United States Patent Application Publication US 2005/0244851 A1 - sequence listing, part 122

SEQ ID NO: 4760245 - DNA, 25 bp, Homo sapien
cagtttagatttggcgcgttgcaaa

SEQ ID NO: 4760246 - DNA, 25 bp, Homo sapien
tagatttggcgcgttgcaaaaattc

SEQ ID NO: 4760247 - DNA, 25 bp, Homo sapien
gatttggcgcgttgcaaaaattctt

SEQ ID NO: 4760248 - DNA, 25 bp, Homo sapien
tttagatttggcgcgttgcaaaaat

SEQ ID NO: 4760249 - DNA, 25 bp, Homo sapien
cgcagcgaccgactgctccctcctg

SEQ ID NO: 4760250 - DNA, 25 bp, Homo sapien
ctcggaggggcgcagtggaaaatct

SEQ ID NO: 4760251 - DNA, 25 bp, Homo sapien
aatctcggcccaaggaagacgagcg

SEQ ID NO: 4760252 - DNA, 25 bp, Homo sapien
ctgcggcggaggctgtgcttgcgcc

SEQ ID NO: 4760253 - DNA, 25 bp, Homo sapien
gactctcacaggagcactgtagctc

SEQ ID NO: 4760254 - DNA, 25 bp, Homo sapien
tcctctgtagactctcacaggagca

SEQ ID NO: 4760255 - DNA, 25 bp, Homo sapien
tctgtagactctcacaggagcactg

SEQ ID NO: 4760256 - DNA, 25 bp, Homo sapien
cccatggggcactagatctttcctc

SEQ ID NO: 4760257 - DNA, 25 bp, Homo sapien
ttaaaaggagtccatatagccattg

SEQ ID NO: 4760258 - DNA, 25 bp, Homo sapien
ggagtccatatagccattgtcttct

SEQ ID NO: 4760259 - DNA, 25 bp, Homo sapien
taaaaggagtccatatagccattgt

SEQ ID NO: 4760260 - DNA, 25 bp, Homo sapien
aaaggagtccatatagccattgtct

SEQ ID NO: 4760261 - DNA, 25 bp, Homo sapien
aggcttcaggtgtgataccccaaaa

SEQ ID NO: 4760262 - DNA, 25 bp, Homo sapien
ctgtggtctcgcagaggcttcaggt

SEQ ID NO: 4760263 - DNA, 25 bp, Homo sapien
aacagcagaagtaggaaggcgtctc

SEQ ID NO: 4760264 - DNA, 25 bp, Homo sapien
cagaagtaggaaggcgtctctgacc

SEQ ID NO: 4760265 - DNA, 25 bp, Homo sapien
tcagggcttcccatgctacagtgga

SEQ ID NO: 4760266 - DNA, 25 bp, Homo sapien
ggcttcccatgctacagtggattga

SEQ ID NO: 4760267 - DNA, 25 bp, Homo sapien
tacagtggattgaacagtgcccctg

SEQ ID NO: 4760268 - DNA, 25 bp, Homo sapien
catgctacagtggattgaacagtgc

SEQ ID NO: 4760269 - DNA, 25 bp, Homo sapien
tgtgaacgatgctccaatcctgttc

SEQ ID NO: 4760270 - DNA, 25 bp, Homo sapien
tgctgagctataccagctcctagtt

SEQ ID NO: 4760271 - DNA, 25 bp, Homo sapien
cctgctgagctataccagctcctag

SEQ ID NO: 4760272 - DNA, 25 bp, Homo sapien
gctgagctataccagctcctagttc

SEQ ID NO: 4760273 - DNA, 25 bp, Homo sapien
gaagaaacttttgctcgaataaata

SEQ ID NO: 4760274 - DNA, 25 bp, Homo sapien
gacacaacaagcgtggcaggaagcg

SEQ ID NO: 4760275 - DNA, 25 bp, Homo sapien
aggagccaccaagacacaacaagcg

SEQ ID NO: 4760276 - DNA, 25 bp, Homo sapien
tggcaggaagcggaagctcaggacc

SEQ ID NO: 4760277 - DNA, 25 bp, Homo sapien
tctcaattaccactgtctcttcaaa

SEQ ID NO: 4760278 - DNA, 25 bp, Homo sapien
ggtttgacatatcccaggaatttgg

SEQ ID NO: 4760279 - DNA, 25 bp, Homo sapien
ccatgatgtgggttgaggtttgaca

SEQ ID NO: 4760280 - DNA, 25 bp, Homo sapien
cttcaaataggaaagcgaggttctc

SEQ ID NO: 4760281 - DNA, 25 bp, Homo sapien
tattaatgtaaaaggacagcagtcc

SEQ ID NO: 4760282 - DNA, 25 bp, Homo sapien
tgattttttatcgatgaagtctggg

SEQ ID NO: 4760283 - DNA, 25 bp, Homo sapien
tgcttctcacctcttgacttagtat

SEQ ID NO: 4760284 - DNA, 25 bp, Homo sapien
gaatggtaggtgtcgttccccagga

SEQ ID NO: 4760285 - DNA, 25 bp, Homo sapien
tgcattcacagagtcctctttgcat

SEQ ID NO: 4760286 - DNA, 25 bp, Homo sapien
ttcagagaactgtgttttaacagtt

SEQ ID NO: 4760287 - DNA, 25 bp, Homo sapien
agaactgtgttttaacagtttcatt

SEQ ID NO: 4760288 - DNA, 25 bp, Homo sapien
atttgaattctgcattcacagagtc

SEQ ID NO: 4760289 - DNA, 25 bp, Homo sapien
tccccagtttgtcccactctaagca

SEQ ID NO: 4760290 - DNA, 25 bp, Homo sapien
gactgaggttcaggtctcccccagc

SEQ ID NO: 4760291 - DNA, 25 bp, Homo sapien
ccccagtttgtcccactctaagcat

SEQ ID NO: 4760292 - DNA, 25 bp, Homo sapien
atccccagtttgtcccactctaagc

SEQ ID NO: 4760293 - DNA, 25 bp, Homo sapien
cagatgtacgatgggcctcaggaga

SEQ ID NO: 4760294 - DNA, 25 bp, Homo sapien
ccccaaaacagtatgtgtgtcagat

SEQ ID NO: 4760295 - DNA, 25 bp, Homo sapien
agtccaccacgggaacatgctgagc

SEQ ID NO: 4760296 - DNA, 25 bp, Homo sapien
tgagctctggaacgaggtggtgcct

SEQ ID NO: 4760297 - DNA, 25 bp, Homo sapien
taacagtggttaagacaagagagat

SEQ ID NO: 4760298 - DNA, 25 bp, Homo sapien
catgtgcttccctgtcaattcaggc

SEQ ID NO: 4760299 - DNA, 25 bp, Homo sapien
ggctagaatagcaattccaggttca

SEQ ID NO: 4760300 - DNA, 25 bp, Homo sapien
cttctcacagagataggcagtctgg

SEQ ID NO: 4760301 - DNA, 25 bp, Homo sapien
tttgccaatcagttgcacctgagaa

SEQ ID NO: 4760302 - DNA, 25 bp, Homo sapien
aatttttgccaatcagttgcacctg

SEQ ID NO: 4760303 - DNA, 25 bp, Homo sapien
tgccaatcagttgcacctgagaaca

SEQ ID NO: 4760304 - DNA, 25 bp, Homo sapien
tttttgccaatcagttgcacctgag

SEQ ID NO: 4760305 - DNA, 25 bp, Homo sapien
tctccagtatccaatacaacagttg

SEQ ID NO: 4760306 - DNA, 25 bp, Homo sapien
tccaatacaacagttgcaacagtgt

SEQ ID NO: 4760307 - DNA, 25 bp, Homo sapien
tttacaatcttcaaggcagccagtg

SEQ ID NO: 4760308 - DNA, 25 bp, Homo sapien
ttacaagggtgcaataagttctctc

SEQ ID NO: 4760309 - DNA, 25 bp, Homo sapien
gacagttgtatcctccagtgccagc

SEQ ID NO: 4760310 - DNA, 25 bp, Homo sapien
tgacagttgtatcctccagtgccag

SEQ ID NO: 4760311 - DNA, 25 bp, Homo sapien
gcccctgagaagctccgaggaagag

SEQ ID NO: 4760312 - DNA, 25 bp, Homo sapien
gcagtatttagtttctcgtaactgt

SEQ ID NO: 4760313 - DNA, 25 bp, Homo sapien
tgtgcggagaaaacccgcaccgaag

SEQ ID NO: 4760314 - DNA, 25 bp, Homo sapien
ccacctccatcgctgtgcggagaaa

SEQ ID NO: 4760315 - DNA, 25 bp, Homo sapien
acccgcaccgaaggcggcttcctct

SEQ ID NO: 4760316 - DNA, 25 bp, Homo sapien
catcgctgtgcggagaaaacccgca

SEQ ID NO: 4760317 - DNA, 25 bp, Homo sapien
ctaaggcggcgaccaggggagacag

SEQ ID NO: 4760318 - DNA, 25 bp, Homo sapien
cggcgaccaggggagacagcgcccc

SEQ ID NO: 4760319 - DNA, 25 bp, Homo sapien
aggcggcgaccaggggagacagcgc

SEQ ID NO: 4760320 - DNA, 25 bp, Homo sapien
taaggcggcgaccaggggagacagc

SEQ ID NO: 4760321 - DNA, 25 bp, Homo sapien
ggtctgtttcgccttggtgcacgca

SEQ ID NO: 4760322 - DNA, 25 bp, Homo sapien
catttgtgattactaatgtctgagt

SEQ ID NO: 4760323 - DNA, 25 bp, Homo sapien
ttccatcagagcagtcctaattgat

SEQ ID NO: 4760324 - DNA, 25 bp, Homo sapien
tctgagtactttgtcattgccaggc

SEQ ID NO: 4760325 - DNA, 25 bp, Homo sapien
gagaggatgtacaatggatagcctc

SEQ ID NO: 4760326 - DNA, 25 bp, Homo sapien
tcttggtgcctctaagaaggccctt

SEQ ID NO: 4760327 - DNA, 25 bp, Homo sapien
tcaatatgcccagaaggtgtacttt

SEQ ID NO: 4760328 - DNA, 25 bp, Homo sapien
tctttgctctgatggatcaacaaca

SEQ ID NO: 4760329 - DNA, 25 bp, Homo sapien
atctggacccacctctttaatattc

SEQ ID NO: 4760330 - DNA, 25 bp, Homo sapien
cccaaaggtgcggtatgtgatgtca

SEQ ID NO: 4760331 - DNA, 25 bp, Homo sapien
tatgtggaacgaagagatcatctgg

SEQ ID NO: 4760332 - DNA, 25 bp, Homo sapien
gatgtcagggacgttataaatcgcc

SEQ ID NO: 4760333 - DNA, 25 bp, Homo sapien
gttggcgcgcaataaaactgagatg

SEQ ID NO: 4760334 - DNA, 25 bp, Homo sapien
ccaggaaagtgtggtggagcctcca

SEQ ID NO: 4760335 - DNA, 25 bp, Homo sapien
tggtgcctcacatgcagttggcgcg

SEQ ID NO: 4760336 - DNA, 25 bp, Homo sapien
tctataccgcgatggtggagctcgg

SEQ ID NO: 4760337 - DNA, 25 bp, Homo sapien
gagagcgcccgaaacgaggtggaaa

SEQ ID NO: 4760338 - DNA, 25 bp, Homo sapien
gggcgaggcacggcgccttcttgcc

SEQ ID NO: 4760339 - DNA, 25 bp, Homo sapien
ctgccgagcgagtggtgaacgcgat

SEQ ID NO: 4760340 - DNA, 25 bp, Homo sapien
tgaacgcgatgggtggagagcgccc

SEQ ID NO: 4760341 - DNA, 25 bp, Homo sapien
tgcttcatcaagattccgcggaggc

SEQ ID NO: 4760342 - DNA, 25 bp, Homo sapien
gacaccaggcaattcggagaaggca

SEQ ID NO: 4760343 - DNA, 25 bp, Homo sapien
gaaaaggagaactccagcgcggtct

SEQ ID NO: 4760344 - DNA, 25 bp, Homo sapien
gacagcaggcgcaaactcagattta

SEQ ID NO: 4760345 - DNA, 25 bp, Homo sapien
cgcttcaaggtgctgcgcgccgacc

SEQ ID NO: 4760346 - DNA, 25 bp, Homo sapien
gcgcttcaaggtgctgcgcgccgac

SEQ ID NO: 4760347 - DNA, 25 bp, Homo sapien
cttcaaggtgctgcgcgccgaccat

SEQ ID NO: 4760348 - DNA, 25 bp, Homo sapien
gcttcaaggtgctgcgcgccgacca

SEQ ID NO: 4760349 - DNA, 25 bp, Homo sapien
ctacctcggccgaaagcaagggcgg

SEQ ID NO: 4760350 - DNA, 25 bp, Homo sapien
ccttgcactcggtgctagtgcactc

SEQ ID NO: 4760351 - DNA, 25 bp, Homo sapien
caagggcggctccttgcactcggtg

SEQ ID NO: 4760352 - DNA, 25 bp, Homo sapien
gcgccatccaccgtgtgctccgcgg

SEQ ID NO: 4760353 - DNA, 25 bp, Homo sapien
ggaaaaactcggcacatcactcgac

SEQ ID NO: 4760354 - DNA, 25 bp, Homo sapien
aagggagacaatacaggcgactttc

SEQ ID NO: 4760355 - DNA, 25 bp, Homo sapien
tatcagtcggatgagagcccaagaa

SEQ ID NO: 4760356 - DNA, 25 bp, Homo sapien
gcttgcagaaacgttccatggctgt

SEQ ID NO: 4760357 - DNA, 25 bp, Homo sapien
tcttcagtttcaattcgtgaatggg

SEQ ID NO: 4760358 - DNA, 25 bp, Homo sapien
gaaacttgccttgtcgctcttgccc

SEQ ID NO: 4760359 - DNA, 25 bp, Homo sapien
tctttcaggcgaattaattcttcag

SEQ ID NO: 4760360 - DNA, 25 bp, Homo sapien
tgtattccgtgtgctgtttgagcgc

SEQ ID NO: 4760361 - DNA, 25 bp, Homo sapien
aatatgtccgtttcctaattgaact

SEQ ID NO: 4760362 - DNA, 25 bp, Homo sapien
cgcaacagtgcgtttttcctgtcac

SEQ ID NO: 4760363 - DNA, 25 bp, Homo sapien
ttgaacttaagtccaccaccatggt

SEQ ID NO: 4760364 - DNA, 25 bp, Homo sapien
gaattagcaaaaacccgcaacagtg

SEQ ID NO: 4760365 - DNA, 25 bp, Homo sapien
tgaggtcctcgactaccatctaagg

SEQ ID NO: 4760366 - DNA, 25 bp, Homo sapien
cattttgaggtcctcgactaccatc

SEQ ID NO: 4760367 - DNA, 25 bp, Homo sapien
tcgactaccatctaaggccaggaac

SEQ ID NO: 4760368 - DNA, 25 bp, Homo sapien
accatctaaggccaggaactcggtg

SEQ ID NO: 4760369 - DNA, 25 bp, Homo sapien
ctggacggaggcagccgggttggcg

SEQ ID NO: 4760370 - DNA, 25 bp, Homo sapien
aggcagccgggttggcgccgggaca

SEQ ID NO: 4760371 - DNA, 25 bp, Homo sapien
ggttggcgccgggacactgccgctg

SEQ ID NO: 4760372 - DNA, 25 bp, Homo sapien
gttggcgccgggacactgccgctgc

SEQ ID NO: 4760373 - DNA, 25 bp, Homo sapien
ccagtgtgctttttaggggtgccct

SEQ ID NO: 4760374 - DNA, 25 bp, Homo sapien
agtgtgctttttaggggtgccctcg

SEQ ID NO: 4760375 - DNA, 25 bp, Homo sapien
ggcccagtgtgctttttaggggtgc

SEQ ID NO: 4760376 - DNA, 25 bp, Homo sapien
gcccagtgtgctttttaggggtgcc

SEQ ID NO: 4760377 - DNA, 25 bp, Homo sapien
caagctttgctcataagtcactgac

SEQ ID NO: 4760378 - DNA, 25 bp, Homo sapien
tttgctcataagtcactgacctcat

SEQ ID NO: 4760379 - DNA, 25 bp, Homo sapien
agacatccaagctttgctcataagt

SEQ ID NO: 4760380 - DNA, 25 bp, Homo sapien
catccaagctttgctcataagtcac

SEQ ID NO: 4760381 - DNA, 25 bp, Homo sapien
ttcttgtccgactctatttgtatct

SEQ ID NO: 4760382 - DNA, 25 bp, Homo sapien
tgattcctccagagttaggtaaagt

SEQ ID NO: 4760383 - DNA, 25 bp, Homo sapien
cctttgtaggtctcctcaaagctga

SEQ ID NO: 4760384 - DNA, 25 bp, Homo sapien
ccagagttaggtaaagtctttcttg

SEQ ID NO: 4760385 - DNA, 25 bp, Homo sapien
tttgctactagaactgagccccatg

SEQ ID NO: 4760386 - DNA, 25 bp, Homo sapien
tcaccttgccgcctattgcagagac

SEQ ID NO: 4760387 - DNA, 25 bp, Homo sapien
tagtctttcagttgatctcctcacc

SEQ ID NO: 4760388 - DNA, 25 bp, Homo sapien
gcagagactgatagttatacccaag

SEQ ID NO: 4760389 - DNA, 25 bp, Homo sapien
ttgataatattaagggctgcttcac

SEQ ID NO: 4760390 - DNA, 25 bp, Homo sapien
cattatttattggatcacagcacag

SEQ ID NO: 4760391 - DNA, 25 bp, Homo sapien
ggaatgattgcagccaacagagagg

SEQ ID NO: 4760392 - DNA, 25 bp, Homo sapien
ggtgataaatacgtcctctgggaat

SEQ ID NO: 4760393 - DNA, 25 bp, Homo sapien
aaaaatgcccgtctgttctgtatcc

SEQ ID NO: 4760394 - DNA, 25 bp, Homo sapien
aacttcatcgttataggctatccat

SEQ ID NO: 4760395 - DNA, 25 bp, Homo sapien
cacaggcttgttctggtacaccagc

SEQ ID NO: 4760396 - DNA, 25 bp, Homo sapien
ggacctgtggtgctctaaaaatgcc

SEQ ID NO: 4760397 - DNA, 25 bp, Homo sapien
tctctgcgtataatggagaacctga

SEQ ID NO: 4760398 - DNA, 25 bp, Homo sapien
gactacctgctaattgcttcaagaa

SEQ ID NO: 4760399 - DNA, 25 bp, Homo sapien
tgatttgcatacacttcgctcttgc

SEQ ID NO: 4760400 - DNA, 25 bp, Homo sapien
agtgatttggaagacctcaggagag

SEQ ID NO: 4760401 - DNA, 25 bp, Homo sapien
gtggagtgttcctcatcaacaccag

SEQ ID NO: 4760402 - DNA, 25 bp, Homo sapien
gggaccagagagcttcttcccttaa

SEQ ID NO: 4760403 - DNA, 25 bp, Homo sapien
aacgcctcgatgatgttgcatgtgg

SEQ ID NO: 4760404 - DNA, 25 bp, Homo sapien
gaccagagagcttcttcccttaaag

SEQ ID NO: 4760405 - DNA, 25 bp, Homo sapien
gccatctgctggcctaaacggaaag

SEQ ID NO: 4760406 - DNA, 25 bp, Homo sapien
tgccatctgctggcctaaacggaaa

SEQ ID NO: 4760407 - DNA, 25 bp, Homo sapien
gcattccttgcagtggctctcagct

SEQ ID NO: 4760408 - DNA, 25 bp, Homo sapien
gatgactggcacagagctgccctgg

SEQ ID NO: 4760409 - DNA, 25 bp, Homo sapien
ctggcattccttgcagtggctctca

SEQ ID NO: 4760410 - DNA, 25 bp, Homo sapien
gtgatgactggcacagagctgccct

SEQ ID NO: 4760411 - DNA, 25 bp, Homo sapien
ttgggattacttctaagtaagacca

SEQ ID NO: 4760412 - DNA, 25 bp, Homo sapien
gagaaaacgctcaatgtacactttt

SEQ ID NO: 4760413 - DNA, 25 bp, Homo sapien
taattacagttctctaaacctcaca

SEQ ID NO: 4760414 - DNA, 25 bp, Homo sapien
ttaacgtgtaaagagaaaacgctca

SEQ ID NO: 4760415 - DNA, 25 bp, Homo sapien
tgtaattgtaatttattttaggtca

SEQ ID NO: 4760416 - DNA, 25 bp, Homo sapien
attgtaatttattttaggtcagtgg

SEQ ID NO: 4760417 - DNA, 25 bp, Homo sapien
aattgtaatttattttaggtcagtg

SEQ ID NO: 4760418 - DNA, 25 bp, Homo sapien
gctgactccaactcttatctgcagg

SEQ ID NO: 4760419 - DNA, 25 bp, Homo sapien
agcagtttccagaccggctgactcc

SEQ ID NO: 4760420 - DNA, 25 bp, Homo sapien
gcataggggtcaagggtccagcact

SEQ ID NO: 4760421 - DNA, 25 bp, Homo sapien
cttatctgcagggaagcgtgttact

SEQ ID NO: 4760422 - DNA, 25 bp, Homo sapien
ctttggaatgaaagacagctccgta

SEQ ID NO: 4760423 - DNA, 25 bp, Homo sapien
acagctccgtataaatgacttgacc

SEQ ID NO: 4760424 - DNA, 25 bp, Homo sapien
tggaatgaaagacagctccgtataa

SEQ ID NO: 4760425 - DNA, 25 bp, Homo sapien
tgaaagacagctccgtataaatgac

SEQ ID NO: 4760426 - DNA, 25 bp, Homo sapien
ctgaagccgccccggagccggtgaa

SEQ ID NO: 4760427 - DNA, 25 bp, Homo sapien
ctcgctagggctgcgcgttgggcca

SEQ ID NO: 4760428 - DNA, 25 bp, Homo sapien
gaccgcctccgtctctcgctgggct

SEQ ID NO: 4760429 - DNA, 25 bp, Homo sapien
ttgcgcacgcgtcgtgagagcgacc

SEQ ID NO: 4760430 - DNA, 25 bp, Homo sapien
catgagtgcgggatgaaaaggtcta

SEQ ID NO: 4760431 - DNA, 25 bp, Homo sapien
catctggaaaggtaaggaggccgcc

SEQ ID NO: 4760432 - DNA, 25 bp, Homo sapien
tctatattttccgagcggagcggac

SEQ ID NO: 4760433 - DNA, 25 bp, Homo sapien
gcccgcctgtgggtcaagttacgta

SEQ ID NO: 4760434 - DNA, 25 bp, Homo sapien
tcgccatagtggccaggttggtcta

SEQ ID NO: 4760435 - DNA, 25 bp, Homo sapien
gccatagtggccaggttggtctaaa

SEQ ID NO: 4760436 - DNA, 25 bp, Homo sapien
tttcgccatagtggccaggttggtc

SEQ ID NO: 4760437 - DNA, 25 bp, Homo sapien
gcctccacctctctggttcaaacga

SEQ ID NO: 4760438 - DNA, 25 bp, Homo sapien
caattgtcgagagctcagctgagga

SEQ ID NO: 4760439 - DNA, 25 bp, Homo sapien
taggataagggacattgagagttca

SEQ ID NO: 4760440 - DNA, 25 bp, Homo sapien
gaacagtgccttcgaggaaatgaga

SEQ ID NO: 4760441 - DNA, 25 bp, Homo sapien
gctgccaggtgtcggaatagctgat

SEQ ID NO: 4760442 - DNA, 25 bp, Homo sapien
gctggtcaaagttgcctattagaga

SEQ ID NO: 4760443 - DNA, 25 bp, Homo sapien
ccaactagtggaattgtcttaggtc

SEQ ID NO: 4760444 - DNA, 25 bp, Homo sapien
cctttctatctagaaggtagcacat

SEQ ID NO: 4760445 - DNA, 25 bp, Homo sapien
ccataattacagtctgagtcatagc

SEQ ID NO: 4760446 - DNA, 25 bp, Homo sapien
tagggagggcatccaacatattata

SEQ ID NO: 4760447 - DNA, 25 bp, Homo sapien
gaaaattcaattctacagggagtgg

SEQ ID NO: 4760448 - DNA, 25 bp, Homo sapien
tatcttacatccaaagtagggaggg

SEQ ID NO: 4760449 - DNA, 25 bp, Homo sapien
gcccatatgtccatttatagggagg

SEQ ID NO: 4760450 - DNA, 25 bp, Homo sapien
tggcctctcatggaagagtagatag

SEQ ID NO: 4760451 - DNA, 25 bp, Homo sapien
cctctcatggaagagtagatagtaa

SEQ ID NO: 4760452 - DNA, 25 bp, Homo sapien
gtcatggcctctcatggaagagtag

SEQ ID NO: 4760453 - DNA, 25 bp, Homo sapien
acagtcatggcctctcatggaagag

SEQ ID NO: 4760454 - DNA, 25 bp, Homo sapien
tctctgaaagatccattagtaaatc

SEQ ID NO: 4760455 - DNA, 25 bp, Homo sapien
tggaaacttctatcgtaaacataac

SEQ ID NO: 4760456 - DNA, 25 bp, Homo sapien
tgtttaatccctatgactgctgtgc

SEQ ID NO: 4760457 - DNA, 25 bp, Homo sapien
tgattcagcacatgatttctgagtc

SEQ ID NO: 4760458 - DNA, 25 bp, Homo sapien
actgtatcctcaaactatggactga

SEQ ID NO: 4760459 - DNA, 25 bp, Homo sapien
gacgtgatccattgctctcggcttt

SEQ ID NO: 4760460 - DNA, 25 bp, Homo sapien
ggatttcagacgtgatccattgctc

SEQ ID NO: 4760461 - DNA, 25 bp, Homo sapien
cctcaaactatggactgaagtagtc

SEQ ID NO: 4760462 - DNA, 25 bp, Homo sapien
tcttttcagcaccacactgcactta

SEQ ID NO: 4760463 - DNA, 25 bp, Homo sapien
tttcagcaccacactgcacttattc

SEQ ID NO: 4760464 - DNA, 25 bp, Homo sapien
attcttttcagcaccacactgcact

SEQ ID NO: 4760465 - DNA, 25 bp, Homo sapien
ttttcagcaccacactgcacttatt

SEQ ID NO: 4760466 - DNA, 25 bp, Homo sapien
acctgtcccgttgccaatagattga

SEQ ID NO: 4760467 - DNA, 25 bp, Homo sapien
tataacatagattgaagcctcccct

SEQ ID NO: 4760468 - DNA, 25 bp, Homo sapien
gatagtgtattatgcttccaacaga

SEQ ID NO: 4760469 - DNA, 25 bp, Homo sapien
ctgtttcagaactttagggcctttg

SEQ ID NO: 4760470 - DNA, 25 bp, Homo sapien
tccttgtaacaagaaaccctgtgag

SEQ ID NO: 4760471 - DNA, 25 bp, Homo sapien
agtttaacacctgctatgatgatag

SEQ ID NO: 4760472 - DNA, 25 bp, Homo sapien
gatgcagaatcctactctattacaa

SEQ ID NO: 4760473 - DNA, 25 bp, Homo sapien
caacatttcctgttatgccgtcata

SEQ ID NO: 4760474 - DNA, 25 bp, Homo sapien
tactgagggaactgcagcatgacac

SEQ ID NO: 4760475 - DNA, 25 bp, Homo sapien
catcttggcctttagtgtggagcac

SEQ ID NO: 4760476 - DNA, 25 bp, Homo sapien
aacatatgtagccaaccgaggtgca

SEQ ID NO: 4760477 - DNA, 25 bp, Homo sapien
tgacacgatgatgcgcagacttgcc

SEQ ID NO: 4760478 - DNA, 25 bp, Homo sapien
tttgaaggcatgatctataaactaa

SEQ ID NO: 4760479 - DNA, 25 bp, Homo sapien
aattaactctagaggtttgaaggca

SEQ ID NO: 4760480 - DNA, 25 bp, Homo sapien
aaagtcacccaaattaactctagag

SEQ ID NO: 4760481 - DNA, 25 bp, Homo sapien
aaagcttcaaacccattaacattct

SEQ ID NO: 4760482 - DNA, 25 bp, Homo sapien
tgacatccttagttcctggcatggg

SEQ ID NO: 4760483 - DNA, 25 bp, Homo sapien
atctctgtccccacgatctacatga

SEQ ID NO: 4760484 - DNA, 25 bp, Homo sapien
ctctggtgatgtcagaagcacttgc

SEQ ID NO: 4760485 - DNA, 25 bp, Homo sapien
taaacacaatttgggatgtaaggac

SEQ ID NO: 4760486 - DNA, 25 bp, Homo sapien
tatctgtagcacatgtgaagtgaga

SEQ ID NO: 4760487 - DNA, 25 bp, Homo sapien
tagaattgtgtctttgacagcagca

SEQ ID NO: 4760488 - DNA, 25 bp, Homo sapien
gaattcccttaggtttagctgtaga

SEQ ID NO: 4760489 - DNA, 25 bp, Homo sapien
gataaagtctctggcagctctgaca

SEQ ID NO: 4760490 - DNA, 25 bp, Homo sapien
aattagatgagagtacatgattttc

SEQ ID NO: 4760491 - DNA, 25 bp, Homo sapien
aatcacagacgaattcagaaaccag

SEQ ID NO: 4760492 - DNA, 25 bp, Homo sapien
gatccttcttgttcaagaataaaat

SEQ ID NO: 4760493 - DNA, 25 bp, Homo sapien
aaaatcacagacgaattcagaaacc

SEQ ID NO: 4760494 - DNA, 25 bp, Homo sapien
gttggactcaggcaccaggtttttg

SEQ ID NO: 4760495 - DNA, 25 bp, Homo sapien
ggttccaggcccgtgattctcagcc

SEQ ID NO: 4760496 - DNA, 25 bp, Homo sapien
tagcagcacagtggattcacctggg

SEQ ID NO: 4760497 - DNA, 25 bp, Homo sapien
ttttgaataggttccgaccttagca

SEQ ID NO: 4760498 - DNA, 25 bp, Homo sapien
aagaaaataatggaggtgacactct

SEQ ID NO: 4760499 - DNA, 25 bp, Homo sapien
gacctggtcatattcactcagagca

SEQ ID NO: 4760500 - DNA, 25 bp, Homo sapien
tcgttgtcacactcagccaggacct

SEQ ID NO: 4760501 - DNA, 25 bp, Homo sapien
cgtctttccgatcgttggccaccaa

SEQ ID NO: 4760502 - DNA, 25 bp, Homo sapien
gatccttcaaaggttggaatacatg

SEQ ID NO: 4760503 - DNA, 25 bp, Homo sapien
acacagatccttcaaaggttggaat

SEQ ID NO: 4760504 - DNA, 25 bp, Homo sapien
ccttcaaaggttggaatacatgaca

SEQ ID NO: 4760505 - DNA, 25 bp, Homo sapien
cagatccttcaaaggttggaataca

SEQ ID NO: 4760506 - DNA, 25 bp, Homo sapien
attgtggttaggtggtccacaggcc

SEQ ID NO: 4760507 - DNA, 25 bp, Homo sapien
tcattgtggttaggtggtccacagg

SEQ ID NO: 4760508 - DNA, 25 bp, Homo sapien
cctgaaggcactgggtcattgtggt

SEQ ID NO: 4760509 - DNA, 25 bp, Homo sapien
acaggccaaccacccagaactgttg

SEQ ID NO: 4760510 - DNA, 25 bp, Homo sapien
ctgagggcttcccaaacacagcaat

SEQ ID NO: 4760511 - DNA, 25 bp, Homo sapien
tgagggcttcccaaacacagcaatt

SEQ ID NO: 4760512 - DNA, 25 bp, Homo sapien
cgaatgatggtgtggcgatgcggtc

SEQ ID NO: 4760513 - DNA, 25 bp, Homo sapien
gtgggcactcggacgcgaagcacat

SEQ ID NO: 4760514 - DNA, 25 bp, Homo sapien
agcacatcttgttgggtaggcacga

SEQ ID NO: 4760515 - DNA, 25 bp, Homo sapien
tcggacgcgaagcacatcttgttgg

SEQ ID NO: 4760516 - DNA, 25 bp, Homo sapien
tatattagagaacgaggaactgact

SEQ ID NO: 4760517 - DNA, 25 bp, Homo sapien
atattagagaacgaggaactgactc

SEQ ID NO: 4760518 - DNA, 25 bp, Homo sapien
ctgtatattagagaacgaggaactg

SEQ ID NO: 4760519 - DNA, 25 bp, Homo sapien
gtatattagagaacgaggaactgac

SEQ ID NO: 4760520 - DNA, 25 bp, Homo sapien
aaatgtccatcctactcaaaggaag

SEQ ID NO: 4760521 - DNA, 25 bp, Homo sapien
gcagggggaaatgtccatcctactc

SEQ ID NO: 4760522 - DNA, 25 bp, Homo sapien
tccatcctactcaaaggaagtcacc

SEQ ID NO: 4760523 - DNA, 25 bp, Homo sapien
gggaaatgtccatcctactcaaagg

SEQ ID NO: 4760524 - DNA, 25 bp, Homo sapien
ccacacagacacacgaattccatca

SEQ ID NO: 4760525 - DNA, 25 bp, Homo sapien
acagacacacgaattccatcaatga

SEQ ID NO: 4760526 - DNA, 25 bp, Homo sapien
cccacacagacacacgaattccatc

SEQ ID NO: 4760527 - DNA, 25 bp, Homo sapien
acacagacacacgaattccatcaat

SEQ ID NO: 4760528 - DNA, 25 bp, Homo sapien
gtcagaaggacttccatgcgccttc

SEQ ID NO: 4760529 - DNA, 25 bp, Homo sapien
cagaaggacttccatgcgccttctg

SEQ ID NO: 4760530 - DNA, 25 bp, Homo sapien
tgggtcagaaggacttccatgcgcc

SEQ ID NO: 4760531 - DNA, 25 bp, Homo sapien
ggtcagaaggacttccatgcgcctt

SEQ ID NO: 4760532 - DNA, 25 bp, Homo sapien
ggttgaaaaccgctggcccagatgg

SEQ ID NO: 4760533 - DNA, 25 bp, Homo sapien
atcagcagacatctctagctgaggg

SEQ ID NO: 4760534 - DNA, 25 bp, Homo sapien
agcactcatcacattgtccaatcag

SEQ ID NO: 4760535 - DNA, 25 bp, Homo sapien
tggcgcatcacaagcactcatcaca

SEQ ID NO: 4760536 - DNA, 25 bp, Homo sapien
cctcgagctgtcaaaggcaagccct

SEQ ID NO: 4760537 - DNA, 25 bp, Homo sapien
tcaggtatggctcaggaacgtcgta

SEQ ID NO: 4760538 - DNA, 25 bp, Homo sapien
tagcaggtctggtggatcttttcca

SEQ ID NO: 4760539 - DNA, 25 bp, Homo sapien
ttcacagaggcaggtaactcaggcc

SEQ ID NO: 4760540 - DNA, 25 bp, Homo sapien
ggccccgctgctctaaacttgactt

SEQ ID NO: 4760541 - DNA, 25 bp, Homo sapien
cctatctgtgccactagaggacagc

SEQ ID NO: 4760542 - DNA, 25 bp, Homo sapien
gattttagcgcaattggacctgctg

SEQ ID NO: 4760543 - DNA, 25 bp, Homo sapien
aatacagtgtgtaggccttcgcagg

SEQ ID NO: 4760544 - DNA, 25 bp, Homo sapien
tgtcgtaacactcctggatgcctgg

SEQ ID NO: 4760545 - DNA, 25 bp, Homo sapien
ggagagcatggagaccttgtccact

SEQ ID NO: 4760546 - DNA, 25 bp, Homo sapien
cctggatgcctggatcttgccagag

SEQ ID NO: 4760547 - DNA, 25 bp, Homo sapien
ctggtactccctcctcctgtcgtaa

SEQ ID NO: 4760548 - DNA, 25 bp, Homo sapien
gggccgctcacagccaagacaccca

SEQ ID NO: 4760549 - DNA, 25 bp, Homo sapien
acagccaagacacccactgcagcca

SEQ ID NO: 4760550 - DNA, 25 bp, Homo sapien
tcacagccaagacacccactgcagc

SEQ ID NO: 4760551 - DNA, 25 bp, Homo sapien
gctcacagccaagacacccactgca

SEQ ID NO: 4760552 - DNA, 25 bp, Homo sapien
tgtgcgttgttcatccttataatta

SEQ ID NO: 4760553 - DNA, 25 bp, Homo sapien
cacttttattgtgcgttgttcatcc

SEQ ID NO: 4760554 - DNA, 25 bp, Homo sapien
aaagtcacttttattgtgcgttgtt

SEQ ID NO: 4760555 - DNA, 25 bp, Homo sapien
cagagaaaaggaggatcttacacat

SEQ ID NO: 4760556 - DNA, 25 bp, Homo sapien
gatggagaacctggacagtgtttat

SEQ ID NO: 4760557 - DNA, 25 bp, Homo sapien
tcacggaccctattcttggctggcg

SEQ ID NO: 4760558 - DNA, 25 bp, Homo sapien
ttcttggctggcgagaatgatggat

SEQ ID NO: 4760559 - DNA, 25 bp, Homo sapien
cactggcatgctgcatgtcacggac

SEQ ID NO: 4760560 - DNA, 25 bp, Homo sapien
tcttcagaatctgcggagcctgctg

SEQ ID NO: 4760561 - DNA, 25 bp, Homo sapien
tgtgcctatcttcagaatctgcgga

SEQ ID NO: 4760562 - DNA, 25 bp, Homo sapien
tatctcttttgtctgtgcctatctt

SEQ ID NO: 4760563 - DNA, 25 bp, Homo sapien
gctgggaggacgacagggtttactc

SEQ ID NO: 4760564 - DNA, 25 bp, Homo sapien
tttctaatgcgaacagtcagggtca

SEQ ID NO: 4760565 - DNA, 25 bp, Homo sapien
ccaccagtagagcaaaggcctttct

SEQ ID NO: 4760566 - DNA, 25 bp, Homo sapien
gatctcaaagtttctgtaggtcgga

SEQ ID NO: 4760567 - DNA, 25 bp, Homo sapien
caggcaatggtataactgggttctc

SEQ ID NO: 4760568 - DNA, 25 bp, Homo sapien
tcctctagatggcactgtggagcag

SEQ ID NO: 4760569 - DNA, 25 bp, Homo sapien
gaacagggcactccagatttcccaa

SEQ ID NO: 4760570 - DNA, 25 bp, Homo sapien
cttttgtagtgatagcccacaggca

SEQ ID NO: 4760571 - DNA, 25 bp, Homo sapien
cagaggcgactgtcttagggacccg

SEQ ID NO: 4760572 - DNA, 25 bp, Homo sapien
cgcggagggctgcagggggtggcat

SEQ ID NO: 4760573 - DNA, 25 bp, Homo sapien
caggcccccgcggagggctgcaggg

SEQ ID NO: 4760574 - DNA, 25 bp, Homo sapien
cccgcggagggctgcagggggtggc

SEQ ID NO: 4760575 - DNA, 25 bp, Homo sapien
cccccgcggagggctgcagggggtg

SEQ ID NO: 4760576 - DNA, 25 bp, Homo sapien
tttgtcctttccataccttagaaga

SEQ ID NO: 4760577 - DNA, 25 bp, Homo sapien
ggtgctcggagaccatttgtccttt

SEQ ID NO: 4760578 - DNA, 25 bp, Homo sapien
tgcaggtggtatgagtcacaaagcc

SEQ ID NO: 4760579 - DNA, 25 bp, Homo sapien
cttagaagaattctccacccaggac

SEQ ID NO: 4760580 - DNA, 25 bp, Homo sapien
caggacattgacatgagtacagtca

SEQ ID NO: 4760581 - DNA, 25 bp, Homo sapien
tactaccaagctacattacaacatc

SEQ ID NO: 4760582 - DNA, 25 bp, Homo sapien
gggaatgaacttacctaggcaaaga

SEQ ID NO: 4760583 - DNA, 25 bp, Homo sapien
tcatgttgctctacagccataacca

SEQ ID NO: 4760584 - DNA, 25 bp, Homo sapien
ctaatctgtcttccagctcactgat

SEQ ID NO: 4760585 - DNA, 25 bp, Homo sapien
gttgctcagccaatccattgagtat

SEQ ID NO: 4760586 - DNA, 25 bp, Homo sapien
ctgttgctcagccaatccattgagt

SEQ ID NO: 4760587 - DNA, 25 bp, Homo sapien
tcagccaatccattgagtatattgt

SEQ ID NO: 4760588 - DNA, 25 bp, Homo sapien
tacaactaatacctaagtacacaaa

SEQ ID NO: 4760589 - DNA, 25 bp, Homo sapien
gaaatacaactaatacctaagtaca

SEQ ID NO: 4760590 - DNA, 25 bp, Homo sapien
caactaatacctaagtacacaaaga

SEQ ID NO: 4760591 - DNA, 25 bp, Homo sapien
ctaatacctaagtacacaaagaaat

SEQ ID NO: 4760592 - DNA, 25 bp, Homo sapien
gactccaagagtgtcagtcaaaggg

SEQ ID NO: 4760593 - DNA, 25 bp, Homo sapien
ccaagagtgtcagtcaaagggttcc

SEQ ID NO: 4760594 - DNA, 25 bp, Homo sapien
ttagactccaagagtgtcagtcaaa

SEQ ID NO: 4760595 - DNA, 25 bp, Homo sapien
ctccaagagtgtcagtcaaagggtt

SEQ ID NO: 4760596 - DNA, 25 bp, Homo sapien
gcctgtcttctggccccactctctc

SEQ ID NO: 4760597 - DNA, 25 bp, Homo sapien
tacacctttgtggacagtgacaaga

SEQ ID NO: 4760598 - DNA, 25 bp, Homo sapien
agagtaatctctggccaaatatata

SEQ ID NO: 4760599 - DNA, 25 bp, Homo sapien
cagtgacaagagtaatctctggcca

SEQ ID NO: 4760600 - DNA, 25 bp, Homo sapien
tcaagttacacctttgtggacagtg

SEQ ID NO: 4760601 - DNA, 25 bp, Homo sapien
ctcagacgtgtgaacagccagagcc

SEQ ID NO: 4760602 - DNA, 25 bp, Homo sapien
ttggctggactcagacgtgtgaaca

SEQ ID NO: 4760603 - DNA, 25 bp, Homo sapien
taacacagagcccactgttggctgg

SEQ ID NO: 4760604 - DNA, 25 bp, Homo sapien
tgaggatcgtggttgaaaagaacag

SEQ ID NO: 4760605 - DNA, 25 bp, Homo sapien
cactggtctgtcataatggtctccc

SEQ ID NO: 4760606 - DNA, 25 bp, Homo sapien
tgtcataatggtctcccacatgcca

SEQ ID NO: 4760607 - DNA, 25 bp, Homo sapien
tggtctcccacatgccatctttcaa

SEQ ID NO: 4760608 - DNA, 25 bp, Homo sapien
ctgccactggtctgtcataatggtc

SEQ ID NO: 4760609 - DNA, 25 bp, Homo sapien
cactggagactacgtagggtgggag

SEQ ID NO: 4760610 - DNA, 25 bp, Homo sapien
caatttgtttatatcggattagtta

SEQ ID NO: 4760611 - DNA, 25 bp, Homo sapien
ggttacactgaaagcccagaccaga

SEQ ID NO: 4760612 - DNA, 25 bp, Homo sapien
tatcggattagttaatgtattccgt

SEQ ID NO: 4760613 - DNA, 25 bp, Homo sapien
gaaggacttcggatctaacgagcat

SEQ ID NO: 4760614 - DNA, 25 bp, Homo sapien
gcaaattctgaaggacttcggatct

SEQ ID NO: 4760615 - DNA, 25 bp, Homo sapien
tctgtcgcctttttatcgccagaga

SEQ ID NO: 4760616 - DNA, 25 bp, Homo sapien
tcgcctttttatcgccagagaactg

SEQ ID NO: 4760617 - DNA, 25 bp, Homo sapien
gttcctagcatcactgataatgatt

SEQ ID NO: 4760618 - DNA, 25 bp, Homo sapien
gattacagcagttttcacactaaag

SEQ ID NO: 4760619 - DNA, 25 bp, Homo sapien
aagctcctgcctagaattttggtgg

SEQ ID NO: 4760620 - DNA, 25 bp, Homo sapien
tgtgttcccaaaggttcgtgcagaa

SEQ ID NO: 4760621 - DNA, 25 bp, Homo sapien
tcaccagagaaccagcaaccttggg

SEQ ID NO: 4760622 - DNA, 25 bp, Homo sapien
tggttcttgtcatgattgcccttac

SEQ ID NO: 4760623 - DNA, 25 bp, Homo sapien
aaaaatctgttttggttcttgtcat

SEQ ID NO: 4760624 - DNA, 25 bp, Homo sapien
ttttggttcttgtcatgattgccct

SEQ ID NO: 4760625 - DNA, 25 bp, Homo sapien
aaatctgttttggttcttgtcatga

SEQ ID NO: 4760626 - DNA, 25 bp, Homo sapien
gaccccagtgtagtttggcgctcct

SEQ ID NO: 4760627 - DNA, 25 bp, Homo sapien
acatgaccccagtgtagtttggcgc

SEQ ID NO: 4760628 - DNA, 25 bp, Homo sapien
atttaagtcccgtgcaaatacaaca

SEQ ID NO: 4760629 - DNA, 25 bp, Homo sapien
taagtcccgtgcaaatacaacatga

SEQ ID NO: 4760630 - DNA, 25 bp, Homo sapien
tacatgggatggacatgaatcttgg

SEQ ID NO: 4760631 - DNA, 25 bp, Homo sapien
tgggtcttagagttgatgctggaat

SEQ ID NO: 4760632 - DNA, 25 bp, Homo sapien
ggatggagtagatgtatgttgtaca

SEQ ID NO: 4760633 - DNA, 25 bp, Homo sapien
tgatatttggattagaattgggtct

SEQ ID NO: 4760634 - DNA, 25 bp, Homo sapien
tcctgcagaaagaagaccgggggct

SEQ ID NO: 4760635 - DNA, 25 bp, Homo sapien
cgctaccaccatgagagaagtcctg

SEQ ID NO: 4760636 - DNA, 25 bp, Homo sapien
tcacgctaccaccatgagagaagtc

SEQ ID NO: 4760637 - DNA, 25 bp, Homo sapien
tgcagaaagaagaccgggggctaac

SEQ ID NO: 4760638 - DNA, 25 bp, Homo sapien
tatgttttggtaaaccagcttcgtg

SEQ ID NO: 4760639 - DNA, 25 bp, Homo sapien
gaacccctttctgtcttcgtcgctg

SEQ ID NO: 4760640 - DNA, 25 bp, Homo sapien
tatccttagcgtgtccatcgctctg

SEQ ID NO: 4760641 - DNA, 25 bp, Homo sapien
cttgcatggcggtgaatatgttttg

SEQ ID NO: 4760642 - DNA, 25 bp, Homo sapien
cagaagcagcacatcgcctaaatgc

SEQ ID NO: 4760643 - DNA, 25 bp, Homo sapien
tgccaccaacagttagccctgcctg

SEQ ID NO: 4760644 - DNA, 25 bp, Homo sapien
ctgctttaggccctcaaagtgcctt

SEQ ID NO: 4760645 - DNA, 25 bp, Homo sapien
cagacatcacatatcctagaaagga

SEQ ID NO: 4760646 - DNA, 25 bp, Homo sapien
ggcagggcccgagattcacacattt

SEQ ID NO: 4760647 - DNA, 25 bp, Homo sapien
catttgggcaccacgaacaatgtgc

SEQ ID NO: 4760648 - DNA, 25 bp, Homo sapien
ctttcatccagtaaaggcagggccc

SEQ ID NO: 4760649 - DNA, 25 bp, Homo sapien
agattcacacatttgggcaccacga

SEQ ID NO: 4760650 - DNA, 25 bp, Homo sapien
actttagctttcagcctgcagagat

SEQ ID NO: 4760651 - DNA, 25 bp, Homo sapien
cagtcttcacctggtacagagattt

SEQ ID NO: 4760652 - DNA, 25 bp, Homo sapien
tagctttcagcctgcagagatctgc

SEQ ID NO: 4760653 - DNA, 25 bp, Homo sapien
gtgcagtcttcacctggtacagaga

SEQ ID NO: 4760654 - DNA, 25 bp, Homo sapien
ttctctctcgagtcttccgaaattc

SEQ ID NO: 4760655 - DNA, 25 bp, Homo sapien
catctttaaaggagattcctccact

SEQ ID NO: 4760656 - DNA, 25 bp, Homo sapien
tctctcgagtcttccgaaattctac

SEQ ID NO: 4760657 - DNA, 25 bp, Homo sapien
tcgagtcttccgaaattctacccat

SEQ ID NO: 4760658 - DNA, 25 bp, Homo sapien
tgtaaatctcctctcggtgtccaaa

SEQ ID NO: 4760659 - DNA, 25 bp, Homo sapien
ccattgatcgcctagctgggcacta

SEQ ID NO: 4760660 - DNA, 25 bp, Homo sapien
tcttttctggcgcacagctgtgaat

SEQ ID NO: 4760661 - DNA, 25 bp, Homo sapien
tagcatttaattcagagcggcctct

SEQ ID NO: 4760662 - DNA, 25 bp, Homo sapien
ccctctttcatgggacccttccctg

SEQ ID NO: 4760663 - DNA, 25 bp, Homo sapien
ctgcctccagactgaagctgaagcc

SEQ ID NO: 4760664 - DNA, 25 bp, Homo sapien
ttcaagtgaccccaaatcactaggt

SEQ ID NO: 4760665 - DNA, 25 bp, Homo sapien
tgaccccaaatcactaggtcatcaa

SEQ ID NO: 4760666 - DNA, 25 bp, Homo sapien
caggcacaggacaattagcccacac

SEQ ID NO: 4760667 - DNA, 25 bp, Homo sapien
cacaggcacaggacaattagcccac

SEQ ID NO: 4760668 - DNA, 25 bp, Homo sapien
tcacaggcacaggacaattagccca

SEQ ID NO: 4760669 - DNA, 25 bp, Homo sapien
acaggcacaggacaattagcccaca

SEQ ID NO: 4760670 - DNA, 25 bp, Homo sapien
atggttgtgggtgagcttaaggtag

SEQ ID NO: 4760671 - DNA, 25 bp, Homo sapien
gaccccatcatcgggttccaccaga

SEQ ID NO: 4760672 - DNA, 25 bp, Homo sapien
gatgaagaccccatcatcgggttcc

SEQ ID NO: 4760673 - DNA, 25 bp, Homo sapien
tgaagaccccatcatcgggttccac

SEQ ID NO: 4760674 - DNA, 25 bp, Homo sapien
gacctcctctcagccaggcactcac

SEQ ID NO: 4760675 - DNA, 25 bp, Homo sapien
ttcggctgacctcctctcagccagg

SEQ ID NO: 4760676 - DNA, 25 bp, Homo sapien
gctgacctcctctcagccaggcact

SEQ ID NO: 4760677 - DNA, 25 bp, Homo sapien
ggctgacctcctctcagccaggcac

SEQ ID NO: 4760678 - DNA, 25 bp, Homo sapien
tgagcagggccacgatgggagtgtg

SEQ ID NO: 4760679 - DNA, 25 bp, Homo sapien
cacgatgggagtgtgcacagtgtgc

SEQ ID NO: 4760680 - DNA, 25 bp, Homo sapien
tactattcgtactcctccagatgct

SEQ ID NO: 4760681 - DNA, 25 bp, Homo sapien
acctcttcccaatactattcgtact

SEQ ID NO: 4760682 - DNA, 25 bp, Homo sapien
taggacccagggtagctgaatgccc

SEQ ID NO: 4760683 - DNA, 25 bp, Homo sapien
aagtccgagacaactacacagtggc

SEQ ID NO: 4760684 - DNA, 25 bp, Homo sapien
ttggcccagtcacagaatccttagg

SEQ ID NO: 4760685 - DNA, 25 bp, Homo sapien
caaaagactctggttcggacattgg

SEQ ID NO: 4760686 - DNA, 25 bp, Homo sapien
cactgaccgccaggatagagtccaa

SEQ ID NO: 4760687 - DNA, 25 bp, Homo sapien
tttccaccaggcaggtaaaccctgc

SEQ ID NO: 4760688 - DNA, 25 bp, Homo sapien
tagagtccaatctccttaactgctg

SEQ ID NO: 4760689 - DNA, 25 bp, Homo sapien
ttcatccctatcctctacaacttta

SEQ ID NO: 4760690 - DNA, 25 bp, Homo sapien
ggtgtcccacatattccaggacagc

SEQ ID NO: 4760691 - DNA, 25 bp, Homo sapien
cacatctgctcactcttgtccaagc

SEQ ID NO: 4760692 - DNA, 25 bp, Homo sapien
catggcatggctaccaggtgtccca

SEQ ID NO: 4760693 - DNA, 25 bp, Homo sapien
aggacagccctgatttcttgtattc

SEQ ID NO: 4760694 - DNA, 25 bp, Homo sapien
catcggctccgagtgtggaaggaaa

SEQ ID NO: 4760695 - DNA, 25 bp, Homo sapien
attctttaaatctaggctcttgttt

SEQ ID NO: 4760696 - DNA, 25 bp, Homo sapien
gcaagtttccatgaactatctactg

SEQ ID NO: 4760697 - DNA, 25 bp, Homo sapien
gcatttctagtcaagatggagacca

SEQ ID NO: 4760698 - DNA, 25 bp, Homo sapien
aacatcagatctctgggtcattctc

SEQ ID NO: 4760699 - DNA, 25 bp, Homo sapien
gtaacatcagatctctgggtcattc

SEQ ID NO: 4760700 - DNA, 25 bp, Homo sapien
taacatcagatctctgggtcattct

SEQ ID NO: 4760701 - DNA, 25 bp, Homo sapien
tgtaacatcagatctctgggtcatt

SEQ ID NO: 4760702 - DNA, 25 bp, Homo sapien
gatatttgcttatggcagcacacca

SEQ ID NO: 4760703 - DNA, 25 bp, Homo sapien
ccctttggcatgctgagcgctttga

SEQ ID NO: 4760704 - DNA, 25 bp, Homo sapien
tgatttttcaggcagccatcacgcc

SEQ ID NO: 4760705 - DNA, 25 bp, Homo sapien
caaccagggaagattaatcactgca

SEQ ID NO: 4760706 - DNA, 25 bp, Homo sapien
tgtcaggccaaacacttctctcagg

SEQ ID NO: 4760707 - DNA, 25 bp, Homo sapien
gagtctacaatcaggcaaaacgttt

SEQ ID NO: 4760708 - DNA, 25 bp, Homo sapien
tgccacaggcatgggaaaagttctc

SEQ ID NO: 4760709 - DNA, 25 bp, Homo sapien
gacatcattcctaccaagcctgcag

SEQ ID NO: 4760710 - DNA, 25 bp, Homo sapien
gaatgcttcatgaatctgcatgtca

SEQ ID NO: 4760711 - DNA, 25 bp, Homo sapien
gctaatcttctgtgtatcactccaa

SEQ ID NO: 4760712 - DNA, 25 bp, Homo sapien
ccatgctaatcttctgtgtatcact

SEQ ID NO: 4760713 - DNA, 25 bp, Homo sapien
atgtcatccttgcataggggccatg

SEQ ID NO: 4760714 - DNA, 25 bp, Homo sapien
ttcactcctctggacctttgccacc

SEQ ID NO: 4760715 - DNA, 25 bp, Homo sapien
tctgctgagtcccttcactcctctg

SEQ ID NO: 4760716 - DNA, 25 bp, Homo sapien
ttgccaccccatccataggatcaaa

SEQ ID NO: 4760717 - DNA, 25 bp, Homo sapien
ccatccataggatcaaagtttgtac

SEQ ID NO: 4760718 - DNA, 25 bp, Homo sapien
gcagagacaccaaaagagctggatg

SEQ ID NO: 4760719 - DNA, 25 bp, Homo sapien
ggatgaagacctgccagaggcacca

SEQ ID NO: 4760720 - DNA, 25 bp, Homo sapien
tggatgaagacctgccagaggcacc

SEQ ID NO: 4760721 - DNA, 25 bp, Homo sapien
gctggatgaagacctgccagaggca

SEQ ID NO: 4760722 - DNA, 25 bp, Homo sapien
tctagaactgaaagcgtacgggtca

SEQ ID NO: 4760723 - DNA, 25 bp, Homo sapien
gagctagcgctgaacccaagatgtg

SEQ ID NO: 4760724 - DNA, 25 bp, Homo sapien
gatgtgggtcaccacagaccccaag

SEQ ID NO: 4760725 - DNA, 25 bp, Homo sapien
aaagcgtacgggtcagagctagcgc

SEQ ID NO: 4760726 - DNA, 25 bp, Homo sapien
tggagtcggagacgcagccactcac

SEQ ID NO: 4760727 - DNA, 25 bp, Homo sapien
gcgcgtccttcttgtcccgacgaag

SEQ ID NO: 4760728 - DNA, 25 bp, Homo sapien
gcgctgatgcgctgcgactccttct

SEQ ID NO: 4760729 - DNA, 25 bp, Homo sapien
agcagcttaagctcacggcgcgcgt

SEQ ID NO: 4760730 - DNA, 25 bp, Homo sapien
acgaagctgtcgctcgatctccgcg

SEQ ID NO: 4760731 - DNA, 25 bp, Homo sapien
aaaacctcagcagtgaccgcagact

SEQ ID NO: 4760732 - DNA, 25 bp, Homo sapien
gcctggaaagttctgaaaacctcag

SEQ ID NO: 4760733 - DNA, 25 bp, Homo sapien
cccttcgaaagtcggctctgaggcg

SEQ ID NO: 4760734 - DNA, 25 bp, Homo sapien
gccgacttgagctttggagtaagac

SEQ ID NO: 4760735 - DNA, 25 bp, Homo sapien
gggaagaaaagtgcatcgacaccta

SEQ ID NO: 4760736 - DNA, 25 bp, Homo sapien
catggcctgtctgggcccattgagt

SEQ ID NO: 4760737 - DNA, 25 bp, Homo sapien
tgcatcgacacctagcatggcctgt

SEQ ID NO: 4760738 - DNA, 25 bp, Homo sapien
gacaacagccggaaatcatgttctg

SEQ ID NO: 4760739 - DNA, 25 bp, Homo sapien
tatgagatcccacattcctgaacag

SEQ ID NO: 4760740 - DNA, 25 bp, Homo sapien
gagtaagcacttgatacagactgag

SEQ ID NO: 4760741 - DNA, 25 bp, Homo sapien
caaaggtgtcagtccttggaatgac

SEQ ID NO: 4760742 - DNA, 25 bp, Homo sapien
tccaagaatttggagttgcgaccaa

SEQ ID NO: 4760743 - DNA, 25 bp, Homo sapien
ttacagacagcatcccttgtccatc

SEQ ID NO: 4760744 - DNA, 25 bp, Homo sapien
caccctcaggaaccagggaatgaac

SEQ ID NO: 4760745 - DNA, 25 bp, Homo sapien
agtcacacacttgtggtgccctcca

SEQ ID NO: 4760746 - DNA, 25 bp, Homo sapien
gggctcacagtctgcacattcttta

SEQ ID NO: 4760747 - DNA, 25 bp, Homo sapien
ggaggtggacaggaaagttgaaggc

SEQ ID NO: 4760748 - DNA, 25 bp, Homo sapien
aggtggacaggaaagttgaaggcat

SEQ ID NO: 4760749 - DNA, 25 bp, Homo sapien
tggaggtggacaggaaagttgaagg

SEQ ID NO: 4760750 - DNA, 25 bp, Homo sapien
gaggtggacaggaaagttgaaggca

SEQ ID NO: 4760751 - DNA, 25 bp, Homo sapien
tattttcgggcaggtctgttgctga

SEQ ID NO: 4760752 - DNA, 25 bp, Homo sapien
tctagatccatttagaaccaagatg

SEQ ID NO: 4760753 - DNA, 25 bp, Homo sapien
tctgtctagacaacgtcctttatac

SEQ ID NO: 4760754 - DNA, 25 bp, Homo sapien
tatacattattttcgggcaggtctg

SEQ ID NO: 4760755 - DNA, 25 bp, Homo sapien
caatatgcacaaggtgtgttaagga

SEQ ID NO: 4760756 - DNA, 25 bp, Homo sapien
ttcagtactcctactaatacaaaac

SEQ ID NO: 4760757 - DNA, 25 bp, Homo sapien
ggaaagatgtatttcagtactccta

SEQ ID NO: 4760758 - DNA, 25 bp, Homo sapien
aatgcaatatgcacaaggtgtgtta

SEQ ID NO: 4760759 - DNA, 25 bp, Homo sapien
gacacagggtagataaggaaggcaa

SEQ ID NO: 4760760 - DNA, 25 bp, Homo sapien
ggtgtctggctccaaaaatctctag

SEQ ID NO: 4760761 - DNA, 25 bp, Homo sapien
taccaggacagatctattaacgcta

SEQ ID NO: 4760762 - DNA, 25 bp, Homo sapien
tatctactaaacagcaggtgtctgg

SEQ ID NO: 4760763 - DNA, 25 bp, Homo sapien
cccttatttaatttgaagaagagca

SEQ ID NO: 4760764 - DNA, 25 bp, Homo sapien
tttaatttgaagaagagcagcaata

SEQ ID NO: 4760765 - DNA, 25 bp, Homo sapien
cttatttaatttgaagaagagcagc

SEQ ID NO: 4760766 - DNA, 25 bp, Homo sapien
tatttaatttgaagaagagcagcaa

SEQ ID NO: 4760767 - DNA, 25 bp, Homo sapien
gaaatcaagggtaatcggtaggtga

SEQ ID NO: 4760768 - DNA, 25 bp, Homo sapien
caagggtaatcggtaggtgatttga

SEQ ID NO: 4760769 - DNA, 25 bp, Homo sapien
caatatgtgagtcttgcagtatttc

SEQ ID NO: 4760770 - DNA, 25 bp, Homo sapien
gtgatttgagggaaatttccaacca

SEQ ID NO: 4760771 - DNA, 25 bp, Homo sapien
gaacatctcattactgttgggcggc

SEQ ID NO: 4760772 - DNA, 25 bp, Homo sapien
taattctaacgtcccagcagctttg

SEQ ID NO: 4760773 - DNA, 25 bp, Homo sapien
gcttcgattgactggtgtggctaaa

SEQ ID NO: 4760774 - DNA, 25 bp, Homo sapien
tttggtactcatttaacaggccgtg

SEQ ID NO: 4760775 - DNA, 25 bp, Homo sapien
tctcctggtaggttcagttacacaa

SEQ ID NO: 4760776 - DNA, 25 bp, Homo sapien
ctgaacatgggacgtgaacactaac

SEQ ID NO: 4760777 - DNA, 25 bp, Homo sapien
ggtggtaaactagcaggaacttcag

SEQ ID NO: 4760778 - DNA, 25 bp, Homo sapien
tacattgccggtttggacactgaac

SEQ ID NO: 4760779 - DNA, 25 bp, Homo sapien
caagctatggctgaaggtaaacatc

SEQ ID NO: 4760780 - DNA, 25 bp, Homo sapien
cacttaacttttagatgggcatcca

SEQ ID NO: 4760781 - DNA, 25 bp, Homo sapien
gataaaggccattgtaacctgggaa

SEQ ID NO: 4760782 - DNA, 25 bp, Homo sapien
taaatcgaacgatgtgtcctgactg

SEQ ID NO: 4760783 - DNA, 25 bp, Homo sapien
cagggcgggtgtctaggaggcacaa

SEQ ID NO: 4760784 - DNA, 25 bp, Homo sapien
cacagagtccaggacggcaataaat

SEQ ID NO: 4760785 - DNA, 25 bp, Homo sapien
cagtccctcttgtgtatcttcaata

SEQ ID NO: 4760786 - DNA, 25 bp, Homo sapien
gacggcaataaattagtattatgca

SEQ ID NO: 4760787 - DNA, 25 bp, Homo sapien
ggatattctcggtgtctgtggcgca

SEQ ID NO: 4760788 - DNA, 25 bp, Homo sapien
ggatggtgtccttgacggcagcaaa

SEQ ID NO: 4760789 - DNA, 25 bp, Homo sapien
agaatgaattctcgggctgcctggg

SEQ ID NO: 4760790 - DNA, 25 bp, Homo sapien
acaaagcggatattctcggtgtctg

SEQ ID NO: 4760791 - DNA, 25 bp, Homo sapien
catctgataggcgtttagtgtccag

SEQ ID NO: 4760792 - DNA, 25 bp, Homo sapien
gaataaccatatgaccgaccctgct

SEQ ID NO: 4760793 - DNA, 25 bp, Homo sapien
gcttgcacacatatgacgtacttag

SEQ ID NO: 4760794 - DNA, 25 bp, Homo sapien
gggctctgatagacacttgatctta

SEQ ID NO: 4760795 - DNA, 25 bp, Homo sapien
cacatagactcttatagggcagcag

SEQ ID NO: 4760796 - DNA, 25 bp, Homo sapien
tgttaccaatcaccaagtgttcaag

SEQ ID NO: 4760797 - DNA, 25 bp, Homo sapien
tacatagtggctacatgtggatgca

SEQ ID NO: 4760798 - DNA, 25 bp, Homo sapien
gttgtccaggatttcacagtctagt

SEQ ID NO: 4760799 - DNA, 25 bp, Homo sapien
tagatgggaatacatgattttctcc

SEQ ID NO: 4760800 - DNA, 25 bp, Homo sapien
tcatattctgggaagtagtcgacta

SEQ ID NO: 4760801 - DNA, 25 bp, Homo sapien
aacagaataaccgaggagttctgga

SEQ ID NO: 4760802 - DNA, 25 bp, Homo sapien
cagaataaccgaggagttctggaac

SEQ ID NO: 4760803 - DNA, 25 bp, Homo sapien
gcttttgcctgcctgcggtaggatg

SEQ ID NO: 4760804 - DNA, 25 bp, Homo sapien
cacagtgaagagttacaaaggccat

SEQ ID NO: 4760805 - DNA, 25 bp, Homo sapien
ttcacagtgaagagttacaaaggcc

SEQ ID NO: 4760806 - DNA, 25 bp, Homo sapien
cctgcggtaggatgctcctggaatt

SEQ ID NO: 4760807 - DNA, 25 bp, Homo sapien
tccagagacaacttgcccagggtgc

SEQ ID NO: 4760808 - DNA, 25 bp, Homo sapien
gaagctcacccatgcatgcagtctg

SEQ ID NO: 4760809 - DNA, 25 bp, Homo sapien
ggctgctcaaggacatacctccatt

SEQ ID NO: 4760810 - DNA, 25 bp, Homo sapien
gattaacaatttccagactggactg

SEQ ID NO: 4760811 - DNA, 25 bp, Homo sapien
actgaagcctgcgcttctagctcag

SEQ ID NO: 4760812 - DNA, 25 bp, Homo sapien
tgaagcctgcgcttctagctcaggg

SEQ ID NO: 4760813 - DNA, 25 bp, Homo sapien
gtggactgaagcctgcgcttctagc

SEQ ID NO: 4760814 - DNA, 25 bp, Homo sapien
ggactgaagcctgcgcttctagctc

SEQ ID NO: 4760815 - DNA, 25 bp, Homo sapien
tccacagtcggcacagagccatgaa

SEQ ID NO: 4760816 - DNA, 25 bp, Homo sapien
gaagtaactcttcaggtatccagag

SEQ ID NO: 4760817 - DNA, 25 bp, Homo sapien
caatgtgtgttatgagctggctgac

SEQ ID NO: 4760818 - DNA, 25 bp, Homo sapien
atcagcaggagagggtccacagtcg

SEQ ID NO: 4760819 - DNA, 25 bp, Homo sapien
taacttttaaggacaagcatgaagc

SEQ ID NO: 4760820 - DNA, 25 bp, Homo sapien
catgaagctttgtagagcttgatgc

SEQ ID NO: 4760821 - DNA, 25 bp, Homo sapien
ttgatgccttctgcaagcactacag

SEQ ID NO: 4760822 - DNA, 25 bp, Homo sapien
gggcataaattgcctcccattaaga

SEQ ID NO: 4760823 - DNA, 25 bp, Homo sapien
catgttctcgaccttagcatttggg

SEQ ID NO: 4760824 - DNA, 25 bp, Homo sapien
gccccatgttctcgaccttagcatt

SEQ ID NO: 4760825 - DNA, 25 bp, Homo sapien
tgttctcgaccttagcatttgggaa

SEQ ID NO: 4760826 - DNA, 25 bp, Homo sapien
tcttcactgccgccaggttctcaat

SEQ ID NO: 4760827 - DNA, 25 bp, Homo sapien
tcttcagtatgatcatcgggaggtg

SEQ ID NO: 4760828 - DNA, 25 bp, Homo sapien
gcacatgttcttcagtatgatcatc

SEQ ID NO: 4760829 - DNA, 25 bp, Homo sapien
gatcatcgggaggtggtatactcat

SEQ ID NO: 4760830 - DNA, 25 bp, Homo sapien
tcagtatgatcatcgggaggtggta

SEQ ID NO: 4760831 - DNA, 25 bp, Homo sapien
aatcattaaatgcttgaggtggata

SEQ ID NO: 4760832 - DNA, 25 bp, Homo sapien
atgatggctattagaggctggaaag

SEQ ID NO: 4760833 - DNA, 25 bp, Homo sapien
atcattaaatgcttgaggtggatat

SEQ ID NO: 4760834 - DNA, 25 bp, Homo sapien
cggggtatttagttaattcataatg

SEQ ID NO: 4760835 - DNA, 25 bp, Homo sapien
tggctttccaaagcgctgcaattac

SEQ ID NO: 4760836 - DNA, 25 bp, Homo sapien
taatgttatacccacctctatctag

SEQ ID NO: 4760837 - DNA, 25 bp, Homo sapien
taattcataatgttatacccacctc

SEQ ID NO: 4760838 - DNA, 25 bp, Homo sapien
ttccgcccaatgcctggactggagt

SEQ ID NO: 4760839 - DNA, 25 bp, Homo sapien
ctgcattcacccttccgcccaatgc

SEQ ID NO: 4760840 - DNA, 25 bp, Homo sapien
ctctgcattcacccttccgcccaat

SEQ ID NO: 4760841 - DNA, 25 bp, Homo sapien
acccacctggactctccaatcaaaa

SEQ ID NO: 4760842 - DNA, 25 bp, Homo sapien
gacatgtgcatcagtgtaatagaac

SEQ ID NO: 4760843 - DNA, 25 bp, Homo sapien
gacaatccaatgtggaaagaacagt

SEQ ID NO: 4760844 - DNA, 25 bp, Homo sapien
tataggtgaaggacccatactttct

SEQ ID NO: 4760845 - DNA, 25 bp, Homo sapien
aaactttatgttcacgatcacctgg

SEQ ID NO: 4760846 - DNA, 25 bp, Homo sapien
gagataccatcttataaccactagg

SEQ ID NO: 4760847 - DNA, 25 bp, Homo sapien
caagtgttggctagcataaggagaa

SEQ ID NO: 4760848 - DNA, 25 bp, Homo sapien
taaagaaagtgaaatccctacagaa

SEQ ID NO: 4760849 - DNA, 25 bp, Homo sapien
taagaacagtttggtatgtcctgaa

SEQ ID NO: 4760850 - DNA, 25 bp, Homo sapien
caaaaaactctaacaatccttaatg

SEQ ID NO: 4760851 - DNA, 25 bp, Homo sapien
gcaggcttcaaagtaaggaaagtta

SEQ ID NO: 4760852 - DNA, 25 bp, Homo sapien
ttaggccttacataatgataacggg

SEQ ID NO: 4760853 - DNA, 25 bp, Homo sapien
tgtatatccctaacaaaagagcatc

SEQ ID NO: 4760854 - DNA, 25 bp, Homo sapien
aaggccctatagtgagactactgga

SEQ ID NO: 4760855 - DNA, 25 bp, Homo sapien
taggcacctagactgatacattggc

SEQ ID NO: 4760856 - DNA, 25 bp, Homo sapien
tgttctccacagcagctatattagt

SEQ ID NO: 4760857 - DNA, 25 bp, Homo sapien
tttgataatggccttcctaagtggg

SEQ ID NO: 4760858 - DNA, 25 bp, Homo sapien
cctgttggatgaatacggatatttt

SEQ ID NO: 4760859 - DNA, 25 bp, Homo sapien
tcctctagcagttttgtgtcttata

SEQ ID NO: 4760860 - DNA, 25 bp, Homo sapien
gatccactttgcgttgattttcgta

SEQ ID NO: 4760861 - DNA, 25 bp, Homo sapien
tgcctgtggttttgaaatcttattc

SEQ ID NO: 4760862 - DNA, 25 bp, Homo sapien
aaaggtacacagattgagaaggaag

SEQ ID NO: 4760863 - DNA, 25 bp, Homo sapien
gatgtctcctctcaacactcctttt

SEQ ID NO: 4760864 - DNA, 25 bp, Homo sapien
aaaaggtacacagattgagaaggaa

SEQ ID NO: 4760865 - DNA, 25 bp, Homo sapien
gtctcctctcaacactccttttcag

SEQ ID NO: 4760866 - DNA, 25 bp, Homo sapien
tcatcttagattatgtgggtgggcc

SEQ ID NO: 4760867 - DNA, 25 bp, Homo sapien
cattgggctgaatagtgactctgag

SEQ ID NO: 4760868 - DNA, 25 bp, Homo sapien
ggaggaattttagccctgccaacac

SEQ ID NO: 4760869 - DNA, 25 bp, Homo sapien
tgtattccctgtgaaccatcagagg

SEQ ID NO: 4760870 - DNA, 25 bp, Homo sapien
tgactggtaaaggatctctggctgg

SEQ ID NO: 4760871 - DNA, 25 bp, Homo sapien
tccttctagcgtaagggaagcaagg

SEQ ID NO: 4760872 - DNA, 25 bp, Homo sapien
tgaatcaggtcatgaatccaagcca

SEQ ID NO: 4760873 - DNA, 25 bp, Homo sapien
gattaagattcgataaaggcgggct

SEQ ID NO: 4760874 - DNA, 25 bp, Homo sapien
ctctttgctgccttatagctcctct

SEQ ID NO: 4760875 - DNA, 25 bp, Homo sapien
tttgctgccttatagctcctcttgc

SEQ ID NO: 4760876 - DNA, 25 bp, Homo sapien
tgctgccttatagctcctcttgctt

SEQ ID NO: 4760877 - DNA, 25 bp, Homo sapien
gctgccttatagctcctcttgcttt

SEQ ID NO: 4760878 - DNA, 25 bp, Homo sapien
tctgtggtctgcaatgcattttcca

SEQ ID NO: 4760879 - DNA, 25 bp, Homo sapien
tttgtctgtggtctgcaatgcattt

SEQ ID NO: 4760880 - DNA, 25 bp, Homo sapien
tgtctgtggtctgcaatgcattttc

SEQ ID NO: 4760881 - DNA, 25 bp, Homo sapien
ttttgtctgtggtctgcaatgcatt

SEQ ID NO: 4760882 - DNA, 25 bp, Homo sapien
aatcgattcatcgtcaggtctttac

SEQ ID NO: 4760883 - DNA, 25 bp, Homo sapien
tccataatcgattcatcgtcaggtc

SEQ ID NO: 4760884 - DNA, 25 bp, Homo sapien
gattcatcgtcaggtctttaccatc

SEQ ID NO: 4760885 - DNA, 25 bp, Homo sapien
aatatattccataatcgattcatcg

SEQ ID NO: 4760886 - DNA, 25 bp, Homo sapien
ttcactaagcgctactagaaacatg

SEQ ID NO: 4760887 - DNA, 25 bp, Homo sapien
attcactaagcgctactagaaacat

SEQ ID NO: 4760888 - DNA, 25 bp, Homo sapien
gatcatattcactaagcgctactag

SEQ ID NO: 4760889 - DNA, 25 bp, Homo sapien
catattcactaagcgctactagaaa

SEQ ID NO: 4760890 - DNA, 25 bp, Homo sapien
ggtaggcagggtcagctacgcggtc

SEQ ID NO: 4760891 - DNA, 25 bp, Homo sapien
atcttgttgcgtaggcaggtaggca

SEQ ID NO: 4760892 - DNA, 25 bp, Homo sapien
catcttgttgcgtaggcaggtaggc

SEQ ID NO: 4760893 - DNA, 25 bp, Homo sapien
aggtaggcagggtcagctacgcggt

SEQ ID NO: 4760894 - DNA, 25 bp, Homo sapien
agaggagggaagacacaatgagaat

SEQ ID NO: 4760895 - DNA, 25 bp, Homo sapien
aggagggaagacacaatgagaatgt

SEQ ID NO: 4760896 - DNA, 25 bp, Homo sapien
agggaagacacaatgagaatgtcag

SEQ ID NO: 4760897 - DNA, 25 bp, Homo sapien
agtgacaccatcacaccaaagctgt

SEQ ID NO: 4760898 - DNA, 25 bp, Homo sapien
caagaatggtgagatttatagagat

SEQ ID NO: 4760899 - DNA, 25 bp, Homo sapien
tagcccttggtgataatcctcaaaa

SEQ ID NO: 4760900 - DNA, 25 bp, Homo sapien
atacagtcactttctgggaacctgt

SEQ ID NO: 4760901 - DNA, 25 bp, Homo sapien
tgttcgaacaatctctagcccttgg

SEQ ID NO: 4760902 - DNA, 25 bp, Homo sapien
tagcaggtgggttataatcctacca

SEQ ID NO: 4760903 - DNA, 25 bp, Homo sapien
agagaaggcttcgaaattatgcatt

SEQ ID NO: 4760904 - DNA, 25 bp, Homo sapien
attacatgcgcgcagcaccaggcct

SEQ ID NO: 4760905 - DNA, 25 bp, Homo sapien
tgttcaagggagactattctggagg

SEQ ID NO: 4760906 - DNA, 25 bp, Homo sapien
tctggaatttcctacctctgtggtt

SEQ ID NO: 4760907 - DNA, 25 bp, Homo sapien
caagttggctaatcaaagtagaagg

SEQ ID NO: 4760908 - DNA, 25 bp, Homo sapien
gtagaagggaagctcaaatcatttt

SEQ ID NO: 4760909 - DNA, 25 bp, Homo sapien
taattgctgcttagctaaacatggc

SEQ ID NO: 4760910 - DNA, 25 bp, Homo sapien
tgctgtcgtatttgccagttcctgg

SEQ ID NO: 4760911 - DNA, 25 bp, Homo sapien
agtgctgtcgtatttgccagttcct

SEQ ID NO: 4760912 - DNA, 25 bp, Homo sapien
gctgtcgtatttgccagttcctgga

SEQ ID NO: 4760913 - DNA, 25 bp, Homo sapien
gtgctgtcgtatttgccagttcctg

SEQ ID NO: 4760914 - DNA, 25 bp, Homo sapien
gtttagatcagcctgtgctagaggg

SEQ ID NO: 4760915 - DNA, 25 bp, Homo sapien
gagtttagatcagcctgtgctagag

SEQ ID NO: 4760916 - DNA, 25 bp, Homo sapien
tgcaggggcatgattgatctcgatc

SEQ ID NO: 4760917 - DNA, 25 bp, Homo sapien
cattcccactagggaaatgtagaac

SEQ ID NO: 4760918 - DNA, 25 bp, Homo sapien
cgtcgtctatcatagcattcctgga

SEQ ID NO: 4760919 - DNA, 25 bp, Homo sapien
tcagataattgatattctcgtcgtc

SEQ ID NO: 4760920 - DNA, 25 bp, Homo sapien
aacttctcgaactaattgtgcatga

SEQ ID NO: 4760921 - DNA, 25 bp, Homo sapien
tacatatggattctcaaaagcagac

SEQ ID NO: 4760922 - DNA, 25 bp, Homo sapien
gttcctgaatcccacgccaggtggg

SEQ ID NO: 4760923 - DNA, 25 bp, Homo sapien
ctgttcctgaatcccacgccaggtg

SEQ ID NO: 4760924 - DNA, 25 bp, Homo sapien
gtcctgttcctgaatcccacgccag

SEQ ID NO: 4760925 - DNA, 25 bp, Homo sapien
tcctgttcctgaatcccacgccagg

SEQ ID NO: 4760926 - DNA, 25 bp, Homo sapien
gaatccattaaaaaacgtgcacctg

SEQ ID NO: 4760927 - DNA, 25 bp, Homo sapien
tgataaggaagcttgtgaactctcc

SEQ ID NO: 4760928 - DNA, 25 bp, Homo sapien
gaatctgactcctaccagtgggcat

SEQ ID NO: 4760929 - DNA, 25 bp, Homo sapien
cgtgcacctgggatcttctgatgtt

SEQ ID NO: 4760930 - DNA, 25 bp, Homo sapien
taatgataactatgtcacagcaccg

SEQ ID NO: 4760931 - DNA, 25 bp, Homo sapien
gactttaccagacagcatatccacg

SEQ ID NO: 4760932 - DNA, 25 bp, Homo sapien
taataggcacacattaacgggtcag

SEQ ID NO: 4760933 - DNA, 25 bp, Homo sapien
tgtacttcagatatgactcaggagg

SEQ ID NO: 4760934 - DNA, 25 bp, Homo sapien
tacagaaactgcctttcagagcaaa

SEQ ID NO: 4760935 - DNA, 25 bp, Homo sapien
ttcactcggaggaacctatacagaa

SEQ ID NO: 4760936 - DNA, 25 bp, Homo sapien
ctgatcttcactcggaggaacctat

SEQ ID NO: 4760937 - DNA, 25 bp, Homo sapien
tgtcatctgagctacagccagtgtc

SEQ ID NO: 4760938 - DNA, 25 bp, Homo sapien
tgtgtttgcaaacaaggagtgtact

SEQ ID NO: 4760939 - DNA, 25 bp, Homo sapien
ctggatagtatataatgaccgcttc

SEQ ID NO: 4760940 - DNA, 25 bp, Homo sapien
tttgcaaacaaggagtgtactggat

SEQ ID NO: 4760941 - DNA, 25 bp, Homo sapien
ggatagtatataatgaccgcttcat

SEQ ID NO: 4760942 - DNA, 25 bp, Homo sapien
tacactacagggtgggaacaaactg

SEQ ID NO: 4760943 - DNA, 25 bp, Homo sapien
caaagtagatatccggctctgcaga

SEQ ID NO: 4760944 - DNA, 25 bp, Homo sapien
taaacctacgatgcctcggagaagg

SEQ ID NO: 4760945 - DNA, 25 bp, Homo sapien
tccttctgggagcaattcacatgtc

SEQ ID NO: 4760946 - DNA, 25 bp, Homo sapien
gaggacaaagccttgcctgcagttg

SEQ ID NO: 4760947 - DNA, 25 bp, Homo sapien
gagctgcctgtaggtaccagaaagg

SEQ ID NO: 4760948 - DNA, 25 bp, Homo sapien
tagtgaagatctactttcaggtctc

SEQ ID NO: 4760949 - DNA, 25 bp, Homo sapien
tcttcctgtgtacatggcagtaaga

SEQ ID NO: 4760950 - DNA, 25 bp, Homo sapien
tcctatacatacgtaactgtgcagc

SEQ ID NO: 4760951 - DNA, 25 bp, Homo sapien
aggcaaagggctgattcacaccctg

SEQ ID NO: 4760952 - DNA, 25 bp, Homo sapien
agggcaagactttatcacaatacac

SEQ ID NO: 4760953 - DNA, 25 bp, Homo sapien
actgtgcagcatggacacactaggc

SEQ ID NO: 4760954 - DNA, 25 bp, Homo sapien
taacttgcctacgaattgcagagcc

SEQ ID NO: 4760955 - DNA, 25 bp, Homo sapien
tctaagcagttaacacagagtatgc

SEQ ID NO: 4760956 - DNA, 25 bp, Homo sapien
agagccaagatttaacccagtaagg

SEQ ID NO: 4760957 - DNA, 25 bp, Homo sapien
tgagcatggactgtgcaccaggcag

SEQ ID NO: 4760958 - DNA, 25 bp, Homo sapien
caccaacctcggccttgcaaagtcc

SEQ ID NO: 4760959 - DNA, 25 bp, Homo sapien
caacctcggccttgcaaagtcctgg

SEQ ID NO: 4760960 - DNA, 25 bp, Homo sapien
gattacaggcattaatgattttttt

SEQ ID NO: 4760961 - DNA, 25 bp, Homo sapien
ggattacaggcattaatgatttttt

SEQ ID NO: 4760962 - DNA, 25 bp, Homo sapien
ctggagtcaaattttacattgacat

SEQ ID NO: 4760963 - DNA, 25 bp, Homo sapien
gagtcaaattttacattgacatttc

SEQ ID NO: 4760964 - DNA, 25 bp, Homo sapien
tggagtcaaattttacattgacatt

SEQ ID NO: 4760965 - DNA, 25 bp, Homo sapien
actggagtcaaattttacattgaca

SEQ ID NO: 4760966 - DNA, 25 bp, Homo sapien
gaaacgtgggcaatcctggtaggcc

SEQ ID NO: 4760967 - DNA, 25 bp, Homo sapien
ccttatgggtgtgcaatgggtccaa

SEQ ID NO: 4760968 - DNA, 25 bp, Homo sapien
ggcaagcgctttccgcctgcttcaa

SEQ ID NO: 4760969 - DNA, 25 bp, Homo sapien
gatttgagttattgttgcccagcta

SEQ ID NO: 4760970 - DNA, 25 bp, Homo sapien
taagctctaggccagtacttccaaa

SEQ ID NO: 4760971 - DNA, 25 bp, Homo sapien
aaatgtcggctacacacttcacctg

SEQ ID NO: 4760972 - DNA, 25 bp, Homo sapien
tctatgacaccagtggcaccttacc

SEQ ID NO: 4760973 - DNA, 25 bp, Homo sapien
gctgtactgaccactctgtctaaaa

SEQ ID NO: 4760974 - DNA, 25 bp, Homo sapien
tatttccattcgtgtctttccatct

SEQ ID NO: 4760975 - DNA, 25 bp, Homo sapien
cattcgtgtctttccatctccatac

SEQ ID NO: 4760976 - DNA, 25 bp, Homo sapien
tccattcgtgtctttccatctccat

SEQ ID NO: 4760977 - DNA, 25 bp, Homo sapien
tttccattcgtgtctttccatctcc

SEQ ID NO: 4760978 - DNA, 25 bp, Homo sapien
ttcatgatcacgagaatagcaaggg

SEQ ID NO: 4760979 - DNA, 25 bp, Homo sapien
tgtgcaggggaaactccagtattta

SEQ ID NO: 4760980 - DNA, 25 bp, Homo sapien
catgatcacgagaatagcaagggaa

SEQ ID NO: 4760981 - DNA, 25 bp, Homo sapien
ttattcatgatcacgagaatagcaa

SEQ ID NO: 4760982 - DNA, 25 bp, Homo sapien
tatacaaaagcagctctgtgcatag

SEQ ID NO: 4760983 - DNA, 25 bp, Homo sapien
taagctgatctccttactgtaaaca

SEQ ID NO: 4760984 - DNA, 25 bp, Homo sapien
gaccccgcatgaaagcatatatagg

SEQ ID NO: 4760985 - DNA, 25 bp, Homo sapien
tgcagtgctctcaggagttgaaaat

SEQ ID NO: 4760986 - DNA, 25 bp, Homo sapien
ttgctatttttcagtgggaaagtag

SEQ ID NO: 4760987 - DNA, 25 bp, Homo sapien
cattgctatttttcagtgggaaagt

SEQ ID NO: 4760988 - DNA, 25 bp, Homo sapien
gctatttttcagtgggaaagtagag

SEQ ID NO: 4760989 - DNA, 25 bp, Homo sapien
ctatttttcagtgggaaagtagagg

SEQ ID NO: 4760990 - DNA, 25 bp, Homo sapien
tagccaaggtttacatgacacctct

SEQ ID NO: 4760991 - DNA, 25 bp, Homo sapien
gacgatcatatcacctagtaacacc

SEQ ID NO: 4760992 - DNA, 25 bp, Homo sapien
gccttacaaatctgtgacttgggca

SEQ ID NO: 4760993 - DNA, 25 bp, Homo sapien
gggccataaaatgcacctaatatgt

SEQ ID NO: 4760994 - DNA, 25 bp, Homo sapien
tacaatgtcagctgcacaacggcag

SEQ ID NO: 4760995 - DNA, 25 bp, Homo sapien
tgccaggctcaccataggagttagc

SEQ ID NO: 4760996 - DNA, 25 bp, Homo sapien
cacgagcgaagtaggaactgggact

SEQ ID NO: 4760997 - DNA, 25 bp, Homo sapien
caaatgctagtatctcagtgaggct

SEQ ID NO: 4760998 - DNA, 25 bp, Homo sapien
gacatgttccagcagttaactgaaa

SEQ ID NO: 4760999 - DNA, 25 bp, Homo sapien
catagtcgctggaagtttaagtagg

SEQ ID NO: 4761000 - DNA, 25 bp, Homo sapien
tatcaaagccatgtctaaaagagtt

SEQ ID NO: 4761001 - DNA, 25 bp, Homo sapien
taaaagagttagcacccttctgaga

SEQ ID NO: 4761002 - DNA, 25 bp, Homo sapien
gggttttaatatacctgcttctgca

SEQ ID NO: 4761003 - DNA, 25 bp, Homo sapien
tgggcttctagtgtatccattcccc

SEQ ID NO: 4761004 - DNA, 25 bp, Homo sapien
gtggaccagggtacaatcagagttt

SEQ ID NO: 4761005 - DNA, 25 bp, Homo sapien
tccccagctagtgaacattgaacct

SEQ ID NO: 4761006 - DNA, 25 bp, Homo sapien
tgtcgcaatcccctaatgcctcagg

SEQ ID NO: 4761007 - DNA, 25 bp, Homo sapien
ggctaatggaatgggtgtttgcaca

SEQ ID NO: 4761008 - DNA, 25 bp, Homo sapien
tgcacaatgcagtttcaagacatgc

SEQ ID NO: 4761009 - DNA, 25 bp, Homo sapien
agttctcaaagtgtaatcgggatgc

SEQ ID NO: 4761010 - DNA, 25 bp, Homo sapien
gctaatccttcaaatagacatgggt

SEQ ID NO: 4761011 - DNA, 25 bp, Homo sapien
aaactcttaaattatcatggcctag

SEQ ID NO: 4761012 - DNA, 25 bp, Homo sapien
ccagttatccgaaatgtttgtcaaa

SEQ ID NO: 4761013 - DNA, 25 bp, Homo sapien
tctttgtcaaaatacgtcaccgctt

SEQ ID NO: 4761014 - DNA, 25 bp, Homo sapien
gatatgtgaggtcagagctttgaaa

SEQ ID NO: 4761015 - DNA, 25 bp, Homo sapien
tgctctctttcgtagcagcagttct

SEQ ID NO: 4761016 - DNA, 25 bp, Homo sapien
ccttttgtaaggctgaggacatgtt

SEQ ID NO: 4761017 - DNA, 25 bp, Homo sapien
tgaccttgccaccacataatttgga

SEQ ID NO: 4761018 - DNA, 25 bp, Homo sapien
atgagcctccaaagcaggacctggg

SEQ ID NO: 4761019 - DNA, 25 bp, Homo sapien
taggctccctcaatgtcttataagt

SEQ ID NO: 4761020 - DNA, 25 bp, Homo sapien
gagcagtacagataccatcacctgg

SEQ ID NO: 4761021 - DNA, 25 bp, Homo sapien
tccttaggccgagctggagctactc

SEQ ID NO: 4761022 - DNA, 25 bp, Homo sapien
gtgtctgtgccctcacaaaatggca

SEQ ID NO: 4761023 - DNA, 25 bp, Homo sapien
cagtctcagtccttctgggttgcta

SEQ ID NO: 4761024 - DNA, 25 bp, Homo sapien
tacagtctcagtccttctgggttgc

SEQ ID NO: 4761025 - DNA, 25 bp, Homo sapien
gtctcagtccttctgggttgctatt

SEQ ID NO: 4761026 - DNA, 25 bp, Homo sapien
acagtctcagtccttctgggttgct

SEQ ID NO: 4761027 - DNA, 25 bp, Homo sapien
cttttagtttagcaaaaagctgact

SEQ ID NO: 4761028 - DNA, 25 bp, Homo sapien
tgtggaaactgtaaataatcaattt

SEQ ID NO: 4761029 - DNA, 25 bp, Homo sapien
ttagcaaaaagctgactgtggaaac

SEQ ID NO: 4761030 - DNA, 25 bp, Homo sapien
tgactgtggaaactgtaaataatca

SEQ ID NO: 4761031 - DNA, 25 bp, Homo sapien
gcaaaatccggtgctgtagagccat

SEQ ID NO: 4761032 - DNA, 25 bp, Homo sapien
gaaactcgaagggattctgatgcaa

SEQ ID NO: 4761033 - DNA, 25 bp, Homo sapien
gttgcacctgtgcttaatgccccta

SEQ ID NO: 4761034 - DNA, 25 bp, Homo sapien
tcatattgagccacacgaattggtc

SEQ ID NO: 4761035 - DNA, 25 bp, Homo sapien
agcataaacaaaggcaacaagtggg

SEQ ID NO: 4761036 - DNA, 25 bp, Homo sapien
tcgctatggatatgctaaagaacag

SEQ ID NO: 4761037 - DNA, 25 bp, Homo sapien
gatgaagcaaggtgaaaatgacgct

SEQ ID NO: 4761038 - DNA, 25 bp, Homo sapien
ggaaactgggaggtcatcacactaa

SEQ ID NO: 4761039 - DNA, 25 bp, Homo sapien
tattgtgaacacctggaacattcag

SEQ ID NO: 4761040 - DNA, 25 bp, Homo sapien
tcaagaggctactcgtgttgtcaca

SEQ ID NO: 4761041 - DNA, 25 bp, Homo sapien
ggctactcgtgttgtcacattattg

SEQ ID NO: 4761042 - DNA, 25 bp, Homo sapien
gaacattcagctgactgctccaatg

SEQ ID NO: 4761043 - DNA, 25 bp, Homo sapien
tatcctgacccatggatgattctca

SEQ ID NO: 4761044 - DNA, 25 bp, Homo sapien
tcatacttgtatgggatcttgagtg

SEQ ID NO: 4761045 - DNA, 25 bp, Homo sapien
tgtgctcatacttgtatgggatctt

SEQ ID NO: 4761046 - DNA, 25 bp, Homo sapien
cttcatcagagtatcctgacccatg

SEQ ID NO: 4761047 - DNA, 25 bp, Homo sapien
cagcactgaattttgatagtgattt

SEQ ID NO: 4761048 - DNA, 25 bp, Homo sapien
gaaaccactcagcactgaattttga

SEQ ID NO: 4761049 - DNA, 25 bp, Homo sapien
cactcagcactgaattttgatagtg

SEQ ID NO: 4761050 - DNA, 25 bp, Homo sapien
gaattttgatagtgatttgtaacca

SEQ ID NO: 4761051 - DNA, 25 bp, Homo sapien
tcttgcaagaaacaatggcaacagc

SEQ ID NO: 4761052 - DNA, 25 bp, Homo sapien
tatcttgcaagaaacaatggcaaca

SEQ ID NO: 4761053 - DNA, 25 bp, Homo sapien
ttgcaagaaacaatggcaacagcat

SEQ ID NO: 4761054 - DNA, 25 bp, Homo sapien
gtatcttgcaagaaacaatggcaac

SEQ ID NO: 4761055 - DNA, 25 bp, Homo sapien
ggcctctcacagactgagggaagcc

SEQ ID NO: 4761056 - DNA, 25 bp, Homo sapien
ctctcacagactgagggaagcccat

SEQ ID NO: 4761057 - DNA, 25 bp, Homo sapien
cagggcctctcacagactgagggaa

SEQ ID NO: 4761058 - DNA, 25 bp, Homo sapien
cctctcacagactgagggaagccca

SEQ ID NO: 4761059 - DNA, 25 bp, Homo sapien
ccaataagcacatcatcaatccaca

SEQ ID NO: 4761060 - DNA, 25 bp, Homo sapien
atgaagtagaactagaaattttaag

SEQ ID NO: 4761061 - DNA, 25 bp, Homo sapien
tttctaccaataagcacatcatcaa

SEQ ID NO: 4761062 - DNA, 25 bp, Homo sapien
ggagaaattttctaccaataagcac

SEQ ID NO: 4761063 - DNA, 25 bp, Homo sapien
ggacttttagaagtccactgttcat

SEQ ID NO: 4761064 - DNA, 25 bp, Homo sapien
aggacttttagaagtccactgttca

SEQ ID NO: 4761065 - DNA, 25 bp, Homo sapien
gccattggagataggaagttgcccc

SEQ ID NO: 4761066 - DNA, 25 bp, Homo sapien
aaagacaggcgcaacatctggtacc

SEQ ID NO: 4761067 - DNA, 25 bp, Homo sapien
gatgtcaagacgatttcaccagcca

SEQ ID NO: 4761068 - DNA, 25 bp, Homo sapien
tgccccttggtagcgaatgctcaga

SEQ ID NO: 4761069 - DNA, 25 bp, Homo sapien
gggctattaactggggatcatccat

SEQ ID NO: 4761070 - DNA, 25 bp, Homo sapien
ccaaatacaaattggttcttgggct

SEQ ID NO: 4761071 - DNA, 25 bp, Homo sapien
agccaaatacaaattggttcttggg

SEQ ID NO: 4761072 - DNA, 25 bp, Homo sapien
aaatacaaattggttcttgggctat

SEQ ID NO: 4761073 - DNA, 25 bp, Homo sapien
agccgaaaggcattctgatgaccag

SEQ ID NO: 4761074 - DNA, 25 bp, Homo sapien
caggataatcatgagtgggcaaaaa

SEQ ID NO: 4761075 - DNA, 25 bp, Homo sapien
ctcattccgtctagcttcagccgaa

SEQ ID NO: 4761076 - DNA, 25 bp, Homo sapien
aaactcatattcaattccctgttct

SEQ ID NO: 4761077 - DNA, 25 bp, Homo sapien
ttagaatcacgcaaggagagggccc

SEQ ID NO: 4761078 - DNA, 25 bp, Homo sapien
aacagactgccattgcaagtcagga

SEQ ID NO: 4761079 - DNA, 25 bp, Homo sapien
tcactgttcttcaaaggtgtggtcc

SEQ ID NO: 4761080 - DNA, 25 bp, Homo sapien
tcacgcattaaagagaacccatttc

SEQ ID NO: 4761081 - DNA, 25 bp, Homo sapien
tcagttctggaagagctctctcagc

SEQ ID NO: 4761082 - DNA, 25 bp, Homo sapien
ctggaagagctctctcagcaagcca

SEQ ID NO: 4761083 - DNA, 25 bp, Homo sapien
tcagcaagccaaaggccttttcctc

SEQ ID NO: 4761084 - DNA, 25 bp, Homo sapien
gctctctcagcaagccaaaggcctt

SEQ ID NO: 4761085 - DNA, 25 bp, Homo sapien
cacggtcaacatcaattcctgcccc

SEQ ID NO: 4761086 - DNA, 25 bp, Homo sapien
cctctgccacggtcaacatcaattc

SEQ ID NO: 4761087 - DNA, 25 bp, Homo sapien
tgccacggtcaacatcaattcctgc

SEQ ID NO: 4761088 - DNA, 25 bp, Homo sapien
tctgccacggtcaacatcaattcct

SEQ ID NO: 4761089 - DNA, 25 bp, Homo sapien
ggccgctttgaacccctcttcacag

SEQ ID NO: 4761090 - DNA, 25 bp, Homo sapien
tgccctaggttcgggcagtccgtca

SEQ ID NO: 4761091 - DNA, 25 bp, Homo sapien
ggcagtccgtcagcggccgctttga

SEQ ID NO: 4761092 - DNA, 25 bp, Homo sapien
ttcgggcagtccgtcagcggccgct

SEQ ID NO: 4761093 - DNA, 25 bp, Homo sapien
gattcagttccctcggtcagatcca

SEQ ID NO: 4761094 - DNA, 25 bp, Homo sapien
tgacaacagctctcacatggaggaa

SEQ ID NO: 4761095 - DNA, 25 bp, Homo sapien
tagccactcgaagaccaacaaaagg

SEQ ID NO: 4761096 - DNA, 25 bp, Homo sapien
catctcaggaaaagggtatcatgcc

SEQ ID NO: 4761097 - DNA, 25 bp, Homo sapien
gtccctgcatgtgcagcagtaaggg

SEQ ID NO: 4761098 - DNA, 25 bp, Homo sapien
cctgcatgtgcagcagtaagggcag

SEQ ID NO: 4761099 - DNA, 25 bp, Homo sapien
ccctgcatgtgcagcagtaagggca

SEQ ID NO: 4761100 - DNA, 25 bp, Homo sapien
tgcatgtgcagcagtaagggcaggg

SEQ ID NO: 4761101 - DNA, 25 bp, Homo sapien
tacacgcagctggtgtatgccctca

SEQ ID NO: 4761102 - DNA, 25 bp, Homo sapien
gcctatgatctttagccacttggga

SEQ ID NO: 4761103 - DNA, 25 bp, Homo sapien
ttaggaagagttcacaaccacactg

SEQ ID NO: 4761104 - DNA, 25 bp, Homo sapien
aacgtgtatggaaaatgctgtcagc

SEQ ID NO: 4761105 - DNA, 25 bp, Homo sapien
caggcgtgagccactgcgctcagcc

SEQ ID NO: 4761106 - DNA, 25 bp, Homo sapien
acaggcgtgagccactgcgctcagc

SEQ ID NO: 4761107 - DNA, 25 bp, Homo sapien
accaccatgcccagctaatttctgt

SEQ ID NO: 4761108 - DNA, 25 bp, Homo sapien
gtagttgggattacacgcgcacacc

SEQ ID NO: 4761109 - DNA, 25 bp, Homo sapien
ttcttttgaagacccttctgagagc

SEQ ID NO: 4761110 - DNA, 25 bp, Homo sapien
tcttttgaagacccttctgagagct

SEQ ID NO: 4761111 - DNA, 25 bp, Homo sapien
gttcttttgaagacccttctgagag

SEQ ID NO: 4761112 - DNA, 25 bp, Homo sapien
cacaaagtaaagtgcccagtaaatg

SEQ ID NO: 4761113 - DNA, 25 bp, Homo sapien
accagtggtaaaaattggcagccaa

SEQ ID NO: 4761114 - DNA, 25 bp, Homo sapien
tggcagccaaaaactatccactcaa

SEQ ID NO: 4761115 - DNA, 25 bp, Homo sapien
tcaggtgttaagagtcctaaccagt

SEQ ID NO: 4761116 - DNA, 25 bp, Homo sapien
ggcaaagcagtatcactattctcag

SEQ ID NO: 4761117 - DNA, 25 bp, Homo sapien
aggccaatgactagccaacctactg

SEQ ID NO: 4761118 - DNA, 25 bp, Homo sapien
gaccactgatgttggcgaagtaaaa

SEQ ID NO: 4761119 - DNA, 25 bp, Homo sapien
tgggtcacatcaagccatcccaggc

SEQ ID NO: 4761120 - DNA, 25 bp, Homo sapien
ttaagagaagtatacccagggattc

SEQ ID NO: 4761121 - DNA, 25 bp, Homo sapien
ttggtttctgtagaactcttacaaa

SEQ ID NO: 4761122 - DNA, 25 bp, Homo sapien
gagaagtatacccagggattcagtg

SEQ ID NO: 4761123 - DNA, 25 bp, Homo sapien
caagtagctccttattgtcttgaaa

SEQ ID NO: 4761124 - DNA, 25 bp, Homo sapien
tccagccatgcagattatagccacc

SEQ ID NO: 4761125 - DNA, 25 bp, Homo sapien
ttcgaagcagtcagaaagataccct

SEQ ID NO: 4761126 - DNA, 25 bp, Homo sapien
tagcattgccatagtttaaagtccc

SEQ ID NO: 4761127 - DNA, 25 bp, Homo sapien
tatacggccttaatattcgaagcag

SEQ ID NO: 4761128 - DNA, 25 bp, Homo sapien
tcatacatatgaaagaaatggttcc

SEQ ID NO: 4761129 - DNA, 25 bp, Homo sapien
ggtgcaaactggttactaccctcac

SEQ ID NO: 4761130 - DNA, 25 bp, Homo sapien
tatgtgtgtattagtaactgttctc

SEQ ID NO: 4761131 - DNA, 25 bp, Homo sapien
tctctacttgtttggaagctccatg

SEQ ID NO: 4761132 - DNA, 25 bp, Homo sapien
gaagttctgctttatggcatgtagg

SEQ ID NO: 4761133 - DNA, 25 bp, Homo sapien
tgtaggcttatcatctgcaagcagc

SEQ ID NO: 4761134 - DNA, 25 bp, Homo sapien
tctggtctggcatttgagggccact

SEQ ID NO: 4761135 - DNA, 25 bp, Homo sapien
caccatgcagactataaaagtgtca

SEQ ID NO: 4761136 - DNA, 25 bp, Homo sapien
aaaatccttgcggttgagaattaca

SEQ ID NO: 4761137 - DNA, 25 bp, Homo sapien
cacatgaaagcctctgggtgcttgc

SEQ ID NO: 4761138 - DNA, 25 bp, Homo sapien
aagcctctgggtgcttgctttcaag

SEQ ID NO: 4761139 - DNA, 25 bp, Homo sapien
aatccttgcggttgagaattacata

SEQ ID NO: 4761140 - DNA, 25 bp, Homo sapien
tggaatcgaaaatttggcctaacca

SEQ ID NO: 4761141 - DNA, 25 bp, Homo sapien
atagcgtaagtataaaagggtgttg

SEQ ID NO: 4761142 - DNA, 25 bp, Homo sapien
gccacaacatccaacctcttttaag

SEQ ID NO: 4761143 - DNA, 25 bp, Homo sapien
tgtgaatctaatgttatcagagaca

SEQ ID NO: 4761144 - DNA, 25 bp, Homo sapien
tcagggcttaactgccgctctgtga

SEQ ID NO: 4761145 - DNA, 25 bp, Homo sapien
cagggcttaactgccgctctgtgac

SEQ ID NO: 4761146 - DNA, 25 bp, Homo sapien
tctctgtctccaattgcttcttgct

SEQ ID NO: 4761147 - DNA, 25 bp, Homo sapien
acttcctctgccatcgaattctctg

SEQ ID NO: 4761148 - DNA, 25 bp, Homo sapien
tcaggtacaggtgccggtaagtcag

SEQ ID NO: 4761149 - DNA, 25 bp, Homo sapien
caagtaaagtcaggtacaggtgccg

SEQ ID NO: 4761150 - DNA, 25 bp, Homo sapien
gcaggtaaggtacaggtgcaagtaa

SEQ ID NO: 4761151 - DNA, 25 bp, Homo sapien
gcgaggtgatcagaacgggatcccc

SEQ ID NO: 4761152 - DNA, 25 bp, Homo sapien
ggagagatagggcaacggcacctct

SEQ ID NO: 4761153 - DNA, 25 bp, Homo sapien
gagatagggcaacggcacctctcat

SEQ ID NO: 4761154 - DNA, 25 bp, Homo sapien
caacaaatgaggagagatagggcaa

SEQ ID NO: 4761155 - DNA, 25 bp, Homo sapien
acaaatgaggagagatagggcaacg

SEQ ID NO: 4761156 - DNA, 25 bp, Homo sapien
tatagcctctccaggtcactctaga

SEQ ID NO: 4761157 - DNA, 25 bp, Homo sapien
tcatggattgagttgaaacaccgat

SEQ ID NO: 4761158 - DNA, 25 bp, Homo sapien
tacttggaatctcagatcagaggag

SEQ ID NO: 4761159 - DNA, 25 bp, Homo sapien
tcactctagatgaggactgtatgct

SEQ ID NO: 4761160 - DNA, 25 bp, Homo sapien
tacatatcctgccttcagggatctg

SEQ ID NO: 4761161 - DNA, 25 bp, Homo sapien
gtagaaagtaccaacaatcaactca

SEQ ID NO: 4761162 - DNA, 25 bp, Homo sapien
tctgacaggttgctatggaggaaca

SEQ ID NO: 4761163 - DNA, 25 bp, Homo sapien
tacaggtatctgcacctcgctgcct

SEQ ID NO: 4761164 - DNA, 25 bp, Homo sapien
tgagcccagccaactatcgaatttc

SEQ ID NO: 4761165 - DNA, 25 bp, Homo sapien
tggctgtaaagtaaataggtaccaa

SEQ ID NO: 4761166 - DNA, 25 bp, Homo sapien
aatggctattatcaactggttggca

SEQ ID NO: 4761167 - DNA, 25 bp, Homo sapien
aatgtgggcatactgtcaaataaag

SEQ ID NO: 4761168 - DNA, 25 bp, Homo sapien
taatgattccctgtgatcatccctg

SEQ ID NO: 4761169 - DNA, 25 bp, Homo sapien
cacctggcctcggaaaggcattttc

SEQ ID NO: 4761170 - DNA, 25 bp, Homo sapien
gacaatatacttaaatgaggttcct

SEQ ID NO: 4761171 - DNA, 25 bp, Homo sapien
caggtgcgcgccatacagatagagt

SEQ ID NO: 4761172 - DNA, 25 bp, Homo sapien
tattgttcacaatccatgattaatc

SEQ ID NO: 4761173 - DNA, 25 bp, Homo sapien
tttctaaagcagacatattgttcac

SEQ ID NO: 4761174 - DNA, 25 bp, Homo sapien
agcagacatattgttcacaatccat

SEQ ID NO: 4761175 - DNA, 25 bp, Homo sapien
ctaaagcagacatattgttcacaat

SEQ ID NO: 4761176 - DNA, 25 bp, Homo sapien
gataccggtcgctgtcaacaaccac

SEQ ID NO: 4761177 - DNA, 25 bp, Homo sapien
taaacaaaagataccggtcgctgtc

SEQ ID NO: 4761178 - DNA, 25 bp, Homo sapien
cacaacgctcccctaccctcatctt

SEQ ID NO: 4761179 - DNA, 25 bp, Homo sapien
ggtcgctgtcaacaaccacacagca

SEQ ID NO: 4761180 - DNA, 25 bp, Homo sapien
cttctaggctccctcctttcgatgg

SEQ ID NO: 4761181 - DNA, 25 bp, Homo sapien
ctccctcctttcgatggtctggtgg

SEQ ID NO: 4761182 - DNA, 25 bp, Homo sapien
tcaccatccactggccaactcttct

SEQ ID NO: 4761183 - DNA, 25 bp, Homo sapien
taggctccctcctttcgatggtctg

SEQ ID NO: 4761184 - DNA, 25 bp, Homo sapien
cgggaatccagctgcgagtctgccc

SEQ ID NO: 4761185 - DNA, 25 bp, Homo sapien
gggaatccagctgcgagtctgccca

SEQ ID NO: 4761186 - DNA, 25 bp, Homo sapien
gctccgggaatccagctgcgagtct

SEQ ID NO: 4761187 - DNA, 25 bp, Homo sapien
tccgggaatccagctgcgagtctgc

SEQ ID NO: 4761188 - DNA, 25 bp, Homo sapien
gccgctcgatctcgtcgttgatccg

SEQ ID NO: 4761189 - DNA, 25 bp, Homo sapien
agctgccgctcgatctcgtcgttga

SEQ ID NO: 4761190 - DNA, 25 bp, Homo sapien
tcccgcttgtccctgcggagctgcc

SEQ ID NO: 4761191 - DNA, 25 bp, Homo sapien
atctcgtcgttgatccgccgggctt

SEQ ID NO: 4761192 - DNA, 25 bp, Homo sapien
cgcgcgtccgggacgagctccggga

SEQ ID NO: 4761193 - DNA, 25 bp, Homo sapien
gggcgcgtgagagaaggccgccgcg

SEQ ID NO: 4761194 - DNA, 25 bp, Homo sapien
ctggcggcgagagctcattcaccgg

SEQ ID NO: 4761195 - DNA, 25 bp, Homo sapien
tagtctgggccgacgggagaagaga

SEQ ID NO: 4761196 - DNA, 25 bp, Homo sapien
actgaaggacactaggtgtgcactg

SEQ ID NO: 4761197 - DNA, 25 bp, Homo sapien
ggcacagctgtgatcagattcagca

SEQ ID NO: 4761198 - DNA, 25 bp, Homo sapien
gctgcaggactgagcataaaggcac

SEQ ID NO: 4761199 - DNA, 25 bp, Homo sapien
tgcaggagacgttccagctgcagga

SEQ ID NO: 4761200 - DNA, 25 bp, Homo sapien
taattttcagcagactgggagtcct

SEQ ID NO: 4761201 - DNA, 25 bp, Homo sapien
tgggagtcctgttccaactgagagc

SEQ ID NO: 4761202 - DNA, 25 bp, Homo sapien
ttaattttcagcagactgggagtcc

SEQ ID NO: 4761203 - DNA, 25 bp, Homo sapien
attttcagcagactgggagtcctgt

SEQ ID NO: 4761204 - DNA, 25 bp, Homo sapien
cacgtggagcagcctgtgccctgga

SEQ ID NO: 4761205 - DNA, 25 bp, Homo sapien
cctgtgccctggacagctcctccat

SEQ ID NO: 4761206 - DNA, 25 bp, Homo sapien
cagcctgtgccctggacagctcctc

SEQ ID NO: 4761207 - DNA, 25 bp, Homo sapien
acgtggagcagcctgtgccctggac

SEQ ID NO: 4761208 - DNA, 25 bp, Homo sapien
gattaggaataattagcatgtgcac

SEQ ID NO: 4761209 - DNA, 25 bp, Homo sapien
taggaataattagcatgtgcacaaa

SEQ ID NO: 4761210 - DNA, 25 bp, Homo sapien
tctttgattaggaataattagcatg

SEQ ID NO: 4761211 - DNA, 25 bp, Homo sapien
ctctctttgattaggaataattagc

SEQ ID NO: 4761212 - DNA, 25 bp, Homo sapien
aagtagtgttcccagactccaataa

SEQ ID NO: 4761213 - DNA, 25 bp, Homo sapien
ccagactccaataaatgtctcataa

SEQ ID NO: 4761214 - DNA, 25 bp, Homo sapien
agttgaagtagtgttcccagactcc

SEQ ID NO: 4761215 - DNA, 25 bp, Homo sapien
cggtgttttccaagttgaagtagtg

SEQ ID NO: 4761216 - DNA, 25 bp, Homo sapien
caggtcttccagcagtttaaagtct

SEQ ID NO: 4761217 - DNA, 25 bp, Homo sapien
aggtcttccagcagtttaaagtctc

SEQ ID NO: 4761218 - DNA, 25 bp, Homo sapien
ctctcaactgggtctgttgccttct

SEQ ID NO: 4761219 - DNA, 25 bp, Homo sapien
caactgaactctcaactgggtctgt

SEQ ID NO: 4761220 - DNA, 25 bp, Homo sapien
tgaactctcaactgggtctgttgcc

SEQ ID NO: 4761221 - DNA, 25 bp, Homo sapien
tctaccaactgaactctcaactggg

SEQ ID NO: 4761222 - DNA, 25 bp, Homo sapien
ttgggcagcttctacatgcagcagt

SEQ ID NO: 4761223 - DNA, 25 bp, Homo sapien
tatagctccgtgaagcctgtgcttg

SEQ ID NO: 4761224 - DNA, 25 bp, Homo sapien
tgaataaccaacagttgttttctcc

SEQ ID NO: 4761225 - DNA, 25 bp, Homo sapien
tgagaagaaaacctgaataaccaac

SEQ ID NO: 4761226 - DNA, 25 bp, Homo sapien
aacagcgtacagcaatgtgctgtcc

SEQ ID NO: 4761227 - DNA, 25 bp, Homo sapien
tccccagagaaacagcgtacagcaa

SEQ ID NO: 4761228 - DNA, 25 bp, Homo sapien
cccagagaaacagcgtacagcaatg

SEQ ID NO: 4761229 - DNA, 25 bp, Homo sapien
gagaaacagcgtacagcaatgtgct

SEQ ID NO: 4761230 - DNA, 25 bp, Homo sapien
cagagttgcaatgcacagatttggg

SEQ ID NO: 4761231 - DNA, 25 bp, Homo sapien
ctgcagagttgcaatgcacagattt

SEQ ID NO: 4761232 - DNA, 25 bp, Homo sapien
gcagagttgcaatgcacagatttgg

SEQ ID NO: 4761233 - DNA, 25 bp, Homo sapien
gagttgcaatgcacagatttgggca

SEQ ID NO: 4761234 - DNA, 25 bp, Homo sapien
agtaaggctgacttgtcatcagata

SEQ ID NO: 4761235 - DNA, 25 bp, Homo sapien
cagatatgccttgataagagatgca

SEQ ID NO: 4761236 - DNA, 25 bp, Homo sapien
gagatgcaataaatggtcctgcttt

SEQ ID NO: 4761237 - DNA, 25 bp, Homo sapien
ctgtaatgagattttgctgagtaag

SEQ ID NO: 4761238 - DNA, 25 bp, Homo sapien
tactgatgtcttcacaagtgggcgg

SEQ ID NO: 4761239 - DNA, 25 bp, Homo sapien
cagcaaagggacattgggacccatg

SEQ ID NO: 4761240 - DNA, 25 bp, Homo sapien
atccgggaggcaggtagacagcaaa

SEQ ID NO: 4761241 - DNA, 25 bp, Homo sapien
gacagaagattccaagatggtactg

SEQ ID NO: 4761242 - DNA, 25 bp, Homo sapien
tgcgtattcctaagtgtctgctcca

SEQ ID NO: 4761243 - DNA, 25 bp, Homo sapien
tgctccatgagatcacctccgattt

SEQ ID NO: 4761244 - DNA, 25 bp, Homo sapien
caatttccatctgagaggatcccat

SEQ ID NO: 4761245 - DNA, 25 bp, Homo sapien
gaggaaattccctagctctctctga

SEQ ID NO: 4761246 - DNA, 25 bp, Homo sapien
tgccctcctcacgcttcttaagtaa

SEQ ID NO: 4761247 - DNA, 25 bp, Homo sapien
ccctcctcacgcttcttaagtaaca

SEQ ID NO: 4761248 - DNA, 25 bp, Homo sapien
ctcctcacgcttcttaagtaacaac

SEQ ID NO: 4761249 - DNA, 25 bp, Homo sapien
cctgccctcctcacgcttcttaagt

SEQ ID NO: 4761250 - DNA, 25 bp, Homo sapien
ccttgtagtgccggtaggccaggaa

SEQ ID NO: 4761251 - DNA, 25 bp, Homo sapien
gccttgtagtgccggtaggccagga

SEQ ID NO: 4761252 - DNA, 25 bp, Homo sapien
ttgtagtgccggtaggccaggaagg

SEQ ID NO: 4761253 - DNA, 25 bp, Homo sapien
ccagggtggagtcgacgtagttctg

SEQ ID NO: 4761254 - DNA, 25 bp, Homo sapien
cagcacgtcctccggttgggtggcc

SEQ ID NO: 4761255 - DNA, 25 bp, Homo sapien
tgcgcggagttggcccccaccagca

SEQ ID NO: 4761256 - DNA, 25 bp, Homo sapien
atcaaggcgaagaccctgcacgcag

SEQ ID NO: 4761257 - DNA, 25 bp, Homo sapien
tatggttgaaaacgcagtacctctg

SEQ ID NO: 4761258 - DNA, 25 bp, Homo sapien
cttgcggtcagtggcattaatgatc

SEQ ID NO: 4761259 - DNA, 25 bp, Homo sapien
tctgcttagacttgctgtagccctt

SEQ ID NO: 4761260 - DNA, 25 bp, Homo sapien
tctgtttgctatccactgattttat

SEQ ID NO: 4761261 - DNA, 25 bp, Homo sapien
gtttgctatccactgattttattaa

SEQ ID NO: 4761262 - DNA, 25 bp, Homo sapien
tattctgtttgctatccactgattt

SEQ ID NO: 4761263 - DNA, 25 bp, Homo sapien
ctttattctgtttgctatccactga

SEQ ID NO: 4761264 - DNA, 25 bp, Homo sapien
aggcagcaaaatatagacaacagtg

SEQ ID NO: 4761265 - DNA, 25 bp, Homo sapien
gcaagagtaaggcagcaaaatatag

SEQ ID NO: 4761266 - DNA, 25 bp, Homo sapien
agtaaggcagcaaaatatagacaac

SEQ ID NO: 4761267 - DNA, 25 bp, Homo sapien
gtggcaagagtaaggcagcaaaata

SEQ ID NO: 4761268 - DNA, 25 bp, Homo sapien
atagcagtgccaatagccaaaaagt

SEQ ID NO: 4761269 - DNA, 25 bp, Homo sapien
taaatggaatagcagtgccaatagc

SEQ ID NO: 4761270 - DNA, 25 bp, Homo sapien
tggaatagcagtgccaatagccaaa

SEQ ID NO: 4761271 - DNA, 25 bp, Homo sapien
agtaaatggaatagcagtgccaata

SEQ ID NO: 4761272 - DNA, 25 bp, Homo sapien
tggcttctttctttttctgatcatt

SEQ ID NO: 4761273 - DNA, 25 bp, Homo sapien
catttgaacccaggtaccttctctt

SEQ ID NO: 4761274 - DNA, 25 bp, Homo sapien
tcatttgaacccaggtaccttctct

SEQ ID NO: 4761275 - DNA, 25 bp, Homo sapien
ccaggacaatcctatgcaaaaagag

SEQ ID NO: 4761276 - DNA, 25 bp, Homo sapien
ccactgtatccggccaaaactactt

SEQ ID NO: 4761277 - DNA, 25 bp, Homo sapien
cactgtatccggccaaaactacttt

SEQ ID NO: 4761278 - DNA, 25 bp, Homo sapien
ccagccagaggaacatagtaagatt

SEQ ID NO: 4761279 - DNA, 25 bp, Homo sapien
gatgggtgctatggcttatccctgt

SEQ ID NO: 4761280 - DNA, 25 bp, Homo sapien
catttaggatgggtgctatggctta

SEQ ID NO: 4761281 - DNA, 25 bp, Homo sapien
aacaaattaaccaagtgtagtggca

SEQ ID NO: 4761282 - DNA, 25 bp, Homo sapien
tcaggaaccttctcagccctagaca

SEQ ID NO: 4761283 - DNA, 25 bp, Homo sapien
ggtttttactatatccacaaagctg

SEQ ID NO: 4761284 - DNA, 25 bp, Homo sapien
ttgcataatgctttcatgagtcatc

SEQ ID NO: 4761285 - DNA, 25 bp, Homo sapien
aaccactaccataatccaattttag

SEQ ID NO: 4761286 - DNA, 25 bp, Homo sapien
gaaatgatgggtcagggtaagtcta

SEQ ID NO: 4761287 - DNA, 25 bp, Homo sapien
tattcatcagtagattgacacttgg

SEQ ID NO: 4761288 - DNA, 25 bp, Homo sapien
ggaaccctcaaactgtcctgcaaaa

SEQ ID NO: 4761289 - DNA, 25 bp, Homo sapien
tttttcttgagtatacatccagctg

SEQ ID NO: 4761290 - DNA, 25 bp, Homo sapien
tatatctgtgacaggttttggccca

SEQ ID NO: 4761291 - DNA, 25 bp, Homo sapien
cccatggagtgtgagcagatgtaat

SEQ ID NO: 4761292 - DNA, 25 bp, Homo sapien
gagttcacgccacttgaaatatcca

SEQ ID NO: 4761293 - DNA, 25 bp, Homo sapien
aatgggcttgcatgtttgggctcac

SEQ ID NO: 4761294 - DNA, 25 bp, Homo sapien
ccggtgcctctaaatgccaagtgaa

SEQ ID NO: 4761295 - DNA, 25 bp, Homo sapien
actggatcttgctctctcgacttga

SEQ ID NO: 4761296 - DNA, 25 bp, Homo sapien
taagctgttctaacgtggcgaagga

SEQ ID NO: 4761297 - DNA, 25 bp, Homo sapien
tgtatagccttggtgcacccggtgc

SEQ ID NO: 4761298 - DNA, 25 bp, Homo sapien
ggagcagcctatgaaaagacccaga

SEQ ID NO: 4761299 - DNA, 25 bp, Homo sapien
tagccgactaaataaaggagcagcc

SEQ ID NO: 4761300 - DNA, 25 bp, Homo sapien
caagcagttctgtgtatctagagaa

SEQ ID NO: 4761301 - DNA, 25 bp, Homo sapien
caagctacgtgacatagatctgaca

SEQ ID NO: 4761302 - DNA, 25 bp, Homo sapien
ccggaattttagagacgcctgcata

SEQ ID NO: 4761303 - DNA, 25 bp, Homo sapien
tattaagatttgagcatgtcgcaca

SEQ ID NO: 4761304 - DNA, 25 bp, Homo sapien
tcaatttgccaggaaccgtgtgaga

SEQ ID NO: 4761305 - DNA, 25 bp, Homo sapien
cacaatgtctaaggctctaccggag

SEQ ID NO: 4761306 - DNA, 25 bp, Homo sapien
cacacaagtgcccaaagagtcagat

SEQ ID NO: 4761307 - DNA, 25 bp, Homo sapien
gacattgacaggacgaagaagttgc

SEQ ID NO: 4761308 - DNA, 25 bp, Homo sapien
tgtgtgcaccctagaaaagagtctg

SEQ ID NO: 4761309 - DNA, 25 bp, Homo sapien
tcctgaagtgttggagtcgcctaca

SEQ ID NO: 4761310 - DNA, 25 bp, Homo sapien
cggctgcagactctcaccgcagcgg

SEQ ID NO: 4761311 - DNA, 25 bp, Homo sapien
aacgccagccgttcacgcgttcggt

SEQ ID NO: 4761312 - DNA, 25 bp, Homo sapien
tgcagactctcaccgcagcggccag

SEQ ID NO: 4761313 - DNA, 25 bp, Homo sapien
caggaacgccagccgttcacgcgtt

SEQ ID NO: 4761314 - DNA, 25 bp, Homo sapien
caccttcgtgggatgggtgtccctg

SEQ ID NO: 4761315 - DNA, 25 bp, Homo sapien
cagtaccttggaaagtcccggtgtg

SEQ ID NO: 4761316 - DNA, 25 bp, Homo sapien
gtccctggctgaaggtgtacctctg

SEQ ID NO: 4761317 - DNA, 25 bp, Homo sapien
ccgaggggactgtctggaactctca

SEQ ID NO: 4761318 - DNA, 25 bp, Homo sapien
gatgcagctgtctgccagatgccct

SEQ ID NO: 4761319 - DNA, 25 bp, Homo sapien
agttaagtcagcagacttgccggaa

SEQ ID NO: 4761320 - DNA, 25 bp, Homo sapien
cagacttgccggaagcctttgtgcc

SEQ ID NO: 4761321 - DNA, 25 bp, Homo sapien
agccccggccctgtaggtcttccag

SEQ ID NO: 4761322 - DNA, 25 bp, Homo sapien
tccacaactctgtaaagctggtggg

SEQ ID NO: 4761323 - DNA, 25 bp, Homo sapien
ggtgctgaatctacacatctgtggg

SEQ ID NO: 4761324 - DNA, 25 bp, Homo sapien
ccaggcgaagggcaaactgtagatc

SEQ ID NO: 4761325 - DNA, 25 bp, Homo sapien
tcagcggctgttgattcaaggtcaa

SEQ ID NO: 4761326 - DNA, 25 bp, Homo sapien
tatcctcatgatcgcccttctcttg

SEQ ID NO: 4761327 - DNA, 25 bp, Homo sapien
tattatggggcttgtctgtatcctc

SEQ ID NO: 4761328 - DNA, 25 bp, Homo sapien
tcttttcctacgtccacctcctctg

SEQ ID NO: 4761329 - DNA, 25 bp, Homo sapien
ttcagaactcaaccccatgtcatca

SEQ ID NO: 4761330 - DNA, 25 bp, Homo sapien
ccaacacgctcagaggaacataagg

SEQ ID NO: 4761331 - DNA, 25 bp, Homo sapien
cacgctcagaggaacataaggccac

SEQ ID NO: 4761332 - DNA, 25 bp, Homo sapien
atggcgcaccctaggtgcctgcagg

SEQ ID NO: 4761333 - DNA, 25 bp, Homo sapien
tagcagcccatggcgcaccctaggt

SEQ ID NO: 4761334 - DNA, 25 bp, Homo sapien
gcagggcggaggatcagggtggcag

SEQ ID NO: 4761335 - DNA, 25 bp, Homo sapien
agggcggaggatcagggtggcagcc

SEQ ID NO: 4761336 - DNA, 25 bp, Homo sapien
ctggcagggcggaggatcagggtgg

SEQ ID NO: 4761337 - DNA, 25 bp, Homo sapien
gggcggaggatcagggtggcagcca

SEQ ID NO: 4761338 - DNA, 25 bp, Homo sapien
gttacgtgtaaaaccatctggccag

SEQ ID NO: 4761339 - DNA, 25 bp, Homo sapien
ttcttgagggatccaagtggtaagg

SEQ ID NO: 4761340 - DNA, 25 bp, Homo sapien
tcatccactagctcctctttcatgt

SEQ ID NO: 4761341 - DNA, 25 bp, Homo sapien
ggccagtccaggactctaacacttg

SEQ ID NO: 4761342 - DNA, 25 bp, Homo sapien
tgaggacgggattgtttgcagggat

SEQ ID NO: 4761343 - DNA, 25 bp, Homo sapien
ctgtctggtgaggacgggattgttt

SEQ ID NO: 4761344 - DNA, 25 bp, Homo sapien
ttgcagggatgagtgcaaaatccct

SEQ ID NO: 4761345 - DNA, 25 bp, Homo sapien
atgaagtcgtgcagacacagcgcca

SEQ ID NO: 4761346 - DNA, 25 bp, Homo sapien
tgtaagaggctggacaaagctatgg

SEQ ID NO: 4761347 - DNA, 25 bp, Homo sapien
ctgtgccctgtagatctgcgttaaa

SEQ ID NO: 4761348 - DNA, 25 bp, Homo sapien
cgctgtagaaaatcgagccagttgc

SEQ ID NO: 4761349 - DNA, 25 bp, Homo sapien
gaaaagcttgcccatcgctgtagaa

SEQ ID NO: 4761350 - DNA, 25 bp, Homo sapien
ccaactctacgtgggctgggtcaga

SEQ ID NO: 4761351 - DNA, 25 bp, Homo sapien
gggctgggtcagagtatgcgatggg

SEQ ID NO: 4761352 - DNA, 25 bp, Homo sapien
ccggccaactctacgtgggctgggt

SEQ ID NO: 4761353 - DNA, 25 bp, Homo sapien
tcttccggccaactctacgtgggct

SEQ ID NO: 4761354 - DNA, 25 bp, Homo sapien
ctggtggagcgaacacatgatggaa

SEQ ID NO: 4761355 - DNA, 25 bp, Homo sapien
ggtggagcgaacacatgatggaaac

SEQ ID NO: 4761356 - DNA, 25 bp, Homo sapien
ttcacagacaaagataagaattgtt

SEQ ID NO: 4761357 - DNA, 25 bp, Homo sapien
tgtacctgagtctcttcccaactgt

SEQ ID NO: 4761358 - DNA, 25 bp, Homo sapien
tggcaggaggtatcaccaacagctc

SEQ ID NO: 4761359 - DNA, 25 bp, Homo sapien
tgaggttgtcttccctagtatccac

SEQ ID NO: 4761360 - DNA, 25 bp, Homo sapien
ccatccgagagtcccgggtacttgt

SEQ ID NO: 4761361 - DNA, 25 bp, Homo sapien
tgtgccttaaccatcgtctgaagcg

SEQ ID NO: 4761362 - DNA, 25 bp, Homo sapien
ccttttggctgtgccttaaccatcg

SEQ ID NO: 4761363 - DNA, 25 bp, Homo sapien
gatgtctgtggggtaatcatgactc

SEQ ID NO: 4761364 - DNA, 25 bp, Homo sapien
cagcagcctccttttggctgtgcct

SEQ ID NO: 4761365 - DNA, 25 bp, Homo sapien
ctctgattatagctttagacctttg

SEQ ID NO: 4761366 - DNA, 25 bp, Homo sapien
tgattatagctttagacctttgaat

SEQ ID NO: 4761367 - DNA, 25 bp, Homo sapien
tctgattatagctttagacctttga

SEQ ID NO: 4761368 - DNA, 25 bp, Homo sapien
ctgattatagctttagacctttgaa

SEQ ID NO: 4761369 - DNA, 25 bp, Homo sapien
aaagcagccacaaatgaacttcagg

SEQ ID NO: 4761370 - DNA, 25 bp, Homo sapien
gaacttcaggtaagctggcgagtac

SEQ ID NO: 4761371 - DNA, 25 bp, Homo sapien
ttatcttcgtggaagcaaagcagcc

SEQ ID NO: 4761372 - DNA, 25 bp, Homo sapien
tactccagcagcctttcagggtgag

SEQ ID NO: 4761373 - DNA, 25 bp, Homo sapien
ctttgtgtagagatgtctttctctc

SEQ ID NO: 4761374 - DNA, 25 bp, Homo sapien
ttacgtatcttccacatggcatttt

SEQ ID NO: 4761375 - DNA, 25 bp, Homo sapien
tgtttatttgaaccctgcacttcca

SEQ ID NO: 4761376 - DNA, 25 bp, Homo sapien
tttgtttatttgaaccctgcacttc

SEQ ID NO: 4761377 - DNA, 25 bp, Homo sapien
ctcttacgtatcttccacatggcat

SEQ ID NO: 4761378 - DNA, 25 bp, Homo sapien
tggatgtcttacaggcagctgaaac

SEQ ID NO: 4761379 - DNA, 25 bp, Homo sapien
tgaaacttcacatatctaagggatg

SEQ ID NO: 4761380 - DNA, 25 bp, Homo sapien
cagcctgcaatctgcaattcttgca

SEQ ID NO: 4761381 - DNA, 25 bp, Homo sapien
aagggatgacctacttttcagccag

SEQ ID NO: 4761382 - DNA, 25 bp, Homo sapien
ggtctctgtatcgacctaaaaccag

SEQ ID NO: 4761383 - DNA, 25 bp, Homo sapien
taaaggtctctgtatcgacctaaaa

SEQ ID NO: 4761384 - DNA, 25 bp, Homo sapien
ttaaaggtctctgtatcgacctaaa

SEQ ID NO: 4761385 - DNA, 25 bp, Homo sapien
ctctgtatcgacctaaaaccagcat

SEQ ID NO: 4761386 - DNA, 25 bp, Homo sapien
caacatctggcgtgggagtgtagga

SEQ ID NO: 4761387 - DNA, 25 bp, Homo sapien
ccaaccatgatgctttggtatcagg

SEQ ID NO: 4761388 - DNA, 25 bp, Homo sapien
tggtgtatggtggaactgcacatcc

SEQ ID NO: 4761389 - DNA, 25 bp, Homo sapien
aatggccaggcctttagcaggattg

SEQ ID NO: 4761390 - DNA, 25 bp, Homo sapien
cagtggtgggtgttcatcatagaca

SEQ ID NO: 4761391 - DNA, 25 bp, Homo sapien
tggtgggtgttcatcatagacacac

SEQ ID NO: 4761392 - DNA, 25 bp, Homo sapien
catcatagacacaccttctctttct

SEQ ID NO: 4761393 - DNA, 25 bp, Homo sapien
gcagccagtggtgggtgttcatcat

SEQ ID NO: 4761394 - DNA, 25 bp, Homo sapien
tagaatttattcttacgcgtttgta

SEQ ID NO: 4761395 - DNA, 25 bp, Homo sapien
aatgttggccgtcagtctgggagat

SEQ ID NO: 4761396 - DNA, 25 bp, Homo sapien
ccaaggagtggctcaatgataaagg

SEQ ID NO: 4761397 - DNA, 25 bp, Homo sapien
ctaatgttggccgtcagtctgggag

SEQ ID NO: 4761398 - DNA, 25 bp, Homo sapien
caaggagtggctcaatgataaaggc

SEQ ID NO: 4761399 - DNA, 25 bp, Homo sapien
taataagggccttgtgatgcatgga

SEQ ID NO: 4761400 - DNA, 25 bp, Homo sapien
ttcttggtcactgggatagcacggc

SEQ ID NO: 4761401 - DNA, 25 bp, Homo sapien
gcacggcatgtgctgttctattttg

SEQ ID NO: 4761402 - DNA, 25 bp, Homo sapien
tgggcatcccaacatataagtgtgc

SEQ ID NO: 4761403 - DNA, 25 bp, Homo sapien
caacagtcctgttttggaccagaaa

SEQ ID NO: 4761404 - DNA, 25 bp, Homo sapien
tcgctcccggagattgaaagaatcc

SEQ ID NO: 4761405 - DNA, 25 bp, Homo sapien
gaccagaaaatcagtaccgaggcga

SEQ ID NO: 4761406 - DNA, 25 bp, Homo sapien
cagaaaagagacgttatgcaagcct

SEQ ID NO: 4761407 - DNA, 25 bp, Homo sapien
aacgaacacgttgcagttatccccg

SEQ ID NO: 4761408 - DNA, 25 bp, Homo sapien
gatggcggtgtacgtcttcctgaga

SEQ ID NO: 4761409 - DNA, 25 bp, Homo sapien
cgggtcctctcattgttggcacaaa

SEQ ID NO: 4761410 - DNA, 25 bp, Homo sapien
gttatccccggtgtccactagatgg

SEQ ID NO: 4761411 - DNA, 25 bp, Homo sapien
tgatggctaatggaagaacctgtgc

SEQ ID NO: 4761412 - DNA, 25 bp, Homo sapien
gggtgtcttttccaactggctgctg

SEQ ID NO: 4761413 - DNA, 25 bp, Homo sapien
acctgtgctgattcctgcagataag

SEQ ID NO: 4761414 - DNA, 25 bp, Homo sapien
gaacctgtgcgctgagttaaacctg

SEQ ID NO: 4761415 - DNA, 25 bp, Homo sapien
ctttatcttgctttatcaaatccag

SEQ ID NO: 4761416 - DNA, 25 bp, Homo sapien
agatcctcatggttcgtttgccttg

SEQ ID NO: 4761417 - DNA, 25 bp, Homo sapien
ttatcttgctttatcaaatccagat

SEQ ID NO: 4761418 - DNA, 25 bp, Homo sapien
tcatggttcgtttgccttgctgtgt

SEQ ID NO: 4761419 - DNA, 25 bp, Homo sapien
ctcagccagtatacaacaggaagtg

SEQ ID NO: 4761420 - DNA, 25 bp, Homo sapien
gaaaggaaaatactcccaggctgta

SEQ ID NO: 4761421 - DNA, 25 bp, Homo sapien
taacttcggagctgaacattttggg

SEQ ID NO: 4761422 - DNA, 25 bp, Homo sapien
gctcttgggcctggagaaagcttcc

SEQ ID NO: 4761423 - DNA, 25 bp, Homo sapien
ttgacctcgtggtgctccagtctac

SEQ ID NO: 4761424 - DNA, 25 bp, Homo sapien
tccagtctaccaatgtagtccttgt

SEQ ID NO: 4761425 - DNA, 25 bp, Homo sapien
aatgtagtccttgtctggtaatgtg

SEQ ID NO: 4761426 - DNA, 25 bp, Homo sapien
tggtgctccagtctaccaatgtagt

SEQ ID NO: 4761427 - DNA, 25 bp, Homo sapien
tgattcctgttctagttccccactg

SEQ ID NO: 4761428 - DNA, 25 bp, Homo sapien
gattcctgttctagttccccactga

SEQ ID NO: 4761429 - DNA, 25 bp, Homo sapien
gttcagaagtggaaatcctcagggt

SEQ ID NO: 4761430 - DNA, 25 bp, Homo sapien
gaagtggaaatcctcagggtctgct

SEQ ID NO: 4761431 - DNA, 25 bp, Homo sapien
ccaaggatgggcaaagttatttctt

SEQ ID NO: 4761432 - DNA, 25 bp, Homo sapien
gtaaaggacagcaagaatcttgacc

SEQ ID NO: 4761433 - DNA, 25 bp, Homo sapien
caggttgaactaggtcttcaggttc

SEQ ID NO: 4761434 - DNA, 25 bp, Homo sapien
cctgtagtagcccaaggatgggcaa

SEQ ID NO: 4761435 - DNA, 25 bp, Homo sapien
atctctcctgacaaggttttgtctg

SEQ ID NO: 4761436 - DNA, 25 bp, Homo sapien
ctctcctgacaaggttttgtctggt

SEQ ID NO: 4761437 - DNA, 25 bp, Homo sapien
tggttttagtggagcagttagtgac

SEQ ID NO: 4761438 - DNA, 25 bp, Homo sapien
ctggttttagtggagcagttagtga

SEQ ID NO: 4761439 - DNA, 25 bp, Homo sapien
gacaggttgcatgtcattcccagaa

SEQ ID NO: 4761440 - DNA, 25 bp, Homo sapien
cacatttgtgggtttccctggagac

SEQ ID NO: 4761441 - DNA, 25 bp, Homo sapien
aaaacctgtcttttcatggcagtgg

SEQ ID NO: 4761442 - DNA, 25 bp, Homo sapien
gacagtttcaatagggaccaatcga

SEQ ID NO: 4761443 - DNA, 25 bp, Homo sapien
aagaattccttggtttctcctatgt

SEQ ID NO: 4761444 - DNA, 25 bp, Homo sapien
ttctcctatgttgggggacagccat

SEQ ID NO: 4761445 - DNA, 25 bp, Homo sapien
attccttggtttctcctatgttggg

SEQ ID NO: 4761446 - DNA, 25 bp, Homo sapien
cttcatgttctttaagaattccttg

SEQ ID NO: 4761447 - DNA, 25 bp, Homo sapien
aactgtcaatcaagagtgtatgtcc

SEQ ID NO: 4761448 - DNA, 25 bp, Homo sapien
gcaaatctcttgtgtaagatatagt

SEQ ID NO: 4761449 - DNA, 25 bp, Homo sapien
cattgcaaatgatgcctaatagatt

SEQ ID NO: 4761450 - DNA, 25 bp, Homo sapien
aatgatgcctaatagattaacagcc

SEQ ID NO: 4761451 - DNA, 25 bp, Homo sapien
ccaggcatagtagtgtgcagcactg

SEQ ID NO: 4761452 - DNA, 25 bp, Homo sapien
catgttactgggatagtagaggtcc

SEQ ID NO: 4761453 - DNA, 25 bp, Homo sapien
gatcatacaattaccttggatcagg

SEQ ID NO: 4761454 - DNA, 25 bp, Homo sapien
aagacaacctaatcaaaaatgggca

SEQ ID NO: 4761455 - DNA, 25 bp, Homo sapien
gcaaagcccagaaattagcaatgac

SEQ ID NO: 4761456 - DNA, 25 bp, Homo sapien
gaatgaaacttcctctcttgcttag

SEQ ID NO: 4761457 - DNA, 25 bp, Homo sapien
gtgttttcctatgcaaatgtagcaa

SEQ ID NO: 4761458 - DNA, 25 bp, Homo sapien
tctaataggcagtcaaatggtcttg

SEQ ID NO: 4761459 - DNA, 25 bp, Homo sapien
cgggcagttctgtttgcacacagtg

SEQ ID NO: 4761460 - DNA, 25 bp, Homo sapien
cctgttattgatggggagtgctgat

SEQ ID NO: 4761461 - DNA, 25 bp, Homo sapien
atttattgtcaacaacgggcagttc

SEQ ID NO: 4761462 - DNA, 25 bp, Homo sapien
caacaacgggcagttctgtttgcac

SEQ ID NO: 4761463 - DNA, 25 bp, Homo sapien
gctgccaaacgaccagcggaggtga

SEQ ID NO: 4761464 - DNA, 25 bp, Homo sapien
ctatgctgccaaacgaccagcggag

SEQ ID NO: 4761465 - DNA, 25 bp, Homo sapien
cagcggaggtgacctccctcggcag

SEQ ID NO: 4761466 - DNA, 25 bp, Homo sapien
aacgaccagcggaggtgacctccct

SEQ ID NO: 4761467 - DNA, 25 bp, Homo sapien
caagatgcgacttgatatgcaggtc

SEQ ID NO: 4761468 - DNA, 25 bp, Homo sapien
ccagcaagagtgatgctaaggcatt

SEQ ID NO: 4761469 - DNA, 25 bp, Homo sapien
taaggcattgccttccgctgggctg

SEQ ID NO: 4761470 - DNA, 25 bp, Homo sapien
cgtaaaagcagctatcaaatcagca

SEQ ID NO: 4761471 - DNA, 25 bp, Homo sapien
ctgacatatttaatctctctttcaa

SEQ ID NO: 4761472 - DNA, 25 bp, Homo sapien
ctttcaactgttcctccattattct

SEQ ID NO: 4761473 - DNA, 25 bp, Homo sapien
catatttaatctctctttcaactgt

SEQ ID NO: 4761474 - DNA, 25 bp, Homo sapien
tcaactgttcctccattattcttct

SEQ ID NO: 4761475 - DNA, 25 bp, Homo sapien
gacacccattatcccaattcaaaag

SEQ ID NO: 4761476 - DNA, 25 bp, Homo sapien
tcagtctcctcactagggctgtggg

SEQ ID NO: 4761477 - DNA, 25 bp, Homo sapien
gtcagtctcctcactagggctgtgg

SEQ ID NO: 4761478 - DNA, 25 bp, Homo sapien
cattgttctagacacccattatccc

SEQ ID NO: 4761479 - DNA, 25 bp, Homo sapien
aagtctgcttgatacgcgatggatg

SEQ ID NO: 4761480 - DNA, 25 bp, Homo sapien
gcaagggatttaagagcgtaaaata

SEQ ID NO: 4761481 - DNA, 25 bp, Homo sapien
gaatgcaaataatctgtatgaggca

SEQ ID NO: 4761482 - DNA, 25 bp, Homo sapien
cgatggatgtatgagggcagaggga

SEQ ID NO: 4761483 - DNA, 25 bp, Homo sapien
gcacacaggctggattattcctgca

SEQ ID NO: 4761484 - DNA, 25 bp, Homo sapien
aaactatgggtgacttagttgcttg

SEQ ID NO: 4761485 - DNA, 25 bp, Homo sapien
ggattattcctgcatgggctaggga

SEQ ID NO: 4761486 - DNA, 25 bp, Homo sapien
caggtaaaaactatgggtgacttag

SEQ ID NO: 4761487 - DNA, 25 bp, Homo sapien
attgctggaattggagggtaagtaa

SEQ ID NO: 4761488 - DNA, 25 bp, Homo sapien
caatcagacaggagtttcttatttc

SEQ ID NO: 4761489 - DNA, 25 bp, Homo sapien
ggagcctagagaagtgtacatgtgc

SEQ ID NO: 4761490 - DNA, 25 bp, Homo sapien
atcaggagtggactcggagcctaga

SEQ ID NO: 4761491 - DNA, 25 bp, Homo sapien
cttgagacttctagggcttcatctc

SEQ ID NO: 4761492 - DNA, 25 bp, Homo sapien
agacttctagggcttcatctccaag

SEQ ID NO: 4761493 - DNA, 25 bp, Homo sapien
ttgagacttctagggcttcatctcc

SEQ ID NO: 4761494 - DNA, 25 bp, Homo sapien
cttctagggcttcatctccaagggc

SEQ ID NO: 4761495 - DNA, 25 bp, Homo sapien
aaaggaacattcaaacttagacata

SEQ ID NO: 4761496 - DNA, 25 bp, Homo sapien
catgtcctttactgggaggaataac

SEQ ID NO: 4761497 - DNA, 25 bp, Homo sapien
cttgtcactgctcccatgtccttta

SEQ ID NO: 4761498 - DNA, 25 bp, Homo sapien
ggaacattcaaacttagacataaat

SEQ ID NO: 4761499 - DNA, 25 bp, Homo sapien
caactcaaacatcattaagaaattc

SEQ ID NO: 4761500 - DNA, 25 bp, Homo sapien
ctgtcaactcaaacatcattaagaa

SEQ ID NO: 4761501 - DNA, 25 bp, Homo sapien
gtcaactcaaacatcattaagaaat

SEQ ID NO: 4761502 - DNA, 25 bp, Homo sapien
actcaaacatcattaagaaattctg

SEQ ID NO: 4761503 - DNA, 25 bp, Homo sapien
tgtaaacaaccttgatggctctcat

SEQ ID NO: 4761504 - DNA, 25 bp, Homo sapien
tttgtaaacaaccttgatggctctc

SEQ ID NO: 4761505 - DNA, 25 bp, Homo sapien
agtttgtaaacaaccttgatggctc

SEQ ID NO: 4761506 - DNA, 25 bp, Homo sapien
gagtttgtaaacaaccttgatggct

SEQ ID NO: 4761507 - DNA, 25 bp, Homo sapien
ctgctctcggcagttaatgggagga

SEQ ID NO: 4761508 - DNA, 25 bp, Homo sapien
gatccactccataagcagagggctg

SEQ ID NO: 4761509 - DNA, 25 bp, Homo sapien
ttggtgtagcttgggtcacagatcc

SEQ ID NO: 4761510 - DNA, 25 bp, Homo sapien
tactcaggattgatatttcttggag

SEQ ID NO: 4761511 - DNA, 25 bp, Homo sapien
caggtagtcagttatagagatgctc

SEQ ID NO: 4761512 - DNA, 25 bp, Homo sapien
gcgtgtgctgatttataatgcacca

SEQ ID NO: 4761513 - DNA, 25 bp, Homo sapien
tcgctggatttaagcagtgtttggc

SEQ ID NO: 4761514 - DNA, 25 bp, Homo sapien
agttccttcttgttcgctggattta

SEQ ID NO: 4761515 - DNA, 25 bp, Homo sapien
tagaccatatagattgcctggaggg

SEQ ID NO: 4761516 - DNA, 25 bp, Homo sapien
gaaagcaggcagctaaatctccagg

SEQ ID NO: 4761517 - DNA, 25 bp, Homo sapien
taaggcaccactttccgcagtgaac

SEQ ID NO: 4761518 - DNA, 25 bp, Homo sapien
aggaagattgaccacactgctcggg

SEQ ID NO: 4761519 - DNA, 25 bp, Homo sapien
ggaagacaggcagccagagcagcac

SEQ ID NO: 4761520 - DNA, 25 bp, Homo sapien
gaagggaagacaggcagccagagca

SEQ ID NO: 4761521 - DNA, 25 bp, Homo sapien
ttagaagctggagaagggaagacag

SEQ ID NO: 4761522 - DNA, 25 bp, Homo sapien
gagaagggaagacaggcagccagag

SEQ ID NO: 4761523 - DNA, 25 bp, Homo sapien
gagtgcgtgtcggaggagggcttcc

SEQ ID NO: 4761524 - DNA, 25 bp, Homo sapien
cattaatccgttcaatccctaaagc

SEQ ID NO: 4761525 - DNA, 25 bp, Homo sapien
cagctgaactccattaatccgttca

SEQ ID NO: 4761526 - DNA, 25 bp, Homo sapien
agcctggggcctgagtgcgtgtcgg

SEQ ID NO: 4761527 - DNA, 25 bp, Homo sapien
atttcaaaacaatcacatcccattg

SEQ ID NO: 4761528 - DNA, 25 bp, Homo sapien
caatcacatcccattgttcagtgcc

SEQ ID NO: 4761529 - DNA, 25 bp, Homo sapien
catcccattgttcagtgcctttttg

SEQ ID NO: 4761530 - DNA, 25 bp, Homo sapien
aaaacaatcacatcccattgttcag

SEQ ID NO: 4761531 - DNA, 25 bp, Homo sapien
gatgccaaaatcatcagcgaaagaa

SEQ ID NO: 4761532 - DNA, 25 bp, Homo sapien
gaggatgccaaaatcatcagcgaaa

SEQ ID NO: 4761533 - DNA, 25 bp, Homo sapien
aaatcatcagcgaaagaaagtgcat

SEQ ID NO: 4761534 - DNA, 25 bp, Homo sapien
ccaaaatcatcagcgaaagaaagtg

SEQ ID NO: 4761535 - DNA, 25 bp, Homo sapien
ttacagacaagctgcagattatcag

SEQ ID NO: 4761536 - DNA, 25 bp, Homo sapien
cccgcaacaattacagacaagctgc

SEQ ID NO: 4761537 - DNA, 25 bp, Homo sapien
acaattacagacaagctgcagatta

SEQ ID NO: 4761538 - DNA, 25 bp, Homo sapien
cagacaagctgcagattatcagcag

SEQ ID NO: 4761539 - DNA, 25 bp, Homo sapien
catatctgatgcacacaaggctgca

SEQ ID NO: 4761540 - DNA, 25 bp, Homo sapien
ttaagggcgtccaagtgctccgtgg

SEQ ID NO: 4761541 - DNA, 25 bp, Homo sapien
tgcttggagaggagcctcatatctg

SEQ ID NO: 4761542 - DNA, 25 bp, Homo sapien
attattaagggcgtccaagtgctcc

SEQ ID NO: 4761543 - DNA, 25 bp, Homo sapien
aaatgaatgagcatgcccagtggat

SEQ ID NO: 4761544 - DNA, 25 bp, Homo sapien
gacaagtgcgtctttcttcctagag

SEQ ID NO: 4761545 - DNA, 25 bp, Homo sapien
tgatatactagagctgacaagtgcg

SEQ ID NO: 4761546 - DNA, 25 bp, Homo sapien
gcagaggatattaaagtcgggcatt

SEQ ID NO: 4761547 - DNA, 25 bp, Homo sapien
tgggctgctaagttctgccctgtgc

SEQ ID NO: 4761548 - DNA, 25 bp, Homo sapien
cccacatagtttgaagccttgcttg

SEQ ID NO: 4761549 - DNA, 25 bp, Homo sapien
cgcagacacgtgaatgagagatacc

SEQ ID NO: 4761550 - DNA, 25 bp, Homo sapien
gagccaaatagtagatacgcagaca

SEQ ID NO: 4761551 - DNA, 25 bp, Homo sapien
taaactgaatgtctcagagctcctc

SEQ ID NO: 4761552 - DNA, 25 bp, Homo sapien
ggcacaatcatgacctcctttgtgg

SEQ ID NO: 4761553 - DNA, 25 bp, Homo sapien
tgtttaagactgctcatcatctggg

SEQ ID NO: 4761554 - DNA, 25 bp, Homo sapien
tcctttgtggccattagtactgtcc

SEQ ID NO: 4761555 - DNA, 25 bp, Homo sapien
ataggctattgtatctgttgtctgt

SEQ ID NO: 4761556 - DNA, 25 bp, Homo sapien
taggctattgtatctgttgtctgtg

SEQ ID NO: 4761557 - DNA, 25 bp, Homo sapien
aggctattgtatctgttgtctgtga

SEQ ID NO: 4761558 - DNA, 25 bp, Homo sapien
ggctattgtatctgttgtctgtgac

SEQ ID NO: 4761559 - DNA, 25 bp, Homo sapien
cacgcttcaagtctggcagctggaa

SEQ ID NO: 4761560 - DNA, 25 bp, Homo sapien
caaacagtcgcccagttggttcaga

SEQ ID NO: 4761561 - DNA, 25 bp, Homo sapien
tctcttgcgaatgtggaagacacaa

SEQ ID NO: 4761562 - DNA, 25 bp, Homo sapien
catgccttgatgagctgaaacgcca

SEQ ID NO: 4761563 - DNA, 25 bp, Homo sapien
ttattcccctgagctttgtccttca

SEQ ID NO: 4761564 - DNA, 25 bp, Homo sapien
attcccctgagctttgtccttcaga

SEQ ID NO: 4761565 - DNA, 25 bp, Homo sapien
ttcccctgagctttgtccttcagac

SEQ ID NO: 4761566 - DNA, 25 bp, Homo sapien
tattcccctgagctttgtccttcag

SEQ ID NO: 4761567 - DNA, 25 bp, Homo sapien
ttcccgtctctgtccttggccatag

SEQ ID NO: 4761568 - DNA, 25 bp, Homo sapien
tcttcgtttgttccactctgaaaag

SEQ ID NO: 4761569 - DNA, 25 bp, Homo sapien
catttgctggccttaagcttgatgc

SEQ ID NO: 4761570 - DNA, 25 bp, Homo sapien
ttggccataggttcttcctgaagtc

SEQ ID NO: 4761571 - DNA, 25 bp, Homo sapien
cactgaatatgcgtgtgctgctcat

SEQ ID NO: 4761572 - DNA, 25 bp, Homo sapien
gctcatttcccagtccctttgcatt

SEQ ID NO: 4761573 - DNA, 25 bp, Homo sapien
ctttcggcccttaggtagaggtgca

SEQ ID NO: 4761574 - DNA, 25 bp, Homo sapien
taggtagggccatgagcaactttcg

SEQ ID NO: 4761575 - DNA, 25 bp, Homo sapien
aatatctgtgccagaaatacttttc

SEQ ID NO: 4761576 - DNA, 25 bp, Homo sapien
gaaatacttttccactgagttagct

SEQ ID NO: 4761577 - DNA, 25 bp, Homo sapien
atacttttccactgagttagctttc

SEQ ID NO: 4761578 - DNA, 25 bp, Homo sapien
atatctgtgccagaaatacttttcc

SEQ ID NO: 4761579 - DNA, 25 bp, Homo sapien
ttactgagatttttatccccatagg

SEQ ID NO: 4761580 - DNA, 25 bp, Homo sapien
cttcaattttcggaattactgagat

SEQ ID NO: 4761581 - DNA, 25 bp, Homo sapien
aatatggatattggatattctgctg

SEQ ID NO: 4761582 - DNA, 25 bp, Homo sapien
ccataggtgttgtaatttgtgtgaa

SEQ ID NO: 4761583 - DNA, 25 bp, Homo sapien
taaatatttcttatttcctcagaat

SEQ ID NO: 4761584 - DNA, 25 bp, Homo sapien
tatttcttatttcctcagaatacac

SEQ ID NO: 4761585 - DNA, 25 bp, Homo sapien
aatatttcttatttcctcagaatac

SEQ ID NO: 4761586 - DNA, 25 bp, Homo sapien
ttaaatatttcttatttcctcagaa

SEQ ID NO: 4761587 - DNA, 25 bp, Homo sapien
ggtaataaccgttcagcagggccat

SEQ ID NO: 4761588 - DNA, 25 bp, Homo sapien
cagacaggtaataaccgttcagcag

SEQ ID NO: 4761589 - DNA, 25 bp, Homo sapien
gaacagacaggtaataaccgttcag

SEQ ID NO: 4761590 - DNA, 25 bp, Homo sapien
gcatgaacagacaggtaataaccgt

SEQ ID NO: 4761591 - DNA, 25 bp, Homo sapien
tacctcttctaaagactattatcaa

SEQ ID NO: 4761592 - DNA, 25 bp, Homo sapien
tcttctaaagactattatcaaaatg

SEQ ID NO: 4761593 - DNA, 25 bp, Homo sapien
taaagactattatcaaaatggtcat

SEQ ID NO: 4761594 - DNA, 25 bp, Homo sapien
tctaaagactattatcaaaatggtc

SEQ ID NO: 4761595 - DNA, 25 bp, Homo sapien
caagagaggtagtggttctaacgac

SEQ ID NO: 4761596 - DNA, 25 bp, Homo sapien
tctgaaaccagcttgacaagagagg

SEQ ID NO: 4761597 - DNA, 25 bp, Homo sapien
tgagtgtgccaaagagggatttatc

SEQ ID NO: 4761598 - DNA, 25 bp, Homo sapien
ccagcgccgtgctctggtgtcatct

SEQ ID NO: 4761599 - DNA, 25 bp, Homo sapien
ttcgggcctggcatttgtagtacag

SEQ ID NO: 4761600 - DNA, 25 bp, Homo sapien
ttttcgggcctggcatttgtagtac

SEQ ID NO: 4761601 - DNA, 25 bp, Homo sapien
tttcgggcctggcatttgtagtaca

SEQ ID NO: 4761602 - DNA, 25 bp, Homo sapien
cttttcgggcctggcatttgtagta

SEQ ID NO: 4761603 - DNA, 25 bp, Homo sapien
cagaagctcatagtgtttatccggg

SEQ ID NO: 4761604 - DNA, 25 bp, Homo sapien
catatcaggtgtaccaattattagg

SEQ ID NO: 4761605 - DNA, 25 bp, Homo sapien
cgaatgcatgggaggtaacaataac

SEQ ID NO: 4761606 - DNA, 25 bp, Homo sapien
ccataaagacgattataacgaatgc

SEQ ID NO: 4761607 - DNA, 25 bp, Homo sapien
tagtacaggaagggtgtaactaaca

SEQ ID NO: 4761608 - DNA, 25 bp, Homo sapien
agtacaggaagggtgtaactaacat

SEQ ID NO: 4761609 - DNA, 25 bp, Homo sapien
atgggcccgttagcttatttaactg

SEQ ID NO: 4761610 - DNA, 25 bp, Homo sapien
tgggcccgttagcttatttaactga

SEQ ID NO: 4761611 - DNA, 25 bp, Homo sapien
tactttgaataataaagctacattg

SEQ ID NO: 4761612 - DNA, 25 bp, Homo sapien
ttgtttatggtgttgtgtgggccca

SEQ ID NO: 4761613 - DNA, 25 bp, Homo sapien
atggtgttgtgtgggcccatctaga

SEQ ID NO: 4761614 - DNA, 25 bp, Homo sapien
tttatggtgttgtgtgggcccatct

SEQ ID NO: 4761615 - DNA, 25 bp, Homo sapien
tacctaggtcgatggtaaagtcaga

SEQ ID NO: 4761616 - DNA, 25 bp, Homo sapien
tgcgggagcgtctgttgattgttac

SEQ ID NO: 4761617 - DNA, 25 bp, Homo sapien
tgaggtttggcaagggtacgtctac

SEQ ID NO: 4761618 - DNA, 25 bp, Homo sapien
cttgaaattgggtgagcgtgtgtac

SEQ ID NO: 4761619 - DNA, 25 bp, Homo sapien
tataccagcccgaaatattcaatat

SEQ ID NO: 4761620 - DNA, 25 bp, Homo sapien
gtttatggttattataccagcccga

SEQ ID NO: 4761621 - DNA, 25 bp, Homo sapien
gttattataccagcccgaaatattc

SEQ ID NO: 4761622 - DNA, 25 bp, Homo sapien
gaacagtttatggttattataccag

SEQ ID NO: 4761623 - DNA, 25 bp, Homo sapien
ctacaattgatttggcaagaatcaa

SEQ ID NO: 4761624 - DNA, 25 bp, Homo sapien
tggcaagaatcaattctgagtttgt

SEQ ID NO: 4761625 - DNA, 25 bp, Homo sapien
tttggcaagaatcaattctgagttt

SEQ ID NO: 4761626 - DNA, 25 bp, Homo sapien
gatttggcaagaatcaattctgagt

SEQ ID NO: 4761627 - DNA, 25 bp, Homo sapien
tggtagtcaccagtccatcgagatg

SEQ ID NO: 4761628 - DNA, 25 bp, Homo sapien
atagggtggtagtcaccagtccatc

SEQ ID NO: 4761629 - DNA, 25 bp, Homo sapien
tagtcaccagtccatcgagatgtct

SEQ ID NO: 4761630 - DNA, 25 bp, Homo sapien
ggtggtagtcaccagtccatcgaga

SEQ ID NO: 4761631 - DNA, 25 bp, Homo sapien
aatatagctgctggcgttttaggct

SEQ ID NO: 4761632 - DNA, 25 bp, Homo sapien
gaaaatatagctgctggcgttttag

SEQ ID NO: 4761633 - DNA, 25 bp, Homo sapien
atagctgctggcgttttaggctcaa

SEQ ID NO: 4761634 - DNA, 25 bp, Homo sapien
gctgctggcgttttaggctcaattt

SEQ ID NO: 4761635 - DNA, 25 bp, Homo sapien
atgcaaagcaaaagcgtaggacgta

SEQ ID NO: 4761636 - DNA, 25 bp, Homo sapien
gcaaagcaaaagcgtaggacgtaaa

SEQ ID NO: 4761637 - DNA, 25 bp, Homo sapien
tgcaaagcaaaagcgtaggacgtaa

SEQ ID NO: 4761638 - DNA, 25 bp, Homo sapien
ggttgctggagaagcagcgcttgac

SEQ ID NO: 4761639 - DNA, 25 bp, Homo sapien
cgatggttgctggagaagcagcgct

SEQ ID NO: 4761640 - DNA, 25 bp, Homo sapien
atggttgctggagaagcagcgcttg

SEQ ID NO: 4761641 - DNA, 25 bp, Homo sapien
cccgatggttgctggagaagcagcg

SEQ ID NO: 4761642 - DNA, 25 bp, Homo sapien
caccttggccctgcacattagggtg

SEQ ID NO: 4761643 - DNA, 25 bp, Homo sapien
ctaatctgcctttcgagttcttggg

SEQ ID NO: 4761644 - DNA, 25 bp, Homo sapien
tgctcctagcactttgagcttcaag

SEQ ID NO: 4761645 - DNA, 25 bp, Homo sapien
tggctgtaggagacactgtgctcct

SEQ ID NO: 4761646 - DNA, 25 bp, Homo sapien
ggaggcgagaacgtgtcgctgccat

SEQ ID NO: 4761647 - DNA, 25 bp, Homo sapien
gacagggaggcgagaacgtgtcgct

SEQ ID NO: 4761648 - DNA, 25 bp, Homo sapien
gggaggcgagaacgtgtcgctgcca

SEQ ID NO: 4761649 - DNA, 25 bp, Homo sapien
cagggaggcgagaacgtgtcgctgc

SEQ ID NO: 4761650 - DNA, 25 bp, Homo sapien
tgctggttaggatttccgtaaccgc

SEQ ID NO: 4761651 - DNA, 25 bp, Homo sapien
gcagatgtgcattgtgaaacaggaa

SEQ ID NO: 4761652 - DNA, 25 bp, Homo sapien
taaccgctagaaggtgcattttgca

SEQ ID NO: 4761653 - DNA, 25 bp, Homo sapien
tttccgtaaccgctagaaggtgcat

SEQ ID NO: 4761654 - DNA, 25 bp, Homo sapien
agaaaggatctagggcttctggctc

SEQ ID NO: 4761655 - DNA, 25 bp, Homo sapien
catcctggatataatgtaactgagt

SEQ ID NO: 4761656 - DNA, 25 bp, Homo sapien
agggcccagaaaggatctagggctt

SEQ ID NO: 4761657 - DNA, 25 bp, Homo sapien
taactgagtcaatgccaaagcaggg

SEQ ID NO: 4761658 - DNA, 25 bp, Homo sapien
tgtttgtgaaataggtagacccagc

SEQ ID NO: 4761659 - DNA, 25 bp, Homo sapien
catgaatgatggcttgaccgtgtgc

SEQ ID NO: 4761660 - DNA, 25 bp, Homo sapien
tatcttttccagcacccaataggga

SEQ ID NO: 4761661 - DNA, 25 bp, Homo sapien
ttgagagactacaggaagatccgtg

SEQ ID NO: 4761662 - DNA, 25 bp, Homo sapien
tcagaattagcaatgagagcacagt

SEQ ID NO: 4761663 - DNA, 25 bp, Homo sapien
taaaatcactcaagcttgccttagg

SEQ ID NO: 4761664 - DNA, 25 bp, Homo sapien
taggagcagttcatgtctgcagccc

SEQ ID NO: 4761665 - DNA, 25 bp, Homo sapien
tcaatagtagtaagttcatgatagc

SEQ ID NO: 4761666 - DNA, 25 bp, Homo sapien
tcctggtcatgcatgtagtggtaca

SEQ ID NO: 4761667 - DNA, 25 bp, Homo sapien
cacgaagaatatgagttccgattga

SEQ ID NO: 4761668 - DNA, 25 bp, Homo sapien
gatggaggacgccaacacgaagaat

SEQ ID NO: 4761669 - DNA, 25 bp, Homo sapien
tgaggttggcagaatgggctgatga

SEQ ID NO: 4761670 - DNA, 25 bp, Homo sapien
cagaccacagtgttgacagaatacc

SEQ ID NO: 4761671 - DNA, 25 bp, Homo sapien
ttttgggatgcgagacaatggaaca

SEQ ID NO: 4761672 - DNA, 25 bp, Homo sapien
gagaagaccttagatgtctactaaa

SEQ ID NO: 4761673 - DNA, 25 bp, Homo sapien
gaacatatgtaaagctccagaccac

SEQ ID NO: 4761674 - DNA, 25 bp, Homo sapien
tggatgacagtagttaggacggtca

SEQ ID NO: 4761675 - DNA, 25 bp, Homo sapien
gcacagcttagcagattggatgaca

SEQ ID NO: 4761676 - DNA, 25 bp, Homo sapien
ttacagaaagacatatttcctgatg

SEQ ID NO: 4761677 - DNA, 25 bp, Homo sapien
tccttgctgccacaacaaataagtt

SEQ ID NO: 4761678 - DNA, 25 bp, Homo sapien
ttgtaggggcacgaccagaacagct

SEQ ID NO: 4761679 - DNA, 25 bp, Homo sapien
tattttcccccagtgcgctttcaat

SEQ ID NO: 4761680 - DNA, 25 bp, Homo sapien
tcaatctctatgtgtttttccccta

SEQ ID NO: 4761681 - DNA, 25 bp, Homo sapien
cctccagtgacttgaatactgaggg

SEQ ID NO: 4761682 - DNA, 25 bp, Homo sapien
agcttcacaaacatgtagagccctt

SEQ ID NO: 4761683 - DNA, 25 bp, Homo sapien
acatgtagagcccttctgcctttga

SEQ ID NO: 4761684 - DNA, 25 bp, Homo sapien
caacagcctgtccttcgacatggcc

SEQ ID NO: 4761685 - DNA, 25 bp, Homo sapien
tggcccggggaatatgtacaagctt

SEQ ID NO: 4761686 - DNA, 25 bp, Homo sapien
tcaagattctggtattcgagaacat

SEQ ID NO: 4761687 - DNA, 25 bp, Homo sapien
atttaagtcaagattctggtattcg

SEQ ID NO: 4761688 - DNA, 25 bp, Homo sapien
ttctggtattcgagaacattcctgt

SEQ ID NO: 4761689 - DNA, 25 bp, Homo sapien
taagtcaagattctggtattcgaga

SEQ ID NO: 4761690 - DNA, 25 bp, Homo sapien
tctttttaaacttatcagccacctg

SEQ ID NO: 4761691 - DNA, 25 bp, Homo sapien
ttttaaacttatcagccacctgcac

SEQ ID NO: 4761692 - DNA, 25 bp, Homo sapien
cttctctttttaaacttatcagcca

SEQ ID NO: 4761693 - DNA, 25 bp, Homo sapien
tctctttttaaacttatcagccacc

SEQ ID NO: 4761694 - DNA, 25 bp, Homo sapien
ttgtcccaagacatgatcagtttcc

SEQ ID NO: 4761695 - DNA, 25 bp, Homo sapien
tctttgtcccaagacatgatcagtt

SEQ ID NO: 4761696 - DNA, 25 bp, Homo sapien
tttgtcccaagacatgatcagtttc

SEQ ID NO: 4761697 - DNA, 25 bp, Homo sapien
ttctttgtcccaagacatgatcagt

SEQ ID NO: 4761698 - DNA, 25 bp, Homo sapien
cattgaaagcgtagggtctggttgc

SEQ ID NO: 4761699 - DNA, 25 bp, Homo sapien
tatctggagggtcaggattctcagc

SEQ ID NO: 4761700 - DNA, 25 bp, Homo sapien
tgggttgcctctgaccccagtagct

SEQ ID NO: 4761701 - DNA, 25 bp, Homo sapien
tcctagttgatggtcctcggagccc

SEQ ID NO: 4761702 - DNA, 25 bp, Homo sapien
tctgagcatgggtatcttggcacca

SEQ ID NO: 4761703 - DNA, 25 bp, Homo sapien
ctagctggagattgcaatggaagca

SEQ ID NO: 4761704 - DNA, 25 bp, Homo sapien
attcttcatccgcatgcacagcctg

SEQ ID NO: 4761705 - DNA, 25 bp, Homo sapien
tggcaccactaccaagtgatgtttg

SEQ ID NO: 4761706 - DNA, 25 bp, Homo sapien
gattgccattataattcccatggca

SEQ ID NO: 4761707 - DNA, 25 bp, Homo sapien
cattaaccaacttttcaattgcagc

SEQ ID NO: 4761708 - DNA, 25 bp, Homo sapien
ccatggcacttctccacagaggtaa

SEQ ID NO: 4761709 - DNA, 25 bp, Homo sapien
ggccataatccagctataacagtaa

SEQ ID NO: 4761710 - DNA, 25 bp, Homo sapien
ggtctgctaatgggccgtagacaac

SEQ ID NO: 4761711 - DNA, 25 bp, Homo sapien
tctgctaatgggccgtagacaacca

SEQ ID NO: 4761712 - DNA, 25 bp, Homo sapien
tgctaatgggccgtagacaaccagg

SEQ ID NO: 4761713 - DNA, 25 bp, Homo sapien
ctaatgggccgtagacaaccagggt

SEQ ID NO: 4761714 - DNA, 25 bp, Homo sapien
cagaaccctgctccaatctcagtag

SEQ ID NO: 4761715 - DNA, 25 bp, Homo sapien
ccaaaatggcatgcaactagtggcc

SEQ ID NO: 4761716 - DNA, 25 bp, Homo sapien
gagtcattccgtagggatctatctt

SEQ ID NO: 4761717 - DNA, 25 bp, Homo sapien
gatctatcttcctactttggtccag

SEQ ID NO: 4761718 - DNA, 25 bp, Homo sapien
tgtttggtgcatgttgacgagatca

SEQ ID NO: 4761719 - DNA, 25 bp, Homo sapien
gatgccctgcgtgtgtttggtgcat

SEQ ID NO: 4761720 - DNA, 25 bp, Homo sapien
gttgacgagatcaaatgcactttct

SEQ ID NO: 4761721 - DNA, 25 bp, Homo sapien
tcagtagcgtggatgccctgcgtgt

SEQ ID NO: 4761722 - DNA, 25 bp, Homo sapien
catggactctgatttgctttataaa

SEQ ID NO: 4761723 - DNA, 25 bp, Homo sapien
atggactctgatttgctttataaac

SEQ ID NO: 4761724 - DNA, 25 bp, Homo sapien
tcatggactctgatttgctttataa

SEQ ID NO: 4761725 - DNA, 25 bp, Homo sapien
agctcagcacatctgtggaataaat

SEQ ID NO: 4761726 - DNA, 25 bp, Homo sapien
cagctcagcacatctgtggaataaa

SEQ ID NO: 4761727 - DNA, 25 bp, Homo sapien
tcagctcagcacatctgtggaataa

SEQ ID NO: 4761728 - DNA, 25 bp, Homo sapien
tttagcagaagcctaacatctaatg

SEQ ID NO: 4761729 - DNA, 25 bp, Homo sapien
atctaatggtttagtccagttaaat

SEQ ID NO: 4761730 - DNA, 25 bp, Homo sapien
tacttttagcagaagcctaacatct

SEQ ID NO: 4761731 - DNA, 25 bp, Homo sapien
cagaagcctaacatctaatggttta

SEQ ID NO: 4761732 - DNA, 25 bp, Homo sapien
tctggcatctcactagtgaacacac

SEQ ID NO: 4761733 - DNA, 25 bp, Homo sapien
tacaggagggcactttgtgaacacc

SEQ ID NO: 4761734 - DNA, 25 bp, Homo sapien
ttgagttacattctttcctggttcc

SEQ ID NO: 4761735 - DNA, 25 bp, Homo sapien
cccttccttgatggagcgttacaaa

SEQ ID NO: 4761736 - DNA, 25 bp, Homo sapien
tgtgaacaccctcatgtacatagtg

SEQ ID NO: 4761737 - DNA, 25 bp, Homo sapien
tagcttccagcattaacacctcgaa

SEQ ID NO: 4761738 - DNA, 25 bp, Homo sapien
ctctgtagcttccagcattaacacc

SEQ ID NO: 4761739 - DNA, 25 bp, Homo sapien
gcattaacacctcgaatgatgactt

SEQ ID NO: 4761740 - DNA, 25 bp, Homo sapien
cgaatgatgacttggagatgttaag

SEQ ID NO: 4761741 - DNA, 25 bp, Homo sapien
ccattgtttggctatgtttgctaca

SEQ ID NO: 4761742 - DNA, 25 bp, Homo sapien
ccagccttcatatctaaagagctcg

SEQ ID NO: 4761743 - DNA, 25 bp, Homo sapien
catctggtctcagttgtttgacggg

SEQ ID NO: 4761744 - DNA, 25 bp, Homo sapien
cattccgtcacttcatctggtctca

SEQ ID NO: 4761745 - DNA, 25 bp, Homo sapien
atccattgtccattaggtgaattac

SEQ ID NO: 4761746 - DNA, 25 bp, Homo sapien
ttacttagccaagaatggaatccat

SEQ ID NO: 4761747 - DNA, 25 bp, Homo sapien
aagaaccaatttaatgtccctggag

SEQ ID NO: 4761748 - DNA, 25 bp, Homo sapien
aatttaatgtccctggagttacagc

SEQ ID NO: 4761749 - DNA, 25 bp, Homo sapien
ggttccccactgtaagaatcacttc

SEQ ID NO: 4761750 - DNA, 25 bp, Homo sapien
ttgccattgcgcctttcctgggcca

SEQ ID NO: 4761751 - DNA, 25 bp, Homo sapien
tgcgcctttcctgggccatgcagtt

SEQ ID NO: 4761752 - DNA, 25 bp, Homo sapien
tgtttctttgccattgcgcctttcc

SEQ ID NO: 4761753 - DNA, 25 bp, Homo sapien
ttctgctggtgtaatgcctcagaac

SEQ ID NO: 4761754 - DNA, 25 bp, Homo sapien
tgtggcacgattccgtcgagctgct

SEQ ID NO: 4761755 - DNA, 25 bp, Homo sapien
gcacgattccgtcgagctgctccat

SEQ ID NO: 4761756 - DNA, 25 bp, Homo sapien
caagtgtggcacgattccgtcgagc

SEQ ID NO: 4761757 - DNA, 25 bp, Homo sapien
tgactccaagtgtggcacgattccg

SEQ ID NO: 4761758 - DNA, 25 bp, Homo sapien
tgtgcatctcggctcagtgagcatc

SEQ ID NO: 4761759 - DNA, 25 bp, Homo sapien
gtcgacctccgaagactggactgtg

SEQ ID NO: 4761760 - DNA, 25 bp, Homo sapien
tttctcatcgattccaggtcgacct

SEQ ID NO: 4761761 - DNA, 25 bp, Homo sapien
gactggactgtgcatctcggctcag

SEQ ID NO: 4761762 - DNA, 25 bp, Homo sapien
tccagctcctctcagttcttccaag

SEQ ID NO: 4761763 - DNA, 25 bp, Homo sapien
gctgagaccactacttgtccagctc

SEQ ID NO: 4761764 - DNA, 25 bp, Homo sapien
tgtccagctcctctcagttcttcca

SEQ ID NO: 4761765 - DNA, 25 bp, Homo sapien
cagctcctctcagttcttccaagcc

SEQ ID NO: 4761766 - DNA, 25 bp, Homo sapien
gcccagatgtctgccatggtcttgg

SEQ ID NO: 4761767 - DNA, 25 bp, Homo sapien
tgggcccagatgtctgccatggtct

SEQ ID NO: 4761768 - DNA, 25 bp, Homo sapien
ttgggcccagatgtctgccatggtc

SEQ ID NO: 4761769 - DNA, 25 bp, Homo sapien
cagatgtctgccatggtcttggcga

SEQ ID NO: 4761770 - DNA, 25 bp, Homo sapien
caatctgagcttgtgggccttttat

SEQ ID NO: 4761771 - DNA, 25 bp, Homo sapien
tcttcatgaaagagctcctccttga

SEQ ID NO: 4761772 - DNA, 25 bp, Homo sapien
tgagagcctcgatctgtgtctccac

SEQ ID NO: 4761773 - DNA, 25 bp, Homo sapien
tatttcctattcgtggttcttcttc

SEQ ID NO: 4761774 - DNA, 25 bp, Homo sapien
gtgtcatcgatgaccttgtggagcc

SEQ ID NO: 4761775 - DNA, 25 bp, Homo sapien
gatgtctttctccacagactggtgc

SEQ ID NO: 4761776 - DNA, 25 bp, Homo sapien
ggatgtctttctccacagactggtg

SEQ ID NO: 4761777 - DNA, 25 bp, Homo sapien
gtctttctccacagactggtgcatg

SEQ ID NO: 4761778 - DNA, 25 bp, Homo sapien
ctacagtcatcagcagcaagatggg

SEQ ID NO: 4761779 - DNA, 25 bp, Homo sapien
cagtcatcagcagcaagatgggcat

SEQ ID NO: 4761780 - DNA, 25 bp, Homo sapien
atcagcagcaagatgggcattgtct

SEQ ID NO: 4761781 - DNA, 25 bp, Homo sapien
cagcagcaagatgggcattgtctat

SEQ ID NO: 4761782 - DNA, 25 bp, Homo sapien
tatttgcgaagatctgagccctcag

SEQ ID NO: 4761783 - DNA, 25 bp, Homo sapien
ctgcagaacgacatgggcattgtcc

SEQ ID NO: 4761784 - DNA, 25 bp, Homo sapien
tctgagccctcaggtactcagtggt

SEQ ID NO: 4761785 - DNA, 25 bp, Homo sapien
agaacgacatgggcattgtccacag

SEQ ID NO: 4761786 - DNA, 25 bp, Homo sapien
tctagtctctgatctagggtctctt

SEQ ID NO: 4761787 - DNA, 25 bp, Homo sapien
tagggggccaggcggtcgttcaggc

SEQ ID NO: 4761788 - DNA, 25 bp, Homo sapien
ctgtccaggtagggggccaggcggt

SEQ ID NO: 4761789 - DNA, 25 bp, Homo sapien
ggcggtcgttcaggcttttcatggt

SEQ ID NO: 4761790 - DNA, 25 bp, Homo sapien
gccaggcggtcgttcaggcttttca

SEQ ID NO: 4761791 - DNA, 25 bp, Homo sapien
atctgggaatccaaacccctggcgc

SEQ ID NO: 4761792 - DNA, 25 bp, Homo sapien
atccaaacccctggcgcccgcatag

SEQ ID NO: 4761793 - DNA, 25 bp, Homo sapien
gagcaggacacggatatctgggaat

SEQ ID NO: 4761794 - DNA, 25 bp, Homo sapien
agcaggacacggatatctgggaatc

SEQ ID NO: 4761795 - DNA, 25 bp, Homo sapien
aggccgggcgccgtagctgggcgcc

SEQ ID NO: 4761796 - DNA, 25 bp, Homo sapien
acagagcccagggaccggtagttgg

SEQ ID NO: 4761797 - DNA, 25 bp, Homo sapien
tggacagagcccagggaccggtagt

SEQ ID NO: 4761798 - DNA, 25 bp, Homo sapien
gcgcctggacagagcccagggaccg

SEQ ID NO: 4761799 - DNA, 25 bp, Homo sapien
ggctttgccgacgactcacaaggct

SEQ ID NO: 4761800 - DNA, 25 bp, Homo sapien
tttgccgacgactcacaaggctctt

SEQ ID NO: 4761801 - DNA, 25 bp, Homo sapien
gacgactcacaaggctcttttgctc

SEQ ID NO: 4761802 - DNA, 25 bp, Homo sapien
gccgacgactcacaaggctcttttg

SEQ ID NO: 4761803 - DNA, 25 bp, Homo sapien
aataacaatcacttcagcaagcatc

SEQ ID NO: 4761804 - DNA, 25 bp, Homo sapien
ataacaatcacttcagcaagcatct

SEQ ID NO: 4761805 - DNA, 25 bp, Homo sapien
aaataacaatcacttcagcaagcat

SEQ ID NO: 4761806 - DNA, 25 bp, Homo sapien
tctctctttgataccatttggctgc

SEQ ID NO: 4761807 - DNA, 25 bp, Homo sapien
ttttatccatttcaaggcttctctc

SEQ ID NO: 4761808 - DNA, 25 bp, Homo sapien
gcttctctctttgataccatttggc

SEQ ID NO: 4761809 - DNA, 25 bp, Homo sapien
tcagtttttatccatttcaaggctt

SEQ ID NO: 4761810 - DNA, 25 bp, Homo sapien
ctcccttgcctttctgcccacccct

SEQ ID NO: 4761811 - DNA, 25 bp, Homo sapien
tctcccttgcctttctgcccacccc

SEQ ID NO: 4761812 - DNA, 25 bp, Homo sapien
gaatatgttttacagctcatctcct

SEQ ID NO: 4761813 - DNA, 25 bp, Homo sapien
cacacgtccctcttgtgaatatgtt

SEQ ID NO: 4761814 - DNA, 25 bp, Homo sapien
tactcaattcttacggttggagtcc

SEQ ID NO: 4761815 - DNA, 25 bp, Homo sapien
gtctgggttcttcggaatggtcact

SEQ ID NO: 4761816 - DNA, 25 bp, Homo sapien
tggatctcctgggataatgtctccc

SEQ ID NO: 4761817 - DNA, 25 bp, Homo sapien
gaatttatgcttttatcaaggcttg

SEQ ID NO: 4761818 - DNA, 25 bp, Homo sapien
ttcccacactcacctcaaaagagct

SEQ ID NO: 4761819 - DNA, 25 bp, Homo sapien
ttgaaaagggtctgtcctcaaacat

SEQ ID NO: 4761820 - DNA, 25 bp, Homo sapien
agctgccctcgaatcagagaagctc

SEQ ID NO: 4761821 - DNA, 25 bp, Homo sapien
cttctgatttagactgttcagctgc

SEQ ID NO: 4761822 - DNA, 25 bp, Homo sapien
ctgatttagactgttcagctgccct

SEQ ID NO: 4761823 - DNA, 25 bp, Homo sapien
tctgatttagactgttcagctgccc

SEQ ID NO: 4761824 - DNA, 25 bp, Homo sapien
tttcacttcagctgccagtccctct

SEQ ID NO: 4761825 - DNA, 25 bp, Homo sapien
tttctttcacttcagctgccagtcc

SEQ ID NO: 4761826 - DNA, 25 bp, Homo sapien
acttcagctgccagtccctcttctc

SEQ ID NO: 4761827 - DNA, 25 bp, Homo sapien
caactttctttcacttcagctgcca

SEQ ID NO: 4761828 - DNA, 25 bp, Homo sapien
tgggtcaagcctcaactctactact

SEQ ID NO: 4761829 - DNA, 25 bp, Homo sapien
ttactgggtcaagcctcaactctac

SEQ ID NO: 4761830 - DNA, 25 bp, Homo sapien
tctattactgggtcaagcctcaact

SEQ ID NO: 4761831 - DNA, 25 bp, Homo sapien
tcaaaatctattactgggtcaagcc

SEQ ID NO: 4761832 - DNA, 25 bp, Homo sapien
cataattgatactgaacatatgagg

SEQ ID NO: 4761833 - DNA, 25 bp, Homo sapien
gagattgttcatgttctcgttgttc

SEQ ID NO: 4761834 - DNA, 25 bp, Homo sapien
tggcaaaactaattggataatggag

SEQ ID NO: 4761835 - DNA, 25 bp, Homo sapien
tttccaggttgacaaacagaattgc

SEQ ID NO: 4761836 - DNA, 25 bp, Homo sapien
tccacatcatgagaatccaggattc

SEQ ID NO: 4761837 - DNA, 25 bp, Homo sapien
gaaaagctatcatttctaactccaa

SEQ ID NO: 4761838 - DNA, 25 bp, Homo sapien
agtccaacagaaaagctatcatttc

SEQ ID NO: 4761839 - DNA, 25 bp, Homo sapien
cagttccatccacatcatgagaatc

SEQ ID NO: 4761840 - DNA, 25 bp, Homo sapien
tgtgctgtaccctctccatccgatg

SEQ ID NO: 4761841 - DNA, 25 bp, Homo sapien
taccctctccatccgatgtggattt

SEQ ID NO: 4761842 - DNA, 25 bp, Homo sapien
ttgatattgatgtactgagaactgc

SEQ ID NO: 4761843 - DNA, 25 bp, Homo sapien
gatattgatgtactgagaactgcgt

SEQ ID NO: 4761844 - DNA, 25 bp, Homo sapien
tattagaccacttgctcacatcatc

SEQ ID NO: 4761845 - DNA, 25 bp, Homo sapien
gagttctgaggaattattagaccac

SEQ ID NO: 4761846 - DNA, 25 bp, Homo sapien
gaaaaagagttctgaggaattatta

SEQ ID NO: 4761847 - DNA, 25 bp, Homo sapien
ggaattattagaccacttgctcaca

SEQ ID NO: 4761848 - DNA, 25 bp, Homo sapien
tgttagaatgttggcagttctgaga

SEQ ID NO: 4761849 - DNA, 25 bp, Homo sapien
ctctggtgccagctggtgttagaat

SEQ ID NO: 4761850 - DNA, 25 bp, Homo sapien
tattcacagactgagtgtttaggat

SEQ ID NO: 4761851 - DNA, 25 bp, Homo sapien
atattcacagactgagtgtttagga

SEQ ID NO: 4761852 - DNA, 25 bp, Homo sapien
attcattccgactatgtctttgctc

SEQ ID NO: 4761853 - DNA, 25 bp, Homo sapien
cattccgactatgtctttgctcctt

SEQ ID NO: 4761854 - DNA, 25 bp, Homo sapien
cttcccattcattccgactatgtct

SEQ ID NO: 4761855 - DNA, 25 bp, Homo sapien
ttcccattcattccgactatgtctt

SEQ ID NO: 4761856 - DNA, 25 bp, Homo sapien
caaaagcttgaagcaaggtacttcc

SEQ ID NO: 4761857 - DNA, 25 bp, Homo sapien
tcagagctataaattcgttgggtca

SEQ ID NO: 4761858 - DNA, 25 bp, Homo sapien
gtaccagatgccagacaaaagcttg

SEQ ID NO: 4761859 - DNA, 25 bp, Homo sapien
taattgttccttaagtcgcattggt

SEQ ID NO: 4761860 - DNA, 25 bp, Homo sapien
gctgctctcagatagtcaggctgca

SEQ ID NO: 4761861 - DNA, 25 bp, Homo sapien
caggctgcagattagagaggcttcc

SEQ ID NO: 4761862 - DNA, 25 bp, Homo sapien
aacacatatgctttcccatgcgcag

SEQ ID NO: 4761863 - DNA, 25 bp, Homo sapien
ccaggattcgagggctgctctcaga

SEQ ID NO: 4761864 - DNA, 25 bp, Homo sapien
gagaaggtctgaggttgtatttttc

SEQ ID NO: 4761865 - DNA, 25 bp, Homo sapien
gaccaagtgtgcaaaataggtaatg

SEQ ID NO: 4761866 - DNA, 25 bp, Homo sapien
agcgaccgggctttatcatacttga

SEQ ID NO: 4761867 - DNA, 25 bp, Homo sapien
acacttctgatcaagatggcctgag

SEQ ID NO: 4761868 - DNA, 25 bp, Homo sapien
aacttgtccttctaggctcctggaa

SEQ ID NO: 4761869 - DNA, 25 bp, Homo sapien
taaagctaagatggcctaagaagcc

SEQ ID NO: 4761870 - DNA, 25 bp, Homo sapien
gcaaatgcaatcactgccctaggat

SEQ ID NO: 4761871 - DNA, 25 bp, Homo sapien
gagcagactctctctgtagccgtaa

SEQ ID NO: 4761872 - DNA, 25 bp, Homo sapien
cacctggtgatgccctcactctgcc

SEQ ID NO: 4761873 - DNA, 25 bp, Homo sapien
acctggtgatgccctcactctgccc

SEQ ID NO: 4761874 - DNA, 25 bp, Homo sapien
tagtagtaagtaccccagacctgct

SEQ ID NO: 4761875 - DNA, 25 bp, Homo sapien
tatcccgggaaggaataggcaactc

SEQ ID NO: 4761876 - DNA, 25 bp, Homo sapien
tggcccacctggatacacggaatca

SEQ ID NO: 4761877 - DNA, 25 bp, Homo sapien
tcagtagtgcagtgtgctatcccgg

SEQ ID NO: 4761878 - DNA, 25 bp, Homo sapien
ctggaactggactctagattaaaat

SEQ ID NO: 4761879 - DNA, 25 bp, Homo sapien
tttccatcatgccttccttgattat

SEQ ID NO: 4761880 - DNA, 25 bp, Homo sapien
tctcaccttactgagcctcaatgtc

SEQ ID NO: 4761881 - DNA, 25 bp, Homo sapien
gaaatgacccttatattcttaaagc

SEQ ID NO: 4761882 - DNA, 25 bp, Homo sapien
tacatgtgaatggtggatgctcaat

SEQ ID NO: 4761883 - DNA, 25 bp, Homo sapien
tggtataggtttagcccaagtagcc

SEQ ID NO: 4761884 - DNA, 25 bp, Homo sapien
taaactccttgaggttaggcattgt

SEQ ID NO: 4761885 - DNA, 25 bp, Homo sapien
tctctctgagtagtgtgtaaactcc

SEQ ID NO: 4761886 - DNA, 25 bp, Homo sapien
ctagtaaatgcaagtcgaggtcatt

SEQ ID NO: 4761887 - DNA, 25 bp, Homo sapien
tgtaattcagtctctctactttggg

SEQ ID NO: 4761888 - DNA, 25 bp, Homo sapien
taaatgcaagtcgaggtcattgctg

SEQ ID NO: 4761889 - DNA, 25 bp, Homo sapien
tcgaggtcattgctgtaattcagtc

SEQ ID NO: 4761890 - DNA, 25 bp, Homo sapien
gtgaaaacgtagtttcctttgcatg

SEQ ID NO: 4761891 - DNA, 25 bp, Homo sapien
tggtcccgctgatgataaaactgaa

SEQ ID NO: 4761892 - DNA, 25 bp, Homo sapien
tctccaaccatgtgttgtgaaaacg

SEQ ID NO: 4761893 - DNA, 25 bp, Homo sapien
ttccttcttcgagccccaccactag

SEQ ID NO: 4761894 - DNA, 25 bp, Homo sapien
ttatacatgaggattggaggattag

SEQ ID NO: 4761895 - DNA, 25 bp, Homo sapien
gttgagcacaggattatacatgagg

SEQ ID NO: 4761896 - DNA, 25 bp, Homo sapien
tcaagaaacatttgagttgagcaca

SEQ ID NO: 4761897 - DNA, 25 bp, Homo sapien
attggaggattaggagacatggcat

SEQ ID NO: 4761898 - DNA, 25 bp, Homo sapien
ttcaggctccctctgattggataaa

SEQ ID NO: 4761899 - DNA, 25 bp, Homo sapien
ctgtaccgccgtccttgggggatca

SEQ ID NO: 4761900 - DNA, 25 bp, Homo sapien
ctccctgttgtctggtgcttcattc

SEQ ID NO: 4761901 - DNA, 25 bp, Homo sapien
cctgttgtctggtgcttcattcccc

SEQ ID NO: 4761902 - DNA, 25 bp, Homo sapien
tgttgtctggtgcttcattccccat

SEQ ID NO: 4761903 - DNA, 25 bp, Homo sapien
aagcagttagcaagccacagcttcc

SEQ ID NO: 4761904 - DNA, 25 bp, Homo sapien
tagcaagccacagcttccggtactg

SEQ ID NO: 4761905 - DNA, 25 bp, Homo sapien
cagttagcaagccacagcttccggt

SEQ ID NO: 4761906 - DNA, 25 bp, Homo sapien
caagccacagcttccggtactggtt

SEQ ID NO: 4761907 - DNA, 25 bp, Homo sapien
tctaaagccttttccctccaaagca

SEQ ID NO: 4761908 - DNA, 25 bp, Homo sapien
tcagggctgaaccttctcagcttcc

SEQ ID NO: 4761909 - DNA, 25 bp, Homo sapien
gcttccctggaataagcttctaaag

SEQ ID NO: 4761910 - DNA, 25 bp, Homo sapien
ggctgaaccttctcagcttccctgg

SEQ ID NO: 4761911 - DNA, 25 bp, Homo sapien
tgcacgtctttcttcggtatattaa

SEQ ID NO: 4761912 - DNA, 25 bp, Homo sapien
gcacgtctttcttcggtatattaat

SEQ ID NO: 4761913 - DNA, 25 bp, Homo sapien
acgtctttcttcggtatattaatgg

SEQ ID NO: 4761914 - DNA, 25 bp, Homo sapien
gtctttcttcggtatattaatggaa

SEQ ID NO: 4761915 - DNA, 25 bp, Homo sapien
ttctttccctgaatttttattggca

SEQ ID NO: 4761916 - DNA, 25 bp, Homo sapien
tccctgaatttttattggcaggcat

SEQ ID NO: 4761917 - DNA, 25 bp, Homo sapien
tctttccctgaatttttattggcag

SEQ ID NO: 4761918 - DNA, 25 bp, Homo sapien
tttccctgaatttttattggcaggc

SEQ ID NO: 4761919 - DNA, 25 bp, Homo sapien
cggttgcgacatcccgtgcacagct

SEQ ID NO: 4761920 - DNA, 25 bp, Homo sapien
tccagttccggaaggcggttgcgac

SEQ ID NO: 4761921 - DNA, 25 bp, Homo sapien
aagagcggcgtacgccctggatgtc

SEQ ID NO: 4761922 - DNA, 25 bp, Homo sapien
cttcaaaatattggtgcgggaaagg

SEQ ID NO: 4761923 - DNA, 25 bp, Homo sapien
caatcgcacgatgggatggcacaga

SEQ ID NO: 4761924 - DNA, 25 bp, Homo sapien
atggcacagacagcgagcacagagt

SEQ ID NO: 4761925 - DNA, 25 bp, Homo sapien
tgccaatcgcacgatgggatggcac

SEQ ID NO: 4761926 - DNA, 25 bp, Homo sapien
ctgcggtgccaatcgcacgatggga

SEQ ID NO: 4761927 - DNA, 25 bp, Homo sapien
gcataaggccgggaggagaaaacca

SEQ ID NO: 4761928 - DNA, 25 bp, Homo sapien
gagcataaggccgggaggagaaaac

SEQ ID NO: 4761929 - DNA, 25 bp, Homo sapien
ctgagagcataaggccgggaggaga

SEQ ID NO: 4761930 - DNA, 25 bp, Homo sapien
gagagcataaggccgggaggagaaa

SEQ ID NO: 4761931 - DNA, 25 bp, Homo sapien
cccattaagtacagccccatgggct

SEQ ID NO: 4761932 - DNA, 25 bp, Homo sapien
cttggcccattaagtacagccccat

SEQ ID NO: 4761933 - DNA, 25 bp, Homo sapien
ggcccattaagtacagccccatggg

SEQ ID NO: 4761934 - DNA, 25 bp, Homo sapien
tggcccattaagtacagccccatgg

SEQ ID NO: 4761935 - DNA, 25 bp, Homo sapien
caaagaccccttgctccacatccca

SEQ ID NO: 4761936 - DNA, 25 bp, Homo sapien
tcaaagaccccttgctccacatccc

SEQ ID NO: 4761937 - DNA, 25 bp, Homo sapien
aaagaccccttgctccacatcccac

SEQ ID NO: 4761938 - DNA, 25 bp, Homo sapien
tcatagttgctgatggtctgctccc

SEQ ID NO: 4761939 - DNA, 25 bp, Homo sapien
cctgcagtaccgagggctgactgtt

SEQ ID NO: 4761940 - DNA, 25 bp, Homo sapien
cagactaacactggactggctaaac

SEQ ID NO: 4761941 - DNA, 25 bp, Homo sapien
tggctaaactggtgaatatctctcc

SEQ ID NO: 4761942 - DNA, 25 bp, Homo sapien
tattcctgaaaactctcataatttt

SEQ ID NO: 4761943 - DNA, 25 bp, Homo sapien
attcctgaaaactctcataattttc

SEQ ID NO: 4761944 - DNA, 25 bp, Homo sapien
ttattcctgaaaactctcataattt

SEQ ID NO: 4761945 - DNA, 25 bp, Homo sapien
ttgtgattacaagggccaaagaaag

SEQ ID NO: 4761946 - DNA, 25 bp, Homo sapien
ttctttagcaattctttcatgccat

SEQ ID NO: 4761947 - DNA, 25 bp, Homo sapien
gccatccatatgttgtgattacaag

SEQ ID NO: 4761948 - DNA, 25 bp, Homo sapien
aaaggatttctgacatgacaggttt

SEQ ID NO: 4761949 - DNA, 25 bp, Homo sapien
agtcttgtcaaaactggacttcagg

SEQ ID NO: 4761950 - DNA, 25 bp, Homo sapien
cattggcatcataaagacggtagac

SEQ ID NO: 4761951 - DNA, 25 bp, Homo sapien
aacttttaaactgctagactctgct

SEQ ID NO: 4761952 - DNA, 25 bp, Homo sapien
gactctgctatcactatcttctcac

SEQ ID NO: 4761953 - DNA, 25 bp, Homo sapien
tggaataggttgccccctgctgttg

SEQ ID NO: 4761954 - DNA, 25 bp, Homo sapien
agggtggagttcagttggcctccca

SEQ ID NO: 4761955 - DNA, 25 bp, Homo sapien
ccctgctgttggaggttaggatgtg

SEQ ID NO: 4761956 - DNA, 25 bp, Homo sapien
tggagttcagttggcctcccaaggc

SEQ ID NO: 4761957 - DNA, 25 bp, Homo sapien
tgtggactgagtttcccgataaaat

SEQ ID NO: 4761958 - DNA, 25 bp, Homo sapien
tcccgataaaatgtatgctggaaga

SEQ ID NO: 4761959 - DNA, 25 bp, Homo sapien
tctagatttgtggactgagtttccc

SEQ ID NO: 4761960 - DNA, 25 bp, Homo sapien
tcaagcaaagcagctctagatttgt

SEQ ID NO: 4761961 - DNA, 25 bp, Homo sapien
agtaaaatttgcttttgtttcatca

SEQ ID NO: 4761962 - DNA, 25 bp, Homo sapien
cagtaaaatttgcttttgtttcatc

SEQ ID NO: 4761963 - DNA, 25 bp, Homo sapien
gtaaaatttgcttttgtttcatcaa

SEQ ID NO: 4761964 - DNA, 25 bp, Homo sapien
tcaattaattgcaacattgggtgtc

SEQ ID NO: 4761965 - DNA, 25 bp, Homo sapien
caattaattgcaacattgggtgtca

SEQ ID NO: 4761966 - DNA, 25 bp, Homo sapien
tccacccacaatccctctttgacat

SEQ ID NO: 4761967 - DNA, 25 bp, Homo sapien
ttttccacccacaatccctctttga

SEQ ID NO: 4761968 - DNA, 25 bp, Homo sapien
cagacatattgacctcatttacagc

SEQ ID NO: 4761969 - DNA, 25 bp, Homo sapien
agacatattgacctcatttacagct

SEQ ID NO: 4761970 - DNA, 25 bp, Homo sapien
gaaacagcctgttcttcgacttgcc

SEQ ID NO: 4761971 - DNA, 25 bp, Homo sapien
gcctgttcttcgacttgcctggtaa

SEQ ID NO: 4761972 - DNA, 25 bp, Homo sapien
ttgtgaaacagcctgttcttcgact

SEQ ID NO: 4761973 - DNA, 25 bp, Homo sapien
tcgacttgcctggtaatttcccgac

SEQ ID NO: 4761974 - DNA, 25 bp, Homo sapien
tactgtatactctccgagtggctga

SEQ ID NO: 4761975 - DNA, 25 bp, Homo sapien
tcagatatactgtatactctccgag

SEQ ID NO: 4761976 - DNA, 25 bp, Homo sapien
tgcttttgaaaactccaccggcaag

SEQ ID NO: 4761977 - DNA, 25 bp, Homo sapien
aactccaccggcaagaatgagaaaa

SEQ ID NO: 4761978 - DNA, 25 bp, Homo sapien
gatcactgtcgaggagctgtaactc

SEQ ID NO: 4761979 - DNA, 25 bp, Homo sapien
gatgaggtcgcaaatcttaagcaaa

SEQ ID NO: 4761980 - DNA, 25 bp, Homo sapien
tgatgcaccaccatggatgaggtcg

SEQ ID NO: 4761981 - DNA, 25 bp, Homo sapien
aattggatcagttcctgctctgcca

SEQ ID NO: 4761982 - DNA, 25 bp, Homo sapien
acagagcaagagttgggccgtcaca

SEQ ID NO: 4761983 - DNA, 25 bp, Homo sapien
accaggtaaccttgcatcccacaag

SEQ ID NO: 4761984 - DNA, 25 bp, Homo sapien
agttgggccgtcacagaacagcagc

SEQ ID NO: 4761985 - DNA, 25 bp, Homo sapien
ggaggaaaggtactgccactgaaca

SEQ ID NO: 4761986 - DNA, 25 bp, Homo sapien
caggaggcaagatcagggacaaact

SEQ ID NO: 4761987 - DNA, 25 bp, Homo sapien
acaaccaggaggcaagatcagggac

SEQ ID NO: 4761988 - DNA, 25 bp, Homo sapien
accaggaggcaagatcagggacaaa

SEQ ID NO: 4761989 - DNA, 25 bp, Homo sapien
ctacaccacaaccaggaggcaagat

SEQ ID NO: 4761990 - DNA, 25 bp, Homo sapien
atccacacccgaagtcgagggagcc

SEQ ID NO: 4761991 - DNA, 25 bp, Homo sapien
ccacacccgaagtcgagggagccat

SEQ ID NO: 4761992 - DNA, 25 bp, Homo sapien
acatccacacccgaagtcgagggag

SEQ ID NO: 4761993 - DNA, 25 bp, Homo sapien
accacatccacacccgaagtcgagg

SEQ ID NO: 4761994 - DNA, 25 bp, Homo sapien
gccagatggaatcctgtcgactatt

SEQ ID NO: 4761995 - DNA, 25 bp, Homo sapien
tcatctgtagggtaatctgggagga

SEQ ID NO: 4761996 - DNA, 25 bp, Homo sapien
caaatcattgggtacgtcatctgta

SEQ ID NO: 4761997 - DNA, 25 bp, Homo sapien
aactctggatattacagacaggcca

SEQ ID NO: 4761998 - DNA, 25 bp, Homo sapien
tcacttctttggcttactatgccag

SEQ ID NO: 4761999 - DNA, 25 bp, Homo sapien
tgcagtttcaaatcggctcccttca

SEQ ID NO: 4762000 - DNA, 25 bp, Homo sapien
tatgtaagtgcttccacccgtgcag

SEQ ID NO: 4762001 - DNA, 25 bp, Homo sapien
ctatgccaggtgaatttgtgatccc

SEQ ID NO: 4762002 - DNA, 25 bp, Homo sapien
caattccgggccgtcagaacgcagg

SEQ ID NO: 4762003 - DNA, 25 bp, Homo sapien
cagcgccatggactatgcaagttac

SEQ ID NO: 4762004 - DNA, 25 bp, Homo sapien
tcttgtggaaccagtcagctctggg

SEQ ID NO: 4762005 - DNA, 25 bp, Homo sapien
ccccggatgcggtttggcataatga

SEQ ID NO: 4762006 - DNA, 25 bp, Homo sapien
accacatctgatccaatggggagga

SEQ ID NO: 4762007 - DNA, 25 bp, Homo sapien
ctgagggctgtatgtaggtgtttac

SEQ ID NO: 4762008 - DNA, 25 bp, Homo sapien
gctgtatgtaggtgtttaccagtga

SEQ ID NO: 4762009 - DNA, 25 bp, Homo sapien
gattcttattgtgtggtgttctatc

SEQ ID NO: 4762010 - DNA, 25 bp, Homo sapien
ccaagtggatataggtgactgcatc

SEQ ID NO: 4762011 - DNA, 25 bp, Homo sapien
taaggcagatacctgagcatctgct

SEQ ID NO: 4762012 - DNA, 25 bp, Homo sapien
ggtgggccaagtggatataggtgac

SEQ ID NO: 4762013 - DNA, 25 bp, Homo sapien
tcagagagttggaaaatatggcagt

SEQ ID NO: 4762014 - DNA, 25 bp, Homo sapien
gcaccaatgcacaagatccagctgt

SEQ ID NO: 4762015 - DNA, 25 bp, Homo sapien
taaatgtccaaaggcatcgggttat

SEQ ID NO: 4762016 - DNA, 25 bp, Homo sapien
tctggttgctgtcagatggaacaaa

SEQ ID NO: 4762017 - DNA, 25 bp, Homo sapien
cacattgccctagattgaatgcatc

SEQ ID NO: 4762018 - DNA, 25 bp, Homo sapien
ccttaaaagcttgacaggaaacatt

SEQ ID NO: 4762019 - DNA, 25 bp, Homo sapien
ctccctgatcacttctgattgctgt

SEQ ID NO: 4762020 - DNA, 25 bp, Homo sapien
gcttgtttggattcctgtgcattca

SEQ ID NO: 4762021 - DNA, 25 bp, Homo sapien
tccttgtcctgagccgattttgaac

SEQ ID NO: 4762022 - DNA, 25 bp, Homo sapien
agtggcctccaagcatgctgcagca

SEQ ID NO: 4762023 - DNA, 25 bp, Homo sapien
tgttgggtagacaggtgataatacc

SEQ ID NO: 4762024 - DNA, 25 bp, Homo sapien
ggtgataatacccagctcccgtaca

SEQ ID NO: 4762025 - DNA, 25 bp, Homo sapien
tgttcattaggatctccagccctgc

SEQ ID NO: 4762026 - DNA, 25 bp, Homo sapien
cagccagaactttgagattagccat

SEQ ID NO: 4762027 - DNA, 25 bp, Homo sapien
cagctgtcacagtattgaacaatga

SEQ ID NO: 4762028 - DNA, 25 bp, Homo sapien
tcttcgtggaagtcagctttaagta

SEQ ID NO: 4762029 - DNA, 25 bp, Homo sapien
atgaagccgacccgcaaatacacac

SEQ ID NO: 4762030 - DNA, 25 bp, Homo sapien
aatacacacatcttcgtggaagtca

SEQ ID NO: 4762031 - DNA, 25 bp, Homo sapien
gatttctccctgacaatccaagtat

SEQ ID NO: 4762032 - DNA, 25 bp, Homo sapien
aatccaagtattgggttttgaagca

SEQ ID NO: 4762033 - DNA, 25 bp, Homo sapien
ttgggttttgaagcattgaggccat

SEQ ID NO: 4762034 - DNA, 25 bp, Homo sapien
tccctgacaatccaagtattgggtt

SEQ ID NO: 4762035 - DNA, 25 bp, Homo sapien
cataaagattgaaaggaatatccca

SEQ ID NO: 4762036 - DNA, 25 bp, Homo sapien
aaactgaataagatatcataaagat

SEQ ID NO: 4762037 - DNA, 25 bp, Homo sapien
tggtgttttatgcacaccagtaatc

SEQ ID NO: 4762038 - DNA, 25 bp, Homo sapien
gttttatgcacaccagtaatctcca

SEQ ID NO: 4762039 - DNA, 25 bp, Homo sapien
acagagatgttctcttggatttgag

SEQ ID NO: 4762040 - DNA, 25 bp, Homo sapien
tccttttgaagccaacagagatgtt

SEQ ID NO: 4762041 - DNA, 25 bp, Homo sapien
cttttgaagccaacagagatgttct

SEQ ID NO: 4762042 - DNA, 25 bp, Homo sapien
gatgttctcttggatttgagttcca

SEQ ID NO: 4762043 - DNA, 25 bp, Homo sapien
tgcccagttagagtcattaaacccc

SEQ ID NO: 4762044 - DNA, 25 bp, Homo sapien
tccaggattcacagtgacgaatcca

SEQ ID NO: 4762045 - DNA, 25 bp, Homo sapien
cagttggagccagaacttcaatcct

SEQ ID NO: 4762046 - DNA, 25 bp, Homo sapien
atgtcctctgcaaactaagaagtac

SEQ ID NO: 4762047 - DNA, 25 bp, Homo sapien
gaaccagggcgacatcaagctctgt

SEQ ID NO: 4762048 - DNA, 25 bp, Homo sapien
gaggcctgacatcgcttaccaggag

SEQ ID NO: 4762049 - DNA, 25 bp, Homo sapien
cagtaaggtgctgaaacagtgccga

SEQ ID NO: 4762050 - DNA, 25 bp, Homo sapien
gcagccttgcttctatgggatcaaa

SEQ ID NO: 4762051 - DNA, 25 bp, Homo sapien
tcgcgttaattagggctccagtcag

SEQ ID NO: 4762052 - DNA, 25 bp, Homo sapien
gaacatgactgatgtactcgcgtta

SEQ ID NO: 4762053 - DNA, 25 bp, Homo sapien
tgtcatcaatcagctcgaaaatgtt

SEQ ID NO: 4762054 - DNA, 25 bp, Homo sapien
agcccgtgccagctggaaactgaga

SEQ ID NO: 4762055 - DNA, 25 bp, Homo sapien
tgtgagcctcttcaggtcatggtgg

SEQ ID NO: 4762056 - DNA, 25 bp, Homo sapien
gttgaaaggtggctcagcagtcttc

SEQ ID NO: 4762057 - DNA, 25 bp, Homo sapien
ggactatgtaaatcaggaatcagtg

SEQ ID NO: 4762058 - DNA, 25 bp, Homo sapien
tcattaacttccaactgggactatg

SEQ ID NO: 4762059 - DNA, 25 bp, Homo sapien
tgaaaattagttgtgctgcatcttg

SEQ ID NO: 4762060 - DNA, 25 bp, Homo sapien
ttgctgtttaactgatttattctcc

SEQ ID NO: 4762061 - DNA, 25 bp, Homo sapien
gcatcttgctgtttaactgatttat

SEQ ID NO: 4762062 - DNA, 25 bp, Homo sapien
atgaaaattagttgtgctgcatctt

SEQ ID NO: 4762063 - DNA, 25 bp, Homo sapien
actgtgcgttagctacttcaagagc

SEQ ID NO: 4762064 - DNA, 25 bp, Homo sapien
cgttagctacttcaagagctttatc

SEQ ID NO: 4762065 - DNA, 25 bp, Homo sapien
tgtgcgttagctacttcaagagctt

SEQ ID NO: 4762066 - DNA, 25 bp, Homo sapien
ctactgtgcgttagctacttcaaga

SEQ ID NO: 4762067 - DNA, 25 bp, Homo sapien
aatttgggtggccttgccgtgctcc

SEQ ID NO: 4762068 - DNA, 25 bp, Homo sapien
caggcagaatttgggtggccttgcc

SEQ ID NO: 4762069 - DNA, 25 bp, Homo sapien
tcttgtagacgctgatgaagggcat

SEQ ID NO: 4762070 - DNA, 25 bp, Homo sapien
tcctgctgttggctgcaatctttct

SEQ ID NO: 4762071 - DNA, 25 bp, Homo sapien
caacaatcttcagggtatccggctg

SEQ ID NO: 4762072 - DNA, 25 bp, Homo sapien
tatgtaaaggcccagatactgtgtg

SEQ ID NO: 4762073 - DNA, 25 bp, Homo sapien
gctgaataggccgaagccagaagta

SEQ ID NO: 4762074 - DNA, 25 bp, Homo sapien
tgtgtgacaaagtctacccagctga

SEQ ID NO: 4762075 - DNA, 25 bp, Homo sapien
catcaaagctactttggatccaggg

SEQ ID NO: 4762076 - DNA, 25 bp, Homo sapien
ggttgacttcgcatccctcaaagag

SEQ ID NO: 4762077 - DNA, 25 bp, Homo sapien
actttggatccagggttgacttcgc

SEQ ID NO: 4762078 - DNA, 25 bp, Homo sapien
ttcgcatccctcaaagagcatttca

SEQ ID NO: 4762079 - DNA, 25 bp, Homo sapien
atgaagagtaatcttcacctttgaa

SEQ ID NO: 4762080 - DNA, 25 bp, Homo sapien
cagtgctgtgtctcttatacgataa

SEQ ID NO: 4762081 - DNA, 25 bp, Homo sapien
gcttctcaattagtggcatcatgtg

SEQ ID NO: 4762082 - DNA, 25 bp, Homo sapien
ccaggatattgatattcagtgctgt

SEQ ID NO: 4762083 - DNA, 25 bp, Homo sapien
tgtggctttctgcagatgttttgta

SEQ ID NO: 4762084 - DNA, 25 bp, Homo sapien
taaatgtagactagcatcagagcct

SEQ ID NO: 4762085 - DNA, 25 bp, Homo sapien
tcttttccttggttggagctgagca

SEQ ID NO: 4762086 - DNA, 25 bp, Homo sapien
cacatttctgggaggtggtagcaag

SEQ ID NO: 4762087 - DNA, 25 bp, Homo sapien
gagctgagcaatccgttggcacatt

SEQ ID NO: 4762088 - DNA, 25 bp, Homo sapien
cattgaggaccagccagttgagttg

SEQ ID NO: 4762089 - DNA, 25 bp, Homo sapien
gatgtgtagttctaagttgggcacg

SEQ ID NO: 4762090 - DNA, 25 bp, Homo sapien
taatgacatgttaccaagaggcagc

SEQ ID NO: 4762091 - DNA, 25 bp, Homo sapien
tagttctaagttgggcacggaagca

SEQ ID NO: 4762092 - DNA, 25 bp, Homo sapien
tgtactgagtacattatggacttct

SEQ ID NO: 4762093 - DNA, 25 bp, Homo sapien
ctgatgttcaatttgtactgagtac

SEQ ID NO: 4762094 - DNA, 25 bp, Homo sapien
tatatttctgatgttcaatttgtac

SEQ ID NO: 4762095 - DNA, 25 bp, Homo sapien
tttgtactgagtacattatggactt

SEQ ID NO: 4762096 - DNA, 25 bp, Homo sapien
cagcttaagggagaggtaagcttcc

SEQ ID NO: 4762097 - DNA, 25 bp, Homo sapien
taagcttcccttggtcctttggtgc

SEQ ID NO: 4762098 - DNA, 25 bp, Homo sapien
gagacataattctggtaaatctggg

SEQ ID NO: 4762099 - DNA, 25 bp, Homo sapien
tctgggtcatcaaaaggagtcggga

SEQ ID NO: 4762100 - DNA, 25 bp, Homo sapien
tcccatcttctatacatagctgctt

SEQ ID NO: 4762101 - DNA, 25 bp, Homo sapien
ggcttaagcaatcattgactccagt

SEQ ID NO: 4762102 - DNA, 25 bp, Homo sapien
ctccagtattcaggtttgggatttc

SEQ ID NO: 4762103 - DNA, 25 bp, Homo sapien
aggaaatcccagaggcctaaggatt

SEQ ID NO: 4762104 - DNA, 25 bp, Homo sapien
gcaatcattgactccagtattcagg

SEQ ID NO: 4762105 - DNA, 25 bp, Homo sapien
cgatactagctcttgaatacgggca

SEQ ID NO: 4762106 - DNA, 25 bp, Homo sapien
aatacgggcaaaagtcagcagcggc

SEQ ID NO: 4762107 - DNA, 25 bp, Homo sapien
gcagcagcacgtgtggtcacagcct

SEQ ID NO: 4762108 - DNA, 25 bp, Homo sapien
tgcattggcggtggtgttctgattc

SEQ ID NO: 4762109 - DNA, 25 bp, Homo sapien
cagcaatgacccttgccactctaac

SEQ ID NO: 4762110 - DNA, 25 bp, Homo sapien
ccagcaatgacccttgccactctaa

SEQ ID NO: 4762111 - DNA, 25 bp, Homo sapien
cactcccatactgtgctccacgaag

SEQ ID NO: 4762112 - DNA, 25 bp, Homo sapien
gtgctccacgaaggctccaaacact

SEQ ID NO: 4762113 - DNA, 25 bp, Homo sapien
aactaaacactcccatactgtgctc

SEQ ID NO: 4762114 - DNA, 25 bp, Homo sapien
gctccaaacactgggaccgagtcat

SEQ ID NO: 4762115 - DNA, 25 bp, Homo sapien
gagagcagtctgtgaggacagagtc

SEQ ID NO: 4762116 - DNA, 25 bp, Homo sapien
cagaaaatgatggaggaggtccact

SEQ ID NO: 4762117 - DNA, 25 bp, Homo sapien
ggcgacatgtgggtttactttcata

SEQ ID NO: 4762118 - DNA, 25 bp, Homo sapien
tatggccttcctggttgctgagagc

SEQ ID NO: 4762119 - DNA, 25 bp, Homo sapien
acagcatctcaaaaagagctcctcc

SEQ ID NO: 4762120 - DNA, 25 bp, Homo sapien
cagacacactcttagggctggctga

SEQ ID NO: 4762121 - DNA, 25 bp, Homo sapien
gcatctcaaaaagagctcctccaag

SEQ ID NO: 4762122 - DNA, 25 bp, Homo sapien
cactcttagggctggctgagatcca

SEQ ID NO: 4762123 - DNA, 25 bp, Homo sapien
ggtgcccctcctcagccatggctgc

SEQ ID NO: 4762124 - DNA, 25 bp, Homo sapien
agcatctgcccctggggccaccccc

SEQ ID NO: 4762125 - DNA, 25 bp, Homo sapien
ctaggggtgcccctcctcagccatg

SEQ ID NO: 4762126 - DNA, 25 bp, Homo sapien
cctcctcagccatggctgccccttt

SEQ ID NO: 4762127 - DNA, 25 bp, Homo sapien
tggcaccctgctctgtttttaacgg

SEQ ID NO: 4762128 - DNA, 25 bp, Homo sapien
gagcgggaaaaagaggcgcagtctt

SEQ ID NO: 4762129 - DNA, 25 bp, Homo sapien
tttccgccatctctcgggcccgcgt

SEQ ID NO: 4762130 - DNA, 25 bp, Homo sapien
ccgcgtggcaccctgctctgttttt

SEQ ID NO: 4762131 - DNA, 25 bp, Homo sapien
tttggaggtccagcgtctctgattc

SEQ ID NO: 4762132 - DNA, 25 bp, Homo sapien
gttcacgtggcccagtcggcaaagt

SEQ ID NO: 4762133 - DNA, 25 bp, Homo sapien
tggcccagtcggcaaagtttctttg

SEQ ID NO: 4762134 - DNA, 25 bp, Homo sapien
gtcgggatgcgctttctctccgagt

SEQ ID NO: 4762135 - DNA, 25 bp, Homo sapien
taattagtccgcattcctggcgcgg

SEQ ID NO: 4762136 - DNA, 25 bp, Homo sapien
ggaagaagatcttttgaccagcccc

SEQ ID NO: 4762137 - DNA, 25 bp, Homo sapien
ggaccgagtcgcgttcacacggaaa

SEQ ID NO: 4762138 - DNA, 25 bp, Homo sapien
ccagcggcgcgtaaaattgatgtga

SEQ ID NO: 4762139 - DNA, 25 bp, Homo sapien
gggcgcttggagagctcgccagagc

SEQ ID NO: 4762140 - DNA, 25 bp, Homo sapien
ggagagctcgccagagcgctcgcat

SEQ ID NO: 4762141 - DNA, 25 bp, Homo sapien
gcttggagagctcgccagagcgctc

SEQ ID NO: 4762142 - DNA, 25 bp, Homo sapien
ggcggggcgcttggagagctcgcca

SEQ ID NO: 4762143 - DNA, 25 bp, Homo sapien
ctcttccgaaccaaaggagtttgtg

SEQ ID NO: 4762144 - DNA, 25 bp, Homo sapien
agatcgttgctgtgaagtgaaaaaa

SEQ ID NO: 4762145 - DNA, 25 bp, Homo sapien
cattcggaggaataacaaccaatta

SEQ ID NO: 4762146 - DNA, 25 bp, Homo sapien
gccttttaaaagatcgttgctgtga

SEQ ID NO: 4762147 - DNA, 25 bp, Homo sapien
cattaaagccaatgagccgcgcgcc

SEQ ID NO: 4762148 - DNA, 25 bp, Homo sapien
attaaagccaatgagccgcgcgcct

SEQ ID NO: 4762149 - DNA, 25 bp, Homo sapien
tggagagccgcccgaaatcggcgcc

SEQ ID NO: 4762150 - DNA, 25 bp, Homo sapien
agagccgcccgaaatcggcgccccg

SEQ ID NO: 4762151 - DNA, 25 bp, Homo sapien
aggggcgtggagagccgcccgaaat

SEQ ID NO: 4762152 - DNA, 25 bp, Homo sapien
cgagttgtgtcttttggccggaggg

SEQ ID NO: 4762153 - DNA, 25 bp, Homo sapien
tcgcctgtgatgtgggctaattaaa

SEQ ID NO: 4762154 - DNA, 25 bp, Homo sapien
ttgcgggaggagagttttaatctct

SEQ ID NO: 4762155 - DNA, 25 bp, Homo sapien
taatctctctttgcttgcgtgcgcg

SEQ ID NO: 4762156 - DNA, 25 bp, Homo sapien
tagtaggttttctccgtctccctgc

SEQ ID NO: 4762157 - DNA, 25 bp, Homo sapien
ttaccacttctggacagcaataatg

SEQ ID NO: 4762158 - DNA, 25 bp, Homo sapien
tggacagcaataatgtatttggtgg

SEQ ID NO: 4762159 - DNA, 25 bp, Homo sapien
acttctggacagcaataatgtattt

SEQ ID NO: 4762160 - DNA, 25 bp, Homo sapien
ccacttctggacagcaataatgtat

SEQ ID NO: 4762161 - DNA, 25 bp, Homo sapien
ttctctcccggtgcgagacaatact

SEQ ID NO: 4762162 - DNA, 25 bp, Homo sapien
gacaatactctatccccaacctggg

SEQ ID NO: 4762163 - DNA, 25 bp, Homo sapien
gcagcttctgcgtttcacggaatga

SEQ ID NO: 4762164 - DNA, 25 bp, Homo sapien
tgtggtgtgcttgggacctctgcag

SEQ ID NO: 4762165 - DNA, 25 bp, Homo sapien
attttcgaactatgtattctgtttc

SEQ ID NO: 4762166 - DNA, 25 bp, Homo sapien
ttttcgaactatgtattctgtttct

SEQ ID NO: 4762167 - DNA, 25 bp, Homo sapien
ttattttcgaactatgtattctgtt

SEQ ID NO: 4762168 - DNA, 25 bp, Homo sapien
tttcgaactatgtattctgtttctg

SEQ ID NO: 4762169 - DNA, 25 bp, Homo sapien
tgtggcttacagtgagcttgacatc

SEQ ID NO: 4762170 - DNA, 25 bp, Homo sapien
tgctttgtcccatcaaggacccttt

SEQ ID NO: 4762171 - DNA, 25 bp, Homo sapien
ctagcttgaggtaaagcgtgtctgt

SEQ ID NO: 4762172 - DNA, 25 bp, Homo sapien
taaggtaggtgtcagtttctctagc

SEQ ID NO: 4762173 - DNA, 25 bp, Homo sapien
gaatccatagcccttactggttcaa

SEQ ID NO: 4762174 - DNA, 25 bp, Homo sapien
atccatagcccttactggttcaatg

SEQ ID NO: 4762175 - DNA, 25 bp, Homo sapien
aatccatagcccttactggttcaat

SEQ ID NO: 4762176 - DNA, 25 bp, Homo sapien
gagaggctgcttgtaagttttctcc

SEQ ID NO: 4762177 - DNA, 25 bp, Homo sapien
gtgtcagatttaggagaggctgctt

SEQ ID NO: 4762178 - DNA, 25 bp, Homo sapien
tctccttatatttcagaggtgtcag

SEQ ID NO: 4762179 - DNA, 25 bp, Homo sapien
tttaggagaggctgcttgtaagttt

SEQ ID NO: 4762180 - DNA, 25 bp, Homo sapien
agatatggggcagccattcttccca

SEQ ID NO: 4762181 - DNA, 25 bp, Homo sapien
ttctgtcagccagatatggggcagc

SEQ ID NO: 4762182 - DNA, 25 bp, Homo sapien
gattttattcgtaagcctaccctca

SEQ ID NO: 4762183 - DNA, 25 bp, Homo sapien
ttattcgtaagcctaccctcataaa

SEQ ID NO: 4762184 - DNA, 25 bp, Homo sapien
ttatagaaatggagtccagaatcat

SEQ ID NO: 4762185 - DNA, 25 bp, Homo sapien
gattatagaaatggagtccagaatc

SEQ ID NO: 4762186 - DNA, 25 bp, Homo sapien
attatagaaatggagtccagaatca

SEQ ID NO: 4762187 - DNA, 25 bp, Homo sapien
gctctcctagggtgcttctaacaaa

SEQ ID NO: 4762188 - DNA, 25 bp, Homo sapien
tcctaaatgccagaaaagatgtgtg

SEQ ID NO: 4762189 - DNA, 25 bp, Homo sapien
tattcacccatcaggaattgtccag

SEQ ID NO: 4762190 - DNA, 25 bp, Homo sapien
caaatccatcagtccagtgggtcag

SEQ ID NO: 4762191 - DNA, 25 bp, Homo sapien
tgttcgtccaggtggagagtggttt

SEQ ID NO: 4762192 - DNA, 25 bp, Homo sapien
actgtggtatgttcgtccaggtgga

SEQ ID NO: 4762193 - DNA, 25 bp, Homo sapien
cccataaccactgtggtatgttcgt

SEQ ID NO: 4762194 - DNA, 25 bp, Homo sapien
taaccactgtggtatgttcgtccag

SEQ ID NO: 4762195 - DNA, 25 bp, Homo sapien
caaatcagggcatctctgatgtttt

SEQ ID NO: 4762196 - DNA, 25 bp, Homo sapien
tcaaatcagggcatctctgatgttt

SEQ ID NO: 4762197 - DNA, 25 bp, Homo sapien
tgaacatcgtccaccttgtttcttc

SEQ ID NO: 4762198 - DNA, 25 bp, Homo sapien
gagcattggactccttgcttctgcc

SEQ ID NO: 4762199 - DNA, 25 bp, Homo sapien
ttatctgaacatcgtccaccttgtt

SEQ ID NO: 4762200 - DNA, 25 bp, Homo sapien
cttctgtgcattctgtgagcattgg

SEQ ID NO: 4762201 - DNA, 25 bp, Homo sapien
ttcgaatgttggagaagagtcaccc

SEQ ID NO: 4762202 - DNA, 25 bp, Homo sapien
cgaatgttggagaagagtcacccat

SEQ ID NO: 4762203 - DNA, 25 bp, Homo sapien
tcgaatgttggagaagagtcaccca

SEQ ID NO: 4762204 - DNA, 25 bp, Homo sapien
cattcgaatgttggagaagagtcac

SEQ ID NO: 4762205 - DNA, 25 bp, Homo sapien
gcttggtgagattcatctggtggca

SEQ ID NO: 4762206 - DNA, 25 bp, Homo sapien
cttggtgagattcatctggtggcat

SEQ ID NO: 4762207 - DNA, 25 bp, Homo sapien
ctgcagattggctggacccaccact

SEQ ID NO: 4762208 - DNA, 25 bp, Homo sapien
ccaccactctggtgctagtgctggc

SEQ ID NO: 4762209 - DNA, 25 bp, Homo sapien
gacacttgtatctgagtgagcagct

SEQ ID NO: 4762210 - DNA, 25 bp, Homo sapien
ggtggtactggtggcgcattcaaac

SEQ ID NO: 4762211 - DNA, 25 bp, Homo sapien
gaaagatatcccctgctgcctaagg

SEQ ID NO: 4762212 - DNA, 25 bp, Homo sapien
tggtgtgcgtttccggttttctgaa

SEQ ID NO: 4762213 - DNA, 25 bp, Homo sapien
tcccctgctgcctaaggcatctttg

SEQ ID NO: 4762214 - DNA, 25 bp, Homo sapien
gattttaatgccagtgcggaaagat

SEQ ID NO: 4762215 - DNA, 25 bp, Homo sapien
tacatcactggactaaatggtaggg

SEQ ID NO: 4762216 - DNA, 25 bp, Homo sapien
tcctaattgggcagcaggtacatca

SEQ ID NO: 4762217 - DNA, 25 bp, Homo sapien
agtgtgcacagcctgattcccagaa

SEQ ID NO: 4762218 - DNA, 25 bp, Homo sapien
cagttcaaaggttatttccccagag

SEQ ID NO: 4762219 - DNA, 25 bp, Homo sapien
tagctaggatttgtgagatgtagac

SEQ ID NO: 4762220 - DNA, 25 bp, Homo sapien
tttttggtctaatgtaatagataca

SEQ ID NO: 4762221 - DNA, 25 bp, Homo sapien
agatgagcatgcaggatcttaataa

SEQ ID NO: 4762222 - DNA, 25 bp, Homo sapien
tttcagggtctgcagttagctagga

SEQ ID NO: 4762223 - DNA, 25 bp, Homo sapien
agttgtagttgcttgttccatcgat

SEQ ID NO: 4762224 - DNA, 25 bp, Homo sapien
tctgggactgtcctatagttctaca

SEQ ID NO: 4762225 - DNA, 25 bp, Homo sapien
catcgatcgtcctcccataagtggt

SEQ ID NO: 4762226 - DNA, 25 bp, Homo sapien
tgtcctatagttctacaaggtgaga

SEQ ID NO: 4762227 - DNA, 25 bp, Homo sapien
cagtgtgtgttgtagggctgttgaa

SEQ ID NO: 4762228 - DNA, 25 bp, Homo sapien
ttgtagggctgttgaagtcaggagc

SEQ ID NO: 4762229 - DNA, 25 bp, Homo sapien
tgtgttgtagggctgttgaagtcag

SEQ ID NO: 4762230 - DNA, 25 bp, Homo sapien
gtagggctgttgaagtcaggagcca

SEQ ID NO: 4762231 - DNA, 25 bp, Homo sapien
gtgactccatgtgcccaacagtaag

SEQ ID NO: 4762232 - DNA, 25 bp, Homo sapien
tgtccagtgactccatgtgcccaac

SEQ ID NO: 4762233 - DNA, 25 bp, Homo sapien
tccatgtgcccaacagtaagtccca

SEQ ID NO: 4762234 - DNA, 25 bp, Homo sapien
gtgcccaacagtaagtcccacattt

SEQ ID NO: 4762235 - DNA, 25 bp, Homo sapien
gcttcccacttgatggaggttccag

SEQ ID NO: 4762236 - DNA, 25 bp, Homo sapien
attaagaggagtcagctgcccagac

SEQ ID NO: 4762237 - DNA, 25 bp, Homo sapien
ggttccagttcattaagaggagtca

SEQ ID NO: 4762238 - DNA, 25 bp, Homo sapien
tgcccagactgaaccagtgctatta

SEQ ID NO: 4762239 - DNA, 25 bp, Homo sapien
agcactctccagttcttttctgagt

SEQ ID NO: 4762240 - DNA, 25 bp, Homo sapien
gcactctccagttcttttctgagtg

SEQ ID NO: 4762241 - DNA, 25 bp, Homo sapien
cactctccagttcttttctgagtga

SEQ ID NO: 4762242 - DNA, 25 bp, Homo sapien
tcttactcccttgattattggtaaa

SEQ ID NO: 4762243 - DNA, 25 bp, Homo sapien
tactcccttgattattggtaaaatc

SEQ ID NO: 4762244 - DNA, 25 bp, Homo sapien
atatcttactcccttgattattggt

SEQ ID NO: 4762245 - DNA, 25 bp, Homo sapien
cccttgattattggtaaaatccatt

SEQ ID NO: 4762246 - DNA, 25 bp, Homo sapien
acttctgggcaggtgttggaaataa

SEQ ID NO: 4762247 - DNA, 25 bp, Homo sapien
gctggttgtcgcataaaggagcaga

SEQ ID NO: 4762248 - DNA, 25 bp, Homo sapien
gagaatcttgcctccttcgatgtaa

SEQ ID NO: 4762249 - DNA, 25 bp, Homo sapien
ccgtgccacaaaagggctggttgtc

SEQ ID NO: 4762250 - DNA, 25 bp, Homo sapien
tcggactatagtccccgagacgcac

SEQ ID NO: 4762251 - DNA, 25 bp, Homo sapien
caataaagcgcgcactggtggtctc

SEQ ID NO: 4762252 - DNA, 25 bp, Homo sapien
tattattatgcagcgtttctcggac

SEQ ID NO: 4762253 - DNA, 25 bp, Homo sapien
tcttggcactgattggaccactcgg

SEQ ID NO: 4762254 - DNA, 25 bp, Homo sapien
cagaggggtaatctggagcagtccc

SEQ ID NO: 4762255 - DNA, 25 bp, Homo sapien
agaggggtaatctggagcagtcccc

SEQ ID NO: 4762256 - DNA, 25 bp, Homo sapien
gcagaggggtaatctggagcagtcc

SEQ ID NO: 4762257 - DNA, 25 bp, Homo sapien
tgtcatcacacagtcccgtgcgtgt

SEQ ID NO: 4762258 - DNA, 25 bp, Homo sapien
atatccaacagatgtatcctcctct

SEQ ID NO: 4762259 - DNA, 25 bp, Homo sapien
tggaatgtcatcacacagtcccgtg

SEQ ID NO: 4762260 - DNA, 25 bp, Homo sapien
acacagtcccgtgcgtgtttttgtg

SEQ ID NO: 4762261 - DNA, 25 bp, Homo sapien
cctgcgttgtagtagtcgtttgtca

SEQ ID NO: 4762262 - DNA, 25 bp, Homo sapien
aaaccagtcagccagcaatttcctg

SEQ ID NO: 4762263 - DNA, 25 bp, Homo sapien
cgtttgtcataaatcagtgaaggga

SEQ ID NO: 4762264 - DNA, 25 bp, Homo sapien
agaggcaaagcggtcaaaaaccttg

SEQ ID NO: 4762265 - DNA, 25 bp, Homo sapien
tccaagacgactttgatgaaatgtc

SEQ ID NO: 4762266 - DNA, 25 bp, Homo sapien
cacaaagagtattgtttccaagacg

SEQ ID NO: 4762267 - DNA, 25 bp, Homo sapien
cttgtgtttgaaataacacaaagag

SEQ ID NO: 4762268 - DNA, 25 bp, Homo sapien
ttgtttccaagacgactttgatgaa

SEQ ID NO: 4762269 - DNA, 25 bp, Homo sapien
tccttggcttttaccacagtttgct

SEQ ID NO: 4762270 - DNA, 25 bp, Homo sapien
ggcgatgagtatccttggcttttac

SEQ ID NO: 4762271 - DNA, 25 bp, Homo sapien
cttggcgatgagtatccttggcttt

SEQ ID NO: 4762272 - DNA, 25 bp, Homo sapien
tggcgatgagtatccttggctttta

SEQ ID NO: 4762273 - DNA, 25 bp, Homo sapien
cctggaggatactgttcacacgcat

SEQ ID NO: 4762274 - DNA, 25 bp, Homo sapien
cataggaacacacatttgtgtgaag

SEQ ID NO: 4762275 - DNA, 25 bp, Homo sapien
gaagatggcatcattatattgacaa

SEQ ID NO: 4762276 - DNA, 25 bp, Homo sapien
tgccatttttacactaagaacctgt

SEQ ID NO: 4762277 - DNA, 25 bp, Homo sapien
gaacctgtatcttattgcaaatgca

SEQ ID NO: 4762278 - DNA, 25 bp, Homo sapien
ctgttggctgtgttagcagagagct

SEQ ID NO: 4762279 - DNA, 25 bp, Homo sapien
agactgttggctgtgttagcagaga

SEQ ID NO: 4762280 - DNA, 25 bp, Homo sapien
actgttggctgtgttagcagagagc

SEQ ID NO: 4762281 - DNA, 25 bp, Homo sapien
gactgttggctgtgttagcagagag

SEQ ID NO: 4762282 - DNA, 25 bp, Homo sapien
ccccagggtcactattctctaaatg

SEQ ID NO: 4762283 - DNA, 25 bp, Homo sapien
tattctctaaatgagcagcacagaa

SEQ ID NO: 4762284 - DNA, 25 bp, Homo sapien
tgatgcgtgcattcttccctgggtc

SEQ ID NO: 4762285 - DNA, 25 bp, Homo sapien
tgtcttttcagtggtcagacttaag

SEQ ID NO: 4762286 - DNA, 25 bp, Homo sapien
gatacgatttttgaaggccatagct

SEQ ID NO: 4762287 - DNA, 25 bp, Homo sapien
gatgagcaaacaagccataacgaat

SEQ ID NO: 4762288 - DNA, 25 bp, Homo sapien
tctgactcctcattatcccatttat

SEQ ID NO: 4762289 - DNA, 25 bp, Homo sapien
cccttttgtaccgtgtggatacgat

SEQ ID NO: 4762290 - DNA, 25 bp, Homo sapien
tttccatgcgacctttagcatgttc

SEQ ID NO: 4762291 - DNA, 25 bp, Homo sapien
ccatgcgacctttagcatgttcttt

SEQ ID NO: 4762292 - DNA, 25 bp, Homo sapien
tccatgcgacctttagcatgttctt

SEQ ID NO: 4762293 - DNA, 25 bp, Homo sapien
ggtttccatgcgacctttagcatgt

SEQ ID NO: 4762294 - DNA, 25 bp, Homo sapien
tgtgtgaatggaaagcaaaattggc

SEQ ID NO: 4762295 - DNA, 25 bp, Homo sapien
ctgtgtgaatggaaagcaaaattgg

SEQ ID NO: 4762296 - DNA, 25 bp, Homo sapien
gtgtgaatggaaagcaaaattggca

SEQ ID NO: 4762297 - DNA, 25 bp, Homo sapien
tgtgaatggaaagcaaaattggcat

SEQ ID NO: 4762298 - DNA, 25 bp, Homo sapien
tgctaccaaagcaattggggtttcc

SEQ ID NO: 4762299 - DNA, 25 bp, Homo sapien
gctaccaaagcaattggggtttcca

SEQ ID NO: 4762300 - DNA, 25 bp, Homo sapien
ctaccaaagcaattggggtttccat

SEQ ID NO: 4762301 - DNA, 25 bp, Homo sapien
tgcttcgttctggtctcaaggcctt

SEQ ID NO: 4762302 - DNA, 25 bp, Homo sapien
cctctctaggatgtagactagtgga

SEQ ID NO: 4762303 - DNA, 25 bp, Homo sapien
tatcctatatgctctccaccgaatg

SEQ ID NO: 4762304 - DNA, 25 bp, Homo sapien
cacctgatggtaactggaacatacg

SEQ ID NO: 4762305 - DNA, 25 bp, Homo sapien
gactcgttgacaagtgtctttgtaa

SEQ ID NO: 4762306 - DNA, 25 bp, Homo sapien
gaaggtgcgttgtatttgatacccc

SEQ ID NO: 4762307 - DNA, 25 bp, Homo sapien
ttagaacacaacaggccaactcata

SEQ ID NO: 4762308 - DNA, 25 bp, Homo sapien
ctgctcctgcattgataatgaaggt

SEQ ID NO: 4762309 - DNA, 25 bp, Homo sapien
tctaatgcattgtattgaccaccag

SEQ ID NO: 4762310 - DNA, 25 bp, Homo sapien
catactagaaatggatggatgctgc

SEQ ID NO: 4762311 - DNA, 25 bp, Homo sapien
tgacgttcctaatgtggtagcagaa

SEQ ID NO: 4762312 - DNA, 25 bp, Homo sapien
gatctgctgatgtacagtgcctttg

SEQ ID NO: 4762313 - DNA, 25 bp, Homo sapien
tacgtacaatgcagatacccactcg

SEQ ID NO: 4762314 - DNA, 25 bp, Homo sapien
tgtgtgttcccactgtggactgaat

SEQ ID NO: 4762315 - DNA, 25 bp, Homo sapien
tatgcgcgacccttggcatctgctg

SEQ ID NO: 4762316 - DNA, 25 bp, Homo sapien
agtagatgtcccctgtatgcgcgac

SEQ ID NO: 4762317 - DNA, 25 bp, Homo sapien
aaatgcaggcattgtgaccatgagg

SEQ ID NO: 4762318 - DNA, 25 bp, Homo sapien
aatgcaggcattgtgaccatgaggg

SEQ ID NO: 4762319 - DNA, 25 bp, Homo sapien
atgcaggcattgtgaccatgagggc

SEQ ID NO: 4762320 - DNA, 25 bp, Homo sapien
atttttgagtcacctttgcatttac

SEQ ID NO: 4762321 - DNA, 25 bp, Homo sapien
aggagacttagcaaccagacttcca

SEQ ID NO: 4762322 - DNA, 25 bp, Homo sapien
gaggctctgcgtgaggtggttggct

SEQ ID NO: 4762323 - DNA, 25 bp, Homo sapien
gtggttggcttgtgctttgcagaca

SEQ ID NO: 4762324 - DNA, 25 bp, Homo sapien
acttcgagcaggagacttagcaacc

SEQ ID NO: 4762325 - DNA, 25 bp, Homo sapien
gcttgctgagaactgcaagttacag

SEQ ID NO: 4762326 - DNA, 25 bp, Homo sapien
gcaagttacagaacgaagcctgcct

SEQ ID NO: 4762327 - DNA, 25 bp, Homo sapien
gttgggctgctgcttataaatagaa

SEQ ID NO: 4762328 - DNA, 25 bp, Homo sapien
tttgaagtggcaatctgggtgactg

SEQ ID NO: 4762329 - DNA, 25 bp, Homo sapien
tactccaaggtcactgcaggttgca

SEQ ID NO: 4762330 - DNA, 25 bp, Homo sapien
gtgctgacctgcatcgggctccatc

SEQ ID NO: 4762331 - DNA, 25 bp, Homo sapien
gaatgtcatggtaaagatgctcatc

SEQ ID NO: 4762332 - DNA, 25 bp, Homo sapien
aaactttgaacgtgatagcattgca

SEQ ID NO: 4762333 - DNA, 25 bp, Homo sapien
cccaagacaagatgagcttgatctc

SEQ ID NO: 4762334 - DNA, 25 bp, Homo sapien
cttgggcaggacccaagacaagatg

SEQ ID NO: 4762335 - DNA, 25 bp, Homo sapien
agatgagcttgatctctctccaggg

SEQ ID NO: 4762336 - DNA, 25 bp, Homo sapien
cctcttgggcaggacccaagacaag

SEQ ID NO: 4762337 - DNA, 25 bp, Homo sapien
ctcactccaatcactgctgcccttt

SEQ ID NO: 4762338 - DNA, 25 bp, Homo sapien
tcactccaatcactgctgccctttc

SEQ ID NO: 4762339 - DNA, 25 bp, Homo sapien
tctcactccaatcactgctgccctt

SEQ ID NO: 4762340 - DNA, 25 bp, Homo sapien
ctctcactccaatcactgctgccct

SEQ ID NO: 4762341 - DNA, 25 bp, Homo sapien
taggtgaggagctggattaaggaca

SEQ ID NO: 4762342 - DNA, 25 bp, Homo sapien
aggtgaggagctggattaaggacag

SEQ ID NO: 4762343 - DNA, 25 bp, Homo sapien
gaaaggccacctgttgccagaatgg

SEQ ID NO: 4762344 - DNA, 25 bp, Homo sapien
tttcccagtacaagtgaaaggccac

SEQ ID NO: 4762345 - DNA, 25 bp, Homo sapien
tcaatgcaatctgcagccgacatgc

SEQ ID NO: 4762346 - DNA, 25 bp, Homo sapien
atatgtcagaagttggaggtcagcc

SEQ ID NO: 4762347 - DNA, 25 bp, Homo sapien
ttttcaggcccaatacagtacgtta

SEQ ID NO: 4762348 - DNA, 25 bp, Homo sapien
gatgagtttgccatgcttactgaac

SEQ ID NO: 4762349 - DNA, 25 bp, Homo sapien
aaagcttttcatgtgcattcctgtt

SEQ ID NO: 4762350 - DNA, 25 bp, Homo sapien
tatcaaattgaatcagaggttctga

SEQ ID NO: 4762351 - DNA, 25 bp, Homo sapien
tccttttttcctcgaatattctcac

SEQ ID NO: 4762352 - DNA, 25 bp, Homo sapien
tctcacaactttgatgaatttatca

SEQ ID NO: 4762353 - DNA, 25 bp, Homo sapien
tcctcgaatattctcacaactttga

SEQ ID NO: 4762354 - DNA, 25 bp, Homo sapien
cgaatattctcacaactttgatgaa

SEQ ID NO: 4762355 - DNA, 25 bp, Homo sapien
cagagcagtttttgttctatcctta

SEQ ID NO: 4762356 - DNA, 25 bp, Homo sapien
agctcaattctacaatccttccatc

SEQ ID NO: 4762357 - DNA, 25 bp, Homo sapien
gtttttgttctatccttagagctca

SEQ ID NO: 4762358 - DNA, 25 bp, Homo sapien
tttacaacaacatttgagagacaaa

SEQ ID NO: 4762359 - DNA, 25 bp, Homo sapien
ctctttccgaatcctgagaagtgaa

SEQ ID NO: 4762360 - DNA, 25 bp, Homo sapien
gccaaagcttccttcgcctgcgccg

SEQ ID NO: 4762361 - DNA, 25 bp, Homo sapien
agcttccttcgcctgcgccgctgct

SEQ ID NO: 4762362 - DNA, 25 bp, Homo sapien
tttccgaatcctgagaagtgaagac

SEQ ID NO: 4762363 - DNA, 25 bp, Homo sapien
taaattgcccatctcgagcgagttg

SEQ ID NO: 4762364 - DNA, 25 bp, Homo sapien
gccttgcttctgtccctcggtggag

SEQ ID NO: 4762365 - DNA, 25 bp, Homo sapien
tgtagccggatggaggttcattgcc

SEQ ID NO: 4762366 - DNA, 25 bp, Homo sapien
gaacccgggctgtgtgattccacag

SEQ ID NO: 4762367 - DNA, 25 bp, Homo sapien
aagaggagcccagaacagtgacgca

SEQ ID NO: 4762368 - DNA, 25 bp, Homo sapien
aggagcatcacgtagagacccagga

SEQ ID NO: 4762369 - DNA, 25 bp, Homo sapien
tgagccacctgttgggaactcccga

SEQ ID NO: 4762370 - DNA, 25 bp, Homo sapien
ttcatccacgtctagggccctggag

SEQ ID NO: 4762371 - DNA, 25 bp, Homo sapien
gcttaccagttctgcaaccctgagt

SEQ ID NO: 4762372 - DNA, 25 bp, Homo sapien
taacataagggaggacgataaactc

SEQ ID NO: 4762373 - DNA, 25 bp, Homo sapien
gaatccttgctctttagcttaccag

SEQ ID NO: 4762374 - DNA, 25 bp, Homo sapien
caaatatctaccatatgggctgctc

SEQ ID NO: 4762375 - DNA, 25 bp, Homo sapien
taagagttaaattccagcataggct

SEQ ID NO: 4762376 - DNA, 25 bp, Homo sapien
gggtatctgctgttatgctcatgaa

SEQ ID NO: 4762377 - DNA, 25 bp, Homo sapien
tgactggagaacaggaatgtgcaca

SEQ ID NO: 4762378 - DNA, 25 bp, Homo sapien
tgacgttgtcagctagaactggatt

SEQ ID NO: 4762379 - DNA, 25 bp, Homo sapien
taggcgatgccatgaacttccaagg

SEQ ID NO: 4762380 - DNA, 25 bp, Homo sapien
acttccaagggcgtccagttcaatc

SEQ ID NO: 4762381 - DNA, 25 bp, Homo sapien
gcgtccagttcaatcaagttgtcgg

SEQ ID NO: 4762382 - DNA, 25 bp, Homo sapien
tcaagttgtcggaagtgtgcaggaa

SEQ ID NO: 4762383 - DNA, 25 bp, Homo sapien
aatctgcaatgcacaaggcaggatt

SEQ ID NO: 4762384 - DNA, 25 bp, Homo sapien
atctgcaatgcacaaggcaggattg

SEQ ID NO: 4762385 - DNA, 25 bp, Homo sapien
tgaggttgtaccagggccggatgtg

SEQ ID NO: 4762386 - DNA, 25 bp, Homo sapien
tctgcaatgcacaaggcaggattgg

SEQ ID NO: 4762387 - DNA, 25 bp, Homo sapien
cattaagagattgagggccagtggc

SEQ ID NO: 4762388 - DNA, 25 bp, Homo sapien
ttgagggccagtggcacaaagacac

SEQ ID NO: 4762389 - DNA, 25 bp, Homo sapien
gatgtgagaaccagaccattaagag

SEQ ID NO: 4762390 - DNA, 25 bp, Homo sapien
gaaccagaccattaagagattgagg

SEQ ID NO: 4762391 - DNA, 25 bp, Homo sapien
tgtttggcaaagacctgcaactcat

SEQ ID NO: 4762392 - DNA, 25 bp, Homo sapien
gactgactttaaagacccagatctc

SEQ ID NO: 4762393 - DNA, 25 bp, Homo sapien
agactgactttaaagacccagatct

SEQ ID NO: 4762394 - DNA, 25 bp, Homo sapien
aagactgactttaaagacccagatc

SEQ ID NO: 4762395 - DNA, 25 bp, Homo sapien
actgactttaaagacccagatctct

SEQ ID NO: 4762396 - DNA, 25 bp, Homo sapien
tgtagtgaaactaagcagccagaac

SEQ ID NO: 4762397 - DNA, 25 bp, Homo sapien
gaaatgcgttgaagaggagctccgc

SEQ ID NO: 4762398 - DNA, 25 bp, Homo sapien
gctttgtctgctactaatactcgta

SEQ ID NO: 4762399 - DNA, 25 bp, Homo sapien
ccagaacttgtggagccaggattcc

SEQ ID NO: 4762400 - DNA, 25 bp, Homo sapien
catttttccttctaggagcctgctg

SEQ ID NO: 4762401 - DNA, 25 bp, Homo sapien
gtcaagttgtgagcgtctgcttcca

SEQ ID NO: 4762402 - DNA, 25 bp, Homo sapien
tccatcaggaaatccttaaatagtt

SEQ ID NO: 4762403 - DNA, 25 bp, Homo sapien
ttatgtcaagttgtgagcgtctgct

SEQ ID NO: 4762404 - DNA, 25 bp, Homo sapien
gaacaggaccagggccaagtaagat

SEQ ID NO: 4762405 - DNA, 25 bp, Homo sapien
ggaacaggaccagggccaagtaaga

SEQ ID NO: 4762406 - DNA, 25 bp, Homo sapien
ctagagggaacaggaccagggccaa

SEQ ID NO: 4762407 - DNA, 25 bp, Homo sapien
gagggaacaggaccagggccaagta

SEQ ID NO: 4762408 - DNA, 25 bp, Homo sapien
cttaaggcaatagcgatatgtctgt

SEQ ID NO: 4762409 - DNA, 25 bp, Homo sapien
ctttccttcaccatccaatttgatt

SEQ ID NO: 4762410 - DNA, 25 bp, Homo sapien
aaatctcaaaatagtccactttcct

SEQ ID NO: 4762411 - DNA, 25 bp, Homo sapien
tccttaaggcaatagcgatatgtct

SEQ ID NO: 4762412 - DNA, 25 bp, Homo sapien
aagagataccagtcttgaaaagttg

SEQ ID NO: 4762413 - DNA, 25 bp, Homo sapien
ataccagtcttgaaaagttggaggg

SEQ ID NO: 4762414 - DNA, 25 bp, Homo sapien
gataccagtcttgaaaagttggagg

SEQ ID NO: 4762415 - DNA, 25 bp, Homo sapien
gagataccagtcttgaaaagttgga

SEQ ID NO: 4762416 - DNA, 25 bp, Homo sapien
caagacctccaggatgagaagtgct

SEQ ID NO: 4762417 - DNA, 25 bp, Homo sapien
tgtcactagtgggatgtggatttct

SEQ ID NO: 4762418 - DNA, 25 bp, Homo sapien
gctccctgccgtctctgtgatctcg

SEQ ID NO: 4762419 - DNA, 25 bp, Homo sapien
gagaagtgctttaggtgtcactagt

SEQ ID NO: 4762420 - DNA, 25 bp, Homo sapien
taattttatgctgacgggcccacaa

SEQ ID NO: 4762421 - DNA, 25 bp, Homo sapien
agcatgagctgcatgcaaaagtaca

SEQ ID NO: 4762422 - DNA, 25 bp, Homo sapien
gctgacgggcccacaatcactcaat

SEQ ID NO: 4762423 - DNA, 25 bp, Homo sapien
catgagctgcatgcaaaagtacaaa

SEQ ID NO: 4762424 - DNA, 25 bp, Homo sapien
gcaccaggctcacggtagtgggccc

SEQ ID NO: 4762425 - DNA, 25 bp, Homo sapien
cagattctgtgaatgtgggatgcac

SEQ ID NO: 4762426 - DNA, 25 bp, Homo sapien
tgggatgcaccaggctcacggtagt

SEQ ID NO: 4762427 - DNA, 25 bp, Homo sapien
gatgcaccaggctcacggtagtggg

SEQ ID NO: 4762428 - DNA, 25 bp, Homo sapien
ttgaaacctcgcatttcctcagcgc

SEQ ID NO: 4762429 - DNA, 25 bp, Homo sapien
cgcatttcctcagcgccttttgggc

SEQ ID NO: 4762430 - DNA, 25 bp, Homo sapien
gtttagacatgacacgctgcttgaa

SEQ ID NO: 4762431 - DNA, 25 bp, Homo sapien
gacacgctgcttgaaacctcgcatt

SEQ ID NO: 4762432 - DNA, 25 bp, Homo sapien
aaggtggatagtgtggagctttctc

SEQ ID NO: 4762433 - DNA, 25 bp, Homo sapien
ggatagtgtggagctttctctgagc

SEQ ID NO: 4762434 - DNA, 25 bp, Homo sapien
gcagccagcatccaaaaccaaacaa

SEQ ID NO: 4762435 - DNA, 25 bp, Homo sapien
ctgagcagtgctttgactaggaaaa

SEQ ID NO: 4762436 - DNA, 25 bp, Homo sapien
gctcttgctacccatactgtctgca

SEQ ID NO: 4762437 - DNA, 25 bp, Homo sapien
tacagaagtgtgtcctcaagctcat

SEQ ID NO: 4762438 - DNA, 25 bp, Homo sapien
tgcaacccaccaagcacgttaagga

SEQ ID NO: 4762439 - DNA, 25 bp, Homo sapien
ccaccagtgagggtaggatttctgc

SEQ ID NO: 4762440 - DNA, 25 bp, Homo sapien
ctttccatgaccatgggcataaaat

SEQ ID NO: 4762441 - DNA, 25 bp, Homo sapien
gcataaaatatcctcccttagtcat

SEQ ID NO: 4762442 - DNA, 25 bp, Homo sapien
ggcataaaatatcctcccttagtca

SEQ ID NO: 4762443 - DNA, 25 bp, Homo sapien
gggcataaaatatcctcccttagtc

SEQ ID NO: 4762444 - DNA, 25 bp, Homo sapien
tctcaatcgtgtagttcgatagcaa

SEQ ID NO: 4762445 - DNA, 25 bp, Homo sapien
tagttcgatagcaaaagcccttcac

SEQ ID NO: 4762446 - DNA, 25 bp, Homo sapien
gggatggtctcaatcgtgtagttcg

SEQ ID NO: 4762447 - DNA, 25 bp, Homo sapien
ttagcggccacgggatggtctcaat

SEQ ID NO: 4762448 - DNA, 25 bp, Homo sapien
tttgactttcataccagtggttcac

SEQ ID NO: 4762449 - DNA, 25 bp, Homo sapien
cactgactttatcttatctttaggc

SEQ ID NO: 4762450 - DNA, 25 bp, Homo sapien
tctggattttgagctcgattttgac

SEQ ID NO: 4762451 - DNA, 25 bp, Homo sapien
taggctttaagacaccagctagcat

SEQ ID NO: 4762452 - DNA, 25 bp, Homo sapien
tcaagcacagggatgcagttgcatg

SEQ ID NO: 4762453 - DNA, 25 bp, Homo sapien
catgctgtccgcatagaacgcgatg

SEQ ID NO: 4762454 - DNA, 25 bp, Homo sapien
gaacgcgatgtgcaaagtaccagcg

SEQ ID NO: 4762455 - DNA, 25 bp, Homo sapien
ccagtctgatagtttcctcgaggca

SEQ ID NO: 4762456 - DNA, 25 bp, Homo sapien
ctggaaaaatgttgataccattgcc

SEQ ID NO: 4762457 - DNA, 25 bp, Homo sapien
tttcaagtgactggaaaaatgttga

SEQ ID NO: 4762458 - DNA, 25 bp, Homo sapien
aagtgactggaaaaatgttgatacc

SEQ ID NO: 4762459 - DNA, 25 bp, Homo sapien
gataccattgccagctggaagtagc

SEQ ID NO: 4762460 - DNA, 25 bp, Homo sapien
ctccattccgctccctaaaggtatt

SEQ ID NO: 4762461 - DNA, 25 bp, Homo sapien
tccctaaaggtatttgagagacaac

SEQ ID NO: 4762462 - DNA, 25 bp, Homo sapien
ggtatttgagagacaaccctcgtag

SEQ ID NO: 4762463 - DNA, 25 bp, Homo sapien
gagagacaaccctcgtagtcttcta

SEQ ID NO: 4762464 - DNA, 25 bp, Homo sapien
ttccaagctggcgatgtatttagtt

SEQ ID NO: 4762465 - DNA, 25 bp, Homo sapien
tggcgatgtatttagttgctgtcac

SEQ ID NO: 4762466 - DNA, 25 bp, Homo sapien
tatttagttgctgtcactgacaagc

SEQ ID NO: 4762467 - DNA, 25 bp, Homo sapien
ctagtcgacgatctccataatttct

SEQ ID NO: 4762468 - DNA, 25 bp, Homo sapien
gagtatgtggcccttcggaatccta

SEQ ID NO: 4762469 - DNA, 25 bp, Homo sapien
cttgcctctagggagtatgtggccc

SEQ ID NO: 4762470 - DNA, 25 bp, Homo sapien
cggaatcctaactgaaaacttggag

SEQ ID NO: 4762471 - DNA, 25 bp, Homo sapien
tggcccttcggaatcctaactgaaa

SEQ ID NO: 4762472 - DNA, 25 bp, Homo sapien
aagatcatctgcattagtcacccgg

SEQ ID NO: 4762473 - DNA, 25 bp, Homo sapien
gctgtggtgactgcatcaatcaatg

SEQ ID NO: 4762474 - DNA, 25 bp, Homo sapien
tcacccggatgcacttctttgctgt

SEQ ID NO: 4762475 - DNA, 25 bp, Homo sapien
aggagaacaacctctggggagcctt

SEQ ID NO: 4762476 - DNA, 25 bp, Homo sapien
acactcttcttgaggggagtttggt

SEQ ID NO: 4762477 - DNA, 25 bp, Homo sapien
cttcttgaggggagtttggtttcag

SEQ ID NO: 4762478 - DNA, 25 bp, Homo sapien
tcttcttgaggggagtttggtttca

SEQ ID NO: 4762479 - DNA, 25 bp, Homo sapien
cactcttcttgaggggagtttggtt

SEQ ID NO: 4762480 - DNA, 25 bp, Homo sapien
aatgctcccagatctcaattttagg

SEQ ID NO: 4762481 - DNA, 25 bp, Homo sapien
tatctccatagaacctaagtggctt

SEQ ID NO: 4762482 - DNA, 25 bp, Homo sapien
tctaactaggcactatgaatcacct

SEQ ID NO: 4762483 - DNA, 25 bp, Homo sapien
gaatcacctacgaactttcatagca

SEQ ID NO: 4762484 - DNA, 25 bp, Homo sapien
taaggtgcattatctgccaatttgt

SEQ ID NO: 4762485 - DNA, 25 bp, Homo sapien
gaaaatgcacctgcttctacatgga

SEQ ID NO: 4762486 - DNA, 25 bp, Homo sapien
ggaatgcaagggctaaatcgggagg

SEQ ID NO: 4762487 - DNA, 25 bp, Homo sapien
tactgctccccaggtttgacgagtg

SEQ ID NO: 4762488 - DNA, 25 bp, Homo sapien
tgtgtcctccggatctgaggagagg

SEQ ID NO: 4762489 - DNA, 25 bp, Homo sapien
aggaggcaataattcttgggagaat

SEQ ID NO: 4762490 - DNA, 25 bp, Homo sapien
caggaggcaataattcttgggagaa

SEQ ID NO: 4762491 - DNA, 25 bp, Homo sapien
tgaaatgtgtcctccggatctgagg

SEQ ID NO: 4762492 - DNA, 25 bp, Homo sapien
agccctcggggctggctggaagaag

SEQ ID NO: 4762493 - DNA, 25 bp, Homo sapien
acatggagaagtctgcaagccctcg

SEQ ID NO: 4762494 - DNA, 25 bp, Homo sapien
atggagaagtctgcaagccctcggg

SEQ ID NO: 4762495 - DNA, 25 bp, Homo sapien
tcacatggagaagtctgcaagccct

SEQ ID NO: 4762496 - DNA, 25 bp, Homo sapien
tcagttccactcaaataaaatggtt

SEQ ID NO: 4762497 - DNA, 25 bp, Homo sapien
tatttatccatacttccacatatgg

SEQ ID NO: 4762498 - DNA, 25 bp, Homo sapien
ttttatttatccatacttccacata

SEQ ID NO: 4762499 - DNA, 25 bp, Homo sapien
atttatccatacttccacatatgga

SEQ ID NO: 4762500 - DNA, 25 bp, Homo sapien
ttatttatccatacttccacatatg

SEQ ID NO: 4762501 - DNA, 25 bp, Homo sapien
ctgccttctgtagtcaaaactgcct

SEQ ID NO: 4762502 - DNA, 25 bp, Homo sapien
ctctcagaagcagggtcaaaatctg

SEQ ID NO: 4762503 - DNA, 25 bp, Homo sapien
ttcctctaatagtcctgcaccctgt

SEQ ID NO: 4762504 - DNA, 25 bp, Homo sapien
aatctgctttcctctaatagtcctg

SEQ ID NO: 4762505 - DNA, 25 bp, Homo sapien
tctcggcgcactgcaagctctcctc

SEQ ID NO: 4762506 - DNA, 25 bp, Homo sapien
tcggcgcactgcaagctctcctcct

SEQ ID NO: 4762507 - DNA, 25 bp, Homo sapien
ctggattcatgccattctcctgcct

SEQ ID NO: 4762508 - DNA, 25 bp, Homo sapien
gcatgagccaccgcgcctggccaaa

SEQ ID NO: 4762509 - DNA, 25 bp, Homo sapien
cattgcttttcattcagcaaggggg

SEQ ID NO: 4762510 - DNA, 25 bp, Homo sapien
tcattgcttttcattcagcaagggg

SEQ ID NO: 4762511 - DNA, 25 bp, Homo sapien
ctccacattctggatctgccatgca

SEQ ID NO: 4762512 - DNA, 25 bp, Homo sapien
tccacattctggatctgccatgcat

SEQ ID NO: 4762513 - DNA, 25 bp, Homo sapien
cacattctggatctgccatgcatgt

SEQ ID NO: 4762514 - DNA, 25 bp, Homo sapien
ccacattctggatctgccatgcatg

SEQ ID NO: 4762515 - DNA, 25 bp, Homo sapien
agacctgaacccgaaggcctgcagt

SEQ ID NO: 4762516 - DNA, 25 bp, Homo sapien
gcagtacaaagcacaacagcaccat

SEQ ID NO: 4762517 - DNA, 25 bp, Homo sapien
acccgaaggcctgcagtacaaagca

SEQ ID NO: 4762518 - DNA, 25 bp, Homo sapien
ctgttgcagacctgaacccgaaggc

SEQ ID NO: 4762519 - DNA, 25 bp, Homo sapien
taatccatgcaagtctggtgtgtaa

SEQ ID NO: 4762520 - DNA, 25 bp, Homo sapien
catgcaagtctggtgtgtaaaccaa

SEQ ID NO: 4762521 - DNA, 25 bp, Homo sapien
caagtctggtgtgtaaaccaatcat

SEQ ID NO: 4762522 - DNA, 25 bp, Homo sapien
ctgttctgttaatccatgcaagtct

SEQ ID NO: 4762523 - DNA, 25 bp, Homo sapien
ttcaaaggagagtagatcctgagaa

SEQ ID NO: 4762524 - DNA, 25 bp, Homo sapien
taactggtggtgatgcaaactggag

SEQ ID NO: 4762525 - DNA, 25 bp, Homo sapien
tcctgagaagtgttctttgtttgtc

SEQ ID NO: 4762526 - DNA, 25 bp, Homo sapien
tttgtctttgtggagtaactggtgg

SEQ ID NO: 4762527 - DNA, 25 bp, Homo sapien
tgagcatccgcctgctcttacgtct

SEQ ID NO: 4762528 - DNA, 25 bp, Homo sapien
cctgctcttacgtctctggatttta

SEQ ID NO: 4762529 - DNA, 25 bp, Homo sapien
ctgcatattgcctggatttaggacc

SEQ ID NO: 4762530 - DNA, 25 bp, Homo sapien
tttaggaccagaccctgtgagcatc

SEQ ID NO: 4762531 - DNA, 25 bp, Homo sapien
ctgaacctcaccatgttccaaattt

SEQ ID NO: 4762532 - DNA, 25 bp, Homo sapien
cctccttattgttagtacttttgct

SEQ ID NO: 4762533 - DNA, 25 bp, Homo sapien
tccttattgttagtacttttgctca

SEQ ID NO: 4762534 - DNA, 25 bp, Homo sapien
tgaacctcaccatgttccaaatttc

SEQ ID NO: 4762535 - DNA, 25 bp, Homo sapien
tgccaagcttttacgttgaggaggg

SEQ ID NO: 4762536 - DNA, 25 bp, Homo sapien
tactctgcattgtcaaggtggcaat

SEQ ID NO: 4762537 - DNA, 25 bp, Homo sapien
tgaatttgcccacagtaacccttcc

SEQ ID NO: 4762538 - DNA, 25 bp, Homo sapien
aaaagggtctatggatattctgctg

SEQ ID NO: 4762539 - DNA, 25 bp, Homo sapien
aaagtccctcgtaatgttggctcag

SEQ ID NO: 4762540 - DNA, 25 bp, Homo sapien
ttaccgggtcagttaatggcctggc

SEQ ID NO: 4762541 - DNA, 25 bp, Homo sapien
tataacctcagatcctggccacgag

SEQ ID NO: 4762542 - DNA, 25 bp, Homo sapien
gcagctgacacccaactagaaaatg

SEQ ID NO: 4762543 - DNA, 25 bp, Homo sapien
tccttaccaccccatctcttatcca

SEQ ID NO: 4762544 - DNA, 25 bp, Homo sapien
gcctgacacacagccattaactctg

SEQ ID NO: 4762545 - DNA, 25 bp, Homo sapien
tccggggaataaatgcctagacacc

SEQ ID NO: 4762546 - DNA, 25 bp, Homo sapien
acttgtgacggcagacacagtggag

SEQ ID NO: 4762547 - DNA, 25 bp, Homo sapien
tgaaaccaatacaatgaccgccact

SEQ ID NO: 4762548 - DNA, 25 bp, Homo sapien
gaaagacatgtatccacatctctga

SEQ ID NO: 4762549 - DNA, 25 bp, Homo sapien
tgggagagtcattcctcactgtatc

SEQ ID NO: 4762550 - DNA, 25 bp, Homo sapien
tccaggatctagattgcggctctaa

SEQ ID NO: 4762551 - DNA, 25 bp, Homo sapien
tcagtttccctatccagaaggcaca

SEQ ID NO: 4762552 - DNA, 25 bp, Homo sapien
ctccaagatctggtgggcagatgtg

SEQ ID NO: 4762553 - DNA, 25 bp, Homo sapien
ttaaggaggctccaagatctggtgg

SEQ ID NO: 4762554 - DNA, 25 bp, Homo sapien
catctgcttgctggtggtaacagag

SEQ ID NO: 4762555 - DNA, 25 bp, Homo sapien
tggaattcatctgcttgctggtggt

SEQ ID NO: 4762556 - DNA, 25 bp, Homo sapien
gcagcagcggtggaatccacatttt

SEQ ID NO: 4762557 - DNA, 25 bp, Homo sapien
gaagagctccatgttggaagagctg

SEQ ID NO: 4762558 - DNA, 25 bp, Homo sapien
tttcctttcacagcgcctgttgctg

SEQ ID NO: 4762559 - DNA, 25 bp, Homo sapien
gcagcggtggaatccacattttcct

SEQ ID NO: 4762560 - DNA, 25 bp, Homo sapien
ctgtctccttcagaagcctggctgc

SEQ ID NO: 4762561 - DNA, 25 bp, Homo sapien
gatgcatctgcgtcactgttctggg

SEQ ID NO: 4762562 - DNA, 25 bp, Homo sapien
tggatgtggatgacacttccttctg

SEQ ID NO: 4762563 - DNA, 25 bp, Homo sapien
tggctgcgacctgctcaagtggtga

SEQ ID NO: 4762564 - DNA, 25 bp, Homo sapien
cccttgtagtgtgggagaggacaag

SEQ ID NO: 4762565 - DNA, 25 bp, Homo sapien
gtcgcccttgtagtgtgggagagga

SEQ ID NO: 4762566 - DNA, 25 bp, Homo sapien
cgcccttgtagtgtgggagaggaca

SEQ ID NO: 4762567 - DNA, 25 bp, Homo sapien
acccaagagggtcgcccttgtagtg

SEQ ID NO: 4762568 - DNA, 25 bp, Homo sapien
gggggaagcggggcctgatctgcca

SEQ ID NO: 4762569 - DNA, 25 bp, Homo sapien
gaagcggggcctgatctgccagagc

SEQ ID NO: 4762570 - DNA, 25 bp, Homo sapien
ggaagcggggcctgatctgccagag

SEQ ID NO: 4762571 - DNA, 25 bp, Homo sapien
ggcctgggcgctggcttgatactca

SEQ ID NO: 4762572 - DNA, 25 bp, Homo sapien
ggcgctggcttgatactcagtggcc

SEQ ID NO: 4762573 - DNA, 25 bp, Homo sapien
tggcctgggcgctggcttgatactc

SEQ ID NO: 4762574 - DNA, 25 bp, Homo sapien
ctgggcgctggcttgatactcagtg

SEQ ID NO: 4762575 - DNA, 25 bp, Homo sapien
cctggccgctagggccaccagctcc

SEQ ID NO: 4762576 - DNA, 25 bp, Homo sapien
aactcgcaagttgtctgtggcccac

SEQ ID NO: 4762577 - DNA, 25 bp, Homo sapien
taactcgcaagttgtctgtggccca

SEQ ID NO: 4762578 - DNA, 25 bp, Homo sapien
cttaactcgcaagttgtctgtggcc

SEQ ID NO: 4762579 - DNA, 25 bp, Homo sapien
ttaactcgcaagttgtctgtggccc

SEQ ID NO: 4762580 - DNA, 25 bp, Homo sapien
ctggtgagatgtcttatagctttgt

SEQ ID NO: 4762581 - DNA, 25 bp, Homo sapien
gagatgtcttatagctttgtgcata

SEQ ID NO: 4762582 - DNA, 25 bp, Homo sapien
tagctttgtgcatatggagactgtg

SEQ ID NO: 4762583 - DNA, 25 bp, Homo sapien
gctttgtgcatatggagactgtgca

SEQ ID NO: 4762584 - DNA, 25 bp, Homo sapien
gagagcctccaaactctactgcatg

SEQ ID NO: 4762585 - DNA, 25 bp, Homo sapien
tgcctgagagcctccaaactctact

SEQ ID NO: 4762586 - DNA, 25 bp, Homo sapien
gagcctccaaactctactgcatgaa

SEQ ID NO: 4762587 - DNA, 25 bp, Homo sapien
ctgagagcctccaaactctactgca

SEQ ID NO: 4762588 - DNA, 25 bp, Homo sapien
tgtgtgagaagctaacatcagcaac

SEQ ID NO: 4762589 - DNA, 25 bp, Homo sapien
tttgctgtgtgagaagctaacatca

SEQ ID NO: 4762590 - DNA, 25 bp, Homo sapien
aataagaattttgctgtgtgagaag

SEQ ID NO: 4762591 - DNA, 25 bp, Homo sapien
gagaagctaacatcagcaacagcct

SEQ ID NO: 4762592 - DNA, 25 bp, Homo sapien
gagctttttcattaccgaatcccag

SEQ ID NO: 4762593 - DNA, 25 bp, Homo sapien
gagctccactggcactctcatacag

SEQ ID NO: 4762594 - DNA, 25 bp, Homo sapien
ggctgatattgctgccaattgtcga

SEQ ID NO: 4762595 - DNA, 25 bp, Homo sapien
tatttattacagaggtggctgatat

SEQ ID NO: 4762596 - DNA, 25 bp, Homo sapien
tgctgggcaggcgccagcactccat

SEQ ID NO: 4762597 - DNA, 25 bp, Homo sapien
aaaactgattatccaggatcttttc

SEQ ID NO: 4762598 - DNA, 25 bp, Homo sapien
cctatgggcttagtggctttagcca

SEQ ID NO: 4762599 - DNA, 25 bp, Homo sapien
ctgatagtgggagtaaacgtatatt

SEQ ID NO: 4762600 - DNA, 25 bp, Homo sapien
gctcttttcccacctatgggcttag

SEQ ID NO: 4762601 - DNA, 25 bp, Homo sapien
tttgtctaccttgtagctggatggg

SEQ ID NO: 4762602 - DNA, 25 bp, Homo sapien
ctattcacagtcataaacttttgct

SEQ ID NO: 4762603 - DNA, 25 bp, Homo sapien
taccaagactgaacagttgcttgac

SEQ ID NO: 4762604 - DNA, 25 bp, Homo sapien
cacagtcataaacttttgctttcac

SEQ ID NO: 4762605 - DNA, 25 bp, Homo sapien
actaccaagactgaacagttgcttg

SEQ ID NO: 4762606 - DNA, 25 bp, Homo sapien
caaagttcatgacaggccattacct

SEQ ID NO: 4762607 - DNA, 25 bp, Homo sapien
cctgttctgtagaaaggaaaatcga

SEQ ID NO: 4762608 - DNA, 25 bp, Homo sapien
ggaaaatcgaaatactacagttctc

SEQ ID NO: 4762609 - DNA, 25 bp, Homo sapien
tattaaccactggacaaccattgag

SEQ ID NO: 4762610 - DNA, 25 bp, Homo sapien
cactggaatttcgaaaagcaggtga

SEQ ID NO: 4762611 - DNA, 25 bp, Homo sapien
caaacatatagaggctttcacattt

SEQ ID NO: 4762612 - DNA, 25 bp, Homo sapien
tttcgaaaagcaggtgaaagagaac

SEQ ID NO: 4762613 - DNA, 25 bp, Homo sapien
tccagcactggaatttcgaaaagca

SEQ ID NO: 4762614 - DNA, 25 bp, Homo sapien
ggttatgcgtgcctagagtggtgtc

SEQ ID NO: 4762615 - DNA, 25 bp, Homo sapien
tgggttatgcgtgcctagagtggtg

SEQ ID NO: 4762616 - DNA, 25 bp, Homo sapien
ttatgcgtgcctagagtggtgtcag

SEQ ID NO: 4762617 - DNA, 25 bp, Homo sapien
tatgcgtgcctagagtggtgtcagt

SEQ ID NO: 4762618 - DNA, 25 bp, Homo sapien
ctgtgaatttagaatagccaatggg

SEQ ID NO: 4762619 - DNA, 25 bp, Homo sapien
tgtgaatttagaatagccaatggga

SEQ ID NO: 4762620 - DNA, 25 bp, Homo sapien
gagtacttatagctttatgagatgg

SEQ ID NO: 4762621 - DNA, 25 bp, Homo sapien
aattgcttgttgataatcgcttatg

SEQ ID NO: 4762622 - DNA, 25 bp, Homo sapien
taatgccccctaggcccatctatgt

SEQ ID NO: 4762623 - DNA, 25 bp, Homo sapien
taatcgcttatgttggctccatatc

SEQ ID NO: 4762624 - DNA, 25 bp, Homo sapien
ttagaagactttgtagcattcaatc

SEQ ID NO: 4762625 - DNA, 25 bp, Homo sapien
tgacttagaagactttgtagcattc

SEQ ID NO: 4762626 - DNA, 25 bp, Homo sapien
ctgtgatttttctgatgagtcatca

SEQ ID NO: 4762627 - DNA, 25 bp, Homo sapien
caatctgtgatttttctgatgagtc

SEQ ID NO: 4762628 - DNA, 25 bp, Homo sapien
tcttggtaaaatggaccttccagat

SEQ ID NO: 4762629 - DNA, 25 bp, Homo sapien
cttggtaaaatggaccttccagata

SEQ ID NO: 4762630 - DNA, 25 bp, Homo sapien
taaaatggaccttccagatatgact

SEQ ID NO: 4762631 - DNA, 25 bp, Homo sapien
aaaatggaccttccagatatgactg

SEQ ID NO: 4762632 - DNA, 25 bp, Homo sapien
atcaccacctccaaacaaagagcat

SEQ ID NO: 4762633 - DNA, 25 bp, Homo sapien
catcaccacctccaaacaaagagca

SEQ ID NO: 4762634 - DNA, 25 bp, Homo sapien
tcagaggcgagacacatgtgtggcc

SEQ ID NO: 4762635 - DNA, 25 bp, Homo sapien
taaacactggatgttatgcttagta

SEQ ID NO: 4762636 - DNA, 25 bp, Homo sapien
cattaaacactggatgttatgctta

SEQ ID NO: 4762637 - DNA, 25 bp, Homo sapien
cactggatgttatgcttagtaccac

SEQ ID NO: 4762638 - DNA, 25 bp, Homo sapien
aacactggatgttatgcttagtacc

SEQ ID NO: 4762639 - DNA, 25 bp, Homo sapien
gaattcacacccgtcttaggcggac

SEQ ID NO: 4762640 - DNA, 25 bp, Homo sapien
acctgtagaagctggttggagaccc

SEQ ID NO: 4762641 - DNA, 25 bp, Homo sapien
cccattgggaggtctcaccgagtca

SEQ ID NO: 4762642 - DNA, 25 bp, Homo sapien
tgtactgacttgttgctgccctgca

SEQ ID NO: 4762643 - DNA, 25 bp, Homo sapien
gctccatgaagactaaacgtgccat

SEQ ID NO: 4762644 - DNA, 25 bp, Homo sapien
tccatgaagactaaacgtgccattt

SEQ ID NO: 4762645 - DNA, 25 bp, Homo sapien
tgctccatgaagactaaacgtgcca

SEQ ID NO: 4762646 - DNA, 25 bp, Homo sapien
ccatgaagactaaacgtgccatttg

SEQ ID NO: 4762647 - DNA, 25 bp, Homo sapien
ctcttggtgactctgtggcctcatt

SEQ ID NO: 4762648 - DNA, 25 bp, Homo sapien
gtttatgttgcaacactcctgggag

SEQ ID NO: 4762649 - DNA, 25 bp, Homo sapien
gaaccttccagcgtatgaaagatgt

SEQ ID NO: 4762650 - DNA, 25 bp, Homo sapien
agcacgatgatgtaattggctccag

SEQ ID NO: 4762651 - DNA, 25 bp, Homo sapien
attagggacccagaggataatcctc

SEQ ID NO: 4762652 - DNA, 25 bp, Homo sapien
gctggagcaccagatgctttggaat

SEQ ID NO: 4762653 - DNA, 25 bp, Homo sapien
atacctggtgggagtaacggatgat

SEQ ID NO: 4762654 - DNA, 25 bp, Homo sapien
tctgctgaagacgatgcttggtaat

SEQ ID NO: 4762655 - DNA, 25 bp, Homo sapien
taagggatgctctgatgcaagttcc

SEQ ID NO: 4762656 - DNA, 25 bp, Homo sapien
gacgcagtggactagtgagagaccc

SEQ ID NO: 4762657 - DNA, 25 bp, Homo sapien
gatgctctgatgcaagttccgtagt

SEQ ID NO: 4762658 - DNA, 25 bp, Homo sapien
ctgatgcaagttccgtagtgcatgg

SEQ ID NO: 4762659 - DNA, 25 bp, Homo sapien
gaaaggtgaaggacaagaaggtcac

SEQ ID NO: 4762660 - DNA, 25 bp, Homo sapien
tgaaggacaagaaggtcactgaatc

SEQ ID NO: 4762661 - DNA, 25 bp, Homo sapien
gaaggacaagaaggtcactgaatca

SEQ ID NO: 4762662 - DNA, 25 bp, Homo sapien
aggtgaaggacaagaaggtcactga

SEQ ID NO: 4762663 - DNA, 25 bp, Homo sapien
tcttgttccatgaccccagggaaaa

SEQ ID NO: 4762664 - DNA, 25 bp, Homo sapien
ttcttgttccatgaccccagggaaa

SEQ ID NO: 4762665 - DNA, 25 bp, Homo sapien
gggagaagatggtcagatacacaga

SEQ ID NO: 4762666 - DNA, 25 bp, Homo sapien
tgtgtgatactgagataaggctggg

SEQ ID NO: 4762667 - DNA, 25 bp, Homo sapien
taaaatagacgaaacacctgccaag

SEQ ID NO: 4762668 - DNA, 25 bp, Homo sapien
gatacacagaggctcctaaatgtgc

SEQ ID NO: 4762669 - DNA, 25 bp, Homo sapien
aaagattataacggatgtgagggcg

SEQ ID NO: 4762670 - DNA, 25 bp, Homo sapien
tataacggatgtgagggcggtaaca

SEQ ID NO: 4762671 - DNA, 25 bp, Homo sapien
attataacggatgtgagggcggtaa

SEQ ID NO: 4762672 - DNA, 25 bp, Homo sapien
taacggatgtgagggcggtaacaat

SEQ ID NO: 4762673 - DNA, 25 bp, Homo sapien
attgtggtagataagagaatgttcg

SEQ ID NO: 4762674 - DNA, 25 bp, Homo sapien
tggtagataagagaatgttcgtgtt

SEQ ID NO: 4762675 - DNA, 25 bp, Homo sapien
tagataagagaatgttcgtgtttgt

SEQ ID NO: 4762676 - DNA, 25 bp, Homo sapien
tgtggtagataagagaatgttcgtg

SEQ ID NO: 4762677 - DNA, 25 bp, Homo sapien
cagctgtgcaaagatgcacaggctg

SEQ ID NO: 4762678 - DNA, 25 bp, Homo sapien
ttagttggagttgcaatgccagagc

SEQ ID NO: 4762679 - DNA, 25 bp, Homo sapien
gttagttggagttgcaatgccagag

SEQ ID NO: 4762680 - DNA, 25 bp, Homo sapien
cccaggtggcttcataagcttcaca

SEQ ID NO: 4762681 - DNA, 25 bp, Homo sapien
gaccccaggtggcttcataagcttc

SEQ ID NO: 4762682 - DNA, 25 bp, Homo sapien
tcccaaacttgaaagtcccaatcta

SEQ ID NO: 4762683 - DNA, 25 bp, Homo sapien
ggtggcttcataagcttcacatttt

SEQ ID NO: 4762684 - DNA, 25 bp, Homo sapien
taatgtgacacttggcggatgtttc

SEQ ID NO: 4762685 - DNA, 25 bp, Homo sapien
gaagctgcttaagacgcttaatgtg

SEQ ID NO: 4762686 - DNA, 25 bp, Homo sapien
catttcgttcttcactttaggggca

SEQ ID NO: 4762687 - DNA, 25 bp, Homo sapien
tggcggatgtttcaatctcagattc

SEQ ID NO: 4762688 - DNA, 25 bp, Homo sapien
tcaaagttgctatggctggaatatt

SEQ ID NO: 4762689 - DNA, 25 bp, Homo sapien
gttgctatggctggaatatttcctt

SEQ ID NO: 4762690 - DNA, 25 bp, Homo sapien
aagttgctatggctggaatatttcc

SEQ ID NO: 4762691 - DNA, 25 bp, Homo sapien
cttcaaagttgctatggctggaata

SEQ ID NO: 4762692 - DNA, 25 bp, Homo sapien
ttcctacaaattgttgcctttccac

SEQ ID NO: 4762693 - DNA, 25 bp, Homo sapien
acaaattgttgcctttccacagttt

SEQ ID NO: 4762694 - DNA, 25 bp, Homo sapien
gcctttccacagtttcaaggtgcat

SEQ ID NO: 4762695 - DNA, 25 bp, Homo sapien
aattgttgcctttccacagtttcaa

SEQ ID NO: 4762696 - DNA, 25 bp, Homo sapien
tgtgagtgctttggttgtacacgtc

SEQ ID NO: 4762697 - DNA, 25 bp, Homo sapien
ggaaagaacagcatactctagctca

SEQ ID NO: 4762698 - DNA, 25 bp, Homo sapien
tctgatcagtgccagctgtgagtgc

SEQ ID NO: 4762699 - DNA, 25 bp, Homo sapien
tgtacacgtcggatgttaaacaaag

SEQ ID NO: 4762700 - DNA, 25 bp, Homo sapien
ggaggtttgtgaattgggacagaaa

SEQ ID NO: 4762701 - DNA, 25 bp, Homo sapien
tttgtgaattgggacagaaataaga

SEQ ID NO: 4762702 - DNA, 25 bp, Homo sapien
ggtttgtgaattgggacagaaataa

SEQ ID NO: 4762703 - DNA, 25 bp, Homo sapien
gaggtttgtgaattgggacagaaat

SEQ ID NO: 4762704 - DNA, 25 bp, Homo sapien
tggcaaagatttttaacgtggaagc

SEQ ID NO: 4762705 - DNA, 25 bp, Homo sapien
gaggagaatccagtatcctctggcc

SEQ ID NO: 4762706 - DNA, 25 bp, Homo sapien
gctgcttgcagagatatacatgtgg

SEQ ID NO: 4762707 - DNA, 25 bp, Homo sapien
catgaatagctctggcataagtgga

SEQ ID NO: 4762708 - DNA, 25 bp, Homo sapien
gggactctttattctttgcgtctgc

SEQ ID NO: 4762709 - DNA, 25 bp, Homo sapien
gagcgggactctttattctttgcgt

SEQ ID NO: 4762710 - DNA, 25 bp, Homo sapien
tcagaaatgtgagcgggactcttta

SEQ ID NO: 4762711 - DNA, 25 bp, Homo sapien
aaatgtgagcgggactctttattct

SEQ ID NO: 4762712 - DNA, 25 bp, Homo sapien
tattcagtaaggaagaaggttattc

SEQ ID NO: 4762713 - DNA, 25 bp, Homo sapien
tgtcttatgacatcactgtggacag

SEQ ID NO: 4762714 - DNA, 25 bp, Homo sapien
tattcacttctgaacccttaaggaa

SEQ ID NO: 4762715 - DNA, 25 bp, Homo sapien
ttataaactggttgataaatgtctt

SEQ ID NO: 4762716 - DNA, 25 bp, Homo sapien
gcagatggagtttgattctccttca

SEQ ID NO: 4762717 - DNA, 25 bp, Homo sapien
tctttggagcctggcgtctagcttc

SEQ ID NO: 4762718 - DNA, 25 bp, Homo sapien
ctggcgtctagcttcccgtcttctg

SEQ ID NO: 4762719 - DNA, 25 bp, Homo sapien
gagcctggcgtctagcttcccgtct

SEQ ID NO: 4762720 - DNA, 25 bp, Homo sapien
atgaaggcctaactctgtttctttt

SEQ ID NO: 4762721 - DNA, 25 bp, Homo sapien
tatgaaggcctaactctgtttcttt

SEQ ID NO: 4762722 - DNA, 25 bp, Homo sapien
tttccctgggaatggttctacttca

SEQ ID NO: 4762723 - DNA, 25 bp, Homo sapien
tgaaggcctaactctgtttcttttc

SEQ ID NO: 4762724 - DNA, 25 bp, Homo sapien
ccgagactggataaatggtaaagct

SEQ ID NO: 4762725 - DNA, 25 bp, Homo sapien
tccttccttggaaaagcaccttcca

SEQ ID NO: 4762726 - DNA, 25 bp, Homo sapien
tcttccagctgtaaccattcccttt

SEQ ID NO: 4762727 - DNA, 25 bp, Homo sapien
ttctttctgggatcctctgtcctcc

SEQ ID NO: 4762728 - DNA, 25 bp, Homo sapien
gagcaggccacttcaaatagataaa

SEQ ID NO: 4762729 - DNA, 25 bp, Homo sapien
cagagcaggccacttcaaatagata

SEQ ID NO: 4762730 - DNA, 25 bp, Homo sapien
tgacagagcaggccacttcaaatag

SEQ ID NO: 4762731 - DNA, 25 bp, Homo sapien
gacagagcaggccacttcaaataga

SEQ ID NO: 4762732 - DNA, 25 bp, Homo sapien
taaatttgtccttgggaatacgctc

SEQ ID NO: 4762733 - DNA, 25 bp, Homo sapien
aatttgtccttgggaatacgctcat

SEQ ID NO: 4762734 - DNA, 25 bp, Homo sapien
aaatttgtccttgggaatacgctca

SEQ ID NO: 4762735 - DNA, 25 bp, Homo sapien
cactggacttgtctcagaatcctgt

SEQ ID NO: 4762736 - DNA, 25 bp, Homo sapien
gtctcagaatcctgtccagggcctg

SEQ ID NO: 4762737 - DNA, 25 bp, Homo sapien
gtccagggcctggatttggctccat

SEQ ID NO: 4762738 - DNA, 25 bp, Homo sapien
gacttgtctcagaatcctgtccagg

SEQ ID NO: 4762739 - DNA, 25 bp, Homo sapien
aattcaagtgggctatggagtcacc

SEQ ID NO: 4762740 - DNA, 25 bp, Homo sapien
aaagggccccagatattgctcaagc

SEQ ID NO: 4762741 - DNA, 25 bp, Homo sapien
tgttagcctcaggacactgttccct

SEQ ID NO: 4762742 - DNA, 25 bp, Homo sapien
cttgggagcccctgcctagattaca

SEQ ID NO: 4762743 - DNA, 25 bp, Homo sapien
tacgtaggtatacaagactccttga

SEQ ID NO: 4762744 - DNA, 25 bp, Homo sapien
tggcattggtgttgggtttatgtcc

SEQ ID NO: 4762745 - DNA, 25 bp, Homo sapien
gattattaacagtcttggcattggt

SEQ ID NO: 4762746 - DNA, 25 bp, Homo sapien
taggattaactggtacgtaggtata

SEQ ID NO: 4762747 - DNA, 25 bp, Homo sapien
gcatggcataatcaccagctatgtg

SEQ ID NO: 4762748 - DNA, 25 bp, Homo sapien
ttgcatggcataatcaccagctatg

SEQ ID NO: 4762749 - DNA, 25 bp, Homo sapien
tgcatggcataatcaccagctatgt

SEQ ID NO: 4762750 - DNA, 25 bp, Homo sapien
cagagttaaatccaagggtactatc

SEQ ID NO: 4762751 - DNA, 25 bp, Homo sapien
agaaacatgactcaatctagatggg

SEQ ID NO: 4762752 - DNA, 25 bp, Homo sapien
tatgatgtcaggaaaaccgtcatag

SEQ ID NO: 4762753 - DNA, 25 bp, Homo sapien
tgccttcattcgcagacatgcttct

SEQ ID NO: 4762754 - DNA, 25 bp, Homo sapien
attcattgccatcagcattgagcag

SEQ ID NO: 4762755 - DNA, 25 bp, Homo sapien
ggcttattcatgtctacacattcat

SEQ ID NO: 4762756 - DNA, 25 bp, Homo sapien
cacattcattgccatcagcattgag

SEQ ID NO: 4762757 - DNA, 25 bp, Homo sapien
catcccttccaagaggcttattcat

SEQ ID NO: 4762758 - DNA, 25 bp, Homo sapien
tctaatgcttcctgttggcagtcac

SEQ ID NO: 4762759 - DNA, 25 bp, Homo sapien
ttctaatgcttcctgttggcagtca

SEQ ID NO: 4762760 - DNA, 25 bp, Homo sapien
aatgcttcctgttggcagtcaccac

SEQ ID NO: 4762761 - DNA, 25 bp, Homo sapien
ttattctaatgcttcctgttggcag

SEQ ID NO: 4762762 - DNA, 25 bp, Homo sapien
tgcactgaagttattagtttgtagc

SEQ ID NO: 4762763 - DNA, 25 bp, Homo sapien
tgtcttggtcctcttccactatttt

SEQ ID NO: 4762764 - DNA, 25 bp, Homo sapien
caagatcccccatagattttggtca

SEQ ID NO: 4762765 - DNA, 25 bp, Homo sapien
aggacccagcatgccatactcttgg

SEQ ID NO: 4762766 - DNA, 25 bp, Homo sapien
tccatccgagtctgcgctgccaggg

SEQ ID NO: 4762767 - DNA, 25 bp, Homo sapien
ctcatagactccatccgagtctgcg

SEQ ID NO: 4762768 - DNA, 25 bp, Homo sapien
catagactccatccgagtctgcgct

SEQ ID NO: 4762769 - DNA, 25 bp, Homo sapien
tagactccatccgagtctgcgctgc

SEQ ID NO: 4762770 - DNA, 25 bp, Homo sapien
cttctgttgccaaaacagctgcaag

SEQ ID NO: 4762771 - DNA, 25 bp, Homo sapien
ttctgttgccaaaacagctgcaagc

SEQ ID NO: 4762772 - DNA, 25 bp, Homo sapien
ccatctagactcacaacacagactg

SEQ ID NO: 4762773 - DNA, 25 bp, Homo sapien
tctagactcacaacacagactgtga

SEQ ID NO: 4762774 - DNA, 25 bp, Homo sapien
atctagactcacaacacagactgtg

SEQ ID NO: 4762775 - DNA, 25 bp, Homo sapien
catctagactcacaacacagactgt

SEQ ID NO: 4762776 - DNA, 25 bp, Homo sapien
tcaaagcccaagtcaatcttaagca

SEQ ID NO: 4762777 - DNA, 25 bp, Homo sapien
gcccaagtcaatcttaagcattact

SEQ ID NO: 4762778 - DNA, 25 bp, Homo sapien
tttcatgatcaaagcccaagtcaat

SEQ ID NO: 4762779 - DNA, 25 bp, Homo sapien
atgatcaaagcccaagtcaatctta

SEQ ID NO: 4762780 - DNA, 25 bp, Homo sapien
tcaggggccttataaattatctgag

SEQ ID NO: 4762781 - DNA, 25 bp, Homo sapien
cctctatcttcaggggccttataaa

SEQ ID NO: 4762782 - DNA, 25 bp, Homo sapien
aattatctgagctgctaaaaatgga

SEQ ID NO: 4762783 - DNA, 25 bp, Homo sapien
taaattatctgagctgctaaaaatg

SEQ ID NO: 4762784 - DNA, 25 bp, Homo sapien
gcagcttcgtgaaaatgaacgttgg

SEQ ID NO: 4762785 - DNA, 25 bp, Homo sapien
caggaattggtggaccgtctcggca

SEQ ID NO: 4762786 - DNA, 25 bp, Homo sapien
tggtgctttctcaaagggccttgga

SEQ ID NO: 4762787 - DNA, 25 bp, Homo sapien
gttggtgagtctcctaatgctgccc

SEQ ID NO: 4762788 - DNA, 25 bp, Homo sapien
accaagtccaatcataagtggcttc

SEQ ID NO: 4762789 - DNA, 25 bp, Homo sapien
atatgtacttcaccaagtccaatca

SEQ ID NO: 4762790 - DNA, 25 bp, Homo sapien
catatgtacttcaccaagtccaatc

SEQ ID NO: 4762791 - DNA, 25 bp, Homo sapien
taactatgtcaatcatataggcggc

SEQ ID NO: 4762792 - DNA, 25 bp, Homo sapien
tttacatgtccacctatgtcaatta

SEQ ID NO: 4762793 - DNA, 25 bp, Homo sapien
gccaatctcttaataggttctgaat

SEQ ID NO: 4762794 - DNA, 25 bp, Homo sapien
tttacccatacctccgatataacta

SEQ ID NO: 4762795 - DNA, 25 bp, Homo sapien
ggcagaggagttttactgattgaat

SEQ ID NO: 4762796 - DNA, 25 bp, Homo sapien
tgctgtcaaaacctatcatcctgtt

SEQ ID NO: 4762797 - DNA, 25 bp, Homo sapien
ttgaatgctgtcaaaacctatcatc

SEQ ID NO: 4762798 - DNA, 25 bp, Homo sapien
gagttttactgattgaatgctgtca

SEQ ID NO: 4762799 - DNA, 25 bp, Homo sapien
cagtcctctggtagatgttgttcga

SEQ ID NO: 4762800 - DNA, 25 bp, Homo sapien
tcctctggtagatgttgttcgaaag

SEQ ID NO: 4762801 - DNA, 25 bp, Homo sapien
tagatgttgttcgaaaggaaggtat

SEQ ID NO: 4762802 - DNA, 25 bp, Homo sapien
tctggtagatgttgttcgaaaggaa

SEQ ID NO: 4762803 - DNA, 25 bp, Homo sapien
cctgcaagatcacaagatgttatca

SEQ ID NO: 4762804 - DNA, 25 bp, Homo sapien
tccctgcaagatcacaagatgttat

SEQ ID NO: 4762805 - DNA, 25 bp, Homo sapien
cttccctgcaagatcacaagatgtt

SEQ ID NO: 4762806 - DNA, 25 bp, Homo sapien
gcaagatcacaagatgttatcacag

SEQ ID NO: 4762807 - DNA, 25 bp, Homo sapien
gaagatgaccgatcaggccaagtcg

SEQ ID NO: 4762808 - DNA, 25 bp, Homo sapien
tgaagatgaccgatcaggccaagtc

SEQ ID NO: 4762809 - DNA, 25 bp, Homo sapien
agatgaccgatcaggccaagtcgac

SEQ ID NO: 4762810 - DNA, 25 bp, Homo sapien
ttgaagatgaccgatcaggccaagt

SEQ ID NO: 4762811 - DNA, 25 bp, Homo sapien
ctgagcaacatctgcattgcttgca

SEQ ID NO: 4762812 - DNA, 25 bp, Homo sapien
cattggagctgagcaacatctgcat

SEQ ID NO: 4762813 - DNA, 25 bp, Homo sapien
gagcaacatctgcattgcttgcatt

SEQ ID NO: 4762814 - DNA, 25 bp, Homo sapien
ttggagctgagcaacatctgcattg

SEQ ID NO: 4762815 - DNA, 25 bp, Homo sapien
taccccaacaccaatcacttgctca

SEQ ID NO: 4762816 - DNA, 25 bp, Homo sapien
tcacttgctcatttatcattcccat

SEQ ID NO: 4762817 - DNA, 25 bp, Homo sapien
ccaacaccaatcacttgctcattta

SEQ ID NO: 4762818 - DNA, 25 bp, Homo sapien
cccaacaccaatcacttgctcattt

SEQ ID NO: 4762819 - DNA, 25 bp, Homo sapien
ttatgaagtcatttggaatatctgc

SEQ ID NO: 4762820 - DNA, 25 bp, Homo sapien
ctgcttaacagtatgtgctcctgtg

SEQ ID NO: 4762821 - DNA, 25 bp, Homo sapien
tatgtgctcctgtgtttatgaagtc

SEQ ID NO: 4762822 - DNA, 25 bp, Homo sapien
tgcatgcaaccactggctcggtgag

SEQ ID NO: 4762823 - DNA, 25 bp, Homo sapien
agagcagttgtattatgagtaaagc

SEQ ID NO: 4762824 - DNA, 25 bp, Homo sapien
tgagtaaagcaatcagtggtctggg

SEQ ID NO: 4762825 - DNA, 25 bp, Homo sapien
tgaaatctccgaacagtttttccat

SEQ ID NO: 4762826 - DNA, 25 bp, Homo sapien
taggctacagccactggcagagcag

SEQ ID NO: 4762827 - DNA, 25 bp, Homo sapien
gctgctggttttcgttgatatgttt

SEQ ID NO: 4762828 - DNA, 25 bp, Homo sapien
tggcaaaggaatgatcaagctgctg

SEQ ID NO: 4762829 - DNA, 25 bp, Homo sapien
ttttcgttgatatgtttaagctttc

SEQ ID NO: 4762830 - DNA, 25 bp, Homo sapien
tcagatggcaaaggaatgatcaagc

SEQ ID NO: 4762831 - DNA, 25 bp, Homo sapien
gcttttgccctaacatatcccaggg

SEQ ID NO: 4762832 - DNA, 25 bp, Homo sapien
aaacttcaaggcctgattgtgataa

SEQ ID NO: 4762833 - DNA, 25 bp, Homo sapien
cttcagtttgctgcgaggatgcgcc

SEQ ID NO: 4762834 - DNA, 25 bp, Homo sapien
aaaggaatccctaattgcacttcag

SEQ ID NO: 4762835 - DNA, 25 bp, Homo sapien
taatgactattaccattttcagcta

SEQ ID NO: 4762836 - DNA, 25 bp, Homo sapien
accaggtaggacctgcttcaccagg

SEQ ID NO: 4762837 - DNA, 25 bp, Homo sapien
gctcttgaccctgggacgggcctgg

SEQ ID NO: 4762838 - DNA, 25 bp, Homo sapien
ccctgggacgggcctgggaagtcag

SEQ ID NO: 4762839 - DNA, 25 bp, Homo sapien
tcttgaccctgggacgggcctggga

SEQ ID NO: 4762840 - DNA, 25 bp, Homo sapien
tccgcaaataggctgcttcctgttg

SEQ ID NO: 4762841 - DNA, 25 bp, Homo sapien
tgagcctccagatgagctctgattt

SEQ ID NO: 4762842 - DNA, 25 bp, Homo sapien
atgtgctttccgcaaataggctgct

SEQ ID NO: 4762843 - DNA, 25 bp, Homo sapien
gcctccagatgagctctgatttatc

SEQ ID NO: 4762844 - DNA, 25 bp, Homo sapien
ctttccagatctccatacatctact

SEQ ID NO: 4762845 - DNA, 25 bp, Homo sapien
tttccagatctccatacatctactg

SEQ ID NO: 4762846 - DNA, 25 bp, Homo sapien
gtttagtaaagcaagctagcccttg

SEQ ID NO: 4762847 - DNA, 25 bp, Homo sapien
tcttataagactcatgttgactgta

SEQ ID NO: 4762848 - DNA, 25 bp, Homo sapien
gtttccagtaataggattcctcaca

SEQ ID NO: 4762849 - DNA, 25 bp, Homo sapien
gactgtatagggtttagtaaagcaa

SEQ ID NO: 4762850 - DNA, 25 bp, Homo sapien
accaaacatcgacatgcaggctgca

SEQ ID NO: 4762851 - DNA, 25 bp, Homo sapien
gtcacatccctctggcccttttctc

SEQ ID NO: 4762852 - DNA, 25 bp, Homo sapien
catcgacatgcaggctgcaccttgg

SEQ ID NO: 4762853 - DNA, 25 bp, Homo sapien
tgtccttgtcataccaaacatcgac

SEQ ID NO: 4762854 - DNA, 25 bp, Homo sapien
ggctgatcttcagacagctgacata

SEQ ID NO: 4762855 - DNA, 25 bp, Homo sapien
cgtgatggctgatcttcagacagct

SEQ ID NO: 4762856 - DNA, 25 bp, Homo sapien
gatcttcagacagctgacataatgt

SEQ ID NO: 4762857 - DNA, 25 bp, Homo sapien
gctgacataatgttcctggtttctc

SEQ ID NO: 4762858 - DNA, 25 bp, Homo sapien
tttctcaggcaaatgtaaccatcat

SEQ ID NO: 4762859 - DNA, 25 bp, Homo sapien
tttttctcaggcaaatgtaaccatc

SEQ ID NO: 4762860 - DNA, 25 bp, Homo sapien
tgtgtaggacaaccagggttgaata

SEQ ID NO: 4762861 - DNA, 25 bp, Homo sapien
aatgggaagttgtgtaggacaacca

SEQ ID NO: 4762862 - DNA, 25 bp, Homo sapien
ttgagtggtctgttcatctggaaca

SEQ ID NO: 4762863 - DNA, 25 bp, Homo sapien
aatgggtgaaaatatccaatatgtt

SEQ ID NO: 4762864 - DNA, 25 bp, Homo sapien
gttgagtggtctgttcatctggaac

SEQ ID NO: 4762865 - DNA, 25 bp, Homo sapien
aaaatatccaatatgttgagtggtc

SEQ ID NO: 4762866 - DNA, 25 bp, Homo sapien
gctagcgcacacgagatcatataat

SEQ ID NO: 4762867 - DNA, 25 bp, Homo sapien
gaagcttatcctcaacagcctgttg

SEQ ID NO: 4762868 - DNA, 25 bp, Homo sapien
cagaaaagagggtgtgctagcgcac

SEQ ID NO: 4762869 - DNA, 25 bp, Homo sapien
gtttatcacacacttcactacctgg

SEQ ID NO: 4762870 - DNA, 25 bp, Homo sapien
cagagttgggtcttttcttggcttc

SEQ ID NO: 4762871 - DNA, 25 bp, Homo sapien
cacctgcaggtgttatttttgcaac

SEQ ID NO: 4762872 - DNA, 25 bp, Homo sapien
tgaaaggcagctgccgtcactctct

SEQ ID NO: 4762873 - DNA, 25 bp, Homo sapien
tcttcatggccttctgcacaccggg

SEQ ID NO: 4762874 - DNA, 25 bp, Homo sapien
catgctgggtttctgccgcctaagc

SEQ ID NO: 4762875 - DNA, 25 bp, Homo sapien
gagtgcacaccacatgaagtccatg

SEQ ID NO: 4762876 - DNA, 25 bp, Homo sapien
gctgagtgtattcctatttccaaag

SEQ ID NO: 4762877 - DNA, 25 bp, Homo sapien
ggacttttcgcaggtagccacaact

SEQ ID NO: 4762878 - DNA, 25 bp, Homo sapien
acagcacactgtagcatattgggca

SEQ ID NO: 4762879 - DNA, 25 bp, Homo sapien
tggcccttcctaagcatttggtcgt

SEQ ID NO: 4762880 - DNA, 25 bp, Homo sapien
cagtctgctggaagttgtatatcac

SEQ ID NO: 4762881 - DNA, 25 bp, Homo sapien
tatagttgcatagcgttcagtctgc

SEQ ID NO: 4762882 - DNA, 25 bp, Homo sapien
gctttcatgtacttgaaacacatcg

SEQ ID NO: 4762883 - DNA, 25 bp, Homo sapien
gactcttgccttctgtacattttgc

SEQ ID NO: 4762884 - DNA, 25 bp, Homo sapien
tctgtgagagactcttgccttctgt

SEQ ID NO: 4762885 - DNA, 25 bp, Homo sapien
tcgtattatcaatcctcttgtacaa

SEQ ID NO: 4762886 - DNA, 25 bp, Homo sapien
aaaatttgacatcgtagtagacaac

SEQ ID NO: 4762887 - DNA, 25 bp, Homo sapien
caaacaagggaactgagcctaaaat

SEQ ID NO: 4762888 - DNA, 25 bp, Homo sapien
tggcagctctgcaagtattaatact

SEQ ID NO: 4762889 - DNA, 25 bp, Homo sapien
aatcccaattgtgaaaaaacctctg

SEQ ID NO: 4762890 - DNA, 25 bp, Homo sapien
cattcggaggaaagtgacccaccat

SEQ ID NO: 4762891 - DNA, 25 bp, Homo sapien
catccaatccgcaaatcttgattaa

SEQ ID NO: 4762892 - DNA, 25 bp, Homo sapien
acaatccctttccaacattcggagg

SEQ ID NO: 4762893 - DNA, 25 bp, Homo sapien
caccagagtaatttggaagatgctc

SEQ ID NO: 4762894 - DNA, 25 bp, Homo sapien
aagatcttgggccaaacacttctca

SEQ ID NO: 4762895 - DNA, 25 bp, Homo sapien
aaggtggaagatcttgggccaaaca

SEQ ID NO: 4762896 - DNA, 25 bp, Homo sapien
gtggaagatcttgggccaaacactt

SEQ ID NO: 4762897 - DNA, 25 bp, Homo sapien
agatcttgggccaaacacttctcat

SEQ ID NO: 4762898 - DNA, 25 bp, Homo sapien
tctaatataagtaaatgtgtggtaa

SEQ ID NO: 4762899 - DNA, 25 bp, Homo sapien
ctaatataagtaaatgtgtggtaaa

SEQ ID NO: 4762900 - DNA, 25 bp, Homo sapien
caactatgatcaatatgctagggct

SEQ ID NO: 4762901 - DNA, 25 bp, Homo sapien
gaacaggtaggcagtataagcagag

SEQ ID NO: 4762902 - DNA, 25 bp, Homo sapien
agatatgtagggctgactgtacagc

SEQ ID NO: 4762903 - DNA, 25 bp, Homo sapien
ggatgttggcattatgagaccagga

SEQ ID NO: 4762904 - DNA, 25 bp, Homo sapien
aagcccagtgcgttcagaaatcaca

SEQ ID NO: 4762905 - DNA, 25 bp, Homo sapien
taaccaaaaattaagccaagctgtc

SEQ ID NO: 4762906 - DNA, 25 bp, Homo sapien
tctctaaccaaaaattaagccaagc

SEQ ID NO: 4762907 - DNA, 25 bp, Homo sapien
gaaatcacaggcgaaatctctaacc

SEQ ID NO: 4762908 - DNA, 25 bp, Homo sapien
ggttggatatgtaaaatctccaata

SEQ ID NO: 4762909 - DNA, 25 bp, Homo sapien
gttggatatgtaaaatctccaatat

SEQ ID NO: 4762910 - DNA, 25 bp, Homo sapien
gatatgtaaaatctccaatattcgc

SEQ ID NO: 4762911 - DNA, 25 bp, Homo sapien
tggatatgtaaaatctccaatattc

SEQ ID NO: 4762912 - DNA, 25 bp, Homo sapien
gctagcaccaggtcccaatccaaac

SEQ ID NO: 4762913 - DNA, 25 bp, Homo sapien
ctagcaccaggtcccaatccaaacc

SEQ ID NO: 4762914 - DNA, 25 bp, Homo sapien
agcaccaggtcccaatccaaaccaa

SEQ ID NO: 4762915 - DNA, 25 bp, Homo sapien
gcaccaggtcccaatccaaaccaac

SEQ ID NO: 4762916 - DNA, 25 bp, Homo sapien
ccaagcgccagtcgcttcactgtag

SEQ ID NO: 4762917 - DNA, 25 bp, Homo sapien
gaagattgatttacaacccaaggtg

SEQ ID NO: 4762918 - DNA, 25 bp, Homo sapien
caagaatcgtatttcacagacccaa

SEQ ID NO: 4762919 - DNA, 25 bp, Homo sapien
tgagcaccagaattgtccagggagc

SEQ ID NO: 4762920 - DNA, 25 bp, Homo sapien
tctcatgcagtgtgaacagcaggag

SEQ ID NO: 4762921 - DNA, 25 bp, Homo sapien
cacagcgtgccctttaacttcaaaa

SEQ ID NO: 4762922 - DNA, 25 bp, Homo sapien
tgcagggtggctaaagtatttacaa

SEQ ID NO: 4762923 - DNA, 25 bp, Homo sapien
gatgagaatcaacgtgctgccaact

SEQ ID NO: 4762924 - DNA, 25 bp, Homo sapien
ctgtggacattctggaaatcaacgg

SEQ ID NO: 4762925 - DNA, 25 bp, Homo sapien
gacattctggaaatcaacggctgac

SEQ ID NO: 4762926 - DNA, 25 bp, Homo sapien
tggacattctggaaatcaacggctg

SEQ ID NO: 4762927 - DNA, 25 bp, Homo sapien
tgtggacattctggaaatcaacggc

SEQ ID NO: 4762928 - DNA, 25 bp, Homo sapien
ctgtgaacaagcctgcctcctgatc

SEQ ID NO: 4762929 - DNA, 25 bp, Homo sapien
ccttggcagactttcgtgtttgtag

SEQ ID NO: 4762930 - DNA, 25 bp, Homo sapien
gtgcctccgggtcattttcacctga

SEQ ID NO: 4762931 - DNA, 25 bp, Homo sapien
cacctgacgtgagtccttggcagac

SEQ ID NO: 4762932 - DNA, 25 bp, Homo sapien
ggtgcataaggtgactagggaaatc

SEQ ID NO: 4762933 - DNA, 25 bp, Homo sapien
gcacataaaccaggcaatgctggtt

SEQ ID NO: 4762934 - DNA, 25 bp, Homo sapien
acataaaccaggcaatgctggtttc

SEQ ID NO: 4762935 - DNA, 25 bp, Homo sapien
tcaggagcacataaaccaggcaatg

SEQ ID NO: 4762936 - DNA, 25 bp, Homo sapien
ataaaccaggcaatgctggtttcag

SEQ ID NO: 4762937 - DNA, 25 bp, Homo sapien
gggacaggccactgagcgaaacttg

SEQ ID NO: 4762938 - DNA, 25 bp, Homo sapien
tgtctagggtggtgccacagggatc

SEQ ID NO: 4762939 - DNA, 25 bp, Homo sapien
gccactgagcgaaacttggtgtcta

SEQ ID NO: 4762940 - DNA, 25 bp, Homo sapien
ctctgggagatccaccttcctggag

SEQ ID NO: 4762941 - DNA, 25 bp, Homo sapien
aaatgaagattcagatcacccaggg

SEQ ID NO: 4762942 - DNA, 25 bp, Homo sapien
taaaatgaagattcagatcacccag

SEQ ID NO: 4762943 - DNA, 25 bp, Homo sapien
aaaatgaagattcagatcacccagg

SEQ ID NO: 4762944 - DNA, 25 bp, Homo sapien
cctttcacctgcaaaccatggcggt

SEQ ID NO: 4762945 - DNA, 25 bp, Homo sapien
aaaggcacatgttaatcaacccatg

SEQ ID NO: 4762946 - DNA, 25 bp, Homo sapien
caaaccatggcggtgatttaaggaa

SEQ ID NO: 4762947 - DNA, 25 bp, Homo sapien
ggtgtttgcctttcacctgcaaacc

SEQ ID NO: 4762948 - DNA, 25 bp, Homo sapien
ggagagtggcacacacttagcagcc

SEQ ID NO: 4762949 - DNA, 25 bp, Homo sapien
caaacctctgaaggtccaagactta

SEQ ID NO: 4762950 - DNA, 25 bp, Homo sapien
cagcccagacttatcaatctcacag

SEQ ID NO: 4762951 - DNA, 25 bp, Homo sapien
ctgaaggtccaagacttatcaaaag

SEQ ID NO: 4762952 - DNA, 25 bp, Homo sapien
aaagaaacagcccagacttatcaat

SEQ ID NO: 4762953 - DNA, 25 bp, Homo sapien
aacaataacgctgtgtccctccggg

SEQ ID NO: 4762954 - DNA, 25 bp, Homo sapien
tatcgacaggccataggatgctttg

SEQ ID NO: 4762955 - DNA, 25 bp, Homo sapien
gctgaaatcaaacaggaggtgagcc

SEQ ID NO: 4762956 - DNA, 25 bp, Homo sapien
gctttgaaggctgaattgatccatt

SEQ ID NO: 4762957 - DNA, 25 bp, Homo sapien
catggagcgaccaaatgtttgaagt

SEQ ID NO: 4762958 - DNA, 25 bp, Homo sapien
agcagggcgatggtgattcttctca

SEQ ID NO: 4762959 - DNA, 25 bp, Homo sapien
tctagaggtgctaaatgggttgagc

SEQ ID NO: 4762960 - DNA, 25 bp, Homo sapien
cactaagtccgtatagtgacttcta

SEQ ID NO: 4762961 - DNA, 25 bp, Homo sapien
atcagaggcccatgtgtttacagaa

SEQ ID NO: 4762962 - DNA, 25 bp, Homo sapien
ggcccatgtgtttacagaataagaa

SEQ ID NO: 4762963 - DNA, 25 bp, Homo sapien
aatttttcatgcattgcactatcat

SEQ ID NO: 4762964 - DNA, 25 bp, Homo sapien
tcatgcattgcactatcatctccaa

SEQ ID NO: 4762965 - DNA, 25 bp, Homo sapien
tagactggattgttacgctctgtct

SEQ ID NO: 4762966 - DNA, 25 bp, Homo sapien
gattgttacgctctgtctggccctt

SEQ ID NO: 4762967 - DNA, 25 bp, Homo sapien
ctgtgtcccgtagcctccagcatgg

SEQ ID NO: 4762968 - DNA, 25 bp, Homo sapien
gtctggcccttctgtgtcccgtagc

SEQ ID NO: 4762969 - DNA, 25 bp, Homo sapien
aatggaaggaactagtgctgacagc

SEQ ID NO: 4762970 - DNA, 25 bp, Homo sapien
aataatggaaggaactagtgctgac

SEQ ID NO: 4762971 - DNA, 25 bp, Homo sapien
tggaaggaactagtgctgacagctt

SEQ ID NO: 4762972 - DNA, 25 bp, Homo sapien
ataataatggaaggaactagtgctg

SEQ ID NO: 4762973 - DNA, 25 bp, Homo sapien
cataagagactaatgtaacagccaa

SEQ ID NO: 4762974 - DNA, 25 bp, Homo sapien
aatgttgctcagtatattcttccct

SEQ ID NO: 4762975 - DNA, 25 bp, Homo sapien
gttgctcagtatattcttccctgtg

SEQ ID NO: 4762976 - DNA, 25 bp, Homo sapien
caaacacaaaagcacatgattccag

SEQ ID NO: 4762977 - DNA, 25 bp, Homo sapien
gacatgagaatccaagtcctgatca

SEQ ID NO: 4762978 - DNA, 25 bp, Homo sapien
agttgacatgagaatccaagtcctg

SEQ ID NO: 4762979 - DNA, 25 bp, Homo sapien
catgagaatccaagtcctgatcagg

SEQ ID NO: 4762980 - DNA, 25 bp, Homo sapien
gagaatccaagtcctgatcaggagc

SEQ ID NO: 4762981 - DNA, 25 bp, Homo sapien
caaattccaatgaggagcttgcttg

SEQ ID NO: 4762982 - DNA, 25 bp, Homo sapien
attcaaattccaatgaggagcttgc

SEQ ID NO: 4762983 - DNA, 25 bp, Homo sapien
ctgaagttgacatgggaattcaaat

SEQ ID NO: 4762984 - DNA, 25 bp, Homo sapien
agttgacatgggaattcaaattcca

SEQ ID NO: 4762985 - DNA, 25 bp, Homo sapien
atggtagctgataacatctcagaga

SEQ ID NO: 4762986 - DNA, 25 bp, Homo sapien
gataaattcggacagttcacatgtg

SEQ ID NO: 4762987 - DNA, 25 bp, Homo sapien
aaatggtagctgataacatctcaga

SEQ ID NO: 4762988 - DNA, 25 bp, Homo sapien
tgggggataaattcggacagttcac

SEQ ID NO: 4762989 - DNA, 25 bp, Homo sapien
aatctgcccaattatccagtgcttt

SEQ ID NO: 4762990 - DNA, 25 bp, Homo sapien
caatgtctgtgctctgatttctact

SEQ ID NO: 4762991 - DNA, 25 bp, Homo sapien
aaaagcaggaggcaatgtctgtgct

SEQ ID NO: 4762992 - DNA, 25 bp, Homo sapien
tatctgcaacatctgaaaagcctcc

SEQ ID NO: 4762993 - DNA, 25 bp, Homo sapien
aatactttgatatcttgattaataa

SEQ ID NO: 4762994 - DNA, 25 bp, Homo sapien
aagaaaaccatagcttcctttatct

SEQ ID NO: 4762995 - DNA, 25 bp, Homo sapien
gaaaaccatagcttcctttatctgc

SEQ ID NO: 4762996 - DNA, 25 bp, Homo sapien
tgcaaagttttcctcggtaaataca

SEQ ID NO: 4762997 - DNA, 25 bp, Homo sapien
ctcggtaaatacatggggcctggaa

SEQ ID NO: 4762998 - DNA, 25 bp, Homo sapien
taatagccgctaaatgacaagcagc

SEQ ID NO: 4762999 - DNA, 25 bp, Homo sapien
gacaagcagcttttgaaatcacttc

SEQ ID NO: 4763000 - DNA, 25 bp, Homo sapien
tttgaagggtagaatgatgtccaac

SEQ ID NO: 4763001 - DNA, 25 bp, Homo sapien
aaatcacttccaactgaatacattt

SEQ ID NO: 4763002 - DNA, 25 bp, Homo sapien
gtcttccccaagatatccgccaatt

SEQ ID NO: 4763003 - DNA, 25 bp, Homo sapien
ccatccctttgagatcctgaactgt

SEQ ID NO: 4763004 - DNA, 25 bp, Homo sapien
cccatgccatgatcacgactaacag

SEQ ID NO: 4763005 - DNA, 25 bp, Homo sapien
tcacatgaatagatgcaatccatgt

SEQ ID NO: 4763006 - DNA, 25 bp, Homo sapien
caaagacactggtccacatctgctt

SEQ ID NO: 4763007 - DNA, 25 bp, Homo sapien
catataaaaagatggccaaagacac

SEQ ID NO: 4763008 - DNA, 25 bp, Homo sapien
atgctgtctctaccctcaacttcat

SEQ ID NO: 4763009 - DNA, 25 bp, Homo sapien
gtacacaaatacacattggaacata

SEQ ID NO: 4763010 - DNA, 25 bp, Homo sapien
tgggctccctgtacattgtcctcgg

SEQ ID NO: 4763011 - DNA, 25 bp, Homo sapien
ttgtgagaacaagccaagcgggagc

SEQ ID NO: 4763012 - DNA, 25 bp, Homo sapien
catggatctgatcggcaccaggttc

SEQ ID NO: 4763013 - DNA, 25 bp, Homo sapien
cgtgacgtgatcagtccggagtgac

SEQ ID NO: 4763014 - DNA, 25 bp, Homo sapien
tcatggagggtttcagaaggccctg

SEQ ID NO: 4763015 - DNA, 25 bp, Homo sapien
aggccctggtgaataaagccccaga

SEQ ID NO: 4763016 - DNA, 25 bp, Homo sapien
gggctgcaagtggccgagctccagg

SEQ ID NO: 4763017 - DNA, 25 bp, Homo sapien
cctggtgaataaagccccagagggc

SEQ ID NO: 4763018 - DNA, 25 bp, Homo sapien
gtttatgttgagctgatataggcag

SEQ ID NO: 4763019 - DNA, 25 bp, Homo sapien
tgttgagctgatataggcagaagaa

SEQ ID NO: 4763020 - DNA, 25 bp, Homo sapien
ttcagtaaaagcaaggctcatgcag

SEQ ID NO: 4763021 - DNA, 25 bp, Homo sapien
ccatatgtgagtggttcttggaaaa

SEQ ID NO: 4763022 - DNA, 25 bp, Homo sapien
aattgcacatggacagatttatgca

SEQ ID NO: 4763023 - DNA, 25 bp, Homo sapien
ccttttccacaattaggaactgcta

SEQ ID NO: 4763024 - DNA, 25 bp, Homo sapien
ttttccacaattaggaactgctacc

SEQ ID NO: 4763025 - DNA, 25 bp, Homo sapien
attgcacatggacagatttatgcat

SEQ ID NO: 4763026 - DNA, 25 bp, Homo sapien
gcaaaatggtggaaggatgtgttca

SEQ ID NO: 4763027 - DNA, 25 bp, Homo sapien
ttcaaagcaaaatggtggaaggatg

SEQ ID NO: 4763028 - DNA, 25 bp, Homo sapien
tgcctttcagatgtcttgttgcttt

SEQ ID NO: 4763029 - DNA, 25 bp, Homo sapien
gttgcttttaggcaatttcaaagca

SEQ ID NO: 4763030 - DNA, 25 bp, Homo sapien
taaatgggatactaacagttctggg

SEQ ID NO: 4763031 - DNA, 25 bp, Homo sapien
tgctgccatgcagtcggctgtctgt

SEQ ID NO: 4763032 - DNA, 25 bp, Homo sapien
caagaacccaggaatggacacctca

SEQ ID NO: 4763033 - DNA, 25 bp, Homo sapien
gtcacatggacttgcctgtgcacgg

SEQ ID NO: 4763034 - DNA, 25 bp, Homo sapien
gctgcttcaaatctgttttatggga

SEQ ID NO: 4763035 - DNA, 25 bp, Homo sapien
ttttgctatgcaggggaaaactttc

SEQ ID NO: 4763036 - DNA, 25 bp, Homo sapien
actgggattttgctatgcaggggaa

SEQ ID NO: 4763037 - DNA, 25 bp, Homo sapien
tatgggagccacactgggattttgc

SEQ ID NO: 4763038 - DNA, 25 bp, Homo sapien
cagttgtggctaccatgaacgcttc

SEQ ID NO: 4763039 - DNA, 25 bp, Homo sapien
agatttctcttaccacacaggcagg

SEQ ID NO: 4763040 - DNA, 25 bp, Homo sapien
tgctgagctcctcatacctgtgtgt

SEQ ID NO: 4763041 - DNA, 25 bp, Homo sapien
tgatggtaagaggaacatgcctggc

SEQ ID NO: 4763042 - DNA, 25 bp, Homo sapien
catgtgagtcggcagattccgttcc

SEQ ID NO: 4763043 - DNA, 25 bp, Homo sapien
tgggcaaggcgtgatccccagatca

SEQ ID NO: 4763044 - DNA, 25 bp, Homo sapien
ctgctctacaaaggacggaaagtga

SEQ ID NO: 4763045 - DNA, 25 bp, Homo sapien
ctctgtccgcttggccttggtgctc

SEQ ID NO: 4763046 - DNA, 25 bp, Homo sapien
cttgtcccccgagccagtgactatg

SEQ ID NO: 4763047 - DNA, 25 bp, Homo sapien
cacagctaagcactgacgaggactc

SEQ ID NO: 4763048 - DNA, 25 bp, Homo sapien
tgtcccccgagccagtgactatgta

SEQ ID NO: 4763049 - DNA, 25 bp, Homo sapien
taagcactgacgaggactctttgga

SEQ ID NO: 4763050 - DNA, 25 bp, Homo sapien
gcgacactgtggtcaaactgtggat

SEQ ID NO: 4763051 - DNA, 25 bp, Homo sapien
gatctaggtgaggagtacttactca

SEQ ID NO: 4763052 - DNA, 25 bp, Homo sapien
gtggaacaacggtactcagaggccc

SEQ ID NO: 4763053 - DNA, 25 bp, Homo sapien
tcggaggcaccttcactcctggctt

SEQ ID NO: 4763054 - DNA, 25 bp, Homo sapien
ctccatagggggtccgccaagcatt

SEQ ID NO: 4763055 - DNA, 25 bp, Homo sapien
gtccgccaagcattgaggaggttat

SEQ ID NO: 4763056 - DNA, 25 bp, Homo sapien
gaatatgctggctccatagggggtc

SEQ ID NO: 4763057 - DNA, 25 bp, Homo sapien
ttatcttttccagtactcacaaacc

SEQ ID NO: 4763058 - DNA, 25 bp, Homo sapien
ttagcaaaggaatatctagttttca

SEQ ID NO: 4763059 - DNA, 25 bp, Homo sapien
tcctactatacaattagcaacttgg

SEQ ID NO: 4763060 - DNA, 25 bp, Homo sapien
tagaattagcaaaggaatatctagt

SEQ ID NO: 4763061 - DNA, 25 bp, Homo sapien
gcaacttggacttaatcaaactaag

SEQ ID NO: 4763062 - DNA, 25 bp, Homo sapien
ggcttgttcacgtgcagcacctcca

SEQ ID NO: 4763063 - DNA, 25 bp, Homo sapien
tcaggcttgttcacgtgcagcacct

SEQ ID NO: 4763064 - DNA, 25 bp, Homo sapien
aggcttgttcacgtgcagcacctcc

SEQ ID NO: 4763065 - DNA, 25 bp, Homo sapien
gtcaggcttgttcacgtgcagcacc

SEQ ID NO: 4763066 - DNA, 25 bp, Homo sapien
ttagaaatgtcaatacagctggctc

SEQ ID NO: 4763067 - DNA, 25 bp, Homo sapien
tagaaatgtcaatacagctggctcc

SEQ ID NO: 4763068 - DNA, 25 bp, Homo sapien
ttccctgttttccacgatccaagtg

SEQ ID NO: 4763069 - DNA, 25 bp, Homo sapien
gcacctgcgattgtctttccctgtt

SEQ ID NO: 4763070 - DNA, 25 bp, Homo sapien
gggaaacagcacctgcgattgtctt

SEQ ID NO: 4763071 - DNA, 25 bp, Homo sapien
gaggggaaacagcacctgcgattgt

SEQ ID NO: 4763072 - DNA, 25 bp, Homo sapien
gagtgcagccatcgggtagcaattt

SEQ ID NO: 4763073 - DNA, 25 bp, Homo sapien
cgggtagcaatttacaggaacggat

SEQ ID NO: 4763074 - DNA, 25 bp, Homo sapien
ttcccctcccactatgagagtgcag

SEQ ID NO: 4763075 - DNA, 25 bp, Homo sapien
aggaacggatataattgtctctgtt

SEQ ID NO: 4763076 - DNA, 25 bp, Homo sapien
attgcccttgtgcaccagttcctgt

SEQ ID NO: 4763077 - DNA, 25 bp, Homo sapien
tccagggagaaattgcccttgtgca

SEQ ID NO: 4763078 - DNA, 25 bp, Homo sapien
ccagggagaaattgcccttgtgcac

SEQ ID NO: 4763079 - DNA, 25 bp, Homo sapien
ttgtgcaccagttcctgttcactca

SEQ ID NO: 4763080 - DNA, 25 bp, Homo sapien
ttgacgcagcccttcccgcctgtgt

SEQ ID NO: 4763081 - DNA, 25 bp, Homo sapien
ctgatgtcccagaccttgacgcagc

SEQ ID NO: 4763082 - DNA, 25 bp, Homo sapien
ttattgccagggtggctgatgtccc

SEQ ID NO: 4763083 - DNA, 25 bp, Homo sapien
cgcctgtgtacacgtgtctcgtggg

SEQ ID NO: 4763084 - DNA, 25 bp, Homo sapien
gagggtgttgatctggcgagcatgc

SEQ ID NO: 4763085 - DNA, 25 bp, Homo sapien
agggtgttgatctggcgagcatgcc

SEQ ID NO: 4763086 - DNA, 25 bp, Homo sapien
gggtgttgatctggcgagcatgccg

SEQ ID NO: 4763087 - DNA, 25 bp, Homo sapien
tgcagtaacgtggaaggagtatgca

SEQ ID NO: 4763088 - DNA, 25 bp, Homo sapien
ctgcagtaacgtggaaggagtatgc

SEQ ID NO: 4763089 - DNA, 25 bp, Homo sapien
accagtttatggtatggacttcaac

SEQ ID NO: 4763090 - DNA, 25 bp, Homo sapien
gcctgcctatgttctgaccaatgag

SEQ ID NO: 4763091 - DNA, 25 bp, Homo sapien
tgcctaccttggtcaggaacgccat

SEQ ID NO: 4763092 - DNA, 25 bp, Homo sapien
gcaaagtgtgcagctaaaaaactac

SEQ ID NO: 4763093 - DNA, 25 bp, Homo sapien
attgattcacaatgcagcgagctgc

SEQ ID NO: 4763094 - DNA, 25 bp, Homo sapien
gccaaatcaaatgaacacgccagag

SEQ ID NO: 4763095 - DNA, 25 bp, Homo sapien
cacgggaagcccatatggatgttaa

SEQ ID NO: 4763096 - DNA, 25 bp, Homo sapien
ggatgttaatacatcagtcacaggg

SEQ ID NO: 4763097 - DNA, 25 bp, Homo sapien
cacacatcgtgagcaacataaggca

SEQ ID NO: 4763098 - DNA, 25 bp, Homo sapien
tgtcgacatcgtgagtgtgactgtg

SEQ ID NO: 4763099 - DNA, 25 bp, Homo sapien
ggaaccgggctccttatggaatgga

SEQ ID NO: 4763100 - DNA, 25 bp, Homo sapien
ttccagaggatactcttagcctgaa

SEQ ID NO: 4763101 - DNA, 25 bp, Homo sapien
tcctctatcaattacacgtttccaa

SEQ ID NO: 4763102 - DNA, 25 bp, Homo sapien
gaggaagtattccagccaaagtcaa

SEQ ID NO: 4763103 - DNA, 25 bp, Homo sapien
caagaaacagatgacctaagttgat

SEQ ID NO: 4763104 - DNA, 25 bp, Homo sapien
gagttctaggacctaacttcctcta

SEQ ID NO: 4763105 - DNA, 25 bp, Homo sapien
tgtgagggggaggatcaaaccccac

SEQ ID NO: 4763106 - DNA, 25 bp, Homo sapien
tcctgccaggtttggaggaatggta

SEQ ID NO: 4763107 - DNA, 25 bp, Homo sapien
tcatgtgagggggaggatcaaaccc

SEQ ID NO: 4763108 - DNA, 25 bp, Homo sapien
ctctcatgtgagggggaggatcaaa

SEQ ID NO: 4763109 - DNA, 25 bp, Homo sapien
tgcagcgttcctaccccaaccacag

SEQ ID NO: 4763110 - DNA, 25 bp, Homo sapien
ctgacagcgctcaatggagcatgca

SEQ ID NO: 4763111 - DNA, 25 bp, Homo sapien
ggagcatgcagcgttcctaccccaa

SEQ ID NO: 4763112 - DNA, 25 bp, Homo sapien
aatggagcatgcagcgttcctaccc

SEQ ID NO: 4763113 - DNA, 25 bp, Homo sapien
agctcgccgttcatgccagcgtggg

SEQ ID NO: 4763114 - DNA, 25 bp, Homo sapien
cccaaaaggagcaggatatgggccg

SEQ ID NO: 4763115 - DNA, 25 bp, Homo sapien
tgtaaactggcgtaggcagcgcctg

SEQ ID NO: 4763116 - DNA, 25 bp, Homo sapien
ggcgacatgttgtgtaaactggcgt

SEQ ID NO: 4763117 - DNA, 25 bp, Homo sapien
atcacctccaatttatacactggat

SEQ ID NO: 4763118 - DNA, 25 bp, Homo sapien
tgaaaggaaacacaagccgcacatc

SEQ ID NO: 4763119 - DNA, 25 bp, Homo sapien
tccatcaaacctgaccagcaagtct

SEQ ID NO: 4763120 - DNA, 25 bp, Homo sapien
ggaagcacaacccacacattttctc

SEQ ID NO: 4763121 - DNA, 25 bp, Homo sapien
gaagattttctcgataaaatccaag

SEQ ID NO: 4763122 - DNA, 25 bp, Homo sapien
tcagtccgaactttccattccctgg

SEQ ID NO: 4763123 - DNA, 25 bp, Homo sapien
aagaagattttctcgataaaatcca

SEQ ID NO: 4763124 - DNA, 25 bp, Homo sapien
ttccctggtaccaattccaaatgaa

SEQ ID NO: 4763125 - DNA, 25 bp, Homo sapien
cagccagtattagcaaagtcagacg

SEQ ID NO: 4763126 - DNA, 25 bp, Homo sapien
tgagttttttaagggctggagtcgc

SEQ ID NO: 4763127 - DNA, 25 bp, Homo sapien
gagtcgcagagaaaccctcctaatt

SEQ ID NO: 4763128 - DNA, 25 bp, Homo sapien
cagcaaactatagtctgcaaggagc

SEQ ID NO: 4763129 - DNA, 25 bp, Homo sapien
gagggtggccctacgtacatttcat

SEQ ID NO: 4763130 - DNA, 25 bp, Homo sapien
ggcaattgcgtcacaacattaacag

SEQ ID NO: 4763131 - DNA, 25 bp, Homo sapien
caaagcacaacaagaggcgatgctg

SEQ ID NO: 4763132 - DNA, 25 bp, Homo sapien
taaacagttggagactgaacagagt

SEQ ID NO: 4763133 - DNA, 25 bp, Homo sapien
catgtcgctccgaggcgttggtgtg

SEQ ID NO: 4763134 - DNA, 25 bp, Homo sapien
gctggatttcagaacaggcgtgctg

SEQ ID NO: 4763135 - DNA, 25 bp, Homo sapien
ggctggaggcttgccgagacctgga

SEQ ID NO: 4763136 - DNA, 25 bp, Homo sapien
gtgcccggcgttggcatgtcgctcc

SEQ ID NO: 4763137 - DNA, 25 bp, Homo sapien
ttctttggatttcaaagaagtggaa

SEQ ID NO: 4763138 - DNA, 25 bp, Homo sapien
ttggatttcaaagaagtggaacttg

SEQ ID NO: 4763139 - DNA, 25 bp, Homo sapien
aagctcatttctttggatttcaaag

SEQ ID NO: 4763140 - DNA, 25 bp, Homo sapien
caagctcatttctttggatttcaaa

SEQ ID NO: 4763141 - DNA, 25 bp, Homo sapien
gcaggcgatttttgtcgattccatt

SEQ ID NO: 4763142 - DNA, 25 bp, Homo sapien
cgattccattttcccggggcgagtg

SEQ ID NO: 4763143 - DNA, 25 bp, Homo sapien
agcatccttctttagcaggcgattt

SEQ ID NO: 4763144 - DNA, 25 bp, Homo sapien
tctttagcaggcgatttttgtcgat

SEQ ID NO: 4763145 - DNA, 25 bp, Homo sapien
tgatttagcttgtaacagacagact

SEQ ID NO: 4763146 - DNA, 25 bp, Homo sapien
gcttgtaacagacagacttttccct

SEQ ID NO: 4763147 - DNA, 25 bp, Homo sapien
tttcgtgatttagcttgtaacagac

SEQ ID NO: 4763148 - DNA, 25 bp, Homo sapien
tcaaaagttttcgtgatttagcttg

SEQ ID NO: 4763149 - DNA, 25 bp, Homo sapien
ctaaatttaaggacagagctgaaag

SEQ ID NO: 4763150 - DNA, 25 bp, Homo sapien
taaatttaaggacagagctgaaagt

SEQ ID NO: 4763151 - DNA, 25 bp, Homo sapien
aaatttaaggacagagctgaaagtc

SEQ ID NO: 4763152 - DNA, 25 bp, Homo sapien
ctaagttgtcatcgcttttgtcacc

SEQ ID NO: 4763153 - DNA, 25 bp, Homo sapien
tgtcatcgcttttgtcaccatcact

SEQ ID NO: 4763154 - DNA, 25 bp, Homo sapien
cacaactaagttgtcatcgcttttg

SEQ ID NO: 4763155 - DNA, 25 bp, Homo sapien
gacacatccacaactaagttgtcat

SEQ ID NO: 4763156 - DNA, 25 bp, Homo sapien
catcttagcattgtgtcgaagagca

SEQ ID NO: 4763157 - DNA, 25 bp, Homo sapien
tcgaagagcagagatactacagctg

SEQ ID NO: 4763158 - DNA, 25 bp, Homo sapien
cacaaggtacctggcactaactcca

SEQ ID NO: 4763159 - DNA, 25 bp, Homo sapien
actccaggtggcactcaaaaagatg

SEQ ID NO: 4763160 - DNA, 25 bp, Homo sapien
ttagacctccacatagcctgcacag

SEQ ID NO: 4763161 - DNA, 25 bp, Homo sapien
gacctccacatagcctgcacagtag

SEQ ID NO: 4763162 - DNA, 25 bp, Homo sapien
agacctccacatagcctgcacagta

SEQ ID NO: 4763163 - DNA, 25 bp, Homo sapien
tccacatagcctgcacagtagatac

SEQ ID NO: 4763164 - DNA, 25 bp, Homo sapien
aagggcatcagggacgtagccccat

SEQ ID NO: 4763165 - DNA, 25 bp, Homo sapien
catactgttcctgagaatgcatcca

SEQ ID NO: 4763166 - DNA, 25 bp, Homo sapien
cctgcaagggcatcagggacgtagc

SEQ ID NO: 4763167 - DNA, 25 bp, Homo sapien
gtagccccatttcagcaactttact

SEQ ID NO: 4763168 - DNA, 25 bp, Homo sapien
tctgcgtttatctgtgcctcttaga

SEQ ID NO: 4763169 - DNA, 25 bp, Homo sapien
tgatgtcattggaaaattcaggtcc

SEQ ID NO: 4763170 - DNA, 25 bp, Homo sapien
tagtggctggagtccttatcatcca

SEQ ID NO: 4763171 - DNA, 25 bp, Homo sapien
cctcttagactgtctgggaccagga

SEQ ID NO: 4763172 - DNA, 25 bp, Homo sapien
cacagggccattccaagacagcttc

SEQ ID NO: 4763173 - DNA, 25 bp, Homo sapien
agcactgcgcatccaagccacaggg

SEQ ID NO: 4763174 - DNA, 25 bp, Homo sapien
ctgtcatcagcactgcgcatccaag

SEQ ID NO: 4763175 - DNA, 25 bp, Homo sapien
gttgttgtcgtttaatgatgtcaaa

SEQ ID NO: 4763176 - DNA, 25 bp, Homo sapien
gtgactttgtgggtactgcatttct

SEQ ID NO: 4763177 - DNA, 25 bp, Homo sapien
tgtgggtactgcatttcttgaggtg

SEQ ID NO: 4763178 - DNA, 25 bp, Homo sapien
gcatttcttgaggtgtttttccctc

SEQ ID NO: 4763179 - DNA, 25 bp, Homo sapien
actgcatttcttgaggtgtttttcc

SEQ ID NO: 4763180 - DNA, 25 bp, Homo sapien
actaagtatgtgaccggatgcaccc

SEQ ID NO: 4763181 - DNA, 25 bp, Homo sapien
catggtcgctcagattactaactct

SEQ ID NO: 4763182 - DNA, 25 bp, Homo sapien
ttacagagtgacaacatggtcgctc

SEQ ID NO: 4763183 - DNA, 25 bp, Homo sapien
gcctccttgataaaaccatggtgct

SEQ ID NO: 4763184 - DNA, 25 bp, Homo sapien
gaataattagaacacaagccccaaa

SEQ ID NO: 4763185 - DNA, 25 bp, Homo sapien
gggaataattagaacacaagcccca

SEQ ID NO: 4763186 - DNA, 25 bp, Homo sapien
ggaataattagaacacaagccccaa

SEQ ID NO: 4763187 - DNA, 25 bp, Homo sapien
tcgagaaatctacagatgcccacag

SEQ ID NO: 4763188 - DNA, 25 bp, Homo sapien
cagttgccaagatgtcaagatgcct

SEQ ID NO: 4763189 - DNA, 25 bp, Homo sapien
caggccactggcattaactaggcag

SEQ ID NO: 4763190 - DNA, 25 bp, Homo sapien
gatgcctgcaatctaacgagatcga

SEQ ID NO: 4763191 - DNA, 25 bp, Homo sapien
tttattgccaagtgagactgcccac

SEQ ID NO: 4763192 - DNA, 25 bp, Homo sapien
tccgtggccatgagaaagatgctga

SEQ ID NO: 4763193 - DNA, 25 bp, Homo sapien
actcagagcactagacagcgcaaga

SEQ ID NO: 4763194 - DNA, 25 bp, Homo sapien
tgtggtgctctgcatcgtggtgctt

SEQ ID NO: 4763195 - DNA, 25 bp, Homo sapien
cctaaaaatctagaatggagtcacc

SEQ ID NO: 4763196 - DNA, 25 bp, Homo sapien
gaaggaatctaactacagggtggag

SEQ ID NO: 4763197 - DNA, 25 bp, Homo sapien
tatgtcagaccaaacatactccggt

SEQ ID NO: 4763198 - DNA, 25 bp, Homo sapien
cagcgggtaattaagcacggcacta

SEQ ID NO: 4763199 - DNA, 25 bp, Homo sapien
tgtccatcgtctggcacaagcttgg

SEQ ID NO: 4763200 - DNA, 25 bp, Homo sapien
ccaagaggcttgctacagggctcag

SEQ ID NO: 4763201 - DNA, 25 bp, Homo sapien
cacagacgatactggctcaaagcca

SEQ ID NO: 4763202 - DNA, 25 bp, Homo sapien
caagcttggaacacatctgagtcag

SEQ ID NO: 4763203 - DNA, 25 bp, Homo sapien
tctgtcccatctgtctttggaagcc

SEQ ID NO: 4763204 - DNA, 25 bp, Homo sapien
gacagcgctcctctgtcccatctgt

SEQ ID NO: 4763205 - DNA, 25 bp, Homo sapien
tttggaagcccattttttctcaaca

SEQ ID NO: 4763206 - DNA, 25 bp, Homo sapien
cccatctgtctttggaagcccattt

SEQ ID NO: 4763207 - DNA, 25 bp, Homo sapien
tatatagccaaaacccaatagctct

SEQ ID NO: 4763208 - DNA, 25 bp, Homo sapien
ggaaaaagtgatactgatactacta

SEQ ID NO: 4763209 - DNA, 25 bp, Homo sapien
gccaatcaggagaatttatgcacac

SEQ ID NO: 4763210 - DNA, 25 bp, Homo sapien
cacaccagccgatacatgcattttt

SEQ ID NO: 4763211 - DNA, 25 bp, Homo sapien
gcactgctgcttggcacaaccacca

SEQ ID NO: 4763212 - DNA, 25 bp, Homo sapien
ccacatccctgtaaccactaaagac

SEQ ID NO: 4763213 - DNA, 25 bp, Homo sapien
aaacacccacatccctgtaaccact

SEQ ID NO: 4763214 - DNA, 25 bp, Homo sapien
accaggacttgaccaactggaccca

SEQ ID NO: 4763215 - DNA, 25 bp, Homo sapien
gctgtagttattattctgccagtca

SEQ ID NO: 4763216 - DNA, 25 bp, Homo sapien
tgtagttattattctgccagtcatc

SEQ ID NO: 4763217 - DNA, 25 bp, Homo sapien
tagggctgtagttattattctgcca

SEQ ID NO: 4763218 - DNA, 25 bp, Homo sapien
aaagtagggctgtagttattattct

SEQ ID NO: 4763219 - DNA, 25 bp, Homo sapien
taagtcggcccctgaacaatactga

SEQ ID NO: 4763220 - DNA, 25 bp, Homo sapien
tgcatttactctgcgcgcagctgct

SEQ ID NO: 4763221 - DNA, 25 bp, Homo sapien
tgtaggaacagacagtttcccggta

SEQ ID NO: 4763222 - DNA, 25 bp, Homo sapien
gctatcaaaccaggctgcatttact

SEQ ID NO: 4763223 - DNA, 25 bp, Homo sapien
tctctgattcagctcaaaatgggta

SEQ ID NO: 4763224 - DNA, 25 bp, Homo sapien
atttttcctggactaaagccattcg

SEQ ID NO: 4763225 - DNA, 25 bp, Homo sapien
catttgcccttctaaaaagatctgc

SEQ ID NO: 4763226 - DNA, 25 bp, Homo sapien
gaacatctggttaatgcgatttcct

SEQ ID NO: 4763227 - DNA, 25 bp, Homo sapien
tgaaaaaattctgtgcttgagctac

SEQ ID NO: 4763228 - DNA, 25 bp, Homo sapien
gattcacaagagctgggcggtgcct

SEQ ID NO: 4763229 - DNA, 25 bp, Homo sapien
ccgggtacttgagaactgctttgca

SEQ ID NO: 4763230 - DNA, 25 bp, Homo sapien
caagaaaagggtacagaaggcagca

SEQ ID NO: 4763231 - DNA, 25 bp, Homo sapien
tccactgaagctccccatttcaggg

SEQ ID NO: 4763232 - DNA, 25 bp, Homo sapien
ccttggctcttatgttttttctcca

SEQ ID NO: 4763233 - DNA, 25 bp, Homo sapien
tctttaatcctccttggctcttatg

SEQ ID NO: 4763234 - DNA, 25 bp, Homo sapien
aaggagagttttcaagctgaggctc

SEQ ID NO: 4763235 - DNA, 25 bp, Homo sapien
gcagatctgcaattgagaaactgat

SEQ ID NO: 4763236 - DNA, 25 bp, Homo sapien
ggatgtaattttaagccctgatgga

SEQ ID NO: 4763237 - DNA, 25 bp, Homo sapien
tttaagccctgatggattaactggt

SEQ ID NO: 4763238 - DNA, 25 bp, Homo sapien
tccagttgggatgtaattttaagcc

SEQ ID NO: 4763239 - DNA, 25 bp, Homo sapien
ctccagttgggatgtaattttaagc

SEQ ID NO: 4763240 - DNA, 25 bp, Homo sapien
tatggcactcttaatccgtacagca

SEQ ID NO: 4763241 - DNA, 25 bp, Homo sapien
gatttgaatctgctcaaggcactca

SEQ ID NO: 4763242 - DNA, 25 bp, Homo sapien
tctgtggccgtcattggactatggc

SEQ ID NO: 4763243 - DNA, 25 bp, Homo sapien
tctgagggaactataaagaccagca

SEQ ID NO: 4763244 - DNA, 25 bp, Homo sapien
ccttctttggcttagtgtggaaggg

SEQ ID NO: 4763245 - DNA, 25 bp, Homo sapien
tggaaggggacgaacacatgagaac

SEQ ID NO: 4763246 - DNA, 25 bp, Homo sapien
gaacacatgagaaccatcccaggtc

SEQ ID NO: 4763247 - DNA, 25 bp, Homo sapien
cagaaaggacggtcccttgtttcag

SEQ ID NO: 4763248 - DNA, 25 bp, Homo sapien
gggatggaatgcacggttcaccaga

SEQ ID NO: 4763249 - DNA, 25 bp, Homo sapien
ttgtgattgacaaccagtggctagc

SEQ ID NO: 4763250 - DNA, 25 bp, Homo sapien
tggctagcacggagcactaactgaa

SEQ ID NO: 4763251 - DNA, 25 bp, Homo sapien
tataggttcgaataccccagaaagc

SEQ ID NO: 4763252 - DNA, 25 bp, Homo sapien
ctcccacccttatcaaataggtcaa

SEQ ID NO: 4763253 - DNA, 25 bp, Homo sapien
ataggtcaacgttaagatacacaca

SEQ ID NO: 4763254 - DNA, 25 bp, Homo sapien
cacacacgtaaagccatcaaattaa

SEQ ID NO: 4763255 - DNA, 25 bp, Homo sapien
catcttccttatgctaagccctctt

SEQ ID NO: 4763256 - DNA, 25 bp, Homo sapien
gtaggaggtagacctggtaggccac

SEQ ID NO: 4763257 - DNA, 25 bp, Homo sapien
taggaggtagacctggtaggccacg

SEQ ID NO: 4763258 - DNA, 25 bp, Homo sapien
tgtaggaggtagacctggtaggcca

SEQ ID NO: 4763259 - DNA, 25 bp, Homo sapien
cccgatgatggcattcaattctgcc

SEQ ID NO: 4763260 - DNA, 25 bp, Homo sapien
ggcattcaattctgccatggtcacc

SEQ ID NO: 4763261 - DNA, 25 bp, Homo sapien
catggtcacctgtttggcacgttca

SEQ ID NO: 4763262 - DNA, 25 bp, Homo sapien
tgtttggcacgttcaacagcctggg

SEQ ID NO: 4763263 - DNA, 25 bp, Homo sapien
cggaaactcctggaattcctctcat

SEQ ID NO: 4763264 - DNA, 25 bp, Homo sapien
ttcggaaactcctggaattcctctc

SEQ ID NO: 4763265 - DNA, 25 bp, Homo sapien
tcattttcggaaactcctggaattc

SEQ ID NO: 4763266 - DNA, 25 bp, Homo sapien
cagtcattttcggaaactcctggaa

SEQ ID NO: 4763267 - DNA, 25 bp, Homo sapien
tattcaatctcttggcgatttcagt

SEQ ID NO: 4763268 - DNA, 25 bp, Homo sapien
tgtgcacaaatcgtattcaatctct

SEQ ID NO: 4763269 - DNA, 25 bp, Homo sapien
tgacttgtgcacaaatcgtattcaa

SEQ ID NO: 4763270 - DNA, 25 bp, Homo sapien
caaatcgtattcaatctcttggcga

SEQ ID NO: 4763271 - DNA, 25 bp, Homo sapien
aagactttcttcatggatggccacc

SEQ ID NO: 4763272 - DNA, 25 bp, Homo sapien
taatacacagatgactaggcccacc

SEQ ID NO: 4763273 - DNA, 25 bp, Homo sapien
tctctaatcttcatgtggacaccag

SEQ ID NO: 4763274 - DNA, 25 bp, Homo sapien
tcctgttggagtctaggcctgagaa

SEQ ID NO: 4763275 - DNA, 25 bp, Homo sapien
caaactccagcgtacacgaggatgg

SEQ ID NO: 4763276 - DNA, 25 bp, Homo sapien
gaaagctctcctatcttcgcagcag

SEQ ID NO: 4763277 - DNA, 25 bp, Homo sapien
tgggcacagatagcaacactaattg

SEQ ID NO: 4763278 - DNA, 25 bp, Homo sapien
tagctcctcgtgaggcagattgcag

SEQ ID NO: 4763279 - DNA, 25 bp, Homo sapien
tgcaaatgacaagcttgccaggccc

SEQ ID NO: 4763280 - DNA, 25 bp, Homo sapien
taggtaataccacacaatggcagga

SEQ ID NO: 4763281 - DNA, 25 bp, Homo sapien
tggagttcagaaagagcctgttcac

SEQ ID NO: 4763282 - DNA, 25 bp, Homo sapien
gtggaaagcaagcaagcctctccct

SEQ ID NO: 4763283 - DNA, 25 bp, Homo sapien
gcctgactaacatgacgaaacgcag

SEQ ID NO: 4763284 - DNA, 25 bp, Homo sapien
gattaaaatttggagccactgaggc

SEQ ID NO: 4763285 - DNA, 25 bp, Homo sapien
ggcagaaaaagaacctgtgaacagt

SEQ ID NO: 4763286 - DNA, 25 bp, Homo sapien
gatatgtaaaggaagttggaagttg

SEQ ID NO: 4763287 - DNA, 25 bp, Homo sapien
tgtgaacagttaacagtcaagaagt

SEQ ID NO: 4763288 - DNA, 25 bp, Homo sapien
tgctctcaaatcgaatgattctgct

SEQ ID NO: 4763289 - DNA, 25 bp, Homo sapien
tagacttggaaaagtagccacattc

SEQ ID NO: 4763290 - DNA, 25 bp, Homo sapien
gctagaattgtaacagccaatcaaa

SEQ ID NO: 4763291 - DNA, 25 bp, Homo sapien
cagtcctcctgagtaatagacttgg

SEQ ID NO: 4763292 - DNA, 25 bp, Homo sapien
aatattagtacatcagcagcagctg

SEQ ID NO: 4763293 - DNA, 25 bp, Homo sapien
ttctggcggaccaattcctagggca

SEQ ID NO: 4763294 - DNA, 25 bp, Homo sapien
ttcaaatggcacaaataacggtggc

SEQ ID NO: 4763295 - DNA, 25 bp, Homo sapien
tagatcacagctatccctcagagcg

SEQ ID NO: 4763296 - DNA, 25 bp, Homo sapien
gtgacggaacgagattccgtcgcgc

SEQ ID NO: 4763297 - DNA, 25 bp, Homo sapien
gcacaaagtgactgatcaaactccc

SEQ ID NO: 4763298 - DNA, 25 bp, Homo sapien
ctgcccattcttcagcagaacacag

SEQ ID NO: 4763299 - DNA, 25 bp, Homo sapien
gaacgagattccgtcgcgcaaaaaa

SEQ ID NO: 4763300 - DNA, 25 bp, Homo sapien
tcagtcctgacatgtcttacaaatc

SEQ ID NO: 4763301 - DNA, 25 bp, Homo sapien
cactgctgattctcctaacttttag

SEQ ID NO: 4763302 - DNA, 25 bp, Homo sapien
gaagttcatcagcacaaagagtcag

SEQ ID NO: 4763303 - DNA, 25 bp, Homo sapien
gcactagggagacatggtccacctc

SEQ ID NO: 4763304 - DNA, 25 bp, Homo sapien
gagcaaaacacctacccaatctact

SEQ ID NO: 4763305 - DNA, 25 bp, Homo sapien
gtcccagactctgaacacgtgcaca

SEQ ID NO: 4763306 - DNA, 25 bp, Homo sapien
cgtgcacacagctgtaggcagagca

SEQ ID NO: 4763307 - DNA, 25 bp, Homo sapien
tcaagcttcaatagatgcgtggcct

SEQ ID NO: 4763308 - DNA, 25 bp, Homo sapien
cactctagttaagggtctgtcagca

SEQ ID NO: 4763309 - DNA, 25 bp, Homo sapien
tcaactaaatttcaggaggctcagt

SEQ ID NO: 4763310 - DNA, 25 bp, Homo sapien
tcaggagtctcgctaatgcccagtt

SEQ ID NO: 4763311 - DNA, 25 bp, Homo sapien
catgctggtgatcaggcggcaaaaa

SEQ ID NO: 4763312 - DNA, 25 bp, Homo sapien
aagaaaaagctcagtctcctcttac

SEQ ID NO: 4763313 - DNA, 25 bp, Homo sapien
aaaaagctcagtctcctcttactct

SEQ ID NO: 4763314 - DNA, 25 bp, Homo sapien
aaagctcagtctcctcttactcttc

SEQ ID NO: 4763315 - DNA, 25 bp, Homo sapien
gaaaaagctcagtctcctcttactc

SEQ ID NO: 4763316 - DNA, 25 bp, Homo sapien
gccacagatcttctagcccatttac

SEQ ID NO: 4763317 - DNA, 25 bp, Homo sapien
cacagatcttctagcccatttacta

SEQ ID NO: 4763318 - DNA, 25 bp, Homo sapien
ttctagcccatttactatcaagaag

SEQ ID NO: 4763319 - DNA, 25 bp, Homo sapien
ttaaatgacgatagatgttagccac

SEQ ID NO: 4763320 - DNA, 25 bp, Homo sapien
cagccggtcagccatgctctttaat

SEQ ID NO: 4763321 - DNA, 25 bp, Homo sapien
tcaaagagtgcggagttacaaaagc

SEQ ID NO: 4763322 - DNA, 25 bp, Homo sapien
aagtgaatgtcagcgtatctccaga

SEQ ID NO: 4763323 - DNA, 25 bp, Homo sapien
gacttattgtaccagcgtcttgatg

SEQ ID NO: 4763324 - DNA, 25 bp, Homo sapien
tacaccattatagtagccataagtg

SEQ ID NO: 4763325 - DNA, 25 bp, Homo sapien
gtccttagtgccttgttccagctca

SEQ ID NO: 4763326 - DNA, 25 bp, Homo sapien
cattgctagagctttccagtcacta

SEQ ID NO: 4763327 - DNA, 25 bp, Homo sapien
gtgtgaattttatgggaacttgcaa

SEQ ID NO: 4763328 - DNA, 25 bp, Homo sapien
gtgcatttcaatgtttaatccatat

SEQ ID NO: 4763329 - DNA, 25 bp, Homo sapien
tgcatttcaatgtttaatccatatg

SEQ ID NO: 4763330 - DNA, 25 bp, Homo sapien
ttcacttgccagtttctcacattcc

SEQ ID NO: 4763331 - DNA, 25 bp, Homo sapien
cttgccagtttctcacattccaatt

SEQ ID NO: 4763332 - DNA, 25 bp, Homo sapien
ctctgcatttctgtcttttcacttg

SEQ ID NO: 4763333 - DNA, 25 bp, Homo sapien
gtcttttcacttgccagtttctcac

SEQ ID NO: 4763334 - DNA, 25 bp, Homo sapien
ttggaaaagccataaactatctagg

SEQ ID NO: 4763335 - DNA, 25 bp, Homo sapien
ctatctaggtaaacacccaaaagct

SEQ ID NO: 4763336 - DNA, 25 bp, Homo sapien
gcctcacatatttgcacttcaagta

SEQ ID NO: 4763337 - DNA, 25 bp, Homo sapien
ggtgcctatctggttagatgacaag

SEQ ID NO: 4763338 - DNA, 25 bp, Homo sapien
tgtttctctgtactccaccaaaatc

SEQ ID NO: 4763339 - DNA, 25 bp, Homo sapien
ccttgcacaatcttcactcttaggc

SEQ ID NO: 4763340 - DNA, 25 bp, Homo sapien
ttctctgtactccaccaaaatccgg

SEQ ID NO: 4763341 - DNA, 25 bp, Homo sapien
caaaatccggcccttgcacaatctt

SEQ ID NO: 4763342 - DNA, 25 bp, Homo sapien
tgagaaagcccctgacaaagtaaga

SEQ ID NO: 4763343 - DNA, 25 bp, Homo sapien
tccctgctgggtaaacacggtgtgt

SEQ ID NO: 4763344 - DNA, 25 bp, Homo sapien
gcaagtatgcctcaagctgcagaga

SEQ ID NO: 4763345 - DNA, 25 bp, Homo sapien
taagttactcctacaattgctggtc

SEQ ID NO: 4763346 - DNA, 25 bp, Homo sapien
ccaatgatgggcaatgttataagca

SEQ ID NO: 4763347 - DNA, 25 bp, Homo sapien
gacgattctcatgcaactcctaaag

SEQ ID NO: 4763348 - DNA, 25 bp, Homo sapien
ccaggactgagacatcgattgaacc

SEQ ID NO: 4763349 - DNA, 25 bp, Homo sapien
tggcaaacagcgatttcaacatggc

SEQ ID NO: 4763350 - DNA, 25 bp, Homo sapien
atccggtccagggactccgggatag

SEQ ID NO: 4763351 - DNA, 25 bp, Homo sapien
cagggactccgggatagtgaacttg

SEQ ID NO: 4763352 - DNA, 25 bp, Homo sapien
gactccgggatagtgaacttgaagg

SEQ ID NO: 4763353 - DNA, 25 bp, Homo sapien
tccgggatagtgaacttgaagggct

SEQ ID NO: 4763354 - DNA, 25 bp, Homo sapien
tgcgggcggatgaataaagcagtaa

SEQ ID NO: 4763355 - DNA, 25 bp, Homo sapien
gttagaagtggctgaaaacgaggcc

SEQ ID NO: 4763356 - DNA, 25 bp, Homo sapien
ggcaagaacgggtgggacataaaca

SEQ ID NO: 4763357 - DNA, 25 bp, Homo sapien
aaactcgagtttgcccttcactatg

SEQ ID NO: 4763358 - DNA, 25 bp, Homo sapien
gattgcgctaagtgcgcccgggtca

SEQ ID NO: 4763359 - DNA, 25 bp, Homo sapien
gccccggcttctaaagaggctcgga

SEQ ID NO: 4763360 - DNA, 25 bp, Homo sapien
gaagaccaggccagattgtcggtgt

SEQ ID NO: 4763361 - DNA, 25 bp, Homo sapien
tcccagtctccagggcggattgcgc

SEQ ID NO: 4763362 - DNA, 25 bp, Homo sapien
cggcaactcaattctccggtcaatt

SEQ ID NO: 4763363 - DNA, 25 bp, Homo sapien
gcaactcaattctccggtcaatttc

SEQ ID NO: 4763364 - DNA, 25 bp, Homo sapien
ggcaactcaattctccggtcaattt

SEQ ID NO: 4763365 - DNA, 25 bp, Homo sapien
caactcaattctccggtcaatttcc

SEQ ID NO: 4763366 - DNA, 25 bp, Homo sapien
gccaagcagaagcggggagcgcgct

SEQ ID NO: 4763367 - DNA, 25 bp, Homo sapien
aaaattaagccggaaagccaagcag

SEQ ID NO: 4763368 - DNA, 25 bp, Homo sapien
gaaaattaagccggaaagccaagca

SEQ ID NO: 4763369 - DNA, 25 bp, Homo sapien
aagccaagcagaagcggggagcgcg

SEQ ID NO: 4763370 - DNA, 25 bp, Homo sapien
gcgagtccagagtagtcacagcggt

SEQ ID NO: 4763371 - DNA, 25 bp, Homo sapien
taacacgcggtttcacactccggag

SEQ ID NO: 4763372 - DNA, 25 bp, Homo sapien
tcgtgtgcttctccgcaaagggcgc

SEQ ID NO: 4763373 - DNA, 25 bp, Homo sapien
tgggcaaacaaatccagacggactg

SEQ ID NO: 4763374 - DNA, 25 bp, Homo sapien
ggttaaatttggtgacgatgacagt

SEQ ID NO: 4763375 - DNA, 25 bp, Homo sapien
caggactttttggaatcataggatc

SEQ ID NO: 4763376 - DNA, 25 bp, Homo sapien
tgacagttttgctcgacatacagga

SEQ ID NO: 4763377 - DNA, 25 bp, Homo sapien
ggatcccagggcctttagcaacctg

SEQ ID NO: 4763378 - DNA, 25 bp, Homo sapien
tcttttaactagtctttccttgcca

SEQ ID NO: 4763379 - DNA, 25 bp, Homo sapien
tcccagtttgccatgagtaaacact

SEQ ID NO: 4763380 - DNA, 25 bp, Homo sapien
caatagagtttgaaacaccaggcct

SEQ ID NO: 4763381 - DNA, 25 bp, Homo sapien
tccttataatgaagtatctgtagta

SEQ ID NO: 4763382 - DNA, 25 bp, Homo sapien
cattaataatcctctaaagcattgt

SEQ ID NO: 4763383 - DNA, 25 bp, Homo sapien
gggaaagctgtcatactaataaccg

SEQ ID NO: 4763384 - DNA, 25 bp, Homo sapien
ctaataaccgaagtattacccagtg

SEQ ID NO: 4763385 - DNA, 25 bp, Homo sapien
tttgctctggatcttttagtagttt

SEQ ID NO: 4763386 - DNA, 25 bp, Homo sapien
ctctggctctagttcagaatgtgtc

SEQ ID NO: 4763387 - DNA, 25 bp, Homo sapien
cctctggctctagttcagaatgtgt

SEQ ID NO: 4763388 - DNA, 25 bp, Homo sapien
cagcacagttgagtagttggctaca

SEQ ID NO: 4763389 - DNA, 25 bp, Homo sapien
catatggcccctaagcctgaaatat

SEQ ID NO: 4763390 - DNA, 25 bp, Homo sapien
tagagtcagcaaactgtcacctgca

SEQ ID NO: 4763391 - DNA, 25 bp, Homo sapien
tgtaacttttacactaagcatggtt

SEQ ID NO: 4763392 - DNA, 25 bp, Homo sapien
tacgcagggggcatgctaatctcct

SEQ ID NO: 4763393 - DNA, 25 bp, Homo sapien
cttacgcagggggcatgctaatctc

SEQ ID NO: 4763394 - DNA, 25 bp, Homo sapien
aaaaaaaatggaacgcttcacagat

SEQ ID NO: 4763395 - DNA, 25 bp, Homo sapien
catgtcatccttacgcagggggcat

SEQ ID NO: 4763396 - DNA, 25 bp, Homo sapien
gcagagggatcttgattgccatttc

SEQ ID NO: 4763397 - DNA, 25 bp, Homo sapien
tctctgctgccatttggatgtgggt

SEQ ID NO: 4763398 - DNA, 25 bp, Homo sapien
aaggctcttctgaaccagacaggtg

SEQ ID NO: 4763399 - DNA, 25 bp, Homo sapien
gctgcagtcgcttcagacggttcag

SEQ ID NO: 4763400 - DNA, 25 bp, Homo sapien
ccgggaggcaagtcatttcgggcct

SEQ ID NO: 4763401 - DNA, 25 bp, Homo sapien
gggagatcgcccatggcttccccag

SEQ ID NO: 4763402 - DNA, 25 bp, Homo sapien
atttcgggccttgctggtagagtga

SEQ ID NO: 4763403 - DNA, 25 bp, Homo sapien
ggcaatgaccgggaggcaagtcatt

SEQ ID NO: 4763404 - DNA, 25 bp, Homo sapien
gggtcatgtaagaacatggccacac

SEQ ID NO: 4763405 - DNA, 25 bp, Homo sapien
caccaacgagaacctgattttgttt

SEQ ID NO: 4763406 - DNA, 25 bp, Homo sapien
gccaggtccaggcaactctagttag

SEQ ID NO: 4763407 - DNA, 25 bp, Homo sapien
ccacatgtttagagggcggaaagga

SEQ ID NO: 4763408 - DNA, 25 bp, Homo sapien
tgagtcagtcagcacgctctcaaag

SEQ ID NO: 4763409 - DNA, 25 bp, Homo sapien
agcacgctctcaaagggtcctatct

SEQ ID NO: 4763410 - DNA, 25 bp, Homo sapien
tcaaagggtcctatctctttctgca

SEQ ID NO: 4763411 - DNA, 25 bp, Homo sapien
tcagtcagcacgctctcaaagggtc

SEQ ID NO: 4763412 - DNA, 25 bp, Homo sapien
gacctcatcacaggatgtacaaagg

SEQ ID NO: 4763413 - DNA, 25 bp, Homo sapien
cctcatcacaggatgtacaaaggaa

SEQ ID NO: 4763414 - DNA, 25 bp, Homo sapien
aagtgaaggtccgatgacctcatca

SEQ ID NO: 4763415 - DNA, 25 bp, Homo sapien
tcatcacaggatgtacaaaggaagg

SEQ ID NO: 4763416 - DNA, 25 bp, Homo sapien
ctcttttgtagggtctgctgaggct

SEQ ID NO: 4763417 - DNA, 25 bp, Homo sapien
catatgggccctgagaatcttttgg

SEQ ID NO: 4763418 - DNA, 25 bp, Homo sapien
ttttcaggcccgcattcttgtgatg

SEQ ID NO: 4763419 - DNA, 25 bp, Homo sapien
ataaaaggggccagaaccaattgag

SEQ ID NO: 4763420 - DNA, 25 bp, Homo sapien
cagagagatacaagcaaggggttgg

SEQ ID NO: 4763421 - DNA, 25 bp, Homo sapien
ccagagagatacaagcaaggggttg

SEQ ID NO: 4763422 - DNA, 25 bp, Homo sapien
cctcttctccgccatggacaaatct

SEQ ID NO: 4763423 - DNA, 25 bp, Homo sapien
ccatggacaaatctggtggtggaga

SEQ ID NO: 4763424 - DNA, 25 bp, Homo sapien
agatctgggtcagtgatagtgaatg

SEQ ID NO: 4763425 - DNA, 25 bp, Homo sapien
gtttccctcttctccgccatggaca

SEQ ID NO: 4763426 - DNA, 25 bp, Homo sapien
tttgcctgaaagatcacatgccccg

SEQ ID NO: 4763427 - DNA, 25 bp, Homo sapien
tgtgcatctccctagtgtactgaac

SEQ ID NO: 4763428 - DNA, 25 bp, Homo sapien
cctaggaagaggcatagagcatctt

SEQ ID NO: 4763429 - DNA, 25 bp, Homo sapien
tgccccgtgacaaagcctaggaaga

SEQ ID NO: 4763430 - DNA, 25 bp, Homo sapien
ctcacagtctgtgaaggcataggcc

SEQ ID NO: 4763431 - DNA, 25 bp, Homo sapien
gttccctggaactcacagtctgtga

SEQ ID NO: 4763432 - DNA, 25 bp, Homo sapien
tgttccctggaactcacagtctgtg

SEQ ID NO: 4763433 - DNA, 25 bp, Homo sapien
gatatggatttgaattcgagttctc

SEQ ID NO: 4763434 - DNA, 25 bp, Homo sapien
ctgtactctgtctgatgagatatgg

SEQ ID NO: 4763435 - DNA, 25 bp, Homo sapien
tgaattcgagttctcttccaccaca

SEQ ID NO: 4763436 - DNA, 25 bp, Homo sapien
tgtactctgtctgatgagatatgga

SEQ ID NO: 4763437 - DNA, 25 bp, Homo sapien
gaagcaccagagaacggatgaagcc

SEQ ID NO: 4763438 - DNA, 25 bp, Homo sapien
gattccccagtagcaagagtgtcca

SEQ ID NO: 4763439 - DNA, 25 bp, Homo sapien
tccagtcggaaggtactgcagctca

SEQ ID NO: 4763440 - DNA, 25 bp, Homo sapien
aagtccctgtcgctgtgtgaagtca

SEQ ID NO: 4763441 - DNA, 25 bp, Homo sapien
gtgtaaatgagagaacagcctccct

SEQ ID NO: 4763442 - DNA, 25 bp, Homo sapien
taaatgagagaacagcctccctttc

SEQ ID NO: 4763443 - DNA, 25 bp, Homo sapien
tttggtgcaaaaagagacaacgcgt

SEQ ID NO: 4763444 - DNA, 25 bp, Homo sapien
cgcgttgggaggagcagcgttgttt

SEQ ID NO: 4763445 - DNA, 25 bp, Homo sapien
agttcccatttggttcagaggcctg

SEQ ID NO: 4763446 - DNA, 25 bp, Homo sapien
tagttcccatttggttcagaggcct

SEQ ID NO: 4763447 - DNA, 25 bp, Homo sapien
tgacttgctgccttactagaaaaaa

SEQ ID NO: 4763448 - DNA, 25 bp, Homo sapien
tgagcattttcgattctcagcccgg

SEQ ID NO: 4763449 - DNA, 25 bp, Homo sapien
gaaagacacaaggtgtttgcatttt

SEQ ID NO: 4763450 - DNA, 25 bp, Homo sapien
gctctgttgttgcatgtgagccatt

SEQ ID NO: 4763451 - DNA, 25 bp, Homo sapien
ggattaattggatggtgtccatgct

SEQ ID NO: 4763452 - DNA, 25 bp, Homo sapien
agctgtaaggattaattggatggtg

SEQ ID NO: 4763453 - DNA, 25 bp, Homo sapien
cctgcttgtcgggtacagctttgca

SEQ ID NO: 4763454 - DNA, 25 bp, Homo sapien
taaggattaattggatggtgtccat

SEQ ID NO: 4763455 - DNA, 25 bp, Homo sapien
gtaatctggcctaaacctgagtcgt

SEQ ID NO: 4763456 - DNA, 25 bp, Homo sapien
tgtagtgagaaatcgcagaactgcc

SEQ ID NO: 4763457 - DNA, 25 bp, Homo sapien
tatgagggcacttcattactctgct

SEQ ID NO: 4763458 - DNA, 25 bp, Homo sapien
tctaccatagtcatagtaatctggc

SEQ ID NO: 4763459 - DNA, 25 bp, Homo sapien
taatagttttccatgcaaactactg

SEQ ID NO: 4763460 - DNA, 25 bp, Homo sapien
gctgtgtctaatcctttgagcccca

SEQ ID NO: 4763461 - DNA, 25 bp, Homo sapien
ttaaattgtaaagcccgctgtgtct

SEQ ID NO: 4763462 - DNA, 25 bp, Homo sapien
tactgtttgcagtaattgttgtttc

SEQ ID NO: 4763463 - DNA, 25 bp, Homo sapien
aagggtcttacagctgggtccaagt

SEQ ID NO: 4763464 - DNA, 25 bp, Homo sapien
gctctgtccccttatggctaaattg

SEQ ID NO: 4763465 - DNA, 25 bp, Homo sapien
gttgtgtagctaatccattaggctt

SEQ ID NO: 4763466 - DNA, 25 bp, Homo sapien
tgacccaacaaccaatcaatgcctt

SEQ ID NO: 4763467 - DNA, 25 bp, Homo sapien
gatcagaccgcggagttgttgacag

SEQ ID NO: 4763468 - DNA, 25 bp, Homo sapien
tgttgacagaagcttggcgaggcct

SEQ ID NO: 4763469 - DNA, 25 bp, Homo sapien
cacgctcagtgcatcggatcagacc

SEQ ID NO: 4763470 - DNA, 25 bp, Homo sapien
aggcctgccagctttccgcatgaaa

SEQ ID NO: 4763471 - DNA, 25 bp, Homo sapien
ttcttgtctaaaggagggctgagcg

SEQ ID NO: 4763472 - DNA, 25 bp, Homo sapien
tcttgtctaaaggagggctgagcgt

SEQ ID NO: 4763473 - DNA, 25 bp, Homo sapien
ttgtctaaaggagggctgagcgtgc

SEQ ID NO: 4763474 - DNA, 25 bp, Homo sapien
cttgtctaaaggagggctgagcgtg

SEQ ID NO: 4763475 - DNA, 25 bp, Homo sapien
ctcctaggcccataagctgacgtgt

SEQ ID NO: 4763476 - DNA, 25 bp, Homo sapien
ggaatcttgtacagagctgaaataa

SEQ ID NO: 4763477 - DNA, 25 bp, Homo sapien
cacccaaaacatttgaacaacactg

SEQ ID NO: 4763478 - DNA, 25 bp, Homo sapien
tgaaataatcagtgtcacccaaaac

SEQ ID NO: 4763479 - DNA, 25 bp, Homo sapien
tccttctggtctgttctattggaac

SEQ ID NO: 4763480 - DNA, 25 bp, Homo sapien
gcaattggcccgttctcttgactgc

SEQ ID NO: 4763481 - DNA, 25 bp, Homo sapien
aatatggtccaatggtcccttgtcc

SEQ ID NO: 4763482 - DNA, 25 bp, Homo sapien
tcagctctctcataagggccccatt

SEQ ID NO: 4763483 - DNA, 25 bp, Homo sapien
ccctctcaactgaaggcaagaaatg

SEQ ID NO: 4763484 - DNA, 25 bp, Homo sapien
caactgaaggcaagaaatgacggaa

SEQ ID NO: 4763485 - DNA, 25 bp, Homo sapien
ctcaactgaaggcaagaaatgacgg

SEQ ID NO: 4763486 - DNA, 25 bp, Homo sapien
cacccctctcaactgaaggcaagaa

SEQ ID NO: 4763487 - DNA, 25 bp, Homo sapien
gaaagctgggtattcatttgatgag

SEQ ID NO: 4763488 - DNA, 25 bp, Homo sapien
tttgatgagtcatggtgagactctc

SEQ ID NO: 4763489 - DNA, 25 bp, Homo sapien
ctcagttctgcgacaggaaagctgg

SEQ ID NO: 4763490 - DNA, 25 bp, Homo sapien
gatgagtcatggtgagactctccaa

SEQ ID NO: 4763491 - DNA, 25 bp, Homo sapien
cctgagggagtgacgcacagttccg

SEQ ID NO: 4763492 - DNA, 25 bp, Homo sapien
gacaccctgagggagtgacgcacag

SEQ ID NO: 4763493 - DNA, 25 bp, Homo sapien
caccctgagggagtgacgcacagtt

SEQ ID NO: 4763494 - DNA, 25 bp, Homo sapien
gggatggctgacaaccaccctggtt

SEQ ID NO: 4763495 - DNA, 25 bp, Homo sapien
tgccagggtcaaagtgggaagccca

SEQ ID NO: 4763496 - DNA, 25 bp, Homo sapien
tgacccaatttcggggtccttgcca

SEQ ID NO: 4763497 - DNA, 25 bp, Homo sapien
tacatgcagttccctgtgtttgttt

SEQ ID NO: 4763498 - DNA, 25 bp, Homo sapien
tacacactgagtcatagtggcacca

SEQ ID NO: 4763499 - DNA, 25 bp, Homo sapien
tacgtttccacgttgcattttctgc

SEQ ID NO: 4763500 - DNA, 25 bp, Homo sapien
ttctctcactattcagcccattgca

SEQ ID NO: 4763501 - DNA, 25 bp, Homo sapien
ccctatatcatgctcttcaaacctt

SEQ ID NO: 4763502 - DNA, 25 bp, Homo sapien
gcatactattgagttaggttttaaa

SEQ ID NO: 4763503 - DNA, 25 bp, Homo sapien
gactcaaatacagaggtgcagagtc

SEQ ID NO: 4763504 - DNA, 25 bp, Homo sapien
cagtgagattggttatagcttggca

SEQ ID NO: 4763505 - DNA, 25 bp, Homo sapien
gttcatctatgaggactcaaataca

SEQ ID NO: 4763506 - DNA, 25 bp, Homo sapien
cacacatagaatctcttacaatcaa

SEQ ID NO: 4763507 - DNA, 25 bp, Homo sapien
ccttggtaagtaagggatttcaatg

SEQ ID NO: 4763508 - DNA, 25 bp, Homo sapien
tctcagagcagaacaacgttctaag

SEQ ID NO: 4763509 - DNA, 25 bp, Homo sapien
taacatcttataaatctattcagtt

SEQ ID NO: 4763510 - DNA, 25 bp, Homo sapien
ctacatgtgttccaggccttaccaa

SEQ ID NO: 4763511 - DNA, 25 bp, Homo sapien
taccaagctgtaaagcttgcaggct

SEQ ID NO: 4763512 - DNA, 25 bp, Homo sapien
acatgtgttccaggccttaccaagc

SEQ ID NO: 4763513 - DNA, 25 bp, Homo sapien
caggccttaccaagctgtaaagctt

SEQ ID NO: 4763514 - DNA, 25 bp, Homo sapien
gctttatggtggagtccttggaaga

SEQ ID NO: 4763515 - DNA, 25 bp, Homo sapien
gcttactggctttatggtggagtcc

SEQ ID NO: 4763516 - DNA, 25 bp, Homo sapien
gacagagagaagaagattactacaa

SEQ ID NO: 4763517 - DNA, 25 bp, Homo sapien
gtttctcaattgcttactggcttta

SEQ ID NO: 4763518 - DNA, 25 bp, Homo sapien
caggcttgctgaagtcataggccaa

SEQ ID NO: 4763519 - DNA, 25 bp, Homo sapien
ggccaaatttctaccatgtttcaaa

SEQ ID NO: 4763520 - DNA, 25 bp, Homo sapien
tgtgcacatgcgatccatgaagtag

SEQ ID NO: 4763521 - DNA, 25 bp, Homo sapien
gaagtagcgttaaacaaaactgtgc

SEQ ID NO: 4763522 - DNA, 25 bp, Homo sapien
gggtacaacaaatattccaggcagt

SEQ ID NO: 4763523 - DNA, 25 bp, Homo sapien
gagagtagaaaagcctgggtacaac

SEQ ID NO: 4763524 - DNA, 25 bp, Homo sapien
gacatatgtgatcctgagagtagaa

SEQ ID NO: 4763525 - DNA, 25 bp, Homo sapien
taagggctccaaacagcgaagtggg

SEQ ID NO: 4763526 - DNA, 25 bp, Homo sapien
gatttcatggaggagcttcttaccc

SEQ ID NO: 4763527 - DNA, 25 bp, Homo sapien
tccggaaatgttatctctaggtggc

SEQ ID NO: 4763528 - DNA, 25 bp, Homo sapien
tctgccccaacaacgaaaggcattg

SEQ ID NO: 4763529 - DNA, 25 bp, Homo sapien
tctaggtggctctggtgggtcatcc

SEQ ID NO: 4763530 - DNA, 25 bp, Homo sapien
gagagtagaaaagcctgggtacaac

SEQ ID NO: 4763531 - DNA, 25 bp, Homo sapien
gacatatgtgatcctgagagtagaa

SEQ ID NO: 4763532 - DNA, 25 bp, Homo sapien
gggtacaacaaatattccaggcagt

SEQ ID NO: 4763533 - DNA, 25 bp, Homo sapien
taagggctccaaacagcgaagtggg

SEQ ID NO: 4763534 - DNA, 25 bp, Homo sapien
tcgggtgtgtaacagagcaactgct

SEQ ID NO: 4763535 - DNA, 25 bp, Homo sapien
taatattgtcctctcggcctaagcc

SEQ ID NO: 4763536 - DNA, 25 bp, Homo sapien
ttgggagtccctgaaagatgctgct

SEQ ID NO: 4763537 - DNA, 25 bp, Homo sapien
catcacattgagagagtggagccca

SEQ ID NO: 4763538 - DNA, 25 bp, Homo sapien
ttttctcagccatgacattccggca

SEQ ID NO: 4763539 - DNA, 25 bp, Homo sapien
catcatacagcctgttaacatctct

SEQ ID NO: 4763540 - DNA, 25 bp, Homo sapien
catacagcctgttaacatctctttt

SEQ ID NO: 4763541 - DNA, 25 bp, Homo sapien
ttctcagccatgacattccggcact

SEQ ID NO: 4763542 - DNA, 25 bp, Homo sapien
aacaagctatctttgtcggccagaa

SEQ ID NO: 4763543 - DNA, 25 bp, Homo sapien
catctgtgcagaatagaggtcgagt

SEQ ID NO: 4763544 - DNA, 25 bp, Homo sapien
gggctatccctgcaactacatggct

SEQ ID NO: 4763545 - DNA, 25 bp, Homo sapien
tgaatagatatcacctgtccccagg

SEQ ID NO: 4763546 - DNA, 25 bp, Homo sapien
caggcttccgccatcacacctggaa

SEQ ID NO: 4763547 - DNA, 25 bp, Homo sapien
cgccatcacacctggaagaaacaca

SEQ ID NO: 4763548 - DNA, 25 bp, Homo sapien
gcttccgccatcacacctggaagaa

SEQ ID NO: 4763549 - DNA, 25 bp, Homo sapien
gccatcacacctggaagaaacacat

SEQ ID NO: 4763550 - DNA, 25 bp, Homo sapien
gcttgtcaggttggagaacttgcca

SEQ ID NO: 4763551 - DNA, 25 bp, Homo sapien
tgcaaaggtgtctcaacattattct

SEQ ID NO: 4763552 - DNA, 25 bp, Homo sapien
ccctactggcttgtcaggttggaga

SEQ ID NO: 4763553 - DNA, 25 bp, Homo sapien
tcatgtaattatagggcatcacaaa

SEQ ID NO: 4763554 - DNA, 25 bp, Homo sapien
caactgttggctggagctagctgga

SEQ ID NO: 4763555 - DNA, 25 bp, Homo sapien
ggaaggatacactgccatgctcact

SEQ ID NO: 4763556 - DNA, 25 bp, Homo sapien
catgctcacttgtgtagctgttgca

SEQ ID NO: 4763557 - DNA, 25 bp, Homo sapien
gatcaggaatccaggcaaggcctag

SEQ ID NO: 4763558 - DNA, 25 bp, Homo sapien
gcaaatttgtatagcgtcctttggg

SEQ ID NO: 4763559 - DNA, 25 bp, Homo sapien
ggcggcagcgttggccacaaatctc

SEQ ID NO: 4763560 - DNA, 25 bp, Homo sapien
acccggcctgcgaggaagcgctgct

SEQ ID NO: 4763561 - DNA, 25 bp, Homo sapien
tgggcttcctaaaggcggcagcgtt

SEQ ID NO: 4763562 - DNA, 25 bp, Homo sapien
gtctccatcgcttccggaagacaag

SEQ ID NO: 4763563 - DNA, 25 bp, Homo sapien
ctccatcgcttccggaagacaagag

SEQ ID NO: 4763564 - DNA, 25 bp, Homo sapien
ctgtctccatcgcttccggaagaca

SEQ ID NO: 4763565 - DNA, 25 bp, Homo sapien
tctccatcgcttccggaagacaaga

SEQ ID NO: 4763566 - DNA, 25 bp, Homo sapien
ctcttcctttgtccgccagtttctt

SEQ ID NO: 4763567 - DNA, 25 bp, Homo sapien
tctctggtcaccgagtgcccttctt

SEQ ID NO: 4763568 - DNA, 25 bp, Homo sapien
ttcttccctaccctgcctgaaggag

SEQ ID NO: 4763569 - DNA, 25 bp, Homo sapien
ggaaaaggtctctggtcaccgagtg

SEQ ID NO: 4763570 - DNA, 25 bp, Homo sapien
taattagagtaacaatgttgaccgc

SEQ ID NO: 4763571 - DNA, 25 bp, Homo sapien
tgccaaggatactcgatggaactcg

SEQ ID NO: 4763572 - DNA, 25 bp, Homo sapien
tgttgaccgctattaaggcttcgct

SEQ ID NO: 4763573 - DNA, 25 bp, Homo sapien
gctttgcattggctgcctggctttg

SEQ ID NO: 4763574 - DNA, 25 bp, Homo sapien
tttcctctgatatccccattattaa

SEQ ID NO: 4763575 - DNA, 25 bp, Homo sapien
gaactgaactatcgtcttctgtcac

SEQ ID NO: 4763576 - DNA, 25 bp, Homo sapien
ttttaagccagtgaaaccaactgat

SEQ ID NO: 4763577 - DNA, 25 bp, Homo sapien
cctcaaggtaaaatcttacgaactg

SEQ ID NO: 4763578 - DNA, 25 bp, Homo sapien
gatcaattgtggacaactgtggctg

SEQ ID NO: 4763579 - DNA, 25 bp, Homo sapien
ctgtggctgcaggttatgtctgtct

SEQ ID NO: 4763580 - DNA, 25 bp, Homo sapien
tttatgatcaattgtggacaactgt

SEQ ID NO: 4763581 - DNA, 25 bp, Homo sapien
tctttagcagcctgtattttcacca

SEQ ID NO: 4763582 - DNA, 25 bp, Homo sapien
gagccagttcttgcatttgggccta

SEQ ID NO: 4763583 - DNA, 25 bp, Homo sapien
tcaagctcctcttggtgcttgaata

SEQ ID NO: 4763584 - DNA, 25 bp, Homo sapien
tgcttgaataggtgccatctgctga

SEQ ID NO: 4763585 - DNA, 25 bp, Homo sapien
agccagttcttgcatttgggcctaa

SEQ ID NO: 4763586 - DNA, 25 bp, Homo sapien
cttgttactgcccttgcctttgtgg

SEQ ID NO: 4763587 - DNA, 25 bp, Homo sapien
tgttactgcccttgcctttgtggac

SEQ ID NO: 4763588 - DNA, 25 bp, Homo sapien
cccttgttactgcccttgcctttgt

SEQ ID NO: 4763589 - DNA, 25 bp, Homo sapien
ttgttactgcccttgcctttgtgga

SEQ ID NO: 4763590 - DNA, 25 bp, Homo sapien
tactctgcaactgtcagtactggct

SEQ ID NO: 4763591 - DNA, 25 bp, Homo sapien
aggttggaaacactgcagtcacgtg

SEQ ID NO: 4763592 - DNA, 25 bp, Homo sapien
cagtactggcttccggcaaaaggtt

SEQ ID NO: 4763593 - DNA, 25 bp, Homo sapien
tgcaactgtcagtactggcttccgg

SEQ ID NO: 4763594 - DNA, 25 bp, Homo sapien
taatcctcttgtggtaaatggtgtc

SEQ ID NO: 4763595 - DNA, 25 bp, Homo sapien
cctcttgtggtaaatggtgtcagaa

SEQ ID NO: 4763596 - DNA, 25 bp, Homo sapien
ctactttaatcctcttgtggtaaat

SEQ ID NO: 4763597 - DNA, 25 bp, Homo sapien
actttaatcctcttgtggtaaatgg

SEQ ID NO: 4763598 - DNA, 25 bp, Homo sapien
ccttcgaggcatggcactcacggca

SEQ ID NO: 4763599 - DNA, 25 bp, Homo sapien
tgtccaactgatgtcatgagctcct

SEQ ID NO: 4763600 - DNA, 25 bp, Homo sapien
tccaactgatgtcatgagctcctgc

SEQ ID NO: 4763601 - DNA, 25 bp, Homo sapien
tggcactcacggcaaagtgacattt

SEQ ID NO: 4763602 - DNA, 25 bp, Homo sapien
ttgcttgatgttttctccaaagtgg

SEQ ID NO: 4763603 - DNA, 25 bp, Homo sapien
gcatgttcccagtaggcatgctctg

SEQ ID NO: 4763604 - DNA, 25 bp, Homo sapien
atgttcccagtaggcatgctctgga

SEQ ID NO: 4763605 - DNA, 25 bp, Homo sapien
tgcttgatgttttctccaaagtggc

SEQ ID NO: 4763606 - DNA, 25 bp, Homo sapien
cggcagaaacttgaggctgggtctc

SEQ ID NO: 4763607 - DNA, 25 bp, Homo sapien
cattccaggctcaaattcactaaca

SEQ ID NO: 4763608 - DNA, 25 bp, Homo sapien
ctggaaggagcacaacagcggcaga

SEQ ID NO: 4763609 - DNA, 25 bp, Homo sapien
tctctgacttcatggccattccagg

SEQ ID NO: 4763610 - DNA, 25 bp, Homo sapien
tagagagcttttgctggcccctgga

SEQ ID NO: 4763611 - DNA, 25 bp, Homo sapien
gccaaggggactctgggttgtggct

SEQ ID NO: 4763612 - DNA, 25 bp, Homo sapien
cctggagcctcgaaaccatggacat

SEQ ID NO: 4763613 - DNA, 25 bp, Homo sapien
gaggtttgccatcatacaggttgcc

SEQ ID NO: 4763614 - DNA, 25 bp, Homo sapien
gtgaggggcttagatggccacctgc

SEQ ID NO: 4763615 - DNA, 25 bp, Homo sapien
tgaggggcttagatggccacctgcc

SEQ ID NO: 4763616 - DNA, 25 bp, Homo sapien
gaggggcttagatggccacctgccc

SEQ ID NO: 4763617 - DNA, 25 bp, Homo sapien
tcatggggccctctggaactgctta

SEQ ID NO: 4763618 - DNA, 25 bp, Homo sapien
catggggccctctggaactgcttac

SEQ ID NO: 4763619 - DNA, 25 bp, Homo sapien
cctgaagactctctggcatatgaac

SEQ ID NO: 4763620 - DNA, 25 bp, Homo sapien
ggcattggtggctctctaaggaacg

SEQ ID NO: 4763621 - DNA, 25 bp, Homo sapien
tctctaaggaacgtggccacctcaa

SEQ ID NO: 4763622 - DNA, 25 bp, Homo sapien
cagccccaggttcacaggtggctga

SEQ ID NO: 4763623 - DNA, 25 bp, Homo sapien
gcacaaggacaaaatcttttccagt

SEQ ID NO: 4763624 - DNA, 25 bp, Homo sapien
taaggcactgaataggcttgaggac

SEQ ID NO: 4763625 - DNA, 25 bp, Homo sapien
tccagtttaaggcactgaataggct

SEQ ID NO: 4763626 - DNA, 25 bp, Homo sapien
ctgcacaaggacaaaatcttttcca

SEQ ID NO: 4763627 - DNA, 25 bp, Homo sapien
ctgtgtttggcccaaaacctcacaa

SEQ ID NO: 4763628 - DNA, 25 bp, Homo sapien
tgtgtttggcccaaaacctcacaat

SEQ ID NO: 4763629 - DNA, 25 bp, Homo sapien
gtgtttggcccaaaacctcacaata

SEQ ID NO: 4763630 - DNA, 25 bp, Homo sapien
tggatgttggacatgggaaaagcct

SEQ ID NO: 4763631 - DNA, 25 bp, Homo sapien
gtggatgttggacatgggaaaagcc

SEQ ID NO: 4763632 - DNA, 25 bp, Homo sapien
ttgacagcaagccaggatcgacgca

SEQ ID NO: 4763633 - DNA, 25 bp, Homo sapien
aaagcctggttgacagcaagccagg

SEQ ID NO: 4763634 - DNA, 25 bp, Homo sapien
gcccttgttgatctggcccaacttc

SEQ ID NO: 4763635 - DNA, 25 bp, Homo sapien
ctgggaagctttccatgcccctgga

SEQ ID NO: 4763636 - DNA, 25 bp, Homo sapien
cctgggaagctttccatgcccctgg

SEQ ID NO: 4763637 - DNA, 25 bp, Homo sapien
ccagaatttgccccagatgtgggca

SEQ ID NO: 4763638 - DNA, 25 bp, Homo sapien
ctgcatcagatccagagactcttgg

SEQ ID NO: 4763639 - DNA, 25 bp, Homo sapien
tgcatcagatccagagactcttgga

SEQ ID NO: 4763640 - DNA, 25 bp, Homo sapien
caccagggattctctgtgccgagag

SEQ ID NO: 4763641 - DNA, 25 bp, Homo sapien
tgcaagaccggtcagtgacccaggc

SEQ ID NO: 4763642 - DNA, 25 bp, Homo sapien
ttttgtgacacagggcaagctactc

SEQ ID NO: 4763643 - DNA, 25 bp, Homo sapien
tgcaaaagcctaagatctgagaact

SEQ ID NO: 4763644 - DNA, 25 bp, Homo sapien
gaggagactgaggtggtcattgggc

SEQ ID NO: 4763645 - DNA, 25 bp, Homo sapien
gagactgaggtggtcattgggcctg

SEQ ID NO: 4763646 - DNA, 25 bp, Homo sapien
gactgaggtggtcattgggcctggt

SEQ ID NO: 4763647 - DNA, 25 bp, Homo sapien
gaggtggtcattgggcctggtgatg

SEQ ID NO: 4763648 - DNA, 25 bp, Homo sapien
ttctggaccagagagctgaccaaag

SEQ ID NO: 4763649 - DNA, 25 bp, Homo sapien
tttgtcaaggtgtgtccccaggagg

SEQ ID NO: 4763650 - DNA, 25 bp, Homo sapien
gttctggaccagagagctgaccaaa

SEQ ID NO: 4763651 - DNA, 25 bp, Homo sapien
tcacctttgtcaaggtgtgtcccca

SEQ ID NO: 4763652 - DNA, 25 bp, Homo sapien
gagtgggcgttagggccacagcccc

SEQ ID NO: 4763653 - DNA, 25 bp, Homo sapien
caggagccaggaggcacaagctgca

SEQ ID NO: 4763654 - DNA, 25 bp, Homo sapien
gaggcacaagctgcagccagaagca

SEQ ID NO: 4763655 - DNA, 25 bp, Homo sapien
ccagaagcaggtgggtttggagggc

SEQ ID NO: 4763656 - DNA, 25 bp, Homo sapien
tctcctgttacccgtcgccccaggc

SEQ ID NO: 4763657 - DNA, 25 bp, Homo sapien
aggcctctcgggcactctctacaag

SEQ ID NO: 4763658 - DNA, 25 bp, Homo sapien
aaagcaggtcccaagtctcctccag

SEQ ID NO: 4763659 - DNA, 25 bp, Homo sapien
ttgtgaaagcaggtcccaagtctcc

SEQ ID NO: 4763660 - DNA, 25 bp, Homo sapien
ctgcagttgtgaaagcaggtcccaa

SEQ ID NO: 4763661 - DNA, 25 bp, Homo sapien
gacactgggagacacgatgacatgg

SEQ ID NO: 4763662 - DNA, 25 bp, Homo sapien
agatgatgtggggagacaagatgac

SEQ ID NO: 4763663 - DNA, 25 bp, Homo sapien
cctctgccctactggacactgggag

SEQ ID NO: 4763664 - DNA, 25 bp, Homo sapien
acacgatgacatggggagacaagat

SEQ ID NO: 4763665 - DNA, 25 bp, Homo sapien
gtctcatgaccggtcctggccactg

SEQ ID NO: 4763666 - DNA, 25 bp, Homo sapien
ggccactgagcccacgggtttgatt

SEQ ID NO: 4763667 - DNA, 25 bp, Homo sapien
ctgagagcttggcatggaaatccca

SEQ ID NO: 4763668 - DNA, 25 bp, Homo sapien
gtttgattttgccttgacgcctcct

SEQ ID NO: 4763669 - DNA, 25 bp, Homo sapien
ggaagatatccaacacccatggtgt

SEQ ID NO: 4763670 - DNA, 25 bp, Homo sapien
gcaaacaccaaggtgaggaagatat

SEQ ID NO: 4763671 - DNA, 25 bp, Homo sapien
gaggaagatatccaacacccatggt

SEQ ID NO: 4763672 - DNA, 25 bp, Homo sapien
aagatatccaacacccatggtgtgg

SEQ ID NO: 4763673 - DNA, 25 bp, Homo sapien
aataggcgtgttgctttcaagcaac

SEQ ID NO: 4763674 - DNA, 25 bp, Homo sapien
gtgaataggcgtgttgctttcaagc

SEQ ID NO: 4763675 - DNA, 25 bp, Homo sapien
ggtgtttagtgatgaggcactaagt

SEQ ID NO: 4763676 - DNA, 25 bp, Homo sapien
gaggcactaagtaattttagaggaa

SEQ ID NO: 4763677 - DNA, 25 bp, Homo sapien
gaggcatttgaaagataacttctac

SEQ ID NO: 4763678 - DNA, 25 bp, Homo sapien
tcttgtccctctaagctccttggaa

SEQ ID NO: 4763679 - DNA, 25 bp, Homo sapien
gacccaatgacctgtgaagatttca

SEQ ID NO: 4763680 - DNA, 25 bp, Homo sapien
cagttgatgggcatagatgaggcat

SEQ ID NO: 4763681 - DNA, 25 bp, Homo sapien
tcacattttattttccatatcttca

SEQ ID NO: 4763682 - DNA, 25 bp, Homo sapien
cacattttattttccatatcttcac

SEQ ID NO: 4763683 - DNA, 25 bp, Homo sapien
aggaactgcataggaacttccttga

SEQ ID NO: 4763684 - DNA, 25 bp, Homo sapien
tttaaagtcaaatccaaacacattg

SEQ ID NO: 4763685 - DNA, 25 bp, Homo sapien
tctcctctttaaagtcaaatccaaa

SEQ ID NO: 4763686 - DNA, 25 bp, Homo sapien
tctgtccaggaactgcataggaact

SEQ ID NO: 4763687 - DNA, 25 bp, Homo sapien
gttactttattggcttggctcatta

SEQ ID NO: 4763688 - DNA, 25 bp, Homo sapien
agttactttattggcttggctcatt

SEQ ID NO: 4763689 - DNA, 25 bp, Homo sapien
cagttactttattggcttggctcat

SEQ ID NO: 4763690 - DNA, 25 bp, Homo sapien
atcttgatcttcagctgaaaaagat

SEQ ID NO: 4763691 - DNA, 25 bp, Homo sapien
aaatcttgatcttcagctgaaaaag

SEQ ID NO: 4763692 - DNA, 25 bp, Homo sapien
ttaaatcttgatcttcagctgaaaa

SEQ ID NO: 4763693 - DNA, 25 bp, Homo sapien
tttttctgaggcaagcaaaattaat

SEQ ID NO: 4763694 - DNA, 25 bp, Homo sapien
gttggcatcctcaggacaatcaaac

SEQ ID NO: 4763695 - DNA, 25 bp, Homo sapien
tactgcagctctcttacggacaaac

SEQ ID NO: 4763696 - DNA, 25 bp, Homo sapien
ggcatcctcaggacaatcaaactga

SEQ ID NO: 4763697 - DNA, 25 bp, Homo sapien
tctcttacggacaaactcattatag

SEQ ID NO: 4763698 - DNA, 25 bp, Homo sapien
cactcggtacagatatcagaccttt

SEQ ID NO: 4763699 - DNA, 25 bp, Homo sapien
actcggtacagatatcagacctttt

SEQ ID NO: 4763700 - DNA, 25 bp, Homo sapien
actcaagcgtgcaaggtcctttaca

SEQ ID NO: 4763701 - DNA, 25 bp, Homo sapien
tcaagcgtgcaaggtcctttacaga

SEQ ID NO: 4763702 - DNA, 25 bp, Homo sapien
aactcaagcgtgcaaggtcctttac

SEQ ID NO: 4763703 - DNA, 25 bp, Homo sapien
caagcgtgcaaggtcctttacagat

SEQ ID NO: 4763704 - DNA, 25 bp, Homo sapien
caagattctatatgcttcatcaaga

SEQ ID NO: 4763705 - DNA, 25 bp, Homo sapien
tcaataatagcattcatggtatcag

SEQ ID NO: 4763706 - DNA, 25 bp, Homo sapien
gcaaagcccacatccaagattctat

SEQ ID NO: 4763707 - DNA, 25 bp, Homo sapien
tagcattcatggtatcagcaaagcc

SEQ ID NO: 4763708 - DNA, 25 bp, Homo sapien
cagtagcatgaaaagacaccgtttc

SEQ ID NO: 4763709 - DNA, 25 bp, Homo sapien
ctaacattaggagagcagtagcatg

SEQ ID NO: 4763710 - DNA, 25 bp, Homo sapien
taggagagcagtagcatgaaaagac

SEQ ID NO: 4763711 - DNA, 25 bp, Homo sapien
gagcagtagcatgaaaagacaccgt

SEQ ID NO: 4763712 - DNA, 25 bp, Homo sapien
gctgagaagtcatgattctttccta

SEQ ID NO: 4763713 - DNA, 25 bp, Homo sapien
agctgagaagtcatgattctttcct

SEQ ID NO: 4763714 - DNA, 25 bp, Homo sapien
caatgatgagaccagctgagaagtc

SEQ ID NO: 4763715 - DNA, 25 bp, Homo sapien
caccaatgatgagaccagctgagaa

SEQ ID NO: 4763716 - DNA, 25 bp, Homo sapien
acgatataaggcttctagcactgga

SEQ ID NO: 4763717 - DNA, 25 bp, Homo sapien
ctattgcagacgatataaggcttct

SEQ ID NO: 4763718 - DNA, 25 bp, Homo sapien
aaggcttctagcactggaacaagga

SEQ ID NO: 4763719 - DNA, 25 bp, Homo sapien
ttggccactccaggtacatctctac

SEQ ID NO: 4763720 - DNA, 25 bp, Homo sapien
accaaacggtactgagcttcttgca

SEQ ID NO: 4763721 - DNA, 25 bp, Homo sapien
ccggagagtccgcagttttgcccat

SEQ ID NO: 4763722 - DNA, 25 bp, Homo sapien
tatttgctgctctcgtggattcttg

SEQ ID NO: 4763723 - DNA, 25 bp, Homo sapien
aatatttgctgctctcgtggattct

SEQ ID NO: 4763724 - DNA, 25 bp, Homo sapien
tgagccccgccacctagaggagggt

SEQ ID NO: 4763725 - DNA, 25 bp, Homo sapien
tgctgctctcgtggattcttgaacc

SEQ ID NO: 4763726 - DNA, 25 bp, Homo sapien
gaacgcaggtatgcattgacctcaa

SEQ ID NO: 4763727 - DNA, 25 bp, Homo sapien
cagtacaaaaggcagtggtcttgtt

SEQ ID NO: 4763728 - DNA, 25 bp, Homo sapien
cctcagagtcagaacgcaggtatgc

SEQ ID NO: 4763729 - DNA, 25 bp, Homo sapien
aaggcagtggtcttgtttgaaagaa

SEQ ID NO: 4763730 - DNA, 25 bp, Homo sapien
ttcagatctcagtcttaggcagtca

SEQ ID NO: 4763731 - DNA, 25 bp, Homo sapien
gccgcagtgggctttaacaaatgtc

SEQ ID NO: 4763732 - DNA, 25 bp, Homo sapien
gactcagtgctgtttagccaggtag

SEQ ID NO: 4763733 - DNA, 25 bp, Homo sapien
gagtgtggccttatcagttatccta

SEQ ID NO: 4763734 - DNA, 25 bp, Homo sapien
gctgacatttttagttttgcctgta

SEQ ID NO: 4763735 - DNA, 25 bp, Homo sapien
ctgacatttttagttttgcctgtac

SEQ ID NO: 4763736 - DNA, 25 bp, Homo sapien
ggctgacatttttagttttgcctgt

SEQ ID NO: 4763737 - DNA, 25 bp, Homo sapien
tgacatttttagttttgcctgtact

SEQ ID NO: 4763738 - DNA, 25 bp, Homo sapien
taagcttcagtgagtatctgtaatc

SEQ ID NO: 4763739 - DNA, 25 bp, Homo sapien
tatattccactggagcaccgccaat

SEQ ID NO: 4763740 - DNA, 25 bp, Homo sapien
gcaccgccaattctttgtggtgaca

SEQ ID NO: 4763741 - DNA, 25 bp, Homo sapien
tctgtaatctatattccactggagc

SEQ ID NO: 4763742 - DNA, 25 bp, Homo sapien
agaacttccttcaccgaatgggctg

SEQ ID NO: 4763743 - DNA, 25 bp, Homo sapien
catgtggtcctaaagagtagcaaca

SEQ ID NO: 4763744 - DNA, 25 bp, Homo sapien
taaagagtagcaacagaacttcctt

SEQ ID NO: 4763745 - DNA, 25 bp, Homo sapien
ccttcaccgaatgggctgtggtaag

SEQ ID NO: 4763746 - DNA, 25 bp, Homo sapien
gttaacatgctgaggttgcagtatg

SEQ ID NO: 4763747 - DNA, 25 bp, Homo sapien
caaaatggaagtgggttaacatgct

SEQ ID NO: 4763748 - DNA, 25 bp, Homo sapien
aatggaagtgggttaacatgctgag

SEQ ID NO: 4763749 - DNA, 25 bp, Homo sapien
tgctgaggttgcagtatggactctc

SEQ ID NO: 4763750 - DNA, 25 bp, Homo sapien
tgtggattgtggttgggtcagtcat

SEQ ID NO: 4763751 - DNA, 25 bp, Homo sapien
ttgtggattgtggttgggtcagtca

SEQ ID NO: 4763752 - DNA, 25 bp, Homo sapien
ttttcctggagagatttgtggattg

SEQ ID NO: 4763753 - DNA, 25 bp, Homo sapien
tttactgttagtgatgaacacatga

SEQ ID NO: 4763754 - DNA, 25 bp, Homo sapien
tagtgatgaacacatgacccaagtg

SEQ ID NO: 4763755 - DNA, 25 bp, Homo sapien
tgttagtgatgaacacatgacccaa

SEQ ID NO: 4763756 - DNA, 25 bp, Homo sapien
gaacacatgacccaagtgaacttag

SEQ ID NO: 4763757 - DNA, 25 bp, Homo sapien
cttgttgagaagagggtttttcttg

SEQ ID NO: 4763758 - DNA, 25 bp, Homo sapien
ctttttctccttgttgagaagaggg

SEQ ID NO: 4763759 - DNA, 25 bp, Homo sapien
cagttcctttttctccttgttgaga

SEQ ID NO: 4763760 - DNA, 25 bp, Homo sapien
ttcctttttctccttgttgagaaga

SEQ ID NO: 4763761 - DNA, 25 bp, Homo sapien
tatagacagcatagtacataaaagt

SEQ ID NO: 4763762 - DNA, 25 bp, Homo sapien
acaacaagcttcagcgtctctgcaa

SEQ ID NO: 4763763 - DNA, 25 bp, Homo sapien
gacagcatagtacataaaagtgaca

SEQ ID NO: 4763764 - DNA, 25 bp, Homo sapien
cataaaagtgacaacaagcttcagc

SEQ ID NO: 4763765 - DNA, 25 bp, Homo sapien
tctgtgtcgcgggagagctgctcta

SEQ ID NO: 4763766 - DNA, 25 bp, Homo sapien
gagctggtaaacattggcaaatccg

SEQ ID NO: 4763767 - DNA, 25 bp, Homo sapien
ggttggcatccaagtgtcagatccc

SEQ ID NO: 4763768 - DNA, 25 bp, Homo sapien
tcacagccctgtgctacagaagacg

SEQ ID NO: 4763769 - DNA, 25 bp, Homo sapien
gaatgcatatctgggagattggttg

SEQ ID NO: 4763770 - DNA, 25 bp, Homo sapien
gagtgaactccccttcagtggggcc

SEQ ID NO: 4763771 - DNA, 25 bp, Homo sapien
ctgagtggaatgcatatctgggaga

SEQ ID NO: 4763772 - DNA, 25 bp, Homo sapien
tggggcctgctagcgctatctccat

SEQ ID NO: 4763773 - DNA, 25 bp, Homo sapien
gaaagggaatcagagagaacagcat

SEQ ID NO: 4763774 - DNA, 25 bp, Homo sapien
ctgtgattccattggaactttgagg

SEQ ID NO: 4763775 - DNA, 25 bp, Homo sapien
gaggataaatcagaaagggaatcag

SEQ ID NO: 4763776 - DNA, 25 bp, Homo sapien
ccattggaactttgaggataaatca

SEQ ID NO: 4763777 - DNA, 25 bp, Homo sapien
tttcagctgtgtactagccctgcta

SEQ ID NO: 4763778 - DNA, 25 bp, Homo sapien
aagcatctctgatatgaaatttcag

SEQ ID NO: 4763779 - DNA, 25 bp, Homo sapien
agcatctctgatatgaaatttcagc

SEQ ID NO: 4763780 - DNA, 25 bp, Homo sapien
agctgtgtactagccctgctatgtt

SEQ ID NO: 4763781 - DNA, 25 bp, Homo sapien
ctgtaatttggttacaggtgtctcc

SEQ ID NO: 4763782 - DNA, 25 bp, Homo sapien
ggttacaggtgtctccaggataatc

SEQ ID NO: 4763783 - DNA, 25 bp, Homo sapien
caggtgtctccaggataatcggata

SEQ ID NO: 4763784 - DNA, 25 bp, Homo sapien
ccaggataatcggatagatactgca

SEQ ID NO: 4763785 - DNA, 25 bp, Homo sapien
tccatgcctcggaatatttcagtag

SEQ ID NO: 4763786 - DNA, 25 bp, Homo sapien
aagattattactctctatacctccg

SEQ ID NO: 4763787 - DNA, 25 bp, Homo sapien
aagaactggtgcaagccaagattat

SEQ ID NO: 4763788 - DNA, 25 bp, Homo sapien
ccgtcagtccttggatttgtggcca

SEQ ID NO: 4763789 - DNA, 25 bp, Homo sapien
gttgatagcattctgagtccttggg

SEQ ID NO: 4763790 - DNA, 25 bp, Homo sapien
aaaggatctgcagcaaaaaatactg

SEQ ID NO: 4763791 - DNA, 25 bp, Homo sapien
cactgttgatagcattctgagtcct

SEQ ID NO: 4763792 - DNA, 25 bp, Homo sapien
ctgttgatagcattctgagtccttg

SEQ ID NO: 4763793 - DNA, 25 bp, Homo sapien
aacagcctggatccatatctgcttc

SEQ ID NO: 4763794 - DNA, 25 bp, Homo sapien
gatcttggggaataagcagctcgta

SEQ ID NO: 4763795 - DNA, 25 bp, Homo sapien
cagctcgtactgtgaactctgatac

SEQ ID NO: 4763796 - DNA, 25 bp, Homo sapien
ctggatccatatctgcttcaccttg

SEQ ID NO: 4763797 - DNA, 25 bp, Homo sapien
ttttacataatagcatatcaataaa

SEQ ID NO: 4763798 - DNA, 25 bp, Homo sapien
cttttacataatagcatatcaataa

SEQ ID NO: 4763799 - DNA, 25 bp, Homo sapien
ttacataatagcatatcaataaatg

SEQ ID NO: 4763800 - DNA, 25 bp, Homo sapien
tttacataatagcatatcaataaat

SEQ ID NO: 4763801 - DNA, 25 bp, Homo sapien
ggagcaagtttggactggaaccact

SEQ ID NO: 4763802 - DNA, 25 bp, Homo sapien
gaattgagggcacagacatttctac

SEQ ID NO: 4763803 - DNA, 25 bp, Homo sapien
cttgtctctgaattgagggcacaga

SEQ ID NO: 4763804 - DNA, 25 bp, Homo sapien
catttctacatgtaagcattccatc

SEQ ID NO: 4763805 - DNA, 25 bp, Homo sapien
gagctgaaattagacacaacaaact

SEQ ID NO: 4763806 - DNA, 25 bp, Homo sapien
aagcagctcaggctcagtttagcca

SEQ ID NO: 4763807 - DNA, 25 bp, Homo sapien
tgtgcctgtaagaccaacctcctct

SEQ ID NO: 4763808 - DNA, 25 bp, Homo sapien
tgatattgcccagccataagccctg

SEQ ID NO: 4763809 - DNA, 25 bp, Homo sapien
aaatgtcgaattttggccctgtgtc

SEQ ID NO: 4763810 - DNA, 25 bp, Homo sapien
gcgggactgtcacgaaaatgtcgaa

SEQ ID NO: 4763811 - DNA, 25 bp, Homo sapien
gggctccagcgggactgtcacgaaa

SEQ ID NO: 4763812 - DNA, 25 bp, Homo sapien
gctccagcgggactgtcacgaaaat

SEQ ID NO: 4763813 - DNA, 25 bp, Homo sapien
gaaaggcacacttgatgtttatctt

SEQ ID NO: 4763814 - DNA, 25 bp, Homo sapien
tcagaaaggcacacttgatgtttat

SEQ ID NO: 4763815 - DNA, 25 bp, Homo sapien
gatttatgcaaagaaggattgggga

SEQ ID NO: 4763816 - DNA, 25 bp, Homo sapien
ttatgcaaagaaggattggggactt

SEQ ID NO: 4763817 - DNA, 25 bp, Homo sapien
gaggcatcagggcacttaagaagcc

SEQ ID NO: 4763818 - DNA, 25 bp, Homo sapien
ggaggcatcagggcacttaagaagc

SEQ ID NO: 4763819 - DNA, 25 bp, Homo sapien
taacatcctcatgttcttatgcatg

SEQ ID NO: 4763820 - DNA, 25 bp, Homo sapien
agccagtgggggaccctcatctcta

SEQ ID NO: 4763821 - DNA, 25 bp, Homo sapien
agtgggggaccctcatctctatccc

SEQ ID NO: 4763822 - DNA, 25 bp, Homo sapien
aaatggaagcttagccagtggggga

SEQ ID NO: 4763823 - DNA, 25 bp, Homo sapien
aactggcgactccatggcccttgga

SEQ ID NO: 4763824 - DNA, 25 bp, Homo sapien
ttcccaaagggaaggatgcctccag

SEQ ID NO: 4763825 - DNA, 25 bp, Homo sapien
caccgttggaagtgggtcaggcttc

SEQ ID NO: 4763826 - DNA, 25 bp, Homo sapien
tgggcaggtggtctttacccagcac

SEQ ID NO: 4763827 - DNA, 25 bp, Homo sapien
ctccatcttcgggagcctggctggg

SEQ ID NO: 4763828 - DNA, 25 bp, Homo sapien
tctacctggtctttcacctccgttg

SEQ ID NO: 4763829 - DNA, 25 bp, Homo sapien
caaggaggaagtgaggtttccctga

SEQ ID NO: 4763830 - DNA, 25 bp, Homo sapien
ggctcttttgccctcacctccatct

SEQ ID NO: 4763831 - DNA, 25 bp, Homo sapien
catcctggagttgtgagcagacagc

SEQ ID NO: 4763832 - DNA, 25 bp, Homo sapien
caaacatcctggagttgtgagcaga

SEQ ID NO: 4763833 - DNA, 25 bp, Homo sapien
tgagcagacagcatgggtttcttcc

SEQ ID NO: 4763834 - DNA, 25 bp, Homo sapien
aacatcctggagttgtgagcagaca

SEQ ID NO: 4763835 - DNA, 25 bp, Homo sapien
aaaagaaggcctaagatgtcactgt

SEQ ID NO: 4763836 - DNA, 25 bp, Homo sapien
cctaagatgtcactgtcagttgaag

SEQ ID NO: 4763837 - DNA, 25 bp, Homo sapien
gaaggcctaagatgtcactgtcagt

SEQ ID NO: 4763838 - DNA, 25 bp, Homo sapien
aggcctaagatgtcactgtcagttg

SEQ ID NO: 4763839 - DNA, 25 bp, Homo sapien
ctgtcccacgggttacagggccaga

SEQ ID NO: 4763840 - DNA, 25 bp, Homo sapien
ccagtggccctgtcttggccggccc

SEQ ID NO: 4763841 - DNA, 25 bp, Homo sapien
tgtcttggccggccctgtcccacgg

SEQ ID NO: 4763842 - DNA, 25 bp, Homo sapien
cctgtcccacgggttacagggccag

SEQ ID NO: 4763843 - DNA, 25 bp, Homo sapien
tggaagcagagcgcaggaccagcca

SEQ ID NO: 4763844 - DNA, 25 bp, Homo sapien
aagcagagcgcaggaccagccagat

SEQ ID NO: 4763845 - DNA, 25 bp, Homo sapien
cctctccagtgcctctgtgccacct

SEQ ID NO: 4763846 - DNA, 25 bp, Homo sapien
agagcgcaggaccagccagatcccg

SEQ ID NO: 4763847 - DNA, 25 bp, Homo sapien
gatgtggaaggcaaacctctttgag

SEQ ID NO: 4763848 - DNA, 25 bp, Homo sapien
cttggtgacctaagctgcaggagca

SEQ ID NO: 4763849 - DNA, 25 bp, Homo sapien
tctggaaacactcgcctggctgtgg

SEQ ID NO: 4763850 - DNA, 25 bp, Homo sapien
cagtgaccactagttcatggagcag

SEQ ID NO: 4763851 - DNA, 25 bp, Homo sapien
ctgctctctgtgaagaccaaaggcc

SEQ ID NO: 4763852 - DNA, 25 bp, Homo sapien
ttctttttcactaagacatctcctc

SEQ ID NO: 4763853 - DNA, 25 bp, Homo sapien
gttttctttttcactaagacatctc

SEQ ID NO: 4763854 - DNA, 25 bp, Homo sapien
cactaagacatctcctctgctctct

SEQ ID NO: 4763855 - DNA, 25 bp, Homo sapien
tgaacttgatgtggcatggattcca

SEQ ID NO: 4763856 - DNA, 25 bp, Homo sapien
gaatgtatttcagctcccagtgcag

SEQ ID NO: 4763857 - DNA, 25 bp, Homo sapien
tattcactgtccagaaatccatcag

SEQ ID NO: 4763858 - DNA, 25 bp, Homo sapien
acatatttctttggcttgggacagc

SEQ ID NO: 4763859 - DNA, 25 bp, Homo sapien
caatctcacataggtaatactgtgc

SEQ ID NO: 4763860 - DNA, 25 bp, Homo sapien
cacttcttcaatctcacataggtaa

SEQ ID NO: 4763861 - DNA, 25 bp, Homo sapien
tcacataggtaatactgtgcatgtc

SEQ ID NO: 4763862 - DNA, 25 bp, Homo sapien
cttcaatctcacataggtaatactg

SEQ ID NO: 4763863 - DNA, 25 bp, Homo sapien
tacacgattccgacagtagccaaac

SEQ ID NO: 4763864 - DNA, 25 bp, Homo sapien
acgattccgacagtagccaaactct

SEQ ID NO: 4763865 - DNA, 25 bp, Homo sapien
tcctccaacatgtggcaaggtgttg

SEQ ID NO: 4763866 - DNA, 25 bp, Homo sapien
ggccctatattggatggacaaggtc

SEQ ID NO: 4763867 - DNA, 25 bp, Homo sapien
gttttgttccatttagttgattcta

SEQ ID NO: 4763868 - DNA, 25 bp, Homo sapien
ttttgttccatttagttgattctac

SEQ ID NO: 4763869 - DNA, 25 bp, Homo sapien
ttgtctatttatatgaacatctgcg

SEQ ID NO: 4763870 - DNA, 25 bp, Homo sapien
tatttatatgaacatctgcgttcat

SEQ ID NO: 4763871 - DNA, 25 bp, Homo sapien
tctatttatatgaacatctgcgttc

SEQ ID NO: 4763872 - DNA, 25 bp, Homo sapien
tgtctatttatatgaacatctgcgt

SEQ ID NO: 4763873 - DNA, 25 bp, Homo sapien
tagcagtttacagagtcctgaactc

SEQ ID NO: 4763874 - DNA, 25 bp, Homo sapien
tagacaagcatgcaaggttcatctg

SEQ ID NO: 4763875 - DNA, 25 bp, Homo sapien
tgtcttctccgcttatcccaggcag

SEQ ID NO: 4763876 - DNA, 25 bp, Homo sapien
ccatggtgaccagcctctagacaag

SEQ ID NO: 4763877 - DNA, 25 bp, Homo sapien
tctagcagcaaggattaggagcaca

SEQ ID NO: 4763878 - DNA, 25 bp, Homo sapien
ccttctagcagcaaggattaggagc

SEQ ID NO: 4763879 - DNA, 25 bp, Homo sapien
tagcagcaaggattaggagcacagg

SEQ ID NO: 4763880 - DNA, 25 bp, Homo sapien
ctccttctagcagcaaggattagga

SEQ ID NO: 4763881 - DNA, 25 bp, Homo sapien
tgcagctgtaggtggttcctctcgt

SEQ ID NO: 4763882 - DNA, 25 bp, Homo sapien
ggctcttatgaactgcagctgtagg

SEQ ID NO: 4763883 - DNA, 25 bp, Homo sapien
ctgcagctgtaggtggttcctctcg

SEQ ID NO: 4763884 - DNA, 25 bp, Homo sapien
tggctcttatgaactgcagctgtag

SEQ ID NO: 4763885 - DNA, 25 bp, Homo sapien
cttggttccttgagtaagcacttgg

SEQ ID NO: 4763886 - DNA, 25 bp, Homo sapien
accagggtgaagaatgtccattggt

SEQ ID NO: 4763887 - DNA, 25 bp, Homo sapien
acttggctgaagaaacgctgaacca

SEQ ID NO: 4763888 - DNA, 25 bp, Homo sapien
tggctgaagaaacgctgaaccaggg

SEQ ID NO: 4763889 - DNA, 25 bp, Homo sapien
caggtgctgtctacactgggtccaa

SEQ ID NO: 4763890 - DNA, 25 bp, Homo sapien
aaacacaggctttagaaggtggagt

SEQ ID NO: 4763891 - DNA, 25 bp, Homo sapien
tccgatgacgaggatctacattccg

SEQ ID NO: 4763892 - DNA, 25 bp, Homo sapien
gagttgactgatgctcaggtgctgt

SEQ ID NO: 4763893 - DNA, 25 bp, Homo sapien
tctgaagccagcattgttctaataa

SEQ ID NO: 4763894 - DNA, 25 bp, Homo sapien
ttatcaacgtaaaattcagcccagt

SEQ ID NO: 4763895 - DNA, 25 bp, Homo sapien
taacttcatgtaaccatagtcctgc

SEQ ID NO: 4763896 - DNA, 25 bp, Homo sapien
aatgggaaccagatggcttatcaac

SEQ ID NO: 4763897 - DNA, 25 bp, Homo sapien
tggctcggatttgaacaggaaaggc

SEQ ID NO: 4763898 - DNA, 25 bp, Homo sapien
gcttcagctgggaagccaaaaatgt

SEQ ID NO: 4763899 - DNA, 25 bp, Homo sapien
ccaaaaatgtgctggctcggatttg

SEQ ID NO: 4763900 - DNA, 25 bp, Homo sapien
caaaagagtttatacgaatcttatc

SEQ ID NO: 4763901 - DNA, 25 bp, Homo sapien
caccagtgctgtgggtaacagtgtc

SEQ ID NO: 4763902 - DNA, 25 bp, Homo sapien
gctgtgggtaacagtgtcagctgct

SEQ ID NO: 4763903 - DNA, 25 bp, Homo sapien
tgctgtgggtaacagtgtcagctgc

SEQ ID NO: 4763904 - DNA, 25 bp, Homo sapien
cagcacaccagtgctgtgggtaaca

SEQ ID NO: 4763905 - DNA, 25 bp, Homo sapien
aagcctttggcttatcaactgcaga

SEQ ID NO: 4763906 - DNA, 25 bp, Homo sapien
tcacacagtggccaacaggcatcag

SEQ ID NO: 4763907 - DNA, 25 bp, Homo sapien
cattagtaaccagcatcacacagtg

SEQ ID NO: 4763908 - DNA, 25 bp, Homo sapien
gcttgctgagccctcgaaattggga

SEQ ID NO: 4763909 - DNA, 25 bp, Homo sapien
tcttctttgttaaaacaggtgttga

SEQ ID NO: 4763910 - DNA, 25 bp, Homo sapien
cagaaaaattgacttgatgggttct

SEQ ID NO: 4763911 - DNA, 25 bp, Homo sapien
ggtgttgaaagcctcaggtgtctgc

SEQ ID NO: 4763912 - DNA, 25 bp, Homo sapien
gtgtctgcccatgtaccttatttgg

SEQ ID NO: 4763913 - DNA, 25 bp, Homo sapien
gaactctttggaagcgccttgagca

SEQ ID NO: 4763914 - DNA, 25 bp, Homo sapien
ctgctgactaatgtgaggtaggtga

SEQ ID NO: 4763915 - DNA, 25 bp, Homo sapien
ctgactaatgtgaggtaggtgaact

SEQ ID NO: 4763916 - DNA, 25 bp, Homo sapien
ttggaagcgccttgagcaaatgcac

SEQ ID NO: 4763917 - DNA, 25 bp, Homo sapien
ttctcttcttcaatgaaacttggct

SEQ ID NO: 4763918 - DNA, 25 bp, Homo sapien
gaatatagatagctttagatctttg

SEQ ID NO: 4763919 - DNA, 25 bp, Homo sapien
tctcttcttcaatgaaacttggctt

SEQ ID NO: 4763920 - DNA, 25 bp, Homo sapien
gatagctttagatctttgccttctc

SEQ ID NO: 4763921 - DNA, 25 bp, Homo sapien
agcatgcacttggagccctctttga

SEQ ID NO: 4763922 - DNA, 25 bp, Homo sapien
caaggtctgtccaacttaaagtggg

SEQ ID NO: 4763923 - DNA, 25 bp, Homo sapien
tctttgatctggttccaaggcgtca

SEQ ID NO: 4763924 - DNA, 25 bp, Homo sapien
cagggacatcgaaccttccagggtc

SEQ ID NO: 4763925 - DNA, 25 bp, Homo sapien
ccactcttcgtggtttcacatcgca

SEQ ID NO: 4763926 - DNA, 25 bp, Homo sapien
tcttcgtggtttcacatcgcactct

SEQ ID NO: 4763927 - DNA, 25 bp, Homo sapien
tcgtggtttcacatcgcactctctg

SEQ ID NO: 4763928 - DNA, 25 bp, Homo sapien
ggtttcacatcgcactctctgctct

SEQ ID NO: 4763929 - DNA, 25 bp, Homo sapien
gtgaagagtatattctctaacaacc

SEQ ID NO: 4763930 - DNA, 25 bp, Homo sapien
tctaacaaccaatcaaggaacaaga

SEQ ID NO: 4763931 - DNA, 25 bp, Homo sapien
tgctctttcgtatttcagtgaagct

SEQ ID NO: 4763932 - DNA, 25 bp, Homo sapien
ttcccatgctcattgctctttcgta

SEQ ID NO: 4763933 - DNA, 25 bp, Homo sapien
tcggggaacagaataatgccatctc

SEQ ID NO: 4763934 - DNA, 25 bp, Homo sapien
gggaacagaataatgccatctctga

SEQ ID NO: 4763935 - DNA, 25 bp, Homo sapien
gaacagaataatgccatctctgatt

SEQ ID NO: 4763936 - DNA, 25 bp, Homo sapien
cttttcggggaacagaataatgcca

SEQ ID NO: 4763937 - DNA, 25 bp, Homo sapien
tgctgcagtgggaagattatagact

SEQ ID NO: 4763938 - DNA, 25 bp, Homo sapien
tgggaagattatagactgagtcccc

SEQ ID NO: 4763939 - DNA, 25 bp, Homo sapien
ctgcagtgggaagattatagactga

SEQ ID NO: 4763940 - DNA, 25 bp, Homo sapien
cagtgggaagattatagactgagtc

SEQ ID NO: 4763941 - DNA, 25 bp, Homo sapien
tgataaagtcgtcatgtttctgaga

SEQ ID NO: 4763942 - DNA, 25 bp, Homo sapien
tcagtgacaattcatccttctgtcc

SEQ ID NO: 4763943 - DNA, 25 bp, Homo sapien
cataatcactgataaagtcgtcatg

SEQ ID NO: 4763944 - DNA, 25 bp, Homo sapien
ctagctcagtgacaattcatccttc

SEQ ID NO: 4763945 - DNA, 25 bp, Homo sapien
catgaaacacgagcagcgcatgtct

SEQ ID NO: 4763946 - DNA, 25 bp, Homo sapien
cttggggaggatttactgtagcatg

SEQ ID NO: 4763947 - DNA, 25 bp, Homo sapien
gaaacacgagcagcgcatgtcttgg

SEQ ID NO: 4763948 - DNA, 25 bp, Homo sapien
tgtagcatgtccaaaataaacggac

SEQ ID NO: 4763949 - DNA, 25 bp, Homo sapien
aaggcggtgggcagttgctagcttc

SEQ ID NO: 4763950 - DNA, 25 bp, Homo sapien
tctctatttcaaatgggtttgggaa

SEQ ID NO: 4763951 - DNA, 25 bp, Homo sapien
ggtgggcagttgctagcttctttgt

SEQ ID NO: 4763952 - DNA, 25 bp, Homo sapien
gggaaaggcggtgggcagttgctag

SEQ ID NO: 4763953 - DNA, 25 bp, Homo sapien
cagcaaacccgaaaatacctgaatt

SEQ ID NO: 4763954 - DNA, 25 bp, Homo sapien
catcaagtatgagctaggacgggaa

SEQ ID NO: 4763955 - DNA, 25 bp, Homo sapien
taatcgtagtgaaaacccaaggcaa

SEQ ID NO: 4763956 - DNA, 25 bp, Homo sapien
taatggtgaatctgtcagcaaaccc

SEQ ID NO: 4763957 - DNA, 25 bp, Homo sapien
tagtagctgctagtgtactcaggag

SEQ ID NO: 4763958 - DNA, 25 bp, Homo sapien
gtctgtactgatcctgcttccctgt

SEQ ID NO: 4763959 - DNA, 25 bp, Homo sapien
gaggagacgccttacacttccccaa

SEQ ID NO: 4763960 - DNA, 25 bp, Homo sapien
ctttgatcacaaagtctttagtagc

SEQ ID NO: 4763961 - DNA, 25 bp, Homo sapien
gctgggcatatttcctgccctttct

SEQ ID NO: 4763962 - DNA, 25 bp, Homo sapien
ctgctgggcatatttcctgcccttt

SEQ ID NO: 4763963 - DNA, 25 bp, Homo sapien
ctgaatgttcctgctgggcatattt

SEQ ID NO: 4763964 - DNA, 25 bp, Homo sapien
aatgttcctgctgggcatatttcct

SEQ ID NO: 4763965 - DNA, 25 bp, Homo sapien
caaaacttctgtcataggactggga

SEQ ID NO: 4763966 - DNA, 25 bp, Homo sapien
gacaaaacttctgtcataggactgg

SEQ ID NO: 4763967 - DNA, 25 bp, Homo sapien
taggactgggagtactggatcagca

SEQ ID NO: 4763968 - DNA, 25 bp, Homo sapien
ctggatcagcaagattttgactttc

SEQ ID NO: 4763969 - DNA, 25 bp, Homo sapien
ccagtgcatgggagagggtttccat

SEQ ID NO: 4763970 - DNA, 25 bp, Homo sapien
agcccagtgcatgggagagggtttc

SEQ ID NO: 4763971 - DNA, 25 bp, Homo sapien
ctaagcccagtgcatgggagagggt

SEQ ID NO: 4763972 - DNA, 25 bp, Homo sapien
cccagtgcatgggagagggtttcca

SEQ ID NO: 4763973 - DNA, 25 bp, Homo sapien
gagggtgtggagaatttctccaagg

SEQ ID NO: 4763974 - DNA, 25 bp, Homo sapien
aagggaggagttgacttaagcctga

SEQ ID NO: 4763975 - DNA, 25 bp, Homo sapien
gttgacttaagcctgagggtgtgga

SEQ ID NO: 4763976 - DNA, 25 bp, Homo sapien
gaggagttgacttaagcctgagggt

SEQ ID NO: 4763977 - DNA, 25 bp, Homo sapien
cttttccatagcttctgtcgtctgc

SEQ ID NO: 4763978 - DNA, 25 bp, Homo sapien
ttttccatagcttctgtcgtctgct

SEQ ID NO: 4763979 - DNA, 25 bp, Homo sapien
gagtcagtggtttgaatactgccta

SEQ ID NO: 4763980 - DNA, 25 bp, Homo sapien
tgtgcaattgacaagcatgtgctca

SEQ ID NO: 4763981 - DNA, 25 bp, Homo sapien
ttttaaagccctgtataggtgatac

SEQ ID NO: 4763982 - DNA, 25 bp, Homo sapien
gaatttatcgtattggcagagtcag

SEQ ID NO: 4763983 - DNA, 25 bp, Homo sapien
tggattggaacttggagagaacacc

SEQ ID NO: 4763984 - DNA, 25 bp, Homo sapien
tggaacttggagagaacaccagaat

SEQ ID NO: 4763985 - DNA, 25 bp, Homo sapien
tttctgtatgtggattggaacttgg

SEQ ID NO: 4763986 - DNA, 25 bp, Homo sapien
cttggagagaacaccagaatgtttt

SEQ ID NO: 4763987 - DNA, 25 bp, Homo sapien
cgaggtagacagcagctttcaagct

SEQ ID NO: 4763988 - DNA, 25 bp, Homo sapien
gcagcctctggccaatttgtgagaa

SEQ ID NO: 4763989 - DNA, 25 bp, Homo sapien
gaagacttgccgctgcgaggtagac

SEQ ID NO: 4763990 - DNA, 25 bp, Homo sapien
ccaatttgtgagaagacttgccgct

SEQ ID NO: 4763991 - DNA, 25 bp, Homo sapien
cctcatgtaataatgtttccctcca

SEQ ID NO: 4763992 - DNA, 25 bp, Homo sapien
caagtatatggaaccactggttgga

SEQ ID NO: 4763993 - DNA, 25 bp, Homo sapien
catctgcaagtatatggaaccactg

SEQ ID NO: 4763994 - DNA, 25 bp, Homo sapien
ccatccatctgcaagtatatggaac

SEQ ID NO: 4763995 - DNA, 25 bp, Homo sapien
tagtcagatgcgttatccattgcgc

SEQ ID NO: 4763996 - DNA, 25 bp, Homo sapien
tgatccgtagtcagatgcgttatcc

SEQ ID NO: 4763997 - DNA, 25 bp, Homo sapien
tctagaatcttctgatccgtagtca

SEQ ID NO: 4763998 - DNA, 25 bp, Homo sapien
agatgcgttatccattgcgccactg

SEQ ID NO: 4763999 - DNA, 25 bp, Homo sapien
tcaaatattacccaagaattctgtg

SEQ ID NO: 4764000 - DNA, 25 bp, Homo sapien
caaatattacccaagaattctgtgg

SEQ ID NO: 4764001 - DNA, 25 bp, Homo sapien
tattacccaagaattctgtggaggc

SEQ ID NO: 4764002 - DNA, 25 bp, Homo sapien
aatattacccaagaattctgtggag

SEQ ID NO: 4764003 - DNA, 25 bp, Homo sapien
ctatcagggaggaagaaacagtaat

SEQ ID NO: 4764004 - DNA, 25 bp, Homo sapien
agaaacagtaataattggctcccat

SEQ ID NO: 4764005 - DNA, 25 bp, Homo sapien
tatcagggaggaagaaacagtaata

SEQ ID NO: 4764006 - DNA, 25 bp, Homo sapien
cagggaggaagaaacagtaataatt

SEQ ID NO: 4764007 - DNA, 25 bp, Homo sapien
agatggctgcctgtagcaatgtagc

SEQ ID NO: 4764008 - DNA, 25 bp, Homo sapien
actccacgtttctgtaattcctgct

SEQ ID NO: 4764009 - DNA, 25 bp, Homo sapien
ctgtagcaatgtagcctcatgttcc

SEQ ID NO: 4764010 - DNA, 25 bp, Homo sapien
cacgtttctgtaattcctgctgctt

SEQ ID NO: 4764011 - DNA, 25 bp, Homo sapien
tgaatcagtcctcatgaccagggtg

SEQ ID NO: 4764012 - DNA, 25 bp, Homo sapien
gagagagcgagttgcttcccacaag

SEQ ID NO: 4764013 - DNA, 25 bp, Homo sapien
cctgattggcttacggatggatgat

SEQ ID NO: 4764014 - DNA, 25 bp, Homo sapien
tgagggcaattctacccaagccacg

SEQ ID NO: 4764015 - DNA, 25 bp, Homo sapien
caggatggtgtgaaacctgcggtac

SEQ ID NO: 4764016 - DNA, 25 bp, Homo sapien
ggtgtgaaacctgcggtacagtaca

SEQ ID NO: 4764017 - DNA, 25 bp, Homo sapien
tacagtacacattgtctgtctcatg

SEQ ID NO: 4764018 - DNA, 25 bp, Homo sapien
gaaacctgcggtacagtacacattg

SEQ ID NO: 4764019 - DNA, 25 bp, Homo sapien
tgagtatagaaccaggcactgcggt

SEQ ID NO: 4764020 - DNA, 25 bp, Homo sapien
gaaaccgttgagtatagaaccaggc

SEQ ID NO: 4764021 - DNA, 25 bp, Homo sapien
ttccactggtaatgctgagaaaccg

SEQ ID NO: 4764022 - DNA, 25 bp, Homo sapien
gcactgcggtgataaacatctgaca

SEQ ID NO: 4764023 - DNA, 25 bp, Homo sapien
tttcatttgcaagtattcatgtttc

SEQ ID NO: 4764024 - DNA, 25 bp, Homo sapien
ttcatttgcaagtattcatgtttca

SEQ ID NO: 4764025 - DNA, 25 bp, Homo sapien
tcatttgcaagtattcatgtttcat

SEQ ID NO: 4764026 - DNA, 25 bp, Homo sapien
tagattcgctgatgcttcaagggag

SEQ ID NO: 4764027 - DNA, 25 bp, Homo sapien
cccttcctcagttcttagattcgct

SEQ ID NO: 4764028 - DNA, 25 bp, Homo sapien
ttaaaagtgttgtattggtactcac

SEQ ID NO: 4764029 - DNA, 25 bp, Homo sapien
agttcttagattcgctgatgcttca

SEQ ID NO: 4764030 - DNA, 25 bp, Homo sapien
aaagtgatcttttcatgcttactca

SEQ ID NO: 4764031 - DNA, 25 bp, Homo sapien
gagaggcggtaatggagactttaaa

SEQ ID NO: 4764032 - DNA, 25 bp, Homo sapien
cgtctgtgcttctacagtgcttggg

SEQ ID NO: 4764033 - DNA, 25 bp, Homo sapien
ataactctcctctctcgtctgtgct

SEQ ID NO: 4764034 - DNA, 25 bp, Homo sapien
acaggagaatgatgtcctgcctggg

SEQ ID NO: 4764035 - DNA, 25 bp, Homo sapien
cctggggtcccatagagggaactgc

SEQ ID NO: 4764036 - DNA, 25 bp, Homo sapien
tcagagaatgtgctgagtcctctat

SEQ ID NO: 4764037 - DNA, 25 bp, Homo sapien
agaatgtgctgagtcctctatcccc

SEQ ID NO: 4764038 - DNA, 25 bp, Homo sapien
caactctaccaggattctgtgttca

SEQ ID NO: 4764039 - DNA, 25 bp, Homo sapien
agccagcatccatgcacaactctac

SEQ ID NO: 4764040 - DNA, 25 bp, Homo sapien
atgcacaactctaccaggattctgt

SEQ ID NO: 4764041 - DNA, 25 bp, Homo sapien
taccaggattctgtgttcacaattc

SEQ ID NO: 4764042 - DNA, 25 bp, Homo sapien
gtttttcagggccatcgagtgtgct

SEQ ID NO: 4764043 - DNA, 25 bp, Homo sapien
tctggtggtgacttcagcaaggagg

SEQ ID NO: 4764044 - DNA, 25 bp, Homo sapien
ttcagggccatcgagtgtgctcagg

SEQ ID NO: 4764045 - DNA, 25 bp, Homo sapien
ttttcagggccatcgagtgtgctca

SEQ ID NO: 4764046 - DNA, 25 bp, Homo sapien
ccagctcctatcttcacttgggaac

SEQ ID NO: 4764047 - DNA, 25 bp, Homo sapien
cagctcctatcttcacttgggaact

SEQ ID NO: 4764048 - DNA, 25 bp, Homo sapien
agctcctatcttcacttgggaactg

SEQ ID NO: 4764049 - DNA, 25 bp, Homo sapien
cattcatctctgatagctttgtctt

SEQ ID NO: 4764050 - DNA, 25 bp, Homo sapien
gcattcatctctgatagctttgtct

SEQ ID NO: 4764051 - DNA, 25 bp, Homo sapien
gtgccccaggactttcagctgagaa

SEQ ID NO: 4764052 - DNA, 25 bp, Homo sapien
ctatggttttgtgccccaggacttt

SEQ ID NO: 4764053 - DNA, 25 bp, Homo sapien
gctgagaacataatttgttcaccat

SEQ ID NO: 4764054 - DNA, 25 bp, Homo sapien
cccaggactttcagctgagaacata

SEQ ID NO: 4764055 - DNA, 25 bp, Homo sapien
tatctgccgtttggtgaactcgttc

SEQ ID NO: 4764056 - DNA, 25 bp, Homo sapien
tctgccgtttggtgaactcgttcac

SEQ ID NO: 4764057 - DNA, 25 bp, Homo sapien
tccgtatctgccgtttggtgaactc

SEQ ID NO: 4764058 - DNA, 25 bp, Homo sapien
tttggtgaactcgttcactttctcc

SEQ ID NO: 4764059 - DNA, 25 bp, Homo sapien
aaattgggggtgagcacaactgctc

SEQ ID NO: 4764060 - DNA, 25 bp, Homo sapien
ggaagcgggactgagggctaaattg

SEQ ID NO: 4764061 - DNA, 25 bp, Homo sapien
gagaagaatttgacatctgagggat

SEQ ID NO: 4764062 - DNA, 25 bp, Homo sapien
aaaagggagaagaatttgacatctg

SEQ ID NO: 4764063 - DNA, 25 bp, Homo sapien
tgcttcaaaacgatctttaaaagtg

SEQ ID NO: 4764064 - DNA, 25 bp, Homo sapien
agtgggtgctaaagtgacactgtca

SEQ ID NO: 4764065 - DNA, 25 bp, Homo sapien
tgctaaagtgacactgtcaattcca

SEQ ID NO: 4764066 - DNA, 25 bp, Homo sapien
ctgacaaataacccgtgcttcaaaa

SEQ ID NO: 4764067 - DNA, 25 bp, Homo sapien
atctttttcacctacttcatggctc

SEQ ID NO: 4764068 - DNA, 25 bp, Homo sapien
tcatctattttgattggtcatcaca

SEQ ID NO: 4764069 - DNA, 25 bp, Homo sapien
gattggtcatcacatctttttcacc

SEQ ID NO: 4764070 - DNA, 25 bp, Homo sapien
cctacttcatggctcttaactatgt

SEQ ID NO: 4764071 - DNA, 25 bp, Homo sapien
cggcccgtgcccaccatgtcgggta

SEQ ID NO: 4764072 - DNA, 25 bp, Homo sapien
tacccgacatggtgggcacgggccg

SEQ ID NO: 4764073 - DNA, 25 bp, Homo sapien
agtcctgcagaacccctaacctggg

SEQ ID NO: 4764074 - DNA, 25 bp, Homo sapien
gggactccatcagccctgcatcaga

SEQ ID NO: 4764075 - DNA, 25 bp, Homo sapien
ggagaccccagtagtcctgcagaac

SEQ ID NO: 4764076 - DNA, 25 bp, Homo sapien
catcagccctgcatcagagttttcc

SEQ ID NO: 4764077 - DNA, 25 bp, Homo sapien
gcatctgaccttacattcaccttga

SEQ ID NO: 4764078 - DNA, 25 bp, Homo sapien
gatgctgcgcacacattttcaacaa

SEQ ID NO: 4764079 - DNA, 25 bp, Homo sapien
tgatgatactctatctcggtggaaa

SEQ ID NO: 4764080 - DNA, 25 bp, Homo sapien
taagagttacacatgagcaaaaagg

SEQ ID NO: 4764081 - DNA, 25 bp, Homo sapien
caccctcaagtgcaggcagcttcat

SEQ ID NO: 4764082 - DNA, 25 bp, Homo sapien
cttctgcaccctcaagtgcaggcag

SEQ ID NO: 4764083 - DNA, 25 bp, Homo sapien
tgcaccctcaagtgcaggcagcttc

SEQ ID NO: 4764084 - DNA, 25 bp, Homo sapien
tctgcaccctcaagtgcaggcagct

SEQ ID NO: 4764085 - DNA, 25 bp, Homo sapien
tctccctttgtctatgggctgatgg

SEQ ID NO: 4764086 - DNA, 25 bp, Homo sapien
tctcgagtacaccagcacaggaggt

SEQ ID NO: 4764087 - DNA, 25 bp, Homo sapien
aaataggaaagatctgggtgtcacc

SEQ ID NO: 4764088 - DNA, 25 bp, Homo sapien
agacggtattggttttcttctcgag

SEQ ID NO: 4764089 - DNA, 25 bp, Homo sapien
tgacatattaagagggacttaagtt

SEQ ID NO: 4764090 - DNA, 25 bp, Homo sapien
ctgacatattaagagggacttaagt

SEQ ID NO: 4764091 - DNA, 25 bp, Homo sapien
aatcatcaaccaaatgaatctggcc

SEQ ID NO: 4764092 - DNA, 25 bp, Homo sapien
cccatcagtgcattgcccttggagt

SEQ ID NO: 4764093 - DNA, 25 bp, Homo sapien
gaatctggcccatcagtgcattgcc

SEQ ID NO: 4764094 - DNA, 25 bp, Homo sapien
ccaaatgaatctggcccatcagtgc

SEQ ID NO: 4764095 - DNA, 25 bp, Homo sapien
caaaattgatcgtagcaaactgagt

SEQ ID NO: 4764096 - DNA, 25 bp, Homo sapien
gatgtattatggctatgatggaggc

SEQ ID NO: 4764097 - DNA, 25 bp, Homo sapien
aactgtgccttctgagatgtattat

SEQ ID NO: 4764098 - DNA, 25 bp, Homo sapien
atggaggcttttggactgcagtttg

SEQ ID NO: 4764099 - DNA, 25 bp, Homo sapien
tttggcagcattattggccagttct

SEQ ID NO: 4764100 - DNA, 25 bp, Homo sapien
ggcagcattattggccagttctttt

SEQ ID NO: 4764101 - DNA, 25 bp, Homo sapien
ttggcagcattattggccagttctt

SEQ ID NO: 4764102 - DNA, 25 bp, Homo sapien
aatttggcagcattattggccagtt

SEQ ID NO: 4764103 - DNA, 25 bp, Homo sapien
gtcctcaaatatacactcctgtaag

SEQ ID NO: 4764104 - DNA, 25 bp, Homo sapien
tttgtcctcaaatatacactcctgt

SEQ ID NO: 4764105 - DNA, 25 bp, Homo sapien
tcctcaaatatacactcctgtaaga

SEQ ID NO: 4764106 - DNA, 25 bp, Homo sapien
tgtcctcaaatatacactcctgtaa

SEQ ID NO: 4764107 - DNA, 25 bp, Homo sapien
ctgagtctttgccatgtcctccttg

SEQ ID NO: 4764108 - DNA, 25 bp, Homo sapien
ttgccaaacctgagccacatacgcg

SEQ ID NO: 4764109 - DNA, 25 bp, Homo sapien
gggctacccaggaaatcaattacag

SEQ ID NO: 4764110 - DNA, 25 bp, Homo sapien
gatggttcaggatttccactgagtc

SEQ ID NO: 4764111 - DNA, 25 bp, Homo sapien
ctgtcttcaccagcattacatgtat

SEQ ID NO: 4764112 - DNA, 25 bp, Homo sapien
catgtataattcctttaactgccat

SEQ ID NO: 4764113 - DNA, 25 bp, Homo sapien
ttacatgtataattcctttaactgc

SEQ ID NO: 4764114 - DNA, 25 bp, Homo sapien
ctctgtcttcaccagcattacatgt

SEQ ID NO: 4764115 - DNA, 25 bp, Homo sapien
ggtctccctggctttggatactccc

SEQ ID NO: 4764116 - DNA, 25 bp, Homo sapien
ccctctgcaaatgcttgctgagaaa

SEQ ID NO: 4764117 - DNA, 25 bp, Homo sapien
ctccctgagtatcacttagtttaag

SEQ ID NO: 4764118 - DNA, 25 bp, Homo sapien
tgcttgctgagaaactgtgaatttc

SEQ ID NO: 4764119 - DNA, 25 bp, Homo sapien
tagctcttagtcttccaggaaacca

SEQ ID NO: 4764120 - DNA, 25 bp, Homo sapien
agctgctattgtgccctccttgaag

SEQ ID NO: 4764121 - DNA, 25 bp, Homo sapien
ggatgactctgcaacccgaaagctg

SEQ ID NO: 4764122 - DNA, 25 bp, Homo sapien
caagagtggttcatgccctgaagat

SEQ ID NO: 4764123 - DNA, 25 bp, Homo sapien
caacagctttactggaaggggtgaa

SEQ ID NO: 4764124 - DNA, 25 bp, Homo sapien
ccaacagctttactggaaggggtga

SEQ ID NO: 4764125 - DNA, 25 bp, Homo sapien
tccaacagctttactggaaggggtg

SEQ ID NO: 4764126 - DNA, 25 bp, Homo sapien
acagctttactggaaggggtgaagg

SEQ ID NO: 4764127 - DNA, 25 bp, Homo sapien
ggcaacggcagctgtggagataata

SEQ ID NO: 4764128 - DNA, 25 bp, Homo sapien
ctgctgtcagggcaacggcagctgt

SEQ ID NO: 4764129 - DNA, 25 bp, Homo sapien
caacggcagctgtggagataatagg

SEQ ID NO: 4764130 - DNA, 25 bp, Homo sapien
agggcaacggcagctgtggagataa

SEQ ID NO: 4764131 - DNA, 25 bp, Homo sapien
tttaacattttgaagcggtctgcag

SEQ ID NO: 4764132 - DNA, 25 bp, Homo sapien
taacattttgaagcggtctgcagcc

SEQ ID NO: 4764133 - DNA, 25 bp, Homo sapien
ctacggttcatctgagtgtcgtttc

SEQ ID NO: 4764134 - DNA, 25 bp, Homo sapien
catctgagtgtcgtttctttgtttt

SEQ ID NO: 4764135 - DNA, 25 bp, Homo sapien
caccatctgattgggttccaaccat

SEQ ID NO: 4764136 - DNA, 25 bp, Homo sapien
ttccactctccttactccatcttct

SEQ ID NO: 4764137 - DNA, 25 bp, Homo sapien
ccaccatctgattgggttccaacca

SEQ ID NO: 4764138 - DNA, 25 bp, Homo sapien
agacttccactctccttactccatc

SEQ ID NO: 4764139 - DNA, 25 bp, Homo sapien
aaagttcataaaggaaatggtctga

SEQ ID NO: 4764140 - DNA, 25 bp, Homo sapien
taaagttcataaaggaaatggtctg

SEQ ID NO: 4764141 - DNA, 25 bp, Homo sapien
aagttcataaaggaaatggtctgac

SEQ ID NO: 4764142 - DNA, 25 bp, Homo sapien
ctaaagttcataaaggaaatggtct

SEQ ID NO: 4764143 - DNA, 25 bp, Homo sapien
cttttcctgatttcttcagttttct

SEQ ID NO: 4764144 - DNA, 25 bp, Homo sapien
ttcctgatttcttcagttttcttca

SEQ ID NO: 4764145 - DNA, 25 bp, Homo sapien
tttcctgatttcttcagttttcttc

SEQ ID NO: 4764146 - DNA, 25 bp, Homo sapien
tcctgatttcttcagttttcttcat

SEQ ID NO: 4764147 - DNA, 25 bp, Homo sapien
cagtataaacgaaatatggcccaca

SEQ ID NO: 4764148 - DNA, 25 bp, Homo sapien
gaatctcccagcatacagagcttta

SEQ ID NO: 4764149 - DNA, 25 bp, Homo sapien
ggtgtaatctcatcaacgtggctat

SEQ ID NO: 4764150 - DNA, 25 bp, Homo sapien
tgaagccgatcactgtacaaatatg

SEQ ID NO: 4764151 - DNA, 25 bp, Homo sapien
gagggcccaaatcactcactgagac

SEQ ID NO: 4764152 - DNA, 25 bp, Homo sapien
gatgtgccactctgttaagagccaa

SEQ ID NO: 4764153 - DNA, 25 bp, Homo sapien
gactagtctatttagccagagggcc

SEQ ID NO: 4764154 - DNA, 25 bp, Homo sapien
ggacagtgtcagtaggatgtgccac

SEQ ID NO: 4764155 - DNA, 25 bp, Homo sapien
tagccattgcaacaattcttcatct

SEQ ID NO: 4764156 - DNA, 25 bp, Homo sapien
ttagccattgcaacaattcttcatc

SEQ ID NO: 4764157 - DNA, 25 bp, Homo sapien
tgactacagaagtgggattaaaacc

SEQ ID NO: 4764158 - DNA, 25 bp, Homo sapien
tgcagaacctgcgatacacacagct

SEQ ID NO: 4764159 - DNA, 25 bp, Homo sapien
gaaccatataaatttgctgtgcccc

SEQ ID NO: 4764160 - DNA, 25 bp, Homo sapien
tgagtgtctgcacggccttatagac

SEQ ID NO: 4764161 - DNA, 25 bp, Homo sapien
ggtattgaatcaagcgggtggctct

SEQ ID NO: 4764162 - DNA, 25 bp, Homo sapien
tctccttgctccctcgtcatgtgac

SEQ ID NO: 4764163 - DNA, 25 bp, Homo sapien
gctctctcatgaatggcatagctcc

SEQ ID NO: 4764164 - DNA, 25 bp, Homo sapien
catgtggaaatctgaccttcggtgt

SEQ ID NO: 4764165 - DNA, 25 bp, Homo sapien
gctgaaaccaatgggatctgctgga

SEQ ID NO: 4764166 - DNA, 25 bp, Homo sapien
aaccaatgggatctgctggaattaa

SEQ ID NO: 4764167 - DNA, 25 bp, Homo sapien
tcttggccagcaactaacacatcct

SEQ ID NO: 4764168 - DNA, 25 bp, Homo sapien
actcaggaattaatgtccatcaaga

SEQ ID NO: 4764169 - DNA, 25 bp, Homo sapien
cagtgttgacagcaacgttgccagt

SEQ ID NO: 4764170 - DNA, 25 bp, Homo sapien
tgtcaatgacacctcagatgcacct

SEQ ID NO: 4764171 - DNA, 25 bp, Homo sapien
gacaaagtgtttctaactggcataa

SEQ ID NO: 4764172 - DNA, 25 bp, Homo sapien
cagataagagagtgttttcccgcat

SEQ ID NO: 4764173 - DNA, 25 bp, Homo sapien
gtttcacagaataatgccccatacg

SEQ ID NO: 4764174 - DNA, 25 bp, Homo sapien
gaaccatctttggcacttgtttcac

SEQ ID NO: 4764175 - DNA, 25 bp, Homo sapien
cttgtttcacagaataatgccccat

SEQ ID NO: 4764176 - DNA, 25 bp, Homo sapien
agcctccactatgttagaaccatct

SEQ ID NO: 4764177 - DNA, 25 bp, Homo sapien
gaaacagagactgcctttgaggatg

SEQ ID NO: 4764178 - DNA, 25 bp, Homo sapien
actgtggaggtcaagagatgcataa

SEQ ID NO: 4764179 - DNA, 25 bp, Homo sapien
tactcgtaagcccacaaatccatag

SEQ ID NO: 4764180 - DNA, 25 bp, Homo sapien
catcagtgctggtgttgacttctac

SEQ ID NO: 4764181 - DNA, 25 bp, Homo sapien
ttcctaccagcataatgggaacagt

SEQ ID NO: 4764182 - DNA, 25 bp, Homo sapien
agtgccctgggacacatttttgtcc

SEQ ID NO: 4764183 - DNA, 25 bp, Homo sapien
tccaaagtgccctgggacacatttt

SEQ ID NO: 4764184 - DNA, 25 bp, Homo sapien
taatgggaacagtctcatgggctgc

SEQ ID NO: 4764185 - DNA, 25 bp, Homo sapien
tatctacccattctcgtatgttaag

SEQ ID NO: 4764186 - DNA, 25 bp, Homo sapien
aagaaagcttttctcacatgtaaca

SEQ ID NO: 4764187 - DNA, 25 bp, Homo sapien
catgtaacatcatacagcagcaaaa

SEQ ID NO: 4764188 - DNA, 25 bp, Homo sapien
gcctttctgaagtaagacttggcaa

SEQ ID NO: 4764189 - DNA, 25 bp, Homo sapien
tggtggtggttagggagtattgtgg

SEQ ID NO: 4764190 - DNA, 25 bp, Homo sapien
ctggaaggagatacgaactagagaa

SEQ ID NO: 4764191 - DNA, 25 bp, Homo sapien
ggagatacgaactagagaatactta

SEQ ID NO: 4764192 - DNA, 25 bp, Homo sapien
tagggagtattgtgggtggatggag

SEQ ID NO: 4764193 - DNA, 25 bp, Homo sapien
cccagagctgcagaactgttcgttc

SEQ ID NO: 4764194 - DNA, 25 bp, Homo sapien
agctgcagaactgttcgttctccat

SEQ ID NO: 4764195 - DNA, 25 bp, Homo sapien
cagagctgcagaactgttcgttctc

SEQ ID NO: 4764196 - DNA, 25 bp, Homo sapien
gagctgcagaactgttcgttctcca

SEQ ID NO: 4764197 - DNA, 25 bp, Homo sapien
gagaaaactgttaactgagcatctg

SEQ ID NO: 4764198 - DNA, 25 bp, Homo sapien
ttatcaaccgaaatacgagccatac

SEQ ID NO: 4764199 - DNA, 25 bp, Homo sapien
gagcatctgtgtatgtaatccctga

SEQ ID NO: 4764200 - DNA, 25 bp, Homo sapien
taaggaaggtcattttcccattatc

SEQ ID NO: 4764201 - DNA, 25 bp, Homo sapien
catgaggaaactagacttccccact

SEQ ID NO: 4764202 - DNA, 25 bp, Homo sapien
tcttgcaaagtctcatgaggaaact

SEQ ID NO: 4764203 - DNA, 25 bp, Homo sapien
ccagggtggcgcttatattttctcg

SEQ ID NO: 4764204 - DNA, 25 bp, Homo sapien
gggtggcgcttatattttctcgaaa

SEQ ID NO: 4764205 - DNA, 25 bp, Homo sapien
gagctaaaagatttagcgttgtcat

SEQ ID NO: 4764206 - DNA, 25 bp, Homo sapien
aaaagatttagcgttgtcatctacc

SEQ ID NO: 4764207 - DNA, 25 bp, Homo sapien
agatttagcgttgtcatctaccagg

SEQ ID NO: 4764208 - DNA, 25 bp, Homo sapien
gctaaaagatttagcgttgtcatct

SEQ ID NO: 4764209 - DNA, 25 bp, Homo sapien
tttcttgatgaactaacaatgctgc

SEQ ID NO: 4764210 - DNA, 25 bp, Homo sapien
cttcactaacagacccttggggctt

SEQ ID NO: 4764211 - DNA, 25 bp, Homo sapien
gtctcttcatcccttatgtcaggaa

SEQ ID NO: 4764212 - DNA, 25 bp, Homo sapien
tccagtctaagacggaagccacatc

SEQ ID NO: 4764213 - DNA, 25 bp, Homo sapien
tcaggcaggctgtcaacttcacaat

SEQ ID NO: 4764214 - DNA, 25 bp, Homo sapien
tctgaaatcccctctggtgcttgta

SEQ ID NO: 4764215 - DNA, 25 bp, Homo sapien
ggagtcacagtcctcatccacatag

SEQ ID NO: 4764216 - DNA, 25 bp, Homo sapien
tgggatctctcaaggtagacaagcc

SEQ ID NO: 4764217 - DNA, 25 bp, Homo sapien
tgtcatagcctagaggttgagggga

SEQ ID NO: 4764218 - DNA, 25 bp, Homo sapien
aggggaatgaccaatgaatttggga

SEQ ID NO: 4764219 - DNA, 25 bp, Homo sapien
tttgggactgcttctagaaattgta

SEQ ID NO: 4764220 - DNA, 25 bp, Homo sapien
aattgtattccctggtgagatatta

SEQ ID NO: 4764221 - DNA, 25 bp, Homo sapien
ttgctataactgttttcaagggcac

SEQ ID NO: 4764222 - DNA, 25 bp, Homo sapien
tgaacttgctataactgttttcaag

SEQ ID NO: 4764223 - DNA, 25 bp, Homo sapien
aagggcacttctaaggccatcatta

SEQ ID NO: 4764224 - DNA, 25 bp, Homo sapien
tactgtcatgtagcttccggttagc

SEQ ID NO: 4764225 - DNA, 25 bp, Homo sapien
tttgcctctcaagactatttcgatc

SEQ ID NO: 4764226 - DNA, 25 bp, Homo sapien
gatcttctgtgtatgctcggattat

SEQ ID NO: 4764227 - DNA, 25 bp, Homo sapien
gtatgctcggattatttccagatcc

SEQ ID NO: 4764228 - DNA, 25 bp, Homo sapien
ctcaagactatttcgatcttctgtg

SEQ ID NO: 4764229 - DNA, 25 bp, Homo sapien
tcagtattcagactctgatcagcat

SEQ ID NO: 4764230 - DNA, 25 bp, Homo sapien
aaagcatctaactcactctgaagaa

SEQ ID NO: 4764231 - DNA, 25 bp, Homo sapien
tcagactctgatcagcataatcact

SEQ ID NO: 4764232 - DNA, 25 bp, Homo sapien
agaaaggctatgtttgtctgtgctt

SEQ ID NO: 4764233 - DNA, 25 bp, Homo sapien
aaagtgggggtcattagattcagat

SEQ ID NO: 4764234 - DNA, 25 bp, Homo sapien
atgaaaagtgggggtcattagattc

SEQ ID NO: 4764235 - DNA, 25 bp, Homo sapien
aaatgaaaagtgggggtcattagat

SEQ ID NO: 4764236 - DNA, 25 bp, Homo sapien
gaaaagtgggggtcattagattcag

SEQ ID NO: 4764237 - DNA, 25 bp, Homo sapien
gcagcccagagcattcaagtgactt

SEQ ID NO: 4764238 - DNA, 25 bp, Homo sapien
ggaatcaacagtacctattaccagg

SEQ ID NO: 4764239 - DNA, 25 bp, Homo sapien
cattcgttcaagatggtggatggag

SEQ ID NO: 4764240 - DNA, 25 bp, Homo sapien
gaatccagaaggagacaagtgaccg

SEQ ID NO: 4764241 - DNA, 25 bp, Homo sapien
gacttacgcgttttgattgttcttc

SEQ ID NO: 4764242 - DNA, 25 bp, Homo sapien
ccttttgacttacgcgttttgattg

SEQ ID NO: 4764243 - DNA, 25 bp, Homo sapien
ttgacttacgcgttttgattgttct

SEQ ID NO: 4764244 - DNA, 25 bp, Homo sapien
ttacgcgttttgattgttcttcgag

SEQ ID NO: 4764245 - DNA, 25 bp, Homo sapien
tacttcagtttcatactgacgtctg

SEQ ID NO: 4764246 - DNA, 25 bp, Homo sapien
cagtttcatactgacgtctgaggtc

SEQ ID NO: 4764247 - DNA, 25 bp, Homo sapien
catactgacgtctgaggtcactgag

SEQ ID NO: 4764248 - DNA, 25 bp, Homo sapien
ctcctacttcagtttcatactgacg

SEQ ID NO: 4764249 - DNA, 25 bp, Homo sapien
gtctttccgtgtcttatgttctgca

SEQ ID NO: 4764250 - DNA, 25 bp, Homo sapien
tttccgtgtcttatgttctgcagcc

SEQ ID NO: 4764251 - DNA, 25 bp, Homo sapien
tcctcttccaactcactcaactgca

SEQ ID NO: 4764252 - DNA, 25 bp, Homo sapien
ccgtgtcttatgttctgcagcctga

SEQ ID NO: 4764253 - DNA, 25 bp, Homo sapien
gatgcacaccttttcattatactct

SEQ ID NO: 4764254 - DNA, 25 bp, Homo sapien
ttcaaaaggatgcacaccttttcat

SEQ ID NO: 4764255 - DNA, 25 bp, Homo sapien
ctgaaattcaaaaggatgcacacct

SEQ ID NO: 4764256 - DNA, 25 bp, Homo sapien
gaaattcaaaaggatgcacaccttt

SEQ ID NO: 4764257 - DNA, 25 bp, Homo sapien
tcttcaccgcaatggccaaattttc

SEQ ID NO: 4764258 - DNA, 25 bp, Homo sapien
ggtacaaggtactaacttgctcttc

SEQ ID NO: 4764259 - DNA, 25 bp, Homo sapien
ggctgaattaatcttggctccacaa

SEQ ID NO: 4764260 - DNA, 25 bp, Homo sapien
tgaagtctgatctcacggatgaagt

SEQ ID NO: 4764261 - DNA, 25 bp, Homo sapien
agattccctcactttttgcaaattt

SEQ ID NO: 4764262 - DNA, 25 bp, Homo sapien
tcagtagattccctcactttttgca

SEQ ID NO: 4764263 - DNA, 25 bp, Homo sapien
cagtagattccctcactttttgcaa

SEQ ID NO: 4764264 - DNA, 25 bp, Homo sapien
gtagattccctcactttttgcaaat

SEQ ID NO: 4764265 - DNA, 25 bp, Homo sapien
tcagcttaagcttagaaagttggca

SEQ ID NO: 4764266 - DNA, 25 bp, Homo sapien
tgtttgcattgcatgaagccagtaa

SEQ ID NO: 4764267 - DNA, 25 bp, Homo sapien
taaaacatttatgagcgggtaagtc

SEQ ID NO: 4764268 - DNA, 25 bp, Homo sapien
ggctaagcctcgtgatagaatgtgc

SEQ ID NO: 4764269 - DNA, 25 bp, Homo sapien
cgcttggtctatactgtggaaatga

SEQ ID NO: 4764270 - DNA, 25 bp, Homo sapien
tggggtatgccaagagactgtaaca

SEQ ID NO: 4764271 - DNA, 25 bp, Homo sapien
tgtaacataacactcttggcaattc

SEQ ID NO: 4764272 - DNA, 25 bp, Homo sapien
ctgcctgtgtgcttcgcttggtcta

SEQ ID NO: 4764273 - DNA, 25 bp, Homo sapien
ggagcccgatgagcacatcctcaag

SEQ ID NO: 4764274 - DNA, 25 bp, Homo sapien
agaagttagcaggagcccgatgagc

SEQ ID NO: 4764275 - DNA, 25 bp, Homo sapien
tcaaggaccgaaagcgcactgaagg

SEQ ID NO: 4764276 - DNA, 25 bp, Homo sapien
ggcatcaatagccacaggctgtgca

SEQ ID NO: 4764277 - DNA, 25 bp, Homo sapien
gagatgacatgatcgagtttgcatt

SEQ ID NO: 4764278 - DNA, 25 bp, Homo sapien
ttaaagcaagagatgacatgatcga

SEQ ID NO: 4764279 - DNA, 25 bp, Homo sapien
aagcaagagatgacatgatcgagtt

SEQ ID NO: 4764280 - DNA, 25 bp, Homo sapien
caagagatgacatgatcgagtttgc

SEQ ID NO: 4764281 - DNA, 25 bp, Homo sapien
gaagaagggctcaacgtgaactgat

SEQ ID NO: 4764282 - DNA, 25 bp, Homo sapien
gaacctgtgacaatcgtggactgaa

SEQ ID NO: 4764283 - DNA, 25 bp, Homo sapien
gaaagtcggccctgaatactccagt

SEQ ID NO: 4764284 - DNA, 25 bp, Homo sapien
ttatactggatctgcgacaggctca

SEQ ID NO: 4764285 - DNA, 25 bp, Homo sapien
tgcatacatagataactcaccatag

SEQ ID NO: 4764286 - DNA, 25 bp, Homo sapien
tatactacagaatcatgaataccag

SEQ ID NO: 4764287 - DNA, 25 bp, Homo sapien
tctatggcgatcaacaaagacaaca

SEQ ID NO: 4764288 - DNA, 25 bp, Homo sapien
tctctttcgaaatcagtacattctg

SEQ ID NO: 4764289 - DNA, 25 bp, Homo sapien
tctcattatagaagtatagatatcg

SEQ ID NO: 4764290 - DNA, 25 bp, Homo sapien
caggtattctgaactactgtatttc

SEQ ID NO: 4764291 - DNA, 25 bp, Homo sapien
tatgtctattaagaatctcgcatga

SEQ ID NO: 4764292 - DNA, 25 bp, Homo sapien
ttatcatttttaagatacccacagg

SEQ ID NO: 4764293 - DNA, 25 bp, Homo sapien
cgcactaacgtgtcatctaccatta

SEQ ID NO: 4764294 - DNA, 25 bp, Homo sapien
gcactaacgtgtcatctaccattag

SEQ ID NO: 4764295 - DNA, 25 bp, Homo sapien
cacgcactaacgtgtcatctaccat

SEQ ID NO: 4764296 - DNA, 25 bp, Homo sapien
ctgcacgcactaacgtgtcatctac

SEQ ID NO: 4764297 - DNA, 25 bp, Homo sapien
tcgattgtccaaagtgtttctctgc

SEQ ID NO: 4764298 - DNA, 25 bp, Homo sapien
gatgcctcacgaacacaaatgcagg

SEQ ID NO: 4764299 - DNA, 25 bp, Homo sapien
tcctttttagcccatgacaatgcac

SEQ ID NO: 4764300 - DNA, 25 bp, Homo sapien
cacacagtgttatgagatgcctcac

SEQ ID NO: 4764301 - DNA, 25 bp, Homo sapien
tagaaggtgacgtaaccaggacgcg

SEQ ID NO: 4764302 - DNA, 25 bp, Homo sapien
gatgtggcgcgcgcgcctaaactcg

SEQ ID NO: 4764303 - DNA, 25 bp, Homo sapien
caggctcaggattcagcacgtaaaa

SEQ ID NO: 4764304 - DNA, 25 bp, Homo sapien
tccccaaacgctgactctctgactc

SEQ ID NO: 4764305 - DNA, 25 bp, Homo sapien
tggaaaagtcaaagcgagtaggtga

SEQ ID NO: 4764306 - DNA, 25 bp, Homo sapien
caaagcgagtaggtgaaggaagaca

SEQ ID NO: 4764307 - DNA, 25 bp, Homo sapien
aagtcaaagcgagtaggtgaaggaa

SEQ ID NO: 4764308 - DNA, 25 bp, Homo sapien
aaaagtcaaagcgagtaggtgaagg

SEQ ID NO: 4764309 - DNA, 25 bp, Homo sapien
aacttggcttcgtccccaagtcgcg

SEQ ID NO: 4764310 - DNA, 25 bp, Homo sapien
aatgaacttggcttcgtccccaagt

SEQ ID NO: 4764311 - DNA, 25 bp, Homo sapien
ttcgtccccaagtcgcgcctggaaa

SEQ ID NO: 4764312 - DNA, 25 bp, Homo sapien
tcgtccccaagtcgcgcctggaaat

SEQ ID NO: 4764313 - DNA, 25 bp, Homo sapien
gccgccgcgtcctcgtcgccttcgt

SEQ ID NO: 4764314 - DNA, 25 bp, Homo sapien
cgccgcgtcctcgtcgccttcgtcc

SEQ ID NO: 4764315 - DNA, 25 bp, Homo sapien
cgcgtcctcgtcgccttcgtcctcc

SEQ ID NO: 4764316 - DNA, 25 bp, Homo sapien
gccgcgtcctcgtcgccttcgtcct

SEQ ID NO: 4764317 - DNA, 25 bp, Homo sapien
ctgtcgtgtgtctccggccccgcct

SEQ ID NO: 4764318 - DNA, 25 bp, Homo sapien
gcgggcgcgggatccagaggacccc

SEQ ID NO: 4764319 - DNA, 25 bp, Homo sapien
ccccgcctcagacacggcgggcgcg

SEQ ID NO: 4764320 - DNA, 25 bp, Homo sapien
gcgcgggatccagaggaccccagtc

SEQ ID NO: 4764321 - DNA, 25 bp, Homo sapien
ggtgatggcgccgtcacggtcggcg

SEQ ID NO: 4764322 - DNA, 25 bp, Homo sapien
cctggaaggtgatggcgccgtcacg

SEQ ID NO: 4764323 - DNA, 25 bp, Homo sapien
atggcgccgtcacggtcggcgtcca

SEQ ID NO: 4764324 - DNA, 25 bp, Homo sapien
ctggaaggtgatggcgccgtcacgg

SEQ ID NO: 4764325 - DNA, 25 bp, Homo sapien
cgcagctccgtgcacagtgcccgga

SEQ ID NO: 4764326 - DNA, 25 bp, Homo sapien
agctccgtgcacagtgcccggaact

SEQ ID NO: 4764327 - DNA, 25 bp, Homo sapien
tcctcgcgctccaggcgccccgagc

SEQ ID NO: 4764328 - DNA, 25 bp, Homo sapien
agcggttcgcgtcgcaggcggcgaa

SEQ ID NO: 4764329 - DNA, 25 bp, Homo sapien
cggccgagagggctccggagcgccg

SEQ ID NO: 4764330 - DNA, 25 bp, Homo sapien
gccgagagggctccggagcgccgcg

SEQ ID NO: 4764331 - DNA, 25 bp, Homo sapien
ggggcggccgagagggctccggagc

SEQ ID NO: 4764332 - DNA, 25 bp, Homo sapien
gggcggccgagagggctccggagcg

SEQ ID NO: 4764333 - DNA, 25 bp, Homo sapien
aggcccggcgagtttggctcgtccg

SEQ ID NO: 4764334 - DNA, 25 bp, Homo sapien
cgagtttggctcgtccggctggttc

SEQ ID NO: 4764335 - DNA, 25 bp, Homo sapien
cgggaggcccggcgagtttggctcg

SEQ ID NO: 4764336 - DNA, 25 bp, Homo sapien
cccggcgagtttggctcgtccggct

SEQ ID NO: 4764337 - DNA, 25 bp, Homo sapien
aggaggagcgcgcgccaccgcttct

SEQ ID NO: 4764338 - DNA, 25 bp, Homo sapien
gaggtggctctcgccactttcccgg

SEQ ID NO: 4764339 - DNA, 25 bp, Homo sapien
cgactgagcgcccaagcgccgaggt

SEQ ID NO: 4764340 - DNA, 25 bp, Homo sapien
agcggctcccttcgacgacggttcg

SEQ ID NO: 4764341 - DNA, 25 bp, Homo sapien
cgctgcttgccgcgcaggtggggga

SEQ ID NO: 4764342 - DNA, 25 bp, Homo sapien
ctgcttgccgcgcaggtgggggaga

SEQ ID NO: 4764343 - DNA, 25 bp, Homo sapien
gctgcttgccgcgcaggtgggggag

SEQ ID NO: 4764344 - DNA, 25 bp, Homo sapien
tgcttgccgcgcaggtgggggagac

SEQ ID NO: 4764345 - DNA, 25 bp, Homo sapien
ggggggagcattgcccttcggcgta

SEQ ID NO: 4764346 - DNA, 25 bp, Homo sapien
tcggggggagcattgcccttcggcg

SEQ ID NO: 4764347 - DNA, 25 bp, Homo sapien
ggattcggggggagcattgcccttc

SEQ ID NO: 4764348 - DNA, 25 bp, Homo sapien
ggagcattgcccttcggcgtaagcg

SEQ ID NO: 4764349 - DNA, 25 bp, Homo sapien
tccgcttctccacagaacgtgctgg

SEQ ID NO: 4764350 - DNA, 25 bp, Homo sapien
agcgctccgcttctccacagaacgt

SEQ ID NO: 4764351 - DNA, 25 bp, Homo sapien
aacgtgctggcgcgcgcgtcagaag

SEQ ID NO: 4764352 - DNA, 25 bp, Homo sapien
aggtagagcccagcgctccgcttct

SEQ ID NO: 4764353 - DNA, 25 bp, Homo sapien
caacttacagtctgaattgagtctg

SEQ ID NO: 4764354 - DNA, 25 bp, Homo sapien
tctgaattgagtctgtatagacttc

SEQ ID NO: 4764355 - DNA, 25 bp, Homo sapien
tacagtctgaattgagtctgtatag

SEQ ID NO: 4764356 - DNA, 25 bp, Homo sapien
gaattgagtctgtatagacttccat

SEQ ID NO: 4764357 - DNA, 25 bp, Homo sapien
cacaagaatgatgttccacattttc

SEQ ID NO: 4764358 - DNA, 25 bp, Homo sapien
cttccaaggaaacaaattccctcat

SEQ ID NO: 4764359 - DNA, 25 bp, Homo sapien
ctattgagcattttcatgaacacaa

SEQ ID NO: 4764360 - DNA, 25 bp, Homo sapien
tcttccaaggaaacaaattccctca

SEQ ID NO: 4764361 - DNA, 25 bp, Homo sapien
tgatcacttgaaatatgtccacctg

SEQ ID NO: 4764362 - DNA, 25 bp, Homo sapien
atatgaaatacccacaacattgtga

SEQ ID NO: 4764363 - DNA, 25 bp, Homo sapien
ggaaacatactatcatgagatgcca

SEQ ID NO: 4764364 - DNA, 25 bp, Homo sapien
tcctgttccacaagatcctatagtt

SEQ ID NO: 4764365 - DNA, 25 bp, Homo sapien
tgtcagcaaccactcacattgagat

SEQ ID NO: 4764366 - DNA, 25 bp, Homo sapien
cctgcattggtaatctgtcagcaac

SEQ ID NO: 4764367 - DNA, 25 bp, Homo sapien
agctccatgccagcacatggattcc

SEQ ID NO: 4764368 - DNA, 25 bp, Homo sapien
tagagctcaggtccagatacttgag

SEQ ID NO: 4764369 - DNA, 25 bp, Homo sapien
cctgagggctcgcagattagtgctg

SEQ ID NO: 4764370 - DNA, 25 bp, Homo sapien
gatgcttacgcatgaaaaagcacct

SEQ ID NO: 4764371 - DNA, 25 bp, Homo sapien
gattagtgctgatttccaccaagct

SEQ ID NO: 4764372 - DNA, 25 bp, Homo sapien
gggtctggttaagatgcttacgcat

SEQ ID NO: 4764373 - DNA, 25 bp, Homo sapien
gcttataaatggatgtgtgagtagc

SEQ ID NO: 4764374 - DNA, 25 bp, Homo sapien
gcagaaagcttataaatggatgtgt

SEQ ID NO: 4764375 - DNA, 25 bp, Homo sapien
gaaagcttataaatggatgtgtgag

SEQ ID NO: 4764376 - DNA, 25 bp, Homo sapien
tataaatggatgtgtgagtagcaga

SEQ ID NO: 4764377 - DNA, 25 bp, Homo sapien
tggcatccattaatggagagtcctt

SEQ ID NO: 4764378 - DNA, 25 bp, Homo sapien
tctatagtctggcatccattaatgg

SEQ ID NO: 4764379 - DNA, 25 bp, Homo sapien
gctttgtctatagtctggcatccat

SEQ ID NO: 4764380 - DNA, 25 bp, Homo sapien
tagtctggcatccattaatggagag

SEQ ID NO: 4764381 - DNA, 25 bp, Homo sapien
gctgaagcaacagctctggtctgaa

SEQ ID NO: 4764382 - DNA, 25 bp, Homo sapien
gaagacttcccctccacatcaagta

SEQ ID NO: 4764383 - DNA, 25 bp, Homo sapien
tggcaattttgaagcaagccatgga

SEQ ID NO: 4764384 - DNA, 25 bp, Homo sapien
cacatcaagtacaccactggcaatt

SEQ ID NO: 4764385 - DNA, 25 bp, Homo sapien
agctcacgtccactactgacagtca

SEQ ID NO: 4764386 - DNA, 25 bp, Homo sapien
tggaacaggaccttgtcccccatga

SEQ ID NO: 4764387 - DNA, 25 bp, Homo sapien
tggaccagctcacgtccactactga

SEQ ID NO: 4764388 - DNA, 25 bp, Homo sapien
tccactactgacagtcagctgcaaa

SEQ ID NO: 4764389 - DNA, 25 bp, Homo sapien
ttccaggatgtactgttcttccaat

SEQ ID NO: 4764390 - DNA, 25 bp, Homo sapien
acaaacatttcgatgcactgaaatt

SEQ ID NO: 4764391 - DNA, 25 bp, Homo sapien
acatttcgatgcactgaaatttcat

SEQ ID NO: 4764392 - DNA, 25 bp, Homo sapien
tgtactgttcttccaatgggcttaa

SEQ ID NO: 4764393 - DNA, 25 bp, Homo sapien
aggcgttcttgtccggggctgctcc

SEQ ID NO: 4764394 - DNA, 25 bp, Homo sapien
tctgaggcgttcttgtccggggctg

SEQ ID NO: 4764395 - DNA, 25 bp, Homo sapien
gggagtctgaggcgttcttgtccgg

SEQ ID NO: 4764396 - DNA, 25 bp, Homo sapien
ggagtctgaggcgttcttgtccggg

SEQ ID NO: 4764397 - DNA, 25 bp, Homo sapien
cattcccctgagaatccggtagcca

SEQ ID NO: 4764398 - DNA, 25 bp, Homo sapien
taaaagcccatgagatggagacacc

SEQ ID NO: 4764399 - DNA, 25 bp, Homo sapien
tctctacaggagtgctataaaagcc

SEQ ID NO: 4764400 - DNA, 25 bp, Homo sapien
tggagacaccagcacgttgtaaact

SEQ ID NO: 4764401 - DNA, 25 bp, Homo sapien
tccatccattggagctgtcgctgtc

SEQ ID NO: 4764402 - DNA, 25 bp, Homo sapien
caactgttctgaccgcctcttggta

SEQ ID NO: 4764403 - DNA, 25 bp, Homo sapien
ggaccttaaagcaaacgctgtattg

SEQ ID NO: 4764404 - DNA, 25 bp, Homo sapien
tacgttgaccttcaggcagcctctg

SEQ ID NO: 4764405 - DNA, 25 bp, Homo sapien
gaagtaaccatttctgggtgggctc

SEQ ID NO: 4764406 - DNA, 25 bp, Homo sapien
agtaaccatttctgggtgggctctg

SEQ ID NO: 4764407 - DNA, 25 bp, Homo sapien
tgtctgtcagtggactccagaagta

SEQ ID NO: 4764408 - DNA, 25 bp, Homo sapien
cagtggactccagaagtaaccattt

SEQ ID NO: 4764409 - DNA, 25 bp, Homo sapien
ctctcaggaaacatctcatcctcac

SEQ ID NO: 4764410 - DNA, 25 bp, Homo sapien
taactgtagtttcttgccgcccaca

SEQ ID NO: 4764411 - DNA, 25 bp, Homo sapien
ataatgaggtaacgcctgaaggccc

SEQ ID NO: 4764412 - DNA, 25 bp, Homo sapien
gacacttcaaggagcagaggtttct

SEQ ID NO: 4764413 - DNA, 25 bp, Homo sapien
ttcacttggatgtcttgggaagcca

SEQ ID NO: 4764414 - DNA, 25 bp, Homo sapien
cagattctctcagccgggcagtcgg

SEQ ID NO: 4764415 - DNA, 25 bp, Homo sapien
cactcctcacaggaggaccgtgcaa

SEQ ID NO: 4764416 - DNA, 25 bp, Homo sapien
aattgctaggcaggtagacctcaca

SEQ ID NO: 4764417 - DNA, 25 bp, Homo sapien
acaggaggaccgtgcaaaggcaaat

SEQ ID NO: 4764418 - DNA, 25 bp, Homo sapien
gtggtctccgtggaaagacaatgat

SEQ ID NO: 4764419 - DNA, 25 bp, Homo sapien
ggtggtctccgtggaaagacaatga

SEQ ID NO: 4764420 - DNA, 25 bp, Homo sapien
gctggaacatggagagccaagtctt

SEQ ID NO: 4764421 - DNA, 25 bp, Homo sapien
cagtcacagacggaggctggaacat

SEQ ID NO: 4764422 - DNA, 25 bp, Homo sapien
tcttctgtgaagtgacggctgccga

SEQ ID NO: 4764423 - DNA, 25 bp, Homo sapien
ctgagctcaccacgggcaggttctg

SEQ ID NO: 4764424 - DNA, 25 bp, Homo sapien
cagatgcaggtccaagagaaaagga

SEQ ID NO: 4764425 - DNA, 25 bp, Homo sapien
caagtaagcagcgaccttcagcaca

SEQ ID NO: 4764426 - DNA, 25 bp, Homo sapien
aggacaagtaagcagcgaccttcag

SEQ ID NO: 4764427 - DNA, 25 bp, Homo sapien
taagcagcgaccttcagcacattgt

SEQ ID NO: 4764428 - DNA, 25 bp, Homo sapien
tagagagagcgattccaagtgggcc

SEQ ID NO: 4764429 - DNA, 25 bp, Homo sapien
tctgcatgggaaggcatcagtacgt

SEQ ID NO: 4764430 - DNA, 25 bp, Homo sapien
caagtgggccctgtaactttgtaca

SEQ ID NO: 4764431 - DNA, 25 bp, Homo sapien
cataacacagtatcagcaggtagtc

SEQ ID NO: 4764432 - DNA, 25 bp, Homo sapien
ttaactcagacagcgactgcactgc

SEQ ID NO: 4764433 - DNA, 25 bp, Homo sapien
gaaaggagtataatgaccaccgcaa

SEQ ID NO: 4764434 - DNA, 25 bp, Homo sapien
gaaggtactagagcactggtcccct

SEQ ID NO: 4764435 - DNA, 25 bp, Homo sapien
tgctcttcacatcatcgaacgctgg

SEQ ID NO: 4764436 - DNA, 25 bp, Homo sapien
ctgtacatgtaaataactccaggag

SEQ ID NO: 4764437 - DNA, 25 bp, Homo sapien
taaggaacacctgttgacagccccg

SEQ ID NO: 4764438 - DNA, 25 bp, Homo sapien
gaatatagcccttagtcacgtgaga

SEQ ID NO: 4764439 - DNA, 25 bp, Homo sapien
tataggcattggttagaggacactg

SEQ ID NO: 4764440 - DNA, 25 bp, Homo sapien
caacccagcatgtagaggatgaggt

SEQ ID NO: 4764441 - DNA, 25 bp, Homo sapien
tcgcataagaaggagagatcaatac

SEQ ID NO: 4764442 - DNA, 25 bp, Homo sapien
ttcatagtgaaactgctcaaactct

SEQ ID NO: 4764443 - DNA, 25 bp, Homo sapien
gggacagtagtattcatagtgaaac

SEQ ID NO: 4764444 - DNA, 25 bp, Homo sapien
tcaaactctggtgtctggcggattt

SEQ ID NO: 4764445 - DNA, 25 bp, Homo sapien
ggttcacccgaatatggccagtcag

SEQ ID NO: 4764446 - DNA, 25 bp, Homo sapien
ggatcttcatactcccgggctgcct

SEQ ID NO: 4764447 - DNA, 25 bp, Homo sapien
atagctccacgacaaagcacggcga

SEQ ID NO: 4764448 - DNA, 25 bp, Homo sapien
gcaggctggcacttgggttgtacac

SEQ ID NO: 4764449 - DNA, 25 bp, Homo sapien
gttctcctctttaggcaatggaaca

SEQ ID NO: 4764450 - DNA, 25 bp, Homo sapien
aatgttctcctctttaggcaatgga

SEQ ID NO: 4764451 - DNA, 25 bp, Homo sapien
ttctcctctttaggcaatggaacac

SEQ ID NO: 4764452 - DNA, 25 bp, Homo sapien
tgttctcctctttaggcaatggaac

SEQ ID NO: 4764453 - DNA, 25 bp, Homo sapien
caacacttctcaaatggttggcaat

SEQ ID NO: 4764454 - DNA, 25 bp, Homo sapien
aacacttctcaaatggttggcaata

SEQ ID NO: 4764455 - DNA, 25 bp, Homo sapien
tctgcaaaccttgaaccttggccat

SEQ ID NO: 4764456 - DNA, 25 bp, Homo sapien
catttaggtgtgcaattttgatctg

SEQ ID NO: 4764457 - DNA, 25 bp, Homo sapien
atggtgctgacagcaacggcatgag

SEQ ID NO: 4764458 - DNA, 25 bp, Homo sapien
gcagccgtcctatggtgctgacagc

SEQ ID NO: 4764459 - DNA, 25 bp, Homo sapien
acagcaacggcatgaggggaagctt

SEQ ID NO: 4764460 - DNA, 25 bp, Homo sapien
actggcagccgtcctatggtgctga

SEQ ID NO: 4764461 - DNA, 25 bp, Homo sapien
tggttcaccatgtgcaattggaggc

SEQ ID NO: 4764462 - DNA, 25 bp, Homo sapien
tgtgaccttggagccgagtctcagc

SEQ ID NO: 4764463 - DNA, 25 bp, Homo sapien
cacattactgttgcagtggttcacc

SEQ ID NO: 4764464 - DNA, 25 bp, Homo sapien
tcgagtctggatcttgaccaagcat

SEQ ID NO: 4764465 - DNA, 25 bp, Homo sapien
cagggcagcctttccctaacagtcc

SEQ ID NO: 4764466 - DNA, 25 bp, Homo sapien
cccagggcagcctttccctaacagt

SEQ ID NO: 4764467 - DNA, 25 bp, Homo sapien
ggcagcctttccctaacagtccatt

SEQ ID NO: 4764468 - DNA, 25 bp, Homo sapien
agggcagcctttccctaacagtcca

SEQ ID NO: 4764469 - DNA, 25 bp, Homo sapien
acctaggcaggacccactgaatgaa

SEQ ID NO: 4764470 - DNA, 25 bp, Homo sapien
tgaatgaatcaaatgtcaggttcct

SEQ ID NO: 4764471 - DNA, 25 bp, Homo sapien
ctaatgcggccaacagaaataactc

SEQ ID NO: 4764472 - DNA, 25 bp, Homo sapien
taactcatgagggatcagcattggg

SEQ ID NO: 4764473 - DNA, 25 bp, Homo sapien
cacgaagacagccactcttaacaca

SEQ ID NO: 4764474 - DNA, 25 bp, Homo sapien
acgaagacagccactcttaacacag

SEQ ID NO: 4764475 - DNA, 25 bp, Homo sapien
tgccatctccccagtggactgtgag

SEQ ID NO: 4764476 - DNA, 25 bp, Homo sapien
gcagaggcagaactttgtcatcgcc

SEQ ID NO: 4764477 - DNA, 25 bp, Homo sapien
tcaaggcactgatatccagtagggc

SEQ ID NO: 4764478 - DNA, 25 bp, Homo sapien
agtgggcacacaattcaatcagcag

SEQ ID NO: 4764479 - DNA, 25 bp, Homo sapien
tgtttgcagcaagcattgtggtgag

SEQ ID NO: 4764480 - DNA, 25 bp, Homo sapien
tcttccctgaagtaaggagagtcct

SEQ ID NO: 4764481 - DNA, 25 bp, Homo sapien
ttttagcttgtatcaaaactgttgg

SEQ ID NO: 4764482 - DNA, 25 bp, Homo sapien
gatgacgagtgtagagatacttgtg

SEQ ID NO: 4764483 - DNA, 25 bp, Homo sapien
tccaagagaaactaatagagctccc

SEQ ID NO: 4764484 - DNA, 25 bp, Homo sapien
cagtataatacagccttccagctgc

SEQ ID NO: 4764485 - DNA, 25 bp, Homo sapien
catatgcagaattggcgcctccctt

SEQ ID NO: 4764486 - DNA, 25 bp, Homo sapien
tactggactggtgtaggtctaacac

SEQ ID NO: 4764487 - DNA, 25 bp, Homo sapien
cttcttcttgctcgctgggggaagg

SEQ ID NO: 4764488 - DNA, 25 bp, Homo sapien
gggttccatgttaatgatgagctgt

SEQ ID NO: 4764489 - DNA, 25 bp, Homo sapien
tgggaactgcggctctgagtaatgt

SEQ ID NO: 4764490 - DNA, 25 bp, Homo sapien
tgatgagctgtttgttcaaggagtg

SEQ ID NO: 4764491 - DNA, 25 bp, Homo sapien
cagacagagttggtttccatcacaa

SEQ ID NO: 4764492 - DNA, 25 bp, Homo sapien
cagagttggtttccatcacaaatgc

SEQ ID NO: 4764493 - DNA, 25 bp, Homo sapien
ccagacagagttggtttccatcaca

SEQ ID NO: 4764494 - DNA, 25 bp, Homo sapien
gacagagttggtttccatcacaaat

SEQ ID NO: 4764495 - DNA, 25 bp, Homo sapien
tacagggaactacctccagacacag

SEQ ID NO: 4764496 - DNA, 25 bp, Homo sapien
aactgtgcaggtatctcattaagcc

SEQ ID NO: 4764497 - DNA, 25 bp, Homo sapien
ccagacacagtgaattgagccagta

SEQ ID NO: 4764498 - DNA, 25 bp, Homo sapien
aaaagacatgggaggtagctagcac

SEQ ID NO: 4764499 - DNA, 25 bp, Homo sapien
accaaatgcaatcctggcttgacat

SEQ ID NO: 4764500 - DNA, 25 bp, Homo sapien
ataactcactgcattttcacctctg

SEQ ID NO: 4764501 - DNA, 25 bp, Homo sapien
ctgagccagccatacttgtgcatct

SEQ ID NO: 4764502 - DNA, 25 bp, Homo sapien
ttgaaactaaagtgcaccaaatgca

SEQ ID NO: 4764503 - DNA, 25 bp, Homo sapien
tatgaggacttgcttagccatggag

SEQ ID NO: 4764504 - DNA, 25 bp, Homo sapien
gaactgtagtcctcaccttaagtaa

SEQ ID NO: 4764505 - DNA, 25 bp, Homo sapien
gatgcctgctaccatcttgaattaa

SEQ ID NO: 4764506 - DNA, 25 bp, Homo sapien
tacagccatttactctgcagctgat

SEQ ID NO: 4764507 - DNA, 25 bp, Homo sapien
gactcctgcagtggattacaaccct

SEQ ID NO: 4764508 - DNA, 25 bp, Homo sapien
taggacgtgccttgtattagaccag

SEQ ID NO: 4764509 - DNA, 25 bp, Homo sapien
tatgctacaacgatgggccctcggt

SEQ ID NO: 4764510 - DNA, 25 bp, Homo sapien
gctggagataccaagcatcctgctg

SEQ ID NO: 4764511 - DNA, 25 bp, Homo sapien
ggttttgcagactttcacattacag

SEQ ID NO: 4764512 - DNA, 25 bp, Homo sapien
tcttacagtgtgatagcctggtttt

SEQ ID NO: 4764513 - DNA, 25 bp, Homo sapien
gagggaaccataaagacttttctca

SEQ ID NO: 4764514 - DNA, 25 bp, Homo sapien
tgggcaggctgcactttcaggatct

SEQ ID NO: 4764515 - DNA, 25 bp, Homo sapien
ggatcttggaactggcctccaccac

SEQ ID NO: 4764516 - DNA, 25 bp, Homo sapien
ctgtgcacctcaggaggctccctct

SEQ ID NO: 4764517 - DNA, 25 bp, Homo sapien
ggaggctccctctggatcttggaac

SEQ ID NO: 4764518 - DNA, 25 bp, Homo sapien
ctctggatcttggaactggcctcca

SEQ ID NO: 4764519 - DNA, 25 bp, Homo sapien
ttgatacagtcttgatctgactgga

SEQ ID NO: 4764520 - DNA, 25 bp, Homo sapien
tatatcgaaatctacttcctttaaa

SEQ ID NO: 4764521 - DNA, 25 bp, Homo sapien
ctatatcgaaatctacttcctttaa

SEQ ID NO: 4764522 - DNA, 25 bp, Homo sapien
tcactgtgcattgcccaagtgaggg

SEQ ID NO: 4764523 - DNA, 25 bp, Homo sapien
caagtgagggaacaagggtcccgca

SEQ ID NO: 4764524 - DNA, 25 bp, Homo sapien
ggtcccgcatcaccacaggaatggt

SEQ ID NO: 4764525 - DNA, 25 bp, Homo sapien
tatgccacgaagaactcactgtgca

SEQ ID NO: 4764526 - DNA, 25 bp, Homo sapien
cagctggtgttgaagtatggaatgc

SEQ ID NO: 4764527 - DNA, 25 bp, Homo sapien
gtttgcaggcagctggtgttgaagt

SEQ ID NO: 4764528 - DNA, 25 bp, Homo sapien
tccactccacacttccaaagatgtt

SEQ ID NO: 4764529 - DNA, 25 bp, Homo sapien
ttccactccacacttccaaagatgt

SEQ ID NO: 4764530 - DNA, 25 bp, Homo sapien
tctgggtgccaatcacataaaatgt

SEQ ID NO: 4764531 - DNA, 25 bp, Homo sapien
gccaatcacataaaatgtcttccct

SEQ ID NO: 4764532 - DNA, 25 bp, Homo sapien
ggtgccaatcacataaaatgtcttc

SEQ ID NO: 4764533 - DNA, 25 bp, Homo sapien
ccttctgggtgccaatcacataaaa

SEQ ID NO: 4764534 - DNA, 25 bp, Homo sapien
cctaaaaatgttgttgtgcctgttg

SEQ ID NO: 4764535 - DNA, 25 bp, Homo sapien
gcagctgtgaatcctaaaaatgttg

SEQ ID NO: 4764536 - DNA, 25 bp, Homo sapien
tcctaaaaatgttgttgtgcctgtt

SEQ ID NO: 4764537 - DNA, 25 bp, Homo sapien
ctgcagctgtgaatcctaaaaatgt

SEQ ID NO: 4764538 - DNA, 25 bp, Homo sapien
ggagcaagttaaattcagcaactgg

SEQ ID NO: 4764539 - DNA, 25 bp, Homo sapien
gcaagttaaattcagcaactggtgg

SEQ ID NO: 4764540 - DNA, 25 bp, Homo sapien
gttaaattcagcaactggtgggctc

SEQ ID NO: 4764541 - DNA, 25 bp, Homo sapien
aattcagcaactggtgggctctgcc

SEQ ID NO: 4764542 - DNA, 25 bp, Homo sapien
cttgatcctgggtaagatcttggga

SEQ ID NO: 4764543 - DNA, 25 bp, Homo sapien
taagcagaagtgctatgaatcactt

SEQ ID NO: 4764544 - DNA, 25 bp, Homo sapien
gatcttgggatgagtcctgatcaga

SEQ ID NO: 4764545 - DNA, 25 bp, Homo sapien
catttccttgatcctgggtaagatc

SEQ ID NO: 4764546 - DNA, 25 bp, Homo sapien
tcccaacagacgcaagaaagctcct

SEQ ID NO: 4764547 - DNA, 25 bp, Homo sapien
ggtttcccaacagacgcaagaaagc

SEQ ID NO: 4764548 - DNA, 25 bp, Homo sapien
gcaggtttcccaacagacgcaagaa

SEQ ID NO: 4764549 - DNA, 25 bp, Homo sapien
aacagacgcaagaaagctcctctcc

SEQ ID NO: 4764550 - DNA, 25 bp, Homo sapien
agccactcataggactccaaactgt

SEQ ID NO: 4764551 - DNA, 25 bp, Homo sapien
aggacaccagggtgtccttgacagt

SEQ ID NO: 4764552 - DNA, 25 bp, Homo sapien
tactgatggatcataaacagccact

SEQ ID NO: 4764553 - DNA, 25 bp, Homo sapien
gattgttattgacggaggacaccag

SEQ ID NO: 4764554 - DNA, 25 bp, Homo sapien
catcaggatcgtaatcaccaagctc

SEQ ID NO: 4764555 - DNA, 25 bp, Homo sapien
tcaggatgctcatcaggatcgtaat

SEQ ID NO: 4764556 - DNA, 25 bp, Homo sapien
tctgtgactgcttggggaaaatctc

SEQ ID NO: 4764557 - DNA, 25 bp, Homo sapien
cagcttctgtgactgcttggggaaa

SEQ ID NO: 4764558 - DNA, 25 bp, Homo sapien
tcagctgacactaacaaagggcacc

SEQ ID NO: 4764559 - DNA, 25 bp, Homo sapien
caagcatgctaaggaatatgagcca

SEQ ID NO: 4764560 - DNA, 25 bp, Homo sapien
cctccagaggatcttcaagggtaaa

SEQ ID NO: 4764561 - DNA, 25 bp, Homo sapien
gatgtctggcatcaagaatactttc

SEQ ID NO: 4764562 - DNA, 25 bp, Homo sapien
caagaggagttgggtaagccgccat

SEQ ID NO: 4764563 - DNA, 25 bp, Homo sapien
ttgaacaatacaggcacccaggtag

SEQ ID NO: 4764564 - DNA, 25 bp, Homo sapien
caggcggccatgaaaaatgtccctt

SEQ ID NO: 4764565 - DNA, 25 bp, Homo sapien
aacaatacaggcacccaggtaggca

SEQ ID NO: 4764566 - DNA, 25 bp, Homo sapien
aaggagcacagcaggcggccatgaa

SEQ ID NO: 4764567 - DNA, 25 bp, Homo sapien
atggccaccgtcatcactagctgca

SEQ ID NO: 4764568 - DNA, 25 bp, Homo sapien
caatccatacataaggccagcctca

SEQ ID NO: 4764569 - DNA, 25 bp, Homo sapien
gagagccaggaaacggactcaatcc

SEQ ID NO: 4764570 - DNA, 25 bp, Homo sapien
agctcccgcacgaggacagccatgg

SEQ ID NO: 4764571 - DNA, 25 bp, Homo sapien
aatcttcaagggttcatgtgggtag

SEQ ID NO: 4764572 - DNA, 25 bp, Homo sapien
cttcaagggttcatgtgggtagaat

SEQ ID NO: 4764573 - DNA, 25 bp, Homo sapien
atcttcaagggttcatgtgggtaga

SEQ ID NO: 4764574 - DNA, 25 bp, Homo sapien
tcttcaagggttcatgtgggtagaa

SEQ ID NO: 4764575 - DNA, 25 bp, Homo sapien
ctgaaacatcataaagaaaaggcat

SEQ ID NO: 4764576 - DNA, 25 bp, Homo sapien
gaaccactcagttctgtcacagtga

SEQ ID NO: 4764577 - DNA, 25 bp, Homo sapien
cacagtgatccaggagtagtgccag

SEQ ID NO: 4764578 - DNA, 25 bp, Homo sapien
cctgaactgatgagaaggtcaatgt

SEQ ID NO: 4764579 - DNA, 25 bp, Homo sapien
tccctgtaagttggaagaaccactc

SEQ ID NO: 4764580 - DNA, 25 bp, Homo sapien
aaatcccagggtagcatcattttgc

SEQ ID NO: 4764581 - DNA, 25 bp, Homo sapien
agccaactgatagctgccagacaag

SEQ ID NO: 4764582 - DNA, 25 bp, Homo sapien
caagtgtctcctcggggcagctcag

SEQ ID NO: 4764583 - DNA, 25 bp, Homo sapien
cagctcagtggccccttttgtgtca

SEQ ID NO: 4764584 - DNA, 25 bp, Homo sapien
accaaacgttttcctccagtcatca

SEQ ID NO: 4764585 - DNA, 25 bp, Homo sapien
agtcatcataaagaatcatggggaa

SEQ ID NO: 4764586 - DNA, 25 bp, Homo sapien
cagtcatcataaagaatcatgggga

SEQ ID NO: 4764587 - DNA, 25 bp, Homo sapien
caaacgttttcctccagtcatcata

SEQ ID NO: 4764588 - DNA, 25 bp, Homo sapien
ataccgagcatggaacctcctgccc

SEQ ID NO: 4764589 - DNA, 25 bp, Homo sapien
tggttatcattcagacactcatgct

SEQ ID NO: 4764590 - DNA, 25 bp, Homo sapien
tgctgccagcatgtgtagttttgag

SEQ ID NO: 4764591 - DNA, 25 bp, Homo sapien
tatcattcagacactcatgctgcca

SEQ ID NO: 4764592 - DNA, 25 bp, Homo sapien
cccgcttcccacgaggagtgctagg

SEQ ID NO: 4764593 - DNA, 25 bp, Homo sapien
gccccagagatataaggacttcccc

SEQ ID NO: 4764594 - DNA, 25 bp, Homo sapien
gaagaaagcccctgaaagtactgcc

SEQ ID NO: 4764595 - DNA, 25 bp, Homo sapien
gagtgctaggtactccctgaaaccc

SEQ ID NO: 4764596 - DNA, 25 bp, Homo sapien
gccaaccctgggaaacatcattcct

SEQ ID NO: 4764597 - DNA, 25 bp, Homo sapien
tcagaaggatcttaatagggtcaga

SEQ ID NO: 4764598 - DNA, 25 bp, Homo sapien
ggcctatcatcctctgtgagtaaga

SEQ ID NO: 4764599 - DNA, 25 bp, Homo sapien
ctctgtgagtaagaaacagttcctc

SEQ ID NO: 4764600 - DNA, 25 bp, Homo sapien
agatacgctgcctgctagtttgtcg

SEQ ID NO: 4764601 - DNA, 25 bp, Homo sapien
gcctgctagtttgtcgtccatgttc

SEQ ID NO: 4764602 - DNA, 25 bp, Homo sapien
gaagagatacgctgcctgctagttt

SEQ ID NO: 4764603 - DNA, 25 bp, Homo sapien
ttaaagaagagatacgctgcctgct

SEQ ID NO: 4764604 - DNA, 25 bp, Homo sapien
tggacttgttaggttcaagccagtg

SEQ ID NO: 4764605 - DNA, 25 bp, Homo sapien
aagatggacttgttaggttcaagcc

SEQ ID NO: 4764606 - DNA, 25 bp, Homo sapien
cttgaagatggacttgttaggttca

SEQ ID NO: 4764607 - DNA, 25 bp, Homo sapien
gatggacttgttaggttcaagccag

SEQ ID NO: 4764608 - DNA, 25 bp, Homo sapien
gttatcacgatagtactgtcttcct

SEQ ID NO: 4764609 - DNA, 25 bp, Homo sapien
gccacaattgaagcactgacaatat

SEQ ID NO: 4764610 - DNA, 25 bp, Homo sapien
cttgagccacaattgaagcactgac

SEQ ID NO: 4764611 - DNA, 25 bp, Homo sapien
gtcttccttttaacctgagtgtcaa

SEQ ID NO: 4764612 - DNA, 25 bp, Homo sapien
cacacagacacccaagaagtcttga

SEQ ID NO: 4764613 - DNA, 25 bp, Homo sapien
cccaagaagtcttgatctttaatac

SEQ ID NO: 4764614 - DNA, 25 bp, Homo sapien
cacagacacccaagaagtcttgatc

SEQ ID NO: 4764615 - DNA, 25 bp, Homo sapien
gacacccaagaagtcttgatcttta

SEQ ID NO: 4764616 - DNA, 25 bp, Homo sapien
tggctaccaacataaaagccttggg

SEQ ID NO: 4764617 - DNA, 25 bp, Homo sapien
ttctggctaccaacataaaagcctt

SEQ ID NO: 4764618 - DNA, 25 bp, Homo sapien
ttccttctggctaccaacataaaag

SEQ ID NO: 4764619 - DNA, 25 bp, Homo sapien
tccttctggctaccaacataaaagc

SEQ ID NO: 4764620 - DNA, 25 bp, Homo sapien
tttatccatcaggacagagactcag

SEQ ID NO: 4764621 - DNA, 25 bp, Homo sapien
caaggtgtaccatgtgctaagcatt

SEQ ID NO: 4764622 - DNA, 25 bp, Homo sapien
gactcagataggctgcatagcttgg

SEQ ID NO: 4764623 - DNA, 25 bp, Homo sapien
tgtctcacctggacctagccaatgc

SEQ ID NO: 4764624 - DNA, 25 bp, Homo sapien
tcaagtggtccattcatctaggcct

SEQ ID NO: 4764625 - DNA, 25 bp, Homo sapien
tgagcaggggtgatattctccatag

SEQ ID NO: 4764626 - DNA, 25 bp, Homo sapien
agtggtccattcatctaggcctccc

SEQ ID NO: 4764627 - DNA, 25 bp, Homo sapien
gggttcaagtggtccattcatctag

SEQ ID NO: 4764628 - DNA, 25 bp, Homo sapien
ttctctgggtccacatagcgaatgc

SEQ ID NO: 4764629 - DNA, 25 bp, Homo sapien
ccacatagcgaatgccaaagtagtc

SEQ ID NO: 4764630 - DNA, 25 bp, Homo sapien
cagatgtggtcaatgagaaactgcc

SEQ ID NO: 4764631 - DNA, 25 bp, Homo sapien
gatgtggtcaatgagaaactgccct

SEQ ID NO: 4764632 - DNA, 25 bp, Homo sapien
agtggaccagagtcagtagtaagtc

SEQ ID NO: 4764633 - DNA, 25 bp, Homo sapien
gctgctgagtggaccagagtcagta

SEQ ID NO: 4764634 - DNA, 25 bp, Homo sapien
ggaccagagtcagtagtaagtccca

SEQ ID NO: 4764635 - DNA, 25 bp, Homo sapien
cacagatgtcaggagagcttatcat

SEQ ID NO: 4764636 - DNA, 25 bp, Homo sapien
tcagcaagactctcaattgtcaaaa

SEQ ID NO: 4764637 - DNA, 25 bp, Homo sapien
accacgctcagcaagactctcaatt

SEQ ID NO: 4764638 - DNA, 25 bp, Homo sapien
cgctcagcaagactctcaattgtca

SEQ ID NO: 4764639 - DNA, 25 bp, Homo sapien
agactctcaattgtcaaaaactcca

SEQ ID NO: 4764640 - DNA, 25 bp, Homo sapien
gcactaactataaatgagggcctgt

SEQ ID NO: 4764641 - DNA, 25 bp, Homo sapien
gagaccccacgagaagacggagtta

SEQ ID NO: 4764642 - DNA, 25 bp, Homo sapien
tcaatagtgtcatacccgaaggttc

SEQ ID NO: 4764643 - DNA, 25 bp, Homo sapien
tcccagtagtcaggcaattagcagg

SEQ ID NO: 4764644 - DNA, 25 bp, Homo sapien
gccattgggcaattgacatgttgtc

SEQ ID NO: 4764645 - DNA, 25 bp, Homo sapien
gaggacacagcccatagaagagagc

SEQ ID NO: 4764646 - DNA, 25 bp, Homo sapien
gacaaggtcctgatgataaccctcc

SEQ ID NO: 4764647 - DNA, 25 bp, Homo sapien
taaatgttagccagcatcggtgagg

SEQ ID NO: 4764648 - DNA, 25 bp, Homo sapien
ccccacaccctcgctgacctttctg

SEQ ID NO: 4764649 - DNA, 25 bp, Homo sapien
gatcctggcagagagttcgctgcag

SEQ ID NO: 4764650 - DNA, 25 bp, Homo sapien
ctgatcctggcagagagttcgctgc

SEQ ID NO: 4764651 - DNA, 25 bp, Homo sapien
ttctgcatgagaggcctcacagact

SEQ ID NO: 4764652 - DNA, 25 bp, Homo sapien
gaagccaggcgcattgaactgaatg

SEQ ID NO: 4764653 - DNA, 25 bp, Homo sapien
cagtatcaaactcaggacaagaagg

SEQ ID NO: 4764654 - DNA, 25 bp, Homo sapien
ggttcccagaatgcagccccatttg

SEQ ID NO: 4764655 - DNA, 25 bp, Homo sapien
catactcgggaaagcaaaggttgtc

SEQ ID NO: 4764656 - DNA, 25 bp, Homo sapien
gcagccagacgaaaatctgtctgga

SEQ ID NO: 4764657 - DNA, 25 bp, Homo sapien
tgcagccagacgaaaatctgtctgg

SEQ ID NO: 4764658 - DNA, 25 bp, Homo sapien
gcagccacccttatggaaactggaa

SEQ ID NO: 4764659 - DNA, 25 bp, Homo sapien
ccagcaaggagtgctcaaggttcca

SEQ ID NO: 4764660 - DNA, 25 bp, Homo sapien
taaaccacagccgtcgttgagaagg

SEQ ID NO: 4764661 - DNA, 25 bp, Homo sapien
gaattcaaatatccaggcccacctg

SEQ ID NO: 4764662 - DNA, 25 bp, Homo sapien
tgtaccccgccctgtatcgaagtgt

SEQ ID NO: 4764663 - DNA, 25 bp, Homo sapien
taccccgccctgtatcgaagtgttc

SEQ ID NO: 4764664 - DNA, 25 bp, Homo sapien
accccgccctgtatcgaagtgttct

SEQ ID NO: 4764665 - DNA, 25 bp, Homo sapien
tgaatgcccctctaaaaagcctaag

SEQ ID NO: 4764666 - DNA, 25 bp, Homo sapien
cagctgttcgattaagagagtgcac

SEQ ID NO: 4764667 - DNA, 25 bp, Homo sapien
aagaaaaataaccaagcctgcgcca

SEQ ID NO: 4764668 - DNA, 25 bp, Homo sapien
ccatcaaattggaggacaggacttc

SEQ ID NO: 4764669 - DNA, 25 bp, Homo sapien
aatgcatattatcagccttcttcct

SEQ ID NO: 4764670 - DNA, 25 bp, Homo sapien
ggctggagtctccatgccactcgca

SEQ ID NO: 4764671 - DNA, 25 bp, Homo sapien
tttggaatagcagagtccccacgtg

SEQ ID NO: 4764672 - DNA, 25 bp, Homo sapien
aggtatatctcccaccctcagtttt

SEQ ID NO: 4764673 - DNA, 25 bp, Homo sapien
catattagtacatcttttgtagcta

SEQ ID NO: 4764674 - DNA, 25 bp, Homo sapien
taatgtcttaatgtagctacaagaa

SEQ ID NO: 4764675 - DNA, 25 bp, Homo sapien
cgcgcccagctcttttaatgtctta

SEQ ID NO: 4764676 - DNA, 25 bp, Homo sapien
tggtggggtaactaacaataatagc

SEQ ID NO: 4764677 - DNA, 25 bp, Homo sapien
tattgatgcatatgagctgccttgt

SEQ ID NO: 4764678 - DNA, 25 bp, Homo sapien
cacccagtagtaacctgcccatagg

SEQ ID NO: 4764679 - DNA, 25 bp, Homo sapien
taggtaaccaatgtaacttcttatg

SEQ ID NO: 4764680 - DNA, 25 bp, Homo sapien
taatggccgcatccattgtataggt

SEQ ID NO: 4764681 - DNA, 25 bp, Homo sapien
caatggtactgggtattgcatgtct

SEQ ID NO: 4764682 - DNA, 25 bp, Homo sapien
tacacctaccataaagccgaagaga

SEQ ID NO: 4764683 - DNA, 25 bp, Homo sapien
tgacaggcggactggtcctaaggat

SEQ ID NO: 4764684 - DNA, 25 bp, Homo sapien
cagctcaagacccttgcaatggtac

SEQ ID NO: 4764685 - DNA, 25 bp, Homo sapien
ctggagcaggtatccacaagcagac

SEQ ID NO: 4764686 - DNA, 25 bp, Homo sapien
ggtatccacaagcagacacatctgc

SEQ ID NO: 4764687 - DNA, 25 bp, Homo sapien
gagcaggtatccacaagcagacaca

SEQ ID NO: 4764688 - DNA, 25 bp, Homo sapien
gcaggtatccacaagcagacacatc

SEQ ID NO: 4764689 - DNA, 25 bp, Homo sapien
aagaaattgggcccttgcccattga

SEQ ID NO: 4764690 - DNA, 25 bp, Homo sapien
ataaagaaattgggcccttgcccat

SEQ ID NO: 4764691 - DNA, 25 bp, Homo sapien
aaagaaattgggcccttgcccattg

SEQ ID NO: 4764692 - DNA, 25 bp, Homo sapien
cataaagaaattgggcccttgccca

SEQ ID NO: 4764693 - DNA, 25 bp, Homo sapien
gctggcaaagaacggtgtgttctga

SEQ ID NO: 4764694 - DNA, 25 bp, Homo sapien
taacagcttctttatctgggctggc

SEQ ID NO: 4764695 - DNA, 25 bp, Homo sapien
gaggctgtagtgtcctgatcaaaca

SEQ ID NO: 4764696 - DNA, 25 bp, Homo sapien
caaagaacggtgtgttctgatcaga

SEQ ID NO: 4764697 - DNA, 25 bp, Homo sapien
tggtaagggtcaccatcacccctct

SEQ ID NO: 4764698 - DNA, 25 bp, Homo sapien
ccaaaaggtcccgaatcacagtgct

SEQ ID NO: 4764699 - DNA, 25 bp, Homo sapien
ggctcatgcactgtcccattagatg

SEQ ID NO: 4764700 - DNA, 25 bp, Homo sapien
gcagtcgcctccagatataagccca

SEQ ID NO: 4764701 - DNA, 25 bp, Homo sapien
catataagaacctaacagtgggacc

SEQ ID NO: 4764702 - DNA, 25 bp, Homo sapien
gctacgtccgctgcactgaaattaa

SEQ ID NO: 4764703 - DNA, 25 bp, Homo sapien
cagtgggaccggtatacatgctata

SEQ ID NO: 4764704 - DNA, 25 bp, Homo sapien
gcctgaatttcttggagagggcaaa

SEQ ID NO: 4764705 - DNA, 25 bp, Homo sapien
taagaaaggaatctcagtatgttca

SEQ ID NO: 4764706 - DNA, 25 bp, Homo sapien
gaatctcagtatgttcatcaggaaa

SEQ ID NO: 4764707 - DNA, 25 bp, Homo sapien
aaggaatctcagtatgttcatcagg

SEQ ID NO: 4764708 - DNA, 25 bp, Homo sapien
gaaaggaatctcagtatgttcatca

SEQ ID NO: 4764709 - DNA, 25 bp, Homo sapien
ctggtgcaggcaaataatgagagct

SEQ ID NO: 4764710 - DNA, 25 bp, Homo sapien
cagtgcctggaggtgtatcatttca

SEQ ID NO: 4764711 - DNA, 25 bp, Homo sapien
taacagacgctgcattccaccaagt

SEQ ID NO: 4764712 - DNA, 25 bp, Homo sapien
gaaggaaatgtgtaccagctggtgc

SEQ ID NO: 4764713 - DNA, 25 bp, Homo sapien
cttcttgcacctgtgtataggtcat

SEQ ID NO: 4764714 - DNA, 25 bp, Homo sapien
tccagttgctcggtaagtaaggcaa

SEQ ID NO: 4764715 - DNA, 25 bp, Homo sapien
ccagttgctcggtaagtaaggcaaa

SEQ ID NO: 4764716 - DNA, 25 bp, Homo sapien
ggtccagttgctcggtaagtaaggc

SEQ ID NO: 4764717 - DNA, 25 bp, Homo sapien
aaggtccagttgctcggtaagtaag

SEQ ID NO: 4764718 - DNA, 25 bp, Homo sapien
taaacaagaggagctagaaatatca

SEQ ID NO: 4764719 - DNA, 25 bp, Homo sapien
aatatcacattgcacatcgacaggc

SEQ ID NO: 4764720 - DNA, 25 bp, Homo sapien
ttccctcactgcaaataagtaacag

SEQ ID NO: 4764721 - DNA, 25 bp, Homo sapien
gcaaataagtaacagacacccagac

SEQ ID NO: 4764722 - DNA, 25 bp, Homo sapien
tgctttggtcaggaaaggaaccacc

SEQ ID NO: 4764723 - DNA, 25 bp, Homo sapien
tactggtcagaagctctacaaaaga

SEQ ID NO: 4764724 - DNA, 25 bp, Homo sapien
tcagaaccattattaccaaagggat

SEQ ID NO: 4764725 - DNA, 25 bp, Homo sapien
aaatggcaggtgttatccaaaccaa

SEQ ID NO: 4764726 - DNA, 25 bp, Homo sapien
gacaaaaaggatttgcagtgccgtg

SEQ ID NO: 4764727 - DNA, 25 bp, Homo sapien
ttgtgccttgccaagacaaaaagga

SEQ ID NO: 4764728 - DNA, 25 bp, Homo sapien
tgtgccttgccaagacaaaaaggat

SEQ ID NO: 4764729 - DNA, 25 bp, Homo sapien
aaaaaggatttgcagtgccgtgatc

SEQ ID NO: 4764730 - DNA, 25 bp, Homo sapien
cttccacagcaggttctgtgcattc

SEQ ID NO: 4764731 - DNA, 25 bp, Homo sapien
ttccacagcaggttctgtgcattcc

SEQ ID NO: 4764732 - DNA, 25 bp, Homo sapien
tccacagcaggttctgtgcattcca

SEQ ID NO: 4764733 - DNA, 25 bp, Homo sapien
ccacagcaggttctgtgcattccat

SEQ ID NO: 4764734 - DNA, 25 bp, Homo sapien
tttaattgtttctactaatatttca

SEQ ID NO: 4764735 - DNA, 25 bp, Homo sapien
attaacttctgttgctatttaattg

SEQ ID NO: 4764736 - DNA, 25 bp, Homo sapien
aattgtttctactaatatttcaatg

SEQ ID NO: 4764737 - DNA, 25 bp, Homo sapien
ttaacttctgttgctatttaattgt

SEQ ID NO: 4764738 - DNA, 25 bp, Homo sapien
gttatatgcagatacaacctatttt

SEQ ID NO: 4764739 - DNA, 25 bp, Homo sapien
gatgctgaaggacaactgtaatatt

SEQ ID NO: 4764740 - DNA, 25 bp, Homo sapien
ctgaaacgaatctgccacagatgct

SEQ ID NO: 4764741 - DNA, 25 bp, Homo sapien
ggcatgagccacgagatgatttaaa

SEQ ID NO: 4764742 - DNA, 25 bp, Homo sapien
ttcccaaccaggcttcctgtagagc

SEQ ID NO: 4764743 - DNA, 25 bp, Homo sapien
aattgtgtagcgcttccccctttgc

SEQ ID NO: 4764744 - DNA, 25 bp, Homo sapien
aaattgtgtagcgcttccccctttg

SEQ ID NO: 4764745 - DNA, 25 bp, Homo sapien
ccttcccaaccaggcttcctgtaga

SEQ ID NO: 4764746 - DNA, 25 bp, Homo sapien
taacgtggcaatatccttgtattgg

SEQ ID NO: 4764747 - DNA, 25 bp, Homo sapien
aatatccttgtattgggtccttggg

SEQ ID NO: 4764748 - DNA, 25 bp, Homo sapien
ctctaacgtggcaatatccttgtat

SEQ ID NO: 4764749 - DNA, 25 bp, Homo sapien
cgtggcaatatccttgtattgggtc

SEQ ID NO: 4764750 - DNA, 25 bp, Homo sapien
agatgacacagatgtatgtaatgca

SEQ ID NO: 4764751 - DNA, 25 bp, Homo sapien
cctaacttcttgatcaaaacaaatg

SEQ ID NO: 4764752 - DNA, 25 bp, Homo sapien
cctccagggtcattgtccctcagag

SEQ ID NO: 4764753 - DNA, 25 bp, Homo sapien
tcagctccagagcttaagttacaac

SEQ ID NO: 4764754 - DNA, 25 bp, Homo sapien
ttttgtatctctacttccagctctg

SEQ ID NO: 4764755 - DNA, 25 bp, Homo sapien
ccagagggacgagaaggcagtcact

SEQ ID NO: 4764756 - DNA, 25 bp, Homo sapien
caccaggagtccagggtacaggaaa

SEQ ID NO: 4764757 - DNA, 25 bp, Homo sapien
tgcgcccagtgaggcacaatcgagg

SEQ ID NO: 4764758 - DNA, 25 bp, Homo sapien
gaatcattccatacccagcaacagt

SEQ ID NO: 4764759 - DNA, 25 bp, Homo sapien
attgaaaccctgctacactgctggt

SEQ ID NO: 4764760 - DNA, 25 bp, Homo sapien
aatggaggtatgactgctaaagggc

SEQ ID NO: 4764761 - DNA, 25 bp, Homo sapien
gatgctcaactttagccaccagaga

SEQ ID NO: 4764762 - DNA, 25 bp, Homo sapien
gatatatctatgcaatggactggac

SEQ ID NO: 4764763 - DNA, 25 bp, Homo sapien
ctttgcacctcacactagctctcct

SEQ ID NO: 4764764 - DNA, 25 bp, Homo sapien
ttgcacctcacactagctctcctga

SEQ ID NO: 4764765 - DNA, 25 bp, Homo sapien
acctcacactagctctcctgacagc

SEQ ID NO: 4764766 - DNA, 25 bp, Homo sapien
gcacctcacactagctctcctgaca

SEQ ID NO: 4764767 - DNA, 25 bp, Homo sapien
cgacacggagcggaaagcaggttcc

SEQ ID NO: 4764768 - DNA, 25 bp, Homo sapien
caacttgggcgacagtgaatgtcca

SEQ ID NO: 4764769 - DNA, 25 bp, Homo sapien
tgaatgtccaccaagattccacggg

SEQ ID NO: 4764770 - DNA, 25 bp, Homo sapien
ctttcgaggtagctccagtccggcg

SEQ ID NO: 4764771 - DNA, 25 bp, Homo sapien
cgccctcgcccggttccacgcgcac

SEQ ID NO: 4764772 - DNA, 25 bp, Homo sapien
cctgctcccggcgtgtgccccgcgc

SEQ ID NO: 4764773 - DNA, 25 bp, Homo sapien
cgccctgctcccggcgtgtgccccg

SEQ ID NO: 4764774 - DNA, 25 bp, Homo sapien
ccgcgccctcgcccggttccacgcg

SEQ ID NO: 4764775 - DNA, 25 bp, Homo sapien
agcagccggatggtgcatctcatct

SEQ ID NO: 4764776 - DNA, 25 bp, Homo sapien
cctggctgagcgatttgacgctgga

SEQ ID NO: 4764777 - DNA, 25 bp, Homo sapien
tgtggcaggagatctccgagtcgtc

SEQ ID NO: 4764778 - DNA, 25 bp, Homo sapien
tctccgagtcgtccagcagccggat

SEQ ID NO: 4764779 - DNA, 25 bp, Homo sapien
cacacagtggcaggaggcgaacatg

SEQ ID NO: 4764780 - DNA, 25 bp, Homo sapien
caggaggcgaacatgcaccgcggcc

SEQ ID NO: 4764781 - DNA, 25 bp, Homo sapien
caccgcggccgtggggagcgagcgg

SEQ ID NO: 4764782 - DNA, 25 bp, Homo sapien
acagtggcaggaggcgaacatgcac

SEQ ID NO: 4764783 - DNA, 25 bp, Homo sapien
ctgtccgggacacctgggcgcggct

SEQ ID NO: 4764784 - DNA, 25 bp, Homo sapien
cgtcgggcgcctgcggacacacatg

SEQ ID NO: 4764785 - DNA, 25 bp, Homo sapien
tcgcctgcgcggacacacacgctcg

SEQ ID NO: 4764786 - DNA, 25 bp, Homo sapien
agccccgggacatcggcagcgtcgg

SEQ ID NO: 4764787 - DNA, 25 bp, Homo sapien
ctcgggctcccggttgtgctcgtcc

SEQ ID NO: 4764788 - DNA, 25 bp, Homo sapien
ggtggcctgctcagtcgcagccgcc

SEQ ID NO: 4764789 - DNA, 25 bp, Homo sapien
gctgcgtcaagctgggcccgactgc

SEQ ID NO: 4764790 - DNA, 25 bp, Homo sapien
gcggagggatggctggcgcggctgg

SEQ ID NO: 4764791 - DNA, 25 bp, Homo sapien
ggattccgcctcgggaaaggattgc

SEQ ID NO: 4764792 - DNA, 25 bp, Homo sapien
cctcgggaaaggattgctgggccca

SEQ ID NO: 4764793 - DNA, 25 bp, Homo sapien
gtgacagccctgacacggctacacc

SEQ ID NO: 4764794 - DNA, 25 bp, Homo sapien
acagccctgacacggctacaccagg

SEQ ID NO: 4764795 - DNA, 25 bp, Homo sapien
agacagcccagagatcaaagaaaag

SEQ ID NO: 4764796 - DNA, 25 bp, Homo sapien
gaagctggtatgacaccgggtcagt

SEQ ID NO: 4764797 - DNA, 25 bp, Homo sapien
aactggatcatctctgctagccaaa

SEQ ID NO: 4764798 - DNA, 25 bp, Homo sapien
cagtggaggacatcttacagctgta

SEQ ID NO: 4764799 - DNA, 25 bp, Homo sapien
tctctttaactgtgtcccctgaggg

SEQ ID NO: 4764800 - DNA, 25 bp, Homo sapien
aaaggagctccctgacttaaatggg

SEQ ID NO: 4764801 - DNA, 25 bp, Homo sapien
tcaaagaatcattggcaaaggaagg

SEQ ID NO: 4764802 - DNA, 25 bp, Homo sapien
gggcatccaccaagattttcaaaga

SEQ ID NO: 4764803 - DNA, 25 bp, Homo sapien
cttacagtgccaagtcagtgtgccc

SEQ ID NO: 4764804 - DNA, 25 bp, Homo sapien
tttgttgccatgatatttaaaggaa

SEQ ID NO: 4764805 - DNA, 25 bp, Homo sapien
tacagtgccaagtcagtgtgcccac

SEQ ID NO: 4764806 - DNA, 25 bp, Homo sapien
ccttccttcatctgtatcagtgtaa

SEQ ID NO: 4764807 - DNA, 25 bp, Homo sapien
aaaccctgagtcctgctatgtctgg

SEQ ID NO: 4764808 - DNA, 25 bp, Homo sapien
tggcaaaccctgagtcctgctatgt

SEQ ID NO: 4764809 - DNA, 25 bp, Homo sapien
actggcaaaccctgagtcctgctat

SEQ ID NO: 4764810 - DNA, 25 bp, Homo sapien
gagcctcattaaaaccttaggaaca

SEQ ID NO: 4764811 - DNA, 25 bp, Homo sapien
catgcaatagactggcaggctggga

SEQ ID NO: 4764812 - DNA, 25 bp, Homo sapien
tagccatgcaatagactggcaggct

SEQ ID NO: 4764813 - DNA, 25 bp, Homo sapien
tgcaccaggaactctcaaaagcctt

SEQ ID NO: 4764814 - DNA, 25 bp, Homo sapien
aaaagccttgaagtagccatgcaat

SEQ ID NO: 4764815 - DNA, 25 bp, Homo sapien
accatggcagtcaagaggtcttctc

SEQ ID NO: 4764816 - DNA, 25 bp, Homo sapien
tacaaccatggcagtcaagaggtct

SEQ ID NO: 4764817 - DNA, 25 bp, Homo sapien
tcattaagcagttctacaaccatgg

SEQ ID NO: 4764818 - DNA, 25 bp, Homo sapien
gcagttctacaaccatggcagtcaa

SEQ ID NO: 4764819 - DNA, 25 bp, Homo sapien
gtgttcccacaaatggtccatatac

SEQ ID NO: 4764820 - DNA, 25 bp, Homo sapien
ttcccacaaatggtccatatacaca

SEQ ID NO: 4764821 - DNA, 25 bp, Homo sapien
ctgtgttcccacaaatggtccatat

SEQ ID NO: 4764822 - DNA, 25 bp, Homo sapien
ccattccattcatgtggggctgtgt

SEQ ID NO: 4764823 - DNA, 25 bp, Homo sapien
aattatcaataatcgtgcctcagac

SEQ ID NO: 4764824 - DNA, 25 bp, Homo sapien
aatcatcctggtaaggtattgggaa

SEQ ID NO: 4764825 - DNA, 25 bp, Homo sapien
tatcaataatcgtgcctcagacaaa

SEQ ID NO: 4764826 - DNA, 25 bp, Homo sapien
caatgccaactatatgccaaatcat

SEQ ID NO: 4764827 - DNA, 25 bp, Homo sapien
tgagtcctaaggtcactgtacaggg

SEQ ID NO: 4764828 - DNA, 25 bp, Homo sapien
aactgtctgaacatggccccaggaa

SEQ ID NO: 4764829 - DNA, 25 bp, Homo sapien
aaaggcataccgctcaatgaccagg

SEQ ID NO: 4764830 - DNA, 25 bp, Homo sapien
gatgagctcgctacagcacttgctg

SEQ ID NO: 4764831 - DNA, 25 bp, Homo sapien
ccctgtgaatggattaaagcgtgtc

SEQ ID NO: 4764832 - DNA, 25 bp, Homo sapien
actgcccccatgctacagagctgag

SEQ ID NO: 4764833 - DNA, 25 bp, Homo sapien
attaaagcgtgtccgtgtccaagtc

SEQ ID NO: 4764834 - DNA, 25 bp, Homo sapien
cccccatgctacagagctgaggaaa

SEQ ID NO: 4764835 - DNA, 25 bp, Homo sapien
ccatattctaccattatctgttctc

SEQ ID NO: 4764836 - DNA, 25 bp, Homo sapien
ttcgtagagcattcattgtgctcac

SEQ ID NO: 4764837 - DNA, 25 bp, Homo sapien
tctgatttcactcttcgtagagcat

SEQ ID NO: 4764838 - DNA, 25 bp, Homo sapien
gtttccataggccaagaaagctttc

SEQ ID NO: 4764839 - DNA, 25 bp, Homo sapien
tgggctgggagtcgggagtgcactg

SEQ ID NO: 4764840 - DNA, 25 bp, Homo sapien
ctgaatggagattcgcagcccacgg

SEQ ID NO: 4764841 - DNA, 25 bp, Homo sapien
ccacggcactagtcttaaataaagc

SEQ ID NO: 4764842 - DNA, 25 bp, Homo sapien
ttcttgctgaatggagattcgcagc

SEQ ID NO: 4764843 - DNA, 25 bp, Homo sapien
gattcgcagcccacggcactagtct

SEQ ID NO: 4764844 - DNA, 25 bp, Homo sapien
cagtgatgccttgctagcctgggag

SEQ ID NO: 4764845 - DNA, 25 bp, Homo sapien
taaatgcttattctacgcgggccag

SEQ ID NO: 4764846 - DNA, 25 bp, Homo sapien
tacgatgttcaaaggccaatggcca

SEQ ID NO: 4764847 - DNA, 25 bp, Homo sapien
tccttaggaaagcacctcgctgtgg

SEQ ID NO: 4764848 - DNA, 25 bp, Homo sapien
tgtcaacttctcagtctaatggaga

SEQ ID NO: 4764849 - DNA, 25 bp, Homo sapien
taagcctcatcatcttgttactgca

SEQ ID NO: 4764850 - DNA, 25 bp, Homo sapien
gcaaatatggagctggtaagcctca

SEQ ID NO: 4764851 - DNA, 25 bp, Homo sapien
taaaaattgaccatgtggtctgcaa

SEQ ID NO: 4764852 - DNA, 25 bp, Homo sapien
gaggtcatctctggacgcttactca

SEQ ID NO: 4764853 - DNA, 25 bp, Homo sapien
cgcttactcaaaagagagggacatt

SEQ ID NO: 4764854 - DNA, 25 bp, Homo sapien
tatcagtggtccaaacagaactaag

SEQ ID NO: 4764855 - DNA, 25 bp, Homo sapien
catctgagcgggtcgtttgaggtca

SEQ ID NO: 4764856 - DNA, 25 bp, Homo sapien
caatttacctgtttctattcaccag

SEQ ID NO: 4764857 - DNA, 25 bp, Homo sapien
tctggccagagattgagttttagaa

SEQ ID NO: 4764858 - DNA, 25 bp, Homo sapien
aggaagatgctttatccttctgtcc

SEQ ID NO: 4764859 - DNA, 25 bp, Homo sapien
catacttgactcaagaactacagcc

SEQ ID NO: 4764860 - DNA, 25 bp, Homo sapien
acagtgcaaggactggtgggtaacc

SEQ ID NO: 4764861 - DNA, 25 bp, Homo sapien
gagcaaagacacatgaatacccttc

SEQ ID NO: 4764862 - DNA, 25 bp, Homo sapien
gttatgacactatcccacactgaat

SEQ ID NO: 4764863 - DNA, 25 bp, Homo sapien
ccaccatttgccagtacagaagttt

SEQ ID NO: 4764864 - DNA, 25 bp, Homo sapien
tattatttaagctggccccatccag

SEQ ID NO: 4764865 - DNA, 25 bp, Homo sapien
ctaaaggaatgtaccaccccaacag

SEQ ID NO: 4764866 - DNA, 25 bp, Homo sapien
tcctaacagaatcttggttgccagt

SEQ ID NO: 4764867 - DNA, 25 bp, Homo sapien
ccagagtcagccaaatgtatcactg

SEQ ID NO: 4764868 - DNA, 25 bp, Homo sapien
gagcctattgcagtatgtttccaga

SEQ ID NO: 4764869 - DNA, 25 bp, Homo sapien
gcctgttaaactacctatgggagaa

SEQ ID NO: 4764870 - DNA, 25 bp, Homo sapien
ttccagaaatgcagtcccaaatgtg

SEQ ID NO: 4764871 - DNA, 25 bp, Homo sapien
gctgagaagtcctaggcaaatgcac

SEQ ID NO: 4764872 - DNA, 25 bp, Homo sapien
caaataaactggacagatgcaggac

SEQ ID NO: 4764873 - DNA, 25 bp, Homo sapien
gatgcaggacaaaatctggtcaccc

SEQ ID NO: 4764874 - DNA, 25 bp, Homo sapien
gtagccttaattcccactgttccag

SEQ ID NO: 4764875 - DNA, 25 bp, Homo sapien
tgcagaagtgatgcatgcagtagcc

SEQ ID NO: 4764876 - DNA, 25 bp, Homo sapien
tttgcttcacggttcaaaaatccca

SEQ ID NO: 4764877 - DNA, 25 bp, Homo sapien
caatagctgcattgatatcacctcc

SEQ ID NO: 4764878 - DNA, 25 bp, Homo sapien
tgggagcccagtaacctttcaatag

SEQ ID NO: 4764879 - DNA, 25 bp, Homo sapien
gcttcacggttcaaaaatcccattg

SEQ ID NO: 4764880 - DNA, 25 bp, Homo sapien
gaaagcacctaacagaccttgagac

SEQ ID NO: 4764881 - DNA, 25 bp, Homo sapien
tactgagtacctaccaagagccaga

SEQ ID NO: 4764882 - DNA, 25 bp, Homo sapien
ttttagaggatcacgtacatgcaga

SEQ ID NO: 4764883 - DNA, 25 bp, Homo sapien
tagaaaagagcttcagtttcaggcc

SEQ ID NO: 4764884 - DNA, 25 bp, Homo sapien
ttcactaggtgtggcgttagatcca

SEQ ID NO: 4764885 - DNA, 25 bp, Homo sapien
ggttcctgctgtgggacttgtgttt

SEQ ID NO: 4764886 - DNA, 25 bp, Homo sapien
agagcctccagtgcttcctaatgcc

SEQ ID NO: 4764887 - DNA, 25 bp, Homo sapien
ttagatccattagttcccgaagagc

SEQ ID NO: 4764888 - DNA, 25 bp, Homo sapien
gtttgacattgctgatagtgtatca

SEQ ID NO: 4764889 - DNA, 25 bp, Homo sapien
taacaaggcctgcattgctctaggg

SEQ ID NO: 4764890 - DNA, 25 bp, Homo sapien
taaaccctgctgaatctgtaacaag

SEQ ID NO: 4764891 - DNA, 25 bp, Homo sapien
gggcttccgttgctaatgtctgtaa

SEQ ID NO: 4764892 - DNA, 25 bp, Homo sapien
aggaaagttgggagctgttgtctca

SEQ ID NO: 4764893 - DNA, 25 bp, Homo sapien
gaggaaagttgggagctgttgtctc

SEQ ID NO: 4764894 - DNA, 25 bp, Homo sapien
ggaaagttgggagctgttgtctcat

SEQ ID NO: 4764895 - DNA, 25 bp, Homo sapien
caaataggggattattcagcatcat

SEQ ID NO: 4764896 - DNA, 25 bp, Homo sapien
tgaggatttccagcaaataggggat

SEQ ID NO: 4764897 - DNA, 25 bp, Homo sapien
ctgaggatttccagcaaatagggga

SEQ ID NO: 4764898 - DNA, 25 bp, Homo sapien
ttccagcaaataggggattattcag

SEQ ID NO: 4764899 - DNA, 25 bp, Homo sapien
tgaaaaggaccactacatctacctg

SEQ ID NO: 4764900 - DNA, 25 bp, Homo sapien
ttgagaacaccaagattagcatctg

SEQ ID NO: 4764901 - DNA, 25 bp, Homo sapien
gcctagcaccaacagtcctctggga

SEQ ID NO: 4764902 - DNA, 25 bp, Homo sapien
gcctcagctggcacttaaaagggag

SEQ ID NO: 4764903 - DNA, 25 bp, Homo sapien
ccctgtggtatggaacctagatagt

SEQ ID NO: 4764904 - DNA, 25 bp, Homo sapien
cagaagccatttttaacgaacagca

SEQ ID NO: 4764905 - DNA, 25 bp, Homo sapien
tagatagtacctaggcaacttgagg

SEQ ID NO: 4764906 - DNA, 25 bp, Homo sapien
tacaaaattgctacgcatgtgcttg

SEQ ID NO: 4764907 - DNA, 25 bp, Homo sapien
gcagcaaggtcaggattctggctta

SEQ ID NO: 4764908 - DNA, 25 bp, Homo sapien
ctgtgcagcaaggtcaggattctgg

SEQ ID NO: 4764909 - DNA, 25 bp, Homo sapien
gcaaggtcaggattctggcttagtg

SEQ ID NO: 4764910 - DNA, 25 bp, Homo sapien
aaggtcaggattctggcttagtgac

SEQ ID NO: 4764911 - DNA, 25 bp, Homo sapien
catgttttgcatcagttgtgggttt

SEQ ID NO: 4764912 - DNA, 25 bp, Homo sapien
cagttatttgttgcaacaagctctg

SEQ ID NO: 4764913 - DNA, 25 bp, Homo sapien
gcttctcatgtagggggcagacaac

SEQ ID NO: 4764914 - DNA, 25 bp, Homo sapien
cagacaacatgttttgcatcagttg

SEQ ID NO: 4764915 - DNA, 25 bp, Homo sapien
tattaagtatgccacagccttcggt

SEQ ID NO: 4764916 - DNA, 25 bp, Homo sapien
ttcccagcgcatacaaaagttgttt

SEQ ID NO: 4764917 - DNA, 25 bp, Homo sapien
ttcatggcattgtagcaacgcagtc

SEQ ID NO: 4764918 - DNA, 25 bp, Homo sapien
caacgcagtcagtgttcatgctcca

SEQ ID NO: 4764919 - DNA, 25 bp, Homo sapien
catgtggccacgttccttgatgatc

SEQ ID NO: 4764920 - DNA, 25 bp, Homo sapien
taaggccctaggattactggaataa

SEQ ID NO: 4764921 - DNA, 25 bp, Homo sapien
gaagagagacaagtggaacagccag

SEQ ID NO: 4764922 - DNA, 25 bp, Homo sapien
gattaagtttgccaggtacaaggtg

SEQ ID NO: 4764923 - DNA, 25 bp, Homo sapien
gaggcacgagaatctctagaacctg

SEQ ID NO: 4764924 - DNA, 25 bp, Homo sapien
ctgggaggcagaggttgcagtgagc

SEQ ID NO: 4764925 - DNA, 25 bp, Homo sapien
gcacgagaatctctagaacctggga

SEQ ID NO: 4764926 - DNA, 25 bp, Homo sapien
tgaggcacgagaatctctagaacct

SEQ ID NO: 4764927 - DNA, 25 bp, Homo sapien
cttaacctccctaagcacaggtaat

SEQ ID NO: 4764928 - DNA, 25 bp, Homo sapien
aacctccctaagcacaggtaatcct

SEQ ID NO: 4764929 - DNA, 25 bp, Homo sapien
gccttaacctccctaagcacaggta

SEQ ID NO: 4764930 - DNA, 25 bp, Homo sapien
agccttaacctccctaagcacaggt

SEQ ID NO: 4764931 - DNA, 25 bp, Homo sapien
taatacctgaagtattatctgaccc

SEQ ID NO: 4764932 - DNA, 25 bp, Homo sapien
tctagagtaggtgcttacaggacca

SEQ ID NO: 4764933 - DNA, 25 bp, Homo sapien
gataggccagcagagtaagttcatt

SEQ ID NO: 4764934 - DNA, 25 bp, Homo sapien
aaaatctgtcaactcctgctctaac

SEQ ID NO: 4764935 - DNA, 25 bp, Homo sapien
ccaaatttggcgcagtagtactctg

SEQ ID NO: 4764936 - DNA, 25 bp, Homo sapien
ggttgactaccttcaccagaggatg

SEQ ID NO: 4764937 - DNA, 25 bp, Homo sapien
cagaggatgtattgctcaccaagga

SEQ ID NO: 4764938 - DNA, 25 bp, Homo sapien
gatctctattttctgtacgggaagg

SEQ ID NO: 4764939 - DNA, 25 bp, Homo sapien
gaatatctgtgtacatgcgccttaa

SEQ ID NO: 4764940 - DNA, 25 bp, Homo sapien
gcagcactcagcattggttcctgaa

SEQ ID NO: 4764941 - DNA, 25 bp, Homo sapien
taggttgctcaaagctcggtcctgg

SEQ ID NO: 4764942 - DNA, 25 bp, Homo sapien
ctggattcctggcaagttccaacgt

SEQ ID NO: 4764943 - DNA, 25 bp, Homo sapien
taattaactgtctcatcaggtcagg

SEQ ID NO: 4764944 - DNA, 25 bp, Homo sapien
gagaagttggtagtattcaaaccca

SEQ ID NO: 4764945 - DNA, 25 bp, Homo sapien
gacaaaagttgtcgctgcatctgac

SEQ ID NO: 4764946 - DNA, 25 bp, Homo sapien
gaccatcatttcagggttagacaaa

SEQ ID NO: 4764947 - DNA, 25 bp, Homo sapien
tgtttgctgagctgaatgatcctga

SEQ ID NO: 4764948 - DNA, 25 bp, Homo sapien
agttgatgatgtagtaacattgctt

SEQ ID NO: 4764949 - DNA, 25 bp, Homo sapien
ccagatgtagagttactattaggag

SEQ ID NO: 4764950 - DNA, 25 bp, Homo sapien
taaaccaaaagggttgctagtagca

SEQ ID NO: 4764951 - DNA, 25 bp, Homo sapien
gcaaatatcaacacaagttggtcag

SEQ ID NO: 4764952 - DNA, 25 bp, Homo sapien
taagtccatcatgaattccatgctg

SEQ ID NO: 4764953 - DNA, 25 bp, Homo sapien
gtatgtgatttaaaacgtttagaga

SEQ ID NO: 4764954 - DNA, 25 bp, Homo sapien
gaattccatgctgactcaaggtatc

SEQ ID NO: 4764955 - DNA, 25 bp, Homo sapien
cataatcccaatgttccaggaggct

SEQ ID NO: 4764956 - DNA, 25 bp, Homo sapien
tatattcgatcctctgctaaggcct

SEQ ID NO: 4764957 - DNA, 25 bp, Homo sapien
gacagagtgatatcccgcctctaaa

SEQ ID NO: 4764958 - DNA, 25 bp, Homo sapien
gaccaaatttagttcgagccacagt

SEQ ID NO: 4764959 - DNA, 25 bp, Homo sapien
ccaatgattggcatctaagagatga

SEQ ID NO: 4764960 - DNA, 25 bp, Homo sapien
tgattggcatctaagagatgataaa

SEQ ID NO: 4764961 - DNA, 25 bp, Homo sapien
aatgattggcatctaagagatgata

SEQ ID NO: 4764962 - DNA, 25 bp, Homo sapien
gattggcatctaagagatgataaac

SEQ ID NO: 4764963 - DNA, 25 bp, Homo sapien
gagaatggccgaggacgacccctct

SEQ ID NO: 4764964 - DNA, 25 bp, Homo sapien
ccaaggcgcaaacccacgaacttgg

SEQ ID NO: 4764965 - DNA, 25 bp, Homo sapien
aaccattgcggtgtcccaaggcgca

SEQ ID NO: 4764966 - DNA, 25 bp, Homo sapien
gtgatctaatttgggacgacgcccg

SEQ ID NO: 4764967 - DNA, 25 bp, Homo sapien
ctgctggacggagctattctcgggc

SEQ ID NO: 4764968 - DNA, 25 bp, Homo sapien
acggagctattctcgggcacggcga

SEQ ID NO: 4764969 - DNA, 25 bp, Homo sapien
ctcgggcacggcgaattcctccttt

SEQ ID NO: 4764970 - DNA, 25 bp, Homo sapien
gctattctcgggcacggcgaattcc

SEQ ID NO: 4764971 - DNA, 25 bp, Homo sapien
gattttgggctccgcggaggcagcg

SEQ ID NO: 4764972 - DNA, 25 bp, Homo sapien
cggcgctatcctgggagcccggagg

SEQ ID NO: 4764973 - DNA, 25 bp, Homo sapien
cgggggcgccagcaccttcggctcc

SEQ ID NO: 4764974 - DNA, 25 bp, Homo sapien
ggaggaccgccgctttcaccactct

SEQ ID NO: 4764975 - DNA, 25 bp, Homo sapien
tagcaacgggcgcagggccaccgta

SEQ ID NO: 4764976 - DNA, 25 bp, Homo sapien
ccggcaggcctggacagcgaagaat

SEQ ID NO: 4764977 - DNA, 25 bp, Homo sapien
gaatgcagagcacgccgcctcagta

SEQ ID NO: 4764978 - DNA, 25 bp, Homo sapien
gccgtgtgttcaggcgccgctcgct

SEQ ID NO: 4764979 - DNA, 25 bp, Homo sapien
tttcccgctccattgcccaaagtgc

SEQ ID NO: 4764980 - DNA, 25 bp, Homo sapien
caaagtgcaggcgaagccagtgtga

SEQ ID NO: 4764981 - DNA, 25 bp, Homo sapien
actttgagctcagcctgcgtgcctt

SEQ ID NO: 4764982 - DNA, 25 bp, Homo sapien
tcatccccggctggcgcgactttga

SEQ ID NO: 4764983 - DNA, 25 bp, Homo sapien
atggggcggggtaggtcagttcatg

SEQ ID NO: 4764984 - DNA, 25 bp, Homo sapien
tccgcgctgtcacaatcgccttgcc

SEQ ID NO: 4764985 - DNA, 25 bp, Homo sapien
tgcctctctgtctactctgcgttcc

SEQ ID NO: 4764986 - DNA, 25 bp, Homo sapien
tgcttagcgtttgatatttggaggg

SEQ ID NO: 4764987 - DNA, 25 bp, Homo sapien
tctggtgataaaatagcggcgaggt

SEQ ID NO: 4764988 - DNA, 25 bp, Homo sapien
caagcttacagaatctgaccttccg

SEQ ID NO: 4764989 - DNA, 25 bp, Homo sapien
gtcataattacctgcacatttcact

SEQ ID NO: 4764990 - DNA, 25 bp, Homo sapien
aactccttgaatacccaagcttaca

SEQ ID NO: 4764991 - DNA, 25 bp, Homo sapien
gaccttccgtcataattacctgcac

SEQ ID NO: 4764992 - DNA, 25 bp, Homo sapien
aactgctggtcggtacaaaagtaat

SEQ ID NO: 4764993 - DNA, 25 bp, Homo sapien
gaactgctggtcggtacaaaagtaa

SEQ ID NO: 4764994 - DNA, 25 bp, Homo sapien
actgctggtcggtacaaaagtaatt

SEQ ID NO: 4764995 - DNA, 25 bp, Homo sapien
ggaactgctggtcggtacaaaagta

SEQ ID NO: 4764996 - DNA, 25 bp, Homo sapien
catgagtaaagatccagtgatggct

SEQ ID NO: 4764997 - DNA, 25 bp, Homo sapien
caggatgtggcagacgcagtagtcc

SEQ ID NO: 4764998 - DNA, 25 bp, Homo sapien
tttgctagttcaggagagcctcacc

SEQ ID NO: 4764999 - DNA, 25 bp, Homo sapien
caactgcagtcagagctgtctggca

SEQ ID NO: 4765000 - DNA, 25 bp, Homo sapien
ccttaagctcagtgagacatacatg

SEQ ID NO: 4765001 - DNA, 25 bp, Homo sapien
gaaacaaatgcaagtcgtatatcac

SEQ ID NO: 4765002 - DNA, 25 bp, Homo sapien
tcagtcctaaagtcaacaggtgggt

SEQ ID NO: 4765003 - DNA, 25 bp, Homo sapien
catggaaagatgtgcctcaattgta

SEQ ID NO: 4765004 - DNA, 25 bp, Homo sapien
tttttgtccacaacttcgccagcca

SEQ ID NO: 4765005 - DNA, 25 bp, Homo sapien
gaaatcgccacactatcatcctcaa

SEQ ID NO: 4765006 - DNA, 25 bp, Homo sapien
tggccatttaggtggattccacatt

SEQ ID NO: 4765007 - DNA, 25 bp, Homo sapien
tatgacagaacgatctatattcctc

SEQ ID NO: 4765008 - DNA, 25 bp, Homo sapien
gaagtatggatagtagacaaccact

SEQ ID NO: 4765009 - DNA, 25 bp, Homo sapien
ttgcacagcattaaatatatacaac

SEQ ID NO: 4765010 - DNA, 25 bp, Homo sapien
gcatagtttagcagttgcacagcat

SEQ ID NO: 4765011 - DNA, 25 bp, Homo sapien
tagaccattagggagctagttgctt

SEQ ID NO: 4765012 - DNA, 25 bp, Homo sapien
ctacactggtcggattcagagtttc

SEQ ID NO: 4765013 - DNA, 25 bp, Homo sapien
tggtcggattcagagtttcttttcc

SEQ ID NO: 4765014 - DNA, 25 bp, Homo sapien
tacactggtcggattcagagtttct

SEQ ID NO: 4765015 - DNA, 25 bp, Homo sapien
cactggtcggattcagagtttcttt

SEQ ID NO: 4765016 - DNA, 25 bp, Homo sapien
tgccttagtaagctcaccgatatct

SEQ ID NO: 4765017 - DNA, 25 bp, Homo sapien
tgctaaagccactagatgaaaaggg

SEQ ID NO: 4765018 - DNA, 25 bp, Homo sapien
aaaactatggcaatggtgtccaaac

SEQ ID NO: 4765019 - DNA, 25 bp, Homo sapien
caatactcgcacataagaatgctgt

SEQ ID NO: 4765020 - DNA, 25 bp, Homo sapien
atactttcactttagatctttcttg

SEQ ID NO: 4765021 - DNA, 25 bp, Homo sapien
gatctttcttgttctaatgcagcat

SEQ ID NO: 4765022 - DNA, 25 bp, Homo sapien
gctaactctgcttgtaatactttca

SEQ ID NO: 4765023 - DNA, 25 bp, Homo sapien
tgttctaatgcagcatgaagtgaag

SEQ ID NO: 4765024 - DNA, 25 bp, Homo sapien
gagctcattcttgatactttgtgat

SEQ ID NO: 4765025 - DNA, 25 bp, Homo sapien
agctcattcttgatactttgtgatt

SEQ ID NO: 4765026 - DNA, 25 bp, Homo sapien
ctcattcttgatactttgtgattca

SEQ ID NO: 4765027 - DNA, 25 bp, Homo sapien
gctcattcttgatactttgtgattc

SEQ ID NO: 4765028 - DNA, 25 bp, Homo sapien
aatacttcaacaatacttcagggaa

SEQ ID NO: 4765029 - DNA, 25 bp, Homo sapien
agtcacccaaatacttcaacaatac

SEQ ID NO: 4765030 - DNA, 25 bp, Homo sapien
ggaaaaacagcagtatagattttcc

SEQ ID NO: 4765031 - DNA, 25 bp, Homo sapien
cccaaatacttcaacaatacttcag

SEQ ID NO: 4765032 - DNA, 25 bp, Homo sapien
atggagatcaataacatgcacaggt

SEQ ID NO: 4765033 - DNA, 25 bp, Homo sapien
caggatgtagacatctaaatgtcca

SEQ ID NO: 4765034 - DNA, 25 bp, Homo sapien
gttcattaaaagacccacatggaga

SEQ ID NO: 4765035 - DNA, 25 bp, Homo sapien
agacccacatggagatcaataacat

SEQ ID NO: 4765036 - DNA, 25 bp, Homo sapien
acactgttattgtttagggagtaat

SEQ ID NO: 4765037 - DNA, 25 bp, Homo sapien
ttgttacactgttattgtttaggga

SEQ ID NO: 4765038 - DNA, 25 bp, Homo sapien
tgttacactgttattgtttagggag

SEQ ID NO: 4765039 - DNA, 25 bp, Homo sapien
ttacactgttattgtttagggagta

SEQ ID NO: 4765040 - DNA, 25 bp, Homo sapien
accttcctgaagcattttcaataat

SEQ ID NO: 4765041 - DNA, 25 bp, Homo sapien
tcaataattgtgcatttcttgcctt

SEQ ID NO: 4765042 - DNA, 25 bp, Homo sapien
cctgaagcattttcaataattgtgc

SEQ ID NO: 4765043 - DNA, 25 bp, Homo sapien
tttcaataattgtgcatttcttgcc

SEQ ID NO: 4765044 - DNA, 25 bp, Homo sapien
tgagccacagttctaaagcagtact

SEQ ID NO: 4765045 - DNA, 25 bp, Homo sapien
gctggcatgaattagtactttaccc

SEQ ID NO: 4765046 - DNA, 25 bp, Homo sapien
tgtctggcaatatactaggactttc

SEQ ID NO: 4765047 - DNA, 25 bp, Homo sapien
tccaatatgcgactactgaaagaac

SEQ ID NO: 4765048 - DNA, 25 bp, Homo sapien
ctgcgcccaagcctgaatcatttat

SEQ ID NO: 4765049 - DNA, 25 bp, Homo sapien
cgcccaagcctgaatcatttataaa

SEQ ID NO: 4765050 - DNA, 25 bp, Homo sapien
tgcgcccaagcctgaatcatttata

SEQ ID NO: 4765051 - DNA, 25 bp, Homo sapien
cactgcgcccaagcctgaatcattt

SEQ ID NO: 4765052 - DNA, 25 bp, Homo sapien
tcctttcaagctctaactttagtct

SEQ ID NO: 4765053 - DNA, 25 bp, Homo sapien
cctttcaagctctaactttagtctt

SEQ ID NO: 4765054 - DNA, 25 bp, Homo sapien
ttcctttcaagctctaactttagtc

SEQ ID NO: 4765055 - DNA, 25 bp, Homo sapien
tcttcctggtcccatatatccagga

SEQ ID NO: 4765056 - DNA, 25 bp, Homo sapien
ctcttcctggtcccatatatccagg

SEQ ID NO: 4765057 - DNA, 25 bp, Homo sapien
ctgtgattttaagagaattttctac

SEQ ID NO: 4765058 - DNA, 25 bp, Homo sapien
tcactgtgattttaagagaattttc

SEQ ID NO: 4765059 - DNA, 25 bp, Homo sapien
tttcactgtgattttaagagaattt

SEQ ID NO: 4765060 - DNA, 25 bp, Homo sapien
cactgtgattttaagagaattttct

SEQ ID NO: 4765061 - DNA, 25 bp, Homo sapien
cagtctattgaagaatcctccatca

SEQ ID NO: 4765062 - DNA, 25 bp, Homo sapien
tgttcatgagctgtacaattatctg

SEQ ID NO: 4765063 - DNA, 25 bp, Homo sapien
ccattatattctgtaagctgttctc

SEQ ID NO: 4765064 - DNA, 25 bp, Homo sapien
catcatcttccagtctattgaagaa

SEQ ID NO: 4765065 - DNA, 25 bp, Homo sapien
tcagctaaaggtagacatgtggagc

SEQ ID NO: 4765066 - DNA, 25 bp, Homo sapien
taaaaagcaggcaggctatttctcc

SEQ ID NO: 4765067 - DNA, 25 bp, Homo sapien
tatttgtccacgctcataatcagct

SEQ ID NO: 4765068 - DNA, 25 bp, Homo sapien
tttacataagtagtacacggacatg

SEQ ID NO: 4765069 - DNA, 25 bp, Homo sapien
ttagtgatactgtgagaggtctgtc

SEQ ID NO: 4765070 - DNA, 25 bp, Homo sapien
gatactgtgagaggtctgtcttttc

SEQ ID NO: 4765071 - DNA, 25 bp, Homo sapien
tggactgagttgaagtattttcagc

SEQ ID NO: 4765072 - DNA, 25 bp, Homo sapien
tttttattcataactttggactgag

SEQ ID NO: 4765073 - DNA, 25 bp, Homo sapien
tagtaacaatgccttctcaagatct

SEQ ID NO: 4765074 - DNA, 25 bp, Homo sapien
tcttcatattctagtttacttagta

SEQ ID NO: 4765075 - DNA, 25 bp, Homo sapien
gtttacttagtaacaatgccttctc

SEQ ID NO: 4765076 - DNA, 25 bp, Homo sapien
tctagtttacttagtaacaatgcct

SEQ ID NO: 4765077 - DNA, 25 bp, Homo sapien
aatagatgtcaaaggcaacattcag

SEQ ID NO: 4765078 - DNA, 25 bp, Homo sapien
gacagtatcattacatcacatgagc

SEQ ID NO: 4765079 - DNA, 25 bp, Homo sapien
gattctccaaagttatctaaccatg

SEQ ID NO: 4765080 - DNA, 25 bp, Homo sapien
tctaaccatgccaaactaggaagcc

SEQ ID NO: 4765081 - DNA, 25 bp, Homo sapien
atgtgtccaagatggagtacttcag

SEQ ID NO: 4765082 - DNA, 25 bp, Homo sapien
tccaagatggagtacttcagatccc

SEQ ID NO: 4765083 - DNA, 25 bp, Homo sapien
agatggagtacttcagatccccttc

SEQ ID NO: 4765084 - DNA, 25 bp, Homo sapien
tgtccaagatggagtacttcagatc

SEQ ID NO: 4765085 - DNA, 25 bp, Homo sapien
tattgtgcacatactaacagacatg

SEQ ID NO: 4765086 - DNA, 25 bp, Homo sapien
accagtgacgtgtagagtttgaatc

SEQ ID NO: 4765087 - DNA, 25 bp, Homo sapien
cagacatgtcacttcagagtgagaa

SEQ ID NO: 4765088 - DNA, 25 bp, Homo sapien
tttggtctgttaatcactgaaaccc

SEQ ID NO: 4765089 - DNA, 25 bp, Homo sapien
gcctgtaaaatcccacctccactaa

SEQ ID NO: 4765090 - DNA, 25 bp, Homo sapien
tggcctgtaaaatcccacctccact

SEQ ID NO: 4765091 - DNA, 25 bp, Homo sapien
ggcctgtaaaatcccacctccacta

SEQ ID NO: 4765092 - DNA, 25 bp, Homo sapien
tgtataggcaaccagttttctcctg

SEQ ID NO: 4765093 - DNA, 25 bp, Homo sapien
gctgcactgggcctaagtgtgtttc

SEQ ID NO: 4765094 - DNA, 25 bp, Homo sapien
attacaggaatgacctgctgcactg

SEQ ID NO: 4765095 - DNA, 25 bp, Homo sapien
aagtagccagcctgattcttcatcc

SEQ ID NO: 4765096 - DNA, 25 bp, Homo sapien
tctcgtgaatccttctgtactgggt

SEQ ID NO: 4765097 - DNA, 25 bp, Homo sapien
tacaaacagcatgggaggatttctg

SEQ ID NO: 4765098 - DNA, 25 bp, Homo sapien
tactgggtttgacaatggaagatca

SEQ ID NO: 4765099 - DNA, 25 bp, Homo sapien
catgttgagcgttacaaacagcatg

SEQ ID NO: 4765100 - DNA, 25 bp, Homo sapien
tttgtagttgacttgcttcctaaag

SEQ ID NO: 4765101 - DNA, 25 bp, Homo sapien
catttgtagttgacttgcttcctaa

SEQ ID NO: 4765102 - DNA, 25 bp, Homo sapien
atttgtagttgacttgcttcctaaa

SEQ ID NO: 4765103 - DNA, 25 bp, Homo sapien
tttctcatttgtagttgacttgctt

SEQ ID NO: 4765104 - DNA, 25 bp, Homo sapien
cagaatcagagccactgccactatc

SEQ ID NO: 4765105 - DNA, 25 bp, Homo sapien
ggttcagaatcagagccactgccac

SEQ ID NO: 4765106 - DNA, 25 bp, Homo sapien
ttcagaatcagagccactgccacta

SEQ ID NO: 4765107 - DNA, 25 bp, Homo sapien
aggttcagaatcagagccactgcca

SEQ ID NO: 4765108 - DNA, 25 bp, Homo sapien
taacagggcaaaacgagaagcggtg

SEQ ID NO: 4765109 - DNA, 25 bp, Homo sapien
ttgtaacagggcaaaacgagaagcg

SEQ ID NO: 4765110 - DNA, 25 bp, Homo sapien
cagaactaagtactgctgaggccat

SEQ ID NO: 4765111 - DNA, 25 bp, Homo sapien
agaagcggtggtgggaacagaacta

SEQ ID NO: 4765112 - DNA, 25 bp, Homo sapien
taaaatacttctgtcaagaataatt

SEQ ID NO: 4765113 - DNA, 25 bp, Homo sapien
tttaaaatacttctgtcaagaataa

SEQ ID NO: 4765114 - DNA, 25 bp, Homo sapien
tcttttaaaatacttctgtcaagaa

SEQ ID NO: 4765115 - DNA, 25 bp, Homo sapien
cttttaaaatacttctgtcaagaat

SEQ ID NO: 4765116 - DNA, 25 bp, Homo sapien
gaagtgcacaatagacaatcctcaa

SEQ ID NO: 4765117 - DNA, 25 bp, Homo sapien
tcccataacgcagatgtgcatgagc

SEQ ID NO: 4765118 - DNA, 25 bp, Homo sapien
aagtgttgatttaagccagccgggc

SEQ ID NO: 4765119 - DNA, 25 bp, Homo sapien
caaccaattttgtctaggaagcata

SEQ ID NO: 4765120 - DNA, 25 bp, Homo sapien
cctggccaacaaggcgaaacaccgt

SEQ ID NO: 4765121 - DNA, 25 bp, Homo sapien
ttctcatagttaagtactgagatcc

SEQ ID NO: 4765122 - DNA, 25 bp, Homo sapien
tctcatagttaagtactgagatccc

SEQ ID NO: 4765123 - DNA, 25 bp, Homo sapien
gatgctccgaaacttattcgcaaag

SEQ ID NO: 4765124 - DNA, 25 bp, Homo sapien
cataggctgttaaccgatgctccga

SEQ ID NO: 4765125 - DNA, 25 bp, Homo sapien
ttgcgctgggcgaaacctaactcgg

SEQ ID NO: 4765126 - DNA, 25 bp, Homo sapien
caaatttcacccataggctgttaac

SEQ ID NO: 4765127 - DNA, 25 bp, Homo sapien
cactcgagcggcccccacggggtct

SEQ ID NO: 4765128 - DNA, 25 bp, Homo sapien
ctgtcactcgagcggcccccacggg

SEQ ID NO: 4765129 - DNA, 25 bp, Homo sapien
tgtcactcgagcggcccccacgggg

SEQ ID NO: 4765130 - DNA, 25 bp, Homo sapien
ctcgagcggcccccacggggtctcg

SEQ ID NO: 4765131 - DNA, 25 bp, Homo sapien
gtctgggtcaagtgtcggcagagct

SEQ ID NO: 4765132 - DNA, 25 bp, Homo sapien
gggtcgcggtcggcccacaggctgg

SEQ ID NO: 4765133 - DNA, 25 bp, Homo sapien
gccgcactgggcgttgggactggtc

SEQ ID NO: 4765134 - DNA, 25 bp, Homo sapien
caggctgggcactaacgggtcccgg

SEQ ID NO: 4765135 - DNA, 25 bp, Homo sapien
gggttcgacctccaggcaatgaagt

SEQ ID NO: 4765136 - DNA, 25 bp, Homo sapien
cgacctccaggcaatgaagtaggga

SEQ ID NO: 4765137 - DNA, 25 bp, Homo sapien
cagtgggacctggtagcttgggttc

SEQ ID NO: 4765138 - DNA, 25 bp, Homo sapien
tgcaacttggggttcgacctccagg

SEQ ID NO: 4765139 - DNA, 25 bp, Homo sapien
caagattccagtagcaagagtgcat

SEQ ID NO: 4765140 - DNA, 25 bp, Homo sapien
caagtcaagattccagtagcaagag

SEQ ID NO: 4765141 - DNA, 25 bp, Homo sapien
gtcaagattccagtagcaagagtgc

SEQ ID NO: 4765142 - DNA, 25 bp, Homo sapien
ctgcaagtcaagattccagtagcaa

SEQ ID NO: 4765143 - DNA, 25 bp, Homo sapien
tgagggatagggcttttagttttca

SEQ ID NO: 4765144 - DNA, 25 bp, Homo sapien
aatgtcactggactgtaagttcctt

SEQ ID NO: 4765145 - DNA, 25 bp, Homo sapien
taatgtcactggactgtaagttcct

SEQ ID NO: 4765146 - DNA, 25 bp, Homo sapien
actctctccataagtaatgtcactg

SEQ ID NO: 4765147 - DNA, 25 bp, Homo sapien
tatttccacaggtaaaacaagtatg

SEQ ID NO: 4765148 - DNA, 25 bp, Homo sapien
tagaaatcaactcacaattgcatag

SEQ ID NO: 4765149 - DNA, 25 bp, Homo sapien
tattcctaaataacgcatagcacat

SEQ ID NO: 4765150 - DNA, 25 bp, Homo sapien
aaatattgctgtgcttgctaagggc

SEQ ID NO: 4765151 - DNA, 25 bp, Homo sapien
tataatggtaaaaggtcagtgcctt

SEQ ID NO: 4765152 - DNA, 25 bp, Homo sapien
tcaacaaagcacagcaataatatat

SEQ ID NO: 4765153 - DNA, 25 bp, Homo sapien
aaggtcagtgccttcaacaaagcac

SEQ ID NO: 4765154 - DNA, 25 bp, Homo sapien
gtataacctatatctatatacaagt

SEQ ID NO: 4765155 - DNA, 25 bp, Homo sapien
atagttatattgtaacatactttta

SEQ ID NO: 4765156 - DNA, 25 bp, Homo sapien
tataataatacatacttgatagata

SEQ ID NO: 4765157 - DNA, 25 bp, Homo sapien
taatatagttatattgtaacatact

SEQ ID NO: 4765158 - DNA, 25 bp, Homo sapien
caataatatagttatattgtaacat

SEQ ID NO: 4765159 - DNA, 25 bp, Homo sapien
ttctgaggaaagaggtagtgaactt

SEQ ID NO: 4765160 - DNA, 25 bp, Homo sapien
aatatatatagaagatgtacacatc

SEQ ID NO: 4765161 - DNA, 25 bp, Homo sapien
aatcttcaaatatgcctggaaaaac

SEQ ID NO: 4765162 - DNA, 25 bp, Homo sapien
tgtacacatctatagcatataaaag

SEQ ID NO: 4765163 - DNA, 25 bp, Homo sapien
agcagccattgatccaatgccaact

SEQ ID NO: 4765164 - DNA, 25 bp, Homo sapien
cagcagccattgatccaatgccaac

SEQ ID NO: 4765165 - DNA, 25 bp, Homo sapien
gcagccattgatccaatgccaactc

SEQ ID NO: 4765166 - DNA, 25 bp, Homo sapien
tcagcagccattgatccaatgccaa

SEQ ID NO: 4765167 - DNA, 25 bp, Homo sapien
caaggcggaaatttgacgtaattct

SEQ ID NO: 4765168 - DNA, 25 bp, Homo sapien
tcttttcgacacagttttacaggtg

SEQ ID NO: 4765169 - DNA, 25 bp, Homo sapien
aggtgtgacaccatgaagtcgtccc

SEQ ID NO: 4765170 - DNA, 25 bp, Homo sapien
aacgtcgcaatgatagttccaaggc

SEQ ID NO: 4765171 - DNA, 25 bp, Homo sapien
tgacagtcgactgtgagattttgta

SEQ ID NO: 4765172 - DNA, 25 bp, Homo sapien
aatttgggatgacagtcgactgtga

SEQ ID NO: 4765173 - DNA, 25 bp, Homo sapien
tgggatgacagtcgactgtgagatt

SEQ ID NO: 4765174 - DNA, 25 bp, Homo sapien
tgaatttgggatgacagtcgactgt

SEQ ID NO: 4765175 - DNA, 25 bp, Homo sapien
tcccagagcttttgaggatttggct

SEQ ID NO: 4765176 - DNA, 25 bp, Homo sapien
cttaatttcatactttcaggtctgg

SEQ ID NO: 4765177 - DNA, 25 bp, Homo sapien
taaagaactatgaattggaggtaat

SEQ ID NO: 4765178 - DNA, 25 bp, Homo sapien
ggaggtaattctgggatatcttccc

SEQ ID NO: 4765179 - DNA, 25 bp, Homo sapien
ccttctggcttcaggactccatctc

SEQ ID NO: 4765180 - DNA, 25 bp, Homo sapien
tctggcttcaggactccatctccag

SEQ ID NO: 4765181 - DNA, 25 bp, Homo sapien
ctccttctggcttcaggactccatc

SEQ ID NO: 4765182 - DNA, 25 bp, Homo sapien
tcctccttctggcttcaggactcca

SEQ ID NO: 4765183 - DNA, 25 bp, Homo sapien
cattttcagcatatatcacttcatt

SEQ ID NO: 4765184 - DNA, 25 bp, Homo sapien
cataaaccatacttaaattatcgaa

SEQ ID NO: 4765185 - DNA, 25 bp, Homo sapien
ggtcttcttacatcttgtgtgccca

SEQ ID NO: 4765186 - DNA, 25 bp, Homo sapien
tatcgaagttattagaattattaga

SEQ ID NO: 4765187 - DNA, 25 bp, Homo sapien
taggaaaacaacagctatgttagat

SEQ ID NO: 4765188 - DNA, 25 bp, Homo sapien
tcctaaataacccagtcaattggta

SEQ ID NO: 4765189 - DNA, 25 bp, Homo sapien
taaggtctacaagcccctggcacat

SEQ ID NO: 4765190 - DNA, 25 bp, Homo sapien
cttctcatgtggttctactttagac

SEQ ID NO: 4765191 - DNA, 25 bp, Homo sapien
accaaatgctagagaaacagtgtta

SEQ ID NO: 4765192 - DNA, 25 bp, Homo sapien
caaagctggcatgacttcaccaaat

SEQ ID NO: 4765193 - DNA, 25 bp, Homo sapien
ctagagaaacagtgttaagagtgac

SEQ ID NO: 4765194 - DNA, 25 bp, Homo sapien
aaagctggcatgacttcaccaaatg

SEQ ID NO: 4765195 - DNA, 25 bp, Homo sapien
tcttcttatgatcccggctggtttt

SEQ ID NO: 4765196 - DNA, 25 bp, Homo sapien
agttgccgccgaattgcttccccta

SEQ ID NO: 4765197 - DNA, 25 bp, Homo sapien
agtttcttcttatgatcccggctgg

SEQ ID NO: 4765198 - DNA, 25 bp, Homo sapien
tgctagttgccgccgaattgcttcc

SEQ ID NO: 4765199 - DNA, 25 bp, Homo sapien
ccgtgcccggctgcaaaattatgtt

SEQ ID NO: 4765200 - DNA, 25 bp, Homo sapien
attatgttttaacataggccctgga

SEQ ID NO: 4765201 - DNA, 25 bp, Homo sapien
tgcccggctgcaaaattatgtttta

SEQ ID NO: 4765202 - DNA, 25 bp, Homo sapien
gcgtgatatgctcggctcactgtaa

SEQ ID NO: 4765203 - DNA, 25 bp, Homo sapien
tccttttgctggagggtcagtctcc

SEQ ID NO: 4765204 - DNA, 25 bp, Homo sapien
gtctccggtcacactgcaattttag

SEQ ID NO: 4765205 - DNA, 25 bp, Homo sapien
taattcacgaaccatattatcccgt

SEQ ID NO: 4765206 - DNA, 25 bp, Homo sapien
tgttgtttccgttcagcttctcgca

SEQ ID NO: 4765207 - DNA, 25 bp, Homo sapien
agacatttgcttcaccacgagagag

SEQ ID NO: 4765208 - DNA, 25 bp, Homo sapien
gacatttgcttcaccacgagagagg

SEQ ID NO: 4765209 - DNA, 25 bp, Homo sapien
aatgatgctctaagtgacttctggc

SEQ ID NO: 4765210 - DNA, 25 bp, Homo sapien
ggttatggaatgatgctctaagtga

SEQ ID NO: 4765211 - DNA, 25 bp, Homo sapien
tgtggcagactatcttgtccatctg

SEQ ID NO: 4765212 - DNA, 25 bp, Homo sapien
tgaactcaaaagtcttgggcccaag

SEQ ID NO: 4765213 - DNA, 25 bp, Homo sapien
tatacccatacctattgtggaggcc

SEQ ID NO: 4765214 - DNA, 25 bp, Homo sapien
accttgataagttcctgtggcagac

SEQ ID NO: 4765215 - DNA, 25 bp, Homo sapien
caatttaataccttgggaggacagc

SEQ ID NO: 4765216 - DNA, 25 bp, Homo sapien
gtcaccggcaggcagaattccttaa

SEQ ID NO: 4765217 - DNA, 25 bp, Homo sapien
tagagcttagtaatagtcaccggca

SEQ ID NO: 4765218 - DNA, 25 bp, Homo sapien
taaaggtaccactgccaactgactg

SEQ ID NO: 4765219 - DNA, 25 bp, Homo sapien
catacagcacctccagttccaaaga

SEQ ID NO: 4765220 - DNA, 25 bp, Homo sapien
cagcacctccagttccaaagaatac

SEQ ID NO: 4765221 - DNA, 25 bp, Homo sapien
tacagcacctccagttccaaagaat

SEQ ID NO: 4765222 - DNA, 25 bp, Homo sapien
agcacctccagttccaaagaatact

SEQ ID NO: 4765223 - DNA, 25 bp, Homo sapien
ttcaggtgataacactctaccattt

SEQ ID NO: 4765224 - DNA, 25 bp, Homo sapien
tttctttctggaggacttcaacttg

SEQ ID NO: 4765225 - DNA, 25 bp, Homo sapien
ttctcctcagctgtactggtctgga

SEQ ID NO: 4765226 - DNA, 25 bp, Homo sapien
gtgataacactctaccatttttaag

SEQ ID NO: 4765227 - DNA, 25 bp, Homo sapien
tcttctcctgtaacagagcctcctt

SEQ ID NO: 4765228 - DNA, 25 bp, Homo sapien
gttcagaactttctctacttcttca

SEQ ID NO: 4765229 - DNA, 25 bp, Homo sapien
caggtgactcttctcctgtaacaga

SEQ ID NO: 4765230 - DNA, 25 bp, Homo sapien
ttggttcagaactttctctacttct

SEQ ID NO: 4765231 - DNA, 25 bp, Homo sapien
ctcagctttcggttttagaccttct

SEQ ID NO: 4765232 - DNA, 25 bp, Homo sapien
ctggagatggtctatacttccaaac

SEQ ID NO: 4765233 - DNA, 25 bp, Homo sapien
gatggtctatacttccaaacgaacc

SEQ ID NO: 4765234 - DNA, 25 bp, Homo sapien
ttttcaagttacatgcatcaaggtc

SEQ ID NO: 4765235 - DNA, 25 bp, Homo sapien
ggatagatacttcacaagccaactg

SEQ ID NO: 4765236 - DNA, 25 bp, Homo sapien
ctttaaagtgaataaggacagcagt

SEQ ID NO: 4765237 - DNA, 25 bp, Homo sapien
gaagaccatggattcgttagctctg

SEQ ID NO: 4765238 - DNA, 25 bp, Homo sapien
tagctctgagccgtttaacatttca

SEQ ID NO: 4765239 - DNA, 25 bp, Homo sapien
tcattttggattgacagtgatgcca

SEQ ID NO: 4765240 - DNA, 25 bp, Homo sapien
cttaattactgcatccagttgcttc

SEQ ID NO: 4765241 - DNA, 25 bp, Homo sapien
gtgatgccagtttcttactatcttg

SEQ ID NO: 4765242 - DNA, 25 bp, Homo sapien
tctttgtagctgtatcttttgatat

SEQ ID NO: 4765243 - DNA, 25 bp, Homo sapien
aactctcagctttgcagcatccatc

SEQ ID NO: 4765244 - DNA, 25 bp, Homo sapien
gcagcatccatctttttacgaaact

SEQ ID NO: 4765245 - DNA, 25 bp, Homo sapien
ccatctttttacgaaactctttctg

SEQ ID NO: 4765246 - DNA, 25 bp, Homo sapien
catccatctttttacgaaactcttt

SEQ ID NO: 4765247 - DNA, 25 bp, Homo sapien
tactgcttgcttacagacttggcat

SEQ ID NO: 4765248 - DNA, 25 bp, Homo sapien
agttcgacttttgcctgttctgcat

SEQ ID NO: 4765249 - DNA, 25 bp, Homo sapien
tgttctgcatcatgctctagctttg

SEQ ID NO: 4765250 - DNA, 25 bp, Homo sapien
gcatcatgctctagctttgttactt

SEQ ID NO: 4765251 - DNA, 25 bp, Homo sapien
ttgtagcctggtatacccaacgtgg

SEQ ID NO: 4765252 - DNA, 25 bp, Homo sapien
gctcattagaaccaagggcaatttg

SEQ ID NO: 4765253 - DNA, 25 bp, Homo sapien
tcttaggagtatctaggagctgatc

SEQ ID NO: 4765254 - DNA, 25 bp, Homo sapien
aacaccagttgacccctcttaggag

SEQ ID NO: 4765255 - DNA, 25 bp, Homo sapien
tctcctggagacaatcaatctttaa

SEQ ID NO: 4765256 - DNA, 25 bp, Homo sapien
ttgactctcctggagacaatcaatc

SEQ ID NO: 4765257 - DNA, 25 bp, Homo sapien
taagtatgcgttctgaattctttaa

SEQ ID NO: 4765258 - DNA, 25 bp, Homo sapien
ttcagtaagtatgcgttctgaattc

SEQ ID NO: 4765259 - DNA, 25 bp, Homo sapien
ctggcttctgaatccatgaacgact

SEQ ID NO: 4765260 - DNA, 25 bp, Homo sapien
tggcttctgaatccatgaacgactt

SEQ ID NO: 4765261 - DNA, 25 bp, Homo sapien
atcctgagtatcactcaattcaaca

SEQ ID NO: 4765262 - DNA, 25 bp, Homo sapien
ttgttcttctatgtgacccaacagc

SEQ ID NO: 4765263 - DNA, 25 bp, Homo sapien
gccccaaatgagtatcaaatggtac

SEQ ID NO: 4765264 - DNA, 25 bp, Homo sapien
tctttagctgaagaagtcactgaca

SEQ ID NO: 4765265 - DNA, 25 bp, Homo sapien
tcctggaatcttgtcttgatgggat

SEQ ID NO: 4765266 - DNA, 25 bp, Homo sapien
ggatataaatataatgccccaaatg

SEQ ID NO: 4765267 - DNA, 25 bp, Homo sapien
ccatcatctgcacttgattcttcag

SEQ ID NO: 4765268 - DNA, 25 bp, Homo sapien
ttcctgtaccatcatctgcacttga

SEQ ID NO: 4765269 - DNA, 25 bp, Homo sapien
catctgcacttgattcttcagttcc

SEQ ID NO: 4765270 - DNA, 25 bp, Homo sapien
ctattcactttttgcgcttctttca

SEQ ID NO: 4765271 - DNA, 25 bp, Homo sapien
tttcagtctctaaattgacaaccag

SEQ ID NO: 4765272 - DNA, 25 bp, Homo sapien
aatcactcttagaatttacttgccc

SEQ ID NO: 4765273 - DNA, 25 bp, Homo sapien
agaacaaagtaagagaggcaagtgg

SEQ ID NO: 4765274 - DNA, 25 bp, Homo sapien
caagtgggattccatatataaatca

SEQ ID NO: 4765275 - DNA, 25 bp, Homo sapien
tatgtgaactcttcctgcgtgggtc

SEQ ID NO: 4765276 - DNA, 25 bp, Homo sapien
gacagtatcttttaggtcaaccagg

SEQ ID NO: 4765277 - DNA, 25 bp, Homo sapien
cagaagccgggtaattttagcatcc

SEQ ID NO: 4765278 - DNA, 25 bp, Homo sapien
cgtgggtccccaagagcgcttatta

SEQ ID NO: 4765279 - DNA, 25 bp, Homo sapien
caaaagactcatcacttcacctgca

SEQ ID NO: 4765280 - DNA, 25 bp, Homo sapien
aaagactcatcacttcacctgcact

SEQ ID NO: 4765281 - DNA, 25 bp, Homo sapien
tgcactctccacatggcattccttg

SEQ ID NO: 4765282 - DNA, 25 bp, Homo sapien
tccaaaagactcatcacttcacctg

SEQ ID NO: 4765283 - DNA, 25 bp, Homo sapien
attaaagtcaatgctaggatgttca

SEQ ID NO: 4765284 - DNA, 25 bp, Homo sapien
gatctcttaggtcttccttgtacac

SEQ ID NO: 4765285 - DNA, 25 bp, Homo sapien
tcaatgctaggatgttcagagatgc

SEQ ID NO: 4765286 - DNA, 25 bp, Homo sapien
aatgatacccttttggccctccaca

SEQ ID NO: 4765287 - DNA, 25 bp, Homo sapien
tgaagttctgataggtgacataaca

SEQ ID NO: 4765288 - DNA, 25 bp, Homo sapien
gataggtgacataacatgctaagag

SEQ ID NO: 4765289 - DNA, 25 bp, Homo sapien
caaataggcgtaggagggactcaaa

SEQ ID NO: 4765290 - DNA, 25 bp, Homo sapien
cagatacttctacatcggtgttcac

SEQ ID NO: 4765291 - DNA, 25 bp, Homo sapien
cacccggcccacttttatgtgtttg

SEQ ID NO: 4765292 - DNA, 25 bp, Homo sapien
caatcttaacagaggacttggctgt

SEQ ID NO: 4765293 - DNA, 25 bp, Homo sapien
tgagagccactattcatacagagaa

SEQ ID NO: 4765294 - DNA, 25 bp, Homo sapien
tgattgcgggactcttaatatttac

SEQ ID NO: 4765295 - DNA, 25 bp, Homo sapien
gatgcatatgtgcactactcaaaag

SEQ ID NO: 4765296 - DNA, 25 bp, Homo sapien
ggctgtttggaataactctcacaca

SEQ ID NO: 4765297 - DNA, 25 bp, Homo sapien
gccctcaatgagtgacaacactagg

SEQ ID NO: 4765298 - DNA, 25 bp, Homo sapien
gtcttcccagatccagtttgtccat

SEQ ID NO: 4765299 - DNA, 25 bp, Homo sapien
ccaatgataacttgctggctgtttg

SEQ ID NO: 4765300 - DNA, 25 bp, Homo sapien
ttccatcttatgtaagatctggatt

SEQ ID NO: 4765301 - DNA, 25 bp, Homo sapien
tccatcttatgtaagatctggattc

SEQ ID NO: 4765302 - DNA, 25 bp, Homo sapien
ggcaacttagattttactaaataga

SEQ ID NO: 4765303 - DNA, 25 bp, Homo sapien
taatgttcagtatctagtgtgagag

SEQ ID NO: 4765304 - DNA, 25 bp, Homo sapien
gatgtgtaaaacatatagtctgaaa

SEQ ID NO: 4765305 - DNA, 25 bp, Homo sapien
tcctgtggcagaacactcttaaaaa

SEQ ID NO: 4765306 - DNA, 25 bp, Homo sapien
aaaatactgttagaagaaagcacaa

SEQ ID NO: 4765307 - DNA, 25 bp, Homo sapien
catctcatgtttatgaattgaaaga

SEQ ID NO: 4765308 - DNA, 25 bp, Homo sapien
atatatctaacaaggaacttgcaac

SEQ ID NO: 4765309 - DNA, 25 bp, Homo sapien
cactgcactataacgtggacaacac

SEQ ID NO: 4765310 - DNA, 25 bp, Homo sapien
gacaacactataatgtggacagcag

SEQ ID NO: 4765311 - DNA, 25 bp, Homo sapien
taaataggcaaagcatccgaaaagg

SEQ ID NO: 4765312 - DNA, 25 bp, Homo sapien
ccctgtcggcgagcgctggactcct

SEQ ID NO: 4765313 - DNA, 25 bp, Homo sapien
gcccctgtcggcgagcgctggactc

SEQ ID NO: 4765314 - DNA, 25 bp, Homo sapien
cccctgtcggcgagcgctggactcc

SEQ ID NO: 4765315 - DNA, 25 bp, Homo sapien
aggcccctgtcggcgagcgctggac

SEQ ID NO: 4765316 - DNA, 25 bp, Homo sapien
gaactgcatacaccatagtatatgg

SEQ ID NO: 4765317 - DNA, 25 bp, Homo sapien
tttgtccacctaaaaccagcatgac

SEQ ID NO: 4765318 - DNA, 25 bp, Homo sapien
ctgtttggcaactgactgagacttc

SEQ ID NO: 4765319 - DNA, 25 bp, Homo sapien
gagattatcccatcccagtgggaca

SEQ ID NO: 4765320 - DNA, 25 bp, Homo sapien
tttccgtcaactacatgtccacagg

SEQ ID NO: 4765321 - DNA, 25 bp, Homo sapien
taaagttccttcacgatttccgtca

SEQ ID NO: 4765322 - DNA, 25 bp, Homo sapien
ggcaatcaatttcctataacctcga

SEQ ID NO: 4765323 - DNA, 25 bp, Homo sapien
tcaaaactaaacaggcagacaaatg

SEQ ID NO: 4765324 - DNA, 25 bp, Homo sapien
tatgcaacgtatgcgatgaaacgga

SEQ ID NO: 4765325 - DNA, 25 bp, Homo sapien
agtcccataagtaataatccagaag

SEQ ID NO: 4765326 - DNA, 25 bp, Homo sapien
gatcagctcaacacaccaaagcgag

SEQ ID NO: 4765327 - DNA, 25 bp, Homo sapien
tcatatcttccctatggtcatgggc

SEQ ID NO: 4765328 - DNA, 25 bp, Homo sapien
tccaagatgagcaagaacctgaggt

SEQ ID NO: 4765329 - DNA, 25 bp, Homo sapien
cagtaggtcatcagagtatttcagg

SEQ ID NO: 4765330 - DNA, 25 bp, Homo sapien
tccaatacactccacgtatctgcta

SEQ ID NO: 4765331 - DNA, 25 bp, Homo sapien
tatctgctacaaggatttgggctcg

SEQ ID NO: 4765332 - DNA, 25 bp, Homo sapien
agcctgtgagggtccaacaaaatga

SEQ ID NO: 4765333 - DNA, 25 bp, Homo sapien
caaaatccgggtgcagcctgtgagg

SEQ ID NO: 4765334 - DNA, 25 bp, Homo sapien
aacaaaatccgggtgcagcctgtga

SEQ ID NO: 4765335 - DNA, 25 bp, Homo sapien
caacaaaatgatcatcatttgttca

SEQ ID NO: 4765336 - DNA, 25 bp, Homo sapien
ggaaaactttcaaccaccaggtgca

SEQ ID NO: 4765337 - DNA, 25 bp, Homo sapien
gaaaactttcaaccaccaggtgcat

SEQ ID NO: 4765338 - DNA, 25 bp, Homo sapien
taacttctgcgcactattctcactt

SEQ ID NO: 4765339 - DNA, 25 bp, Homo sapien
tttcattgagaatccgatgcctctc

SEQ ID NO: 4765340 - DNA, 25 bp, Homo sapien
gaatccgatgcctctcttctactaa

SEQ ID NO: 4765341 - DNA, 25 bp, Homo sapien
tcactttctcggacgcagttgagaa

SEQ ID NO: 4765342 - DNA, 25 bp, Homo sapien
tctgtgtcagaacgaagtatattcc

SEQ ID NO: 4765343 - DNA, 25 bp, Homo sapien
agtatattccgaacctgatccaggg

SEQ ID NO: 4765344 - DNA, 25 bp, Homo sapien
tacgaggcactagttattggtatcc

SEQ ID NO: 4765345 - DNA, 25 bp, Homo sapien
tcactgtcgcgtagtacgaggcact

SEQ ID NO: 4765346 - DNA, 25 bp, Homo sapien
cagggaccagtacccactgtatgtt

SEQ ID NO: 4765347 - DNA, 25 bp, Homo sapien
acggcggcgcacagggaccagtacc

SEQ ID NO: 4765348 - DNA, 25 bp, Homo sapien
cttcgtcgagggctctgttgacggc

SEQ ID NO: 4765349 - DNA, 25 bp, Homo sapien
cactgtatgttttccctctgtacct

SEQ ID NO: 4765350 - DNA, 25 bp, Homo sapien
gagaagttgagcgtgtctgtcacga

SEQ ID NO: 4765351 - DNA, 25 bp, Homo sapien
gtcacgaacacccagttgaccgcgg

SEQ ID NO: 4765352 - DNA, 25 bp, Homo sapien
cgtacgcctccgctgtcaataaaca

SEQ ID NO: 4765353 - DNA, 25 bp, Homo sapien
ctgctccgaccaaaaggagaagttg

SEQ ID NO: 4765354 - DNA, 25 bp, Homo sapien
cgcggcgttgccctgattaggaaac

SEQ ID NO: 4765355 - DNA, 25 bp, Homo sapien
ccagggagtggcaccgagaacttag

SEQ ID NO: 4765356 - DNA, 25 bp, Homo sapien
tgcgctactacgaaccgcgcgatca

SEQ ID NO: 4765357 - DNA, 25 bp, Homo sapien
tgcagccaaggtaaaggttctctcc

SEQ ID NO: 4765358 - DNA, 25 bp, Homo sapien
ctggaaactgctaagggtccggcgt

SEQ ID NO: 4765359 - DNA, 25 bp, Homo sapien
ggaggtgcatggctttgccatgttt

SEQ ID NO: 4765360 - DNA, 25 bp, Homo sapien
ctccgcttccggttccaaaggtctg

SEQ ID NO: 4765361 - DNA, 25 bp, Homo sapien
gcgttcaccggccgtgagttgccca

SEQ ID NO: 4765362 - DNA, 25 bp, Homo sapien
ttggcctcgaagagcattatggccg

SEQ ID NO: 4765363 - DNA, 25 bp, Homo sapien
agcctgagcaagacgccttcggcaa

SEQ ID NO: 4765364 - DNA, 25 bp, Homo sapien
ccgcttcggacaggtgggactcgaa

SEQ ID NO: 4765365 - DNA, 25 bp, Homo sapien
cattatggccgtagatctgggtgct

SEQ ID NO: 4765366 - DNA, 25 bp, Homo sapien
gaggctagtgccttgtttttgtgct

SEQ ID NO: 4765367 - DNA, 25 bp, Homo sapien
tttgcagggtttcaaattagaagtg

SEQ ID NO: 4765368 - DNA, 25 bp, Homo sapien
cagggtttcaaattagaagtgaggc

SEQ ID NO: 4765369 - DNA, 25 bp, Homo sapien
agtgaggctagtgccttgtttttgt

SEQ ID NO: 4765370 - DNA, 25 bp, Homo sapien
taagtcagcattatacaccagtaac

SEQ ID NO: 4765371 - DNA, 25 bp, Homo sapien
catttaccaatcaatagcagtggca

SEQ ID NO: 4765372 - DNA, 25 bp, Homo sapien
tacaggtaacagataaaagctttgg

SEQ ID NO: 4765373 - DNA, 25 bp, Homo sapien
cagtggcaatgcaaaaggcccctct

SEQ ID NO: 4765374 - DNA, 25 bp, Homo sapien
ttttttcttatagtcagccagagct

SEQ ID NO: 4765375 - DNA, 25 bp, Homo sapien
tggttcccggctcatatttctgaag

SEQ ID NO: 4765376 - DNA, 25 bp, Homo sapien
tattaacctccagctgtccagaaag

SEQ ID NO: 4765377 - DNA, 25 bp, Homo sapien
taactgcagagtatggttcccggct

SEQ ID NO: 4765378 - DNA, 25 bp, Homo sapien
tgtgtgcccgatttgaacaagggtt

SEQ ID NO: 4765379 - DNA, 25 bp, Homo sapien
caagggttgattgacacctgtaaaa

SEQ ID NO: 4765380 - DNA, 25 bp, Homo sapien
caatcaacccttgttcaaatcgggc

SEQ ID NO: 4765381 - DNA, 25 bp, Homo sapien
cataggtaatgaggaaagctctggc

SEQ ID NO: 4765382 - DNA, 25 bp, Homo sapien
aaaaaattggatgactaggctctca

SEQ ID NO: 4765383 - DNA, 25 bp, Homo sapien
tagtacttcagaaatatgagccggg

SEQ ID NO: 4765384 - DNA, 25 bp, Homo sapien
tatgagccgggaaccatactctgca

SEQ ID NO: 4765385 - DNA, 25 bp, Homo sapien
tctggacagctggaggttaataagt

SEQ ID NO: 4765386 - DNA, 25 bp, Homo sapien
tatgagtatataccagaattctgat

SEQ ID NO: 4765387 - DNA, 25 bp, Homo sapien
tgctctagtgtcttattagttaaac

SEQ ID NO: 4765388 - DNA, 25 bp, Homo sapien
caagttgagtaatggtatgagtata

SEQ ID NO: 4765389 - DNA, 25 bp, Homo sapien
tttctcacctatagacttaaactgt

SEQ ID NO: 4765390 - DNA, 25 bp, Homo sapien
ttctgattggcagcaagttttatta

SEQ ID NO: 4765391 - DNA, 25 bp, Homo sapien
cagaataacacttggttatggaagt

SEQ ID NO: 4765392 - DNA, 25 bp, Homo sapien
acagtttaagtctataggtgagaaa

SEQ ID NO: 4765393 - DNA, 25 bp, Homo sapien
acttccataaccaagtgttattctg

SEQ ID NO: 4765394 - DNA, 25 bp, Homo sapien
caatcagaattctggtatatactca

SEQ ID NO: 4765395 - DNA, 25 bp, Homo sapien
taataaaacttgctgccaatcagaa

SEQ ID NO: 4765396 - DNA, 25 bp, Homo sapien
tatactcataccattactcaacttg

SEQ ID NO: 4765397 - DNA, 25 bp, Homo sapien
gtttaactaataagacactagagca

SEQ ID NO: 4765398 - DNA, 25 bp, Homo sapien
tttgtttttgcaaatgcttgcccct

SEQ ID NO: 4765399 - DNA, 25 bp, Homo sapien
aatgcttgcccctacttttcaacaa

SEQ ID NO: 4765400 - DNA, 25 bp, Homo sapien
aaatgcttgcccctacttttcaaca

SEQ ID NO: 4765401 - DNA, 25 bp, Homo sapien
gtttgtttttgcaaatgcttgcccc

SEQ ID NO: 4765402 - DNA, 25 bp, Homo sapien
atgcttgcccctacttttcaacaat

SEQ ID NO: 4765403 - DNA, 25 bp, Homo sapien
tttttgcaaatgcttgcccctactt

SEQ ID NO: 4765404 - DNA, 25 bp, Homo sapien
attgttgaaaagtaggggcaagcat

SEQ ID NO: 4765405 - DNA, 25 bp, Homo sapien
ttgttgaaaagtaggggcaagcatt

SEQ ID NO: 4765406 - DNA, 25 bp, Homo sapien
aagtaggggcaagcatttgcaaaaa

SEQ ID NO: 4765407 - DNA, 25 bp, Homo sapien
aaagtaggggcaagcatttgcaaaa

SEQ ID NO: 4765408 - DNA, 25 bp, Homo sapien
ggggcaagcatttgcaaaaacaaac

SEQ ID NO: 4765409 - DNA, 25 bp, Homo sapien
tgttgaaaagtaggggcaagcattt

SEQ ID NO: 4765410 - DNA, 25 bp, Homo sapien
cttgttggacataggcaaaataact

SEQ ID NO: 4765411 - DNA, 25 bp, Homo sapien
ggacataggcaaaataacttggcaa

SEQ ID NO: 4765412 - DNA, 25 bp, Homo sapien
gtttggaagtctattgctgggaaga

SEQ ID NO: 4765413 - DNA, 25 bp, Homo sapien
tctcttgttggacataggcaaaata

SEQ ID NO: 4765414 - DNA, 25 bp, Homo sapien
tcttgttggacataggcaaaataac

SEQ ID NO: 4765415 - DNA, 25 bp, Homo sapien
ttggacataggcaaaataacttggc

SEQ ID NO: 4765416 - DNA, 25 bp, Homo sapien
tattttgcctatgtccaacaagaga

SEQ ID NO: 4765417 - DNA, 25 bp, Homo sapien
aaaaatccccagcttattataagca

SEQ ID NO: 4765418 - DNA, 25 bp, Homo sapien
ttgccaagttattttgcctatgtcc

SEQ ID NO: 4765419 - DNA, 25 bp, Homo sapien
gccaagttattttgcctatgtccaa

SEQ ID NO: 4765420 - DNA, 25 bp, Homo sapien
agttattttgcctatgtccaacaag

SEQ ID NO: 4765421 - DNA, 25 bp, Homo sapien
tcttcccagcaatagacttccaaac

SEQ ID NO: 4765422 - DNA, 25 bp, Homo sapien
tagtgaagaactgaaggagtcctgc

SEQ ID NO: 4765423 - DNA, 25 bp, Homo sapien
cataggtgttctgcatttgaggtgt

SEQ ID NO: 4765424 - DNA, 25 bp, Homo sapien
tgtaatgctcttttgtaagaaacgt

SEQ ID NO: 4765425 - DNA, 25 bp, Homo sapien
gaagggcgtgcaaaaactaacattg

SEQ ID NO: 4765426 - DNA, 25 bp, Homo sapien
cagagtgagtggattttatttttcg

SEQ ID NO: 4765427 - DNA, 25 bp, Homo sapien
gccaacattcctctgcttcataggt

SEQ ID NO: 4765428 - DNA, 25 bp, Homo sapien
gaaaaataaaatccactcactctgc

SEQ ID NO: 4765429 - DNA, 25 bp, Homo sapien
cgtttcttacaaaagagcattacat

SEQ ID NO: 4765430 - DNA, 25 bp, Homo sapien
caatgttagtttttgcacgcccttc

SEQ ID NO: 4765431 - DNA, 25 bp, Homo sapien
cctatgaagcagaggaatgttggct

SEQ ID NO: 4765432 - DNA, 25 bp, Homo sapien
tacacctcaaatgcagaacacctat

SEQ ID NO: 4765433 - DNA, 25 bp, Homo sapien
gcagaacacctatgaagcagaggaa

SEQ ID NO: 4765434 - DNA, 25 bp, Homo sapien
agcagtattctggaaagtttttcta

SEQ ID NO: 4765435 - DNA, 25 bp, Homo sapien
gtgaagcagtattctggaaagtttt

SEQ ID NO: 4765436 - DNA, 25 bp, Homo sapien
aagcagtattctggaaagtttttct

SEQ ID NO: 4765437 - DNA, 25 bp, Homo sapien
tgtgaagcagtattctggaaagttt

SEQ ID NO: 4765438 - DNA, 25 bp, Homo sapien
gaagcagtattctggaaagtttttc

SEQ ID NO: 4765439 - DNA, 25 bp, Homo sapien
gcagtattctggaaagtttttctaa

SEQ ID NO: 4765440 - DNA, 25 bp, Homo sapien
agaaaaactttccagaatactgctt

SEQ ID NO: 4765441 - DNA, 25 bp, Homo sapien
aaaactttccagaatactgcttcac

SEQ ID NO: 4765442 - DNA, 25 bp, Homo sapien
tagaaaaactttccagaatactgct

SEQ ID NO: 4765443 - DNA, 25 bp, Homo sapien
aaactttccagaatactgcttcaca

SEQ ID NO: 4765444 - DNA, 25 bp, Homo sapien
gaaaaactttccagaatactgcttc

SEQ ID NO: 4765445 - DNA, 25 bp, Homo sapien
ttagaaaaactttccagaatactgc

SEQ ID NO: 4765446 - DNA, 25 bp, Homo sapien
tataaaaaagaaaaaatatcttgca

SEQ ID NO: 4765447 - DNA, 25 bp, Homo sapien
tgtgaagcagtatgcagatgttgaa

SEQ ID NO: 4765448 - DNA, 25 bp, Homo sapien
gtgaagcagtatgcagatgttgaag

SEQ ID NO: 4765449 - DNA, 25 bp, Homo sapien
gaagcagtatgcagatgttgaagga

SEQ ID NO: 4765450 - DNA, 25 bp, Homo sapien
gcagtatgcagatgttgaaggattc

SEQ ID NO: 4765451 - DNA, 25 bp, Homo sapien
gtatgcagatgttgaaggattctaa

SEQ ID NO: 4765452 - DNA, 25 bp, Homo sapien
agtatgcagatgttgaaggattcta

SEQ ID NO: 4765453 - DNA, 25 bp, Homo sapien
tccttcaacatctgcatactgcttc

SEQ ID NO: 4765454 - DNA, 25 bp, Homo sapien
ttcaacatctgcatactgcttcaca

SEQ ID NO: 4765455 - DNA, 25 bp, Homo sapien
tagaatccttcaacatctgcatact

SEQ ID NO: 4765456 - DNA, 25 bp, Homo sapien
ttagaatccttcaacatctgcatac

SEQ ID NO: 4765457 - DNA, 25 bp, Homo sapien
cttcaacatctgcatactgcttcac

SEQ ID NO: 4765458 - DNA, 25 bp, Homo sapien
gaatccttcaacatctgcatactgc

SEQ ID NO: 4765459 - DNA, 25 bp, Homo sapien
tacgagcaaaaattctaattcgcac

SEQ ID NO: 4765460 - DNA, 25 bp, Homo sapien
tactaatgtccgatttactactcat

SEQ ID NO: 4765461 - DNA, 25 bp, Homo sapien
tgttgattaagatgttacgagcaaa

SEQ ID NO: 4765462 - DNA, 25 bp, Homo sapien
tctaattgtaatggacgtgtttatc

SEQ ID NO: 4765463 - DNA, 25 bp, Homo sapien
cagcatttcacaccttactagcatt

SEQ ID NO: 4765464 - DNA, 25 bp, Homo sapien
taattctgttctactaatgtccgat

SEQ ID NO: 4765465 - DNA, 25 bp, Homo sapien
caaagaatgctagtaaggtgtgaaa

SEQ ID NO: 4765466 - DNA, 25 bp, Homo sapien
aagtgcgaattagaatttttgctcg

SEQ ID NO: 4765467 - DNA, 25 bp, Homo sapien
cggacattagtagaacagaattaag

SEQ ID NO: 4765468 - DNA, 25 bp, Homo sapien
taaacacgtccattacaattagaag

SEQ ID NO: 4765469 - DNA, 25 bp, Homo sapien
gatgagtagtaaatcggacattagt

SEQ ID NO: 4765470 - DNA, 25 bp, Homo sapien
caattagaagagttcaaaaaccatt

SEQ ID NO: 4765471 - DNA, 25 bp, Homo sapien
gatgttggcctagttctgtgtggaa

SEQ ID NO: 4765472 - DNA, 25 bp, Homo sapien
tcacagtctgccatatggcacaggc

SEQ ID NO: 4765473 - DNA, 25 bp, Homo sapien
agtctgccatatggcacaggccatg

SEQ ID NO: 4765474 - DNA, 25 bp, Homo sapien
tagataactaaatcgacaacaaatc

SEQ ID NO: 4765475 - DNA, 25 bp, Homo sapien
ttggatgttggcctagttctgtgtg

SEQ ID NO: 4765476 - DNA, 25 bp, Homo sapien
caaatcacagtctgccatatggcac

SEQ ID NO: 4765477 - DNA, 25 bp, Homo sapien
cttccacacagaactaggccaacat

SEQ ID NO: 4765478 - DNA, 25 bp, Homo sapien
gcctgtgccatatggcagactgtga

SEQ ID NO: 4765479 - DNA, 25 bp, Homo sapien
gtgccatatggcagactgtgatttg

SEQ ID NO: 4765480 - DNA, 25 bp, Homo sapien
gatttgttgtcgatttagttatcta

SEQ ID NO: 4765481 - DNA, 25 bp, Homo sapien
catggcctgtgccatatggcagact

SEQ ID NO: 4765482 - DNA, 25 bp, Homo sapien
cacacagaactaggccaacatccaa

SEQ ID NO: 4765483 - DNA, 25 bp, Homo sapien
agccatggtgtctcaaccttttggg

SEQ ID NO: 4765484 - DNA, 25 bp, Homo sapien
attcaatactaatcttgctggaaga

SEQ ID NO: 4765485 - DNA, 25 bp, Homo sapien
ttttagaagccatggtgtctcaacc

SEQ ID NO: 4765486 - DNA, 25 bp, Homo sapien
tagaagccatggtgtctcaaccttt

SEQ ID NO: 4765487 - DNA, 25 bp, Homo sapien
ctttgtgttagcttatacatactaa

SEQ ID NO: 4765488 - DNA, 25 bp, Homo sapien
gacattcaatactaatcttgctgga

SEQ ID NO: 4765489 - DNA, 25 bp, Homo sapien
tccagcaagattagtattgaatgtc

SEQ ID NO: 4765490 - DNA, 25 bp, Homo sapien
ggttgagacaccatggcttctaaaa

SEQ ID NO: 4765491 - DNA, 25 bp, Homo sapien
caaaaggttgagacaccatggcttc

SEQ ID NO: 4765492 - DNA, 25 bp, Homo sapien
tcttccagcaagattagtattgaat

SEQ ID NO: 4765493 - DNA, 25 bp, Homo sapien
ttagtatgtataagctaacacaaag

SEQ ID NO: 4765494 - DNA, 25 bp, Homo sapien
cccaaaaggttgagacaccatggct

SEQ ID NO: 4765495 - DNA, 25 bp, Homo sapien
aagatcggatcattaccattacagg

SEQ ID NO: 4765496 - DNA, 25 bp, Homo sapien
tccgaagatcggatcattaccatta

SEQ ID NO: 4765497 - DNA, 25 bp, Homo sapien
gatcggatcattaccattacaggaa

SEQ ID NO: 4765498 - DNA, 25 bp, Homo sapien
cggatcattaccattacaggaacac

SEQ ID NO: 4765499 - DNA, 25 bp, Homo sapien
tcggatcattaccattacaggaaca

SEQ ID NO: 4765500 - DNA, 25 bp, Homo sapien
aaggatccgaagatcggatcattac

SEQ ID NO: 4765501 - DNA, 25 bp, Homo sapien
taatggtaatgatccgatcttcgga

SEQ ID NO: 4765502 - DNA, 25 bp, Homo sapien
ggtaatgatccgatcttcggatcct

SEQ ID NO: 4765503 - DNA, 25 bp, Homo sapien
tcctgtaatggtaatgatccgatct

SEQ ID NO: 4765504 - DNA, 25 bp, Homo sapien
gttcctgtaatggtaatgatccgat

SEQ ID NO: 4765505 - DNA, 25 bp, Homo sapien
tgtaatggtaatgatccgatcttcg

SEQ ID NO: 4765506 - DNA, 25 bp, Homo sapien
gtgttcctgtaatggtaatgatccg

SEQ ID NO: 4765507 - DNA, 25 bp, Homo sapien
caagtgatcagtgctattaataaaa

SEQ ID NO: 4765508 - DNA, 25 bp, Homo sapien
cgttagatcatcagttaagattctg

SEQ ID NO: 4765509 - DNA, 25 bp, Homo sapien
tatgttaatgggctttagtgagctg

SEQ ID NO: 4765510 - DNA, 25 bp, Homo sapien
caggtttagggagcgttagatcatc

SEQ ID NO: 4765511 - DNA, 25 bp, Homo sapien
caaaccttgacaggtttagggagcg

SEQ ID NO: 4765512 - DNA, 25 bp, Homo sapien
gctgtttgagtcttgtcaagtgatc

SEQ ID NO: 4765513 - DNA, 25 bp, Homo sapien
cagaatcttaactgatgatctaacg

SEQ ID NO: 4765514 - DNA, 25 bp, Homo sapien
cagctcactaaagcccattaacata

SEQ ID NO: 4765515 - DNA, 25 bp, Homo sapien
aaatgttcctggtagtattaaagat

SEQ ID NO: 4765516 - DNA, 25 bp, Homo sapien
gatgatctaacgctccctaaacctg

SEQ ID NO: 4765517 - DNA, 25 bp, Homo sapien
ttttattaatagcactgatcacttg

SEQ ID NO: 4765518 - DNA, 25 bp, Homo sapien
gatcacttgacaagactcaaacagc

SEQ ID NO: 4765519 - DNA, 25 bp, Homo sapien
tacacaagtaactattcccaaagat

SEQ ID NO: 4765520 - DNA, 25 bp, Homo sapien
tcgtggctcatatggtgatcttggt

SEQ ID NO: 4765521 - DNA, 25 bp, Homo sapien
atggtgatcttggtggacctattat

SEQ ID NO: 4765522 - DNA, 25 bp, Homo sapien
gtggacctattattactacacaagt

SEQ ID NO: 4765523 - DNA, 25 bp, Homo sapien
gctcatatggtgatcttggtggacc

SEQ ID NO: 4765524 - DNA, 25 bp, Homo sapien
gggtcgtggctcatatggtgatctt

SEQ ID NO: 4765525 - DNA, 25 bp, Homo sapien
ataataggtccaccaagatcaccat

SEQ ID NO: 4765526 - DNA, 25 bp, Homo sapien
tctttgggaatagttacttgtgtag

SEQ ID NO: 4765527 - DNA, 25 bp, Homo sapien
aagatcaccatatgagccacgaccc

SEQ ID NO: 4765528 - DNA, 25 bp, Homo sapien
acttgtgtagtaataataggtccac

SEQ ID NO: 4765529 - DNA, 25 bp, Homo sapien
caccaagatcaccatatgagccacg

SEQ ID NO: 4765530 - DNA, 25 bp, Homo sapien
ccaagatcaccatatgagccacgac

SEQ ID NO: 4765531 - DNA, 25 bp, Homo sapien
gatacaggaggactttggtttcctg

SEQ ID NO: 4765532 - DNA, 25 bp, Homo sapien
tattcccctgaggatacttactgaa

SEQ ID NO: 4765533 - DNA, 25 bp, Homo sapien
taaaatacttgaatagtgaagctgg

SEQ ID NO: 4765534 - DNA, 25 bp, Homo sapien
gttcgtgtgtatatcagtgataatt

SEQ ID NO: 4765535 - DNA, 25 bp, Homo sapien
aataggatacaggaggactttggtt

SEQ ID NO: 4765536 - DNA, 25 bp, Homo sapien
tcagtgataatttaagatgcttacc

SEQ ID NO: 4765537 - DNA, 25 bp, Homo sapien
cacccagcttcactattcaagtatt

SEQ ID NO: 4765538 - DNA, 25 bp, Homo sapien
ttcagtaagtatcctcaggggaata

SEQ ID NO: 4765539 - DNA, 25 bp, Homo sapien
aattatcactgatatacacacgaac

SEQ ID NO: 4765540 - DNA, 25 bp, Homo sapien
ggtaagcatcttaaattatcactga

SEQ ID NO: 4765541 - DNA, 25 bp, Homo sapien
gaaaccaaagtcctcctgtatccta

SEQ ID NO: 4765542 - DNA, 25 bp, Homo sapien
caggaaaccaaagtcctcctgtatc

SEQ ID NO: 4765543 - DNA, 25 bp, Homo sapien
gactctgcaatagatacatggagcc

SEQ ID NO: 4765544 - DNA, 25 bp, Homo sapien
cagaatggcagatggcttatgaacc

SEQ ID NO: 4765545 - DNA, 25 bp, Homo sapien
gagcccatcagaatggcagatggct

SEQ ID NO: 4765546 - DNA, 25 bp, Homo sapien
gctgatgaaacttgggactctgcaa

SEQ ID NO: 4765547 - DNA, 25 bp, Homo sapien
catggagcccatcagaatggcagat

SEQ ID NO: 4765548 - DNA, 25 bp, Homo sapien
tttcagtgctgatgaaacttgggac

SEQ ID NO: 4765549 - DNA, 25 bp, Homo sapien
gtcccaagtttcatcagcactgaaa

SEQ ID NO: 4765550 - DNA, 25 bp, Homo sapien
gcagagtcccaagtttcatcagcac

SEQ ID NO: 4765551 - DNA, 25 bp, Homo sapien
tgatgggctccatgtatctattgca

SEQ ID NO: 4765552 - DNA, 25 bp, Homo sapien
ggttcataagccatctgccattctg

SEQ ID NO: 4765553 - DNA, 25 bp, Homo sapien
catctgccattctgatgggctccat

SEQ ID NO: 4765554 - DNA, 25 bp, Homo sapien
catgtatctattgcagagtcccaag

SEQ ID NO: 4765555 - DNA, 25 bp, Homo sapien
caatgcgggttcatgttaatgtttt

SEQ ID NO: 4765556 - DNA, 25 bp, Homo sapien
atacaatgcgggttcatgttaatgt

SEQ ID NO: 4765557 - DNA, 25 bp, Homo sapien
tacaatgcgggttcatgttaatgtt

SEQ ID NO: 4765558 - DNA, 25 bp, Homo sapien
atgcgggttcatgttaatgttttta

SEQ ID NO: 4765559 - DNA, 25 bp, Homo sapien
aatacaatgcgggttcatgttaatg

SEQ ID NO: 4765560 - DNA, 25 bp, Homo sapien
acaatgcgggttcatgttaatgttt

SEQ ID NO: 4765561 - DNA, 25 bp, Homo sapien
cattaacatgaacccgcattgtatt

SEQ ID NO: 4765562 - DNA, 25 bp, Homo sapien
acattaacatgaacccgcattgtat

SEQ ID NO: 4765563 - DNA, 25 bp, Homo sapien
aaacattaacatgaacccgcattgt

SEQ ID NO: 4765564 - DNA, 25 bp, Homo sapien
aaaacattaacatgaacccgcattg

SEQ ID NO: 4765565 - DNA, 25 bp, Homo sapien
taaaaacattaacatgaacccgcat

SEQ ID NO: 4765566 - DNA, 25 bp, Homo sapien
aacattaacatgaacccgcattgta

SEQ ID NO: 4765567 - DNA, 25 bp, Homo sapien
gagacctggagaccgttacgacggc

SEQ ID NO: 4765568 - DNA, 25 bp, Homo sapien
ggcctatgacagaagagggagacct

SEQ ID NO: 4765569 - DNA, 25 bp, Homo sapien
ctatgacagaagagggagacctgga

SEQ ID NO: 4765570 - DNA, 25 bp, Homo sapien
acctggagaccgttacgacggcatg

SEQ ID NO: 4765571 - DNA, 25 bp, Homo sapien
gacctggagaccgttacgacggcat

SEQ ID NO: 4765572 - DNA, 25 bp, Homo sapien
catggcctatgacagaagagggaga

SEQ ID NO: 4765573 - DNA, 25 bp, Homo sapien
catgccgtcgtaacggtctccaggt

SEQ ID NO: 4765574 - DNA, 25 bp, Homo sapien
atgccgtcgtaacggtctccaggtc

SEQ ID NO: 4765575 - DNA, 25 bp, Homo sapien
tccctcttctgtcataggccatgag

SEQ ID NO: 4765576 - DNA, 25 bp, Homo sapien
caggtctccctcttctgtcataggc

SEQ ID NO: 4765577 - DNA, 25 bp, Homo sapien
gccgtcgtaacggtctccaggtctc

SEQ ID NO: 4765578 - DNA, 25 bp, Homo sapien
tctccctcttctgtcataggccatg

SEQ ID NO: 4765579 - DNA, 25 bp, Homo sapien
tgatatgagccctcgtcgaggacca

SEQ ID NO: 4765580 - DNA, 25 bp, Homo sapien
attatgatgatatgagccctcgtcg

SEQ ID NO: 4765581 - DNA, 25 bp, Homo sapien
ttttgacagaatgcctcctggtcgg

SEQ ID NO: 4765582 - DNA, 25 bp, Homo sapien
ggtagcagagctcggaatcttcctc

SEQ ID NO: 4765583 - DNA, 25 bp, Homo sapien
gcctccatctagaagagattatgat

SEQ ID NO: 4765584 - DNA, 25 bp, Homo sapien
gaggcggccggggtggtagcagagc

SEQ ID NO: 4765585 - DNA, 25 bp, Homo sapien
tcataatctcttctagatggaggca

SEQ ID NO: 4765586 - DNA, 25 bp, Homo sapien
atggaggcatgggacgcccaccccg

SEQ ID NO: 4765587 - DNA, 25 bp, Homo sapien
cgacgagggctcatatcatcataat

SEQ ID NO: 4765588 - DNA, 25 bp, Homo sapien
ggtcctcgacgagggctcatatcat

SEQ ID NO: 4765589 - DNA, 25 bp, Homo sapien
ccccgaccaggaggcattctgtcaa

SEQ ID NO: 4765590 - DNA, 25 bp, Homo sapien
gaggaagattccgagctctgctacc

SEQ ID NO: 4765591 - DNA, 25 bp, Homo sapien
atgaccgtcgcggacgcccagtggg

SEQ ID NO: 4765592 - DNA, 25 bp, Homo sapien
tgaccgtcgcggacgcccagtggga

SEQ ID NO: 4765593 - DNA, 25 bp, Homo sapien
ttgatgaccgtcgcggacgcccagt

SEQ ID NO: 4765594 - DNA, 25 bp, Homo sapien
atgtttgatgaccgtcgcggacgcc

SEQ ID NO: 4765595 - DNA, 25 bp, Homo sapien
tttgatgaccgtcgcggacgcccag

SEQ ID NO: 4765596 - DNA, 25 bp, Homo sapien
gatgtttgatgaccgtcgcggacgc

SEQ ID NO: 4765597 - DNA, 25 bp, Homo sapien
gaaacctatgattatggtggtttta

SEQ ID NO: 4765598 - DNA, 25 bp, Homo sapien
tgaaacctatgattatggtggtttt

SEQ ID NO: 4765599 - DNA, 25 bp, Homo sapien
atgaaacctatgattatggtggttt

SEQ ID NO: 4765600 - DNA, 25 bp, Homo sapien
aaaccaccataatcataggtttcat

SEQ ID NO: 4765601 - DNA, 25 bp, Homo sapien
aaaaccaccataatcataggtttca

SEQ ID NO: 4765602 - DNA, 25 bp, Homo sapien
taaaaccaccataatcataggtttc

SEQ ID NO: 4765603 - DNA, 25 bp, Homo sapien
cccactgggcgtccgcgacggtcat

SEQ ID NO: 4765604 - DNA, 25 bp, Homo sapien
tcccactgggcgtccgcgacggtca

SEQ ID NO: 4765605 - DNA, 25 bp, Homo sapien
ctgggcgtccgcgacggtcatcaaa

SEQ ID NO: 4765606 - DNA, 25 bp, Homo sapien
gcgtccgcgacggtcatcaaacatc

SEQ ID NO: 4765607 - DNA, 25 bp, Homo sapien
ggcgtccgcgacggtcatcaaacat

SEQ ID NO: 4765608 - DNA, 25 bp, Homo sapien
actgggcgtccgcgacggtcatcaa

SEQ ID NO: 4765609 - DNA, 25 bp, Homo sapien
tcccactgggcgtccgcgacggtca

SEQ ID NO: 4765610 - DNA, 25 bp, Homo sapien
ctgggcgtccgcgacggtcatcaaa

SEQ ID NO: 4765611 - DNA, 25 bp, Homo sapien
catgggaaatcccactgggcgtccg

SEQ ID NO: 4765612 - DNA, 25 bp, Homo sapien
aattgggatcataaggctgtgcacg

SEQ ID NO: 4765613 - DNA, 25 bp, Homo sapien
gcgtccgcgacggtcatcaaacatc

SEQ ID NO: 4765614 - DNA, 25 bp, Homo sapien
gctgtgcacgtcctttgatgggaga

SEQ ID NO: 4765615 - DNA, 25 bp, Homo sapien
cctcattccactgacagagttgttc

SEQ ID NO: 4765616 - DNA, 25 bp, Homo sapien
ctgtcctcattccactgacagagtt

SEQ ID NO: 4765617 - DNA, 25 bp, Homo sapien
acccgatagggttgtagagtgcata

SEQ ID NO: 4765618 - DNA, 25 bp, Homo sapien
gacagagttgttcttattggaggaa

SEQ ID NO: 4765619 - DNA, 25 bp, Homo sapien
caccatcaagcttttccaggaatgc

SEQ ID NO: 4765620 - DNA, 25 bp, Homo sapien
ttccaggaatgctgtcctcattcca

SEQ ID NO: 4765621 - DNA, 25 bp, Homo sapien
tggaatgaggacagcattcctggaa

SEQ ID NO: 4765622 - DNA, 25 bp, Homo sapien
aactctgtcagtggaatgaggacag

SEQ ID NO: 4765623 - DNA, 25 bp, Homo sapien
gaacaactctgtcagtggaatgagg

SEQ ID NO: 4765624 - DNA, 25 bp, Homo sapien
tatgcactctacaaccctatcgggt

SEQ ID NO: 4765625 - DNA, 25 bp, Homo sapien
gcattcctggaaaagcttgatggtg

SEQ ID NO: 4765626 - DNA, 25 bp, Homo sapien
tttcctccaataagaacaactctgt

SEQ ID NO: 4765627 - DNA, 25 bp, Homo sapien
actgcgagttgaggctgttgattca

SEQ ID NO: 4765628 - DNA, 25 bp, Homo sapien
tcatcagagtctagcaggaggaatt

SEQ ID NO: 4765629 - DNA, 25 bp, Homo sapien
gaagtgactttgactgcgagttgag

SEQ ID NO: 4765630 - DNA, 25 bp, Homo sapien
taccaacactataaaggaagtgact

SEQ ID NO: 4765631 - DNA, 25 bp, Homo sapien
ggtgctaaaatcaaagaacttcgag

SEQ ID NO: 4765632 - DNA, 25 bp, Homo sapien
gtgactttgactgcgagttgaggct

SEQ ID NO: 4765633 - DNA, 25 bp, Homo sapien
tagcacctttgaccccaataattcc

SEQ ID NO: 4765634 - DNA, 25 bp, Homo sapien
gcctcaactcgcagtcaaagtcact

SEQ ID NO: 4765635 - DNA, 25 bp, Homo sapien
taattcctcctgctagactctgatg

SEQ ID NO: 4765636 - DNA, 25 bp, Homo sapien
ctcgaagttctttgattttagcacc

SEQ ID NO: 4765637 - DNA, 25 bp, Homo sapien
aaagtcacttcctttatagtgttgg

SEQ ID NO: 4765638 - DNA, 25 bp, Homo sapien
tgaatcaacagcctcaactcgcagt

SEQ ID NO: 4765639 - DNA, 25 bp, Homo sapien
taagcacataactggtaaagttatt

SEQ ID NO: 4765640 - DNA, 25 bp, Homo sapien
tatgcttatagcagataagtgtgta

SEQ ID NO: 4765641 - DNA, 25 bp, Homo sapien
gggaattgttgatttgagactaaaa

SEQ ID NO: 4765642 - DNA, 25 bp, Homo sapien
gttgcaggacctgaaaataaaatag

SEQ ID NO: 4765643 - DNA, 25 bp, Homo sapien
taattttgtggtaacagcgacatgc

SEQ ID NO: 4765644 - DNA, 25 bp, Homo sapien
cctggctattgaggataataagcac

SEQ ID NO: 4765645 - DNA, 25 bp, Homo sapien
cacacttatctgctataagcataac

SEQ ID NO: 4765646 - DNA, 25 bp, Homo sapien
ctattttattttcaggtcctgcaac

SEQ ID NO: 4765647 - DNA, 25 bp, Homo sapien
gcataacaataatatactgttgcag

SEQ ID NO: 4765648 - DNA, 25 bp, Homo sapien
gcttattatcctcaatagccaggcc

SEQ ID NO: 4765649 - DNA, 25 bp, Homo sapien
tagcatgtcgctgttaccacaaaat

SEQ ID NO: 4765650 - DNA, 25 bp, Homo sapien
tagtctcaaatcaacaattccccaa

SEQ ID NO: 4765651 - DNA, 25 bp, Homo sapien
ccactgaagtatggagcctggccca

SEQ ID NO: 4765652 - DNA, 25 bp, Homo sapien
gtatgtcatagtgccattgaacccc

SEQ ID NO: 4765653 - DNA, 25 bp, Homo sapien
cattgaaccccactgaagtatggag

SEQ ID NO: 4765654 - DNA, 25 bp, Homo sapien
gcagtgggaattaactacatttgca

SEQ ID NO: 4765655 - DNA, 25 bp, Homo sapien
aactcactgttgaccctgctccatg

SEQ ID NO: 4765656 - DNA, 25 bp, Homo sapien
catgatacatgaatggtcttacaac

SEQ ID NO: 4765657 - DNA, 25 bp, Homo sapien
gttgtaagaccattcatgtatcatg

SEQ ID NO: 4765658 - DNA, 25 bp, Homo sapien
tgggccaggctccatacttcagtgg

SEQ ID NO: 4765659 - DNA, 25 bp, Homo sapien
taaaaatataatcgatcctatgggc

SEQ ID NO: 4765660 - DNA, 25 bp, Homo sapien
gagcagggtcaacagtgagttgtaa

SEQ ID NO: 4765661 - DNA, 25 bp, Homo sapien
cagcatggagcagggtcaacagtga

SEQ ID NO: 4765662 - DNA, 25 bp, Homo sapien
tgcaaatgtagttaattcccactgc

SEQ ID NO: 4765663 - DNA, 25 bp, Homo sapien
cgctcgaatctgatgctgtggaatg

SEQ ID NO: 4765664 - DNA, 25 bp, Homo sapien
gctcccgctcgaatctgatgctgtg

SEQ ID NO: 4765665 - DNA, 25 bp, Homo sapien
agccagctcccgctcgaatctgatg

SEQ ID NO: 4765666 - DNA, 25 bp, Homo sapien
aatctgatgctgtggaatgcttaaa

SEQ ID NO: 4765667 - DNA, 25 bp, Homo sapien
cgaatctgatgctgtggaatgctta

SEQ ID NO: 4765668 - DNA, 25 bp, Homo sapien
gcctgcagttgccatcacccactgc

SEQ ID NO: 4765669 - DNA, 25 bp, Homo sapien
cacagcatcagattcgagcgggagc

SEQ ID NO: 4765670 - DNA, 25 bp, Homo sapien
cattccacagcatcagattcgagcg

SEQ ID NO: 4765671 - DNA, 25 bp, Homo sapien
gcagtgggtgatggcaactgcaggc

SEQ ID NO: 4765672 - DNA, 25 bp, Homo sapien
tcgagcgggagctggctggttgcag

SEQ ID NO: 4765673 - DNA, 25 bp, Homo sapien
taagcattccacagcatcagattcg

SEQ ID NO: 4765674 - DNA, 25 bp, Homo sapien
catcagattcgagcgggagctggct

SEQ ID NO: 4765675 - DNA, 25 bp, Homo sapien
aaaatatgttgtagtagctttacca

SEQ ID NO: 4765676 - DNA, 25 bp, Homo sapien
tatcttaacctgctacataattttg

SEQ ID NO: 4765677 - DNA, 25 bp, Homo sapien
cctgatcacgctagacacttaacct

SEQ ID NO: 4765678 - DNA, 25 bp, Homo sapien
tatatgcgacaatagcctgatcacg

SEQ ID NO: 4765679 - DNA, 25 bp, Homo sapien
tatttgtgggaacatgttgaaaagg

SEQ ID NO: 4765680 - DNA, 25 bp, Homo sapien
cataattcactaggtgtatatagag

SEQ ID NO: 4765681 - DNA, 25 bp, Homo sapien
caaaattatgtagcaggttaagata

SEQ ID NO: 4765682 - DNA, 25 bp, Homo sapien
tctttctgataactaaagcccataa

SEQ ID NO: 4765683 - DNA, 25 bp, Homo sapien
aatacatactaaacccatgaaagca

SEQ ID NO: 4765684 - DNA, 25 bp, Homo sapien
catatattggtaaagctactacaac

SEQ ID NO: 4765685 - DNA, 25 bp, Homo sapien
cgtgatcaggctattgtcgcatata

SEQ ID NO: 4765686 - DNA, 25 bp, Homo sapien
ggttaagtgtctagcgtgatcaggc

SEQ ID NO: 4765687 - DNA, 25 bp, Homo sapien
catattgagtatcagtgctgatatt

SEQ ID NO: 4765688 - DNA, 25 bp, Homo sapien
aattctgaagaaaatcatccctacc

SEQ ID NO: 4765689 - DNA, 25 bp, Homo sapien
tcagtgctgatattgaaacaattgg

SEQ ID NO: 4765690 - DNA, 25 bp, Homo sapien
tgaaacaattggagaaattctgaag

SEQ ID NO: 4765691 - DNA, 25 bp, Homo sapien
agtatcagtgctgatattgaaacaa

SEQ ID NO: 4765692 - DNA, 25 bp, Homo sapien
gaagaaaatcatccctaccttggaa

SEQ ID NO: 4765693 - DNA, 25 bp, Homo sapien
ctcttccaaggtagggatgattttc

SEQ ID NO: 4765694 - DNA, 25 bp, Homo sapien
tcagaatttctccaattgtttcaat

SEQ ID NO: 4765695 - DNA, 25 bp, Homo sapien
aaggtagggatgattttcttcagaa

SEQ ID NO: 4765696 - DNA, 25 bp, Homo sapien
ccaattgtttcaatatcagcactga

SEQ ID NO: 4765697 - DNA, 25 bp, Homo sapien
ttgtttcaatatcagcactgatact

SEQ ID NO: 4765698 - DNA, 25 bp, Homo sapien
aatatcagcactgatactcaatatg

SEQ ID NO: 4765699 - DNA, 25 bp, Homo sapien
ttttatttcgatggaaggagcacag

SEQ ID NO: 4765700 - DNA, 25 bp, Homo sapien
ccaatgtaacagcaagggtatcctt

SEQ ID NO: 4765701 - DNA, 25 bp, Homo sapien
gttaccaaaatagtctctcgctctg

SEQ ID NO: 4765702 - DNA, 25 bp, Homo sapien
ctttgcctaagagaaggtgtgccag

SEQ ID NO: 4765703 - DNA, 25 bp, Homo sapien
tttattgcccacttaatctgagccc

SEQ ID NO: 4765704 - DNA, 25 bp, Homo sapien
tgaacttttaccgtgagttgcccac

SEQ ID NO: 4765705 - DNA, 25 bp, Homo sapien
taaaactggcacaccttctcttagg

SEQ ID NO: 4765706 - DNA, 25 bp, Homo sapien
ggcaactcacggtaaaagttcagtg

SEQ ID NO: 4765707 - DNA, 25 bp, Homo sapien
aaggatacccttgctgttacattgg

SEQ ID NO: 4765708 - DNA, 25 bp, Homo sapien
gaagggctcagattaagtgggcaat

SEQ ID NO: 4765709 - DNA, 25 bp, Homo sapien
tgcggcaaatatgcaacacttgaag

SEQ ID NO: 4765710 - DNA, 25 bp, Homo sapien
cagagcgagagactattttggtaac

SEQ ID NO: 4765711 - DNA, 25 bp, Homo sapien
tgtcccaacagtttatgcctcactg

SEQ ID NO: 4765712 - DNA, 25 bp, Homo sapien
ccaacagtttatgcctcactgcctg

SEQ ID NO: 4765713 - DNA, 25 bp, Homo sapien
cccaacagtttatgcctcactgcct

SEQ ID NO: 4765714 - DNA, 25 bp, Homo sapien
atgtcccaacagtttatgcctcact

SEQ ID NO: 4765715 - DNA, 25 bp, Homo sapien
tcccaacagtttatgcctcactgcc

SEQ ID NO: 4765716 - DNA, 25 bp, Homo sapien
gtcccaacagtttatgcctcactgc

SEQ ID NO: 4765717 - DNA, 25 bp, Homo sapien
gcagtgaggcataaactgttgggac

SEQ ID NO: 4765718 - DNA, 25 bp, Homo sapien
agtgaggcataaactgttgggacat

SEQ ID NO: 4765719 - DNA, 25 bp, Homo sapien
aggcagtgaggcataaactgttggg

SEQ ID NO: 4765720 - DNA, 25 bp, Homo sapien
cagtgaggcataaactgttgggaca

SEQ ID NO: 4765721 - DNA, 25 bp, Homo sapien
ggcagtgaggcataaactgttggga

SEQ ID NO: 4765722 - DNA, 25 bp, Homo sapien
caggcagtgaggcataaactgttgg

SEQ ID NO: 4765723 - DNA, 25 bp, Homo sapien
tacaatgccagtgtttcagtcccag

SEQ ID NO: 4765724 - DNA, 25 bp, Homo sapien
aatgccagtgtttcagtcccagaca

SEQ ID NO: 4765725 - DNA, 25 bp, Homo sapien
tgccagtgtttcagtcccagacagc

SEQ ID NO: 4765726 - DNA, 25 bp, Homo sapien
caatgccagtgtttcagtcccagac

SEQ ID NO: 4765727 - DNA, 25 bp, Homo sapien
tgtttcagtcccagacagcagtggc

SEQ ID NO: 4765728 - DNA, 25 bp, Homo sapien
atgccagtgtttcagtcccagacag

SEQ ID NO: 4765729 - DNA, 25 bp, Homo sapien
tctgggactgaaacactggcattgt

SEQ ID NO: 4765730 - DNA, 25 bp, Homo sapien
gtctgggactgaaacactggcattg

SEQ ID NO: 4765731 - DNA, 25 bp, Homo sapien
ctgtctgggactgaaacactggcat

SEQ ID NO: 4765732 - DNA, 25 bp, Homo sapien
tgtctgggactgaaacactggcatt

SEQ ID NO: 4765733 - DNA, 25 bp, Homo sapien
gctgtctgggactgaaacactggca

SEQ ID NO: 4765734 - DNA, 25 bp, Homo sapien
gccactgctgtctgggactgaaaca

SEQ ID NO: 4765735 - DNA, 25 bp, Homo sapien
caaaaatgtgctcgttgccaaacgg

SEQ ID NO: 4765736 - DNA, 25 bp, Homo sapien
tgtactggatcgacttacccctgcg

SEQ ID NO: 4765737 - DNA, 25 bp, Homo sapien
tgcgttgcccaccatgacgttggcc

SEQ ID NO: 4765738 - DNA, 25 bp, Homo sapien
tatatctccgttgcccatgtactgg

SEQ ID NO: 4765739 - DNA, 25 bp, Homo sapien
tgaacgcccatgtgaaaaccctggt

SEQ ID NO: 4765740 - DNA, 25 bp, Homo sapien
gacaacttctgattgaatgcccatg

SEQ ID NO: 4765741 - DNA, 25 bp, Homo sapien
taagtcgatccagtacatgggcaac

SEQ ID NO: 4765742 - DNA, 25 bp, Homo sapien
gccaacgtcatggtgggcaacgcag

SEQ ID NO: 4765743 - DNA, 25 bp, Homo sapien
tatggtacccgtttggcaacgagca

SEQ ID NO: 4765744 - DNA, 25 bp, Homo sapien
cagggttttcacatgggcgttcagg

SEQ ID NO: 4765745 - DNA, 25 bp, Homo sapien
catgggcaacggagatatatggcca

SEQ ID NO: 4765746 - DNA, 25 bp, Homo sapien
catttttgggcatagccaaccaggg

SEQ ID NO: 4765747 - DNA, 25 bp, Homo sapien
atttcagtaaactttgagtcaggtt

SEQ ID NO: 4765748 - DNA, 25 bp, Homo sapien
gttttgtgtctaccctcatgagcca

SEQ ID NO: 4765749 - DNA, 25 bp, Homo sapien
ctctcctcttaatccagatgttctg

SEQ ID NO: 4765750 - DNA, 25 bp, Homo sapien
actttgtgtcgagtacttatttgac

SEQ ID NO: 4765751 - DNA, 25 bp, Homo sapien
tacaaacttgcctgttaggatctag

SEQ ID NO: 4765752 - DNA, 25 bp, Homo sapien
cctgttaggatctaggaatgcattt

SEQ ID NO: 4765753 - DNA, 25 bp, Homo sapien
tggctcatgagggtagacacaaaac

SEQ ID NO: 4765754 - DNA, 25 bp, Homo sapien
cagaacatctggattaagaggagag

SEQ ID NO: 4765755 - DNA, 25 bp, Homo sapien
tcaaataagtactcgacacaaagtt

SEQ ID NO: 4765756 - DNA, 25 bp, Homo sapien
cagtaatcaagaggaacatacaaag

SEQ ID NO: 4765757 - DNA, 25 bp, Homo sapien
aaatgcattcctagatcctaacagg

SEQ ID NO: 4765758 - DNA, 25 bp, Homo sapien
gatcctaacaggcaagtttgtaaaa

SEQ ID NO: 4765759 - DNA, 25 bp, Homo sapien
agcacaaagaatttaatgttgaggt

SEQ ID NO: 4765760 - DNA, 25 bp, Homo sapien
gagcacaaagaatttaatgttgagg

SEQ ID NO: 4765761 - DNA, 25 bp, Homo sapien
tgcacatggagcacaaagaatttaa

SEQ ID NO: 4765762 - DNA, 25 bp, Homo sapien
ttgcacatggagcacaaagaattta

SEQ ID NO: 4765763 - DNA, 25 bp, Homo sapien
gcacatggagcacaaagaatttaat

SEQ ID NO: 4765764 - DNA, 25 bp, Homo sapien
cttgcacatggagcacaaagaattt

SEQ ID NO: 4765765 - DNA, 25 bp, Homo sapien
cctcaacattaaattctttgtgctc

SEQ ID NO: 4765766 - DNA, 25 bp, Homo sapien
attaaattctttgtgctccatgtgc

SEQ ID NO: 4765767 - DNA, 25 bp, Homo sapien
aaattctttgtgctccatgtgcaag

SEQ ID NO: 4765768 - DNA, 25 bp, Homo sapien
acctcaacattaaattctttgtgct

SEQ ID NO: 4765769 - DNA, 25 bp, Homo sapien
taaattctttgtgctccatgtgcaa

SEQ ID NO: 4765770 - DNA, 25 bp, Homo sapien
caacattaaattctttgtgctccat

SEQ ID NO: 4765771 - DNA, 25 bp, Homo sapien
taacaaaagcccagattgagcaggg

SEQ ID NO: 4765772 - DNA, 25 bp, Homo sapien
cacattttaataagagtccaccaaa

SEQ ID NO: 4765773 - DNA, 25 bp, Homo sapien
taaactactacacgagcagcttcag

SEQ ID NO: 4765774 - DNA, 25 bp, Homo sapien
catagtttagctacaaagacatttg

SEQ ID NO: 4765775 - DNA, 25 bp, Homo sapien
tagcgacaaagtgtaaaaatccttg

SEQ ID NO: 4765776 - DNA, 25 bp, Homo sapien
cattgcaggtggctggttaaatcca

SEQ ID NO: 4765777 - DNA, 25 bp, Homo sapien
cctgctcaatctgggcttttgttaa

SEQ ID NO: 4765778 - DNA, 25 bp, Homo sapien
taaactgaagctgctcgtgtagtag

SEQ ID NO: 4765779 - DNA, 25 bp, Homo sapien
caaggatttttacactttgtcgcta

SEQ ID NO: 4765780 - DNA, 25 bp, Homo sapien
tggatttaaccagccacctgcaatg

SEQ ID NO: 4765781 - DNA, 25 bp, Homo sapien
caggaatggataacttcgaaatcaa

SEQ ID NO: 4765782 - DNA, 25 bp, Homo sapien
tactgtaattgattcacacacagga

SEQ ID NO: 4765783 - DNA, 25 bp, Homo sapien
tgctggggcagtgattggaaaagga

SEQ ID NO: 4765784 - DNA, 25 bp, Homo sapien
gggcagtgattggaaaaggaggcaa

SEQ ID NO: 4765785 - DNA, 25 bp, Homo sapien
aatgctggggcagtgattggaaaag

SEQ ID NO: 4765786 - DNA, 25 bp, Homo sapien
ggcagtgattggaaaaggaggcaag

SEQ ID NO: 4765787 - DNA, 25 bp, Homo sapien
gctggggcagtgattggaaaaggag

SEQ ID NO: 4765788 - DNA, 25 bp, Homo sapien
atgctggggcagtgattggaaaagg

SEQ ID NO: 4765789 - DNA, 25 bp, Homo sapien
tccttttccaatcactgccccagca

SEQ ID NO: 4765790 - DNA, 25 bp, Homo sapien
ttgcctccttttccaatcactgccc

SEQ ID NO: 4765791 - DNA, 25 bp, Homo sapien
tgcctccttttccaatcactgcccc

SEQ ID NO: 4765792 - DNA, 25 bp, Homo sapien
cttttccaatcactgccccagcatt

SEQ ID NO: 4765793 - DNA, 25 bp, Homo sapien
cttgcctccttttccaatcactgcc

SEQ ID NO: 4765794 - DNA, 25 bp, Homo sapien
gcctccttttccaatcactgcccca

SEQ ID NO: 4765795 - DNA, 25 bp, Homo sapien
cactgatgagatggttgaattacgc

SEQ ID NO: 4765796 - DNA, 25 bp, Homo sapien
gaattacgcattctgcttcagagca

SEQ ID NO: 4765797 - DNA, 25 bp, Homo sapien
tgaattacgcattctgcttcagagc

SEQ ID NO: 4765798 - DNA, 25 bp, Homo sapien
attacgcattctgcttcagagcaag

SEQ ID NO: 4765799 - DNA, 25 bp, Homo sapien
gatgagatggttgaattacgcattc

SEQ ID NO: 4765800 - DNA, 25 bp, Homo sapien
aattacgcattctgcttcagagcaa

SEQ ID NO: 4765801 - DNA, 25 bp, Homo sapien
cttgctctgaagcagaatgcgtaat

SEQ ID NO: 4765802 - DNA, 25 bp, Homo sapien
gctctgaagcagaatgcgtaattca

SEQ ID NO: 4765803 - DNA, 25 bp, Homo sapien
tgctctgaagcagaatgcgtaattc

SEQ ID NO: 4765804 - DNA, 25 bp, Homo sapien
gaatgcgtaattcaaccatctcatc

SEQ ID NO: 4765805 - DNA, 25 bp, Homo sapien
cgtaattcaaccatctcatcagtgt

SEQ ID NO: 4765806 - DNA, 25 bp, Homo sapien
gcagaatgcgtaattcaaccatctc

SEQ ID NO: 4765807 - DNA, 25 bp, Homo sapien
gatatggaagaggaacaagcattta

SEQ ID NO: 4765808 - DNA, 25 bp, Homo sapien
taaacgccctgcagaagatatggaa

SEQ ID NO: 4765809 - DNA, 25 bp, Homo sapien
gtaaacgccctgcagaagatatgga

SEQ ID NO: 4765810 - DNA, 25 bp, Homo sapien
aaacgccctgcagaagatatggaag

SEQ ID NO: 4765811 - DNA, 25 bp, Homo sapien
gaggaacaagcatttaaaagatcta

SEQ ID NO: 4765812 - DNA, 25 bp, Homo sapien
aacgccctgcagaagatatggaaga

SEQ ID NO: 4765813 - DNA, 25 bp, Homo sapien
ttccatatcttctgcagggcgttta

SEQ ID NO: 4765814 - DNA, 25 bp, Homo sapien
tcttccatatcttctgcagggcgtt

SEQ ID NO: 4765815 - DNA, 25 bp, Homo sapien
tccatatcttctgcagggcgtttac

SEQ ID NO: 4765816 - DNA, 25 bp, Homo sapien
tagatcttttaaatgcttgttcctc

SEQ ID NO: 4765817 - DNA, 25 bp, Homo sapien
cttccatatcttctgcagggcgttt

SEQ ID NO: 4765818 - DNA, 25 bp, Homo sapien
cctcttccatatcttctgcagggcg

SEQ ID NO: 4765819 - DNA, 25 bp, Homo sapien
cgctgctttctttgaaatgtgaact

SEQ ID NO: 4765820 - DNA, 25 bp, Homo sapien
tgaaatgtgaactgttaatttttag

SEQ ID NO: 4765821 - DNA, 25 bp, Homo sapien
ctgctttctttgaaatgtgaactgt

SEQ ID NO: 4765822 - DNA, 25 bp, Homo sapien
gctgctttctttgaaatgtgaactg

SEQ ID NO: 4765823 - DNA, 25 bp, Homo sapien
tgctttctttgaaatgtgaactgtt

SEQ ID NO: 4765824 - DNA, 25 bp, Homo sapien
ctttgaaatgtgaactgttaatttt

SEQ ID NO: 4765825 - DNA, 25 bp, Homo sapien
aaaattaacagttcacatttcaaag

SEQ ID NO: 4765826 - DNA, 25 bp, Homo sapien
agttcacatttcaaagaaagcagcg

SEQ ID NO: 4765827 - DNA, 25 bp, Homo sapien
cagttcacatttcaaagaaagcagc

SEQ ID NO: 4765828 - DNA, 25 bp, Homo sapien
aacagttcacatttcaaagaaagca

SEQ ID NO: 4765829 - DNA, 25 bp, Homo sapien
ctaaaaattaacagttcacatttca

SEQ ID NO: 4765830 - DNA, 25 bp, Homo sapien
taaaaattaacagttcacatttcaa

SEQ ID NO: 4765831 - DNA, 25 bp, Homo sapien
taacactgaaaccaatggtgaattt

SEQ ID NO: 4765832 - DNA, 25 bp, Homo sapien
aaactgaacagccagaagaaacctt

SEQ ID NO: 4765833 - DNA, 25 bp, Homo sapien
accttccctaacactgaaaccaatg

SEQ ID NO: 4765834 - DNA, 25 bp, Homo sapien
cagaagaaaccttccctaacactga

SEQ ID NO: 4765835 - DNA, 25 bp, Homo sapien
ttccctaacactgaaaccaatggtg

SEQ ID NO: 4765836 - DNA, 25 bp, Homo sapien
ccttccctaacactgaaaccaatgg

SEQ ID NO: 4765837 - DNA, 25 bp, Homo sapien
cattggtttcagtgttagggaaggt

SEQ ID NO: 4765838 - DNA, 25 bp, Homo sapien
caccattggtttcagtgttagggaa

SEQ ID NO: 4765839 - DNA, 25 bp, Homo sapien
tagggaaggtttcttctggctgttc

SEQ ID NO: 4765840 - DNA, 25 bp, Homo sapien
ccattggtttcagtgttagggaagg

SEQ ID NO: 4765841 - DNA, 25 bp, Homo sapien
aattcaccattggtttcagtgttag

SEQ ID NO: 4765842 - DNA, 25 bp, Homo sapien
ggtttcttctggctgttcagtttcc

SEQ ID NO: 4765843 - DNA, 25 bp, Homo sapien
tctgctctgcaaggatatataataa

SEQ ID NO: 4765844 - DNA, 25 bp, Homo sapien
ggtgtcagttgttggtccgacccag

SEQ ID NO: 4765845 - DNA, 25 bp, Homo sapien
gacccagaacgcttcagttctgctc

SEQ ID NO: 4765846 - DNA, 25 bp, Homo sapien
tcagttgttggtccgacccagaacg

SEQ ID NO: 4765847 - DNA, 25 bp, Homo sapien
tggtccgacccagaacgcttcagtt

SEQ ID NO: 4765848 - DNA, 25 bp, Homo sapien
ttgttggtccgacccagaacgcttc

SEQ ID NO: 4765849 - DNA, 25 bp, Homo sapien
tattatatatccttgcagagcagaa

SEQ ID NO: 4765850 - DNA, 25 bp, Homo sapien
gaagcgttctgggtcggaccaacaa

SEQ ID NO: 4765851 - DNA, 25 bp, Homo sapien
tctgggtcggaccaacaactgacac

SEQ ID NO: 4765852 - DNA, 25 bp, Homo sapien
gagcagaactgaagcgttctgggtc

SEQ ID NO: 4765853 - DNA, 25 bp, Homo sapien
aactgaagcgttctgggtcggacca

SEQ ID NO: 4765854 - DNA, 25 bp, Homo sapien
actgacaccccagtgctgcagtagc

SEQ ID NO: 4765855 - DNA, 25 bp, Homo sapien
cgttttggcacgtagacactttagt

SEQ ID NO: 4765856 - DNA, 25 bp, Homo sapien
tagtcctatcgaccgttttggcacg

SEQ ID NO: 4765857 - DNA, 25 bp, Homo sapien
ggcatgattgttgtgttgtactccc

SEQ ID NO: 4765858 - DNA, 25 bp, Homo sapien
aaaggctgtttgtagtcctatcgac

SEQ ID NO: 4765859 - DNA, 25 bp, Homo sapien
cactttagttttcgtgttacaggca

SEQ ID NO: 4765860 - DNA, 25 bp, Homo sapien
tcctagtcccgacaagagggaagct

SEQ ID NO: 4765861 - DNA, 25 bp, Homo sapien
tgttagttttcaagggctccatttg

SEQ ID NO: 4765862 - DNA, 25 bp, Homo sapien
tgttggatgtgttcgcaattgccgt

SEQ ID NO: 4765863 - DNA, 25 bp, Homo sapien
ggctccatttgtttcgctgattaat

SEQ ID NO: 4765864 - DNA, 25 bp, Homo sapien
tattgtggtagtttgggtctggtcc

SEQ ID NO: 4765865 - DNA, 25 bp, Homo sapien
aaataatccgctagtgactgttagt

SEQ ID NO: 4765866 - DNA, 25 bp, Homo sapien
ttatccctccggtagattgttctgg

SEQ ID NO: 4765867 - DNA, 25 bp, Homo sapien
caaatggagcccttgaaaactaaca

SEQ ID NO: 4765868 - DNA, 25 bp, Homo sapien
tacaacggcaattgcgaacacatcc

SEQ ID NO: 4765869 - DNA, 25 bp, Homo sapien
ccagaacaatctaccggagggataa

SEQ ID NO: 4765870 - DNA, 25 bp, Homo sapien
tctaatataggaccagacccaaact

SEQ ID NO: 4765871 - DNA, 25 bp, Homo sapien
gaaaactaacagtcactagcggatt

SEQ ID NO: 4765872 - DNA, 25 bp, Homo sapien
tattaatcagcgaaacaaatggagc

SEQ ID NO: 4765873 - DNA, 25 bp, Homo sapien
taggcttaagggagtacaacacaac

SEQ ID NO: 4765874 - DNA, 25 bp, Homo sapien
cgaaaactaaagtgtctacgtgcca

SEQ ID NO: 4765875 - DNA, 25 bp, Homo sapien
tctacgtgccaaaacggtcgatagg

SEQ ID NO: 4765876 - DNA, 25 bp, Homo sapien
taagcttccctcttgtcgggactag

SEQ ID NO: 4765877 - DNA, 25 bp, Homo sapien
ggtcgataggactacaaacagcctt

SEQ ID NO: 4765878 - DNA, 25 bp, Homo sapien
caacaatcatgcctgtaacacgaaa

SEQ ID NO: 4765879 - DNA, 25 bp, Homo sapien
gctgtttttgatctcggtgccggga

SEQ ID NO: 4765880 - DNA, 25 bp, Homo sapien
cgtttcagttgtcgttaggagagca

SEQ ID NO: 4765881 - DNA, 25 bp, Homo sapien
tcggccagtggagcacatacttagc

SEQ ID NO: 4765882 - DNA, 25 bp, Homo sapien
gagagcaataagtcgaccaacggta

SEQ ID NO: 4765883 - DNA, 25 bp, Homo sapien
tacttagcggatttttgaggcctgg

SEQ ID NO: 4765884 - DNA, 25 bp, Homo sapien
tcagaaattgcgtgctgggccggaa

SEQ ID NO: 4765885 - DNA, 25 bp, Homo sapien
gagatcaaaaacagccgggtaacag

SEQ ID NO: 4765886 - DNA, 25 bp, Homo sapien
taagtatgtgctccactggccgagc

SEQ ID NO: 4765887 - DNA, 25 bp, Homo sapien
tgctctcctaacgacaactgaaacg

SEQ ID NO: 4765888 - DNA, 25 bp, Homo sapien
ggcctcaaaaatccgctaagtatgt

SEQ ID NO: 4765889 - DNA, 25 bp, Homo sapien
taagaataacgttgccgcttgccgt

SEQ ID NO: 4765890 - DNA, 25 bp, Homo sapien
tccggcccagcacgcaatttctgag

SEQ ID NO: 4765891 - DNA, 25 bp, Homo sapien
tacgcgggccgccatttcctgtcgg

SEQ ID NO: 4765892 - DNA, 25 bp, Homo sapien
acgcgggccgccatttcctgtcgga

SEQ ID NO: 4765893 - DNA, 25 bp, Homo sapien
gcgggccgccatttcctgtcggatc

SEQ ID NO: 4765894 - DNA, 25 bp, Homo sapien
ggccgccatttcctgtcggatccgg

SEQ ID NO: 4765895 - DNA, 25 bp, Homo sapien
cgcgggccgccatttcctgtcggat

SEQ ID NO: 4765896 - DNA, 25 bp, Homo sapien
gggccgccatttcctgtcggatccg

SEQ ID NO: 4765897 - DNA, 25 bp, Homo sapien
cggatccgacaggaaatggcggccc

SEQ ID NO: 4765898 - DNA, 25 bp, Homo sapien
atccgacaggaaatggcggcccgcg

SEQ ID NO: 4765899 - DNA, 25 bp, Homo sapien
ccgacaggaaatggcggcccgcgta

SEQ ID NO: 4765900 - DNA, 25 bp, Homo sapien
gatccgacaggaaatggcggcccgc

SEQ ID NO: 4765901 - DNA, 25 bp, Homo sapien
ccggatccgacaggaaatggcggcc

SEQ ID NO: 4765902 - DNA, 25 bp, Homo sapien
tccgacaggaaatggcggcccgcgt

SEQ ID NO: 4765903 - DNA, 25 bp, Homo sapien
cgctcggctccgcctagtagcacgt

SEQ ID NO: 4765904 - DNA, 25 bp, Homo sapien
gctcggctccgcctagtagcacgta

SEQ ID NO: 4765905 - DNA, 25 bp, Homo sapien
ggagggggtcggcgctcggctccgc

SEQ ID NO: 4765906 - DNA, 25 bp, Homo sapien
gagggggtcggcgctcggctccgcc

SEQ ID NO: 4765907 - DNA, 25 bp, Homo sapien
ctcggctccgcctagtagcacgtag

SEQ ID NO: 4765908 - DNA, 25 bp, Homo sapien
ctacgtgctactaggcggagccgag

SEQ ID NO: 4765909 - DNA, 25 bp, Homo sapien
ggcggagccgagcgccgaccccctc

SEQ ID NO: 4765910 - DNA, 25 bp, Homo sapien
gcggagccgagcgccgaccccctcc

SEQ ID NO: 4765911 - DNA, 25 bp, Homo sapien
acgtgctactaggcggagccgagcg

SEQ ID NO: 4765912 - DNA, 25 bp, Homo sapien
tacgtgctactaggcggagccgagc

SEQ ID NO: 4765913 - DNA, 25 bp, Homo sapien
gctcggctccgcctagtagcacgta

SEQ ID NO: 4765914 - DNA, 25 bp, Homo sapien
ggagggggtcggcgctcggctccgc

SEQ ID NO: 4765915 - DNA, 25 bp, Homo sapien
gagggggtcggcgctcggctccgcc

SEQ ID NO: 4765916 - DNA, 25 bp, Homo sapien
agggggtcggcgctcggctccgcct

SEQ ID NO: 4765917 - DNA, 25 bp, Homo sapien
gtcggcgctcggctccgcctagtag

SEQ ID NO: 4765918 - DNA, 25 bp, Homo sapien
ctcggctccgcctagtagcacgtag

SEQ ID NO: 4765919 - DNA, 25 bp, Homo sapien
ctccacgagccgctcccccaacccg

SEQ ID NO: 4765920 - DNA, 25 bp, Homo sapien
agccgggttgggggagcggctcgtg

SEQ ID NO: 4765921 - DNA, 25 bp, Homo sapien
gcgctcgttttctgtctagctccga

SEQ ID NO: 4765922 - DNA, 25 bp, Homo sapien
cggcagcggagggacggcagtctcg

SEQ ID NO: 4765923 - DNA, 25 bp, Homo sapien
tgtctagctccgaccggctgaggcg

SEQ ID NO: 4765924 - DNA, 25 bp, Homo sapien
tttctgtctagctccgaccggctga

SEQ ID NO: 4765925 - DNA, 25 bp, Homo sapien
tcgttttctgtctagctccgaccgg

SEQ ID NO: 4765926 - DNA, 25 bp, Homo sapien
gagcctgcgctcgttttctgtctag

SEQ ID NO: 4765927 - DNA, 25 bp, Homo sapien
ccggtcggagctagacagaaaacga

SEQ ID NO: 4765928 - DNA, 25 bp, Homo sapien
tcagccggtcggagctagacagaaa

SEQ ID NO: 4765929 - DNA, 25 bp, Homo sapien
gagctagacagaaaacgagcgcagg

SEQ ID NO: 4765930 - DNA, 25 bp, Homo sapien
tcggagctagacagaaaacgagcgc

SEQ ID NO: 4765931 - DNA, 25 bp, Homo sapien
cgcctcagccggtcggagctagaca

SEQ ID NO: 4765932 - DNA, 25 bp, Homo sapien
ctagacagaaaacgagcgcaggctc

SEQ ID NO: 4765933 - DNA, 25 bp, Homo sapien
cactgcagacgccattatcctctgt

SEQ ID NO: 4765934 - DNA, 25 bp, Homo sapien
gctccaggcgacagcactgcagacg

SEQ ID NO: 4765935 - DNA, 25 bp, Homo sapien
acagcactgcagacgccattatcct

SEQ ID NO: 4765936 - DNA, 25 bp, Homo sapien
ctgcagacgccattatcctctgttt

SEQ ID NO: 4765937 - DNA, 25 bp, Homo sapien
ggcgctccaggcgacagcactgcag

SEQ ID NO: 4765938 - DNA, 25 bp, Homo sapien
gcgacagcactgcagacgccattat

SEQ ID NO: 4765939 - DNA, 25 bp, Homo sapien
tttctctgctgcaccgacctcgacg

SEQ ID NO: 4765940 - DNA, 25 bp, Homo sapien
cgtcgaggtcggtgcagcagagaaa

SEQ ID NO: 4765941 - DNA, 25 bp, Homo sapien
cgtctgcagtgctgtcgcctggagc

SEQ ID NO: 4765942 - DNA, 25 bp, Homo sapien
aaacagaggataatggcgtctgcag

SEQ ID NO: 4765943 - DNA, 25 bp, Homo sapien
aggataatggcgtctgcagtgctgt

SEQ ID NO: 4765944 - DNA, 25 bp, Homo sapien
tctgcagtgctgtcgcctggagcgc

SEQ ID NO: 4765945 - DNA, 25 bp, Homo sapien
gataatggcgtctgcagtgctgtcg

SEQ ID NO: 4765946 - DNA, 25 bp, Homo sapien
taatggcgtctgcagtgctgtcgcc

SEQ ID NO: 4765947 - DNA, 25 bp, Homo sapien
tcaggatatttctcttgtcaattag

SEQ ID NO: 4765948 - DNA, 25 bp, Homo sapien
ttctcttgtcaattagatgtttctt

SEQ ID NO: 4765949 - DNA, 25 bp, Homo sapien
tcttttagactaatatgcatgtgtg

SEQ ID NO: 4765950 - DNA, 25 bp, Homo sapien
ttcctaacagtgtctttcatagaac

SEQ ID NO: 4765951 - DNA, 25 bp, Homo sapien
cctctgcctcccaagttcaggcaat

SEQ ID NO: 4765952 - DNA, 25 bp, Homo sapien
caccacacccagctaattttgtatt

SEQ ID NO: 4765953 - DNA, 25 bp, Homo sapien
atggcgcaacctcagctcaccacaa

SEQ ID NO: 4765954 - DNA, 25 bp, Homo sapien
agttcaggcaattctcctgcctcag

SEQ ID NO: 4765955 - DNA, 25 bp, Homo sapien
ttttaacagaaatgccgatcgaagt

SEQ ID NO: 4765956 - DNA, 25 bp, Homo sapien
ggaaactaaggaattgcaaccattg

SEQ ID NO: 4765957 - DNA, 25 bp, Homo sapien
tgtaatgtacccttagcccatgatt

SEQ ID NO: 4765958 - DNA, 25 bp, Homo sapien
ggttgtccatctgttagagaccaaa

SEQ ID NO: 4765959 - DNA, 25 bp, Homo sapien
tactggtgttcggtggtgagtcata

SEQ ID NO: 4765960 - DNA, 25 bp, Homo sapien
cttgtcacgtcacataagatgattg

SEQ ID NO: 4765961 - DNA, 25 bp, Homo sapien
ggaggaatatggtgacccactattg

SEQ ID NO: 4765962 - DNA, 25 bp, Homo sapien
tgccgtcatggcctccaaagtttac

SEQ ID NO: 4765963 - DNA, 25 bp, Homo sapien
gttttgagtttttagcactcagaaa

SEQ ID NO: 4765964 - DNA, 25 bp, Homo sapien
gtaataaccttcacttccatctgtg

SEQ ID NO: 4765965 - DNA, 25 bp, Homo sapien
tctttaagttatttttcgatgtaca

SEQ ID NO: 4765966 - DNA, 25 bp, Homo sapien
aactgttttgagtttttagcactca

SEQ ID NO: 4765967 - DNA, 25 bp, Homo sapien
gctccccccgcccctgtgccgggca

SEQ ID NO: 4765968 - DNA, 25 bp, Homo sapien
gttctgtgagcgtcccattgtccct

SEQ ID NO: 4765969 - DNA, 25 bp, Homo sapien
ccagttcgcaggaaaagatgacatc

SEQ ID NO: 4765970 - DNA, 25 bp, Homo sapien
ggctggcgctttccactgggatgtt

SEQ ID NO: 4765971 - DNA, 25 bp, Homo sapien
gagtcgcctagttagagcttctgtt

SEQ ID NO: 4765972 - DNA, 25 bp, Homo sapien
gcaggtggaagagtcgggcgcctgg

SEQ ID NO: 4765973 - DNA, 25 bp, Homo sapien
cctgagcgcaattccgcgggagcag

SEQ ID NO: 4765974 - DNA, 25 bp, Homo sapien
gggagcgcgatctgcgagaggccag

SEQ ID NO: 4765975 - DNA, 25 bp, Homo sapien
tcgtggccgcgggagcgcgatctgc

SEQ ID NO: 4765976 - DNA, 25 bp, Homo sapien
cagtggataaagctgttctattttc

SEQ ID NO: 4765977 - DNA, 25 bp, Homo sapien
gagattttctcacatccccagagct

SEQ ID NO: 4765978 - DNA, 25 bp, Homo sapien
caaactctgagcttcctctatatcc

SEQ ID NO: 4765979 - DNA, 25 bp, Homo sapien
tgaggagtttattccagcctctctg

SEQ ID NO: 4765980 - DNA, 25 bp, Homo sapien
ctaaagtgttgtggtgatgaggagt

SEQ ID NO: 4765981 - DNA, 25 bp, Homo sapien
tggctgtgttgtgcatgccagacat

SEQ ID NO: 4765982 - DNA, 25 bp, Homo sapien
tccagggcttaacttagtttctggc

SEQ ID NO: 4765983 - DNA, 25 bp, Homo sapien
aacttagtttctggctgtgttgtgc

SEQ ID NO: 4765984 - DNA, 25 bp, Homo sapien
gctgtgttgtgcatgccagacatga

SEQ ID NO: 4765985 - DNA, 25 bp, Homo sapien
ttttctgtccacagcaatacaaccc

SEQ ID NO: 4765986 - DNA, 25 bp, Homo sapien
tgtccacagcaatacaacccatgtg

SEQ ID NO: 4765987 - DNA, 25 bp, Homo sapien
atacaacccatgtgttcctgctttt

SEQ ID NO: 4765988 - DNA, 25 bp, Homo sapien
acagcaatacaacccatgtgttcct

SEQ ID NO: 4765989 - DNA, 25 bp, Homo sapien
ctttcattattgtaactgtaaaact

SEQ ID NO: 4765990 - DNA, 25 bp, Homo sapien
tcaagctttggtgagaccatgtctt

SEQ ID NO: 4765991 - DNA, 25 bp, Homo sapien
cttctcggaaggcaaccatcctttt

SEQ ID NO: 4765992 - DNA, 25 bp, Homo sapien
ggcccttgcacacttctcggaaggc

SEQ ID NO: 4765993 - DNA, 25 bp, Homo sapien
taagaatttcgctgagtctttacgg

SEQ ID NO: 4765994 - DNA, 25 bp, Homo sapien
gttcgtagaagtgcagccactgcta

SEQ ID NO: 4765995 - DNA, 25 bp, Homo sapien
tctttacggttcgtagaagtgcagc

SEQ ID NO: 4765996 - DNA, 25 bp, Homo sapien
tcgctgagtctttacggttcgtaga

SEQ ID NO: 4765997 - DNA, 25 bp, Homo sapien
aggaggccgttcctgacacctggtc

SEQ ID NO: 4765998 - DNA, 25 bp, Homo sapien
ctgacacctggtcccatatggcagt

SEQ ID NO: 4765999 - DNA, 25 bp, Homo sapien
tccccaacattgttgtccctggagc

SEQ ID NO: 4766000 - DNA, 25 bp, Homo sapien
cagctggccctatggtctgcttggc

SEQ ID NO: 4766001 - DNA, 25 bp, Homo sapien
tcattttgagtatctgtctacttga

SEQ ID NO: 4766002 - DNA, 25 bp, Homo sapien
gagtatctgtctacttgatgctgga

SEQ ID NO: 4766003 - DNA, 25 bp, Homo sapien
tctacttgatgctggacaaaattcg

SEQ ID NO: 4766004 - DNA, 25 bp, Homo sapien
ttgatgctggacaaaattcggccca

SEQ ID NO: 4766005 - DNA, 25 bp, Homo sapien
tttctgttcaacatacttgtggcca

SEQ ID NO: 4766006 - DNA, 25 bp, Homo sapien
ttttctgttcaacatacttgtggcc

SEQ ID NO: 4766007 - DNA, 25 bp, Homo sapien
cttttctgttcaacatacttgtggc

SEQ ID NO: 4766008 - DNA, 25 bp, Homo sapien
tctggaacattgactctcaggtgtg

SEQ ID NO: 4766009 - DNA, 25 bp, Homo sapien
tctcaggtgtgtccggtgcctacgg

SEQ ID NO: 4766010 - DNA, 25 bp, Homo sapien
gaacattgactctcaggtgtgtccg

SEQ ID NO: 4766011 - DNA, 25 bp, Homo sapien
gactctcaggtgtgtccggtgccta

SEQ ID NO: 4766012 - DNA, 25 bp, Homo sapien
caaaccctggcttgagagacactct

SEQ ID NO: 4766013 - DNA, 25 bp, Homo sapien
ccctcacttgttgccaaagacttgg

SEQ ID NO: 4766014 - DNA, 25 bp, Homo sapien
tagatctattcaacagagcactttg

SEQ ID NO: 4766015 - DNA, 25 bp, Homo sapien
tctgtctggccgtacagtaccacag

SEQ ID NO: 4766016 - DNA, 25 bp, Homo sapien
ccaaagttctgggcctacaataaca

SEQ ID NO: 4766017 - DNA, 25 bp, Homo sapien
tctgggcctacaataacaccagttt

SEQ ID NO: 4766018 - DNA, 25 bp, Homo sapien
taacaccagttttttagtgctagag

SEQ ID NO: 4766019 - DNA, 25 bp, Homo sapien
ttttttagtgctagagtggcggtgt

SEQ ID NO: 4766020 - DNA, 25 bp, Homo sapien
atgtccagttgaaggacgttgccat

SEQ ID NO: 4766021 - DNA, 25 bp, Homo sapien
gaagactgaataggattcctggaaa

SEQ ID NO: 4766022 - DNA, 25 bp, Homo sapien
agcaatgttacagaagactgaatag

SEQ ID NO: 4766023 - DNA, 25 bp, Homo sapien
gaaggacgttgccattgtcaatcag

SEQ ID NO: 4766024 - DNA, 25 bp, Homo sapien
gtcagaggagtccattttggggagc

SEQ ID NO: 4766025 - DNA, 25 bp, Homo sapien
ttctgcattcaatgatgggaagtca

SEQ ID NO: 4766026 - DNA, 25 bp, Homo sapien
agtcagaggagtccattttggggag

SEQ ID NO: 4766027 - DNA, 25 bp, Homo sapien
tgcattcaatgatgggaagtcagag

SEQ ID NO: 4766028 - DNA, 25 bp, Homo sapien
gagcagtacataaatctcctgggaa

SEQ ID NO: 4766029 - DNA, 25 bp, Homo sapien
gtacataaatctcctgggaacctgg

SEQ ID NO: 4766030 - DNA, 25 bp, Homo sapien
agtacataaatctcctgggaacctg

SEQ ID NO: 4766031 - DNA, 25 bp, Homo sapien
gcagtacataaatctcctgggaacc

SEQ ID NO: 4766032 - DNA, 25 bp, Homo sapien
tcctttggagaccagtgtctgcatt

SEQ ID NO: 4766033 - DNA, 25 bp, Homo sapien
tttcctttctctggtggctcactcc

SEQ ID NO: 4766034 - DNA, 25 bp, Homo sapien
ggagactggaaacctttctcttcag

SEQ ID NO: 4766035 - DNA, 25 bp, Homo sapien
gaccagtgtctgcatttcacaccct

SEQ ID NO: 4766036 - DNA, 25 bp, Homo sapien
ctcttgactgttggaccagacttta

SEQ ID NO: 4766037 - DNA, 25 bp, Homo sapien
gtgctcttgactgttggaccagact

SEQ ID NO: 4766038 - DNA, 25 bp, Homo sapien
gactgttggaccagactttataggg

SEQ ID NO: 4766039 - DNA, 25 bp, Homo sapien
ctttataggggcaatttgaagccac

SEQ ID NO: 4766040 - DNA, 25 bp, Homo sapien
aaaatatgttcggtaaacataggag

SEQ ID NO: 4766041 - DNA, 25 bp, Homo sapien
tcttctgggtttaccctgattacca

SEQ ID NO: 4766042 - DNA, 25 bp, Homo sapien
tatgttcggtaaacataggagagtg

SEQ ID NO: 4766043 - DNA, 25 bp, Homo sapien
ctgattaccagggagtcaacttcag

SEQ ID NO: 4766044 - DNA, 25 bp, Homo sapien
gaagaacttatgtcaccactccctc

SEQ ID NO: 4766045 - DNA, 25 bp, Homo sapien
tggccatgcaggctttctgagatgg

SEQ ID NO: 4766046 - DNA, 25 bp, Homo sapien
ccactccctccatttacaaagacag

SEQ ID NO: 4766047 - DNA, 25 bp, Homo sapien
caggctttctgagatgggttccaga

SEQ ID NO: 4766048 - DNA, 25 bp, Homo sapien
cagcaagctgatggagcccttacat

SEQ ID NO: 4766049 - DNA, 25 bp, Homo sapien
caagctgatggagcccttacataca

SEQ ID NO: 4766050 - DNA, 25 bp, Homo sapien
gatggagcccttacatacaaggagg

SEQ ID NO: 4766051 - DNA, 25 bp, Homo sapien
gctgatggagcccttacatacaagg

SEQ ID NO: 4766052 - DNA, 25 bp, Homo sapien
gcattggagtcaccccaggatggca

SEQ ID NO: 4766053 - DNA, 25 bp, Homo sapien
tgatctgccattgcttgtacctgca

SEQ ID NO: 4766054 - DNA, 25 bp, Homo sapien
cttgtacctgcattggagtcacccc

SEQ ID NO: 4766055 - DNA, 25 bp, Homo sapien
tttgatctgccattgcttgtacctg

SEQ ID NO: 4766056 - DNA, 25 bp, Homo sapien
ctgtggggacagtgtgtgaatgaga

SEQ ID NO: 4766057 - DNA, 25 bp, Homo sapien
gactgagtcaaggatatgtctgtga

SEQ ID NO: 4766058 - DNA, 25 bp, Homo sapien
tgtctgtgatgagactcacatttca

SEQ ID NO: 4766059 - DNA, 25 bp, Homo sapien
gacagagcttgttgtgaagaggact

SEQ ID NO: 4766060 - DNA, 25 bp, Homo sapien
ggtgacaagcattcagatcgctcct

SEQ ID NO: 4766061 - DNA, 25 bp, Homo sapien
ctgaagccaacaattttctaaatcc

SEQ ID NO: 4766062 - DNA, 25 bp, Homo sapien
ggtctcccattttgtggcctgaagc

SEQ ID NO: 4766063 - DNA, 25 bp, Homo sapien
gcctgaagccaacaattttctaaat

SEQ ID NO: 4766064 - DNA, 25 bp, Homo sapien
ctggtctcccattttgtggcctgaa

SEQ ID NO: 4766065 - DNA, 25 bp, Homo sapien
aagatttgagccctggcagtccagc

SEQ ID NO: 4766066 - DNA, 25 bp, Homo sapien
gataggcaccctgcagttgaaagga

SEQ ID NO: 4766067 - DNA, 25 bp, Homo sapien
tgcacatgatcaagaaggccaatct

SEQ ID NO: 4766068 - DNA, 25 bp, Homo sapien
tagaccagggaatactgccccaact

SEQ ID NO: 4766069 - DNA, 25 bp, Homo sapien
cagaaaggtcatatcaaagcaggta

SEQ ID NO: 4766070 - DNA, 25 bp, Homo sapien
ccattaggttgtttcactgggagaa

SEQ ID NO: 4766071 - DNA, 25 bp, Homo sapien
gaagggccacttacgacgttcacag

SEQ ID NO: 4766072 - DNA, 25 bp, Homo sapien
ttaagcacatttagaccaacatggg

SEQ ID NO: 4766073 - DNA, 25 bp, Homo sapien
aatgtgcagatgaataggcctaccg

SEQ ID NO: 4766074 - DNA, 25 bp, Homo sapien
cgttatggcctacaacaggatggct

SEQ ID NO: 4766075 - DNA, 25 bp, Homo sapien
ggaatcaacaacacctcactttggg

SEQ ID NO: 4766076 - DNA, 25 bp, Homo sapien
tatgatccacgtgttctcctcaagg

SEQ ID NO: 4766077 - DNA, 25 bp, Homo sapien
ttcctcctgggatgacttcaccagg

SEQ ID NO: 4766078 - DNA, 25 bp, Homo sapien
gcagcagcccttcaaagaatacaga

SEQ ID NO: 4766079 - DNA, 25 bp, Homo sapien
gagatcccattgcagttaaaggtcg

SEQ ID NO: 4766080 - DNA, 25 bp, Homo sapien
ttaaaggtcgatggattcaacaatg

SEQ ID NO: 4766081 - DNA, 25 bp, Homo sapien
gcaacaagctatcaccttggttgtg

SEQ ID NO: 4766082 - DNA, 25 bp, Homo sapien
tcaccttggttgtgtttccagggaa

SEQ ID NO: 4766083 - DNA, 25 bp, Homo sapien
cagactttggcaacaagctatcacc

SEQ ID NO: 4766084 - DNA, 25 bp, Homo sapien
tgctcaacagactttggcaacaagc

SEQ ID NO: 4766085 - DNA, 25 bp, Homo sapien
tggcagttgatgtccacaggagtgc

SEQ ID NO: 4766086 - DNA, 25 bp, Homo sapien
gatggcagttgatgtccacaggagt

SEQ ID NO: 4766087 - DNA, 25 bp, Homo sapien
gcagttgatgtccacaggagtgctg

SEQ ID NO: 4766088 - DNA, 25 bp, Homo sapien
cagttgatgtccacaggagtgctgg

SEQ ID NO: 4766089 - DNA, 25 bp, Homo sapien
ctggaggcactgcctgtcctgaaag

SEQ ID NO: 4766090 - DNA, 25 bp, Homo sapien
cagcgtgtgctgcacatgcaagctg

SEQ ID NO: 4766091 - DNA, 25 bp, Homo sapien
gcgtgtgctgcacatgcaagctgga

SEQ ID NO: 4766092 - DNA, 25 bp, Homo sapien
gcagcgtgtgctgcacatgcaagct

SEQ ID NO: 4766093 - DNA, 25 bp, Homo sapien
tgcgatgcaggctgtcatgaagcag

SEQ ID NO: 4766094 - DNA, 25 bp, Homo sapien
acggtccccgcaatcagagctctca

SEQ ID NO: 4766095 - DNA, 25 bp, Homo sapien
atgaagcaggccacggtccccgcaa

SEQ ID NO: 4766096 - DNA, 25 bp, Homo sapien
gaggcgatatcacgctttctggaag

SEQ ID NO: 4766097 - DNA, 25 bp, Homo sapien
ccacagagagcgtaagtggcgatta

SEQ ID NO: 4766098 - DNA, 25 bp, Homo sapien
gtccgccgatcacgattcctaggga

SEQ ID NO: 4766099 - DNA, 25 bp, Homo sapien
taagtggcgattatctcagaacgaa

SEQ ID NO: 4766100 - DNA, 25 bp, Homo sapien
tagggacccgatattggcaaaacca

SEQ ID NO: 4766101 - DNA, 25 bp, Homo sapien
tgagaggtgctcataagccacaaat

SEQ ID NO: 4766102 - DNA, 25 bp, Homo sapien
tcttataacctatgagtctggcaac

SEQ ID NO: 4766103 - DNA, 25 bp, Homo sapien
gtctggcaaccataaagctgtcctg

SEQ ID NO: 4766104 - DNA, 25 bp, Homo sapien
aaaagggcatgaagatgtaggagca

SEQ ID NO: 4766105 - DNA, 25 bp, Homo sapien
ccaggaaggcaatcagattcacagc

SEQ ID NO: 4766106 - DNA, 25 bp, Homo sapien
actcagctgtgggtagtcaaacatg

SEQ ID NO: 4766107 - DNA, 25 bp, Homo sapien
ccaggacagggctgaattcataaaa

SEQ ID NO: 4766108 - DNA, 25 bp, Homo sapien
ggcaatcagattcacagcgatgttg

SEQ ID NO: 4766109 - DNA, 25 bp, Homo sapien
ttttctgtctcaggccaaaagagtt

SEQ ID NO: 4766110 - DNA, 25 bp, Homo sapien
tctcaggccaaaagagtttagcagc

SEQ ID NO: 4766111 - DNA, 25 bp, Homo sapien
gacgcaggtgctgacataactgacg

SEQ ID NO: 4766112 - DNA, 25 bp, Homo sapien
agcagccaatgacgcaggtgctgac

SEQ ID NO: 4766113 - DNA, 25 bp, Homo sapien
ctgttaacaagtgggaggatggaac

SEQ ID NO: 4766114 - DNA, 25 bp, Homo sapien
agggtccaagagctccgcaagggaa

SEQ ID NO: 4766115 - DNA, 25 bp, Homo sapien
aagtcgcgggcatcaccttgagagg

SEQ ID NO: 4766116 - DNA, 25 bp, Homo sapien
ggaagagccactctagctcattgag

SEQ ID NO: 4766117 - DNA, 25 bp, Homo sapien
agagctccgcaagggaagaaacagg

SEQ ID NO: 4766118 - DNA, 25 bp, Homo sapien
tcatgatggcgtggagttcagactt

SEQ ID NO: 4766119 - DNA, 25 bp, Homo sapien
taaatatggtcggaccagcagtgga

SEQ ID NO: 4766120 - DNA, 25 bp, Homo sapien
tccagcaatggtagagaacccggcg

SEQ ID NO: 4766121 - DNA, 25 bp, Homo sapien
tgtatgcacctagcacgcttccagc

SEQ ID NO: 4766122 - DNA, 25 bp, Homo sapien
ggaagagctaccagcctctgaagag

SEQ ID NO: 4766123 - DNA, 25 bp, Homo sapien
aagagacgatccatttcaacagatg

SEQ ID NO: 4766124 - DNA, 25 bp, Homo sapien
tgaagagttgaccagaaacctcaca

SEQ ID NO: 4766125 - DNA, 25 bp, Homo sapien
gaatccggacattgccaatactggg

SEQ ID NO: 4766126 - DNA, 25 bp, Homo sapien
caaatatattgccagaagcaactac

SEQ ID NO: 4766127 - DNA, 25 bp, Homo sapien
gatcccgtagtaactagcatgatcc

SEQ ID NO: 4766128 - DNA, 25 bp, Homo sapien
cagattcaataggagatgatcccgt

SEQ ID NO: 4766129 - DNA, 25 bp, Homo sapien
gcaactacagattcaataggagatg

SEQ ID NO: 4766130 - DNA, 25 bp, Homo sapien
tcagtcccaggtagtacagcatgga

SEQ ID NO: 4766131 - DNA, 25 bp, Homo sapien
tttctaataatccactgcatcagtc

SEQ ID NO: 4766132 - DNA, 25 bp, Homo sapien
gtgctgaagaaaaccacgatcggca

SEQ ID NO: 4766133 - DNA, 25 bp, Homo sapien
tgaagaaaaccacgatcggcaggac

SEQ ID NO: 4766134 - DNA, 25 bp, Homo sapien
ttttattggctttaatgggtaggca

SEQ ID NO: 4766135 - DNA, 25 bp, Homo sapien
tcatctctggaatgttagcagagga

SEQ ID NO: 4766136 - DNA, 25 bp, Homo sapien
gggagttaaagaggctcatctctgg

SEQ ID NO: 4766137 - DNA, 25 bp, Homo sapien
aaagcttgagggagttaaagaggct

SEQ ID NO: 4766138 - DNA, 25 bp, Homo sapien
agcaccagcatctgtgtactccaga

SEQ ID NO: 4766139 - DNA, 25 bp, Homo sapien
agacaaatgaagcaccagcatctgt

SEQ ID NO: 4766140 - DNA, 25 bp, Homo sapien
aaatgaagcaccagcatctgtgtac

SEQ ID NO: 4766141 - DNA, 25 bp, Homo sapien
cttaaatgcaaagaagtggtctttg

SEQ ID NO: 4766142 - DNA, 25 bp, Homo sapien
ctgaacttgtctgcccaaccaatca

SEQ ID NO: 4766143 - DNA, 25 bp, Homo sapien
caagaagaaactgtagcccgattcc

SEQ ID NO: 4766144 - DNA, 25 bp, Homo sapien
tcaaaagctataaatccagggtcag

SEQ ID NO: 4766145 - DNA, 25 bp, Homo sapien
gtcagtccttagaatcaagagccca

SEQ ID NO: 4766146 - DNA, 25 bp, Homo sapien
ataacaggacaatgtacattatgag

SEQ ID NO: 4766147 - DNA, 25 bp, Homo sapien
tctggttgggtacttggaaaataga

SEQ ID NO: 4766148 - DNA, 25 bp, Homo sapien
acaggacaatgtacattatgagccc

SEQ ID NO: 4766149 - DNA, 25 bp, Homo sapien
gaaataacaggacaatgtacattat

SEQ ID NO: 4766150 - DNA, 25 bp, Homo sapien
gacccaatttggcagtgtcaaaggc

SEQ ID NO: 4766151 - DNA, 25 bp, Homo sapien
ccagaaaataactgctaggaccagg

SEQ ID NO: 4766152 - DNA, 25 bp, Homo sapien
ctgctgttgacccaatttggcagtg

SEQ ID NO: 4766153 - DNA, 25 bp, Homo sapien
ggcagtgtcaaaggccaaccagaaa

SEQ ID NO: 4766154 - DNA, 25 bp, Homo sapien
catgacaaatctgactcaggactca

SEQ ID NO: 4766155 - DNA, 25 bp, Homo sapien
gttagggcaagttctggctcctctg

SEQ ID NO: 4766156 - DNA, 25 bp, Homo sapien
cggccgagagggagatcagacgtta

SEQ ID NO: 4766157 - DNA, 25 bp, Homo sapien
caagcatgacaaatctgactcagga

SEQ ID NO: 4766158 - DNA, 25 bp, Homo sapien
ggcttgcacagcagagccagaaagc

SEQ ID NO: 4766159 - DNA, 25 bp, Homo sapien
tgtgtgaattttcctggtagatccc

SEQ ID NO: 4766160 - DNA, 25 bp, Homo sapien
gatcccacgttagtcttgagggaga

SEQ ID NO: 4766161 - DNA, 25 bp, Homo sapien
gtgttgggattgcacaagcccagtt

SEQ ID NO: 4766162 - DNA, 25 bp, Homo sapien
cccagtttaataggccaaggatgtg

SEQ ID NO: 4766163 - DNA, 25 bp, Homo sapien
aagatggcagccacggtgatcacaa

SEQ ID NO: 4766164 - DNA, 25 bp, Homo sapien
tgtgaaagttcagcacacaggccga

SEQ ID NO: 4766165 - DNA, 25 bp, Homo sapien
tcgtatttggccatcaggtgatccc

SEQ ID NO: 4766166 - DNA, 25 bp, Homo sapien
gcatctcatcaattcgatgttcgta

SEQ ID NO: 4766167 - DNA, 25 bp, Homo sapien
tgatgtgccgaagagttgttttgtg

SEQ ID NO: 4766168 - DNA, 25 bp, Homo sapien
gaaaccacatactgtgtcatacctc

SEQ ID NO: 4766169 - DNA, 25 bp, Homo sapien
cagaaaccacatactgtgtcatacc

SEQ ID NO: 4766170 - DNA, 25 bp, Homo sapien
gatgatgtgccgaagagttgttttg

SEQ ID NO: 4766171 - DNA, 25 bp, Homo sapien
tgctcaactgtgacctgttcttcat

SEQ ID NO: 4766172 - DNA, 25 bp, Homo sapien
gaatcctgctcaactgtgacctgtt

SEQ ID NO: 4766173 - DNA, 25 bp, Homo sapien
tcctgctcaactgtgacctgttctt

SEQ ID NO: 4766174 - DNA, 25 bp, Homo sapien
gctcaactgtgacctgttcttcatc

SEQ ID NO: 4766175 - DNA, 25 bp, Homo sapien
gagcagagatggaataatgagcatc

SEQ ID NO: 4766176 - DNA, 25 bp, Homo sapien
tggagcagagatggaataatgagca

SEQ ID NO: 4766177 - DNA, 25 bp, Homo sapien
ggagcagagatggaataatgagcat

SEQ ID NO: 4766178 - DNA, 25 bp, Homo sapien
tccagtctccaataatgtctcaaat

SEQ ID NO: 4766179 - DNA, 25 bp, Homo sapien
tgagtgtgctctaagaagtataatg

SEQ ID NO: 4766180 - DNA, 25 bp, Homo sapien
tgtcatatccaatgtggcctttgat

SEQ ID NO: 4766181 - DNA, 25 bp, Homo sapien
gcctggctcttgtaaccaatggtac

SEQ ID NO: 4766182 - DNA, 25 bp, Homo sapien
tgtttggtgtttgtgtgctccctgc

SEQ ID NO: 4766183 - DNA, 25 bp, Homo sapien
tgatgtgttctcgttctcaagaaag

SEQ ID NO: 4766184 - DNA, 25 bp, Homo sapien
gtttcctgatgtgttctcgttctca

SEQ ID NO: 4766185 - DNA, 25 bp, Homo sapien
tgttctcgttctcaagaaagttttc

SEQ ID NO: 4766186 - DNA, 25 bp, Homo sapien
ttctaattctattaggagattcagc

SEQ ID NO: 4766187 - DNA, 25 bp, Homo sapien
gagattcagcttcttgacgttgatt

SEQ ID NO: 4766188 - DNA, 25 bp, Homo sapien
tcttgacgttgattcctcctgccac

SEQ ID NO: 4766189 - DNA, 25 bp, Homo sapien
taattctattaggagattcagcttc

SEQ ID NO: 4766190 - DNA, 25 bp, Homo sapien
tgtgggtttagaggccaggtaagga

SEQ ID NO: 4766191 - DNA, 25 bp, Homo sapien
tgggtttagaggccaggtaaggagc

SEQ ID NO: 4766192 - DNA, 25 bp, Homo sapien
gtttagaggccaggtaaggagcagc

SEQ ID NO: 4766193 - DNA, 25 bp, Homo sapien
tgtgtgggtttagaggccaggtaag

SEQ ID NO: 4766194 - DNA, 25 bp, Homo sapien
cttcactcatgactctgccagccat

SEQ ID NO: 4766195 - DNA, 25 bp, Homo sapien
agcaatgtgaccacgccttcactca

SEQ ID NO: 4766196 - DNA, 25 bp, Homo sapien
aagctgttctgagagcaatgtgacc

SEQ ID NO: 4766197 - DNA, 25 bp, Homo sapien
tctgagagcaatgtgaccacgcctt

SEQ ID NO: 4766198 - DNA, 25 bp, Homo sapien
tcaggaagcatccatggcccagctt

SEQ ID NO: 4766199 - DNA, 25 bp, Homo sapien
ggaagcatccatggcccagcttctc

SEQ ID NO: 4766200 - DNA, 25 bp, Homo sapien
ctggagtactagctccatgaaaaca

SEQ ID NO: 4766201 - DNA, 25 bp, Homo sapien
ttctctcttataacccatatcactg

SEQ ID NO: 4766202 - DNA, 25 bp, Homo sapien
ctttcccactggagtactagctcca

SEQ ID NO: 4766203 - DNA, 25 bp, Homo sapien
tctcttataacccatatcactgact

SEQ ID NO: 4766204 - DNA, 25 bp, Homo sapien
atccatagatatgcataaccattgc

SEQ ID NO: 4766205 - DNA, 25 bp, Homo sapien
agatatgcataaccattgcacctgc

SEQ ID NO: 4766206 - DNA, 25 bp, Homo sapien
catagatatgcataaccattgcacc

SEQ ID NO: 4766207 - DNA, 25 bp, Homo sapien
caggtaatccatagatatgcataac

SEQ ID NO: 4766208 - DNA, 25 bp, Homo sapien
ttgttgacacttgccggtgcaggct

SEQ ID NO: 4766209 - DNA, 25 bp, Homo sapien
ctccagagcgcccatgctgagtgtc

SEQ ID NO: 4766210 - DNA, 25 bp, Homo sapien
tagcagaccgtaaagtccaagggat

SEQ ID NO: 4766211 - DNA, 25 bp, Homo sapien
tttgttttgcccatctagcagaccg

SEQ ID NO: 4766212 - DNA, 25 bp, Homo sapien
ggaagcccacgttgctgtagccctc

SEQ ID NO: 4766213 - DNA, 25 bp, Homo sapien
gcccacgttgctgtagccctcagct

SEQ ID NO: 4766214 - DNA, 25 bp, Homo sapien
aagcccacgttgctgtagccctcag

SEQ ID NO: 4766215 - DNA, 25 bp, Homo sapien
gaagcccacgttgctgtagccctca

SEQ ID NO: 4766216 - DNA, 25 bp, Homo sapien
tggctctggtctggaggtcctttgt

SEQ ID NO: 4766217 - DNA, 25 bp, Homo sapien
gctggctctggtctggaggtccttt

SEQ ID NO: 4766218 - DNA, 25 bp, Homo sapien
gctctggtctggaggtcctttgtac

SEQ ID NO: 4766219 - DNA, 25 bp, Homo sapien
gctggctggctctggtctggaggtc

SEQ ID NO: 4766220 - DNA, 25 bp, Homo sapien
ttctgcaataatctcctgaatgact

SEQ ID NO: 4766221 - DNA, 25 bp, Homo sapien
aacttctgcaataatctcctgaatg

SEQ ID NO: 4766222 - DNA, 25 bp, Homo sapien
tggaaacttctgcaataatctcctg

SEQ ID NO: 4766223 - DNA, 25 bp, Homo sapien
agaaagccacctgctgttacaggga

SEQ ID NO: 4766224 - DNA, 25 bp, Homo sapien
tccaagtcctccagatctgttctgg

SEQ ID NO: 4766225 - DNA, 25 bp, Homo sapien
ctccagatctgttctggccacagga

SEQ ID NO: 4766226 - DNA, 25 bp, Homo sapien
tcttctttgctcacaaatcttccaa

SEQ ID NO: 4766227 - DNA, 25 bp, Homo sapien
cagatctgttctggccacaggacat

SEQ ID NO: 4766228 - DNA, 25 bp, Homo sapien
ctgttttgatctccggttgccacct

SEQ ID NO: 4766229 - DNA, 25 bp, Homo sapien
ttttgatctccggttgccacctagg

SEQ ID NO: 4766230 - DNA, 25 bp, Homo sapien
tctgttttgatctccggttgccacc

SEQ ID NO: 4766231 - DNA, 25 bp, Homo sapien
tgatctccggttgccacctaggcat

SEQ ID NO: 4766232 - DNA, 25 bp, Homo sapien
tatagtcaatctgttgtgtgatcaa

SEQ ID NO: 4766233 - DNA, 25 bp, Homo sapien
cccgagtggcttataggcatgcacc

SEQ ID NO: 4766234 - DNA, 25 bp, Homo sapien
agtcaatctgttgtgtgatcaaata

SEQ ID NO: 4766235 - DNA, 25 bp, Homo sapien
aactatagtcaatctgttgtgtgat

SEQ ID NO: 4766236 - DNA, 25 bp, Homo sapien
ggttgttcaggtcccaagcgctctt

SEQ ID NO: 4766237 - DNA, 25 bp, Homo sapien
cgctgctggttgttcaggtcccaag

SEQ ID NO: 4766238 - DNA, 25 bp, Homo sapien
ttcaggtcccaagcgctcttcattt

SEQ ID NO: 4766239 - DNA, 25 bp, Homo sapien
ggtatcgctgctggttgttcaggtc

SEQ ID NO: 4766240 - DNA, 25 bp, Homo sapien
taaacatgtgtacgttatgcggatg

SEQ ID NO: 4766241 - DNA, 25 bp, Homo sapien
tagagtgtacagattgcctgggctc

SEQ ID NO: 4766242 - DNA, 25 bp, Homo sapien
gctaaatgacatgtccaggtccctt

SEQ ID NO: 4766243 - DNA, 25 bp, Homo sapien
gctctgagtctgaatccacagctaa

SEQ ID NO: 4766244 - DNA, 25 bp, Homo sapien
cagactggatctgaagagctcatct

SEQ ID NO: 4766245 - DNA, 25 bp, Homo sapien
caagactatttcatacaactctggg

SEQ ID NO: 4766246 - DNA, 25 bp, Homo sapien
tgtctgttgtaacaccctccaggga

SEQ ID NO: 4766247 - DNA, 25 bp, Homo sapien
ttcgacaatgtggagggacacactg

SEQ ID NO: 4766248 - DNA, 25 bp, Homo sapien
ctgcgcctggtcctgtgcctgcgag

SEQ ID NO: 4766249 - DNA, 25 bp, Homo sapien
ctgcgagaagggcaggagcgacctc

SEQ ID NO: 4766250 - DNA, 25 bp, Homo sapien
ctccctgcgcctggtcctgtgcctg

SEQ ID NO: 4766251 - DNA, 25 bp, Homo sapien
cgcctggtcctgtgcctgcgagaag

SEQ ID NO: 4766252 - DNA, 25 bp, Homo sapien
cacatttcaaaagggcgactgcagc

SEQ ID NO: 4766253 - DNA, 25 bp, Homo sapien
cgtccctttggatagacacatttca

SEQ ID NO: 4766254 - DNA, 25 bp, Homo sapien
ggctttcacgtgtgcatttgggaga

SEQ ID NO: 4766255 - DNA, 25 bp, Homo sapien
gtcgagctctctttggagcagaaga

SEQ ID NO: 4766256 - DNA, 25 bp, Homo sapien
acagggcttggactcagtggggctg

SEQ ID NO: 4766257 - DNA, 25 bp, Homo sapien
gctggggcggacttccgctccccca

SEQ ID NO: 4766258 - DNA, 25 bp, Homo sapien
ctggggcggacttccgctcccccat

SEQ ID NO: 4766259 - DNA, 25 bp, Homo sapien
ctgctgaacaccgactgctccccat

SEQ ID NO: 4766260 - DNA, 25 bp, Homo sapien
caatctggttacttcttaaggaagg

SEQ ID NO: 4766261 - DNA, 25 bp, Homo sapien
tgacaatctggttacttcttaagga

SEQ ID NO: 4766262 - DNA, 25 bp, Homo sapien
acatgacaatctggttacttcttaa

SEQ ID NO: 4766263 - DNA, 25 bp, Homo sapien
ggaacacgaacttctctgatggaag

SEQ ID NO: 4766264 - DNA, 25 bp, Homo sapien
ccagttcgctctgtctcgaggcttc

SEQ ID NO: 4766265 - DNA, 25 bp, Homo sapien
cttcagaggaacacgaacttctctg

SEQ ID NO: 4766266 - DNA, 25 bp, Homo sapien
gctctgtctcgaggcttcagaggaa

SEQ ID NO: 4766267 - DNA, 25 bp, Homo sapien
gtctgcaggtaagttccactctgtg

SEQ ID NO: 4766268 - DNA, 25 bp, Homo sapien
aacacaagttgagtttcctgctcag

SEQ ID NO: 4766269 - DNA, 25 bp, Homo sapien
ggagtctgcaggtaagttccactct

SEQ ID NO: 4766270 - DNA, 25 bp, Homo sapien
ttgagtttcctgctcaggagtctgc

SEQ ID NO: 4766271 - DNA, 25 bp, Homo sapien
ttgattcttaagctgctcctcattg

SEQ ID NO: 4766272 - DNA, 25 bp, Homo sapien
tcatcctccgtgcaagcccatttga

SEQ ID NO: 4766273 - DNA, 25 bp, Homo sapien
ccttttcctgtagcatccacaatag

SEQ ID NO: 4766274 - DNA, 25 bp, Homo sapien
aagacaaatgatggtggtaaataca

SEQ ID NO: 4766275 - DNA, 25 bp, Homo sapien
tggctgtagatagtcaccaaggctt

SEQ ID NO: 4766276 - DNA, 25 bp, Homo sapien
gatggggcctagtaaaaccttgcag

SEQ ID NO: 4766277 - DNA, 25 bp, Homo sapien
cttgcaggccgccttgtaaaactgc

SEQ ID NO: 4766278 - DNA, 25 bp, Homo sapien
gtaatgagcgtcaaatactgatggg

SEQ ID NO: 4766279 - DNA, 25 bp, Homo sapien
tcagaagcgtatgtgcttttcataa

SEQ ID NO: 4766280 - DNA, 25 bp, Homo sapien
tattgtttcagaagcgtatgtgctt

SEQ ID NO: 4766281 - DNA, 25 bp, Homo sapien
tggtattgtttcagaagcgtatgtg

SEQ ID NO: 4766282 - DNA, 25 bp, Homo sapien
cagagtggtattgtttcagaagcgt

SEQ ID NO: 4766283 - DNA, 25 bp, Homo sapien
tgagctgcagtaaaaactggaggtc

SEQ ID NO: 4766284 - DNA, 25 bp, Homo sapien
agaatctaaggccatatgagctgca

SEQ ID NO: 4766285 - DNA, 25 bp, Homo sapien
gaatctaaggccatatgagctgcag

SEQ ID NO: 4766286 - DNA, 25 bp, Homo sapien
tgcagtaaaaactggaggtccctga

SEQ ID NO: 4766287 - DNA, 25 bp, Homo sapien
gcaatgaccaacatttccttgcttt

SEQ ID NO: 4766288 - DNA, 25 bp, Homo sapien
ggtgttaatgccacagcaatgacca

SEQ ID NO: 4766289 - DNA, 25 bp, Homo sapien
tcaaggtgttaatgccacagcaatg

SEQ ID NO: 4766290 - DNA, 25 bp, Homo sapien
cacagcaatgaccaacatttccttg

SEQ ID NO: 4766291 - DNA, 25 bp, Homo sapien
tcacatcctcgtagaccaccctcct

SEQ ID NO: 4766292 - DNA, 25 bp, Homo sapien
atcctcgtagaccaccctccttctc

SEQ ID NO: 4766293 - DNA, 25 bp, Homo sapien
gattctgcctttatgcgtcttctct

SEQ ID NO: 4766294 - DNA, 25 bp, Homo sapien
tctgattctgcctttatgcgtcttc

SEQ ID NO: 4766295 - DNA, 25 bp, Homo sapien
tcatctgctccgtgtccagcaagga

SEQ ID NO: 4766296 - DNA, 25 bp, Homo sapien
tctgctccgtgtccagcaaggattc

SEQ ID NO: 4766297 - DNA, 25 bp, Homo sapien
ctgctccgtgtccagcaaggattcc

SEQ ID NO: 4766298 - DNA, 25 bp, Homo sapien
catctgctccgtgtccagcaaggat

SEQ ID NO: 4766299 - DNA, 25 bp, Homo sapien
ggttctggactctcacaccatgtcc

SEQ ID NO: 4766300 - DNA, 25 bp, Homo sapien
tctagtgggcaaggtcagttcctgg

SEQ ID NO: 4766301 - DNA, 25 bp, Homo sapien
ggctatgccccactggattctgaga

SEQ ID NO: 4766302 - DNA, 25 bp, Homo sapien
catgtcctgatgcattgcagccaac

SEQ ID NO: 4766303 - DNA, 25 bp, Homo sapien
tcagattgaagcctgcaaaatgtag

SEQ ID NO: 4766304 - DNA, 25 bp, Homo sapien
tctgcatttggactcttgaaaggcc

SEQ ID NO: 4766305 - DNA, 25 bp, Homo sapien
ggccgttaggaagaggtctgcattt

SEQ ID NO: 4766306 - DNA, 25 bp, Homo sapien
ccttttactgtaattgaagaggccg

SEQ ID NO: 4766307 - DNA, 25 bp, Homo sapien
gctacgtcttcccaattctgtgcgt

SEQ ID NO: 4766308 - DNA, 25 bp, Homo sapien
gtgctacgtcttcccaattctgtgc

SEQ ID NO: 4766309 - DNA, 25 bp, Homo sapien
tgctacgtcttcccaattctgtgcg

SEQ ID NO: 4766310 - DNA, 25 bp, Homo sapien
tgtgctacgtcttcccaattctgtg

SEQ ID NO: 4766311 - DNA, 25 bp, Homo sapien
tctgaggtcttagcctcatggctag

SEQ ID NO: 4766312 - DNA, 25 bp, Homo sapien
ggtcttagcctcatggctagtcttc

SEQ ID NO: 4766313 - DNA, 25 bp, Homo sapien
tagcctcatggctagtcttcttcac

SEQ ID NO: 4766314 - DNA, 25 bp, Homo sapien
gtgctctgaggtcttagcctcatgg

SEQ ID NO: 4766315 - DNA, 25 bp, Homo sapien
ttgccaaaacatcatgtggggattc

SEQ ID NO: 4766316 - DNA, 25 bp, Homo sapien
cctttgaactgctcttgccaaaaca

SEQ ID NO: 4766317 - DNA, 25 bp, Homo sapien
gaagagtcctttgaactgctcttgc

SEQ ID NO: 4766318 - DNA, 25 bp, Homo sapien
gagtcctttgaactgctcttgccaa

SEQ ID NO: 4766319 - DNA, 25 bp, Homo sapien
tgtcagatgctgccaattcttgctc

SEQ ID NO: 4766320 - DNA, 25 bp, Homo sapien
tgccaattcttgctcaatattttaa

SEQ ID NO: 4766321 - DNA, 25 bp, Homo sapien
tcagatgctgccaattcttgctcaa

SEQ ID NO: 4766322 - DNA, 25 bp, Homo sapien
tcttgctcaatattttaacaaacat

SEQ ID NO: 4766323 - DNA, 25 bp, Homo sapien
gagcatctggatttaagatgccaac

SEQ ID NO: 4766324 - DNA, 25 bp, Homo sapien
aagaaagagggatctcatagggaaa

SEQ ID NO: 4766325 - DNA, 25 bp, Homo sapien
tcagggagcatctggatttaagatg

SEQ ID NO: 4766326 - DNA, 25 bp, Homo sapien
gaaagagggatctcatagggaaatg

SEQ ID NO: 4766327 - DNA, 25 bp, Homo sapien
ccagtgtagccatgcacatcagggc

SEQ ID NO: 4766328 - DNA, 25 bp, Homo sapien
tacttctggctttagagtaaaccat

SEQ ID NO: 4766329 - DNA, 25 bp, Homo sapien
cattgaactttgacagcatcctctg

SEQ ID NO: 4766330 - DNA, 25 bp, Homo sapien
tgtagagtgtcagcccaggtgcata

SEQ ID NO: 4766331 - DNA, 25 bp, Homo sapien
tttgaagaacaggaacctttgtctg

SEQ ID NO: 4766332 - DNA, 25 bp, Homo sapien
gattaaaagtgccacaaagaacaaa

SEQ ID NO: 4766333 - DNA, 25 bp, Homo sapien
cacaagtatgccttttgcaagatta

SEQ ID NO: 4766334 - DNA, 25 bp, Homo sapien
tctggaaattccacaagtatgcctt

SEQ ID NO: 4766335 - DNA, 25 bp, Homo sapien
acacccaagtccctggtcaggaact

SEQ ID NO: 4766336 - DNA, 25 bp, Homo sapien
ggtcaggaactgaccctcttccatt

SEQ ID NO: 4766337 - DNA, 25 bp, Homo sapien
gcttgggagtaagggtcagagctgg

SEQ ID NO: 4766338 - DNA, 25 bp, Homo sapien
gaggccagtcagaagaacctgagga

SEQ ID NO: 4766339 - DNA, 25 bp, Homo sapien
ttgctcaggagataggaacttctac

SEQ ID NO: 4766340 - DNA, 25 bp, Homo sapien
tccaagaagtgcaaggttaaagacc

SEQ ID NO: 4766341 - DNA, 25 bp, Homo sapien
aaagctttactgatgtgctcaaggc

SEQ ID NO: 4766342 - DNA, 25 bp, Homo sapien
tggccatctgtttgctcaggagata

SEQ ID NO: 4766343 - DNA, 25 bp, Homo sapien
gtttgcaagatgatagcaaggagga

SEQ ID NO: 4766344 - DNA, 25 bp, Homo sapien
tgcaagatgatagcaaggaggaata

SEQ ID NO: 4766345 - DNA, 25 bp, Homo sapien
agatgatagcaaggaggaataagga

SEQ ID NO: 4766346 - DNA, 25 bp, Homo sapien
gaaattcaacaccaatacttttgtc

SEQ ID NO: 4766347 - DNA, 25 bp, Homo sapien
gctgcctggtcctcggacgcggcca

SEQ ID NO: 4766348 - DNA, 25 bp, Homo sapien
gttccctgaggctgtcccttgagat

SEQ ID NO: 4766349 - DNA, 25 bp, Homo sapien
ttgttctctatctgatgaggttccc

SEQ ID NO: 4766350 - DNA, 25 bp, Homo sapien
tcatttggtcgcttcttgttctcta

SEQ ID NO: 4766351 - DNA, 25 bp, Homo sapien
agccttgtcagtaccactggtggat

SEQ ID NO: 4766352 - DNA, 25 bp, Homo sapien
tgtctggtcctcagacgtggccacc

SEQ ID NO: 4766353 - DNA, 25 bp, Homo sapien
taccactggtggattccaagatgct

SEQ ID NO: 4766354 - DNA, 25 bp, Homo sapien
tggtggattccaagatgctggagat

SEQ ID NO: 4766355 - DNA, 25 bp, Homo sapien
tcagagtcaacgtccaatgaaggag

SEQ ID NO: 4766356 - DNA, 25 bp, Homo sapien
gatgtatctctcttgtcccgcttct

SEQ ID NO: 4766357 - DNA, 25 bp, Homo sapien
ccaatgaaggagcatccaactggcc

SEQ ID NO: 4766358 - DNA, 25 bp, Homo sapien
ctttgtgccaccaatggctctcaca

SEQ ID NO: 4766359 - DNA, 25 bp, Homo sapien
taacctggataagacaatcttggct

SEQ ID NO: 4766360 - DNA, 25 bp, Homo sapien
tcttggctgtactaatcaggtaagt

SEQ ID NO: 4766361 - DNA, 25 bp, Homo sapien
catttcgcaaaggaggagttctact

SEQ ID NO: 4766362 - DNA, 25 bp, Homo sapien
caggtaagtttcacccagttgcagt

SEQ ID NO: 4766363 - DNA, 25 bp, Homo sapien
ttacattacacaggttcgtttctgg

SEQ ID NO: 4766364 - DNA, 25 bp, Homo sapien
gaggggaactcagtgccagagggtt

SEQ ID NO: 4766365 - DNA, 25 bp, Homo sapien
aggaggggaactcagtgccagaggg

SEQ ID NO: 4766366 - DNA, 25 bp, Homo sapien
gggaactcagtgccagagggttgca

SEQ ID NO: 4766367 - DNA, 25 bp, Homo sapien
aactcagtgccagagggttgcacac

SEQ ID NO: 4766368 - DNA, 25 bp, Homo sapien
gatagatgttacttctgctttgttt

SEQ ID NO: 4766369 - DNA, 25 bp, Homo sapien
tgtttcttttgaccgcaactggcca

SEQ ID NO: 4766370 - DNA, 25 bp, Homo sapien
aagggcagttctgtaagtgatagat

SEQ ID NO: 4766371 - DNA, 25 bp, Homo sapien
ttcttttgaccgcaactggccacat

SEQ ID NO: 4766372 - DNA, 25 bp, Homo sapien
aggcccctccaagcggcagggcaag

SEQ ID NO: 4766373 - DNA, 25 bp, Homo sapien
caggcccctccaagcggcagggcaa

SEQ ID NO: 4766374 - DNA, 25 bp, Homo sapien
caagcggcagggcaagtcttttcct

SEQ ID NO: 4766375 - DNA, 25 bp, Homo sapien
cctccaagcggcagggcaagtcttt

SEQ ID NO: 4766376 - DNA, 25 bp, Homo sapien
tacgtgcgtctgagaccaggtcatt

SEQ ID NO: 4766377 - DNA, 25 bp, Homo sapien
caagacaggcggagttttacgtgcg

SEQ ID NO: 4766378 - DNA, 25 bp, Homo sapien
ccttggcgtctcttccttggcgcgt

SEQ ID NO: 4766379 - DNA, 25 bp, Homo sapien
tctccgcttaaggttcactgacaag

SEQ ID NO: 4766380 - DNA, 25 bp, Homo sapien
tcaggagtaaacttcagcctggccg

SEQ ID NO: 4766381 - DNA, 25 bp, Homo sapien
caggagtaaacttcagcctggccgt

SEQ ID NO: 4766382 - DNA, 25 bp, Homo sapien
ggagtaaacttcagcctggccgttc

SEQ ID NO: 4766383 - DNA, 25 bp, Homo sapien
agtaaacttcagcctggccgttcac

SEQ ID NO: 4766384 - DNA, 25 bp, Homo sapien
tgctggccttgctttcgggacctgc

SEQ ID NO: 4766385 - DNA, 25 bp, Homo sapien
tgtccaagaattcccgcggttacac

SEQ ID NO: 4766386 - DNA, 25 bp, Homo sapien
cagtggtgagatagacctgctggcc

SEQ ID NO: 4766387 - DNA, 25 bp, Homo sapien
cgatgtgtgttacagccgagtgaca

SEQ ID NO: 4766388 - DNA, 25 bp, Homo sapien
ggcgccgctggttgcgcatctggcg

SEQ ID NO: 4766389 - DNA, 25 bp, Homo sapien
acgcgcaggcgtcgggcgccgctgg

SEQ ID NO: 4766390 - DNA, 25 bp, Homo sapien
ctggttgcgcatctggcgccagagc

SEQ ID NO: 4766391 - DNA, 25 bp, Homo sapien
cagggacgcgcaggcgtcgggcgcc

SEQ ID NO: 4766392 - DNA, 25 bp, Homo sapien
gaacggttcatcttagaggtacctg

SEQ ID NO: 4766393 - DNA, 25 bp, Homo sapien
tatttttaggatagcttgccctccc

SEQ ID NO: 4766394 - DNA, 25 bp, Homo sapien
gaggtacctggatgtaaatgcacac

SEQ ID NO: 4766395 - DNA, 25 bp, Homo sapien
ggagacagcctctaccgcgattgta

SEQ ID NO: 4766396 - DNA, 25 bp, Homo sapien
gagagactattgaagcatggcaaag

SEQ ID NO: 4766397 - DNA, 25 bp, Homo sapien
cataaactggccttatccctctggc

SEQ ID NO: 4766398 - DNA, 25 bp, Homo sapien
aaaagctatagcgtaggatgtgaca

SEQ ID NO: 4766399 - DNA, 25 bp, Homo sapien
taaaggtcccatataactgggtgcc

SEQ ID NO: 4766400 - DNA, 25 bp, Homo sapien
tgggcctcagcttgtcacatgtaaa

SEQ ID NO: 4766401 - DNA, 25 bp, Homo sapien
cacatgtaaactgagggctttggat

SEQ ID NO: 4766402 - DNA, 25 bp, Homo sapien
gaagcctcggtcacggagataagga

SEQ ID NO: 4766403 - DNA, 25 bp, Homo sapien
ggctttggatttgatgctcagacaa

SEQ ID NO: 4766404 - DNA, 25 bp, Homo sapien
gaagggccctttacagacatctgct

SEQ ID NO: 4766405 - DNA, 25 bp, Homo sapien
acgtgaagggccctttacagacatc

SEQ ID NO: 4766406 - DNA, 25 bp, Homo sapien
tatgtgttgttcgtgttctgctctg

SEQ ID NO: 4766407 - DNA, 25 bp, Homo sapien
ttgcatgaagatttgctcccatggg

SEQ ID NO: 4766408 - DNA, 25 bp, Homo sapien
cactagaatccatgtggtcattacc

SEQ ID NO: 4766409 - DNA, 25 bp, Homo sapien
ctacactagaatccatgtggtcatt

SEQ ID NO: 4766410 - DNA, 25 bp, Homo sapien
actagaatccatgtggtcattacca

SEQ ID NO: 4766411 - DNA, 25 bp, Homo sapien
tacactagaatccatgtggtcatta

SEQ ID NO: 4766412 - DNA, 25 bp, Homo sapien
aggcaatagatactctgttggcaaa

SEQ ID NO: 4766413 - DNA, 25 bp, Homo sapien
caatagatactctgttggcaaagtc

SEQ ID NO: 4766414 - DNA, 25 bp, Homo sapien
atctatacacatacagttcagaagg

SEQ ID NO: 4766415 - DNA, 25 bp, Homo sapien
ctatacacatacagttcagaaggca

SEQ ID NO: 4766416 - DNA, 25 bp, Homo sapien
gagctgccaagtcttcaaagggtgc

SEQ ID NO: 4766417 - DNA, 25 bp, Homo sapien
aaaatggaagcattgaggagcacca

SEQ ID NO: 4766418 - DNA, 25 bp, Homo sapien
tcaaagggtgctccacattgggagc

SEQ ID NO: 4766419 - DNA, 25 bp, Homo sapien
tcactgaagacgtaggagtgcatgt

SEQ ID NO: 4766420 - DNA, 25 bp, Homo sapien
ttcccacaaccgcagcatgattcat

SEQ ID NO: 4766421 - DNA, 25 bp, Homo sapien
cagcatgattcatgtgagagctctt

SEQ ID NO: 4766422 - DNA, 25 bp, Homo sapien
gcagcatgattcatgtgagagctct

SEQ ID NO: 4766423 - DNA, 25 bp, Homo sapien
gggaattcccacaaccgcagcatga

SEQ ID NO: 4766424 - DNA, 25 bp, Homo sapien
ttttatcaaagcgtcagcaaaagca

SEQ ID NO: 4766425 - DNA, 25 bp, Homo sapien
gtttttatcaaagcgtcagcaaaag

SEQ ID NO: 4766426 - DNA, 25 bp, Homo sapien
ctttgtttttatcaaagcgtcagca

SEQ ID NO: 4766427 - DNA, 25 bp, Homo sapien
tatcaaagcgtcagcaaaagcagaa

SEQ ID NO: 4766428 - DNA, 25 bp, Homo sapien
agagaggcagccctgccttagccat

SEQ ID NO: 4766429 - DNA, 25 bp, Homo sapien
atgtcagggagcagctcaacatgtg

SEQ ID NO: 4766430 - DNA, 25 bp, Homo sapien
agctcaacatgtgggctgtttcttg

SEQ ID NO: 4766431 - DNA, 25 bp, Homo sapien
tcagggagcagctcaacatgtgggc

SEQ ID NO: 4766432 - DNA, 25 bp, Homo sapien
ggagcagctcaacatgtgggctgtt

SEQ ID NO: 4766433 - DNA, 25 bp, Homo sapien
caagccaggcatgtgagcttgccag

SEQ ID NO: 4766434 - DNA, 25 bp, Homo sapien
aagccaggcatgtgagcttgccagg

SEQ ID NO: 4766435 - DNA, 25 bp, Homo sapien
aaattacaaggagattaggaagaag

SEQ ID NO: 4766436 - DNA, 25 bp, Homo sapien
tacaaggagattaggaagaagttgc

SEQ ID NO: 4766437 - DNA, 25 bp, Homo sapien
attacaaggagattaggaagaagtt

SEQ ID NO: 4766438 - DNA, 25 bp, Homo sapien
gagagatttaatctatgaaaataca

SEQ ID NO: 4766439 - DNA, 25 bp, Homo sapien
gcaggagccatcacccgaaaatggg

SEQ ID NO: 4766440 - DNA, 25 bp, Homo sapien
ggcaggagccatcacccgaaaatgg

SEQ ID NO: 4766441 - DNA, 25 bp, Homo sapien
tccttgtccgtggccgttggtgcat

SEQ ID NO: 4766442 - DNA, 25 bp, Homo sapien
cgttggtgcatttgcttatatggac

SEQ ID NO: 4766443 - DNA, 25 bp, Homo sapien
ctctgtccacgacagagagcttcat

SEQ ID NO: 4766444 - DNA, 25 bp, Homo sapien
gctctgtccacgacagagagcttca

SEQ ID NO: 4766445 - DNA, 25 bp, Homo sapien
agtcgtttccaggtgaattggtcaa

SEQ ID NO: 4766446 - DNA, 25 bp, Homo sapien
gtagtcgtttccaggtgaattggtc

SEQ ID NO: 4766447 - DNA, 25 bp, Homo sapien
tcgtttccaggtgaattggtcaaaa

SEQ ID NO: 4766448 - DNA, 25 bp, Homo sapien
tagtcgtttccaggtgaattggtca

SEQ ID NO: 4766449 - DNA, 25 bp, Homo sapien
tgggaaacgcgagggctgagtgagg

SEQ ID NO: 4766450 - DNA, 25 bp, Homo sapien
gccctgggctcttgggaaacgcgag

SEQ ID NO: 4766451 - DNA, 25 bp, Homo sapien
gctcttgggaaacgcgagggctgag

SEQ ID NO: 4766452 - DNA, 25 bp, Homo sapien
tgggctcttgggaaacgcgagggct

SEQ ID NO: 4766453 - DNA, 25 bp, Homo sapien
gcaatggtatcagtctttggatgca

SEQ ID NO: 4766454 - DNA, 25 bp, Homo sapien
tctttggatgcattccccatcctct

SEQ ID NO: 4766455 - DNA, 25 bp, Homo sapien
aagtctctgaaatggtagttgttga

SEQ ID NO: 4766456 - DNA, 25 bp, Homo sapien
tgagtcctcggacacttgtcatcag

SEQ ID NO: 4766457 - DNA, 25 bp, Homo sapien
cccagttgccaatgagaagcagtag

SEQ ID NO: 4766458 - DNA, 25 bp, Homo sapien
aaaaatgtgatttcgtactggaagc

SEQ ID NO: 4766459 - DNA, 25 bp, Homo sapien
tgatttcgtactggaagctttggaa

SEQ ID NO: 4766460 - DNA, 25 bp, Homo sapien
ccaatgagaagcagtagatcctgca

SEQ ID NO: 4766461 - DNA, 25 bp, Homo sapien
ttcaattcagttgggttgttgagta

SEQ ID NO: 4766462 - DNA, 25 bp, Homo sapien
caattcagttgggttgttgagtaca

SEQ ID NO: 4766463 - DNA, 25 bp, Homo sapien
tcaattcagttgggttgttgagtac

SEQ ID NO: 4766464 - DNA, 25 bp, Homo sapien
ccttcagctcttggtatttgtgtga

SEQ ID NO: 4766465 - DNA, 25 bp, Homo sapien
tgtgaaaccaaaaatgccttcagct

SEQ ID NO: 4766466 - DNA, 25 bp, Homo sapien
gctcttggtatttgtgtgaggccat

SEQ ID NO: 4766467 - DNA, 25 bp, Homo sapien
tcagctcttggtatttgtgtgaggc

SEQ ID NO: 4766468 - DNA, 25 bp, Homo sapien
gaaaatgtatagatgtgctccctct

SEQ ID NO: 4766469 - DNA, 25 bp, Homo sapien
agaaaatgtatagatgtgctccctc

SEQ ID NO: 4766470 - DNA, 25 bp, Homo sapien
tagaaaatgtatagatgtgctccct

SEQ ID NO: 4766471 - DNA, 25 bp, Homo sapien
caattccgaggctctgagtttagat

SEQ ID NO: 4766472 - DNA, 25 bp, Homo sapien
ggactgacaattccgaggctctgag

SEQ ID NO: 4766473 - DNA, 25 bp, Homo sapien
gtttagatttcagctctctcattca

SEQ ID NO: 4766474 - DNA, 25 bp, Homo sapien
tgccaaagagggactgacaattccg

SEQ ID NO: 4766475 - DNA, 25 bp, Homo sapien
catttgaatgtaagggcagctggcc

SEQ ID NO: 4766476 - DNA, 25 bp, Homo sapien
tagattccgatctttcccaaaggtg

SEQ ID NO: 4766477 - DNA, 25 bp, Homo sapien
tacaaagaggccagctaatagcaga

SEQ ID NO: 4766478 - DNA, 25 bp, Homo sapien
caaaagcagaaacatgccgccagtt

SEQ ID NO: 4766479 - DNA, 25 bp, Homo sapien
gctcctctcctgtgattcccaccat

SEQ ID NO: 4766480 - DNA, 25 bp, Homo sapien
ccagagcccttggagttgcgcagct

SEQ ID NO: 4766481 - DNA, 25 bp, Homo sapien
tttgcatgatttacacctccgcctg

SEQ ID NO: 4766482 - DNA, 25 bp, Homo sapien
tctagcatagggtctctcagggttg

SEQ ID NO: 4766483 - DNA, 25 bp, Homo sapien
cagctggactgaggacaagcaattc

SEQ ID NO: 4766484 - DNA, 25 bp, Homo sapien
tagatcataaatgtacttgctgaat

SEQ ID NO: 4766485 - DNA, 25 bp, Homo sapien
gctgttttaacaatgtagatagatc

SEQ ID NO: 4766486 - DNA, 25 bp, Homo sapien
ttagtgctgttttaacaatgtagat

SEQ ID NO: 4766487 - DNA, 25 bp, Homo sapien
tctgtaaataatggataatcatttt

SEQ ID NO: 4766488 - DNA, 25 bp, Homo sapien
ttagttaaccccagagcacgtttgc

SEQ ID NO: 4766489 - DNA, 25 bp, Homo sapien
gagtgaacttgagggaaaccttgcg

SEQ ID NO: 4766490 - DNA, 25 bp, Homo sapien
gaatccagacatcagaacaaggtgg

SEQ ID NO: 4766491 - DNA, 25 bp, Homo sapien
aatgtgcctgtcctcgaatgtcccg

SEQ ID NO: 4766492 - DNA, 25 bp, Homo sapien
ttaaaagggcttctactacaatcat

SEQ ID NO: 4766493 - DNA, 25 bp, Homo sapien
tcattggttaaaagggcttctacta

SEQ ID NO: 4766494 - DNA, 25 bp, Homo sapien
gttaaaagggcttctactacaatca

SEQ ID NO: 4766495 - DNA, 25 bp, Homo sapien
tattctcatcattgtggagtctgga

SEQ ID NO: 4766496 - DNA, 25 bp, Homo sapien
agctgtatcactccagtcactgcag

SEQ ID NO: 4766497 - DNA, 25 bp, Homo sapien
gcaattatcggcatcctttggcttg

SEQ ID NO: 4766498 - DNA, 25 bp, Homo sapien
ctgagggtctctcttagtttccagg

SEQ ID NO: 4766499 - DNA, 25 bp, Homo sapien
attctcattagatttaaagcctacc

SEQ ID NO: 4766500 - DNA, 25 bp, Homo sapien
gctctgggtgccacgtgggaatcta

SEQ ID NO: 4766501 - DNA, 25 bp, Homo sapien
ttcagggagcttatgttctctgagc

SEQ ID NO: 4766502 - DNA, 25 bp, Homo sapien
gaatctagggctttttgctgccaaa

SEQ ID NO: 4766503 - DNA, 25 bp, Homo sapien
tatgttctctgagcgcaactccagc

SEQ ID NO: 4766504 - DNA, 25 bp, Homo sapien
ggagctaataaatgtcacagcaaga

SEQ ID NO: 4766505 - DNA, 25 bp, Homo sapien
acatagttgttttctaaatacgaag

SEQ ID NO: 4766506 - DNA, 25 bp, Homo sapien
aataattcagaaattgcatttgttt

SEQ ID NO: 4766507 - DNA, 25 bp, Homo sapien
ccagttaactccaaaataattcaga

SEQ ID NO: 4766508 - DNA, 25 bp, Homo sapien
gcatttgttttatgcctaaaaaaca

SEQ ID NO: 4766509 - DNA, 25 bp, Homo sapien
tttgctgcccgggagctatgctgcc

SEQ ID NO: 4766510 - DNA, 25 bp, Homo sapien
tgcccgggagctatgctgccgcctt

SEQ ID NO: 4766511 - DNA, 25 bp, Homo sapien
agagcaatctgtgcattcttcaggc

SEQ ID NO: 4766512 - DNA, 25 bp, Homo sapien
ttcagagcctctagcagatgcagag

SEQ ID NO: 4766513 - DNA, 25 bp, Homo sapien
ttctccagcagaaaccggcatgctc

SEQ ID NO: 4766514 - DNA, 25 bp, Homo sapien
gcaggctcacaggtatctgactgct

SEQ ID NO: 4766515 - DNA, 25 bp, Homo sapien
ttttccacccatagtgctgcttccc

SEQ ID NO: 4766516 - DNA, 25 bp, Homo sapien
ctcacaggtatctgactgctccagg

SEQ ID NO: 4766517 - DNA, 25 bp, Homo sapien
tgatggttggggcttccctccgtat

SEQ ID NO: 4766518 - DNA, 25 bp, Homo sapien
tggttggggcttccctccgtatgac

SEQ ID NO: 4766519 - DNA, 25 bp, Homo sapien
ttggggcttccctccgtatgaccat

SEQ ID NO: 4766520 - DNA, 25 bp, Homo sapien
tttcagtgatggttggggcttccct

SEQ ID NO: 4766521 - DNA, 25 bp, Homo sapien
ctggattcgaatgtggttatgggat

SEQ ID NO: 4766522 - DNA, 25 bp, Homo sapien
cctgactttggctggattcgaatgt

SEQ ID NO: 4766523 - DNA, 25 bp, Homo sapien
tttcctgactttggctggattcgaa

SEQ ID NO: 4766524 - DNA, 25 bp, Homo sapien
ctttggctggattcgaatgtggtta

SEQ ID NO: 4766525 - DNA, 25 bp, Homo sapien
gacttgttagtctcctgcagggcca

SEQ ID NO: 4766526 - DNA, 25 bp, Homo sapien
caaagacttgccctgagtgctaacc

SEQ ID NO: 4766527 - DNA, 25 bp, Homo sapien
caagtgtttgccagactctgcggac

SEQ ID NO: 4766528 - DNA, 25 bp, Homo sapien
gcagggccactaacatcgcttctaa

SEQ ID NO: 4766529 - DNA, 25 bp, Homo sapien
tgacttcttggatggctcatcctcc

SEQ ID NO: 4766530 - DNA, 25 bp, Homo sapien
tctcaagtgccgctttgcagctcat

SEQ ID NO: 4766531 - DNA, 25 bp, Homo sapien
ggactgacttcttggatggctcatc

SEQ ID NO: 4766532 - DNA, 25 bp, Homo sapien
tcctccaccgagagcttctcaagtg

SEQ ID NO: 4766533 - DNA, 25 bp, Homo sapien
gaggacagacaagtactcctctggc

SEQ ID NO: 4766534 - DNA, 25 bp, Homo sapien
tctggctcaccttctacaactcgtt

SEQ ID NO: 4766535 - DNA, 25 bp, Homo sapien
atcttatgagcatcgcagaggacag

SEQ ID NO: 4766536 - DNA, 25 bp, Homo sapien
cagccttgatgcgaatcttatgagc

SEQ ID NO: 4766537 - DNA, 25 bp, Homo sapien
ttcttgcctgtggccgatagttggt

SEQ ID NO: 4766538 - DNA, 25 bp, Homo sapien
tgcctgtggccgatagttggtgatt

SEQ ID NO: 4766539 - DNA, 25 bp, Homo sapien
cttgcctgtggccgatagttggtga

SEQ ID NO: 4766540 - DNA, 25 bp, Homo sapien
gcctgtggccgatagttggtgattg

SEQ ID NO: 4766541 - DNA, 25 bp, Homo sapien
cagctgaaaggttaggtcttgggac

SEQ ID NO: 4766542 - DNA, 25 bp, Homo sapien
gacatgccactagggaagtaagtgc

SEQ ID NO: 4766543 - DNA, 25 bp, Homo sapien
ttctcagctgaaaggttaggtcttg

SEQ ID NO: 4766544 - DNA, 25 bp, Homo sapien
ctgtggacatgccactagggaagta

SEQ ID NO: 4766545 - DNA, 25 bp, Homo sapien
tgaactccttgttgcacctgccaca

SEQ ID NO: 4766546 - DNA, 25 bp, Homo sapien
cagggctctataaaaccaagggtca

SEQ ID NO: 4766547 - DNA, 25 bp, Homo sapien
tttggccggagcattggtgaactcc

SEQ ID NO: 4766548 - DNA, 25 bp, Homo sapien
aaaaggcctgtgagcaagggaccca

SEQ ID NO: 4766549 - DNA, 25 bp, Homo sapien
tgttcttggtacagcatccatatct

SEQ ID NO: 4766550 - DNA, 25 bp, Homo sapien
tgaggctagtgaggaaaggatattc

SEQ ID NO: 4766551 - DNA, 25 bp, Homo sapien
tactgagaatactgtgggcacactg

SEQ ID NO: 4766552 - DNA, 25 bp, Homo sapien
cagaaaccccatgaaaagtactgag

SEQ ID NO: 4766553 - DNA, 25 bp, Homo sapien
tgtgggaaacgacatttacctctgg

SEQ ID NO: 4766554 - DNA, 25 bp, Homo sapien
gagaatgtgggaaacgacatttacc

SEQ ID NO: 4766555 - DNA, 25 bp, Homo sapien
tagctggacccttcaaacaaaggag

SEQ ID NO: 4766556 - DNA, 25 bp, Homo sapien
gcctttggcagattctcgacataca

SEQ ID NO: 4766557 - DNA, 25 bp, Homo sapien
tccagagtccacaacgtgcagtgct

SEQ ID NO: 4766558 - DNA, 25 bp, Homo sapien
tctggcatttgaaatctatcagtcc

SEQ ID NO: 4766559 - DNA, 25 bp, Homo sapien
gtaggtcaagtctacctctgttcca

SEQ ID NO: 4766560 - DNA, 25 bp, Homo sapien
gttccaaggctctccagtgtagttg

SEQ ID NO: 4766561 - DNA, 25 bp, Homo sapien
cactgggccgggcagcttcttggtt

SEQ ID NO: 4766562 - DNA, 25 bp, Homo sapien
gatggagatcattctggtgggatga

SEQ ID NO: 4766563 - DNA, 25 bp, Homo sapien
tctggtgggatgacagcccataagc

SEQ ID NO: 4766564 - DNA, 25 bp, Homo sapien
gacagcccataagcacgtgtgcagt

SEQ ID NO: 4766565 - DNA, 25 bp, Homo sapien
gctccacaatgggggcttctttgca

SEQ ID NO: 4766566 - DNA, 25 bp, Homo sapien
ttgctccacaatgggggcttctttg

SEQ ID NO: 4766567 - DNA, 25 bp, Homo sapien
tgctccacaatgggggcttctttgc

SEQ ID NO: 4766568 - DNA, 25 bp, Homo sapien
gactgacaagtattgttccagcggg

SEQ ID NO: 4766569 - DNA, 25 bp, Homo sapien
aaacattgccgggactgactgacaa

SEQ ID NO: 4766570 - DNA, 25 bp, Homo sapien
gagctgtcagggcaaatcaatccaa

SEQ ID NO: 4766571 - DNA, 25 bp, Homo sapien
gatgtcaaagcgaaggatgtaccgt

SEQ ID NO: 4766572 - DNA, 25 bp, Homo sapien
ttcaacatcgcaaagcagctgctgc

SEQ ID NO: 4766573 - DNA, 25 bp, Homo sapien
gagaaaagcagttggtcagaaactg

SEQ ID NO: 4766574 - DNA, 25 bp, Homo sapien
tgacttccctaacactgagcttcca

SEQ ID NO: 4766575 - DNA, 25 bp, Homo sapien
tacactacagtgacttccctaacac

SEQ ID NO: 4766576 - DNA, 25 bp, Homo sapien
aggcagacatcagtaaccatagcag

SEQ ID NO: 4766577 - DNA, 25 bp, Homo sapien
aaggcagacatcagtaaccatagca

SEQ ID NO: 4766578 - DNA, 25 bp, Homo sapien
gaaggcagacatcagtaaccatagc

SEQ ID NO: 4766579 - DNA, 25 bp, Homo sapien
ggcagacatcagtaaccatagcaga

SEQ ID NO: 4766580 - DNA, 25 bp, Homo sapien
tgtcagcagattccctctcccaaag

SEQ ID NO: 4766581 - DNA, 25 bp, Homo sapien
taccgcaagtcctccaaagcatctg

SEQ ID NO: 4766582 - DNA, 25 bp, Homo sapien
ggaaacaacaggtcctctgtgtatg

SEQ ID NO: 4766583 - DNA, 25 bp, Homo sapien
tggtgagatcattctaccctcatac

SEQ ID NO: 4766584 - DNA, 25 bp, Homo sapien
gtttgagtatcgaccctgagggtga

SEQ ID NO: 4766585 - DNA, 25 bp, Homo sapien
tgtgccacactgattgcagtttgag

SEQ ID NO: 4766586 - DNA, 25 bp, Homo sapien
tactacccacatcctttctggttgg

SEQ ID NO: 4766587 - DNA, 25 bp, Homo sapien
cagacatcaagtaagaccataagag

SEQ ID NO: 4766588 - DNA, 25 bp, Homo sapien
agaacctaccgccacaggactactg

SEQ ID NO: 4766589 - DNA, 25 bp, Homo sapien
cagctgtcaggcatactgtgtagca

SEQ ID NO: 4766590 - DNA, 25 bp, Homo sapien
tctgttcatgggtttgaaatcgggc

SEQ ID NO: 4766591 - DNA, 25 bp, Homo sapien
ggactactgtgcagaaatctgttca

SEQ ID NO: 4766592 - DNA, 25 bp, Homo sapien
gaacatcttttaactgccgctggag

SEQ ID NO: 4766593 - DNA, 25 bp, Homo sapien
aaggcatctccggtctacctggaca

SEQ ID NO: 4766594 - DNA, 25 bp, Homo sapien
cagacgggctgagaggatgaacatc

SEQ ID NO: 4766595 - DNA, 25 bp, Homo sapien
tacctggacattctaggctagggcc

SEQ ID NO: 4766596 - DNA, 25 bp, Homo sapien
caagatggcgcatagtgtgctcgga

SEQ ID NO: 4766597 - DNA, 25 bp, Homo sapien
caaagatggcttccgtgagacacaa

SEQ ID NO: 4766598 - DNA, 25 bp, Homo sapien
tagcactggtttgtttctcaagcgc

SEQ ID NO: 4766599 - DNA, 25 bp, Homo sapien
ccctgaggacctttctgaggagtaa

SEQ ID NO: 4766600 - DNA, 25 bp, Homo sapien
tccctccgacccctaacttccatgc

SEQ ID NO: 4766601 - DNA, 25 bp, Homo sapien
ctccgacccctaacttccatgccca

SEQ ID NO: 4766602 - DNA, 25 bp, Homo sapien
tccgacccctaacttccatgcccac

SEQ ID NO: 4766603 - DNA, 25 bp, Homo sapien
gacactactgctccagacgtcgttt

SEQ ID NO: 4766604 - DNA, 25 bp, Homo sapien
aaattgtgcatggtcttcgtcgatt

SEQ ID NO: 4766605 - DNA, 25 bp, Homo sapien
cgtcgattaataccttgtgtgcaga

SEQ ID NO: 4766606 - DNA, 25 bp, Homo sapien
actgtgcaagcaaaattgtgcatgg

SEQ ID NO: 4766607 - DNA, 25 bp, Homo sapien
catgcactcatgttcagtgtacaca

SEQ ID NO: 4766608 - DNA, 25 bp, Homo sapien
gggcatcacatgcactcatgttcag

SEQ ID NO: 4766609 - DNA, 25 bp, Homo sapien
agtgtacacaggtcaagtcccttgc

SEQ ID NO: 4766610 - DNA, 25 bp, Homo sapien
cttgctctgggctctagttgggaga

SEQ ID NO: 4766611 - DNA, 25 bp, Homo sapien
taaaaggttctatgcaagtgcaaag

SEQ ID NO: 4766612 - DNA, 25 bp, Homo sapien
tttaaagtagctgaacgagccacag

SEQ ID NO: 4766613 - DNA, 25 bp, Homo sapien
aatacggccttccatcaaatttgtg

SEQ ID NO: 4766614 - DNA, 25 bp, Homo sapien
gaagagtggcatcctcgttctaaaa

SEQ ID NO: 4766615 - DNA, 25 bp, Homo sapien
gaaccaatgtcataatcaggcttat

SEQ ID NO: 4766616 - DNA, 25 bp, Homo sapien
tgtgttcacatcagcgctacctgtg

SEQ ID NO: 4766617 - DNA, 25 bp, Homo sapien
taggcacacaataatagaggtaatt

SEQ ID NO: 4766618 - DNA, 25 bp, Homo sapien
taggatgcggtatgaataatttgct

SEQ ID NO: 4766619 - DNA, 25 bp, Homo sapien
tctgttttgaggtccattgctttac

SEQ ID NO: 4766620 - DNA, 25 bp, Homo sapien
ttgaggtccattgctttactaagac

SEQ ID NO: 4766621 - DNA, 25 bp, Homo sapien
cattgctttactaagacccactgca

SEQ ID NO: 4766622 - DNA, 25 bp, Homo sapien
ttgcaatctgttttgaggtccattg

SEQ ID NO: 4766623 - DNA, 25 bp, Homo sapien
tggcctcttctcaaccctctgagag

SEQ ID NO: 4766624 - DNA, 25 bp, Homo sapien
ggcaatagacgctccaaaactcaga

SEQ ID NO: 4766625 - DNA, 25 bp, Homo sapien
ggcaacattcctgccataggcttgg

SEQ ID NO: 4766626 - DNA, 25 bp, Homo sapien
tatttcacagttggatttcccaggg

SEQ ID NO: 4766627 - DNA, 25 bp, Homo sapien
tccaattgtcgatttcactggctcc

SEQ ID NO: 4766628 - DNA, 25 bp, Homo sapien
tgggctccaattgtcgatttcactg

SEQ ID NO: 4766629 - DNA, 25 bp, Homo sapien
agctgtgggctccaattgtcgattt

SEQ ID NO: 4766630 - DNA, 25 bp, Homo sapien
aattgtcgatttcactggctccctg

SEQ ID NO: 4766631 - DNA, 25 bp, Homo sapien
tagcttgacgtaattccagtaggct

SEQ ID NO: 4766632 - DNA, 25 bp, Homo sapien
gagaatagcttgacgtaattccagt

SEQ ID NO: 4766633 - DNA, 25 bp, Homo sapien
cttagagctactgccttgtatatat

SEQ ID NO: 4766634 - DNA, 25 bp, Homo sapien
tagagctactgccttgtatatatac

SEQ ID NO: 4766635 - DNA, 25 bp, Homo sapien
ccataacccagatatcccttccaat

SEQ ID NO: 4766636 - DNA, 25 bp, Homo sapien
cataacccagatatcccttccaatc

SEQ ID NO: 4766637 - DNA, 25 bp, Homo sapien
gtccacagcatgtctaccaagccac

SEQ ID NO: 4766638 - DNA, 25 bp, Homo sapien
taaatgtgaccacaccttcaagggc

SEQ ID NO: 4766639 - DNA, 25 bp, Homo sapien
gcatgtctaccaagccacataaatg

SEQ ID NO: 4766640 - DNA, 25 bp, Homo sapien
cataaatgtgaccacaccttcaagg

SEQ ID NO: 4766641 - DNA, 25 bp, Homo sapien
acttcacgtccaccagaggcctcaa

SEQ ID NO: 4766642 - DNA, 25 bp, Homo sapien
ctggagcaaggcctagatgatggcc

SEQ ID NO: 4766643 - DNA, 25 bp, Homo sapien
gaacttcacgtccaccagaggcctc

SEQ ID NO: 4766644 - DNA, 25 bp, Homo sapien
ggagcaaggcctagatgatggccat

SEQ ID NO: 4766645 - DNA, 25 bp, Homo sapien
aggtgagagccttgccagacatcac

SEQ ID NO: 4766646 - DNA, 25 bp, Homo sapien
taggtgagagccttgccagacatca

SEQ ID NO: 4766647 - DNA, 25 bp, Homo sapien
ctaggtgagagccttgccagacatc

SEQ ID NO: 4766648 - DNA, 25 bp, Homo sapien
tcttctctcaagagtaggatgccct

SEQ ID NO: 4766649 - DNA, 25 bp, Homo sapien
ttccatcaggaaaaatttgatcccc

SEQ ID NO: 4766650 - DNA, 25 bp, Homo sapien
gaatgctccaatggaacctcttcca

SEQ ID NO: 4766651 - DNA, 25 bp, Homo sapien
gtaggatgcccttggtcattagaat

SEQ ID NO: 4766652 - DNA, 25 bp, Homo sapien
tttctagaaatagacatgcagagga

SEQ ID NO: 4766653 - DNA, 25 bp, Homo sapien
caggttctcgtatgttctctgagaa

SEQ ID NO: 4766654 - DNA, 25 bp, Homo sapien
aaatagacatgcagaggaagtttct

SEQ ID NO: 4766655 - DNA, 25 bp, Homo sapien
ttgttacggacatttgcaaacctct

SEQ ID NO: 4766656 - DNA, 25 bp, Homo sapien
ctggtccccaggaccaatcagaaag

SEQ ID NO: 4766657 - DNA, 25 bp, Homo sapien
ggtccccaggaccaatcagaaagaa

SEQ ID NO: 4766658 - DNA, 25 bp, Homo sapien
tggtccccaggaccaatcagaaaga

SEQ ID NO: 4766659 - DNA, 25 bp, Homo sapien
tgtgagtgagtctctgtagactccc

SEQ ID NO: 4766660 - DNA, 25 bp, Homo sapien
agtgagtctctgtagactcccccat

SEQ ID NO: 4766661 - DNA, 25 bp, Homo sapien
tgtgtgagtgagtctctgtagactc

SEQ ID NO: 4766662 - DNA, 25 bp, Homo sapien
gtgagtgagtctctgtagactcccc

SEQ ID NO: 4766663 - DNA, 25 bp, Homo sapien
tgcttgtaagatcaacaaaaacctc

SEQ ID NO: 4766664 - DNA, 25 bp, Homo sapien
ggtaaacgcaggagctctcttccct

SEQ ID NO: 4766665 - DNA, 25 bp, Homo sapien
ccttaggggtaaacgcaggagctct

SEQ ID NO: 4766666 - DNA, 25 bp, Homo sapien
cctccccagaagtaagtgcctgctt

SEQ ID NO: 4766667 - DNA, 25 bp, Homo sapien
gtgagttctaaaatttctgtcactg

SEQ ID NO: 4766668 - DNA, 25 bp, Homo sapien
tttctgtcactggagcagcattgac

SEQ ID NO: 4766669 - DNA, 25 bp, Homo sapien
gtttgtgtgtgagttctaaaatttc

SEQ ID NO: 4766670 - DNA, 25 bp, Homo sapien
tcactggagcagcattgactaattt

SEQ ID NO: 4766671 - DNA, 25 bp, Homo sapien
catcttcagatccctttctccatca

SEQ ID NO: 4766672 - DNA, 25 bp, Homo sapien
cagatccctttctccatcaatgaac

SEQ ID NO: 4766673 - DNA, 25 bp, Homo sapien
cttcagatccctttctccatcaatg

SEQ ID NO: 4766674 - DNA, 25 bp, Homo sapien
tcagatccctttctccatcaatgaa

SEQ ID NO: 4766675 - DNA, 25 bp, Homo sapien
ctgctttggtgctgaaaggcaagtc

SEQ ID NO: 4766676 - DNA, 25 bp, Homo sapien
taaatagcaactagagcgagcctgt

SEQ ID NO: 4766677 - DNA, 25 bp, Homo sapien
tgctcctggaacacactagggtgct

SEQ ID NO: 4766678 - DNA, 25 bp, Homo sapien
gaggtctatcttgttaccccactta

SEQ ID NO: 4766679 - DNA, 25 bp, Homo sapien
tattatcccatctcattagcgtcag

SEQ ID NO: 4766680 - DNA, 25 bp, Homo sapien
ttcaaaggactttcggaacataaca

SEQ ID NO: 4766681 - DNA, 25 bp, Homo sapien
ggacacagttatcagaaactctagc

SEQ ID NO: 4766682 - DNA, 25 bp, Homo sapien
cattgaagtgaaacattagtttctc

SEQ ID NO: 4766683 - DNA, 25 bp, Homo sapien
cattgacaggtaaagaggacacagt

SEQ ID NO: 4766684 - DNA, 25 bp, Homo sapien
gcttctgcaaccagagggacttgca

SEQ ID NO: 4766685 - DNA, 25 bp, Homo sapien
agtttctgtagctcgtggatagaag

SEQ ID NO: 4766686 - DNA, 25 bp, Homo sapien
cttgcttctgcaaccagagggactt

SEQ ID NO: 4766687 - DNA, 25 bp, Homo sapien
gggacttgcaaacactcttctctca

SEQ ID NO: 4766688 - DNA, 25 bp, Homo sapien
gaagttttcaacctgtggacctgct

SEQ ID NO: 4766689 - DNA, 25 bp, Homo sapien
gctgggctgaggcaccgatgataaa

SEQ ID NO: 4766690 - DNA, 25 bp, Homo sapien
tgtttcttgagtctttaatgatgcc

SEQ ID NO: 4766691 - DNA, 25 bp, Homo sapien
gggctttttagaatagatgtgaagt

SEQ ID NO: 4766692 - DNA, 25 bp, Homo sapien
gccagaagcccaccaggcaaggttg

SEQ ID NO: 4766693 - DNA, 25 bp, Homo sapien
ccaggcaaggttggaaagaacctct

SEQ ID NO: 4766694 - DNA, 25 bp, Homo sapien
cagaagcccaccaggcaaggttgga

SEQ ID NO: 4766695 - DNA, 25 bp, Homo sapien
gcccaccaggcaaggttggaaagaa

SEQ ID NO: 4766696 - DNA, 25 bp, Homo sapien
actccctcttgcagaagcacgagcc

SEQ ID NO: 4766697 - DNA, 25 bp, Homo sapien
cactccctcttgcagaagcacgagc

SEQ ID NO: 4766698 - DNA, 25 bp, Homo sapien
tccctcttgcagaagcacgagcctc

SEQ ID NO: 4766699 - DNA, 25 bp, Homo sapien
ctccctcttgcagaagcacgagcct

SEQ ID NO: 4766700 - DNA, 25 bp, Homo sapien
tccccagctctcgatgaaggcagca

SEQ ID NO: 4766701 - DNA, 25 bp, Homo sapien
tagggcataattttccccagctctc

SEQ ID NO: 4766702 - DNA, 25 bp, Homo sapien
tcagtgcagcctacaatgacaggct

SEQ ID NO: 4766703 - DNA, 25 bp, Homo sapien
tgaaattcttcactgctagacaatg

SEQ ID NO: 4766704 - DNA, 25 bp, Homo sapien
tcctactggagatgcaaattctcac

SEQ ID NO: 4766705 - DNA, 25 bp, Homo sapien
aattagaccagctccatcctactgg

SEQ ID NO: 4766706 - DNA, 25 bp, Homo sapien
gactgaaaaagtccaggaacttgca

SEQ ID NO: 4766707 - DNA, 25 bp, Homo sapien
tataatgagaccaatgcctttccca

SEQ ID NO: 4766708 - DNA, 25 bp, Homo sapien
gcaacgttcaaacttctctgctacc

SEQ ID NO: 4766709 - DNA, 25 bp, Homo sapien
tcttttgagcaacgttcaaacttct

SEQ ID NO: 4766710 - DNA, 25 bp, Homo sapien
caaacttctctgctaccttcttgca

SEQ ID NO: 4766711 - DNA, 25 bp, Homo sapien
atgactgtcatcttttgagcaacgt

SEQ ID NO: 4766712 - DNA, 25 bp, Homo sapien
ttgccatggtgacagtgtcctgcat

SEQ ID NO: 4766713 - DNA, 25 bp, Homo sapien
atggtgacagtgtcctgcattgggc

SEQ ID NO: 4766714 - DNA, 25 bp, Homo sapien
tatcctaaattctgctgcagttgcc

SEQ ID NO: 4766715 - DNA, 25 bp, Homo sapien
ctatatcctaaattctgctgcagtt

SEQ ID NO: 4766716 - DNA, 25 bp, Homo sapien
gagtccctggtcttcatcgtttccc

SEQ ID NO: 4766717 - DNA, 25 bp, Homo sapien
tccagcacgcaatgctgagtccctg

SEQ ID NO: 4766718 - DNA, 25 bp, Homo sapien
aagaggtgttcgcttgtctccagca

SEQ ID NO: 4766719 - DNA, 25 bp, Homo sapien
gatggtgattgtattttgggtcccc

SEQ ID NO: 4766720 - DNA, 25 bp, Homo sapien
cgtcagcactttaaagttagaggtc

SEQ ID NO: 4766721 - DNA, 25 bp, Homo sapien
ccttccgtcagcactttaaagttag

SEQ ID NO: 4766722 - DNA, 25 bp, Homo sapien
ctccttccgtcagcactttaaagtt

SEQ ID NO: 4766723 - DNA, 25 bp, Homo sapien
tccgtcagcactttaaagttagagg

SEQ ID NO: 4766724 - DNA, 25 bp, Homo sapien
gctccattgaaatagatgctcacca

SEQ ID NO: 4766725 - DNA, 25 bp, Homo sapien
tgctcaccagaaaatcacaagcttg

SEQ ID NO: 4766726 - DNA, 25 bp, Homo sapien
tgacgcgtgctccattgaaatagat

SEQ ID NO: 4766727 - DNA, 25 bp, Homo sapien
ttggtcctgagcatgacgcgtgctc

SEQ ID NO: 4766728 - DNA, 25 bp, Homo sapien
taactgtgattaggcactccaaggg

SEQ ID NO: 4766729 - DNA, 25 bp, Homo sapien
gacatatggtctaacacggagctgg

SEQ ID NO: 4766730 - DNA, 25 bp, Homo sapien
aagatcactctttcctattcgggag

SEQ ID NO: 4766731 - DNA, 25 bp, Homo sapien
tccaagggttctggagcaaccgggc

SEQ ID NO: 4766732 - DNA, 25 bp, Homo sapien
cggtagcccttcgttatgtgtttct

SEQ ID NO: 4766733 - DNA, 25 bp, Homo sapien
tagcccttcgttatgtgtttcttgg

SEQ ID NO: 4766734 - DNA, 25 bp, Homo sapien
atccccggtagcccttcgttatgtg

SEQ ID NO: 4766735 - DNA, 25 bp, Homo sapien
gcccttcgttatgtgtttcttggct

SEQ ID NO: 4766736 - DNA, 25 bp, Homo sapien
agagcatggttcagtccctggcata

SEQ ID NO: 4766737 - DNA, 25 bp, Homo sapien
taaaactggatgcacaaactcagtc

SEQ ID NO: 4766738 - DNA, 25 bp, Homo sapien
gattctactgcattactcaccacca

SEQ ID NO: 4766739 - DNA, 25 bp, Homo sapien
gaggagtaccatcactctattgagt

SEQ ID NO: 4766740 - DNA, 25 bp, Homo sapien
tagtgagtcttatttcagtgtaata

SEQ ID NO: 4766741 - DNA, 25 bp, Homo sapien
aatagtgagtcttatttcagtgtaa

SEQ ID NO: 4766742 - DNA, 25 bp, Homo sapien
tggatttttagagttcttgtagatg

SEQ ID NO: 4766743 - DNA, 25 bp, Homo sapien
tcagtgtaatagtccacttgatttt

SEQ ID NO: 4766744 - DNA, 25 bp, Homo sapien
tgcccagtttacactcatgcgaggt

SEQ ID NO: 4766745 - DNA, 25 bp, Homo sapien
tctaggagatcgagaagtaacatgc

SEQ ID NO: 4766746 - DNA, 25 bp, Homo sapien
gctgaaagtccgcatgaggtgaacg

SEQ ID NO: 4766747 - DNA, 25 bp, Homo sapien
gggaaagctcactattcctgcccag

SEQ ID NO: 4766748 - DNA, 25 bp, Homo sapien
tacaggtccctcaaccggaaaatgc

SEQ ID NO: 4766749 - DNA, 25 bp, Homo sapien
tcacttgccactggtactctctgag

SEQ ID NO: 4766750 - DNA, 25 bp, Homo sapien
gagatgcgaagagttctgtcctgac

SEQ ID NO: 4766751 - DNA, 25 bp, Homo sapien
ggatcctctgctgggagattctacc

SEQ ID NO: 4766752 - DNA, 25 bp, Homo sapien
ttaagacaacccaggccagtttcat

SEQ ID NO: 4766753 - DNA, 25 bp, Homo sapien
ccagaatttttcttgcacaaagtac

SEQ ID NO: 4766754 - DNA, 25 bp, Homo sapien
cactctccagaatttttcttgcaca

SEQ ID NO: 4766755 - DNA, 25 bp, Homo sapien
tgcacaaagtactttttaagacaac

SEQ ID NO: 4766756 - DNA, 25 bp, Homo sapien
gatgtgactaggtcgtgctccaagc

SEQ ID NO: 4766757 - DNA, 25 bp, Homo sapien
ggatgtgactaggtcgtgctccaag

SEQ ID NO: 4766758 - DNA, 25 bp, Homo sapien
aggatgtgactaggtcgtgctccaa

SEQ ID NO: 4766759 - DNA, 25 bp, Homo sapien
tttccctgcttttgtagcatgctca

SEQ ID NO: 4766760 - DNA, 25 bp, Homo sapien
catgtgtcatctggccgccagtcac

SEQ ID NO: 4766761 - DNA, 25 bp, Homo sapien
tgaccggagacttccatgtgctgtg

SEQ ID NO: 4766762 - DNA, 25 bp, Homo sapien
caggggagtgtcaaacgctgaatgt

SEQ ID NO: 4766763 - DNA, 25 bp, Homo sapien
caggtggcagcacccgacgtgacat

SEQ ID NO: 4766764 - DNA, 25 bp, Homo sapien
cccgacgtgacatggcaaaagcatg

SEQ ID NO: 4766765 - DNA, 25 bp, Homo sapien
tgggctgcgcccatgaatactctcc

SEQ ID NO: 4766766 - DNA, 25 bp, Homo sapien
aagtttgtgggctgcgcccatgaat

SEQ ID NO: 4766767 - DNA, 25 bp, Homo sapien
ccggtcaggaacaagctgctgctat

SEQ ID NO: 4766768 - DNA, 25 bp, Homo sapien
tggccattcggtctccggtcaggaa

SEQ ID NO: 4766769 - DNA, 25 bp, Homo sapien
tttgagagtcacctgttagcaaccg

SEQ ID NO: 4766770 - DNA, 25 bp, Homo sapien
cagacgtgacttagccagatgaaat

SEQ ID NO: 4766771 - DNA, 25 bp, Homo sapien
ctgatgtggtgatcacttctacaca

SEQ ID NO: 4766772 - DNA, 25 bp, Homo sapien
tgatgtggtgatcacttctacacag

SEQ ID NO: 4766773 - DNA, 25 bp, Homo sapien
tcacttctacacaggcttctatcat

SEQ ID NO: 4766774 - DNA, 25 bp, Homo sapien
cacacatttgcacgttctgatgttc

SEQ ID NO: 4766775 - DNA, 25 bp, Homo sapien
catttgcacgttctgatgttcgcat

SEQ ID NO: 4766776 - DNA, 25 bp, Homo sapien
tgtgttcacatcagttgttccttga

SEQ ID NO: 4766777 - DNA, 25 bp, Homo sapien
tttcacacatttgcacgttctgatg

SEQ ID NO: 4766778 - DNA, 25 bp, Homo sapien
aaaatcctaatagttcaggagtctc

SEQ ID NO: 4766779 - DNA, 25 bp, Homo sapien
aatcctaatagttcaggagtctcta

SEQ ID NO: 4766780 - DNA, 25 bp, Homo sapien
cagtatctgactaagagtcacaaaa

SEQ ID NO: 4766781 - DNA, 25 bp, Homo sapien
acaaaaaatcctaatagttcaggag

SEQ ID NO: 4766782 - DNA, 25 bp, Homo sapien
tctagggagagacaatggcacataa

SEQ ID NO: 4766783 - DNA, 25 bp, Homo sapien
catgggttcctttacagctgggctg

SEQ ID NO: 4766784 - DNA, 25 bp, Homo sapien
gcaggataaagcacaggaagggacc

SEQ ID NO: 4766785 - DNA, 25 bp, Homo sapien
tagggtacttagcagacatgggttc

SEQ ID NO: 4766786 - DNA, 25 bp, Homo sapien
tgtccttggagcctcgacgggtctg

SEQ ID NO: 4766787 - DNA, 25 bp, Homo sapien
tatcacacgatggatgggtctggtg

SEQ ID NO: 4766788 - DNA, 25 bp, Homo sapien
agaacctccgcactcctctctgagg

SEQ ID NO: 4766789 - DNA, 25 bp, Homo sapien
tctggaacgtccaaggtggcacctt

SEQ ID NO: 4766790 - DNA, 25 bp, Homo sapien
tatccaaggtaagatgctccaaggt

SEQ ID NO: 4766791 - DNA, 25 bp, Homo sapien
tgcttataataacctgtatccaagg

SEQ ID NO: 4766792 - DNA, 25 bp, Homo sapien
taacctgtatccaaggtaagatgct

SEQ ID NO: 4766793 - DNA, 25 bp, Homo sapien
tcctccttctgcttataataacctg

SEQ ID NO: 4766794 - DNA, 25 bp, Homo sapien
tttggcatagccaaagcagaatctc

SEQ ID NO: 4766795 - DNA, 25 bp, Homo sapien
ccatttctttggcatagccaaagca

SEQ ID NO: 4766796 - DNA, 25 bp, Homo sapien
gagttttttgatgcaagaagtgcag

SEQ ID NO: 4766797 - DNA, 25 bp, Homo sapien
catcccaaaagtgcatctggtcttg

SEQ ID NO: 4766798 - DNA, 25 bp, Homo sapien
ggctgcctccaaatattcacatact

SEQ ID NO: 4766799 - DNA, 25 bp, Homo sapien
gatattctcagtgcctcatctatta

SEQ ID NO: 4766800 - DNA, 25 bp, Homo sapien
tatcgagttactctggagaaagacg

SEQ ID NO: 4766801 - DNA, 25 bp, Homo sapien
gttactctggagaaagacggctgcc

SEQ ID NO: 4766802 - DNA, 25 bp, Homo sapien
aaatgctagccagtttgaaccctgg

SEQ ID NO: 4766803 - DNA, 25 bp, Homo sapien
caaagtcgctttcagaagcttggag

SEQ ID NO: 4766804 - DNA, 25 bp, Homo sapien
ggttggatctggaggtaaaatgcta

SEQ ID NO: 4766805 - DNA, 25 bp, Homo sapien
gggctgacccaatccttacacaagg

SEQ ID NO: 4766806 - DNA, 25 bp, Homo sapien
caaccagcagagaaggaaactgagg

SEQ ID NO: 4766807 - DNA, 25 bp, Homo sapien
agcagagaaggaaactgaggttcat

SEQ ID NO: 4766808 - DNA, 25 bp, Homo sapien
ccagcagagaaggaaactgaggttc

SEQ ID NO: 4766809 - DNA, 25 bp, Homo sapien
accagcagagaaggaaactgaggtt

SEQ ID NO: 4766810 - DNA, 25 bp, Homo sapien
aatgcacccttcagtaaatgccagg

SEQ ID NO: 4766811 - DNA, 25 bp, Homo sapien
gaattgactgactacaaaacaaggg

SEQ ID NO: 4766812 - DNA, 25 bp, Homo sapien
ggtatgttcatatagacactgtagg

SEQ ID NO: 4766813 - DNA, 25 bp, Homo sapien
cactgtaggtagataggtaaaccga

SEQ ID NO: 4766814 - DNA, 25 bp, Homo sapien
cggtggccactgactgagaaaagct

SEQ ID NO: 4766815 - DNA, 25 bp, Homo sapien
aagctatgatgatgggagtcctcac

SEQ ID NO: 4766816 - DNA, 25 bp, Homo sapien
cacatgctctggacagctaaagcca

SEQ ID NO: 4766817 - DNA, 25 bp, Homo sapien
caatcactccctaaacatgcggtgg

SEQ ID NO: 4766818 - DNA, 25 bp, Homo sapien
gcaaatccgatagagctgcaggcac

SEQ ID NO: 4766819 - DNA, 25 bp, Homo sapien
taggatgtgctctcttttgtagatt

SEQ ID NO: 4766820 - DNA, 25 bp, Homo sapien
taggaaaagtcctctgatcctgcag

SEQ ID NO: 4766821 - DNA, 25 bp, Homo sapien
gcaggcacttatgggctgtaggaaa

SEQ ID NO: 4766822 - DNA, 25 bp, Homo sapien
cacagcagaattggtcattaaccat

SEQ ID NO: 4766823 - DNA, 25 bp, Homo sapien
tatagaaacacagcagaattggtca

SEQ ID NO: 4766824 - DNA, 25 bp, Homo sapien
aacacagcagaattggtcattaacc

SEQ ID NO: 4766825 - DNA, 25 bp, Homo sapien
gaaacacagcagaattggtcattaa

SEQ ID NO: 4766826 - DNA, 25 bp, Homo sapien
ctttttggtttagatctgttgctgg

SEQ ID NO: 4766827 - DNA, 25 bp, Homo sapien
ttttcaggcaaatcagggagtcctt

SEQ ID NO: 4766828 - DNA, 25 bp, Homo sapien
ctttttcaggcaaatcagggagtcc

SEQ ID NO: 4766829 - DNA, 25 bp, Homo sapien
tttttcaggcaaatcagggagtcct

SEQ ID NO: 4766830 - DNA, 25 bp, Homo sapien
aaaatgaatgagagtgaccacaagc

SEQ ID NO: 4766831 - DNA, 25 bp, Homo sapien
ctgcataatacaggaggcttctctc

SEQ ID NO: 4766832 - DNA, 25 bp, Homo sapien
tgttcccaacagtccagtgacaaca

SEQ ID NO: 4766833 - DNA, 25 bp, Homo sapien
gttcaatcactcgatcacctcctgt

SEQ ID NO: 4766834 - DNA, 25 bp, Homo sapien
accttccagggattggaggcttctt

SEQ ID NO: 4766835 - DNA, 25 bp, Homo sapien
cttccagggattggaggcttcttcc

SEQ ID NO: 4766836 - DNA, 25 bp, Homo sapien
ccagggattggaggcttcttccttg

SEQ ID NO: 4766837 - DNA, 25 bp, Homo sapien
ctcctccaccttccagggattggag

SEQ ID NO: 4766838 - DNA, 25 bp, Homo sapien
tattccctcttctcagcggtaagga

SEQ ID NO: 4766839 - DNA, 25 bp, Homo sapien
caaggatcctaagttgcaaacacca

SEQ ID NO: 4766840 - DNA, 25 bp, Homo sapien
cagaagagcccactctgttgttgag

SEQ ID NO: 4766841 - DNA, 25 bp, Homo sapien
tgagatgctcatgaaacctttgggt

SEQ ID NO: 4766842 - DNA, 25 bp, Homo sapien
cagagcttttgagttgggcccgtta

SEQ ID NO: 4766843 - DNA, 25 bp, Homo sapien
gagttaaccacgtgtgcagtccgcg

SEQ ID NO: 4766844 - DNA, 25 bp, Homo sapien
taaaacatgcctgcgatcgagaacc

SEQ ID NO: 4766845 - DNA, 25 bp, Homo sapien
gcagtccgcggcttctcagaaagaa

SEQ ID NO: 4766846 - DNA, 25 bp, Homo sapien
tggataactcttcccgcatcggcct

SEQ ID NO: 4766847 - DNA, 25 bp, Homo sapien
gcggcgagcttcctttgcccctaaa

SEQ ID NO: 4766848 - DNA, 25 bp, Homo sapien
attagaaagacgtccctacgccgcg

SEQ ID NO: 4766849 - DNA, 25 bp, Homo sapien
caaaggactacagcaaaggcgcgtt

SEQ ID NO: 4766850 - DNA, 25 bp, Homo sapien
ctccagcccgccagggcccggcttt

SEQ ID NO: 4766851 - DNA, 25 bp, Homo sapien
caggcgccccagctcgcgctctcca

SEQ ID NO: 4766852 - DNA, 25 bp, Homo sapien
gcccggctttggcagacccgaggct

SEQ ID NO: 4766853 - DNA, 25 bp, Homo sapien
ctgtgcgcgcaggagtgacaggcgc

SEQ ID NO: 4766854 - DNA, 25 bp, Homo sapien
taatgatccagtcaattgtcgctgc

SEQ ID NO: 4766855 - DNA, 25 bp, Homo sapien
ggaagtctgtacaaatccttaatga

SEQ ID NO: 4766856 - DNA, 25 bp, Homo sapien
gtacttactgagaactgatgcttag

SEQ ID NO: 4766857 - DNA, 25 bp, Homo sapien
gacgggttgtacttactgagaactg

SEQ ID NO: 4766858 - DNA, 25 bp, Homo sapien
gaaacaatcacttattctctcatat

SEQ ID NO: 4766859 - DNA, 25 bp, Homo sapien
gtctcccacgaggttgcggtggtca

SEQ ID NO: 4766860 - DNA, 25 bp, Homo sapien
tagctggaggttctcacggggtctc

SEQ ID NO: 4766861 - DNA, 25 bp, Homo sapien
gtgcctcgacgtgccagatggctcc

SEQ ID NO: 4766862 - DNA, 25 bp, Homo sapien
tgtgactttctttcttctttgttct

SEQ ID NO: 4766863 - DNA, 25 bp, Homo sapien
cctgtgactttctttcttctttgtt

SEQ ID NO: 4766864 - DNA, 25 bp, Homo sapien
tcctgtgactttctttcttctttgt

SEQ ID NO: 4766865 - DNA, 25 bp, Homo sapien
aaagcagtagggcagaattcgtttc

SEQ ID NO: 4766866 - DNA, 25 bp, Homo sapien
cagaattcgtttcggggaatccttg

SEQ ID NO: 4766867 - DNA, 25 bp, Homo sapien
cagtagggcagaattcgtttcgggg

SEQ ID NO: 4766868 - DNA, 25 bp, Homo sapien
agcagtagggcagaattcgtttcgg

SEQ ID NO: 4766869 - DNA, 25 bp, Homo sapien
ttgatcatcagtaatcccatatcca

SEQ ID NO: 4766870 - DNA, 25 bp, Homo sapien
aggacccatcggctcagggcatttt

SEQ ID NO: 4766871 - DNA, 25 bp, Homo sapien
ctttcctttaggacccatcggctca

SEQ ID NO: 4766872 - DNA, 25 bp, Homo sapien
tcctttaggacccatcggctcaggg

SEQ ID NO: 4766873 - DNA, 25 bp, Homo sapien
gaatccagatctacaggccatgagc

SEQ ID NO: 4766874 - DNA, 25 bp, Homo sapien
ggaaagtcttgtcccttgcgcaggc

SEQ ID NO: 4766875 - DNA, 25 bp, Homo sapien
cggtctggagcaagaaattcgtcct

SEQ ID NO: 4766876 - DNA, 25 bp, Homo sapien
tacacatggccctagagatgcagtg

SEQ ID NO: 4766877 - DNA, 25 bp, Homo sapien
ctcttggagggacaaaaaggaggca

SEQ ID NO: 4766878 - DNA, 25 bp, Homo sapien
caggtgctgacccaacttgaggcgg

SEQ ID NO: 4766879 - DNA, 25 bp, Homo sapien
caaaaaggaggcaccctgcctcaca

SEQ ID NO: 4766880 - DNA, 25 bp, Homo sapien
acccaggtgcgctcccattgatgca

SEQ ID NO: 4766881 - DNA, 25 bp, Homo sapien
ttgatgctcactccgcatggactgg

SEQ ID NO: 4766882 - DNA, 25 bp, Homo sapien
ctttgggtggaaccatgcctctgga

SEQ ID NO: 4766883 - DNA, 25 bp, Homo sapien
tgcctctggaatggacactacaggt

SEQ ID NO: 4766884 - DNA, 25 bp, Homo sapien
cacgctggagtggacatttgctgct

SEQ ID NO: 4766885 - DNA, 25 bp, Homo sapien
caaacattcgggagatcatgcatct

SEQ ID NO: 4766886 - DNA, 25 bp, Homo sapien
caaagaatgctgtaggactcgagtg

SEQ ID NO: 4766887 - DNA, 25 bp, Homo sapien
caggtgtttgctattgcctacccca

SEQ ID NO: 4766888 - DNA, 25 bp, Homo sapien
gactcgagtgtcaaccgcatcttag

SEQ ID NO: 4766889 - DNA, 25 bp, Homo sapien
gacctgggctaaaaccctggctcaa

SEQ ID NO: 4766890 - DNA, 25 bp, Homo sapien
cacaagtggcagagactgatcatac

SEQ ID NO: 4766891 - DNA, 25 bp, Homo sapien
taattaggatccagacaaatgccca

SEQ ID NO: 4766892 - DNA, 25 bp, Homo sapien
caaaaagtcaatgtgaaccataggt

SEQ ID NO: 4766893 - DNA, 25 bp, Homo sapien
caactaactgtatggacatggtggc

SEQ ID NO: 4766894 - DNA, 25 bp, Homo sapien
aaacaaattcatatacagccagccc

SEQ ID NO: 4766895 - DNA, 25 bp, Homo sapien
tggtggctccataatctactctctg

SEQ ID NO: 4766896 - DNA, 25 bp, Homo sapien
taagaggactagttcaacttcacag

SEQ ID NO: 4766897 - DNA, 25 bp, Homo sapien
gatcattcaatgctacataaagtgc

SEQ ID NO: 4766898 - DNA, 25 bp, Homo sapien
taatggtttcaaggcaaaccctgga

SEQ ID NO: 4766899 - DNA, 25 bp, Homo sapien
tccacttgatgcaggatataaccat

SEQ ID NO: 4766900 - DNA, 25 bp, Homo sapien
gaacagtcttatctgcaatatctac

SEQ ID NO: 4766901 - DNA, 25 bp, Homo sapien
tctttgcagttaacaagagatggca

SEQ ID NO: 4766902 - DNA, 25 bp, Homo sapien
cagttaacaagagatggcagcgggc

SEQ ID NO: 4766903 - DNA, 25 bp, Homo sapien
tattctttgcagttaacaagagatg

SEQ ID NO: 4766904 - DNA, 25 bp, Homo sapien
gtctttttgagtcagctctgtataa

SEQ ID NO: 4766905 - DNA, 25 bp, Homo sapien
acttcttcttgagcagaaggttcat

SEQ ID NO: 4766906 - DNA, 25 bp, Homo sapien
tcaaggaatcgaggttcatcttcat

SEQ ID NO: 4766907 - DNA, 25 bp, Homo sapien
aatcaacttcttcaaggaatcgagg

SEQ ID NO: 4766908 - DNA, 25 bp, Homo sapien
aggttcataatctcctacattttca

SEQ ID NO: 4766909 - DNA, 25 bp, Homo sapien
catgtttcttttgaaatataataat

SEQ ID NO: 4766910 - DNA, 25 bp, Homo sapien
gtttcttttgaaatataataattca

SEQ ID NO: 4766911 - DNA, 25 bp, Homo sapien
tcttagagcaatgttggtatcaggt

SEQ ID NO: 4766912 - DNA, 25 bp, Homo sapien
gaaaaagcctagtcttataagctga

SEQ ID NO: 4766913 - DNA, 25 bp, Homo sapien
catgttgactatgagaagaactcca

SEQ ID NO: 4766914 - DNA, 25 bp, Homo sapien
aataagtttagcttccttgacagga

SEQ ID NO: 4766915 - DNA, 25 bp, Homo sapien
tcagataagtttactccttttggct

SEQ ID NO: 4766916 - DNA, 25 bp, Homo sapien
taaataagcagataggagtccaaaa

SEQ ID NO: 4766917 - DNA, 25 bp, Homo sapien
catgattactttgttttaacgccac

SEQ ID NO: 4766918 - DNA, 25 bp, Homo sapien
gccctgtgtacacctgccttaacat

SEQ ID NO: 4766919 - DNA, 25 bp, Homo sapien
cctgactgcaggctactgtttaagt

SEQ ID NO: 4766920 - DNA, 25 bp, Homo sapien
tgtcaggcttaaatggctacagcat

SEQ ID NO: 4766921 - DNA, 25 bp, Homo sapien
ccttagatgattttgcctgactgca

SEQ ID NO: 4766922 - DNA, 25 bp, Homo sapien
gggaagcagcaattaactatgtcac

SEQ ID NO: 4766923 - DNA, 25 bp, Homo sapien
gcacacagttgaattcagttatgac

SEQ ID NO: 4766924 - DNA, 25 bp, Homo sapien
tcccaagaccaccatagggttagtg

SEQ ID NO: 4766925 - DNA, 25 bp, Homo sapien
cctctgggataaccaacctttacag

SEQ ID NO: 4766926 - DNA, 25 bp, Homo sapien
tgcacacatccataaaaggatcata

SEQ ID NO: 4766927 - DNA, 25 bp, Homo sapien
ccagttctcgggtaccaatctgtaa

SEQ ID NO: 4766928 - DNA, 25 bp, Homo sapien
gctggaaggcagattatactccaat

SEQ ID NO: 4766929 - DNA, 25 bp, Homo sapien
ctagttactttgcagcttgattcaa

SEQ ID NO: 4766930 - DNA, 25 bp, Homo sapien
gagaggtcagtcttttcaaacgtaa

SEQ ID NO: 4766931 - DNA, 25 bp, Homo sapien
ccaaactacaacacgtgctgtggat

SEQ ID NO: 4766932 - DNA, 25 bp, Homo sapien
cgatatggctcagtatcttaggcaa

SEQ ID NO: 4766933 - DNA, 25 bp, Homo sapien
cataaagtactctccatggtataac

SEQ ID NO: 4766934 - DNA, 25 bp, Homo sapien
ttttccactacgaagctacagctgc

SEQ ID NO: 4766935 - DNA, 25 bp, Homo sapien
tatcattggtatgccacactgtctc

SEQ ID NO: 4766936 - DNA, 25 bp, Homo sapien
gtatcctccacaacatcacatgaag

SEQ ID NO: 4766937 - DNA, 25 bp, Homo sapien
gatgctgcaaccatacataaataca

SEQ ID NO: 4766938 - DNA, 25 bp, Homo sapien
tcttctttcgggaatggccatgata

SEQ ID NO: 4766939 - DNA, 25 bp, Homo sapien
tggactttgccactgcctattcaaa

SEQ ID NO: 4766940 - DNA, 25 bp, Homo sapien
agtattgcaacagccccttagcatg

SEQ ID NO: 4766941 - DNA, 25 bp, Homo sapien
caagggtaaacgcttcactgcagcc

SEQ ID NO: 4766942 - DNA, 25 bp, Homo sapien
taaattgtaggatgtaaatccggac

SEQ ID NO: 4766943 - DNA, 25 bp, Homo sapien
ctacatgtacataaacacaaagaca

SEQ ID NO: 4766944 - DNA, 25 bp, Homo sapien
catgtacataaacacaaagacagaa

SEQ ID NO: 4766945 - DNA, 25 bp, Homo sapien
ataaacacaaagacagaaaaacact

SEQ ID NO: 4766946 - DNA, 25 bp, Homo sapien
acataaacacaaagacagaaaaaca

SEQ ID NO: 4766947 - DNA, 25 bp, Homo sapien
ttgtgtcacatgcatttaactgtgg

SEQ ID NO: 4766948 - DNA, 25 bp, Homo sapien
tcaattaaagtgctatctaggtgct

SEQ ID NO: 4766949 - DNA, 25 bp, Homo sapien
tggtaagctcaaccaaatgcatact

SEQ ID NO: 4766950 - DNA, 25 bp, Homo sapien
gctatgtgcaagattttgtgtcaca

SEQ ID NO: 4766951 - DNA, 25 bp, Homo sapien
tttcaacaagtttatacaggacaac

SEQ ID NO: 4766952 - DNA, 25 bp, Homo sapien
acaagtttatacaggacaaccacaa

SEQ ID NO: 4766953 - DNA, 25 bp, Homo sapien
gaatatattctacaactattgctta

SEQ ID NO: 4766954 - DNA, 25 bp, Homo sapien
cactaagtttgttaacctggacatt

SEQ ID NO: 4766955 - DNA, 25 bp, Homo sapien
gagatattccaacgttcctttcata

SEQ ID NO: 4766956 - DNA, 25 bp, Homo sapien
caggatgtacccgagcagacaagaa

SEQ ID NO: 4766957 - DNA, 25 bp, Homo sapien
taagattctcgtaagctctgagcag

SEQ ID NO: 4766958 - DNA, 25 bp, Homo sapien
cagacaagaaaacgtaagggcgatt

SEQ ID NO: 4766959 - DNA, 25 bp, Homo sapien
ctttccgaaaatagatttgctgagg

SEQ ID NO: 4766960 - DNA, 25 bp, Homo sapien
cataataattagactctggcattgc

SEQ ID NO: 4766961 - DNA, 25 bp, Homo sapien
gggtttcacataacacatctttccg

SEQ ID NO: 4766962 - DNA, 25 bp, Homo sapien
gcattgctgttatagtcaccaaggg

SEQ ID NO: 4766963 - DNA, 25 bp, Homo sapien
cagtaaatgtaattgtatagtagga

SEQ ID NO: 4766964 - DNA, 25 bp, Homo sapien
ctgtaaagttgaatacgtatatgga

SEQ ID NO: 4766965 - DNA, 25 bp, Homo sapien
agttgaatacgtatatggatagtga

SEQ ID NO: 4766966 - DNA, 25 bp, Homo sapien
aattgacagtaaatgtaattgtata

SEQ ID NO: 4766967 - DNA, 25 bp, Homo sapien
gaaccgaatacatgagtggttgcat

SEQ ID NO: 4766968 - DNA, 25 bp, Homo sapien
aatgtcagtccccatacgaatccac

SEQ ID NO: 4766969 - DNA, 25 bp, Homo sapien
tccaccatggtctggcatttaatgc

SEQ ID NO: 4766970 - DNA, 25 bp, Homo sapien
cttcctgaaccgaatacatgagtgg

SEQ ID NO: 4766971 - DNA, 25 bp, Homo sapien
gatgctgaatgagataaatgtgata

SEQ ID NO: 4766972 - DNA, 25 bp, Homo sapien
cacagctaaaataagtgtcacacta

SEQ ID NO: 4766973 - DNA, 25 bp, Homo sapien
cattttacattttggattccacagc

SEQ ID NO: 4766974 - DNA, 25 bp, Homo sapien
acatacatcaagcaaattcaaacca

SEQ ID NO: 4766975 - DNA, 25 bp, Homo sapien
ggtcgcattccactgacttcaaagt

SEQ ID NO: 4766976 - DNA, 25 bp, Homo sapien
taaaaccactgatgataatgattgc

SEQ ID NO: 4766977 - DNA, 25 bp, Homo sapien
tgttaaacctgtaagcaacacctgg

SEQ ID NO: 4766978 - DNA, 25 bp, Homo sapien
taaactgactgttggacttttcaca

SEQ ID NO: 4766979 - DNA, 25 bp, Homo sapien
tactttgcgcagattcccagactca

SEQ ID NO: 4766980 - DNA, 25 bp, Homo sapien
tatctccctcttctggaatggtgta

SEQ ID NO: 4766981 - DNA, 25 bp, Homo sapien
gattcccagactcaaatttggagtt

SEQ ID NO: 4766982 - DNA, 25 bp, Homo sapien
tttgaattactttgcgcagattccc

SEQ ID NO: 4766983 - DNA, 25 bp, Homo sapien
tttgggttatccaagtcatatacca

SEQ ID NO: 4766984 - DNA, 25 bp, Homo sapien
cacgatctatgatatcactctgatg

SEQ ID NO: 4766985 - DNA, 25 bp, Homo sapien
gtcatataccacacgatctatgata

SEQ ID NO: 4766986 - DNA, 25 bp, Homo sapien
tatcactctgatgtattagcctttc

SEQ ID NO: 4766987 - DNA, 25 bp, Homo sapien
taagcaaaccagaattaccatcctc

SEQ ID NO: 4766988 - DNA, 25 bp, Homo sapien
catttacaatgcattcaggtaggga

SEQ ID NO: 4766989 - DNA, 25 bp, Homo sapien
caaacttctcctacaaagagccaga

SEQ ID NO: 4766990 - DNA, 25 bp, Homo sapien
aaacataagatgcagaagactaggc

SEQ ID NO: 4766991 - DNA, 25 bp, Homo sapien
tcaagggttaactatatttgcaaag

SEQ ID NO: 4766992 - DNA, 25 bp, Homo sapien
ccaaagtactgttgtctattacaca

SEQ ID NO: 4766993 - DNA, 25 bp, Homo sapien
tactggtaaggcttccggccaacag

SEQ ID NO: 4766994 - DNA, 25 bp, Homo sapien
gtgccccaacctctgcattgttcaa

SEQ ID NO: 4766995 - DNA, 25 bp, Homo sapien
tattacctgaaaggtcaagcaagcc

SEQ ID NO: 4766996 - DNA, 25 bp, Homo sapien
ggtggtagtcctcaatctgcataca

SEQ ID NO: 4766997 - DNA, 25 bp, Homo sapien
catcatcaggataggctcagtcagg

SEQ ID NO: 4766998 - DNA, 25 bp, Homo sapien
gacagaggtcaccagagctaagggt

SEQ ID NO: 4766999 - DNA, 25 bp, Homo sapien
tgcaatgtaattcggtccaaggcct

SEQ ID NO: 4767000 - DNA, 25 bp, Homo sapien
cagatgtttcctcgcctgccgtagg

SEQ ID NO: 4767001 - DNA, 25 bp, Homo sapien
tgccgtaggaacaacaataggacca

SEQ ID NO: 4767002 - DNA, 25 bp, Homo sapien
caaccgatgcttgttctaccgatga

SEQ ID NO: 4767003 - DNA, 25 bp, Homo sapien
aaaggtctacgttcaattagaattg

SEQ ID NO: 4767004 - DNA, 25 bp, Homo sapien
gacagatagttctaatgaaataatc

SEQ ID NO: 4767005 - DNA, 25 bp, Homo sapien
aaactgacagatagttctaatgaaa

SEQ ID NO: 4767006 - DNA, 25 bp, Homo sapien
ggtctacgttcaattagaattgcaa

SEQ ID NO: 4767007 - DNA, 25 bp, Homo sapien
caaaagccagctaattgccaacaat

SEQ ID NO: 4767008 - DNA, 25 bp, Homo sapien
taacctcacaactataacctcacaa

SEQ ID NO: 4767009 - DNA, 25 bp, Homo sapien
ttagacactttaagatcctgggcga

SEQ ID NO: 4767010 - DNA, 25 bp, Homo sapien
tcatagacttatccaaggaaccatc

SEQ ID NO: 4767011 - DNA, 25 bp, Homo sapien
aatcatcaacaagctcagggaaaag

SEQ ID NO: 4767012 - DNA, 25 bp, Homo sapien
aaatcatcaacaagctcagggaaaa

SEQ ID NO: 4767013 - DNA, 25 bp, Homo sapien
gatcttctattgttcgtcccggttc

SEQ ID NO: 4767014 - DNA, 25 bp, Homo sapien
atcttctattgttcgtcccggttct

SEQ ID NO: 4767015 - DNA, 25 bp, Homo sapien
tcatggttactctaatataacagag

SEQ ID NO: 4767016 - DNA, 25 bp, Homo sapien
aacttgtgtaaagatcaagactcca

SEQ ID NO: 4767017 - DNA, 25 bp, Homo sapien
aacagagtattctggctactcaaaa

SEQ ID NO: 4767018 - DNA, 25 bp, Homo sapien
taaaacagctaacattaagcactga

SEQ ID NO: 4767019 - DNA, 25 bp, Homo sapien
gtcatcactttcatctactacgtca

SEQ ID NO: 4767020 - DNA, 25 bp, Homo sapien
tcactttcatctactacgtcatcca

SEQ ID NO: 4767021 - DNA, 25 bp, Homo sapien
tctacatcaatatcatcgttgtcat

SEQ ID NO: 4767022 - DNA, 25 bp, Homo sapien
gcttctacatcaatatcatcgttgt

SEQ ID NO: 4767023 - DNA, 25 bp, Homo sapien
tccaaaatgctatgggaaaacgaga

SEQ ID NO: 4767024 - DNA, 25 bp, Homo sapien
tgctgaccacttcacagaataggtg

SEQ ID NO: 4767025 - DNA, 25 bp, Homo sapien
gagcagaaaggagtaaacacgtaat

SEQ ID NO: 4767026 - DNA, 25 bp, Homo sapien
aactaattgtaaactgcttggagac

SEQ ID NO: 4767027 - DNA, 25 bp, Homo sapien
gtgtcctaaacgtaaacaatactgc

SEQ ID NO: 4767028 - DNA, 25 bp, Homo sapien
gataatacttagcttgttcaggaaa

SEQ ID NO: 4767029 - DNA, 25 bp, Homo sapien
gacagtgatctgtaggttgtttcag

SEQ ID NO: 4767030 - DNA, 25 bp, Homo sapien
aaatcttgtcatggcatttactgag

SEQ ID NO: 4767031 - DNA, 25 bp, Homo sapien
tgctctggaaaataaagtgtaggac

SEQ ID NO: 4767032 - DNA, 25 bp, Homo sapien
tgtgtagacaacaaggatgtaaacc

SEQ ID NO: 4767033 - DNA, 25 bp, Homo sapien
cacacagtgacccttgaaaaatgta

SEQ ID NO: 4767034 - DNA, 25 bp, Homo sapien
tctatgaagtcatcaccatttggtg

SEQ ID NO: 4767035 - DNA, 25 bp, Homo sapien
gcagctctcaaattgtatcctttat

SEQ ID NO: 4767036 - DNA, 25 bp, Homo sapien
cttctcttatacctggctctatgca

SEQ ID NO: 4767037 - DNA, 25 bp, Homo sapien
ggctctatgcatcgcttccatttag

SEQ ID NO: 4767038 - DNA, 25 bp, Homo sapien
gagggtggcatacctagagagggca

SEQ ID NO: 4767039 - DNA, 25 bp, Homo sapien
cttcaggaggtaagctgtagagctg

SEQ ID NO: 4767040 - DNA, 25 bp, Homo sapien
gaccagtcacaggaataacaggcaa

SEQ ID NO: 4767041 - DNA, 25 bp, Homo sapien
gccacaggaccagtcacaggaataa

SEQ ID NO: 4767042 - DNA, 25 bp, Homo sapien
gagctgagccacaggaccagtcaca

SEQ ID NO: 4767043 - DNA, 25 bp, Homo sapien
gggaaacacttcctcattatcagac

SEQ ID NO: 4767044 - DNA, 25 bp, Homo sapien
actggaggtattgacaagaggatcc

SEQ ID NO: 4767045 - DNA, 25 bp, Homo sapien
gatccagagtcctgactgccagaca

SEQ ID NO: 4767046 - DNA, 25 bp, Homo sapien
gagtggcagtcgattttttgggaaa

SEQ ID NO: 4767047 - DNA, 25 bp, Homo sapien
caacttgatgtttgtaacacttttt

SEQ ID NO: 4767048 - DNA, 25 bp, Homo sapien
gttaaaagcacttggacatatcctc

SEQ ID NO: 4767049 - DNA, 25 bp, Homo sapien
ttatcatggcggtgccaatctacat

SEQ ID NO: 4767050 - DNA, 25 bp, Homo sapien
tgtctacagctctcctggcatttgt

SEQ ID NO: 4767051 - DNA, 25 bp, Homo sapien
gtttctatgccggttatcatggcgg

SEQ ID NO: 4767052 - DNA, 25 bp, Homo sapien
gattttagcaatgcagcaagagtgt

SEQ ID NO: 4767053 - DNA, 25 bp, Homo sapien
ttgattttagcaatgcagcaagagt

SEQ ID NO: 4767054 - DNA, 25 bp, Homo sapien
ttttagcaatgcagcaagagtgtct

SEQ ID NO: 4767055 - DNA, 25 bp, Homo sapien
tgattttagcaatgcagcaagagtg

SEQ ID NO: 4767056 - DNA, 25 bp, Homo sapien
acatcagttccacaactccattttt

SEQ ID NO: 4767057 - DNA, 25 bp, Homo sapien
tcttcttactaaatggtccaatgat

SEQ ID NO: 4767058 - DNA, 25 bp, Homo sapien
taaatggtccaatgattttaaacat

SEQ ID NO: 4767059 - DNA, 25 bp, Homo sapien
tcttactaaatggtccaatgatttt

SEQ ID NO: 4767060 - DNA, 25 bp, Homo sapien
gaaccaagcgatgattctgcaaatt

SEQ ID NO: 4767061 - DNA, 25 bp, Homo sapien
ccaaattcagggttatattcagagc

SEQ ID NO: 4767062 - DNA, 25 bp, Homo sapien
aatatactcgtaaaagctgaaggca

SEQ ID NO: 4767063 - DNA, 25 bp, Homo sapien
gctgaaggcaaggtagaaccaagcg

SEQ ID NO: 4767064 - DNA, 25 bp, Homo sapien
cacccaccaccacactgggttaatt

SEQ ID NO: 4767065 - DNA, 25 bp, Homo sapien
gcacccaccaccacactgggttaat

SEQ ID NO: 4767066 - DNA, 25 bp, Homo sapien
ggagacgggctttcgccatgttggc

SEQ ID NO: 4767067 - DNA, 25 bp, Homo sapien
tggagacgggctttcgccatgttgg

SEQ ID NO: 4767068 - DNA, 25 bp, Homo sapien
catttgtctagttcaacacacttcc

SEQ ID NO: 4767069 - DNA, 25 bp, Homo sapien
cacatatacatttgtctagttcaac

SEQ ID NO: 4767070 - DNA, 25 bp, Homo sapien
cagaacaccaacacagagttaaaag

SEQ ID NO: 4767071 - DNA, 25 bp, Homo sapien
tcccagaacaccaacacagagttaa

SEQ ID NO: 4767072 - DNA, 25 bp, Homo sapien
gaatctgtaccattaagtcctcatg

SEQ ID NO: 4767073 - DNA, 25 bp, Homo sapien
tgaatctgtaccattaagtcctcat

SEQ ID NO: 4767074 - DNA, 25 bp, Homo sapien
ctaagaaactcactcttcgacctcc

SEQ ID NO: 4767075 - DNA, 25 bp, Homo sapien
taagaaactcactcttcgacctcca

SEQ ID NO: 4767076 - DNA, 25 bp, Homo sapien
aagaaactcactcttcgacctccac

SEQ ID NO: 4767077 - DNA, 25 bp, Homo sapien
caaataaagtgaatacgatacattg

SEQ ID NO: 4767078 - DNA, 25 bp, Homo sapien
ccaaataaagtgaatacgatacatt

SEQ ID NO: 4767079 - DNA, 25 bp, Homo sapien
tacattgttgatcactgtttagaaa

SEQ ID NO: 4767080 - DNA, 25 bp, Homo sapien
taagagtatcggaaaattccaaata

SEQ ID NO: 4767081 - DNA, 25 bp, Homo sapien
aagtgtagtttgaagatcttttgtg

SEQ ID NO: 4767082 - DNA, 25 bp, Homo sapien
gcttaagatattaagtgtagtttga

SEQ ID NO: 4767083 - DNA, 25 bp, Homo sapien
aacaagaatgcttaagatattaagt

SEQ ID NO: 4767084 - DNA, 25 bp, Homo sapien
ttaagtgtagtttgaagatcttttg

SEQ ID NO: 4767085 - DNA, 25 bp, Homo sapien
ggcgtccgccaccacatccaactaa

SEQ ID NO: 4767086 - DNA, 25 bp, Homo sapien
gcgtccgccaccacatccaactaat

SEQ ID NO: 4767087 - DNA, 25 bp, Homo sapien
gttacataattaaagcgtgtcactg

SEQ ID NO: 4767088 - DNA, 25 bp, Homo sapien
gatgctaagacttcctattgaagaa

SEQ ID NO: 4767089 - DNA, 25 bp, Homo sapien
taaagtaacagagcaatctagggag

SEQ ID NO: 4767090 - DNA, 25 bp, Homo sapien
ctttacactggcgtagaaattcaat

SEQ ID NO: 4767091 - DNA, 25 bp, Homo sapien
attcctgtagaacctttggctgtca

SEQ ID NO: 4767092 - DNA, 25 bp, Homo sapien
ttcctgtagaacctttggctgtcat

SEQ ID NO: 4767093 - DNA, 25 bp, Homo sapien
tgatattgactggaattaagtacac

SEQ ID NO: 4767094 - DNA, 25 bp, Homo sapien
tataaagcataagattgtgtaagca

SEQ ID NO: 4767095 - DNA, 25 bp, Homo sapien
tcactccacaactccttctaagaaa

SEQ ID NO: 4767096 - DNA, 25 bp, Homo sapien
ggctcttaatcctgctcttcattca

SEQ ID NO: 4767097 - DNA, 25 bp, Homo sapien
tctcaaaactactgacttcatgatc

SEQ ID NO: 4767098 - DNA, 25 bp, Homo sapien
tttttgtggaaaatcatccattatt

SEQ ID NO: 4767099 - DNA, 25 bp, Homo sapien
gagtcctacgatcctagaattattg

SEQ ID NO: 4767100 - DNA, 25 bp, Homo sapien
ttgatgtaacatatcgggcagtgtc

SEQ ID NO: 4767101 - DNA, 25 bp, Homo sapien
gattctgaaggctcagcattgatct

SEQ ID NO: 4767102 - DNA, 25 bp, Homo sapien
tccagttgagccaggagtcctacga

SEQ ID NO: 4767103 - DNA, 25 bp, Homo sapien
caactaatagatttgttgctgatga

SEQ ID NO: 4767104 - DNA, 25 bp, Homo sapien
gccagacattctcttttcatggaga

SEQ ID NO: 4767105 - DNA, 25 bp, Homo sapien
tgatctaccataatgaccttgacag

SEQ ID NO: 4767106 - DNA, 25 bp, Homo sapien
acctagcctttgccagacattctct

SEQ ID NO: 4767107 - DNA, 25 bp, Homo sapien
ttaagactgctggttgacactaatg

SEQ ID NO: 4767108 - DNA, 25 bp, Homo sapien
agggcagctctaccatttgactaca

SEQ ID NO: 4767109 - DNA, 25 bp, Homo sapien
gagtcagagggtgaacaccagaggg

SEQ ID NO: 4767110 - DNA, 25 bp, Homo sapien
ggttgacactaatgttgagagtcag

SEQ ID NO: 4767111 - DNA, 25 bp, Homo sapien
gctaagttttgtattagagatggtg

SEQ ID NO: 4767112 - DNA, 25 bp, Homo sapien
agttttgtattagagatggtgtttc

SEQ ID NO: 4767113 - DNA, 25 bp, Homo sapien
taagttttgtattagagatggtgtt

SEQ ID NO: 4767114 - DNA, 25 bp, Homo sapien
acccacgctggaggacagtggtgca

SEQ ID NO: 4767115 - DNA, 25 bp, Homo sapien
gtcccagttgcatttggcagccttt

SEQ ID NO: 4767116 - DNA, 25 bp, Homo sapien
aacccagttacagtgagttgtcaaa

SEQ ID NO: 4767117 - DNA, 25 bp, Homo sapien
taattaggcctcacaattgaatggc

SEQ ID NO: 4767118 - DNA, 25 bp, Homo sapien
ttctgagatctgctattctgagccc

SEQ ID NO: 4767119 - DNA, 25 bp, Homo sapien
tctggtatcacttttaacttgctca

SEQ ID NO: 4767120 - DNA, 25 bp, Homo sapien
ttctggtatcacttttaacttgctc

SEQ ID NO: 4767121 - DNA, 25 bp, Homo sapien
ttttctggtatcacttttaacttgc

SEQ ID NO: 4767122 - DNA, 25 bp, Homo sapien
ctggtatcacttttaacttgctcat

SEQ ID NO: 4767123 - DNA, 25 bp, Homo sapien
cttgagttacttcatttcataattg

SEQ ID NO: 4767124 - DNA, 25 bp, Homo sapien
acagggaaaattaggtctgctgaag

SEQ ID NO: 4767125 - DNA, 25 bp, Homo sapien
gacagggaaaattaggtctgctgaa

SEQ ID NO: 4767126 - DNA, 25 bp, Homo sapien
cagacagggaaaattaggtctgctg

SEQ ID NO: 4767127 - DNA, 25 bp, Homo sapien
tcagacagggaaaattaggtctgct

SEQ ID NO: 4767128 - DNA, 25 bp, Homo sapien
catatccgcataaatactcacatgg

SEQ ID NO: 4767129 - DNA, 25 bp, Homo sapien
agaaataaacatctggccgggtacg

SEQ ID NO: 4767130 - DNA, 25 bp, Homo sapien
tttgcttactaaatgcctcccaagt

SEQ ID NO: 4767131 - DNA, 25 bp, Homo sapien
tataatatctaagacttcactggcc

SEQ ID NO: 4767132 - DNA, 25 bp, Homo sapien
gcactccagcctgagagacacagca

SEQ ID NO: 4767133 - DNA, 25 bp, Homo sapien
gcagaggttgcagtttgcagtgagc

SEQ ID NO: 4767134 - DNA, 25 bp, Homo sapien
gagccaagatcatgctacttgcact

SEQ ID NO: 4767135 - DNA, 25 bp, Homo sapien
ttgcactccagcctgagagacacag

SEQ ID NO: 4767136 - DNA, 25 bp, Homo sapien
aaaagcattgcaagggaaaagaatt

SEQ ID NO: 4767137 - DNA, 25 bp, Homo sapien
ggatggttcttctaccaccaggctc

SEQ ID NO: 4767138 - DNA, 25 bp, Homo sapien
cttcaacaaggatggttcttctacc

SEQ ID NO: 4767139 - DNA, 25 bp, Homo sapien
taagctgtgtcagtagacggctctg

SEQ ID NO: 4767140 - DNA, 25 bp, Homo sapien
tgttttcatacaaaccccggtggca

SEQ ID NO: 4767141 - DNA, 25 bp, Homo sapien
gcccgccgcccggtgttttcataca

SEQ ID NO: 4767142 - DNA, 25 bp, Homo sapien
gcggggaccgcgcagagccgcagca

SEQ ID NO: 4767143 - DNA, 25 bp, Homo sapien
cagcacctggatcacggcggatccc

SEQ ID NO: 4767144 - DNA, 25 bp, Homo sapien
ctggaggcggcggaacctgtccgca

SEQ ID NO: 4767145 - DNA, 25 bp, Homo sapien
catcccgggcaacgtcagcgcggcg

SEQ ID NO: 4767146 - DNA, 25 bp, Homo sapien
gaggcggcggaacctgtccgcatcc

SEQ ID NO: 4767147 - DNA, 25 bp, Homo sapien
aacctgtccgcatcccgggcaacgt

SEQ ID NO: 4767148 - DNA, 25 bp, Homo sapien
cagatcccacgtgtatgaagttgaa

SEQ ID NO: 4767149 - DNA, 25 bp, Homo sapien
gatcccacgtgtatgaagttgaaat

SEQ ID NO: 4767150 - DNA, 25 bp, Homo sapien
agatcccacgtgtatgaagttgaaa

SEQ ID NO: 4767151 - DNA, 25 bp, Homo sapien
cgatctcctgtatgttggacaccat

SEQ ID NO: 4767152 - DNA, 25 bp, Homo sapien
ggcacagccctctagcatcgtggga

SEQ ID NO: 4767153 - DNA, 25 bp, Homo sapien
catcgtgggaccttgcatatcctca

SEQ ID NO: 4767154 - DNA, 25 bp, Homo sapien
tgaacgctaccagctcaggctgcaa

SEQ ID NO: 4767155 - DNA, 25 bp, Homo sapien
cagacttaaagaaacgggaggccat

SEQ ID NO: 4767156 - DNA, 25 bp, Homo sapien
gcagacttaaagaaacgggaggcca

SEQ ID NO: 4767157 - DNA, 25 bp, Homo sapien
ccaagaattagaggagctggaagca

SEQ ID NO: 4767158 - DNA, 25 bp, Homo sapien
gagaactacagaccactgctcagca

SEQ ID NO: 4767159 - DNA, 25 bp, Homo sapien
tacagaccactgctcagcaacataa

SEQ ID NO: 4767160 - DNA, 25 bp, Homo sapien
cagcaacataaaagaggacaaaaac

SEQ ID NO: 4767161 - DNA, 25 bp, Homo sapien
gaactacagaccactgctcagcaac

SEQ ID NO: 4767162 - DNA, 25 bp, Homo sapien
gaatgtgcagctccagaccagtaca

SEQ ID NO: 4767163 - DNA, 25 bp, Homo sapien
aatgtgcagctccagaccagtacag

SEQ ID NO: 4767164 - DNA, 25 bp, Homo sapien
tctttggaactggaggtgctgtatg

SEQ ID NO: 4767165 - DNA, 25 bp, Homo sapien
tatctggtaaacttggttccttgag

SEQ ID NO: 4767166 - DNA, 25 bp, Homo sapien
tcagatgtagtgagttcacctggca

SEQ ID NO: 4767167 - DNA, 25 bp, Homo sapien
gaagtaagtcagtattctttggaac

SEQ ID NO: 4767168 - DNA, 25 bp, Homo sapien
gaagataaaatccagcagttggaaa

SEQ ID NO: 4767169 - DNA, 25 bp, Homo sapien
tatagaacaagatggagaaggcatt

SEQ ID NO: 4767170 - DNA, 25 bp, Homo sapien
ttgtagtgtagcctttaccaattga

SEQ ID NO: 4767171 - DNA, 25 bp, Homo sapien
ccagccgggatcataagaagaaact

SEQ ID NO: 4767172 - DNA, 25 bp, Homo sapien
gcaatgagcctcttttcttatgatc

SEQ ID NO: 4767173 - DNA, 25 bp, Homo sapien
tctggaagagggaaactttcttgtg

SEQ ID NO: 4767174 - DNA, 25 bp, Homo sapien
tccctagtcggttccctcaattata

SEQ ID NO: 4767175 - DNA, 25 bp, Homo sapien
atccaagtgggctccggagtgagcc

SEQ ID NO: 4767176 - DNA, 25 bp, Homo sapien
aggtgcccaaagcactcttatgttt

SEQ ID NO: 4767177 - DNA, 25 bp, Homo sapien
tgttccatgaattaaagttgtgagt

SEQ ID NO: 4767178 - DNA, 25 bp, Homo sapien
cactagtagcaagaacagcagagaa

SEQ ID NO: 4767179 - DNA, 25 bp, Homo sapien
tcttatgtttccagggagtaccaaa

SEQ ID NO: 4767180 - DNA, 25 bp, Homo sapien
tcagaagaattaaaatgggcatcca

SEQ ID NO: 4767181 - DNA, 25 bp, Homo sapien
cagaagaattaaaatgggcatccag

SEQ ID NO: 4767182 - DNA, 25 bp, Homo sapien
gaagaattaaaatgggcatccagac

SEQ ID NO: 4767183 - DNA, 25 bp, Homo sapien
ttcagaagaattaaaatgggcatcc

SEQ ID NO: 4767184 - DNA, 25 bp, Homo sapien
tgggcatatgttaggtaatgagaat

SEQ ID NO: 4767185 - DNA, 25 bp, Homo sapien
tttacaaaatctcagtcgactgtca

SEQ ID NO: 4767186 - DNA, 25 bp, Homo sapien
cagaaacagatgataatcagtttac

SEQ ID NO: 4767187 - DNA, 25 bp, Homo sapien
catcccaaattcaggttgtgggaaa

SEQ ID NO: 4767188 - DNA, 25 bp, Homo sapien
aactgtgtcgaaaagaattacgtca

SEQ ID NO: 4767189 - DNA, 25 bp, Homo sapien
tccgccttggaactatcattgcgac

SEQ ID NO: 4767190 - DNA, 25 bp, Homo sapien
cattggatcaatggctgctgattcc

SEQ ID NO: 4767191 - DNA, 25 bp, Homo sapien
tcattgcgacgttccagtcttggag

SEQ ID NO: 4767192 - DNA, 25 bp, Homo sapien
tttctgatgtagtgctgctacagac

SEQ ID NO: 4767193 - DNA, 25 bp, Homo sapien
gggctgtagcaaaaccatcctgaca

SEQ ID NO: 4767194 - DNA, 25 bp, Homo sapien
gacatggatgcttactcagagtcac

SEQ ID NO: 4767195 - DNA, 25 bp, Homo sapien
tccattgtaatgacctgaggaatta

SEQ ID NO: 4767196 - DNA, 25 bp, Homo sapien
gatttgatcatctcacataggaccc

SEQ ID NO: 4767197 - DNA, 25 bp, Homo sapien
cataggacccaaactgtcaccctgt

SEQ ID NO: 4767198 - DNA, 25 bp, Homo sapien
tttctctcattgctagcccctaggg

SEQ ID NO: 4767199 - DNA, 25 bp, Homo sapien
gtcaccctgtgctcaaagactcaag

SEQ ID NO: 4767200 - DNA, 25 bp, Homo sapien
cagggtccaaggagtcggcaaaaat

SEQ ID NO: 4767201 - DNA, 25 bp, Homo sapien
tagattgccactagccattgccttg

SEQ ID NO: 4767202 - DNA, 25 bp, Homo sapien
ccttgttcagtctaggccagtaaag

SEQ ID NO: 4767203 - DNA, 25 bp, Homo sapien
ccacaggtggtgagaacattgatga

SEQ ID NO: 4767204 - DNA, 25 bp, Homo sapien
atccaggattccaatagctctaaga

SEQ ID NO: 4767205 - DNA, 25 bp, Homo sapien
tcatttcccacaatgatccaggatt

SEQ ID NO: 4767206 - DNA, 25 bp, Homo sapien
catttcccacaatgatccaggattc

SEQ ID NO: 4767207 - DNA, 25 bp, Homo sapien
gattccaatagctctaagacagatg

SEQ ID NO: 4767208 - DNA, 25 bp, Homo sapien
tgtagttgcacttcactgtctatcc

SEQ ID NO: 4767209 - DNA, 25 bp, Homo sapien
tgaggggctggattaattttattca

SEQ ID NO: 4767210 - DNA, 25 bp, Homo sapien
catttgcgggctgtagttgcacttc

SEQ ID NO: 4767211 - DNA, 25 bp, Homo sapien
attcattttcatttgcgggctgtag

SEQ ID NO: 4767212 - DNA, 25 bp, Homo sapien
cacagtggtctctccttcataaaca

SEQ ID NO: 4767213 - DNA, 25 bp, Homo sapien
ttcataaacattcagagggaagctc

SEQ ID NO: 4767214 - DNA, 25 bp, Homo sapien
cagtggtctctccttcataaacatt

SEQ ID NO: 4767215 - DNA, 25 bp, Homo sapien
gtggtctctccttcataaacattca

SEQ ID NO: 4767216 - DNA, 25 bp, Homo sapien
tcttgaagtcgaagtgtgaatccat

SEQ ID NO: 4767217 - DNA, 25 bp, Homo sapien
tttaggaccagttgtccatttctac

SEQ ID NO: 4767218 - DNA, 25 bp, Homo sapien
tatatgtctgtcctatgacagactg

SEQ ID NO: 4767219 - DNA, 25 bp, Homo sapien
tatgacagactgtaccacactgtct

SEQ ID NO: 4767220 - DNA, 25 bp, Homo sapien
tggtcatctgcataattgaatcaga

SEQ ID NO: 4767221 - DNA, 25 bp, Homo sapien
gtcatctgcataattgaatcagagt

SEQ ID NO: 4767222 - DNA, 25 bp, Homo sapien
ggtcatctgcataattgaatcagag

SEQ ID NO: 4767223 - DNA, 25 bp, Homo sapien
gtggtcatctgcataattgaatcag

SEQ ID NO: 4767224 - DNA, 25 bp, Homo sapien
atgggatgcgctggaagccagtaca

SEQ ID NO: 4767225 - DNA, 25 bp, Homo sapien
ctgtggggcgtctaatattagttga

SEQ ID NO: 4767226 - DNA, 25 bp, Homo sapien
cagtacagctgggtgccggctctgc

SEQ ID NO: 4767227 - DNA, 25 bp, Homo sapien
ctctgccgtttattagctgtgaggt

SEQ ID NO: 4767228 - DNA, 25 bp, Homo sapien
aactcgggcgctcacgtcaccggcg

SEQ ID NO: 4767229 - DNA, 25 bp, Homo sapien
gtcaccggcgaacctctaaccagcg

SEQ ID NO: 4767230 - DNA, 25 bp, Homo sapien
tgtgaccccgaagaccgtggcgccg

SEQ ID NO: 4767231 - DNA, 25 bp, Homo sapien
cccacgtgaggcgtttggaccctgc

SEQ ID NO: 4767232 - DNA, 25 bp, Homo sapien
cagctctgccgacacttgacccaga

SEQ ID NO: 4767233 - DNA, 25 bp, Homo sapien
ggacccgttagtgcccagcctgtgg

SEQ ID NO: 4767234 - DNA, 25 bp, Homo sapien
tgccgacacttgacccagaccagtc

SEQ ID NO: 4767235 - DNA, 25 bp, Homo sapien
agaccagtcccaacgcccagtgcgg

SEQ ID NO: 4767236 - DNA, 25 bp, Homo sapien
aaatcctagctcactcagttgctgg

SEQ ID NO: 4767237 - DNA, 25 bp, Homo sapien
tctttgaccaggctatcatcggttc

SEQ ID NO: 4767238 - DNA, 25 bp, Homo sapien
tgttaagctgaacccaaggcatggg

SEQ ID NO: 4767239 - DNA, 25 bp, Homo sapien
tgccaggctctgttccgttgaaatg

SEQ ID NO: 4767240 - DNA, 25 bp, Homo sapien
tagccaggatggatgaagttgtatc

SEQ ID NO: 4767241 - DNA, 25 bp, Homo sapien
atatattctgacattaaattctatc

SEQ ID NO: 4767242 - DNA, 25 bp, Homo sapien
tgtgcttattggctgttcataaatc

SEQ ID NO: 4767243 - DNA, 25 bp, Homo sapien
gtctattcaggttctttgtccacat

SEQ ID NO: 4767244 - DNA, 25 bp, Homo sapien
cctggacaaataattgggttagtct

SEQ ID NO: 4767245 - DNA, 25 bp, Homo sapien
ctcccaggcaagaggggcgatcttg

SEQ ID NO: 4767246 - DNA, 25 bp, Homo sapien
tctggaagaattggacctggacaaa

SEQ ID NO: 4767247 - DNA, 25 bp, Homo sapien
taataaatgttttgttcacatggct

SEQ ID NO: 4767248 - DNA, 25 bp, Homo sapien
tcagcaaaagaaattatcaataaac

SEQ ID NO: 4767249 - DNA, 25 bp, Homo sapien
gctcagcaaaagaaattatcaataa

SEQ ID NO: 4767250 - DNA, 25 bp, Homo sapien
aacttctgctcagcaaaagaaatta

SEQ ID NO: 4767251 - DNA, 25 bp, Homo sapien
agaacttctgctcagcaaaagaaat

SEQ ID NO: 4767252 - DNA, 25 bp, Homo sapien
ataacagatgttggcgatatttctg

SEQ ID NO: 4767253 - DNA, 25 bp, Homo sapien
aaagaagatgtacaagcagccaaca

SEQ ID NO: 4767254 - DNA, 25 bp, Homo sapien
atgggggggcggcgaaggacatgaa

SEQ ID NO: 4767255 - DNA, 25 bp, Homo sapien
gaatggttatgattaaaaagttaga

SEQ ID NO: 4767256 - DNA, 25 bp, Homo sapien
tgtggtcactgactagttgaacttc

SEQ ID NO: 4767257 - DNA, 25 bp, Homo sapien
actgactagttgaacttcagatgcc

SEQ ID NO: 4767258 - DNA, 25 bp, Homo sapien
ttcagatgcctgagctagcaggctt

SEQ ID NO: 4767259 - DNA, 25 bp, Homo sapien
gcaggcttccacaaagatgaatgaa

SEQ ID NO: 4767260 - DNA, 25 bp, Homo sapien
tctgttgttaataatccagccgtgg

SEQ ID NO: 4767261 - DNA, 25 bp, Homo sapien
ctggagctacctggcaatgccaagg

SEQ ID NO: 4767262 - DNA, 25 bp, Homo sapien
tgtgctcctcaccttgctcatgtaa

SEQ ID NO: 4767263 - DNA, 25 bp, Homo sapien
ccagccgtggttatggctatttctt

SEQ ID NO: 4767264 - DNA, 25 bp, Homo sapien
caaggtggccgagctgatcaccaac

SEQ ID NO: 4767265 - DNA, 25 bp, Homo sapien
ggtggccgagctgatcaccaactca

SEQ ID NO: 4767266 - DNA, 25 bp, Homo sapien
tccaaggtggccgagctgatcacca

SEQ ID NO: 4767267 - DNA, 25 bp, Homo sapien
ggccgagctgatcaccaactcactg

SEQ ID NO: 4767268 - DNA, 25 bp, Homo sapien
agcttttacgctctcggaacatcac

SEQ ID NO: 4767269 - DNA, 25 bp, Homo sapien
cagcttttacgctctcggaacatca

SEQ ID NO: 4767270 - DNA, 25 bp, Homo sapien
ccagcttttacgctctcggaacatc

SEQ ID NO: 4767271 - DNA, 25 bp, Homo sapien
tcgtgctcgcaaccactaaggtcta

SEQ ID NO: 4767272 - DNA, 25 bp, Homo sapien
ccaggactccgacagagggtgaaaa

SEQ ID NO: 4767273 - DNA, 25 bp, Homo sapien
aaaagataacttccggtctcgcgat

SEQ ID NO: 4767274 - DNA, 25 bp, Homo sapien
taatctcgcgagaagagaaggcggc

SEQ ID NO: 4767275 - DNA, 25 bp, Homo sapien
cccaactagtaatctaaaagctggt

SEQ ID NO: 4767276 - DNA, 25 bp, Homo sapien
gctggttaaatcattatggagcatc

SEQ ID NO: 4767277 - DNA, 25 bp, Homo sapien
catcactgtgtgctatgcccactac

SEQ ID NO: 4767278 - DNA, 25 bp, Homo sapien
gaggtgaaccaaagtagtatatgct

SEQ ID NO: 4767279 - DNA, 25 bp, Homo sapien
gaatctctatgatctttggtcctga

SEQ ID NO: 4767280 - DNA, 25 bp, Homo sapien
gacacttaggcttattgatcacttg

SEQ ID NO: 4767281 - DNA, 25 bp, Homo sapien
tcactgggccgaggctttctgtagg

SEQ ID NO: 4767282 - DNA, 25 bp, Homo sapien
gttctgagattctgtcctcacctca

SEQ ID NO: 4767283 - DNA, 25 bp, Homo sapien
gatcttcggcagagtagttcttccc

SEQ ID NO: 4767284 - DNA, 25 bp, Homo sapien
gatcactgggagcataactgtttca

SEQ ID NO: 4767285 - DNA, 25 bp, Homo sapien
gaaatcatgaccaaggtgatcactg

SEQ ID NO: 4767286 - DNA, 25 bp, Homo sapien
cattttgccctgaatttggtggcac

SEQ ID NO: 4767287 - DNA, 25 bp, Homo sapien
ggctgcatcttagttgtccccttca

SEQ ID NO: 4767288 - DNA, 25 bp, Homo sapien
gctgcatcttagttgtccccttcac

SEQ ID NO: 4767289 - DNA, 25 bp, Homo sapien
aaggctgcatcttagttgtcccctt

SEQ ID NO: 4767290 - DNA, 25 bp, Homo sapien
aggctgcatcttagttgtccccttc

SEQ ID NO: 4767291 - DNA, 25 bp, Homo sapien
tatacattgtttgctggtgacatgc

SEQ ID NO: 4767292 - DNA, 25 bp, Homo sapien
gaactgaagaaggtgtatgctcttt

SEQ ID NO: 4767293 - DNA, 25 bp, Homo sapien
tgagtagttccaaaaacgttatcca

SEQ ID NO: 4767294 - DNA, 25 bp, Homo sapien
gaaaaacagtaggtctttgtccatg

SEQ ID NO: 4767295 - DNA, 25 bp, Homo sapien
cctgtgcttgcaagtgcctgctgcc

SEQ ID NO: 4767296 - DNA, 25 bp, Homo sapien
ggcttagcctaagactagtgacagt

SEQ ID NO: 4767297 - DNA, 25 bp, Homo sapien
ggtggcagctttctaggcctcttgg

SEQ ID NO: 4767298 - DNA, 25 bp, Homo sapien
tgctctgatgtttgcggtggcagct

SEQ ID NO: 4767299 - DNA, 25 bp, Homo sapien
tgactgaacttgctaagggtgttcc

SEQ ID NO: 4767300 - DNA, 25 bp, Homo sapien
tctttgcagctaatgagccctcttg

SEQ ID NO: 4767301 - DNA, 25 bp, Homo sapien
tacttgtgttattcaagaacagcca

SEQ ID NO: 4767302 - DNA, 25 bp, Homo sapien
tctcctttccaagagcggtaatact

SEQ ID NO: 4767303 - DNA, 25 bp, Homo sapien
gaggcaaggagaagccgatacccaa

SEQ ID NO: 4767304 - DNA, 25 bp, Homo sapien
actgccccacgtgaaactttaggtg

SEQ ID NO: 4767305 - DNA, 25 bp, Homo sapien
tatgcagggacatgatgggatcaag

SEQ ID NO: 4767306 - DNA, 25 bp, Homo sapien
aggcactgctgggaaaagggtccca

SEQ ID NO: 4767307 - DNA, 25 bp, Homo sapien
tctcagcaattctatgcgtacaaat

SEQ ID NO: 4767308 - DNA, 25 bp, Homo sapien
tgactaaggacatcacatatgaaga

SEQ ID NO: 4767309 - DNA, 25 bp, Homo sapien
agagaaaattcctatcaaccccaag

SEQ ID NO: 4767310 - DNA, 25 bp, Homo sapien
tctaagttgccttttctgggtggga

SEQ ID NO: 4767311 - DNA, 25 bp, Homo sapien
gcaacgtgaattgcaaacagggcct

SEQ ID NO: 4767312 - DNA, 25 bp, Homo sapien
tggcaacgtgaattgcaaacagggc

SEQ ID NO: 4767313 - DNA, 25 bp, Homo sapien
ggcaacgtgaattgcaaacagggcc

SEQ ID NO: 4767314 - DNA, 25 bp, Homo sapien
gtggcaacgtgaattgcaaacaggg

SEQ ID NO: 4767315 - DNA, 25 bp, Homo sapien
agcgcaccagctagatgctctgtaa

SEQ ID NO: 4767316 - DNA, 25 bp, Homo sapien
gggtgccagcgcaccagctagatgc

SEQ ID NO: 4767317 - DNA, 25 bp, Homo sapien
gatgctctgtaacttctaggcccca

SEQ ID NO: 4767318 - DNA, 25 bp, Homo sapien
ccagctagatgctctgtaacttcta

SEQ ID NO: 4767319 - DNA, 25 bp, Homo sapien
taataaagtaggcacagatctgtcc

SEQ ID NO: 4767320 - DNA, 25 bp, Homo sapien
aacaaacttgccctctcatgccttg

SEQ ID NO: 4767321 - DNA, 25 bp, Homo sapien
cagtcattaatgatgtggccagtta

SEQ ID NO: 4767322 - DNA, 25 bp, Homo sapien
cttaccccttagagagccttactgg

SEQ ID NO: 4767323 - DNA, 25 bp, Homo sapien
acttggtacagcacgtggacaggac

SEQ ID NO: 4767324 - DNA, 25 bp, Homo sapien
tagccagacttttcagtgagaacag

SEQ ID NO: 4767325 - DNA, 25 bp, Homo sapien
taacagtcagtgctctaggccattg

SEQ ID NO: 4767326 - DNA, 25 bp, Homo sapien
tgactacacaagagcattagccaga

SEQ ID NO: 4767327 - DNA, 25 bp, Homo sapien
ttccagaatcaggaagccccgctgt

SEQ ID NO: 4767328 - DNA, 25 bp, Homo sapien
taatttacacaaagttatattccag

SEQ ID NO: 4767329 - DNA, 25 bp, Homo sapien
ggagaactatgttccagttttggtg

SEQ ID NO: 4767330 - DNA, 25 bp, Homo sapien
cccgctgtcgccaacacttgaagga

SEQ ID NO: 4767331 - DNA, 25 bp, Homo sapien
acacaaagtgcatactaaaatttca

SEQ ID NO: 4767332 - DNA, 25 bp, Homo sapien
tgtgacaccttattagacacttcca

SEQ ID NO: 4767333 - DNA, 25 bp, Homo sapien
aagctgtttaaaagaccattccatt

SEQ ID NO: 4767334 - DNA, 25 bp, Homo sapien
acaaagtgcatactaaaatttcaca

SEQ ID NO: 4767335 - DNA, 25 bp, Homo sapien
tagtcatctcttcggccctgttgtg

SEQ ID NO: 4767336 - DNA, 25 bp, Homo sapien
cagttttcagtattcagtccctcat

SEQ ID NO: 4767337 - DNA, 25 bp, Homo sapien
gtattcagtccctcatgaacatttt

SEQ ID NO: 4767338 - DNA, 25 bp, Homo sapien
ccctgttgtgaaatatgtgattcca

SEQ ID NO: 4767339 - DNA, 25 bp, Homo sapien
gctgatcaagtaaatttatggtgtc

SEQ ID NO: 4767340 - DNA, 25 bp, Homo sapien
ccgcttttcacgctgatcaagtaaa

SEQ ID NO: 4767341 - DNA, 25 bp, Homo sapien
tcagagtgtatgattccgcttttca

SEQ ID NO: 4767342 - DNA, 25 bp, Homo sapien
tgtatgattccgcttttcacgctga

SEQ ID NO: 4767343 - DNA, 25 bp, Homo sapien
taaatgagatactagccctaggcag

SEQ ID NO: 4767344 - DNA, 25 bp, Homo sapien
gaaattcggccaaggacagtaggag

SEQ ID NO: 4767345 - DNA, 25 bp, Homo sapien
gaagaacacatcgaaagacgctggc

SEQ ID NO: 4767346 - DNA, 25 bp, Homo sapien
caaggacaagatggcaacggtgata

SEQ ID NO: 4767347 - DNA, 25 bp, Homo sapien
agtgagccgagatcgcactactgca

SEQ ID NO: 4767348 - DNA, 25 bp, Homo sapien
cttgaacccgggaggcagaggttgc

SEQ ID NO: 4767349 - DNA, 25 bp, Homo sapien
tggcgtgcgcctctaatctcagctg

SEQ ID NO: 4767350 - DNA, 25 bp, Homo sapien
tcgggaggctgaagcaggagaatcg

SEQ ID NO: 4767351 - DNA, 25 bp, Homo sapien
ctgaatatgtttctagaaacgatgc

SEQ ID NO: 4767352 - DNA, 25 bp, Homo sapien
gactttccgaatggttttcatcacc

SEQ ID NO: 4767353 - DNA, 25 bp, Homo sapien
aaacgatgcagactttccgaatggt

SEQ ID NO: 4767354 - DNA, 25 bp, Homo sapien
tacttaaagagttgagccacactga

SEQ ID NO: 4767355 - DNA, 25 bp, Homo sapien
tcgtcaccgatgtaggccccattct

SEQ ID NO: 4767356 - DNA, 25 bp, Homo sapien
cgtcaccgatgtaggccccattctt

SEQ ID NO: 4767357 - DNA, 25 bp, Homo sapien
tcaccgatgtaggccccattcttac

SEQ ID NO: 4767358 - DNA, 25 bp, Homo sapien
ctcgtcaccgatgtaggccccattc

SEQ ID NO: 4767359 - DNA, 25 bp, Homo sapien
atccatgttgtagtcatcttctcct

SEQ ID NO: 4767360 - DNA, 25 bp, Homo sapien
ccatgttgtagtcatcttctcctct

SEQ ID NO: 4767361 - DNA, 25 bp, Homo sapien
tccatgttgtagtcatcttctcctc

SEQ ID NO: 4767362 - DNA, 25 bp, Homo sapien
tctggaaatggtagggacgcaaggg

SEQ ID NO: 4767363 - DNA, 25 bp, Homo sapien
gtagggacgcaagggctggcttcca

SEQ ID NO: 4767364 - DNA, 25 bp, Homo sapien
tggtagggacgcaagggctggcttc

SEQ ID NO: 4767365 - DNA, 25 bp, Homo sapien
aaatggtagggacgcaagggctggc

SEQ ID NO: 4767366 - DNA, 25 bp, Homo sapien
tcaccacacctgcatctagaagcag

SEQ ID NO: 4767367 - DNA, 25 bp, Homo sapien
gggtggaaactgcacaggcctatgt

SEQ ID NO: 4767368 - DNA, 25 bp, Homo sapien
tcaaatgaggtcaccacacctgcat

SEQ ID NO: 4767369 - DNA, 25 bp, Homo sapien
gtccaccgcgtttcttcaaatgagg

SEQ ID NO: 4767370 - DNA, 25 bp, Homo sapien
gctgagcgagccagtgagatctccc

SEQ ID NO: 4767371 - DNA, 25 bp, Homo sapien
acgctttgtgaccagccgctgaggg

SEQ ID NO: 4767372 - DNA, 25 bp, Homo sapien
cactggagcgccacaggctgagcga

SEQ ID NO: 4767373 - DNA, 25 bp, Homo sapien
ggtctgacactggagcgccacaggc

SEQ ID NO: 4767374 - DNA, 25 bp, Homo sapien
tgggtgagcacggaacacaaggaca

SEQ ID NO: 4767375 - DNA, 25 bp, Homo sapien
tatctgaagggactgaaatacatcc

SEQ ID NO: 4767376 - DNA, 25 bp, Homo sapien
catcctggaatagtcggttgatctc

SEQ ID NO: 4767377 - DNA, 25 bp, Homo sapien
tcatgtcctcagaagtgttcctggc

SEQ ID NO: 4767378 - DNA, 25 bp, Homo sapien
cagacactgcacgacggtggacata

SEQ ID NO: 4767379 - DNA, 25 bp, Homo sapien
agacactgcacgacggtggacatac

SEQ ID NO: 4767380 - DNA, 25 bp, Homo sapien
ccagacactgcacgacggtggacat

SEQ ID NO: 4767381 - DNA, 25 bp, Homo sapien
caccagacactgcacgacggtggac

SEQ ID NO: 4767382 - DNA, 25 bp, Homo sapien
gcctgccaggagggggcgtccactt

SEQ ID NO: 4767383 - DNA, 25 bp, Homo sapien
ccaggagggggcgtccacttgatgc

SEQ ID NO: 4767384 - DNA, 25 bp, Homo sapien
aggagggggcgtccacttgatgcta

SEQ ID NO: 4767385 - DNA, 25 bp, Homo sapien
caggagggggcgtccacttgatgct

SEQ ID NO: 4767386 - DNA, 25 bp, Homo sapien
aattggcaaattgtggactgctgtt

SEQ ID NO: 4767387 - DNA, 25 bp, Homo sapien
gccaatattgcatctaaaacctcga

SEQ ID NO: 4767388 - DNA, 25 bp, Homo sapien
acctcgagttctagagcatatgctg

SEQ ID NO: 4767389 - DNA, 25 bp, Homo sapien
tgcctccctcttgataacgaataag

SEQ ID NO: 4767390 - DNA, 25 bp, Homo sapien
ccccggcagcttcctgctcctcctc

SEQ ID NO: 4767391 - DNA, 25 bp, Homo sapien
cttccccggcagcttcctgctcctc

SEQ ID NO: 4767392 - DNA, 25 bp, Homo sapien
ttccccggcagcttcctgctcctcc

SEQ ID NO: 4767393 - DNA, 25 bp, Homo sapien
tccccggcagcttcctgctcctcct

SEQ ID NO: 4767394 - DNA, 25 bp, Homo sapien
tccgtcggggatgacaagctggtct

SEQ ID NO: 4767395 - DNA, 25 bp, Homo sapien
atgacaagctggtctcgctcagggc

SEQ ID NO: 4767396 - DNA, 25 bp, Homo sapien
tcggggatgacaagctggtctcgct

SEQ ID NO: 4767397 - DNA, 25 bp, Homo sapien
gacaagctggtctcgctcagggccc

SEQ ID NO: 4767398 - DNA, 25 bp, Homo sapien
tctggcccagttctccggctccccc

SEQ ID NO: 4767399 - DNA, 25 bp, Homo sapien
cagttctccggctcccccgaagcct

SEQ ID NO: 4767400 - DNA, 25 bp, Homo sapien
cccccgaagcctcttccacctacag

SEQ ID NO: 4767401 - DNA, 25 bp, Homo sapien
tcccccgaagcctcttccacctaca

SEQ ID NO: 4767402 - DNA, 25 bp, Homo sapien
gaggctcctcattcaccacctggat

SEQ ID NO: 4767403 - DNA, 25 bp, Homo sapien
caccacctggatctcattggtttcc

SEQ ID NO: 4767404 - DNA, 25 bp, Homo sapien
ctctgaggctcctcattcaccacct

SEQ ID NO: 4767405 - DNA, 25 bp, Homo sapien
accacctggatctcattggtttcct

SEQ ID NO: 4767406 - DNA, 25 bp, Homo sapien
cttgctgttaccaagcacgtttccc

SEQ ID NO: 4767407 - DNA, 25 bp, Homo sapien
gacttgctgttaccaagcacgtttc

SEQ ID NO: 4767408 - DNA, 25 bp, Homo sapien
ttgctgttaccaagcacgtttccct

SEQ ID NO: 4767409 - DNA, 25 bp, Homo sapien
ggacttgctgttaccaagcacgttt

SEQ ID NO: 4767410 - DNA, 25 bp, Homo sapien
tgaacagaagccgtaaaagaatcct

SEQ ID NO: 4767411 - DNA, 25 bp, Homo sapien
tacctaggcggaagatcaacaacaa

SEQ ID NO: 4767412 - DNA, 25 bp, Homo sapien
gagaaacgccacagtctactctggt

SEQ ID NO: 4767413 - DNA, 25 bp, Homo sapien
ccctggtcatgtggcgtaaatcaga

SEQ ID NO: 4767414 - DNA, 25 bp, Homo sapien
ttggtgacctcttctattcgctcct

SEQ ID NO: 4767415 - DNA, 25 bp, Homo sapien
ctcaggtctctggaagctacagctt

SEQ ID NO: 4767416 - DNA, 25 bp, Homo sapien
gaagctacagcttcattcccctttt

SEQ ID NO: 4767417 - DNA, 25 bp, Homo sapien
tgtctctggtcgttgttttcactca

SEQ ID NO: 4767418 - DNA, 25 bp, Homo sapien
tgctgcagcctgccgtaattcctct

SEQ ID NO: 4767419 - DNA, 25 bp, Homo sapien
ctgcagcctgccgtaattcctctgc

SEQ ID NO: 4767420 - DNA, 25 bp, Homo sapien
gctgcagcctgccgtaattcctctg

SEQ ID NO: 4767421 - DNA, 25 bp, Homo sapien
caaaatatgacagaggcagactcac

SEQ ID NO: 4767422 - DNA, 25 bp, Homo sapien
caaggaattgcacaggtcaccggca

SEQ ID NO: 4767423 - DNA, 25 bp, Homo sapien
tcaccggcacagctgtcatgccatt

SEQ ID NO: 4767424 - DNA, 25 bp, Homo sapien
taaagggcaaggacagattgggaca

SEQ ID NO: 4767425 - DNA, 25 bp, Homo sapien
taatcaatgtggtttttatctttgg

SEQ ID NO: 4767426 - DNA, 25 bp, Homo sapien
gaaggcaacttgattgtgttggata

SEQ ID NO: 4767427 - DNA, 25 bp, Homo sapien
tcaatgtggtttttatctttggttc

SEQ ID NO: 4767428 - DNA, 25 bp, Homo sapien
tccccgggatgaaggcaacttgatt

SEQ ID NO: 4767429 - DNA, 25 bp, Homo sapien
agcactcggatgagcctctcacctg

SEQ ID NO: 4767430 - DNA, 25 bp, Homo sapien
tgcagcactcggatgagcctctcac

SEQ ID NO: 4767431 - DNA, 25 bp, Homo sapien
cttgcagcactcggatgagcctctc

SEQ ID NO: 4767432 - DNA, 25 bp, Homo sapien
cagcactcggatgagcctctcacct

SEQ ID NO: 4767433 - DNA, 25 bp, Homo sapien
agatgtgatacaaaccaatgatggg

SEQ ID NO: 4767434 - DNA, 25 bp, Homo sapien
tacaaaccaatgatggggcctgtcc

SEQ ID NO: 4767435 - DNA, 25 bp, Homo sapien
aaaccaacacctcagcctgacagcc

SEQ ID NO: 4767436 - DNA, 25 bp, Homo sapien
tgacagccagatgtgatacaaacca

SEQ ID NO: 4767437 - DNA, 25 bp, Homo sapien
aaacacagacaaggaggcaataagc

SEQ ID NO: 4767438 - DNA, 25 bp, Homo sapien
ttctactctaaacagccaggttgtt

SEQ ID NO: 4767439 - DNA, 25 bp, Homo sapien
actaaacctcaaagaatctgggtga

SEQ ID NO: 4767440 - DNA, 25 bp, Homo sapien
taagcgccaccagaaattaactgga

SEQ ID NO: 4767441 - DNA, 25 bp, Homo sapien
gaaagtactctgcaaattaaacaac

SEQ ID NO: 4767442 - DNA, 25 bp, Homo sapien
gagaggtacacgcattataaaagcc

SEQ ID NO: 4767443 - DNA, 25 bp, Homo sapien
caacattatgcacaattcccagaga

SEQ ID NO: 4767444 - DNA, 25 bp, Homo sapien
cagttatgcgagaaaagtctgagtc

SEQ ID NO: 4767445 - DNA, 25 bp, Homo sapien
atcctcccgccaagaagaaacagac

SEQ ID NO: 4767446 - DNA, 25 bp, Homo sapien
tcatcctcccgccaagaagaaacag

SEQ ID NO: 4767447 - DNA, 25 bp, Homo sapien
catcctcccgccaagaagaaacaga

SEQ ID NO: 4767448 - DNA, 25 bp, Homo sapien
catcccttagaaaagaactgagagg

SEQ ID NO: 4767449 - DNA, 25 bp, Homo sapien
atcccttagaaaagaactgagagga

SEQ ID NO: 4767450 - DNA, 25 bp, Homo sapien
tcccttagaaaagaactgagaggaa

SEQ ID NO: 4767451 - DNA, 25 bp, Homo sapien
tttcgtcctggtacagcttgttgac

SEQ ID NO: 4767452 - DNA, 25 bp, Homo sapien
ttttcgtcctggtacagcttgttga

SEQ ID NO: 4767453 - DNA, 25 bp, Homo sapien
cttttcgtcctggtacagcttgttg

SEQ ID NO: 4767454 - DNA, 25 bp, Homo sapien
tggctggactggattttgtcaagct

SEQ ID NO: 4767455 - DNA, 25 bp, Homo sapien
tgtggctggactggattttgtcaag

SEQ ID NO: 4767456 - DNA, 25 bp, Homo sapien
agttgtggctggactggattttgtc

SEQ ID NO: 4767457 - DNA, 25 bp, Homo sapien
gctggactggattttgtcaagctgc

SEQ ID NO: 4767458 - DNA, 25 bp, Homo sapien
ttcagctccacggcgcctctctctg

SEQ ID NO: 4767459 - DNA, 25 bp, Homo sapien
cagctccacggcgcctctctctgca

SEQ ID NO: 4767460 - DNA, 25 bp, Homo sapien
tcagctccacggcgcctctctctgc

SEQ ID NO: 4767461 - DNA, 25 bp, Homo sapien
tggaccacctgagcgccctccacaa

SEQ ID NO: 4767462 - DNA, 25 bp, Homo sapien
cctggaccacctgagcgccctccac

SEQ ID NO: 4767463 - DNA, 25 bp, Homo sapien
acctgagcgccctccacaaagacca

SEQ ID NO: 4767464 - DNA, 25 bp, Homo sapien
accacctgagcgccctccacaaaga

SEQ ID NO: 4767465 - DNA, 25 bp, Homo sapien
ggcggcgacttcatgctgcgacgcc

SEQ ID NO: 4767466 - DNA, 25 bp, Homo sapien
ccagtagttgaagcccaagacgatg

SEQ ID NO: 4767467 - DNA, 25 bp, Homo sapien
gcccaagacgatgatgcaggccacc

SEQ ID NO: 4767468 - DNA, 25 bp, Homo sapien
tgcgacgcccgtttcccaagcccat

SEQ ID NO: 4767469 - DNA, 25 bp, Homo sapien
acatcaatactagttttatcatctc

SEQ ID NO: 4767470 - DNA, 25 bp, Homo sapien
caaataaataaacatcaatactagt

SEQ ID NO: 4767471 - DNA, 25 bp, Homo sapien
ccgaagcagaccgtatcatccttac

SEQ ID NO: 4767472 - DNA, 25 bp, Homo sapien
gttttatcatctccgaagcagaccg

SEQ ID NO: 4767473 - DNA, 25 bp, Homo sapien
agcgtgggctggtagcttctccttg

SEQ ID NO: 4767474 - DNA, 25 bp, Homo sapien
caagaggaaaggagtcttgccaaga

SEQ ID NO: 4767475 - DNA, 25 bp, Homo sapien
tcttgccaagaagcgtgggctggta

SEQ ID NO: 4767476 - DNA, 25 bp, Homo sapien
accaagaggaaaggagtcttgccaa

SEQ ID NO: 4767477 - DNA, 25 bp, Homo sapien
atgtgaacggcacgcacagagccca

SEQ ID NO: 4767478 - DNA, 25 bp, Homo sapien
gaagagtatgtgaacggcacgcaca

SEQ ID NO: 4767479 - DNA, 25 bp, Homo sapien
ctgtcaagggagaagagtatgtgaa

SEQ ID NO: 4767480 - DNA, 25 bp, Homo sapien
gtatgtgaacggcacgcacagagcc

SEQ ID NO: 4767481 - DNA, 25 bp, Homo sapien
gaattaatcatttctgtaagcagca

SEQ ID NO: 4767482 - DNA, 25 bp, Homo sapien
gcttccgcatcatattagaaagagt

SEQ ID NO: 4767483 - DNA, 25 bp, Homo sapien
tgctttgattcctaacaagggaggt

SEQ ID NO: 4767484 - DNA, 25 bp, Homo sapien
gtatattcctcattactcctcagag

SEQ ID NO: 4767485 - DNA, 25 bp, Homo sapien
ccttcatgacacacaacggaagtgg

SEQ ID NO: 4767486 - DNA, 25 bp, Homo sapien
tccatgccaaacgagagcaccttct

SEQ ID NO: 4767487 - DNA, 25 bp, Homo sapien
cagccctggctatagaagtgtctcc

SEQ ID NO: 4767488 - DNA, 25 bp, Homo sapien
catcttaggatttgaggtggaaaca

SEQ ID NO: 4767489 - DNA, 25 bp, Homo sapien
ttacctggggctgacctacagttgc

SEQ ID NO: 4767490 - DNA, 25 bp, Homo sapien
cattacctggggctgacctacagtt

SEQ ID NO: 4767491 - DNA, 25 bp, Homo sapien
acctggggctgacctacagttgcca

SEQ ID NO: 4767492 - DNA, 25 bp, Homo sapien
ctggggctgacctacagttgccact

SEQ ID NO: 4767493 - DNA, 25 bp, Homo sapien
cctccgcagcggcaaggccccgccc

SEQ ID NO: 4767494 - DNA, 25 bp, Homo sapien
ttttcgaggctccggccgccactcg

SEQ ID NO: 4767495 - DNA, 25 bp, Homo sapien
cagcgcctccgcgtccagcgccgcc

SEQ ID NO: 4767496 - DNA, 25 bp, Homo sapien
gaggccgcccgggtcgctctcccgc

SEQ ID NO: 4767497 - DNA, 25 bp, Homo sapien
ccacgaggcattccctgttgaccat

SEQ ID NO: 4767498 - DNA, 25 bp, Homo sapien
ggccttagtgtttggtctgtgaccc

SEQ ID NO: 4767499 - DNA, 25 bp, Homo sapien
tgttgaccatcatctcgcctcggtt

SEQ ID NO: 4767500 - DNA, 25 bp, Homo sapien
tccactgctagcaacggaaaaagtg

SEQ ID NO: 4767501 - DNA, 25 bp, Homo sapien
acgttagagacaggtccaaatgcca

SEQ ID NO: 4767502 - DNA, 25 bp, Homo sapien
tggggtacacgttagagacaggtcc

SEQ ID NO: 4767503 - DNA, 25 bp, Homo sapien
gggtacacgttagagacaggtccaa

SEQ ID NO: 4767504 - DNA, 25 bp, Homo sapien
tacacgttagagacaggtccaaatg

SEQ ID NO: 4767505 - DNA, 25 bp, Homo sapien
acaggtcttgtcaaggcctcctcag

SEQ ID NO: 4767506 - DNA, 25 bp, Homo sapien
ccctctcagtatgggttacttccct

SEQ ID NO: 4767507 - DNA, 25 bp, Homo sapien
gtggcccctgtgctcgccaaaacca

SEQ ID NO: 4767508 - DNA, 25 bp, Homo sapien
agtggcccctgtgctcgccaaaacc

SEQ ID NO: 4767509 - DNA, 25 bp, Homo sapien
tgttttccctctcagtatgggttac

SEQ ID NO: 4767510 - DNA, 25 bp, Homo sapien
gaaagtgatctggaggcacgcagta

SEQ ID NO: 4767511 - DNA, 25 bp, Homo sapien
gctgcagatttcagcggcgtgctct

SEQ ID NO: 4767512 - DNA, 25 bp, Homo sapien
aagggttgctcctttagtggcctga

SEQ ID NO: 4767513 - DNA, 25 bp, Homo sapien
tatctatgagctcagaaagggttgc

SEQ ID NO: 4767514 - DNA, 25 bp, Homo sapien
gcctgtacctgttgtagattttgag

SEQ ID NO: 4767515 - DNA, 25 bp, Homo sapien
gtgttgtcctgtgtgcctcctaagc

SEQ ID NO: 4767516 - DNA, 25 bp, Homo sapien
cagctcatttccttcgacaatttca

SEQ ID NO: 4767517 - DNA, 25 bp, Homo sapien
caatttcaatagtgcctgtacctgt

SEQ ID NO: 4767518 - DNA, 25 bp, Homo sapien
gtttgtagtcatccaatttgagaat

SEQ ID NO: 4767519 - DNA, 25 bp, Homo sapien
ggtttgtagtcatccaatttgagaa

SEQ ID NO: 4767520 - DNA, 25 bp, Homo sapien
taggtttgtagtcatccaatttgag

SEQ ID NO: 4767521 - DNA, 25 bp, Homo sapien
ttgtagtcatccaatttgagaataa

SEQ ID NO: 4767522 - DNA, 25 bp, Homo sapien
gtgtccagatttccccggcttatat

SEQ ID NO: 4767523 - DNA, 25 bp, Homo sapien
tatcatatttgataagcacccgctc

SEQ ID NO: 4767524 - DNA, 25 bp, Homo sapien
tttgaagagacacaagtcggtccat

SEQ ID NO: 4767525 - DNA, 25 bp, Homo sapien
ggaagtctacgatcaaggtgtaagc

SEQ ID NO: 4767526 - DNA, 25 bp, Homo sapien
caaaggccacggtgctaatggtggt

SEQ ID NO: 4767527 - DNA, 25 bp, Homo sapien
gccacggtgctaatggtggtggtgc

SEQ ID NO: 4767528 - DNA, 25 bp, Homo sapien
aagacaaaggccacggtgctaatgg

SEQ ID NO: 4767529 - DNA, 25 bp, Homo sapien
ccacggtgctaatggtggtggtgca

SEQ ID NO: 4767530 - DNA, 25 bp, Homo sapien
tgagatggccagagctcagagaagt

SEQ ID NO: 4767531 - DNA, 25 bp, Homo sapien
atggccagagctcagagaagttcat

SEQ ID NO: 4767532 - DNA, 25 bp, Homo sapien
ctgagatggccagagctcagagaag

SEQ ID NO: 4767533 - DNA, 25 bp, Homo sapien
agatggccagagctcagagaagttc

SEQ ID NO: 4767534 - DNA, 25 bp, Homo sapien
tgttttctacaataaaggcacagag

SEQ ID NO: 4767535 - DNA, 25 bp, Homo sapien
tacacccattattgcatctgacctg

SEQ ID NO: 4767536 - DNA, 25 bp, Homo sapien
tatgtgctaggagctgttctatgtg

SEQ ID NO: 4767537 - DNA, 25 bp, Homo sapien
cacatggctggtaccaattatagta

SEQ ID NO: 4767538 - DNA, 25 bp, Homo sapien
gactagggttgcaacgaagttgcag

SEQ ID NO: 4767539 - DNA, 25 bp, Homo sapien
acaccccggctggttggatctctgg

SEQ ID NO: 4767540 - DNA, 25 bp, Homo sapien
gcagaacctcgatgtgcagcctcag

SEQ ID NO: 4767541 - DNA, 25 bp, Homo sapien
tggctttgcatcctttctgatgtgg

SEQ ID NO: 4767542 - DNA, 25 bp, Homo sapien
tagatggttgagatggtccctggaa

SEQ ID NO: 4767543 - DNA, 25 bp, Homo sapien
tactgacatctacattaagaagttg

SEQ ID NO: 4767544 - DNA, 25 bp, Homo sapien
ctgacatctacattaagaagttggc

SEQ ID NO: 4767545 - DNA, 25 bp, Homo sapien
actgacatctacattaagaagttgg

SEQ ID NO: 4767546 - DNA, 25 bp, Homo sapien
ttctccatcttacgagacctggata

SEQ ID NO: 4767547 - DNA, 25 bp, Homo sapien
tctgtggacccgtctgaccttgtgt

SEQ ID NO: 4767548 - DNA, 25 bp, Homo sapien
tcttttgcacatagtccctccctag

SEQ ID NO: 4767549 - DNA, 25 bp, Homo sapien
tgctcccaatgcgaattgccccaaa

SEQ ID NO: 4767550 - DNA, 25 bp, Homo sapien
tctggctggaacctcgattataggc

SEQ ID NO: 4767551 - DNA, 25 bp, Homo sapien
gaagtagcaattgcagatatccgtg

SEQ ID NO: 4767552 - DNA, 25 bp, Homo sapien
gataatgctaatagatgagatccct

SEQ ID NO: 4767553 - DNA, 25 bp, Homo sapien
gattataggctgaaaagaagtagca

SEQ ID NO: 4767554 - DNA, 25 bp, Homo sapien
tgtagcatggatttgaagtggacaa

SEQ ID NO: 4767555 - DNA, 25 bp, Homo sapien
ctgtgtagcatggatttgaagtgga

SEQ ID NO: 4767556 - DNA, 25 bp, Homo sapien
aggaaggctgtccttcggaggcagt

SEQ ID NO: 4767557 - DNA, 25 bp, Homo sapien
ggaaggctgtccttcggaggcagta

SEQ ID NO: 4767558 - DNA, 25 bp, Homo sapien
gggccttgtccaatcaatcagttga

SEQ ID NO: 4767559 - DNA, 25 bp, Homo sapien
ccaactggattttgtgtcacgtaga

SEQ ID NO: 4767560 - DNA, 25 bp, Homo sapien
ggcagattgccttctctaatgtggg

SEQ ID NO: 4767561 - DNA, 25 bp, Homo sapien
tgtgttaacttcactgggccatggg

SEQ ID NO: 4767562 - DNA, 25 bp, Homo sapien
tggcttgctcacgacttagagctcc

SEQ ID NO: 4767563 - DNA, 25 bp, Homo sapien
tgctcacgacttagagctcccggtc

SEQ ID NO: 4767564 - DNA, 25 bp, Homo sapien
gcatggcagccagataagatactat

SEQ ID NO: 4767565 - DNA, 25 bp, Homo sapien
tattggggtgctttctctgagtgac

SEQ ID NO: 4767566 - DNA, 25 bp, Homo sapien
ggaaaatatccttcccacatgaaag

SEQ ID NO: 4767567 - DNA, 25 bp, Homo sapien
taacctagaattctggatccaagga

SEQ ID NO: 4767568 - DNA, 25 bp, Homo sapien
caaagcggaaggaagcaatggcatg

SEQ ID NO: 4767569 - DNA, 25 bp, Homo sapien
taaaacagtaacattgctgccaggc

SEQ ID NO: 4767570 - DNA, 25 bp, Homo sapien
ttctcacgttagcagattaaatcgg

SEQ ID NO: 4767571 - DNA, 25 bp, Homo sapien
taattttacaatataccttcatgtg

SEQ ID NO: 4767572 - DNA, 25 bp, Homo sapien
cttttgctctgtattaacggcttaa

SEQ ID NO: 4767573 - DNA, 25 bp, Homo sapien
tgttgtacacactcacttcagatgt

SEQ ID NO: 4767574 - DNA, 25 bp, Homo sapien
gaccaaagacttgcgaactataggg

SEQ ID NO: 4767575 - DNA, 25 bp, Homo sapien
gtgttgtattttatgtctccgaatg

SEQ ID NO: 4767576 - DNA, 25 bp, Homo sapien
gggaaaataacgtcaggcatgtcct

SEQ ID NO: 4767577 - DNA, 25 bp, Homo sapien
cgaatgaaattgcagtagtgcgcct

SEQ ID NO: 4767578 - DNA, 25 bp, Homo sapien
atatctccattccagatcccttaga

SEQ ID NO: 4767579 - DNA, 25 bp, Homo sapien
cattccagatcccttagattcatga

SEQ ID NO: 4767580 - DNA, 25 bp, Homo sapien
ccagatcccttagattcatgaattg

SEQ ID NO: 4767581 - DNA, 25 bp, Homo sapien
gatcccttagattcatgaattgttt

SEQ ID NO: 4767582 - DNA, 25 bp, Homo sapien
tgttttccaggcttgttcattttat

SEQ ID NO: 4767583 - DNA, 25 bp, Homo sapien
tctatgttttccaggcttgttcatt

SEQ ID NO: 4767584 - DNA, 25 bp, Homo sapien
ttttccaggcttgttcattttattg

SEQ ID NO: 4767585 - DNA, 25 bp, Homo sapien
ctatgttttccaggcttgttcattt

SEQ ID NO: 4767586 - DNA, 25 bp, Homo sapien
tgcctaagctgcataagattttggg

SEQ ID NO: 4767587 - DNA, 25 bp, Homo sapien
tcgagtgatcggtgagaatttcata

SEQ ID NO: 4767588 - DNA, 25 bp, Homo sapien
tctgtacggtaacttgggccaaggc

SEQ ID NO: 4767589 - DNA, 25 bp, Homo sapien
gagcttgccagtaagctgcggtaga

SEQ ID NO: 4767590 - DNA, 25 bp, Homo sapien
gtgcttcgttaagtgaaataccatg

SEQ ID NO: 4767591 - DNA, 25 bp, Homo sapien
gcgcccctggtgaatgacatgacat

SEQ ID NO: 4767592 - DNA, 25 bp, Homo sapien
tggagatctcctctcacatcagcgc

SEQ ID NO: 4767593 - DNA, 25 bp, Homo sapien
ctgataacaggttggagatctcctc

SEQ ID NO: 4767594 - DNA, 25 bp, Homo sapien
tttgatttcttgctctccttattaa

SEQ ID NO: 4767595 - DNA, 25 bp, Homo sapien
tgatttcttgctctccttattaaaa

SEQ ID NO: 4767596 - DNA, 25 bp, Homo sapien
ttgatttcttgctctccttattaaa

SEQ ID NO: 4767597 - DNA, 25 bp, Homo sapien
ggcttctctattgtcctcagctgga

SEQ ID NO: 4767598 - DNA, 25 bp, Homo sapien
tggcttctctattgtcctcagctgg

SEQ ID NO: 4767599 - DNA, 25 bp, Homo sapien
gtggcttctctattgtcctcagctg

SEQ ID NO: 4767600 - DNA, 25 bp, Homo sapien
gtgctgggattttattctctaattc

SEQ ID NO: 4767601 - DNA, 25 bp, Homo sapien
cgtgctgggattttattctctaatt

SEQ ID NO: 4767602 - DNA, 25 bp, Homo sapien
gcctgcaaggtgtagtgtaatttga

SEQ ID NO: 4767603 - DNA, 25 bp, Homo sapien
agttgtaaacatatactgcaaactc

SEQ ID NO: 4767604 - DNA, 25 bp, Homo sapien
tcttgggttagttgtaaacatatac

SEQ ID NO: 4767605 - DNA, 25 bp, Homo sapien
actgcctgcaaggtgtagtgtaatt

SEQ ID NO: 4767606 - DNA, 25 bp, Homo sapien
ttctaataagaactggtccccatac

SEQ ID NO: 4767607 - DNA, 25 bp, Homo sapien
catttctgaaaagcaggctgcatct

SEQ ID NO: 4767608 - DNA, 25 bp, Homo sapien
ggctgcatctcacaatcagttggtc

SEQ ID NO: 4767609 - DNA, 25 bp, Homo sapien
tgcatttagcaagccacatcgcctg

SEQ ID NO: 4767610 - DNA, 25 bp, Homo sapien
tgtgatctgcacagaggcaggtccc

SEQ ID NO: 4767611 - DNA, 25 bp, Homo sapien
gtttcccaagctagaggcaggctcc

SEQ ID NO: 4767612 - DNA, 25 bp, Homo sapien
tacttttgaaaacggagtagcaagc

SEQ ID NO: 4767613 - DNA, 25 bp, Homo sapien
tccacttcctgcgagttcacacggg

SEQ ID NO: 4767614 - DNA, 25 bp, Homo sapien
agcctcattctttactcctttctgt

SEQ ID NO: 4767615 - DNA, 25 bp, Homo sapien
attagcctcattctttactcctttc

SEQ ID NO: 4767616 - DNA, 25 bp, Homo sapien
aaattcattagcctcattctttact

SEQ ID NO: 4767617 - DNA, 25 bp, Homo sapien
ttcattagcctcattctttactcct

SEQ ID NO: 4767618 - DNA, 25 bp, Homo sapien
gtttattagaatgctactgtgtttg

SEQ ID NO: 4767619 - DNA, 25 bp, Homo sapien
tgaaatcagttttgtcctagaaggt

SEQ ID NO: 4767620 - DNA, 25 bp, Homo sapien
tttaatcaatcagaagtttcagtgg

SEQ ID NO: 4767621 - DNA, 25 bp, Homo sapien
aactctactggtttattagaatgct

SEQ ID NO: 4767622 - DNA, 25 bp, Homo sapien
ttcacttatcagctgcctctgtaag

SEQ ID NO: 4767623 - DNA, 25 bp, Homo sapien
tcacttatcagctgcctctgtaaga

SEQ ID NO: 4767624 - DNA, 25 bp, Homo sapien
tttcacttatcagctgcctctgtaa

SEQ ID NO: 4767625 - DNA, 25 bp, Homo sapien
gggaatgcaatttactactgctgat

SEQ ID NO: 4767626 - DNA, 25 bp, Homo sapien
tgtcagagggtgaattgacaacacg

SEQ ID NO: 4767627 - DNA, 25 bp, Homo sapien
cacgattgattgacagggaatgcaa

SEQ ID NO: 4767628 - DNA, 25 bp, Homo sapien
ggagccgcttgtctgacatggcagc

SEQ ID NO: 4767629 - DNA, 25 bp, Homo sapien
tcatatacccttgcccaaagaacgg

SEQ ID NO: 4767630 - DNA, 25 bp, Homo sapien
ttgcccaaagaacggccctcctctg

SEQ ID NO: 4767631 - DNA, 25 bp, Homo sapien
cgcatgtggacggatgagggaggaa

SEQ ID NO: 4767632 - DNA, 25 bp, Homo sapien
gacaaattaaccctggccatcagtg

SEQ ID NO: 4767633 - DNA, 25 bp, Homo sapien
aaaacaaaggacactgggtgtgagg

SEQ ID NO: 4767634 - DNA, 25 bp, Homo sapien
gagagagagcagagctatcagtgtt

SEQ ID NO: 4767635 - DNA, 25 bp, Homo sapien
tcggcccgatcaactggttccagct

SEQ ID NO: 4767636 - DNA, 25 bp, Homo sapien
tatcagtgttgaaggccggaaagga

SEQ ID NO: 4767637 - DNA, 25 bp, Homo sapien
tggtcatatctgtcttgagtctctg

SEQ ID NO: 4767638 - DNA, 25 bp, Homo sapien
tcttcacgtggtcatatctgtcttg

SEQ ID NO: 4767639 - DNA, 25 bp, Homo sapien
cacgtggtcatatctgtcttgagtc

SEQ ID NO: 4767640 - DNA, 25 bp, Homo sapien
ttcacgtggtcatatctgtcttgag

SEQ ID NO: 4767641 - DNA, 25 bp, Homo sapien
ctggccagatatgggtagaagtgga

SEQ ID NO: 4767642 - DNA, 25 bp, Homo sapien
agatatgggtagaagtggaccaggg

SEQ ID NO: 4767643 - DNA, 25 bp, Homo sapien
ccagatatgggtagaagtggaccag

SEQ ID NO: 4767644 - DNA, 25 bp, Homo sapien
ggccagatatgggtagaagtggacc

SEQ ID NO: 4767645 - DNA, 25 bp, Homo sapien
atgagccatgcagccgtgctccaga

SEQ ID NO: 4767646 - DNA, 25 bp, Homo sapien
attccccacccatgggaggtccctg

SEQ ID NO: 4767647 - DNA, 25 bp, Homo sapien
ctgtgcaaattctctccatgagcca

SEQ ID NO: 4767648 - DNA, 25 bp, Homo sapien
gcaaattctctccatgagccatgca

SEQ ID NO: 4767649 - DNA, 25 bp, Homo sapien
ggctagttttaagctgagtaccgct

SEQ ID NO: 4767650 - DNA, 25 bp, Homo sapien
tcatcatgaaaagtttcggaatcac

SEQ ID NO: 4767651 - DNA, 25 bp, Homo sapien
atcactagctagtggaagtaaaagc

SEQ ID NO: 4767652 - DNA, 25 bp, Homo sapien
tcaaggccctcaaagtaggctagtt

SEQ ID NO: 4767653 - DNA, 25 bp, Homo sapien
aaaataattctgacctgcccgatgc

SEQ ID NO: 4767654 - DNA, 25 bp, Homo sapien
tgcccgatgctaaacgaacactgaa

SEQ ID NO: 4767655 - DNA, 25 bp, Homo sapien
gaagcaattgcgttcctgtctccaa

SEQ ID NO: 4767656 - DNA, 25 bp, Homo sapien
catgacatggtgtgacatggccgta

SEQ ID NO: 4767657 - DNA, 25 bp, Homo sapien
agaacttgcagaaagcccaaacgcc

SEQ ID NO: 4767658 - DNA, 25 bp, Homo sapien
tgggctacggatagagtaccatcct

SEQ ID NO: 4767659 - DNA, 25 bp, Homo sapien
cattctccggagtgcttagcttcac

SEQ ID NO: 4767660 - DNA, 25 bp, Homo sapien
ttatagcgggctttgcagtagcttc

SEQ ID NO: 4767661 - DNA, 25 bp, Homo sapien
ctcatttgccgacttgaagctctct

SEQ ID NO: 4767662 - DNA, 25 bp, Homo sapien
tcttcgctggtgtctcatttgccga

SEQ ID NO: 4767663 - DNA, 25 bp, Homo sapien
tggtgatcgatgctcttcgctggtg

SEQ ID NO: 4767664 - DNA, 25 bp, Homo sapien
tgaggttgggactgtctttgatgac

SEQ ID NO: 4767665 - DNA, 25 bp, Homo sapien
aaagctcagggctagtggagagtca

SEQ ID NO: 4767666 - DNA, 25 bp, Homo sapien
gtgaaagctcagggctagtggagag

SEQ ID NO: 4767667 - DNA, 25 bp, Homo sapien
aagctcagggctagtggagagtcag

SEQ ID NO: 4767668 - DNA, 25 bp, Homo sapien
gaaagctcagggctagtggagagtc

SEQ ID NO: 4767669 - DNA, 25 bp, Homo sapien
taaggacatgaggaacctgcttggg

SEQ ID NO: 4767670 - DNA, 25 bp, Homo sapien
aagctcagatgacagagggaaaagc

SEQ ID NO: 4767671 - DNA, 25 bp, Homo sapien
tgataatgctctcgtcctaaggaca

SEQ ID NO: 4767672 - DNA, 25 bp, Homo sapien
aagcactccaggtagtgataatgct

SEQ ID NO: 4767673 - DNA, 25 bp, Homo sapien
gcagtcacgatgtcctgtctcagat

SEQ ID NO: 4767674 - DNA, 25 bp, Homo sapien
ggatgatcaagccatcaatagcgat

SEQ ID NO: 4767675 - DNA, 25 bp, Homo sapien
gagtatgcagtgaggcagctgacaa

SEQ ID NO: 4767676 - DNA, 25 bp, Homo sapien
ctattaaagagtatgcagtgaggca

SEQ ID NO: 4767677 - DNA, 25 bp, Homo sapien
ccaggaaggcaactttaatgaaact

SEQ ID NO: 4767678 - DNA, 25 bp, Homo sapien
aggaaggcaactttaatgaaactgg

SEQ ID NO: 4767679 - DNA, 25 bp, Homo sapien
gcaactttaatgaaactggttctaa

SEQ ID NO: 4767680 - DNA, 25 bp, Homo sapien
aggcaactttaatgaaactggttct

SEQ ID NO: 4767681 - DNA, 25 bp, Homo sapien
agctttcctggaacctacggccaga

SEQ ID NO: 4767682 - DNA, 25 bp, Homo sapien
agatgtatcactttattttccagca

SEQ ID NO: 4767683 - DNA, 25 bp, Homo sapien
gagccccaaagcttccacgagcttt

SEQ ID NO: 4767684 - DNA, 25 bp, Homo sapien
tattttccagcacgtgacagtcaca

SEQ ID NO: 4767685 - DNA, 25 bp, Homo sapien
caagtccctttgatgtttgggttat

SEQ ID NO: 4767686 - DNA, 25 bp, Homo sapien
tcaaatattaaagctttctccacag

SEQ ID NO: 4767687 - DNA, 25 bp, Homo sapien
tccctttgatgtttgggttattgaa

SEQ ID NO: 4767688 - DNA, 25 bp, Homo sapien
ccacagccacaagtccctttgatgt

SEQ ID NO: 4767689 - DNA, 25 bp, Homo sapien
catttctgttcctaaaagtgttagc

SEQ ID NO: 4767690 - DNA, 25 bp, Homo sapien
tgtgctttcttttcgatgaatactc

SEQ ID NO: 4767691 - DNA, 25 bp, Homo sapien
tagtccatttctgttcctaaaagtg

SEQ ID NO: 4767692 - DNA, 25 bp, Homo sapien
tctgttcctaaaagtgttagctgtg

SEQ ID NO: 4767693 - DNA, 25 bp, Homo sapien
gctgattcaaagcacaagtgaactt

SEQ ID NO: 4767694 - DNA, 25 bp, Homo sapien
cacggattcaagcttaaagatgtac

SEQ ID NO: 4767695 - DNA, 25 bp, Homo sapien
tctgcaatacactagatacacggat

SEQ ID NO: 4767696 - DNA, 25 bp, Homo sapien
tcaatgaaagtcaaacaagaagcct

SEQ ID NO: 4767697 - DNA, 25 bp, Homo sapien
cacttaggaatctaggcctcattct

SEQ ID NO: 4767698 - DNA, 25 bp, Homo sapien
taagaactgcaagctaagtgcatac

SEQ ID NO: 4767699 - DNA, 25 bp, Homo sapien
taacagattatagggtggaagaagg

SEQ ID NO: 4767700 - DNA, 25 bp, Homo sapien
gagttgataatacagctccactaaa

SEQ ID NO: 4767701 - DNA, 25 bp, Homo sapien
ttacagcccctggttcggacaccaa

SEQ ID NO: 4767702 - DNA, 25 bp, Homo sapien
aggccattacagcccctggttcgga

SEQ ID NO: 4767703 - DNA, 25 bp, Homo sapien
gccattacagcccctggttcggaca

SEQ ID NO: 4767704 - DNA, 25 bp, Homo sapien
attacagcccctggttcggacacca

SEQ ID NO: 4767705 - DNA, 25 bp, Homo sapien
ctcaggcttatctttaagaagttgt

SEQ ID NO: 4767706 - DNA, 25 bp, Homo sapien
gaagttgttttatcttgtttactgc

SEQ ID NO: 4767707 - DNA, 25 bp, Homo sapien
ttatcttgtttactgctgaaggtgt

SEQ ID NO: 4767708 - DNA, 25 bp, Homo sapien
atgctcaggcttatctttaagaagt

SEQ ID NO: 4767709 - DNA, 25 bp, Homo sapien
gtgcaccaactctatgcccaggaac

SEQ ID NO: 4767710 - DNA, 25 bp, Homo sapien
caccaactctatgcccaggaaccag

SEQ ID NO: 4767711 - DNA, 25 bp, Homo sapien
caactctatgcccaggaaccagcat

SEQ ID NO: 4767712 - DNA, 25 bp, Homo sapien
ttgtgcaccaactctatgcccagga

SEQ ID NO: 4767713 - DNA, 25 bp, Homo sapien
cagtaggtgggcctctaaaggccca

SEQ ID NO: 4767714 - DNA, 25 bp, Homo sapien
tgggcctctaaaggcccatggtttc

SEQ ID NO: 4767715 - DNA, 25 bp, Homo sapien
gcctctaaaggcccatggtttccca

SEQ ID NO: 4767716 - DNA, 25 bp, Homo sapien
gagtgtttgacctttcacccagaaa

SEQ ID NO: 4767717 - DNA, 25 bp, Homo sapien
acactgtgaatgtcttaaatggcac

SEQ ID NO: 4767718 - DNA, 25 bp, Homo sapien
gaaaaggctgtaaactcactctggg

SEQ ID NO: 4767719 - DNA, 25 bp, Homo sapien
taatcaatggttgcactctggtgcc

SEQ ID NO: 4767720 - DNA, 25 bp, Homo sapien
gttgtcgctgtgctcgccctctgcg

SEQ ID NO: 4767721 - DNA, 25 bp, Homo sapien
acagcggtccttcggacagcctggt

SEQ ID NO: 4767722 - DNA, 25 bp, Homo sapien
ctaagagcctaggcttgctagaggc

SEQ ID NO: 4767723 - DNA, 25 bp, Homo sapien
caggacaccggcaagtaacgctttg

SEQ ID NO: 4767724 - DNA, 25 bp, Homo sapien
caggagtgtggaggcgatcggcccc

SEQ ID NO: 4767725 - DNA, 25 bp, Homo sapien
aacggccgaacagcgcaggccggca

SEQ ID NO: 4767726 - DNA, 25 bp, Homo sapien
tctgcttaaccggaacggccgaaca

SEQ ID NO: 4767727 - DNA, 25 bp, Homo sapien
accgggcacgttcagcctctgctta

SEQ ID NO: 4767728 - DNA, 25 bp, Homo sapien
acagcccggacagttgcccggacta

SEQ ID NO: 4767729 - DNA, 25 bp, Homo sapien
ggacagttgcccggactaaggaagc

SEQ ID NO: 4767730 - DNA, 25 bp, Homo sapien
agggctgcccgggtgggctgcagct

SEQ ID NO: 4767731 - DNA, 25 bp, Homo sapien
agcccggacagttgcccggactaag

SEQ ID NO: 4767732 - DNA, 25 bp, Homo sapien
gggccgaaggtcggccgcctcagct

SEQ ID NO: 4767733 - DNA, 25 bp, Homo sapien
gcgcattgacgccacaagcttcggc

SEQ ID NO: 4767734 - DNA, 25 bp, Homo sapien
acacggcgggcgcattgacgccaca

SEQ ID NO: 4767735 - DNA, 25 bp, Homo sapien
ttgacgccacaagcttcggcgcacg

SEQ ID NO: 4767736 - DNA, 25 bp, Homo sapien
gcgcacggcgccctcagtcctagcc

SEQ ID NO: 4767737 - DNA, 25 bp, Homo sapien
caccagccacacttgtgactggcag

SEQ ID NO: 4767738 - DNA, 25 bp, Homo sapien
aaatgataaataaaccgaggcatag

SEQ ID NO: 4767739 - DNA, 25 bp, Homo sapien
gggctccagtcagacccagaatgac

SEQ ID NO: 4767740 - DNA, 25 bp, Homo sapien
gaggcatagttctgaccaggtacta

SEQ ID NO: 4767741 - DNA, 25 bp, Homo sapien
gatatgctttcacaccaggattcag

SEQ ID NO: 4767742 - DNA, 25 bp, Homo sapien
cctgagtggccatttagagtgctgc

SEQ ID NO: 4767743 - DNA, 25 bp, Homo sapien
agttgaagcctgatctacactgctg

SEQ ID NO: 4767744 - DNA, 25 bp, Homo sapien
cgtaaatcggaagtacagcagtagc

SEQ ID NO: 4767745 - DNA, 25 bp, Homo sapien
ttcgctgaggcttttccctgagtca

SEQ ID NO: 4767746 - DNA, 25 bp, Homo sapien
cctcttcgctgaggcttttccctga

SEQ ID NO: 4767747 - DNA, 25 bp, Homo sapien
gctgggtcctcttcgctgaggcttt

SEQ ID NO: 4767748 - DNA, 25 bp, Homo sapien
gctgaggcttttccctgagtcatat

SEQ ID NO: 4767749 - DNA, 25 bp, Homo sapien
tatttccatgttggtacagagcacc

SEQ ID NO: 4767750 - DNA, 25 bp, Homo sapien
cagacaggttcctagagtgatctca

SEQ ID NO: 4767751 - DNA, 25 bp, Homo sapien
tattatatttacaggtggaggacac

SEQ ID NO: 4767752 - DNA, 25 bp, Homo sapien
tactctgcagatacgaagctgtgga

SEQ ID NO: 4767753 - DNA, 25 bp, Homo sapien
gaggtagtttccctcctcacaccat

SEQ ID NO: 4767754 - DNA, 25 bp, Homo sapien
gagtaatcctgtaggtaatcctggg

SEQ ID NO: 4767755 - DNA, 25 bp, Homo sapien
tgtaactataagaaagtcagagcgt

SEQ ID NO: 4767756 - DNA, 25 bp, Homo sapien
taatgaacttgtaagtcaccagaga

SEQ ID NO: 4767757 - DNA, 25 bp, Homo sapien
taatgctagaatggagggagtacag

SEQ ID NO: 4767758 - DNA, 25 bp, Homo sapien
ttcaaagcaggacatcgagataagc

SEQ ID NO: 4767759 - DNA, 25 bp, Homo sapien
tccatagcaaacatagtaagtatgc

SEQ ID NO: 4767760 - DNA, 25 bp, Homo sapien
aaagtactctattgttctaccactg

SEQ ID NO: 4767761 - DNA, 25 bp, Homo sapien
gagaaactacaagtgggccaaagac

SEQ ID NO: 4767762 - DNA, 25 bp, Homo sapien
catatggaggataaggcagtctctc

SEQ ID NO: 4767763 - DNA, 25 bp, Homo sapien
tcaaggctgaagcttatggccaggt

SEQ ID NO: 4767764 - DNA, 25 bp, Homo sapien
tcttagcaccctatgagataaacgg

SEQ ID NO: 4767765 - DNA, 25 bp, Homo sapien
gaagactctggttgccactcatggg

SEQ ID NO: 4767766 - DNA, 25 bp, Homo sapien
ttactttaccagagatgctgcctcc

SEQ ID NO: 4767767 - DNA, 25 bp, Homo sapien
caaaaagcacgggactggaacaaat

SEQ ID NO: 4767768 - DNA, 25 bp, Homo sapien
cactcatgggtggtataaacatcac

SEQ ID NO: 4767769 - DNA, 25 bp, Homo sapien
ttttgtcttcatgtaaaagcactgc

SEQ ID NO: 4767770 - DNA, 25 bp, Homo sapien
ctgactggggactcaaaaatattgt

SEQ ID NO: 4767771 - DNA, 25 bp, Homo sapien
tctttttgtcttcatgtaaaagcac

SEQ ID NO: 4767772 - DNA, 25 bp, Homo sapien
gactggggactcaaaaatattgttg

SEQ ID NO: 4767773 - DNA, 25 bp, Homo sapien
tccttctccgtttgagctaggttta

SEQ ID NO: 4767774 - DNA, 25 bp, Homo sapien
ttacaaaatcgaaaggaagagcatc

SEQ ID NO: 4767775 - DNA, 25 bp, Homo sapien
ggagttctgaaacaaggccccgcca

SEQ ID NO: 4767776 - DNA, 25 bp, Homo sapien
tgcaagttaactgaaaagcaagacc

SEQ ID NO: 4767777 - DNA, 25 bp, Homo sapien
acaggtgagggcgatccaaacatac

SEQ ID NO: 4767778 - DNA, 25 bp, Homo sapien
caaataaaccagttggtttcaatgg

SEQ ID NO: 4767779 - DNA, 25 bp, Homo sapien
ccaaacatacaatctgatttagaca

SEQ ID NO: 4767780 - DNA, 25 bp, Homo sapien
cagttggtttcaatgggacaggtga

SEQ ID NO: 4767781 - DNA, 25 bp, Homo sapien
ttgttcctactttaaattgaaagca

SEQ ID NO: 4767782 - DNA, 25 bp, Homo sapien
tttaaattgaaagcagtagccctgt

SEQ ID NO: 4767783 - DNA, 25 bp, Homo sapien
actttaaattgaaagcagtagccct

SEQ ID NO: 4767784 - DNA, 25 bp, Homo sapien
taaattgaaagcagtagccctgttt

SEQ ID NO: 4767785 - DNA, 25 bp, Homo sapien
acagagagactgtctgttggtgtga

SEQ ID NO: 4767786 - DNA, 25 bp, Homo sapien
agagagactgtctgttggtgtgaca

SEQ ID NO: 4767787 - DNA, 25 bp, Homo sapien
agctccactcagtatattgtgtgga

SEQ ID NO: 4767788 - DNA, 25 bp, Homo sapien
gtatattgtgtggacaaaggagcaa

SEQ ID NO: 4767789 - DNA, 25 bp, Homo sapien
gactgcattctgaagggaccacatt

SEQ ID NO: 4767790 - DNA, 25 bp, Homo sapien
ggtctaactgttgtgagagcttccc

SEQ ID NO: 4767791 - DNA, 25 bp, Homo sapien
tatacaactgaggatagcgacagga

SEQ ID NO: 4767792 - DNA, 25 bp, Homo sapien
tagtctgtttaaaaggtgcccacaa

SEQ ID NO: 4767793 - DNA, 25 bp, Homo sapien
atcaaggtgtgataggtgtccatac

SEQ ID NO: 4767794 - DNA, 25 bp, Homo sapien
tagagcaaacatcaaggtgtgatag

SEQ ID NO: 4767795 - DNA, 25 bp, Homo sapien
atgttagagcaaacatcaaggtgtg

SEQ ID NO: 4767796 - DNA, 25 bp, Homo sapien
catcaaggtgtgataggtgtccata

SEQ ID NO: 4767797 - DNA, 25 bp, Homo sapien
agagcctttaaactgtgggcattcc

SEQ ID NO: 4767798 - DNA, 25 bp, Homo sapien
gaggtgtgcactgtatgggcttatc

SEQ ID NO: 4767799 - DNA, 25 bp, Homo sapien
cagggtatctttggttcagggcatc

SEQ ID NO: 4767800 - DNA, 25 bp, Homo sapien
gacacctccctttctgtgtacttgt

SEQ ID NO: 4767801 - DNA, 25 bp, Homo sapien
catgaagtgtccgatttttccacaa

SEQ ID NO: 4767802 - DNA, 25 bp, Homo sapien
atcatttggggccagctctccttca

SEQ ID NO: 4767803 - DNA, 25 bp, Homo sapien
aattcgacaacatctatcatttggg

SEQ ID NO: 4767804 - DNA, 25 bp, Homo sapien
ctcctcataggacagtccttcatga

SEQ ID NO: 4767805 - DNA, 25 bp, Homo sapien
atatgtacaaactgggcttggccaa

SEQ ID NO: 4767806 - DNA, 25 bp, Homo sapien
ttggccaaggctggcatcaagccga

SEQ ID NO: 4767807 - DNA, 25 bp, Homo sapien
tatgaaggctagcacagataaccag

SEQ ID NO: 4767808 - DNA, 25 bp, Homo sapien
gctgtctgctacaggaagcactgtt

SEQ ID NO: 4767809 - DNA, 25 bp, Homo sapien
tactcttctaccattgataaaagcc

SEQ ID NO: 4767810 - DNA, 25 bp, Homo sapien
actcttctaccattgataaaagcct

SEQ ID NO: 4767811 - DNA, 25 bp, Homo sapien
ccagctccaagattatgattcaaat

SEQ ID NO: 4767812 - DNA, 25 bp, Homo sapien
ataatccagctccaagattatgatt

SEQ ID NO: 4767813 - DNA, 25 bp, Homo sapien
atccagctccaagattatgattcaa

SEQ ID NO: 4767814 - DNA, 25 bp, Homo sapien
caagattatgattcaaatcaaaggg

SEQ ID NO: 4767815 - DNA, 25 bp, Homo sapien
gaagaaggcccaaccataactgccc

SEQ ID NO: 4767816 - DNA, 25 bp, Homo sapien
tctgtgtagaaacgaagaaggccca

SEQ ID NO: 4767817 - DNA, 25 bp, Homo sapien
aatcaaattcctctgtgtagaaacg

SEQ ID NO: 4767818 - DNA, 25 bp, Homo sapien
aagttgtaagcagactttttctcct

SEQ ID NO: 4767819 - DNA, 25 bp, Homo sapien
aaaaataaatattccagccatcaac

SEQ ID NO: 4767820 - DNA, 25 bp, Homo sapien
aatattccagccatcaacaaatatt

SEQ ID NO: 4767821 - DNA, 25 bp, Homo sapien
cagttcatctatttgatcaaaaaaa

SEQ ID NO: 4767822 - DNA, 25 bp, Homo sapien
gttcatctatttgatcaaaaaaata

SEQ ID NO: 4767823 - DNA, 25 bp, Homo sapien
tgataagctgcctctagatgcatca

SEQ ID NO: 4767824 - DNA, 25 bp, Homo sapien
tagatgcatcaccaatatcacacat

SEQ ID NO: 4767825 - DNA, 25 bp, Homo sapien
tatgcatacgatgataagctgcctc

SEQ ID NO: 4767826 - DNA, 25 bp, Homo sapien
tagcaccataagagtatatgcatac

SEQ ID NO: 4767827 - DNA, 25 bp, Homo sapien
acttcactctgggatcaatggcgga

SEQ ID NO: 4767828 - DNA, 25 bp, Homo sapien
tcatggtatagcacaaatacttcac

SEQ ID NO: 4767829 - DNA, 25 bp, Homo sapien
gatcaatggcggaataagcagataa

SEQ ID NO: 4767830 - DNA, 25 bp, Homo sapien
caaatacttcactctgggatcaatg

SEQ ID NO: 4767831 - DNA, 25 bp, Homo sapien
cacttctcaaatggaagaacttcac

SEQ ID NO: 4767832 - DNA, 25 bp, Homo sapien
caaactgatatctacttccagacca

SEQ ID NO: 4767833 - DNA, 25 bp, Homo sapien
tacaaactgatatctacttccagac

SEQ ID NO: 4767834 - DNA, 25 bp, Homo sapien
aaactgatatctacttccagaccac

SEQ ID NO: 4767835 - DNA, 25 bp, Homo sapien
gagatcaggccaagcgtagtggctc

SEQ ID NO: 4767836 - DNA, 25 bp, Homo sapien
agaataattatccagtccagttgcc

SEQ ID NO: 4767837 - DNA, 25 bp, Homo sapien
gctgccatgacaacaaaaggatacg

SEQ ID NO: 4767838 - DNA, 25 bp, Homo sapien
tgcacgttcatgctgtgacttaaag

SEQ ID NO: 4767839 - DNA, 25 bp, Homo sapien
attcttcaatagttctgacacagtc

SEQ ID NO: 4767840 - DNA, 25 bp, Homo sapien
ctgaatgttttctgaggactcttgc

SEQ ID NO: 4767841 - DNA, 25 bp, Homo sapien
gttttctgaggactcttgctaattc

SEQ ID NO: 4767842 - DNA, 25 bp, Homo sapien
tcttcaatagttctgacacagtcca

SEQ ID NO: 4767843 - DNA, 25 bp, Homo sapien
tcagcagtttcaagtccattaattg

SEQ ID NO: 4767844 - DNA, 25 bp, Homo sapien
tttggaggagccaaacaggctcaat

SEQ ID NO: 4767845 - DNA, 25 bp, Homo sapien
ggtcactctgtttgaacccaaatcc

SEQ ID NO: 4767846 - DNA, 25 bp, Homo sapien
tcatacagacgtcaaggtcactctg

SEQ ID NO: 4767847 - DNA, 25 bp, Homo sapien
aactttctaggttttgccgaatatg

SEQ ID NO: 4767848 - DNA, 25 bp, Homo sapien
tcacgagcctgatcttctataattg

SEQ ID NO: 4767849 - DNA, 25 bp, Homo sapien
tgccgaatatgttcacgagcctgat

SEQ ID NO: 4767850 - DNA, 25 bp, Homo sapien
tggaaagtcctgtcttatgaaactt

SEQ ID NO: 4767851 - DNA, 25 bp, Homo sapien
ttgaagtcttcaggacagtccttct

SEQ ID NO: 4767852 - DNA, 25 bp, Homo sapien
cataagctgcacactaccgtaggag

SEQ ID NO: 4767853 - DNA, 25 bp, Homo sapien
aaaacttgggtgttaatggtggcag

SEQ ID NO: 4767854 - DNA, 25 bp, Homo sapien
tggcagaggttctagctggattctt

SEQ ID NO: 4767855 - DNA, 25 bp, Homo sapien
tatgactagtggtggtactgattac

SEQ ID NO: 4767856 - DNA, 25 bp, Homo sapien
catatcagaatgaaaggccaacttg

SEQ ID NO: 4767857 - DNA, 25 bp, Homo sapien
aaagcagaccgagcagtcatatcag

SEQ ID NO: 4767858 - DNA, 25 bp, Homo sapien
gtatcattaggagaacatagtggct

SEQ ID NO: 4767859 - DNA, 25 bp, Homo sapien
tattaagttccactaggagagctct

SEQ ID NO: 4767860 - DNA, 25 bp, Homo sapien
cacgtcttcatacttagcagcttcg

SEQ ID NO: 4767861 - DNA, 25 bp, Homo sapien
aatcagactgatccacaggtgaatt

SEQ ID NO: 4767862 - DNA, 25 bp, Homo sapien
tcctcttcagatagggcgtcctcat

SEQ ID NO: 4767863 - DNA, 25 bp, Homo sapien
ccagtgtaggtgttgtctaactcat

SEQ ID NO: 4767864 - DNA, 25 bp, Homo sapien
ttaatggtgagcctaggttcttctt

SEQ ID NO: 4767865 - DNA, 25 bp, Homo sapien
aatggtgagcctaggttcttcttcc

SEQ ID NO: 4767866 - DNA, 25 bp, Homo sapien
tggtgagcctaggttcttcttcctc

SEQ ID NO: 4767867 - DNA, 25 bp, Homo sapien
taatggtgagcctaggttcttcttc

SEQ ID NO: 4767868 - DNA, 25 bp, Homo sapien
tgtactgagtgggtaaagtggttta

SEQ ID NO: 4767869 - DNA, 25 bp, Homo sapien
ctgagtgggtaaagtggtttagaga

SEQ ID NO: 4767870 - DNA, 25 bp, Homo sapien
cctgtactgagtgggtaaagtggtt

SEQ ID NO: 4767871 - DNA, 25 bp, Homo sapien
tactgagtgggtaaagtggtttaga

SEQ ID NO: 4767872 - DNA, 25 bp, Homo sapien
tggaagccttctaaatccaaagtgc

SEQ ID NO: 4767873 - DNA, 25 bp, Homo sapien
tgggattttggaagccttctaaatc

SEQ ID NO: 4767874 - DNA, 25 bp, Homo sapien
gtccctcacactctttagctgtggg

SEQ ID NO: 4767875 - DNA, 25 bp, Homo sapien
gatcagccttgttatctaaagtggc

SEQ ID NO: 4767876 - DNA, 25 bp, Homo sapien
caacatgctctccacgtttctgatc

SEQ ID NO: 4767877 - DNA, 25 bp, Homo sapien
ctgatcaacagtcaacagatgcttg

SEQ ID NO: 4767878 - DNA, 25 bp, Homo sapien
tttctgatcaacagtcaacagatgc

SEQ ID NO: 4767879 - DNA, 25 bp, Homo sapien
tgctctccacgtttctgatcaacag

SEQ ID NO: 4767880 - DNA, 25 bp, Homo sapien
ttggtgggcttccaaaactttcagc

SEQ ID NO: 4767881 - DNA, 25 bp, Homo sapien
tttgcagctgaactggtagcaccag

SEQ ID NO: 4767882 - DNA, 25 bp, Homo sapien
ctctttaagagtaagtggctgtacc

SEQ ID NO: 4767883 - DNA, 25 bp, Homo sapien
aacatctgcttggatacagtctgag

SEQ ID NO: 4767884 - DNA, 25 bp, Homo sapien
tttgtgtggaagagcaaaatacttg

SEQ ID NO: 4767885 - DNA, 25 bp, Homo sapien
ggctttagaaggctggattttgtaa

SEQ ID NO: 4767886 - DNA, 25 bp, Homo sapien
caaacacaggttgactatttagggt

SEQ ID NO: 4767887 - DNA, 25 bp, Homo sapien
aatacatgtaattgcattcagaggc

SEQ ID NO: 4767888 - DNA, 25 bp, Homo sapien
aaaatgtgagatccccatgactgca

SEQ ID NO: 4767889 - DNA, 25 bp, Homo sapien
gaaacatcggctctatgaagggaac

SEQ ID NO: 4767890 - DNA, 25 bp, Homo sapien
caggccctgtggtttatcgagctta

SEQ ID NO: 4767891 - DNA, 25 bp, Homo sapien
tccagcaggttaggcaattggccag

SEQ ID NO: 4767892 - DNA, 25 bp, Homo sapien
gcaatgcgctttttgggccaatcct

SEQ ID NO: 4767893 - DNA, 25 bp, Homo sapien
gacacgaatacttatcactaaatca

SEQ ID NO: 4767894 - DNA, 25 bp, Homo sapien
ttcaattcccgagataccaattctt

SEQ ID NO: 4767895 - DNA, 25 bp, Homo sapien
ggccaatccttcaattcccgagata

SEQ ID NO: 4767896 - DNA, 25 bp, Homo sapien
tggtgtttcacatccaatattaatg

SEQ ID NO: 4767897 - DNA, 25 bp, Homo sapien
ctggtgtttcacatccaatattaat

SEQ ID NO: 4767898 - DNA, 25 bp, Homo sapien
atctgcagagtagggatgataccac

SEQ ID NO: 4767899 - DNA, 25 bp, Homo sapien
cacagtgttcaaaaaatggtcgcta

SEQ ID NO: 4767900 - DNA, 25 bp, Homo sapien
tgagatagtgtctgtaaagtgctta

SEQ ID NO: 4767901 - DNA, 25 bp, Homo sapien
ggactgagtgagatagtgtctgtaa

SEQ ID NO: 4767902 - DNA, 25 bp, Homo sapien
gaaattccctagtttgcttaatgag

SEQ ID NO: 4767903 - DNA, 25 bp, Homo sapien
ttcttttgttatgcctgtgtcccct

SEQ ID NO: 4767904 - DNA, 25 bp, Homo sapien
caatgtcttgaaggttgaaattccc

SEQ ID NO: 4767905 - DNA, 25 bp, Homo sapien
taatcggcgtttctcttggtgcctc

SEQ ID NO: 4767906 - DNA, 25 bp, Homo sapien
atgtcccacttgaattcctctttaa

SEQ ID NO: 4767907 - DNA, 25 bp, Homo sapien
tgccactatgccaaactatcttaca

SEQ ID NO: 4767908 - DNA, 25 bp, Homo sapien
caaaatatgttttaatgtcccactt

SEQ ID NO: 4767909 - DNA, 25 bp, Homo sapien
tcctctttaatccatggaatccttt

SEQ ID NO: 4767910 - DNA, 25 bp, Homo sapien
gattgtggctcagctcttgcatcag

SEQ ID NO: 4767911 - DNA, 25 bp, Homo sapien
tatcacacctccagtagattgtggc

SEQ ID NO: 4767912 - DNA, 25 bp, Homo sapien
gctgtcgtagctgaaaattcctctg

SEQ ID NO: 4767913 - DNA, 25 bp, Homo sapien
gacacgatgtactgggtaaacaggc

SEQ ID NO: 4767914 - DNA, 25 bp, Homo sapien
ctaagcaggttatagggcaacatac

SEQ ID NO: 4767915 - DNA, 25 bp, Homo sapien
tcaagagatgactactaggttctgc

SEQ ID NO: 4767916 - DNA, 25 bp, Homo sapien
ggtcagtctcttgttcgtctcagga

SEQ ID NO: 4767917 - DNA, 25 bp, Homo sapien
tctgcatcttgtggtacaggtagca

SEQ ID NO: 4767918 - DNA, 25 bp, Homo sapien
tcttcagggcgatctatactgcaaa

SEQ ID NO: 4767919 - DNA, 25 bp, Homo sapien
ggcaaacacataaggtggcagacct

SEQ ID NO: 4767920 - DNA, 25 bp, Homo sapien
aaagaaaatggccatcagggcaaac

SEQ ID NO: 4767921 - DNA, 25 bp, Homo sapien
gatcctagatatacaggcaaaaggg

SEQ ID NO: 4767922 - DNA, 25 bp, Homo sapien
gaagctttatctcaacgttcctgtg

SEQ ID NO: 4767923 - DNA, 25 bp, Homo sapien
tcctgtgcctaacaaccactgtggt

SEQ ID NO: 4767924 - DNA, 25 bp, Homo sapien
ggttcaagcgacagaatctcaattt

SEQ ID NO: 4767925 - DNA, 25 bp, Homo sapien
gagcaataccgttaaagtgaaacag

SEQ ID NO: 4767926 - DNA, 25 bp, Homo sapien
ctttgttgtcagacaagcattttca

SEQ ID NO: 4767927 - DNA, 25 bp, Homo sapien
ctagttttccaagggcagttaaatg

SEQ ID NO: 4767928 - DNA, 25 bp, Homo sapien
gtacctaaatgcaatcaccaaagga

SEQ ID NO: 4767929 - DNA, 25 bp, Homo sapien
tgcccagtacctaaatgcaatcacc

SEQ ID NO: 4767930 - DNA, 25 bp, Homo sapien
gtggcaaaatacaggtgattacagc

SEQ ID NO: 4767931 - DNA, 25 bp, Homo sapien
gaaatggaccgaaatacttccttgc

SEQ ID NO: 4767932 - DNA, 25 bp, Homo sapien
tacagtagtgacagtaatgctttca

SEQ ID NO: 4767933 - DNA, 25 bp, Homo sapien
aatgctgccaaaaagggtggcaaaa

SEQ ID NO: 4767934 - DNA, 25 bp, Homo sapien
ggaaccatgtgtgataaccaaataa

SEQ ID NO: 4767935 - DNA, 25 bp, Homo sapien
taagatgtagtaaagtacttgtgct

SEQ ID NO: 4767936 - DNA, 25 bp, Homo sapien
catcaaatgccaaaagtatagggag

SEQ ID NO: 4767937 - DNA, 25 bp, Homo sapien
tatagggagaatgttagtaggaacc

SEQ ID NO: 4767938 - DNA, 25 bp, Homo sapien
agcatggaagtctgcatcaacatca

SEQ ID NO: 4767939 - DNA, 25 bp, Homo sapien
tagcatggaagtctgcatcaacatc

SEQ ID NO: 4767940 - DNA, 25 bp, Homo sapien
cctagcatggaagtctgcatcaaca

SEQ ID NO: 4767941 - DNA, 25 bp, Homo sapien
ctagcatggaagtctgcatcaacat

SEQ ID NO: 4767942 - DNA, 25 bp, Homo sapien
ttgaacaagtaagaggacatctggc

SEQ ID NO: 4767943 - DNA, 25 bp, Homo sapien
tgaacaagtaagaggacatctggct

SEQ ID NO: 4767944 - DNA, 25 bp, Homo sapien
tgctacaggatgacccatataatct

SEQ ID NO: 4767945 - DNA, 25 bp, Homo sapien
ttttgaaacccaatctgctacagga

SEQ ID NO: 4767946 - DNA, 25 bp, Homo sapien
gtcaatgtttacatccgaatttttg

SEQ ID NO: 4767947 - DNA, 25 bp, Homo sapien
tggaaactggatgtcaatgtttaca

SEQ ID NO: 4767948 - DNA, 25 bp, Homo sapien
tgaatgaggtacttttaggtagtta

SEQ ID NO: 4767949 - DNA, 25 bp, Homo sapien
aaattactattggtaggagaaatga

SEQ ID NO: 4767950 - DNA, 25 bp, Homo sapien
aatgaatgaggtacttttaggtagt

SEQ ID NO: 4767951 - DNA, 25 bp, Homo sapien
gatgaaaattactattggtaggaga

SEQ ID NO: 4767952 - DNA, 25 bp, Homo sapien
gatacgtttaatttccagcctctgt

SEQ ID NO: 4767953 - DNA, 25 bp, Homo sapien
ctggtaacttgtgttggaacacatt

SEQ ID NO: 4767954 - DNA, 25 bp, Homo sapien
ccactttgtcaatggcaatgccaac

SEQ ID NO: 4767955 - DNA, 25 bp, Homo sapien
agttctcattgtgtaagccaaattc

SEQ ID NO: 4767956 - DNA, 25 bp, Homo sapien
ggtaacgtagtgagcaactcttcct

SEQ ID NO: 4767957 - DNA, 25 bp, Homo sapien
taacgtagtgagcaactcttcctct

SEQ ID NO: 4767958 - DNA, 25 bp, Homo sapien
tgggggtaacgtagtgagcaactct

SEQ ID NO: 4767959 - DNA, 25 bp, Homo sapien
ggggtaacgtagtgagcaactcttc

SEQ ID NO: 4767960 - DNA, 25 bp, Homo sapien
agttttgaccttctaccactcatga

SEQ ID NO: 4767961 - DNA, 25 bp, Homo sapien
ttgaccttctaccactcatgaagac

SEQ ID NO: 4767962 - DNA, 25 bp, Homo sapien
aatgacttacacatagttttgacct

SEQ ID NO: 4767963 - DNA, 25 bp, Homo sapien
gttttgaccttctaccactcatgaa

SEQ ID NO: 4767964 - DNA, 25 bp, Homo sapien
ccttgatatgcttatgggcaaatgc

SEQ ID NO: 4767965 - DNA, 25 bp, Homo sapien
ttcaattaaaacatcacagagtctg

SEQ ID NO: 4767966 - DNA, 25 bp, Homo sapien
tttccttgatatgcttatgggcaaa

SEQ ID NO: 4767967 - DNA, 25 bp, Homo sapien
tgcaggtgtactttgctgtagggta

SEQ ID NO: 4767968 - DNA, 25 bp, Homo sapien
gcagctccttcgttgaaagtacaga

SEQ ID NO: 4767969 - DNA, 25 bp, Homo sapien
tccgtggcttcctaggtctggacct

SEQ ID NO: 4767970 - DNA, 25 bp, Homo sapien
tacagactcatcgatcacagggcct

SEQ ID NO: 4767971 - DNA, 25 bp, Homo sapien
tcagcctgctgtaagcctagcagct

SEQ ID NO: 4767972 - DNA, 25 bp, Homo sapien
cagagtagcagagtccccaatttta

SEQ ID NO: 4767973 - DNA, 25 bp, Homo sapien
catttaccgcgctgcataaacaggt

SEQ ID NO: 4767974 - DNA, 25 bp, Homo sapien
tatcaagaaatattcggctccgccg

SEQ ID NO: 4767975 - DNA, 25 bp, Homo sapien
tcaggatttcaggtccagcgaggct

SEQ ID NO: 4767976 - DNA, 25 bp, Homo sapien
ttactgacgtaaagtgagccctggg

SEQ ID NO: 4767977 - DNA, 25 bp, Homo sapien
tggagcatatagctaccctcttctg

SEQ ID NO: 4767978 - DNA, 25 bp, Homo sapien
aattacgatatggtcccctggagca

SEQ ID NO: 4767979 - DNA, 25 bp, Homo sapien
agaataaaacattgctgactctggg

SEQ ID NO: 4767980 - DNA, 25 bp, Homo sapien
gaaacagtcgtcttacagttctgca

SEQ ID NO: 4767981 - DNA, 25 bp, Homo sapien
taccagtatgttcatcagacagcca

SEQ ID NO: 4767982 - DNA, 25 bp, Homo sapien
caggaattctaggtccaggtttgaa

SEQ ID NO: 4767983 - DNA, 25 bp, Homo sapien
tgtggctgtcattcatccaagcggg

SEQ ID NO: 4767984 - DNA, 25 bp, Homo sapien
cccggtctttagtgcgcttcacgaa

SEQ ID NO: 4767985 - DNA, 25 bp, Homo sapien
aaacagcacatggtccttttctggg

SEQ ID NO: 4767986 - DNA, 25 bp, Homo sapien
catagttccctggtgttatcttctt

SEQ ID NO: 4767987 - DNA, 25 bp, Homo sapien
tggcctttagcatggtcatctatta

SEQ ID NO: 4767988 - DNA, 25 bp, Homo sapien
tttgacttcaattttcttactttgc

SEQ ID NO: 4767989 - DNA, 25 bp, Homo sapien
ctttgacttcaattttcttactttg

SEQ ID NO: 4767990 - DNA, 25 bp, Homo sapien
ttgacttcaattttcttactttgca

SEQ ID NO: 4767991 - DNA, 25 bp, Homo sapien
tgacttcaattttcttactttgcac

SEQ ID NO: 4767992 - DNA, 25 bp, Homo sapien
ccaggccggacagctactctggagt

SEQ ID NO: 4767993 - DNA, 25 bp, Homo sapien
ttgggagaaggcgcccaagagcact

SEQ ID NO: 4767994 - DNA, 25 bp, Homo sapien
gagtctggcagggacgttgggagaa

SEQ ID NO: 4767995 - DNA, 25 bp, Homo sapien
aatcagcccggaggcgagtctggca

SEQ ID NO: 4767996 - DNA, 25 bp, Homo sapien
cggcttcgacgctcctctggttccc

SEQ ID NO: 4767997 - DNA, 25 bp, Homo sapien
tttctctcccggcttcgacgctcct

SEQ ID NO: 4767998 - DNA, 25 bp, Homo sapien
ctaagtgctcgggagaggcgcggga

SEQ ID NO: 4767999 - DNA, 25 bp, Homo sapien
ctcgggaggctaagtgctcgggaga

SEQ ID NO: 4768000 - DNA, 25 bp, Homo sapien
ctgggtgctccccggttacttccag

SEQ ID NO: 4768001 - DNA, 25 bp, Homo sapien
ggagtaaaggctccgaggcctcgta

SEQ ID NO: 4768002 - DNA, 25 bp, Homo sapien
ggcctcggctttgcccctgggtgct

SEQ ID NO: 4768003 - DNA, 25 bp, Homo sapien
agcggtcgggcaaagccgcattccc

SEQ ID NO: 4768004 - DNA, 25 bp, Homo sapien
taattcgtagtgattaatgttttcg

SEQ ID NO: 4768005 - DNA, 25 bp, Homo sapien
tgttttcgtgaattcttaattgccg

SEQ ID NO: 4768006 - DNA, 25 bp, Homo sapien
gaattcttaattgccgaccttgtag

SEQ ID NO: 4768007 - DNA, 25 bp, Homo sapien
ttgccgaccttgtagaaatgccagc

SEQ ID NO: 4768008 - DNA, 25 bp, Homo sapien
agttctcaccactgatttgggccac

SEQ ID NO: 4768009 - DNA, 25 bp, Homo sapien
ctccttggtctgtaagaggacctta

SEQ ID NO: 4768010 - DNA, 25 bp, Homo sapien
tgtaagaggaccttactcagtagca

SEQ ID NO: 4768011 - DNA, 25 bp, Homo sapien
tctcaccactgatttgggccacata

SEQ ID NO: 4768012 - DNA, 25 bp, Homo sapien
ttcctcttcaatgagtttccggctg

SEQ ID NO: 4768013 - DNA, 25 bp, Homo sapien
tcttcaatgagtttccggctgtcag

SEQ ID NO: 4768014 - DNA, 25 bp, Homo sapien
ctcttcaatgagtttccggctgtca

SEQ ID NO: 4768015 - DNA, 25 bp, Homo sapien
ttcaatgagtttccggctgtcagtg

SEQ ID NO: 4768016 - DNA, 25 bp, Homo sapien
tgacctagttaagccctgcttccag

SEQ ID NO: 4768017 - DNA, 25 bp, Homo sapien
tttgacctagttaagccctgcttcc

SEQ ID NO: 4768018 - DNA, 25 bp, Homo sapien
gatatggacttttagttggcaggcc

SEQ ID NO: 4768019 - DNA, 25 bp, Homo sapien
agctctcgtgaagctgcgatatgga

SEQ ID NO: 4768020 - DNA, 25 bp, Homo sapien
caggtcaatgcatggagtggatggg

SEQ ID NO: 4768021 - DNA, 25 bp, Homo sapien
tgtcctcagatagagaatatatcag

SEQ ID NO: 4768022 - DNA, 25 bp, Homo sapien
gcatggagtggatggggtaagctcc

SEQ ID NO: 4768023 - DNA, 25 bp, Homo sapien
catctcctatttccaaaaatccatt

SEQ ID NO: 4768024 - DNA, 25 bp, Homo sapien
gagacgataagaatggattggagga

SEQ ID NO: 4768025 - DNA, 25 bp, Homo sapien
aagagacgataagaatggattggag

SEQ ID NO: 4768026 - DNA, 25 bp, Homo sapien
agacgataagaatggattggaggaa

SEQ ID NO: 4768027 - DNA, 25 bp, Homo sapien
tcaagagacgataagaatggattgg

SEQ ID NO: 4768028 - DNA, 25 bp, Homo sapien
cagaggcttattgtcggtaattgag

SEQ ID NO: 4768029 - DNA, 25 bp, Homo sapien
tcacgtctgatgagggcttatgtac

SEQ ID NO: 4768030 - DNA, 25 bp, Homo sapien
tgatgagggcttatgtacagaggct

SEQ ID NO: 4768031 - DNA, 25 bp, Homo sapien
ggtgcccagtgtgggaataatgcat

SEQ ID NO: 4768032 - DNA, 25 bp, Homo sapien
ggggcgggccttgtcagcagtaaaa

SEQ ID NO: 4768033 - DNA, 25 bp, Homo sapien
tcccaaacgttgtgctggagcctct

SEQ ID NO: 4768034 - DNA, 25 bp, Homo sapien
aatgaccactgaccagtgaacaggg

SEQ ID NO: 4768035 - DNA, 25 bp, Homo sapien
gagcctctgggtgcacaatgaccac

SEQ ID NO: 4768036 - DNA, 25 bp, Homo sapien
tcttctgctctatggcctctggaca

SEQ ID NO: 4768037 - DNA, 25 bp, Homo sapien
ctgctctatggcctctggacacaac

SEQ ID NO: 4768038 - DNA, 25 bp, Homo sapien
tgctctatggcctctggacacaacc

SEQ ID NO: 4768039 - DNA, 25 bp, Homo sapien
tcctgtcttctgctctatggcctct

SEQ ID NO: 4768040 - DNA, 25 bp, Homo sapien
aattggtaccacacactgtaggagg

SEQ ID NO: 4768041 - DNA, 25 bp, Homo sapien
taaattggtaccacacactgtagga

SEQ ID NO: 4768042 - DNA, 25 bp, Homo sapien
gataggataggccagttcctctttt

SEQ ID NO: 4768043 - DNA, 25 bp, Homo sapien
cttcccttcggcatcaaggatagga

SEQ ID NO: 4768044 - DNA, 25 bp, Homo sapien
ttttcatttcctgtgcagtcctgga

SEQ ID NO: 4768045 - DNA, 25 bp, Homo sapien
tttcatttcctgtgcagtcctggaa

SEQ ID NO: 4768046 - DNA, 25 bp, Homo sapien
tgttttcatttcctgtgcagtcctg

SEQ ID NO: 4768047 - DNA, 25 bp, Homo sapien
tcatttcctgtgcagtcctggaatt

SEQ ID NO: 4768048 - DNA, 25 bp, Homo sapien
tactgatgaactaggagaggccgct

SEQ ID NO: 4768049 - DNA, 25 bp, Homo sapien
gaggccgctgtatctaggaatgcac

SEQ ID NO: 4768050 - DNA, 25 bp, Homo sapien
aggaatgcacggatgagacccacag

SEQ ID NO: 4768051 - DNA, 25 bp, Homo sapien
cagcggttgcctcgaagtgttggaa

SEQ ID NO: 4768052 - DNA, 25 bp, Homo sapien
gccaattcagtacttgagcttgtgg

SEQ ID NO: 4768053 - DNA, 25 bp, Homo sapien
cctccacaattgaggccaattcagt

SEQ ID NO: 4768054 - DNA, 25 bp, Homo sapien
tgctcctccacaattgaggccaatt

SEQ ID NO: 4768055 - DNA, 25 bp, Homo sapien
tcctccacaattgaggccaattcag

SEQ ID NO: 4768056 - DNA, 25 bp, Homo sapien
ttccagctgcatttggatcactgtg

SEQ ID NO: 4768057 - DNA, 25 bp, Homo sapien
cactgtgattgtgtaaatcctgctg

SEQ ID NO: 4768058 - DNA, 25 bp, Homo sapien
gctgcatttggatcactgtgattgt

SEQ ID NO: 4768059 - DNA, 25 bp, Homo sapien
tggatcactgtgattgtgtaaatcc

SEQ ID NO: 4768060 - DNA, 25 bp, Homo sapien
tgcagagaacagctctgtaccagaa

SEQ ID NO: 4768061 - DNA, 25 bp, Homo sapien
ccctgcagagaacagctctgtacca

SEQ ID NO: 4768062 - DNA, 25 bp, Homo sapien
tgtaccagaaagcccagggccaggt

SEQ ID NO: 4768063 - DNA, 25 bp, Homo sapien
cagagaacagctctgtaccagaaag

SEQ ID NO: 4768064 - DNA, 25 bp, Homo sapien
tgattggctgctggttgtggtgcag

SEQ ID NO: 4768065 - DNA, 25 bp, Homo sapien
ttgcatttgattgcccagcatttgg

SEQ ID NO: 4768066 - DNA, 25 bp, Homo sapien
ttcatcattttgcattctctccttg

SEQ ID NO: 4768067 - DNA, 25 bp, Homo sapien
ctccttggtcttaggtgttctttca

SEQ ID NO: 4768068 - DNA, 25 bp, Homo sapien
cagatcttttcaaaaccaacgcttt

SEQ ID NO: 4768069 - DNA, 25 bp, Homo sapien
tcaaggcaagttttggaggaaattg

SEQ ID NO: 4768070 - DNA, 25 bp, Homo sapien
ggaggaaattgtcagatcttttcaa

SEQ ID NO: 4768071 - DNA, 25 bp, Homo sapien
aattgtcagatcttttcaaaaccaa

SEQ ID NO: 4768072 - DNA, 25 bp, Homo sapien
tggcttcatccatattggacactgg

SEQ ID NO: 4768073 - DNA, 25 bp, Homo sapien
tctgaagttttggagcccgatctga

SEQ ID NO: 4768074 - DNA, 25 bp, Homo sapien
taagcaccgatctgaacctttctga

SEQ ID NO: 4768075 - DNA, 25 bp, Homo sapien
tatgtgttagcattcagtggcttca

SEQ ID NO: 4768076 - DNA, 25 bp, Homo sapien
tttttagtcatgtgctgtataagga

SEQ ID NO: 4768077 - DNA, 25 bp, Homo sapien
ctacaaatattgttgccagataaag

SEQ ID NO: 4768078 - DNA, 25 bp, Homo sapien
gattcaagtttaaccaggcatctga

SEQ ID NO: 4768079 - DNA, 25 bp, Homo sapien
gccacagcccaattgtgaaatgcca

SEQ ID NO: 4768080 - DNA, 25 bp, Homo sapien
tcccctttagagtagtcaattctgc

SEQ ID NO: 4768081 - DNA, 25 bp, Homo sapien
tccagcaagccttcccctttagagt

SEQ ID NO: 4768082 - DNA, 25 bp, Homo sapien
gtcaattctgctgccagttgccaga

SEQ ID NO: 4768083 - DNA, 25 bp, Homo sapien
ttagagtagtcaattctgctgccag

SEQ ID NO: 4768084 - DNA, 25 bp, Homo sapien
cttggtctctcctgcgctgtgtcct

SEQ ID NO: 4768085 - DNA, 25 bp, Homo sapien
gggcatagcttcttaagggcttgaa

SEQ ID NO: 4768086 - DNA, 25 bp, Homo sapien
cctgatgtgggggtgatgatgattc

SEQ ID NO: 4768087 - DNA, 25 bp, Homo sapien
tggtctctcctgcgctgtgtccttt

SEQ ID NO: 4768088 - DNA, 25 bp, Homo sapien
atgcacatgtgaagagatgatcgtg

SEQ ID NO: 4768089 - DNA, 25 bp, Homo sapien
tgcacatgtgaagagatgatcgtgt

SEQ ID NO: 4768090 - DNA, 25 bp, Homo sapien
tatgcacatgtgaagagatgatcgt

SEQ ID NO: 4768091 - DNA, 25 bp, Homo sapien
ctatgcacatgtgaagagatgatcg

SEQ ID NO: 4768092 - DNA, 25 bp, Homo sapien
cttggtcgccatggcatccaaatca

SEQ ID NO: 4768093 - DNA, 25 bp, Homo sapien
tccttggtcgccatggcatccaaat

SEQ ID NO: 4768094 - DNA, 25 bp, Homo sapien
ccaacctccttggtcgccatggcat

SEQ ID NO: 4768095 - DNA, 25 bp, Homo sapien
tccacattcaaccttggcacttcct

SEQ ID NO: 4768096 - DNA, 25 bp, Homo sapien
catctcagggataaaatgtgcacgg

SEQ ID NO: 4768097 - DNA, 25 bp, Homo sapien
gctctccatacggtgagatgaggga

SEQ ID NO: 4768098 - DNA, 25 bp, Homo sapien
cacggtactgcattgggagccatgg

SEQ ID NO: 4768099 - DNA, 25 bp, Homo sapien
tgaggcagctctccatacggtgaga

SEQ ID NO: 4768100 - DNA, 25 bp, Homo sapien
gagttggcacatttgcctccaggca

SEQ ID NO: 4768101 - DNA, 25 bp, Homo sapien
aaacttccggttgaatgggcactca

SEQ ID NO: 4768102 - DNA, 25 bp, Homo sapien
tccaggcaccctttcgaactgaggc

SEQ ID NO: 4768103 - DNA, 25 bp, Homo sapien
ttcttgcaaatagggagcaatcagg

SEQ ID NO: 4768104 - DNA, 25 bp, Homo sapien
taaatgaggtgtggcggttgctgga

SEQ ID NO: 4768105 - DNA, 25 bp, Homo sapien
ccggtcgacccgtccatagggaatg

SEQ ID NO: 4768106 - DNA, 25 bp, Homo sapien
cctggcacagcaaggctttgtacct

SEQ ID NO: 4768107 - DNA, 25 bp, Homo sapien
taccttttgagtacagcagcctcag

SEQ ID NO: 4768108 - DNA, 25 bp, Homo sapien
caggaggacagtccatgccccagca

SEQ ID NO: 4768109 - DNA, 25 bp, Homo sapien
tcacgccgagataccactaataggt

SEQ ID NO: 4768110 - DNA, 25 bp, Homo sapien
aattcacttgtcctggtgaaggcag

SEQ ID NO: 4768111 - DNA, 25 bp, Homo sapien
tgacagctgcataaatcacgccgag

SEQ ID NO: 4768112 - DNA, 25 bp, Homo sapien
agactgtactggaccacccaagagc

SEQ ID NO: 4768113 - DNA, 25 bp, Homo sapien
agcaactctgctccggatactctga

SEQ ID NO: 4768114 - DNA, 25 bp, Homo sapien
ttggaagaaagcaactctgctccgg

SEQ ID NO: 4768115 - DNA, 25 bp, Homo sapien
gaagaaagcaactctgctccggata

SEQ ID NO: 4768116 - DNA, 25 bp, Homo sapien
gaaagcaactctgctccggatactc

SEQ ID NO: 4768117 - DNA, 25 bp, Homo sapien
accaaaaggagatctgtatacagct

SEQ ID NO: 4768118 - DNA, 25 bp, Homo sapien
gtcttgatttattccgtggagccca

SEQ ID NO: 4768119 - DNA, 25 bp, Homo sapien
gctcatcactattttgcactcttgt

SEQ ID NO: 4768120 - DNA, 25 bp, Homo sapien
gagcccaaagcatttcagcaccaaa

SEQ ID NO: 4768121 - DNA, 25 bp, Homo sapien
tgtgaaggcacgattcaaagacgcc

SEQ ID NO: 4768122 - DNA, 25 bp, Homo sapien
tcggcggtgaggaagaacactccta

SEQ ID NO: 4768123 - DNA, 25 bp, Homo sapien
gcctgtactggcagcctagggctta

SEQ ID NO: 4768124 - DNA, 25 bp, Homo sapien
gaggccagtcctatggaacattgtg

SEQ ID NO: 4768125 - DNA, 25 bp, Homo sapien
gacgggagtgacttgttttcagtaa

SEQ ID NO: 4768126 - DNA, 25 bp, Homo sapien
ttactgattgtgaagctgacgggag

SEQ ID NO: 4768127 - DNA, 25 bp, Homo sapien
tttcttgcctttactgattgtgaag

SEQ ID NO: 4768128 - DNA, 25 bp, Homo sapien
cagatgtgaggtctgctccttttct

SEQ ID NO: 4768129 - DNA, 25 bp, Homo sapien
gctggtactgctagcacggaggaaa

SEQ ID NO: 4768130 - DNA, 25 bp, Homo sapien
actgctagcacggaggaaatgagag

SEQ ID NO: 4768131 - DNA, 25 bp, Homo sapien
gacgggtaatgccttctgggccagc

SEQ ID NO: 4768132 - DNA, 25 bp, Homo sapien
gtaatgccttctgggccagcatgtt

SEQ ID NO: 4768133 - DNA, 25 bp, Homo sapien
ggaaatgcagcagatcttatccatc

SEQ ID NO: 4768134 - DNA, 25 bp, Homo sapien
ttctggtgccacaacatagacctgc

SEQ ID NO: 4768135 - DNA, 25 bp, Homo sapien
cagctgcctgtaactgggaaatgca

SEQ ID NO: 4768136 - DNA, 25 bp, Homo sapien
agacctgctgcctcattcctctatt

SEQ ID NO: 4768137 - DNA, 25 bp, Homo sapien
ctggtcataaccctgtccactgtgt

SEQ ID NO: 4768138 - DNA, 25 bp, Homo sapien
gtcctggccctgtattctgctgctt

SEQ ID NO: 4768139 - DNA, 25 bp, Homo sapien
tgtcctggccctgtattctgctgct

SEQ ID NO: 4768140 - DNA, 25 bp, Homo sapien
tagcttgtgatgctgctgcatgaag

SEQ ID NO: 4768141 - DNA, 25 bp, Homo sapien
gatgctgctgcatgaaggcctcgtg

SEQ ID NO: 4768142 - DNA, 25 bp, Homo sapien
ctgcatgaaggcctcgtggccatgg

SEQ ID NO: 4768143 - DNA, 25 bp, Homo sapien
tgtgatgctgctgcatgaaggcctc

SEQ ID NO: 4768144 - DNA, 25 bp, Homo sapien
aagagggcacagctatttgtgaagg

SEQ ID NO: 4768145 - DNA, 25 bp, Homo sapien
tcagtgcctgcagcgagatgattga

SEQ ID NO: 4768146 - DNA, 25 bp, Homo sapien
cagcctctggactgatgcagcgttg

SEQ ID NO: 4768147 - DNA, 25 bp, Homo sapien
tgatgcagcgttgatgctgcacgtc

SEQ ID NO: 4768148 - DNA, 25 bp, Homo sapien
ctggagacagccactcacgcttgac

SEQ ID NO: 4768149 - DNA, 25 bp, Homo sapien
tggagacagccactcacgcttgacc

SEQ ID NO: 4768150 - DNA, 25 bp, Homo sapien
acctggagacagccactcacgcttg

SEQ ID NO: 4768151 - DNA, 25 bp, Homo sapien
ggagacagccactcacgcttgaccc

SEQ ID NO: 4768152 - DNA, 25 bp, Homo sapien
ccagtccattccccaggataccgtt

SEQ ID NO: 4768153 - DNA, 25 bp, Homo sapien
cagtccattccccaggataccgttt

SEQ ID NO: 4768154 - DNA, 25 bp, Homo sapien
tcccagtccattccccaggataccg

SEQ ID NO: 4768155 - DNA, 25 bp, Homo sapien
tttcccagtccattccccaggatac

SEQ ID NO: 4768156 - DNA, 25 bp, Homo sapien
tagtggcatttatgtgtttgaatga

SEQ ID NO: 4768157 - DNA, 25 bp, Homo sapien
catgctggagggcatattattttta

SEQ ID NO: 4768158 - DNA, 25 bp, Homo sapien
ggttgtttgtagtggcatttatgtg

SEQ ID NO: 4768159 - DNA, 25 bp, Homo sapien
gacagccagaacaagcctctgtaga

SEQ ID NO: 4768160 - DNA, 25 bp, Homo sapien
tgggtcatcctctagtacttgctct

SEQ ID NO: 4768161 - DNA, 25 bp, Homo sapien
tctgggtcatcctctagtacttgct

SEQ ID NO: 4768162 - DNA, 25 bp, Homo sapien
ggtcatcctctagtacttgctctcc

SEQ ID NO: 4768163 - DNA, 25 bp, Homo sapien
tctgtcccaggctctcatcccaggc

SEQ ID NO: 4768164 - DNA, 25 bp, Homo sapien
tgcacagaggttttgcaatacctcc

SEQ ID NO: 4768165 - DNA, 25 bp, Homo sapien
gtgcacagaggttttgcaatacctc

SEQ ID NO: 4768166 - DNA, 25 bp, Homo sapien
actccttgtgcatgagagaaaaatg

SEQ ID NO: 4768167 - DNA, 25 bp, Homo sapien
cacagaggttttgcaatacctcctt

SEQ ID NO: 4768168 - DNA, 25 bp, Homo sapien
tggatcttgccatcacggtcacaga

SEQ ID NO: 4768169 - DNA, 25 bp, Homo sapien
gagatgagcagcagaattcctggct

SEQ ID NO: 4768170 - DNA, 25 bp, Homo sapien
ctggcttggcctccgtgtcgggtct

SEQ ID NO: 4768171 - DNA, 25 bp, Homo sapien
gcctgccaagttggttgacctctgg

SEQ ID NO: 4768172 - DNA, 25 bp, Homo sapien
aaggtccctggccttatgtttgtgc

SEQ ID NO: 4768173 - DNA, 25 bp, Homo sapien
cactggccctgttgtatttgccgat

SEQ ID NO: 4768174 - DNA, 25 bp, Homo sapien
gagtttaatgaggatgccactggcc

SEQ ID NO: 4768175 - DNA, 25 bp, Homo sapien
ggccttatgtttgtgcagggagccc

SEQ ID NO: 4768176 - DNA, 25 bp, Homo sapien
tgtaggtcttgggttcaaggagccc

SEQ ID NO: 4768177 - DNA, 25 bp, Homo sapien
gggatgctgcggagagctgtaggtc

SEQ ID NO: 4768178 - DNA, 25 bp, Homo sapien
cataatctctgagtagaggaaactg

SEQ ID NO: 4768179 - DNA, 25 bp, Homo sapien
ccataatctctgagtagaggaaact

SEQ ID NO: 4768180 - DNA, 25 bp, Homo sapien
cagaatggtgctattgggtttgaga

SEQ ID NO: 4768181 - DNA, 25 bp, Homo sapien
tattgggtttgagatattcatatgc

SEQ ID NO: 4768182 - DNA, 25 bp, Homo sapien
ggtgctattgggtttgagatattca

SEQ ID NO: 4768183 - DNA, 25 bp, Homo sapien
ctctgcttcccagaatggtgctatt

SEQ ID NO: 4768184 - DNA, 25 bp, Homo sapien
ttatccacattaccaagcttcatct

SEQ ID NO: 4768185 - DNA, 25 bp, Homo sapien
ggagaactcagtcctgtgtgcatct

SEQ ID NO: 4768186 - DNA, 25 bp, Homo sapien
tgtgtgcatctcctatacgctggga

SEQ ID NO: 4768187 - DNA, 25 bp, Homo sapien
tctcctatacgctgggacctgggca

SEQ ID NO: 4768188 - DNA, 25 bp, Homo sapien
tccttttggactgaaaggagaactc

SEQ ID NO: 4768189 - DNA, 25 bp, Homo sapien
gcttcttgcacctgatgctccacaa

SEQ ID NO: 4768190 - DNA, 25 bp, Homo sapien
gcatttcaagaagatgcagctgaca

SEQ ID NO: 4768191 - DNA, 25 bp, Homo sapien
ttgaaggcgacaccatggcagtggc

SEQ ID NO: 4768192 - DNA, 25 bp, Homo sapien
gcctgtcggaatagattggctcaga

SEQ ID NO: 4768193 - DNA, 25 bp, Homo sapien
cctgagagctgcgagaataagaatc

SEQ ID NO: 4768194 - DNA, 25 bp, Homo sapien
aaatcccgacaggttgctaaatagg

SEQ ID NO: 4768195 - DNA, 25 bp, Homo sapien
aaagagaccgttgcattcctgaagt

SEQ ID NO: 4768196 - DNA, 25 bp, Homo sapien
gaaattcaggaacacccatggagcc

SEQ ID NO: 4768197 - DNA, 25 bp, Homo sapien
ggctgactgtatattgtactcttaa

SEQ ID NO: 4768198 - DNA, 25 bp, Homo sapien
acactctagggggttcggctgactg

SEQ ID NO: 4768199 - DNA, 25 bp, Homo sapien
gggttcggctgactgtatattgtac

SEQ ID NO: 4768200 - DNA, 25 bp, Homo sapien
gttcggctgactgtatattgtactc

SEQ ID NO: 4768201 - DNA, 25 bp, Homo sapien
tgaatgatgatctatcagctttggg

SEQ ID NO: 4768202 - DNA, 25 bp, Homo sapien
attcggattctgagattagaggcag

SEQ ID NO: 4768203 - DNA, 25 bp, Homo sapien
tgttgccaagatgccctggattcaa

SEQ ID NO: 4768204 - DNA, 25 bp, Homo sapien
cagctttggggattcggattctgag

SEQ ID NO: 4768205 - DNA, 25 bp, Homo sapien
ctgtgagtagaaagaaaaatccacc

SEQ ID NO: 4768206 - DNA, 25 bp, Homo sapien
caaaattgttatcagctctccaggg

SEQ ID NO: 4768207 - DNA, 25 bp, Homo sapien
tttccagttagccaataaggtacat

SEQ ID NO: 4768208 - DNA, 25 bp, Homo sapien
taataatataccttccatgcagaca

SEQ ID NO: 4768209 - DNA, 25 bp, Homo sapien
caataaggtacatcgaagggcaaaa

SEQ ID NO: 4768210 - DNA, 25 bp, Homo sapien
cagtgtttttatcaacggcttggca

SEQ ID NO: 4768211 - DNA, 25 bp, Homo sapien
tgaaaaagcagcgacaggaagaatg

SEQ ID NO: 4768212 - DNA, 25 bp, Homo sapien
gcttcggtgggtatttgagagacat

SEQ ID NO: 4768213 - DNA, 25 bp, Homo sapien
tgaatatcgccaaatgtcctcaggc

SEQ ID NO: 4768214 - DNA, 25 bp, Homo sapien
cagccgccataacagacatgtgttg

SEQ ID NO: 4768215 - DNA, 25 bp, Homo sapien
tgtgagtctcgccatcgcagggaga

SEQ ID NO: 4768216 - DNA, 25 bp, Homo sapien
cctgatacatatttagggtggcaag

SEQ ID NO: 4768217 - DNA, 25 bp, Homo sapien
ggaaccaatccaatggcacagctga

SEQ ID NO: 4768218 - DNA, 25 bp, Homo sapien
tgagcatgtccattgcgagggcaca

SEQ ID NO: 4768219 - DNA, 25 bp, Homo sapien
tgttgaatccgaactgaatgtggca

SEQ ID NO: 4768220 - DNA, 25 bp, Homo sapien
tatgtgtacattgtccccttggcca

SEQ ID NO: 4768221 - DNA, 25 bp, Homo sapien
aaatgaggctacagtttccctgcgg

SEQ ID NO: 4768222 - DNA, 25 bp, Homo sapien
gcacatgaacacgatgactgtaggg

SEQ ID NO: 4768223 - DNA, 25 bp, Homo sapien
gactgtagggatccagcctcttcct

SEQ ID NO: 4768224 - DNA, 25 bp, Homo sapien
tattgctgctgcctacagtcctggc

SEQ ID NO: 4768225 - DNA, 25 bp, Homo sapien
tcctttggcctttcctattgctgct

SEQ ID NO: 4768226 - DNA, 25 bp, Homo sapien
ttccacgtacacctcaaccttggca

SEQ ID NO: 4768227 - DNA, 25 bp, Homo sapien
tccacgtacacctcaaccttggcat

SEQ ID NO: 4768228 - DNA, 25 bp, Homo sapien
cttccacgtacacctcaaccttggc

SEQ ID NO: 4768229 - DNA, 25 bp, Homo sapien
tgaaggtctgcaccgcgggtaagtc

SEQ ID NO: 4768230 - DNA, 25 bp, Homo sapien
ctagcactgaaaggcaatagtcttc

SEQ ID NO: 4768231 - DNA, 25 bp, Homo sapien
tgaaggccaagtacaagccatccgg

SEQ ID NO: 4768232 - DNA, 25 bp, Homo sapien
caacttctctaaattgtactgcaag

SEQ ID NO: 4768233 - DNA, 25 bp, Homo sapien
gcaggctttactagaattgtggctc

SEQ ID NO: 4768234 - DNA, 25 bp, Homo sapien
gaatggttcaggcaggctttactag

SEQ ID NO: 4768235 - DNA, 25 bp, Homo sapien
ttctggaatggttcaggcaggcttt

SEQ ID NO: 4768236 - DNA, 25 bp, Homo sapien
ggttcaggcaggctttactagaatt

SEQ ID NO: 4768237 - DNA, 25 bp, Homo sapien
aagcgtgtggctcttgagtagaaga

SEQ ID NO: 4768238 - DNA, 25 bp, Homo sapien
tcgcaaccatgggagtgttctgtcc

SEQ ID NO: 4768239 - DNA, 25 bp, Homo sapien
tttcgccatttgacatgataaagcg

SEQ ID NO: 4768240 - DNA, 25 bp, Homo sapien
cttgagtagaagaactgtcgcaacc

SEQ ID NO: 4768241 - DNA, 25 bp, Homo sapien
tatgtggacatgacttgccaccggc

SEQ ID NO: 4768242 - DNA, 25 bp, Homo sapien
cagcacatcgaaggtggcctggaca

SEQ ID NO: 4768243 - DNA, 25 bp, Homo sapien
gattctcgatgtggatcagcaggaa

SEQ ID NO: 4768244 - DNA, 25 bp, Homo sapien
gcagcagtttccatgggtggccttg

SEQ ID NO: 4768245 - DNA, 25 bp, Homo sapien
atttcccagaagctcgcaccagtgg

SEQ ID NO: 4768246 - DNA, 25 bp, Homo sapien
gatatttcccagaagctcgcaccag

SEQ ID NO: 4768247 - DNA, 25 bp, Homo sapien
ggatccaatgaagctgccgcgtcat

SEQ ID NO: 4768248 - DNA, 25 bp, Homo sapien
ggctctggatccaatgaagctgccg

SEQ ID NO: 4768249 - DNA, 25 bp, Homo sapien
cacagccgaagggattcttcagttc

SEQ ID NO: 4768250 - DNA, 25 bp, Homo sapien
cagccgaagggattcttcagttcca

SEQ ID NO: 4768251 - DNA, 25 bp, Homo sapien
ggtcacagccgaagggattcttcag

SEQ ID NO: 4768252 - DNA, 25 bp, Homo sapien
gccgaagggattcttcagttccagc

SEQ ID NO: 4768253 - DNA, 25 bp, Homo sapien
agcggttgaaggcttggtctggaag

SEQ ID NO: 4768254 - DNA, 25 bp, Homo sapien
caacgcttctgtgggatgaaaggct

SEQ ID NO: 4768255 - DNA, 25 bp, Homo sapien
caaaaggggaacaacaacgcttctg

SEQ ID NO: 4768256 - DNA, 25 bp, Homo sapien
ctggtgaagcagagcggttgaaggc

SEQ ID NO: 4768257 - DNA, 25 bp, Homo sapien
tggccaggatggggactcagacctc

SEQ ID NO: 4768258 - DNA, 25 bp, Homo sapien
ggccaggatggggactcagacctca

SEQ ID NO: 4768259 - DNA, 25 bp, Homo sapien
ctggccaggatggggactcagacct

SEQ ID NO: 4768260 - DNA, 25 bp, Homo sapien
gccaggatggggactcagacctcac

SEQ ID NO: 4768261 - DNA, 25 bp, Homo sapien
ctgtgcccttgggtgtctcctcgga

SEQ ID NO: 4768262 - DNA, 25 bp, Homo sapien
tgtctaagtaacacctctcctttgg

SEQ ID NO: 4768263 - DNA, 25 bp, Homo sapien
tggggtgaactgtaacctgcctcat

SEQ ID NO: 4768264 - DNA, 25 bp, Homo sapien
acctgcatctacttgtctaagtaac

SEQ ID NO: 4768265 - DNA, 25 bp, Homo sapien
ctttggggtgaactgtaacctgcct

SEQ ID NO: 4768266 - DNA, 25 bp, Homo sapien
ttgtcttgagtttctcgtgggaagg

SEQ ID NO: 4768267 - DNA, 25 bp, Homo sapien
tggacccctgcattttcccacccta

SEQ ID NO: 4768268 - DNA, 25 bp, Homo sapien
tcagctgacattgagagtaggtggt

SEQ ID NO: 4768269 - DNA, 25 bp, Homo sapien
ggtggttgacatcctcatggacccc

SEQ ID NO: 4768270 - DNA, 25 bp, Homo sapien
tctggccaggatcctgcactgacag

SEQ ID NO: 4768271 - DNA, 25 bp, Homo sapien
attccaccggcaccgcaagtttgag

SEQ ID NO: 4768272 - DNA, 25 bp, Homo sapien
ggctgactgcagtgttccctaacat

SEQ ID NO: 4768273 - DNA, 25 bp, Homo sapien
caagtttgagtactcctctgggaca

SEQ ID NO: 4768274 - DNA, 25 bp, Homo sapien
tatccccaacaagataggaggctct

SEQ ID NO: 4768275 - DNA, 25 bp, Homo sapien
taaggtccgcgtaatatccccaaca

SEQ ID NO: 4768276 - DNA, 25 bp, Homo sapien
ctctagcttgttggagtgcttgttc

SEQ ID NO: 4768277 - DNA, 25 bp, Homo sapien
tgtgaattatgggtaaggtccgcgt

SEQ ID NO: 4768278 - DNA, 25 bp, Homo sapien
tttcaggactgttgtggcagtttac

SEQ ID NO: 4768279 - DNA, 25 bp, Homo sapien
cacaggtctcatggcgttgttgatc

SEQ ID NO: 4768280 - DNA, 25 bp, Homo sapien
gatgggttcctagccccagatgctt

SEQ ID NO: 4768281 - DNA, 25 bp, Homo sapien
gcagtttactgatgggttcctagcc

SEQ ID NO: 4768282 - DNA, 25 bp, Homo sapien
gaagaaactttttgtccaatgaggc

SEQ ID NO: 4768283 - DNA, 25 bp, Homo sapien
tctgtgcccagatccaagtgagact

SEQ ID NO: 4768284 - DNA, 25 bp, Homo sapien
aaatggaaggtctaacagcaaagcc

SEQ ID NO: 4768285 - DNA, 25 bp, Homo sapien
gttgagcatgtgaggaattgttccc

SEQ ID NO: 4768286 - DNA, 25 bp, Homo sapien
ccacgatgcagaattttagctctga

SEQ ID NO: 4768287 - DNA, 25 bp, Homo sapien
aaagtacacctttccacttgtgcca

SEQ ID NO: 4768288 - DNA, 25 bp, Homo sapien
cttcttggaacccatctatatggtt

SEQ ID NO: 4768289 - DNA, 25 bp, Homo sapien
aacccatctatatggttttcaactg

SEQ ID NO: 4768290 - DNA, 25 bp, Homo sapien
tcacggacgtaaagggctcccagat

SEQ ID NO: 4768291 - DNA, 25 bp, Homo sapien
gacttggagccaaacgcccaaatat

SEQ ID NO: 4768292 - DNA, 25 bp, Homo sapien
cagatttggaggcaacaactggaat

SEQ ID NO: 4768293 - DNA, 25 bp, Homo sapien
gacgtaaagggctcccagatttgga

SEQ ID NO: 4768294 - DNA, 25 bp, Homo sapien
caggaactactacttatgcacactt

SEQ ID NO: 4768295 - DNA, 25 bp, Homo sapien
tcaggaactactacttatgcacact

SEQ ID NO: 4768296 - DNA, 25 bp, Homo sapien
tacggcgacatcagctgctccttca

SEQ ID NO: 4768297 - DNA, 25 bp, Homo sapien
catcagctgctccttcagcacactc

SEQ ID NO: 4768298 - DNA, 25 bp, Homo sapien
gacatcagctgctccttcagcacac

SEQ ID NO: 4768299 - DNA, 25 bp, Homo sapien
tcagctgctccttcagcacactcac

SEQ ID NO: 4768300 - DNA, 25 bp, Homo sapien
cctatcctctgaacttctacttgtt

SEQ ID NO: 4768301 - DNA, 25 bp, Homo sapien
cttttatcagctccatcccctccta

SEQ ID NO: 4768302 - DNA, 25 bp, Homo sapien
tcccctcctatcctctgaacttcta

SEQ ID NO: 4768303 - DNA, 25 bp, Homo sapien
tctcttttatcagctccatcccctc

SEQ ID NO: 4768304 - DNA, 25 bp, Homo sapien
taaaggtggcacaagcttggtcctg

SEQ ID NO: 4768305 - DNA, 25 bp, Homo sapien
ggttcagcacaaatgcacctcttga

SEQ ID NO: 4768306 - DNA, 25 bp, Homo sapien
caggacacagtctgctaaaggtggc

SEQ ID NO: 4768307 - DNA, 25 bp, Homo sapien
caggcagcaacaatccttgggaggg

SEQ ID NO: 4768308 - DNA, 25 bp, Homo sapien
ctccggagcagtaggcccaagttgc

SEQ ID NO: 4768309 - DNA, 25 bp, Homo sapien
tctctgctagagcattcaacgctgg

SEQ ID NO: 4768310 - DNA, 25 bp, Homo sapien
gctggacagacacgggacagggaga

SEQ ID NO: 4768311 - DNA, 25 bp, Homo sapien
tttacaagcattagcaggatacttc

SEQ ID NO: 4768312 - DNA, 25 bp, Homo sapien
tcagttgtccaacgaaaggagtctg

SEQ ID NO: 4768313 - DNA, 25 bp, Homo sapien
gatgctacagacagctgagtcgcaa

SEQ ID NO: 4768314 - DNA, 25 bp, Homo sapien
tgagtcgcaaatgcgcctgagccgc

SEQ ID NO: 4768315 - DNA, 25 bp, Homo sapien
taaagaggccatgcaaggatgctac

SEQ ID NO: 4768316 - DNA, 25 bp, Homo sapien
aggcctgcagaactggttctgctcc

SEQ ID NO: 4768317 - DNA, 25 bp, Homo sapien
ttccaatggacagagatgcccagca

SEQ ID NO: 4768318 - DNA, 25 bp, Homo sapien
tttccaatggacagagatgcccagc

SEQ ID NO: 4768319 - DNA, 25 bp, Homo sapien
ggcctgcagaactggttctgctcca

SEQ ID NO: 4768320 - DNA, 25 bp, Homo sapien
tgaagtggtaggatgagcttccacc

SEQ ID NO: 4768321 - DNA, 25 bp, Homo sapien
cttgaagggacccttggatgctaaa

SEQ ID NO: 4768322 - DNA, 25 bp, Homo sapien
ttagcttgaagggacccttggatgc

SEQ ID NO: 4768323 - DNA, 25 bp, Homo sapien
cttggatgctaaatgaagtggtagg

SEQ ID NO: 4768324 - DNA, 25 bp, Homo sapien
gccttccgtcttgtctttccaatca

SEQ ID NO: 4768325 - DNA, 25 bp, Homo sapien
cagcaagtgtcccaagaggacggca

SEQ ID NO: 4768326 - DNA, 25 bp, Homo sapien
ctccttcaggactcacagcaagtgt

SEQ ID NO: 4768327 - DNA, 25 bp, Homo sapien
tgacggtcagatcacatgccttccg

SEQ ID NO: 4768328 - DNA, 25 bp, Homo sapien
gctgtctctcactcggcagcttggg

SEQ ID NO: 4768329 - DNA, 25 bp, Homo sapien
cagctgtgaatgctgtcgcctccca

SEQ ID NO: 4768330 - DNA, 25 bp, Homo sapien
gggaattgatacatccacatggcaa

SEQ ID NO: 4768331 - DNA, 25 bp, Homo sapien
caaggagaccctgctgatcatgtgg

SEQ ID NO: 4768332 - DNA, 25 bp, Homo sapien
acttcatcatcacgaacactcagaa

SEQ ID NO: 4768333 - DNA, 25 bp, Homo sapien
ctgaagaatgaactgtggacagact

SEQ ID NO: 4768334 - DNA, 25 bp, Homo sapien
tcatcatcacgaacactcagaatcc

SEQ ID NO: 4768335 - DNA, 25 bp, Homo sapien
tgaagaatgaactgtggacagactt

SEQ ID NO: 4768336 - DNA, 25 bp, Homo sapien
tctctccatctatcagagttgtaac

SEQ ID NO: 4768337 - DNA, 25 bp, Homo sapien
cctgctgggaacgtgcctttggaaa

SEQ ID NO: 4768338 - DNA, 25 bp, Homo sapien
cctttggaaatgagaatcctgtgct

SEQ ID NO: 4768339 - DNA, 25 bp, Homo sapien
gcttggtctagtggcctctcttcat

SEQ ID NO: 4768340 - DNA, 25 bp, Homo sapien
catgtgacacttgtaaagcccacct

SEQ ID NO: 4768341 - DNA, 25 bp, Homo sapien
tagtcttgtttgtgagccccttaga

SEQ ID NO: 4768342 - DNA, 25 bp, Homo sapien
aattggcctgcaatgaaaggctagc

SEQ ID NO: 4768343 - DNA, 25 bp, Homo sapien
aggcctagcagacccatggacaaag

SEQ ID NO: 4768344 - DNA, 25 bp, Homo sapien
tgagtatccaggctagcaggcagct

SEQ ID NO: 4768345 - DNA, 25 bp, Homo sapien
agggcagaaaagcagtattctgtct

SEQ ID NO: 4768346 - DNA, 25 bp, Homo sapien
cagaaaagcagtattctgtctcccc

SEQ ID NO: 4768347 - DNA, 25 bp, Homo sapien
agaaaagcagtattctgtctcccct

SEQ ID NO: 4768348 - DNA, 25 bp, Homo sapien
ggcagaaaagcagtattctgtctcc

SEQ ID NO: 4768349 - DNA, 25 bp, Homo sapien
ctgatctctatgatgccaatatctg

SEQ ID NO: 4768350 - DNA, 25 bp, Homo sapien
aacctcaagagctctacaaagtcaa

SEQ ID NO: 4768351 - DNA, 25 bp, Homo sapien
aaagtcaagtgcatcttcaatcaag

SEQ ID NO: 4768352 - DNA, 25 bp, Homo sapien
caatcaagggcgtgtttttgctccg

SEQ ID NO: 4768353 - DNA, 25 bp, Homo sapien
ggtccccagaggccacttcaggact

SEQ ID NO: 4768354 - DNA, 25 bp, Homo sapien
tgcaggggagtccctttggtcccca

SEQ ID NO: 4768355 - DNA, 25 bp, Homo sapien
ctttggtccccagaggccacttcag

SEQ ID NO: 4768356 - DNA, 25 bp, Homo sapien
ttggtccccagaggccacttcagga

SEQ ID NO: 4768357 - DNA, 25 bp, Homo sapien
ttttctaggtgccaaaacataagag

SEQ ID NO: 4768358 - DNA, 25 bp, Homo sapien
cactttccattgatccatgaccctt

SEQ ID NO: 4768359 - DNA, 25 bp, Homo sapien
ttaagacctccggatttactcttgc

SEQ ID NO: 4768360 - DNA, 25 bp, Homo sapien
gacctccggatttactcttgcactt

SEQ ID NO: 4768361 - DNA, 25 bp, Homo sapien
caagaggtggacatggtccagatca

SEQ ID NO: 4768362 - DNA, 25 bp, Homo sapien
gccaagaggtggacatggtccagat

SEQ ID NO: 4768363 - DNA, 25 bp, Homo sapien
gatggccaagaggtggacatggtcc

SEQ ID NO: 4768364 - DNA, 25 bp, Homo sapien
atggccaagaggtggacatggtcca

SEQ ID NO: 4768365 - DNA, 25 bp, Homo sapien
ctgaggaaagaggaagcctgaaaca

SEQ ID NO: 4768366 - DNA, 25 bp, Homo sapien
cctgaaacagagaggtttgtggctg

SEQ ID NO: 4768367 - DNA, 25 bp, Homo sapien
aaacagagaggtttgtggctgttac

SEQ ID NO: 4768368 - DNA, 25 bp, Homo sapien
tgaggaaagaggaagcctgaaacag

SEQ ID NO: 4768369 - DNA, 25 bp, Homo sapien
cctgcctggcttttacgtggtgtca

SEQ ID NO: 4768370 - DNA, 25 bp, Homo sapien
gtttgtggtgctcgcaggctatctg

SEQ ID NO: 4768371 - DNA, 25 bp, Homo sapien
tgtcataccagagcgccgagcaact

SEQ ID NO: 4768372 - DNA, 25 bp, Homo sapien
ttgtggtgctcgcaggctatctgag

SEQ ID NO: 4768373 - DNA, 25 bp, Homo sapien
gcctgtagagctgaatgaaaccaga

SEQ ID NO: 4768374 - DNA, 25 bp, Homo sapien
cactggcccaaacaggctcttttgc

SEQ ID NO: 4768375 - DNA, 25 bp, Homo sapien
catttgcctgtagagctgaatgaaa

SEQ ID NO: 4768376 - DNA, 25 bp, Homo sapien
ccactggcccaaacaggctcttttg

SEQ ID NO: 4768377 - DNA, 25 bp, Homo sapien
tggatttgaaggttgtcttgagcca

SEQ ID NO: 4768378 - DNA, 25 bp, Homo sapien
ctgtggatttgaaggttgtcttgag

SEQ ID NO: 4768379 - DNA, 25 bp, Homo sapien
tttgaaggttgtcttgagccatttg

SEQ ID NO: 4768380 - DNA, 25 bp, Homo sapien
ttgaaggttgtcttgagccatttgc

SEQ ID NO: 4768381 - DNA, 25 bp, Homo sapien
gcaactgtattctggcaggaagcgt

SEQ ID NO: 4768382 - DNA, 25 bp, Homo sapien
acccctgaggtgtcctgctgactga

SEQ ID NO: 4768383 - DNA, 25 bp, Homo sapien
aagcgtaatggactgtaacaaagcc

SEQ ID NO: 4768384 - DNA, 25 bp, Homo sapien
caacaattattggacccctttcctg

SEQ ID NO: 4768385 - DNA, 25 bp, Homo sapien
attcttcccctatcctggaccagta

SEQ ID NO: 4768386 - DNA, 25 bp, Homo sapien
ctatcctggaccagtatcctatctg

SEQ ID NO: 4768387 - DNA, 25 bp, Homo sapien
cagtatcctatctgtgatattctgt

SEQ ID NO: 4768388 - DNA, 25 bp, Homo sapien
gtatcctatctgtgatattctgtgc

SEQ ID NO: 4768389 - DNA, 25 bp, Homo sapien
tggtagctagaaaggctgtgtccac

SEQ ID NO: 4768390 - DNA, 25 bp, Homo sapien
ttctctacagcctcggcagcttttg

SEQ ID NO: 4768391 - DNA, 25 bp, Homo sapien
gaagcttgcttcctggtagctagaa

SEQ ID NO: 4768392 - DNA, 25 bp, Homo sapien
gcagcttttgcatcagagttgtatg

SEQ ID NO: 4768393 - DNA, 25 bp, Homo sapien
aattgccctggattccttcgctgtc

SEQ ID NO: 4768394 - DNA, 25 bp, Homo sapien
tgccctggattccttcgctgtcctt

SEQ ID NO: 4768395 - DNA, 25 bp, Homo sapien
attgccctggattccttcgctgtcc

SEQ ID NO: 4768396 - DNA, 25 bp, Homo sapien
ttgccctggattccttcgctgtcct

SEQ ID NO: 4768397 - DNA, 25 bp, Homo sapien
tgacaccagttcaacggagcaaagg

SEQ ID NO: 4768398 - DNA, 25 bp, Homo sapien
acaccagttcaacggagcaaagggc

SEQ ID NO: 4768399 - DNA, 25 bp, Homo sapien
ccagttcaacggagcaaagggctct

SEQ ID NO: 4768400 - DNA, 25 bp, Homo sapien
gctgacaccagttcaacggagcaaa

SEQ ID NO: 4768401 - DNA, 25 bp, Homo sapien
tggacatatagtcccaatggagagc

SEQ ID NO: 4768402 - DNA, 25 bp, Homo sapien
gggccacagagagctagatgatttt

SEQ ID NO: 4768403 - DNA, 25 bp, Homo sapien
gagagctagatgattttgatgaact

SEQ ID NO: 4768404 - DNA, 25 bp, Homo sapien
tgatgaactgtagttcttatggaca

SEQ ID NO: 4768405 - DNA, 25 bp, Homo sapien
tgtaagtggagttgtcagtgggcat

SEQ ID NO: 4768406 - DNA, 25 bp, Homo sapien
acagggtcagtgtaagtggagttgt

SEQ ID NO: 4768407 - DNA, 25 bp, Homo sapien
tcagtgtaagtggagttgtcagtgg

SEQ ID NO: 4768408 - DNA, 25 bp, Homo sapien
agaactccaagtcatcaatggctgc

SEQ ID NO: 4768409 - DNA, 25 bp, Homo sapien
tagcaggggatattcaaataagcga

SEQ ID NO: 4768410 - DNA, 25 bp, Homo sapien
gacaggaggtgagtagaatatgaat

SEQ ID NO: 4768411 - DNA, 25 bp, Homo sapien
gaggtgagtagaatatgaatagcag

SEQ ID NO: 4768412 - DNA, 25 bp, Homo sapien
tcaaataagcgagtcgtgtggggct

SEQ ID NO: 4768413 - DNA, 25 bp, Homo sapien
tcttccagtaatgcatgtctaattt

SEQ ID NO: 4768414 - DNA, 25 bp, Homo sapien
tttgcatgtatttggtagtaagagc

SEQ ID NO: 4768415 - DNA, 25 bp, Homo sapien
agtttcttccagtaatgcatgtcta

SEQ ID NO: 4768416 - DNA, 25 bp, Homo sapien
tctgccccactaaagtcatcagctc

SEQ ID NO: 4768417 - DNA, 25 bp, Homo sapien
attctgagcaatttcatacttttgc

SEQ ID NO: 4768418 - DNA, 25 bp, Homo sapien
tttcatacttttgcaggagatacat

SEQ ID NO: 4768419 - DNA, 25 bp, Homo sapien
tgaaaaattctgagcaatttcatac

SEQ ID NO: 4768420 - DNA, 25 bp, Homo sapien
cttatagatgaaaaattctgagcaa

SEQ ID NO: 4768421 - DNA, 25 bp, Homo sapien
aaatccaagtttttatatgtcatca

SEQ ID NO: 4768422 - DNA, 25 bp, Homo sapien
aaaaatccaagtttttatatgtcat

SEQ ID NO: 4768423 - DNA, 25 bp, Homo sapien
aatccaagtttttatatgtcatcaa

SEQ ID NO: 4768424 - DNA, 25 bp, Homo sapien
tccaagtttttatatgtcatcaatc

SEQ ID NO: 4768425 - DNA, 25 bp, Homo sapien
gagactgtaccgtaattgttctctg

SEQ ID NO: 4768426 - DNA, 25 bp, Homo sapien
tctgagactgtaccgtaattgttct

SEQ ID NO: 4768427 - DNA, 25 bp, Homo sapien
gttctctgagactgtaccgtaattg

SEQ ID NO: 4768428 - DNA, 25 bp, Homo sapien
gactgtaccgtaattgttctctgga

SEQ ID NO: 4768429 - DNA, 25 bp, Homo sapien
attagtcagaaccttcagcgggaga

SEQ ID NO: 4768430 - DNA, 25 bp, Homo sapien
ttagtcagaaccttcagcgggagat

SEQ ID NO: 4768431 - DNA, 25 bp, Homo sapien
cattagtcagaaccttcagcgggag

SEQ ID NO: 4768432 - DNA, 25 bp, Homo sapien
aattaaggatatggtagaacagtac

SEQ ID NO: 4768433 - DNA, 25 bp, Homo sapien
ggatatggtagaacagtactgtact

SEQ ID NO: 4768434 - DNA, 25 bp, Homo sapien
tgtaaaattaaggatatggtagaac

SEQ ID NO: 4768435 - DNA, 25 bp, Homo sapien
ggtagaacagtactgtacttgtgtg

SEQ ID NO: 4768436 - DNA, 25 bp, Homo sapien
ccaattggctttgactctgagtcct

SEQ ID NO: 4768437 - DNA, 25 bp, Homo sapien
cttttcccaattggctttgactctg

SEQ ID NO: 4768438 - DNA, 25 bp, Homo sapien
tcccaattggctttgactctgagtc

SEQ ID NO: 4768439 - DNA, 25 bp, Homo sapien
tttcccaattggctttgactctgag

SEQ ID NO: 4768440 - DNA, 25 bp, Homo sapien
tcgcttctgcatttaccggcttctc

SEQ ID NO: 4768441 - DNA, 25 bp, Homo sapien
gagtcgcttctgcatttaccggctt

SEQ ID NO: 4768442 - DNA, 25 bp, Homo sapien
tctgagtcgcttctgcatttaccgg

SEQ ID NO: 4768443 - DNA, 25 bp, Homo sapien
tgagtcgcttctgcatttaccggct

SEQ ID NO: 4768444 - DNA, 25 bp, Homo sapien
ttccttaggtgaggccatgggccca

SEQ ID NO: 4768445 - DNA, 25 bp, Homo sapien
gacagaaccacctatcccagttggg

SEQ ID NO: 4768446 - DNA, 25 bp, Homo sapien
ggcctgctggccagtctgaagacca

SEQ ID NO: 4768447 - DNA, 25 bp, Homo sapien
tttcatgtctgatccactgtggccg

SEQ ID NO: 4768448 - DNA, 25 bp, Homo sapien
gatgagagacacacttctatgctgc

SEQ ID NO: 4768449 - DNA, 25 bp, Homo sapien
gaaaagcatctttactcctggctgt

SEQ ID NO: 4768450 - DNA, 25 bp, Homo sapien
tgaagcataggctctccggagacct

SEQ ID NO: 4768451 - DNA, 25 bp, Homo sapien
ggagacctgctatccttttgcagaa

SEQ ID NO: 4768452 - DNA, 25 bp, Homo sapien
cttttcaaaagcctctccacggtct

SEQ ID NO: 4768453 - DNA, 25 bp, Homo sapien
tccacggtctgagtctcccttctgg

SEQ ID NO: 4768454 - DNA, 25 bp, Homo sapien
tgagtctcccttctgggtcagtaaa

SEQ ID NO: 4768455 - DNA, 25 bp, Homo sapien
caaaagcctctccacggtctgagtc

SEQ ID NO: 4768456 - DNA, 25 bp, Homo sapien
agaatgaagtggctgcacattgttt

SEQ ID NO: 4768457 - DNA, 25 bp, Homo sapien
tgaaagaatgaagtggctgcacatt

SEQ ID NO: 4768458 - DNA, 25 bp, Homo sapien
aaagaatgaagtggctgcacattgt

SEQ ID NO: 4768459 - DNA, 25 bp, Homo sapien
aatgaagtggctgcacattgtttgg

SEQ ID NO: 4768460 - DNA, 25 bp, Homo sapien
tccataacaaaagtgccactcgact

SEQ ID NO: 4768461 - DNA, 25 bp, Homo sapien
taacaaaagtgccactcgacttctc

SEQ ID NO: 4768462 - DNA, 25 bp, Homo sapien
taatgcagctcgagggctcttgtcg

SEQ ID NO: 4768463 - DNA, 25 bp, Homo sapien
ttctccccgattaatgcagctcgag

SEQ ID NO: 4768464 - DNA, 25 bp, Homo sapien
ggtcccttaaatttgtggcagtcag

SEQ ID NO: 4768465 - DNA, 25 bp, Homo sapien
gtgtccatccttctagacatttgaa

SEQ ID NO: 4768466 - DNA, 25 bp, Homo sapien
gagaatggcggtgcaccctagatgt

SEQ ID NO: 4768467 - DNA, 25 bp, Homo sapien
tagatgtgttagagcctggtggtcc

SEQ ID NO: 4768468 - DNA, 25 bp, Homo sapien
gagtgtagatcagtagctctggcag

SEQ ID NO: 4768469 - DNA, 25 bp, Homo sapien
cctagcttggcgaggttcaggctca

SEQ ID NO: 4768470 - DNA, 25 bp, Homo sapien
tacaaggtcaagtgtatcagcactc

SEQ ID NO: 4768471 - DNA, 25 bp, Homo sapien
tcaggctcaaatccctagaggacag

SEQ ID NO: 4768472 - DNA, 25 bp, Homo sapien
tgcagctagctttctggacggcaga

SEQ ID NO: 4768473 - DNA, 25 bp, Homo sapien
ccaagaagtcaagctccggagagga

SEQ ID NO: 4768474 - DNA, 25 bp, Homo sapien
ggtttagcaaccctgataggagcag

SEQ ID NO: 4768475 - DNA, 25 bp, Homo sapien
tcaaattgctaaggccccactggtc

SEQ ID NO: 4768476 - DNA, 25 bp, Homo sapien
ggccgcccgatgcagcagcgccgct

SEQ ID NO: 4768477 - DNA, 25 bp, Homo sapien
ggcgcggtgggtgcgggacgccgtc

SEQ ID NO: 4768478 - DNA, 25 bp, Homo sapien
gcggtgggtgcgggacgccgtcgtc

SEQ ID NO: 4768479 - DNA, 25 bp, Homo sapien
ctcctgcgcccaggcccatagggca

SEQ ID NO: 4768480 - DNA, 25 bp, Homo sapien
tagtcctcatcgtagtagtcgtcca

SEQ ID NO: 4768481 - DNA, 25 bp, Homo sapien
gcagcgcagcccgttgaagactttg

SEQ ID NO: 4768482 - DNA, 25 bp, Homo sapien
actttgccgcagtaggtcaggtagc

SEQ ID NO: 4768483 - DNA, 25 bp, Homo sapien
gcatgtcctcaatgacggtgcggca

SEQ ID NO: 4768484 - DNA, 25 bp, Homo sapien
tgtcgcggtcgcagcgccgccgggc

SEQ ID NO: 4768485 - DNA, 25 bp, Homo sapien
ctgtcgcggtcgcagcgccgccggg

SEQ ID NO: 4768486 - DNA, 25 bp, Homo sapien
caatggcgcgcttggtggacttgca

SEQ ID NO: 4768487 - DNA, 25 bp, Homo sapien
tggacttgcagttctcgtcctgcgc

SEQ ID NO: 4768488 - DNA, 25 bp, Homo sapien
ccgcggcgcgtgtggttgagctgaa

SEQ ID NO: 4768489 - DNA, 25 bp, Homo sapien
agatgcagtgactcgggcagcgcca

SEQ ID NO: 4768490 - DNA, 25 bp, Homo sapien
gctgcagcagcgccatcaggcacag

SEQ ID NO: 4768491 - DNA, 25 bp, Homo sapien
cctcggcgtactggttgtaggcgta

SEQ ID NO: 4768492 - DNA, 25 bp, Homo sapien
gccagcagatgaggcggcggccgtg

SEQ ID NO: 4768493 - DNA, 25 bp, Homo sapien
ttgtaggcgtagctgcactccggct

SEQ ID NO: 4768494 - DNA, 25 bp, Homo sapien
aacagctgtcgagatctggtcccgc

SEQ ID NO: 4768495 - DNA, 25 bp, Homo sapien
ttcataaatccatgcgcgccgctgg

SEQ ID NO: 4768496 - DNA, 25 bp, Homo sapien
agaaggtcccctttcgctctggctg

SEQ ID NO: 4768497 - DNA, 25 bp, Homo sapien
ctgcagatccgttgtgcggccggct

SEQ ID NO: 4768498 - DNA, 25 bp, Homo sapien
gctccttcctcctgggctcagtgcc

SEQ ID NO: 4768499 - DNA, 25 bp, Homo sapien
ggcggctccttcctcctgggctcag

SEQ ID NO: 4768500 - DNA, 25 bp, Homo sapien
cggcggctccttcctcctgggctca

SEQ ID NO: 4768501 - DNA, 25 bp, Homo sapien
ccttcctcctgggctcagtgcctcg

SEQ ID NO: 4768502 - DNA, 25 bp, Homo sapien
ggagaacaagaaagtcggcgctgcc

SEQ ID NO: 4768503 - DNA, 25 bp, Homo sapien
tgagcccggctgcagactcgttagc

SEQ ID NO: 4768504 - DNA, 25 bp, Homo sapien
tagcagcgaggctttaaatacaaaa

SEQ ID NO: 4768505 - DNA, 25 bp, Homo sapien
gcagcttctcgggtgaccaagagcc

SEQ ID NO: 4768506 - DNA, 25 bp, Homo sapien
ggctgcgggaaatcttcctgtacct

SEQ ID NO: 4768507 - DNA, 25 bp, Homo sapien
ctccggctgcgggaaatcttcctgt

SEQ ID NO: 4768508 - DNA, 25 bp, Homo sapien
ccagcactaggagattcctccggct

SEQ ID NO: 4768509 - DNA, 25 bp, Homo sapien
cagaggcgcttggtctgccgtggga

SEQ ID NO: 4768510 - DNA, 25 bp, Homo sapien
gagaaattggctatcatccaaccca

SEQ ID NO: 4768511 - DNA, 25 bp, Homo sapien
tctggaactgagaaattggctatca

SEQ ID NO: 4768512 - DNA, 25 bp, Homo sapien
gaactgagaaattggctatcatcca

SEQ ID NO: 4768513 - DNA, 25 bp, Homo sapien
ctgagaaattggctatcatccaacc

SEQ ID NO: 4768514 - DNA, 25 bp, Homo sapien
ggtcagccaacccattgtctagcaa

SEQ ID NO: 4768515 - DNA, 25 bp, Homo sapien
aatgtggcatagattgggagctggc

SEQ ID NO: 4768516 - DNA, 25 bp, Homo sapien
tgtctagcaaccaatctgattcctc

SEQ ID NO: 4768517 - DNA, 25 bp, Homo sapien
catggagattggcttgaaatgtggc

SEQ ID NO: 4768518 - DNA, 25 bp, Homo sapien
ttatcagcacagatgctaggagcag

SEQ ID NO: 4768519 - DNA, 25 bp, Homo sapien
ggttatcagcacagatgctaggagc

SEQ ID NO: 4768520 - DNA, 25 bp, Homo sapien
gttatcagcacagatgctaggagca

SEQ ID NO: 4768521 - DNA, 25 bp, Homo sapien
ggtttgaatctcagccttataggaa

SEQ ID NO: 4768522 - DNA, 25 bp, Homo sapien
gtgtatatgactctttactgcccat

SEQ ID NO: 4768523 - DNA, 25 bp, Homo sapien
actcatgcagttctgtgtatatgac

SEQ ID NO: 4768524 - DNA, 25 bp, Homo sapien
ctagtagctcttggatagaaactca

SEQ ID NO: 4768525 - DNA, 25 bp, Homo sapien
agtagctcttggatagaaactcatg

SEQ ID NO: 4768526 - DNA, 25 bp, Homo sapien
tcgggattttaaacgttggcatgct

SEQ ID NO: 4768527 - DNA, 25 bp, Homo sapien
gttgtacgtatgctcacttgaggcg

SEQ ID NO: 4768528 - DNA, 25 bp, Homo sapien
gttcttagaaggtcatatgccagtt

SEQ ID NO: 4768529 - DNA, 25 bp, Homo sapien
cctagtgtgtctactggagttgtac

SEQ ID NO: 4768530 - DNA, 25 bp, Homo sapien
ctggcacataaggaggcaaagctgg

SEQ ID NO: 4768531 - DNA, 25 bp, Homo sapien
tgatggcccataggagcaaaggcac

SEQ ID NO: 4768532 - DNA, 25 bp, Homo sapien
tcggaggttaatgctttcggccaag

SEQ ID NO: 4768533 - DNA, 25 bp, Homo sapien
gaccaggaagtctctaaaagcaccg

SEQ ID NO: 4768534 - DNA, 25 bp, Homo sapien
actcccagaagtttgatagagctca

SEQ ID NO: 4768535 - DNA, 25 bp, Homo sapien
tgtaaaatccagtcaagtcgccatc

SEQ ID NO: 4768536 - DNA, 25 bp, Homo sapien
cagtcaagtcgccatcctggttgga

SEQ ID NO: 4768537 - DNA, 25 bp, Homo sapien
catgcgtgtcaatgaaactgtaaaa

SEQ ID NO: 4768538 - DNA, 25 bp, Homo sapien
catcgttacccccagagtcttagtg

SEQ ID NO: 4768539 - DNA, 25 bp, Homo sapien
ttacccccagagtcttagtgatgac

SEQ ID NO: 4768540 - DNA, 25 bp, Homo sapien
gccatctaggttggcacctgagggc

SEQ ID NO: 4768541 - DNA, 25 bp, Homo sapien
gggcctgccatctaggttggcacct

SEQ ID NO: 4768542 - DNA, 25 bp, Homo sapien
ctctgctggcctccaagtgaaaaat

SEQ ID NO: 4768543 - DNA, 25 bp, Homo sapien
gtgttgcagcatgactgcctgtggc

SEQ ID NO: 4768544 - DNA, 25 bp, Homo sapien
aagggagagcaagagagtgttgcag

SEQ ID NO: 4768545 - DNA, 25 bp, Homo sapien
ccattcaggaggaattcgaggaagg

SEQ ID NO: 4768546 - DNA, 25 bp, Homo sapien
ctctaacttgaactgctaaggtttt

SEQ ID NO: 4768547 - DNA, 25 bp, Homo sapien
tgagtaaacctgcaatgctcaatag

SEQ ID NO: 4768548 - DNA, 25 bp, Homo sapien
aaaaacacctctaacttgaactgct

SEQ ID NO: 4768549 - DNA, 25 bp, Homo sapien
tagactgaatgatgtggtggcattg

SEQ ID NO: 4768550 - DNA, 25 bp, Homo sapien
aaaataatcatgcaagcaggcaaac

SEQ ID NO: 4768551 - DNA, 25 bp, Homo sapien
aaaaataatcatgcaagcaggcaaa

SEQ ID NO: 4768552 - DNA, 25 bp, Homo sapien
aataatcatgcaagcaggcaaacaa

SEQ ID NO: 4768553 - DNA, 25 bp, Homo sapien
aaataatcatgcaagcaggcaaaca

SEQ ID NO: 4768554 - DNA, 25 bp, Homo sapien
aataagctccggtctacagctccca

SEQ ID NO: 4768555 - DNA, 25 bp, Homo sapien
catagagggaacggaggagccaaga

SEQ ID NO: 4768556 - DNA, 25 bp, Homo sapien
atagagggaacggaggagccaagat

SEQ ID NO: 4768557 - DNA, 25 bp, Homo sapien
ggccgaataagctccggtctacagc

SEQ ID NO: 4768558 - DNA, 25 bp, Homo sapien
cctcactcgggaagagcaaggggtc

SEQ ID NO: 4768559 - DNA, 25 bp, Homo sapien
cactcgggaagagcaaggggtcagg

SEQ ID NO: 4768560 - DNA, 25 bp, Homo sapien
gcgcgcaccgtgcgcgagctgaagc

SEQ ID NO: 4768561 - DNA, 25 bp, Homo sapien
ggcattgcctcactcgggaagagca

SEQ ID NO: 4768562 - DNA, 25 bp, Homo sapien
tgagctacgggaggacattcaaacc

SEQ ID NO: 4768563 - DNA, 25 bp, Homo sapien
acagagaagtgcttaaaggagctga

SEQ ID NO: 4768564 - DNA, 25 bp, Homo sapien
aaattactctgagctacgggaggac

SEQ ID NO: 4768565 - DNA, 25 bp, Homo sapien
ttactctgagctacgggaggacatt

SEQ ID NO: 4768566 - DNA, 25 bp, Homo sapien
ggtttcctggatctatgactcgtaa

SEQ ID NO: 4768567 - DNA, 25 bp, Homo sapien
tgacctccccatgcactgagtaggc

SEQ ID NO: 4768568 - DNA, 25 bp, Homo sapien
aatgccatctggagtgaactgcggg

SEQ ID NO: 4768569 - DNA, 25 bp, Homo sapien
gaactgcgggacatggaggtttcct

SEQ ID NO: 4768570 - DNA, 25 bp, Homo sapien
aagaaggctgtgttcatgacctggg

SEQ ID NO: 4768571 - DNA, 25 bp, Homo sapien
agtgtcctcggccttgccagctccg

SEQ ID NO: 4768572 - DNA, 25 bp, Homo sapien
catgaggcctagtgcgccattgtcc

SEQ ID NO: 4768573 - DNA, 25 bp, Homo sapien
caggcatgaggcctagtgcgccatt

SEQ ID NO: 4768574 - DNA, 25 bp, Homo sapien
gcccgcaggtatggatacttgctgg

SEQ ID NO: 4768575 - DNA, 25 bp, Homo sapien
cccatcagagggctggttgactgac

SEQ ID NO: 4768576 - DNA, 25 bp, Homo sapien
gtcctggcccgcaggtatggatact

SEQ ID NO: 4768577 - DNA, 25 bp, Homo sapien
ccatcagagggctggttgactgact

SEQ ID NO: 4768578 - DNA, 25 bp, Homo sapien
tgtctgtgtaatcggttgagcgctg

SEQ ID NO: 4768579 - DNA, 25 bp, Homo sapien
tgtaatcggttgagcgctggtggca

SEQ ID NO: 4768580 - DNA, 25 bp, Homo sapien
tctgtctgtgtaatcggttgagcgc

SEQ ID NO: 4768581 - DNA, 25 bp, Homo sapien
tctgtgtaatcggttgagcgctggt

SEQ ID NO: 4768582 - DNA, 25 bp, Homo sapien
gcagaacgtgggtgcctgatacaga

SEQ ID NO: 4768583 - DNA, 25 bp, Homo sapien
atccagtaccactctgggcctactg

SEQ ID NO: 4768584 - DNA, 25 bp, Homo sapien
tgcacggtccatccagtaccactct

SEQ ID NO: 4768585 - DNA, 25 bp, Homo sapien
cagtaccactctgggcctactgggc

SEQ ID NO: 4768586 - DNA, 25 bp, Homo sapien
acggtccatccagtaccactctggg

SEQ ID NO: 4768587 - DNA, 25 bp, Homo sapien
ctgtggctgggcctggacaatctgc

SEQ ID NO: 4768588 - DNA, 25 bp, Homo sapien
gcctggacaatctgcacctgctgac

SEQ ID NO: 4768589 - DNA, 25 bp, Homo sapien
gggcctggacaatctgcacctgctg

SEQ ID NO: 4768590 - DNA, 25 bp, Homo sapien
gtggctgggcctggacaatctgcac

SEQ ID NO: 4768591 - DNA, 25 bp, Homo sapien
ctgctgaagctgtgcgatgatgatc

SEQ ID NO: 4768592 - DNA, 25 bp, Homo sapien
gcgtcgtcacgggcgtggtctggcc

SEQ ID NO: 4768593 - DNA, 25 bp, Homo sapien
tggagctggcggtggtctggccttg

SEQ ID NO: 4768594 - DNA, 25 bp, Homo sapien
aagctgtgcgatgatgatctgccca

SEQ ID NO: 4768595 - DNA, 25 bp, Homo sapien
ctcctcctgacactttggaggtttc

SEQ ID NO: 4768596 - DNA, 25 bp, Homo sapien
tcctcctgacactttggaggtttca

SEQ ID NO: 4768597 - DNA, 25 bp, Homo sapien
caattgatcaaatttcgtaattgcc

SEQ ID NO: 4768598 - DNA, 25 bp, Homo sapien
cctcctgacactttggaggtttcag

SEQ ID NO: 4768599 - DNA, 25 bp, Homo sapien
taagtccggcagttgttatcctctg

SEQ ID NO: 4768600 - DNA, 25 bp, Homo sapien
tccggcagttgttatcctctgtgtg

SEQ ID NO: 4768601 - DNA, 25 bp, Homo sapien
acataagtccggcagttgttatcct

SEQ ID NO: 4768602 - DNA, 25 bp, Homo sapien
ggcgacataagtccggcagttgtta

SEQ ID NO: 4768603 - DNA, 25 bp, Homo sapien
cttcttaatacgagccagtgggagt

SEQ ID NO: 4768604 - DNA, 25 bp, Homo sapien
ttcttaatacgagccagtgggagtt

SEQ ID NO: 4768605 - DNA, 25 bp, Homo sapien
tgctaaattccagatttcttccatg

SEQ ID NO: 4768606 - DNA, 25 bp, Homo sapien
ctaaattccagatttcttccatgac

SEQ ID NO: 4768607 - DNA, 25 bp, Homo sapien
gctaaattccagatttcttccatga

SEQ ID NO: 4768608 - DNA, 25 bp, Homo sapien
agccagaaggactttaggctttgct

SEQ ID NO: 4768609 - DNA, 25 bp, Homo sapien
caccaaatcctccttctgtggacat

SEQ ID NO: 4768610 - DNA, 25 bp, Homo sapien
ggaagagcaggagccgccctggcgc

SEQ ID NO: 4768611 - DNA, 25 bp, Homo sapien
tcttcagggagtccaggaagagcag

SEQ ID NO: 4768612 - DNA, 25 bp, Homo sapien
ttcgacaaacgcctcttcagggagt

SEQ ID NO: 4768613 - DNA, 25 bp, Homo sapien
aagagcaggagccgccctggcgctc

SEQ ID NO: 4768614 - DNA, 25 bp, Homo sapien
gtcgtgggctttccgatgccagtcc

SEQ ID NO: 4768615 - DNA, 25 bp, Homo sapien
tctccgccctggcctttggctgagg

SEQ ID NO: 4768616 - DNA, 25 bp, Homo sapien
ccagtgttcaaggtggctttgcccc

SEQ ID NO: 4768617 - DNA, 25 bp, Homo sapien
cttttctcgtcgtgggctttccgat

SEQ ID NO: 4768618 - DNA, 25 bp, Homo sapien
catgattgtctgaagatccttgact

SEQ ID NO: 4768619 - DNA, 25 bp, Homo sapien
ccagaacatgattgtctgaagatcc

SEQ ID NO: 4768620 - DNA, 25 bp, Homo sapien
agcttcccagaacatgattgtctga

SEQ ID NO: 4768621 - DNA, 25 bp, Homo sapien
gaagatccttgactatcttgcattt

SEQ ID NO: 4768622 - DNA, 25 bp, Homo sapien
caatgaggctgtggtaatacctgga

SEQ ID NO: 4768623 - DNA, 25 bp, Homo sapien
tatctggcctaggatgcagacaggc

SEQ ID NO: 4768624 - DNA, 25 bp, Homo sapien
gtcttcaccacaaggcgcacctgta

SEQ ID NO: 4768625 - DNA, 25 bp, Homo sapien
ggtgactcgtgataacaagctggca

SEQ ID NO: 4768626 - DNA, 25 bp, Homo sapien
gccggcctagggattctttttcaca

SEQ ID NO: 4768627 - DNA, 25 bp, Homo sapien
aggacaggaaccatttagagctcaa

SEQ ID NO: 4768628 - DNA, 25 bp, Homo sapien
cacttctagcacatctcatttggga

SEQ ID NO: 4768629 - DNA, 25 bp, Homo sapien
tactatattgggtattgccggccta

SEQ ID NO: 4768630 - DNA, 25 bp, Homo sapien
tgcaaattgatacaagcctagctat

SEQ ID NO: 4768631 - DNA, 25 bp, Homo sapien
gagtgaacagtgagtcaaagcaaaa

SEQ ID NO: 4768632 - DNA, 25 bp, Homo sapien
gcctagctatttggtggaactttca

SEQ ID NO: 4768633 - DNA, 25 bp, Homo sapien
caatatctctaaatatgcacagagc

SEQ ID NO: 4768634 - DNA, 25 bp, Homo sapien
gcactcattgcagttagggtctgaa

SEQ ID NO: 4768635 - DNA, 25 bp, Homo sapien
ttgcagttagggtctgaatgacact

SEQ ID NO: 4768636 - DNA, 25 bp, Homo sapien
tctttattgcactcattgcagttag

SEQ ID NO: 4768637 - DNA, 25 bp, Homo sapien
ttagggtctgaatgacactggagat

SEQ ID NO: 4768638 - DNA, 25 bp, Homo sapien
ggactgtgcccaatgcagatgtgtc

SEQ ID NO: 4768639 - DNA, 25 bp, Homo sapien
ggaggtgctaagtccacatactggg

SEQ ID NO: 4768640 - DNA, 25 bp, Homo sapien
gactgtgcccaatgcagatgtgtca

SEQ ID NO: 4768641 - DNA, 25 bp, Homo sapien
tcatcaccctcttggggaggtgcta

SEQ ID NO: 4768642 - DNA, 25 bp, Homo sapien
atatgttctccttgccacttttgac

SEQ ID NO: 4768643 - DNA, 25 bp, Homo sapien
tcatgcaaagatgagcataaaactg

SEQ ID NO: 4768644 - DNA, 25 bp, Homo sapien
tgcaaagatgagcataaaactggat

SEQ ID NO: 4768645 - DNA, 25 bp, Homo sapien
gtttttcatcctgaaatatgttctc

SEQ ID NO: 4768646 - DNA, 25 bp, Homo sapien
gtttcttttgtgctctctgtagtaa

SEQ ID NO: 4768647 - DNA, 25 bp, Homo sapien
gtgctctctgtagtaatgtgctggg

SEQ ID NO: 4768648 - DNA, 25 bp, Homo sapien
tagctcagatgtgactgtgatactg

SEQ ID NO: 4768649 - DNA, 25 bp, Homo sapien
tagtaatgtgctgggtagctcagat

SEQ ID NO: 4768650 - DNA, 25 bp, Homo sapien
ccctggagcccattctcattaattc

SEQ ID NO: 4768651 - DNA, 25 bp, Homo sapien
tggagcccattctcattaattctgg

SEQ ID NO: 4768652 - DNA, 25 bp, Homo sapien
taccctggagcccattctcattaat

SEQ ID NO: 4768653 - DNA, 25 bp, Homo sapien
cacctcaatctcttctaccctggag

SEQ ID NO: 4768654 - DNA, 25 bp, Homo sapien
tgtgggatgtgcaattcccattatg

SEQ ID NO: 4768655 - DNA, 25 bp, Homo sapien
ggatgtgcaattcccattatgttag

SEQ ID NO: 4768656 - DNA, 25 bp, Homo sapien
tgtgcaattcccattatgttagggc

SEQ ID NO: 4768657 - DNA, 25 bp, Homo sapien
caattcccattatgttagggcccag

SEQ ID NO: 4768658 - DNA, 25 bp, Homo sapien
tgctgcctcttgtgctgtcgacacc

SEQ ID NO: 4768659 - DNA, 25 bp, Homo sapien
acttttctgactttgtctggatcac

SEQ ID NO: 4768660 - DNA, 25 bp, Homo sapien
tgtcgacacccatgatcctagcttg

SEQ ID NO: 4768661 - DNA, 25 bp, Homo sapien
tagccaggttaagctgatactgcca

SEQ ID NO: 4768662 - DNA, 25 bp, Homo sapien
ccatgttgcctgttagcttcttaaa

SEQ ID NO: 4768663 - DNA, 25 bp, Homo sapien
tgtgctcatgaaagatggcgttgat

SEQ ID NO: 4768664 - DNA, 25 bp, Homo sapien
tattggtttgtcatctgttgcctcc

SEQ ID NO: 4768665 - DNA, 25 bp, Homo sapien
caagtggtgcctatctgtcaaagaa

SEQ ID NO: 4768666 - DNA, 25 bp, Homo sapien
tgttgcctccacaagaaagtgagct

SEQ ID NO: 4768667 - DNA, 25 bp, Homo sapien
gccccaggttgtaccgatgctggat

SEQ ID NO: 4768668 - DNA, 25 bp, Homo sapien
tctgtgattaatcttccttgaaacg

SEQ ID NO: 4768669 - DNA, 25 bp, Homo sapien
tgtgctgcagaatgcctgctggtgc

SEQ ID NO: 4768670 - DNA, 25 bp, Homo sapien
gatgctggattaggcaagaatccgg

SEQ ID NO: 4768671 - DNA, 25 bp, Homo sapien
aaccatctagacaaccttgtctata

SEQ ID NO: 4768672 - DNA, 25 bp, Homo sapien
tagacaaccttgtctatacgcaaaa

SEQ ID NO: 4768673 - DNA, 25 bp, Homo sapien
gctgtagaagagatccccaaatgag

SEQ ID NO: 4768674 - DNA, 25 bp, Homo sapien
tctgactgcggctgtagaagagatc

SEQ ID NO: 4768675 - DNA, 25 bp, Homo sapien
agaagacattacagggacatcccat

SEQ ID NO: 4768676 - DNA, 25 bp, Homo sapien
taagtggaactctgggacactagca

SEQ ID NO: 4768677 - DNA, 25 bp, Homo sapien
cactagtagccttgagggtgtcatc

SEQ ID NO: 4768678 - DNA, 25 bp, Homo sapien
tgagcctcccttggttcccatgtag

SEQ ID NO: 4768679 - DNA, 25 bp, Homo sapien
cttgattgccgtctgatccttgatg

SEQ ID NO: 4768680 - DNA, 25 bp, Homo sapien
cagcaaccctaatgaaaaacacaag

SEQ ID NO: 4768681 - DNA, 25 bp, Homo sapien
gctaaaaaccagcattactccagca

SEQ ID NO: 4768682 - DNA, 25 bp, Homo sapien
caagttccgtgtaccaatttgtggt

SEQ ID NO: 4768683 - DNA, 25 bp, Homo sapien
aaggatcaccagcaaaatcccacag

SEQ ID NO: 4768684 - DNA, 25 bp, Homo sapien
acagatgcaagcgaccacggtgttt

SEQ ID NO: 4768685 - DNA, 25 bp, Homo sapien
aaaatcccacagatgcaagcgacca

SEQ ID NO: 4768686 - DNA, 25 bp, Homo sapien
cgaccacggtgtttggagagcactg

SEQ ID NO: 4768687 - DNA, 25 bp, Homo sapien
taagtggcacagatgagttagcctc

SEQ ID NO: 4768688 - DNA, 25 bp, Homo sapien
tacaagatgctttctacgtgacaga

SEQ ID NO: 4768689 - DNA, 25 bp, Homo sapien
aatctgctctctccttacaatctgc

SEQ ID NO: 4768690 - DNA, 25 bp, Homo sapien
tgctctctccgtcctcagtggatgg

SEQ ID NO: 4768691 - DNA, 25 bp, Homo sapien
tggcaaagctggccgtgtttcctct

SEQ ID NO: 4768692 - DNA, 25 bp, Homo sapien
acatggcaaagctggccgtgtttcc

SEQ ID NO: 4768693 - DNA, 25 bp, Homo sapien
tctggagtattccaggtccacttgg

SEQ ID NO: 4768694 - DNA, 25 bp, Homo sapien
ctctggagtattccaggtccacttg

SEQ ID NO: 4768695 - DNA, 25 bp, Homo sapien
gctagagctcgaatgcccaaatgat

SEQ ID NO: 4768696 - DNA, 25 bp, Homo sapien
attgtgcccaaagtagccatcccca

SEQ ID NO: 4768697 - DNA, 25 bp, Homo sapien
gcccagcgtggaaaccttgatatcg

SEQ ID NO: 4768698 - DNA, 25 bp, Homo sapien
aagtatggctctggaccaaggcaca

SEQ ID NO: 4768699 - DNA, 25 bp, Homo sapien
ggtttgacccagtgaggtgaaggcc

SEQ ID NO: 4768700 - DNA, 25 bp, Homo sapien
ggaagacaatagtgtccagagaagg

SEQ ID NO: 4768701 - DNA, 25 bp, Homo sapien
tatcctttcacaaataagtgtggcg

SEQ ID NO: 4768702 - DNA, 25 bp, Homo sapien
ggcgtcacaactgtagtgagcaaag

SEQ ID NO: 4768703 - DNA, 25 bp, Homo sapien
agcattccgatagataatttccagg

SEQ ID NO: 4768704 - DNA, 25 bp, Homo sapien
taaatcctagactcaaagagcaact

SEQ ID NO: 4768705 - DNA, 25 bp, Homo sapien
ttagttcttgtccaagccaaatgtc

SEQ ID NO: 4768706 - DNA, 25 bp, Homo sapien
taaagactgtgacatgtggcatagg

SEQ ID NO: 4768707 - DNA, 25 bp, Homo sapien
caggaaaggggttccagatgtgtcc

SEQ ID NO: 4768708 - DNA, 25 bp, Homo sapien
gaaaatccactgtggcgctgcctcc

SEQ ID NO: 4768709 - DNA, 25 bp, Homo sapien
aacacataaacactttcactagcag

SEQ ID NO: 4768710 - DNA, 25 bp, Homo sapien
tagcagccacgttctcaagcgctgg

SEQ ID NO: 4768711 - DNA, 25 bp, Homo sapien
cctggtcatttacaatctcttcaga

SEQ ID NO: 4768712 - DNA, 25 bp, Homo sapien
cactgaagaatataagaagagtcat

SEQ ID NO: 4768713 - DNA, 25 bp, Homo sapien
acaatctcttcagagccactgaaga

SEQ ID NO: 4768714 - DNA, 25 bp, Homo sapien
agccactgaagaatataagaagagt

SEQ ID NO: 4768715 - DNA, 25 bp, Homo sapien
cagtgttgtctaccaagaattcccc

SEQ ID NO: 4768716 - DNA, 25 bp, Homo sapien
tgtctaccaagaattccccataatt

SEQ ID NO: 4768717 - DNA, 25 bp, Homo sapien
ctgccagtgttgtctaccaagaatt

SEQ ID NO: 4768718 - DNA, 25 bp, Homo sapien
ccaagaattccccataattcaactg

SEQ ID NO: 4768719 - DNA, 25 bp, Homo sapien
taggaaccccacagagatatcgtga

SEQ ID NO: 4768720 - DNA, 25 bp, Homo sapien
gatatttgaagccagggttactcac

SEQ ID NO: 4768721 - DNA, 25 bp, Homo sapien
tgtaaagcacaccagagcgcagaaa

SEQ ID NO: 4768722 - DNA, 25 bp, Homo sapien
gaacacggtctaacaaatgggctaa

SEQ ID NO: 4768723 - DNA, 25 bp, Homo sapien
cgacgatgacggtaatgatagtgct

SEQ ID NO: 4768724 - DNA, 25 bp, Homo sapien
ggtgcccgcaagtttacgcttccca

SEQ ID NO: 4768725 - DNA, 25 bp, Homo sapien
gaacagggaatatgcacgtggaagc

SEQ ID NO: 4768726 - DNA, 25 bp, Homo sapien
catctgtttactcagggtgcccgca

SEQ ID NO: 4768727 - DNA, 25 bp, Homo sapien
ctgaacatagatgcctttattatta

SEQ ID NO: 4768728 - DNA, 25 bp, Homo sapien
gcaacttcacgtatttgtctactac

SEQ ID NO: 4768729 - DNA, 25 bp, Homo sapien
gacttgcaacttcacgtatttgtct

SEQ ID NO: 4768730 - DNA, 25 bp, Homo sapien
ctgggactggagttgtactgaacat

SEQ ID NO: 4768731 - DNA, 25 bp, Homo sapien
gacctctgtggttacaccagagcag

SEQ ID NO: 4768732 - DNA, 25 bp, Homo sapien
ctgacctctgtggttacaccagagc

SEQ ID NO: 4768733 - DNA, 25 bp, Homo sapien
ctgtggttacaccagagcagcattt

SEQ ID NO: 4768734 - DNA, 25 bp, Homo sapien
gtggttacaccagagcagcatttta

SEQ ID NO: 4768735 - DNA, 25 bp, Homo sapien
tgagaatggtttcgaataagtgcat

SEQ ID NO: 4768736 - DNA, 25 bp, Homo sapien
gagtttgagaatggtttcgaataag

SEQ ID NO: 4768737 - DNA, 25 bp, Homo sapien
gtttgagaatggtttcgaataagtg

SEQ ID NO: 4768738 - DNA, 25 bp, Homo sapien
gctgagtttgagaatggtttcgaat

SEQ ID NO: 4768739 - DNA, 25 bp, Homo sapien
tggacagctgctgcggaagggttgt

SEQ ID NO: 4768740 - DNA, 25 bp, Homo sapien
cagacaaccgttgtccactggagac

SEQ ID NO: 4768741 - DNA, 25 bp, Homo sapien
aatcagacaaccgttgtccactgga

SEQ ID NO: 4768742 - DNA, 25 bp, Homo sapien
ctggacagctgctgcggaagggttg

SEQ ID NO: 4768743 - DNA, 25 bp, Homo sapien
ggattcttcagaattatggcatgca

SEQ ID NO: 4768744 - DNA, 25 bp, Homo sapien
gattcttcagaattatggcatgcag

SEQ ID NO: 4768745 - DNA, 25 bp, Homo sapien
cataaacactatctgatctcttcca

SEQ ID NO: 4768746 - DNA, 25 bp, Homo sapien
atgcagtgtgctcataaacactatc

SEQ ID NO: 4768747 - DNA, 25 bp, Homo sapien
aatttttgtctgaacaccatttctg

SEQ ID NO: 4768748 - DNA, 25 bp, Homo sapien
aataatgtatgatggttgaggagga

SEQ ID NO: 4768749 - DNA, 25 bp, Homo sapien
tctggaacatacttcgtcataagaa

SEQ ID NO: 4768750 - DNA, 25 bp, Homo sapien
tgttggataaccgaacctggtcaca

SEQ ID NO: 4768751 - DNA, 25 bp, Homo sapien
cttcaacatctccagctgcatgcat

SEQ ID NO: 4768752 - DNA, 25 bp, Homo sapien
ctcctatggcattcttgaggaggtg

SEQ ID NO: 4768753 - DNA, 25 bp, Homo sapien
tatggcattcttgaggaggtgctga

SEQ ID NO: 4768754 - DNA, 25 bp, Homo sapien
tccttcctcaattgatccagagaat

SEQ ID NO: 4768755 - DNA, 25 bp, Homo sapien
cctcaattgatccagagaattaaca

SEQ ID NO: 4768756 - DNA, 25 bp, Homo sapien
ttgcaccaagctcccgtcttcttat

SEQ ID NO: 4768757 - DNA, 25 bp, Homo sapien
actgtaggctcccagtaaaacatcc

SEQ ID NO: 4768758 - DNA, 25 bp, Homo sapien
ccagccggaacatgactttctgagc

SEQ ID NO: 4768759 - DNA, 25 bp, Homo sapien
aaaatgtcttcaagccactaaacag

SEQ ID NO: 4768760 - DNA, 25 bp, Homo sapien
agcaggagaatgacaccatagccat

SEQ ID NO: 4768761 - DNA, 25 bp, Homo sapien
aaacaaaagcaggagaatgacacca

SEQ ID NO: 4768762 - DNA, 25 bp, Homo sapien
aaagcaggagaatgacaccatagcc

SEQ ID NO: 4768763 - DNA, 25 bp, Homo sapien
cagaaaacaaaagcaggagaatgac

SEQ ID NO: 4768764 - DNA, 25 bp, Homo sapien
aagccttgatgccttgcacagctct

SEQ ID NO: 4768765 - DNA, 25 bp, Homo sapien
ggaggcattcaacgttgtattaact

SEQ ID NO: 4768766 - DNA, 25 bp, Homo sapien
tagaaggtagacaattagtggaggc

SEQ ID NO: 4768767 - DNA, 25 bp, Homo sapien
tgcacagctctcatcatagaaggta

SEQ ID NO: 4768768 - DNA, 25 bp, Homo sapien
agccctttcatttggatcccttgga

SEQ ID NO: 4768769 - DNA, 25 bp, Homo sapien
caggacctgtcctccgctaagagtc

SEQ ID NO: 4768770 - DNA, 25 bp, Homo sapien
caggactaggaggaggtgatgttgg

SEQ ID NO: 4768771 - DNA, 25 bp, Homo sapien
gagtcacagcactctcaagtgaggc

SEQ ID NO: 4768772 - DNA, 25 bp, Homo sapien
gcacagccccacaccgaagcacacc

SEQ ID NO: 4768773 - DNA, 25 bp, Homo sapien
ggaggcacagccccacaccgaagca

SEQ ID NO: 4768774 - DNA, 25 bp, Homo sapien
cagccccacaccgaagcacacccat

SEQ ID NO: 4768775 - DNA, 25 bp, Homo sapien
aggcacagccccacaccgaagcaca

SEQ ID NO: 4768776 - DNA, 25 bp, Homo sapien
agcggtgactcctttcctgggttgt

SEQ ID NO: 4768777 - DNA, 25 bp, Homo sapien
tccagcggtgactcctttcctgggt

SEQ ID NO: 4768778 - DNA, 25 bp, Homo sapien
tgtgaccaataacccggtccagctc

SEQ ID NO: 4768779 - DNA, 25 bp, Homo sapien
gtgtgaccaataacccggtccagct

SEQ ID NO: 4768780 - DNA, 25 bp, Homo sapien
cagctcctggcttattccaagtaag

SEQ ID NO: 4768781 - DNA, 25 bp, Homo sapien
agctcctggcttattccaagtaagt

SEQ ID NO: 4768782 - DNA, 25 bp, Homo sapien
gctcctggcttattccaagtaagta

SEQ ID NO: 4768783 - DNA, 25 bp, Homo sapien
gcagctcctggcttattccaagtaa

SEQ ID NO: 4768784 - DNA, 25 bp, Homo sapien
gcccaagtttgtcaacaagtcccag

SEQ ID NO: 4768785 - DNA, 25 bp, Homo sapien
ctgggtgggaataatgaaactgccc

SEQ ID NO: 4768786 - DNA, 25 bp, Homo sapien
gtgggaataatgaaactgcccaagt

SEQ ID NO: 4768787 - DNA, 25 bp, Homo sapien
caagtttgtcaacaagtcccaggct

SEQ ID NO: 4768788 - DNA, 25 bp, Homo sapien
tctctgtccaggaagtttgcttgtt

SEQ ID NO: 4768789 - DNA, 25 bp, Homo sapien
tgtccaggaagtttgcttgtttggt

SEQ ID NO: 4768790 - DNA, 25 bp, Homo sapien
tttccacttctctgtccaggaagtt

SEQ ID NO: 4768791 - DNA, 25 bp, Homo sapien
ccacttctctgtccaggaagtttgc

SEQ ID NO: 4768792 - DNA, 25 bp, Homo sapien
gctgccccactttacaaccaaacaa

SEQ ID NO: 4768793 - DNA, 25 bp, Homo sapien
ccactttacaaccaaacaatgccat

SEQ ID NO: 4768794 - DNA, 25 bp, Homo sapien
tgccccactttacaaccaaacaatg

SEQ ID NO: 4768795 - DNA, 25 bp, Homo sapien
ctgctgccccactttacaaccaaac

SEQ ID NO: 4768796 - DNA, 25 bp, Homo sapien
gctgttatcacaaagcttttgagat

SEQ ID NO: 4768797 - DNA, 25 bp, Homo sapien
ctgtttcaaagtacacgccgatcct

SEQ ID NO: 4768798 - DNA, 25 bp, Homo sapien
gcttttgagatagtaagtgcatttt

SEQ ID NO: 4768799 - DNA, 25 bp, Homo sapien
tttcagtgtgatagatcacactgtt

SEQ ID NO: 4768800 - DNA, 25 bp, Homo sapien
tacatcaatgagaatgcagccttgg

SEQ ID NO: 4768801 - DNA, 25 bp, Homo sapien
caggacctcacagcaattgacttgt

SEQ ID NO: 4768802 - DNA, 25 bp, Homo sapien
caataagagcgcaatctgagcaagc

SEQ ID NO: 4768803 - DNA, 25 bp, Homo sapien
tttctggtgctcaacgaacgctgcc

SEQ ID NO: 4768804 - DNA, 25 bp, Homo sapien
tctaggctggcggaggaaaaggctc

SEQ ID NO: 4768805 - DNA, 25 bp, Homo sapien
tcagtagcaaagttggggacaagga

SEQ ID NO: 4768806 - DNA, 25 bp, Homo sapien
acactgctgggtcattccctttagc

SEQ ID NO: 4768807 - DNA, 25 bp, Homo sapien
ttccctttagcagcatttgccgcat

SEQ ID NO: 4768808 - DNA, 25 bp, Homo sapien
gaaaatcattccgaggcactgagcg

SEQ ID NO: 4768809 - DNA, 25 bp, Homo sapien
tgtctgaggatgtctgctactgttt

SEQ ID NO: 4768810 - DNA, 25 bp, Homo sapien
cactgagcgattgtctgaggatgtc

SEQ ID NO: 4768811 - DNA, 25 bp, Homo sapien
ttcacagccatctgccatctttgct

SEQ ID NO: 4768812 - DNA, 25 bp, Homo sapien
cactcaggatatctcatgaggtcgc

SEQ ID NO: 4768813 - DNA, 25 bp, Homo sapien
gggctcggctgggtagatctcactc

SEQ ID NO: 4768814 - DNA, 25 bp, Homo sapien
ggctgggtagatctcactcaggata

SEQ ID NO: 4768815 - DNA, 25 bp, Homo sapien
tatctcatgaggtcgctgtcagatg

SEQ ID NO: 4768816 - DNA, 25 bp, Homo sapien
acatcaaaaataggtttctcggccg

SEQ ID NO: 4768817 - DNA, 25 bp, Homo sapien
catcaaaaataggtttctcggccgg

SEQ ID NO: 4768818 - DNA, 25 bp, Homo sapien
ggtggccgtgaacatcaccgagtct

SEQ ID NO: 4768819 - DNA, 25 bp, Homo sapien
tcagtaagcaaaggaatgtccagct

SEQ ID NO: 4768820 - DNA, 25 bp, Homo sapien
agggaatgtcaataaagtccttgcc

SEQ ID NO: 4768821 - DNA, 25 bp, Homo sapien
ccttgccaagagtaatagttctttg

SEQ ID NO: 4768822 - DNA, 25 bp, Homo sapien
aggcattttcagttttcccacatac

SEQ ID NO: 4768823 - DNA, 25 bp, Homo sapien
ttcaaaggcattttcagttttccca

SEQ ID NO: 4768824 - DNA, 25 bp, Homo sapien
tcaaaggcattttcagttttcccac

SEQ ID NO: 4768825 - DNA, 25 bp, Homo sapien
ctatttcaaaggcattttcagtttt

SEQ ID NO: 4768826 - DNA, 25 bp, Homo sapien
tatttaacagcttcagttccagctt

SEQ ID NO: 4768827 - DNA, 25 bp, Homo sapien
ttaacagcttcagttccagctttac

SEQ ID NO: 4768828 - DNA, 25 bp, Homo sapien
atatttaacagcttcagttccagct

SEQ ID NO: 4768829 - DNA, 25 bp, Homo sapien
tttaacagcttcagttccagcttta

SEQ ID NO: 4768830 - DNA, 25 bp, Homo sapien
gcacgggtccccttcccatgttctg

SEQ ID NO: 4768831 - DNA, 25 bp, Homo sapien
tatcagggccctctgctgtatcaag

SEQ ID NO: 4768832 - DNA, 25 bp, Homo sapien
tagtttgtgactactcagaattctc

SEQ ID NO: 4768833 - DNA, 25 bp, Homo sapien
tattctggactcctgacagctcagg

SEQ ID NO: 4768834 - DNA, 25 bp, Homo sapien
gtcttgttctctggcctactcaatt

SEQ ID NO: 4768835 - DNA, 25 bp, Homo sapien
tcaattccagcttattcccacttct

SEQ ID NO: 4768836 - DNA, 25 bp, Homo sapien
tgtatccttcttaccatcaaaaagt

SEQ ID NO: 4768837 - DNA, 25 bp, Homo sapien
tgcttaacaaacctcagtggctccc

SEQ ID NO: 4768838 - DNA, 25 bp, Homo sapien
aaggtgcagtctccttagcatggcc

SEQ ID NO: 4768839 - DNA, 25 bp, Homo sapien
tcaaaaagtaatactgcagatctcc

SEQ ID NO: 4768840 - DNA, 25 bp, Homo sapien
gtcctcttgttgaatatcaggcaca

SEQ ID NO: 4768841 - DNA, 25 bp, Homo sapien
gaatatcaggcacatggagacaaat

SEQ ID NO: 4768842 - DNA, 25 bp, Homo sapien
gcttaaggctttctatgtcctcttg

SEQ ID NO: 4768843 - DNA, 25 bp, Homo sapien
agggagtgtgtacatgcttaaggct

SEQ ID NO: 4768844 - DNA, 25 bp, Homo sapien
actctgttgaggaactggaaagtcc

SEQ ID NO: 4768845 - DNA, 25 bp, Homo sapien
gactgtaacctgctctaaacctgtg

SEQ ID NO: 4768846 - DNA, 25 bp, Homo sapien
taaacctgtggtcaaatcttgccag

SEQ ID NO: 4768847 - DNA, 25 bp, Homo sapien
gggatctttcccatgactctgttga

SEQ ID NO: 4768848 - DNA, 25 bp, Homo sapien
gaaagcagactcagcagatgagtgt

SEQ ID NO: 4768849 - DNA, 25 bp, Homo sapien
gatgagtgtgttcctgtaccttcca

SEQ ID NO: 4768850 - DNA, 25 bp, Homo sapien
cgctgatattcgaaaggctgaaaat

SEQ ID NO: 4768851 - DNA, 25 bp, Homo sapien
cctgtaccttccagctttatgcttt

SEQ ID NO: 4768852 - DNA, 25 bp, Homo sapien
cccagggagtaggtagcagctcaaa

SEQ ID NO: 4768853 - DNA, 25 bp, Homo sapien
ctacggttgggaagctggccagtga

SEQ ID NO: 4768854 - DNA, 25 bp, Homo sapien
tggccagtgattacccagggagtag

SEQ ID NO: 4768855 - DNA, 25 bp, Homo sapien
gattacccagggagtaggtagcagc

SEQ ID NO: 4768856 - DNA, 25 bp, Homo sapien
tgttagcaccacactgtattgtgct

SEQ ID NO: 4768857 - DNA, 25 bp, Homo sapien
tattgtgcttcaacaatgtaaaacc

SEQ ID NO: 4768858 - DNA, 25 bp, Homo sapien
cacactgtattgtgcttcaacaatg

SEQ ID NO: 4768859 - DNA, 25 bp, Homo sapien
agcaccacactgtattgtgcttcaa

SEQ ID NO: 4768860 - DNA, 25 bp, Homo sapien
tgtttgaaatcacaatgcaatcttg

SEQ ID NO: 4768861 - DNA, 25 bp, Homo sapien
ttggagcccggactcaagagattca

SEQ ID NO: 4768862 - DNA, 25 bp, Homo sapien
gcttgtgaaccaggccttggagccc

SEQ ID NO: 4768863 - DNA, 25 bp, Homo sapien
taatacacgtttccagctagagcta

SEQ ID NO: 4768864 - DNA, 25 bp, Homo sapien
tttaggtgaccgatcgccgactgtt

SEQ ID NO: 4768865 - DNA, 25 bp, Homo sapien
tcacctcttaaagaacctgatgccc

SEQ ID NO: 4768866 - DNA, 25 bp, Homo sapien
gatcgccgactgtttgatcacctct

SEQ ID NO: 4768867 - DNA, 25 bp, Homo sapien
agaaccaacagtttaggtgaccgat

SEQ ID NO: 4768868 - DNA, 25 bp, Homo sapien
tcaccacccgttgatgatgcccatt

SEQ ID NO: 4768869 - DNA, 25 bp, Homo sapien
ctgtatgccagaagcataatgaggc

SEQ ID NO: 4768870 - DNA, 25 bp, Homo sapien
tcatgatgcgatacatactgtatgc

SEQ ID NO: 4768871 - DNA, 25 bp, Homo sapien
cactccatatgcaggaagtcttaat

SEQ ID NO: 4768872 - DNA, 25 bp, Homo sapien
tgtcaacggtcaggaactttataga

SEQ ID NO: 4768873 - DNA, 25 bp, Homo sapien
cgtatttgtgtgtactgcctaagac

SEQ ID NO: 4768874 - DNA, 25 bp, Homo sapien
taatagagcagatgggccactggac

SEQ ID NO: 4768875 - DNA, 25 bp, Homo sapien
tgaacaggccatttacccactctga

SEQ ID NO: 4768876 - DNA, 25 bp, Homo sapien
tgacacattcatccagcactgagac

SEQ ID NO: 4768877 - DNA, 25 bp, Homo sapien
ctacattactgctttcctccggggg

SEQ ID NO: 4768878 - DNA, 25 bp, Homo sapien
aaggcattcctgagactcaagcagt

SEQ ID NO: 4768879 - DNA, 25 bp, Homo sapien
tcggtggactgggtttataatccat

SEQ ID NO: 4768880 - DNA, 25 bp, Homo sapien
tgaacctgcgtttttacagcacagt

SEQ ID NO: 4768881 - DNA, 25 bp, Homo sapien
gaaagcagcacgcatctgtcgctga

SEQ ID NO: 4768882 - DNA, 25 bp, Homo sapien
catgttagcttgtcccagtgtcata

SEQ ID NO: 4768883 - DNA, 25 bp, Homo sapien
caatctgccccatagcacgggtagt

SEQ ID NO: 4768884 - DNA, 25 bp, Homo sapien
tctcattgatgtcggccagtcaatc

SEQ ID NO: 4768885 - DNA, 25 bp, Homo sapien
aatctcattgatgtcggccagtcaa

SEQ ID NO: 4768886 - DNA, 25 bp, Homo sapien
tcaatctcattgatgtcggccagtc

SEQ ID NO: 4768887 - DNA, 25 bp, Homo sapien
ctcattgatgtcggccagtcaatcc

SEQ ID NO: 4768888 - DNA, 25 bp, Homo sapien
aacttccaccctcagtaaaatcagc

SEQ ID NO: 4768889 - DNA, 25 bp, Homo sapien
ctatgtgggtatccatgttggtgcc

SEQ ID NO: 4768890 - DNA, 25 bp, Homo sapien
tggcccgcgcccagtatttggcagc

SEQ ID NO: 4768891 - DNA, 25 bp, Homo sapien
taaaatgttagatgaacttccaccc

SEQ ID NO: 4768892 - DNA, 25 bp, Homo sapien
ccttggccaagtcgagtaagtaaca

SEQ ID NO: 4768893 - DNA, 25 bp, Homo sapien
cagaggatttcgcaagaggtgctcc

SEQ ID NO: 4768894 - DNA, 25 bp, Homo sapien
gaaaaagtagagatcgcaggaagca

SEQ ID NO: 4768895 - DNA, 25 bp, Homo sapien
catcggactgataggaggaagagca

SEQ ID NO: 4768896 - DNA, 25 bp, Homo sapien
gcccatgccaagtactctggaatag

SEQ ID NO: 4768897 - DNA, 25 bp, Homo sapien
aaaagactgctgttggcccatgcca

SEQ ID NO: 4768898 - DNA, 25 bp, Homo sapien
caggtttccacagttgcccctataa

SEQ ID NO: 4768899 - DNA, 25 bp, Homo sapien
ggagtggtatttccgccctcttgga

SEQ ID NO: 4768900 - DNA, 25 bp, Homo sapien
atctgaggatgattggttgatttcc

SEQ ID NO: 4768901 - DNA, 25 bp, Homo sapien
gatgattggttgatttcctatgatt

SEQ ID NO: 4768902 - DNA, 25 bp, Homo sapien
ggcaattgtattgccccggtgctcc

SEQ ID NO: 4768903 - DNA, 25 bp, Homo sapien
ccttcgctgcaacccaatggcaatt

SEQ ID NO: 4768904 - DNA, 25 bp, Homo sapien
ggctgtcacgtgaccagtggcccgc

SEQ ID NO: 4768905 - DNA, 25 bp, Homo sapien
agccatactccctgggagtgtctgg

SEQ ID NO: 4768906 - DNA, 25 bp, Homo sapien
tcagagacatctgcctggtggattg

SEQ ID NO: 4768907 - DNA, 25 bp, Homo sapien
tccctgggagtgtctggctgatcat

SEQ ID NO: 4768908 - DNA, 25 bp, Homo sapien
gggcccaaccttctcgaaagtggca

SEQ ID NO: 4768909 - DNA, 25 bp, Homo sapien
ctccaagcaatgaggtagcactgct

SEQ ID NO: 4768910 - DNA, 25 bp, Homo sapien
tcctcaggatctggtctttttccat

SEQ ID NO: 4768911 - DNA, 25 bp, Homo sapien
tttccatgacaatgaggtggggccc

SEQ ID NO: 4768912 - DNA, 25 bp, Homo sapien
aaaaataggcttctggtgctgaggg

SEQ ID NO: 4768913 - DNA, 25 bp, Homo sapien
aattagcctcctcgcactctgggag

SEQ ID NO: 4768914 - DNA, 25 bp, Homo sapien
caacaaggtgtgaattagcctcctc

SEQ ID NO: 4768915 - DNA, 25 bp, Homo sapien
gttccagaattgtgtaaacggattg

SEQ ID NO: 4768916 - DNA, 25 bp, Homo sapien
aagtcctccctgttcagacagggac

SEQ ID NO: 4768917 - DNA, 25 bp, Homo sapien
cagagaccgtctccactgtcagaac

SEQ ID NO: 4768918 - DNA, 25 bp, Homo sapien
catgtcctgccttccgctaggatgt

SEQ ID NO: 4768919 - DNA, 25 bp, Homo sapien
actgtcagaactcagctgccatgtc

SEQ ID NO: 4768920 - DNA, 25 bp, Homo sapien
cttccgctaggatgtcagcactggg

SEQ ID NO: 4768921 - DNA, 25 bp, Homo sapien
accagggagatttcctgcactgttg

SEQ ID NO: 4768922 - DNA, 25 bp, Homo sapien
tggctggattcaaccagggagattt

SEQ ID NO: 4768923 - DNA, 25 bp, Homo sapien
ctgcactgttggtagctgtagggaa

SEQ ID NO: 4768924 - DNA, 25 bp, Homo sapien
ggagatttcctgcactgttggtagc

SEQ ID NO: 4768925 - DNA, 25 bp, Homo sapien
tgtgccccgatagaggttcttacag

SEQ ID NO: 4768926 - DNA, 25 bp, Homo sapien
tgaaacaggtacagcccatgagagg

SEQ ID NO: 4768927 - DNA, 25 bp, Homo sapien
tagtgtcttggataaggcgttcctg

SEQ ID NO: 4768928 - DNA, 25 bp, Homo sapien
tactcagcgaggtggatgaaacagg

SEQ ID NO: 4768929 - DNA, 25 bp, Homo sapien
cttggaactgttcctcaggtctctg

SEQ ID NO: 4768930 - DNA, 25 bp, Homo sapien
gtctttgcggcctgttgggtctgca

SEQ ID NO: 4768931 - DNA, 25 bp, Homo sapien
ccagtagtctttgcggcctgttggg

SEQ ID NO: 4768932 - DNA, 25 bp, Homo sapien
ttcagatcttctgcgctaggttgag

SEQ ID NO: 4768933 - DNA, 25 bp, Homo sapien
tcctctcaggcccagtagtctttgc

SEQ ID NO: 4768934 - DNA, 25 bp, Homo sapien
catgaactctctcagggaagtgcag

SEQ ID NO: 4768935 - DNA, 25 bp, Homo sapien
cggagagagtcaccgtagagcccag

SEQ ID NO: 4768936 - DNA, 25 bp, Homo sapien
gaagctgtaaccaagccggagagag

SEQ ID NO: 4768937 - DNA, 25 bp, Homo sapien
caggaggagagacccgaagataagc

SEQ ID NO: 4768938 - DNA, 25 bp, Homo sapien
agccagaagatggatgggaccaccc

SEQ ID NO: 4768939 - DNA, 25 bp, Homo sapien
aagccagaagatggatgggaccacc

SEQ ID NO: 4768940 - DNA, 25 bp, Homo sapien
caagccagaagatggatgggaccac

SEQ ID NO: 4768941 - DNA, 25 bp, Homo sapien
tcaagccagaagatggatgggacca

SEQ ID NO: 4768942 - DNA, 25 bp, Homo sapien
ggccctctccacagtaggacttagg

SEQ ID NO: 4768943 - DNA, 25 bp, Homo sapien
gacttagggcgctcatgtagatccc

SEQ ID NO: 4768944 - DNA, 25 bp, Homo sapien
ctcggcagtaatgcgctagttgctc

SEQ ID NO: 4768945 - DNA, 25 bp, Homo sapien
gctcatgtagatccctcggcagtaa

SEQ ID NO: 4768946 - DNA, 25 bp, Homo sapien
ggagatcgctgatctccatggcaac

SEQ ID NO: 4768947 - DNA, 25 bp, Homo sapien
gggagatcgctgatctccatggcaa

SEQ ID NO: 4768948 - DNA, 25 bp, Homo sapien
tagggagatcgctgatctccatggc

SEQ ID NO: 4768949 - DNA, 25 bp, Homo sapien
atctagggagatcgctgatctccat

SEQ ID NO: 4768950 - DNA, 25 bp, Homo sapien
gacccaaatgagcaaagtgccatca

SEQ ID NO: 4768951 - DNA, 25 bp, Homo sapien
gtgccatcagctggcctcggcctga

SEQ ID NO: 4768952 - DNA, 25 bp, Homo sapien
aaagtgccatcagctggcctcggcc

SEQ ID NO: 4768953 - DNA, 25 bp, Homo sapien
ctggacccaaatgagcaaagtgcca

SEQ ID NO: 4768954 - DNA, 25 bp, Homo sapien
cagccccatgaggaatgctcagatc

SEQ ID NO: 4768955 - DNA, 25 bp, Homo sapien
agccccatgaggaatgctcagatcc

SEQ ID NO: 4768956 - DNA, 25 bp, Homo sapien
ccccatgaggaatgctcagatccat

SEQ ID NO: 4768957 - DNA, 25 bp, Homo sapien
gccccatgaggaatgctcagatcca

SEQ ID NO: 4768958 - DNA, 25 bp, Homo sapien
tgtgacagccgcgtagaccttcttg

SEQ ID NO: 4768959 - DNA, 25 bp, Homo sapien
ggcatagtttttggcgccattttgg

SEQ ID NO: 4768960 - DNA, 25 bp, Homo sapien
tatttagtttaggatgcccgtctcc

SEQ ID NO: 4768961 - DNA, 25 bp, Homo sapien
tttggcgccattttggatatgttct

SEQ ID NO: 4768962 - DNA, 25 bp, Homo sapien
aatttctggacctccaaagaaggct

SEQ ID NO: 4768963 - DNA, 25 bp, Homo sapien
gaatttctggacctccaaagaaggc

SEQ ID NO: 4768964 - DNA, 25 bp, Homo sapien
tgaatttctggacctccaaagaagg

SEQ ID NO: 4768965 - DNA, 25 bp, Homo sapien
atttctggacctccaaagaaggctg

SEQ ID NO: 4768966 - DNA, 25 bp, Homo sapien
tctgaaggggcagtcgctatgcatt

SEQ ID NO: 4768967 - DNA, 25 bp, Homo sapien
atgcattgggcgctgactgcctgca

SEQ ID NO: 4768968 - DNA, 25 bp, Homo sapien
gcagtcgctatgcattgggcgctga

SEQ ID NO: 4768969 - DNA, 25 bp, Homo sapien
tcgctatgcattgggcgctgactgc

SEQ ID NO: 4768970 - DNA, 25 bp, Homo sapien
aatggcccatgtgaggtccgtcctg

SEQ ID NO: 4768971 - DNA, 25 bp, Homo sapien
agcaattagcctctaggagaccagc

SEQ ID NO: 4768972 - DNA, 25 bp, Homo sapien
ccctgaagtttgtcaatggcccatg

SEQ ID NO: 4768973 - DNA, 25 bp, Homo sapien
gaaatacaccgattgtcccttaggc

SEQ ID NO: 4768974 - DNA, 25 bp, Homo sapien
gacagatctgtagacatcatgggaa

SEQ ID NO: 4768975 - DNA, 25 bp, Homo sapien
tgagacctgggcctgtgactcttgc

SEQ ID NO: 4768976 - DNA, 25 bp, Homo sapien
tagacttcctccacgaggtgagtcc

SEQ ID NO: 4768977 - DNA, 25 bp, Homo sapien
gagtccccacttggttcagagccaa

SEQ ID NO: 4768978 - DNA, 25 bp, Homo sapien
taatgggtcaatcccaggaaggtct

SEQ ID NO: 4768979 - DNA, 25 bp, Homo sapien
ccttctaatgggtcaatcccaggaa

SEQ ID NO: 4768980 - DNA, 25 bp, Homo sapien
gattggcatcctgccttagggaata

SEQ ID NO: 4768981 - DNA, 25 bp, Homo sapien
gaaggtctgaatccacctgggcacc

SEQ ID NO: 4768982 - DNA, 25 bp, Homo sapien
gccatgactccctttctccaagcag

SEQ ID NO: 4768983 - DNA, 25 bp, Homo sapien
ctttatatgagctccagagacccac

SEQ ID NO: 4768984 - DNA, 25 bp, Homo sapien
atgactccctttctccaagcagcat

SEQ ID NO: 4768985 - DNA, 25 bp, Homo sapien
catctctttatatgagctccagaga

SEQ ID NO: 4768986 - DNA, 25 bp, Homo sapien
aaaccagtgcgtggagcccgaccca

SEQ ID NO: 4768987 - DNA, 25 bp, Homo sapien
gaggatgctttcgccaagggaccga

SEQ ID NO: 4768988 - DNA, 25 bp, Homo sapien
ctgactctcagcatatttggtttcc

SEQ ID NO: 4768989 - DNA, 25 bp, Homo sapien
ggccttgggtcctcggttatgccac

SEQ ID NO: 4768990 - DNA, 25 bp, Homo sapien
ctctcctctgctctccttggcccat

SEQ ID NO: 4768991 - DNA, 25 bp, Homo sapien
gctgttcgcccttctctttctgcat

SEQ ID NO: 4768992 - DNA, 25 bp, Homo sapien
tgcgctgttcgcccttctctttctg

SEQ ID NO: 4768993 - DNA, 25 bp, Homo sapien
cgctgttcgcccttctctttctgca

SEQ ID NO: 4768994 - DNA, 25 bp, Homo sapien
gcgctgttcgcccttctctttctgc

SEQ ID NO: 4768995 - DNA, 25 bp, Homo sapien
tggtctgtctgagctcgcccttgaa

SEQ ID NO: 4768996 - DNA, 25 bp, Homo sapien
tctgagggcacacgatttaggaatc

SEQ ID NO: 4768997 - DNA, 25 bp, Homo sapien
gaagggatcggagcagcaattcacc

SEQ ID NO: 4768998 - DNA, 25 bp, Homo sapien
caaaggagtcccgatccagggtgga

SEQ ID NO: 4768999 - DNA, 25 bp, Homo sapien
ctggcactttggctcagcttgtgac

SEQ ID NO: 4769000 - DNA, 25 bp, Homo sapien
tctggcagtcatgagaggtaggtac

SEQ ID NO: 4769001 - DNA, 25 bp, Homo sapien
taagtggcaacacaccctctgggtg

SEQ ID NO: 4769002 - DNA, 25 bp, Homo sapien
tatacatcgttagcacaggacagcc

SEQ ID NO: 4769003 - DNA, 25 bp, Homo sapien
cagtttgcggttgtgaagaaatgcc

SEQ ID NO: 4769004 - DNA, 25 bp, Homo sapien
ccagtatgccgccaaattcatcaag

SEQ ID NO: 4769005 - DNA, 25 bp, Homo sapien
tatgaacgataaagaatcctccatc

SEQ ID NO: 4769006 - DNA, 25 bp, Homo sapien
agaaatgccgtgagaaaagcaccgg

SEQ ID NO: 4769007 - DNA, 25 bp, Homo sapien
gacggacgtcatcctgatcttggaa

SEQ ID NO: 4769008 - DNA, 25 bp, Homo sapien
tgatcttggaactgtgagtgccgcc

SEQ ID NO: 4769009 - DNA, 25 bp, Homo sapien
cgtcatcctgatcttggaactgtga

SEQ ID NO: 4769010 - DNA, 25 bp, Homo sapien
gagaacaagacggacgtcatcctga

SEQ ID NO: 4769011 - DNA, 25 bp, Homo sapien
cacgatttcggatttcatgtcctcc

SEQ ID NO: 4769012 - DNA, 25 bp, Homo sapien
taaaatcacgatttcggatttcatg

SEQ ID NO: 4769013 - DNA, 25 bp, Homo sapien
gatttcggatttcatgtcctccacg

SEQ ID NO: 4769014 - DNA, 25 bp, Homo sapien
aaatcacgatttcggatttcatgtc

SEQ ID NO: 4769015 - DNA, 25 bp, Homo sapien
tcctcaatgcgttcttttgctgcca

SEQ ID NO: 4769016 - DNA, 25 bp, Homo sapien
atttcaagagctcttgtgggttcca

SEQ ID NO: 4769017 - DNA, 25 bp, Homo sapien
caagagctcttgtgggttccacttc

SEQ ID NO: 4769018 - DNA, 25 bp, Homo sapien
tgagctcgagccagctcttttgact

SEQ ID NO: 4769019 - DNA, 25 bp, Homo sapien
ctgttttggccaactgcttccccaa

SEQ ID NO: 4769020 - DNA, 25 bp, Homo sapien
ttcttcctgttttggccaactgctt

SEQ ID NO: 4769021 - DNA, 25 bp, Homo sapien
tagaaactctccctgatctcatatc

SEQ ID NO: 4769022 - DNA, 25 bp, Homo sapien
gaaactctccctgatctcatatctt

SEQ ID NO: 4769023 - DNA, 25 bp, Homo sapien
tggaattgcggctttagctgtcccc

SEQ ID NO: 4769024 - DNA, 25 bp, Homo sapien
tcaagcgggtgtaatggaagagaac

SEQ ID NO: 4769025 - DNA, 25 bp, Homo sapien
ccactctggtcatacggagtccaca

SEQ ID NO: 4769026 - DNA, 25 bp, Homo sapien
tctccagctggtactccaagacgga

SEQ ID NO: 4769027 - DNA, 25 bp, Homo sapien
ggtgctccttgacatccacgtttat

SEQ ID NO: 4769028 - DNA, 25 bp, Homo sapien
cgtttataatggatgcaatgggaag

SEQ ID NO: 4769029 - DNA, 25 bp, Homo sapien
tcttctaccccttgggtgccacatc

SEQ ID NO: 4769030 - DNA, 25 bp, Homo sapien
taccccttgggtgccacatccatct

SEQ ID NO: 4769031 - DNA, 25 bp, Homo sapien
tgcatgggatgggaacgagctcaat

SEQ ID NO: 4769032 - DNA, 25 bp, Homo sapien
gagctcaatagaaggacagtcgatg

SEQ ID NO: 4769033 - DNA, 25 bp, Homo sapien
tgagaggattgagacgcaggaccat

SEQ ID NO: 4769034 - DNA, 25 bp, Homo sapien
acagtcgatgggactccacgggaca

SEQ ID NO: 4769035 - DNA, 25 bp, Homo sapien
tctggtagagtcatgcccatcacgt

SEQ ID NO: 4769036 - DNA, 25 bp, Homo sapien
tgattgtcgttgtcatctggtagag

SEQ ID NO: 4769037 - DNA, 25 bp, Homo sapien
tatgctagaggccaatgacagtcag

SEQ ID NO: 4769038 - DNA, 25 bp, Homo sapien
catcacgtaacagctgccaatgcat

SEQ ID NO: 4769039 - DNA, 25 bp, Homo sapien
catcccgtttacagcgacccggttg

SEQ ID NO: 4769040 - DNA, 25 bp, Homo sapien
gaggcctgtgcctctacacacccac

SEQ ID NO: 4769041 - DNA, 25 bp, Homo sapien
cagcgacccggttgtcaggctcggc

SEQ ID NO: 4769042 - DNA, 25 bp, Homo sapien
acacacccacatcccgtttacagcg

SEQ ID NO: 4769043 - DNA, 25 bp, Homo sapien
tctctcatcacgtctgtgatctcca

SEQ ID NO: 4769044 - DNA, 25 bp, Homo sapien
ctctctcatcacgtctgtgatctcc

SEQ ID NO: 4769045 - DNA, 25 bp, Homo sapien
ctctcatcacgtctgtgatctccat

SEQ ID NO: 4769046 - DNA, 25 bp, Homo sapien
ctgtttcctgtctaagagccaacct

SEQ ID NO: 4769047 - DNA, 25 bp, Homo sapien
tctaagagccaacctcttccccaga

SEQ ID NO: 4769048 - DNA, 25 bp, Homo sapien
ttcctgtctaagagccaacctcttc

SEQ ID NO: 4769049 - DNA, 25 bp, Homo sapien
gtttcctgtctaagagccaacctct

SEQ ID NO: 4769050 - DNA, 25 bp, Homo sapien
aaaccctactcttcaaccacaggag

SEQ ID NO: 4769051 - DNA, 25 bp, Homo sapien
tgtttcagcaaaaccctactcttca

SEQ ID NO: 4769052 - DNA, 25 bp, Homo sapien
caaccacaggagtgtgggccttatt

SEQ ID NO: 4769053 - DNA, 25 bp, Homo sapien
tcttcaaccacaggagtgtgggcct

SEQ ID NO: 4769054 - DNA, 25 bp, Homo sapien
tgtaaagatggcaacatgcctatcg

SEQ ID NO: 4769055 - DNA, 25 bp, Homo sapien
caaggtatgcacagagaacaggatc

SEQ ID NO: 4769056 - DNA, 25 bp, Homo sapien
atcgtggtggccctctgtgaagcaa

SEQ ID NO: 4769057 - DNA, 25 bp, Homo sapien
gcaatactcccctccatgtggcatg

SEQ ID NO: 4769058 - DNA, 25 bp, Homo sapien
cctgaacccgggtcctgattctgtg

SEQ ID NO: 4769059 - DNA, 25 bp, Homo sapien
cccgatcccgggtcctgattctgtg

SEQ ID NO: 4769060 - DNA, 25 bp, Homo sapien
atccccccgatcctgggtcctgatt

SEQ ID NO: 4769061 - DNA, 25 bp, Homo sapien
catccccccgatcccgggtcctgat

SEQ ID NO: 4769062 - DNA, 25 bp, Homo sapien
ttctgtgtccatgcccccgatcctg

SEQ ID NO: 4769063 - DNA, 25 bp, Homo sapien
ccacctgataccaggtcctgattct

SEQ ID NO: 4769064 - DNA, 25 bp, Homo sapien
ctcccacctgataccaggtcctgat

SEQ ID NO: 4769065 - DNA, 25 bp, Homo sapien
gattctgtgtccatgcccccgatcc

SEQ ID NO: 4769066 - DNA, 25 bp, Homo sapien
gtgctcccacctgatcctggatttt

SEQ ID NO: 4769067 - DNA, 25 bp, Homo sapien
tgtacttttttatagcgttttgcca

SEQ ID NO: 4769068 - DNA, 25 bp, Homo sapien
tagcgttttgccatcttaagttgca

SEQ ID NO: 4769069 - DNA, 25 bp, Homo sapien
tacttatatggacatgtactttttt

SEQ ID NO: 4769070 - DNA, 25 bp, Homo sapien
tatggacatgtacttttttatagcg

SEQ ID NO: 4769071 - DNA, 25 bp, Homo sapien
ccctctttaagtcggtgcttcccat

SEQ ID NO: 4769072 - DNA, 25 bp, Homo sapien
catttgtccctctttaagtcggtgc

SEQ ID NO: 4769073 - DNA, 25 bp, Homo sapien
ccatttgtccctctttaagtcggtg

SEQ ID NO: 4769074 - DNA, 25 bp, Homo sapien
ttgtccctctttaagtcggtgcttc

SEQ ID NO: 4769075 - DNA, 25 bp, Homo sapien
gggacagggcttgtatggcaactct

SEQ ID NO: 4769076 - DNA, 25 bp, Homo sapien
ttgcggccaacaacggaatcctaga

SEQ ID NO: 4769077 - DNA, 25 bp, Homo sapien
tgtgtctccggaatgtcatcctcag

SEQ ID NO: 4769078 - DNA, 25 bp, Homo sapien
gcaactgcgtgagaagaacgacctt

SEQ ID NO: 4769079 - DNA, 25 bp, Homo sapien
cttgccaccgcaggaaaagcgtctt

SEQ ID NO: 4769080 - DNA, 25 bp, Homo sapien
acggtgcccagagctaacctcagag

SEQ ID NO: 4769081 - DNA, 25 bp, Homo sapien
cttgcccacgacatctgtatcagtg

SEQ ID NO: 4769082 - DNA, 25 bp, Homo sapien
ctgtagggtccctccgtgagccgcg

SEQ ID NO: 4769083 - DNA, 25 bp, Homo sapien
cctagttgatctggcgaggacttcc

SEQ ID NO: 4769084 - DNA, 25 bp, Homo sapien
ggctggatcgtcattggtatatagg

SEQ ID NO: 4769085 - DNA, 25 bp, Homo sapien
ggtgacatcctcagggttttctaga

SEQ ID NO: 4769086 - DNA, 25 bp, Homo sapien
cttactccccaggtttcaagctgag

SEQ ID NO: 4769087 - DNA, 25 bp, Homo sapien
ctccccagtgttcagcctctgcaaa

SEQ ID NO: 4769088 - DNA, 25 bp, Homo sapien
ctggcccccagacttgcagctgtcc

SEQ ID NO: 4769089 - DNA, 25 bp, Homo sapien
atgctcaggtctctggtccctgctt

SEQ ID NO: 4769090 - DNA, 25 bp, Homo sapien
aacactgaggcccatgctcaggtct

SEQ ID NO: 4769091 - DNA, 25 bp, Homo sapien
tgattaaacctgtggacctgaaagg

SEQ ID NO: 4769092 - DNA, 25 bp, Homo sapien
gacaggaagacaccaacatgtgctt

SEQ ID NO: 4769093 - DNA, 25 bp, Homo sapien
gagctgggtcgagcacatattatga

SEQ ID NO: 4769094 - DNA, 25 bp, Homo sapien
tgcacagtaattaccaggagctggt

SEQ ID NO: 4769095 - DNA, 25 bp, Homo sapien
ttgccatatagaccgagaagtgcct

SEQ ID NO: 4769096 - DNA, 25 bp, Homo sapien
aaaccccttggagttgacctggcag

SEQ ID NO: 4769097 - DNA, 25 bp, Homo sapien
tatagacttggagagacacacttca

SEQ ID NO: 4769098 - DNA, 25 bp, Homo sapien
tcatacatgtcctgtggtcttgcca

SEQ ID NO: 4769099 - DNA, 25 bp, Homo sapien
ccaccaggtctggattgaggctgca

SEQ ID NO: 4769100 - DNA, 25 bp, Homo sapien
ggaactaacagtggtctctgagggc

SEQ ID NO: 4769101 - DNA, 25 bp, Homo sapien
cctggagatttttgagctgggctct

SEQ ID NO: 4769102 - DNA, 25 bp, Homo sapien
gaattaatggcacggtgtagcctgt

SEQ ID NO: 4769103 - DNA, 25 bp, Homo sapien
tgcagttctcggctcaccttaggag

SEQ ID NO: 4769104 - DNA, 25 bp, Homo sapien
tttgtatcagcgtggagtcatcagc

SEQ ID NO: 4769105 - DNA, 25 bp, Homo sapien
ctgttagtttgggagtgcagtgccc

SEQ ID NO: 4769106 - DNA, 25 bp, Homo sapien
caagtgacgctctgaactgcagttc

SEQ ID NO: 4769107 - DNA, 25 bp, Homo sapien
tgtatgctgatcatcgccagaggtg

SEQ ID NO: 4769108 - DNA, 25 bp, Homo sapien
tcatctcaggtagaaggttgacaca

SEQ ID NO: 4769109 - DNA, 25 bp, Homo sapien
gaaatcatcggagtcagccaggagc

SEQ ID NO: 4769110 - DNA, 25 bp, Homo sapien
taaattgataggagggaacatgtcc

SEQ ID NO: 4769111 - DNA, 25 bp, Homo sapien
gcatcacccgccatgaaatatgagg

SEQ ID NO: 4769112 - DNA, 25 bp, Homo sapien
ggtctccgctcaaatggtcccagag

SEQ ID NO: 4769113 - DNA, 25 bp, Homo sapien
ggccacactttaggaagcacagtat

SEQ ID NO: 4769114 - DNA, 25 bp, Homo sapien
gattttaattcctacgtgagctgac

SEQ ID NO: 4769115 - DNA, 25 bp, Homo sapien
tgcttctatgtaacgtgaagaatat

SEQ ID NO: 4769116 - DNA, 25 bp, Homo sapien
tacaagccattctaaatatacacat

SEQ ID NO: 4769117 - DNA, 25 bp, Homo sapien
tatacaagccattctaaatatacac

SEQ ID NO: 4769118 - DNA, 25 bp, Homo sapien
ttcttgcttctatgtaacgtgaaga

SEQ ID NO: 4769119 - DNA, 25 bp, Homo sapien
tggttctaactcatgttctccagga

SEQ ID NO: 4769120 - DNA, 25 bp, Homo sapien
aactaatagcatttcacttcctggg

SEQ ID NO: 4769121 - DNA, 25 bp, Homo sapien
ggaaatactaagctgcacactgctg

SEQ ID NO: 4769122 - DNA, 25 bp, Homo sapien
gaggaggacagcagtaatcaagtct

SEQ ID NO: 4769123 - DNA, 25 bp, Homo sapien
gcgcatgcatgggaggaattcatct

SEQ ID NO: 4769124 - DNA, 25 bp, Homo sapien
cattgtggaattgcctcagcagcca

SEQ ID NO: 4769125 - DNA, 25 bp, Homo sapien
gccaaagaccggagaaaccattgtg

SEQ ID NO: 4769126 - DNA, 25 bp, Homo sapien
tgtcggatacacactcgaatcattg

SEQ ID NO: 4769127 - DNA, 25 bp, Homo sapien
gaagggatgctctataagacaagtc

SEQ ID NO: 4769128 - DNA, 25 bp, Homo sapien
taagaaaatgatttgtcgaagcttc

SEQ ID NO: 4769129 - DNA, 25 bp, Homo sapien
tgatttgtcgaagcttcagtgacca

SEQ ID NO: 4769130 - DNA, 25 bp, Homo sapien
tcagtgaccattgaagggatgctct

SEQ ID NO: 4769131 - DNA, 25 bp, Homo sapien
tctttctcttcactgtccctccatg

SEQ ID NO: 4769132 - DNA, 25 bp, Homo sapien
tctctttctcttcactgtccctcca

SEQ ID NO: 4769133 - DNA, 25 bp, Homo sapien
ctcttcactgtccctccatggttcc

SEQ ID NO: 4769134 - DNA, 25 bp, Homo sapien
tttctcttcactgtccctccatggt

SEQ ID NO: 4769135 - DNA, 25 bp, Homo sapien
gctccctgtgtttgaaaactgatgg

SEQ ID NO: 4769136 - DNA, 25 bp, Homo sapien
tccctgtgtttgaaaactgatgggt

SEQ ID NO: 4769137 - DNA, 25 bp, Homo sapien
gtcccagctccctgtgtttgaaaac

SEQ ID NO: 4769138 - DNA, 25 bp, Homo sapien
cccagctccctgtgtttgaaaactg

SEQ ID NO: 4769139 - DNA, 25 bp, Homo sapien
aggcaggattggtggcccgtggctt

SEQ ID NO: 4769140 - DNA, 25 bp, Homo sapien
ggcagagttccagaatccaccaggc

SEQ ID NO: 4769141 - DNA, 25 bp, Homo sapien
cacatggacctcttgcattgtcctg

SEQ ID NO: 4769142 - DNA, 25 bp, Homo sapien
ttgccagcccagatgccacccacat

SEQ ID NO: 4769143 - DNA, 25 bp, Homo sapien
cctgacactactcctgagtgttgca

SEQ ID NO: 4769144 - DNA, 25 bp, Homo sapien
ccctgacactactcctgagtgttgc

SEQ ID NO: 4769145 - DNA, 25 bp, Homo sapien
ctgacactactcctgagtgttgcat

SEQ ID NO: 4769146 - DNA, 25 bp, Homo sapien
tacagatgctttggaccgtagctgc

SEQ ID NO: 4769147 - DNA, 25 bp, Homo sapien
tacaagttgggtcctcagtggatcc

SEQ ID NO: 4769148 - DNA, 25 bp, Homo sapien
tccttctagagtgggagatcagcac

SEQ ID NO: 4769149 - DNA, 25 bp, Homo sapien
ccagagtgtgatgtaccaaggcttt

SEQ ID NO: 4769150 - DNA, 25 bp, Homo sapien
ctcccagacggggtcgcagctgggc

SEQ ID NO: 4769151 - DNA, 25 bp, Homo sapien
ttcatcaagatcttcgtccccgcca

SEQ ID NO: 4769152 - DNA, 25 bp, Homo sapien
tgctgaagcaacatcccataaccgc

SEQ ID NO: 4769153 - DNA, 25 bp, Homo sapien
catgtcacgggaccattcgttttca

SEQ ID NO: 4769154 - DNA, 25 bp, Homo sapien
ccataaccgctgcatctgggcctct

SEQ ID NO: 4769155 - DNA, 25 bp, Homo sapien
aacatccttgatgagatgacactgc

SEQ ID NO: 4769156 - DNA, 25 bp, Homo sapien
acatccttgatgagatgacactgct

SEQ ID NO: 4769157 - DNA, 25 bp, Homo sapien
catccttgatgagatgacactgctt

SEQ ID NO: 4769158 - DNA, 25 bp, Homo sapien
atccttgatgagatgacactgcttc

SEQ ID NO: 4769159 - DNA, 25 bp, Homo sapien
tggttgaataaactcaatgcacctc

SEQ ID NO: 4769160 - DNA, 25 bp, Homo sapien
cagcccacacatggttgaataaact

SEQ ID NO: 4769161 - DNA, 25 bp, Homo sapien
aatctgagtctatccagcccacaca

SEQ ID NO: 4769162 - DNA, 25 bp, Homo sapien
ctctaaatctgagtctatccagccc

SEQ ID NO: 4769163 - DNA, 25 bp, Homo sapien
tcataaaccaaaagagctgattcct

SEQ ID NO: 4769164 - DNA, 25 bp, Homo sapien
tactgtaatgcactagagaagtgtt

SEQ ID NO: 4769165 - DNA, 25 bp, Homo sapien
tctcatttgggaaggtcgcctgcca

SEQ ID NO: 4769166 - DNA, 25 bp, Homo sapien
catatggaaccacgaatggatttga

SEQ ID NO: 4769167 - DNA, 25 bp, Homo sapien
gaagcagggcccatagttgacctgc

SEQ ID NO: 4769168 - DNA, 25 bp, Homo sapien
tcatagcaactgggctgcatctaaa

SEQ ID NO: 4769169 - DNA, 25 bp, Homo sapien
gaatcaagggcgtgatccacaacca

SEQ ID NO: 4769170 - DNA, 25 bp, Homo sapien
tgcacagtatgagtcatgacccatg

SEQ ID NO: 4769171 - DNA, 25 bp, Homo sapien
ctgcagagggtgggtgttaacggtc

SEQ ID NO: 4769172 - DNA, 25 bp, Homo sapien
tgcagagggtgggtgttaacggtct

SEQ ID NO: 4769173 - DNA, 25 bp, Homo sapien
cagaaattcagacttggtaacccgg

SEQ ID NO: 4769174 - DNA, 25 bp, Homo sapien
gacaacctcccaactcaagagaagg

SEQ ID NO: 4769175 - DNA, 25 bp, Homo sapien
tggtagagacggagacacctggtca

SEQ ID NO: 4769176 - DNA, 25 bp, Homo sapien
tggcaaagacactgtccagacaacc

SEQ ID NO: 4769177 - DNA, 25 bp, Homo sapien
atagctgggctaacaaatagtggag

SEQ ID NO: 4769178 - DNA, 25 bp, Homo sapien
taacaaatagtggagcgagtatcgt

SEQ ID NO: 4769179 - DNA, 25 bp, Homo sapien
gggctaacaaatagtggagcgagta

SEQ ID NO: 4769180 - DNA, 25 bp, Homo sapien
gctgggctaacaaatagtggagcga

SEQ ID NO: 4769181 - DNA, 25 bp, Homo sapien
caatggtttttgcacccaggaggcc

SEQ ID NO: 4769182 - DNA, 25 bp, Homo sapien
tccacaccgcatggaaagcagccat

SEQ ID NO: 4769183 - DNA, 25 bp, Homo sapien
tgaaggctgccagtaatagcaggtt

SEQ ID NO: 4769184 - DNA, 25 bp, Homo sapien
tagcaggttagtaccaggtgcccag

SEQ ID NO: 4769185 - DNA, 25 bp, Homo sapien
tggagctgctgagcaatgcacctgg

SEQ ID NO: 4769186 - DNA, 25 bp, Homo sapien
agctggtcctgcacttcgcacacaa

SEQ ID NO: 4769187 - DNA, 25 bp, Homo sapien
tccattgaggttccaccaggaaggc

SEQ ID NO: 4769188 - DNA, 25 bp, Homo sapien
gatgaccagagggttcagctggtcc

SEQ ID NO: 4769189 - DNA, 25 bp, Homo sapien
gcagctgtgggtgccctgagcggag

SEQ ID NO: 4769190 - DNA, 25 bp, Homo sapien
tgcagctgtgggtgccctgagcgga

SEQ ID NO: 4769191 - DNA, 25 bp, Homo sapien
ctgcagctgtgggtgccctgagcgg

SEQ ID NO: 4769192 - DNA, 25 bp, Homo sapien
gaacaaaatgcacatggactctgat

SEQ ID NO: 4769193 - DNA, 25 bp, Homo sapien
tcaggggacaccaactttccagaga

SEQ ID NO: 4769194 - DNA, 25 bp, Homo sapien
gggggcccaggacaagcttctcctc

SEQ ID NO: 4769195 - DNA, 25 bp, Homo sapien
ttttgtaattcgagggcaggatctg

SEQ ID NO: 4769196 - DNA, 25 bp, Homo sapien
tgactgttgacttgcctggcccagg

SEQ ID NO: 4769197 - DNA, 25 bp, Homo sapien
gtgctgatgcacaggctctaagagc

SEQ ID NO: 4769198 - DNA, 25 bp, Homo sapien
agtgactgttgacttgcctggccca

SEQ ID NO: 4769199 - DNA, 25 bp, Homo sapien
tgagctgtgccttctatccagggct

SEQ ID NO: 4769200 - DNA, 25 bp, Homo sapien
tctgcgcagggtactgtccttctcc

SEQ ID NO: 4769201 - DNA, 25 bp, Homo sapien
tgcatttctgcgcagggtactgtcc

SEQ ID NO: 4769202 - DNA, 25 bp, Homo sapien
ccaatgcatttctgcgcagggtact

SEQ ID NO: 4769203 - DNA, 25 bp, Homo sapien
agggcccacacactccaatgcattt

SEQ ID NO: 4769204 - DNA, 25 bp, Homo sapien
ctcatgagaggaccgcacagatcct

SEQ ID NO: 4769205 - DNA, 25 bp, Homo sapien
gagccttgggttactttcctctgaa

SEQ ID NO: 4769206 - DNA, 25 bp, Homo sapien
ctgagccttgggttactttcctctg

SEQ ID NO: 4769207 - DNA, 25 bp, Homo sapien
cgcacagatcctggcagtcaaatga

SEQ ID NO: 4769208 - DNA, 25 bp, Homo sapien
acagcgtctggaacccgggtgagca

SEQ ID NO: 4769209 - DNA, 25 bp, Homo sapien
gtgagcaccagctacaggactccct

SEQ ID NO: 4769210 - DNA, 25 bp, Homo sapien
ggtcccacatgtattcttgcccaag

SEQ ID NO: 4769211 - DNA, 25 bp, Homo sapien
ttgcccaaggctcactaagtaatag

SEQ ID NO: 4769212 - DNA, 25 bp, Homo sapien
gataagaatgggacttgcagcgact

SEQ ID NO: 4769213 - DNA, 25 bp, Homo sapien
ccatggatggagcagcaactcttaa

SEQ ID NO: 4769214 - DNA, 25 bp, Homo sapien
catccacggtctgggaaggccagat

SEQ ID NO: 4769215 - DNA, 25 bp, Homo sapien
aagctaatgaggagaccatccacgg

SEQ ID NO: 4769216 - DNA, 25 bp, Homo sapien
atccagtgagaaacaccgagaaata

SEQ ID NO: 4769217 - DNA, 25 bp, Homo sapien
gcatccagtgagaaacaccgagaaa

SEQ ID NO: 4769218 - DNA, 25 bp, Homo sapien
catccagtgagaaacaccgagaaat

SEQ ID NO: 4769219 - DNA, 25 bp, Homo sapien
agaaaatggtcctaagatgctctga

SEQ ID NO: 4769220 - DNA, 25 bp, Homo sapien
ttccctctcccacatcacgtgcccc

SEQ ID NO: 4769221 - DNA, 25 bp, Homo sapien
cacatcacgtgccccattgtctcct

SEQ ID NO: 4769222 - DNA, 25 bp, Homo sapien
ctcccacatcacgtgccccattgtc

SEQ ID NO: 4769223 - DNA, 25 bp, Homo sapien
tccctctcccacatcacgtgcccca

SEQ ID NO: 4769224 - DNA, 25 bp, Homo sapien
ctggcttcctccgcaggcactgtct

SEQ ID NO: 4769225 - DNA, 25 bp, Homo sapien
ttcctggcttcctccgcaggcactg

SEQ ID NO: 4769226 - DNA, 25 bp, Homo sapien
ggcttcctccgcaggcactgtctgc

SEQ ID NO: 4769227 - DNA, 25 bp, Homo sapien
tcagaactgcaggtcagccccttcc

SEQ ID NO: 4769228 - DNA, 25 bp, Homo sapien
cctcagcgatgcattctccaaagaa

SEQ ID NO: 4769229 - DNA, 25 bp, Homo sapien
attctccaaagaagccgctgtgaca

SEQ ID NO: 4769230 - DNA, 25 bp, Homo sapien
acaatcctcagcgatgcattctcca

SEQ ID NO: 4769231 - DNA, 25 bp, Homo sapien
ttctccaaagaagccgctgtgacag

SEQ ID NO: 4769232 - DNA, 25 bp, Homo sapien
ggatttatgttcacccacaaggaag

SEQ ID NO: 4769233 - DNA, 25 bp, Homo sapien
tatggctaatccagacgctaaagtc

SEQ ID NO: 4769234 - DNA, 25 bp, Homo sapien
caatgcttggcaaacaattcatccc

SEQ ID NO: 4769235 - DNA, 25 bp, Homo sapien
gacagactgtgattagcaatgcttg

SEQ ID NO: 4769236 - DNA, 25 bp, Homo sapien
tcagccctcctcacattttgcctgt

SEQ ID NO: 4769237 - DNA, 25 bp, Homo sapien
tcctcacattttgcctgtctactca

SEQ ID NO: 4769238 - DNA, 25 bp, Homo sapien
ccctcctcacattttgcctgtctac

SEQ ID NO: 4769239 - DNA, 25 bp, Homo sapien
cagccctcctcacattttgcctgtc

SEQ ID NO: 4769240 - DNA, 25 bp, Homo sapien
gtagacggcaaagatggttccaatg

SEQ ID NO: 4769241 - DNA, 25 bp, Homo sapien
tgtagacggcaaagatggttccaat

SEQ ID NO: 4769242 - DNA, 25 bp, Homo sapien
ctgtagacggcaaagatggttccaa

SEQ ID NO: 4769243 - DNA, 25 bp, Homo sapien
tctgtagacggcaaagatggttcca

SEQ ID NO: 4769244 - DNA, 25 bp, Homo sapien
tcatctaatggcgagcaggggcact

SEQ ID NO: 4769245 - DNA, 25 bp, Homo sapien
tggcgatgatggtcacgtccttttt

SEQ ID NO: 4769246 - DNA, 25 bp, Homo sapien
cctggcgatgatggtcacgtccttt

SEQ ID NO: 4769247 - DNA, 25 bp, Homo sapien
cttcctggcgatgatggtcacgtcc

SEQ ID NO: 4769248 - DNA, 25 bp, Homo sapien
tcctggcgatgatggtcacgtcctt

SEQ ID NO: 4769249 - DNA, 25 bp, Homo sapien
gagcagatgccccaaaggtgtctgc

SEQ ID NO: 4769250 - DNA, 25 bp, Homo sapien
gcagatgccccaaaggtgtctgcca

SEQ ID NO: 4769251 - DNA, 25 bp, Homo sapien
gctgagcagatgccccaaaggtgtc

SEQ ID NO: 4769252 - DNA, 25 bp, Homo sapien
agatgccccaaaggtgtctgccatg

SEQ ID NO: 4769253 - DNA, 25 bp, Homo sapien
ctgccacaaggagtccttgcacctc

SEQ ID NO: 4769254 - DNA, 25 bp, Homo sapien
tcatggcagcacctcagtgcttcag

SEQ ID NO: 4769255 - DNA, 25 bp, Homo sapien
acctcatggcagcacctcagtgctt

SEQ ID NO: 4769256 - DNA, 25 bp, Homo sapien
cttgcacctcatggcagcacctcag

SEQ ID NO: 4769257 - DNA, 25 bp, Homo sapien
caatgatgtatctctgtcatatcca

SEQ ID NO: 4769258 - DNA, 25 bp, Homo sapien
gtcatatccaaactcgcctccagct

SEQ ID NO: 4769259 - DNA, 25 bp, Homo sapien
ctccagctggttcaggaacattcat

SEQ ID NO: 4769260 - DNA, 25 bp, Homo sapien
tactcctgatccctttcagcaatga

SEQ ID NO: 4769261 - DNA, 25 bp, Homo sapien
gatgtccgcatggaagccagcagga

SEQ ID NO: 4769262 - DNA, 25 bp, Homo sapien
cctgatgccagtatttgatctgtgc

SEQ ID NO: 4769263 - DNA, 25 bp, Homo sapien
cctcctgatgccagtatttgatctg

SEQ ID NO: 4769264 - DNA, 25 bp, Homo sapien
ttcctcctgatgccagtatttgatc

SEQ ID NO: 4769265 - DNA, 25 bp, Homo sapien
gatgccagtatttgatctgtgctat

SEQ ID NO: 4769266 - DNA, 25 bp, Homo sapien
caaggactgatgcaaaacccttcct

SEQ ID NO: 4769267 - DNA, 25 bp, Homo sapien
ctgcaagcttagagccaggtgcaaa

SEQ ID NO: 4769268 - DNA, 25 bp, Homo sapien
agccataggccaaggactgatgcaa

SEQ ID NO: 4769269 - DNA, 25 bp, Homo sapien
ggagacagtgtagaagccaagacat

SEQ ID NO: 4769270 - DNA, 25 bp, Homo sapien
tgagtggccaaaaagcctgagcttg

SEQ ID NO: 4769271 - DNA, 25 bp, Homo sapien
cagggctattagatgaagagtcctc

SEQ ID NO: 4769272 - DNA, 25 bp, Homo sapien
ttgattcttgggagcaggttctgcg

SEQ ID NO: 4769273 - DNA, 25 bp, Homo sapien
cacttgagagagtccataaggctgc

SEQ ID NO: 4769274 - DNA, 25 bp, Homo sapien
caggcggcatagaggcactggagca

SEQ ID NO: 4769275 - DNA, 25 bp, Homo sapien
aggtggccccatgctcggcttccag

SEQ ID NO: 4769276 - DNA, 25 bp, Homo sapien
gctggtggcccctagtggccatgta

SEQ ID NO: 4769277 - DNA, 25 bp, Homo sapien
gtagcctggtagcatccaggtggcc

SEQ ID NO: 4769278 - DNA, 25 bp, Homo sapien
acagcctggaggctcactcaaagga

SEQ ID NO: 4769279 - DNA, 25 bp, Homo sapien
tgctccctgactggatgcacagcca

SEQ ID NO: 4769280 - DNA, 25 bp, Homo sapien
aaggagcagcagtgcagtagccaaa

SEQ ID NO: 4769281 - DNA, 25 bp, Homo sapien
ccctgagggctcttcttgttgcctg

SEQ ID NO: 4769282 - DNA, 25 bp, Homo sapien
tagccaaacagcaggcatgagagga

SEQ ID NO: 4769283 - DNA, 25 bp, Homo sapien
agatttctctgtagaccaagatgtg

SEQ ID NO: 4769284 - DNA, 25 bp, Homo sapien
accaccatagagctcacatacctga

SEQ ID NO: 4769285 - DNA, 25 bp, Homo sapien
ccaagatgtggtgcatatccaccac

SEQ ID NO: 4769286 - DNA, 25 bp, Homo sapien
agagctcacatacctgaccccatag

SEQ ID NO: 4769287 - DNA, 25 bp, Homo sapien
cagaactatgaacagtggctccaac

SEQ ID NO: 4769288 - DNA, 25 bp, Homo sapien
gaaaagcagagtctgccattctcat

SEQ ID NO: 4769289 - DNA, 25 bp, Homo sapien
cattctcatactgtccagaactatg

SEQ ID NO: 4769290 - DNA, 25 bp, Homo sapien
aaacaggaccccatagagacaacac

SEQ ID NO: 4769291 - DNA, 25 bp, Homo sapien
agcattgccctcattcaggttgtaa

SEQ ID NO: 4769292 - DNA, 25 bp, Homo sapien
tttctgcacatattcggtgacggcc

SEQ ID NO: 4769293 - DNA, 25 bp, Homo sapien
cttagcattgccctcattcaggttg

SEQ ID NO: 4769294 - DNA, 25 bp, Homo sapien
tcggtgacggccctgtcaaaatact

SEQ ID NO: 4769295 - DNA, 25 bp, Homo sapien
tgtacagtgtataaactatggtcac

SEQ ID NO: 4769296 - DNA, 25 bp, Homo sapien
tatggtcacaatgttgcagccaggc

SEQ ID NO: 4769297 - DNA, 25 bp, Homo sapien
agccaccagggttgtgctactgtac

SEQ ID NO: 4769298 - DNA, 25 bp, Homo sapien
cagggttgtgctactgtacagtgta

SEQ ID NO: 4769299 - DNA, 25 bp, Homo sapien
tagagtactgtgctttctgagaagt

SEQ ID NO: 4769300 - DNA, 25 bp, Homo sapien
gttgagccctgaacctagtctttca

SEQ ID NO: 4769301 - DNA, 25 bp, Homo sapien
gtttatccgaaagaacagtctatga

SEQ ID NO: 4769302 - DNA, 25 bp, Homo sapien
tttctagtgaaaccatccgggcctg

SEQ ID NO: 4769303 - DNA, 25 bp, Homo sapien
cctgattgggtttatgctctatgag

SEQ ID NO: 4769304 - DNA, 25 bp, Homo sapien
acctgattgggtttatgctctatga

SEQ ID NO: 4769305 - DNA, 25 bp, Homo sapien
tgattgggtttatgctctatgaggg

SEQ ID NO: 4769306 - DNA, 25 bp, Homo sapien
gccacctgattgggtttatgctcta

SEQ ID NO: 4769307 - DNA, 25 bp, Homo sapien
gcgggagcggcggtagataggtgct

SEQ ID NO: 4769308 - DNA, 25 bp, Homo sapien
agcggcggtagataggtgctctcct

SEQ ID NO: 4769309 - DNA, 25 bp, Homo sapien
cggtagataggtgctctccttccca

SEQ ID NO: 4769310 - DNA, 25 bp, Homo sapien
tagataggtgctctccttcccagtt

SEQ ID NO: 4769311 - DNA, 25 bp, Homo sapien
tgcctttaacttctcgcccataagg

SEQ ID NO: 4769312 - DNA, 25 bp, Homo sapien
cctatccttttcatagcctaaatta

SEQ ID NO: 4769313 - DNA, 25 bp, Homo sapien
catagcctaaattatcatcccataa

SEQ ID NO: 4769314 - DNA, 25 bp, Homo sapien
catccaatacttccacttgccttgt

SEQ ID NO: 4769315 - DNA, 25 bp, Homo sapien
cattttggtgagtccatccaatact

SEQ ID NO: 4769316 - DNA, 25 bp, Homo sapien
tacaactggtatgctggaagggcag

SEQ ID NO: 4769317 - DNA, 25 bp, Homo sapien
tgagactgtgttaggttcagacctc

SEQ ID NO: 4769318 - DNA, 25 bp, Homo sapien
caacagccatgaacgcctttggaga

SEQ ID NO: 4769319 - DNA, 25 bp, Homo sapien
tatgctagactgtgctgcaacatgc

SEQ ID NO: 4769320 - DNA, 25 bp, Homo sapien
acctggcgaaggcagtggcaactgt

SEQ ID NO: 4769321 - DNA, 25 bp, Homo sapien
agaaggacctggcgaaggcagtggc

SEQ ID NO: 4769322 - DNA, 25 bp, Homo sapien
ggacctggcgaaggcagtggcaact

SEQ ID NO: 4769323 - DNA, 25 bp, Homo sapien
aaggacctggcgaaggcagtggcaa

SEQ ID NO: 4769324 - DNA, 25 bp, Homo sapien
tacagggcaaagctatcagggccag

SEQ ID NO: 4769325 - DNA, 25 bp, Homo sapien
tgagaggacccaaactgagagtctg

SEQ ID NO: 4769326 - DNA, 25 bp, Homo sapien
gttgcaatccagtcaagttacaggg

SEQ ID NO: 4769327 - DNA, 25 bp, Homo sapien
caagcatgaaactgggctctaagcc

SEQ ID NO: 4769328 - DNA, 25 bp, Homo sapien
ggcatttagcttgggctgttgacca

SEQ ID NO: 4769329 - DNA, 25 bp, Homo sapien
atttagcttgggctgttgaccagag

SEQ ID NO: 4769330 - DNA, 25 bp, Homo sapien
gttggctgggcatttagcttgggct

SEQ ID NO: 4769331 - DNA, 25 bp, Homo sapien
ctgggcatttagcttgggctgttga

SEQ ID NO: 4769332 - DNA, 25 bp, Homo sapien
tgctgtgggcattcctgtgacttct

SEQ ID NO: 4769333 - DNA, 25 bp, Homo sapien
acagcatagggtgcttgtgaggcca

SEQ ID NO: 4769334 - DNA, 25 bp, Homo sapien
agcgccagccccaagagtgttgcca

SEQ ID NO: 4769335 - DNA, 25 bp, Homo sapien
gttgccaccagggatagcccagcgt

SEQ ID NO: 4769336 - DNA, 25 bp, Homo sapien
aatgctgttataaggcccagtgcta

SEQ ID NO: 4769337 - DNA, 25 bp, Homo sapien
cagagttttagatcccagaggtcca

SEQ ID NO: 4769338 - DNA, 25 bp, Homo sapien
taagaaatgctgttataaggcccag

SEQ ID NO: 4769339 - DNA, 25 bp, Homo sapien
gttataaggcccagtgctaggaaat

SEQ ID NO: 4769340 - DNA, 25 bp, Homo sapien
aaacgcccttcacataagccctttg

SEQ ID NO: 4769341 - DNA, 25 bp, Homo sapien
tgcagtacaggaggccgatgtgaac

SEQ ID NO: 4769342 - DNA, 25 bp, Homo sapien
acaagctcagggtgcagtacaggag

SEQ ID NO: 4769343 - DNA, 25 bp, Homo sapien
tgtggaaggtgccaaacgcccttca

SEQ ID NO: 4769344 - DNA, 25 bp, Homo sapien
cgttcacaccgggaactgtgtgggc

SEQ ID NO: 4769345 - DNA, 25 bp, Homo sapien
tcagccgttcacaccgggaactgtg

SEQ ID NO: 4769346 - DNA, 25 bp, Homo sapien
gttcacaccgggaactgtgtgggca

SEQ ID NO: 4769347 - DNA, 25 bp, Homo sapien
gccgttcacaccgggaactgtgtgg

SEQ ID NO: 4769348 - DNA, 25 bp, Homo sapien
cgaggcacgtgctcttccagcagag

SEQ ID NO: 4769349 - DNA, 25 bp, Homo sapien
caggcgaggcacgtgctcttccagc

SEQ ID NO: 4769350 - DNA, 25 bp, Homo sapien
tggaagcgtcaggagccattcctgg

SEQ ID NO: 4769351 - DNA, 25 bp, Homo sapien
aaggtgtccagacaaagaggccagg

SEQ ID NO: 4769352 - DNA, 25 bp, Homo sapien
cagtcacagcagttgtggtgccgtc

SEQ ID NO: 4769353 - DNA, 25 bp, Homo sapien
agttgtggtgccgtcccccatcgca

SEQ ID NO: 4769354 - DNA, 25 bp, Homo sapien
tcagtcacagcagttgtggtgccgt

SEQ ID NO: 4769355 - DNA, 25 bp, Homo sapien
tcacagcagttgtggtgccgtcccc

SEQ ID NO: 4769356 - DNA, 25 bp, Homo sapien
ggcgctgctccctaaactggaggtg

SEQ ID NO: 4769357 - DNA, 25 bp, Homo sapien
gccctgatgggaaggctcggaaaaa

SEQ ID NO: 4769358 - DNA, 25 bp, Homo sapien
cggggacaaaggtttttcattgctg

SEQ ID NO: 4769359 - DNA, 25 bp, Homo sapien
ccttgaggagccctgatgggaaggc

SEQ ID NO: 4769360 - DNA, 25 bp, Homo sapien
gagctgagggcctaaaggaggctgc

SEQ ID NO: 4769361 - DNA, 25 bp, Homo sapien
atcacagcaggagtcgtgtccatag

SEQ ID NO: 4769362 - DNA, 25 bp, Homo sapien
gcaggagtcgtgtccatagcaaaga

SEQ ID NO: 4769363 - DNA, 25 bp, Homo sapien
tgagggcctaaaggaggctgcaagg

SEQ ID NO: 4769364 - DNA, 25 bp, Homo sapien
tgacctcccagacgtggctgctgct

SEQ ID NO: 4769365 - DNA, 25 bp, Homo sapien
aggcactcctgacctcccagacgtg

SEQ ID NO: 4769366 - DNA, 25 bp, Homo sapien
acttctcagatggtggggcagctgg

SEQ ID NO: 4769367 - DNA, 25 bp, Homo sapien
acagaggggcggtggcagggcagag

SEQ ID NO: 4769368 - DNA, 25 bp, Homo sapien
gataggcagggaagcttagcgggtg

SEQ ID NO: 4769369 - DNA, 25 bp, Homo sapien
cctgtgggacctgtagccggtagct

SEQ ID NO: 4769370 - DNA, 25 bp, Homo sapien
tttctcccctcaagcagctgttttc

SEQ ID NO: 4769371 - DNA, 25 bp, Homo sapien
ccatgttcttatccatgttgccttg

SEQ ID NO: 4769372 - DNA, 25 bp, Homo sapien
tctttgacctccgttgcttctttgg

SEQ ID NO: 4769373 - DNA, 25 bp, Homo sapien
ttcccaaagagaagaatgcctccag

SEQ ID NO: 4769374 - DNA, 25 bp, Homo sapien
gtcaggcttcccaaagagaagaatg

SEQ ID NO: 4769375 - DNA, 25 bp, Homo sapien
accatcagcaaacctggagagctgg

SEQ ID NO: 4769376 - DNA, 25 bp, Homo sapien
gaacacagaaggcaggaccctcagt

SEQ ID NO: 4769377 - DNA, 25 bp, Homo sapien
agggggggctccagaacacagaagg

SEQ ID NO: 4769378 - DNA, 25 bp, Homo sapien
atgaaggaagtctgaggttaaactt

SEQ ID NO: 4769379 - DNA, 25 bp, Homo sapien
tctaatgaaggaagtctgaggttaa

SEQ ID NO: 4769380 - DNA, 25 bp, Homo sapien
ggttgaagaggaatcggtaacagcc

SEQ ID NO: 4769381 - DNA, 25 bp, Homo sapien
tcctaggggcgccataccgcctggc

SEQ ID NO: 4769382 - DNA, 25 bp, Homo sapien
ttgaagaggaatcggtaacagccca

SEQ ID NO: 4769383 - DNA, 25 bp, Homo sapien
agaggaatcggtaacagcccaaggt

SEQ ID NO: 4769384 - DNA, 25 bp, Homo sapien
agacgagcaggttgctgatggtatg

SEQ ID NO: 4769385 - DNA, 25 bp, Homo sapien
aggttgctgatggtatggcggggac

SEQ ID NO: 4769386 - DNA, 25 bp, Homo sapien
agcaggttgctgatggtatggcggg

SEQ ID NO: 4769387 - DNA, 25 bp, Homo sapien
cgagcaggttgctgatggtatggcg

SEQ ID NO: 4769388 - DNA, 25 bp, Homo sapien
ttagaagagaatgtcgccgatggtg

SEQ ID NO: 4769389 - DNA, 25 bp, Homo sapien
caaaatacgcttagaagagcacgtt

SEQ ID NO: 4769390 - DNA, 25 bp, Homo sapien
ttgccaatcgcgtggccggaacctg

SEQ ID NO: 4769391 - DNA, 25 bp, Homo sapien
ttagaagagtaagtcgccgatggca

SEQ ID NO: 4769392 - DNA, 25 bp, Homo sapien
ctctccagtgcctctatgccacctg

SEQ ID NO: 4769393 - DNA, 25 bp, Homo sapien
tgcctctatgccacctggagccagg

SEQ ID NO: 4769394 - DNA, 25 bp, Homo sapien
tccagtgcctctatgccacctggag

SEQ ID NO: 4769395 - DNA, 25 bp, Homo sapien
cagtgcctctatgccacctggagcc

SEQ ID NO: 4769396 - DNA, 25 bp, Homo sapien
tgtcggccgacaaaaggatttatgc

SEQ ID NO: 4769397 - DNA, 25 bp, Homo sapien
tctgctagctttagatgagagcctt

SEQ ID NO: 4769398 - DNA, 25 bp, Homo sapien
gtcaggtgtctcctagagcttctca

SEQ ID NO: 4769399 - DNA, 25 bp, Homo sapien
tttactcgcccaagtgtttgagcca

SEQ ID NO: 4769400 - DNA, 25 bp, Homo sapien
gagtgtgccctctacaactccaggg

SEQ ID NO: 4769401 - DNA, 25 bp, Homo sapien
ctaagtgccgtgtcctctcagagct

SEQ ID NO: 4769402 - DNA, 25 bp, Homo sapien
aacatggtccccacacgcttgtgag

SEQ ID NO: 4769403 - DNA, 25 bp, Homo sapien
gaatttctcagacctaagactcgcc

SEQ ID NO: 4769404 - DNA, 25 bp, Homo sapien
ccatgatggtgttgttctggtggtc

SEQ ID NO: 4769405 - DNA, 25 bp, Homo sapien
gatgcaggcatcaagcagggcggtt

SEQ ID NO: 4769406 - DNA, 25 bp, Homo sapien
caggcatcaagcagggcggttgtct

SEQ ID NO: 4769407 - DNA, 25 bp, Homo sapien
tcagatgcaggcatcaagcagggcg

SEQ ID NO: 4769408 - DNA, 25 bp, Homo sapien
attagagaatccacaggtgctcccc

SEQ ID NO: 4769409 - DNA, 25 bp, Homo sapien
agggccaggattagagaatccacag

SEQ ID NO: 4769410 - DNA, 25 bp, Homo sapien
ctctgccctccccaccgagtgtggt

SEQ ID NO: 4769411 - DNA, 25 bp, Homo sapien
tctgccctccccaccgagtgtggtc

SEQ ID NO: 4769412 - DNA, 25 bp, Homo sapien
ggttccaactctgcttctaagaaaa

SEQ ID NO: 4769413 - DNA, 25 bp, Homo sapien
cagtggttccaactctgcttctaag

SEQ ID NO: 4769414 - DNA, 25 bp, Homo sapien
gtggttccaactctgcttctaagaa

SEQ ID NO: 4769415 - DNA, 25 bp, Homo sapien
ctaagaaaaattactcattctaggg

SEQ ID NO: 4769416 - DNA, 25 bp, Homo sapien
aagcagatgggagcaagtgcccaac

SEQ ID NO: 4769417 - DNA, 25 bp, Homo sapien
gaaagcagatgggagcaagtgccca

SEQ ID NO: 4769418 - DNA, 25 bp, Homo sapien
gcagatgggagcaagtgcccaacac

SEQ ID NO: 4769419 - DNA, 25 bp, Homo sapien
agaaagcagatgggagcaagtgccc

SEQ ID NO: 4769420 - DNA, 25 bp, Homo sapien
tcctttcaacgtgctggctgacagt

SEQ ID NO: 4769421 - DNA, 25 bp, Homo sapien
atcctttcaacgtgctggctgacag

SEQ ID NO: 4769422 - DNA, 25 bp, Homo sapien
aatcctttcaacgtgctggctgaca

SEQ ID NO: 4769423 - DNA, 25 bp, Homo sapien
caaaggtatatcgagggatgctgag

SEQ ID NO: 4769424 - DNA, 25 bp, Homo sapien
tgaaaacgagacacttggtttctct

SEQ ID NO: 4769425 - DNA, 25 bp, Homo sapien
cacatatgagtgaaaacgagacact

SEQ ID NO: 4769426 - DNA, 25 bp, Homo sapien
tgttcctatgtttatgccaatgtgc

SEQ ID NO: 4769427 - DNA, 25 bp, Homo sapien
agccaccagaaggcagaaggaggcc

SEQ ID NO: 4769428 - DNA, 25 bp, Homo sapien
ccaccagaaggcagaaggaggccat

SEQ ID NO: 4769429 - DNA, 25 bp, Homo sapien
gccaccagaaggcagaaggaggcca

SEQ ID NO: 4769430 - DNA, 25 bp, Homo sapien
tccagcctccatcaggcggaaggtg

SEQ ID NO: 4769431 - DNA, 25 bp, Homo sapien
tccagttctgtaagccgggcacaga

SEQ ID NO: 4769432 - DNA, 25 bp, Homo sapien
ctccatcaggcggaaggtggctacc

SEQ ID NO: 4769433 - DNA, 25 bp, Homo sapien
tcaggcggaaggtggctaccccttc

SEQ ID NO: 4769434 - DNA, 25 bp, Homo sapien
agtggcgccgcagctttcagctctg

SEQ ID NO: 4769435 - DNA, 25 bp, Homo sapien
ccagattcagcttgtctcataaaaa

SEQ ID NO: 4769436 - DNA, 25 bp, Homo sapien
tttaatcctgaacattcttgaagca

SEQ ID NO: 4769437 - DNA, 25 bp, Homo sapien
caacttcaagtagcacaatttcttg

SEQ ID NO: 4769438 - DNA, 25 bp, Homo sapien
tgctgagagtcttctcgcggttgcc

SEQ ID NO: 4769439 - DNA, 25 bp, Homo sapien
ctgggctgcggagatcaggccctgt

SEQ ID NO: 4769440 - DNA, 25 bp, Homo sapien
tgggctgcggagatcaggccctgtc

SEQ ID NO: 4769441 - DNA, 25 bp, Homo sapien
ctgcggagatcaggccctgtctgaa

SEQ ID NO: 4769442 - DNA, 25 bp, Homo sapien
ggctgcggagatcaggccctgtctg

SEQ ID NO: 4769443 - DNA, 25 bp, Homo sapien
ttgaactcgctgaagcgggcctcgt

SEQ ID NO: 4769444 - DNA, 25 bp, Homo sapien
tcttgaactcgctgaagcgggcctc

SEQ ID NO: 4769445 - DNA, 25 bp, Homo sapien
ctcttgaactcgctgaagcgggcct

SEQ ID NO: 4769446 - DNA, 25 bp, Homo sapien
gaactcgctgaagcgggcctcgtcg

SEQ ID NO: 4769447 - DNA, 25 bp, Homo sapien
gacccaagaaagcagtagaagtggc

SEQ ID NO: 4769448 - DNA, 25 bp, Homo sapien
cccaagaaagcagtagaagtggcta

SEQ ID NO: 4769449 - DNA, 25 bp, Homo sapien
tgacccaagaaagcagtagaagtgg

SEQ ID NO: 4769450 - DNA, 25 bp, Homo sapien
tgtgacccaagaaagcagtagaagt

SEQ ID NO: 4769451 - DNA, 25 bp, Homo sapien
tttagggcaagatagcttatcacag

SEQ ID NO: 4769452 - DNA, 25 bp, Homo sapien
ttaagtgttttagggcaagatagct

SEQ ID NO: 4769453 - DNA, 25 bp, Homo sapien
gttttagggcaagatagcttatcac

SEQ ID NO: 4769454 - DNA, 25 bp, Homo sapien
agtgttttagggcaagatagcttat

SEQ ID NO: 4769455 - DNA, 25 bp, Homo sapien
ttccagggtgtctgatgcttcttgc

SEQ ID NO: 4769456 - DNA, 25 bp, Homo sapien
ctgttccagggtgtctgatgcttct

SEQ ID NO: 4769457 - DNA, 25 bp, Homo sapien
ggtgtctgatgcttcttgcagacaa

SEQ ID NO: 4769458 - DNA, 25 bp, Homo sapien
gggtgtctgatgcttcttgcagaca

SEQ ID NO: 4769459 - DNA, 25 bp, Homo sapien
tttcatgagttttggggaccgtgac

SEQ ID NO: 4769460 - DNA, 25 bp, Homo sapien
tccttgctttgagtaaggccacatt

SEQ ID NO: 4769461 - DNA, 25 bp, Homo sapien
tgctttgagtaaggccacatttcat

SEQ ID NO: 4769462 - DNA, 25 bp, Homo sapien
agcctccttgctttgagtaaggcca

SEQ ID NO: 4769463 - DNA, 25 bp, Homo sapien
ttccagaacatgcaggtcagtgaaa

SEQ ID NO: 4769464 - DNA, 25 bp, Homo sapien
tccttccagaacatgcaggtcagtg

SEQ ID NO: 4769465 - DNA, 25 bp, Homo sapien
ccttccagaacatgcaggtcagtga

SEQ ID NO: 4769466 - DNA, 25 bp, Homo sapien
cttccagaacatgcaggtcagtgaa

SEQ ID NO: 4769467 - DNA, 25 bp, Homo sapien
tgtcttcggctcttcctgtggatct

SEQ ID NO: 4769468 - DNA, 25 bp, Homo sapien
gggaggtgtcttcggctcttcctgt

SEQ ID NO: 4769469 - DNA, 25 bp, Homo sapien
aggggaggtgtcttcggctcttcct

SEQ ID NO: 4769470 - DNA, 25 bp, Homo sapien
aggtgtcttcggctcttcctgtgga

SEQ ID NO: 4769471 - DNA, 25 bp, Homo sapien
gccagtctgtccatggtccgggagg

SEQ ID NO: 4769472 - DNA, 25 bp, Homo sapien
tctgtccatggtccgggaggtagcc

SEQ ID NO: 4769473 - DNA, 25 bp, Homo sapien
aggggttgatgatgggccccagtgg

SEQ ID NO: 4769474 - DNA, 25 bp, Homo sapien
cagtctgtccatggtccgggaggta

SEQ ID NO: 4769475 - DNA, 25 bp, Homo sapien
aataagctgagtaagctttctcctg

SEQ ID NO: 4769476 - DNA, 25 bp, Homo sapien
gactggtagaatttagtagtgaagc

SEQ ID NO: 4769477 - DNA, 25 bp, Homo sapien
gactactgctggtgtcacaaaataa

SEQ ID NO: 4769478 - DNA, 25 bp, Homo sapien
tattctctggaatcgtgacactgtc

SEQ ID NO: 4769479 - DNA, 25 bp, Homo sapien
acccggcctctgttatttgatatca

SEQ ID NO: 4769480 - DNA, 25 bp, Homo sapien
gcacccggcctctgttatttgatat

SEQ ID NO: 4769481 - DNA, 25 bp, Homo sapien
tgcacccggcctctgttatttgata

SEQ ID NO: 4769482 - DNA, 25 bp, Homo sapien
actgcacccggcctctgttatttga

SEQ ID NO: 4769483 - DNA, 25 bp, Homo sapien
tatctgataccgtaagtccttccat

SEQ ID NO: 4769484 - DNA, 25 bp, Homo sapien
tggtatctgataccgtaagtccttc

SEQ ID NO: 4769485 - DNA, 25 bp, Homo sapien
aaatattggtatctgataccgtaag

SEQ ID NO: 4769486 - DNA, 25 bp, Homo sapien
ccttgaaccacaatcatactcttta

SEQ ID NO: 4769487 - DNA, 25 bp, Homo sapien
gaccccaaaaacgagagccatgaga

SEQ ID NO: 4769488 - DNA, 25 bp, Homo sapien
tctggctcacgctcatcctgaggga

SEQ ID NO: 4769489 - DNA, 25 bp, Homo sapien
tgtgaagtacacaggagtccctcag

SEQ ID NO: 4769490 - DNA, 25 bp, Homo sapien
caaaagtggctatgcctggtgctac

SEQ ID NO: 4769491 - DNA, 25 bp, Homo sapien
ggcatcgtcattctgcatatgcagg

SEQ ID NO: 4769492 - DNA, 25 bp, Homo sapien
ctgtcctgatgggtacgtcagtagc

SEQ ID NO: 4769493 - DNA, 25 bp, Homo sapien
tctgcatatgcaggccttgactggc

SEQ ID NO: 4769494 - DNA, 25 bp, Homo sapien
gggtacgtcagtagcacacagaagg

SEQ ID NO: 4769495 - DNA, 25 bp, Homo sapien
ggctgggaacatgacctctgcctcg

SEQ ID NO: 4769496 - DNA, 25 bp, Homo sapien
gctcgactggatgttctcatactct

SEQ ID NO: 4769497 - DNA, 25 bp, Homo sapien
tgggaacatgacctctgcctcgaga

SEQ ID NO: 4769498 - DNA, 25 bp, Homo sapien
ctcctctgctcgactggatgttctc

SEQ ID NO: 4769499 - DNA, 25 bp, Homo sapien
gcagaggaacaggtggactgagtgg

SEQ ID NO: 4769500 - DNA, 25 bp, Homo sapien
ttcaacagcgactcctcaagaggcc

SEQ ID NO: 4769501 - DNA, 25 bp, Homo sapien
tccacgtggaagtcatggatgtggg

SEQ ID NO: 4769502 - DNA, 25 bp, Homo sapien
ccctccaggatgaagggccgaatca

SEQ ID NO: 4769503 - DNA, 25 bp, Homo sapien
tcagctctgggttcaacagcgactc

SEQ ID NO: 4769504 - DNA, 25 bp, Homo sapien
acgctgaggaatcggcagctcagat

SEQ ID NO: 4769505 - DNA, 25 bp, Homo sapien
tgaggaatcggcagctcagatggat

SEQ ID NO: 4769506 - DNA, 25 bp, Homo sapien
ctagacgctgaggaatcggcagctc

SEQ ID NO: 4769507 - DNA, 25 bp, Homo sapien
tagacgctgaggaatcggcagctca

SEQ ID NO: 4769508 - DNA, 25 bp, Homo sapien
tgtgaagaagtactgatggaggaga

SEQ ID NO: 4769509 - DNA, 25 bp, Homo sapien
gtgaagaagtactgatggaggagag

SEQ ID NO: 4769510 - DNA, 25 bp, Homo sapien
tgaagaagtactgatggaggagagc

SEQ ID NO: 4769511 - DNA, 25 bp, Homo sapien
ctgtgaagaagtactgatggaggag

SEQ ID NO: 4769512 - DNA, 25 bp, Homo sapien
catgctcctgtggtcatcgtcctcc

SEQ ID NO: 4769513 - DNA, 25 bp, Homo sapien
gacaccctgacacctgtcagcccat

SEQ ID NO: 4769514 - DNA, 25 bp, Homo sapien
tgtggtcatcgtcctcccaggccta

SEQ ID NO: 4769515 - DNA, 25 bp, Homo sapien
ctgagagacaccctgacacctgtca

SEQ ID NO: 4769516 - DNA, 25 bp, Homo sapien
tcctgggtcctctcttccaggcctc

SEQ ID NO: 4769517 - DNA, 25 bp, Homo sapien
cagccataaccagccttcctgggtc

SEQ ID NO: 4769518 - DNA, 25 bp, Homo sapien
ttcctgggtcctctcttccaggcct

SEQ ID NO: 4769519 - DNA, 25 bp, Homo sapien
gccttcctgggtcctctcttccagg

SEQ ID NO: 4769520 - DNA, 25 bp, Homo sapien
agctttgcttgaccccaaagtcggc

SEQ ID NO: 4769521 - DNA, 25 bp, Homo sapien
tctctcttcagcgaacacctcctca

SEQ ID NO: 4769522 - DNA, 25 bp, Homo sapien
ggaagctttgcttgaccccaaagtc

SEQ ID NO: 4769523 - DNA, 25 bp, Homo sapien
ttgcttgaccccaaagtcggccttg

SEQ ID NO: 4769524 - DNA, 25 bp, Homo sapien
ttttggacctggagctacctcacca

SEQ ID NO: 4769525 - DNA, 25 bp, Homo sapien
ctggagaacatgacctcttgtgacc

SEQ ID NO: 4769526 - DNA, 25 bp, Homo sapien
ccccgcggaggtaggactgattgtt

SEQ ID NO: 4769527 - DNA, 25 bp, Homo sapien
gggcccaggacaatccctgcatgtg

SEQ ID NO: 4769528 - DNA, 25 bp, Homo sapien
tgggcatgcccctcgtatgggccac

SEQ ID NO: 4769529 - DNA, 25 bp, Homo sapien
ccggacacgcgctctcctgagagtt

SEQ ID NO: 4769530 - DNA, 25 bp, Homo sapien
gaaacctgcactcccggacacgcgc

SEQ ID NO: 4769531 - DNA, 25 bp, Homo sapien
ctgagagttgggcatgcccctcgta

SEQ ID NO: 4769532 - DNA, 25 bp, Homo sapien
ttctgagggtcgctgatgtgatggg

SEQ ID NO: 4769533 - DNA, 25 bp, Homo sapien
ggtgctggtccatgccaatcacagg

SEQ ID NO: 4769534 - DNA, 25 bp, Homo sapien
tctactcatgagaggcacacctgct

SEQ ID NO: 4769535 - DNA, 25 bp, Homo sapien
tccatgccaatcacaggttctgagg

SEQ ID NO: 4769536 - DNA, 25 bp, Homo sapien
taaaggagatcttgttgtagtccgg

SEQ ID NO: 4769537 - DNA, 25 bp, Homo sapien
catgggcacctgctccttaaaggag

SEQ ID NO: 4769538 - DNA, 25 bp, Homo sapien
ctgcgatgcgctggtgaggagggta

SEQ ID NO: 4769539 - DNA, 25 bp, Homo sapien
tagagaaggaattgacccagcagat

SEQ ID NO: 4769540 - DNA, 25 bp, Homo sapien
caacccaaatgacagcaggaaggag

SEQ ID NO: 4769541 - DNA, 25 bp, Homo sapien
gggacaaaggacaggatctacccca

SEQ ID NO: 4769542 - DNA, 25 bp, Homo sapien
ggagtggagtaaacctgccccacac

SEQ ID NO: 4769543 - DNA, 25 bp, Homo sapien
tacaatgagagtagttcccgaccct

SEQ ID NO: 4769544 - DNA, 25 bp, Homo sapien
gggtgcccaagatgcgaagcacata

SEQ ID NO: 4769545 - DNA, 25 bp, Homo sapien
aaagctgttcaatatcgttcttgcc

SEQ ID NO: 4769546 - DNA, 25 bp, Homo sapien
caatatcgttcttgcccgggaaaag

SEQ ID NO: 4769547 - DNA, 25 bp, Homo sapien
tgcgaagcacatagcaaagctgttc

SEQ ID NO: 4769548 - DNA, 25 bp, Homo sapien
tcttgctgcaaaacaagctcagagc

SEQ ID NO: 4769549 - DNA, 25 bp, Homo sapien
gaaaacatcatagtgaggaacccca

SEQ ID NO: 4769550 - DNA, 25 bp, Homo sapien
catgagccatgttaccctttgacca

SEQ ID NO: 4769551 - DNA, 25 bp, Homo sapien
gatctaactccagcacatatcggct

SEQ ID NO: 4769552 - DNA, 25 bp, Homo sapien
gacgccctggtcatactggcgggca

SEQ ID NO: 4769553 - DNA, 25 bp, Homo sapien
cagatcgacgccctggtcatactgg

SEQ ID NO: 4769554 - DNA, 25 bp, Homo sapien
cctggtcatactggcgggcaccata

SEQ ID NO: 4769555 - DNA, 25 bp, Homo sapien
ctggcgggcaccatacaggagctcg

SEQ ID NO: 4769556 - DNA, 25 bp, Homo sapien
cagccccacaagcaatgtctggaga

SEQ ID NO: 4769557 - DNA, 25 bp, Homo sapien
agccccacaagcaatgtctggagaa

SEQ ID NO: 4769558 - DNA, 25 bp, Homo sapien
ccagccccacaagcaatgtctggag

SEQ ID NO: 4769559 - DNA, 25 bp, Homo sapien
ggccaaagtccgctatcttgagctg

SEQ ID NO: 4769560 - DNA, 25 bp, Homo sapien
ccgtctggggaaaagactcgagcca

SEQ ID NO: 4769561 - DNA, 25 bp, Homo sapien
cctggtgtgtgtagaggcggctgcc

SEQ ID NO: 4769562 - DNA, 25 bp, Homo sapien
gctatcttgagctggcctgaggcgc

SEQ ID NO: 4769563 - DNA, 25 bp, Homo sapien
ctagtggcctctgggcatggcgcac

SEQ ID NO: 4769564 - DNA, 25 bp, Homo sapien
gccagatccgacagcatgaactcaa

SEQ ID NO: 4769565 - DNA, 25 bp, Homo sapien
gcaggtagctcttgacctgtgcctg

SEQ ID NO: 4769566 - DNA, 25 bp, Homo sapien
tggcagaaggcgacacccttgagca

SEQ ID NO: 4769567 - DNA, 25 bp, Homo sapien
cctgcagagccttaatctcccgcag

SEQ ID NO: 4769568 - DNA, 25 bp, Homo sapien
agagccttaatctcccgcagggcct

SEQ ID NO: 4769569 - DNA, 25 bp, Homo sapien
tgcagagccttaatctcccgcaggg

SEQ ID NO: 4769570 - DNA, 25 bp, Homo sapien
accgccttagggccaccttcttgag

SEQ ID NO: 4769571 - DNA, 25 bp, Homo sapien
caggatagaaggcagacactgccag

SEQ ID NO: 4769572 - DNA, 25 bp, Homo sapien
ctgcaggatagaaggcagacactgc

SEQ ID NO: 4769573 - DNA, 25 bp, Homo sapien
tgcaggatagaaggcagacactgcc

SEQ ID NO: 4769574 - DNA, 25 bp, Homo sapien
ggatagaaggcagacactgccagcc

SEQ ID NO: 4769575 - DNA, 25 bp, Homo sapien
cttggccttgaagacgatgccgtgg

SEQ ID NO: 4769576 - DNA, 25 bp, Homo sapien
ccccgatgcggcccaggatgcagta

SEQ ID NO: 4769577 - DNA, 25 bp, Homo sapien
cgtgggcgccctccccgatgcggcc

SEQ ID NO: 4769578 - DNA, 25 bp, Homo sapien
cacgtgcttggccttgaagacgatg

SEQ ID NO: 4769579 - DNA, 25 bp, Homo sapien
ccctgtgcccctgaacttccaaact

SEQ ID NO: 4769580 - DNA, 25 bp, Homo sapien
tccaccccacgctgatctgagctcg

SEQ ID NO: 4769581 - DNA, 25 bp, Homo sapien
ccccacgctgatctgagctcgcacg

SEQ ID NO: 4769582 - DNA, 25 bp, Homo sapien
gctgcagtcgtgggcctgtgcccct

SEQ ID NO: 4769583 - DNA, 25 bp, Homo sapien
cctagcaacagcgcggcagctgacc

SEQ ID NO: 4769584 - DNA, 25 bp, Homo sapien
ctgttgcctagcaacagcgcggcag

SEQ ID NO: 4769585 - DNA, 25 bp, Homo sapien
cggcagctgaccactggggcggttc

SEQ ID NO: 4769586 - DNA, 25 bp, Homo sapien
gcctagcaacagcgcggcagctgac

SEQ ID NO: 4769587 - DNA, 25 bp, Homo sapien
gacgtcaccaggagaacggaagctg

SEQ ID NO: 4769588 - DNA, 25 bp, Homo sapien
tccgctgtcacgcagcagcaagctt

SEQ ID NO: 4769589 - DNA, 25 bp, Homo sapien
taaaaaacgcatgcgccgagagcgt

SEQ ID NO: 4769590 - DNA, 25 bp, Homo sapien
gcttaatcccgcataaaaaacgcat

SEQ ID NO: 4769591 - DNA, 25 bp, Homo sapien
gaactcaaacatcttaacaacaaca

SEQ ID NO: 4769592 - DNA, 25 bp, Homo sapien
caaataaccccactaaaagcagtca

SEQ ID NO: 4769593 - DNA, 25 bp, Homo sapien
catgaacagacatttgacaaacaaa

SEQ ID NO: 4769594 - DNA, 25 bp, Homo sapien
cactaaaagcagtcaaagaacatga

SEQ ID NO: 4769595 - DNA, 25 bp, Homo sapien
aatgttggcgaggatacagagaaaa

SEQ ID NO: 4769596 - DNA, 25 bp, Homo sapien
aaaatgttggcgaggatacagagaa

SEQ ID NO: 4769597 - DNA, 25 bp, Homo sapien
aaaaaatgttggcgaggatacagag

SEQ ID NO: 4769598 - DNA, 25 bp, Homo sapien
aaaaaaaatgttggcgaggatacag

SEQ ID NO: 4769599 - DNA, 25 bp, Homo sapien
atcttctctgtatcgttccagtttt

SEQ ID NO: 4769600 - DNA, 25 bp, Homo sapien
atggaacacgtcatgaatttgtgtg

SEQ ID NO: 4769601 - DNA, 25 bp, Homo sapien
tcatccttgtgcaggggccatgcta

SEQ ID NO: 4769602 - DNA, 25 bp, Homo sapien
agtatatgtgctgcagaagcaagca

SEQ ID NO: 4769603 - DNA, 25 bp, Homo sapien
gcactagcgccgcttccagggtcat

SEQ ID NO: 4769604 - DNA, 25 bp, Homo sapien
actcaggctcagaagaagcagcgct

SEQ ID NO: 4769605 - DNA, 25 bp, Homo sapien
actgcaaagagggtcccagactcag

SEQ ID NO: 4769606 - DNA, 25 bp, Homo sapien
atgaaaaaggccgtgatgggaccag

SEQ ID NO: 4769607 - DNA, 25 bp, Homo sapien
gtgggcaatccgcagtgcaaggcca

SEQ ID NO: 4769608 - DNA, 25 bp, Homo sapien
aattcacaggagcagttggtgcttc

SEQ ID NO: 4769609 - DNA, 25 bp, Homo sapien
tattctaaagaagtgagcagggaga

SEQ ID NO: 4769610 - DNA, 25 bp, Homo sapien
gaaagtggagaaacgcatgtttcca

SEQ ID NO: 4769611 - DNA, 25 bp, Homo sapien
gggtgagccagcattacctgtcaga

SEQ ID NO: 4769612 - DNA, 25 bp, Homo sapien
gagctcgtctgtggcctattaggaa

SEQ ID NO: 4769613 - DNA, 25 bp, Homo sapien
tccaactcccggaccatggactgga

SEQ ID NO: 4769614 - DNA, 25 bp, Homo sapien
gagccagcattacctgtcagatcag

SEQ ID NO: 4769615 - DNA, 25 bp, Homo sapien
tctccacagggtatgacaagacatg

SEQ ID NO: 4769616 - DNA, 25 bp, Homo sapien
tacagcccatgcttggtcgacggga

SEQ ID NO: 4769617 - DNA, 25 bp, Homo sapien
tattgccccaagctgtagaatcctg

SEQ ID NO: 4769618 - DNA, 25 bp, Homo sapien
gataacggcccatgactccggaggt

SEQ ID NO: 4769619 - DNA, 25 bp, Homo sapien
tcaccatatcagccaggctggtctc

SEQ ID NO: 4769620 - DNA, 25 bp, Homo sapien
caccatatcagccaggctggtctcg

SEQ ID NO: 4769621 - DNA, 25 bp, Homo sapien
tggaattacaggcgcccagctaatt

SEQ ID NO: 4769622 - DNA, 25 bp, Homo sapien
ggaattacaggcgcccagctaattt

SEQ ID NO: 4769623 - DNA, 25 bp, Homo sapien
tgggtttattcgttgcaccaggtgg

SEQ ID NO: 4769624 - DNA, 25 bp, Homo sapien
cagagttacttggtcgccacggtgt

SEQ ID NO: 4769625 - DNA, 25 bp, Homo sapien
ggtgggtcctgattcttcaccctga

SEQ ID NO: 4769626 - DNA, 25 bp, Homo sapien
ttctcctcgcgatgctgagagtctg

SEQ ID NO: 4769627 - DNA, 25 bp, Homo sapien
gtctgataagagacagttaccatct

SEQ ID NO: 4769628 - DNA, 25 bp, Homo sapien
aacgcccagcacaaagccatttctt

SEQ ID NO: 4769629 - DNA, 25 bp, Homo sapien
tggaggctccatctacataacaagt

SEQ ID NO: 4769630 - DNA, 25 bp, Homo sapien
tacataacaagtacctcagcttcca

SEQ ID NO: 4769631 - DNA, 25 bp, Homo sapien
gttgcatggatattgcagtgagtcc

SEQ ID NO: 4769632 - DNA, 25 bp, Homo sapien
tattgcagtgagtccataccgcacc

SEQ ID NO: 4769633 - DNA, 25 bp, Homo sapien
catggatattgcagtgagtccatac

SEQ ID NO: 4769634 - DNA, 25 bp, Homo sapien
gagctgaggttgcatggatattgca

SEQ ID NO: 4769635 - DNA, 25 bp, Homo sapien
gcatgttaccctgacgatctctgaa

SEQ ID NO: 4769636 - DNA, 25 bp, Homo sapien
tgtctagggaatcaactgcaaagtc

SEQ ID NO: 4769637 - DNA, 25 bp, Homo sapien
aatcctggaataggccagcctgggc

SEQ ID NO: 4769638 - DNA, 25 bp, Homo sapien
tctttgattagactcagatcttcac

SEQ ID NO: 4769639 - DNA, 25 bp, Homo sapien
ccaagtatatcgcaatacacgtata

SEQ ID NO: 4769640 - DNA, 25 bp, Homo sapien
gtatatcgcaatacacgtataataa

SEQ ID NO: 4769641 - DNA, 25 bp, Homo sapien
caagtatatcgcaatacacgtataa

SEQ ID NO: 4769642 - DNA, 25 bp, Homo sapien
tatcgcaatacacgtataataagca

SEQ ID NO: 4769643 - DNA, 25 bp, Homo sapien
ctcatgggtctttggtgcggtctgg

SEQ ID NO: 4769644 - DNA, 25 bp, Homo sapien
ttcagtaagtaacacataggaatag

SEQ ID NO: 4769645 - DNA, 25 bp, Homo sapien
taagtaacacataggaatagtttga

SEQ ID NO: 4769646 - DNA, 25 bp, Homo sapien
catgggtctttggtgcggtctggga

SEQ ID NO: 4769647 - DNA, 25 bp, Homo sapien
ggatgcaactttactcattaccatt

SEQ ID NO: 4769648 - DNA, 25 bp, Homo sapien
agcagctcagtcatcggtgcttgtg

SEQ ID NO: 4769649 - DNA, 25 bp, Homo sapien
gctgaattcagcagatcggcccatg

SEQ ID NO: 4769650 - DNA, 25 bp, Homo sapien
gccacccgtagttctgagcttgaag

SEQ ID NO: 4769651 - DNA, 25 bp, Homo sapien
cctgggcttgacaccaaggaagagg

SEQ ID NO: 4769652 - DNA, 25 bp, Homo sapien
agaggacaggtagtggaaatcctgc

SEQ ID NO: 4769653 - DNA, 25 bp, Homo sapien
gcttgacaccaaggaagaggacagg

SEQ ID NO: 4769654 - DNA, 25 bp, Homo sapien
tctgtcagaaagcaacacctattgt

SEQ ID NO: 4769655 - DNA, 25 bp, Homo sapien
acctaggaggtggacattccagtga

SEQ ID NO: 4769656 - DNA, 25 bp, Homo sapien
aacctaggaggtggacattccagtg

SEQ ID NO: 4769657 - DNA, 25 bp, Homo sapien
ctattcttatggtgatttggcctca

SEQ ID NO: 4769658 - DNA, 25 bp, Homo sapien
gatttggcctcattgtttctgcaaa

SEQ ID NO: 4769659 - DNA, 25 bp, Homo sapien
gacacttactttggggagttgtata

SEQ ID NO: 4769660 - DNA, 25 bp, Homo sapien
catgccccgcctgcacaagctattc

SEQ ID NO: 4769661 - DNA, 25 bp, Homo sapien
acaggctttagaggaagcatgatgc

SEQ ID NO: 4769662 - DNA, 25 bp, Homo sapien
tggttccacaggctttagaggaagc

SEQ ID NO: 4769663 - DNA, 25 bp, Homo sapien
gctcatggttccacaggctttagag

SEQ ID NO: 4769664 - DNA, 25 bp, Homo sapien
tcatggttccacaggctttagagga

SEQ ID NO: 4769665 - DNA, 25 bp, Homo sapien
taccaagacctttagcagcagattc

SEQ ID NO: 4769666 - DNA, 25 bp, Homo sapien
ctgctcgggtgcaccaacatctcag

SEQ ID NO: 4769667 - DNA, 25 bp, Homo sapien
tataatggacttttgactcagtggc

SEQ ID NO: 4769668 - DNA, 25 bp, Homo sapien
gtttataagcagacagctaagttgt

SEQ ID NO: 4769669 - DNA, 25 bp, Homo sapien
taaaggcaaaatttaggctggcatg

SEQ ID NO: 4769670 - DNA, 25 bp, Homo sapien
cagcgcgacctcttctctataaaaa

SEQ ID NO: 4769671 - DNA, 25 bp, Homo sapien
gaaggtgatagattatttcaacaac

SEQ ID NO: 4769672 - DNA, 25 bp, Homo sapien
actgttatgccaatccaggaattca

SEQ ID NO: 4769673 - DNA, 25 bp, Homo sapien
ccgtatttttgtgagcggagctgct

SEQ ID NO: 4769674 - DNA, 25 bp, Homo sapien
ctaggcagggcccttccagtttctg

SEQ ID NO: 4769675 - DNA, 25 bp, Homo sapien
tctctgcactgacgcgtggagtcgc

SEQ ID NO: 4769676 - DNA, 25 bp, Homo sapien
gctgcttttgtgagcgctgcgtccc

SEQ ID NO: 4769677 - DNA, 25 bp, Homo sapien
ggtcatcagcttaaacctgagcttg

SEQ ID NO: 4769678 - DNA, 25 bp, Homo sapien
tcagcttaaacctgagcttgatgaa

SEQ ID NO: 4769679 - DNA, 25 bp, Homo sapien
ttaggtcatcagcttaaacctgagc

SEQ ID NO: 4769680 - DNA, 25 bp, Homo sapien
aacctgagcttgatgaaagctttct

SEQ ID NO: 4769681 - DNA, 25 bp, Homo sapien
gcatcctggatacacttagatgctg

SEQ ID NO: 4769682 - DNA, 25 bp, Homo sapien
catcctggatacacttagatgctgg

SEQ ID NO: 4769683 - DNA, 25 bp, Homo sapien
tgcatcctggatacacttagatgct

SEQ ID NO: 4769684 - DNA, 25 bp, Homo sapien
tgtcagccagcacgttgaaaggatt

SEQ ID NO: 4769685 - DNA, 25 bp, Homo sapien
tcagccagcacgttgaaaggattct

SEQ ID NO: 4769686 - DNA, 25 bp, Homo sapien
gaactgtcagccagcacgttgaaag

SEQ ID NO: 4769687 - DNA, 25 bp, Homo sapien
cttttgccatcctcatggaactgtc

SEQ ID NO: 4769688 - DNA, 25 bp, Homo sapien
cctgttctgtgttgacagtcatctg

SEQ ID NO: 4769689 - DNA, 25 bp, Homo sapien
gtcatctgattcatcctggtagcaa

SEQ ID NO: 4769690 - DNA, 25 bp, Homo sapien
tctgtgttgacagtcatctgattca

SEQ ID NO: 4769691 - DNA, 25 bp, Homo sapien
tgattcatcctggtagcaattccat

SEQ ID NO: 4769692 - DNA, 25 bp, Homo sapien
gacacccacaggaccaccagaacaa

SEQ ID NO: 4769693 - DNA, 25 bp, Homo sapien
tggacacccacaggaccaccagaac

SEQ ID NO: 4769694 - DNA, 25 bp, Homo sapien
ctcttctggacacccacaggaccac

SEQ ID NO: 4769695 - DNA, 25 bp, Homo sapien
cacaggaccaccagaacaaccccat

SEQ ID NO: 4769696 - DNA, 25 bp, Homo sapien
gagatcttgctcagagattttgaca

SEQ ID NO: 4769697 - DNA, 25 bp, Homo sapien
tgggagatcttgctcagagattttg

SEQ ID NO: 4769698 - DNA, 25 bp, Homo sapien
cctgggagatcttgctcagagattt

SEQ ID NO: 4769699 - DNA, 25 bp, Homo sapien
gatcttgctcagagattttgacagg

SEQ ID NO: 4769700 - DNA, 25 bp, Homo sapien
cctctacatagagtgaattttttct

SEQ ID NO: 4769701 - DNA, 25 bp, Homo sapien
gaccaaattagatacctccctgaaa

SEQ ID NO: 4769702 - DNA, 25 bp, Homo sapien
tctgcgtgtactaacatgagagaaa

SEQ ID NO: 4769703 - DNA, 25 bp, Homo sapien
ggaatattaaatgttctgcgtgtac

SEQ ID NO: 4769704 - DNA, 25 bp, Homo sapien
ttgggacgactctggttcttgagag

SEQ ID NO: 4769705 - DNA, 25 bp, Homo sapien
ctgttgggacgactctggttcttga

SEQ ID NO: 4769706 - DNA, 25 bp, Homo sapien
tgggacgactctggttcttgagagt

SEQ ID NO: 4769707 - DNA, 25 bp, Homo sapien
gttgggacgactctggttcttgaga

SEQ ID NO: 4769708 - DNA, 25 bp, Homo sapien
ctgtccaactgctgtcatgagcctc

SEQ ID NO: 4769709 - DNA, 25 bp, Homo sapien
ctgctgtcatgagcctctcagcttc

SEQ ID NO: 4769710 - DNA, 25 bp, Homo sapien
cttgtgccccatgttactccttctg

SEQ ID NO: 4769711 - DNA, 25 bp, Homo sapien
tgtgccccatgttactccttctggc

SEQ ID NO: 4769712 - DNA, 25 bp, Homo sapien
tggcagaaacttgaggctgggtctc

SEQ ID NO: 4769713 - DNA, 25 bp, Homo sapien
ttccaggctcaaattcactaacagc

SEQ ID NO: 4769714 - DNA, 25 bp, Homo sapien
ggagcacaacagtggcagaaacttg

SEQ ID NO: 4769715 - DNA, 25 bp, Homo sapien
tgggtctctgacttcgtggcctttc

SEQ ID NO: 4769716 - DNA, 25 bp, Homo sapien
ttgctctcatacaggttcccaaggg

SEQ ID NO: 4769717 - DNA, 25 bp, Homo sapien
gcctggagccttgaaaccacgcaca

SEQ ID NO: 4769718 - DNA, 25 bp, Homo sapien
taggagccttcaaggacccatgatc

SEQ ID NO: 4769719 - DNA, 25 bp, Homo sapien
gcgcctggagccttgaaaccacgca

SEQ ID NO: 4769720 - DNA, 25 bp, Homo sapien
cctctctggcatgtgaacagatggt

SEQ ID NO: 4769721 - DNA, 25 bp, Homo sapien
aacagatggtttggtcagcacctgc

SEQ ID NO: 4769722 - DNA, 25 bp, Homo sapien
ggctctccaaggaacgtggccacct

SEQ ID NO: 4769723 - DNA, 25 bp, Homo sapien
gccccagattcgcaggtgtctgagg

SEQ ID NO: 4769724 - DNA, 25 bp, Homo sapien
gacagcaagccaggatcgacgcaca

SEQ ID NO: 4769725 - DNA, 25 bp, Homo sapien
gtgtttggcccaaaacctcacaata

SEQ ID NO: 4769726 - DNA, 25 bp, Homo sapien
cacccagaatttgccccagatgtgg

SEQ ID NO: 4769727 - DNA, 25 bp, Homo sapien
cctgaggggtagaccccacctgtgt

SEQ ID NO: 4769728 - DNA, 25 bp, Homo sapien
tgcatcagatccagagactcttgga

SEQ ID NO: 4769729 - DNA, 25 bp, Homo sapien
ctgcatcagatccagagactcttgg

SEQ ID NO: 4769730 - DNA, 25 bp, Homo sapien
actaaagacgtcctgagatttttgg

SEQ ID NO: 4769731 - DNA, 25 bp, Homo sapien
tggagacactaaagacgtcctgaga

SEQ ID NO: 4769732 - DNA, 25 bp, Homo sapien
gaaggttaggagtggagacactaaa

SEQ ID NO: 4769733 - DNA, 25 bp, Homo sapien
gacactaaagacgtcctgagatttt

SEQ ID NO: 4769734 - DNA, 25 bp, Homo sapien
ctcctgcgaccaggagagggcagaa

SEQ ID NO: 4769735 - DNA, 25 bp, Homo sapien
tggtagtctcctgcgaccaggagag

SEQ ID NO: 4769736 - DNA, 25 bp, Homo sapien
ttttggtagtctcctgcgaccagga

SEQ ID NO: 4769737 - DNA, 25 bp, Homo sapien
caggttttggtagtctcctgcgacc

SEQ ID NO: 4769738 - DNA, 25 bp, Homo sapien
caaagtcacctttttcaaggtgtgg

SEQ ID NO: 4769739 - DNA, 25 bp, Homo sapien
ctggcgggtctggaccagagagctg

SEQ ID NO: 4769740 - DNA, 25 bp, Homo sapien
tggaccagagagctgaccaaagtca

SEQ ID NO: 4769741 - DNA, 25 bp, Homo sapien
ctttttcaaggtgtggccccaggag

SEQ ID NO: 4769742 - DNA, 25 bp, Homo sapien
aggcctctcgggcactctctacaag

SEQ ID NO: 4769743 - DNA, 25 bp, Homo sapien
ttgtgaaagcaggtcccaagtctcc

SEQ ID NO: 4769744 - DNA, 25 bp, Homo sapien
aaagcaggtcccaagtctcctccag

SEQ ID NO: 4769745 - DNA, 25 bp, Homo sapien
ctgcagttgtgaaagcaggtcccaa

SEQ ID NO: 4769746 - DNA, 25 bp, Homo sapien
gaataggcgcattgctttctagcaa

SEQ ID NO: 4769747 - DNA, 25 bp, Homo sapien
taggcgcattgctttctagcaactg

SEQ ID NO: 4769748 - DNA, 25 bp, Homo sapien
gtgaataggcgcattgctttctagc

SEQ ID NO: 4769749 - DNA, 25 bp, Homo sapien
aataggcgcattgctttctagcaac

SEQ ID NO: 4769750 - DNA, 25 bp, Homo sapien
ggatcaacacctgctaatgttggtc

SEQ ID NO: 4769751 - DNA, 25 bp, Homo sapien
gggtggatcaacacctgctaatgtt

SEQ ID NO: 4769752 - DNA, 25 bp, Homo sapien
agttgtatttcgttttcagtactgg

SEQ ID NO: 4769753 - DNA, 25 bp, Homo sapien
tagggatgctgctcagttgtatttc

SEQ ID NO: 4769754 - DNA, 25 bp, Homo sapien
gatgttgaagttgcacgtttcgctt

SEQ ID NO: 4769755 - DNA, 25 bp, Homo sapien
aagttgcacgtttcgcttcaccaga

SEQ ID NO: 4769756 - DNA, 25 bp, Homo sapien
gcacgtttcgcttcaccagattcca

SEQ ID NO: 4769757 - DNA, 25 bp, Homo sapien
ttgaagttgcacgtttcgcttcacc

SEQ ID NO: 4769758 - DNA, 25 bp, Homo sapien
aaaggaatcactttcaacagcttcc

SEQ ID NO: 4769759 - DNA, 25 bp, Homo sapien
cagggtggcgtggtcttcctccttt

SEQ ID NO: 4769760 - DNA, 25 bp, Homo sapien
gaaccagctgtattctggctttggc

SEQ ID NO: 4769761 - DNA, 25 bp, Homo sapien
tttcacttgttctaccagggtggcg

SEQ ID NO: 4769762 - DNA, 25 bp, Homo sapien
cactgctccgactgtgagaacacag

SEQ ID NO: 4769763 - DNA, 25 bp, Homo sapien
gacaaggccttgacctagatcttct

SEQ ID NO: 4769764 - DNA, 25 bp, Homo sapien
tacgttgttctttatcccgagacca

SEQ ID NO: 4769765 - DNA, 25 bp, Homo sapien
tgagagctactccttggttgatgcc

SEQ ID NO: 4769766 - DNA, 25 bp, Homo sapien
ctgctacccaggtatgcctgaaatc

SEQ ID NO: 4769767 - DNA, 25 bp, Homo sapien
tacccaggtatgcctgaaatcataa

SEQ ID NO: 4769768 - DNA, 25 bp, Homo sapien
gctacccaggtatgcctgaaatcat

SEQ ID NO: 4769769 - DNA, 25 bp, Homo sapien
tgctacccaggtatgcctgaaatca

SEQ ID NO: 4769770 - DNA, 25 bp, Homo sapien
gcacttgcgacgagagcattttcct

SEQ ID NO: 4769771 - DNA, 25 bp, Homo sapien
cagcacttgcgacgagagcattttc

SEQ ID NO: 4769772 - DNA, 25 bp, Homo sapien
acttgcgacgagagcattttcctca

SEQ ID NO: 4769773 - DNA, 25 bp, Homo sapien
cacttgcgacgagagcattttcctc

SEQ ID NO: 4769774 - DNA, 25 bp, Homo sapien
ctcctcccgtgatctcccatgccat

SEQ ID NO: 4769775 - DNA, 25 bp, Homo sapien
cagctcctcccgtgatctcccatgc

SEQ ID NO: 4769776 - DNA, 25 bp, Homo sapien
agctcctcccgtgatctcccatgcc

SEQ ID NO: 4769777 - DNA, 25 bp, Homo sapien
gctcctcccgtgatctcccatgcca

SEQ ID NO: 4769778 - DNA, 25 bp, Homo sapien
tctatcctcctcctccccctccacc

SEQ ID NO: 4769779 - DNA, 25 bp, Homo sapien
ccttcctgagatctatcctcctcct

SEQ ID NO: 4769780 - DNA, 25 bp, Homo sapien
tatcctcctcctccccctccaccat

SEQ ID NO: 4769781 - DNA, 25 bp, Homo sapien
ctccttcctgagatctatcctcctc

SEQ ID NO: 4769782 - DNA, 25 bp, Homo sapien
gcgcccagcccggatgtttctttaa

SEQ ID NO: 4769783 - DNA, 25 bp, Homo sapien
aataagggggtggaatgctcattag

SEQ ID NO: 4769784 - DNA, 25 bp, Homo sapien
ctttaataagggggtggaatgctca

SEQ ID NO: 4769785 - DNA, 25 bp, Homo sapien
cgcccagcccggatgtttctttaat

SEQ ID NO: 4769786 - DNA, 25 bp, Homo sapien
acaggaggcatggctataacacagg

SEQ ID NO: 4769787 - DNA, 25 bp, Homo sapien
ctattagcccatactgaaccactgc

SEQ ID NO: 4769788 - DNA, 25 bp, Homo sapien
gagtgctggagtatgttctctaaag

SEQ ID NO: 4769789 - DNA, 25 bp, Homo sapien
gaaatacagggttagcttccacgcc

SEQ ID NO: 4769790 - DNA, 25 bp, Homo sapien
aagacactgtgaacactattagccc

SEQ ID NO: 4769791 - DNA, 25 bp, Homo sapien
ccaagtcctgcacctaaaattgaat

SEQ ID NO: 4769792 - DNA, 25 bp, Homo sapien
tcatagggaactgaggcggatgcct

SEQ ID NO: 4769793 - DNA, 25 bp, Homo sapien
aaaaaaggtgacagccgcagttggt

SEQ ID NO: 4769794 - DNA, 25 bp, Homo sapien
catatgggaacaattggaatagtga

SEQ ID NO: 4769795 - DNA, 25 bp, Homo sapien
taaacaagccgtgaatggtgaggac

SEQ ID NO: 4769796 - DNA, 25 bp, Homo sapien
aataaacaagccgtgaatggtgagg

SEQ ID NO: 4769797 - DNA, 25 bp, Homo sapien
caagccgtgaatggtgaggacagtt

SEQ ID NO: 4769798 - DNA, 25 bp, Homo sapien
gccgtgaatggtgaggacagtttcc

SEQ ID NO: 4769799 - DNA, 25 bp, Homo sapien
tctctctttaggcagggaccaggca

SEQ ID NO: 4769800 - DNA, 25 bp, Homo sapien
tcggggcaaggagagcgaaactctg

SEQ ID NO: 4769801 - DNA, 25 bp, Homo sapien
gtatatggaggttctacgtctctct

SEQ ID NO: 4769802 - DNA, 25 bp, Homo sapien
ggacttcagaaaaaccctcatgagc

SEQ ID NO: 4769803 - DNA, 25 bp, Homo sapien
cagatgtcttttagtaacaacttgt

SEQ ID NO: 4769804 - DNA, 25 bp, Homo sapien
cactggcaagcgaaagtgatagcca

SEQ ID NO: 4769805 - DNA, 25 bp, Homo sapien
cacactattaaagctatgaatatga

SEQ ID NO: 4769806 - DNA, 25 bp, Homo sapien
gaaatgtcgagtagaacacactatt

SEQ ID NO: 4769807 - DNA, 25 bp, Homo sapien
caacagtgatgtccgtagaagtcct

SEQ ID NO: 4769808 - DNA, 25 bp, Homo sapien
gaaacatatacgaattgccagccta

SEQ ID NO: 4769809 - DNA, 25 bp, Homo sapien
tcctgaagctagcaattatctgaag

SEQ ID NO: 4769810 - DNA, 25 bp, Homo sapien
taaccatgagttctttgtgtgatgc

SEQ ID NO: 4769811 - DNA, 25 bp, Homo sapien
caggctaaagagctagggaaagtta

SEQ ID NO: 4769812 - DNA, 25 bp, Homo sapien
tacaggctaaagagctagggaaagt

SEQ ID NO: 4769813 - DNA, 25 bp, Homo sapien
gctaaagagctagggaaagttaggc

SEQ ID NO: 4769814 - DNA, 25 bp, Homo sapien
gagtacaggctaaagagctagggaa

SEQ ID NO: 4769815 - DNA, 25 bp, Homo sapien
ctttacatactttcaatacacgtgg

SEQ ID NO: 4769816 - DNA, 25 bp, Homo sapien
tactttcaatacacgtggagtagga

SEQ ID NO: 4769817 - DNA, 25 bp, Homo sapien
tctttgcacgtgaaaccttgtttgc

SEQ ID NO: 4769818 - DNA, 25 bp, Homo sapien
tggagtaggatgaaactgaataaaa

SEQ ID NO: 4769819 - DNA, 25 bp, Homo sapien
tctggtttgggataaagctcagtct

SEQ ID NO: 4769820 - DNA, 25 bp, Homo sapien
gctgattgtgagatacactccttaa

SEQ ID NO: 4769821 - DNA, 25 bp, Homo sapien
tattggcttagctccgatagtgtgc

SEQ ID NO: 4769822 - DNA, 25 bp, Homo sapien
tcagtctgtcgatttgttcttcccg

SEQ ID NO: 4769823 - DNA, 25 bp, Homo sapien
cacaactttaacctcctccacaaag

SEQ ID NO: 4769824 - DNA, 25 bp, Homo sapien
tgtggtttgtgctgtctagcactaa

SEQ ID NO: 4769825 - DNA, 25 bp, Homo sapien
gtttgtgctgtctagcactaagaac

SEQ ID NO: 4769826 - DNA, 25 bp, Homo sapien
tggtttgtgctgtctagcactaaga

SEQ ID NO: 4769827 - DNA, 25 bp, Homo sapien
tggctctgatgaagcgacatcccag

SEQ ID NO: 4769828 - DNA, 25 bp, Homo sapien
tctgatgaagcgacatcccagtgat

SEQ ID NO: 4769829 - DNA, 25 bp, Homo sapien
gcgacatcccagtgattattcagaa

SEQ ID NO: 4769830 - DNA, 25 bp, Homo sapien
gaagcgacatcccagtgattattca

SEQ ID NO: 4769831 - DNA, 25 bp, Homo sapien
tgatgacataagcatctaagcaaca

SEQ ID NO: 4769832 - DNA, 25 bp, Homo sapien
agcaacactcatcaatccaggtatc

SEQ ID NO: 4769833 - DNA, 25 bp, Homo sapien
cataagcatctaagcaacactcatc

SEQ ID NO: 4769834 - DNA, 25 bp, Homo sapien
cactcatcaatccaggtatccagct

SEQ ID NO: 4769835 - DNA, 25 bp, Homo sapien
acatgtataagacagccagcttcca

SEQ ID NO: 4769836 - DNA, 25 bp, Homo sapien
acacatgtataagacagccagcttc

SEQ ID NO: 4769837 - DNA, 25 bp, Homo sapien
ctttgtccacatgaagggcatagga

SEQ ID NO: 4769838 - DNA, 25 bp, Homo sapien
tgtccacatgaagggcataggacag

SEQ ID NO: 4769839 - DNA, 25 bp, Homo sapien
cttccagttgacttggaagtcttct

SEQ ID NO: 4769840 - DNA, 25 bp, Homo sapien
caacttccagttgacttggaagtct

SEQ ID NO: 4769841 - DNA, 25 bp, Homo sapien
ccagttgacttggaagtcttcttca

SEQ ID NO: 4769842 - DNA, 25 bp, Homo sapien
tcaacttccagttgacttggaagtc

SEQ ID NO: 4769843 - DNA, 25 bp, Homo sapien
aggcacaccccgaaggcagaaacct

SEQ ID NO: 4769844 - DNA, 25 bp, Homo sapien
gcctggtgcggagctgcaaagacca

SEQ ID NO: 4769845 - DNA, 25 bp, Homo sapien
tgagcactggatactgcctggtgcg

SEQ ID NO: 4769846 - DNA, 25 bp, Homo sapien
tcagtcaacaggtatcgcctgagca

SEQ ID NO: 4769847 - DNA, 25 bp, Homo sapien
ctgggccggatcatgcctgacgcta

SEQ ID NO: 4769848 - DNA, 25 bp, Homo sapien
catgcctgacgctagcaggctcgct

SEQ ID NO: 4769849 - DNA, 25 bp, Homo sapien
acgctagcaggctcgctgggtcctt

SEQ ID NO: 4769850 - DNA, 25 bp, Homo sapien
gccggatcatgcctgacgctagcag

SEQ ID NO: 4769851 - DNA, 25 bp, Homo sapien
catctgtccactgtagccacaaggg

SEQ ID NO: 4769852 - DNA, 25 bp, Homo sapien
gggcttcgtgctcctttgtctcatc

SEQ ID NO: 4769853 - DNA, 25 bp, Homo sapien
ggcttcgtgctcctttgtctcatca

SEQ ID NO: 4769854 - DNA, 25 bp, Homo sapien
tccactgtagccacaagggcttcgt

SEQ ID NO: 4769855 - DNA, 25 bp, Homo sapien
tgttaatgtcttagaacaggtaggt

SEQ ID NO: 4769856 - DNA, 25 bp, Homo sapien
ggtgtagaaagtgatctcagaaggg

SEQ ID NO: 4769857 - DNA, 25 bp, Homo sapien
aattgccatggatctaacctgatgg

SEQ ID NO: 4769858 - DNA, 25 bp, Homo sapien
caggtaggtagcttcaggtgccact

SEQ ID NO: 4769859 - DNA, 25 bp, Homo sapien
tggacactggagtcggtttcccttc

SEQ ID NO: 4769860 - DNA, 25 bp, Homo sapien
cagccggattctctgcaagtcagga

SEQ ID NO: 4769861 - DNA, 25 bp, Homo sapien
tcagctttgagcagtcccactgaaa

SEQ ID NO: 4769862 - DNA, 25 bp, Homo sapien
tgtctctatggacactggagtcggt

SEQ ID NO: 4769863 - DNA, 25 bp, Homo sapien
ctggcctgttgccgggaaaaagtga

SEQ ID NO: 4769864 - DNA, 25 bp, Homo sapien
aaagtgagatttggcagacacgggc

SEQ ID NO: 4769865 - DNA, 25 bp, Homo sapien
acacgggcgtcgggacagcctgcat

SEQ ID NO: 4769866 - DNA, 25 bp, Homo sapien
cctgttgccgggaaaaagtgagatt

SEQ ID NO: 4769867 - DNA, 25 bp, Homo sapien
ccaactcaggctcctgctgcagccc

SEQ ID NO: 4769868 - DNA, 25 bp, Homo sapien
gaccaactcaggctcctgctgcagc

SEQ ID NO: 4769869 - DNA, 25 bp, Homo sapien
actcaggctcctgctgcagccccat

SEQ ID NO: 4769870 - DNA, 25 bp, Homo sapien
agaccaactcaggctcctgctgcag

SEQ ID NO: 4769871 - DNA, 25 bp, Homo sapien
ccaccatgctcagccgagatggggt

SEQ ID NO: 4769872 - DNA, 25 bp, Homo sapien
ctagctactagggagcaagaggatt

SEQ ID NO: 4769873 - DNA, 25 bp, Homo sapien
catgctcagccgagatggggttttg

SEQ ID NO: 4769874 - DNA, 25 bp, Homo sapien
atgtcggccatggctggtctggaac

SEQ ID NO: 4769875 - DNA, 25 bp, Homo sapien
gctgggtgacattactggactgtgc

SEQ ID NO: 4769876 - DNA, 25 bp, Homo sapien
tatgtcagttgtagccatcaggtct

SEQ ID NO: 4769877 - DNA, 25 bp, Homo sapien
ctttactgatatagggctgggtgac

SEQ ID NO: 4769878 - DNA, 25 bp, Homo sapien
tagcaaggccttagatgcagctgag

SEQ ID NO: 4769879 - DNA, 25 bp, Homo sapien
tcctaaatagctcggattactggtg

SEQ ID NO: 4769880 - DNA, 25 bp, Homo sapien
cctaaatagctcggattactggtgc

SEQ ID NO: 4769881 - DNA, 25 bp, Homo sapien
taaatagctcggattactggtgcct

SEQ ID NO: 4769882 - DNA, 25 bp, Homo sapien
ctaaatagctcggattactggtgcc

SEQ ID NO: 4769883 - DNA, 25 bp, Homo sapien
tgactttgaagacgttttccgtgaa

SEQ ID NO: 4769884 - DNA, 25 bp, Homo sapien
caggtgtaaaccacagtcctgtgta

SEQ ID NO: 4769885 - DNA, 25 bp, Homo sapien
catcctacaaagcatggaacagacc

SEQ ID NO: 4769886 - DNA, 25 bp, Homo sapien
ggaacagaccccacatgaaaggatt

SEQ ID NO: 4769887 - DNA, 25 bp, Homo sapien
ggtttattacgatgaggctgcgctg

SEQ ID NO: 4769888 - DNA, 25 bp, Homo sapien
gtcgcactcgaggaaccaggtcagt

SEQ ID NO: 4769889 - DNA, 25 bp, Homo sapien
tctctagttggcctgtgaacgtccc

SEQ ID NO: 4769890 - DNA, 25 bp, Homo sapien
tttgatctgacaacgctttgggagg

SEQ ID NO: 4769891 - DNA, 25 bp, Homo sapien
agcgttcttacttctactcctgagg

SEQ ID NO: 4769892 - DNA, 25 bp, Homo sapien
ctactcctgaggcaagccatctctg

SEQ ID NO: 4769893 - DNA, 25 bp, Homo sapien
ccatctctgatgtcctggaaggtcg

SEQ ID NO: 4769894 - DNA, 25 bp, Homo sapien
cctttctgcataggtagcagcgttc

SEQ ID NO: 4769895 - DNA, 25 bp, Homo sapien
taataagtactttctgcctatcaaa

SEQ ID NO: 4769896 - DNA, 25 bp, Homo sapien
tgcccagccagtatatactagaatt

SEQ ID NO: 4769897 - DNA, 25 bp, Homo sapien
gagcatctgtctattggcatttgac

SEQ ID NO: 4769898 - DNA, 25 bp, Homo sapien
gtaactgacgtttagtttcaatctg

SEQ ID NO: 4769899 - DNA, 25 bp, Homo sapien
accaccatagtagccaccgtggttt

SEQ ID NO: 4769900 - DNA, 25 bp, Homo sapien
tggaaccaccatagtagccaccgtg

SEQ ID NO: 4769901 - DNA, 25 bp, Homo sapien
tctctctgataccttactatctttc

SEQ ID NO: 4769902 - DNA, 25 bp, Homo sapien
ctgataccttactatctttcaagtt

SEQ ID NO: 4769903 - DNA, 25 bp, Homo sapien
aaattgcttccaccattaccaaatc

SEQ ID NO: 4769904 - DNA, 25 bp, Homo sapien
ttgcttccaccattaccaaatccat

SEQ ID NO: 4769905 - DNA, 25 bp, Homo sapien
ctgcctccaaagtttccttccttcg

SEQ ID NO: 4769906 - DNA, 25 bp, Homo sapien
caaaattgcttccaccattaccaaa

SEQ ID NO: 4769907 - DNA, 25 bp, Homo sapien
cacgtttccagaatcacttagcttc

SEQ ID NO: 4769908 - DNA, 25 bp, Homo sapien
ccaccacgtttccagaatcacttag

SEQ ID NO: 4769909 - DNA, 25 bp, Homo sapien
cgtttccagaatcacttagcttctt

SEQ ID NO: 4769910 - DNA, 25 bp, Homo sapien
ccacgtttccagaatcacttagctt

SEQ ID NO: 4769911 - DNA, 25 bp, Homo sapien
aattgttgccattcacagtatgata

SEQ ID NO: 4769912 - DNA, 25 bp, Homo sapien
atccacggagttgtggtcgtcaaag

SEQ ID NO: 4769913 - DNA, 25 bp, Homo sapien
cacggagttgtggtcgtcaaaggtt

SEQ ID NO: 4769914 - DNA, 25 bp, Homo sapien
acaattgttgccattcacagtatga

SEQ ID NO: 4769915 - DNA, 25 bp, Homo sapien
taggtgatgttctttagtgtcttct

SEQ ID NO: 4769916 - DNA, 25 bp, Homo sapien
ttttcacagttaagtgggcacctgg

SEQ ID NO: 4769917 - DNA, 25 bp, Homo sapien
tttcagaactgtttaaaataatctc

SEQ ID NO: 4769918 - DNA, 25 bp, Homo sapien
gtgatgttctttagtgtcttcttta

SEQ ID NO: 4769919 - DNA, 25 bp, Homo sapien
tttggttccacaagtcttctgttca

SEQ ID NO: 4769920 - DNA, 25 bp, Homo sapien
ctttggttccacaagtcttctgttc

SEQ ID NO: 4769921 - DNA, 25 bp, Homo sapien
ttggttccacaagtcttctgttcac

SEQ ID NO: 4769922 - DNA, 25 bp, Homo sapien
tctttggttccacaagtcttctgtt

SEQ ID NO: 4769923 - DNA, 25 bp, Homo sapien
attaccacacagtccgtgagtgtcc

SEQ ID NO: 4769924 - DNA, 25 bp, Homo sapien
ttggtgtttggatctctcattacca

SEQ ID NO: 4769925 - DNA, 25 bp, Homo sapien
ccgtgagtgtcccccattgctcaaa

SEQ ID NO: 4769926 - DNA, 25 bp, Homo sapien
gacaaactcaaagcccctggagcac

SEQ ID NO: 4769927 - DNA, 25 bp, Homo sapien
gacttgtgacttagacatgatggca

SEQ ID NO: 4769928 - DNA, 25 bp, Homo sapien
ttaatgatgcttcagcgtcatccat

SEQ ID NO: 4769929 - DNA, 25 bp, Homo sapien
ctttaatgatgcttcagcgtcatcc

SEQ ID NO: 4769930 - DNA, 25 bp, Homo sapien
agactttaatgatgcttcagcgtca

SEQ ID NO: 4769931 - DNA, 25 bp, Homo sapien
ttggcctcctgggctcaagctgtcc

SEQ ID NO: 4769932 - DNA, 25 bp, Homo sapien
atcttggcttactatagccttggcc

SEQ ID NO: 4769933 - DNA, 25 bp, Homo sapien
ggcctcctgggctcaagctgtcctt

SEQ ID NO: 4769934 - DNA, 25 bp, Homo sapien
tgatcttggcttactatagccttgg

SEQ ID NO: 4769935 - DNA, 25 bp, Homo sapien
aggcagtctccctgtatcgcccagg

SEQ ID NO: 4769936 - DNA, 25 bp, Homo sapien
aaggcagtctccctgtatcgcccag

SEQ ID NO: 4769937 - DNA, 25 bp, Homo sapien
ctcccaaggtctcacactctacagg

SEQ ID NO: 4769938 - DNA, 25 bp, Homo sapien
tggcctcccaaggtctcacactcta

SEQ ID NO: 4769939 - DNA, 25 bp, Homo sapien
ataaaaatcaattgtggggtggtct

SEQ ID NO: 4769940 - DNA, 25 bp, Homo sapien
cctcccaaggtctcacactctacag

SEQ ID NO: 4769941 - DNA, 25 bp, Homo sapien
gataattcagttaggatgactcaca

SEQ ID NO: 4769942 - DNA, 25 bp, Homo sapien
ttggataccagctgcaaacttcggg

SEQ ID NO: 4769943 - DNA, 25 bp, Homo sapien
gggaactttagtgagcattgtggat

SEQ ID NO: 4769944 - DNA, 25 bp, Homo sapien
cgatacagttcgacttagatcaaag

SEQ ID NO: 4769945 - DNA, 25 bp, Homo sapien
gagtgcatgacacatagcgagtgct

SEQ ID NO: 4769946 - DNA, 25 bp, Homo sapien
tcctttgagattgcaatagaatgag

SEQ ID NO: 4769947 - DNA, 25 bp, Homo sapien
gttatagtgcatatcttcctcatgg

SEQ ID NO: 4769948 - DNA, 25 bp, Homo sapien
catttttctggtaagtagttggaga

SEQ ID NO: 4769949 - DNA, 25 bp, Homo sapien
tcagtggccattgatgatcagctca

SEQ ID NO: 4769950 - DNA, 25 bp, Homo sapien
ttcagcccctgtcccgtaacagtgg

SEQ ID NO: 4769951 - DNA, 25 bp, Homo sapien
gaaagtcctgatcctttagtcatgc

SEQ ID NO: 4769952 - DNA, 25 bp, Homo sapien
tagtcatgccttggtcctactagag

SEQ ID NO: 4769953 - DNA, 25 bp, Homo sapien
tgaactgacagcgtttgaggacctc

SEQ ID NO: 4769954 - DNA, 25 bp, Homo sapien
gacattggtctttatcattggagca

SEQ ID NO: 4769955 - DNA, 25 bp, Homo sapien
catgtgcctgagtaagcctctgtga

SEQ ID NO: 4769956 - DNA, 25 bp, Homo sapien
tacgctgtgtaaagtctcagtttcc

SEQ ID NO: 4769957 - DNA, 25 bp, Homo sapien
ttttgtctgtcttgtgggtgagaaa

SEQ ID NO: 4769958 - DNA, 25 bp, Homo sapien
tcctgagccttgtgggccatggtgc

SEQ ID NO: 4769959 - DNA, 25 bp, Homo sapien
gacatatgttgtcaaatatgtggtt

SEQ ID NO: 4769960 - DNA, 25 bp, Homo sapien
ttgtctgtcttgtgggtgagaaatg

SEQ ID NO: 4769961 - DNA, 25 bp, Homo sapien
gggtctgtcagcctatatcacataa

SEQ ID NO: 4769962 - DNA, 25 bp, Homo sapien
aaacagcctttcttgagtccctggt

SEQ ID NO: 4769963 - DNA, 25 bp, Homo sapien
tacccaggtacgaagttcagagttc

SEQ ID NO: 4769964 - DNA, 25 bp, Homo sapien
taagtcttgctttggaaccttctgc

SEQ ID NO: 4769965 - DNA, 25 bp, Homo sapien
gacacaatgattggcaaagcagtgg

SEQ ID NO: 4769966 - DNA, 25 bp, Homo sapien
acattacctatgagaaagaccctgt

SEQ ID NO: 4769967 - DNA, 25 bp, Homo sapien
gatgattacaaagaaggcgaccttc

SEQ ID NO: 4769968 - DNA, 25 bp, Homo sapien
ggaatggtcttagcacgtgcacctg

SEQ ID NO: 4769969 - DNA, 25 bp, Homo sapien
ggtcattcatcaagtagaagccaag

SEQ ID NO: 4769970 - DNA, 25 bp, Homo sapien
cagcctggtaggcaaacaagtggaa

SEQ ID NO: 4769971 - DNA, 25 bp, Homo sapien
gaagatggctcgaaaaggactggca

SEQ ID NO: 4769972 - DNA, 25 bp, Homo sapien
gccctccgtctatttcatcaagttt

SEQ ID NO: 4769973 - DNA, 25 bp, Homo sapien
aacaggagtgctttacccaagtcag

SEQ ID NO: 4769974 - DNA, 25 bp, Homo sapien
gagcaccttttcaatctggagccct

SEQ ID NO: 4769975 - DNA, 25 bp, Homo sapien
tattctgccgccacaatgcaagcat

SEQ ID NO: 4769976 - DNA, 25 bp, Homo sapien
gaacagttaatgacccatattagaa

SEQ ID NO: 4769977 - DNA, 25 bp, Homo sapien
tgccagtgaagcgttaccatagaag

SEQ ID NO: 4769978 - DNA, 25 bp, Homo sapien
caggttcttgttccacacagtgtaa

SEQ ID NO: 4769979 - DNA, 25 bp, Homo sapien
tgtctagacaaacagcagcttagtc

SEQ ID NO: 4769980 - DNA, 25 bp, Homo sapien
tatggtcagagactttcaacccacc

SEQ ID NO: 4769981 - DNA, 25 bp, Homo sapien
caactgtgcagaacttggctcggta

SEQ ID NO: 4769982 - DNA, 25 bp, Homo sapien
gagtccagactgacattacagcgca

SEQ ID NO: 4769983 - DNA, 25 bp, Homo sapien
caagagtttgcaagtgtgtccagca

SEQ ID NO: 4769984 - DNA, 25 bp, Homo sapien
tgtaaatctcaaagctgagcctggc

SEQ ID NO: 4769985 - DNA, 25 bp, Homo sapien
catgggacttgtgacaatacaagac

SEQ ID NO: 4769986 - DNA, 25 bp, Homo sapien
tttaggctcatgtgtcagatctgca

SEQ ID NO: 4769987 - DNA, 25 bp, Homo sapien
tgcgtgtgtgatgtcaggctgccac

SEQ ID NO: 4769988 - DNA, 25 bp, Homo sapien
ggctgccacgtaaaacttcagagaa

SEQ ID NO: 4769989 - DNA, 25 bp, Homo sapien
tttatgtgccaaaccacgaagtgca

SEQ ID NO: 4769990 - DNA, 25 bp, Homo sapien
tgtagacccattagaagactgttcc

SEQ ID NO: 4769991 - DNA, 25 bp, Homo sapien
tatacaatgtgtagacagttccctg

SEQ ID NO: 4769992 - DNA, 25 bp, Homo sapien
gttccttggaaatgctgcgctcttt

SEQ ID NO: 4769993 - DNA, 25 bp, Homo sapien
cagttcaaggaggaaatgagccatt

SEQ ID NO: 4769994 - DNA, 25 bp, Homo sapien
taaggatctcatgcttaagtctggg

SEQ ID NO: 4769995 - DNA, 25 bp, Homo sapien
tgaaggcagggtctactccggctta

SEQ ID NO: 4769996 - DNA, 25 bp, Homo sapien
gggatatttacctgcctttgggaga

SEQ ID NO: 4769997 - DNA, 25 bp, Homo sapien
tccataaattcatagggactaggtt

SEQ ID NO: 4769998 - DNA, 25 bp, Homo sapien
ttccataaattcatagggactaggt

SEQ ID NO: 4769999 - DNA, 25 bp, Homo sapien
ttattccataaattcatagggacta

SEQ ID NO: 4770000 - DNA, 25 bp, Homo sapien
ggactaggttccagcagcccaggct

SEQ ID NO: 4770001 - DNA, 25 bp, Homo sapien
ctggcgtttagtggaacccagacac

SEQ ID NO: 4770002 - DNA, 25 bp, Homo sapien
catgtgggtaacattatagactgct

SEQ ID NO: 4770003 - DNA, 25 bp, Homo sapien
acaataccaacagcatgtgggtaac

SEQ ID NO: 4770004 - DNA, 25 bp, Homo sapien
cagcatgtgggtaacattatagact

SEQ ID NO: 4770005 - DNA, 25 bp, Homo sapien
aacagcatgtgggtaacattataga

SEQ ID NO: 4770006 - DNA, 25 bp, Homo sapien
agtcaatctttaggtcggtctccat

SEQ ID NO: 4770007 - DNA, 25 bp, Homo sapien
gaagaaatgctctgagcaagttcct

SEQ ID NO: 4770008 - DNA, 25 bp, Homo sapien
gaaatgctctgagcaagttcctctc

SEQ ID NO: 4770009 - DNA, 25 bp, Homo sapien
tcaagttcagcagagtcaatcttta

SEQ ID NO: 4770010 - DNA, 25 bp, Homo sapien
tccaagaagtagtctaggcccggtg

SEQ ID NO: 4770011 - DNA, 25 bp, Homo sapien
tgtgctgatcaaggcaccccaggac

SEQ ID NO: 4770012 - DNA, 25 bp, Homo sapien
ccggtgcccaatgagaattatagtc

SEQ ID NO: 4770013 - DNA, 25 bp, Homo sapien
tggtgtcacttacagaagcctctgc

SEQ ID NO: 4770014 - DNA, 25 bp, Homo sapien
ctttttgttcatcagtatctgccat

SEQ ID NO: 4770015 - DNA, 25 bp, Homo sapien
gtttgctttttgttcatcagtatct

SEQ ID NO: 4770016 - DNA, 25 bp, Homo sapien
ttgctttttgttcatcagtatctgc

SEQ ID NO: 4770017 - DNA, 25 bp, Homo sapien
gctttttgttcatcagtatctgcca

SEQ ID NO: 4770018 - DNA, 25 bp, Homo sapien
gctgtgtggctctgcggaaccccaa

SEQ ID NO: 4770019 - DNA, 25 bp, Homo sapien
cttgagggcccaatctagacgctgg

SEQ ID NO: 4770020 - DNA, 25 bp, Homo sapien
tagacgctggcctaggccacattgg

SEQ ID NO: 4770021 - DNA, 25 bp, Homo sapien
tgactgcaccctcccttctgtgtgg

SEQ ID NO: 4770022 - DNA, 25 bp, Homo sapien
tgacggtgactgttggaaatatctg

SEQ ID NO: 4770023 - DNA, 25 bp, Homo sapien
tcatcattaggagtagctggcgtgg

SEQ ID NO: 4770024 - DNA, 25 bp, Homo sapien
tctggtcaggcttaacagataactg

SEQ ID NO: 4770025 - DNA, 25 bp, Homo sapien
tgacttggcgatggtagttctctgg

SEQ ID NO: 4770026 - DNA, 25 bp, Homo sapien
aaagccctgggcatctggtaaacat

SEQ ID NO: 4770027 - DNA, 25 bp, Homo sapien
cagaacaccaaaaacaaaagccctg

SEQ ID NO: 4770028 - DNA, 25 bp, Homo sapien
aaaacaaaagccctgggcatctggt

SEQ ID NO: 4770029 - DNA, 25 bp, Homo sapien
aagcagaacaaaacagaacaccaaa

SEQ ID NO: 4770030 - DNA, 25 bp, Homo sapien
tgtgacaagttatgtttgcagagca

SEQ ID NO: 4770031 - DNA, 25 bp, Homo sapien
caagttatgtttgcagagcagacag

SEQ ID NO: 4770032 - DNA, 25 bp, Homo sapien
taatgtgacaagttatgtttgcaga

SEQ ID NO: 4770033 - DNA, 25 bp, Homo sapien
ttttaatgtgacaagttatgtttgc

SEQ ID NO: 4770034 - DNA, 25 bp, Homo sapien
tggatagggtatcctggccactgga

SEQ ID NO: 4770035 - DNA, 25 bp, Homo sapien
gctccaacttagaaacgagacacgg

SEQ ID NO: 4770036 - DNA, 25 bp, Homo sapien
gcctcatgaagaaacaaggtatgca

SEQ ID NO: 4770037 - DNA, 25 bp, Homo sapien
gagacacgggatccatcagctatga

SEQ ID NO: 4770038 - DNA, 25 bp, Homo sapien
cccgcccaagcccgctccaagccca

SEQ ID NO: 4770039 - DNA, 25 bp, Homo sapien
cgcccaagcccgctccaagcccaat

SEQ ID NO: 4770040 - DNA, 25 bp, Homo sapien
caccccgcccaagcccgctccaagc

SEQ ID NO: 4770041 - DNA, 25 bp, Homo sapien
cccaagcccgctccaagcccaatta

SEQ ID NO: 4770042 - DNA, 25 bp, Homo sapien
ccacagaaaagagacggaaaggctg

SEQ ID NO: 4770043 - DNA, 25 bp, Homo sapien
gatgcatctttctgccagcgggagg

SEQ ID NO: 4770044 - DNA, 25 bp, Homo sapien
ggaactcctacccagtactagacaa

SEQ ID NO: 4770045 - DNA, 25 bp, Homo sapien
aaaggcctggtcacttttgcaagaa

SEQ ID NO: 4770046 - DNA, 25 bp, Homo sapien
cagcccttgctcttgctagatgtgt

SEQ ID NO: 4770047 - DNA, 25 bp, Homo sapien
gcagcccttgctcttgctagatgtg

SEQ ID NO: 4770048 - DNA, 25 bp, Homo sapien
tgcagcccttgctcttgctagatgt

SEQ ID NO: 4770049 - DNA, 25 bp, Homo sapien
gaacagctattgtaggcagcaggag

SEQ ID NO: 4770050 - DNA, 25 bp, Homo sapien
ttgcttcctccgtatgaacagctat

SEQ ID NO: 4770051 - DNA, 25 bp, Homo sapien
ttgtaggcagcaggagtaatatggt

SEQ ID NO: 4770052 - DNA, 25 bp, Homo sapien
cgtatgaacagctattgtaggcagc

SEQ ID NO: 4770053 - DNA, 25 bp, Homo sapien
tctagtgtgttatatgccatccagg

SEQ ID NO: 4770054 - DNA, 25 bp, Homo sapien
tccagggatttgacctcatgtaggg

SEQ ID NO: 4770055 - DNA, 25 bp, Homo sapien
ttgaaggtatccacagaaagggtac

SEQ ID NO: 4770056 - DNA, 25 bp, Homo sapien
gctggtgatggcagtcgccttcata

SEQ ID NO: 4770057 - DNA, 25 bp, Homo sapien
agttggctctgtactcaatctgtcg

SEQ ID NO: 4770058 - DNA, 25 bp, Homo sapien
tgacgtcactcatcatgtagcctct

SEQ ID NO: 4770059 - DNA, 25 bp, Homo sapien
caatctgtcgtgacgtcactcatca

SEQ ID NO: 4770060 - DNA, 25 bp, Homo sapien
tgtactcaatctgtcgtgacgtcac

SEQ ID NO: 4770061 - DNA, 25 bp, Homo sapien
tggagaagatgacacgctggccagc

SEQ ID NO: 4770062 - DNA, 25 bp, Homo sapien
ggctgagtcccaagaaggaccctgt

SEQ ID NO: 4770063 - DNA, 25 bp, Homo sapien
gactgtccaccctgtgctcataggt

SEQ ID NO: 4770064 - DNA, 25 bp, Homo sapien
tgaacacatttccaggtctcagcag

SEQ ID NO: 4770065 - DNA, 25 bp, Homo sapien
ccttgctgtcttcctgctctgagtt

SEQ ID NO: 4770066 - DNA, 25 bp, Homo sapien
tgctgtcttcctgctctgagtttat

SEQ ID NO: 4770067 - DNA, 25 bp, Homo sapien
ctattccttgctgtcttcctgctct

SEQ ID NO: 4770068 - DNA, 25 bp, Homo sapien
tccttgctgtcttcctgctctgagt

SEQ ID NO: 4770069 - DNA, 25 bp, Homo sapien
agaataagtgtctacactgtggttt

SEQ ID NO: 4770070 - DNA, 25 bp, Homo sapien
gaataagtgtctacactgtggtttt

SEQ ID NO: 4770071 - DNA, 25 bp, Homo sapien
ataagtgtctacactgtggttttcc

SEQ ID NO: 4770072 - DNA, 25 bp, Homo sapien
aataagtgtctacactgtggttttc

SEQ ID NO: 4770073 - DNA, 25 bp, Homo sapien
atttgtggggcttgtgtagtgaccc

SEQ ID NO: 4770074 - DNA, 25 bp, Homo sapien
aaatttgtggggcttgtgtagtgac

SEQ ID NO: 4770075 - DNA, 25 bp, Homo sapien
ttgtggggcttgtgtagtgacccac

SEQ ID NO: 4770076 - DNA, 25 bp, Homo sapien
tgtggaggtgggtgaaatttgtggg

SEQ ID NO: 4770077 - DNA, 25 bp, Homo sapien
tcatctctatacacaggtaataact

SEQ ID NO: 4770078 - DNA, 25 bp, Homo sapien
aataacttggtcttggtcttagtca

SEQ ID NO: 4770079 - DNA, 25 bp, Homo sapien
tctctatacacaggtaataacttgg

SEQ ID NO: 4770080 - DNA, 25 bp, Homo sapien
cacaggtaataacttggtcttggtc

SEQ ID NO: 4770081 - DNA, 25 bp, Homo sapien
gaggactgttggaaagcattaggac

SEQ ID NO: 4770082 - DNA, 25 bp, Homo sapien
tatacacgcttttatacgtaagaaa

SEQ ID NO: 4770083 - DNA, 25 bp, Homo sapien
ttaggacagatgtataaggagcata

SEQ ID NO: 4770084 - DNA, 25 bp, Homo sapien
cttggtgaggcttagagtgaggact

SEQ ID NO: 4770085 - DNA, 25 bp, Homo sapien
ttctctaaggactcgaaataattca

SEQ ID NO: 4770086 - DNA, 25 bp, Homo sapien
tctctaaggactcgaaataattcac

SEQ ID NO: 4770087 - DNA, 25 bp, Homo sapien
cttctctaaggactcgaaataattc

SEQ ID NO: 4770088 - DNA, 25 bp, Homo sapien
tgggtccaaccagaaacgatgtgtt

SEQ ID NO: 4770089 - DNA, 25 bp, Homo sapien
gctgatcactgcccaacttggagac

SEQ ID NO: 4770090 - DNA, 25 bp, Homo sapien
ctgatcactgcccaacttggagaca

SEQ ID NO: 4770091 - DNA, 25 bp, Homo sapien
acttgcacgcatacactccctatgt

SEQ ID NO: 4770092 - DNA, 25 bp, Homo sapien
agcacctgaacccagccacttgcac

SEQ ID NO: 4770093 - DNA, 25 bp, Homo sapien
gcacgcatacactccctatgtttct

SEQ ID NO: 4770094 - DNA, 25 bp, Homo sapien
atgctgtcatgtcctggccggagag

SEQ ID NO: 4770095 - DNA, 25 bp, Homo sapien
tcagatttgatcaatgacatctcca

SEQ ID NO: 4770096 - DNA, 25 bp, Homo sapien
aagtattgggtttctcagatttgat

SEQ ID NO: 4770097 - DNA, 25 bp, Homo sapien
tctccataaagctatccagttgttg

SEQ ID NO: 4770098 - DNA, 25 bp, Homo sapien
ccataaagctatccagttgttgtgt

SEQ ID NO: 4770099 - DNA, 25 bp, Homo sapien
taacccagaaatggacttcggagtg

SEQ ID NO: 4770100 - DNA, 25 bp, Homo sapien
aaggcataacccagaaatggacttc

SEQ ID NO: 4770101 - DNA, 25 bp, Homo sapien
tcggagtgggtcattaagccacaaa

SEQ ID NO: 4770102 - DNA, 25 bp, Homo sapien
tggacttcggagtgggtcattaagc

SEQ ID NO: 4770103 - DNA, 25 bp, Homo sapien
ctggaacgcaaagggagtagagcct

SEQ ID NO: 4770104 - DNA, 25 bp, Homo sapien
tgcggtgccggcatggcacctcgct

SEQ ID NO: 4770105 - DNA, 25 bp, Homo sapien
taagcaggcctctgcgttaacactg

SEQ ID NO: 4770106 - DNA, 25 bp, Homo sapien
gggagtggccacattccgcgctaag

SEQ ID NO: 4770107 - DNA, 25 bp, Homo sapien
caatgtgagtggcaatcagagagtt

SEQ ID NO: 4770108 - DNA, 25 bp, Homo sapien
atgtgagtggcaatcagagagttag

SEQ ID NO: 4770109 - DNA, 25 bp, Homo sapien
tggcaatcagagagttaggaaacat

SEQ ID NO: 4770110 - DNA, 25 bp, Homo sapien
tgagtggcaatcagagagttaggaa

SEQ ID NO: 4770111 - DNA, 25 bp, Homo sapien
gaagctgagttttctgtcatggatt

SEQ ID NO: 4770112 - DNA, 25 bp, Homo sapien
agctgagttttctgtcatggatttg

SEQ ID NO: 4770113 - DNA, 25 bp, Homo sapien
gctgagttttctgtcatggatttgg

SEQ ID NO: 4770114 - DNA, 25 bp, Homo sapien
aagctgagttttctgtcatggattt

SEQ ID NO: 4770115 - DNA, 25 bp, Homo sapien
tggctgaatcagatgcggagacctg

SEQ ID NO: 4770116 - DNA, 25 bp, Homo sapien
ttgaataactccatggatttaacct

SEQ ID NO: 4770117 - DNA, 25 bp, Homo sapien
gctgaatcagatgcggagacctgga

SEQ ID NO: 4770118 - DNA, 25 bp, Homo sapien
gaatggagtggcgagctttggattt

SEQ ID NO: 4770119 - DNA, 25 bp, Homo sapien
ttgttatcctcccagaaggtgaact

SEQ ID NO: 4770120 - DNA, 25 bp, Homo sapien
tttgctctcgttcctgaaatttctg

SEQ ID NO: 4770121 - DNA, 25 bp, Homo sapien
actatctgcagatcttttgctctcg

SEQ ID NO: 4770122 - DNA, 25 bp, Homo sapien
gaactctggattgtgactatctgca

SEQ ID NO: 4770123 - DNA, 25 bp, Homo sapien
aagtggttgcaccagaagaattcag

SEQ ID NO: 4770124 - DNA, 25 bp, Homo sapien
caaagccctctgtgtaaaaggttgt

SEQ ID NO: 4770125 - DNA, 25 bp, Homo sapien
agtggttgcaccagaagaattcagt

SEQ ID NO: 4770126 - DNA, 25 bp, Homo sapien
tgtaaaaggttgttggtgccaactg

SEQ ID NO: 4770127 - DNA, 25 bp, Homo sapien
ctggcccctcgagcctccacttcca

SEQ ID NO: 4770128 - DNA, 25 bp, Homo sapien
cacctcagcggggtgctgtctgttg

SEQ ID NO: 4770129 - DNA, 25 bp, Homo sapien
tccctgtgcttgatgttaccagctc

SEQ ID NO: 4770130 - DNA, 25 bp, Homo sapien
tatcggctgtgggtaccacctcagc

SEQ ID NO: 4770131 - DNA, 25 bp, Homo sapien
cttgatgttaccagctctccacctg

SEQ ID NO: 4770132 - DNA, 25 bp, Homo sapien
tctgagtgccgttaggtgtctgaaa

SEQ ID NO: 4770133 - DNA, 25 bp, Homo sapien
aataatctgagtgccgttaggtgtc

SEQ ID NO: 4770134 - DNA, 25 bp, Homo sapien
tgttgaataatctgagtgccgttag

SEQ ID NO: 4770135 - DNA, 25 bp, Homo sapien
gctgttgaataatctgagtgccgtt

SEQ ID NO: 4770136 - DNA, 25 bp, Homo sapien
tgtaatccgtccacaatcagaactt

SEQ ID NO: 4770137 - DNA, 25 bp, Homo sapien
tcagaacttctaacagagtaccaat

SEQ ID NO: 4770138 - DNA, 25 bp, Homo sapien
acccagagggcttttaatgaatcat

SEQ ID NO: 4770139 - DNA, 25 bp, Homo sapien
caaggatactgccaatgggctcttt

SEQ ID NO: 4770140 - DNA, 25 bp, Homo sapien
gataaaaaaccatggccctactgtg

SEQ ID NO: 4770141 - DNA, 25 bp, Homo sapien
caacattctactgcggagagctgca

SEQ ID NO: 4770142 - DNA, 25 bp, Homo sapien
taaatggcactaatcagcacaaggt

SEQ ID NO: 4770143 - DNA, 25 bp, Homo sapien
caagcgaggccaatatacagggatt

SEQ ID NO: 4770144 - DNA, 25 bp, Homo sapien
tcaatcgtcagcagtagttgtggtt

SEQ ID NO: 4770145 - DNA, 25 bp, Homo sapien
tcttttctcacgtcagtaggaggct

SEQ ID NO: 4770146 - DNA, 25 bp, Homo sapien
gcctcttttctcacgtcagtaggag

SEQ ID NO: 4770147 - DNA, 25 bp, Homo sapien
tttctcacgtcagtaggaggctgtt

SEQ ID NO: 4770148 - DNA, 25 bp, Homo sapien
aagcctcttttctcacgtcagtagg

SEQ ID NO: 4770149 - DNA, 25 bp, Homo sapien
gcgaaggtcccacgttcaccacatt

SEQ ID NO: 4770150 - DNA, 25 bp, Homo sapien
cccacgttcaccacattctccagtg

SEQ ID NO: 4770151 - DNA, 25 bp, Homo sapien
aagcgaaggtcccacgttcaccaca

SEQ ID NO: 4770152 - DNA, 25 bp, Homo sapien
cacgttcaccacattctccagtgag

SEQ ID NO: 4770153 - DNA, 25 bp, Homo sapien
tgccagtgaccagggtctactgtgc

SEQ ID NO: 4770154 - DNA, 25 bp, Homo sapien
ctgccagtgaccagggtctactgtg

SEQ ID NO: 4770155 - DNA, 25 bp, Homo sapien
catgaagtccaggggtaggttgctc

SEQ ID NO: 4770156 - DNA, 25 bp, Homo sapien
tgctcagggtaagagtgtggctcca

SEQ ID NO: 4770157 - DNA, 25 bp, Homo sapien
tccaggggtaggttgctcagggtaa

SEQ ID NO: 4770158 - DNA, 25 bp, Homo sapien
ggtaggttgctcagggtaagagtgt

SEQ ID NO: 4770159 - DNA, 25 bp, Homo sapien
tgttggtctctgcatcggtcactgt

SEQ ID NO: 4770160 - DNA, 25 bp, Homo sapien
tagagcgccgtgcatcatgactgat

SEQ ID NO: 4770161 - DNA, 25 bp, Homo sapien
ccatcttcatggagtgtggtctact

SEQ ID NO: 4770162 - DNA, 25 bp, Homo sapien
gactgatgactgactctcttgccgg

SEQ ID NO: 4770163 - DNA, 25 bp, Homo sapien
ggaacagtgtagacaacaactgagt

SEQ ID NO: 4770164 - DNA, 25 bp, Homo sapien
tggaacagtgtagacaacaactgag

SEQ ID NO: 4770165 - DNA, 25 bp, Homo sapien
ctggaacagtgtagacaacaactga

SEQ ID NO: 4770166 - DNA, 25 bp, Homo sapien
tgatgccatcacaagggtggtctcc

SEQ ID NO: 4770167 - DNA, 25 bp, Homo sapien
gagtggcaaggtggtcccctgaact

SEQ ID NO: 4770168 - DNA, 25 bp, Homo sapien
gacatagtgggaccaaagtgggcca

SEQ ID NO: 4770169 - DNA, 25 bp, Homo sapien
caagggactctgaagccatgctgtg

SEQ ID NO: 4770170 - DNA, 25 bp, Homo sapien
ggccccctccttgagcacctggaag

SEQ ID NO: 4770171 - DNA, 25 bp, Homo sapien
gcacctggaagagcacccagtctct

SEQ ID NO: 4770172 - DNA, 25 bp, Homo sapien
tctctgcgtgctcctgaatagctgt

SEQ ID NO: 4770173 - DNA, 25 bp, Homo sapien
ttgccctgggtgcatctctgcgtgc

SEQ ID NO: 4770174 - DNA, 25 bp, Homo sapien
cttatggagcctgaaatccagggca

SEQ ID NO: 4770175 - DNA, 25 bp, Homo sapien
tatggagcctgaaatccagggcatc

SEQ ID NO: 4770176 - DNA, 25 bp, Homo sapien
atggagcctgaaatccagggcatct

SEQ ID NO: 4770177 - DNA, 25 bp, Homo sapien
ttatggagcctgaaatccagggcat

SEQ ID NO: 4770178 - DNA, 25 bp, Homo sapien
tgatgaggtttagtggcatcggctc

SEQ ID NO: 4770179 - DNA, 25 bp, Homo sapien
gcatcggctctatatttctcatgaa

SEQ ID NO: 4770180 - DNA, 25 bp, Homo sapien
gaggtttagtggcatcggctctata

SEQ ID NO: 4770181 - DNA, 25 bp, Homo sapien
tagtggcatcggctctatatttctc

SEQ ID NO: 4770182 - DNA, 25 bp, Homo sapien
caggcacggggtgaggtatgcactc

SEQ ID NO: 4770183 - DNA, 25 bp, Homo sapien
atcatcaaaccacacacaggcacgg

SEQ ID NO: 4770184 - DNA, 25 bp, Homo sapien
aagcaccttatgcatcatcaaacca

SEQ ID NO: 4770185 - DNA, 25 bp, Homo sapien
gcacggggtgaggtatgcactccat

SEQ ID NO: 4770186 - DNA, 25 bp, Homo sapien
ttgcttcgctggcatggacggcaag

SEQ ID NO: 4770187 - DNA, 25 bp, Homo sapien
ccagcgctgtgtccgctgcagcatg

SEQ ID NO: 4770188 - DNA, 25 bp, Homo sapien
catggacggcaagggtcacactgcc

SEQ ID NO: 4770189 - DNA, 25 bp, Homo sapien
ctgcccagctgtgagttgcccctca

SEQ ID NO: 4770190 - DNA, 25 bp, Homo sapien
ccttgcatattgtcagaggcagcgc

SEQ ID NO: 4770191 - DNA, 25 bp, Homo sapien
catcactggtaagactgccagcctt

SEQ ID NO: 4770192 - DNA, 25 bp, Homo sapien
cccacaaggtgtggtagaccagctg

SEQ ID NO: 4770193 - DNA, 25 bp, Homo sapien
gaggcagcgctgaaccttgtcttcc

SEQ ID NO: 4770194 - DNA, 25 bp, Homo sapien
gcttgccagggagcagtatgtcccc

SEQ ID NO: 4770195 - DNA, 25 bp, Homo sapien
ggactcagccattttaatggcgtcc

SEQ ID NO: 4770196 - DNA, 25 bp, Homo sapien
gaggcgtggtacagtgcctcccaca

SEQ ID NO: 4770197 - DNA, 25 bp, Homo sapien
tggcgtcctcaagtgtaatgtgcga

SEQ ID NO: 4770198 - DNA, 25 bp, Homo sapien
gcaagttgctgttagtgtcatggag

SEQ ID NO: 4770199 - DNA, 25 bp, Homo sapien
ttttctccaaattcatgcaaggcta

SEQ ID NO: 4770200 - DNA, 25 bp, Homo sapien
tgcaaggctatgaactgagaaagct

SEQ ID NO: 4770201 - DNA, 25 bp, Homo sapien
ctggtatggaaggttgcaagttgct

SEQ ID NO: 4770202 - DNA, 25 bp, Homo sapien
ggtaccagccgctgccaggaatcta

SEQ ID NO: 4770203 - DNA, 25 bp, Homo sapien
gtaccagccgctgccaggaatctag

SEQ ID NO: 4770204 - DNA, 25 bp, Homo sapien
accagccgctgccaggaatctagtg

SEQ ID NO: 4770205 - DNA, 25 bp, Homo sapien
taccagccgctgccaggaatctagt

SEQ ID NO: 4770206 - DNA, 25 bp, Homo sapien
tgtagccttggaaactggtcatgga

SEQ ID NO: 4770207 - DNA, 25 bp, Homo sapien
tttattatgggagataaatcactgt

SEQ ID NO: 4770208 - DNA, 25 bp, Homo sapien
tggagttgggggtccgggactgaca

SEQ ID NO: 4770209 - DNA, 25 bp, Homo sapien
gtatttcaggtttattatgggagat

SEQ ID NO: 4770210 - DNA, 25 bp, Homo sapien
ggtctcaggcaaatgcccctggact

SEQ ID NO: 4770211 - DNA, 25 bp, Homo sapien
ctggtgtgggctctgaattccacag

SEQ ID NO: 4770212 - DNA, 25 bp, Homo sapien
aggcaaatgcccctggactcagcac

SEQ ID NO: 4770213 - DNA, 25 bp, Homo sapien
cctggtgtgggctctgaattccaca

SEQ ID NO: 4770214 - DNA, 25 bp, Homo sapien
aacgcagggatcaaaggttgcccag

SEQ ID NO: 4770215 - DNA, 25 bp, Homo sapien
cagaacgcagggatcaaaggttgcc

SEQ ID NO: 4770216 - DNA, 25 bp, Homo sapien
gacacagaacgcagggatcaaaggt

SEQ ID NO: 4770217 - DNA, 25 bp, Homo sapien
tgtgtagacacagaacgcagggatc

SEQ ID NO: 4770218 - DNA, 25 bp, Homo sapien
tcccagtaaccatctgtgtggccag

SEQ ID NO: 4770219 - DNA, 25 bp, Homo sapien
gtacagttctcccagtaaccatctg

SEQ ID NO: 4770220 - DNA, 25 bp, Homo sapien
gaatggtagtacagttctcccagta

SEQ ID NO: 4770221 - DNA, 25 bp, Homo sapien
cagatgtgggaatggtagtacagtt

SEQ ID NO: 4770222 - DNA, 25 bp, Homo sapien
gcctgtcagtgtaccacaggtctac

SEQ ID NO: 4770223 - DNA, 25 bp, Homo sapien
ggaggtgataacttgtaggcagact

SEQ ID NO: 4770224 - DNA, 25 bp, Homo sapien
tgatttcaagtccatctcctaataa

SEQ ID NO: 4770225 - DNA, 25 bp, Homo sapien
taccacaggtctaccttgatttcaa

SEQ ID NO: 4770226 - DNA, 25 bp, Homo sapien
tctgctcacacagagctcgaagcag

SEQ ID NO: 4770227 - DNA, 25 bp, Homo sapien
cagagctcgaagcaggcatgctcct

SEQ ID NO: 4770228 - DNA, 25 bp, Homo sapien
tctccttcagatacttcaccacttt

SEQ ID NO: 4770229 - DNA, 25 bp, Homo sapien
caagactctggttgatgaagccatt

SEQ ID NO: 4770230 - DNA, 25 bp, Homo sapien
ttggctggaggcaagtggactgtgc

SEQ ID NO: 4770231 - DNA, 25 bp, Homo sapien
ttctcttgctcccaatagatcagct

SEQ ID NO: 4770232 - DNA, 25 bp, Homo sapien
aatagatcagctctccccttggctg

SEQ ID NO: 4770233 - DNA, 25 bp, Homo sapien
aggggacactccctggcagcaccaa

SEQ ID NO: 4770234 - DNA, 25 bp, Homo sapien
tgcagggccacgctgccaaaggcca

SEQ ID NO: 4770235 - DNA, 25 bp, Homo sapien
cctgcagggccacgctgccaaaggc

SEQ ID NO: 4770236 - DNA, 25 bp, Homo sapien
accctgcagggccacgctgccaaag

SEQ ID NO: 4770237 - DNA, 25 bp, Homo sapien
gcagggccacgctgccaaaggccat

SEQ ID NO: 4770238 - DNA, 25 bp, Homo sapien
tactcctggaaacattgtaaatcaa

SEQ ID NO: 4770239 - DNA, 25 bp, Homo sapien
ggcttcctggtgacagcagtactcc

SEQ ID NO: 4770240 - DNA, 25 bp, Homo sapien
ttcctggtgacagcagtactcctgg

SEQ ID NO: 4770241 - DNA, 25 bp, Homo sapien
cattgtaaatcaaccccacagcctt

SEQ ID NO: 4770242 - DNA, 25 bp, Homo sapien
agagccctgctgtgaacagtgtggt

SEQ ID NO: 4770243 - DNA, 25 bp, Homo sapien
aggaaagagccctgctgtgaacagt

SEQ ID NO: 4770244 - DNA, 25 bp, Homo sapien
aggaggaaagagccctgctgtgaac

SEQ ID NO: 4770245 - DNA, 25 bp, Homo sapien
gagccctgctgtgaacagtgtggtc

SEQ ID NO: 4770246 - DNA, 25 bp, Homo sapien
tccttgatgtacaggcccaccacat

SEQ ID NO: 4770247 - DNA, 25 bp, Homo sapien
ccaacataggtttccttagaaaatg

SEQ ID NO: 4770248 - DNA, 25 bp, Homo sapien
ccttagaaaatgctggataaaccac

SEQ ID NO: 4770249 - DNA, 25 bp, Homo sapien
tccttgaaagtccaacataggtttc

SEQ ID NO: 4770250 - DNA, 25 bp, Homo sapien
actcccaacacatgcagggtacagg

SEQ ID NO: 4770251 - DNA, 25 bp, Homo sapien
agcctgcagcaccaggcactcccaa

SEQ ID NO: 4770252 - DNA, 25 bp, Homo sapien
caggggcatgcggagcactttccag

SEQ ID NO: 4770253 - DNA, 25 bp, Homo sapien
gtacaggggcatgcggagcactttc

SEQ ID NO: 4770254 - DNA, 25 bp, Homo sapien
ccacatgcaggaagacaaggctctg

SEQ ID NO: 4770255 - DNA, 25 bp, Homo sapien
cacatgcaggaagacaaggctctga

SEQ ID NO: 4770256 - DNA, 25 bp, Homo sapien
gcaggaagacaaggctctgagaagc

SEQ ID NO: 4770257 - DNA, 25 bp, Homo sapien
catgcaggaagacaaggctctgaga

SEQ ID NO: 4770258 - DNA, 25 bp, Homo sapien
tggggatcttccagaattctttatc

SEQ ID NO: 4770259 - DNA, 25 bp, Homo sapien
ttggtggggatcttccagaattctt

SEQ ID NO: 4770260 - DNA, 25 bp, Homo sapien
tccctgacccgagtgtgatggccat

SEQ ID NO: 4770261 - DNA, 25 bp, Homo sapien
cctgacccgagtgtgatggccatgg

SEQ ID NO: 4770262 - DNA, 25 bp, Homo sapien
tgtagactccgttgggaggtctgca

SEQ ID NO: 4770263 - DNA, 25 bp, Homo sapien
gagatctttgtagactccgttggga

SEQ ID NO: 4770264 - DNA, 25 bp, Homo sapien
tggcgaatccaatgtggagatcttt

SEQ ID NO: 4770265 - DNA, 25 bp, Homo sapien
ctatggcgaatccaatgtggagatc

SEQ ID NO: 4770266 - DNA, 25 bp, Homo sapien
tccattactagaagaaacggtcttc

SEQ ID NO: 4770267 - DNA, 25 bp, Homo sapien
ccttctcagtgctgcgactgaaact

SEQ ID NO: 4770268 - DNA, 25 bp, Homo sapien
ggcttctccgctctcgccctcccct

SEQ ID NO: 4770269 - DNA, 25 bp, Homo sapien
ctcgctgtgacttttcaggcttctc

SEQ ID NO: 4770270 - DNA, 25 bp, Homo sapien
gtggccgccccttctgtgttcttga

SEQ ID NO: 4770271 - DNA, 25 bp, Homo sapien
gttcttgacaaagcatgtttctgcc

SEQ ID NO: 4770272 - DNA, 25 bp, Homo sapien
aagcatgtttctgcctgactgccca

SEQ ID NO: 4770273 - DNA, 25 bp, Homo sapien
cgccccttctgtgttcttgacaaag

SEQ ID NO: 4770274 - DNA, 25 bp, Homo sapien
cctgtgcctttcacgttgtggttaa

SEQ ID NO: 4770275 - DNA, 25 bp, Homo sapien
gagcaaatgtctcccgccagctgtt

SEQ ID NO: 4770276 - DNA, 25 bp, Homo sapien
atttggatatttgctcctgtgcctt

SEQ ID NO: 4770277 - DNA, 25 bp, Homo sapien
caattcatagtgatagggcatctct

SEQ ID NO: 4770278 - DNA, 25 bp, Homo sapien
gcctgcacactttcacctaagggtt

SEQ ID NO: 4770279 - DNA, 25 bp, Homo sapien
ggacagggatctttaggcaaacgga

SEQ ID NO: 4770280 - DNA, 25 bp, Homo sapien
gcatttctacgtttatgagctggca

SEQ ID NO: 4770281 - DNA, 25 bp, Homo sapien
taagggtttgacacccactagtgca

SEQ ID NO: 4770282 - DNA, 25 bp, Homo sapien
ttggtaatatagacacagtggccac

SEQ ID NO: 4770283 - DNA, 25 bp, Homo sapien
cacagtatgctgtattgttatcctg

SEQ ID NO: 4770284 - DNA, 25 bp, Homo sapien
cacagtggccacagtatgctgtatt

SEQ ID NO: 4770285 - DNA, 25 bp, Homo sapien
tgtattgttatcctggttgtgacca

SEQ ID NO: 4770286 - DNA, 25 bp, Homo sapien
ctcaattgctgagggcttgcgtttc

SEQ ID NO: 4770287 - DNA, 25 bp, Homo sapien
caaataagcgtatgcaccctgctcc

SEQ ID NO: 4770288 - DNA, 25 bp, Homo sapien
gtgccgccgacttccactcttggtg

SEQ ID NO: 4770289 - DNA, 25 bp, Homo sapien
gctcaaactgcaccccaaataagcg

SEQ ID NO: 4770290 - DNA, 25 bp, Homo sapien
cacccggagcgtttacaacgggctg

SEQ ID NO: 4770291 - DNA, 25 bp, Homo sapien
ggctggagctgaatacctggatgaa

SEQ ID NO: 4770292 - DNA, 25 bp, Homo sapien
agaggctgttcgtggagaagttcca

SEQ ID NO: 4770293 - DNA, 25 bp, Homo sapien
attaacaagttaggcttccacagtg

SEQ ID NO: 4770294 - DNA, 25 bp, Homo sapien
tccccacaccagttttgcaagatgg

SEQ ID NO: 4770295 - DNA, 25 bp, Homo sapien
gaaacccagtgcctccgagtcatgg

SEQ ID NO: 4770296 - DNA, 25 bp, Homo sapien
gcctccgagtcatggttaaagccca

SEQ ID NO: 4770297 - DNA, 25 bp, Homo sapien
gagtgaacactaatactgcatcagt

SEQ ID NO: 4770298 - DNA, 25 bp, Homo sapien
taaggtggccaaccacaacaactcg

SEQ ID NO: 4770299 - DNA, 25 bp, Homo sapien
gcatcatggacaagaacgcagcact

SEQ ID NO: 4770300 - DNA, 25 bp, Homo sapien
tgcgctcgacccaagcagaagtaaa

SEQ ID NO: 4770301 - DNA, 25 bp, Homo sapien
gccactctccgaaggtcaaggaaga

SEQ ID NO: 4770302 - DNA, 25 bp, Homo sapien
ttaaattcacagcacggaccctggg

SEQ ID NO: 4770303 - DNA, 25 bp, Homo sapien
tatagccctgcagtgtagagcacgc

SEQ ID NO: 4770304 - DNA, 25 bp, Homo sapien
gccttcaggtagcagccagtttgga

SEQ ID NO: 4770305 - DNA, 25 bp, Homo sapien
tatggacagcacacaaagttgggcc

SEQ ID NO: 4770306 - DNA, 25 bp, Homo sapien
acatagagtttggggttaagtgttg

SEQ ID NO: 4770307 - DNA, 25 bp, Homo sapien
ttgggggtgcccattggagggacag

SEQ ID NO: 4770308 - DNA, 25 bp, Homo sapien
tgggggtgcccattggagggacagc

SEQ ID NO: 4770309 - DNA, 25 bp, Homo sapien
cttgtactcccagaagacatagagt

SEQ ID NO: 4770310 - DNA, 25 bp, Homo sapien
ttctgctgacccataccctacaggg

SEQ ID NO: 4770311 - DNA, 25 bp, Homo sapien
gcaaagactccctagaaggccatgt

SEQ ID NO: 4770312 - DNA, 25 bp, Homo sapien
tatccacatgatgcctgaagccaaa

SEQ ID NO: 4770313 - DNA, 25 bp, Homo sapien
taccattggcattagaacttagcag

SEQ ID NO: 4770314 - DNA, 25 bp, Homo sapien
tacaggatgtataggtatgtacacc

SEQ ID NO: 4770315 - DNA, 25 bp, Homo sapien
tatagagggataatttgtacaggat

SEQ ID NO: 4770316 - DNA, 25 bp, Homo sapien
tcagaaccaagtttatgaaacttga

SEQ ID NO: 4770317 - DNA, 25 bp, Homo sapien
tacagcacagaacattagtcttaca

SEQ ID NO: 4770318 - DNA, 25 bp, Homo sapien
tctccactggctgctggagacacag

SEQ ID NO: 4770319 - DNA, 25 bp, Homo sapien
tccactggctgctggagacacagct

SEQ ID NO: 4770320 - DNA, 25 bp, Homo sapien
cactggctgctggagacacagctca

SEQ ID NO: 4770321 - DNA, 25 bp, Homo sapien
actggctgctggagacacagctcac

SEQ ID NO: 4770322 - DNA, 25 bp, Homo sapien
gagacaatgggcaggctgctttcta

SEQ ID NO: 4770323 - DNA, 25 bp, Homo sapien
cagagacaatgggcaggctgctttc

SEQ ID NO: 4770324 - DNA, 25 bp, Homo sapien
agagacaatgggcaggctgctttct

SEQ ID NO: 4770325 - DNA, 25 bp, Homo sapien
tgcagagacaatgggcaggctgctt

SEQ ID NO: 4770326 - DNA, 25 bp, Homo sapien
cacagtgaagacacatggaatgtta

SEQ ID NO: 4770327 - DNA, 25 bp, Homo sapien
accccagacaactggttgaggctgt

SEQ ID NO: 4770328 - DNA, 25 bp, Homo sapien
ccagacaactggttgaggctgtgca

SEQ ID NO: 4770329 - DNA, 25 bp, Homo sapien
cagtgaagacacatggaatgttaac

SEQ ID NO: 4770330 - DNA, 25 bp, Homo sapien
tgccatctccatgaaacctccagga

SEQ ID NO: 4770331 - DNA, 25 bp, Homo sapien
acaccaccgcactcaatgtccccac

SEQ ID NO: 4770332 - DNA, 25 bp, Homo sapien
acagcatttgatgagtcactgctcc

SEQ ID NO: 4770333 - DNA, 25 bp, Homo sapien
caccaccgcactcaatgtccccaca

SEQ ID NO: 4770334 - DNA, 25 bp, Homo sapien
cacactgcacagtttaaccttacac

SEQ ID NO: 4770335 - DNA, 25 bp, Homo sapien
tggaggtgatggcatcccagaagga

SEQ ID NO: 4770336 - DNA, 25 bp, Homo sapien
aggtgatggcatcccagaaggattc

SEQ ID NO: 4770337 - DNA, 25 bp, Homo sapien
acactgcacagtttaaccttacact

SEQ ID NO: 4770338 - DNA, 25 bp, Homo sapien
aaaggacagtgcaggaattaacaac

SEQ ID NO: 4770339 - DNA, 25 bp, Homo sapien
aaaaggacagtgcaggaattaacaa

SEQ ID NO: 4770340 - DNA, 25 bp, Homo sapien
aaggacagtgcaggaattaacaact

SEQ ID NO: 4770341 - DNA, 25 bp, Homo sapien
aggacagtgcaggaattaacaactt

SEQ ID NO: 4770342 - DNA, 25 bp, Homo sapien
ctattttggtgtccccacagcaaga

SEQ ID NO: 4770343 - DNA, 25 bp, Homo sapien
tgaataaatattgaagagaatgtgt

SEQ ID NO: 4770344 - DNA, 25 bp, Homo sapien
aataaatattgaagagaatgtgttc

SEQ ID NO: 4770345 - DNA, 25 bp, Homo sapien
gatgaataaatattgaagagaatgt

SEQ ID NO: 4770346 - DNA, 25 bp, Homo sapien
tgacatgtggactgcatacgtgacg

SEQ ID NO: 4770347 - DNA, 25 bp, Homo sapien
ctgcatacgtgacgggccccaggca

SEQ ID NO: 4770348 - DNA, 25 bp, Homo sapien
tggactgcatacgtgacgggcccca

SEQ ID NO: 4770349 - DNA, 25 bp, Homo sapien
gtaagtgacatgtggactgcatacg

SEQ ID NO: 4770350 - DNA, 25 bp, Homo sapien
cagggatggccaacatcagtaggag

SEQ ID NO: 4770351 - DNA, 25 bp, Homo sapien
gatgaatgtctttcttgacgggaag

SEQ ID NO: 4770352 - DNA, 25 bp, Homo sapien
caaacctacgggattattcagatac

SEQ ID NO: 4770353 - DNA, 25 bp, Homo sapien
ggactatgccccaggtaaagatgaa

SEQ ID NO: 4770354 - DNA, 25 bp, Homo sapien
gtctgcacccactggcaggtccggc

SEQ ID NO: 4770355 - DNA, 25 bp, Homo sapien
taggcacttgtggatagaggtggga

SEQ ID NO: 4770356 - DNA, 25 bp, Homo sapien
agtaggcacttgtggatagaggtgg

SEQ ID NO: 4770357 - DNA, 25 bp, Homo sapien
agtggagactgtttaaggcaggtct

SEQ ID NO: 4770358 - DNA, 25 bp, Homo sapien
gcctggccattgtgcatgcccgtga

SEQ ID NO: 4770359 - DNA, 25 bp, Homo sapien
ggaagtctccgtctttctccagcag

SEQ ID NO: 4770360 - DNA, 25 bp, Homo sapien
atgcccgtgaggacaaaggagcccg

SEQ ID NO: 4770361 - DNA, 25 bp, Homo sapien
caagtctcggcttgcagttcctcca

SEQ ID NO: 4770362 - DNA, 25 bp, Homo sapien
tgccttgcttaacacgggccccaag

SEQ ID NO: 4770363 - DNA, 25 bp, Homo sapien
tgatgcactccacggaggctgcctt

SEQ ID NO: 4770364 - DNA, 25 bp, Homo sapien
tgacacagggctgatgcactccacg

SEQ ID NO: 4770365 - DNA, 25 bp, Homo sapien
ggttcttgagagcatcttcaaaagg

SEQ ID NO: 4770366 - DNA, 25 bp, Homo sapien
tgggatctgctgagtgttgacgtag

SEQ ID NO: 4770367 - DNA, 25 bp, Homo sapien
ggcgtgctgtagatgtccgaggacc

SEQ ID NO: 4770368 - DNA, 25 bp, Homo sapien
tgcttctcccgtgggggccacgtgc

SEQ ID NO: 4770369 - DNA, 25 bp, Homo sapien
gtgttgacgtaggtgggtgcttctc

SEQ ID NO: 4770370 - DNA, 25 bp, Homo sapien
caacaagaaagtgagccccttttct

SEQ ID NO: 4770371 - DNA, 25 bp, Homo sapien
ctgcaacaagaaagtgagccccttt

SEQ ID NO: 4770372 - DNA, 25 bp, Homo sapien
tgcaacaagaaagtgagcccctttt

SEQ ID NO: 4770373 - DNA, 25 bp, Homo sapien
agtgagccccttttcttttacgatg

SEQ ID NO: 4770374 - DNA, 25 bp, Homo sapien
taaacatgttcgcaagaacaccctg

SEQ ID NO: 4770375 - DNA, 25 bp, Homo sapien
gtaaacatgttcgcaagaacaccct

SEQ ID NO: 4770376 - DNA, 25 bp, Homo sapien
aacatgttcgcaagaacaccctgtg

SEQ ID NO: 4770377 - DNA, 25 bp, Homo sapien
aaacatgttcgcaagaacaccctgt

SEQ ID NO: 4770378 - DNA, 25 bp, Homo sapien
ttgctgccagtcttcgccaaaagtg

SEQ ID NO: 4770379 - DNA, 25 bp, Homo sapien
cttccctggtaataagtctgctctt

SEQ ID NO: 4770380 - DNA, 25 bp, Homo sapien
gccagtcttcgccaaaagtgtctcc

SEQ ID NO: 4770381 - DNA, 25 bp, Homo sapien
tggtaataagtctgctcttttcctg

SEQ ID NO: 4770382 - DNA, 25 bp, Homo sapien
agtatgggtggtctgagccatctcc

SEQ ID NO: 4770383 - DNA, 25 bp, Homo sapien
catcttgcttgggatgctgttgtag

SEQ ID NO: 4770384 - DNA, 25 bp, Homo sapien
ttcagtctagtatcaagaaagcccc

SEQ ID NO: 4770385 - DNA, 25 bp, Homo sapien
cctcttccgtccatggctcatccag

SEQ ID NO: 4770386 - DNA, 25 bp, Homo sapien
gcgggaatcttggtaggacactgta

SEQ ID NO: 4770387 - DNA, 25 bp, Homo sapien
gcttgtccgatggagccgatgacat

SEQ ID NO: 4770388 - DNA, 25 bp, Homo sapien
gacactgtaaatattgcttaaaccg

SEQ ID NO: 4770389 - DNA, 25 bp, Homo sapien
taaaccggagctcaaaggcttgtcc

SEQ ID NO: 4770390 - DNA, 25 bp, Homo sapien
ctggtgctacctgggctcctctaca

SEQ ID NO: 4770391 - DNA, 25 bp, Homo sapien
tagagacagacactggtgctacctg

SEQ ID NO: 4770392 - DNA, 25 bp, Homo sapien
gacatgggcctattagagacagaca

SEQ ID NO: 4770393 - DNA, 25 bp, Homo sapien
tgggcctattagagacagacactgg

SEQ ID NO: 4770394 - DNA, 25 bp, Homo sapien
caaaagccgcgttggtccctgcagt

SEQ ID NO: 4770395 - DNA, 25 bp, Homo sapien
tcatgagttgttgttccccagccct

SEQ ID NO: 4770396 - DNA, 25 bp, Homo sapien
ccctggcagtgattagggagacact

SEQ ID NO: 4770397 - DNA, 25 bp, Homo sapien
ccgacaatcgtatgccaaggagggt

SEQ ID NO: 4770398 - DNA, 25 bp, Homo sapien
ggaaggataggagagcaggatatta

SEQ ID NO: 4770399 - DNA, 25 bp, Homo sapien
ctgttctgctcttagcccgtcacac

SEQ ID NO: 4770400 - DNA, 25 bp, Homo sapien
tgctcttagcccgtcacacagaact

SEQ ID NO: 4770401 - DNA, 25 bp, Homo sapien
aggataggagagcaggatattagga

SEQ ID NO: 4770402 - DNA, 25 bp, Homo sapien
cacatcccagcacatgggctggcag

SEQ ID NO: 4770403 - DNA, 25 bp, Homo sapien
cccacatcccagcacatgggctggc

SEQ ID NO: 4770404 - DNA, 25 bp, Homo sapien
tggcagcagagagccctgcctgctg

SEQ ID NO: 4770405 - DNA, 25 bp, Homo sapien
gctggcagcagagagccctgcctgc

SEQ ID NO: 4770406 - DNA, 25 bp, Homo sapien
tatcaccacatgcaaacctgagaga

SEQ ID NO: 4770407 - DNA, 25 bp, Homo sapien
gatcctgattcccatgtcgctggac

SEQ ID NO: 4770408 - DNA, 25 bp, Homo sapien
cacgggacatgtggaatcgatcctg

SEQ ID NO: 4770409 - DNA, 25 bp, Homo sapien
tcaagcaccaaaaatggtggagatc

SEQ ID NO: 4770410 - DNA, 25 bp, Homo sapien
tggcagggcagagtgaagtagctag

SEQ ID NO: 4770411 - DNA, 25 bp, Homo sapien
gcagggcagagtgaagtagctaggg

SEQ ID NO: 4770412 - DNA, 25 bp, Homo sapien
gtgaagtagctaggggtggcttagt

SEQ ID NO: 4770413 - DNA, 25 bp, Homo sapien
cagagtgaagtagctaggggtggct

SEQ ID NO: 4770414 - DNA, 25 bp, Homo sapien
catatgcaacatagtcagttgtgtc

SEQ ID NO: 4770415 - DNA, 25 bp, Homo sapien
tagccacatatgcaacatagtcagt

SEQ ID NO: 4770416 - DNA, 25 bp, Homo sapien
ctctgcgattaacagggtccttagc

SEQ ID NO: 4770417 - DNA, 25 bp, Homo sapien
taacagggtccttagccacatatgc

SEQ ID NO: 4770418 - DNA, 25 bp, Homo sapien
caagaccacaccagtgtagcattct

SEQ ID NO: 4770419 - DNA, 25 bp, Homo sapien
aacaagaccacaccagtgtagcatt

SEQ ID NO: 4770420 - DNA, 25 bp, Homo sapien
caacaagaccacaccagtgtagcat

SEQ ID NO: 4770421 - DNA, 25 bp, Homo sapien
ccaacaagaccacaccagtgtagca

SEQ ID NO: 4770422 - DNA, 25 bp, Homo sapien
ggcaggagtgatgcccagaatggcc

SEQ ID NO: 4770423 - DNA, 25 bp, Homo sapien
agattcgtggcccaattgtactgtc

SEQ ID NO: 4770424 - DNA, 25 bp, Homo sapien
gcctctccacggcagctcgtgctgg

SEQ ID NO: 4770425 - DNA, 25 bp, Homo sapien
ttccctgttgctgagattcgtggcc

SEQ ID NO: 4770426 - DNA, 25 bp, Homo sapien
tggtaagaacgccagtgcctccagg

SEQ ID NO: 4770427 - DNA, 25 bp, Homo sapien
ctggtaagaacgccagtgcctccag

SEQ ID NO: 4770428 - DNA, 25 bp, Homo sapien
aagaacgccagtgcctccaggattt

SEQ ID NO: 4770429 - DNA, 25 bp, Homo sapien
gtaagaacgccagtgcctccaggat

SEQ ID NO: 4770430 - DNA, 25 bp, Homo sapien
aaataaaacgatggccaagaagatc

SEQ ID NO: 4770431 - DNA, 25 bp, Homo sapien
aaaataaaacgatggccaagaagat

SEQ ID NO: 4770432 - DNA, 25 bp, Homo sapien
tggaccgcatgtggtgattcgctat

SEQ ID NO: 4770433 - DNA, 25 bp, Homo sapien
gatggaccgcatgtggtgattcgct

SEQ ID NO: 4770434 - DNA, 25 bp, Homo sapien
gaccgcatgtggtgattcgctatga

SEQ ID NO: 4770435 - DNA, 25 bp, Homo sapien
ggagatggaccgcatgtggtgattc

SEQ ID NO: 4770436 - DNA, 25 bp, Homo sapien
gcccaaaacaagaaacgagatgtgc

SEQ ID NO: 4770437 - DNA, 25 bp, Homo sapien
gctgttatcgccctttccacatttt

SEQ ID NO: 4770438 - DNA, 25 bp, Homo sapien
tgttggcaggcattacaaattgaca

SEQ ID NO: 4770439 - DNA, 25 bp, Homo sapien
actgtttgttggcaggcattacaaa

SEQ ID NO: 4770440 - DNA, 25 bp, Homo sapien
tcatgaacagcgcagtcttggacca

SEQ ID NO: 4770441 - DNA, 25 bp, Homo sapien
tagcagagctgcgatctaacacggg

SEQ ID NO: 4770442 - DNA, 25 bp, Homo sapien
cagttgggcccaaaagtcagctgga

SEQ ID NO: 4770443 - DNA, 25 bp, Homo sapien
ccagaatagtgtccgtgaagcctcg

SEQ ID NO: 4770444 - DNA, 25 bp, Homo sapien
gacaatgtcggaatcaggtagagta

SEQ ID NO: 4770445 - DNA, 25 bp, Homo sapien
tatatagagaggtcccatccgagct

SEQ ID NO: 4770446 - DNA, 25 bp, Homo sapien
tagtaacataaaggtcactgcgggc

SEQ ID NO: 4770447 - DNA, 25 bp, Homo sapien
cactgcgggcatccctggtgacaat

SEQ ID NO: 4770448 - DNA, 25 bp, Homo sapien
caaacacctatttttccagctaaag

SEQ ID NO: 4770449 - DNA, 25 bp, Homo sapien
tagacattgtgcaggaacgcaacca

SEQ ID NO: 4770450 - DNA, 25 bp, Homo sapien
cagaagtgccttgttggtagctaaa

SEQ ID NO: 4770451 - DNA, 25 bp, Homo sapien
gctattccatagacaacaccacttc

SEQ ID NO: 4770452 - DNA, 25 bp, Homo sapien
tccggagttcgcaggttcagactgg

SEQ ID NO: 4770453 - DNA, 25 bp, Homo sapien
cgcaaactggaggttgctctttccc

SEQ ID NO: 4770454 - DNA, 25 bp, Homo sapien
ttcagactggccgtggagatggtca

SEQ ID NO: 4770455 - DNA, 25 bp, Homo sapien
cagagagatgctcattcccgcaaac

SEQ ID NO: 4770456 - DNA, 25 bp, Homo sapien
ttgaaggctcccttcgcaccaggca

SEQ ID NO: 4770457 - DNA, 25 bp, Homo sapien
ttcacagacgcggctgatggcttcc

SEQ ID NO: 4770458 - DNA, 25 bp, Homo sapien
tctcttcttgaaggctcccttcgca

SEQ ID NO: 4770459 - DNA, 25 bp, Homo sapien
ttcttgaaggctcccttcgcaccag

SEQ ID NO: 4770460 - DNA, 25 bp, Homo sapien
tgaccccttggtgaggtagggatga

SEQ ID NO: 4770461 - DNA, 25 bp, Homo sapien
tcctgaccccttggtgaggtaggga

SEQ ID NO: 4770462 - DNA, 25 bp, Homo sapien
ctcctgaccccttggtgaggtaggg

SEQ ID NO: 4770463 - DNA, 25 bp, Homo sapien
cctgaccccttggtgaggtagggat

SEQ ID NO: 4770464 - DNA, 25 bp, Homo sapien
gtcagcaaagaagcctcaatgccaa

SEQ ID NO: 4770465 - DNA, 25 bp, Homo sapien
tctttcatcttggggacggcctctc

SEQ ID NO: 4770466 - DNA, 25 bp, Homo sapien
cctctctctttttctcatgggtcat

SEQ ID NO: 4770467 - DNA, 25 bp, Homo sapien
cggcctctctctttttctcatgggt

SEQ ID NO: 4770468 - DNA, 25 bp, Homo sapien
acggcctctctctttttctcatggg

SEQ ID NO: 4770469 - DNA, 25 bp, Homo sapien
gaagcagcaggaaccattctgggtg

SEQ ID NO: 4770470 - DNA, 25 bp, Homo sapien
tcattaccacgacaaagggatggaa

SEQ ID NO: 4770471 - DNA, 25 bp, Homo sapien
tcagggaaagaggtacaatgcaatc

SEQ ID NO: 4770472 - DNA, 25 bp, Homo sapien
tgcaatcagtagaaaggtcaccaga

SEQ ID NO: 4770473 - DNA, 25 bp, Homo sapien
aatccacgcaggtgttcaactgctt

SEQ ID NO: 4770474 - DNA, 25 bp, Homo sapien
caatccacgcaggtgttcaactgct

SEQ ID NO: 4770475 - DNA, 25 bp, Homo sapien
tcaatccacgcaggtgttcaactgc

SEQ ID NO: 4770476 - DNA, 25 bp, Homo sapien
agcgcccagaaggtgctcgctctca

SEQ ID NO: 4770477 - DNA, 25 bp, Homo sapien
gcgcccagaaggtgctcgctctcat

SEQ ID NO: 4770478 - DNA, 25 bp, Homo sapien
tggagaactcggcccaagtcgtaca

SEQ ID NO: 4770479 - DNA, 25 bp, Homo sapien
ggagaactcggcccaagtcgtacac

SEQ ID NO: 4770480 - DNA, 25 bp, Homo sapien
ctggagaactcggcccaagtcgtac

SEQ ID NO: 4770481 - DNA, 25 bp, Homo sapien
gccaggtcctggggataggaaatcc

SEQ ID NO: 4770482 - DNA, 25 bp, Homo sapien
ccaggtcctggggataggaaatcct

SEQ ID NO: 4770483 - DNA, 25 bp, Homo sapien
ctgcccttcttcctcaatgtccatc

SEQ ID NO: 4770484 - DNA, 25 bp, Homo sapien
ttcctcaatgtccatcttccactcc

SEQ ID NO: 4770485 - DNA, 25 bp, Homo sapien
taaatgcagcctgtcttaatactgc

SEQ ID NO: 4770486 - DNA, 25 bp, Homo sapien
gtccatgcaacccagaaatgtctga

SEQ ID NO: 4770487 - DNA, 25 bp, Homo sapien
acttgtgattaaaggtccatgcaac

SEQ ID NO: 4770488 - DNA, 25 bp, Homo sapien
gattaaaggtccatgcaacccagaa

SEQ ID NO: 4770489 - DNA, 25 bp, Homo sapien
tgttggaagccagaagtgacctgag

SEQ ID NO: 4770490 - DNA, 25 bp, Homo sapien
tccaagtgaactcttagaagagaag

SEQ ID NO: 4770491 - DNA, 25 bp, Homo sapien
gagagctgagttttgccaagccttc

SEQ ID NO: 4770492 - DNA, 25 bp, Homo sapien
acgcagttgcgaagctgtgctgaga

SEQ ID NO: 4770493 - DNA, 25 bp, Homo sapien
atctccaggctcctgctcccttctt

SEQ ID NO: 4770494 - DNA, 25 bp, Homo sapien
aacatcttcaggcatctccaggctc

SEQ ID NO: 4770495 - DNA, 25 bp, Homo sapien
tccaggctcctgctcccttcttcat

SEQ ID NO: 4770496 - DNA, 25 bp, Homo sapien
caacatcttcaggcatctccaggct

SEQ ID NO: 4770497 - DNA, 25 bp, Homo sapien
cagggcttgtttgctcttttgttca

SEQ ID NO: 4770498 - DNA, 25 bp, Homo sapien
cagactcaaagccatgctgaatgct

SEQ ID NO: 4770499 - DNA, 25 bp, Homo sapien
taacactcataccaagatcacatga

SEQ ID NO: 4770500 - DNA, 25 bp, Homo sapien
gattactcagctaacttctaagcaa

SEQ ID NO: 4770501 - DNA, 25 bp, Homo sapien
gttccttcatttatacctatgcctc

SEQ ID NO: 4770502 - DNA, 25 bp, Homo sapien
ttattaaggtaagcaagcaacactc

SEQ ID NO: 4770503 - DNA, 25 bp, Homo sapien
cattgttttattaaggtaagcaagc

SEQ ID NO: 4770504 - DNA, 25 bp, Homo sapien
acactctgaactgcaatatacacat

SEQ ID NO: 4770505 - DNA, 25 bp, Homo sapien
aagtcaagagacctcattgagcgca

SEQ ID NO: 4770506 - DNA, 25 bp, Homo sapien
cattgagcgcagaacttcaatgcac

SEQ ID NO: 4770507 - DNA, 25 bp, Homo sapien
tgttcttgtactgaagtcaagagac

SEQ ID NO: 4770508 - DNA, 25 bp, Homo sapien
gcagaacttcaatgcaccccaagta

SEQ ID NO: 4770509 - DNA, 25 bp, Homo sapien
gtacagaagagttgtaaagaataag

SEQ ID NO: 4770510 - DNA, 25 bp, Homo sapien
agtacagaagagttgtaaagaataa

SEQ ID NO: 4770511 - DNA, 25 bp, Homo sapien
tacagaagagttgtaaagaataagc

SEQ ID NO: 4770512 - DNA, 25 bp, Homo sapien
cttacaggatgtgcgagtgtcaccc

SEQ ID NO: 4770513 - DNA, 25 bp, Homo sapien
gggctgacccatgtgaccaataaaa

SEQ ID NO: 4770514 - DNA, 25 bp, Homo sapien
gaatgcatgtcagtgcagcccagca

SEQ ID NO: 4770515 - DNA, 25 bp, Homo sapien
tcttacgtacgacaaggaagctgag

SEQ ID NO: 4770516 - DNA, 25 bp, Homo sapien
gagacaagatgcagactctccccgg

SEQ ID NO: 4770517 - DNA, 25 bp, Homo sapien
caggccaaagcgttctcacagctag

SEQ ID NO: 4770518 - DNA, 25 bp, Homo sapien
tgactgtggtcctgtaagtctcagg

SEQ ID NO: 4770519 - DNA, 25 bp, Homo sapien
gccctgcagataccctgactgtggt

SEQ ID NO: 4770520 - DNA, 25 bp, Homo sapien
caaggccgagactgggagtcctcca

SEQ ID NO: 4770521 - DNA, 25 bp, Homo sapien
gaggctgtgagccaacagcatcagg

SEQ ID NO: 4770522 - DNA, 25 bp, Homo sapien
tccagggagaggctgtgagccaaca

SEQ ID NO: 4770523 - DNA, 25 bp, Homo sapien
tcaaggccgagactgggagtcctcc

SEQ ID NO: 4770524 - DNA, 25 bp, Homo sapien
tctttttctgcctattcaatagacg

SEQ ID NO: 4770525 - DNA, 25 bp, Homo sapien
gaaggccaagttccagagtttgaag

SEQ ID NO: 4770526 - DNA, 25 bp, Homo sapien
gacctcagagtagagagcacttctg

SEQ ID NO: 4770527 - DNA, 25 bp, Homo sapien
taaaatgaagtttgtcagaatgacc

SEQ ID NO: 4770528 - DNA, 25 bp, Homo sapien
gctgaggtatatccggcaccttctc

SEQ ID NO: 4770529 - DNA, 25 bp, Homo sapien
ccaactctcctcacaaagacaaaga

SEQ ID NO: 4770530 - DNA, 25 bp, Homo sapien
ggtatatccggcaccttctcaccaa

SEQ ID NO: 4770531 - DNA, 25 bp, Homo sapien
aggagggctgaggtatatccggcac

SEQ ID NO: 4770532 - DNA, 25 bp, Homo sapien
tctgtgctgtgatgtgctctaagaa

SEQ ID NO: 4770533 - DNA, 25 bp, Homo sapien
ctgtgctgtgatgtgctctaagaag

SEQ ID NO: 4770534 - DNA, 25 bp, Homo sapien
gctgtggagaaggtcatcgaccgat

SEQ ID NO: 4770535 - DNA, 25 bp, Homo sapien
tgtcaccgagtcattcctgaagcgg

SEQ ID NO: 4770536 - DNA, 25 bp, Homo sapien
ttgaccacgtaggtgactccgggcc

SEQ ID NO: 4770537 - DNA, 25 bp, Homo sapien
tcgccggacaccaagtagggagccg

SEQ ID NO: 4770538 - DNA, 25 bp, Homo sapien
cccctccgtgggctcgctgcatccg

SEQ ID NO: 4770539 - DNA, 25 bp, Homo sapien
ctccgtgggctcgctgcatccgccc

SEQ ID NO: 4770540 - DNA, 25 bp, Homo sapien
tccgtgggctcgctgcatccgcccg

SEQ ID NO: 4770541 - DNA, 25 bp, Homo sapien
tgtgccaaaggtaaatccaatccag

SEQ ID NO: 4770542 - DNA, 25 bp, Homo sapien
ccttctggagaacgagagcagagca

SEQ ID NO: 4770543 - DNA, 25 bp, Homo sapien
tctgtgtgagcctgtaaaagtgtct

SEQ ID NO: 4770544 - DNA, 25 bp, Homo sapien
gacccttctcaacaaaggctcggtg

SEQ ID NO: 4770545 - DNA, 25 bp, Homo sapien
gagtcttgaaccctgctctatggag

SEQ ID NO: 4770546 - DNA, 25 bp, Homo sapien
aaggctttcgctgtccccagaggtc

SEQ ID NO: 4770547 - DNA, 25 bp, Homo sapien
tatggagcagagtttaatgagcgcc

SEQ ID NO: 4770548 - DNA, 25 bp, Homo sapien
tcaggctcgggcttgcaagtaaaat

SEQ ID NO: 4770549 - DNA, 25 bp, Homo sapien
ttattcgtatacggccaccatcaga

SEQ ID NO: 4770550 - DNA, 25 bp, Homo sapien
tatacggccaccatcagaattgccc

SEQ ID NO: 4770551 - DNA, 25 bp, Homo sapien
atacggccaccatcagaattgccct

SEQ ID NO: 4770552 - DNA, 25 bp, Homo sapien
gaggccatctcattgatgcttgagg

SEQ ID NO: 4770553 - DNA, 25 bp, Homo sapien
ttacaaattatgtttctaacggtca

SEQ ID NO: 4770554 - DNA, 25 bp, Homo sapien
caggtgggattgagatgactttaaa

SEQ ID NO: 4770555 - DNA, 25 bp, Homo sapien
gcacaggtgggattgagatgacttt

SEQ ID NO: 4770556 - DNA, 25 bp, Homo sapien
gtttctaacggtcaaagccctgaga

SEQ ID NO: 4770557 - DNA, 25 bp, Homo sapien
tctcgttcatgcagcagggtcacca

SEQ ID NO: 4770558 - DNA, 25 bp, Homo sapien
cagcatctggtgtagcctcatctcg

SEQ ID NO: 4770559 - DNA, 25 bp, Homo sapien
gatgggagatttccctggtacagca

SEQ ID NO: 4770560 - DNA, 25 bp, Homo sapien
tatcacagtggtgggccacttgcca

SEQ ID NO: 4770561 - DNA, 25 bp, Homo sapien
tgaccccatccatggcaatctttgt

SEQ ID NO: 4770562 - DNA, 25 bp, Homo sapien
gaccccatccatggcaatctttgtg

SEQ ID NO: 4770563 - DNA, 25 bp, Homo sapien
tggcaatctttgtgaacgttggcag

SEQ ID NO: 4770564 - DNA, 25 bp, Homo sapien
aatctttgtgaacgttggcagctgc

SEQ ID NO: 4770565 - DNA, 25 bp, Homo sapien
tggtaataggctcaagaagtttccc

SEQ ID NO: 4770566 - DNA, 25 bp, Homo sapien
tagacataatattcgtagttggcag

SEQ ID NO: 4770567 - DNA, 25 bp, Homo sapien
tcaaaagtgatttatgaaccaccat

SEQ ID NO: 4770568 - DNA, 25 bp, Homo sapien
gatataatggtgatgaattcccaca

SEQ ID NO: 4770569 - DNA, 25 bp, Homo sapien
actccatagacagaacagccgaggg

SEQ ID NO: 4770570 - DNA, 25 bp, Homo sapien
cgctggagcatttcgcataaaatga

SEQ ID NO: 4770571 - DNA, 25 bp, Homo sapien
cactagcctgtactgcgctggagca

SEQ ID NO: 4770572 - DNA, 25 bp, Homo sapien
tataaatgtccttagccggcctgtc

SEQ ID NO: 4770573 - DNA, 25 bp, Homo sapien
cagcctctagtctggaaactttgtc

SEQ ID NO: 4770574 - DNA, 25 bp, Homo sapien
tagcattgttattcttggccgcagc

SEQ ID NO: 4770575 - DNA, 25 bp, Homo sapien
caagctttccatggcttgggtctgc

SEQ ID NO: 4770576 - DNA, 25 bp, Homo sapien
aacattaggttaggctacagaaagc

SEQ ID NO: 4770577 - DNA, 25 bp, Homo sapien
taaatccccttatccaggaattagc

SEQ ID NO: 4770578 - DNA, 25 bp, Homo sapien
ctacttttcaaagtggacctaggct

SEQ ID NO: 4770579 - DNA, 25 bp, Homo sapien
agtggacctaggctcctggctcgag

SEQ ID NO: 4770580 - DNA, 25 bp, Homo sapien
ttttcaaagtggacctaggctcctg

SEQ ID NO: 4770581 - DNA, 25 bp, Homo sapien
tcaaagtggacctaggctcctggct

SEQ ID NO: 4770582 - DNA, 25 bp, Homo sapien
aagggatcacgaggagcgccatcac

SEQ ID NO: 4770583 - DNA, 25 bp, Homo sapien
gggatacaagggatcacgaggagcg

SEQ ID NO: 4770584 - DNA, 25 bp, Homo sapien
atacaagggatcacgaggagcgcca

SEQ ID NO: 4770585 - DNA, 25 bp, Homo sapien
ggatcacgaggagcgccatcaccgt

SEQ ID NO: 4770586 - DNA, 25 bp, Homo sapien
tcaaatccggatcgttgggactgcg

SEQ ID NO: 4770587 - DNA, 25 bp, Homo sapien
gcggcgggctgtcggattcaaatcc

SEQ ID NO: 4770588 - DNA, 25 bp, Homo sapien
caagcagatctactactcggacaag

SEQ ID NO: 4770589 - DNA, 25 bp, Homo sapien
gaacactacgagtaccggtgggcgc

SEQ ID NO: 4770590 - DNA, 25 bp, Homo sapien
gcatacaaggactagtagctactac

SEQ ID NO: 4770591 - DNA, 25 bp, Homo sapien
taaagcaacttctggagcatacaag

SEQ ID NO: 4770592 - DNA, 25 bp, Homo sapien
gctttacagtcaaggactaggctgg

SEQ ID NO: 4770593 - DNA, 25 bp, Homo sapien
gctagtgttgagtaagaggaaaccc

SEQ ID NO: 4770594 - DNA, 25 bp, Homo sapien
tctttcatccatacctgtgcatgag

SEQ ID NO: 4770595 - DNA, 25 bp, Homo sapien
gcaactgcaagtaggttactgtaag

SEQ ID NO: 4770596 - DNA, 25 bp, Homo sapien
acagagctcagttaaatgcaactgc

SEQ ID NO: 4770597 - DNA, 25 bp, Homo sapien
taagtgcctgtttgagtttactgaa

SEQ ID NO: 4770598 - DNA, 25 bp, Homo sapien
agatccaagactcccgcaagctacg

SEQ ID NO: 4770599 - DNA, 25 bp, Homo sapien
aaggcagatccaagactcccgcaag

SEQ ID NO: 4770600 - DNA, 25 bp, Homo sapien
ccaagactcccgcaagctacggtgg

SEQ ID NO: 4770601 - DNA, 25 bp, Homo sapien
gactcccgcaagctacggtgggtcc

SEQ ID NO: 4770602 - DNA, 25 bp, Homo sapien
ggcggaaacgctttgtctgtccggc

SEQ ID NO: 4770603 - DNA, 25 bp, Homo sapien
aaagggcgggctctgtcgctttgct

SEQ ID NO: 4770604 - DNA, 25 bp, Homo sapien
tcgctttgctgtgacgcacttcctg

SEQ ID NO: 4770605 - DNA, 25 bp, Homo sapien
ttgtctgtccggcaagccgacggcc

SEQ ID NO: 4770606 - DNA, 25 bp, Homo sapien
tgaaggggcttcagtgcaaaggccc

SEQ ID NO: 4770607 - DNA, 25 bp, Homo sapien
ctctgcagacaggtgtgatgtgcag

SEQ ID NO: 4770608 - DNA, 25 bp, Homo sapien
tgtgcagatgaggaacgactgggtc

SEQ ID NO: 4770609 - DNA, 25 bp, Homo sapien
acgactgggtcgtgctgatggaaat

SEQ ID NO: 4770610 - DNA, 25 bp, Homo sapien
catttagcagtcctgggatggtccc

SEQ ID NO: 4770611 - DNA, 25 bp, Homo sapien
cctggtggctacttaacaatgctca

SEQ ID NO: 4770612 - DNA, 25 bp, Homo sapien
tatggcaccaaaaagatgggcaaca

SEQ ID NO: 4770613 - DNA, 25 bp, Homo sapien
aatgcagttactacatgactcagcg

SEQ ID NO: 4770614 - DNA, 25 bp, Homo sapien
tttctccagaagtacacaagtggtc

SEQ ID NO: 4770615 - DNA, 25 bp, Homo sapien
catgccactgtaatcttcacggtga

SEQ ID NO: 4770616 - DNA, 25 bp, Homo sapien
aatcttcacggtgaaggaactggag

SEQ ID NO: 4770617 - DNA, 25 bp, Homo sapien
ttaacatgccactgtaatcttcacg

SEQ ID NO: 4770618 - DNA, 25 bp, Homo sapien
ccactgtaatcttcacggtgaagga

SEQ ID NO: 4770619 - DNA, 25 bp, Homo sapien
aaagggacatcttcctttgccatct

SEQ ID NO: 4770620 - DNA, 25 bp, Homo sapien
ctgggtcaaagggacatcttccttt

SEQ ID NO: 4770621 - DNA, 25 bp, Homo sapien
caaccatgacggatgtgtagctgtg

SEQ ID NO: 4770622 - DNA, 25 bp, Homo sapien
atgtgtagctgtgtgctgggtcaaa

SEQ ID NO: 4770623 - DNA, 25 bp, Homo sapien
gggaagtggcgctgagtggctgcag

SEQ ID NO: 4770624 - DNA, 25 bp, Homo sapien
caggccggctggaatgcgttggtcc

SEQ ID NO: 4770625 - DNA, 25 bp, Homo sapien
cacacacgtaaagggaagtggcgct

SEQ ID NO: 4770626 - DNA, 25 bp, Homo sapien
cacccggatgtagttgaggcactct

SEQ ID NO: 4770627 - DNA, 25 bp, Homo sapien
tttgtcttctgagaccttccaatac

SEQ ID NO: 4770628 - DNA, 25 bp, Homo sapien
cccttttctgcacattttgcttttt

SEQ ID NO: 4770629 - DNA, 25 bp, Homo sapien
ttttgatttccccttttctgcacat

SEQ ID NO: 4770630 - DNA, 25 bp, Homo sapien
tgtcttctgagaccttccaatacac

SEQ ID NO: 4770631 - DNA, 25 bp, Homo sapien
tagacttcgctggtcaaaggccacc

SEQ ID NO: 4770632 - DNA, 25 bp, Homo sapien
tgagaaataagctagaccctggaga

SEQ ID NO: 4770633 - DNA, 25 bp, Homo sapien
ggcagaaaatgtccagcgtgaacct

SEQ ID NO: 4770634 - DNA, 25 bp, Homo sapien
ggacctctacggaccaaaatagctg

SEQ ID NO: 4770635 - DNA, 25 bp, Homo sapien
agcaaggctgagtagttgtagatgt

SEQ ID NO: 4770636 - DNA, 25 bp, Homo sapien
tgagtgcgttcacagcgaagaccgc

SEQ ID NO: 4770637 - DNA, 25 bp, Homo sapien
tcatgctgcttctcggagatgttga

SEQ ID NO: 4770638 - DNA, 25 bp, Homo sapien
cctcccgggcacctatgtacaaggt

SEQ ID NO: 4770639 - DNA, 25 bp, Homo sapien
ggctcatgaaactgcaccaggtgca

SEQ ID NO: 4770640 - DNA, 25 bp, Homo sapien
ctggctcatgaaactgcaccaggtg

SEQ ID NO: 4770641 - DNA, 25 bp, Homo sapien
gctcatgaaactgcaccaggtgcac

SEQ ID NO: 4770642 - DNA, 25 bp, Homo sapien
tcatgaaactgcaccaggtgcacct

SEQ ID NO: 4770643 - DNA, 25 bp, Homo sapien
ggcgggtgctttggcagcacgccgc

SEQ ID NO: 4770644 - DNA, 25 bp, Homo sapien
gctttggcagcacgccgcgaacatt

SEQ ID NO: 4770645 - DNA, 25 bp, Homo sapien
tgttcttctcaggcgcctggagcag

SEQ ID NO: 4770646 - DNA, 25 bp, Homo sapien
ttcttctcaggcgcctggagcagac

SEQ ID NO: 4770647 - DNA, 25 bp, Homo sapien
caaatcaggaggtctgcacgagcct

SEQ ID NO: 4770648 - DNA, 25 bp, Homo sapien
tacgagggagggaagcttcctgtca

SEQ ID NO: 4770649 - DNA, 25 bp, Homo sapien
gagcagagaatccaacagatcacat

SEQ ID NO: 4770650 - DNA, 25 bp, Homo sapien
gcacgagccttgctgagtatctaca

SEQ ID NO: 4770651 - DNA, 25 bp, Homo sapien
agtggggtccctgtcccgttctcag

SEQ ID NO: 4770652 - DNA, 25 bp, Homo sapien
tgatccggggtatgggtgcaaatgc

SEQ ID NO: 4770653 - DNA, 25 bp, Homo sapien
ctgtgctcccaggtgatccggggta

SEQ ID NO: 4770654 - DNA, 25 bp, Homo sapien
ctcccaggtgatccggggtatgggt

SEQ ID NO: 4770655 - DNA, 25 bp, Homo sapien
gtgatccggggtatgggtgcaaatg

SEQ ID NO: 4770656 - DNA, 25 bp, Homo sapien
tgtcccaaacatcactgcaagggcc

SEQ ID NO: 4770657 - DNA, 25 bp, Homo sapien
atgagcagccccctaatgggggtgc

SEQ ID NO: 4770658 - DNA, 25 bp, Homo sapien
caaacatcactgcaagggccatgag

SEQ ID NO: 4770659 - DNA, 25 bp, Homo sapien
tcccaaacatcactgcaagggccat

SEQ ID NO: 4770660 - DNA, 25 bp, Homo sapien
gcgcggtccctgagaatccacattt

SEQ ID NO: 4770661 - DNA, 25 bp, Homo sapien
ctggagctcgtgaacagcgcggtcc

SEQ ID NO: 4770662 - DNA, 25 bp, Homo sapien
ggtgtgctattgcagatgcggctca

SEQ ID NO: 4770663 - DNA, 25 bp, Homo sapien
caccgcaatgtcaaagcccacttga

SEQ ID NO: 4770664 - DNA, 25 bp, Homo sapien
ccgggtccatctgctgaggaatacg

SEQ ID NO: 4770665 - DNA, 25 bp, Homo sapien
agcccaacggacacaggaaagcgaa

SEQ ID NO: 4770666 - DNA, 25 bp, Homo sapien
gagagtcttagaagtggacagccca

SEQ ID NO: 4770667 - DNA, 25 bp, Homo sapien
gtccatctgctgaggaatacggaag

SEQ ID NO: 4770668 - DNA, 25 bp, Homo sapien
aatttcagaccagagttgagccagg

SEQ ID NO: 4770669 - DNA, 25 bp, Homo sapien
ttgaatttcagaccagagttgagcc

SEQ ID NO: 4770670 - DNA, 25 bp, Homo sapien
atttgaatttcagaccagagttgag

SEQ ID NO: 4770671 - DNA, 25 bp, Homo sapien
gaatttcagaccagagttgagccag

SEQ ID NO: 4770672 - DNA, 25 bp, Homo sapien
gccggccctgcgagttctttcagaa

SEQ ID NO: 4770673 - DNA, 25 bp, Homo sapien
tgagaagcaaaggtatcccgctggg

SEQ ID NO: 4770674 - DNA, 25 bp, Homo sapien
gggtgttacattaaggacctcactc

SEQ ID NO: 4770675 - DNA, 25 bp, Homo sapien
cagtggctccataatcattgatggg

SEQ ID NO: 4770676 - DNA, 25 bp, Homo sapien
caaaagaagagagtaagctttctgg

SEQ ID NO: 4770677 - DNA, 25 bp, Homo sapien
tgtatcttatgcctcttgaaacttt

SEQ ID NO: 4770678 - DNA, 25 bp, Homo sapien
cagtcatttctagaaagacgtcttc

SEQ ID NO: 4770679 - DNA, 25 bp, Homo sapien
atcttatgcctcttgaaactttcca

SEQ ID NO: 4770680 - DNA, 25 bp, Homo sapien
ctagaaagacgtcttcagaaatctt

SEQ ID NO: 4770681 - DNA, 25 bp, Homo sapien
taaactgtgcatccacttaaactca

SEQ ID NO: 4770682 - DNA, 25 bp, Homo sapien
gcaacactcctagaaaggcactgaa

SEQ ID NO: 4770683 - DNA, 25 bp, Homo sapien
cacttaaactcagcaacactcctag

SEQ ID NO: 4770684 - DNA, 25 bp, Homo sapien
gcatccacttaaactcagcaacact

SEQ ID NO: 4770685 - DNA, 25 bp, Homo sapien
caggacccgaccaggtgtactttct

SEQ ID NO: 4770686 - DNA, 25 bp, Homo sapien
tgcacaataagccattccagttagc

SEQ ID NO: 4770687 - DNA, 25 bp, Homo sapien
caataagccattccagttagcagag

SEQ ID NO: 4770688 - DNA, 25 bp, Homo sapien
cacaataagccattccagttagcag

SEQ ID NO: 4770689 - DNA, 25 bp, Homo sapien
gggttctcatctcaattgcctccaa

SEQ ID NO: 4770690 - DNA, 25 bp, Homo sapien
caaatgtcagcaggtctgggttctc

SEQ ID NO: 4770691 - DNA, 25 bp, Homo sapien
ctttaataaagacccagaactgctc

SEQ ID NO: 4770692 - DNA, 25 bp, Homo sapien
tgaacaccagcatccttgtgtcctg

SEQ ID NO: 4770693 - DNA, 25 bp, Homo sapien
gcccttctcacctgcgtgtgtcact

SEQ ID NO: 4770694 - DNA, 25 bp, Homo sapien
tgctgctgtccgtctgaccaccgct

SEQ ID NO: 4770695 - DNA, 25 bp, Homo sapien
cttctcacctgcgtgtgtcactgag

SEQ ID NO: 4770696 - DNA, 25 bp, Homo sapien
tgagacgctggctccaacacccagg

SEQ ID NO: 4770697 - DNA, 25 bp, Homo sapien
gagacatggtttgctgcgccgtacg

SEQ ID NO: 4770698 - DNA, 25 bp, Homo sapien
tgaacaaggagcttaaacagggcca

SEQ ID NO: 4770699 - DNA, 25 bp, Homo sapien
tctaaagatcatcgcagctggccgg

SEQ ID NO: 4770700 - DNA, 25 bp, Homo sapien
tatgggctggcacctgaaactctct

SEQ ID NO: 4770701 - DNA, 25 bp, Homo sapien
ttgaaacgccttctaacacagacac

SEQ ID NO: 4770702 - DNA, 25 bp, Homo sapien
ctcccctagcttggtgtggctgaca

SEQ ID NO: 4770703 - DNA, 25 bp, Homo sapien
ctatttccacaccagatctagcagg

SEQ ID NO: 4770704 - DNA, 25 bp, Homo sapien
gcagtaggagtcacaacccggcttt

SEQ ID NO: 4770705 - DNA, 25 bp, Homo sapien
gagaaaacgggtagcctgggtcata

SEQ ID NO: 4770706 - DNA, 25 bp, Homo sapien
aggcagcccgatcccaacagttggg

SEQ ID NO: 4770707 - DNA, 25 bp, Homo sapien
tgcacagcacaaggacatgtcccat

SEQ ID NO: 4770708 - DNA, 25 bp, Homo sapien
gaaactgaacccatgaagtgacggg

SEQ ID NO: 4770709 - DNA, 25 bp, Homo sapien
ggctgccatgacatgcggactcgca

SEQ ID NO: 4770710 - DNA, 25 bp, Homo sapien
aacaatatcacttcatcacgctgtg

SEQ ID NO: 4770711 - DNA, 25 bp, Homo sapien
ggactcgcacccacatgctgtctgt

SEQ ID NO: 4770712 - DNA, 25 bp, Homo sapien
ttcagacaacaagcagccccttcgt

SEQ ID NO: 4770713 - DNA, 25 bp, Homo sapien
ccaatatgaactcctaggcgcacca

SEQ ID NO: 4770714 - DNA, 25 bp, Homo sapien
tgggagcaaaggtgtggcagcccag

SEQ ID NO: 4770715 - DNA, 25 bp, Homo sapien
gacctccctgaacacggggcatggg

SEQ ID NO: 4770716 - DNA, 25 bp, Homo sapien
cagatcccgaagacccctagggtcg

SEQ ID NO: 4770717 - DNA, 25 bp, Homo sapien
ggcagacgccgagacgccgacactt

SEQ ID NO: 4770718 - DNA, 25 bp, Homo sapien
aggcagacgccgagacgccgacact

SEQ ID NO: 4770719 - DNA, 25 bp, Homo sapien
tcaggcagacgccgagacgccgaca

SEQ ID NO: 4770720 - DNA, 25 bp, Homo sapien
gcagacgccgagacgccgacactta

SEQ ID NO: 4770721 - DNA, 25 bp, Homo sapien
atttcagcacatggtttctttccac

SEQ ID NO: 4770722 - DNA, 25 bp, Homo sapien
ttcagcacatggtttctttccacta

SEQ ID NO: 4770723 - DNA, 25 bp, Homo sapien
caaaccatcagtgtcgtcaaacatt

SEQ ID NO: 4770724 - DNA, 25 bp, Homo sapien
gtgtcgtcaaacatttcagcacatg

SEQ ID NO: 4770725 - DNA, 25 bp, Homo sapien
tgactgtgacgctcgggatgctgct

SEQ ID NO: 4770726 - DNA, 25 bp, Homo sapien
cttcctgcatcgtagcaaagccatg

SEQ ID NO: 4770727 - DNA, 25 bp, Homo sapien
aaagctacaccatgagggtgcttcc

SEQ ID NO: 4770728 - DNA, 25 bp, Homo sapien
cacattccaattggacacaaagcta

SEQ ID NO: 4770729 - DNA, 25 bp, Homo sapien
gatccgaaggcaacttggtccctgc

SEQ ID NO: 4770730 - DNA, 25 bp, Homo sapien
gctgcgcaggaaacacaggcttttg

SEQ ID NO: 4770731 - DNA, 25 bp, Homo sapien
tctgagcttccgtattagggctgtt

SEQ ID NO: 4770732 - DNA, 25 bp, Homo sapien
caggcttttgggaggacagtccaga

SEQ ID NO: 4770733 - DNA, 25 bp, Homo sapien
gcccataaggctagcttctacagag

SEQ ID NO: 4770734 - DNA, 25 bp, Homo sapien
gaaagaaatgccagaaatcgcttgg

SEQ ID NO: 4770735 - DNA, 25 bp, Homo sapien
gaagggaaattctcaggctttgctg

SEQ ID NO: 4770736 - DNA, 25 bp, Homo sapien
gaatccctaactgaagcacgtgaag

SEQ ID NO: 4770737 - DNA, 25 bp, Homo sapien
catgaccagccctttttcgctgctg

SEQ ID NO: 4770738 - DNA, 25 bp, Homo sapien
gggtccattcccaggtgctaaatct

SEQ ID NO: 4770739 - DNA, 25 bp, Homo sapien
catctggtcctcttcgtagacaggg

SEQ ID NO: 4770740 - DNA, 25 bp, Homo sapien
aatctgttcagcagggctacttggg

SEQ ID NO: 4770741 - DNA, 25 bp, Homo sapien
cactggtggagggtaaagaacacaa

SEQ ID NO: 4770742 - DNA, 25 bp, Homo sapien
cgtaagaactcgatgaaggccagaa

SEQ ID NO: 4770743 - DNA, 25 bp, Homo sapien
caatttctgactgtcgtaagaactc

SEQ ID NO: 4770744 - DNA, 25 bp, Homo sapien
tgactgtcgtaagaactcgatgaag

SEQ ID NO: 4770745 - DNA, 25 bp, Homo sapien
gtggagttaacagtcctaacgacat

SEQ ID NO: 4770746 - DNA, 25 bp, Homo sapien
ctgggattgagaagatgatggagac

SEQ ID NO: 4770747 - DNA, 25 bp, Homo sapien
aatgtggacctaaacactgagaagc

SEQ ID NO: 4770748 - DNA, 25 bp, Homo sapien
aaattaatttgagtggagttaacag

SEQ ID NO: 4770749 - DNA, 25 bp, Homo sapien
agtgtgtacacttcattatcgtttt

SEQ ID NO: 4770750 - DNA, 25 bp, Homo sapien
cagtgtgtacacttcattatcgttt

SEQ ID NO: 4770751 - DNA, 25 bp, Homo sapien
cttcagaacccgtgggtgatttttg

SEQ ID NO: 4770752 - DNA, 25 bp, Homo sapien
ttcagtgtgtacacttcattatcgt

SEQ ID NO: 4770753 - DNA, 25 bp, Homo sapien
ctgagcctcagccagtgagaagcag

SEQ ID NO: 4770754 - DNA, 25 bp, Homo sapien
tgggcccccagatcctgagcctcag

SEQ ID NO: 4770755 - DNA, 25 bp, Homo sapien
tgggagccagaaggggcctgctggg

SEQ ID NO: 4770756 - DNA, 25 bp, Homo sapien
cagatcctgagcctcagccagtgag

SEQ ID NO: 4770757 - DNA, 25 bp, Homo sapien
tctcacttgttcacccatcaatcat

SEQ ID NO: 4770758 - DNA, 25 bp, Homo sapien
ttgttcacccatcaatcattcattc

SEQ ID NO: 4770759 - DNA, 25 bp, Homo sapien
cacttgttcacccatcaatcattca

SEQ ID NO: 4770760 - DNA, 25 bp, Homo sapien
cttgttcacccatcaatcattcatt

SEQ ID NO: 4770761 - DNA, 25 bp, Homo sapien
cattccaccaatcaaggcagtcagg

SEQ ID NO: 4770762 - DNA, 25 bp, Homo sapien
gtcaggaagtaacccagatccacag

SEQ ID NO: 4770763 - DNA, 25 bp, Homo sapien
gcagcaatggcgagattggccacca

SEQ ID NO: 4770764 - DNA, 25 bp, Homo sapien
aaagcccctgtatcccctattgtgt

SEQ ID NO: 4770765 - DNA, 25 bp, Homo sapien
gctagcagtagcaagagcgaaagaa

SEQ ID NO: 4770766 - DNA, 25 bp, Homo sapien
gagctagcagtagcaagagcgaaag

SEQ ID NO: 4770767 - DNA, 25 bp, Homo sapien
ctagcagtagcaagagcgaaagaac

SEQ ID NO: 4770768 - DNA, 25 bp, Homo sapien
aaagagctagcagtagcaagagcga

SEQ ID NO: 4770769 - DNA, 25 bp, Homo sapien
caagcgaggggccggccagcttcac

SEQ ID NO: 4770770 - DNA, 25 bp, Homo sapien
aggcaagcgaggggccggccagctt

SEQ ID NO: 4770771 - DNA, 25 bp, Homo sapien
gcaagcgaggggccggccagcttca

SEQ ID NO: 4770772 - DNA, 25 bp, Homo sapien
agaggcaagcgaggggccggccagc

SEQ ID NO: 4770773 - DNA, 25 bp, Homo sapien
tagaaacggtactgcgagtatccac

SEQ ID NO: 4770774 - DNA, 25 bp, Homo sapien
taatcccatcacaggtctaggagca

SEQ ID NO: 4770775 - DNA, 25 bp, Homo sapien
ttagatgactctgcccaacggtagg

SEQ ID NO: 4770776 - DNA, 25 bp, Homo sapien
aaaagacatcaagtgccggtatgca

SEQ ID NO: 4770777 - DNA, 25 bp, Homo sapien
ctgtctgagtgcgcggcgccgggtc

SEQ ID NO: 4770778 - DNA, 25 bp, Homo sapien
tgcgcggcgccgggtccagtgcaca

SEQ ID NO: 4770779 - DNA, 25 bp, Homo sapien
tgagtgcgcggcgccgggtccagtg

SEQ ID NO: 4770780 - DNA, 25 bp, Homo sapien
cggcgccgggtccagtgcacagggt

SEQ ID NO: 4770781 - DNA, 25 bp, Homo sapien
cggccgggcgagttcgggcgccagg

SEQ ID NO: 4770782 - DNA, 25 bp, Homo sapien
gccgggcgagttcgggcgccaggaa

SEQ ID NO: 4770783 - DNA, 25 bp, Homo sapien
agttcgggcgccaggaatggcggcg

SEQ ID NO: 4770784 - DNA, 25 bp, Homo sapien
gcgagttcgggcgccaggaatggcg

SEQ ID NO: 4770785 - DNA, 25 bp, Homo sapien
acttttttcttagccgctatccatc

SEQ ID NO: 4770786 - DNA, 25 bp, Homo sapien
cagatgttggtcttcgtgaactgat

SEQ ID NO: 4770787 - DNA, 25 bp, Homo sapien
tcgtgaactgatgctttaatttcct

SEQ ID NO: 4770788 - DNA, 25 bp, Homo sapien
ttcttagccgctatccatcttttgt

SEQ ID NO: 4770789 - DNA, 25 bp, Homo sapien
tccaggaagcttctactgtcagggc

SEQ ID NO: 4770790 - DNA, 25 bp, Homo sapien
gtccaggaagcttctactgtcaggg

SEQ ID NO: 4770791 - DNA, 25 bp, Homo sapien
gctgcttcccacgaggctggtggac

SEQ ID NO: 4770792 - DNA, 25 bp, Homo sapien
gagggcacgctgcttcccacgaggc

SEQ ID NO: 4770793 - DNA, 25 bp, Homo sapien
ccacagcttcacagcaggagggcac

SEQ ID NO: 4770794 - DNA, 25 bp, Homo sapien
ggctggtggactccagcataggcat

SEQ ID NO: 4770795 - DNA, 25 bp, Homo sapien
ggtgccccatggcagcgagaccttg

SEQ ID NO: 4770796 - DNA, 25 bp, Homo sapien
gtgccccatggcagcgagaccttgc

SEQ ID NO: 4770797 - DNA, 25 bp, Homo sapien
ccagggacccctggttgtctcagct

SEQ ID NO: 4770798 - DNA, 25 bp, Homo sapien
tgtctcagctctatggacacccaca

SEQ ID NO: 4770799 - DNA, 25 bp, Homo sapien
cctttccagtctcttggcaaattct

SEQ ID NO: 4770800 - DNA, 25 bp, Homo sapien
gccaaatagaaccagagacttggga

SEQ ID NO: 4770801 - DNA, 25 bp, Homo sapien
tcctgagaatgagcctgaagacact

SEQ ID NO: 4770802 - DNA, 25 bp, Homo sapien
cagagtgtggccaccgagcttagtg

SEQ ID NO: 4770803 - DNA, 25 bp, Homo sapien
caaggtaatggatgcacagagctga

SEQ ID NO: 4770804 - DNA, 25 bp, Homo sapien
ggctgctgcctttgcccctggagcc

SEQ ID NO: 4770805 - DNA, 25 bp, Homo sapien
cccatctctcactgtgcagggggtg

SEQ ID NO: 4770806 - DNA, 25 bp, Homo sapien
cctttcccatctctcactgtgcagg

SEQ ID NO: 4770807 - DNA, 25 bp, Homo sapien
ttcccatctctcactgtgcaggggg

SEQ ID NO: 4770808 - DNA, 25 bp, Homo sapien
ggattttcatcctaggcaatcgtac

SEQ ID NO: 4770809 - DNA, 25 bp, Homo sapien
tctgggaaacttgctacacgtactt

SEQ ID NO: 4770810 - DNA, 25 bp, Homo sapien
tcttgccattctctggctatgggct

SEQ ID NO: 4770811 - DNA, 25 bp, Homo sapien
tgctgatcaccagtgccaagagtgg

SEQ ID NO: 4770812 - DNA, 25 bp, Homo sapien
cttgttgggttcagggattacaatc

SEQ ID NO: 4770813 - DNA, 25 bp, Homo sapien
tatgaattgagtgggaactgtttcc

SEQ ID NO: 4770814 - DNA, 25 bp, Homo sapien
gattacaatcatgcaggccatatga

SEQ ID NO: 4770815 - DNA, 25 bp, Homo sapien
taagagagatcagcctgcaattttc

SEQ ID NO: 4770816 - DNA, 25 bp, Homo sapien
gcaggtcagaggtggcttggggtca

SEQ ID NO: 4770817 - DNA, 25 bp, Homo sapien
cttggggtcagcgagtcgacttcct

SEQ ID NO: 4770818 - DNA, 25 bp, Homo sapien
gggtcagcgagtcgacttcctggag

SEQ ID NO: 4770819 - DNA, 25 bp, Homo sapien
tcagcgagtcgacttcctggaggag

SEQ ID NO: 4770820 - DNA, 25 bp, Homo sapien
ctttccggcgtggaaggtactggct

SEQ ID NO: 4770821 - DNA, 25 bp, Homo sapien
ttccggcgtggaaggtactggctgg

SEQ ID NO: 4770822 - DNA, 25 bp, Homo sapien
tttccggcgtggaaggtactggctg

SEQ ID NO: 4770823 - DNA, 25 bp, Homo sapien
tccggcgtggaaggtactggctggc

SEQ ID NO: 4770824 - DNA, 25 bp, Homo sapien
tccatgcggacagtgtaaggacctg

SEQ ID NO: 4770825 - DNA, 25 bp, Homo sapien
cagaatagtggtggcctctgatagt

SEQ ID NO: 4770826 - DNA, 25 bp, Homo sapien
taatggctgcatgatctcggaaaga

SEQ ID NO: 4770827 - DNA, 25 bp, Homo sapien
gattcaagagatcttcgggagtcag

SEQ ID NO: 4770828 - DNA, 25 bp, Homo sapien
ctacgatggtgatgtcacgaagctc

SEQ ID NO: 4770829 - DNA, 25 bp, Homo sapien
gatgtcagccaatcgcagccggtct

SEQ ID NO: 4770830 - DNA, 25 bp, Homo sapien
tcagccaatcgcagccggtctggag

SEQ ID NO: 4770831 - DNA, 25 bp, Homo sapien
gtcacgaagctcttggtggtaattt

SEQ ID NO: 4770832 - DNA, 25 bp, Homo sapien
gatggtgtttgagtagccatctgct

SEQ ID NO: 4770833 - DNA, 25 bp, Homo sapien
tggtgtttgagtagccatctgctgg

SEQ ID NO: 4770834 - DNA, 25 bp, Homo sapien
tgatggtgtttgagtagccatctgc

SEQ ID NO: 4770835 - DNA, 25 bp, Homo sapien
tcttgatggtgtttgagtagccatc

SEQ ID NO: 4770836 - DNA, 25 bp, Homo sapien
gggagtagctcaccggactggtctt

SEQ ID NO: 4770837 - DNA, 25 bp, Homo sapien
aaatgtgtctctgtactgccgagcc

SEQ ID NO: 4770838 - DNA, 25 bp, Homo sapien
cctgaacctggacatattgtgctgt

SEQ ID NO: 4770839 - DNA, 25 bp, Homo sapien
tctgcattgctacagcggcacacaa

SEQ ID NO: 4770840 - DNA, 25 bp, Homo sapien
ttagggcatattggccctaggtggc

SEQ ID NO: 4770841 - DNA, 25 bp, Homo sapien
tattggccctaggtggcctggtggt

SEQ ID NO: 4770842 - DNA, 25 bp, Homo sapien
catattggccctaggtggcctggtg

SEQ ID NO: 4770843 - DNA, 25 bp, Homo sapien
ggcatattggccctaggtggcctgg

SEQ ID NO: 4770844 - DNA, 25 bp, Homo sapien
tctgacagggttgccatcctcttcc

SEQ ID NO: 4770845 - DNA, 25 bp, Homo sapien
catgggtccatgacacctgctctga

SEQ ID NO: 4770846 - DNA, 25 bp, Homo sapien
gacacctgctctgacagggttgcca

SEQ ID NO: 4770847 - DNA, 25 bp, Homo sapien
gagctgcatgggtccatgacacctg

SEQ ID NO: 4770848 - DNA, 25 bp, Homo sapien
agtctctccaggttacttaaatcaa

SEQ ID NO: 4770849 - DNA, 25 bp, Homo sapien
agggtgagtctctccaggttactta

SEQ ID NO: 4770850 - DNA, 25 bp, Homo sapien
aggagggtgagtctctccaggttac

SEQ ID NO: 4770851 - DNA, 25 bp, Homo sapien
tctctccaggttacttaaatcaatt

SEQ ID NO: 4770852 - DNA, 25 bp, Homo sapien
ggttctcagattcagaggtaatctg

SEQ ID NO: 4770853 - DNA, 25 bp, Homo sapien
cagaggtaatctgaagagtggccat

SEQ ID NO: 4770854 - DNA, 25 bp, Homo sapien
cggttctcagattcagaggtaatct

SEQ ID NO: 4770855 - DNA, 25 bp, Homo sapien
tatcatgccgggaactactcttcag

SEQ ID NO: 4770856 - DNA, 25 bp, Homo sapien
gacagggcttacacgtgccagtgga

SEQ ID NO: 4770857 - DNA, 25 bp, Homo sapien
cagtcatgccagagttaacctccga

SEQ ID NO: 4770858 - DNA, 25 bp, Homo sapien
gattttcactcagtcacaggcgcag

SEQ ID NO: 4770859 - DNA, 25 bp, Homo sapien
cctgaagaaagcctgaatgaaagga

SEQ ID NO: 4770860 - DNA, 25 bp, Homo sapien
tcagaaatgctaggagagcaagctc

SEQ ID NO: 4770861 - DNA, 25 bp, Homo sapien
tgcctgcaagcgcagaatggaaact

SEQ ID NO: 4770862 - DNA, 25 bp, Homo sapien
ttatcgccccagtcttgcggcaggg

SEQ ID NO: 4770863 - DNA, 25 bp, Homo sapien
tcagcctgttttgcgaggagagccg

SEQ ID NO: 4770864 - DNA, 25 bp, Homo sapien
tgctttttcaaaacggatccgggca

SEQ ID NO: 4770865 - DNA, 25 bp, Homo sapien
gcagcgttaacgactgggtgcccag

SEQ ID NO: 4770866 - DNA, 25 bp, Homo sapien
cgtgaaggacttagccgactgcgct

SEQ ID NO: 4770867 - DNA, 25 bp, Homo sapien
gacgtgttgtggaagttctttttgc

SEQ ID NO: 4770868 - DNA, 25 bp, Homo sapien
aaggtgggaacatctgttataccat

SEQ ID NO: 4770869 - DNA, 25 bp, Homo sapien
tcacctccagggagtaaatcagctg

SEQ ID NO: 4770870 - DNA, 25 bp, Homo sapien
tataccatagggtgggtagacgtgt

SEQ ID NO: 4770871 - DNA, 25 bp, Homo sapien
cttttcatcccctgtggggttcctg

SEQ ID NO: 4770872 - DNA, 25 bp, Homo sapien
gcagctgcagcttcatccaaaggtt

SEQ ID NO: 4770873 - DNA, 25 bp, Homo sapien
tttcatcccctgtggggttcctgtc

SEQ ID NO: 4770874 - DNA, 25 bp, Homo sapien
gctgcagcttcatccaaaggtttcc

SEQ ID NO: 4770875 - DNA, 25 bp, Homo sapien
ttgtacaagctagaacgaggaggag

SEQ ID NO: 4770876 - DNA, 25 bp, Homo sapien
cccatggctcttgggggtgaactgc

SEQ ID NO: 4770877 - DNA, 25 bp, Homo sapien
ctgtcctcgctgtttgggtcccggc

SEQ ID NO: 4770878 - DNA, 25 bp, Homo sapien
gggagccagtgagagggagataaat

SEQ ID NO: 4770879 - DNA, 25 bp, Homo sapien
catttaagacatacacctgcctgca

SEQ ID NO: 4770880 - DNA, 25 bp, Homo sapien
gatctttctggcaggctcaggaaca

SEQ ID NO: 4770881 - DNA, 25 bp, Homo sapien
tcccataaacacagcttgtgggctt

SEQ ID NO: 4770882 - DNA, 25 bp, Homo sapien
agcttgtgggcttcccttgctgcct

SEQ ID NO: 4770883 - DNA, 25 bp, Homo sapien
cttggaggacaaatgcagcagcgtc

SEQ ID NO: 4770884 - DNA, 25 bp, Homo sapien
catgcggaacgccagcagatgttga

SEQ ID NO: 4770885 - DNA, 25 bp, Homo sapien
tgaagagtactctggcttggaggac

SEQ ID NO: 4770886 - DNA, 25 bp, Homo sapien
cagatgttgaaagcattccgaccat

SEQ ID NO: 4770887 - DNA, 25 bp, Homo sapien
cattcgtgcggcagatttgcctgtg

SEQ ID NO: 4770888 - DNA, 25 bp, Homo sapien
gccctttctggtggatagacttgtt

SEQ ID NO: 4770889 - DNA, 25 bp, Homo sapien
tgcctgtgggagaatgctttgccct

SEQ ID NO: 4770890 - DNA, 25 bp, Homo sapien
tattagcgccttctgcattcgtgcg

SEQ ID NO: 4770891 - DNA, 25 bp, Homo sapien
agtgtagttgctggtatgaaactgt

SEQ ID NO: 4770892 - DNA, 25 bp, Homo sapien
gtgtagttgctggtatgaaactgtc

SEQ ID NO: 4770893 - DNA, 25 bp, Homo sapien
catggtcgtgctttctctcttcaag

SEQ ID NO: 4770894 - DNA, 25 bp, Homo sapien
tcgtgctttctctcttcaagtttac

SEQ ID NO: 4770895 - DNA, 25 bp, Homo sapien
gtgctttctctcttcaagtttacgg

SEQ ID NO: 4770896 - DNA, 25 bp, Homo sapien
gctttctctcttcaagtttacggaa

SEQ ID NO: 4770897 - DNA, 25 bp, Homo sapien
tggtggggccttgatgagaataaac

SEQ ID NO: 4770898 - DNA, 25 bp, Homo sapien
cctcctgcccttggctgccagtgcc

SEQ ID NO: 4770899 - DNA, 25 bp, Homo sapien
tgtcaattgtcaatgaggccttgag

SEQ ID NO: 4770900 - DNA, 25 bp, Homo sapien
caattgtcaatgaggccttgagctc

SEQ ID NO: 4770901 - DNA, 25 bp, Homo sapien
cacaggctgggtcaccttggccttt

SEQ ID NO: 4770902 - DNA, 25 bp, Homo sapien
gcaagcggtttcactttccaggccc

SEQ ID NO: 4770903 - DNA, 25 bp, Homo sapien
gctgctgggtcgaagcacattctct

SEQ ID NO: 4770904 - DNA, 25 bp, Homo sapien
tggctggagctcaggtccggtcaca

SEQ ID NO: 4770905 - DNA, 25 bp, Homo sapien
ccccagaagagtagactccagcata

SEQ ID NO: 4770906 - DNA, 25 bp, Homo sapien
cacttaagatgcctgctatctgcag

SEQ ID NO: 4770907 - DNA, 25 bp, Homo sapien
cagcatactgttgatggttaataaa

SEQ ID NO: 4770908 - DNA, 25 bp, Homo sapien
tgttgatggttaataaatgccagct

SEQ ID NO: 4770909 - DNA, 25 bp, Homo sapien
tctccagtgagtcccgggccaggtt

SEQ ID NO: 4770910 - DNA, 25 bp, Homo sapien
gggccaggttgtgcccactgagctc

SEQ ID NO: 4770911 - DNA, 25 bp, Homo sapien
tcccgggccaggttgtgcccactga

SEQ ID NO: 4770912 - DNA, 25 bp, Homo sapien
tgagtcccgggccaggttgtgccca

SEQ ID NO: 4770913 - DNA, 25 bp, Homo sapien
gcttcatggctgtggagaacagatc

SEQ ID NO: 4770914 - DNA, 25 bp, Homo sapien
tgcatgccagggagctttgcgcaca

SEQ ID NO: 4770915 - DNA, 25 bp, Homo sapien
gtgagcatctgccactctggtatgg

SEQ ID NO: 4770916 - DNA, 25 bp, Homo sapien
gcacagcattccacagatagcatgg

SEQ ID NO: 4770917 - DNA, 25 bp, Homo sapien
gagacggcccatagcgcggaaagaa

SEQ ID NO: 4770918 - DNA, 25 bp, Homo sapien
gcgagtgtgcaaagacaggccacct

SEQ ID NO: 4770919 - DNA, 25 bp, Homo sapien
ccatagcgcggaaagaagtcatctt

SEQ ID NO: 4770920 - DNA, 25 bp, Homo sapien
tgcagcgtgctgttcagggcgagtg

SEQ ID NO: 4770921 - DNA, 25 bp, Homo sapien
gggctcctcactgtgtttatttaca

SEQ ID NO: 4770922 - DNA, 25 bp, Homo sapien
cactacacaaattgcacaacacaag

SEQ ID NO: 4770923 - DNA, 25 bp, Homo sapien
acaagcaggtcatctgtcccctttg

SEQ ID NO: 4770924 - DNA, 25 bp, Homo sapien
acatgttgttttggccacggcagca

SEQ ID NO: 4770925 - DNA, 25 bp, Homo sapien
ggtgggctgcattgtgaccgggtca

SEQ ID NO: 4770926 - DNA, 25 bp, Homo sapien
ttaagcaaggtgtccggtgggctgc

SEQ ID NO: 4770927 - DNA, 25 bp, Homo sapien
gctgcattgtgaccgggtcagccag

SEQ ID NO: 4770928 - DNA, 25 bp, Homo sapien
cattgtgaccgggtcagccaggccc

SEQ ID NO: 4770929 - DNA, 25 bp, Homo sapien
cagctgaccaagtagtgacagcagg

SEQ ID NO: 4770930 - DNA, 25 bp, Homo sapien
tcttcagctgaccaagtagtgacag

SEQ ID NO: 4770931 - DNA, 25 bp, Homo sapien
gtagtgacagcaggactccagggtt

SEQ ID NO: 4770932 - DNA, 25 bp, Homo sapien
agtagtgacagcaggactccagggt

SEQ ID NO: 4770933 - DNA, 25 bp, Homo sapien
ttgatgcttgagacgctcagtggga

SEQ ID NO: 4770934 - DNA, 25 bp, Homo sapien
tgctgcggttgatgcttgagacgct

SEQ ID NO: 4770935 - DNA, 25 bp, Homo sapien
ttcagtgctgcggttgatgcttgag

SEQ ID NO: 4770936 - DNA, 25 bp, Homo sapien
acactttcagtgctgcggttgatgc

SEQ ID NO: 4770937 - DNA, 25 bp, Homo sapien
ctgcagacacccagacctgacagcc

SEQ ID NO: 4770938 - DNA, 25 bp, Homo sapien
ccctcgggtgccgagctgagctgca

SEQ ID NO: 4770939 - DNA, 25 bp, Homo sapien
cttccttgcaccctcgggtgccgag

SEQ ID NO: 4770940 - DNA, 25 bp, Homo sapien
agacacccagacctgacagcccttc

SEQ ID NO: 4770941 - DNA, 25 bp, Homo sapien
cactttaggtccagatgacgggagc

SEQ ID NO: 4770942 - DNA, 25 bp, Homo sapien
ggagaacagagctggcccagtaaca

SEQ ID NO: 4770943 - DNA, 25 bp, Homo sapien
ttaaccggacagaggatgactttct

SEQ ID NO: 4770944 - DNA, 25 bp, Homo sapien
gttgaacctggcttgtgaacacagc

SEQ ID NO: 4770945 - DNA, 25 bp, Homo sapien
ccgtcttacacaactgtggtcttct

SEQ ID NO: 4770946 - DNA, 25 bp, Homo sapien
taaccgtcttacacaactgtggtct

SEQ ID NO: 4770947 - DNA, 25 bp, Homo sapien
ctaaccgtcttacacaactgtggtc

SEQ ID NO: 4770948 - DNA, 25 bp, Homo sapien
gtcttacacaactgtggtcttctct

SEQ ID NO: 4770949 - DNA, 25 bp, Homo sapien
ttttttgtgcatggcctgggttttg

SEQ ID NO: 4770950 - DNA, 25 bp, Homo sapien
ggccaccaaagactctatgcctgtg

SEQ ID NO: 4770951 - DNA, 25 bp, Homo sapien
tgcacaggtttggccacacagtcca

SEQ ID NO: 4770952 - DNA, 25 bp, Homo sapien
tctgcacaggtttggccacacagtc

SEQ ID NO: 4770953 - DNA, 25 bp, Homo sapien
cttctcacagaggctgcatggctgt

SEQ ID NO: 4770954 - DNA, 25 bp, Homo sapien
tctcacagaggctgcatggctgtca

SEQ ID NO: 4770955 - DNA, 25 bp, Homo sapien
ctcacagaggctgcatggctgtcac

SEQ ID NO: 4770956 - DNA, 25 bp, Homo sapien
ttctcacagaggctgcatggctgtc

SEQ ID NO: 4770957 - DNA, 25 bp, Homo sapien
tgtgcaccagggagcggactgatct

SEQ ID NO: 4770958 - DNA, 25 bp, Homo sapien
ccagggagcggactgatctgaagta

SEQ ID NO: 4770959 - DNA, 25 bp, Homo sapien
tggggatccccgtttgagaggcaaa

SEQ ID NO: 4770960 - DNA, 25 bp, Homo sapien
gatccccgtttgagaggcaaagctt

SEQ ID NO: 4770961 - DNA, 25 bp, Homo sapien
cagtgtgggcagagtccatataatt

SEQ ID NO: 4770962 - DNA, 25 bp, Homo sapien
gtggctcttgaagacgccataatac

SEQ ID NO: 4770963 - DNA, 25 bp, Homo sapien
tccatataattctgtctgcggcacg

SEQ ID NO: 4770964 - DNA, 25 bp, Homo sapien
cataatacagatgctgcacaaaggc

SEQ ID NO: 4770965 - DNA, 25 bp, Homo sapien
gaattaagacattgaaggaactgct

SEQ ID NO: 4770966 - DNA, 25 bp, Homo sapien
ttaagacattgaaggaactgctgct

SEQ ID NO: 4770967 - DNA, 25 bp, Homo sapien
attaagacattgaaggaactgctgc

SEQ ID NO: 4770968 - DNA, 25 bp, Homo sapien
taagacattgaaggaactgctgctg

SEQ ID NO: 4770969 - DNA, 25 bp, Homo sapien
ctgcaagaaacgcaagaaaggctgc

SEQ ID NO: 4770970 - DNA, 25 bp, Homo sapien
gcaagaaaggctgctgccagcattg

SEQ ID NO: 4770971 - DNA, 25 bp, Homo sapien
agaaaggctgctgccagcattgcat

SEQ ID NO: 4770972 - DNA, 25 bp, Homo sapien
tgcaagaaacgcaagaaaggctgct

SEQ ID NO: 4770973 - DNA, 25 bp, Homo sapien
ttatggatgtatcgctgtatgcacc

SEQ ID NO: 4770974 - DNA, 25 bp, Homo sapien
gaagctgccccgcaaaatttatgga

SEQ ID NO: 4770975 - DNA, 25 bp, Homo sapien
gaatggcttataaagatctcccctg

SEQ ID NO: 4770976 - DNA, 25 bp, Homo sapien
tagcaagctctactggatgaatggc

SEQ ID NO: 4770977 - DNA, 25 bp, Homo sapien
gggcaaaatgcactccagtatggat

SEQ ID NO: 4770978 - DNA, 25 bp, Homo sapien
agatggtgaggcagccgcagctgga

SEQ ID NO: 4770979 - DNA, 25 bp, Homo sapien
tgaggccttgctgagagcatgcccc

SEQ ID NO: 4770980 - DNA, 25 bp, Homo sapien
tctagcaaggagaacatagaagatg

SEQ ID NO: 4770981 - DNA, 25 bp, Homo sapien
gacagggcggtgttgttcatgctgc

SEQ ID NO: 4770982 - DNA, 25 bp, Homo sapien
agctgatctggtgagttcattgcac

SEQ ID NO: 4770983 - DNA, 25 bp, Homo sapien
aggagtcctgggcttgcagcgcctg

SEQ ID NO: 4770984 - DNA, 25 bp, Homo sapien
tctggtgagttcattgcacagggct

SEQ ID NO: 4770985 - DNA, 25 bp, Homo sapien
cacaatattttatgggacgcctctc

SEQ ID NO: 4770986 - DNA, 25 bp, Homo sapien
tgaactggccgggttgccacatggc

SEQ ID NO: 4770987 - DNA, 25 bp, Homo sapien
tcactgtgattatccagtcgtcacc

SEQ ID NO: 4770988 - DNA, 25 bp, Homo sapien
tccactgagagcgtggctgtccccg

SEQ ID NO: 4770989 - DNA, 25 bp, Homo sapien
catctgtatcacctggagaggttat

SEQ ID NO: 4770990 - DNA, 25 bp, Homo sapien
catacactgagtgataactggatca

SEQ ID NO: 4770991 - DNA, 25 bp, Homo sapien
tcatccatccccaaagagctgtatc

SEQ ID NO: 4770992 - DNA, 25 bp, Homo sapien
gttattaagagttgcccaggcctca

SEQ ID NO: 4770993 - DNA, 25 bp, Homo sapien
ctgtcgggaactctggctccagtgg

SEQ ID NO: 4770994 - DNA, 25 bp, Homo sapien
ttgggctggaatatctggacggcac

SEQ ID NO: 4770995 - DNA, 25 bp, Homo sapien
gccgttgaatgaggccggatccaca

SEQ ID NO: 4770996 - DNA, 25 bp, Homo sapien
catgctcttgagctttccagacaaa

SEQ ID NO: 4770997 - DNA, 25 bp, Homo sapien
gtattgtctccctccgtgtccactt

SEQ ID NO: 4770998 - DNA, 25 bp, Homo sapien
cactttgctaaactgtgatgtgatc

SEQ ID NO: 4770999 - DNA, 25 bp, Homo sapien
agctcccgtcaaaggtattgtctcc

SEQ ID NO: 4771000 - DNA, 25 bp, Homo sapien
taaactgtgatgtgatcagcgtaat

SEQ ID NO: 4771001 - DNA, 25 bp, Homo sapien
cacttcctgggtgctgatgaaagat

SEQ ID NO: 4771002 - DNA, 25 bp, Homo sapien
ttcctgggtgctgatgaaagatgct

SEQ ID NO: 4771003 - DNA, 25 bp, Homo sapien
ccacttcctgggtgctgatgaaaga

SEQ ID NO: 4771004 - DNA, 25 bp, Homo sapien
ctccacttcctgggtgctgatgaaa

SEQ ID NO: 4771005 - DNA, 25 bp, Homo sapien
tcccactgccggatcacagttggtg

SEQ ID NO: 4771006 - DNA, 25 bp, Homo sapien
aggcaaaggctcctgtgatgactgc

SEQ ID NO: 4771007 - DNA, 25 bp, Homo sapien
ctgaggcaaaggctcctgtgatgac

SEQ ID NO: 4771008 - DNA, 25 bp, Homo sapien
tggtgctgtagtcctccaacctggc

SEQ ID NO: 4771009 - DNA, 25 bp, Homo sapien
tgggaccctccagcatgacagcttg

SEQ ID NO: 4771010 - DNA, 25 bp, Homo sapien
tgaacagagggtttcagttccttgc

SEQ ID NO: 4771011 - DNA, 25 bp, Homo sapien
ctaggtccagcttatgtgcacacac

SEQ ID NO: 4771012 - DNA, 25 bp, Homo sapien
taaactcagtcttttacaaggtgac

SEQ ID NO: 4771013 - DNA, 25 bp, Homo sapien
acaaaggccagaagggtcttggaag

SEQ ID NO: 4771014 - DNA, 25 bp, Homo sapien
caggacaaaggccagaagggtcttg

SEQ ID NO: 4771015 - DNA, 25 bp, Homo sapien
ggacaaaggccagaagggtcttgga

SEQ ID NO: 4771016 - DNA, 25 bp, Homo sapien
ctaaaccaggacaaaggccagaagg

SEQ ID NO: 4771017 - DNA, 25 bp, Homo sapien
gggatttcttgatccctttcctgca

SEQ ID NO: 4771018 - DNA, 25 bp, Homo sapien
ctcctgttctctgcgctccctggag

SEQ ID NO: 4771019 - DNA, 25 bp, Homo sapien
tgctgggatttcttgatccctttcc

SEQ ID NO: 4771020 - DNA, 25 bp, Homo sapien
tccactctcctgttctctgcgctcc

SEQ ID NO: 4771021 - DNA, 25 bp, Homo sapien
cattgttctcaggagggtctttcat

SEQ ID NO: 4771022 - DNA, 25 bp, Homo sapien
ctaagcttgatggtcgagccttgtt

SEQ ID NO: 4771023 - DNA, 25 bp, Homo sapien
tctcaggagggtctttcatatgtgt

SEQ ID NO: 4771024 - DNA, 25 bp, Homo sapien
tgatggtcgagccttgtttcagctg

SEQ ID NO: 4771025 - DNA, 25 bp, Homo sapien
gacagggttgactgcatcggtgtcc

SEQ ID NO: 4771026 - DNA, 25 bp, Homo sapien
cactcgctcggcaatgactcattat

SEQ ID NO: 4771027 - DNA, 25 bp, Homo sapien
acaggaggacagggttgactgcatc

SEQ ID NO: 4771028 - DNA, 25 bp, Homo sapien
tgagtggggaatgaagtaccactcg

SEQ ID NO: 4771029 - DNA, 25 bp, Homo sapien
catccttcagcatggagacccttga

SEQ ID NO: 4771030 - DNA, 25 bp, Homo sapien
gacccttgaccagatctcaatctag

SEQ ID NO: 4771031 - DNA, 25 bp, Homo sapien
gaagagtcagctatcacagcctcag

SEQ ID NO: 4771032 - DNA, 25 bp, Homo sapien
tgttcatgttaagtctgcagccaga

SEQ ID NO: 4771033 - DNA, 25 bp, Homo sapien
tatttgcgtaggactctcatccccg

SEQ ID NO: 4771034 - DNA, 25 bp, Homo sapien
cactagaattagagaccaggtcctt

SEQ ID NO: 4771035 - DNA, 25 bp, Homo sapien
gcaggcctgggtggtcactacacat

SEQ ID NO: 4771036 - DNA, 25 bp, Homo sapien
tccaagttgctactccaaagaggtg

SEQ ID NO: 4771037 - DNA, 25 bp, Homo sapien
ctggagctttgagttgagctggctc

SEQ ID NO: 4771038 - DNA, 25 bp, Homo sapien
agcatctccgctgtcctgaggttgg

SEQ ID NO: 4771039 - DNA, 25 bp, Homo sapien
cggaaactcggctctggttccctgg

SEQ ID NO: 4771040 - DNA, 25 bp, Homo sapien
gctccatgtgagtgacggaaactcg

SEQ ID NO: 4771041 - DNA, 25 bp, Homo sapien
aggagtgcgtgcatgagcaggctgc

SEQ ID NO: 4771042 - DNA, 25 bp, Homo sapien
tgaagtgaggagtgcgtgcatgagc

SEQ ID NO: 4771043 - DNA, 25 bp, Homo sapien
agtgaggagtgcgtgcatgagcagg

SEQ ID NO: 4771044 - DNA, 25 bp, Homo sapien
tgatgaagtgaggagtgcgtgcatg

SEQ ID NO: 4771045 - DNA, 25 bp, Homo sapien
cttggcatccaaaacactccagccc

SEQ ID NO: 4771046 - DNA, 25 bp, Homo sapien
ggcatccaaaacactccagccccat

SEQ ID NO: 4771047 - DNA, 25 bp, Homo sapien
ttggcatccaaaacactccagcccc

SEQ ID NO: 4771048 - DNA, 25 bp, Homo sapien
tggcatccaaaacactccagcccca

SEQ ID NO: 4771049 - DNA, 25 bp, Homo sapien
ttccctgtgtgaaaatactcactac

SEQ ID NO: 4771050 - DNA, 25 bp, Homo sapien
ggaggttgtaccctctaaggcagtc

SEQ ID NO: 4771051 - DNA, 25 bp, Homo sapien
tccaggaggttgtaccctctaaggc

SEQ ID NO: 4771052 - DNA, 25 bp, Homo sapien
cacaagactgctgcgtgtttgacat

SEQ ID NO: 4771053 - DNA, 25 bp, Homo sapien
taaggcagtcacaagactgctgcgt

SEQ ID NO: 4771054 - DNA, 25 bp, Homo sapien
agcatcaggttctctgtgggttgct

SEQ ID NO: 4771055 - DNA, 25 bp, Homo sapien
ggatgaagcaattaggagtaagagc

SEQ ID NO: 4771056 - DNA, 25 bp, Homo sapien
gcatcaggttctctgtgggttgctg

SEQ ID NO: 4771057 - DNA, 25 bp, Homo sapien
ctgagtggatgaagcaattaggagt

SEQ ID NO: 4771058 - DNA, 25 bp, Homo sapien
cagccgttgagtctcgcaggtttgc

SEQ ID NO: 4771059 - DNA, 25 bp, Homo sapien
tgcagttgattaatgcctgacagca

SEQ ID NO: 4771060 - DNA, 25 bp, Homo sapien
cacttgcaacagagtgtccttggtg

SEQ ID NO: 4771061 - DNA, 25 bp, Homo sapien
gaaagaaggcataaatcctcccttg

SEQ ID NO: 4771062 - DNA, 25 bp, Homo sapien
tcccgcacgctgatgcgcggtaaag

SEQ ID NO: 4771063 - DNA, 25 bp, Homo sapien
ccgcacgctgatgcgcggtaaagga

SEQ ID NO: 4771064 - DNA, 25 bp, Homo sapien
atcccgcacgctgatgcgcggtaaa

SEQ ID NO: 4771065 - DNA, 25 bp, Homo sapien
gcacgctgatgcgcggtaaaggact

SEQ ID NO: 4771066 - DNA, 25 bp, Homo sapien
gaccatagtgtaggctgtcagaatg

SEQ ID NO: 4771067 - DNA, 25 bp, Homo sapien
tagtgtaggctgtcagaatggaatt

SEQ ID NO: 4771068 - DNA, 25 bp, Homo sapien
ctggagaccatagtgtaggctgtca

SEQ ID NO: 4771069 - DNA, 25 bp, Homo sapien
catagtgtaggctgtcagaatggaa

SEQ ID NO: 4771070 - DNA, 25 bp, Homo sapien
cgttaatgcatcaggatgtgatggt

SEQ ID NO: 4771071 - DNA, 25 bp, Homo sapien
cagaactaccacctgcgttaatgca

SEQ ID NO: 4771072 - DNA, 25 bp, Homo sapien
tgcttggacttgagatcaaaaggca

SEQ ID NO: 4771073 - DNA, 25 bp, Homo sapien
tggtgcacaagggctggtcctctcc

SEQ ID NO: 4771074 - DNA, 25 bp, Homo sapien
ctgatttgagtcctggatgatctca

SEQ ID NO: 4771075 - DNA, 25 bp, Homo sapien
tgatctcagcaacattgtttcctgg

SEQ ID NO: 4771076 - DNA, 25 bp, Homo sapien
tggatgatctcagcaacattgtttc

SEQ ID NO: 4771077 - DNA, 25 bp, Homo sapien
gatgatctcagcaacattgtttcct

SEQ ID NO: 4771078 - DNA, 25 bp, Homo sapien
ccttgttgtgacatttaagaacaac

SEQ ID NO: 4771079 - DNA, 25 bp, Homo sapien
ttccctgctttccttgttgtgacat

SEQ ID NO: 4771080 - DNA, 25 bp, Homo sapien
tgttgtgacatttaagaacaacgtc

SEQ ID NO: 4771081 - DNA, 25 bp, Homo sapien
gctttccttgttgtgacatttaaga

SEQ ID NO: 4771082 - DNA, 25 bp, Homo sapien
tcatggcaggactgtttgcagctca

SEQ ID NO: 4771083 - DNA, 25 bp, Homo sapien
ttcttttcatggcaggactgtttgc

SEQ ID NO: 4771084 - DNA, 25 bp, Homo sapien
ttcatggcaggactgtttgcagctc

SEQ ID NO: 4771085 - DNA, 25 bp, Homo sapien
ttttcatggcaggactgtttgcagc

SEQ ID NO: 4771086 - DNA, 25 bp, Homo sapien
tcacgtctgggcatccagtgccctc

SEQ ID NO: 4771087 - DNA, 25 bp, Homo sapien
cacgtctgggcatccagtgccctcc

SEQ ID NO: 4771088 - DNA, 25 bp, Homo sapien
gcaccaagatctttgtaaaattgac

SEQ ID NO: 4771089 - DNA, 25 bp, Homo sapien
caagatctttgtaaaattgacttcc

SEQ ID NO: 4771090 - DNA, 25 bp, Homo sapien
tgtaaaattgacttccattttgtgt

SEQ ID NO: 4771091 - DNA, 25 bp, Homo sapien
gatctttgtaaaattgacttccatt

SEQ ID NO: 4771092 - DNA, 25 bp, Homo sapien
tggccttttattagaggtctcaggg

SEQ ID NO: 4771093 - DNA, 25 bp, Homo sapien
ccaagtcaaagacttctgcgtgcat

SEQ ID NO: 4771094 - DNA, 25 bp, Homo sapien
ctgggggaggccatagctctttgaa

SEQ ID NO: 4771095 - DNA, 25 bp, Homo sapien
gccagcatggccttttattagaggt

SEQ ID NO: 4771096 - DNA, 25 bp, Homo sapien
tgagtcctggagaacatcgtcctgg

SEQ ID NO: 4771097 - DNA, 25 bp, Homo sapien
gaagtccatgcctgtgagtccaaca

SEQ ID NO: 4771098 - DNA, 25 bp, Homo sapien
acaaagtaggtgcatgtcagcatcc

SEQ ID NO: 4771099 - DNA, 25 bp, Homo sapien
aagtgtttgcgatgctccagccaga

SEQ ID NO: 4771100 - DNA, 25 bp, Homo sapien
ctctccgcagtaagagggtgtttct

SEQ ID NO: 4771101 - DNA, 25 bp, Homo sapien
tctctccgcagtaagagggtgtttc

SEQ ID NO: 4771102 - DNA, 25 bp, Homo sapien
cctctctccgcagtaagagggtgtt

SEQ ID NO: 4771103 - DNA, 25 bp, Homo sapien
tcctgttcttgcatcggctgtccaa

SEQ ID NO: 4771104 - DNA, 25 bp, Homo sapien
tacagcacccttacagaagtgctcc

SEQ ID NO: 4771105 - DNA, 25 bp, Homo sapien
gtatacagcacccttacagaagtgc

SEQ ID NO: 4771106 - DNA, 25 bp, Homo sapien
ggcggtatacagcacccttacagaa

SEQ ID NO: 4771107 - DNA, 25 bp, Homo sapien
cttggcggtatacagcacccttaca

SEQ ID NO: 4771108 - DNA, 25 bp, Homo sapien
ctgccaagagagtcaagaaccacgt

SEQ ID NO: 4771109 - DNA, 25 bp, Homo sapien
catgtgtgaagtaggggtgagtgga

SEQ ID NO: 4771110 - DNA, 25 bp, Homo sapien
gagccaatgggcagttgggtcacat

SEQ ID NO: 4771111 - DNA, 25 bp, Homo sapien
gagctgagccaatgggcagttgggt

SEQ ID NO: 4771112 - DNA, 25 bp, Homo sapien
ctgagccaatgggcagttgggtcac

SEQ ID NO: 4771113 - DNA, 25 bp, Homo sapien
tctccttccctggaaacgagtggca

SEQ ID NO: 4771114 - DNA, 25 bp, Homo sapien
ttctccttccctggaaacgagtggc

SEQ ID NO: 4771115 - DNA, 25 bp, Homo sapien
ctccttccctggaaacgagtggcac

SEQ ID NO: 4771116 - DNA, 25 bp, Homo sapien
cggcttccagtcatggagatccact

SEQ ID NO: 4771117 - DNA, 25 bp, Homo sapien
tcagccaccggcttccagtcatgga

SEQ ID NO: 4771118 - DNA, 25 bp, Homo sapien
agccaccggcttccagtcatggaga

SEQ ID NO: 4771119 - DNA, 25 bp, Homo sapien
agctctagcggctgcctcactgtca

SEQ ID NO: 4771120 - DNA, 25 bp, Homo sapien
ttgagccacctgtgtcaccagggcc

SEQ ID NO: 4771121 - DNA, 25 bp, Homo sapien
tgtgtcaccagggcccagagcgtct

SEQ ID NO: 4771122 - DNA, 25 bp, Homo sapien
tcaccagggcccagagcgtcttcat

SEQ ID NO: 4771123 - DNA, 25 bp, Homo sapien
gtcaccagggcccagagcgtcttca

SEQ ID NO: 4771124 - DNA, 25 bp, Homo sapien
ccagttctggtgtcgggtccctgag

SEQ ID NO: 4771125 - DNA, 25 bp, Homo sapien
gacagccagatgaaggtccagttct

SEQ ID NO: 4771126 - DNA, 25 bp, Homo sapien
ctggctccgtagcacatgctcctgg

SEQ ID NO: 4771127 - DNA, 25 bp, Homo sapien
agctctgtggactggctccgtagca

SEQ ID NO: 4771128 - DNA, 25 bp, Homo sapien
tgtcagactgacaacgactgctgtg

SEQ ID NO: 4771129 - DNA, 25 bp, Homo sapien
tgttgttgctacgagatggctgcat

SEQ ID NO: 4771130 - DNA, 25 bp, Homo sapien
tgcaactgcttacttgcaacaggtg

SEQ ID NO: 4771131 - DNA, 25 bp, Homo sapien
cacagctgcaggaccattgcaactg

SEQ ID NO: 4771132 - DNA, 25 bp, Homo sapien
tcgtcttgtaatgatggcccttgat

SEQ ID NO: 4771133 - DNA, 25 bp, Homo sapien
gctgcatggacccttcgtcttgtaa

SEQ ID NO: 4771134 - DNA, 25 bp, Homo sapien
tgcggtagccacctcatccggtata

SEQ ID NO: 4771135 - DNA, 25 bp, Homo sapien
cagcgtccgaccagacatcagggtg

SEQ ID NO: 4771136 - DNA, 25 bp, Homo sapien
cacgaggctccataatcggtgctaa

SEQ ID NO: 4771137 - DNA, 25 bp, Homo sapien
cctgctggcagctagtgttgaccta

SEQ ID NO: 4771138 - DNA, 25 bp, Homo sapien
aaatagcccctaagaacacacgagg

SEQ ID NO: 4771139 - DNA, 25 bp, Homo sapien
tgttgacctaaacctgcatgcaggg

SEQ ID NO: 4771140 - DNA, 25 bp, Homo sapien
tcacacctaggagaggagcaagtgg

SEQ ID NO: 4771141 - DNA, 25 bp, Homo sapien
caagctaaggtggttggctcctcct

SEQ ID NO: 4771142 - DNA, 25 bp, Homo sapien
catcaggtgctccaagtctaaggac

SEQ ID NO: 4771143 - DNA, 25 bp, Homo sapien
tgtggcaaccctgacctgatggaag

SEQ ID NO: 4771144 - DNA, 25 bp, Homo sapien
acagctccgtgcagcaaattcttct

SEQ ID NO: 4771145 - DNA, 25 bp, Homo sapien
ttctgcagtgactgtttggcatcat

SEQ ID NO: 4771146 - DNA, 25 bp, Homo sapien
gatgacgtggaggacaatgcttgac

SEQ ID NO: 4771147 - DNA, 25 bp, Homo sapien
cgtggaggacaatgcttgacttggt

SEQ ID NO: 4771148 - DNA, 25 bp, Homo sapien
atgacgtggaggacaatgcttgact

SEQ ID NO: 4771149 - DNA, 25 bp, Homo sapien
cctggattggcctgtgtaggcagca

SEQ ID NO: 4771150 - DNA, 25 bp, Homo sapien
tccactgaggatgtggatctgccgg

SEQ ID NO: 4771151 - DNA, 25 bp, Homo sapien
cctggctcatccctggattggcctg

SEQ ID NO: 4771152 - DNA, 25 bp, Homo sapien
ccactgaggatgtggatctgccggc

SEQ ID NO: 4771153 - DNA, 25 bp, Homo sapien
cccactggcatcaggatttgcacag

SEQ ID NO: 4771154 - DNA, 25 bp, Homo sapien
catcaggatttgcacagccaacctt

SEQ ID NO: 4771155 - DNA, 25 bp, Homo sapien
tcccactggcatcaggatttgcaca

SEQ ID NO: 4771156 - DNA, 25 bp, Homo sapien
tggcatcaggatttgcacagccaac

SEQ ID NO: 4771157 - DNA, 25 bp, Homo sapien
gtctggtcaggagccgccattgtgt

SEQ ID NO: 4771158 - DNA, 25 bp, Homo sapien
agagtgagtggtagcaaggtttact

SEQ ID NO: 4771159 - DNA, 25 bp, Homo sapien
tgagggtctggtcaggagccgccat

SEQ ID NO: 4771160 - DNA, 25 bp, Homo sapien
caggagccgccattgtgtccagagt

SEQ ID NO: 4771161 - DNA, 25 bp, Homo sapien
gatcctgatagtgcctgagatgcct

SEQ ID NO: 4771162 - DNA, 25 bp, Homo sapien
tggttgatcctgatagtgcctgaga

SEQ ID NO: 4771163 - DNA, 25 bp, Homo sapien
cggagatgaccgtaatggttgatcc

SEQ ID NO: 4771164 - DNA, 25 bp, Homo sapien
cagactggggaatgataaccggaga

SEQ ID NO: 4771165 - DNA, 25 bp, Homo sapien
gctggaatcctggtttctgatgttg

SEQ ID NO: 4771166 - DNA, 25 bp, Homo sapien
agctggaatcctggtttctgatgtt

SEQ ID NO: 4771167 - DNA, 25 bp, Homo sapien
aaagcctgcttgacccctgtctgca

SEQ ID NO: 4771168 - DNA, 25 bp, Homo sapien
gccaggtctgatgtgcactttgagc

SEQ ID NO: 4771169 - DNA, 25 bp, Homo sapien
gcccatctcagggtgcaaagcctgc

SEQ ID NO: 4771170 - DNA, 25 bp, Homo sapien
cactctttggtaggggctgtgccca

SEQ ID NO: 4771171 - DNA, 25 bp, Homo sapien
tgggattaattgcatcagcttcctg

SEQ ID NO: 4771172 - DNA, 25 bp, Homo sapien
cttgggattaattgcatcagcttcc

SEQ ID NO: 4771173 - DNA, 25 bp, Homo sapien
ttcttgggattaattgcatcagctt

SEQ ID NO: 4771174 - DNA, 25 bp, Homo sapien
ggattaattgcatcagcttcctgca

SEQ ID NO: 4771175 - DNA, 25 bp, Homo sapien
ggctgagggcctagacagtccatga

SEQ ID NO: 4771176 - DNA, 25 bp, Homo sapien
tggtcatgatgagggccggctccca

SEQ ID NO: 4771177 - DNA, 25 bp, Homo sapien
gaccatggctatgatctgcccaggg

SEQ ID NO: 4771178 - DNA, 25 bp, Homo sapien
ctggaatctgcacttcatccccaga

SEQ ID NO: 4771179 - DNA, 25 bp, Homo sapien
tccagagcaacgtcctatctttctg

SEQ ID NO: 4771180 - DNA, 25 bp, Homo sapien
gcaacgtcctatctttctgctccat

SEQ ID NO: 4771181 - DNA, 25 bp, Homo sapien
tggagctttggcctccagagcaacg

SEQ ID NO: 4771182 - DNA, 25 bp, Homo sapien
gagctttggcctccagagcaacgtc

SEQ ID NO: 4771183 - DNA, 25 bp, Homo sapien
gtagtcagaccttgcaagaagccct

SEQ ID NO: 4771184 - DNA, 25 bp, Homo sapien
tctcttagctctttctggtccccta

SEQ ID NO: 4771185 - DNA, 25 bp, Homo sapien
ctcttagctctttctggtcccctac

SEQ ID NO: 4771186 - DNA, 25 bp, Homo sapien
ctgattctcaggttctcttagctct

SEQ ID NO: 4771187 - DNA, 25 bp, Homo sapien
attctcaggttctcttagctctttc

SEQ ID NO: 4771188 - DNA, 25 bp, Homo sapien
ctggttgtccacagttgatgtaact

SEQ ID NO: 4771189 - DNA, 25 bp, Homo sapien
tccacagttgatgtaactccttgct

SEQ ID NO: 4771190 - DNA, 25 bp, Homo sapien
gttgatgtaactccttgctttagtg

SEQ ID NO: 4771191 - DNA, 25 bp, Homo sapien
tgatgtaactccttgctttagtgtt

SEQ ID NO: 4771192 - DNA, 25 bp, Homo sapien
cagcgtgttgatacaactctcttca

SEQ ID NO: 4771193 - DNA, 25 bp, Homo sapien
tgtccaacagcgtgttgatacaact

SEQ ID NO: 4771194 - DNA, 25 bp, Homo sapien
ctgagtgtccaacagcgtgttgata

SEQ ID NO: 4771195 - DNA, 25 bp, Homo sapien
caacagcgtgttgatacaactctct

SEQ ID NO: 4771196 - DNA, 25 bp, Homo sapien
tgcaggattccataaccctctaata

SEQ ID NO: 4771197 - DNA, 25 bp, Homo sapien
gttgacaggtgggtcggactgcagg

SEQ ID NO: 4771198 - DNA, 25 bp, Homo sapien
gcaggattccataaccctctaatat

SEQ ID NO: 4771199 - DNA, 25 bp, Homo sapien
gtgggtcggactgcaggattccata

SEQ ID NO: 4771200 - DNA, 25 bp, Homo sapien
ttccttcttggctaatgcccagtgg

SEQ ID NO: 4771201 - DNA, 25 bp, Homo sapien
tgcctccagcgtagggcagcctctt

SEQ ID NO: 4771202 - DNA, 25 bp, Homo sapien
tgatggccagcatgcttccttcttg

SEQ ID NO: 4771203 - DNA, 25 bp, Homo sapien
agcactgcccgcagtgtggccagca

SEQ ID NO: 4771204 - DNA, 25 bp, Homo sapien
aagaaacctgtccctccgccttcat

SEQ ID NO: 4771205 - DNA, 25 bp, Homo sapien
cagccctgattcagctttgtggtgg

SEQ ID NO: 4771206 - DNA, 25 bp, Homo sapien
agccctgattcagctttgtggtgga

SEQ ID NO: 4771207 - DNA, 25 bp, Homo sapien
tccagccctgattcagctttgtggt

SEQ ID NO: 4771208 - DNA, 25 bp, Homo sapien
ctttctcatgcggaagtctggcctc

SEQ ID NO: 4771209 - DNA, 25 bp, Homo sapien
ttgggctttctcatgcggaagtctg

SEQ ID NO: 4771210 - DNA, 25 bp, Homo sapien
gggctttctcatgcggaagtctggc

SEQ ID NO: 4771211 - DNA, 25 bp, Homo sapien
ttctcatgcggaagtctggcctcat

SEQ ID NO: 4771212 - DNA, 25 bp, Homo sapien
ggtgtgctggcccacgacttccctt

SEQ ID NO: 4771213 - DNA, 25 bp, Homo sapien
ttccgtagagccgagaaacagccat

SEQ ID NO: 4771214 - DNA, 25 bp, Homo sapien
gctgggtacatgtggtgtgctggcc

SEQ ID NO: 4771215 - DNA, 25 bp, Homo sapien
acgacttcccttccgtagagccgag

SEQ ID NO: 4771216 - DNA, 25 bp, Homo sapien
agatgattgcttttccctggttgag

SEQ ID NO: 4771217 - DNA, 25 bp, Homo sapien
cagatgattgcttttccctggttga

SEQ ID NO: 4771218 - DNA, 25 bp, Homo sapien
gatgattgcttttccctggttgagc

SEQ ID NO: 4771219 - DNA, 25 bp, Homo sapien
tgattgcttttccctggttgagcag

SEQ ID NO: 4771220 - DNA, 25 bp, Homo sapien
ctgctgtttatacaagaaccagact

SEQ ID NO: 4771221 - DNA, 25 bp, Homo sapien
agaaccagacttttgatgttccttt

SEQ ID NO: 4771222 - DNA, 25 bp, Homo sapien
caagaaccagacttttgatgttcct

SEQ ID NO: 4771223 - DNA, 25 bp, Homo sapien
acaagaaccagacttttgatgttcc

SEQ ID NO: 4771224 - DNA, 25 bp, Homo sapien
tgcttccctcaccatgtaacattta

SEQ ID NO: 4771225 - DNA, 25 bp, Homo sapien
catctatgcctgttcaagtgtcacc

SEQ ID NO: 4771226 - DNA, 25 bp, Homo sapien
tacaccagtatgcactgtgcctagc

SEQ ID NO: 4771227 - DNA, 25 bp, Homo sapien
gacacccacttggtttacagctttg

SEQ ID NO: 4771228 - DNA, 25 bp, Homo sapien
tctttgagtggaccatattatcctg

SEQ ID NO: 4771229 - DNA, 25 bp, Homo sapien
gacaatttctgttggctcacttttt

SEQ ID NO: 4771230 - DNA, 25 bp, Homo sapien
gtctttgctaaggattatcttgaca

SEQ ID NO: 4771231 - DNA, 25 bp, Homo sapien
aagttggtgtagcttgtgtctttgc

SEQ ID NO: 4771232 - DNA, 25 bp, Homo sapien
cattgtgccgatggaagtgatcttc

SEQ ID NO: 4771233 - DNA, 25 bp, Homo sapien
tatgcatgaacagcttgataacaca

SEQ ID NO: 4771234 - DNA, 25 bp, Homo sapien
tcttatggtcagcagtaaagtggac

SEQ ID NO: 4771235 - DNA, 25 bp, Homo sapien
aacacagagaccactcgtcttatgg

SEQ ID NO: 4771236 - DNA, 25 bp, Homo sapien
tctgcaggatgcaagtgtccgcagc

SEQ ID NO: 4771237 - DNA, 25 bp, Homo sapien
ttctctgcaggatgcaagtgtccgc

SEQ ID NO: 4771238 - DNA, 25 bp, Homo sapien
tctctgcaggatgcaagtgtccgca

SEQ ID NO: 4771239 - DNA, 25 bp, Homo sapien
cttctctgcaggatgcaagtgtccg

SEQ ID NO: 4771240 - DNA, 25 bp, Homo sapien
cgaatgcagggtaatgcttgagctt

SEQ ID NO: 4771241 - DNA, 25 bp, Homo sapien
tatgacattcaaccagctatttagc

SEQ ID NO: 4771242 - DNA, 25 bp, Homo sapien
ttacattaccaccagaggtttatgg

SEQ ID NO: 4771243 - DNA, 25 bp, Homo sapien
ccctcctattggtactagcagtatg

SEQ ID NO: 4771244 - DNA, 25 bp, Homo sapien
attcagaggttctatgtttcttgtg

SEQ ID NO: 4771245 - DNA, 25 bp, Homo sapien
ggtgtaaagttttgcatacaatcat

SEQ ID NO: 4771246 - DNA, 25 bp, Homo sapien
actattcagaggttctatgtttctt

SEQ ID NO: 4771247 - DNA, 25 bp, Homo sapien
tgaaagcatttaggcctgaatttct

SEQ ID NO: 4771248 - DNA, 25 bp, Homo sapien
tcaggtacttataactcaaatttat

SEQ ID NO: 4771249 - DNA, 25 bp, Homo sapien
gtcaggtacttataactcaaattta

SEQ ID NO: 4771250 - DNA, 25 bp, Homo sapien
cactaggtggaagtaaagtatgcaa

SEQ ID NO: 4771251 - DNA, 25 bp, Homo sapien
tcctaaatccactaggtggaagtaa

SEQ ID NO: 4771252 - DNA, 25 bp, Homo sapien
gattgcaacttctcctaaatccact

SEQ ID NO: 4771253 - DNA, 25 bp, Homo sapien
acttctcctaaatccactaggtgga

SEQ ID NO: 4771254 - DNA, 25 bp, Homo sapien
caccagcatggcacatgtatacata

SEQ ID NO: 4771255 - DNA, 25 bp, Homo sapien
ctaatgctagatgacacattagtgg

SEQ ID NO: 4771256 - DNA, 25 bp, Homo sapien
agatgacacattagtgggtgcagcg

SEQ ID NO: 4771257 - DNA, 25 bp, Homo sapien
tgtatacatatgtaactaacctgca

SEQ ID NO: 4771258 - DNA, 25 bp, Homo sapien
ccaagacatgaagtagcccggcgat

SEQ ID NO: 4771259 - DNA, 25 bp, Homo sapien
tatagatcagagcttcatgcctggc

SEQ ID NO: 4771260 - DNA, 25 bp, Homo sapien
gatctgtaagtctctggtgccaaga

SEQ ID NO: 4771261 - DNA, 25 bp, Homo sapien
catgcctggcttctagacgaaataa

SEQ ID NO: 4771262 - DNA, 25 bp, Homo sapien
tgtgtttaccgctgtgcatagagga

SEQ ID NO: 4771263 - DNA, 25 bp, Homo sapien
cccggccgccagtgtatccttattg

SEQ ID NO: 4771264 - DNA, 25 bp, Homo sapien
gcttctgtccagaggtgtgtttacc

SEQ ID NO: 4771265 - DNA, 25 bp, Homo sapien
gctatgtagaagattcatcgtggcc

SEQ ID NO: 4771266 - DNA, 25 bp, Homo sapien
tttatgtacaccatcccagcaggcc

SEQ ID NO: 4771267 - DNA, 25 bp, Homo sapien
gccaccctgcacttaatacaactgt

SEQ ID NO: 4771268 - DNA, 25 bp, Homo sapien
gcaacattgggaatatgtgtcaaca

SEQ ID NO: 4771269 - DNA, 25 bp, Homo sapien
caacatgagacttggccaaatcaaa

SEQ ID NO: 4771270 - DNA, 25 bp, Homo sapien
tattcaacctacttgtgccacctgt

SEQ ID NO: 4771271 - DNA, 25 bp, Homo sapien
cctgttggcatgatgtatctttccc

SEQ ID NO: 4771272 - DNA, 25 bp, Homo sapien
caaatatgcacggagatagaagcga

SEQ ID NO: 4771273 - DNA, 25 bp, Homo sapien
tactaatgtaaccactccagacttg

SEQ ID NO: 4771274 - DNA, 25 bp, Homo sapien
cagaacggcagctggtccttgctgg

SEQ ID NO: 4771275 - DNA, 25 bp, Homo sapien
ggatccagaacggcagctggtcctt

SEQ ID NO: 4771276 - DNA, 25 bp, Homo sapien
tccagaacggcagctggtccttgct

SEQ ID NO: 4771277 - DNA, 25 bp, Homo sapien
gatccagaacggcagctggtccttg

SEQ ID NO: 4771278 - DNA, 25 bp, Homo sapien
atcttgcatgttgtgacaccttcac

SEQ ID NO: 4771279 - DNA, 25 bp, Homo sapien
tcttgcatgttgtgacaccttcacc

SEQ ID NO: 4771280 - DNA, 25 bp, Homo sapien
ccaaatgtaaaggacagatgtcgac

SEQ ID NO: 4771281 - DNA, 25 bp, Homo sapien
caacaagtaccaaatgtaaaggaca

SEQ ID NO: 4771282 - DNA, 25 bp, Homo sapien
aaggacagatgtcgactcttatgga

SEQ ID NO: 4771283 - DNA, 25 bp, Homo sapien
gatgtcgactcttatggaaatggac

SEQ ID NO: 4771284 - DNA, 25 bp, Homo sapien
caagtccaccgtgtctagtagagcc

SEQ ID NO: 4771285 - DNA, 25 bp, Homo sapien
agtagagcctccttcacgaagacgg

SEQ ID NO: 4771286 - DNA, 25 bp, Homo sapien
catgagaacggcatctgttagtcga

SEQ ID NO: 4771287 - DNA, 25 bp, Homo sapien
tgtgaataaatccatggctgtgaga

SEQ ID NO: 4771288 - DNA, 25 bp, Homo sapien
ggtttttgagtcttgcctccactgg

SEQ ID NO: 4771289 - DNA, 25 bp, Homo sapien
gcatgaacggtttttgagtcttgcc

SEQ ID NO: 4771290 - DNA, 25 bp, Homo sapien
ctacaatggcatgaacggtttttga

SEQ ID NO: 4771291 - DNA, 25 bp, Homo sapien
tttgagtcttgcctccactggagat

SEQ ID NO: 4771292 - DNA, 25 bp, Homo sapien
tactgtacagaagttggccctgtca

SEQ ID NO: 4771293 - DNA, 25 bp, Homo sapien
tagagctttgctctaaaccaactga

SEQ ID NO: 4771294 - DNA, 25 bp, Homo sapien
gaaactacctgggatttgcattagg

SEQ ID NO: 4771295 - DNA, 25 bp, Homo sapien
taaggcaaccctcatattacaatga

SEQ ID NO: 4771296 - DNA, 25 bp, Homo sapien
gatgttggattttccacgtggcatc

SEQ ID NO: 4771297 - DNA, 25 bp, Homo sapien
atgttggattttccacgtggcatct

SEQ ID NO: 4771298 - DNA, 25 bp, Homo sapien
tgttggattttccacgtggcatctg

SEQ ID NO: 4771299 - DNA, 25 bp, Homo sapien
agccatagcacacggaagctgaagg

SEQ ID NO: 4771300 - DNA, 25 bp, Homo sapien
gagactgacttctggcttaggcagc

SEQ ID NO: 4771301 - DNA, 25 bp, Homo sapien
caattaggttgttccagggtcttct

SEQ ID NO: 4771302 - DNA, 25 bp, Homo sapien
gacaagggatcagaggatatctccg

SEQ ID NO: 4771303 - DNA, 25 bp, Homo sapien
tccccttgctctccgggactgtggc

SEQ ID NO: 4771304 - DNA, 25 bp, Homo sapien
gagcaatgaggctgctgctcggcgg

SEQ ID NO: 4771305 - DNA, 25 bp, Homo sapien
gtggctttgctaatggaacaatcag

SEQ ID NO: 4771306 - DNA, 25 bp, Homo sapien
tgcagatgcatcccatgggtgcggc

SEQ ID NO: 4771307 - DNA, 25 bp, Homo sapien
gccccactcactatcatgccttttt

SEQ ID NO: 4771308 - DNA, 25 bp, Homo sapien
ccccactcactatcatgcctttttc

SEQ ID NO: 4771309 - DNA, 25 bp, Homo sapien
caccgtgacatcgagtggactccga

SEQ ID NO: 4771310 - DNA, 25 bp, Homo sapien
gtgacatcgagtggactccgaccct

SEQ ID NO: 4771311 - DNA, 25 bp, Homo sapien
tcacagacaccgtgacatcgagtgg

SEQ ID NO: 4771312 - DNA, 25 bp, Homo sapien
cagacaccgtgacatcgagtggact

SEQ ID NO: 4771313 - DNA, 25 bp, Homo sapien
gaaaccatcattagacttccttctt

SEQ ID NO: 4771314 - DNA, 25 bp, Homo sapien
cttgaaaccatcattagacttcctt

SEQ ID NO: 4771315 - DNA, 25 bp, Homo sapien
agagctcctttgacccacatttaat

SEQ ID NO: 4771316 - DNA, 25 bp, Homo sapien
tcctttgacccacatttaatgcctt

SEQ ID NO: 4771317 - DNA, 25 bp, Homo sapien
atgcagcaggtggtacacagaactt

SEQ ID NO: 4771318 - DNA, 25 bp, Homo sapien
cagtgtcaaaatcctcgtggggatg

SEQ ID NO: 4771319 - DNA, 25 bp, Homo sapien
caaaatcctcgtggggatgcagcag

SEQ ID NO: 4771320 - DNA, 25 bp, Homo sapien
tgcagcaggtggtacacagaacttc

SEQ ID NO: 4771321 - DNA, 25 bp, Homo sapien
tattccctatcttagacactttctg

SEQ ID NO: 4771322 - DNA, 25 bp, Homo sapien
caagttgttatgaatctattcccta

SEQ ID NO: 4771323 - DNA, 25 bp, Homo sapien
gtttcttagcattctatggcctctg

SEQ ID NO: 4771324 - DNA, 25 bp, Homo sapien
gcccggccgctactgatgattttta

SEQ ID NO: 4771325 - DNA, 25 bp, Homo sapien
ctcaattgttcaacttgtccctggg

SEQ ID NO: 4771326 - DNA, 25 bp, Homo sapien
gattcatggattctcatactagcac

SEQ ID NO: 4771327 - DNA, 25 bp, Homo sapien
taaagatgccagtgtttaagacaca

SEQ ID NO: 4771328 - DNA, 25 bp, Homo sapien
gacacaatcacctttcttatgaaca

SEQ ID NO: 4771329 - DNA, 25 bp, Homo sapien
tacccactgtggagatattactgtc

SEQ ID NO: 4771330 - DNA, 25 bp, Homo sapien
tgattcatgctgtatcctgcccaga

SEQ ID NO: 4771331 - DNA, 25 bp, Homo sapien
gcagctcaagaggatatacggtcac

SEQ ID NO: 4771332 - DNA, 25 bp, Homo sapien
cataagtcagacaagtggaaaggcc

SEQ ID NO: 4771333 - DNA, 25 bp, Homo sapien
caacagcttgagtgtggccatgatc

SEQ ID NO: 4771334 - DNA, 25 bp, Homo sapien
ccaaccaagatcaacagcttgagtg

SEQ ID NO: 4771335 - DNA, 25 bp, Homo sapien
tgtggccatgatctgcaaggctcca

SEQ ID NO: 4771336 - DNA, 25 bp, Homo sapien
aaaccccaaccaagatcaacagctt

SEQ ID NO: 4771337 - DNA, 25 bp, Homo sapien
cccatacctgtgtcgctgcgagctt

SEQ ID NO: 4771338 - DNA, 25 bp, Homo sapien
tgctcacactcatccctgattagac

SEQ ID NO: 4771339 - DNA, 25 bp, Homo sapien
cgagctttcgtccatgcatctgcag

SEQ ID NO: 4771340 - DNA, 25 bp, Homo sapien
tgggaaagcatgctcctcattctgc

SEQ ID NO: 4771341 - DNA, 25 bp, Homo sapien
tacccacaatgagtagcaggaggcc

SEQ ID NO: 4771342 - DNA, 25 bp, Homo sapien
gctattgctgaacgtggcctgctca

SEQ ID NO: 4771343 - DNA, 25 bp, Homo sapien
tcttcctgcagatgaaggtctccga

SEQ ID NO: 4771344 - DNA, 25 bp, Homo sapien
gataaataggaggagagacagcact

SEQ ID NO: 4771345 - DNA, 25 bp, Homo sapien
acacaggtaaaggatgggcagccag

SEQ ID NO: 4771346 - DNA, 25 bp, Homo sapien
gccagtgactgtaggagggcacaca

SEQ ID NO: 4771347 - DNA, 25 bp, Homo sapien
tcttagcagccacttaagcctgttt

SEQ ID NO: 4771348 - DNA, 25 bp, Homo sapien
catccaactatgtgccacagctgag

SEQ ID NO: 4771349 - DNA, 25 bp, Homo sapien
gcctttgtgaagtgacacgtgtagg

SEQ ID NO: 4771350 - DNA, 25 bp, Homo sapien
tttgtgaagtgacacgtgtaggtgc

SEQ ID NO: 4771351 - DNA, 25 bp, Homo sapien
tgaagtgacacgtgtaggtgcacag

SEQ ID NO: 4771352 - DNA, 25 bp, Homo sapien
tgacacgtgtaggtgcacagtctct

SEQ ID NO: 4771353 - DNA, 25 bp, Homo sapien
ccagaacgtaaagcataatacaaat

SEQ ID NO: 4771354 - DNA, 25 bp, Homo sapien
ctagaactgtacaatagggtatgat

SEQ ID NO: 4771355 - DNA, 25 bp, Homo sapien
catatacattggtattactgtagga

SEQ ID NO: 4771356 - DNA, 25 bp, Homo sapien
ttaaccaagaatttatacaagtgca

SEQ ID NO: 4771357 - DNA, 25 bp, Homo sapien
gagaccttgaaagtgtgggatccca

SEQ ID NO: 4771358 - DNA, 25 bp, Homo sapien
tgtaaggagtcgcagaaccagaaga

SEQ ID NO: 4771359 - DNA, 25 bp, Homo sapien
caagtccatcggtgctctggtaagc

SEQ ID NO: 4771360 - DNA, 25 bp, Homo sapien
ttacctgagctagcacagatgcagc

SEQ ID NO: 4771361 - DNA, 25 bp, Homo sapien
ggctatgctgctcttatgtcttgtg

SEQ ID NO: 4771362 - DNA, 25 bp, Homo sapien
ctaactaagccttgcttgtggctat

SEQ ID NO: 4771363 - DNA, 25 bp, Homo sapien
gcttgtggctatgctgctcttatgt

SEQ ID NO: 4771364 - DNA, 25 bp, Homo sapien
tatgtcttgtgtgccagaggaagaa

SEQ ID NO: 4771365 - DNA, 25 bp, Homo sapien
aacatatggtcttatgataaggcaa

SEQ ID NO: 4771366 - DNA, 25 bp, Homo sapien
gattttggacagtggtaacaccatg

SEQ ID NO: 4771367 - DNA, 25 bp, Homo sapien
acaccatgggacaggggaaagtatg

SEQ ID NO: 4771368 - DNA, 25 bp, Homo sapien
ataaaaatggtcactctgtttcaca

SEQ ID NO: 4771369 - DNA, 25 bp, Homo sapien
ttgcatttgggaacaccggcactgg

SEQ ID NO: 4771370 - DNA, 25 bp, Homo sapien
tggtcatgggtaggcttctcacaat

SEQ ID NO: 4771371 - DNA, 25 bp, Homo sapien
gaagactgcgttgtcactgtggtca

SEQ ID NO: 4771372 - DNA, 25 bp, Homo sapien
gaaaagctgaatgtctgaaatcccc

SEQ ID NO: 4771373 - DNA, 25 bp, Homo sapien
atttacctcaccacacgtttttgca

SEQ ID NO: 4771374 - DNA, 25 bp, Homo sapien
tttgcacctcctgtgatgacataaa

SEQ ID NO: 4771375 - DNA, 25 bp, Homo sapien
tataacttactacaaaataagggca

SEQ ID NO: 4771376 - DNA, 25 bp, Homo sapien
catcctcttaattatcctgctgtgt

SEQ ID NO: 4771377 - DNA, 25 bp, Homo sapien
agctgaaatgtgtcctggtcatgct

SEQ ID NO: 4771378 - DNA, 25 bp, Homo sapien
ggtcatgctgaggtccatccagtat

SEQ ID NO: 4771379 - DNA, 25 bp, Homo sapien
cagtatggccgtgccagttttgctc

SEQ ID NO: 4771380 - DNA, 25 bp, Homo sapien
ggtccttggcagaatgtgttcttgg

SEQ ID NO: 4771381 - DNA, 25 bp, Homo sapien
cagcagaggcgatgactctgagaaa

SEQ ID NO: 4771382 - DNA, 25 bp, Homo sapien
tgcagcagaggcgatgactctgaga

SEQ ID NO: 4771383 - DNA, 25 bp, Homo sapien
ccatctgcagcagaggcgatgactc

SEQ ID NO: 4771384 - DNA, 25 bp, Homo sapien
atctgcagcagaggcgatgactctg

SEQ ID NO: 4771385 - DNA, 25 bp, Homo sapien
gagtttcaggcaatggaaatgtgtt

SEQ ID NO: 4771386 - DNA, 25 bp, Homo sapien
aagagtttcaggcaatggaaatgtg

SEQ ID NO: 4771387 - DNA, 25 bp, Homo sapien
attttaagagtttcaggcaatggaa

SEQ ID NO: 4771388 - DNA, 25 bp, Homo sapien
ttaagagtttcaggcaatggaaatg

SEQ ID NO: 4771389 - DNA, 25 bp, Homo sapien
gtaaactggaacacagcatggtttt

SEQ ID NO: 4771390 - DNA, 25 bp, Homo sapien
tcaaagtaaactggaacacagcatg

SEQ ID NO: 4771391 - DNA, 25 bp, Homo sapien
acgggcctccgtcattttttcagct

SEQ ID NO: 4771392 - DNA, 25 bp, Homo sapien
aagtaaactggaacacagcatggtt

SEQ ID NO: 4771393 - DNA, 25 bp, Homo sapien
tggtgtactaggaaccctgcatttc

SEQ ID NO: 4771394 - DNA, 25 bp, Homo sapien
aaattggtgtactaggaaccctgca

SEQ ID NO: 4771395 - DNA, 25 bp, Homo sapien
ttaccacttcttcctatgcaagagg

SEQ ID NO: 4771396 - DNA, 25 bp, Homo sapien
cttcctatgcaagaggctgggcatg

SEQ ID NO: 4771397 - DNA, 25 bp, Homo sapien
cttggtcttctgcagcattgtttct

SEQ ID NO: 4771398 - DNA, 25 bp, Homo sapien
tgcggtcagggtactaggagttcat

SEQ ID NO: 4771399 - DNA, 25 bp, Homo sapien
tcagggtactaggagttcatgggtt

SEQ ID NO: 4771400 - DNA, 25 bp, Homo sapien
tactaggagttcatgggttgattta

SEQ ID NO: 4771401 - DNA, 25 bp, Homo sapien
tacgctgcggtcagggtactaggag

SEQ ID NO: 4771402 - DNA, 25 bp, Homo sapien
ttcccggaaggaacatacactctgt

SEQ ID NO: 4771403 - DNA, 25 bp, Homo sapien
tagttggttataccccactgtgagc

SEQ ID NO: 4771404 - DNA, 25 bp, Homo sapien
tgactagctgtgtctcagggctcct

SEQ ID NO: 4771405 - DNA, 25 bp, Homo sapien
ggtgatcccctaaacaatagccctg

SEQ ID NO: 4771406 - DNA, 25 bp, Homo sapien
aaggagcgtgattcccaggcagctg

SEQ ID NO: 4771407 - DNA, 25 bp, Homo sapien
tccagaagctgttgtgccaataacg

SEQ ID NO: 4771408 - DNA, 25 bp, Homo sapien
gacggagcctgcaccaatgaaaata

SEQ ID NO: 4771409 - DNA, 25 bp, Homo sapien
gacaaatgatatggccagacacacc

SEQ ID NO: 4771410 - DNA, 25 bp, Homo sapien
tgacccagtaggagctgtcctctag

SEQ ID NO: 4771411 - DNA, 25 bp, Homo sapien
cagtaggagctgtcctctagaacat

SEQ ID NO: 4771412 - DNA, 25 bp, Homo sapien
ggagctgtcctctagaacatactga

SEQ ID NO: 4771413 - DNA, 25 bp, Homo sapien
gacccagtaggagctgtcctctaga

SEQ ID NO: 4771414 - DNA, 25 bp, Homo sapien
gacaaaaaagtgtagaatacctgag

SEQ ID NO: 4771415 - DNA, 25 bp, Homo sapien
aagacaaaaaagtgtagaatacctg

SEQ ID NO: 4771416 - DNA, 25 bp, Homo sapien
gtgtagaatacctgagtacttttta

SEQ ID NO: 4771417 - DNA, 25 bp, Homo sapien
aaaaagtgtagaatacctgagtact

SEQ ID NO: 4771418 - DNA, 25 bp, Homo sapien
gacatcactgcccacgtagccctga

SEQ ID NO: 4771419 - DNA, 25 bp, Homo sapien
cctgatggaactccccagggtagag

SEQ ID NO: 4771420 - DNA, 25 bp, Homo sapien
actgcccacgtagccctgatggaac

SEQ ID NO: 4771421 - DNA, 25 bp, Homo sapien
ccctgatggaactccccagggtaga

SEQ ID NO: 4771422 - DNA, 25 bp, Homo sapien
caagggtgatttttataaccgcaga

SEQ ID NO: 4771423 - DNA, 25 bp, Homo sapien
tactttgtatacacactgtccttgt

SEQ ID NO: 4771424 - DNA, 25 bp, Homo sapien
cacatataaaagtcatgctctgcaa

SEQ ID NO: 4771425 - DNA, 25 bp, Homo sapien
agagaacttatgtagaagcaacaca

SEQ ID NO: 4771426 - DNA, 25 bp, Homo sapien
tacatgctaccctgacgacggtggg

SEQ ID NO: 4771427 - DNA, 25 bp, Homo sapien
ggtaaggtgaacacatcccctcagg

SEQ ID NO: 4771428 - DNA, 25 bp, Homo sapien
tctgcctgggtcaaaaactgctatg

SEQ ID NO: 4771429 - DNA, 25 bp, Homo sapien
tgaagaacttccgacagagcagcac

SEQ ID NO: 4771430 - DNA, 25 bp, Homo sapien
tggagactcacggtcctgcgcttct

SEQ ID NO: 4771431 - DNA, 25 bp, Homo sapien
tgaaggcacacttccatgtgcgggc

SEQ ID NO: 4771432 - DNA, 25 bp, Homo sapien
gatttgttcgtagatgggcttgagc

SEQ ID NO: 4771433 - DNA, 25 bp, Homo sapien
cacgttatggttgagcttggctgag

SEQ ID NO: 4771434 - DNA, 25 bp, Homo sapien
caccaggatgaaggcgtgccctttg

SEQ ID NO: 4771435 - DNA, 25 bp, Homo sapien
gagtacaccaggatgaaggcgtgcc

SEQ ID NO: 4771436 - DNA, 25 bp, Homo sapien
tacaccaggatgaaggcgtgccctt

SEQ ID NO: 4771437 - DNA, 25 bp, Homo sapien
gtacaccaggatgaaggcgtgccct

SEQ ID NO: 4771438 - DNA, 25 bp, Homo sapien
ggatgtagctctcccggaatgtgcc

SEQ ID NO: 4771439 - DNA, 25 bp, Homo sapien
tttcacaaacctcaacaccagggag

SEQ ID NO: 4771440 - DNA, 25 bp, Homo sapien
tcgtgtcggtgatctgcaatgtgca

SEQ ID NO: 4771441 - DNA, 25 bp, Homo sapien
cacttgccggtaggtgtcttccacc

SEQ ID NO: 4771442 - DNA, 25 bp, Homo sapien
ggagagctccaactctcagccagga

SEQ ID NO: 4771443 - DNA, 25 bp, Homo sapien
gctggagagctccaactctcagcca

SEQ ID NO: 4771444 - DNA, 25 bp, Homo sapien
gttgctggagagctccaactctcag

SEQ ID NO: 4771445 - DNA, 25 bp, Homo sapien
agagctccaactctcagccaggacg

SEQ ID NO: 4771446 - DNA, 25 bp, Homo sapien
tgctgaatttcaacaagaatgctca

SEQ ID NO: 4771447 - DNA, 25 bp, Homo sapien
taataaactttcttgtactctgatt

SEQ ID NO: 4771448 - DNA, 25 bp, Homo sapien
gattgtacctattcttgatttctcc

SEQ ID NO: 4771449 - DNA, 25 bp, Homo sapien
cttaggaactgtgataccatgctga

SEQ ID NO: 4771450 - DNA, 25 bp, Homo sapien
tgagaatgctgggttgttagacaca

SEQ ID NO: 4771451 - DNA, 25 bp, Homo sapien
tctgagtcgcctcttaggaacaatt

SEQ ID NO: 4771452 - DNA, 25 bp, Homo sapien
gtgcttgcccgggactattaccaaa

SEQ ID NO: 4771453 - DNA, 25 bp, Homo sapien
tgtgccttggtatagacagcaatac

SEQ ID NO: 4771454 - DNA, 25 bp, Homo sapien
tccctgagagcggtaatccctttcc

SEQ ID NO: 4771455 - DNA, 25 bp, Homo sapien
ggatgaaagcatgccgaaccaaacg

SEQ ID NO: 4771456 - DNA, 25 bp, Homo sapien
caagcgcatgaagtgaaggagtcga

SEQ ID NO: 4771457 - DNA, 25 bp, Homo sapien
aacggcagtccctagcgtgcttggc

SEQ ID NO: 4771458 - DNA, 25 bp, Homo sapien
gggaagaacacaactccgctcagag

SEQ ID NO: 4771459 - DNA, 25 bp, Homo sapien
gggtgtgtggatgcggctcctcccg

SEQ ID NO: 4771460 - DNA, 25 bp, Homo sapien
gctccactcgcgcaggacagggcag

SEQ ID NO: 4771461 - DNA, 25 bp, Homo sapien
ttcttcagagctccactcgcgcagg

SEQ ID NO: 4771462 - DNA, 25 bp, Homo sapien
cagtctgtagctaggagttcttgaa

SEQ ID NO: 4771463 - DNA, 25 bp, Homo sapien
acagaagcatgtgtggtcccggtcc

SEQ ID NO: 4771464 - DNA, 25 bp, Homo sapien
gactcggttacaccagaaggctggg

SEQ ID NO: 4771465 - DNA, 25 bp, Homo sapien
atgtgaaggttggtggacagctgct

SEQ ID NO: 4771466 - DNA, 25 bp, Homo sapien
tgcctggtgtcagtcctgcgcgtgt

SEQ ID NO: 4771467 - DNA, 25 bp, Homo sapien
gatgttccccaaatgcgtacctagg

SEQ ID NO: 4771468 - DNA, 25 bp, Homo sapien
tcctaaatctgtcctgatgttcccc

SEQ ID NO: 4771469 - DNA, 25 bp, Homo sapien
cacactttttgtggctgtcgcatac

SEQ ID NO: 4771470 - DNA, 25 bp, Homo sapien
caccaggtgtatgctgatcacaccc

SEQ ID NO: 4771471 - DNA, 25 bp, Homo sapien
tgtctttgtggccttaaatagtctt

SEQ ID NO: 4771472 - DNA, 25 bp, Homo sapien
cttttcaagtaatttagctctccca

SEQ ID NO: 4771473 - DNA, 25 bp, Homo sapien
ccatcctcaattcctgtttgcacag

SEQ ID NO: 4771474 - DNA, 25 bp, Homo sapien
catcctcaattcctgtttgcacaga

SEQ ID NO: 4771475 - DNA, 25 bp, Homo sapien
gccaccgcagcctttctcggggaag

SEQ ID NO: 4771476 - DNA, 25 bp, Homo sapien
ttagacagagctgccgtgcagccac

SEQ ID NO: 4771477 - DNA, 25 bp, Homo sapien
gtgcagccaccgcaggacactttta

SEQ ID NO: 4771478 - DNA, 25 bp, Homo sapien
cagccaccgcaggacacttttaata

SEQ ID NO: 4771479 - DNA, 25 bp, Homo sapien
aagatgggggagtggagaagggtca

SEQ ID NO: 4771480 - DNA, 25 bp, Homo sapien
attatgttattggtgaaggtgtcac

SEQ ID NO: 4771481 - DNA, 25 bp, Homo sapien
tcacaacatgcaagatgggggagtg

SEQ ID NO: 4771482 - DNA, 25 bp, Homo sapien
cagcagggaaatacatgattatgtt

SEQ ID NO: 4771483 - DNA, 25 bp, Homo sapien
caagggttcatgacggctgaatgat

SEQ ID NO: 4771484 - DNA, 25 bp, Homo sapien
cagaaacaagggttcatgacggctg

SEQ ID NO: 4771485 - DNA, 25 bp, Homo sapien
gaaacaagggttcatgacggctgaa

SEQ ID NO: 4771486 - DNA, 25 bp, Homo sapien
ccacagaaacaagggttcatgacgg

SEQ ID NO: 4771487 - DNA, 25 bp, Homo sapien
caaaaatggcaaagagagatgtctg

SEQ ID NO: 4771488 - DNA, 25 bp, Homo sapien
tgactctgctgtgagatcggatgtc

SEQ ID NO: 4771489 - DNA, 25 bp, Homo sapien
tggcaaagagagatgtctgagtcag

SEQ ID NO: 4771490 - DNA, 25 bp, Homo sapien
tccaaaaatggcaaagagagatgtc

SEQ ID NO: 4771491 - DNA, 25 bp, Homo sapien
tgaaaccgatgtcaggcaaggatag

SEQ ID NO: 4771492 - DNA, 25 bp, Homo sapien
tgtcaggcaaggataggttggagag

SEQ ID NO: 4771493 - DNA, 25 bp, Homo sapien
accgatgtcaggcaaggataggttg

SEQ ID NO: 4771494 - DNA, 25 bp, Homo sapien
tcaggcaaggataggttggagagga

SEQ ID NO: 4771495 - DNA, 25 bp, Homo sapien
ggacaggaacagcccagcaaggacc

SEQ ID NO: 4771496 - DNA, 25 bp, Homo sapien
gacaggaacagcccagcaaggacca

SEQ ID NO: 4771497 - DNA, 25 bp, Homo sapien
acaggaacagcccagcaaggaccag

SEQ ID NO: 4771498 - DNA, 25 bp, Homo sapien
tgtgggtctgtagagattggacacc

SEQ ID NO: 4771499 - DNA, 25 bp, Homo sapien
ctgtgggtctgtagagattggacac

SEQ ID NO: 4771500 - DNA, 25 bp, Homo sapien
gtctgtagagattggacaccttttg

SEQ ID NO: 4771501 - DNA, 25 bp, Homo sapien
tgggtctgtagagattggacacctt

SEQ ID NO: 4771502 - DNA, 25 bp, Homo sapien
aaacaagtaaaccaacacccagcat

SEQ ID NO: 4771503 - DNA, 25 bp, Homo sapien
tgagaaatcggaaacaagtaaacca

SEQ ID NO: 4771504 - DNA, 25 bp, Homo sapien
ctagaaaagagggttgagaaatcgg

SEQ ID NO: 4771505 - DNA, 25 bp, Homo sapien
agagggttgagaaatcggaaacaag

SEQ ID NO: 4771506 - DNA, 25 bp, Homo sapien
tgctgggccatgaccacggagaaca

SEQ ID NO: 4771507 - DNA, 25 bp, Homo sapien
ctctgctgggccatgaccacggaga

SEQ ID NO: 4771508 - DNA, 25 bp, Homo sapien
tgggccatgaccacggagaacaggt

SEQ ID NO: 4771509 - DNA, 25 bp, Homo sapien
tctgctgggccatgaccacggagaa

SEQ ID NO: 4771510 - DNA, 25 bp, Homo sapien
cgcagcctccacagggcgctttgaa

SEQ ID NO: 4771511 - DNA, 25 bp, Homo sapien
tgctgcgcagcctccacagggcgct

SEQ ID NO: 4771512 - DNA, 25 bp, Homo sapien
cctccacagggcgctttgaatgtcc

SEQ ID NO: 4771513 - DNA, 25 bp, Homo sapien
tccacagggcgctttgaatgtccct

SEQ ID NO: 4771514 - DNA, 25 bp, Homo sapien
gtaacaatctaactgtgcagctggg

SEQ ID NO: 4771515 - DNA, 25 bp, Homo sapien
ttgaagaaggtgaattgtaacaatc

SEQ ID NO: 4771516 - DNA, 25 bp, Homo sapien
gaattgtaacaatctaactgtgcag

SEQ ID NO: 4771517 - DNA, 25 bp, Homo sapien
aggtgaattgtaacaatctaactgt

SEQ ID NO: 4771518 - DNA, 25 bp, Homo sapien
acatccgtgtcaggcagctcgcata

SEQ ID NO: 4771519 - DNA, 25 bp, Homo sapien
cagctcgcataagagatgactctga

SEQ ID NO: 4771520 - DNA, 25 bp, Homo sapien
aagagatgactctgatatgtgactg

SEQ ID NO: 4771521 - DNA, 25 bp, Homo sapien
ctgatatgtgactgcatgtccacag

SEQ ID NO: 4771522 - DNA, 25 bp, Homo sapien
tcagagctgacagccaggatgacga

SEQ ID NO: 4771523 - DNA, 25 bp, Homo sapien
agagctgacagccaggatgacgagc

SEQ ID NO: 4771524 - DNA, 25 bp, Homo sapien
gatgacgagcaggttcctcagcact

SEQ ID NO: 4771525 - DNA, 25 bp, Homo sapien
tcctcagcactgtgaccagatacat

SEQ ID NO: 4771526 - DNA, 25 bp, Homo sapien
tactgttagtataaacaatgtgctc

SEQ ID NO: 4771527 - DNA, 25 bp, Homo sapien
gaagagaaggtagatccatgtgtgc

SEQ ID NO: 4771528 - DNA, 25 bp, Homo sapien
tctgctacacagaaaagcagtctcc

SEQ ID NO: 4771529 - DNA, 25 bp, Homo sapien
tagaagacagaatccatggatttac

SEQ ID NO: 4771530 - DNA, 25 bp, Homo sapien
ggcgcttcagccgattcccgcccag

SEQ ID NO: 4771531 - DNA, 25 bp, Homo sapien
tcctctacacctgccgccgcctggg

SEQ ID NO: 4771532 - DNA, 25 bp, Homo sapien
attccgcgggcctcgcccggcgctt

SEQ ID NO: 4771533 - DNA, 25 bp, Homo sapien
cgcctgggccgattccgcgggcctc

SEQ ID NO: 4771534 - DNA, 25 bp, Homo sapien
ttcatcggccgaggtaaaagtgctg

SEQ ID NO: 4771535 - DNA, 25 bp, Homo sapien
gggaacgacgcgctgctttcatgcc

SEQ ID NO: 4771536 - DNA, 25 bp, Homo sapien
taaaatacaggtgggttccgccagc

SEQ ID NO: 4771537 - DNA, 25 bp, Homo sapien
ggcacagcgcgaggaagtcgatctt

SEQ ID NO: 4771538 - DNA, 25 bp, Homo sapien
tggagaggcgcttccagttactgct

SEQ ID NO: 4771539 - DNA, 25 bp, Homo sapien
gagctggagaggcgcttccagttac

SEQ ID NO: 4771540 - DNA, 25 bp, Homo sapien
tgagctggagaggcgcttccagtta

SEQ ID NO: 4771541 - DNA, 25 bp, Homo sapien
gctggagaggcgcttccagttactg

SEQ ID NO: 4771542 - DNA, 25 bp, Homo sapien
ctgcgaggcgtcttctgctgctttc

SEQ ID NO: 4771543 - DNA, 25 bp, Homo sapien
ctgtcttttcctgcgaggcgtcttc

SEQ ID NO: 4771544 - DNA, 25 bp, Homo sapien
ttcctgcgaggcgtcttctgctgct

SEQ ID NO: 4771545 - DNA, 25 bp, Homo sapien
cttttcctgcgaggcgtcttctgct

SEQ ID NO: 4771546 - DNA, 25 bp, Homo sapien
ccttcagtgtgagcctgacctgctt

SEQ ID NO: 4771547 - DNA, 25 bp, Homo sapien
tcagtgtgagcctgacctgcttcat

SEQ ID NO: 4771548 - DNA, 25 bp, Homo sapien
gggactgtgattgcccccttcagtg

SEQ ID NO: 4771549 - DNA, 25 bp, Homo sapien
cctgcctgcacagggggactgtgat

SEQ ID NO: 4771550 - DNA, 25 bp, Homo sapien
gctggagataggtgatgatttagta

SEQ ID NO: 4771551 - DNA, 25 bp, Homo sapien
ggtgatattgggcacaggctcactc

SEQ ID NO: 4771552 - DNA, 25 bp, Homo sapien
tcccaatatttaggcccacaggatg

SEQ ID NO: 4771553 - DNA, 25 bp, Homo sapien
gatttagtatagtgcacatccacca

SEQ ID NO: 4771554 - DNA, 25 bp, Homo sapien
aatggtgagagactgaacactgtcc

SEQ ID NO: 4771555 - DNA, 25 bp, Homo sapien
tactgggagccctagctagtgcaag

SEQ ID NO: 4771556 - DNA, 25 bp, Homo sapien
actctgttcaacatcctactgggag

SEQ ID NO: 4771557 - DNA, 25 bp, Homo sapien
gtccctctgatactgaaaacaaggt

SEQ ID NO: 4771558 - DNA, 25 bp, Homo sapien
tcagccacatcggtgctgacactga

SEQ ID NO: 4771559 - DNA, 25 bp, Homo sapien
acactgagtgcagcacattcttctg

SEQ ID NO: 4771560 - DNA, 25 bp, Homo sapien
agccacatcggtgctgacactgagt

SEQ ID NO: 4771561 - DNA, 25 bp, Homo sapien
ccatcagccacatcggtgctgacac

SEQ ID NO: 4771562 - DNA, 25 bp, Homo sapien
gcatcccggtgcagtccagtgtggt

SEQ ID NO: 4771563 - DNA, 25 bp, Homo sapien
catcccggtgcagtccagtgtggtc

SEQ ID NO: 4771564 - DNA, 25 bp, Homo sapien
acagcatcccggtgcagtccagtgt

SEQ ID NO: 4771565 - DNA, 25 bp, Homo sapien
agcatcccggtgcagtccagtgtgg

SEQ ID NO: 4771566 - DNA, 25 bp, Homo sapien
gtttctccacagcagggaaccactg

SEQ ID NO: 4771567 - DNA, 25 bp, Homo sapien
gaagcagacatggaacctgcaggtg

SEQ ID NO: 4771568 - DNA, 25 bp, Homo sapien
tgttacccagtgcaaggagggcctt

SEQ ID NO: 4771569 - DNA, 25 bp, Homo sapien
actacaccatcgagcgggagctgaa

SEQ ID NO: 4771570 - DNA, 25 bp, Homo sapien
taactgtctactaggataattggca

SEQ ID NO: 4771571 - DNA, 25 bp, Homo sapien
aaaactatggtgcttaactgtgtcc

SEQ ID NO: 4771572 - DNA, 25 bp, Homo sapien
aactgggagtaagtagcactaatgc

SEQ ID NO: 4771573 - DNA, 25 bp, Homo sapien
tagtaaaggcatggtagataagcac

SEQ ID NO: 4771574 - DNA, 25 bp, Homo sapien
ccagtgatggctagtccgaggacat

SEQ ID NO: 4771575 - DNA, 25 bp, Homo sapien
tgtgaggtagagaggctgcaacccc

SEQ ID NO: 4771576 - DNA, 25 bp, Homo sapien
tgcaaccccaggataatgtcctcag

SEQ ID NO: 4771577 - DNA, 25 bp, Homo sapien
tatgtcaagaagaggtgatggtccc

SEQ ID NO: 4771578 - DNA, 25 bp, Homo sapien
cttagcatgtgactcctgaagggaa

SEQ ID NO: 4771579 - DNA, 25 bp, Homo sapien
atttgttactcatcgggcccaggga

SEQ ID NO: 4771580 - DNA, 25 bp, Homo sapien
gcttctacggccatgagactgatcc

SEQ ID NO: 4771581 - DNA, 25 bp, Homo sapien
tgatccctggccactgaaaagcttt

SEQ ID NO: 4771582 - DNA, 25 bp, Homo sapien
ctgtgaggctgaactcttggtggct

SEQ ID NO: 4771583 - DNA, 25 bp, Homo sapien
caagtttggtaaagtggtgactgca

SEQ ID NO: 4771584 - DNA, 25 bp, Homo sapien
acaggccccgtgctcgtaggaatac

SEQ ID NO: 4771585 - DNA, 25 bp, Homo sapien
tccagagggagtcttcaacacaggc

SEQ ID NO: 4771586 - DNA, 25 bp, Homo sapien
ccaatgactgcaagtcggcctggat

SEQ ID NO: 4771587 - DNA, 25 bp, Homo sapien
tttagcaggtaacaaaggagcatca

SEQ ID NO: 4771588 - DNA, 25 bp, Homo sapien
gcagggccgacagtttctatcacag

SEQ ID NO: 4771589 - DNA, 25 bp, Homo sapien
tagtgaggccgtgaatatcttgtcc

SEQ ID NO: 4771590 - DNA, 25 bp, Homo sapien
cattgtgtcactggacatttttaaa

SEQ ID NO: 4771591 - DNA, 25 bp, Homo sapien
tcatttcagaagagctacattgtgt

SEQ ID NO: 4771592 - DNA, 25 bp, Homo sapien
ttcatttcagaagagctacattgtg

SEQ ID NO: 4771593 - DNA, 25 bp, Homo sapien
ccatttcctgatgaacccggaggtg

SEQ ID NO: 4771594 - DNA, 25 bp, Homo sapien
tcctctcgtaccaaaagcgcctggt

SEQ ID NO: 4771595 - DNA, 25 bp, Homo sapien
taaggtcacacccatagcaatggct

SEQ ID NO: 4771596 - DNA, 25 bp, Homo sapien
agcacactttctggacaccggatgt

SEQ ID NO: 4771597 - DNA, 25 bp, Homo sapien
tgtgcagcaagttggtgaagatgcc

SEQ ID NO: 4771598 - DNA, 25 bp, Homo sapien
ccctggggctgtgcagcaagttggt

SEQ ID NO: 4771599 - DNA, 25 bp, Homo sapien
gctgtgcagcaagttggtgaagatg

SEQ ID NO: 4771600 - DNA, 25 bp, Homo sapien
gggctgtgcagcaagttggtgaaga

SEQ ID NO: 4771601 - DNA, 25 bp, Homo sapien
gtggcctggcagctgtctaaagccc

SEQ ID NO: 4771602 - DNA, 25 bp, Homo sapien
tgaaagtccatgaggctggctcctg

SEQ ID NO: 4771603 - DNA, 25 bp, Homo sapien
ctgtgaaagtccatgaggctggctc

SEQ ID NO: 4771604 - DNA, 25 bp, Homo sapien
gctcctggttctgggctgtggcctg

SEQ ID NO: 4771605 - DNA, 25 bp, Homo sapien
gatgacaggagtgctcaggttcccc

SEQ ID NO: 4771606 - DNA, 25 bp, Homo sapien
tcccggaggcattccggatgacagg

SEQ ID NO: 4771607 - DNA, 25 bp, Homo sapien
tagctagaagggagccttcgcccag

SEQ ID NO: 4771608 - DNA, 25 bp, Homo sapien
cccacctggagcttgctagtccagg

SEQ ID NO: 4771609 - DNA, 25 bp, Homo sapien
gtgtctctgagtcaacaggccaaga

SEQ ID NO: 4771610 - DNA, 25 bp, Homo sapien
taaatgtcttagctccagagggaag

SEQ ID NO: 4771611 - DNA, 25 bp, Homo sapien
tccaccaggagatgcaacaatgatt

SEQ ID NO: 4771612 - DNA, 25 bp, Homo sapien
cattgtgggctcttcgtgtctctga

SEQ ID NO: 4771613 - DNA, 25 bp, Homo sapien
ttcgggccacggttgtcaaaggaga

SEQ ID NO: 4771614 - DNA, 25 bp, Homo sapien
tagacatcactggagacgctggagc

SEQ ID NO: 4771615 - DNA, 25 bp, Homo sapien
tgaagttcgggccacggttgtcaaa

SEQ ID NO: 4771616 - DNA, 25 bp, Homo sapien
atgtagacatcactggagacgctgg

SEQ ID NO: 4771617 - DNA, 25 bp, Homo sapien
tccctgtggatggagagccgtttgc

SEQ ID NO: 4771618 - DNA, 25 bp, Homo sapien
gaccctgattctggcaatgccctac

SEQ ID NO: 4771619 - DNA, 25 bp, Homo sapien
aatgccctacagttacatggcccag

SEQ ID NO: 4771620 - DNA, 25 bp, Homo sapien
gggtccctgtggatggagagccgtt

SEQ ID NO: 4771621 - DNA, 25 bp, Homo sapien
agttgctgatgctatctcccaggaa

SEQ ID NO: 4771622 - DNA, 25 bp, Homo sapien
gccaggtcccgtctgtgttcaggga

SEQ ID NO: 4771623 - DNA, 25 bp, Homo sapien
tccattctcatgcaggaggctgggt

SEQ ID NO: 4771624 - DNA, 25 bp, Homo sapien
gggttcaggcactgcggtcctcgct

SEQ ID NO: 4771625 - DNA, 25 bp, Homo sapien
gcataggatctagcaaacaagagga

SEQ ID NO: 4771626 - DNA, 25 bp, Homo sapien
cagtgcagagtggtggaaagttccc

SEQ ID NO: 4771627 - DNA, 25 bp, Homo sapien
ttaaagtgaggccagtagcatactg

SEQ ID NO: 4771628 - DNA, 25 bp, Homo sapien
gcgaggacccatttgatactatgaa

SEQ ID NO: 4771629 - DNA, 25 bp, Homo sapien
tgaggattctggacctgtcgccaca

SEQ ID NO: 4771630 - DNA, 25 bp, Homo sapien
tgaccacacgggacaaatcatagag

SEQ ID NO: 4771631 - DNA, 25 bp, Homo sapien
gagggtctacctcacaacaaggaat

SEQ ID NO: 4771632 - DNA, 25 bp, Homo sapien
ggacaaccgggcagcaatgagatct

SEQ ID NO: 4771633 - DNA, 25 bp, Homo sapien
gagcagacttcccagatttaatggt

SEQ ID NO: 4771634 - DNA, 25 bp, Homo sapien
aagtggtaattcagttgtcaagagg

SEQ ID NO: 4771635 - DNA, 25 bp, Homo sapien
aaatgtgcggtcaggcattgtcatg

SEQ ID NO: 4771636 - DNA, 25 bp, Homo sapien
tgtcaagaggtcaggtaaacatagt

SEQ ID NO: 4771637 - DNA, 25 bp, Homo sapien
aaaaagaaaatcactcgaattggct

SEQ ID NO: 4771638 - DNA, 25 bp, Homo sapien
actgcactgtacattcattagtagt

SEQ ID NO: 4771639 - DNA, 25 bp, Homo sapien
tgttgacgttgcaagttgtctctgc

SEQ ID NO: 4771640 - DNA, 25 bp, Homo sapien
tgcactgtacattcattagtagttc

SEQ ID NO: 4771641 - DNA, 25 bp, Homo sapien
tggatccagcgcttcgtagcatgtt

SEQ ID NO: 4771642 - DNA, 25 bp, Homo sapien
cgctttctctcgtggaaccggttgg

SEQ ID NO: 4771643 - DNA, 25 bp, Homo sapien
ggttggaagctagttacagacgtca

SEQ ID NO: 4771644 - DNA, 25 bp, Homo sapien
gttacagacgtcaaaacaactcacc

SEQ ID NO: 4771645 - DNA, 25 bp, Homo sapien
aggcctgtgagaggagccgcagcag

SEQ ID NO: 4771646 - DNA, 25 bp, Homo sapien
agccaggcctgtgagaggagccgca

SEQ ID NO: 4771647 - DNA, 25 bp, Homo sapien
tagctgcagcctgcgggatctgcat

SEQ ID NO: 4771648 - DNA, 25 bp, Homo sapien
cagcagtagctgcagcctgcgggat

SEQ ID NO: 4771649 - DNA, 25 bp, Homo sapien
cccatctccagatttacgtaggcag

SEQ ID NO: 4771650 - DNA, 25 bp, Homo sapien
atatttatggtttagtcccatctcc

SEQ ID NO: 4771651 - DNA, 25 bp, Homo sapien
atttacgtaggcagtctcgggattc

SEQ ID NO: 4771652 - DNA, 25 bp, Homo sapien
cgtaggcagtctcgggattcaaagt

SEQ ID NO: 4771653 - DNA, 25 bp, Homo sapien
tcagaaggcgctgacatcggatgtt

SEQ ID NO: 4771654 - DNA, 25 bp, Homo sapien
cgctgacatcggatgttgtaaaggg

SEQ ID NO: 4771655 - DNA, 25 bp, Homo sapien
gagtgggaataggattccgcatcct

SEQ ID NO: 4771656 - DNA, 25 bp, Homo sapien
gaatagagtgggaataggattccgc

SEQ ID NO: 4771657 - DNA, 25 bp, Homo sapien
tgtcctcgcctttggctgtgctgca

SEQ ID NO: 4771658 - DNA, 25 bp, Homo sapien
tgatacagcaagcagctgtcctcgc

SEQ ID NO: 4771659 - DNA, 25 bp, Homo sapien
aaatgatacagcaagcagctgtcct

SEQ ID NO: 4771660 - DNA, 25 bp, Homo sapien
ggtgtgatggaagaaatgatacagc

SEQ ID NO: 4771661 - DNA, 25 bp, Homo sapien
ccaggctagtgtgcagtgaggccat

SEQ ID NO: 4771662 - DNA, 25 bp, Homo sapien
ctagtgtgcagtgaggccatctcag

SEQ ID NO: 4771663 - DNA, 25 bp, Homo sapien
ggctagtgtgcagtgaggccatctc

SEQ ID NO: 4771664 - DNA, 25 bp, Homo sapien
caggctagtgtgcagtgaggccatc

SEQ ID NO: 4771665 - DNA, 25 bp, Homo sapien
ctaattctaacattcctaacctggg

SEQ ID NO: 4771666 - DNA, 25 bp, Homo sapien
gctaggaatgtaggcaagaaaccac

SEQ ID NO: 4771667 - DNA, 25 bp, Homo sapien
caatgttgttgccatagaactccag

SEQ ID NO: 4771668 - DNA, 25 bp, Homo sapien
tgaactagttaatggccagatcagt

SEQ ID NO: 4771669 - DNA, 25 bp, Homo sapien
acagcatttccacaaccaccagagt

SEQ ID NO: 4771670 - DNA, 25 bp, Homo sapien
ccaccagagtcccattcctgagatc

SEQ ID NO: 4771671 - DNA, 25 bp, Homo sapien
gtcccattcctgagatcccagctct

SEQ ID NO: 4771672 - DNA, 25 bp, Homo sapien
ccacccaaacagcatttccacaacc

SEQ ID NO: 4771673 - DNA, 25 bp, Homo sapien
tattcatgcatactggacaaatagg

SEQ ID NO: 4771674 - DNA, 25 bp, Homo sapien
ggaactttctctagatattcatgca

SEQ ID NO: 4771675 - DNA, 25 bp, Homo sapien
catgcatactggacaaatagggcaa

SEQ ID NO: 4771676 - DNA, 25 bp, Homo sapien
ctgctgtcccccttagatctggaac

SEQ ID NO: 4771677 - DNA, 25 bp, Homo sapien
ctgttttctctcgaccagacttcca

SEQ ID NO: 4771678 - DNA, 25 bp, Homo sapien
tggcacagtgtcaaatccagtgctg

SEQ ID NO: 4771679 - DNA, 25 bp, Homo sapien
agacttccaccacgttctcacctcc

SEQ ID NO: 4771680 - DNA, 25 bp, Homo sapien
tggtaggtaatgttgatggcacagt

SEQ ID NO: 4771681 - DNA, 25 bp, Homo sapien
tgccaaccacgtcagctagtagctt

SEQ ID NO: 4771682 - DNA, 25 bp, Homo sapien
cacaaagcaccctgaaaatagtagc

SEQ ID NO: 4771683 - DNA, 25 bp, Homo sapien
tgtcacttgcagtcatctagaggct

SEQ ID NO: 4771684 - DNA, 25 bp, Homo sapien
tgtaagttgactggaatcagcagga

SEQ ID NO: 4771685 - DNA, 25 bp, Homo sapien
taatgacgtgcatggctgctgttac

SEQ ID NO: 4771686 - DNA, 25 bp, Homo sapien
gatcatcataatgacgtgcatggct

SEQ ID NO: 4771687 - DNA, 25 bp, Homo sapien
tcataatgacgtgcatggctgctgt

SEQ ID NO: 4771688 - DNA, 25 bp, Homo sapien
cagatcatcataatgacgtgcatgg

SEQ ID NO: 4771689 - DNA, 25 bp, Homo sapien
cagatcttctctggttggagccaat

SEQ ID NO: 4771690 - DNA, 25 bp, Homo sapien
atggtttctttcagacctgagatat

SEQ ID NO: 4771691 - DNA, 25 bp, Homo sapien
tcaggtttgtcactctcagatcttc

SEQ ID NO: 4771692 - DNA, 25 bp, Homo sapien
atgatgtcatcttgtcataattgac

SEQ ID NO: 4771693 - DNA, 25 bp, Homo sapien
tgatgctggtcatggtggtcactct

SEQ ID NO: 4771694 - DNA, 25 bp, Homo sapien
cctgatgctggtcatggtggtcact

SEQ ID NO: 4771695 - DNA, 25 bp, Homo sapien
gccctgatgctggtcatggtggtca

SEQ ID NO: 4771696 - DNA, 25 bp, Homo sapien
gatgctggtcatggtggtcactctc

SEQ ID NO: 4771697 - DNA, 25 bp, Homo sapien
ccttgtttgcagaggtccccagctg

SEQ ID NO: 4771698 - DNA, 25 bp, Homo sapien
cacctccaggcccattgaggtcttg

SEQ ID NO: 4771699 - DNA, 25 bp, Homo sapien
cccattgaggtcttggccatattcc

SEQ ID NO: 4771700 - DNA, 25 bp, Homo sapien
cttgtttgcagaggtccccagctgc

SEQ ID NO: 4771701 - DNA, 25 bp, Homo sapien
cacctgaaaatttagcccattcgtg

SEQ ID NO: 4771702 - DNA, 25 bp, Homo sapien
acctgaaaatttagcccattcgtga

SEQ ID NO: 4771703 - DNA, 25 bp, Homo sapien
cctgaaaatttagcccattcgtgag

SEQ ID NO: 4771704 - DNA, 25 bp, Homo sapien
gaccagaatccatgagcacctgaaa

SEQ ID NO: 4771705 - DNA, 25 bp, Homo sapien
tattttcgggaaactgcacaggagg

SEQ ID NO: 4771706 - DNA, 25 bp, Homo sapien
cctgccccttggagaaatacctgga

SEQ ID NO: 4771707 - DNA, 25 bp, Homo sapien
gaatgtttgaaccacggcccaagtc

SEQ ID NO: 4771708 - DNA, 25 bp, Homo sapien
tagaatacgatttcaccgccaggta

SEQ ID NO: 4771709 - DNA, 25 bp, Homo sapien
tagcaacagcaagccacgttaagac

SEQ ID NO: 4771710 - DNA, 25 bp, Homo sapien
tggcttcgagggaaataatagcaac

SEQ ID NO: 4771711 - DNA, 25 bp, Homo sapien
tcaggaaagcatgcgatgttaactc

SEQ ID NO: 4771712 - DNA, 25 bp, Homo sapien
atccagtgtctcatggcttcgaggg

SEQ ID NO: 4771713 - DNA, 25 bp, Homo sapien
tcctctgaacatggtacctcattac

SEQ ID NO: 4771714 - DNA, 25 bp, Homo sapien
taggcggtcatgcttcttacacaag

SEQ ID NO: 4771715 - DNA, 25 bp, Homo sapien
tggtacctcattacacgggccttgg

SEQ ID NO: 4771716 - DNA, 25 bp, Homo sapien
gcttgattctgactacacagcatcc

SEQ ID NO: 4771717 - DNA, 25 bp, Homo sapien
acggccagcactgggaagctgcctc

SEQ ID NO: 4771718 - DNA, 25 bp, Homo sapien
tataaattgtaagtcacggccagca

SEQ ID NO: 4771719 - DNA, 25 bp, Homo sapien
ggcatctgagctgtcccttgctgcg

SEQ ID NO: 4771720 - DNA, 25 bp, Homo sapien
ggcacccttgagcacaccggaagct

SEQ ID NO: 4771721 - DNA, 25 bp, Homo sapien
catccaagtaacaggctgttctggt

SEQ ID NO: 4771722 - DNA, 25 bp, Homo sapien
taacaggctgttctggtgctcaccc

SEQ ID NO: 4771723 - DNA, 25 bp, Homo sapien
ggtaatagggctgttcttaggttca

SEQ ID NO: 4771724 - DNA, 25 bp, Homo sapien
ggttcatccaggtaacagctgttct

SEQ ID NO: 4771725 - DNA, 25 bp, Homo sapien
gaaagaatctgatagcagcctggct

SEQ ID NO: 4771726 - DNA, 25 bp, Homo sapien
cttgcagaaagctcacggcgtggat

SEQ ID NO: 4771727 - DNA, 25 bp, Homo sapien
gatgccaaggttctgtgcactccag

SEQ ID NO: 4771728 - DNA, 25 bp, Homo sapien
gaatgtggctggaacgctcttctag

SEQ ID NO: 4771729 - DNA, 25 bp, Homo sapien
ggctctcacagcacgacgccttcat

SEQ ID NO: 4771730 - DNA, 25 bp, Homo sapien
acagcacgacgccttcatctctgtc

SEQ ID NO: 4771731 - DNA, 25 bp, Homo sapien
gatgctgccgggcgatggctctcac

SEQ ID NO: 4771732 - DNA, 25 bp, Homo sapien
ctgccgggcgatggctctcacagca

SEQ ID NO: 4771733 - DNA, 25 bp, Homo sapien
ctgatatctttgtctggcattctgg

SEQ ID NO: 4771734 - DNA, 25 bp, Homo sapien
gattcctgatatctttgtctggcat

SEQ ID NO: 4771735 - DNA, 25 bp, Homo sapien
cagattcctgatatctttgtctggc

SEQ ID NO: 4771736 - DNA, 25 bp, Homo sapien
ttatgagaggcttgtactgttccat

SEQ ID NO: 4771737 - DNA, 25 bp, Homo sapien
ttctggacaacagaggcgggccaag

SEQ ID NO: 4771738 - DNA, 25 bp, Homo sapien
tctttaatgcagtctagggatgaca

SEQ ID NO: 4771739 - DNA, 25 bp, Homo sapien
gaaatgtgaccttacaggtccctga

SEQ ID NO: 4771740 - DNA, 25 bp, Homo sapien
aagttatctttcacgcatgcctcag

SEQ ID NO: 4771741 - DNA, 25 bp, Homo sapien
ttggtgttgctctctaggtgctcag

SEQ ID NO: 4771742 - DNA, 25 bp, Homo sapien
cctgagcagagcagatcccgacttg

SEQ ID NO: 4771743 - DNA, 25 bp, Homo sapien
atgactgggagctcatcgggcacct

SEQ ID NO: 4771744 - DNA, 25 bp, Homo sapien
ttcttggtttctcggaggagtctcc

SEQ ID NO: 4771745 - DNA, 25 bp, Homo sapien
tgatgttgatgattgctgaaggctg

SEQ ID NO: 4771746 - DNA, 25 bp, Homo sapien
cttcagcgagccataatcttgttgc

SEQ ID NO: 4771747 - DNA, 25 bp, Homo sapien
tttgatgttgatgattgctgaaggc

SEQ ID NO: 4771748 - DNA, 25 bp, Homo sapien
cgagccataatcttgttgctaatgg

SEQ ID NO: 4771749 - DNA, 25 bp, Homo sapien
tatatacgccaataacatccaagct

SEQ ID NO: 4771750 - DNA, 25 bp, Homo sapien
gctgagagctaaatcgaggacacaa

SEQ ID NO: 4771751 - DNA, 25 bp, Homo sapien
caatgagcatcacaaaacactgctg

SEQ ID NO: 4771752 - DNA, 25 bp, Homo sapien
gcccaaatagccagaccgatcctaa

SEQ ID NO: 4771753 - DNA, 25 bp, Homo sapien
cagagttcttaactgccctgggact

SEQ ID NO: 4771754 - DNA, 25 bp, Homo sapien
gatatgcagccgtccaggtgtcgtt

SEQ ID NO: 4771755 - DNA, 25 bp, Homo sapien
gaaaatctgttgtctagaactgcca

SEQ ID NO: 4771756 - DNA, 25 bp, Homo sapien
ccatggtgtaaaccagatatgcagc

SEQ ID NO: 4771757 - DNA, 25 bp, Homo sapien
gagatctagacccagcttcatgcag

SEQ ID NO: 4771758 - DNA, 25 bp, Homo sapien
atgtgcatagggtgtatgcaaacgg

SEQ ID NO: 4771759 - DNA, 25 bp, Homo sapien
catatgtgctaaccatggagtgcag

SEQ ID NO: 4771760 - DNA, 25 bp, Homo sapien
tgggaggtcctagaaacaatcctgt

SEQ ID NO: 4771761 - DNA, 25 bp, Homo sapien
gagaaaaatgaacaaccccatcaaa

SEQ ID NO: 4771762 - DNA, 25 bp, Homo sapien
gaacatgcaggtttgacaaatggga

SEQ ID NO: 4771763 - DNA, 25 bp, Homo sapien
aacatgcaggtttgacaaatgggat

SEQ ID NO: 4771764 - DNA, 25 bp, Homo sapien
tacaagagaaaaatgaacaacccca

SEQ ID NO: 4771765 - DNA, 25 bp, Homo sapien
cactggcttgtcactactcggagca

SEQ ID NO: 4771766 - DNA, 25 bp, Homo sapien
tctgtctcccgctgcagcgaggtga

SEQ ID NO: 4771767 - DNA, 25 bp, Homo sapien
cagaactccctcaggcaagtaagag

SEQ ID NO: 4771768 - DNA, 25 bp, Homo sapien
ccacggctcttgacaggatggagac

SEQ ID NO: 4771769 - DNA, 25 bp, Homo sapien
ctttagagagaaagtgtgaaatagt

SEQ ID NO: 4771770 - DNA, 25 bp, Homo sapien
gaaccattttgccagccttttgata

SEQ ID NO: 4771771 - DNA, 25 bp, Homo sapien
gacgtggtactctcatggacattca

SEQ ID NO: 4771772 - DNA, 25 bp, Homo sapien
gatgactgctttgtccatgtctttc

SEQ ID NO: 4771773 - DNA, 25 bp, Homo sapien
cttgttttctagcaccaggattgag

SEQ ID NO: 4771774 - DNA, 25 bp, Homo sapien
tcaccgtgcacatacggaccacaga

SEQ ID NO: 4771775 - DNA, 25 bp, Homo sapien
gaaatgacgaaagtagtacgtgctc

SEQ ID NO: 4771776 - DNA, 25 bp, Homo sapien
cagcaataaatgactcatcctgcca

SEQ ID NO: 4771777 - DNA, 25 bp, Homo sapien
tgacagcattggcatgcagcctcct

SEQ ID NO: 4771778 - DNA, 25 bp, Homo sapien
catgggtatttcttggatacagaga

SEQ ID NO: 4771779 - DNA, 25 bp, Homo sapien
cctaacgtttagagagctgcattct

SEQ ID NO: 4771780 - DNA, 25 bp, Homo sapien
gctgcattctattccgatattctat

SEQ ID NO: 4771781 - DNA, 25 bp, Homo sapien
gattgtattctggtttagtcgacca

SEQ ID NO: 4771782 - DNA, 25 bp, Homo sapien
tgaaaaagtgtagcatgaatggcag

SEQ ID NO: 4771783 - DNA, 25 bp, Homo sapien
caaggatgggtgaaaaagtgtagca

SEQ ID NO: 4771784 - DNA, 25 bp, Homo sapien
gaggccaaggatgggtgaaaaagtg

SEQ ID NO: 4771785 - DNA, 25 bp, Homo sapien
gatgggtgaaaaagtgtagcatgaa

SEQ ID NO: 4771786 - DNA, 25 bp, Homo sapien
acagagacccggcaatgcaagtgag

SEQ ID NO: 4771787 - DNA, 25 bp, Homo sapien
aagtgagtcctgtttgacctcgtca

SEQ ID NO: 4771788 - DNA, 25 bp, Homo sapien
ggtgactcggatgctcaagaaacga

SEQ ID NO: 4771789 - DNA, 25 bp, Homo sapien
gactgtaaaggtgactcggatgctc

SEQ ID NO: 4771790 - DNA, 25 bp, Homo sapien
tgagatgcctgtgtcagaagacact

SEQ ID NO: 4771791 - DNA, 25 bp, Homo sapien
gttgtgagatgcctgtgtcagaaga

SEQ ID NO: 4771792 - DNA, 25 bp, Homo sapien
cagacaacggtccggctgcactggt

SEQ ID NO: 4771793 - DNA, 25 bp, Homo sapien
aacggtccggctgcactggtgttgt

SEQ ID NO: 4771794 - DNA, 25 bp, Homo sapien
agcacttgctgaagaagccgcctcg

SEQ ID NO: 4771795 - DNA, 25 bp, Homo sapien
agacaagctgcactctgaatcccgc

SEQ ID NO: 4771796 - DNA, 25 bp, Homo sapien
tgcactctgaatcccgctacgctga

SEQ ID NO: 4771797 - DNA, 25 bp, Homo sapien
tgaccgcagcacttgctgaagaagc

SEQ ID NO: 4771798 - DNA, 25 bp, Homo sapien
caaagaccacatgtttgccttctaa

SEQ ID NO: 4771799 - DNA, 25 bp, Homo sapien
ggtggttaagataaaggacgagtca

SEQ ID NO: 4771800 - DNA, 25 bp, Homo sapien
ttagactgtccagagtcagcaatgg

SEQ ID NO: 4771801 - DNA, 25 bp, Homo sapien
ttgctggtcttcttattcctgaacc

SEQ ID NO: 4771802 - DNA, 25 bp, Homo sapien
aaaccgtttgtgttgggtctagcat

SEQ ID NO: 4771803 - DNA, 25 bp, Homo sapien
agagcagatgaaaaactggaaaccg

SEQ ID NO: 4771804 - DNA, 25 bp, Homo sapien
gaaaccgtttgtgttgggtctagca

SEQ ID NO: 4771805 - DNA, 25 bp, Homo sapien
cagatgaaaaactggaaaccgtttg

SEQ ID NO: 4771806 - DNA, 25 bp, Homo sapien
tttctctccatgaatggactttcca

SEQ ID NO: 4771807 - DNA, 25 bp, Homo sapien
ctctccatgaatggactttccacca

SEQ ID NO: 4771808 - DNA, 25 bp, Homo sapien
tcagagtgcaaaagtttcttgctgt

SEQ ID NO: 4771809 - DNA, 25 bp, Homo sapien
tctctaatgctcagagtgcaaaagt

SEQ ID NO: 4771810 - DNA, 25 bp, Homo sapien
gaattgcagcgcacctgagatcctg

SEQ ID NO: 4771811 - DNA, 25 bp, Homo sapien
tattctgcataattccgaggctaca

SEQ ID NO: 4771812 - DNA, 25 bp, Homo sapien
tactttcacattctgggacccagca

SEQ ID NO: 4771813 - DNA, 25 bp, Homo sapien
tagtcacaaatgaacgcacgagtgg

SEQ ID NO: 4771814 - DNA, 25 bp, Homo sapien
aggggccggctgcttatcttcaaga

SEQ ID NO: 4771815 - DNA, 25 bp, Homo sapien
tcacatcaccaatgaggtgctcctg

SEQ ID NO: 4771816 - DNA, 25 bp, Homo sapien
gcacactcacatcaccaatgaggtg

SEQ ID NO: 4771817 - DNA, 25 bp, Homo sapien
aacagcacactcacatcaccaatga

SEQ ID NO: 4771818 - DNA, 25 bp, Homo sapien
caagtgctgaaggttcaggtcacag

SEQ ID NO: 4771819 - DNA, 25 bp, Homo sapien
gtgctgaaggttcaggtcacagatg

SEQ ID NO: 4771820 - DNA, 25 bp, Homo sapien
aagtgctgaaggttcaggtcacaga

SEQ ID NO: 4771821 - DNA, 25 bp, Homo sapien
agtgctgaaggttcaggtcacagat

SEQ ID NO: 4771822 - DNA, 25 bp, Homo sapien
agggggcagtttcaggtctccaagt

SEQ ID NO: 4771823 - DNA, 25 bp, Homo sapien
gcagtttcaggtctccaagtggtgt

SEQ ID NO: 4771824 - DNA, 25 bp, Homo sapien
ccttgtggactgaaccgagggggca

SEQ ID NO: 4771825 - DNA, 25 bp, Homo sapien
ccgagggggcagtttcaggtctcca

SEQ ID NO: 4771826 - DNA, 25 bp, Homo sapien
ccacaagccacacatcgggtgtctg

SEQ ID NO: 4771827 - DNA, 25 bp, Homo sapien
ggccatcctgcatgtccaaaggtga

SEQ ID NO: 4771828 - DNA, 25 bp, Homo sapien
cacacatcgggtgtctggccatcct

SEQ ID NO: 4771829 - DNA, 25 bp, Homo sapien
ggtttggagaatcttgcattgtggt

SEQ ID NO: 4771830 - DNA, 25 bp, Homo sapien
agcccatggtatacctggttgcatt

SEQ ID NO: 4771831 - DNA, 25 bp, Homo sapien
taacagcccatggtatacctggttg

SEQ ID NO: 4771832 - DNA, 25 bp, Homo sapien
gtaacagcccatggtatacctggtt

SEQ ID NO: 4771833 - DNA, 25 bp, Homo sapien
acagcccatggtatacctggttgca

SEQ ID NO: 4771834 - DNA, 25 bp, Homo sapien
aagaacatggagaaacaacctacag

SEQ ID NO: 4771835 - DNA, 25 bp, Homo sapien
cataaagaacattcacaactcaatt

SEQ ID NO: 4771836 - DNA, 25 bp, Homo sapien
cttttatgcttccaagcataccaac

SEQ ID NO: 4771837 - DNA, 25 bp, Homo sapien
gttaaggggcttgtatacagtatac

SEQ ID NO: 4771838 - DNA, 25 bp, Homo sapien
ccatctgtaggtatgcccaagagaa

SEQ ID NO: 4771839 - DNA, 25 bp, Homo sapien
cataaagttgtcatatgatccagta

SEQ ID NO: 4771840 - DNA, 25 bp, Homo sapien
atggtacagcttgttggttttgtag

SEQ ID NO: 4771841 - DNA, 25 bp, Homo sapien
tcacaattacaataagataccagtt

SEQ ID NO: 4771842 - DNA, 25 bp, Homo sapien
gaatagacaagatgaggtcccgctc

SEQ ID NO: 4771843 - DNA, 25 bp, Homo sapien
caagttctaggcgtcataaaaagca

SEQ ID NO: 4771844 - DNA, 25 bp, Homo sapien
taatacgcatgaagcacatgtgggc

SEQ ID NO: 4771845 - DNA, 25 bp, Homo sapien
gaaatgttactcaatgcagccgagg

SEQ ID NO: 4771846 - DNA, 25 bp, Homo sapien
tagtgaccagtatttgtaaggagac

SEQ ID NO: 4771847 - DNA, 25 bp, Homo sapien
tgtaaggagacccatctttctcatc

SEQ ID NO: 4771848 - DNA, 25 bp, Homo sapien
tatttgtaaggagacccatctttct

SEQ ID NO: 4771849 - DNA, 25 bp, Homo sapien
gaccagtatttgtaaggagacccat

SEQ ID NO: 4771850 - DNA, 25 bp, Homo sapien
tatttatattaggtagttttcactc

SEQ ID NO: 4771851 - DNA, 25 bp, Homo sapien
tatgtatatgtagctgttcgtatgc

SEQ ID NO: 4771852 - DNA, 25 bp, Homo sapien
ttaggtagttttcactcagaatatc

SEQ ID NO: 4771853 - DNA, 25 bp, Homo sapien
gcattaatcacttagaaactttatt

SEQ ID NO: 4771854 - DNA, 25 bp, Homo sapien
tcttaatgcagcacagtagacatac

SEQ ID NO: 4771855 - DNA, 25 bp, Homo sapien
tgaagtacacggatgggtccattcc

SEQ ID NO: 4771856 - DNA, 25 bp, Homo sapien
cattaaggttccatgtgctgaggca

SEQ ID NO: 4771857 - DNA, 25 bp, Homo sapien
agtggatccgaaagacacttccagg

SEQ ID NO: 4771858 - DNA, 25 bp, Homo sapien
attctcctttatagcgagggggcct

SEQ ID NO: 4771859 - DNA, 25 bp, Homo sapien
tattctcctttatagcgagggggcc

SEQ ID NO: 4771860 - DNA, 25 bp, Homo sapien
ttattctcctttatagcgagggggc

SEQ ID NO: 4771861 - DNA, 25 bp, Homo sapien
tggcacgtactcatcaatgacaggt

SEQ ID NO: 4771862 - DNA, 25 bp, Homo sapien
ccattgtggtctgaagaataccttg

SEQ ID NO: 4771863 - DNA, 25 bp, Homo sapien
gatttatatatacaagctgggcaca

SEQ ID NO: 4771864 - DNA, 25 bp, Homo sapien
aacgagtgctcatgcagtttccaac

SEQ ID NO: 4771865 - DNA, 25 bp, Homo sapien
tttgtatgattttggaatgggcgca

SEQ ID NO: 4771866 - DNA, 25 bp, Homo sapien
gcgcaagggtaatcttgctcagtga

SEQ ID NO: 4771867 - DNA, 25 bp, Homo sapien
cctcattgaatttgtgattgcatta

SEQ ID NO: 4771868 - DNA, 25 bp, Homo sapien
ttggaatgggcgcaagggtaatctt

SEQ ID NO: 4771869 - DNA, 25 bp, Homo sapien
tcttctatggctaaccctgttacta

SEQ ID NO: 4771870 - DNA, 25 bp, Homo sapien
tgagcataacaagcttcttctatgg

SEQ ID NO: 4771871 - DNA, 25 bp, Homo sapien
taacaagcttcttctatggctaacc

SEQ ID NO: 4771872 - DNA, 25 bp, Homo sapien
caagcttcttctatggctaaccctg

SEQ ID NO: 4771873 - DNA, 25 bp, Homo sapien
taggtgaggcctttatgtcgcgaca

SEQ ID NO: 4771874 - DNA, 25 bp, Homo sapien
gatcagagtgtgaccaacatgagac

SEQ ID NO: 4771875 - DNA, 25 bp, Homo sapien
aattataatgctcaccaaatgggag

SEQ ID NO: 4771876 - DNA, 25 bp, Homo sapien
cacttgggagctgagttaccttggg

SEQ ID NO: 4771877 - DNA, 25 bp, Homo sapien
catcccttgattaattgctaatttt

SEQ ID NO: 4771878 - DNA, 25 bp, Homo sapien
gagcaggtagtgcatgtccagctgt

SEQ ID NO: 4771879 - DNA, 25 bp, Homo sapien
gtgagcaggtagtgcatgtccagct

SEQ ID NO: 4771880 - DNA, 25 bp, Homo sapien
ggtgagcaggtagtgcatgtccagc

SEQ ID NO: 4771881 - DNA, 25 bp, Homo sapien
tgcagaagagtcacaaggaatgaac

SEQ ID NO: 4771882 - DNA, 25 bp, Homo sapien
gagattctgcacgtctaacaagctg

SEQ ID NO: 4771883 - DNA, 25 bp, Homo sapien
ttgtcaactgaccaagaaaaggtgc

SEQ ID NO: 4771884 - DNA, 25 bp, Homo sapien
ggtaggctctaaacaacaggcacag

SEQ ID NO: 4771885 - DNA, 25 bp, Homo sapien
tgaaactggatgcaagactctgaac

SEQ ID NO: 4771886 - DNA, 25 bp, Homo sapien
tatggctctgcactaccttatgtgg

SEQ ID NO: 4771887 - DNA, 25 bp, Homo sapien
gagcgggctctgcagatcatcagaa

SEQ ID NO: 4771888 - DNA, 25 bp, Homo sapien
tttaaaaaccgattcagcaggtgca

SEQ ID NO: 4771889 - DNA, 25 bp, Homo sapien
agtgcacggccactgatatcactcc

SEQ ID NO: 4771890 - DNA, 25 bp, Homo sapien
atcactcctgagtcagccatacgca

SEQ ID NO: 4771891 - DNA, 25 bp, Homo sapien
ctgagtcagccatacgcatcatgtt

SEQ ID NO: 4771892 - DNA, 25 bp, Homo sapien
gcacggccactgatatcactcctga

SEQ ID NO: 4771893 - DNA, 25 bp, Homo sapien
gtaaaaactctctcgccaggtccaa

SEQ ID NO: 4771894 - DNA, 25 bp, Homo sapien
ttctttgccatcgaggactcgcgca

SEQ ID NO: 4771895 - DNA, 25 bp, Homo sapien
tctgttccagaacgtggctgattaa

SEQ ID NO: 4771896 - DNA, 25 bp, Homo sapien
gactcgcgcagagaatatgagctcc

SEQ ID NO: 4771897 - DNA, 25 bp, Homo sapien
ggcgcgtggcaatcgctgtgtcccc

SEQ ID NO: 4771898 - DNA, 25 bp, Homo sapien
aatggcgcgtggcaatcgctgtgtc

SEQ ID NO: 4771899 - DNA, 25 bp, Homo sapien
ccaatggcgcgtggcaatcgctgtg

SEQ ID NO: 4771900 - DNA, 25 bp, Homo sapien
tccaatggcgcgtggcaatcgctgt

SEQ ID NO: 4771901 - DNA, 25 bp, Homo sapien
gctgctcaggtgcagccaaccacat

SEQ ID NO: 4771902 - DNA, 25 bp, Homo sapien
tgaggctgttcagctgctcaggtgc

SEQ ID NO: 4771903 - DNA, 25 bp, Homo sapien
ttcagctgctcaggtgcagccaacc

SEQ ID NO: 4771904 - DNA, 25 bp, Homo sapien
tcagctgctcaggtgcagccaacca

SEQ ID NO: 4771905 - DNA, 25 bp, Homo sapien
agaacacaatatttctgaacactga

SEQ ID NO: 4771906 - DNA, 25 bp, Homo sapien
aagaacacaatatttctgaacactg

SEQ ID NO: 4771907 - DNA, 25 bp, Homo sapien
gaacacaatatttctgaacactgac

SEQ ID NO: 4771908 - DNA, 25 bp, Homo sapien
aaaagaacacaatatttctgaacac

SEQ ID NO: 4771909 - DNA, 25 bp, Homo sapien
tgggaatacggacttgagccaccgc

SEQ ID NO: 4771910 - DNA, 25 bp, Homo sapien
gctgggaatacggacttgagccacc

SEQ ID NO: 4771911 - DNA, 25 bp, Homo sapien
ggaatacggacttgagccaccgcag

SEQ ID NO: 4771912 - DNA, 25 bp, Homo sapien
aatacggacttgagccaccgcagcc

SEQ ID NO: 4771913 - DNA, 25 bp, Homo sapien
gacgagagtggacaggcttgtttac

SEQ ID NO: 4771914 - DNA, 25 bp, Homo sapien
ttgcactggcaaaaacctatgggac

SEQ ID NO: 4771915 - DNA, 25 bp, Homo sapien
tcactcttatactcttgtagcccag

SEQ ID NO: 4771916 - DNA, 25 bp, Homo sapien
caatgttggataagagtgacgagag

SEQ ID NO: 4771917 - DNA, 25 bp, Homo sapien
tcttcagggtgtcctacaaagcctc

SEQ ID NO: 4771918 - DNA, 25 bp, Homo sapien
aaacgtagtcgtggctttgagatcc

SEQ ID NO: 4771919 - DNA, 25 bp, Homo sapien
taagctttgttaagacaggcctaga

SEQ ID NO: 4771920 - DNA, 25 bp, Homo sapien
taaggatagtatggccctaccaaag

SEQ ID NO: 4771921 - DNA, 25 bp, Homo sapien
gctgagccagcatatgagagtaaac

SEQ ID NO: 4771922 - DNA, 25 bp, Homo sapien
caaagacctagaccagctattacgg

SEQ ID NO: 4771923 - DNA, 25 bp, Homo sapien
cacaaaactctatggcactgacaca

SEQ ID NO: 4771924 - DNA, 25 bp, Homo sapien
gacaggatcatctgcaagaggtacc

SEQ ID NO: 4771925 - DNA, 25 bp, Homo sapien
gaatttcgtctcatgtctaaagaag

SEQ ID NO: 4771926 - DNA, 25 bp, Homo sapien
gacaatgctcagtaactagtctgct

SEQ ID NO: 4771927 - DNA, 25 bp, Homo sapien
gctttcttgacccagagccttaatg

SEQ ID NO: 4771928 - DNA, 25 bp, Homo sapien
ggctagggcttttcaacccgtctca

SEQ ID NO: 4771929 - DNA, 25 bp, Homo sapien
tcatatctatgttgggagggcacaa

SEQ ID NO: 4771930 - DNA, 25 bp, Homo sapien
caaggtttatcctactgaggtggta

SEQ ID NO: 4771931 - DNA, 25 bp, Homo sapien
cccagtcttctttgaggtaaatcca

SEQ ID NO: 4771932 - DNA, 25 bp, Homo sapien
cagccatatgaaagtgcaaggacca

SEQ ID NO: 4771933 - DNA, 25 bp, Homo sapien
caatcaaagcttgacagctaccagt

SEQ ID NO: 4771934 - DNA, 25 bp, Homo sapien
gcagctggtgtcaaccttccgtaaa

SEQ ID NO: 4771935 - DNA, 25 bp, Homo sapien
agacaattaatacatgcagctggtg

SEQ ID NO: 4771936 - DNA, 25 bp, Homo sapien
tactcaggagttagctaaaaggaca

SEQ ID NO: 4771937 - DNA, 25 bp, Homo sapien
aaattaggaacaggtcgagcgcggt

SEQ ID NO: 4771938 - DNA, 25 bp, Homo sapien
gatgactatggccatttccagaggc

SEQ ID NO: 4771939 - DNA, 25 bp, Homo sapien
tctggctgggaatagaacgggaact

SEQ ID NO: 4771940 - DNA, 25 bp, Homo sapien
gatgactagtacaacacacactggg

SEQ ID NO: 4771941 - DNA, 25 bp, Homo sapien
gggacccaccttgcaggacatgtca

SEQ ID NO: 4771942 - DNA, 25 bp, Homo sapien
aaaacagtatgtgagcaggaggagc

SEQ ID NO: 4771943 - DNA, 25 bp, Homo sapien
tcctgtgctagaaggtaactgcttg

SEQ ID NO: 4771944 - DNA, 25 bp, Homo sapien
tctgcttgttcacggctgtatcccc

SEQ ID NO: 4771945 - DNA, 25 bp, Homo sapien
caccacaaagaaagagaattttaca

SEQ ID NO: 4771946 - DNA, 25 bp, Homo sapien
atcctcaataaaatactggcaaaac

SEQ ID NO: 4771947 - DNA, 25 bp, Homo sapien
atatccctgatgaacatcggtgcaa

SEQ ID NO: 4771948 - DNA, 25 bp, Homo sapien
cacaaagaaagagaattttacacca

SEQ ID NO: 4771949 - DNA, 25 bp, Homo sapien
caactaaatgcaacgtggaggcctc

SEQ ID NO: 4771950 - DNA, 25 bp, Homo sapien
caaaaagacggctacagacaactgg

SEQ ID NO: 4771951 - DNA, 25 bp, Homo sapien
ggcctcaactgtcttgaaccagaaa

SEQ ID NO: 4771952 - DNA, 25 bp, Homo sapien
gctgggtaaagcgtacataagagtg

SEQ ID NO: 4771953 - DNA, 25 bp, Homo sapien
ggattaacttacaaatgctggccag

SEQ ID NO: 4771954 - DNA, 25 bp, Homo sapien
aaaaactacatgatagcagtggtcc

SEQ ID NO: 4771955 - DNA, 25 bp, Homo sapien
gccagtatgaaatcatggacctgta

SEQ ID NO: 4771956 - DNA, 25 bp, Homo sapien
tcaacatattgctacgcaggtcaaa

SEQ ID NO: 4771957 - DNA, 25 bp, Homo sapien
ttccccatatttgaattctccccac

SEQ ID NO: 4771958 - DNA, 25 bp, Homo sapien
tttccccatatttgaattctcccca

SEQ ID NO: 4771959 - DNA, 25 bp, Homo sapien
tccccatatttgaattctccccact

SEQ ID NO: 4771960 - DNA, 25 bp, Homo sapien
ccccatatttgaattctccccactt

SEQ ID NO: 4771961 - DNA, 25 bp, Homo sapien
tcagagatcactttaggcatggcaa

SEQ ID NO: 4771962 - DNA, 25 bp, Homo sapien
gcagctacagtggagcaaggctcac

SEQ ID NO: 4771963 - DNA, 25 bp, Homo sapien
tctataataggaggcaagtgacgca

SEQ ID NO: 4771964 - DNA, 25 bp, Homo sapien
caaaagagatctaccaagaagggag

SEQ ID NO: 4771965 - DNA, 25 bp, Homo sapien
caaattgccataaacctggtacctc

SEQ ID NO: 4771966 - DNA, 25 bp, Homo sapien
gacctcatatggtatggcacagtga

SEQ ID NO: 4771967 - DNA, 25 bp, Homo sapien
taatgcagccactattgcagaggac

SEQ ID NO: 4771968 - DNA, 25 bp, Homo sapien
caaaaagtcgctgtattcattgcta

SEQ ID NO: 4771969 - DNA, 25 bp, Homo sapien
tacataaaaggtaccatgagccaag

SEQ ID NO: 4771970 - DNA, 25 bp, Homo sapien
tcttacacattcatctgggcagtct

SEQ ID NO: 4771971 - DNA, 25 bp, Homo sapien
tcacatattagttatctgggaattc

SEQ ID NO: 4771972 - DNA, 25 bp, Homo sapien
caattcatatgcaagtatgtcttcc

SEQ ID NO: 4771973 - DNA, 25 bp, Homo sapien
caagatttcattatcaattttggaa

SEQ ID NO: 4771974 - DNA, 25 bp, Homo sapien
tgatgcaagatttcattatcaattt

SEQ ID NO: 4771975 - DNA, 25 bp, Homo sapien
gatttcattatcaattttggaaaga

SEQ ID NO: 4771976 - DNA, 25 bp, Homo sapien
cattatcaattttggaaagatgttt

SEQ ID NO: 4771977 - DNA, 25 bp, Homo sapien
cgcaacttttgtcccactgcagaga

SEQ ID NO: 4771978 - DNA, 25 bp, Homo sapien
gaactaccatcttcactgtctacgt

SEQ ID NO: 4771979 - DNA, 25 bp, Homo sapien
taaaaatagggcatacaggcatacc

SEQ ID NO: 4771980 - DNA, 25 bp, Homo sapien
taagttcaggctacccactaaccgc

SEQ ID NO: 4771981 - DNA, 25 bp, Homo sapien
gcagaggctacttcatggttaagga

SEQ ID NO: 4771982 - DNA, 25 bp, Homo sapien
tcaagtagagcaaagatccacacgt

SEQ ID NO: 4771983 - DNA, 25 bp, Homo sapien
gaaagaagccatctaccgtaacaca

SEQ ID NO: 4771984 - DNA, 25 bp, Homo sapien
gtattctgacggctcaaccaacggg

SEQ ID NO: 4771985 - DNA, 25 bp, Homo sapien
atctgccattctagatccctttaag

SEQ ID NO: 4771986 - DNA, 25 bp, Homo sapien
ccttctggaaaggatctgccattct

SEQ ID NO: 4771987 - DNA, 25 bp, Homo sapien
gggaagaggccagaatatcaatatt

SEQ ID NO: 4771988 - DNA, 25 bp, Homo sapien
gaagaggccagaatatcaatattaa

SEQ ID NO: 4771989 - DNA, 25 bp, Homo sapien
ctccaccaggaataatcgccaattt

SEQ ID NO: 4771990 - DNA, 25 bp, Homo sapien
aatcgccaattttgtttcaaccagg

SEQ ID NO: 4771991 - DNA, 25 bp, Homo sapien
tcaaccaggcccatttttgcagagg

SEQ ID NO: 4771992 - DNA, 25 bp, Homo sapien
ttcaaccaggcccatttttgcagag

SEQ ID NO: 4771993 - DNA, 25 bp, Homo sapien
tcgtatatcacaggctaaagccagt

SEQ ID NO: 4771994 - DNA, 25 bp, Homo sapien
aaagcgagtccatctattgctgcaa

SEQ ID NO: 4771995 - DNA, 25 bp, Homo sapien
ctgctactcgtatatcacaggctaa

SEQ ID NO: 4771996 - DNA, 25 bp, Homo sapien
agaccaccacctaaagcgagtccat

SEQ ID NO: 4771997 - DNA, 25 bp, Homo sapien
taacatggtaaatgcagtcacttct

SEQ ID NO: 4771998 - DNA, 25 bp, Homo sapien
catttaacaaaactcttggcattta

SEQ ID NO: 4771999 - DNA, 25 bp, Homo sapien
tagtagaactgagtgatgacttctg

SEQ ID NO: 4772000 - DNA, 25 bp, Homo sapien
tgttgattgctgttccacatttaac

SEQ ID NO: 4772001 - DNA, 25 bp, Homo sapien
taacaggttacatcaggctttgcgg

SEQ ID NO: 4772002 - DNA, 25 bp, Homo sapien
aataaaagttcccatgaggcaatgg

SEQ ID NO: 4772003 - DNA, 25 bp, Homo sapien
ttaaagcagagtagacttactgagc

SEQ ID NO: 4772004 - DNA, 25 bp, Homo sapien
tactgagctgattcaggtagactgg

SEQ ID NO: 4772005 - DNA, 25 bp, Homo sapien
aaaattccaatcacagttgcaatac

SEQ ID NO: 4772006 - DNA, 25 bp, Homo sapien
tcctacagactataataacaagact

SEQ ID NO: 4772007 - DNA, 25 bp, Homo sapien
gggagggtctcattcaaaggaataa

SEQ ID NO: 4772008 - DNA, 25 bp, Homo sapien
gaaaatacgagccatgcacactatg

SEQ ID NO: 4772009 - DNA, 25 bp, Homo sapien
gagacaaaaggaccaacttcactgg

SEQ ID NO: 4772010 - DNA, 25 bp, Homo sapien
caatatcgttaatcactgctcttat

SEQ ID NO: 4772011 - DNA, 25 bp, Homo sapien
tcgttaatcactgctcttattttgg

SEQ ID NO: 4772012 - DNA, 25 bp, Homo sapien
aatcactgctcttattttggagaca

SEQ ID NO: 4772013 - DNA, 25 bp, Homo sapien
ttggctctttccttaaggtcagcac

SEQ ID NO: 4772014 - DNA, 25 bp, Homo sapien
tttggctctttccttaaggtcagca

SEQ ID NO: 4772015 - DNA, 25 bp, Homo sapien
ggacctggaactcgctgagctgcag

SEQ ID NO: 4772016 - DNA, 25 bp, Homo sapien
tccttatgtcactcaataaaattct

SEQ ID NO: 4772017 - DNA, 25 bp, Homo sapien
cctcattcctcttggtcgcgggaca

SEQ ID NO: 4772018 - DNA, 25 bp, Homo sapien
atgaaagggctgtgatgcccctggc

SEQ ID NO: 4772019 - DNA, 25 bp, Homo sapien
cagggtgcccagataaaatacagtt

SEQ ID NO: 4772020 - DNA, 25 bp, Homo sapien
ggtagccatcatccaattccctgag

SEQ ID NO: 4772021 - DNA, 25 bp, Homo sapien
cagtcagaagtcagttgccaggtca

SEQ ID NO: 4772022 - DNA, 25 bp, Homo sapien
gaagagttttatgacagggtacacg

SEQ ID NO: 4772023 - DNA, 25 bp, Homo sapien
gctatatcctcaacagtacctgaca

SEQ ID NO: 4772024 - DNA, 25 bp, Homo sapien
cacagtccatatactttggaagaag

SEQ ID NO: 4772025 - DNA, 25 bp, Homo sapien
tactatcgcacatcctcttggcaaa

SEQ ID NO: 4772026 - DNA, 25 bp, Homo sapien
tatgagatccaacaatactatcgca

SEQ ID NO: 4772027 - DNA, 25 bp, Homo sapien
gactactgtcagagcttctagagca

SEQ ID NO: 4772028 - DNA, 25 bp, Homo sapien
tcaagtgagattaaggagcatgacc

SEQ ID NO: 4772029 - DNA, 25 bp, Homo sapien
gattcaggcaatcctaacaggctta

SEQ ID NO: 4772030 - DNA, 25 bp, Homo sapien
catctgttctcaagggaaggaattg

SEQ ID NO: 4772031 - DNA, 25 bp, Homo sapien
taactgccggagctctactcaagct

SEQ ID NO: 4772032 - DNA, 25 bp, Homo sapien
cagtctagactaatgccagttccca

SEQ ID NO: 4772033 - DNA, 25 bp, Homo sapien
tgaagtctccctttctaactgccgg

SEQ ID NO: 4772034 - DNA, 25 bp, Homo sapien
tcctccagctggaacaaacagagaa

SEQ ID NO: 4772035 - DNA, 25 bp, Homo sapien
caaggataacctgtgtgatgaccca

SEQ ID NO: 4772036 - DNA, 25 bp, Homo sapien
gcaggtggaggtgtcatctctccta

SEQ ID NO: 4772037 - DNA, 25 bp, Homo sapien
tcctaacctctcatgttgctcaagg

SEQ ID NO: 4772038 - DNA, 25 bp, Homo sapien
taacggcatctctgacgtgctcaaa

SEQ ID NO: 4772039 - DNA, 25 bp, Homo sapien
tcaaactctctgaaggactaacagt

SEQ ID NO: 4772040 - DNA, 25 bp, Homo sapien
aatttgtggtatctatcccttcacg

SEQ ID NO: 4772041 - DNA, 25 bp, Homo sapien
atttacatccaacgcagcagcccaa

SEQ ID NO: 4772042 - DNA, 25 bp, Homo sapien
gttacttcatagtccaacgtgccca

SEQ ID NO: 4772043 - DNA, 25 bp, Homo sapien
taggagagtggtatgagacaattca

SEQ ID NO: 4772044 - DNA, 25 bp, Homo sapien
ccaacctccaatgcaatgtaggaat

SEQ ID NO: 4772045 - DNA, 25 bp, Homo sapien
tgtaagtgaagtacttaataatgct

SEQ ID NO: 4772046 - DNA, 25 bp, Homo sapien
gctgcttattatatcccaaccattc

SEQ ID NO: 4772047 - DNA, 25 bp, Homo sapien
cctgattattatggtccgtactttc

SEQ ID NO: 4772048 - DNA, 25 bp, Homo sapien
cttcactcctgattattatggtccg

SEQ ID NO: 4772049 - DNA, 25 bp, Homo sapien
atatccctgggacttcactcctgat

SEQ ID NO: 4772050 - DNA, 25 bp, Homo sapien
tatggtccgtactttcttatcagat

SEQ ID NO: 4772051 - DNA, 25 bp, Homo sapien
tgccataagctctgtttattccaag

SEQ ID NO: 4772052 - DNA, 25 bp, Homo sapien
ttttactgagtgaatttttgccata

SEQ ID NO: 4772053 - DNA, 25 bp, Homo sapien
tataagatttttactgagtgaattt

SEQ ID NO: 4772054 - DNA, 25 bp, Homo sapien
ctgtttattccaagcaccacaattc

SEQ ID NO: 4772055 - DNA, 25 bp, Homo sapien
ctccatgcctttgaccatgttcttg

SEQ ID NO: 4772056 - DNA, 25 bp, Homo sapien
aatacaccacacatgttcacatctc

SEQ ID NO: 4772057 - DNA, 25 bp, Homo sapien
gccacacttgccttatgttacgtcc

SEQ ID NO: 4772058 - DNA, 25 bp, Homo sapien
tccagtgctagtctatgcttccagc

SEQ ID NO: 4772059 - DNA, 25 bp, Homo sapien
gaaactgctattccacccttcacga

SEQ ID NO: 4772060 - DNA, 25 bp, Homo sapien
ttaacagattataggtgctcaacaa

SEQ ID NO: 4772061 - DNA, 25 bp, Homo sapien
gttaagggtggaaactgctattcca

SEQ ID NO: 4772062 - DNA, 25 bp, Homo sapien
actggtcctctggcttaacccggag

SEQ ID NO: 4772063 - DNA, 25 bp, Homo sapien
atgcccgtcctgagagcgagcggcc

SEQ ID NO: 4772064 - DNA, 25 bp, Homo sapien
ttatgcccgtcctgagagcgagcgg

SEQ ID NO: 4772065 - DNA, 25 bp, Homo sapien
gccccgcgcctgcccagcgttcgca

SEQ ID NO: 4772066 - DNA, 25 bp, Homo sapien
tcctgagagcgagcggccgcccgct

SEQ ID NO: 4772067 - DNA, 25 bp, Homo sapien
cagctcgtcctccgtcttcatctca

SEQ ID NO: 4772068 - DNA, 25 bp, Homo sapien
agctcgtcctccgtcttcatctcag

SEQ ID NO: 4772069 - DNA, 25 bp, Homo sapien
gctcgtcctccgtcttcatctcaga

SEQ ID NO: 4772070 - DNA, 25 bp, Homo sapien
ctcgtcctccgtcttcatctcagag

SEQ ID NO: 4772071 - DNA, 25 bp, Homo sapien
ctgggcccagatcgccgggcccgct

SEQ ID NO: 4772072 - DNA, 25 bp, Homo sapien
ggcccagatcgccgggcccgctcgc

SEQ ID NO: 4772073 - DNA, 25 bp, Homo sapien
agccctgggcccagatcgccgggcc

SEQ ID NO: 4772074 - DNA, 25 bp, Homo sapien
ccctgggcccagatcgccgggcccg

SEQ ID NO: 4772075 - DNA, 25 bp, Homo sapien
cctcaaccccgggcagagccacgca

SEQ ID NO: 4772076 - DNA, 25 bp, Homo sapien
ggcagcctcaaccccgggcagagcc

SEQ ID NO: 4772077 - DNA, 25 bp, Homo sapien
agcctcaaccccgggcagagccacg

SEQ ID NO: 4772078 - DNA, 25 bp, Homo sapien
gcagcctcaaccccgggcagagcca

SEQ ID NO: 4772079 - DNA, 25 bp, Homo sapien
agggatcccaaggccccaggtgccg

SEQ ID NO: 4772080 - DNA, 25 bp, Homo sapien
tgcaagcggccaccaggcgggcgcc

SEQ ID NO: 4772081 - DNA, 25 bp, Homo sapien
gggatcccaaggccccaggtgccgc

SEQ ID NO: 4772082 - DNA, 25 bp, Homo sapien
ggatcccaaggccccaggtgccgcc

SEQ ID NO: 4772083 - DNA, 25 bp, Homo sapien
ctgtttacggcgtggacctgcgacg

SEQ ID NO: 4772084 - DNA, 25 bp, Homo sapien
tgtctgtttacggcgtggacctgcg

SEQ ID NO: 4772085 - DNA, 25 bp, Homo sapien
tttacggcgtggacctgcgacggcc

SEQ ID NO: 4772086 - DNA, 25 bp, Homo sapien
gttgtctgtttacggcgtggacctg

SEQ ID NO: 4772087 - DNA, 25 bp, Homo sapien
caagctttgttagaccccagcaggc

SEQ ID NO: 4772088 - DNA, 25 bp, Homo sapien
gctttgaacagggagggcccaaatc

SEQ ID NO: 4772089 - DNA, 25 bp, Homo sapien
gaatcagtgtaaaatatgtcgccag

SEQ ID NO: 4772090 - DNA, 25 bp, Homo sapien
gagtttcagcagagcatacccaggg

SEQ ID NO: 4772091 - DNA, 25 bp, Homo sapien
gcaaacatctgaagatatagagcca

SEQ ID NO: 4772092 - DNA, 25 bp, Homo sapien
ccatgtgtcatacttaaagggtaga

SEQ ID NO: 4772093 - DNA, 25 bp, Homo sapien
gaagaggctgttaccaaacaacttg

SEQ ID NO: 4772094 - DNA, 25 bp, Homo sapien
tgactcaactatccacatccatgtg

SEQ ID NO: 4772095 - DNA, 25 bp, Homo sapien
ggactatctgactatacacaggcag

SEQ ID NO: 4772096 - DNA, 25 bp, Homo sapien
actggtaacttacacactttataat

SEQ ID NO: 4772097 - DNA, 25 bp, Homo sapien
ccttcgcatggactatctgactata

SEQ ID NO: 4772098 - DNA, 25 bp, Homo sapien
tcaatatatacagccttcgcatgga

SEQ ID NO: 4772099 - DNA, 25 bp, Homo sapien
gactgctctattgcaaatgacatct

SEQ ID NO: 4772100 - DNA, 25 bp, Homo sapien
aatacaaaatggactgctctattgc

SEQ ID NO: 4772101 - DNA, 25 bp, Homo sapien
taatctgtgcacaaaaagacaccaa

SEQ ID NO: 4772102 - DNA, 25 bp, Homo sapien
ttcatcataatctgtgcacaaaaag

SEQ ID NO: 4772103 - DNA, 25 bp, Homo sapien
tgctactggcatcaagagacgcctg

SEQ ID NO: 4772104 - DNA, 25 bp, Homo sapien
gaggacacttctgaaacatcggaca

SEQ ID NO: 4772105 - DNA, 25 bp, Homo sapien
taaaaccaggtcattcagtcgacgc

SEQ ID NO: 4772106 - DNA, 25 bp, Homo sapien
tacaactacttgacaccatcgaggg

SEQ ID NO: 4772107 - DNA, 25 bp, Homo sapien
tccttttgttctaccgtctgggata

SEQ ID NO: 4772108 - DNA, 25 bp, Homo sapien
tgggataaatccgtcaggctcctta

SEQ ID NO: 4772109 - DNA, 25 bp, Homo sapien
taatttccccgtattctcaagctct

SEQ ID NO: 4772110 - DNA, 25 bp, Homo sapien
tgtgtaggagaacaaattaatttcc

SEQ ID NO: 4772111 - DNA, 25 bp, Homo sapien
tccatcctccttagatgtttcagat

SEQ ID NO: 4772112 - DNA, 25 bp, Homo sapien
ctgtcttaacttctttagccagcaa

SEQ ID NO: 4772113 - DNA, 25 bp, Homo sapien
tatgatagctgtggacattgtcacc

SEQ ID NO: 4772114 - DNA, 25 bp, Homo sapien
gccagcaaagatactatctagaact

SEQ ID NO: 4772115 - DNA, 25 bp, Homo sapien
caaaagtagtttacgatgccttcaa

SEQ ID NO: 4772116 - DNA, 25 bp, Homo sapien
gatatgactctccttgaaaacacaa

SEQ ID NO: 4772117 - DNA, 25 bp, Homo sapien
cagattaatcagctagaagacaggc

SEQ ID NO: 4772118 - DNA, 25 bp, Homo sapien
tatgatgttagtgtattcagcacga

SEQ ID NO: 4772119 - DNA, 25 bp, Homo sapien
tttaacaatccaagctccacaaaag

SEQ ID NO: 4772120 - DNA, 25 bp, Homo sapien
aaacattaaaatctactctgagaac

SEQ ID NO: 4772121 - DNA, 25 bp, Homo sapien
tataacctcataacaataattctag

SEQ ID NO: 4772122 - DNA, 25 bp, Homo sapien
ccttgaggagttatctcattagtta

SEQ ID NO: 4772123 - DNA, 25 bp, Homo sapien
ttgatcaagacaggcaagacgcaca

SEQ ID NO: 4772124 - DNA, 25 bp, Homo sapien
taaatgtgtcaaagcctgatccagt

SEQ ID NO: 4772125 - DNA, 25 bp, Homo sapien
tttcaagttcgacaaaggactagct

SEQ ID NO: 4772126 - DNA, 25 bp, Homo sapien
gagtaagcacatacacgctagcacg

SEQ ID NO: 4772127 - DNA, 25 bp, Homo sapien
tggcaattgtcacgtcattcctgct

SEQ ID NO: 4772128 - DNA, 25 bp, Homo sapien
tgaagccctgacctatgtcgcaagt

SEQ ID NO: 4772129 - DNA, 25 bp, Homo sapien
tgtcgcaagtgtaagggtaaaccaa

SEQ ID NO: 4772130 - DNA, 25 bp, Homo sapien
cccctacaagagagcttatctgtgg

SEQ ID NO: 4772131 - DNA, 25 bp, Homo sapien
tactgcatgggtacaatcttggaag

SEQ ID NO: 4772132 - DNA, 25 bp, Homo sapien
tagcggtgtagggtatgatgccaaa

SEQ ID NO: 4772133 - DNA, 25 bp, Homo sapien
gcaagttttcggtcagttttcaaca

SEQ ID NO: 4772134 - DNA, 25 bp, Homo sapien
cagattgcgttgatatgcttcagga

SEQ ID NO: 4772135 - DNA, 25 bp, Homo sapien
gtagttttacagtaggacagcagcg

SEQ ID NO: 4772136 - DNA, 25 bp, Homo sapien
tagttttacagtaggacagcagcgt

SEQ ID NO: 4772137 - DNA, 25 bp, Homo sapien
cgcagaacaggcgcggagtcaggcc

SEQ ID NO: 4772138 - DNA, 25 bp, Homo sapien
ttatcaaaggtctccgaaggcgtgg

SEQ ID NO: 4772139 - DNA, 25 bp, Homo sapien
gccttgaacttgtatttgcacacag

SEQ ID NO: 4772140 - DNA, 25 bp, Homo sapien
gaaggcgtggagttaaaactacagc

SEQ ID NO: 4772141 - DNA, 25 bp, Homo sapien
cgggcgctgcgaaatgccttcctaa

SEQ ID NO: 4772142 - DNA, 25 bp, Homo sapien
tgtctactttcctgtttaaaatatc

SEQ ID NO: 4772143 - DNA, 25 bp, Homo sapien
tgccagcaaattcggcagttacata

SEQ ID NO: 4772144 - DNA, 25 bp, Homo sapien
gcaaattcggcagttacataatgca

SEQ ID NO: 4772145 - DNA, 25 bp, Homo sapien
cataatgcaacatttccaggaaact

SEQ ID NO: 4772146 - DNA, 25 bp, Homo sapien
ccaggaaactattatgtgatttgtc

SEQ ID NO: 4772147 - DNA, 25 bp, Homo sapien
gctctcgggccggcgaggagaaaga

SEQ ID NO: 4772148 - DNA, 25 bp, Homo sapien
gccgggagtcgggccgccggcgctc

SEQ ID NO: 4772149 - DNA, 25 bp, Homo sapien
ccgggagtcgggccgccggcgctcg

SEQ ID NO: 4772150 - DNA, 25 bp, Homo sapien
ctcgggccggcgaggagaaagaaag

SEQ ID NO: 4772151 - DNA, 25 bp, Homo sapien
gaccgcgcgggatctcttcctgtga

SEQ ID NO: 4772152 - DNA, 25 bp, Homo sapien
gctgggacgcccactgtcgtttggt

SEQ ID NO: 4772153 - DNA, 25 bp, Homo sapien
tgtgattttgagctgatagctgctt

SEQ ID NO: 4772154 - DNA, 25 bp, Homo sapien
tagtgttatttctgcgtctaactgg

SEQ ID NO: 4772155 - DNA, 25 bp, Homo sapien
ttcttaagtcgtcgcgctagactgt

SEQ ID NO: 4772156 - DNA, 25 bp, Homo sapien
gcgacttcttaagtcgtcgcgctag

SEQ ID NO: 4772157 - DNA, 25 bp, Homo sapien
tcgtcgcgctagactgtcaaggcac

SEQ ID NO: 4772158 - DNA, 25 bp, Homo sapien
ctagccgcgacttcttaagtcgtcg

SEQ ID NO: 4772159 - DNA, 25 bp, Homo sapien
acggatagtggtcagtgctggcctt

SEQ ID NO: 4772160 - DNA, 25 bp, Homo sapien
cgatacacggatagtggtcagtgct

SEQ ID NO: 4772161 - DNA, 25 bp, Homo sapien
cagtgctggccttggcgaagggagc

SEQ ID NO: 4772162 - DNA, 25 bp, Homo sapien
agtggtcagtgctggccttggcgaa

SEQ ID NO: 4772163 - DNA, 25 bp, Homo sapien
attgcaaaatcttggcgatggagca

SEQ ID NO: 4772164 - DNA, 25 bp, Homo sapien
tcattgcaaaatcttggcgatggag

SEQ ID NO: 4772165 - DNA, 25 bp, Homo sapien
tgcaaaatcttggcgatggagcaag

SEQ ID NO: 4772166 - DNA, 25 bp, Homo sapien
cattgcaaaatcttggcgatggagc

SEQ ID NO: 4772167 - DNA, 25 bp, Homo sapien
tcaagattcaggtgccattgtgttt

SEQ ID NO: 4772168 - DNA, 25 bp, Homo sapien
tgctctcaggcggtgcatgtaggtc

SEQ ID NO: 4772169 - DNA, 25 bp, Homo sapien
catgtaggtctgtggaggattttgt

SEQ ID NO: 4772170 - DNA, 25 bp, Homo sapien
aggtgccattgtgttttcagctgct

SEQ ID NO: 4772171 - DNA, 25 bp, Homo sapien
ggctccgtttggcactgaatcagtt

SEQ ID NO: 4772172 - DNA, 25 bp, Homo sapien
ttttagagacatctgcctgcgcctg

SEQ ID NO: 4772173 - DNA, 25 bp, Homo sapien
tgaagtgaggactatgattttgcca

SEQ ID NO: 4772174 - DNA, 25 bp, Homo sapien
cgcctgaaactgaggagtgtaggaa

SEQ ID NO: 4772175 - DNA, 25 bp, Homo sapien
cgttggttgcagtgtgccacaaaaa

SEQ ID NO: 4772176 - DNA, 25 bp, Homo sapien
tctgcattgcgtggctggatgaaca

SEQ ID NO: 4772177 - DNA, 25 bp, Homo sapien
aagcagccgatgcaatggtaagcag

SEQ ID NO: 4772178 - DNA, 25 bp, Homo sapien
tgccacataaactctgcgttggttg

SEQ ID NO: 4772179 - DNA, 25 bp, Homo sapien
aacatccgaaaagtatgtattgaac

SEQ ID NO: 4772180 - DNA, 25 bp, Homo sapien
ttcaacatccgaaaagtatgtattg

SEQ ID NO: 4772181 - DNA, 25 bp, Homo sapien
ctgagtgtagcaatattcaacatcc

SEQ ID NO: 4772182 - DNA, 25 bp, Homo sapien
gtagcaatattcaacatccgaaaag

SEQ ID NO: 4772183 - DNA, 25 bp, Homo sapien
cccttgtctgagtccttgggctggt

SEQ ID NO: 4772184 - DNA, 25 bp, Homo sapien
gtctgagtccttgggctggtgtcca

SEQ ID NO: 4772185 - DNA, 25 bp, Homo sapien
ttggcccttgtctgagtccttgggc

SEQ ID NO: 4772186 - DNA, 25 bp, Homo sapien
tgtctgagtccttgggctggtgtcc

SEQ ID NO: 4772187 - DNA, 25 bp, Homo sapien
ctcgtggtggtgttgataggcactc

SEQ ID NO: 4772188 - DNA, 25 bp, Homo sapien
cacatgaagccagaatggacatgaa

SEQ ID NO: 4772189 - DNA, 25 bp, Homo sapien
cacaaatagtgtttagagatcccaa

SEQ ID NO: 4772190 - DNA, 25 bp, Homo sapien
ccatttcaaatatgggaatgctgaa

SEQ ID NO: 4772191 - DNA, 25 bp, Homo sapien
agcagaatggtgtggcaataatttc

SEQ ID NO: 4772192 - DNA, 25 bp, Homo sapien
tagcagaatggtgtggcaataattt

SEQ ID NO: 4772193 - DNA, 25 bp, Homo sapien
ctagcagaatggtgtggcaataatt

SEQ ID NO: 4772194 - DNA, 25 bp, Homo sapien
cagagtccagttgcaaggccatggg

SEQ ID NO: 4772195 - DNA, 25 bp, Homo sapien
caatcatcaaccagtgtccacaagg

SEQ ID NO: 4772196 - DNA, 25 bp, Homo sapien
cttgaggaccatcaaaagaaacagc

SEQ ID NO: 4772197 - DNA, 25 bp, Homo sapien
tctgaagacaaccagatccagtggt

SEQ ID NO: 4772198 - DNA, 25 bp, Homo sapien
gacatggccatttggttgctctcca

SEQ ID NO: 4772199 - DNA, 25 bp, Homo sapien
tagacatggccatttggttgctctc

SEQ ID NO: 4772200 - DNA, 25 bp, Homo sapien
ttagacatggccatttggttgctct

SEQ ID NO: 4772201 - DNA, 25 bp, Homo sapien
ttgtccatgttttctagctctcggt

SEQ ID NO: 4772202 - DNA, 25 bp, Homo sapien
agtccttgctcttttgctagctttc

SEQ ID NO: 4772203 - DNA, 25 bp, Homo sapien
catgttttctagctctcggtaggag

SEQ ID NO: 4772204 - DNA, 25 bp, Homo sapien
tctagctctcggtaggagtactggc

SEQ ID NO: 4772205 - DNA, 25 bp, Homo sapien
actcagtaaggctctctgatgtgct

SEQ ID NO: 4772206 - DNA, 25 bp, Homo sapien
ttagttgaaggcaaactcagtaagg

SEQ ID NO: 4772207 - DNA, 25 bp, Homo sapien
gtaaggctctctgatgtgctggtta

SEQ ID NO: 4772208 - DNA, 25 bp, Homo sapien
cagtaaggctctctgatgtgctggt

SEQ ID NO: 4772209 - DNA, 25 bp, Homo sapien
cacagaactgtgtacaagttgacac

SEQ ID NO: 4772210 - DNA, 25 bp, Homo sapien
ttgctgtgctggacttggtaaaggc

SEQ ID NO: 4772211 - DNA, 25 bp, Homo sapien
caaagtgaagtagctagcgtgagtc

SEQ ID NO: 4772212 - DNA, 25 bp, Homo sapien
aaccaccagagaagttgttgttgct

SEQ ID NO: 4772213 - DNA, 25 bp, Homo sapien
tctctaggccttggatgaccatgca

SEQ ID NO: 4772214 - DNA, 25 bp, Homo sapien
tcaagcatatttaagtctctaggcc

SEQ ID NO: 4772215 - DNA, 25 bp, Homo sapien
cattaatgatccttaactttagatc

SEQ ID NO: 4772216 - DNA, 25 bp, Homo sapien
tgtgcagcaataaggtcaaccttag

SEQ ID NO: 4772217 - DNA, 25 bp, Homo sapien
ggaaagccaagggagtatatgccca

SEQ ID NO: 4772218 - DNA, 25 bp, Homo sapien
aagccaagggagtatatgcccagga

SEQ ID NO: 4772219 - DNA, 25 bp, Homo sapien
gccaagggagtatatgcccaggata

SEQ ID NO: 4772220 - DNA, 25 bp, Homo sapien
caagggagtatatgcccaggataaa

SEQ ID NO: 4772221 - DNA, 25 bp, Homo sapien
tctgcagcggtaatcgaagatccac

SEQ ID NO: 4772222 - DNA, 25 bp, Homo sapien
accaattgccctgttctgcagcggt

SEQ ID NO: 4772223 - DNA, 25 bp, Homo sapien
cagcggtaatcgaagatccacaccc

SEQ ID NO: 4772224 - DNA, 25 bp, Homo sapien
gccctgttctgcagcggtaatcgaa

SEQ ID NO: 4772225 - DNA, 25 bp, Homo sapien
acaaacccttctccaacagtccagg

SEQ ID NO: 4772226 - DNA, 25 bp, Homo sapien
ggctcctccaagtacagcttgccaa

SEQ ID NO: 4772227 - DNA, 25 bp, Homo sapien
ggtcctgccttcagcacaaaccctt

SEQ ID NO: 4772228 - DNA, 25 bp, Homo sapien
caagtacagcttgccaattccttgt

SEQ ID NO: 4772229 - DNA, 25 bp, Homo sapien
aggtcatgggccctaaaaattccag

SEQ ID NO: 4772230 - DNA, 25 bp, Homo sapien
taggtcatgggccctaaaaattcca

SEQ ID NO: 4772231 - DNA, 25 bp, Homo sapien
actctccttctaagaggcactcacg

SEQ ID NO: 4772232 - DNA, 25 bp, Homo sapien
ggcactcacggagtcttgactctgc

SEQ ID NO: 4772233 - DNA, 25 bp, Homo sapien
taagaggcactcacggagtcttgac

SEQ ID NO: 4772234 - DNA, 25 bp, Homo sapien
ccttctaagaggcactcacggagtc

SEQ ID NO: 4772235 - DNA, 25 bp, Homo sapien
tcaacagacgctcttcaaaacctga

SEQ ID NO: 4772236 - DNA, 25 bp, Homo sapien
tccccatcccaggagtgaactgagt

SEQ ID NO: 4772237 - DNA, 25 bp, Homo sapien
tttccccatcccaggagtgaactga

SEQ ID NO: 4772238 - DNA, 25 bp, Homo sapien
ttcatctacctgtttcaacagacgc

SEQ ID NO: 4772239 - DNA, 25 bp, Homo sapien
ctcacatggaccacgccttggagat

SEQ ID NO: 4772240 - DNA, 25 bp, Homo sapien
ttttgacgaattgacttgaagcggc

SEQ ID NO: 4772241 - DNA, 25 bp, Homo sapien
caagcctctggtagttctcctgtgg

SEQ ID NO: 4772242 - DNA, 25 bp, Homo sapien
cagtggagttcccagggccttccta

SEQ ID NO: 4772243 - DNA, 25 bp, Homo sapien
tgtccgtagggttccaggtatccag

SEQ ID NO: 4772244 - DNA, 25 bp, Homo sapien
tccaggggtttctcatccaaggaga

SEQ ID NO: 4772245 - DNA, 25 bp, Homo sapien
ctgtccgtagggttccaggtatcca

SEQ ID NO: 4772246 - DNA, 25 bp, Homo sapien
ccaggggtttctcatccaaggagat

SEQ ID NO: 4772247 - DNA, 25 bp, Homo sapien
ggactttaggctgatcattgtaggg

SEQ ID NO: 4772248 - DNA, 25 bp, Homo sapien
tggccttgctgataaggaatctata

SEQ ID NO: 4772249 - DNA, 25 bp, Homo sapien
gaatctataaactctgacttcagct

SEQ ID NO: 4772250 - DNA, 25 bp, Homo sapien
ttttgaatgggaggactttaggctg

SEQ ID NO: 4772251 - DNA, 25 bp, Homo sapien
cacctgtgtgcagattcccaggatt

SEQ ID NO: 4772252 - DNA, 25 bp, Homo sapien
cagcacctgtgtgcagattcccagg

SEQ ID NO: 4772253 - DNA, 25 bp, Homo sapien
gcacctgtgtgcagattcccaggat

SEQ ID NO: 4772254 - DNA, 25 bp, Homo sapien
agcacctgtgtgcagattcccagga

SEQ ID NO: 4772255 - DNA, 25 bp, Homo sapien
ttcagcatgctggataaatgcgtgc

SEQ ID NO: 4772256 - DNA, 25 bp, Homo sapien
tcgtgtgttaacatctggataggct

SEQ ID NO: 4772257 - DNA, 25 bp, Homo sapien
tggtttctgcgtcgtcgtgtgttaa

SEQ ID NO: 4772258 - DNA, 25 bp, Homo sapien
taaatgcgtgctggtttctgcgtcg

SEQ ID NO: 4772259 - DNA, 25 bp, Homo sapien
ggaatggtaagccaccggttctaga

SEQ ID NO: 4772260 - DNA, 25 bp, Homo sapien
gtaagccaccggttctagagaagtg

SEQ ID NO: 4772261 - DNA, 25 bp, Homo sapien
aatggtaagccaccggttctagaga

SEQ ID NO: 4772262 - DNA, 25 bp, Homo sapien
caccggttctagagaagtggttgga

SEQ ID NO: 4772263 - DNA, 25 bp, Homo sapien
gccaaggcgcagaggagcgggcgct

SEQ ID NO: 4772264 - DNA, 25 bp, Homo sapien
ggcgctgccaggactcgagcgccat

SEQ ID NO: 4772265 - DNA, 25 bp, Homo sapien
aacacaggcgctgccaaggcgcaga

SEQ ID NO: 4772266 - DNA, 25 bp, Homo sapien
cgccgggagtcaacacaggcgctgc

SEQ ID NO: 4772267 - DNA, 25 bp, Homo sapien
catgcggttgaagtcacatggcagt

SEQ ID NO: 4772268 - DNA, 25 bp, Homo sapien
ttgttcatgagtctgagtgctctgg

SEQ ID NO: 4772269 - DNA, 25 bp, Homo sapien
tcatgagtctgagtgctctgggccc

SEQ ID NO: 4772270 - DNA, 25 bp, Homo sapien
agggtctgtcatgcggttgaagtca

SEQ ID NO: 4772271 - DNA, 25 bp, Homo sapien
cttcttggcgtacacttggcaaaac

SEQ ID NO: 4772272 - DNA, 25 bp, Homo sapien
gcccaggagacgtcgttcctgcttt

SEQ ID NO: 4772273 - DNA, 25 bp, Homo sapien
gtccttcttggcgtacacttggcaa

SEQ ID NO: 4772274 - DNA, 25 bp, Homo sapien
tttacgcggcgccatgtccttcttg

SEQ ID NO: 4772275 - DNA, 25 bp, Homo sapien
aactccagacacattatgccacaac

SEQ ID NO: 4772276 - DNA, 25 bp, Homo sapien
caactccagacacattatgccacaa

SEQ ID NO: 4772277 - DNA, 25 bp, Homo sapien
ccaactccagacacattatgccaca

SEQ ID NO: 4772278 - DNA, 25 bp, Homo sapien
actccagacacattatgccacaaca

SEQ ID NO: 4772279 - DNA, 25 bp, Homo sapien
tagttgccctgtgggcggaggttgt

SEQ ID NO: 4772280 - DNA, 25 bp, Homo sapien
catctggagttagcccctggtggac

SEQ ID NO: 4772281 - DNA, 25 bp, Homo sapien
gggagtgatagttgccctgtgggcg

SEQ ID NO: 4772282 - DNA, 25 bp, Homo sapien
tggtggactgcagcaatgaaagggc

SEQ ID NO: 4772283 - DNA, 25 bp, Homo sapien
ccatcctggtgggggttgtagctac

SEQ ID NO: 4772284 - DNA, 25 bp, Homo sapien
tgccatcctggtgggggttgtagct

SEQ ID NO: 4772285 - DNA, 25 bp, Homo sapien
gggaagttgtagttgccatcctggt

SEQ ID NO: 4772286 - DNA, 25 bp, Homo sapien
ctgggggggaagttgtagttgccat

SEQ ID NO: 4772287 - DNA, 25 bp, Homo sapien
taccaggggacttgtagctgccatc

SEQ ID NO: 4772288 - DNA, 25 bp, Homo sapien
tcctgtggaagttgtagctgcccta

SEQ ID NO: 4772289 - DNA, 25 bp, Homo sapien
gccatcctcgaggtggttgtagctg

SEQ ID NO: 4772290 - DNA, 25 bp, Homo sapien
tcctgggcgaggaggttgtagctgc

SEQ ID NO: 4772291 - DNA, 25 bp, Homo sapien
tcccgctgcctcgcatccttacaac

SEQ ID NO: 4772292 - DNA, 25 bp, Homo sapien
tttggcgtctccgtcatccagcact

SEQ ID NO: 4772293 - DNA, 25 bp, Homo sapien
cgtttggcgtctccgtcatccagca

SEQ ID NO: 4772294 - DNA, 25 bp, Homo sapien
cctcccgctgcctcgcatccttaca

SEQ ID NO: 4772295 - DNA, 25 bp, Homo sapien
caaataggaccaacaatgtgtgcgg

SEQ ID NO: 4772296 - DNA, 25 bp, Homo sapien
tcctcaaaccaacagaccagatcgg

SEQ ID NO: 4772297 - DNA, 25 bp, Homo sapien
gaccaactggatcccaacgtgggta

SEQ ID NO: 4772298 - DNA, 25 bp, Homo sapien
tgtcaggaacctcaagacccgaggt

SEQ ID NO: 4772299 - DNA, 25 bp, Homo sapien
tcatcagcgccctctgagagcaggg

SEQ ID NO: 4772300 - DNA, 25 bp, Homo sapien
tagaagttgggcaggtaggccccat

SEQ ID NO: 4772301 - DNA, 25 bp, Homo sapien
gcaccatgggtctgatctggccctt

SEQ ID NO: 4772302 - DNA, 25 bp, Homo sapien
gcattgggatctgcaccgggtagaa

SEQ ID NO: 4772303 - DNA, 25 bp, Homo sapien
cacatcctggttggagtacccgcag

SEQ ID NO: 4772304 - DNA, 25 bp, Homo sapien
cacgtggtggctggataggtactcc

SEQ ID NO: 4772305 - DNA, 25 bp, Homo sapien
tacactagcacattgcgggtggcca

SEQ ID NO: 4772306 - DNA, 25 bp, Homo sapien
cagcagcttgtagtaatcggcggca

SEQ ID NO: 4772307 - DNA, 25 bp, Homo sapien
gaggattaaacctggaagagccacc

SEQ ID NO: 4772308 - DNA, 25 bp, Homo sapien
aaaaggcaagcgatgaccagtggaa

SEQ ID NO: 4772309 - DNA, 25 bp, Homo sapien
tgtggacgcagatgccttctgctta

SEQ ID NO: 4772310 - DNA, 25 bp, Homo sapien
tattccggcacatgcaaaccaagaa

SEQ ID NO: 4772311 - DNA, 25 bp, Homo sapien
ggaccaagatgtacagaatccccat

SEQ ID NO: 4772312 - DNA, 25 bp, Homo sapien
tcactccaccaaacctaagtgtaaa

SEQ ID NO: 4772313 - DNA, 25 bp, Homo sapien
tgcttgccgttcctctgtaatccat

SEQ ID NO: 4772314 - DNA, 25 bp, Homo sapien
aggggccctccatctggcctccggg

SEQ ID NO: 4772315 - DNA, 25 bp, Homo sapien
ggtgcttgccgttcctctgtaatcc

SEQ ID NO: 4772316 - DNA, 25 bp, Homo sapien
gtggtgcttgccgttcctctgtaat

SEQ ID NO: 4772317 - DNA, 25 bp, Homo sapien
tctcggctgggatgccaatgcgcat

SEQ ID NO: 4772318 - DNA, 25 bp, Homo sapien
gacaggtgcgtagacgtgccgatca

SEQ ID NO: 4772319 - DNA, 25 bp, Homo sapien
caatgcgcatgcagttggcagcgtc

SEQ ID NO: 4772320 - DNA, 25 bp, Homo sapien
gcgatggtgtactcctggcggcaca

SEQ ID NO: 4772321 - DNA, 25 bp, Homo sapien
tgtatgtgtacactaagtcatggcg

SEQ ID NO: 4772322 - DNA, 25 bp, Homo sapien
agttattccctgtaacctatgtcag

SEQ ID NO: 4772323 - DNA, 25 bp, Homo sapien
aagtcatggcgtaaagtatattctc

SEQ ID NO: 4772324 - DNA, 25 bp, Homo sapien
caagtgcaccgcttttacgaagggt

SEQ ID NO: 4772325 - DNA, 25 bp, Homo sapien
tccggttgccaatgaagcgtgcaca

SEQ ID NO: 4772326 - DNA, 25 bp, Homo sapien
cctgcatctgaagcgagtccacata

SEQ ID NO: 4772327 - DNA, 25 bp, Homo sapien
ctgtgattcggttttcaatctcccc

SEQ ID NO: 4772328 - DNA, 25 bp, Homo sapien
caattccccggtaaggctggcagaa

SEQ ID NO: 4772329 - DNA, 25 bp, Homo sapien
cttctagcaaattcggcaaagacat

SEQ ID NO: 4772330 - DNA, 25 bp, Homo sapien
aattcggcaaagacatgagctggca

SEQ ID NO: 4772331 - DNA, 25 bp, Homo sapien
taacaaaaaccctcagagcagcaga

SEQ ID NO: 4772332 - DNA, 25 bp, Homo sapien
gcagaacacggcttggggaaaacag

SEQ ID NO: 4772333 - DNA, 25 bp, Homo sapien
ttatgatttgggctgtgcgttggac

SEQ ID NO: 4772334 - DNA, 25 bp, Homo sapien
aagttatgatttgggctgtgcgttg

SEQ ID NO: 4772335 - DNA, 25 bp, Homo sapien
tgaaagttatgatttgggctgtgcg

SEQ ID NO: 4772336 - DNA, 25 bp, Homo sapien
gaaagttatgatttgggctgtgcgt

SEQ ID NO: 4772337 - DNA, 25 bp, Homo sapien
taatggtcttcatcccgttggtggc

SEQ ID NO: 4772338 - DNA, 25 bp, Homo sapien
tgcagtgcagaattgccgtctggcc

SEQ ID NO: 4772339 - DNA, 25 bp, Homo sapien
cattctttagccaccgcacgttagg

SEQ ID NO: 4772340 - DNA, 25 bp, Homo sapien
caggtcctggattcgcagtcgtgaa

SEQ ID NO: 4772341 - DNA, 25 bp, Homo sapien
tgttcacaatatgagggcagaaacc

SEQ ID NO: 4772342 - DNA, 25 bp, Homo sapien
taaggcatgtcgcagctttcttgca

SEQ ID NO: 4772343 - DNA, 25 bp, Homo sapien
cacaaatttttcactgccgtgggcg

SEQ ID NO: 4772344 - DNA, 25 bp, Homo sapien
agaccatcgccttgtttagccccag

SEQ ID NO: 4772345 - DNA, 25 bp, Homo sapien
caggatagagtctcacggacagcac

SEQ ID NO: 4772346 - DNA, 25 bp, Homo sapien
gcagtggcatataaaggcctgccca

SEQ ID NO: 4772347 - DNA, 25 bp, Homo sapien
tgctgaggcagtggcatataaaggc

SEQ ID NO: 4772348 - DNA, 25 bp, Homo sapien
tgcccaggtgggaagggaccaggat

SEQ ID NO: 4772349 - DNA, 25 bp, Homo sapien
gaatggaaatcctgagagctgcagg

SEQ ID NO: 4772350 - DNA, 25 bp, Homo sapien
tgcaggaaggacataaagctgctcc

SEQ ID NO: 4772351 - DNA, 25 bp, Homo sapien
taataaatccgttgcgggtgtggaa

SEQ ID NO: 4772352 - DNA, 25 bp, Homo sapien
acagtggccactccactcgggcttt

SEQ ID NO: 4772353 - DNA, 25 bp, Homo sapien
tggctcgcctgctggcggtcagcac

SEQ ID NO: 4772354 - DNA, 25 bp, Homo sapien
tcataatctttaccctggctcgcct

SEQ ID NO: 4772355 - DNA, 25 bp, Homo sapien
cactccagggagtgtcttccgtatt

SEQ ID NO: 4772356 - DNA, 25 bp, Homo sapien
tcacattctggtctgggcacctgga

SEQ ID NO: 4772357 - DNA, 25 bp, Homo sapien
atcgggccgtcctgcccatcaaggg

SEQ ID NO: 4772358 - DNA, 25 bp, Homo sapien
tttcagagttggaatcgggccgtcc

SEQ ID NO: 4772359 - DNA, 25 bp, Homo sapien
tcctaaagggtcgttcggatccaga

SEQ ID NO: 4772360 - DNA, 25 bp, Homo sapien
ggtcgttcggatccagaacctccac

SEQ ID NO: 4772361 - DNA, 25 bp, Homo sapien
ccttctggaccatcagaaaagagat

SEQ ID NO: 4772362 - DNA, 25 bp, Homo sapien
tagttgcctggatttagctggagga

SEQ ID NO: 4772363 - DNA, 25 bp, Homo sapien
caaggtccctgtcctcgttagttgc

SEQ ID NO: 4772364 - DNA, 25 bp, Homo sapien
gaagaggccacgtggccttctggac

SEQ ID NO: 4772365 - DNA, 25 bp, Homo sapien
ttttctcataatatttacaccaatg

SEQ ID NO: 4772366 - DNA, 25 bp, Homo sapien
tttacaccaatgccactccacggct

SEQ ID NO: 4772367 - DNA, 25 bp, Homo sapien
ttctcataatatttacaccaatgcc

SEQ ID NO: 4772368 - DNA, 25 bp, Homo sapien
tacaccaatgccactccacggctct

SEQ ID NO: 4772369 - DNA, 25 bp, Homo sapien
taagtaaagcaaggtgagaaccaca

SEQ ID NO: 4772370 - DNA, 25 bp, Homo sapien
agaaccacagtgtgtccctttcctg

SEQ ID NO: 4772371 - DNA, 25 bp, Homo sapien
cagtaagtaaagcaaggtgagaacc

SEQ ID NO: 4772372 - DNA, 25 bp, Homo sapien
caaggtgagaaccacagtgtgtccc

SEQ ID NO: 4772373 - DNA, 25 bp, Homo sapien
ttctttccaaattctcatggcacat

SEQ ID NO: 4772374 - DNA, 25 bp, Homo sapien
tttctttccaaattctcatggcaca

SEQ ID NO: 4772375 - DNA, 25 bp, Homo sapien
cttttctttccaaattctcatggca

SEQ ID NO: 4772376 - DNA, 25 bp, Homo sapien
ttttctttccaaattctcatggcac

SEQ ID NO: 4772377 - DNA, 25 bp, Homo sapien
gacacagcctcatggcagtcagcgg

SEQ ID NO: 4772378 - DNA, 25 bp, Homo sapien
tgactatcctcgagttccctgaggg

SEQ ID NO: 4772379 - DNA, 25 bp, Homo sapien
tgtccatccactccaagacacggag

SEQ ID NO: 4772380 - DNA, 25 bp, Homo sapien
tcacatggccatgcagttctgtcca

SEQ ID NO: 4772381 - DNA, 25 bp, Homo sapien
tgtccggtcactctcggcagaggct

SEQ ID NO: 4772382 - DNA, 25 bp, Homo sapien
aaggctgccacaaggacaaccgcag

SEQ ID NO: 4772383 - DNA, 25 bp, Homo sapien
cctgcggtctgtgtcaccaggtgtg

SEQ ID NO: 4772384 - DNA, 25 bp, Homo sapien
tgcatgctcagcaataaaggctgcc

SEQ ID NO: 4772385 - DNA, 25 bp, Homo sapien
tccggcatggctggacgatgggccc

SEQ ID NO: 4772386 - DNA, 25 bp, Homo sapien
ctccggcatggctggacgatgggcc

SEQ ID NO: 4772387 - DNA, 25 bp, Homo sapien
ccggcatggctggacgatgggccca

SEQ ID NO: 4772388 - DNA, 25 bp, Homo sapien
aacgttccctcaagagactggtcca

SEQ ID NO: 4772389 - DNA, 25 bp, Homo sapien
ggatgcatggcccaaaacgttccct

SEQ ID NO: 4772390 - DNA, 25 bp, Homo sapien
tcagtccaatgtacagatcggtcca

SEQ ID NO: 4772391 - DNA, 25 bp, Homo sapien
gaagtgaaagtactgggtccaagga

SEQ ID NO: 4772392 - DNA, 25 bp, Homo sapien
ctgaaggcggcaagggtattttttg

SEQ ID NO: 4772393 - DNA, 25 bp, Homo sapien
ttttttggagtgttccagactgtgg

SEQ ID NO: 4772394 - DNA, 25 bp, Homo sapien
ggatggtctcgaaagtatttctctt

SEQ ID NO: 4772395 - DNA, 25 bp, Homo sapien
aagatctgaaggcggcaagggtatt

SEQ ID NO: 4772396 - DNA, 25 bp, Homo sapien
gacatagtcaaggtgagtatgcagc

SEQ ID NO: 4772397 - DNA, 25 bp, Homo sapien
ggtctcaagaggtggtcaaactcca

SEQ ID NO: 4772398 - DNA, 25 bp, Homo sapien
caagatgttgggctagaggactgaa

SEQ ID NO: 4772399 - DNA, 25 bp, Homo sapien
gaacttgaaaataccagggagatga

SEQ ID NO: 4772400 - DNA, 25 bp, Homo sapien
actcggagttacactctcaggctgg

SEQ ID NO: 4772401 - DNA, 25 bp, Homo sapien
ggtgcatctcgtcgttttaactgtg

SEQ ID NO: 4772402 - DNA, 25 bp, Homo sapien
aaacagcataaaagagactcctcac

SEQ ID NO: 4772403 - DNA, 25 bp, Homo sapien
gattgtggccactcatgtaaacaca

SEQ ID NO: 4772404 - DNA, 25 bp, Homo sapien
cttggaagacgagatccagaaagct

SEQ ID NO: 4772405 - DNA, 25 bp, Homo sapien
tgttcatttcatcactcttcatgtt

SEQ ID NO: 4772406 - DNA, 25 bp, Homo sapien
ttcatgtttcccactcacattttct

SEQ ID NO: 4772407 - DNA, 25 bp, Homo sapien
tcttcaacagggtgggagtcactca

SEQ ID NO: 4772408 - DNA, 25 bp, Homo sapien
tagacagaactggaccgacagcgtg

SEQ ID NO: 4772409 - DNA, 25 bp, Homo sapien
tagacgtcggcgtgtgtctacacca

SEQ ID NO: 4772410 - DNA, 25 bp, Homo sapien
ggccatgtgaacagcccagattgtt

SEQ ID NO: 4772411 - DNA, 25 bp, Homo sapien
gatctgtctacaccagggtctctgc

SEQ ID NO: 4772412 - DNA, 25 bp, Homo sapien
tggtaccaaggaaggagcaaccgct

SEQ ID NO: 4772413 - DNA, 25 bp, Homo sapien
aaatctataccatgaaggcgcccca

SEQ ID NO: 4772414 - DNA, 25 bp, Homo sapien
tagacatactgcatgctagacgtgg

SEQ ID NO: 4772415 - DNA, 25 bp, Homo sapien
tgggcagatcacaccctcaggtgga

SEQ ID NO: 4772416 - DNA, 25 bp, Homo sapien
tataatctacatttgtgcaccccgc

SEQ ID NO: 4772417 - DNA, 25 bp, Homo sapien
ctaaaactgggccaaggacctggct

SEQ ID NO: 4772418 - DNA, 25 bp, Homo sapien
gaataatcctggcttcggcccataa

SEQ ID NO: 4772419 - DNA, 25 bp, Homo sapien
gccaagtgagtagtaagagcccagt

SEQ ID NO: 4772420 - DNA, 25 bp, Homo sapien
gtacagtggtaggatctcggctcac

SEQ ID NO: 4772421 - DNA, 25 bp, Homo sapien
gctctgccgcataggctggagtaca

SEQ ID NO: 4772422 - DNA, 25 bp, Homo sapien
ctctgccgcataggctggagtacag

SEQ ID NO: 4772423 - DNA, 25 bp, Homo sapien
ggagtacagtggtaggatctcggct

SEQ ID NO: 4772424 - DNA, 25 bp, Homo sapien
aattgatgactgtgtgctgaaggca

SEQ ID NO: 4772425 - DNA, 25 bp, Homo sapien
ggccagacttatcaaacaactccaa

SEQ ID NO: 4772426 - DNA, 25 bp, Homo sapien
aagaaacttaaatgtcagtgcccag

SEQ ID NO: 4772427 - DNA, 25 bp, Homo sapien
agtgaaaacacaaccaaggcaatga

SEQ ID NO: 4772428 - DNA, 25 bp, Homo sapien
ggcactcctactggaggccacagtg

SEQ ID NO: 4772429 - DNA, 25 bp, Homo sapien
cagcagggcactcctactggaggcc

SEQ ID NO: 4772430 - DNA, 25 bp, Homo sapien
cactcctactggaggccacagtgca

SEQ ID NO: 4772431 - DNA, 25 bp, Homo sapien
gatgcgtgggtgcacactggggttg

SEQ ID NO: 4772432 - DNA, 25 bp, Homo sapien
ccaccgcgcccgaccaagaatattt

SEQ ID NO: 4772433 - DNA, 25 bp, Homo sapien
caccgcgcccgaccaagaatatttt

SEQ ID NO: 4772434 - DNA, 25 bp, Homo sapien
gcttataaacttgttgcttgttgca

SEQ ID NO: 4772435 - DNA, 25 bp, Homo sapien
taccaaagtgcttataaacttgttg

SEQ ID NO: 4772436 - DNA, 25 bp, Homo sapien
aatattttaaccctcacatgcaatt

SEQ ID NO: 4772437 - DNA, 25 bp, Homo sapien
tatttcaagttgacgcactgacttt

SEQ ID NO: 4772438 - DNA, 25 bp, Homo sapien
gatctgagagattccaagctccctg

SEQ ID NO: 4772439 - DNA, 25 bp, Homo sapien
caggtgtcgttcttcaggtggcaga

SEQ ID NO: 4772440 - DNA, 25 bp, Homo sapien
gatggcatggctatccgatgagtca

SEQ ID NO: 4772441 - DNA, 25 bp, Homo sapien
tgttgggtcaactgtcctgtgtggc

SEQ ID NO: 4772442 - DNA, 25 bp, Homo sapien
catggtaggtgatccctcctgctgc

SEQ ID NO: 4772443 - DNA, 25 bp, Homo sapien
atacttggaccctcatcaggccctg

SEQ ID NO: 4772444 - DNA, 25 bp, Homo sapien
catgggtgccttcctattccagggt

SEQ ID NO: 4772445 - DNA, 25 bp, Homo sapien
ctgagctggtactccatgaatggga

SEQ ID NO: 4772446 - DNA, 25 bp, Homo sapien
acacaagccccaattcccaatgccc

SEQ ID NO: 4772447 - DNA, 25 bp, Homo sapien
cacaagccccaattcccaatgccct

SEQ ID NO: 4772448 - DNA, 25 bp, Homo sapien
cacacaagccccaattcccaatgcc

SEQ ID NO: 4772449 - DNA, 25 bp, Homo sapien
tccacacaagccccaattcccaatg

SEQ ID NO: 4772450 - DNA, 25 bp, Homo sapien
accgtacacaaactccaaagccaga

SEQ ID NO: 4772451 - DNA, 25 bp, Homo sapien
tgcaggaagaactaaacaccgtaca

SEQ ID NO: 4772452 - DNA, 25 bp, Homo sapien
gtacacaaactccaaagccagagga

SEQ ID NO: 4772453 - DNA, 25 bp, Homo sapien
caggaagaactaaacaccgtacaca

SEQ ID NO: 4772454 - DNA, 25 bp, Homo sapien
cctgggcaactgagcgagactgtct

SEQ ID NO: 4772455 - DNA, 25 bp, Homo sapien
gcctgggcaactgagcgagactgtc

SEQ ID NO: 4772456 - DNA, 25 bp, Homo sapien
cctggtggacaattgttaaaatgtc

SEQ ID NO: 4772457 - DNA, 25 bp, Homo sapien
ataaggacagttggcctggtggaca

SEQ ID NO: 4772458 - DNA, 25 bp, Homo sapien
gatttccaatgttgctgggcctaga

SEQ ID NO: 4772459 - DNA, 25 bp, Homo sapien
aaagtgaacgcttatttgccagaaa

SEQ ID NO: 4772460 - DNA, 25 bp, Homo sapien
tccaggtcccgcataaatcacactt

SEQ ID NO: 4772461 - DNA, 25 bp, Homo sapien
gctgacagccccacaattccagccg

SEQ ID NO: 4772462 - DNA, 25 bp, Homo sapien
aagggcttccaggtcccgcataaat

SEQ ID NO: 4772463 - DNA, 25 bp, Homo sapien
caattccagccgccatgaggatgtt

SEQ ID NO: 4772464 - DNA, 25 bp, Homo sapien
gctgcagaaatcatgtaccccaagc

SEQ ID NO: 4772465 - DNA, 25 bp, Homo sapien
agtgacaaggctcaggactcttctc

SEQ ID NO: 4772466 - DNA, 25 bp, Homo sapien
gccccgctgcagaaatcatgtaccc

SEQ ID NO: 4772467 - DNA, 25 bp, Homo sapien
atctgggatgccccgctgcagaaat

SEQ ID NO: 4772468 - DNA, 25 bp, Homo sapien
tggccagtcctgcaccattaatgcc

SEQ ID NO: 4772469 - DNA, 25 bp, Homo sapien
gccagtcctgcaccattaatgccat

SEQ ID NO: 4772470 - DNA, 25 bp, Homo sapien
tgtggccagtcctgcaccattaatg

SEQ ID NO: 4772471 - DNA, 25 bp, Homo sapien
gtcctgcaccattaatgccatgctc

SEQ ID NO: 4772472 - DNA, 25 bp, Homo sapien
ttcaccttcctcagcctcccaaagt

SEQ ID NO: 4772473 - DNA, 25 bp, Homo sapien
tctcggcctcccgagtagttgggat

SEQ ID NO: 4772474 - DNA, 25 bp, Homo sapien
tgatcctcctgtctctgtctcggcc

SEQ ID NO: 4772475 - DNA, 25 bp, Homo sapien
gattacaggcacccagcccccaccc

SEQ ID NO: 4772476 - DNA, 25 bp, Homo sapien
acccaggccagactgccatggcgct

SEQ ID NO: 4772477 - DNA, 25 bp, Homo sapien
ccaggccagactgccatggcgctat

SEQ ID NO: 4772478 - DNA, 25 bp, Homo sapien
ttcacccaggccagactgccatggc

SEQ ID NO: 4772479 - DNA, 25 bp, Homo sapien
tctttcacccaggccagactgccat

SEQ ID NO: 4772480 - DNA, 25 bp, Homo sapien
tgcgactgtcccgattctcaccttc

SEQ ID NO: 4772481 - DNA, 25 bp, Homo sapien
gccaggatacctggagcgcgcagct

SEQ ID NO: 4772482 - DNA, 25 bp, Homo sapien
gaaaagcagagcgtctcccagcctg

SEQ ID NO: 4772483 - DNA, 25 bp, Homo sapien
actgaagcccatttactagtaagaa

SEQ ID NO: 4772484 - DNA, 25 bp, Homo sapien
agcggcccgcgggctgggaaagtca

SEQ ID NO: 4772485 - DNA, 25 bp, Homo sapien
tcaagcggcccgcgggctgggaaag

SEQ ID NO: 4772486 - DNA, 25 bp, Homo sapien
gctgggaaagtcaggacccgggagc

SEQ ID NO: 4772487 - DNA, 25 bp, Homo sapien
gtcaggacccgggagccgccggcgc

SEQ ID NO: 4772488 - DNA, 25 bp, Homo sapien
cccgccgcaagagccgcttctccgg

SEQ ID NO: 4772489 - DNA, 25 bp, Homo sapien
ccccgccgcaagagccgcttctccg

SEQ ID NO: 4772490 - DNA, 25 bp, Homo sapien
aggattctgccaggcatcaggccgc

SEQ ID NO: 4772491 - DNA, 25 bp, Homo sapien
gggccacgtccaccccaggattctg

SEQ ID NO: 4772492 - DNA, 25 bp, Homo sapien
gcacatctgcggactcgggtcccgg

SEQ ID NO: 4772493 - DNA, 25 bp, Homo sapien
cctcggggcacatctgcggactcgg

SEQ ID NO: 4772494 - DNA, 25 bp, Homo sapien
gggcacatctgcggactcgggtccc

SEQ ID NO: 4772495 - DNA, 25 bp, Homo sapien
ggaccctcggggcacatctgcggac

SEQ ID NO: 4772496 - DNA, 25 bp, Homo sapien
cggcggccgcccagacggccgggat

SEQ ID NO: 4772497 - DNA, 25 bp, Homo sapien
ctgaagtccgggacactgagagcag

SEQ ID NO: 4772498 - DNA, 25 bp, Homo sapien
cggccgcccagacggccgggatgca

SEQ ID NO: 4772499 - DNA, 25 bp, Homo sapien
ctgagagcagaagcgcggcggccgc

SEQ ID NO: 4772500 - DNA, 25 bp, Homo sapien
cacccctttctacgatgcgtccgct

SEQ ID NO: 4772501 - DNA, 25 bp, Homo sapien
ttctccctggcgcttcgcaaacggg

SEQ ID NO: 4772502 - DNA, 25 bp, Homo sapien
gaagccctcagagcttcgggccggg

SEQ ID NO: 4772503 - DNA, 25 bp, Homo sapien
acttcgaggacctcgtcgtcgtcct

SEQ ID NO: 4772504 - DNA, 25 bp, Homo sapien
tgaactttagtgctattgtgctttg

SEQ ID NO: 4772505 - DNA, 25 bp, Homo sapien
aaccagagcggtcccaaatattgcc

SEQ ID NO: 4772506 - DNA, 25 bp, Homo sapien
aaatattgcccttcagcttttgaac

SEQ ID NO: 4772507 - DNA, 25 bp, Homo sapien
tctgcctctctttgtggaaatgtgt

SEQ ID NO: 4772508 - DNA, 25 bp, Homo sapien
cctttatccacacaagtaagaccca

SEQ ID NO: 4772509 - DNA, 25 bp, Homo sapien
tcctttatccacacaagtaagaccc

SEQ ID NO: 4772510 - DNA, 25 bp, Homo sapien
tctcctttatccacacaagtaagac

SEQ ID NO: 4772511 - DNA, 25 bp, Homo sapien
ctttatccacacaagtaagacccat

SEQ ID NO: 4772512 - DNA, 25 bp, Homo sapien
caagtgtgctggacacagacgccat

SEQ ID NO: 4772513 - DNA, 25 bp, Homo sapien
atgcatagaccgctcctgggcagac

SEQ ID NO: 4772514 - DNA, 25 bp, Homo sapien
gggagccctcgacagcctttctggg

SEQ ID NO: 4772515 - DNA, 25 bp, Homo sapien
gctgtctactggagcagcccgggta

SEQ ID NO: 4772516 - DNA, 25 bp, Homo sapien
gggctggaatcatccgcgctcctgc

SEQ ID NO: 4772517 - DNA, 25 bp, Homo sapien
ctacagagcgccctctctgccgggc

SEQ ID NO: 4772518 - DNA, 25 bp, Homo sapien
cctgggctggaatcatccgcgctcc

SEQ ID NO: 4772519 - DNA, 25 bp, Homo sapien
tgtgctacagagcgccctctctgcc

SEQ ID NO: 4772520 - DNA, 25 bp, Homo sapien
tgcacatctataaggaaggtgataa

SEQ ID NO: 4772521 - DNA, 25 bp, Homo sapien
tcttggcactgtcgtaaacaaacaa

SEQ ID NO: 4772522 - DNA, 25 bp, Homo sapien
atattacccagcatgctcttggcac

SEQ ID NO: 4772523 - DNA, 25 bp, Homo sapien
taaggaaggtgataatgtagacacc

SEQ ID NO: 4772524 - DNA, 25 bp, Homo sapien
cagcatgtctcttgcctcctccaga

SEQ ID NO: 4772525 - DNA, 25 bp, Homo sapien
agcatgtctcttgcctcctccagag

SEQ ID NO: 4772526 - DNA, 25 bp, Homo sapien
agcatttggaaagtttcttccactc

SEQ ID NO: 4772527 - DNA, 25 bp, Homo sapien
tggttgaaaggcaaatattggttga

SEQ ID NO: 4772528 - DNA, 25 bp, Homo sapien
caaccagttagcatgaaagtcaaaa

SEQ ID NO: 4772529 - DNA, 25 bp, Homo sapien
tgctggatgaggctataagggaaaa

SEQ ID NO: 4772530 - DNA, 25 bp, Homo sapien
gaacctaggaaacttcagatactat

SEQ ID NO: 4772531 - DNA, 25 bp, Homo sapien
tatatattctttggttggatgtgaa

SEQ ID NO: 4772532 - DNA, 25 bp, Homo sapien
caaagaatactaccccagtgcaaaa

SEQ ID NO: 4772533 - DNA, 25 bp, Homo sapien
ttgtagtcctatgaggtcagcaaga

SEQ ID NO: 4772534 - DNA, 25 bp, Homo sapien
agactcatcccccaaagagtacttt

SEQ ID NO: 4772535 - DNA, 25 bp, Homo sapien
aaaagatgttgaagaccatttgagt

SEQ ID NO: 4772536 - DNA, 25 bp, Homo sapien
ttgaagaccatttgagtaataagca

SEQ ID NO: 4772537 - DNA, 25 bp, Homo sapien
aagatgttgaagaccatttgagtaa

SEQ ID NO: 4772538 - DNA, 25 bp, Homo sapien
tgtagttacacgtccctaggcaaac

SEQ ID NO: 4772539 - DNA, 25 bp, Homo sapien
tctggctaaggatgctcagattaga

SEQ ID NO: 4772540 - DNA, 25 bp, Homo sapien
tgtggcacgtataacaaacctttac

SEQ ID NO: 4772541 - DNA, 25 bp, Homo sapien
tttagcttcacacaacgaagactgg

SEQ ID NO: 4772542 - DNA, 25 bp, Homo sapien
cactgaagctccagttttaaacgac

SEQ ID NO: 4772543 - DNA, 25 bp, Homo sapien
tactgaaccattactattagaggga

SEQ ID NO: 4772544 - DNA, 25 bp, Homo sapien
cagttcctgggcttttagatgtgtt

SEQ ID NO: 4772545 - DNA, 25 bp, Homo sapien
tactaaggagttaaggagtgcttac

SEQ ID NO: 4772546 - DNA, 25 bp, Homo sapien
ttggtaacaatcctatcaaagatcc

SEQ ID NO: 4772547 - DNA, 25 bp, Homo sapien
ggtccatactgacaccatttggtaa

SEQ ID NO: 4772548 - DNA, 25 bp, Homo sapien
catggccagcgggagtcttgagtcc

SEQ ID NO: 4772549 - DNA, 25 bp, Homo sapien
tcacacaattggtccatactgacac

SEQ ID NO: 4772550 - DNA, 25 bp, Homo sapien
ctccttgatggtggacgcagctctc

SEQ ID NO: 4772551 - DNA, 25 bp, Homo sapien
tgttccaccgtgaccacaacccgaa

SEQ ID NO: 4772552 - DNA, 25 bp, Homo sapien
ttccaccgtgaccacaacccgaatg

SEQ ID NO: 4772553 - DNA, 25 bp, Homo sapien
ttgttccaccgtgaccacaacccga

SEQ ID NO: 4772554 - DNA, 25 bp, Homo sapien
gttaatgcaatacttctgttcatgc

SEQ ID NO: 4772555 - DNA, 25 bp, Homo sapien
cgcctgagttaatgcaatacttctg

SEQ ID NO: 4772556 - DNA, 25 bp, Homo sapien
caagtagcgcgcctgagttaatgca

SEQ ID NO: 4772557 - DNA, 25 bp, Homo sapien
tctttctccaagtagcgcgcctgag

SEQ ID NO: 4772558 - DNA, 25 bp, Homo sapien
aagacatctgcaacctggacttcag

SEQ ID NO: 4772559 - DNA, 25 bp, Homo sapien
agaagacatctgcaacctggacttc

SEQ ID NO: 4772560 - DNA, 25 bp, Homo sapien
gacatctgcaacctggacttcagac

SEQ ID NO: 4772561 - DNA, 25 bp, Homo sapien
catctgcaacctggacttcagacat

SEQ ID NO: 4772562 - DNA, 25 bp, Homo sapien
ccttaagagagccagtatcaaacca

SEQ ID NO: 4772563 - DNA, 25 bp, Homo sapien
aacaccgagttgcttcattcgcacg

SEQ ID NO: 4772564 - DNA, 25 bp, Homo sapien
tgaagcatgtgtggacaactgtcct

SEQ ID NO: 4772565 - DNA, 25 bp, Homo sapien
actcagtgagaacggcggagccatt

SEQ ID NO: 4772566 - DNA, 25 bp, Homo sapien
tctcttccagttgtaggtgaaaggc

SEQ ID NO: 4772567 - DNA, 25 bp, Homo sapien
cccagtgctctcttccagttgtagg

SEQ ID NO: 4772568 - DNA, 25 bp, Homo sapien
ttgctcgcgagacccagtgctctct

SEQ ID NO: 4772569 - DNA, 25 bp, Homo sapien
agcagtctgacatcttgctcgcgag

SEQ ID NO: 4772570 - DNA, 25 bp, Homo sapien
cacacagctgtaagtcccttccagg

SEQ ID NO: 4772571 - DNA, 25 bp, Homo sapien
ccaggcttgaagatcgctcacggag

SEQ ID NO: 4772572 - DNA, 25 bp, Homo sapien
tgtaagtcccttccaggcttgaaga

SEQ ID NO: 4772573 - DNA, 25 bp, Homo sapien
agatcgctcacggagaaataatgtt

SEQ ID NO: 4772574 - DNA, 25 bp, Homo sapien
tatgaatttgtccgcacttttcctt

SEQ ID NO: 4772575 - DNA, 25 bp, Homo sapien
tttatgaatttgtccgcacttttcc

SEQ ID NO: 4772576 - DNA, 25 bp, Homo sapien
ttatgaatttgtccgcacttttcct

SEQ ID NO: 4772577 - DNA, 25 bp, Homo sapien
ctttatgaatttgtccgcacttttc

SEQ ID NO: 4772578 - DNA, 25 bp, Homo sapien
gggcctcaattgctgcagcagctaa

SEQ ID NO: 4772579 - DNA, 25 bp, Homo sapien
taacaggggaggtaacgaagctgaa

SEQ ID NO: 4772580 - DNA, 25 bp, Homo sapien
ttctcttccatgatgttgagggcct

SEQ ID NO: 4772581 - DNA, 25 bp, Homo sapien
gaaaagcagtatccctggccggaaa

SEQ ID NO: 4772582 - DNA, 25 bp, Homo sapien
gatggtcaattacaaaagacctgcc

SEQ ID NO: 4772583 - DNA, 25 bp, Homo sapien
gaaacctccaatagaagcaagtgca

SEQ ID NO: 4772584 - DNA, 25 bp, Homo sapien
agcaagtgcattctccatgttggca

SEQ ID NO: 4772585 - DNA, 25 bp, Homo sapien
ggcactgataagatcaatatcatca

SEQ ID NO: 4772586 - DNA, 25 bp, Homo sapien
gattccatagtgttcagtgactcct

SEQ ID NO: 4772587 - DNA, 25 bp, Homo sapien
catagtgttcagtgactcctcggcc

SEQ ID NO: 4772588 - DNA, 25 bp, Homo sapien
attgattccatagtgttcagtgact

SEQ ID NO: 4772589 - DNA, 25 bp, Homo sapien
ttcagtgactcctcggccatgctct

SEQ ID NO: 4772590 - DNA, 25 bp, Homo sapien
gcttatctacacttgagctgttcct

SEQ ID NO: 4772591 - DNA, 25 bp, Homo sapien
gagctgttcctacacttcatcttta

SEQ ID NO: 4772592 - DNA, 25 bp, Homo sapien
tcatctttagtttcgtatctgtcca

SEQ ID NO: 4772593 - DNA, 25 bp, Homo sapien
tagcactgcttcattactgtagccc

SEQ ID NO: 4772594 - DNA, 25 bp, Homo sapien
tcactagggtggctaaaacaaacca

SEQ ID NO: 4772595 - DNA, 25 bp, Homo sapien
tatgtctccaaaggtatacgcatgg

SEQ ID NO: 4772596 - DNA, 25 bp, Homo sapien
accctggaaaatataagtgctgaca

SEQ ID NO: 4772597 - DNA, 25 bp, Homo sapien
tgtaaccctggtatatagctgatag

SEQ ID NO: 4772598 - DNA, 25 bp, Homo sapien
aatatgcttatgaggcctaatgcgc

SEQ ID NO: 4772599 - DNA, 25 bp, Homo sapien
gcagacgttatacactaaaagcggt

SEQ ID NO: 4772600 - DNA, 25 bp, Homo sapien
taatgcgcaaagcaacgcagacgtt

SEQ ID NO: 4772601 - DNA, 25 bp, Homo sapien
ttgattactctttgaaggccagcac

SEQ ID NO: 4772602 - DNA, 25 bp, Homo sapien
cgagttacacgagccttgcgaggat

SEQ ID NO: 4772603 - DNA, 25 bp, Homo sapien
agaggacaaatagttccagtattca

SEQ ID NO: 4772604 - DNA, 25 bp, Homo sapien
ccttctactacaatgaaacgccgag

SEQ ID NO: 4772605 - DNA, 25 bp, Homo sapien
tagttccagtattcatatacaatcc

SEQ ID NO: 4772606 - DNA, 25 bp, Homo sapien
tctgtttcaccctaatcagaacacc

SEQ ID NO: 4772607 - DNA, 25 bp, Homo sapien
ccacagacctgagctactttactta

SEQ ID NO: 4772608 - DNA, 25 bp, Homo sapien
tcagaacaccaaggagctacttcca

SEQ ID NO: 4772609 - DNA, 25 bp, Homo sapien
tggtgtcctgctcagaaccacagac

SEQ ID NO: 4772610 - DNA, 25 bp, Homo sapien
ctgggttatgttaggttctcgagag

SEQ ID NO: 4772611 - DNA, 25 bp, Homo sapien
atgttaggttctcgagaggaaacag

SEQ ID NO: 4772612 - DNA, 25 bp, Homo sapien
ttatgttaggttctcgagaggaaac

SEQ ID NO: 4772613 - DNA, 25 bp, Homo sapien
ggttatgttaggttctcgagaggaa

SEQ ID NO: 4772614 - DNA, 25 bp, Homo sapien
gggcagtcatttcccacaggcagta

SEQ ID NO: 4772615 - DNA, 25 bp, Homo sapien
tgtaattacggcaatgacaaggcaa

SEQ ID NO: 4772616 - DNA, 25 bp, Homo sapien
taatatccaaatgtgatccacaggc

SEQ ID NO: 4772617 - DNA, 25 bp, Homo sapien
ggtacatgtcattaaaggcctagta

SEQ ID NO: 4772618 - DNA, 25 bp, Homo sapien
ttttagtagtcgctcgaggtcagcc

SEQ ID NO: 4772619 - DNA, 25 bp, Homo sapien
cttttgatcttcgatctcttgttct

SEQ ID NO: 4772620 - DNA, 25 bp, Homo sapien
ttagtagtcgctcgaggtcagccat

SEQ ID NO: 4772621 - DNA, 25 bp, Homo sapien
ttgatcttcgatctcttgttctttt

SEQ ID NO: 4772622 - DNA, 25 bp, Homo sapien
taaataacttaatgtcactacggga

SEQ ID NO: 4772623 - DNA, 25 bp, Homo sapien
taacttaatgtcactacgggatgcc

SEQ ID NO: 4772624 - DNA, 25 bp, Homo sapien
atgtcactacgggatgcctgtaatc

SEQ ID NO: 4772625 - DNA, 25 bp, Homo sapien
ttaatgtcactacgggatgcctgta

SEQ ID NO: 4772626 - DNA, 25 bp, Homo sapien
tgtcccctcttttagagtaagcagg

SEQ ID NO: 4772627 - DNA, 25 bp, Homo sapien
catatgagtatataatggcttcttc

SEQ ID NO: 4772628 - DNA, 25 bp, Homo sapien
gaatagcactggctatggtggcaaa

SEQ ID NO: 4772629 - DNA, 25 bp, Homo sapien
tgtcttcataaattttgccaggcgg

SEQ ID NO: 4772630 - DNA, 25 bp, Homo sapien
atggttaaactgccttataattctt

SEQ ID NO: 4772631 - DNA, 25 bp, Homo sapien
aatggttaaactgccttataattct

SEQ ID NO: 4772632 - DNA, 25 bp, Homo sapien
atacagttgccataagtgggaagaa

SEQ ID NO: 4772633 - DNA, 25 bp, Homo sapien
cagttgccataagtgggaagaagaa

SEQ ID NO: 4772634 - DNA, 25 bp, Homo sapien
ggtatactcgtaactgtttatatac

SEQ ID NO: 4772635 - DNA, 25 bp, Homo sapien
gtatactcgtaactgtttatataca

SEQ ID NO: 4772636 - DNA, 25 bp, Homo sapien
tctatcagaagacactgggttttag

SEQ ID NO: 4772637 - DNA, 25 bp, Homo sapien
tcagaagacactgggttttagctga

SEQ ID NO: 4772638 - DNA, 25 bp, Homo sapien
tccttctatcagaagacactgggtt

SEQ ID NO: 4772639 - DNA, 25 bp, Homo sapien
tatcagaagacactgggttttagct

SEQ ID NO: 4772640 - DNA, 25 bp, Homo sapien
gacaggtaaatatgggtaactgaag

SEQ ID NO: 4772641 - DNA, 25 bp, Homo sapien
cctttgtgcaacgaagaaactctca

SEQ ID NO: 4772642 - DNA, 25 bp, Homo sapien
tttctcttgatgctcctttgtgcaa

SEQ ID NO: 4772643 - DNA, 25 bp, Homo sapien
tttgtgacaggtaaatatgggtaac

SEQ ID NO: 4772644 - DNA, 25 bp, Homo sapien
tattaaacacggcagagaagtgacc

SEQ ID NO: 4772645 - DNA, 25 bp, Homo sapien
gaggtgtcctagaatgcctccgcac

SEQ ID NO: 4772646 - DNA, 25 bp, Homo sapien
cactaactggagctgtagatttgca

SEQ ID NO: 4772647 - DNA, 25 bp, Homo sapien
cagcaagcaggaaaactacaagggc

SEQ ID NO: 4772648 - DNA, 25 bp, Homo sapien
ctgcctgcctcagcctttgaaagtg

SEQ ID NO: 4772649 - DNA, 25 bp, Homo sapien
tgcctgcctcagcctttgaaagtgc

SEQ ID NO: 4772650 - DNA, 25 bp, Homo sapien
ttttcaggagcaaagaatatacact

SEQ ID NO: 4772651 - DNA, 25 bp, Homo sapien
aacattttcaggagcaaagaatata

SEQ ID NO: 4772652 - DNA, 25 bp, Homo sapien
ttaataacattttcaggagcaaaga

SEQ ID NO: 4772653 - DNA, 25 bp, Homo sapien
cattttcaggagcaaagaatataca

SEQ ID NO: 4772654 - DNA, 25 bp, Homo sapien
gttcccggattatccatacacaagg

SEQ ID NO: 4772655 - DNA, 25 bp, Homo sapien
gactcccagggaattcactgtattt

SEQ ID NO: 4772656 - DNA, 25 bp, Homo sapien
caaatatttagttggcctgttcccg

SEQ ID NO: 4772657 - DNA, 25 bp, Homo sapien
taaaatgccggtcttctttgatgac

SEQ ID NO: 4772658 - DNA, 25 bp, Homo sapien
agcagtagtctcaaagagaacacaa

SEQ ID NO: 4772659 - DNA, 25 bp, Homo sapien
ccagcctaaaattgaatcttaacta

SEQ ID NO: 4772660 - DNA, 25 bp, Homo sapien
taactattgaaagcagtagtctcaa

SEQ ID NO: 4772661 - DNA, 25 bp, Homo sapien
aatcttaactattgaaagcagtagt

SEQ ID NO: 4772662 - DNA, 25 bp, Homo sapien
aagtccccacgccatacttctttag

SEQ ID NO: 4772663 - DNA, 25 bp, Homo sapien
ccataaaatcctctgggtccacaag

SEQ ID NO: 4772664 - DNA, 25 bp, Homo sapien
atgtgccataaaatcctctgggtcc

SEQ ID NO: 4772665 - DNA, 25 bp, Homo sapien
cgccatacttctttagagatgctaa

SEQ ID NO: 4772666 - DNA, 25 bp, Homo sapien
tccacttcagcaatatgtgctactc

SEQ ID NO: 4772667 - DNA, 25 bp, Homo sapien
tgtccacttcagcaatatgtgctac

SEQ ID NO: 4772668 - DNA, 25 bp, Homo sapien
cacttcagcaatatgtgctactcac

SEQ ID NO: 4772669 - DNA, 25 bp, Homo sapien
tctgtccacttcagcaatatgtgct

SEQ ID NO: 4772670 - DNA, 25 bp, Homo sapien
taaatgaggcgaagtttatacattc

SEQ ID NO: 4772671 - DNA, 25 bp, Homo sapien
tcaccacagttttgtggcttggagg

SEQ ID NO: 4772672 - DNA, 25 bp, Homo sapien
cattcttttccattcaccacagttt

SEQ ID NO: 4772673 - DNA, 25 bp, Homo sapien
gaggcgaagtttatacattcttttc

SEQ ID NO: 4772674 - DNA, 25 bp, Homo sapien
ttttttggttgtgtctctgcccagc

SEQ ID NO: 4772675 - DNA, 25 bp, Homo sapien
gagagttttcagcatgaaggttgtt

SEQ ID NO: 4772676 - DNA, 25 bp, Homo sapien
ttgagagttttcagcatgaaggttg

SEQ ID NO: 4772677 - DNA, 25 bp, Homo sapien
gagttttcagcatgaaggttgttga

SEQ ID NO: 4772678 - DNA, 25 bp, Homo sapien
cggattttcgtgaaccgggaatgct

SEQ ID NO: 4772679 - DNA, 25 bp, Homo sapien
cctatttgcctggctatcagcagca

SEQ ID NO: 4772680 - DNA, 25 bp, Homo sapien
cagcggattttcgtgaaccgggaat

SEQ ID NO: 4772681 - DNA, 25 bp, Homo sapien
agaacagcggattttcgtgaaccgg

SEQ ID NO: 4772682 - DNA, 25 bp, Homo sapien
caggaattacttatgttaagcatga

SEQ ID NO: 4772683 - DNA, 25 bp, Homo sapien
aacctgatcaagcagactaaaggca

SEQ ID NO: 4772684 - DNA, 25 bp, Homo sapien
aaagaataagggaagtctaatcaag

SEQ ID NO: 4772685 - DNA, 25 bp, Homo sapien
gaattacttatgttaagcatgagga

SEQ ID NO: 4772686 - DNA, 25 bp, Homo sapien
caggatggtaacctgggtccctaat

SEQ ID NO: 4772687 - DNA, 25 bp, Homo sapien
cacaggatggtaacctgggtcccta

SEQ ID NO: 4772688 - DNA, 25 bp, Homo sapien
gaacacaggatggtaacctgggtcc

SEQ ID NO: 4772689 - DNA, 25 bp, Homo sapien
acacaggatggtaacctgggtccct

SEQ ID NO: 4772690 - DNA, 25 bp, Homo sapien
ctgaatttagaaaccgggaggtgct

SEQ ID NO: 4772691 - DNA, 25 bp, Homo sapien
agcagttaccccacaaaccactagg

SEQ ID NO: 4772692 - DNA, 25 bp, Homo sapien
tctctacggataaagttgaacagcc

SEQ ID NO: 4772693 - DNA, 25 bp, Homo sapien
gaactgtgtacatacaaatacctgg

SEQ ID NO: 4772694 - DNA, 25 bp, Homo sapien
cctgactcagcattcccggattcac

SEQ ID NO: 4772695 - DNA, 25 bp, Homo sapien
cggttcccgccatctcggcagccat

SEQ ID NO: 4772696 - DNA, 25 bp, Homo sapien
tttccaagcagtaggtaaatactgg

SEQ ID NO: 4772697 - DNA, 25 bp, Homo sapien
tcaaattagatctttagggtaggaa

SEQ ID NO: 4772698 - DNA, 25 bp, Homo sapien
gaatctggcttaccaaagaagggaa

SEQ ID NO: 4772699 - DNA, 25 bp, Homo sapien
taaggagatacgaatatatccaatg

SEQ ID NO: 4772700 - DNA, 25 bp, Homo sapien
cagaatcagaacaatactactcagg

SEQ ID NO: 4772701 - DNA, 25 bp, Homo sapien
ccaacttcaagacagtagttatccg

SEQ ID NO: 4772702 - DNA, 25 bp, Homo sapien
cagaacaatactactcaggaaaata

SEQ ID NO: 4772703 - DNA, 25 bp, Homo sapien
cgtatgagaggcaagagtaagtgat

SEQ ID NO: 4772704 - DNA, 25 bp, Homo sapien
gactgcaggttactacaagaagcca

SEQ ID NO: 4772705 - DNA, 25 bp, Homo sapien
tagatgagacactggaagcaaggag

SEQ ID NO: 4772706 - DNA, 25 bp, Homo sapien
agctaaagctgttactcctgggaac

SEQ ID NO: 4772707 - DNA, 25 bp, Homo sapien
gaattatgagggtaacgtgcgacaa

SEQ ID NO: 4772708 - DNA, 25 bp, Homo sapien
ctgaaacgatgttgtagttgagagc

SEQ ID NO: 4772709 - DNA, 25 bp, Homo sapien
gaaacgatgttgtagttgagagcag

SEQ ID NO: 4772710 - DNA, 25 bp, Homo sapien
cctgaaacgatgttgtagttgagag

SEQ ID NO: 4772711 - DNA, 25 bp, Homo sapien
tgaaacgatgttgtagttgagagca

SEQ ID NO: 4772712 - DNA, 25 bp, Homo sapien
gatggtcttttgggacaggaggaac

SEQ ID NO: 4772713 - DNA, 25 bp, Homo sapien
atttgtaagtcttagagaaaagaag

SEQ ID NO: 4772714 - DNA, 25 bp, Homo sapien
tgtaagtcttagagaaaagaagtct

SEQ ID NO: 4772715 - DNA, 25 bp, Homo sapien
tcattttcaccactccgttttatcg

SEQ ID NO: 4772716 - DNA, 25 bp, Homo sapien
ctgcgtccccttacacgtgttcctt

SEQ ID NO: 4772717 - DNA, 25 bp, Homo sapien
gcagacctgtctcctgcgtcccctt

SEQ ID NO: 4772718 - DNA, 25 bp, Homo sapien
cgttttatcgtccgtctaaactctg

SEQ ID NO: 4772719 - DNA, 25 bp, Homo sapien
aggtctcaggccacaaatccacacg

SEQ ID NO: 4772720 - DNA, 25 bp, Homo sapien
agtctgggcgtgaccgagccagtcc

SEQ ID NO: 4772721 - DNA, 25 bp, Homo sapien
tacactcaaccgctgggactagaag

SEQ ID NO: 4772722 - DNA, 25 bp, Homo sapien
taagaattcaaaccgagaccctcag

SEQ ID NO: 4772723 - DNA, 25 bp, Homo sapien
ccagaacccactgctccgtggcggt

SEQ ID NO: 4772724 - DNA, 25 bp, Homo sapien
tcgtaaagcgcctgtaccatctcca

SEQ ID NO: 4772725 - DNA, 25 bp, Homo sapien
caccagaacccactgctccgtggcg

SEQ ID NO: 4772726 - DNA, 25 bp, Homo sapien
agaacccactgctccgtggcggtcg

SEQ ID NO: 4772727 - DNA, 25 bp, Homo sapien
gcttccttccggaaggcgggtcaca

SEQ ID NO: 4772728 - DNA, 25 bp, Homo sapien
cttccggaaggcgggtcacaagcgc

SEQ ID NO: 4772729 - DNA, 25 bp, Homo sapien
tccttccggaaggcgggtcacaagc

SEQ ID NO: 4772730 - DNA, 25 bp, Homo sapien
ccttccggaaggcgggtcacaagcg

SEQ ID NO: 4772731 - DNA, 25 bp, Homo sapien
ctgagtcaatggtactatctgcaaa

SEQ ID NO: 4772732 - DNA, 25 bp, Homo sapien
gagtcaatggtactatctgcaaatt

SEQ ID NO: 4772733 - DNA, 25 bp, Homo sapien
attctgagtcaatggtactatctgc

SEQ ID NO: 4772734 - DNA, 25 bp, Homo sapien
tctgagtcaatggtactatctgcaa

SEQ ID NO: 4772735 - DNA, 25 bp, Homo sapien
tcagaagtcaggagggtccttctca

SEQ ID NO: 4772736 - DNA, 25 bp, Homo sapien
agaagtcaggagggtccttctcagg

SEQ ID NO: 4772737 - DNA, 25 bp, Homo sapien
cagaagtcaggagggtccttctcag

SEQ ID NO: 4772738 - DNA, 25 bp, Homo sapien
gggacttagatcctcctgacacaga

SEQ ID NO: 4772739 - DNA, 25 bp, Homo sapien
ccatagacggaaccataggaggcgc

SEQ ID NO: 4772740 - DNA, 25 bp, Homo sapien
caggccagagaggactcgaagatcc

SEQ ID NO: 4772741 - DNA, 25 bp, Homo sapien
ggacttggagcccaaccagttggtg

SEQ ID NO: 4772742 - DNA, 25 bp, Homo sapien
gacattctccctggctagggcctgt

SEQ ID NO: 4772743 - DNA, 25 bp, Homo sapien
tttcgacattctccctggctagggc

SEQ ID NO: 4772744 - DNA, 25 bp, Homo sapien
tcgacattctccctggctagggcct

SEQ ID NO: 4772745 - DNA, 25 bp, Homo sapien
gggtttcgacattctccctggctag

SEQ ID NO: 4772746 - DNA, 25 bp, Homo sapien
acccaatcgtcacgcttcttaactg

SEQ ID NO: 4772747 - DNA, 25 bp, Homo sapien
ccaatcgtcacgcttcttaactgca

SEQ ID NO: 4772748 - DNA, 25 bp, Homo sapien
aatcgtcacgcttcttaactgcaaa

SEQ ID NO: 4772749 - DNA, 25 bp, Homo sapien
tcgtcacgcttcttaactgcaaaag

SEQ ID NO: 4772750 - DNA, 25 bp, Homo sapien
tactctgggaccaactgtgaagaca

SEQ ID NO: 4772751 - DNA, 25 bp, Homo sapien
ttactctgggaccaactgtgaagac

SEQ ID NO: 4772752 - DNA, 25 bp, Homo sapien
actctgggaccaactgtgaagacat

SEQ ID NO: 4772753 - DNA, 25 bp, Homo sapien
tcttgtcattggtaagctcccatcc

SEQ ID NO: 4772754 - DNA, 25 bp, Homo sapien
tgtcattggtaagctcccatcccca

SEQ ID NO: 4772755 - DNA, 25 bp, Homo sapien
gtcctcttgtcattggtaagctccc

SEQ ID NO: 4772756 - DNA, 25 bp, Homo sapien
aatcatccagtatatttctctctcc

SEQ ID NO: 4772757 - DNA, 25 bp, Homo sapien
tggctagcagcaatttacttttctt

SEQ ID NO: 4772758 - DNA, 25 bp, Homo sapien
ttctttggctagcagcaatttactt

SEQ ID NO: 4772759 - DNA, 25 bp, Homo sapien
tctttggctagcagcaatttacttt

SEQ ID NO: 4772760 - DNA, 25 bp, Homo sapien
tttggctagcagcaatttacttttc

SEQ ID NO: 4772761 - DNA, 25 bp, Homo sapien
agttgagcaggagatagcgtgggtc

SEQ ID NO: 4772762 - DNA, 25 bp, Homo sapien
tagcgtgggtcaaacacgattttgt

SEQ ID NO: 4772763 - DNA, 25 bp, Homo sapien
ctgctttcgttcctcagagttgagc

SEQ ID NO: 4772764 - DNA, 25 bp, Homo sapien
ggtcaaacacgattttgtgtaattc

SEQ ID NO: 4772765 - DNA, 25 bp, Homo sapien
ctgcactgcagagggttgccattgg

SEQ ID NO: 4772766 - DNA, 25 bp, Homo sapien
gcagagggttgccattggcaccttc

SEQ ID NO: 4772767 - DNA, 25 bp, Homo sapien
agggttgccattggcaccttcctcc

SEQ ID NO: 4772768 - DNA, 25 bp, Homo sapien
acctgcactgcagagggttgccatt

SEQ ID NO: 4772769 - DNA, 25 bp, Homo sapien
tgtgaggagccagcgcggggtcaga

SEQ ID NO: 4772770 - DNA, 25 bp, Homo sapien
ctgagggtaagtggcagcaggagcc

SEQ ID NO: 4772771 - DNA, 25 bp, Homo sapien
cagcgcggggtcagaaagaggagtg

SEQ ID NO: 4772772 - DNA, 25 bp, Homo sapien
tgccatggggccctgagggtaagtg

SEQ ID NO: 4772773 - DNA, 25 bp, Homo sapien
ctggggaggtagcagactagaggcc

SEQ ID NO: 4772774 - DNA, 25 bp, Homo sapien
tgaagtaggtgaccctggtgaagat

SEQ ID NO: 4772775 - DNA, 25 bp, Homo sapien
cagttgatgaagtaggtgaccctgg

SEQ ID NO: 4772776 - DNA, 25 bp, Homo sapien
gcaggatgccggcagtccaggcccc

SEQ ID NO: 4772777 - DNA, 25 bp, Homo sapien
ggagatagaagggtggtgacagttg

SEQ ID NO: 4772778 - DNA, 25 bp, Homo sapien
gagatagaagggtggtgacagttgc

SEQ ID NO: 4772779 - DNA, 25 bp, Homo sapien
tggagatagaagggtggtgacagtt

SEQ ID NO: 4772780 - DNA, 25 bp, Homo sapien
gaagtgaagttcataggcaggtgca

SEQ ID NO: 4772781 - DNA, 25 bp, Homo sapien
cagacagggacaatgtaggaagtga

SEQ ID NO: 4772782 - DNA, 25 bp, Homo sapien
gcaacatggcaatgtcactcccaaa

SEQ ID NO: 4772783 - DNA, 25 bp, Homo sapien
caacagaacctgatagttcttcggg

SEQ ID NO: 4772784 - DNA, 25 bp, Homo sapien
gccaatgctctcacgcatgtctggg

SEQ ID NO: 4772785 - DNA, 25 bp, Homo sapien
ggagcatggtgcacactgaagagaa

SEQ ID NO: 4772786 - DNA, 25 bp, Homo sapien
gacactgccaatgctctcacgcatg

SEQ ID NO: 4772787 - DNA, 25 bp, Homo sapien
catgtctgggttgagcagacagaca

SEQ ID NO: 4772788 - DNA, 25 bp, Homo sapien
ggacagctccacagaggtgcgagcc

SEQ ID NO: 4772789 - DNA, 25 bp, Homo sapien
ggtgcgagccccagtagagcaggct

SEQ ID NO: 4772790 - DNA, 25 bp, Homo sapien
ccagccagcaggagtcgatgaggac

SEQ ID NO: 4772791 - DNA, 25 bp, Homo sapien
cagtgggtagttgataccagccagc

SEQ ID NO: 4772792 - DNA, 25 bp, Homo sapien
cttgcttgatgtcgtctctggagcc

SEQ ID NO: 4772793 - DNA, 25 bp, Homo sapien
gggctctggtccgcgttgaccccac

SEQ ID NO: 4772794 - DNA, 25 bp, Homo sapien
gctgcgcccccaagctctctctggc

SEQ ID NO: 4772795 - DNA, 25 bp, Homo sapien
tggtccgcgttgaccccacacccat

SEQ ID NO: 4772796 - DNA, 25 bp, Homo sapien
gctctggtccgcgttgaccccacac

SEQ ID NO: 4772797 - DNA, 25 bp, Homo sapien
agctgagctagtgccaagaaggcct

SEQ ID NO: 4772798 - DNA, 25 bp, Homo sapien
tctacagtgtctggcaggtttttgc

SEQ ID NO: 4772799 - DNA, 25 bp, Homo sapien
acaacagcgacctggctcacaccct

SEQ ID NO: 4772800 - DNA, 25 bp, Homo sapien
gcccggctgtgaggccccataggca

SEQ ID NO: 4772801 - DNA, 25 bp, Homo sapien
gattatggcgccctccaccacgtcc

SEQ ID NO: 4772802 - DNA, 25 bp, Homo sapien
gctgggattatggcgccctccacca

SEQ ID NO: 4772803 - DNA, 25 bp, Homo sapien
aagacagggtctgggctggggtaca

SEQ ID NO: 4772804 - DNA, 25 bp, Homo sapien
acagggtctgggctggggtacagtg

SEQ ID NO: 4772805 - DNA, 25 bp, Homo sapien
agatgtctagtccactgtcttaata

SEQ ID NO: 4772806 - DNA, 25 bp, Homo sapien
tgtctagtccactgtcttaataaga

SEQ ID NO: 4772807 - DNA, 25 bp, Homo sapien
tagtccactgtcttaataagaaacc

SEQ ID NO: 4772808 - DNA, 25 bp, Homo sapien
ccactgtcttaataagaaaccacca

SEQ ID NO: 4772809 - DNA, 25 bp, Homo sapien
caagttacttgactaatcaatccca

SEQ ID NO: 4772810 - DNA, 25 bp, Homo sapien
tgtaattagggaagggctgaccgaa

SEQ ID NO: 4772811 - DNA, 25 bp, Homo sapien
aacatgactgcataggtgtctaagg

SEQ ID NO: 4772812 - DNA, 25 bp, Homo sapien
ttgtaacctgctcccaacatgactg

SEQ ID NO: 4772813 - DNA, 25 bp, Homo sapien
tgttgttggtaacacagaaacatac

SEQ ID NO: 4772814 - DNA, 25 bp, Homo sapien
tgctgttgttggtaacacagaaaca

SEQ ID NO: 4772815 - DNA, 25 bp, Homo sapien
ctgctgttgttggtaacacagaaac

SEQ ID NO: 4772816 - DNA, 25 bp, Homo sapien
gctgttgttggtaacacagaaacat

SEQ ID NO: 4772817 - DNA, 25 bp, Homo sapien
tatggccaatgacgaaaactctgag

SEQ ID NO: 4772818 - DNA, 25 bp, Homo sapien
taagcctaggacatgttgctacgtg

SEQ ID NO: 4772819 - DNA, 25 bp, Homo sapien
taactctgggtactgccaagatggt

SEQ ID NO: 4772820 - DNA, 25 bp, Homo sapien
gaacagctattttctacgtctggag

SEQ ID NO: 4772821 - DNA, 25 bp, Homo sapien
cccaagtgggttttcaagcaggaga

SEQ ID NO: 4772822 - DNA, 25 bp, Homo sapien
tccgaaggccaaacaccttggctgc

SEQ ID NO: 4772823 - DNA, 25 bp, Homo sapien
cagctttagcttcctgctccgaagg

SEQ ID NO: 4772824 - DNA, 25 bp, Homo sapien
gaagaccttggtgggtgagtccatt

SEQ ID NO: 4772825 - DNA, 25 bp, Homo sapien
agagtactagaactgttgatcagag

SEQ ID NO: 4772826 - DNA, 25 bp, Homo sapien
agtactagaactgttgatcagagag

SEQ ID NO: 4772827 - DNA, 25 bp, Homo sapien
ttcaggagctgtaggttgatatact

SEQ ID NO: 4772828 - DNA, 25 bp, Homo sapien
aggttgatatactgacaaagaagag

SEQ ID NO: 4772829 - DNA, 25 bp, Homo sapien
gactcagtaagtcagtttggttttg

SEQ ID NO: 4772830 - DNA, 25 bp, Homo sapien
agtcacacaaagtgtttttccacta

SEQ ID NO: 4772831 - DNA, 25 bp, Homo sapien
cacaaagtgtttttccactaagact

SEQ ID NO: 4772832 - DNA, 25 bp, Homo sapien
tgtttttccactaagactcagtaag

SEQ ID NO: 4772833 - DNA, 25 bp, Homo sapien
caaggaaactgctgcaccagtggct

SEQ ID NO: 4772834 - DNA, 25 bp, Homo sapien
tagatgctcatgctcagcctaggcc

SEQ ID NO: 4772835 - DNA, 25 bp, Homo sapien
aatggttgtgatataggacaggccc

SEQ ID NO: 4772836 - DNA, 25 bp, Homo sapien
gcttctttcagtgcagccggctggt

SEQ ID NO: 4772837 - DNA, 25 bp, Homo sapien
tgcaactctctggaaaagtgtacca

SEQ ID NO: 4772838 - DNA, 25 bp, Homo sapien
tctggtggcagttaatagtacctca

SEQ ID NO: 4772839 - DNA, 25 bp, Homo sapien
tagcaaacagttttccagtggttcc

SEQ ID NO: 4772840 - DNA, 25 bp, Homo sapien
ccaccttggtggaacctggttagag

SEQ ID NO: 4772841 - DNA, 25 bp, Homo sapien
tctgaaacctgtaggcgaattcttt

SEQ ID NO: 4772842 - DNA, 25 bp, Homo sapien
ctgtaggcgaattcttttttgcctc

SEQ ID NO: 4772843 - DNA, 25 bp, Homo sapien
ctgccatagtaaagtcccataaact

SEQ ID NO: 4772844 - DNA, 25 bp, Homo sapien
ctgaaacctgtaggcgaattctttt

SEQ ID NO: 4772845 - DNA, 25 bp, Homo sapien
ctgtttcatcatggaagacagccag

SEQ ID NO: 4772846 - DNA, 25 bp, Homo sapien
aatgctagtgacaacactcttcagc

SEQ ID NO: 4772847 - DNA, 25 bp, Homo sapien
ccaaaaatgctagtgacaacactct

SEQ ID NO: 4772848 - DNA, 25 bp, Homo sapien
aaaatgctagtgacaacactcttca

SEQ ID NO: 4772849 - DNA, 25 bp, Homo sapien
tttggattttccaggagcaatactc

SEQ ID NO: 4772850 - DNA, 25 bp, Homo sapien
cttttggattttccaggagcaatac

SEQ ID NO: 4772851 - DNA, 25 bp, Homo sapien
ttggattttccaggagcaatactcc

SEQ ID NO: 4772852 - DNA, 25 bp, Homo sapien
ggattttccaggagcaatactccac

SEQ ID NO: 4772853 - DNA, 25 bp, Homo sapien
gctagaatgcagtagtgcgatttcg

SEQ ID NO: 4772854 - DNA, 25 bp, Homo sapien
tagaatgcagtagtgcgatttcggc

SEQ ID NO: 4772855 - DNA, 25 bp, Homo sapien
aggctagaatgcagtagtgcgattt

SEQ ID NO: 4772856 - DNA, 25 bp, Homo sapien
agaatgcagtagtgcgatttcggct

SEQ ID NO: 4772857 - DNA, 25 bp, Homo sapien
tgctggccctctgtacaagaacact

SEQ ID NO: 4772858 - DNA, 25 bp, Homo sapien
ggccctctgtacaagaacactgttc

SEQ ID NO: 4772859 - DNA, 25 bp, Homo sapien
tgaccatccgattccttctacaggg

SEQ ID NO: 4772860 - DNA, 25 bp, Homo sapien
tgtttacattactgatgcacaccac

SEQ ID NO: 4772861 - DNA, 25 bp, Homo sapien
tacaaattcatctccttaataatta

SEQ ID NO: 4772862 - DNA, 25 bp, Homo sapien
tgggcctggagattagttcagagat

SEQ ID NO: 4772863 - DNA, 25 bp, Homo sapien
cctggagattagttcagagatttta

SEQ ID NO: 4772864 - DNA, 25 bp, Homo sapien
tccttaataattatagggccattaa

SEQ ID NO: 4772865 - DNA, 25 bp, Homo sapien
cctgggcgacaagcatccaagttgt

SEQ ID NO: 4772866 - DNA, 25 bp, Homo sapien
aaaaattcatcaggcgtggtgtggc

SEQ ID NO: 4772867 - DNA, 25 bp, Homo sapien
tagtgcaacagatttccgtctcagg

SEQ ID NO: 4772868 - DNA, 25 bp, Homo sapien
cgtctcaggactgctttagccacat

SEQ ID NO: 4772869 - DNA, 25 bp, Homo sapien
caactttgggtatacgaggcagaaa

SEQ ID NO: 4772870 - DNA, 25 bp, Homo sapien
gagggatgccttgttactgcccaga

SEQ ID NO: 4772871 - DNA, 25 bp, Homo sapien
gactggtctgctgggaacggattct

SEQ ID NO: 4772872 - DNA, 25 bp, Homo sapien
tgacactacagaggagttgctcgtg

SEQ ID NO: 4772873 - DNA, 25 bp, Homo sapien
ttaattgaggcaggatcttattatg

SEQ ID NO: 4772874 - DNA, 25 bp, Homo sapien
caggatcttattatgttggcaaggt

SEQ ID NO: 4772875 - DNA, 25 bp, Homo sapien
tcttattatgttggcaaggttagtc

SEQ ID NO: 4772876 - DNA, 25 bp, Homo sapien
gaggcaggatcttattatgttggca

SEQ ID NO: 4772877 - DNA, 25 bp, Homo sapien
ggtagatttcaggaatgatccactg

SEQ ID NO: 4772878 - DNA, 25 bp, Homo sapien
tggtagatttcaggaatgatccact

SEQ ID NO: 4772879 - DNA, 25 bp, Homo sapien
ttttcacatccataagtataactaa

SEQ ID NO: 4772880 - DNA, 25 bp, Homo sapien
tcacatccataagtataactaaaaa

SEQ ID NO: 4772881 - DNA, 25 bp, Homo sapien
cacaaatcatggaatttactcttac

SEQ ID NO: 4772882 - DNA, 25 bp, Homo sapien
cacatccataagtataactaaaaaa

SEQ ID NO: 4772883 - DNA, 25 bp, Homo sapien
acatatgcacaagcaggaccaggaa

SEQ ID NO: 4772884 - DNA, 25 bp, Homo sapien
aatgttaagattgacatatgcacaa

SEQ ID NO: 4772885 - DNA, 25 bp, Homo sapien
ctctggtgagtgtaatttccagttc

SEQ ID NO: 4772886 - DNA, 25 bp, Homo sapien
tgacatatgcacaagcaggaccagg

SEQ ID NO: 4772887 - DNA, 25 bp, Homo sapien
aactggatatggtttcaagggagcc

SEQ ID NO: 4772888 - DNA, 25 bp, Homo sapien
gatttcatcagttggaaccagattg

SEQ ID NO: 4772889 - DNA, 25 bp, Homo sapien
gactttatccgatggagaaactgga

SEQ ID NO: 4772890 - DNA, 25 bp, Homo sapien
tggtaaatatgaactctgtgtggct

SEQ ID NO: 4772891 - DNA, 25 bp, Homo sapien
catgctgaatcatcacagaagggca

SEQ ID NO: 4772892 - DNA, 25 bp, Homo sapien
gcacaggctggctgaaagctacgac

SEQ ID NO: 4772893 - DNA, 25 bp, Homo sapien
cctgctgggtgatccgtaagactaa

SEQ ID NO: 4772894 - DNA, 25 bp, Homo sapien
aagctacgacttgggagtgaacacg

SEQ ID NO: 4772895 - DNA, 25 bp, Homo sapien
gatgacttcccgagccattccttca

SEQ ID NO: 4772896 - DNA, 25 bp, Homo sapien
tcatctaccattgactggtcaggag

SEQ ID NO: 4772897 - DNA, 25 bp, Homo sapien
ctttttgcgaagtttctgtatgcga

SEQ ID NO: 4772898 - DNA, 25 bp, Homo sapien
tcaggagtgacatctaagaggacca

SEQ ID NO: 4772899 - DNA, 25 bp, Homo sapien
gaatgaacagtgcacaccatgacaa

SEQ ID NO: 4772900 - DNA, 25 bp, Homo sapien
tgggaatgaacagtgcacaccatga

SEQ ID NO: 4772901 - DNA, 25 bp, Homo sapien
tttaaatctggagagtctataatgc

SEQ ID NO: 4772902 - DNA, 25 bp, Homo sapien
ataatgcagcactattttttcacac

SEQ ID NO: 4772903 - DNA, 25 bp, Homo sapien
caaaggtgtacatgaggcggatgtc

SEQ ID NO: 4772904 - DNA, 25 bp, Homo sapien
cctgtggcctgatcaaaggtgtaca

SEQ ID NO: 4772905 - DNA, 25 bp, Homo sapien
gagtgtgcttcaaattgcgcagtcc

SEQ ID NO: 4772906 - DNA, 25 bp, Homo sapien
ttcatcgtgcaattcatggccttcc

SEQ ID NO: 4772907 - DNA, 25 bp, Homo sapien
gacagtgtaacttttcgaacattga

SEQ ID NO: 4772908 - DNA, 25 bp, Homo sapien
tccccaggaccatgtgatctggttc

SEQ ID NO: 4772909 - DNA, 25 bp, Homo sapien
tgcccttagccgaatgccatacttg

SEQ ID NO: 4772910 - DNA, 25 bp, Homo sapien
gctcaactgcttgatggacgtcatc

SEQ ID NO: 4772911 - DNA, 25 bp, Homo sapien
ataatgttctaagtctatctgtacc

SEQ ID NO: 4772912 - DNA, 25 bp, Homo sapien
tcttgatggataaccacaatttctt

SEQ ID NO: 4772913 - DNA, 25 bp, Homo sapien
ctcaatgatatacttctccaaagac

SEQ ID NO: 4772914 - DNA, 25 bp, Homo sapien
ctggatcttgatggataaccacaat

SEQ ID NO: 4772915 - DNA, 25 bp, Homo sapien
aatgatatacttctccaaagacttg

SEQ ID NO: 4772916 - DNA, 25 bp, Homo sapien
ttaattaatttaggtctgtgccatg

SEQ ID NO: 4772917 - DNA, 25 bp, Homo sapien
gtcaggctggactagtactaagtca

SEQ ID NO: 4772918 - DNA, 25 bp, Homo sapien
tagtactaagtcattcacaccctca

SEQ ID NO: 4772919 - DNA, 25 bp, Homo sapien
atttgaatctcaagctctagtcagg

SEQ ID NO: 4772920 - DNA, 25 bp, Homo sapien
tactgcactctctgttttcttgtca

SEQ ID NO: 4772921 - DNA, 25 bp, Homo sapien
gatactgcactctctgttttcttgt

SEQ ID NO: 4772922 - DNA, 25 bp, Homo sapien
tctgagatactgcactctctgtttt

SEQ ID NO: 4772923 - DNA, 25 bp, Homo sapien
tgagatactgcactctctgttttct

SEQ ID NO: 4772924 - DNA, 25 bp, Homo sapien
ggctaggccctcctggtgaagcact

SEQ ID NO: 4772925 - DNA, 25 bp, Homo sapien
gggttccacaccaagcatccttgct

SEQ ID NO: 4772926 - DNA, 25 bp, Homo sapien
cttgctaccgtgtaccaaagtgggc

SEQ ID NO: 4772927 - DNA, 25 bp, Homo sapien
cactaggcatgcataagcgaggaag

SEQ ID NO: 4772928 - DNA, 25 bp, Homo sapien
cagcacctttagattctggtacatc

SEQ ID NO: 4772929 - DNA, 25 bp, Homo sapien
tgtccttgtcctgaacagaaacagg

SEQ ID NO: 4772930 - DNA, 25 bp, Homo sapien
cagcatgaggtagtgaatgctgagt

SEQ ID NO: 4772931 - DNA, 25 bp, Homo sapien
cagaaacagggtcaatcagcacctt

SEQ ID NO: 4772932 - DNA, 25 bp, Homo sapien
catcatgtcagttatatgcagtcat

SEQ ID NO: 4772933 - DNA, 25 bp, Homo sapien
tatatgcagtcatcaacaactgatc

SEQ ID NO: 4772934 - DNA, 25 bp, Homo sapien
aagacacaggacatcatgtcagtta

SEQ ID NO: 4772935 - DNA, 25 bp, Homo sapien
caggacatcatgtcagttatatgca

SEQ ID NO: 4772936 - DNA, 25 bp, Homo sapien
gccaagggccctgacatatattgta

SEQ ID NO: 4772937 - DNA, 25 bp, Homo sapien
tagatcctcattctagagccaaggg

SEQ ID NO: 4772938 - DNA, 25 bp, Homo sapien
ggtactagaaagaagccaatcatct

SEQ ID NO: 4772939 - DNA, 25 bp, Homo sapien
tataaatggaggatgctgcagcaag

SEQ ID NO: 4772940 - DNA, 25 bp, Homo sapien
tagggccatgacacaatcctccatc

SEQ ID NO: 4772941 - DNA, 25 bp, Homo sapien
cactaaacaaggtttctagggccat

SEQ ID NO: 4772942 - DNA, 25 bp, Homo sapien
gcagaacactaaacaaggtttctag

SEQ ID NO: 4772943 - DNA, 25 bp, Homo sapien
acaaggtttctagggccatgacaca

SEQ ID NO: 4772944 - DNA, 25 bp, Homo sapien
ctaactgtaggacccgaaggctgaa

SEQ ID NO: 4772945 - DNA, 25 bp, Homo sapien
tacgtgtgtgtgagatacatctgca

SEQ ID NO: 4772946 - DNA, 25 bp, Homo sapien
tagaatggatctacccacaacagac

SEQ ID NO: 4772947 - DNA, 25 bp, Homo sapien
gcatatgtccttctagatacgtgtg

SEQ ID NO: 4772948 - DNA, 25 bp, Homo sapien
ccaattggtcagaatatctacaaac

SEQ ID NO: 4772949 - DNA, 25 bp, Homo sapien
aacataccaattggtcagaatatct

SEQ ID NO: 4772950 - DNA, 25 bp, Homo sapien
atatctacaaacttgaccaggcgag

SEQ ID NO: 4772951 - DNA, 25 bp, Homo sapien
tctacaaacttgaccaggcgaggca

SEQ ID NO: 4772952 - DNA, 25 bp, Homo sapien
tgacggtcagacttcaggcaactct

SEQ ID NO: 4772953 - DNA, 25 bp, Homo sapien
caaaacgtggctgccgatctccagt

SEQ ID NO: 4772954 - DNA, 25 bp, Homo sapien
tgtgtctatctgagcaacagctgga

SEQ ID NO: 4772955 - DNA, 25 bp, Homo sapien
aatggtgaatcccaggtctgtggcg

SEQ ID NO: 4772956 - DNA, 25 bp, Homo sapien
ctgccatttcagtctcaaagaagcc

SEQ ID NO: 4772957 - DNA, 25 bp, Homo sapien
tgccatttcagtctcaaagaagcca

SEQ ID NO: 4772958 - DNA, 25 bp, Homo sapien
tttcagtctcaaagaagccaatgag

SEQ ID NO: 4772959 - DNA, 25 bp, Homo sapien
cagtctcaaagaagccaatgagaga

SEQ ID NO: 4772960 - DNA, 25 bp, Homo sapien
aatgttggggctttctctaaccgtg

SEQ ID NO: 4772961 - DNA, 25 bp, Homo sapien
tctcattgtagagaaattctatttc

SEQ ID NO: 4772962 - DNA, 25 bp, Homo sapien
ggatccaccggtctgtaatgttggg

SEQ ID NO: 4772963 - DNA, 25 bp, Homo sapien
caggatccaccggtctgtaatgttg

SEQ ID NO: 4772964 - DNA, 25 bp, Homo sapien
tgaaacactggcacacttgggaaga

SEQ ID NO: 4772965 - DNA, 25 bp, Homo sapien
cactggcacacttgggaagaaagtt

SEQ ID NO: 4772966 - DNA, 25 bp, Homo sapien
ctaggaaggaacaattaatgaaaca

SEQ ID NO: 4772967 - DNA, 25 bp, Homo sapien
taggaaggaacaattaatgaaacac

SEQ ID NO: 4772968 - DNA, 25 bp, Homo sapien
accagtggagacctgcagagtgcac

SEQ ID NO: 4772969 - DNA, 25 bp, Homo sapien
taaggccctgatcatggagtctgtg

SEQ ID NO: 4772970 - DNA, 25 bp, Homo sapien
tttgaccccgcctgtattcctgagt

SEQ ID NO: 4772971 - DNA, 25 bp, Homo sapien
ccaacgtggcacattaagtcctcaa

SEQ ID NO: 4772972 - DNA, 25 bp, Homo sapien
agcagccctaaagtctcacacagag

SEQ ID NO: 4772973 - DNA, 25 bp, Homo sapien
gaaaactccatcgagaactgctgtc

SEQ ID NO: 4772974 - DNA, 25 bp, Homo sapien
taactcttttgcaggctagggccca

SEQ ID NO: 4772975 - DNA, 25 bp, Homo sapien
tgggtgctctctctaaaagttgctg

SEQ ID NO: 4772976 - DNA, 25 bp, Homo sapien
gaagcgataggcattgtaccatggg

SEQ ID NO: 4772977 - DNA, 25 bp, Homo sapien
tctttaaagcggaggttttctgctc

SEQ ID NO: 4772978 - DNA, 25 bp, Homo sapien
tctggagcctcagaacgttctggat

SEQ ID NO: 4772979 - DNA, 25 bp, Homo sapien
taccatgggagcagtacatccttaa

SEQ ID NO: 4772980 - DNA, 25 bp, Homo sapien
tacttctggatgatggaaactggat

SEQ ID NO: 4772981 - DNA, 25 bp, Homo sapien
catacttctggatgatggaaactgg

SEQ ID NO: 4772982 - DNA, 25 bp, Homo sapien
cagcaccatacttctggatgatgga

SEQ ID NO: 4772983 - DNA, 25 bp, Homo sapien
caccatacttctggatgatggaaac

SEQ ID NO: 4772984 - DNA, 25 bp, Homo sapien
ccaggacaagcccattcacaattac

SEQ ID NO: 4772985 - DNA, 25 bp, Homo sapien
agcccattcacaattacgttcttga

SEQ ID NO: 4772986 - DNA, 25 bp, Homo sapien
tacgttcttgaaaggcggttgtcca

SEQ ID NO: 4772987 - DNA, 25 bp, Homo sapien
tcacaattacgttcttgaaaggcgg

SEQ ID NO: 4772988 - DNA, 25 bp, Homo sapien
tcccacagcgtgaaggaatggtcag

SEQ ID NO: 4772989 - DNA, 25 bp, Homo sapien
caaacgggtaatgaacctgagcata

SEQ ID NO: 4772990 - DNA, 25 bp, Homo sapien
tctggtttggtcgatgccctcggca

SEQ ID NO: 4772991 - DNA, 25 bp, Homo sapien
tcagagatgcggtgcaaggatccct

SEQ ID NO: 4772992 - DNA, 25 bp, Homo sapien
aacaaacagaaaagtagtcatttct

SEQ ID NO: 4772993 - DNA, 25 bp, Homo sapien
taacaaacagaaaagtagtcatttc

SEQ ID NO: 4772994 - DNA, 25 bp, Homo sapien
acagaaaagtagtcatttctattaa

SEQ ID NO: 4772995 - DNA, 25 bp, Homo sapien
caaacagaaaagtagtcatttctat

SEQ ID NO: 4772996 - DNA, 25 bp, Homo sapien
ctgacagttcttcaagttccgccac

SEQ ID NO: 4772997 - DNA, 25 bp, Homo sapien
aagttccgccactgacccaatgcat

SEQ ID NO: 4772998 - DNA, 25 bp, Homo sapien
gacagttcttcaagttccgccactg

SEQ ID NO: 4772999 - DNA, 25 bp, Homo sapien
ccgccactgacccaatgcataccac

SEQ ID NO: 4773000 - DNA, 25 bp, Homo sapien
ctggaaattgtccagtcacgtgcat

SEQ ID NO: 4773001 - DNA, 25 bp, Homo sapien
tcaaagtcatcgctgacccacagtg

SEQ ID NO: 4773002 - DNA, 25 bp, Homo sapien
gtccagtcacgtgcatctttcagcc

SEQ ID NO: 4773003 - DNA, 25 bp, Homo sapien
caaagtcatcgctgacccacagtgg

SEQ ID NO: 4773004 - DNA, 25 bp, Homo sapien
ggcactgctttgtaaattagaggag

SEQ ID NO: 4773005 - DNA, 25 bp, Homo sapien
tgggcactgctttgtaaattagagg

SEQ ID NO: 4773006 - DNA, 25 bp, Homo sapien
cactgctttgtaaattagaggagtg

SEQ ID NO: 4773007 - DNA, 25 bp, Homo sapien
caggtcattgttccttaggagctgg

SEQ ID NO: 4773008 - DNA, 25 bp, Homo sapien
agcaaaaagggtagctgtgagtgaa

SEQ ID NO: 4773009 - DNA, 25 bp, Homo sapien
ctccagcaaaaagggtagctgtgag

SEQ ID NO: 4773010 - DNA, 25 bp, Homo sapien
gcaaccagaagtcggccttgttcct

SEQ ID NO: 4773011 - DNA, 25 bp, Homo sapien
ggtggcaaccagaagtcggccttgt

SEQ ID NO: 4773012 - DNA, 25 bp, Homo sapien
ccttctatgctatatggattacaga

SEQ ID NO: 4773013 - DNA, 25 bp, Homo sapien
cttctatgctatatggattacagac

SEQ ID NO: 4773014 - DNA, 25 bp, Homo sapien
taaagtccatacagacccgatagtc

SEQ ID NO: 4773015 - DNA, 25 bp, Homo sapien
tgtcacctccgttgtgaagcagcct

SEQ ID NO: 4773016 - DNA, 25 bp, Homo sapien
tctttccgaataatgttaaagtcca

SEQ ID NO: 4773017 - DNA, 25 bp, Homo sapien
caaacagggagtgagtctttccgaa

SEQ ID NO: 4773018 - DNA, 25 bp, Homo sapien
ttcacatagttgtcaacaagcacag

SEQ ID NO: 4773019 - DNA, 25 bp, Homo sapien
cagtgaaagcgccattctctttaca

SEQ ID NO: 4773020 - DNA, 25 bp, Homo sapien
caccgaagtaaggagcttggtggac

SEQ ID NO: 4773021 - DNA, 25 bp, Homo sapien
agcttggtggacaacccctgtgcct

SEQ ID NO: 4773022 - DNA, 25 bp, Homo sapien
tggagagcgcccacagtagcggtcc

SEQ ID NO: 4773023 - DNA, 25 bp, Homo sapien
attgtggagagcgcccacagtagcg

SEQ ID NO: 4773024 - DNA, 25 bp, Homo sapien
ccacagtagcggtccctaagcttac

SEQ ID NO: 4773025 - DNA, 25 bp, Homo sapien
agcgcccacagtagcggtccctaag

SEQ ID NO: 4773026 - DNA, 25 bp, Homo sapien
gggcctgtacttcttgcctttaaga

SEQ ID NO: 4773027 - DNA, 25 bp, Homo sapien
gaaatagtcaaacaggggcctgtac

SEQ ID NO: 4773028 - DNA, 25 bp, Homo sapien
ggaaatagtcaaacaggggcctgta

SEQ ID NO: 4773029 - DNA, 25 bp, Homo sapien
gcctttaagataggcaccaggaaat

SEQ ID NO: 4773030 - DNA, 25 bp, Homo sapien
aatgagtaatcgtcctctggcaaca

SEQ ID NO: 4773031 - DNA, 25 bp, Homo sapien
tagtcactctccaatttatagaggg

SEQ ID NO: 4773032 - DNA, 25 bp, Homo sapien
tagagggctgacaatctggcttcca

SEQ ID NO: 4773033 - DNA, 25 bp, Homo sapien
tttcaaggatctcatagtcactctc

SEQ ID NO: 4773034 - DNA, 25 bp, Homo sapien
cagcaaggttactaggtagagtcca

SEQ ID NO: 4773035 - DNA, 25 bp, Homo sapien
caaatactgaaggatcttgaacatc

SEQ ID NO: 4773036 - DNA, 25 bp, Homo sapien
ttttcacatattgcatttctggatt

SEQ ID NO: 4773037 - DNA, 25 bp, Homo sapien
tccagggagtggttgtccaagcaac

SEQ ID NO: 4773038 - DNA, 25 bp, Homo sapien
tgaaataaattgaggtaaagtattg

SEQ ID NO: 4773039 - DNA, 25 bp, Homo sapien
tatcatagagttgtttgaagaccca

SEQ ID NO: 4773040 - DNA, 25 bp, Homo sapien
tctggtgtgactcgaagttggaaag

SEQ ID NO: 4773041 - DNA, 25 bp, Homo sapien
aaagtggagtgttacatgccgtaga

SEQ ID NO: 4773042 - DNA, 25 bp, Homo sapien
gagaagggcatgactttcacacctc

SEQ ID NO: 4773043 - DNA, 25 bp, Homo sapien
gctaatatctactgatatcgaatga

SEQ ID NO: 4773044 - DNA, 25 bp, Homo sapien
tcaggcagacattaaaatgctaata

SEQ ID NO: 4773045 - DNA, 25 bp, Homo sapien
caatatagtaagacatcaggcagac

SEQ ID NO: 4773046 - DNA, 25 bp, Homo sapien
ctgatatcgaatgatatttaacaca

SEQ ID NO: 4773047 - DNA, 25 bp, Homo sapien
ataacgatggactcaaaaataaact

SEQ ID NO: 4773048 - DNA, 25 bp, Homo sapien
gaaataacgatggactcaaaaataa

SEQ ID NO: 4773049 - DNA, 25 bp, Homo sapien
tcagagaaataacgatggactcaaa

SEQ ID NO: 4773050 - DNA, 25 bp, Homo sapien
tttcagagaaataacgatggactca

SEQ ID NO: 4773051 - DNA, 25 bp, Homo sapien
tcaaagtcaatccatcggccaagtc

SEQ ID NO: 4773052 - DNA, 25 bp, Homo sapien
gtcaaagtcaatccatcggccaagt

SEQ ID NO: 4773053 - DNA, 25 bp, Homo sapien
aaagtcaatccatcggccaagtctg

SEQ ID NO: 4773054 - DNA, 25 bp, Homo sapien
ttgtggatacagagttttatagtca

SEQ ID NO: 4773055 - DNA, 25 bp, Homo sapien
cacagaagtcagaagagagatggtt

SEQ ID NO: 4773056 - DNA, 25 bp, Homo sapien
gggaccataaaccatttcaatgccc

SEQ ID NO: 4773057 - DNA, 25 bp, Homo sapien
gttagaccaattaagcacacagaag

SEQ ID NO: 4773058 - DNA, 25 bp, Homo sapien
tgatcatgcaagaaagttagaccaa

SEQ ID NO: 4773059 - DNA, 25 bp, Homo sapien
gaatatctcatcacaattgctcggc

SEQ ID NO: 4773060 - DNA, 25 bp, Homo sapien
tcggcactgattgttatactctgta

SEQ ID NO: 4773061 - DNA, 25 bp, Homo sapien
catcacaattgctcggcactgattg

SEQ ID NO: 4773062 - DNA, 25 bp, Homo sapien
cttccactcagcagaatatctcatc

SEQ ID NO: 4773063 - DNA, 25 bp, Homo sapien
acatcctctggtcctctgattccca

SEQ ID NO: 4773064 - DNA, 25 bp, Homo sapien
gattcccagtgtcttatcaatttca

SEQ ID NO: 4773065 - DNA, 25 bp, Homo sapien
tttggccacatcctctggtcctctg

SEQ ID NO: 4773066 - DNA, 25 bp, Homo sapien
ccagtgtcttatcaatttcatattc

SEQ ID NO: 4773067 - DNA, 25 bp, Homo sapien
tgaaaacaactgcaactatgcaact

SEQ ID NO: 4773068 - DNA, 25 bp, Homo sapien
agactgttaccacgctgccctatga

SEQ ID NO: 4773069 - DNA, 25 bp, Homo sapien
aaatttgtgataagactgttaccac

SEQ ID NO: 4773070 - DNA, 25 bp, Homo sapien
cacgctgccctatgaaaacaactgc

SEQ ID NO: 4773071 - DNA, 25 bp, Homo sapien
gtgagcatatcttgtaactatatct

SEQ ID NO: 4773072 - DNA, 25 bp, Homo sapien
aacatgaaacccactctggtgagca

SEQ ID NO: 4773073 - DNA, 25 bp, Homo sapien
tacccgcaagtatatgtccatagtg

SEQ ID NO: 4773074 - DNA, 25 bp, Homo sapien
cacaggtaagccatggcaatcccat

SEQ ID NO: 4773075 - DNA, 25 bp, Homo sapien
tatgttttgattgctttaagcattc

SEQ ID NO: 4773076 - DNA, 25 bp, Homo sapien
tggtttatgttttgattgctttaag

SEQ ID NO: 4773077 - DNA, 25 bp, Homo sapien
ggtttatgttttgattgctttaagc

SEQ ID NO: 4773078 - DNA, 25 bp, Homo sapien
tgaaaacaattaaattcagtccaaa

SEQ ID NO: 4773079 - DNA, 25 bp, Homo sapien
ccatattattaacatgggtgtacat

SEQ ID NO: 4773080 - DNA, 25 bp, Homo sapien
gggtgtacatgacactatccatact

SEQ ID NO: 4773081 - DNA, 25 bp, Homo sapien
tagccagtggcaacgatttatcttc

SEQ ID NO: 4773082 - DNA, 25 bp, Homo sapien
gaatcatctatatgtggcctattgc

SEQ ID NO: 4773083 - DNA, 25 bp, Homo sapien
gatttttcgcttacatttaggccac

SEQ ID NO: 4773084 - DNA, 25 bp, Homo sapien
ggaaattctatctagtggtgcaaaa

SEQ ID NO: 4773085 - DNA, 25 bp, Homo sapien
gaattttcttacctacactcacatg

SEQ ID NO: 4773086 - DNA, 25 bp, Homo sapien
tattcagtaatggtagagacaatgt

SEQ ID NO: 4773087 - DNA, 25 bp, Homo sapien
tttattctcaggtcttcataatcta

SEQ ID NO: 4773088 - DNA, 25 bp, Homo sapien
tccttttattctcaggtcttcataa

SEQ ID NO: 4773089 - DNA, 25 bp, Homo sapien
tctccttttattctcaggtcttcat

SEQ ID NO: 4773090 - DNA, 25 bp, Homo sapien
ttcataatctattaagtcaaatgta

SEQ ID NO: 4773091 - DNA, 25 bp, Homo sapien
gactgaagtaaattacggtacatca

SEQ ID NO: 4773092 - DNA, 25 bp, Homo sapien
tctaaatattcatggtgactgaagt

SEQ ID NO: 4773093 - DNA, 25 bp, Homo sapien
taaaataagtatctcgcagccattg

SEQ ID NO: 4773094 - DNA, 25 bp, Homo sapien
taagacatataaaaatacgtattgc

SEQ ID NO: 4773095 - DNA, 25 bp, Homo sapien
cctcgtctttgagggccggatcctg

SEQ ID NO: 4773096 - DNA, 25 bp, Homo sapien
aaaaaggcgaccataaattcctgag

SEQ ID NO: 4773097 - DNA, 25 bp, Homo sapien
gttgtaacgcgtgcgtgaccctcgt

SEQ ID NO: 4773098 - DNA, 25 bp, Homo sapien
ctgaggctggaaacgaacgaacggc

SEQ ID NO: 4773099 - DNA, 25 bp, Homo sapien
ccccgcgggccagcaagcctaaaag

SEQ ID NO: 4773100 - DNA, 25 bp, Homo sapien
gggcctcgcgtgcctggacagcccc

SEQ ID NO: 4773101 - DNA, 25 bp, Homo sapien
aaaagcaactcatccggcgtccacg

SEQ ID NO: 4773102 - DNA, 25 bp, Homo sapien
aggggcctcgcgtgcctggacagcc

SEQ ID NO: 4773103 - DNA, 25 bp, Homo sapien
accgggcgcacggaggtgatgcaac

SEQ ID NO: 4773104 - DNA, 25 bp, Homo sapien
tgcaaccgggcgcacggaggtgatg

SEQ ID NO: 4773105 - DNA, 25 bp, Homo sapien
caaccgggcgcacggaggtgatgca

SEQ ID NO: 4773106 - DNA, 25 bp, Homo sapien
gggcgcacggaggtgatgcaacgcg

SEQ ID NO: 4773107 - DNA, 25 bp, Homo sapien
ggccaatcagtgcgcgctgcctgac

SEQ ID NO: 4773108 - DNA, 25 bp, Homo sapien
gccaatcagtgcgcgctgcctgaca

SEQ ID NO: 4773109 - DNA, 25 bp, Homo sapien
ccaatcagtgcgcgctgcctgacac

SEQ ID NO: 4773110 - DNA, 25 bp, Homo sapien
cggccaatcagtgcgcgctgcctga

SEQ ID NO: 4773111 - DNA, 25 bp, Homo sapien
gataacgacaaacagcaacttccgg

SEQ ID NO: 4773112 - DNA, 25 bp, Homo sapien
tccacgtggaaaacgaaccagcgct

SEQ ID NO: 4773113 - DNA, 25 bp, Homo sapien
tatccgttgcagtagtgtagaccga

SEQ ID NO: 4773114 - DNA, 25 bp, Homo sapien
aattatacttttgggccctgagccg

SEQ ID NO: 4773115 - DNA, 25 bp, Homo sapien
atggaaggtgtatttgacataatca

SEQ ID NO: 4773116 - DNA, 25 bp, Homo sapien
ttcacacaaagcctaggctggaaaa

SEQ ID NO: 4773117 - DNA, 25 bp, Homo sapien
atttcaaatagcctataattcacac

SEQ ID NO: 4773118 - DNA, 25 bp, Homo sapien
ggaaggtgtatttgacataatcaga

SEQ ID NO: 4773119 - DNA, 25 bp, Homo sapien
cagaatgatattccgtcagccagat

SEQ ID NO: 4773120 - DNA, 25 bp, Homo sapien
gttcacattcagtatcaaaaccagc

SEQ ID NO: 4773121 - DNA, 25 bp, Homo sapien
cattagttactcaggatagagggca

SEQ ID NO: 4773122 - DNA, 25 bp, Homo sapien
ggaagaaatgcagaggagttccaca

SEQ ID NO: 4773123 - DNA, 25 bp, Homo sapien
cgtctttatgtttctttcgacaatc

SEQ ID NO: 4773124 - DNA, 25 bp, Homo sapien
ttttgcgtctttatgtttctttcga

SEQ ID NO: 4773125 - DNA, 25 bp, Homo sapien
tgcgtctttatgtttctttcgacaa

SEQ ID NO: 4773126 - DNA, 25 bp, Homo sapien
ttgcgtctttatgtttctttcgaca

SEQ ID NO: 4773127 - DNA, 25 bp, Homo sapien
catacgcaggttggttgttctggcc

SEQ ID NO: 4773128 - DNA, 25 bp, Homo sapien
tacgcaggttggttgttctggcctc

SEQ ID NO: 4773129 - DNA, 25 bp, Homo sapien
atacgcaggttggttgttctggcct

SEQ ID NO: 4773130 - DNA, 25 bp, Homo sapien
gctcatattacttcctactcctctc

SEQ ID NO: 4773131 - DNA, 25 bp, Homo sapien
ctgctcatattacttcctactcctc

SEQ ID NO: 4773132 - DNA, 25 bp, Homo sapien
taccaacggtcaaaattcctggatg

SEQ ID NO: 4773133 - DNA, 25 bp, Homo sapien
caacagcctgagttttcacatggaa

SEQ ID NO: 4773134 - DNA, 25 bp, Homo sapien
gtgttggcattatcaaggtctcgaa

SEQ ID NO: 4773135 - DNA, 25 bp, Homo sapien
gggagctctcagaccttgacagctt

SEQ ID NO: 4773136 - DNA, 25 bp, Homo sapien
gaaaaatctagtggtctctttctca

SEQ ID NO: 4773137 - DNA, 25 bp, Homo sapien
ggtcttcctgccagacaatctttcc

SEQ ID NO: 4773138 - DNA, 25 bp, Homo sapien
gggtcttcctgccagacaatctttc

SEQ ID NO: 4773139 - DNA, 25 bp, Homo sapien
ttacagtgggaacttccagaaagct

SEQ ID NO: 4773140 - DNA, 25 bp, Homo sapien
acagtgggaacttccagaaagctgg

SEQ ID NO: 4773141 - DNA, 25 bp, Homo sapien
ctgcttttacagtgggaacttccag

SEQ ID NO: 4773142 - DNA, 25 bp, Homo sapien
gcttttacagtgggaacttccagaa

SEQ ID NO: 4773143 - DNA, 25 bp, Homo sapien
agagaacgtgaacccgctgggctgc

SEQ ID NO: 4773144 - DNA, 25 bp, Homo sapien
ggctgctcagcgtcactggtcagag

SEQ ID NO: 4773145 - DNA, 25 bp, Homo sapien
ctttagacacctcaggtagtttctc

SEQ ID NO: 4773146 - DNA, 25 bp, Homo sapien
acatttctttagacacctcaggtag

SEQ ID NO: 4773147 - DNA, 25 bp, Homo sapien
ttttctttcgtaagtggcatggtct

SEQ ID NO: 4773148 - DNA, 25 bp, Homo sapien
taagtggcatggtcttgcttcgttg

SEQ ID NO: 4773149 - DNA, 25 bp, Homo sapien
tgcttcgttggatcataatgtatga

SEQ ID NO: 4773150 - DNA, 25 bp, Homo sapien
tcttttggcttatcatctctttttc

SEQ ID NO: 4773151 - DNA, 25 bp, Homo sapien
ctggtgtacaggtaatgatggtata

SEQ ID NO: 4773152 - DNA, 25 bp, Homo sapien
cagggctttcattagtctctctaaa

SEQ ID NO: 4773153 - DNA, 25 bp, Homo sapien
tgatggtatacagggctttcattag

SEQ ID NO: 4773154 - DNA, 25 bp, Homo sapien
ggtgtacaggtaatgatggtataca

SEQ ID NO: 4773155 - DNA, 25 bp, Homo sapien
gcagctactgatcctctgtttgtag

SEQ ID NO: 4773156 - DNA, 25 bp, Homo sapien
cttctaaatgaaggttagtctccag

SEQ ID NO: 4773157 - DNA, 25 bp, Homo sapien
ttctaaatgaaggttagtctccagg

SEQ ID NO: 4773158 - DNA, 25 bp, Homo sapien
ttctagaaatcgagagtccatgcgg

SEQ ID NO: 4773159 - DNA, 25 bp, Homo sapien
gagtccatgcggaatctgtcatcgg

SEQ ID NO: 4773160 - DNA, 25 bp, Homo sapien
ctagaaatcgagagtccatgcggaa

SEQ ID NO: 4773161 - DNA, 25 bp, Homo sapien
ccatgcggaatctgtcatcggtgcc

SEQ ID NO: 4773162 - DNA, 25 bp, Homo sapien
ctgccctcaaactgaggtttaattt

SEQ ID NO: 4773163 - DNA, 25 bp, Homo sapien
tctgccctcaaactgaggtttaatt

SEQ ID NO: 4773164 - DNA, 25 bp, Homo sapien
ctctgccctcaaactgaggtttaat

SEQ ID NO: 4773165 - DNA, 25 bp, Homo sapien
cttccctgatgttttacccatagac

SEQ ID NO: 4773166 - DNA, 25 bp, Homo sapien
ttccctgatgttttacccatagact

SEQ ID NO: 4773167 - DNA, 25 bp, Homo sapien
tccctgatgttttacccatagactc

SEQ ID NO: 4773168 - DNA, 25 bp, Homo sapien
ttcccttcataacgtaatcttctcc

SEQ ID NO: 4773169 - DNA, 25 bp, Homo sapien
attaatagcagaggcaaacaagcag

SEQ ID NO: 4773170 - DNA, 25 bp, Homo sapien
ttattaatagcagaggcaaacaagc

SEQ ID NO: 4773171 - DNA, 25 bp, Homo sapien
agtatttcccttcataacgtaatct

SEQ ID NO: 4773172 - DNA, 25 bp, Homo sapien
catgctgcagatgttgtggagaata

SEQ ID NO: 4773173 - DNA, 25 bp, Homo sapien
atatgaggtgacctggcaagccctg

SEQ ID NO: 4773174 - DNA, 25 bp, Homo sapien
gacccctgtagtctcaatatgaggt

SEQ ID NO: 4773175 - DNA, 25 bp, Homo sapien
ccagttgtttgtggtgtggatctgc

SEQ ID NO: 4773176 - DNA, 25 bp, Homo sapien
gatgatgtgcgttggcttatcctct

SEQ ID NO: 4773177 - DNA, 25 bp, Homo sapien
ccgaagatgatgtgcgttggcttat

SEQ ID NO: 4773178 - DNA, 25 bp, Homo sapien
gtgcgttggcttatcctctggatga

SEQ ID NO: 4773179 - DNA, 25 bp, Homo sapien
aaccgaagatgatgtgcgttggctt

SEQ ID NO: 4773180 - DNA, 25 bp, Homo sapien
tagggaggccatcgaaagcattgca

SEQ ID NO: 4773181 - DNA, 25 bp, Homo sapien
gggaggccatcgaaagcattgcatc

SEQ ID NO: 4773182 - DNA, 25 bp, Homo sapien
ctagggaggccatcgaaagcattgc

SEQ ID NO: 4773183 - DNA, 25 bp, Homo sapien
ggaggccatcgaaagcattgcatct

SEQ ID NO: 4773184 - DNA, 25 bp, Homo sapien
actatcatttgacctacaaccccat

SEQ ID NO: 4773185 - DNA, 25 bp, Homo sapien
atcatttgacctacaaccccattag

SEQ ID NO: 4773186 - DNA, 25 bp, Homo sapien
gacctacaaccccattagtggatat

SEQ ID NO: 4773187 - DNA, 25 bp, Homo sapien
tttgacctacaaccccattagtgga

SEQ ID NO: 4773188 - DNA, 25 bp, Homo sapien
gaacctccaagacacacagcttacc

SEQ ID NO: 4773189 - DNA, 25 bp, Homo sapien
caccgaacctccaagacacacagct

SEQ ID NO: 4773190 - DNA, 25 bp, Homo sapien
ccgaacctccaagacacacagctta

SEQ ID NO: 4773191 - DNA, 25 bp, Homo sapien
accgaacctccaagacacacagctt

SEQ ID NO: 4773192 - DNA, 25 bp, Homo sapien
tgtcttcagcatgcttatctttagc

SEQ ID NO: 4773193 - DNA, 25 bp, Homo sapien
tatctttagcactcacatctgacga

SEQ ID NO: 4773194 - DNA, 25 bp, Homo sapien
caaatttgccagagcattatgcacc

SEQ ID NO: 4773195 - DNA, 25 bp, Homo sapien
caaggctgccaaacgcttctcattg

SEQ ID NO: 4773196 - DNA, 25 bp, Homo sapien
gaatcagaccgctcttcctgtgaag

SEQ ID NO: 4773197 - DNA, 25 bp, Homo sapien
gcatgttggcatggagtcacttcac

SEQ ID NO: 4773198 - DNA, 25 bp, Homo sapien
gatgtgaggccgcttgaatcagacc

SEQ ID NO: 4773199 - DNA, 25 bp, Homo sapien
gggacactgccttgcgatcctggct

SEQ ID NO: 4773200 - DNA, 25 bp, Homo sapien
gaagccacaatctccgcaggacgaa

SEQ ID NO: 4773201 - DNA, 25 bp, Homo sapien
gcctactcccttgaaagcctgaaat

SEQ ID NO: 4773202 - DNA, 25 bp, Homo sapien
tccttttcatatagacagcctactc

SEQ ID NO: 4773203 - DNA, 25 bp, Homo sapien
ccacaatctccgcaggacgaataca

SEQ ID NO: 4773204 - DNA, 25 bp, Homo sapien
cggcctctgcggaggccagtgggag

SEQ ID NO: 4773205 - DNA, 25 bp, Homo sapien
gtatcttcatttggaaccttcagat

SEQ ID NO: 4773206 - DNA, 25 bp, Homo sapien
ctgtcggcctctgcggaggccagtg

SEQ ID NO: 4773207 - DNA, 25 bp, Homo sapien
atcttcatttggaaccttcagatca

SEQ ID NO: 4773208 - DNA, 25 bp, Homo sapien
agctaattctgatgcagaatcagca

SEQ ID NO: 4773209 - DNA, 25 bp, Homo sapien
ttctgatgcagaatcagcatcttca

SEQ ID NO: 4773210 - DNA, 25 bp, Homo sapien
tgttccaaatcagctaaagtgagat

SEQ ID NO: 4773211 - DNA, 25 bp, Homo sapien
tgccagccaattgttccaaatcagc

SEQ ID NO: 4773212 - DNA, 25 bp, Homo sapien
tcgcaatcatcattctcaattcatc

SEQ ID NO: 4773213 - DNA, 25 bp, Homo sapien
gagggagatttacgattaagagact

SEQ ID NO: 4773214 - DNA, 25 bp, Homo sapien
aaagaatgcagtttgtgaacgcctg

SEQ ID NO: 4773215 - DNA, 25 bp, Homo sapien
gcctgatttgaaatcatcccttaca

SEQ ID NO: 4773216 - DNA, 25 bp, Homo sapien
ttgggagggccatgaaagtcagaga

SEQ ID NO: 4773217 - DNA, 25 bp, Homo sapien
taagggtggtctctctattaccctc

SEQ ID NO: 4773218 - DNA, 25 bp, Homo sapien
atgatttagaaggagtaatggaatc

SEQ ID NO: 4773219 - DNA, 25 bp, Homo sapien
agaactctcctcgccgtttcttact

SEQ ID NO: 4773220 - DNA, 25 bp, Homo sapien
tcaggttgtggcagtattttgaggg

SEQ ID NO: 4773221 - DNA, 25 bp, Homo sapien
ttcaggttgtggcagtattttgagg

SEQ ID NO: 4773222 - DNA, 25 bp, Homo sapien
ttccaaatttgctcacaacccaatt

SEQ ID NO: 4773223 - DNA, 25 bp, Homo sapien
aacaggtaagactcttccaaatttg

SEQ ID NO: 4773224 - DNA, 25 bp, Homo sapien
taaggtgaagaacaggtaagactct

SEQ ID NO: 4773225 - DNA, 25 bp, Homo sapien
gaagaacaggtaagactcttccaaa

SEQ ID NO: 4773226 - DNA, 25 bp, Homo sapien
tttactatatgtgacacaaatggaa

SEQ ID NO: 4773227 - DNA, 25 bp, Homo sapien
gggctatgattactgttgggtttag

SEQ ID NO: 4773228 - DNA, 25 bp, Homo sapien
aaaaggaagatttggagcagctatc

SEQ ID NO: 4773229 - DNA, 25 bp, Homo sapien
caatcccaagtaaaccgtgtaagat

SEQ ID NO: 4773230 - DNA, 25 bp, Homo sapien
gcacagctttcatatggaaatccac

SEQ ID NO: 4773231 - DNA, 25 bp, Homo sapien
ttatgccctggcacttctgtccctg

SEQ ID NO: 4773232 - DNA, 25 bp, Homo sapien
gattcttctttcttagcttttgctg

SEQ ID NO: 4773233 - DNA, 25 bp, Homo sapien
caagttggcgttacctgttgttgat

SEQ ID NO: 4773234 - DNA, 25 bp, Homo sapien
tatggaagaccaagaccatggatcg

SEQ ID NO: 4773235 - DNA, 25 bp, Homo sapien
gcttctcaggcatatccacgcagat

SEQ ID NO: 4773236 - DNA, 25 bp, Homo sapien
gacgaaggtatctttcggagcccaa

SEQ ID NO: 4773237 - DNA, 25 bp, Homo sapien
ggatgtcccagttcccctttatgga

SEQ ID NO: 4773238 - DNA, 25 bp, Homo sapien
tatacataggatatgtgctccagga

SEQ ID NO: 4773239 - DNA, 25 bp, Homo sapien
tagaaacagtcatcagtgggaaggg

SEQ ID NO: 4773240 - DNA, 25 bp, Homo sapien
gtgcccggcctctatctgtatattc

SEQ ID NO: 4773241 - DNA, 25 bp, Homo sapien
tggtatgacactagcattaacagtc

SEQ ID NO: 4773242 - DNA, 25 bp, Homo sapien
tgcagaaagctttcttttgctagtt

SEQ ID NO: 4773243 - DNA, 25 bp, Homo sapien
cagaaagctttcttttgctagttga

SEQ ID NO: 4773244 - DNA, 25 bp, Homo sapien
gaatttgtaatgttccacctttcca

SEQ ID NO: 4773245 - DNA, 25 bp, Homo sapien
ctagttgaatttgtaatgttccacc

SEQ ID NO: 4773246 - DNA, 25 bp, Homo sapien
gaggacactctggaatcctacagca

SEQ ID NO: 4773247 - DNA, 25 bp, Homo sapien
gaactgtttgaattactatgccgta

SEQ ID NO: 4773248 - DNA, 25 bp, Homo sapien
gagcatctgccgtcagcttccttaa

SEQ ID NO: 4773249 - DNA, 25 bp, Homo sapien
taactatgagtgactgaactgtttg

SEQ ID NO: 4773250 - DNA, 25 bp, Homo sapien
ccctcaagagtgtttagtgacaagg

SEQ ID NO: 4773251 - DNA, 25 bp, Homo sapien
tcagcggcagtatggattatctccc

SEQ ID NO: 4773252 - DNA, 25 bp, Homo sapien
gaatatgttactgtgtcagcggcag

SEQ ID NO: 4773253 - DNA, 25 bp, Homo sapien
caaggatacggtcttacaagggtgt

SEQ ID NO: 4773254 - DNA, 25 bp, Homo sapien
catgtctgctgatgccaaatggaat

SEQ ID NO: 4773255 - DNA, 25 bp, Homo sapien
tggaatggacctaaacctgctgagt

SEQ ID NO: 4773256 - DNA, 25 bp, Homo sapien
gctgtccctctggataacgtgaaaa

SEQ ID NO: 4773257 - DNA, 25 bp, Homo sapien
cctgctgagttatacgatactggaa

SEQ ID NO: 4773258 - DNA, 25 bp, Homo sapien
ttagaaccagttattccaagttaca

SEQ ID NO: 4773259 - DNA, 25 bp, Homo sapien
ttccaagttacagagtcatacaaac

SEQ ID NO: 4773260 - DNA, 25 bp, Homo sapien
gttacagagtcatacaaactggcaa

SEQ ID NO: 4773261 - DNA, 25 bp, Homo sapien
actggcaaacagtatagaaaatata

SEQ ID NO: 4773262 - DNA, 25 bp, Homo sapien
attttttcaggtccgcttctgctac

SEQ ID NO: 4773263 - DNA, 25 bp, Homo sapien
acactgatgttgatatatgcaaaaa

SEQ ID NO: 4773264 - DNA, 25 bp, Homo sapien
ggtccgcttctgctacactgatgtt

SEQ ID NO: 4773265 - DNA, 25 bp, Homo sapien
ttttcaggtccgcttctgctacact

SEQ ID NO: 4773266 - DNA, 25 bp, Homo sapien
cagaaatgtcctggctaaggccacc

SEQ ID NO: 4773267 - DNA, 25 bp, Homo sapien
gaactgattttgtaggtctgcctca

SEQ ID NO: 4773268 - DNA, 25 bp, Homo sapien
cacccacataaaggcgcttcgtttc

SEQ ID NO: 4773269 - DNA, 25 bp, Homo sapien
gctgaactgattttgtaggtctgcc

SEQ ID NO: 4773270 - DNA, 25 bp, Homo sapien
aggctgggcatatacttgggtgtgt

SEQ ID NO: 4773271 - DNA, 25 bp, Homo sapien
aaggctgggcatatacttgggtgtg

SEQ ID NO: 4773272 - DNA, 25 bp, Homo sapien
gaaggctgggcatatacttgggtgt

SEQ ID NO: 4773273 - DNA, 25 bp, Homo sapien
tagtcttcgaggttttgcccaagcc

SEQ ID NO: 4773274 - DNA, 25 bp, Homo sapien
cttctgtatcaaatccgtctcctgg

SEQ ID NO: 4773275 - DNA, 25 bp, Homo sapien
gaaacaggatgtaacgcactaaaag

SEQ ID NO: 4773276 - DNA, 25 bp, Homo sapien
tttggaacagcaaccccatacccat

SEQ ID NO: 4773277 - DNA, 25 bp, Homo sapien
ttttccagaggtactagggcccatc

SEQ ID NO: 4773278 - DNA, 25 bp, Homo sapien
tcatttcgtttagcacccggcaggc

SEQ ID NO: 4773279 - DNA, 25 bp, Homo sapien
gcaggtctaccttcagaacttggaa

SEQ ID NO: 4773280 - DNA, 25 bp, Homo sapien
cacatggcgtgtattctgggcagaa

SEQ ID NO: 4773281 - DNA, 25 bp, Homo sapien
gagactaggaaacggccctgtgact

SEQ ID NO: 4773282 - DNA, 25 bp, Homo sapien
agagagactaggaaacggccctgtg

SEQ ID NO: 4773283 - DNA, 25 bp, Homo sapien
tgtgacttctcatgcccgaaaccca

SEQ ID NO: 4773284 - DNA, 25 bp, Homo sapien
gaaacggccctgtgacttctcatgc

SEQ ID NO: 4773285 - DNA, 25 bp, Homo sapien
ttctggtcacgtgtcccaacggagc

SEQ ID NO: 4773286 - DNA, 25 bp, Homo sapien
gaacactatcgctgtgtgtaccaat

SEQ ID NO: 4773287 - DNA, 25 bp, Homo sapien
caattcagttcccaagagcttttaa

SEQ ID NO: 4773288 - DNA, 25 bp, Homo sapien
tcaacgactgcaaaagagcctaaac

SEQ ID NO: 4773289 - DNA, 25 bp, Homo sapien
tgtcataaaggttttcctctatatt

SEQ ID NO: 4773290 - DNA, 25 bp, Homo sapien
acaaatccaagtaattccgtgccaa

SEQ ID NO: 4773291 - DNA, 25 bp, Homo sapien
gttaattatagtcatcttacaatgg

SEQ ID NO: 4773292 - DNA, 25 bp, Homo sapien
taattccgtgccaaattcaatgtca

SEQ ID NO: 4773293 - DNA, 25 bp, Homo sapien
tatcctcttatctagaaatccccaa

SEQ ID NO: 4773294 - DNA, 25 bp, Homo sapien
tatatgaaggtgtaaggtatgcatg

SEQ ID NO: 4773295 - DNA, 25 bp, Homo sapien
gattttgatggcaactgtgttcagt

SEQ ID NO: 4773296 - DNA, 25 bp, Homo sapien
tgttcagtctgcatatcatattgga

SEQ ID NO: 4773297 - DNA, 25 bp, Homo sapien
tctgacattctaggtagggaaaaca

SEQ ID NO: 4773298 - DNA, 25 bp, Homo sapien
tagaaactttactctggcaccactg

SEQ ID NO: 4773299 - DNA, 25 bp, Homo sapien
cacagtccggactcatgtttctaaa

SEQ ID NO: 4773300 - DNA, 25 bp, Homo sapien
taattcttgcagttagccatgtcag

SEQ ID NO: 4773301 - DNA, 25 bp, Homo sapien
ttgttacagtgaacatggatgtgta

SEQ ID NO: 4773302 - DNA, 25 bp, Homo sapien
ttgtgaatattcagtttgttacagt

SEQ ID NO: 4773303 - DNA, 25 bp, Homo sapien
tactcagaagctttattgtgaatat

SEQ ID NO: 4773304 - DNA, 25 bp, Homo sapien
ggaaggtagtgtgcactggcaccac

SEQ ID NO: 4773305 - DNA, 25 bp, Homo sapien
agactttgccatagagaactttatc

SEQ ID NO: 4773306 - DNA, 25 bp, Homo sapien
tattttgcagttatctcgtatttga

SEQ ID NO: 4773307 - DNA, 25 bp, Homo sapien
tatctcgtatttgaaagactttgcc

SEQ ID NO: 4773308 - DNA, 25 bp, Homo sapien
ttcttataagcatattggttttggc

SEQ ID NO: 4773309 - DNA, 25 bp, Homo sapien
tgtttcgaacgtagacattcagtct

SEQ ID NO: 4773310 - DNA, 25 bp, Homo sapien
aaaggccaggaaaggcaaagagttg

SEQ ID NO: 4773311 - DNA, 25 bp, Homo sapien
cctttactcattgttgagacagact

SEQ ID NO: 4773312 - DNA, 25 bp, Homo sapien
gaagaatgagcgatcatgggaaaca

SEQ ID NO: 4773313 - DNA, 25 bp, Homo sapien
tcttcaatgcggtcccggatgtaac

SEQ ID NO: 4773314 - DNA, 25 bp, Homo sapien
ggtgtcattagccttgcagaatgtg

SEQ ID NO: 4773315 - DNA, 25 bp, Homo sapien
aaaagtatgaccctatcggtaatct

SEQ ID NO: 4773316 - DNA, 25 bp, Homo sapien
gattggattgccctccaggcgtatc

SEQ ID NO: 4773317 - DNA, 25 bp, Homo sapien
cattatggtccaagtagaggaaggt

SEQ ID NO: 4773318 - DNA, 25 bp, Homo sapien
gatgaattacacgtagactttctgg

SEQ ID NO: 4773319 - DNA, 25 bp, Homo sapien
cggattccagggcattatggtccaa

SEQ ID NO: 4773320 - DNA, 25 bp, Homo sapien
ctttctggtaaattaagaggcacgg

SEQ ID NO: 4773321 - DNA, 25 bp, Homo sapien
gctgaatgagcctaataggatggtt

SEQ ID NO: 4773322 - DNA, 25 bp, Homo sapien
tatcatcactcatactatgcttagt

SEQ ID NO: 4773323 - DNA, 25 bp, Homo sapien
taactgagatatgggtataagctag

SEQ ID NO: 4773324 - DNA, 25 bp, Homo sapien
tacaattctagaccaaagtttctct

SEQ ID NO: 4773325 - DNA, 25 bp, Homo sapien
ctgtaaaatcgagtcttcttaagtt

SEQ ID NO: 4773326 - DNA, 25 bp, Homo sapien
cctttggtaagggtggtacagcatc

SEQ ID NO: 4773327 - DNA, 25 bp, Homo sapien
ttcttcacagtatacagagccactt

SEQ ID NO: 4773328 - DNA, 25 bp, Homo sapien
taaagataggctgattcctttggta

SEQ ID NO: 4773329 - DNA, 25 bp, Homo sapien
taattttgttgaatcgtgcgtaaag

SEQ ID NO: 4773330 - DNA, 25 bp, Homo sapien
atgaacaatcgtttgaaaatatttc

SEQ ID NO: 4773331 - DNA, 25 bp, Homo sapien
tatgaacaatcgtttgaaaatattt

SEQ ID NO: 4773332 - DNA, 25 bp, Homo sapien
aaatatgaacaatcgtttgaaaata

SEQ ID NO: 4773333 - DNA, 25 bp, Homo sapien
aatatgaacaatcgtttgaaaatat

SEQ ID NO: 4773334 - DNA, 25 bp, Homo sapien
cctacagttgtctggttctttcagc

SEQ ID NO: 4773335 - DNA, 25 bp, Homo sapien
gaacagttggttccttgataattca

SEQ ID NO: 4773336 - DNA, 25 bp, Homo sapien
tttaagtaatgtttgccgaccacca

SEQ ID NO: 4773337 - DNA, 25 bp, Homo sapien
tttttatatatggtgccaggaaggg

SEQ ID NO: 4773338 - DNA, 25 bp, Homo sapien
ggtaatggtgttattgcctcatctt

SEQ ID NO: 4773339 - DNA, 25 bp, Homo sapien
tctttcttgggaggtaatggtgtta

SEQ ID NO: 4773340 - DNA, 25 bp, Homo sapien
gggaggtaatggtgttattgcctca

SEQ ID NO: 4773341 - DNA, 25 bp, Homo sapien
tcttgggaggtaatggtgttattgc

SEQ ID NO: 4773342 - DNA, 25 bp, Homo sapien
cataatcttggctaaatatggattc

SEQ ID NO: 4773343 - DNA, 25 bp, Homo sapien
tagataatgcgtgagtcctgctggg

SEQ ID NO: 4773344 - DNA, 25 bp, Homo sapien
taacaggagaagtgtagactgcaga

SEQ ID NO: 4773345 - DNA, 25 bp, Homo sapien
tatcagaggcacaagcagtaacagg

SEQ ID NO: 4773346 - DNA, 25 bp, Homo sapien
ggaagttaataaactagtggcctgc

SEQ ID NO: 4773347 - DNA, 25 bp, Homo sapien
taaactagtggcctgctgactgtgg

SEQ ID NO: 4773348 - DNA, 25 bp, Homo sapien
tgactgtgggacaaaactctctttt

SEQ ID NO: 4773349 - DNA, 25 bp, Homo sapien
tcaaggtgactggaagttaataaac

SEQ ID NO: 4773350 - DNA, 25 bp, Homo sapien
tgtgcgcagtaagggccagagaaca

SEQ ID NO: 4773351 - DNA, 25 bp, Homo sapien
tcagaccatcgaagcaatatttaaa

SEQ ID NO: 4773352 - DNA, 25 bp, Homo sapien
aataaaaattcagaccatcgaagca

SEQ ID NO: 4773353 - DNA, 25 bp, Homo sapien
aaagcttagaggatgttttggcagg

SEQ ID NO: 4773354 - DNA, 25 bp, Homo sapien
ttcttaataattaagtgccttcagc

SEQ ID NO: 4773355 - DNA, 25 bp, Homo sapien
tatgtatcagtgaacattctgaaaa

SEQ ID NO: 4773356 - DNA, 25 bp, Homo sapien
gtgccttcagcagacatactaatat

SEQ ID NO: 4773357 - DNA, 25 bp, Homo sapien
tagtgatctttaattagatgctagc

SEQ ID NO: 4773358 - DNA, 25 bp, Homo sapien
cctcaatagatgttcatgtctgtgc

SEQ ID NO: 4773359 - DNA, 25 bp, Homo sapien
gctatgtcttgatttcaaactgctg

SEQ ID NO: 4773360 - DNA, 25 bp, Homo sapien
tgtctgtgcattagccccaagtggg

SEQ ID NO: 4773361 - DNA, 25 bp, Homo sapien
taagaacagtttccatgtggtagag

SEQ ID NO: 4773362 - DNA, 25 bp, Homo sapien
ttttcatagtcactgccgctttagc

SEQ ID NO: 4773363 - DNA, 25 bp, Homo sapien
gatacaaattgaaactccagagctc

SEQ ID NO: 4773364 - DNA, 25 bp, Homo sapien
gttctctctacttttgccagtcagt

SEQ ID NO: 4773365 - DNA, 25 bp, Homo sapien
gggttttcaatctcttaaactgtgc

SEQ ID NO: 4773366 - DNA, 25 bp, Homo sapien
gctctaggcaaccaatagtctttgt

SEQ ID NO: 4773367 - DNA, 25 bp, Homo sapien
tgggtgatttctaccttgtggataa

SEQ ID NO: 4773368 - DNA, 25 bp, Homo sapien
ggtttctacctttggatatggctga

SEQ ID NO: 4773369 - DNA, 25 bp, Homo sapien
tgtctccatagatttcccagttctg

SEQ ID NO: 4773370 - DNA, 25 bp, Homo sapien
gatttcagctatcctagtgagcaca

SEQ ID NO: 4773371 - DNA, 25 bp, Homo sapien
ccaaaggtgtatgaaggctccaatt

SEQ ID NO: 4773372 - DNA, 25 bp, Homo sapien
ggtgtgagctaatgcgcccgactat

SEQ ID NO: 4773373 - DNA, 25 bp, Homo sapien
ggaacttccatactgcttttctaag

SEQ ID NO: 4773374 - DNA, 25 bp, Homo sapien
gataatgctaataattcctcaaaga

SEQ ID NO: 4773375 - DNA, 25 bp, Homo sapien
ttcttgaggttgtccctgggaacag

SEQ ID NO: 4773376 - DNA, 25 bp, Homo sapien
gacttgcaagcttgaaaactatttc

SEQ ID NO: 4773377 - DNA, 25 bp, Homo sapien
gacttgatgaatgttgattagacga

SEQ ID NO: 4773378 - DNA, 25 bp, Homo sapien
tagcttatgtagatattggctgata

SEQ ID NO: 4773379 - DNA, 25 bp, Homo sapien
aattttagcttatgtagatattggc

SEQ ID NO: 4773380 - DNA, 25 bp, Homo sapien
tagatattggctgataagcataaag

SEQ ID NO: 4773381 - DNA, 25 bp, Homo sapien
tatgtagatattggctgataagcat

SEQ ID NO: 4773382 - DNA, 25 bp, Homo sapien
gaggtcagagaaaatggtctattcc

SEQ ID NO: 4773383 - DNA, 25 bp, Homo sapien
tatgccttgggtccttagtacctgg

SEQ ID NO: 4773384 - DNA, 25 bp, Homo sapien
acaaataccagtgtgaaagctttcc

SEQ ID NO: 4773385 - DNA, 25 bp, Homo sapien
gagtgatcaaaaaggtcatggcctg

SEQ ID NO: 4773386 - DNA, 25 bp, Homo sapien
ataataatgaaggtcaaagtgccct

SEQ ID NO: 4773387 - DNA, 25 bp, Homo sapien
aggatcatcgtgatcttcactttca

SEQ ID NO: 4773388 - DNA, 25 bp, Homo sapien
tgttctgggctctcatgagcattgt

SEQ ID NO: 4773389 - DNA, 25 bp, Homo sapien
catcatctggaaatctcctgaaaac

SEQ ID NO: 4773390 - DNA, 25 bp, Homo sapien
tagtgtgtatatgagggaagcagaa

SEQ ID NO: 4773391 - DNA, 25 bp, Homo sapien
taaatggtggtaatgtagtgggtca

SEQ ID NO: 4773392 - DNA, 25 bp, Homo sapien
cattagtgcttcgttgttcaccata

SEQ ID NO: 4773393 - DNA, 25 bp, Homo sapien
tattttggtccacacgaatgtatgt

SEQ ID NO: 4773394 - DNA, 25 bp, Homo sapien
tgaatgaatttgcagtcacagcctc

SEQ ID NO: 4773395 - DNA, 25 bp, Homo sapien
ttataacagagatcaagcatggtca

SEQ ID NO: 4773396 - DNA, 25 bp, Homo sapien
cactgagttctacaatgttgggaag

SEQ ID NO: 4773397 - DNA, 25 bp, Homo sapien
tgtaaccaagaaggagtctttccag

SEQ ID NO: 4773398 - DNA, 25 bp, Homo sapien
aaaagaagaaaataacatatattgg

SEQ ID NO: 4773399 - DNA, 25 bp, Homo sapien
aaaaagaagaaaataacatatattg

SEQ ID NO: 4773400 - DNA, 25 bp, Homo sapien
aaagaagaaaataacatatattgga

SEQ ID NO: 4773401 - DNA, 25 bp, Homo sapien
caaaaaagaagaaaataacatatat

SEQ ID NO: 4773402 - DNA, 25 bp, Homo sapien
ctgatcctttaatgatggtcactgc

SEQ ID NO: 4773403 - DNA, 25 bp, Homo sapien
ggttctagctatttttcatcattgg

SEQ ID NO: 4773404 - DNA, 25 bp, Homo sapien
attttgagtattccgcactcagacc

SEQ ID NO: 4773405 - DNA, 25 bp, Homo sapien
tttccgtggaacctcagctatattg

SEQ ID NO: 4773406 - DNA, 25 bp, Homo sapien
caggtagagtcagagacccttgagc

SEQ ID NO: 4773407 - DNA, 25 bp, Homo sapien
acactcgggttgaattaaaattatg

SEQ ID NO: 4773408 - DNA, 25 bp, Homo sapien
caaattaagatgcttgtgttcttgg

SEQ ID NO: 4773409 - DNA, 25 bp, Homo sapien
gctttagttttcaggggttgatgaa

SEQ ID NO: 4773410 - DNA, 25 bp, Homo sapien
ttgtggattcaaattaagatgcttg

SEQ ID NO: 4773411 - DNA, 25 bp, Homo sapien
ctctttttggcagatgtacccacta

SEQ ID NO: 4773412 - DNA, 25 bp, Homo sapien
ggaagtaaccacctctcagcattct

SEQ ID NO: 4773413 - DNA, 25 bp, Homo sapien
caaggcagacatatgcctggaagta

SEQ ID NO: 4773414 - DNA, 25 bp, Homo sapien
gataatgacacttagctgatgaact

SEQ ID NO: 4773415 - DNA, 25 bp, Homo sapien
tcaagtttgtaaggcagataatgac

SEQ ID NO: 4773416 - DNA, 25 bp, Homo sapien
catcattcacattttctgtaaatgg

SEQ ID NO: 4773417 - DNA, 25 bp, Homo sapien
aggctttcttggccatcatcattca

SEQ ID NO: 4773418 - DNA, 25 bp, Homo sapien
ctttcttggccatcatcattcacat

SEQ ID NO: 4773419 - DNA, 25 bp, Homo sapien
ttggccatcatcattcacattttct

SEQ ID NO: 4773420 - DNA, 25 bp, Homo sapien
tggtgaactcatcagcaggcctcat

SEQ ID NO: 4773421 - DNA, 25 bp, Homo sapien
ctggtgaactcatcagcaggcctca

SEQ ID NO: 4773422 - DNA, 25 bp, Homo sapien
gaaatcagctgagcaactcctagaa

SEQ ID NO: 4773423 - DNA, 25 bp, Homo sapien
ctcctagaagtttagaacctgcaca

SEQ ID NO: 4773424 - DNA, 25 bp, Homo sapien
aggaaggttagaaatcagctgagca

SEQ ID NO: 4773425 - DNA, 25 bp, Homo sapien
ctggttgtccgtagagatgcaggaa

SEQ ID NO: 4773426 - DNA, 25 bp, Homo sapien
gaattgttagtgtccaggctcttcc

SEQ ID NO: 4773427 - DNA, 25 bp, Homo sapien
gcatatgctatagccccaaaccagc

SEQ ID NO: 4773428 - DNA, 25 bp, Homo sapien
ttctcagagttatccagtccatacg

SEQ ID NO: 4773429 - DNA, 25 bp, Homo sapien
cataaagacgggctctaagacatga

SEQ ID NO: 4773430 - DNA, 25 bp, Homo sapien
actcccactcttgcaattgaattag

SEQ ID NO: 4773431 - DNA, 25 bp, Homo sapien
cagtatttcaccgggttgttgaata

SEQ ID NO: 4773432 - DNA, 25 bp, Homo sapien
gttcccaagctgaacgctcattctg

SEQ ID NO: 4773433 - DNA, 25 bp, Homo sapien
aacacaacgaaatgttgcaggttgc

SEQ ID NO: 4773434 - DNA, 25 bp, Homo sapien
gcagcttgagagaggacggactcaa

SEQ ID NO: 4773435 - DNA, 25 bp, Homo sapien
ccttccagccagttaagagttgtca

SEQ ID NO: 4773436 - DNA, 25 bp, Homo sapien
gttgtagtcactggctaaacagaca

SEQ ID NO: 4773437 - DNA, 25 bp, Homo sapien
gatttaagagagaccagaagctgga

SEQ ID NO: 4773438 - DNA, 25 bp, Homo sapien
cacctcatgcaacctggagagtcat

SEQ ID NO: 4773439 - DNA, 25 bp, Homo sapien
tatgtttgaatcacccttgctgctt

SEQ ID NO: 4773440 - DNA, 25 bp, Homo sapien
ttgaatcacccttgctgcttacttg

SEQ ID NO: 4773441 - DNA, 25 bp, Homo sapien
tatctactgaacacaagtagaatgt

SEQ ID NO: 4773442 - DNA, 25 bp, Homo sapien
ttcaactctggtaatcctgaaggga

SEQ ID NO: 4773443 - DNA, 25 bp, Homo sapien
ctggaggtatttcaactctggtaat

SEQ ID NO: 4773444 - DNA, 25 bp, Homo sapien
gactcccattttcgatatctgtgat

SEQ ID NO: 4773445 - DNA, 25 bp, Homo sapien
tctctcacacgtggtatgttagcaa

SEQ ID NO: 4773446 - DNA, 25 bp, Homo sapien
tgaaaacaccgcaaactagttagaa

SEQ ID NO: 4773447 - DNA, 25 bp, Homo sapien
ctagttagaatataagcctgtccta

SEQ ID NO: 4773448 - DNA, 25 bp, Homo sapien
cagatggttaggtgtgatagagtta

SEQ ID NO: 4773449 - DNA, 25 bp, Homo sapien
aatgcatcaagtcttacacagatgg

SEQ ID NO: 4773450 - DNA, 25 bp, Homo sapien
atcctcaagttccactgttgaaatt

SEQ ID NO: 4773451 - DNA, 25 bp, Homo sapien
cctcaagttccactgttgaaatttt

SEQ ID NO: 4773452 - DNA, 25 bp, Homo sapien
ttataatctaagtgaagctccaata

SEQ ID NO: 4773453 - DNA, 25 bp, Homo sapien
agctccaataaagttggtggtaagc

SEQ ID NO: 4773454 - DNA, 25 bp, Homo sapien
tctcaaatacgtcattttacagttg

SEQ ID NO: 4773455 - DNA, 25 bp, Homo sapien
gaaatctctcttaatgtacaacata

SEQ ID NO: 4773456 - DNA, 25 bp, Homo sapien
cagcttccatgtgatatcatttatc

SEQ ID NO: 4773457 - DNA, 25 bp, Homo sapien
catttggttcttatcgctcttgaaa

SEQ ID NO: 4773458 - DNA, 25 bp, Homo sapien
cagagagaagattgaagtgtagcct

SEQ ID NO: 4773459 - DNA, 25 bp, Homo sapien
aaatgttagcacacttttgtaccgg

SEQ ID NO: 4773460 - DNA, 25 bp, Homo sapien
taatctctgggagaggacttgtaga

SEQ ID NO: 4773461 - DNA, 25 bp, Homo sapien
tctaggataaaacgagcagaggtgt

SEQ ID NO: 4773462 - DNA, 25 bp, Homo sapien
gctgggtacaaaatgccttgccttg

SEQ ID NO: 4773463 - DNA, 25 bp, Homo sapien
tacgtgctggatgttgtcctcagac

SEQ ID NO: 4773464 - DNA, 25 bp, Homo sapien
tatgcagctaatcatcagacaggga

SEQ ID NO: 4773465 - DNA, 25 bp, Homo sapien
ctcaaactgtggctaaatgcctggg

SEQ ID NO: 4773466 - DNA, 25 bp, Homo sapien
accgtcaccccttcaaatgcccctg

SEQ ID NO: 4773467 - DNA, 25 bp, Homo sapien
tgcccctggctctatcccattatta

SEQ ID NO: 4773468 - DNA, 25 bp, Homo sapien
aattctgatatggaacaccgtcacc

SEQ ID NO: 4773469 - DNA, 25 bp, Homo sapien
taggaactgaggtcagttttgcttc

SEQ ID NO: 4773470 - DNA, 25 bp, Homo sapien
ccttcgcaacttctttgtggttaga

SEQ ID NO: 4773471 - DNA, 25 bp, Homo sapien
cttcgttagcttgttgttgttcagg

SEQ ID NO: 4773472 - DNA, 25 bp, Homo sapien
gagttctgctaatgatttgggaaga

SEQ ID NO: 4773473 - DNA, 25 bp, Homo sapien
tagaaaggcttttgggtgaatcttc

SEQ ID NO: 4773474 - DNA, 25 bp, Homo sapien
ggaagtggatttgatttaccagtat

SEQ ID NO: 4773475 - DNA, 25 bp, Homo sapien
gaagtggatttgatttaccagtatt

SEQ ID NO: 4773476 - DNA, 25 bp, Homo sapien
gatcaagcattcgagtatcaaatgg

SEQ ID NO: 4773477 - DNA, 25 bp, Homo sapien
caagcattcgagtatcaaatggaat

SEQ ID NO: 4773478 - DNA, 25 bp, Homo sapien
tcaagcattcgagtatcaaatggaa

SEQ ID NO: 4773479 - DNA, 25 bp, Homo sapien
atcaagcattcgagtatcaaatgga

SEQ ID NO: 4773480 - DNA, 25 bp, Homo sapien
tgaacaagttttctcaaacagtact

SEQ ID NO: 4773481 - DNA, 25 bp, Homo sapien
tccacaggtaaagcttaagacccat

SEQ ID NO: 4773482 - DNA, 25 bp, Homo sapien
tccacagtcgttctacatgaacaag

SEQ ID NO: 4773483 - DNA, 25 bp, Homo sapien
tgagaattccacaggtaaagcttaa

SEQ ID NO: 4773484 - DNA, 25 bp, Homo sapien
gaaaagtacagtctcaacctgctag

SEQ ID NO: 4773485 - DNA, 25 bp, Homo sapien
tagattagagatttcacaagctttc

SEQ ID NO: 4773486 - DNA, 25 bp, Homo sapien
catcctttaaattgtcagaatagca

SEQ ID NO: 4773487 - DNA, 25 bp, Homo sapien
cctgctagcaccctgagatagaact

SEQ ID NO: 4773488 - DNA, 25 bp, Homo sapien
gcaatgtacaactcgtgaatagcac

SEQ ID NO: 4773489 - DNA, 25 bp, Homo sapien
tgaatagcactgacatccaaatgga

SEQ ID NO: 4773490 - DNA, 25 bp, Homo sapien
atggacacattggaaacagatcaaa

SEQ ID NO: 4773491 - DNA, 25 bp, Homo sapien
acatccaaatggacacattggaaac

SEQ ID NO: 4773492 - DNA, 25 bp, Homo sapien
ccatatccttcagcatcatattctt

SEQ ID NO: 4773493 - DNA, 25 bp, Homo sapien
caaagccaggaataataggagcaca

SEQ ID NO: 4773494 - DNA, 25 bp, Homo sapien
tcagtgcgatgtgtgaagggctaaa

SEQ ID NO: 4773495 - DNA, 25 bp, Homo sapien
agggtttggcagagcacaaagccag

SEQ ID NO: 4773496 - DNA, 25 bp, Homo sapien
cttagtgtagaagaccagtctagga

SEQ ID NO: 4773497 - DNA, 25 bp, Homo sapien
tcttagtgtagaagaccagtctagg

SEQ ID NO: 4773498 - DNA, 25 bp, Homo sapien
tgtcttagtgtagaagaccagtcta

SEQ ID NO: 4773499 - DNA, 25 bp, Homo sapien
ggtgtcttagtgtagaagaccagtc

SEQ ID NO: 4773500 - DNA, 25 bp, Homo sapien
cagaaatttactttgggagtagaca

SEQ ID NO: 4773501 - DNA, 25 bp, Homo sapien
tgtttcctgggtgccacacctctga

SEQ ID NO: 4773502 - DNA, 25 bp, Homo sapien
tatagctgtgatatccccaaacttc

SEQ ID NO: 4773503 - DNA, 25 bp, Homo sapien
gctgtgcgctatttagattactagg

SEQ ID NO: 4773504 - DNA, 25 bp, Homo sapien
taaactgctcccacagattagtcca

SEQ ID NO: 4773505 - DNA, 25 bp, Homo sapien
gaagagagtagtcctcctaaaagta

SEQ ID NO: 4773506 - DNA, 25 bp, Homo sapien
aaaaacacccttcaacacagtcctg

SEQ ID NO: 4773507 - DNA, 25 bp, Homo sapien
catgtactacttatctataatgtaa

SEQ ID NO: 4773508 - DNA, 25 bp, Homo sapien
tagtcccattagtggccctctgtaa

SEQ ID NO: 4773509 - DNA, 25 bp, Homo sapien
cagttccaggcagctcggtagtccc

SEQ ID NO: 4773510 - DNA, 25 bp, Homo sapien
cagctcggtagtcccattagtggcc

SEQ ID NO: 4773511 - DNA, 25 bp, Homo sapien
attagtggccctctgtaactcaggc

SEQ ID NO: 4773512 - DNA, 25 bp, Homo sapien
tgtagacatgtcataagctgaagcc

SEQ ID NO: 4773513 - DNA, 25 bp, Homo sapien
gttacttagaaacacaccaggacat

SEQ ID NO: 4773514 - DNA, 25 bp, Homo sapien
caattgagctgatggtcgtagggcc

SEQ ID NO: 4773515 - DNA, 25 bp, Homo sapien
gcagactgtcttgctatactgttgg

SEQ ID NO: 4773516 - DNA, 25 bp, Homo sapien
tgccatgaggacattttctatcctt

SEQ ID NO: 4773517 - DNA, 25 bp, Homo sapien
tcccgtctttactgtcctctccttg

SEQ ID NO: 4773518 - DNA, 25 bp, Homo sapien
tctccttgtcttgcctgacccccat

SEQ ID NO: 4773519 - DNA, 25 bp, Homo sapien
tcctctccttgtcttgcctgacccc

SEQ ID NO: 4773520 - DNA, 25 bp, Homo sapien
cttcccgtctttactgtcctctcct

SEQ ID NO: 4773521 - DNA, 25 bp, Homo sapien
aaaaagcttcaatcagtcattctga

SEQ ID NO: 4773522 - DNA, 25 bp, Homo sapien
gaccaggacttctttagtgtatatg

SEQ ID NO: 4773523 - DNA, 25 bp, Homo sapien
ctgaacaagttccatgctagccata

SEQ ID NO: 4773524 - DNA, 25 bp, Homo sapien
aaacttcccatctagaacatcatga

SEQ ID NO: 4773525 - DNA, 25 bp, Homo sapien
acagcaagcccacagtgcgtctgct

SEQ ID NO: 4773526 - DNA, 25 bp, Homo sapien
cagcaagcccacagtgcgtctgctc

SEQ ID NO: 4773527 - DNA, 25 bp, Homo sapien
gtggccgtagtctcctggcggccct

SEQ ID NO: 4773528 - DNA, 25 bp, Homo sapien
ttaatccaggccgttgagggtggcc

SEQ ID NO: 4773529 - DNA, 25 bp, Homo sapien
gagggtggccgtagtctcctggcgg

SEQ ID NO: 4773530 - DNA, 25 bp, Homo sapien
gccgttgagggtggccgtagtctcc

SEQ ID NO: 4773531 - DNA, 25 bp, Homo sapien
ctgtttgatttcctgcttattgcct

SEQ ID NO: 4773532 - DNA, 25 bp, Homo sapien
cacttgcctgcttacttgtctgttt

SEQ ID NO: 4773533 - DNA, 25 bp, Homo sapien
tctgtttgatttcctgcttattgcc

SEQ ID NO: 4773534 - DNA, 25 bp, Homo sapien
ctgcacagcacttgcctgcttactt

SEQ ID NO: 4773535 - DNA, 25 bp, Homo sapien
tttgtcactgtctctagaacagcat

SEQ ID NO: 4773536 - DNA, 25 bp, Homo sapien
tgtcactgtctctagaacagcatct

SEQ ID NO: 4773537 - DNA, 25 bp, Homo sapien
ggccacatctgatctgtttgtcact

SEQ ID NO: 4773538 - DNA, 25 bp, Homo sapien
ctaccagagaggaaaggccacatct

SEQ ID NO: 4773539 - DNA, 25 bp, Homo sapien
gaatttatgcacacccttctgccag

SEQ ID NO: 4773540 - DNA, 25 bp, Homo sapien
tacagagttctcagctaacaccagt

SEQ ID NO: 4773541 - DNA, 25 bp, Homo sapien
taccagtaattatagcacaggacct

SEQ ID NO: 4773542 - DNA, 25 bp, Homo sapien
tatcctattctagtgagatggcctc

SEQ ID NO: 4773543 - DNA, 25 bp, Homo sapien
tatgatcttatgcatgaaaatgtgt

SEQ ID NO: 4773544 - DNA, 25 bp, Homo sapien
cgatacttgagtatgatcttatgca

SEQ ID NO: 4773545 - DNA, 25 bp, Homo sapien
tataattgttttcaagatgaagatg

SEQ ID NO: 4773546 - DNA, 25 bp, Homo sapien
tgtggtttaagaacgatacttgagt

SEQ ID NO: 4773547 - DNA, 25 bp, Homo sapien
tgacaggtacaagtattccaggcct

SEQ ID NO: 4773548 - DNA, 25 bp, Homo sapien
catagccagggatccgttcaatctg

SEQ ID NO: 4773549 - DNA, 25 bp, Homo sapien
gatatgccccatagaaggagacacg

SEQ ID NO: 4773550 - DNA, 25 bp, Homo sapien
ggtccatgccatcatcagcaagttt

SEQ ID NO: 4773551 - DNA, 25 bp, Homo sapien
gttataacgtagtacaatgacattg

SEQ ID NO: 4773552 - DNA, 25 bp, Homo sapien
ttctggtatgattgaaacaaatttc

SEQ ID NO: 4773553 - DNA, 25 bp, Homo sapien
aattttgttataacgtagtacaatg

SEQ ID NO: 4773554 - DNA, 25 bp, Homo sapien
caatgacattgatctttctggtatg

SEQ ID NO: 4773555 - DNA, 25 bp, Homo sapien
taggctcttcaaaggtttgaaagct

SEQ ID NO: 4773556 - DNA, 25 bp, Homo sapien
tattttttcccagacgcaagtaggc

SEQ ID NO: 4773557 - DNA, 25 bp, Homo sapien
gaagaccctgcggtataattctaaa

SEQ ID NO: 4773558 - DNA, 25 bp, Homo sapien
agctaaaggattgacattggcttca

SEQ ID NO: 4773559 - DNA, 25 bp, Homo sapien
gccaggctcctacagacagaaagat

SEQ ID NO: 4773560 - DNA, 25 bp, Homo sapien
caaagacggttgcatcaggaataga

SEQ ID NO: 4773561 - DNA, 25 bp, Homo sapien
ggctcagggtgtggccaaaattccc

SEQ ID NO: 4773562 - DNA, 25 bp, Homo sapien
cattgcaccgaatgccatgtgggac

SEQ ID NO: 4773563 - DNA, 25 bp, Homo sapien
tctgagccggaggacagaagcactg

SEQ ID NO: 4773564 - DNA, 25 bp, Homo sapien
tgagccggaggacagaagcactgcc

SEQ ID NO: 4773565 - DNA, 25 bp, Homo sapien
gtatctgagccggaggacagaagca

SEQ ID NO: 4773566 - DNA, 25 bp, Homo sapien
cggaggacagaagcactgccggcat

SEQ ID NO: 4773567 - DNA, 25 bp, Homo sapien
gacatatgagtacagaagttccagc

SEQ ID NO: 4773568 - DNA, 25 bp, Homo sapien
tttgtaggacagcatctcagccgca

SEQ ID NO: 4773569 - DNA, 25 bp, Homo sapien
catggcactggttagtcgctacaaa

SEQ ID NO: 4773570 - DNA, 25 bp, Homo sapien
ggagccttgcatccacatgccgtgg

SEQ ID NO: 4773571 - DNA, 25 bp, Homo sapien
tggcaattgtgaaggaatctgtatc

SEQ ID NO: 4773572 - DNA, 25 bp, Homo sapien
gttcttctaatgtagatggcaattg

SEQ ID NO: 4773573 - DNA, 25 bp, Homo sapien
ttccatccatattcaaacgcattaa

SEQ ID NO: 4773574 - DNA, 25 bp, Homo sapien
tcgatagcctgaagattgttctcat

SEQ ID NO: 4773575 - DNA, 25 bp, Homo sapien
gatctagggtgtgaatgtagaaccc

SEQ ID NO: 4773576 - DNA, 25 bp, Homo sapien
tcaacagtttcggaatgggacagag

SEQ ID NO: 4773577 - DNA, 25 bp, Homo sapien
tgttcattggtcaaacctagcctgt

SEQ ID NO: 4773578 - DNA, 25 bp, Homo sapien
caatatggcatccagttgactgtct

SEQ ID NO: 4773579 - DNA, 25 bp, Homo sapien
atttttactcagatcaagcctttcc

SEQ ID NO: 4773580 - DNA, 25 bp, Homo sapien
gatattatttttactcagatcaagc

SEQ ID NO: 4773581 - DNA, 25 bp, Homo sapien
tactcagatcaagcctttccaaatt

SEQ ID NO: 4773582 - DNA, 25 bp, Homo sapien
catctgggatggaggcgatggaatt

SEQ ID NO: 4773583 - DNA, 25 bp, Homo sapien
tacggcttcaatctacaaaggttcc

SEQ ID NO: 4773584 - DNA, 25 bp, Homo sapien
gatctaatgttatgcctctacggct

SEQ ID NO: 4773585 - DNA, 25 bp, Homo sapien
gatgaaggtgcttaacacagccaga

SEQ ID NO: 4773586 - DNA, 25 bp, Homo sapien
taaacccggaaagtgagcataccag

SEQ ID NO: 4773587 - DNA, 25 bp, Homo sapien
tataggccacaggaggaagggactt

SEQ ID NO: 4773588 - DNA, 25 bp, Homo sapien
ggtgtataggccacaggaggaaggg

SEQ ID NO: 4773589 - DNA, 25 bp, Homo sapien
ctggtgtataggccacaggaggaag

SEQ ID NO: 4773590 - DNA, 25 bp, Homo sapien
taggccacaggaggaagggactttc

SEQ ID NO: 4773591 - DNA, 25 bp, Homo sapien
taagcatggcgttgatgcagctgat

SEQ ID NO: 4773592 - DNA, 25 bp, Homo sapien
gtatctgggtaagcatggcgttgat

SEQ ID NO: 4773593 - DNA, 25 bp, Homo sapien
cagtgagctccagacttgttatctg

SEQ ID NO: 4773594 - DNA, 25 bp, Homo sapien
tgctgtcagcggtggtatctgggta

SEQ ID NO: 4773595 - DNA, 25 bp, Homo sapien
agagagcacccgcttggcaggcgca

SEQ ID NO: 4773596 - DNA, 25 bp, Homo sapien
tgtaggacagagagcacccgcttgg

SEQ ID NO: 4773597 - DNA, 25 bp, Homo sapien
cagagagcacccgcttggcaggcgc

SEQ ID NO: 4773598 - DNA, 25 bp, Homo sapien
aggacagagagcacccgcttggcag

SEQ ID NO: 4773599 - DNA, 25 bp, Homo sapien
ggatcgagagggcattcggaacata

SEQ ID NO: 4773600 - DNA, 25 bp, Homo sapien
agagggcattcggaacatatctcct

SEQ ID NO: 4773601 - DNA, 25 bp, Homo sapien
gaacatatctcctcttaccgggtcc

SEQ ID NO: 4773602 - DNA, 25 bp, Homo sapien
ggcattcggaacatatctcctctta

SEQ ID NO: 4773603 - DNA, 25 bp, Homo sapien
ccttggcgttgttgctggtgtgcca

SEQ ID NO: 4773604 - DNA, 25 bp, Homo sapien
tctccaggcctctgctttctgtctc

SEQ ID NO: 4773605 - DNA, 25 bp, Homo sapien
tggtgtgccagcctcctctcctctc

SEQ ID NO: 4773606 - DNA, 25 bp, Homo sapien
cctcctcccttccttggcgttgttg

SEQ ID NO: 4773607 - DNA, 25 bp, Homo sapien
aagttgcccctgatttctagattca

SEQ ID NO: 4773608 - DNA, 25 bp, Homo sapien
gttgcccctgatttctagattcagg

SEQ ID NO: 4773609 - DNA, 25 bp, Homo sapien
ttcttactattcggtccattcccac

SEQ ID NO: 4773610 - DNA, 25 bp, Homo sapien
tgcccctgatttctagattcagggg

SEQ ID NO: 4773611 - DNA, 25 bp, Homo sapien
gaggtggcagttgcttatgaagtaa

SEQ ID NO: 4773612 - DNA, 25 bp, Homo sapien
tgcttatgaagtaaattggtaggtt

SEQ ID NO: 4773613 - DNA, 25 bp, Homo sapien
tatgaagtaaattggtaggttctct

SEQ ID NO: 4773614 - DNA, 25 bp, Homo sapien
ctgaggaggtggcagttgcttatga

SEQ ID NO: 4773615 - DNA, 25 bp, Homo sapien
catttaatgctataccactgagtag

SEQ ID NO: 4773616 - DNA, 25 bp, Homo sapien
taatgctataccactgagtagagaa

SEQ ID NO: 4773617 - DNA, 25 bp, Homo sapien
tatcatttaatgctataccactgag

SEQ ID NO: 4773618 - DNA, 25 bp, Homo sapien
tctatcatttaatgctataccactg

SEQ ID NO: 4773619 - DNA, 25 bp, Homo sapien
gaggcaaaatggtaagcaatcctgt

SEQ ID NO: 4773620 - DNA, 25 bp, Homo sapien
agggaataatattgccacatgaggc

SEQ ID NO: 4773621 - DNA, 25 bp, Homo sapien
taatgaccacgcaaggatgaggtag

SEQ ID NO: 4773622 - DNA, 25 bp, Homo sapien
gagaatttgcagactgtttaccaga

SEQ ID NO: 4773623 - DNA, 25 bp, Homo sapien
tccaagtcttctgaaaaaatttctg

SEQ ID NO: 4773624 - DNA, 25 bp, Homo sapien
caagaatactccaagtcttctgaaa

SEQ ID NO: 4773625 - DNA, 25 bp, Homo sapien
gaatactccaagtcttctgaaaaaa

SEQ ID NO: 4773626 - DNA, 25 bp, Homo sapien
catttcaagaatactccaagtcttc

SEQ ID NO: 4773627 - DNA, 25 bp, Homo sapien
gagacttttgtagacacctaccctg

SEQ ID NO: 4773628 - DNA, 25 bp, Homo sapien
caagggtccttcattcagtcaggta

SEQ ID NO: 4773629 - DNA, 25 bp, Homo sapien
tgtgcatgggagcaatctaccttgg

SEQ ID NO: 4773630 - DNA, 25 bp, Homo sapien
gatgataaaggcacgttgcactgga

SEQ ID NO: 4773631 - DNA, 25 bp, Homo sapien
ctgatattttgcttagctaaatctc

SEQ ID NO: 4773632 - DNA, 25 bp, Homo sapien
taaagattaatcacacactgatatt

SEQ ID NO: 4773633 - DNA, 25 bp, Homo sapien
gatattttgcttagctaaatctctg

SEQ ID NO: 4773634 - DNA, 25 bp, Homo sapien
tggaagttaaagattaatcacacac

SEQ ID NO: 4773635 - DNA, 25 bp, Homo sapien
ttgttgtacatggttatgcccttta

SEQ ID NO: 4773636 - DNA, 25 bp, Homo sapien
ggctcaggcgaccacacagctttgt

SEQ ID NO: 4773637 - DNA, 25 bp, Homo sapien
tatgccctttaccaaacagtgtccc

SEQ ID NO: 4773638 - DNA, 25 bp, Homo sapien
ggcagcattccccttcaggtataac

SEQ ID NO: 4773639 - DNA, 25 bp, Homo sapien
gtttgctgaattccaagctgtctgt

SEQ ID NO: 4773640 - DNA, 25 bp, Homo sapien
taggaagtcttgctactggtgtaaa

SEQ ID NO: 4773641 - DNA, 25 bp, Homo sapien
cctcaaccttctgtggtagatcttc

SEQ ID NO: 4773642 - DNA, 25 bp, Homo sapien
ttgattctactccaggaaaacttga

SEQ ID NO: 4773643 - DNA, 25 bp, Homo sapien
tcctatttggcacttcttgaatttg

SEQ ID NO: 4773644 - DNA, 25 bp, Homo sapien
taactacaggtacttgcatatcagc

SEQ ID NO: 4773645 - DNA, 25 bp, Homo sapien
gatcttccagttcattgatactctc

SEQ ID NO: 4773646 - DNA, 25 bp, Homo sapien
tctcagcccttaactatacaaatag

SEQ ID NO: 4773647 - DNA, 25 bp, Homo sapien
aactaagtaggctttgcttggtgtc

SEQ ID NO: 4773648 - DNA, 25 bp, Homo sapien
ctaaactaagtaggctttgcttggt

SEQ ID NO: 4773649 - DNA, 25 bp, Homo sapien
ctaagtaggctttgcttggtgtcat

SEQ ID NO: 4773650 - DNA, 25 bp, Homo sapien
gagatctaaactaagtaggctttgc

SEQ ID NO: 4773651 - DNA, 25 bp, Homo sapien
aagaaaggacagaagggaatgttga

SEQ ID NO: 4773652 - DNA, 25 bp, Homo sapien
aacaaagaaaggacagaagggaatg

SEQ ID NO: 4773653 - DNA, 25 bp, Homo sapien
gaaacaaaatcagagctttctttaa

SEQ ID NO: 4773654 - DNA, 25 bp, Homo sapien
aatgaaacaaaatcagagctttctt

SEQ ID NO: 4773655 - DNA, 25 bp, Homo sapien
ttacgctggcaaattagttgtgtac

SEQ ID NO: 4773656 - DNA, 25 bp, Homo sapien
ctgttacgctggcaaattagttgtg

SEQ ID NO: 4773657 - DNA, 25 bp, Homo sapien
acgctggcaaattagttgtgtactt

SEQ ID NO: 4773658 - DNA, 25 bp, Homo sapien
tgttacgctggcaaattagttgtgt

SEQ ID NO: 4773659 - DNA, 25 bp, Homo sapien
gaagtaactccattaataccaccat

SEQ ID NO: 4773660 - DNA, 25 bp, Homo sapien
acagaagtaactccattaataccac

SEQ ID NO: 4773661 - DNA, 25 bp, Homo sapien
gagaaacagaagtaactccattaat

SEQ ID NO: 4773662 - DNA, 25 bp, Homo sapien
gaaacagaagtaactccattaatac

SEQ ID NO: 4773663 - DNA, 25 bp, Homo sapien
gctttgaaggctcttggtcttgttt

SEQ ID NO: 4773664 - DNA, 25 bp, Homo sapien
gcagaaattaagtatagcctactta

SEQ ID NO: 4773665 - DNA, 25 bp, Homo sapien
tgaaggctcttggtcttgtttaacc

SEQ ID NO: 4773666 - DNA, 25 bp, Homo sapien
aagtatagcctacttactaagggct

SEQ ID NO: 4773667 - DNA, 25 bp, Homo sapien
ctagaattcccaagactataggccc

SEQ ID NO: 4773668 - DNA, 25 bp, Homo sapien
cagagggtgcaatggacaccatgag

SEQ ID NO: 4773669 - DNA, 25 bp, Homo sapien
tcctgtcaagaggtgatgcttcctg

SEQ ID NO: 4773670 - DNA, 25 bp, Homo sapien
ttcctggaaggcatcagctgtagta

SEQ ID NO: 4773671 - DNA, 25 bp, Homo sapien
ctgctttacgttatgaatggcagtt

SEQ ID NO: 4773672 - DNA, 25 bp, Homo sapien
tgctttacgttatgaatggcagtta

SEQ ID NO: 4773673 - DNA, 25 bp, Homo sapien
tctgctttacgttatgaatggcagt

SEQ ID NO: 4773674 - DNA, 25 bp, Homo sapien
gctttacgttatgaatggcagttac

SEQ ID NO: 4773675 - DNA, 25 bp, Homo sapien
caagacagtctgattgggtcgtctt

SEQ ID NO: 4773676 - DNA, 25 bp, Homo sapien
tggtggtcggattctcaatgtgaag

SEQ ID NO: 4773677 - DNA, 25 bp, Homo sapien
ggtcatgtgtccatccttggtctca

SEQ ID NO: 4773678 - DNA, 25 bp, Homo sapien
taagcaacttcccagactggtggtc

SEQ ID NO: 4773679 - DNA, 25 bp, Homo sapien
tcaccagcatgctagctggaagagc

SEQ ID NO: 4773680 - DNA, 25 bp, Homo sapien
tctgtttatggtggtatgccatttg

SEQ ID NO: 4773681 - DNA, 25 bp, Homo sapien
agctgtgccatcatctgtttatggt

SEQ ID NO: 4773682 - DNA, 25 bp, Homo sapien
ccagcatgctagctggaagagctgt

SEQ ID NO: 4773683 - DNA, 25 bp, Homo sapien
ttataggcgcaagccaccaagcgca

SEQ ID NO: 4773684 - DNA, 25 bp, Homo sapien
attataggcgcaagccaccaagcgc

SEQ ID NO: 4773685 - DNA, 25 bp, Homo sapien
ataggcgcaagccaccaagcgcagc

SEQ ID NO: 4773686 - DNA, 25 bp, Homo sapien
ggcgcaagccaccaagcgcagctaa

SEQ ID NO: 4773687 - DNA, 25 bp, Homo sapien
ttctatacccaaactattcatcaag

SEQ ID NO: 4773688 - DNA, 25 bp, Homo sapien
tgaaagcatttaacgtaagactgtg

SEQ ID NO: 4773689 - DNA, 25 bp, Homo sapien
aacacattgttaaacatgaaagtcc

SEQ ID NO: 4773690 - DNA, 25 bp, Homo sapien
caagtttgaacatacatcattggct

SEQ ID NO: 4773691 - DNA, 25 bp, Homo sapien
gattcagcaatctgtggtgccagca

SEQ ID NO: 4773692 - DNA, 25 bp, Homo sapien
gctgcacccaggctgtcaagaccag

SEQ ID NO: 4773693 - DNA, 25 bp, Homo sapien
tcagcatggatatgcagcgttaggc

SEQ ID NO: 4773694 - DNA, 25 bp, Homo sapien
ggctgtcaagaccagccatgctggg

SEQ ID NO: 4773695 - DNA, 25 bp, Homo sapien
ccacagtgccaagtccaacagacat

SEQ ID NO: 4773696 - DNA, 25 bp, Homo sapien
caagacacccacagtgccaagtcca

SEQ ID NO: 4773697 - DNA, 25 bp, Homo sapien
aagacacccacagtgccaagtccaa

SEQ ID NO: 4773698 - DNA, 25 bp, Homo sapien
cacccacagtgccaagtccaacaga

SEQ ID NO: 4773699 - DNA, 25 bp, Homo sapien
tttgccagcatcttatgccacggtg

SEQ ID NO: 4773700 - DNA, 25 bp, Homo sapien
tggatatccaattggcccagtgcca

SEQ ID NO: 4773701 - DNA, 25 bp, Homo sapien
ccagttactgaggagtctagggtaa

SEQ ID NO: 4773702 - DNA, 25 bp, Homo sapien
ttggttctcagacaactggatattc

SEQ ID NO: 4773703 - DNA, 25 bp, Homo sapien
atgccgtgtacctctcggaggggcc

SEQ ID NO: 4773704 - DNA, 25 bp, Homo sapien
ccagatgccgtgtacctctcggagg

SEQ ID NO: 4773705 - DNA, 25 bp, Homo sapien
agatgccgtgtacctctcggagggg

SEQ ID NO: 4773706 - DNA, 25 bp, Homo sapien
tgccgtgtacctctcggaggggccc

SEQ ID NO: 4773707 - DNA, 25 bp, Homo sapien
tggaatcgaagctgctctggaaagc

SEQ ID NO: 4773708 - DNA, 25 bp, Homo sapien
tcccatgcagctagtcgggaggagt

SEQ ID NO: 4773709 - DNA, 25 bp, Homo sapien
ggaatatgcctccagccgtaggtga

SEQ ID NO: 4773710 - DNA, 25 bp, Homo sapien
gataaaatcgctttgtgcagaggag

SEQ ID NO: 4773711 - DNA, 25 bp, Homo sapien
tcgtcccggatgtgccttaagaacc

SEQ ID NO: 4773712 - DNA, 25 bp, Homo sapien
taagaaccgtgacctcatcagtcgc

SEQ ID NO: 4773713 - DNA, 25 bp, Homo sapien
taagtgctatatcgatcgtcccgga

SEQ ID NO: 4773714 - DNA, 25 bp, Homo sapien
tgggtcaagacagtactcaacggcc

SEQ ID NO: 4773715 - DNA, 25 bp, Homo sapien
accgagtcgacatcacggcgttgtc

SEQ ID NO: 4773716 - DNA, 25 bp, Homo sapien
gacatcacggcgttgtctttggcac

SEQ ID NO: 4773717 - DNA, 25 bp, Homo sapien
cgagtcgacatcacggcgttgtctt

SEQ ID NO: 4773718 - DNA, 25 bp, Homo sapien
catcacggcgttgtctttggcacgt

SEQ ID NO: 4773719 - DNA, 25 bp, Homo sapien
ctcgatgaagggacgacaggccttt

SEQ ID NO: 4773720 - DNA, 25 bp, Homo sapien
gaagggacgacaggcctttgatcag

SEQ ID NO: 4773721 - DNA, 25 bp, Homo sapien
tcgatgaagggacgacaggcctttg

SEQ ID NO: 4773722 - DNA, 25 bp, Homo sapien
gatgaagggacgacaggcctttgat

SEQ ID NO: 4773723 - DNA, 25 bp, Homo sapien
ttggcagtcatggcgacgcggtact

SEQ ID NO: 4773724 - DNA, 25 bp, Homo sapien
ggcagtcatggcgacgcggtactgc

SEQ ID NO: 4773725 - DNA, 25 bp, Homo sapien
cagtcatggcgacgcggtactgctg

SEQ ID NO: 4773726 - DNA, 25 bp, Homo sapien
ccttggcagtcatggcgacgcggta

SEQ ID NO: 4773727 - DNA, 25 bp, Homo sapien
gcttagaacgacattccctccggaa

SEQ ID NO: 4773728 - DNA, 25 bp, Homo sapien
tgtcaatggcaaggcagggactcaa

SEQ ID NO: 4773729 - DNA, 25 bp, Homo sapien
tctcacggcaagcagtgtgggaccc

SEQ ID NO: 4773730 - DNA, 25 bp, Homo sapien
gagtatcactcgacacctgcaagga

SEQ ID NO: 4773731 - DNA, 25 bp, Homo sapien
cagtctctcaggcaggtaagactac

SEQ ID NO: 4773732 - DNA, 25 bp, Homo sapien
gccgttgttaatccacctcttccag

SEQ ID NO: 4773733 - DNA, 25 bp, Homo sapien
ccactgaacccagccgttgttaatc

SEQ ID NO: 4773734 - DNA, 25 bp, Homo sapien
tctctcaggcaggtaagactacagg

SEQ ID NO: 4773735 - DNA, 25 bp, Homo sapien
taacgctacaccatgaaaatcccag

SEQ ID NO: 4773736 - DNA, 25 bp, Homo sapien
tcacagactacgattacatataaag

SEQ ID NO: 4773737 - DNA, 25 bp, Homo sapien
tcgtgaaattaatataagacctctc

SEQ ID NO: 4773738 - DNA, 25 bp, Homo sapien
gatatgcaaaaggtcgagaacagcc

SEQ ID NO: 4773739 - DNA, 25 bp, Homo sapien
tagaactactgaaatggggccaggt

SEQ ID NO: 4773740 - DNA, 25 bp, Homo sapien
aatagacaagccacaaggaactaga

SEQ ID NO: 4773741 - DNA, 25 bp, Homo sapien
ttaaagatagaactactgaaatggg

SEQ ID NO: 4773742 - DNA, 25 bp, Homo sapien
ataacttcataaattgcttaaagaa

SEQ ID NO: 4773743 - DNA, 25 bp, Homo sapien
ttataggcgtaagctgccgtacccg

SEQ ID NO: 4773744 - DNA, 25 bp, Homo sapien
aacaatatgagtgcaagaacttttg

SEQ ID NO: 4773745 - DNA, 25 bp, Homo sapien
tgtgtaggaaggaatgtcctcagcc

SEQ ID NO: 4773746 - DNA, 25 bp, Homo sapien
taccctcttcaggttcaattaccag

SEQ ID NO: 4773747 - DNA, 25 bp, Homo sapien
tgctaagaagctaaggatcacacag

SEQ ID NO: 4773748 - DNA, 25 bp, Homo sapien
catgcagatgggttgcagatcggcc

SEQ ID NO: 4773749 - DNA, 25 bp, Homo sapien
caagtttttggatgggtctgcccac

SEQ ID NO: 4773750 - DNA, 25 bp, Homo sapien
tcttagtggcaaactcctgggtcct

SEQ ID NO: 4773751 - DNA, 25 bp, Homo sapien
ggtaaaatgcttcatcataaggccc

SEQ ID NO: 4773752 - DNA, 25 bp, Homo sapien
cataaggcccatctatttgtaaggt

SEQ ID NO: 4773753 - DNA, 25 bp, Homo sapien
ttcgttagcgcgaaggccactgtcc

SEQ ID NO: 4773754 - DNA, 25 bp, Homo sapien
ggtcaagcagcttctggtaaaatgc

SEQ ID NO: 4773755 - DNA, 25 bp, Homo sapien
ctgcgtcagagatgcaaggaagacc

SEQ ID NO: 4773756 - DNA, 25 bp, Homo sapien
tgacaaagccgcacggaggttgttt

SEQ ID NO: 4773757 - DNA, 25 bp, Homo sapien
tgttcatgacaagtagcatcctgcg

SEQ ID NO: 4773758 - DNA, 25 bp, Homo sapien
aagaccagaaccagcgagccttgaa

SEQ ID NO: 4773759 - DNA, 25 bp, Homo sapien
gaattagcaaggtcacagacgtgct

SEQ ID NO: 4773760 - DNA, 25 bp, Homo sapien
tctagaaacaagtgaccctgttcct

SEQ ID NO: 4773761 - DNA, 25 bp, Homo sapien
ctttacaaggcactacattccagag

SEQ ID NO: 4773762 - DNA, 25 bp, Homo sapien
gggtttcgaattagcaaggtcacag

SEQ ID NO: 4773763 - DNA, 25 bp, Homo sapien
gtagaggccttcgatgtccagcagg

SEQ ID NO: 4773764 - DNA, 25 bp, Homo sapien
ttgtacagagggtagaggccttcga

SEQ ID NO: 4773765 - DNA, 25 bp, Homo sapien
aaactcttccaggtatcgctcaacc

SEQ ID NO: 4773766 - DNA, 25 bp, Homo sapien
gctcaacccggttgtacagagggta

SEQ ID NO: 4773767 - DNA, 25 bp, Homo sapien
ctggagggttttgtacagaagacag

SEQ ID NO: 4773768 - DNA, 25 bp, Homo sapien
ggagggttttgtacagaagacagcc

SEQ ID NO: 4773769 - DNA, 25 bp, Homo sapien
agggttttgtacagaagacagccct

SEQ ID NO: 4773770 - DNA, 25 bp, Homo sapien
gagggttttgtacagaagacagccc

SEQ ID NO: 4773771 - DNA, 25 bp, Homo sapien
tcaaagaacgtggagggagacacag

SEQ ID NO: 4773772 - DNA, 25 bp, Homo sapien
gcaaggactgcaccctggactggca

SEQ ID NO: 4773773 - DNA, 25 bp, Homo sapien
gcgcagaccgcagggctcatcctgg

SEQ ID NO: 4773774 - DNA, 25 bp, Homo sapien
gccatacgggcatcaccacaggcaa

SEQ ID NO: 4773775 - DNA, 25 bp, Homo sapien
tagattccaccacaacagccctgga

SEQ ID NO: 4773776 - DNA, 25 bp, Homo sapien
aaatctgcaagaccactaaaggagg

SEQ ID NO: 4773777 - DNA, 25 bp, Homo sapien
agctgcagatttcactaggacccgg

SEQ ID NO: 4773778 - DNA, 25 bp, Homo sapien
taaggacagacgagatgacgctccc

SEQ ID NO: 4773779 - DNA, 25 bp, Homo sapien
tcctgtctgcaaggaaggcgtcccg

SEQ ID NO: 4773780 - DNA, 25 bp, Homo sapien
acgggcagcgtcagctcatgagatg

SEQ ID NO: 4773781 - DNA, 25 bp, Homo sapien
tatgggctgccaagaatcacgggca

SEQ ID NO: 4773782 - DNA, 25 bp, Homo sapien
ggtttctggttgcacacaagcagga

SEQ ID NO: 4773783 - DNA, 25 bp, Homo sapien
tcagcagcacccgtgtgatcacgtg

SEQ ID NO: 4773784 - DNA, 25 bp, Homo sapien
ctgatcacagcccttgtgcagtggg

SEQ ID NO: 4773785 - DNA, 25 bp, Homo sapien
tctttgcagccgtaaatcagctcac

SEQ ID NO: 4773786 - DNA, 25 bp, Homo sapien
tggtgtgcaagctcgctccagtcag

SEQ ID NO: 4773787 - DNA, 25 bp, Homo sapien
ggtggggctttggtcgagcacccca

SEQ ID NO: 4773788 - DNA, 25 bp, Homo sapien
tggggctttggtcgagcaccccagg

SEQ ID NO: 4773789 - DNA, 25 bp, Homo sapien
ggtcatgagcaacccagggtcactc

SEQ ID NO: 4773790 - DNA, 25 bp, Homo sapien
agggtcatgagcaacccagggtcac

SEQ ID NO: 4773791 - DNA, 25 bp, Homo sapien
aaatatcttcaagttgttctgtgcc

SEQ ID NO: 4773792 - DNA, 25 bp, Homo sapien
ggcaaagtgcattctctgtttgttt

SEQ ID NO: 4773793 - DNA, 25 bp, Homo sapien
tcctgcagcaaactcttcaaggcaa

SEQ ID NO: 4773794 - DNA, 25 bp, Homo sapien
aatatcttcaagttgttctgtgcct

SEQ ID NO: 4773795 - DNA, 25 bp, Homo sapien
cagtatttgctgatctgcttccact

SEQ ID NO: 4773796 - DNA, 25 bp, Homo sapien
cctgagtagagatcaaggggacagt

SEQ ID NO: 4773797 - DNA, 25 bp, Homo sapien
agatcaaggggacagtatttgctga

SEQ ID NO: 4773798 - DNA, 25 bp, Homo sapien
acagtatttgctgatctgcttccac

SEQ ID NO: 4773799 - DNA, 25 bp, Homo sapien
ggcgctggtgactgcactgtgccaa

SEQ ID NO: 4773800 - DNA, 25 bp, Homo sapien
tgactggcgctggtgactgcactgt

SEQ ID NO: 4773801 - DNA, 25 bp, Homo sapien
ggagggcatgaggtgactggcgctg

SEQ ID NO: 4773802 - DNA, 25 bp, Homo sapien
aggtgactggcgctggtgactgcac

SEQ ID NO: 4773803 - DNA, 25 bp, Homo sapien
cactaagtggcggagggagccactt

SEQ ID NO: 4773804 - DNA, 25 bp, Homo sapien
tccattcaaggaaaccttggcccca

SEQ ID NO: 4773805 - DNA, 25 bp, Homo sapien
tgacttccattcaaggaaaccttgg

SEQ ID NO: 4773806 - DNA, 25 bp, Homo sapien
aggtgcacatcactaagtggcggag

SEQ ID NO: 4773807 - DNA, 25 bp, Homo sapien
gtgcatgcagtatcgacagacctta

SEQ ID NO: 4773808 - DNA, 25 bp, Homo sapien
ggtgctggtgcatgcagtatcgaca

SEQ ID NO: 4773809 - DNA, 25 bp, Homo sapien
gcagtatcgacagaccttatgcttc

SEQ ID NO: 4773810 - DNA, 25 bp, Homo sapien
ttgaggtgctggtgcatgcagtatc

SEQ ID NO: 4773811 - DNA, 25 bp, Homo sapien
tggcaggaaccagaacgcaggtggg

SEQ ID NO: 4773812 - DNA, 25 bp, Homo sapien
caggaatgagcctaaacctgggatc

SEQ ID NO: 4773813 - DNA, 25 bp, Homo sapien
aaacctgggatctgggagccatggc

SEQ ID NO: 4773814 - DNA, 25 bp, Homo sapien
gagcctaaacctgggatctgggagc

SEQ ID NO: 4773815 - DNA, 25 bp, Homo sapien
caccatctgcccctcgacaggtcac

SEQ ID NO: 4773816 - DNA, 25 bp, Homo sapien
acccacaccatctgcccctcgacag

SEQ ID NO: 4773817 - DNA, 25 bp, Homo sapien
cacaccatctgcccctcgacaggtc

SEQ ID NO: 4773818 - DNA, 25 bp, Homo sapien
cctttacccacaccatctgcccctc

SEQ ID NO: 4773819 - DNA, 25 bp, Homo sapien
gcacatagcgtaaccactgagagta

SEQ ID NO: 4773820 - DNA, 25 bp, Homo sapien
ggagtctggttaaattaggaaggca

SEQ ID NO: 4773821 - DNA, 25 bp, Homo sapien
tctgcaaagcggtaggtttggagtc

SEQ ID NO: 4773822 - DNA, 25 bp, Homo sapien
agaatcggccggtgctctgcaaagc

SEQ ID NO: 4773823 - DNA, 25 bp, Homo sapien
agattgtatctttaaacaaagctgt

SEQ ID NO: 4773824 - DNA, 25 bp, Homo sapien
agctgtttcacaaactctaaaggta

SEQ ID NO: 4773825 - DNA, 25 bp, Homo sapien
actctaaaggtagctgaacgacctc

SEQ ID NO: 4773826 - DNA, 25 bp, Homo sapien
tatctttaaacaaagctgtttcaca

SEQ ID NO: 4773827 - DNA, 25 bp, Homo sapien
ccagtatgtaaggagcaacagtgga

SEQ ID NO: 4773828 - DNA, 25 bp, Homo sapien
tgagccttcaggttcctccagtatg

SEQ ID NO: 4773829 - DNA, 25 bp, Homo sapien
atttggcccacagcagcgaggtgga

SEQ ID NO: 4773830 - DNA, 25 bp, Homo sapien
gcaacagtggaagaacaaggcaagc

SEQ ID NO: 4773831 - DNA, 25 bp, Homo sapien
tctgttcttccctcacgtggccctg

SEQ ID NO: 4773832 - DNA, 25 bp, Homo sapien
gttcttccctcacgtggccctgtgt

SEQ ID NO: 4773833 - DNA, 25 bp, Homo sapien
tgttcttccctcacgtggccctgtg

SEQ ID NO: 4773834 - DNA, 25 bp, Homo sapien
tcttccctcacgtggccctgtgtgg

SEQ ID NO: 4773835 - DNA, 25 bp, Homo sapien
caaagtccactatgttctgcaggtg

SEQ ID NO: 4773836 - DNA, 25 bp, Homo sapien
aggaaacttcagaaaccgcagcacg

SEQ ID NO: 4773837 - DNA, 25 bp, Homo sapien
aaacttcagaaaccgcagcacgacg

SEQ ID NO: 4773838 - DNA, 25 bp, Homo sapien
tcagaaaccgcagcacgacgcagcg

SEQ ID NO: 4773839 - DNA, 25 bp, Homo sapien
cttcagaaaccgcagcacgacgcag

SEQ ID NO: 4773840 - DNA, 25 bp, Homo sapien
ctgccagactgcatgcacagagctc

SEQ ID NO: 4773841 - DNA, 25 bp, Homo sapien
agactgcatgcacagagctctgcgg

SEQ ID NO: 4773842 - DNA, 25 bp, Homo sapien
ctgcatgcacagagctctgcggcat

SEQ ID NO: 4773843 - DNA, 25 bp, Homo sapien
tgccagactgcatgcacagagctct

SEQ ID NO: 4773844 - DNA, 25 bp, Homo sapien
gggtctgtcagtcaccaggggcagg

SEQ ID NO: 4773845 - DNA, 25 bp, Homo sapien
cccggggtctgtcagtcaccagggg

SEQ ID NO: 4773846 - DNA, 25 bp, Homo sapien
tgcccggggtctgtcagtcaccagg

SEQ ID NO: 4773847 - DNA, 25 bp, Homo sapien
cggggtctgtcagtcaccaggggca

SEQ ID NO: 4773848 - DNA, 25 bp, Homo sapien
aaatgagaatcatcctgggccgtct

SEQ ID NO: 4773849 - DNA, 25 bp, Homo sapien
ggcagaatgcaaactgacaggcaaa

SEQ ID NO: 4773850 - DNA, 25 bp, Homo sapien
gggaaagttcaggtgcacaaccatc

SEQ ID NO: 4773851 - DNA, 25 bp, Homo sapien
ccatcccaaacagaggcagaatgca

SEQ ID NO: 4773852 - DNA, 25 bp, Homo sapien
ggtgatgaggaacccaagcggtagg

SEQ ID NO: 4773853 - DNA, 25 bp, Homo sapien
cccaagcggtagggggggatgctgg

SEQ ID NO: 4773854 - DNA, 25 bp, Homo sapien
tagagaggggatactggggtgatga

SEQ ID NO: 4773855 - DNA, 25 bp, Homo sapien
ggggtgatgaggaacccaagcggta

SEQ ID NO: 4773856 - DNA, 25 bp, Homo sapien
caggctcttattgccctctccgtgg

SEQ ID NO: 4773857 - DNA, 25 bp, Homo sapien
gctcttattgccctctccgtggtac

SEQ ID NO: 4773858 - DNA, 25 bp, Homo sapien
accaggctcttattgccctctccgt

SEQ ID NO: 4773859 - DNA, 25 bp, Homo sapien
ccaccaggctcttattgccctctcc

SEQ ID NO: 4773860 - DNA, 25 bp, Homo sapien
cctggcgcctcgcgggctaggactc

SEQ ID NO: 4773861 - DNA, 25 bp, Homo sapien
tggcgcctcgcgggctaggactcgg

SEQ ID NO: 4773862 - DNA, 25 bp, Homo sapien
cctcgcgggctaggactcggggacg

SEQ ID NO: 4773863 - DNA, 25 bp, Homo sapien
gcgggctaggactcggggacgcgag

SEQ ID NO: 4773864 - DNA, 25 bp, Homo sapien
ccgcccgcctcgctgggaaccagcc

SEQ ID NO: 4773865 - DNA, 25 bp, Homo sapien
cgcccgcctcgctgggaaccagccg

SEQ ID NO: 4773866 - DNA, 25 bp, Homo sapien
gcaattccgggttcgtgacactttc

SEQ ID NO: 4773867 - DNA, 25 bp, Homo sapien
cgcctgccatgacggagtcgggcaa

SEQ ID NO: 4773868 - DNA, 25 bp, Homo sapien
ccgccgcggcgactagcaagctgtg

SEQ ID NO: 4773869 - DNA, 25 bp, Homo sapien
ctagcaagctgtggccgccggaagc

SEQ ID NO: 4773870 - DNA, 25 bp, Homo sapien
gagcgactcatttccggaacgcggt

SEQ ID NO: 4773871 - DNA, 25 bp, Homo sapien
tcttaggtactggtagagcgactca

SEQ ID NO: 4773872 - DNA, 25 bp, Homo sapien
cggaagagaagcttccggcctcggc

SEQ ID NO: 4773873 - DNA, 25 bp, Homo sapien
tttcggcgcccggtagtgaccggca

SEQ ID NO: 4773874 - DNA, 25 bp, Homo sapien
aagaacagagccctgatgcagcagc

SEQ ID NO: 4773875 - DNA, 25 bp, Homo sapien
ctgtctgatcagaaacaagaacaga

SEQ ID NO: 4773876 - DNA, 25 bp, Homo sapien
gatgcagcagcctcaggatgcccag

SEQ ID NO: 4773877 - DNA, 25 bp, Homo sapien
tcaggatgcccagccagatggaact

SEQ ID NO: 4773878 - DNA, 25 bp, Homo sapien
gtcagagtgtcagctctccatcctg

SEQ ID NO: 4773879 - DNA, 25 bp, Homo sapien
tcctggggtcttgtcagagtgtcag

SEQ ID NO: 4773880 - DNA, 25 bp, Homo sapien
tcttgtcagagtgtcagctctccat

SEQ ID NO: 4773881 - DNA, 25 bp, Homo sapien
gggtcttgtcagagtgtcagctctc

SEQ ID NO: 4773882 - DNA, 25 bp, Homo sapien
actggctctcgcaaagtgtccttct

SEQ ID NO: 4773883 - DNA, 25 bp, Homo sapien
tccactggctctcgcaaagtgtcct

SEQ ID NO: 4773884 - DNA, 25 bp, Homo sapien
cactggctctcgcaaagtgtccttc

SEQ ID NO: 4773885 - DNA, 25 bp, Homo sapien
tttccactggctctcgcaaagtgtc

SEQ ID NO: 4773886 - DNA, 25 bp, Homo sapien
tttttctgatcgttttccttcactg

SEQ ID NO: 4773887 - DNA, 25 bp, Homo sapien
cttcactgtcttggctatcttggct

SEQ ID NO: 4773888 - DNA, 25 bp, Homo sapien
tccttcactgtcttggctatcttgg

SEQ ID NO: 4773889 - DNA, 25 bp, Homo sapien
tctgatcgttttccttcactgtctt

SEQ ID NO: 4773890 - DNA, 25 bp, Homo sapien
ttttgccacggtaacatttgtgagc

SEQ ID NO: 4773891 - DNA, 25 bp, Homo sapien
taaaaggcttagataacatatactg

SEQ ID NO: 4773892 - DNA, 25 bp, Homo sapien
gataacatatactgggcccctcttc

SEQ ID NO: 4773893 - DNA, 25 bp, Homo sapien
gtatgtgaacaaaggaataacttcc

SEQ ID NO: 4773894 - DNA, 25 bp, Homo sapien
ggtgccaaaaactacgggatgcttc

SEQ ID NO: 4773895 - DNA, 25 bp, Homo sapien
aaactacgggatgcttccggggcag

SEQ ID NO: 4773896 - DNA, 25 bp, Homo sapien
tgccaaaaactacgggatgcttccg

SEQ ID NO: 4773897 - DNA, 25 bp, Homo sapien
caggtgccaaaaactacgggatgct

SEQ ID NO: 4773898 - DNA, 25 bp, Homo sapien
cctactagtaagcccatcaaaagct

SEQ ID NO: 4773899 - DNA, 25 bp, Homo sapien
gagcccttaacatgttattcatact

SEQ ID NO: 4773900 - DNA, 25 bp, Homo sapien
tccttgacaatgtccagcctactag

SEQ ID NO: 4773901 - DNA, 25 bp, Homo sapien
gctttgtttactgtttggcatagct

SEQ ID NO: 4773902 - DNA, 25 bp, Homo sapien
tgtaataattgctccatagaatgag

SEQ ID NO: 4773903 - DNA, 25 bp, Homo sapien
tctgttacattgagtttgccattat

SEQ ID NO: 4773904 - DNA, 25 bp, Homo sapien
atttacagtcatatggaaatattgc

SEQ ID NO: 4773905 - DNA, 25 bp, Homo sapien
tcttgtggtgtctttaggtagcttt

SEQ ID NO: 4773906 - DNA, 25 bp, Homo sapien
caagctaaaggtttgtagatttgtt

SEQ ID NO: 4773907 - DNA, 25 bp, Homo sapien
taggctgtctgcttatactgttgat

SEQ ID NO: 4773908 - DNA, 25 bp, Homo sapien
ggctgtctgcttatactgttgattg

SEQ ID NO: 4773909 - DNA, 25 bp, Homo sapien
gctgtctgcttatactgttgattgt

SEQ ID NO: 4773910 - DNA, 25 bp, Homo sapien
tccttaaatgtgtggtagatgccag

SEQ ID NO: 4773911 - DNA, 25 bp, Homo sapien
tatcttctggaacagactgtagagg

SEQ ID NO: 4773912 - DNA, 25 bp, Homo sapien
tggtaaacccatgtgggccttgcac

SEQ ID NO: 4773913 - DNA, 25 bp, Homo sapien
tgtggtagaattcactggtaaaccc

SEQ ID NO: 4773914 - DNA, 25 bp, Homo sapien
aacagtctagataaaggtttgccat

SEQ ID NO: 4773915 - DNA, 25 bp, Homo sapien
gtttttcttgaacagtctagataaa

SEQ ID NO: 4773916 - DNA, 25 bp, Homo sapien
cttgaacagtctagataaaggtttg

SEQ ID NO: 4773917 - DNA, 25 bp, Homo sapien
ccccactctcattcctgatttagta

SEQ ID NO: 4773918 - DNA, 25 bp, Homo sapien
attattctttattggtcctaccaat

SEQ ID NO: 4773919 - DNA, 25 bp, Homo sapien
ttattctttattggtcctaccaatg

SEQ ID NO: 4773920 - DNA, 25 bp, Homo sapien
tattattctttattggtcctaccaa

SEQ ID NO: 4773921 - DNA, 25 bp, Homo sapien
taaagctacacgctatggagcacac

SEQ ID NO: 4773922 - DNA, 25 bp, Homo sapien
tctctacgcgaggaattaaggaagc

SEQ ID NO: 4773923 - DNA, 25 bp, Homo sapien
taaaggctgctgaaccacagcgtgg

SEQ ID NO: 4773924 - DNA, 25 bp, Homo sapien
cttaactgatgaaggcactactggc

SEQ ID NO: 4773925 - DNA, 25 bp, Homo sapien
gttaagattgacctagcaccgccgt

SEQ ID NO: 4773926 - DNA, 25 bp, Homo sapien
ccaagtacaaaaggacgggctctgc

SEQ ID NO: 4773927 - DNA, 25 bp, Homo sapien
aattgaagctctccacgtgctggga

SEQ ID NO: 4773928 - DNA, 25 bp, Homo sapien
catacatgggcgtgtcctggagtct

SEQ ID NO: 4773929 - DNA, 25 bp, Homo sapien
ccctcggccctgtcgctggcacagg

SEQ ID NO: 4773930 - DNA, 25 bp, Homo sapien
ttctcgctgcagaacacctggttgg

SEQ ID NO: 4773931 - DNA, 25 bp, Homo sapien
tctcgctgcagaacacctggttggc

SEQ ID NO: 4773932 - DNA, 25 bp, Homo sapien
tgcttctcgctgcagaacacctggt

SEQ ID NO: 4773933 - DNA, 25 bp, Homo sapien
acgccgggtctgctcatggtccagc

SEQ ID NO: 4773934 - DNA, 25 bp, Homo sapien
gagttcagcgtcttcttctcgtcct

SEQ ID NO: 4773935 - DNA, 25 bp, Homo sapien
tggccatgcgcagcagcgagttcag

SEQ ID NO: 4773936 - DNA, 25 bp, Homo sapien
tccagctgtgtaatgtactcgtcac

SEQ ID NO: 4773937 - DNA, 25 bp, Homo sapien
ctggtggcaaacatagcacgcagcg

SEQ ID NO: 4773938 - DNA, 25 bp, Homo sapien
gaaggtggctgcgtcctccttgagg

SEQ ID NO: 4773939 - DNA, 25 bp, Homo sapien
agcttcatcatggtctcggtaacca

SEQ ID NO: 4773940 - DNA, 25 bp, Homo sapien
gggccttgagctcattgcgcagctt

SEQ ID NO: 4773941 - DNA, 25 bp, Homo sapien
tagtccagcatgacacggttgggtg

SEQ ID NO: 4773942 - DNA, 25 bp, Homo sapien
cacacgtggtggtagagattggcca

SEQ ID NO: 4773943 - DNA, 25 bp, Homo sapien
tgttggccttgagcacagtgcgcag

SEQ ID NO: 4773944 - DNA, 25 bp, Homo sapien
tgtagatgttcatgggctcccggcg

SEQ ID NO: 4773945 - DNA, 25 bp, Homo sapien
tgtagtgtgacagctccttgcgcag

SEQ ID NO: 4773946 - DNA, 25 bp, Homo sapien
gctctgagatctccttgaggcggat

SEQ ID NO: 4773947 - DNA, 25 bp, Homo sapien
aggccgccgtgctcaaagccattga

SEQ ID NO: 4773948 - DNA, 25 bp, Homo sapien
tgttcgcgctccgtcttcagggtct

SEQ ID NO: 4773949 - DNA, 25 bp, Homo sapien
tcctccagttccgagtagtcctgca

SEQ ID NO: 4773950 - DNA, 25 bp, Homo sapien
ctgcagcagacgagcttcccggaat

SEQ ID NO: 4773951 - DNA, 25 bp, Homo sapien
ctccttgatgtcatcccgcaggcgg

SEQ ID NO: 4773952 - DNA, 25 bp, Homo sapien
cgctggatctccacattctggttga

SEQ ID NO: 4773953 - DNA, 25 bp, Homo sapien
tgctgtagtaggacgcaaacactgt

SEQ ID NO: 4773954 - DNA, 25 bp, Homo sapien
tagtaggacgcaaacactgtgcttc

SEQ ID NO: 4773955 - DNA, 25 bp, Homo sapien
taggacgcaaacactgtgcttccat

SEQ ID NO: 4773956 - DNA, 25 bp, Homo sapien
tgtagtaggacgcaaacactgtgct

SEQ ID NO: 4773957 - DNA, 25 bp, Homo sapien
cattctccgactgcgtgttggtgag

SEQ ID NO: 4773958 - DNA, 25 bp, Homo sapien
tccttggaggccgactcctggatca

SEQ ID NO: 4773959 - DNA, 25 bp, Homo sapien
ttggtgaggacattgcgcaactgct

SEQ ID NO: 4773960 - DNA, 25 bp, Homo sapien
tagcaccttccgcacgtagtactgc

SEQ ID NO: 4773961 - DNA, 25 bp, Homo sapien
agccagcctcccatcgtgtacaccc

SEQ ID NO: 4773962 - DNA, 25 bp, Homo sapien
tcgtgtacaccccaggcgagtggcc

SEQ ID NO: 4773963 - DNA, 25 bp, Homo sapien
tgtcatgtccatgccccaaaatcca

SEQ ID NO: 4773964 - DNA, 25 bp, Homo sapien
ctgagagtcgacagctgtgtcatgt

SEQ ID NO: 4773965 - DNA, 25 bp, Homo sapien
gaagatgcatttgagttacccactc

SEQ ID NO: 4773966 - DNA, 25 bp, Homo sapien
gattttgtctagaaaatgcaccaag

SEQ ID NO: 4773967 - DNA, 25 bp, Homo sapien
aatcctcccaaattaaactgttgag

SEQ ID NO: 4773968 - DNA, 25 bp, Homo sapien
gagaaaaaagcgtactgctaaattc

SEQ ID NO: 4773969 - DNA, 25 bp, Homo sapien
tccaagaacggtgtagaggcagtgc

SEQ ID NO: 4773970 - DNA, 25 bp, Homo sapien
acccagatccaagaacggtgtagag

SEQ ID NO: 4773971 - DNA, 25 bp, Homo sapien
tcagcccagtaatgacccagatcca

SEQ ID NO: 4773972 - DNA, 25 bp, Homo sapien
tgttcagcccagtaatgacccagat

SEQ ID NO: 4773973 - DNA, 25 bp, Homo sapien
agtgaaaggactggccctcctgctc

SEQ ID NO: 4773974 - DNA, 25 bp, Homo sapien
aaagcacgagtgaaaggactggccc

SEQ ID NO: 4773975 - DNA, 25 bp, Homo sapien
agcacgagtgaaaggactggccctc

SEQ ID NO: 4773976 - DNA, 25 bp, Homo sapien
cacgagtgaaaggactggccctcct

SEQ ID NO: 4773977 - DNA, 25 bp, Homo sapien
tcatcgccacaagtgtaggcaacag

SEQ ID NO: 4773978 - DNA, 25 bp, Homo sapien
gcatctctttcatcgccacaagtgt

SEQ ID NO: 4773979 - DNA, 25 bp, Homo sapien
gaagcaggtctgcatgctggtatgc

SEQ ID NO: 4773980 - DNA, 25 bp, Homo sapien
tgctttcttccaaagtccccgccag

SEQ ID NO: 4773981 - DNA, 25 bp, Homo sapien
cggggatcgctaggactcagggctg

SEQ ID NO: 4773982 - DNA, 25 bp, Homo sapien
cactgtagggctgtggtgcttgtca

SEQ ID NO: 4773983 - DNA, 25 bp, Homo sapien
cacacagggaacactgtagggctgt

SEQ ID NO: 4773984 - DNA, 25 bp, Homo sapien
tgtggatgcggggatcgctaggact

SEQ ID NO: 4773985 - DNA, 25 bp, Homo sapien
aaatctttcttacccccgatgtgtg

SEQ ID NO: 4773986 - DNA, 25 bp, Homo sapien
aaagcctgcatagtcctggccagcc

SEQ ID NO: 4773987 - DNA, 25 bp, Homo sapien
tcaaagcctgcatagtcctggccag

SEQ ID NO: 4773988 - DNA, 25 bp, Homo sapien
acccccgatgtgtgtaacagtttca

SEQ ID NO: 4773989 - DNA, 25 bp, Homo sapien
gtggccaggtccacgcctccacatg

SEQ ID NO: 4773990 - DNA, 25 bp, Homo sapien
ttggcatccccaaagacgagctgct

SEQ ID NO: 4773991 - DNA, 25 bp, Homo sapien
tgcctgccttgaatcccatggaggg

SEQ ID NO: 4773992 - DNA, 25 bp, Homo sapien
aaagcatgctcgcttggcatcccca

SEQ ID NO: 4773993 - DNA, 25 bp, Homo sapien
acgtttgtgtcagaatagcaaagac

SEQ ID NO: 4773994 - DNA, 25 bp, Homo sapien
ttcactgtgccaaaacgtttgtgtc

SEQ ID NO: 4773995 - DNA, 25 bp, Homo sapien
cgaaaatgccaagattcttcactgt

SEQ ID NO: 4773996 - DNA, 25 bp, Homo sapien
cctccagatacatgccacgaaaatg

SEQ ID NO: 4773997 - DNA, 25 bp, Homo sapien
gcatgcattgcagaaggtgccaata

SEQ ID NO: 4773998 - DNA, 25 bp, Homo sapien
cgccactggagcatgcattgcagaa

SEQ ID NO: 4773999 - DNA, 25 bp, Homo sapien
cttgtagctccagcgccactggagc

SEQ ID NO: 4774000 - DNA, 25 bp, Homo sapien
tccagcgccactggagcatgcattg

SEQ ID NO: 4774001 - DNA, 25 bp, Homo sapien
ggccgcctggatcttctcacgcgtg

SEQ ID NO: 4774002 - DNA, 25 bp, Homo sapien
tcgctgcggatagcctcatagtcca

SEQ ID NO: 4774003 - DNA, 25 bp, Homo sapien
ttctcacgcgtggtctcggccagct

SEQ ID NO: 4774004 - DNA, 25 bp, Homo sapien
ggtgcttctcctcgagcaccgccag

SEQ ID NO: 4774005 - DNA, 25 bp, Homo sapien
ggtggccgagggctgagccggctcc

SEQ ID NO: 4774006 - DNA, 25 bp, Homo sapien
ggctcccactgaggctctcgcaggc

SEQ ID NO: 4774007 - DNA, 25 bp, Homo sapien
tgaggctctcgcaggccgggccctc

SEQ ID NO: 4774008 - DNA, 25 bp, Homo sapien
cgagggctgagccggctcccactga

SEQ ID NO: 4774009 - DNA, 25 bp, Homo sapien
gggtgaacggctgctgctggaaacc

SEQ ID NO: 4774010 - DNA, 25 bp, Homo sapien
acggtgtgacgcatgctctgtgcag

SEQ ID NO: 4774011 - DNA, 25 bp, Homo sapien
gaaacccgtggacggtgtgacgcat

SEQ ID NO: 4774012 - DNA, 25 bp, Homo sapien
ccgagagcgcgggtgaacggctgct

SEQ ID NO: 4774013 - DNA, 25 bp, Homo sapien
tagaatggtggcctgtccaacatgc

SEQ ID NO: 4774014 - DNA, 25 bp, Homo sapien
tctgacaaggtcgaatagcaacctg

SEQ ID NO: 4774015 - DNA, 25 bp, Homo sapien
cctggttatcttggacgacatagaa

SEQ ID NO: 4774016 - DNA, 25 bp, Homo sapien
cacacgacgatgaccaagtggaact

SEQ ID NO: 4774017 - DNA, 25 bp, Homo sapien
agggcttctccctagatccaacagg

SEQ ID NO: 4774018 - DNA, 25 bp, Homo sapien
cacctgtgggaatcgtatgggtctc

SEQ ID NO: 4774019 - DNA, 25 bp, Homo sapien
tgagagctcttgcaacttcgaccaa

SEQ ID NO: 4774020 - DNA, 25 bp, Homo sapien
ccctgtaggagagagtatgtgagcc

SEQ ID NO: 4774021 - DNA, 25 bp, Homo sapien
agttcccacgtccagaggcagttgc

SEQ ID NO: 4774022 - DNA, 25 bp, Homo sapien
tctgcaagcacaacggaagctcctt

SEQ ID NO: 4774023 - DNA, 25 bp, Homo sapien
tattgcttatctggtgatgccaccc

SEQ ID NO: 4774024 - DNA, 25 bp, Homo sapien
attccagccagacagtgatccgagg

SEQ ID NO: 4774025 - DNA, 25 bp, Homo sapien
gacaaaggttcaacaacaggaagag

SEQ ID NO: 4774026 - DNA, 25 bp, Homo sapien
aaagagctgcgtccaggagccgccc

SEQ ID NO: 4774027 - DNA, 25 bp, Homo sapien
gcttttcgttgcagagtgacaaagg

SEQ ID NO: 4774028 - DNA, 25 bp, Homo sapien
tgcggtgccgcagggccagagtgcg

SEQ ID NO: 4774029 - DNA, 25 bp, Homo sapien
ggcgtgagggcggtgctggccgcac

SEQ ID NO: 4774030 - DNA, 25 bp, Homo sapien
ggtgcggggcgtgagggcggtgctg

SEQ ID NO: 4774031 - DNA, 25 bp, Homo sapien
ggggcgtgagggcggtgctggccgc

SEQ ID NO: 4774032 - DNA, 25 bp, Homo sapien
gaggtgcggggcgtgagggcggtgc

SEQ ID NO: 4774033 - DNA, 25 bp, Homo sapien
acgcctgcaccgggaccggttgctg

SEQ ID NO: 4774034 - DNA, 25 bp, Homo sapien
caccgggaccggttgctgcagcggt

SEQ ID NO: 4774035 - DNA, 25 bp, Homo sapien
cctgcaccgggaccggttgctgcag

SEQ ID NO: 4774036 - DNA, 25 bp, Homo sapien
ccgcgcgaggaggccgccttccact

SEQ ID NO: 4774037 - DNA, 25 bp, Homo sapien
ggcccctggcttcccagcgcgctgt

SEQ ID NO: 4774038 - DNA, 25 bp, Homo sapien
gatgacaggtgcaggagactgtggc

SEQ ID NO: 4774039 - DNA, 25 bp, Homo sapien
tgctgcttctccgacgccagggcgc

SEQ ID NO: 4774040 - DNA, 25 bp, Homo sapien
agatgtggtttccagccccaggtcc

SEQ ID NO: 4774041 - DNA, 25 bp, Homo sapien
tgcaccgtggctggaaccgaccccc

SEQ ID NO: 4774042 - DNA, 25 bp, Homo sapien
gaacatgtattaatatgttcccaat

SEQ ID NO: 4774043 - DNA, 25 bp, Homo sapien
aaaatacctttcagtgattactgct

SEQ ID NO: 4774044 - DNA, 25 bp, Homo sapien
gtatttaacaaagtatcacatgtac

SEQ ID NO: 4774045 - DNA, 25 bp, Homo sapien
gtgagggattccctaaataccctga

SEQ ID NO: 4774046 - DNA, 25 bp, Homo sapien
catgaactatattcagatatggatc

SEQ ID NO: 4774047 - DNA, 25 bp, Homo sapien
tcattttgacagtgtgtgcacccat

SEQ ID NO: 4774048 - DNA, 25 bp, Homo sapien
tgtctctggcctagcttcaggcaac

SEQ ID NO: 4774049 - DNA, 25 bp, Homo sapien
tatcaactctaaaagattccttgtg

SEQ ID NO: 4774050 - DNA, 25 bp, Homo sapien
acacttggtactgttgatcatttta

SEQ ID NO: 4774051 - DNA, 25 bp, Homo sapien
attgagttgtccttttacaattggg

SEQ ID NO: 4774052 - DNA, 25 bp, Homo sapien
tatctctattgaagtatattgtcat

SEQ ID NO: 4774053 - DNA, 25 bp, Homo sapien
ttttacatccctacctgccacgcat

SEQ ID NO: 4774054 - DNA, 25 bp, Homo sapien
tggcagggattcacgggcgcacaca

SEQ ID NO: 4774055 - DNA, 25 bp, Homo sapien
ctttaatcctggcagggattcacgg

SEQ ID NO: 4774056 - DNA, 25 bp, Homo sapien
atcctggcagggattcacgggcgca

SEQ ID NO: 4774057 - DNA, 25 bp, Homo sapien
ttaatcctggcagggattcacgggc

SEQ ID NO: 4774058 - DNA, 25 bp, Homo sapien
actctgcacgtgctcctcaaacttg

SEQ ID NO: 4774059 - DNA, 25 bp, Homo sapien
gatatcgacactctgcacgtgctcc

SEQ ID NO: 4774060 - DNA, 25 bp, Homo sapien
tgaaagctgcgatatcgacactctg

SEQ ID NO: 4774061 - DNA, 25 bp, Homo sapien
tagcttccggataccgtagcccatg

SEQ ID NO: 4774062 - DNA, 25 bp, Homo sapien
cagctcttccagctggatggagcac

SEQ ID NO: 4774063 - DNA, 25 bp, Homo sapien
agctcttccagctggatggagcaca

SEQ ID NO: 4774064 - DNA, 25 bp, Homo sapien
gctcttccagctggatggagcacac

SEQ ID NO: 4774065 - DNA, 25 bp, Homo sapien
cagtctcatcgtcccaaggcttgaa

SEQ ID NO: 4774066 - DNA, 25 bp, Homo sapien
caggtcagtgtcatcatcgtcgtca

SEQ ID NO: 4774067 - DNA, 25 bp, Homo sapien
ccaaacaggtcagtgtcatcatcgt

SEQ ID NO: 4774068 - DNA, 25 bp, Homo sapien
aaacaggtcagtgtcatcatcgtcg

SEQ ID NO: 4774069 - DNA, 25 bp, Homo sapien
gtcgttctcttggcgggaggcaccg

SEQ ID NO: 4774070 - DNA, 25 bp, Homo sapien
cctgtaccacactgcgcaggctctg

SEQ ID NO: 4774071 - DNA, 25 bp, Homo sapien
tcctgtaccacactgcgcaggctct

SEQ ID NO: 4774072 - DNA, 25 bp, Homo sapien
aggcccattcatctgctcgtagaat

SEQ ID NO: 4774073 - DNA, 25 bp, Homo sapien
cgtcgtcatatttgaacttgtcgaa

SEQ ID NO: 4774074 - DNA, 25 bp, Homo sapien
ctcatgtactaggaagtttgtagcc

SEQ ID NO: 4774075 - DNA, 25 bp, Homo sapien
gaatctcctttctgcgtcgtcatat

SEQ ID NO: 4774076 - DNA, 25 bp, Homo sapien
tacatttcatatcattcctactaca

SEQ ID NO: 4774077 - DNA, 25 bp, Homo sapien
tttactgtaggtagtattctcttcc

SEQ ID NO: 4774078 - DNA, 25 bp, Homo sapien
gtatcttactaggagatcacccatt

SEQ ID NO: 4774079 - DNA, 25 bp, Homo sapien
ccttactcgggtttatgtgaggtat

SEQ ID NO: 4774080 - DNA, 25 bp, Homo sapien
gatggaattgatggtgacagctaag

SEQ ID NO: 4774081 - DNA, 25 bp, Homo sapien
gctgaggcaggtcatttggccacta

SEQ ID NO: 4774082 - DNA, 25 bp, Homo sapien
accagtgttggtgaatcttttggcc

SEQ ID NO: 4774083 - DNA, 25 bp, Homo sapien
gagtcaataacatcaagaccagtgt

SEQ ID NO: 4774084 - DNA, 25 bp, Homo sapien
cactggtttgagacatgggcttgaa

SEQ ID NO: 4774085 - DNA, 25 bp, Homo sapien
taatgtacagtaatcacagggcttc

SEQ ID NO: 4774086 - DNA, 25 bp, Homo sapien
cagctactctataggctaggacagg

SEQ ID NO: 4774087 - DNA, 25 bp, Homo sapien
tctagtacttaagggcatgattgtc

SEQ ID NO: 4774088 - DNA, 25 bp, Homo sapien
gtgcccaccatcacgcccggctgat

SEQ ID NO: 4774089 - DNA, 25 bp, Homo sapien
tgcccaccatcacgcccggctgatt

SEQ ID NO: 4774090 - DNA, 25 bp, Homo sapien
ggtgcccaccatcacgcccggctga

SEQ ID NO: 4774091 - DNA, 25 bp, Homo sapien
taaagtaatgctgcaaatctaagca

SEQ ID NO: 4774092 - DNA, 25 bp, Homo sapien
gcaacaaaagattggaataaagtaa

SEQ ID NO: 4774093 - DNA, 25 bp, Homo sapien
aacaaatgggtgaatgccttaagac

SEQ ID NO: 4774094 - DNA, 25 bp, Homo sapien
ttaacaaatgggtgaatgccttaag

SEQ ID NO: 4774095 - DNA, 25 bp, Homo sapien
tggtacagactagtacttcctttgg

SEQ ID NO: 4774096 - DNA, 25 bp, Homo sapien
aaaacatctgccagtggcagagtag

SEQ ID NO: 4774097 - DNA, 25 bp, Homo sapien
acatctgccagtggcagagtaggtg

SEQ ID NO: 4774098 - DNA, 25 bp, Homo sapien
gcagagtaggtggtacagactagta

SEQ ID NO: 4774099 - DNA, 25 bp, Homo sapien
taaagggtgttcctcagtaagaagc

SEQ ID NO: 4774100 - DNA, 25 bp, Homo sapien
gaaaagcagattgcctgcaaaggta

SEQ ID NO: 4774101 - DNA, 25 bp, Homo sapien
tcaccatatgaggagataggacatc

SEQ ID NO: 4774102 - DNA, 25 bp, Homo sapien
tagataatagctaggaatttcccca

SEQ ID NO: 4774103 - DNA, 25 bp, Homo sapien
taagttccatgatcgtagggccagt

SEQ ID NO: 4774104 - DNA, 25 bp, Homo sapien
taaagtgctgctatctagacctggg

SEQ ID NO: 4774105 - DNA, 25 bp, Homo sapien
ttatttgcaggagcttgacaacacc

SEQ ID NO: 4774106 - DNA, 25 bp, Homo sapien
aatattgaatagttgtggtacccag

SEQ ID NO: 4774107 - DNA, 25 bp, Homo sapien
ctagatagaagaaagttggccttgg

SEQ ID NO: 4774108 - DNA, 25 bp, Homo sapien
tgtatatggagacctgacttcctag

SEQ ID NO: 4774109 - DNA, 25 bp, Homo sapien
gatgtatcctgagccgagacttcca

SEQ ID NO: 4774110 - DNA, 25 bp, Homo sapien
gaggcatactgagttgtggcttcca

SEQ ID NO: 4774111 - DNA, 25 bp, Homo sapien
gaatctgctgatgtacgtggagctg

SEQ ID NO: 4774112 - DNA, 25 bp, Homo sapien
caaattctttccacacgagttacag

SEQ ID NO: 4774113 - DNA, 25 bp, Homo sapien
cataaaccctctgactgccatcaag

SEQ ID NO: 4774114 - DNA, 25 bp, Homo sapien
tatataaggttatgataggctccaa

SEQ ID NO: 4774115 - DNA, 25 bp, Homo sapien
gacatcctctgttgtaaaggtccaa

SEQ ID NO: 4774116 - DNA, 25 bp, Homo sapien
tcatattcaatattagtatgcccaa

SEQ ID NO: 4774117 - DNA, 25 bp, Homo sapien
atgataaagcaatcccactcctctt

SEQ ID NO: 4774118 - DNA, 25 bp, Homo sapien
gaaattctcatttccggctgggcgt

SEQ ID NO: 4774119 - DNA, 25 bp, Homo sapien
tgtgcttatacctcatcatattcaa

SEQ ID NO: 4774120 - DNA, 25 bp, Homo sapien
ggacggctctgactggggatctcac

SEQ ID NO: 4774121 - DNA, 25 bp, Homo sapien
accatccaacatacatggctcttct

SEQ ID NO: 4774122 - DNA, 25 bp, Homo sapien
tgttccaagctgaagatgacttctg

SEQ ID NO: 4774123 - DNA, 25 bp, Homo sapien
tccaacatacatggctcttcttgtt

SEQ ID NO: 4774124 - DNA, 25 bp, Homo sapien
cactgagatcaagttgaaatagttt

SEQ ID NO: 4774125 - DNA, 25 bp, Homo sapien
ccactgagatcaagttgaaatagtt

SEQ ID NO: 4774126 - DNA, 25 bp, Homo sapien
taattgttgccactcatccctactg

SEQ ID NO: 4774127 - DNA, 25 bp, Homo sapien
cactcatccctactgaagtctacag

SEQ ID NO: 4774128 - DNA, 25 bp, Homo sapien
agtctacagttacgtccttgaatga

SEQ ID NO: 4774129 - DNA, 25 bp, Homo sapien
ttctgagcaaggtctaattgttgcc

SEQ ID NO: 4774130 - DNA, 25 bp, Homo sapien
ctgccattggtagttgagaaagaag

SEQ ID NO: 4774131 - DNA, 25 bp, Homo sapien
tgccattggtagttgagaaagaagt

SEQ ID NO: 4774132 - DNA, 25 bp, Homo sapien
cagggacttggtcatttttggctct

SEQ ID NO: 4774133 - DNA, 25 bp, Homo sapien
agggacttggtcatttttggctctt

SEQ ID NO: 4774134 - DNA, 25 bp, Homo sapien
catttttggctcttcggacaaaggg

SEQ ID NO: 4774135 - DNA, 25 bp, Homo sapien
ttggctcttcggacaaaggggcaga

SEQ ID NO: 4774136 - DNA, 25 bp, Homo sapien
atgggtagaggtacccatgagagaa

SEQ ID NO: 4774137 - DNA, 25 bp, Homo sapien
gatgggtagaggtacccatgagaga

SEQ ID NO: 4774138 - DNA, 25 bp, Homo sapien
ggtagaggtacccatgagagaagga

SEQ ID NO: 4774139 - DNA, 25 bp, Homo sapien
tgggtagaggtacccatgagagaag

SEQ ID NO: 4774140 - DNA, 25 bp, Homo sapien
cagatcggtacgtataaaagagagg

SEQ ID NO: 4774141 - DNA, 25 bp, Homo sapien
aatgataaaggagctactagtctgg

SEQ ID NO: 4774142 - DNA, 25 bp, Homo sapien
gatgtgcatcattcacactcctcag

SEQ ID NO: 4774143 - DNA, 25 bp, Homo sapien
gatccctccttagttcccatagtca

SEQ ID NO: 4774144 - DNA, 25 bp, Homo sapien
gacttccactattccatccactgac

SEQ ID NO: 4774145 - DNA, 25 bp, Homo sapien
gagattcttcttgctcagtccacag

SEQ ID NO: 4774146 - DNA, 25 bp, Homo sapien
accgaccccatcactgaccggaagg

SEQ ID NO: 4774147 - DNA, 25 bp, Homo sapien
gctccgacttccactattccatcca

SEQ ID NO: 4774148 - DNA, 25 bp, Homo sapien
tgcctcgggaggtgactatagtcgc

SEQ ID NO: 4774149 - DNA, 25 bp, Homo sapien
tctcaggacagtggtcatttgcctc

SEQ ID NO: 4774150 - DNA, 25 bp, Homo sapien
ctatagtcgcaagaaccagaacagg

SEQ ID NO: 4774151 - DNA, 25 bp, Homo sapien
agaaccagaacaggacccacttcct

SEQ ID NO: 4774152 - DNA, 25 bp, Homo sapien
tcttcatggcctgaaggttgccagt

SEQ ID NO: 4774153 - DNA, 25 bp, Homo sapien
cagtaatcaacatggcgctttgcca

SEQ ID NO: 4774154 - DNA, 25 bp, Homo sapien
atggcggcgcccatgtagacactct

SEQ ID NO: 4774155 - DNA, 25 bp, Homo sapien
tgggtttgcgcatgctcagcagtct

SEQ ID NO: 4774156 - DNA, 25 bp, Homo sapien
cttcctattactcccctacttatct

SEQ ID NO: 4774157 - DNA, 25 bp, Homo sapien
tcctattactcccctacttatctta

SEQ ID NO: 4774158 - DNA, 25 bp, Homo sapien
tcttcctattactcccctacttatc

SEQ ID NO: 4774159 - DNA, 25 bp, Homo sapien
tgtgacgatccaccctcaccatcgc

SEQ ID NO: 4774160 - DNA, 25 bp, Homo sapien
ttgtgacgatccaccctcaccatcg

SEQ ID NO: 4774161 - DNA, 25 bp, Homo sapien
agagggccccacgaaggatcccatc

SEQ ID NO: 4774162 - DNA, 25 bp, Homo sapien
gggccccacgaaggatcccatcttg

SEQ ID NO: 4774163 - DNA, 25 bp, Homo sapien
agggccccacgaaggatcccatctt

SEQ ID NO: 4774164 - DNA, 25 bp, Homo sapien
gccccacgaaggatcccatcttgga

SEQ ID NO: 4774165 - DNA, 25 bp, Homo sapien
cagccaaagtgtcccaaaaaatcct

SEQ ID NO: 4774166 - DNA, 25 bp, Homo sapien
ctgttcctgtgattctgacgttatc

SEQ ID NO: 4774167 - DNA, 25 bp, Homo sapien
attctgacgttatcagcctctgcac

SEQ ID NO: 4774168 - DNA, 25 bp, Homo sapien
tcagccaaagtgtcccaaaaaatcc

SEQ ID NO: 4774169 - DNA, 25 bp, Homo sapien
ctcccttctgccacatgttgcctac

SEQ ID NO: 4774170 - DNA, 25 bp, Homo sapien
ctgtcctcccttctgccacatgttg

SEQ ID NO: 4774171 - DNA, 25 bp, Homo sapien
gtcctcccttctgccacatgttgcc

SEQ ID NO: 4774172 - DNA, 25 bp, Homo sapien
ctctgtcctcccttctgccacatgt

SEQ ID NO: 4774173 - DNA, 25 bp, Homo sapien
ctggctgggttcattggcaaagagc

SEQ ID NO: 4774174 - DNA, 25 bp, Homo sapien
agtgatggcctgttccagatccaag

SEQ ID NO: 4774175 - DNA, 25 bp, Homo sapien
tgaagtgatggcctgttccagatcc

SEQ ID NO: 4774176 - DNA, 25 bp, Homo sapien
tccatgactgagtccacttcctggc

SEQ ID NO: 4774177 - DNA, 25 bp, Homo sapien
tcttttcagcgctggtggggcacat

SEQ ID NO: 4774178 - DNA, 25 bp, Homo sapien
gtcttttcagcgctggtggggcaca

SEQ ID NO: 4774179 - DNA, 25 bp, Homo sapien
tttcagcgctggtggggcacatcag

SEQ ID NO: 4774180 - DNA, 25 bp, Homo sapien
ttttcagcgctggtggggcacatca

SEQ ID NO: 4774181 - DNA, 25 bp, Homo sapien
ccacaggtgcttccccaatctctgc

SEQ ID NO: 4774182 - DNA, 25 bp, Homo sapien
gccaggattagagcctccacaggtg

SEQ ID NO: 4774183 - DNA, 25 bp, Homo sapien
gagcctccacaggtgcttccccaat

SEQ ID NO: 4774184 - DNA, 25 bp, Homo sapien
ttagagcctccacaggtgcttcccc

SEQ ID NO: 4774185 - DNA, 25 bp, Homo sapien
tggggatgcagacagaggaggggcg

SEQ ID NO: 4774186 - DNA, 25 bp, Homo sapien
ctggggatgcagacagaggaggggc

SEQ ID NO: 4774187 - DNA, 25 bp, Homo sapien
cccatctcaaaggagacaatgaggt

SEQ ID NO: 4774188 - DNA, 25 bp, Homo sapien
tcaaaggagacaatgaggtggcctg

SEQ ID NO: 4774189 - DNA, 25 bp, Homo sapien
tgggcccatctcaaaggagacaatg

SEQ ID NO: 4774190 - DNA, 25 bp, Homo sapien
tctcaaaggagacaatgaggtggcc

SEQ ID NO: 4774191 - DNA, 25 bp, Homo sapien
gtgctaaggcactaggatcagtact

SEQ ID NO: 4774192 - DNA, 25 bp, Homo sapien
gctaaggcactaggatcagtactgg

SEQ ID NO: 4774193 - DNA, 25 bp, Homo sapien
taaggcactaggatcagtactggaa

SEQ ID NO: 4774194 - DNA, 25 bp, Homo sapien
aggcactaggatcagtactggaatt

SEQ ID NO: 4774195 - DNA, 25 bp, Homo sapien
ttcagagaatccttccagtgtgctg

SEQ ID NO: 4774196 - DNA, 25 bp, Homo sapien
tttcagagaatccttccagtgtgct

SEQ ID NO: 4774197 - DNA, 25 bp, Homo sapien
cacagctggtaatgataggattggg

SEQ ID NO: 4774198 - DNA, 25 bp, Homo sapien
tctgggatgcatcatcccggagtgc

SEQ ID NO: 4774199 - DNA, 25 bp, Homo sapien
tttagttcccgtgggtttgcacagc

SEQ ID NO: 4774200 - DNA, 25 bp, Homo sapien
gagtgctggagccttgggtggagct

SEQ ID NO: 4774201 - DNA, 25 bp, Homo sapien
gcggccaccagcactctgacctgcc

SEQ ID NO: 4774202 - DNA, 25 bp, Homo sapien
actgctgctcccgaaggattttaca

SEQ ID NO: 4774203 - DNA, 25 bp, Homo sapien
agaactgctgctcccgaaggatttt

SEQ ID NO: 4774204 - DNA, 25 bp, Homo sapien
gaactgctgctcccgaaggatttta

SEQ ID NO: 4774205 - DNA, 25 bp, Homo sapien
tagattttgccagatgtagggttgt

SEQ ID NO: 4774206 - DNA, 25 bp, Homo sapien
tgtgtagattttgccagatgtaggg

SEQ ID NO: 4774207 - DNA, 25 bp, Homo sapien
ttggtccttgaaacactggtgcctg

SEQ ID NO: 4774208 - DNA, 25 bp, Homo sapien
ttttgccagatgtagggttgtgtct

SEQ ID NO: 4774209 - DNA, 25 bp, Homo sapien
ctagccagcttctcgctgctcacac

SEQ ID NO: 4774210 - DNA, 25 bp, Homo sapien
agcttctcgctgctcacactgtagc

SEQ ID NO: 4774211 - DNA, 25 bp, Homo sapien
gcttctcgctgctcacactgtagca

SEQ ID NO: 4774212 - DNA, 25 bp, Homo sapien
gccagcttctcgctgctcacactgt

SEQ ID NO: 4774213 - DNA, 25 bp, Homo sapien
agttccagatctgggcttgtccact

SEQ ID NO: 4774214 - DNA, 25 bp, Homo sapien
ccccaggaacttggtgtccagggat

SEQ ID NO: 4774215 - DNA, 25 bp, Homo sapien
acacgggcctcacagttccagatct

SEQ ID NO: 4774216 - DNA, 25 bp, Homo sapien
caggaacttggtgtccagggatatt

SEQ ID NO: 4774217 - DNA, 25 bp, Homo sapien
tgcaggccagagctgctccttcctc

SEQ ID NO: 4774218 - DNA, 25 bp, Homo sapien
cttgcacaggaagtggcagccatga

SEQ ID NO: 4774219 - DNA, 25 bp, Homo sapien
aagtggcagccatgagggtctctgc

SEQ ID NO: 4774220 - DNA, 25 bp, Homo sapien
cagccatgagggtctctgcaggcca

SEQ ID NO: 4774221 - DNA, 25 bp, Homo sapien
ccctggtcctaatgggaccccactg

SEQ ID NO: 4774222 - DNA, 25 bp, Homo sapien
tggtcctaatgggaccccactgctg

SEQ ID NO: 4774223 - DNA, 25 bp, Homo sapien
cccactgctggccttctggcacagg

SEQ ID NO: 4774224 - DNA, 25 bp, Homo sapien
ctggtcctaatgggaccccactgct

SEQ ID NO: 4774225 - DNA, 25 bp, Homo sapien
ttgtaggtgacaaggggcccattgt

SEQ ID NO: 4774226 - DNA, 25 bp, Homo sapien
cttgtaggtgacaaggggcccattg

SEQ ID NO: 4774227 - DNA, 25 bp, Homo sapien
tattgtgggtccttgtaggtgacaa

SEQ ID NO: 4774228 - DNA, 25 bp, Homo sapien
tctctgcagatattgtgggtccttg

SEQ ID NO: 4774229 - DNA, 25 bp, Homo sapien
gagatcttgtcgtcatcatccctca

SEQ ID NO: 4774230 - DNA, 25 bp, Homo sapien
tctatcacagggtaacccacaaggg

SEQ ID NO: 4774231 - DNA, 25 bp, Homo sapien
cagggtaacccacaagggagatctt

SEQ ID NO: 4774232 - DNA, 25 bp, Homo sapien
attgcctggattctctatcacaggg

SEQ ID NO: 4774233 - DNA, 25 bp, Homo sapien
agcacagagtaggcagctcttgaac

SEQ ID NO: 4774234 - DNA, 25 bp, Homo sapien
ccacattacctgactgcatttggag

SEQ ID NO: 4774235 - DNA, 25 bp, Homo sapien
gaattgctcagaggagattagcaca

SEQ ID NO: 4774236 - DNA, 25 bp, Homo sapien
tttgtcctgctagtgccaatgtctg

SEQ ID NO: 4774237 - DNA, 25 bp, Homo sapien
ggactatctgaagaggctcccgcag

SEQ ID NO: 4774238 - DNA, 25 bp, Homo sapien
caccgaggatgcgtataagagagcc

SEQ ID NO: 4774239 - DNA, 25 bp, Homo sapien
tatcgagagcgatctgcagaaggac

SEQ ID NO: 4774240 - DNA, 25 bp, Homo sapien
tctaggcataaggacaagccctggc

SEQ ID NO: 4774241 - DNA, 25 bp, Homo sapien
gaagaagacattgtcaacccggcca

SEQ ID NO: 4774242 - DNA, 25 bp, Homo sapien
tgagatcactcaggtccaaggacgg

SEQ ID NO: 4774243 - DNA, 25 bp, Homo sapien
tgccatggcgcggtagaaacagatg

SEQ ID NO: 4774244 - DNA, 25 bp, Homo sapien
tcagcttgtagcaaccaggacagca

SEQ ID NO: 4774245 - DNA, 25 bp, Homo sapien
ctgtgacgtccccaggccatgggtg

SEQ ID NO: 4774246 - DNA, 25 bp, Homo sapien
tgcacagcatcctacacacaaaggt

SEQ ID NO: 4774247 - DNA, 25 bp, Homo sapien
ccatgggtggtggaactggcatcac

SEQ ID NO: 4774248 - DNA, 25 bp, Homo sapien
tgaacagtcggccacctttccatgg

SEQ ID NO: 4774249 - DNA, 25 bp, Homo sapien
ttctagtggcagttccagctctgac

SEQ ID NO: 4774250 - DNA, 25 bp, Homo sapien
cagtaatggtaagcttattttaggt

SEQ ID NO: 4774251 - DNA, 25 bp, Homo sapien
tcttaacagtggtttcggcacccat

SEQ ID NO: 4774252 - DNA, 25 bp, Homo sapien
gggaactcgatacatatctttgcct

SEQ ID NO: 4774253 - DNA, 25 bp, Homo sapien
cctggctcatggatatagataccct

SEQ ID NO: 4774254 - DNA, 25 bp, Homo sapien
ccatcaccaagaggaggcatcactg

SEQ ID NO: 4774255 - DNA, 25 bp, Homo sapien
tggaaccagagaacccctagctggg

SEQ ID NO: 4774256 - DNA, 25 bp, Homo sapien
tgacagagcagctgagtcctcacca

SEQ ID NO: 4774257 - DNA, 25 bp, Homo sapien
caaagcctggtttgtagggagactc

SEQ ID NO: 4774258 - DNA, 25 bp, Homo sapien
taggatcgccatgttcagttaagca

SEQ ID NO: 4774259 - DNA, 25 bp, Homo sapien
tacagaggtactggaacccttgccc

SEQ ID NO: 4774260 - DNA, 25 bp, Homo sapien
tcttgtctctggtaatgggctgcac

SEQ ID NO: 4774261 - DNA, 25 bp, Homo sapien
tctgccccgaggacgaacctcctcg

SEQ ID NO: 4774262 - DNA, 25 bp, Homo sapien
gggccacagcaacgatctgccccga

SEQ ID NO: 4774263 - DNA, 25 bp, Homo sapien
tcgcggggccgcacagccgtgggtg

SEQ ID NO: 4774264 - DNA, 25 bp, Homo sapien
ttcacagacgggaaagccgagggga

SEQ ID NO: 4774265 - DNA, 25 bp, Homo sapien
gcagttcgaaaccaggcggctgcac

SEQ ID NO: 4774266 - DNA, 25 bp, Homo sapien
tagcggagccgaagcctggcagcga

SEQ ID NO: 4774267 - DNA, 25 bp, Homo sapien
gcgcccgttcccgagtggccgcagc

SEQ ID NO: 4774268 - DNA, 25 bp, Homo sapien
ttggtcccgggcgtctgcggacagc

SEQ ID NO: 4774269 - DNA, 25 bp, Homo sapien
ctggcgggcgggtggcgcgggggcg

SEQ ID NO: 4774270 - DNA, 25 bp, Homo sapien
ttctgggcgtctcaggcgttgcggg

SEQ ID NO: 4774271 - DNA, 25 bp, Homo sapien
agggttctgggcgtctcaggcgttg

SEQ ID NO: 4774272 - DNA, 25 bp, Homo sapien
tgcccacgaacgttaggcctgaggg

SEQ ID NO: 4774273 - DNA, 25 bp, Homo sapien
cggccactgcccacgaacgttaggc

SEQ ID NO: 4774274 - DNA, 25 bp, Homo sapien
cagggcctggtactacctgaggagc

SEQ ID NO: 4774275 - DNA, 25 bp, Homo sapien
tgggaatggagcttagtctggcacc

SEQ ID NO: 4774276 - DNA, 25 bp, Homo sapien
ccttctactggcacaacagcctggg

SEQ ID NO: 4774277 - DNA, 25 bp, Homo sapien
gccctttggatagccttgacttgcc

SEQ ID NO: 4774278 - DNA, 25 bp, Homo sapien
cccattggcatcgaaagagctgctg

SEQ ID NO: 4774279 - DNA, 25 bp, Homo sapien
aattagcccagctcttttatggagg

SEQ ID NO: 4774280 - DNA, 25 bp, Homo sapien
ccagggatgtgggagtacatgttcc

SEQ ID NO: 4774281 - DNA, 25 bp, Homo sapien
tggtagaaggcataggttcccggac

SEQ ID NO: 4774282 - DNA, 25 bp, Homo sapien
ccaggcagaggcgcaggcgcggcat

SEQ ID NO: 4774283 - DNA, 25 bp, Homo sapien
gggagggaggaagcgcagctgcagc

SEQ ID NO: 4774284 - DNA, 25 bp, Homo sapien
gccaggcagaggcgcaggcgcggca

SEQ ID NO: 4774285 - DNA, 25 bp, Homo sapien
ataaggccagggagggaggaagcgc

SEQ ID NO: 4774286 - DNA, 25 bp, Homo sapien
aaggtcataacgtgcctggccctgg

SEQ ID NO: 4774287 - DNA, 25 bp, Homo sapien
taagtactggcaacacggaaggtca

SEQ ID NO: 4774288 - DNA, 25 bp, Homo sapien
gctccaacaggtacggtggcctcat

SEQ ID NO: 4774289 - DNA, 25 bp, Homo sapien
agtgtgcaaacgtaaggacccctct

SEQ ID NO: 4774290 - DNA, 25 bp, Homo sapien
cataactgggaaagtgcccatggaa

SEQ ID NO: 4774291 - DNA, 25 bp, Homo sapien
tttccttttgggtagtgagatatcc

SEQ ID NO: 4774292 - DNA, 25 bp, Homo sapien
tagtgagatatccaaagccactttc

SEQ ID NO: 4774293 - DNA, 25 bp, Homo sapien
cattacagcactgggaccagatcat

SEQ ID NO: 4774294 - DNA, 25 bp, Homo sapien
cctgcctcttacactgcgggaactt

SEQ ID NO: 4774295 - DNA, 25 bp, Homo sapien
tgtgcgtcccgtccaagagtggcca

SEQ ID NO: 4774296 - DNA, 25 bp, Homo sapien
caacatggtgtccaggatgatggca

SEQ ID NO: 4774297 - DNA, 25 bp, Homo sapien
cactgcgggaacttgtgcagtgtgt

SEQ ID NO: 4774298 - DNA, 25 bp, Homo sapien
cctggttgtgtagatgaaggaccca

SEQ ID NO: 4774299 - DNA, 25 bp, Homo sapien
ttaggggggcaagtgtctgactcct

SEQ ID NO: 4774300 - DNA, 25 bp, Homo sapien
gtgacctctgtgcaccttagggtgc

SEQ ID NO: 4774301 - DNA, 25 bp, Homo sapien
cacttgccaacagggcccggcaggg

SEQ ID NO: 4774302 - DNA, 25 bp, Homo sapien
tgcgcccagctcgagactgatgagt

SEQ ID NO: 4774303 - DNA, 25 bp, Homo sapien
cgagctgacatccaaggctgaggac

SEQ ID NO: 4774304 - DNA, 25 bp, Homo sapien
gcatatgccctagggtgaccacgca

SEQ ID NO: 4774305 - DNA, 25 bp, Homo sapien
gactacttgaaaccactactgaggg

SEQ ID NO: 4774306 - DNA, 25 bp, Homo sapien
cagttacagaaatgggtgtccggat

SEQ ID NO: 4774307 - DNA, 25 bp, Homo sapien
agttacagaaatgggtgtccggatg

SEQ ID NO: 4774308 - DNA, 25 bp, Homo sapien
gttacagaaatgggtgtccggatgg

SEQ ID NO: 4774309 - DNA, 25 bp, Homo sapien
tcaaattcggtgttggtgagaccca

SEQ ID NO: 4774310 - DNA, 25 bp, Homo sapien
gcaacatccagactacgatggcatc

SEQ ID NO: 4774311 - DNA, 25 bp, Homo sapien
tggcatccttcttgtcgcttcaaga

SEQ ID NO: 4774312 - DNA, 25 bp, Homo sapien
tggttcagctgtctttcaaattcgg

SEQ ID NO: 4774313 - DNA, 25 bp, Homo sapien
tctctttcacttggtgggtcaagaa

SEQ ID NO: 4774314 - DNA, 25 bp, Homo sapien
tgtcagccagggttgcagtttcatc

SEQ ID NO: 4774315 - DNA, 25 bp, Homo sapien
taagggtttcttatgccactgcagt

SEQ ID NO: 4774316 - DNA, 25 bp, Homo sapien
agggtgattctgacataagggtttc

SEQ ID NO: 4774317 - DNA, 25 bp, Homo sapien
gcatccttacaatatagtagctgat

SEQ ID NO: 4774318 - DNA, 25 bp, Homo sapien
gattcgccccagaacaagctatctg

SEQ ID NO: 4774319 - DNA, 25 bp, Homo sapien
cagaccagcctgattgactgtggga

SEQ ID NO: 4774320 - DNA, 25 bp, Homo sapien
tgcaaaggctgaagccatgatgcct

SEQ ID NO: 4774321 - DNA, 25 bp, Homo sapien
tctggtaacagggaagctccatggg

SEQ ID NO: 4774322 - DNA, 25 bp, Homo sapien
gatcaacatgcagatgtgtgtttgt

SEQ ID NO: 4774323 - DNA, 25 bp, Homo sapien
gggggagtggagcttccagtcttcc

SEQ ID NO: 4774324 - DNA, 25 bp, Homo sapien
cttgtgatccagctctgggttgggc

SEQ ID NO: 4774325 - DNA, 25 bp, Homo sapien
aggttccctgaaggtgggcagtgcc

SEQ ID NO: 4774326 - DNA, 25 bp, Homo sapien
ttccctgaaggtgggcagtgcctgg

SEQ ID NO: 4774327 - DNA, 25 bp, Homo sapien
ggtcaaggttccctgaaggtgggca

SEQ ID NO: 4774328 - DNA, 25 bp, Homo sapien
tcaaggttccctgaaggtgggcagt

SEQ ID NO: 4774329 - DNA, 25 bp, Homo sapien
catcatgtggggctaggagcttctt

SEQ ID NO: 4774330 - DNA, 25 bp, Homo sapien
gggctaggagcttcttgtggcgggc

SEQ ID NO: 4774331 - DNA, 25 bp, Homo sapien
ccagtgcattcacatcatgtggggc

SEQ ID NO: 4774332 - DNA, 25 bp, Homo sapien
ctaggagcttcttgtggcgggctcc

SEQ ID NO: 4774333 - DNA, 25 bp, Homo sapien
gaggtggactgagccggccggcggg

SEQ ID NO: 4774334 - DNA, 25 bp, Homo sapien
ttggatcagtcacgtcccctctcag

SEQ ID NO: 4774335 - DNA, 25 bp, Homo sapien
tggatcccgactccgccactcaacg

SEQ ID NO: 4774336 - DNA, 25 bp, Homo sapien
gactccgccactcaacgcggcaggg

SEQ ID NO: 4774337 - DNA, 25 bp, Homo sapien
ttttttttgagtcttgccctgtctc

SEQ ID NO: 4774338 - DNA, 25 bp, Homo sapien
ttttttgagtcttgccctgtctccc

SEQ ID NO: 4774339 - DNA, 25 bp, Homo sapien
tgacctagtgatccgcgcgtctcag

SEQ ID NO: 4774340 - DNA, 25 bp, Homo sapien
acctagtgatccgcgcgtctcagcc

SEQ ID NO: 4774341 - DNA, 25 bp, Homo sapien
gaatggaggtccagttgcctcccca

SEQ ID NO: 4774342 - DNA, 25 bp, Homo sapien
tcatctgacatgagctgccctcatc

SEQ ID NO: 4774343 - DNA, 25 bp, Homo sapien
ggttctgtcacaaatggccaataca

SEQ ID NO: 4774344 - DNA, 25 bp, Homo sapien
catccttactctgcacatgggaatg

SEQ ID NO: 4774345 - DNA, 25 bp, Homo sapien
gctgctgagagacaagagtggcctc

SEQ ID NO: 4774346 - DNA, 25 bp, Homo sapien
cttggccgcagtcagagcaagggct

SEQ ID NO: 4774347 - DNA, 25 bp, Homo sapien
cttaagaccagagccagtggccatc

SEQ ID NO: 4774348 - DNA, 25 bp, Homo sapien
tatatacaaggtctacggccctcac

SEQ ID NO: 4774349 - DNA, 25 bp, Homo sapien
ttgactaccacgatgatgaacacca

SEQ ID NO: 4774350 - DNA, 25 bp, Homo sapien
accccgaaggccgtgatgaagatgt

SEQ ID NO: 4774351 - DNA, 25 bp, Homo sapien
atgaagatgttgactaccacgatga

SEQ ID NO: 4774352 - DNA, 25 bp, Homo sapien
ccgaaggccgtgatgaagatgttga

SEQ ID NO: 4774353 - DNA, 25 bp, Homo sapien
taggatgagttttgtcgcccagaga

SEQ ID NO: 4774354 - DNA, 25 bp, Homo sapien
tcaaaaattcgactgggcaacatgg

SEQ ID NO: 4774355 - DNA, 25 bp, Homo sapien
tatggacgtcaaccaaaggccaggt

SEQ ID NO: 4774356 - DNA, 25 bp, Homo sapien
tgcccaaggttacgcagccatgaag

SEQ ID NO: 4774357 - DNA, 25 bp, Homo sapien
ggcacctgtcccaggcgatgcgagc

SEQ ID NO: 4774358 - DNA, 25 bp, Homo sapien
ccaagtgtgcaaggtggtgggcacc

SEQ ID NO: 4774359 - DNA, 25 bp, Homo sapien
ccaggcgatgcgagcagatgccagc

SEQ ID NO: 4774360 - DNA, 25 bp, Homo sapien
caggaactcggcagctccttgagag

SEQ ID NO: 4774361 - DNA, 25 bp, Homo sapien
ttccacgacggccttcagctgggac

SEQ ID NO: 4774362 - DNA, 25 bp, Homo sapien
cagctgggacgcgttggccatcagc

SEQ ID NO: 4774363 - DNA, 25 bp, Homo sapien
tcagcagcgcgatgtccagcatgct

SEQ ID NO: 4774364 - DNA, 25 bp, Homo sapien
tgcagcacaagggagatggagatga

SEQ ID NO: 4774365 - DNA, 25 bp, Homo sapien
gtaatggttcacgttgatgggcccg

SEQ ID NO: 4774366 - DNA, 25 bp, Homo sapien
gttcacgttgatgggcccgtgcctc

SEQ ID NO: 4774367 - DNA, 25 bp, Homo sapien
aatggttcacgttgatgggcccgtg

SEQ ID NO: 4774368 - DNA, 25 bp, Homo sapien
tggttcacgttgatgggcccgtgcc

SEQ ID NO: 4774369 - DNA, 25 bp, Homo sapien
aggaccatgcctctcggcccagatg

SEQ ID NO: 4774370 - DNA, 25 bp, Homo sapien
cagatgtggccccaggaaccttcaa

SEQ ID NO: 4774371 - DNA, 25 bp, Homo sapien
gaccatgcctctcggcccagatgtg

SEQ ID NO: 4774372 - DNA, 25 bp, Homo sapien
gatgtggccccaggaaccttcaacc

SEQ ID NO: 4774373 - DNA, 25 bp, Homo sapien
gctcgtactcctcggttcccgagtc

SEQ ID NO: 4774374 - DNA, 25 bp, Homo sapien
aggccgccgttgagctcgtactcct

SEQ ID NO: 4774375 - DNA, 25 bp, Homo sapien
gtgcccggaggcaggccgccgttga

SEQ ID NO: 4774376 - DNA, 25 bp, Homo sapien
gggagccgggtgtgcccggaggcag

SEQ ID NO: 4774377 - DNA, 25 bp, Homo sapien
ccgcccaggccgccaggatccgggc

SEQ ID NO: 4774378 - DNA, 25 bp, Homo sapien
cggccgcccaggccgccaggatccg

SEQ ID NO: 4774379 - DNA, 25 bp, Homo sapien
tgcggccgcccaggccgccaggatc

SEQ ID NO: 4774380 - DNA, 25 bp, Homo sapien
gccgcccaggccgccaggatccggg

SEQ ID NO: 4774381 - DNA, 25 bp, Homo sapien
tgagcgcgcccgagcctcagccgca

SEQ ID NO: 4774382 - DNA, 25 bp, Homo sapien
gagcgcgcccgagcctcagccgcag

SEQ ID NO: 4774383 - DNA, 25 bp, Homo sapien
agcgcgcccgagcctcagccgcagg

SEQ ID NO: 4774384 - DNA, 25 bp, Homo sapien
ctgagcgcgcccgagcctcagccgc

SEQ ID NO: 4774385 - DNA, 25 bp, Homo sapien
gcgctgactcatgggcccatctgtg

SEQ ID NO: 4774386 - DNA, 25 bp, Homo sapien
cacaaaggggatgaacgtgcgctga

SEQ ID NO: 4774387 - DNA, 25 bp, Homo sapien
gatgaacgtgcgctgactcatgggc

SEQ ID NO: 4774388 - DNA, 25 bp, Homo sapien
aaatgggggttatgagggcacagac

SEQ ID NO: 4774389 - DNA, 25 bp, Homo sapien
gattgaagtggttgtttggtctctg

SEQ ID NO: 4774390 - DNA, 25 bp, Homo sapien
ttgtatgattgaagtggttgtttgg

SEQ ID NO: 4774391 - DNA, 25 bp, Homo sapien
gtatgattgaagtggttgtttggtc

SEQ ID NO: 4774392 - DNA, 25 bp, Homo sapien
atgattgaagtggttgtttggtctc

SEQ ID NO: 4774393 - DNA, 25 bp, Homo sapien
ggggtcgagagcatgtggcggccac

SEQ ID NO: 4774394 - DNA, 25 bp, Homo sapien
tgggggtcgagagcatgtggcggcc

SEQ ID NO: 4774395 - DNA, 25 bp, Homo sapien
gggtcgagagcatgtggcggccacc

SEQ ID NO: 4774396 - DNA, 25 bp, Homo sapien
ctgggggtcgagagcatgtggcggc

SEQ ID NO: 4774397 - DNA, 25 bp, Homo sapien
agaaagcgagtctggcaaggtggcg

SEQ ID NO: 4774398 - DNA, 25 bp, Homo sapien
ggcttgcaggcaggtatgccgtttc

SEQ ID NO: 4774399 - DNA, 25 bp, Homo sapien
gcagcatgcccgaggtgacccagct

SEQ ID NO: 4774400 - DNA, 25 bp, Homo sapien
caggtatgccgtttccacatcacca

SEQ ID NO: 4774401 - DNA, 25 bp, Homo sapien
cccaggactgggacgacagggttgg

SEQ ID NO: 4774402 - DNA, 25 bp, Homo sapien
actgggacgacagggttggcgatgc

SEQ ID NO: 4774403 - DNA, 25 bp, Homo sapien
ggttggcgatgcctacagccgccag

SEQ ID NO: 4774404 - DNA, 25 bp, Homo sapien
gacgacagggttggcgatgcctaca

SEQ ID NO: 4774405 - DNA, 25 bp, Homo sapien
ctatgattgcgcctatgaagagtca

SEQ ID NO: 4774406 - DNA, 25 bp, Homo sapien
aagcaagtgcaaaatctcacagttt

SEQ ID NO: 4774407 - DNA, 25 bp, Homo sapien
aaaatctcacagtttttcttgtggg

SEQ ID NO: 4774408 - DNA, 25 bp, Homo sapien
ctgaaggcagtcaatgcaagcagca

SEQ ID NO: 4774409 - DNA, 25 bp, Homo sapien
tgaaactccgtgtccccctgtggaa

SEQ ID NO: 4774410 - DNA, 25 bp, Homo sapien
aatggaggtgaggacatgtgcccag

SEQ ID NO: 4774411 - DNA, 25 bp, Homo sapien
tgtgtcccctgaaactccgtgtccc

SEQ ID NO: 4774412 - DNA, 25 bp, Homo sapien
ccaggcagattggaacgggtggcca

SEQ ID NO: 4774413 - DNA, 25 bp, Homo sapien
gcgaaactgcctcttgtctgacatg

SEQ ID NO: 4774414 - DNA, 25 bp, Homo sapien
ttaacaagccagtcgaaggtcatgg

SEQ ID NO: 4774415 - DNA, 25 bp, Homo sapien
cccaagatttgagctgcattcgaca

SEQ ID NO: 4774416 - DNA, 25 bp, Homo sapien
caggactctctcacaaccaggaaag

SEQ ID NO: 4774417 - DNA, 25 bp, Homo sapien
agcctgcgtgctttgccccgatggc

SEQ ID NO: 4774418 - DNA, 25 bp, Homo sapien
tggagagcctgcgtgctttgccccg

SEQ ID NO: 4774419 - DNA, 25 bp, Homo sapien
gccccgatggcctctcgttagaggc

SEQ ID NO: 4774420 - DNA, 25 bp, Homo sapien
agagcctgcgtgctttgccccgatg

SEQ ID NO: 4774421 - DNA, 25 bp, Homo sapien
caatgggcagcagattccgagtttt

SEQ ID NO: 4774422 - DNA, 25 bp, Homo sapien
tacaatgggcagcagattccgagtt

SEQ ID NO: 4774423 - DNA, 25 bp, Homo sapien
gggcagcagattccgagttttaggt

SEQ ID NO: 4774424 - DNA, 25 bp, Homo sapien
tcatacaatgggcagcagattccga

SEQ ID NO: 4774425 - DNA, 25 bp, Homo sapien
tgcagctggaagacacccaaggtga

SEQ ID NO: 4774426 - DNA, 25 bp, Homo sapien
catagtcatcttgtaggtgtctctc

SEQ ID NO: 4774427 - DNA, 25 bp, Homo sapien
gctgcagcccttctatgcccatagt

SEQ ID NO: 4774428 - DNA, 25 bp, Homo sapien
gtctcccttgtggtccgtcctggct

SEQ ID NO: 4774429 - DNA, 25 bp, Homo sapien
agtgtgcccgggcattgggtttcat

SEQ ID NO: 4774430 - DNA, 25 bp, Homo sapien
gagttgggggagtgtgcccgggcat

SEQ ID NO: 4774431 - DNA, 25 bp, Homo sapien
ccttgttgagttgggggagtgtgcc

SEQ ID NO: 4774432 - DNA, 25 bp, Homo sapien
accagccttgttgagttgggggagt

SEQ ID NO: 4774433 - DNA, 25 bp, Homo sapien
ctggggaagatgacatgatggacat

SEQ ID NO: 4774434 - DNA, 25 bp, Homo sapien
gggaagatgacatgatggacatgga

SEQ ID NO: 4774435 - DNA, 25 bp, Homo sapien
gaagatgacatgatggacatggaag

SEQ ID NO: 4774436 - DNA, 25 bp, Homo sapien
aagatgacatgatggacatggaagc

SEQ ID NO: 4774437 - DNA, 25 bp, Homo sapien
ttggacgcagtgaacttggcaccct

SEQ ID NO: 4774438 - DNA, 25 bp, Homo sapien
tcagcctgtcagtcgctctggtgcc

SEQ ID NO: 4774439 - DNA, 25 bp, Homo sapien
ttggcaccctcgtttgcggctgagc

SEQ ID NO: 4774440 - DNA, 25 bp, Homo sapien
agaggatgccggagcatggccctgc

SEQ ID NO: 4774441 - DNA, 25 bp, Homo sapien
gtgacttagaggtgagacggccaca

SEQ ID NO: 4774442 - DNA, 25 bp, Homo sapien
caggtgggttctgtacagacggcca

SEQ ID NO: 4774443 - DNA, 25 bp, Homo sapien
ttgggtgacttagaggtgagacggc

SEQ ID NO: 4774444 - DNA, 25 bp, Homo sapien
acttagaggtgagacggccacatgg

SEQ ID NO: 4774445 - DNA, 25 bp, Homo sapien
tcagggaggggtgggtatttgcacg

SEQ ID NO: 4774446 - DNA, 25 bp, Homo sapien
agaggacactttctgcttgggaggg

SEQ ID NO: 4774447 - DNA, 25 bp, Homo sapien
gaggggcgggaactgctgggagcca

SEQ ID NO: 4774448 - DNA, 25 bp, Homo sapien
gtgggtatttgcacggctgatggcc

SEQ ID NO: 4774449 - DNA, 25 bp, Homo sapien
ccacgtggcaaccattggaggagag

SEQ ID NO: 4774450 - DNA, 25 bp, Homo sapien
ctgcaaggaccacatctaaggccat

SEQ ID NO: 4774451 - DNA, 25 bp, Homo sapien
aggccatttgcgaggcacccaggct

SEQ ID NO: 4774452 - DNA, 25 bp, Homo sapien
tctgtgtccaagtgggtggcagtgg

SEQ ID NO: 4774453 - DNA, 25 bp, Homo sapien
cattgatggggctgcgggatggcat

SEQ ID NO: 4774454 - DNA, 25 bp, Homo sapien
gggctgcgggatggcatccttggga

SEQ ID NO: 4774455 - DNA, 25 bp, Homo sapien
gggatgtcccgagggcttcctagac

SEQ ID NO: 4774456 - DNA, 25 bp, Homo sapien
tgtgggagggatgtcccgagggctt

SEQ ID NO: 4774457 - DNA, 25 bp, Homo sapien
tatgaaaaccgttcagagatatggg

SEQ ID NO: 4774458 - DNA, 25 bp, Homo sapien
cttggtcagtgggtactagggagcc

SEQ ID NO: 4774459 - DNA, 25 bp, Homo sapien
gggagagtatatgaaaaccgttcag

SEQ ID NO: 4774460 - DNA, 25 bp, Homo sapien
cgttcagagatatgggcttcacagc

SEQ ID NO: 4774461 - DNA, 25 bp, Homo sapien
ggcagccatatttagtgtccttgga

SEQ ID NO: 4774462 - DNA, 25 bp, Homo sapien
caccgggcagacgtgtgcttggccc

SEQ ID NO: 4774463 - DNA, 25 bp, Homo sapien
gtccttggatgggacaacaccatgg

SEQ ID NO: 4774464 - DNA, 25 bp, Homo sapien
aatgagtgttgaccatgggccccaa

SEQ ID NO: 4774465 - DNA, 25 bp, Homo sapien
gtgggtttgacctgccccagatctc

SEQ ID NO: 4774466 - DNA, 25 bp, Homo sapien
tcctaagttgcagagccgtgggttt

SEQ ID NO: 4774467 - DNA, 25 bp, Homo sapien
ggatagcactcctaagttgcagagc

SEQ ID NO: 4774468 - DNA, 25 bp, Homo sapien
ctaaaatactcaggctcggatagca

SEQ ID NO: 4774469 - DNA, 25 bp, Homo sapien
cccagagctacaggtctgggtattt

SEQ ID NO: 4774470 - DNA, 25 bp, Homo sapien
gtgacttcattctgggcgtaggcgt

SEQ ID NO: 4774471 - DNA, 25 bp, Homo sapien
cattctgggcgtaggcgtagaagac

SEQ ID NO: 4774472 - DNA, 25 bp, Homo sapien
tcctcattgcccagagctacaggtc

SEQ ID NO: 4774473 - DNA, 25 bp, Homo sapien
cttgggtgagtgccgatgtgttctc

SEQ ID NO: 4774474 - DNA, 25 bp, Homo sapien
gcctgcaatcaggaaagtttttgtg

SEQ ID NO: 4774475 - DNA, 25 bp, Homo sapien
gcaatcaggaaagtttttgtggtgg

SEQ ID NO: 4774476 - DNA, 25 bp, Homo sapien
ctgcaatcaggaaagtttttgtggt

SEQ ID NO: 4774477 - DNA, 25 bp, Homo sapien
caatcaggaaagtttttgtggtggg

SEQ ID NO: 4774478 - DNA, 25 bp, Homo sapien
tgcctgcccgtgctgccccagcatc

SEQ ID NO: 4774479 - DNA, 25 bp, Homo sapien
agaccccaggtggtccacagtcctg

SEQ ID NO: 4774480 - DNA, 25 bp, Homo sapien
tcagctgcaccctgtcatggttcat

SEQ ID NO: 4774481 - DNA, 25 bp, Homo sapien
tcctgtcagctgcaccctgtcatgg

SEQ ID NO: 4774482 - DNA, 25 bp, Homo sapien
tacacatggctaccacacgtgaaca

SEQ ID NO: 4774483 - DNA, 25 bp, Homo sapien
catgcatgccccacgtgtgtgtaca

SEQ ID NO: 4774484 - DNA, 25 bp, Homo sapien
tacataggcacatctacacatgcac

SEQ ID NO: 4774485 - DNA, 25 bp, Homo sapien
cacacatagaacacccataggcaca

SEQ ID NO: 4774486 - DNA, 25 bp, Homo sapien
gattctggagaaaccctcgtaacag

SEQ ID NO: 4774487 - DNA, 25 bp, Homo sapien
aagcagctggttcgtcagcgcagca

SEQ ID NO: 4774488 - DNA, 25 bp, Homo sapien
cagggaggagtctttgtcagcagca

SEQ ID NO: 4774489 - DNA, 25 bp, Homo sapien
tcaggactgtggcaataagcgagag

SEQ ID NO: 4774490 - DNA, 25 bp, Homo sapien
gcctggtacagggtagacatccgtc

SEQ ID NO: 4774491 - DNA, 25 bp, Homo sapien
tcaatccagatgaagacctagggtg

SEQ ID NO: 4774492 - DNA, 25 bp, Homo sapien
tgttctgaagatggctggaccggcc

SEQ ID NO: 4774493 - DNA, 25 bp, Homo sapien
cagtatgtccctttgcaggtggagc

SEQ ID NO: 4774494 - DNA, 25 bp, Homo sapien
taagcaggcgtttgatgaaagtccc

SEQ ID NO: 4774495 - DNA, 25 bp, Homo sapien
agtccccactcagcatattaccagg

SEQ ID NO: 4774496 - DNA, 25 bp, Homo sapien
gagcgggaaacgttcatcgagcaga

SEQ ID NO: 4774497 - DNA, 25 bp, Homo sapien
cgtgtatcagcagaacggtgagtct

SEQ ID NO: 4774498 - DNA, 25 bp, Homo sapien
ccactgtggcaagtctggtgcaggt

SEQ ID NO: 4774499 - DNA, 25 bp, Homo sapien
actgtggcaagtctggtgcaggtga

SEQ ID NO: 4774500 - DNA, 25 bp, Homo sapien
gcaggtgatgggggtcacactggcc

SEQ ID NO: 4774501 - DNA, 25 bp, Homo sapien
tgtggcaagtctggtgcaggtgatg

SEQ ID NO: 4774502 - DNA, 25 bp, Homo sapien
gaaccaggaagtatcatggagagca

SEQ ID NO: 4774503 - DNA, 25 bp, Homo sapien
ccttgtcattcatggcacagccgca

SEQ ID NO: 4774504 - DNA, 25 bp, Homo sapien
taaagttgtttatggactcctgggc

SEQ ID NO: 4774505 - DNA, 25 bp, Homo sapien
tttctctgtcctcttgccaccttgt

SEQ ID NO: 4774506 - DNA, 25 bp, Homo sapien
taacagcttcctgctgaaccctgcg

SEQ ID NO: 4774507 - DNA, 25 bp, Homo sapien
ccctgcgttcacaaggtgctgcctg

SEQ ID NO: 4774508 - DNA, 25 bp, Homo sapien
atggagcagggcacgtcctcgtcaa

SEQ ID NO: 4774509 - DNA, 25 bp, Homo sapien
tcgtcaatgacaggtaacagcttcc

SEQ ID NO: 4774510 - DNA, 25 bp, Homo sapien
tgtgaagacatgcacatagcgagcc

SEQ ID NO: 4774511 - DNA, 25 bp, Homo sapien
aaatatacatgtccgctgtccccag

SEQ ID NO: 4774512 - DNA, 25 bp, Homo sapien
cactggagggcgtggtttctgtacc

SEQ ID NO: 4774513 - DNA, 25 bp, Homo sapien
tagcgagcctatacggttctaaagg

SEQ ID NO: 4774514 - DNA, 25 bp, Homo sapien
gagcactttacttgctgtattttcc

SEQ ID NO: 4774515 - DNA, 25 bp, Homo sapien
tgaagtcaatgacgcagttcctcca

SEQ ID NO: 4774516 - DNA, 25 bp, Homo sapien
tcccatgaccgcagggatgaagtca

SEQ ID NO: 4774517 - DNA, 25 bp, Homo sapien
ccagccagtgggagcactttacttg

SEQ ID NO: 4774518 - DNA, 25 bp, Homo sapien
ccatcagaggtccatgtgggtcatc

SEQ ID NO: 4774519 - DNA, 25 bp, Homo sapien
cacaagggccatgtaggaatgccag

SEQ ID NO: 4774520 - DNA, 25 bp, Homo sapien
tgggtcatcattctccgggcaggca

SEQ ID NO: 4774521 - DNA, 25 bp, Homo sapien
ggctgccctgtttcggccaccatgt

SEQ ID NO: 4774522 - DNA, 25 bp, Homo sapien
tggtcgtggttctgttggttctgct

SEQ ID NO: 4774523 - DNA, 25 bp, Homo sapien
cagaagctggggtccttctggatct

SEQ ID NO: 4774524 - DNA, 25 bp, Homo sapien
ctgcttgtcagaagctggggtcctt

SEQ ID NO: 4774525 - DNA, 25 bp, Homo sapien
tctggtcgtggttctgttggttctg

SEQ ID NO: 4774526 - DNA, 25 bp, Homo sapien
tctggcaccctgtgggcctttctct

SEQ ID NO: 4774527 - DNA, 25 bp, Homo sapien
ggcatgttctggcaccctgtgggcc

SEQ ID NO: 4774528 - DNA, 25 bp, Homo sapien
cctttctctctgcacgctggtatct

SEQ ID NO: 4774529 - DNA, 25 bp, Homo sapien
tctgcacgctggtatctctttgggt

SEQ ID NO: 4774530 - DNA, 25 bp, Homo sapien
gagcgttcctgtgaatgtagtgtcc

SEQ ID NO: 4774531 - DNA, 25 bp, Homo sapien
gacatatgaacaacatgagcgttcc

SEQ ID NO: 4774532 - DNA, 25 bp, Homo sapien
tgagcagacattcgtcaagtggtcg

SEQ ID NO: 4774533 - DNA, 25 bp, Homo sapien
tttctgcaggctagcccactgggat

SEQ ID NO: 4774534 - DNA, 25 bp, Homo sapien
gaatgtcagttgttgcgctgggcca

SEQ ID NO: 4774535 - DNA, 25 bp, Homo sapien
aaaacgttaggtgagcagacatgcc

SEQ ID NO: 4774536 - DNA, 25 bp, Homo sapien
tcctcagtagagtgccggttccctg

SEQ ID NO: 4774537 - DNA, 25 bp, Homo sapien
tgagaaatccgccagaaaacgttag

SEQ ID NO: 4774538 - DNA, 25 bp, Homo sapien
gtggtcagtggcacggaatccccaa

SEQ ID NO: 4774539 - DNA, 25 bp, Homo sapien
ccttgtacatggtggtcagtggcac

SEQ ID NO: 4774540 - DNA, 25 bp, Homo sapien
gtgaatcccttccttgtacatggtg

SEQ ID NO: 4774541 - DNA, 25 bp, Homo sapien
cacggaatccccaatagattgtata

SEQ ID NO: 4774542 - DNA, 25 bp, Homo sapien
tgctggtcgggttagctggctgggc

SEQ ID NO: 4774543 - DNA, 25 bp, Homo sapien
tgattacacttagcagtgccacggg

SEQ ID NO: 4774544 - DNA, 25 bp, Homo sapien
gctgcatccacacctctggaggagg

SEQ ID NO: 4774545 - DNA, 25 bp, Homo sapien
tgggccccgagcacggtcagctctg

SEQ ID NO: 4774546 - DNA, 25 bp, Homo sapien
actgtgagcaagctgagggtcccag

SEQ ID NO: 4774547 - DNA, 25 bp, Homo sapien
cgtgtgcattgcaggcctcactgtg

SEQ ID NO: 4774548 - DNA, 25 bp, Homo sapien
gacagcctcgagctgactgtggtcc

SEQ ID NO: 4774549 - DNA, 25 bp, Homo sapien
ggcagtggcttttctggtaggcaca

SEQ ID NO: 4774550 - DNA, 25 bp, Homo sapien
cggtacaggagcagagcgtctgttt

SEQ ID NO: 4774551 - DNA, 25 bp, Homo sapien
tgggtttctggcagccgttcagtgt

SEQ ID NO: 4774552 - DNA, 25 bp, Homo sapien
cccagatgctccagacggtacagga

SEQ ID NO: 4774553 - DNA, 25 bp, Homo sapien
tccagacggtacaggagcagagcgt

SEQ ID NO: 4774554 - DNA, 25 bp, Homo sapien
tctcaactgagacgtgccccagtca

SEQ ID NO: 4774555 - DNA, 25 bp, Homo sapien
tagacgggcaactcgcattcttctc

SEQ ID NO: 4774556 - DNA, 25 bp, Homo sapien
cctgccggaggaacaagcatctcaa

SEQ ID NO: 4774557 - DNA, 25 bp, Homo sapien
gacaacttgccaaattagacgggca

SEQ ID NO: 4774558 - DNA, 25 bp, Homo sapien
cagagaggaaagatcacctgcttca

SEQ ID NO: 4774559 - DNA, 25 bp, Homo sapien
tggatagcagtgagcccttcagtga

SEQ ID NO: 4774560 - DNA, 25 bp, Homo sapien
tggcatggaaactaacaactacgtc

SEQ ID NO: 4774561 - DNA, 25 bp, Homo sapien
tgccctgggtcaaccgacattcgtt

SEQ ID NO: 4774562 - DNA, 25 bp, Homo sapien
cggcgtgtgcttcccttcgtgagga

SEQ ID NO: 4774563 - DNA, 25 bp, Homo sapien
tcccgctcgtgtccaaagtgagagg

SEQ ID NO: 4774564 - DNA, 25 bp, Homo sapien
tgccctcgtcgttgtcggaagatga

SEQ ID NO: 4774565 - DNA, 25 bp, Homo sapien
cggaagatgacgatgtagaagagcc

SEQ ID NO: 4774566 - DNA, 25 bp, Homo sapien
agagaggtctgcggaatgttgagca

SEQ ID NO: 4774567 - DNA, 25 bp, Homo sapien
cagagaggtctgcggaatgttgagc

SEQ ID NO: 4774568 - DNA, 25 bp, Homo sapien
gagaggtctgcggaatgttgagcat

SEQ ID NO: 4774569 - DNA, 25 bp, Homo sapien
gcagagaggtctgcggaatgttgag

SEQ ID NO: 4774570 - DNA, 25 bp, Homo sapien
gaggaggaacatgcggcggcaccat

SEQ ID NO: 4774571 - DNA, 25 bp, Homo sapien
aggcattccaaacggaccgggtctg

SEQ ID NO: 4774572 - DNA, 25 bp, Homo sapien
caggcattccaaacggaccgggtct

SEQ ID NO: 4774573 - DNA, 25 bp, Homo sapien
ccccacgtgtcaaggcagagatgag

SEQ ID NO: 4774574 - DNA, 25 bp, Homo sapien
ggccccaccggattttagaattgca

SEQ ID NO: 4774575 - DNA, 25 bp, Homo sapien
actgtttgcaccacacccctggaaa

SEQ ID NO: 4774576 - DNA, 25 bp, Homo sapien
gattttacagacacataggcggagg

SEQ ID NO: 4774577 - DNA, 25 bp, Homo sapien
tggtcccagaataatgtccgcttgc

SEQ ID NO: 4774578 - DNA, 25 bp, Homo sapien
tgttacatcccagaactgattctca

SEQ ID NO: 4774579 - DNA, 25 bp, Homo sapien
gcagtgaccgaggcttgctggtccc

SEQ ID NO: 4774580 - DNA, 25 bp, Homo sapien
tctggaagatgctcggcaggaggct

SEQ ID NO: 4774581 - DNA, 25 bp, Homo sapien
aggtggcggcgtgagggtccggcgg

SEQ ID NO: 4774582 - DNA, 25 bp, Homo sapien
ctggagagaaggtggcggcgtgagg

SEQ ID NO: 4774583 - DNA, 25 bp, Homo sapien
gtggcggcgtgagggtccggcggcg

SEQ ID NO: 4774584 - DNA, 25 bp, Homo sapien
agaaggtggcggcgtgagggtccgg

SEQ ID NO: 4774585 - DNA, 25 bp, Homo sapien
ccaaagcagggtcgggctgagccca

SEQ ID NO: 4774586 - DNA, 25 bp, Homo sapien
gctccaggctgcgcgagcgagatac

SEQ ID NO: 4774587 - DNA, 25 bp, Homo sapien
gctgcgcgagcgagataccccggtc

SEQ ID NO: 4774588 - DNA, 25 bp, Homo sapien
cgggcagcggccaaagcagggtcgg

SEQ ID NO: 4774589 - DNA, 25 bp, Homo sapien
agccacggaggggaggcggccggcg

SEQ ID NO: 4774590 - DNA, 25 bp, Homo sapien
tagagccacggaggggaggcggccg

SEQ ID NO: 4774591 - DNA, 25 bp, Homo sapien
ctagagccacggaggggaggcggcc

SEQ ID NO: 4774592 - DNA, 25 bp, Homo sapien
agagccacggaggggaggcggccgg

SEQ ID NO: 4774593 - DNA, 25 bp, Homo sapien
cgctcctctgctcgcccttcgcttt

SEQ ID NO: 4774594 - DNA, 25 bp, Homo sapien
tcctcgctcctctgctcgcccttcg

SEQ ID NO: 4774595 - DNA, 25 bp, Homo sapien
gttctgcccgcactgcgctccgctc

SEQ ID NO: 4774596 - DNA, 25 bp, Homo sapien
cgctcctcgctcctctgctcgccct

SEQ ID NO: 4774597 - DNA, 25 bp, Homo sapien
ccctcgtcggcggcttcctcttctg

SEQ ID NO: 4774598 - DNA, 25 bp, Homo sapien
ctccttccctcgtcggcggcttcct

SEQ ID NO: 4774599 - DNA, 25 bp, Homo sapien
tccttccctcgtcggcggcttcctc

SEQ ID NO: 4774600 - DNA, 25 bp, Homo sapien
ttccctcgtcggcggcttcctcttc

SEQ ID NO: 4774601 - DNA, 25 bp, Homo sapien
cagatttagcagatgtaggacgttt

SEQ ID NO: 4774602 - DNA, 25 bp, Homo sapien
tagcagatgtaggacgtttgcccat

SEQ ID NO: 4774603 - DNA, 25 bp, Homo sapien
atggcctctcatgtcagatttagca

SEQ ID NO: 4774604 - DNA, 25 bp, Homo sapien
catgtcagatttagcagatgtagga

SEQ ID NO: 4774605 - DNA, 25 bp, Homo sapien
tgcacagagttgtgtgcctgtgctc

SEQ ID NO: 4774606 - DNA, 25 bp, Homo sapien
tgactgaagcacagccattcttttt

SEQ ID NO: 4774607 - DNA, 25 bp, Homo sapien
tctagacccgctgtgtcatgctgta

SEQ ID NO: 4774608 - DNA, 25 bp, Homo sapien
caggtataagctcacacaaacaggt

SEQ ID NO: 4774609 - DNA, 25 bp, Homo sapien
tcaaggaatgcatctggtaaactgc

SEQ ID NO: 4774610 - DNA, 25 bp, Homo sapien
ggcacatccagggtcgcatagtcaa

SEQ ID NO: 4774611 - DNA, 25 bp, Homo sapien
aaaaggatctggcatactctgtgga

SEQ ID NO: 4774612 - DNA, 25 bp, Homo sapien
cacatgtggtactcagtggtttgac

SEQ ID NO: 4774613 - DNA, 25 bp, Homo sapien
cttgctgcattatatataagcctgc

SEQ ID NO: 4774614 - DNA, 25 bp, Homo sapien
gcaagtgaagcactagaagcaaaag

SEQ ID NO: 4774615 - DNA, 25 bp, Homo sapien
gacctgtgatgcttttcacacttgc

SEQ ID NO: 4774616 - DNA, 25 bp, Homo sapien
tctcaaaagcttgatggatatcatg

SEQ ID NO: 4774617 - DNA, 25 bp, Homo sapien
gagtttattcaagcgccaagtgtta

SEQ ID NO: 4774618 - DNA, 25 bp, Homo sapien
tccatcgtaaagaggtaagggtctc

SEQ ID NO: 4774619 - DNA, 25 bp, Homo sapien
gaagcaaaggtcatgcaccagagaa

SEQ ID NO: 4774620 - DNA, 25 bp, Homo sapien
ccaagtgttagggtagcagacacca

SEQ ID NO: 4774621 - DNA, 25 bp, Homo sapien
caccgcgcctggccttctctcttcc

SEQ ID NO: 4774622 - DNA, 25 bp, Homo sapien
ccgcgcctggccttctctcttcctc

SEQ ID NO: 4774623 - DNA, 25 bp, Homo sapien
gccaccgcgcctggccttctctctt

SEQ ID NO: 4774624 - DNA, 25 bp, Homo sapien
agccaccgcgcctggccttctctct

SEQ ID NO: 4774625 - DNA, 25 bp, Homo sapien
catgtctacagaaacctagtctctg

SEQ ID NO: 4774626 - DNA, 25 bp, Homo sapien
ggcttaattacctctgctccaccgt

SEQ ID NO: 4774627 - DNA, 25 bp, Homo sapien
aggaccttgtctcactcggtctgca

SEQ ID NO: 4774628 - DNA, 25 bp, Homo sapien
tctctctctttagcgcaaagcctct

SEQ ID NO: 4774629 - DNA, 25 bp, Homo sapien
cctgtgtgcacgtctagcacagata

SEQ ID NO: 4774630 - DNA, 25 bp, Homo sapien
tctgtgagcatgtctagcataaagt

SEQ ID NO: 4774631 - DNA, 25 bp, Homo sapien
gtttatggcagttggaacaatggcg

SEQ ID NO: 4774632 - DNA, 25 bp, Homo sapien
cccggaacaatggagcgaagcaatt

SEQ ID NO: 4774633 - DNA, 25 bp, Homo sapien
ggttggtagtcagcaatttctttct

SEQ ID NO: 4774634 - DNA, 25 bp, Homo sapien
tgtgactactaacacaactgctaac

SEQ ID NO: 4774635 - DNA, 25 bp, Homo sapien
tacaatatacccaaatcaatacaat

SEQ ID NO: 4774636 - DNA, 25 bp, Homo sapien
ggttgataagaatctttctgacaaa

SEQ ID NO: 4774637 - DNA, 25 bp, Homo sapien
tcttcaggaaatggagggtacactc

SEQ ID NO: 4774638 - DNA, 25 bp, Homo sapien
taggctgggctaaaggaaccaacag

SEQ ID NO: 4774639 - DNA, 25 bp, Homo sapien
tatttccagcggtgtaggctgggct

SEQ ID NO: 4774640 - DNA, 25 bp, Homo sapien
gaagagaatctcataaagggcctat

SEQ ID NO: 4774641 - DNA, 25 bp, Homo sapien
caatgggtgttatgtgcatggaaga

SEQ ID NO: 4774642 - DNA, 25 bp, Homo sapien
gatgggccatatggtgtaaattcta

SEQ ID NO: 4774643 - DNA, 25 bp, Homo sapien
tcttatgctgcattactgatgggcc

SEQ ID NO: 4774644 - DNA, 25 bp, Homo sapien
tagcaacaggttaactggctcttcc

SEQ ID NO: 4774645 - DNA, 25 bp, Homo sapien
tgccaccacatctgggcaatgtttt

SEQ ID NO: 4774646 - DNA, 25 bp, Homo sapien
tcaagcggtccacccgtgttggcct

SEQ ID NO: 4774647 - DNA, 25 bp, Homo sapien
ccacatctgggcaatgtttttgtat

SEQ ID NO: 4774648 - DNA, 25 bp, Homo sapien
caggctcctctggaactccggagct

SEQ ID NO: 4774649 - DNA, 25 bp, Homo sapien
ttgcagtgagctgagattgcgccat

SEQ ID NO: 4774650 - DNA, 25 bp, Homo sapien
atcactttaactcgggaggcggagt

SEQ ID NO: 4774651 - DNA, 25 bp, Homo sapien
tgagattgcgccattgcattccagc

SEQ ID NO: 4774652 - DNA, 25 bp, Homo sapien
agctgagattgcgccattgcattcc

SEQ ID NO: 4774653 - DNA, 25 bp, Homo sapien
tatgatccaacattactagatgcgc

SEQ ID NO: 4774654 - DNA, 25 bp, Homo sapien
gggacttggtattcaaaacatccag

SEQ ID NO: 4774655 - DNA, 25 bp, Homo sapien
gttgcagactcttgggacttggtat

SEQ ID NO: 4774656 - DNA, 25 bp, Homo sapien
gcgcaagcaaccaggtaagtatgac

SEQ ID NO: 4774657 - DNA, 25 bp, Homo sapien
tagccacactttctagcttgccggg

SEQ ID NO: 4774658 - DNA, 25 bp, Homo sapien
tgatgattacctgcctacactgcct

SEQ ID NO: 4774659 - DNA, 25 bp, Homo sapien
cacagtatgttttgaggccagtaag

SEQ ID NO: 4774660 - DNA, 25 bp, Homo sapien
gcacggaattcagctcatgtacaga

SEQ ID NO: 4774661 - DNA, 25 bp, Homo sapien
tctatcttctaggacagggtacagt

SEQ ID NO: 4774662 - DNA, 25 bp, Homo sapien
tgagatcgtcaatccaggaacctgt

SEQ ID NO: 4774663 - DNA, 25 bp, Homo sapien
taaatggtacagtcaggaccgacag

SEQ ID NO: 4774664 - DNA, 25 bp, Homo sapien
taagaacctatgaagcgccagggca

SEQ ID NO: 4774665 - DNA, 25 bp, Homo sapien
aattggactcaagaatgatcttagt

SEQ ID NO: 4774666 - DNA, 25 bp, Homo sapien
ctttgagactttgttattgacagaa

SEQ ID NO: 4774667 - DNA, 25 bp, Homo sapien
tgagactttgttattgacagaacag

SEQ ID NO: 4774668 - DNA, 25 bp, Homo sapien
tcaaattggactcaagaatgatctt

SEQ ID NO: 4774669 - DNA, 25 bp, Homo sapien
agtgagctgagaacacatcattgta

SEQ ID NO: 4774670 - DNA, 25 bp, Homo sapien
cagtgagctgagaacacatcattgt

SEQ ID NO: 4774671 - DNA, 25 bp, Homo sapien
gctgagaacacatcattgtactcca

SEQ ID NO: 4774672 - DNA, 25 bp, Homo sapien
tgagctgagaacacatcattgtact

SEQ ID NO: 4774673 - DNA, 25 bp, Homo sapien
agcatttgttgtgtggcaggcacac

SEQ ID NO: 4774674 - DNA, 25 bp, Homo sapien
aagtctagacaaatacagtttctgg

SEQ ID NO: 4774675 - DNA, 25 bp, Homo sapien
ttttgcaagggcacagacttatcat

SEQ ID NO: 4774676 - DNA, 25 bp, Homo sapien
acaataactggtctatgttctcgag

SEQ ID NO: 4774677 - DNA, 25 bp, Homo sapien
ggccacagcctgtcggttgcatcct

SEQ ID NO: 4774678 - DNA, 25 bp, Homo sapien
gcttctttggccaaaccgtgcgcgt

SEQ ID NO: 4774679 - DNA, 25 bp, Homo sapien
cgtgcgcgtgcaggctccatgtgct

SEQ ID NO: 4774680 - DNA, 25 bp, Homo sapien
agcctgtcggttgcatcctgctcct

SEQ ID NO: 4774681 - DNA, 25 bp, Homo sapien
aaaagaacaaatggagagatgaagg

SEQ ID NO: 4774682 - DNA, 25 bp, Homo sapien
gaacaaatggagagatgaaggtaag

SEQ ID NO: 4774683 - DNA, 25 bp, Homo sapien
gagtgctgggtttctaaatttatat

SEQ ID NO: 4774684 - DNA, 25 bp, Homo sapien
aatgttttatgcaagcctaatatac

SEQ ID NO: 4774685 - DNA, 25 bp, Homo sapien
tgggagatccactgcaaaggcgcac

SEQ ID NO: 4774686 - DNA, 25 bp, Homo sapien
gaagcagttacgacagagctttgga

SEQ ID NO: 4774687 - DNA, 25 bp, Homo sapien
cagtctagccattgcgcagtggtaa

SEQ ID NO: 4774688 - DNA, 25 bp, Homo sapien
cagaagatgctactaaagcaacaag

SEQ ID NO: 4774689 - DNA, 25 bp, Homo sapien
ttcagacattatggtgtgtttggcc

SEQ ID NO: 4774690 - DNA, 25 bp, Homo sapien
tagggctacctgtaccttcagacat

SEQ ID NO: 4774691 - DNA, 25 bp, Homo sapien
tgtcataggtgtaaaaaccacaacc

SEQ ID NO: 4774692 - DNA, 25 bp, Homo sapien
tcaagacagtctcttccgtgacgag

SEQ ID NO: 4774693 - DNA, 25 bp, Homo sapien
aacagagtgactcggcctcggctcc

SEQ ID NO: 4774694 - DNA, 25 bp, Homo sapien
gcggaactgcattctcgcgctcctt

SEQ ID NO: 4774695 - DNA, 25 bp, Homo sapien
tagaaaggcggcgtcccgacgaaca

SEQ ID NO: 4774696 - DNA, 25 bp, Homo sapien
ccggaccccgcagtcagtgtgggca

SEQ ID NO: 4774697 - DNA, 25 bp, Homo sapien
catccgcttccacgtcaaggtgagg

SEQ ID NO: 4774698 - DNA, 25 bp, Homo sapien
ttcggcggcaacatcgagctcttcg

SEQ ID NO: 4774699 - DNA, 25 bp, Homo sapien
ccagaattcggaggcgacagtgtca

SEQ ID NO: 4774700 - DNA, 25 bp, Homo sapien
ttcgtcttcttcaacggcgcgctcg

SEQ ID NO: 4774701 - DNA, 25 bp, Homo sapien
ttgaggcgggcaggctatcactcac

SEQ ID NO: 4774702 - DNA, 25 bp, Homo sapien
cctatttgaggcgggcaggctatca

SEQ ID NO: 4774703 - DNA, 25 bp, Homo sapien
tatttgaggcgggcaggctatcact

SEQ ID NO: 4774704 - DNA, 25 bp, Homo sapien
tttgaggcgggcaggctatcactca

SEQ ID NO: 4774705 - DNA, 25 bp, Homo sapien
gccaatgttgttagcccggtgacag

SEQ ID NO: 4774706 - DNA, 25 bp, Homo sapien
gcaaatatcagtgctgctgccgccg

SEQ ID NO: 4774707 - DNA, 25 bp, Homo sapien
tattcagtgaccttcagcggtgccc

SEQ ID NO: 4774708 - DNA, 25 bp, Homo sapien
tgtagatcccatgcgaaaggagtcg

SEQ ID NO: 4774709 - DNA, 25 bp, Homo sapien
ggtacacgctgttgccacatccagc

SEQ ID NO: 4774710 - DNA, 25 bp, Homo sapien
ggccattcacctcgaatttttccca

SEQ ID NO: 4774711 - DNA, 25 bp, Homo sapien
tacaggtacacgctgttgccacatc

SEQ ID NO: 4774712 - DNA, 25 bp, Homo sapien
cattcacctcgaatttttcccaggg

SEQ ID NO: 4774713 - DNA, 25 bp, Homo sapien
caggattatgccgttctagttgcca

SEQ ID NO: 4774714 - DNA, 25 bp, Homo sapien
tcagtttcttgttcaccgtgtggag

SEQ ID NO: 4774715 - DNA, 25 bp, Homo sapien
gaacctgttgccttagtattgtcca

SEQ ID NO: 4774716 - DNA, 25 bp, Homo sapien
gattttgccctttgatactacctgg

SEQ ID NO: 4774717 - DNA, 25 bp, Homo sapien
cctgatccagagtgtgcttagcatg

SEQ ID NO: 4774718 - DNA, 25 bp, Homo sapien
tgtaaaatagcggaggcgattggcc

SEQ ID NO: 4774719 - DNA, 25 bp, Homo sapien
agatgcatagcaaggtgtgacccca

SEQ ID NO: 4774720 - DNA, 25 bp, Homo sapien
ttgatgccatttgccctcgggacag

SEQ ID NO: 4774721 - DNA, 25 bp, Homo sapien
tgcagatttggcgacgggtcagccc

SEQ ID NO: 4774722 - DNA, 25 bp, Homo sapien
gaactgtgcggaaaggtgacttgca

SEQ ID NO: 4774723 - DNA, 25 bp, Homo sapien
ttacatgggatagttagggaggcca

SEQ ID NO: 4774724 - DNA, 25 bp, Homo sapien
tagtgccttgaaactgaagctggcc

SEQ ID NO: 4774725 - DNA, 25 bp, Homo sapien
tttgactcccgcacttaaaatgaag

SEQ ID NO: 4774726 - DNA, 25 bp, Homo sapien
taagtacagacagcgcttgccgcag

SEQ ID NO: 4774727 - DNA, 25 bp, Homo sapien
ccctggctgaaaacggagtgatggc

SEQ ID NO: 4774728 - DNA, 25 bp, Homo sapien
gctatgtcttcagacgggtccctgg

SEQ ID NO: 4774729 - DNA, 25 bp, Homo sapien
tgcccgcaagagctaagtaggatct

SEQ ID NO: 4774730 - DNA, 25 bp, Homo sapien
tatctagccgtttcgaatatcaaca

SEQ ID NO: 4774731 - DNA, 25 bp, Homo sapien
tgccctaactcatggattgtgcaag

SEQ ID NO: 4774732 - DNA, 25 bp, Homo sapien
gaaactttcgtgactaataccatgc

SEQ ID NO: 4774733 - DNA, 25 bp, Homo sapien
cgagcgcctggagaaagcgccccgt

SEQ ID NO: 4774734 - DNA, 25 bp, Homo sapien
ttctctgcagcctgatatgaggtcc

SEQ ID NO: 4774735 - DNA, 25 bp, Homo sapien
ccaggagagctgcggcgatcccgct

SEQ ID NO: 4774736 - DNA, 25 bp, Homo sapien
atggtgggctaacggcgccggaggc

SEQ ID NO: 4774737 - DNA, 25 bp, Homo sapien
tgttccggggccacggctgagtccc

SEQ ID NO: 4774738 - DNA, 25 bp, Homo sapien
cctgactcgccggttcctgacggtg

SEQ ID NO: 4774739 - DNA, 25 bp, Homo sapien
tgactcgccggttcctgacggtggc

SEQ ID NO: 4774740 - DNA, 25 bp, Homo sapien
gttcctgacggtggcccgctgttcc

SEQ ID NO: 4774741 - DNA, 25 bp, Homo sapien
ggagtgtccctctagccagtgccct

SEQ ID NO: 4774742 - DNA, 25 bp, Homo sapien
gagtgtccctctagccagtgccctt

SEQ ID NO: 4774743 - DNA, 25 bp, Homo sapien
agtgtccctctagccagtgcccttc

SEQ ID NO: 4774744 - DNA, 25 bp, Homo sapien
ccacatttcccagcacgatgcggat

SEQ ID NO: 4774745 - DNA, 25 bp, Homo sapien
tgctaggagactgagccaggtttcc

SEQ ID NO: 4774746 - DNA, 25 bp, Homo sapien
ctaaggagccttgtcatggatgctg

SEQ ID NO: 4774747 - DNA, 25 bp, Homo sapien
tcctgtccggagattctggaattcc

SEQ ID NO: 4774748 - DNA, 25 bp, Homo sapien
cccaccgtgggggctcagttccctg

SEQ ID NO: 4774749 - DNA, 25 bp, Homo sapien
gcttcatgatcgagtgcgacgcctg

SEQ ID NO: 4774750 - DNA, 25 bp, Homo sapien
tacccgcttcatgatcgagtgcgac

SEQ ID NO: 4774751 - DNA, 25 bp, Homo sapien
gacgttacccgcttcatgatcgagt

SEQ ID NO: 4774752 - DNA, 25 bp, Homo sapien
catgatcgagtgcgacgcctgcaag

SEQ ID NO: 4774753 - DNA, 25 bp, Homo sapien
cccctgcgaagttgcaggaactttc

SEQ ID NO: 4774754 - DNA, 25 bp, Homo sapien
cggagcagctagacccggcaggcct

SEQ ID NO: 4774755 - DNA, 25 bp, Homo sapien
cgggagaggcgcgagtggcgggctc

SEQ ID NO: 4774756 - DNA, 25 bp, Homo sapien
ggccggcgagctcccttggaccttg

SEQ ID NO: 4774757 - DNA, 25 bp, Homo sapien
taactggggtatctgagctgatgtc

SEQ ID NO: 4774758 - DNA, 25 bp, Homo sapien
ccaaagcgtgctgttgtccgtcctt

SEQ ID NO: 4774759 - DNA, 25 bp, Homo sapien
aggctctttcccgagccaaagcgtg

SEQ ID NO: 4774760 - DNA, 25 bp, Homo sapien
ttcatccggtgagccaggttgtgtc

SEQ ID NO: 4774761 - DNA, 25 bp, Homo sapien
ttccctgaggatgctagacctggat

SEQ ID NO: 4774762 - DNA, 25 bp, Homo sapien
aaatatgtgcgtaaccagagatgcc

SEQ ID NO: 4774763 - DNA, 25 bp, Homo sapien
gatgccttcctcttgatggaacttc

SEQ ID NO: 4774764 - DNA, 25 bp, Homo sapien
gcaggtaaatatgtgcgtaaccaga

SEQ ID NO: 4774765 - DNA, 25 bp, Homo sapien
tcagcgagctagtcccgtgtccatc

SEQ ID NO: 4774766 - DNA, 25 bp, Homo sapien
gagctagtcccgtgtccatctccat

SEQ ID NO: 4774767 - DNA, 25 bp, Homo sapien
tcccgtgtccatctccatgggtgtg

SEQ ID NO: 4774768 - DNA, 25 bp, Homo sapien
gcattgttttgtactgtgcgtgcct

SEQ ID NO: 4774769 - DNA, 25 bp, Homo sapien
tgtgtttatttttaccgtcatcgtc

SEQ ID NO: 4774770 - DNA, 25 bp, Homo sapien
gctctccagggtgggttccgaagaa

SEQ ID NO: 4774771 - DNA, 25 bp, Homo sapien
ttatttttaccgtcatcgtcttcat

SEQ ID NO: 4774772 - DNA, 25 bp, Homo sapien
aagaaggcctgctggacctcgggct

SEQ ID NO: 4774773 - DNA, 25 bp, Homo sapien
acatgccaccacgagggctgatgtg

SEQ ID NO: 4774774 - DNA, 25 bp, Homo sapien
tcctggacttcactaaaccataaca

SEQ ID NO: 4774775 - DNA, 25 bp, Homo sapien
catgccaccacgagggctgatgtgg

SEQ ID NO: 4774776 - DNA, 25 bp, Homo sapien
tcacctttcctggacttcactaaac

SEQ ID NO: 4774777 - DNA, 25 bp, Homo sapien
tcattcaaagtctaaccaggcctga

SEQ ID NO: 4774778 - DNA, 25 bp, Homo sapien
tctcattcaaagtctaaccaggcct

SEQ ID NO: 4774779 - DNA, 25 bp, Homo sapien
cattcaaagtctaaccaggcctgat

SEQ ID NO: 4774780 - DNA, 25 bp, Homo sapien
cctctcattcaaagtctaaccaggc

SEQ ID NO: 4774781 - DNA, 25 bp, Homo sapien
gggctggatgatcacgttcatgcca

SEQ ID NO: 4774782 - DNA, 25 bp, Homo sapien
tggatgatcacgttcatgccatgaa

SEQ ID NO: 4774783 - DNA, 25 bp, Homo sapien
gatgatcacgttcatgccatgaatc

SEQ ID NO: 4774784 - DNA, 25 bp, Homo sapien
ccatgaatcttgtggattccgtgtt

SEQ ID NO: 4774785 - DNA, 25 bp, Homo sapien
gtgtgtgcccattggcctctcctgg

SEQ ID NO: 4774786 - DNA, 25 bp, Homo sapien
gacggcagtgtgtgcccattggcct

SEQ ID NO: 4774787 - DNA, 25 bp, Homo sapien
ctctcctggactgtcaaagtgagca

SEQ ID NO: 4774788 - DNA, 25 bp, Homo sapien
cctggactgtcaaagtgagcatctc

SEQ ID NO: 4774789 - DNA, 25 bp, Homo sapien
cgtggcccgtgctctatgcctgcta

SEQ ID NO: 4774790 - DNA, 25 bp, Homo sapien
tggtggcttccggtagcccgtgctc

SEQ ID NO: 4774791 - DNA, 25 bp, Homo sapien
tgtacgaggctgagcattccaagtg

SEQ ID NO: 4774792 - DNA, 25 bp, Homo sapien
gaagtttgcacttcggccaacaagc

SEQ ID NO: 4774793 - DNA, 25 bp, Homo sapien
agatgtgggtgggctcccgggacag

SEQ ID NO: 4774794 - DNA, 25 bp, Homo sapien
atgtgggtgggctcccgggacagac

SEQ ID NO: 4774795 - DNA, 25 bp, Homo sapien
gatgtgggtgggctcccgggacaga

SEQ ID NO: 4774796 - DNA, 25 bp, Homo sapien
cccacatctgggtcctcatggagcc

SEQ ID NO: 4774797 - DNA, 25 bp, Homo sapien
tccccacatctgggtcctcatggag

SEQ ID NO: 4774798 - DNA, 25 bp, Homo sapien
cacatctgggtcctcatggagcctc

SEQ ID NO: 4774799 - DNA, 25 bp, Homo sapien
catctgggtcctcatggagcctctg

SEQ ID NO: 4774800 - DNA, 25 bp, Homo sapien
ctcaggtggcccacgatgggcttcc

SEQ ID NO: 4774801 - DNA, 25 bp, Homo sapien
ggtggcccacgatgggcttcctgca

SEQ ID NO: 4774802 - DNA, 25 bp, Homo sapien
tggcccacgatgggcttcctgcaga

SEQ ID NO: 4774803 - DNA, 25 bp, Homo sapien
aggtggcccacgatgggcttcctgc

SEQ ID NO: 4774804 - DNA, 25 bp, Homo sapien
cctcgttaggtgctgtctccttggc

SEQ ID NO: 4774805 - DNA, 25 bp, Homo sapien
gctggagcttgcacaatcgaagccc

SEQ ID NO: 4774806 - DNA, 25 bp, Homo sapien
aagccctggatcctcgttaggtgct

SEQ ID NO: 4774807 - DNA, 25 bp, Homo sapien
gagcttgcacaatcgaagccctgga

SEQ ID NO: 4774808 - DNA, 25 bp, Homo sapien
tcggtgctagcaggggatctggcct

SEQ ID NO: 4774809 - DNA, 25 bp, Homo sapien
gcaatgcagatgtagggtcggtgct

SEQ ID NO: 4774810 - DNA, 25 bp, Homo sapien
actgtcggggttggtggcacaggca

SEQ ID NO: 4774811 - DNA, 25 bp, Homo sapien
ggtcggtgctagcaggggatctggc

SEQ ID NO: 4774812 - DNA, 25 bp, Homo sapien
ggcctttcacctgtgccacccagtt

SEQ ID NO: 4774813 - DNA, 25 bp, Homo sapien
caaggtgaggcctttcacctgtgcc

SEQ ID NO: 4774814 - DNA, 25 bp, Homo sapien
ctggccaaggtgaggcctttcacct

SEQ ID NO: 4774815 - DNA, 25 bp, Homo sapien
aaggcagctgtcctggccaaggtga

SEQ ID NO: 4774816 - DNA, 25 bp, Homo sapien
gaagtggaagtcctgctctcccaag

SEQ ID NO: 4774817 - DNA, 25 bp, Homo sapien
ccacacccaagggagagcttcagtt

SEQ ID NO: 4774818 - DNA, 25 bp, Homo sapien
tacttgctgcagacgtaaactcagc

SEQ ID NO: 4774819 - DNA, 25 bp, Homo sapien
gaaagctctctagctgggagccggt

SEQ ID NO: 4774820 - DNA, 25 bp, Homo sapien
tagacgttgctcattgattcaccag

SEQ ID NO: 4774821 - DNA, 25 bp, Homo sapien
gagtgactgcgctcacttaggcagg

SEQ ID NO: 4774822 - DNA, 25 bp, Homo sapien
tccatgccgactagttagacgttgc

SEQ ID NO: 4774823 - DNA, 25 bp, Homo sapien
tcccggcagtgccttctgaggagtg

SEQ ID NO: 4774824 - DNA, 25 bp, Homo sapien
tagttctggtgcacagacaggtgag

SEQ ID NO: 4774825 - DNA, 25 bp, Homo sapien
aaagggacgttgcagggtgtacctg

SEQ ID NO: 4774826 - DNA, 25 bp, Homo sapien
cccaggagtggctagatgcagtgac

SEQ ID NO: 4774827 - DNA, 25 bp, Homo sapien
gggcacctgtcctggctacatacag

SEQ ID NO: 4774828 - DNA, 25 bp, Homo sapien
tgctcagccctagaaggcctggctg

SEQ ID NO: 4774829 - DNA, 25 bp, Homo sapien
ggcctggctgagaatggagacagta

SEQ ID NO: 4774830 - DNA, 25 bp, Homo sapien
ctcagctcagcaaaaccctcggcct

SEQ ID NO: 4774831 - DNA, 25 bp, Homo sapien
gctctccaagttacagcaggcctca

SEQ ID NO: 4774832 - DNA, 25 bp, Homo sapien
ccccgagctttctggttggcaggtg

SEQ ID NO: 4774833 - DNA, 25 bp, Homo sapien
tcagccaagtccagacagtgctcgg

SEQ ID NO: 4774834 - DNA, 25 bp, Homo sapien
gctaagactggcagctgggttggtg

SEQ ID NO: 4774835 - DNA, 25 bp, Homo sapien
tgaggaagggtctgccccgagcttt

SEQ ID NO: 4774836 - DNA, 25 bp, Homo sapien
gcagccttacactctgtctttacag

SEQ ID NO: 4774837 - DNA, 25 bp, Homo sapien
tatacgagttttttgctgagtcaga

SEQ ID NO: 4774838 - DNA, 25 bp, Homo sapien
tactagcaccttgtgaagtgtttcc

SEQ ID NO: 4774839 - DNA, 25 bp, Homo sapien
gggatacagttattttactagcacc

SEQ ID NO: 4774840 - DNA, 25 bp, Homo sapien
cctggatgtttttgtccactgggag

SEQ ID NO: 4774841 - DNA, 25 bp, Homo sapien
cctgtttggagggacgcagtcccta

SEQ ID NO: 4774842 - DNA, 25 bp, Homo sapien
ggaggccttatccactcccacttgt

SEQ ID NO: 4774843 - DNA, 25 bp, Homo sapien
ccacttgtcctgtttggagggacgc

SEQ ID NO: 4774844 - DNA, 25 bp, Homo sapien
tttatataatctaacctggacatca

SEQ ID NO: 4774845 - DNA, 25 bp, Homo sapien
gagtctcacggggccccaggcttat

SEQ ID NO: 4774846 - DNA, 25 bp, Homo sapien
atttatataatctaacctggacatc

SEQ ID NO: 4774847 - DNA, 25 bp, Homo sapien
gtcgctgctcgtgatgtgtggcagg

SEQ ID NO: 4774848 - DNA, 25 bp, Homo sapien
cagaggcactcaaatggtgcaagcc

SEQ ID NO: 4774849 - DNA, 25 bp, Homo sapien
tgagcgcaggggtggggtcgctgct

SEQ ID NO: 4774850 - DNA, 25 bp, Homo sapien
gaggcactcaaatggtgcaagccca

SEQ ID NO: 4774851 - DNA, 25 bp, Homo sapien
ccaggtatataaggctggtccaata

SEQ ID NO: 4774852 - DNA, 25 bp, Homo sapien
gagaggaactccctcaattcgctaa

SEQ ID NO: 4774853 - DNA, 25 bp, Homo sapien
caatacaatctaccatatcaacagg

SEQ ID NO: 4774854 - DNA, 25 bp, Homo sapien
tctagctactgtgatgaggcaagga

SEQ ID NO: 4774855 - DNA, 25 bp, Homo sapien
ggcccttgttcttggagctcatgga

SEQ ID NO: 4774856 - DNA, 25 bp, Homo sapien
cccttgttcttggagctcatggatg

SEQ ID NO: 4774857 - DNA, 25 bp, Homo sapien
tggatgaggcccttgttcttggagc

SEQ ID NO: 4774858 - DNA, 25 bp, Homo sapien
ttgttcttggagctcatggatggga

SEQ ID NO: 4774859 - DNA, 25 bp, Homo sapien
catgtggcacacagcggtcattgat

SEQ ID NO: 4774860 - DNA, 25 bp, Homo sapien
ggggccttttgtgctcatgtggcac

SEQ ID NO: 4774861 - DNA, 25 bp, Homo sapien
gctggatggggccttttgtgctcat

SEQ ID NO: 4774862 - DNA, 25 bp, Homo sapien
cacagcggtcattgattcggtccct

SEQ ID NO: 4774863 - DNA, 25 bp, Homo sapien
aacgtgggccccagaccgtctgtct

SEQ ID NO: 4774864 - DNA, 25 bp, Homo sapien
gccaagaacttgtgaatggtccaag

SEQ ID NO: 4774865 - DNA, 25 bp, Homo sapien
tgagaggagatctatgagcagaccc

SEQ ID NO: 4774866 - DNA, 25 bp, Homo sapien
tccccttgcgggtgttcctggcaac

SEQ ID NO: 4774867 - DNA, 25 bp, Homo sapien
cgtggcgggcaaagcctccttttca

SEQ ID NO: 4774868 - DNA, 25 bp, Homo sapien
aggaatggagccgtggcgggcaaag

SEQ ID NO: 4774869 - DNA, 25 bp, Homo sapien
ggcgggcaaagcctccttttcagca

SEQ ID NO: 4774870 - DNA, 25 bp, Homo sapien
gcaaagcctccttttcagcacacat

SEQ ID NO: 4774871 - DNA, 25 bp, Homo sapien
tcaaaggcatgggttttcaaaggag

SEQ ID NO: 4774872 - DNA, 25 bp, Homo sapien
ttatgggcactgctttttcaaaggc

SEQ ID NO: 4774873 - DNA, 25 bp, Homo sapien
ttgtcccgggtttatgggcactgct

SEQ ID NO: 4774874 - DNA, 25 bp, Homo sapien
tcaaaggaggttcagctgcattcct

SEQ ID NO: 4774875 - DNA, 25 bp, Homo sapien
ttagtcctcgtaagcgtgtacagag

SEQ ID NO: 4774876 - DNA, 25 bp, Homo sapien
tcctcgtaagcgtgtacagagcttc

SEQ ID NO: 4774877 - DNA, 25 bp, Homo sapien
tcgtaagcgtgtacagagcttcctt

SEQ ID NO: 4774878 - DNA, 25 bp, Homo sapien
gtaagcgtgtacagagcttccttgt

SEQ ID NO: 4774879 - DNA, 25 bp, Homo sapien
tggatctttggcagtcagagctgag

SEQ ID NO: 4774880 - DNA, 25 bp, Homo sapien
tctttggcagtcagagctgagggca

SEQ ID NO: 4774881 - DNA, 25 bp, Homo sapien
agtccccagagtacagctgtcttgc

SEQ ID NO: 4774882 - DNA, 25 bp, Homo sapien
tacagctgtcttgctgatgcccctc

SEQ ID NO: 4774883 - DNA, 25 bp, Homo sapien
gttgtcagacacaatcgcagctgcc

SEQ ID NO: 4774884 - DNA, 25 bp, Homo sapien
gggtgttgtcagacacaatcgcagc

SEQ ID NO: 4774885 - DNA, 25 bp, Homo sapien
cacagagctggggtgttgtcagaca

SEQ ID NO: 4774886 - DNA, 25 bp, Homo sapien
atcgcagctgccaggtcccaaggca

SEQ ID NO: 4774887 - DNA, 25 bp, Homo sapien
gggtaagcagggctaatgggcccca

SEQ ID NO: 4774888 - DNA, 25 bp, Homo sapien
ggtaagcagggctaatgggccccag

SEQ ID NO: 4774889 - DNA, 25 bp, Homo sapien
taagcagggctaatgggccccaggt

SEQ ID NO: 4774890 - DNA, 25 bp, Homo sapien
agcagggctaatgggccccaggtag

SEQ ID NO: 4774891 - DNA, 25 bp, Homo sapien
aggtggaggggagggcagctcgggc

SEQ ID NO: 4774892 - DNA, 25 bp, Homo sapien
tggaggggagggcagctcgggcagg

SEQ ID NO: 4774893 - DNA, 25 bp, Homo sapien
gaggggagggcagctcgggcagggc

SEQ ID NO: 4774894 - DNA, 25 bp, Homo sapien
gaaggtggaggggagggcagctcgg

SEQ ID NO: 4774895 - DNA, 25 bp, Homo sapien
ggcatcctaggtgggggaacttctc

SEQ ID NO: 4774896 - DNA, 25 bp, Homo sapien
tccaaggtctgggagctcaaggatg

SEQ ID NO: 4774897 - DNA, 25 bp, Homo sapien
actgtcctaggcatcctaggtgggg

SEQ ID NO: 4774898 - DNA, 25 bp, Homo sapien
tcctaggcatcctaggtgggggaac

SEQ ID NO: 4774899 - DNA, 25 bp, Homo sapien
cagtgactgtagaaacacttggagt

SEQ ID NO: 4774900 - DNA, 25 bp, Homo sapien
cataagctgaagctactgctaaagt

SEQ ID NO: 4774901 - DNA, 25 bp, Homo sapien
gaaacacttggagtaattggcttca

SEQ ID NO: 4774902 - DNA, 25 bp, Homo sapien
aagctactgctaaagtcagtgactg

SEQ ID NO: 4774903 - DNA, 25 bp, Homo sapien
tgggctccgcttccaaagctgtgcc

SEQ ID NO: 4774904 - DNA, 25 bp, Homo sapien
gtcctgaggcctgcactttgtcaga

SEQ ID NO: 4774905 - DNA, 25 bp, Homo sapien
tttgtcagacactttaacactgtgg

SEQ ID NO: 4774906 - DNA, 25 bp, Homo sapien
gtctggatggcataagggcgactta

SEQ ID NO: 4774907 - DNA, 25 bp, Homo sapien
gaaagtacaaggagtgacaccagtt

SEQ ID NO: 4774908 - DNA, 25 bp, Homo sapien
ctggaagtccaggtgtcaggctcca

SEQ ID NO: 4774909 - DNA, 25 bp, Homo sapien
ggggaaagtacaaggagtgacacca

SEQ ID NO: 4774910 - DNA, 25 bp, Homo sapien
ggaaagtacaaggagtgacaccagt

SEQ ID NO: 4774911 - DNA, 25 bp, Homo sapien
tctcagctctaacgttggctctgcc

SEQ ID NO: 4774912 - DNA, 25 bp, Homo sapien
cttggctgtgatcagcccgagcctc

SEQ ID NO: 4774913 - DNA, 25 bp, Homo sapien
agctctaacgttggctctgccacct

SEQ ID NO: 4774914 - DNA, 25 bp, Homo sapien
tgtgatcagcccgagcctcgaggcc

SEQ ID NO: 4774915 - DNA, 25 bp, Homo sapien
gatcccgacaccaaggcagtgggtg

SEQ ID NO: 4774916 - DNA, 25 bp, Homo sapien
gactgagaggatcccgacaccaagg

SEQ ID NO: 4774917 - DNA, 25 bp, Homo sapien
cagagctgtagggtaacaggctgat

SEQ ID NO: 4774918 - DNA, 25 bp, Homo sapien
ctgtagggtaacaggctgatggact

SEQ ID NO: 4774919 - DNA, 25 bp, Homo sapien
tgggcctcgagtcacaggtagatta

SEQ ID NO: 4774920 - DNA, 25 bp, Homo sapien
ctgtgacaagctgggcgatcctcaa

SEQ ID NO: 4774921 - DNA, 25 bp, Homo sapien
tctgtgttacgggacgatgctcggc

SEQ ID NO: 4774922 - DNA, 25 bp, Homo sapien
gtagattaggcccagacctctgagc

SEQ ID NO: 4774923 - DNA, 25 bp, Homo sapien
gctggctaagtgtgcacagacacca

SEQ ID NO: 4774924 - DNA, 25 bp, Homo sapien
agcaagccgccaacggcacctgcag

SEQ ID NO: 4774925 - DNA, 25 bp, Homo sapien
tggtcccgctggctaagtgtgcaca

SEQ ID NO: 4774926 - DNA, 25 bp, Homo sapien
cgccaacggcacctgcaggcatctc

SEQ ID NO: 4774927 - DNA, 25 bp, Homo sapien
ctatgggagacgtggtacagtcact

SEQ ID NO: 4774928 - DNA, 25 bp, Homo sapien
cagcgtgcctggcactacgcaaggc

SEQ ID NO: 4774929 - DNA, 25 bp, Homo sapien
tttgtaaagcgctgctgggtctcct

SEQ ID NO: 4774930 - DNA, 25 bp, Homo sapien
agtcactccctgctttgtaaagcgc

SEQ ID NO: 4774931 - DNA, 25 bp, Homo sapien
gcggttgcgcctctgacttccttta

SEQ ID NO: 4774932 - DNA, 25 bp, Homo sapien
acttgcgtcgttgtgtaggcgtctg

SEQ ID NO: 4774933 - DNA, 25 bp, Homo sapien
tgagggccacctgacgtcgtctagt

SEQ ID NO: 4774934 - DNA, 25 bp, Homo sapien
gtcgtctagtgtctccacgccttga

SEQ ID NO: 4774935 - DNA, 25 bp, Homo sapien
cttcctctaggatgtgcaaccagtt

SEQ ID NO: 4774936 - DNA, 25 bp, Homo sapien
ctttccgtgaaagcctctgtgggct

SEQ ID NO: 4774937 - DNA, 25 bp, Homo sapien
cattaaatgccttgtattctaaaca

SEQ ID NO: 4774938 - DNA, 25 bp, Homo sapien
ctaggatgtgcaaccagttctctgc

SEQ ID NO: 4774939 - DNA, 25 bp, Homo sapien
gcataacgtctgtccctctcaagtc

SEQ ID NO: 4774940 - DNA, 25 bp, Homo sapien
agccaacacacgcataacgtctgtc

SEQ ID NO: 4774941 - DNA, 25 bp, Homo sapien
tggcctcaggtatgctgtgagaagc

SEQ ID NO: 4774942 - DNA, 25 bp, Homo sapien
tgctggcctcaggtatgctgtgaga

SEQ ID NO: 4774943 - DNA, 25 bp, Homo sapien
ggtctccactgtggaggtgccacag

SEQ ID NO: 4774944 - DNA, 25 bp, Homo sapien
tgttggccccttccgggtggcgctg

SEQ ID NO: 4774945 - DNA, 25 bp, Homo sapien
tagttgacatcggtgttggcccctt

SEQ ID NO: 4774946 - DNA, 25 bp, Homo sapien
ctcaggacgccctgagggtgacgcc

SEQ ID NO: 4774947 - DNA, 25 bp, Homo sapien
gtggaggcagagctgttctgctgtg

SEQ ID NO: 4774948 - DNA, 25 bp, Homo sapien
gcagagctgttctgctgtggctgca

SEQ ID NO: 4774949 - DNA, 25 bp, Homo sapien
tgggtggaggcagagctgttctgct

SEQ ID NO: 4774950 - DNA, 25 bp, Homo sapien
cttcagcaggaacagctgggtggag

SEQ ID NO: 4774951 - DNA, 25 bp, Homo sapien
cccaattccaacagtgtgagaattc

SEQ ID NO: 4774952 - DNA, 25 bp, Homo sapien
ggtcccaattccaacagtgtgagaa

SEQ ID NO: 4774953 - DNA, 25 bp, Homo sapien
tcccaattccaacagtgtgagaatt

SEQ ID NO: 4774954 - DNA, 25 bp, Homo sapien
cccagaaatggagggccactgtgca

SEQ ID NO: 4774955 - DNA, 25 bp, Homo sapien
ttcctgcccagaaatggagggccac

SEQ ID NO: 4774956 - DNA, 25 bp, Homo sapien
tgcccagaaatggagggccactgtg

SEQ ID NO: 4774957 - DNA, 25 bp, Homo sapien
cctgcccagaaatggagggccactg

SEQ ID NO: 4774958 - DNA, 25 bp, Homo sapien
tgagagcaaggtagagtccatccga

SEQ ID NO: 4774959 - DNA, 25 bp, Homo sapien
gatactcgtatgtggagatgccaag

SEQ ID NO: 4774960 - DNA, 25 bp, Homo sapien
gaatgcgtggttacatccaccctga

SEQ ID NO: 4774961 - DNA, 25 bp, Homo sapien
gacacgtccgcggtttgctgcaaaa

SEQ ID NO: 4774962 - DNA, 25 bp, Homo sapien
catgaactctcttaattcaattgag

SEQ ID NO: 4774963 - DNA, 25 bp, Homo sapien
cactgggagtaatgggctgtttccg

SEQ ID NO: 4774964 - DNA, 25 bp, Homo sapien
tgagaggccattatcggcactggga

SEQ ID NO: 4774965 - DNA, 25 bp, Homo sapien
tacggaaacagatttcatgcctggg

SEQ ID NO: 4774966 - DNA, 25 bp, Homo sapien
gacttcctgtcgaagacaacctgag

SEQ ID NO: 4774967 - DNA, 25 bp, Homo sapien
catggtcagggcgtaaaacaagccc

SEQ ID NO: 4774968 - DNA, 25 bp, Homo sapien
cgcccacgatatgaatggccagtga

SEQ ID NO: 4774969 - DNA, 25 bp, Homo sapien
catcacagcggtctgctgggagctc

SEQ ID NO: 4774970 - DNA, 25 bp, Homo sapien
ggaagaaggaggggccagagcaaac

SEQ ID NO: 4774971 - DNA, 25 bp, Homo sapien
ctaggggaagaaggaggggccagag

SEQ ID NO: 4774972 - DNA, 25 bp, Homo sapien
ggggaagaaggaggggccagagcaa

SEQ ID NO: 4774973 - DNA, 25 bp, Homo sapien
taggggaagaaggaggggccagagc

SEQ ID NO: 4774974 - DNA, 25 bp, Homo sapien
tggctcgtttcccacccagagcggg

SEQ ID NO: 4774975 - DNA, 25 bp, Homo sapien
gcagctgctcgtggctcgtttccca

SEQ ID NO: 4774976 - DNA, 25 bp, Homo sapien
gtggctcgtttcccacccagagcgg

SEQ ID NO: 4774977 - DNA, 25 bp, Homo sapien
ctcgtggctcgtttcccacccagag

SEQ ID NO: 4774978 - DNA, 25 bp, Homo sapien
tggtggcaccactgtcacacaacag

SEQ ID NO: 4774979 - DNA, 25 bp, Homo sapien
ggtggcaccactgtcacacaacagg

SEQ ID NO: 4774980 - DNA, 25 bp, Homo sapien
gctggcgtcggctggccatttgcta

SEQ ID NO: 4774981 - DNA, 25 bp, Homo sapien
gtcggctggccatttgctagagcaa

SEQ ID NO: 4774982 - DNA, 25 bp, Homo sapien
ctgtgctggcgtcggctggccattt

SEQ ID NO: 4774983 - DNA, 25 bp, Homo sapien
cttgttctgtgctggcgtcggctgg

SEQ ID NO: 4774984 - DNA, 25 bp, Homo sapien
taaacaagatgttctggcagcacaa

SEQ ID NO: 4774985 - DNA, 25 bp, Homo sapien
ctcacaaacagagggtaaacaagat

SEQ ID NO: 4774986 - DNA, 25 bp, Homo sapien
acaagatgttctggcagcacaacag

SEQ ID NO: 4774987 - DNA, 25 bp, Homo sapien
cacaaacagagggtaaacaagatgt

SEQ ID NO: 4774988 - DNA, 25 bp, Homo sapien
gtcatgcaaatgattaatgtcagct

SEQ ID NO: 4774989 - DNA, 25 bp, Homo sapien
gaggccctcggcagccgcagaacct

SEQ ID NO: 4774990 - DNA, 25 bp, Homo sapien
tgattaatgtcagctccgtggaggg

SEQ ID NO: 4774991 - DNA, 25 bp, Homo sapien
ggaagccgcagcgaagcccagcgcc

SEQ ID NO: 4774992 - DNA, 25 bp, Homo sapien
cctgccccaacaggttctcagccac

SEQ ID NO: 4774993 - DNA, 25 bp, Homo sapien
gactgtggagatagcaccacccctg

SEQ ID NO: 4774994 - DNA, 25 bp, Homo sapien
agccaccatgtagctcccaagccac

SEQ ID NO: 4774995 - DNA, 25 bp, Homo sapien
tgctctgtgagcttggcagcttttg

SEQ ID NO: 4774996 - DNA, 25 bp, Homo sapien
aaaaagtcaccgtcttcgcaagagg

SEQ ID NO: 4774997 - DNA, 25 bp, Homo sapien
tgaatacgcgtggagcgctctgcgc

SEQ ID NO: 4774998 - DNA, 25 bp, Homo sapien
gtttggccccaattgtccgcattca

SEQ ID NO: 4774999 - DNA, 25 bp, Homo sapien
cagggtagagactgtagcttccgcc

SEQ ID NO: 4775000 - DNA, 25 bp, Homo sapien
acctccgccggtttctctgcatcct

SEQ ID NO: 4775001 - DNA, 25 bp, Homo sapien
tgctcgctcgttggaattgagttct

SEQ ID NO: 4775002 - DNA, 25 bp, Homo sapien
tgctcagtaagctgctcgctcgttg

SEQ ID NO: 4775003 - DNA, 25 bp, Homo sapien
agtcctcgcggctcctgtcgctggg

SEQ ID NO: 4775004 - DNA, 25 bp, Homo sapien
gagtgcagggtccatatgaggaaat

SEQ ID NO: 4775005 - DNA, 25 bp, Homo sapien
tgtcccgggaaatggcggccatttg

SEQ ID NO: 4775006 - DNA, 25 bp, Homo sapien
gaaatgtcccgggaaatggcggcca

SEQ ID NO: 4775007 - DNA, 25 bp, Homo sapien
acccaggtaggactaaggagtgcag

SEQ ID NO: 4775008 - DNA, 25 bp, Homo sapien
aaaaaactgagaggattccggtgcg

SEQ ID NO: 4775009 - DNA, 25 bp, Homo sapien
gaaaaaactgagaggattccggtgc

SEQ ID NO: 4775010 - DNA, 25 bp, Homo sapien
aaaactgagaggattccggtgcgta

SEQ ID NO: 4775011 - DNA, 25 bp, Homo sapien
aaactgagaggattccggtgcgtac

SEQ ID NO: 4775012 - DNA, 25 bp, Homo sapien
gcagctctgcatgcaccggggcatg

SEQ ID NO: 4775013 - DNA, 25 bp, Homo sapien
gggtgggaagccaccaggcacactc

SEQ ID NO: 4775014 - DNA, 25 bp, Homo sapien
gagcagctctgcatgcaccggggca

SEQ ID NO: 4775015 - DNA, 25 bp, Homo sapien
aatcggggggttgggcagagtctca

SEQ ID NO: 4775016 - DNA, 25 bp, Homo sapien
tcatcctccgattctggtaccacgt

SEQ ID NO: 4775017 - DNA, 25 bp, Homo sapien
gtcttcacctgcaactggctcaggc

SEQ ID NO: 4775018 - DNA, 25 bp, Homo sapien
ggtaccacgtcttcacctgcaactg

SEQ ID NO: 4775019 - DNA, 25 bp, Homo sapien
gcccagggactcagcaagatctatt

SEQ ID NO: 4775020 - DNA, 25 bp, Homo sapien
gcttctcgaagcgtttctccaggcc

SEQ ID NO: 4775021 - DNA, 25 bp, Homo sapien
ttctgcttctcgaagcgtttctcca

SEQ ID NO: 4775022 - DNA, 25 bp, Homo sapien
ctgcttctcgaagcgtttctccagg

SEQ ID NO: 4775023 - DNA, 25 bp, Homo sapien
ctgtccggcgtggaaaggtacttct

SEQ ID NO: 4775024 - DNA, 25 bp, Homo sapien
ctgcagctcggtgaacacagtgcgg

SEQ ID NO: 4775025 - DNA, 25 bp, Homo sapien
agctcggtgaacacagtgcggctcc

SEQ ID NO: 4775026 - DNA, 25 bp, Homo sapien
tcggtgaacacagtgcggctccgac

SEQ ID NO: 4775027 - DNA, 25 bp, Homo sapien
ggtgaacacagtgcggctccgacgc

SEQ ID NO: 4775028 - DNA, 25 bp, Homo sapien
aactcgagcggcaggtgtggcgcac

SEQ ID NO: 4775029 - DNA, 25 bp, Homo sapien
agcaacgcagagctcagccctgaac

SEQ ID NO: 4775030 - DNA, 25 bp, Homo sapien
gtgggaacttgaacaccgccgcctg

SEQ ID NO: 4775031 - DNA, 25 bp, Homo sapien
ccagcggcgccagtgggaacttgaa

SEQ ID NO: 4775032 - DNA, 25 bp, Homo sapien
caacgttgccgttccccagatttgg

SEQ ID NO: 4775033 - DNA, 25 bp, Homo sapien
ccggtggcgcagatggagaccctcc

SEQ ID NO: 4775034 - DNA, 25 bp, Homo sapien
aagagaatgaggacccgggtgagct

SEQ ID NO: 4775035 - DNA, 25 bp, Homo sapien
ttgggagggagtatctcctcgaccc

SEQ ID NO: 4775036 - DNA, 25 bp, Homo sapien
caaggccgcgttcctcgcccgctgg

SEQ ID NO: 4775037 - DNA, 25 bp, Homo sapien
aggccgcgttcctcgcccgctggag

SEQ ID NO: 4775038 - DNA, 25 bp, Homo sapien
gccaaggccgcgttcctcgcccgct

SEQ ID NO: 4775039 - DNA, 25 bp, Homo sapien
ggccgcgttcctcgcccgctggagc

SEQ ID NO: 4775040 - DNA, 25 bp, Homo sapien
tagcctggcagtgcgcctgcactgg

SEQ ID NO: 4775041 - DNA, 25 bp, Homo sapien
tgaggtcgcttccacccacgagagt

SEQ ID NO: 4775042 - DNA, 25 bp, Homo sapien
acccacgagagtccgtagcctggca

SEQ ID NO: 4775043 - DNA, 25 bp, Homo sapien
cccgtggcctgaggtcgcttccacc

SEQ ID NO: 4775044 - DNA, 25 bp, Homo sapien
gggctccgagagacggtcccagaac

SEQ ID NO: 4775045 - DNA, 25 bp, Homo sapien
tggagggctccgagagacggtccca

SEQ ID NO: 4775046 - DNA, 25 bp, Homo sapien
gagggctccgagagacggtcccaga

SEQ ID NO: 4775047 - DNA, 25 bp, Homo sapien
ctggagggctccgagagacggtccc

SEQ ID NO: 4775048 - DNA, 25 bp, Homo sapien
gggctgcttcgatgccggaggaggc

SEQ ID NO: 4775049 - DNA, 25 bp, Homo sapien
ttcccggggctgcttcgatgccgga

SEQ ID NO: 4775050 - DNA, 25 bp, Homo sapien
cttcccggggctgcttcgatgccgg

SEQ ID NO: 4775051 - DNA, 25 bp, Homo sapien
gcttcgatgccggaggaggctcggg

SEQ ID NO: 4775052 - DNA, 25 bp, Homo sapien
gcccgcgaccccgcggccgccacac

SEQ ID NO: 4775053 - DNA, 25 bp, Homo sapien
ggcccgcgaccccgcggccgccaca

SEQ ID NO: 4775054 - DNA, 25 bp, Homo sapien
gcgaccccgcggccgccacacgtac

SEQ ID NO: 4775055 - DNA, 25 bp, Homo sapien
ccgcgaccccgcggccgccacacgt

SEQ ID NO: 4775056 - DNA, 25 bp, Homo sapien
gctccgtgaggatctcctcaatcat

SEQ ID NO: 4775057 - DNA, 25 bp, Homo sapien
aacttcagcagctcgcccgccgcgg

SEQ ID NO: 4775058 - DNA, 25 bp, Homo sapien
ttgggcccgggtggctccgtgagga

SEQ ID NO: 4775059 - DNA, 25 bp, Homo sapien
gcgcctgcacgccgaacttcagcag

SEQ ID NO: 4775060 - DNA, 25 bp, Homo sapien
agcggtgcggccggtggtccgcgca

SEQ ID NO: 4775061 - DNA, 25 bp, Homo sapien
ctcgggcgggccgaagcgcgcggcg

SEQ ID NO: 4775062 - DNA, 25 bp, Homo sapien
tcgggcgggccgaagcgcgcggcgc

SEQ ID NO: 4775063 - DNA, 25 bp, Homo sapien
gaagctgcgatagcggtgcggccgg

SEQ ID NO: 4775064 - DNA, 25 bp, Homo sapien
ggcgacggcttggctccggcgcggg

SEQ ID NO: 4775065 - DNA, 25 bp, Homo sapien
cgacggcttggctccggcgcggggc

SEQ ID NO: 4775066 - DNA, 25 bp, Homo sapien
ctgctgcgcccgcggtttggcggcg

SEQ ID NO: 4775067 - DNA, 25 bp, Homo sapien
gcggcgacggcttggctccggcgcg

SEQ ID NO: 4775068 - DNA, 25 bp, Homo sapien
gccggccgggcggaggcgcagggcg

SEQ ID NO: 4775069 - DNA, 25 bp, Homo sapien
gggcgcgcggggctcggccggtcga

SEQ ID NO: 4775070 - DNA, 25 bp, Homo sapien
ctcatgccccctcccccgccggccg

SEQ ID NO: 4775071 - DNA, 25 bp, Homo sapien
gcgcgcggggctcggccggtcgaac

SEQ ID NO: 4775072 - DNA, 25 bp, Homo sapien
tgaactcagagttaccattgggact

SEQ ID NO: 4775073 - DNA, 25 bp, Homo sapien
gggcgcactaagagcaacagtatcc

SEQ ID NO: 4775074 - DNA, 25 bp, Homo sapien
caatggccgccagttgcttcggact

SEQ ID NO: 4775075 - DNA, 25 bp, Homo sapien
ttcggactccctcggagagtggtgc

SEQ ID NO: 4775076 - DNA, 25 bp, Homo sapien
ctccggatgcggtcgtccgagcagc

SEQ ID NO: 4775077 - DNA, 25 bp, Homo sapien
ggatgcggtcgtccgagcagccgcc

SEQ ID NO: 4775078 - DNA, 25 bp, Homo sapien
atgcggtcgtccgagcagccgcctg

SEQ ID NO: 4775079 - DNA, 25 bp, Homo sapien
ctgcggggggtcccacgccctctat

SEQ ID NO: 4775080 - DNA, 25 bp, Homo sapien
tgcatccgagtccagttacgcgaac

SEQ ID NO: 4775081 - DNA, 25 bp, Homo sapien
ggcggctcccgcagagaccttgcat

SEQ ID NO: 4775082 - DNA, 25 bp, Homo sapien
caggaagtagccgtctgggtgccgg

SEQ ID NO: 4775083 - DNA, 25 bp, Homo sapien
ttacgcgaaccagcggcgcctgagg

SEQ ID NO: 4775084 - DNA, 25 bp, Homo sapien
gcaagtcccagggcagaggtggtgg

SEQ ID NO: 4775085 - DNA, 25 bp, Homo sapien
aagtcccagggcagaggtggtggcc

SEQ ID NO: 4775086 - DNA, 25 bp, Homo sapien
gtcccagggcagaggtggtggccat

SEQ ID NO: 4775087 - DNA, 25 bp, Homo sapien
ccaggcaagtcccagggcagaggtg

SEQ ID NO: 4775088 - DNA, 25 bp, Homo sapien
atgcccttgatctgagctaggacag

SEQ ID NO: 4775089 - DNA, 25 bp, Homo sapien
taatgcccttgatctgagctaggac

SEQ ID NO: 4775090 - DNA, 25 bp, Homo sapien
cttaatgcccttgatctgagctagg

SEQ ID NO: 4775091 - DNA, 25 bp, Homo sapien
ttaatgcccttgatctgagctagga

SEQ ID NO: 4775092 - DNA, 25 bp, Homo sapien
cttaagctgctcccatgctccctgc

SEQ ID NO: 4775093 - DNA, 25 bp, Homo sapien
ccatgctccctgccccaacccagac

SEQ ID NO: 4775094 - DNA, 25 bp, Homo sapien
tgctccctgccccaacccagacagg

SEQ ID NO: 4775095 - DNA, 25 bp, Homo sapien
ttaagctgctcccatgctccctgcc

SEQ ID NO: 4775096 - DNA, 25 bp, Homo sapien
tggcatggctgtgggaccaggagcc

SEQ ID NO: 4775097 - DNA, 25 bp, Homo sapien
atttggcatggctgtgggaccagga

SEQ ID NO: 4775098 - DNA, 25 bp, Homo sapien
acagagagcatttggcatggctgtg

SEQ ID NO: 4775099 - DNA, 25 bp, Homo sapien
tttggcatggctgtgggaccaggag

SEQ ID NO: 4775100 - DNA, 25 bp, Homo sapien
aggcaaaccccgtcagccactctgt

SEQ ID NO: 4775101 - DNA, 25 bp, Homo sapien
ttacacgcaggcaaaccccgtcagc

SEQ ID NO: 4775102 - DNA, 25 bp, Homo sapien
accccgtcagccactctgtaaactg

SEQ ID NO: 4775103 - DNA, 25 bp, Homo sapien
cgtcagccactctgtaaactgctgg

SEQ ID NO: 4775104 - DNA, 25 bp, Homo sapien
agattctgctcctcggatttctctg

SEQ ID NO: 4775105 - DNA, 25 bp, Homo sapien
cagattctgctcctcggatttctct

SEQ ID NO: 4775106 - DNA, 25 bp, Homo sapien
cggagaggcggccagtcgctgggtt

SEQ ID NO: 4775107 - DNA, 25 bp, Homo sapien
cgtaagagttgggacgataggacca

SEQ ID NO: 4775108 - DNA, 25 bp, Homo sapien
tcgctgggttccgtccgcggtgctc

SEQ ID NO: 4775109 - DNA, 25 bp, Homo sapien
aggaacaacacaggaagcgcgcccg

SEQ ID NO: 4775110 - DNA, 25 bp, Homo sapien
gtcccctttccgcacccgcgccatc

SEQ ID NO: 4775111 - DNA, 25 bp, Homo sapien
tcagcgtccctcacggttccctcac

SEQ ID NO: 4775112 - DNA, 25 bp, Homo sapien
catcccctcagcgtccctcacggtt

SEQ ID NO: 4775113 - DNA, 25 bp, Homo sapien
gcacccgcgccatcccctcagcgtc

SEQ ID NO: 4775114 - DNA, 25 bp, Homo sapien
gcccgttcgaaaatgcccagagcca

SEQ ID NO: 4775115 - DNA, 25 bp, Homo sapien
tggcggctgacattggcgggcgggc

SEQ ID NO: 4775116 - DNA, 25 bp, Homo sapien
acggtccgcttcaggcctccattgg

SEQ ID NO: 4775117 - DNA, 25 bp, Homo sapien
tccattggccagcacacgtcacgtg

SEQ ID NO: 4775118 - DNA, 25 bp, Homo sapien
gaagatttttgttcagaagtgtgcc

SEQ ID NO: 4775119 - DNA, 25 bp, Homo sapien
gttcagaagtgtgcccagtgacaca

SEQ ID NO: 4775120 - DNA, 25 bp, Homo sapien
ttttgttcagaagtgtgcccagtga

SEQ ID NO: 4775121 - DNA, 25 bp, Homo sapien
tttgttcagaagtgtgcccagtgac

SEQ ID NO: 4775122 - DNA, 25 bp, Homo sapien
ataagactgagcataatctccatgg

SEQ ID NO: 4775123 - DNA, 25 bp, Homo sapien
cataagactgagcataatctccatg

SEQ ID NO: 4775124 - DNA, 25 bp, Homo sapien
aagcataagactgagcataatctcc

SEQ ID NO: 4775125 - DNA, 25 bp, Homo sapien
gcaagcataagactgagcataatct

SEQ ID NO: 4775126 - DNA, 25 bp, Homo sapien
tggagtatttggagaatcccaagaa

SEQ ID NO: 4775127 - DNA, 25 bp, Homo sapien
ttggagaatcccaagaagtacatcc

SEQ ID NO: 4775128 - DNA, 25 bp, Homo sapien
ctggggagaggatacactgatggag

SEQ ID NO: 4775129 - DNA, 25 bp, Homo sapien
ggagaggatacactgatggagtatt

SEQ ID NO: 4775130 - DNA, 25 bp, Homo sapien
ctttgctggcattaagaagaaggca

SEQ ID NO: 4775131 - DNA, 25 bp, Homo sapien
gatctttgctggcattaagaagaag

SEQ ID NO: 4775132 - DNA, 25 bp, Homo sapien
aaaatgatctttgctggcattaaga

SEQ ID NO: 4775133 - DNA, 25 bp, Homo sapien
ttgctggcattaagaagaaggcaga

SEQ ID NO: 4775134 - DNA, 25 bp, Homo sapien
ctcccaggcactgcttaatgtagtt

SEQ ID NO: 4775135 - DNA, 25 bp, Homo sapien
gcatcttacatgacagaagcaggag

SEQ ID NO: 4775136 - DNA, 25 bp, Homo sapien
ggcaaagcaagagcaggcatcttac

SEQ ID NO: 4775137 - DNA, 25 bp, Homo sapien
tcactcactatacactaccaaaggg

SEQ ID NO: 4775138 - DNA, 25 bp, Homo sapien
taaacagctgaatcccatgagaact

SEQ ID NO: 4775139 - DNA, 25 bp, Homo sapien
taatcctcatataattcctccgaca

SEQ ID NO: 4775140 - DNA, 25 bp, Homo sapien
attcctccgacaggaaagctgtgct

SEQ ID NO: 4775141 - DNA, 25 bp, Homo sapien
tcatataattcctccgacaggaaag

SEQ ID NO: 4775142 - DNA, 25 bp, Homo sapien
tataattcctccgacaggaaagctg

SEQ ID NO: 4775143 - DNA, 25 bp, Homo sapien
agctgtagatatgtggcgttatttc

SEQ ID NO: 4775144 - DNA, 25 bp, Homo sapien
tagctgtagatatgtggcgttattt

SEQ ID NO: 4775145 - DNA, 25 bp, Homo sapien
aagatcagatagctgtagatatgtg

SEQ ID NO: 4775146 - DNA, 25 bp, Homo sapien
atcagatagctgtagatatgtggcg

SEQ ID NO: 4775147 - DNA, 25 bp, Homo sapien
tagaccccaggttaatgtataaatg

SEQ ID NO: 4775148 - DNA, 25 bp, Homo sapien
tatctcagtcaatcagcccaacagc

SEQ ID NO: 4775149 - DNA, 25 bp, Homo sapien
cagtgtcttagtccagtgtccagcc

SEQ ID NO: 4775150 - DNA, 25 bp, Homo sapien
ccagaaggctgaaaaggaagactct

SEQ ID NO: 4775151 - DNA, 25 bp, Homo sapien
tgtgaggccaagagccctctgggaa

SEQ ID NO: 4775152 - DNA, 25 bp, Homo sapien
caggtcatgtgaggccaagagccct

SEQ ID NO: 4775153 - DNA, 25 bp, Homo sapien
gtcatgtgaggccaagagccctctg

SEQ ID NO: 4775154 - DNA, 25 bp, Homo sapien
aggccaagagccctctgggaaggca

SEQ ID NO: 4775155 - DNA, 25 bp, Homo sapien
ggacatagtggctctccaccacacc

SEQ ID NO: 4775156 - DNA, 25 bp, Homo sapien
ctgctgcttgcaactggtggacata

SEQ ID NO: 4775157 - DNA, 25 bp, Homo sapien
tcactgctgcttgcaactggtggac

SEQ ID NO: 4775158 - DNA, 25 bp, Homo sapien
gctgcttgcaactggtggacatagt

SEQ ID NO: 4775159 - DNA, 25 bp, Homo sapien
ttccgggtcgcgcacgtgtaaattg

SEQ ID NO: 4775160 - DNA, 25 bp, Homo sapien
gggtcgcgcacgtgtaaattgcccc

SEQ ID NO: 4775161 - DNA, 25 bp, Homo sapien
gcgttcagcggccacgtgacacagc

SEQ ID NO: 4775162 - DNA, 25 bp, Homo sapien
gcagcgcgttcagcggccacgtgac

SEQ ID NO: 4775163 - DNA, 25 bp, Homo sapien
caaaatagcgtgttgattcagctcg

SEQ ID NO: 4775164 - DNA, 25 bp, Homo sapien
ccaggaccagtatgcgttttaatca

SEQ ID NO: 4775165 - DNA, 25 bp, Homo sapien
ggaacatgagccacctactttagtt

SEQ ID NO: 4775166 - DNA, 25 bp, Homo sapien
gctcgacacatgtgtattcctgtaa

SEQ ID NO: 4775167 - DNA, 25 bp, Homo sapien
cgaatcaggtgatttcttaggccct

SEQ ID NO: 4775168 - DNA, 25 bp, Homo sapien
ggcagccgacagctatacctttaag

SEQ ID NO: 4775169 - DNA, 25 bp, Homo sapien
gtttaagtgttttgaggcagccgac

SEQ ID NO: 4775170 - DNA, 25 bp, Homo sapien
caccgggttcctggccgaatcaggt

SEQ ID NO: 4775171 - DNA, 25 bp, Homo sapien
ggcccagaaattagatgatatgtcc

SEQ ID NO: 4775172 - DNA, 25 bp, Homo sapien
ggagccagcattaactgtagacaga

SEQ ID NO: 4775173 - DNA, 25 bp, Homo sapien
cttttaatgagagggtagttccagc

SEQ ID NO: 4775174 - DNA, 25 bp, Homo sapien
tctttcccagtacgcaagcattaca

SEQ ID NO: 4775175 - DNA, 25 bp, Homo sapien
tcaaacttccttggatgggcccaac

SEQ ID NO: 4775176 - DNA, 25 bp, Homo sapien
tgggcaaaccatacactaacttggg

SEQ ID NO: 4775177 - DNA, 25 bp, Homo sapien
cattgataggttgattgagccagac

SEQ ID NO: 4775178 - DNA, 25 bp, Homo sapien
agtagtccttcattcacacagtggg

SEQ ID NO: 4775179 - DNA, 25 bp, Homo sapien
attttgtctttccaagtgggagagt

SEQ ID NO: 4775180 - DNA, 25 bp, Homo sapien
gctgacactgtttccaatccaccat

SEQ ID NO: 4775181 - DNA, 25 bp, Homo sapien
gagtcatgctgacactgtttccaat

SEQ ID NO: 4775182 - DNA, 25 bp, Homo sapien
tccaagtgggagagtcatgctgaca

SEQ ID NO: 4775183 - DNA, 25 bp, Homo sapien
tggatgtggtcccttgatcttggac

SEQ ID NO: 4775184 - DNA, 25 bp, Homo sapien
caagaaggctctcactggatgtggt

SEQ ID NO: 4775185 - DNA, 25 bp, Homo sapien
tcactggatgtggtcccttgatctt

SEQ ID NO: 4775186 - DNA, 25 bp, Homo sapien
agaaggctctcactggatgtggtcc

SEQ ID NO: 4775187 - DNA, 25 bp, Homo sapien
tgtaattccagtgagaggcgaagcc

SEQ ID NO: 4775188 - DNA, 25 bp, Homo sapien
gtaattccagtgagaggcgaagcca

SEQ ID NO: 4775189 - DNA, 25 bp, Homo sapien
cagtgtcagtgggttccagtgagaa

SEQ ID NO: 4775190 - DNA, 25 bp, Homo sapien
agacaatgaatgtaagttagtgctc

SEQ ID NO: 4775191 - DNA, 25 bp, Homo sapien
gaatgtaagttagtgctcagctttt

SEQ ID NO: 4775192 - DNA, 25 bp, Homo sapien
taagttagtgctcagctttttctgt

SEQ ID NO: 4775193 - DNA, 25 bp, Homo sapien
attggaattctaaaatccagggtct

SEQ ID NO: 4775194 - DNA, 25 bp, Homo sapien
tacctgaggaagaggactctctgca

SEQ ID NO: 4775195 - DNA, 25 bp, Homo sapien
catctgcgggaagttcaaaggctca

SEQ ID NO: 4775196 - DNA, 25 bp, Homo sapien
cctgtgaactctagatgcatatgcc

SEQ ID NO: 4775197 - DNA, 25 bp, Homo sapien
gaggcaaaacccttccgagtacatg

SEQ ID NO: 4775198 - DNA, 25 bp, Homo sapien
ggatgttgtagtccctcgctccagg

SEQ ID NO: 4775199 - DNA, 25 bp, Homo sapien
ccttctcatagacccgaaagttaga

SEQ ID NO: 4775200 - DNA, 25 bp, Homo sapien
tccacggtagggtagttgcgcgccc

SEQ ID NO: 4775201 - DNA, 25 bp, Homo sapien
cctggtgcgtggtgagtgtcctttc

SEQ ID NO: 4775202 - DNA, 25 bp, Homo sapien
ctttggaggacatgatatcctcggt

SEQ ID NO: 4775203 - DNA, 25 bp, Homo sapien
aatgtgcctttggaggacatgatat

SEQ ID NO: 4775204 - DNA, 25 bp, Homo sapien
tgatatcctcggttggagcaaactt

SEQ ID NO: 4775205 - DNA, 25 bp, Homo sapien
gaggacatgatatcctcggttggag

SEQ ID NO: 4775206 - DNA, 25 bp, Homo sapien
ttgattgtatcctaaacctctcagg

SEQ ID NO: 4775207 - DNA, 25 bp, Homo sapien
gtttgattgtatcctaaacctctca

SEQ ID NO: 4775208 - DNA, 25 bp, Homo sapien
ggtttgattgtatcctaaacctctc

SEQ ID NO: 4775209 - DNA, 25 bp, Homo sapien
tttgattgtatcctaaacctctcag

SEQ ID NO: 4775210 - DNA, 25 bp, Homo sapien
attcatctggtagctagccagccag

SEQ ID NO: 4775211 - DNA, 25 bp, Homo sapien
ctcaaaattcatctggtagctagcc

SEQ ID NO: 4775212 - DNA, 25 bp, Homo sapien
tggtagctagccagccagccctcat

SEQ ID NO: 4775213 - DNA, 25 bp, Homo sapien
gctagccagccagccctcataaccc

SEQ ID NO: 4775214 - DNA, 25 bp, Homo sapien
agcaccctggaatgagggcccagca

SEQ ID NO: 4775215 - DNA, 25 bp, Homo sapien
accctggaatgagggcccagcaatg

SEQ ID NO: 4775216 - DNA, 25 bp, Homo sapien
cagagcaccctggaatgagggccca

SEQ ID NO: 4775217 - DNA, 25 bp, Homo sapien
caccctggaatgagggcccagcaat

SEQ ID NO: 4775218 - DNA, 25 bp, Homo sapien
tctgtaaatgccaggccatattcag

SEQ ID NO: 4775219 - DNA, 25 bp, Homo sapien
gcccgtcactttggtattctcagtg

SEQ ID NO: 4775220 - DNA, 25 bp, Homo sapien
atgccaggccatattcagtccatct

SEQ ID NO: 4775221 - DNA, 25 bp, Homo sapien
ctatttctctgtaaatgccaggcca

SEQ ID NO: 4775222 - DNA, 25 bp, Homo sapien
cgacgaaccttggagagaggagaac

SEQ ID NO: 4775223 - DNA, 25 bp, Homo sapien
cactggtaaaggctgcatggcactg

SEQ ID NO: 4775224 - DNA, 25 bp, Homo sapien
taggtctaggatcccctccctgtat

SEQ ID NO: 4775225 - DNA, 25 bp, Homo sapien
ccaaaactcatcgaacagctggagc

SEQ ID NO: 4775226 - DNA, 25 bp, Homo sapien
cttatgaatgctcacacagaagctc

SEQ ID NO: 4775227 - DNA, 25 bp, Homo sapien
tcttatgaatgctcacacagaagct

SEQ ID NO: 4775228 - DNA, 25 bp, Homo sapien
tgggaccagtgctctggcagtcaca

SEQ ID NO: 4775229 - DNA, 25 bp, Homo sapien
gaccacagctctgcatgcgggcagt

SEQ ID NO: 4775230 - DNA, 25 bp, Homo sapien
gctgggccaactcccagcaccatga

SEQ ID NO: 4775231 - DNA, 25 bp, Homo sapien
tcacagcggtcctgagccaacaagg

SEQ ID NO: 4775232 - DNA, 25 bp, Homo sapien
tactgataatgatgggaggccccga

SEQ ID NO: 4775233 - DNA, 25 bp, Homo sapien
actgataatgatgggaggccccgag

SEQ ID NO: 4775234 - DNA, 25 bp, Homo sapien
caaagctaaggcccagcaagatcag

SEQ ID NO: 4775235 - DNA, 25 bp, Homo sapien
aaagctaaggcccagcaagatcagc

SEQ ID NO: 4775236 - DNA, 25 bp, Homo sapien
gctaaggcccagcaagatcagcact

SEQ ID NO: 4775237 - DNA, 25 bp, Homo sapien
aagctaaggcccagcaagatcagca

SEQ ID NO: 4775238 - DNA, 25 bp, Homo sapien
ccagggagttccgtctcctcacttg

SEQ ID NO: 4775239 - DNA, 25 bp, Homo sapien
cctgtggtgggaacccacgacatag

SEQ ID NO: 4775240 - DNA, 25 bp, Homo sapien
catagaccatgccagggagttccgt

SEQ ID NO: 4775241 - DNA, 25 bp, Homo sapien
tgggaacccacgacatagaccatgc

SEQ ID NO: 4775242 - DNA, 25 bp, Homo sapien
tgccagtgcgcactctgccctgtcc

SEQ ID NO: 4775243 - DNA, 25 bp, Homo sapien
catgccagtgcgcactctgccctgt

SEQ ID NO: 4775244 - DNA, 25 bp, Homo sapien
ctggccatgccagtgcgcactctgc

SEQ ID NO: 4775245 - DNA, 25 bp, Homo sapien
ggccatgccagtgcgcactctgccc

SEQ ID NO: 4775246 - DNA, 25 bp, Homo sapien
ggtcagggacctctctcgctgcttc

SEQ ID NO: 4775247 - DNA, 25 bp, Homo sapien
caacctggccgtgccatgtcgaggg

SEQ ID NO: 4775248 - DNA, 25 bp, Homo sapien
tccaacctggccgtgccatgtcgag

SEQ ID NO: 4775249 - DNA, 25 bp, Homo sapien
gagtccaacctggccgtgccatgtc

SEQ ID NO: 4775250 - DNA, 25 bp, Homo sapien
ccttcaaggacaggaggcgcttctc

SEQ ID NO: 4775251 - DNA, 25 bp, Homo sapien
ctccttcaaggacaggaggcgcttc

SEQ ID NO: 4775252 - DNA, 25 bp, Homo sapien
ttcaaggacaggaggcgcttctcca

SEQ ID NO: 4775253 - DNA, 25 bp, Homo sapien
cctttctccttcaaggacaggaggc

SEQ ID NO: 4775254 - DNA, 25 bp, Homo sapien
ggttcccctccctccgctgctctac

SEQ ID NO: 4775255 - DNA, 25 bp, Homo sapien
ctgggttcccctccctccgctgctc

SEQ ID NO: 4775256 - DNA, 25 bp, Homo sapien
gggttcccctccctccgctgctcta

SEQ ID NO: 4775257 - DNA, 25 bp, Homo sapien
tgggttcccctccctccgctgctct

SEQ ID NO: 4775258 - DNA, 25 bp, Homo sapien
ctgggcaagggtgagtccttcctcc

SEQ ID NO: 4775259 - DNA, 25 bp, Homo sapien
ccaagaaatccatctgtggatctgg

SEQ ID NO: 4775260 - DNA, 25 bp, Homo sapien
caagaaatccatctgtggatctggg

SEQ ID NO: 4775261 - DNA, 25 bp, Homo sapien
cctgggaacacagcttgtcaatgta

SEQ ID NO: 4775262 - DNA, 25 bp, Homo sapien
cttggtgacaaagtcttcctgggaa

SEQ ID NO: 4775263 - DNA, 25 bp, Homo sapien
ggtctgaggttatcccgtcctcttc

SEQ ID NO: 4775264 - DNA, 25 bp, Homo sapien
caggaggcccgggtctgaggttatc

SEQ ID NO: 4775265 - DNA, 25 bp, Homo sapien
ctccatgatgtccacatactcctgc

SEQ ID NO: 4775266 - DNA, 25 bp, Homo sapien
cctccatgatgtccacatactcctg

SEQ ID NO: 4775267 - DNA, 25 bp, Homo sapien
tcctccatgatgtccacatactcct

SEQ ID NO: 4775268 - DNA, 25 bp, Homo sapien
ctggctgcttgaccacctcaggggc

SEQ ID NO: 4775269 - DNA, 25 bp, Homo sapien
aaagttgctcgtgtgctgccattcc

SEQ ID NO: 4775270 - DNA, 25 bp, Homo sapien
gtcaaagttgctcgtgtgctgccat

SEQ ID NO: 4775271 - DNA, 25 bp, Homo sapien
caaagttgctcgtgtgctgccattc

SEQ ID NO: 4775272 - DNA, 25 bp, Homo sapien
tcaaagttgctcgtgtgctgccatt

SEQ ID NO: 4775273 - DNA, 25 bp, Homo sapien
cttccgccgggccagggatcggaga

SEQ ID NO: 4775274 - DNA, 25 bp, Homo sapien
ggcttccgccgggccagggatcgga

SEQ ID NO: 4775275 - DNA, 25 bp, Homo sapien
gtgggcttccgccgggccagggatc

SEQ ID NO: 4775276 - DNA, 25 bp, Homo sapien
ccgggccagggatcggagaactggg

SEQ ID NO: 4775277 - DNA, 25 bp, Homo sapien
catcgaccctagtgcgggtcccaag

SEQ ID NO: 4775278 - DNA, 25 bp, Homo sapien
agcatcgaccctagtgcgggtccca

SEQ ID NO: 4775279 - DNA, 25 bp, Homo sapien
ctgcccagcatcgaccctagtgcgg

SEQ ID NO: 4775280 - DNA, 25 bp, Homo sapien
gcccagcatcgaccctagtgcgggt

SEQ ID NO: 4775281 - DNA, 25 bp, Homo sapien
ccagagtcggaagttctcatagaca

SEQ ID NO: 4775282 - DNA, 25 bp, Homo sapien
tgctgccagagtcggaagttctcat

SEQ ID NO: 4775283 - DNA, 25 bp, Homo sapien
agtgctgccagagtcggaagttctc

SEQ ID NO: 4775284 - DNA, 25 bp, Homo sapien
gccaggggcttgtagtgctgccaga

SEQ ID NO: 4775285 - DNA, 25 bp, Homo sapien
ctcttgggtttacaggagtcgtccg

SEQ ID NO: 4775286 - DNA, 25 bp, Homo sapien
ggaggaaccactgcagtcacgaggg

SEQ ID NO: 4775287 - DNA, 25 bp, Homo sapien
ccactgcagtcacgaggggcggcct

SEQ ID NO: 4775288 - DNA, 25 bp, Homo sapien
cacctgggcagaggtaacgggcacc

SEQ ID NO: 4775289 - DNA, 25 bp, Homo sapien
agaggtgaatgagctggcgtctcca

SEQ ID NO: 4775290 - DNA, 25 bp, Homo sapien
cacgtggagacagacggtaggaatc

SEQ ID NO: 4775291 - DNA, 25 bp, Homo sapien
gtgaaggctcttcagtgtcatcacg

SEQ ID NO: 4775292 - DNA, 25 bp, Homo sapien
tcttcagtgtcatcacgtggagaca

SEQ ID NO: 4775293 - DNA, 25 bp, Homo sapien
tcatcacgtggagacagacggtagg

SEQ ID NO: 4775294 - DNA, 25 bp, Homo sapien
gtgtttcttcgtaatgtcttttgtc

SEQ ID NO: 4775295 - DNA, 25 bp, Homo sapien
gctaccggtgagcagtaagatgtgt

SEQ ID NO: 4775296 - DNA, 25 bp, Homo sapien
taccggtgagcagtaagatgtgttt

SEQ ID NO: 4775297 - DNA, 25 bp, Homo sapien
ctgtgctaccggtgagcagtaagat

SEQ ID NO: 4775298 - DNA, 25 bp, Homo sapien
gcagtgcgatggcggatcctggctc

SEQ ID NO: 4775299 - DNA, 25 bp, Homo sapien
tgcagtgcgatggcggatcctggct

SEQ ID NO: 4775300 - DNA, 25 bp, Homo sapien
agtcagaagtaggacggagaacggt

SEQ ID NO: 4775301 - DNA, 25 bp, Homo sapien
ggtcatccgagatcattaaaggtgg

SEQ ID NO: 4775302 - DNA, 25 bp, Homo sapien
ccgagatcattaaaggtggctgacc

SEQ ID NO: 4775303 - DNA, 25 bp, Homo sapien
tcagaagtaggacggagaacggtcc

SEQ ID NO: 4775304 - DNA, 25 bp, Homo sapien
atccttgtcggtcttctgcttcttg

SEQ ID NO: 4775305 - DNA, 25 bp, Homo sapien
tcatccttgtcggtcttctgcttct

SEQ ID NO: 4775306 - DNA, 25 bp, Homo sapien
ctagtcatccttgtcggtcttctgc

SEQ ID NO: 4775307 - DNA, 25 bp, Homo sapien
agtcatccttgtcggtcttctgctt

SEQ ID NO: 4775308 - DNA, 25 bp, Homo sapien
catcttcagctgcccgcttgcctgt

SEQ ID NO: 4775309 - DNA, 25 bp, Homo sapien
tcttcagctgcccgcttgcctgtag

SEQ ID NO: 4775310 - DNA, 25 bp, Homo sapien
ttcagctgcccgcttgcctgtagca

SEQ ID NO: 4775311 - DNA, 25 bp, Homo sapien
cagctgcccgcttgcctgtagcaga

SEQ ID NO: 4775312 - DNA, 25 bp, Homo sapien
ctcttcctcaccatcaccttctttt

SEQ ID NO: 4775313 - DNA, 25 bp, Homo sapien
ctcagcttcctcttcatctccatcc

SEQ ID NO: 4775314 - DNA, 25 bp, Homo sapien
ccatcctcttcctcaccatcacctt

SEQ ID NO: 4775315 - DNA, 25 bp, Homo sapien
atcctcttcctcaccatcaccttct

SEQ ID NO: 4775316 - DNA, 25 bp, Homo sapien
cttccattttccgcgtctttcacaa

SEQ ID NO: 4775317 - DNA, 25 bp, Homo sapien
cattttccgcgtctttcacaacttc

SEQ ID NO: 4775318 - DNA, 25 bp, Homo sapien
tccattttccgcgtctttcacaact

SEQ ID NO: 4775319 - DNA, 25 bp, Homo sapien
tcttccattttccgcgtctttcaca

SEQ ID NO: 4775320 - DNA, 25 bp, Homo sapien
ctttaagtccttggcaatgatttca

SEQ ID NO: 4775321 - DNA, 25 bp, Homo sapien
ttaagtccttggcaatgatttcaga

SEQ ID NO: 4775322 - DNA, 25 bp, Homo sapien
taagtccttggcaatgatttcagag

SEQ ID NO: 4775323 - DNA, 25 bp, Homo sapien
tttaagtccttggcaatgatttcag

SEQ ID NO: 4775324 - DNA, 25 bp, Homo sapien
gatattaactccctgctatggtgcg

SEQ ID NO: 4775325 - DNA, 25 bp, Homo sapien
gattgcgtcctttgatgcacataag

SEQ ID NO: 4775326 - DNA, 25 bp, Homo sapien
gactgagacactcccttgcaggtag

SEQ ID NO: 4775327 - DNA, 25 bp, Homo sapien
ttgggataacgcagtgagaaggcac

SEQ ID NO: 4775328 - DNA, 25 bp, Homo sapien
gcaatgggttacagggagaatacct

SEQ ID NO: 4775329 - DNA, 25 bp, Homo sapien
cttttggtccataactaaggtctga

SEQ ID NO: 4775330 - DNA, 25 bp, Homo sapien
tacaaagtttccgtagcttatatac

SEQ ID NO: 4775331 - DNA, 25 bp, Homo sapien
tcttaatgattaacaacttttggtc

SEQ ID NO: 4775332 - DNA, 25 bp, Homo sapien
tctgcgttccatcctgggattctcc

SEQ ID NO: 4775333 - DNA, 25 bp, Homo sapien
gttaacatgtactgaggctcactct

SEQ ID NO: 4775334 - DNA, 25 bp, Homo sapien
ccagagttacttggatcactgcctt

SEQ ID NO: 4775335 - DNA, 25 bp, Homo sapien
tggttttgaaaaatgcgtggtgccg

SEQ ID NO: 4775336 - DNA, 25 bp, Homo sapien
cctgtttctgtaaggttgaccatta

SEQ ID NO: 4775337 - DNA, 25 bp, Homo sapien
ctgctggaattctgggaggtttttg

SEQ ID NO: 4775338 - DNA, 25 bp, Homo sapien
gctaattgtctatgagactccctta

SEQ ID NO: 4775339 - DNA, 25 bp, Homo sapien
tatgtgtttctaggagtttgtccat

SEQ ID NO: 4775340 - DNA, 25 bp, Homo sapien
ctggtcttaacttcttaactcctgg

SEQ ID NO: 4775341 - DNA, 25 bp, Homo sapien
gtatgatgatggctcattgcaccct

SEQ ID NO: 4775342 - DNA, 25 bp, Homo sapien
ggcaaggtttcactcccttctccca

SEQ ID NO: 4775343 - DNA, 25 bp, Homo sapien
tgccaccatgcttgggtaaactttt

SEQ ID NO: 4775344 - DNA, 25 bp, Homo sapien
taaaggggtcctataaatcaatatg

SEQ ID NO: 4775345 - DNA, 25 bp, Homo sapien
ttgacagaagatgaacaggcagttc

SEQ ID NO: 4775346 - DNA, 25 bp, Homo sapien
tcaatatgaaagattaaagtcacca

SEQ ID NO: 4775347 - DNA, 25 bp, Homo sapien
gaaacgcaaattcctaatcatagga

SEQ ID NO: 4775348 - DNA, 25 bp, Homo sapien
cagtgatttcagtggccattaatgg

SEQ ID NO: 4775349 - DNA, 25 bp, Homo sapien
tgtcttgactgcattgaatccaggt

SEQ ID NO: 4775350 - DNA, 25 bp, Homo sapien
tcatggcctagattcactatttcag

SEQ ID NO: 4775351 - DNA, 25 bp, Homo sapien
tattcatcaccctactgcaacaagg

SEQ ID NO: 4775352 - DNA, 25 bp, Homo sapien
cacctgactgttggttagaggaagt

SEQ ID NO: 4775353 - DNA, 25 bp, Homo sapien
tgtaattgggtcgtctaagatggcc

SEQ ID NO: 4775354 - DNA, 25 bp, Homo sapien
tgttaactggtttgtctgtgaggcc

SEQ ID NO: 4775355 - DNA, 25 bp, Homo sapien
gatggccttgctcctatgtctgaca

SEQ ID NO: 4775356 - DNA, 25 bp, Homo sapien
tatgtgtgtgtatcgtctagagtca

SEQ ID NO: 4775357 - DNA, 25 bp, Homo sapien
tctcttgaaatctctgtatgtgcag

SEQ ID NO: 4775358 - DNA, 25 bp, Homo sapien
caaatccaacgagtcctctcaggca

SEQ ID NO: 4775359 - DNA, 25 bp, Homo sapien
gaaataggtttatacagctgtactg

SEQ ID NO: 4775360 - DNA, 25 bp, Homo sapien
ggtgaacacctttccttctcgtgaa

SEQ ID NO: 4775361 - DNA, 25 bp, Homo sapien
caagtctttcatgttcccaagagga

SEQ ID NO: 4775362 - DNA, 25 bp, Homo sapien
tgtaccttgaagatcacccaccaag

SEQ ID NO: 4775363 - DNA, 25 bp, Homo sapien
ggattaattcagcaggcccaagttg

SEQ ID NO: 4775364 - DNA, 25 bp, Homo sapien
tcacctgtacaaagggaatgcaggt

SEQ ID NO: 4775365 - DNA, 25 bp, Homo sapien
catcacctgtacaaagggaatgcag

SEQ ID NO: 4775366 - DNA, 25 bp, Homo sapien
aactgcatcacctgtacaaagggaa

SEQ ID NO: 4775367 - DNA, 25 bp, Homo sapien
aagggaatgcaggtttgcatcattt

SEQ ID NO: 4775368 - DNA, 25 bp, Homo sapien
ttcaaatgtcagtagctgagatgac

SEQ ID NO: 4775369 - DNA, 25 bp, Homo sapien
agctgagatgacaaactttttctaa

SEQ ID NO: 4775370 - DNA, 25 bp, Homo sapien
agagttcaaatgtcagtagctgaga

SEQ ID NO: 4775371 - DNA, 25 bp, Homo sapien
gtagctgagatgacaaactttttct

SEQ ID NO: 4775372 - DNA, 25 bp, Homo sapien
caagaggatgctcatacatcttggc

SEQ ID NO: 4775373 - DNA, 25 bp, Homo sapien
agcaagaggatgctcatacatcttg

SEQ ID NO: 4775374 - DNA, 25 bp, Homo sapien
gagcaagaggatgctcatacatctt

SEQ ID NO: 4775375 - DNA, 25 bp, Homo sapien
gcaagaggatgctcatacatcttgg

SEQ ID NO: 4775376 - DNA, 25 bp, Homo sapien
ctcatacagccagtaacttggcctt

SEQ ID NO: 4775377 - DNA, 25 bp, Homo sapien
tcatacagccagtaacttggccttc

SEQ ID NO: 4775378 - DNA, 25 bp, Homo sapien
ctactctcatacagccagtaacttg

SEQ ID NO: 4775379 - DNA, 25 bp, Homo sapien
tctcatacagccagtaacttggcct

SEQ ID NO: 4775380 - DNA, 25 bp, Homo sapien
tcatcacctatttcattattcatca

SEQ ID NO: 4775381 - DNA, 25 bp, Homo sapien
ctgtgtactcatcacctatttcatt

SEQ ID NO: 4775382 - DNA, 25 bp, Homo sapien
tcacctatttcattattcatcagca

SEQ ID NO: 4775383 - DNA, 25 bp, Homo sapien
cacctatttcattattcatcagcat

SEQ ID NO: 4775384 - DNA, 25 bp, Homo sapien
ccagccaacagagtgactggcaaat

SEQ ID NO: 4775385 - DNA, 25 bp, Homo sapien
ttgaaatgaaggtggccagccaaca

SEQ ID NO: 4775386 - DNA, 25 bp, Homo sapien
gtgaatgtgagttccttgacttcct

SEQ ID NO: 4775387 - DNA, 25 bp, Homo sapien
ctggcaaatagtgggcaagcagtga

SEQ ID NO: 4775388 - DNA, 25 bp, Homo sapien
tcattaagcatatgtacactcctct

SEQ ID NO: 4775389 - DNA, 25 bp, Homo sapien
tagcttcttcccgtatgcttggtgt

SEQ ID NO: 4775390 - DNA, 25 bp, Homo sapien
tgtaccagttaatgcagttttgtgc

SEQ ID NO: 4775391 - DNA, 25 bp, Homo sapien
tcgtcttaagggtcaaatgtgggta

SEQ ID NO: 4775392 - DNA, 25 bp, Homo sapien
cagtggcacgatcttggcttactgc

SEQ ID NO: 4775393 - DNA, 25 bp, Homo sapien
tcttgccctgttgactaggctggag

SEQ ID NO: 4775394 - DNA, 25 bp, Homo sapien
ttgccctgttgactaggctggagtg

SEQ ID NO: 4775395 - DNA, 25 bp, Homo sapien
acgatcttggcttactgcaacctcc

SEQ ID NO: 4775396 - DNA, 25 bp, Homo sapien
tttggataacagaagatggtatttt

SEQ ID NO: 4775397 - DNA, 25 bp, Homo sapien
caaaggtgggttggaatttgcatgt

SEQ ID NO: 4775398 - DNA, 25 bp, Homo sapien
gcatgtgagccgtaacttagttgtt

SEQ ID NO: 4775399 - DNA, 25 bp, Homo sapien
attttggtatgtattcctattgcag

SEQ ID NO: 4775400 - DNA, 25 bp, Homo sapien
ccaccttttctctttagagctacta

SEQ ID NO: 4775401 - DNA, 25 bp, Homo sapien
gtcttaagtacactaatatttttca

SEQ ID NO: 4775402 - DNA, 25 bp, Homo sapien
tagagctactaaaatgaataattat

SEQ ID NO: 4775403 - DNA, 25 bp, Homo sapien
aaaaagcatctatcacatgatataa

SEQ ID NO: 4775404 - DNA, 25 bp, Homo sapien
aggctataaaggaggcatagaggct

SEQ ID NO: 4775405 - DNA, 25 bp, Homo sapien
tgatggaaggcagagccagagcagg

SEQ ID NO: 4775406 - DNA, 25 bp, Homo sapien
ctgcaggctataaaggaggcataga

SEQ ID NO: 4775407 - DNA, 25 bp, Homo sapien
agcttttactcatgatgatggaagg

SEQ ID NO: 4775408 - DNA, 25 bp, Homo sapien
tgtaagttttatcatcagccctgca

SEQ ID NO: 4775409 - DNA, 25 bp, Homo sapien
ttgtcttacttaaagccagggaagc

SEQ ID NO: 4775410 - DNA, 25 bp, Homo sapien
gctttccccagaggtgttcacctat

SEQ ID NO: 4775411 - DNA, 25 bp, Homo sapien
gaccctggttgagtgtgctttcctg

SEQ ID NO: 4775412 - DNA, 25 bp, Homo sapien
tactgatttcattggaaggcaggcc

SEQ ID NO: 4775413 - DNA, 25 bp, Homo sapien
ttaaaacatacctgtgcccgggtca

SEQ ID NO: 4775414 - DNA, 25 bp, Homo sapien
gggtcataccgccagagagcctgat

SEQ ID NO: 4775415 - DNA, 25 bp, Homo sapien
taatgtcagcagcactggattggct

SEQ ID NO: 4775416 - DNA, 25 bp, Homo sapien
gagtaagtacatatgccccttctga

SEQ ID NO: 4775417 - DNA, 25 bp, Homo sapien
gagctggtccttactttggacacaa

SEQ ID NO: 4775418 - DNA, 25 bp, Homo sapien
gaaggaaggtccaaataagctcagt

SEQ ID NO: 4775419 - DNA, 25 bp, Homo sapien
ccattttagacggtagagctggtcc

SEQ ID NO: 4775420 - DNA, 25 bp, Homo sapien
gattaacttgcttgattctccttgt

SEQ ID NO: 4775421 - DNA, 25 bp, Homo sapien
cattcatgtagtgttaaaaagactt

SEQ ID NO: 4775422 - DNA, 25 bp, Homo sapien
tttggttcagtagctgatttagtca

SEQ ID NO: 4775423 - DNA, 25 bp, Homo sapien
gagccactgtccctagccgtctgtg

SEQ ID NO: 4775424 - DNA, 25 bp, Homo sapien
ttggaataactcaaagtctttgagc

SEQ ID NO: 4775425 - DNA, 25 bp, Homo sapien
aaaagtctgtgtggttgttgataga

SEQ ID NO: 4775426 - DNA, 25 bp, Homo sapien
aaatagcattctaccatctagatcc

SEQ ID NO: 4775427 - DNA, 25 bp, Homo sapien
agaaatagaactattcattttccct

SEQ ID NO: 4775428 - DNA, 25 bp, Homo sapien
cattgagccactactgcaagacagc

SEQ ID NO: 4775429 - DNA, 25 bp, Homo sapien
tgggattctgcatacgccatctctg

SEQ ID NO: 4775430 - DNA, 25 bp, Homo sapien
ctgaatacagtaaagccagtggagt

SEQ ID NO: 4775431 - DNA, 25 bp, Homo sapien
cactgagctgtaaactcggcagaaa

SEQ ID NO: 4775432 - DNA, 25 bp, Homo sapien
taaatggaccattaactagggccca

SEQ ID NO: 4775433 - DNA, 25 bp, Homo sapien
ttttgaatcgcatgggaatacgcac

SEQ ID NO: 4775434 - DNA, 25 bp, Homo sapien
caagcattctggtggcaacatagag

SEQ ID NO: 4775435 - DNA, 25 bp, Homo sapien
taatgtgcaactcccaaggtgaaac

SEQ ID NO: 4775436 - DNA, 25 bp, Homo sapien
ttgaaacctgttctgctatgaacag

SEQ ID NO: 4775437 - DNA, 25 bp, Homo sapien
tgtaatgaaggtattgacagaaaaa

SEQ ID NO: 4775438 - DNA, 25 bp, Homo sapien
tttttaggttaagcttcctaatgca

SEQ ID NO: 4775439 - DNA, 25 bp, Homo sapien
cttttataaaggattgtgtactgac

SEQ ID NO: 4775440 - DNA, 25 bp, Homo sapien
caatgtcacgagagagtatcatacc

SEQ ID NO: 4775441 - DNA, 25 bp, Homo sapien
tgcatagtgattgggagctgcagct

SEQ ID NO: 4775442 - DNA, 25 bp, Homo sapien
tcagcactttcggtatcagcacagt

SEQ ID NO: 4775443 - DNA, 25 bp, Homo sapien
gtttaccctcctgagtgcatagtga

SEQ ID NO: 4775444 - DNA, 25 bp, Homo sapien
tccaaggcactataggtgcttctgc

SEQ ID NO: 4775445 - DNA, 25 bp, Homo sapien
tatggcaaacgttattcaaacaggt

SEQ ID NO: 4775446 - DNA, 25 bp, Homo sapien
gatccactgtccagatgtaatcact

SEQ ID NO: 4775447 - DNA, 25 bp, Homo sapien
ctggaaccacgggtacacaccagtg

SEQ ID NO: 4775448 - DNA, 25 bp, Homo sapien
gcagctgcctaccattccgagggaa

SEQ ID NO: 4775449 - DNA, 25 bp, Homo sapien
tgctccgtaagaggcagtgacgtcc

SEQ ID NO: 4775450 - DNA, 25 bp, Homo sapien
caatggaaacacttagggcagaaaa

SEQ ID NO: 4775451 - DNA, 25 bp, Homo sapien
gtaattcagacaagtgttctccctg

SEQ ID NO: 4775452 - DNA, 25 bp, Homo sapien
ccaagagttgagtttgctgacccca

SEQ ID NO: 4775453 - DNA, 25 bp, Homo sapien
gttgagtgagcatagacagacccat

SEQ ID NO: 4775454 - DNA, 25 bp, Homo sapien
gattccagtgtgaccattcttgagc

SEQ ID NO: 4775455 - DNA, 25 bp, Homo sapien
ttctgataccacagaccgagtctgc

SEQ ID NO: 4775456 - DNA, 25 bp, Homo sapien
gcaattacttcttgggagaggcaga

SEQ ID NO: 4775457 - DNA, 25 bp, Homo sapien
cattgcagtactttatgtgacaggg

SEQ ID NO: 4775458 - DNA, 25 bp, Homo sapien
tattgtgcatcacagggtggttttc

SEQ ID NO: 4775459 - DNA, 25 bp, Homo sapien
aaaaacattggtaatggcctctgcc

SEQ ID NO: 4775460 - DNA, 25 bp, Homo sapien
tggctgggagcagttgcgcaggcaa

SEQ ID NO: 4775461 - DNA, 25 bp, Homo sapien
caccaccaccaacagggagggagtg

SEQ ID NO: 4775462 - DNA, 25 bp, Homo sapien
caggagaagctctcgctgctagcct

SEQ ID NO: 4775463 - DNA, 25 bp, Homo sapien
cagcacgcggcggtgcctcttcttt

SEQ ID NO: 4775464 - DNA, 25 bp, Homo sapien
cgagctgcggtctctgatttcacca

SEQ ID NO: 4775465 - DNA, 25 bp, Homo sapien
gcttccaaacctgtcgtaagcagtt

SEQ ID NO: 4775466 - DNA, 25 bp, Homo sapien
tagacaaggtgcaagacaaacagaa

SEQ ID NO: 4775467 - DNA, 25 bp, Homo sapien
cattgaccatagaatcgcctgtggc

SEQ ID NO: 4775468 - DNA, 25 bp, Homo sapien
tctgtttatcgttcatttagggtcc

SEQ ID NO: 4775469 - DNA, 25 bp, Homo sapien
gactcgctggtgaattgcctcgggc

SEQ ID NO: 4775470 - DNA, 25 bp, Homo sapien
gattgcattcatacaggagccggag

SEQ ID NO: 4775471 - DNA, 25 bp, Homo sapien
tgatgtaggccacgggattgcattc

SEQ ID NO: 4775472 - DNA, 25 bp, Homo sapien
ttcacgtccagtacaggctgggtcc

SEQ ID NO: 4775473 - DNA, 25 bp, Homo sapien
tggctgggtacaggaagattcctcc

SEQ ID NO: 4775474 - DNA, 25 bp, Homo sapien
gcggtgcacgtcagccaccatggag

SEQ ID NO: 4775475 - DNA, 25 bp, Homo sapien
ggaagattcctccatagaccagggt

SEQ ID NO: 4775476 - DNA, 25 bp, Homo sapien
accagggtgcggtgcacgtcagcca

SEQ ID NO: 4775477 - DNA, 25 bp, Homo sapien
ggcatagccctcattcaggctgtaa

SEQ ID NO: 4775478 - DNA, 25 bp, Homo sapien
cttggcatagccctcattcaggctg

SEQ ID NO: 4775479 - DNA, 25 bp, Homo sapien
ggtggccgcatcaaaatacttggca

SEQ ID NO: 4775480 - DNA, 25 bp, Homo sapien
ttctgcacatattcagtggtggccg

SEQ ID NO: 4775481 - DNA, 25 bp, Homo sapien
ggccacaatattgcggccacactgc

SEQ ID NO: 4775482 - DNA, 25 bp, Homo sapien
ggttgcactaccgtacagcgcataa

SEQ ID NO: 4775483 - DNA, 25 bp, Homo sapien
taacctgcggccacaatattgcggc

SEQ ID NO: 4775484 - DNA, 25 bp, Homo sapien
tccttttcagaaggctcatcctctg

SEQ ID NO: 4775485 - DNA, 25 bp, Homo sapien
tgggtcaaagcagaccacgtatttc

SEQ ID NO: 4775486 - DNA, 25 bp, Homo sapien
ccaggcagtcaatattggaagatcc

SEQ ID NO: 4775487 - DNA, 25 bp, Homo sapien
tctatagatggcaaagatggttccg

SEQ ID NO: 4775488 - DNA, 25 bp, Homo sapien
aatattggaagatccatccagtggg

SEQ ID NO: 4775489 - DNA, 25 bp, Homo sapien
caccagggaattggatagcacatcc

SEQ ID NO: 4775490 - DNA, 25 bp, Homo sapien
gatggcgtccttattctcttctgag

SEQ ID NO: 4775491 - DNA, 25 bp, Homo sapien
tctccttggcggtgatgatggcgtc

SEQ ID NO: 4775492 - DNA, 25 bp, Homo sapien
gattggaccatgttgatcaccaggg

SEQ ID NO: 4775493 - DNA, 25 bp, Homo sapien
ccttttccataacgtagcgggtcag

SEQ ID NO: 4775494 - DNA, 25 bp, Homo sapien
gtgggccagaccggccttgcgcaca

SEQ ID NO: 4775495 - DNA, 25 bp, Homo sapien
tcagggtgagcatgtcggtttcgaa

SEQ ID NO: 4775496 - DNA, 25 bp, Homo sapien
tttggcctgacgccccttttccata

SEQ ID NO: 4775497 - DNA, 25 bp, Homo sapien
ggcaggaaaccttgcttacttctga

SEQ ID NO: 4775498 - DNA, 25 bp, Homo sapien
ctcccggcaggaaaccttgcttact

SEQ ID NO: 4775499 - DNA, 25 bp, Homo sapien
ccggcaggaaaccttgcttacttct

SEQ ID NO: 4775500 - DNA, 25 bp, Homo sapien
tctcccggcaggaaaccttgcttac

SEQ ID NO: 4775501 - DNA, 25 bp, Homo sapien
ttattatttgacacaaagcaaggga

SEQ ID NO: 4775502 - DNA, 25 bp, Homo sapien
aaaatatatcttaacaccagtggca

SEQ ID NO: 4775503 - DNA, 25 bp, Homo sapien
caccagtggcattatggagacagca

SEQ ID NO: 4775504 - DNA, 25 bp, Homo sapien
catttggttagggagtgccaagcat

SEQ ID NO: 4775505 - DNA, 25 bp, Homo sapien
gaggaataagtttatttctcctcca

SEQ ID NO: 4775506 - DNA, 25 bp, Homo sapien
tggtggaaatagtcatgctttttat

SEQ ID NO: 4775507 - DNA, 25 bp, Homo sapien
tactgctgtgtgagacaaaaggtcc

SEQ ID NO: 4775508 - DNA, 25 bp, Homo sapien
tagaggcaattctccggatgcaggc

SEQ ID NO: 4775509 - DNA, 25 bp, Homo sapien
gctctctaggaatgtaaggtgcaca

SEQ ID NO: 4775510 - DNA, 25 bp, Homo sapien
gcagagtgcttctcatacaccttca

SEQ ID NO: 4775511 - DNA, 25 bp, Homo sapien
gagtgcttctcatacaccttcagga

SEQ ID NO: 4775512 - DNA, 25 bp, Homo sapien
tgggcagagtgcttctcatacacct

SEQ ID NO: 4775513 - DNA, 25 bp, Homo sapien
actgggcagagtgcttctcatacac

SEQ ID NO: 4775514 - DNA, 25 bp, Homo sapien
tgtctgtgggaatgacgtctaacac

SEQ ID NO: 4775515 - DNA, 25 bp, Homo sapien
tcgtcgggggatcccaagatcaccg

SEQ ID NO: 4775516 - DNA, 25 bp, Homo sapien
gaatgacgtctaacacggcctcctt

SEQ ID NO: 4775517 - DNA, 25 bp, Homo sapien
cggcgccctctggtgaatgtctgtg

SEQ ID NO: 4775518 - DNA, 25 bp, Homo sapien
caaccattcatcaagccagtgccag

SEQ ID NO: 4775519 - DNA, 25 bp, Homo sapien
ctgatgcaaatgtgagacagaccac

SEQ ID NO: 4775520 - DNA, 25 bp, Homo sapien
ggttgcatctgagacaaaacagtta

SEQ ID NO: 4775521 - DNA, 25 bp, Homo sapien
gggtagcggcctccttgtatcagaa

SEQ ID NO: 4775522 - DNA, 25 bp, Homo sapien
taccgggccccataaggagctgaat

SEQ ID NO: 4775523 - DNA, 25 bp, Homo sapien
gcgatgaacatcagccaccatggag

SEQ ID NO: 4775524 - DNA, 25 bp, Homo sapien
cagaaatatccctccgtagaccaga

SEQ ID NO: 4775525 - DNA, 25 bp, Homo sapien
tgttagcggggtacagaaatatccc

SEQ ID NO: 4775526 - DNA, 25 bp, Homo sapien
ttcaccgagcacctacaaggtatgt

SEQ ID NO: 4775527 - DNA, 25 bp, Homo sapien
tgatgagaatcctgttcccaataaa

SEQ ID NO: 4775528 - DNA, 25 bp, Homo sapien
cagaagccccaacgagggtatggtt

SEQ ID NO: 4775529 - DNA, 25 bp, Homo sapien
aataggtcagattgcccacagaagc

SEQ ID NO: 4775530 - DNA, 25 bp, Homo sapien
agtccctggcgtagccctcgttaag

SEQ ID NO: 4775531 - DNA, 25 bp, Homo sapien
tcagtgacggcagggtcaaagtccc

SEQ ID NO: 4775532 - DNA, 25 bp, Homo sapien
gtcaaagtccctggcgtagccctcg

SEQ ID NO: 4775533 - DNA, 25 bp, Homo sapien
gatgtactcagtgacggcagggtca

SEQ ID NO: 4775534 - DNA, 25 bp, Homo sapien
tgtccaccaaaatgaactccccgat

SEQ ID NO: 4775535 - DNA, 25 bp, Homo sapien
gtccaccaaaatgaactccccgatg

SEQ ID NO: 4775536 - DNA, 25 bp, Homo sapien
cttgtccaccaaaatgaactccccg

SEQ ID NO: 4775537 - DNA, 25 bp, Homo sapien
ccaccaaaatgaactccccgatggc

SEQ ID NO: 4775538 - DNA, 25 bp, Homo sapien
tggagagatgacgagcgcactgggt

SEQ ID NO: 4775539 - DNA, 25 bp, Homo sapien
aggtggagagatgacgagcgcactg

SEQ ID NO: 4775540 - DNA, 25 bp, Homo sapien
agagatgacgagcgcactgggtccc

SEQ ID NO: 4775541 - DNA, 25 bp, Homo sapien
gatgacgagcgcactgggtccccca

SEQ ID NO: 4775542 - DNA, 25 bp, Homo sapien
gaggcgagcgatgggctgggctacg

SEQ ID NO: 4775543 - DNA, 25 bp, Homo sapien
gagcgatgggctgggctacgctggg

SEQ ID NO: 4775544 - DNA, 25 bp, Homo sapien
gcgagcgatgggctgggctacgctg

SEQ ID NO: 4775545 - DNA, 25 bp, Homo sapien
aggcgagcgatgggctgggctacgc

SEQ ID NO: 4775546 - DNA, 25 bp, Homo sapien
gatcgaggctctgcccatttaggag

SEQ ID NO: 4775547 - DNA, 25 bp, Homo sapien
tctggcgtacgtaacttccgatggc

SEQ ID NO: 4775548 - DNA, 25 bp, Homo sapien
gatcagtccctgagttacacccaag

SEQ ID NO: 4775549 - DNA, 25 bp, Homo sapien
tgttgcagaagtcctattgctccgg

SEQ ID NO: 4775550 - DNA, 25 bp, Homo sapien
tggtggcactgccatacagtgcgta

SEQ ID NO: 4775551 - DNA, 25 bp, Homo sapien
gtccatggcaaggaccagcatggtg

SEQ ID NO: 4775552 - DNA, 25 bp, Homo sapien
agcatgaagcagttgaccccacagt

SEQ ID NO: 4775553 - DNA, 25 bp, Homo sapien
cctggttgcagagcatccttctcag

SEQ ID NO: 4775554 - DNA, 25 bp, Homo sapien
tatcattccactgcacatgcctggg

SEQ ID NO: 4775555 - DNA, 25 bp, Homo sapien
tgagaacctgcctctttaagaaaaa

SEQ ID NO: 4775556 - DNA, 25 bp, Homo sapien
tagttagctggttgcactgggttat

SEQ ID NO: 4775557 - DNA, 25 bp, Homo sapien
tgagaatctgcattgcactatgcaa

SEQ ID NO: 4775558 - DNA, 25 bp, Homo sapien
caaaaatggttccaacggacacaag

SEQ ID NO: 4775559 - DNA, 25 bp, Homo sapien
caaggcaatcgatgttggaagatcc

SEQ ID NO: 4775560 - DNA, 25 bp, Homo sapien
tcgatgttggaagatccatcaaggg

SEQ ID NO: 4775561 - DNA, 25 bp, Homo sapien
catcaaggggatcaaaacagaccac

SEQ ID NO: 4775562 - DNA, 25 bp, Homo sapien
tcacctgtcacgttggtagaaccag

SEQ ID NO: 4775563 - DNA, 25 bp, Homo sapien
tcttctgacacgagaacacacgtgg

SEQ ID NO: 4775564 - DNA, 25 bp, Homo sapien
taaccaggtcgttggagaggacgtc

SEQ ID NO: 4775565 - DNA, 25 bp, Homo sapien
gaggacgtccagcttcttaacttga

SEQ ID NO: 4775566 - DNA, 25 bp, Homo sapien
gaagcggcaggttgtcatagcctgg

SEQ ID NO: 4775567 - DNA, 25 bp, Homo sapien
agaagcggcaggttgtcatagcctg

SEQ ID NO: 4775568 - DNA, 25 bp, Homo sapien
aagcggcaggttgtcatagcctggg

SEQ ID NO: 4775569 - DNA, 25 bp, Homo sapien
agaactgacggggctgcccgcatcc

SEQ ID NO: 4775570 - DNA, 25 bp, Homo sapien
cagaactgacggggctgcccgcatc

SEQ ID NO: 4775571 - DNA, 25 bp, Homo sapien
acagaactgacggggctgcccgcat

SEQ ID NO: 4775572 - DNA, 25 bp, Homo sapien
cacagaactgacggggctgcccgca

SEQ ID NO: 4775573 - DNA, 25 bp, Homo sapien
ttgacgtccgtgtcgaagggcgcct

SEQ ID NO: 4775574 - DNA, 25 bp, Homo sapien
ctccatgacgaagcgggtcagggtg

SEQ ID NO: 4775575 - DNA, 25 bp, Homo sapien
cgccttgcgcaccgccgaagagatg

SEQ ID NO: 4775576 - DNA, 25 bp, Homo sapien
tgcagagcgagttgagcagctgggt

SEQ ID NO: 4775577 - DNA, 25 bp, Homo sapien
gcaggtgcaagcggcaggtgcgggg

SEQ ID NO: 4775578 - DNA, 25 bp, Homo sapien
aggtgcgggcggcaagagagggcag

SEQ ID NO: 4775579 - DNA, 25 bp, Homo sapien
ggcggcaagagagggcagtaggcac

SEQ ID NO: 4775580 - DNA, 25 bp, Homo sapien
aagagagggcagtaggcactggccg

SEQ ID NO: 4775581 - DNA, 25 bp, Homo sapien
gagagggcagtaggcactggccgca

SEQ ID NO: 4775582 - DNA, 25 bp, Homo sapien
cgggaggactgacagaccgactgcc

SEQ ID NO: 4775583 - DNA, 25 bp, Homo sapien
cagcgctcgtggtgcaactgggcca

SEQ ID NO: 4775584 - DNA, 25 bp, Homo sapien
tgaatcgcggaaacctttagacgcg

SEQ ID NO: 4775585 - DNA, 25 bp, Homo sapien
aggcgccggcgggtgaatcgcggaa

SEQ ID NO: 4775586 - DNA, 25 bp, Homo sapien
cacccgcactgtggagcgggactcg

SEQ ID NO: 4775587 - DNA, 25 bp, Homo sapien
ctccacccgcactgtggagcgggac

SEQ ID NO: 4775588 - DNA, 25 bp, Homo sapien
ccgcactgtggagcgggactcgggc

SEQ ID NO: 4775589 - DNA, 25 bp, Homo sapien
tccacccgcactgtggagcgggact

SEQ ID NO: 4775590 - DNA, 25 bp, Homo sapien
gagagttgatcctttaagggtctta

SEQ ID NO: 4775591 - DNA, 25 bp, Homo sapien
ggaaagacagcgactgtctcctcaa

SEQ ID NO: 4775592 - DNA, 25 bp, Homo sapien
gttcctcaggcaacttttcaggaaa

SEQ ID NO: 4775593 - DNA, 25 bp, Homo sapien
aggggacttagatgcctggcaaaga

SEQ ID NO: 4775594 - DNA, 25 bp, Homo sapien
ttcaggcaagagtagatacagcaca

SEQ ID NO: 4775595 - DNA, 25 bp, Homo sapien
gatgtgtatacgtgacactcctaac

SEQ ID NO: 4775596 - DNA, 25 bp, Homo sapien
taacgatatcctagggtaagaacag

SEQ ID NO: 4775597 - DNA, 25 bp, Homo sapien
ggcaaaggcttttacatacaaccaa

SEQ ID NO: 4775598 - DNA, 25 bp, Homo sapien
gctgggcaagtcgagggaatccaca

SEQ ID NO: 4775599 - DNA, 25 bp, Homo sapien
caacagctccgttcattgtctggca

SEQ ID NO: 4775600 - DNA, 25 bp, Homo sapien
cactttggcagagtcgcagagacaa

SEQ ID NO: 4775601 - DNA, 25 bp, Homo sapien
tgagatgtccaactgacagctgggc

SEQ ID NO: 4775602 - DNA, 25 bp, Homo sapien
ggagattccaccgacaatggaggct

SEQ ID NO: 4775603 - DNA, 25 bp, Homo sapien
ccttctgttctgagggcaaagggag

SEQ ID NO: 4775604 - DNA, 25 bp, Homo sapien
gaggtagagttggtggctaaccttc

SEQ ID NO: 4775605 - DNA, 25 bp, Homo sapien
tccccagggcatagggcggaggtag

SEQ ID NO: 4775606 - DNA, 25 bp, Homo sapien
tccccatactgaagccgagtcccca

SEQ ID NO: 4775607 - DNA, 25 bp, Homo sapien
atactgaagccgagtccccagagct

SEQ ID NO: 4775608 - DNA, 25 bp, Homo sapien
ggtgacctgactttcagctgtcatc

SEQ ID NO: 4775609 - DNA, 25 bp, Homo sapien
agctggccatggtcacagtggtgac

SEQ ID NO: 4775610 - DNA, 25 bp, Homo sapien
cggtcactggctctttggccacagg

SEQ ID NO: 4775611 - DNA, 25 bp, Homo sapien
tacttctcctcaaagatgtcacggt

SEQ ID NO: 4775612 - DNA, 25 bp, Homo sapien
cactgtttaatggttgaaattcctc

SEQ ID NO: 4775613 - DNA, 25 bp, Homo sapien
tacatacgtattatctttacagaca

SEQ ID NO: 4775614 - DNA, 25 bp, Homo sapien
ttgcaccaaatggtgcagctataca

SEQ ID NO: 4775615 - DNA, 25 bp, Homo sapien
caccaaatggtgcagctatacacac

SEQ ID NO: 4775616 - DNA, 25 bp, Homo sapien
tcttgcaccaaatggtgcagctata

SEQ ID NO: 4775617 - DNA, 25 bp, Homo sapien
cattcttgcaccaaatggtgcagct

SEQ ID NO: 4775618 - DNA, 25 bp, Homo sapien
gtaggagatgccaccagttacccag

SEQ ID NO: 4775619 - DNA, 25 bp, Homo sapien
cagcattctcatatcgccgtaggag

SEQ ID NO: 4775620 - DNA, 25 bp, Homo sapien
gaaggaggcagtgatactgtcaagc

SEQ ID NO: 4775621 - DNA, 25 bp, Homo sapien
caagctgccgagatttatcgctgtc

SEQ ID NO: 4775622 - DNA, 25 bp, Homo sapien
tcttaagcttcataaagattttgca

SEQ ID NO: 4775623 - DNA, 25 bp, Homo sapien
cagaggtgagactaggctaaggaat

SEQ ID NO: 4775624 - DNA, 25 bp, Homo sapien
gggcaactctacaagccctagccag

SEQ ID NO: 4775625 - DNA, 25 bp, Homo sapien
aatactagggtaccagggcaactct

SEQ ID NO: 4775626 - DNA, 25 bp, Homo sapien
tagcccgtagtaaccccgagtctgc

SEQ ID NO: 4775627 - DNA, 25 bp, Homo sapien
tggatgacgtcacccggcgcgtgcc

SEQ ID NO: 4775628 - DNA, 25 bp, Homo sapien
taacctgttcgctccctgttgggtc

SEQ ID NO: 4775629 - DNA, 25 bp, Homo sapien
ccgagtctgcggaagtggtgacccg

SEQ ID NO: 4775630 - DNA, 25 bp, Homo sapien
cacttttgctcgaccagcgaggacc

SEQ ID NO: 4775631 - DNA, 25 bp, Homo sapien
cttttgctcgaccagcgaggacccg

SEQ ID NO: 4775632 - DNA, 25 bp, Homo sapien
tttgctcgaccagcgaggacccgca

SEQ ID NO: 4775633 - DNA, 25 bp, Homo sapien
cctcacttttgctcgaccagcgagg

SEQ ID NO: 4775634 - DNA, 25 bp, Homo sapien
ttcatcaagtaagaatgggtactaa

SEQ ID NO: 4775635 - DNA, 25 bp, Homo sapien
tctttatgagcataacctacattat

SEQ ID NO: 4775636 - DNA, 25 bp, Homo sapien
ctttatgagcataacctacattatt

SEQ ID NO: 4775637 - DNA, 25 bp, Homo sapien
agtaagaatgggtactaattcccat

SEQ ID NO: 4775638 - DNA, 25 bp, Homo sapien
ctattgatcccatcattcagactgt

SEQ ID NO: 4775639 - DNA, 25 bp, Homo sapien
tctggctaactgttatttgtggaga

SEQ ID NO: 4775640 - DNA, 25 bp, Homo sapien
attcagactgtgaacagagtaccca

SEQ ID NO: 4775641 - DNA, 25 bp, Homo sapien
gactgtgaacagagtacccatgaaa

SEQ ID NO: 4775642 - DNA, 25 bp, Homo sapien
gccttgcaaggtggccacatacatg

SEQ ID NO: 4775643 - DNA, 25 bp, Homo sapien
tacatgcatttgcaaccacaggcag

SEQ ID NO: 4775644 - DNA, 25 bp, Homo sapien
ccaaaagtgctgaagtcaacggact

SEQ ID NO: 4775645 - DNA, 25 bp, Homo sapien
ggctgtgaccctgattgatgtcagt

SEQ ID NO: 4775646 - DNA, 25 bp, Homo sapien
caaatttgggatgcctgaaccctgc

SEQ ID NO: 4775647 - DNA, 25 bp, Homo sapien
tcacggttgtttctgaggagttcag

SEQ ID NO: 4775648 - DNA, 25 bp, Homo sapien
tgggatttctagctcaaagtactgc

SEQ ID NO: 4775649 - DNA, 25 bp, Homo sapien
gaaccctgccatattcccgtgacaa

SEQ ID NO: 4775650 - DNA, 25 bp, Homo sapien
gattagcacatttcccgggcaccag

SEQ ID NO: 4775651 - DNA, 25 bp, Homo sapien
tcacagtgacacataggcctgatta

SEQ ID NO: 4775652 - DNA, 25 bp, Homo sapien
gacacataggcctgattagcacatt

SEQ ID NO: 4775653 - DNA, 25 bp, Homo sapien
ttcccgggcaccagctgatttttcc

SEQ ID NO: 4775654 - DNA, 25 bp, Homo sapien
gtggccggtgagacttgaataacaa

SEQ ID NO: 4775655 - DNA, 25 bp, Homo sapien
cctatagaggcgcttgtgttcagca

SEQ ID NO: 4775656 - DNA, 25 bp, Homo sapien
tgaccacctggagcagtatgatttg

SEQ ID NO: 4775657 - DNA, 25 bp, Homo sapien
cctgcattgaaggtcagagtggccg

SEQ ID NO: 4775658 - DNA, 25 bp, Homo sapien
attgccctggttaggcaatgctggt

SEQ ID NO: 4775659 - DNA, 25 bp, Homo sapien
gtgcccagggcgtcttactgtctcg

SEQ ID NO: 4775660 - DNA, 25 bp, Homo sapien
ggtgccagttacaacccttgagcaa

SEQ ID NO: 4775661 - DNA, 25 bp, Homo sapien
cgtcttactgtctcgtttgttctgg

SEQ ID NO: 4775662 - DNA, 25 bp, Homo sapien
cactctcaaactctgggtcatttac

SEQ ID NO: 4775663 - DNA, 25 bp, Homo sapien
actctgggtcatttacggtttctga

SEQ ID NO: 4775664 - DNA, 25 bp, Homo sapien
tgttaccactattgctatctcactc

SEQ ID NO: 4775665 - DNA, 25 bp, Homo sapien
cactattgctatctcactctcaaac

SEQ ID NO: 4775666 - DNA, 25 bp, Homo sapien
gatggagacatggtcatcaaatgat

SEQ ID NO: 4775667 - DNA, 25 bp, Homo sapien
ctccaccttcacaattgcagtggga

SEQ ID NO: 4775668 - DNA, 25 bp, Homo sapien
gtaactatgccaatgccagcctcca

SEQ ID NO: 4775669 - DNA, 25 bp, Homo sapien
tcacaattgcagtgggatgctggac

SEQ ID NO: 4775670 - DNA, 25 bp, Homo sapien
aggccaacttcaggtttgtgtttgg

SEQ ID NO: 4775671 - DNA, 25 bp, Homo sapien
tgaggccaacttcaggtttgtgttt

SEQ ID NO: 4775672 - DNA, 25 bp, Homo sapien
tctgaggccaacttcaggtttgtgt

SEQ ID NO: 4775673 - DNA, 25 bp, Homo sapien
cttctgaggccaacttcaggtttgt

SEQ ID NO: 4775674 - DNA, 25 bp, Homo sapien
tcaggtttaggttgtatacgatcac

SEQ ID NO: 4775675 - DNA, 25 bp, Homo sapien
ccagaaattcatccggccaaacact

SEQ ID NO: 4775676 - DNA, 25 bp, Homo sapien
aactttagggttcttggcagcagga

SEQ ID NO: 4775677 - DNA, 25 bp, Homo sapien
tgtatctttggctacctcagtattc

SEQ ID NO: 4775678 - DNA, 25 bp, Homo sapien
tcccgactggctaatgagaacctga

SEQ ID NO: 4775679 - DNA, 25 bp, Homo sapien
cccctggcagctgttgattgattct

SEQ ID NO: 4775680 - DNA, 25 bp, Homo sapien
taaacggtatgcacgtacatgccca

SEQ ID NO: 4775681 - DNA, 25 bp, Homo sapien
gagaacctgattggcttagcagctg

SEQ ID NO: 4775682 - DNA, 25 bp, Homo sapien
tgtcctctgacgcacagaagtcttt

SEQ ID NO: 4775683 - DNA, 25 bp, Homo sapien
agtaatggcaaagaaaggaccagag

SEQ ID NO: 4775684 - DNA, 25 bp, Homo sapien
tagatgtttatttctcccaccctgt

SEQ ID NO: 4775685 - DNA, 25 bp, Homo sapien
aatatttttataggaggcgtggagg

SEQ ID NO: 4775686 - DNA, 25 bp, Homo sapien
ccacagatgtggtcctgcctgttgg

SEQ ID NO: 4775687 - DNA, 25 bp, Homo sapien
tcctgcctgttggctgttataaccc

SEQ ID NO: 4775688 - DNA, 25 bp, Homo sapien
ctgcctgttggctgttataacccat

SEQ ID NO: 4775689 - DNA, 25 bp, Homo sapien
tggtcctgcctgttggctgttataa

SEQ ID NO: 4775690 - DNA, 25 bp, Homo sapien
ggattccatccccacttgcaatcac

SEQ ID NO: 4775691 - DNA, 25 bp, Homo sapien
cttgcaatcacactgcacagttttg

SEQ ID NO: 4775692 - DNA, 25 bp, Homo sapien
ccacttgcaatcacactgcacagtt

SEQ ID NO: 4775693 - DNA, 25 bp, Homo sapien
gcaatcacactgcacagttttgcac

SEQ ID NO: 4775694 - DNA, 25 bp, Homo sapien
ctacagtttagcagtgagccagcct

SEQ ID NO: 4775695 - DNA, 25 bp, Homo sapien
tgcacatattccagtaagccaagct

SEQ ID NO: 4775696 - DNA, 25 bp, Homo sapien
gcagatgctgagtggcttacataca

SEQ ID NO: 4775697 - DNA, 25 bp, Homo sapien
agttccctcaaggtcccagatttgg

SEQ ID NO: 4775698 - DNA, 25 bp, Homo sapien
catctttagccttctgggtattcct

SEQ ID NO: 4775699 - DNA, 25 bp, Homo sapien
tctttagccttctgggtattcctca

SEQ ID NO: 4775700 - DNA, 25 bp, Homo sapien
ctttagccttctgggtattcctcat

SEQ ID NO: 4775701 - DNA, 25 bp, Homo sapien
atctttagccttctgggtattcctc

SEQ ID NO: 4775702 - DNA, 25 bp, Homo sapien
tgacaacacgggagtgtggctgcaa

SEQ ID NO: 4775703 - DNA, 25 bp, Homo sapien
catgcaatacgcttggcctctgtgg

SEQ ID NO: 4775704 - DNA, 25 bp, Homo sapien
gggcaaggcggcagacatgcaatac

SEQ ID NO: 4775705 - DNA, 25 bp, Homo sapien
agacgcagtcttctaatctgggtgg

SEQ ID NO: 4775706 - DNA, 25 bp, Homo sapien
tcgcctccaggacgagatgcaatgc

SEQ ID NO: 4775707 - DNA, 25 bp, Homo sapien
aaaactagcatgaggccatttccgg

SEQ ID NO: 4775708 - DNA, 25 bp, Homo sapien
ggtaaagctgcatggtgatccacag

SEQ ID NO: 4775709 - DNA, 25 bp, Homo sapien
gttctaagtctttcagggcatgcgt

SEQ ID NO: 4775710 - DNA, 25 bp, Homo sapien
gcccagccatataccatcttatttt

SEQ ID NO: 4775711 - DNA, 25 bp, Homo sapien
taaattgaaagcttacaggcttcaa

SEQ ID NO: 4775712 - DNA, 25 bp, Homo sapien
gcttcaaggaagagtctgataagga

SEQ ID NO: 4775713 - DNA, 25 bp, Homo sapien
gcgcccagccatataccatcttatt

SEQ ID NO: 4775714 - DNA, 25 bp, Homo sapien
tctcaccagtacaggaaaactgttt

SEQ ID NO: 4775715 - DNA, 25 bp, Homo sapien
ctttgtttggtactgttgacagctc

SEQ ID NO: 4775716 - DNA, 25 bp, Homo sapien
gctcattgtgccctgacagtcacca

SEQ ID NO: 4775717 - DNA, 25 bp, Homo sapien
cagtcctctggaatctgctttctgc

SEQ ID NO: 4775718 - DNA, 25 bp, Homo sapien
tcccagagtggtctcatctaaaccc

SEQ ID NO: 4775719 - DNA, 25 bp, Homo sapien
cctccacactcggctgcgtgtcctc

SEQ ID NO: 4775720 - DNA, 25 bp, Homo sapien
catctccttcgaggtctgccctttg

SEQ ID NO: 4775721 - DNA, 25 bp, Homo sapien
gtctcatctaaacccccatcttagg

SEQ ID NO: 4775722 - DNA, 25 bp, Homo sapien
ctcaactgccctatctccaaagaca

SEQ ID NO: 4775723 - DNA, 25 bp, Homo sapien
tgccaggaaacgaggacaaaaacca

SEQ ID NO: 4775724 - DNA, 25 bp, Homo sapien
gtcctcaagcggccttttctctgcg

SEQ ID NO: 4775725 - DNA, 25 bp, Homo sapien
aaccaccccttgaagccctcaactg

SEQ ID NO: 4775726 - DNA, 25 bp, Homo sapien
tcattgagcccaaatgataaattct

SEQ ID NO: 4775727 - DNA, 25 bp, Homo sapien
cctaaattctagagtattttcactc

SEQ ID NO: 4775728 - DNA, 25 bp, Homo sapien
ggatggttgtgaaaagtatagactt

SEQ ID NO: 4775729 - DNA, 25 bp, Homo sapien
tagactttatagtatctagtgggca

SEQ ID NO: 4775730 - DNA, 25 bp, Homo sapien
gtcacttggcttttgagctttattt

SEQ ID NO: 4775731 - DNA, 25 bp, Homo sapien
cttgctcacagtagatatgaagcca

SEQ ID NO: 4775732 - DNA, 25 bp, Homo sapien
agtctgttactccattgtcatccta

SEQ ID NO: 4775733 - DNA, 25 bp, Homo sapien
tgtcatcctacataaagtctcatgc

SEQ ID NO: 4775734 - DNA, 25 bp, Homo sapien
ccagaaggcattggcccagtaaatg

SEQ ID NO: 4775735 - DNA, 25 bp, Homo sapien
ggaatctaaatgtctcacccgagat

SEQ ID NO: 4775736 - DNA, 25 bp, Homo sapien
cactccggtgggtgttcaaacgtgc

SEQ ID NO: 4775737 - DNA, 25 bp, Homo sapien
tagaatcttcatgcgtcagttggag

SEQ ID NO: 4775738 - DNA, 25 bp, Homo sapien
ctagaggtcctccatagatgcatgt

SEQ ID NO: 4775739 - DNA, 25 bp, Homo sapien
ggtcctccatagatgcatgtgctag

SEQ ID NO: 4775740 - DNA, 25 bp, Homo sapien
gaggtcctccatagatgcatgtgct

SEQ ID NO: 4775741 - DNA, 25 bp, Homo sapien
tcctccatagatgcatgtgctagtc

SEQ ID NO: 4775742 - DNA, 25 bp, Homo sapien
tccaaagagcagataaggattctat

SEQ ID NO: 4775743 - DNA, 25 bp, Homo sapien
cattagtggattttacaaggcacag

SEQ ID NO: 4775744 - DNA, 25 bp, Homo sapien
tagactagacacacatccaaaggga

SEQ ID NO: 4775745 - DNA, 25 bp, Homo sapien
ctgggttcactgcacgggttgatgt

SEQ ID NO: 4775746 - DNA, 25 bp, Homo sapien
taattaatgttactggggaatgggc

SEQ ID NO: 4775747 - DNA, 25 bp, Homo sapien
tcatgggtcacagacagtagtaatt

SEQ ID NO: 4775748 - DNA, 25 bp, Homo sapien
tatctgtggtgtgttatgggaacag

SEQ ID NO: 4775749 - DNA, 25 bp, Homo sapien
tccagtactgttttcagacttaaag

SEQ ID NO: 4775750 - DNA, 25 bp, Homo sapien
tcatccacaagctcgtgagcagcca

SEQ ID NO: 4775751 - DNA, 25 bp, Homo sapien
acaagctcgtgagcagccactggca

SEQ ID NO: 4775752 - DNA, 25 bp, Homo sapien
cagttcatccacaagctcgtgagca

SEQ ID NO: 4775753 - DNA, 25 bp, Homo sapien
tccacaagctcgtgagcagccactg

SEQ ID NO: 4775754 - DNA, 25 bp, Homo sapien
gctgcacctggtgcatgtgtcatgg

SEQ ID NO: 4775755 - DNA, 25 bp, Homo sapien
tggtgtcctggcttttggatggtca

SEQ ID NO: 4775756 - DNA, 25 bp, Homo sapien
catgtgtcatggtcttatggctggg

SEQ ID NO: 4775757 - DNA, 25 bp, Homo sapien
tcctggcttttggatggtcagaaat

SEQ ID NO: 4775758 - DNA, 25 bp, Homo sapien
tcagtcatgacagagcattccggtg

SEQ ID NO: 4775759 - DNA, 25 bp, Homo sapien
tcagaacactcattgcaggcctgtt

SEQ ID NO: 4775760 - DNA, 25 bp, Homo sapien
tcagcagaatcatgagcctcagaac

SEQ ID NO: 4775761 - DNA, 25 bp, Homo sapien
ccctctcgtcgtgggtgaagttcag

SEQ ID NO: 4775762 - DNA, 25 bp, Homo sapien
gagtaaatggctgtaagtgcagagc

SEQ ID NO: 4775763 - DNA, 25 bp, Homo sapien
catttgataaccatctcctgtgtcc

SEQ ID NO: 4775764 - DNA, 25 bp, Homo sapien
tcatgaagggatcgtgtcggactgt

SEQ ID NO: 4775765 - DNA, 25 bp, Homo sapien
gagcagcgtctgagcctcatgaagg

SEQ ID NO: 4775766 - DNA, 25 bp, Homo sapien
gcatgtggccagtgatgtaaaaact

SEQ ID NO: 4775767 - DNA, 25 bp, Homo sapien
catgtggccagtgatgtaaaaactg

SEQ ID NO: 4775768 - DNA, 25 bp, Homo sapien
ctgctcctgtgatgtatctcgtagg

SEQ ID NO: 4775769 - DNA, 25 bp, Homo sapien
gatgtatctcgtaggagcagtcagc

SEQ ID NO: 4775770 - DNA, 25 bp, Homo sapien
cctgaacctggacattaattgttgg

SEQ ID NO: 4775771 - DNA, 25 bp, Homo sapien
ctgaacctggacattaattgttggc

SEQ ID NO: 4775772 - DNA, 25 bp, Homo sapien
tagcagcaagctcggtaagtccagg

SEQ ID NO: 4775773 - DNA, 25 bp, Homo sapien
gggacttacggataacctcgatgag

SEQ ID NO: 4775774 - DNA, 25 bp, Homo sapien
tgaggcgggcttaacataggattgc

SEQ ID NO: 4775775 - DNA, 25 bp, Homo sapien
tccaggttacttctaggcggacagg

SEQ ID NO: 4775776 - DNA, 25 bp, Homo sapien
gaattatattgctatcaggaatggt

SEQ ID NO: 4775777 - DNA, 25 bp, Homo sapien
tggtttcttgagaactggagcggaa

SEQ ID NO: 4775778 - DNA, 25 bp, Homo sapien
gagcggaagaaaggctgtgtcccac

SEQ ID NO: 4775779 - DNA, 25 bp, Homo sapien
ccacgatatgtgatcctgctaataa

SEQ ID NO: 4775780 - DNA, 25 bp, Homo sapien
gtagatagcacatgacatgagcaaa

SEQ ID NO: 4775781 - DNA, 25 bp, Homo sapien
gatgggggtagatagcacatgacat

SEQ ID NO: 4775782 - DNA, 25 bp, Homo sapien
gggtagatagcacatgacatgagca

SEQ ID NO: 4775783 - DNA, 25 bp, Homo sapien
taaacatttgactatcaaggatggg

SEQ ID NO: 4775784 - DNA, 25 bp, Homo sapien
gtatactcatatgctgggccttagg

SEQ ID NO: 4775785 - DNA, 25 bp, Homo sapien
cactgtttgtaaattaggaactcag

SEQ ID NO: 4775786 - DNA, 25 bp, Homo sapien
tgtataactagaattggagctagca

SEQ ID NO: 4775787 - DNA, 25 bp, Homo sapien
tagaattggagctagcaaatgtcac

SEQ ID NO: 4775788 - DNA, 25 bp, Homo sapien
tacaagaaaagttaggaatattctg

SEQ ID NO: 4775789 - DNA, 25 bp, Homo sapien
tctgatactttaaagtattccaatt

SEQ ID NO: 4775790 - DNA, 25 bp, Homo sapien
aatgtgaatacaagaaaagttagga

SEQ ID NO: 4775791 - DNA, 25 bp, Homo sapien
taggaatattctgatactttaaagt

SEQ ID NO: 4775792 - DNA, 25 bp, Homo sapien
gaccagaggattgcatgtttcatca

SEQ ID NO: 4775793 - DNA, 25 bp, Homo sapien
cccttgtaattggtctggcaggatc

SEQ ID NO: 4775794 - DNA, 25 bp, Homo sapien
taatagcacgggaacatttgacact

SEQ ID NO: 4775795 - DNA, 25 bp, Homo sapien
tagtaggcaggctcttgggcagaca

SEQ ID NO: 4775796 - DNA, 25 bp, Homo sapien
tattggcaaaaagcaccatgtgaaa

SEQ ID NO: 4775797 - DNA, 25 bp, Homo sapien
ttatgcagcgtatagattttcactg

SEQ ID NO: 4775798 - DNA, 25 bp, Homo sapien
tttatttggttcagagccgagtctg

SEQ ID NO: 4775799 - DNA, 25 bp, Homo sapien
ttgaggaacttcattgattatatct

SEQ ID NO: 4775800 - DNA, 25 bp, Homo sapien
tagaactcatgccactgtcaatccg

SEQ ID NO: 4775801 - DNA, 25 bp, Homo sapien
aatccgtggctgcattagtcccagg

SEQ ID NO: 4775802 - DNA, 25 bp, Homo sapien
cctctgcaaggtcagtcatgggaca

SEQ ID NO: 4775803 - DNA, 25 bp, Homo sapien
gcttcatttaggcacagatcccaga

SEQ ID NO: 4775804 - DNA, 25 bp, Homo sapien
aacacagctggcctttcagtcttaa

SEQ ID NO: 4775805 - DNA, 25 bp, Homo sapien
acacagctggcctttcagtcttaaa

SEQ ID NO: 4775806 - DNA, 25 bp, Homo sapien
attaaacacagctggcctttcagtc

SEQ ID NO: 4775807 - DNA, 25 bp, Homo sapien
taaacacagctggcctttcagtctt

SEQ ID NO: 4775808 - DNA, 25 bp, Homo sapien
cctggcctgggtacccctcgtggag

SEQ ID NO: 4775809 - DNA, 25 bp, Homo sapien
ttgacagcagcacaacaaagggtag

SEQ ID NO: 4775810 - DNA, 25 bp, Homo sapien
gctgtttgacagcagcacaacaaag

SEQ ID NO: 4775811 - DNA, 25 bp, Homo sapien
gacagcagcacaacaaagggtagta

SEQ ID NO: 4775812 - DNA, 25 bp, Homo sapien
agaagactctgagcccccgaactct

SEQ ID NO: 4775813 - DNA, 25 bp, Homo sapien
cagaccagctggtcttgcttctgga

SEQ ID NO: 4775814 - DNA, 25 bp, Homo sapien
tctggagcatctcttggagcagaag

SEQ ID NO: 4775815 - DNA, 25 bp, Homo sapien
tggcattttcataggctgtttggtt

SEQ ID NO: 4775816 - DNA, 25 bp, Homo sapien
ggaacactctcggagtttaaccagc

SEQ ID NO: 4775817 - DNA, 25 bp, Homo sapien
gaggtaaccaggaacactctcggag

SEQ ID NO: 4775818 - DNA, 25 bp, Homo sapien
tcggagtttaaccagcaggtcccca

SEQ ID NO: 4775819 - DNA, 25 bp, Homo sapien
aggatcaggatgcagaggtaaccag

SEQ ID NO: 4775820 - DNA, 25 bp, Homo sapien
ccatcttgtatgtagcaggcctcag

SEQ ID NO: 4775821 - DNA, 25 bp, Homo sapien
agcacggaaaatgagccgaagggaa

SEQ ID NO: 4775822 - DNA, 25 bp, Homo sapien
gagagtgaagctgacctcaaagtca

SEQ ID NO: 4775823 - DNA, 25 bp, Homo sapien
acaggctgcgctccttgatgctcct

SEQ ID NO: 4775824 - DNA, 25 bp, Homo sapien
acgaatccgaaaggcccatgctgca

SEQ ID NO: 4775825 - DNA, 25 bp, Homo sapien
tgttttgctggtggccacgaatccg

SEQ ID NO: 4775826 - DNA, 25 bp, Homo sapien
ggtggccacgaatccgaaaggccca

SEQ ID NO: 4775827 - DNA, 25 bp, Homo sapien
gactccactgagcgctttcagactg

SEQ ID NO: 4775828 - DNA, 25 bp, Homo sapien
gaaactccaggttgattggaaatgg

SEQ ID NO: 4775829 - DNA, 25 bp, Homo sapien
ggaaaaaacgaccagcgtcacaggc

SEQ ID NO: 4775830 - DNA, 25 bp, Homo sapien
catccggctgccttccaggatagaa

SEQ ID NO: 4775831 - DNA, 25 bp, Homo sapien
tgtttcagcactcatccggctgcct

SEQ ID NO: 4775832 - DNA, 25 bp, Homo sapien
gatggttgttacatctccagattct

SEQ ID NO: 4775833 - DNA, 25 bp, Homo sapien
taaaattgatccatagttgtggttc

SEQ ID NO: 4775834 - DNA, 25 bp, Homo sapien
ctgttcgttcctttcagtgctagaa

SEQ ID NO: 4775835 - DNA, 25 bp, Homo sapien
ggcaaagaatgaaggtttgatggtt

SEQ ID NO: 4775836 - DNA, 25 bp, Homo sapien
tacccttcgctgaaacagcctttct

SEQ ID NO: 4775837 - DNA, 25 bp, Homo sapien
gggcaccaggtagtttttctcgaga

SEQ ID NO: 4775838 - DNA, 25 bp, Homo sapien
ttttctcgagagtagactgtgtaga

SEQ ID NO: 4775839 - DNA, 25 bp, Homo sapien
gactgtgtagaatagtacccttcgc

SEQ ID NO: 4775840 - DNA, 25 bp, Homo sapien
gagagagtcagccatccctcagact

SEQ ID NO: 4775841 - DNA, 25 bp, Homo sapien
aggaggtaacgatggtcactgtttc

SEQ ID NO: 4775842 - DNA, 25 bp, Homo sapien
ggaggtcctccaggctgaattcacc

SEQ ID NO: 4775843 - DNA, 25 bp, Homo sapien
gcttattagaggaggtaacgatggt

SEQ ID NO: 4775844 - DNA, 25 bp, Homo sapien
tctccatgtgcatgtcgagtgtgat

SEQ ID NO: 4775845 - DNA, 25 bp, Homo sapien
catgatctccatgtgcatgtcgagt

SEQ ID NO: 4775846 - DNA, 25 bp, Homo sapien
atgtgcatgtcgagtgtgatggccc

SEQ ID NO: 4775847 - DNA, 25 bp, Homo sapien
gatctccatgtgcatgtcgagtgtg

SEQ ID NO: 4775848 - DNA, 25 bp, Homo sapien
tacattgctacaccctcatggaagg

SEQ ID NO: 4775849 - DNA, 25 bp, Homo sapien
cactcatgggaatcgtaagtcaaga

SEQ ID NO: 4775850 - DNA, 25 bp, Homo sapien
gggtctcacgtcgattttggcagga

SEQ ID NO: 4775851 - DNA, 25 bp, Homo sapien
tggacaccccacatctaggaagttg

SEQ ID NO: 4775852 - DNA, 25 bp, Homo sapien
ccttatcagggtacagaggaatgca

SEQ ID NO: 4775853 - DNA, 25 bp, Homo sapien
gctgatcagtctccatttgattggg

SEQ ID NO: 4775854 - DNA, 25 bp, Homo sapien
tcctagggagccaagcccttatcat

SEQ ID NO: 4775855 - DNA, 25 bp, Homo sapien
tggccacctgcacagtagggactga

SEQ ID NO: 4775856 - DNA, 25 bp, Homo sapien
ccttgagcaaaaagccttcgtgtct

SEQ ID NO: 4775857 - DNA, 25 bp, Homo sapien
tcgtgtctgtaagtgcccgaggctc

SEQ ID NO: 4775858 - DNA, 25 bp, Homo sapien
ggcggcagcacggtgccagtcatct

SEQ ID NO: 4775859 - DNA, 25 bp, Homo sapien
agcaggaacaggagtcgagcccttg

SEQ ID NO: 4775860 - DNA, 25 bp, Homo sapien
ggcagattctcgtaaacgcagcctc

SEQ ID NO: 4775861 - DNA, 25 bp, Homo sapien
tcaaaggagggattatgtggctgct

SEQ ID NO: 4775862 - DNA, 25 bp, Homo sapien
gaactgaccctggacatcaaaggag

SEQ ID NO: 4775863 - DNA, 25 bp, Homo sapien
tgtggctgctaaagccatcggccca

SEQ ID NO: 4775864 - DNA, 25 bp, Homo sapien
ctgtcacggatttgactgaggtcct

SEQ ID NO: 4775865 - DNA, 25 bp, Homo sapien
tcagaaccggacattgctgtcacgg

SEQ ID NO: 4775866 - DNA, 25 bp, Homo sapien
gaaccggacattgctgtcacggatt

SEQ ID NO: 4775867 - DNA, 25 bp, Homo sapien
gactgaggtcctgccaggagtcggc

SEQ ID NO: 4775868 - DNA, 25 bp, Homo sapien
atagcaccttcggagagcagggctg

SEQ ID NO: 4775869 - DNA, 25 bp, Homo sapien
cagccatagcaccttcggagagcag

SEQ ID NO: 4775870 - DNA, 25 bp, Homo sapien
ctgtctgcacgggacatagtagttt

SEQ ID NO: 4775871 - DNA, 25 bp, Homo sapien
atagtagttttggatgaagacgggc

SEQ ID NO: 4775872 - DNA, 25 bp, Homo sapien
ctggaagagcaggatgtgggtgtgc

SEQ ID NO: 4775873 - DNA, 25 bp, Homo sapien
tgtgctggggaacctgagttcccac

SEQ ID NO: 4775874 - DNA, 25 bp, Homo sapien
gaagagcaggatgtgggtgtgctgg

SEQ ID NO: 4775875 - DNA, 25 bp, Homo sapien
tgctggggaacctgagttcccactg

SEQ ID NO: 4775876 - DNA, 25 bp, Homo sapien
gcctccatgctaggcaaggtgacct

SEQ ID NO: 4775877 - DNA, 25 bp, Homo sapien
aaatactgaaataatagcctccatg

SEQ ID NO: 4775878 - DNA, 25 bp, Homo sapien
accaaaatactgaaataatagcctc

SEQ ID NO: 4775879 - DNA, 25 bp, Homo sapien
tagcctccatgctaggcaaggtgac

SEQ ID NO: 4775880 - DNA, 25 bp, Homo sapien
agggccgctttcaagggacagtttg

SEQ ID NO: 4775881 - DNA, 25 bp, Homo sapien
gtttcaagttctagaccaagcacgt

SEQ ID NO: 4775882 - DNA, 25 bp, Homo sapien
cagaactctgggtgcgcagggccca

SEQ ID NO: 4775883 - DNA, 25 bp, Homo sapien
agcacgtccttgttctatagatggg

SEQ ID NO: 4775884 - DNA, 25 bp, Homo sapien
ataggggcacggagacggtggccac

SEQ ID NO: 4775885 - DNA, 25 bp, Homo sapien
agacggtggccacccaagaggtttg

SEQ ID NO: 4775886 - DNA, 25 bp, Homo sapien
cagtcactgtataggggcacggaga

SEQ ID NO: 4775887 - DNA, 25 bp, Homo sapien
catgacagtcactgtataggggcac

SEQ ID NO: 4775888 - DNA, 25 bp, Homo sapien
cagcacccgcgggacagtgaccttg

SEQ ID NO: 4775889 - DNA, 25 bp, Homo sapien
taactagacggtgtgagaaaggccg

SEQ ID NO: 4775890 - DNA, 25 bp, Homo sapien
ggaaaccaccgtaaagccacagatg

SEQ ID NO: 4775891 - DNA, 25 bp, Homo sapien
cagttgtgactattcagtggcaggg

SEQ ID NO: 4775892 - DNA, 25 bp, Homo sapien
ggagactgatcacccgataggcatt

SEQ ID NO: 4775893 - DNA, 25 bp, Homo sapien
tggcagtcgctgagtggggcctggg

SEQ ID NO: 4775894 - DNA, 25 bp, Homo sapien
tgctcccagggggactgtccattct

SEQ ID NO: 4775895 - DNA, 25 bp, Homo sapien
ccagggggactgtccattctgagtc

SEQ ID NO: 4775896 - DNA, 25 bp, Homo sapien
tcccagggggactgtccattctgag

SEQ ID NO: 4775897 - DNA, 25 bp, Homo sapien
tctgagttgccccagtggttgttgg

SEQ ID NO: 4775898 - DNA, 25 bp, Homo sapien
tggttgttggctgtcgcatcctgca

SEQ ID NO: 4775899 - DNA, 25 bp, Homo sapien
tgcacacgcacaggcgccggcatat

SEQ ID NO: 4775900 - DNA, 25 bp, Homo sapien
gaaagccctagatgtgcgcactagt

SEQ ID NO: 4775901 - DNA, 25 bp, Homo sapien
cctccatactgtggcgtgctcagga

SEQ ID NO: 4775902 - DNA, 25 bp, Homo sapien
taagattgaccagtataaccatgtg

SEQ ID NO: 4775903 - DNA, 25 bp, Homo sapien
cctgttttagggagctcatatgaga

SEQ ID NO: 4775904 - DNA, 25 bp, Homo sapien
tctaaggctgaggaccatcctgcca

SEQ ID NO: 4775905 - DNA, 25 bp, Homo sapien
ttgcgttgggcatggaaagggttcc

SEQ ID NO: 4775906 - DNA, 25 bp, Homo sapien
gccaagggagatgcgtggggggtcc

SEQ ID NO: 4775907 - DNA, 25 bp, Homo sapien
cgttgggcatggaaagggttccctg

SEQ ID NO: 4775908 - DNA, 25 bp, Homo sapien
tcttgcttttgcgttgggcatggaa

SEQ ID NO: 4775909 - DNA, 25 bp, Homo sapien
tgcccaggctttgccgaaatcgaag

SEQ ID NO: 4775910 - DNA, 25 bp, Homo sapien
tagagtaaggtcagattccagaccc

SEQ ID NO: 4775911 - DNA, 25 bp, Homo sapien
cacctctgacgaagcatgtttgtta

SEQ ID NO: 4775912 - DNA, 25 bp, Homo sapien
caaggatcatgatggcacgaagcat

SEQ ID NO: 4775913 - DNA, 25 bp, Homo sapien
acgaagcatgttatatgaaggcaat

SEQ ID NO: 4775914 - DNA, 25 bp, Homo sapien
cacgaagcatgttatatgaaggcaa

SEQ ID NO: 4775915 - DNA, 25 bp, Homo sapien
gcacgaagcatgttatatgaaggca

SEQ ID NO: 4775916 - DNA, 25 bp, Homo sapien
tacctcaaaacggagccaagactca

SEQ ID NO: 4775917 - DNA, 25 bp, Homo sapien
ggcagctgccaccaaaatactttac

SEQ ID NO: 4775918 - DNA, 25 bp, Homo sapien
cttcagtggatctattagcattgcc

SEQ ID NO: 4775919 - DNA, 25 bp, Homo sapien
gaaaggaaaaagcaccctgtactga

SEQ ID NO: 4775920 - DNA, 25 bp, Homo sapien
gcagttagcatcatttagcaaatac

SEQ ID NO: 4775921 - DNA, 25 bp, Homo sapien
tggaaagagtgtgccggaggcccgg

SEQ ID NO: 4775922 - DNA, 25 bp, Homo sapien
aagggccttttggtagcagttagca

SEQ ID NO: 4775923 - DNA, 25 bp, Homo sapien
cccgggcttgggtgtgctgtctgct

SEQ ID NO: 4775924 - DNA, 25 bp, Homo sapien
cagatccctgactcctaaaaagagt

SEQ ID NO: 4775925 - DNA, 25 bp, Homo sapien
acagtgtggctttatcccagatccc

SEQ ID NO: 4775926 - DNA, 25 bp, Homo sapien
ccctgactccccttgaagaatttct

SEQ ID NO: 4775927 - DNA, 25 bp, Homo sapien
ccatacagcaagacagtgtggcttt

SEQ ID NO: 4775928 - DNA, 25 bp, Homo sapien
tactccacaaatgcgtggccacagg

SEQ ID NO: 4775929 - DNA, 25 bp, Homo sapien
tgtgcagcttgacttgggtaaaaac

SEQ ID NO: 4775930 - DNA, 25 bp, Homo sapien
ttatcaagctgacggtctggccggg

SEQ ID NO: 4775931 - DNA, 25 bp, Homo sapien
tagatactagcagattgtcccaaga

SEQ ID NO: 4775932 - DNA, 25 bp, Homo sapien
gccctggcgagcctgatccctcacg

SEQ ID NO: 4775933 - DNA, 25 bp, Homo sapien
gagcctgatccctcacgccgggcac

SEQ ID NO: 4775934 - DNA, 25 bp, Homo sapien
cgggcacccacacggcctgcgtgcc

SEQ ID NO: 4775935 - DNA, 25 bp, Homo sapien
tcacgccgggcacccacacggcctg

SEQ ID NO: 4775936 - DNA, 25 bp, Homo sapien
tctgatctagggctttcaatgccaa

SEQ ID NO: 4775937 - DNA, 25 bp, Homo sapien
caagacgattccatctgtacaaggt

SEQ ID NO: 4775938 - DNA, 25 bp, Homo sapien
ctagacttgagttcgcagctcttta

SEQ ID NO: 4775939 - DNA, 25 bp, Homo sapien
tctttaaggagctctcgggccagtt

SEQ ID NO: 4775940 - DNA, 25 bp, Homo sapien
ctggtcaagaaagccaatgatctcg

SEQ ID NO: 4775941 - DNA, 25 bp, Homo sapien
caagaaagccaatgatctcgtgagt

SEQ ID NO: 4775942 - DNA, 25 bp, Homo sapien
gagttatctcagcagtgtgagccat

SEQ ID NO: 4775943 - DNA, 25 bp, Homo sapien
ccaatgatctcgtgagttatctcag

SEQ ID NO: 4775944 - DNA, 25 bp, Homo sapien
gtgggccaagcagacccggctcttt

SEQ ID NO: 4775945 - DNA, 25 bp, Homo sapien
agcagacccggctctttccaaggtg

SEQ ID NO: 4775946 - DNA, 25 bp, Homo sapien
tgggccaagcagacccggctctttc

SEQ ID NO: 4775947 - DNA, 25 bp, Homo sapien
ccaagcagacccggctctttccaag

SEQ ID NO: 4775948 - DNA, 25 bp, Homo sapien
tttcaccacgatgggtgcccagatg

SEQ ID NO: 4775949 - DNA, 25 bp, Homo sapien
accacgatgggtgcccagatggcca

SEQ ID NO: 4775950 - DNA, 25 bp, Homo sapien
taaagatggtttcaaaacatccgaa

SEQ ID NO: 4775951 - DNA, 25 bp, Homo sapien
tcaaaacatccgaaaggacagcccc

SEQ ID NO: 4775952 - DNA, 25 bp, Homo sapien
tcccaggcgatcgtgtggcctccag

SEQ ID NO: 4775953 - DNA, 25 bp, Homo sapien
tgatgacatcccaggcgatcgtgtg

SEQ ID NO: 4775954 - DNA, 25 bp, Homo sapien
ctgctaccgtctgcaggtcctgggc

SEQ ID NO: 4775955 - DNA, 25 bp, Homo sapien
gaaggtgcctgatcagctgttgtgc

SEQ ID NO: 4775956 - DNA, 25 bp, Homo sapien
actcgatttcacacaaacccaaatg

SEQ ID NO: 4775957 - DNA, 25 bp, Homo sapien
taggcagcggccgaatttacactcg

SEQ ID NO: 4775958 - DNA, 25 bp, Homo sapien
ccaaatgggcggaatggaaatttct

SEQ ID NO: 4775959 - DNA, 25 bp, Homo sapien
gtcttgctcaccaagcagtcagggc

SEQ ID NO: 4775960 - DNA, 25 bp, Homo sapien
tgcttgctacaagaatggtacaccc

SEQ ID NO: 4775961 - DNA, 25 bp, Homo sapien
tgcacgcacgtgtacacaagcacgg

SEQ ID NO: 4775962 - DNA, 25 bp, Homo sapien
ccagtcgtgacttggaaaacaaagc

SEQ ID NO: 4775963 - DNA, 25 bp, Homo sapien
acacatttgttttagatgccggaac

SEQ ID NO: 4775964 - DNA, 25 bp, Homo sapien
tatggattttgtgtgaggcgttttt

SEQ ID NO: 4775965 - DNA, 25 bp, Homo sapien
aatacttaggcctattctgagaatt

SEQ ID NO: 4775966 - DNA, 25 bp, Homo sapien
cccatgaccgattttatggattttg

SEQ ID NO: 4775967 - DNA, 25 bp, Homo sapien
tctgagaattcccatgaccgatttt

SEQ ID NO: 4775968 - DNA, 25 bp, Homo sapien
catgttcttcacctcaaggacatcc

SEQ ID NO: 4775969 - DNA, 25 bp, Homo sapien
acagaggcagtgacgccaggcccag

SEQ ID NO: 4775970 - DNA, 25 bp, Homo sapien
gggacacgcttggtctttgcaccca

SEQ ID NO: 4775971 - DNA, 25 bp, Homo sapien
gatgcggggatacgccaccagctga

SEQ ID NO: 4775972 - DNA, 25 bp, Homo sapien
tctttttaatcagacagcaatcctc

SEQ ID NO: 4775973 - DNA, 25 bp, Homo sapien
ttaaaaaccatatgtgccccgtaca

SEQ ID NO: 4775974 - DNA, 25 bp, Homo sapien
tgaacacatatctaccaacttagct

SEQ ID NO: 4775975 - DNA, 25 bp, Homo sapien
gattctctgtcagtaaccttttgac

SEQ ID NO: 4775976 - DNA, 25 bp, Homo sapien
ggaggtgccaatgcctttaatcaaa

SEQ ID NO: 4775977 - DNA, 25 bp, Homo sapien
ggagaacgcctctgaccacaaggct

SEQ ID NO: 4775978 - DNA, 25 bp, Homo sapien
tgcaggttgccatgacatatgccat

SEQ ID NO: 4775979 - DNA, 25 bp, Homo sapien
ccacaaggctggagatcaccatgcc

SEQ ID NO: 4775980 - DNA, 25 bp, Homo sapien
tcggctgccgacatcagtaattgct

SEQ ID NO: 4775981 - DNA, 25 bp, Homo sapien
gcccatcctccgaagtgaatgaaca

SEQ ID NO: 4775982 - DNA, 25 bp, Homo sapien
gggccgtagtagaaggccaagagcc

SEQ ID NO: 4775983 - DNA, 25 bp, Homo sapien
accagctctcaaagggacctccgca

SEQ ID NO: 4775984 - DNA, 25 bp, Homo sapien
cacaggacccaaacaagtgcccttt

SEQ ID NO: 4775985 - DNA, 25 bp, Homo sapien
gcgcatgcctattcatcctgacctg

SEQ ID NO: 4775986 - DNA, 25 bp, Homo sapien
cctagagaggtagagggaagaccac

SEQ ID NO: 4775987 - DNA, 25 bp, Homo sapien
aacatttcgatacaggtattggcac

SEQ ID NO: 4775988 - DNA, 25 bp, Homo sapien
tcaactgcttctctgagcagttcag

SEQ ID NO: 4775989 - DNA, 25 bp, Homo sapien
tggagccagtgtccccgagggatat

SEQ ID NO: 4775990 - DNA, 25 bp, Homo sapien
aactgcttctctgagcagttcagaa

SEQ ID NO: 4775991 - DNA, 25 bp, Homo sapien
caactgcttctctgagcagttcaga

SEQ ID NO: 4775992 - DNA, 25 bp, Homo sapien
aattaggaatagactgcctgactgc

SEQ ID NO: 4775993 - DNA, 25 bp, Homo sapien
gctataatcgaacacacaaggaagg

SEQ ID NO: 4775994 - DNA, 25 bp, Homo sapien
ggcccttggtgcacagccttttgaa

SEQ ID NO: 4775995 - DNA, 25 bp, Homo sapien
tacagctgagcagcacgtatctgca

SEQ ID NO: 4775996 - DNA, 25 bp, Homo sapien
cttgagggtcttgcagcagcaccat

SEQ ID NO: 4775997 - DNA, 25 bp, Homo sapien
aaagtaggtcttgagtgcaaaccgc

SEQ ID NO: 4775998 - DNA, 25 bp, Homo sapien
tggagaagtgtaaggaaagtaggtc

SEQ ID NO: 4775999 - DNA, 25 bp, Homo sapien
ggaaagtaggtcttgagtgcaaacc

SEQ ID NO: 4776000 - DNA, 25 bp, Homo sapien
gatggagaagtgtaaggaaagtagg

SEQ ID NO: 4776001 - DNA, 25 bp, Homo sapien
acaggatggaaaatccaaagagcat

SEQ ID NO: 4776002 - DNA, 25 bp, Homo sapien
tgccacaggatggaaaatccaaaga

SEQ ID NO: 4776003 - DNA, 25 bp, Homo sapien
ctgccacaggatggaaaatccaaag

SEQ ID NO: 4776004 - DNA, 25 bp, Homo sapien
ccacaggatggaaaatccaaagagc

SEQ ID NO: 4776005 - DNA, 25 bp, Homo sapien
acattatcctatgctctctctaggg

SEQ ID NO: 4776006 - DNA, 25 bp, Homo sapien
tcagttggccacatatgtatgggtc

SEQ ID NO: 4776007 - DNA, 25 bp, Homo sapien
gggtctatatctggactcaattctg

SEQ ID NO: 4776008 - DNA, 25 bp, Homo sapien
gaaatcttagatcacctcagtgtca

SEQ ID NO: 4776009 - DNA, 25 bp, Homo sapien
aattcaaaccagaggttacctggag

SEQ ID NO: 4776010 - DNA, 25 bp, Homo sapien
gaggagcacgtggatagacatatat

SEQ ID NO: 4776011 - DNA, 25 bp, Homo sapien
cgtggatagacatatattcagatta

SEQ ID NO: 4776012 - DNA, 25 bp, Homo sapien
caaaccagaggttacctggagggag

SEQ ID NO: 4776013 - DNA, 25 bp, Homo sapien
tgggaccatggatagcgcagcttgc

SEQ ID NO: 4776014 - DNA, 25 bp, Homo sapien
tccaatttagacctgcggatgctgc

SEQ ID NO: 4776015 - DNA, 25 bp, Homo sapien
caaaataaccgtgagggccagctgt

SEQ ID NO: 4776016 - DNA, 25 bp, Homo sapien
cagtccgtgcctccaatatgatgaa

SEQ ID NO: 4776017 - DNA, 25 bp, Homo sapien
tccagagcttctacaaagcactgcg

SEQ ID NO: 4776018 - DNA, 25 bp, Homo sapien
actgcgtaaacacctgaatagtggc

SEQ ID NO: 4776019 - DNA, 25 bp, Homo sapien
cccatcggtttccaggagtgcacac

SEQ ID NO: 4776020 - DNA, 25 bp, Homo sapien
gaatagtggctatgatttccagggc

SEQ ID NO: 4776021 - DNA, 25 bp, Homo sapien
acatctcatcaacaacccggaatat

SEQ ID NO: 4776022 - DNA, 25 bp, Homo sapien
atcaacaacccggaatatggcaggg

SEQ ID NO: 4776023 - DNA, 25 bp, Homo sapien
tcaacaacccggaatatggcagggt

SEQ ID NO: 4776024 - DNA, 25 bp, Homo sapien
tctcatcaacaacccggaatatggc

SEQ ID NO: 4776025 - DNA, 25 bp, Homo sapien
aagtgcatacggtggtctccctggg

SEQ ID NO: 4776026 - DNA, 25 bp, Homo sapien
caggcagcttattcctctgtatact

SEQ ID NO: 4776027 - DNA, 25 bp, Homo sapien
tctgtatactcctgtatgtcccaca

SEQ ID NO: 4776028 - DNA, 25 bp, Homo sapien
agctcaggcgatccataatacagaa

SEQ ID NO: 4776029 - DNA, 25 bp, Homo sapien
cacgctgcaagccagggctctgaag

SEQ ID NO: 4776030 - DNA, 25 bp, Homo sapien
gcaagccagggctctgaagccccat

SEQ ID NO: 4776031 - DNA, 25 bp, Homo sapien
cagaggtcacgctgcaagccagggc

SEQ ID NO: 4776032 - DNA, 25 bp, Homo sapien
aggtcacgctgcaagccagggctct

SEQ ID NO: 4776033 - DNA, 25 bp, Homo sapien
tgcaccacattaaagagctcaaaag

SEQ ID NO: 4776034 - DNA, 25 bp, Homo sapien
gagctcaaaaggaagtgccgaaaag

SEQ ID NO: 4776035 - DNA, 25 bp, Homo sapien
ttcaattacatgcaccacattaaag

SEQ ID NO: 4776036 - DNA, 25 bp, Homo sapien
acttcagctcttgttcaattacatg

SEQ ID NO: 4776037 - DNA, 25 bp, Homo sapien
gatacttctgtacagtcctgtcact

SEQ ID NO: 4776038 - DNA, 25 bp, Homo sapien
gaatccaactctaatgtaataggca

SEQ ID NO: 4776039 - DNA, 25 bp, Homo sapien
cacagcgcagcagtctcgtgctatc

SEQ ID NO: 4776040 - DNA, 25 bp, Homo sapien
gtaataggcatcaggtttcctctgg

SEQ ID NO: 4776041 - DNA, 25 bp, Homo sapien
cagatgatgcaattaggaagcaggc

SEQ ID NO: 4776042 - DNA, 25 bp, Homo sapien
agatgatgcaattaggaagcaggct

SEQ ID NO: 4776043 - DNA, 25 bp, Homo sapien
tcagatgatgcaattaggaagcagg

SEQ ID NO: 4776044 - DNA, 25 bp, Homo sapien
cacaggcctattgcggcctgcctgg

SEQ ID NO: 4776045 - DNA, 25 bp, Homo sapien
tgcaatcacttagccacgtcacagg

SEQ ID NO: 4776046 - DNA, 25 bp, Homo sapien
ccatcgtctgtattgtaattacgtc

SEQ ID NO: 4776047 - DNA, 25 bp, Homo sapien
gaacagcccacaccaatcaggggct

SEQ ID NO: 4776048 - DNA, 25 bp, Homo sapien
gaagaagtggaaggcaatctctgtg

SEQ ID NO: 4776049 - DNA, 25 bp, Homo sapien
gaagtggaaggcaatctctgtgcca

SEQ ID NO: 4776050 - DNA, 25 bp, Homo sapien
agtggaaggcaatctctgtgccaca

SEQ ID NO: 4776051 - DNA, 25 bp, Homo sapien
ggaaggcaatctctgtgccacatcc

SEQ ID NO: 4776052 - DNA, 25 bp, Homo sapien
tgactggcgagtcagtggtggcgag

SEQ ID NO: 4776053 - DNA, 25 bp, Homo sapien
tgcctcccacaaaggaatatgactg

SEQ ID NO: 4776054 - DNA, 25 bp, Homo sapien
gggccaggaggtggatgtccacgtg

SEQ ID NO: 4776055 - DNA, 25 bp, Homo sapien
aaaggaatatgactggcgagtcagt

SEQ ID NO: 4776056 - DNA, 25 bp, Homo sapien
tagctggttctgctgctttaaccat

SEQ ID NO: 4776057 - DNA, 25 bp, Homo sapien
gtcttagctggttctgctgctttaa

SEQ ID NO: 4776058 - DNA, 25 bp, Homo sapien
agaagtcttagctggttctgctgct

SEQ ID NO: 4776059 - DNA, 25 bp, Homo sapien
tcttagctggttctgctgctttaac

SEQ ID NO: 4776060 - DNA, 25 bp, Homo sapien
ctctcactggagattagcttttcaa

SEQ ID NO: 4776061 - DNA, 25 bp, Homo sapien
ttcaaaaagatgcagcattgctttt

SEQ ID NO: 4776062 - DNA, 25 bp, Homo sapien
taaagcattcgatccttctcagaca

SEQ ID NO: 4776063 - DNA, 25 bp, Homo sapien
ttctcagacaatttctctcactgga

SEQ ID NO: 4776064 - DNA, 25 bp, Homo sapien
aggcagactacagctgacatgggga

SEQ ID NO: 4776065 - DNA, 25 bp, Homo sapien
agactacagctgacatggggagaga

SEQ ID NO: 4776066 - DNA, 25 bp, Homo sapien
gcagactacagctgacatggggaga

SEQ ID NO: 4776067 - DNA, 25 bp, Homo sapien
gaggcagactacagctgacatgggg

SEQ ID NO: 4776068 - DNA, 25 bp, Homo sapien
tgaagcccagcaactgggtccaggg

SEQ ID NO: 4776069 - DNA, 25 bp, Homo sapien
gagagcagttcctagaggtttcact

SEQ ID NO: 4776070 - DNA, 25 bp, Homo sapien
tggtgtgaagcccagcaactgggtc

SEQ ID NO: 4776071 - DNA, 25 bp, Homo sapien
tgcagaccttgtccagggttgaccg

SEQ ID NO: 4776072 - DNA, 25 bp, Homo sapien
ctgagcttcaatttgtccaggaccc

SEQ ID NO: 4776073 - DNA, 25 bp, Homo sapien
ttcaatttgtccaggacccaccggc

SEQ ID NO: 4776074 - DNA, 25 bp, Homo sapien
gagcttcaatttgtccaggacccac

SEQ ID NO: 4776075 - DNA, 25 bp, Homo sapien
aatttgtccaggacccaccggcagg

SEQ ID NO: 4776076 - DNA, 25 bp, Homo sapien
catcttgatatgcttgcttaacaga

SEQ ID NO: 4776077 - DNA, 25 bp, Homo sapien
tcgccgaagcagtatcatcttgata

SEQ ID NO: 4776078 - DNA, 25 bp, Homo sapien
ccctgaatgaaggaatcgccgaagc

SEQ ID NO: 4776079 - DNA, 25 bp, Homo sapien
gcttaacagaatttggccgagccaa

SEQ ID NO: 4776080 - DNA, 25 bp, Homo sapien
tattttgaaaaatcgccgtggagag

SEQ ID NO: 4776081 - DNA, 25 bp, Homo sapien
aatcgccgtggagagtaaaaatgcc

SEQ ID NO: 4776082 - DNA, 25 bp, Homo sapien
aaatgccagttggtgtgatcagtgg

SEQ ID NO: 4776083 - DNA, 25 bp, Homo sapien
aagcgtgtgctccattgcgggtgtt

SEQ ID NO: 4776084 - DNA, 25 bp, Homo sapien
tgtaaggaaagaatcgagcgccgcg

SEQ ID NO: 4776085 - DNA, 25 bp, Homo sapien
cataacgctcggactcctcagaaag

SEQ ID NO: 4776086 - DNA, 25 bp, Homo sapien
gccgcacgttcacaacgccctttac

SEQ ID NO: 4776087 - DNA, 25 bp, Homo sapien
tactcagtatctcacataaggacca

SEQ ID NO: 4776088 - DNA, 25 bp, Homo sapien
cttaacatcatgaaaacgccagctc

SEQ ID NO: 4776089 - DNA, 25 bp, Homo sapien
gatcacaaaagcttaacaaatggta

SEQ ID NO: 4776090 - DNA, 25 bp, Homo sapien
cgccagctctctcgataatctatat

SEQ ID NO: 4776091 - DNA, 25 bp, Homo sapien
tgtgttcttgaacaggcggacagac

SEQ ID NO: 4776092 - DNA, 25 bp, Homo sapien
tgtggaatataagacaagcaatgat

SEQ ID NO: 4776093 - DNA, 25 bp, Homo sapien
tttatgtggaatataagacaagcaa

SEQ ID NO: 4776094 - DNA, 25 bp, Homo sapien
tatgtggaatataagacaagcaatg

SEQ ID NO: 4776095 - DNA, 25 bp, Homo sapien
agtttatgtggaatataagacaagc

SEQ ID NO: 4776096 - DNA, 25 bp, Homo sapien
gatttcctgaggttcacgtccatga

SEQ ID NO: 4776097 - DNA, 25 bp, Homo sapien
tccatgacagatgaggagagcctcc

SEQ ID NO: 4776098 - DNA, 25 bp, Homo sapien
gacacaaactcgtgacagggacgcc

SEQ ID NO: 4776099 - DNA, 25 bp, Homo sapien
cgtttacagcctcaaagaactctgg

SEQ ID NO: 4776100 - DNA, 25 bp, Homo sapien
actccacaacaagccccagggtgtg

SEQ ID NO: 4776101 - DNA, 25 bp, Homo sapien
ttgccccccactccacaacaagccc

SEQ ID NO: 4776102 - DNA, 25 bp, Homo sapien
ccactccacaacaagccccagggtg

SEQ ID NO: 4776103 - DNA, 25 bp, Homo sapien
ccccactccacaacaagccccaggg

SEQ ID NO: 4776104 - DNA, 25 bp, Homo sapien
gttcagacgctaatgataaaaccat

SEQ ID NO: 4776105 - DNA, 25 bp, Homo sapien
ttgagtgttaaatccattaagatga

SEQ ID NO: 4776106 - DNA, 25 bp, Homo sapien
tgagttcagacgctaatgataaaac

SEQ ID NO: 4776107 - DNA, 25 bp, Homo sapien
ctctgagttcagacgctaatgataa

SEQ ID NO: 4776108 - DNA, 25 bp, Homo sapien
cccaagaccttgagtgaaaagagca

SEQ ID NO: 4776109 - DNA, 25 bp, Homo sapien
ttttaagcaaaccaggatagtaatc

SEQ ID NO: 4776110 - DNA, 25 bp, Homo sapien
agagcaacttctttatcaaatctga

SEQ ID NO: 4776111 - DNA, 25 bp, Homo sapien
tataggtgcatacccaagaccttga

SEQ ID NO: 4776112 - DNA, 25 bp, Homo sapien
ctgaaagtatatgagataatacacc

SEQ ID NO: 4776113 - DNA, 25 bp, Homo sapien
gggtaacgtgccgatgtcatacaag

SEQ ID NO: 4776114 - DNA, 25 bp, Homo sapien
ggtaacgtgccgatgtcatacaagg

SEQ ID NO: 4776115 - DNA, 25 bp, Homo sapien
gtaacgtgccgatgtcatacaaggt

SEQ ID NO: 4776116 - DNA, 25 bp, Homo sapien
tgggtaacgtgccgatgtcatacaa

SEQ ID NO: 4776117 - DNA, 25 bp, Homo sapien
caagcacgtggcacacataccagtg

SEQ ID NO: 4776118 - DNA, 25 bp, Homo sapien
tcataaagtatctcacacatccaaa

SEQ ID NO: 4776119 - DNA, 25 bp, Homo sapien
tatcacggtggtcatttcaatttca

SEQ ID NO: 4776120 - DNA, 25 bp, Homo sapien
gatgacagtctaatccagggtggag

SEQ ID NO: 4776121 - DNA, 25 bp, Homo sapien
agctgcgcttactgctggactccac

SEQ ID NO: 4776122 - DNA, 25 bp, Homo sapien
ggactccactgaacttgcgaaggcg

SEQ ID NO: 4776123 - DNA, 25 bp, Homo sapien
agcacttggtgctcttagcaagcca

SEQ ID NO: 4776124 - DNA, 25 bp, Homo sapien
agccaggatggagcctgaatcccca

SEQ ID NO: 4776125 - DNA, 25 bp, Homo sapien
aaatggacttgtacccaaagaggca

SEQ ID NO: 4776126 - DNA, 25 bp, Homo sapien
tcaagcattcaagctccaggcaaga

SEQ ID NO: 4776127 - DNA, 25 bp, Homo sapien
gatccaggttcagaatggccgcctt

SEQ ID NO: 4776128 - DNA, 25 bp, Homo sapien
tgtgccagaatagcccctcagaact

SEQ ID NO: 4776129 - DNA, 25 bp, Homo sapien
caaccaggctgactggcgccctgtg

SEQ ID NO: 4776130 - DNA, 25 bp, Homo sapien
cactccttaggaggcttggcccatg

SEQ ID NO: 4776131 - DNA, 25 bp, Homo sapien
ccctctgtgctaaggaacacgacct

SEQ ID NO: 4776132 - DNA, 25 bp, Homo sapien
caggaagagacgcaggatccagctt

SEQ ID NO: 4776133 - DNA, 25 bp, Homo sapien
cagccggtattctattcttaagagg

SEQ ID NO: 4776134 - DNA, 25 bp, Homo sapien
tgggtgtactgatttgtcaaaaagg

SEQ ID NO: 4776135 - DNA, 25 bp, Homo sapien
gattatacatgtcaatgcacataca

SEQ ID NO: 4776136 - DNA, 25 bp, Homo sapien
tgagctgaagtatagatgaagcaga

SEQ ID NO: 4776137 - DNA, 25 bp, Homo sapien
taaagcagagggaaatccactgccc

SEQ ID NO: 4776138 - DNA, 25 bp, Homo sapien
cattcgcaggcaggttaggaaagct

SEQ ID NO: 4776139 - DNA, 25 bp, Homo sapien
ggctaggagagccaaactgtggtca

SEQ ID NO: 4776140 - DNA, 25 bp, Homo sapien
tattctcaaactaagacagagcacg

SEQ ID NO: 4776141 - DNA, 25 bp, Homo sapien
agcttgctgagtgctggaatgactc

SEQ ID NO: 4776142 - DNA, 25 bp, Homo sapien
ctggggtacttccagagacaatggc

SEQ ID NO: 4776143 - DNA, 25 bp, Homo sapien
tgagtgctggaatgactcttggtga

SEQ ID NO: 4776144 - DNA, 25 bp, Homo sapien
tgctgagtgctggaatgactcttgg

SEQ ID NO: 4776145 - DNA, 25 bp, Homo sapien
taacggtgagcctgctctcctctgt

SEQ ID NO: 4776146 - DNA, 25 bp, Homo sapien
cttgcagtgtaacggtgagcctgct

SEQ ID NO: 4776147 - DNA, 25 bp, Homo sapien
cctctgtccaccgttagcatgcagg

SEQ ID NO: 4776148 - DNA, 25 bp, Homo sapien
atgcaggcgctccacggcaggcact

SEQ ID NO: 4776149 - DNA, 25 bp, Homo sapien
gcaatataaaggagacttgtgtggc

SEQ ID NO: 4776150 - DNA, 25 bp, Homo sapien
ttggcaatataaaggagacttgtgt

SEQ ID NO: 4776151 - DNA, 25 bp, Homo sapien
gatattggcaatataaaggagactt

SEQ ID NO: 4776152 - DNA, 25 bp, Homo sapien
tcttgtctttgggataaagatagat

SEQ ID NO: 4776153 - DNA, 25 bp, Homo sapien
ggatgtcatgtacagagacctcaat

SEQ ID NO: 4776154 - DNA, 25 bp, Homo sapien
ccggagggcctaagtcagcgtttct

SEQ ID NO: 4776155 - DNA, 25 bp, Homo sapien
aggagccaagactgaaaaccggagg

SEQ ID NO: 4776156 - DNA, 25 bp, Homo sapien
tctaggtctgccacaaatgtatgca

SEQ ID NO: 4776157 - DNA, 25 bp, Homo sapien
gactatagctcaaatgctgtgtgtc

SEQ ID NO: 4776158 - DNA, 25 bp, Homo sapien
ccacagacctgactatagctcaaat

SEQ ID NO: 4776159 - DNA, 25 bp, Homo sapien
tagctcaaatgctgtgtgtctttat

SEQ ID NO: 4776160 - DNA, 25 bp, Homo sapien
cctgactatagctcaaatgctgtgt

SEQ ID NO: 4776161 - DNA, 25 bp, Homo sapien
tcacatggcagtccgaaacacgtca

SEQ ID NO: 4776162 - DNA, 25 bp, Homo sapien
tgcccctagggagaagacacaagaa

SEQ ID NO: 4776163 - DNA, 25 bp, Homo sapien
tgcttggtcccataaagaaggtcag

SEQ ID NO: 4776164 - DNA, 25 bp, Homo sapien
cacagcgcgtgggttaatgcagcct

SEQ ID NO: 4776165 - DNA, 25 bp, Homo sapien
ggtccaaccataacaaagtctgcag

SEQ ID NO: 4776166 - DNA, 25 bp, Homo sapien
tgctgtgtaaaaccttggcccttgt

SEQ ID NO: 4776167 - DNA, 25 bp, Homo sapien
gatttctgaccacaacccttgaagg

SEQ ID NO: 4776168 - DNA, 25 bp, Homo sapien
tacatagcctattccgtgagcagga

SEQ ID NO: 4776169 - DNA, 25 bp, Homo sapien
caaaaatagtagtcaagtaggcatc

SEQ ID NO: 4776170 - DNA, 25 bp, Homo sapien
caagcctggacatgttctgaactga

SEQ ID NO: 4776171 - DNA, 25 bp, Homo sapien
ttctgagtgggtggaacaacacagc

SEQ ID NO: 4776172 - DNA, 25 bp, Homo sapien
gtaggcatcagtggccaaattccag

SEQ ID NO: 4776173 - DNA, 25 bp, Homo sapien
gaaactgccccagtagaggtggaga

SEQ ID NO: 4776174 - DNA, 25 bp, Homo sapien
gggaaactgccccagtagaggtgga

SEQ ID NO: 4776175 - DNA, 25 bp, Homo sapien
ctcttcactcatgtgaccggagact

SEQ ID NO: 4776176 - DNA, 25 bp, Homo sapien
tcactcatgtgaccggagactaaaa

SEQ ID NO: 4776177 - DNA, 25 bp, Homo sapien
aaaagtcacccatattatctcctac

SEQ ID NO: 4776178 - DNA, 25 bp, Homo sapien
aaaagacatattcatataaagaact

SEQ ID NO: 4776179 - DNA, 25 bp, Homo sapien
aggatactatcaagagaattaaaag

SEQ ID NO: 4776180 - DNA, 25 bp, Homo sapien
tatgccattgcaaaggatactatca

SEQ ID NO: 4776181 - DNA, 25 bp, Homo sapien
gatatctcttacagttcggatacag

SEQ ID NO: 4776182 - DNA, 25 bp, Homo sapien
cagatcactgcttctgcagtaataa

SEQ ID NO: 4776183 - DNA, 25 bp, Homo sapien
gacaaagatatctcttacagttcgg

SEQ ID NO: 4776184 - DNA, 25 bp, Homo sapien
tacagttcggatacagatcactgct

SEQ ID NO: 4776185 - DNA, 25 bp, Homo sapien
ctttggaatggcttgttacttaaca

SEQ ID NO: 4776186 - DNA, 25 bp, Homo sapien
agcagcaggtgtcacattagataaa

SEQ ID NO: 4776187 - DNA, 25 bp, Homo sapien
tattaaagatttaaaccagccatat

SEQ ID NO: 4776188 - DNA, 25 bp, Homo sapien
ccaaaaactatacgctacctatgaa

SEQ ID NO: 4776189 - DNA, 25 bp, Homo sapien
tcatctcttaggagattgataaaaa

SEQ ID NO: 4776190 - DNA, 25 bp, Homo sapien
cttaggagattgataaaaatagaca

SEQ ID NO: 4776191 - DNA, 25 bp, Homo sapien
aatcagaagactatagggacctgaa

SEQ ID NO: 4776192 - DNA, 25 bp, Homo sapien
caacactattattggtagacaattc

SEQ ID NO: 4776193 - DNA, 25 bp, Homo sapien
aggacaccaaaaggcagtgaggaag

SEQ ID NO: 4776194 - DNA, 25 bp, Homo sapien
ggaacacggcagacaggagtgaggg

SEQ ID NO: 4776195 - DNA, 25 bp, Homo sapien
aacacggcagacaggagtgagggta

SEQ ID NO: 4776196 - DNA, 25 bp, Homo sapien
gacaccaaaaggcagtgaggaaggc

SEQ ID NO: 4776197 - DNA, 25 bp, Homo sapien
tatagtttcagtcagaaggccagca

SEQ ID NO: 4776198 - DNA, 25 bp, Homo sapien
accattacagtagccagcaagtcag

SEQ ID NO: 4776199 - DNA, 25 bp, Homo sapien
tgcccagataaccaggagagtcacc

SEQ ID NO: 4776200 - DNA, 25 bp, Homo sapien
tattataaggaatcagctaacacca

SEQ ID NO: 4776201 - DNA, 25 bp, Homo sapien
ccagctatgcctaagtgtatcgaca

SEQ ID NO: 4776202 - DNA, 25 bp, Homo sapien
cctgacaatgggatattcacctgct

SEQ ID NO: 4776203 - DNA, 25 bp, Homo sapien
agcactctctgggagcggaccttac

SEQ ID NO: 4776204 - DNA, 25 bp, Homo sapien
gacagcactgctgtatggcattaga

SEQ ID NO: 4776205 - DNA, 25 bp, Homo sapien
tagacaacataagcaccatattaga

SEQ ID NO: 4776206 - DNA, 25 bp, Homo sapien
ctgtatccaggagttaagttttgat

SEQ ID NO: 4776207 - DNA, 25 bp, Homo sapien
taattagacaacataagcaccatat

SEQ ID NO: 4776208 - DNA, 25 bp, Homo sapien
taagttttgattgtccagaattctg

SEQ ID NO: 4776209 - DNA, 25 bp, Homo sapien
agtaataggacctggctaccaccat

SEQ ID NO: 4776210 - DNA, 25 bp, Homo sapien
gaaaggaatcctgacacaaagtgcc

SEQ ID NO: 4776211 - DNA, 25 bp, Homo sapien
acctggctaccaccatgaggtatag

SEQ ID NO: 4776212 - DNA, 25 bp, Homo sapien
gaatgagtgtgaaaggaatcctgac

SEQ ID NO: 4776213 - DNA, 25 bp, Homo sapien
taaaaggattccaacaagcttttgc

SEQ ID NO: 4776214 - DNA, 25 bp, Homo sapien
acaagcttttgccaacagttgacca

SEQ ID NO: 4776215 - DNA, 25 bp, Homo sapien
ttgccaacagttgaccaattgtggg

SEQ ID NO: 4776216 - DNA, 25 bp, Homo sapien
gggaatctttcaatgactgtattag

SEQ ID NO: 4776217 - DNA, 25 bp, Homo sapien
tgcatccaaaactgataatcacaag

SEQ ID NO: 4776218 - DNA, 25 bp, Homo sapien
actgagccacgtgaagacaggtgtc

SEQ ID NO: 4776219 - DNA, 25 bp, Homo sapien
gaagcctgatcccatacagaaagct

SEQ ID NO: 4776220 - DNA, 25 bp, Homo sapien
tcttccttaggaactcctggaactg

SEQ ID NO: 4776221 - DNA, 25 bp, Homo sapien
gaaggaaatggtcggcacacattaa

SEQ ID NO: 4776222 - DNA, 25 bp, Homo sapien
aaaaggtgatgtcccttcacagcag

SEQ ID NO: 4776223 - DNA, 25 bp, Homo sapien
aaagcgaaaaggtgatgtcccttca

SEQ ID NO: 4776224 - DNA, 25 bp, Homo sapien
gcgaaaaggtgatgtcccttcacag

SEQ ID NO: 4776225 - DNA, 25 bp, Homo sapien
ttctctgttgagtcagtggcgttcc

SEQ ID NO: 4776226 - DNA, 25 bp, Homo sapien
agaaaagttccactaggaggagctg

SEQ ID NO: 4776227 - DNA, 25 bp, Homo sapien
taagaaaagttccactaggaggagc

SEQ ID NO: 4776228 - DNA, 25 bp, Homo sapien
agtcagtggcgttccacctctgaga

SEQ ID NO: 4776229 - DNA, 25 bp, Homo sapien
catgaactcgatggctttcacctgt

SEQ ID NO: 4776230 - DNA, 25 bp, Homo sapien
tactactagctgctgcatgaactcg

SEQ ID NO: 4776231 - DNA, 25 bp, Homo sapien
tagctgctgcatgaactcgatggct

SEQ ID NO: 4776232 - DNA, 25 bp, Homo sapien
ctaagttactactagctgctgcatg

SEQ ID NO: 4776233 - DNA, 25 bp, Homo sapien
tacgtaggtgtaaggaaagatgatt

SEQ ID NO: 4776234 - DNA, 25 bp, Homo sapien
ggagagctgattgcttctgctgtgc

SEQ ID NO: 4776235 - DNA, 25 bp, Homo sapien
caaagctggagatcagatgatccat

SEQ ID NO: 4776236 - DNA, 25 bp, Homo sapien
caaactcgttgaaagatgattacaa

SEQ ID NO: 4776237 - DNA, 25 bp, Homo sapien
caccttccaaagtatggctccttcc

SEQ ID NO: 4776238 - DNA, 25 bp, Homo sapien
ccaccttccaaagtatggctccttc

SEQ ID NO: 4776239 - DNA, 25 bp, Homo sapien
tgttttgtgggagttatcagctaga

SEQ ID NO: 4776240 - DNA, 25 bp, Homo sapien
tatcagctagaaatcggtgatcagc

SEQ ID NO: 4776241 - DNA, 25 bp, Homo sapien
gaagaaccttacagagaccatccat

SEQ ID NO: 4776242 - DNA, 25 bp, Homo sapien
actcttcactgtccggcaaaggtgt

SEQ ID NO: 4776243 - DNA, 25 bp, Homo sapien
tcctgcaattctctgtcctacaaac

SEQ ID NO: 4776244 - DNA, 25 bp, Homo sapien
cacagcaaaccagagcagcacggct

SEQ ID NO: 4776245 - DNA, 25 bp, Homo sapien
gcagcacggctcagatatgaaggcc

SEQ ID NO: 4776246 - DNA, 25 bp, Homo sapien
agagcagcacggctcagatatgaag

SEQ ID NO: 4776247 - DNA, 25 bp, Homo sapien
cactcttacggcctatgattggaaa

SEQ ID NO: 4776248 - DNA, 25 bp, Homo sapien
gattggaaattcctagctaacggct

SEQ ID NO: 4776249 - DNA, 25 bp, Homo sapien
gctaacggcttcaagcaaaagcagc

SEQ ID NO: 4776250 - DNA, 25 bp, Homo sapien
tctgttactcctaaaactggctgca

SEQ ID NO: 4776251 - DNA, 25 bp, Homo sapien
ctgaggtggcatgattcctggagcc

SEQ ID NO: 4776252 - DNA, 25 bp, Homo sapien
tggctgaggtggcatgattcctgga

SEQ ID NO: 4776253 - DNA, 25 bp, Homo sapien
gctgaggtggcatgattcctggagc

SEQ ID NO: 4776254 - DNA, 25 bp, Homo sapien
gcctgcgctcaatgaacaaaaagaa

SEQ ID NO: 4776255 - DNA, 25 bp, Homo sapien
tgcctgcgctcaatgaacaaaaaga

SEQ ID NO: 4776256 - DNA, 25 bp, Homo sapien
tcctcctcccgctctcgccgctgac

SEQ ID NO: 4776257 - DNA, 25 bp, Homo sapien
ctcctcccgctctcgccgctgacgt

SEQ ID NO: 4776258 - DNA, 25 bp, Homo sapien
ctcctcctcccgctctcgccgctga

SEQ ID NO: 4776259 - DNA, 25 bp, Homo sapien
tcctcccgctctcgccgctgacgtg

SEQ ID NO: 4776260 - DNA, 25 bp, Homo sapien
cagtgttcccggtttcgcgcggaag

SEQ ID NO: 4776261 - DNA, 25 bp, Homo sapien
gagtcggtactgctccagtgttccc

SEQ ID NO: 4776262 - DNA, 25 bp, Homo sapien
aattccgacgaatctcgggtccgtg

SEQ ID NO: 4776263 - DNA, 25 bp, Homo sapien
cgcacacgtgtcagcagtgcattct

SEQ ID NO: 4776264 - DNA, 25 bp, Homo sapien
agccctgactaagaacctggaggtg

SEQ ID NO: 4776265 - DNA, 25 bp, Homo sapien
aagcaagccctgactaagaacctgg

SEQ ID NO: 4776266 - DNA, 25 bp, Homo sapien
gcaagccctgactaagaacctggag

SEQ ID NO: 4776267 - DNA, 25 bp, Homo sapien
caagccctgactaagaacctggagg

SEQ ID NO: 4776268 - DNA, 25 bp, Homo sapien
gaccagcattcacgtgaaaatggag

SEQ ID NO: 4776269 - DNA, 25 bp, Homo sapien
gaaaatggagctcataagactgaca

SEQ ID NO: 4776270 - DNA, 25 bp, Homo sapien
gagggttaaatcactcacccctaca

SEQ ID NO: 4776271 - DNA, 25 bp, Homo sapien
gaggttggccatgcctcgttataca

SEQ ID NO: 4776272 - DNA, 25 bp, Homo sapien
tggcctcaggtcctcggtgttgacg

SEQ ID NO: 4776273 - DNA, 25 bp, Homo sapien
aggtgtgcccgaacaacaaggccag

SEQ ID NO: 4776274 - DNA, 25 bp, Homo sapien
ggccagccctttggacggtttctgc

SEQ ID NO: 4776275 - DNA, 25 bp, Homo sapien
gatgcctccctggtagtaccctgtg

SEQ ID NO: 4776276 - DNA, 25 bp, Homo sapien
cccaagatccacaactcaacctcat

SEQ ID NO: 4776277 - DNA, 25 bp, Homo sapien
gacgtttacacggtaattgtccagc

SEQ ID NO: 4776278 - DNA, 25 bp, Homo sapien
tgacgggtcatgacgtttacacggt

SEQ ID NO: 4776279 - DNA, 25 bp, Homo sapien
ttacacggtaattgtccagcaaact

SEQ ID NO: 4776280 - DNA, 25 bp, Homo sapien
cctgggagtatatgcctggctgcca

SEQ ID NO: 4776281 - DNA, 25 bp, Homo sapien
tggaaattctgcctacctgggtgga

SEQ ID NO: 4776282 - DNA, 25 bp, Homo sapien
ggccttttcgcaggagaactccaaa

SEQ ID NO: 4776283 - DNA, 25 bp, Homo sapien
gcattgtcttagctcctgcctggga

SEQ ID NO: 4776284 - DNA, 25 bp, Homo sapien
tttatgctaataagacactgtcttc

SEQ ID NO: 4776285 - DNA, 25 bp, Homo sapien
gcccactggccatgtatatctgggt

SEQ ID NO: 4776286 - DNA, 25 bp, Homo sapien
tgcatttccgtagggattctataat

SEQ ID NO: 4776287 - DNA, 25 bp, Homo sapien
agcaatccttgcttatggaatcact

SEQ ID NO: 4776288 - DNA, 25 bp, Homo sapien
cctattgattgtgacggaccaagcc

SEQ ID NO: 4776289 - DNA, 25 bp, Homo sapien
aatcgagcagatagagttcccagcc

SEQ ID NO: 4776290 - DNA, 25 bp, Homo sapien
tggacaccccgtgacagactttcct

SEQ ID NO: 4776291 - DNA, 25 bp, Homo sapien
cattatgagattgatgcacggacct

SEQ ID NO: 4776292 - DNA, 25 bp, Homo sapien
ttcctgtcactacgagaagctccag

SEQ ID NO: 4776293 - DNA, 25 bp, Homo sapien
cattggccattagaagccttgcagt

SEQ ID NO: 4776294 - DNA, 25 bp, Homo sapien
ttatgactgttgatgaggacctcga

SEQ ID NO: 4776295 - DNA, 25 bp, Homo sapien
aagatctggactctacgtgtgctca

SEQ ID NO: 4776296 - DNA, 25 bp, Homo sapien
tcaccagccaatgggtatgcactgt

SEQ ID NO: 4776297 - DNA, 25 bp, Homo sapien
ggtacctttaggacgttcagccaga

SEQ ID NO: 4776298 - DNA, 25 bp, Homo sapien
gatttgcacgtctaccactcgtgtg

SEQ ID NO: 4776299 - DNA, 25 bp, Homo sapien
tattataggtggcttcagactcaca

SEQ ID NO: 4776300 - DNA, 25 bp, Homo sapien
tgctgcctgaccactagttacttgg

SEQ ID NO: 4776301 - DNA, 25 bp, Homo sapien
gaatgtatctcttgcaggtaaggag

SEQ ID NO: 4776302 - DNA, 25 bp, Homo sapien
ggtagtcctcttggttatcagacca

SEQ ID NO: 4776303 - DNA, 25 bp, Homo sapien
aggaggactctctattggcttttga

SEQ ID NO: 4776304 - DNA, 25 bp, Homo sapien
ctttttgtagatgagccaggtgacc

SEQ ID NO: 4776305 - DNA, 25 bp, Homo sapien
catatgctgtcccaggtgtttccca

SEQ ID NO: 4776306 - DNA, 25 bp, Homo sapien
caaattgcgggttaagtggctccag

SEQ ID NO: 4776307 - DNA, 25 bp, Homo sapien
tggctccagtagaggctataaaggc

SEQ ID NO: 4776308 - DNA, 25 bp, Homo sapien
caaactctgcctccccggttcaact

SEQ ID NO: 4776309 - DNA, 25 bp, Homo sapien
tctctctctttctcttcttttgttt

SEQ ID NO: 4776310 - DNA, 25 bp, Homo sapien
tcttttgagatggaatttcactctt

SEQ ID NO: 4776311 - DNA, 25 bp, Homo sapien
ctctctcctctctttcctctttctt

SEQ ID NO: 4776312 - DNA, 25 bp, Homo sapien
gcactaattttccagggagaccaga

SEQ ID NO: 4776313 - DNA, 25 bp, Homo sapien
tgaaatttcaagcagcattggaggg

SEQ ID NO: 4776314 - DNA, 25 bp, Homo sapien
tctccgcagtgatgaaagtgtttgc

SEQ ID NO: 4776315 - DNA, 25 bp, Homo sapien
gcagattttcacagctccgcgcata

SEQ ID NO: 4776316 - DNA, 25 bp, Homo sapien
tgactttaccatgggtttatcaggg

SEQ ID NO: 4776317 - DNA, 25 bp, Homo sapien
ttagggagacacataagttcagtcc

SEQ ID NO: 4776318 - DNA, 25 bp, Homo sapien
taaattttgcgatgggtctatcagg

SEQ ID NO: 4776319 - DNA, 25 bp, Homo sapien
taggaactagggtcataacgtacga

SEQ ID NO: 4776320 - DNA, 25 bp, Homo sapien
taaggatggcctttccaccgtcatc

SEQ ID NO: 4776321 - DNA, 25 bp, Homo sapien
catcagaaaggcttttacctccata

SEQ ID NO: 4776322 - DNA, 25 bp, Homo sapien
cactcttcatttacgtctgagacaa

SEQ ID NO: 4776323 - DNA, 25 bp, Homo sapien
accgtcatccaataacactcttcat

SEQ ID NO: 4776324 - DNA, 25 bp, Homo sapien
aatataggagcagaagctagtgaaa

SEQ ID NO: 4776325 - DNA, 25 bp, Homo sapien
cttataaaaagggagacatcactac

SEQ ID NO: 4776326 - DNA, 25 bp, Homo sapien
gcaaacatataaaatgaggaccaac

SEQ ID NO: 4776327 - DNA, 25 bp, Homo sapien
gacaaacttctggtatgactaatca

SEQ ID NO: 4776328 - DNA, 25 bp, Homo sapien
cagtgtgctaatgctcttcctgaag

SEQ ID NO: 4776329 - DNA, 25 bp, Homo sapien
tgaagaatacactggagagtagact

SEQ ID NO: 4776330 - DNA, 25 bp, Homo sapien
caagctatccatggaacagtgtgct

SEQ ID NO: 4776331 - DNA, 25 bp, Homo sapien
cacagatttaatatccatccaagct

SEQ ID NO: 4776332 - DNA, 25 bp, Homo sapien
aatggggtgaacctgggaggcggag

SEQ ID NO: 4776333 - DNA, 25 bp, Homo sapien
gctactcaggaggctgaggcaggag

SEQ ID NO: 4776334 - DNA, 25 bp, Homo sapien
cttgcagtgtgccgagattgtgcta

SEQ ID NO: 4776335 - DNA, 25 bp, Homo sapien
gtggtggcgggagtttgtagtccca

SEQ ID NO: 4776336 - DNA, 25 bp, Homo sapien
tgcctgccatgtgcagcggcccctt

SEQ ID NO: 4776337 - DNA, 25 bp, Homo sapien
ctgccatgtgcagcggcccctttgt

SEQ ID NO: 4776338 - DNA, 25 bp, Homo sapien
tttgtgcccgcgcacccggcccggc

SEQ ID NO: 4776339 - DNA, 25 bp, Homo sapien
agcggcccctttgtgcccgcgcacc

SEQ ID NO: 4776340 - DNA, 25 bp, Homo sapien
ttttatcatggacagatttctattg

SEQ ID NO: 4776341 - DNA, 25 bp, Homo sapien
gacagatttctattggcattgctgc

SEQ ID NO: 4776342 - DNA, 25 bp, Homo sapien
catggacagatttctattggcattg

SEQ ID NO: 4776343 - DNA, 25 bp, Homo sapien
tatcatggacagatttctattggca

SEQ ID NO: 4776344 - DNA, 25 bp, Homo sapien
aagtccaccgaccactgctgctgat

SEQ ID NO: 4776345 - DNA, 25 bp, Homo sapien
ctcttactgcaaaataggctctcaa

SEQ ID NO: 4776346 - DNA, 25 bp, Homo sapien
tcttaaaccgcagcagagagcctgc

SEQ ID NO: 4776347 - DNA, 25 bp, Homo sapien
cgacggatagttctgctctcactct

SEQ ID NO: 4776348 - DNA, 25 bp, Homo sapien
caaaattggttctctctacagcctc

SEQ ID NO: 4776349 - DNA, 25 bp, Homo sapien
gcaaacactgtcttgacaaaattgg

SEQ ID NO: 4776350 - DNA, 25 bp, Homo sapien
tgcttgcagagggacgactcattct

SEQ ID NO: 4776351 - DNA, 25 bp, Homo sapien
ggcactgcttgcagagggacgactc

SEQ ID NO: 4776352 - DNA, 25 bp, Homo sapien
agtatgacaccttcactgatgataa

SEQ ID NO: 4776353 - DNA, 25 bp, Homo sapien
actgttctgtatcaggttcaatcaa

SEQ ID NO: 4776354 - DNA, 25 bp, Homo sapien
ctttgacactgtttagaagtatgac

SEQ ID NO: 4776355 - DNA, 25 bp, Homo sapien
aaactgttctgtatcaggttcaatc

SEQ ID NO: 4776356 - DNA, 25 bp, Homo sapien
gggtgatgatcacactaaaagctca

SEQ ID NO: 4776357 - DNA, 25 bp, Homo sapien
ggtcagcaagatgaaacaacagttt

SEQ ID NO: 4776358 - DNA, 25 bp, Homo sapien
taacagagctatgcttatacccact

SEQ ID NO: 4776359 - DNA, 25 bp, Homo sapien
aacaaaaatagggtcaggtgataag

SEQ ID NO: 4776360 - DNA, 25 bp, Homo sapien
gaactgatgtgagctccataccctg

SEQ ID NO: 4776361 - DNA, 25 bp, Homo sapien
gaaaagatatcctgacgcttccagc

SEQ ID NO: 4776362 - DNA, 25 bp, Homo sapien
gagagtctagcttttgccgggctga

SEQ ID NO: 4776363 - DNA, 25 bp, Homo sapien
aaacactggtgcatgaagaatcccc

SEQ ID NO: 4776364 - DNA, 25 bp, Homo sapien
gaaatttcaaaagcgtctctgcgcg

SEQ ID NO: 4776365 - DNA, 25 bp, Homo sapien
gatgcctggattcgggatggaccac

SEQ ID NO: 4776366 - DNA, 25 bp, Homo sapien
ctcaaacaggccgtggtcagtctca

SEQ ID NO: 4776367 - DNA, 25 bp, Homo sapien
tcacaccggacgtggaaaggcacgt

SEQ ID NO: 4776368 - DNA, 25 bp, Homo sapien
ctccgagtcggaggaatcagacccg

SEQ ID NO: 4776369 - DNA, 25 bp, Homo sapien
tgggcctcgtagtgccgaagctcct

SEQ ID NO: 4776370 - DNA, 25 bp, Homo sapien
gcttccacgatcacttggtgggcag

SEQ ID NO: 4776371 - DNA, 25 bp, Homo sapien
cctgacactgtcgtctgggaactat

SEQ ID NO: 4776372 - DNA, 25 bp, Homo sapien
ctcaaagctcaaagcacggtatttt

SEQ ID NO: 4776373 - DNA, 25 bp, Homo sapien
caaagctcaaagcacggtatttttc

SEQ ID NO: 4776374 - DNA, 25 bp, Homo sapien
gctcaaagcacggtatttttcaggg

SEQ ID NO: 4776375 - DNA, 25 bp, Homo sapien
aagctcaaagcacggtatttttcag

SEQ ID NO: 4776376 - DNA, 25 bp, Homo sapien
tggaggaccttcaggtcccgcagct

SEQ ID NO: 4776377 - DNA, 25 bp, Homo sapien
cctggaggaccttcaggtcccgcag

SEQ ID NO: 4776378 - DNA, 25 bp, Homo sapien
ctggaggaccttcaggtcccgcagc

SEQ ID NO: 4776379 - DNA, 25 bp, Homo sapien
ggaggaccttcaggtcccgcagctg

SEQ ID NO: 4776380 - DNA, 25 bp, Homo sapien
gaagtccaattatgcatctcaaggg

SEQ ID NO: 4776381 - DNA, 25 bp, Homo sapien
tcaaagccagtacaccgaagaggaa

SEQ ID NO: 4776382 - DNA, 25 bp, Homo sapien
tataaagatctgtaagacccaggct

SEQ ID NO: 4776383 - DNA, 25 bp, Homo sapien
tatcgaagtgaagagcggcacagga

SEQ ID NO: 4776384 - DNA, 25 bp, Homo sapien
aggatggtgaggatcgccagcacag

SEQ ID NO: 4776385 - DNA, 25 bp, Homo sapien
acaaaagcacgggaagcaaaaccag

SEQ ID NO: 4776386 - DNA, 25 bp, Homo sapien
aaaccagcccattgagaacgccgag

SEQ ID NO: 4776387 - DNA, 25 bp, Homo sapien
gcccattgagaacgccgaggatggt

SEQ ID NO: 4776388 - DNA, 25 bp, Homo sapien
ggtctaatgtaaactgctggaactt

SEQ ID NO: 4776389 - DNA, 25 bp, Homo sapien
ttaagacatttgcatcccatccatc

SEQ ID NO: 4776390 - DNA, 25 bp, Homo sapien
gaactacattagtaaaaaccaagca

SEQ ID NO: 4776391 - DNA, 25 bp, Homo sapien
ctcacagctattgtaaacactagaa

SEQ ID NO: 4776392 - DNA, 25 bp, Homo sapien
caggacgggtgcaaacatgtgctcc

SEQ ID NO: 4776393 - DNA, 25 bp, Homo sapien
caatgaagtcgaactcagatcccgc

SEQ ID NO: 4776394 - DNA, 25 bp, Homo sapien
agcagagtggacacggcgccatcca

SEQ ID NO: 4776395 - DNA, 25 bp, Homo sapien
aagcacagccctgcggttcttgtcg

SEQ ID NO: 4776396 - DNA, 25 bp, Homo sapien
ctggacttcacctggtaaatgctca

SEQ ID NO: 4776397 - DNA, 25 bp, Homo sapien
tcacctggtaaatgctcagctctgt

SEQ ID NO: 4776398 - DNA, 25 bp, Homo sapien
cttcacctggtaaatgctcagctct

SEQ ID NO: 4776399 - DNA, 25 bp, Homo sapien
gacttcacctggtaaatgctcagct

SEQ ID NO: 4776400 - DNA, 25 bp, Homo sapien
tatgccaacagaagcgatcaggatg

SEQ ID NO: 4776401 - DNA, 25 bp, Homo sapien
gatcaggatgaccacgggcacggca

SEQ ID NO: 4776402 - DNA, 25 bp, Homo sapien
ggtgaactccactcctatgccaaca

SEQ ID NO: 4776403 - DNA, 25 bp, Homo sapien
gagcttgattccgatgaggcccatc

SEQ ID NO: 4776404 - DNA, 25 bp, Homo sapien
tccaccagcgcaatccacgaggaat

SEQ ID NO: 4776405 - DNA, 25 bp, Homo sapien
caccagcgcaatccacgaggaattg

SEQ ID NO: 4776406 - DNA, 25 bp, Homo sapien
ttgcacaagcatggccgcatcactt

SEQ ID NO: 4776407 - DNA, 25 bp, Homo sapien
acgaggaattgcacaagcatggccg

SEQ ID NO: 4776408 - DNA, 25 bp, Homo sapien
ggttcagaaggaagacagcgcacac

SEQ ID NO: 4776409 - DNA, 25 bp, Homo sapien
cacacgaggaatgtgcaggccaaca

SEQ ID NO: 4776410 - DNA, 25 bp, Homo sapien
cacaaagtctgaggtgtcccgcaag

SEQ ID NO: 4776411 - DNA, 25 bp, Homo sapien
gaactgggcatactcgatgggctct

SEQ ID NO: 4776412 - DNA, 25 bp, Homo sapien
aagggcacaggttaggagcagccca

SEQ ID NO: 4776413 - DNA, 25 bp, Homo sapien
aggagcagcccagggtagaagagca

SEQ ID NO: 4776414 - DNA, 25 bp, Homo sapien
gacagagaagggcacaggttaggag

SEQ ID NO: 4776415 - DNA, 25 bp, Homo sapien
cagagaagggcacaggttaggagca

SEQ ID NO: 4776416 - DNA, 25 bp, Homo sapien
ctttgcatgaaagcttactgactgc

SEQ ID NO: 4776417 - DNA, 25 bp, Homo sapien
tgcatgaaagcttactgactgctct

SEQ ID NO: 4776418 - DNA, 25 bp, Homo sapien
gaactttgcatgaaagcttactgac

SEQ ID NO: 4776419 - DNA, 25 bp, Homo sapien
ttgcatgaaagcttactgactgctc

SEQ ID NO: 4776420 - DNA, 25 bp, Homo sapien
catacgctactaatatctccaccag

SEQ ID NO: 4776421 - DNA, 25 bp, Homo sapien
tcattaagacaagccttggctgcct

SEQ ID NO: 4776422 - DNA, 25 bp, Homo sapien
ggcccggtatccaaagcatacgcta

SEQ ID NO: 4776423 - DNA, 25 bp, Homo sapien
gagtctccagccatgtttgcaaggg

SEQ ID NO: 4776424 - DNA, 25 bp, Homo sapien
gcttataggaatgacccaatgtgcc

SEQ ID NO: 4776425 - DNA, 25 bp, Homo sapien
gaagaggacgctgttgtatacagac

SEQ ID NO: 4776426 - DNA, 25 bp, Homo sapien
cagtgcaggtgcttggtggcttata

SEQ ID NO: 4776427 - DNA, 25 bp, Homo sapien
ttaaacagctttgacacagtgcagg

SEQ ID NO: 4776428 - DNA, 25 bp, Homo sapien
acccattctggtcggtgtggccgga

SEQ ID NO: 4776429 - DNA, 25 bp, Homo sapien
ggtcgttgctgacccaagccgtcag

SEQ ID NO: 4776430 - DNA, 25 bp, Homo sapien
ccgtcaggtagatgtagaaagcgct

SEQ ID NO: 4776431 - DNA, 25 bp, Homo sapien
tgtagtcggctttgtcgtggaccca

SEQ ID NO: 4776432 - DNA, 25 bp, Homo sapien
tggctgatgtcgatgggcttatcgc

SEQ ID NO: 4776433 - DNA, 25 bp, Homo sapien
gactccatcgtctgatccattcttg

SEQ ID NO: 4776434 - DNA, 25 bp, Homo sapien
tgccggtttgcaccaggagtttgta

SEQ ID NO: 4776435 - DNA, 25 bp, Homo sapien
gagtttgtaggcaaggactccatcg

SEQ ID NO: 4776436 - DNA, 25 bp, Homo sapien
ccagaaggaccctggtcctagcggg

SEQ ID NO: 4776437 - DNA, 25 bp, Homo sapien
tgtgtcccacatccactttgactga

SEQ ID NO: 4776438 - DNA, 25 bp, Homo sapien
tagacgtccatcagaaacacaccct

SEQ ID NO: 4776439 - DNA, 25 bp, Homo sapien
cattataactcgcagccagaaggac

SEQ ID NO: 4776440 - DNA, 25 bp, Homo sapien
tttggatccgattgagaacaggaag

SEQ ID NO: 4776441 - DNA, 25 bp, Homo sapien
aatttggatccgattgagaacagga

SEQ ID NO: 4776442 - DNA, 25 bp, Homo sapien
atttggatccgattgagaacaggaa

SEQ ID NO: 4776443 - DNA, 25 bp, Homo sapien
aacgtgtaggcagcaaagggctcca

SEQ ID NO: 4776444 - DNA, 25 bp, Homo sapien
cacatcaaccattcaacaggcctga

SEQ ID NO: 4776445 - DNA, 25 bp, Homo sapien
tctgtgttgagtgctctagcggacc

SEQ ID NO: 4776446 - DNA, 25 bp, Homo sapien
gcaaggaaagctgactcaaggataa

SEQ ID NO: 4776447 - DNA, 25 bp, Homo sapien
cagaagctgtatggaaccatcctct

SEQ ID NO: 4776448 - DNA, 25 bp, Homo sapien
gacacaaagttctggtaaacacaag

SEQ ID NO: 4776449 - DNA, 25 bp, Homo sapien
gctgctgagtctttacatacaagtg

SEQ ID NO: 4776450 - DNA, 25 bp, Homo sapien
taaacacaagtcaaggccagaagct

SEQ ID NO: 4776451 - DNA, 25 bp, Homo sapien
tacaacatgctccccttttcctgac

SEQ ID NO: 4776452 - DNA, 25 bp, Homo sapien
gttacaacatgctccccttttcctg

SEQ ID NO: 4776453 - DNA, 25 bp, Homo sapien
ctgttacaacatgctccccttttcc

SEQ ID NO: 4776454 - DNA, 25 bp, Homo sapien
ttacaacatgctccccttttcctga

SEQ ID NO: 4776455 - DNA, 25 bp, Homo sapien
taacgctctcataatcatgacaaag

SEQ ID NO: 4776456 - DNA, 25 bp, Homo sapien
caaaagaccgaaaggacgagagcct

SEQ ID NO: 4776457 - DNA, 25 bp, Homo sapien
ttgaagctgaacacgcaaaagaccg

SEQ ID NO: 4776458 - DNA, 25 bp, Homo sapien
taaaagtccatgaaacacgtcagtg

SEQ ID NO: 4776459 - DNA, 25 bp, Homo sapien
gatattcgggtagtctgctttctgg

SEQ ID NO: 4776460 - DNA, 25 bp, Homo sapien
tcactcgggtggtgccataaaggct

SEQ ID NO: 4776461 - DNA, 25 bp, Homo sapien
tctggtttcccgaggtacaatgtcc

SEQ ID NO: 4776462 - DNA, 25 bp, Homo sapien
acaatgtccgtaaggtccagcccgt

SEQ ID NO: 4776463 - DNA, 25 bp, Homo sapien
tcggtgtaggcctgaggttcaacct

SEQ ID NO: 4776464 - DNA, 25 bp, Homo sapien
tgcacagagatctcggagcgcggct

SEQ ID NO: 4776465 - DNA, 25 bp, Homo sapien
taatctgcgtttcatgggcaaagct

SEQ ID NO: 4776466 - DNA, 25 bp, Homo sapien
gatgagagtgtccacttcgtacagg

SEQ ID NO: 4776467 - DNA, 25 bp, Homo sapien
aaattgaacaccactactaccgctg

SEQ ID NO: 4776468 - DNA, 25 bp, Homo sapien
agtctcctgtcctcgcgtcgatata

SEQ ID NO: 4776469 - DNA, 25 bp, Homo sapien
gcgtcgatataaatccatgctgaga

SEQ ID NO: 4776470 - DNA, 25 bp, Homo sapien
aatgagcagaaccatggcaaaattg

SEQ ID NO: 4776471 - DNA, 25 bp, Homo sapien
cacctgcctgaggttatccagtaaa

SEQ ID NO: 4776472 - DNA, 25 bp, Homo sapien
cctagctcagctgagaaccgggagt

SEQ ID NO: 4776473 - DNA, 25 bp, Homo sapien
gataaagtccccgaagtgcggtcaa

SEQ ID NO: 4776474 - DNA, 25 bp, Homo sapien
tcaaacaaagacttgatgccaagcc

SEQ ID NO: 4776475 - DNA, 25 bp, Homo sapien
agtttctcaataccagcaccggctg

SEQ ID NO: 4776476 - DNA, 25 bp, Homo sapien
gagagtcggcctcgatgagccatca

SEQ ID NO: 4776477 - DNA, 25 bp, Homo sapien
gacagggtcccatgactaaaagact

SEQ ID NO: 4776478 - DNA, 25 bp, Homo sapien
taccttgggagaatttagcgcactg

SEQ ID NO: 4776479 - DNA, 25 bp, Homo sapien
tgattggttcctcttacatgacaaa

SEQ ID NO: 4776480 - DNA, 25 bp, Homo sapien
atgacattcaaatacgtgattgatt

SEQ ID NO: 4776481 - DNA, 25 bp, Homo sapien
ttcaaatacgtgattgattggttcc

SEQ ID NO: 4776482 - DNA, 25 bp, Homo sapien
attggttcctcttacatgacaaatg

SEQ ID NO: 4776483 - DNA, 25 bp, Homo sapien
gccgggcatcctaacaacaagtgaa

SEQ ID NO: 4776484 - DNA, 25 bp, Homo sapien
caggaactcttggtgagtagagtaa

SEQ ID NO: 4776485 - DNA, 25 bp, Homo sapien
gaattagacatcatatcatcacaga

SEQ ID NO: 4776486 - DNA, 25 bp, Homo sapien
cagatgcaagactggtcaatttctc

SEQ ID NO: 4776487 - DNA, 25 bp, Homo sapien
cactttgcgctcaggaagaccatgg

SEQ ID NO: 4776488 - DNA, 25 bp, Homo sapien
catggcacaaactggtgaagtctct

SEQ ID NO: 4776489 - DNA, 25 bp, Homo sapien
gctcaagggcaacgtcagtaattta

SEQ ID NO: 4776490 - DNA, 25 bp, Homo sapien
tcctatgaatttcaggtagctcaag

SEQ ID NO: 4776491 - DNA, 25 bp, Homo sapien
gagtagccccgaaagccatgcataa

SEQ ID NO: 4776492 - DNA, 25 bp, Homo sapien
tagcagagaccgcagacatgggatg

SEQ ID NO: 4776493 - DNA, 25 bp, Homo sapien
cagacgtctgggcttcatagggcta

SEQ ID NO: 4776494 - DNA, 25 bp, Homo sapien
agaaaataccctgacggcctctggg

SEQ ID NO: 4776495 - DNA, 25 bp, Homo sapien
cgggaattgggattaacgcggccat

SEQ ID NO: 4776496 - DNA, 25 bp, Homo sapien
gattaacgcggccatgaagaaggct

SEQ ID NO: 4776497 - DNA, 25 bp, Homo sapien
ggagaacgcccgcagagcgggaatt

SEQ ID NO: 4776498 - DNA, 25 bp, Homo sapien
gctggctcctgtgcgcttcaggcac

SEQ ID NO: 4776499 - DNA, 25 bp, Homo sapien
cagcgctgagagctgcactggacat

SEQ ID NO: 4776500 - DNA, 25 bp, Homo sapien
catggtccccttggagcacagactg

SEQ ID NO: 4776501 - DNA, 25 bp, Homo sapien
agcgctgagagctgcactggacatg

SEQ ID NO: 4776502 - DNA, 25 bp, Homo sapien
tgcactggacatggtccccttggag

SEQ ID NO: 4776503 - DNA, 25 bp, Homo sapien
cattattcagtaccatctacagagt

SEQ ID NO: 4776504 - DNA, 25 bp, Homo sapien
taccatctacagagtcatcaattct

SEQ ID NO: 4776505 - DNA, 25 bp, Homo sapien
tcttcatggttattaccatccagag

SEQ ID NO: 4776506 - DNA, 25 bp, Homo sapien
caagataatgacttaacgcttaagt

SEQ ID NO: 4776507 - DNA, 25 bp, Homo sapien
agttagggataaagtgtcacattaa

SEQ ID NO: 4776508 - DNA, 25 bp, Homo sapien
gggataaagtgtcacattaaaacaa

SEQ ID NO: 4776509 - DNA, 25 bp, Homo sapien
tagggataaagtgtcacattaaaac

SEQ ID NO: 4776510 - DNA, 25 bp, Homo sapien
gttagggataaagtgtcacattaaa

SEQ ID NO: 4776511 - DNA, 25 bp, Homo sapien
aacaccaagagcgagaaatggcaaa

SEQ ID NO: 4776512 - DNA, 25 bp, Homo sapien
cacaccaacaccaagagcgagaaat

SEQ ID NO: 4776513 - DNA, 25 bp, Homo sapien
ctgtcctgtttcactgaaggcgtgg

SEQ ID NO: 4776514 - DNA, 25 bp, Homo sapien
ctgtttcactgaaggcgtgggccag

SEQ ID NO: 4776515 - DNA, 25 bp, Homo sapien
ttgttgcagcgttaaaggaaattcc

SEQ ID NO: 4776516 - DNA, 25 bp, Homo sapien
actgacagtgcaaccagcaggacgc

SEQ ID NO: 4776517 - DNA, 25 bp, Homo sapien
ttccgatcaatgagcacaggcccag

SEQ ID NO: 4776518 - DNA, 25 bp, Homo sapien
ccagcgcagcatggttagacaggca

SEQ ID NO: 4776519 - DNA, 25 bp, Homo sapien
catgagtaagtagccgctggccacg

SEQ ID NO: 4776520 - DNA, 25 bp, Homo sapien
ttctgtgcgacactctgatgaacca

SEQ ID NO: 4776521 - DNA, 25 bp, Homo sapien
gaaagcaccttttgagtggagttct

SEQ ID NO: 4776522 - DNA, 25 bp, Homo sapien
agaaggatttcaggatgtcgtccag

SEQ ID NO: 4776523 - DNA, 25 bp, Homo sapien
gccgctttgtcctcgttccagttga

SEQ ID NO: 4776524 - DNA, 25 bp, Homo sapien
gcttgggagtcattaactggaacat

SEQ ID NO: 4776525 - DNA, 25 bp, Homo sapien
gatgtgtgagacatactcgtacccc

SEQ ID NO: 4776526 - DNA, 25 bp, Homo sapien
tactcgtaccccttgaagtgctcgt

SEQ ID NO: 4776527 - DNA, 25 bp, Homo sapien
ggaagaagactacagggcatagatt

SEQ ID NO: 4776528 - DNA, 25 bp, Homo sapien
catagattgtcctcgggagctggct

SEQ ID NO: 4776529 - DNA, 25 bp, Homo sapien
caaatacacttgccgatgtcaggag

SEQ ID NO: 4776530 - DNA, 25 bp, Homo sapien
gactacagggcatagattgtcctcg

SEQ ID NO: 4776531 - DNA, 25 bp, Homo sapien
tcaaaacaagggccatatcaagagg

SEQ ID NO: 4776532 - DNA, 25 bp, Homo sapien
tcttgactgtgccacccacaatcaa

SEQ ID NO: 4776533 - DNA, 25 bp, Homo sapien
tgttcttgactgtgccacccacaat

SEQ ID NO: 4776534 - DNA, 25 bp, Homo sapien
agtgctgttcttgactgtgccaccc

SEQ ID NO: 4776535 - DNA, 25 bp, Homo sapien
cgaagtttgtccaccgcaaaggagg

SEQ ID NO: 4776536 - DNA, 25 bp, Homo sapien
ggcagtctggatcggccggattgag

SEQ ID NO: 4776537 - DNA, 25 bp, Homo sapien
ccagctgtccacttgatagtttatt

SEQ ID NO: 4776538 - DNA, 25 bp, Homo sapien
tgtaaccatgaccaacctcagcctt

SEQ ID NO: 4776539 - DNA, 25 bp, Homo sapien
tacttatgagcgctctctgacagcc

SEQ ID NO: 4776540 - DNA, 25 bp, Homo sapien
taaccaggctgaagtcattattcgg

SEQ ID NO: 4776541 - DNA, 25 bp, Homo sapien
taaaactgtacactgaaggtcaggg

SEQ ID NO: 4776542 - DNA, 25 bp, Homo sapien
cctggcaatggaatgggcaagcccc

SEQ ID NO: 4776543 - DNA, 25 bp, Homo sapien
agcaacattagaaacactgagtcct

SEQ ID NO: 4776544 - DNA, 25 bp, Homo sapien
actgaaatggaacaaacaatgataa

SEQ ID NO: 4776545 - DNA, 25 bp, Homo sapien
gagtcctagagaagtcacagacatc

SEQ ID NO: 4776546 - DNA, 25 bp, Homo sapien
gaaacactgagtcctagagaagtca

SEQ ID NO: 4776547 - DNA, 25 bp, Homo sapien
aggaggtatgctgtcccagactgta

SEQ ID NO: 4776548 - DNA, 25 bp, Homo sapien
agactgtaatttcgccccttcccag

SEQ ID NO: 4776549 - DNA, 25 bp, Homo sapien
aagcagtccaaaggtgtaataatca

SEQ ID NO: 4776550 - DNA, 25 bp, Homo sapien
taataatcaaacaagggtaaagata

SEQ ID NO: 4776551 - DNA, 25 bp, Homo sapien
cctgatttgtaacacaaatgttcca

SEQ ID NO: 4776552 - DNA, 25 bp, Homo sapien
tctcctgatttgtaacacaaatgtt

SEQ ID NO: 4776553 - DNA, 25 bp, Homo sapien
tctgtgataagctctcctgatttgt

SEQ ID NO: 4776554 - DNA, 25 bp, Homo sapien
ttgtaacacaaatgttccaatttcc

SEQ ID NO: 4776555 - DNA, 25 bp, Homo sapien
tacagcatcaacatagactatccgg

SEQ ID NO: 4776556 - DNA, 25 bp, Homo sapien
agatctcctgctgaaacctggcgca

SEQ ID NO: 4776557 - DNA, 25 bp, Homo sapien
tacagaccaacagggcaagtttgcc

SEQ ID NO: 4776558 - DNA, 25 bp, Homo sapien
taaacaacaacatgtgccaggtggg

SEQ ID NO: 4776559 - DNA, 25 bp, Homo sapien
tctccaatcttctggcgagtataat

SEQ ID NO: 4776560 - DNA, 25 bp, Homo sapien
taattcacgacttactcgtcctcca

SEQ ID NO: 4776561 - DNA, 25 bp, Homo sapien
catgtatacatggacacggctggcc

SEQ ID NO: 4776562 - DNA, 25 bp, Homo sapien
tgtggtcaggacattagcaccttct

SEQ ID NO: 4776563 - DNA, 25 bp, Homo sapien
ggccagcacggggtatgcccaaagc

SEQ ID NO: 4776564 - DNA, 25 bp, Homo sapien
tcaacactgtgactgccaaatgcct

SEQ ID NO: 4776565 - DNA, 25 bp, Homo sapien
tccttaggcccaaggttatgttcaa

SEQ ID NO: 4776566 - DNA, 25 bp, Homo sapien
caaagccagcgcaggagcaggtgac

SEQ ID NO: 4776567 - DNA, 25 bp, Homo sapien
gccaagccaagctccgaatgctgca

SEQ ID NO: 4776568 - DNA, 25 bp, Homo sapien
gggccaagccaagctccgaatgctg

SEQ ID NO: 4776569 - DNA, 25 bp, Homo sapien
ctgggccaagccaagctccgaatgc

SEQ ID NO: 4776570 - DNA, 25 bp, Homo sapien
ccaagccaagctccgaatgctgcac

SEQ ID NO: 4776571 - DNA, 25 bp, Homo sapien
agtgcacgacactcatatattctga

SEQ ID NO: 4776572 - DNA, 25 bp, Homo sapien
tccctctcgggtataactgtgtcat

SEQ ID NO: 4776573 - DNA, 25 bp, Homo sapien
gtgaactggtagaatcagctccctc

SEQ ID NO: 4776574 - DNA, 25 bp, Homo sapien
taattaagtcttgtgtcattcacca

SEQ ID NO: 4776575 - DNA, 25 bp, Homo sapien
aagtttttgatcaagctctgctgat

SEQ ID NO: 4776576 - DNA, 25 bp, Homo sapien
ttgaaaggcaaaagaagcatcactt

SEQ ID NO: 4776577 - DNA, 25 bp, Homo sapien
gaaatccaaggcttaagccaattct

SEQ ID NO: 4776578 - DNA, 25 bp, Homo sapien
gatcaagctctgctgatcctctcat

SEQ ID NO: 4776579 - DNA, 25 bp, Homo sapien
gaaatgtcttccatccggaacagcg

SEQ ID NO: 4776580 - DNA, 25 bp, Homo sapien
ggaacagcgtactttccaagctggg

SEQ ID NO: 4776581 - DNA, 25 bp, Homo sapien
gctgacttcctgcagagcacaggcg

SEQ ID NO: 4776582 - DNA, 25 bp, Homo sapien
ctgagacaggcccaagaacgttgct

SEQ ID NO: 4776583 - DNA, 25 bp, Homo sapien
atgggggagaagacaatgcgagtct

SEQ ID NO: 4776584 - DNA, 25 bp, Homo sapien
tgggggagaagacaatgcgagtctc

SEQ ID NO: 4776585 - DNA, 25 bp, Homo sapien
catgggggagaagacaatgcgagtc

SEQ ID NO: 4776586 - DNA, 25 bp, Homo sapien
gactcacgtcactgggggccacttt

SEQ ID NO: 4776587 - DNA, 25 bp, Homo sapien
tccggtgaataccacgctggcctca

SEQ ID NO: 4776588 - DNA, 25 bp, Homo sapien
ggagactcacgtcactgggggccac

SEQ ID NO: 4776589 - DNA, 25 bp, Homo sapien
ctggcctccggtgaataccacgctg

SEQ ID NO: 4776590 - DNA, 25 bp, Homo sapien
cacataaagcttcagagtcggccaa

SEQ ID NO: 4776591 - DNA, 25 bp, Homo sapien
aatctagccaagctccatgtgccca

SEQ ID NO: 4776592 - DNA, 25 bp, Homo sapien
gagttctaagcaaggaagacctgaa

SEQ ID NO: 4776593 - DNA, 25 bp, Homo sapien
cactggctttggtgggagttctaag

SEQ ID NO: 4776594 - DNA, 25 bp, Homo sapien
cacaatggcaaccccagagaaaaga

SEQ ID NO: 4776595 - DNA, 25 bp, Homo sapien
tgtcccttgtgaaatgcccccacaa

SEQ ID NO: 4776596 - DNA, 25 bp, Homo sapien
atccattctgcccttctggctggga

SEQ ID NO: 4776597 - DNA, 25 bp, Homo sapien
ccttggttctgctccacaagggctc

SEQ ID NO: 4776598 - DNA, 25 bp, Homo sapien
cttgacgctggcctgcagcaatgtt

SEQ ID NO: 4776599 - DNA, 25 bp, Homo sapien
aatgttaacatccaaacaccaaagc

SEQ ID NO: 4776600 - DNA, 25 bp, Homo sapien
tggattcattacaaggctgctgccc

SEQ ID NO: 4776601 - DNA, 25 bp, Homo sapien
ggcctgcagcaatgttaacatccaa

SEQ ID NO: 4776602 - DNA, 25 bp, Homo sapien
gggatcactgaagcgattatgcgca

SEQ ID NO: 4776603 - DNA, 25 bp, Homo sapien
catcctgaaagggatcactgaagcg

SEQ ID NO: 4776604 - DNA, 25 bp, Homo sapien
ttctcaactaaatactccaactcca

SEQ ID NO: 4776605 - DNA, 25 bp, Homo sapien
gattatgcgcataactcttcagctt

SEQ ID NO: 4776606 - DNA, 25 bp, Homo sapien
gccgcggccgccgggggcgcgcaca

SEQ ID NO: 4776607 - DNA, 25 bp, Homo sapien
ccggccctccccagcgcggcggccg

SEQ ID NO: 4776608 - DNA, 25 bp, Homo sapien
cgcctccgcagccccgcgctgcgcc

SEQ ID NO: 4776609 - DNA, 25 bp, Homo sapien
cgccgcctccgcagccccgcgctgc

SEQ ID NO: 4776610 - DNA, 25 bp, Homo sapien
aggaggcccacaaccaagaacttgc

SEQ ID NO: 4776611 - DNA, 25 bp, Homo sapien
ccgcgaaggccccaaatatgaggag

SEQ ID NO: 4776612 - DNA, 25 bp, Homo sapien
gctgcttttaatcccaccgcgaagg

SEQ ID NO: 4776613 - DNA, 25 bp, Homo sapien
tccacgttggtctcgaggttcgctg

SEQ ID NO: 4776614 - DNA, 25 bp, Homo sapien
ccaacagccgtgggggcgcgggtgg

SEQ ID NO: 4776615 - DNA, 25 bp, Homo sapien
caacagccgtgggggcgcgggtggc

SEQ ID NO: 4776616 - DNA, 25 bp, Homo sapien
cccgcgggatccctgagcgacttgg

SEQ ID NO: 4776617 - DNA, 25 bp, Homo sapien
agccccggcggatctgagcgtcatg

SEQ ID NO: 4776618 - DNA, 25 bp, Homo sapien
ctgcacctcggggacatcagggcgc

SEQ ID NO: 4776619 - DNA, 25 bp, Homo sapien
ggctcggtcataaagccgggccgca

SEQ ID NO: 4776620 - DNA, 25 bp, Homo sapien
tatttgtgatcggaagagggcagcc

SEQ ID NO: 4776621 - DNA, 25 bp, Homo sapien
gagaggcggctcaaaacctggaaaa

SEQ ID NO: 4776622 - DNA, 25 bp, Homo sapien
tggattccacacatttcagcgagcc

SEQ ID NO: 4776623 - DNA, 25 bp, Homo sapien
cgtaaacacaatgaacccggcagct

SEQ ID NO: 4776624 - DNA, 25 bp, Homo sapien
tcggcggcgttaccagccgaggcca

SEQ ID NO: 4776625 - DNA, 25 bp, Homo sapien
tgggccggtgcagatagtcccggtc

SEQ ID NO: 4776626 - DNA, 25 bp, Homo sapien
gctcgggctccggttgacagaccag

SEQ ID NO: 4776627 - DNA, 25 bp, Homo sapien
ctgggcgctcggcttgcgaggacgc

SEQ ID NO: 4776628 - DNA, 25 bp, Homo sapien
gccgctgccggggagtcagaccctg

SEQ ID NO: 4776629 - DNA, 25 bp, Homo sapien
gctgccggggagtcagaccctgcgc

SEQ ID NO: 4776630 - DNA, 25 bp, Homo sapien
cggccgctgccggggagtcagaccc

SEQ ID NO: 4776631 - DNA, 25 bp, Homo sapien
cgctgccggggagtcagaccctgcg

SEQ ID NO: 4776632 - DNA, 25 bp, Homo sapien
gctgggttcgcggtggctgctcggt

SEQ ID NO: 4776633 - DNA, 25 bp, Homo sapien
tgggttcgcggtggctgctcggtcc

SEQ ID NO: 4776634 - DNA, 25 bp, Homo sapien
ttgtgctcctcggcaacccgctgga

SEQ ID NO: 4776635 - DNA, 25 bp, Homo sapien
gttcgcggtggctgctcggtcccgg

SEQ ID NO: 4776636 - DNA, 25 bp, Homo sapien
gcgcacggtgtatgttcattgaaaa

SEQ ID NO: 4776637 - DNA, 25 bp, Homo sapien
actggcagtagcgagaagtctagtg

SEQ ID NO: 4776638 - DNA, 25 bp, Homo sapien
agtaggtagggaggcggatgcgccg

SEQ ID NO: 4776639 - DNA, 25 bp, Homo sapien
gacccgcaaacccttgatttgcttc

SEQ ID NO: 4776640 - DNA, 25 bp, Homo sapien
cggcagcggcttccgcgcgcgcgct

SEQ ID NO: 4776641 - DNA, 25 bp, Homo sapien
tcggcgctgtcactctccgcaccag

SEQ ID NO: 4776642 - DNA, 25 bp, Homo sapien
gcgagcgtgcccttccctgcggctg

SEQ ID NO: 4776643 - DNA, 25 bp, Homo sapien
ctaggcgtgcgtgcgggctcgagag

SEQ ID NO: 4776644 - DNA, 25 bp, Homo sapien
ggcgcggacgctgggcttggatttc

SEQ ID NO: 4776645 - DNA, 25 bp, Homo sapien
tttcggcggagtgcagcgcggactc

SEQ ID NO: 4776646 - DNA, 25 bp, Homo sapien
tcggagcgcgggtgccgatggcgcg

SEQ ID NO: 4776647 - DNA, 25 bp, Homo sapien
ttgtcgctgcgggtctctttgtctc

SEQ ID NO: 4776648 - DNA, 25 bp, Homo sapien
cataggcaggacctgtcagggtcac

SEQ ID NO: 4776649 - DNA, 25 bp, Homo sapien
cacagccctcctgggtaaacaggcg

SEQ ID NO: 4776650 - DNA, 25 bp, Homo sapien
caaagtaaactcgaggaacgtgcta

SEQ ID NO: 4776651 - DNA, 25 bp, Homo sapien
tttctattaagcagttccatggccc

SEQ ID NO: 4776652 - DNA, 25 bp, Homo sapien
gcggattcgtgtcggtccctcggaa

SEQ ID NO: 4776653 - DNA, 25 bp, Homo sapien
gggagcaggaaaaccggacagatca

SEQ ID NO: 4776654 - DNA, 25 bp, Homo sapien
aaaaccggacagatcacagcgcctt

SEQ ID NO: 4776655 - DNA, 25 bp, Homo sapien
gaaatttcagcacgagatgtgtgcg

SEQ ID NO: 4776656 - DNA, 25 bp, Homo sapien
ggttcagaagaaacagttgcccaca

SEQ ID NO: 4776657 - DNA, 25 bp, Homo sapien
gaatgctgctcttgcacatggtcag

SEQ ID NO: 4776658 - DNA, 25 bp, Homo sapien
taaaagtactcttgctcaatgtggg

SEQ ID NO: 4776659 - DNA, 25 bp, Homo sapien
cacggtaacctccagcaattggaag

SEQ ID NO: 4776660 - DNA, 25 bp, Homo sapien
gggcagccttgttaacgaagaatgt

SEQ ID NO: 4776661 - DNA, 25 bp, Homo sapien
aagttgctcttcctccaacagaggt

SEQ ID NO: 4776662 - DNA, 25 bp, Homo sapien
cagtgatgaccttcccatatgtaga

SEQ ID NO: 4776663 - DNA, 25 bp, Homo sapien
gaggtacacatacaaactgactcct

SEQ ID NO: 4776664 - DNA, 25 bp, Homo sapien
ccctaaggcagtcgtttccaaggct

SEQ ID NO: 4776665 - DNA, 25 bp, Homo sapien
aaggcagtcgtttccaaggctgctg

SEQ ID NO: 4776666 - DNA, 25 bp, Homo sapien
gcagtcgtttccaaggctgctgttc

SEQ ID NO: 4776667 - DNA, 25 bp, Homo sapien
cctaaggcagtcgtttccaaggctg

SEQ ID NO: 4776668 - DNA, 25 bp, Homo sapien
tatagtctagaaacccacgcagtct

SEQ ID NO: 4776669 - DNA, 25 bp, Homo sapien
tgttactttatgagccccaacgtgg

SEQ ID NO: 4776670 - DNA, 25 bp, Homo sapien
gaaagcccattcctacagagattta

SEQ ID NO: 4776671 - DNA, 25 bp, Homo sapien
ctccaagggaacgaggaaagcccat

SEQ ID NO: 4776672 - DNA, 25 bp, Homo sapien
tcgatggagtgctcgcatcctgcag

SEQ ID NO: 4776673 - DNA, 25 bp, Homo sapien
tcttccacctactccttcaaattgg

SEQ ID NO: 4776674 - DNA, 25 bp, Homo sapien
aggactgccctgacattcatcgatg

SEQ ID NO: 4776675 - DNA, 25 bp, Homo sapien
cctggtggcaagcttctcttggcct

SEQ ID NO: 4776676 - DNA, 25 bp, Homo sapien
tctcaggaagctacttgcactcaag

SEQ ID NO: 4776677 - DNA, 25 bp, Homo sapien
gaaccgagctccagttttccacagg

SEQ ID NO: 4776678 - DNA, 25 bp, Homo sapien
gggaaacccacattaagacaatcac

SEQ ID NO: 4776679 - DNA, 25 bp, Homo sapien
tggctccatgagttccccagtggaa

SEQ ID NO: 4776680 - DNA, 25 bp, Homo sapien
tctcgacctcttgacctcaagcaat

SEQ ID NO: 4776681 - DNA, 25 bp, Homo sapien
tggtctcgacctcttgacctcaagc

SEQ ID NO: 4776682 - DNA, 25 bp, Homo sapien
cgacctcttgacctcaagcaatctg

SEQ ID NO: 4776683 - DNA, 25 bp, Homo sapien
gacctcttgacctcaagcaatctgc

SEQ ID NO: 4776684 - DNA, 25 bp, Homo sapien
tatggctttctgtggagataggcta

SEQ ID NO: 4776685 - DNA, 25 bp, Homo sapien
gctttctgtggagataggctattat

SEQ ID NO: 4776686 - DNA, 25 bp, Homo sapien
tcctttacatatggctttctgtgga

SEQ ID NO: 4776687 - DNA, 25 bp, Homo sapien
acatatggctttctgtggagatagg

SEQ ID NO: 4776688 - DNA, 25 bp, Homo sapien
caggacccgctgtaagtgggaattt

SEQ ID NO: 4776689 - DNA, 25 bp, Homo sapien
ccaggacccgctgtaagtgggaatt

SEQ ID NO: 4776690 - DNA, 25 bp, Homo sapien
ccgctgtaagtgggaatttggggct

SEQ ID NO: 4776691 - DNA, 25 bp, Homo sapien
tccaggacccgctgtaagtgggaat

SEQ ID NO: 4776692 - DNA, 25 bp, Homo sapien
aacacccagcggcttcccaggaaat

SEQ ID NO: 4776693 - DNA, 25 bp, Homo sapien
catgtgctcaaacacccagcggctt

SEQ ID NO: 4776694 - DNA, 25 bp, Homo sapien
tctttgggtactgctgctgtgagca

SEQ ID NO: 4776695 - DNA, 25 bp, Homo sapien
gctgtgagcactccccagacaccct

SEQ ID NO: 4776696 - DNA, 25 bp, Homo sapien
ccaaatgtgtgtctgtcattaagca

SEQ ID NO: 4776697 - DNA, 25 bp, Homo sapien
ggttctgtcatacagcctaggtctg

SEQ ID NO: 4776698 - DNA, 25 bp, Homo sapien
tacagtgttgagtagagttgcatgc

SEQ ID NO: 4776699 - DNA, 25 bp, Homo sapien
tgtgtacacatgaagaaaattgcct

SEQ ID NO: 4776700 - DNA, 25 bp, Homo sapien
cacctcttggttgtaggtacagaca

SEQ ID NO: 4776701 - DNA, 25 bp, Homo sapien
tctgccgagagcttgagaaaatgaa

SEQ ID NO: 4776702 - DNA, 25 bp, Homo sapien
tacgcaaaaatgctttcccctcgga

SEQ ID NO: 4776703 - DNA, 25 bp, Homo sapien
cactggaggtcgttcatacgcaaaa

SEQ ID NO: 4776704 - DNA, 25 bp, Homo sapien
gccaagggctctggttccacagttc

SEQ ID NO: 4776705 - DNA, 25 bp, Homo sapien
attccctgcccactagcataccagg

SEQ ID NO: 4776706 - DNA, 25 bp, Homo sapien
ctggaggctgcgctctgcctgagct

SEQ ID NO: 4776707 - DNA, 25 bp, Homo sapien
ggagccccacgcaaggctgctcttg

SEQ ID NO: 4776708 - DNA, 25 bp, Homo sapien
taaaatagagcaccatcgtacccag

SEQ ID NO: 4776709 - DNA, 25 bp, Homo sapien
tagcataactgtggccgacatttgg

SEQ ID NO: 4776710 - DNA, 25 bp, Homo sapien
gtttggcgcagagggataaaataga

SEQ ID NO: 4776711 - DNA, 25 bp, Homo sapien
gggtccttagcataactgtggccga

SEQ ID NO: 4776712 - DNA, 25 bp, Homo sapien
cccgcagatgggaatgtccttgtcc

SEQ ID NO: 4776713 - DNA, 25 bp, Homo sapien
gacgcgcacgacaggaggaagcctg

SEQ ID NO: 4776714 - DNA, 25 bp, Homo sapien
gaacagcgcatctccgcggacggct

SEQ ID NO: 4776715 - DNA, 25 bp, Homo sapien
ccggccagcgcggagccaggagggt

SEQ ID NO: 4776716 - DNA, 25 bp, Homo sapien
gacggcaatcagttccaacctgagt

SEQ ID NO: 4776717 - DNA, 25 bp, Homo sapien
tcagttccaacctgagttcaacaag

SEQ ID NO: 4776718 - DNA, 25 bp, Homo sapien
ttccaacctgagttcaacaagtgct

SEQ ID NO: 4776719 - DNA, 25 bp, Homo sapien
cccacaacacagacggcaatcagtt

SEQ ID NO: 4776720 - DNA, 25 bp, Homo sapien
ggcttcctcaggaacgcgtctgatg

SEQ ID NO: 4776721 - DNA, 25 bp, Homo sapien
cacccaggtaaagcgagtacttcca

SEQ ID NO: 4776722 - DNA, 25 bp, Homo sapien
aacatcactgtgaacagagcacaca

SEQ ID NO: 4776723 - DNA, 25 bp, Homo sapien
tgatgtctagcttgacgtctcccca

SEQ ID NO: 4776724 - DNA, 25 bp, Homo sapien
tgccaatacatcctgtctcttggaa

SEQ ID NO: 4776725 - DNA, 25 bp, Homo sapien
aatggtcttaatagttcctcttgcc

SEQ ID NO: 4776726 - DNA, 25 bp, Homo sapien
agtaacaatggtcttaatagttcct

SEQ ID NO: 4776727 - DNA, 25 bp, Homo sapien
gttcctcttgccaatacatcctgtc

SEQ ID NO: 4776728 - DNA, 25 bp, Homo sapien
aaagcgaatgggatttaatttcatg

SEQ ID NO: 4776729 - DNA, 25 bp, Homo sapien
aaaagcgaatgggatttaatttcat

SEQ ID NO: 4776730 - DNA, 25 bp, Homo sapien
gattcaaaaagcgaatgggatttaa

SEQ ID NO: 4776731 - DNA, 25 bp, Homo sapien
gaaattgattcaaaaagcgaatggg

SEQ ID NO: 4776732 - DNA, 25 bp, Homo sapien
ggcaacacgggtaattacaagaggc

SEQ ID NO: 4776733 - DNA, 25 bp, Homo sapien
gctgctccactaatcctgggttaca

SEQ ID NO: 4776734 - DNA, 25 bp, Homo sapien
tcaagatttactggcctcacggaga

SEQ ID NO: 4776735 - DNA, 25 bp, Homo sapien
ctcacggagatagccggcctcaaat

SEQ ID NO: 4776736 - DNA, 25 bp, Homo sapien
ttctactgtcccctaagtcggaagc

SEQ ID NO: 4776737 - DNA, 25 bp, Homo sapien
cggactctgttgtcccctaagttgg

SEQ ID NO: 4776738 - DNA, 25 bp, Homo sapien
tcccctaagtcggaagctgtgggct

SEQ ID NO: 4776739 - DNA, 25 bp, Homo sapien
ctgtctcctatgtcagaagctgtgg

SEQ ID NO: 4776740 - DNA, 25 bp, Homo sapien
tggaaccggcttccaccgagcagtt

SEQ ID NO: 4776741 - DNA, 25 bp, Homo sapien
cacggagagcgctgcctgttactag

SEQ ID NO: 4776742 - DNA, 25 bp, Homo sapien
caataggccatcaggatgatcagta

SEQ ID NO: 4776743 - DNA, 25 bp, Homo sapien
cctttgggccggattcacggagagc

SEQ ID NO: 4776744 - DNA, 25 bp, Homo sapien
ctctgtggcaactctgtggagtctc

SEQ ID NO: 4776745 - DNA, 25 bp, Homo sapien
gtctccagttgacccaatggtgtca

SEQ ID NO: 4776746 - DNA, 25 bp, Homo sapien
gacccaatggtgtcaacaacagaac

SEQ ID NO: 4776747 - DNA, 25 bp, Homo sapien
aagaaaccaatgctccatactgcag

SEQ ID NO: 4776748 - DNA, 25 bp, Homo sapien
cccaggaatgtctgcttggcccaga

SEQ ID NO: 4776749 - DNA, 25 bp, Homo sapien
tggccacccaggaatgtctgcttgg

SEQ ID NO: 4776750 - DNA, 25 bp, Homo sapien
aatgtaacagtcacgaacaggactg

SEQ ID NO: 4776751 - DNA, 25 bp, Homo sapien
cagtcacgaacaggactgtgaagtt

SEQ ID NO: 4776752 - DNA, 25 bp, Homo sapien
ggaatgtcctagatgtccaggagac

SEQ ID NO: 4776753 - DNA, 25 bp, Homo sapien
ccaggagacctggtgattgcagtcc

SEQ ID NO: 4776754 - DNA, 25 bp, Homo sapien
aatgacgcccctttcagatgaggcc

SEQ ID NO: 4776755 - DNA, 25 bp, Homo sapien
tactggtgttaactgcctttgcctc

SEQ ID NO: 4776756 - DNA, 25 bp, Homo sapien
tgtgggaaatccagtgcccttccaa

SEQ ID NO: 4776757 - DNA, 25 bp, Homo sapien
cctccacgacttgtgggaaatccag

SEQ ID NO: 4776758 - DNA, 25 bp, Homo sapien
gtgggaaatccagtgcccttccaat

SEQ ID NO: 4776759 - DNA, 25 bp, Homo sapien
gattgaccaacgacatcctctgctg

SEQ ID NO: 4776760 - DNA, 25 bp, Homo sapien
gaccaacgacatcctctgctgggat

SEQ ID NO: 4776761 - DNA, 25 bp, Homo sapien
gggtgagtgtgattgaccaacgaca

SEQ ID NO: 4776762 - DNA, 25 bp, Homo sapien
tgtgattgaccaacgacatcctctg

SEQ ID NO: 4776763 - DNA, 25 bp, Homo sapien
cgtttcatatgatctcttttaacct

SEQ ID NO: 4776764 - DNA, 25 bp, Homo sapien
tatgatctcttttaacctgaaaagc

SEQ ID NO: 4776765 - DNA, 25 bp, Homo sapien
gtttcatatgatctcttttaacctg

SEQ ID NO: 4776766 - DNA, 25 bp, Homo sapien
tcatatgatctcttttaacctgaaa

SEQ ID NO: 4776767 - DNA, 25 bp, Homo sapien
ttggtttaccacgatctctttgatg

SEQ ID NO: 4776768 - DNA, 25 bp, Homo sapien
ggtttgcagttggtttaccacgatc

SEQ ID NO: 4776769 - DNA, 25 bp, Homo sapien
tgaaggggtcaatgttagcagaggc

SEQ ID NO: 4776770 - DNA, 25 bp, Homo sapien
tgcagttggtttaccacgatctctt

SEQ ID NO: 4776771 - DNA, 25 bp, Homo sapien
tattattttggcagtggaaacctac

SEQ ID NO: 4776772 - DNA, 25 bp, Homo sapien
ttaaagagtagagcggatctgtgta

SEQ ID NO: 4776773 - DNA, 25 bp, Homo sapien
agagtagagcggatctgtgtattat

SEQ ID NO: 4776774 - DNA, 25 bp, Homo sapien
tctgtgtattattttggcagtggaa

SEQ ID NO: 4776775 - DNA, 25 bp, Homo sapien
taactgaggcttggcggtgtctctg

SEQ ID NO: 4776776 - DNA, 25 bp, Homo sapien
aaaagctgccgtttctctgactgcc

SEQ ID NO: 4776777 - DNA, 25 bp, Homo sapien
taaataaaaagctgccgtttctctg

SEQ ID NO: 4776778 - DNA, 25 bp, Homo sapien
aaactctgcattgaccatcccctga

SEQ ID NO: 4776779 - DNA, 25 bp, Homo sapien
ggctatgcgagttcccactgctctt

SEQ ID NO: 4776780 - DNA, 25 bp, Homo sapien
caaaatgggttgaggctatgcgagt

SEQ ID NO: 4776781 - DNA, 25 bp, Homo sapien
agagcaaaatgggttgaggctatgc

SEQ ID NO: 4776782 - DNA, 25 bp, Homo sapien
ggttgaggctatgcgagttcccact

SEQ ID NO: 4776783 - DNA, 25 bp, Homo sapien
tgacagcgtctcagtgctcgtattc

SEQ ID NO: 4776784 - DNA, 25 bp, Homo sapien
cagtgctcgtattccatgagtgcca

SEQ ID NO: 4776785 - DNA, 25 bp, Homo sapien
ctttcctaactgtgtgacagcgtct

SEQ ID NO: 4776786 - DNA, 25 bp, Homo sapien
tcgtattccatgagtgccaaaccac

SEQ ID NO: 4776787 - DNA, 25 bp, Homo sapien
ccagagggcagcatgttgtcaaggc

SEQ ID NO: 4776788 - DNA, 25 bp, Homo sapien
ccaccctctcgtggctttagttggg

SEQ ID NO: 4776789 - DNA, 25 bp, Homo sapien
tgaatttccgccatgacgtaccacc

SEQ ID NO: 4776790 - DNA, 25 bp, Homo sapien
ttagttggggttctgctttcttggc

SEQ ID NO: 4776791 - DNA, 25 bp, Homo sapien
tctgaattcagggactttgttctca

SEQ ID NO: 4776792 - DNA, 25 bp, Homo sapien
ctctgaattcagggactttgttctc

SEQ ID NO: 4776793 - DNA, 25 bp, Homo sapien
ctgaattcagggactttgttctcac

SEQ ID NO: 4776794 - DNA, 25 bp, Homo sapien
gattttgagagtaaagtgagtggtc

SEQ ID NO: 4776795 - DNA, 25 bp, Homo sapien
aggactgcagacatatttgggtatg

SEQ ID NO: 4776796 - DNA, 25 bp, Homo sapien
accaagggccatccggtggtcacta

SEQ ID NO: 4776797 - DNA, 25 bp, Homo sapien
ctctgtagttctccttttggcagat

SEQ ID NO: 4776798 - DNA, 25 bp, Homo sapien
gtggcgactggaaaatgtacttctg

SEQ ID NO: 4776799 - DNA, 25 bp, Homo sapien
tggcgactggaaaatgtacttctga

SEQ ID NO: 4776800 - DNA, 25 bp, Homo sapien
ggcgactggaaaatgtacttctgac

SEQ ID NO: 4776801 - DNA, 25 bp, Homo sapien
tatagacgaggttctcttccaacct

SEQ ID NO: 4776802 - DNA, 25 bp, Homo sapien
tgcccgtagaagtatagacgaggtt

SEQ ID NO: 4776803 - DNA, 25 bp, Homo sapien
cttatctgcccgtagaagtatagac

SEQ ID NO: 4776804 - DNA, 25 bp, Homo sapien
tagacgaggttctcttccaacctgg

SEQ ID NO: 4776805 - DNA, 25 bp, Homo sapien
cagtagaaacggctttcttttcact

SEQ ID NO: 4776806 - DNA, 25 bp, Homo sapien
ttcttttcactgagacccagcgaga

SEQ ID NO: 4776807 - DNA, 25 bp, Homo sapien
gacccagcgagacccactcagtggt

SEQ ID NO: 4776808 - DNA, 25 bp, Homo sapien
gtctgaagggacatgcattggaaag

SEQ ID NO: 4776809 - DNA, 25 bp, Homo sapien
ttaccatagcaactgatatcgtggc

SEQ ID NO: 4776810 - DNA, 25 bp, Homo sapien
taccatagcaactgatatcgtggcc

SEQ ID NO: 4776811 - DNA, 25 bp, Homo sapien
attaccatagcaactgatatcgtgg

SEQ ID NO: 4776812 - DNA, 25 bp, Homo sapien
ccatagcaactgatatcgtggccat

SEQ ID NO: 4776813 - DNA, 25 bp, Homo sapien
tagctgcggcaagtcaggtctcgga

SEQ ID NO: 4776814 - DNA, 25 bp, Homo sapien
catgtggactgtcaggacttgctgc

SEQ ID NO: 4776815 - DNA, 25 bp, Homo sapien
gactgacagcgaaagggacgttctt

SEQ ID NO: 4776816 - DNA, 25 bp, Homo sapien
aatgttttgagccacagccatcggg

SEQ ID NO: 4776817 - DNA, 25 bp, Homo sapien
aggacacacgctgcacttgatacat

SEQ ID NO: 4776818 - DNA, 25 bp, Homo sapien
ggacacacgctgcacttgatacata

SEQ ID NO: 4776819 - DNA, 25 bp, Homo sapien
gacacacgctgcacttgatacatac

SEQ ID NO: 4776820 - DNA, 25 bp, Homo sapien
cagagtgcttcctcagccacagcca

SEQ ID NO: 4776821 - DNA, 25 bp, Homo sapien
agagtgcttcctcagccacagccat

SEQ ID NO: 4776822 - DNA, 25 bp, Homo sapien
cattggaaaaagcagccggcatgct

SEQ ID NO: 4776823 - DNA, 25 bp, Homo sapien
gcatggaaaaccctgcttggaggtc

SEQ ID NO: 4776824 - DNA, 25 bp, Homo sapien
cttctgcatggaaaaccctgcttgg

SEQ ID NO: 4776825 - DNA, 25 bp, Homo sapien
caggtgcccattcgcatgggagaga

SEQ ID NO: 4776826 - DNA, 25 bp, Homo sapien
cctggagcaatctgactccatagtt

SEQ ID NO: 4776827 - DNA, 25 bp, Homo sapien
gagtgtggtttccaagagtgaggct

SEQ ID NO: 4776828 - DNA, 25 bp, Homo sapien
agtgtggtttccaagagtgaggctt

SEQ ID NO: 4776829 - DNA, 25 bp, Homo sapien
tgaggcttgggccctggagcaatct

SEQ ID NO: 4776830 - DNA, 25 bp, Homo sapien
caggtgctaggaacagaaattgtgt

SEQ ID NO: 4776831 - DNA, 25 bp, Homo sapien
aggtgctaggaacagaaattgtgtt

SEQ ID NO: 4776832 - DNA, 25 bp, Homo sapien
tgctaggaacagaaattgtgttcat

SEQ ID NO: 4776833 - DNA, 25 bp, Homo sapien
ggtgctaggaacagaaattgtgttc

SEQ ID NO: 4776834 - DNA, 25 bp, Homo sapien
gggtaatctgactcaaggatgcctc

SEQ ID NO: 4776835 - DNA, 25 bp, Homo sapien
gacagtttcatcatatatggcacca

SEQ ID NO: 4776836 - DNA, 25 bp, Homo sapien
gatttgacggcgacttctcttggcc

SEQ ID NO: 4776837 - DNA, 25 bp, Homo sapien
gttctcatgtgagggtgatgttcct

SEQ ID NO: 4776838 - DNA, 25 bp, Homo sapien
cttgttagttgacctaagagattcc

SEQ ID NO: 4776839 - DNA, 25 bp, Homo sapien
cctaagagattccattccaatgtgc

SEQ ID NO: 4776840 - DNA, 25 bp, Homo sapien
tccggagtggttcggtgtcagcacc

SEQ ID NO: 4776841 - DNA, 25 bp, Homo sapien
acatgtcgcaggagattccggagtg

SEQ ID NO: 4776842 - DNA, 25 bp, Homo sapien
ttgtctggctttcgtgggatagcca

SEQ ID NO: 4776843 - DNA, 25 bp, Homo sapien
tgggatagccagtgttttcccttgt

SEQ ID NO: 4776844 - DNA, 25 bp, Homo sapien
tttcgtgggatagccagtgttttcc

SEQ ID NO: 4776845 - DNA, 25 bp, Homo sapien
tggctttcgtgggatagccagtgtt

SEQ ID NO: 4776846 - DNA, 25 bp, Homo sapien
gcaaagactcgagccacagccactt

SEQ ID NO: 4776847 - DNA, 25 bp, Homo sapien
caaagactcgagccacagccactta

SEQ ID NO: 4776848 - DNA, 25 bp, Homo sapien
aggcaaagactcgagccacagccac

SEQ ID NO: 4776849 - DNA, 25 bp, Homo sapien
ggcaaagactcgagccacagccact

SEQ ID NO: 4776850 - DNA, 25 bp, Homo sapien
gagtgtcttgcgagcaccttgggaa

SEQ ID NO: 4776851 - DNA, 25 bp, Homo sapien
tgtcttgcgagcaccttgggaaccc

SEQ ID NO: 4776852 - DNA, 25 bp, Homo sapien
ctccagggagagtgtcttgcgagca

SEQ ID NO: 4776853 - DNA, 25 bp, Homo sapien
gcaccttgggaacccgtcagtttca

SEQ ID NO: 4776854 - DNA, 25 bp, Homo sapien
tgggcagccacttcacggcaatagc

SEQ ID NO: 4776855 - DNA, 25 bp, Homo sapien
caacgtgggttggaaatgcagtccc

SEQ ID NO: 4776856 - DNA, 25 bp, Homo sapien
gccacttcacggcaatagctcaact

SEQ ID NO: 4776857 - DNA, 25 bp, Homo sapien
tggcaagtggtcacaacaccctgcc

SEQ ID NO: 4776858 - DNA, 25 bp, Homo sapien
taacaagtctgtgctcttcaaaatg

SEQ ID NO: 4776859 - DNA, 25 bp, Homo sapien
caaaagtccgataccaattagatgg

SEQ ID NO: 4776860 - DNA, 25 bp, Homo sapien
gggcctgataatcctttgaatgaga

SEQ ID NO: 4776861 - DNA, 25 bp, Homo sapien
tcctcttatccaagggcctgataat

SEQ ID NO: 4776862 - DNA, 25 bp, Homo sapien
ctttctggagcccgatttccgacat

SEQ ID NO: 4776863 - DNA, 25 bp, Homo sapien
tgggtaccgtgacacgtcctggact

SEQ ID NO: 4776864 - DNA, 25 bp, Homo sapien
ggagtgggtaccgtgacacgtcctg

SEQ ID NO: 4776865 - DNA, 25 bp, Homo sapien
gtaccgtgacacgtcctggactctg

SEQ ID NO: 4776866 - DNA, 25 bp, Homo sapien
accgtgacacgtcctggactctgag

SEQ ID NO: 4776867 - DNA, 25 bp, Homo sapien
gtcagtgggttgtggttctcgggga

SEQ ID NO: 4776868 - DNA, 25 bp, Homo sapien
ttctcggggagaacgggaggatgga

SEQ ID NO: 4776869 - DNA, 25 bp, Homo sapien
ctgcagctaccgctgggaatggaag

SEQ ID NO: 4776870 - DNA, 25 bp, Homo sapien
agggaggcccaagaccggtgcgtgg

SEQ ID NO: 4776871 - DNA, 25 bp, Homo sapien
tctccttgggaggtgcgtctgtaac

SEQ ID NO: 4776872 - DNA, 25 bp, Homo sapien
atctctgctcgatccggtgcccttc

SEQ ID NO: 4776873 - DNA, 25 bp, Homo sapien
gagagcgcaaggaccacctcttctg

SEQ ID NO: 4776874 - DNA, 25 bp, Homo sapien
tgcctggaggcttttcgctttttgt

SEQ ID NO: 4776875 - DNA, 25 bp, Homo sapien
ttggggaccttaggtggatagtcat

SEQ ID NO: 4776876 - DNA, 25 bp, Homo sapien
ggaccttaggtggatagtcattaat

SEQ ID NO: 4776877 - DNA, 25 bp, Homo sapien
tttggggaccttaggtggatagtca

SEQ ID NO: 4776878 - DNA, 25 bp, Homo sapien
ggggaccttaggtggatagtcatta

SEQ ID NO: 4776879 - DNA, 25 bp, Homo sapien
gccggagcaccctccactaagagat

SEQ ID NO: 4776880 - DNA, 25 bp, Homo sapien
ttagggaccagtgactgtgaaggct

SEQ ID NO: 4776881 - DNA, 25 bp, Homo sapien
gagcaccctccactaagagatgcct

SEQ ID NO: 4776882 - DNA, 25 bp, Homo sapien
tgccacccacgactttagactttag

SEQ ID NO: 4776883 - DNA, 25 bp, Homo sapien
gatgttttccctcacccgtgattcc

SEQ ID NO: 4776884 - DNA, 25 bp, Homo sapien
catgtgggtgaacgtgtcccagtga

SEQ ID NO: 4776885 - DNA, 25 bp, Homo sapien
cctccatgtgggtgaacgtgtccca

SEQ ID NO: 4776886 - DNA, 25 bp, Homo sapien
acccgtgattccaagccactcacag

SEQ ID NO: 4776887 - DNA, 25 bp, Homo sapien
ggtccccgttggaggccacgcatgg

SEQ ID NO: 4776888 - DNA, 25 bp, Homo sapien
gagccctggaagacgaagttccaaa

SEQ ID NO: 4776889 - DNA, 25 bp, Homo sapien
caaagatcagtgacactcagagctc

SEQ ID NO: 4776890 - DNA, 25 bp, Homo sapien
aagttccaaagatcagtgacactca

SEQ ID NO: 4776891 - DNA, 25 bp, Homo sapien
tccaggttcgcaaggcgttgttgga

SEQ ID NO: 4776892 - DNA, 25 bp, Homo sapien
tcgcaaggcgttgttggagagggag

SEQ ID NO: 4776893 - DNA, 25 bp, Homo sapien
caccccaggtaacctgccagtctcc

SEQ ID NO: 4776894 - DNA, 25 bp, Homo sapien
ccagtctccaggttcgcaaggcgtt

SEQ ID NO: 4776895 - DNA, 25 bp, Homo sapien
agtgaagtaatagccctggaccacc

SEQ ID NO: 4776896 - DNA, 25 bp, Homo sapien
cagcagcattcaggtcaaactgcag

SEQ ID NO: 4776897 - DNA, 25 bp, Homo sapien
caaactgcagacaattggacgtaac

SEQ ID NO: 4776898 - DNA, 25 bp, Homo sapien
cagggagttttgtgctggccatgaa

SEQ ID NO: 4776899 - DNA, 25 bp, Homo sapien
gtaattgatcgacatgaccaacatg

SEQ ID NO: 4776900 - DNA, 25 bp, Homo sapien
ctggtctaatcagctgtggcaggtg

SEQ ID NO: 4776901 - DNA, 25 bp, Homo sapien
caggtgcaatgcacaatggcagagg

SEQ ID NO: 4776902 - DNA, 25 bp, Homo sapien
caccacgggagggacgttcctcttg

SEQ ID NO: 4776903 - DNA, 25 bp, Homo sapien
gagcaatgcagggaaagggttctca

SEQ ID NO: 4776904 - DNA, 25 bp, Homo sapien
cagggagcaatgcagggaaagggtt

SEQ ID NO: 4776905 - DNA, 25 bp, Homo sapien
ggagcagggagcaatgcagggaaag

SEQ ID NO: 4776906 - DNA, 25 bp, Homo sapien
gggagcaatgcagggaaagggttct

SEQ ID NO: 4776907 - DNA, 25 bp, Homo sapien
tcctctgtcaccctggctggagtac

SEQ ID NO: 4776908 - DNA, 25 bp, Homo sapien
tctttttgagtcaggatcttcctct

SEQ ID NO: 4776909 - DNA, 25 bp, Homo sapien
tttttctttttgagtcaggatcttc

SEQ ID NO: 4776910 - DNA, 25 bp, Homo sapien
ttctttttgagtcaggatcttcctc

SEQ ID NO: 4776911 - DNA, 25 bp, Homo sapien
cagaagtgaaaatgcgtcgctgctg

SEQ ID NO: 4776912 - DNA, 25 bp, Homo sapien
gaggtcggtcgtcttccaaaccgca

SEQ ID NO: 4776913 - DNA, 25 bp, Homo sapien
ctccaggtcggaatagaggtcggtc

SEQ ID NO: 4776914 - DNA, 25 bp, Homo sapien
gaaatctattcaaagaaatgtgcct

SEQ ID NO: 4776915 - DNA, 25 bp, Homo sapien
tctcacagtgtgattgcaaaaccca

SEQ ID NO: 4776916 - DNA, 25 bp, Homo sapien
ctcggtttgacgtctcagggtagag

SEQ ID NO: 4776917 - DNA, 25 bp, Homo sapien
aaacccagcagaattgtaggggaag

SEQ ID NO: 4776918 - DNA, 25 bp, Homo sapien
gacgtctcagggtagagtttctcac

SEQ ID NO: 4776919 - DNA, 25 bp, Homo sapien
caccacttgtggatgttgtgaagcg

SEQ ID NO: 4776920 - DNA, 25 bp, Homo sapien
agttgtgacatctgggtcccgaata

SEQ ID NO: 4776921 - DNA, 25 bp, Homo sapien
tgacattacacacggcattggaggg

SEQ ID NO: 4776922 - DNA, 25 bp, Homo sapien
catgtggtggcagaacgcaaccaaa

SEQ ID NO: 4776923 - DNA, 25 bp, Homo sapien
gtagccactacctgtctccttctga

SEQ ID NO: 4776924 - DNA, 25 bp, Homo sapien
cttcagaggatttagtccggagaga

SEQ ID NO: 4776925 - DNA, 25 bp, Homo sapien
cagaggatttagtccggagagaagc

SEQ ID NO: 4776926 - DNA, 25 bp, Homo sapien
gctgcggtggatgcgttcgtagcgt

SEQ ID NO: 4776927 - DNA, 25 bp, Homo sapien
aagggcattcaaggttacaagaggg

SEQ ID NO: 4776928 - DNA, 25 bp, Homo sapien
caaagggcattcaaggttacaagag

SEQ ID NO: 4776929 - DNA, 25 bp, Homo sapien
tacaaagggcattcaaggttacaag

SEQ ID NO: 4776930 - DNA, 25 bp, Homo sapien
tttacaaagggcattcaaggttaca

SEQ ID NO: 4776931 - DNA, 25 bp, Homo sapien
accacgtaatgagctgttctcctgc

SEQ ID NO: 4776932 - DNA, 25 bp, Homo sapien
gagctgttctcctgcacaaaagcct

SEQ ID NO: 4776933 - DNA, 25 bp, Homo sapien
taccacgtaatgagctgttctcctg

SEQ ID NO: 4776934 - DNA, 25 bp, Homo sapien
ctgttctcctgcacaaaagccttac

SEQ ID NO: 4776935 - DNA, 25 bp, Homo sapien
cactgtaggcccaggctcggagctt

SEQ ID NO: 4776936 - DNA, 25 bp, Homo sapien
gcccaggctcggagcttccaggtat

SEQ ID NO: 4776937 - DNA, 25 bp, Homo sapien
caggctcggagcttccaggtatgcc

SEQ ID NO: 4776938 - DNA, 25 bp, Homo sapien
tttcttgccactgtaggcccaggct

SEQ ID NO: 4776939 - DNA, 25 bp, Homo sapien
gtcagacccttggtaccactgagct

SEQ ID NO: 4776940 - DNA, 25 bp, Homo sapien
ctgtcagacccttggtaccactgag

SEQ ID NO: 4776941 - DNA, 25 bp, Homo sapien
tgtctggtgttataactgtcagacc

SEQ ID NO: 4776942 - DNA, 25 bp, Homo sapien
taaaccttaagagccacagcggaga

SEQ ID NO: 4776943 - DNA, 25 bp, Homo sapien
gcaaatagccctttttactccagat

SEQ ID NO: 4776944 - DNA, 25 bp, Homo sapien
gaaacattggatcttcctgactgaa

SEQ ID NO: 4776945 - DNA, 25 bp, Homo sapien
cactgatctgcaggtgagttgtgcg

SEQ ID NO: 4776946 - DNA, 25 bp, Homo sapien
tccagtgacagctacagagcaggcc

SEQ ID NO: 4776947 - DNA, 25 bp, Homo sapien
ctaggccgggttttcgatgcctgtg

SEQ ID NO: 4776948 - DNA, 25 bp, Homo sapien
gccgggttttcgatgcctgtggccc

SEQ ID NO: 4776949 - DNA, 25 bp, Homo sapien
ggttttcgatgcctgtggccctgtc

SEQ ID NO: 4776950 - DNA, 25 bp, Homo sapien
tttcgatgcctgtggccctgtcagc

SEQ ID NO: 4776951 - DNA, 25 bp, Homo sapien
gcaggtgggcggctgtaaaatcttt

SEQ ID NO: 4776952 - DNA, 25 bp, Homo sapien
accggcagtacccatggtccaggaa

SEQ ID NO: 4776953 - DNA, 25 bp, Homo sapien
ctcaagctttcgctggagtcctcgg

SEQ ID NO: 4776954 - DNA, 25 bp, Homo sapien
caaaaactccctgttcgtatctggt

SEQ ID NO: 4776955 - DNA, 25 bp, Homo sapien
gccagcttccgcgaccttgatctca

SEQ ID NO: 4776956 - DNA, 25 bp, Homo sapien
gcgaccttgatctcagccaatcctg

SEQ ID NO: 4776957 - DNA, 25 bp, Homo sapien
ttccgcgaccttgatctcagccaat

SEQ ID NO: 4776958 - DNA, 25 bp, Homo sapien
gaccttgatctcagccaatcctgtt

SEQ ID NO: 4776959 - DNA, 25 bp, Homo sapien
caggtagcattgcagacagactgac

SEQ ID NO: 4776960 - DNA, 25 bp, Homo sapien
catcacagttaccacaagggttaag

SEQ ID NO: 4776961 - DNA, 25 bp, Homo sapien
cacaagggttaaggatgcaggtagc

SEQ ID NO: 4776962 - DNA, 25 bp, Homo sapien
tggcttggccaattagcttagcttc

SEQ ID NO: 4776963 - DNA, 25 bp, Homo sapien
tcagatatggatggtgtcaacaggg

SEQ ID NO: 4776964 - DNA, 25 bp, Homo sapien
ctctgccaagccatagttcttcagc

SEQ ID NO: 4776965 - DNA, 25 bp, Homo sapien
tcttcagctcagatatggatggtgt

SEQ ID NO: 4776966 - DNA, 25 bp, Homo sapien
tcagcctgaatctaactctgccaag

SEQ ID NO: 4776967 - DNA, 25 bp, Homo sapien
ttctcctacacccagtgccccgact

SEQ ID NO: 4776968 - DNA, 25 bp, Homo sapien
ctacacccagtgccccgactccctc

SEQ ID NO: 4776969 - DNA, 25 bp, Homo sapien
tctcctacacccagtgccccgactc

SEQ ID NO: 4776970 - DNA, 25 bp, Homo sapien
tcctacacccagtgccccgactccc

SEQ ID NO: 4776971 - DNA, 25 bp, Homo sapien
taatagcagtaaagcttgtcaatga

SEQ ID NO: 4776972 - DNA, 25 bp, Homo sapien
gcttgtcaatgatgggaaggttgct

SEQ ID NO: 4776973 - DNA, 25 bp, Homo sapien
atgggaaggttgctgaacacatctg

SEQ ID NO: 4776974 - DNA, 25 bp, Homo sapien
gtaatagcagtaaagcttgtcaatg

SEQ ID NO: 4776975 - DNA, 25 bp, Homo sapien
cctcagcttgctgttcccaagaggg

SEQ ID NO: 4776976 - DNA, 25 bp, Homo sapien
tcagcttgctgttcccaagagggca

SEQ ID NO: 4776977 - DNA, 25 bp, Homo sapien
ctcagcttgctgttcccaagagggc

SEQ ID NO: 4776978 - DNA, 25 bp, Homo sapien
tacttccttagggtgcggaggagtg

SEQ ID NO: 4776979 - DNA, 25 bp, Homo sapien
tctgctctcagtccgtcaggcttgc

SEQ ID NO: 4776980 - DNA, 25 bp, Homo sapien
tgcggaggagtggtcttctctgctc

SEQ ID NO: 4776981 - DNA, 25 bp, Homo sapien
caggacagagctctgacgttgcatg

SEQ ID NO: 4776982 - DNA, 25 bp, Homo sapien
tctctgcttagagatatactgcata

SEQ ID NO: 4776983 - DNA, 25 bp, Homo sapien
catattatcatatgcagtgcaggca

SEQ ID NO: 4776984 - DNA, 25 bp, Homo sapien
tgaggttgagtcctgtcactgtccg

SEQ ID NO: 4776985 - DNA, 25 bp, Homo sapien
ccctgctcgtgggaagaagcatctt

SEQ ID NO: 4776986 - DNA, 25 bp, Homo sapien
gattgctggattaaaatgtgatcta

SEQ ID NO: 4776987 - DNA, 25 bp, Homo sapien
aattccataccttttgccataatgg

SEQ ID NO: 4776988 - DNA, 25 bp, Homo sapien
gagtggaggtacctctttgaaatac

SEQ ID NO: 4776989 - DNA, 25 bp, Homo sapien
tccaaattgttggacacaaaagtcg

SEQ ID NO: 4776990 - DNA, 25 bp, Homo sapien
tgagatgtcctgtatccaagtcctg

SEQ ID NO: 4776991 - DNA, 25 bp, Homo sapien
atgtagtgagatgtcctgtatccaa

SEQ ID NO: 4776992 - DNA, 25 bp, Homo sapien
tcctgtatccaagtcctgccaatgt

SEQ ID NO: 4776993 - DNA, 25 bp, Homo sapien
gatgtcctgtatccaagtcctgcca

SEQ ID NO: 4776994 - DNA, 25 bp, Homo sapien
cagaggaccagacacacgtgcatat

SEQ ID NO: 4776995 - DNA, 25 bp, Homo sapien
gttttcaaggcacccattctggtca

SEQ ID NO: 4776996 - DNA, 25 bp, Homo sapien
tgagcggccgcttgttttatacatg

SEQ ID NO: 4776997 - DNA, 25 bp, Homo sapien
tttccctaagattaatgagcggccg

SEQ ID NO: 4776998 - DNA, 25 bp, Homo sapien
tctggttcactgcatggaggtgcta

SEQ ID NO: 4776999 - DNA, 25 bp, Homo sapien
ttgagttccaggtccaacggcttca

SEQ ID NO: 4777000 - DNA, 25 bp, Homo sapien
aaagcaccaatcagtgttctgtagg

SEQ ID NO: 4777001 - DNA, 25 bp, Homo sapien
cacaaagacttgatcaggtgtcaat

SEQ ID NO: 4777002 - DNA, 25 bp, Homo sapien
gggcctaggcagtaattcgcactca

SEQ ID NO: 4777003 - DNA, 25 bp, Homo sapien
tagtgtgcattcaacagggcctagg

SEQ ID NO: 4777004 - DNA, 25 bp, Homo sapien
taaaattagttgaacgcagccctga

SEQ ID NO: 4777005 - DNA, 25 bp, Homo sapien
gaaggactttcgtgcctgatggtga

SEQ ID NO: 4777006 - DNA, 25 bp, Homo sapien
gagaatttgtttggcccgattgtgc

SEQ ID NO: 4777007 - DNA, 25 bp, Homo sapien
agtcctatttccgtctgctgcaaga

SEQ ID NO: 4777008 - DNA, 25 bp, Homo sapien
ttggtcgtgataaacttagtatttc

SEQ ID NO: 4777009 - DNA, 25 bp, Homo sapien
caagatgttgtggatctacatccaa

SEQ ID NO: 4777010 - DNA, 25 bp, Homo sapien
catgacctttcgttcctgtgtatcc

SEQ ID NO: 4777011 - DNA, 25 bp, Homo sapien
gttttcagcaccagacatgtcattt

SEQ ID NO: 4777012 - DNA, 25 bp, Homo sapien
acatctcctggtcccagtagggttg

SEQ ID NO: 4777013 - DNA, 25 bp, Homo sapien
cagtgagcaatggtttccagagcaa

SEQ ID NO: 4777014 - DNA, 25 bp, Homo sapien
ggcaagacccagaggacatctacct

SEQ ID NO: 4777015 - DNA, 25 bp, Homo sapien
gatgcctttgcagtctgaatgtggc

SEQ ID NO: 4777016 - DNA, 25 bp, Homo sapien
agagacccggcagggactccagaag

SEQ ID NO: 4777017 - DNA, 25 bp, Homo sapien
catggccccttcagtaggatgcctt

SEQ ID NO: 4777018 - DNA, 25 bp, Homo sapien
gagagattctgtcactccaaaggtg

SEQ ID NO: 4777019 - DNA, 25 bp, Homo sapien
ctagggcagatggagaaggactatt

SEQ ID NO: 4777020 - DNA, 25 bp, Homo sapien
ggaagtctcttcagccaactacatg

SEQ ID NO: 4777021 - DNA, 25 bp, Homo sapien
cagagatgacataggtggctctcca

SEQ ID NO: 4777022 - DNA, 25 bp, Homo sapien
taagagtcccgaccctctaatgctg

SEQ ID NO: 4777023 - DNA, 25 bp, Homo sapien
ccattggtggtcaacaacctttcca

SEQ ID NO: 4777024 - DNA, 25 bp, Homo sapien
gctccgtgtgttcagctatgcagaa

SEQ ID NO: 4777025 - DNA, 25 bp, Homo sapien
ctctaggaagctccgtgtgttcagc

SEQ ID NO: 4777026 - DNA, 25 bp, Homo sapien
aaccataggcttgcagggatgccca

SEQ ID NO: 4777027 - DNA, 25 bp, Homo sapien
tgcattctgcttcaggaccctggtg

SEQ ID NO: 4777028 - DNA, 25 bp, Homo sapien
taaccatcctagaaaagttgctggg

SEQ ID NO: 4777029 - DNA, 25 bp, Homo sapien
tctggagggacccaaggtatggcac

SEQ ID NO: 4777030 - DNA, 25 bp, Homo sapien
ccttagtctcaatggagaggactct

SEQ ID NO: 4777031 - DNA, 25 bp, Homo sapien
agcccctagggctgagtatggttcc

SEQ ID NO: 4777032 - DNA, 25 bp, Homo sapien
cacaatgaagggattggaagtctcc

SEQ ID NO: 4777033 - DNA, 25 bp, Homo sapien
gattggctgctcactaagcctgatg

SEQ ID NO: 4777034 - DNA, 25 bp, Homo sapien
ccctgtgaggcggtaaatggactct

SEQ ID NO: 4777035 - DNA, 25 bp, Homo sapien
caatgagtttgtgtagcgcagcgga

SEQ ID NO: 4777036 - DNA, 25 bp, Homo sapien
taaatttcggttgagcatcaatgcc

SEQ ID NO: 4777037 - DNA, 25 bp, Homo sapien
tataggagtaataacggcccctgtg

SEQ ID NO: 4777038 - DNA, 25 bp, Homo sapien
gatgcccacgtgtagagggcacaga

SEQ ID NO: 4777039 - DNA, 25 bp, Homo sapien
atgcccacgtgtagagggcacagac

SEQ ID NO: 4777040 - DNA, 25 bp, Homo sapien
ctgatgcccacgtgtagagggcaca

SEQ ID NO: 4777041 - DNA, 25 bp, Homo sapien
tgatgcccacgtgtagagggcacag

SEQ ID NO: 4777042 - DNA, 25 bp, Homo sapien
cttccagaacgcatgcacctctgct

SEQ ID NO: 4777043 - DNA, 25 bp, Homo sapien
atgcccagtgaggataggaagcaga

SEQ ID NO: 4777044 - DNA, 25 bp, Homo sapien
ctgtgatgcccagtgaggataggaa

SEQ ID NO: 4777045 - DNA, 25 bp, Homo sapien
ttacatcctgcaggaaaatcctctc

SEQ ID NO: 4777046 - DNA, 25 bp, Homo sapien
gtaaactggtgattttttggacaga

SEQ ID NO: 4777047 - DNA, 25 bp, Homo sapien
aactggtgattttttggacagagct

SEQ ID NO: 4777048 - DNA, 25 bp, Homo sapien
gacagagcttgggagaatatctggg

SEQ ID NO: 4777049 - DNA, 25 bp, Homo sapien
gaatatctggggcagaaccggaaga

SEQ ID NO: 4777050 - DNA, 25 bp, Homo sapien
tggtgccgcagttcataatctctac

SEQ ID NO: 4777051 - DNA, 25 bp, Homo sapien
gatgtgcagtatcttgtaatcctga

SEQ ID NO: 4777052 - DNA, 25 bp, Homo sapien
gaaatgtaggttctttcagcctgcc

SEQ ID NO: 4777053 - DNA, 25 bp, Homo sapien
gaaacacactaagaatggtgccgca

SEQ ID NO: 4777054 - DNA, 25 bp, Homo sapien
tttgcagagagctgtcccctaggga

SEQ ID NO: 4777055 - DNA, 25 bp, Homo sapien
cactcagacgtggaatgtagtacaa

SEQ ID NO: 4777056 - DNA, 25 bp, Homo sapien
tggtaagactgaataaccgtccagg

SEQ ID NO: 4777057 - DNA, 25 bp, Homo sapien
gaaggatcacacatgggcctcaagc

SEQ ID NO: 4777058 - DNA, 25 bp, Homo sapien
gatttggtggcttcaattatagaaa

SEQ ID NO: 4777059 - DNA, 25 bp, Homo sapien
gatggaagcctgagctccacgtgtc

SEQ ID NO: 4777060 - DNA, 25 bp, Homo sapien
taacaaagtacaacagatttggtgg

SEQ ID NO: 4777061 - DNA, 25 bp, Homo sapien
ctgtagaagtagagagttcaattcc

SEQ ID NO: 4777062 - DNA, 25 bp, Homo sapien
tattaccaggcctaattcccatgtt

SEQ ID NO: 4777063 - DNA, 25 bp, Homo sapien
gggccactcctcactgcctattgga

SEQ ID NO: 4777064 - DNA, 25 bp, Homo sapien
tctaggcaaagttatctcttgcata

SEQ ID NO: 4777065 - DNA, 25 bp, Homo sapien
ggactctgagacaccagaacagatg

SEQ ID NO: 4777066 - DNA, 25 bp, Homo sapien
tgagaagagccgtgcctaggaaacc

SEQ ID NO: 4777067 - DNA, 25 bp, Homo sapien
tccatgggtagagtgccagaaaacc

SEQ ID NO: 4777068 - DNA, 25 bp, Homo sapien
ttaatatggcaacacgtacgagtgc

SEQ ID NO: 4777069 - DNA, 25 bp, Homo sapien
gattaagaccaaccaaccttgtgga

SEQ ID NO: 4777070 - DNA, 25 bp, Homo sapien
ctatgctacaggtcagaaactggga

SEQ ID NO: 4777071 - DNA, 25 bp, Homo sapien
tatgctacaggtcagaaactgggat

SEQ ID NO: 4777072 - DNA, 25 bp, Homo sapien
agagagagggactatgctacaggtc

SEQ ID NO: 4777073 - DNA, 25 bp, Homo sapien
gagtattttgcctcaataatcttaa

SEQ ID NO: 4777074 - DNA, 25 bp, Homo sapien
cttttaatacactcttgaatttggc

SEQ ID NO: 4777075 - DNA, 25 bp, Homo sapien
agggtattgaactatgtcaaatact

SEQ ID NO: 4777076 - DNA, 25 bp, Homo sapien
ttttgcctcaataatcttaagggat

SEQ ID NO: 4777077 - DNA, 25 bp, Homo sapien
cattttgattgggaaagatacacag

SEQ ID NO: 4777078 - DNA, 25 bp, Homo sapien
tttcaatagggtctttgtgtggcaa

SEQ ID NO: 4777079 - DNA, 25 bp, Homo sapien
gagtgcaagattctagcttcaaaga

SEQ ID NO: 4777080 - DNA, 25 bp, Homo sapien
ggagaatgctccctgtgcagttgag

SEQ ID NO: 4777081 - DNA, 25 bp, Homo sapien
aaatttttcgatctgttgagatgac

SEQ ID NO: 4777082 - DNA, 25 bp, Homo sapien
taatttcacttgtcatggtgtcctt

SEQ ID NO: 4777083 - DNA, 25 bp, Homo sapien
tgctatcaagatttaaccaagttta

SEQ ID NO: 4777084 - DNA, 25 bp, Homo sapien
tatttgcattcttgaggtaaaccca

SEQ ID NO: 4777085 - DNA, 25 bp, Homo sapien
tgattcatctcaccagtggtttgcc

SEQ ID NO: 4777086 - DNA, 25 bp, Homo sapien
gcaatatagatttgaacacttgggc

SEQ ID NO: 4777087 - DNA, 25 bp, Homo sapien
tggatgttgaaacaccaggactcag

SEQ ID NO: 4777088 - DNA, 25 bp, Homo sapien
gcatgagccagtgtccggctccttt

SEQ ID NO: 4777089 - DNA, 25 bp, Homo sapien
gaatataagttcatttattggaaca

SEQ ID NO: 4777090 - DNA, 25 bp, Homo sapien
ggaacaatactcattcaaacccact

SEQ ID NO: 4777091 - DNA, 25 bp, Homo sapien
gattcttctagtctctcttgataat

SEQ ID NO: 4777092 - DNA, 25 bp, Homo sapien
tcttgaaaggcaactaggaaaagtc

SEQ ID NO: 4777093 - DNA, 25 bp, Homo sapien
tactgtggtaacatacaagtgtggg

SEQ ID NO: 4777094 - DNA, 25 bp, Homo sapien
gacacttagatcgattccatgacgt

SEQ ID NO: 4777095 - DNA, 25 bp, Homo sapien
aaatggtgttggtgaatattcaagg

SEQ ID NO: 4777096 - DNA, 25 bp, Homo sapien
tcagtagtgggattcgtgcatcaaa

SEQ ID NO: 4777097 - DNA, 25 bp, Homo sapien
tgctgatgtgatcaagggcagagac

SEQ ID NO: 4777098 - DNA, 25 bp, Homo sapien
tggcaaaaggattctgctgatgtga

SEQ ID NO: 4777099 - DNA, 25 bp, Homo sapien
atggcaaaaggattctgctgatgtg

SEQ ID NO: 4777100 - DNA, 25 bp, Homo sapien
gattctgctgatgtgatcaagggca

SEQ ID NO: 4777101 - DNA, 25 bp, Homo sapien
tcctggattactcaggtgagccctc

SEQ ID NO: 4777102 - DNA, 25 bp, Homo sapien
ttactcaggtgagccctcagaatct

SEQ ID NO: 4777103 - DNA, 25 bp, Homo sapien
aggtgagccctcagaatcttttcca

SEQ ID NO: 4777104 - DNA, 25 bp, Homo sapien
ttttccagctgcaatcagcggtaga

SEQ ID NO: 4777105 - DNA, 25 bp, Homo sapien
gagatggcatatcactggctttgaa

SEQ ID NO: 4777106 - DNA, 25 bp, Homo sapien
gatggcatatcactggctttgaaga

SEQ ID NO: 4777107 - DNA, 25 bp, Homo sapien
tcagagagatggcatatcactggct

SEQ ID NO: 4777108 - DNA, 25 bp, Homo sapien
gagagatggcatatcactggctttg

SEQ ID NO: 4777109 - DNA, 25 bp, Homo sapien
agtgtcaagaggccgtgtccttcat

SEQ ID NO: 4777110 - DNA, 25 bp, Homo sapien
gtcaagaggccgtgtccttcattca

SEQ ID NO: 4777111 - DNA, 25 bp, Homo sapien
ggagtgtcaagaggccgtgtccttc

SEQ ID NO: 4777112 - DNA, 25 bp, Homo sapien
tgtcaagaggccgtgtccttcattc

SEQ ID NO: 4777113 - DNA, 25 bp, Homo sapien
atgctcccgggctcagtgcagacgg

SEQ ID NO: 4777114 - DNA, 25 bp, Homo sapien
gaaccgccagaaacgtcagatggta

SEQ ID NO: 4777115 - DNA, 25 bp, Homo sapien
tcagcgttctctcgcgttcaacgaa

SEQ ID NO: 4777116 - DNA, 25 bp, Homo sapien
tcagatggtacggaggaaaacactt

SEQ ID NO: 4777117 - DNA, 25 bp, Homo sapien
tttatgactcactataaagtgtagg

SEQ ID NO: 4777118 - DNA, 25 bp, Homo sapien
tgtcccggggagctctccaaggaag

SEQ ID NO: 4777119 - DNA, 25 bp, Homo sapien
tgtaggatccaagaaaacgcgctag

SEQ ID NO: 4777120 - DNA, 25 bp, Homo sapien
gggtgctgcaccaccacggaagaac

SEQ ID NO: 4777121 - DNA, 25 bp, Homo sapien
cagttatttctagcttcgcacagcg

SEQ ID NO: 4777122 - DNA, 25 bp, Homo sapien
gcccgagagaactaggtgaacaccg

SEQ ID NO: 4777123 - DNA, 25 bp, Homo sapien
ccaatgacaattcgggagcccgttc

SEQ ID NO: 4777124 - DNA, 25 bp, Homo sapien
gagacatcgggaagattgctccgcc

SEQ ID NO: 4777125 - DNA, 25 bp, Homo sapien
gcgttggccgccattggcctgccgg

SEQ ID NO: 4777126 - DNA, 25 bp, Homo sapien
ttcgggttgccgaagagcgatgctc

SEQ ID NO: 4777127 - DNA, 25 bp, Homo sapien
gagggcggccggaagtggcgttggc

SEQ ID NO: 4777128 - DNA, 25 bp, Homo sapien
tccatcctgtggcttcgggttgccg

SEQ ID NO: 4777129 - DNA, 25 bp, Homo sapien
gagaataatgggtaccctacgctaa

SEQ ID NO: 4777130 - DNA, 25 bp, Homo sapien
tacgctaaataggtggactgggagc

SEQ ID NO: 4777131 - DNA, 25 bp, Homo sapien
tgatggtggcatgctttaagacaga

SEQ ID NO: 4777132 - DNA, 25 bp, Homo sapien
tgggctaaaactggtctgacacttt

SEQ ID NO: 4777133 - DNA, 25 bp, Homo sapien
tgtttaaggaaagcagccacctcca

SEQ ID NO: 4777134 - DNA, 25 bp, Homo sapien
caagtgttgatgtagaaaagctgca

SEQ ID NO: 4777135 - DNA, 25 bp, Homo sapien
ttagagactaatggagctggtgact

SEQ ID NO: 4777136 - DNA, 25 bp, Homo sapien
taagatcattgttgaaggtacctac

SEQ ID NO: 4777137 - DNA, 25 bp, Homo sapien
agatggcagcatacccaggcaggat

SEQ ID NO: 4777138 - DNA, 25 bp, Homo sapien
gatgtatacccagaaatgacctgag

SEQ ID NO: 4777139 - DNA, 25 bp, Homo sapien
cacaccctgctaattagtgaaggtc

SEQ ID NO: 4777140 - DNA, 25 bp, Homo sapien
gagaagacttttagccttcacccca

SEQ ID NO: 4777141 - DNA, 25 bp, Homo sapien
gagaaaaaagtgttcccaatcactg

SEQ ID NO: 4777142 - DNA, 25 bp, Homo sapien
tatcgcgtcaatattacttcagcac

SEQ ID NO: 4777143 - DNA, 25 bp, Homo sapien
ccattgctagcagcccaaacacagt

SEQ ID NO: 4777144 - DNA, 25 bp, Homo sapien
aagccactaaatgggaggtccattc

SEQ ID NO: 4777145 - DNA, 25 bp, Homo sapien
ccttttgtcaggtatattagtccat

SEQ ID NO: 4777146 - DNA, 25 bp, Homo sapien
ggtgaaagtcataccttacatggca

SEQ ID NO: 4777147 - DNA, 25 bp, Homo sapien
ttgctgttaaagacacaccagagac

SEQ ID NO: 4777148 - DNA, 25 bp, Homo sapien
tctctccttttgtcaggtatattag

SEQ ID NO: 4777149 - DNA, 25 bp, Homo sapien
ctcccaaacaactcttatgcctcag

SEQ ID NO: 4777150 - DNA, 25 bp, Homo sapien
cctcccaaacaactcttatgcctca

SEQ ID NO: 4777151 - DNA, 25 bp, Homo sapien
ttggccaggcgtagagtgcttccga

SEQ ID NO: 4777152 - DNA, 25 bp, Homo sapien
tcactgtcacgagagcagcgttcag

SEQ ID NO: 4777153 - DNA, 25 bp, Homo sapien
ttctgaaatacacacccgggatgct

SEQ ID NO: 4777154 - DNA, 25 bp, Homo sapien
caaggcttccgcagctcaaaaggag

SEQ ID NO: 4777155 - DNA, 25 bp, Homo sapien
ggagggcggcgcagccctctgcggg

SEQ ID NO: 4777156 - DNA, 25 bp, Homo sapien
atggcggcctatgggaaagcagtct

SEQ ID NO: 4777157 - DNA, 25 bp, Homo sapien
gaaagcagtctccactggatcccgc

SEQ ID NO: 4777158 - DNA, 25 bp, Homo sapien
ctggatggcggcctatgggaaagca

SEQ ID NO: 4777159 - DNA, 25 bp, Homo sapien
ctggagccgggagggtccgctccct

SEQ ID NO: 4777160 - DNA, 25 bp, Homo sapien
cggagtaattcagagcccgtcagcc

SEQ ID NO: 4777161 - DNA, 25 bp, Homo sapien
gtcagccccacgccgagtttattca

SEQ ID NO: 4777162 - DNA, 25 bp, Homo sapien
tcggcttgtaagcaacggagtaatt

SEQ ID NO: 4777163 - DNA, 25 bp, Homo sapien
taagcaacggagtaattcagagccc

SEQ ID NO: 4777164 - DNA, 25 bp, Homo sapien
ggagccatgacccttcctaactggg

SEQ ID NO: 4777165 - DNA, 25 bp, Homo sapien
ccgggtccgggccagacggcagcga

SEQ ID NO: 4777166 - DNA, 25 bp, Homo sapien
gggcttccgcgggagccatgaccct

SEQ ID NO: 4777167 - DNA, 25 bp, Homo sapien
gtccgggccagacggcagcgagtgt

SEQ ID NO: 4777168 - DNA, 25 bp, Homo sapien
tagggatgctgaatgggtcaggcag

SEQ ID NO: 4777169 - DNA, 25 bp, Homo sapien
gggatgctgaatgggtcaggcagtg

SEQ ID NO: 4777170 - DNA, 25 bp, Homo sapien
ctgttaatagggatgctgaatgggt

SEQ ID NO: 4777171 - DNA, 25 bp, Homo sapien
ttaatagggatgctgaatgggtcag

SEQ ID NO: 4777172 - DNA, 25 bp, Homo sapien
tctgagtttctggagatgggcaaga

SEQ ID NO: 4777173 - DNA, 25 bp, Homo sapien
gatgggcaagatggagcagtctcca

SEQ ID NO: 4777174 - DNA, 25 bp, Homo sapien
taatggatgggtggtctgagtttct

SEQ ID NO: 4777175 - DNA, 25 bp, Homo sapien
acacttggctcttcagccccggcgc

SEQ ID NO: 4777176 - DNA, 25 bp, Homo sapien
ctgtgcattgacctattatgtaata

SEQ ID NO: 4777177 - DNA, 25 bp, Homo sapien
tatttctgtgcattgacctattatg

SEQ ID NO: 4777178 - DNA, 25 bp, Homo sapien
tttctgtgcattgacctattatgta

SEQ ID NO: 4777179 - DNA, 25 bp, Homo sapien
tctgtgcattgacctattatgtaat

SEQ ID NO: 4777180 - DNA, 25 bp, Homo sapien
gaatggagcccggagtttctcagca

SEQ ID NO: 4777181 - DNA, 25 bp, Homo sapien
gggacccgggagcataactgaacaa

SEQ ID NO: 4777182 - DNA, 25 bp, Homo sapien
gaaccgaggattgcagtaaccaggg

SEQ ID NO: 4777183 - DNA, 25 bp, Homo sapien
tctggccacacgtatgtagacatgc

SEQ ID NO: 4777184 - DNA, 25 bp, Homo sapien
agcagcttgcaccacgtaaccccaa

SEQ ID NO: 4777185 - DNA, 25 bp, Homo sapien
cagcttgcaccacgtaaccccaaag

SEQ ID NO: 4777186 - DNA, 25 bp, Homo sapien
cagagcagcttgcaccacgtaaccc

SEQ ID NO: 4777187 - DNA, 25 bp, Homo sapien
cttgcaccacgtaaccccaaagctt

SEQ ID NO: 4777188 - DNA, 25 bp, Homo sapien
actaggagtagcaggaagggacact

SEQ ID NO: 4777189 - DNA, 25 bp, Homo sapien
ggattcccctgcataaaattcccca

SEQ ID NO: 4777190 - DNA, 25 bp, Homo sapien
gatggcagcgagtttctgttaacag

SEQ ID NO: 4777191 - DNA, 25 bp, Homo sapien
tgcttccagtgtcaagttctatagg

SEQ ID NO: 4777192 - DNA, 25 bp, Homo sapien
tcaacttgcaaggaactgtgcgcgg

SEQ ID NO: 4777193 - DNA, 25 bp, Homo sapien
gatttgtatttagagtctagtcagg

SEQ ID NO: 4777194 - DNA, 25 bp, Homo sapien
tgtatttagagtctagtcagggaaa

SEQ ID NO: 4777195 - DNA, 25 bp, Homo sapien
tgtgcgcggtgttaagaccatgcct

SEQ ID NO: 4777196 - DNA, 25 bp, Homo sapien
atctcctgttgttggtcgatattgg

SEQ ID NO: 4777197 - DNA, 25 bp, Homo sapien
tggcaagccaagattcagatatggt

SEQ ID NO: 4777198 - DNA, 25 bp, Homo sapien
tattggaggattgagtggcaagcca

SEQ ID NO: 4777199 - DNA, 25 bp, Homo sapien
ccccctcagatagagagaatctcct

SEQ ID NO: 4777200 - DNA, 25 bp, Homo sapien
tgctgacgggaacaggctcctgtcc

SEQ ID NO: 4777201 - DNA, 25 bp, Homo sapien
ctctgctgacgggaacaggctcctg

SEQ ID NO: 4777202 - DNA, 25 bp, Homo sapien
gggctctgctgacgggaacaggctc

SEQ ID NO: 4777203 - DNA, 25 bp, Homo sapien
cgatctgcggccaccacgccgccct

SEQ ID NO: 4777204 - DNA, 25 bp, Homo sapien
gagacggagtgaccggcaggacagg

SEQ ID NO: 4777205 - DNA, 25 bp, Homo sapien
ctagttcccggcaaagcaggtggga

SEQ ID NO: 4777206 - DNA, 25 bp, Homo sapien
gtgggagacggagtgaccggcagga

SEQ ID NO: 4777207 - DNA, 25 bp, Homo sapien
ggtgtgtgctctagttcccggcaaa

SEQ ID NO: 4777208 - DNA, 25 bp, Homo sapien
cccggccgctctttctcagcattct

SEQ ID NO: 4777209 - DNA, 25 bp, Homo sapien
tccaagccgactcctcagccttcta

SEQ ID NO: 4777210 - DNA, 25 bp, Homo sapien
aggctagctcccaggggcgcctgtc

SEQ ID NO: 4777211 - DNA, 25 bp, Homo sapien
atccgcgccgccttgccgagaccct

SEQ ID NO: 4777212 - DNA, 25 bp, Homo sapien
ttctctgcgagagcctaggtctgac

SEQ ID NO: 4777213 - DNA, 25 bp, Homo sapien
taggtctgactctaactctgccctg

SEQ ID NO: 4777214 - DNA, 25 bp, Homo sapien
tccgctttctaggagcgcgtgacat

SEQ ID NO: 4777215 - DNA, 25 bp, Homo sapien
agctgggagcgcgatgcagttctct

SEQ ID NO: 4777216 - DNA, 25 bp, Homo sapien
catgatgtatctgccactggtgctc

SEQ ID NO: 4777217 - DNA, 25 bp, Homo sapien
tggtgctcagccagaacaaactctg

SEQ ID NO: 4777218 - DNA, 25 bp, Homo sapien
tcccaacaagcaaagtagggcttcc

SEQ ID NO: 4777219 - DNA, 25 bp, Homo sapien
gagaaaataatttcccggcatcagc

SEQ ID NO: 4777220 - DNA, 25 bp, Homo sapien
cagctccactcatgttgggcagctg

SEQ ID NO: 4777221 - DNA, 25 bp, Homo sapien
ggaccccagatctgaaaagccactc

SEQ ID NO: 4777222 - DNA, 25 bp, Homo sapien
ggccagggaccccagatctgaaaag

SEQ ID NO: 4777223 - DNA, 25 bp, Homo sapien
tggaaacccccaggaacgagcagct

SEQ ID NO: 4777224 - DNA, 25 bp, Homo sapien
tcttgggtgttcattcagacacagc

SEQ ID NO: 4777225 - DNA, 25 bp, Homo sapien
gccctttcatctatcaggaatgtca

SEQ ID NO: 4777226 - DNA, 25 bp, Homo sapien
cagcctccgctttggtgggtgtcct

SEQ ID NO: 4777227 - DNA, 25 bp, Homo sapien
gagccacaaaaactcgaagccaccc

SEQ ID NO: 4777228 - DNA, 25 bp, Homo sapien
cctggtgcagggacgtcaactgcaa

SEQ ID NO: 4777229 - DNA, 25 bp, Homo sapien
cgctgctctccggtcactgggaaac

SEQ ID NO: 4777230 - DNA, 25 bp, Homo sapien
cactgggaaacccatcagaaacctg

SEQ ID NO: 4777231 - DNA, 25 bp, Homo sapien
aaagaagggcccgttgtctgcacca

SEQ ID NO: 4777232 - DNA, 25 bp, Homo sapien
tccaggcatcccttgagaagagcca

SEQ ID NO: 4777233 - DNA, 25 bp, Homo sapien
taggtggaagacacaaacgcattgc

SEQ ID NO: 4777234 - DNA, 25 bp, Homo sapien
cacctgtgcaggctttgaaggacac

SEQ ID NO: 4777235 - DNA, 25 bp, Homo sapien
tctcagtgctgcacgcagtcagggt

SEQ ID NO: 4777236 - DNA, 25 bp, Homo sapien
ccagaaagcacacattggcatgaac

SEQ ID NO: 4777237 - DNA, 25 bp, Homo sapien
ctgggcctgaagaaggccagaagca

SEQ ID NO: 4777238 - DNA, 25 bp, Homo sapien
gaaagcacacattggcatgaacaca

SEQ ID NO: 4777239 - DNA, 25 bp, Homo sapien
gggccagaaagcacacattggcatg

SEQ ID NO: 4777240 - DNA, 25 bp, Homo sapien
aagagccaggacacatcgttgctag

SEQ ID NO: 4777241 - DNA, 25 bp, Homo sapien
tgaggtcagagatctgcgtgccccg

SEQ ID NO: 4777242 - DNA, 25 bp, Homo sapien
cccgttgagacaccctagagctggg

SEQ ID NO: 4777243 - DNA, 25 bp, Homo sapien
aagaacgctttctcctgaccggtgg

SEQ ID NO: 4777244 - DNA, 25 bp, Homo sapien
catagctgcgttggctttgcaaatc

SEQ ID NO: 4777245 - DNA, 25 bp, Homo sapien
cagggaagcagacgtagccctgtgt

SEQ ID NO: 4777246 - DNA, 25 bp, Homo sapien
agacgtagccctgtgtgtagctgca

SEQ ID NO: 4777247 - DNA, 25 bp, Homo sapien
gatgccattgcctagctcagcactt

SEQ ID NO: 4777248 - DNA, 25 bp, Homo sapien
tgaactcccgtgactccccagcaat

SEQ ID NO: 4777249 - DNA, 25 bp, Homo sapien
ttttactctattgtatcttactgcc

SEQ ID NO: 4777250 - DNA, 25 bp, Homo sapien
gagtctcaagtcatccaagacgctc

SEQ ID NO: 4777251 - DNA, 25 bp, Homo sapien
caactctgagtctcaagtcatccaa

SEQ ID NO: 4777252 - DNA, 25 bp, Homo sapien
ccaaggcctccgagggccaagtcca

SEQ ID NO: 4777253 - DNA, 25 bp, Homo sapien
aaggcctccgagggccaagtccagg

SEQ ID NO: 4777254 - DNA, 25 bp, Homo sapien
gccaccaaggcctccgagggccaag

SEQ ID NO: 4777255 - DNA, 25 bp, Homo sapien
caccaaggcctccgagggccaagtc

SEQ ID NO: 4777256 - DNA, 25 bp, Homo sapien
gggcaccgcacatgcccctcctgct

SEQ ID NO: 4777257 - DNA, 25 bp, Homo sapien
tgagggccagatgtgcggcagcggc

SEQ ID NO: 4777258 - DNA, 25 bp, Homo sapien
agtgctgagggccagatgtgcggca

SEQ ID NO: 4777259 - DNA, 25 bp, Homo sapien
agatgtgcggcagcggcctccacac

SEQ ID NO: 4777260 - DNA, 25 bp, Homo sapien
cagattttaacatttgtgcaatgaa

SEQ ID NO: 4777261 - DNA, 25 bp, Homo sapien
ctccttcaccgaggacagcttcttt

SEQ ID NO: 4777262 - DNA, 25 bp, Homo sapien
tgactcgccccagaacacaatacag

SEQ ID NO: 4777263 - DNA, 25 bp, Homo sapien
aaactgtagagtgttaagcttgaga

SEQ ID NO: 4777264 - DNA, 25 bp, Homo sapien
caagtttccgcagcttgtctgcatc

SEQ ID NO: 4777265 - DNA, 25 bp, Homo sapien
gtctgcatcctccaagtgttcacac

SEQ ID NO: 4777266 - DNA, 25 bp, Homo sapien
gattgtctttgccaccctgagagat

SEQ ID NO: 4777267 - DNA, 25 bp, Homo sapien
agtgttcacacctcggctcctctgg

SEQ ID NO: 4777268 - DNA, 25 bp, Homo sapien
caggctgatcttgatcttttagtag

SEQ ID NO: 4777269 - DNA, 25 bp, Homo sapien
acctcgtgagccacccaccttggct

SEQ ID NO: 4777270 - DNA, 25 bp, Homo sapien
accaggctgatcttgatcttttagt

SEQ ID NO: 4777271 - DNA, 25 bp, Homo sapien
ggctgatcttgatcttttagtagag

SEQ ID NO: 4777272 - DNA, 25 bp, Homo sapien
tatttaggagccgtttcaggaccgc

SEQ ID NO: 4777273 - DNA, 25 bp, Homo sapien
gtggtgagctcctttgtcagtgcgt

SEQ ID NO: 4777274 - DNA, 25 bp, Homo sapien
tcaagggactgtgttactgcggtct

SEQ ID NO: 4777275 - DNA, 25 bp, Homo sapien
ctcgagtggagctgttcaagggact

SEQ ID NO: 4777276 - DNA, 25 bp, Homo sapien
tgtgaagctgttgagacaggggtct

SEQ ID NO: 4777277 - DNA, 25 bp, Homo sapien
gaagctgttgagacaggggtctgga

SEQ ID NO: 4777278 - DNA, 25 bp, Homo sapien
tgaagctgttgagacaggggtctgg

SEQ ID NO: 4777279 - DNA, 25 bp, Homo sapien
gtgaagctgttgagacaggggtctg

SEQ ID NO: 4777280 - DNA, 25 bp, Homo sapien
ggtcctccccgacatggcaccccat

SEQ ID NO: 4777281 - DNA, 25 bp, Homo sapien
gccaggggtcctccccgacatggca

SEQ ID NO: 4777282 - DNA, 25 bp, Homo sapien
caggggtcctccccgacatggcacc

SEQ ID NO: 4777283 - DNA, 25 bp, Homo sapien
cctccccgacatggcaccccatggc

SEQ ID NO: 4777284 - DNA, 25 bp, Homo sapien
ggtagttcctgttctaatcatggca

SEQ ID NO: 4777285 - DNA, 25 bp, Homo sapien
catcccagaaagtacggtagttcct

SEQ ID NO: 4777286 - DNA, 25 bp, Homo sapien
tcttccttaaggtggcttgctctga

SEQ ID NO: 4777287 - DNA, 25 bp, Homo sapien
gtatctgcattttccgacatcccag

SEQ ID NO: 4777288 - DNA, 25 bp, Homo sapien
ttccttgcagtttctgtccatacac

SEQ ID NO: 4777289 - DNA, 25 bp, Homo sapien
tccttgcagtttctgtccatacact

SEQ ID NO: 4777290 - DNA, 25 bp, Homo sapien
tcacaggccttgattcctgttgagc

SEQ ID NO: 4777291 - DNA, 25 bp, Homo sapien
gttgagctcctccaacaacagctgc

SEQ ID NO: 4777292 - DNA, 25 bp, Homo sapien
tggctccccatcacgggcgaatgca

SEQ ID NO: 4777293 - DNA, 25 bp, Homo sapien
aaaaaatcaggcctgttagcaacag

SEQ ID NO: 4777294 - DNA, 25 bp, Homo sapien
acgtgcattgccctttcccccacaa

SEQ ID NO: 4777295 - DNA, 25 bp, Homo sapien
ggagagggccattgcaggtcatcaa

SEQ ID NO: 4777296 - DNA, 25 bp, Homo sapien
gagggccattgcaggtcatcaataa

SEQ ID NO: 4777297 - DNA, 25 bp, Homo sapien
ggccattgcaggtcatcaataaatc

SEQ ID NO: 4777298 - DNA, 25 bp, Homo sapien
tctcaccggcatgcagccgcacctg

SEQ ID NO: 4777299 - DNA, 25 bp, Homo sapien
tgggagtgaccacactctcaccggc

SEQ ID NO: 4777300 - DNA, 25 bp, Homo sapien
gagtgaccacactctcaccggcatg

SEQ ID NO: 4777301 - DNA, 25 bp, Homo sapien
gtgctgggagtgaccacactctcac

SEQ ID NO: 4777302 - DNA, 25 bp, Homo sapien
tctgtgtcctccctcgaggcatgct

SEQ ID NO: 4777303 - DNA, 25 bp, Homo sapien
ttgtggtcactggtgcgtccctttg

SEQ ID NO: 4777304 - DNA, 25 bp, Homo sapien
tcgaggcatgctttcagggctgcag

SEQ ID NO: 4777305 - DNA, 25 bp, Homo sapien
ggtgcgtccctttgtatgctctgct

SEQ ID NO: 4777306 - DNA, 25 bp, Homo sapien
gccgtaaaccgctctgcttcaggca

SEQ ID NO: 4777307 - DNA, 25 bp, Homo sapien
tgcttcaggcacctctcacatgcag

SEQ ID NO: 4777308 - DNA, 25 bp, Homo sapien
tctgttgcctttaagtgccgtaaac

SEQ ID NO: 4777309 - DNA, 25 bp, Homo sapien
ttccttgctggcagtacacctcgtc

SEQ ID NO: 4777310 - DNA, 25 bp, Homo sapien
gtgaaacccgtcctaattgatgaag

SEQ ID NO: 4777311 - DNA, 25 bp, Homo sapien
tcttcaggatcaggccaaccttaga

SEQ ID NO: 4777312 - DNA, 25 bp, Homo sapien
gaggcttgacttgcagtgaaacccg

SEQ ID NO: 4777313 - DNA, 25 bp, Homo sapien
ctctgggtataaaagtcatgggtgc

SEQ ID NO: 4777314 - DNA, 25 bp, Homo sapien
tagtagaccagcttcagtggcacta

SEQ ID NO: 4777315 - DNA, 25 bp, Homo sapien
gatttaagagcaggggatagtagac

SEQ ID NO: 4777316 - DNA, 25 bp, Homo sapien
tcagatttaagagcaggggatagta

SEQ ID NO: 4777317 - DNA, 25 bp, Homo sapien
tttaagagcaggggatagtagacca

SEQ ID NO: 4777318 - DNA, 25 bp, Homo sapien
tggaaacaccacctcaagagccagg

SEQ ID NO: 4777319 - DNA, 25 bp, Homo sapien
ggccgcatgatgactgagactggaa

SEQ ID NO: 4777320 - DNA, 25 bp, Homo sapien
tctggagggaaattgccaccgtgct

SEQ ID NO: 4777321 - DNA, 25 bp, Homo sapien
gactggaatgatgcgacgacaagcc

SEQ ID NO: 4777322 - DNA, 25 bp, Homo sapien
gcaataattagtccccaagttggca

SEQ ID NO: 4777323 - DNA, 25 bp, Homo sapien
catttggtagcatcgtctggtgggt

SEQ ID NO: 4777324 - DNA, 25 bp, Homo sapien
taatatgactaatcccaagacccag

SEQ ID NO: 4777325 - DNA, 25 bp, Homo sapien
gagaaagtttccgatcaaaggcagt

SEQ ID NO: 4777326 - DNA, 25 bp, Homo sapien
taataggcccttggtacatacatag

SEQ ID NO: 4777327 - DNA, 25 bp, Homo sapien
ttccctgccggacaatggtggctca

SEQ ID NO: 4777328 - DNA, 25 bp, Homo sapien
aatgaatgtgcctcacctatgccag

SEQ ID NO: 4777329 - DNA, 25 bp, Homo sapien
tgccagccgagtaggcaacatggga

SEQ ID NO: 4777330 - DNA, 25 bp, Homo sapien
gaagggacaccagtcagggaattat

SEQ ID NO: 4777331 - DNA, 25 bp, Homo sapien
catcacaccaggactttaacgcagg

SEQ ID NO: 4777332 - DNA, 25 bp, Homo sapien
tttaacgcaggaatcaggagcagct

SEQ ID NO: 4777333 - DNA, 25 bp, Homo sapien
agcagctggaggacaattcatcccg

SEQ ID NO: 4777334 - DNA, 25 bp, Homo sapien
tcttccttcctccacatcctggagc

SEQ ID NO: 4777335 - DNA, 25 bp, Homo sapien
catcttccttcctccacatcctgga

SEQ ID NO: 4777336 - DNA, 25 bp, Homo sapien
tcatcttccttcctccacatcctgg

SEQ ID NO: 4777337 - DNA, 25 bp, Homo sapien
ctcatcttccttcctccacatcctg

SEQ ID NO: 4777338 - DNA, 25 bp, Homo sapien
gagcatacagagcaatctcacaaag

SEQ ID NO: 4777339 - DNA, 25 bp, Homo sapien
caggcattgcatctggtctccacaa

SEQ ID NO: 4777340 - DNA, 25 bp, Homo sapien
ttcgcctgcaggctttgacccaggg

SEQ ID NO: 4777341 - DNA, 25 bp, Homo sapien
caacaagacgctcagtacctacgag

SEQ ID NO: 4777342 - DNA, 25 bp, Homo sapien
tgagtgcacttagacaaagaatagc

SEQ ID NO: 4777343 - DNA, 25 bp, Homo sapien
gctggcaatgttgcaatgctggaga

SEQ ID NO: 4777344 - DNA, 25 bp, Homo sapien
gatcatatgggccatgttccaaatg

SEQ ID NO: 4777345 - DNA, 25 bp, Homo sapien
agtcccagcagccagttgtgccttg

SEQ ID NO: 4777346 - DNA, 25 bp, Homo sapien
acattctgtacccaggggcaagccc

SEQ ID NO: 4777347 - DNA, 25 bp, Homo sapien
ctgaataaaacattctgtacccagg

SEQ ID NO: 4777348 - DNA, 25 bp, Homo sapien
cctggcactgctttgcccactgaat

SEQ ID NO: 4777349 - DNA, 25 bp, Homo sapien
gctttgcccactgaataaaacattc

SEQ ID NO: 4777350 - DNA, 25 bp, Homo sapien
cttccaggctgcccttcagcacaga

SEQ ID NO: 4777351 - DNA, 25 bp, Homo sapien
ggcttccaggctgcccttcagcaca

SEQ ID NO: 4777352 - DNA, 25 bp, Homo sapien
aggcttccaggctgcccttcagcac

SEQ ID NO: 4777353 - DNA, 25 bp, Homo sapien
ttccaggctgcccttcagcacagac

SEQ ID NO: 4777354 - DNA, 25 bp, Homo sapien
gcattgtctgtgagtccttgatccc

SEQ ID NO: 4777355 - DNA, 25 bp, Homo sapien
tgcctgtgaataaaagccttctcag

SEQ ID NO: 4777356 - DNA, 25 bp, Homo sapien
ttgatccctgtcttcactaatggca

SEQ ID NO: 4777357 - DNA, 25 bp, Homo sapien
caaactctgccccaattgccaaggg

SEQ ID NO: 4777358 - DNA, 25 bp, Homo sapien
cctggagtcgctgggcaaggaggct

SEQ ID NO: 4777359 - DNA, 25 bp, Homo sapien
ggcctggagtcgctgggcaaggagg

SEQ ID NO: 4777360 - DNA, 25 bp, Homo sapien
tggagtcgctgggcaaggaggctgt

SEQ ID NO: 4777361 - DNA, 25 bp, Homo sapien
ttggcctggagtcgctgggcaagga

SEQ ID NO: 4777362 - DNA, 25 bp, Homo sapien
gtctcctttattgcgggagaaggag

SEQ ID NO: 4777363 - DNA, 25 bp, Homo sapien
ggtctcctttattgcgggagaagga

SEQ ID NO: 4777364 - DNA, 25 bp, Homo sapien
ctcccagagtcagactctcatcaaa

SEQ ID NO: 4777365 - DNA, 25 bp, Homo sapien
cgggtctcctttattgcgggagaag

SEQ ID NO: 4777366 - DNA, 25 bp, Homo sapien
ttgttcatttgcgagtttctcacac

SEQ ID NO: 4777367 - DNA, 25 bp, Homo sapien
gccctcgccggctggtgtggagtgt

SEQ ID NO: 4777368 - DNA, 25 bp, Homo sapien
tttgttgttcatttgcgagtttctc

SEQ ID NO: 4777369 - DNA, 25 bp, Homo sapien
ccctccgtggttgtgaaaaacatca

SEQ ID NO: 4777370 - DNA, 25 bp, Homo sapien
cgcctgcagcggatgtctccaggag

SEQ ID NO: 4777371 - DNA, 25 bp, Homo sapien
tgtttacaggttttagattgctggt

SEQ ID NO: 4777372 - DNA, 25 bp, Homo sapien
gattgctggtgggatggaaatcacc

SEQ ID NO: 4777373 - DNA, 25 bp, Homo sapien
gccgactgccgtcagtgtttacagg

SEQ ID NO: 4777374 - DNA, 25 bp, Homo sapien
gcagaacagagcccgtgacatgcat

SEQ ID NO: 4777375 - DNA, 25 bp, Homo sapien
tgcagaacagagcccgtgacatgca

SEQ ID NO: 4777376 - DNA, 25 bp, Homo sapien
cctgcagtgctgtcgaagtggcgtc

SEQ ID NO: 4777377 - DNA, 25 bp, Homo sapien
cataaagaaggatttagtgtcgacc

SEQ ID NO: 4777378 - DNA, 25 bp, Homo sapien
gaggagcccactttttaacgcttca

SEQ ID NO: 4777379 - DNA, 25 bp, Homo sapien
ttagtgtcgaccgtctccaccttgg

SEQ ID NO: 4777380 - DNA, 25 bp, Homo sapien
cccccgattctgagatggcagcaca

SEQ ID NO: 4777381 - DNA, 25 bp, Homo sapien
gcggagatgcaagggaacgcttttc

SEQ ID NO: 4777382 - DNA, 25 bp, Homo sapien
aaagaagccccgataagcatctcct

SEQ ID NO: 4777383 - DNA, 25 bp, Homo sapien
gcacagcacccatgtgtgatctggg

SEQ ID NO: 4777384 - DNA, 25 bp, Homo sapien
aagactatctccctaacagactttc

SEQ ID NO: 4777385 - DNA, 25 bp, Homo sapien
gggaagactatctccctaacagact

SEQ ID NO: 4777386 - DNA, 25 bp, Homo sapien
tatctccctaacagactttctggct

SEQ ID NO: 4777387 - DNA, 25 bp, Homo sapien
actatctccctaacagactttctgg

SEQ ID NO: 4777388 - DNA, 25 bp, Homo sapien
tataggcgtgatggtagaggtcccc

SEQ ID NO: 4777389 - DNA, 25 bp, Homo sapien
ccctcggagtactcctaaggaagat

SEQ ID NO: 4777390 - DNA, 25 bp, Homo sapien
tgaatctaaaccctcggagtactcc

SEQ ID NO: 4777391 - DNA, 25 bp, Homo sapien
atcgcagggatgatgtctcagagga

SEQ ID NO: 4777392 - DNA, 25 bp, Homo sapien
ttctgcaagcaagtatgctgctctc

SEQ ID NO: 4777393 - DNA, 25 bp, Homo sapien
gttctgcaagcaagtatgctgctct

SEQ ID NO: 4777394 - DNA, 25 bp, Homo sapien
gaacattcgagagcaaatcaaaacc

SEQ ID NO: 4777395 - DNA, 25 bp, Homo sapien
aaatcaaaacctctatccagacaag

SEQ ID NO: 4777396 - DNA, 25 bp, Homo sapien
tttctctccaccctggaacattcga

SEQ ID NO: 4777397 - DNA, 25 bp, Homo sapien
caaaacctctatccagacaagacaa

SEQ ID NO: 4777398 - DNA, 25 bp, Homo sapien
gaaggctcctcgagcagagcacgca

SEQ ID NO: 4777399 - DNA, 25 bp, Homo sapien
tcgagcagagcacgcagcttctgtt

SEQ ID NO: 4777400 - DNA, 25 bp, Homo sapien
aaatgcatgcaaattattggaaatg

SEQ ID NO: 4777401 - DNA, 25 bp, Homo sapien
gactgctgctgaagcgtccagaagg

SEQ ID NO: 4777402 - DNA, 25 bp, Homo sapien
tggcacccgtcccattgatctgctt

SEQ ID NO: 4777403 - DNA, 25 bp, Homo sapien
tgtacggccccactggtttcttgga

SEQ ID NO: 4777404 - DNA, 25 bp, Homo sapien
catcttctgcggaatctggtgctga

SEQ ID NO: 4777405 - DNA, 25 bp, Homo sapien
taagctagctaccaaagcatattgt

SEQ ID NO: 4777406 - DNA, 25 bp, Homo sapien
gagcctggcccaagctatatgttcc

SEQ ID NO: 4777407 - DNA, 25 bp, Homo sapien
cactgtcattgaaaagctctggtct

SEQ ID NO: 4777408 - DNA, 25 bp, Homo sapien
cagactcggccccttgggttagtgt

SEQ ID NO: 4777409 - DNA, 25 bp, Homo sapien
gttagtgtccctgtgatgtcgatcc

SEQ ID NO: 4777410 - DNA, 25 bp, Homo sapien
cctcaccagctctacacgagaattc

SEQ ID NO: 4777411 - DNA, 25 bp, Homo sapien
accagctctacacgagaattcccat

SEQ ID NO: 4777412 - DNA, 25 bp, Homo sapien
tcaccagctctacacgagaattccc

SEQ ID NO: 4777413 - DNA, 25 bp, Homo sapien
caccagctctacacgagaattccca

SEQ ID NO: 4777414 - DNA, 25 bp, Homo sapien
gacagagattaactttatatactaa

SEQ ID NO: 4777415 - DNA, 25 bp, Homo sapien
cagtgagtaatacaacaagacagag

SEQ ID NO: 4777416 - DNA, 25 bp, Homo sapien
caatctccagtgagtaatacaacaa

SEQ ID NO: 4777417 - DNA, 25 bp, Homo sapien
tacaacaagacagagattaacttta

SEQ ID NO: 4777418 - DNA, 25 bp, Homo sapien
agaaccttcaacacaattgtagtag

SEQ ID NO: 4777419 - DNA, 25 bp, Homo sapien
cttggaggtggttcaaccacagctc

SEQ ID NO: 4777420 - DNA, 25 bp, Homo sapien
aggtggttcaaccacagctctacca

SEQ ID NO: 4777421 - DNA, 25 bp, Homo sapien
gctctaccaccactcgtaacatctg

SEQ ID NO: 4777422 - DNA, 25 bp, Homo sapien
tttctatgaccccatgattacaagc

SEQ ID NO: 4777423 - DNA, 25 bp, Homo sapien
ctttctgtctgttttctatgacccc

SEQ ID NO: 4777424 - DNA, 25 bp, Homo sapien
gttttctatgaccccatgattacaa

SEQ ID NO: 4777425 - DNA, 25 bp, Homo sapien
ttttctatgaccccatgattacaag

SEQ ID NO: 4777426 - DNA, 25 bp, Homo sapien
cagaactgcgttcagatcgggccta

SEQ ID NO: 4777427 - DNA, 25 bp, Homo sapien
taactgccccacgaagattctttca

SEQ ID NO: 4777428 - DNA, 25 bp, Homo sapien
cctttaataattctatagatacaga

SEQ ID NO: 4777429 - DNA, 25 bp, Homo sapien
gaagtcaggttaataactggtactc

SEQ ID NO: 4777430 - DNA, 25 bp, Homo sapien
ggcttgggatcgagccctatgcagc

SEQ ID NO: 4777431 - DNA, 25 bp, Homo sapien
tgcagccattcacaaggtgcctgtg

SEQ ID NO: 4777432 - DNA, 25 bp, Homo sapien
tttctcgtatgcacatcttacagca

SEQ ID NO: 4777433 - DNA, 25 bp, Homo sapien
gtgcacaaacaggtgccatttgtat

SEQ ID NO: 4777434 - DNA, 25 bp, Homo sapien
gagtaaaggccaatgccctctctcc

SEQ ID NO: 4777435 - DNA, 25 bp, Homo sapien
tgttcttgccgctggagtctgggcc

SEQ ID NO: 4777436 - DNA, 25 bp, Homo sapien
cggcggcacagcctgagtaaaggcc

SEQ ID NO: 4777437 - DNA, 25 bp, Homo sapien
ggcatccccgcatcgggacactgtt

SEQ ID NO: 4777438 - DNA, 25 bp, Homo sapien
ctgaagtgcacttggctaagaactg

SEQ ID NO: 4777439 - DNA, 25 bp, Homo sapien
aactgagaaagccaagacggtagga

SEQ ID NO: 4777440 - DNA, 25 bp, Homo sapien
ccaagacggtaggaaatcctcctca

SEQ ID NO: 4777441 - DNA, 25 bp, Homo sapien
cacttggctaagaactgagaaagcc

SEQ ID NO: 4777442 - DNA, 25 bp, Homo sapien
tgtgaacgtgggttgagcacctgct

SEQ ID NO: 4777443 - DNA, 25 bp, Homo sapien
ctgttctttgtgaacgtgggttgag

SEQ ID NO: 4777444 - DNA, 25 bp, Homo sapien
tctttgtgaacgtgggttgagcacc

SEQ ID NO: 4777445 - DNA, 25 bp, Homo sapien
ggacagtcctctgcttctagggacc

SEQ ID NO: 4777446 - DNA, 25 bp, Homo sapien
gcagtccagcttcgcactatacaag

SEQ ID NO: 4777447 - DNA, 25 bp, Homo sapien
gcaagcttccagaaacctgcagtcc

SEQ ID NO: 4777448 - DNA, 25 bp, Homo sapien
ttcgcactatacaagcctgcgcgtg

SEQ ID NO: 4777449 - DNA, 25 bp, Homo sapien
tgcacggcgcctcccaaggacttgc

SEQ ID NO: 4777450 - DNA, 25 bp, Homo sapien
tgcaggcaagtccctctttgaggag

SEQ ID NO: 4777451 - DNA, 25 bp, Homo sapien
gcaggcaagtccctctttgaggagc

SEQ ID NO: 4777452 - DNA, 25 bp, Homo sapien
gctgcaggcaagtccctctttgagg

SEQ ID NO: 4777453 - DNA, 25 bp, Homo sapien
ctgcaggcaagtccctctttgagga

SEQ ID NO: 4777454 - DNA, 25 bp, Homo sapien
catcctgttgcctgtgttcctccag

SEQ ID NO: 4777455 - DNA, 25 bp, Homo sapien
tcagactgcttgatttccacggcaa

SEQ ID NO: 4777456 - DNA, 25 bp, Homo sapien
tacagggccgtgatgtaggtattcc

SEQ ID NO: 4777457 - DNA, 25 bp, Homo sapien
tgggcattgcctctgcacactattt

SEQ ID NO: 4777458 - DNA, 25 bp, Homo sapien
ttttgagtgcactatgaattttggg

SEQ ID NO: 4777459 - DNA, 25 bp, Homo sapien
gcacacagggggactccacaaacag

SEQ ID NO: 4777460 - DNA, 25 bp, Homo sapien
gatgtctgtatggaatgaagaacac

SEQ ID NO: 4777461 - DNA, 25 bp, Homo sapien
aattgttacatttgggcagcaggag

SEQ ID NO: 4777462 - DNA, 25 bp, Homo sapien
tcagttcctttcacccacgtgggag

SEQ ID NO: 4777463 - DNA, 25 bp, Homo sapien
tcaagacacaaagccgtgaaggcat

SEQ ID NO: 4777464 - DNA, 25 bp, Homo sapien
tgcagaccaccgtgacaggactgtg

SEQ ID NO: 4777465 - DNA, 25 bp, Homo sapien
agtcaccccgtggatagtctgcagg

SEQ ID NO: 4777466 - DNA, 25 bp, Homo sapien
gatcccatggccagtttaagactca

SEQ ID NO: 4777467 - DNA, 25 bp, Homo sapien
tcataagaagttgtcctggagcaag

SEQ ID NO: 4777468 - DNA, 25 bp, Homo sapien
gagcaagatagctccatccccactg

SEQ ID NO: 4777469 - DNA, 25 bp, Homo sapien
tccccactgtcgttttgccaaagag

SEQ ID NO: 4777470 - DNA, 25 bp, Homo sapien
gaggcttggccccaacacagctttt

SEQ ID NO: 4777471 - DNA, 25 bp, Homo sapien
ccaacacagctttttgttctcacac

SEQ ID NO: 4777472 - DNA, 25 bp, Homo sapien
tggccccaacacagctttttgttct

SEQ ID NO: 4777473 - DNA, 25 bp, Homo sapien
acacagaggcttggccccaacacag

SEQ ID NO: 4777474 - DNA, 25 bp, Homo sapien
gctctggacttggtataatgctggt

SEQ ID NO: 4777475 - DNA, 25 bp, Homo sapien
gagccagttagagtcttgcagcagc

SEQ ID NO: 4777476 - DNA, 25 bp, Homo sapien
ctcaaaatcgaggtgacacagaagc

SEQ ID NO: 4777477 - DNA, 25 bp, Homo sapien
taatgctggttttggtctgtggcct

SEQ ID NO: 4777478 - DNA, 25 bp, Homo sapien
cagaaacatgatttgacaaaacttg

SEQ ID NO: 4777479 - DNA, 25 bp, Homo sapien
aaacttgttcaagctcctcaagaca

SEQ ID NO: 4777480 - DNA, 25 bp, Homo sapien
gcatgtgccaccagcgacttatacc

SEQ ID NO: 4777481 - DNA, 25 bp, Homo sapien
cgacttataccaggctcttcttcag

SEQ ID NO: 4777482 - DNA, 25 bp, Homo sapien
cattatccgtgcatcgtagggtcct

SEQ ID NO: 4777483 - DNA, 25 bp, Homo sapien
gcatcgtagggtcctttggagaaca

SEQ ID NO: 4777484 - DNA, 25 bp, Homo sapien
ctgaaagaaaatgttcctcacacat

SEQ ID NO: 4777485 - DNA, 25 bp, Homo sapien
tggctcagtttcaaaggcaagggcg

SEQ ID NO: 4777486 - DNA, 25 bp, Homo sapien
tagctatgtgtgtcaaacagcgaac

SEQ ID NO: 4777487 - DNA, 25 bp, Homo sapien
cttctgccacgaggagggtctgtca

SEQ ID NO: 4777488 - DNA, 25 bp, Homo sapien
tgtcaaacagcgaacactccttctg

SEQ ID NO: 4777489 - DNA, 25 bp, Homo sapien
actccttctgccacgaggagggtct

SEQ ID NO: 4777490 - DNA, 25 bp, Homo sapien
caggactgtcgtgaaaggtcactga

SEQ ID NO: 4777491 - DNA, 25 bp, Homo sapien
tggacgccacaggactgtcgtgaaa

SEQ ID NO: 4777492 - DNA, 25 bp, Homo sapien
gcagtggacgccacaggactgtcgt

SEQ ID NO: 4777493 - DNA, 25 bp, Homo sapien
gccacaggactgtcgtgaaaggtca

SEQ ID NO: 4777494 - DNA, 25 bp, Homo sapien
ctctaggaatgagtgacaggcacat

SEQ ID NO: 4777495 - DNA, 25 bp, Homo sapien
aatgagcatccccacctgagttcag

SEQ ID NO: 4777496 - DNA, 25 bp, Homo sapien
tcaagctggactgaaaggaagatgc

SEQ ID NO: 4777497 - DNA, 25 bp, Homo sapien
tgtaggttgcacactccataagaga

SEQ ID NO: 4777498 - DNA, 25 bp, Homo sapien
ggccatgagaagcaacgagatggag

SEQ ID NO: 4777499 - DNA, 25 bp, Homo sapien
cgctgggcacttagggatccatggt

SEQ ID NO: 4777500 - DNA, 25 bp, Homo sapien
caaaccgctgggcacttagggatcc

SEQ ID NO: 4777501 - DNA, 25 bp, Homo sapien
catgagaagcaacgagatggagagt

SEQ ID NO: 4777502 - DNA, 25 bp, Homo sapien
acatagtctgcctcatcgccaatgc

SEQ ID NO: 4777503 - DNA, 25 bp, Homo sapien
ctcatcgccaatgcccacatgactg

SEQ ID NO: 4777504 - DNA, 25 bp, Homo sapien
tcatcgccaatgcccacatgactgg

SEQ ID NO: 4777505 - DNA, 25 bp, Homo sapien
ggcaacatagtctgcctcatcgcca

SEQ ID NO: 4777506 - DNA, 25 bp, Homo sapien
gaatttcgttaaaagcactgcaggt

SEQ ID NO: 4777507 - DNA, 25 bp, Homo sapien
cagaaaccaagtcagggtaccaggc

SEQ ID NO: 4777508 - DNA, 25 bp, Homo sapien
tgcctcatgaaagaagctgactgca

SEQ ID NO: 4777509 - DNA, 25 bp, Homo sapien
tggaccgtatctgaccacgctgaga

SEQ ID NO: 4777510 - DNA, 25 bp, Homo sapien
accattttcgacttcagtaaccatc

SEQ ID NO: 4777511 - DNA, 25 bp, Homo sapien
taaccattttcgacttcagtaacca

SEQ ID NO: 4777512 - DNA, 25 bp, Homo sapien
ttgtaaataaccattttcgacttca

SEQ ID NO: 4777513 - DNA, 25 bp, Homo sapien
taaataaccattttcgacttcagta

SEQ ID NO: 4777514 - DNA, 25 bp, Homo sapien
tttcactcgtacagcacttgggtca

SEQ ID NO: 4777515 - DNA, 25 bp, Homo sapien
cagcacttgagttagggtccatgga

SEQ ID NO: 4777516 - DNA, 25 bp, Homo sapien
agaactctgggttccctcggccatt

SEQ ID NO: 4777517 - DNA, 25 bp, Homo sapien
gatccagctcataagtcctccattg

SEQ ID NO: 4777518 - DNA, 25 bp, Homo sapien
ctctcaggcttgtccaggaggatgg

SEQ ID NO: 4777519 - DNA, 25 bp, Homo sapien
cttcctctcaggcttgtccaggagg

SEQ ID NO: 4777520 - DNA, 25 bp, Homo sapien
ttcctctcaggcttgtccaggagga

SEQ ID NO: 4777521 - DNA, 25 bp, Homo sapien
tcaggcttgtccaggaggatgggca

SEQ ID NO: 4777522 - DNA, 25 bp, Homo sapien
ttgtgagcacaaggtcaaccccaga

SEQ ID NO: 4777523 - DNA, 25 bp, Homo sapien
tagttcccaagtgactagagcccgg

SEQ ID NO: 4777524 - DNA, 25 bp, Homo sapien
gaatcacacctctgtttcagacaga

SEQ ID NO: 4777525 - DNA, 25 bp, Homo sapien
aaggaggccccaggatgttgaattc

SEQ ID NO: 4777526 - DNA, 25 bp, Homo sapien
gagcagactcgcagcagggtgccca

SEQ ID NO: 4777527 - DNA, 25 bp, Homo sapien
cagctggtgcatccaccctgggtat

SEQ ID NO: 4777528 - DNA, 25 bp, Homo sapien
ctgggtatgagcagactcgcagcag

SEQ ID NO: 4777529 - DNA, 25 bp, Homo sapien
ggtgcatccaccctgggtatgagca

SEQ ID NO: 4777530 - DNA, 25 bp, Homo sapien
tggccgactggcagacctggttgca

SEQ ID NO: 4777531 - DNA, 25 bp, Homo sapien
gactagttgtcccagcgaagtgttg

SEQ ID NO: 4777532 - DNA, 25 bp, Homo sapien
gtaagaacggccacaagggtgacca

SEQ ID NO: 4777533 - DNA, 25 bp, Homo sapien
tcaaggtaaggtttgtgcctggtcc

SEQ ID NO: 4777534 - DNA, 25 bp, Homo sapien
aaggagccgttcacagccgcgcgtt

SEQ ID NO: 4777535 - DNA, 25 bp, Homo sapien
aggctgtgcctcctcgccaaggagc

SEQ ID NO: 4777536 - DNA, 25 bp, Homo sapien
gccctgctcctcgtgcctttggtgg

SEQ ID NO: 4777537 - DNA, 25 bp, Homo sapien
acagtggggcctgaacagcgtccgc

SEQ ID NO: 4777538 - DNA, 25 bp, Homo sapien
tgccaatacttcttggagcagcagc

SEQ ID NO: 4777539 - DNA, 25 bp, Homo sapien
ctctgcggccttcggcttcctggga

SEQ ID NO: 4777540 - DNA, 25 bp, Homo sapien
ctcccagtgccatccgaaagggact

SEQ ID NO: 4777541 - DNA, 25 bp, Homo sapien
tccacaagagcaagaaagggatgac

SEQ ID NO: 4777542 - DNA, 25 bp, Homo sapien
gtgtattctatgcctctgtgacccc

SEQ ID NO: 4777543 - DNA, 25 bp, Homo sapien
ccctccatcttcagcggactaggtt

SEQ ID NO: 4777544 - DNA, 25 bp, Homo sapien
tcttcagcggactaggttgaagtgc

SEQ ID NO: 4777545 - DNA, 25 bp, Homo sapien
ctaggttgaagtgctggtctgctcc

SEQ ID NO: 4777546 - DNA, 25 bp, Homo sapien
aaggcaccgctgtagaaggcccagg

SEQ ID NO: 4777547 - DNA, 25 bp, Homo sapien
ccgggatcaggctcagaaagcccgc

SEQ ID NO: 4777548 - DNA, 25 bp, Homo sapien
caggccgggatcaggctcagaaagc

SEQ ID NO: 4777549 - DNA, 25 bp, Homo sapien
ggaaggcaccgctgtagaaggccca

SEQ ID NO: 4777550 - DNA, 25 bp, Homo sapien
gatgctgatgagttctgtttaagcc

SEQ ID NO: 4777551 - DNA, 25 bp, Homo sapien
ctgtgacaccgagaaagtgcacaag

SEQ ID NO: 4777552 - DNA, 25 bp, Homo sapien
aagaaatctgtagttttggctgggt

SEQ ID NO: 4777553 - DNA, 25 bp, Homo sapien
catcagcatcctggaggactaaggt

SEQ ID NO: 4777554 - DNA, 25 bp, Homo sapien
agggggatgtggcagagtacagcag

SEQ ID NO: 4777555 - DNA, 25 bp, Homo sapien
cagtctgctgccctcagtagctggg

SEQ ID NO: 4777556 - DNA, 25 bp, Homo sapien
gggatgtggcagagtacagcagtct

SEQ ID NO: 4777557 - DNA, 25 bp, Homo sapien
tggcagagtacagcagtctgctgcc

SEQ ID NO: 4777558 - DNA, 25 bp, Homo sapien
cttatcagggtatccactggccaag

SEQ ID NO: 4777559 - DNA, 25 bp, Homo sapien
tccactggccaagtcaaaaggacag

SEQ ID NO: 4777560 - DNA, 25 bp, Homo sapien
taaacttcagcaaggtgaacagcca

SEQ ID NO: 4777561 - DNA, 25 bp, Homo sapien
catggaaggaccgtcatggaccaca

SEQ ID NO: 4777562 - DNA, 25 bp, Homo sapien
agagtctttaagtcccagcagataa

SEQ ID NO: 4777563 - DNA, 25 bp, Homo sapien
tagactttagcgcatggagccatga

SEQ ID NO: 4777564 - DNA, 25 bp, Homo sapien
tatgcacattgttgaggttctacat

SEQ ID NO: 4777565 - DNA, 25 bp, Homo sapien
gtttagactcattggacattcgatg

SEQ ID NO: 4777566 - DNA, 25 bp, Homo sapien
gcagtccaggagtggtaagagcctc

SEQ ID NO: 4777567 - DNA, 25 bp, Homo sapien
ttaaaagcagtccaggagtggtaag

SEQ ID NO: 4777568 - DNA, 25 bp, Homo sapien
aaagcagtccaggagtggtaagagc

SEQ ID NO: 4777569 - DNA, 25 bp, Homo sapien
aagcagtccaggagtggtaagagcc

SEQ ID NO: 4777570 - DNA, 25 bp, Homo sapien
caagaaaaggagaagttatcaatta

SEQ ID NO: 4777571 - DNA, 25 bp, Homo sapien
tcaagaaaaggagaagttatcaatt

SEQ ID NO: 4777572 - DNA, 25 bp, Homo sapien
caagatttcatgggcaaggcagcca

SEQ ID NO: 4777573 - DNA, 25 bp, Homo sapien
tcatgggcaaggcagccacaggttt

SEQ ID NO: 4777574 - DNA, 25 bp, Homo sapien
tttcatgggcaaggcagccacaggt

SEQ ID NO: 4777575 - DNA, 25 bp, Homo sapien
agatttcatgggcaaggcagccaca

SEQ ID NO: 4777576 - DNA, 25 bp, Homo sapien
cattgcagtcgagacagcatatggg

SEQ ID NO: 4777577 - DNA, 25 bp, Homo sapien
tgtgacataattcaatgactctttg

SEQ ID NO: 4777578 - DNA, 25 bp, Homo sapien
tgacaaactcatcagcagtcttggt

SEQ ID NO: 4777579 - DNA, 25 bp, Homo sapien
agatactttgtcattgcagtcgaga

SEQ ID NO: 4777580 - DNA, 25 bp, Homo sapien
tccagacacatgcataatagaattg

SEQ ID NO: 4777581 - DNA, 25 bp, Homo sapien
gcaggtggctgcgatgatcattcat

SEQ ID NO: 4777582 - DNA, 25 bp, Homo sapien
agtacccactacctcggcagctgtg

SEQ ID NO: 4777583 - DNA, 25 bp, Homo sapien
tgtgttcggagaggccaattggttt

SEQ ID NO: 4777584 - DNA, 25 bp, Homo sapien
tgaggcgccccaaaagcccacgtgg

SEQ ID NO: 4777585 - DNA, 25 bp, Homo sapien
caaaagcccacgtggcatccccagc

SEQ ID NO: 4777586 - DNA, 25 bp, Homo sapien
ggactgaggcgccccaaaagcccac

SEQ ID NO: 4777587 - DNA, 25 bp, Homo sapien
cagggcacgggggagggcaacagaa

SEQ ID NO: 4777588 - DNA, 25 bp, Homo sapien
acaaggactccacagctgcccacct

SEQ ID NO: 4777589 - DNA, 25 bp, Homo sapien
aggactccacagctgcccacctcac

SEQ ID NO: 4777590 - DNA, 25 bp, Homo sapien
tggatgatgacaaggactccacagc

SEQ ID NO: 4777591 - DNA, 25 bp, Homo sapien
ctggatgatgacaaggactccacag

SEQ ID NO: 4777592 - DNA, 25 bp, Homo sapien
ggccttggaaaatgcgcacacaaac

SEQ ID NO: 4777593 - DNA, 25 bp, Homo sapien
gccttggaaaatgcgcacacaaacg

SEQ ID NO: 4777594 - DNA, 25 bp, Homo sapien
ccttggaaaatgcgcacacaaacgc

SEQ ID NO: 4777595 - DNA, 25 bp, Homo sapien
cttggaagctgagtacatggagtag

SEQ ID NO: 4777596 - DNA, 25 bp, Homo sapien
gaaatgttcaggatgagacctttct

SEQ ID NO: 4777597 - DNA, 25 bp, Homo sapien
aatgttcaggatgagacctttctgc

SEQ ID NO: 4777598 - DNA, 25 bp, Homo sapien
gaaacagggctatcccagaagaaat

SEQ ID NO: 4777599 - DNA, 25 bp, Homo sapien
agtgtgtgctgaaactgccgttctc

SEQ ID NO: 4777600 - DNA, 25 bp, Homo sapien
cgtttgttaaagcacagccagatgg

SEQ ID NO: 4777601 - DNA, 25 bp, Homo sapien
agtccctgagttagctgaccgccag

SEQ ID NO: 4777602 - DNA, 25 bp, Homo sapien
tggcctggcccagaacgttatgttt

SEQ ID NO: 4777603 - DNA, 25 bp, Homo sapien
cttgattccatatgtttcagaatta

SEQ ID NO: 4777604 - DNA, 25 bp, Homo sapien
tgattccatatgtttcagaattagc

SEQ ID NO: 4777605 - DNA, 25 bp, Homo sapien
ccatatgtttcagaattagctgtgt

SEQ ID NO: 4777606 - DNA, 25 bp, Homo sapien
tatgtttcagaattagctgtgtcat

SEQ ID NO: 4777607 - DNA, 25 bp, Homo sapien
ggaattggcttacagctgtgggacc

SEQ ID NO: 4777608 - DNA, 25 bp, Homo sapien
gctgtgggaccaacactgaggttcc

SEQ ID NO: 4777609 - DNA, 25 bp, Homo sapien
ctgaggttcccatgatactcttcat

SEQ ID NO: 4777610 - DNA, 25 bp, Homo sapien
ccctaaagctaatgtcttcctggaa

SEQ ID NO: 4777611 - DNA, 25 bp, Homo sapien
tcagatacaagggagagttgaatcc

SEQ ID NO: 4777612 - DNA, 25 bp, Homo sapien
gcttagtatgttccaacgtgtgaca

SEQ ID NO: 4777613 - DNA, 25 bp, Homo sapien
gacatggcctctcaactaagtgtgg

SEQ ID NO: 4777614 - DNA, 25 bp, Homo sapien
gacaattacaagaccacgacatggc

SEQ ID NO: 4777615 - DNA, 25 bp, Homo sapien
cttgactacggaggtgatgttacaa

SEQ ID NO: 4777616 - DNA, 25 bp, Homo sapien
actacggaggtgatgttacaatgga

SEQ ID NO: 4777617 - DNA, 25 bp, Homo sapien
aggtgatgttacaatggatgaggct

SEQ ID NO: 4777618 - DNA, 25 bp, Homo sapien
tacggaggtgatgttacaatggatg

SEQ ID NO: 4777619 - DNA, 25 bp, Homo sapien
tgcaaattaggctcataactgcctt

SEQ ID NO: 4777620 - DNA, 25 bp, Homo sapien
tctgtcattctgtacccacgtcatc

SEQ ID NO: 4777621 - DNA, 25 bp, Homo sapien
ttccagcaagcatgtactagcatca

SEQ ID NO: 4777622 - DNA, 25 bp, Homo sapien
agacatcaattaagagtttcctgga

SEQ ID NO: 4777623 - DNA, 25 bp, Homo sapien
gggttagcctatgtgagtccaggag

SEQ ID NO: 4777624 - DNA, 25 bp, Homo sapien
ggcagaggagcaaccctggaacttg

SEQ ID NO: 4777625 - DNA, 25 bp, Homo sapien
gacacagacactagcacaaacacag

SEQ ID NO: 4777626 - DNA, 25 bp, Homo sapien
tataaggtagaggttctgggctatg

SEQ ID NO: 4777627 - DNA, 25 bp, Homo sapien
acacaggagatgtgtggtccagaga

SEQ ID NO: 4777628 - DNA, 25 bp, Homo sapien
agtctggcattatcacccggtgcag

SEQ ID NO: 4777629 - DNA, 25 bp, Homo sapien
gacgtagatttgtgccagaaacaga

SEQ ID NO: 4777630 - DNA, 25 bp, Homo sapien
gggcttacacaggacgatgggatac

SEQ ID NO: 4777631 - DNA, 25 bp, Homo sapien
tcacactgaaagttacacaaatctt

SEQ ID NO: 4777632 - DNA, 25 bp, Homo sapien
ccctcacactgaaagttacacaaat

SEQ ID NO: 4777633 - DNA, 25 bp, Homo sapien
ctgaaagttacacaaatcttagtac

SEQ ID NO: 4777634 - DNA, 25 bp, Homo sapien
agccatagagtttgtgtcatatact

SEQ ID NO: 4777635 - DNA, 25 bp, Homo sapien
ggtactcttgactgtggatcgagtg

SEQ ID NO: 4777636 - DNA, 25 bp, Homo sapien
gaagcataggacaatggacaggtaa

SEQ ID NO: 4777637 - DNA, 25 bp, Homo sapien
tcctagagatatcgtgaaaagtggt

SEQ ID NO: 4777638 - DNA, 25 bp, Homo sapien
ctttataaagtagagtgcagcaccc

SEQ ID NO: 4777639 - DNA, 25 bp, Homo sapien
gaatctatacacagaagagcacaag

SEQ ID NO: 4777640 - DNA, 25 bp, Homo sapien
gataagaggaatctatacacagaag

SEQ ID NO: 4777641 - DNA, 25 bp, Homo sapien
agatgcatgcttccatcacgccttc

SEQ ID NO: 4777642 - DNA, 25 bp, Homo sapien
agtccaggatttcggccagatgcat

SEQ ID NO: 4777643 - DNA, 25 bp, Homo sapien
ggtttggaagcattccgacattgtt

SEQ ID NO: 4777644 - DNA, 25 bp, Homo sapien
ggatttcatccggtgcgttcaggaa

SEQ ID NO: 4777645 - DNA, 25 bp, Homo sapien
catccggtgcgttcaggaaatggct

SEQ ID NO: 4777646 - DNA, 25 bp, Homo sapien
gaaatggcttgggagaaggtttgga

SEQ ID NO: 4777647 - DNA, 25 bp, Homo sapien
taatatgctcgtagatgtcatcttt

SEQ ID NO: 4777648 - DNA, 25 bp, Homo sapien
gctcgtagatgtcatcttttgtaaa

SEQ ID NO: 4777649 - DNA, 25 bp, Homo sapien
ttctttaatatgctcgtagatgtca

SEQ ID NO: 4777650 - DNA, 25 bp, Homo sapien
tatgctcgtagatgtcatcttttgt

SEQ ID NO: 4777651 - DNA, 25 bp, Homo sapien
tttttaatgaacagggatccaaatg

SEQ ID NO: 4777652 - DNA, 25 bp, Homo sapien
taatgaacagggatccaaatgcccc

SEQ ID NO: 4777653 - DNA, 25 bp, Homo sapien
ctacacgagagacaacagttttttt

SEQ ID NO: 4777654 - DNA, 25 bp, Homo sapien
agacaacagtttttttaatgaacag

SEQ ID NO: 4777655 - DNA, 25 bp, Homo sapien
tctcggtcctagtcaaagttacttc

SEQ ID NO: 4777656 - DNA, 25 bp, Homo sapien
caaacactgaagaatgtctcggtcc

SEQ ID NO: 4777657 - DNA, 25 bp, Homo sapien
gacagcccaccatagtcttcacaag

SEQ ID NO: 4777658 - DNA, 25 bp, Homo sapien
ttcatgggttcaagggcactgtgct

SEQ ID NO: 4777659 - DNA, 25 bp, Homo sapien
tgtggggatgccaagtacatcaact

SEQ ID NO: 4777660 - DNA, 25 bp, Homo sapien
gggatgccaagtacatcaactggca

SEQ ID NO: 4777661 - DNA, 25 bp, Homo sapien
ttctatcccgccctctgctttgtaa

SEQ ID NO: 4777662 - DNA, 25 bp, Homo sapien
tctgctttgtaaccgggctccccag

SEQ ID NO: 4777663 - DNA, 25 bp, Homo sapien
cgtccggctaataaggacaacattg

SEQ ID NO: 4777664 - DNA, 25 bp, Homo sapien
tctagtttttccagcgtccggctaa

SEQ ID NO: 4777665 - DNA, 25 bp, Homo sapien
tctctgtggcaatggcctctagttt

SEQ ID NO: 4777666 - DNA, 25 bp, Homo sapien
aatggcctctagtttttccagcgtc

SEQ ID NO: 4777667 - DNA, 25 bp, Homo sapien
cttgggaactcatgctaatgttctc

SEQ ID NO: 4777668 - DNA, 25 bp, Homo sapien
tccttgggaactcatgctaatgttc

SEQ ID NO: 4777669 - DNA, 25 bp, Homo sapien
tcatccttgggaactcatgctaatg

SEQ ID NO: 4777670 - DNA, 25 bp, Homo sapien
catccttgggaactcatgctaatgt

SEQ ID NO: 4777671 - DNA, 25 bp, Homo sapien
ttaccgccaggtctctaagattgcc

SEQ ID NO: 4777672 - DNA, 25 bp, Homo sapien
ggaacccattcaggacccaaagctg

SEQ ID NO: 4777673 - DNA, 25 bp, Homo sapien
caccttgatcaagaagtgacccgca

SEQ ID NO: 4777674 - DNA, 25 bp, Homo sapien
gaatgagtcgcatggcttcacacag

SEQ ID NO: 4777675 - DNA, 25 bp, Homo sapien
tcttggaatccatcaacaggatggc

SEQ ID NO: 4777676 - DNA, 25 bp, Homo sapien
tggaatccatcaacaggatggctaa

SEQ ID NO: 4777677 - DNA, 25 bp, Homo sapien
ttgagtcttggaatccatcaacagg

SEQ ID NO: 4777678 - DNA, 25 bp, Homo sapien
gagtcttggaatccatcaacaggat

SEQ ID NO: 4777679 - DNA, 25 bp, Homo sapien
tttgtctcccaattcacttcatcag

SEQ ID NO: 4777680 - DNA, 25 bp, Homo sapien
ctttgtctcccaattcacttcatca

SEQ ID NO: 4777681 - DNA, 25 bp, Homo sapien
tgtctcccaattcacttcatcagcc

SEQ ID NO: 4777682 - DNA, 25 bp, Homo sapien
tctcccaattcacttcatcagcctc

SEQ ID NO: 4777683 - DNA, 25 bp, Homo sapien
tcctgatgcagaacggctgccgtgg

SEQ ID NO: 4777684 - DNA, 25 bp, Homo sapien
ctgccgtgggatgaatgggccttgt

SEQ ID NO: 4777685 - DNA, 25 bp, Homo sapien
tctacagcgggtagtgggaatgcca

SEQ ID NO: 4777686 - DNA, 25 bp, Homo sapien
caaggaaggtgcttgtagctgctaa

SEQ ID NO: 4777687 - DNA, 25 bp, Homo sapien
aaaagaaagggcttgaattcaggtg

SEQ ID NO: 4777688 - DNA, 25 bp, Homo sapien
gaataaaagaaagggcttgaattca

SEQ ID NO: 4777689 - DNA, 25 bp, Homo sapien
ctgtgtggccaagaataaaagaaag

SEQ ID NO: 4777690 - DNA, 25 bp, Homo sapien
caagaataaaagaaagggcttgaat

SEQ ID NO: 4777691 - DNA, 25 bp, Homo sapien
tcccagacattgctggagaaactgg

SEQ ID NO: 4777692 - DNA, 25 bp, Homo sapien
acacccctgccagtaaaggctgggt

SEQ ID NO: 4777693 - DNA, 25 bp, Homo sapien
agacagcaactgtctactccaagca

SEQ ID NO: 4777694 - DNA, 25 bp, Homo sapien
tctctaactagaggaccagaaaagg

SEQ ID NO: 4777695 - DNA, 25 bp, Homo sapien
ttttacccattacagtccacagcat

SEQ ID NO: 4777696 - DNA, 25 bp, Homo sapien
cagtccacagcatctcaggctcagc

SEQ ID NO: 4777697 - DNA, 25 bp, Homo sapien
tttacccattacagtccacagcatc

SEQ ID NO: 4777698 - DNA, 25 bp, Homo sapien
taacatacgccaagtttctagcaag

SEQ ID NO: 4777699 - DNA, 25 bp, Homo sapien
tgcttgaggtttgttaacatacgcc

SEQ ID NO: 4777700 - DNA, 25 bp, Homo sapien
tgctgtttcacataagatggctttg

SEQ ID NO: 4777701 - DNA, 25 bp, Homo sapien
tagcaagtgcgtcccagatgccttg

SEQ ID NO: 4777702 - DNA, 25 bp, Homo sapien
gaacgagtacgctttcccaattcca

SEQ ID NO: 4777703 - DNA, 25 bp, Homo sapien
ctcgaacgagtacgctttcccaatt

SEQ ID NO: 4777704 - DNA, 25 bp, Homo sapien
tcgaacgagtacgctttcccaattc

SEQ ID NO: 4777705 - DNA, 25 bp, Homo sapien
ccattgaccgcaagaaagactttgg

SEQ ID NO: 4777706 - DNA, 25 bp, Homo sapien
cagccctgtgaggatgaagaactgt

SEQ ID NO: 4777707 - DNA, 25 bp, Homo sapien
gagaatctcacgcacttcgccaggc

SEQ ID NO: 4777708 - DNA, 25 bp, Homo sapien
tccagtagttcagtaaaacacatct

SEQ ID NO: 4777709 - DNA, 25 bp, Homo sapien
tcaacagactgtttcagccctggcc

SEQ ID NO: 4777710 - DNA, 25 bp, Homo sapien
aacagactgtttcagccctggccgt

SEQ ID NO: 4777711 - DNA, 25 bp, Homo sapien
ctgcactcaacagactgtttcagcc

SEQ ID NO: 4777712 - DNA, 25 bp, Homo sapien
actcaacagactgtttcagccctgg

SEQ ID NO: 4777713 - DNA, 25 bp, Homo sapien
gagccactcgtctgggtgctggaca

SEQ ID NO: 4777714 - DNA, 25 bp, Homo sapien
caggaaccgagaagagaatgacccc

SEQ ID NO: 4777715 - DNA, 25 bp, Homo sapien
gaatgacccctttttggctatgccc

SEQ ID NO: 4777716 - DNA, 25 bp, Homo sapien
tccaagaagcttagggcaaagacca

SEQ ID NO: 4777717 - DNA, 25 bp, Homo sapien
ttggcggtaggtgagcatgtgagga

SEQ ID NO: 4777718 - DNA, 25 bp, Homo sapien
ctgtggtaaaagctcctgaacaaac

SEQ ID NO: 4777719 - DNA, 25 bp, Homo sapien
tcccatacaccaggggttggcggta

SEQ ID NO: 4777720 - DNA, 25 bp, Homo sapien
catgtgaggaaatgcacctgtggta

SEQ ID NO: 4777721 - DNA, 25 bp, Homo sapien
acagcacagagatgccacgaaggcc

SEQ ID NO: 4777722 - DNA, 25 bp, Homo sapien
aaggccccataggtccctagaagag

SEQ ID NO: 4777723 - DNA, 25 bp, Homo sapien
ctgggaccttgggaatcacggccaa

SEQ ID NO: 4777724 - DNA, 25 bp, Homo sapien
tgatgattagggaaagataccaaca

SEQ ID NO: 4777725 - DNA, 25 bp, Homo sapien
tttgcagatgctctcacttgcccag

SEQ ID NO: 4777726 - DNA, 25 bp, Homo sapien
tttccacaggtaaggtgtcgcccga

SEQ ID NO: 4777727 - DNA, 25 bp, Homo sapien
ctgccattggctcatcctgcatatg

SEQ ID NO: 4777728 - DNA, 25 bp, Homo sapien
gatgtcacgaatccgaaacctctgg

SEQ ID NO: 4777729 - DNA, 25 bp, Homo sapien
aaaggaatatctcaagccccctgcc

SEQ ID NO: 4777730 - DNA, 25 bp, Homo sapien
caaatccaaacagatgttttcttca

SEQ ID NO: 4777731 - DNA, 25 bp, Homo sapien
aatccaaacagatgttttcttcacc

SEQ ID NO: 4777732 - DNA, 25 bp, Homo sapien
taggttttaactggctgctcagtgt

SEQ ID NO: 4777733 - DNA, 25 bp, Homo sapien
tcaaatctaatgcagaacctcagag

SEQ ID NO: 4777734 - DNA, 25 bp, Homo sapien
tacacctgcttcatgcggagggaat

SEQ ID NO: 4777735 - DNA, 25 bp, Homo sapien
taaatagtatcccactgctgagacc

SEQ ID NO: 4777736 - DNA, 25 bp, Homo sapien
gattgcttgatgagaatttcccctt

SEQ ID NO: 4777737 - DNA, 25 bp, Homo sapien
agccccgcaaactgccatcacacgt

SEQ ID NO: 4777738 - DNA, 25 bp, Homo sapien
tgtgaggaagacaggtgagttaaat

SEQ ID NO: 4777739 - DNA, 25 bp, Homo sapien
tgccatcacacgtgtccccatggat

SEQ ID NO: 4777740 - DNA, 25 bp, Homo sapien
gtgagttaaattccgatcccagccc

SEQ ID NO: 4777741 - DNA, 25 bp, Homo sapien
gtctccaccgattaatatcccaatg

SEQ ID NO: 4777742 - DNA, 25 bp, Homo sapien
ttaatatcccaatgtaggcaacgga

SEQ ID NO: 4777743 - DNA, 25 bp, Homo sapien
aaaatgtagtctccaccgattaata

SEQ ID NO: 4777744 - DNA, 25 bp, Homo sapien
tcccaatgtaggcaacggatacatt

SEQ ID NO: 4777745 - DNA, 25 bp, Homo sapien
caaccactgctgtcgtcagggctga

SEQ ID NO: 4777746 - DNA, 25 bp, Homo sapien
atagctgcacagaaccgtggagtac

SEQ ID NO: 4777747 - DNA, 25 bp, Homo sapien
aaccgtggagtacatcagcagaaac

SEQ ID NO: 4777748 - DNA, 25 bp, Homo sapien
cagggctgaattgtaatagctgcac

SEQ ID NO: 4777749 - DNA, 25 bp, Homo sapien
acactggagtgtgtgcctcactacg

SEQ ID NO: 4777750 - DNA, 25 bp, Homo sapien
cagacactggagtgtgtgcctcact

SEQ ID NO: 4777751 - DNA, 25 bp, Homo sapien
aagcagacactggagtgtgtgcctc

SEQ ID NO: 4777752 - DNA, 25 bp, Homo sapien
ctgtgacaaggaagcagacactgga

SEQ ID NO: 4777753 - DNA, 25 bp, Homo sapien
cacaacattcttccattggttgaat

SEQ ID NO: 4777754 - DNA, 25 bp, Homo sapien
acattcttccattggttgaattcag

SEQ ID NO: 4777755 - DNA, 25 bp, Homo sapien
aacacaacattcttccattggttga

SEQ ID NO: 4777756 - DNA, 25 bp, Homo sapien
gaaagaagaaactgtaggataaaca

SEQ ID NO: 4777757 - DNA, 25 bp, Homo sapien
gaccaatgggaagaaatttgccctg

SEQ ID NO: 4777758 - DNA, 25 bp, Homo sapien
gttaaccagggaaaatgactcatca

SEQ ID NO: 4777759 - DNA, 25 bp, Homo sapien
gaattcccggaggaatgagtcacac

SEQ ID NO: 4777760 - DNA, 25 bp, Homo sapien
actgtgtaagtccaaagtctgggct

SEQ ID NO: 4777761 - DNA, 25 bp, Homo sapien
atataaacccgtggaaatggctgtt

SEQ ID NO: 4777762 - DNA, 25 bp, Homo sapien
tctttatcgagattggtgccacttg

SEQ ID NO: 4777763 - DNA, 25 bp, Homo sapien
aaagagagctctttatcgagattgg

SEQ ID NO: 4777764 - DNA, 25 bp, Homo sapien
cgagattggtgccacttggtagttt

SEQ ID NO: 4777765 - DNA, 25 bp, Homo sapien
ggcattgtagaaaagtactccgtat

SEQ ID NO: 4777766 - DNA, 25 bp, Homo sapien
gttgggataatcatgaagcaggcat

SEQ ID NO: 4777767 - DNA, 25 bp, Homo sapien
tgaagcaggcattgtagaaaagtac

SEQ ID NO: 4777768 - DNA, 25 bp, Homo sapien
aataataagagttgggataatcatg

SEQ ID NO: 4777769 - DNA, 25 bp, Homo sapien
acgtgacaggcagccacacaaaagc

SEQ ID NO: 4777770 - DNA, 25 bp, Homo sapien
caaattatccattgcagtcatttca

SEQ ID NO: 4777771 - DNA, 25 bp, Homo sapien
cagtcagtaagtagaaaaacttgtg

SEQ ID NO: 4777772 - DNA, 25 bp, Homo sapien
aacagtcagtaagtagaaaaacttg

SEQ ID NO: 4777773 - DNA, 25 bp, Homo sapien
tatagccttctaagttaaaagcaag

SEQ ID NO: 4777774 - DNA, 25 bp, Homo sapien
ccttctaagttaaaagcaaggtcag

SEQ ID NO: 4777775 - DNA, 25 bp, Homo sapien
tttggtataaactccatttgctgct

SEQ ID NO: 4777776 - DNA, 25 bp, Homo sapien
gctgctgtgaagatatcattcagga

SEQ ID NO: 4777777 - DNA, 25 bp, Homo sapien
cagcccatcagatggcttcgactca

SEQ ID NO: 4777778 - DNA, 25 bp, Homo sapien
gatggcttcgactcaatcgtgaatg

SEQ ID NO: 4777779 - DNA, 25 bp, Homo sapien
ctttccccgctttgtggtagtgaat

SEQ ID NO: 4777780 - DNA, 25 bp, Homo sapien
ggtagtgaatgattaattcctctgc

SEQ ID NO: 4777781 - DNA, 25 bp, Homo sapien
tgtgacccctctatggctcctttct

SEQ ID NO: 4777782 - DNA, 25 bp, Homo sapien
aaatggcaaggcaggtatccatcct

SEQ ID NO: 4777783 - DNA, 25 bp, Homo sapien
gcaccccgtccatcaaaatggcaag

SEQ ID NO: 4777784 - DNA, 25 bp, Homo sapien
ggcaggtatccatccttctatgtga

SEQ ID NO: 4777785 - DNA, 25 bp, Homo sapien
tacccacatgtgattcagcgtgaag

SEQ ID NO: 4777786 - DNA, 25 bp, Homo sapien
cacatgtgattcagcgtgaagaaga

SEQ ID NO: 4777787 - DNA, 25 bp, Homo sapien
cccacatgtgattcagcgtgaagaa

SEQ ID NO: 4777788 - DNA, 25 bp, Homo sapien
ctacccacatgtgattcagcgtgaa

SEQ ID NO: 4777789 - DNA, 25 bp, Homo sapien
tggggatccattctgtgagtgccag

SEQ ID NO: 4777790 - DNA, 25 bp, Homo sapien
ctgtgagtgccagaggaagagccag

SEQ ID NO: 4777791 - DNA, 25 bp, Homo sapien
caggtggggatccattctgtgagtg

SEQ ID NO: 4777792 - DNA, 25 bp, Homo sapien
atccattctgtgagtgccagaggaa

SEQ ID NO: 4777793 - DNA, 25 bp, Homo sapien
tctaccatcggaaacagcaactgct

SEQ ID NO: 4777794 - DNA, 25 bp, Homo sapien
gagctaagttttgaacccagggatg

SEQ ID NO: 4777795 - DNA, 25 bp, Homo sapien
tgcccacgaagacttggagtcctcg

SEQ ID NO: 4777796 - DNA, 25 bp, Homo sapien
tagtagtcatgcaccagtgttggct

SEQ ID NO: 4777797 - DNA, 25 bp, Homo sapien
tgctatgaaagccccgagaataatg

SEQ ID NO: 4777798 - DNA, 25 bp, Homo sapien
tgaaagccccgagaataatggcaaa

SEQ ID NO: 4777799 - DNA, 25 bp, Homo sapien
ggatgatgttgagtgaatactgctt

SEQ ID NO: 4777800 - DNA, 25 bp, Homo sapien
tgaggatgatgttgagtgaatactg

SEQ ID NO: 4777801 - DNA, 25 bp, Homo sapien
catctggctcaggaaacaggtttac

SEQ ID NO: 4777802 - DNA, 25 bp, Homo sapien
caatggctactagaatttgctgggt

SEQ ID NO: 4777803 - DNA, 25 bp, Homo sapien
gaagcgctcctgctggtggatctag

SEQ ID NO: 4777804 - DNA, 25 bp, Homo sapien
gaattgatatccctcataccctgca

SEQ ID NO: 4777805 - DNA, 25 bp, Homo sapien
ccagaagtaaggtaagtggaatggt

SEQ ID NO: 4777806 - DNA, 25 bp, Homo sapien
taaggtaagtggaatggtgaatttc

SEQ ID NO: 4777807 - DNA, 25 bp, Homo sapien
aagtaaggtaagtggaatggtgaat

SEQ ID NO: 4777808 - DNA, 25 bp, Homo sapien
aagtggaatggtgaatttcctgagc

SEQ ID NO: 4777809 - DNA, 25 bp, Homo sapien
agagtgaagcatgtcagacaccaag

SEQ ID NO: 4777810 - DNA, 25 bp, Homo sapien
gcatgtcagacaccaagggttggtt

SEQ ID NO: 4777811 - DNA, 25 bp, Homo sapien
agcatgtcagacaccaagggttggt

SEQ ID NO: 4777812 - DNA, 25 bp, Homo sapien
ggaaaagagtgaagcatgtcagaca

SEQ ID NO: 4777813 - DNA, 25 bp, Homo sapien
cttcacatcatcaaccacactgcat

SEQ ID NO: 4777814 - DNA, 25 bp, Homo sapien
gcttcacatcatcaaccacactgca

SEQ ID NO: 4777815 - DNA, 25 bp, Homo sapien
aagctactgcatttgagtctgggta

SEQ ID NO: 4777816 - DNA, 25 bp, Homo sapien
taccttaatgtctacagctctcaga

SEQ ID NO: 4777817 - DNA, 25 bp, Homo sapien
tacaccaaggctgaggagatgttcc

SEQ ID NO: 4777818 - DNA, 25 bp, Homo sapien
tgcaccaaacctggtctacaccaag

SEQ ID NO: 4777819 - DNA, 25 bp, Homo sapien
agtcaagataaggttgcactccaac

SEQ ID NO: 4777820 - DNA, 25 bp, Homo sapien
atttacttgtgcttgataatccact

SEQ ID NO: 4777821 - DNA, 25 bp, Homo sapien
tggtttccaacgtagaggagaggca

SEQ ID NO: 4777822 - DNA, 25 bp, Homo sapien
tgtgcttgataatccacttatgtgg

SEQ ID NO: 4777823 - DNA, 25 bp, Homo sapien
taatccacttatgtggtttccaacg

SEQ ID NO: 4777824 - DNA, 25 bp, Homo sapien
ctaacacatgtacgccagggtccaa

SEQ ID NO: 4777825 - DNA, 25 bp, Homo sapien
agaagtcaaccctgccagcactttg

SEQ ID NO: 4777826 - DNA, 25 bp, Homo sapien
tttgttacggcagcctcagctaaca

SEQ ID NO: 4777827 - DNA, 25 bp, Homo sapien
ggcagcctcagctaacacatgtacg

SEQ ID NO: 4777828 - DNA, 25 bp, Homo sapien
cacctgttgtatgggactggtctaa

SEQ ID NO: 4777829 - DNA, 25 bp, Homo sapien
ttccaagcactagagaaacagcagc

SEQ ID NO: 4777830 - DNA, 25 bp, Homo sapien
tgcctgccctaatgtctggaaccca

SEQ ID NO: 4777831 - DNA, 25 bp, Homo sapien
tgggctcccctgattactgatgctg

SEQ ID NO: 4777832 - DNA, 25 bp, Homo sapien
cagtggcagaggtgaataattacaa

SEQ ID NO: 4777833 - DNA, 25 bp, Homo sapien
catttaaatgtcatcaagggctact

SEQ ID NO: 4777834 - DNA, 25 bp, Homo sapien
aatcagtaaactagagctcaaatcc

SEQ ID NO: 4777835 - DNA, 25 bp, Homo sapien
gctactttcatggtacagtggcaga

SEQ ID NO: 4777836 - DNA, 25 bp, Homo sapien
tgacctgtactctaaaatcaatgtg

SEQ ID NO: 4777837 - DNA, 25 bp, Homo sapien
gaagtttctatccagtgcaggcagg

SEQ ID NO: 4777838 - DNA, 25 bp, Homo sapien
agtacagtgtgtatagaaattgacc

SEQ ID NO: 4777839 - DNA, 25 bp, Homo sapien
tttcacatcttctatcacagtcata

SEQ ID NO: 4777840 - DNA, 25 bp, Homo sapien
gattttgtttagcttggacacatat

SEQ ID NO: 4777841 - DNA, 25 bp, Homo sapien
tcaaaatcagggaagtgaatgattt

SEQ ID NO: 4777842 - DNA, 25 bp, Homo sapien
cttatcaaaatcagggaagtgaatg

SEQ ID NO: 4777843 - DNA, 25 bp, Homo sapien
acatatagtatcattatggtggctg

SEQ ID NO: 4777844 - DNA, 25 bp, Homo sapien
ggcacaggtggcagtgagtcgacat

SEQ ID NO: 4777845 - DNA, 25 bp, Homo sapien
acaggtggcagtgagtcgacattgt

SEQ ID NO: 4777846 - DNA, 25 bp, Homo sapien
gcacaggtggcagtgagtcgacatt

SEQ ID NO: 4777847 - DNA, 25 bp, Homo sapien
gaggcacaggtggcagtgagtcgac

SEQ ID NO: 4777848 - DNA, 25 bp, Homo sapien
ctgtccaattccaaggaaaattggt

SEQ ID NO: 4777849 - DNA, 25 bp, Homo sapien
caattccaaggaaaattggtgacgg

SEQ ID NO: 4777850 - DNA, 25 bp, Homo sapien
tccaattccaaggaaaattggtgac

SEQ ID NO: 4777851 - DNA, 25 bp, Homo sapien
tgtccaattccaaggaaaattggtg

SEQ ID NO: 4777852 - DNA, 25 bp, Homo sapien
ggaatcccagtactgtgtgtgccct

SEQ ID NO: 4777853 - DNA, 25 bp, Homo sapien
agtactgtgtgtgccctgttcactc

SEQ ID NO: 4777854 - DNA, 25 bp, Homo sapien
ctttgctttcccgttttcagtatgc

SEQ ID NO: 4777855 - DNA, 25 bp, Homo sapien
tgctttcccgttttcagtatgcttg

SEQ ID NO: 4777856 - DNA, 25 bp, Homo sapien
tcagcggaccaagcagagaaacaat

SEQ ID NO: 4777857 - DNA, 25 bp, Homo sapien
gtgtccctcctagagtggctctcag

SEQ ID NO: 4777858 - DNA, 25 bp, Homo sapien
gcagagaaacaatgccaggaggcac

SEQ ID NO: 4777859 - DNA, 25 bp, Homo sapien
cacagtcacagcagcgagaagggac

SEQ ID NO: 4777860 - DNA, 25 bp, Homo sapien
tgccaagaatactgacggccacagg

SEQ ID NO: 4777861 - DNA, 25 bp, Homo sapien
gtgtcaggtcactcccatgtcaaaa

SEQ ID NO: 4777862 - DNA, 25 bp, Homo sapien
cagcaggctgcaacacactggagag

SEQ ID NO: 4777863 - DNA, 25 bp, Homo sapien
tccaggtttaggtacagtatgtcca

SEQ ID NO: 4777864 - DNA, 25 bp, Homo sapien
acagtgatttagatcatgtaattcc

SEQ ID NO: 4777865 - DNA, 25 bp, Homo sapien
gtgatttagatcatgtaattcccct

SEQ ID NO: 4777866 - DNA, 25 bp, Homo sapien
gccacagtgatttagatcatgtaat

SEQ ID NO: 4777867 - DNA, 25 bp, Homo sapien
agccacagtgatttagatcatgtaa

SEQ ID NO: 4777868 - DNA, 25 bp, Homo sapien
ggaaggagcaggtcccgtagaagag

SEQ ID NO: 4777869 - DNA, 25 bp, Homo sapien
ccgtaggtggtcagcagcgccttgt

SEQ ID NO: 4777870 - DNA, 25 bp, Homo sapien
gggccacccgcgagggcagccgcgc

SEQ ID NO: 4777871 - DNA, 25 bp, Homo sapien
agcaggtcccgtagaagagcgccga

SEQ ID NO: 4777872 - DNA, 25 bp, Homo sapien
ccccgccgcccgccagccccggctg

SEQ ID NO: 4777873 - DNA, 25 bp, Homo sapien
taaggtgcttagcttatgcccaagg

SEQ ID NO: 4777874 - DNA, 25 bp, Homo sapien
ccaaatctcattacagggcccttaa

SEQ ID NO: 4777875 - DNA, 25 bp, Homo sapien
ccaagttaacatgctagggatgaca

SEQ ID NO: 4777876 - DNA, 25 bp, Homo sapien
tctgaagtaaagcaagaaggtggct

SEQ ID NO: 4777877 - DNA, 25 bp, Homo sapien
ttcaaagtgggggtgcgctgctctc

SEQ ID NO: 4777878 - DNA, 25 bp, Homo sapien
cagtcaggttggcaagctctatgag

SEQ ID NO: 4777879 - DNA, 25 bp, Homo sapien
tctatgagcgcgagggctccatgca

SEQ ID NO: 4777880 - DNA, 25 bp, Homo sapien
catcagactgaaggtattccagagg

SEQ ID NO: 4777881 - DNA, 25 bp, Homo sapien
atagggtcctgccatttagccaggc

SEQ ID NO: 4777882 - DNA, 25 bp, Homo sapien
gctagagtgtaatgacgggatttta

SEQ ID NO: 4777883 - DNA, 25 bp, Homo sapien
gaggcaccgcaccaggcctgtattt

SEQ ID NO: 4777884 - DNA, 25 bp, Homo sapien
tagagatagggtcctgccatttagc

SEQ ID NO: 4777885 - DNA, 25 bp, Homo sapien
gctcaatgagctaataatcctgcta

SEQ ID NO: 4777886 - DNA, 25 bp, Homo sapien
cctgctactacagtccagtcttgac

SEQ ID NO: 4777887 - DNA, 25 bp, Homo sapien
aataatcctgctactacagtccagt

SEQ ID NO: 4777888 - DNA, 25 bp, Homo sapien
ggctcaatgagctaataatcctgct

SEQ ID NO: 4777889 - DNA, 25 bp, Homo sapien
aaaggttgcattcatgacgaatgaa

SEQ ID NO: 4777890 - DNA, 25 bp, Homo sapien
gatcctaagatcctaataccactca

SEQ ID NO: 4777891 - DNA, 25 bp, Homo sapien
aataaactgtagtctgggcactcta

SEQ ID NO: 4777892 - DNA, 25 bp, Homo sapien
tgttttaattggcacgtagctaagg

SEQ ID NO: 4777893 - DNA, 25 bp, Homo sapien
tgacatagccccagcccgcgctgtg

SEQ ID NO: 4777894 - DNA, 25 bp, Homo sapien
gctgtgcatcttcacggtggactaa

SEQ ID NO: 4777895 - DNA, 25 bp, Homo sapien
tcttcacggtggactaaaggcagca

SEQ ID NO: 4777896 - DNA, 25 bp, Homo sapien
agcccgcgctgtgcatcttcacggt

SEQ ID NO: 4777897 - DNA, 25 bp, Homo sapien
tgcttcggacagtggcggtttgcat

SEQ ID NO: 4777898 - DNA, 25 bp, Homo sapien
tttgctgagtgtgtccgtgggctcc

SEQ ID NO: 4777899 - DNA, 25 bp, Homo sapien
ccttgttgtcggcagcctgatgttt

SEQ ID NO: 4777900 - DNA, 25 bp, Homo sapien
cggtttgcatgggtgaatctgctca

SEQ ID NO: 4777901 - DNA, 25 bp, Homo sapien
tgagctgtccactttgaacaaaggc

SEQ ID NO: 4777902 - DNA, 25 bp, Homo sapien
tccacagtctggatagtcacacaga

SEQ ID NO: 4777903 - DNA, 25 bp, Homo sapien
tctctccggtgtgaagacgctgatg

SEQ ID NO: 4777904 - DNA, 25 bp, Homo sapien
gacgctgatgtgttttgagctgtcc

SEQ ID NO: 4777905 - DNA, 25 bp, Homo sapien
cagagtttatccttacttccctcct

SEQ ID NO: 4777906 - DNA, 25 bp, Homo sapien
caacctcattagctactggggttaa

SEQ ID NO: 4777907 - DNA, 25 bp, Homo sapien
cctcattagctactggggttaaggg

SEQ ID NO: 4777908 - DNA, 25 bp, Homo sapien
ggcagagtttatccttacttccctc

SEQ ID NO: 4777909 - DNA, 25 bp, Homo sapien
cctggagcgatttctcccgtggaaa

SEQ ID NO: 4777910 - DNA, 25 bp, Homo sapien
tgttacaacggattctgctggatga

SEQ ID NO: 4777911 - DNA, 25 bp, Homo sapien
tattaaatcgcggacagtatctgct

SEQ ID NO: 4777912 - DNA, 25 bp, Homo sapien
gagtccttttgtgagcctggagcga

SEQ ID NO: 4777913 - DNA, 25 bp, Homo sapien
gccgcctcccgagttctaccaattc

SEQ ID NO: 4777914 - DNA, 25 bp, Homo sapien
gcaaccgccgcctcccgagttctac

SEQ ID NO: 4777915 - DNA, 25 bp, Homo sapien
taccaattctcctgccttagcctcc

SEQ ID NO: 4777916 - DNA, 25 bp, Homo sapien
caccacgtccggcgaatttttatat

SEQ ID NO: 4777917 - DNA, 25 bp, Homo sapien
actactgagctgtgccatcgtggga

SEQ ID NO: 4777918 - DNA, 25 bp, Homo sapien
gaaggtcgcctcactaatcactgta

SEQ ID NO: 4777919 - DNA, 25 bp, Homo sapien
taacgaccttcccagctttaagcag

SEQ ID NO: 4777920 - DNA, 25 bp, Homo sapien
gatagaaatactcctggctcacctg

SEQ ID NO: 4777921 - DNA, 25 bp, Homo sapien
tcagccgcagaacaggcccagaagt

SEQ ID NO: 4777922 - DNA, 25 bp, Homo sapien
ctgccctctcgcagtcggtggaaca

SEQ ID NO: 4777923 - DNA, 25 bp, Homo sapien
tcatccctctcgtttcctctcggaa

SEQ ID NO: 4777924 - DNA, 25 bp, Homo sapien
aaacactgtgcgctccctgccctct

SEQ ID NO: 4777925 - DNA, 25 bp, Homo sapien
tctcgcagtcggtggaacaactcaa

SEQ ID NO: 4777926 - DNA, 25 bp, Homo sapien
cgccgggaggatgtcagtggccgtt

SEQ ID NO: 4777927 - DNA, 25 bp, Homo sapien
gaggatgtcagtggccgttgacccg

SEQ ID NO: 4777928 - DNA, 25 bp, Homo sapien
tgtcagtggccgttgacccggcctc

SEQ ID NO: 4777929 - DNA, 25 bp, Homo sapien
ccgggaggatgtcagtggccgttga

SEQ ID NO: 4777930 - DNA, 25 bp, Homo sapien
ctcgtcctcacctcccgaggcggcg

SEQ ID NO: 4777931 - DNA, 25 bp, Homo sapien
cgcgccccggccacgaagccccgag

SEQ ID NO: 4777932 - DNA, 25 bp, Homo sapien
agccccgagtgctcggcggctgcgg

SEQ ID NO: 4777933 - DNA, 25 bp, Homo sapien
cctcctcgtcctcacctcccgaggc

SEQ ID NO: 4777934 - DNA, 25 bp, Homo sapien
gttgtgtgcgttctcgccccagcgc

SEQ ID NO: 4777935 - DNA, 25 bp, Homo sapien
caccgccgcacgttggcttgatcgg

SEQ ID NO: 4777936 - DNA, 25 bp, Homo sapien
ggtcgtcctgatgaccgacaccagc

SEQ ID NO: 4777937 - DNA, 25 bp, Homo sapien
gtacaccatgaagtcgctgaagccg

SEQ ID NO: 4777938 - DNA, 25 bp, Homo sapien
tgacgtttcccggaatcctgcgcag

SEQ ID NO: 4777939 - DNA, 25 bp, Homo sapien
gctcatggcagactgacgtttcccg

SEQ ID NO: 4777940 - DNA, 25 bp, Homo sapien
tgctccgagtcgcaggctcagtcct

SEQ ID NO: 4777941 - DNA, 25 bp, Homo sapien
ctaactagttgagcagacggcaccg

SEQ ID NO: 4777942 - DNA, 25 bp, Homo sapien
aaaataacaacctgccgccgcggtg

SEQ ID NO: 4777943 - DNA, 25 bp, Homo sapien
ggcggaaccagtcaccgcgaggccg

SEQ ID NO: 4777944 - DNA, 25 bp, Homo sapien
gcgctgagcccccaaaaataacaac

SEQ ID NO: 4777945 - DNA, 25 bp, Homo sapien
gcttttcccgcgttacatttcgcgc

SEQ ID NO: 4777946 - DNA, 25 bp, Homo sapien
tcctccgggccgattgtgggcctcc

SEQ ID NO: 4777947 - DNA, 25 bp, Homo sapien
cgattgtgggcctccggttccccat

SEQ ID NO: 4777948 - DNA, 25 bp, Homo sapien
cagcaccgccctgactcctccgggc

SEQ ID NO: 4777949 - DNA, 25 bp, Homo sapien
gccctgactcctccgggccgattgt

SEQ ID NO: 4777950 - DNA, 25 bp, Homo sapien
catggatcatggagggaaattgtgt

SEQ ID NO: 4777951 - DNA, 25 bp, Homo sapien
aatgggactcacacatttctcggtc

SEQ ID NO: 4777952 - DNA, 25 bp, Homo sapien
cagttcactcaacaattgggtaagg

SEQ ID NO: 4777953 - DNA, 25 bp, Homo sapien
gaagaataagtctgtactgcctgtg

SEQ ID NO: 4777954 - DNA, 25 bp, Homo sapien
ttttgatataatcataacccttcat

SEQ ID NO: 4777955 - DNA, 25 bp, Homo sapien
tgggatagggccctcgaaccctggc

SEQ ID NO: 4777956 - DNA, 25 bp, Homo sapien
ggcgaacggctgaggtcgctacccc

SEQ ID NO: 4777957 - DNA, 25 bp, Homo sapien
tctacggcaagttggacgaagttga

SEQ ID NO: 4777958 - DNA, 25 bp, Homo sapien
ctggtggccgccgaaggtaggagga

SEQ ID NO: 4777959 - DNA, 25 bp, Homo sapien
caagtgcttcccagtgtattaaagg

SEQ ID NO: 4777960 - DNA, 25 bp, Homo sapien
ccttcaaactggtatgactgagcca

SEQ ID NO: 4777961 - DNA, 25 bp, Homo sapien
tagtaaatcggcttgaggtcatgaa

SEQ ID NO: 4777962 - DNA, 25 bp, Homo sapien
tcctatttgaagacgctgacagcaa

SEQ ID NO: 4777963 - DNA, 25 bp, Homo sapien
tcaaatagcttttatccctattgtt

SEQ ID NO: 4777964 - DNA, 25 bp, Homo sapien
caaatagcttttatccctattgttt

SEQ ID NO: 4777965 - DNA, 25 bp, Homo sapien
cagccaaaacatggtattttcaaat

SEQ ID NO: 4777966 - DNA, 25 bp, Homo sapien
tcaagcctggtctcagtgaagcaca

SEQ ID NO: 4777967 - DNA, 25 bp, Homo sapien
taacaacctcgcgtaaggcactggg

SEQ ID NO: 4777968 - DNA, 25 bp, Homo sapien
agtggagcccaagccttagactgtg

SEQ ID NO: 4777969 - DNA, 25 bp, Homo sapien
ggctccagaggtctcccagaatatt

SEQ ID NO: 4777970 - DNA, 25 bp, Homo sapien
cagtgcccggcacgcagtaaccatt

SEQ ID NO: 4777971 - DNA, 25 bp, Homo sapien
tccccgaggataggcactgtctgtg

SEQ ID NO: 4777972 - DNA, 25 bp, Homo sapien
tgtgccaccaaattgcactggatgg

SEQ ID NO: 4777973 - DNA, 25 bp, Homo sapien
tcccaggacgtgttagtgaagctcc

SEQ ID NO: 4777974 - DNA, 25 bp, Homo sapien
cacttttttgggctgagctgttaga

SEQ ID NO: 4777975 - DNA, 25 bp, Homo sapien
ctgggccaagggagtcagactctaa

SEQ ID NO: 4777976 - DNA, 25 bp, Homo sapien
ctccagaggctcgagagcaggccat

SEQ ID NO: 4777977 - DNA, 25 bp, Homo sapien
tagatgttgcttttcccgtgtcatg

SEQ ID NO: 4777978 - DNA, 25 bp, Homo sapien
tcagagttcggcagctgcgtacaaa

SEQ ID NO: 4777979 - DNA, 25 bp, Homo sapien
gatagtatagactcctccgcggaag

SEQ ID NO: 4777980 - DNA, 25 bp, Homo sapien
ggctttgaactggaacccaagtgca

SEQ ID NO: 4777981 - DNA, 25 bp, Homo sapien
tcacagctgagttttcggagaccaa

SEQ ID NO: 4777982 - DNA, 25 bp, Homo sapien
gaacctagccggtacaacatcaggg

SEQ ID NO: 4777983 - DNA, 25 bp, Homo sapien
ctttgaagattagccagagagccct

SEQ ID NO: 4777984 - DNA, 25 bp, Homo sapien
gatcgtgccaggttgtacatagccc

SEQ ID NO: 4777985 - DNA, 25 bp, Homo sapien
cacgttctgaacctgtaatgggcta

SEQ ID NO: 4777986 - DNA, 25 bp, Homo sapien
gaatgcctccgaagtcagagttgga

SEQ ID NO: 4777987 - DNA, 25 bp, Homo sapien
tttgagctggttatagccaagccca

SEQ ID NO: 4777988 - DNA, 25 bp, Homo sapien
cgttttcattccacgcaaggtgggc

SEQ ID NO: 4777989 - DNA, 25 bp, Homo sapien
gatgctttgaacaagacccctctag

SEQ ID NO: 4777990 - DNA, 25 bp, Homo sapien
aaactgtactgtgcggtgctggcag

SEQ ID NO: 4777991 - DNA, 25 bp, Homo sapien
gatcagcaagtccatgccattccag

SEQ ID NO: 4777992 - DNA, 25 bp, Homo sapien
tgcttcggagcagctgagcctgcgt

SEQ ID NO: 4777993 - DNA, 25 bp, Homo sapien
gcttcacgggaaggagactgctgtc

SEQ ID NO: 4777994 - DNA, 25 bp, Homo sapien
tgctctctccacatggcggcctccg

SEQ ID NO: 4777995 - DNA, 25 bp, Homo sapien
agaacaggagctgcccgtgcctgcc

SEQ ID NO: 4777996 - DNA, 25 bp, Homo sapien
ccctgttctcagcagcagtgggcct

SEQ ID NO: 4777997 - DNA, 25 bp, Homo sapien
gaaaggcagaacaggagctgcccgt

SEQ ID NO: 4777998 - DNA, 25 bp, Homo sapien
gaactgggttgctgtgaccaaggta

SEQ ID NO: 4777999 - DNA, 25 bp, Homo sapien
tgctgattgatgaatagaccctgcc

SEQ ID NO: 4778000 - DNA, 25 bp, Homo sapien
tgagaggatagagctggagccagcg

SEQ ID NO: 4778001 - DNA, 25 bp, Homo sapien
aatgggaacgccgtgtggcctatga

SEQ ID NO: 4778002 - DNA, 25 bp, Homo sapien
atgggcctcctaccatcccagggtg

SEQ ID NO: 4778003 - DNA, 25 bp, Homo sapien
agcactgccctgctgcgcctggaat

SEQ ID NO: 4778004 - DNA, 25 bp, Homo sapien
gggctgatggctcaatacccagtgg

SEQ ID NO: 4778005 - DNA, 25 bp, Homo sapien
caggccgaggcccacctaaaggaag

SEQ ID NO: 4778006 - DNA, 25 bp, Homo sapien
ggcttcaattgcacctggagagaac

SEQ ID NO: 4778007 - DNA, 25 bp, Homo sapien
ctggagagaacttgcagtgggcaac

SEQ ID NO: 4778008 - DNA, 25 bp, Homo sapien
tgggcaacgggcgtgtccaggagag

SEQ ID NO: 4778009 - DNA, 25 bp, Homo sapien
tgagaggcttcaattgcacctggag

SEQ ID NO: 4778010 - DNA, 25 bp, Homo sapien
gaagccggtctagaaaggtgacagc

SEQ ID NO: 4778011 - DNA, 25 bp, Homo sapien
gccagatcagaagccggtctagaaa

SEQ ID NO: 4778012 - DNA, 25 bp, Homo sapien
tgtggatcccgagccagatcagaag

SEQ ID NO: 4778013 - DNA, 25 bp, Homo sapien
tagtccttgtggatcccgagccaga

SEQ ID NO: 4778014 - DNA, 25 bp, Homo sapien
ccagcacgcgtcgtccagaagcgtg

SEQ ID NO: 4778015 - DNA, 25 bp, Homo sapien
gaagcgtgtcaaagccatgcagact

SEQ ID NO: 4778016 - DNA, 25 bp, Homo sapien
gcgtcgtccagaagcgtgtcaaagc

SEQ ID NO: 4778017 - DNA, 25 bp, Homo sapien
ggtgtggacccagcacgcgtcgtcc

SEQ ID NO: 4778018 - DNA, 25 bp, Homo sapien
ccacggcgctgaggccagcgtcctg

SEQ ID NO: 4778019 - DNA, 25 bp, Homo sapien
caacagctgctaacgggagaggagc

SEQ ID NO: 4778020 - DNA, 25 bp, Homo sapien
gggcagcggcgactgtgcattttta

SEQ ID NO: 4778021 - DNA, 25 bp, Homo sapien
gagcagctcaccagcgtcacaacag

SEQ ID NO: 4778022 - DNA, 25 bp, Homo sapien
tcacagtcccccagctaaggcacag

SEQ ID NO: 4778023 - DNA, 25 bp, Homo sapien
agtcccccagctaaggcacagccac

SEQ ID NO: 4778024 - DNA, 25 bp, Homo sapien
ccccagctaaggcacagccacgtac

SEQ ID NO: 4778025 - DNA, 25 bp, Homo sapien
acagtcccccagctaaggcacagcc

SEQ ID NO: 4778026 - DNA, 25 bp, Homo sapien
cagatacgcccagtgggacttgcac

SEQ ID NO: 4778027 - DNA, 25 bp, Homo sapien
tctgttaaaccaaacgctaggtgct

SEQ ID NO: 4778028 - DNA, 25 bp, Homo sapien
taggtgctcactagtccaattgtac

SEQ ID NO: 4778029 - DNA, 25 bp, Homo sapien
taccactgaactaagtgaggctcgg

SEQ ID NO: 4778030 - DNA, 25 bp, Homo sapien
cattcaccgtgagggagacagtact

SEQ ID NO: 4778031 - DNA, 25 bp, Homo sapien
taaatggaagagcagcagatagcct

SEQ ID NO: 4778032 - DNA, 25 bp, Homo sapien
catcggatgaacatgtctgctgaca

SEQ ID NO: 4778033 - DNA, 25 bp, Homo sapien
tattgaagagtagtctgcccacagc

SEQ ID NO: 4778034 - DNA, 25 bp, Homo sapien
tctggcgcacgccttgtggcttagg

SEQ ID NO: 4778035 - DNA, 25 bp, Homo sapien
tcccggcacaggcaaaaatggctta

SEQ ID NO: 4778036 - DNA, 25 bp, Homo sapien
ggagttgcctactaatctggcgcac

SEQ ID NO: 4778037 - DNA, 25 bp, Homo sapien
taggagggcatttgtttcccactgc

SEQ ID NO: 4778038 - DNA, 25 bp, Homo sapien
ttgtcactgagatcgcaggccacgt

SEQ ID NO: 4778039 - DNA, 25 bp, Homo sapien
gcttgagagctggacccttctctga

SEQ ID NO: 4778040 - DNA, 25 bp, Homo sapien
aacagtgagatccagaagcagatca

SEQ ID NO: 4778041 - DNA, 25 bp, Homo sapien
cgtcaatggccttaggtggatctca

SEQ ID NO: 4778042 - DNA, 25 bp, Homo sapien
acgcaagactgttttagtccttgaa

SEQ ID NO: 4778043 - DNA, 25 bp, Homo sapien
aacgcaagactgttttagtccttga

SEQ ID NO: 4778044 - DNA, 25 bp, Homo sapien
taacgcaagactgttttagtccttg

SEQ ID NO: 4778045 - DNA, 25 bp, Homo sapien
cgcaagactgttttagtccttgaaa

SEQ ID NO: 4778046 - DNA, 25 bp, Homo sapien
gctgctgctgcgctcttcaaggaga

SEQ ID NO: 4778047 - DNA, 25 bp, Homo sapien
tcgatcatttcgttttcagagatcc

SEQ ID NO: 4778048 - DNA, 25 bp, Homo sapien
cgctcttcaaggagaagcgtttgaa

SEQ ID NO: 4778049 - DNA, 25 bp, Homo sapien
gaagcgtttgaatcgatcatttcgt

SEQ ID NO: 4778050 - DNA, 25 bp, Homo sapien
tgaaaacactcgtggttttagaagc

SEQ ID NO: 4778051 - DNA, 25 bp, Homo sapien
aaagccacccgagaacactgaagaa

SEQ ID NO: 4778052 - DNA, 25 bp, Homo sapien
caactgaagggctcctgaaaacact

SEQ ID NO: 4778053 - DNA, 25 bp, Homo sapien
agttagaggtcctagatgcagctgc

SEQ ID NO: 4778054 - DNA, 25 bp, Homo sapien
tgatgtgaacacaggacaaagtccc

SEQ ID NO: 4778055 - DNA, 25 bp, Homo sapien
gataaaagctccaggctacagcttg

SEQ ID NO: 4778056 - DNA, 25 bp, Homo sapien
caggagttcaggttactagagtgac

SEQ ID NO: 4778057 - DNA, 25 bp, Homo sapien
gactctgaaatctaccttaggaccc

SEQ ID NO: 4778058 - DNA, 25 bp, Homo sapien
taccgaaatctttgacctttggtca

SEQ ID NO: 4778059 - DNA, 25 bp, Homo sapien
tgtatgactcccaattcatttggca

SEQ ID NO: 4778060 - DNA, 25 bp, Homo sapien
tatgcatggctcttttcacttactg

SEQ ID NO: 4778061 - DNA, 25 bp, Homo sapien
gcataatgtaacaatcttgagccca

SEQ ID NO: 4778062 - DNA, 25 bp, Homo sapien
tctcttgggagactggctgctttgc

SEQ ID NO: 4778063 - DNA, 25 bp, Homo sapien
gctgcatccccatgcgagtgttaag

SEQ ID NO: 4778064 - DNA, 25 bp, Homo sapien
gacagtcctccaatccttatgccgg

SEQ ID NO: 4778065 - DNA, 25 bp, Homo sapien
taggcccaaagcctcggatatacat

SEQ ID NO: 4778066 - DNA, 25 bp, Homo sapien
tagtaatgcctgcactgccagaaat

SEQ ID NO: 4778067 - DNA, 25 bp, Homo sapien
tccttgaagcagatctggtggttct

SEQ ID NO: 4778068 - DNA, 25 bp, Homo sapien
aggttcagatgttttacagctctga

SEQ ID NO: 4778069 - DNA, 25 bp, Homo sapien
cagctctgaacactggattgaagaa

SEQ ID NO: 4778070 - DNA, 25 bp, Homo sapien
agtggcgcaatcatagcagcctcaa

SEQ ID NO: 4778071 - DNA, 25 bp, Homo sapien
cgcaatcatagcagcctcaaatcct

SEQ ID NO: 4778072 - DNA, 25 bp, Homo sapien
ctcaaatcctgggctcaattgatcc

SEQ ID NO: 4778073 - DNA, 25 bp, Homo sapien
ggcgcaatcatagcagcctcaaatc

SEQ ID NO: 4778074 - DNA, 25 bp, Homo sapien
cttggagcctcggtactctgagatt

SEQ ID NO: 4778075 - DNA, 25 bp, Homo sapien
tggagcctcggtactctgagatttc

SEQ ID NO: 4778076 - DNA, 25 bp, Homo sapien
ggagcctcggtactctgagatttca

SEQ ID NO: 4778077 - DNA, 25 bp, Homo sapien
tccttggagcctcggtactctgaga

SEQ ID NO: 4778078 - DNA, 25 bp, Homo sapien
tcagagaaggaagaacgcagctcag

SEQ ID NO: 4778079 - DNA, 25 bp, Homo sapien
taacttccaagtccaagaggagaca

SEQ ID NO: 4778080 - DNA, 25 bp, Homo sapien
tcaacatgctgttccacaagtgggc

SEQ ID NO: 4778081 - DNA, 25 bp, Homo sapien
aaataaagcctcttcgctgttaagg

SEQ ID NO: 4778082 - DNA, 25 bp, Homo sapien
tctgtcagggggtcctgatggctac

SEQ ID NO: 4778083 - DNA, 25 bp, Homo sapien
atccaccagatgacaacactacaca

SEQ ID NO: 4778084 - DNA, 25 bp, Homo sapien
gggaagaatgtagtcacaaacaatc

SEQ ID NO: 4778085 - DNA, 25 bp, Homo sapien
tgggaagaatgtagtcacaaacaat

SEQ ID NO: 4778086 - DNA, 25 bp, Homo sapien
ggaagaatgtagtcacaaacaatcc

SEQ ID NO: 4778087 - DNA, 25 bp, Homo sapien
ctcatactagttggctttcagcttg

SEQ ID NO: 4778088 - DNA, 25 bp, Homo sapien
ttaacccagggcaacacaaaatgag

SEQ ID NO: 4778089 - DNA, 25 bp, Homo sapien
tcacttaggtatgcatactatagac

SEQ ID NO: 4778090 - DNA, 25 bp, Homo sapien
cattttcctcatactagttggcttt

SEQ ID NO: 4778091 - DNA, 25 bp, Homo sapien
cagtatgcagaacgacaggcctcat

SEQ ID NO: 4778092 - DNA, 25 bp, Homo sapien
caaaaccatcagtatgcagaacgac

SEQ ID NO: 4778093 - DNA, 25 bp, Homo sapien
accatcagtatgcagaacgacaggc

SEQ ID NO: 4778094 - DNA, 25 bp, Homo sapien
catcagtatgcagaacgacaggcct

SEQ ID NO: 4778095 - DNA, 25 bp, Homo sapien
taccactaagttgcaaaagaaatgc

SEQ ID NO: 4778096 - DNA, 25 bp, Homo sapien
atcaaaatggatgccctacattcat

SEQ ID NO: 4778097 - DNA, 25 bp, Homo sapien
agttgactaaagtaccactaagttg

SEQ ID NO: 4778098 - DNA, 25 bp, Homo sapien
taaagtaccactaagttgcaaaaga

SEQ ID NO: 4778099 - DNA, 25 bp, Homo sapien
catattacaagatgcttactgaata

SEQ ID NO: 4778100 - DNA, 25 bp, Homo sapien
atctggtgtcccacaatgaaaaagg

SEQ ID NO: 4778101 - DNA, 25 bp, Homo sapien
ctggaaatctggtgtcccacaatga

SEQ ID NO: 4778102 - DNA, 25 bp, Homo sapien
gaaatctggtgtcccacaatgaaaa

SEQ ID NO: 4778103 - DNA, 25 bp, Homo sapien
cataaaggctcatgaggaccaaggt

SEQ ID NO: 4778104 - DNA, 25 bp, Homo sapien
catcatgggcttgcaactatggaga

SEQ ID NO: 4778105 - DNA, 25 bp, Homo sapien
tctgctgtcgcgctcctgaggatgc

SEQ ID NO: 4778106 - DNA, 25 bp, Homo sapien
gagaaaaagtatccctgatgtcgcc

SEQ ID NO: 4778107 - DNA, 25 bp, Homo sapien
gaggaatagcgtttgttttggattg

SEQ ID NO: 4778108 - DNA, 25 bp, Homo sapien
ttctgcttttcaaggcccgaagtct

SEQ ID NO: 4778109 - DNA, 25 bp, Homo sapien
gagaggaatagcgtttgttttggat

SEQ ID NO: 4778110 - DNA, 25 bp, Homo sapien
aggcccgaagtctatcaccttgtgt

SEQ ID NO: 4778111 - DNA, 25 bp, Homo sapien
caatagcagttaaagcagtaacaac

SEQ ID NO: 4778112 - DNA, 25 bp, Homo sapien
catcgcaacagaaacggcttgatta

SEQ ID NO: 4778113 - DNA, 25 bp, Homo sapien
gtaacaacatcgcaacagaaacggc

SEQ ID NO: 4778114 - DNA, 25 bp, Homo sapien
taaagcagtaacaacatcgcaacag

SEQ ID NO: 4778115 - DNA, 25 bp, Homo sapien
cggttcgggttcttgctgatcttga

SEQ ID NO: 4778116 - DNA, 25 bp, Homo sapien
acccacgcaatggtctcggctgctg

SEQ ID NO: 4778117 - DNA, 25 bp, Homo sapien
cacgcaatggtctcggctgctgtca

SEQ ID NO: 4778118 - DNA, 25 bp, Homo sapien
ttcatgatgtagcaggctatcagag

SEQ ID NO: 4778119 - DNA, 25 bp, Homo sapien
tgatgtagcaggctatcagagtgcc

SEQ ID NO: 4778120 - DNA, 25 bp, Homo sapien
tcaagggatcctgctatctaagctt

SEQ ID NO: 4778121 - DNA, 25 bp, Homo sapien
gggatcctgctatctaagcttcccg

SEQ ID NO: 4778122 - DNA, 25 bp, Homo sapien
ctgtatgaagttttaaaccaggaag

SEQ ID NO: 4778123 - DNA, 25 bp, Homo sapien
gcctgtatgaagttttaaaccagga

SEQ ID NO: 4778124 - DNA, 25 bp, Homo sapien
cggttcttatgttgaggtaatctcc

SEQ ID NO: 4778125 - DNA, 25 bp, Homo sapien
ttttgtcagacgctttttgtgcaga

SEQ ID NO: 4778126 - DNA, 25 bp, Homo sapien
tgtcttcttcatgagcttagaggaa

SEQ ID NO: 4778127 - DNA, 25 bp, Homo sapien
cattaccatgttaaatagaagccac

SEQ ID NO: 4778128 - DNA, 25 bp, Homo sapien
tctgtagtatcagtggtaatgccat

SEQ ID NO: 4778129 - DNA, 25 bp, Homo sapien
ggtcatggcacacaatccttttaaa

SEQ ID NO: 4778130 - DNA, 25 bp, Homo sapien
catgtagactatccaatttgttgtc

SEQ ID NO: 4778131 - DNA, 25 bp, Homo sapien
aaaattatactacttgcaaacgaca

SEQ ID NO: 4778132 - DNA, 25 bp, Homo sapien
acagatatctaggaattctttgaca

SEQ ID NO: 4778133 - DNA, 25 bp, Homo sapien
cagatatctaggaattctttgacaa

SEQ ID NO: 4778134 - DNA, 25 bp, Homo sapien
cacagatatctaggaattctttgac

SEQ ID NO: 4778135 - DNA, 25 bp, Homo sapien
ttcacagatatctaggaattctttg

SEQ ID NO: 4778136 - DNA, 25 bp, Homo sapien
tattcagacgaataatggtagtaac

SEQ ID NO: 4778137 - DNA, 25 bp, Homo sapien
tcagacgaataatggtagtaacatt

SEQ ID NO: 4778138 - DNA, 25 bp, Homo sapien
cgaataatggtagtaacattgtgat

SEQ ID NO: 4778139 - DNA, 25 bp, Homo sapien
ccttttattcagacgaataatggta

SEQ ID NO: 4778140 - DNA, 25 bp, Homo sapien
aaatattgaatataagtctcaggag

SEQ ID NO: 4778141 - DNA, 25 bp, Homo sapien
gtctcaggagaatgttggtggtaac

SEQ ID NO: 4778142 - DNA, 25 bp, Homo sapien
tattgaatataagtctcaggagaat

SEQ ID NO: 4778143 - DNA, 25 bp, Homo sapien
aatataagtctcaggagaatgttgg

SEQ ID NO: 4778144 - DNA, 25 bp, Homo sapien
tgcaccagatcttataaaacacata

SEQ ID NO: 4778145 - DNA, 25 bp, Homo sapien
agaaatgcaccagatcttataaaac

SEQ ID NO: 4778146 - DNA, 25 bp, Homo sapien
cataaagaaatgcaccagatcttat

SEQ ID NO: 4778147 - DNA, 25 bp, Homo sapien
aatgcaccagatcttataaaacaca

SEQ ID NO: 4778148 - DNA, 25 bp, Homo sapien
ctggactgggaattaaataccaatt

SEQ ID NO: 4778149 - DNA, 25 bp, Homo sapien
gaattaaataccaatttgattataa

SEQ ID NO: 4778150 - DNA, 25 bp, Homo sapien
gactgggaattaaataccaatttga

SEQ ID NO: 4778151 - DNA, 25 bp, Homo sapien
tgggaattaaataccaatttgatta

SEQ ID NO: 4778152 - DNA, 25 bp, Homo sapien
tgaggtccacagaaggcaataaatc

SEQ ID NO: 4778153 - DNA, 25 bp, Homo sapien
gtccacagaaggcaataaatcggtc

SEQ ID NO: 4778154 - DNA, 25 bp, Homo sapien
aaggcaataaatcggtctggtatta

SEQ ID NO: 4778155 - DNA, 25 bp, Homo sapien
agaaggcaataaatcggtctggtat

SEQ ID NO: 4778156 - DNA, 25 bp, Homo sapien
caatcttgactccacgaataaaggg

SEQ ID NO: 4778157 - DNA, 25 bp, Homo sapien
gaatgactaactggcttccaacatg

SEQ ID NO: 4778158 - DNA, 25 bp, Homo sapien
tatctagggaatggacgtatatcct

SEQ ID NO: 4778159 - DNA, 25 bp, Homo sapien
tgtttcattgctagggtatcagccc

SEQ ID NO: 4778160 - DNA, 25 bp, Homo sapien
taacagagcgagacttggtctctct

SEQ ID NO: 4778161 - DNA, 25 bp, Homo sapien
taggtaacagagcgagacttggtct

SEQ ID NO: 4778162 - DNA, 25 bp, Homo sapien
cctaggtaacagagcgagacttggt

SEQ ID NO: 4778163 - DNA, 25 bp, Homo sapien
agccatgtataccactgcacttcag

SEQ ID NO: 4778164 - DNA, 25 bp, Homo sapien
ttcatcaaggttaaatgagttgaaa

SEQ ID NO: 4778165 - DNA, 25 bp, Homo sapien
tgttgccctttggtctcctgatttc

SEQ ID NO: 4778166 - DNA, 25 bp, Homo sapien
tcctgatttccaccagtgccccata

SEQ ID NO: 4778167 - DNA, 25 bp, Homo sapien
gtgccccatacctgcccacactgag

SEQ ID NO: 4778168 - DNA, 25 bp, Homo sapien
ttgccctttggtctcctgatttcca

SEQ ID NO: 4778169 - DNA, 25 bp, Homo sapien
tctttactgcatgaaaacagtcaag

SEQ ID NO: 4778170 - DNA, 25 bp, Homo sapien
aaattgcaacttccataggcagcat

SEQ ID NO: 4778171 - DNA, 25 bp, Homo sapien
cagtcaagaagtgtaatgtagaaat

SEQ ID NO: 4778172 - DNA, 25 bp, Homo sapien
attgcaacttccataggcagcatct

SEQ ID NO: 4778173 - DNA, 25 bp, Homo sapien
gcattagcaaccttatcgactgtct

SEQ ID NO: 4778174 - DNA, 25 bp, Homo sapien
caggaaccacactcctcagtggtag

SEQ ID NO: 4778175 - DNA, 25 bp, Homo sapien
tactgactgtgtccccagaaaaaag

SEQ ID NO: 4778176 - DNA, 25 bp, Homo sapien
tatcttcaacacaatcgcatgctaa

SEQ ID NO: 4778177 - DNA, 25 bp, Homo sapien
ctgaaaggaatataggatgtctctc

SEQ ID NO: 4778178 - DNA, 25 bp, Homo sapien
tctatatgcttcttctggggttctc

SEQ ID NO: 4778179 - DNA, 25 bp, Homo sapien
gtctctccaaagattaatattctat

SEQ ID NO: 4778180 - DNA, 25 bp, Homo sapien
ttctggggttctccccaaatatata

SEQ ID NO: 4778181 - DNA, 25 bp, Homo sapien
aatgacagctaagcagcgtgtagga

SEQ ID NO: 4778182 - DNA, 25 bp, Homo sapien
tgacagctaagcagcgtgtaggaga

SEQ ID NO: 4778183 - DNA, 25 bp, Homo sapien
gaaatgacagctaagcagcgtgtag

SEQ ID NO: 4778184 - DNA, 25 bp, Homo sapien
gacagctaagcagcgtgtaggagat

SEQ ID NO: 4778185 - DNA, 25 bp, Homo sapien
tctctctaagtaagtcctctgccta

SEQ ID NO: 4778186 - DNA, 25 bp, Homo sapien
acatttgcctgggacttcagaacct

SEQ ID NO: 4778187 - DNA, 25 bp, Homo sapien
gcgtaggatttttggtctgcagtca

SEQ ID NO: 4778188 - DNA, 25 bp, Homo sapien
tgcagtttgagactttcaccaccat

SEQ ID NO: 4778189 - DNA, 25 bp, Homo sapien
taacatcagtaaagtctttcatttt

SEQ ID NO: 4778190 - DNA, 25 bp, Homo sapien
cagtaaagtctttcattttctccat

SEQ ID NO: 4778191 - DNA, 25 bp, Homo sapien
gataacatcagtaaagtctttcatt

SEQ ID NO: 4778192 - DNA, 25 bp, Homo sapien
cagataacatcagtaaagtctttca

SEQ ID NO: 4778193 - DNA, 25 bp, Homo sapien
ccaaagagtctcatctgctggcatt

SEQ ID NO: 4778194 - DNA, 25 bp, Homo sapien
ttccacagtgctagttaagaacagg

SEQ ID NO: 4778195 - DNA, 25 bp, Homo sapien
taaaagaggtagctcctgtcatgct

SEQ ID NO: 4778196 - DNA, 25 bp, Homo sapien
cagggtgcccctgtgtaacgaacag

SEQ ID NO: 4778197 - DNA, 25 bp, Homo sapien
acccaggaagggtgttatgacctca

SEQ ID NO: 4778198 - DNA, 25 bp, Homo sapien
gggcctgtgccgtccctttgctcag

SEQ ID NO: 4778199 - DNA, 25 bp, Homo sapien
gacggttgcctcgtgctgtttgccc

SEQ ID NO: 4778200 - DNA, 25 bp, Homo sapien
tgaactggattcttacccactgcgt

SEQ ID NO: 4778201 - DNA, 25 bp, Homo sapien
tacgagaaacaccaagagaggctgg

SEQ ID NO: 4778202 - DNA, 25 bp, Homo sapien
aacctatgtttcatactttcaggga

SEQ ID NO: 4778203 - DNA, 25 bp, Homo sapien
ctttcagggatgataataaattttg

SEQ ID NO: 4778204 - DNA, 25 bp, Homo sapien
tacgtctgggaaagcttatgaaacc

SEQ ID NO: 4778205 - DNA, 25 bp, Homo sapien
taatccgtgtggtatgtaacccatc

SEQ ID NO: 4778206 - DNA, 25 bp, Homo sapien
gatccaaatggagcacttgatggca

SEQ ID NO: 4778207 - DNA, 25 bp, Homo sapien
aaatataggcttttttcccgagcag

SEQ ID NO: 4778208 - DNA, 25 bp, Homo sapien
tgacaacactgacatcccgtggcct

SEQ ID NO: 4778209 - DNA, 25 bp, Homo sapien
gcttgttttctctgatcagagccag

SEQ ID NO: 4778210 - DNA, 25 bp, Homo sapien
ttgttttctctgatcagagccagta

SEQ ID NO: 4778211 - DNA, 25 bp, Homo sapien
gttttctctgatcagagccagtaaa

SEQ ID NO: 4778212 - DNA, 25 bp, Homo sapien
tgttttctctgatcagagccagtaa

SEQ ID NO: 4778213 - DNA, 25 bp, Homo sapien
gagtggtccaaaatctgcgtagaag

SEQ ID NO: 4778214 - DNA, 25 bp, Homo sapien
taaaccattgccagattgagtggtc

SEQ ID NO: 4778215 - DNA, 25 bp, Homo sapien
attgagtggtccaaaatctgcgtag

SEQ ID NO: 4778216 - DNA, 25 bp, Homo sapien
tattgatcttgcaacaatatctgta

SEQ ID NO: 4778217 - DNA, 25 bp, Homo sapien
tttcccaggccatcccatttataac

SEQ ID NO: 4778218 - DNA, 25 bp, Homo sapien
catttataaccatacctttagattc

SEQ ID NO: 4778219 - DNA, 25 bp, Homo sapien
caagcatcctgtaattagcaatcaa

SEQ ID NO: 4778220 - DNA, 25 bp, Homo sapien
cctgtaattagcaatcaatagattt

SEQ ID NO: 4778221 - DNA, 25 bp, Homo sapien
cattatctatgctgaaataatgtac

SEQ ID NO: 4778222 - DNA, 25 bp, Homo sapien
catttgatgcactctttggtctgct

SEQ ID NO: 4778223 - DNA, 25 bp, Homo sapien
tgtacatttgatgcactctttggtc

SEQ ID NO: 4778224 - DNA, 25 bp, Homo sapien
atgcactctttggtctgctgtagag

SEQ ID NO: 4778225 - DNA, 25 bp, Homo sapien
tgaaatggaaaaattgcaatgttcc

SEQ ID NO: 4778226 - DNA, 25 bp, Homo sapien
aatggaaaaattgcaatgttccttc

SEQ ID NO: 4778227 - DNA, 25 bp, Homo sapien
gaaatggaaaaattgcaatgttcct

SEQ ID NO: 4778228 - DNA, 25 bp, Homo sapien
ctgaaatggaaaaattgcaatgttc

SEQ ID NO: 4778229 - DNA, 25 bp, Homo sapien
tgtgatggctagcatcaaccttgta

SEQ ID NO: 4778230 - DNA, 25 bp, Homo sapien
tcatgcacgtttcagatggtaggag

SEQ ID NO: 4778231 - DNA, 25 bp, Homo sapien
ttgggtgggaataatcaatgagcac

SEQ ID NO: 4778232 - DNA, 25 bp, Homo sapien
cagcaaattgcagcatgcatgtgat

SEQ ID NO: 4778233 - DNA, 25 bp, Homo sapien
cttgtaaactcctcagctaaaactt

SEQ ID NO: 4778234 - DNA, 25 bp, Homo sapien
caaggacctttgatccctgtgacag

SEQ ID NO: 4778235 - DNA, 25 bp, Homo sapien
ttcttgcaaccacaaacactcaaat

SEQ ID NO: 4778236 - DNA, 25 bp, Homo sapien
cactcaaatgggtgacagggcttaa

SEQ ID NO: 4778237 - DNA, 25 bp, Homo sapien
ctttgatcacctcggctaccaaagc

SEQ ID NO: 4778238 - DNA, 25 bp, Homo sapien
gcgccctcccggctcatgactccaa

SEQ ID NO: 4778239 - DNA, 25 bp, Homo sapien
cgccctcccggctcatgactccaaa

SEQ ID NO: 4778240 - DNA, 25 bp, Homo sapien
tgatcacctcggctaccaaagctgc

SEQ ID NO: 4778241 - DNA, 25 bp, Homo sapien
gaggcgccgcgaccacacccccgaa

SEQ ID NO: 4778242 - DNA, 25 bp, Homo sapien
caaggactgccagccgccgagaggg

SEQ ID NO: 4778243 - DNA, 25 bp, Homo sapien
ggactgccagccgccgagaggggag

SEQ ID NO: 4778244 - DNA, 25 bp, Homo sapien
ggaggcgccgcgaccacacccccga

SEQ ID NO: 4778245 - DNA, 25 bp, Homo sapien
tagctcccaactcccataagttttg

SEQ ID NO: 4778246 - DNA, 25 bp, Homo sapien
agaaagccggccttgggaaacagag

SEQ ID NO: 4778247 - DNA, 25 bp, Homo sapien
caacatcttgttatatgctgggcgc

SEQ ID NO: 4778248 - DNA, 25 bp, Homo sapien
acctcgcctgggctataatgaataa

SEQ ID NO: 4778249 - DNA, 25 bp, Homo sapien
aaaaatgctggactggacataagtg

SEQ ID NO: 4778250 - DNA, 25 bp, Homo sapien
caccaaaagtgtacaagacttccaa

SEQ ID NO: 4778251 - DNA, 25 bp, Homo sapien
gatgaatattgaggtggcttccacc

SEQ ID NO: 4778252 - DNA, 25 bp, Homo sapien
gtaaaagtaccactgggcaatcctg

SEQ ID NO: 4778253 - DNA, 25 bp, Homo sapien
tccatctccctttgttccaattctg

SEQ ID NO: 4778254 - DNA, 25 bp, Homo sapien
tccaattctgtgctcattgagtaac

SEQ ID NO: 4778255 - DNA, 25 bp, Homo sapien
tgttccaattctgtgctcattgagt

SEQ ID NO: 4778256 - DNA, 25 bp, Homo sapien
ccctttgttccaattctgtgctcat

SEQ ID NO: 4778257 - DNA, 25 bp, Homo sapien
cctgtcacatgcatatgctttctca

SEQ ID NO: 4778258 - DNA, 25 bp, Homo sapien
tctaacaaatccgccctgtcacatg

SEQ ID NO: 4778259 - DNA, 25 bp, Homo sapien
gcttctaacaaatccgccctgtcac

SEQ ID NO: 4778260 - DNA, 25 bp, Homo sapien
tcacatgcatatgctttctcaacat

SEQ ID NO: 4778261 - DNA, 25 bp, Homo sapien
gagtagagtcgattcccactcccag

SEQ ID NO: 4778262 - DNA, 25 bp, Homo sapien
cccggccaatgtgatgtcttcattc

SEQ ID NO: 4778263 - DNA, 25 bp, Homo sapien
aatctctccctcatgctggagtaga

SEQ ID NO: 4778264 - DNA, 25 bp, Homo sapien
tgttagtggcagaatacacgagcaa

SEQ ID NO: 4778265 - DNA, 25 bp, Homo sapien
cctgacccagtctgtgtgctagtgt

SEQ ID NO: 4778266 - DNA, 25 bp, Homo sapien
ggtccagtctgaaatctctaccaca

SEQ ID NO: 4778267 - DNA, 25 bp, Homo sapien
aattcccagacgtcagtggtccagt

SEQ ID NO: 4778268 - DNA, 25 bp, Homo sapien
tgtgtgctagtgtcaattcccagac

SEQ ID NO: 4778269 - DNA, 25 bp, Homo sapien
gagcagggactatctctagcagtgc

SEQ ID NO: 4778270 - DNA, 25 bp, Homo sapien
tatatgctagttctccctcagaccc

SEQ ID NO: 4778271 - DNA, 25 bp, Homo sapien
gaccctcccagtgttattttctcaa

SEQ ID NO: 4778272 - DNA, 25 bp, Homo sapien
tggaaaacagcatgacctgcagaag

SEQ ID NO: 4778273 - DNA, 25 bp, Homo sapien
taattggtgactgcctcacgaagac

SEQ ID NO: 4778274 - DNA, 25 bp, Homo sapien
gagtctccaagaacagtcgaatcag

SEQ ID NO: 4778275 - DNA, 25 bp, Homo sapien
ctcaaaatcgtggacagctctgctg

SEQ ID NO: 4778276 - DNA, 25 bp, Homo sapien
ttaataacgccacgcaccgaggttg

SEQ ID NO: 4778277 - DNA, 25 bp, Homo sapien
tcgtcttgccggctggctcgaatgc

SEQ ID NO: 4778278 - DNA, 25 bp, Homo sapien
aacgtgacaccttccttctcgaggc

SEQ ID NO: 4778279 - DNA, 25 bp, Homo sapien
tcgaatgccaccaacgtgacacctt

SEQ ID NO: 4778280 - DNA, 25 bp, Homo sapien
tctcaaaagtgacaacccggacatt

SEQ ID NO: 4778281 - DNA, 25 bp, Homo sapien
gcccaggagaggggctcgggcttac

SEQ ID NO: 4778282 - DNA, 25 bp, Homo sapien
tagggggcagggcgcgggaggccca

SEQ ID NO: 4778283 - DNA, 25 bp, Homo sapien
ggcccaggagaggggctcgggctta

SEQ ID NO: 4778284 - DNA, 25 bp, Homo sapien
gggcagggcgcgggaggcccaggag

SEQ ID NO: 4778285 - DNA, 25 bp, Homo sapien
ttggccaacgccaaaaaggggcagc

SEQ ID NO: 4778286 - DNA, 25 bp, Homo sapien
gattcagaggttgtgactcgcgcga

SEQ ID NO: 4778287 - DNA, 25 bp, Homo sapien
agggtcccaaggctacggagcagcg

SEQ ID NO: 4778288 - DNA, 25 bp, Homo sapien
gttcagcgcgctcggggaatcctca

SEQ ID NO: 4778289 - DNA, 25 bp, Homo sapien
caggaactcagaagcagcccgcggg

SEQ ID NO: 4778290 - DNA, 25 bp, Homo sapien
agctgcaggttcgaggcgccgggct

SEQ ID NO: 4778291 - DNA, 25 bp, Homo sapien
gaaaggtgaccctcggtccatcttg

SEQ ID NO: 4778292 - DNA, 25 bp, Homo sapien
ggctgacgcccgcaacttagaaagg

SEQ ID NO: 4778293 - DNA, 25 bp, Homo sapien
tcttcacacccggcgaggtcgacga

SEQ ID NO: 4778294 - DNA, 25 bp, Homo sapien
ttcacacccggcgaggtcgacgagc

SEQ ID NO: 4778295 - DNA, 25 bp, Homo sapien
tcacacccggcgaggtcgacgagca

SEQ ID NO: 4778296 - DNA, 25 bp, Homo sapien
cttcacacccggcgaggtcgacgag

SEQ ID NO: 4778297 - DNA, 25 bp, Homo sapien
tcggtgacgccataaagaaaactct

SEQ ID NO: 4778298 - DNA, 25 bp, Homo sapien
taaagtgtgctagcgaccttcgcca

SEQ ID NO: 4778299 - DNA, 25 bp, Homo sapien
tctacaggcaggtactcggtgacgc

SEQ ID NO: 4778300 - DNA, 25 bp, Homo sapien
tcattggccaatgcggcgtgacgtc

SEQ ID NO: 4778301 - DNA, 25 bp, Homo sapien
gccctatcttcctggaacttaacca

SEQ ID NO: 4778302 - DNA, 25 bp, Homo sapien
actggattaaaataatgccctatct

SEQ ID NO: 4778303 - DNA, 25 bp, Homo sapien
tgtcattttggagggcctttaaaca

SEQ ID NO: 4778304 - DNA, 25 bp, Homo sapien
gcacactgtagggtcatatcctctt

SEQ ID NO: 4778305 - DNA, 25 bp, Homo sapien
ttgagggtgagaaatagcagttctc

SEQ ID NO: 4778306 - DNA, 25 bp, Homo sapien
aagtctcccaaataagagcagtttg

SEQ ID NO: 4778307 - DNA, 25 bp, Homo sapien
tgggacacctcccaactaaacatat

SEQ ID NO: 4778308 - DNA, 25 bp, Homo sapien
gattttgctatacttttcatcagga

SEQ ID NO: 4778309 - DNA, 25 bp, Homo sapien
tatatgtgaaatgttcggattgcca

SEQ ID NO: 4778310 - DNA, 25 bp, Homo sapien
tcctggccctacaatattaatcatg

SEQ ID NO: 4778311 - DNA, 25 bp, Homo sapien
gaaggtgctgtggacactggctata

SEQ ID NO: 4778312 - DNA, 25 bp, Homo sapien
cctagtgaaacggatagcaagtatg

SEQ ID NO: 4778313 - DNA, 25 bp, Homo sapien
tccagttgaaagtgactgagtgcat

SEQ ID NO: 4778314 - DNA, 25 bp, Homo sapien
gacactgcacgaggatattacaccc

SEQ ID NO: 4778315 - DNA, 25 bp, Homo sapien
gcttcccagcatgcaattcaacagg

SEQ ID NO: 4778316 - DNA, 25 bp, Homo sapien
tgtccccttatatactgtcagaatt

SEQ ID NO: 4778317 - DNA, 25 bp, Homo sapien
ttcctatcgcggtgtataaaatgga

SEQ ID NO: 4778318 - DNA, 25 bp, Homo sapien
agttcacatgctgaactcctacaag

SEQ ID NO: 4778319 - DNA, 25 bp, Homo sapien
tttgtgatccaacctattcctatcg

SEQ ID NO: 4778320 - DNA, 25 bp, Homo sapien
gaactcctacaagctgtaaaacaga

SEQ ID NO: 4778321 - DNA, 25 bp, Homo sapien
ataagaataaaaggctgaggcatag

SEQ ID NO: 4778322 - DNA, 25 bp, Homo sapien
gaggcatagtattattcatcagatt

SEQ ID NO: 4778323 - DNA, 25 bp, Homo sapien
cctggagtgcattatattctctata

SEQ ID NO: 4778324 - DNA, 25 bp, Homo sapien
tttactgcttactaaaatcaaggaa

SEQ ID NO: 4778325 - DNA, 25 bp, Homo sapien
tttctaagcacagctggtcttctgc

SEQ ID NO: 4778326 - DNA, 25 bp, Homo sapien
ggccatgaggcatgttttctaagca

SEQ ID NO: 4778327 - DNA, 25 bp, Homo sapien
ccggccatgaggcatgttttctaag

SEQ ID NO: 4778328 - DNA, 25 bp, Homo sapien
ttctaagcacagctggtcttctgca

SEQ ID NO: 4778329 - DNA, 25 bp, Homo sapien
aaatcaaagagagggccagtcactg

SEQ ID NO: 4778330 - DNA, 25 bp, Homo sapien
gaaaatcaaagagagggccagtcac

SEQ ID NO: 4778331 - DNA, 25 bp, Homo sapien
aaaatcaaagagagggccagtcact

SEQ ID NO: 4778332 - DNA, 25 bp, Homo sapien
tgagagtagatttgattttatgtgg

SEQ ID NO: 4778333 - DNA, 25 bp, Homo sapien
ctgagagtagatttgattttatgtg

SEQ ID NO: 4778334 - DNA, 25 bp, Homo sapien
atttctctctcaggatcgacataga

SEQ ID NO: 4778335 - DNA, 25 bp, Homo sapien
caatatgatggtaggatgactgtcc

SEQ ID NO: 4778336 - DNA, 25 bp, Homo sapien
ctcaatatgatggtaggatgactgt

SEQ ID NO: 4778337 - DNA, 25 bp, Homo sapien
tcactataagggtgacatttgcttc

SEQ ID NO: 4778338 - DNA, 25 bp, Homo sapien
atgactgtccaatcactataagggt

SEQ ID NO: 4778339 - DNA, 25 bp, Homo sapien
aactcctggggattttggccagatc

SEQ ID NO: 4778340 - DNA, 25 bp, Homo sapien
acgtattccttgcagatgtaacaca

SEQ ID NO: 4778341 - DNA, 25 bp, Homo sapien
tttggccagatcctctacgtattcc

SEQ ID NO: 4778342 - DNA, 25 bp, Homo sapien
cagatcctctacgtattccttgcag

SEQ ID NO: 4778343 - DNA, 25 bp, Homo sapien
ccgaaggatccctgtacttcgccgt

SEQ ID NO: 4778344 - DNA, 25 bp, Homo sapien
tgacgcgagcaaaggcgacgcccgc

SEQ ID NO: 4778345 - DNA, 25 bp, Homo sapien
tgtacttcgccgtgcgtgacgcgag

SEQ ID NO: 4778346 - DNA, 25 bp, Homo sapien
ttagtaaagcagcaccctcgggccc

SEQ ID NO: 4778347 - DNA, 25 bp, Homo sapien
gcggcgccgctaacctgccgcgtga

SEQ ID NO: 4778348 - DNA, 25 bp, Homo sapien
acagcgcgccgaacggtacccgctg

SEQ ID NO: 4778349 - DNA, 25 bp, Homo sapien
acgaacaccaccacggcgcggcgct

SEQ ID NO: 4778350 - DNA, 25 bp, Homo sapien
ccgcgggcgtccagcaccggcagct

SEQ ID NO: 4778351 - DNA, 25 bp, Homo sapien
tagagttgccagtgtaactactgtg

SEQ ID NO: 4778352 - DNA, 25 bp, Homo sapien
tgttgctcaagaaagcgtcctccaa

SEQ ID NO: 4778353 - DNA, 25 bp, Homo sapien
ggaatgacctgctaatatttggtgg

SEQ ID NO: 4778354 - DNA, 25 bp, Homo sapien
caactgccaagaatacagctctgag

SEQ ID NO: 4778355 - DNA, 25 bp, Homo sapien
tgctggaagtagtaaccgcagactc

SEQ ID NO: 4778356 - DNA, 25 bp, Homo sapien
gcagactctaagtggtttgaactct

SEQ ID NO: 4778357 - DNA, 25 bp, Homo sapien
ttggcctgctggaagtagtaaccgc

SEQ ID NO: 4778358 - DNA, 25 bp, Homo sapien
gtagtaaccgcagactctaagtggt

SEQ ID NO: 4778359 - DNA, 25 bp, Homo sapien
gggacattgaaggccaaagggctcc

SEQ ID NO: 4778360 - DNA, 25 bp, Homo sapien
catgggacattgaaggccaaagggc

SEQ ID NO: 4778361 - DNA, 25 bp, Homo sapien
tgggacattgaaggccaaagggctc

SEQ ID NO: 4778362 - DNA, 25 bp, Homo sapien
agcatgggacattgaaggccaaagg

SEQ ID NO: 4778363 - DNA, 25 bp, Homo sapien
gctggatgtctcagtgtcataggag

SEQ ID NO: 4778364 - DNA, 25 bp, Homo sapien
ctgctggatgtctcagtgtcatagg

SEQ ID NO: 4778365 - DNA, 25 bp, Homo sapien
cactgctggatgtctcagtgtcata

SEQ ID NO: 4778366 - DNA, 25 bp, Homo sapien
gtcactgctggatgtctcagtgtca

SEQ ID NO: 4778367 - DNA, 25 bp, Homo sapien
ggtggctctttctcctcagggtcat

SEQ ID NO: 4778368 - DNA, 25 bp, Homo sapien
gggctgacgcacaggtggctctttc

SEQ ID NO: 4778369 - DNA, 25 bp, Homo sapien
cacaggtggctctttctcctcaggg

SEQ ID NO: 4778370 - DNA, 25 bp, Homo sapien
caggtggctctttctcctcagggtc

SEQ ID NO: 4778371 - DNA, 25 bp, Homo sapien
ttcacactttgccagggacaagggt

SEQ ID NO: 4778372 - DNA, 25 bp, Homo sapien
tgttcacactttgccagggacaagg

SEQ ID NO: 4778373 - DNA, 25 bp, Homo sapien
cacactttgccagggacaagggttc

SEQ ID NO: 4778374 - DNA, 25 bp, Homo sapien
tgtgttcacactttgccagggacaa

SEQ ID NO: 4778375 - DNA, 25 bp, Homo sapien
tcctcactgccgcccgggcctttcc

SEQ ID NO: 4778376 - DNA, 25 bp, Homo sapien
cggattctggtcctcactgccgccc

SEQ ID NO: 4778377 - DNA, 25 bp, Homo sapien
cactgccgcccgggcctttccgctt

SEQ ID NO: 4778378 - DNA, 25 bp, Homo sapien
ctggtcctcactgccgcccgggcct

SEQ ID NO: 4778379 - DNA, 25 bp, Homo sapien
ttgctgtatccaatggcacagggat

SEQ ID NO: 4778380 - DNA, 25 bp, Homo sapien
tgtatccaatggcacagggatttgc

SEQ ID NO: 4778381 - DNA, 25 bp, Homo sapien
gaataaacagcttggttcatgattt

SEQ ID NO: 4778382 - DNA, 25 bp, Homo sapien
aatggcacagggatttgcactctgg

SEQ ID NO: 4778383 - DNA, 25 bp, Homo sapien
tttgcatcttcggtagatagcttgc

SEQ ID NO: 4778384 - DNA, 25 bp, Homo sapien
gcatcttcggtagatagcttgccat

SEQ ID NO: 4778385 - DNA, 25 bp, Homo sapien
ctgaagtttgcatcttcggtagata

SEQ ID NO: 4778386 - DNA, 25 bp, Homo sapien
gaagtttgcatcttcggtagatagc

SEQ ID NO: 4778387 - DNA, 25 bp, Homo sapien
cttattttgcatcgtgagtattttc

SEQ ID NO: 4778388 - DNA, 25 bp, Homo sapien
caccgtgctgggcccataactattt

SEQ ID NO: 4778389 - DNA, 25 bp, Homo sapien
ttcttattttgcatcgtgagtattt

SEQ ID NO: 4778390 - DNA, 25 bp, Homo sapien
tgctgggcccataactattttctta

SEQ ID NO: 4778391 - DNA, 25 bp, Homo sapien
ctaaggtcccagggcgctgaaacaa

SEQ ID NO: 4778392 - DNA, 25 bp, Homo sapien
cagggcgctgaaacaatctgggcag

SEQ ID NO: 4778393 - DNA, 25 bp, Homo sapien
ggtcccagggcgctgaaacaatctg

SEQ ID NO: 4778394 - DNA, 25 bp, Homo sapien
tcccagggcgctgaaacaatctggg

SEQ ID NO: 4778395 - DNA, 25 bp, Homo sapien
tgcgaagtcgctttcaggcgctgag

SEQ ID NO: 4778396 - DNA, 25 bp, Homo sapien
aaaggctgcgaagtcgctttcaggc

SEQ ID NO: 4778397 - DNA, 25 bp, Homo sapien
aagtcgctttcaggcgctgagcgga

SEQ ID NO: 4778398 - DNA, 25 bp, Homo sapien
cggaaaggctgcgaagtcgctttca

SEQ ID NO: 4778399 - DNA, 25 bp, Homo sapien
ggtttcggacgcgtctcctgggctc

SEQ ID NO: 4778400 - DNA, 25 bp, Homo sapien
ggaaatgtggtttcggacgcgtctc

SEQ ID NO: 4778401 - DNA, 25 bp, Homo sapien
atgtggtttcggacgcgtctcctgg

SEQ ID NO: 4778402 - DNA, 25 bp, Homo sapien
gaaatgtggtttcggacgcgtctcc

SEQ ID NO: 4778403 - DNA, 25 bp, Homo sapien
cagatgtagagggtccgcgccccag

SEQ ID NO: 4778404 - DNA, 25 bp, Homo sapien
tcttcctgcgcggtggggtgcagag

SEQ ID NO: 4778405 - DNA, 25 bp, Homo sapien
gggaccagcgtggagtgctcggctt

SEQ ID NO: 4778406 - DNA, 25 bp, Homo sapien
cccacagatgtagagggtccgcgcc

SEQ ID NO: 4778407 - DNA, 25 bp, Homo sapien
ttctgatgccggcaacgaacgtgcc

SEQ ID NO: 4778408 - DNA, 25 bp, Homo sapien
aacgaacgtgccagacgccagagtg

SEQ ID NO: 4778409 - DNA, 25 bp, Homo sapien
ggtaagagcgtttctgatgccggca

SEQ ID NO: 4778410 - DNA, 25 bp, Homo sapien
acgccagagtgcttggatccgcggc

SEQ ID NO: 4778411 - DNA, 25 bp, Homo sapien
ctgtgagtcagggcgagggaaggaa

SEQ ID NO: 4778412 - DNA, 25 bp, Homo sapien
gaaggaagccggtcaggtttctcat

SEQ ID NO: 4778413 - DNA, 25 bp, Homo sapien
aggaagccggtcaggtttctcattt

SEQ ID NO: 4778414 - DNA, 25 bp, Homo sapien
ggaaggaagccggtcaggtttctca

SEQ ID NO: 4778415 - DNA, 25 bp, Homo sapien
gcagagggagactcctagctcctcc

SEQ ID NO: 4778416 - DNA, 25 bp, Homo sapien
cctcttgtcgagtgtgttctgggat

SEQ ID NO: 4778417 - DNA, 25 bp, Homo sapien
gacctgtctgcaaatacccagggat

SEQ ID NO: 4778418 - DNA, 25 bp, Homo sapien
cagcgcttagcagagtgacctgtct

SEQ ID NO: 4778419 - DNA, 25 bp, Homo sapien
aacaacatcctgttcttaattccct

SEQ ID NO: 4778420 - DNA, 25 bp, Homo sapien
ggaagggaacaacatcctgttctta

SEQ ID NO: 4778421 - DNA, 25 bp, Homo sapien
aacatcctgttcttaattccctcac

SEQ ID NO: 4778422 - DNA, 25 bp, Homo sapien
ccggaagggaacaacatcctgttct

SEQ ID NO: 4778423 - DNA, 25 bp, Homo sapien
aggcagaagtgtgcaaacaggagca

SEQ ID NO: 4778424 - DNA, 25 bp, Homo sapien
tgcaaacaggagcaggtccaagatt

SEQ ID NO: 4778425 - DNA, 25 bp, Homo sapien
agaagcaattcttgatcctcttggc

SEQ ID NO: 4778426 - DNA, 25 bp, Homo sapien
caggtccaagatttgcatggccaga

SEQ ID NO: 4778427 - DNA, 25 bp, Homo sapien
aggctgcccaggaaaagccattcca

SEQ ID NO: 4778428 - DNA, 25 bp, Homo sapien
agagcaaggtgagctgggacttcct

SEQ ID NO: 4778429 - DNA, 25 bp, Homo sapien
ctttgagaagagcaaggtgagctgg

SEQ ID NO: 4778430 - DNA, 25 bp, Homo sapien
gtgagctgggacttcctggagcagg

SEQ ID NO: 4778431 - DNA, 25 bp, Homo sapien
gcctactgtctcaagtgcattcgca

SEQ ID NO: 4778432 - DNA, 25 bp, Homo sapien
gaaggacatggagctctcacttgct

SEQ ID NO: 4778433 - DNA, 25 bp, Homo sapien
aaaattgtgcattgaggcccatgag

SEQ ID NO: 4778434 - DNA, 25 bp, Homo sapien
tgcattcgcaagtggagcagtgcta

SEQ ID NO: 4778435 - DNA, 25 bp, Homo sapien
agaatatcagagagctctcacaggg

SEQ ID NO: 4778436 - DNA, 25 bp, Homo sapien
ttaatgaagtatggctagcagcagg

SEQ ID NO: 4778437 - DNA, 25 bp, Homo sapien
gagtttgggaaaaacgtcagccaca

SEQ ID NO: 4778438 - DNA, 25 bp, Homo sapien
gaacacactcagaggaggacccttt

SEQ ID NO: 4778439 - DNA, 25 bp, Homo sapien
taagcttagtccgtattggagtcag

SEQ ID NO: 4778440 - DNA, 25 bp, Homo sapien
ttcacccaggaaagaaacgctatga

SEQ ID NO: 4778441 - DNA, 25 bp, Homo sapien
ccaaatgaacgtggaagtttctcac

SEQ ID NO: 4778442 - DNA, 25 bp, Homo sapien
gatgaatgtaggacaactttcagcc

SEQ ID NO: 4778443 - DNA, 25 bp, Homo sapien
caaggagagggagcatacatgacta

SEQ ID NO: 4778444 - DNA, 25 bp, Homo sapien
gtgaatcagttccaccctacagggt

SEQ ID NO: 4778445 - DNA, 25 bp, Homo sapien
tgcctaatacgaagagggactgctt

SEQ ID NO: 4778446 - DNA, 25 bp, Homo sapien
atggaaaggtatcctgtgggccgcc

SEQ ID NO: 4778447 - DNA, 25 bp, Homo sapien
tatccattttgttgtgacagggccc

SEQ ID NO: 4778448 - DNA, 25 bp, Homo sapien
gatatccaatgtgtaaaagagccca

SEQ ID NO: 4778449 - DNA, 25 bp, Homo sapien
ggtagcaaccgtcacaatctggatg

SEQ ID NO: 4778450 - DNA, 25 bp, Homo sapien
cagttggcgaaagcatcagtgagcc

SEQ ID NO: 4778451 - DNA, 25 bp, Homo sapien
gtataagcttagggtagacttctta

SEQ ID NO: 4778452 - DNA, 25 bp, Homo sapien
tataagcttagggtagacttcttac

SEQ ID NO: 4778453 - DNA, 25 bp, Homo sapien
gagatgatcttttcgccagaaggat

SEQ ID NO: 4778454 - DNA, 25 bp, Homo sapien
gtgatgatctctgagggtggacttc

SEQ ID NO: 4778455 - DNA, 25 bp, Homo sapien
cactaaggattgctttccggacaaa

SEQ ID NO: 4778456 - DNA, 25 bp, Homo sapien
ctctgagggttgatgtccgggcaaa

SEQ ID NO: 4778457 - DNA, 25 bp, Homo sapien
atttatagggtttcatcattgagtg

SEQ ID NO: 4778458 - DNA, 25 bp, Homo sapien
tttatagggtttcatcattgagtga

SEQ ID NO: 4778459 - DNA, 25 bp, Homo sapien
gttctgtcattacttaccaatgggt

SEQ ID NO: 4778460 - DNA, 25 bp, Homo sapien
tctcttctatgacagctgtttgagg

SEQ ID NO: 4778461 - DNA, 25 bp, Homo sapien
tctgtgaaccgacgtctggtaggat

SEQ ID NO: 4778462 - DNA, 25 bp, Homo sapien
tgatattcagaggatttaacccaag

SEQ ID NO: 4778463 - DNA, 25 bp, Homo sapien
tgaaactttggatgcttgggaagat

SEQ ID NO: 4778464 - DNA, 25 bp, Homo sapien
gccagttctcctgtggtcaaagaga

SEQ ID NO: 4778465 - DNA, 25 bp, Homo sapien
gtgaattctcacatacattaccgca

SEQ ID NO: 4778466 - DNA, 25 bp, Homo sapien
tccacagttgacttctcaaaggatt

SEQ ID NO: 4778467 - DNA, 25 bp, Homo sapien
tattattgatacatattgcttgctc

SEQ ID NO: 4778468 - DNA, 25 bp, Homo sapien
tgatacatattgcttgctccaagtg

SEQ ID NO: 4778469 - DNA, 25 bp, Homo sapien
tacatgcagagtaaatggtttcccc

SEQ ID NO: 4778470 - DNA, 25 bp, Homo sapien
ttcacttcccatgagttgcatttgc

SEQ ID NO: 4778471 - DNA, 25 bp, Homo sapien
tatttcacctcatatctcacttcat

SEQ ID NO: 4778472 - DNA, 25 bp, Homo sapien
ttcaaagatttactgggcatacata

SEQ ID NO: 4778473 - DNA, 25 bp, Homo sapien
tctgttatttcacctcatatctcac

SEQ ID NO: 4778474 - DNA, 25 bp, Homo sapien
gatttactgggcatacatattaaaa

SEQ ID NO: 4778475 - DNA, 25 bp, Homo sapien
ctaaccactcctgcagaattatgtc

SEQ ID NO: 4778476 - DNA, 25 bp, Homo sapien
gcaatatttaggtgttcacccctaa

SEQ ID NO: 4778477 - DNA, 25 bp, Homo sapien
aaagtcttgcaatatttaggtgttc

SEQ ID NO: 4778478 - DNA, 25 bp, Homo sapien
ctaaagtgacctggagtctaaccac

SEQ ID NO: 4778479 - DNA, 25 bp, Homo sapien
acctctggtttgaaacagcagtacc

SEQ ID NO: 4778480 - DNA, 25 bp, Homo sapien
gactctggtttgagaattcctcctc

SEQ ID NO: 4778481 - DNA, 25 bp, Homo sapien
ggtgactctggtttgagaattcctc

SEQ ID NO: 4778482 - DNA, 25 bp, Homo sapien
ttgggtgactctggtttgagaattc

SEQ ID NO: 4778483 - DNA, 25 bp, Homo sapien
attctatagtcacgtccttgaatga

SEQ ID NO: 4778484 - DNA, 25 bp, Homo sapien
cctgggtgaattctatagtcacgtc

SEQ ID NO: 4778485 - DNA, 25 bp, Homo sapien
tctgtacagattcttctgaacaggg

SEQ ID NO: 4778486 - DNA, 25 bp, Homo sapien
ctgaacaggggccatttgctgccac

SEQ ID NO: 4778487 - DNA, 25 bp, Homo sapien
agtacatttctattcaatctgaagg

SEQ ID NO: 4778488 - DNA, 25 bp, Homo sapien
gtacatttctattcaatctgaaggg

SEQ ID NO: 4778489 - DNA, 25 bp, Homo sapien
tatagggattatggagattgaaagt

SEQ ID NO: 4778490 - DNA, 25 bp, Homo sapien
caaaaccaaaagatagttgatatga

SEQ ID NO: 4778491 - DNA, 25 bp, Homo sapien
gatatgactgcattactatcatata

SEQ ID NO: 4778492 - DNA, 25 bp, Homo sapien
gcattactatcatatacagtagact

SEQ ID NO: 4778493 - DNA, 25 bp, Homo sapien
tgtagagagctgataaaagcaacgc

SEQ ID NO: 4778494 - DNA, 25 bp, Homo sapien
catccttacaagaacatagctggga

SEQ ID NO: 4778495 - DNA, 25 bp, Homo sapien
tatggctgcttaacactacagctgc

SEQ ID NO: 4778496 - DNA, 25 bp, Homo sapien
gacataattaaccaacctgactgac

SEQ ID NO: 4778497 - DNA, 25 bp, Homo sapien
aacagtatgctaagtaaaaaggata

SEQ ID NO: 4778498 - DNA, 25 bp, Homo sapien
taaaaaggatagtcacaaagggcca

SEQ ID NO: 4778499 - DNA, 25 bp, Homo sapien
aggatagtcacaaagggccaggtgt

SEQ ID NO: 4778500 - DNA, 25 bp, Homo sapien
atgctaagtaaaaaggatagtcaca

SEQ ID NO: 4778501 - DNA, 25 bp, Homo sapien
agagtgtggagaaccgtaaaggata

SEQ ID NO: 4778502 - DNA, 25 bp, Homo sapien
gagtgtggagaaccgtaaaggataa

SEQ ID NO: 4778503 - DNA, 25 bp, Homo sapien
aagagtgtggagaaccgtaaaggat

SEQ ID NO: 4778504 - DNA, 25 bp, Homo sapien
tgatggcttctggatgtggcgacat

SEQ ID NO: 4778505 - DNA, 25 bp, Homo sapien
agttggcccacagtgttcagtgtca

SEQ ID NO: 4778506 - DNA, 25 bp, Homo sapien
tcagtgtcacacaatctgtgatggc

SEQ ID NO: 4778507 - DNA, 25 bp, Homo sapien
caccttctgcaagttggcccacagt

SEQ ID NO: 4778508 - DNA, 25 bp, Homo sapien
gaagtgccgctggttgggcaaatca

SEQ ID NO: 4778509 - DNA, 25 bp, Homo sapien
tcttcggtgggactcctgttcctgg

SEQ ID NO: 4778510 - DNA, 25 bp, Homo sapien
ggttgggcaaatcaagacctgctcc

SEQ ID NO: 4778511 - DNA, 25 bp, Homo sapien
tcagagagcagttcttcggtgggac

SEQ ID NO: 4778512 - DNA, 25 bp, Homo sapien
cagagccaaaattcacgaggtcctt

SEQ ID NO: 4778513 - DNA, 25 bp, Homo sapien
tcatggtcaatacaataaacgcgca

SEQ ID NO: 4778514 - DNA, 25 bp, Homo sapien
cgcaccgagcatcttccaactagga

SEQ ID NO: 4778515 - DNA, 25 bp, Homo sapien
tacgcgctttgtggcaggttcatgg

SEQ ID NO: 4778516 - DNA, 25 bp, Homo sapien
cactaacagggagaagccggaaagt

SEQ ID NO: 4778517 - DNA, 25 bp, Homo sapien
aaagtggggttgactgcacatgcgc

SEQ ID NO: 4778518 - DNA, 25 bp, Homo sapien
gcacatgcgcagacgaaaacgcgca

SEQ ID NO: 4778519 - DNA, 25 bp, Homo sapien
aaaacgcgcatatccgttcccagca

SEQ ID NO: 4778520 - DNA, 25 bp, Homo sapien
taatacctgaagtacacacaatccc

SEQ ID NO: 4778521 - DNA, 25 bp, Homo sapien
tctacttctagaatatggacatgct

SEQ ID NO: 4778522 - DNA, 25 bp, Homo sapien
gccttttaacttagagctgccacaa

SEQ ID NO: 4778523 - DNA, 25 bp, Homo sapien
gaaaaccgttatccacaaattatgc

SEQ ID NO: 4778524 - DNA, 25 bp, Homo sapien
gacaattatgaataaccctgtaatg

SEQ ID NO: 4778525 - DNA, 25 bp, Homo sapien
aaagtatcactcactaatttagtag

SEQ ID NO: 4778526 - DNA, 25 bp, Homo sapien
tggcctgcagtgagatattttgagg

SEQ ID NO: 4778527 - DNA, 25 bp, Homo sapien
taatgtaagattcacacgcaggttt

SEQ ID NO: 4778528 - DNA, 25 bp, Homo sapien
tctagcataattcaccagtggaacc

SEQ ID NO: 4778529 - DNA, 25 bp, Homo sapien
tttatctcggtcagtcttgctagag

SEQ ID NO: 4778530 - DNA, 25 bp, Homo sapien
tggtagtttgaaccaattcaaggaa

SEQ ID NO: 4778531 - DNA, 25 bp, Homo sapien
tgaggttagtagtgatgtcctctct

SEQ ID NO: 4778532 - DNA, 25 bp, Homo sapien
aatgtgtggccgattttagagtaaa

SEQ ID NO: 4778533 - DNA, 25 bp, Homo sapien
tgttgtttctgggtggtgcattctg

SEQ ID NO: 4778534 - DNA, 25 bp, Homo sapien
gagtaaatgccacatggtgatgaga

SEQ ID NO: 4778535 - DNA, 25 bp, Homo sapien
gatgtctaacaggtacatttggtct

SEQ ID NO: 4778536 - DNA, 25 bp, Homo sapien
gcaggtgcgagcctctctgtggaca

SEQ ID NO: 4778537 - DNA, 25 bp, Homo sapien
cagcgggtgccagttctctgcaggt

SEQ ID NO: 4778538 - DNA, 25 bp, Homo sapien
gagttgactggcttcgttactggaa

SEQ ID NO: 4778539 - DNA, 25 bp, Homo sapien
caacactctgatgggaggtcccagc

SEQ ID NO: 4778540 - DNA, 25 bp, Homo sapien
catggcctgagctgttatggtgcta

SEQ ID NO: 4778541 - DNA, 25 bp, Homo sapien
cagagcctgggttgcacagtgatac

SEQ ID NO: 4778542 - DNA, 25 bp, Homo sapien
gatgaatgactagatgttcctggtg

SEQ ID NO: 4778543 - DNA, 25 bp, Homo sapien
tatcacaaggtatgccaataagatc

SEQ ID NO: 4778544 - DNA, 25 bp, Homo sapien
tcactagaaagacatacataggccg

SEQ ID NO: 4778545 - DNA, 25 bp, Homo sapien
caaaactggagagatcaaccagaca

SEQ ID NO: 4778546 - DNA, 25 bp, Homo sapien
aatagaccgaacagacatacacaga

SEQ ID NO: 4778547 - DNA, 25 bp, Homo sapien
ggaagagttgctatactaacatcag

SEQ ID NO: 4778548 - DNA, 25 bp, Homo sapien
gcctgggaaacagacagagtaccgg

SEQ ID NO: 4778549 - DNA, 25 bp, Homo sapien
tatgtgttagtacccaaatgaagcc

SEQ ID NO: 4778550 - DNA, 25 bp, Homo sapien
aatacttgagacaaataggccaggc

SEQ ID NO: 4778551 - DNA, 25 bp, Homo sapien
acagatgtcctcaagcaagaaacag

SEQ ID NO: 4778552 - DNA, 25 bp, Homo sapien
tcttgctcttggacacaacacagaa

SEQ ID NO: 4778553 - DNA, 25 bp, Homo sapien
gctgagaagcactacttagcaactt

SEQ ID NO: 4778554 - DNA, 25 bp, Homo sapien
tcagtggtgtatcaagcccaccagc

SEQ ID NO: 4778555 - DNA, 25 bp, Homo sapien
aaagcacctgctatgatctcagacc

SEQ ID NO: 4778556 - DNA, 25 bp, Homo sapien
acatcttgcccaggacttttggctg

SEQ ID NO: 4778557 - DNA, 25 bp, Homo sapien
catcaatctttatgttatccgtacc

SEQ ID NO: 4778558 - DNA, 25 bp, Homo sapien
tgttatccgtaccaagcacatcttg

SEQ ID NO: 4778559 - DNA, 25 bp, Homo sapien
caagcacatcttgcccaggactttt

SEQ ID NO: 4778560 - DNA, 25 bp, Homo sapien
tcagaaaggattgtaggtaattacc

SEQ ID NO: 4778561 - DNA, 25 bp, Homo sapien
aaggtcacagccatatgggaagaaa

SEQ ID NO: 4778562 - DNA, 25 bp, Homo sapien
tctagtgatgtcaataagccattta

SEQ ID NO: 4778563 - DNA, 25 bp, Homo sapien
ctcttttaaggaacacaggtctttg

SEQ ID NO: 4778564 - DNA, 25 bp, Homo sapien
ccttgtaacaagctctgatataaaa

SEQ ID NO: 4778565 - DNA, 25 bp, Homo sapien
tattacctgtctgatgaggaagact

SEQ ID NO: 4778566 - DNA, 25 bp, Homo sapien
tgtcctgaaaaatcatactcctaag

SEQ ID NO: 4778567 - DNA, 25 bp, Homo sapien
gctgtccgagatttgtcctatgtga

SEQ ID NO: 4778568 - DNA, 25 bp, Homo sapien
ggctctggctgaaagaatgcccata

SEQ ID NO: 4778569 - DNA, 25 bp, Homo sapien
catattccactagctagagggtaac

SEQ ID NO: 4778570 - DNA, 25 bp, Homo sapien
tgtatatccatagaagactgggctc

SEQ ID NO: 4778571 - DNA, 25 bp, Homo sapien
caatatgaccccgtttagatgagag

SEQ ID NO: 4778572 - DNA, 25 bp, Homo sapien
tctgatgttctctaaggcttgattt

SEQ ID NO: 4778573 - DNA, 25 bp, Homo sapien
tttctgatgttctctaaggcttgat

SEQ ID NO: 4778574 - DNA, 25 bp, Homo sapien
gatgttctctaaggcttgatttttg

SEQ ID NO: 4778575 - DNA, 25 bp, Homo sapien
tgttctctaaggcttgatttttgac

SEQ ID NO: 4778576 - DNA, 25 bp, Homo sapien
tgtacactgaaagttgactggtagc

SEQ ID NO: 4778577 - DNA, 25 bp, Homo sapien
gagttcttcggtgattccttaggcc

SEQ ID NO: 4778578 - DNA, 25 bp, Homo sapien
tctgaggccaaatcaagtgtgaatt

SEQ ID NO: 4778579 - DNA, 25 bp, Homo sapien
tccttaggcctgacatatggctgaa

SEQ ID NO: 4778580 - DNA, 25 bp, Homo sapien
ggatttccctcctgtgagagttttg

SEQ ID NO: 4778581 - DNA, 25 bp, Homo sapien
tttgtgagtgattctacagaaacaa

SEQ ID NO: 4778582 - DNA, 25 bp, Homo sapien
gggtttcacccctatatgaactcta

SEQ ID NO: 4778583 - DNA, 25 bp, Homo sapien
ccagtatcattaaactcatagtgac

SEQ ID NO: 4778584 - DNA, 25 bp, Homo sapien
cccaaatttattgaaattgtaagat

SEQ ID NO: 4778585 - DNA, 25 bp, Homo sapien
ccaaatttattgaaattgtaagatt

SEQ ID NO: 4778586 - DNA, 25 bp, Homo sapien
tcttgagtgttagttctgccatcct

SEQ ID NO: 4778587 - DNA, 25 bp, Homo sapien
taatactgatgagccatttgtcaca

SEQ ID NO: 4778588 - DNA, 25 bp, Homo sapien
tgttagatgtaacaagggcagcctt

SEQ ID NO: 4778589 - DNA, 25 bp, Homo sapien
tgtcacaaacattacgctcatgagc

SEQ ID NO: 4778590 - DNA, 25 bp, Homo sapien
caagcagaccccgcaatgtcacatt

SEQ ID NO: 4778591 - DNA, 25 bp, Homo sapien
ggctgagcccctggcaagcagaccc

SEQ ID NO: 4778592 - DNA, 25 bp, Homo sapien
ccctggcaagcagaccccgcaatgt

SEQ ID NO: 4778593 - DNA, 25 bp, Homo sapien
gcagaccccgcaatgtcacatttac

SEQ ID NO: 4778594 - DNA, 25 bp, Homo sapien
ttcttgctctgtagtcaataattta

SEQ ID NO: 4778595 - DNA, 25 bp, Homo sapien
aatgtttatgtctcgattatgtggt

SEQ ID NO: 4778596 - DNA, 25 bp, Homo sapien
ggtgaataaaacttgcaacaaatgt

SEQ ID NO: 4778597 - DNA, 25 bp, Homo sapien
ctgagatttcatcaggttgggagtc

SEQ ID NO: 4778598 - DNA, 25 bp, Homo sapien
tctgtctgcattatcatcaaaggaa

SEQ ID NO: 4778599 - DNA, 25 bp, Homo sapien
tgcaatagttcagttggagctccat

SEQ ID NO: 4778600 - DNA, 25 bp, Homo sapien
tttgccgtagggagtaacgctagtc

SEQ ID NO: 4778601 - DNA, 25 bp, Homo sapien
tgtatacgtaagagcattggatcct

SEQ ID NO: 4778602 - DNA, 25 bp, Homo sapien
ccggccaatagtgaatctttttaga

SEQ ID NO: 4778603 - DNA, 25 bp, Homo sapien
gtctttgtccaatccttaattctgc

SEQ ID NO: 4778604 - DNA, 25 bp, Homo sapien
gtgaatctttttagatcatcaaatc

SEQ ID NO: 4778605 - DNA, 25 bp, Homo sapien
accacatccggccaatagtgaatct

SEQ ID NO: 4778606 - DNA, 25 bp, Homo sapien
ccaaaatataaccttcgttctgata

SEQ ID NO: 4778607 - DNA, 25 bp, Homo sapien
ataaccttcgttctgatatacttta

SEQ ID NO: 4778608 - DNA, 25 bp, Homo sapien
aatataaccttcgttctgatatact

SEQ ID NO: 4778609 - DNA, 25 bp, Homo sapien
aaaatataaccttcgttctgatata

SEQ ID NO: 4778610 - DNA, 25 bp, Homo sapien
ctggggagttcctgcttagaaatcc

SEQ ID NO: 4778611 - DNA, 25 bp, Homo sapien
tctctttctctaataaccatggatc

SEQ ID NO: 4778612 - DNA, 25 bp, Homo sapien
ctttctctaataaccatggatcttc

SEQ ID NO: 4778613 - DNA, 25 bp, Homo sapien
tggggagttcctgcttagaaatcct

SEQ ID NO: 4778614 - DNA, 25 bp, Homo sapien
cattagttgcataggttctactgtt

SEQ ID NO: 4778615 - DNA, 25 bp, Homo sapien
tttgcattagttgcataggttctac

SEQ ID NO: 4778616 - DNA, 25 bp, Homo sapien
gcatttgcattagttgcataggttc

SEQ ID NO: 4778617 - DNA, 25 bp, Homo sapien
tgcattagttgcataggttctactg

SEQ ID NO: 4778618 - DNA, 25 bp, Homo sapien
tattcagggtgctcactggaccttc

SEQ ID NO: 4778619 - DNA, 25 bp, Homo sapien
catattcagggtgctcactggacct

SEQ ID NO: 4778620 - DNA, 25 bp, Homo sapien
atattcagggtgctcactggacctt

SEQ ID NO: 4778621 - DNA, 25 bp, Homo sapien
gcatattcagggtgctcactggacc

SEQ ID NO: 4778622 - DNA, 25 bp, Homo sapien
taaagatagagtcgaattcctggcc

SEQ ID NO: 4778623 - DNA, 25 bp, Homo sapien
gagtaaatgccagcgaagaaagagc

SEQ ID NO: 4778624 - DNA, 25 bp, Homo sapien
gaagccctggcaactagaatttgtg

SEQ ID NO: 4778625 - DNA, 25 bp, Homo sapien
tacttgtgagagagttgccaaacca

SEQ ID NO: 4778626 - DNA, 25 bp, Homo sapien
tcttttatgtgcacttaacacttaa

SEQ ID NO: 4778627 - DNA, 25 bp, Homo sapien
tatgcgtttatagctatacatttcc

SEQ ID NO: 4778628 - DNA, 25 bp, Homo sapien
tgttggttttactgcatccagaagg

SEQ ID NO: 4778629 - DNA, 25 bp, Homo sapien
catccagaaggtacgctatgttgta

SEQ ID NO: 4778630 - DNA, 25 bp, Homo sapien
tactgtcagttggtaggaagagtcc

SEQ ID NO: 4778631 - DNA, 25 bp, Homo sapien
gaagagtcctggcttaccactaggc

SEQ ID NO: 4778632 - DNA, 25 bp, Homo sapien
ccaattggtgtttcaggctgataca

SEQ ID NO: 4778633 - DNA, 25 bp, Homo sapien
gtactctgatactctagaaccaggg

SEQ ID NO: 4778634 - DNA, 25 bp, Homo sapien
ccactgagacgaggtggctgtagtt

SEQ ID NO: 4778635 - DNA, 25 bp, Homo sapien
tccagcatcacatctctgtacaggg

SEQ ID NO: 4778636 - DNA, 25 bp, Homo sapien
gcatcacatctctgtacagggtcct

SEQ ID NO: 4778637 - DNA, 25 bp, Homo sapien
cactgagacgaggtggctgtagttc

SEQ ID NO: 4778638 - DNA, 25 bp, Homo sapien
gtcacgtcctggaatgacactgatg

SEQ ID NO: 4778639 - DNA, 25 bp, Homo sapien
tcaacagggcccatgtgctgccact

SEQ ID NO: 4778640 - DNA, 25 bp, Homo sapien
ctcaacagggcccatgtgctgccac

SEQ ID NO: 4778641 - DNA, 25 bp, Homo sapien
tggctgaattccacagtcacgtcct

SEQ ID NO: 4778642 - DNA, 25 bp, Homo sapien
ctgtaacagcgcatttctaattaat

SEQ ID NO: 4778643 - DNA, 25 bp, Homo sapien
agagtatagagaactgtaaagcctc

SEQ ID NO: 4778644 - DNA, 25 bp, Homo sapien
ttgggagagtatagagaactgtaaa

SEQ ID NO: 4778645 - DNA, 25 bp, Homo sapien
ggagagtatagagaactgtaaagcc

SEQ ID NO: 4778646 - DNA, 25 bp, Homo sapien
gggagagtatagagaactgtaaagc

SEQ ID NO: 4778647 - DNA, 25 bp, Homo sapien
gatagccacggaaaacccttcatgt

SEQ ID NO: 4778648 - DNA, 25 bp, Homo sapien
tcctggctctaccacaaacgaggga

SEQ ID NO: 4778649 - DNA, 25 bp, Homo sapien
gagggatccccggaaactcactgaa

SEQ ID NO: 4778650 - DNA, 25 bp, Homo sapien
tatgaggtagggacaaagtctccag

SEQ ID NO: 4778651 - DNA, 25 bp, Homo sapien
gatgcagacccaccgtccggggatt

SEQ ID NO: 4778652 - DNA, 25 bp, Homo sapien
tcgcccgcgttacaaatgcgctttc

SEQ ID NO: 4778653 - DNA, 25 bp, Homo sapien
cagagctcggggtctcgatgcagac

SEQ ID NO: 4778654 - DNA, 25 bp, Homo sapien
ggatttcgggcacgttgtcgcccgc

SEQ ID NO: 4778655 - DNA, 25 bp, Homo sapien
gggagccagcggccgaagtccctct

SEQ ID NO: 4778656 - DNA, 25 bp, Homo sapien
tctcgagaacccaaatgaggaggcg

SEQ ID NO: 4778657 - DNA, 25 bp, Homo sapien
tgctccggaccaacgctcagcctca

SEQ ID NO: 4778658 - DNA, 25 bp, Homo sapien
tccagcggccgggaaggccgagggc

SEQ ID NO: 4778659 - DNA, 25 bp, Homo sapien
cttttatcccttgccccgctgccct

SEQ ID NO: 4778660 - DNA, 25 bp, Homo sapien
atggctaagtagtatatcatcagat

SEQ ID NO: 4778661 - DNA, 25 bp, Homo sapien
gctaagtagtatatcatcagataca

SEQ ID NO: 4778662 - DNA, 25 bp, Homo sapien
tgccctccgccattccccgccaagt

SEQ ID NO: 4778663 - DNA, 25 bp, Homo sapien
aattcatgagtaaccctgcttagca

SEQ ID NO: 4778664 - DNA, 25 bp, Homo sapien
tcaaaggtcagtcttaggacaacaa

SEQ ID NO: 4778665 - DNA, 25 bp, Homo sapien
gaacattgccagatctaagctacca

SEQ ID NO: 4778666 - DNA, 25 bp, Homo sapien
cagggatacatagactggcagctgt

SEQ ID NO: 4778667 - DNA, 25 bp, Homo sapien
tatggctttctagaggccgtctgca

SEQ ID NO: 4778668 - DNA, 25 bp, Homo sapien
tatcttgctgtggagcgatgaccat

SEQ ID NO: 4778669 - DNA, 25 bp, Homo sapien
gacatttgtccaaccaaactagaag

SEQ ID NO: 4778670 - DNA, 25 bp, Homo sapien
taattggccgctgacaggtctaggg

SEQ ID NO: 4778671 - DNA, 25 bp, Homo sapien
tggctctcagacagcacctttgaat

SEQ ID NO: 4778672 - DNA, 25 bp, Homo sapien
tcactacctgctaattggagagccc

SEQ ID NO: 4778673 - DNA, 25 bp, Homo sapien
ctttgaatgcatctagggaccaggg

SEQ ID NO: 4778674 - DNA, 25 bp, Homo sapien
tcacagcgctgtgccggcttcaggt

SEQ ID NO: 4778675 - DNA, 25 bp, Homo sapien
ccaacctgagtgacaaagtgagatc

SEQ ID NO: 4778676 - DNA, 25 bp, Homo sapien
tccaacctgagtgacaaagtgagat

SEQ ID NO: 4778677 - DNA, 25 bp, Homo sapien
tgtttttgaagatagcccagttgac

SEQ ID NO: 4778678 - DNA, 25 bp, Homo sapien
taatgatgtcgatgttcctggcagt

SEQ ID NO: 4778679 - DNA, 25 bp, Homo sapien
taagtgggctttcagtcaaacacca

SEQ ID NO: 4778680 - DNA, 25 bp, Homo sapien
tactttgacctttgcgccttggcac

SEQ ID NO: 4778681 - DNA, 25 bp, Homo sapien
tcttcagtgccttaaggccatcctc

SEQ ID NO: 4778682 - DNA, 25 bp, Homo sapien
gatcttcagtgccttaaggccatcc

SEQ ID NO: 4778683 - DNA, 25 bp, Homo sapien
aagacaaagacttctatggtactgc

SEQ ID NO: 4778684 - DNA, 25 bp, Homo sapien
ttcagtgccttaaggccatcctctc

SEQ ID NO: 4778685 - DNA, 25 bp, Homo sapien
tgaagtagttctttgcagggctttc

SEQ ID NO: 4778686 - DNA, 25 bp, Homo sapien
atcacttgaggcctagcattggagg

SEQ ID NO: 4778687 - DNA, 25 bp, Homo sapien
agtgcgctgtgattgtgcctggaaa

SEQ ID NO: 4778688 - DNA, 25 bp, Homo sapien
tcataaggcttaaatggcaggatca

SEQ ID NO: 4778689 - DNA, 25 bp, Homo sapien
ggtagttcagaaggtcgggagttca

SEQ ID NO: 4778690 - DNA, 25 bp, Homo sapien
aaggcaggtagttcagaaggtcggg

SEQ ID NO: 4778691 - DNA, 25 bp, Homo sapien
caagtcagtcttgatatgtcttaaa

SEQ ID NO: 4778692 - DNA, 25 bp, Homo sapien
gtgttacatctctgcgtaacttaaa

SEQ ID NO: 4778693 - DNA, 25 bp, Homo sapien
agggtggctcagaccacataatttg

SEQ ID NO: 4778694 - DNA, 25 bp, Homo sapien
cataatttgactttagcacactgct

SEQ ID NO: 4778695 - DNA, 25 bp, Homo sapien
tagaattagaacaagggtgtttgag

SEQ ID NO: 4778696 - DNA, 25 bp, Homo sapien
aaagttgttgtacagagggtggctc

SEQ ID NO: 4778697 - DNA, 25 bp, Homo sapien
gtctccacagctcggggtcttgcca

SEQ ID NO: 4778698 - DNA, 25 bp, Homo sapien
gacacagcgcccacgagttctggca

SEQ ID NO: 4778699 - DNA, 25 bp, Homo sapien
agacacagcgcccacgagttctggc

SEQ ID NO: 4778700 - DNA, 25 bp, Homo sapien
ggaatttatgcagctctttcggtct

SEQ ID NO: 4778701 - DNA, 25 bp, Homo sapien
ggttaaatttgaactttgctgccga

SEQ ID NO: 4778702 - DNA, 25 bp, Homo sapien
tggtcctccatcaaatcccgattgg

SEQ ID NO: 4778703 - DNA, 25 bp, Homo sapien
gaaaaaacagctgccaaacacgttg

SEQ ID NO: 4778704 - DNA, 25 bp, Homo sapien
cgaatacggtgcgtggtcctccatc

SEQ ID NO: 4778705 - DNA, 25 bp, Homo sapien
ttaaagaacattgccgttattctta

SEQ ID NO: 4778706 - DNA, 25 bp, Homo sapien
taaagaacattgccgttattcttaa

SEQ ID NO: 4778707 - DNA, 25 bp, Homo sapien
attaaagaacattgccgttattctt

SEQ ID NO: 4778708 - DNA, 25 bp, Homo sapien
cgttccttgcggtccgcggtcttga

SEQ ID NO: 4778709 - DNA, 25 bp, Homo sapien
tcaggcttcgctccgcgagatctgg

SEQ ID NO: 4778710 - DNA, 25 bp, Homo sapien
tgcggtccgcggtcttgaagcaatt

SEQ ID NO: 4778711 - DNA, 25 bp, Homo sapien
gttcccggtggatgtgcctcttcat

SEQ ID NO: 4778712 - DNA, 25 bp, Homo sapien
tgtgcaaaaatgaagcttactcggt

SEQ ID NO: 4778713 - DNA, 25 bp, Homo sapien
ctgtgcaaaaatgaagcttactcgg

SEQ ID NO: 4778714 - DNA, 25 bp, Homo sapien
tgcaaaaatgaagcttactcggtat

SEQ ID NO: 4778715 - DNA, 25 bp, Homo sapien
caaaaatgaagcttactcggtatca

SEQ ID NO: 4778716 - DNA, 25 bp, Homo sapien
caagtgtgatgctagctttagttaa

SEQ ID NO: 4778717 - DNA, 25 bp, Homo sapien
cattttgtgatcctgctaaacccac

SEQ ID NO: 4778718 - DNA, 25 bp, Homo sapien
gcttttgccgcatcaactgatatga

SEQ ID NO: 4778719 - DNA, 25 bp, Homo sapien
tgtcaaaattgcagataacattggt

SEQ ID NO: 4778720 - DNA, 25 bp, Homo sapien
ccataaagccatattagcagccatt

SEQ ID NO: 4778721 - DNA, 25 bp, Homo sapien
gccattggccagtacatttcgcatt

SEQ ID NO: 4778722 - DNA, 25 bp, Homo sapien
ggcctaaattcattaagacagtctc

SEQ ID NO: 4778723 - DNA, 25 bp, Homo sapien
cagctttagttatttggaggtcgag

SEQ ID NO: 4778724 - DNA, 25 bp, Homo sapien
tctccaataccagtagggctcaagg

SEQ ID NO: 4778725 - DNA, 25 bp, Homo sapien
ggacctacactgaagagagactgct

SEQ ID NO: 4778726 - DNA, 25 bp, Homo sapien
gaaaatcaagcaggatagggacaac

SEQ ID NO: 4778727 - DNA, 25 bp, Homo sapien
tgagccctagacacaaccaatagaa

SEQ ID NO: 4778728 - DNA, 25 bp, Homo sapien
tgacaatgcagtaaaaggcagagct

SEQ ID NO: 4778729 - DNA, 25 bp, Homo sapien
gccctgtcatgaaggtccattgggt

SEQ ID NO: 4778730 - DNA, 25 bp, Homo sapien
tcctactcatagcaacaaggtggtg

SEQ ID NO: 4778731 - DNA, 25 bp, Homo sapien
caacaacaaggcagaatagagtgtc

SEQ ID NO: 4778732 - DNA, 25 bp, Homo sapien
aggtggtgtgagtcagcgtcccact

SEQ ID NO: 4778733 - DNA, 25 bp, Homo sapien
tgtgagtcagcgtcccactttgacc

SEQ ID NO: 4778734 - DNA, 25 bp, Homo sapien
agtcagcgtcccactttgaccagga

SEQ ID NO: 4778735 - DNA, 25 bp, Homo sapien
cgtcccactttgaccaggaagatga

SEQ ID NO: 4778736 - DNA, 25 bp, Homo sapien
gatagggtattatctaacaagtgtt

SEQ ID NO: 4778737 - DNA, 25 bp, Homo sapien
caggatggtttggaggagtctatta

SEQ ID NO: 4778738 - DNA, 25 bp, Homo sapien
gcttgacatgccaagaatcagaaaa

SEQ ID NO: 4778739 - DNA, 25 bp, Homo sapien
gaccctggcactatacccacttaaa

SEQ ID NO: 4778740 - DNA, 25 bp, Homo sapien
ttctcagcaaactattgcaaagaca

SEQ ID NO: 4778741 - DNA, 25 bp, Homo sapien
cagcaaactattgcaaagacaaaaa

SEQ ID NO: 4778742 - DNA, 25 bp, Homo sapien
tctcagcaaactattgcaaagacaa

SEQ ID NO: 4778743 - DNA, 25 bp, Homo sapien
accaaacaccacatgttctcactca

SEQ ID NO: 4778744 - DNA, 25 bp, Homo sapien
caaagaattactggagcaaagaggg

SEQ ID NO: 4778745 - DNA, 25 bp, Homo sapien
tctcagcaattgataaaactactag

SEQ ID NO: 4778746 - DNA, 25 bp, Homo sapien
tgtaagttggacttcaacactcttc

SEQ ID NO: 4778747 - DNA, 25 bp, Homo sapien
tactaatacagtagacctcagagca

SEQ ID NO: 4778748 - DNA, 25 bp, Homo sapien
ttgcagactccttcctttggcagac

SEQ ID NO: 4778749 - DNA, 25 bp, Homo sapien
catttgcagactccttcctttggca

SEQ ID NO: 4778750 - DNA, 25 bp, Homo sapien
tttgcagactccttcctttggcaga

SEQ ID NO: 4778751 - DNA, 25 bp, Homo sapien
tcatttgcagactccttcctttggc

SEQ ID NO: 4778752 - DNA, 25 bp, Homo sapien
ggcaggtttgatgtgcctgagctta

SEQ ID NO: 4778753 - DNA, 25 bp, Homo sapien
caggatgcacttggatgtggtcaag

SEQ ID NO: 4778754 - DNA, 25 bp, Homo sapien
tgtggccactttgccctccttcaga

SEQ ID NO: 4778755 - DNA, 25 bp, Homo sapien
caagagctagtctggactttgtgtc

SEQ ID NO: 4778756 - DNA, 25 bp, Homo sapien
tccaaggaggatacagggatgagcc

SEQ ID NO: 4778757 - DNA, 25 bp, Homo sapien
gacatcgggcgcatggtaagcactg

SEQ ID NO: 4778758 - DNA, 25 bp, Homo sapien
gagatccagtcaaggacacggctag

SEQ ID NO: 4778759 - DNA, 25 bp, Homo sapien
gagtatacaccctctgtcatgggca

SEQ ID NO: 4778760 - DNA, 25 bp, Homo sapien
tctgttaatagctcaatctgctgcc

SEQ ID NO: 4778761 - DNA, 25 bp, Homo sapien
tactgtttctctatgtggacgatga

SEQ ID NO: 4778762 - DNA, 25 bp, Homo sapien
gaaatccagcgaaaggacacttctg

SEQ ID NO: 4778763 - DNA, 25 bp, Homo sapien
gttgggtgagtagcaatctgttact

SEQ ID NO: 4778764 - DNA, 25 bp, Homo sapien
tagggaacaagtgttctgattctga

SEQ ID NO: 4778765 - DNA, 25 bp, Homo sapien
aaagctgtcatgatagaacactgcc

SEQ ID NO: 4778766 - DNA, 25 bp, Homo sapien
ctgattctgagcagaactactctgc

SEQ ID NO: 4778767 - DNA, 25 bp, Homo sapien
cctgggtatatgcccttgttgtcca

SEQ ID NO: 4778768 - DNA, 25 bp, Homo sapien
tgtgactgtcatgcgtggaccaccc

SEQ ID NO: 4778769 - DNA, 25 bp, Homo sapien
gcgtcagtgcggatcttaggaacat

SEQ ID NO: 4778770 - DNA, 25 bp, Homo sapien
catcctcatgaaggttcggtgtgac

SEQ ID NO: 4778771 - DNA, 25 bp, Homo sapien
tggaacattactccacctgctgtgg

SEQ ID NO: 4778772 - DNA, 25 bp, Homo sapien
tctgccacaatatgatcaatagggt

SEQ ID NO: 4778773 - DNA, 25 bp, Homo sapien
tgactctcataacaccctcggagcg

SEQ ID NO: 4778774 - DNA, 25 bp, Homo sapien
catctcccaggtagtgtctcaacac

SEQ ID NO: 4778775 - DNA, 25 bp, Homo sapien
gaacatttaagactacctgcccctg

SEQ ID NO: 4778776 - DNA, 25 bp, Homo sapien
gccaagtggcagcatttaatcacca

SEQ ID NO: 4778777 - DNA, 25 bp, Homo sapien
ttaaataatgaggaggctgtgtccc

SEQ ID NO: 4778778 - DNA, 25 bp, Homo sapien
caagacttgggccagtttgcagacc

SEQ ID NO: 4778779 - DNA, 25 bp, Homo sapien
aagggacctatagcactttaccaag

SEQ ID NO: 4778780 - DNA, 25 bp, Homo sapien
gaataagttgttgcatctagcccct

SEQ ID NO: 4778781 - DNA, 25 bp, Homo sapien
tcaagggcctttcacttcagcgaaa

SEQ ID NO: 4778782 - DNA, 25 bp, Homo sapien
ggaccctagaactgtggagcatgcc

SEQ ID NO: 4778783 - DNA, 25 bp, Homo sapien
tagggatactatctgaagccactgg

SEQ ID NO: 4778784 - DNA, 25 bp, Homo sapien
gcttcagataaggatcacaggatta

SEQ ID NO: 4778785 - DNA, 25 bp, Homo sapien
cagggtgatgctgtttgcaacacac

SEQ ID NO: 4778786 - DNA, 25 bp, Homo sapien
gaccagttgcctccacaagtgactc

SEQ ID NO: 4778787 - DNA, 25 bp, Homo sapien
cagccagctgacaactgcatgcact

SEQ ID NO: 4778788 - DNA, 25 bp, Homo sapien
ttcttcacatcaaaggagaccaaac

SEQ ID NO: 4778789 - DNA, 25 bp, Homo sapien
gaatttacctatcttggacgttcca

SEQ ID NO: 4778790 - DNA, 25 bp, Homo sapien
ctggtacccaccaatctgctttgtg

SEQ ID NO: 4778791 - DNA, 25 bp, Homo sapien
tacccatcaagcagtcactcgctgt

SEQ ID NO: 4778792 - DNA, 25 bp, Homo sapien
ggctgcagttcaggggcacaatctt

SEQ ID NO: 4778793 - DNA, 25 bp, Homo sapien
tcaggcatgcaccaccatgcccggc

SEQ ID NO: 4778794 - DNA, 25 bp, Homo sapien
tgcccaggctgcagttcaggggcac

SEQ ID NO: 4778795 - DNA, 25 bp, Homo sapien
ttcaggcatgcaccaccatgcccgg

SEQ ID NO: 4778796 - DNA, 25 bp, Homo sapien
ctcaggatccgaagtagctgcgatt

SEQ ID NO: 4778797 - DNA, 25 bp, Homo sapien
gcataagccaccatgactggccagt

SEQ ID NO: 4778798 - DNA, 25 bp, Homo sapien
ataagccaccatgactggccagttc

SEQ ID NO: 4778799 - DNA, 25 bp, Homo sapien
cacgctggtcttaaaactccttggc

SEQ ID NO: 4778800 - DNA, 25 bp, Homo sapien
tccacatcacttggtcaggtcagtt

SEQ ID NO: 4778801 - DNA, 25 bp, Homo sapien
aatgtgtgcaagttctagttactcc

SEQ ID NO: 4778802 - DNA, 25 bp, Homo sapien
tgccaagtgttcttccagagtgact

SEQ ID NO: 4778803 - DNA, 25 bp, Homo sapien
ggactacagcggtatgccacctatt

SEQ ID NO: 4778804 - DNA, 25 bp, Homo sapien
ggtggtcctcactgctcattttaca

SEQ ID NO: 4778805 - DNA, 25 bp, Homo sapien
tttacactaattataacgcattagc

SEQ ID NO: 4778806 - DNA, 25 bp, Homo sapien
cattttacactaattataacgcatt

SEQ ID NO: 4778807 - DNA, 25 bp, Homo sapien
tcattttacactaattataacgcat

SEQ ID NO: 4778808 - DNA, 25 bp, Homo sapien
accaaacttgatttatcctgctata

SEQ ID NO: 4778809 - DNA, 25 bp, Homo sapien
tgctaaataacatatactactaata

SEQ ID NO: 4778810 - DNA, 25 bp, Homo sapien
ccctttttggtaacactgctgagaa

SEQ ID NO: 4778811 - DNA, 25 bp, Homo sapien
ccaaacttgatttatcctgctatac

SEQ ID NO: 4778812 - DNA, 25 bp, Homo sapien
gacgtggagcttttatatcctccca

SEQ ID NO: 4778813 - DNA, 25 bp, Homo sapien
gaagctttgttaggtaggcataatt

SEQ ID NO: 4778814 - DNA, 25 bp, Homo sapien
cctccaggaactttcatgagttcaa

SEQ ID NO: 4778815 - DNA, 25 bp, Homo sapien
gaaaagatgcctagggtaagagatg

SEQ ID NO: 4778816 - DNA, 25 bp, Homo sapien
cctaacatagtcaagcttatagaaa

SEQ ID NO: 4778817 - DNA, 25 bp, Homo sapien
aaagagaaagtagaatgcgggttgc

SEQ ID NO: 4778818 - DNA, 25 bp, Homo sapien
gcagttgttgtttaacggaaatcga

SEQ ID NO: 4778819 - DNA, 25 bp, Homo sapien
tgttacatgtagtttaccgcaattt

SEQ ID NO: 4778820 - DNA, 25 bp, Homo sapien
tccaagtatttacaagtggctcaat

SEQ ID NO: 4778821 - DNA, 25 bp, Homo sapien
atttacaagtggctcaatttttcca

SEQ ID NO: 4778822 - DNA, 25 bp, Homo sapien
tacaagtggctcaatttttccaagt

SEQ ID NO: 4778823 - DNA, 25 bp, Homo sapien
cttccaagtatttacaagtggctca

SEQ ID NO: 4778824 - DNA, 25 bp, Homo sapien
gcgtgccccaccatgtcagatgcag

SEQ ID NO: 4778825 - DNA, 25 bp, Homo sapien
gccccaccatgtcagatgcagctgt

SEQ ID NO: 4778826 - DNA, 25 bp, Homo sapien
accatgtcagatgcagctgtagaca

SEQ ID NO: 4778827 - DNA, 25 bp, Homo sapien
tgtcagatgcagctgtagacaccag

SEQ ID NO: 4778828 - DNA, 25 bp, Homo sapien
atgaccaaaccagccttcggaccgt

SEQ ID NO: 4778829 - DNA, 25 bp, Homo sapien
cagccacctttaatgatctcggatg

SEQ ID NO: 4778830 - DNA, 25 bp, Homo sapien
catattgttagggtcagccaccttt

SEQ ID NO: 4778831 - DNA, 25 bp, Homo sapien
ccacctttaatgatctcggatgacc

SEQ ID NO: 4778832 - DNA, 25 bp, Homo sapien
ccagaggaagtgaaagttaagctga

SEQ ID NO: 4778833 - DNA, 25 bp, Homo sapien
caggtgaagggcagtaatccaggta

SEQ ID NO: 4778834 - DNA, 25 bp, Homo sapien
gaggtggcattcagccaggtgaagg

SEQ ID NO: 4778835 - DNA, 25 bp, Homo sapien
gattcctgtggacttatgttttcta

SEQ ID NO: 4778836 - DNA, 25 bp, Homo sapien
tgcaacctggacactcctatagcta

SEQ ID NO: 4778837 - DNA, 25 bp, Homo sapien
ccagcccgaggcctttgcggaggct

SEQ ID NO: 4778838 - DNA, 25 bp, Homo sapien
cccagcccgaggcctttgcggaggc

SEQ ID NO: 4778839 - DNA, 25 bp, Homo sapien
tgtttgtctaggtaaaatcagggcc

SEQ ID NO: 4778840 - DNA, 25 bp, Homo sapien
ttgtcagggccactatcacaacctc

SEQ ID NO: 4778841 - DNA, 25 bp, Homo sapien
taataattactagggagaagaggga

SEQ ID NO: 4778842 - DNA, 25 bp, Homo sapien
gcaacgcggtaaatcaagaaaggac

SEQ ID NO: 4778843 - DNA, 25 bp, Homo sapien
caaacttgtgtgccgaggagactcc

SEQ ID NO: 4778844 - DNA, 25 bp, Homo sapien
accggtccaccatattctccactcg

SEQ ID NO: 4778845 - DNA, 25 bp, Homo sapien
ggaaccggtccaccatattctccac

SEQ ID NO: 4778846 - DNA, 25 bp, Homo sapien
tcactgttccttaggaaccggtcca

SEQ ID NO: 4778847 - DNA, 25 bp, Homo sapien
gaaccggtccaccatattctccact

SEQ ID NO: 4778848 - DNA, 25 bp, Homo sapien
tctccctgccccgaaccaccggcaa

SEQ ID NO: 4778849 - DNA, 25 bp, Homo sapien
ccgccctttccgctcgcgctgcgtc

SEQ ID NO: 4778850 - DNA, 25 bp, Homo sapien
tttccgctcgcgctgcgtcgtctcc

SEQ ID NO: 4778851 - DNA, 25 bp, Homo sapien
cgaaccaccggcaaccgatgctggg

SEQ ID NO: 4778852 - DNA, 25 bp, Homo sapien
gccaggcgacgccttctccttggag

SEQ ID NO: 4778853 - DNA, 25 bp, Homo sapien
cactgacttgagtttgtagtagctt

SEQ ID NO: 4778854 - DNA, 25 bp, Homo sapien
tgcacttcaaggtgggagcaagact

SEQ ID NO: 4778855 - DNA, 25 bp, Homo sapien
tcctagaaacgagagagtctgaccg

SEQ ID NO: 4778856 - DNA, 25 bp, Homo sapien
gaagagccttcacgtctatgacggc

SEQ ID NO: 4778857 - DNA, 25 bp, Homo sapien
tatgacggcctagggcctcaagtgc

SEQ ID NO: 4778858 - DNA, 25 bp, Homo sapien
gtctgtctccacatgatgacgctga

SEQ ID NO: 4778859 - DNA, 25 bp, Homo sapien
tgacgctgaagagccttcacgtcta

SEQ ID NO: 4778860 - DNA, 25 bp, Homo sapien
ggctacaataattcccatgctgaga

SEQ ID NO: 4778861 - DNA, 25 bp, Homo sapien
gaaaaagacggtgttctgctctcct

SEQ ID NO: 4778862 - DNA, 25 bp, Homo sapien
tcccttaaaactgtgcgtactgcca

SEQ ID NO: 4778863 - DNA, 25 bp, Homo sapien
cactaaacctggaagctgagaacag

SEQ ID NO: 4778864 - DNA, 25 bp, Homo sapien
taaagagaggaaccacattactggg

SEQ ID NO: 4778865 - DNA, 25 bp, Homo sapien
cagaagaatactagaacatattaat

SEQ ID NO: 4778866 - DNA, 25 bp, Homo sapien
gctaaatctggccactatgttcttt

SEQ ID NO: 4778867 - DNA, 25 bp, Homo sapien
taatatatctctggaaagatgaaaa

SEQ ID NO: 4778868 - DNA, 25 bp, Homo sapien
tgttactgtggaggtgaagaatttg

SEQ ID NO: 4778869 - DNA, 25 bp, Homo sapien
ggcccgtcctctgtactttgtgtta

SEQ ID NO: 4778870 - DNA, 25 bp, Homo sapien
acttcctctcgtcagctagctcgtg

SEQ ID NO: 4778871 - DNA, 25 bp, Homo sapien
tcaggtcttcagacccacttcctct

SEQ ID NO: 4778872 - DNA, 25 bp, Homo sapien
ccctggttcttcgttggtccctatg

SEQ ID NO: 4778873 - DNA, 25 bp, Homo sapien
ctgtgaaaatccctggccgggcgcg

SEQ ID NO: 4778874 - DNA, 25 bp, Homo sapien
cagttactgggagctcaaaggagaa

SEQ ID NO: 4778875 - DNA, 25 bp, Homo sapien
gctccctgtcccactatttagtgta

SEQ ID NO: 4778876 - DNA, 25 bp, Homo sapien
tttaggtctttgagtgtacacccca

SEQ ID NO: 4778877 - DNA, 25 bp, Homo sapien
tcttggtgtgacgtgagccacggtt

SEQ ID NO: 4778878 - DNA, 25 bp, Homo sapien
tcgaactgagtgtcaatggccaggg

SEQ ID NO: 4778879 - DNA, 25 bp, Homo sapien
agtgccttccctcgaactgagtgtc

SEQ ID NO: 4778880 - DNA, 25 bp, Homo sapien
tgctgggcaggtattagcatcttca

SEQ ID NO: 4778881 - DNA, 25 bp, Homo sapien
tcttgggacccgcactagggtcgat

SEQ ID NO: 4778882 - DNA, 25 bp, Homo sapien
tcttctgccgcggtccagttagcac

SEQ ID NO: 4778883 - DNA, 25 bp, Homo sapien
ccgcggtccagttagcacagcggtg

SEQ ID NO: 4778884 - DNA, 25 bp, Homo sapien
ggagcttgagcatatccaccgtgca

SEQ ID NO: 4778885 - DNA, 25 bp, Homo sapien
tgccgtaacgaatcccatagactgg

SEQ ID NO: 4778886 - DNA, 25 bp, Homo sapien
gaatggcagcacacgagcaactttg

SEQ ID NO: 4778887 - DNA, 25 bp, Homo sapien
gatgattttctacgagatggcggca

SEQ ID NO: 4778888 - DNA, 25 bp, Homo sapien
catgggtgtgtttgggatatgatga

SEQ ID NO: 4778889 - DNA, 25 bp, Homo sapien
ttgaggtgaccgtccacatgggtgt

SEQ ID NO: 4778890 - DNA, 25 bp, Homo sapien
acgttgaggtgaccgtccacatggg

SEQ ID NO: 4778891 - DNA, 25 bp, Homo sapien
ggagacgttgaggtgaccgtccaca

SEQ ID NO: 4778892 - DNA, 25 bp, Homo sapien
gagtcttgtccaactggctgaagca

SEQ ID NO: 4778893 - DNA, 25 bp, Homo sapien
ttgtccaactggctgaagcagatgc

SEQ ID NO: 4778894 - DNA, 25 bp, Homo sapien
agagagtcttgtccaactggctgaa

SEQ ID NO: 4778895 - DNA, 25 bp, Homo sapien
tcttgtccaactggctgaagcagat

SEQ ID NO: 4778896 - DNA, 25 bp, Homo sapien
tgccctggttccctcctggccaaca

SEQ ID NO: 4778897 - DNA, 25 bp, Homo sapien
gccctggttccctcctggccaacac

SEQ ID NO: 4778898 - DNA, 25 bp, Homo sapien
ctgccctggttccctcctggccaac

SEQ ID NO: 4778899 - DNA, 25 bp, Homo sapien
gctgtgactgccagagcactggtcc

SEQ ID NO: 4778900 - DNA, 25 bp, Homo sapien
tccacagtctgagttctgattcctc

SEQ ID NO: 4778901 - DNA, 25 bp, Homo sapien
tcaggaccgctgtgactgccagagc

SEQ ID NO: 4778902 - DNA, 25 bp, Homo sapien
ttgttggctcaggaccgctgtgact

SEQ ID NO: 4778903 - DNA, 25 bp, Homo sapien
ccaaagatcatgttgtagggacgtt

SEQ ID NO: 4778904 - DNA, 25 bp, Homo sapien
cagtcctcggaaggatgaattccac

SEQ ID NO: 4778905 - DNA, 25 bp, Homo sapien
cgtttatcacgtatacggtatttgc

SEQ ID NO: 4778906 - DNA, 25 bp, Homo sapien
gaattccacctctcaggccatggtc

SEQ ID NO: 4778907 - DNA, 25 bp, Homo sapien
tccctgcattcctcacgaatgggag

SEQ ID NO: 4778908 - DNA, 25 bp, Homo sapien
gcttctgtgtgagcattcataagac

SEQ ID NO: 4778909 - DNA, 25 bp, Homo sapien
gacatcctgcattcacgtccactga

SEQ ID NO: 4778910 - DNA, 25 bp, Homo sapien
gggaccatcgtgtgtcatctgagct

SEQ ID NO: 4778911 - DNA, 25 bp, Homo sapien
tatagctttacatgctctggacttg

SEQ ID NO: 4778912 - DNA, 25 bp, Homo sapien
tatagacaccacatagacgtgggcc

SEQ ID NO: 4778913 - DNA, 25 bp, Homo sapien
gacgtgggccatgttaacattctac

SEQ ID NO: 4778914 - DNA, 25 bp, Homo sapien
taggcctacataaccacgaactgac

SEQ ID NO: 4778915 - DNA, 25 bp, Homo sapien
gatggagtctcaccatgcctaggct

SEQ ID NO: 4778916 - DNA, 25 bp, Homo sapien
aagagaaaatcaatacaatttaatt

SEQ ID NO: 4778917 - DNA, 25 bp, Homo sapien
gaaaagagaaaatcaatacaattta

SEQ ID NO: 4778918 - DNA, 25 bp, Homo sapien
ggagtgcaatggtgtgatcttggct

SEQ ID NO: 4778919 - DNA, 25 bp, Homo sapien
tacaggtgcacgccaccacacccgg

SEQ ID NO: 4778920 - DNA, 25 bp, Homo sapien
gactacaggtgcacgccaccacacc

SEQ ID NO: 4778921 - DNA, 25 bp, Homo sapien
attctcctgccacaggtagctggga

SEQ ID NO: 4778922 - DNA, 25 bp, Homo sapien
agccattctcctgccacaggtagct

SEQ ID NO: 4778923 - DNA, 25 bp, Homo sapien
ccagactatgactatagtcctagct

SEQ ID NO: 4778924 - DNA, 25 bp, Homo sapien
tgcactccagccagactatgactat

SEQ ID NO: 4778925 - DNA, 25 bp, Homo sapien
aaaatggctacagcccgggaggtag

SEQ ID NO: 4778926 - DNA, 25 bp, Homo sapien
gtgggaaaatggctacagcccggga

SEQ ID NO: 4778927 - DNA, 25 bp, Homo sapien
tatctcagtgtagttgtaatttacg

SEQ ID NO: 4778928 - DNA, 25 bp, Homo sapien
tttctccacagtcttatccgtagag

SEQ ID NO: 4778929 - DNA, 25 bp, Homo sapien
catcttttggtaaagagtctgtgca

SEQ ID NO: 4778930 - DNA, 25 bp, Homo sapien
tacgtttctcttaccatgagtgaag

SEQ ID NO: 4778931 - DNA, 25 bp, Homo sapien
tcagtattaccagagagatcaaatg

SEQ ID NO: 4778932 - DNA, 25 bp, Homo sapien
aaaacaagcagtcaggaggtgaagg

SEQ ID NO: 4778933 - DNA, 25 bp, Homo sapien
tataatgacaactgtccaaactggt

SEQ ID NO: 4778934 - DNA, 25 bp, Homo sapien
tgtaatagttaagaagtgctctgca

SEQ ID NO: 4778935 - DNA, 25 bp, Homo sapien
tgggctgatcctcatcagtgggatt

SEQ ID NO: 4778936 - DNA, 25 bp, Homo sapien
gagtggggcactcaaaaaagagagc

SEQ ID NO: 4778937 - DNA, 25 bp, Homo sapien
gaatacagtgccgaggagaaagggc

SEQ ID NO: 4778938 - DNA, 25 bp, Homo sapien
atcagacagggcaccaatgagtggg

SEQ ID NO: 4778939 - DNA, 25 bp, Homo sapien
ctttacaccttgaatgagaccattc

SEQ ID NO: 4778940 - DNA, 25 bp, Homo sapien
attctcctgcctcagaatcctgagt

SEQ ID NO: 4778941 - DNA, 25 bp, Homo sapien
aacctccaccttctgggttcaagca

SEQ ID NO: 4778942 - DNA, 25 bp, Homo sapien
tgctttggttgtccaggctggaatg

SEQ ID NO: 4778943 - DNA, 25 bp, Homo sapien
caatggcacgatctcagctcactgc

SEQ ID NO: 4778944 - DNA, 25 bp, Homo sapien
gccccacgcaaagaattcaaggaag

SEQ ID NO: 4778945 - DNA, 25 bp, Homo sapien
tgacaatagcagcatggtacacact

SEQ ID NO: 4778946 - DNA, 25 bp, Homo sapien
aatagcagcatggtacacacttggt

SEQ ID NO: 4778947 - DNA, 25 bp, Homo sapien
cccacgcaaagaattcaaggaagat

SEQ ID NO: 4778948 - DNA, 25 bp, Homo sapien
ttttcaagtgcacacaagtcagcgg

SEQ ID NO: 4778949 - DNA, 25 bp, Homo sapien
gaagccctacacctattaggagaca

SEQ ID NO: 4778950 - DNA, 25 bp, Homo sapien
cgaatattgataggagtacatggaa

SEQ ID NO: 4778951 - DNA, 25 bp, Homo sapien
taggctcttccaatctaagtcagtt

SEQ ID NO: 4778952 - DNA, 25 bp, Homo sapien
ccttaacaattctggaggatacctg

SEQ ID NO: 4778953 - DNA, 25 bp, Homo sapien
ttctggaggatacctgtcctgccat

SEQ ID NO: 4778954 - DNA, 25 bp, Homo sapien
aattctggaggatacctgtcctgcc

SEQ ID NO: 4778955 - DNA, 25 bp, Homo sapien
agtctccttaacaattctggaggat

SEQ ID NO: 4778956 - DNA, 25 bp, Homo sapien
agtatattacaaagacccctgagca

SEQ ID NO: 4778957 - DNA, 25 bp, Homo sapien
aatatacgctctgaaggaaaaggac

SEQ ID NO: 4778958 - DNA, 25 bp, Homo sapien
taaccttgactataccagctaggtg

SEQ ID NO: 4778959 - DNA, 25 bp, Homo sapien
atagcagcaacagatattatgcggg

SEQ ID NO: 4778960 - DNA, 25 bp, Homo sapien
gatagtcacacacctccagagtatg

SEQ ID NO: 4778961 - DNA, 25 bp, Homo sapien
tcaaatgtagctagttcctcaggca

SEQ ID NO: 4778962 - DNA, 25 bp, Homo sapien
tactgtgtacttgagcaaaagggca

SEQ ID NO: 4778963 - DNA, 25 bp, Homo sapien
tagcagcatgttattagtcccagac

SEQ ID NO: 4778964 - DNA, 25 bp, Homo sapien
aatcacttaactcttgtgtctctcc

SEQ ID NO: 4778965 - DNA, 25 bp, Homo sapien
tcaatcacttaactcttgtgtctct

SEQ ID NO: 4778966 - DNA, 25 bp, Homo sapien
caatcacttaactcttgtgtctctc

SEQ ID NO: 4778967 - DNA, 25 bp, Homo sapien
tggatcctggttacagggttagtct

SEQ ID NO: 4778968 - DNA, 25 bp, Homo sapien
gaaaagcaccttactctacaaacag

SEQ ID NO: 4778969 - DNA, 25 bp, Homo sapien
gacttagatgtcctggcaacacctt

SEQ ID NO: 4778970 - DNA, 25 bp, Homo sapien
ggtaaacatttatcacacaaacgag

SEQ ID NO: 4778971 - DNA, 25 bp, Homo sapien
taaagtaagtcaaacacatagaaac

SEQ ID NO: 4778972 - DNA, 25 bp, Homo sapien
tgggcctgctcgtgtgcgcctgtac

SEQ ID NO: 4778973 - DNA, 25 bp, Homo sapien
ccgtatttctatatgctggcaacaa

SEQ ID NO: 4778974 - DNA, 25 bp, Homo sapien
tacttacactactgaagtctacact

SEQ ID NO: 4778975 - DNA, 25 bp, Homo sapien
actacttatattcactgtcccatgt

SEQ ID NO: 4778976 - DNA, 25 bp, Homo sapien
tgtcccatgtctagcgccttttgaa

SEQ ID NO: 4778977 - DNA, 25 bp, Homo sapien
aaaactgttatcaactgttacaggg

SEQ ID NO: 4778978 - DNA, 25 bp, Homo sapien
ctgttacagggacggagaactccga

SEQ ID NO: 4778979 - DNA, 25 bp, Homo sapien
ggcctgcgcgcccgcgcgcttctcc

SEQ ID NO: 4778980 - DNA, 25 bp, Homo sapien
gctccccgcggcctgcgcgcccgcg

SEQ ID NO: 4778981 - DNA, 25 bp, Homo sapien
ccaggtgctccccgcggcctgcgcg

SEQ ID NO: 4778982 - DNA, 25 bp, Homo sapien
gcgcgcccgcgcgcttctccggcat

SEQ ID NO: 4778983 - DNA, 25 bp, Homo sapien
ctcgggctccgacgccgccttctcc

SEQ ID NO: 4778984 - DNA, 25 bp, Homo sapien
ctgtcgcagttaccggcggcgtcag

SEQ ID NO: 4778985 - DNA, 25 bp, Homo sapien
cgaccccgactgtcgcagttaccgg

SEQ ID NO: 4778986 - DNA, 25 bp, Homo sapien
ccgactgtcgcagttaccggcggcg

SEQ ID NO: 4778987 - DNA, 25 bp, Homo sapien
actgtcgcagttaccggcggcgtca

SEQ ID NO: 4778988 - DNA, 25 bp, Homo sapien
cgagagcccgtacgactaatttctt

SEQ ID NO: 4778989 - DNA, 25 bp, Homo sapien
cggcgcgcgggaagtacgtcatttc

SEQ ID NO: 4778990 - DNA, 25 bp, Homo sapien
cgtcatttcgagagcccgtacgact

SEQ ID NO: 4778991 - DNA, 25 bp, Homo sapien
cgggaagtacgtcatttcgagagcc

SEQ ID NO: 4778992 - DNA, 25 bp, Homo sapien
cagtgaaagccaccatcatgagaga

SEQ ID NO: 4778993 - DNA, 25 bp, Homo sapien
cactcagggctcaaagggcatggaa

SEQ ID NO: 4778994 - DNA, 25 bp, Homo sapien
gacttgcacttgagtccactgggct

SEQ ID NO: 4778995 - DNA, 25 bp, Homo sapien
taaacaccggtatgagcagatgtgg

SEQ ID NO: 4778996 - DNA, 25 bp, Homo sapien
tagcctctagtatgatgcccaagtg

SEQ ID NO: 4778997 - DNA, 25 bp, Homo sapien
tggagagtaccaacttagcctgctg

SEQ ID NO: 4778998 - DNA, 25 bp, Homo sapien
tgctgctgcaaagacgaaggaatcc

SEQ ID NO: 4778999 - DNA, 25 bp, Homo sapien
ggtaaaccttcagcatggcgtcatg

SEQ ID NO: 4779000 - DNA, 25 bp, Homo sapien
cagacatgctgtccttaagtccttc

SEQ ID NO: 4779001 - DNA, 25 bp, Homo sapien
tggatcctcaatgattcaactggtt

SEQ ID NO: 4779002 - DNA, 25 bp, Homo sapien
aagataaaatttccccagacatgct

SEQ ID NO: 4779003 - DNA, 25 bp, Homo sapien
cacaataagcgtttggtcagtttca

SEQ ID NO: 4779004 - DNA, 25 bp, Homo sapien
ggctatttttacatagccattcgag

SEQ ID NO: 4779005 - DNA, 25 bp, Homo sapien
ttccacagtggttgttcttgtcttt

SEQ ID NO: 4779006 - DNA, 25 bp, Homo sapien
tatttttacatagccattcgagccc

SEQ ID NO: 4779007 - DNA, 25 bp, Homo sapien
tgctgtggcgattccacagtggttg

SEQ ID NO: 4779008 - DNA, 25 bp, Homo sapien
aggaatcaagggaaaattggctcca

SEQ ID NO: 4779009 - DNA, 25 bp, Homo sapien
agaggagcaggttttccattttata

SEQ ID NO: 4779010 - DNA, 25 bp, Homo sapien
tttccattttatacaaggaatcaag

SEQ ID NO: 4779011 - DNA, 25 bp, Homo sapien
ccattttatacaaggaatcaaggga

SEQ ID NO: 4779012 - DNA, 25 bp, Homo sapien
gaatttgctccttcaaagccgtagc

SEQ ID NO: 4779013 - DNA, 25 bp, Homo sapien
acaccatgatccaggtttttgctgc

SEQ ID NO: 4779014 - DNA, 25 bp, Homo sapien
ctgtttttgacgagccaatacttgc

SEQ ID NO: 4779015 - DNA, 25 bp, Homo sapien
gagccaatacttgctgttattcgaa

SEQ ID NO: 4779016 - DNA, 25 bp, Homo sapien
ggaaggacgaatggcctgcatccat

SEQ ID NO: 4779017 - DNA, 25 bp, Homo sapien
tccaggtgcgaccactgtgaagcca

SEQ ID NO: 4779018 - DNA, 25 bp, Homo sapien
tccatagcaacggagatgggcccca

SEQ ID NO: 4779019 - DNA, 25 bp, Homo sapien
tgtagaactggaaggacgaatggcc

SEQ ID NO: 4779020 - DNA, 25 bp, Homo sapien
gggggagagacttgatcactaccat

SEQ ID NO: 4779021 - DNA, 25 bp, Homo sapien
gagagacttgatcactaccatctac

SEQ ID NO: 4779022 - DNA, 25 bp, Homo sapien
gggagagacttgatcactaccatct

SEQ ID NO: 4779023 - DNA, 25 bp, Homo sapien
ggagagacttgatcactaccatcta

SEQ ID NO: 4779024 - DNA, 25 bp, Homo sapien
ctagaaccgaaacactcagcaattt

SEQ ID NO: 4779025 - DNA, 25 bp, Homo sapien
gcaatttgcaacctaggatttccaa

SEQ ID NO: 4779026 - DNA, 25 bp, Homo sapien
gaaccgaaacactcagcaatttgca

SEQ ID NO: 4779027 - DNA, 25 bp, Homo sapien
cgaaacactcagcaatttgcaacct

SEQ ID NO: 4779028 - DNA, 25 bp, Homo sapien
tatctgttatctctgaaagtgttcc

SEQ ID NO: 4779029 - DNA, 25 bp, Homo sapien
cagagcacgaatgacaagataagga

SEQ ID NO: 4779030 - DNA, 25 bp, Homo sapien
aaaagcagagcacgaatgacaagat

SEQ ID NO: 4779031 - DNA, 25 bp, Homo sapien
gatgtagattctaccatataaaatg

SEQ ID NO: 4779032 - DNA, 25 bp, Homo sapien
tactggaaggccctagccatgaagc

SEQ ID NO: 4779033 - DNA, 25 bp, Homo sapien
aaggccctagccatgaagccaccat

SEQ ID NO: 4779034 - DNA, 25 bp, Homo sapien
agccctgattgccttgaggacgcga

SEQ ID NO: 4779035 - DNA, 25 bp, Homo sapien
tgaggacgcgaacagtccaccagat

SEQ ID NO: 4779036 - DNA, 25 bp, Homo sapien
gtggagacagggtctgaatctgacg

SEQ ID NO: 4779037 - DNA, 25 bp, Homo sapien
ggagacagggtctgaatctgacgct

SEQ ID NO: 4779038 - DNA, 25 bp, Homo sapien
gacagggtctgaatctgacgctgtc

SEQ ID NO: 4779039 - DNA, 25 bp, Homo sapien
gagacagggtctgaatctgacgctg

SEQ ID NO: 4779040 - DNA, 25 bp, Homo sapien
ctggtttcgaaagcaacccatcatc

SEQ ID NO: 4779041 - DNA, 25 bp, Homo sapien
ggtttcgaaagcaacccatcatctg

SEQ ID NO: 4779042 - DNA, 25 bp, Homo sapien
gtttcgaaagcaacccatcatctgc

SEQ ID NO: 4779043 - DNA, 25 bp, Homo sapien
tttcgaaagcaacccatcatctgcc

SEQ ID NO: 4779044 - DNA, 25 bp, Homo sapien
catgtcaccaaaagcattcatggcc

SEQ ID NO: 4779045 - DNA, 25 bp, Homo sapien
tggctgtattccccattgtgcagtt

SEQ ID NO: 4779046 - DNA, 25 bp, Homo sapien
ccttggctgtattccccattgtgca

SEQ ID NO: 4779047 - DNA, 25 bp, Homo sapien
accaaaagcattcatggccattgtg

SEQ ID NO: 4779048 - DNA, 25 bp, Homo sapien
taatgggtgctgttaggttattgcc

SEQ ID NO: 4779049 - DNA, 25 bp, Homo sapien
ttattgcctggtaaggtctggtgtc

SEQ ID NO: 4779050 - DNA, 25 bp, Homo sapien
acagcgaggaccattctctccagag

SEQ ID NO: 4779051 - DNA, 25 bp, Homo sapien
tggtgtctagaagctactctctggc

SEQ ID NO: 4779052 - DNA, 25 bp, Homo sapien
catataatcttctgtgtgttgcctt

SEQ ID NO: 4779053 - DNA, 25 bp, Homo sapien
gaacagcggaggctattcccaagca

SEQ ID NO: 4779054 - DNA, 25 bp, Homo sapien
ggaggctattcccaagcaaaaggca

SEQ ID NO: 4779055 - DNA, 25 bp, Homo sapien
tttggaacagcggaggctattccca

SEQ ID NO: 4779056 - DNA, 25 bp, Homo sapien
caaattttggaacagcggaggctat

SEQ ID NO: 4779057 - DNA, 25 bp, Homo sapien
acctcacaccttcttggctgataca

SEQ ID NO: 4779058 - DNA, 25 bp, Homo sapien
tgagctatgtcttccaacctctcct

SEQ ID NO: 4779059 - DNA, 25 bp, Homo sapien
aagtagatgcaagcggatccccaag

SEQ ID NO: 4779060 - DNA, 25 bp, Homo sapien
accttcttggctgatacacagcagg

SEQ ID NO: 4779061 - DNA, 25 bp, Homo sapien
gctccgggcagaagctctcactccc

SEQ ID NO: 4779062 - DNA, 25 bp, Homo sapien
cctcggtctggtcgggggcgctcac

SEQ ID NO: 4779063 - DNA, 25 bp, Homo sapien
ccttcgccctgtccctcggtctggt

SEQ ID NO: 4779064 - DNA, 25 bp, Homo sapien
agaagcgcccgcctcctctcagtgt

SEQ ID NO: 4779065 - DNA, 25 bp, Homo sapien
tgcgcaggcaccctcagcaaacaag

SEQ ID NO: 4779066 - DNA, 25 bp, Homo sapien
gcaggttcgcccgcctcgggattta

SEQ ID NO: 4779067 - DNA, 25 bp, Homo sapien
agtcccaacccgtctcaggtctggg

SEQ ID NO: 4779068 - DNA, 25 bp, Homo sapien
agattacagacgtccgcggtctggt

SEQ ID NO: 4779069 - DNA, 25 bp, Homo sapien
gatggatggtcgagaccggacacca

SEQ ID NO: 4779070 - DNA, 25 bp, Homo sapien
tagctgatagggtgtccagagaccg

SEQ ID NO: 4779071 - DNA, 25 bp, Homo sapien
gagcgttttgtggtgcgtccttccc

SEQ ID NO: 4779072 - DNA, 25 bp, Homo sapien
acgggactagctgatagggtgtcca

SEQ ID NO: 4779073 - DNA, 25 bp, Homo sapien
aatcaatcaatgagaattcagctct

SEQ ID NO: 4779074 - DNA, 25 bp, Homo sapien
tcaagcacgtaaatcaatcaatgag

SEQ ID NO: 4779075 - DNA, 25 bp, Homo sapien
aaatcaatcaatgagaattcagctc

SEQ ID NO: 4779076 - DNA, 25 bp, Homo sapien
caatcaatgagaattcagctcttac

SEQ ID NO: 4779077 - DNA, 25 bp, Homo sapien
tctcctcttctggtgtagcatgagc

SEQ ID NO: 4779078 - DNA, 25 bp, Homo sapien
tatgtggttcactacagtaatttca

SEQ ID NO: 4779079 - DNA, 25 bp, Homo sapien
gcatgagcattcacttccacattct

SEQ ID NO: 4779080 - DNA, 25 bp, Homo sapien
tatttaaatatgtggttcactacag

SEQ ID NO: 4779081 - DNA, 25 bp, Homo sapien
cttcgtgggtgtttttgtgcttgat

SEQ ID NO: 4779082 - DNA, 25 bp, Homo sapien
tcttcgtgggtgtttttgtgcttga

SEQ ID NO: 4779083 - DNA, 25 bp, Homo sapien
ttcttcgtgggtgtttttgtgcttg

SEQ ID NO: 4779084 - DNA, 25 bp, Homo sapien
ttcgtgggtgtttttgtgcttgatc

SEQ ID NO: 4779085 - DNA, 25 bp, Homo sapien
ctacaagtacaagtgcaggaagcag

SEQ ID NO: 4779086 - DNA, 25 bp, Homo sapien
ggatgactcctaagcaacaaactgt

SEQ ID NO: 4779087 - DNA, 25 bp, Homo sapien
tatgccggcatttctaagggcctga

SEQ ID NO: 4779088 - DNA, 25 bp, Homo sapien
taaccttacctcatctgagtgggag

SEQ ID NO: 4779089 - DNA, 25 bp, Homo sapien
attgtgacctggtatctggtctcca

SEQ ID NO: 4779090 - DNA, 25 bp, Homo sapien
ttgtgacctggtatctggtctccat

SEQ ID NO: 4779091 - DNA, 25 bp, Homo sapien
tattgtgacctggtatctggtctcc

SEQ ID NO: 4779092 - DNA, 25 bp, Homo sapien
cctattgtgacctggtatctggtct

SEQ ID NO: 4779093 - DNA, 25 bp, Homo sapien
tcattacattctgcttccttactgg

SEQ ID NO: 4779094 - DNA, 25 bp, Homo sapien
ccccacatcgccaaatgggcaggag

SEQ ID NO: 4779095 - DNA, 25 bp, Homo sapien
tcctgggaccagaaaccccacatcg

SEQ ID NO: 4779096 - DNA, 25 bp, Homo sapien
aggagaggctctccatctcattaca

SEQ ID NO: 4779097 - DNA, 25 bp, Homo sapien
cagtgttcaacaaaggcccttccaa

SEQ ID NO: 4779098 - DNA, 25 bp, Homo sapien
tctgggattcccaaggggacctgga

SEQ ID NO: 4779099 - DNA, 25 bp, Homo sapien
tgactcagtgttcaacaaaggccct

SEQ ID NO: 4779100 - DNA, 25 bp, Homo sapien
ctggacaggggttctgtaaaaggat

SEQ ID NO: 4779101 - DNA, 25 bp, Homo sapien
aactagaggatctgtaggccgagtc

SEQ ID NO: 4779102 - DNA, 25 bp, Homo sapien
gaggtcccattgtgacattcctgag

SEQ ID NO: 4779103 - DNA, 25 bp, Homo sapien
gccacgtttgccatacaagagaatg

SEQ ID NO: 4779104 - DNA, 25 bp, Homo sapien
cattggtcttaaggccagagtcccc

SEQ ID NO: 4779105 - DNA, 25 bp, Homo sapien
tacactgggtttggactgggaaagc

SEQ ID NO: 4779106 - DNA, 25 bp, Homo sapien
gaggtcccgctagcaacagccttat

SEQ ID NO: 4779107 - DNA, 25 bp, Homo sapien
tggcgcgtgtggtgctaaactctac

SEQ ID NO: 4779108 - DNA, 25 bp, Homo sapien
cagccttatgggtcccggcattggc

SEQ ID NO: 4779109 - DNA, 25 bp, Homo sapien
gcctgggagcctcggcacctgcttt

SEQ ID NO: 4779110 - DNA, 25 bp, Homo sapien
gggatgcggcgggcagctgatccca

SEQ ID NO: 4779111 - DNA, 25 bp, Homo sapien
ggagtaggagcggggatgcggcggg

SEQ ID NO: 4779112 - DNA, 25 bp, Homo sapien
ctcggagtaggagcggggatgcggc

SEQ ID NO: 4779113 - DNA, 25 bp, Homo sapien
ccggagcgccggcgctctctcgagg

SEQ ID NO: 4779114 - DNA, 25 bp, Homo sapien
gagcgccggcgctctctcgagggga

SEQ ID NO: 4779115 - DNA, 25 bp, Homo sapien
ctagggcccggagcgccggcgctct

SEQ ID NO: 4779116 - DNA, 25 bp, Homo sapien
agcgccggcgctctctcgaggggac

SEQ ID NO: 4779117 - DNA, 25 bp, Homo sapien
ccagggcaggggctaggggtgggcg

SEQ ID NO: 4779118 - DNA, 25 bp, Homo sapien
ggcaggggctaggggtgggcgacac

SEQ ID NO: 4779119 - DNA, 25 bp, Homo sapien
caggctaccagggcaggggctaggg

SEQ ID NO: 4779120 - DNA, 25 bp, Homo sapien
gctaccagggcaggggctaggggtg

SEQ ID NO: 4779121 - DNA, 25 bp, Homo sapien
gcacttcggagtcgcccagatccgt

SEQ ID NO: 4779122 - DNA, 25 bp, Homo sapien
agcacttcggagtcgcccagatccg

SEQ ID NO: 4779123 - DNA, 25 bp, Homo sapien
cgcggagcacttcggagtcgcccag

SEQ ID NO: 4779124 - DNA, 25 bp, Homo sapien
ggagcacttcggagtcgcccagatc

SEQ ID NO: 4779125 - DNA, 25 bp, Homo sapien
ggttcccatacacgggccagccgag

SEQ ID NO: 4779126 - DNA, 25 bp, Homo sapien
ctggaaggtcacacttcgggatgcg

SEQ ID NO: 4779127 - DNA, 25 bp, Homo sapien
gatgcgcggacagcctcatgggttc

SEQ ID NO: 4779128 - DNA, 25 bp, Homo sapien
gtcacacttcgggatgcgcggacag

SEQ ID NO: 4779129 - DNA, 25 bp, Homo sapien
gctgggacccccagtggataggaag

SEQ ID NO: 4779130 - DNA, 25 bp, Homo sapien
cccagtggataggaagggaacccag

SEQ ID NO: 4779131 - DNA, 25 bp, Homo sapien
tgaagacaacggctgggacccccag

SEQ ID NO: 4779132 - DNA, 25 bp, Homo sapien
ccagtggataggaagggaacccagg

SEQ ID NO: 4779133 - DNA, 25 bp, Homo sapien
gctgagccatcaaaaaaacgacgta

SEQ ID NO: 4779134 - DNA, 25 bp, Homo sapien
agccatcaaaaaaacgacgtagcag

SEQ ID NO: 4779135 - DNA, 25 bp, Homo sapien
aaaaaacgacgtagcagcagtaatg

SEQ ID NO: 4779136 - DNA, 25 bp, Homo sapien
tcaaaaaaacgacgtagcagcagta

SEQ ID NO: 4779137 - DNA, 25 bp, Homo sapien
tgagtatctcacagatgtcgaagag

SEQ ID NO: 4779138 - DNA, 25 bp, Homo sapien
atgaagacttgtggctccaggttcc

SEQ ID NO: 4779139 - DNA, 25 bp, Homo sapien
caggcgcccagatctcaaagcgcaa

SEQ ID NO: 4779140 - DNA, 25 bp, Homo sapien
ccacggaggatgaagtcacatggct

SEQ ID NO: 4779141 - DNA, 25 bp, Homo sapien
aataaagagaatttactggtggcat

SEQ ID NO: 4779142 - DNA, 25 bp, Homo sapien
cagaggtacaaaaaaagctggtatc

SEQ ID NO: 4779143 - DNA, 25 bp, Homo sapien
gcccaggaccagatggagtcacagt

SEQ ID NO: 4779144 - DNA, 25 bp, Homo sapien
cccaggaccagatggagtcacagtt

SEQ ID NO: 4779145 - DNA, 25 bp, Homo sapien
aggtacaaaaaaagctggtatcatt

SEQ ID NO: 4779146 - DNA, 25 bp, Homo sapien
tatgcagagcacaaacacacgagtg

SEQ ID NO: 4779147 - DNA, 25 bp, Homo sapien
tataggatgcacacactgctatgca

SEQ ID NO: 4779148 - DNA, 25 bp, Homo sapien
ccctgagttggtgctatccagtgaa

SEQ ID NO: 4779149 - DNA, 25 bp, Homo sapien
caatgaacggacattttcagagaca

SEQ ID NO: 4779150 - DNA, 25 bp, Homo sapien
cacatctgttagctccaacaggagg

SEQ ID NO: 4779151 - DNA, 25 bp, Homo sapien
ccttttccctgagttgagagtgaag

SEQ ID NO: 4779152 - DNA, 25 bp, Homo sapien
gtgcacatctgttagctccaacagg

SEQ ID NO: 4779153 - DNA, 25 bp, Homo sapien
cttttccctgagttgagagtgaaga

SEQ ID NO: 4779154 - DNA, 25 bp, Homo sapien
cactgatggttcttaggttaggaag

SEQ ID NO: 4779155 - DNA, 25 bp, Homo sapien
gcaacatgcgcaaactcagtggctc

SEQ ID NO: 4779156 - DNA, 25 bp, Homo sapien
agtggctcatggactctctgcaggt

SEQ ID NO: 4779157 - DNA, 25 bp, Homo sapien
tatttgctggttacctgatcctagc

SEQ ID NO: 4779158 - DNA, 25 bp, Homo sapien
caggactacattgttcttgatgacc

SEQ ID NO: 4779159 - DNA, 25 bp, Homo sapien
tgctccaggattccatatcaggata

SEQ ID NO: 4779160 - DNA, 25 bp, Homo sapien
gatgtcgaggtaaaatgccattctc

SEQ ID NO: 4779161 - DNA, 25 bp, Homo sapien
ccttaggttcttcccggctgtgatc

SEQ ID NO: 4779162 - DNA, 25 bp, Homo sapien
aatcataagcagcagcgcagtcgtg

SEQ ID NO: 4779163 - DNA, 25 bp, Homo sapien
cgcagtcgtgatggttccggtctca

SEQ ID NO: 4779164 - DNA, 25 bp, Homo sapien
catgggaggctatagaggaacagct

SEQ ID NO: 4779165 - DNA, 25 bp, Homo sapien
gataacactcgtatgagagacagca

SEQ ID NO: 4779166 - DNA, 25 bp, Homo sapien
tactgccaatggaataactttgcgg

SEQ ID NO: 4779167 - DNA, 25 bp, Homo sapien
ccatgcttaggaggtatgtcgtaca

SEQ ID NO: 4779168 - DNA, 25 bp, Homo sapien
aactttgcggagaagtgtcatcgta

SEQ ID NO: 4779169 - DNA, 25 bp, Homo sapien
tcatcgtattagcaacagacaagtg

SEQ ID NO: 4779170 - DNA, 25 bp, Homo sapien
aaaacgttcagtgtctactctgatg

SEQ ID NO: 4779171 - DNA, 25 bp, Homo sapien
actaatgcactcatcatccggttgg

SEQ ID NO: 4779172 - DNA, 25 bp, Homo sapien
gccaaagatgctgatcataatgaag

SEQ ID NO: 4779173 - DNA, 25 bp, Homo sapien
tctgaaacaaattacagtggagtgt

SEQ ID NO: 4779174 - DNA, 25 bp, Homo sapien
ggtacgaggttacagttcacagaaa

SEQ ID NO: 4779175 - DNA, 25 bp, Homo sapien
cttaccagatacaaagggcgaattt

SEQ ID NO: 4779176 - DNA, 25 bp, Homo sapien
gaatggaaaatctgcaactcttacc

SEQ ID NO: 4779177 - DNA, 25 bp, Homo sapien
ttaattcgctgaaatgttctggcac

SEQ ID NO: 4779178 - DNA, 25 bp, Homo sapien
ggaactctaaagtcctgcctggagg

SEQ ID NO: 4779179 - DNA, 25 bp, Homo sapien
aaaatgcagtcaaagtccgcagtgc

SEQ ID NO: 4779180 - DNA, 25 bp, Homo sapien
cacacccatgagaaaggctgagatg

SEQ ID NO: 4779181 - DNA, 25 bp, Homo sapien
cgctggagatgacgtggaacaactg

SEQ ID NO: 4779182 - DNA, 25 bp, Homo sapien
tggtcatagaaatcgcaacagcggt

SEQ ID NO: 4779183 - DNA, 25 bp, Homo sapien
caacagcggtatgattttttgcatg

SEQ ID NO: 4779184 - DNA, 25 bp, Homo sapien
ttttgcatggtgactgacagggaca

SEQ ID NO: 4779185 - DNA, 25 bp, Homo sapien
tctgtagtaacggaacttttctata

SEQ ID NO: 4779186 - DNA, 25 bp, Homo sapien
ggagtgcaacttggctacaggcttc

SEQ ID NO: 4779187 - DNA, 25 bp, Homo sapien
cacagtgttatactcctctggagga

SEQ ID NO: 4779188 - DNA, 25 bp, Homo sapien
cctcatggatgggtttagggccttt

SEQ ID NO: 4779189 - DNA, 25 bp, Homo sapien
aaagatttgaaagagtgagtttgtc

SEQ ID NO: 4779190 - DNA, 25 bp, Homo sapien
gagctataatagtatactatgttgc

SEQ ID NO: 4779191 - DNA, 25 bp, Homo sapien
aaaataggaacatggtgcaatgagc

SEQ ID NO: 4779192 - DNA, 25 bp, Homo sapien
acaacacacaaaataggaacatggt

SEQ ID NO: 4779193 - DNA, 25 bp, Homo sapien
gcaatgagctataatagtatactat

SEQ ID NO: 4779194 - DNA, 25 bp, Homo sapien
tatatacgatgaactgaaagcaggt

SEQ ID NO: 4779195 - DNA, 25 bp, Homo sapien
gaaaatggcaagtgtcaatgaggat

SEQ ID NO: 4779196 - DNA, 25 bp, Homo sapien
cacaaccattaggatgactactatg

SEQ ID NO: 4779197 - DNA, 25 bp, Homo sapien
aattagaaccgttgggcattgctgc

SEQ ID NO: 4779198 - DNA, 25 bp, Homo sapien
gctaaagctcaggagcaactttgat

SEQ ID NO: 4779199 - DNA, 25 bp, Homo sapien
cactaaagaatgcagttcagtggta

SEQ ID NO: 4779200 - DNA, 25 bp, Homo sapien
tactgagaaagtgaggtggtacatt

SEQ ID NO: 4779201 - DNA, 25 bp, Homo sapien
tattcccttgccagattttctagaa

SEQ ID NO: 4779202 - DNA, 25 bp, Homo sapien
gaagttttcaggatgacccaccaag

SEQ ID NO: 4779203 - DNA, 25 bp, Homo sapien
ttaaaaatgagctcgagaggccggg

SEQ ID NO: 4779204 - DNA, 25 bp, Homo sapien
tcctggatgaataagcctgcggctg

SEQ ID NO: 4779205 - DNA, 25 bp, Homo sapien
tgtctgatcacccaacggaagtgga

SEQ ID NO: 4779206 - DNA, 25 bp, Homo sapien
gagactaagcccacaatgacctgag

SEQ ID NO: 4779207 - DNA, 25 bp, Homo sapien
tgtgaggaaagcactccgtgaccct

SEQ ID NO: 4779208 - DNA, 25 bp, Homo sapien
taagaatggagagtggcttcctgca

SEQ ID NO: 4779209 - DNA, 25 bp, Homo sapien
taaattccatgggtaagggcctgct

SEQ ID NO: 4779210 - DNA, 25 bp, Homo sapien
gaccgggtggtcgggcagaggcgcc

SEQ ID NO: 4779211 - DNA, 25 bp, Homo sapien
cagaggcgctcctccaggcagaggt

SEQ ID NO: 4779212 - DNA, 25 bp, Homo sapien
ctcacctcccagaccgggtggtcgg

SEQ ID NO: 4779213 - DNA, 25 bp, Homo sapien
gcggcccggcagaggtgcccaccac

SEQ ID NO: 4779214 - DNA, 25 bp, Homo sapien
atcccagacaatgagtggccaggca

SEQ ID NO: 4779215 - DNA, 25 bp, Homo sapien
cggccgggaagaggctgtaatctta

SEQ ID NO: 4779216 - DNA, 25 bp, Homo sapien
cccagacaatgagtggccaggcaga

SEQ ID NO: 4779217 - DNA, 25 bp, Homo sapien
aggcaaggcaggtggctgggaggta

SEQ ID NO: 4779218 - DNA, 25 bp, Homo sapien
aagcccacggagagctcgggctgca

SEQ ID NO: 4779219 - DNA, 25 bp, Homo sapien
actccaagcccacggagagctcggg

SEQ ID NO: 4779220 - DNA, 25 bp, Homo sapien
ggctgacactggaaaagtgggaccc

SEQ ID NO: 4779221 - DNA, 25 bp, Homo sapien
ccctgtcccaatccgctgcaagttt

SEQ ID NO: 4779222 - DNA, 25 bp, Homo sapien
cacttttgactgggactttgggcac

SEQ ID NO: 4779223 - DNA, 25 bp, Homo sapien
actactgggccatcccaactatcca

SEQ ID NO: 4779224 - DNA, 25 bp, Homo sapien
tatccacagggccctccataacgtg

SEQ ID NO: 4779225 - DNA, 25 bp, Homo sapien
tttgtcctttcaatatctctgagca

SEQ ID NO: 4779226 - DNA, 25 bp, Homo sapien
agcagcccccactgaccaggtccct

SEQ ID NO: 4779227 - DNA, 25 bp, Homo sapien
ccaggtccctgctgaccatatccca

SEQ ID NO: 4779228 - DNA, 25 bp, Homo sapien
tccctgctgaccatatcccacacat

SEQ ID NO: 4779229 - DNA, 25 bp, Homo sapien
ggtccctgctgaccatatcccacac

SEQ ID NO: 4779230 - DNA, 25 bp, Homo sapien
tccatgactgggtcccattcctggc

SEQ ID NO: 4779231 - DNA, 25 bp, Homo sapien
atgactgggtcccattcctggctgg

SEQ ID NO: 4779232 - DNA, 25 bp, Homo sapien
tgactgggtcccattcctggctggg

SEQ ID NO: 4779233 - DNA, 25 bp, Homo sapien
tgcctactctccgtgactttggtta

SEQ ID NO: 4779234 - DNA, 25 bp, Homo sapien
aagaactcaccgacagtgttgaagg

SEQ ID NO: 4779235 - DNA, 25 bp, Homo sapien
aactcaccgacagtgttgaaggcat

SEQ ID NO: 4779236 - DNA, 25 bp, Homo sapien
tggcaaagaactcaccgacagtgtt

SEQ ID NO: 4779237 - DNA, 25 bp, Homo sapien
gcaaagaactcaccgacagtgttga

SEQ ID NO: 4779238 - DNA, 25 bp, Homo sapien
acagtgctgtaggagccctgatgca

SEQ ID NO: 4779239 - DNA, 25 bp, Homo sapien
aagctggccgtgtggttcatccacc

SEQ ID NO: 4779240 - DNA, 25 bp, Homo sapien
gcacttgaacatagagtccttctca

SEQ ID NO: 4779241 - DNA, 25 bp, Homo sapien
tcttcagtgctggtgtggcacatca

SEQ ID NO: 4779242 - DNA, 25 bp, Homo sapien
acccctgcttccttgagtgggtgag

SEQ ID NO: 4779243 - DNA, 25 bp, Homo sapien
gttggtggctgatccatctgctcca

SEQ ID NO: 4779244 - DNA, 25 bp, Homo sapien
tcagccgtcaggtggcagcccctca

SEQ ID NO: 4779245 - DNA, 25 bp, Homo sapien
ccgtcaggtggcagcccctcaggct

SEQ ID NO: 4779246 - DNA, 25 bp, Homo sapien
gcctggcatgcacaggtcctgggta

SEQ ID NO: 4779247 - DNA, 25 bp, Homo sapien
ctggcatgcacaggtcctgggtact

SEQ ID NO: 4779248 - DNA, 25 bp, Homo sapien
gcatgcacaggtcctgggtactgac

SEQ ID NO: 4779249 - DNA, 25 bp, Homo sapien
ggcatgcacaggtcctgggtactga

SEQ ID NO: 4779250 - DNA, 25 bp, Homo sapien
gcccaggatgaggcttgactgggcc

SEQ ID NO: 4779251 - DNA, 25 bp, Homo sapien
aggatgaggcttgactgggccagga

SEQ ID NO: 4779252 - DNA, 25 bp, Homo sapien
cccatagtgcccctcccgtcccagg

SEQ ID NO: 4779253 - DNA, 25 bp, Homo sapien
ggcccatagtgcccctcccgtccca

SEQ ID NO: 4779254 - DNA, 25 bp, Homo sapien
tttaagtatggatctttgttcccca

SEQ ID NO: 4779255 - DNA, 25 bp, Homo sapien
caggcaccgtgcagggcggttgtct

SEQ ID NO: 4779256 - DNA, 25 bp, Homo sapien
aagggggtcagatgcaggcaccgtg

SEQ ID NO: 4779257 - DNA, 25 bp, Homo sapien
ggtggtcctgggagtgtccagagga

SEQ ID NO: 4779258 - DNA, 25 bp, Homo sapien
gtcagatgcaggcaccgtgcagggc

SEQ ID NO: 4779259 - DNA, 25 bp, Homo sapien
ctccataggtgctccccaatctctg

SEQ ID NO: 4779260 - DNA, 25 bp, Homo sapien
ttagagcctccataggtgctcccca

SEQ ID NO: 4779261 - DNA, 25 bp, Homo sapien
atcactaacaccactagggcccagg

SEQ ID NO: 4779262 - DNA, 25 bp, Homo sapien
aggtcctcatcactaacaccactag

SEQ ID NO: 4779263 - DNA, 25 bp, Homo sapien
gagcaagtgttcaacacagcaaaag

SEQ ID NO: 4779264 - DNA, 25 bp, Homo sapien
gaaaggagatgggagcaagtgttca

SEQ ID NO: 4779265 - DNA, 25 bp, Homo sapien
gggagcaagtgttcaacacagcaaa

SEQ ID NO: 4779266 - DNA, 25 bp, Homo sapien
gagatgggagcaagtgttcaacaca

SEQ ID NO: 4779267 - DNA, 25 bp, Homo sapien
agaaaatatcatccgttctttctcc

SEQ ID NO: 4779268 - DNA, 25 bp, Homo sapien
gagaaaatatcatccgttctttctc

SEQ ID NO: 4779269 - DNA, 25 bp, Homo sapien
tctgagatggaattgttagctttca

SEQ ID NO: 4779270 - DNA, 25 bp, Homo sapien
ttctgagatggaattgttagctttc

SEQ ID NO: 4779271 - DNA, 25 bp, Homo sapien
tttttctgagatggaattgttagct

SEQ ID NO: 4779272 - DNA, 25 bp, Homo sapien
tcttttttagtgaagccgtattatc

SEQ ID NO: 4779273 - DNA, 25 bp, Homo sapien
gatttatattcttgtgctttaccaa

SEQ ID NO: 4779274 - DNA, 25 bp, Homo sapien
attcttgtgctttaccaagttctac

SEQ ID NO: 4779275 - DNA, 25 bp, Homo sapien
tgatgaagaacttcattgtctttgg

SEQ ID NO: 4779276 - DNA, 25 bp, Homo sapien
cacatttctcttgtacttttctcat

SEQ ID NO: 4779277 - DNA, 25 bp, Homo sapien
taataaaataatagagcttgataat

SEQ ID NO: 4779278 - DNA, 25 bp, Homo sapien
taatagagcttgataatgaagtagg

SEQ ID NO: 4779279 - DNA, 25 bp, Homo sapien
gataatgaagtaggctgagaataat

SEQ ID NO: 4779280 - DNA, 25 bp, Homo sapien
aaataatagagcttgataatgaagt

SEQ ID NO: 4779281 - DNA, 25 bp, Homo sapien
ggatacagaattacagttagataag

SEQ ID NO: 4779282 - DNA, 25 bp, Homo sapien
catcccattaaaagaatagaatatg

SEQ ID NO: 4779283 - DNA, 25 bp, Homo sapien
cagcccccagattgtgagagagatc

SEQ ID NO: 4779284 - DNA, 25 bp, Homo sapien
cttcagatgattcaatttctccaac

SEQ ID NO: 4779285 - DNA, 25 bp, Homo sapien
ttggccgaatttgggtttatccatc

SEQ ID NO: 4779286 - DNA, 25 bp, Homo sapien
aacctgcacctctcgcacatgtaat

SEQ ID NO: 4779287 - DNA, 25 bp, Homo sapien
gggacatggatgaactcgaagctgt

SEQ ID NO: 4779288 - DNA, 25 bp, Homo sapien
cgcacatgtaatctagaccttaaga

SEQ ID NO: 4779289 - DNA, 25 bp, Homo sapien
tcagtttttccctgtctcttaacca

SEQ ID NO: 4779290 - DNA, 25 bp, Homo sapien
cagtttttccctgtctcttaaccat

SEQ ID NO: 4779291 - DNA, 25 bp, Homo sapien
ttatattcattcattaattccatac

SEQ ID NO: 4779292 - DNA, 25 bp, Homo sapien
aattatattcattcattaattccat

SEQ ID NO: 4779293 - DNA, 25 bp, Homo sapien
attatattcattcattaattccata

SEQ ID NO: 4779294 - DNA, 25 bp, Homo sapien
taattatattcattcattaattcca

SEQ ID NO: 4779295 - DNA, 25 bp, Homo sapien
cagcttagcttttaaggtactgaac

SEQ ID NO: 4779296 - DNA, 25 bp, Homo sapien
tccagtggattgactctccttagct

SEQ ID NO: 4779297 - DNA, 25 bp, Homo sapien
gcatctcttgtctcatgcagcttag

SEQ ID NO: 4779298 - DNA, 25 bp, Homo sapien
tcttgtgaatactgggcaattgttt

SEQ ID NO: 4779299 - DNA, 25 bp, Homo sapien
tcttttttccataactttgagaatc

SEQ ID NO: 4779300 - DNA, 25 bp, Homo sapien
cacatccttcttttttccataactt

SEQ ID NO: 4779301 - DNA, 25 bp, Homo sapien
catccttcttttttccataactttg

SEQ ID NO: 4779302 - DNA, 25 bp, Homo sapien
cctctgaaggcacttttaagtcgtg

SEQ ID NO: 4779303 - DNA, 25 bp, Homo sapien
tgcttttcctctgaaggcactttta

SEQ ID NO: 4779304 - DNA, 25 bp, Homo sapien
tctgaaggcacttttaagtcgtgtt

SEQ ID NO: 4779305 - DNA, 25 bp, Homo sapien
ttcctctgaaggcacttttaagtcg

SEQ ID NO: 4779306 - DNA, 25 bp, Homo sapien
ctttttttcaaatttgcaggcttca

SEQ ID NO: 4779307 - DNA, 25 bp, Homo sapien
tttttttcaaatttgcaggcttcat

SEQ ID NO: 4779308 - DNA, 25 bp, Homo sapien
ttctgtcaaacatgcaagcttctta

SEQ ID NO: 4779309 - DNA, 25 bp, Homo sapien
tttctgtcaaacatgcaagcttctt

SEQ ID NO: 4779310 - DNA, 25 bp, Homo sapien
tctgtcaaacatgcaagcttcttag

SEQ ID NO: 4779311 - DNA, 25 bp, Homo sapien
aatattacagaaagggccgagcacg

SEQ ID NO: 4779312 - DNA, 25 bp, Homo sapien
aaattgaatctaatgcctcccctgt

SEQ ID NO: 4779313 - DNA, 25 bp, Homo sapien
tgctggctccctacccaagagcagt

SEQ ID NO: 4779314 - DNA, 25 bp, Homo sapien
tgctttataccctcaacagaatgcc

SEQ ID NO: 4779315 - DNA, 25 bp, Homo sapien
tctcccaatttaaaagacacgtgaa

SEQ ID NO: 4779316 - DNA, 25 bp, Homo sapien
agtcccctgcaagttttctcccaat

SEQ ID NO: 4779317 - DNA, 25 bp, Homo sapien
ttctcccaatttaaaagacacgtga

SEQ ID NO: 4779318 - DNA, 25 bp, Homo sapien
gatgacattggacacacagtaagca

SEQ ID NO: 4779319 - DNA, 25 bp, Homo sapien
gcaatttgccaaacctaacttatag

SEQ ID NO: 4779320 - DNA, 25 bp, Homo sapien
tcttgcctaatggtaacagagtaac

SEQ ID NO: 4779321 - DNA, 25 bp, Homo sapien
cacaaacataaacgtgcctggcaca

SEQ ID NO: 4779322 - DNA, 25 bp, Homo sapien
agacctttgggaggattcacttacg

SEQ ID NO: 4779323 - DNA, 25 bp, Homo sapien
caagagtttgaactgcaagggtcca

SEQ ID NO: 4779324 - DNA, 25 bp, Homo sapien
gaagatccatttgcataacaagtcc

SEQ ID NO: 4779325 - DNA, 25 bp, Homo sapien
tttcaactccacagggatcagagtc

SEQ ID NO: 4779326 - DNA, 25 bp, Homo sapien
tttatgttccaaaatttgttgttga

SEQ ID NO: 4779327 - DNA, 25 bp, Homo sapien
ttgattgtcatttcaaagatgattt

SEQ ID NO: 4779328 - DNA, 25 bp, Homo sapien
tcatttcaaagatgatttttaagtt

SEQ ID NO: 4779329 - DNA, 25 bp, Homo sapien
ttatgttccaaaatttgttgttgaa

SEQ ID NO: 4779330 - DNA, 25 bp, Homo sapien
tgtgtgccctccttaggcagcaggc

SEQ ID NO: 4779331 - DNA, 25 bp, Homo sapien
agcaggcatgcttatctgttctgta

SEQ ID NO: 4779332 - DNA, 25 bp, Homo sapien
taggcagcaggcatgcttatctgtt

SEQ ID NO: 4779333 - DNA, 25 bp, Homo sapien
aatttgtgtgccctccttaggcagc

SEQ ID NO: 4779334 - DNA, 25 bp, Homo sapien
tgatgatacttgacgagctatgctg

SEQ ID NO: 4779335 - DNA, 25 bp, Homo sapien
aggaggctgatgatacttgacgagc

SEQ ID NO: 4779336 - DNA, 25 bp, Homo sapien
gctgatgatacttgacgagctatgc

SEQ ID NO: 4779337 - DNA, 25 bp, Homo sapien
tgatacttgacgagctatgctgtac

SEQ ID NO: 4779338 - DNA, 25 bp, Homo sapien
catcaactgaatacaagttgtcttg

SEQ ID NO: 4779339 - DNA, 25 bp, Homo sapien
agttgtcttgtttggtctgaaatct

SEQ ID NO: 4779340 - DNA, 25 bp, Homo sapien
aaacattaaagcataggaatacatc

SEQ ID NO: 4779341 - DNA, 25 bp, Homo sapien
cttgtttggtctgaaatcttgaaaa

SEQ ID NO: 4779342 - DNA, 25 bp, Homo sapien
gaacctccgtccatcccagaagtta

SEQ ID NO: 4779343 - DNA, 25 bp, Homo sapien
ggcactgcttcaagggaacctccgt

SEQ ID NO: 4779344 - DNA, 25 bp, Homo sapien
tgaggtagatttaggttggcactgc

SEQ ID NO: 4779345 - DNA, 25 bp, Homo sapien
ctagttttggttacaggctcccaag

SEQ ID NO: 4779346 - DNA, 25 bp, Homo sapien
catatactagtgataggcatgattt

SEQ ID NO: 4779347 - DNA, 25 bp, Homo sapien
tatactagtgataggcatgattttc

SEQ ID NO: 4779348 - DNA, 25 bp, Homo sapien
caaacatatactagtgataggcatg

SEQ ID NO: 4779349 - DNA, 25 bp, Homo sapien
atgtcaaacatatactagtgatagg

SEQ ID NO: 4779350 - DNA, 25 bp, Homo sapien
tatcactatgagctatattcactgg

SEQ ID NO: 4779351 - DNA, 25 bp, Homo sapien
cactggccctaatattatcatgatc

SEQ ID NO: 4779352 - DNA, 25 bp, Homo sapien
ttaggatcaaagcttagagccatac

SEQ ID NO: 4779353 - DNA, 25 bp, Homo sapien
cagtcattaggatcaaagcttagag

SEQ ID NO: 4779354 - DNA, 25 bp, Homo sapien
tccatgaatccaaatggcaatactc

SEQ ID NO: 4779355 - DNA, 25 bp, Homo sapien
gcagtgtagcagttcgccaactcca

SEQ ID NO: 4779356 - DNA, 25 bp, Homo sapien
agttcgccaactccatgaatccaaa

SEQ ID NO: 4779357 - DNA, 25 bp, Homo sapien
catgaatccaaatggcaatactctc

SEQ ID NO: 4779358 - DNA, 25 bp, Homo sapien
gatgaatctgccaactacttttccc

SEQ ID NO: 4779359 - DNA, 25 bp, Homo sapien
aatcagaggatttggactagcaaca

SEQ ID NO: 4779360 - DNA, 25 bp, Homo sapien
tattcactagtctacaaagtcccaa

SEQ ID NO: 4779361 - DNA, 25 bp, Homo sapien
tagaattctgcattccacgccatat

SEQ ID NO: 4779362 - DNA, 25 bp, Homo sapien
gattgcaatcctttccctgggatta

SEQ ID NO: 4779363 - DNA, 25 bp, Homo sapien
attgcaatcctttccctgggattaa

SEQ ID NO: 4779364 - DNA, 25 bp, Homo sapien
tgattgcaatcctttccctgggatt

SEQ ID NO: 4779365 - DNA, 25 bp, Homo sapien
ttgcaatcctttccctgggattaaa

SEQ ID NO: 4779366 - DNA, 25 bp, Homo sapien
tgggtcttgatttgctataaacagc

SEQ ID NO: 4779367 - DNA, 25 bp, Homo sapien
ttttttactctatgcctactcaggc

SEQ ID NO: 4779368 - DNA, 25 bp, Homo sapien
gctgactgtgggtagctactgctga

SEQ ID NO: 4779369 - DNA, 25 bp, Homo sapien
cactaggtttggagttaggatactc

SEQ ID NO: 4779370 - DNA, 25 bp, Homo sapien
taagacaggagcttctaccaaaggt

SEQ ID NO: 4779371 - DNA, 25 bp, Homo sapien
gatcaaatttgagctcagacggtaa

SEQ ID NO: 4779372 - DNA, 25 bp, Homo sapien
tcttacaacgagaagggctgagcat

SEQ ID NO: 4779373 - DNA, 25 bp, Homo sapien
tctggtccccactgaattctgagct

SEQ ID NO: 4779374 - DNA, 25 bp, Homo sapien
acatctgtgaggcttctgacgcatg

SEQ ID NO: 4779375 - DNA, 25 bp, Homo sapien
taagctcaagacctttttcactcac

SEQ ID NO: 4779376 - DNA, 25 bp, Homo sapien
atggggagggctaagctcaagacct

SEQ ID NO: 4779377 - DNA, 25 bp, Homo sapien
atctgtgaggcttctgacgcatggg

SEQ ID NO: 4779378 - DNA, 25 bp, Homo sapien
actctctggtgcacgataaggtctg

SEQ ID NO: 4779379 - DNA, 25 bp, Homo sapien
cctaattaggttggcactccgagta

SEQ ID NO: 4779380 - DNA, 25 bp, Homo sapien
gcaacaaagtccattcctaggagga

SEQ ID NO: 4779381 - DNA, 25 bp, Homo sapien
tacaatgaaggctgaacggtgtcgg

SEQ ID NO: 4779382 - DNA, 25 bp, Homo sapien
gagctaagttttcacacaagttttg

SEQ ID NO: 4779383 - DNA, 25 bp, Homo sapien
acaagttttgcttgcattcaaggca

SEQ ID NO: 4779384 - DNA, 25 bp, Homo sapien
taagagctaagttttcacacaagtt

SEQ ID NO: 4779385 - DNA, 25 bp, Homo sapien
gttttcacacaagttttgcttgcat

SEQ ID NO: 4779386 - DNA, 25 bp, Homo sapien
ctggtatatatgaccatctatctga

SEQ ID NO: 4779387 - DNA, 25 bp, Homo sapien
ccatctatctgaataatctcatgca

SEQ ID NO: 4779388 - DNA, 25 bp, Homo sapien
ggtatatatgaccatctatctgaat

SEQ ID NO: 4779389 - DNA, 25 bp, Homo sapien
tgaccatctatctgaataatctcat

SEQ ID NO: 4779390 - DNA, 25 bp, Homo sapien
ttttgagttctctgattacatttct

SEQ ID NO: 4779391 - DNA, 25 bp, Homo sapien
ccttccgagggcatacattatatat

SEQ ID NO: 4779392 - DNA, 25 bp, Homo sapien
tttgagttctctgattacatttctc

SEQ ID NO: 4779393 - DNA, 25 bp, Homo sapien
tttacccttccgagggcatacatta

SEQ ID NO: 4779394 - DNA, 25 bp, Homo sapien
tcatgagcctctacaagtttccagc

SEQ ID NO: 4779395 - DNA, 25 bp, Homo sapien
tggtcttcttgacccatcgttgccc

SEQ ID NO: 4779396 - DNA, 25 bp, Homo sapien
tggtttcaaaaggtctctagttcag

SEQ ID NO: 4779397 - DNA, 25 bp, Homo sapien
tctcctagggagttttccgctggtc

SEQ ID NO: 4779398 - DNA, 25 bp, Homo sapien
tccggttactctccggacactcgaa

SEQ ID NO: 4779399 - DNA, 25 bp, Homo sapien
gggacagcacttccggttactctcc

SEQ ID NO: 4779400 - DNA, 25 bp, Homo sapien
tctccggacactcgaatctgggctt

SEQ ID NO: 4779401 - DNA, 25 bp, Homo sapien
atctgggcttcctggcggccgcaga

SEQ ID NO: 4779402 - DNA, 25 bp, Homo sapien
tttaacagagcgcttcaagggccca

SEQ ID NO: 4779403 - DNA, 25 bp, Homo sapien
ggccggcgccaagtctacactttat

SEQ ID NO: 4779404 - DNA, 25 bp, Homo sapien
cccttcgtgcgcctagactagagga

SEQ ID NO: 4779405 - DNA, 25 bp, Homo sapien
gcgatagtagatctaagggccaggc

SEQ ID NO: 4779406 - DNA, 25 bp, Homo sapien
ttatagcaaacaaaagtggagtgtt

SEQ ID NO: 4779407 - DNA, 25 bp, Homo sapien
ctatgtcaacgttaaaacaaacatt

SEQ ID NO: 4779408 - DNA, 25 bp, Homo sapien
attttgaaaagaaagttgactgatc

SEQ ID NO: 4779409 - DNA, 25 bp, Homo sapien
gaaaagaaagttgactgatctgtac

SEQ ID NO: 4779410 - DNA, 25 bp, Homo sapien
tttgaaaagaaagttgactgatctg

SEQ ID NO: 4779411 - DNA, 25 bp, Homo sapien
aagtccccttattatacacagcata

SEQ ID NO: 4779412 - DNA, 25 bp, Homo sapien
tattatacacagcataatagagagc

SEQ ID NO: 4779413 - DNA, 25 bp, Homo sapien
taatatttgcatggtgggaaagcag

SEQ ID NO: 4779414 - DNA, 25 bp, Homo sapien
tggattggcaccatgttccaggaaa

SEQ ID NO: 4779415 - DNA, 25 bp, Homo sapien
gtcacagatgtcaatcaggcatctt

SEQ ID NO: 4779416 - DNA, 25 bp, Homo sapien
agatgtcaatcaggcatcttctccc

SEQ ID NO: 4779417 - DNA, 25 bp, Homo sapien
atcttctccccagcaagagagtgac

SEQ ID NO: 4779418 - DNA, 25 bp, Homo sapien
gacgtcctgtttagtctgtcacaga

SEQ ID NO: 4779419 - DNA, 25 bp, Homo sapien
agttttcaggaaatgtagtgcagta

SEQ ID NO: 4779420 - DNA, 25 bp, Homo sapien
caggaaatgtagtgcagtatctcaa

SEQ ID NO: 4779421 - DNA, 25 bp, Homo sapien
ggaaatgtagtgcagtatctcaaaa

SEQ ID NO: 4779422 - DNA, 25 bp, Homo sapien
ttcaggaaatgtagtgcagtatctc

SEQ ID NO: 4779423 - DNA, 25 bp, Homo sapien
tacaggagtgcaccagcatgatcag

SEQ ID NO: 4779424 - DNA, 25 bp, Homo sapien
tcaaactcctagcatggtgggaact

SEQ ID NO: 4779425 - DNA, 25 bp, Homo sapien
actgtatacacagcaggtctagggc

SEQ ID NO: 4779426 - DNA, 25 bp, Homo sapien
tagggtatcacacaatccatgaggc

SEQ ID NO: 4779427 - DNA, 25 bp, Homo sapien
tgtttgcctatatgtaatgaatcta

SEQ ID NO: 4779428 - DNA, 25 bp, Homo sapien
ttcaaaagggcagttaaagcttatc

SEQ ID NO: 4779429 - DNA, 25 bp, Homo sapien
aagggtcctgggagatagtgcaaaa

SEQ ID NO: 4779430 - DNA, 25 bp, Homo sapien
gcaaaaagtctgctacataacatat

SEQ ID NO: 4779431 - DNA, 25 bp, Homo sapien
aagtcccggaacctgcgagtcaggc

SEQ ID NO: 4779432 - DNA, 25 bp, Homo sapien
gtactcttggtccatggagctcagg

SEQ ID NO: 4779433 - DNA, 25 bp, Homo sapien
tgtcctttctgtcgcgggcatccaa

SEQ ID NO: 4779434 - DNA, 25 bp, Homo sapien
gcagttcccagtccccgatgtggta

SEQ ID NO: 4779435 - DNA, 25 bp, Homo sapien
tggcccaggcgtctcccgaaactga

SEQ ID NO: 4779436 - DNA, 25 bp, Homo sapien
ctggcccaggcgtctcccgaaactg

SEQ ID NO: 4779437 - DNA, 25 bp, Homo sapien
cccaggcgtctcccgaaactgaaga

SEQ ID NO: 4779438 - DNA, 25 bp, Homo sapien
aggcgtctcccgaaactgaagagtt

SEQ ID NO: 4779439 - DNA, 25 bp, Homo sapien
cgctctcgagctcgcgtggacggca

SEQ ID NO: 4779440 - DNA, 25 bp, Homo sapien
cagttgggcgctccgacctctcaga

SEQ ID NO: 4779441 - DNA, 25 bp, Homo sapien
tcgcgtgccagcagttgggcgctcc

SEQ ID NO: 4779442 - DNA, 25 bp, Homo sapien
tgggctcgcgcaggacatcccggaa

SEQ ID NO: 4779443 - DNA, 25 bp, Homo sapien
tgcgggcgggctcgagagttgcctg

SEQ ID NO: 4779444 - DNA, 25 bp, Homo sapien
gtgcgggcgggctcgagagttgcct

SEQ ID NO: 4779445 - DNA, 25 bp, Homo sapien
ggagtgcgggcgggctcgagagttg

SEQ ID NO: 4779446 - DNA, 25 bp, Homo sapien
cgggcgggctcgagagttgcctgga

SEQ ID NO: 4779447 - DNA, 25 bp, Homo sapien
gagcggcgggttctcggttctgctc

SEQ ID NO: 4779448 - DNA, 25 bp, Homo sapien
gcggcgggttctcggttctgctcct

SEQ ID NO: 4779449 - DNA, 25 bp, Homo sapien
cgggttctcggttctgctcctgtgc

SEQ ID NO: 4779450 - DNA, 25 bp, Homo sapien
ggcgggttctcggttctgctcctgt

SEQ ID NO: 4779451 - DNA, 25 bp, Homo sapien
atatactgcgaaggctgaaggccac

SEQ ID NO: 4779452 - DNA, 25 bp, Homo sapien
gaacataatatactgcgaaggctga

SEQ ID NO: 4779453 - DNA, 25 bp, Homo sapien
gtacccgggaacataatatactgcg

SEQ ID NO: 4779454 - DNA, 25 bp, Homo sapien
tcaagtacccgggaacataatatac

SEQ ID NO: 4779455 - DNA, 25 bp, Homo sapien
acggcgcccggcctggagcttgtgt

SEQ ID NO: 4779456 - DNA, 25 bp, Homo sapien
ggcgcccggcctggagcttgtgtta

SEQ ID NO: 4779457 - DNA, 25 bp, Homo sapien
cggcgcccggcctggagcttgtgtt

SEQ ID NO: 4779458 - DNA, 25 bp, Homo sapien
ccacggcgcccggcctggagcttgt

SEQ ID NO: 4779459 - DNA, 25 bp, Homo sapien
tagtgggtcctgctgaagtcgttgt

SEQ ID NO: 4779460 - DNA, 25 bp, Homo sapien
ctctggcagaagcaacggtggcttc

SEQ ID NO: 4779461 - DNA, 25 bp, Homo sapien
gatgctctaatccactgcggcgtta

SEQ ID NO: 4779462 - DNA, 25 bp, Homo sapien
taagcgcgctagtagcagctctggc

SEQ ID NO: 4779463 - DNA, 25 bp, Homo sapien
ttactctttcacccaaactcgagtg

SEQ ID NO: 4779464 - DNA, 25 bp, Homo sapien
tactctttcacccaaactcgagtgc

SEQ ID NO: 4779465 - DNA, 25 bp, Homo sapien
accatcacactaagctaattcatta

SEQ ID NO: 4779466 - DNA, 25 bp, Homo sapien
cacactaagctaattcattaaacat

SEQ ID NO: 4779467 - DNA, 25 bp, Homo sapien
ttgtctgttagtgctctccttaaca

SEQ ID NO: 4779468 - DNA, 25 bp, Homo sapien
cctatgactgttaatatgaagaaac

SEQ ID NO: 4779469 - DNA, 25 bp, Homo sapien
cattgctcttttcctatgactgtta

SEQ ID NO: 4779470 - DNA, 25 bp, Homo sapien
cttttgtctgttagtgctctcctta

SEQ ID NO: 4779471 - DNA, 25 bp, Homo sapien
gtcagagcatgacctttctatggct

SEQ ID NO: 4779472 - DNA, 25 bp, Homo sapien
tccttagggtgcctcgtggaagcca

SEQ ID NO: 4779473 - DNA, 25 bp, Homo sapien
tgatgctgtgagaggtgcacttgcc

SEQ ID NO: 4779474 - DNA, 25 bp, Homo sapien
gtcagagcatgacctttctacggct

SEQ ID NO: 4779475 - DNA, 25 bp, Homo sapien
cttgcccaagctgacgatacagaag

SEQ ID NO: 4779476 - DNA, 25 bp, Homo sapien
atgggccctgaggaagtcctacttt

SEQ ID NO: 4779477 - DNA, 25 bp, Homo sapien
ccaagctgacgatacagaagtgaac

SEQ ID NO: 4779478 - DNA, 25 bp, Homo sapien
ctgaggaagtcctacttttctccca

SEQ ID NO: 4779479 - DNA, 25 bp, Homo sapien
tgctgcgtacgtaggggtcacagtt

SEQ ID NO: 4779480 - DNA, 25 bp, Homo sapien
tgccctgctgcgtacgtaggggtca

SEQ ID NO: 4779481 - DNA, 25 bp, Homo sapien
ttgagcgtgcctcgtgtctgtccag

SEQ ID NO: 4779482 - DNA, 25 bp, Homo sapien
cacagttgagcgtgcctcgtgtctg

SEQ ID NO: 4779483 - DNA, 25 bp, Homo sapien
ggttctgactggcaggactgcttat

SEQ ID NO: 4779484 - DNA, 25 bp, Homo sapien
ttgaggccgttgctggctgactcag

SEQ ID NO: 4779485 - DNA, 25 bp, Homo sapien
cctgagcttgactgtggccttttct

SEQ ID NO: 4779486 - DNA, 25 bp, Homo sapien
tccttggcattgaggccgttgctgg

SEQ ID NO: 4779487 - DNA, 25 bp, Homo sapien
agctgcagctccctaattactgtgc

SEQ ID NO: 4779488 - DNA, 25 bp, Homo sapien
ttccccagcctgatctctcatcctc

SEQ ID NO: 4779489 - DNA, 25 bp, Homo sapien
aagtcctcaggtggaaattatctgc

SEQ ID NO: 4779490 - DNA, 25 bp, Homo sapien
tggtctggaaccaggttccaaagtc

SEQ ID NO: 4779491 - DNA, 25 bp, Homo sapien
tcctgccaccatggacagcgcccga

SEQ ID NO: 4779492 - DNA, 25 bp, Homo sapien
cagcgcagctacaatctcctgcagc

SEQ ID NO: 4779493 - DNA, 25 bp, Homo sapien
cagcgcccgagggagcgtctgactc

SEQ ID NO: 4779494 - DNA, 25 bp, Homo sapien
ccgagggagcgtctgactccagcgc

SEQ ID NO: 4779495 - DNA, 25 bp, Homo sapien
ggcggctccgtggagcctccgttcc

SEQ ID NO: 4779496 - DNA, 25 bp, Homo sapien
gcggctccgtggagcctccgttccc

SEQ ID NO: 4779497 - DNA, 25 bp, Homo sapien
tggcggctccgtggagcctccgttc

SEQ ID NO: 4779498 - DNA, 25 bp, Homo sapien
gctttggcaatcacaaaggttgtga

SEQ ID NO: 4779499 - DNA, 25 bp, Homo sapien
tcctacagccggctttggcaatcac

SEQ ID NO: 4779500 - DNA, 25 bp, Homo sapien
ctctctgcgtctagcaaactcgctg

SEQ ID NO: 4779501 - DNA, 25 bp, Homo sapien
gtctagcaaactcgctgtagccact

SEQ ID NO: 4779502 - DNA, 25 bp, Homo sapien
ccctcctctcttgatgtgaggccta

SEQ ID NO: 4779503 - DNA, 25 bp, Homo sapien
ggccccctcctctcttgatgtgagg

SEQ ID NO: 4779504 - DNA, 25 bp, Homo sapien
ctcctctcttgatgtgaggcctacg

SEQ ID NO: 4779505 - DNA, 25 bp, Homo sapien
ccccctcctctcttgatgtgaggcc

SEQ ID NO: 4779506 - DNA, 25 bp, Homo sapien
agctgctgcctcttctgggctctct

SEQ ID NO: 4779507 - DNA, 25 bp, Homo sapien
gctctctggggctccatctccaggg

SEQ ID NO: 4779508 - DNA, 25 bp, Homo sapien
gctgctgcctcttctgggctctctg

SEQ ID NO: 4779509 - DNA, 25 bp, Homo sapien
tccagggtggccaccctgaaggtcc

SEQ ID NO: 4779510 - DNA, 25 bp, Homo sapien
ttctctccatgtgaattgaggtact

SEQ ID NO: 4779511 - DNA, 25 bp, Homo sapien
cttctctccatgtgaattgaggtac

SEQ ID NO: 4779512 - DNA, 25 bp, Homo sapien
acttctctccatgtgaattgaggta

SEQ ID NO: 4779513 - DNA, 25 bp, Homo sapien
agaagttcttgaggactcagcactc

SEQ ID NO: 4779514 - DNA, 25 bp, Homo sapien
catggtggaagacgagaagcaagtc

SEQ ID NO: 4779515 - DNA, 25 bp, Homo sapien
tccacatggttggtggctggggaag

SEQ ID NO: 4779516 - DNA, 25 bp, Homo sapien
tacagttccacatggttggtggctg

SEQ ID NO: 4779517 - DNA, 25 bp, Homo sapien
tggtggaagacgagaagcaagtcac

SEQ ID NO: 4779518 - DNA, 25 bp, Homo sapien
cacagacgggagctccctgggcctc

SEQ ID NO: 4779519 - DNA, 25 bp, Homo sapien
gggacacagacgggagctccctggg

SEQ ID NO: 4779520 - DNA, 25 bp, Homo sapien
gacacagacgggagctccctgggcc

SEQ ID NO: 4779521 - DNA, 25 bp, Homo sapien
acacagacgggagctccctgggcct

SEQ ID NO: 4779522 - DNA, 25 bp, Homo sapien
gacccaatattggtaggcacaggag

SEQ ID NO: 4779523 - DNA, 25 bp, Homo sapien
taagaatctagtccaggccatatgg

SEQ ID NO: 4779524 - DNA, 25 bp, Homo sapien
gattgggcccgcatcattcgactga

SEQ ID NO: 4779525 - DNA, 25 bp, Homo sapien
gcatagaacctacatgggctgggtc

SEQ ID NO: 4779526 - DNA, 25 bp, Homo sapien
ttgatcctgaggtccatcatctctg

SEQ ID NO: 4779527 - DNA, 25 bp, Homo sapien
catcatctctgtcagaatatggcag

SEQ ID NO: 4779528 - DNA, 25 bp, Homo sapien
tctctgtcagaatatggcaggatgc

SEQ ID NO: 4779529 - DNA, 25 bp, Homo sapien
cagaatatggcaggatgcatgtgta

SEQ ID NO: 4779530 - DNA, 25 bp, Homo sapien
tcaacatactgtggacgcagcctgc

SEQ ID NO: 4779531 - DNA, 25 bp, Homo sapien
gatatctgagttagcgtagggcccc

SEQ ID NO: 4779532 - DNA, 25 bp, Homo sapien
cagggatcagccatgtggaaactca

SEQ ID NO: 4779533 - DNA, 25 bp, Homo sapien
tagtccctgcaagaaccctgtgaga

SEQ ID NO: 4779534 - DNA, 25 bp, Homo sapien
tggtggcagagtccccactgtgctg

SEQ ID NO: 4779535 - DNA, 25 bp, Homo sapien
gagaggtgcagcaaaattcctgaga

SEQ ID NO: 4779536 - DNA, 25 bp, Homo sapien
tgctgtcgaagggacaggctcccac

SEQ ID NO: 4779537 - DNA, 25 bp, Homo sapien
tctcagaggagcaaattgaggctaa

SEQ ID NO: 4779538 - DNA, 25 bp, Homo sapien
tgtagggtatgtgtctgctctggaa

SEQ ID NO: 4779539 - DNA, 25 bp, Homo sapien
ctctggaagcctggtccagggatgc

SEQ ID NO: 4779540 - DNA, 25 bp, Homo sapien
gatgccaccatatgctcctgagtgc

SEQ ID NO: 4779541 - DNA, 25 bp, Homo sapien
cccaggaaggtggtgctgtagggta

SEQ ID NO: 4779542 - DNA, 25 bp, Homo sapien
tgtgcagatctcgcccaggtgcagg

SEQ ID NO: 4779543 - DNA, 25 bp, Homo sapien
gatctcgcccaggtgcagggttaac

SEQ ID NO: 4779544 - DNA, 25 bp, Homo sapien
cagatctcgcccaggtgcagggtta

SEQ ID NO: 4779545 - DNA, 25 bp, Homo sapien
tgcagatctcgcccaggtgcagggt

SEQ ID NO: 4779546 - DNA, 25 bp, Homo sapien
gaagccttccgccatgggatgatgc

SEQ ID NO: 4779547 - DNA, 25 bp, Homo sapien
gcttagggatgtcaaatggctgctc

SEQ ID NO: 4779548 - DNA, 25 bp, Homo sapien
gctgtcacggcaacaagaacacgag

SEQ ID NO: 4779549 - DNA, 25 bp, Homo sapien
gaacctgagctatgaggatcccaga

SEQ ID NO: 4779550 - DNA, 25 bp, Homo sapien
agggcaggggagctgattcttacat

SEQ ID NO: 4779551 - DNA, 25 bp, Homo sapien
tttctaaggcttggagcaggtctgg

SEQ ID NO: 4779552 - DNA, 25 bp, Homo sapien
tctaaggcttggagcaggtctggaa

SEQ ID NO: 4779553 - DNA, 25 bp, Homo sapien
tgatttctaaggcttggagcaggtc

SEQ ID NO: 4779554 - DNA, 25 bp, Homo sapien
aatgatgctcggcagccagatcatc

SEQ ID NO: 4779555 - DNA, 25 bp, Homo sapien
catcagacatcagggccctgcctgg

SEQ ID NO: 4779556 - DNA, 25 bp, Homo sapien
gatggaggagttgaacccatcaacc

SEQ ID NO: 4779557 - DNA, 25 bp, Homo sapien
gctctgcacaaatgatgctcggcag

SEQ ID NO: 4779558 - DNA, 25 bp, Homo sapien
caacacccaacaacctgctccagcc

SEQ ID NO: 4779559 - DNA, 25 bp, Homo sapien
tccaacacccaacaacctgctccag

SEQ ID NO: 4779560 - DNA, 25 bp, Homo sapien
ggttccaacacccaacaacctgctc

SEQ ID NO: 4779561 - DNA, 25 bp, Homo sapien
cagggttccaacacccaacaacctg

SEQ ID NO: 4779562 - DNA, 25 bp, Homo sapien
tgggtacttcctgccaaatggccag

SEQ ID NO: 4779563 - DNA, 25 bp, Homo sapien
gccagaggtgccaaaagtgagtgct

SEQ ID NO: 4779564 - DNA, 25 bp, Homo sapien
gcctcagaaagtcgggatacagcag

SEQ ID NO: 4779565 - DNA, 25 bp, Homo sapien
gagaacatcttattccctctagtgg

SEQ ID NO: 4779566 - DNA, 25 bp, Homo sapien
ctccacttcctttggcgtcaagcat

SEQ ID NO: 4779567 - DNA, 25 bp, Homo sapien
gaggaacctcggaagcctcccttga

SEQ ID NO: 4779568 - DNA, 25 bp, Homo sapien
gcagtgtgaggaacctcggaagcct

SEQ ID NO: 4779569 - DNA, 25 bp, Homo sapien
aaaggagcaggtccgcaggctccaa

SEQ ID NO: 4779570 - DNA, 25 bp, Homo sapien
caaacagtctatagcaaaaactgat

SEQ ID NO: 4779571 - DNA, 25 bp, Homo sapien
cttgttttgtaagggcactgatgcc

SEQ ID NO: 4779572 - DNA, 25 bp, Homo sapien
gaagctgggatgtcctagctcaaag

SEQ ID NO: 4779573 - DNA, 25 bp, Homo sapien
aaactgcacgtggtaaaatttatca

SEQ ID NO: 4779574 - DNA, 25 bp, Homo sapien
caggtctactggcagtgaatgttct

SEQ ID NO: 4779575 - DNA, 25 bp, Homo sapien
ttcatatggcttcaatttgctgtcc

SEQ ID NO: 4779576 - DNA, 25 bp, Homo sapien
gcttcaatttgctgtccagtgtcct

SEQ ID NO: 4779577 - DNA, 25 bp, Homo sapien
tcttgtgagagcaggtctactggca

SEQ ID NO: 4779578 - DNA, 25 bp, Homo sapien
taccatgttgcactaactggatatc

SEQ ID NO: 4779579 - DNA, 25 bp, Homo sapien
cttaatgccattgactaataattcc

SEQ ID NO: 4779580 - DNA, 25 bp, Homo sapien
tatttaaggcagttgacttaatgcc

SEQ ID NO: 4779581 - DNA, 25 bp, Homo sapien
tatggttttccttatctcattaaac

SEQ ID NO: 4779582 - DNA, 25 bp, Homo sapien
tattgctgatcgtgtgctaggcact

SEQ ID NO: 4779583 - DNA, 25 bp, Homo sapien
tatccaatggtgcagagaagtgttc

SEQ ID NO: 4779584 - DNA, 25 bp, Homo sapien
cagagtgtgtgtctagggcaataaa

SEQ ID NO: 4779585 - DNA, 25 bp, Homo sapien
gctctgggaataggttaaggaacca

SEQ ID NO: 4779586 - DNA, 25 bp, Homo sapien
tgccctaaagagatatccagatact

SEQ ID NO: 4779587 - DNA, 25 bp, Homo sapien
taagataaggagcttgggttagcct

SEQ ID NO: 4779588 - DNA, 25 bp, Homo sapien
ggactttaagttcccgctgttgcta

SEQ ID NO: 4779589 - DNA, 25 bp, Homo sapien
tagcctagacgatgcctaaaatgtg

SEQ ID NO: 4779590 - DNA, 25 bp, Homo sapien
ctcttcatgtgtaactgatggagcc

SEQ ID NO: 4779591 - DNA, 25 bp, Homo sapien
gagagtaaactactgatgtcaacaa

SEQ ID NO: 4779592 - DNA, 25 bp, Homo sapien
gagccagtgcctaagtgaatcataa

SEQ ID NO: 4779593 - DNA, 25 bp, Homo sapien
ccatgtgcatgtagggagagtaaac

SEQ ID NO: 4779594 - DNA, 25 bp, Homo sapien
tatcctgggactcactaaggccgtc

SEQ ID NO: 4779595 - DNA, 25 bp, Homo sapien
taaggccgtcggatatcctaagccg

SEQ ID NO: 4779596 - DNA, 25 bp, Homo sapien
caaccctaggaagtgcacttttggg

SEQ ID NO: 4779597 - DNA, 25 bp, Homo sapien
cggagacgctgcagaaatcggagac

SEQ ID NO: 4779598 - DNA, 25 bp, Homo sapien
tcgccctatgccctcagactctcgg

SEQ ID NO: 4779599 - DNA, 25 bp, Homo sapien
cgctactattacagaccctgtctcc

SEQ ID NO: 4779600 - DNA, 25 bp, Homo sapien
agactctcggagacgacctggccca

SEQ ID NO: 4779601 - DNA, 25 bp, Homo sapien
tctcggagacgacctggcccaagct

SEQ ID NO: 4779602 - DNA, 25 bp, Homo sapien
gctctgggagcacccgatcaatgcc

SEQ ID NO: 4779603 - DNA, 25 bp, Homo sapien
tgggagcacccgatcaatgccccct

SEQ ID NO: 4779604 - DNA, 25 bp, Homo sapien
ggagctctgggagcacccgatcaat

SEQ ID NO: 4779605 - DNA, 25 bp, Homo sapien
gggagcacccgatcaatgccccctc

SEQ ID NO: 4779606 - DNA, 25 bp, Homo sapien
aaatgatttgtgaaagggttggaca

SEQ ID NO: 4779607 - DNA, 25 bp, Homo sapien
aatgatttgtgaaagggttggacat

SEQ ID NO: 4779608 - DNA, 25 bp, Homo sapien
accccagggccgtttctagcgatga

SEQ ID NO: 4779609 - DNA, 25 bp, Homo sapien
agttgtgaccactgcgttgttgctc

SEQ ID NO: 4779610 - DNA, 25 bp, Homo sapien
tcatagactcatcgctgctgcccat

SEQ ID NO: 4779611 - DNA, 25 bp, Homo sapien
actgcgttgttgctctccatgccca

SEQ ID NO: 4779612 - DNA, 25 bp, Homo sapien
ctgggtctacagtcaccggagagcc

SEQ ID NO: 4779613 - DNA, 25 bp, Homo sapien
tacagcagctaaggtctcaccatgg

SEQ ID NO: 4779614 - DNA, 25 bp, Homo sapien
cactcatccggtgcttgcaggctgc

SEQ ID NO: 4779615 - DNA, 25 bp, Homo sapien
gggatgagcaccttgaactgttgat

SEQ ID NO: 4779616 - DNA, 25 bp, Homo sapien
tgcacagtggccctagtgtcctcga

SEQ ID NO: 4779617 - DNA, 25 bp, Homo sapien
ctaaagtcaggacttgtaaccaggc

SEQ ID NO: 4779618 - DNA, 25 bp, Homo sapien
gacttctatggcaatgctccttctg

SEQ ID NO: 4779619 - DNA, 25 bp, Homo sapien
aaggtcatatggcaggtcctcaact

SEQ ID NO: 4779620 - DNA, 25 bp, Homo sapien
gatcttgcccggctcaatctgggaa

SEQ ID NO: 4779621 - DNA, 25 bp, Homo sapien
gtgccgggagcctgtgtggtgaggt

SEQ ID NO: 4779622 - DNA, 25 bp, Homo sapien
cagtctcctccgctaggcaggggca

SEQ ID NO: 4779623 - DNA, 25 bp, Homo sapien
tgcagatgtcagatgtgatcttgcc

SEQ ID NO: 4779624 - DNA, 25 bp, Homo sapien
tccgtaggaagcctgaggaataccc

SEQ ID NO: 4779625 - DNA, 25 bp, Homo sapien
gaagggcatgccgacttttacatcc

SEQ ID NO: 4779626 - DNA, 25 bp, Homo sapien
tcatctgatgggtaatgctctgaca

SEQ ID NO: 4779627 - DNA, 25 bp, Homo sapien
taaatatccatctacaccagggcgt

SEQ ID NO: 4779628 - DNA, 25 bp, Homo sapien
atgagctctggtgaactcagaatac

SEQ ID NO: 4779629 - DNA, 25 bp, Homo sapien
cagtctgaacccagatgagctctgg

SEQ ID NO: 4779630 - DNA, 25 bp, Homo sapien
gccagctttctgagcccagtctgaa

SEQ ID NO: 4779631 - DNA, 25 bp, Homo sapien
tggaatttcaccagtgtccctctgc

SEQ ID NO: 4779632 - DNA, 25 bp, Homo sapien
agggcacaagtctcgccgggagtat

SEQ ID NO: 4779633 - DNA, 25 bp, Homo sapien
aaatctgagcctaggagacttcaca

SEQ ID NO: 4779634 - DNA, 25 bp, Homo sapien
gagtagaaatatgcttcctgccctg

SEQ ID NO: 4779635 - DNA, 25 bp, Homo sapien
ggcttcgggcatccaacgcaatgat

SEQ ID NO: 4779636 - DNA, 25 bp, Homo sapien
ccagggaactgtgggcagctgctcc

SEQ ID NO: 4779637 - DNA, 25 bp, Homo sapien
ttaccccagggaactgtgggcagct

SEQ ID NO: 4779638 - DNA, 25 bp, Homo sapien
taccccagggaactgtgggcagctg

SEQ ID NO: 4779639 - DNA, 25 bp, Homo sapien
ccccagggaactgtgggcagctgct

SEQ ID NO: 4779640 - DNA, 25 bp, Homo sapien
gacaggcggtatgcccaggatgcat

SEQ ID NO: 4779641 - DNA, 25 bp, Homo sapien
tatgaggacagcgactggctctgca

SEQ ID NO: 4779642 - DNA, 25 bp, Homo sapien
tgcatcctgaccagtgcgtcttcgg

SEQ ID NO: 4779643 - DNA, 25 bp, Homo sapien
cattgagtccccaaggctatgagga

SEQ ID NO: 4779644 - DNA, 25 bp, Homo sapien
caccaagccatagggtcctttctgt

SEQ ID NO: 4779645 - DNA, 25 bp, Homo sapien
cctttctgttccctcaaccatgggc

SEQ ID NO: 4779646 - DNA, 25 bp, Homo sapien
ttccctcaaccatgggccagggact

SEQ ID NO: 4779647 - DNA, 25 bp, Homo sapien
cccaccaagccatagggtcctttct

SEQ ID NO: 4779648 - DNA, 25 bp, Homo sapien
taatggcccagcttagagacttcag

SEQ ID NO: 4779649 - DNA, 25 bp, Homo sapien
tgggatccagcaaaagtgttaagcc

SEQ ID NO: 4779650 - DNA, 25 bp, Homo sapien
catcatgtgcgtctcttgggatcca

SEQ ID NO: 4779651 - DNA, 25 bp, Homo sapien
gaaggcctgcgcactgaactgtaag

SEQ ID NO: 4779652 - DNA, 25 bp, Homo sapien
cgctgtgaagtgtagacggctgcca

SEQ ID NO: 4779653 - DNA, 25 bp, Homo sapien
catgtgtttgccaccagggtagaag

SEQ ID NO: 4779654 - DNA, 25 bp, Homo sapien
taagtggtagacaacgtgactcctc

SEQ ID NO: 4779655 - DNA, 25 bp, Homo sapien
cacatacgtgggttctgtagggccc

SEQ ID NO: 4779656 - DNA, 25 bp, Homo sapien
ggctcacaggctgtcgcacatgctg

SEQ ID NO: 4779657 - DNA, 25 bp, Homo sapien
ttccctaggtatgcgtggccgtcgg

SEQ ID NO: 4779658 - DNA, 25 bp, Homo sapien
ctgtcgcacatgctgcaagagttcc

SEQ ID NO: 4779659 - DNA, 25 bp, Homo sapien
gagttccctaggtatgcgtggccgt

SEQ ID NO: 4779660 - DNA, 25 bp, Homo sapien
aactttcctgctccccttgtcttga

SEQ ID NO: 4779661 - DNA, 25 bp, Homo sapien
cgcattcctctttaaagctgtcttg

SEQ ID NO: 4779662 - DNA, 25 bp, Homo sapien
tttaaagctgtcttgcatagggcct

SEQ ID NO: 4779663 - DNA, 25 bp, Homo sapien
aggtcaaaacgagctggcggcactg

SEQ ID NO: 4779664 - DNA, 25 bp, Homo sapien
cagcgggctccacagtatgaacact

SEQ ID NO: 4779665 - DNA, 25 bp, Homo sapien
ccagcgggctccacagtatgaacac

SEQ ID NO: 4779666 - DNA, 25 bp, Homo sapien
tggtgaagactatagatcctggcct

SEQ ID NO: 4779667 - DNA, 25 bp, Homo sapien
tgggtccacagagagctatgagttc

SEQ ID NO: 4779668 - DNA, 25 bp, Homo sapien
tatatcaactcttagtggtgggcct

SEQ ID NO: 4779669 - DNA, 25 bp, Homo sapien
gaatctcgtagatcctgtggaaccc

SEQ ID NO: 4779670 - DNA, 25 bp, Homo sapien
tttgggctctgagcctgtgctgacc

SEQ ID NO: 4779671 - DNA, 25 bp, Homo sapien
agtttgggctctgagcctgtgctga

SEQ ID NO: 4779672 - DNA, 25 bp, Homo sapien
gggctctgagcctgtgctgacctac

SEQ ID NO: 4779673 - DNA, 25 bp, Homo sapien
tcagtttgggctctgagcctgtgct

SEQ ID NO: 4779674 - DNA, 25 bp, Homo sapien
ggacagagcatagcgttcatcaaaa

SEQ ID NO: 4779675 - DNA, 25 bp, Homo sapien
taggacagagcatagcgttcatcaa

SEQ ID NO: 4779676 - DNA, 25 bp, Homo sapien
ttgtaggacagagcatagcgttcat

SEQ ID NO: 4779677 - DNA, 25 bp, Homo sapien
cagagcatagcgttcatcaaaaaca

SEQ ID NO: 4779678 - DNA, 25 bp, Homo sapien
aggagtgctgacgtagaggactcat

SEQ ID NO: 4779679 - DNA, 25 bp, Homo sapien
gggtcaaggcaccaactggccagat

SEQ ID NO: 4779680 - DNA, 25 bp, Homo sapien
tcatggccgctgctatcagtcaggg

SEQ ID NO: 4779681 - DNA, 25 bp, Homo sapien
cccactgcgggacactgaggaattg

SEQ ID NO: 4779682 - DNA, 25 bp, Homo sapien
ctggagccatacgaggggtgaaggc

SEQ ID NO: 4779683 - DNA, 25 bp, Homo sapien
aggggtgaaggcatgctttggctgc

SEQ ID NO: 4779684 - DNA, 25 bp, Homo sapien
gaactccatgctggagccatacgag

SEQ ID NO: 4779685 - DNA, 25 bp, Homo sapien
actccatgctggagccatacgaggg

SEQ ID NO: 4779686 - DNA, 25 bp, Homo sapien
gagtactgggggcagcggacagctc

SEQ ID NO: 4779687 - DNA, 25 bp, Homo sapien
ggagtactgggggcagcggacagct

SEQ ID NO: 4779688 - DNA, 25 bp, Homo sapien
tgtcaacgtagctagggaagtaact

SEQ ID NO: 4779689 - DNA, 25 bp, Homo sapien
tgaaaagttctagatttttgtcaac

SEQ ID NO: 4779690 - DNA, 25 bp, Homo sapien
tttgaggtaggctgaaccccgctca

SEQ ID NO: 4779691 - DNA, 25 bp, Homo sapien
ccggtacagtacatcagcactctct

SEQ ID NO: 4779692 - DNA, 25 bp, Homo sapien
taggacttgggttttctctgaagct

SEQ ID NO: 4779693 - DNA, 25 bp, Homo sapien
gcacacacaaggtccccttgggaaa

SEQ ID NO: 4779694 - DNA, 25 bp, Homo sapien
agatttctgagttttaggacttggg

SEQ ID NO: 4779695 - DNA, 25 bp, Homo sapien
tactgggaggagatccatgtggcca

SEQ ID NO: 4779696 - DNA, 25 bp, Homo sapien
gaaggatagtatcactttgttcttg

SEQ ID NO: 4779697 - DNA, 25 bp, Homo sapien
tcttgatttgcctgagataaaaact

SEQ ID NO: 4779698 - DNA, 25 bp, Homo sapien
agaaggatagtatcactttgttctt

SEQ ID NO: 4779699 - DNA, 25 bp, Homo sapien
ttgatttgcctgagataaaaacttt

SEQ ID NO: 4779700 - DNA, 25 bp, Homo sapien
caaaacccaatcatgactcacccag

SEQ ID NO: 4779701 - DNA, 25 bp, Homo sapien
aatcatgactcacccagcctgactt

SEQ ID NO: 4779702 - DNA, 25 bp, Homo sapien
aaaaccaaaacccaatcatgactca

SEQ ID NO: 4779703 - DNA, 25 bp, Homo sapien
aacccaatcatgactcacccagcct

SEQ ID NO: 4779704 - DNA, 25 bp, Homo sapien
acaactgtctgaaaagaacactact

SEQ ID NO: 4779705 - DNA, 25 bp, Homo sapien
ttccagtaattccaggtatcctcaa

SEQ ID NO: 4779706 - DNA, 25 bp, Homo sapien
tgatcatgatgaaataacttagtaa

SEQ ID NO: 4779707 - DNA, 25 bp, Homo sapien
tgtctgaaaagaacactacttgatg

SEQ ID NO: 4779708 - DNA, 25 bp, Homo sapien
tacttggcctaaccctagtgataaa

SEQ ID NO: 4779709 - DNA, 25 bp, Homo sapien
tattgtcactgtacatggaggagct

SEQ ID NO: 4779710 - DNA, 25 bp, Homo sapien
caactgggatctaaattgccatgtg

SEQ ID NO: 4779711 - DNA, 25 bp, Homo sapien
tgctggtccattgtatggtcactgg

SEQ ID NO: 4779712 - DNA, 25 bp, Homo sapien
aggttgtagtgagcattccagcctg

SEQ ID NO: 4779713 - DNA, 25 bp, Homo sapien
ggttgtagtgagcattccagcctgg

SEQ ID NO: 4779714 - DNA, 25 bp, Homo sapien
gcatgataggtacatagaacttcac

SEQ ID NO: 4779715 - DNA, 25 bp, Homo sapien
tcagttaactgctaaagctgcatga

SEQ ID NO: 4779716 - DNA, 25 bp, Homo sapien
tgctctattctgctaatgaactgtt

SEQ ID NO: 4779717 - DNA, 25 bp, Homo sapien
tacaaatgaaatggcctgacattgg

SEQ ID NO: 4779718 - DNA, 25 bp, Homo sapien
gcacaatcttctaaaagcaagcata

SEQ ID NO: 4779719 - DNA, 25 bp, Homo sapien
aattaaagcacaatcttctaaaagc

SEQ ID NO: 4779720 - DNA, 25 bp, Homo sapien
cagtgcctagctttcttatttgtct

SEQ ID NO: 4779721 - DNA, 25 bp, Homo sapien
ctgctgatcacagtgcctagctttc

SEQ ID NO: 4779722 - DNA, 25 bp, Homo sapien
gatccccatgggcacgatttcttca

SEQ ID NO: 4779723 - DNA, 25 bp, Homo sapien
caccaacacgcaattctggaaaaca

SEQ ID NO: 4779724 - DNA, 25 bp, Homo sapien
tcaaatacaccaacacgcaattctg

SEQ ID NO: 4779725 - DNA, 25 bp, Homo sapien
ggagatctttttggggctgatcccc

SEQ ID NO: 4779726 - DNA, 25 bp, Homo sapien
gaggtctagagcactagctggtcca

SEQ ID NO: 4779727 - DNA, 25 bp, Homo sapien
gggacgagcatactccttctattgt

SEQ ID NO: 4779728 - DNA, 25 bp, Homo sapien
tctcaagtgagctaatatgtccaag

SEQ ID NO: 4779729 - DNA, 25 bp, Homo sapien
tttggagtcccagattgcatgagct

SEQ ID NO: 4779730 - DNA, 25 bp, Homo sapien
cataaagtctggtagccaatttgct

SEQ ID NO: 4779731 - DNA, 25 bp, Homo sapien
aagtctggtagccaatttgcttcca

SEQ ID NO: 4779732 - DNA, 25 bp, Homo sapien
tggtagccaatttgcttccaccaac

SEQ ID NO: 4779733 - DNA, 25 bp, Homo sapien
ccacataaagtctggtagccaattt

SEQ ID NO: 4779734 - DNA, 25 bp, Homo sapien
gctgacacagagctgtctgccaggc

SEQ ID NO: 4779735 - DNA, 25 bp, Homo sapien
cagtaataaaggagcacctcccctt

SEQ ID NO: 4779736 - DNA, 25 bp, Homo sapien
gtagcagtaataaaggagcacctcc

SEQ ID NO: 4779737 - DNA, 25 bp, Homo sapien
tagcagtaataaaggagcacctccc

SEQ ID NO: 4779738 - DNA, 25 bp, Homo sapien
gcagtaataaaggagcacctcccct

SEQ ID NO: 4779739 - DNA, 25 bp, Homo sapien
acaggaggctattagtatagttttg

SEQ ID NO: 4779740 - DNA, 25 bp, Homo sapien
tggattcctgaccccgtgtttttca

SEQ ID NO: 4779741 - DNA, 25 bp, Homo sapien
tttcaactgcccctaatccttggat

SEQ ID NO: 4779742 - DNA, 25 bp, Homo sapien
catagaaagatgtgttcattgactg

SEQ ID NO: 4779743 - DNA, 25 bp, Homo sapien
cttgcaccgtgtgccgaaaagatgc

SEQ ID NO: 4779744 - DNA, 25 bp, Homo sapien
tatacccgcaaagccacaaaggcgg

SEQ ID NO: 4779745 - DNA, 25 bp, Homo sapien
tgcatagaagtcaagaatcagggtt

SEQ ID NO: 4779746 - DNA, 25 bp, Homo sapien
cagtcaggagggaggctatacccgc

SEQ ID NO: 4779747 - DNA, 25 bp, Homo sapien
caagcagacacgtcatggctatgtg

SEQ ID NO: 4779748 - DNA, 25 bp, Homo sapien
tatcagctcatcagggttaaagcag

SEQ ID NO: 4779749 - DNA, 25 bp, Homo sapien
aaagcagcttatatcagggagccaa

SEQ ID NO: 4779750 - DNA, 25 bp, Homo sapien
tctttgaggtgctcaatgtcacagc

SEQ ID NO: 4779751 - DNA, 25 bp, Homo sapien
agcatttccacaatttttctttaca

SEQ ID NO: 4779752 - DNA, 25 bp, Homo sapien
cagcatttccacaatttttctttac

SEQ ID NO: 4779753 - DNA, 25 bp, Homo sapien
acagcatttccacaatttttcttta

SEQ ID NO: 4779754 - DNA, 25 bp, Homo sapien
tccacaatttttctttacattcaaa

SEQ ID NO: 4779755 - DNA, 25 bp, Homo sapien
ggttaaataactctcagcatcataa

SEQ ID NO: 4779756 - DNA, 25 bp, Homo sapien
tacataatacagtttggcctaaaat

SEQ ID NO: 4779757 - DNA, 25 bp, Homo sapien
gatataagactaagtcacactggaa

SEQ ID NO: 4779758 - DNA, 25 bp, Homo sapien
aaaactaggctttatattgaggagg

SEQ ID NO: 4779759 - DNA, 25 bp, Homo sapien
aagcatgtgggtgccattttatcca

SEQ ID NO: 4779760 - DNA, 25 bp, Homo sapien
taagcagccagttttaagttatatg

SEQ ID NO: 4779761 - DNA, 25 bp, Homo sapien
aagtacattgaaaaagaccaggaag

SEQ ID NO: 4779762 - DNA, 25 bp, Homo sapien
gcttatgcaatgtaatcttaaccac

SEQ ID NO: 4779763 - DNA, 25 bp, Homo sapien
tggctattccaggaccacaccttgc

SEQ ID NO: 4779764 - DNA, 25 bp, Homo sapien
gcctgggatggaattaacatcactg

SEQ ID NO: 4779765 - DNA, 25 bp, Homo sapien
cactggttaatgttcctgactagac

SEQ ID NO: 4779766 - DNA, 25 bp, Homo sapien
tgaaatctaatccatctgtctagga

SEQ ID NO: 4779767 - DNA, 25 bp, Homo sapien
ccttgataaccgacttccaaatgta

SEQ ID NO: 4779768 - DNA, 25 bp, Homo sapien
tccaaatgtatctgcgttaaccaca

SEQ ID NO: 4779769 - DNA, 25 bp, Homo sapien
cttgagctggagagcaaccttgata

SEQ ID NO: 4779770 - DNA, 25 bp, Homo sapien
catgatcatgaaacattcataagaa

SEQ ID NO: 4779771 - DNA, 25 bp, Homo sapien
ctgccatctaattctgctttaagac

SEQ ID NO: 4779772 - DNA, 25 bp, Homo sapien
ttgtactgccatctaattctgcttt

SEQ ID NO: 4779773 - DNA, 25 bp, Homo sapien
tgtactgccatctaattctgcttta

SEQ ID NO: 4779774 - DNA, 25 bp, Homo sapien
tcttttaaatccaggtcagaaaatc

SEQ ID NO: 4779775 - DNA, 25 bp, Homo sapien
cttttaaatccaggtcagaaaatct

SEQ ID NO: 4779776 - DNA, 25 bp, Homo sapien
taaaatgcagttctccaggtcatct

SEQ ID NO: 4779777 - DNA, 25 bp, Homo sapien
tcatctccttggtctggtgaagtgg

SEQ ID NO: 4779778 - DNA, 25 bp, Homo sapien
tgaagcagatattcctttcagttaa

SEQ ID NO: 4779779 - DNA, 25 bp, Homo sapien
ctggtttggttgcaacagtgaagca

SEQ ID NO: 4779780 - DNA, 25 bp, Homo sapien
agtgaagcagatattcctttcagtt

SEQ ID NO: 4779781 - DNA, 25 bp, Homo sapien
tggtttggttgcaacagtgaagcag

SEQ ID NO: 4779782 - DNA, 25 bp, Homo sapien
tgtgccgggcccatggaatagtcct

SEQ ID NO: 4779783 - DNA, 25 bp, Homo sapien
tctatctatacttaccctacaggtg

SEQ ID NO: 4779784 - DNA, 25 bp, Homo sapien
gaaacagttgaagtacctgctctct

SEQ ID NO: 4779785 - DNA, 25 bp, Homo sapien
taccagctagggataacggcccctg

SEQ ID NO: 4779786 - DNA, 25 bp, Homo sapien
gctgaactatcttcctcctttggga

SEQ ID NO: 4779787 - DNA, 25 bp, Homo sapien
aataagtcagactggccctgcacag

SEQ ID NO: 4779788 - DNA, 25 bp, Homo sapien
tcctttgggagcatgagaagtaact

SEQ ID NO: 4779789 - DNA, 25 bp, Homo sapien
tgaagtacaatccaatcagatcact

SEQ ID NO: 4779790 - DNA, 25 bp, Homo sapien
ttaggccgggagagtgaaatttcag

SEQ ID NO: 4779791 - DNA, 25 bp, Homo sapien
gaaatttcagatggccatggacaaa

SEQ ID NO: 4779792 - DNA, 25 bp, Homo sapien
gattaagcggccgacggatgacgtc

SEQ ID NO: 4779793 - DNA, 25 bp, Homo sapien
cttaaggaaaatgacggccagccgg

SEQ ID NO: 4779794 - DNA, 25 bp, Homo sapien
cctgcactgtctccgcctagcaatt

SEQ ID NO: 4779795 - DNA, 25 bp, Homo sapien
ccagtcctgatcctttctaaggtct

SEQ ID NO: 4779796 - DNA, 25 bp, Homo sapien
cagtcctgatcctttctaaggtctc

SEQ ID NO: 4779797 - DNA, 25 bp, Homo sapien
tccgcctagcaattgtcactgctca

SEQ ID NO: 4779798 - DNA, 25 bp, Homo sapien
tgggtagaaaagctcgctcgtgacg

SEQ ID NO: 4779799 - DNA, 25 bp, Homo sapien
tagaaaagctcgctcgtgacgtcac

SEQ ID NO: 4779800 - DNA, 25 bp, Homo sapien
cgccgcgtatttgggtagaaaagct

SEQ ID NO: 4779801 - DNA, 25 bp, Homo sapien
cgtatttgggtagaaaagctcgctc

SEQ ID NO: 4779802 - DNA, 25 bp, Homo sapien
gccttcaggcgtacgacgaccgcgg

SEQ ID NO: 4779803 - DNA, 25 bp, Homo sapien
gccgccgggaaaaccattgagaggc

SEQ ID NO: 4779804 - DNA, 25 bp, Homo sapien
gaggccaccgggaaaccattgagaa

SEQ ID NO: 4779805 - DNA, 25 bp, Homo sapien
aagctccggaagtctcctggcgtcg

SEQ ID NO: 4779806 - DNA, 25 bp, Homo sapien
ttgcgtcggccagcggccagacagt

SEQ ID NO: 4779807 - DNA, 25 bp, Homo sapien
tggccccggaaggacatagagcgga

SEQ ID NO: 4779808 - DNA, 25 bp, Homo sapien
gagaaagaagtagccggcaggcgga

SEQ ID NO: 4779809 - DNA, 25 bp, Homo sapien
tgcatgtgtgccagacgttcgtagc

SEQ ID NO: 4779810 - DNA, 25 bp, Homo sapien
cacagcgacgagaacgacggtgagt

SEQ ID NO: 4779811 - DNA, 25 bp, Homo sapien
acggaagagactggaagctcttctc

SEQ ID NO: 4779812 - DNA, 25 bp, Homo sapien
tcgggcggcttctagaaagcgactt

SEQ ID NO: 4779813 - DNA, 25 bp, Homo sapien
aggctcggcgtctttgggtgtccac

SEQ ID NO: 4779814 - DNA, 25 bp, Homo sapien
ggtagtggttatccgttgatttcac

SEQ ID NO: 4779815 - DNA, 25 bp, Homo sapien
actgagagatctcatgagttgcagt

SEQ ID NO: 4779816 - DNA, 25 bp, Homo sapien
gagttgcagtctgaactctgttccg

SEQ ID NO: 4779817 - DNA, 25 bp, Homo sapien
aaaagggctcggaagaattcactga

SEQ ID NO: 4779818 - DNA, 25 bp, Homo sapien
gattgtgctcgtggagatcagtgtt

SEQ ID NO: 4779819 - DNA, 25 bp, Homo sapien
ttcaggcctctgagagagttagaac

SEQ ID NO: 4779820 - DNA, 25 bp, Homo sapien
gggttcccatctccgtttggatgat

SEQ ID NO: 4779821 - DNA, 25 bp, Homo sapien
caggcctctgagagagttagaacag

SEQ ID NO: 4779822 - DNA, 25 bp, Homo sapien
ccagagggtttaggttcaaagccag

SEQ ID NO: 4779823 - DNA, 25 bp, Homo sapien
gcttaagaggcggtaaacgttagca

SEQ ID NO: 4779824 - DNA, 25 bp, Homo sapien
ttatcatttgccaacgcttaagagg

SEQ ID NO: 4779825 - DNA, 25 bp, Homo sapien
taagagatgagactttggaaccaga

SEQ ID NO: 4779826 - DNA, 25 bp, Homo sapien
tcctttttctcacttagaggtaatc

SEQ ID NO: 4779827 - DNA, 25 bp, Homo sapien
tcttggagttggcttgtttttaaca

SEQ ID NO: 4779828 - DNA, 25 bp, Homo sapien
tggagttggcttgtttttaacacca

SEQ ID NO: 4779829 - DNA, 25 bp, Homo sapien
agacaaatattgtcctttaatatag

SEQ ID NO: 4779830 - DNA, 25 bp, Homo sapien
aagggtttgcagttcagagatgtga

SEQ ID NO: 4779831 - DNA, 25 bp, Homo sapien
ctccagacaaatattgtcctttaat

SEQ ID NO: 4779832 - DNA, 25 bp, Homo sapien
agggtttgcagttcagagatgtgac

SEQ ID NO: 4779833 - DNA, 25 bp, Homo sapien
tgcagcacaatctgcctccttttac

SEQ ID NO: 4779834 - DNA, 25 bp, Homo sapien
acaatctgcctccttttacaccacc

SEQ ID NO: 4779835 - DNA, 25 bp, Homo sapien
ctgcagcacaatctgcctcctttta

SEQ ID NO: 4779836 - DNA, 25 bp, Homo sapien
agcacaatctgcctccttttacacc

SEQ ID NO: 4779837 - DNA, 25 bp, Homo sapien
taaagtgctaatgaccagtaggaat

SEQ ID NO: 4779838 - DNA, 25 bp, Homo sapien
tagatatgtctaactgaaaatctgg

SEQ ID NO: 4779839 - DNA, 25 bp, Homo sapien
tggtttacatttaagactgctaatg

SEQ ID NO: 4779840 - DNA, 25 bp, Homo sapien
ctgctaatgtttgtggtcgggtatt

SEQ ID NO: 4779841 - DNA, 25 bp, Homo sapien
catggcaaagaagtcttggactgcc

SEQ ID NO: 4779842 - DNA, 25 bp, Homo sapien
ttcaagtaacagtgtggaatgactt

SEQ ID NO: 4779843 - DNA, 25 bp, Homo sapien
gaagtttctgaataagaggcatggc

SEQ ID NO: 4779844 - DNA, 25 bp, Homo sapien
gaaactgtcatggatcttttgagcc

SEQ ID NO: 4779845 - DNA, 25 bp, Homo sapien
tcacgagtgtatgcaggtcagattc

SEQ ID NO: 4779846 - DNA, 25 bp, Homo sapien
caatgtatgcctgtgcgtatggagg

SEQ ID NO: 4779847 - DNA, 25 bp, Homo sapien
gccagtagacttgcttgttgcaggg

SEQ ID NO: 4779848 - DNA, 25 bp, Homo sapien
gggattgcagcaattaataatggaa

SEQ ID NO: 4779849 - DNA, 25 bp, Homo sapien
aatgctatacatgcgtttggacaca

SEQ ID NO: 4779850 - DNA, 25 bp, Homo sapien
gcttgcacaggcaactgaaatgcta

SEQ ID NO: 4779851 - DNA, 25 bp, Homo sapien
ttggacacaatgaacactacctgtg

SEQ ID NO: 4779852 - DNA, 25 bp, Homo sapien
tatcctaaattcacagcttgcacag

SEQ ID NO: 4779853 - DNA, 25 bp, Homo sapien
taacttccagttccgttggagctgg

SEQ ID NO: 4779854 - DNA, 25 bp, Homo sapien
taataaacatgttaggtgcccgcac

SEQ ID NO: 4779855 - DNA, 25 bp, Homo sapien
cttagtcaagatcctgaaagtccca

SEQ ID NO: 4779856 - DNA, 25 bp, Homo sapien
tcctccttaggtcagattgtcttag

SEQ ID NO: 4779857 - DNA, 25 bp, Homo sapien
ggttctaagcctcttggtggacaca

SEQ ID NO: 4779858 - DNA, 25 bp, Homo sapien
gggcacttgatatgctcattgccat

SEQ ID NO: 4779859 - DNA, 25 bp, Homo sapien
cgttttcttgccctatcactggaat

SEQ ID NO: 4779860 - DNA, 25 bp, Homo sapien
catctatttattcatggagccctag

SEQ ID NO: 4779861 - DNA, 25 bp, Homo sapien
taggttgtcttaccatcagcgtata

SEQ ID NO: 4779862 - DNA, 25 bp, Homo sapien
ggtgttaccgaagaatgggactgat

SEQ ID NO: 4779863 - DNA, 25 bp, Homo sapien
gatattgttcctcctaccttctcag

SEQ ID NO: 4779864 - DNA, 25 bp, Homo sapien
cttcttggttgtcagctgagttcaa

SEQ ID NO: 4779865 - DNA, 25 bp, Homo sapien
tgttgctctggtgatgccttacggt

SEQ ID NO: 4779866 - DNA, 25 bp, Homo sapien
tctgacttacgtagattcaagcttg

SEQ ID NO: 4779867 - DNA, 25 bp, Homo sapien
gacttcatttccacggtcccgagga

SEQ ID NO: 4779868 - DNA, 25 bp, Homo sapien
tacaaggagtcccatcacgtgagca

SEQ ID NO: 4779869 - DNA, 25 bp, Homo sapien
gacgacggtaagtggaattcagtat

SEQ ID NO: 4779870 - DNA, 25 bp, Homo sapien
tctggcaacatgatgctcttaaagc

SEQ ID NO: 4779871 - DNA, 25 bp, Homo sapien
taagtggaactatgtataggccaac

SEQ ID NO: 4779872 - DNA, 25 bp, Homo sapien
tcctaaccaggatgatgacgacggt

SEQ ID NO: 4779873 - DNA, 25 bp, Homo sapien
gcatttgaggtaaggcaccaaggaa

SEQ ID NO: 4779874 - DNA, 25 bp, Homo sapien
cacgcaaaggttggcatctgaagac

SEQ ID NO: 4779875 - DNA, 25 bp, Homo sapien
tatcctaaggcttccgtcagtctgt

SEQ ID NO: 4779876 - DNA, 25 bp, Homo sapien
cagctacactgttgggagtcacgca

SEQ ID NO: 4779877 - DNA, 25 bp, Homo sapien
gaagctctgattgtatgggtataaa

SEQ ID NO: 4779878 - DNA, 25 bp, Homo sapien
tgcaagctccagatttctcaaacct

SEQ ID NO: 4779879 - DNA, 25 bp, Homo sapien
tgtttgaggtctggaggaaccatcc

SEQ ID NO: 4779880 - DNA, 25 bp, Homo sapien
aaaccctagctgaaagtgatgaagg

SEQ ID NO: 4779881 - DNA, 25 bp, Homo sapien
aacactttccccgtactgtgaggag

SEQ ID NO: 4779882 - DNA, 25 bp, Homo sapien
tagttcactatctctgggtcggcct

SEQ ID NO: 4779883 - DNA, 25 bp, Homo sapien
tgctaggcaacacaaacgggtaagt

SEQ ID NO: 4779884 - DNA, 25 bp, Homo sapien
tcggcctcacgtttgcacaagggaa

SEQ ID NO: 4779885 - DNA, 25 bp, Homo sapien
gatgacgacagaagcagtgacagga

SEQ ID NO: 4779886 - DNA, 25 bp, Homo sapien
ctatagcgaagtgatgatgacgaca

SEQ ID NO: 4779887 - DNA, 25 bp, Homo sapien
gcctagataagaacccatggaattt

SEQ ID NO: 4779888 - DNA, 25 bp, Homo sapien
tagtgataaattgtagccaagtccc

SEQ ID NO: 4779889 - DNA, 25 bp, Homo sapien
gaataatggaagctaggcacacaca

SEQ ID NO: 4779890 - DNA, 25 bp, Homo sapien
ggtttatcatgatcttgaccgagca

SEQ ID NO: 4779891 - DNA, 25 bp, Homo sapien
gaccgagcacctagtacgatgcgaa

SEQ ID NO: 4779892 - DNA, 25 bp, Homo sapien
tgcagcagatcttcctacaggtatg

SEQ ID NO: 4779893 - DNA, 25 bp, Homo sapien
tcttggccgtgttccagcagttctg

SEQ ID NO: 4779894 - DNA, 25 bp, Homo sapien
catggtgaccctggagaaccttctc

SEQ ID NO: 4779895 - DNA, 25 bp, Homo sapien
tcatcattctgcagcatgggtgggc

SEQ ID NO: 4779896 - DNA, 25 bp, Homo sapien
gaattagaccctcatatcttggccg

SEQ ID NO: 4779897 - DNA, 25 bp, Homo sapien
tgatccaaaaaactacgaagtcctg

SEQ ID NO: 4779898 - DNA, 25 bp, Homo sapien
ggtggaacgcagacatcctcagtaa

SEQ ID NO: 4779899 - DNA, 25 bp, Homo sapien
gtagcataacttttcacagctcggg

SEQ ID NO: 4779900 - DNA, 25 bp, Homo sapien
tatgtgaaacactagaggtcaacct

SEQ ID NO: 4779901 - DNA, 25 bp, Homo sapien
gattggtaactttgactcaaaactg

SEQ ID NO: 4779902 - DNA, 25 bp, Homo sapien
tcagcagtgggctattggtggttaa

SEQ ID NO: 4779903 - DNA, 25 bp, Homo sapien
aaaaatccaggttgcgtggctggtt

SEQ ID NO: 4779904 - DNA, 25 bp, Homo sapien
taccatacattttagtggctacaga

SEQ ID NO: 4779905 - DNA, 25 bp, Homo sapien
aaaaaacacatgactagaacctggg

SEQ ID NO: 4779906 - DNA, 25 bp, Homo sapien
gacattgtgcacacaaccaggccag

SEQ ID NO: 4779907 - DNA, 25 bp, Homo sapien
taagaaggcaatcacagacatgaca

SEQ ID NO: 4779908 - DNA, 25 bp, Homo sapien
catcgtggagacagaaatcgtccta

SEQ ID NO: 4779909 - DNA, 25 bp, Homo sapien
attttttcatatgtcagttcatggc

SEQ ID NO: 4779910 - DNA, 25 bp, Homo sapien
ttcatatgtcagttcatggccacac

SEQ ID NO: 4779911 - DNA, 25 bp, Homo sapien
ttttcatatgtcagttcatggccac

SEQ ID NO: 4779912 - DNA, 25 bp, Homo sapien
tcatatgtcagttcatggccacaca

SEQ ID NO: 4779913 - DNA, 25 bp, Homo sapien
gttttcttctggtccatactcatgt

SEQ ID NO: 4779914 - DNA, 25 bp, Homo sapien
gctgcttcttactgctcgccgcaat

SEQ ID NO: 4779915 - DNA, 25 bp, Homo sapien
gatgaacaatcgtctcccttttcca

SEQ ID NO: 4779916 - DNA, 25 bp, Homo sapien
ttttccacacgctgcttcttactgc

SEQ ID NO: 4779917 - DNA, 25 bp, Homo sapien
catcttttcagtggtgctattcagg

SEQ ID NO: 4779918 - DNA, 25 bp, Homo sapien
agctttcagccatgtacatgtgtgt

SEQ ID NO: 4779919 - DNA, 25 bp, Homo sapien
ggtgaatccaaaaatccaactccat

SEQ ID NO: 4779920 - DNA, 25 bp, Homo sapien
tcagtggtgctattcaggtgaatcc

SEQ ID NO: 4779921 - DNA, 25 bp, Homo sapien
gggttggtggtatgcaaaacagaac

SEQ ID NO: 4779922 - DNA, 25 bp, Homo sapien
cacaataggacacattcaggtacgt

SEQ ID NO: 4779923 - DNA, 25 bp, Homo sapien
caggtacgtttgacttcagataaca

SEQ ID NO: 4779924 - DNA, 25 bp, Homo sapien
tggagcagtgtgaaacaagagattc

SEQ ID NO: 4779925 - DNA, 25 bp, Homo sapien
tagatatagatctggaatgccctcc

SEQ ID NO: 4779926 - DNA, 25 bp, Homo sapien
cctaagggagattatgatagctgtc

SEQ ID NO: 4779927 - DNA, 25 bp, Homo sapien
tagtttaactgtgaagccaggacac

SEQ ID NO: 4779928 - DNA, 25 bp, Homo sapien
tgatggatacctctagcatgaaaag

SEQ ID NO: 4779929 - DNA, 25 bp, Homo sapien
gcttctttgtggatcaaaatcagaa

SEQ ID NO: 4779930 - DNA, 25 bp, Homo sapien
ttcccataaagaagtaaactgtgtc

SEQ ID NO: 4779931 - DNA, 25 bp, Homo sapien
gcctattcaggaaggcgggaacaac

SEQ ID NO: 4779932 - DNA, 25 bp, Homo sapien
ctttgtggcctattcaggaaggcgg

SEQ ID NO: 4779933 - DNA, 25 bp, Homo sapien
aagatgtgtataaggatgttgatca

SEQ ID NO: 4779934 - DNA, 25 bp, Homo sapien
gatcatggagttgcttaacttcgtg

SEQ ID NO: 4779935 - DNA, 25 bp, Homo sapien
gagttgcttaacttcgtgtcaaaca

SEQ ID NO: 4779936 - DNA, 25 bp, Homo sapien
gtgattcaggaattgctaagtaact

SEQ ID NO: 4779937 - DNA, 25 bp, Homo sapien
tactgtgaggtttgagcttagtgcc

SEQ ID NO: 4779938 - DNA, 25 bp, Homo sapien
ttttcagaaatgtcgtactgtgagg

SEQ ID NO: 4779939 - DNA, 25 bp, Homo sapien
taaaaaacacattccaatctattgg

SEQ ID NO: 4779940 - DNA, 25 bp, Homo sapien
tgccttgaagaccaacatactgagg

SEQ ID NO: 4779941 - DNA, 25 bp, Homo sapien
cacgatataaaatgtggccatctac

SEQ ID NO: 4779942 - DNA, 25 bp, Homo sapien
cttcacgatataaaatgtggccatc

SEQ ID NO: 4779943 - DNA, 25 bp, Homo sapien
ttcacgatataaaatgtggccatct

SEQ ID NO: 4779944 - DNA, 25 bp, Homo sapien
tcacgatataaaatgtggccatcta

SEQ ID NO: 4779945 - DNA, 25 bp, Homo sapien
ccaaacttcaagagacctcttcaca

SEQ ID NO: 4779946 - DNA, 25 bp, Homo sapien
tttcctgtcggacttcctttgcttc

SEQ ID NO: 4779947 - DNA, 25 bp, Homo sapien
tcctgtcggacttcctttgcttctt

SEQ ID NO: 4779948 - DNA, 25 bp, Homo sapien
gcttcttgactaccccaaacttcaa

SEQ ID NO: 4779949 - DNA, 25 bp, Homo sapien
agtgccatattagaagcaaaatgag

SEQ ID NO: 4779950 - DNA, 25 bp, Homo sapien
gccatattagaagcaaaatgaggcc

SEQ ID NO: 4779951 - DNA, 25 bp, Homo sapien
aaagtgccatattagaagcaaaatg

SEQ ID NO: 4779952 - DNA, 25 bp, Homo sapien
tgccatattagaagcaaaatgaggc

SEQ ID NO: 4779953 - DNA, 25 bp, Homo sapien
aaataataaatacaacttattagag

SEQ ID NO: 4779954 - DNA, 25 bp, Homo sapien
cagagtgaaaaataataaatacaac

SEQ ID NO: 4779955 - DNA, 25 bp, Homo sapien
agagtgaaaaataataaatacaact

SEQ ID NO: 4779956 - DNA, 25 bp, Homo sapien
ataataaatacaacttattagagac

SEQ ID NO: 4779957 - DNA, 25 bp, Homo sapien
ctgtaactttaagtagagtttcata

SEQ ID NO: 4779958 - DNA, 25 bp, Homo sapien
gatgtggattcttcttcacaataaa

SEQ ID NO: 4779959 - DNA, 25 bp, Homo sapien
tatcaccccattgtgaatgatgtgg

SEQ ID NO: 4779960 - DNA, 25 bp, Homo sapien
tctaaatcacagtctttcagaagat

SEQ ID NO: 4779961 - DNA, 25 bp, Homo sapien
tcataattactaagaaaatatcaaa

SEQ ID NO: 4779962 - DNA, 25 bp, Homo sapien
cttgttttgccctaaacctacacat

SEQ ID NO: 4779963 - DNA, 25 bp, Homo sapien
cctaaacctacacataaacattagc

SEQ ID NO: 4779964 - DNA, 25 bp, Homo sapien
ttgccctaaacctacacataaacat

SEQ ID NO: 4779965 - DNA, 25 bp, Homo sapien
gcagttatcacaagttggcaaatca

SEQ ID NO: 4779966 - DNA, 25 bp, Homo sapien
acataatcaaattccataacaggtc

SEQ ID NO: 4779967 - DNA, 25 bp, Homo sapien
cattcttcgcatattacataatcaa

SEQ ID NO: 4779968 - DNA, 25 bp, Homo sapien
atcacaagttggcaaatcaaagtgg

SEQ ID NO: 4779969 - DNA, 25 bp, Homo sapien
tctagtttattctgacatgggtctc

SEQ ID NO: 4779970 - DNA, 25 bp, Homo sapien
tcttccataatcacatgtccctctg

SEQ ID NO: 4779971 - DNA, 25 bp, Homo sapien
tcagcatgtatgcaatgcctgacat

SEQ ID NO: 4779972 - DNA, 25 bp, Homo sapien
tgaatcccagccatgtacaaggtac

SEQ ID NO: 4779973 - DNA, 25 bp, Homo sapien
agagagcagcaacccctaagtacat

SEQ ID NO: 4779974 - DNA, 25 bp, Homo sapien
tcccaaagagtgtgaaagtaccctc

SEQ ID NO: 4779975 - DNA, 25 bp, Homo sapien
gattctggtgcctcatttcagccta

SEQ ID NO: 4779976 - DNA, 25 bp, Homo sapien
ccctcactgtgaagatatgtgtaca

SEQ ID NO: 4779977 - DNA, 25 bp, Homo sapien
tcctcttctaaaatgaagcctcctc

SEQ ID NO: 4779978 - DNA, 25 bp, Homo sapien
tcctcctgtgtcaattatctttggg

SEQ ID NO: 4779979 - DNA, 25 bp, Homo sapien
cctcctcctgtgtcaattatctttg

SEQ ID NO: 4779980 - DNA, 25 bp, Homo sapien
ttcctcttctaaaatgaagcctcct

SEQ ID NO: 4779981 - DNA, 25 bp, Homo sapien
ttccacagccatgtcgtagacctgg

SEQ ID NO: 4779982 - DNA, 25 bp, Homo sapien
tccgttccacagccatgtcgtagac

SEQ ID NO: 4779983 - DNA, 25 bp, Homo sapien
ccacagccatgtcgtagacctggaa

SEQ ID NO: 4779984 - DNA, 25 bp, Homo sapien
acagccatgtcgtagacctggaaac

SEQ ID NO: 4779985 - DNA, 25 bp, Homo sapien
tccctaaacgaaaaatcgaagctgc

SEQ ID NO: 4779986 - DNA, 25 bp, Homo sapien
agcagccgaggtgcagcgaagaagg

SEQ ID NO: 4779987 - DNA, 25 bp, Homo sapien
acgaaaaatcgaagctgccagcagc

SEQ ID NO: 4779988 - DNA, 25 bp, Homo sapien
gggcggctgcatccctaaacgaaaa

SEQ ID NO: 4779989 - DNA, 25 bp, Homo sapien
gacaggacgctttgacaaggcggct

SEQ ID NO: 4779990 - DNA, 25 bp, Homo sapien
aacgctctgtggtcgtggacaggac

SEQ ID NO: 4779991 - DNA, 25 bp, Homo sapien
ccgcgtgcgacagaggaacgctctg

SEQ ID NO: 4779992 - DNA, 25 bp, Homo sapien
gagaatctgcacacatacgccagcg

SEQ ID NO: 4779993 - DNA, 25 bp, Homo sapien
gcttccgctcgatactcgcccgcac

SEQ ID NO: 4779994 - DNA, 25 bp, Homo sapien
cgtcgccgagtagggccgggcagcc

SEQ ID NO: 4779995 - DNA, 25 bp, Homo sapien
ctgccgcttccgctcgatactcgcc

SEQ ID NO: 4779996 - DNA, 25 bp, Homo sapien
cgccgtcgccgagtagggccgggca

SEQ ID NO: 4779997 - DNA, 25 bp, Homo sapien
gcagctccgcgggttgctctaaagc

SEQ ID NO: 4779998 - DNA, 25 bp, Homo sapien
gcgggttgctctaaagccgccgcct

SEQ ID NO: 4779999 - DNA, 25 bp, Homo sapien
cgccgcctccggcaaagccccgtcg

SEQ ID NO: 4780000 - DNA, 25 bp, Homo sapien
gaggcaggcagctccgcgggttgct

SEQ ID NO: 4780001 - DNA, 25 bp, Homo sapien
agctcccagctccacgcacgcgcac

SEQ ID NO: 4780002 - DNA, 25 bp, Homo sapien
gcacgcgcactgcacgccgaggcga

SEQ ID NO: 4780003 - DNA, 25 bp, Homo sapien
acgccgaggcgagccagccgccctg

SEQ ID NO: 4780004 - DNA, 25 bp, Homo sapien
ctggcccactccgaggacctagctc

SEQ ID NO: 4780005 - DNA, 25 bp, Homo sapien
tcgtatagttgggtaaaaatgactc

SEQ ID NO: 4780006 - DNA, 25 bp, Homo sapien
tacagctcggatgttgtataggctc

SEQ ID NO: 4780007 - DNA, 25 bp, Homo sapien
tggtgtactgactttcgttagcaag

SEQ ID NO: 4780008 - DNA, 25 bp, Homo sapien
tctagattctgtaactcttggcagc

SEQ ID NO: 4780009 - DNA, 25 bp, Homo sapien
ggacattcacagtggtctgcctggg

SEQ ID NO: 4780010 - DNA, 25 bp, Homo sapien
cttctcccttcagaccatgagaccc

SEQ ID NO: 4780011 - DNA, 25 bp, Homo sapien
ctcccttcagaccatgagacccagg

SEQ ID NO: 4780012 - DNA, 25 bp, Homo sapien
ctggacattcacagtggtctgcctg

SEQ ID NO: 4780013 - DNA, 25 bp, Homo sapien
gatgttttcctgcaagcgcacacga

SEQ ID NO: 4780014 - DNA, 25 bp, Homo sapien
gcagaacaatggcaacaagcagggt

SEQ ID NO: 4780015 - DNA, 25 bp, Homo sapien
ttgtctgcggttgacagccctcagg

SEQ ID NO: 4780016 - DNA, 25 bp, Homo sapien
tcgtacaggttgatgctgaagccac

SEQ ID NO: 4780017 - DNA, 25 bp, Homo sapien
tcctcccctttctaagcacgcttcg

SEQ ID NO: 4780018 - DNA, 25 bp, Homo sapien
cctcccctttctaagcacgcttcgc

SEQ ID NO: 4780019 - DNA, 25 bp, Homo sapien
aggtccagggtgtgtacacagacag

SEQ ID NO: 4780020 - DNA, 25 bp, Homo sapien
tcccctttctaagcacgcttcgcat

SEQ ID NO: 4780021 - DNA, 25 bp, Homo sapien
tgggtgatggtgtgcggctatgcag

SEQ ID NO: 4780022 - DNA, 25 bp, Homo sapien
gtgtgcggctatgcagggaattccc

SEQ ID NO: 4780023 - DNA, 25 bp, Homo sapien
gtgggtgatggtgtgcggctatgca

SEQ ID NO: 4780024 - DNA, 25 bp, Homo sapien
gatggtgtgcggctatgcagggaat

SEQ ID NO: 4780025 - DNA, 25 bp, Homo sapien
aacttttaaaagattccacatgtga

SEQ ID NO: 4780026 - DNA, 25 bp, Homo sapien
cttttaaaagattccacatgtgaaa

SEQ ID NO: 4780027 - DNA, 25 bp, Homo sapien
acttttaaaagattccacatgtgaa

SEQ ID NO: 4780028 - DNA, 25 bp, Homo sapien
ccccgtcttcttccatgtctttgct

SEQ ID NO: 4780029 - DNA, 25 bp, Homo sapien
cccgtcttcttccatgtctttgctc

SEQ ID NO: 4780030 - DNA, 25 bp, Homo sapien
tctaccagtgctggcgtcaccacca

SEQ ID NO: 4780031 - DNA, 25 bp, Homo sapien
ctgcacctctctctaccagtgctgg

SEQ ID NO: 4780032 - DNA, 25 bp, Homo sapien
ccaagcaaaaaggtggggctctctg

SEQ ID NO: 4780033 - DNA, 25 bp, Homo sapien
caattccaagcaaaaaggtggggct

SEQ ID NO: 4780034 - DNA, 25 bp, Homo sapien
gcttcctcatccccgctctgactgt

SEQ ID NO: 4780035 - DNA, 25 bp, Homo sapien
atccccgctctgactgttcagtcgg

SEQ ID NO: 4780036 - DNA, 25 bp, Homo sapien
ggcttcctcatccccgctctgactg

SEQ ID NO: 4780037 - DNA, 25 bp, Homo sapien
cctcatccccgctctgactgttcag

SEQ ID NO: 4780038 - DNA, 25 bp, Homo sapien
cagtgaccagacgagctgaggtcag

SEQ ID NO: 4780039 - DNA, 25 bp, Homo sapien
ggagctgacagtgaccagacgagct

SEQ ID NO: 4780040 - DNA, 25 bp, Homo sapien
ctgacagtgaccagacgagctgagg

SEQ ID NO: 4780041 - DNA, 25 bp, Homo sapien
ccagacgagctgaggtcagtgcaga

SEQ ID NO: 4780042 - DNA, 25 bp, Homo sapien
gctcttcgctccgtcagctcaccag

SEQ ID NO: 4780043 - DNA, 25 bp, Homo sapien
cttgaagctcttcgctccgtcagct

SEQ ID NO: 4780044 - DNA, 25 bp, Homo sapien
tgaagctcttcgctccgtcagctca

SEQ ID NO: 4780045 - DNA, 25 bp, Homo sapien
tcttcgctccgtcagctcaccagtc

SEQ ID NO: 4780046 - DNA, 25 bp, Homo sapien
ctgcagcagaatgttccgggatgtg

SEQ ID NO: 4780047 - DNA, 25 bp, Homo sapien
tgcagcagaatgttccgggatgtga

SEQ ID NO: 4780048 - DNA, 25 bp, Homo sapien
gaatgttccgggatgtgagtctgca

SEQ ID NO: 4780049 - DNA, 25 bp, Homo sapien
gcagaatgttccgggatgtgagtct

SEQ ID NO: 4780050 - DNA, 25 bp, Homo sapien
tcaccactcgacacaatggagactg

SEQ ID NO: 4780051 - DNA, 25 bp, Homo sapien
taactgccttaaacaagtcttgctt

SEQ ID NO: 4780052 - DNA, 25 bp, Homo sapien
actcgacacaatggagactgctgct

SEQ ID NO: 4780053 - DNA, 25 bp, Homo sapien
gccttaaacaagtcttgcttcatac

SEQ ID NO: 4780054 - DNA, 25 bp, Homo sapien
cagagctgcgactcaaggaggcgtc

SEQ ID NO: 4780055 - DNA, 25 bp, Homo sapien
gcgtcgccatgggaagtggatcctg

SEQ ID NO: 4780056 - DNA, 25 bp, Homo sapien
gctgggtctttgagtgcaggttttc

SEQ ID NO: 4780057 - DNA, 25 bp, Homo sapien
gcccagccgatcaaatctttcttct

SEQ ID NO: 4780058 - DNA, 25 bp, Homo sapien
gaatgcacttgaaattcttcttcct

SEQ ID NO: 4780059 - DNA, 25 bp, Homo sapien
aatggatgtggctcttagaatgcac

SEQ ID NO: 4780060 - DNA, 25 bp, Homo sapien
tgttgcatggagcactggcagaagc

SEQ ID NO: 4780061 - DNA, 25 bp, Homo sapien
agtgagttgaaggtggcttcctccc

SEQ ID NO: 4780062 - DNA, 25 bp, Homo sapien
actggcagaagcagagtgagttgaa

SEQ ID NO: 4780063 - DNA, 25 bp, Homo sapien
catgaacaagatgttgcatggagca

SEQ ID NO: 4780064 - DNA, 25 bp, Homo sapien
tccttgcttggttctgaaaatgcca

SEQ ID NO: 4780065 - DNA, 25 bp, Homo sapien
gcttggttctgaaaatgccatctcc

SEQ ID NO: 4780066 - DNA, 25 bp, Homo sapien
ggttctgaaaatgccatctccaaag

SEQ ID NO: 4780067 - DNA, 25 bp, Homo sapien
cttctcactatctacttccttgctt

SEQ ID NO: 4780068 - DNA, 25 bp, Homo sapien
gcatcatcgtggctgtcttctaccg

SEQ ID NO: 4780069 - DNA, 25 bp, Homo sapien
gtccaagttatcacccccatcagca

SEQ ID NO: 4780070 - DNA, 25 bp, Homo sapien
catcatcgtggctgtcttctaccgt

SEQ ID NO: 4780071 - DNA, 25 bp, Homo sapien
agtccaagttatcacccccatcagc

SEQ ID NO: 4780072 - DNA, 25 bp, Homo sapien
cttggagatcttcggattctacccc

SEQ ID NO: 4780073 - DNA, 25 bp, Homo sapien
ggattctaccccctcatcttggaat

SEQ ID NO: 4780074 - DNA, 25 bp, Homo sapien
ggccttggagatcttcggattctac

SEQ ID NO: 4780075 - DNA, 25 bp, Homo sapien
tctaccccctcatcttggaatcagg

SEQ ID NO: 4780076 - DNA, 25 bp, Homo sapien
aaagatgacatagacactgtcctct

SEQ ID NO: 4780077 - DNA, 25 bp, Homo sapien
gacaaagatgacatagacactgtcc

SEQ ID NO: 4780078 - DNA, 25 bp, Homo sapien
caaagatgacatagacactgtcctc

SEQ ID NO: 4780079 - DNA, 25 bp, Homo sapien
agacaaagatgacatagacactgtc

SEQ ID NO: 4780080 - DNA, 25 bp, Homo sapien
gtgggttggaaccatcaagctccct

SEQ ID NO: 4780081 - DNA, 25 bp, Homo sapien
tcctgggtgggttggaaccatcaag

SEQ ID NO: 4780082 - DNA, 25 bp, Homo sapien
tccctgaagaaaggctcccaagaca

SEQ ID NO: 4780083 - DNA, 25 bp, Homo sapien
ctccctgaagaaaggctcccaagac

SEQ ID NO: 4780084 - DNA, 25 bp, Homo sapien
ctctgcttgctggggatagggttgt

SEQ ID NO: 4780085 - DNA, 25 bp, Homo sapien
tgcttgctggggatagggttgtcca

SEQ ID NO: 4780086 - DNA, 25 bp, Homo sapien
ctggggatagggttgtccagaggtc

SEQ ID NO: 4780087 - DNA, 25 bp, Homo sapien
cttgctggggatagggttgtccaga

SEQ ID NO: 4780088 - DNA, 25 bp, Homo sapien
tgagccagatgcagacgtgctttac

SEQ ID NO: 4780089 - DNA, 25 bp, Homo sapien
ctcctgcacagggcagttatgagcc

SEQ ID NO: 4780090 - DNA, 25 bp, Homo sapien
cacagggcagttatgagccagatgc

SEQ ID NO: 4780091 - DNA, 25 bp, Homo sapien
gcagttatgagccagatgcagacgt

SEQ ID NO: 4780092 - DNA, 25 bp, Homo sapien
ccatctgcccatctccatgggccat

SEQ ID NO: 4780093 - DNA, 25 bp, Homo sapien
tgtccatctgcccatctccatgggc

SEQ ID NO: 4780094 - DNA, 25 bp, Homo sapien
atgtccatctgcccatctccatggg

SEQ ID NO: 4780095 - DNA, 25 bp, Homo sapien
cagctggatgtccatctgcccatct

SEQ ID NO: 4780096 - DNA, 25 bp, Homo sapien
caaaggcgctgattgtcatgtctgc

SEQ ID NO: 4780097 - DNA, 25 bp, Homo sapien
tctgctgccgatggtatgaacatag

SEQ ID NO: 4780098 - DNA, 25 bp, Homo sapien
tccaagctgctacggacaaaggcgc

SEQ ID NO: 4780099 - DNA, 25 bp, Homo sapien
gaatttcacatggagaccagatgcc

SEQ ID NO: 4780100 - DNA, 25 bp, Homo sapien
attggcaagggccaccgccagtctc

SEQ ID NO: 4780101 - DNA, 25 bp, Homo sapien
gataagaaatcgacttttcctctct

SEQ ID NO: 4780102 - DNA, 25 bp, Homo sapien
tgccttggcaccagattcactggta

SEQ ID NO: 4780103 - DNA, 25 bp, Homo sapien
agggccaccgccagtctcagaaaga

SEQ ID NO: 4780104 - DNA, 25 bp, Homo sapien
gccgctgcccttgttattgttcgac

SEQ ID NO: 4780105 - DNA, 25 bp, Homo sapien
tccggagagccaggaatactgacca

SEQ ID NO: 4780106 - DNA, 25 bp, Homo sapien
ggaatactgaccaagccactcacag

SEQ ID NO: 4780107 - DNA, 25 bp, Homo sapien
tattgttcgacagaggaaaaccttc

SEQ ID NO: 4780108 - DNA, 25 bp, Homo sapien
tagacacatcggctgttcacacgtt

SEQ ID NO: 4780109 - DNA, 25 bp, Homo sapien
catgctgccgcttatcccggtggga

SEQ ID NO: 4780110 - DNA, 25 bp, Homo sapien
tgagccagcgtagggacgaaaactc

SEQ ID NO: 4780111 - DNA, 25 bp, Homo sapien
gatagatcggttcgtgtccgccatg

SEQ ID NO: 4780112 - DNA, 25 bp, Homo sapien
ttcctcatctgggcgatgtgggctc

SEQ ID NO: 4780113 - DNA, 25 bp, Homo sapien
caggaagctgctcacggtagtcggc

SEQ ID NO: 4780114 - DNA, 25 bp, Homo sapien
gaaagtgccccgaccgcagaggcga

SEQ ID NO: 4780115 - DNA, 25 bp, Homo sapien
ttcctgcggccagcgctttggggaa

SEQ ID NO: 4780116 - DNA, 25 bp, Homo sapien
cctcggtcatccttatgtcaacctt

SEQ ID NO: 4780117 - DNA, 25 bp, Homo sapien
gaccctcggtcatccttatgtcaac

SEQ ID NO: 4780118 - DNA, 25 bp, Homo sapien
gcacttgggaccctcggtcatcctt

SEQ ID NO: 4780119 - DNA, 25 bp, Homo sapien
ttgggaccctcggtcatccttatgt

SEQ ID NO: 4780120 - DNA, 25 bp, Homo sapien
gcactggtttaagtcctggctttga

SEQ ID NO: 4780121 - DNA, 25 bp, Homo sapien
ctgccttcgtgagaaaagcactggt

SEQ ID NO: 4780122 - DNA, 25 bp, Homo sapien
tgttgatactttgcagcttcccaag

SEQ ID NO: 4780123 - DNA, 25 bp, Homo sapien
ctgagaagtcttagtgcccccgaaa

SEQ ID NO: 4780124 - DNA, 25 bp, Homo sapien
catacccatttcttaattctacacc

SEQ ID NO: 4780125 - DNA, 25 bp, Homo sapien
acccatttcttaattctacacccat

SEQ ID NO: 4780126 - DNA, 25 bp, Homo sapien
ccacatacccatttcttaattctac

SEQ ID NO: 4780127 - DNA, 25 bp, Homo sapien
tacccatttcttaattctacaccca

SEQ ID NO: 4780128 - DNA, 25 bp, Homo sapien
ggattaagaattgacacggagcgac

SEQ ID NO: 4780129 - DNA, 25 bp, Homo sapien
gcacaacacatttacatcgacctgg

SEQ ID NO: 4780130 - DNA, 25 bp, Homo sapien
tcactgagtctaattggacacgccc

SEQ ID NO: 4780131 - DNA, 25 bp, Homo sapien
tattcatgttagttgggctgctcca

SEQ ID NO: 4780132 - DNA, 25 bp, Homo sapien
aaagttgttctacccatgtacacgc

SEQ ID NO: 4780133 - DNA, 25 bp, Homo sapien
aaactgaccgcatctacgtaatagc

SEQ ID NO: 4780134 - DNA, 25 bp, Homo sapien
tgttgcatgcatatctaggagtgga

SEQ ID NO: 4780135 - DNA, 25 bp, Homo sapien
acatgcctttacgtgctcctctggg

SEQ ID NO: 4780136 - DNA, 25 bp, Homo sapien
tctcaggactgaagcagtgcatgct

SEQ ID NO: 4780137 - DNA, 25 bp, Homo sapien
cagtgagtacaagggccctggaatc

SEQ ID NO: 4780138 - DNA, 25 bp, Homo sapien
taccaggctggacacgtgggaagaa

SEQ ID NO: 4780139 - DNA, 25 bp, Homo sapien
tgggaatgtgctcatccgctgcagg

SEQ ID NO: 4780140 - DNA, 25 bp, Homo sapien
aatacaaaaattagccgggcatggt

SEQ ID NO: 4780141 - DNA, 25 bp, Homo sapien
aaggcaggtggatcatatgaggcca

SEQ ID NO: 4780142 - DNA, 25 bp, Homo sapien
ggagttcgagaccagcctggccaac

SEQ ID NO: 4780143 - DNA, 25 bp, Homo sapien
gtggtgaaaccctgtctctactaaa

SEQ ID NO: 4780144 - DNA, 25 bp, Homo sapien
cagtgttctgttagtaaataagagg

SEQ ID NO: 4780145 - DNA, 25 bp, Homo sapien
ggacaacccgcttgactgcttacat

SEQ ID NO: 4780146 - DNA, 25 bp, Homo sapien
gggacctctccttacatttcaatgg

SEQ ID NO: 4780147 - DNA, 25 bp, Homo sapien
gacgcaccaccacgctggacaattt

SEQ ID NO: 4780148 - DNA, 25 bp, Homo sapien
tgaattattatgttagcccagagag

SEQ ID NO: 4780149 - DNA, 25 bp, Homo sapien
tagggcttctatccaatactcacag

SEQ ID NO: 4780150 - DNA, 25 bp, Homo sapien
ccagccagggactggattattaaga

SEQ ID NO: 4780151 - DNA, 25 bp, Homo sapien
cagagagacaactgagatgggaact

SEQ ID NO: 4780152 - DNA, 25 bp, Homo sapien
tacttgagcctgtggactgttgtca

SEQ ID NO: 4780153 - DNA, 25 bp, Homo sapien
gaaggttctgcctgttcagcccaga

SEQ ID NO: 4780154 - DNA, 25 bp, Homo sapien
taacacgtggtgacatacttgagcc

SEQ ID NO: 4780155 - DNA, 25 bp, Homo sapien
tcctccttgagatacacttggcctg

SEQ ID NO: 4780156 - DNA, 25 bp, Homo sapien
gatgtcccagcaaactctggccata

SEQ ID NO: 4780157 - DNA, 25 bp, Homo sapien
tgtcccagcaaactctggccataga

SEQ ID NO: 4780158 - DNA, 25 bp, Homo sapien
atggatgagagtgatgtcccagcaa

SEQ ID NO: 4780159 - DNA, 25 bp, Homo sapien
gatgagagtgatgtcccagcaaact

SEQ ID NO: 4780160 - DNA, 25 bp, Homo sapien
tattactgctaatcctactttaaaa

SEQ ID NO: 4780161 - DNA, 25 bp, Homo sapien
cagaagataacattgtattactgct

SEQ ID NO: 4780162 - DNA, 25 bp, Homo sapien
gaagagttagatatattagcaaaga

SEQ ID NO: 4780163 - DNA, 25 bp, Homo sapien
gaattttcaagctatctacgaggca

SEQ ID NO: 4780164 - DNA, 25 bp, Homo sapien
cactgcgggcattgaaaaggctctt

SEQ ID NO: 4780165 - DNA, 25 bp, Homo sapien
acgtgcactggcctaaaccttgaac

SEQ ID NO: 4780166 - DNA, 25 bp, Homo sapien
tgcactggcctaaaccttgaacctt

SEQ ID NO: 4780167 - DNA, 25 bp, Homo sapien
tcactgagtttttgcactgcgggca

SEQ ID NO: 4780168 - DNA, 25 bp, Homo sapien
aaaaaacccgtgagctggtgactgc

SEQ ID NO: 4780169 - DNA, 25 bp, Homo sapien
agagattttcctgcaataccagggc

SEQ ID NO: 4780170 - DNA, 25 bp, Homo sapien
ataccagggctaggattaggaaaga

SEQ ID NO: 4780171 - DNA, 25 bp, Homo sapien
caataccagggctaggattaggaaa

SEQ ID NO: 4780172 - DNA, 25 bp, Homo sapien
tatctagccaggtaagccagaacag

SEQ ID NO: 4780173 - DNA, 25 bp, Homo sapien
catgatttgctaaggcgtagagcca

SEQ ID NO: 4780174 - DNA, 25 bp, Homo sapien
catggcagggcagaaagcgcttgaa

SEQ ID NO: 4780175 - DNA, 25 bp, Homo sapien
ttcccaggaggttccatgcagatcc

SEQ ID NO: 4780176 - DNA, 25 bp, Homo sapien
tgagcactgcccataaagaataagc

SEQ ID NO: 4780177 - DNA, 25 bp, Homo sapien
acaggctaacttgggagggcaacca

SEQ ID NO: 4780178 - DNA, 25 bp, Homo sapien
ggaagttcaccaaccagagatgcac

SEQ ID NO: 4780179 - DNA, 25 bp, Homo sapien
gcttggatggttgcctgctctcaaa

SEQ ID NO: 4780180 - DNA, 25 bp, Homo sapien
cagaaattatcgagacagcatcacc

SEQ ID NO: 4780181 - DNA, 25 bp, Homo sapien
caggcttttccagacagacaggaaa

SEQ ID NO: 4780182 - DNA, 25 bp, Homo sapien
tatgaattactgaatagatcccctc

SEQ ID NO: 4780183 - DNA, 25 bp, Homo sapien
tttatcaagtgcaccaagaacagct

SEQ ID NO: 4780184 - DNA, 25 bp, Homo sapien
gatcaaaaagcatttggtgatttct

SEQ ID NO: 4780185 - DNA, 25 bp, Homo sapien
atcaaaaagcatttggtgatttctc

SEQ ID NO: 4780186 - DNA, 25 bp, Homo sapien
agatcaaaaagcatttggtgatttc

SEQ ID NO: 4780187 - DNA, 25 bp, Homo sapien
cagatcaaaaagcatttggtgattt

SEQ ID NO: 4780188 - DNA, 25 bp, Homo sapien
gacacaacattagcttgttcagaaa

SEQ ID NO: 4780189 - DNA, 25 bp, Homo sapien
gatgctaccttaaagacatgaggga

SEQ ID NO: 4780190 - DNA, 25 bp, Homo sapien
ttgaacagcccaaatcaatcaaagc

SEQ ID NO: 4780191 - DNA, 25 bp, Homo sapien
caaagtgttgcttctcgacacaaca

SEQ ID NO: 4780192 - DNA, 25 bp, Homo sapien
gaccctagagacaccaaggacccca

SEQ ID NO: 4780193 - DNA, 25 bp, Homo sapien
taagaccctagagacaccaaggacc

SEQ ID NO: 4780194 - DNA, 25 bp, Homo sapien
ttaagaccctagagacaccaaggac

SEQ ID NO: 4780195 - DNA, 25 bp, Homo sapien
ctcagaagccggcttgatcctcagc

SEQ ID NO: 4780196 - DNA, 25 bp, Homo sapien
agggccagtcatatgaacaggctca

SEQ ID NO: 4780197 - DNA, 25 bp, Homo sapien
tcagaagccggcttgatcctcagca

SEQ ID NO: 4780198 - DNA, 25 bp, Homo sapien
gtcatatgaacaggctcagaagccg

SEQ ID NO: 4780199 - DNA, 25 bp, Homo sapien
gcctcaatggcacgctttgcttcct

SEQ ID NO: 4780200 - DNA, 25 bp, Homo sapien
tagaaaaggcggtcctggcaaagct

SEQ ID NO: 4780201 - DNA, 25 bp, Homo sapien
ttccggcggtacacagaccgaggat

SEQ ID NO: 4780202 - DNA, 25 bp, Homo sapien
catgcgctatgtctacagtaaagta

SEQ ID NO: 4780203 - DNA, 25 bp, Homo sapien
gaactactgtagcaagtagacaagg

SEQ ID NO: 4780204 - DNA, 25 bp, Homo sapien
ctgccaatgctttactgacagcctg

SEQ ID NO: 4780205 - DNA, 25 bp, Homo sapien
tatttgaagactctaagaactactg

SEQ ID NO: 4780206 - DNA, 25 bp, Homo sapien
tcacatgatggtactgcaaaaatat

SEQ ID NO: 4780207 - DNA, 25 bp, Homo sapien
gctgcggggagctccatcagccctt

SEQ ID NO: 4780208 - DNA, 25 bp, Homo sapien
ccaaggtccatctcggcatgaggag

SEQ ID NO: 4780209 - DNA, 25 bp, Homo sapien
ccatctcggcatgaggagtaaaccg

SEQ ID NO: 4780210 - DNA, 25 bp, Homo sapien
aggagtaaaccgcacttctaaagtg

SEQ ID NO: 4780211 - DNA, 25 bp, Homo sapien
tcttctgccacgctggaactctgat

SEQ ID NO: 4780212 - DNA, 25 bp, Homo sapien
tatctccctgtgcataggaaatgct

SEQ ID NO: 4780213 - DNA, 25 bp, Homo sapien
gatcacgtcttgattccaaaccaaa

SEQ ID NO: 4780214 - DNA, 25 bp, Homo sapien
tctctgggcaatatgggccaatttg

SEQ ID NO: 4780215 - DNA, 25 bp, Homo sapien
tatggtggggttgtggctcatcaca

SEQ ID NO: 4780216 - DNA, 25 bp, Homo sapien
atggtggggttgtggctcatcacac

SEQ ID NO: 4780217 - DNA, 25 bp, Homo sapien
ctatggtggggttgtggctcatcac

SEQ ID NO: 4780218 - DNA, 25 bp, Homo sapien
gcttgatgtctagtacgggtgtgcc

SEQ ID NO: 4780219 - DNA, 25 bp, Homo sapien
cacattttgcggtgagtcatactca

SEQ ID NO: 4780220 - DNA, 25 bp, Homo sapien
taaattaaagtctgctaaaggctcc

SEQ ID NO: 4780221 - DNA, 25 bp, Homo sapien
caattccagaaaggtatatagctcc

SEQ ID NO: 4780222 - DNA, 25 bp, Homo sapien
ttgaggccctcaaaagcacaccttt

SEQ ID NO: 4780223 - DNA, 25 bp, Homo sapien
gaagaacagtgcaaacacttggaga

SEQ ID NO: 4780224 - DNA, 25 bp, Homo sapien
cagtccccatagagaagcctgtgca

SEQ ID NO: 4780225 - DNA, 25 bp, Homo sapien
taacactgtctgcttacgcctcact

SEQ ID NO: 4780226 - DNA, 25 bp, Homo sapien
cacggtagggtagtgacctgcttag

SEQ ID NO: 4780227 - DNA, 25 bp, Homo sapien
gtcttcatccctagacgcaggcagg

SEQ ID NO: 4780228 - DNA, 25 bp, Homo sapien
ctagagcgctttccccacggtaggg

SEQ ID NO: 4780229 - DNA, 25 bp, Homo sapien
ttagagtcttcatccctagacgcag

SEQ ID NO: 4780230 - DNA, 25 bp, Homo sapien
agatgacctagttaagctgtgccca

SEQ ID NO: 4780231 - DNA, 25 bp, Homo sapien
tctagtgagacctaagcagatgacc

SEQ ID NO: 4780232 - DNA, 25 bp, Homo sapien
taggaagcccacatagcaaggaact

SEQ ID NO: 4780233 - DNA, 25 bp, Homo sapien
tatggcaaaagaggtatgatgtccc

SEQ ID NO: 4780234 - DNA, 25 bp, Homo sapien
ctgcagccatgatatctgtccattt

SEQ ID NO: 4780235 - DNA, 25 bp, Homo sapien
cactgcagccatgatatctgtccat

SEQ ID NO: 4780236 - DNA, 25 bp, Homo sapien
gcactgcagccatgatatctgtcca

SEQ ID NO: 4780237 - DNA, 25 bp, Homo sapien
agcactgcagccatgatatctgtcc

SEQ ID NO: 4780238 - DNA, 25 bp, Homo sapien
ccagtggtgaatgctgtttatttta

SEQ ID NO: 4780239 - DNA, 25 bp, Homo sapien
gttaacatcattggtactcgtctga

SEQ ID NO: 4780240 - DNA, 25 bp, Homo sapien
cgtctgaataaacagccagtggtga

SEQ ID NO: 4780241 - DNA, 25 bp, Homo sapien
gtggttctcaggagttaacatcatt

SEQ ID NO: 4780242 - DNA, 25 bp, Homo sapien
aggctgcacttttgccttacagctc

SEQ ID NO: 4780243 - DNA, 25 bp, Homo sapien
cagctcaaatgaccatttttgtgaa

SEQ ID NO: 4780244 - DNA, 25 bp, Homo sapien
cagggtcagtcctattgcattggga

SEQ ID NO: 4780245 - DNA, 25 bp, Homo sapien
cattgggacgatgagggctccttgt

SEQ ID NO: 4780246 - DNA, 25 bp, Homo sapien
ttccatttggcatgactagaccttc

SEQ ID NO: 4780247 - DNA, 25 bp, Homo sapien
ttttccatttggcatgactagacct

SEQ ID NO: 4780248 - DNA, 25 bp, Homo sapien
tctttttccatttggcatgactaga

SEQ ID NO: 4780249 - DNA, 25 bp, Homo sapien
ctttttccatttggcatgactagac

SEQ ID NO: 4780250 - DNA, 25 bp, Homo sapien
tgtcttggagtaccattcttggccg

SEQ ID NO: 4780251 - DNA, 25 bp, Homo sapien
tctaatcctcaaacaggctcgagaa

SEQ ID NO: 4780252 - DNA, 25 bp, Homo sapien
aggcccatcaaggaatgttcaggat

SEQ ID NO: 4780253 - DNA, 25 bp, Homo sapien
tagccgactggctcagttaaaagat

SEQ ID NO: 4780254 - DNA, 25 bp, Homo sapien
gcgtggaaggtagacaccaagatat

SEQ ID NO: 4780255 - DNA, 25 bp, Homo sapien
tacagcgcaggatgcctctctatgg

SEQ ID NO: 4780256 - DNA, 25 bp, Homo sapien
catacgctatggcaaggaaacccct

SEQ ID NO: 4780257 - DNA, 25 bp, Homo sapien
taaacaggtcgtatagtacctcact

SEQ ID NO: 4780258 - DNA, 25 bp, Homo sapien
ctgtctccagagccggcttaacgca

SEQ ID NO: 4780259 - DNA, 25 bp, Homo sapien
gagccggcttaacgcagccgcacgg

SEQ ID NO: 4780260 - DNA, 25 bp, Homo sapien
gaggccccgactcctccaagccgcg

SEQ ID NO: 4780261 - DNA, 25 bp, Homo sapien
tcgctgtaggccgaggccccgactc

SEQ ID NO: 4780262 - DNA, 25 bp, Homo sapien
acgcattcaaccttccgcttccgct

SEQ ID NO: 4780263 - DNA, 25 bp, Homo sapien
ctgaggtgcccacccgacgcattca

SEQ ID NO: 4780264 - DNA, 25 bp, Homo sapien
ttccgcttccgctctccatgcctga

SEQ ID NO: 4780265 - DNA, 25 bp, Homo sapien
gctctccatgcctgacgcatgcgca

SEQ ID NO: 4780266 - DNA, 25 bp, Homo sapien
cagctacccaggagattgaggcggg

SEQ ID NO: 4780267 - DNA, 25 bp, Homo sapien
ccagctacccaggagattgaggcgg

SEQ ID NO: 4780268 - DNA, 25 bp, Homo sapien
aggatcgcttgagcccaggagtttg

SEQ ID NO: 4780269 - DNA, 25 bp, Homo sapien
gcttgagcccaggagtttgaggctg

SEQ ID NO: 4780270 - DNA, 25 bp, Homo sapien
tagtcacttatctgctcttaagacg

SEQ ID NO: 4780271 - DNA, 25 bp, Homo sapien
gcttccttatttgtctgttcccacc

SEQ ID NO: 4780272 - DNA, 25 bp, Homo sapien
gaaaactatatactccacaaaatgt

SEQ ID NO: 4780273 - DNA, 25 bp, Homo sapien
tgtatgtgttcagtcttagtcactt

SEQ ID NO: 4780274 - DNA, 25 bp, Homo sapien
tattaatgagcattgtcaaaagttt

SEQ ID NO: 4780275 - DNA, 25 bp, Homo sapien
actattaagctgtatgttccattgg

SEQ ID NO: 4780276 - DNA, 25 bp, Homo sapien
gttccattggaccacaactttatgg

SEQ ID NO: 4780277 - DNA, 25 bp, Homo sapien
gaaaatcacgcataaactattaagc

SEQ ID NO: 4780278 - DNA, 25 bp, Homo sapien
cagaattgctggtattcctggctct

SEQ ID NO: 4780279 - DNA, 25 bp, Homo sapien
atcaggacgctgtgttggttagagc

SEQ ID NO: 4780280 - DNA, 25 bp, Homo sapien
tcaggacgctgtgttggttagagct

SEQ ID NO: 4780281 - DNA, 25 bp, Homo sapien
gacgctgtgttggttagagctgctt

SEQ ID NO: 4780282 - DNA, 25 bp, Homo sapien
gctgtgttggttagagctgcttctc

SEQ ID NO: 4780283 - DNA, 25 bp, Homo sapien
gaaaccaactagcaccatgtttttg

SEQ ID NO: 4780284 - DNA, 25 bp, Homo sapien
tacttggaaaccaactagcaccatg

SEQ ID NO: 4780285 - DNA, 25 bp, Homo sapien
tcttcaaaactggtattacttggaa

SEQ ID NO: 4780286 - DNA, 25 bp, Homo sapien
tcagtgcacgtactgcttcacatgc

SEQ ID NO: 4780287 - DNA, 25 bp, Homo sapien
tgtctctgaggcaagtgaaattaaa

SEQ ID NO: 4780288 - DNA, 25 bp, Homo sapien
gagagctgaagttctcagttatgtc

SEQ ID NO: 4780289 - DNA, 25 bp, Homo sapien
ctacagtattgtacaaagagagctg

SEQ ID NO: 4780290 - DNA, 25 bp, Homo sapien
aactatggtctgatagactcagtcc

SEQ ID NO: 4780291 - DNA, 25 bp, Homo sapien
taacagggaatacccaggattgtca

SEQ ID NO: 4780292 - DNA, 25 bp, Homo sapien
gggagatgtacctaccttggtgcta

SEQ ID NO: 4780293 - DNA, 25 bp, Homo sapien
gaaagttgtaaatcactactctggg

SEQ ID NO: 4780294 - DNA, 25 bp, Homo sapien
caagacagacgttggttgcatgaaa

SEQ ID NO: 4780295 - DNA, 25 bp, Homo sapien
cctggtgtgctttaggatcctggcc

SEQ ID NO: 4780296 - DNA, 25 bp, Homo sapien
ctcagtagagaggtcttcaggcccc

SEQ ID NO: 4780297 - DNA, 25 bp, Homo sapien
ggagccagatcttctcgtttagcca

SEQ ID NO: 4780298 - DNA, 25 bp, Homo sapien
tatgcttgaagagagcatcctgcca

SEQ ID NO: 4780299 - DNA, 25 bp, Homo sapien
cctgttctctgctgcttgcgttttt

SEQ ID NO: 4780300 - DNA, 25 bp, Homo sapien
cagacacatgttggcatgtttcaga

SEQ ID NO: 4780301 - DNA, 25 bp, Homo sapien
tactttggttatgctcccaggtggc

SEQ ID NO: 4780302 - DNA, 25 bp, Homo sapien
ctctataggtgccagtgctttctcc

SEQ ID NO: 4780303 - DNA, 25 bp, Homo sapien
ccaggacttcgtggcattgatacca

SEQ ID NO: 4780304 - DNA, 25 bp, Homo sapien
gaaagaacagaattagtgtcagcag

SEQ ID NO: 4780305 - DNA, 25 bp, Homo sapien
gcacaagtatcatgaactagtcact

SEQ ID NO: 4780306 - DNA, 25 bp, Homo sapien
tgtcagcagtggtactacagaattc

SEQ ID NO: 4780307 - DNA, 25 bp, Homo sapien
caggagccttcttggtgagggtagt

SEQ ID NO: 4780308 - DNA, 25 bp, Homo sapien
ggagccttcttggtgagggtagtgc

SEQ ID NO: 4780309 - DNA, 25 bp, Homo sapien
agccttcttggtgagggtagtgcat

SEQ ID NO: 4780310 - DNA, 25 bp, Homo sapien
gagccttcttggtgagggtagtgca

SEQ ID NO: 4780311 - DNA, 25 bp, Homo sapien
aatcgagtttctagacctggcacag

SEQ ID NO: 4780312 - DNA, 25 bp, Homo sapien
cctgcaggtggatgctgtatatggc

SEQ ID NO: 4780313 - DNA, 25 bp, Homo sapien
tagagtggcattctggtttatacac

SEQ ID NO: 4780314 - DNA, 25 bp, Homo sapien
cgtgcgtgcgtgtgttatagcatat

SEQ ID NO: 4780315 - DNA, 25 bp, Homo sapien
ggttgccgttaagttgggcacagga

SEQ ID NO: 4780316 - DNA, 25 bp, Homo sapien
aggagggaagtgcaagctgccactt

SEQ ID NO: 4780317 - DNA, 25 bp, Homo sapien
ccacttgatggagagctgcgcaagg

SEQ ID NO: 4780318 - DNA, 25 bp, Homo sapien
tggagagctgcgcaaggctggtgtt

SEQ ID NO: 4780319 - DNA, 25 bp, Homo sapien
ccaaatagccattgtgatgtttcct

SEQ ID NO: 4780320 - DNA, 25 bp, Homo sapien
caaatagccattgtgatgtttcctt

SEQ ID NO: 4780321 - DNA, 25 bp, Homo sapien
cttcttgatgagggtcaggtgtctg

SEQ ID NO: 4780322 - DNA, 25 bp, Homo sapien
ttgatgagggtcaggtgtctgatgg

SEQ ID NO: 4780323 - DNA, 25 bp, Homo sapien
atggtgcttcaaatgagattggtcc

SEQ ID NO: 4780324 - DNA, 25 bp, Homo sapien
gatggtgcttcaaatgagattggtc

SEQ ID NO: 4780325 - DNA, 25 bp, Homo sapien
ttttggtctgacttccacaagcagc

SEQ ID NO: 4780326 - DNA, 25 bp, Homo sapien
caataccttcctgctattttggtct

SEQ ID NO: 4780327 - DNA, 25 bp, Homo sapien
ctgcaataccttcctgctattttgg

SEQ ID NO: 4780328 - DNA, 25 bp, Homo sapien
attttggtctgacttccacaagcag

SEQ ID NO: 4780329 - DNA, 25 bp, Homo sapien
ggttggaccacaactgcaggctaat

SEQ ID NO: 4780330 - DNA, 25 bp, Homo sapien
atatcaaaaacatctaacacttaaa

SEQ ID NO: 4780331 - DNA, 25 bp, Homo sapien
agttttatctggttggaccacaact

SEQ ID NO: 4780332 - DNA, 25 bp, Homo sapien
tgtcacttgacttcccgcctaaaag

SEQ ID NO: 4780333 - DNA, 25 bp, Homo sapien
ccttagagagcagatacagctcctg

SEQ ID NO: 4780334 - DNA, 25 bp, Homo sapien
ccacagtatgatccggtgggaggct

SEQ ID NO: 4780335 - DNA, 25 bp, Homo sapien
cttagagagcagatacagctcctga

SEQ ID NO: 4780336 - DNA, 25 bp, Homo sapien
gtctccacagtatgatccggtggga

SEQ ID NO: 4780337 - DNA, 25 bp, Homo sapien
cagtctggcatttaagtctaacttc

SEQ ID NO: 4780338 - DNA, 25 bp, Homo sapien
cttctggttgttcagtcttctgtca

SEQ ID NO: 4780339 - DNA, 25 bp, Homo sapien
cctgttttgccgtgaatctttctaa

SEQ ID NO: 4780340 - DNA, 25 bp, Homo sapien
cataacttctggttgttcagtcttc

SEQ ID NO: 4780341 - DNA, 25 bp, Homo sapien
taacacccacagtacctatcttcat

SEQ ID NO: 4780342 - DNA, 25 bp, Homo sapien
ctatagaggcagcaagccttgcagc

SEQ ID NO: 4780343 - DNA, 25 bp, Homo sapien
agtctatagaggcagcaagccttgc

SEQ ID NO: 4780344 - DNA, 25 bp, Homo sapien
gacagggacatttagtctacagagg

SEQ ID NO: 4780345 - DNA, 25 bp, Homo sapien
gagtctatagaggcagcaagccttg

SEQ ID NO: 4780346 - DNA, 25 bp, Homo sapien
taatgctgctaccatgggattggaa

SEQ ID NO: 4780347 - DNA, 25 bp, Homo sapien
catcagtcaatcagttgggaaatga

SEQ ID NO: 4780348 - DNA, 25 bp, Homo sapien
actcagcccagtgtgataattttaa

SEQ ID NO: 4780349 - DNA, 25 bp, Homo sapien
catactgccttggaaagaccctgcc

SEQ ID NO: 4780350 - DNA, 25 bp, Homo sapien
cacactggcctatgtggataatcca

SEQ ID NO: 4780351 - DNA, 25 bp, Homo sapien
taagcaccttgtgatcacactggcc

SEQ ID NO: 4780352 - DNA, 25 bp, Homo sapien
cattcctgcgtttatggctcccttc

SEQ ID NO: 4780353 - DNA, 25 bp, Homo sapien
ccttcgaggccagcattcaagtcct

SEQ ID NO: 4780354 - DNA, 25 bp, Homo sapien
caccggctgcgtaagaacggacagt

SEQ ID NO: 4780355 - DNA, 25 bp, Homo sapien
tatcctgtgagctatgtaccctagg

SEQ ID NO: 4780356 - DNA, 25 bp, Homo sapien
tggccataaagagaggacagagtct

SEQ ID NO: 4780357 - DNA, 25 bp, Homo sapien
gaaagagtccttcataccctccagt

SEQ ID NO: 4780358 - DNA, 25 bp, Homo sapien
tgccgcgccgcgtcgccggtttaag

SEQ ID NO: 4780359 - DNA, 25 bp, Homo sapien
ggtagtgagcccagcgctgcgctcc

SEQ ID NO: 4780360 - DNA, 25 bp, Homo sapien
gcgtcgccggtttaagcgcagtgca

SEQ ID NO: 4780361 - DNA, 25 bp, Homo sapien
gggcggcggtagtgagcccagcgct

SEQ ID NO: 4780362 - DNA, 25 bp, Homo sapien
tgagaccagtgggagttaggtaccc

SEQ ID NO: 4780363 - DNA, 25 bp, Homo sapien
aaagtgttttcgcacagaggcgtca

SEQ ID NO: 4780364 - DNA, 25 bp, Homo sapien
cacttgggagagttgatgaggcctt

SEQ ID NO: 4780365 - DNA, 25 bp, Homo sapien
gatggcattgtcagctgttacacag

SEQ ID NO: 4780366 - DNA, 25 bp, Homo sapien
tgtcccatggttgaccttaatgatt

SEQ ID NO: 4780367 - DNA, 25 bp, Homo sapien
gcagtgtcccatggttgaccttaat

SEQ ID NO: 4780368 - DNA, 25 bp, Homo sapien
tacagcagtgtcccatggttgacct

SEQ ID NO: 4780369 - DNA, 25 bp, Homo sapien
cagcagtgtcccatggttgacctta

SEQ ID NO: 4780370 - DNA, 25 bp, Homo sapien
aaatgagaagacactgacatgcagt

SEQ ID NO: 4780371 - DNA, 25 bp, Homo sapien
caccatggaaattggaggtcttgtc

SEQ ID NO: 4780372 - DNA, 25 bp, Homo sapien
tgaacagtgctagaatacaccatat

SEQ ID NO: 4780373 - DNA, 25 bp, Homo sapien
catgcagtagctagatataaaccac

SEQ ID NO: 4780374 - DNA, 25 bp, Homo sapien
gcacctcattaaccacgcatctggg

SEQ ID NO: 4780375 - DNA, 25 bp, Homo sapien
aagccaagcagttccttactgtggc

SEQ ID NO: 4780376 - DNA, 25 bp, Homo sapien
tgtcgctctgttagaagcacctcat

SEQ ID NO: 4780377 - DNA, 25 bp, Homo sapien
tccagtaaactgaacatgtcgctct

SEQ ID NO: 4780378 - DNA, 25 bp, Homo sapien
aggaagcacctgactcagatgccga

SEQ ID NO: 4780379 - DNA, 25 bp, Homo sapien
gccccagcttacctacttggatggc

SEQ ID NO: 4780380 - DNA, 25 bp, Homo sapien
tggctatgaccgagaggaccaggaa

SEQ ID NO: 4780381 - DNA, 25 bp, Homo sapien
tgccgaggtggatggtgtggatgaa

SEQ ID NO: 4780382 - DNA, 25 bp, Homo sapien
ggtgaagaagaggagtttgatgaag

SEQ ID NO: 4780383 - DNA, 25 bp, Homo sapien
cgaggacgatgaggatggtgaagaa

SEQ ID NO: 4780384 - DNA, 25 bp, Homo sapien
ggaagacgaggacgatgaggatggt

SEQ ID NO: 4780385 - DNA, 25 bp, Homo sapien
aagacgaggacgatgaggatggtga

SEQ ID NO: 4780386 - DNA, 25 bp, Homo sapien
gaagatgaagatgaggatgaggatg

SEQ ID NO: 4780387 - DNA, 25 bp, Homo sapien
gatgaagaagatgaagatgaggatg

SEQ ID NO: 4780388 - DNA, 25 bp, Homo sapien
atgaagaagatgaagatgaggatga

SEQ ID NO: 4780389 - DNA, 25 bp, Homo sapien
gatgaagatgaggatgaggatgaag

SEQ ID NO: 4780390 - DNA, 25 bp, Homo sapien
ggtagctgtgatacaaaccccagga

SEQ ID NO: 4780391 - DNA, 25 bp, Homo sapien
gagtcaaccgtctgtggctaccagt

SEQ ID NO: 4780392 - DNA, 25 bp, Homo sapien
caagcttgtggacttcaccccaaca

SEQ ID NO: 4780393 - DNA, 25 bp, Homo sapien
tgattaagaccccagatgacctgca

SEQ ID NO: 4780394 - DNA, 25 bp, Homo sapien
caagtcacagtctctatggagcccc

SEQ ID NO: 4780395 - DNA, 25 bp, Homo sapien
tttggcaaaccttcaatacattgta

SEQ ID NO: 4780396 - DNA, 25 bp, Homo sapien
taaattttagcttatagctgctgga

SEQ ID NO: 4780397 - DNA, 25 bp, Homo sapien
tccccaaccataaggccattttggc

SEQ ID NO: 4780398 - DNA, 25 bp, Homo sapien
tgcggctggaggacagttgaggcat

SEQ ID NO: 4780399 - DNA, 25 bp, Homo sapien
cttgttggtaaactgggagcagctg

SEQ ID NO: 4780400 - DNA, 25 bp, Homo sapien
ttgttggtaaactgggagcagctgc

SEQ ID NO: 4780401 - DNA, 25 bp, Homo sapien
cagctgcggctggaggacagttgag

SEQ ID NO: 4780402 - DNA, 25 bp, Homo sapien
tgcagcagcctggatgcatctcaag

SEQ ID NO: 4780403 - DNA, 25 bp, Homo sapien
tgaactattgatgcgtgcagcagcc

SEQ ID NO: 4780404 - DNA, 25 bp, Homo sapien
aagggaacatactgtacgattctgc

SEQ ID NO: 4780405 - DNA, 25 bp, Homo sapien
catctcaaggaaatgatgctgagtg

SEQ ID NO: 4780406 - DNA, 25 bp, Homo sapien
caaacgaggctatccatgggaccca

SEQ ID NO: 4780407 - DNA, 25 bp, Homo sapien
tgtgggcacgtgttgtccaccctca

SEQ ID NO: 4780408 - DNA, 25 bp, Homo sapien
tttactgggaccctctaagaaggca

SEQ ID NO: 4780409 - DNA, 25 bp, Homo sapien
cattaaggcagggtagtgtttctcc

SEQ ID NO: 4780410 - DNA, 25 bp, Homo sapien
gcagctgaagcttgcaaccccagca

SEQ ID NO: 4780411 - DNA, 25 bp, Homo sapien
gaggcggcaaaatgaggcgcccctt

SEQ ID NO: 4780412 - DNA, 25 bp, Homo sapien
tagggctgaaagttaggatcttcca

SEQ ID NO: 4780413 - DNA, 25 bp, Homo sapien
ttttctaaatgtccactgggtggcg

SEQ ID NO: 4780414 - DNA, 25 bp, Homo sapien
tcacttttaagtaggcagcgtgctt

SEQ ID NO: 4780415 - DNA, 25 bp, Homo sapien
ttcgccaagaattgaaatagcccct

SEQ ID NO: 4780416 - DNA, 25 bp, Homo sapien
gctttcaagttgctgagcgtccctc

SEQ ID NO: 4780417 - DNA, 25 bp, Homo sapien
cagccatggatccttatgtagaggc

SEQ ID NO: 4780418 - DNA, 25 bp, Homo sapien
tcctaggactgaaacaggtcatgat

SEQ ID NO: 4780419 - DNA, 25 bp, Homo sapien
gcagtgggacatgatcgtgtaaagt

SEQ ID NO: 4780420 - DNA, 25 bp, Homo sapien
cttgagtttgagaccgcagtgggac

SEQ ID NO: 4780421 - DNA, 25 bp, Homo sapien
tatggtggtgcattactgtggcccc

SEQ ID NO: 4780422 - DNA, 25 bp, Homo sapien
gcttcttgcagtgtaccagcgcata

SEQ ID NO: 4780423 - DNA, 25 bp, Homo sapien
aacctgcgggtcatctcggtgagca

SEQ ID NO: 4780424 - DNA, 25 bp, Homo sapien
caagtttatcagatcgtgaagcccc

SEQ ID NO: 4780425 - DNA, 25 bp, Homo sapien
gattactcaggtcgcccaatggtga

SEQ ID NO: 4780426 - DNA, 25 bp, Homo sapien
tgatcagtgaatgtgctcccacccg

SEQ ID NO: 4780427 - DNA, 25 bp, Homo sapien
ttctgggcatgaaacaggcatagcg

SEQ ID NO: 4780428 - DNA, 25 bp, Homo sapien
tcagtgcgtcttgtggagcgtgccc

SEQ ID NO: 4780429 - DNA, 25 bp, Homo sapien
gccaaggtgttggaacgtcacataa

SEQ ID NO: 4780430 - DNA, 25 bp, Homo sapien
tctagtgggcaagaaggtcctggtc

SEQ ID NO: 4780431 - DNA, 25 bp, Homo sapien
tgacagagaaactaaaacgtggcct

SEQ ID NO: 4780432 - DNA, 25 bp, Homo sapien
tgaaaattccggaaggcaccattct

SEQ ID NO: 4780433 - DNA, 25 bp, Homo sapien
caatggacatgctcaccgtgaaggt

SEQ ID NO: 4780434 - DNA, 25 bp, Homo sapien
gctgactactaccagaaggctgcgt

SEQ ID NO: 4780435 - DNA, 25 bp, Homo sapien
tgagagctggctgcacatgtccttt

SEQ ID NO: 4780436 - DNA, 25 bp, Homo sapien
gccaggcactgctttaggcacagag

SEQ ID NO: 4780437 - DNA, 25 bp, Homo sapien
taatacgatcttggatgggaacagg

SEQ ID NO: 4780438 - DNA, 25 bp, Homo sapien
aaaaatatctgcaagcaatttgcca

SEQ ID NO: 4780439 - DNA, 25 bp, Homo sapien
tgcaagcaatttgccatatcaataa

SEQ ID NO: 4780440 - DNA, 25 bp, Homo sapien
tatctgcaagcaatttgccatatca

SEQ ID NO: 4780441 - DNA, 25 bp, Homo sapien
gcaatttgccatatcaataaagaaa

SEQ ID NO: 4780442 - DNA, 25 bp, Homo sapien
caacatctggatctaagggtgctct

SEQ ID NO: 4780443 - DNA, 25 bp, Homo sapien
tctatttaaaccacgaggattcggc

SEQ ID NO: 4780444 - DNA, 25 bp, Homo sapien
tctcgcagagtaaccaggcactagg

SEQ ID NO: 4780445 - DNA, 25 bp, Homo sapien
taattttgggcagactagacaagcc

SEQ ID NO: 4780446 - DNA, 25 bp, Homo sapien
accttcaaagcactgtaggcgtgat

SEQ ID NO: 4780447 - DNA, 25 bp, Homo sapien
tgaaactagcctaggagaggaaacc

SEQ ID NO: 4780448 - DNA, 25 bp, Homo sapien
caaagcactgtaggcgtgattggtc

SEQ ID NO: 4780449 - DNA, 25 bp, Homo sapien
ttcaaagcactgtaggcgtgattgg

SEQ ID NO: 4780450 - DNA, 25 bp, Homo sapien
tagattaggcgagactgggcagctg

SEQ ID NO: 4780451 - DNA, 25 bp, Homo sapien
gaccagccacgctgatctaggtaga

SEQ ID NO: 4780452 - DNA, 25 bp, Homo sapien
taagaagcaggcagtaaggggacca

SEQ ID NO: 4780453 - DNA, 25 bp, Homo sapien
agggagagggccctaagaagcaggc

SEQ ID NO: 4780454 - DNA, 25 bp, Homo sapien
agcggctcctggaacgtggcgcgga

SEQ ID NO: 4780455 - DNA, 25 bp, Homo sapien
ccgcagggccgggtagagcggctcc

SEQ ID NO: 4780456 - DNA, 25 bp, Homo sapien
ctcctggaacgtggcgcggaaggta

SEQ ID NO: 4780457 - DNA, 25 bp, Homo sapien
ggcgcggaaggtatgcaggtggctc

SEQ ID NO: 4780458 - DNA, 25 bp, Homo sapien
aggaagacgccgagccggtcgaggt

SEQ ID NO: 4780459 - DNA, 25 bp, Homo sapien
ggctgcgctggccgtcgtggaaggc

SEQ ID NO: 4780460 - DNA, 25 bp, Homo sapien
tcacgtcgtagaaggcgaggacgcc

SEQ ID NO: 4780461 - DNA, 25 bp, Homo sapien
tcgtggaaggcccagtactcaaggt

SEQ ID NO: 4780462 - DNA, 25 bp, Homo sapien
ccgcggcgccgaagggaggcgtagg

SEQ ID NO: 4780463 - DNA, 25 bp, Homo sapien
cccgcggcgccgaagggaggcgtag

SEQ ID NO: 4780464 - DNA, 25 bp, Homo sapien
ccagcacttgccagagcgcgtcgaa

SEQ ID NO: 4780465 - DNA, 25 bp, Homo sapien
aggccgcagcgcaccgtcaggcgat

SEQ ID NO: 4780466 - DNA, 25 bp, Homo sapien
cagagcgcgtcgaaccgcagcacgg

SEQ ID NO: 4780467 - DNA, 25 bp, Homo sapien
ccggtggcgaagcagtcacgagcca

SEQ ID NO: 4780468 - DNA, 25 bp, Homo sapien
gcgcgtgcatcgtgtcaggatccag

SEQ ID NO: 4780469 - DNA, 25 bp, Homo sapien
cggacaggcgcaggcgcgcgtgcat

SEQ ID NO: 4780470 - DNA, 25 bp, Homo sapien
gcgcaggcgcgcgtgcatcgtgtca

SEQ ID NO: 4780471 - DNA, 25 bp, Homo sapien
aggcgcgcgtgcatcgtgtcaggat

SEQ ID NO: 4780472 - DNA, 25 bp, Homo sapien
ttggggatagtaaacaagaaggcac

SEQ ID NO: 4780473 - DNA, 25 bp, Homo sapien
gggatagtaaacaagaaggcacatg

SEQ ID NO: 4780474 - DNA, 25 bp, Homo sapien
tagtaaacaagaaggcacatgagga

SEQ ID NO: 4780475 - DNA, 25 bp, Homo sapien
gagtggatcccctttggggatagta

SEQ ID NO: 4780476 - DNA, 25 bp, Homo sapien
gatcaccattctttggtttccctct

SEQ ID NO: 4780477 - DNA, 25 bp, Homo sapien
ctctgttttgatattcactgtcccc

SEQ ID NO: 4780478 - DNA, 25 bp, Homo sapien
caacaccaggggcagtgatcaccat

SEQ ID NO: 4780479 - DNA, 25 bp, Homo sapien
accgtgctcggcctttaaatcagta

SEQ ID NO: 4780480 - DNA, 25 bp, Homo sapien
tgtattgttttattgcctttaataa

SEQ ID NO: 4780481 - DNA, 25 bp, Homo sapien
cttggtgctggaagggtctgagagc

SEQ ID NO: 4780482 - DNA, 25 bp, Homo sapien
tggaagggtctgagagctggcagtt

SEQ ID NO: 4780483 - DNA, 25 bp, Homo sapien
gggtctgagagctggcagtttatgc

SEQ ID NO: 4780484 - DNA, 25 bp, Homo sapien
ggcttggtgctggaagggtctgaga

SEQ ID NO: 4780485 - DNA, 25 bp, Homo sapien
ataatctcgcccaagagccaggcag

SEQ ID NO: 4780486 - DNA, 25 bp, Homo sapien
tgagcgcccggagcttatgcaagca

SEQ ID NO: 4780487 - DNA, 25 bp, Homo sapien
ccacacaactggagattcgcataat

SEQ ID NO: 4780488 - DNA, 25 bp, Homo sapien
tgaggcgcgaacaactactggatcc

SEQ ID NO: 4780489 - DNA, 25 bp, Homo sapien
gcatggaaaagggaggagccgtgtc

SEQ ID NO: 4780490 - DNA, 25 bp, Homo sapien
acagaggcatggaaaagggaggagc

SEQ ID NO: 4780491 - DNA, 25 bp, Homo sapien
gaaacagaggcatggaaaagggagg

SEQ ID NO: 4780492 - DNA, 25 bp, Homo sapien
gagaggcgactgcattatggtctcc

SEQ ID NO: 4780493 - DNA, 25 bp, Homo sapien
tgtatccacttcatgagcaccctct

SEQ ID NO: 4780494 - DNA, 25 bp, Homo sapien
gggtccatgtatccacttcatgagc

SEQ ID NO: 4780495 - DNA, 25 bp, Homo sapien
caaggaggggggtccatgtatccac

SEQ ID NO: 4780496 - DNA, 25 bp, Homo sapien
tgagcaccctctagcaggacatggg

SEQ ID NO: 4780497 - DNA, 25 bp, Homo sapien
gcgaatgtccaatggcgtctgtaat

SEQ ID NO: 4780498 - DNA, 25 bp, Homo sapien
ttccacgaggcccttaaagaagctc

SEQ ID NO: 4780499 - DNA, 25 bp, Homo sapien
atgtactctccacggcttccacgag

SEQ ID NO: 4780500 - DNA, 25 bp, Homo sapien
agaagctcttgacgggctcaaagga

SEQ ID NO: 4780501 - DNA, 25 bp, Homo sapien
ctgaagcctctggacaggatcgggc

SEQ ID NO: 4780502 - DNA, 25 bp, Homo sapien
aagcctctggacaggatcgggctcc

SEQ ID NO: 4780503 - DNA, 25 bp, Homo sapien
cctctggacaggatcgggctcctgg

SEQ ID NO: 4780504 - DNA, 25 bp, Homo sapien
tgaagcctctggacaggatcgggct

SEQ ID NO: 4780505 - DNA, 25 bp, Homo sapien
gttggagagatcattcatgatgtca

SEQ ID NO: 4780506 - DNA, 25 bp, Homo sapien
ctgttggagagatcattcatgatgt

SEQ ID NO: 4780507 - DNA, 25 bp, Homo sapien
tgttggagagatcattcatgatgtc

SEQ ID NO: 4780508 - DNA, 25 bp, Homo sapien
agggtaagctgcgtgtttttatcaa

SEQ ID NO: 4780509 - DNA, 25 bp, Homo sapien
ctggagggtaagctgcgtgttttta

SEQ ID NO: 4780510 - DNA, 25 bp, Homo sapien
ggagggtaagctgcgtgtttttatc

SEQ ID NO: 4780511 - DNA, 25 bp, Homo sapien
gtaagctgcgtgtttttatcaatga

SEQ ID NO: 4780512 - DNA, 25 bp, Homo sapien
agttcagtgaatttccccttcagcc

SEQ ID NO: 4780513 - DNA, 25 bp, Homo sapien
taatctgagttcagtgaatttcccc

SEQ ID NO: 4780514 - DNA, 25 bp, Homo sapien
tcctcttcgtcaagtagtaatctga

SEQ ID NO: 4780515 - DNA, 25 bp, Homo sapien
caagtagtaatctgagttcagtgaa

SEQ ID NO: 4780516 - DNA, 25 bp, Homo sapien
ttcagaggctagctcataccacagg

SEQ ID NO: 4780517 - DNA, 25 bp, Homo sapien
tgtttcctatccaatgctccaggca

SEQ ID NO: 4780518 - DNA, 25 bp, Homo sapien
ggataggttcagaggctagctcata

SEQ ID NO: 4780519 - DNA, 25 bp, Homo sapien
tttcctatccaatgctccaggcaga

SEQ ID NO: 4780520 - DNA, 25 bp, Homo sapien
gacgtgatcctaggtcactgcagtc

SEQ ID NO: 4780521 - DNA, 25 bp, Homo sapien
cacagtgacgtgatcctaggtcact

SEQ ID NO: 4780522 - DNA, 25 bp, Homo sapien
cagagatttgccacaaagcaaagga

SEQ ID NO: 4780523 - DNA, 25 bp, Homo sapien
tgggctaattcctccaagagactgg

SEQ ID NO: 4780524 - DNA, 25 bp, Homo sapien
agagactggcagatgacactaagga

SEQ ID NO: 4780525 - DNA, 25 bp, Homo sapien
aagcaaaggaaaccggagctcaggg

SEQ ID NO: 4780526 - DNA, 25 bp, Homo sapien
ccatattgggggtcccttttgtctg

SEQ ID NO: 4780527 - DNA, 25 bp, Homo sapien
catattgggggtcccttttgtctgg

SEQ ID NO: 4780528 - DNA, 25 bp, Homo sapien
atctgggttatgttgtcaatgtgct

SEQ ID NO: 4780529 - DNA, 25 bp, Homo sapien
ttcttgattgccagctgctttaaac

SEQ ID NO: 4780530 - DNA, 25 bp, Homo sapien
cttgattgccagctgctttaaacat

SEQ ID NO: 4780531 - DNA, 25 bp, Homo sapien
gggttatgttgtcaatgtgctgctg

SEQ ID NO: 4780532 - DNA, 25 bp, Homo sapien
tattcttttccaatggaggcatctg

SEQ ID NO: 4780533 - DNA, 25 bp, Homo sapien
gctgggactaggacatctctgatcc

SEQ ID NO: 4780534 - DNA, 25 bp, Homo sapien
tcggaggtccacatcaggtatgcct

SEQ ID NO: 4780535 - DNA, 25 bp, Homo sapien
aatcttgatttgcaccccttcctca

SEQ ID NO: 4780536 - DNA, 25 bp, Homo sapien
tgcttttccagcctttcaagtggga

SEQ ID NO: 4780537 - DNA, 25 bp, Homo sapien
acttgcttttccagcctttcaagtg

SEQ ID NO: 4780538 - DNA, 25 bp, Homo sapien
tgtgacttgcttttccagcctttca

SEQ ID NO: 4780539 - DNA, 25 bp, Homo sapien
ctaggacaagtcttgcctgtgactt

SEQ ID NO: 4780540 - DNA, 25 bp, Homo sapien
gccatggtggacacggtcaaggaca

SEQ ID NO: 4780541 - DNA, 25 bp, Homo sapien
cttccagcccaatggcagtgtggcg

SEQ ID NO: 4780542 - DNA, 25 bp, Homo sapien
cacggtcaaggacatctgggtacca

SEQ ID NO: 4780543 - DNA, 25 bp, Homo sapien
cagcccaatggcagtgtggcggatc

SEQ ID NO: 4780544 - DNA, 25 bp, Homo sapien
ttccaggttgtaacccgccactggc

SEQ ID NO: 4780545 - DNA, 25 bp, Homo sapien
gatggctttggctcgcctttgccct

SEQ ID NO: 4780546 - DNA, 25 bp, Homo sapien
tgaactttcggtcgaccgcttagac

SEQ ID NO: 4780547 - DNA, 25 bp, Homo sapien
tcctcggccgttatgcctgggctgg

SEQ ID NO: 4780548 - DNA, 25 bp, Homo sapien
gcccagcaccgggcaaagcgcgcac

SEQ ID NO: 4780549 - DNA, 25 bp, Homo sapien
gccacggtgcgcgcccagcaccggg

SEQ ID NO: 4780550 - DNA, 25 bp, Homo sapien
tggccacggtgcgcgcccagcaccg

SEQ ID NO: 4780551 - DNA, 25 bp, Homo sapien
gggtggccacggtgcgcgcccagca

SEQ ID NO: 4780552 - DNA, 25 bp, Homo sapien
acgcggtcgccatgctccgggcagc

SEQ ID NO: 4780553 - DNA, 25 bp, Homo sapien
gcagcggcgacagaagagctcagcc

SEQ ID NO: 4780554 - DNA, 25 bp, Homo sapien
agccgcatccctcgacaagctccga

SEQ ID NO: 4780555 - DNA, 25 bp, Homo sapien
gaagagctcagccacgcggtcgcca

SEQ ID NO: 4780556 - DNA, 25 bp, Homo sapien
gccggccgacccctaggaggatgac

SEQ ID NO: 4780557 - DNA, 25 bp, Homo sapien
cccaccagaaatgggaagctcctaa

SEQ ID NO: 4780558 - DNA, 25 bp, Homo sapien
ggaagctcctaatgagccagctagg

SEQ ID NO: 4780559 - DNA, 25 bp, Homo sapien
cctaatgagccagctaggagagggt

SEQ ID NO: 4780560 - DNA, 25 bp, Homo sapien
tgtgcagaggcataccgggaagctc

SEQ ID NO: 4780561 - DNA, 25 bp, Homo sapien
tgaagtctgcgtccctccataaggg

SEQ ID NO: 4780562 - DNA, 25 bp, Homo sapien
tagtgcatcagacgggagtgagccc

SEQ ID NO: 4780563 - DNA, 25 bp, Homo sapien
cagagagcagcttgttccagggtac

SEQ ID NO: 4780564 - DNA, 25 bp, Homo sapien
agacttttgctcttattgcccaggt

SEQ ID NO: 4780565 - DNA, 25 bp, Homo sapien
agagtgcagtggcacaatctcagct

SEQ ID NO: 4780566 - DNA, 25 bp, Homo sapien
tccggtttcaagcaattctcctgcc

SEQ ID NO: 4780567 - DNA, 25 bp, Homo sapien
ctcactgcaacccccgccttccggt

SEQ ID NO: 4780568 - DNA, 25 bp, Homo sapien
agaaaaacggcaccatgtcccactg

SEQ ID NO: 4780569 - DNA, 25 bp, Homo sapien
tctaaacctccccatggagccgagt

SEQ ID NO: 4780570 - DNA, 25 bp, Homo sapien
tgagaagttacagctcatcatgggc

SEQ ID NO: 4780571 - DNA, 25 bp, Homo sapien
actgcgcctggtgagactggtttca

SEQ ID NO: 4780572 - DNA, 25 bp, Homo sapien
tcgctgggtcaacagctcccggagc

SEQ ID NO: 4780573 - DNA, 25 bp, Homo sapien
ctctgagcccatccgcaagtttttg

SEQ ID NO: 4780574 - DNA, 25 bp, Homo sapien
gtttggcctggacctctcgctgggt

SEQ ID NO: 4780575 - DNA, 25 bp, Homo sapien
tctcctcctgttgccggtagaacat

SEQ ID NO: 4780576 - DNA, 25 bp, Homo sapien
gggcattcgaaaacgtcaaagccat

SEQ ID NO: 4780577 - DNA, 25 bp, Homo sapien
ggggcattcgaaaacgtcaaagcca

SEQ ID NO: 4780578 - DNA, 25 bp, Homo sapien
tggtggggggcattcgaaaacgtca

SEQ ID NO: 4780579 - DNA, 25 bp, Homo sapien
ggcattcgaaaacgtcaaagccatt

SEQ ID NO: 4780580 - DNA, 25 bp, Homo sapien
gccatggaattgaagataggtctct

SEQ ID NO: 4780581 - DNA, 25 bp, Homo sapien
gaggaagacctccagccatcttctg

SEQ ID NO: 4780582 - DNA, 25 bp, Homo sapien
ttctcctccaacagggaggaagacc

SEQ ID NO: 4780583 - DNA, 25 bp, Homo sapien
cttttctgtctgattcaagagccgg

SEQ ID NO: 4780584 - DNA, 25 bp, Homo sapien
agccaggcctaagggacaccaggat

SEQ ID NO: 4780585 - DNA, 25 bp, Homo sapien
caggcctaagggacaccaggattgg

SEQ ID NO: 4780586 - DNA, 25 bp, Homo sapien
cagagccaggcctaagggacaccag

SEQ ID NO: 4780587 - DNA, 25 bp, Homo sapien
ctcagagccaggcctaagggacacc

SEQ ID NO: 4780588 - DNA, 25 bp, Homo sapien
cttgctttgtaaggacagtcccacc

SEQ ID NO: 4780589 - DNA, 25 bp, Homo sapien
tgtgccaccctcagagtgaagcttg

SEQ ID NO: 4780590 - DNA, 25 bp, Homo sapien
ttggtttgtaggaacagcacggtgc

SEQ ID NO: 4780591 - DNA, 25 bp, Homo sapien
tgtgtgggaaatacagctacctgtg

SEQ ID NO: 4780592 - DNA, 25 bp, Homo sapien
tggagggtatatgtcctcttggtag

SEQ ID NO: 4780593 - DNA, 25 bp, Homo sapien
atatgtcctcttggtaggattctga

SEQ ID NO: 4780594 - DNA, 25 bp, Homo sapien
gagggtatatgtcctcttggtagga

SEQ ID NO: 4780595 - DNA, 25 bp, Homo sapien
ggtatatgtcctcttggtaggattc

SEQ ID NO: 4780596 - DNA, 25 bp, Homo sapien
aggacacgtcgagtcctctctttgg

SEQ ID NO: 4780597 - DNA, 25 bp, Homo sapien
tggttgtgatcagcttgtagaagcg

SEQ ID NO: 4780598 - DNA, 25 bp, Homo sapien
aagcggaagatctcgcaggaggaca

SEQ ID NO: 4780599 - DNA, 25 bp, Homo sapien
gctcgatgaggcttttggttgtgat

SEQ ID NO: 4780600 - DNA, 25 bp, Homo sapien
gcggtactcagtcaggtagctcagg

SEQ ID NO: 4780601 - DNA, 25 bp, Homo sapien
ctcaggtgaggcttgtcggcgctca

SEQ ID NO: 4780602 - DNA, 25 bp, Homo sapien
cgtagtagcggatgttgccatctcc

SEQ ID NO: 4780603 - DNA, 25 bp, Homo sapien
tctgtgggttataggagcggtactc

SEQ ID NO: 4780604 - DNA, 25 bp, Homo sapien
atgctggtgtccgcgtcatagaagg

SEQ ID NO: 4780605 - DNA, 25 bp, Homo sapien
agggaaacagcacgcccgaggagcc

SEQ ID NO: 4780606 - DNA, 25 bp, Homo sapien
ctggtgtccgcgtcatagaagggaa

SEQ ID NO: 4780607 - DNA, 25 bp, Homo sapien
ggtgtccgcgtcatagaagggaaac

SEQ ID NO: 4780608 - DNA, 25 bp, Homo sapien
ttgttccatcgggatgtgcctgtgg

SEQ ID NO: 4780609 - DNA, 25 bp, Homo sapien
gaaacagcactttgctggcccggtg

SEQ ID NO: 4780610 - DNA, 25 bp, Homo sapien
acaaggccacctgccggttgttcca

SEQ ID NO: 4780611 - DNA, 25 bp, Homo sapien
gcccggtgccctttgtagctggcct

SEQ ID NO: 4780612 - DNA, 25 bp, Homo sapien
gagaggatcacatcttggtgacagc

SEQ ID NO: 4780613 - DNA, 25 bp, Homo sapien
ggtcaataacccgaatcttgcggtc

SEQ ID NO: 4780614 - DNA, 25 bp, Homo sapien
ggtgacagctaatcgtactcatggg

SEQ ID NO: 4780615 - DNA, 25 bp, Homo sapien
gatgacagactcctttgtatccagg

SEQ ID NO: 4780616 - DNA, 25 bp, Homo sapien
taggccgtgaggttcctggtcagca

SEQ ID NO: 4780617 - DNA, 25 bp, Homo sapien
actctgcgcgcgtggcccacgagtt

SEQ ID NO: 4780618 - DNA, 25 bp, Homo sapien
tagtcatagccagcactgaagagga

SEQ ID NO: 4780619 - DNA, 25 bp, Homo sapien
tggcccacgagttccttcctgtagg

SEQ ID NO: 4780620 - DNA, 25 bp, Homo sapien
gatcttgatgggagccttcaaagca

SEQ ID NO: 4780621 - DNA, 25 bp, Homo sapien
gagaagactccccactgctagagga

SEQ ID NO: 4780622 - DNA, 25 bp, Homo sapien
cacccgcaacactgaagcagagaag

SEQ ID NO: 4780623 - DNA, 25 bp, Homo sapien
aacaccccataaattcactgtgggc

SEQ ID NO: 4780624 - DNA, 25 bp, Homo sapien
cttgacatccaaaacgttgcctctg

SEQ ID NO: 4780625 - DNA, 25 bp, Homo sapien
gcatcttcagaacaggaggcgatct

SEQ ID NO: 4780626 - DNA, 25 bp, Homo sapien
atcaaaagggttccacttgacatcc

SEQ ID NO: 4780627 - DNA, 25 bp, Homo sapien
cgttgcctctgtgcccgcagacttt

SEQ ID NO: 4780628 - DNA, 25 bp, Homo sapien
tgctggctggtttgccaaagacatg

SEQ ID NO: 4780629 - DNA, 25 bp, Homo sapien
acggaacttggagctccggtactgg

SEQ ID NO: 4780630 - DNA, 25 bp, Homo sapien
taggcacggagtcgtagcagttctc

SEQ ID NO: 4780631 - DNA, 25 bp, Homo sapien
cacactcagtcacaactgcaatgaa

SEQ ID NO: 4780632 - DNA, 25 bp, Homo sapien
gggtggcgggagtgcacctgtctgt

SEQ ID NO: 4780633 - DNA, 25 bp, Homo sapien
cgggagtgcacctgtctgtggcagc

SEQ ID NO: 4780634 - DNA, 25 bp, Homo sapien
ggcgggagtgcacctgtctgtggca

SEQ ID NO: 4780635 - DNA, 25 bp, Homo sapien
agtgcacctgtctgtggcagctggt

SEQ ID NO: 4780636 - DNA, 25 bp, Homo sapien
tttatgaggattaaaagagtccagc

SEQ ID NO: 4780637 - DNA, 25 bp, Homo sapien
caggaggccagactgattgcccttc

SEQ ID NO: 4780638 - DNA, 25 bp, Homo sapien
tccaggagctccacctaaattgttt

SEQ ID NO: 4780639 - DNA, 25 bp, Homo sapien
ttaacatggagataaatgcctctgc

SEQ ID NO: 4780640 - DNA, 25 bp, Homo sapien
gtctctctccctagttacttcctta

SEQ ID NO: 4780641 - DNA, 25 bp, Homo sapien
caaagtagccggctaagggcaaagg

SEQ ID NO: 4780642 - DNA, 25 bp, Homo sapien
aacagcactacatatgtctctctcc

SEQ ID NO: 4780643 - DNA, 25 bp, Homo sapien
aaattaaatgccacaggcgaatccc

SEQ ID NO: 4780644 - DNA, 25 bp, Homo sapien
tcatgggccagcacatatactttgc

SEQ ID NO: 4780645 - DNA, 25 bp, Homo sapien
ggagacccaggtagcacttaagcct

SEQ ID NO: 4780646 - DNA, 25 bp, Homo sapien
tgagacgacgtctgaaggctccttt

SEQ ID NO: 4780647 - DNA, 25 bp, Homo sapien
acttaagcctgtgcgtcggagctgg

SEQ ID NO: 4780648 - DNA, 25 bp, Homo sapien
ctgggatctgatgggagaaactgct

SEQ ID NO: 4780649 - DNA, 25 bp, Homo sapien
gtgggttctgaacaagccccaggaa

SEQ ID NO: 4780650 - DNA, 25 bp, Homo sapien
tttgtgtgtccagagcaggaccagc

SEQ ID NO: 4780651 - DNA, 25 bp, Homo sapien
tatttaagggacctgaccactgccc

SEQ ID NO: 4780652 - DNA, 25 bp, Homo sapien
cttgatgactgccgcgcaggtggcg

SEQ ID NO: 4780653 - DNA, 25 bp, Homo sapien
atctttcccaggctaaggcatctga

SEQ ID NO: 4780654 - DNA, 25 bp, Homo sapien
gatctttcccaggctaaggcatctg

SEQ ID NO: 4780655 - DNA, 25 bp, Homo sapien
acatggtgatgggacacccagggct

SEQ ID NO: 4780656 - DNA, 25 bp, Homo sapien
gcttgtttacatgccaaagtgctct

SEQ ID NO: 4780657 - DNA, 25 bp, Homo sapien
catccctgggtaagtaagtgcctat

SEQ ID NO: 4780658 - DNA, 25 bp, Homo sapien
ggctttgcagcacacaatgtcccag

SEQ ID NO: 4780659 - DNA, 25 bp, Homo sapien
gctcccggtggaccatgcgcagctg

SEQ ID NO: 4780660 - DNA, 25 bp, Homo sapien
ctctccaggtactctgccttaagct

SEQ ID NO: 4780661 - DNA, 25 bp, Homo sapien
cggacacagctctgcgccgggatgc

SEQ ID NO: 4780662 - DNA, 25 bp, Homo sapien
cgtcctcgctggcacagccctcgga

SEQ ID NO: 4780663 - DNA, 25 bp, Homo sapien
tttcatgcggaaggggttcatgtca

SEQ ID NO: 4780664 - DNA, 25 bp, Homo sapien
tcatgtcattgaaggcgatgttcat

SEQ ID NO: 4780665 - DNA, 25 bp, Homo sapien
tgcggaaggggttcatgtcattgaa

SEQ ID NO: 4780666 - DNA, 25 bp, Homo sapien
ctgtttcatgcggaaggggttcatg

SEQ ID NO: 4780667 - DNA, 25 bp, Homo sapien
tgaagaagcgcaggtactggtagat

SEQ ID NO: 4780668 - DNA, 25 bp, Homo sapien
gtcttggtgaagaagcgcaggtact

SEQ ID NO: 4780669 - DNA, 25 bp, Homo sapien
tcttggtgaagaagcgcaggtactg

SEQ ID NO: 4780670 - DNA, 25 bp, Homo sapien
agcgcaggtactggtagatttccag

SEQ ID NO: 4780671 - DNA, 25 bp, Homo sapien
tggccaaggcatagcgaaacaccac

SEQ ID NO: 4780672 - DNA, 25 bp, Homo sapien
atggccaaggcatagcgaaacacca

SEQ ID NO: 4780673 - DNA, 25 bp, Homo sapien
ttcgtcccctcgtacaggaaggcat

SEQ ID NO: 4780674 - DNA, 25 bp, Homo sapien
gatgttgctaatgagactgtccgca

SEQ ID NO: 4780675 - DNA, 25 bp, Homo sapien
ccacgaggaaccagttgaaggtgac

SEQ ID NO: 4780676 - DNA, 25 bp, Homo sapien
cccagacccgaaggaggatgttgct

SEQ ID NO: 4780677 - DNA, 25 bp, Homo sapien
ggaagccagcgagagggcctgtcat

SEQ ID NO: 4780678 - DNA, 25 bp, Homo sapien
ctggaagccagcgagagggcctgtc

SEQ ID NO: 4780679 - DNA, 25 bp, Homo sapien
tggaagccagcgagagggcctgtca

SEQ ID NO: 4780680 - DNA, 25 bp, Homo sapien
cgtgttgcagtagtaatcagcgggc

SEQ ID NO: 4780681 - DNA, 25 bp, Homo sapien
cagtagtaatcagcgggcatgatgg

SEQ ID NO: 4780682 - DNA, 25 bp, Homo sapien
gatgccgtcagcgtgttgcagtagt

SEQ ID NO: 4780683 - DNA, 25 bp, Homo sapien
gtaatcagcgggcatgatggtctcc

SEQ ID NO: 4780684 - DNA, 25 bp, Homo sapien
tggagtgattacagaagccgtggcc

SEQ ID NO: 4780685 - DNA, 25 bp, Homo sapien
aaggcctggagtgattacagaagcc

SEQ ID NO: 4780686 - DNA, 25 bp, Homo sapien
gcctggagtgattacagaagccgtg

SEQ ID NO: 4780687 - DNA, 25 bp, Homo sapien
tggagtagtagggaaggcctggagt

SEQ ID NO: 4780688 - DNA, 25 bp, Homo sapien
cagcatttgtggtgagacaacgggc

SEQ ID NO: 4780689 - DNA, 25 bp, Homo sapien
cctgtggcagacgtttagtgtggca

SEQ ID NO: 4780690 - DNA, 25 bp, Homo sapien
caaggaggcttcgactgagaggcat

SEQ ID NO: 4780691 - DNA, 25 bp, Homo sapien
tagatgccatcaggtgttaaacacc

SEQ ID NO: 4780692 - DNA, 25 bp, Homo sapien
tggtgggatcgtgactccaatgcct

SEQ ID NO: 4780693 - DNA, 25 bp, Homo sapien
tcaggtccagctcaatctggcgggc

SEQ ID NO: 4780694 - DNA, 25 bp, Homo sapien
caggaagccgtactcatcatactta

SEQ ID NO: 4780695 - DNA, 25 bp, Homo sapien
tcatagtcgggcaccgtcaggaagc

SEQ ID NO: 4780696 - DNA, 25 bp, Homo sapien
cacgttagcaacaccttgcagagcc

SEQ ID NO: 4780697 - DNA, 25 bp, Homo sapien
tgcacgttagcaacaccttgcagag

SEQ ID NO: 4780698 - DNA, 25 bp, Homo sapien
gcaaaagtgcacgttagcaacacct

SEQ ID NO: 4780699 - DNA, 25 bp, Homo sapien
aaagtgcacgttagcaacaccttgc

SEQ ID NO: 4780700 - DNA, 25 bp, Homo sapien
tgtcagatgaggcctccccagcttc

SEQ ID NO: 4780701 - DNA, 25 bp, Homo sapien
ctgtcagatgaggcctccccagctt

SEQ ID NO: 4780702 - DNA, 25 bp, Homo sapien
gaccggccaggtacttgctttccac

SEQ ID NO: 4780703 - DNA, 25 bp, Homo sapien
gccttctcagaccggccaggtactt

SEQ ID NO: 4780704 - DNA, 25 bp, Homo sapien
cggccaggtacttgctttccacctg

SEQ ID NO: 4780705 - DNA, 25 bp, Homo sapien
tctcagaccggccaggtacttgctt

SEQ ID NO: 4780706 - DNA, 25 bp, Homo sapien
tgtgacctggtggatctcggagttg

SEQ ID NO: 4780707 - DNA, 25 bp, Homo sapien
gcagttctgggtccggtaagcttcc

SEQ ID NO: 4780708 - DNA, 25 bp, Homo sapien
cctggtggatctcggagttgaggaa

SEQ ID NO: 4780709 - DNA, 25 bp, Homo sapien
gaggaagcagttctgggtccggtaa

SEQ ID NO: 4780710 - DNA, 25 bp, Homo sapien
cactgggaaggttcaagcaaggacc

SEQ ID NO: 4780711 - DNA, 25 bp, Homo sapien
tgtgacaacactaagtacagggacc

SEQ ID NO: 4780712 - DNA, 25 bp, Homo sapien
tgcaagttgcccatccagtggaggg

SEQ ID NO: 4780713 - DNA, 25 bp, Homo sapien
caattctgctgggatggacattaca

SEQ ID NO: 4780714 - DNA, 25 bp, Homo sapien
caagcgatgctgcagcaaggatgac

SEQ ID NO: 4780715 - DNA, 25 bp, Homo sapien
tgactccgacgtggccaggttgatt

SEQ ID NO: 4780716 - DNA, 25 bp, Homo sapien
agcaaggatgactccgacgtggcca

SEQ ID NO: 4780717 - DNA, 25 bp, Homo sapien
tcacatgtgcaagcgatgctgcagc

SEQ ID NO: 4780718 - DNA, 25 bp, Homo sapien
acatcctcgtcagggtcacatgtgc

SEQ ID NO: 4780719 - DNA, 25 bp, Homo sapien
ggagggaacgaatgccccctgttga

SEQ ID NO: 4780720 - DNA, 25 bp, Homo sapien
gctggaagctccgatgcctgcccag

SEQ ID NO: 4780721 - DNA, 25 bp, Homo sapien
acgaatgccccctgttgactttatc

SEQ ID NO: 4780722 - DNA, 25 bp, Homo sapien
aaggcacagacatgccggacaggga

SEQ ID NO: 4780723 - DNA, 25 bp, Homo sapien
tcacataagataccctgcttccagc

SEQ ID NO: 4780724 - DNA, 25 bp, Homo sapien
cagtgggtggcgtcgggcagtacct

SEQ ID NO: 4780725 - DNA, 25 bp, Homo sapien
tcaaagcactggattgtgagccacc

SEQ ID NO: 4780726 - DNA, 25 bp, Homo sapien
cttgagtgctcgtcttggctcagaa

SEQ ID NO: 4780727 - DNA, 25 bp, Homo sapien
agaccgcagacatgagctccagccc

SEQ ID NO: 4780728 - DNA, 25 bp, Homo sapien
cagaccgcagacatgagctccagcc

SEQ ID NO: 4780729 - DNA, 25 bp, Homo sapien
accgcagacatgagctccagcccag

SEQ ID NO: 4780730 - DNA, 25 bp, Homo sapien
ccgcagacatgagctccagcccagc

SEQ ID NO: 4780731 - DNA, 25 bp, Homo sapien
tgctggctcaggaagtccctgttgg

SEQ ID NO: 4780732 - DNA, 25 bp, Homo sapien
tggcagcgtcggggcgcaaaggaga

SEQ ID NO: 4780733 - DNA, 25 bp, Homo sapien
ggaagtccctgttggcagcgtcggg

SEQ ID NO: 4780734 - DNA, 25 bp, Homo sapien
cttcaggtgctctatcttcccctgc

SEQ ID NO: 4780735 - DNA, 25 bp, Homo sapien
caggggggtgcgtgaagtcctgggt

SEQ ID NO: 4780736 - DNA, 25 bp, Homo sapien
tggtcaggggggtgcgtgaagtcct

SEQ ID NO: 4780737 - DNA, 25 bp, Homo sapien
aagtcctgggtgaccttctcagaga

SEQ ID NO: 4780738 - DNA, 25 bp, Homo sapien
gtgcgtgaagtcctgggtgaccttc

SEQ ID NO: 4780739 - DNA, 25 bp, Homo sapien
caggtatgcgctggacgcccgcttc

SEQ ID NO: 4780740 - DNA, 25 bp, Homo sapien
tcttgtccataagcagctgcacgtg

SEQ ID NO: 4780741 - DNA, 25 bp, Homo sapien
gcgatctgccgcactttgtgccgca

SEQ ID NO: 4780742 - DNA, 25 bp, Homo sapien
ccttgtgcaggatcttcactagctc

SEQ ID NO: 4780743 - DNA, 25 bp, Homo sapien
tctcctgggcagttcggttccgtgt

SEQ ID NO: 4780744 - DNA, 25 bp, Homo sapien
ggttccgtgtgattccttcagaaaa

SEQ ID NO: 4780745 - DNA, 25 bp, Homo sapien
cttctgagactttaactccttggtg

SEQ ID NO: 4780746 - DNA, 25 bp, Homo sapien
cttggtgagcatcagaacctgttgc

SEQ ID NO: 4780747 - DNA, 25 bp, Homo sapien
caggctttggagaatcctctggctc

SEQ ID NO: 4780748 - DNA, 25 bp, Homo sapien
ctgagcgaaactgatggtcagagaa

SEQ ID NO: 4780749 - DNA, 25 bp, Homo sapien
gcgaaactgatggtcagagaaggct

SEQ ID NO: 4780750 - DNA, 25 bp, Homo sapien
gtgcaggctttggagaatcctctgg

SEQ ID NO: 4780751 - DNA, 25 bp, Homo sapien
gggtgctggcgtcagaggccaaggg

SEQ ID NO: 4780752 - DNA, 25 bp, Homo sapien
cccctggaggttcatggcctgttcc

SEQ ID NO: 4780753 - DNA, 25 bp, Homo sapien
cttgttgccacggatgttgtgcatt

SEQ ID NO: 4780754 - DNA, 25 bp, Homo sapien
atcttcccctggaggttcatggcct

SEQ ID NO: 4780755 - DNA, 25 bp, Homo sapien
tcagtccccaggtgcttgagggaaa

SEQ ID NO: 4780756 - DNA, 25 bp, Homo sapien
cagtccccaggtgcttgagggaaat

SEQ ID NO: 4780757 - DNA, 25 bp, Homo sapien
ttcagtccccaggtgcttgagggaa

SEQ ID NO: 4780758 - DNA, 25 bp, Homo sapien
agtccccaggtgcttgagggaaata

SEQ ID NO: 4780759 - DNA, 25 bp, Homo sapien
aaggcagctgccacgcccactagcc

SEQ ID NO: 4780760 - DNA, 25 bp, Homo sapien
gcaaggcagctgccacgcccactag

SEQ ID NO: 4780761 - DNA, 25 bp, Homo sapien
caaggcagctgccacgcccactagc

SEQ ID NO: 4780762 - DNA, 25 bp, Homo sapien
cacgcccactagcccagggggtgtt

SEQ ID NO: 4780763 - DNA, 25 bp, Homo sapien
aatgcgagatctttgaggccctccc

SEQ ID NO: 4780764 - DNA, 25 bp, Homo sapien
tcaaatgcgagatctttgaggccct

SEQ ID NO: 4780765 - DNA, 25 bp, Homo sapien
ctcctcaaatgcgagatctttgagg

SEQ ID NO: 4780766 - DNA, 25 bp, Homo sapien
gtttaccctgaggcttgtgagtggg

SEQ ID NO: 4780767 - DNA, 25 bp, Homo sapien
agaaagtgagaagaataaaagcaga

SEQ ID NO: 4780768 - DNA, 25 bp, Homo sapien
aagtgagaagaataaaagcagaaac

SEQ ID NO: 4780769 - DNA, 25 bp, Homo sapien
tggagaaagtgagaagaataaaagc

SEQ ID NO: 4780770 - DNA, 25 bp, Homo sapien
ctggagaaagtgagaagaataaaag

SEQ ID NO: 4780771 - DNA, 25 bp, Homo sapien
tgtgggcctagatcaactctgagac

SEQ ID NO: 4780772 - DNA, 25 bp, Homo sapien
caggtgacaccgttatagactcaaa

SEQ ID NO: 4780773 - DNA, 25 bp, Homo sapien
gagaaatgccctccatgagtgacca

SEQ ID NO: 4780774 - DNA, 25 bp, Homo sapien
tgagactacacagagccaagtcctg

SEQ ID NO: 4780775 - DNA, 25 bp, Homo sapien
agctgctgcagccagtacagcatcg

SEQ ID NO: 4780776 - DNA, 25 bp, Homo sapien
gaattcccagcgcttcatctgcagc

SEQ ID NO: 4780777 - DNA, 25 bp, Homo sapien
cattcccagccagggcggcatcagg

SEQ ID NO: 4780778 - DNA, 25 bp, Homo sapien
ccggcgggctgttgtggaattccca

SEQ ID NO: 4780779 - DNA, 25 bp, Homo sapien
aggattagttggcaaggccctgtgc

SEQ ID NO: 4780780 - DNA, 25 bp, Homo sapien
attagttggcaaggccctgtgcctg

SEQ ID NO: 4780781 - DNA, 25 bp, Homo sapien
gcaaggccctgtgcctgaagggtgg

SEQ ID NO: 4780782 - DNA, 25 bp, Homo sapien
tggcaaggccctgtgcctgaagggt

SEQ ID NO: 4780783 - DNA, 25 bp, Homo sapien
atgggctcctcatcctgagttccct

SEQ ID NO: 4780784 - DNA, 25 bp, Homo sapien
gttccatgggctcctcatcctgagt

SEQ ID NO: 4780785 - DNA, 25 bp, Homo sapien
ctggatgttccatgggctcctcatc

SEQ ID NO: 4780786 - DNA, 25 bp, Homo sapien
tccatgggctcctcatcctgagttc

SEQ ID NO: 4780787 - DNA, 25 bp, Homo sapien
tggaaaggagaaagtcgttgcagga

SEQ ID NO: 4780788 - DNA, 25 bp, Homo sapien
tcagcgtccgccttacagtcaaaca

SEQ ID NO: 4780789 - DNA, 25 bp, Homo sapien
gcgtccgccttacagtcaaacactg

SEQ ID NO: 4780790 - DNA, 25 bp, Homo sapien
gtaataacccggctgggagtcttga

SEQ ID NO: 4780791 - DNA, 25 bp, Homo sapien
gctgggagtcttgatttcgaagatc

SEQ ID NO: 4780792 - DNA, 25 bp, Homo sapien
ggtcgatgctgtccaagggattggc

SEQ ID NO: 4780793 - DNA, 25 bp, Homo sapien
gtcgatgctgtccaagggattggca

SEQ ID NO: 4780794 - DNA, 25 bp, Homo sapien
tcgatgctgtccaagggattggcat

SEQ ID NO: 4780795 - DNA, 25 bp, Homo sapien
gatgggccctttgccgccgaactta

SEQ ID NO: 4780796 - DNA, 25 bp, Homo sapien
tcctttcgtcgtagaagaaccagcg

SEQ ID NO: 4780797 - DNA, 25 bp, Homo sapien
tgagcggtccgcgagtaatacagct

SEQ ID NO: 4780798 - DNA, 25 bp, Homo sapien
cagcgggatttccagccccggatgg

SEQ ID NO: 4780799 - DNA, 25 bp, Homo sapien
tcttcctccggaggcggcacctgtg

SEQ ID NO: 4780800 - DNA, 25 bp, Homo sapien
cctggcagactcttcggacccaggg

SEQ ID NO: 4780801 - DNA, 25 bp, Homo sapien
agagtttcttggggaccgcctccag

SEQ ID NO: 4780802 - DNA, 25 bp, Homo sapien
aggcggcacctgtggatccctggca

SEQ ID NO: 4780803 - DNA, 25 bp, Homo sapien
atctcggagactcggcgggcagctt

SEQ ID NO: 4780804 - DNA, 25 bp, Homo sapien
accaccagggacaaatctcggagac

SEQ ID NO: 4780805 - DNA, 25 bp, Homo sapien
gactcggcgggcagcttcccaaagg

SEQ ID NO: 4780806 - DNA, 25 bp, Homo sapien
ctgccagccggagactgcggaggga

SEQ ID NO: 4780807 - DNA, 25 bp, Homo sapien
tacacttccctggtagttcgcatag

SEQ ID NO: 4780808 - DNA, 25 bp, Homo sapien
tcaaagatcgcaaacccaggttacg

SEQ ID NO: 4780809 - DNA, 25 bp, Homo sapien
tgctttcttgcacccgatgggctgc

SEQ ID NO: 4780810 - DNA, 25 bp, Homo sapien
ccctggcttcaggttaaaggcgtgg

SEQ ID NO: 4780811 - DNA, 25 bp, Homo sapien
tggctgaaaggaagaccgctgggag

SEQ ID NO: 4780812 - DNA, 25 bp, Homo sapien
aaaggaagaccgctgggaggcccat

SEQ ID NO: 4780813 - DNA, 25 bp, Homo sapien
tcggacggcgcatctcgcggccatt

SEQ ID NO: 4780814 - DNA, 25 bp, Homo sapien
gcatctcgcggccattggctgaaag

SEQ ID NO: 4780815 - DNA, 25 bp, Homo sapien
tattcgcctcctgacagcgctggtt

SEQ ID NO: 4780816 - DNA, 25 bp, Homo sapien
gcggaaacccatgccactcctgggt

SEQ ID NO: 4780817 - DNA, 25 bp, Homo sapien
ttatccctcgcctgacagcagtggc

SEQ ID NO: 4780818 - DNA, 25 bp, Homo sapien
cctgggtcatagttgggtgcagtac

SEQ ID NO: 4780819 - DNA, 25 bp, Homo sapien
tctccccttccctcctaaggcgcat

SEQ ID NO: 4780820 - DNA, 25 bp, Homo sapien
ttctccccttccctcctaaggcgca

SEQ ID NO: 4780821 - DNA, 25 bp, Homo sapien
tcacaaagggttacagacgcacagg

SEQ ID NO: 4780822 - DNA, 25 bp, Homo sapien
taatacacagtgagtgacaacaccg

SEQ ID NO: 4780823 - DNA, 25 bp, Homo sapien
gagttaacctagaagacagcgcacg

SEQ ID NO: 4780824 - DNA, 25 bp, Homo sapien
cattggtaagattcctgtgggccct

SEQ ID NO: 4780825 - DNA, 25 bp, Homo sapien
cggcttcactgtttggtacaaagct

SEQ ID NO: 4780826 - DNA, 25 bp, Homo sapien
cagggcggcttcactgtttggtaca

SEQ ID NO: 4780827 - DNA, 25 bp, Homo sapien
gcttcactgtttggtacaaagcttt

SEQ ID NO: 4780828 - DNA, 25 bp, Homo sapien
ggcggcttcactgtttggtacaaag

SEQ ID NO: 4780829 - DNA, 25 bp, Homo sapien
tccatgattagctcgggtggtcccc

SEQ ID NO: 4780830 - DNA, 25 bp, Homo sapien
ccaacgtggtgggtgcatgacagac

SEQ ID NO: 4780831 - DNA, 25 bp, Homo sapien
gatgtcttttagcagagtgcctcca

SEQ ID NO: 4780832 - DNA, 25 bp, Homo sapien
tactgggagcatccgataggaacac

SEQ ID NO: 4780833 - DNA, 25 bp, Homo sapien
tgtgcctgtctgcgctcctgcagac

SEQ ID NO: 4780834 - DNA, 25 bp, Homo sapien
acaggtcccatgtggagcatgtaag

SEQ ID NO: 4780835 - DNA, 25 bp, Homo sapien
ggagcatgtaagtcagcctgctcca

SEQ ID NO: 4780836 - DNA, 25 bp, Homo sapien
cccatgtggagcatgtaagtcagcc

SEQ ID NO: 4780837 - DNA, 25 bp, Homo sapien
tcacaaataaggctcgaggtcaggt

SEQ ID NO: 4780838 - DNA, 25 bp, Homo sapien
gcagatgttaaggaagacgtcccat

SEQ ID NO: 4780839 - DNA, 25 bp, Homo sapien
gtttgatatcccagcgcctccttgt

SEQ ID NO: 4780840 - DNA, 25 bp, Homo sapien
atccgagtggtcctgagaggccagc

SEQ ID NO: 4780841 - DNA, 25 bp, Homo sapien
cccgagaccatgactcggaaggagg

SEQ ID NO: 4780842 - DNA, 25 bp, Homo sapien
agctggcgtccacgcctccgatgga

SEQ ID NO: 4780843 - DNA, 25 bp, Homo sapien
aggcccgagaccatgactcggaagg

SEQ ID NO: 4780844 - DNA, 25 bp, Homo sapien
ccacgcctccgatggatgggaggta

SEQ ID NO: 4780845 - DNA, 25 bp, Homo sapien
tctttgcatgttcgagagggctctg

SEQ ID NO: 4780846 - DNA, 25 bp, Homo sapien
tatatcttctataggatctttgcat

SEQ ID NO: 4780847 - DNA, 25 bp, Homo sapien
ggattttgatcgaggtgatttttta

SEQ ID NO: 4780848 - DNA, 25 bp, Homo sapien
agggctctgttgtgttccactgtag

SEQ ID NO: 4780849 - DNA, 25 bp, Homo sapien
tgcccacttttaccagatacgaaag

SEQ ID NO: 4780850 - DNA, 25 bp, Homo sapien
cagatgcctacccatttatcccaat

SEQ ID NO: 4780851 - DNA, 25 bp, Homo sapien
taggatctaccttattctcctccag

SEQ ID NO: 4780852 - DNA, 25 bp, Homo sapien
gaatattgctactgtaataagacca

SEQ ID NO: 4780853 - DNA, 25 bp, Homo sapien
gcacacctgggagtatttgcaaggg

SEQ ID NO: 4780854 - DNA, 25 bp, Homo sapien
tctaatgcattgcaggagaatgctc

SEQ ID NO: 4780855 - DNA, 25 bp, Homo sapien
caggttcctgctagtagaactgcca

SEQ ID NO: 4780856 - DNA, 25 bp, Homo sapien
caggtcaagaggtttaacatggagc

SEQ ID NO: 4780857 - DNA, 25 bp, Homo sapien
attgagctcttggtagtggttctgt

SEQ ID NO: 4780858 - DNA, 25 bp, Homo sapien
gctcttggtagtggttctgtttaat

SEQ ID NO: 4780859 - DNA, 25 bp, Homo sapien
tctgtttaatgtaggtggtcttttc

SEQ ID NO: 4780860 - DNA, 25 bp, Homo sapien
ccaggttgaggatgtcattgagctc

SEQ ID NO: 4780861 - DNA, 25 bp, Homo sapien
tgatacttaataggacccacagtgg

SEQ ID NO: 4780862 - DNA, 25 bp, Homo sapien
gaggagttaatcaggatgggtccca

SEQ ID NO: 4780863 - DNA, 25 bp, Homo sapien
tcatggagactctgacctgcagggt

SEQ ID NO: 4780864 - DNA, 25 bp, Homo sapien
tctgagcctcacactatcatggaga

SEQ ID NO: 4780865 - DNA, 25 bp, Homo sapien
tgacatggtcgtactcatcaggaga

SEQ ID NO: 4780866 - DNA, 25 bp, Homo sapien
ggtgggttacctcatcctaaagcag

SEQ ID NO: 4780867 - DNA, 25 bp, Homo sapien
gcctgggtttcctaatgtgactgaa

SEQ ID NO: 4780868 - DNA, 25 bp, Homo sapien
ccaaagggcggccagatctagcaaa

SEQ ID NO: 4780869 - DNA, 25 bp, Homo sapien
tccctggtctacaagccaagcctgg

SEQ ID NO: 4780870 - DNA, 25 bp, Homo sapien
caatctggctatggtctctctggaa

SEQ ID NO: 4780871 - DNA, 25 bp, Homo sapien
tgcagagcacgggttcaggcatacc

SEQ ID NO: 4780872 - DNA, 25 bp, Homo sapien
tgagaaccctcaggacaaaggcgag

SEQ ID NO: 4780873 - DNA, 25 bp, Homo sapien
ttctgagtgaactggaatcgcctgt

SEQ ID NO: 4780874 - DNA, 25 bp, Homo sapien
cattcgcaggcgatggttttctgac

SEQ ID NO: 4780875 - DNA, 25 bp, Homo sapien
tgaccgaggtggacgttttagaatc

SEQ ID NO: 4780876 - DNA, 25 bp, Homo sapien
gttttctgactgtaggccctccagg

SEQ ID NO: 4780877 - DNA, 25 bp, Homo sapien
cgttgtagacactcatcccgatgta

SEQ ID NO: 4780878 - DNA, 25 bp, Homo sapien
cttcggcacgaataccaggcagagg

SEQ ID NO: 4780879 - DNA, 25 bp, Homo sapien
gatgcacatgatccccacgttgtag

SEQ ID NO: 4780880 - DNA, 25 bp, Homo sapien
atgaccagagccacgatgcagaact

SEQ ID NO: 4780881 - DNA, 25 bp, Homo sapien
aaggggagagatgatcgttaccaag

SEQ ID NO: 4780882 - DNA, 25 bp, Homo sapien
tggagtggagggttactcaggaggt

SEQ ID NO: 4780883 - DNA, 25 bp, Homo sapien
gatgatcgttaccaaggggtggcac

SEQ ID NO: 4780884 - DNA, 25 bp, Homo sapien
gggtcgggggccttgctgtcagccg

SEQ ID NO: 4780885 - DNA, 25 bp, Homo sapien
ccagggtcattaccttgtgctcaga

SEQ ID NO: 4780886 - DNA, 25 bp, Homo sapien
gtcctgttgcttgcatgggagctca

SEQ ID NO: 4780887 - DNA, 25 bp, Homo sapien
cctgttgcttgcatgggagctcaaa

SEQ ID NO: 4780888 - DNA, 25 bp, Homo sapien
tgtgctcagattgcagcccagtggt

SEQ ID NO: 4780889 - DNA, 25 bp, Homo sapien
tgcagcagcaggtaagaatgcattt

SEQ ID NO: 4780890 - DNA, 25 bp, Homo sapien
atcactaacacttcagtgatgcagc

SEQ ID NO: 4780891 - DNA, 25 bp, Homo sapien
tcactaacacttcagtgatgcagca

SEQ ID NO: 4780892 - DNA, 25 bp, Homo sapien
tagacgatgccaagccagatggtca

SEQ ID NO: 4780893 - DNA, 25 bp, Homo sapien
cagatggtcatatgggtgttctcac

SEQ ID NO: 4780894 - DNA, 25 bp, Homo sapien
ggcggatggagatatcccgtcctgc

SEQ ID NO: 4780895 - DNA, 25 bp, Homo sapien
catgagaagtcccttgtaggcatag

SEQ ID NO: 4780896 - DNA, 25 bp, Homo sapien
agtgtggactgtccacgcaggccag

SEQ ID NO: 4780897 - DNA, 25 bp, Homo sapien
agggccagcgagcacagggcactga

SEQ ID NO: 4780898 - DNA, 25 bp, Homo sapien
actgcactcggcctgttcccagtgt

SEQ ID NO: 4780899 - DNA, 25 bp, Homo sapien
ggactgtccacgcaggccagggcca

SEQ ID NO: 4780900 - DNA, 25 bp, Homo sapien
aggaggcacgcagaagctgccgggg

SEQ ID NO: 4780901 - DNA, 25 bp, Homo sapien
gaggcacgcagaagctgccggggaa

SEQ ID NO: 4780902 - DNA, 25 bp, Homo sapien
aggcacgcagaagctgccggggaaa

SEQ ID NO: 4780903 - DNA, 25 bp, Homo sapien
gcacgcagaagctgccggggaaagc

SEQ ID NO: 4780904 - DNA, 25 bp, Homo sapien
tgcggcaaaaggagagcagctggcc

SEQ ID NO: 4780905 - DNA, 25 bp, Homo sapien
ggcaaaaggagagcagctggcccga

SEQ ID NO: 4780906 - DNA, 25 bp, Homo sapien
agctggcccgagagtccctctgcat

SEQ ID NO: 4780907 - DNA, 25 bp, Homo sapien
ctgtgcggcaaaaggagagcagctg

SEQ ID NO: 4780908 - DNA, 25 bp, Homo sapien
gccatgtgtttaccgaggctcaaag

SEQ ID NO: 4780909 - DNA, 25 bp, Homo sapien
gaagtgcaaaagctgccaggaggct

SEQ ID NO: 4780910 - DNA, 25 bp, Homo sapien
gaactgggcccgcatatgccaatga

SEQ ID NO: 4780911 - DNA, 25 bp, Homo sapien
taccaagaaatgctgggcagaacca

SEQ ID NO: 4780912 - DNA, 25 bp, Homo sapien
tcttcataacagaggacaggctgtg

SEQ ID NO: 4780913 - DNA, 25 bp, Homo sapien
tctatggtgcacctgagctccacga

SEQ ID NO: 4780914 - DNA, 25 bp, Homo sapien
gaatgacacgtgtctctctagtggc

SEQ ID NO: 4780915 - DNA, 25 bp, Homo sapien
acagactgccttggaatgagccaaa

SEQ ID NO: 4780916 - DNA, 25 bp, Homo sapien
tgcaggccctgagtacctttctcac

SEQ ID NO: 4780917 - DNA, 25 bp, Homo sapien
atgcaggccctgagtacctttctca

SEQ ID NO: 4780918 - DNA, 25 bp, Homo sapien
catgcaggccctgagtacctttctc

SEQ ID NO: 4780919 - DNA, 25 bp, Homo sapien
tgtgggcaaatcttacaggcatccc

SEQ ID NO: 4780920 - DNA, 25 bp, Homo sapien
caagatgtccgttgggctgtgctcc

SEQ ID NO: 4780921 - DNA, 25 bp, Homo sapien
taggcccattttaaggctgaagccc

SEQ ID NO: 4780922 - DNA, 25 bp, Homo sapien
cgagtcagacacaagaagatggcaa

SEQ ID NO: 4780923 - DNA, 25 bp, Homo sapien
tttaaaactctatgtgtttgcctct

SEQ ID NO: 4780924 - DNA, 25 bp, Homo sapien
cagctgtagagggagatagaaggta

SEQ ID NO: 4780925 - DNA, 25 bp, Homo sapien
gaaagtgcctgctttaggattgact

SEQ ID NO: 4780926 - DNA, 25 bp, Homo sapien
gggagatagaaggtaagagttgaaa

SEQ ID NO: 4780927 - DNA, 25 bp, Homo sapien
aattcctgacataggttgcttggca

SEQ ID NO: 4780928 - DNA, 25 bp, Homo sapien
ctagagtgtagggaattcctgacat

SEQ ID NO: 4780929 - DNA, 25 bp, Homo sapien
ttcctgacataggttgcttggcatc

SEQ ID NO: 4780930 - DNA, 25 bp, Homo sapien
gaaagccacagaagctagagtgtag

SEQ ID NO: 4780931 - DNA, 25 bp, Homo sapien
ggctgccatggctacctgtgtcttc

SEQ ID NO: 4780932 - DNA, 25 bp, Homo sapien
ttattcgtctgcaggtttagtctgc

SEQ ID NO: 4780933 - DNA, 25 bp, Homo sapien
ggtttagtctgctccctgatttgcc

SEQ ID NO: 4780934 - DNA, 25 bp, Homo sapien
aagatgccggccgtggcgtgcttgc

SEQ ID NO: 4780935 - DNA, 25 bp, Homo sapien
ctctccataggaggtaacactggtg

SEQ ID NO: 4780936 - DNA, 25 bp, Homo sapien
ccataggaggtaacactggtgctga

SEQ ID NO: 4780937 - DNA, 25 bp, Homo sapien
ggtgctgaaactgaagtcatatact

SEQ ID NO: 4780938 - DNA, 25 bp, Homo sapien
ctggtgctgaaactgaagtcatata

SEQ ID NO: 4780939 - DNA, 25 bp, Homo sapien
tcaggtgctcagagtccggagcaca

SEQ ID NO: 4780940 - DNA, 25 bp, Homo sapien
gctcagagtccggagcacacagggt

SEQ ID NO: 4780941 - DNA, 25 bp, Homo sapien
tcagagtccggagcacacagggtgt

SEQ ID NO: 4780942 - DNA, 25 bp, Homo sapien
ggtgctcagagtccggagcacacag

SEQ ID NO: 4780943 - DNA, 25 bp, Homo sapien
aaccatagccttggaaagtctggaa

SEQ ID NO: 4780944 - DNA, 25 bp, Homo sapien
tatctacacagaaaggcacttctgc

SEQ ID NO: 4780945 - DNA, 25 bp, Homo sapien
agaaccatagccttggaaagtctgg

SEQ ID NO: 4780946 - DNA, 25 bp, Homo sapien
tttccttatctacacagaaaggcac

SEQ ID NO: 4780947 - DNA, 25 bp, Homo sapien
tttaaacggtccagtaggacaggca

SEQ ID NO: 4780948 - DNA, 25 bp, Homo sapien
gtctgttgactctggcactgctggt

SEQ ID NO: 4780949 - DNA, 25 bp, Homo sapien
ggcactgctggtgtctccccaccac

SEQ ID NO: 4780950 - DNA, 25 bp, Homo sapien
gggaacctctcgtaaatactcagct

SEQ ID NO: 4780951 - DNA, 25 bp, Homo sapien
agttctggttgtgactgtctggagt

SEQ ID NO: 4780952 - DNA, 25 bp, Homo sapien
cttccctcctgccggcatggagggc

SEQ ID NO: 4780953 - DNA, 25 bp, Homo sapien
cctcctgccggcatggagggcttac

SEQ ID NO: 4780954 - DNA, 25 bp, Homo sapien
tccctcctgccggcatggagggctt

SEQ ID NO: 4780955 - DNA, 25 bp, Homo sapien
aaatggaactgatgaagtgttccca

SEQ ID NO: 4780956 - DNA, 25 bp, Homo sapien
cacagcctgccagcagatcaggata

SEQ ID NO: 4780957 - DNA, 25 bp, Homo sapien
atacacaggtcgatcagcagcatgc

SEQ ID NO: 4780958 - DNA, 25 bp, Homo sapien
tctccactgtccttcgcagggggtc

SEQ ID NO: 4780959 - DNA, 25 bp, Homo sapien
tgccagcagatcaggatacacaggt

SEQ ID NO: 4780960 - DNA, 25 bp, Homo sapien
catctggagaggacagggggctgca

SEQ ID NO: 4780961 - DNA, 25 bp, Homo sapien
ctggagaggacagggggctgcagtc

SEQ ID NO: 4780962 - DNA, 25 bp, Homo sapien
tccacctcatctggagaggacaggg

SEQ ID NO: 4780963 - DNA, 25 bp, Homo sapien
ctccacctcatctggagaggacagg

SEQ ID NO: 4780964 - DNA, 25 bp, Homo sapien
tcacatttttgaagatggcgtggac

SEQ ID NO: 4780965 - DNA, 25 bp, Homo sapien
ggtcgtgtagcccacggtgagaatc

SEQ ID NO: 4780966 - DNA, 25 bp, Homo sapien
catggccccaaaagcggtcgtgtag

SEQ ID NO: 4780967 - DNA, 25 bp, Homo sapien
ttgaagatggcgtggactctccagg

SEQ ID NO: 4780968 - DNA, 25 bp, Homo sapien
cctccaaggatgataaggttgttca

SEQ ID NO: 4780969 - DNA, 25 bp, Homo sapien
ggagagcatccctccaaggatgata

SEQ ID NO: 4780970 - DNA, 25 bp, Homo sapien
ttgttcatgtatggactcgacatct

SEQ ID NO: 4780971 - DNA, 25 bp, Homo sapien
gtatggactcgacatctttatgagc

SEQ ID NO: 4780972 - DNA, 25 bp, Homo sapien
ggtttgacctaagcaactgctatca

SEQ ID NO: 4780973 - DNA, 25 bp, Homo sapien
tttgagagctgattatgtgcccagg

SEQ ID NO: 4780974 - DNA, 25 bp, Homo sapien
ggagtggacaaaagttgcctcactt

SEQ ID NO: 4780975 - DNA, 25 bp, Homo sapien
tttttgtggcagtatatgtgctatt

SEQ ID NO: 4780976 - DNA, 25 bp, Homo sapien
cactggccatgatcatcccgaggat

SEQ ID NO: 4780977 - DNA, 25 bp, Homo sapien
tctgattccggttcttgatgttgaa

SEQ ID NO: 4780978 - DNA, 25 bp, Homo sapien
actggccatgatcatcccgaggatg

SEQ ID NO: 4780979 - DNA, 25 bp, Homo sapien
aagcactggccatgatcatcccgag

SEQ ID NO: 4780980 - DNA, 25 bp, Homo sapien
agtgtgtcggccacagcgttgtact

SEQ ID NO: 4780981 - DNA, 25 bp, Homo sapien
gatctccagtgtgtcggccacagcg

SEQ ID NO: 4780982 - DNA, 25 bp, Homo sapien
ccagtgtgtcggccacagcgttgta

SEQ ID NO: 4780983 - DNA, 25 bp, Homo sapien
tctccagtgtgtcggccacagcgtt

SEQ ID NO: 4780984 - DNA, 25 bp, Homo sapien
gaaataatactcagcttcccaccga

SEQ ID NO: 4780985 - DNA, 25 bp, Homo sapien
tggcactgaaataatactcagcttc

SEQ ID NO: 4780986 - DNA, 25 bp, Homo sapien
tatgcaccgtcccatggcactgaaa

SEQ ID NO: 4780987 - DNA, 25 bp, Homo sapien
atacgctgctgtatgcaccgtccca

SEQ ID NO: 4780988 - DNA, 25 bp, Homo sapien
catcttttgtgcacgccagagagct

SEQ ID NO: 4780989 - DNA, 25 bp, Homo sapien
cctaaaattacatcttttgtgcacg

SEQ ID NO: 4780990 - DNA, 25 bp, Homo sapien
cagagagctgacacgcgtttcaatt

SEQ ID NO: 4780991 - DNA, 25 bp, Homo sapien
cacgccagagagctgacacgcgttt

SEQ ID NO: 4780992 - DNA, 25 bp, Homo sapien
ttctctccccattccggaatacaac

SEQ ID NO: 4780993 - DNA, 25 bp, Homo sapien
attgagtaaatttaatggtccccat

SEQ ID NO: 4780994 - DNA, 25 bp, Homo sapien
tctccccattccggaatacaacttg

SEQ ID NO: 4780995 - DNA, 25 bp, Homo sapien
tccccattccggaatacaacttgac

SEQ ID NO: 4780996 - DNA, 25 bp, Homo sapien
tccgtgctataatggggacgacgtc

SEQ ID NO: 4780997 - DNA, 25 bp, Homo sapien
tgctataatggggacgacgtcttct

SEQ ID NO: 4780998 - DNA, 25 bp, Homo sapien
ccgtgctataatggggacgacgtct

SEQ ID NO: 4780999 - DNA, 25 bp, Homo sapien
gtgtccgtgctataatggggacgac

SEQ ID NO: 4781000 - DNA, 25 bp, Homo sapien
gacacggatgtgtaactgactatgt

SEQ ID NO: 4781001 - DNA, 25 bp, Homo sapien
tgtgtaactgactatgttgagggtc

SEQ ID NO: 4781002 - DNA, 25 bp, Homo sapien
taactgactatgttgagggtctgca

SEQ ID NO: 4781003 - DNA, 25 bp, Homo sapien
tgctgatggagacacggatgtgtaa

SEQ ID NO: 4781004 - DNA, 25 bp, Homo sapien
catctgttgggtttgactggtgaag

SEQ ID NO: 4781005 - DNA, 25 bp, Homo sapien
gatgcactcatagagcctagagcag

SEQ ID NO: 4781006 - DNA, 25 bp, Homo sapien
taaccagacggctcagagggtgcaa

SEQ ID NO: 4781007 - DNA, 25 bp, Homo sapien
tgcaagtagtgaccctccacaaagc

SEQ ID NO: 4781008 - DNA, 25 bp, Homo sapien
ccttcggcgggtggacaataaggat

SEQ ID NO: 4781009 - DNA, 25 bp, Homo sapien
tcctcatactataggtggttgtaaa

SEQ ID NO: 4781010 - DNA, 25 bp, Homo sapien
cctcctcatactataggtggttgta

SEQ ID NO: 4781011 - DNA, 25 bp, Homo sapien
cctatcctcctcatactataggtgg

SEQ ID NO: 4781012 - DNA, 25 bp, Homo sapien
gccacccctatcctcctcatactat

SEQ ID NO: 4781013 - DNA, 25 bp, Homo sapien
tggcaaacactttgtagaggtcagg

SEQ ID NO: 4781014 - DNA, 25 bp, Homo sapien
gcaaacactttgtagaggtcaggac

SEQ ID NO: 4781015 - DNA, 25 bp, Homo sapien
agaaaatgtggcaaacactttgtag

SEQ ID NO: 4781016 - DNA, 25 bp, Homo sapien
aaatgtggcaaacactttgtagagg

SEQ ID NO: 4781017 - DNA, 25 bp, Homo sapien
tcttgggcacctgttgctctattgg

SEQ ID NO: 4781018 - DNA, 25 bp, Homo sapien
gcctcctgtgagatgacctgacagc

SEQ ID NO: 4781019 - DNA, 25 bp, Homo sapien
agctaccgtggttccttcttgggca

SEQ ID NO: 4781020 - DNA, 25 bp, Homo sapien
ctctattggaaaagctgccattgct

SEQ ID NO: 4781021 - DNA, 25 bp, Homo sapien
ctaaggaaaacagcccagaggcatg

SEQ ID NO: 4781022 - DNA, 25 bp, Homo sapien
aacagcccagaggcatgggactgac

SEQ ID NO: 4781023 - DNA, 25 bp, Homo sapien
gaaaacagcccagaggcatgggact

SEQ ID NO: 4781024 - DNA, 25 bp, Homo sapien
aggaaaacagcccagaggcatggga

SEQ ID NO: 4781025 - DNA, 25 bp, Homo sapien
ttgaggatgatcctgcccagcgtgt

SEQ ID NO: 4781026 - DNA, 25 bp, Homo sapien
catcgtaggcgtacccgtggaactt

SEQ ID NO: 4781027 - DNA, 25 bp, Homo sapien
gaagaagttggtctcgttcatggca

SEQ ID NO: 4781028 - DNA, 25 bp, Homo sapien
cacgcctgaccgcttgttgttgtac

SEQ ID NO: 4781029 - DNA, 25 bp, Homo sapien
gacacaggtgtagctaagccctgaa

SEQ ID NO: 4781030 - DNA, 25 bp, Homo sapien
taaagaagtcgttgctgccacatga

SEQ ID NO: 4781031 - DNA, 25 bp, Homo sapien
gaaaggtgacctcagttcttgctgt

SEQ ID NO: 4781032 - DNA, 25 bp, Homo sapien
atcattgttcccaggcgatgccagc

SEQ ID NO: 4781033 - DNA, 25 bp, Homo sapien
aagcagattcttccggaggcagcgg

SEQ ID NO: 4781034 - DNA, 25 bp, Homo sapien
aagaaggctcgtaccagcccggaat

SEQ ID NO: 4781035 - DNA, 25 bp, Homo sapien
gggctcgaaatccacgccaatgtag

SEQ ID NO: 4781036 - DNA, 25 bp, Homo sapien
tgatatttactaccatacatgttct

SEQ ID NO: 4781037 - DNA, 25 bp, Homo sapien
ttttgctgccatattctggtcaaac

SEQ ID NO: 4781038 - DNA, 25 bp, Homo sapien
acaacagaacacttttgctgccata

SEQ ID NO: 4781039 - DNA, 25 bp, Homo sapien
ggccaaggatgatccgcacatcatt

SEQ ID NO: 4781040 - DNA, 25 bp, Homo sapien
tattctggtcaaactggccaaggat

SEQ ID NO: 4781041 - DNA, 25 bp, Homo sapien
ccacttcttgagtagatcgagggac

SEQ ID NO: 4781042 - DNA, 25 bp, Homo sapien
ttcttgagtagatcgagggacccac

SEQ ID NO: 4781043 - DNA, 25 bp, Homo sapien
acttcttgagtagatcgagggaccc

SEQ ID NO: 4781044 - DNA, 25 bp, Homo sapien
cttgagtagatcgagggacccacat

SEQ ID NO: 4781045 - DNA, 25 bp, Homo sapien
aagaagaggctgtgataagatggag

SEQ ID NO: 4781046 - DNA, 25 bp, Homo sapien
ttaaaagtgtcctcctttgatgttg

SEQ ID NO: 4781047 - DNA, 25 bp, Homo sapien
gcagaagcgttggatgaggtcagaa

SEQ ID NO: 4781048 - DNA, 25 bp, Homo sapien
aggcaagcaaggctcttgactcctc

SEQ ID NO: 4781049 - DNA, 25 bp, Homo sapien
ttggaaccttgtctgagcactctcc

SEQ ID NO: 4781050 - DNA, 25 bp, Homo sapien
tggaaccttgtctgagcactctccc

SEQ ID NO: 4781051 - DNA, 25 bp, Homo sapien
gaagctctcggtgtctgaaatctca

SEQ ID NO: 4781052 - DNA, 25 bp, Homo sapien
ttgacactggtacagggatcgttgg

SEQ ID NO: 4781053 - DNA, 25 bp, Homo sapien
gatcgttggagaagctctcggtgtc

SEQ ID NO: 4781054 - DNA, 25 bp, Homo sapien
cactggtacagggatcgttggagaa

SEQ ID NO: 4781055 - DNA, 25 bp, Homo sapien
cagggaaacaagtggaggaccatac

SEQ ID NO: 4781056 - DNA, 25 bp, Homo sapien
aagtggaggaccatacgctgtgcat

SEQ ID NO: 4781057 - DNA, 25 bp, Homo sapien
gaaacaagtggaggaccatacgctg

SEQ ID NO: 4781058 - DNA, 25 bp, Homo sapien
aagcagggaaacaagtggaggacca

SEQ ID NO: 4781059 - DNA, 25 bp, Homo sapien
gcagcgctagctggaactctatcag

SEQ ID NO: 4781060 - DNA, 25 bp, Homo sapien
gacccatcttgagctggtctcgcag

SEQ ID NO: 4781061 - DNA, 25 bp, Homo sapien
tgaggctgaagacccagtctgcaga

SEQ ID NO: 4781062 - DNA, 25 bp, Homo sapien
tctcgcagggatgaggcaacttcgc

SEQ ID NO: 4781063 - DNA, 25 bp, Homo sapien
ggaagcaggaccaggtccaagcacc

SEQ ID NO: 4781064 - DNA, 25 bp, Homo sapien
gcacctttcttggataatgcacaaa

SEQ ID NO: 4781065 - DNA, 25 bp, Homo sapien
gaagcaggaccaggtccaagcacct

SEQ ID NO: 4781066 - DNA, 25 bp, Homo sapien
caagcacctttcttggataatgcac

SEQ ID NO: 4781067 - DNA, 25 bp, Homo sapien
tactgctatgaaactctaaattggc

SEQ ID NO: 4781068 - DNA, 25 bp, Homo sapien
taaaatagcaatcgccaaaaatcag

SEQ ID NO: 4781069 - DNA, 25 bp, Homo sapien
tcagaaaataatcagagatgttccc

SEQ ID NO: 4781070 - DNA, 25 bp, Homo sapien
tactggcagggaatggtcccgtata

SEQ ID NO: 4781071 - DNA, 25 bp, Homo sapien
cagcctagatgttaatgatgacctt

SEQ ID NO: 4781072 - DNA, 25 bp, Homo sapien
aaatggtaaagacatcagcctagat

SEQ ID NO: 4781073 - DNA, 25 bp, Homo sapien
ctaagaagccatttcgatagcaaga

SEQ ID NO: 4781074 - DNA, 25 bp, Homo sapien
cctttcagtgggtaggttatggcca

SEQ ID NO: 4781075 - DNA, 25 bp, Homo sapien
aatctgatccgtcggagtcccctct

SEQ ID NO: 4781076 - DNA, 25 bp, Homo sapien
cgaggtggggcactagtaccattag

SEQ ID NO: 4781077 - DNA, 25 bp, Homo sapien
taccattaggattagaatctgatcc

SEQ ID NO: 4781078 - DNA, 25 bp, Homo sapien
aagatctgcagatacgctggcagcc

SEQ ID NO: 4781079 - DNA, 25 bp, Homo sapien
tccagagcagtatcctgggagacac

SEQ ID NO: 4781080 - DNA, 25 bp, Homo sapien
ttccagagcagtatcctgggagaca

SEQ ID NO: 4781081 - DNA, 25 bp, Homo sapien
gacacagggatctgctgtggctctc

SEQ ID NO: 4781082 - DNA, 25 bp, Homo sapien
aggggacacagggatctgctgtggc

SEQ ID NO: 4781083 - DNA, 25 bp, Homo sapien
ggtgaggggacacagggatctgctg

SEQ ID NO: 4781084 - DNA, 25 bp, Homo sapien
ctgcaccagggagcatgcagggtga

SEQ ID NO: 4781085 - DNA, 25 bp, Homo sapien
ctaaaccacattgccttttgctaga

SEQ ID NO: 4781086 - DNA, 25 bp, Homo sapien
gccgtgtccacacaagccgagcgta

SEQ ID NO: 4781087 - DNA, 25 bp, Homo sapien
gtaaggcaggccgtgtccacacaag

SEQ ID NO: 4781088 - DNA, 25 bp, Homo sapien
tgccttttgctagatgacagcagca

SEQ ID NO: 4781089 - DNA, 25 bp, Homo sapien
agtgcttgagcaacttcagaatggc

SEQ ID NO: 4781090 - DNA, 25 bp, Homo sapien
gcattgtctgatgggacggtccgaa

SEQ ID NO: 4781091 - DNA, 25 bp, Homo sapien
tctgaacgtcttgcgtcagcgtgcc

SEQ ID NO: 4781092 - DNA, 25 bp, Homo sapien
tcttatcggctagaacaggcgtggt

SEQ ID NO: 4781093 - DNA, 25 bp, Homo sapien
caagttgaaatcacatctgtcaggg

SEQ ID NO: 4781094 - DNA, 25 bp, Homo sapien
cctctgatcagtccacaagttgaaa

SEQ ID NO: 4781095 - DNA, 25 bp, Homo sapien
tgtctcctcatgtcaatatggcacc

SEQ ID NO: 4781096 - DNA, 25 bp, Homo sapien
ccagctcgagtctttgagtgggaga

SEQ ID NO: 4781097 - DNA, 25 bp, Homo sapien
ccaaacacaacactggacggggcag

SEQ ID NO: 4781098 - DNA, 25 bp, Homo sapien
aaacacaacactggacggggcagtc

SEQ ID NO: 4781099 - DNA, 25 bp, Homo sapien
taccaaacacaacactggacggggc

SEQ ID NO: 4781100 - DNA, 25 bp, Homo sapien
acactggacggggcagtcagtgcca

SEQ ID NO: 4781101 - DNA, 25 bp, Homo sapien
acatgcacccgtgtgtctgtccgca

SEQ ID NO: 4781102 - DNA, 25 bp, Homo sapien
tgtgtctgtccgcagagcacctgcc

SEQ ID NO: 4781103 - DNA, 25 bp, Homo sapien
ccacatgcacccgtgtgtctgtccg

SEQ ID NO: 4781104 - DNA, 25 bp, Homo sapien
gccaccacatgcacccgtgtgtctg

SEQ ID NO: 4781105 - DNA, 25 bp, Homo sapien
tctgcaagctgggagtttccaacgt

SEQ ID NO: 4781106 - DNA, 25 bp, Homo sapien
tgcaagctgggagtttccaacgttg

SEQ ID NO: 4781107 - DNA, 25 bp, Homo sapien
tggtctgcaagctgggagtttccaa

SEQ ID NO: 4781108 - DNA, 25 bp, Homo sapien
aagctgggagtttccaacgttgtgc

SEQ ID NO: 4781109 - DNA, 25 bp, Homo sapien
gattccagccttggagggactctgc

SEQ ID NO: 4781110 - DNA, 25 bp, Homo sapien
atgtgacggatggacagacgcctcc

SEQ ID NO: 4781111 - DNA, 25 bp, Homo sapien
tattgcatcgtagaaggctttcaac

SEQ ID NO: 4781112 - DNA, 25 bp, Homo sapien
aaacaccatcaagtggttaggcccg

SEQ ID NO: 4781113 - DNA, 25 bp, Homo sapien
cctctcccaactgcctcagctgcag

SEQ ID NO: 4781114 - DNA, 25 bp, Homo sapien
agcagctcctctcccaactgcctca

SEQ ID NO: 4781115 - DNA, 25 bp, Homo sapien
cttcacttcaaccagcagctcctct

SEQ ID NO: 4781116 - DNA, 25 bp, Homo sapien
agctcctctcccaactgcctcagct

SEQ ID NO: 4781117 - DNA, 25 bp, Homo sapien
caggggctgtgtgagtctgggccac

SEQ ID NO: 4781118 - DNA, 25 bp, Homo sapien
ggggctgtgtgagtctgggccacca

SEQ ID NO: 4781119 - DNA, 25 bp, Homo sapien
ggctgtgtgagtctgggccaccagg

SEQ ID NO: 4781120 - DNA, 25 bp, Homo sapien
tcaggggctgtgtgagtctgggcca

SEQ ID NO: 4781121 - DNA, 25 bp, Homo sapien
ctgcccacgctaccgactttccctt

SEQ ID NO: 4781122 - DNA, 25 bp, Homo sapien
gctaccgactttcccttgggagcca

SEQ ID NO: 4781123 - DNA, 25 bp, Homo sapien
tggccagctgcccacgctaccgact

SEQ ID NO: 4781124 - DNA, 25 bp, Homo sapien
cacgctaccgactttcccttgggag

SEQ ID NO: 4781125 - DNA, 25 bp, Homo sapien
gtggttggagggctcaaggatgaag

SEQ ID NO: 4781126 - DNA, 25 bp, Homo sapien
agcaatgcactcagagcaataagaa

SEQ ID NO: 4781127 - DNA, 25 bp, Homo sapien
gttggagggctcaaggatgaagtgg

SEQ ID NO: 4781128 - DNA, 25 bp, Homo sapien
cagcaatgcactcagagcaataaga

SEQ ID NO: 4781129 - DNA, 25 bp, Homo sapien
ggcactgagctcaggctgaccggga

SEQ ID NO: 4781130 - DNA, 25 bp, Homo sapien
tgaccgggagacaagacgggcaccc

SEQ ID NO: 4781131 - DNA, 25 bp, Homo sapien
ctgaccgggagacaagacgggcacc

SEQ ID NO: 4781132 - DNA, 25 bp, Homo sapien
agctcaggctgaccgggagacaaga

SEQ ID NO: 4781133 - DNA, 25 bp, Homo sapien
gggtagtggatgtcaagccccagct

SEQ ID NO: 4781134 - DNA, 25 bp, Homo sapien
ttaaggccagtatgggccaagggct

SEQ ID NO: 4781135 - DNA, 25 bp, Homo sapien
actggaagctgtgagtgactttcag

SEQ ID NO: 4781136 - DNA, 25 bp, Homo sapien
tctgttaaggccagtatgggccaag

SEQ ID NO: 4781137 - DNA, 25 bp, Homo sapien
gttggtgtggtaggtagtaatacta

SEQ ID NO: 4781138 - DNA, 25 bp, Homo sapien
ctgttggtgtggtaggtagtaatac

SEQ ID NO: 4781139 - DNA, 25 bp, Homo sapien
ggtgtggtaggtagtaatactatca

SEQ ID NO: 4781140 - DNA, 25 bp, Homo sapien
gggtattgctgaagttgaaaatggt

SEQ ID NO: 4781141 - DNA, 25 bp, Homo sapien
gctggctatcaaccctacacttgtt

SEQ ID NO: 4781142 - DNA, 25 bp, Homo sapien
caaccctacacttgttcctaattgg

SEQ ID NO: 4781143 - DNA, 25 bp, Homo sapien
tcctaattggttgacttgctgtagt

SEQ ID NO: 4781144 - DNA, 25 bp, Homo sapien
tcttgctgctggctatcaaccctac

SEQ ID NO: 4781145 - DNA, 25 bp, Homo sapien
gacccgcctaaggaacttggcctgc

SEQ ID NO: 4781146 - DNA, 25 bp, Homo sapien
ggtctctgtggacccgcctaaggaa

SEQ ID NO: 4781147 - DNA, 25 bp, Homo sapien
acttggcctgcacaggatgcggagg

SEQ ID NO: 4781148 - DNA, 25 bp, Homo sapien
tggcctgcacaggatgcggaggaag

SEQ ID NO: 4781149 - DNA, 25 bp, Homo sapien
actgatgcccggctcagggctcagg

SEQ ID NO: 4781150 - DNA, 25 bp, Homo sapien
ccctgtcctcatacccagcgtggcc

SEQ ID NO: 4781151 - DNA, 25 bp, Homo sapien
ttctgtggaaactgttccctgtcct

SEQ ID NO: 4781152 - DNA, 25 bp, Homo sapien
atccacaccattgcccttctgtgga

SEQ ID NO: 4781153 - DNA, 25 bp, Homo sapien
ttcctcccgtgaagctgaaaaggcc

SEQ ID NO: 4781154 - DNA, 25 bp, Homo sapien
agcttcctcccgtgaagctgaaaag

SEQ ID NO: 4781155 - DNA, 25 bp, Homo sapien
gtgaagctgaaaaggccacgtgcaa

SEQ ID NO: 4781156 - DNA, 25 bp, Homo sapien
tcccgtgaagctgaaaaggccacgt

SEQ ID NO: 4781157 - DNA, 25 bp, Homo sapien
tgtcatggttccagttgcatagtgg

SEQ ID NO: 4781158 - DNA, 25 bp, Homo sapien
aggcacacagaggtgtcatggttcc

SEQ ID NO: 4781159 - DNA, 25 bp, Homo sapien
cagaggtgtcatggttccagttgca

SEQ ID NO: 4781160 - DNA, 25 bp, Homo sapien
ttccagttgcatagtggacattctt

SEQ ID NO: 4781161 - DNA, 25 bp, Homo sapien
tatcattaatcatacagggtgtgtg

SEQ ID NO: 4781162 - DNA, 25 bp, Homo sapien
tctatcattaatcatacagggtgtg

SEQ ID NO: 4781163 - DNA, 25 bp, Homo sapien
ctatcattaatcatacagggtgtgt

SEQ ID NO: 4781164 - DNA, 25 bp, Homo sapien
gcttcgcatttggaggcaatgggtc

SEQ ID NO: 4781165 - DNA, 25 bp, Homo sapien
ctgataagtcttcctcaagtaggct

SEQ ID NO: 4781166 - DNA, 25 bp, Homo sapien
ccagcttcgcatttggaggcaatgg

SEQ ID NO: 4781167 - DNA, 25 bp, Homo sapien
ccagtggagcgtcactctcactgtc

SEQ ID NO: 4781168 - DNA, 25 bp, Homo sapien
tggtacacagccttgtcatggccca

SEQ ID NO: 4781169 - DNA, 25 bp, Homo sapien
cgcctcgtgccttggagtgttcatc

SEQ ID NO: 4781170 - DNA, 25 bp, Homo sapien
cagccgcaagattcttaactcatta

SEQ ID NO: 4781171 - DNA, 25 bp, Homo sapien
tggacatcttgaggcgaggcattat

SEQ ID NO: 4781172 - DNA, 25 bp, Homo sapien
actgtgggccctttgcgcctcgtgc

SEQ ID NO: 4781173 - DNA, 25 bp, Homo sapien
gcctgagacttggaatggagacacc

SEQ ID NO: 4781174 - DNA, 25 bp, Homo sapien
ccaaagatgctatcatacgtgccca

SEQ ID NO: 4781175 - DNA, 25 bp, Homo sapien
aatttacctgaagaccctgctctcc

SEQ ID NO: 4781176 - DNA, 25 bp, Homo sapien
cctaacacaggctagggtgtcacct

SEQ ID NO: 4781177 - DNA, 25 bp, Homo sapien
ctgtgtggtcatttctgtctccatc

SEQ ID NO: 4781178 - DNA, 25 bp, Homo sapien
tcaggctgtgtggtcatttctgtct

SEQ ID NO: 4781179 - DNA, 25 bp, Homo sapien
aggctgtgtggtcatttctgtctcc

SEQ ID NO: 4781180 - DNA, 25 bp, Homo sapien
ggctgtgtggtcatttctgtctcca

SEQ ID NO: 4781181 - DNA, 25 bp, Homo sapien
ggggtgccataggatccttcacctt

SEQ ID NO: 4781182 - DNA, 25 bp, Homo sapien
ggtgccataggatccttcaccttgt

SEQ ID NO: 4781183 - DNA, 25 bp, Homo sapien
gggtgccataggatccttcaccttg

SEQ ID NO: 4781184 - DNA, 25 bp, Homo sapien
gggggtgccataggatccttcacct

SEQ ID NO: 4781185 - DNA, 25 bp, Homo sapien
tatcagcacgcaagctctctggacg

SEQ ID NO: 4781186 - DNA, 25 bp, Homo sapien
caaacatatagaatgcgccccaacg

SEQ ID NO: 4781187 - DNA, 25 bp, Homo sapien
ttgactaaatgaagagtgcaccaga

SEQ ID NO: 4781188 - DNA, 25 bp, Homo sapien
cctgcgaggtgcttcgctggaaagc

SEQ ID NO: 4781189 - DNA, 25 bp, Homo sapien
gacggtccctttcaagctgagcata

SEQ ID NO: 4781190 - DNA, 25 bp, Homo sapien
tagtttggggtccagacctattctg

SEQ ID NO: 4781191 - DNA, 25 bp, Homo sapien
tgagcatacccagttcctgagttag

SEQ ID NO: 4781192 - DNA, 25 bp, Homo sapien
ctgtcaccatcagggagacggtccc

SEQ ID NO: 4781193 - DNA, 25 bp, Homo sapien
tattttctcactatgcccagatctg

SEQ ID NO: 4781194 - DNA, 25 bp, Homo sapien
gccttgctattaggggattccaggg

SEQ ID NO: 4781195 - DNA, 25 bp, Homo sapien
tctcactatgcccagatctgcactg

SEQ ID NO: 4781196 - DNA, 25 bp, Homo sapien
actatgcccagatctgcactggacc

SEQ ID NO: 4781197 - DNA, 25 bp, Homo sapien
caatctagcctcctttggctctcgt

SEQ ID NO: 4781198 - DNA, 25 bp, Homo sapien
cagagcccaatctagcctcctttgg

SEQ ID NO: 4781199 - DNA, 25 bp, Homo sapien
tctagcctcctttggctctcgtgct

SEQ ID NO: 4781200 - DNA, 25 bp, Homo sapien
aggaccagagcccaatctagcctcc

SEQ ID NO: 4781201 - DNA, 25 bp, Homo sapien
tataaacgagtatttgctgaagcca

SEQ ID NO: 4781202 - DNA, 25 bp, Homo sapien
ggtgttacaccagagaagcagaggt

SEQ ID NO: 4781203 - DNA, 25 bp, Homo sapien
cagaggttctgatagacaggtattc

SEQ ID NO: 4781204 - DNA, 25 bp, Homo sapien
atttttaccaacacatggcattgag

SEQ ID NO: 4781205 - DNA, 25 bp, Homo sapien
ccattccttgctaaatctccatctc

SEQ ID NO: 4781206 - DNA, 25 bp, Homo sapien
cccatagtcactggccattgaggcc

SEQ ID NO: 4781207 - DNA, 25 bp, Homo sapien
catctctctgcagatcatatggata

SEQ ID NO: 4781208 - DNA, 25 bp, Homo sapien
tgtaggaggctcctttattgagaca

SEQ ID NO: 4781209 - DNA, 25 bp, Homo sapien
tgccaactgccaccggttccttcac

SEQ ID NO: 4781210 - DNA, 25 bp, Homo sapien
gctgccaactgccaccggttccttc

SEQ ID NO: 4781211 - DNA, 25 bp, Homo sapien
tgcagcagcctgcgcgtaccgctgc

SEQ ID NO: 4781212 - DNA, 25 bp, Homo sapien
agcctgcgcgtaccgctgccaactg

SEQ ID NO: 4781213 - DNA, 25 bp, Homo sapien
ccaaccgagcgtactgcacaggaaa

SEQ ID NO: 4781214 - DNA, 25 bp, Homo sapien
actccagcagaagcgcccggagagt

SEQ ID NO: 4781215 - DNA, 25 bp, Homo sapien
aggaagccaggatcaagcccagcgc

SEQ ID NO: 4781216 - DNA, 25 bp, Homo sapien
ttccgcgcgatggaagaggcgccaa

SEQ ID NO: 4781217 - DNA, 25 bp, Homo sapien
cctccttggtgagcggcatgaggcc

SEQ ID NO: 4781218 - DNA, 25 bp, Homo sapien
tcatagagccgcaggtcgaggaagt

SEQ ID NO: 4781219 - DNA, 25 bp, Homo sapien
gcgcaggagtgactcgttgcggatc

SEQ ID NO: 4781220 - DNA, 25 bp, Homo sapien
tgctcgatggccagttccacggcgg

SEQ ID NO: 4781221 - DNA, 25 bp, Homo sapien
cagtagcagtagcaggcgcgcgggc

SEQ ID NO: 4781222 - DNA, 25 bp, Homo sapien
aggccccgggcgccagaggcagcag

SEQ ID NO: 4781223 - DNA, 25 bp, Homo sapien
cagcagtagcagtagcaggcgcgcg

SEQ ID NO: 4781224 - DNA, 25 bp, Homo sapien
caggccccgggcgccagaggcagca

SEQ ID NO: 4781225 - DNA, 25 bp, Homo sapien
gcccggagctccgcggggaagccat

SEQ ID NO: 4781226 - DNA, 25 bp, Homo sapien
gcggcccgggctgcccggagctccg

SEQ ID NO: 4781227 - DNA, 25 bp, Homo sapien
cggcggcccgggctgcccggagctc

SEQ ID NO: 4781228 - DNA, 25 bp, Homo sapien
ggctgcccggagctccgcggggaag

SEQ ID NO: 4781229 - DNA, 25 bp, Homo sapien
cgcgccgcgggctgcgggcgccggc

SEQ ID NO: 4781230 - DNA, 25 bp, Homo sapien
gccgcgccgcgggctgcgggcgccg

SEQ ID NO: 4781231 - DNA, 25 bp, Homo sapien
gcgccgcgggctgcgggcgccggct

SEQ ID NO: 4781232 - DNA, 25 bp, Homo sapien
ccgcgggctgcgggcgccggctcac

SEQ ID NO: 4781233 - DNA, 25 bp, Homo sapien
cgccccgcgccaaggtcttcccgcg

SEQ ID NO: 4781234 - DNA, 25 bp, Homo sapien
ccgcggcgcccgcgcaatggcgccg

SEQ ID NO: 4781235 - DNA, 25 bp, Homo sapien
ggcgcccgcgcaatggcgccggccc

SEQ ID NO: 4781236 - DNA, 25 bp, Homo sapien
ccgcgccaaggtcttcccgcggcgc

SEQ ID NO: 4781237 - DNA, 25 bp, Homo sapien
gttccggctcggctcagaacggccg

SEQ ID NO: 4781238 - DNA, 25 bp, Homo sapien
cgtctcgggctagggttccggctcg

SEQ ID NO: 4781239 - DNA, 25 bp, Homo sapien
cgggctagggttccggctcggctca

SEQ ID NO: 4781240 - DNA, 25 bp, Homo sapien
tagggttccggctcggctcagaacg

SEQ ID NO: 4781241 - DNA, 25 bp, Homo sapien
caggaaacgcgggaggcgaaggcga

SEQ ID NO: 4781242 - DNA, 25 bp, Homo sapien
gggtgggagcgagcggagtgcggga

SEQ ID NO: 4781243 - DNA, 25 bp, Homo sapien
tgacggatcaatcacgccgggaagg

SEQ ID NO: 4781244 - DNA, 25 bp, Homo sapien
tctcccgccgggagctgctaggcgg

SEQ ID NO: 4781245 - DNA, 25 bp, Homo sapien
ttaatgcgaggaacacagtaggaca

SEQ ID NO: 4781246 - DNA, 25 bp, Homo sapien
cgagccagatgtacccgagtgagct

SEQ ID NO: 4781247 - DNA, 25 bp, Homo sapien
gagtgagctgacctaagaccttggg

SEQ ID NO: 4781248 - DNA, 25 bp, Homo sapien
ccaggtcgcactggccaatcttagc

SEQ ID NO: 4781249 - DNA, 25 bp, Homo sapien
ctgcagcacccctggcattggtggc

SEQ ID NO: 4781250 - DNA, 25 bp, Homo sapien
agcacccctggcattggtggcacca

SEQ ID NO: 4781251 - DNA, 25 bp, Homo sapien
tcactgcagcacccctggcattggt

SEQ ID NO: 4781252 - DNA, 25 bp, Homo sapien
gcagcacccctggcattggtggcac

SEQ ID NO: 4781253 - DNA, 25 bp, Homo sapien
tctggaagtgacaggcgatgaatac

SEQ ID NO: 4781254 - DNA, 25 bp, Homo sapien
gattgcctgggttgacgtcgctgct

SEQ ID NO: 4781255 - DNA, 25 bp, Homo sapien
cgtcgctgctagaggatgatgttaa

SEQ ID NO: 4781256 - DNA, 25 bp, Homo sapien
ctgaggcgctttgtccagatctgac

SEQ ID NO: 4781257 - DNA, 25 bp, Homo sapien
ttgtcttgttgcctgggcttattca

SEQ ID NO: 4781258 - DNA, 25 bp, Homo sapien
tcatttgtcttgttgcctgggctta

SEQ ID NO: 4781259 - DNA, 25 bp, Homo sapien
atttgtcttgttgcctgggcttatt

SEQ ID NO: 4781260 - DNA, 25 bp, Homo sapien
gtttcatttgtcttgttgcctgggc

SEQ ID NO: 4781261 - DNA, 25 bp, Homo sapien
gacttctagaagctgcgcctggcag

SEQ ID NO: 4781262 - DNA, 25 bp, Homo sapien
ggaaaatagacactcccttgggcag

SEQ ID NO: 4781263 - DNA, 25 bp, Homo sapien
gacagggtctccgacacaaggatgg

SEQ ID NO: 4781264 - DNA, 25 bp, Homo sapien
tccctatgctgatgcgagatggctc

SEQ ID NO: 4781265 - DNA, 25 bp, Homo sapien
cagagtcaggcacatttggagggca

SEQ ID NO: 4781266 - DNA, 25 bp, Homo sapien
ttatccaaagttgtccagcctccgg

SEQ ID NO: 4781267 - DNA, 25 bp, Homo sapien
gctggatcagcttctacgacttggt

SEQ ID NO: 4781268 - DNA, 25 bp, Homo sapien
caggtctctttacacgttgaacagg

SEQ ID NO: 4781269 - DNA, 25 bp, Homo sapien
tgcaaaatgggaatagccccgctct

SEQ ID NO: 4781270 - DNA, 25 bp, Homo sapien
tggagagctctcagaacagggaccc

SEQ ID NO: 4781271 - DNA, 25 bp, Homo sapien
tagaaactttgagcaccagagacct

SEQ ID NO: 4781272 - DNA, 25 bp, Homo sapien
catctttggagacagagcgtacgag

SEQ ID NO: 4781273 - DNA, 25 bp, Homo sapien
gatgtgtgtcagttaagagcaaggc

SEQ ID NO: 4781274 - DNA, 25 bp, Homo sapien
gccacatgactaccagtggccaaga

SEQ ID NO: 4781275 - DNA, 25 bp, Homo sapien
gaagccactatgtggagactgcaca

SEQ ID NO: 4781276 - DNA, 25 bp, Homo sapien
cccatctaagtcaaaagttgttgct

SEQ ID NO: 4781277 - DNA, 25 bp, Homo sapien
agggaacaacatgactaaggcacag

SEQ ID NO: 4781278 - DNA, 25 bp, Homo sapien
cccactggactgttacatgggaatc

SEQ ID NO: 4781279 - DNA, 25 bp, Homo sapien
ccaatgaatgccgtcgacgtgaagt

SEQ ID NO: 4781280 - DNA, 25 bp, Homo sapien
tttgttgcagcaagaagtactacca

SEQ ID NO: 4781281 - DNA, 25 bp, Homo sapien
actgctctcaaaggaagagtgaaag

SEQ ID NO: 4781282 - DNA, 25 bp, Homo sapien
gaaagttgtgaatggtttcctgtaa

SEQ ID NO: 4781283 - DNA, 25 bp, Homo sapien
gccctggtgttgctggcactgctct

SEQ ID NO: 4781284 - DNA, 25 bp, Homo sapien
cctgtaaaatttgtctctcgcgtcc

SEQ ID NO: 4781285 - DNA, 25 bp, Homo sapien
cttatagccttcaggcaggtaataa

SEQ ID NO: 4781286 - DNA, 25 bp, Homo sapien
ttatagccttcaggcaggtaataag

SEQ ID NO: 4781287 - DNA, 25 bp, Homo sapien
acctccaatcctggcagggctgaga

SEQ ID NO: 4781288 - DNA, 25 bp, Homo sapien
gcagggctgagaggagccgcctctg

SEQ ID NO: 4781289 - DNA, 25 bp, Homo sapien
cagtgtgaggaacgcttccatgtcc

SEQ ID NO: 4781290 - DNA, 25 bp, Homo sapien
gaaatcgctgccagaatctgctgcc

SEQ ID NO: 4781291 - DNA, 25 bp, Homo sapien
ttgcctgcgttcagttcagaaatcg

SEQ ID NO: 4781292 - DNA, 25 bp, Homo sapien
caagtcaccgtcagtcagtgtgagg

SEQ ID NO: 4781293 - DNA, 25 bp, Homo sapien
ctccctcaccacgcacgagacagag

SEQ ID NO: 4781294 - DNA, 25 bp, Homo sapien
tcaccacgcacgagacagagacaga

SEQ ID NO: 4781295 - DNA, 25 bp, Homo sapien
tccctcaccacgcacgagacagaga

SEQ ID NO: 4781296 - DNA, 25 bp, Homo sapien
cctcaccacgcacgagacagagaca

SEQ ID NO: 4781297 - DNA, 25 bp, Homo sapien
tttcttaaggattccagtcagttca

SEQ ID NO: 4781298 - DNA, 25 bp, Homo sapien
ttctcaagtgataatttcttaagga

SEQ ID NO: 4781299 - DNA, 25 bp, Homo sapien
aaatgggctgatatttctcaagtga

SEQ ID NO: 4781300 - DNA, 25 bp, Homo sapien
ttcttaaggattccagtcagttcat

SEQ ID NO: 4781301 - DNA, 25 bp, Homo sapien
ccaggcctggcactataatgagatt

SEQ ID NO: 4781302 - DNA, 25 bp, Homo sapien
tacagaagatggtcacggaaagact

SEQ ID NO: 4781303 - DNA, 25 bp, Homo sapien
ccagggtttggctcaagtgtgcaga

SEQ ID NO: 4781304 - DNA, 25 bp, Homo sapien
gccacaagggcacaagaagatgatt

SEQ ID NO: 4781305 - DNA, 25 bp, Homo sapien
catgtttgtcgtaaatcttcttaaa

SEQ ID NO: 4781306 - DNA, 25 bp, Homo sapien
acctttagcatagtgaagacaaaaa

SEQ ID NO: 4781307 - DNA, 25 bp, Homo sapien
catacctttagcatagtgaagacaa

SEQ ID NO: 4781308 - DNA, 25 bp, Homo sapien
gagggacatgtttgtcgtaaatctt

SEQ ID NO: 4781309 - DNA, 25 bp, Homo sapien
cactgctggagcccccactgctctt

SEQ ID NO: 4781310 - DNA, 25 bp, Homo sapien
gtgatggtgccactgctggagcccc

SEQ ID NO: 4781311 - DNA, 25 bp, Homo sapien
gatggtgccactgctggagccccca

SEQ ID NO: 4781312 - DNA, 25 bp, Homo sapien
tgctggagcccccactgctcttgga

SEQ ID NO: 4781313 - DNA, 25 bp, Homo sapien
ggaagacactgaggactctgcagtg

SEQ ID NO: 4781314 - DNA, 25 bp, Homo sapien
ctgccgatgggatgacgaggaagac

SEQ ID NO: 4781315 - DNA, 25 bp, Homo sapien
gaagacactgaggactctgcagtgt

SEQ ID NO: 4781316 - DNA, 25 bp, Homo sapien
ccgatgggatgacgaggaagacact

SEQ ID NO: 4781317 - DNA, 25 bp, Homo sapien
tccagatggaggccttttgctggtc

SEQ ID NO: 4781318 - DNA, 25 bp, Homo sapien
agggcgtgagggttggagaggtgct

SEQ ID NO: 4781319 - DNA, 25 bp, Homo sapien
cagatggaggccttttgctggtctc

SEQ ID NO: 4781320 - DNA, 25 bp, Homo sapien
tgagggttggagaggtgctcttgga

SEQ ID NO: 4781321 - DNA, 25 bp, Homo sapien
ggagacattcctactgatcctatgt

SEQ ID NO: 4781322 - DNA, 25 bp, Homo sapien
gaaatagaacacctgaatagtccta

SEQ ID NO: 4781323 - DNA, 25 bp, Homo sapien
taagcttccaccataaggaactaga

SEQ ID NO: 4781324 - DNA, 25 bp, Homo sapien
taatcaatgggccaaagaggaaatc

SEQ ID NO: 4781325 - DNA, 25 bp, Homo sapien
gacaagacattgtctatgctgccac

SEQ ID NO: 4781326 - DNA, 25 bp, Homo sapien
tgggcagcgatttgggacaagacat

SEQ ID NO: 4781327 - DNA, 25 bp, Homo sapien
cccacagggcttgaccgatggctgg

SEQ ID NO: 4781328 - DNA, 25 bp, Homo sapien
ggctgggtttctgctccaataatcc

SEQ ID NO: 4781329 - DNA, 25 bp, Homo sapien
cccgatgaatgaggcgagtggttga

SEQ ID NO: 4781330 - DNA, 25 bp, Homo sapien
acctaccccactggagccgcccgat

SEQ ID NO: 4781331 - DNA, 25 bp, Homo sapien
gaagtttccagaattggcagaagag

SEQ ID NO: 4781332 - DNA, 25 bp, Homo sapien
tgagcggttaagcagctccccaccg

SEQ ID NO: 4781333 - DNA, 25 bp, Homo sapien
ctttcagcttgtcactcgggagtct

SEQ ID NO: 4781334 - DNA, 25 bp, Homo sapien
gtctgccttcccgttgtgacgcgtc

SEQ ID NO: 4781335 - DNA, 25 bp, Homo sapien
ggaccgatcagagctccacagctca

SEQ ID NO: 4781336 - DNA, 25 bp, Homo sapien
gttgtgacgcgtccgggaccgatca

SEQ ID NO: 4781337 - DNA, 25 bp, Homo sapien
cacactgatggctgcacatgcccat

SEQ ID NO: 4781338 - DNA, 25 bp, Homo sapien
tcgggagccgagcaggcgggcatct

SEQ ID NO: 4781339 - DNA, 25 bp, Homo sapien
aacgggcatcccacagctaaactcg

SEQ ID NO: 4781340 - DNA, 25 bp, Homo sapien
tggagctttgcagcaacgggcatcc

SEQ ID NO: 4781341 - DNA, 25 bp, Homo sapien
cagccctcattgtggagtccagagc

SEQ ID NO: 4781342 - DNA, 25 bp, Homo sapien
tgcagagcggcttgtcttgtcctgg

SEQ ID NO: 4781343 - DNA, 25 bp, Homo sapien
tggctcaggctcgtcagagaaaggc

SEQ ID NO: 4781344 - DNA, 25 bp, Homo sapien
cgattggacattcggttccaccagg

SEQ ID NO: 4781345 - DNA, 25 bp, Homo sapien
atgctccagggctgtcggaccttcg

SEQ ID NO: 4781346 - DNA, 25 bp, Homo sapien
tgccagcagtcgaacaagttccgtg

SEQ ID NO: 4781347 - DNA, 25 bp, Homo sapien
gtcatcgggcagcactgggatgctc

SEQ ID NO: 4781348 - DNA, 25 bp, Homo sapien
cacccttgtcatcgggcagcactgg

SEQ ID NO: 4781349 - DNA, 25 bp, Homo sapien
aaaggcatcattttacctgcaaata

SEQ ID NO: 4781350 - DNA, 25 bp, Homo sapien
aggcatcattttacctgcaaatatg

SEQ ID NO: 4781351 - DNA, 25 bp, Homo sapien
ctatggacacaaaaggcatcatttt

SEQ ID NO: 4781352 - DNA, 25 bp, Homo sapien
caaaaggcatcattttacctgcaaa

SEQ ID NO: 4781353 - DNA, 25 bp, Homo sapien
agagtggctgcggactgattccgaa

SEQ ID NO: 4781354 - DNA, 25 bp, Homo sapien
tgattccgaataacaaactcttggc

SEQ ID NO: 4781355 - DNA, 25 bp, Homo sapien
tgtatgagatccagcgagagtggct

SEQ ID NO: 4781356 - DNA, 25 bp, Homo sapien
ggtggagtaggatcactggacttgg

SEQ ID NO: 4781357 - DNA, 25 bp, Homo sapien
ccccttggtttagcagatatttcac

SEQ ID NO: 4781358 - DNA, 25 bp, Homo sapien
tatccattttttgcacgaagagtga

SEQ ID NO: 4781359 - DNA, 25 bp, Homo sapien
caccaggtcaaaggccgtgtatcca

SEQ ID NO: 4781360 - DNA, 25 bp, Homo sapien
tttgcacgaagagtgacatcggccc

SEQ ID NO: 4781361 - DNA, 25 bp, Homo sapien
ggactaaaatgagcctgtgccgctt

SEQ ID NO: 4781362 - DNA, 25 bp, Homo sapien
gggtttgtatgcagcatctcaggac

SEQ ID NO: 4781363 - DNA, 25 bp, Homo sapien
catctgtctggccttgtcgctgagg

SEQ ID NO: 4781364 - DNA, 25 bp, Homo sapien
gcctcaatgtcgtcatagtcctggg

SEQ ID NO: 4781365 - DNA, 25 bp, Homo sapien
tgcttgtcaacatccgcgtgcctct

SEQ ID NO: 4781366 - DNA, 25 bp, Homo sapien
tgcatgagggccgtccagccatgca

SEQ ID NO: 4781367 - DNA, 25 bp, Homo sapien
agctgctagcatcagtggcgtcgcc

SEQ ID NO: 4781368 - DNA, 25 bp, Homo sapien
gggtcttcatcggcaatctctttga

SEQ ID NO: 4781369 - DNA, 25 bp, Homo sapien
gcatggaaaatatcaggtcgccttt

SEQ ID NO: 4781370 - DNA, 25 bp, Homo sapien
atgcatggaaaatatcaggtcgcct

SEQ ID NO: 4781371 - DNA, 25 bp, Homo sapien
tgcatggaaaatatcaggtcgcctt

SEQ ID NO: 4781372 - DNA, 25 bp, Homo sapien
atggaaaatatcaggtcgccttttc

SEQ ID NO: 4781373 - DNA, 25 bp, Homo sapien
gacctacgtaatggacaaatccagc

SEQ ID NO: 4781374 - DNA, 25 bp, Homo sapien
taattggagacctacgtaatggaca

SEQ ID NO: 4781375 - DNA, 25 bp, Homo sapien
gcaatctaattggagacctacgtaa

SEQ ID NO: 4781376 - DNA, 25 bp, Homo sapien
aagcaatctaattggagacctacgt

SEQ ID NO: 4781377 - DNA, 25 bp, Homo sapien
gaaacctgggatggagaacgcatgc

SEQ ID NO: 4781378 - DNA, 25 bp, Homo sapien
ccagggcactgcgatgaaaatttta

SEQ ID NO: 4781379 - DNA, 25 bp, Homo sapien
gctgagtatctcacacgccagagga

SEQ ID NO: 4781380 - DNA, 25 bp, Homo sapien
ttaagatgaccaagaccacccaggt

SEQ ID NO: 4781381 - DNA, 25 bp, Homo sapien
ctgaagctactttcttcagtgcttg

SEQ ID NO: 4781382 - DNA, 25 bp, Homo sapien
tttcaggtctttttagccaatgtgc

SEQ ID NO: 4781383 - DNA, 25 bp, Homo sapien
cagcatctcttgattgatggggcta

SEQ ID NO: 4781384 - DNA, 25 bp, Homo sapien
cagcccacctactgttactccctgg

SEQ ID NO: 4781385 - DNA, 25 bp, Homo sapien
tgcccagggctaccaaatcactctg

SEQ ID NO: 4781386 - DNA, 25 bp, Homo sapien
cactctagcagaagtgactactgta

SEQ ID NO: 4781387 - DNA, 25 bp, Homo sapien
tattggaacctagccatacctgact

SEQ ID NO: 4781388 - DNA, 25 bp, Homo sapien
agagtgggcccagaacctgcatgtc

SEQ ID NO: 4781389 - DNA, 25 bp, Homo sapien
ttctgcgtgtccttccagtagagca

SEQ ID NO: 4781390 - DNA, 25 bp, Homo sapien
ctcagcttaagccacataaacacaa

SEQ ID NO: 4781391 - DNA, 25 bp, Homo sapien
gtagagcaatcctcagcttaagcca

SEQ ID NO: 4781392 - DNA, 25 bp, Homo sapien
tgtccttccagtagagcaatcctca

SEQ ID NO: 4781393 - DNA, 25 bp, Homo sapien
ccccagccggttctgggcattgaca

SEQ ID NO: 4781394 - DNA, 25 bp, Homo sapien
tcagcgggtccaggtagtctacaag

SEQ ID NO: 4781395 - DNA, 25 bp, Homo sapien
tccagtgcaacctcgaaggcggtct

SEQ ID NO: 4781396 - DNA, 25 bp, Homo sapien
tgatggtccacaaaggcaccggctt

SEQ ID NO: 4781397 - DNA, 25 bp, Homo sapien
cactcgggggccagcttatgtcatc

SEQ ID NO: 4781398 - DNA, 25 bp, Homo sapien
tcgggggccagcttatgtcatcctt

SEQ ID NO: 4781399 - DNA, 25 bp, Homo sapien
cacacagcactcgggggccagctta

SEQ ID NO: 4781400 - DNA, 25 bp, Homo sapien
ggccagcttatgtcatccttaattg

SEQ ID NO: 4781401 - DNA, 25 bp, Homo sapien
aagaggtcttattctggcgccaggc

SEQ ID NO: 4781402 - DNA, 25 bp, Homo sapien
gctgtgtatctccaagctggaagcg

SEQ ID NO: 4781403 - DNA, 25 bp, Homo sapien
gaagcggccctggactaacaagaaa

SEQ ID NO: 4781404 - DNA, 25 bp, Homo sapien
tccttcccgggagccagttttgcac

SEQ ID NO: 4781405 - DNA, 25 bp, Homo sapien
aggaagcgcaccagcggttcgtggc

SEQ ID NO: 4781406 - DNA, 25 bp, Homo sapien
ttgcggctgttgaccgaggcaccgc

SEQ ID NO: 4781407 - DNA, 25 bp, Homo sapien
tggccgcctgcatgagcgcgctcca

SEQ ID NO: 4781408 - DNA, 25 bp, Homo sapien
tccagccgtagtggttgcggctgtt

SEQ ID NO: 4781409 - DNA, 25 bp, Homo sapien
gtccgagcaatccacgggcaccgga

SEQ ID NO: 4781410 - DNA, 25 bp, Homo sapien
ctcgtccgagcaatccacgggcacc

SEQ ID NO: 4781411 - DNA, 25 bp, Homo sapien
tcgtccgagcaatccacgggcaccg

SEQ ID NO: 4781412 - DNA, 25 bp, Homo sapien
tccgagcaatccacgggcaccggag

SEQ ID NO: 4781413 - DNA, 25 bp, Homo sapien
cgccctggtcacacgcgcgcagcag

SEQ ID NO: 4781414 - DNA, 25 bp, Homo sapien
ctccgtgtcgccctggtcacacgcg

SEQ ID NO: 4781415 - DNA, 25 bp, Homo sapien
gccgcgccgtctccgtgtcgccctg

SEQ ID NO: 4781416 - DNA, 25 bp, Homo sapien
ccgtctccgtgtcgccctggtcaca

SEQ ID NO: 4781417 - DNA, 25 bp, Homo sapien
tggtgaggtttattttgagcagcat

SEQ ID NO: 4781418 - DNA, 25 bp, Homo sapien
tttggtgaggtttattttgagcagc

SEQ ID NO: 4781419 - DNA, 25 bp, Homo sapien
tttttggtgaggtttattttgagca

SEQ ID NO: 4781420 - DNA, 25 bp, Homo sapien
ttggtgaggtttattttgagcagca

SEQ ID NO: 4781421 - DNA, 25 bp, Homo sapien
tgtaaggcctaattgcatttctctt

SEQ ID NO: 4781422 - DNA, 25 bp, Homo sapien
agtccatgtcttgtaaggcctaatt

SEQ ID NO: 4781423 - DNA, 25 bp, Homo sapien
ctgtatctgaacctctattgagaag

SEQ ID NO: 4781424 - DNA, 25 bp, Homo sapien
gtcttgtaaggcctaattgcatttc

SEQ ID NO: 4781425 - DNA, 25 bp, Homo sapien
tattgtcgcaggttgtgaatatctc

SEQ ID NO: 4781426 - DNA, 25 bp, Homo sapien
caatctgtggggcttatggtaacct

SEQ ID NO: 4781427 - DNA, 25 bp, Homo sapien
tgtcctctcaggatttgcttgtaga

SEQ ID NO: 4781428 - DNA, 25 bp, Homo sapien
atggtaacctgtctccatggtgacg

SEQ ID NO: 4781429 - DNA, 25 bp, Homo sapien
caatgacatttgcaggctgcccaga

SEQ ID NO: 4781430 - DNA, 25 bp, Homo sapien
cagacgtctctgatcttcttgaatg

SEQ ID NO: 4781431 - DNA, 25 bp, Homo sapien
tgttgtcactagcaatgacatttgc

SEQ ID NO: 4781432 - DNA, 25 bp, Homo sapien
catggtgttacctattgaatacagg

SEQ ID NO: 4781433 - DNA, 25 bp, Homo sapien
caaattggacttctgctggttttgt

SEQ ID NO: 4781434 - DNA, 25 bp, Homo sapien
ttctacccctttctgtgttcttcaa

SEQ ID NO: 4781435 - DNA, 25 bp, Homo sapien
tctgtgttcttcaaattggacttct

SEQ ID NO: 4781436 - DNA, 25 bp, Homo sapien
tcttcaaattggacttctgctggtt

SEQ ID NO: 4781437 - DNA, 25 bp, Homo sapien
gaggaactgtacaaaacagggatca

SEQ ID NO: 4781438 - DNA, 25 bp, Homo sapien
gagagaaaaatacggctgaagggct

SEQ ID NO: 4781439 - DNA, 25 bp, Homo sapien
gaagggcttcttaggtccattgggc

SEQ ID NO: 4781440 - DNA, 25 bp, Homo sapien
gagatacactccagatgtggcttca

SEQ ID NO: 4781441 - DNA, 25 bp, Homo sapien
cattggagtagttggttctttgtca

SEQ ID NO: 4781442 - DNA, 25 bp, Homo sapien
tccaagagacgggagcatgatcctc

SEQ ID NO: 4781443 - DNA, 25 bp, Homo sapien
ggttctttgtcaggtgtctgctctc

SEQ ID NO: 4781444 - DNA, 25 bp, Homo sapien
aaggctctcggcaacactttccatt

SEQ ID NO: 4781445 - DNA, 25 bp, Homo sapien
tctctaaagccaggtctgtaggagt

SEQ ID NO: 4781446 - DNA, 25 bp, Homo sapien
tctaaagccaggtctgtaggagtgg

SEQ ID NO: 4781447 - DNA, 25 bp, Homo sapien
gctctctaaagccaggtctgtagga

SEQ ID NO: 4781448 - DNA, 25 bp, Homo sapien
taaagccaggtctgtaggagtggaa

SEQ ID NO: 4781449 - DNA, 25 bp, Homo sapien
gccagggtaatgctctgtaacaacc

SEQ ID NO: 4781450 - DNA, 25 bp, Homo sapien
tgtaacaaccactcccaaattcagg

SEQ ID NO: 4781451 - DNA, 25 bp, Homo sapien
gggctccaccagtgatgtctattta

SEQ ID NO: 4781452 - DNA, 25 bp, Homo sapien
gacctgtggttgtaagatggctgcc

SEQ ID NO: 4781453 - DNA, 25 bp, Homo sapien
ttatcatagcagttgatccggtttg

SEQ ID NO: 4781454 - DNA, 25 bp, Homo sapien
tatcatagcagttgatccggtttgt

SEQ ID NO: 4781455 - DNA, 25 bp, Homo sapien
atcatagcagttgatccggtttgtg

SEQ ID NO: 4781456 - DNA, 25 bp, Homo sapien
tttatcatagcagttgatccggttt

SEQ ID NO: 4781457 - DNA, 25 bp, Homo sapien
gggtggtcatccagtgtctgctggc

SEQ ID NO: 4781458 - DNA, 25 bp, Homo sapien
ggccagctgcgtgaatgattgattg

SEQ ID NO: 4781459 - DNA, 25 bp, Homo sapien
tgtctggtcattactgtagcatttg

SEQ ID NO: 4781460 - DNA, 25 bp, Homo sapien
tagaaggcgggtgtgatgtgtctgg

SEQ ID NO: 4781461 - DNA, 25 bp, Homo sapien
cctgagttttatgttcctgggagag

SEQ ID NO: 4781462 - DNA, 25 bp, Homo sapien
tcagttccctgcacgatacagatgt

SEQ ID NO: 4781463 - DNA, 25 bp, Homo sapien
ccttctcggaaaggcaacaacctct

SEQ ID NO: 4781464 - DNA, 25 bp, Homo sapien
acatggccttgggacgttggacacc

SEQ ID NO: 4781465 - DNA, 25 bp, Homo sapien
gcatctcataaccaatatctgacat

SEQ ID NO: 4781466 - DNA, 25 bp, Homo sapien
agaagcatctcataaccaatatctg

SEQ ID NO: 4781467 - DNA, 25 bp, Homo sapien
ctccagaagcatctcataaccaata

SEQ ID NO: 4781468 - DNA, 25 bp, Homo sapien
ccagaagcatctcataaccaatatc

SEQ ID NO: 4781469 - DNA, 25 bp, Homo sapien
ccatcaagccagacagtgtgcagca

SEQ ID NO: 4781470 - DNA, 25 bp, Homo sapien
tttgagcagaagagattccacctcg

SEQ ID NO: 4781471 - DNA, 25 bp, Homo sapien
gaagccgcactactttcactggaaa

SEQ ID NO: 4781472 - DNA, 25 bp, Homo sapien
cacctcgtggccaggaagttcctct

SEQ ID NO: 4781473 - DNA, 25 bp, Homo sapien
gaacaagtggtagggagtgcaacct

SEQ ID NO: 4781474 - DNA, 25 bp, Homo sapien
caacagggcttcacgtccgagctat

SEQ ID NO: 4781475 - DNA, 25 bp, Homo sapien
gacccttgtgggtacaggacaggaa

SEQ ID NO: 4781476 - DNA, 25 bp, Homo sapien
gaatccaggcaaagaagcggctttc

SEQ ID NO: 4781477 - DNA, 25 bp, Homo sapien
cttatgcttgcacttcccgtgtctg

SEQ ID NO: 4781478 - DNA, 25 bp, Homo sapien
gaaatgagctttggccagcggggtg

SEQ ID NO: 4781479 - DNA, 25 bp, Homo sapien
gaagaaatgagctttggccagcggg

SEQ ID NO: 4781480 - DNA, 25 bp, Homo sapien
tatgcttgcacttcccgtgtctgtc

SEQ ID NO: 4781481 - DNA, 25 bp, Homo sapien
gttcagcgtggagcttgtgcctcat

SEQ ID NO: 4781482 - DNA, 25 bp, Homo sapien
gagtgggtgggccatgcgcagttca

SEQ ID NO: 4781483 - DNA, 25 bp, Homo sapien
tgggtgggccatgcgcagttcagcg

SEQ ID NO: 4781484 - DNA, 25 bp, Homo sapien
cagttcagcgtggagcttgtgcctc

SEQ ID NO: 4781485 - DNA, 25 bp, Homo sapien
ttattcatggaccacaggcaactac

SEQ ID NO: 4781486 - DNA, 25 bp, Homo sapien
caggcatccacataagcaaagatgt

SEQ ID NO: 4781487 - DNA, 25 bp, Homo sapien
accacaggcaactactggaaatggg

SEQ ID NO: 4781488 - DNA, 25 bp, Homo sapien
gcatccacataagcaaagatgtgtt

SEQ ID NO: 4781489 - DNA, 25 bp, Homo sapien
cagtactcccgcatgggctcatgcg

SEQ ID NO: 4781490 - DNA, 25 bp, Homo sapien
tgaagtgaataaagtctgcgtgctt

SEQ ID NO: 4781491 - DNA, 25 bp, Homo sapien
ggatcacccagatagcaagtttagg

SEQ ID NO: 4781492 - DNA, 25 bp, Homo sapien
ggctcatgcgaatgtgaaaaacctt

SEQ ID NO: 4781493 - DNA, 25 bp, Homo sapien
aattgttggcacagagaatgcaggc

SEQ ID NO: 4781494 - DNA, 25 bp, Homo sapien
caaactggacagtactgccttagct

SEQ ID NO: 4781495 - DNA, 25 bp, Homo sapien
gaatgcaggccttatgtcgccaggt

SEQ ID NO: 4781496 - DNA, 25 bp, Homo sapien
tggtgggaactacggcaaactggac

SEQ ID NO: 4781497 - DNA, 25 bp, Homo sapien
agaggattccctcagcggctgtgaa

SEQ ID NO: 4781498 - DNA, 25 bp, Homo sapien
cagcttgggactttgggacatacgc

SEQ ID NO: 4781499 - DNA, 25 bp, Homo sapien
agttgtatgtatcccttatggcccc

SEQ ID NO: 4781500 - DNA, 25 bp, Homo sapien
tcaagtcggtccatgtgtcaggcgt

SEQ ID NO: 4781501 - DNA, 25 bp, Homo sapien
acattgtttatttcctggaggattt

SEQ ID NO: 4781502 - DNA, 25 bp, Homo sapien
agtccttggctgtgtgacactagca

SEQ ID NO: 4781503 - DNA, 25 bp, Homo sapien
gtgtgacactagcatgcgaagagcc

SEQ ID NO: 4781504 - DNA, 25 bp, Homo sapien
gaggattttactcagtggttggtaa

SEQ ID NO: 4781505 - DNA, 25 bp, Homo sapien
tgttctggctgttcccttaaactca

SEQ ID NO: 4781506 - DNA, 25 bp, Homo sapien
tgtctctttgcacaactgagcagga

SEQ ID NO: 4781507 - DNA, 25 bp, Homo sapien
gctgttcccttaaactcaaatccca

SEQ ID NO: 4781508 - DNA, 25 bp, Homo sapien
aatcccattttggagccaaatgggg

SEQ ID NO: 4781509 - DNA, 25 bp, Homo sapien
cacacaagctcatctgttgggacgc

SEQ ID NO: 4781510 - DNA, 25 bp, Homo sapien
caatgtaggcgagatttcacggtgc

SEQ ID NO: 4781511 - DNA, 25 bp, Homo sapien
gcagcttgattttgcccagggcata

SEQ ID NO: 4781512 - DNA, 25 bp, Homo sapien
aagctatgagctcgttctgactgcg

SEQ ID NO: 4781513 - DNA, 25 bp, Homo sapien
cagcgccaagtccagacagggttgg

SEQ ID NO: 4781514 - DNA, 25 bp, Homo sapien
ggccccatgttggtgtctggtcctt

SEQ ID NO: 4781515 - DNA, 25 bp, Homo sapien
ggtcacctgtatctgggccccatgt

SEQ ID NO: 4781516 - DNA, 25 bp, Homo sapien
tatctgggccccgtgttggtgtctg

SEQ ID NO: 4781517 - DNA, 25 bp, Homo sapien
ggcctccattcaggtagtaggatgc

SEQ ID NO: 4781518 - DNA, 25 bp, Homo sapien
tctccaggtccatgactgcccatga

SEQ ID NO: 4781519 - DNA, 25 bp, Homo sapien
tggcctccattcaggtagtaggatg

SEQ ID NO: 4781520 - DNA, 25 bp, Homo sapien
ggcccctgcaccagacgtctgtgct

SEQ ID NO: 4781521 - DNA, 25 bp, Homo sapien
taagtatacatacccattcatggga

SEQ ID NO: 4781522 - DNA, 25 bp, Homo sapien
cagccatggctcgaaaatgtcctgc

SEQ ID NO: 4781523 - DNA, 25 bp, Homo sapien
ttagtactggcggtgagcagccttc

SEQ ID NO: 4781524 - DNA, 25 bp, Homo sapien
acttaccagctgcataacctcgggc

SEQ ID NO: 4781525 - DNA, 25 bp, Homo sapien
ggcgggaacacttgtgagtttgctc

SEQ ID NO: 4781526 - DNA, 25 bp, Homo sapien
aggggaaacttgcctcttgtggaca

SEQ ID NO: 4781527 - DNA, 25 bp, Homo sapien
cacagaaagttatatggacgtaata

SEQ ID NO: 4781528 - DNA, 25 bp, Homo sapien
aaccttctgtcggcgggaacacttg

SEQ ID NO: 4781529 - DNA, 25 bp, Homo sapien
aaccaattctttagtgtataagtgg

SEQ ID NO: 4781530 - DNA, 25 bp, Homo sapien
aaacagaccatttctgacatgcttg

SEQ ID NO: 4781531 - DNA, 25 bp, Homo sapien
aattgtagacaacttgctcatatga

SEQ ID NO: 4781532 - DNA, 25 bp, Homo sapien
gacaacttgctcatatgaaagcttt

SEQ ID NO: 4781533 - DNA, 25 bp, Homo sapien
tgaagaatggcctgtaactttcgag

SEQ ID NO: 4781534 - DNA, 25 bp, Homo sapien
acagacttgtatccttgaagaatgg

SEQ ID NO: 4781535 - DNA, 25 bp, Homo sapien
tctgtaacagacttgtatccttgaa

SEQ ID NO: 4781536 - DNA, 25 bp, Homo sapien
taactttcgaggtgaatccttcaaa

SEQ ID NO: 4781537 - DNA, 25 bp, Homo sapien
tcttgctccttagttaaccctgact

SEQ ID NO: 4781538 - DNA, 25 bp, Homo sapien
cttgctccttagttaaccctgactg

SEQ ID NO: 4781539 - DNA, 25 bp, Homo sapien
ttagagtgatcaatacactttctgc

SEQ ID NO: 4781540 - DNA, 25 bp, Homo sapien
ctggaaccggcaggcaaaccagaca

SEQ ID NO: 4781541 - DNA, 25 bp, Homo sapien
accagacactgacgccttcatttag

SEQ ID NO: 4781542 - DNA, 25 bp, Homo sapien
actttctgcatgaactaaactcttc

SEQ ID NO: 4781543 - DNA, 25 bp, Homo sapien
gagttcgtaattgatccctgttgga

SEQ ID NO: 4781544 - DNA, 25 bp, Homo sapien
ttcaaaatgacgcagtttggccgcg

SEQ ID NO: 4781545 - DNA, 25 bp, Homo sapien
tggccgcgtatttgcccagacatct

SEQ ID NO: 4781546 - DNA, 25 bp, Homo sapien
taaacgttgaggcatccaagtctgc

SEQ ID NO: 4781547 - DNA, 25 bp, Homo sapien
tgcatgcattggtcgctacagggcc

SEQ ID NO: 4781548 - DNA, 25 bp, Homo sapien
gactgttgtccacctaccgagcatt

SEQ ID NO: 4781549 - DNA, 25 bp, Homo sapien
taaaatgacctccaacgtgccttcc

SEQ ID NO: 4781550 - DNA, 25 bp, Homo sapien
tccttccccggaaatggtcaggcag

SEQ ID NO: 4781551 - DNA, 25 bp, Homo sapien
tggcgtccgccttgtggataactac

SEQ ID NO: 4781552 - DNA, 25 bp, Homo sapien
tgacagacgctaggaagtaatggcc

SEQ ID NO: 4781553 - DNA, 25 bp, Homo sapien
ggaccagaaagcatacagctgtgct

SEQ ID NO: 4781554 - DNA, 25 bp, Homo sapien
actgtgaagcatggcgaaccgcgga

SEQ ID NO: 4781555 - DNA, 25 bp, Homo sapien
ttggtgctagattctgcaggaaacc

SEQ ID NO: 4781556 - DNA, 25 bp, Homo sapien
tcaaaactgaagacatagaggactc

SEQ ID NO: 4781557 - DNA, 25 bp, Homo sapien
gaacgcatcccaacataggttaaga

SEQ ID NO: 4781558 - DNA, 25 bp, Homo sapien
ggaaaccccagcagtgtgaacgcat

SEQ ID NO: 4781559 - DNA, 25 bp, Homo sapien
aaactccaaataatctgaaactaga

SEQ ID NO: 4781560 - DNA, 25 bp, Homo sapien
gcaattgttgaattataactgcgac

SEQ ID NO: 4781561 - DNA, 25 bp, Homo sapien
tattattgccatcatgctttaggaa

SEQ ID NO: 4781562 - DNA, 25 bp, Homo sapien
gaaatagcacataattactaccttc

SEQ ID NO: 4781563 - DNA, 25 bp, Homo sapien
gataggcttcattccgactcttagc

SEQ ID NO: 4781564 - DNA, 25 bp, Homo sapien
ttccgactcttagcacattgttgag

SEQ ID NO: 4781565 - DNA, 25 bp, Homo sapien
ggcctgcattagaggaaacaatgga

SEQ ID NO: 4781566 - DNA, 25 bp, Homo sapien
tgttgagtcccttcacgtgggcctg

SEQ ID NO: 4781567 - DNA, 25 bp, Homo sapien
tgccttttgcagttcttccttggtc

SEQ ID NO: 4781568 - DNA, 25 bp, Homo sapien
ccttttgcagttcttccttggtcat

SEQ ID NO: 4781569 - DNA, 25 bp, Homo sapien
cttgccttttgcagttcttccttgg

SEQ ID NO: 4781570 - DNA, 25 bp, Homo sapien
ctcttgccttttgcagttcttcctt

SEQ ID NO: 4781571 - DNA, 25 bp, Homo sapien
gcagtttatgaaagctaataaaagt

SEQ ID NO: 4781572 - DNA, 25 bp, Homo sapien
tcagcagtttatgaaagctaataaa

SEQ ID NO: 4781573 - DNA, 25 bp, Homo sapien
agtttatgaaagctaataaaagtgt

SEQ ID NO: 4781574 - DNA, 25 bp, Homo sapien
cagcagtttatgaaagctaataaaa

SEQ ID NO: 4781575 - DNA, 25 bp, Homo sapien
tgcaagcacacgatatatgtatggg

SEQ ID NO: 4781576 - DNA, 25 bp, Homo sapien
gtctctttgttcagcacgtggttgt

SEQ ID NO: 4781577 - DNA, 25 bp, Homo sapien
gccagtcccaccaaagcgttggcag

SEQ ID NO: 4781578 - DNA, 25 bp, Homo sapien
gcgttggcagattaacacagcattg

SEQ ID NO: 4781579 - DNA, 25 bp, Homo sapien
gaatcaacttgtcagttcccactga

SEQ ID NO: 4781580 - DNA, 25 bp, Homo sapien
tgcccatttgtccttgtgccattac

SEQ ID NO: 4781581 - DNA, 25 bp, Homo sapien
cagatcactttatggaatattgacc

SEQ ID NO: 4781582 - DNA, 25 bp, Homo sapien
caagaggttgtatatgtgagggtct

SEQ ID NO: 4781583 - DNA, 25 bp, Homo sapien
cagacgagatcgggcgtgtttaggg

SEQ ID NO: 4781584 - DNA, 25 bp, Homo sapien
gaccctgcttagcttccaagatcag

SEQ ID NO: 4781585 - DNA, 25 bp, Homo sapien
cgaccctgcttagcttccaagatca

SEQ ID NO: 4781586 - DNA, 25 bp, Homo sapien
acgagatcgggcgtgtttagggtgg

SEQ ID NO: 4781587 - DNA, 25 bp, Homo sapien
ttcagtgcacccttgttacttggga

SEQ ID NO: 4781588 - DNA, 25 bp, Homo sapien
cagtgtttccttatgtgtgcgtaca

SEQ ID NO: 4781589 - DNA, 25 bp, Homo sapien
gaaagtctgtctagctgcttgtgaa

SEQ ID NO: 4781590 - DNA, 25 bp, Homo sapien
taaacgttcggtggatcctctgtct

SEQ ID NO: 4781591 - DNA, 25 bp, Homo sapien
tttcgaagtccttttatcactgtga

SEQ ID NO: 4781592 - DNA, 25 bp, Homo sapien
tcatgattactgtcgataactgcag

SEQ ID NO: 4781593 - DNA, 25 bp, Homo sapien
agttgtttatactgcccatcctagg

SEQ ID NO: 4781594 - DNA, 25 bp, Homo sapien
aaattgactttacgtattactgcag

SEQ ID NO: 4781595 - DNA, 25 bp, Homo sapien
gggccatttctaagcctaccagatc

SEQ ID NO: 4781596 - DNA, 25 bp, Homo sapien
aaaacatcttctggtaaattgtgcg

SEQ ID NO: 4781597 - DNA, 25 bp, Homo sapien
cgtggctaaaacatcttctggtaaa

SEQ ID NO: 4781598 - DNA, 25 bp, Homo sapien
aagattcaacgtggctaaaacatct

SEQ ID NO: 4781599 - DNA, 25 bp, Homo sapien
tctggtaaattgtgcgtccatattc

SEQ ID NO: 4781600 - DNA, 25 bp, Homo sapien
tttgtcagtagccaggagaaatggg

SEQ ID NO: 4781601 - DNA, 25 bp, Homo sapien
gggaaatacgacttagtgaggcata

SEQ ID NO: 4781602 - DNA, 25 bp, Homo sapien
ttcttggaacctgctctcctgcttg

SEQ ID NO: 4781603 - DNA, 25 bp, Homo sapien
gacatccctggtccatcctttctgt

SEQ ID NO: 4781604 - DNA, 25 bp, Homo sapien
ggctccaaatggtagtgattccaaa

SEQ ID NO: 4781605 - DNA, 25 bp, Homo sapien
actggaatacccatgggccctctca

SEQ ID NO: 4781606 - DNA, 25 bp, Homo sapien
ggaagaatcgtaagtcaactgtttc

SEQ ID NO: 4781607 - DNA, 25 bp, Homo sapien
caagagtgctggacttctaggacat

SEQ ID NO: 4781608 - DNA, 25 bp, Homo sapien
cataagctgtgtttccccataagtt

SEQ ID NO: 4781609 - DNA, 25 bp, Homo sapien
tttgtaccccaaataacatcgtctg

SEQ ID NO: 4781610 - DNA, 25 bp, Homo sapien
catgaaccatgttttgatacccctt

SEQ ID NO: 4781611 - DNA, 25 bp, Homo sapien
tcttcatatgttaaggagatgcttc

SEQ ID NO: 4781612 - DNA, 25 bp, Homo sapien
atagcctccctgtaaacaattccaa

SEQ ID NO: 4781613 - DNA, 25 bp, Homo sapien
ctagccacagaatagcctccctgta

SEQ ID NO: 4781614 - DNA, 25 bp, Homo sapien
ccctgtaaacaattccaatgcattt

SEQ ID NO: 4781615 - DNA, 25 bp, Homo sapien
gcctccctgtaaacaattccaatgc

SEQ ID NO: 4781616 - DNA, 25 bp, Homo sapien
gaaaagcacagtagattggacagta

SEQ ID NO: 4781617 - DNA, 25 bp, Homo sapien
ggacagtatctccaccaaattctac

SEQ ID NO: 4781618 - DNA, 25 bp, Homo sapien
gctgacggtctctgtaatggcctct

SEQ ID NO: 4781619 - DNA, 25 bp, Homo sapien
ggttggtactccaggcggatgtcca

SEQ ID NO: 4781620 - DNA, 25 bp, Homo sapien
tcctctctggtctcagtgcctgatg

SEQ ID NO: 4781621 - DNA, 25 bp, Homo sapien
gtgtgtgggtgtgacatgctttctg

SEQ ID NO: 4781622 - DNA, 25 bp, Homo sapien
ggatgtggacttgcatgaagccggg

SEQ ID NO: 4781623 - DNA, 25 bp, Homo sapien
ctgtcctctctggtctcagtgcctg

SEQ ID NO: 4781624 - DNA, 25 bp, Homo sapien
gtgtcgttggaagtgccgccatgca

SEQ ID NO: 4781625 - DNA, 25 bp, Homo sapien
tcacgcttgccatgctcaaaatgag

SEQ ID NO: 4781626 - DNA, 25 bp, Homo sapien
gagtcctgcaggcatctcacgcttg

SEQ ID NO: 4781627 - DNA, 25 bp, Homo sapien
tacttccgggcttctgtgtcgttgg

SEQ ID NO: 4781628 - DNA, 25 bp, Homo sapien
cccattgccactaccgtagctgtga

SEQ ID NO: 4781629 - DNA, 25 bp, Homo sapien
tgtctccaacaagcctctggattcc

SEQ ID NO: 4781630 - DNA, 25 bp, Homo sapien
tcttatgtctccaacaagcctctgg

SEQ ID NO: 4781631 - DNA, 25 bp, Homo sapien
tgtgacacattccagtcttacctcc

SEQ ID NO: 4781632 - DNA, 25 bp, Homo sapien
ccggggatgtgtacctggggcttga

SEQ ID NO: 4781633 - DNA, 25 bp, Homo sapien
tgcctgagctctggatcagagagag

SEQ ID NO: 4781634 - DNA, 25 bp, Homo sapien
gagagagcctgctcctgcaccttgt

SEQ ID NO: 4781635 - DNA, 25 bp, Homo sapien
gcaaacctcttttcctgtgtgccac

SEQ ID NO: 4781636 - DNA, 25 bp, Homo sapien
tccactgacaagctaatcttttcag

SEQ ID NO: 4781637 - DNA, 25 bp, Homo sapien
aacatttcattagctcctgccagtc

SEQ ID NO: 4781638 - DNA, 25 bp, Homo sapien
acatttcattagctcctgccagtct

SEQ ID NO: 4781639 - DNA, 25 bp, Homo sapien
caggctccactgacaagctaatctt

SEQ ID NO: 4781640 - DNA, 25 bp, Homo sapien
cattttgcacattgggggaataccc

SEQ ID NO: 4781641 - DNA, 25 bp, Homo sapien
tccaaatagttttcatcctggagtt

SEQ ID NO: 4781642 - DNA, 25 bp, Homo sapien
ggcctcaacgtgctccccttgttct

SEQ ID NO: 4781643 - DNA, 25 bp, Homo sapien
gaatacccctcagtgtagaaaatta

SEQ ID NO: 4781644 - DNA, 25 bp, Homo sapien
gactttcgagtccaagcagagaaga

SEQ ID NO: 4781645 - DNA, 25 bp, Homo sapien
tagagaccgttctagacaggtgctg

SEQ ID NO: 4781646 - DNA, 25 bp, Homo sapien
cattggcaggcacctacatggcaga

SEQ ID NO: 4781647 - DNA, 25 bp, Homo sapien
cacagaaggaaactctaatggatct

SEQ ID NO: 4781648 - DNA, 25 bp, Homo sapien
tatgtggtgggaacagcctacccag

SEQ ID NO: 4781649 - DNA, 25 bp, Homo sapien
taagtgtcagagcaagaattcaggc

SEQ ID NO: 4781650 - DNA, 25 bp, Homo sapien
aatggagggaccaagataactgccc

SEQ ID NO: 4781651 - DNA, 25 bp, Homo sapien
tcttccatcccgttgcagcagtggt

SEQ ID NO: 4781652 - DNA, 25 bp, Homo sapien
agccactcagggctgggcctggcct

SEQ ID NO: 4781653 - DNA, 25 bp, Homo sapien
ccactcagggctgggcctggcctga

SEQ ID NO: 4781654 - DNA, 25 bp, Homo sapien
cactcagggctgggcctggcctgac

SEQ ID NO: 4781655 - DNA, 25 bp, Homo sapien
tcagccactcagggctgggcctggc

SEQ ID NO: 4781656 - DNA, 25 bp, Homo sapien
aaggttgagcagacattggccacag

SEQ ID NO: 4781657 - DNA, 25 bp, Homo sapien
gtgggccgcaagctcttcttggagt

SEQ ID NO: 4781658 - DNA, 25 bp, Homo sapien
caaaggttgagcagacattggccac

SEQ ID NO: 4781659 - DNA, 25 bp, Homo sapien
tgagcagacattggccacagtcccg

SEQ ID NO: 4781660 - DNA, 25 bp, Homo sapien
gcagccaccccttcctgtgccagag

SEQ ID NO: 4781661 - DNA, 25 bp, Homo sapien
agccaccccttcctgtgccagagac

SEQ ID NO: 4781662 - DNA, 25 bp, Homo sapien
caccccttcctgtgccagagacagg

SEQ ID NO: 4781663 - DNA, 25 bp, Homo sapien
cccttcctgtgccagagacaggaga

SEQ ID NO: 4781664 - DNA, 25 bp, Homo sapien
tgagcaagaccgtaaagcacttcgc

SEQ ID NO: 4781665 - DNA, 25 bp, Homo sapien
tggtggtccacacataagatcttcc

SEQ ID NO: 4781666 - DNA, 25 bp, Homo sapien
tacaaggacggccatcactgcttct

SEQ ID NO: 4781667 - DNA, 25 bp, Homo sapien
gaatggctccttcggtacaaggacg

SEQ ID NO: 4781668 - DNA, 25 bp, Homo sapien
gacgtagctggctcctggccatgga

SEQ ID NO: 4781669 - DNA, 25 bp, Homo sapien
gggcacacaggacgtagctggctcc

SEQ ID NO: 4781670 - DNA, 25 bp, Homo sapien
acaggacgtagctggctcctggcca

SEQ ID NO: 4781671 - DNA, 25 bp, Homo sapien
gggaaggacggagagtgaggagggc

SEQ ID NO: 4781672 - DNA, 25 bp, Homo sapien
tggctgatcccactattgtccagca

SEQ ID NO: 4781673 - DNA, 25 bp, Homo sapien
tccagcacaggagctctgacttgct

SEQ ID NO: 4781674 - DNA, 25 bp, Homo sapien
agtggctgatcccactattgtccag

SEQ ID NO: 4781675 - DNA, 25 bp, Homo sapien
gctgatcccactattgtccagcaca

SEQ ID NO: 4781676 - DNA, 25 bp, Homo sapien
cacgtgcctctgttccattctagct

SEQ ID NO: 4781677 - DNA, 25 bp, Homo sapien
gttccattctagctaggtcttcggg

SEQ ID NO: 4781678 - DNA, 25 bp, Homo sapien
acaggcacccttgtggccacatgca

SEQ ID NO: 4781679 - DNA, 25 bp, Homo sapien
ggacaggcacccttgtggccacatg

SEQ ID NO: 4781680 - DNA, 25 bp, Homo sapien
tgatatttggacatggggcacttgg

SEQ ID NO: 4781681 - DNA, 25 bp, Homo sapien
ggcaccctgacttaggacctccagt

SEQ ID NO: 4781682 - DNA, 25 bp, Homo sapien
aagatgattgcctaagagtaagaac

SEQ ID NO: 4781683 - DNA, 25 bp, Homo sapien
gggccctcacccaagttcaactatg

SEQ ID NO: 4781684 - DNA, 25 bp, Homo sapien
tattaagtgtccaccatgtgcaggg

SEQ ID NO: 4781685 - DNA, 25 bp, Homo sapien
tccttttagggctctgggtatacaa

SEQ ID NO: 4781686 - DNA, 25 bp, Homo sapien
aactctgcagaatatagtgggacca

SEQ ID NO: 4781687 - DNA, 25 bp, Homo sapien
ctttctaactgtacctgggaggagc

SEQ ID NO: 4781688 - DNA, 25 bp, Homo sapien
cagacgcatttgcaggaacagccag

SEQ ID NO: 4781689 - DNA, 25 bp, Homo sapien
ccggccagatttgaattgctaatgt

SEQ ID NO: 4781690 - DNA, 25 bp, Homo sapien
tgttttgcccgtcagttgaggagga

SEQ ID NO: 4781691 - DNA, 25 bp, Homo sapien
gctaatgtataatctgcccggcaca

SEQ ID NO: 4781692 - DNA, 25 bp, Homo sapien
gtttcacagtctcaagttttagatt

SEQ ID NO: 4781693 - DNA, 25 bp, Homo sapien
taatcaattttcagtggattttgta

SEQ ID NO: 4781694 - DNA, 25 bp, Homo sapien
catccttctgaataggaatatcgag

SEQ ID NO: 4781695 - DNA, 25 bp, Homo sapien
taaaatgttgaagtgctcaacatca

SEQ ID NO: 4781696 - DNA, 25 bp, Homo sapien
acaaagagggataatttgactacct

SEQ ID NO: 4781697 - DNA, 25 bp, Homo sapien
ttcattgacccagtgggtgttcaga

SEQ ID NO: 4781698 - DNA, 25 bp, Homo sapien
agtttttcattgacccagtgggtgt

SEQ ID NO: 4781699 - DNA, 25 bp, Homo sapien
tcttaagtttttcattgacccagtg

SEQ ID NO: 4781700 - DNA, 25 bp, Homo sapien
cattgacccagtgggtgttcagaag

SEQ ID NO: 4781701 - DNA, 25 bp, Homo sapien
ttaggcacttcttgtagggctggtc

SEQ ID NO: 4781702 - DNA, 25 bp, Homo sapien
gaaggacagcttcgcttggtagagt

SEQ ID NO: 4781703 - DNA, 25 bp, Homo sapien
caggtgtagaactcccttaggcact

SEQ ID NO: 4781704 - DNA, 25 bp, Homo sapien
cacccacagttcagatatttgctca

SEQ ID NO: 4781705 - DNA, 25 bp, Homo sapien
tacttagtaggagcttggtcaagac

SEQ ID NO: 4781706 - DNA, 25 bp, Homo sapien
caaaatcatataggctgttaggctc

SEQ ID NO: 4781707 - DNA, 25 bp, Homo sapien
tgaagagccccaaaagaacaatatg

SEQ ID NO: 4781708 - DNA, 25 bp, Homo sapien
gtggccagagggtcaaagaaagctt

SEQ ID NO: 4781709 - DNA, 25 bp, Homo sapien
aaaattccctaacagatgacagtga

SEQ ID NO: 4781710 - DNA, 25 bp, Homo sapien
gaagagcaataatcccgagaaaata

SEQ ID NO: 4781711 - DNA, 25 bp, Homo sapien
gctatggatccaggcaaagacagga

SEQ ID NO: 4781712 - DNA, 25 bp, Homo sapien
gaatctgggaactacaatagccctg

SEQ ID NO: 4781713 - DNA, 25 bp, Homo sapien
tcacatactggccaaggtcggactg

SEQ ID NO: 4781714 - DNA, 25 bp, Homo sapien
ttccagagggacaatgccaaagtgc

SEQ ID NO: 4781715 - DNA, 25 bp, Homo sapien
gggtccacccgaattaacagcaatg

SEQ ID NO: 4781716 - DNA, 25 bp, Homo sapien
tgcttctgagaagtgcaccgggtca

SEQ ID NO: 4781717 - DNA, 25 bp, Homo sapien
aagtgacagtaaaataggatcttct

SEQ ID NO: 4781718 - DNA, 25 bp, Homo sapien
caattggggccctgtatagtcgttt

SEQ ID NO: 4781719 - DNA, 25 bp, Homo sapien
tagtcgtttaagaaaagaatctctc

SEQ ID NO: 4781720 - DNA, 25 bp, Homo sapien
tcttggtgagaagcagatctgggaa

SEQ ID NO: 4781721 - DNA, 25 bp, Homo sapien
gctctagattcaagactgccagggt

SEQ ID NO: 4781722 - DNA, 25 bp, Homo sapien
tcaagtaatttatcccactctgggc

SEQ ID NO: 4781723 - DNA, 25 bp, Homo sapien
aaagaaagcttccatgcaagcaagg

SEQ ID NO: 4781724 - DNA, 25 bp, Homo sapien
gctctactaactggccacgatcaag

SEQ ID NO: 4781725 - DNA, 25 bp, Homo sapien
ccaaaaaccaatggggagccatgta

SEQ ID NO: 4781726 - DNA, 25 bp, Homo sapien
aaaccaatggggagccatgtacaag

SEQ ID NO: 4781727 - DNA, 25 bp, Homo sapien
aatggggagccatgtacaagtttta

SEQ ID NO: 4781728 - DNA, 25 bp, Homo sapien
ccaatggggagccatgtacaagttt

SEQ ID NO: 4781729 - DNA, 25 bp, Homo sapien
ttttaacacatgacactgctgagga

SEQ ID NO: 4781730 - DNA, 25 bp, Homo sapien
gatatattcagcttggcgtttttaa

SEQ ID NO: 4781731 - DNA, 25 bp, Homo sapien
tggctccgaacacaaggacagtggg

SEQ ID NO: 4781732 - DNA, 25 bp, Homo sapien
tgtggcctggctccgaacacaagga

SEQ ID NO: 4781733 - DNA, 25 bp, Homo sapien
agggcacctggatgaaaacttcctg

SEQ ID NO: 4781734 - DNA, 25 bp, Homo sapien
agttagagaaccacaggctcgctca

SEQ ID NO: 4781735 - DNA, 25 bp, Homo sapien
tctccatgtcagttccgatctttgc

SEQ ID NO: 4781736 - DNA, 25 bp, Homo sapien
taaatgggcccacactaaagttaga

SEQ ID NO: 4781737 - DNA, 25 bp, Homo sapien
tggtcgcacactaccacgtcgaact

SEQ ID NO: 4781738 - DNA, 25 bp, Homo sapien
cacgtcgaactcctcgtcggcgagg

SEQ ID NO: 4781739 - DNA, 25 bp, Homo sapien
acgtagagcgccaggaaaaccatgc

SEQ ID NO: 4781740 - DNA, 25 bp, Homo sapien
aaaaccatgcgcacgtaggcgcaga

SEQ ID NO: 4781741 - DNA, 25 bp, Homo sapien
gtagctcgcggctctcggcgaaaca

SEQ ID NO: 4781742 - DNA, 25 bp, Homo sapien
aggaacagcaccgacggcttgggaa

SEQ ID NO: 4781743 - DNA, 25 bp, Homo sapien
gtcgtagtgcgctgtccagatcttc

SEQ ID NO: 4781744 - DNA, 25 bp, Homo sapien
tctcggcgaaacagtggcccgggtc

SEQ ID NO: 4781745 - DNA, 25 bp, Homo sapien
ggagccgcaactgcaccccgcaccc

SEQ ID NO: 4781746 - DNA, 25 bp, Homo sapien
ctggagccgcaactgcaccccgcac

SEQ ID NO: 4781747 - DNA, 25 bp, Homo sapien
cccgcaccctgatgggggtcttctg

SEQ ID NO: 4781748 - DNA, 25 bp, Homo sapien
cctggagccgcaactgcaccccgca

SEQ ID NO: 4781749 - DNA, 25 bp, Homo sapien
agaaacgtcagcgtcatcttggatt

SEQ ID NO: 4781750 - DNA, 25 bp, Homo sapien
tcatatgccagactttaaactctgc

SEQ ID NO: 4781751 - DNA, 25 bp, Homo sapien
gctttccagtccatcgttcgctctg

SEQ ID NO: 4781752 - DNA, 25 bp, Homo sapien
taaactctgcttgaaagctttctca

SEQ ID NO: 4781753 - DNA, 25 bp, Homo sapien
tgccaaccttttggtctttggtgga

SEQ ID NO: 4781754 - DNA, 25 bp, Homo sapien
gctagttttttgtacaagcagaatc

SEQ ID NO: 4781755 - DNA, 25 bp, Homo sapien
ttataggcatgagagggaacctcag

SEQ ID NO: 4781756 - DNA, 25 bp, Homo sapien
ggattaattagtcctgagtagttgg

SEQ ID NO: 4781757 - DNA, 25 bp, Homo sapien
tggtcctacatcagtcatagaatct

SEQ ID NO: 4781758 - DNA, 25 bp, Homo sapien
tcaacattgagtagcatttggtcct

SEQ ID NO: 4781759 - DNA, 25 bp, Homo sapien
gagtagcatttggtcctacatcagt

SEQ ID NO: 4781760 - DNA, 25 bp, Homo sapien
agtcatagaatcttcaacttttagg

SEQ ID NO: 4781761 - DNA, 25 bp, Homo sapien
aactcagtgacgtacttgcaggtga

SEQ ID NO: 4781762 - DNA, 25 bp, Homo sapien
ctaactcagtgacgtacttgcaggt

SEQ ID NO: 4781763 - DNA, 25 bp, Homo sapien
taactcagtgacgtacttgcaggtg

SEQ ID NO: 4781764 - DNA, 25 bp, Homo sapien
ctcagtgacgtacttgcaggtgagg

SEQ ID NO: 4781765 - DNA, 25 bp, Homo sapien
cagctgaagacgaggtactgcggat

SEQ ID NO: 4781766 - DNA, 25 bp, Homo sapien
agacgaggtactgcggatgaagagg

SEQ ID NO: 4781767 - DNA, 25 bp, Homo sapien
ctgaagacgaggtactgcggatgaa

SEQ ID NO: 4781768 - DNA, 25 bp, Homo sapien
aagacgaggtactgcggatgaagag

SEQ ID NO: 4781769 - DNA, 25 bp, Homo sapien
tgatagctgttgtcactggccgcca

SEQ ID NO: 4781770 - DNA, 25 bp, Homo sapien
cgtgtacacgtaaacatgcttgtga

SEQ ID NO: 4781771 - DNA, 25 bp, Homo sapien
gacccacatggcctatctggttgct

SEQ ID NO: 4781772 - DNA, 25 bp, Homo sapien
tgacaagggaattggcagtgatagc

SEQ ID NO: 4781773 - DNA, 25 bp, Homo sapien
catctgctgtcttcactaacagtct

SEQ ID NO: 4781774 - DNA, 25 bp, Homo sapien
tcatctgctgtcttcactaacagtc

SEQ ID NO: 4781775 - DNA, 25 bp, Homo sapien
taacaccttccgtgtctgctgtcat

SEQ ID NO: 4781776 - DNA, 25 bp, Homo sapien
ctataacaccttccgtgtctgctgt

SEQ ID NO: 4781777 - DNA, 25 bp, Homo sapien
ataacaccttccgtgtctgctgtca

SEQ ID NO: 4781778 - DNA, 25 bp, Homo sapien
tctataacaccttccgtgtctgctg

SEQ ID NO: 4781779 - DNA, 25 bp, Homo sapien
ctccttccatccacagtttgcaaag

SEQ ID NO: 4781780 - DNA, 25 bp, Homo sapien
acagtttgcaaagccccttggagtg

SEQ ID NO: 4781781 - DNA, 25 bp, Homo sapien
aaagccccttggagtgctccctcta

SEQ ID NO: 4781782 - DNA, 25 bp, Homo sapien
ctgaggttaggtggggaaggatttg

SEQ ID NO: 4781783 - DNA, 25 bp, Homo sapien
tggatgcacattcgagcagccacct

SEQ ID NO: 4781784 - DNA, 25 bp, Homo sapien
gcctggatgcacattcgagcagcca

SEQ ID NO: 4781785 - DNA, 25 bp, Homo sapien
gatgcacattcgagcagccaccttg

SEQ ID NO: 4781786 - DNA, 25 bp, Homo sapien
tcctgcctggatgcacattcgagca

SEQ ID NO: 4781787 - DNA, 25 bp, Homo sapien
tgcagttggtgaaaaccacagggtg

SEQ ID NO: 4781788 - DNA, 25 bp, Homo sapien
ctgcagttggtgaaaaccacagggt

SEQ ID NO: 4781789 - DNA, 25 bp, Homo sapien
ggtttccctcttcacgtctgtctag

SEQ ID NO: 4781790 - DNA, 25 bp, Homo sapien
gtctggaaggcggtttccctcttca

SEQ ID NO: 4781791 - DNA, 25 bp, Homo sapien
ggattgttctaagccacagctgtga

SEQ ID NO: 4781792 - DNA, 25 bp, Homo sapien
tctagaggtggtatcgtgctctgtg

SEQ ID NO: 4781793 - DNA, 25 bp, Homo sapien
tccccaaacgaaagccagatatcgg

SEQ ID NO: 4781794 - DNA, 25 bp, Homo sapien
aggagcttttggaaagtgcgtgtcc

SEQ ID NO: 4781795 - DNA, 25 bp, Homo sapien
cttcccggtgcagccatgatttatt

SEQ ID NO: 4781796 - DNA, 25 bp, Homo sapien
gaggtgttgggtaagcaggagcttt

SEQ ID NO: 4781797 - DNA, 25 bp, Homo sapien
ggtgctcactgaatccggtattcgg

SEQ ID NO: 4781798 - DNA, 25 bp, Homo sapien
gaatctgtgccacggagctgtcagc

SEQ ID NO: 4781799 - DNA, 25 bp, Homo sapien
tgacggtgtcagcaggttcacctgc

SEQ ID NO: 4781800 - DNA, 25 bp, Homo sapien
gacttggcaggagccggtgctcact

SEQ ID NO: 4781801 - DNA, 25 bp, Homo sapien
ctggatgtcaaatctcacgggaaga

SEQ ID NO: 4781802 - DNA, 25 bp, Homo sapien
gacagcccggatgtgcctttgaaca

SEQ ID NO: 4781803 - DNA, 25 bp, Homo sapien
aagattcctctgtgcctgactgcag

SEQ ID NO: 4781804 - DNA, 25 bp, Homo sapien
tcagccgagactagatcaaagattc

SEQ ID NO: 4781805 - DNA, 25 bp, Homo sapien
cctcgagagcttctcttagattgct

SEQ ID NO: 4781806 - DNA, 25 bp, Homo sapien
tctcctttgttctggttattgaatg

SEQ ID NO: 4781807 - DNA, 25 bp, Homo sapien
tcccctgcttgttgaactctgctgt

SEQ ID NO: 4781808 - DNA, 25 bp, Homo sapien
cagtgggtcccctgcttgttgaact

SEQ ID NO: 4781809 - DNA, 25 bp, Homo sapien
aggaactcctgctttcctctcagcc

SEQ ID NO: 4781810 - DNA, 25 bp, Homo sapien
tccaggaactcctgctttcctctca

SEQ ID NO: 4781811 - DNA, 25 bp, Homo sapien
tggtccaggaactcctgctttcctc

SEQ ID NO: 4781812 - DNA, 25 bp, Homo sapien
ggtccaggaactcctgctttcctct

SEQ ID NO: 4781813 - DNA, 25 bp, Homo sapien
tggagggggcactgaatgggtgtcg

SEQ ID NO: 4781814 - DNA, 25 bp, Homo sapien
ggcactgaatgggtgtcgggggcac

SEQ ID NO: 4781815 - DNA, 25 bp, Homo sapien
ggggcactgaatgggtgtcgggggc

SEQ ID NO: 4781816 - DNA, 25 bp, Homo sapien
gagggggcactgaatgggtgtcggg

SEQ ID NO: 4781817 - DNA, 25 bp, Homo sapien
tccgtgcaggagtagggacagtcat

SEQ ID NO: 4781818 - DNA, 25 bp, Homo sapien
tgcatggcgggggactaacttcagt

SEQ ID NO: 4781819 - DNA, 25 bp, Homo sapien
ctgagagctgtagggggcttttcct

SEQ ID NO: 4781820 - DNA, 25 bp, Homo sapien
gcttttcctgcctaacaacattttc

SEQ ID NO: 4781821 - DNA, 25 bp, Homo sapien
agagaggcaggttttactcccatac

SEQ ID NO: 4781822 - DNA, 25 bp, Homo sapien
gagagaggcaggttttactcccata

SEQ ID NO: 4781823 - DNA, 25 bp, Homo sapien
tctcgatttgcagcttcatggaaga

SEQ ID NO: 4781824 - DNA, 25 bp, Homo sapien
ctcgatttgcagcttcatggaagac

SEQ ID NO: 4781825 - DNA, 25 bp, Homo sapien
ctctcgatttgcagcttcatggaag

SEQ ID NO: 4781826 - DNA, 25 bp, Homo sapien
aaagtttcagactcttccagctcac

SEQ ID NO: 4781827 - DNA, 25 bp, Homo sapien
catccaaagccaataagaaacacag

SEQ ID NO: 4781828 - DNA, 25 bp, Homo sapien
tggcatccaaagccaataagaaaca

SEQ ID NO: 4781829 - DNA, 25 bp, Homo sapien
aatcttcaataaacagctaatggca

SEQ ID NO: 4781830 - DNA, 25 bp, Homo sapien
gaatcttcaataaacagctaatggc

SEQ ID NO: 4781831 - DNA, 25 bp, Homo sapien
tccagtcccatgaggaaagtttgct

SEQ ID NO: 4781832 - DNA, 25 bp, Homo sapien
gagggggcacgcttccagtcccatg

SEQ ID NO: 4781833 - DNA, 25 bp, Homo sapien
agtgttctcccatgaatgtcttaga

SEQ ID NO: 4781834 - DNA, 25 bp, Homo sapien
aaaggtgcctgaggtgcctgagcag

SEQ ID NO: 4781835 - DNA, 25 bp, Homo sapien
gcttctcaaatatgccacagctgga

SEQ ID NO: 4781836 - DNA, 25 bp, Homo sapien
ggctgtgtgctaccccaggaacaag

SEQ ID NO: 4781837 - DNA, 25 bp, Homo sapien
ggaacaaggaagatgcaggatagca

SEQ ID NO: 4781838 - DNA, 25 bp, Homo sapien
ttcaccctgttgagagaacccacag

SEQ ID NO: 4781839 - DNA, 25 bp, Homo sapien
tcgttgctcgccatagatgtagctt

SEQ ID NO: 4781840 - DNA, 25 bp, Homo sapien
aatgttattggagagggacggagcc

SEQ ID NO: 4781841 - DNA, 25 bp, Homo sapien
gcttgtgacaaagtggctggaccct

SEQ ID NO: 4781842 - DNA, 25 bp, Homo sapien
cctgcagccgggagtcgttgctcgc

SEQ ID NO: 4781843 - DNA, 25 bp, Homo sapien
gaagaagtagaccaaggaagtgcag

SEQ ID NO: 4781844 - DNA, 25 bp, Homo sapien
ctaggctacagagggaagtacatcc

SEQ ID NO: 4781845 - DNA, 25 bp, Homo sapien
tctgggaccctttagtgcccacaag

SEQ ID NO: 4781846 - DNA, 25 bp, Homo sapien
tgtttccagcacagtctgatgtgga

SEQ ID NO: 4781847 - DNA, 25 bp, Homo sapien
tagaaaaagccgaggcacctgctgg

SEQ ID NO: 4781848 - DNA, 25 bp, Homo sapien
tgagctcacaatgcatctctttgga

SEQ ID NO: 4781849 - DNA, 25 bp, Homo sapien
gactattttggtactgcatgctaga

SEQ ID NO: 4781850 - DNA, 25 bp, Homo sapien
tctctttggaagtctgccctcccag

SEQ ID NO: 4781851 - DNA, 25 bp, Homo sapien
ttctgggacttatccaaatgatcag

SEQ ID NO: 4781852 - DNA, 25 bp, Homo sapien
tttctgggacttatccaaatgatca

SEQ ID NO: 4781853 - DNA, 25 bp, Homo sapien
tctgggacttatccaaatgatcaga

SEQ ID NO: 4781854 - DNA, 25 bp, Homo sapien
ctgggacttatccaaatgatcagat

SEQ ID NO: 4781855 - DNA, 25 bp, Homo sapien
tatagcagataagatatgggcacac

SEQ ID NO: 4781856 - DNA, 25 bp, Homo sapien
gccttcaaaggctcaaatctattat

SEQ ID NO: 4781857 - DNA, 25 bp, Homo sapien
taaatccttacagtgaccttacgag

SEQ ID NO: 4781858 - DNA, 25 bp, Homo sapien
ctgtgattcagttctaggcagccca

SEQ ID NO: 4781859 - DNA, 25 bp, Homo sapien
gacggcaaccgtatggcctgcaaag

SEQ ID NO: 4781860 - DNA, 25 bp, Homo sapien
cacattagtagttgctccagagagt

SEQ ID NO: 4781861 - DNA, 25 bp, Homo sapien
ttttaggaagtggacagcaaatgct

SEQ ID NO: 4781862 - DNA, 25 bp, Homo sapien
ggctggttttacaccacaatggtag

SEQ ID NO: 4781863 - DNA, 25 bp, Homo sapien
ggcagacgctgactccttgattttc

SEQ ID NO: 4781864 - DNA, 25 bp, Homo sapien
tcactttgggcagacgctgactcct

SEQ ID NO: 4781865 - DNA, 25 bp, Homo sapien
tttgggcagacgctgactccttgat

SEQ ID NO: 4781866 - DNA, 25 bp, Homo sapien
cttcactttgggcagacgctgactc

SEQ ID NO: 4781867 - DNA, 25 bp, Homo sapien
aaccaggtgttcctgattgagatca

SEQ ID NO: 4781868 - DNA, 25 bp, Homo sapien
tcattttttaactgtctgcgagagg

SEQ ID NO: 4781869 - DNA, 25 bp, Homo sapien
tcaagtatacttccagccgcgctga

SEQ ID NO: 4781870 - DNA, 25 bp, Homo sapien
tccttcacctgatcactatagagct

SEQ ID NO: 4781871 - DNA, 25 bp, Homo sapien
gggagatccatcctctctggaaggg

SEQ ID NO: 4781872 - DNA, 25 bp, Homo sapien
caccagcttccctgaagatttctca

SEQ ID NO: 4781873 - DNA, 25 bp, Homo sapien
gctacccctacttgtgggaatcctc

SEQ ID NO: 4781874 - DNA, 25 bp, Homo sapien
gatgaagctgctacccctacttgtg

SEQ ID NO: 4781875 - DNA, 25 bp, Homo sapien
ggtataaaagcattaccatcatcat

SEQ ID NO: 4781876 - DNA, 25 bp, Homo sapien
aaaccaaatctcatctgtgcaccag

SEQ ID NO: 4781877 - DNA, 25 bp, Homo sapien
catcattgcaatatgtatattccca

SEQ ID NO: 4781878 - DNA, 25 bp, Homo sapien
tccaggtgtgagaagaaaatcgtgc

SEQ ID NO: 4781879 - DNA, 25 bp, Homo sapien
tttgtgagtcaccctcttgggctcc

SEQ ID NO: 4781880 - DNA, 25 bp, Homo sapien
ggccctgtcacgcaggagcctgtca

SEQ ID NO: 4781881 - DNA, 25 bp, Homo sapien
ttgtgagtcaccctcttgggctcca

SEQ ID NO: 4781882 - DNA, 25 bp, Homo sapien
cagaggccctgtcacgcaggagcct

SEQ ID NO: 4781883 - DNA, 25 bp, Homo sapien
taataaggttggtattcagatcctt

SEQ ID NO: 4781884 - DNA, 25 bp, Homo sapien
ctaataaggttggtattcagatcct

SEQ ID NO: 4781885 - DNA, 25 bp, Homo sapien
tgagaaaactccctccttatctgtg

SEQ ID NO: 4781886 - DNA, 25 bp, Homo sapien
tatctgtgggcatgtcttgactcta

SEQ ID NO: 4781887 - DNA, 25 bp, Homo sapien
cagaagtagacataagtagagcggg

SEQ ID NO: 4781888 - DNA, 25 bp, Homo sapien
acgaggctgctatttctgggtgtcc

SEQ ID NO: 4781889 - DNA, 25 bp, Homo sapien
gagaatggggtcattctaccagagg

SEQ ID NO: 4781890 - DNA, 25 bp, Homo sapien
cagaggctgctacttgctcaagagt

SEQ ID NO: 4781891 - DNA, 25 bp, Homo sapien
aggctgctacttgctcaagagtggt

SEQ ID NO: 4781892 - DNA, 25 bp, Homo sapien
gggtcattctaccagaggctgctac

SEQ ID NO: 4781893 - DNA, 25 bp, Homo sapien
tgtagttcacttcaattccgttgtg

SEQ ID NO: 4781894 - DNA, 25 bp, Homo sapien
aaccttaaaagtgtcatctctgccc

SEQ ID NO: 4781895 - DNA, 25 bp, Homo sapien
gcagttgacttcaaacaccttgtag

SEQ ID NO: 4781896 - DNA, 25 bp, Homo sapien
ccaggaataatgttagcaaaaaggg

SEQ ID NO: 4781897 - DNA, 25 bp, Homo sapien
tataatttggggtttcagttccaga

SEQ ID NO: 4781898 - DNA, 25 bp, Homo sapien
tatgaaatgggactgcaagtcatag

SEQ ID NO: 4781899 - DNA, 25 bp, Homo sapien
tgggactgcaagtcatagtatagtg

SEQ ID NO: 4781900 - DNA, 25 bp, Homo sapien
caagtcatagtatagtgtgactata

SEQ ID NO: 4781901 - DNA, 25 bp, Homo sapien
cttgatggaggcctggatgtaaaat

SEQ ID NO: 4781902 - DNA, 25 bp, Homo sapien
tatccgaaatttgcttgatggaggc

SEQ ID NO: 4781903 - DNA, 25 bp, Homo sapien
gaaatttgcttgatggaggcctgga

SEQ ID NO: 4781904 - DNA, 25 bp, Homo sapien
cttttatccgaaatttgcttgatgg

SEQ ID NO: 4781905 - DNA, 25 bp, Homo sapien
ttcaggccgatttccatgggttggg

SEQ ID NO: 4781906 - DNA, 25 bp, Homo sapien
caaggaaccagaggtcaagaaaaag

SEQ ID NO: 4781907 - DNA, 25 bp, Homo sapien
tgacagttcaggccgatttccatgg

SEQ ID NO: 4781908 - DNA, 25 bp, Homo sapien
gggcaggaatagagagccacaagga

SEQ ID NO: 4781909 - DNA, 25 bp, Homo sapien
gctaccatcagcagtagcagaaggt

SEQ ID NO: 4781910 - DNA, 25 bp, Homo sapien
agcagaaggtaggagctttgtcgga

SEQ ID NO: 4781911 - DNA, 25 bp, Homo sapien
gaaggtaggagctttgtcggagcat

SEQ ID NO: 4781912 - DNA, 25 bp, Homo sapien
ctccaattctagctaccatcagcag

SEQ ID NO: 4781913 - DNA, 25 bp, Homo sapien
gaggcttgtggctgtgagcctatca

SEQ ID NO: 4781914 - DNA, 25 bp, Homo sapien
ggcttgtggctgtgagcctatcagc

SEQ ID NO: 4781915 - DNA, 25 bp, Homo sapien
cttgtggctgtgagcctatcagctg

SEQ ID NO: 4781916 - DNA, 25 bp, Homo sapien
ggaggcttgtggctgtgagcctatc

SEQ ID NO: 4781917 - DNA, 25 bp, Homo sapien
gacagaaatggctgcggagtcacag

SEQ ID NO: 4781918 - DNA, 25 bp, Homo sapien
tcgatgaggtatggccttccaagtt

SEQ ID NO: 4781919 - DNA, 25 bp, Homo sapien
cacagtgaagagaactcgatgaggt

SEQ ID NO: 4781920 - DNA, 25 bp, Homo sapien
tctaatctcaaaggaccagagtgac

SEQ ID NO: 4781921 - DNA, 25 bp, Homo sapien
tatgaagaaggcagtatcatccgcc

SEQ ID NO: 4781922 - DNA, 25 bp, Homo sapien
ctcagagctgtgagaagcccaggca

SEQ ID NO: 4781923 - DNA, 25 bp, Homo sapien
tgtaagagtccacagattacgctgc

SEQ ID NO: 4781924 - DNA, 25 bp, Homo sapien
aaaggagtactccagagcttctcag

SEQ ID NO: 4781925 - DNA, 25 bp, Homo sapien
cctctccccattcaggcagacatgc

SEQ ID NO: 4781926 - DNA, 25 bp, Homo sapien
ccccattcaggcagacatgcgtgcc

SEQ ID NO: 4781927 - DNA, 25 bp, Homo sapien
tccccattcaggcagacatgcgtgc

SEQ ID NO: 4781928 - DNA, 25 bp, Homo sapien
tctccccattcaggcagacatgcgt

SEQ ID NO: 4781929 - DNA, 25 bp, Homo sapien
cagtgaaataatcatgtcctgggct

SEQ ID NO: 4781930 - DNA, 25 bp, Homo sapien
ttcaatcttggtaggaatttatcca

SEQ ID NO: 4781931 - DNA, 25 bp, Homo sapien
gaatgaatcagtattagttcttctg

SEQ ID NO: 4781932 - DNA, 25 bp, Homo sapien
tagtatcagtgtaatatcagccttg

SEQ ID NO: 4781933 - DNA, 25 bp, Homo sapien
tgtgtcctctgaccgtatgttttca

SEQ ID NO: 4781934 - DNA, 25 bp, Homo sapien
ccaaatatattggagttccatggta

SEQ ID NO: 4781935 - DNA, 25 bp, Homo sapien
ctatcaggaaactctgatacattct

SEQ ID NO: 4781936 - DNA, 25 bp, Homo sapien
taaattcttctatcaggaaactctg

SEQ ID NO: 4781937 - DNA, 25 bp, Homo sapien
tgctgaaagcatgctcacccgagag

SEQ ID NO: 4781938 - DNA, 25 bp, Homo sapien
ggcgaagaccttgcccaaagatgat

SEQ ID NO: 4781939 - DNA, 25 bp, Homo sapien
taatgaatgactcaagacaaaggtc

SEQ ID NO: 4781940 - DNA, 25 bp, Homo sapien
tccaagaagttcataagctgttcca

SEQ ID NO: 4781941 - DNA, 25 bp, Homo sapien
aaagcacattctgtaggaacccggg

SEQ ID NO: 4781942 - DNA, 25 bp, Homo sapien
ccaatcaggtgggaatttgtctcct

SEQ ID NO: 4781943 - DNA, 25 bp, Homo sapien
cacagcattagtttgagccttaagt

SEQ ID NO: 4781944 - DNA, 25 bp, Homo sapien
ccctttagccaactgggcaagaaga

SEQ ID NO: 4781945 - DNA, 25 bp, Homo sapien
cccttcacggccaccatcaaactga

SEQ ID NO: 4781946 - DNA, 25 bp, Homo sapien
aaggcaaacagatccttcattagtg

SEQ ID NO: 4781947 - DNA, 25 bp, Homo sapien
gtgaatcagtgataccatctttatc

SEQ ID NO: 4781948 - DNA, 25 bp, Homo sapien
tagcaattgagagctgtgtgaggtt

SEQ ID NO: 4781949 - DNA, 25 bp, Homo sapien
tgtgaggtttggtacccactagctg

SEQ ID NO: 4781950 - DNA, 25 bp, Homo sapien
tactgtggcatacaaaacccttcaa

SEQ ID NO: 4781951 - DNA, 25 bp, Homo sapien
catggtacttgccttatgtgctgca

SEQ ID NO: 4781952 - DNA, 25 bp, Homo sapien
actggctcaccgaaaaagttatttg

SEQ ID NO: 4781953 - DNA, 25 bp, Homo sapien
cattgacaagggaaacacagagact

SEQ ID NO: 4781954 - DNA, 25 bp, Homo sapien
cacaggtcaggtcagatgactcgct

SEQ ID NO: 4781955 - DNA, 25 bp, Homo sapien
ccttcagattcatgtggcctttgaa

SEQ ID NO: 4781956 - DNA, 25 bp, Homo sapien
gttgataataacagcataggacttg

SEQ ID NO: 4781957 - DNA, 25 bp, Homo sapien
ggacttgaatattggccttcagatt

SEQ ID NO: 4781958 - DNA, 25 bp, Homo sapien
tataggagactagtttctgtggtct

SEQ ID NO: 4781959 - DNA, 25 bp, Homo sapien
tcttaccaagaaggtccaatatagg

SEQ ID NO: 4781960 - DNA, 25 bp, Homo sapien
gaaggtccaatataggagactagtt

SEQ ID NO: 4781961 - DNA, 25 bp, Homo sapien
caatataggagactagtttctgtgg

SEQ ID NO: 4781962 - DNA, 25 bp, Homo sapien
ttgggccatggctctatattgagac

SEQ ID NO: 4781963 - DNA, 25 bp, Homo sapien
gccatcagtaattcttgactgacca

SEQ ID NO: 4781964 - DNA, 25 bp, Homo sapien
gttgaggccatcagtaattcttgac

SEQ ID NO: 4781965 - DNA, 25 bp, Homo sapien
taggcactgtgtgcggtttcaaagc

SEQ ID NO: 4781966 - DNA, 25 bp, Homo sapien
gctgctcagaatgtgactcaccaga

SEQ ID NO: 4781967 - DNA, 25 bp, Homo sapien
gaggggctagactcatctccataga

SEQ ID NO: 4781968 - DNA, 25 bp, Homo sapien
ccagaagaccttctaggactttgtt

SEQ ID NO: 4781969 - DNA, 25 bp, Homo sapien
tgttaattatgcctcaatgccagtt

SEQ ID NO: 4781970 - DNA, 25 bp, Homo sapien
gtaaaggccagtaactgaaactcaa

SEQ ID NO: 4781971 - DNA, 25 bp, Homo sapien
aaaggccagtaactgaaactcaaat

SEQ ID NO: 4781972 - DNA, 25 bp, Homo sapien
taaaggccagtaactgaaactcaaa

SEQ ID NO: 4781973 - DNA, 25 bp, Homo sapien
tgttcgataccaaattgacaccaat

SEQ ID NO: 4781974 - DNA, 25 bp, Homo sapien
tctgtagggataaagtaatgtgccc

SEQ ID NO: 4781975 - DNA, 25 bp, Homo sapien
attaccacctagaaaggagcagagc

SEQ ID NO: 4781976 - DNA, 25 bp, Homo sapien
gaaatgattctcttttggcagggca

SEQ ID NO: 4781977 - DNA, 25 bp, Homo sapien
ctgccagcattcagtgtgccatggg

SEQ ID NO: 4781978 - DNA, 25 bp, Homo sapien
tgccagcattcagtgtgccatgggc

SEQ ID NO: 4781979 - DNA, 25 bp, Homo sapien
tgaacaaagaggtaaaaggcacagt

SEQ ID NO: 4781980 - DNA, 25 bp, Homo sapien
ctgctactaatttccttcttgtttc

SEQ ID NO: 4781981 - DNA, 25 bp, Homo sapien
taacagaaatctttgtttgaacaaa

SEQ ID NO: 4781982 - DNA, 25 bp, Homo sapien
ttcttgtttctttgctaacagaaat

SEQ ID NO: 4781983 - DNA, 25 bp, Homo sapien
taagaagcagctccagcgatgagtt

SEQ ID NO: 4781984 - DNA, 25 bp, Homo sapien
ttaagaagcagctccagcgatgagt

SEQ ID NO: 4781985 - DNA, 25 bp, Homo sapien
ctgtcccatgacgtacttcattcat

SEQ ID NO: 4781986 - DNA, 25 bp, Homo sapien
gtcccatgacgtacttcattcatga

SEQ ID NO: 4781987 - DNA, 25 bp, Homo sapien
tgtcccatgacgtacttcattcatg

SEQ ID NO: 4781988 - DNA, 25 bp, Homo sapien
tcctcatgggtcttgaccatctcct

SEQ ID NO: 4781989 - DNA, 25 bp, Homo sapien
gtgccccgcaggccccatggactac

SEQ ID NO: 4781990 - DNA, 25 bp, Homo sapien
tcctcatcatcttcttgttaagtag

SEQ ID NO: 4781991 - DNA, 25 bp, Homo sapien
catcatcttcttgttaagtaggttg

SEQ ID NO: 4781992 - DNA, 25 bp, Homo sapien
ggaggaagaagaggggtcagtcttg

SEQ ID NO: 4781993 - DNA, 25 bp, Homo sapien
cctcatcatcttcttgttaagtagg

SEQ ID NO: 4781994 - DNA, 25 bp, Homo sapien
ttctatcttcaccaacagtgcctac

SEQ ID NO: 4781995 - DNA, 25 bp, Homo sapien
tctatcttcaccaacagtgcctacc

SEQ ID NO: 4781996 - DNA, 25 bp, Homo sapien
ctatcttcaccaacagtgcctacca

SEQ ID NO: 4781997 - DNA, 25 bp, Homo sapien
caaatctgtgggtgactagatgtcc

SEQ ID NO: 4781998 - DNA, 25 bp, Homo sapien
gactgcagtgaagtggaaagcatct

SEQ ID NO: 4781999 - DNA, 25 bp, Homo sapien
tgtgtaagccaggacaatcctgaga

SEQ ID NO: 4782000 - DNA, 25 bp, Homo sapien
gacaagcgtttgtgtctccagagac

SEQ ID NO: 4782001 - DNA, 25 bp, Homo sapien
ggagacatccagaaggtagttagca

SEQ ID NO: 4782002 - DNA, 25 bp, Homo sapien
gaagccacatgcctatgacgatgag

SEQ ID NO: 4782003 - DNA, 25 bp, Homo sapien
tagcagttccggactgtaaattcag

SEQ ID NO: 4782004 - DNA, 25 bp, Homo sapien
tcagggaatctgtatggagacatcc

SEQ ID NO: 4782005 - DNA, 25 bp, Homo sapien
ggagaaatttggcagtggacacgta

SEQ ID NO: 4782006 - DNA, 25 bp, Homo sapien
tctttcaataaatgccgaagaaatt

SEQ ID NO: 4782007 - DNA, 25 bp, Homo sapien
tgtagttgccacatacatgtgatgg

SEQ ID NO: 4782008 - DNA, 25 bp, Homo sapien
aagctgagtcacagttgtagttgcc

SEQ ID NO: 4782009 - DNA, 25 bp, Homo sapien
gagtagcagtcattccaccttcttg

SEQ ID NO: 4782010 - DNA, 25 bp, Homo sapien
gcctagattcttcctcatatatggg

SEQ ID NO: 4782011 - DNA, 25 bp, Homo sapien
ccagcaggtctgatggacagatgtg

SEQ ID NO: 4782012 - DNA, 25 bp, Homo sapien
ccttcttgctagtatgcacacagga

SEQ ID NO: 4782013 - DNA, 25 bp, Homo sapien
aaagccaactctgcaatccaatgac

SEQ ID NO: 4782014 - DNA, 25 bp, Homo sapien
catccttgcagccatagaaacacag

SEQ ID NO: 4782015 - DNA, 25 bp, Homo sapien
aaacacagcacctacagcacctaga

SEQ ID NO: 4782016 - DNA, 25 bp, Homo sapien
ttttgtaaaaggcattgatagtagt

SEQ ID NO: 4782017 - DNA, 25 bp, Homo sapien
ccatgtgaacataaggaggtagctg

SEQ ID NO: 4782018 - DNA, 25 bp, Homo sapien
cataaaattctacatagagtctgga

SEQ ID NO: 4782019 - DNA, 25 bp, Homo sapien
agagtctggaagcaaccatgtgaac

SEQ ID NO: 4782020 - DNA, 25 bp, Homo sapien
taacaaatttgatactacagaggca

SEQ ID NO: 4782021 - DNA, 25 bp, Homo sapien
cgttgactccattgtaaggacggca

SEQ ID NO: 4782022 - DNA, 25 bp, Homo sapien
gaacagcttgtgtaatgaacttcct

SEQ ID NO: 4782023 - DNA, 25 bp, Homo sapien
tcatcatatttggacaccgagcctc

SEQ ID NO: 4782024 - DNA, 25 bp, Homo sapien
cacatctatcaggaaagaacagctt

SEQ ID NO: 4782025 - DNA, 25 bp, Homo sapien
ccagtccagatatgttgcttcctga

SEQ ID NO: 4782026 - DNA, 25 bp, Homo sapien
tatcaggaacagaggtaatccagtc

SEQ ID NO: 4782027 - DNA, 25 bp, Homo sapien
gattgaattcgctgacaagtgcctg

SEQ ID NO: 4782028 - DNA, 25 bp, Homo sapien
tcttaggtgagcctttgtcaagcac

SEQ ID NO: 4782029 - DNA, 25 bp, Homo sapien
tgttttgaagacctgcttagtattt

SEQ ID NO: 4782030 - DNA, 25 bp, Homo sapien
gtatttaggacataagcatatagag

SEQ ID NO: 4782031 - DNA, 25 bp, Homo sapien
gaagacctgcttagtatttaggaca

SEQ ID NO: 4782032 - DNA, 25 bp, Homo sapien
tatttaggacataagcatatagaga

SEQ ID NO: 4782033 - DNA, 25 bp, Homo sapien
tcctccaatttagaagtaatctttc

SEQ ID NO: 4782034 - DNA, 25 bp, Homo sapien
ctttcccacctctgaaatattaata

SEQ ID NO: 4782035 - DNA, 25 bp, Homo sapien
tccaatttagaagtaatctttccca

SEQ ID NO: 4782036 - DNA, 25 bp, Homo sapien
aaatattaatagctcttacccccat

SEQ ID NO: 4782037 - DNA, 25 bp, Homo sapien
ctgtttgcggtagagttgttcagaa

SEQ ID NO: 4782038 - DNA, 25 bp, Homo sapien
catggaagctagaatccttggctag

SEQ ID NO: 4782039 - DNA, 25 bp, Homo sapien
catcatggaagctagaatccttggc

SEQ ID NO: 4782040 - DNA, 25 bp, Homo sapien
ctgcccaatacttcatcatggaagc

SEQ ID NO: 4782041 - DNA, 25 bp, Homo sapien
tacttcatcatggaagctagaatcc

SEQ ID NO: 4782042 - DNA, 25 bp, Homo sapien
gaaaactggagccatttgaagtgtt

SEQ ID NO: 4782043 - DNA, 25 bp, Homo sapien
ttctgagaaaactggagccatttga

SEQ ID NO: 4782044 - DNA, 25 bp, Homo sapien
tggagccatttgaagtgtttttctt

SEQ ID NO: 4782045 - DNA, 25 bp, Homo sapien
aactggagccatttgaagtgttttt

SEQ ID NO: 4782046 - DNA, 25 bp, Homo sapien
ccagaccagtgatctcttcttctgc

SEQ ID NO: 4782047 - DNA, 25 bp, Homo sapien
ttgcctttcaatctttggctccagg

SEQ ID NO: 4782048 - DNA, 25 bp, Homo sapien
ttccttcacactgtatattgtattt

SEQ ID NO: 4782049 - DNA, 25 bp, Homo sapien
tttgcctttcaatctttggctccag

SEQ ID NO: 4782050 - DNA, 25 bp, Homo sapien
ctccttcaccaagtagtacacaaaa

SEQ ID NO: 4782051 - DNA, 25 bp, Homo sapien
cattattgccagtaacatgtggaca

SEQ ID NO: 4782052 - DNA, 25 bp, Homo sapien
tggcttcattaaggcagctggattc

SEQ ID NO: 4782053 - DNA, 25 bp, Homo sapien
tctgtgaggtgtttggaaagataac

SEQ ID NO: 4782054 - DNA, 25 bp, Homo sapien
tgaaaccaatgaaagcctgatcaaa

SEQ ID NO: 4782055 - DNA, 25 bp, Homo sapien
tgcagatttgtgaaggcaagaggct

SEQ ID NO: 4782056 - DNA, 25 bp, Homo sapien
gaggcttattggagtagtcctgcag

SEQ ID NO: 4782057 - DNA, 25 bp, Homo sapien
ggcaagaggcttattggagtagtcc

SEQ ID NO: 4782058 - DNA, 25 bp, Homo sapien
cgctgcagatttgtgaaggcaagag

SEQ ID NO: 4782059 - DNA, 25 bp, Homo sapien
tgccctatcactggcagatgctacg

SEQ ID NO: 4782060 - DNA, 25 bp, Homo sapien
tggttgccctatcactggcagatgc

SEQ ID NO: 4782061 - DNA, 25 bp, Homo sapien
agcccaatctaactgccgccaagtc

SEQ ID NO: 4782062 - DNA, 25 bp, Homo sapien
ctctggttgccctatcactggcaga

SEQ ID NO: 4782063 - DNA, 25 bp, Homo sapien
tatctcatagtttagtccccacata

SEQ ID NO: 4782064 - DNA, 25 bp, Homo sapien
gcctttgtatctcatagtttagtcc

SEQ ID NO: 4782065 - DNA, 25 bp, Homo sapien
ggataataatagtccccaatatcat

SEQ ID NO: 4782066 - DNA, 25 bp, Homo sapien
tgagttacatctcttaggataataa

SEQ ID NO: 4782067 - DNA, 25 bp, Homo sapien
tcaatttctgcccaatagaagtggg

SEQ ID NO: 4782068 - DNA, 25 bp, Homo sapien
ctttacgcatgtggtttgcacaaca

SEQ ID NO: 4782069 - DNA, 25 bp, Homo sapien
cactgatgttccagaagctaagaaa

SEQ ID NO: 4782070 - DNA, 25 bp, Homo sapien
aattattttctttacgcatgtggtt

SEQ ID NO: 4782071 - DNA, 25 bp, Homo sapien
gatgtgtgtcgtatccaggccaagg

SEQ ID NO: 4782072 - DNA, 25 bp, Homo sapien
taacgcatctagttccggccaatgg

SEQ ID NO: 4782073 - DNA, 25 bp, Homo sapien
acagaagaattcaaggccctaggga

SEQ ID NO: 4782074 - DNA, 25 bp, Homo sapien
aatgagactgttaccacacctgtgg

SEQ ID NO: 4782075 - DNA, 25 bp, Homo sapien
gctcctgaaaagacacatccatatc

SEQ ID NO: 4782076 - DNA, 25 bp, Homo sapien
taaaagctagcacaacaatttggtg

SEQ ID NO: 4782077 - DNA, 25 bp, Homo sapien
tgagctgctacttaatttagtcccg

SEQ ID NO: 4782078 - DNA, 25 bp, Homo sapien
tgactcaaattagaatgcccatatg

SEQ ID NO: 4782079 - DNA, 25 bp, Homo sapien
tactttacctggaatttcaaatgag

SEQ ID NO: 4782080 - DNA, 25 bp, Homo sapien
atcaagtccttttgttacaactctt

SEQ ID NO: 4782081 - DNA, 25 bp, Homo sapien
caaaggagatcttgtatatgaaaac

SEQ ID NO: 4782082 - DNA, 25 bp, Homo sapien
aacattcagagtattataaagtccc

SEQ ID NO: 4782083 - DNA, 25 bp, Homo sapien
gttttccccaacaggtagattctga

SEQ ID NO: 4782084 - DNA, 25 bp, Homo sapien
gaatgaaccattaataactcttctt

SEQ ID NO: 4782085 - DNA, 25 bp, Homo sapien
ttctcagccaagaatgaaccattaa

SEQ ID NO: 4782086 - DNA, 25 bp, Homo sapien
gattctgatctactgccagacctag

SEQ ID NO: 4782087 - DNA, 25 bp, Homo sapien
tcaaattggtactggacaaagaggg

SEQ ID NO: 4782088 - DNA, 25 bp, Homo sapien
ttttaagtcaaattggtactggaca

SEQ ID NO: 4782089 - DNA, 25 bp, Homo sapien
gtactaccagcatcaggcggcaagt

SEQ ID NO: 4782090 - DNA, 25 bp, Homo sapien
tggacaaagagggtactaccagcat

SEQ ID NO: 4782091 - DNA, 25 bp, Homo sapien
aggctgcgtgcggtattgctgagga

SEQ ID NO: 4782092 - DNA, 25 bp, Homo sapien
ccaggctgcgtgcggtattgctgag

SEQ ID NO: 4782093 - DNA, 25 bp, Homo sapien
gctgcgtgcggtattgctgaggaaa

SEQ ID NO: 4782094 - DNA, 25 bp, Homo sapien
ggctgcgtgcggtattgctgaggaa

SEQ ID NO: 4782095 - DNA, 25 bp, Homo sapien
ctatttatttacactccgaagggag

SEQ ID NO: 4782096 - DNA, 25 bp, Homo sapien
ccgaagggagatgtagacttgcaac

SEQ ID NO: 4782097 - DNA, 25 bp, Homo sapien
tagttcattaccatgcaggccaaag

SEQ ID NO: 4782098 - DNA, 25 bp, Homo sapien
catttctacttcatggacagaaggc

SEQ ID NO: 4782099 - DNA, 25 bp, Homo sapien
gatgagattcaagaattttcatatt

SEQ ID NO: 4782100 - DNA, 25 bp, Homo sapien
tatagtagcatgcaaacctatttca

SEQ ID NO: 4782101 - DNA, 25 bp, Homo sapien
ttcaatcatattgagcttctatcta

SEQ ID NO: 4782102 - DNA, 25 bp, Homo sapien
ttaatattcaatcatattgagcttc

SEQ ID NO: 4782103 - DNA, 25 bp, Homo sapien
ggtgaagagttaggcaagaagtaat

SEQ ID NO: 4782104 - DNA, 25 bp, Homo sapien
taggcaagaagtaatacgtggaaac

SEQ ID NO: 4782105 - DNA, 25 bp, Homo sapien
gaagtaatacgtggaaactgtcaag

SEQ ID NO: 4782106 - DNA, 25 bp, Homo sapien
tacgtggaaactgtcaagtgcttct

SEQ ID NO: 4782107 - DNA, 25 bp, Homo sapien
cactggcccgtcatggtattttcag

SEQ ID NO: 4782108 - DNA, 25 bp, Homo sapien
gatctggagctggtgatcacactgg

SEQ ID NO: 4782109 - DNA, 25 bp, Homo sapien
ggtgatcacactggcccgtcatggt

SEQ ID NO: 4782110 - DNA, 25 bp, Homo sapien
cagataccatcgcagccggctgggg

SEQ ID NO: 4782111 - DNA, 25 bp, Homo sapien
gggcaaaaagccacaaaggagcaga

SEQ ID NO: 4782112 - DNA, 25 bp, Homo sapien
gcaaaaagccacaaaggagcagagc

SEQ ID NO: 4782113 - DNA, 25 bp, Homo sapien
cggggcaaaaagccacaaaggagca

SEQ ID NO: 4782114 - DNA, 25 bp, Homo sapien
aggagcagagcagctgctgctgcac

SEQ ID NO: 4782115 - DNA, 25 bp, Homo sapien
gggtatccccggcactcaggaagtg

SEQ ID NO: 4782116 - DNA, 25 bp, Homo sapien
tcaggaagtggtggccgcgggcagc

SEQ ID NO: 4782117 - DNA, 25 bp, Homo sapien
cactcaggaagtggtggccgcgggc

SEQ ID NO: 4782118 - DNA, 25 bp, Homo sapien
cgggaagggtatccccggcactcag

SEQ ID NO: 4782119 - DNA, 25 bp, Homo sapien
tggtagaaccgccgggccttccgca

SEQ ID NO: 4782120 - DNA, 25 bp, Homo sapien
cccacctccgtgcgcacacacatgc

SEQ ID NO: 4782121 - DNA, 25 bp, Homo sapien
gcgggcggggatcaccgtctcccca

SEQ ID NO: 4782122 - DNA, 25 bp, Homo sapien
tcgcgccccgctgtcgcccgcgcct

SEQ ID NO: 4782123 - DNA, 25 bp, Homo sapien
ccgcgccggacgaagagagccgcca

SEQ ID NO: 4782124 - DNA, 25 bp, Homo sapien
cggacgaagagagccgccagcgccc

SEQ ID NO: 4782125 - DNA, 25 bp, Homo sapien
tctctcccacggctcgcacccactc

SEQ ID NO: 4782126 - DNA, 25 bp, Homo sapien
gcgccggacgaagagagccgccagc

SEQ ID NO: 4782127 - DNA, 25 bp, Homo sapien
gagcccggcccctcgtcgccggtca

SEQ ID NO: 4782128 - DNA, 25 bp, Homo sapien
cggcccctcgtcgccggtcaccaga

SEQ ID NO: 4782129 - DNA, 25 bp, Homo sapien
ccggcccctcgtcgccggtcaccag

SEQ ID NO: 4782130 - DNA, 25 bp, Homo sapien
ggcccctcgtcgccggtcaccagac

SEQ ID NO: 4782131 - DNA, 25 bp, Homo sapien
tcactggagctggtcagaagctggc

SEQ ID NO: 4782132 - DNA, 25 bp, Homo sapien
agacgcacgccctggcgagcggttc

SEQ ID NO: 4782133 - DNA, 25 bp, Homo sapien
tcttcgggctggtgccagacgcctt

SEQ ID NO: 4782134 - DNA, 25 bp, Homo sapien
tccctttcggaagagctgtcctctc

SEQ ID NO: 4782135 - DNA, 25 bp, Homo sapien
gaggaggagggtgacgtagcgtccc

SEQ ID NO: 4782136 - DNA, 25 bp, Homo sapien
aggaggagggtgacgtagcgtccca

SEQ ID NO: 4782137 - DNA, 25 bp, Homo sapien
ggaggagggtgacgtagcgtcccat

SEQ ID NO: 4782138 - DNA, 25 bp, Homo sapien
ggaggaggagggtgacgtagcgtcc

SEQ ID NO: 4782139 - DNA, 25 bp, Homo sapien
gccgctagggctcctgtggcataaa

SEQ ID NO: 4782140 - DNA, 25 bp, Homo sapien
ccgggagagcggagtctcctgcctc

SEQ ID NO: 4782141 - DNA, 25 bp, Homo sapien
cataaatgacgtgccgagagagcga

SEQ ID NO: 4782142 - DNA, 25 bp, Homo sapien
tccaggcactctatggagaggccgc

SEQ ID NO: 4782143 - DNA, 25 bp, Homo sapien
cttgtacaccgcagcccttccggga

SEQ ID NO: 4782144 - DNA, 25 bp, Homo sapien
tctcccatgagtcgggatcgcagca

SEQ ID NO: 4782145 - DNA, 25 bp, Homo sapien
tctcggctgtgctctcccatgagtc

SEQ ID NO: 4782146 - DNA, 25 bp, Homo sapien
ccagtgcagatttcgggacagctct

SEQ ID NO: 4782147 - DNA, 25 bp, Homo sapien
tatagcggctccagcgatgtaattc

SEQ ID NO: 4782148 - DNA, 25 bp, Homo sapien
ccccactcgaagaggcgaaaagcct

SEQ ID NO: 4782149 - DNA, 25 bp, Homo sapien
gaccgggatttgtgctatagcggct

SEQ ID NO: 4782150 - DNA, 25 bp, Homo sapien
agcggcccgtaggttctgatctgaa

SEQ ID NO: 4782151 - DNA, 25 bp, Homo sapien
taaatcgggtgtaattggcgactcc

SEQ ID NO: 4782152 - DNA, 25 bp, Homo sapien
cacggacagaactcgcgcttttgga

SEQ ID NO: 4782153 - DNA, 25 bp, Homo sapien
gactcccgcacactgacacgtgtgg

SEQ ID NO: 4782154 - DNA, 25 bp, Homo sapien
tctcctctggacgttggctcggtgt

SEQ ID NO: 4782155 - DNA, 25 bp, Homo sapien
cgagcgcagcctgcggagactgact

SEQ ID NO: 4782156 - DNA, 25 bp, Homo sapien
tctccaacctgttggaagcctcggg

SEQ ID NO: 4782157 - DNA, 25 bp, Homo sapien
aggaagaacgcatttgtcccttgat

SEQ ID NO: 4782158 - DNA, 25 bp, Homo sapien
cagcctgcggagactgacttccaaa

SEQ ID NO: 4782159 - DNA, 25 bp, Homo sapien
gctccccagggttggaaactccgca

SEQ ID NO: 4782160 - DNA, 25 bp, Homo sapien
ccagggttggaaactccgcagagga

SEQ ID NO: 4782161 - DNA, 25 bp, Homo sapien
cgcagaggagccccggtcacaatgg

SEQ ID NO: 4782162 - DNA, 25 bp, Homo sapien
gtgcgtttcacggtttcctccacac

SEQ ID NO: 4782163 - DNA, 25 bp, Homo sapien
ccggcggccgcaagcaggagcggcg

SEQ ID NO: 4782164 - DNA, 25 bp, Homo sapien
ctaatttacaaccccaaggctctgt

SEQ ID NO: 4782165 - DNA, 25 bp, Homo sapien
gggctttgacagaggtagttatttc

SEQ ID NO: 4782166 - DNA, 25 bp, Homo sapien
gcaggagcggcggaacgtgtttcca

SEQ ID NO: 4782167 - DNA, 25 bp, Homo sapien
actccgcttgaaaggccctcaggga

SEQ ID NO: 4782168 - DNA, 25 bp, Homo sapien
cttgaaaggccctcagggaatgcgg

SEQ ID NO: 4782169 - DNA, 25 bp, Homo sapien
cagggaatgcgggacgggaatgcgg

SEQ ID NO: 4782170 - DNA, 25 bp, Homo sapien
tcagagaacgactccgcttgaaagg

SEQ ID NO: 4782171 - DNA, 25 bp, Homo sapien
gggcgggtgggggattgctggagac

SEQ ID NO: 4782172 - DNA, 25 bp, Homo sapien
tgaaggggcgggtgggggattgctg

SEQ ID NO: 4782173 - DNA, 25 bp, Homo sapien
gaagcacgtgctacagccgtgggaa

SEQ ID NO: 4782174 - DNA, 25 bp, Homo sapien
ccgcgctacatcgagcgcaagcttt

SEQ ID NO: 4782175 - DNA, 25 bp, Homo sapien
atcgagcgcaagctttccgtccgag

SEQ ID NO: 4782176 - DNA, 25 bp, Homo sapien
ctacagccgtgggaagatccgcttc

SEQ ID NO: 4782177 - DNA, 25 bp, Homo sapien
tcctggtcgtcgagggtttcctgga

SEQ ID NO: 4782178 - DNA, 25 bp, Homo sapien
ctcaggggcgccaggagatgaccct

SEQ ID NO: 4782179 - DNA, 25 bp, Homo sapien
gagccccgagtccctttctctcttc

SEQ ID NO: 4782180 - DNA, 25 bp, Homo sapien
gcgccaggagatgaccctcgtggcc

SEQ ID NO: 4782181 - DNA, 25 bp, Homo sapien
tcatgcattcgttccggaccttgtg

SEQ ID NO: 4782182 - DNA, 25 bp, Homo sapien
tggccctcgaaactcgcggctaata

SEQ ID NO: 4782183 - DNA, 25 bp, Homo sapien
gcggctaatagaagcgaagctccat

SEQ ID NO: 4782184 - DNA, 25 bp, Homo sapien
catttagaatgaaaagcgcagactt

SEQ ID NO: 4782185 - DNA, 25 bp, Homo sapien
tacactctcagcctccgctggagag

SEQ ID NO: 4782186 - DNA, 25 bp, Homo sapien
ggcgcttcgcctcgccggacgtccg

SEQ ID NO: 4782187 - DNA, 25 bp, Homo sapien
tgagcctggacccttagcggtgccg

SEQ ID NO: 4782188 - DNA, 25 bp, Homo sapien
cctgtagagcccactgcggaagagg

SEQ ID NO: 4782189 - DNA, 25 bp, Homo sapien
cttgcaaatacgagaggtgctgctc

SEQ ID NO: 4782190 - DNA, 25 bp, Homo sapien
tcctaaaacatggtgcccagactgc

SEQ ID NO: 4782191 - DNA, 25 bp, Homo sapien
tcagtgccacttaacggagtaacag

SEQ ID NO: 4782192 - DNA, 25 bp, Homo sapien
tactgggattagcttcagagcctgc

SEQ ID NO: 4782193 - DNA, 25 bp, Homo sapien
tccagttaagagtctgtgtgctggt

SEQ ID NO: 4782194 - DNA, 25 bp, Homo sapien
tgacctgctgcttggtccaacacac

SEQ ID NO: 4782195 - DNA, 25 bp, Homo sapien
ttttgaaagggaggatctgccctga

SEQ ID NO: 4782196 - DNA, 25 bp, Homo sapien
gagtttcacaagtagctccctcagc

SEQ ID NO: 4782197 - DNA, 25 bp, Homo sapien
gaaaacatgtttctcaagcaggtgg

SEQ ID NO: 4782198 - DNA, 25 bp, Homo sapien
aatgcaacctctggtacagatggcc

SEQ ID NO: 4782199 - DNA, 25 bp, Homo sapien
gatggttgacatgcaggcaaagaca

SEQ ID NO: 4782200 - DNA, 25 bp, Homo sapien
tgctagacttccaagagagccatta

SEQ ID NO: 4782201 - DNA, 25 bp, Homo sapien
cagccaagggttgttcgccagggta

SEQ ID NO: 4782202 - DNA, 25 bp, Homo sapien
tggaggattacctacaaatcagaca

SEQ ID NO: 4782203 - DNA, 25 bp, Homo sapien
caaaggtacgtatgtggtgcaaaca

SEQ ID NO: 4782204 - DNA, 25 bp, Homo sapien
tgtgtcttaaagattggtcccttga

SEQ ID NO: 4782205 - DNA, 25 bp, Homo sapien
agtgacttggatacaccaattagaa

SEQ ID NO: 4782206 - DNA, 25 bp, Homo sapien
tgtatgcacgttatattgtaatagc

SEQ ID NO: 4782207 - DNA, 25 bp, Homo sapien
cattccgtgttcgtactcccttttg

SEQ ID NO: 4782208 - DNA, 25 bp, Homo sapien
tgggctgcgtttcaacattccgtgt

SEQ ID NO: 4782209 - DNA, 25 bp, Homo sapien
tcttgtgcaccatgagtatttggaa

SEQ ID NO: 4782210 - DNA, 25 bp, Homo sapien
tatcaagatgatagaacctggaatg

SEQ ID NO: 4782211 - DNA, 25 bp, Homo sapien
ggcctggtctgtcaactagtccaac

SEQ ID NO: 4782212 - DNA, 25 bp, Homo sapien
gaagagttactcaaggtcaaacagc

SEQ ID NO: 4782213 - DNA, 25 bp, Homo sapien
gattttacggagcagagcaacccta

SEQ ID NO: 4782214 - DNA, 25 bp, Homo sapien
gggtacctcctaagaactgtagcaa

SEQ ID NO: 4782215 - DNA, 25 bp, Homo sapien
ccttttatctggaacgtggatgcca

SEQ ID NO: 4782216 - DNA, 25 bp, Homo sapien
catggttcatctacagcataggtga

SEQ ID NO: 4782217 - DNA, 25 bp, Homo sapien
tttccaaaattggtatccagagcca

SEQ ID NO: 4782218 - DNA, 25 bp, Homo sapien
tccaaaattggtatccagagccaaa

SEQ ID NO: 4782219 - DNA, 25 bp, Homo sapien
ttccaaaattggtatccagagccaa

SEQ ID NO: 4782220 - DNA, 25 bp, Homo sapien
ttcacaggaagcatggttaagcctc

SEQ ID NO: 4782221 - DNA, 25 bp, Homo sapien
aaccatatcagccaccaaatcatta

SEQ ID NO: 4782222 - DNA, 25 bp, Homo sapien
gccacacaccttcaaacaactagct

SEQ ID NO: 4782223 - DNA, 25 bp, Homo sapien
catctttaccatggcggagcaggag

SEQ ID NO: 4782224 - DNA, 25 bp, Homo sapien
caaagaagagatgtcaagcaagagc

SEQ ID NO: 4782225 - DNA, 25 bp, Homo sapien
cagagaagaaccagtcagccaagtg

SEQ ID NO: 4782226 - DNA, 25 bp, Homo sapien
tagaacattttagcaccaggtggca

SEQ ID NO: 4782227 - DNA, 25 bp, Homo sapien
tcaaacaccaattccaaagggccag

SEQ ID NO: 4782228 - DNA, 25 bp, Homo sapien
cagatagacatccactaacaagctc

SEQ ID NO: 4782229 - DNA, 25 bp, Homo sapien
gggcagtaccctggtgtgatctcca

SEQ ID NO: 4782230 - DNA, 25 bp, Homo sapien
tcaggaacctgatgtagcagcataa

SEQ ID NO: 4782231 - DNA, 25 bp, Homo sapien
taatgacagtggatcaatctctccc

SEQ ID NO: 4782232 - DNA, 25 bp, Homo sapien
ggtagaaagtcactgccctttggag

SEQ ID NO: 4782233 - DNA, 25 bp, Homo sapien
tgttgcgaatcagttaatgtagcag

SEQ ID NO: 4782234 - DNA, 25 bp, Homo sapien
taaatcctttagtgagtccatcctg

SEQ ID NO: 4782235 - DNA, 25 bp, Homo sapien
gatcagaagtctgggttaaatcctt

SEQ ID NO: 4782236 - DNA, 25 bp, Homo sapien
ccctgccagctctgttaaatgctgg

SEQ ID NO: 4782237 - DNA, 25 bp, Homo sapien
ctacaataacatcactttgcatttg

SEQ ID NO: 4782238 - DNA, 25 bp, Homo sapien
cttcccctgccagctctgttaaatg

SEQ ID NO: 4782239 - DNA, 25 bp, Homo sapien
caataacatcactttgcatttgtat

SEQ ID NO: 4782240 - DNA, 25 bp, Homo sapien
gaccctgctgctttctccgctctct

SEQ ID NO: 4782241 - DNA, 25 bp, Homo sapien
aggaccctgctgctttctccgctct

SEQ ID NO: 4782242 - DNA, 25 bp, Homo sapien
tgaggaccctgctgctttctccgct

SEQ ID NO: 4782243 - DNA, 25 bp, Homo sapien
tgtgaggaccctgctgctttctccg

SEQ ID NO: 4782244 - DNA, 25 bp, Homo sapien
gaatcaagtctagctggagtccatc

SEQ ID NO: 4782245 - DNA, 25 bp, Homo sapien
gctctatggacactttgatcaatgg

SEQ ID NO: 4782246 - DNA, 25 bp, Homo sapien
tgatcaatggtgaaagagaaccagg

SEQ ID NO: 4782247 - DNA, 25 bp, Homo sapien
gttctgagtgacagctccaagccag

SEQ ID NO: 4782248 - DNA, 25 bp, Homo sapien
aaacagcttatcaaggaagggcact

SEQ ID NO: 4782249 - DNA, 25 bp, Homo sapien
agcttatcaaggaagggcactgaag

SEQ ID NO: 4782250 - DNA, 25 bp, Homo sapien
ttaaacagcttatcaaggaagggca

SEQ ID NO: 4782251 - DNA, 25 bp, Homo sapien
acagcttatcaaggaagggcactga

SEQ ID NO: 4782252 - DNA, 25 bp, Homo sapien
agcgcccggcctgggggccctgcgg

SEQ ID NO: 4782253 - DNA, 25 bp, Homo sapien
cccagcgcccggcctgggggccctg

SEQ ID NO: 4782254 - DNA, 25 bp, Homo sapien
tgtgcgcccccagcgcccggcctgg

SEQ ID NO: 4782255 - DNA, 25 bp, Homo sapien
ctgtgcgcccccagcgcccggcctg

SEQ ID NO: 4782256 - DNA, 25 bp, Homo sapien
gtgatgccccgccccgtcgctcctg

SEQ ID NO: 4782257 - DNA, 25 bp, Homo sapien
ccctcgtgatgccccgccccgtcgc

SEQ ID NO: 4782258 - DNA, 25 bp, Homo sapien
ctcgtgatgccccgccccgtcgctc

SEQ ID NO: 4782259 - DNA, 25 bp, Homo sapien
atgccccgccccgtcgctcctgcgc

SEQ ID NO: 4782260 - DNA, 25 bp, Homo sapien
tttttcagaagtggcggagcctcgc

SEQ ID NO: 4782261 - DNA, 25 bp, Homo sapien
agacccgcgcatccgttcgctggtg

SEQ ID NO: 4782262 - DNA, 25 bp, Homo sapien
ttggatccgaagtgcgagcgccatg

SEQ ID NO: 4782263 - DNA, 25 bp, Homo sapien
cgtcctgtctctggcgcgctgtagg

SEQ ID NO: 4782264 - DNA, 25 bp, Homo sapien
cgctcgatggtagtgaggctcggag

SEQ ID NO: 4782265 - DNA, 25 bp, Homo sapien
aggaatgacgcgacgctcgatggta

SEQ ID NO: 4782266 - DNA, 25 bp, Homo sapien
ctgcgaggaatgacgcgacgctcga

SEQ ID NO: 4782267 - DNA, 25 bp, Homo sapien
atgacgcgacgctcgatggtagtga

SEQ ID NO: 4782268 - DNA, 25 bp, Homo sapien
agcgagaggccggaagcccctgctc

SEQ ID NO: 4782269 - DNA, 25 bp, Homo sapien
tggttggcagaaggtcccacacctt

SEQ ID NO: 4782270 - DNA, 25 bp, Homo sapien
ccacaccttggctccctccttttag

SEQ ID NO: 4782271 - DNA, 25 bp, Homo sapien
gctcgccaaacccagaggtggttgg

SEQ ID NO: 4782272 - DNA, 25 bp, Homo sapien
tctctccaaattcggtatctcttcc

SEQ ID NO: 4782273 - DNA, 25 bp, Homo sapien
ccaaattcggtatctcttccataag

SEQ ID NO: 4782274 - DNA, 25 bp, Homo sapien
ggtatctcttccataagtcagaaac

SEQ ID NO: 4782275 - DNA, 25 bp, Homo sapien
tcggtatctcttccataagtcagaa

SEQ ID NO: 4782276 - DNA, 25 bp, Homo sapien
gaagacagctgttaccagggaggtc

SEQ ID NO: 4782277 - DNA, 25 bp, Homo sapien
ttttaggatgtctgaagatgaagaa

SEQ ID NO: 4782278 - DNA, 25 bp, Homo sapien
cattaagatagtaatcccaacagac

SEQ ID NO: 4782279 - DNA, 25 bp, Homo sapien
gaaattacgccgtcttgaaccagct

SEQ ID NO: 4782280 - DNA, 25 bp, Homo sapien
gctttctgtgtatcttgtggttaat

SEQ ID NO: 4782281 - DNA, 25 bp, Homo sapien
tttctctaaatgctccatatctctg

SEQ ID NO: 4782282 - DNA, 25 bp, Homo sapien
ttttttagttgtctggctttctgtg

SEQ ID NO: 4782283 - DNA, 25 bp, Homo sapien
tgtggttaattttctctaaatgctc

SEQ ID NO: 4782284 - DNA, 25 bp, Homo sapien
aagaaatcagattaattattatgat

SEQ ID NO: 4782285 - DNA, 25 bp, Homo sapien
tttctgctgtacacaatttgttctc

SEQ ID NO: 4782286 - DNA, 25 bp, Homo sapien
tatatgcatagccactcttaatcat

SEQ ID NO: 4782287 - DNA, 25 bp, Homo sapien
atatgcatagccactcttaatcatt

SEQ ID NO: 4782288 - DNA, 25 bp, Homo sapien
gctcaaaggagaacccctgattatt

SEQ ID NO: 4782289 - DNA, 25 bp, Homo sapien
tctactgggataggcacataaaaga

SEQ ID NO: 4782290 - DNA, 25 bp, Homo sapien
caaaagtcattggtctgtacacata

SEQ ID NO: 4782291 - DNA, 25 bp, Homo sapien
tgtaagcagctcataacctctaatc

SEQ ID NO: 4782292 - DNA, 25 bp, Homo sapien
cattgcagaccatgtcaacagtgct

SEQ ID NO: 4782293 - DNA, 25 bp, Homo sapien
cactattaagatggcaaggctgcag

SEQ ID NO: 4782294 - DNA, 25 bp, Homo sapien
caggagaagattgacagcattgcag

SEQ ID NO: 4782295 - DNA, 25 bp, Homo sapien
tacccagggccctgattacaggaat

SEQ ID NO: 4782296 - DNA, 25 bp, Homo sapien
tattggtgccaacatgtctatcctg

SEQ ID NO: 4782297 - DNA, 25 bp, Homo sapien
tgatggagaagctcacttccagctg

SEQ ID NO: 4782298 - DNA, 25 bp, Homo sapien
tctatcctgaggacctttgctgctg

SEQ ID NO: 4782299 - DNA, 25 bp, Homo sapien
gttggacactccgtcaccttttgga

SEQ ID NO: 4782300 - DNA, 25 bp, Homo sapien
tcagtgtgacacagaaaccaatctt

SEQ ID NO: 4782301 - DNA, 25 bp, Homo sapien
gtatgtactcatataagcccttgac

SEQ ID NO: 4782302 - DNA, 25 bp, Homo sapien
ttactgcaacaagttagaaagtggg

SEQ ID NO: 4782303 - DNA, 25 bp, Homo sapien
tagcagtcttcacacataggcaagt

SEQ ID NO: 4782304 - DNA, 25 bp, Homo sapien
caaaccttttggctgtaacccacag

SEQ ID NO: 4782305 - DNA, 25 bp, Homo sapien
tgtttgccaggcacttcaccaggca

SEQ ID NO: 4782306 - DNA, 25 bp, Homo sapien
gctgatgcagacataaacagtgctc

SEQ ID NO: 4782307 - DNA, 25 bp, Homo sapien
taaaatatgccagttgcaacccact

SEQ ID NO: 4782308 - DNA, 25 bp, Homo sapien
gatgttcttaagtaatcagaggcct

SEQ ID NO: 4782309 - DNA, 25 bp, Homo sapien
tcagagtgcagaaaccaaaccatgc

SEQ ID NO: 4782310 - DNA, 25 bp, Homo sapien
tactggtaacatcaatcacaagaag

SEQ ID NO: 4782311 - DNA, 25 bp, Homo sapien
aacgtttgtcttccatcagagtgca

SEQ ID NO: 4782312 - DNA, 25 bp, Homo sapien
taggagcagggtgatcatacatccc

SEQ ID NO: 4782313 - DNA, 25 bp, Homo sapien
tagtgggaacgtatacatgcaagtt

SEQ ID NO: 4782314 - DNA, 25 bp, Homo sapien
gatttacatctgttgtcctggtgaa

SEQ ID NO: 4782315 - DNA, 25 bp, Homo sapien
gaatacaattacatggtcaccttag

SEQ ID NO: 4782316 - DNA, 25 bp, Homo sapien
tctctaggatacagaagtgtgggtc

SEQ ID NO: 4782317 - DNA, 25 bp, Homo sapien
cagaggtcctatccaacctggttta

SEQ ID NO: 4782318 - DNA, 25 bp, Homo sapien
aaaaacagttgctaagcagaggtcc

SEQ ID NO: 4782319 - DNA, 25 bp, Homo sapien
tgagtcctgaaacaacttactgtct

SEQ ID NO: 4782320 - DNA, 25 bp, Homo sapien
gaggccccgagtagatcagataaac

SEQ ID NO: 4782321 - DNA, 25 bp, Homo sapien
caagtcctaatgagtgctgagcccc

SEQ ID NO: 4782322 - DNA, 25 bp, Homo sapien
tactgaacacgtactccttgaggcc

SEQ ID NO: 4782323 - DNA, 25 bp, Homo sapien
taggctgtgaacaactctagggcag

SEQ ID NO: 4782324 - DNA, 25 bp, Homo sapien
gacccatcttactgtatgctgcagg

SEQ ID NO: 4782325 - DNA, 25 bp, Homo sapien
caagactctacaagacagaaggagc

SEQ ID NO: 4782326 - DNA, 25 bp, Homo sapien
tgattggtagcctgttccactgtca

SEQ ID NO: 4782327 - DNA, 25 bp, Homo sapien
tgaagtctcataataggaggagcct

SEQ ID NO: 4782328 - DNA, 25 bp, Homo sapien
cctaccctagtagtgcaagttaatg

SEQ ID NO: 4782329 - DNA, 25 bp, Homo sapien
ccaacagaattgatcatatgaaaga

SEQ ID NO: 4782330 - DNA, 25 bp, Homo sapien
gaaaagcacatacgacacaggaaac

SEQ ID NO: 4782331 - DNA, 25 bp, Homo sapien
gaggctactatattaaatgacaatg

SEQ ID NO: 4782332 - DNA, 25 bp, Homo sapien
tactatttccaccacgtaggttgat

SEQ ID NO: 4782333 - DNA, 25 bp, Homo sapien
ccaccacgtaggttgatgctgctgt

SEQ ID NO: 4782334 - DNA, 25 bp, Homo sapien
tttccaccacgtaggttgatgctgc

SEQ ID NO: 4782335 - DNA, 25 bp, Homo sapien
tatttccaccacgtaggttgatgct

SEQ ID NO: 4782336 - DNA, 25 bp, Homo sapien
tacctatattcactgggtgctagtt

SEQ ID NO: 4782337 - DNA, 25 bp, Homo sapien
gatccctcaatagagtatacctata

SEQ ID NO: 4782338 - DNA, 25 bp, Homo sapien
tcactgggtgctagtttctggaagg

SEQ ID NO: 4782339 - DNA, 25 bp, Homo sapien
ttaaagctcatctcgatccctcaat

SEQ ID NO: 4782340 - DNA, 25 bp, Homo sapien
ggcagggttgccacagggccattaa

SEQ ID NO: 4782341 - DNA, 25 bp, Homo sapien
ctgggtgctttcctagactagtcga

SEQ ID NO: 4782342 - DNA, 25 bp, Homo sapien
gactagtcgacagagacagcacaac

SEQ ID NO: 4782343 - DNA, 25 bp, Homo sapien
aaagcaactgtgtgccaaagcaaga

SEQ ID NO: 4782344 - DNA, 25 bp, Homo sapien
gtatcagttgggtcaggtccatgat

SEQ ID NO: 4782345 - DNA, 25 bp, Homo sapien
gctgtatcagttgggtcaggtccat

SEQ ID NO: 4782346 - DNA, 25 bp, Homo sapien
ctggggctgtatcagttgggtcagg

SEQ ID NO: 4782347 - DNA, 25 bp, Homo sapien
gggctgtatcagttgggtcaggtcc

SEQ ID NO: 4782348 - DNA, 25 bp, Homo sapien
gaatgcctctgaaaggttctctggt

SEQ ID NO: 4782349 - DNA, 25 bp, Homo sapien
cttgaggtcccggaagtgctgtttc

SEQ ID NO: 4782350 - DNA, 25 bp, Homo sapien
tgctgaagtaattgcacatgcacca

SEQ ID NO: 4782351 - DNA, 25 bp, Homo sapien
tagctccaatgcaacagagaccagc

SEQ ID NO: 4782352 - DNA, 25 bp, Homo sapien
tagcattttgctaccagcttctcaa

SEQ ID NO: 4782353 - DNA, 25 bp, Homo sapien
cataacccctggcaactgttgacct

SEQ ID NO: 4782354 - DNA, 25 bp, Homo sapien
tgaactttgtctagaataaatgcca

SEQ ID NO: 4782355 - DNA, 25 bp, Homo sapien
tatccattgctgaacagtatttccc

SEQ ID NO: 4782356 - DNA, 25 bp, Homo sapien
tgttcgaacccatcacaaggaagcc

SEQ ID NO: 4782357 - DNA, 25 bp, Homo sapien
tcgaacccatcacaaggaagccgaa

SEQ ID NO: 4782358 - DNA, 25 bp, Homo sapien
tggaacaaagcaggaaagttgacag

SEQ ID NO: 4782359 - DNA, 25 bp, Homo sapien
aacaaagcaggaaagttgacagaag

SEQ ID NO: 4782360 - DNA, 25 bp, Homo sapien
tactttctctgccacgttttaaggc

SEQ ID NO: 4782361 - DNA, 25 bp, Homo sapien
gaagctacacagatgcaggtgtcat

SEQ ID NO: 4782362 - DNA, 25 bp, Homo sapien
gattgaattagatcctgtgagagtg

SEQ ID NO: 4782363 - DNA, 25 bp, Homo sapien
ttggtgccaccctcatggtagttga

SEQ ID NO: 4782364 - DNA, 25 bp, Homo sapien
cacatatacacacaccacagtttat

SEQ ID NO: 4782365 - DNA, 25 bp, Homo sapien
cacatacacacgtatgtatatgtgt

SEQ ID NO: 4782366 - DNA, 25 bp, Homo sapien
tatacacacaccacagtttatcgac

SEQ ID NO: 4782367 - DNA, 25 bp, Homo sapien
acacacaccacagtttatcgacttg

SEQ ID NO: 4782368 - DNA, 25 bp, Homo sapien
gttaaaatccgtgagaattctgctt

SEQ ID NO: 4782369 - DNA, 25 bp, Homo sapien
caggaatggttaaaatccgtgagaa

SEQ ID NO: 4782370 - DNA, 25 bp, Homo sapien
tggttaaaatccgtgagaattctgc

SEQ ID NO: 4782371 - DNA, 25 bp, Homo sapien
gaatggttaaaatccgtgagaattc

SEQ ID NO: 4782372 - DNA, 25 bp, Homo sapien
cggccggtcctcgtttgccagtcac

SEQ ID NO: 4782373 - DNA, 25 bp, Homo sapien
acacgcgagctcccggatcatacag

SEQ ID NO: 4782374 - DNA, 25 bp, Homo sapien
ttctgggtgccggaccgtcatcaca

SEQ ID NO: 4782375 - DNA, 25 bp, Homo sapien
atctgtccccgaaccttttgccttg

SEQ ID NO: 4782376 - DNA, 25 bp, Homo sapien
gctcgtggtgagctctgtgcctcct

SEQ ID NO: 4782377 - DNA, 25 bp, Homo sapien
ctcgtggtgagctctgtgcctcctg

SEQ ID NO: 4782378 - DNA, 25 bp, Homo sapien
tcaggctcgtggtgagctctgtgcc

SEQ ID NO: 4782379 - DNA, 25 bp, Homo sapien
gattctttttcttgagatctctcca

SEQ ID NO: 4782380 - DNA, 25 bp, Homo sapien
gctgtctttgtgcttcagattcttt

SEQ ID NO: 4782381 - DNA, 25 bp, Homo sapien
cagattctttttcttgagatctctc

SEQ ID NO: 4782382 - DNA, 25 bp, Homo sapien
tctttttcttgagatctctccacat

SEQ ID NO: 4782383 - DNA, 25 bp, Homo sapien
tatttgttattggttgctattggtc

SEQ ID NO: 4782384 - DNA, 25 bp, Homo sapien
tctgtttcatgattccaccttggta

SEQ ID NO: 4782385 - DNA, 25 bp, Homo sapien
aaaccagctatagttttgttgctct

SEQ ID NO: 4782386 - DNA, 25 bp, Homo sapien
tagattgtatgtgcctagtattttc

SEQ ID NO: 4782387 - DNA, 25 bp, Homo sapien
tgtggttaccatgagatttacgtaa

SEQ ID NO: 4782388 - DNA, 25 bp, Homo sapien
tccttcataccaaagctataagtga

SEQ ID NO: 4782389 - DNA, 25 bp, Homo sapien
aatttctggtgtcataatttacatc

SEQ ID NO: 4782390 - DNA, 25 bp, Homo sapien
tatgtcctatgctcataacaggcta

SEQ ID NO: 4782391 - DNA, 25 bp, Homo sapien
cataatgttcataattataccacac

SEQ ID NO: 4782392 - DNA, 25 bp, Homo sapien
ctacaaggctatatcataatgttca

SEQ ID NO: 4782393 - DNA, 25 bp, Homo sapien
ggctatatcataatgttcataatta

SEQ ID NO: 4782394 - DNA, 25 bp, Homo sapien
tatcataatgttcataattatacca

SEQ ID NO: 4782395 - DNA, 25 bp, Homo sapien
gtctaaatttgtcacaatcggcatg

SEQ ID NO: 4782396 - DNA, 25 bp, Homo sapien
ctgtatgtgcagaagaggatgtcta

SEQ ID NO: 4782397 - DNA, 25 bp, Homo sapien
ttctgtatgtgcagaagaggatgtc

SEQ ID NO: 4782398 - DNA, 25 bp, Homo sapien
gtcacaatcggcatgtaaaaagttt

SEQ ID NO: 4782399 - DNA, 25 bp, Homo sapien
atgtgaaagagtatgagaaaaggca

SEQ ID NO: 4782400 - DNA, 25 bp, Homo sapien
gccgagctacttcattctggaatat

SEQ ID NO: 4782401 - DNA, 25 bp, Homo sapien
ctttttcacttattaattgccgagc

SEQ ID NO: 4782402 - DNA, 25 bp, Homo sapien
tattaattgccgagctacttcattc

SEQ ID NO: 4782403 - DNA, 25 bp, Homo sapien
caaagcttgaagtgttttatccagg

SEQ ID NO: 4782404 - DNA, 25 bp, Homo sapien
aaagtccagaaagggtctcataaca

SEQ ID NO: 4782405 - DNA, 25 bp, Homo sapien
taaatctaggaactacctcaccaga

SEQ ID NO: 4782406 - DNA, 25 bp, Homo sapien
caaactgggacctattttacaggat

SEQ ID NO: 4782407 - DNA, 25 bp, Homo sapien
tgctctagcctgacaagttcatgta

SEQ ID NO: 4782408 - DNA, 25 bp, Homo sapien
caagcctaggtttccatctgcctgc

SEQ ID NO: 4782409 - DNA, 25 bp, Homo sapien
taactgatgctggtctcaatgactg

SEQ ID NO: 4782410 - DNA, 25 bp, Homo sapien
tacccattagtagtgattcccatct

SEQ ID NO: 4782411 - DNA, 25 bp, Homo sapien
tagctgccacagagattatatgaac

SEQ ID NO: 4782412 - DNA, 25 bp, Homo sapien
tttgtgctacaactgcaaagctgag

SEQ ID NO: 4782413 - DNA, 25 bp, Homo sapien
tggtccataccactctaagtagtga

SEQ ID NO: 4782414 - DNA, 25 bp, Homo sapien
catggtcagttctagtgagagctgt

SEQ ID NO: 4782415 - DNA, 25 bp, Homo sapien
tgaatccaattgtaagtcacatcaa

SEQ ID NO: 4782416 - DNA, 25 bp, Homo sapien
tagctcccaagtacaccatatccgg

SEQ ID NO: 4782417 - DNA, 25 bp, Homo sapien
tctcggacaagaggaacacatttat

SEQ ID NO: 4782418 - DNA, 25 bp, Homo sapien
gtcacatcaaaatttgtcatagctc

SEQ ID NO: 4782419 - DNA, 25 bp, Homo sapien
tcgccactatatctttccggttttg

SEQ ID NO: 4782420 - DNA, 25 bp, Homo sapien
ccctggtggtttgtagattatgttg

SEQ ID NO: 4782421 - DNA, 25 bp, Homo sapien
ggtttgtagattatgttgtcgccac

SEQ ID NO: 4782422 - DNA, 25 bp, Homo sapien
tatgttgtcgccactatatctttcc

SEQ ID NO: 4782423 - DNA, 25 bp, Homo sapien
cgctactcgttcaaaaactctatag

SEQ ID NO: 4782424 - DNA, 25 bp, Homo sapien
caaaaactctatagttgtccgagtc

SEQ ID NO: 4782425 - DNA, 25 bp, Homo sapien
tgtccgagtccttttgctcaaaata

SEQ ID NO: 4782426 - DNA, 25 bp, Homo sapien
tcatgcaaaatattcgctactcgtt

SEQ ID NO: 4782427 - DNA, 25 bp, Homo sapien
ggtgatttctgctaagtcccgaatt

SEQ ID NO: 4782428 - DNA, 25 bp, Homo sapien
gatcgctgacccctgtattctctct

SEQ ID NO: 4782429 - DNA, 25 bp, Homo sapien
tctgccaatgctttcactgatcgct

SEQ ID NO: 4782430 - DNA, 25 bp, Homo sapien
tgttgcctgatgtaatctgccaatg

SEQ ID NO: 4782431 - DNA, 25 bp, Homo sapien
gtttttgaggtcaacgtaatcttca

SEQ ID NO: 4782432 - DNA, 25 bp, Homo sapien
ttgaggtcaacgtaatcttcacggg

SEQ ID NO: 4782433 - DNA, 25 bp, Homo sapien
acaaagaaaactccattcccacaca

SEQ ID NO: 4782434 - DNA, 25 bp, Homo sapien
gaggtcaacgtaatcttcacgggaa

SEQ ID NO: 4782435 - DNA, 25 bp, Homo sapien
gaaaggacctgcaaccctgtatcaa

SEQ ID NO: 4782436 - DNA, 25 bp, Homo sapien
tggtacttaggagacaacgtctact

SEQ ID NO: 4782437 - DNA, 25 bp, Homo sapien
gaaaaatctcctatggcctcctggt

SEQ ID NO: 4782438 - DNA, 25 bp, Homo sapien
ttgggtcacaaagacgaaaaatctc

SEQ ID NO: 4782439 - DNA, 25 bp, Homo sapien
tccttaatgacatcggaagcttcct

SEQ ID NO: 4782440 - DNA, 25 bp, Homo sapien
gatgcaacatctgactgaaacgaca

SEQ ID NO: 4782441 - DNA, 25 bp, Homo sapien
aagcttcctcaaaaattggatgcaa

SEQ ID NO: 4782442 - DNA, 25 bp, Homo sapien
aaaattggatgcaacatctgactga

SEQ ID NO: 4782443 - DNA, 25 bp, Homo sapien
aaatttactaaagcaacatcagcat

SEQ ID NO: 4782444 - DNA, 25 bp, Homo sapien
gcataaaaatttactaaagcaacat

SEQ ID NO: 4782445 - DNA, 25 bp, Homo sapien
agtcagcataaaaatttactaaagc

SEQ ID NO: 4782446 - DNA, 25 bp, Homo sapien
taaaaatttactaaagcaacatcag

SEQ ID NO: 4782447 - DNA, 25 bp, Homo sapien
atattctctgtatcaagacttgtta

SEQ ID NO: 4782448 - DNA, 25 bp, Homo sapien
tggaaattttcatagatcttaatag

SEQ ID NO: 4782449 - DNA, 25 bp, Homo sapien
caggaaacttgatgagagaaagtta

SEQ ID NO: 4782450 - DNA, 25 bp, Homo sapien
ccaggaaacttgatgagagaaagtt

SEQ ID NO: 4782451 - DNA, 25 bp, Homo sapien
aggaaacttgatgagagaaagttac

SEQ ID NO: 4782452 - DNA, 25 bp, Homo sapien
tacatacacgatcgggctcaagcag

SEQ ID NO: 4782453 - DNA, 25 bp, Homo sapien
taggtcttcaagtcaccatgagacc

SEQ ID NO: 4782454 - DNA, 25 bp, Homo sapien
actgaatgtttgactataggtcttc

SEQ ID NO: 4782455 - DNA, 25 bp, Homo sapien
aatggaagtgatacatacacgatcg

SEQ ID NO: 4782456 - DNA, 25 bp, Homo sapien
gaagagtcggaacttacatagatgc

SEQ ID NO: 4782457 - DNA, 25 bp, Homo sapien
tccatgtgcttacgttatagacaag

SEQ ID NO: 4782458 - DNA, 25 bp, Homo sapien
ttgaatggagactaatgaagaggca

SEQ ID NO: 4782459 - DNA, 25 bp, Homo sapien
gcattacactgccttttgaatggag

SEQ ID NO: 4782460 - DNA, 25 bp, Homo sapien
ttttccgattcaagctaccaccagg

SEQ ID NO: 4782461 - DNA, 25 bp, Homo sapien
gtgactacgtatcagtccctcaggg

SEQ ID NO: 4782462 - DNA, 25 bp, Homo sapien
cgggcaccgcttcagggatctagac

SEQ ID NO: 4782463 - DNA, 25 bp, Homo sapien
tgggaaggaacgctaggtctatgct

SEQ ID NO: 4782464 - DNA, 25 bp, Homo sapien
ggagcatctgaggtcgggtaaggat

SEQ ID NO: 4782465 - DNA, 25 bp, Homo sapien
tctgaggtcgggtaaggataggaag

SEQ ID NO: 4782466 - DNA, 25 bp, Homo sapien
ggtaaggataggaagacggcaggat

SEQ ID NO: 4782467 - DNA, 25 bp, Homo sapien
tcgggtaaggataggaagacggcag

SEQ ID NO: 4782468 - DNA, 25 bp, Homo sapien
ctggggtccgtgacagggacaggcg

SEQ ID NO: 4782469 - DNA, 25 bp, Homo sapien
gcgaacacccgggacaacttccaga

SEQ ID NO: 4782470 - DNA, 25 bp, Homo sapien
tctcgacccgggctccagcggcgaa

SEQ ID NO: 4782471 - DNA, 25 bp, Homo sapien
gctccgggagccgacggcagcggag

SEQ ID NO: 4782472 - DNA, 25 bp, Homo sapien
acggcagcggaggattctccaggca

SEQ ID NO: 4782473 - DNA, 25 bp, Homo sapien
cactgagtcctctgcgcgcggggtc

SEQ ID NO: 4782474 - DNA, 25 bp, Homo sapien
cgcacgtcgtccgtcatctagaact

SEQ ID NO: 4782475 - DNA, 25 bp, Homo sapien
tcccattgggctctcggccccggtc

SEQ ID NO: 4782476 - DNA, 25 bp, Homo sapien
cgtcgtccgtcatctagaacttcct

SEQ ID NO: 4782477 - DNA, 25 bp, Homo sapien
cgccttggcccctgctgcagactca

SEQ ID NO: 4782478 - DNA, 25 bp, Homo sapien
gccttggcccctgctgcagactcac

SEQ ID NO: 4782479 - DNA, 25 bp, Homo sapien
ggccttcctggcctaggctgtggcc

SEQ ID NO: 4782480 - DNA, 25 bp, Homo sapien
tggcctgagcctccatcattggcct

SEQ ID NO: 4782481 - DNA, 25 bp, Homo sapien
taggctgtggcctgagcctccatca

SEQ ID NO: 4782482 - DNA, 25 bp, Homo sapien
tcctggcctaggctgtggcctgagc

SEQ ID NO: 4782483 - DNA, 25 bp, Homo sapien
tgattgctgctaaggcgtggatcgc

SEQ ID NO: 4782484 - DNA, 25 bp, Homo sapien
cgggatgggatagcacgtcgtaaac

SEQ ID NO: 4782485 - DNA, 25 bp, Homo sapien
tataaagtcagagccaccactcggg

SEQ ID NO: 4782486 - DNA, 25 bp, Homo sapien
gacttatccctgattgtctctgagg

SEQ ID NO: 4782487 - DNA, 25 bp, Homo sapien
tctctctggaatgctatcttaaatg

SEQ ID NO: 4782488 - DNA, 25 bp, Homo sapien
tctctggaatgctatcttaaatgtc

SEQ ID NO: 4782489 - DNA, 25 bp, Homo sapien
tctggaatgctatcttaaatgtcac

SEQ ID NO: 4782490 - DNA, 25 bp, Homo sapien
ggaatgctatcttaaatgtcaccat

SEQ ID NO: 4782491 - DNA, 25 bp, Homo sapien
taccgtaacctctggctaagctaga

SEQ ID NO: 4782492 - DNA, 25 bp, Homo sapien
cttctactggtgtaccgtaacctct

SEQ ID NO: 4782493 - DNA, 25 bp, Homo sapien
tggtgtaccgtaacctctggctaag

SEQ ID NO: 4782494 - DNA, 25 bp, Homo sapien
tctggctaagctagaggttacttct

SEQ ID NO: 4782495 - DNA, 25 bp, Homo sapien
tctgcaccggcgtaaccttcaaaat

SEQ ID NO: 4782496 - DNA, 25 bp, Homo sapien
gatggccttacggatggtggtggcc

SEQ ID NO: 4782497 - DNA, 25 bp, Homo sapien
caccggcgtaaccttcaaaatctcg

SEQ ID NO: 4782498 - DNA, 25 bp, Homo sapien
ggatgatggccttacggatggtggt

SEQ ID NO: 4782499 - DNA, 25 bp, Homo sapien
tcggccttgccttctcgagctccac

SEQ ID NO: 4782500 - DNA, 25 bp, Homo sapien
cctcggccttgccttctcgagctcc

SEQ ID NO: 4782501 - DNA, 25 bp, Homo sapien
atcctcggccttgccttctcgagct

SEQ ID NO: 4782502 - DNA, 25 bp, Homo sapien
cggccttgccttctcgagctccacg

SEQ ID NO: 4782503 - DNA, 25 bp, Homo sapien
ccggccccggatgccactgcggaaa

SEQ ID NO: 4782504 - DNA, 25 bp, Homo sapien
cccccgcccacctcccgctgcaccg

SEQ ID NO: 4782505 - DNA, 25 bp, Homo sapien
ccgcccacctcccgctgcaccggcg

SEQ ID NO: 4782506 - DNA, 25 bp, Homo sapien
tgcggaaacctccgcggaagccacc

SEQ ID NO: 4782507 - DNA, 25 bp, Homo sapien
ctacttcctcatacctcttgacaaa

SEQ ID NO: 4782508 - DNA, 25 bp, Homo sapien
ttcctacttcctcatacctcttgac

SEQ ID NO: 4782509 - DNA, 25 bp, Homo sapien
cctacttcctcatacctcttgacaa

SEQ ID NO: 4782510 - DNA, 25 bp, Homo sapien
tcctacttcctcatacctcttgaca

SEQ ID NO: 4782511 - DNA, 25 bp, Homo sapien
ctgcaagtcctgcatgcggttccag

SEQ ID NO: 4782512 - DNA, 25 bp, Homo sapien
ctctgcaagtcctgcatgcggttcc

SEQ ID NO: 4782513 - DNA, 25 bp, Homo sapien
tctgcaagtcctgcatgcggttcca

SEQ ID NO: 4782514 - DNA, 25 bp, Homo sapien
tggaatgtgagacccactgagtctc

SEQ ID NO: 4782515 - DNA, 25 bp, Homo sapien
tcctatagacctccgacatctgcat

SEQ ID NO: 4782516 - DNA, 25 bp, Homo sapien
gagacccactgagtctcctatagac

SEQ ID NO: 4782517 - DNA, 25 bp, Homo sapien
gtctcctatagacctccgacatctg

SEQ ID NO: 4782518 - DNA, 25 bp, Homo sapien
catttgtgctgtttgactccgtgcc

SEQ ID NO: 4782519 - DNA, 25 bp, Homo sapien
tctggcattggataaggaagcctca

SEQ ID NO: 4782520 - DNA, 25 bp, Homo sapien
gctatattagtcaggaagagcacct

SEQ ID NO: 4782521 - DNA, 25 bp, Homo sapien
gaaaccaagttagtggatggagcca

SEQ ID NO: 4782522 - DNA, 25 bp, Homo sapien
tacaacagacatatggactcatccc

SEQ ID NO: 4782523 - DNA, 25 bp, Homo sapien
catagaggtttcctatgtcccagtt

SEQ ID NO: 4782524 - DNA, 25 bp, Homo sapien
cagcaactacttccctgaatcctga

SEQ ID NO: 4782525 - DNA, 25 bp, Homo sapien
caatcttgtgttatcattcccctga

SEQ ID NO: 4782526 - DNA, 25 bp, Homo sapien
catttaaggtcgtttctatgctttt

SEQ ID NO: 4782527 - DNA, 25 bp, Homo sapien
gaggctaggaatacctttctgggaa

SEQ ID NO: 4782528 - DNA, 25 bp, Homo sapien
cgaaagtaagagaggaacgtatcca

SEQ ID NO: 4782529 - DNA, 25 bp, Homo sapien
catcagtatgttcccttaacggtaa

SEQ ID NO: 4782530 - DNA, 25 bp, Homo sapien
tcgggatattaggactctctcaagt

SEQ ID NO: 4782531 - DNA, 25 bp, Homo sapien
caggcacagcatgtcacctcggtgt

SEQ ID NO: 4782532 - DNA, 25 bp, Homo sapien
ctcattgactaagctggcccaggca

SEQ ID NO: 4782533 - DNA, 25 bp, Homo sapien
tactgaaagagaaaccgggagagaa

SEQ ID NO: 4782534 - DNA, 25 bp, Homo sapien
tcaggatgctaaactcagtccttgc

SEQ ID NO: 4782535 - DNA, 25 bp, Homo sapien
gcagactgaagaccgaggttctggt

SEQ ID NO: 4782536 - DNA, 25 bp, Homo sapien
tcccttgaagagatgtcccatatct

SEQ ID NO: 4782537 - DNA, 25 bp, Homo sapien
tctcttaatcaagtctcccttgaag

SEQ ID NO: 4782538 - DNA, 25 bp, Homo sapien
ctgaagaccgaggttctggtaccag

SEQ ID NO: 4782539 - DNA, 25 bp, Homo sapien
caaataagatagatgtgaataaaca

SEQ ID NO: 4782540 - DNA, 25 bp, Homo sapien
tgacaaagatctattacatcagtct

SEQ ID NO: 4782541 - DNA, 25 bp, Homo sapien
gatctattacatcagtctttttctt

SEQ ID NO: 4782542 - DNA, 25 bp, Homo sapien
ttcttcaaataagatagatgtgaat

SEQ ID NO: 4782543 - DNA, 25 bp, Homo sapien
agtaatgtaagtctgtgagccactg

SEQ ID NO: 4782544 - DNA, 25 bp, Homo sapien
caatacactgtagccagtgcactgg

SEQ ID NO: 4782545 - DNA, 25 bp, Homo sapien
tatacacgttgaagcagtaatgtaa

SEQ ID NO: 4782546 - DNA, 25 bp, Homo sapien
gggatgcccagtgatatacacgttg

SEQ ID NO: 4782547 - DNA, 25 bp, Homo sapien
caagagtaatctgagaactgcaccc

SEQ ID NO: 4782548 - DNA, 25 bp, Homo sapien
taccacaggcagtgaaaattcctag

SEQ ID NO: 4782549 - DNA, 25 bp, Homo sapien
ctattaattgggcattaccacaggc

SEQ ID NO: 4782550 - DNA, 25 bp, Homo sapien
cagagctttggcaactgtatcccca

SEQ ID NO: 4782551 - DNA, 25 bp, Homo sapien
gcagcatcaacctgaggactcgagg

SEQ ID NO: 4782552 - DNA, 25 bp, Homo sapien
ttggtcaacatatgagtcctgaggg

SEQ ID NO: 4782553 - DNA, 25 bp, Homo sapien
gaagcagcagtcgaagcagctggcc

SEQ ID NO: 4782554 - DNA, 25 bp, Homo sapien
gatctgctgcaccaagatcgcattg

SEQ ID NO: 4782555 - DNA, 25 bp, Homo sapien
gacagccaagctcaaggccagatgg

SEQ ID NO: 4782556 - DNA, 25 bp, Homo sapien
cactgactatgaaaggctctgacct

SEQ ID NO: 4782557 - DNA, 25 bp, Homo sapien
tgcaaaggcacggagatacagacta

SEQ ID NO: 4782558 - DNA, 25 bp, Homo sapien
gacaggtgaccttgcagctagccta

SEQ ID NO: 4782559 - DNA, 25 bp, Homo sapien
gaagactgtagcaacaagaagccag

SEQ ID NO: 4782560 - DNA, 25 bp, Homo sapien
taactacacaagtatgatccaggag

SEQ ID NO: 4782561 - DNA, 25 bp, Homo sapien
gccagccgtgctgtcaggaattaca

SEQ ID NO: 4782562 - DNA, 25 bp, Homo sapien
gccagaaatggcagtagagtctcac

SEQ ID NO: 4782563 - DNA, 25 bp, Homo sapien
gcagagaaaaacgagattaatcacc

SEQ ID NO: 4782564 - DNA, 25 bp, Homo sapien
taatcacctcttcataacagacccg

SEQ ID NO: 4782565 - DNA, 25 bp, Homo sapien
gaagtgctattaacccaatccactg

SEQ ID NO: 4782566 - DNA, 25 bp, Homo sapien
tatacctaacatatgccacctgcca

SEQ ID NO: 4782567 - DNA, 25 bp, Homo sapien
caatctcctggagactactgttggg

SEQ ID NO: 4782568 - DNA, 25 bp, Homo sapien
gaaaatagtggccaagactgactgg

SEQ ID NO: 4782569 - DNA, 25 bp, Homo sapien
gactgactggcatattgatctttta

SEQ ID NO: 4782570 - DNA, 25 bp, Homo sapien
taatgaatgtagtcaacggagagtc

SEQ ID NO: 4782571 - DNA, 25 bp, Homo sapien
gacttcgggcaggaataaccaataa

SEQ ID NO: 4782572 - DNA, 25 bp, Homo sapien
tcaaagttctgacttcgggcaggaa

SEQ ID NO: 4782573 - DNA, 25 bp, Homo sapien
aatgcttactgatggcactttgcaa

SEQ ID NO: 4782574 - DNA, 25 bp, Homo sapien
tgcaagatgtcaaagttctgacttc

SEQ ID NO: 4782575 - DNA, 25 bp, Homo sapien
taaactctggcactggatttggtgg

SEQ ID NO: 4782576 - DNA, 25 bp, Homo sapien
agtagacagcccgaaagaaccagag

SEQ ID NO: 4782577 - DNA, 25 bp, Homo sapien
caataagaggatacgggagaagcaa

SEQ ID NO: 4782578 - DNA, 25 bp, Homo sapien
tggagccaaactaggtaaactctgg

SEQ ID NO: 4782579 - DNA, 25 bp, Homo sapien
taccatatggtctatctgggagata

SEQ ID NO: 4782580 - DNA, 25 bp, Homo sapien
tggtctgaggagatatacttggtat

SEQ ID NO: 4782581 - DNA, 25 bp, Homo sapien
gggacttgttgtgacctaccatatg

SEQ ID NO: 4782582 - DNA, 25 bp, Homo sapien
ctgtaaggtccacttagtctaaagt

SEQ ID NO: 4782583 - DNA, 25 bp, Homo sapien
ggaaagctgtgtctggatgacatga

SEQ ID NO: 4782584 - DNA, 25 bp, Homo sapien
gaactcctcgaaggctctgaagcca

SEQ ID NO: 4782585 - DNA, 25 bp, Homo sapien
aattgatccaaatctgtaaggtaga

SEQ ID NO: 4782586 - DNA, 25 bp, Homo sapien
tcccagtggtgtaaaaattgatcca

SEQ ID NO: 4782587 - DNA, 25 bp, Homo sapien
catcaaccagtctttagctgaatac

SEQ ID NO: 4782588 - DNA, 25 bp, Homo sapien
tcaaccagtctttagctgaatactt

SEQ ID NO: 4782589 - DNA, 25 bp, Homo sapien
tctacatcactcatcaaccagtctt

SEQ ID NO: 4782590 - DNA, 25 bp, Homo sapien
agtctacatcactcatcaaccagtc

SEQ ID NO: 4782591 - DNA, 25 bp, Homo sapien
ccaaggagaatcaatttcaagaaac

SEQ ID NO: 4782592 - DNA, 25 bp, Homo sapien
taatatacctacatagagagaagtc

SEQ ID NO: 4782593 - DNA, 25 bp, Homo sapien
tactaatggactctgtacaaatact

SEQ ID NO: 4782594 - DNA, 25 bp, Homo sapien
gccactcatcgccacaaaaagataa

SEQ ID NO: 4782595 - DNA, 25 bp, Homo sapien
tgaaccaaacgctgctgagagtctg

SEQ ID NO: 4782596 - DNA, 25 bp, Homo sapien
cagtatcccgataagcatggcagcc

SEQ ID NO: 4782597 - DNA, 25 bp, Homo sapien
tgagtcttcccataatacagcaacg

SEQ ID NO: 4782598 - DNA, 25 bp, Homo sapien
caaatcagccggcagactgggtagg

SEQ ID NO: 4782599 - DNA, 25 bp, Homo sapien
tgctgcagcggtatgaatgatatcg

SEQ ID NO: 4782600 - DNA, 25 bp, Homo sapien
gccagccaacgggataacactttac

SEQ ID NO: 4782601 - DNA, 25 bp, Homo sapien
cataaattcggagggcagtagcttg

SEQ ID NO: 4782602 - DNA, 25 bp, Homo sapien
gagcaagttgcaatggtaagccagc

SEQ ID NO: 4782603 - DNA, 25 bp, Homo sapien
tgccttaataagagtctctgtgtcc

SEQ ID NO: 4782604 - DNA, 25 bp, Homo sapien
tgaatctacaagatctcagttcttc

SEQ ID NO: 4782605 - DNA, 25 bp, Homo sapien
ggataaggcccctctgctgatataa

SEQ ID NO: 4782606 - DNA, 25 bp, Homo sapien
caaagtccgaactggaaggataagg

SEQ ID NO: 4782607 - DNA, 25 bp, Homo sapien
attaacctccaggatactcccagca

SEQ ID NO: 4782608 - DNA, 25 bp, Homo sapien
tatttgcattaacctccaggatact

SEQ ID NO: 4782609 - DNA, 25 bp, Homo sapien
ctgtttggctgtatttgcattaacc

SEQ ID NO: 4782610 - DNA, 25 bp, Homo sapien
gcattaacctccaggatactcccag

SEQ ID NO: 4782611 - DNA, 25 bp, Homo sapien
tatttagcctagagccatcttcaag

SEQ ID NO: 4782612 - DNA, 25 bp, Homo sapien
caaagttgacgcatttgccagggag

SEQ ID NO: 4782613 - DNA, 25 bp, Homo sapien
ctgcaaagttgacgcatttgccagg

SEQ ID NO: 4782614 - DNA, 25 bp, Homo sapien
gcaaagttgacgcatttgccaggga

SEQ ID NO: 4782615 - DNA, 25 bp, Homo sapien
tgcaaagttgacgcatttgccaggg

SEQ ID NO: 4782616 - DNA, 25 bp, Homo sapien
taaattcagtaagagatgatctatg

SEQ ID NO: 4782617 - DNA, 25 bp, Homo sapien
tgatctatgttattggagagaactg

SEQ ID NO: 4782618 - DNA, 25 bp, Homo sapien
cagtgttaaattcagtaagagatga

SEQ ID NO: 4782619 - DNA, 25 bp, Homo sapien
ggagagaactgtgcaatgcttgatg

SEQ ID NO: 4782620 - DNA, 25 bp, Homo sapien
tatgcgttctcaagggtcaagactt

SEQ ID NO: 4782621 - DNA, 25 bp, Homo sapien
catagttctttgatatgcagcagaa

SEQ ID NO: 4782622 - DNA, 25 bp, Homo sapien
ttcccacagggctatttccttgaga

SEQ ID NO: 4782623 - DNA, 25 bp, Homo sapien
gtgccaaacacccaaatctgaataa

SEQ ID NO: 4782624 - DNA, 25 bp, Homo sapien
ctgtttcatgactggaccctgacac

SEQ ID NO: 4782625 - DNA, 25 bp, Homo sapien
atataattgcttaaggctgggtaca

SEQ ID NO: 4782626 - DNA, 25 bp, Homo sapien
gagagtggaactagatgatcatcaa

SEQ ID NO: 4782627 - DNA, 25 bp, Homo sapien
ggttcaataatcacacagtgcctca

SEQ ID NO: 4782628 - DNA, 25 bp, Homo sapien
acacagcagtgtagaaagttccata

SEQ ID NO: 4782629 - DNA, 25 bp, Homo sapien
ccttccttcgggatactgatattag

SEQ ID NO: 4782630 - DNA, 25 bp, Homo sapien
gactcataaaatggtgtttaaaatc

SEQ ID NO: 4782631 - DNA, 25 bp, Homo sapien
tcaataaggtagttctttcgaagcc

SEQ ID NO: 4782632 - DNA, 25 bp, Homo sapien
gacatatggaaaacgactcataaaa

SEQ ID NO: 4782633 - DNA, 25 bp, Homo sapien
ggtagttctttcgaagccatgactc

SEQ ID NO: 4782634 - DNA, 25 bp, Homo sapien
tgctaaaacagctggtcaccctaca

SEQ ID NO: 4782635 - DNA, 25 bp, Homo sapien
ctgagaagtttcctagatgtgggac

SEQ ID NO: 4782636 - DNA, 25 bp, Homo sapien
cctgatgttctgtctacaccataac

SEQ ID NO: 4782637 - DNA, 25 bp, Homo sapien
acccggccttacagctcaattattg

SEQ ID NO: 4782638 - DNA, 25 bp, Homo sapien
ggattcacacctgccttatcaaaag

SEQ ID NO: 4782639 - DNA, 25 bp, Homo sapien
tcaagtctgatcatgagctcttcag

SEQ ID NO: 4782640 - DNA, 25 bp, Homo sapien
tcctacagatgatgagttaacagca

SEQ ID NO: 4782641 - DNA, 25 bp, Homo sapien
tttctactaaacctggcaatgtgga

SEQ ID NO: 4782642 - DNA, 25 bp, Homo sapien
gtagtaatgagctgatttcgaatct

SEQ ID NO: 4782643 - DNA, 25 bp, Homo sapien
ccaattagtagtaatgagctgattt

SEQ ID NO: 4782644 - DNA, 25 bp, Homo sapien
ttagtagtaatgagctgatttcgaa

SEQ ID NO: 4782645 - DNA, 25 bp, Homo sapien
agtaatgagctgatttcgaatcttg

SEQ ID NO: 4782646 - DNA, 25 bp, Homo sapien
tcctgttgtttagagagtttccaca

SEQ ID NO: 4782647 - DNA, 25 bp, Homo sapien
catcctgttgtttagagagtttcca

SEQ ID NO: 4782648 - DNA, 25 bp, Homo sapien
atcctgttgtttagagagtttccac

SEQ ID NO: 4782649 - DNA, 25 bp, Homo sapien
cctgttgtttagagagtttccacag

SEQ ID NO: 4782650 - DNA, 25 bp, Homo sapien
ccaacaggagtagctagttgtggag

SEQ ID NO: 4782651 - DNA, 25 bp, Homo sapien
tggaggtacagcttcaacccagcat

SEQ ID NO: 4782652 - DNA, 25 bp, Homo sapien
cgttctataccattcccaacaggag

SEQ ID NO: 4782653 - DNA, 25 bp, Homo sapien
ttttcagtagatgacaggccttcat

SEQ ID NO: 4782654 - DNA, 25 bp, Homo sapien
taagcaatatgctgctacggccagt

SEQ ID NO: 4782655 - DNA, 25 bp, Homo sapien
tgaactgacatttggctgtgaaccc

SEQ ID NO: 4782656 - DNA, 25 bp, Homo sapien
tactggatccatctgccaaggcctg

SEQ ID NO: 4782657 - DNA, 25 bp, Homo sapien
tggcactagagagatgggcacttac

SEQ ID NO: 4782658 - DNA, 25 bp, Homo sapien
tctattgtttgttggaagtgttcca

SEQ ID NO: 4782659 - DNA, 25 bp, Homo sapien
gctcaggcagatgtatagtctttgt

SEQ ID NO: 4782660 - DNA, 25 bp, Homo sapien
ttgaaaatcatgttggcgttttctt

SEQ ID NO: 4782661 - DNA, 25 bp, Homo sapien
taaagtttgtaggagtagcattttg

SEQ ID NO: 4782662 - DNA, 25 bp, Homo sapien
gaagtggggcccgattcacacactc

SEQ ID NO: 4782663 - DNA, 25 bp, Homo sapien
tctctcggacccgaaaccaggcgaa

SEQ ID NO: 4782664 - DNA, 25 bp, Homo sapien
acactccgggctaaaactctctcgg

SEQ ID NO: 4782665 - DNA, 25 bp, Homo sapien
atcgttcctcctactccaagggacg

SEQ ID NO: 4782666 - DNA, 25 bp, Homo sapien
ccagacccgggggacgcaaatcgtg

SEQ ID NO: 4782667 - DNA, 25 bp, Homo sapien
gcacggccgaccctgcccgcttggg

SEQ ID NO: 4782668 - DNA, 25 bp, Homo sapien
aggcccagctcggagggacgccgcg

SEQ ID NO: 4782669 - DNA, 25 bp, Homo sapien
ggacgcaaatcgtgcacggccgacc

SEQ ID NO: 4782670 - DNA, 25 bp, Homo sapien
cgagaagcccgagaagacaagcgag

SEQ ID NO: 4782671 - DNA, 25 bp, Homo sapien
ttcaaatagcctcgtcctcacgcgg

SEQ ID NO: 4782672 - DNA, 25 bp, Homo sapien
gtgcgccgccgacctcaggctctag

SEQ ID NO: 4782673 - DNA, 25 bp, Homo sapien
ctcccggagcgtgttttcaaatagc

SEQ ID NO: 4782674 - DNA, 25 bp, Homo sapien
tggcgcataagtccggcccgtaact

SEQ ID NO: 4782675 - DNA, 25 bp, Homo sapien
tgggcctggttatagctgagcatgc

SEQ ID NO: 4782676 - DNA, 25 bp, Homo sapien
tccttaattagagcaagacacacct

SEQ ID NO: 4782677 - DNA, 25 bp, Homo sapien
tccccggacaaagcgtggcgcataa

SEQ ID NO: 4782678 - DNA, 25 bp, Homo sapien
tatccatcaagtgcgggtacgcagg

SEQ ID NO: 4782679 - DNA, 25 bp, Homo sapien
ggtacgcagggagcacagtcgttgt

SEQ ID NO: 4782680 - DNA, 25 bp, Homo sapien
tgtatccatcaagtgcgggtacgca

SEQ ID NO: 4782681 - DNA, 25 bp, Homo sapien
cacagtcgttgtgccaggtgggtgc

SEQ ID NO: 4782682 - DNA, 25 bp, Homo sapien
tccagccactctgtttgcgggagga

SEQ ID NO: 4782683 - DNA, 25 bp, Homo sapien
aatgagtcagcacagtgtccgagac

SEQ ID NO: 4782684 - DNA, 25 bp, Homo sapien
gggaggcacgttccacaaattaaca

SEQ ID NO: 4782685 - DNA, 25 bp, Homo sapien
ccaatggatccagggcaaaagaaac

SEQ ID NO: 4782686 - DNA, 25 bp, Homo sapien
catggccgccaaatcccgtgtgaca

SEQ ID NO: 4782687 - DNA, 25 bp, Homo sapien
ttttcgggccgcttcaggagctcct

SEQ ID NO: 4782688 - DNA, 25 bp, Homo sapien
caaatcccgtgtgacaaatgtattc

SEQ ID NO: 4782689 - DNA, 25 bp, Homo sapien
acagtttttcgggccgcttcaggag

SEQ ID NO: 4782690 - DNA, 25 bp, Homo sapien
taccctcaggtactattgtgaaaga

SEQ ID NO: 4782691 - DNA, 25 bp, Homo sapien
caggccctaggtactaaacagttgg

SEQ ID NO: 4782692 - DNA, 25 bp, Homo sapien
tccagagtgtaacgggagggatccc

SEQ ID NO: 4782693 - DNA, 25 bp, Homo sapien
gatcactgtgctcggcgcttttcca

SEQ ID NO: 4782694 - DNA, 25 bp, Homo sapien
agtgcagagtaattctgagtgctgc

SEQ ID NO: 4782695 - DNA, 25 bp, Homo sapien
ggatatggatagatctcagtgcaga

SEQ ID NO: 4782696 - DNA, 25 bp, Homo sapien
tagggagagccttcaggatatggat

SEQ ID NO: 4782697 - DNA, 25 bp, Homo sapien
tctcagtgcagagtaattctgagtg

SEQ ID NO: 4782698 - DNA, 25 bp, Homo sapien
aagatttgagagccgatggttgtag

SEQ ID NO: 4782699 - DNA, 25 bp, Homo sapien
gaagatttgagagccgatggttgta

SEQ ID NO: 4782700 - DNA, 25 bp, Homo sapien
ctcattttagttgtcagtttgtgca

SEQ ID NO: 4782701 - DNA, 25 bp, Homo sapien
gtctgtttcagcgtgcctctcattt

SEQ ID NO: 4782702 - DNA, 25 bp, Homo sapien
tcttcatgctcaaggtgctttgtcc

SEQ ID NO: 4782703 - DNA, 25 bp, Homo sapien
ttcatgctcaaggtgctttgtcctc

SEQ ID NO: 4782704 - DNA, 25 bp, Homo sapien
tgagggccaaaccacctttgacatg

SEQ ID NO: 4782705 - DNA, 25 bp, Homo sapien
ctgagggccaaaccacctttgacat

SEQ ID NO: 4782706 - DNA, 25 bp, Homo sapien
tctgagggccaaaccacctttgaca

SEQ ID NO: 4782707 - DNA, 25 bp, Homo sapien
gtgtccagtatgaatgtagagcagg

SEQ ID NO: 4782708 - DNA, 25 bp, Homo sapien
gagatacggattaccctcgtacttc

SEQ ID NO: 4782709 - DNA, 25 bp, Homo sapien
tatgaatgtagagcagggtacctgg

SEQ ID NO: 4782710 - DNA, 25 bp, Homo sapien
cagggtacctggtatttggagatac

SEQ ID NO: 4782711 - DNA, 25 bp, Homo sapien
aaagtgaaacggagcgtcagccctc

SEQ ID NO: 4782712 - DNA, 25 bp, Homo sapien
tgtccctgcgggatttcaaacagct

SEQ ID NO: 4782713 - DNA, 25 bp, Homo sapien
tgagtacccacgtcctagggaagga

SEQ ID NO: 4782714 - DNA, 25 bp, Homo sapien
tattgcccttaagcagcgtacctgg

SEQ ID NO: 4782715 - DNA, 25 bp, Homo sapien
cctcgtgttcagctgtcagaataac

SEQ ID NO: 4782716 - DNA, 25 bp, Homo sapien
tgtttcaaatagagaactgtgcgat

SEQ ID NO: 4782717 - DNA, 25 bp, Homo sapien
aaatgaatgaggtgcatgtggccaa

SEQ ID NO: 4782718 - DNA, 25 bp, Homo sapien
gccaaaatccagcagatagagcgag

SEQ ID NO: 4782719 - DNA, 25 bp, Homo sapien
ttcattcaggtaaacagctgcaccc

SEQ ID NO: 4782720 - DNA, 25 bp, Homo sapien
cccttaagtggcaaagaagctgtta

SEQ ID NO: 4782721 - DNA, 25 bp, Homo sapien
gacttggcggtcagtaacctgtaac

SEQ ID NO: 4782722 - DNA, 25 bp, Homo sapien
cctgtaacagagctacaactaggaa

SEQ ID NO: 4782723 - DNA, 25 bp, Homo sapien
tttagggaacctccgtgagagctgc

SEQ ID NO: 4782724 - DNA, 25 bp, Homo sapien
taattttctcggtgtcatcctctga

SEQ ID NO: 4782725 - DNA, 25 bp, Homo sapien
caaatgaatgccgtcccatggaaag

SEQ ID NO: 4782726 - DNA, 25 bp, Homo sapien
gctacacgtttctccaatggtgatg

SEQ ID NO: 4782727 - DNA, 25 bp, Homo sapien
gcctgggctatggtgagcagtgaaa

SEQ ID NO: 4782728 - DNA, 25 bp, Homo sapien
taatggttgacttctcttagtattt

SEQ ID NO: 4782729 - DNA, 25 bp, Homo sapien
gaggtcaaccttagcagagaagctg

SEQ ID NO: 4782730 - DNA, 25 bp, Homo sapien
tagcagttaggaacctgagatccca

SEQ ID NO: 4782731 - DNA, 25 bp, Homo sapien
ggattcaggtacttgattgccagct

SEQ ID NO: 4782732 - DNA, 25 bp, Homo sapien
tactgagtcctgctttgaaatctag

SEQ ID NO: 4782733 - DNA, 25 bp, Homo sapien
cactaggacagttgtcaccggacat

SEQ ID NO: 4782734 - DNA, 25 bp, Homo sapien
tgtaacccacctagatgtgatcttg

SEQ ID NO: 4782735 - DNA, 25 bp, Homo sapien
gaggttgcatcatccccacaagtga

SEQ ID NO: 4782736 - DNA, 25 bp, Homo sapien
gaagacttgcccaacaactctcgtg

SEQ ID NO: 4782737 - DNA, 25 bp, Homo sapien
ctccagagggagttgtgcatagaaa

SEQ ID NO: 4782738 - DNA, 25 bp, Homo sapien
caagtgattttagcttggaccagag

SEQ ID NO: 4782739 - DNA, 25 bp, Homo sapien
gcagttctgtttggtagtagagcaa

SEQ ID NO: 4782740 - DNA, 25 bp, Homo sapien
tgtaatctcagaacctttagaaggc

SEQ ID NO: 4782741 - DNA, 25 bp, Homo sapien
tgttatccaacctatctgatttgca

SEQ ID NO: 4782742 - DNA, 25 bp, Homo sapien
aaattttattgtatgccagctgtgg

SEQ ID NO: 4782743 - DNA, 25 bp, Homo sapien
aatgagtttgactgtagatgccctc

SEQ ID NO: 4782744 - DNA, 25 bp, Homo sapien
ccttggcaatgagtttgactgtaga

SEQ ID NO: 4782745 - DNA, 25 bp, Homo sapien
tgccttggcaatgagtttgactgta

SEQ ID NO: 4782746 - DNA, 25 bp, Homo sapien
tggcaatgagtttgactgtagatgc

SEQ ID NO: 4782747 - DNA, 25 bp, Homo sapien
catgtggtactttccatgctcagat

SEQ ID NO: 4782748 - DNA, 25 bp, Homo sapien
gtggtactttccatgctcagatatt

SEQ ID NO: 4782749 - DNA, 25 bp, Homo sapien
tcatgtggtactttccatgctcaga

SEQ ID NO: 4782750 - DNA, 25 bp, Homo sapien
tgtggtactttccatgctcagatat

SEQ ID NO: 4782751 - DNA, 25 bp, Homo sapien
gggcttttagatttccttcatattc

SEQ ID NO: 4782752 - DNA, 25 bp, Homo sapien
tgggggcttttagatttccttcata

SEQ ID NO: 4782753 - DNA, 25 bp, Homo sapien
gcttttagatttccttcatattcag

SEQ ID NO: 4782754 - DNA, 25 bp, Homo sapien
tttagatttccttcatattcagttt

SEQ ID NO: 4782755 - DNA, 25 bp, Homo sapien
cagtagtatccgtggcctctggagt

SEQ ID NO: 4782756 - DNA, 25 bp, Homo sapien
cactataatcagtagtatccgtggc

SEQ ID NO: 4782757 - DNA, 25 bp, Homo sapien
taatcagtagtatccgtggcctctg

SEQ ID NO: 4782758 - DNA, 25 bp, Homo sapien
gctgtaatcactataatcagtagta

SEQ ID NO: 4782759 - DNA, 25 bp, Homo sapien
cattgttgaacgatctggtttatgt

SEQ ID NO: 4782760 - DNA, 25 bp, Homo sapien
aaattgccagtaggtggttgacagt

SEQ ID NO: 4782761 - DNA, 25 bp, Homo sapien
aaaagtccttatttttcagcttgcg

SEQ ID NO: 4782762 - DNA, 25 bp, Homo sapien
ttgacagtgggtgaattcatttgct

SEQ ID NO: 4782763 - DNA, 25 bp, Homo sapien
ctgtctgcggatacacctttttgct

SEQ ID NO: 4782764 - DNA, 25 bp, Homo sapien
gctcttgcctgtctgcggatacacc

SEQ ID NO: 4782765 - DNA, 25 bp, Homo sapien
tgcctgtctgcggatacaccttttt

SEQ ID NO: 4782766 - DNA, 25 bp, Homo sapien
tcttgcctgtctgcggatacacctt

SEQ ID NO: 4782767 - DNA, 25 bp, Homo sapien
tatccaaggtctggatagaagccag

SEQ ID NO: 4782768 - DNA, 25 bp, Homo sapien
gaagccagaccttcagtagtctcag

SEQ ID NO: 4782769 - DNA, 25 bp, Homo sapien
tctgggcagagggttgaagcatatc

SEQ ID NO: 4782770 - DNA, 25 bp, Homo sapien
caaatacagatattggcaggccata

SEQ ID NO: 4782771 - DNA, 25 bp, Homo sapien
gtttatcaagactgcatgagtcaat

SEQ ID NO: 4782772 - DNA, 25 bp, Homo sapien
ctgtttatcaagactgcatgagtca

SEQ ID NO: 4782773 - DNA, 25 bp, Homo sapien
tatcaagactgcatgagtcaatttt

SEQ ID NO: 4782774 - DNA, 25 bp, Homo sapien
caagactgcatgagtcaatttttct

SEQ ID NO: 4782775 - DNA, 25 bp, Homo sapien
ggacacccacttagcccagccagat

SEQ ID NO: 4782776 - DNA, 25 bp, Homo sapien
cgtgcggcttcgagagggacacaca

SEQ ID NO: 4782777 - DNA, 25 bp, Homo sapien
gaaggggacacccacttagcccagc

SEQ ID NO: 4782778 - DNA, 25 bp, Homo sapien
ttcgaccaagcgtgcggcttcgaga

SEQ ID NO: 4782779 - DNA, 25 bp, Homo sapien
tctcgttggttgaattagacttacg

SEQ ID NO: 4782780 - DNA, 25 bp, Homo sapien
tgtttaagctttgcagtttctgtct

SEQ ID NO: 4782781 - DNA, 25 bp, Homo sapien
tagacttacgaacaaattgtccata

SEQ ID NO: 4782782 - DNA, 25 bp, Homo sapien
tgacaagagggcaatgatgactgag

SEQ ID NO: 4782783 - DNA, 25 bp, Homo sapien
tgagatagcaggtagctcgaaggcc

SEQ ID NO: 4782784 - DNA, 25 bp, Homo sapien
ttcttgagatagcaggtagctcgaa

SEQ ID NO: 4782785 - DNA, 25 bp, Homo sapien
aaggcctgtatgaagccccaaaagg

SEQ ID NO: 4782786 - DNA, 25 bp, Homo sapien
caggtagctcgaaggcctgtatgaa

SEQ ID NO: 4782787 - DNA, 25 bp, Homo sapien
tgtaacaacttccacaaatccatct

SEQ ID NO: 4782788 - DNA, 25 bp, Homo sapien
tgtaagtgcatcattgaccacgttc

SEQ ID NO: 4782789 - DNA, 25 bp, Homo sapien
ccagtcatatctgggactttaaagg

SEQ ID NO: 4782790 - DNA, 25 bp, Homo sapien
ttcaagcctgctttttgagtctgtg

SEQ ID NO: 4782791 - DNA, 25 bp, Homo sapien
atgttattccccaaggaccgtgtgg

SEQ ID NO: 4782792 - DNA, 25 bp, Homo sapien
aatgttattccccaaggaccgtgtg

SEQ ID NO: 4782793 - DNA, 25 bp, Homo sapien
ctaatgttattccccaaggaccgtg

SEQ ID NO: 4782794 - DNA, 25 bp, Homo sapien
gtgttctgtcccatttgttgccttc

SEQ ID NO: 4782795 - DNA, 25 bp, Homo sapien
tgttctgtcccatttgttgccttct

SEQ ID NO: 4782796 - DNA, 25 bp, Homo sapien
ttctgtcccatttgttgccttctcc

SEQ ID NO: 4782797 - DNA, 25 bp, Homo sapien
tgtgttctgtcccatttgttgcctt

SEQ ID NO: 4782798 - DNA, 25 bp, Homo sapien
cttccatatccttatttttggactc

SEQ ID NO: 4782799 - DNA, 25 bp, Homo sapien
gcttccatatccttatttttggact

SEQ ID NO: 4782800 - DNA, 25 bp, Homo sapien
ttccatatccttatttttggactca

SEQ ID NO: 4782801 - DNA, 25 bp, Homo sapien
gttggcttctttgctaaaggattca

SEQ ID NO: 4782802 - DNA, 25 bp, Homo sapien
tgttggcttctttgctaaaggattc

SEQ ID NO: 4782803 - DNA, 25 bp, Homo sapien
tatgttggcttctttgctaaaggat

SEQ ID NO: 4782804 - DNA, 25 bp, Homo sapien
ctatgttggcttctttgctaaagga

SEQ ID NO: 4782805 - DNA, 25 bp, Homo sapien
taaaggatctgacccaaccaggagg

SEQ ID NO: 4782806 - DNA, 25 bp, Homo sapien
ctcccaagggttgctggagagccgc

SEQ ID NO: 4782807 - DNA, 25 bp, Homo sapien
ggaggatctccttaaccaactgcct

SEQ ID NO: 4782808 - DNA, 25 bp, Homo sapien
gaatctgaattcgatcaggtccttg

SEQ ID NO: 4782809 - DNA, 25 bp, Homo sapien
cagctctatgggcatgaagaagcca

SEQ ID NO: 4782810 - DNA, 25 bp, Homo sapien
gaagaagccatgcagtatgatggcc

SEQ ID NO: 4782811 - DNA, 25 bp, Homo sapien
gagggaatgatgctggatcatgacc

SEQ ID NO: 4782812 - DNA, 25 bp, Homo sapien
tcatcatggccacgggcatgaggga

SEQ ID NO: 4782813 - DNA, 25 bp, Homo sapien
gcataaccgataccatttacttcat

SEQ ID NO: 4782814 - DNA, 25 bp, Homo sapien
tggatcctactgttgcatcagcata

SEQ ID NO: 4782815 - DNA, 25 bp, Homo sapien
tgcatcagcataaccgataccattt

SEQ ID NO: 4782816 - DNA, 25 bp, Homo sapien
ctgtgtggatcctactgttgcatca

SEQ ID NO: 4782817 - DNA, 25 bp, Homo sapien
tctcccatgagggaacagggtttgc

SEQ ID NO: 4782818 - DNA, 25 bp, Homo sapien
tattgtgttgggtctgacgtggcaa

SEQ ID NO: 4782819 - DNA, 25 bp, Homo sapien
cagggtttgcaggatcagatccttc

SEQ ID NO: 4782820 - DNA, 25 bp, Homo sapien
acgtggcaaggcacaaatattccta

SEQ ID NO: 4782821 - DNA, 25 bp, Homo sapien
ggcagagactgttaatacaaaggca

SEQ ID NO: 4782822 - DNA, 25 bp, Homo sapien
gcagagactgttaatacaaaggcag

SEQ ID NO: 4782823 - DNA, 25 bp, Homo sapien
caaaggcagatgtaactccttttgt

SEQ ID NO: 4782824 - DNA, 25 bp, Homo sapien
gatctaggagctgccctactgccag

SEQ ID NO: 4782825 - DNA, 25 bp, Homo sapien
tagcatcatgatggactccgtggat

SEQ ID NO: 4782826 - DNA, 25 bp, Homo sapien
ggctacagcttcactaccagggcag

SEQ ID NO: 4782827 - DNA, 25 bp, Homo sapien
gacggtactaccatgaaccctggca

SEQ ID NO: 4782828 - DNA, 25 bp, Homo sapien
gattattgctcctcccgagctcaaa

SEQ ID NO: 4782829 - DNA, 25 bp, Homo sapien
tccagcagatcagatatggaccagc

SEQ ID NO: 4782830 - DNA, 25 bp, Homo sapien
gatcagatatggaccagcaagcggg

SEQ ID NO: 4782831 - DNA, 25 bp, Homo sapien
caagcgggggtatgacgagtcggcc

SEQ ID NO: 4782832 - DNA, 25 bp, Homo sapien
cagactgttaattgcgttacaccct

SEQ ID NO: 4782833 - DNA, 25 bp, Homo sapien
acctaactggtgcagagaacaagat

SEQ ID NO: 4782834 - DNA, 25 bp, Homo sapien
taggcagactgttaattgcgttaca

SEQ ID NO: 4782835 - DNA, 25 bp, Homo sapien
ttcttgataaaacctaactggtgca

SEQ ID NO: 4782836 - DNA, 25 bp, Homo sapien
gtttatttgcagagcgaccctttcg

SEQ ID NO: 4782837 - DNA, 25 bp, Homo sapien
tctagtataggtacagtatcctgct

SEQ ID NO: 4782838 - DNA, 25 bp, Homo sapien
tcgctctgcatgtaatctagtatag

SEQ ID NO: 4782839 - DNA, 25 bp, Homo sapien
aagtgccacccttgctctaaagagc

SEQ ID NO: 4782840 - DNA, 25 bp, Homo sapien
caatgctggtgatacttggaggcca

SEQ ID NO: 4782841 - DNA, 25 bp, Homo sapien
gcaagtgatcttgaccaatggctcc

SEQ ID NO: 4782842 - DNA, 25 bp, Homo sapien
tcccaccagggtaattatgccaagt

SEQ ID NO: 4782843 - DNA, 25 bp, Homo sapien
taaaggcttagagacatcactctgg

SEQ ID NO: 4782844 - DNA, 25 bp, Homo sapien
ggaaatggcccatacagagtccact

SEQ ID NO: 4782845 - DNA, 25 bp, Homo sapien
gccagagaggcaaatcctagcatcc

SEQ ID NO: 4782846 - DNA, 25 bp, Homo sapien
gcttcttgtagtcaaggccagagag

SEQ ID NO: 4782847 - DNA, 25 bp, Homo sapien
catccctcctgggaatggtattggg

SEQ ID NO: 4782848 - DNA, 25 bp, Homo sapien
catcacccacaacttggaattcagc

SEQ ID NO: 4782849 - DNA, 25 bp, Homo sapien
tcacccacaacttggaattcagcat

SEQ ID NO: 4782850 - DNA, 25 bp, Homo sapien
atcacccacaacttggaattcagca

SEQ ID NO: 4782851 - DNA, 25 bp, Homo sapien
tttggaattacatttgcctcctgct

SEQ ID NO: 4782852 - DNA, 25 bp, Homo sapien
tttctaagagcaaattcagcactga

SEQ ID NO: 4782853 - DNA, 25 bp, Homo sapien
tcagcactgactgtagcaacttgtt

SEQ ID NO: 4782854 - DNA, 25 bp, Homo sapien
tgttttggaattacatttgcctcct

SEQ ID NO: 4782855 - DNA, 25 bp, Homo sapien
ttcaacagcggttcctccatctgcc

SEQ ID NO: 4782856 - DNA, 25 bp, Homo sapien
ctggtttcaacagcggttcctccat

SEQ ID NO: 4782857 - DNA, 25 bp, Homo sapien
gtttcaacagcggttcctccatctg

SEQ ID NO: 4782858 - DNA, 25 bp, Homo sapien
ggtttcaacagcggttcctccatct

SEQ ID NO: 4782859 - DNA, 25 bp, Homo sapien
caatgccatttttgggagaggcaat

SEQ ID NO: 4782860 - DNA, 25 bp, Homo sapien
tcaagcaaaaggttggcagcacagc

SEQ ID NO: 4782861 - DNA, 25 bp, Homo sapien
aagtcacgcagaatcccttttgctg

SEQ ID NO: 4782862 - DNA, 25 bp, Homo sapien
tgctgtcttggagcaagaacacttg

SEQ ID NO: 4782863 - DNA, 25 bp, Homo sapien
gaactgtgatgtaaaggcgcataaa

SEQ ID NO: 4782864 - DNA, 25 bp, Homo sapien
gctgccatcggttctctgaactgtg

SEQ ID NO: 4782865 - DNA, 25 bp, Homo sapien
tcacaactgtgtaacggaacatgag

SEQ ID NO: 4782866 - DNA, 25 bp, Homo sapien
acatgaagtttccttgctacagctg

SEQ ID NO: 4782867 - DNA, 25 bp, Homo sapien
tctaaggcgatgactgttatttctg

SEQ ID NO: 4782868 - DNA, 25 bp, Homo sapien
tggacaccacggtgtaccaggttat

SEQ ID NO: 4782869 - DNA, 25 bp, Homo sapien
tagtaagtggatacacacttcagtt

SEQ ID NO: 4782870 - DNA, 25 bp, Homo sapien
ttattgggtctccatagtaagtgga

SEQ ID NO: 4782871 - DNA, 25 bp, Homo sapien
gagagctcatggcattaacagaggg

SEQ ID NO: 4782872 - DNA, 25 bp, Homo sapien
cacagcgtgcacatatacagaggcc

SEQ ID NO: 4782873 - DNA, 25 bp, Homo sapien
tgagctcagggtggtgtaacacagc

SEQ ID NO: 4782874 - DNA, 25 bp, Homo sapien
aacagctgcctttttagagggtgga

SEQ ID NO: 4782875 - DNA, 25 bp, Homo sapien
ccagctcttgaagttggtgaaccaa

SEQ ID NO: 4782876 - DNA, 25 bp, Homo sapien
gcagcaacattggatgcaccaccag

SEQ ID NO: 4782877 - DNA, 25 bp, Homo sapien
caacctttgttcaagaaggggcagc

SEQ ID NO: 4782878 - DNA, 25 bp, Homo sapien
cttggaccagctcttgaagttggtg

SEQ ID NO: 4782879 - DNA, 25 bp, Homo sapien
cagacactgtaagtcctcaacaagg

SEQ ID NO: 4782880 - DNA, 25 bp, Homo sapien
gttttgtcgcagacactgtaagtcc

SEQ ID NO: 4782881 - DNA, 25 bp, Homo sapien
cctcaacaaggtccctttggattcg

SEQ ID NO: 4782882 - DNA, 25 bp, Homo sapien
agtcctcaacaaggtccctttggat

SEQ ID NO: 4782883 - DNA, 25 bp, Homo sapien
aggctgctggagtctaatttgtctg

SEQ ID NO: 4782884 - DNA, 25 bp, Homo sapien
agccagtccctgtattcatttgctg

SEQ ID NO: 4782885 - DNA, 25 bp, Homo sapien
cagtccctgtattcatttgctgtgg

SEQ ID NO: 4782886 - DNA, 25 bp, Homo sapien
ctgcacgaaggctgctggagtctaa

SEQ ID NO: 4782887 - DNA, 25 bp, Homo sapien
cagccaggcaaccggagaatggaca

SEQ ID NO: 4782888 - DNA, 25 bp, Homo sapien
ccaggcaaccggagaatggacactg

SEQ ID NO: 4782889 - DNA, 25 bp, Homo sapien
gccaggcaaccggagaatggacact

SEQ ID NO: 4782890 - DNA, 25 bp, Homo sapien
agccaggcaaccggagaatggacac

SEQ ID NO: 4782891 - DNA, 25 bp, Homo sapien
ttccacaaagtctctatcgtttact

SEQ ID NO: 4782892 - DNA, 25 bp, Homo sapien
caatcgaatacaattcatttctgac

SEQ ID NO: 4782893 - DNA, 25 bp, Homo sapien
gtctctatcgtttacttcaatcgaa

SEQ ID NO: 4782894 - DNA, 25 bp, Homo sapien
acagccactcgttgctttccacaaa

SEQ ID NO: 4782895 - DNA, 25 bp, Homo sapien
ttaataaagatccagttgaattgct

SEQ ID NO: 4782896 - DNA, 25 bp, Homo sapien
attaataaagatccagttgaattgc

SEQ ID NO: 4782897 - DNA, 25 bp, Homo sapien
ggtacctggcacctctactgttact

SEQ ID NO: 4782898 - DNA, 25 bp, Homo sapien
ctactgttactaaagcacacgacat

SEQ ID NO: 4782899 - DNA, 25 bp, Homo sapien
ggcacctctactgttactaaagcac

SEQ ID NO: 4782900 - DNA, 25 bp, Homo sapien
cctggcacctctactgttactaaag

SEQ ID NO: 4782901 - DNA, 25 bp, Homo sapien
cctcaggttgatatgtaggatctat

SEQ ID NO: 4782902 - DNA, 25 bp, Homo sapien
tgtaggatctatataatctgtgtat

SEQ ID NO: 4782903 - DNA, 25 bp, Homo sapien
ctttcctcaggttgatatgtaggat

SEQ ID NO: 4782904 - DNA, 25 bp, Homo sapien
tatgtaggatctatataatctgtgt

SEQ ID NO: 4782905 - DNA, 25 bp, Homo sapien
ggaagaagacactttgggtgacttc

SEQ ID NO: 4782906 - DNA, 25 bp, Homo sapien
tttctgatgtggcatggtgaggatt

SEQ ID NO: 4782907 - DNA, 25 bp, Homo sapien
atgtggcatggtgaggattttccag

SEQ ID NO: 4782908 - DNA, 25 bp, Homo sapien
aagaagacactttgggtgacttctc

SEQ ID NO: 4782909 - DNA, 25 bp, Homo sapien
ttcgtgcttggtgaaatattatgca

SEQ ID NO: 4782910 - DNA, 25 bp, Homo sapien
ttaccatctgttttcgtgcttggtg

SEQ ID NO: 4782911 - DNA, 25 bp, Homo sapien
gcttggtgaaatattatgcatcaca

SEQ ID NO: 4782912 - DNA, 25 bp, Homo sapien
tatgcatcacactattccaggcacc

SEQ ID NO: 4782913 - DNA, 25 bp, Homo sapien
gccagctggataatgactgttatca

SEQ ID NO: 4782914 - DNA, 25 bp, Homo sapien
ggataatgactgttatcaaggaaga

SEQ ID NO: 4782915 - DNA, 25 bp, Homo sapien
taatgactgttatcaaggaagaggg

SEQ ID NO: 4782916 - DNA, 25 bp, Homo sapien
atacagccagctggataatgactgt

SEQ ID NO: 4782917 - DNA, 25 bp, Homo sapien
cctcatttccaaattatagctatag

SEQ ID NO: 4782918 - DNA, 25 bp, Homo sapien
gctatccttaattgcaaagcttccc

SEQ ID NO: 4782919 - DNA, 25 bp, Homo sapien
aaaagctatccttaattgcaaagct

SEQ ID NO: 4782920 - DNA, 25 bp, Homo sapien
caagctgaccagtgatgctgtgaaa

SEQ ID NO: 4782921 - DNA, 25 bp, Homo sapien
cagcaggacaagctgaccagtgatg

SEQ ID NO: 4782922 - DNA, 25 bp, Homo sapien
ctaaagtaaggtcagtagtggaact

SEQ ID NO: 4782923 - DNA, 25 bp, Homo sapien
gtttggagattctcgaagcctcttg

SEQ ID NO: 4782924 - DNA, 25 bp, Homo sapien
tagtggaactgaggcaatatagctg

SEQ ID NO: 4782925 - DNA, 25 bp, Homo sapien
ggcaatatagctgattgcattgcat

SEQ ID NO: 4782926 - DNA, 25 bp, Homo sapien
gacaatggttggatgattataaaag

SEQ ID NO: 4782927 - DNA, 25 bp, Homo sapien
caatggttggatgattataaaagaa

SEQ ID NO: 4782928 - DNA, 25 bp, Homo sapien
actcaatactttgacaatggttgga

SEQ ID NO: 4782929 - DNA, 25 bp, Homo sapien
tactttgacaatggttggatgatta

SEQ ID NO: 4782930 - DNA, 25 bp, Homo sapien
agcatttcagaagtccaccagtaaa

SEQ ID NO: 4782931 - DNA, 25 bp, Homo sapien
gcatttcagaagtccaccagtaaag

SEQ ID NO: 4782932 - DNA, 25 bp, Homo sapien
catttcagaagtccaccagtaaagc

SEQ ID NO: 4782933 - DNA, 25 bp, Homo sapien
atttcagaagtccaccagtaaagcc

SEQ ID NO: 4782934 - DNA, 25 bp, Homo sapien
ctgcagactgtccataacagtgtgt

SEQ ID NO: 4782935 - DNA, 25 bp, Homo sapien
gcagactgtccataacagtgtgtga

SEQ ID NO: 4782936 - DNA, 25 bp, Homo sapien
caaggcgctgttaacgccttcatca

SEQ ID NO: 4782937 - DNA, 25 bp, Homo sapien
ggttcctgccaaggcgctgttaacg

SEQ ID NO: 4782938 - DNA, 25 bp, Homo sapien
caacagcagtgatgctgcccgggcc

SEQ ID NO: 4782939 - DNA, 25 bp, Homo sapien
tgcccgggcctcgacacttcacttg

SEQ ID NO: 4782940 - DNA, 25 bp, Homo sapien
tagagagagacccattgaccctcca

SEQ ID NO: 4782941 - DNA, 25 bp, Homo sapien
ggcctcgacacttcacttggcccat

SEQ ID NO: 4782942 - DNA, 25 bp, Homo sapien
tctaattctaatatggaagcacagc

SEQ ID NO: 4782943 - DNA, 25 bp, Homo sapien
attcacttagaatcaggcacgcctg

SEQ ID NO: 4782944 - DNA, 25 bp, Homo sapien
gaaacatctcctaggagttaggcat

SEQ ID NO: 4782945 - DNA, 25 bp, Homo sapien
gaagtacttattgtgtaccaggtaa

SEQ ID NO: 4782946 - DNA, 25 bp, Homo sapien
gtcacttggcattattattgggaag

SEQ ID NO: 4782947 - DNA, 25 bp, Homo sapien
tctgctcgcttccactgtaaagtgg

SEQ ID NO: 4782948 - DNA, 25 bp, Homo sapien
tatgtgggtcagagttcagcaagaa

SEQ ID NO: 4782949 - DNA, 25 bp, Homo sapien
ttattgggaagatgaatggtatgtg

SEQ ID NO: 4782950 - DNA, 25 bp, Homo sapien
gaaaagatttgcacaaggcaggctg

SEQ ID NO: 4782951 - DNA, 25 bp, Homo sapien
ggcaggctgtcctctattcctccaa

SEQ ID NO: 4782952 - DNA, 25 bp, Homo sapien
agcagaggggaccaaaggttatcct

SEQ ID NO: 4782953 - DNA, 25 bp, Homo sapien
taatgaaagcttggaaaagatttgc

SEQ ID NO: 4782954 - DNA, 25 bp, Homo sapien
aagctgttgtgggacccgactggac

SEQ ID NO: 4782955 - DNA, 25 bp, Homo sapien
ccgactggacgttgccttttcttgc

SEQ ID NO: 4782956 - DNA, 25 bp, Homo sapien
gtttggaagagttatcgctagcccc

SEQ ID NO: 4782957 - DNA, 25 bp, Homo sapien
gccctcgccccattaaagctgttgt

SEQ ID NO: 4782958 - DNA, 25 bp, Homo sapien
gacctctggggagacgcatctcggt

SEQ ID NO: 4782959 - DNA, 25 bp, Homo sapien
gctaaaaccacaccgggagaggaca

SEQ ID NO: 4782960 - DNA, 25 bp, Homo sapien
acgcatctcggttgcccgcagggta

SEQ ID NO: 4782961 - DNA, 25 bp, Homo sapien
actcattttagttcggggcgacctg

SEQ ID NO: 4782962 - DNA, 25 bp, Homo sapien
gaagcggtctccaaggatgggtggg

SEQ ID NO: 4782963 - DNA, 25 bp, Homo sapien
ctcgaggcagaagcggtctccaagg

SEQ ID NO: 4782964 - DNA, 25 bp, Homo sapien
gcgcagggcgcacctttgcggcggg

SEQ ID NO: 4782965 - DNA, 25 bp, Homo sapien
tccagctctgcatgcgccgcggagt

SEQ ID NO: 4782966 - DNA, 25 bp, Homo sapien
ggcttgctctcccacgcaagcggaa

SEQ ID NO: 4782967 - DNA, 25 bp, Homo sapien
acgcaagcggaatgcagcagcgcct

SEQ ID NO: 4782968 - DNA, 25 bp, Homo sapien
gagagcgtgtctcggaccgccgcct

SEQ ID NO: 4782969 - DNA, 25 bp, Homo sapien
gcgtgtctcggaccgccgcctgaat

SEQ ID NO: 4782970 - DNA, 25 bp, Homo sapien
tcgctcccgggagccggacggccca

SEQ ID NO: 4782971 - DNA, 25 bp, Homo sapien
cggacggcccagtagggcgcactgg

SEQ ID NO: 4782972 - DNA, 25 bp, Homo sapien
agccggacggcccagtagggcgcac

SEQ ID NO: 4782973 - DNA, 25 bp, Homo sapien
gacggcccagtagggcgcactggag

SEQ ID NO: 4782974 - DNA, 25 bp, Homo sapien
agccgggccgctggggaagtctctg

SEQ ID NO: 4782975 - DNA, 25 bp, Homo sapien
ctccgctgcgggaggtgagtgcggc

SEQ ID NO: 4782976 - DNA, 25 bp, Homo sapien
agcgcggggcaagctcctggccgga

SEQ ID NO: 4782977 - DNA, 25 bp, Homo sapien
gggaagtctctgcaccggggcagta

SEQ ID NO: 4782978 - DNA, 25 bp, Homo sapien
cttgtgggtgtcgaggtgcagatga

SEQ ID NO: 4782979 - DNA, 25 bp, Homo sapien
ttgcttgtgggtgtcgaggtgcaga

SEQ ID NO: 4782980 - DNA, 25 bp, Homo sapien
ttgtgggtgtcgaggtgcagatgaa

SEQ ID NO: 4782981 - DNA, 25 bp, Homo sapien
aggtgcagatgaaggcggcgctggg

SEQ ID NO: 4782982 - DNA, 25 bp, Homo sapien
gaaagtgcctcgtgtgaaagtttct

SEQ ID NO: 4782983 - DNA, 25 bp, Homo sapien
agtgcctcgtgtgaaagtttctcca

SEQ ID NO: 4782984 - DNA, 25 bp, Homo sapien
ctagaaagtgcctcgtgtgaaagtt

SEQ ID NO: 4782985 - DNA, 25 bp, Homo sapien
aagtgcctcgtgtgaaagtttctcc

SEQ ID NO: 4782986 - DNA, 25 bp, Homo sapien
tgtccaagaaaacactggggctcct

SEQ ID NO: 4782987 - DNA, 25 bp, Homo sapien
caaataggcttgttctgtgtccaag

SEQ ID NO: 4782988 - DNA, 25 bp, Homo sapien
aatgacaaccgagtttataatttca

SEQ ID NO: 4782989 - DNA, 25 bp, Homo sapien
atgccaaataggcttgttctgtgtc

SEQ ID NO: 4782990 - DNA, 25 bp, Homo sapien
aacttcttactgagtctcttatata

SEQ ID NO: 4782991 - DNA, 25 bp, Homo sapien
taacttcttactgagtctcttatat

SEQ ID NO: 4782992 - DNA, 25 bp, Homo sapien
gttaacttcttactgagtctcttat

SEQ ID NO: 4782993 - DNA, 25 bp, Homo sapien
ttaacttcttactgagtctcttata

SEQ ID NO: 4782994 - DNA, 25 bp, Homo sapien
tcataatccaatttgatgggtcttt

SEQ ID NO: 4782995 - DNA, 25 bp, Homo sapien
gatattttcatcacgcacacagaag

SEQ ID NO: 4782996 - DNA, 25 bp, Homo sapien
tgatgggtctttccccctgcattct

SEQ ID NO: 4782997 - DNA, 25 bp, Homo sapien
cccctgcattctctcatgtgggaat

SEQ ID NO: 4782998 - DNA, 25 bp, Homo sapien
tccttttcatacctttgatgagcta

SEQ ID NO: 4782999 - DNA, 25 bp, Homo sapien
taatggccgataggtgaaaagtaga

SEQ ID NO: 4783000 - DNA, 25 bp, Homo sapien
ccgataggtgaaaagtagacctgga

SEQ ID NO: 4783001 - DNA, 25 bp, Homo sapien
tacctttgatgagctaatggccgat

SEQ ID NO: 4783002 - DNA, 25 bp, Homo sapien
gagtaatttgtggacagggccttca

SEQ ID NO: 4783003 - DNA, 25 bp, Homo sapien
gatggaactatcaggacaggtatct

SEQ ID NO: 4783004 - DNA, 25 bp, Homo sapien
tgcctatcagcaatcaagaagaacc

SEQ ID NO: 4783005 - DNA, 25 bp, Homo sapien
gagtaagccatttcacaccgtgctg

SEQ ID NO: 4783006 - DNA, 25 bp, Homo sapien
tttctgtggctgattaagtcacaca

SEQ ID NO: 4783007 - DNA, 25 bp, Homo sapien
ggtcttgggattctttctgtggctg

SEQ ID NO: 4783008 - DNA, 25 bp, Homo sapien
aacaggtcttgggattctttctgtg

SEQ ID NO: 4783009 - DNA, 25 bp, Homo sapien
tggctaaaacaggtcttgggattct

SEQ ID NO: 4783010 - DNA, 25 bp, Homo sapien
tgtaacattacaggccccataaaga

SEQ ID NO: 4783011 - DNA, 25 bp, Homo sapien
accattgtaacattacaggccccat

SEQ ID NO: 4783012 - DNA, 25 bp, Homo sapien
cattgtaacattacaggccccataa

SEQ ID NO: 4783013 - DNA, 25 bp, Homo sapien
ttgtaacattacaggccccataaag

SEQ ID NO: 4783014 - DNA, 25 bp, Homo sapien
agctcatcaggtttaaaggggccac

SEQ ID NO: 4783015 - DNA, 25 bp, Homo sapien
ggccacctgaggaggacttttagga

SEQ ID NO: 4783016 - DNA, 25 bp, Homo sapien
tccttgaccccagctgtgtctgttg

SEQ ID NO: 4783017 - DNA, 25 bp, Homo sapien
ttaaaagtagtgaagacaggtgcca

SEQ ID NO: 4783018 - DNA, 25 bp, Homo sapien
tctcaatgaagaaaggagcagcagg

SEQ ID NO: 4783019 - DNA, 25 bp, Homo sapien
ctccttggagatccctgtttgctgc

SEQ ID NO: 4783020 - DNA, 25 bp, Homo sapien
ccctgtttgctgctacattcttgta

SEQ ID NO: 4783021 - DNA, 25 bp, Homo sapien
gagcagcaggagagtcaggtaaatc

SEQ ID NO: 4783022 - DNA, 25 bp, Homo sapien
acacacccaaggtttattttagatg

SEQ ID NO: 4783023 - DNA, 25 bp, Homo sapien
cacacccaaggtttattttagatgg

SEQ ID NO: 4783024 - DNA, 25 bp, Homo sapien
ctgtccattaacacacccaaggttt

SEQ ID NO: 4783025 - DNA, 25 bp, Homo sapien
tgtccattaacacacccaaggttta

SEQ ID NO: 4783026 - DNA, 25 bp, Homo sapien
ctccttttttcattttccactgttg

SEQ ID NO: 4783027 - DNA, 25 bp, Homo sapien
ttcattttccactgttgtttcttta

SEQ ID NO: 4783028 - DNA, 25 bp, Homo sapien
tctgtctccttttttcattttccac

SEQ ID NO: 4783029 - DNA, 25 bp, Homo sapien
cactgttgtttctttaattccttca

SEQ ID NO: 4783030 - DNA, 25 bp, Homo sapien
tcataaagccccaccggctgacata

SEQ ID NO: 4783031 - DNA, 25 bp, Homo sapien
ccaccggctgacatatagcctgcaa

SEQ ID NO: 4783032 - DNA, 25 bp, Homo sapien
gcctgtttgactgccttgtggtttc

SEQ ID NO: 4783033 - DNA, 25 bp, Homo sapien
tatagcctgcaaagcactgcctgtt

SEQ ID NO: 4783034 - DNA, 25 bp, Homo sapien
tgggccatgggtcgtgctgtcacac

SEQ ID NO: 4783035 - DNA, 25 bp, Homo sapien
caccatgttaaatgttgtggaactc

SEQ ID NO: 4783036 - DNA, 25 bp, Homo sapien
aactcatattagagatgccttcaac

SEQ ID NO: 4783037 - DNA, 25 bp, Homo sapien
ggccatgggtcgtgctgtcacacat

SEQ ID NO: 4783038 - DNA, 25 bp, Homo sapien
tttgtactagcagtttttccagcac

SEQ ID NO: 4783039 - DNA, 25 bp, Homo sapien
gaattactttgttcagttgctccaa

SEQ ID NO: 4783040 - DNA, 25 bp, Homo sapien
tagtagagtattgggagcttgtgca

SEQ ID NO: 4783041 - DNA, 25 bp, Homo sapien
gaactccttttgtactctacctctg

SEQ ID NO: 4783042 - DNA, 25 bp, Homo sapien
atagtcagataattttgagcattct

SEQ ID NO: 4783043 - DNA, 25 bp, Homo sapien
gatcattgagtttcaccttatagac

SEQ ID NO: 4783044 - DNA, 25 bp, Homo sapien
tgatcagatatatgggtgtttggct

SEQ ID NO: 4783045 - DNA, 25 bp, Homo sapien
ccttatagacattgcttggtacttt

SEQ ID NO: 4783046 - DNA, 25 bp, Homo sapien
cttatggggaccacaagtcaggagc

SEQ ID NO: 4783047 - DNA, 25 bp, Homo sapien
tacagcaggcaacataaaaggtctt

SEQ ID NO: 4783048 - DNA, 25 bp, Homo sapien
gagaagctgcctgacaatacagcag

SEQ ID NO: 4783049 - DNA, 25 bp, Homo sapien
ctgaaatagtggtagagaagctgcc

SEQ ID NO: 4783050 - DNA, 25 bp, Homo sapien
caagacagatgtaaaatgtgatgcc

SEQ ID NO: 4783051 - DNA, 25 bp, Homo sapien
agataacctctccagtccaaccggg

SEQ ID NO: 4783052 - DNA, 25 bp, Homo sapien
aactatgtgcctatcaagtgtatgc

SEQ ID NO: 4783053 - DNA, 25 bp, Homo sapien
tcatggcaatagatattgcaggctc

SEQ ID NO: 4783054 - DNA, 25 bp, Homo sapien
taaaactaagtcagtgtagacaatt

SEQ ID NO: 4783055 - DNA, 25 bp, Homo sapien
aactaagtcagtgtagacaatttca

SEQ ID NO: 4783056 - DNA, 25 bp, Homo sapien
taagtcagtgtagacaatttcattt

SEQ ID NO: 4783057 - DNA, 25 bp, Homo sapien
attaaaactaagtcagtgtagacaa

SEQ ID NO: 4783058 - DNA, 25 bp, Homo sapien
ggttcatactctcaacctgatggtt

SEQ ID NO: 4783059 - DNA, 25 bp, Homo sapien
caggaagatattcaggaccaagtct

SEQ ID NO: 4783060 - DNA, 25 bp, Homo sapien
tctcctttgagtacagattatgctg

SEQ ID NO: 4783061 - DNA, 25 bp, Homo sapien
gttttgatctattaaccctagactc

SEQ ID NO: 4783062 - DNA, 25 bp, Homo sapien
tacgaggctgtatgatactgggcca

SEQ ID NO: 4783063 - DNA, 25 bp, Homo sapien
cctgcaaagttgaaagatctggtaa

SEQ ID NO: 4783064 - DNA, 25 bp, Homo sapien
gagaactaggtaaacaggaccacag

SEQ ID NO: 4783065 - DNA, 25 bp, Homo sapien
agaaggacttccaagagcctaagga

SEQ ID NO: 4783066 - DNA, 25 bp, Homo sapien
caaaatttggccttgcgtcatatga

SEQ ID NO: 4783067 - DNA, 25 bp, Homo sapien
gaagaagaatgcaatctactgcttt

SEQ ID NO: 4783068 - DNA, 25 bp, Homo sapien
taagaggattcatagtctccaatca

SEQ ID NO: 4783069 - DNA, 25 bp, Homo sapien
taccatggaagtgggtatccttcca

SEQ ID NO: 4783070 - DNA, 25 bp, Homo sapien
tgtaggaggtgggtacataacactg

SEQ ID NO: 4783071 - DNA, 25 bp, Homo sapien
gttcgcagttgggttactttaagca

SEQ ID NO: 4783072 - DNA, 25 bp, Homo sapien
gcaattctgccccaagtgtaggagg

SEQ ID NO: 4783073 - DNA, 25 bp, Homo sapien
gctcccagacaccatgtagatagat

SEQ ID NO: 4783074 - DNA, 25 bp, Homo sapien
tggtgaagcaagttcttcactagga

SEQ ID NO: 4783075 - DNA, 25 bp, Homo sapien
tttaggtagtgacaccaagtcctca

SEQ ID NO: 4783076 - DNA, 25 bp, Homo sapien
gagcaatgcatgacttctttaggta

SEQ ID NO: 4783077 - DNA, 25 bp, Homo sapien
caacttgggaattgaagtagcacct

SEQ ID NO: 4783078 - DNA, 25 bp, Homo sapien
ggtgtacaatagtgtcggtcacgac

SEQ ID NO: 4783079 - DNA, 25 bp, Homo sapien
tgagaatgacaggtcttaaaacagt

SEQ ID NO: 4783080 - DNA, 25 bp, Homo sapien
tgttggtggcaagtctctcctgagt

SEQ ID NO: 4783081 - DNA, 25 bp, Homo sapien
acagtagtttgttggtgtacaatag

SEQ ID NO: 4783082 - DNA, 25 bp, Homo sapien
tgtgcagggctgactggctcattcc

SEQ ID NO: 4783083 - DNA, 25 bp, Homo sapien
ggctgactggctcattccaattcca

SEQ ID NO: 4783084 - DNA, 25 bp, Homo sapien
tgcagggctgactggctcattccaa

SEQ ID NO: 4783085 - DNA, 25 bp, Homo sapien
ctctgtgcagggctgactggctcat

SEQ ID NO: 4783086 - DNA, 25 bp, Homo sapien
cccagaatttcttaacccaattgca

SEQ ID NO: 4783087 - DNA, 25 bp, Homo sapien
caaggatttacccataaactcctgt

SEQ ID NO: 4783088 - DNA, 25 bp, Homo sapien
ccaattgcaaaaacttcctgtgcag

SEQ ID NO: 4783089 - DNA, 25 bp, Homo sapien
caaagcaagagctggtccactgcca

SEQ ID NO: 4783090 - DNA, 25 bp, Homo sapien
gtgtctccttccaggcctaatataa

SEQ ID NO: 4783091 - DNA, 25 bp, Homo sapien
ggcctaatataagctccctccactg

SEQ ID NO: 4783092 - DNA, 25 bp, Homo sapien
aaatgctcctcgtacacagtaggga

SEQ ID NO: 4783093 - DNA, 25 bp, Homo sapien
gtacacagtagggatgcagtggaac

SEQ ID NO: 4783094 - DNA, 25 bp, Homo sapien
ttacagaacccatttgaagggtcag

SEQ ID NO: 4783095 - DNA, 25 bp, Homo sapien
cctctccaatttctgtgccttgcca

SEQ ID NO: 4783096 - DNA, 25 bp, Homo sapien
tttacagaacccatttgaagggtca

SEQ ID NO: 4783097 - DNA, 25 bp, Homo sapien
gcctctccaatttctgtgccttgcc

SEQ ID NO: 4783098 - DNA, 25 bp, Homo sapien
aatcaccgaaacttccccattcagg

SEQ ID NO: 4783099 - DNA, 25 bp, Homo sapien
aggtcagcatctgagcacttcagat

SEQ ID NO: 4783100 - DNA, 25 bp, Homo sapien
ctgatccaatcaccgaaacttcccc

SEQ ID NO: 4783101 - DNA, 25 bp, Homo sapien
acctgtgttggaatatacgtctcat

SEQ ID NO: 4783102 - DNA, 25 bp, Homo sapien
ttggaatgcgaaatgcccatgcctg

SEQ ID NO: 4783103 - DNA, 25 bp, Homo sapien
ctatagagcgtgcacaaagctgcta

SEQ ID NO: 4783104 - DNA, 25 bp, Homo sapien
gctctccagaacacgtggatctagt

SEQ ID NO: 4783105 - DNA, 25 bp, Homo sapien
cacctcctgttgagttcttgtccag

SEQ ID NO: 4783106 - DNA, 25 bp, Homo sapien
tcacaacaaggacatagctctggca

SEQ ID NO: 4783107 - DNA, 25 bp, Homo sapien
caaaccaagcatattcagaattctg

SEQ ID NO: 4783108 - DNA, 25 bp, Homo sapien
ccaggttgtagctcttgatcttcca

SEQ ID NO: 4783109 - DNA, 25 bp, Homo sapien
gaaactttgtaagactgtctcgccc

SEQ ID NO: 4783110 - DNA, 25 bp, Homo sapien
agtaagaaacaacacagatggagca

SEQ ID NO: 4783111 - DNA, 25 bp, Homo sapien
agaaacaacacagatggagcagagc

SEQ ID NO: 4783112 - DNA, 25 bp, Homo sapien
ctgaagtaagaaacaacacagatgg

SEQ ID NO: 4783113 - DNA, 25 bp, Homo sapien
taagaaacaacacagatggagcaga

SEQ ID NO: 4783114 - DNA, 25 bp, Homo sapien
taagagagagatggcttgagttcct

SEQ ID NO: 4783115 - DNA, 25 bp, Homo sapien
tgatctgacatggtctgtgagttac

SEQ ID NO: 4783116 - DNA, 25 bp, Homo sapien
aaggagcgtagggtgaagtaagaga

SEQ ID NO: 4783117 - DNA, 25 bp, Homo sapien
tgagttcctttggaaaagccctgta

SEQ ID NO: 4783118 - DNA, 25 bp, Homo sapien
cgcgctttgttggtgtggcctgcat

SEQ ID NO: 4783119 - DNA, 25 bp, Homo sapien
ttcccaggctgatgcggtacttcct

SEQ ID NO: 4783120 - DNA, 25 bp, Homo sapien
tgaagtggttggacagcggatgctc

SEQ ID NO: 4783121 - DNA, 25 bp, Homo sapien
ctgatgcggtacttcctgaagctgg

SEQ ID NO: 4783122 - DNA, 25 bp, Homo sapien
gaagctggatcaaatgcaccagaat

SEQ ID NO: 4783123 - DNA, 25 bp, Homo sapien
ttcaattgcatataatacatcttca

SEQ ID NO: 4783124 - DNA, 25 bp, Homo sapien
tcaattgcatataatacatcttcat

SEQ ID NO: 4783125 - DNA, 25 bp, Homo sapien
cttcaattgcatataatacatcttc

SEQ ID NO: 4783126 - DNA, 25 bp, Homo sapien
ttttattaccacagttgctgcctcc

SEQ ID NO: 4783127 - DNA, 25 bp, Homo sapien
gctgcaggaaggacaatgttggtta

SEQ ID NO: 4783128 - DNA, 25 bp, Homo sapien
aatggcctctactaaataactcaag

SEQ ID NO: 4783129 - DNA, 25 bp, Homo sapien
tcaagcgtgcattgaagaaccacat

SEQ ID NO: 4783130 - DNA, 25 bp, Homo sapien
tctggtcttaatgaggtgttgcctg

SEQ ID NO: 4783131 - DNA, 25 bp, Homo sapien
tcagagtttgcttctggtcttaatg

SEQ ID NO: 4783132 - DNA, 25 bp, Homo sapien
tggtcttaatgaggtgttgcctgaa

SEQ ID NO: 4783133 - DNA, 25 bp, Homo sapien
ttctggtcttaatgaggtgttgcct

SEQ ID NO: 4783134 - DNA, 25 bp, Homo sapien
aggtggcctgccccgaggtgcacca

SEQ ID NO: 4783135 - DNA, 25 bp, Homo sapien
cacaagggagcatagggcggttcta

SEQ ID NO: 4783136 - DNA, 25 bp, Homo sapien
tgctatccaggcattcgtcactctc

SEQ ID NO: 4783137 - DNA, 25 bp, Homo sapien
cacggcctgctcagcgtacgctttg

SEQ ID NO: 4783138 - DNA, 25 bp, Homo sapien
gggagtctcccttacagtggcagag

SEQ ID NO: 4783139 - DNA, 25 bp, Homo sapien
catctcggggagtctcccttacagt

SEQ ID NO: 4783140 - DNA, 25 bp, Homo sapien
gatggagcccatctcggggagtctc

SEQ ID NO: 4783141 - DNA, 25 bp, Homo sapien
ctgatggagcccatctcggggagtc

SEQ ID NO: 4783142 - DNA, 25 bp, Homo sapien
aatcagatccccgtatctgagtgga

SEQ ID NO: 4783143 - DNA, 25 bp, Homo sapien
tcagatccccgtatctgagtggaac

SEQ ID NO: 4783144 - DNA, 25 bp, Homo sapien
atcagatccccgtatctgagtggaa

SEQ ID NO: 4783145 - DNA, 25 bp, Homo sapien
ccgttaatgcagacggtggccacca

SEQ ID NO: 4783146 - DNA, 25 bp, Homo sapien
cgttaatgcagacggtggccaccac

SEQ ID NO: 4783147 - DNA, 25 bp, Homo sapien
ggcccgttaatgcagacggtggcca

SEQ ID NO: 4783148 - DNA, 25 bp, Homo sapien
cccgttaatgcagacggtggccacc

SEQ ID NO: 4783149 - DNA, 25 bp, Homo sapien
tgcacacggagatcactccaattcc

SEQ ID NO: 4783150 - DNA, 25 bp, Homo sapien
ggtagcaggccatagccaagccaat

SEQ ID NO: 4783151 - DNA, 25 bp, Homo sapien
tagccaagccaatctcggcaccttt

SEQ ID NO: 4783152 - DNA, 25 bp, Homo sapien
caatctcggcacctttgcacacgga

SEQ ID NO: 4783153 - DNA, 25 bp, Homo sapien
aagacaaaaggcttggattcagtaa

SEQ ID NO: 4783154 - DNA, 25 bp, Homo sapien
ggatcattcgttctctggtagactg

SEQ ID NO: 4783155 - DNA, 25 bp, Homo sapien
aataggaaaaggtagtagctcatag

SEQ ID NO: 4783156 - DNA, 25 bp, Homo sapien
tagctcatagaggaggatcattcgt

SEQ ID NO: 4783157 - DNA, 25 bp, Homo sapien
agccaaaagactggcccgaaattct

SEQ ID NO: 4783158 - DNA, 25 bp, Homo sapien
gatgagctagtagcaagttggcagc

SEQ ID NO: 4783159 - DNA, 25 bp, Homo sapien
aaatatgctaatgccagcactgcaa

SEQ ID NO: 4783160 - DNA, 25 bp, Homo sapien
gaaattctactaggctcccaatgcc

SEQ ID NO: 4783161 - DNA, 25 bp, Homo sapien
accagtgctgcacggtctggctggc

SEQ ID NO: 4783162 - DNA, 25 bp, Homo sapien
agaaccagtgctgcacggtctggct

SEQ ID NO: 4783163 - DNA, 25 bp, Homo sapien
ggctccttgcactggaccttcttgg

SEQ ID NO: 4783164 - DNA, 25 bp, Homo sapien
gctccttgcactggaccttcttgga

SEQ ID NO: 4783165 - DNA, 25 bp, Homo sapien
tataggtccagactgacccaaaagg

SEQ ID NO: 4783166 - DNA, 25 bp, Homo sapien
caaaagaggcccattggatgtaccc

SEQ ID NO: 4783167 - DNA, 25 bp, Homo sapien
tccggaaaggcctctcaggcttcag

SEQ ID NO: 4783168 - DNA, 25 bp, Homo sapien
cctcattagccctgtagaaggccat

SEQ ID NO: 4783169 - DNA, 25 bp, Homo sapien
ggctccaaattcagatacccatggg

SEQ ID NO: 4783170 - DNA, 25 bp, Homo sapien
gtctaaaggtattcagtgggcaaca

SEQ ID NO: 4783171 - DNA, 25 bp, Homo sapien
ctgtacaatgtatgccagaggctcc

SEQ ID NO: 4783172 - DNA, 25 bp, Homo sapien
tataatgctgaaagactcgggaagc

SEQ ID NO: 4783173 - DNA, 25 bp, Homo sapien
acctaaatctgggtggaatgccctg

SEQ ID NO: 4783174 - DNA, 25 bp, Homo sapien
gactggccagcaatagggtgtatca

SEQ ID NO: 4783175 - DNA, 25 bp, Homo sapien
catttccaagggagtggctctacca

SEQ ID NO: 4783176 - DNA, 25 bp, Homo sapien
tatgcttccgtagggcagaactgca

SEQ ID NO: 4783177 - DNA, 25 bp, Homo sapien
ggagcaaaaccgctgccttcaacct

SEQ ID NO: 4783178 - DNA, 25 bp, Homo sapien
gtattcattccatcccagtagctcc

SEQ ID NO: 4783179 - DNA, 25 bp, Homo sapien
cactggccggtttagtgtctgatga

SEQ ID NO: 4783180 - DNA, 25 bp, Homo sapien
tctggccgtccgaaatgtatgttct

SEQ ID NO: 4783181 - DNA, 25 bp, Homo sapien
caggaagtggagatttgaggccacc

SEQ ID NO: 4783182 - DNA, 25 bp, Homo sapien
ttgaggccacctggcgtcaaggtcc

SEQ ID NO: 4783183 - DNA, 25 bp, Homo sapien
gatacagatatgttgcccccagcct

SEQ ID NO: 4783184 - DNA, 25 bp, Homo sapien
tcttttgatacagatatgttgcccc

SEQ ID NO: 4783185 - DNA, 25 bp, Homo sapien
tattgggaaccctgcgactgaggca

SEQ ID NO: 4783186 - DNA, 25 bp, Homo sapien
tgcgactgaggcagaacacacgtct

SEQ ID NO: 4783187 - DNA, 25 bp, Homo sapien
cagcagcatattgggaaccctgcga

SEQ ID NO: 4783188 - DNA, 25 bp, Homo sapien
cagaacacacgtctagactctgggc

SEQ ID NO: 4783189 - DNA, 25 bp, Homo sapien
ttcctcagaaactgttcatcctcct

SEQ ID NO: 4783190 - DNA, 25 bp, Homo sapien
tagtacctgtccttatagagctcac

SEQ ID NO: 4783191 - DNA, 25 bp, Homo sapien
gaagtacagtgatagttgacccaat

SEQ ID NO: 4783192 - DNA, 25 bp, Homo sapien
ggactgtacagcaaacaaccatgtg

SEQ ID NO: 4783193 - DNA, 25 bp, Homo sapien
aatgccatcattgtagctatgcagc

SEQ ID NO: 4783194 - DNA, 25 bp, Homo sapien
gttactgtggtgaagttgaaaaata

SEQ ID NO: 4783195 - DNA, 25 bp, Homo sapien
tgtctcagttatgtgccaatgggca

SEQ ID NO: 4783196 - DNA, 25 bp, Homo sapien
tattgcaatgaactaactgacctcc

SEQ ID NO: 4783197 - DNA, 25 bp, Homo sapien
gccagtgtactatacctcagtccta

SEQ ID NO: 4783198 - DNA, 25 bp, Homo sapien
ccagtttggttagcttgttatgcag

SEQ ID NO: 4783199 - DNA, 25 bp, Homo sapien
tatgcagtataagtgaaatatcagg

SEQ ID NO: 4783200 - DNA, 25 bp, Homo sapien
tttatgatttattcaccatgtccag

SEQ ID NO: 4783201 - DNA, 25 bp, Homo sapien
catgaaaattgagagaaggtcccgg

SEQ ID NO: 4783202 - DNA, 25 bp, Homo sapien
agctgcgtgtgggatcacctctcct

SEQ ID NO: 4783203 - DNA, 25 bp, Homo sapien
agttgactggtcacatctggaatga

SEQ ID NO: 4783204 - DNA, 25 bp, Homo sapien
ccagtgtaacctcaaatcgtgggtc

SEQ ID NO: 4783205 - DNA, 25 bp, Homo sapien
tcgtgggtcgttgaggcacagcaca

SEQ ID NO: 4783206 - DNA, 25 bp, Homo sapien
cagggtaagatagcagggtccagtt

SEQ ID NO: 4783207 - DNA, 25 bp, Homo sapien
cctgggcctcttcaataggaaacaa

SEQ ID NO: 4783208 - DNA, 25 bp, Homo sapien
tgactggccccaacttgagttgtct

SEQ ID NO: 4783209 - DNA, 25 bp, Homo sapien
tcctatggcttgttcagcgtgtgct

SEQ ID NO: 4783210 - DNA, 25 bp, Homo sapien
aaggcattggtggatattaattgtg

SEQ ID NO: 4783211 - DNA, 25 bp, Homo sapien
gggctgatggatctgaccatgatat

SEQ ID NO: 4783212 - DNA, 25 bp, Homo sapien
gtggatattaattgtgcagaatggg

SEQ ID NO: 4783213 - DNA, 25 bp, Homo sapien
gctgatggatctgaccatgatatac

SEQ ID NO: 4783214 - DNA, 25 bp, Homo sapien
ctgtggaatgccaaaaggaaagttg

SEQ ID NO: 4783215 - DNA, 25 bp, Homo sapien
tgtggaatgccaaaaggaaagttgg

SEQ ID NO: 4783216 - DNA, 25 bp, Homo sapien
atgccaaaaggaaagttggtcccat

SEQ ID NO: 4783217 - DNA, 25 bp, Homo sapien
tggaatgccaaaaggaaagttggtc

SEQ ID NO: 4783218 - DNA, 25 bp, Homo sapien
tccttgacatacagagactacccca

SEQ ID NO: 4783219 - DNA, 25 bp, Homo sapien
atacagagactaccccaacgcctga

SEQ ID NO: 4783220 - DNA, 25 bp, Homo sapien
gatagtccaatctgtactccttgac

SEQ ID NO: 4783221 - DNA, 25 bp, Homo sapien
tgacttgctttaggtaaatagccat

SEQ ID NO: 4783222 - DNA, 25 bp, Homo sapien
tggctaggaggctggcccgaaattc

SEQ ID NO: 4783223 - DNA, 25 bp, Homo sapien
tcatagttatggtaagccaaggcca

SEQ ID NO: 4783224 - DNA, 25 bp, Homo sapien
tcaggagaaagttggcagcctcctc

SEQ ID NO: 4783225 - DNA, 25 bp, Homo sapien
caaggaggcgaagccacgactggct

SEQ ID NO: 4783226 - DNA, 25 bp, Homo sapien
tcgaaggcggccttctcgaacctta

SEQ ID NO: 4783227 - DNA, 25 bp, Homo sapien
gaaccttaattcgtgtgacaccagg

SEQ ID NO: 4783228 - DNA, 25 bp, Homo sapien
cggccttctcgaaccttaattcgtg

SEQ ID NO: 4783229 - DNA, 25 bp, Homo sapien
tgtgacaccaggtgccacataccac

SEQ ID NO: 4783230 - DNA, 25 bp, Homo sapien
tggagcactggcaactttattgttc

SEQ ID NO: 4783231 - DNA, 25 bp, Homo sapien
tggacctggaaaggcctattcatca

SEQ ID NO: 4783232 - DNA, 25 bp, Homo sapien
tggcctttggagcactggcaacttt

SEQ ID NO: 4783233 - DNA, 25 bp, Homo sapien
ctttggagcactggcaactttattg

SEQ ID NO: 4783234 - DNA, 25 bp, Homo sapien
ccatataatcccctccaagtgaaga

SEQ ID NO: 4783235 - DNA, 25 bp, Homo sapien
accgaattcattggccctatagtgg

SEQ ID NO: 4783236 - DNA, 25 bp, Homo sapien
cctatagtgggcttgagaataaaac

SEQ ID NO: 4783237 - DNA, 25 bp, Homo sapien
gaagaagcatgattcaggtccacct

SEQ ID NO: 4783238 - DNA, 25 bp, Homo sapien
tagctcggatatgcactggctcatc

SEQ ID NO: 4783239 - DNA, 25 bp, Homo sapien
gcactggctcatcaacaagtgcact

SEQ ID NO: 4783240 - DNA, 25 bp, Homo sapien
ggctcatcaacaagtgcactcacag

SEQ ID NO: 4783241 - DNA, 25 bp, Homo sapien
gaatcaggcctgtagctcggatatg

SEQ ID NO: 4783242 - DNA, 25 bp, Homo sapien
gatgattcttcaggaatatcttcag

SEQ ID NO: 4783243 - DNA, 25 bp, Homo sapien
tgattcttcaggaatatcttcagca

SEQ ID NO: 4783244 - DNA, 25 bp, Homo sapien
gattcttcaggaatatcttcagcaa

SEQ ID NO: 4783245 - DNA, 25 bp, Homo sapien
tgggatgattcttcaggaatatctt

SEQ ID NO: 4783246 - DNA, 25 bp, Homo sapien
aaagaaatctgaggcattgcacacc

SEQ ID NO: 4783247 - DNA, 25 bp, Homo sapien
gcataaaccattaagtaacccaaga

SEQ ID NO: 4783248 - DNA, 25 bp, Homo sapien
tactgatagctttcagggctagcat

SEQ ID NO: 4783249 - DNA, 25 bp, Homo sapien
cccttatcactagaagtactggcaa

SEQ ID NO: 4783250 - DNA, 25 bp, Homo sapien
ctagagacggatgattcataggatt

SEQ ID NO: 4783251 - DNA, 25 bp, Homo sapien
agtgataactccataaagctgtctc

SEQ ID NO: 4783252 - DNA, 25 bp, Homo sapien
ttctttgtgaattccagttgctttc

SEQ ID NO: 4783253 - DNA, 25 bp, Homo sapien
gttgctttcctagatgcaaggccag

SEQ ID NO: 4783254 - DNA, 25 bp, Homo sapien
cattgttgcgggctttcagtggcag

SEQ ID NO: 4783255 - DNA, 25 bp, Homo sapien
ctggggatgcctcactagaacagtc

SEQ ID NO: 4783256 - DNA, 25 bp, Homo sapien
gatgcctcactagaacagtcagcag

SEQ ID NO: 4783257 - DNA, 25 bp, Homo sapien
tgagattttcattgttgcgggcttt

SEQ ID NO: 4783258 - DNA, 25 bp, Homo sapien
gtacagaagttcctgagactagagc

SEQ ID NO: 4783259 - DNA, 25 bp, Homo sapien
ggcaatgtggagacagactaatcag

SEQ ID NO: 4783260 - DNA, 25 bp, Homo sapien
gataaagattgacaaaaaggcccac

SEQ ID NO: 4783261 - DNA, 25 bp, Homo sapien
cactatcaaatgttgggtggaccaa

SEQ ID NO: 4783262 - DNA, 25 bp, Homo sapien
cagcgtgcccaaacagaaataagtc

SEQ ID NO: 4783263 - DNA, 25 bp, Homo sapien
tttaacaaatgacttctgatagcct

SEQ ID NO: 4783264 - DNA, 25 bp, Homo sapien
tacagtttcccagaataggagggct

SEQ ID NO: 4783265 - DNA, 25 bp, Homo sapien
tcatcataatagcaagtccctactg

SEQ ID NO: 4783266 - DNA, 25 bp, Homo sapien
ctggattgtggtgaaaaattacatt

SEQ ID NO: 4783267 - DNA, 25 bp, Homo sapien
aaggaaaggattactgagagtctgg

SEQ ID NO: 4783268 - DNA, 25 bp, Homo sapien
tagcaagagaacctgcccccaaaat

SEQ ID NO: 4783269 - DNA, 25 bp, Homo sapien
gatgtcacatatcagcaggaccgtg

SEQ ID NO: 4783270 - DNA, 25 bp, Homo sapien
gtgaggccccgagccacaaaaccag

SEQ ID NO: 4783271 - DNA, 25 bp, Homo sapien
ctcagatttaccacagcaggatttt

SEQ ID NO: 4783272 - DNA, 25 bp, Homo sapien
taaaaccattctattgagtctgaat

SEQ ID NO: 4783273 - DNA, 25 bp, Homo sapien
gtaaaaccattctattgagtctgaa

SEQ ID NO: 4783274 - DNA, 25 bp, Homo sapien
tgtaaaaccattctattgagtctga

SEQ ID NO: 4783275 - DNA, 25 bp, Homo sapien
tataaaccagtgatgccctctagtg

SEQ ID NO: 4783276 - DNA, 25 bp, Homo sapien
tcttatgaggaagagtcacagcact

SEQ ID NO: 4783277 - DNA, 25 bp, Homo sapien
tataaaccagtgatgccctctagag

SEQ ID NO: 4783278 - DNA, 25 bp, Homo sapien
caaggcagagcgcaagcaaatttca

SEQ ID NO: 4783279 - DNA, 25 bp, Homo sapien
cttaaacccaagttgacagtgccct

SEQ ID NO: 4783280 - DNA, 25 bp, Homo sapien
tatgcttatgaaaggtgtgaacttg

SEQ ID NO: 4783281 - DNA, 25 bp, Homo sapien
tgtgaacttgcaatgtcctcctgtc

SEQ ID NO: 4783282 - DNA, 25 bp, Homo sapien
aaaagatgatacattcctctacaga

SEQ ID NO: 4783283 - DNA, 25 bp, Homo sapien
gattttcaaattggggggcagatta

SEQ ID NO: 4783284 - DNA, 25 bp, Homo sapien
ttagacgactatcttccagggagat

SEQ ID NO: 4783285 - DNA, 25 bp, Homo sapien
ggtggacacactaggataggttcct

SEQ ID NO: 4783286 - DNA, 25 bp, Homo sapien
tgtatgctcggcttcgtaaaggtgg

SEQ ID NO: 4783287 - DNA, 25 bp, Homo sapien
ccagaagattgaactttagacgact

SEQ ID NO: 4783288 - DNA, 25 bp, Homo sapien
tcctccttaactttccttgaacatg

SEQ ID NO: 4783289 - DNA, 25 bp, Homo sapien
tgaattcgtccctaatcctccttaa

SEQ ID NO: 4783290 - DNA, 25 bp, Homo sapien
cgcgggaccacgatggcgtaacact

SEQ ID NO: 4783291 - DNA, 25 bp, Homo sapien
tgtccttgctctgatcaggcgcggg

SEQ ID NO: 4783292 - DNA, 25 bp, Homo sapien
ctacatggtgtccctgagactgtcc

SEQ ID NO: 4783293 - DNA, 25 bp, Homo sapien
tacatggtgtccctgagactgtcca

SEQ ID NO: 4783294 - DNA, 25 bp, Homo sapien
acatggtgtccctgagactgtccac

SEQ ID NO: 4783295 - DNA, 25 bp, Homo sapien
gtaatgcccgacacagatcgcgccg

SEQ ID NO: 4783296 - DNA, 25 bp, Homo sapien
gactcttctggtaatgcccgacaca

SEQ ID NO: 4783297 - DNA, 25 bp, Homo sapien
atgaagactcttctggtaatgcccg

SEQ ID NO: 4783298 - DNA, 25 bp, Homo sapien
ctggtaatgcccgacacagatcgcg

SEQ ID NO: 4783299 - DNA, 25 bp, Homo sapien
ggaccgcggcgctctttccgagcat

SEQ ID NO: 4783300 - DNA, 25 bp, Homo sapien
tccagtagctgttgctggcggcgtc

SEQ ID NO: 4783301 - DNA, 25 bp, Homo sapien
atcggatacaatcccagtggcaaga

SEQ ID NO: 4783302 - DNA, 25 bp, Homo sapien
cttcgatgagatccacgggcctgag

SEQ ID NO: 4783303 - DNA, 25 bp, Homo sapien
tccttgttctgaaagtatgctcttt

SEQ ID NO: 4783304 - DNA, 25 bp, Homo sapien
atccttgttctgaaagtatgctctt

SEQ ID NO: 4783305 - DNA, 25 bp, Homo sapien
ccttgttctgaaagtatgctctttc

SEQ ID NO: 4783306 - DNA, 25 bp, Homo sapien
gaaaggtataatgtgtccaaggtca

SEQ ID NO: 4783307 - DNA, 25 bp, Homo sapien
gaacctgtgctttgaagaaccctga

SEQ ID NO: 4783308 - DNA, 25 bp, Homo sapien
tggaaaacttccttagcacgctgga

SEQ ID NO: 4783309 - DNA, 25 bp, Homo sapien
tgtgagtgacatctagacggcagct

SEQ ID NO: 4783310 - DNA, 25 bp, Homo sapien
tagaaaagtaatgacaagtacatgg

SEQ ID NO: 4783311 - DNA, 25 bp, Homo sapien
ttcaaggtaagaaatttagcatact

SEQ ID NO: 4783312 - DNA, 25 bp, Homo sapien
gtcttagagtaagcccctttggcta

SEQ ID NO: 4783313 - DNA, 25 bp, Homo sapien
tgttaatctacacaataccatttgt

SEQ ID NO: 4783314 - DNA, 25 bp, Homo sapien
tgtttcaccaaacctgggccacttg

SEQ ID NO: 4783315 - DNA, 25 bp, Homo sapien
cagaaaagtgaaacccgatagcagc

SEQ ID NO: 4783316 - DNA, 25 bp, Homo sapien
gacgtgcagatgacaaggtagtcct

SEQ ID NO: 4783317 - DNA, 25 bp, Homo sapien
caatgactagcaagagttgaagacc

SEQ ID NO: 4783318 - DNA, 25 bp, Homo sapien
tttcttgggtgggtattctggagca

SEQ ID NO: 4783319 - DNA, 25 bp, Homo sapien
gaggtgtttcaatcagcagttgttc

SEQ ID NO: 4783320 - DNA, 25 bp, Homo sapien
tgttctttggatgaggagccgatat

SEQ ID NO: 4783321 - DNA, 25 bp, Homo sapien
gactgtttcataagatgcacttctc

SEQ ID NO: 4783322 - DNA, 25 bp, Homo sapien
ctagaagcactggagctaggctggc

SEQ ID NO: 4783323 - DNA, 25 bp, Homo sapien
cagttcaaatctaattgtgtcgaat

SEQ ID NO: 4783324 - DNA, 25 bp, Homo sapien
taattgtgtcgaatttccaggattg

SEQ ID NO: 4783325 - DNA, 25 bp, Homo sapien
cctcctactagaagcactggagcta

SEQ ID NO: 4783326 - DNA, 25 bp, Homo sapien
tgaagagcgactgggtggaagcagc

SEQ ID NO: 4783327 - DNA, 25 bp, Homo sapien
caggctgtgaagagcgactgggtgg

SEQ ID NO: 4783328 - DNA, 25 bp, Homo sapien
acccgtgtgaacatactgtcctttg

SEQ ID NO: 4783329 - DNA, 25 bp, Homo sapien
ccagaagaacccgtgtgaacatact

SEQ ID NO: 4783330 - DNA, 25 bp, Homo sapien
ggaaaccagtcaaaccttcactcag

SEQ ID NO: 4783331 - DNA, 25 bp, Homo sapien
gactggttagagtaaatgtgacccc

SEQ ID NO: 4783332 - DNA, 25 bp, Homo sapien
gggaaatctctgttcagtaccaaca

SEQ ID NO: 4783333 - DNA, 25 bp, Homo sapien
ggataccatccccttctataaagta

SEQ ID NO: 4783334 - DNA, 25 bp, Homo sapien
gctatgtctggccataacgtccgat

SEQ ID NO: 4783335 - DNA, 25 bp, Homo sapien
tagaaactcagtgggtgagacccat

SEQ ID NO: 4783336 - DNA, 25 bp, Homo sapien
catcatgtaagctaggtctcctcag

SEQ ID NO: 4783337 - DNA, 25 bp, Homo sapien
tatggtcagcaagctaacagaggct

SEQ ID NO: 4783338 - DNA, 25 bp, Homo sapien
gtgagggtcactggtatgctcctaa

SEQ ID NO: 4783339 - DNA, 25 bp, Homo sapien
ctttattgaaactgtttcagtgagg

SEQ ID NO: 4783340 - DNA, 25 bp, Homo sapien
tatgctcctaaatgccaatctcagg

SEQ ID NO: 4783341 - DNA, 25 bp, Homo sapien
tctatagcatgttattattggccct

SEQ ID NO: 4783342 - DNA, 25 bp, Homo sapien
tattcccagaatgcttggttcaccc

SEQ ID NO: 4783343 - DNA, 25 bp, Homo sapien
ggtagataccttcttggcccaaaga

SEQ ID NO: 4783344 - DNA, 25 bp, Homo sapien
tctccgtgttggaaagtcaagcccc

SEQ ID NO: 4783345 - DNA, 25 bp, Homo sapien
ggttcaccctacaatataatcgctg

SEQ ID NO: 4783346 - DNA, 25 bp, Homo sapien
ataaaagcctcctgggttgcctcct

SEQ ID NO: 4783347 - DNA, 25 bp, Homo sapien
tccttgtttgcagccttgccacccc

SEQ ID NO: 4783348 - DNA, 25 bp, Homo sapien
tgcctccttgtttgcagccttgcca

SEQ ID NO: 4783349 - DNA, 25 bp, Homo sapien
tgggttgcctccttgtttgcagcct

SEQ ID NO: 4783350 - DNA, 25 bp, Homo sapien
cactggcctgcagggcccgtccata

SEQ ID NO: 4783351 - DNA, 25 bp, Homo sapien
agccagtgcactggcctgcagggcc

SEQ ID NO: 4783352 - DNA, 25 bp, Homo sapien
actggcctgcagggcccgtccataa

SEQ ID NO: 4783353 - DNA, 25 bp, Homo sapien
ggcagccagtgcactggcctgcagg

SEQ ID NO: 4783354 - DNA, 25 bp, Homo sapien
ttccagggctttggtagagggcaaa

SEQ ID NO: 4783355 - DNA, 25 bp, Homo sapien
tttggtagagggcaaaggttgatag

SEQ ID NO: 4783356 - DNA, 25 bp, Homo sapien
ctttggtagagggcaaaggttgata

SEQ ID NO: 4783357 - DNA, 25 bp, Homo sapien
cttagtttccagggctttggtagag

SEQ ID NO: 4783358 - DNA, 25 bp, Homo sapien
attgaggttgagagtggcatcctct

SEQ ID NO: 4783359 - DNA, 25 bp, Homo sapien
cattgaggttgagagtggcatcctc

SEQ ID NO: 4783360 - DNA, 25 bp, Homo sapien
actcatgccaccagacaaaaagcag

SEQ ID NO: 4783361 - DNA, 25 bp, Homo sapien
ttgaggttgagagtggcatcctctt

SEQ ID NO: 4783362 - DNA, 25 bp, Homo sapien
ggccatagctacttgttctggagta

SEQ ID NO: 4783363 - DNA, 25 bp, Homo sapien
agctgcaggaacagtacggtggaga

SEQ ID NO: 4783364 - DNA, 25 bp, Homo sapien
gagctgttacggtggccatagctac

SEQ ID NO: 4783365 - DNA, 25 bp, Homo sapien
tctggagtatacttcttggtgcagg

SEQ ID NO: 4783366 - DNA, 25 bp, Homo sapien
gaccaatgtgttgcaatccatagcc

SEQ ID NO: 4783367 - DNA, 25 bp, Homo sapien
tagccactgagcacaactaaactgg

SEQ ID NO: 4783368 - DNA, 25 bp, Homo sapien
aaaagcttctgaaccaatctccagg

SEQ ID NO: 4783369 - DNA, 25 bp, Homo sapien
tgcatgaatgacaggcatggctctg

SEQ ID NO: 4783370 - DNA, 25 bp, Homo sapien
acatactggcagtgttccaggtcat

SEQ ID NO: 4783371 - DNA, 25 bp, Homo sapien
tctccatcaggaattacctctggtt

SEQ ID NO: 4783372 - DNA, 25 bp, Homo sapien
gaattacctctggttcaacaatagg

SEQ ID NO: 4783373 - DNA, 25 bp, Homo sapien
gttcaacaataggtaccagtccatt

SEQ ID NO: 4783374 - DNA, 25 bp, Homo sapien
ggatggacactggtcggcaatcctc

SEQ ID NO: 4783375 - DNA, 25 bp, Homo sapien
tggcgttttcctggatagcgaggct

SEQ ID NO: 4783376 - DNA, 25 bp, Homo sapien
cgagccagggcgttggcgttttcct

SEQ ID NO: 4783377 - DNA, 25 bp, Homo sapien
ctgacagatgctggcgtagcgagcc

SEQ ID NO: 4783378 - DNA, 25 bp, Homo sapien
gtcaacaccatctttcttgtactga

SEQ ID NO: 4783379 - DNA, 25 bp, Homo sapien
tgtactgagcacagcgctctgagag

SEQ ID NO: 4783380 - DNA, 25 bp, Homo sapien
cagcgctctgagaggccatcaagcc

SEQ ID NO: 4783381 - DNA, 25 bp, Homo sapien
tcccaaagtcaacaccatctttctt

SEQ ID NO: 4783382 - DNA, 25 bp, Homo sapien
tgttcctgcaagaggagcacctcct

SEQ ID NO: 4783383 - DNA, 25 bp, Homo sapien
ccacgtccagcctagaaacttttag

SEQ ID NO: 4783384 - DNA, 25 bp, Homo sapien
atccctgtaagaacatcatgaggta

SEQ ID NO: 4783385 - DNA, 25 bp, Homo sapien
ccctgtaagaacatcatgaggtaga

SEQ ID NO: 4783386 - DNA, 25 bp, Homo sapien
cgtccagcctagaaacttttagtca

SEQ ID NO: 4783387 - DNA, 25 bp, Homo sapien
tgtttctgaacagctttccctggct

SEQ ID NO: 4783388 - DNA, 25 bp, Homo sapien
cttgattcccaccacgatccccttt

SEQ ID NO: 4783389 - DNA, 25 bp, Homo sapien
tgattcccaccacgatccccttttc

SEQ ID NO: 4783390 - DNA, 25 bp, Homo sapien
gtgttttccaccttgatcctctgca

SEQ ID NO: 4783391 - DNA, 25 bp, Homo sapien
gaagaggatttctcggaactgccgg

SEQ ID NO: 4783392 - DNA, 25 bp, Homo sapien
gtggaaaaggatcacacccccgatg

SEQ ID NO: 4783393 - DNA, 25 bp, Homo sapien
ctggtagagggtctcgtggaaaagg

SEQ ID NO: 4783394 - DNA, 25 bp, Homo sapien
tccattggcaacaatgctctgggca

SEQ ID NO: 4783395 - DNA, 25 bp, Homo sapien
cattggcaacaatgctctgggcaat

SEQ ID NO: 4783396 - DNA, 25 bp, Homo sapien
tttccattggcaacaatgctctggg

SEQ ID NO: 4783397 - DNA, 25 bp, Homo sapien
cctttccattggcaacaatgctctg

SEQ ID NO: 4783398 - DNA, 25 bp, Homo sapien
tgagggctggaaatcggtgggccat

SEQ ID NO: 4783399 - DNA, 25 bp, Homo sapien
tcaaccctgtcactttagagatgag

SEQ ID NO: 4783400 - DNA, 25 bp, Homo sapien
gagactatgtctgatgtgccttcta

SEQ ID NO: 4783401 - DNA, 25 bp, Homo sapien
tcagagatacctgcgtcaaccctgt

SEQ ID NO: 4783402 - DNA, 25 bp, Homo sapien
aaaacagagctacaaatgacctcag

SEQ ID NO: 4783403 - DNA, 25 bp, Homo sapien
tctgtgaagtttccaaccctgttgc

SEQ ID NO: 4783404 - DNA, 25 bp, Homo sapien
caagggcctcattcaggtaacacaa

SEQ ID NO: 4783405 - DNA, 25 bp, Homo sapien
gaaacttcagtgtcggtaccagtag

SEQ ID NO: 4783406 - DNA, 25 bp, Homo sapien
tagatcagagactcacaagggcctc

SEQ ID NO: 4783407 - DNA, 25 bp, Homo sapien
gccaaataagacagatctttggtag

SEQ ID NO: 4783408 - DNA, 25 bp, Homo sapien
cctcctagatatcaaaagctgtggg

SEQ ID NO: 4783409 - DNA, 25 bp, Homo sapien
ataagacagatctttggtagcacac

SEQ ID NO: 4783410 - DNA, 25 bp, Homo sapien
aaataagacagatctttggtagcac

SEQ ID NO: 4783411 - DNA, 25 bp, Homo sapien
actaaacctgtcacaaggcggcgca

SEQ ID NO: 4783412 - DNA, 25 bp, Homo sapien
gctccacagggaacggactgatcct

SEQ ID NO: 4783413 - DNA, 25 bp, Homo sapien
aacgaagcgcacagaaccgtgagct

SEQ ID NO: 4783414 - DNA, 25 bp, Homo sapien
tgtccggcagtcagaacaagcggct

SEQ ID NO: 4783415 - DNA, 25 bp, Homo sapien
gttggattctggaggcggtgggagc

SEQ ID NO: 4783416 - DNA, 25 bp, Homo sapien
agtgagcagagccacagtcaaatcc

SEQ ID NO: 4783417 - DNA, 25 bp, Homo sapien
tgagcagagccacagtcaaatccat

SEQ ID NO: 4783418 - DNA, 25 bp, Homo sapien
cagtgagcagagccacagtcaaatc

SEQ ID NO: 4783419 - DNA, 25 bp, Homo sapien
gtgagcagagccacagtcaaatcca

SEQ ID NO: 4783420 - DNA, 25 bp, Homo sapien
tcttcaggctctagctacactggct

SEQ ID NO: 4783421 - DNA, 25 bp, Homo sapien
tataagaccagcctatggagaatgc

SEQ ID NO: 4783422 - DNA, 25 bp, Homo sapien
tatcttgctaggagctggcttctca

SEQ ID NO: 4783423 - DNA, 25 bp, Homo sapien
tacctgaattgcagcagtgttgcga

SEQ ID NO: 4783424 - DNA, 25 bp, Homo sapien
gagtgattatatgacctgcccaagg

SEQ ID NO: 4783425 - DNA, 25 bp, Homo sapien
gtcacgtcgttaggccatggcagag

SEQ ID NO: 4783426 - DNA, 25 bp, Homo sapien
ggtaagcagtcagccaggaaagtca

SEQ ID NO: 4783427 - DNA, 25 bp, Homo sapien
tctgtagagcgtgggtgatcaacct

SEQ ID NO: 4783428 - DNA, 25 bp, Homo sapien
caacctgcaggacgtagtggaagcc

SEQ ID NO: 4783429 - DNA, 25 bp, Homo sapien
tgtatatccaggttagtaagggccc

SEQ ID NO: 4783430 - DNA, 25 bp, Homo sapien
gaagagcccgatgtgtttcacgagg

SEQ ID NO: 4783431 - DNA, 25 bp, Homo sapien
ctcatagcgattggccacagggaca

SEQ ID NO: 4783432 - DNA, 25 bp, Homo sapien
ccccaggagagtcgccgcagcctcc

SEQ ID NO: 4783433 - DNA, 25 bp, Homo sapien
gaaaaaaccatcctggaactcaggc

SEQ ID NO: 4783434 - DNA, 25 bp, Homo sapien
ttttgttcatgtctggtcccaagaa

SEQ ID NO: 4783435 - DNA, 25 bp, Homo sapien
ctggtcccaagaaaaaaccatcctg

SEQ ID NO: 4783436 - DNA, 25 bp, Homo sapien
ggaactcaggccagagtcatcagaa

SEQ ID NO: 4783437 - DNA, 25 bp, Homo sapien
ccttcattcaagattagatgactgc

SEQ ID NO: 4783438 - DNA, 25 bp, Homo sapien
cacacccaggtggatctaattaacc

SEQ ID NO: 4783439 - DNA, 25 bp, Homo sapien
tagtgtctgtcgctgaccttgggca

SEQ ID NO: 4783440 - DNA, 25 bp, Homo sapien
tcataaagtacctagtgcagtgcat

SEQ ID NO: 4783441 - DNA, 25 bp, Homo sapien
taatggtccgcatggtgagatcatc

SEQ ID NO: 4783442 - DNA, 25 bp, Homo sapien
ttcctctgcccagtcgccctccccc

SEQ ID NO: 4783443 - DNA, 25 bp, Homo sapien
ctggtcctgggagggacgccttcct

SEQ ID NO: 4783444 - DNA, 25 bp, Homo sapien
gccgagctgaccgtctccatcgctg

SEQ ID NO: 4783445 - DNA, 25 bp, Homo sapien
tggtcctgggagggacgccttcctc

SEQ ID NO: 4783446 - DNA, 25 bp, Homo sapien
cgaacctaaggtgtggacgcgccgc

SEQ ID NO: 4783447 - DNA, 25 bp, Homo sapien
tattgacctgtcagcgcagctggcg

SEQ ID NO: 4783448 - DNA, 25 bp, Homo sapien
gctcggcgagggtcttacccagact

SEQ ID NO: 4783449 - DNA, 25 bp, Homo sapien
ttgcgggcggccattaggcgccagg

SEQ ID NO: 4783450 - DNA, 25 bp, Homo sapien
tgctgccctggggacccctgcgggg

SEQ ID NO: 4783451 - DNA, 25 bp, Homo sapien
cctgctgccctggggacccctgcgg

SEQ ID NO: 4783452 - DNA, 25 bp, Homo sapien
tggggacccctgcggggtcctcgca

SEQ ID NO: 4783453 - DNA, 25 bp, Homo sapien
cccctgctgccctggggacccctgc

SEQ ID NO: 4783454 - DNA, 25 bp, Homo sapien
acaggccctctgcgatgactctccc

SEQ ID NO: 4783455 - DNA, 25 bp, Homo sapien
ccgcctgcccgaggcgcactgcccg

SEQ ID NO: 4783456 - DNA, 25 bp, Homo sapien
ctgcgggcagggccgctaggcaacc

SEQ ID NO: 4783457 - DNA, 25 bp, Homo sapien
gcagggccgctaggcaacccgcctg

SEQ ID NO: 4783458 - DNA, 25 bp, Homo sapien
aatccttgtcccctcgctctagtgt

SEQ ID NO: 4783459 - DNA, 25 bp, Homo sapien
cagatcgtgcgcaacagaaacctac

SEQ ID NO: 4783460 - DNA, 25 bp, Homo sapien
gctctagtgtccagggctccgacca

SEQ ID NO: 4783461 - DNA, 25 bp, Homo sapien
agctgtggccacccctaatccttgt

SEQ ID NO: 4783462 - DNA, 25 bp, Homo sapien
gcggtttgggtgtgcgccggagcct

SEQ ID NO: 4783463 - DNA, 25 bp, Homo sapien
ccaggctggctagctcatcccggtg

SEQ ID NO: 4783464 - DNA, 25 bp, Homo sapien
gctcatcccggtggaggcgccatct

SEQ ID NO: 4783465 - DNA, 25 bp, Homo sapien
ggccgcctctggtattgcccaggct

SEQ ID NO: 4783466 - DNA, 25 bp, Homo sapien
gtccattctcttaatcaacatgcta

SEQ ID NO: 4783467 - DNA, 25 bp, Homo sapien
agagtccattctcttaatcaacatg

SEQ ID NO: 4783468 - DNA, 25 bp, Homo sapien
ccaaactgatgaaatccggcttcag

SEQ ID NO: 4783469 - DNA, 25 bp, Homo sapien
ccattctcttaatcaacatgctata

SEQ ID NO: 4783470 - DNA, 25 bp, Homo sapien
aagagatacagtgctgctctagtac

SEQ ID NO: 4783471 - DNA, 25 bp, Homo sapien
gacacaagagatacagtgctgctct

SEQ ID NO: 4783472 - DNA, 25 bp, Homo sapien
tacagtgctgctctagtacctccag

SEQ ID NO: 4783473 - DNA, 25 bp, Homo sapien
gaacttgtatagatcattgggaccc

SEQ ID NO: 4783474 - DNA, 25 bp, Homo sapien
agatagtcctcgagtgacttctgat

SEQ ID NO: 4783475 - DNA, 25 bp, Homo sapien
caggagatagtcctcgagtgacttc

SEQ ID NO: 4783476 - DNA, 25 bp, Homo sapien
ggagatagtcctcgagtgacttctg

SEQ ID NO: 4783477 - DNA, 25 bp, Homo sapien
ttatatagtttccttataagaaaca

SEQ ID NO: 4783478 - DNA, 25 bp, Homo sapien
tacgcttgaccatctgtcctagata

SEQ ID NO: 4783479 - DNA, 25 bp, Homo sapien
tacagaggaagaggacggtctacaa

SEQ ID NO: 4783480 - DNA, 25 bp, Homo sapien
tgcccctgacttaaccgagaaactc

SEQ ID NO: 4783481 - DNA, 25 bp, Homo sapien
ggacggtctacaaaatgcccctgac

SEQ ID NO: 4783482 - DNA, 25 bp, Homo sapien
ctcatcatcttgactgcccattggg

SEQ ID NO: 4783483 - DNA, 25 bp, Homo sapien
gacgctcaatctctacccatgtgga

SEQ ID NO: 4783484 - DNA, 25 bp, Homo sapien
acagcatgacatggattctttagaa

SEQ ID NO: 4783485 - DNA, 25 bp, Homo sapien
tattaaggccctccttgctgtgtgt

SEQ ID NO: 4783486 - DNA, 25 bp, Homo sapien
cacctgtgaaggtgttagataactg

SEQ ID NO: 4783487 - DNA, 25 bp, Homo sapien
cttttgagaaagacatatatcccag

SEQ ID NO: 4783488 - DNA, 25 bp, Homo sapien
gaaagacatatatcccagttgctag

SEQ ID NO: 4783489 - DNA, 25 bp, Homo sapien
tgtgaaggtgttagataactggaac

SEQ ID NO: 4783490 - DNA, 25 bp, Homo sapien
tccattctcaagaatgatctcagga

SEQ ID NO: 4783491 - DNA, 25 bp, Homo sapien
gggtgacctaactcagttgattggc

SEQ ID NO: 4783492 - DNA, 25 bp, Homo sapien
tggtgagaattgaaaggtactagaa

SEQ ID NO: 4783493 - DNA, 25 bp, Homo sapien
tccaacagtttcagcctcacacaga

SEQ ID NO: 4783494 - DNA, 25 bp, Homo sapien
cctagcaggtacagggacaaaagtc

SEQ ID NO: 4783495 - DNA, 25 bp, Homo sapien
aaaagcttttgtccaggccaagtga

SEQ ID NO: 4783496 - DNA, 25 bp, Homo sapien
tgtagacagggcagaataccgctcc

SEQ ID NO: 4783497 - DNA, 25 bp, Homo sapien
tagacccttagctgacgtcattagg

SEQ ID NO: 4783498 - DNA, 25 bp, Homo sapien
tgaggaactttatccccgcagaaag

SEQ ID NO: 4783499 - DNA, 25 bp, Homo sapien
gaaagaccagatcgcagtagcaaag

SEQ ID NO: 4783500 - DNA, 25 bp, Homo sapien
cgtctgaacgagtgatggcaacccc

SEQ ID NO: 4783501 - DNA, 25 bp, Homo sapien
gaggctagtcatgtccccggagatt

SEQ ID NO: 4783502 - DNA, 25 bp, Homo sapien
tgcggaatcaagtggtaggtctact

SEQ ID NO: 4783503 - DNA, 25 bp, Homo sapien
caattccaattccatccggattgct

SEQ ID NO: 4783504 - DNA, 25 bp, Homo sapien
cccagtgtgtagtctattgtaccca

SEQ ID NO: 4783505 - DNA, 25 bp, Homo sapien
agtattccatggcgtgacttttcct

SEQ ID NO: 4783506 - DNA, 25 bp, Homo sapien
tgggtgcagatatactgcttggtca

SEQ ID NO: 4783507 - DNA, 25 bp, Homo sapien
tgttgtggaggaaaccactagcccc

SEQ ID NO: 4783508 - DNA, 25 bp, Homo sapien
cactagccccatgggaagttggatt

SEQ ID NO: 4783509 - DNA, 25 bp, Homo sapien
cttggtcaacaggtggtttgggctt

SEQ ID NO: 4783510 - DNA, 25 bp, Homo sapien
gggagcccctgatcccaactggctt

SEQ ID NO: 4783511 - DNA, 25 bp, Homo sapien
ccctgatcccaactggcttgaggtc

SEQ ID NO: 4783512 - DNA, 25 bp, Homo sapien
gcagggagcccctgatcccaactgg

SEQ ID NO: 4783513 - DNA, 25 bp, Homo sapien
ctagttgagatgagcagggagcccc

SEQ ID NO: 4783514 - DNA, 25 bp, Homo sapien
ttcagataacaaccaaaaatgatgg

SEQ ID NO: 4783515 - DNA, 25 bp, Homo sapien
cagataacaaccaaaaatgatggtg

SEQ ID NO: 4783516 - DNA, 25 bp, Homo sapien
gataacaaccaaaaatgatggtgat

SEQ ID NO: 4783517 - DNA, 25 bp, Homo sapien
ttttcagataacaaccaaaaatgat

SEQ ID NO: 4783518 - DNA, 25 bp, Homo sapien
gcataactacatggcttggatctta

SEQ ID NO: 4783519 - DNA, 25 bp, Homo sapien
tctgaggcatgcataactacatggc

SEQ ID NO: 4783520 - DNA, 25 bp, Homo sapien
catggcttggatcttaccttcttac

SEQ ID NO: 4783521 - DNA, 25 bp, Homo sapien
tgtgctctgaggcatgcataactac

SEQ ID NO: 4783522 - DNA, 25 bp, Homo sapien
tgtccagatccgtaggcttccttgt

SEQ ID NO: 4783523 - DNA, 25 bp, Homo sapien
ctctgtccagatccgtaggcttcct

SEQ ID NO: 4783524 - DNA, 25 bp, Homo sapien
tcaaaggtattgagctgtttctgca

SEQ ID NO: 4783525 - DNA, 25 bp, Homo sapien
ctttttcaaaggtattgagctgttt

SEQ ID NO: 4783526 - DNA, 25 bp, Homo sapien
gccggaatttgatgcacatagttta

SEQ ID NO: 4783527 - DNA, 25 bp, Homo sapien
cttcaagggccggaatttgatgcac

SEQ ID NO: 4783528 - DNA, 25 bp, Homo sapien
tgcacatagtttaatgtacatgcca

SEQ ID NO: 4783529 - DNA, 25 bp, Homo sapien
gtacatgccactagagtgatgactg

SEQ ID NO: 4783530 - DNA, 25 bp, Homo sapien
gagagtcatctccaggcacattaaa

SEQ ID NO: 4783531 - DNA, 25 bp, Homo sapien
tgctctaaggctctaacagacacag

SEQ ID NO: 4783532 - DNA, 25 bp, Homo sapien
cattaaagacctcgactgcttgggt

SEQ ID NO: 4783533 - DNA, 25 bp, Homo sapien
tggagcggagcgattgcaaacacat

SEQ ID NO: 4783534 - DNA, 25 bp, Homo sapien
gaataccaccctctatctgaaggct

SEQ ID NO: 4783535 - DNA, 25 bp, Homo sapien
catctgagcatgctttatcatgtgc

SEQ ID NO: 4783536 - DNA, 25 bp, Homo sapien
tgccagaaaagcaaggtagcgtccc

SEQ ID NO: 4783537 - DNA, 25 bp, Homo sapien
atctgaaggcttctgatctttgtgt

SEQ ID NO: 4783538 - DNA, 25 bp, Homo sapien
caaaggagttgaaagaacagaggca

SEQ ID NO: 4783539 - DNA, 25 bp, Homo sapien
ctcaaaggagttgaaagaacagagg

SEQ ID NO: 4783540 - DNA, 25 bp, Homo sapien
aggagttgaaagaacagaggcagag

SEQ ID NO: 4783541 - DNA, 25 bp, Homo sapien
aaaggagttgaaagaacagaggcag

SEQ ID NO: 4783542 - DNA, 25 bp, Homo sapien
gatctggcatgtgatcaccactgct

SEQ ID NO: 4783543 - DNA, 25 bp, Homo sapien
catctactttgtggataggcagggc

SEQ ID NO: 4783544 - DNA, 25 bp, Homo sapien
gaggagcgtgcattggtcatctact

SEQ ID NO: 4783545 - DNA, 25 bp, Homo sapien
gaagactgcttcgtttcaccacaag

SEQ ID NO: 4783546 - DNA, 25 bp, Homo sapien
aatacagtcagaatatgagctgagt

SEQ ID NO: 4783547 - DNA, 25 bp, Homo sapien
gcatggctgtaatgtggattgaggt

SEQ ID NO: 4783548 - DNA, 25 bp, Homo sapien
ttaggagcatggctgtaatgtggat

SEQ ID NO: 4783549 - DNA, 25 bp, Homo sapien
tcaaatacagtcagaatatgagctg

SEQ ID NO: 4783550 - DNA, 25 bp, Homo sapien
tacatcagccttccgggctgcacag

SEQ ID NO: 4783551 - DNA, 25 bp, Homo sapien
ctgtacatcagccttccgggctgca

SEQ ID NO: 4783552 - DNA, 25 bp, Homo sapien
catcagccttccgggctgcacagag

SEQ ID NO: 4783553 - DNA, 25 bp, Homo sapien
tgtacatcagccttccgggctgcac

SEQ ID NO: 4783554 - DNA, 25 bp, Homo sapien
tggggatggctaaggggcaaaatct

SEQ ID NO: 4783555 - DNA, 25 bp, Homo sapien
gatggctaaggggcaaaatcttcca

SEQ ID NO: 4783556 - DNA, 25 bp, Homo sapien
aggcagttgcaacctacttctgggc

SEQ ID NO: 4783557 - DNA, 25 bp, Homo sapien
caaaggcagttgcaacctacttctg

SEQ ID NO: 4783558 - DNA, 25 bp, Homo sapien
tctatgctaagcgatgggtgactgc

SEQ ID NO: 4783559 - DNA, 25 bp, Homo sapien
tcattagagggaccaaaaccagttc

SEQ ID NO: 4783560 - DNA, 25 bp, Homo sapien
tcgaagcttatagtgttcccgggct

SEQ ID NO: 4783561 - DNA, 25 bp, Homo sapien
gaagtcttgtcctaaatggtgccca

SEQ ID NO: 4783562 - DNA, 25 bp, Homo sapien
gagttcctgcatcactgagttccga

SEQ ID NO: 4783563 - DNA, 25 bp, Homo sapien
gtattccatacggtaagctgacggg

SEQ ID NO: 4783564 - DNA, 25 bp, Homo sapien
ttcccattggtggtccgcaaggcag

SEQ ID NO: 4783565 - DNA, 25 bp, Homo sapien
gatgtcctggtggatccggatgccc

SEQ ID NO: 4783566 - DNA, 25 bp, Homo sapien
tgcagctctcaaggtgctgtcttca

SEQ ID NO: 4783567 - DNA, 25 bp, Homo sapien
aattttagatttactttccattctg

SEQ ID NO: 4783568 - DNA, 25 bp, Homo sapien
ttccattctgcagctctcaaggtgc

SEQ ID NO: 4783569 - DNA, 25 bp, Homo sapien
cagctctcaaggtgctgtcttcatc

SEQ ID NO: 4783570 - DNA, 25 bp, Homo sapien
ttcccattcatgtaactgaattgac

SEQ ID NO: 4783571 - DNA, 25 bp, Homo sapien
cccattcatgtaactgaattgactt

SEQ ID NO: 4783572 - DNA, 25 bp, Homo sapien
tcccattcatgtaactgaattgact

SEQ ID NO: 4783573 - DNA, 25 bp, Homo sapien
tccagagggttgatcctagagtcca

SEQ ID NO: 4783574 - DNA, 25 bp, Homo sapien
tatggtacgccaaacactcattgtg

SEQ ID NO: 4783575 - DNA, 25 bp, Homo sapien
aatcagtagggttgccttaggcagc

SEQ ID NO: 4783576 - DNA, 25 bp, Homo sapien
tagggaacagtcatccacagcctgg

SEQ ID NO: 4783577 - DNA, 25 bp, Homo sapien
tttccacacgtttggtcttgaaatg

SEQ ID NO: 4783578 - DNA, 25 bp, Homo sapien
tccacacgtttggtcttgaaatgct

SEQ ID NO: 4783579 - DNA, 25 bp, Homo sapien
ttccacacgtttggtcttgaaatgc

SEQ ID NO: 4783580 - DNA, 25 bp, Homo sapien
gcccagagaagtgtttgatgcccat

SEQ ID NO: 4783581 - DNA, 25 bp, Homo sapien
tagcagcagcctgtatactatgtgc

SEQ ID NO: 4783582 - DNA, 25 bp, Homo sapien
tactatgtgctcaccaatggtggtc

SEQ ID NO: 4783583 - DNA, 25 bp, Homo sapien
tgtggagccagtattgcagcttgga

SEQ ID NO: 4783584 - DNA, 25 bp, Homo sapien
gagacagcctcctagttgttttccc

SEQ ID NO: 4783585 - DNA, 25 bp, Homo sapien
ctcttgcggagtaaattcagagtcc

SEQ ID NO: 4783586 - DNA, 25 bp, Homo sapien
ctgtgctcaatgcctggtcatggtt

SEQ ID NO: 4783587 - DNA, 25 bp, Homo sapien
ccttgcaatgggctatgaggcctca

SEQ ID NO: 4783588 - DNA, 25 bp, Homo sapien
tgtataacaaaggttatatcaaaag

SEQ ID NO: 4783589 - DNA, 25 bp, Homo sapien
aaatccatgctttgccacttaccag

SEQ ID NO: 4783590 - DNA, 25 bp, Homo sapien
ctcacagtgttgttatgatgattaa

SEQ ID NO: 4783591 - DNA, 25 bp, Homo sapien
accagactcacagtgttgttatgat

SEQ ID NO: 4783592 - DNA, 25 bp, Homo sapien
cacagggttgggagcgtttatcaca

SEQ ID NO: 4783593 - DNA, 25 bp, Homo sapien
taaatgcgtgggaagagacacatgc

SEQ ID NO: 4783594 - DNA, 25 bp, Homo sapien
tagggagattccactgcagcctgac

SEQ ID NO: 4783595 - DNA, 25 bp, Homo sapien
aaagtgattacgagatgcccagcaa

SEQ ID NO: 4783596 - DNA, 25 bp, Homo sapien
tcatcattgtcaaagtgggagcaca

SEQ ID NO: 4783597 - DNA, 25 bp, Homo sapien
tatccatgtcgtaaatgctgaacgc

SEQ ID NO: 4783598 - DNA, 25 bp, Homo sapien
gagctccccgttggaaatgtagcca

SEQ ID NO: 4783599 - DNA, 25 bp, Homo sapien
ttgacgctgaactgggaggtcccca

SEQ ID NO: 4783600 - DNA, 25 bp, Homo sapien
caacggccacggctcaaagggtcgg

SEQ ID NO: 4783601 - DNA, 25 bp, Homo sapien
ccacggctcaaagggtcggagaggg

SEQ ID NO: 4783602 - DNA, 25 bp, Homo sapien
ctggcaacggccacggctcaaaggg

SEQ ID NO: 4783603 - DNA, 25 bp, Homo sapien
ggagcaggggcggtgagctcgggcg

SEQ ID NO: 4783604 - DNA, 25 bp, Homo sapien
ctttctgtagcattgccggtcacca

SEQ ID NO: 4783605 - DNA, 25 bp, Homo sapien
gagcatcaggtttgtcatctgtttg

SEQ ID NO: 4783606 - DNA, 25 bp, Homo sapien
tttagactgtggaactactagctcg

SEQ ID NO: 4783607 - DNA, 25 bp, Homo sapien
taagcgtactgacgttagccacagt

SEQ ID NO: 4783608 - DNA, 25 bp, Homo sapien
gagatggtctttgctcagaaagctt

SEQ ID NO: 4783609 - DNA, 25 bp, Homo sapien
ggaaaagaactataagaactcagag

SEQ ID NO: 4783610 - DNA, 25 bp, Homo sapien
taaagcattgggacattcagagatg

SEQ ID NO: 4783611 - DNA, 25 bp, Homo sapien
cagaaagcttgctgatcagtgagtg

SEQ ID NO: 4783612 - DNA, 25 bp, Homo sapien
ctgggaacaatagaggaagactttt

SEQ ID NO: 4783613 - DNA, 25 bp, Homo sapien
tcttgctgggaacaatagaggaaga

SEQ ID NO: 4783614 - DNA, 25 bp, Homo sapien
ttgctgggaacaatagaggaagact

SEQ ID NO: 4783615 - DNA, 25 bp, Homo sapien
gctgggaacaatagaggaagacttt

SEQ ID NO: 4783616 - DNA, 25 bp, Homo sapien
ctacccagtagggaaagcacacgtt

SEQ ID NO: 4783617 - DNA, 25 bp, Homo sapien
ttgaaacctgtagggcaacccttgc

SEQ ID NO: 4783618 - DNA, 25 bp, Homo sapien
cctgagctgggatgcaagaggcact

SEQ ID NO: 4783619 - DNA, 25 bp, Homo sapien
ctagacagaaccagatgaagcaggg

SEQ ID NO: 4783620 - DNA, 25 bp, Homo sapien
gcagtctaatggtttgtataaagca

SEQ ID NO: 4783621 - DNA, 25 bp, Homo sapien
ctgttttaagtgcagtctaatggtt

SEQ ID NO: 4783622 - DNA, 25 bp, Homo sapien
ttccgtaaagatctgttttaagtgc

SEQ ID NO: 4783623 - DNA, 25 bp, Homo sapien
cattgtttccgtaaagatctgtttt

SEQ ID NO: 4783624 - DNA, 25 bp, Homo sapien
tgtggaattgggtatttttcacaag

SEQ ID NO: 4783625 - DNA, 25 bp, Homo sapien
ttattgctgcccctgtggcggtgtg

SEQ ID NO: 4783626 - DNA, 25 bp, Homo sapien
agctctgtattcatctctgcattgg

SEQ ID NO: 4783627 - DNA, 25 bp, Homo sapien
ttgagctcctatgagctctctgcct

SEQ ID NO: 4783628 - DNA, 25 bp, Homo sapien
tctggtcggcagaattggacctgca

SEQ ID NO: 4783629 - DNA, 25 bp, Homo sapien
gattgacaatgagttcactgtgggc

SEQ ID NO: 4783630 - DNA, 25 bp, Homo sapien
tgtttccctaatggcactgattgac

SEQ ID NO: 4783631 - DNA, 25 bp, Homo sapien
tgaaaattgccagagtctggtcggc

SEQ ID NO: 4783632 - DNA, 25 bp, Homo sapien
ggtaagtctccaatagtgtgttcgc

SEQ ID NO: 4783633 - DNA, 25 bp, Homo sapien
ttaggttctgagtccgcagagctgt

SEQ ID NO: 4783634 - DNA, 25 bp, Homo sapien
tgtgtgtccaggtagagttaggttc

SEQ ID NO: 4783635 - DNA, 25 bp, Homo sapien
tagtgtgttcgcttctgtgtgtcca

SEQ ID NO: 4783636 - DNA, 25 bp, Homo sapien
aacccatgtgacttgtattgactga

SEQ ID NO: 4783637 - DNA, 25 bp, Homo sapien
tattgactgattagctcggatatgt

SEQ ID NO: 4783638 - DNA, 25 bp, Homo sapien
ctcggatatgttggcggtcaatgga

SEQ ID NO: 4783639 - DNA, 25 bp, Homo sapien
taccacttgtcatggagcatatcca

SEQ ID NO: 4783640 - DNA, 25 bp, Homo sapien
atgatgaaggcgtctagtttctctg

SEQ ID NO: 4783641 - DNA, 25 bp, Homo sapien
gtgagaagtttgcagtcagcatcta

SEQ ID NO: 4783642 - DNA, 25 bp, Homo sapien
gtcagcatctattgacacttcataa

SEQ ID NO: 4783643 - DNA, 25 bp, Homo sapien
tgatgaaggcgtctagtttctctgg

SEQ ID NO: 4783644 - DNA, 25 bp, Homo sapien
gcactgctttctcggacagttccaa

SEQ ID NO: 4783645 - DNA, 25 bp, Homo sapien
tccaaagcggaatccttgggaagga

SEQ ID NO: 4783646 - DNA, 25 bp, Homo sapien
tgtctcacataatcttcagcactgc

SEQ ID NO: 4783647 - DNA, 25 bp, Homo sapien
ggctggaacattgtaccttctcata

SEQ ID NO: 4783648 - DNA, 25 bp, Homo sapien
aagctttcatatggtatgatcaaaa

SEQ ID NO: 4783649 - DNA, 25 bp, Homo sapien
caaatgctcatatggcaagtggaaa

SEQ ID NO: 4783650 - DNA, 25 bp, Homo sapien
tattcttatagagtgtaatgcaaca

SEQ ID NO: 4783651 - DNA, 25 bp, Homo sapien
cacagtaaaggtgtaacaataaggt

SEQ ID NO: 4783652 - DNA, 25 bp, Homo sapien
gcttgcgcaaggcacatttatcagc

SEQ ID NO: 4783653 - DNA, 25 bp, Homo sapien
gctgttctcatagtagcaaattgca

SEQ ID NO: 4783654 - DNA, 25 bp, Homo sapien
caaattgcagtcgtatggcttgcgc

SEQ ID NO: 4783655 - DNA, 25 bp, Homo sapien
aatattatccttatgccttgaaccc

SEQ ID NO: 4783656 - DNA, 25 bp, Homo sapien
gtgtactataccctgcagactgagc

SEQ ID NO: 4783657 - DNA, 25 bp, Homo sapien
cagtaaggtccttgccaaacctaga

SEQ ID NO: 4783658 - DNA, 25 bp, Homo sapien
tcttgaatcattgcccatcaccagc

SEQ ID NO: 4783659 - DNA, 25 bp, Homo sapien
gactgagcaggcagtaaggtccttg

SEQ ID NO: 4783660 - DNA, 25 bp, Homo sapien
tcctcttgaacctcatttgcacagc

SEQ ID NO: 4783661 - DNA, 25 bp, Homo sapien
cctcttgaacctcatttgcacagca

SEQ ID NO: 4783662 - DNA, 25 bp, Homo sapien
catcctcttgaacctcatttgcaca

SEQ ID NO: 4783663 - DNA, 25 bp, Homo sapien
catttgcacagcaggccagttcctc

SEQ ID NO: 4783664 - DNA, 25 bp, Homo sapien
tagcttcaatctctctcttgaactc

SEQ ID NO: 4783665 - DNA, 25 bp, Homo sapien
caatctctctcttgaactctggctc

SEQ ID NO: 4783666 - DNA, 25 bp, Homo sapien
gcttcaatctctctcttgaactctg

SEQ ID NO: 4783667 - DNA, 25 bp, Homo sapien
ttcaatctctctcttgaactctggc

SEQ ID NO: 4783668 - DNA, 25 bp, Homo sapien
agtgaccaaatctatatcagtgacc

SEQ ID NO: 4783669 - DNA, 25 bp, Homo sapien
tctcttgtaatcttgtttgcctgct

SEQ ID NO: 4783670 - DNA, 25 bp, Homo sapien
gctataatttcagctctattcattt

SEQ ID NO: 4783671 - DNA, 25 bp, Homo sapien
tctatatcagtgaccaaagctataa

SEQ ID NO: 4783672 - DNA, 25 bp, Homo sapien
cacattgtccagtggagtggccaca

SEQ ID NO: 4783673 - DNA, 25 bp, Homo sapien
aatgggagctgctgtatctcgggtc

SEQ ID NO: 4783674 - DNA, 25 bp, Homo sapien
ggtcctcactaagatgcccaagctg

SEQ ID NO: 4783675 - DNA, 25 bp, Homo sapien
gatgctaaaggaagtgactgccatg

SEQ ID NO: 4783676 - DNA, 25 bp, Homo sapien
gatctgtaggaagctcaagaggtcc

SEQ ID NO: 4783677 - DNA, 25 bp, Homo sapien
tgtaatttcgaaaatccgccggata

SEQ ID NO: 4783678 - DNA, 25 bp, Homo sapien
gatttgtagtttccacctccatgca

SEQ ID NO: 4783679 - DNA, 25 bp, Homo sapien
tgtggctacagctcttgcgaccagc

SEQ ID NO: 4783680 - DNA, 25 bp, Homo sapien
ggtcaggattgagacagtgacatca

SEQ ID NO: 4783681 - DNA, 25 bp, Homo sapien
tttctaaactcagttgtaggtgaag

SEQ ID NO: 4783682 - DNA, 25 bp, Homo sapien
tctaaactcagttgtaggtgaaggg

SEQ ID NO: 4783683 - DNA, 25 bp, Homo sapien
gagacagtgacatcagcatcagaac

SEQ ID NO: 4783684 - DNA, 25 bp, Homo sapien
tcctgtgcgattctgcattgtcctc

SEQ ID NO: 4783685 - DNA, 25 bp, Homo sapien
gataaatggttggagccaccatctg

SEQ ID NO: 4783686 - DNA, 25 bp, Homo sapien
tcttcagcagttgggcttttctgtc

SEQ ID NO: 4783687 - DNA, 25 bp, Homo sapien
tcttcagcaggttctacagtgtcct

SEQ ID NO: 4783688 - DNA, 25 bp, Homo sapien
ggagatccctcatcagtctttgttc

SEQ ID NO: 4783689 - DNA, 25 bp, Homo sapien
gctccagtaccagtcagcatgcaag

SEQ ID NO: 4783690 - DNA, 25 bp, Homo sapien
agtttgtggattagtaagagtttca

SEQ ID NO: 4783691 - DNA, 25 bp, Homo sapien
cagattctgctagtttgtggattag

SEQ ID NO: 4783692 - DNA, 25 bp, Homo sapien
tcatagtctagcatctcaaaacact

SEQ ID NO: 4783693 - DNA, 25 bp, Homo sapien
ttctggataaagagagaattgctaa

SEQ ID NO: 4783694 - DNA, 25 bp, Homo sapien
acagtataaaacacatcgtagagct

SEQ ID NO: 4783695 - DNA, 25 bp, Homo sapien
tgctaaccagcccttatatcatagt

SEQ ID NO: 4783696 - DNA, 25 bp, Homo sapien
cacttcctgcaatgtaatcaatctc

SEQ ID NO: 4783697 - DNA, 25 bp, Homo sapien
cagaacaaatgcatatgggtcagat

SEQ ID NO: 4783698 - DNA, 25 bp, Homo sapien
cttaacataatgtgaagccagaaca

SEQ ID NO: 4783699 - DNA, 25 bp, Homo sapien
cttaaatgacttccatgggtggcca

SEQ ID NO: 4783700 - DNA, 25 bp, Homo sapien
ttatgggacctttggtagaatacac

SEQ ID NO: 4783701 - DNA, 25 bp, Homo sapien
ttgaaacagagtacaattttctgct

SEQ ID NO: 4783702 - DNA, 25 bp, Homo sapien
ctaagggggtaatctaaaggcagct

SEQ ID NO: 4783703 - DNA, 25 bp, Homo sapien
gagcctggttattaatgtgtcagga

SEQ ID NO: 4783704 - DNA, 25 bp, Homo sapien
gactgaaattactttgcaaattgta

SEQ ID NO: 4783705 - DNA, 25 bp, Homo sapien
tgttttaggtttttacgtatatgca

SEQ ID NO: 4783706 - DNA, 25 bp, Homo sapien
agcgcccatctccactccacgcacc

SEQ ID NO: 4783707 - DNA, 25 bp, Homo sapien
ttccacgcggttcaggttgtccacg

SEQ ID NO: 4783708 - DNA, 25 bp, Homo sapien
tgtccacggcaaataggagggcgtc

SEQ ID NO: 4783709 - DNA, 25 bp, Homo sapien
gactctcccgtggaaactcgtggcg

SEQ ID NO: 4783710 - DNA, 25 bp, Homo sapien
aagacaggttgtagggtagcagccc

SEQ ID NO: 4783711 - DNA, 25 bp, Homo sapien
ccggccagcaccagtgcgcagggcg

SEQ ID NO: 4783712 - DNA, 25 bp, Homo sapien
gccagcaccagtgcgcagggcggcg

SEQ ID NO: 4783713 - DNA, 25 bp, Homo sapien
cccggccagcaccagtgcgcagggc

SEQ ID NO: 4783714 - DNA, 25 bp, Homo sapien
cagggagaaagcgcgccccctcctg

SEQ ID NO: 4783715 - DNA, 25 bp, Homo sapien
cagtgacagaggagcgacgcgctct

SEQ ID NO: 4783716 - DNA, 25 bp, Homo sapien
aggcgagacccacttatttcctggg

SEQ ID NO: 4783717 - DNA, 25 bp, Homo sapien
tcgcgttggagagggctttcacgcc

SEQ ID NO: 4783718 - DNA, 25 bp, Homo sapien
tctctaggccatgcaagttggagcg

SEQ ID NO: 4783719 - DNA, 25 bp, Homo sapien
catcacttctatgtcctttctgttc

SEQ ID NO: 4783720 - DNA, 25 bp, Homo sapien
ggtggtttgacctttacttcatcac

SEQ ID NO: 4783721 - DNA, 25 bp, Homo sapien
attggttctttggtagtggcctcta

SEQ ID NO: 4783722 - DNA, 25 bp, Homo sapien
ccttgactaaggttttctccttgag

SEQ ID NO: 4783723 - DNA, 25 bp, Homo sapien
gaatgtaatgcctcataggtttcca

SEQ ID NO: 4783724 - DNA, 25 bp, Homo sapien
ggtttccataatacttcccaatgtg

SEQ ID NO: 4783725 - DNA, 25 bp, Homo sapien
ggaaagaatgtaatgcctcataggt

SEQ ID NO: 4783726 - DNA, 25 bp, Homo sapien
tgggttcttgtgagtccactgtgat

SEQ ID NO: 4783727 - DNA, 25 bp, Homo sapien
ttactctcttttgaatattatcaaa

SEQ ID NO: 4783728 - DNA, 25 bp, Homo sapien
aatggtactgtttatacttcaagag

SEQ ID NO: 4783729 - DNA, 25 bp, Homo sapien
ctcttttgaatattatcaaaactaa

SEQ ID NO: 4783730 - DNA, 25 bp, Homo sapien
ttgaatattatcaaaactaattgat

SEQ ID NO: 4783731 - DNA, 25 bp, Homo sapien
tttggagatgcccatcaatctgggc

SEQ ID NO: 4783732 - DNA, 25 bp, Homo sapien
gaagttttgcactcccaagggctct

SEQ ID NO: 4783733 - DNA, 25 bp, Homo sapien
tgcctgctgcctgtattgcccttca

SEQ ID NO: 4783734 - DNA, 25 bp, Homo sapien
ttcactgcaagcaggactgtgccct

SEQ ID NO: 4783735 - DNA, 25 bp, Homo sapien
attttgggcaagatcaggaaagccc

SEQ ID NO: 4783736 - DNA, 25 bp, Homo sapien
cctttatccagaggttcaggaacaa

SEQ ID NO: 4783737 - DNA, 25 bp, Homo sapien
tatccagaggttcaggaacaatttt

SEQ ID NO: 4783738 - DNA, 25 bp, Homo sapien
tccagaggttcaggaacaattttca

SEQ ID NO: 4783739 - DNA, 25 bp, Homo sapien
tctctaggtgtggaagccaaagatg

SEQ ID NO: 4783740 - DNA, 25 bp, Homo sapien
tggaagccaaagatggttcctcttt

SEQ ID NO: 4783741 - DNA, 25 bp, Homo sapien
ggtgtggaagccaaagatggttcct

SEQ ID NO: 4783742 - DNA, 25 bp, Homo sapien
ctaggtgtggaagccaaagatggtt

SEQ ID NO: 4783743 - DNA, 25 bp, Homo sapien
agaatcaggtggcaaaactctgaca

SEQ ID NO: 4783744 - DNA, 25 bp, Homo sapien
tctgacacagacttgaacaacaggt

SEQ ID NO: 4783745 - DNA, 25 bp, Homo sapien
gacacagacttgaacaacaggtgtt

SEQ ID NO: 4783746 - DNA, 25 bp, Homo sapien
ggcaaaactctgacacagacttgaa

SEQ ID NO: 4783747 - DNA, 25 bp, Homo sapien
tgagcaagtgatagcacaatacaga

SEQ ID NO: 4783748 - DNA, 25 bp, Homo sapien
cagagtctgttagagttgtctgaca

SEQ ID NO: 4783749 - DNA, 25 bp, Homo sapien
gatagcacaatacagagtctgttag

SEQ ID NO: 4783750 - DNA, 25 bp, Homo sapien
caatacagagtctgttagagttgtc

SEQ ID NO: 4783751 - DNA, 25 bp, Homo sapien
tgtcctgcccgggatgttaatcatc

SEQ ID NO: 4783752 - DNA, 25 bp, Homo sapien
tgacttctccaataggtagttccct

SEQ ID NO: 4783753 - DNA, 25 bp, Homo sapien
catagcagtgttccaatgacttctc

SEQ ID NO: 4783754 - DNA, 25 bp, Homo sapien
gtccagtatgtccacactgtataag

SEQ ID NO: 4783755 - DNA, 25 bp, Homo sapien
tcatgtgcatatccggagagcctga

SEQ ID NO: 4783756 - DNA, 25 bp, Homo sapien
gtttcaatcagactgtggctatcac

SEQ ID NO: 4783757 - DNA, 25 bp, Homo sapien
tgttgctgccagtgtgctactgctt

SEQ ID NO: 4783758 - DNA, 25 bp, Homo sapien
tactttgtccttgcaaatcttgagc

SEQ ID NO: 4783759 - DNA, 25 bp, Homo sapien
tagtgcggtgtgaagttgcaagatc

SEQ ID NO: 4783760 - DNA, 25 bp, Homo sapien
agttgcaagatctggaactgctgta

SEQ ID NO: 4783761 - DNA, 25 bp, Homo sapien
cattttactcttgtgaggagagagc

SEQ ID NO: 4783762 - DNA, 25 bp, Homo sapien
tagccattttactcttgtgaggaga

SEQ ID NO: 4783763 - DNA, 25 bp, Homo sapien
cttcatgctgcttcaatttttcaca

SEQ ID NO: 4783764 - DNA, 25 bp, Homo sapien
acagctctcatcatttctatcattc

SEQ ID NO: 4783765 - DNA, 25 bp, Homo sapien
tttcacagctctcatcatttctatc

SEQ ID NO: 4783766 - DNA, 25 bp, Homo sapien
catgctgcttcaatttttcacagct

SEQ ID NO: 4783767 - DNA, 25 bp, Homo sapien
ccggccgcttttcatctctgagatg

SEQ ID NO: 4783768 - DNA, 25 bp, Homo sapien
tctgagatgccaggcctgttccggt

SEQ ID NO: 4783769 - DNA, 25 bp, Homo sapien
tctctgtgggagaagtaacctctga

SEQ ID NO: 4783770 - DNA, 25 bp, Homo sapien
gtaacctctgatggcccggccgctt

SEQ ID NO: 4783771 - DNA, 25 bp, Homo sapien
gctgagaacaattcggcaaagaaat

SEQ ID NO: 4783772 - DNA, 25 bp, Homo sapien
gatggagaggtacaagcagattttc

SEQ ID NO: 4783773 - DNA, 25 bp, Homo sapien
tagtcactagaaagctgttaaacat

SEQ ID NO: 4783774 - DNA, 25 bp, Homo sapien
gcagacgtcattttgagcatatcct

SEQ ID NO: 4783775 - DNA, 25 bp, Homo sapien
gatgtccacataaaggggcactgct

SEQ ID NO: 4783776 - DNA, 25 bp, Homo sapien
cagaagctgggtctcctcatgggag

SEQ ID NO: 4783777 - DNA, 25 bp, Homo sapien
gggtaaaatgcaagaacttgaatca

SEQ ID NO: 4783778 - DNA, 25 bp, Homo sapien
cactgctgtaagagccaggtagggc

SEQ ID NO: 4783779 - DNA, 25 bp, Homo sapien
ttgtccccgcatttcagggcttcga

SEQ ID NO: 4783780 - DNA, 25 bp, Homo sapien
tcttcctttccgtcttgatcagtgc

SEQ ID NO: 4783781 - DNA, 25 bp, Homo sapien
tcagtgctccagttacactagattg

SEQ ID NO: 4783782 - DNA, 25 bp, Homo sapien
tttcagggcttcgataaagcaccac

SEQ ID NO: 4783783 - DNA, 25 bp, Homo sapien
gtgcaccccagggttcactctcaca

SEQ ID NO: 4783784 - DNA, 25 bp, Homo sapien
aaatgagtcaaatggcatttggagc

SEQ ID NO: 4783785 - DNA, 25 bp, Homo sapien
caagcaataactcccttagaattgc

SEQ ID NO: 4783786 - DNA, 25 bp, Homo sapien
ggtcctctgatgattgtgacggaaa

SEQ ID NO: 4783787 - DNA, 25 bp, Homo sapien
agaattttcacacccaggctcctgt

SEQ ID NO: 4783788 - DNA, 25 bp, Homo sapien
gatgaatactgtgggaagaactaga

SEQ ID NO: 4783789 - DNA, 25 bp, Homo sapien
caggctcctgtacctggatggccat

SEQ ID NO: 4783790 - DNA, 25 bp, Homo sapien
ctgcgagaaaatcaatttgtgttga

SEQ ID NO: 4783791 - DNA, 25 bp, Homo sapien
cagacactggtaaggctaagttttg

SEQ ID NO: 4783792 - DNA, 25 bp, Homo sapien
tctctcagaggacttgactgctgct

SEQ ID NO: 4783793 - DNA, 25 bp, Homo sapien
ctattctctcagaggacttgactgc

SEQ ID NO: 4783794 - DNA, 25 bp, Homo sapien
ctggtaaggctaagttttgtggctg

SEQ ID NO: 4783795 - DNA, 25 bp, Homo sapien
actgatgtgacttcttctccttcaa

SEQ ID NO: 4783796 - DNA, 25 bp, Homo sapien
aatcatttttcgctcctctgtctcc

SEQ ID NO: 4783797 - DNA, 25 bp, Homo sapien
ttggaaatagttgattcattcttgg

SEQ ID NO: 4783798 - DNA, 25 bp, Homo sapien
catcctctgttctagcaagtctgca

SEQ ID NO: 4783799 - DNA, 25 bp, Homo sapien
caatgttgagcaagataggattttg

SEQ ID NO: 4783800 - DNA, 25 bp, Homo sapien
gcttttgagtgaccggtcatccata

SEQ ID NO: 4783801 - DNA, 25 bp, Homo sapien
gaaagtgaacctatactgagaaagc

SEQ ID NO: 4783802 - DNA, 25 bp, Homo sapien
taccacacgatgatacaatgttgag

SEQ ID NO: 4783803 - DNA, 25 bp, Homo sapien
tgctccccaacttgatcctggtcag

SEQ ID NO: 4783804 - DNA, 25 bp, Homo sapien
ccgctgctccccaacttgatcctgg

SEQ ID NO: 4783805 - DNA, 25 bp, Homo sapien
cccaacttgatcctggtcagcagct

SEQ ID NO: 4783806 - DNA, 25 bp, Homo sapien
ttccccgctgctccccaacttgatc

SEQ ID NO: 4783807 - DNA, 25 bp, Homo sapien
gcctctaaactgaagcccctgtagg

SEQ ID NO: 4783808 - DNA, 25 bp, Homo sapien
gagcttatactctggcctagagtca

SEQ ID NO: 4783809 - DNA, 25 bp, Homo sapien
ctgctggagagcttatactctggcc

SEQ ID NO: 4783810 - DNA, 25 bp, Homo sapien
agcttgaggcttttggcttccttca

SEQ ID NO: 4783811 - DNA, 25 bp, Homo sapien
ttagtaactaactcatattcatccc

SEQ ID NO: 4783812 - DNA, 25 bp, Homo sapien
ttaacttagtaactaactcatattc

SEQ ID NO: 4783813 - DNA, 25 bp, Homo sapien
acttagtaactaactcatattcatc

SEQ ID NO: 4783814 - DNA, 25 bp, Homo sapien
gtaactaactcatattcatccctgg

SEQ ID NO: 4783815 - DNA, 25 bp, Homo sapien
ctgccctgactttttaaataggcca

SEQ ID NO: 4783816 - DNA, 25 bp, Homo sapien
tgccctgactttttaaataggccat

SEQ ID NO: 4783817 - DNA, 25 bp, Homo sapien
gacctttgaatgtgttgtttctgca

SEQ ID NO: 4783818 - DNA, 25 bp, Homo sapien
aagtttatccaaccatgaaggacct

SEQ ID NO: 4783819 - DNA, 25 bp, Homo sapien
cagctttcctattaaagtttatcca

SEQ ID NO: 4783820 - DNA, 25 bp, Homo sapien
catgaaggacctttgaatgtgttgt

SEQ ID NO: 4783821 - DNA, 25 bp, Homo sapien
ggatgattgtaagatcagtattcat

SEQ ID NO: 4783822 - DNA, 25 bp, Homo sapien
gcagagtcactgtctacgacataga

SEQ ID NO: 4783823 - DNA, 25 bp, Homo sapien
tcactgtctacgacatagaacctaa

SEQ ID NO: 4783824 - DNA, 25 bp, Homo sapien
aagaaattgcagagtcactgtctac

SEQ ID NO: 4783825 - DNA, 25 bp, Homo sapien
aattgcagagtcactgtctacgaca

SEQ ID NO: 4783826 - DNA, 25 bp, Homo sapien
ggaggtaggacctaatgctgtagat

SEQ ID NO: 4783827 - DNA, 25 bp, Homo sapien
ccgtcatgtaagtcttgtctccagc

SEQ ID NO: 4783828 - DNA, 25 bp, Homo sapien
tgtagattgttctagaaagctggcc

SEQ ID NO: 4783829 - DNA, 25 bp, Homo sapien
gaggataatttgcacaagtcaccac

SEQ ID NO: 4783830 - DNA, 25 bp, Homo sapien
atgggagtagcatgttgaatatgtc

SEQ ID NO: 4783831 - DNA, 25 bp, Homo sapien
ctgtaaatgggagtagcatgttgaa

SEQ ID NO: 4783832 - DNA, 25 bp, Homo sapien
taaatgggagtagcatgttgaatat

SEQ ID NO: 4783833 - DNA, 25 bp, Homo sapien
gggagtagcatgttgaatatgtcac

SEQ ID NO: 4783834 - DNA, 25 bp, Homo sapien
cttgctgtaacgttgttgtaaaagc

SEQ ID NO: 4783835 - DNA, 25 bp, Homo sapien
gttgaatccaggaatctgctccaga

SEQ ID NO: 4783836 - DNA, 25 bp, Homo sapien
tcaatatacttttccaccaaataaa

SEQ ID NO: 4783837 - DNA, 25 bp, Homo sapien
tgctccagaagctgtctttcaatat

SEQ ID NO: 4783838 - DNA, 25 bp, Homo sapien
cagaagctgtctttcaatatacttt

SEQ ID NO: 4783839 - DNA, 25 bp, Homo sapien
agaaggaatgtatgaagctctcttc

SEQ ID NO: 4783840 - DNA, 25 bp, Homo sapien
cttctaaggcattaattgtgaccat

SEQ ID NO: 4783841 - DNA, 25 bp, Homo sapien
cttcttctaaggcattaattgtgac

SEQ ID NO: 4783842 - DNA, 25 bp, Homo sapien
gaaggaatgtatgaagctctcttct

SEQ ID NO: 4783843 - DNA, 25 bp, Homo sapien
gaaacatctatattttccttcacca

SEQ ID NO: 4783844 - DNA, 25 bp, Homo sapien
ggaaacatctatattttccttcacc

SEQ ID NO: 4783845 - DNA, 25 bp, Homo sapien
tatattttccttcaccattcactaa

SEQ ID NO: 4783846 - DNA, 25 bp, Homo sapien
catctatattttccttcaccattca

SEQ ID NO: 4783847 - DNA, 25 bp, Homo sapien
caagtcaacaatttcaacagtcact

SEQ ID NO: 4783848 - DNA, 25 bp, Homo sapien
ttccttaatgggctgaattgtcacc

SEQ ID NO: 4783849 - DNA, 25 bp, Homo sapien
tgtcaccaagtattccaagtcaaca

SEQ ID NO: 4783850 - DNA, 25 bp, Homo sapien
caatttcaacagtcactcttgtggg

SEQ ID NO: 4783851 - DNA, 25 bp, Homo sapien
caatctaggtcgcacaaaaatagtg

SEQ ID NO: 4783852 - DNA, 25 bp, Homo sapien
ctgttttatgactacgtcctttgca

SEQ ID NO: 4783853 - DNA, 25 bp, Homo sapien
tccttgccaaagtgacagggctctg

SEQ ID NO: 4783854 - DNA, 25 bp, Homo sapien
tcttatccgagagtttcaatctagg

SEQ ID NO: 4783855 - DNA, 25 bp, Homo sapien
cagaaaccaataccccgaaatatgg

SEQ ID NO: 4783856 - DNA, 25 bp, Homo sapien
gacaaagcagtcttcagaatgttgg

SEQ ID NO: 4783857 - DNA, 25 bp, Homo sapien
tccattgtatgctggagcaatcagc

SEQ ID NO: 4783858 - DNA, 25 bp, Homo sapien
gtctctcctaaagcatagaatgaag

SEQ ID NO: 4783859 - DNA, 25 bp, Homo sapien
ctgcgtcttgtggagtggtaaatga

SEQ ID NO: 4783860 - DNA, 25 bp, Homo sapien
gactgtattctttagacaagggctg

SEQ ID NO: 4783861 - DNA, 25 bp, Homo sapien
caagggctgatagtaggcattcaca

SEQ ID NO: 4783862 - DNA, 25 bp, Homo sapien
agcttccagaggtaactgcgtcttg

SEQ ID NO: 4783863 - DNA, 25 bp, Homo sapien
gtccatcccggcgtcttctgtgagg

SEQ ID NO: 4783864 - DNA, 25 bp, Homo sapien
gcagattctatggcaggctttctgg

SEQ ID NO: 4783865 - DNA, 25 bp, Homo sapien
tctggctctcagatcaaggcttata

SEQ ID NO: 4783866 - DNA, 25 bp, Homo sapien
tcatccttcatgtagctgtctgtcc

SEQ ID NO: 4783867 - DNA, 25 bp, Homo sapien
agcattaaatttcacacctgaagca

SEQ ID NO: 4783868 - DNA, 25 bp, Homo sapien
ttaaatttcacacctgaagcacaga

SEQ ID NO: 4783869 - DNA, 25 bp, Homo sapien
atttcacacctgaagcacagaactg

SEQ ID NO: 4783870 - DNA, 25 bp, Homo sapien
cacagaactgtatactctcatagta

SEQ ID NO: 4783871 - DNA, 25 bp, Homo sapien
attattgccacaatttcagctcctg

SEQ ID NO: 4783872 - DNA, 25 bp, Homo sapien
tgattattgccacaatttcagctcc

SEQ ID NO: 4783873 - DNA, 25 bp, Homo sapien
ttgccacaatttcagctcctgttat

SEQ ID NO: 4783874 - DNA, 25 bp, Homo sapien
tattgccacaatttcagctcctgtt

SEQ ID NO: 4783875 - DNA, 25 bp, Homo sapien
tgagggtgttaagtctcccataatc

SEQ ID NO: 4783876 - DNA, 25 bp, Homo sapien
tattgttgagggtgttaagtctccc

SEQ ID NO: 4783877 - DNA, 25 bp, Homo sapien
taagtctcccataatctgttttacc

SEQ ID NO: 4783878 - DNA, 25 bp, Homo sapien
tgctgatattgttgagggtgttaag

SEQ ID NO: 4783879 - DNA, 25 bp, Homo sapien
ccttgactcctctggaagtggttcc

SEQ ID NO: 4783880 - DNA, 25 bp, Homo sapien
ctctggaagtggttccttttgcagc

SEQ ID NO: 4783881 - DNA, 25 bp, Homo sapien
cttccttgactcctctggaagtggt

SEQ ID NO: 4783882 - DNA, 25 bp, Homo sapien
ctggaagtggttccttttgcagcca

SEQ ID NO: 4783883 - DNA, 25 bp, Homo sapien
tccctttgaaattctgagagaagct

SEQ ID NO: 4783884 - DNA, 25 bp, Homo sapien
ttagtgttcagaacctacacgatca

SEQ ID NO: 4783885 - DNA, 25 bp, Homo sapien
caacttccctttgaaattctgagag

SEQ ID NO: 4783886 - DNA, 25 bp, Homo sapien
tcatgtcctgctttattgaccatca

SEQ ID NO: 4783887 - DNA, 25 bp, Homo sapien
cctagtcctacatacaaatctctgc

SEQ ID NO: 4783888 - DNA, 25 bp, Homo sapien
ggtttgagtcgacctatttcagatt

SEQ ID NO: 4783889 - DNA, 25 bp, Homo sapien
tcctaaaccaagaccctaatgtgct

SEQ ID NO: 4783890 - DNA, 25 bp, Homo sapien
ttctctctggtgtatgatgcattct

SEQ ID NO: 4783891 - DNA, 25 bp, Homo sapien
tggacaaagagctaacaagaacaag

SEQ ID NO: 4783892 - DNA, 25 bp, Homo sapien
tgggcttgagccctctctttggtgt

SEQ ID NO: 4783893 - DNA, 25 bp, Homo sapien
gaagcactagattataacctgagac

SEQ ID NO: 4783894 - DNA, 25 bp, Homo sapien
ctctttggtgtgtcaagaagctaaa

SEQ ID NO: 4783895 - DNA, 25 bp, Homo sapien
gtgattataggcaagtgccaccacg

SEQ ID NO: 4783896 - DNA, 25 bp, Homo sapien
tgtgattataggcaagtgccaccac

SEQ ID NO: 4783897 - DNA, 25 bp, Homo sapien
gaaaaagatgcccatgatatagtca

SEQ ID NO: 4783898 - DNA, 25 bp, Homo sapien
ttagaaaaagatgcccatgatatag

SEQ ID NO: 4783899 - DNA, 25 bp, Homo sapien
agatgcccatgatatagtcatctaa

SEQ ID NO: 4783900 - DNA, 25 bp, Homo sapien
aaaagatgcccatgatatagtcatc

SEQ ID NO: 4783901 - DNA, 25 bp, Homo sapien
tatatattatgtccatggtgagcaa

SEQ ID NO: 4783902 - DNA, 25 bp, Homo sapien
gagccaggcacagataccagttcta

SEQ ID NO: 4783903 - DNA, 25 bp, Homo sapien
ttgggtcccaagtgcactgcgagat

SEQ ID NO: 4783904 - DNA, 25 bp, Homo sapien
ttccagattcttgggattgggtccc

SEQ ID NO: 4783905 - DNA, 25 bp, Homo sapien
tgtgacccgccccttgttttctgag

SEQ ID NO: 4783906 - DNA, 25 bp, Homo sapien
ttcaataatgtgcatgagtcctcca

SEQ ID NO: 4783907 - DNA, 25 bp, Homo sapien
tacatgcaacactcttgtacctcat

SEQ ID NO: 4783908 - DNA, 25 bp, Homo sapien
gccaacacaaggacttggctacatg

SEQ ID NO: 4783909 - DNA, 25 bp, Homo sapien
gagtcctccatagatagtgggtccc

SEQ ID NO: 4783910 - DNA, 25 bp, Homo sapien
tttgagcacttagcatgaaggtcat

SEQ ID NO: 4783911 - DNA, 25 bp, Homo sapien
ctttgagcacttagcatgaaggtca

SEQ ID NO: 4783912 - DNA, 25 bp, Homo sapien
aaaatgttttgtgttggccgtagcg

SEQ ID NO: 4783913 - DNA, 25 bp, Homo sapien
ggccgtagcgtctgatgttgtccac

SEQ ID NO: 4783914 - DNA, 25 bp, Homo sapien
caggtgagtcaccaactaagagtaa

SEQ ID NO: 4783915 - DNA, 25 bp, Homo sapien
gaggctcaatataagcccacactgc

SEQ ID NO: 4783916 - DNA, 25 bp, Homo sapien
atatgtatctttagcattccaattc

SEQ ID NO: 4783917 - DNA, 25 bp, Homo sapien
tatctttagcattccaattcacccc

SEQ ID NO: 4783918 - DNA, 25 bp, Homo sapien
atctttagcattccaattcacccct

SEQ ID NO: 4783919 - DNA, 25 bp, Homo sapien
tgtatctttagcattccaattcacc

SEQ ID NO: 4783920 - DNA, 25 bp, Homo sapien
tgtctccaagaacatccgagtttct

SEQ ID NO: 4783921 - DNA, 25 bp, Homo sapien
caaaggatgtgagtttaccaaattc

SEQ ID NO: 4783922 - DNA, 25 bp, Homo sapien
cagggcagccatgtctccaagaaca

SEQ ID NO: 4783923 - DNA, 25 bp, Homo sapien
ggatgtgagtttaccaaattccagg

SEQ ID NO: 4783924 - DNA, 25 bp, Homo sapien
tcggaagcacagtgcagccaatgtc

SEQ ID NO: 4783925 - DNA, 25 bp, Homo sapien
aaaacactgatcaaggcatttttgg

SEQ ID NO: 4783926 - DNA, 25 bp, Homo sapien
aagttatgaacaaaatctctcggaa

SEQ ID NO: 4783927 - DNA, 25 bp, Homo sapien
gaaaaacactgatcaaggcattttt

SEQ ID NO: 4783928 - DNA, 25 bp, Homo sapien
cctataagtagacaagaatcccaga

SEQ ID NO: 4783929 - DNA, 25 bp, Homo sapien
tgtgaggaagtgtattccactcccc

SEQ ID NO: 4783930 - DNA, 25 bp, Homo sapien
gaatcccagaaggaccttataggtg

SEQ ID NO: 4783931 - DNA, 25 bp, Homo sapien
tacaagcagaaatcgggcgaatatg

SEQ ID NO: 4783932 - DNA, 25 bp, Homo sapien
gcagaaaagttccaggtcaagtgaa

SEQ ID NO: 4783933 - DNA, 25 bp, Homo sapien
gaaggcctctcaatcaattcccacg

SEQ ID NO: 4783934 - DNA, 25 bp, Homo sapien
agatcttttgggaactactggacac

SEQ ID NO: 4783935 - DNA, 25 bp, Homo sapien
ttaaggaaagcgaggacagatctcc

SEQ ID NO: 4783936 - DNA, 25 bp, Homo sapien
ccaaagctgacgtcaagaagggtat

SEQ ID NO: 4783937 - DNA, 25 bp, Homo sapien
ttaacagggctgttcatcttttgct

SEQ ID NO: 4783938 - DNA, 25 bp, Homo sapien
tatctccaagtttcgttccacaggc

SEQ ID NO: 4783939 - DNA, 25 bp, Homo sapien
gctgggtcgaatcgtcgttcttttg

SEQ ID NO: 4783940 - DNA, 25 bp, Homo sapien
aaagaatcaaaggatccagttgtcg

SEQ ID NO: 4783941 - DNA, 25 bp, Homo sapien
aagcattgggacattttctggtgaa

SEQ ID NO: 4783942 - DNA, 25 bp, Homo sapien
cagttgtcgtcttgtgagtaggata

SEQ ID NO: 4783943 - DNA, 25 bp, Homo sapien
tcaaaccagaggactaagcattggg

SEQ ID NO: 4783944 - DNA, 25 bp, Homo sapien
ttaacaacacttaggtcaagtcagt

SEQ ID NO: 4783945 - DNA, 25 bp, Homo sapien
tgtatagtgctttcatgacagacaa

SEQ ID NO: 4783946 - DNA, 25 bp, Homo sapien
tgatggcctgtaatgtgatatgtct

SEQ ID NO: 4783947 - DNA, 25 bp, Homo sapien
tgtactgtgggttaaaagcatgttg

SEQ ID NO: 4783948 - DNA, 25 bp, Homo sapien
tcttagcaaagtctagttctggttc

SEQ ID NO: 4783949 - DNA, 25 bp, Homo sapien
cacagtgagtatactgacattgata

SEQ ID NO: 4783950 - DNA, 25 bp, Homo sapien
aacagtcccatgtggtcattagttt

SEQ ID NO: 4783951 - DNA, 25 bp, Homo sapien
tagtttttgactcaaagcgttctaa

SEQ ID NO: 4783952 - DNA, 25 bp, Homo sapien
cagcctatgggatgatgtcaattgg

SEQ ID NO: 4783953 - DNA, 25 bp, Homo sapien
caagcagagctcagataactaagtg

SEQ ID NO: 4783954 - DNA, 25 bp, Homo sapien
ggagatctgattttacagcctatgg

SEQ ID NO: 4783955 - DNA, 25 bp, Homo sapien
ggtataattttcttgccaagcagag

SEQ ID NO: 4783956 - DNA, 25 bp, Homo sapien
tgcgaacatagagaagccggaagct

SEQ ID NO: 4783957 - DNA, 25 bp, Homo sapien
gaatgggcaacatggtaccagccag

SEQ ID NO: 4783958 - DNA, 25 bp, Homo sapien
atagaaaagagctacctggtggcca

SEQ ID NO: 4783959 - DNA, 25 bp, Homo sapien
tcttgcacgccccatgtaaaccaga

SEQ ID NO: 4783960 - DNA, 25 bp, Homo sapien
catttttccatgtggttttgttaca

SEQ ID NO: 4783961 - DNA, 25 bp, Homo sapien
ctcatttttccatgtggttttgtta

SEQ ID NO: 4783962 - DNA, 25 bp, Homo sapien
atttttccatgtggttttgttacag

SEQ ID NO: 4783963 - DNA, 25 bp, Homo sapien
tcatttttccatgtggttttgttac

SEQ ID NO: 4783964 - DNA, 25 bp, Homo sapien
ttcccctacaggctactagacaaga

SEQ ID NO: 4783965 - DNA, 25 bp, Homo sapien
tttcatttcccctacaggctactag

SEQ ID NO: 4783966 - DNA, 25 bp, Homo sapien
ggctgcaagtcatgatgcattttca

SEQ ID NO: 4783967 - DNA, 25 bp, Homo sapien
tacaggctactagacaagattacac

SEQ ID NO: 4783968 - DNA, 25 bp, Homo sapien
tgcatttcctatattcggtctatca

SEQ ID NO: 4783969 - DNA, 25 bp, Homo sapien
gacgtttcatagagccaggtaggca

SEQ ID NO: 4783970 - DNA, 25 bp, Homo sapien
tgctgccacccattcttgttaggct

SEQ ID NO: 4783971 - DNA, 25 bp, Homo sapien
tgagttgctttctccgacgtttcat

SEQ ID NO: 4783972 - DNA, 25 bp, Homo sapien
gagtaatatcctgcatctggcattc

SEQ ID NO: 4783973 - DNA, 25 bp, Homo sapien
gacaaggattggttgatcaataaaa

SEQ ID NO: 4783974 - DNA, 25 bp, Homo sapien
cattatccgtaactcaacttgcaga

SEQ ID NO: 4783975 - DNA, 25 bp, Homo sapien
cagcagtgactgacattatccgtaa

SEQ ID NO: 4783976 - DNA, 25 bp, Homo sapien
gcctcacggtgcctgtagaaggttt

SEQ ID NO: 4783977 - DNA, 25 bp, Homo sapien
tttgccttcgttttgttctaaatgc

SEQ ID NO: 4783978 - DNA, 25 bp, Homo sapien
cctgtagaaggtttgttaccactct

SEQ ID NO: 4783979 - DNA, 25 bp, Homo sapien
ttgttctaaatgcctcacggtgcct

SEQ ID NO: 4783980 - DNA, 25 bp, Homo sapien
cacaggtagtaggacttgtacttcc

SEQ ID NO: 4783981 - DNA, 25 bp, Homo sapien
ctctgtgaaggtgcagtagggccta

SEQ ID NO: 4783982 - DNA, 25 bp, Homo sapien
agtagccacaggtagtaggacttgt

SEQ ID NO: 4783983 - DNA, 25 bp, Homo sapien
cagtagggcctaatagctgcaagag

SEQ ID NO: 4783984 - DNA, 25 bp, Homo sapien
tgcttccacaagtgtagcctggtct

SEQ ID NO: 4783985 - DNA, 25 bp, Homo sapien
aaatagcttttgcttccacaagtgt

SEQ ID NO: 4783986 - DNA, 25 bp, Homo sapien
tttgcttccacaagtgtagcctggt

SEQ ID NO: 4783987 - DNA, 25 bp, Homo sapien
cttttgcttccacaagtgtagcctg

SEQ ID NO: 4783988 - DNA, 25 bp, Homo sapien
ttgagcttctgcagtgtactcattt

SEQ ID NO: 4783989 - DNA, 25 bp, Homo sapien
tgtattgagcttctgcagtgtactc

SEQ ID NO: 4783990 - DNA, 25 bp, Homo sapien
tcatttcctcagtttaacaggaatg

SEQ ID NO: 4783991 - DNA, 25 bp, Homo sapien
catttcctcagtttaacaggaatgt

SEQ ID NO: 4783992 - DNA, 25 bp, Homo sapien
tccaaggtgtaagggctaatctttc

SEQ ID NO: 4783993 - DNA, 25 bp, Homo sapien
cacctccaaggtgtaagggctaatc

SEQ ID NO: 4783994 - DNA, 25 bp, Homo sapien
taagggctaatctttcctgactaat

SEQ ID NO: 4783995 - DNA, 25 bp, Homo sapien
ggtgtaagggctaatctttcctgac

SEQ ID NO: 4783996 - DNA, 25 bp, Homo sapien
tgaaaccaactgatcctacgcataa

SEQ ID NO: 4783997 - DNA, 25 bp, Homo sapien
cgtacctaatagctacaaagtccat

SEQ ID NO: 4783998 - DNA, 25 bp, Homo sapien
ttagaactcttgacagataagtgac

SEQ ID NO: 4783999 - DNA, 25 bp, Homo sapien
catccatgacggttgtgaagatagc

SEQ ID NO: 4784000 - DNA, 25 bp, Homo sapien
gggctttgtctcttttacacacttg

SEQ ID NO: 4784001 - DNA, 25 bp, Homo sapien
tctgtccctggtattttgtcctgca

SEQ ID NO: 4784002 - DNA, 25 bp, Homo sapien
cacttgtagtttttggcctgctcac

SEQ ID NO: 4784003 - DNA, 25 bp, Homo sapien
ccatcaccgagcctgtgggaattga

SEQ ID NO: 4784004 - DNA, 25 bp, Homo sapien
tctctacaacttcttgaatcccatt

SEQ ID NO: 4784005 - DNA, 25 bp, Homo sapien
gacttgttcttcatattgtcctcct

SEQ ID NO: 4784006 - DNA, 25 bp, Homo sapien
accaaactaggaattttggagtcat

SEQ ID NO: 4784007 - DNA, 25 bp, Homo sapien
aaactaggaattttggagtcatctc

SEQ ID NO: 4784008 - DNA, 25 bp, Homo sapien
tcatcaaccaaactaggaattttgg

SEQ ID NO: 4784009 - DNA, 25 bp, Homo sapien
tgttctccatctgtaacttgggatg

SEQ ID NO: 4784010 - DNA, 25 bp, Homo sapien
ggcattctcagtattgccagtgctt

SEQ ID NO: 4784011 - DNA, 25 bp, Homo sapien
tctcattagagacatcacggatttt

SEQ ID NO: 4784012 - DNA, 25 bp, Homo sapien
gtaaagttggttggaggcattctca

SEQ ID NO: 4784013 - DNA, 25 bp, Homo sapien
cacggattttgagtatgtgaaaagc

SEQ ID NO: 4784014 - DNA, 25 bp, Homo sapien
gactgaagggctgtatcattgtttc

SEQ ID NO: 4784015 - DNA, 25 bp, Homo sapien
cccttgctttaccaagagagatgga

SEQ ID NO: 4784016 - DNA, 25 bp, Homo sapien
tgaagcagaagcagccaaaagggct

SEQ ID NO: 4784017 - DNA, 25 bp, Homo sapien
tgacagactgaatgtggagtttccc

SEQ ID NO: 4784018 - DNA, 25 bp, Homo sapien
tattccagtgatttggctgcacaca

SEQ ID NO: 4784019 - DNA, 25 bp, Homo sapien
tttggctgcacacaagagcagtttt

SEQ ID NO: 4784020 - DNA, 25 bp, Homo sapien
cagtgatttggctgcacacaagagc

SEQ ID NO: 4784021 - DNA, 25 bp, Homo sapien
tattaatattccagtgatttggctg

SEQ ID NO: 4784022 - DNA, 25 bp, Homo sapien
agtacacttgattagacaatccaaa

SEQ ID NO: 4784023 - DNA, 25 bp, Homo sapien
ctagtacacttgattagacaatcca

SEQ ID NO: 4784024 - DNA, 25 bp, Homo sapien
tagtacacttgattagacaatccaa

SEQ ID NO: 4784025 - DNA, 25 bp, Homo sapien
tacacttgattagacaatccaaaag

SEQ ID NO: 4784026 - DNA, 25 bp, Homo sapien
cagcaggaactctgcctagaccttc

SEQ ID NO: 4784027 - DNA, 25 bp, Homo sapien
gacagcaggaactctgcctagacct

SEQ ID NO: 4784028 - DNA, 25 bp, Homo sapien
agcaggaactctgcctagaccttcc

SEQ ID NO: 4784029 - DNA, 25 bp, Homo sapien
atgacagcaggaactctgcctagac

SEQ ID NO: 4784030 - DNA, 25 bp, Homo sapien
ctcaaatattctgttaccatataga

SEQ ID NO: 4784031 - DNA, 25 bp, Homo sapien
tctcaaatattctgttaccatatag

SEQ ID NO: 4784032 - DNA, 25 bp, Homo sapien
ttctcaaatattctgttaccatata

SEQ ID NO: 4784033 - DNA, 25 bp, Homo sapien
taatactgaaggctgatggttggaa

SEQ ID NO: 4784034 - DNA, 25 bp, Homo sapien
aatactgaaggctgatggttggaaa

SEQ ID NO: 4784035 - DNA, 25 bp, Homo sapien
tggaaaagcacattgacaagttgga

SEQ ID NO: 4784036 - DNA, 25 bp, Homo sapien
gcacattgacaagttggaaatcctg

SEQ ID NO: 4784037 - DNA, 25 bp, Homo sapien
ggcgagcgtatttttcaccaccgaa

SEQ ID NO: 4784038 - DNA, 25 bp, Homo sapien
tcttagcacttagggagcctgagaa

SEQ ID NO: 4784039 - DNA, 25 bp, Homo sapien
ccttgaaaatgtgagggcttcccta

SEQ ID NO: 4784040 - DNA, 25 bp, Homo sapien
catagatagcttgggttgtataccc

SEQ ID NO: 4784041 - DNA, 25 bp, Homo sapien
agacatgaatgcctgtattgcttca

SEQ ID NO: 4784042 - DNA, 25 bp, Homo sapien
tagtccacttattccttttgtccag

SEQ ID NO: 4784043 - DNA, 25 bp, Homo sapien
tctgcatgtagtccacttattcctt

SEQ ID NO: 4784044 - DNA, 25 bp, Homo sapien
ccttttgtccagacatgaatgcctg

SEQ ID NO: 4784045 - DNA, 25 bp, Homo sapien
gagaaggaccgcttaatacttcctg

SEQ ID NO: 4784046 - DNA, 25 bp, Homo sapien
caataagaggatacttatctcccac

SEQ ID NO: 4784047 - DNA, 25 bp, Homo sapien
cccgaggtaacttataggattgaat

SEQ ID NO: 4784048 - DNA, 25 bp, Homo sapien
caatacagatgtcttcccgaggtaa

SEQ ID NO: 4784049 - DNA, 25 bp, Homo sapien
ccaaatgttctgagaaagcttccat

SEQ ID NO: 4784050 - DNA, 25 bp, Homo sapien
actgccaaatgttctgagaaagctt

SEQ ID NO: 4784051 - DNA, 25 bp, Homo sapien
tgccaaatgttctgagaaagcttcc

SEQ ID NO: 4784052 - DNA, 25 bp, Homo sapien
ctgaactgccaaatgttctgagaaa

SEQ ID NO: 4784053 - DNA, 25 bp, Homo sapien
cccaccaattccagacacataagca

SEQ ID NO: 4784054 - DNA, 25 bp, Homo sapien
aacccaccaattccagacacataag

SEQ ID NO: 4784055 - DNA, 25 bp, Homo sapien
gaacccaccaattccagacacataa

SEQ ID NO: 4784056 - DNA, 25 bp, Homo sapien
ccaccaattccagacacataagcag

SEQ ID NO: 4784057 - DNA, 25 bp, Homo sapien
tggtgcatcaactggttcaaagaca

SEQ ID NO: 4784058 - DNA, 25 bp, Homo sapien
caaagacaagatctccaagtgaagc

SEQ ID NO: 4784059 - DNA, 25 bp, Homo sapien
aatctgtttccatatcccacaacca

SEQ ID NO: 4784060 - DNA, 25 bp, Homo sapien
cccttcatgttttgtcactaatctg

SEQ ID NO: 4784061 - DNA, 25 bp, Homo sapien
aacaaaaaaaggctcaccaccacag

SEQ ID NO: 4784062 - DNA, 25 bp, Homo sapien
cacagaagtcccctacttcatagat

SEQ ID NO: 4784063 - DNA, 25 bp, Homo sapien
cttcatagataagcaaaataaaagg

SEQ ID NO: 4784064 - DNA, 25 bp, Homo sapien
aaaaaaggctcaccaccacagaagt

SEQ ID NO: 4784065 - DNA, 25 bp, Homo sapien
taaagacatggcactttgggtccgg

SEQ ID NO: 4784066 - DNA, 25 bp, Homo sapien
cacaccgtggctactagaggatcct

SEQ ID NO: 4784067 - DNA, 25 bp, Homo sapien
cgcatggcgattactttagaggaac

SEQ ID NO: 4784068 - DNA, 25 bp, Homo sapien
gattgccttggtgagtcaacactgg

SEQ ID NO: 4784069 - DNA, 25 bp, Homo sapien
gagcagaaatgtgcctagccaaaag

SEQ ID NO: 4784070 - DNA, 25 bp, Homo sapien
gataagaggatccttttgcagtcaa

SEQ ID NO: 4784071 - DNA, 25 bp, Homo sapien
ccagcaatattctggaccatcagtt

SEQ ID NO: 4784072 - DNA, 25 bp, Homo sapien
taagctggcttagctgataagagga

SEQ ID NO: 4784073 - DNA, 25 bp, Homo sapien
atctgaaatagtagaagcttctgta

SEQ ID NO: 4784074 - DNA, 25 bp, Homo sapien
cttatctgaaatagtagaagcttct

SEQ ID NO: 4784075 - DNA, 25 bp, Homo sapien
tacttatctgaaatagtagaagctt

SEQ ID NO: 4784076 - DNA, 25 bp, Homo sapien
ttatctgaaatagtagaagcttctg

SEQ ID NO: 4784077 - DNA, 25 bp, Homo sapien
tgctgagccaatatttccaaatgtg

SEQ ID NO: 4784078 - DNA, 25 bp, Homo sapien
aagggtatagctgcaatgctgagcc

SEQ ID NO: 4784079 - DNA, 25 bp, Homo sapien
agtgtgtttcctgtctaaagggtat

SEQ ID NO: 4784080 - DNA, 25 bp, Homo sapien
gcctctctgtcaaggagaactggaa

SEQ ID NO: 4784081 - DNA, 25 bp, Homo sapien
actcccatatatgtctcagaaagag

SEQ ID NO: 4784082 - DNA, 25 bp, Homo sapien
gaatgcttgagtggatcttgtggat

SEQ ID NO: 4784083 - DNA, 25 bp, Homo sapien
gactggctgactatccacttaggtg

SEQ ID NO: 4784084 - DNA, 25 bp, Homo sapien
gaacaaaggaagcaactgtggcttt

SEQ ID NO: 4784085 - DNA, 25 bp, Homo sapien
gaatgagggatgctgataattcagc

SEQ ID NO: 4784086 - DNA, 25 bp, Homo sapien
agcagatgcaattcgctggcctctg

SEQ ID NO: 4784087 - DNA, 25 bp, Homo sapien
ccccatggctgattgattcattaca

SEQ ID NO: 4784088 - DNA, 25 bp, Homo sapien
tctgtatgagtcacctaccactgtg

SEQ ID NO: 4784089 - DNA, 25 bp, Homo sapien
aagacaaaagtgctgactgcatatt

SEQ ID NO: 4784090 - DNA, 25 bp, Homo sapien
atgaagacaaaagtgctgactgcat

SEQ ID NO: 4784091 - DNA, 25 bp, Homo sapien
tgaagacaaaagtgctgactgcata

SEQ ID NO: 4784092 - DNA, 25 bp, Homo sapien
gacaaaagtgctgactgcatatttt

SEQ ID NO: 4784093 - DNA, 25 bp, Homo sapien
ctcatcagatttagtagatgggttc

SEQ ID NO: 4784094 - DNA, 25 bp, Homo sapien
atctcatcagatttagtagatgggt

SEQ ID NO: 4784095 - DNA, 25 bp, Homo sapien
tctcatcagatttagtagatgggtt

SEQ ID NO: 4784096 - DNA, 25 bp, Homo sapien
tatctcatcagatttagtagatggg

SEQ ID NO: 4784097 - DNA, 25 bp, Homo sapien
tcatagacacatcagaagcaaaggt

SEQ ID NO: 4784098 - DNA, 25 bp, Homo sapien
tcatgcacataaacgaattcaggtg

SEQ ID NO: 4784099 - DNA, 25 bp, Homo sapien
attcaggtgagagcatcagaacccc

SEQ ID NO: 4784100 - DNA, 25 bp, Homo sapien
tggatgcgacttgcagattgaagcc

SEQ ID NO: 4784101 - DNA, 25 bp, Homo sapien
ctacaggtatgctactgtatctgac

SEQ ID NO: 4784102 - DNA, 25 bp, Homo sapien
gaatgtctgtatcccgtcatattaa

SEQ ID NO: 4784103 - DNA, 25 bp, Homo sapien
gaagaagtaagtctagtgttcagta

SEQ ID NO: 4784104 - DNA, 25 bp, Homo sapien
tgggtacaaaatacaggtaggtaga

SEQ ID NO: 4784105 - DNA, 25 bp, Homo sapien
ttactcttgttgagttttgtttgag

SEQ ID NO: 4784106 - DNA, 25 bp, Homo sapien
gtcctttgttggatacatagcttgc

SEQ ID NO: 4784107 - DNA, 25 bp, Homo sapien
ggatacatagcttgcaagtattttc

SEQ ID NO: 4784108 - DNA, 25 bp, Homo sapien
tttactcttgttgagttttgtttga

SEQ ID NO: 4784109 - DNA, 25 bp, Homo sapien
catttgtcctaactccagggaatgt

SEQ ID NO: 4784110 - DNA, 25 bp, Homo sapien
tctctggtggtaatttgcttagtaa

SEQ ID NO: 4784111 - DNA, 25 bp, Homo sapien
catgtgtccgtattctaccagtgtt

SEQ ID NO: 4784112 - DNA, 25 bp, Homo sapien
ttcctttctggccttgtctcatgtg

SEQ ID NO: 4784113 - DNA, 25 bp, Homo sapien
cactatctgagattctcttgcatct

SEQ ID NO: 4784114 - DNA, 25 bp, Homo sapien
gttgagttcactatctgagattctc

SEQ ID NO: 4784115 - DNA, 25 bp, Homo sapien
gagttcactatctgagattctcttg

SEQ ID NO: 4784116 - DNA, 25 bp, Homo sapien
ctgttgagttcactatctgagattc

SEQ ID NO: 4784117 - DNA, 25 bp, Homo sapien
tctctgaggctttcgtctcctatcc

SEQ ID NO: 4784118 - DNA, 25 bp, Homo sapien
gaggctttcgtctcctatcccagtt

SEQ ID NO: 4784119 - DNA, 25 bp, Homo sapien
tctgaggctttcgtctcctatccca

SEQ ID NO: 4784120 - DNA, 25 bp, Homo sapien
gctttcgtctcctatcccagttcat

SEQ ID NO: 4784121 - DNA, 25 bp, Homo sapien
tctctgtttctaaagggctcaaggg

SEQ ID NO: 4784122 - DNA, 25 bp, Homo sapien
ggattctgcctaccatgaaaagctg

SEQ ID NO: 4784123 - DNA, 25 bp, Homo sapien
cacttatctctggagtaaagctgga

SEQ ID NO: 4784124 - DNA, 25 bp, Homo sapien
tcaagggattatgttaggcccaccc

SEQ ID NO: 4784125 - DNA, 25 bp, Homo sapien
tcagaagtcctgagtagtggcagta

SEQ ID NO: 4784126 - DNA, 25 bp, Homo sapien
tcagcattaagtgaaatgtccgaag

SEQ ID NO: 4784127 - DNA, 25 bp, Homo sapien
aattcagaggttaatatcataaagc

SEQ ID NO: 4784128 - DNA, 25 bp, Homo sapien
agtggcagtagagtgaattttcagc

SEQ ID NO: 4784129 - DNA, 25 bp, Homo sapien
gaagaaagccatcctaaacatcact

SEQ ID NO: 4784130 - DNA, 25 bp, Homo sapien
agtaacattcccagggacacacgga

SEQ ID NO: 4784131 - DNA, 25 bp, Homo sapien
gacacacggataaagatgaccaagc

SEQ ID NO: 4784132 - DNA, 25 bp, Homo sapien
tcttcataaagagcgtttgccagtg

SEQ ID NO: 4784133 - DNA, 25 bp, Homo sapien
tgctgtgtgcctctcatttaatcag

SEQ ID NO: 4784134 - DNA, 25 bp, Homo sapien
atttcatctgtccaaacacttcaga

SEQ ID NO: 4784135 - DNA, 25 bp, Homo sapien
agatgctaatcaaactttctgcagg

SEQ ID NO: 4784136 - DNA, 25 bp, Homo sapien
attttacagtgtacttgctgtgtgc

SEQ ID NO: 4784137 - DNA, 25 bp, Homo sapien
agcagtttctacagaacttcttgag

SEQ ID NO: 4784138 - DNA, 25 bp, Homo sapien
tctctcaactcgtggcacctctgaa

SEQ ID NO: 4784139 - DNA, 25 bp, Homo sapien
gacattaacacctgtatgcttgata

SEQ ID NO: 4784140 - DNA, 25 bp, Homo sapien
gtatggtggtcttaatcatgcagca

SEQ ID NO: 4784141 - DNA, 25 bp, Homo sapien
catctgagtggctattgatcaatgg

SEQ ID NO: 4784142 - DNA, 25 bp, Homo sapien
cagatgtgtttaggcaccacagcca

SEQ ID NO: 4784143 - DNA, 25 bp, Homo sapien
tactcatggcaaacacagaacatct

SEQ ID NO: 4784144 - DNA, 25 bp, Homo sapien
ccagaagactgaagtccgatactca

SEQ ID NO: 4784145 - DNA, 25 bp, Homo sapien
caaagtcacttttgccattcaatgt

SEQ ID NO: 4784146 - DNA, 25 bp, Homo sapien
tctacaaagtcacttttgccattca

SEQ ID NO: 4784147 - DNA, 25 bp, Homo sapien
tacaaagtcacttttgccattcaat

SEQ ID NO: 4784148 - DNA, 25 bp, Homo sapien
ctctacaaagtcacttttgccattc

SEQ ID NO: 4784149 - DNA, 25 bp, Homo sapien
cattcatgttccatatactcaaagt

SEQ ID NO: 4784150 - DNA, 25 bp, Homo sapien
taatagccacaacagagtgacagaa

SEQ ID NO: 4784151 - DNA, 25 bp, Homo sapien
tttgcttcctgtcatacccaggcag

SEQ ID NO: 4784152 - DNA, 25 bp, Homo sapien
gctgtcttagcaatgcatcatcttg

SEQ ID NO: 4784153 - DNA, 25 bp, Homo sapien
tcctgctgaatatgtgctcggcctc

SEQ ID NO: 4784154 - DNA, 25 bp, Homo sapien
cagcatcactacattggtcaaggca

SEQ ID NO: 4784155 - DNA, 25 bp, Homo sapien
gcatgaatcatggtaactgagccag

SEQ ID NO: 4784156 - DNA, 25 bp, Homo sapien
taaagtgcccaagattggagagcca

SEQ ID NO: 4784157 - DNA, 25 bp, Homo sapien
taactactgtagtctaaggccattt

SEQ ID NO: 4784158 - DNA, 25 bp, Homo sapien
ggaccatgaccttggtaaaaggcca

SEQ ID NO: 4784159 - DNA, 25 bp, Homo sapien
catttgattgttgggcaaggctaac

SEQ ID NO: 4784160 - DNA, 25 bp, Homo sapien
gatgtttagaacacacctagttgac

SEQ ID NO: 4784161 - DNA, 25 bp, Homo sapien
tcagtatgagggacatagaggttcc

SEQ ID NO: 4784162 - DNA, 25 bp, Homo sapien
tctcttcagtatgagggacatagag

SEQ ID NO: 4784163 - DNA, 25 bp, Homo sapien
tatgagggacatagaggttcctaac

SEQ ID NO: 4784164 - DNA, 25 bp, Homo sapien
taaatggggatagcttgaaagtcct

SEQ ID NO: 4784165 - DNA, 25 bp, Homo sapien
tttgattgtaattttgtattgacag

SEQ ID NO: 4784166 - DNA, 25 bp, Homo sapien
gacagttcttcattcagccaaaaac

SEQ ID NO: 4784167 - DNA, 25 bp, Homo sapien
tgtattgacagttcttcattcagcc

SEQ ID NO: 4784168 - DNA, 25 bp, Homo sapien
cattcagccaaaaacttattttcag

SEQ ID NO: 4784169 - DNA, 25 bp, Homo sapien
gaaggaagcaataaagtagggaatc

SEQ ID NO: 4784170 - DNA, 25 bp, Homo sapien
caataaagtagggaatctgctgatt

SEQ ID NO: 4784171 - DNA, 25 bp, Homo sapien
ggaagcaataaagtagggaatctgc

SEQ ID NO: 4784172 - DNA, 25 bp, Homo sapien
acttgaaggaagcaataaagtaggg

SEQ ID NO: 4784173 - DNA, 25 bp, Homo sapien
cagcagcaggtaacctaaagcagca

SEQ ID NO: 4784174 - DNA, 25 bp, Homo sapien
tcttcatcgtctttgcattttctag

SEQ ID NO: 4784175 - DNA, 25 bp, Homo sapien
ctcttcatcgtctttgcattttcta

SEQ ID NO: 4784176 - DNA, 25 bp, Homo sapien
tataagaaggaagtgatcaacaggc

SEQ ID NO: 4784177 - DNA, 25 bp, Homo sapien
ctataagaaggaagtgatcaacagg

SEQ ID NO: 4784178 - DNA, 25 bp, Homo sapien
gaaacatgaggtcagtgcatgtagc

SEQ ID NO: 4784179 - DNA, 25 bp, Homo sapien
ctgggaattgggacttaacatagga

SEQ ID NO: 4784180 - DNA, 25 bp, Homo sapien
ttcacccagctttcatgatgcgtat

SEQ ID NO: 4784181 - DNA, 25 bp, Homo sapien
ctcacaatagcatgggattcttgtt

SEQ ID NO: 4784182 - DNA, 25 bp, Homo sapien
gaagttgtggccaccaaatgtggtt

SEQ ID NO: 4784183 - DNA, 25 bp, Homo sapien
ttccaaattggaagccactgatgaa

SEQ ID NO: 4784184 - DNA, 25 bp, Homo sapien
attggaagccactgatgaaagaagc

SEQ ID NO: 4784185 - DNA, 25 bp, Homo sapien
gaagcagagatggttgaatcagaaa

SEQ ID NO: 4784186 - DNA, 25 bp, Homo sapien
tatccctgggccctttgacgtggat

SEQ ID NO: 4784187 - DNA, 25 bp, Homo sapien
atctgtgggtaatggatagttgtcc

SEQ ID NO: 4784188 - DNA, 25 bp, Homo sapien
tcttgtgccttcatgggttggtgtc

SEQ ID NO: 4784189 - DNA, 25 bp, Homo sapien
catgggttggtgtctcctggatctg

SEQ ID NO: 4784190 - DNA, 25 bp, Homo sapien
caaacgttctggtatttggagtcgc

SEQ ID NO: 4784191 - DNA, 25 bp, Homo sapien
tttggagtcgcgatgcacaacttca

SEQ ID NO: 4784192 - DNA, 25 bp, Homo sapien
aacgttctggtatttggagtcgcga

SEQ ID NO: 4784193 - DNA, 25 bp, Homo sapien
tctggtatttggagtcgcgatgcac

SEQ ID NO: 4784194 - DNA, 25 bp, Homo sapien
gacctccctggatatgtctatcaca

SEQ ID NO: 4784195 - DNA, 25 bp, Homo sapien
acctccctggatatgtctatcacag

SEQ ID NO: 4784196 - DNA, 25 bp, Homo sapien
ctatcacagttgtgatgcatttact

SEQ ID NO: 4784197 - DNA, 25 bp, Homo sapien
ctccctggatatgtctatcacagtt

SEQ ID NO: 4784198 - DNA, 25 bp, Homo sapien
aacttcctgggccttcatcattatc

SEQ ID NO: 4784199 - DNA, 25 bp, Homo sapien
agaatcagcatctgagtacttcttc

SEQ ID NO: 4784200 - DNA, 25 bp, Homo sapien
gaatcagcatctgagtacttcttcc

SEQ ID NO: 4784201 - DNA, 25 bp, Homo sapien
ttcctagtaacttcctgggccttca

SEQ ID NO: 4784202 - DNA, 25 bp, Homo sapien
tgaatagctttatgggctccttctc

SEQ ID NO: 4784203 - DNA, 25 bp, Homo sapien
tccttctcacagctgtcattgttct

SEQ ID NO: 4784204 - DNA, 25 bp, Homo sapien
gctgtcattgttctgacaaagtgat

SEQ ID NO: 4784205 - DNA, 25 bp, Homo sapien
gaatagctttatgggctccttctca

SEQ ID NO: 4784206 - DNA, 25 bp, Homo sapien
gacggtaaactctgatctcctggaa

SEQ ID NO: 4784207 - DNA, 25 bp, Homo sapien
catatttccgagtccttctggttgc

SEQ ID NO: 4784208 - DNA, 25 bp, Homo sapien
gacaacactgaagtgctcaaaccag

SEQ ID NO: 4784209 - DNA, 25 bp, Homo sapien
tactccaggggacggtaaactctga

SEQ ID NO: 4784210 - DNA, 25 bp, Homo sapien
tcaaggacctcgtggaatacactcc

SEQ ID NO: 4784211 - DNA, 25 bp, Homo sapien
ggaatacactccaactttcgatgaa

SEQ ID NO: 4784212 - DNA, 25 bp, Homo sapien
gtggaatacactccaactttcgatg

SEQ ID NO: 4784213 - DNA, 25 bp, Homo sapien
tacactccaactttcgatgaatagt

SEQ ID NO: 4784214 - DNA, 25 bp, Homo sapien
tgtttcccttcaggtttcatcagca

SEQ ID NO: 4784215 - DNA, 25 bp, Homo sapien
tgatagtggtttgatatgtaatgtt

SEQ ID NO: 4784216 - DNA, 25 bp, Homo sapien
gttgatagtggtttgatatgtaatg

SEQ ID NO: 4784217 - DNA, 25 bp, Homo sapien
ttaatgttgatagtggtttgatatg

SEQ ID NO: 4784218 - DNA, 25 bp, Homo sapien
aatgttgatagtggtttgatatgta

SEQ ID NO: 4784219 - DNA, 25 bp, Homo sapien
aaccaaggtccttagcagctatgta

SEQ ID NO: 4784220 - DNA, 25 bp, Homo sapien
tgcaagcacacatagaaaagtacca

SEQ ID NO: 4784221 - DNA, 25 bp, Homo sapien
tagtttgcagtaggaaaccaaggtc

SEQ ID NO: 4784222 - DNA, 25 bp, Homo sapien
taccaaggcagcttaagttatcact

SEQ ID NO: 4784223 - DNA, 25 bp, Homo sapien
ccgctgatgggaaagggttaggcct

SEQ ID NO: 4784224 - DNA, 25 bp, Homo sapien
gggattcttcagttagctccgctga

SEQ ID NO: 4784225 - DNA, 25 bp, Homo sapien
attcttcagttagctccgctgatgg

SEQ ID NO: 4784226 - DNA, 25 bp, Homo sapien
cagggattcttcagttagctccgct

SEQ ID NO: 4784227 - DNA, 25 bp, Homo sapien
gatccttcaggttctagctgtcttc

SEQ ID NO: 4784228 - DNA, 25 bp, Homo sapien
tttgggcagtctaccaccgtggctg

SEQ ID NO: 4784229 - DNA, 25 bp, Homo sapien
tttgctacgcgatgaatccactttc

SEQ ID NO: 4784230 - DNA, 25 bp, Homo sapien
ccacaccttttgctacgcgatgaat

SEQ ID NO: 4784231 - DNA, 25 bp, Homo sapien
aaatgacccattgccaggagtaggg

SEQ ID NO: 4784232 - DNA, 25 bp, Homo sapien
cctctaagctcaaatgacccattgc

SEQ ID NO: 4784233 - DNA, 25 bp, Homo sapien
ttcacttctaccaagctgatagagc

SEQ ID NO: 4784234 - DNA, 25 bp, Homo sapien
acttctaccaagctgatagagctgg

SEQ ID NO: 4784235 - DNA, 25 bp, Homo sapien
caagcagatgttccctgttgggcat

SEQ ID NO: 4784236 - DNA, 25 bp, Homo sapien
aaagggagttccaagcagatgttcc

SEQ ID NO: 4784237 - DNA, 25 bp, Homo sapien
ttatttcaaaggcatccaaactcat

SEQ ID NO: 4784238 - DNA, 25 bp, Homo sapien
gagaggctctaagaggtcattatca

SEQ ID NO: 4784239 - DNA, 25 bp, Homo sapien
tgacaaccacaaggggaatcagtct

SEQ ID NO: 4784240 - DNA, 25 bp, Homo sapien
gaggtcattatcaactgcttctggc

SEQ ID NO: 4784241 - DNA, 25 bp, Homo sapien
ccacaaggggaatcagtcttaaaat

SEQ ID NO: 4784242 - DNA, 25 bp, Homo sapien
agggggattcaaactatcataggct

SEQ ID NO: 4784243 - DNA, 25 bp, Homo sapien
ggagggggattcaaactatcatagg

SEQ ID NO: 4784244 - DNA, 25 bp, Homo sapien
aagtggagggggattcaaactatca

SEQ ID NO: 4784245 - DNA, 25 bp, Homo sapien
gtggagggggattcaaactatcata

SEQ ID NO: 4784246 - DNA, 25 bp, Homo sapien
tagacaagatgccactggacaaacc

SEQ ID NO: 4784247 - DNA, 25 bp, Homo sapien
atgtggttggtgttgtgcatcagaa

SEQ ID NO: 4784248 - DNA, 25 bp, Homo sapien
gttggtgttgtgcatcagaatagac

SEQ ID NO: 4784249 - DNA, 25 bp, Homo sapien
tgtgcatcagaatagacaagatgcc

SEQ ID NO: 4784250 - DNA, 25 bp, Homo sapien
ctgcctgatgctctcaatgtcatca

SEQ ID NO: 4784251 - DNA, 25 bp, Homo sapien
gatgctctcaatgtcatcagttaaa

SEQ ID NO: 4784252 - DNA, 25 bp, Homo sapien
gcctgatgctctcaatgtcatcagt

SEQ ID NO: 4784253 - DNA, 25 bp, Homo sapien
ctgatgctctcaatgtcatcagtta

SEQ ID NO: 4784254 - DNA, 25 bp, Homo sapien
tttcattcttcaactgtgtctgaaa

SEQ ID NO: 4784255 - DNA, 25 bp, Homo sapien
tcaggtggccaattgtctcatcagc

SEQ ID NO: 4784256 - DNA, 25 bp, Homo sapien
caagcgtctggtgaaatgggtcatc

SEQ ID NO: 4784257 - DNA, 25 bp, Homo sapien
tgaagactcataggtacccctaggg

SEQ ID NO: 4784258 - DNA, 25 bp, Homo sapien
cagaagttgttctacggcactgggc

SEQ ID NO: 4784259 - DNA, 25 bp, Homo sapien
agacttggagacatgatcttcatca

SEQ ID NO: 4784260 - DNA, 25 bp, Homo sapien
tgcatgagtgttttcccgaagaagt

SEQ ID NO: 4784261 - DNA, 25 bp, Homo sapien
ccacaggagattgggagagaatact

SEQ ID NO: 4784262 - DNA, 25 bp, Homo sapien
tactggcaacggcagaaaagacttg

SEQ ID NO: 4784263 - DNA, 25 bp, Homo sapien
gacagagccagaaggtgctatccac

SEQ ID NO: 4784264 - DNA, 25 bp, Homo sapien
gaactgacggttttagcaagtggca

SEQ ID NO: 4784265 - DNA, 25 bp, Homo sapien
gcacattcttctaaccacccaggag

SEQ ID NO: 4784266 - DNA, 25 bp, Homo sapien
tacaagtgaatagctgtggagccca

SEQ ID NO: 4784267 - DNA, 25 bp, Homo sapien
tctgggctcggaacagctctcggta

SEQ ID NO: 4784268 - DNA, 25 bp, Homo sapien
tgcctaacgcgaactagagggaccg

SEQ ID NO: 4784269 - DNA, 25 bp, Homo sapien
cttcagataaaaacgctccccgagg

SEQ ID NO: 4784270 - DNA, 25 bp, Homo sapien
gactacgatccctttccgacgtgga

SEQ ID NO: 4784271 - DNA, 25 bp, Homo sapien
atttgacccatccagctgccgtttg

SEQ ID NO: 4784272 - DNA, 25 bp, Homo sapien
taaagtcgatgggagcatctcagtg

SEQ ID NO: 4784273 - DNA, 25 bp, Homo sapien
tgtccggccatctgtttagaaatat

SEQ ID NO: 4784274 - DNA, 25 bp, Homo sapien
tttactattgtgctgtgtccggcca

SEQ ID NO: 4784275 - DNA, 25 bp, Homo sapien
caaactgttttggatggtctggagt

SEQ ID NO: 4784276 - DNA, 25 bp, Homo sapien
caggtgaacaaggactttgggtcta

SEQ ID NO: 4784277 - DNA, 25 bp, Homo sapien
taatgctatgcttgcaccaccagag

SEQ ID NO: 4784278 - DNA, 25 bp, Homo sapien
aataggtgacaaaggaggaataagc

SEQ ID NO: 4784279 - DNA, 25 bp, Homo sapien
taggtggccacaaatctgtatttca

SEQ ID NO: 4784280 - DNA, 25 bp, Homo sapien
cacaactgagctctataaaaccaaa

SEQ ID NO: 4784281 - DNA, 25 bp, Homo sapien
tccaaattttatcccagtgatgcca

SEQ ID NO: 4784282 - DNA, 25 bp, Homo sapien
tacagcacagtaatgtttaccacat

SEQ ID NO: 4784283 - DNA, 25 bp, Homo sapien
cctcacttcccagactatgggcggc

SEQ ID NO: 4784284 - DNA, 25 bp, Homo sapien
tcacttcccagactatgggcggctg

SEQ ID NO: 4784285 - DNA, 25 bp, Homo sapien
tatgggcggctgggcagaggtgctc

SEQ ID NO: 4784286 - DNA, 25 bp, Homo sapien
acttcccagactatgggcggctggg

SEQ ID NO: 4784287 - DNA, 25 bp, Homo sapien
gctggtctggggcattagtgtctgc

SEQ ID NO: 4784288 - DNA, 25 bp, Homo sapien
aaatgtctaattgctttgggttcca

SEQ ID NO: 4784289 - DNA, 25 bp, Homo sapien
tggtctggggcattagtgtctgcct

SEQ ID NO: 4784290 - DNA, 25 bp, Homo sapien
aatgtctaattgctttgggttccag

SEQ ID NO: 4784291 - DNA, 25 bp, Homo sapien
gatccatgcttggtttgaagtcgct

SEQ ID NO: 4784292 - DNA, 25 bp, Homo sapien
gggcctgaaaacacgaagagagatt

SEQ ID NO: 4784293 - DNA, 25 bp, Homo sapien
gaagtcgctgttagtacactctgag

SEQ ID NO: 4784294 - DNA, 25 bp, Homo sapien
gattagtttaagtgtgacaaggcca

SEQ ID NO: 4784295 - DNA, 25 bp, Homo sapien
ttctgtactcttctttcctctgcat

SEQ ID NO: 4784296 - DNA, 25 bp, Homo sapien
tcttcattggttccctgttgcacag

SEQ ID NO: 4784297 - DNA, 25 bp, Homo sapien
ctttagcttcaatccattcctccat

SEQ ID NO: 4784298 - DNA, 25 bp, Homo sapien
tggttccctgttgcacagagaatcc

SEQ ID NO: 4784299 - DNA, 25 bp, Homo sapien
gttgcacagagaatcctttagcttc

SEQ ID NO: 4784300 - DNA, 25 bp, Homo sapien
tgacgatggcggtttcattgaaaag

SEQ ID NO: 4784301 - DNA, 25 bp, Homo sapien
catccttggcaagagcagaaagtaa

SEQ ID NO: 4784302 - DNA, 25 bp, Homo sapien
cacttttgctggacatgcttgatgg

SEQ ID NO: 4784303 - DNA, 25 bp, Homo sapien
gatggctttcgttcatacagttagc

SEQ ID NO: 4784304 - DNA, 25 bp, Homo sapien
tgagacccttgagatattgtttact

SEQ ID NO: 4784305 - DNA, 25 bp, Homo sapien
aaagcacaaatgcatggcaaacctg

SEQ ID NO: 4784306 - DNA, 25 bp, Homo sapien
atctgagagttggaaaaattccact

SEQ ID NO: 4784307 - DNA, 25 bp, Homo sapien
catttgactctgttccaaaagcaca

SEQ ID NO: 4784308 - DNA, 25 bp, Homo sapien
taggaatctgtagtagatgccatct

SEQ ID NO: 4784309 - DNA, 25 bp, Homo sapien
tgagggccaccagtttaggacgtcc

SEQ ID NO: 4784310 - DNA, 25 bp, Homo sapien
tttaggacgtccttgtgtgcaagaa

SEQ ID NO: 4784311 - DNA, 25 bp, Homo sapien
gccaccagtttaggacgtccttgtg

SEQ ID NO: 4784312 - DNA, 25 bp, Homo sapien
caagaaggtctacaggtggcttctt

SEQ ID NO: 4784313 - DNA, 25 bp, Homo sapien
ttacttcaataacagtccttttctg

SEQ ID NO: 4784314 - DNA, 25 bp, Homo sapien
ttctggtcatcccagattgtcgctt

SEQ ID NO: 4784315 - DNA, 25 bp, Homo sapien
tggtcatcccagattgtcgctttac

SEQ ID NO: 4784316 - DNA, 25 bp, Homo sapien
cttcaataacagtccttttctggtc

SEQ ID NO: 4784317 - DNA, 25 bp, Homo sapien
cattccatgtatacgcatccgtggt

SEQ ID NO: 4784318 - DNA, 25 bp, Homo sapien
caagctaaatagctactgtgaaata

SEQ ID NO: 4784319 - DNA, 25 bp, Homo sapien
tttccccactggccactaaagcaag

SEQ ID NO: 4784320 - DNA, 25 bp, Homo sapien
tcggcattatagattcggaatccag

SEQ ID NO: 4784321 - DNA, 25 bp, Homo sapien
caatttcctcttcctctaatctcat

SEQ ID NO: 4784322 - DNA, 25 bp, Homo sapien
tcctcaatttcctcttcctctaatc

SEQ ID NO: 4784323 - DNA, 25 bp, Homo sapien
tatctcctcaatttcctcttcctct

SEQ ID NO: 4784324 - DNA, 25 bp, Homo sapien
tcaatttcctcttcctctaatctca

SEQ ID NO: 4784325 - DNA, 25 bp, Homo sapien
ctggatcttagcacagatgtcctta

SEQ ID NO: 4784326 - DNA, 25 bp, Homo sapien
tcccaccggcagcatgataatctag

SEQ ID NO: 4784327 - DNA, 25 bp, Homo sapien
tagcacagatgtccttaattggttc

SEQ ID NO: 4784328 - DNA, 25 bp, Homo sapien
ttaattggttcccaccggcagcatg

SEQ ID NO: 4784329 - DNA, 25 bp, Homo sapien
tcattggtgtattgtgggtgtcccc

SEQ ID NO: 4784330 - DNA, 25 bp, Homo sapien
tggcacagaacatactctgcagtct

SEQ ID NO: 4784331 - DNA, 25 bp, Homo sapien
cagtctcaagatataggatgatttc

SEQ ID NO: 4784332 - DNA, 25 bp, Homo sapien
gggtgtccccacgaatcatcacaaa

SEQ ID NO: 4784333 - DNA, 25 bp, Homo sapien
caggacgctactgtttgggctttga

SEQ ID NO: 4784334 - DNA, 25 bp, Homo sapien
tctctcccaatgctgaagaaatcta

SEQ ID NO: 4784335 - DNA, 25 bp, Homo sapien
tattgtattatgcagagcaggctat

SEQ ID NO: 4784336 - DNA, 25 bp, Homo sapien
tgttctgcttcacgaagtctctcgg

SEQ ID NO: 4784337 - DNA, 25 bp, Homo sapien
gttgtgatgttctcgtatgtctttg

SEQ ID NO: 4784338 - DNA, 25 bp, Homo sapien
gatgttctcgtatgtctttgcggtc

SEQ ID NO: 4784339 - DNA, 25 bp, Homo sapien
gttctcgtatgtctttgcggtctct

SEQ ID NO: 4784340 - DNA, 25 bp, Homo sapien
tgtgatgttctcgtatgtctttgcg

SEQ ID NO: 4784341 - DNA, 25 bp, Homo sapien
tatcacgtatttaaccctggacttg

SEQ ID NO: 4784342 - DNA, 25 bp, Homo sapien
tcactagggccatgagatttgtagc

SEQ ID NO: 4784343 - DNA, 25 bp, Homo sapien
taccctgagacggtctaggttgagg

SEQ ID NO: 4784344 - DNA, 25 bp, Homo sapien
tgataggaaaaggtagacactgtcc

SEQ ID NO: 4784345 - DNA, 25 bp, Homo sapien
gccttacatctggtataggcagtag

SEQ ID NO: 4784346 - DNA, 25 bp, Homo sapien
ttagccttacatctggtataggcag

SEQ ID NO: 4784347 - DNA, 25 bp, Homo sapien
atctggtataggcagtaggaagcat

SEQ ID NO: 4784348 - DNA, 25 bp, Homo sapien
tacatctggtataggcagtaggaag

SEQ ID NO: 4784349 - DNA, 25 bp, Homo sapien
gccttatagtgatagtatgcaagcc

SEQ ID NO: 4784350 - DNA, 25 bp, Homo sapien
cagaattaaccaggtcttcccttga

SEQ ID NO: 4784351 - DNA, 25 bp, Homo sapien
ccttcctgactcactaaacattggg

SEQ ID NO: 4784352 - DNA, 25 bp, Homo sapien
tatgcaagccacctaaaatgccact

SEQ ID NO: 4784353 - DNA, 25 bp, Homo sapien
tgtctacagcatcaacaattgtaca

SEQ ID NO: 4784354 - DNA, 25 bp, Homo sapien
tatgtctacagcatcaacaattgta

SEQ ID NO: 4784355 - DNA, 25 bp, Homo sapien
tgatatgtctacagcatcaacaatt

SEQ ID NO: 4784356 - DNA, 25 bp, Homo sapien
tctacagcatcaacaattgtacata

SEQ ID NO: 4784357 - DNA, 25 bp, Homo sapien
cttcagagcgactgctactatgctt

SEQ ID NO: 4784358 - DNA, 25 bp, Homo sapien
ttcagagcgactgctactatgcttc

SEQ ID NO: 4784359 - DNA, 25 bp, Homo sapien
tcagagcgactgctactatgcttcc

SEQ ID NO: 4784360 - DNA, 25 bp, Homo sapien
aatctcacgcattttgcaggttctc

SEQ ID NO: 4784361 - DNA, 25 bp, Homo sapien
tctcagtcacagtctggtggtttat

SEQ ID NO: 4784362 - DNA, 25 bp, Homo sapien
caggttctcttagtagatctgttcc

SEQ ID NO: 4784363 - DNA, 25 bp, Homo sapien
gaatgagcaactggacagttctcag

SEQ ID NO: 4784364 - DNA, 25 bp, Homo sapien
aggagccttgtaggcttaggctttt

SEQ ID NO: 4784365 - DNA, 25 bp, Homo sapien
gccttgtaggcttaggcttttgggc

SEQ ID NO: 4784366 - DNA, 25 bp, Homo sapien
catcgtgaagaaggagccttgtagg

SEQ ID NO: 4784367 - DNA, 25 bp, Homo sapien
ctcatcgtgaagaaggagccttgta

SEQ ID NO: 4784368 - DNA, 25 bp, Homo sapien
tagaacgattgctggcagtatctga

SEQ ID NO: 4784369 - DNA, 25 bp, Homo sapien
tgtttctagccagccaataatcagc

SEQ ID NO: 4784370 - DNA, 25 bp, Homo sapien
tcattctataggaactcatcaagga

SEQ ID NO: 4784371 - DNA, 25 bp, Homo sapien
tcatcaaggaaaagctagaacgatt

SEQ ID NO: 4784372 - DNA, 25 bp, Homo sapien
ctgtttagaactttgagtcttaggt

SEQ ID NO: 4784373 - DNA, 25 bp, Homo sapien
taattataatagtatacgccatgac

SEQ ID NO: 4784374 - DNA, 25 bp, Homo sapien
gagtcttaggttccttaacataata

SEQ ID NO: 4784375 - DNA, 25 bp, Homo sapien
ccatgacattgttaaaggtatcaga

SEQ ID NO: 4784376 - DNA, 25 bp, Homo sapien
tgctccccgttccaacactagagaa

SEQ ID NO: 4784377 - DNA, 25 bp, Homo sapien
tttgctccccgttccaacactagag

SEQ ID NO: 4784378 - DNA, 25 bp, Homo sapien
gttccaacactagagaattcattcc

SEQ ID NO: 4784379 - DNA, 25 bp, Homo sapien
tccccgttccaacactagagaattc

SEQ ID NO: 4784380 - DNA, 25 bp, Homo sapien
ctcctctctgtagccaggatcatct

SEQ ID NO: 4784381 - DNA, 25 bp, Homo sapien
ttttcaacaattgtattaccaattg

SEQ ID NO: 4784382 - DNA, 25 bp, Homo sapien
ggaacagcaatttcttttcaacaat

SEQ ID NO: 4784383 - DNA, 25 bp, Homo sapien
ccttgataactatggaacagcaatt

SEQ ID NO: 4784384 - DNA, 25 bp, Homo sapien
tccaatttacccttgataactatgg

SEQ ID NO: 4784385 - DNA, 25 bp, Homo sapien
gccaatagcaatcaatttgactggg

SEQ ID NO: 4784386 - DNA, 25 bp, Homo sapien
tcatgtagcttggctgccaatagca

SEQ ID NO: 4784387 - DNA, 25 bp, Homo sapien
tgtagcttggctgccaatagcaatc

SEQ ID NO: 4784388 - DNA, 25 bp, Homo sapien
ctgccaatagcaatcaatttgactg

SEQ ID NO: 4784389 - DNA, 25 bp, Homo sapien
atccaatgaaccccaccccacagtt

SEQ ID NO: 4784390 - DNA, 25 bp, Homo sapien
cattttgatgcctatcaaaatccaa

SEQ ID NO: 4784391 - DNA, 25 bp, Homo sapien
caggtcattttgatgcctatcaaaa

SEQ ID NO: 4784392 - DNA, 25 bp, Homo sapien
tcaaaatccaatgaaccccacccca

SEQ ID NO: 4784393 - DNA, 25 bp, Homo sapien
gtccagcccacttttattttctctc

SEQ ID NO: 4784394 - DNA, 25 bp, Homo sapien
tccaaaagagtccagcccactttta

SEQ ID NO: 4784395 - DNA, 25 bp, Homo sapien
ttctgggttccaaaagagtccagcc

SEQ ID NO: 4784396 - DNA, 25 bp, Homo sapien
tttctgggttccaaaagagtccagc

SEQ ID NO: 4784397 - DNA, 25 bp, Homo sapien
tttatttgcgttgcatccttcatgc

SEQ ID NO: 4784398 - DNA, 25 bp, Homo sapien
ccattatggcagttggaagcagcat

SEQ ID NO: 4784399 - DNA, 25 bp, Homo sapien
gcatccttcatgcaaacggtatcca

SEQ ID NO: 4784400 - DNA, 25 bp, Homo sapien
gaagcagcataatttatttgcgttg

SEQ ID NO: 4784401 - DNA, 25 bp, Homo sapien
ttttgatgaagtttgtggccccacc

SEQ ID NO: 4784402 - DNA, 25 bp, Homo sapien
acttccagacgccttggctttgctc

SEQ ID NO: 4784403 - DNA, 25 bp, Homo sapien
gcttcacactgcaaaccgccttttg

SEQ ID NO: 4784404 - DNA, 25 bp, Homo sapien
ccaatataggccttcgtctgacgat

SEQ ID NO: 4784405 - DNA, 25 bp, Homo sapien
tcaacttgagtaacagcccttcttc

SEQ ID NO: 4784406 - DNA, 25 bp, Homo sapien
tcccctctagaaaatttgcagctct

SEQ ID NO: 4784407 - DNA, 25 bp, Homo sapien
cttcaacttgagtaacagcccttct

SEQ ID NO: 4784408 - DNA, 25 bp, Homo sapien
tcttggttcaacactctttcccctc

SEQ ID NO: 4784409 - DNA, 25 bp, Homo sapien
ccaagatgcttgctatgatcagaac

SEQ ID NO: 4784410 - DNA, 25 bp, Homo sapien
tgtgaagacgagaatccaagatgct

SEQ ID NO: 4784411 - DNA, 25 bp, Homo sapien
caatatttgacactgctagggtaac

SEQ ID NO: 4784412 - DNA, 25 bp, Homo sapien
catcatgccaaggaggaaacattct

SEQ ID NO: 4784413 - DNA, 25 bp, Homo sapien
gccaaaggaagacccaatgtataat

SEQ ID NO: 4784414 - DNA, 25 bp, Homo sapien
caaaggaagacccaatgtataatat

SEQ ID NO: 4784415 - DNA, 25 bp, Homo sapien
ccaaaggaagacccaatgtataata

SEQ ID NO: 4784416 - DNA, 25 bp, Homo sapien
cagctttcaggatgccaaaggaaga

SEQ ID NO: 4784417 - DNA, 25 bp, Homo sapien
ttagtgaattggttttttgttcagc

SEQ ID NO: 4784418 - DNA, 25 bp, Homo sapien
gtgaattggttttttgttcagcaaa

SEQ ID NO: 4784419 - DNA, 25 bp, Homo sapien
agtgaattggttttttgttcagcaa

SEQ ID NO: 4784420 - DNA, 25 bp, Homo sapien
tgaattggttttttgttcagcaaat

SEQ ID NO: 4784421 - DNA, 25 bp, Homo sapien
taagctcaccaatgttgagggaaca

SEQ ID NO: 4784422 - DNA, 25 bp, Homo sapien
caggtcttgagacttcggtttcgca

SEQ ID NO: 4784423 - DNA, 25 bp, Homo sapien
tacgccaccttgctcaggatgatgg

SEQ ID NO: 4784424 - DNA, 25 bp, Homo sapien
tgaatttattccaccggacagccag

SEQ ID NO: 4784425 - DNA, 25 bp, Homo sapien
caaacagtacaaattaactgaacaa

SEQ ID NO: 4784426 - DNA, 25 bp, Homo sapien
tgaaatgtatttactgccaagaaac

SEQ ID NO: 4784427 - DNA, 25 bp, Homo sapien
aacatgaaatgtatttactgccaag

SEQ ID NO: 4784428 - DNA, 25 bp, Homo sapien
gatctaacatgaaatgtatttactg

SEQ ID NO: 4784429 - DNA, 25 bp, Homo sapien
tgcagatacataaccactactatac

SEQ ID NO: 4784430 - DNA, 25 bp, Homo sapien
tataccccagtagaccagactgagt

SEQ ID NO: 4784431 - DNA, 25 bp, Homo sapien
cctcaaagaggtcatatgcagatac

SEQ ID NO: 4784432 - DNA, 25 bp, Homo sapien
tcaaaagatgctcaaccacacaggg

SEQ ID NO: 4784433 - DNA, 25 bp, Homo sapien
tttcttctcagtaggtgttttactg

SEQ ID NO: 4784434 - DNA, 25 bp, Homo sapien
tctcagtaggtgttttactgcctcc

SEQ ID NO: 4784435 - DNA, 25 bp, Homo sapien
tcttctcagtaggtgttttactgcc

SEQ ID NO: 4784436 - DNA, 25 bp, Homo sapien
tcagtaggtgttttactgcctcctt

SEQ ID NO: 4784437 - DNA, 25 bp, Homo sapien
gattaaaggattcatcatgggagtc

SEQ ID NO: 4784438 - DNA, 25 bp, Homo sapien
ccttgtttctaagactgtagattaa

SEQ ID NO: 4784439 - DNA, 25 bp, Homo sapien
tgtttctaagactgtagattaaagg

SEQ ID NO: 4784440 - DNA, 25 bp, Homo sapien
tctaagactgtagattaaaggattc

SEQ ID NO: 4784441 - DNA, 25 bp, Homo sapien
tgttatcaccacagtcagacgagct

SEQ ID NO: 4784442 - DNA, 25 bp, Homo sapien
taacaaaggtgtcaataggaacaat

SEQ ID NO: 4784443 - DNA, 25 bp, Homo sapien
gtcacaagcaggatgaactcattgc

SEQ ID NO: 4784444 - DNA, 25 bp, Homo sapien
tgaggaagatggtcccacagaatgt

SEQ ID NO: 4784445 - DNA, 25 bp, Homo sapien
agctgccatgggtacataggcatcc

SEQ ID NO: 4784446 - DNA, 25 bp, Homo sapien
cagctgccatgggtacataggcatc

SEQ ID NO: 4784447 - DNA, 25 bp, Homo sapien
catccttactcatgatgatgggata

SEQ ID NO: 4784448 - DNA, 25 bp, Homo sapien
ggtacataggcatccttactcatga

SEQ ID NO: 4784449 - DNA, 25 bp, Homo sapien
cagaagcacacactctgttgtcccc

SEQ ID NO: 4784450 - DNA, 25 bp, Homo sapien
cacgcccagaagcacacactctgtt

SEQ ID NO: 4784451 - DNA, 25 bp, Homo sapien
gaagcacacactctgttgtccccat

SEQ ID NO: 4784452 - DNA, 25 bp, Homo sapien
cgcccagaagcacacactctgttgt

SEQ ID NO: 4784453 - DNA, 25 bp, Homo sapien
agctcactagcgtggagggaataga

SEQ ID NO: 4784454 - DNA, 25 bp, Homo sapien
tctgcactgcacagccagaaaggga

SEQ ID NO: 4784455 - DNA, 25 bp, Homo sapien
ggccaagctgaggaacatctgcact

SEQ ID NO: 4784456 - DNA, 25 bp, Homo sapien
ttctgaaaggaagctcactagcgtg

SEQ ID NO: 4784457 - DNA, 25 bp, Homo sapien
aatgagagtaccattccccagaagg

SEQ ID NO: 4784458 - DNA, 25 bp, Homo sapien
gagagtaccattccccagaaggatg

SEQ ID NO: 4784459 - DNA, 25 bp, Homo sapien
tgagagtaccattccccagaaggat

SEQ ID NO: 4784460 - DNA, 25 bp, Homo sapien
aaatgagagtaccattccccagaag

SEQ ID NO: 4784461 - DNA, 25 bp, Homo sapien
tccaccagaatggtgtggttttccc

SEQ ID NO: 4784462 - DNA, 25 bp, Homo sapien
tatgaagatgagcacaaaaaagagt

SEQ ID NO: 4784463 - DNA, 25 bp, Homo sapien
tgaccagaaagtcccttcagaaaaa

SEQ ID NO: 4784464 - DNA, 25 bp, Homo sapien
aaaagagtaactcaagtcttgggtg

SEQ ID NO: 4784465 - DNA, 25 bp, Homo sapien
cagtaggtgttttactgcctctttc

SEQ ID NO: 4784466 - DNA, 25 bp, Homo sapien
tcagtaggtgttttactgcctcttt

SEQ ID NO: 4784467 - DNA, 25 bp, Homo sapien
ctaaagaaccttctgttcagtaggt

SEQ ID NO: 4784468 - DNA, 25 bp, Homo sapien
ttgctaaagaaccttctgttcagta

SEQ ID NO: 4784469 - DNA, 25 bp, Homo sapien
gcaattgtaccacaaacactgattg

SEQ ID NO: 4784470 - DNA, 25 bp, Homo sapien
gattaacgtgtaagagacaatgatt

SEQ ID NO: 4784471 - DNA, 25 bp, Homo sapien
aaggcaattgtaccacaaacactga

SEQ ID NO: 4784472 - DNA, 25 bp, Homo sapien
aagagctaattttgaagatgctcac

SEQ ID NO: 4784473 - DNA, 25 bp, Homo sapien
ttctgaaaggaagctcactagcgtg

SEQ ID NO: 4784474 - DNA, 25 bp, Homo sapien
agctcactagcgtggagggaataga

SEQ ID NO: 4784475 - DNA, 25 bp, Homo sapien
ggccaagccgaggaacatctgcact

SEQ ID NO: 4784476 - DNA, 25 bp, Homo sapien
tctgcactgcacagccagaaaggga

SEQ ID NO: 4784477 - DNA, 25 bp, Homo sapien
ccaagatgctgattaaaatgagagt

SEQ ID NO: 4784478 - DNA, 25 bp, Homo sapien
gagagtaccattccccagaaggatg

SEQ ID NO: 4784479 - DNA, 25 bp, Homo sapien
aaatgagagtaccattccccagaag

SEQ ID NO: 4784480 - DNA, 25 bp, Homo sapien
tgagagtaccattccccagaaggat

SEQ ID NO: 4784481 - DNA, 25 bp, Homo sapien
tccaccagaatggtgtggttttccc

SEQ ID NO: 4784482 - DNA, 25 bp, Homo sapien
tatgaagatgagcacaaaaaagagt

SEQ ID NO: 4784483 - DNA, 25 bp, Homo sapien
tgaccagaaagtcccttcagaaaaa

SEQ ID NO: 4784484 - DNA, 25 bp, Homo sapien
aaaagagtaactcaagtcttgggtg

SEQ ID NO: 4784485 - DNA, 25 bp, Homo sapien
tggttcactcctgaacacacttcat

SEQ ID NO: 4784486 - DNA, 25 bp, Homo sapien
gaaggtggttcactcctgaacacac

SEQ ID NO: 4784487 - DNA, 25 bp, Homo sapien
ggtggttcactcctgaacacacttc

SEQ ID NO: 4784488 - DNA, 25 bp, Homo sapien
ctagaaggtggttcactcctgaaca

SEQ ID NO: 4784489 - DNA, 25 bp, Homo sapien
tgctaaagaaccttctgttcggtag

SEQ ID NO: 4784490 - DNA, 25 bp, Homo sapien
cttctgttcggtaggtgttttactg

SEQ ID NO: 4784491 - DNA, 25 bp, Homo sapien
ctgttcggtaggtgttttactgcct

SEQ ID NO: 4784492 - DNA, 25 bp, Homo sapien
cttgctaaagaaccttctgttcggt

SEQ ID NO: 4784493 - DNA, 25 bp, Homo sapien
gataactatcaagagcagtggcatc

SEQ ID NO: 4784494 - DNA, 25 bp, Homo sapien
catcaatgtgaacaatattgtggcc

SEQ ID NO: 4784495 - DNA, 25 bp, Homo sapien
cagagttgacaatccctgcaaacca

SEQ ID NO: 4784496 - DNA, 25 bp, Homo sapien
aaggcaattgtactacaaatgtagt

SEQ ID NO: 4784497 - DNA, 25 bp, Homo sapien
tgagagtaccattccccagaaggat

SEQ ID NO: 4784498 - DNA, 25 bp, Homo sapien
ccaagatgctgattaaaatgagagt

SEQ ID NO: 4784499 - DNA, 25 bp, Homo sapien
gagagtaccattccccagaaggatg

SEQ ID NO: 4784500 - DNA, 25 bp, Homo sapien
aaatgagagtaccattccccagaag

SEQ ID NO: 4784501 - DNA, 25 bp, Homo sapien
caagccttgggtgaacagaatgtcc

SEQ ID NO: 4784502 - DNA, 25 bp, Homo sapien
aagccttgggtgaacagaatgtccc

SEQ ID NO: 4784503 - DNA, 25 bp, Homo sapien
ctgttctgcggggtagtaatgctca

SEQ ID NO: 4784504 - DNA, 25 bp, Homo sapien
gagaaactggttgacctgttctgcg

SEQ ID NO: 4784505 - DNA, 25 bp, Homo sapien
tcagagaaactggttgacctgttct

SEQ ID NO: 4784506 - DNA, 25 bp, Homo sapien
tgctcatgctcaatcttatcatcta

SEQ ID NO: 4784507 - DNA, 25 bp, Homo sapien
gaatctctggagattagacttcaga

SEQ ID NO: 4784508 - DNA, 25 bp, Homo sapien
actttggaaccatggcatatgttac

SEQ ID NO: 4784509 - DNA, 25 bp, Homo sapien
gatgaaatgtttcaccctctaggga

SEQ ID NO: 4784510 - DNA, 25 bp, Homo sapien
gattctaattaaaagccagattggc

SEQ ID NO: 4784511 - DNA, 25 bp, Homo sapien
tctgcccatatgggatcagctggaa

SEQ ID NO: 4784512 - DNA, 25 bp, Homo sapien
cactgcagtctttgctatgagaaaa

SEQ ID NO: 4784513 - DNA, 25 bp, Homo sapien
cttctctgccgggaaaaggtaagca

SEQ ID NO: 4784514 - DNA, 25 bp, Homo sapien
tcaggctgactgcatagaaaaggga

SEQ ID NO: 4784515 - DNA, 25 bp, Homo sapien
aagcataggtgtcaccactccatag

SEQ ID NO: 4784516 - DNA, 25 bp, Homo sapien
tgtctgcaccagaagagtctttagc

SEQ ID NO: 4784517 - DNA, 25 bp, Homo sapien
gctttgcatacatgaaaaggatggt

SEQ ID NO: 4784518 - DNA, 25 bp, Homo sapien
gaacagggagatgattttgtctgtg

SEQ ID NO: 4784519 - DNA, 25 bp, Homo sapien
ctgttaggtgggcagagcaggtgga

SEQ ID NO: 4784520 - DNA, 25 bp, Homo sapien
gtggaggaggctttgtgccttcctt

SEQ ID NO: 4784521 - DNA, 25 bp, Homo sapien
aggtggaggaggctttgtgccttcc

SEQ ID NO: 4784522 - DNA, 25 bp, Homo sapien
gcagagcaggtggaggaggctttgt

SEQ ID NO: 4784523 - DNA, 25 bp, Homo sapien
cacagaaaggaagccgcattgcaag

SEQ ID NO: 4784524 - DNA, 25 bp, Homo sapien
gaccccgcagccatggacatgtatg

SEQ ID NO: 4784525 - DNA, 25 bp, Homo sapien
tatggagatattagcacaggccaat

SEQ ID NO: 4784526 - DNA, 25 bp, Homo sapien
taatgacgttatctccacagaaagg

SEQ ID NO: 4784527 - DNA, 25 bp, Homo sapien
agtcaaacgccatcatacttagaag

SEQ ID NO: 4784528 - DNA, 25 bp, Homo sapien
tcatacttagaaggacacactctgt

SEQ ID NO: 4784529 - DNA, 25 bp, Homo sapien
ctctgttgctcccatagcaaaagag

SEQ ID NO: 4784530 - DNA, 25 bp, Homo sapien
gacacactctgttgctcccatagca

SEQ ID NO: 4784531 - DNA, 25 bp, Homo sapien
gatgatgactccatttcccaacagg

SEQ ID NO: 4784532 - DNA, 25 bp, Homo sapien
gtgcaagtgggtgtcataaacactc

SEQ ID NO: 4784533 - DNA, 25 bp, Homo sapien
gtggaatagatgaactagtgtagca

SEQ ID NO: 4784534 - DNA, 25 bp, Homo sapien
ctttgacgttaagaagctgctgaga

SEQ ID NO: 4784535 - DNA, 25 bp, Homo sapien
cagcaggacaaattctgtcatgaaa

SEQ ID NO: 4784536 - DNA, 25 bp, Homo sapien
aaagactgattagagtttcccatgc

SEQ ID NO: 4784537 - DNA, 25 bp, Homo sapien
tagctctgggtagccagaaagcccc

SEQ ID NO: 4784538 - DNA, 25 bp, Homo sapien
tgtggatcttttacagcagtgtctg

SEQ ID NO: 4784539 - DNA, 25 bp, Homo sapien
tgatcttcctctcactgcatatttg

SEQ ID NO: 4784540 - DNA, 25 bp, Homo sapien
gaaaatacatattgccttcttcctg

SEQ ID NO: 4784541 - DNA, 25 bp, Homo sapien
ttcctctgctcgaacagctgttctg

SEQ ID NO: 4784542 - DNA, 25 bp, Homo sapien
gctcgaacagctgttctgctgatct

SEQ ID NO: 4784543 - DNA, 25 bp, Homo sapien
atggcattcagtccaagcctgattg

SEQ ID NO: 4784544 - DNA, 25 bp, Homo sapien
gcattcagtccaagcctgattgccc

SEQ ID NO: 4784545 - DNA, 25 bp, Homo sapien
ttcagtccaagcctgattgccccaa

SEQ ID NO: 4784546 - DNA, 25 bp, Homo sapien
tggcattcagtccaagcctgattgc

SEQ ID NO: 4784547 - DNA, 25 bp, Homo sapien
cagatctctgggcattactactcat

SEQ ID NO: 4784548 - DNA, 25 bp, Homo sapien
ccaaccacttgcaggcattggagag

SEQ ID NO: 4784549 - DNA, 25 bp, Homo sapien
ttggagagagtatgagacccagatc

SEQ ID NO: 4784550 - DNA, 25 bp, Homo sapien
agttccaaccacttgcaggcattgg

SEQ ID NO: 4784551 - DNA, 25 bp, Homo sapien
gcttacaactccaacaagggagcaa

SEQ ID NO: 4784552 - DNA, 25 bp, Homo sapien
gttgcttacaactccaacaagggag

SEQ ID NO: 4784553 - DNA, 25 bp, Homo sapien
aggttgcttacaactccaacaaggg

SEQ ID NO: 4784554 - DNA, 25 bp, Homo sapien
tacaactccaacaagggagcaaagc

SEQ ID NO: 4784555 - DNA, 25 bp, Homo sapien
tttctatactgaatgcttgtctgga

SEQ ID NO: 4784556 - DNA, 25 bp, Homo sapien
tctatactgaatgcttgtctggatt

SEQ ID NO: 4784557 - DNA, 25 bp, Homo sapien
tcagaaacgtagttttctatactga

SEQ ID NO: 4784558 - DNA, 25 bp, Homo sapien
agaaacgtagttttctatactgaat

SEQ ID NO: 4784559 - DNA, 25 bp, Homo sapien
cttcggagggaactagattccccag

SEQ ID NO: 4784560 - DNA, 25 bp, Homo sapien
cccagggcatgccagactgtataaa

SEQ ID NO: 4784561 - DNA, 25 bp, Homo sapien
tacattagtattcgcatttctcagg

SEQ ID NO: 4784562 - DNA, 25 bp, Homo sapien
cattgcatcatgaagatacctttga

SEQ ID NO: 4784563 - DNA, 25 bp, Homo sapien
gtatatatgcagttactgccctcac

SEQ ID NO: 4784564 - DNA, 25 bp, Homo sapien
agtatatatgcagttactgccctca

SEQ ID NO: 4784565 - DNA, 25 bp, Homo sapien
tgttgggcccacattggctccaccc

SEQ ID NO: 4784566 - DNA, 25 bp, Homo sapien
taactgttgggcccacattggctcc

SEQ ID NO: 4784567 - DNA, 25 bp, Homo sapien
actgttgggcccacattggctccac

SEQ ID NO: 4784568 - DNA, 25 bp, Homo sapien
ttgggcccacattggctccacccat

SEQ ID NO: 4784569 - DNA, 25 bp, Homo sapien
gtgatgcccaatactgagaaccgat

SEQ ID NO: 4784570 - DNA, 25 bp, Homo sapien
actgagaaccgatctatgatggagc

SEQ ID NO: 4784571 - DNA, 25 bp, Homo sapien
cccataggtgatgcccaatactgag

SEQ ID NO: 4784572 - DNA, 25 bp, Homo sapien
ttcttcccataggtgatgcccaata

SEQ ID NO: 4784573 - DNA, 25 bp, Homo sapien
cactatttcgatttaaagaatagga

SEQ ID NO: 4784574 - DNA, 25 bp, Homo sapien
ttgatatcactatttcgatttaaag

SEQ ID NO: 4784575 - DNA, 25 bp, Homo sapien
acctttttgatatcactatttcgat

SEQ ID NO: 4784576 - DNA, 25 bp, Homo sapien
gatatcactatttcgatttaaagaa

SEQ ID NO: 4784577 - DNA, 25 bp, Homo sapien
tcctggaatacacgatgaatgactc

SEQ ID NO: 4784578 - DNA, 25 bp, Homo sapien
tgaacctgactagggtggcaactga

SEQ ID NO: 4784579 - DNA, 25 bp, Homo sapien
gccacttgtagactcaaactctgga

SEQ ID NO: 4784580 - DNA, 25 bp, Homo sapien
taactgttattggaagtgcctcact

SEQ ID NO: 4784581 - DNA, 25 bp, Homo sapien
cagctttattttgtgactcattata

SEQ ID NO: 4784582 - DNA, 25 bp, Homo sapien
tgactcattatattacaacatagaa

SEQ ID NO: 4784583 - DNA, 25 bp, Homo sapien
aactgtcacagctttattttgtgac

SEQ ID NO: 4784584 - DNA, 25 bp, Homo sapien
catataaagttattgacatacaaaa

SEQ ID NO: 4784585 - DNA, 25 bp, Homo sapien
ggaatgagggccaatgatgaacaaa

SEQ ID NO: 4784586 - DNA, 25 bp, Homo sapien
gacagcgtaaagtgcttggaatgag

SEQ ID NO: 4784587 - DNA, 25 bp, Homo sapien
ttctcagatattccagtgcaaaaat

SEQ ID NO: 4784588 - DNA, 25 bp, Homo sapien
tcccattacagacagcgtaaagtgc

SEQ ID NO: 4784589 - DNA, 25 bp, Homo sapien
aagaattagagcaatatttctacag

SEQ ID NO: 4784590 - DNA, 25 bp, Homo sapien
caagggtacaaattaatgtctcaat

SEQ ID NO: 4784591 - DNA, 25 bp, Homo sapien
tttacctgatatatacaaccacaag

SEQ ID NO: 4784592 - DNA, 25 bp, Homo sapien
gggataatagcatacctaaatcctt

SEQ ID NO: 4784593 - DNA, 25 bp, Homo sapien
tgaggtgtcccaaagatgcaaaagc

SEQ ID NO: 4784594 - DNA, 25 bp, Homo sapien
tcacatggtgcaaaggaaagtctag

SEQ ID NO: 4784595 - DNA, 25 bp, Homo sapien
taaggatgaccctgtagacccatgg

SEQ ID NO: 4784596 - DNA, 25 bp, Homo sapien
tgtgtcaccgggaaaccagtctcct

SEQ ID NO: 4784597 - DNA, 25 bp, Homo sapien
agaggtcttttaagtggtcatcatc

SEQ ID NO: 4784598 - DNA, 25 bp, Homo sapien
gcaacgtccactactgtctggtttt

SEQ ID NO: 4784599 - DNA, 25 bp, Homo sapien
ctggtttttgtgtaatgagaggtct

SEQ ID NO: 4784600 - DNA, 25 bp, Homo sapien
aaaagatgtgagaactgcaacgtcc

SEQ ID NO: 4784601 - DNA, 25 bp, Homo sapien
ttataaataccactcaacttgctca

SEQ ID NO: 4784602 - DNA, 25 bp, Homo sapien
taagatggacctttataaataccac

SEQ ID NO: 4784603 - DNA, 25 bp, Homo sapien
taaaagattaagatggacctttata

SEQ ID NO: 4784604 - DNA, 25 bp, Homo sapien
taaataccactcaacttgctcattc

SEQ ID NO: 4784605 - DNA, 25 bp, Homo sapien
ttcaggtccgggttggaccctgcta

SEQ ID NO: 4784606 - DNA, 25 bp, Homo sapien
catgttccggtgtttctcttttaga

SEQ ID NO: 4784607 - DNA, 25 bp, Homo sapien
gaagctggtattgtagcatgttccg

SEQ ID NO: 4784608 - DNA, 25 bp, Homo sapien
gaccctgctattcgtacaactattg

SEQ ID NO: 4784609 - DNA, 25 bp, Homo sapien
tgtgccatgaaaaagggcggcccct

SEQ ID NO: 4784610 - DNA, 25 bp, Homo sapien
tgaggcccagggagttagtcacttg

SEQ ID NO: 4784611 - DNA, 25 bp, Homo sapien
ttggtagggccaggatgcaaaccca

SEQ ID NO: 4784612 - DNA, 25 bp, Homo sapien
gaatgcagttcggacttcaaagccc

SEQ ID NO: 4784613 - DNA, 25 bp, Homo sapien
ttttagatgctggacactgccaagg

SEQ ID NO: 4784614 - DNA, 25 bp, Homo sapien
ttagatgctggacactgccaaggca

SEQ ID NO: 4784615 - DNA, 25 bp, Homo sapien
ctattttttagatgctggacactgc

SEQ ID NO: 4784616 - DNA, 25 bp, Homo sapien
ttttttagatgctggacactgccaa

SEQ ID NO: 4784617 - DNA, 25 bp, Homo sapien
gccatcctagtgcaaagagcttcac

SEQ ID NO: 4784618 - DNA, 25 bp, Homo sapien
atgattgccatcctagtgcaaagag

SEQ ID NO: 4784619 - DNA, 25 bp, Homo sapien
gattgccatcctagtgcaaagagct

SEQ ID NO: 4784620 - DNA, 25 bp, Homo sapien
catcctagtgcaaagagcttcacat

SEQ ID NO: 4784621 - DNA, 25 bp, Homo sapien
acttagggcacaattccacaagaac

SEQ ID NO: 4784622 - DNA, 25 bp, Homo sapien
ctatgagatgtaagcactactgatc

SEQ ID NO: 4784623 - DNA, 25 bp, Homo sapien
ccgccgggctttgggatccatgcct

SEQ ID NO: 4784624 - DNA, 25 bp, Homo sapien
gatgtaagcactactgatctcccct

SEQ ID NO: 4784625 - DNA, 25 bp, Homo sapien
tagtatattgcaactgttagcctta

SEQ ID NO: 4784626 - DNA, 25 bp, Homo sapien
agtatattgcaactgttagccttac

SEQ ID NO: 4784627 - DNA, 25 bp, Homo sapien
aggtggaatacataaaagcctcaaa

SEQ ID NO: 4784628 - DNA, 25 bp, Homo sapien
gcctcaaaggcttcttcccgtaata

SEQ ID NO: 4784629 - DNA, 25 bp, Homo sapien
tcttcccgtaataacatcaatgctc

SEQ ID NO: 4784630 - DNA, 25 bp, Homo sapien
aacaaattccagaccgaggtggaat

SEQ ID NO: 4784631 - DNA, 25 bp, Homo sapien
actatgacctagttgctaccttggg

SEQ ID NO: 4784632 - DNA, 25 bp, Homo sapien
aggtcaagggccacttcccagtctg

SEQ ID NO: 4784633 - DNA, 25 bp, Homo sapien
ctgtttttcatctatccgtgtgtaa

SEQ ID NO: 4784634 - DNA, 25 bp, Homo sapien
tatccgtgtgtaaggaactatgacc

SEQ ID NO: 4784635 - DNA, 25 bp, Homo sapien
gagcttgcgtttgttgcctccacta

SEQ ID NO: 4784636 - DNA, 25 bp, Homo sapien
aggcccgccgatcaaagccatggct

SEQ ID NO: 4784637 - DNA, 25 bp, Homo sapien
tctccatacttcacgaggcccagtt

SEQ ID NO: 4784638 - DNA, 25 bp, Homo sapien
gcctccactatagttaccagcatat

SEQ ID NO: 4784639 - DNA, 25 bp, Homo sapien
ggcagtagcccatgttctgatgtac

SEQ ID NO: 4784640 - DNA, 25 bp, Homo sapien
tctgggactcctctcaaaagggcaa

SEQ ID NO: 4784641 - DNA, 25 bp, Homo sapien
tgtgatggcatcaaactgagggcag

SEQ ID NO: 4784642 - DNA, 25 bp, Homo sapien
tcccagtcaacagctctgtgatggc

SEQ ID NO: 4784643 - DNA, 25 bp, Homo sapien
taaggaaagcatctcctctggtaac

SEQ ID NO: 4784644 - DNA, 25 bp, Homo sapien
ctcctctggtaacagtggtatctcc

SEQ ID NO: 4784645 - DNA, 25 bp, Homo sapien
agttgatgattttccagccccatta

SEQ ID NO: 4784646 - DNA, 25 bp, Homo sapien
tggtatctcctgttaacatcttgaa

SEQ ID NO: 4784647 - DNA, 25 bp, Homo sapien
tgaaaaggaaagattaagttgtata

SEQ ID NO: 4784648 - DNA, 25 bp, Homo sapien
ctgaaaaggaaagattaagttgtat

SEQ ID NO: 4784649 - DNA, 25 bp, Homo sapien
caggcttccgcttccttctatatat

SEQ ID NO: 4784650 - DNA, 25 bp, Homo sapien
gtcaacagcaggcttccgcttcctt

SEQ ID NO: 4784651 - DNA, 25 bp, Homo sapien
ggaggaatgcccacgcaaatcctgt

SEQ ID NO: 4784652 - DNA, 25 bp, Homo sapien
ggaatgcccacgcaaatcctgtcaa

SEQ ID NO: 4784653 - DNA, 25 bp, Homo sapien
cattcagaggagatagctttgcatt

SEQ ID NO: 4784654 - DNA, 25 bp, Homo sapien
tttctaagatgtcattctggcctcc

SEQ ID NO: 4784655 - DNA, 25 bp, Homo sapien
tctttcccgcctcacatcttcatct

SEQ ID NO: 4784656 - DNA, 25 bp, Homo sapien
gaggagatagctttgcatttacagg

SEQ ID NO: 4784657 - DNA, 25 bp, Homo sapien
tgaagaatctgtactggatcagaac

SEQ ID NO: 4784658 - DNA, 25 bp, Homo sapien
cccttccacggccatggcgaagagg

SEQ ID NO: 4784659 - DNA, 25 bp, Homo sapien
aatggtgacacaaagcgattctccc

SEQ ID NO: 4784660 - DNA, 25 bp, Homo sapien
gccatggcgaagaggtttcgtccca

SEQ ID NO: 4784661 - DNA, 25 bp, Homo sapien
tatgaacagtaaataacatggccca

SEQ ID NO: 4784662 - DNA, 25 bp, Homo sapien
aaaaagcccctcttctatgaacagt

SEQ ID NO: 4784663 - DNA, 25 bp, Homo sapien
tgtagcccaagttgcaaaaagcccc

SEQ ID NO: 4784664 - DNA, 25 bp, Homo sapien
taataatcatatggctaccggagaa

SEQ ID NO: 4784665 - DNA, 25 bp, Homo sapien
tgagccagtggatccaagcaaatgc

SEQ ID NO: 4784666 - DNA, 25 bp, Homo sapien
taaccaacccagacagtggcatgag

SEQ ID NO: 4784667 - DNA, 25 bp, Homo sapien
ggaacatcctgtgcttagtcacctg

SEQ ID NO: 4784668 - DNA, 25 bp, Homo sapien
cacatgattcgcctaaaagagccaa

SEQ ID NO: 4784669 - DNA, 25 bp, Homo sapien
ttttcaccatgtcgatgagccctcg

SEQ ID NO: 4784670 - DNA, 25 bp, Homo sapien
gatcaagaacacggacttcaggata

SEQ ID NO: 4784671 - DNA, 25 bp, Homo sapien
caagaacacggacttcaggatatca

SEQ ID NO: 4784672 - DNA, 25 bp, Homo sapien
tttttcaccatgtcgatgagccctc

SEQ ID NO: 4784673 - DNA, 25 bp, Homo sapien
gggatcttgaacacaaaggaggctg

SEQ ID NO: 4784674 - DNA, 25 bp, Homo sapien
ggggatcttgaacacaaaggaggct

SEQ ID NO: 4784675 - DNA, 25 bp, Homo sapien
tggccacgctgccattaatgccaat

SEQ ID NO: 4784676 - DNA, 25 bp, Homo sapien
gtacatgagaggtgtgattgaccac

SEQ ID NO: 4784677 - DNA, 25 bp, Homo sapien
aagtagaagggctagcacaggcaga

SEQ ID NO: 4784678 - DNA, 25 bp, Homo sapien
gaagatgataatgaccagtgtggca

SEQ ID NO: 4784679 - DNA, 25 bp, Homo sapien
cacaggcagattggtggaggacaca

SEQ ID NO: 4784680 - DNA, 25 bp, Homo sapien
gtgtggcagggacaacgtaattgca

SEQ ID NO: 4784681 - DNA, 25 bp, Homo sapien
tctttagagtagctggaacatttcc

SEQ ID NO: 4784682 - DNA, 25 bp, Homo sapien
aacatttcctgatgatagccagagc

SEQ ID NO: 4784683 - DNA, 25 bp, Homo sapien
ttcttatccatatcaatccatggcc

SEQ ID NO: 4784684 - DNA, 25 bp, Homo sapien
tttcatacatctttagagtagctgg

SEQ ID NO: 4784685 - DNA, 25 bp, Homo sapien
atcagaaagatacagcaggcctgtg

SEQ ID NO: 4784686 - DNA, 25 bp, Homo sapien
cagaaagatacagcaggcctgtgtc

SEQ ID NO: 4784687 - DNA, 25 bp, Homo sapien
gaaagatacagcaggcctgtgtcct

SEQ ID NO: 4784688 - DNA, 25 bp, Homo sapien
agatacagcaggcctgtgtccttac

SEQ ID NO: 4784689 - DNA, 25 bp, Homo sapien
tcaggaatacgacaaagctggctgg

SEQ ID NO: 4784690 - DNA, 25 bp, Homo sapien
caaggacatccactgatgtggtcat

SEQ ID NO: 4784691 - DNA, 25 bp, Homo sapien
tagagagccagtagatgacaggctt

SEQ ID NO: 4784692 - DNA, 25 bp, Homo sapien
gatgacaggcttcactccactgatg

SEQ ID NO: 4784693 - DNA, 25 bp, Homo sapien
ctcccttttgcaggttggcccggag

SEQ ID NO: 4784694 - DNA, 25 bp, Homo sapien
ggttggcccggagaatggcattgtt

SEQ ID NO: 4784695 - DNA, 25 bp, Homo sapien
ctgattgcatgccagcccttgttat

SEQ ID NO: 4784696 - DNA, 25 bp, Homo sapien
attccataatggctagggttctctc

SEQ ID NO: 4784697 - DNA, 25 bp, Homo sapien
gctgttgagaaatcgatctgcagaa

SEQ ID NO: 4784698 - DNA, 25 bp, Homo sapien
tgagaaatcgatctgcagaactgtc

SEQ ID NO: 4784699 - DNA, 25 bp, Homo sapien
tgttgagaaatcgatctgcagaact

SEQ ID NO: 4784700 - DNA, 25 bp, Homo sapien
aagctgttgagaaatcgatctgcag

SEQ ID NO: 4784701 - DNA, 25 bp, Homo sapien
ttgatggcatcattaacttcttgac

SEQ ID NO: 4784702 - DNA, 25 bp, Homo sapien
gaagtgcttgagtattactgacacc

SEQ ID NO: 4784703 - DNA, 25 bp, Homo sapien
gtattactgacacccagggaaaagc

SEQ ID NO: 4784704 - DNA, 25 bp, Homo sapien
cttcttgactcggaggaagtgcttg

SEQ ID NO: 4784705 - DNA, 25 bp, Homo sapien
aagaacagcctgacattaaaaccca

SEQ ID NO: 4784706 - DNA, 25 bp, Homo sapien
ccagacagtggggtgcacagtatca

SEQ ID NO: 4784707 - DNA, 25 bp, Homo sapien
tgtacaaggttcactgagtcaaatt

SEQ ID NO: 4784708 - DNA, 25 bp, Homo sapien
cagcagactcagtgcgagtgtgtac

SEQ ID NO: 4784709 - DNA, 25 bp, Homo sapien
ccaacccagtggctcgtgtgtgaat

SEQ ID NO: 4784710 - DNA, 25 bp, Homo sapien
gttggcaatctcttaactcccatgg

SEQ ID NO: 4784711 - DNA, 25 bp, Homo sapien
gaggacctggcctgattacacacac

SEQ ID NO: 4784712 - DNA, 25 bp, Homo sapien
tgcactgtccagagtaggctgcgct

SEQ ID NO: 4784713 - DNA, 25 bp, Homo sapien
tcattcacccagatcttgttcttta

SEQ ID NO: 4784714 - DNA, 25 bp, Homo sapien
tgcacatacgtcttcaccagataat

SEQ ID NO: 4784715 - DNA, 25 bp, Homo sapien
ccagataatccgaaatgtttcttcc

SEQ ID NO: 4784716 - DNA, 25 bp, Homo sapien
tggctatgatctgcacatacgtctt

SEQ ID NO: 4784717 - DNA, 25 bp, Homo sapien
ggtcctgaaggatatctgcagtgtt

SEQ ID NO: 4784718 - DNA, 25 bp, Homo sapien
tcacatgaaaaccaagcatacgggt

SEQ ID NO: 4784719 - DNA, 25 bp, Homo sapien
caggtgaagggttctgcattgtcca

SEQ ID NO: 4784720 - DNA, 25 bp, Homo sapien
cactggcatgcaggtgaagggttct

SEQ ID NO: 4784721 - DNA, 25 bp, Homo sapien
tgtccagttcccattctggaagagg

SEQ ID NO: 4784722 - DNA, 25 bp, Homo sapien
tcttcttgattttgtcgctgctaca

SEQ ID NO: 4784723 - DNA, 25 bp, Homo sapien
gagttccagggttcccgtgtcctca

SEQ ID NO: 4784724 - DNA, 25 bp, Homo sapien
gtcccgaagccagggtctttggtga

SEQ ID NO: 4784725 - DNA, 25 bp, Homo sapien
ttggtgagggcgtttaagagttcca

SEQ ID NO: 4784726 - DNA, 25 bp, Homo sapien
tccttccatacagcgggtcccgaag

SEQ ID NO: 4784727 - DNA, 25 bp, Homo sapien
ggtacttgccaaagggtggcacgat

SEQ ID NO: 4784728 - DNA, 25 bp, Homo sapien
gatcaggctgaacacaagggcaatg

SEQ ID NO: 4784729 - DNA, 25 bp, Homo sapien
tgttcgttgtacatccagggctgaa

SEQ ID NO: 4784730 - DNA, 25 bp, Homo sapien
gacaaatgtgtactgttcgttgtac

SEQ ID NO: 4784731 - DNA, 25 bp, Homo sapien
agccagagtctctggcgaaaacagc

SEQ ID NO: 4784732 - DNA, 25 bp, Homo sapien
gagtctctggcgaaaacagcacgtc

SEQ ID NO: 4784733 - DNA, 25 bp, Homo sapien
agagtctctggcgaaaacagcacgt

SEQ ID NO: 4784734 - DNA, 25 bp, Homo sapien
tctctggcgaaaacagcacgtctca

SEQ ID NO: 4784735 - DNA, 25 bp, Homo sapien
tttcacctggtaggaccctttgcca

SEQ ID NO: 4784736 - DNA, 25 bp, Homo sapien
gctgtgtaagtttccagcctttcac

SEQ ID NO: 4784737 - DNA, 25 bp, Homo sapien
tgagcaaaaaatcctttccgactcc

SEQ ID NO: 4784738 - DNA, 25 bp, Homo sapien
tccgactccgtctggcaattagcag

SEQ ID NO: 4784739 - DNA, 25 bp, Homo sapien
cttctggtgtcttcaacaactatct

SEQ ID NO: 4784740 - DNA, 25 bp, Homo sapien
caacactgaaggtcacctattatct

SEQ ID NO: 4784741 - DNA, 25 bp, Homo sapien
ggtgttttcggcattgccatgctcc

SEQ ID NO: 4784742 - DNA, 25 bp, Homo sapien
caacaactatcttgaaggcatgtgt

SEQ ID NO: 4784743 - DNA, 25 bp, Homo sapien
tagggtacaattaactctaacagca

SEQ ID NO: 4784744 - DNA, 25 bp, Homo sapien
tcaggtttgatcacatgcacgatgc

SEQ ID NO: 4784745 - DNA, 25 bp, Homo sapien
catgggttcagaggattgaggcacc

SEQ ID NO: 4784746 - DNA, 25 bp, Homo sapien
tgtatacaagaaactaggaccccgc

SEQ ID NO: 4784747 - DNA, 25 bp, Homo sapien
acattcaaacagtaggacactgttt

SEQ ID NO: 4784748 - DNA, 25 bp, Homo sapien
tagggatctatcaccttggctaaag

SEQ ID NO: 4784749 - DNA, 25 bp, Homo sapien
tggctaaaggccatccaaagaaaac

SEQ ID NO: 4784750 - DNA, 25 bp, Homo sapien
gacactgtttgatcttgccctaaca

SEQ ID NO: 4784751 - DNA, 25 bp, Homo sapien
tcatcttcagtgaacgggcgaagac

SEQ ID NO: 4784752 - DNA, 25 bp, Homo sapien
ctgggtctatgtcagaatcatttgg

SEQ ID NO: 4784753 - DNA, 25 bp, Homo sapien
agacagctctgcttgtccccgaagg

SEQ ID NO: 4784754 - DNA, 25 bp, Homo sapien
gaaggcccgcctgtttcgtcttgct

SEQ ID NO: 4784755 - DNA, 25 bp, Homo sapien
tctcttcggccaccttgaggaatat

SEQ ID NO: 4784756 - DNA, 25 bp, Homo sapien
ccactctcttcggccaccttgagga

SEQ ID NO: 4784757 - DNA, 25 bp, Homo sapien
actctcttcggccaccttgaggaat

SEQ ID NO: 4784758 - DNA, 25 bp, Homo sapien
ctctcttcggccaccttgaggaata

SEQ ID NO: 4784759 - DNA, 25 bp, Homo sapien
tgagagccggtcatcaatctcatga

SEQ ID NO: 4784760 - DNA, 25 bp, Homo sapien
tatggcagcacataggtcagctcat

SEQ ID NO: 4784761 - DNA, 25 bp, Homo sapien
tccttagcagcttcatatggcagca

SEQ ID NO: 4784762 - DNA, 25 bp, Homo sapien
tcttccagggtcgtctctgagatgc

SEQ ID NO: 4784763 - DNA, 25 bp, Homo sapien
gcaaaccttgagtcagcgccaccag

SEQ ID NO: 4784764 - DNA, 25 bp, Homo sapien
agcaaaccttgagtcagcgccacca

SEQ ID NO: 4784765 - DNA, 25 bp, Homo sapien
tcagcgtgtcactctcatggtcgct

SEQ ID NO: 4784766 - DNA, 25 bp, Homo sapien
agcgtgtcactctcatggtcgctgc

SEQ ID NO: 4784767 - DNA, 25 bp, Homo sapien
ggtcagcgtgtcactctcatggtcg

SEQ ID NO: 4784768 - DNA, 25 bp, Homo sapien
gatggtcagcgtgtcactctcatgg

SEQ ID NO: 4784769 - DNA, 25 bp, Homo sapien
gaactgctctgagaaacactgtcct

SEQ ID NO: 4784770 - DNA, 25 bp, Homo sapien
atcagaactgctctgagaaacactg

SEQ ID NO: 4784771 - DNA, 25 bp, Homo sapien
aactgctctgagaaacactgtcctc

SEQ ID NO: 4784772 - DNA, 25 bp, Homo sapien
cagaactgctctgagaaacactgtc

SEQ ID NO: 4784773 - DNA, 25 bp, Homo sapien
gcttccaagaagctctgttgtgtga

SEQ ID NO: 4784774 - DNA, 25 bp, Homo sapien
gtgtgtgccgtgtgaacagcctcgc

SEQ ID NO: 4784775 - DNA, 25 bp, Homo sapien
gccgtggcttcagaggaccctgtct

SEQ ID NO: 4784776 - DNA, 25 bp, Homo sapien
gaccctgtctggcatgtgtgtgccg

SEQ ID NO: 4784777 - DNA, 25 bp, Homo sapien
cctggctacatgtctagttcaatgc

SEQ ID NO: 4784778 - DNA, 25 bp, Homo sapien
tgtgttcaaccactcaagaaccttg

SEQ ID NO: 4784779 - DNA, 25 bp, Homo sapien
catctcaggcaaggcctttacctgg

SEQ ID NO: 4784780 - DNA, 25 bp, Homo sapien
gaatgctgcaatgaggcctttgcca

SEQ ID NO: 4784781 - DNA, 25 bp, Homo sapien
tagtagcctgttcccagctggttct

SEQ ID NO: 4784782 - DNA, 25 bp, Homo sapien
tcttgaccaaggtcaggtagtagcc

SEQ ID NO: 4784783 - DNA, 25 bp, Homo sapien
cagtgctactactgtttctgcagga

SEQ ID NO: 4784784 - DNA, 25 bp, Homo sapien
caggaactgagggaggattccacat

SEQ ID NO: 4784785 - DNA, 25 bp, Homo sapien
tgtcccccaggacgtccgcttcatc

SEQ ID NO: 4784786 - DNA, 25 bp, Homo sapien
tcccccaggacgtccgcttcatcca

SEQ ID NO: 4784787 - DNA, 25 bp, Homo sapien
gtcccccaggacgtccgcttcatcc

SEQ ID NO: 4784788 - DNA, 25 bp, Homo sapien
ctgtcccccaggacgtccgcttcat

SEQ ID NO: 4784789 - DNA, 25 bp, Homo sapien
gtggtgtgtagagagaataatggtg

SEQ ID NO: 4784790 - DNA, 25 bp, Homo sapien
tggtgtgtagagagaataatggtgc

SEQ ID NO: 4784791 - DNA, 25 bp, Homo sapien
tgtgtagagagaataatggtgcggc

SEQ ID NO: 4784792 - DNA, 25 bp, Homo sapien
ggtgtgtagagagaataatggtgcg

SEQ ID NO: 4784793 - DNA, 25 bp, Homo sapien
ctgcgggagtaagggtccacaccag

SEQ ID NO: 4784794 - DNA, 25 bp, Homo sapien
gccaaggccacagatagctttctct

SEQ ID NO: 4784795 - DNA, 25 bp, Homo sapien
cttagatcccccgacaaaggccaag

SEQ ID NO: 4784796 - DNA, 25 bp, Homo sapien
atccagaatgacaaccttagatccc

SEQ ID NO: 4784797 - DNA, 25 bp, Homo sapien
tccgccttcacgtgcttctcagaga

SEQ ID NO: 4784798 - DNA, 25 bp, Homo sapien
tttcagcttgcttgatggcaaacca

SEQ ID NO: 4784799 - DNA, 25 bp, Homo sapien
ttcaagcgggcatagaaccagatgt

SEQ ID NO: 4784800 - DNA, 25 bp, Homo sapien
aaccagatgtgttcttcgacagtca

SEQ ID NO: 4784801 - DNA, 25 bp, Homo sapien
caaacagcacgttatgctggggaca

SEQ ID NO: 4784802 - DNA, 25 bp, Homo sapien
gaatgtcttttcccaggatgtaggc

SEQ ID NO: 4784803 - DNA, 25 bp, Homo sapien
acccccaggttctgccggatggtgc

SEQ ID NO: 4784804 - DNA, 25 bp, Homo sapien
ggtgctcatctcagagcgaatgtct

SEQ ID NO: 4784805 - DNA, 25 bp, Homo sapien
ccaggttctgaatggacacgcccag

SEQ ID NO: 4784806 - DNA, 25 bp, Homo sapien
ggtggtcgtcttccccgctccattg

SEQ ID NO: 4784807 - DNA, 25 bp, Homo sapien
cacgcccagcttcaagtgggtgggt

SEQ ID NO: 4784808 - DNA, 25 bp, Homo sapien
ccatctcggtagacttttaccaggt

SEQ ID NO: 4784809 - DNA, 25 bp, Homo sapien
cactttcctcgccaaaccagtagga

SEQ ID NO: 4784810 - DNA, 25 bp, Homo sapien
ttctggttggaaccagggtggctct

SEQ ID NO: 4784811 - DNA, 25 bp, Homo sapien
tctgatattctcttctggttggaac

SEQ ID NO: 4784812 - DNA, 25 bp, Homo sapien
ggacttggtgcaaggaaaataccag

SEQ ID NO: 4784813 - DNA, 25 bp, Homo sapien
acaaagaaaggacatcagctagaag

SEQ ID NO: 4784814 - DNA, 25 bp, Homo sapien
tattttccaaacagatgcccaaagc

SEQ ID NO: 4784815 - DNA, 25 bp, Homo sapien
ggacatcagctagaagtcatatttt

SEQ ID NO: 4784816 - DNA, 25 bp, Homo sapien
gtcatattttccaaacagatgccca

SEQ ID NO: 4784817 - DNA, 25 bp, Homo sapien
ggtgtcaaacagcatcatggagacc

SEQ ID NO: 4784818 - DNA, 25 bp, Homo sapien
tcatcaccccatagaggaaggtgtc

SEQ ID NO: 4784819 - DNA, 25 bp, Homo sapien
agcctcaatgtaccaggtcatcacc

SEQ ID NO: 4784820 - DNA, 25 bp, Homo sapien
tcatggagaccgaagtggtgagatt

SEQ ID NO: 4784821 - DNA, 25 bp, Homo sapien
cagggactccaaaggaaggtcaaat

SEQ ID NO: 4784822 - DNA, 25 bp, Homo sapien
ctgaagaaaggccagaggtactcac

SEQ ID NO: 4784823 - DNA, 25 bp, Homo sapien
ccactgaagaaaggccagaggtact

SEQ ID NO: 4784824 - DNA, 25 bp, Homo sapien
cactgaagaaaggccagaggtactc

SEQ ID NO: 4784825 - DNA, 25 bp, Homo sapien
agccactgaagaaaggccagaggta

SEQ ID NO: 4784826 - DNA, 25 bp, Homo sapien
cagcaaacacggacaggaagacaaa

SEQ ID NO: 4784827 - DNA, 25 bp, Homo sapien
tgcaggattgtcaccacagcaaaca

SEQ ID NO: 4784828 - DNA, 25 bp, Homo sapien
gtgtgaagcccacgtagtcctgcca

SEQ ID NO: 4784829 - DNA, 25 bp, Homo sapien
gaagagtgtgctaatcaggaagcac

SEQ ID NO: 4784830 - DNA, 25 bp, Homo sapien
tgaaccagctaaaccagaggatgct

SEQ ID NO: 4784831 - DNA, 25 bp, Homo sapien
ttcaggatgaccactagcaggccag

SEQ ID NO: 4784832 - DNA, 25 bp, Homo sapien
tgatccgcatggtctctttcagccg

SEQ ID NO: 4784833 - DNA, 25 bp, Homo sapien
ggaatgaggctactaatgaaccagc

SEQ ID NO: 4784834 - DNA, 25 bp, Homo sapien
tcagcaccctgatgattgcctgctc

SEQ ID NO: 4784835 - DNA, 25 bp, Homo sapien
cagttttcttctcggtgcccgtcag

SEQ ID NO: 4784836 - DNA, 25 bp, Homo sapien
ggcatctgttgcatatagacaccag

SEQ ID NO: 4784837 - DNA, 25 bp, Homo sapien
tgtcatcaacgtaacagggataggg

SEQ ID NO: 4784838 - DNA, 25 bp, Homo sapien
ttccagtgaacacaataccagccca

SEQ ID NO: 4784839 - DNA, 25 bp, Homo sapien
gacttctgttgctatgggttctagc

SEQ ID NO: 4784840 - DNA, 25 bp, Homo sapien
cggatcttgtacttgacatgatggg

SEQ ID NO: 4784841 - DNA, 25 bp, Homo sapien
gtccattcggatcttgtacttgaca

SEQ ID NO: 4784842 - DNA, 25 bp, Homo sapien
cctggttagtctcgttgaaagcttc

SEQ ID NO: 4784843 - DNA, 25 bp, Homo sapien
tccatgaagcgagatatggtccgga

SEQ ID NO: 4784844 - DNA, 25 bp, Homo sapien
agaaccattactggactggacatcc

SEQ ID NO: 4784845 - DNA, 25 bp, Homo sapien
caaaaacgccacgatgtcttgggct

SEQ ID NO: 4784846 - DNA, 25 bp, Homo sapien
tacaggtcatgatgcaaaggaggcc

SEQ ID NO: 4784847 - DNA, 25 bp, Homo sapien
gacccagtctgttgatcccacataa

SEQ ID NO: 4784848 - DNA, 25 bp, Homo sapien
ggttcctcacatgggtcaacacgaa

SEQ ID NO: 4784849 - DNA, 25 bp, Homo sapien
tcaacacgaaagagaaggacagatc

SEQ ID NO: 4784850 - DNA, 25 bp, Homo sapien
aatgagtatctcaggccagtctaca

SEQ ID NO: 4784851 - DNA, 25 bp, Homo sapien
gagaatgagtatctcaggccagtct

SEQ ID NO: 4784852 - DNA, 25 bp, Homo sapien
gccagtctacatgtaacatcatgct

SEQ ID NO: 4784853 - DNA, 25 bp, Homo sapien
tatctcaggccagtctacatgtaac

SEQ ID NO: 4784854 - DNA, 25 bp, Homo sapien
ggagatgctgtggctggctgagagg

SEQ ID NO: 4784855 - DNA, 25 bp, Homo sapien
caagacacagggagatgctgtggct

SEQ ID NO: 4784856 - DNA, 25 bp, Homo sapien
acagggagatgctgtggctggctga

SEQ ID NO: 4784857 - DNA, 25 bp, Homo sapien
agggagatgctgtggctggctgaga

SEQ ID NO: 4784858 - DNA, 25 bp, Homo sapien
ggtggtgccctgtgactttagctat

SEQ ID NO: 4784859 - DNA, 25 bp, Homo sapien
tgcaccatggcctgtacttctggag

SEQ ID NO: 4784860 - DNA, 25 bp, Homo sapien
aaactgctatttgaccgtgagtggc

SEQ ID NO: 4784861 - DNA, 25 bp, Homo sapien
gcacagcgttatctctgcaccatgg

SEQ ID NO: 4784862 - DNA, 25 bp, Homo sapien
caagcaggcacatggtaataatggg

SEQ ID NO: 4784863 - DNA, 25 bp, Homo sapien
tggtaataatgggagggacactcac

SEQ ID NO: 4784864 - DNA, 25 bp, Homo sapien
gtatcaagcaggcacatggtaataa

SEQ ID NO: 4784865 - DNA, 25 bp, Homo sapien
cacatggtaataatgggagggacac

SEQ ID NO: 4784866 - DNA, 25 bp, Homo sapien
catgaaggtccagatcttggggctg

SEQ ID NO: 4784867 - DNA, 25 bp, Homo sapien
atgaaggtccagatcttggggctga

SEQ ID NO: 4784868 - DNA, 25 bp, Homo sapien
ccggacaaggtccatttcttggctg

SEQ ID NO: 4784869 - DNA, 25 bp, Homo sapien
ctcccacatgccttccagatcatgg

SEQ ID NO: 4784870 - DNA, 25 bp, Homo sapien
ctatgattctatacccacgactggg

SEQ ID NO: 4784871 - DNA, 25 bp, Homo sapien
cactctgggaattccagaagagccg

SEQ ID NO: 4784872 - DNA, 25 bp, Homo sapien
tatacttagcgcacacctctgaagc

SEQ ID NO: 4784873 - DNA, 25 bp, Homo sapien
gaagcacagacaatgagcgtttggc

SEQ ID NO: 4784874 - DNA, 25 bp, Homo sapien
ttcagagctttccagataatgcggg

SEQ ID NO: 4784875 - DNA, 25 bp, Homo sapien
ctcagccatgacctgccttgtggct

SEQ ID NO: 4784876 - DNA, 25 bp, Homo sapien
tatacaggatcttcccaacgagcag

SEQ ID NO: 4784877 - DNA, 25 bp, Homo sapien
gcgggaaagaggactagactccaaa

SEQ ID NO: 4784878 - DNA, 25 bp, Homo sapien
ccactgcctaaaactgtgacattgg

SEQ ID NO: 4784879 - DNA, 25 bp, Homo sapien
ctgctgccacgaggcatacggcaca

SEQ ID NO: 4784880 - DNA, 25 bp, Homo sapien
ggttcccctgcatcaagttttcaag

SEQ ID NO: 4784881 - DNA, 25 bp, Homo sapien
gcatacggcacacgggcccacaaaa

SEQ ID NO: 4784882 - DNA, 25 bp, Homo sapien
gagagacttgatcttcagcccccct

SEQ ID NO: 4784883 - DNA, 25 bp, Homo sapien
tgcccgcagacaatacgagacacag

SEQ ID NO: 4784884 - DNA, 25 bp, Homo sapien
tccctcgggatgcccgcagacaata

SEQ ID NO: 4784885 - DNA, 25 bp, Homo sapien
tcgggatgcccgcagacaatacgag

SEQ ID NO: 4784886 - DNA, 25 bp, Homo sapien
gagctggagctgttcacattggtca

SEQ ID NO: 4784887 - DNA, 25 bp, Homo sapien
ctggagctgttcacattggtcagaa

SEQ ID NO: 4784888 - DNA, 25 bp, Homo sapien
aggagctggagctgttcacattggt

SEQ ID NO: 4784889 - DNA, 25 bp, Homo sapien
gagctgttcacattggtcagaaaca

SEQ ID NO: 4784890 - DNA, 25 bp, Homo sapien
tcagacaatgagtaacttttgatca

SEQ ID NO: 4784891 - DNA, 25 bp, Homo sapien
acttttgatcaaagggatctggagg

SEQ ID NO: 4784892 - DNA, 25 bp, Homo sapien
caatgagtaacttttgatcaaaggg

SEQ ID NO: 4784893 - DNA, 25 bp, Homo sapien
gtaacttttgatcaaagggatctgg

SEQ ID NO: 4784894 - DNA, 25 bp, Homo sapien
gaccaggagcaagcagggcacaaga

SEQ ID NO: 4784895 - DNA, 25 bp, Homo sapien
ccaggagcaagcagggcacaagaaa

SEQ ID NO: 4784896 - DNA, 25 bp, Homo sapien
caggagcaagcagggcacaagaaac

SEQ ID NO: 4784897 - DNA, 25 bp, Homo sapien
ctggaccaggagcaagcagggcaca

SEQ ID NO: 4784898 - DNA, 25 bp, Homo sapien
ctccttgctcgggaagggagatgta

SEQ ID NO: 4784899 - DNA, 25 bp, Homo sapien
cagccagctccttgctcgggaaggg

SEQ ID NO: 4784900 - DNA, 25 bp, Homo sapien
gccagagtcccaagactatgcagca

SEQ ID NO: 4784901 - DNA, 25 bp, Homo sapien
ccagagtcccaagactatgcagcaa

SEQ ID NO: 4784902 - DNA, 25 bp, Homo sapien
ttaaacgtcagactcagataggcct

SEQ ID NO: 4784903 - DNA, 25 bp, Homo sapien
tacgcggtctcccttaaacgtcaga

SEQ ID NO: 4784904 - DNA, 25 bp, Homo sapien
tcacagtcctcaaagggacctacgc

SEQ ID NO: 4784905 - DNA, 25 bp, Homo sapien
agtcccaggactcccacattcacag

SEQ ID NO: 4784906 - DNA, 25 bp, Homo sapien
cgcatactacaatctgcttcagact

SEQ ID NO: 4784907 - DNA, 25 bp, Homo sapien
tattctgtgtctggtccgcatacta

SEQ ID NO: 4784908 - DNA, 25 bp, Homo sapien
ttcccagtatgctttgcgccaacgt

SEQ ID NO: 4784909 - DNA, 25 bp, Homo sapien
gccaacgtgcttggtggtatattct

SEQ ID NO: 4784910 - DNA, 25 bp, Homo sapien
tggcattctgtgacattggccccag

SEQ ID NO: 4784911 - DNA, 25 bp, Homo sapien
ttggccccagaaagataaaggctgt

SEQ ID NO: 4784912 - DNA, 25 bp, Homo sapien
tgtttcctaaaagcatggcattctg

SEQ ID NO: 4784913 - DNA, 25 bp, Homo sapien
gaaagataaaggctgttgtgcccca

SEQ ID NO: 4784914 - DNA, 25 bp, Homo sapien
aatgaggtgaacatagagtctgaag

SEQ ID NO: 4784915 - DNA, 25 bp, Homo sapien
cattaccaacccatggggattgcgg

SEQ ID NO: 4784916 - DNA, 25 bp, Homo sapien
aacccatggggattgcggctgcttg

SEQ ID NO: 4784917 - DNA, 25 bp, Homo sapien
tgtcattccacccattaccaaccca

SEQ ID NO: 4784918 - DNA, 25 bp, Homo sapien
taatttatccgacatcaatgctggt

SEQ ID NO: 4784919 - DNA, 25 bp, Homo sapien
attcaaatgcaatattcaaacccag

SEQ ID NO: 4784920 - DNA, 25 bp, Homo sapien
tcacaatacccttggctggaaacag

SEQ ID NO: 4784921 - DNA, 25 bp, Homo sapien
tccccatgttgccaaaacactgctt

SEQ ID NO: 4784922 - DNA, 25 bp, Homo sapien
catcatgttgggctttgcatctccg

SEQ ID NO: 4784923 - DNA, 25 bp, Homo sapien
gctactgctgcacttcttggcacag

SEQ ID NO: 4784924 - DNA, 25 bp, Homo sapien
agttaactgcccatgtgcaatgtca

SEQ ID NO: 4784925 - DNA, 25 bp, Homo sapien
tccacttttggtacagaagcacata

SEQ ID NO: 4784926 - DNA, 25 bp, Homo sapien
cagccagccgtacttttctacaaaa

SEQ ID NO: 4784927 - DNA, 25 bp, Homo sapien
gaaaagcctcacattccgaaagcat

SEQ ID NO: 4784928 - DNA, 25 bp, Homo sapien
taaaacactctgatgaccaaactgc

SEQ ID NO: 4784929 - DNA, 25 bp, Homo sapien
caaagtcatgctgtccaaggaaaag

SEQ ID NO: 4784930 - DNA, 25 bp, Homo sapien
gacttgtcaaatgtaactggtagcc

SEQ ID NO: 4784931 - DNA, 25 bp, Homo sapien
gaaacttcttggtcaccaagttgaa

SEQ ID NO: 4784932 - DNA, 25 bp, Homo sapien
ttggtaggccacaaagctcagaaac

SEQ ID NO: 4784933 - DNA, 25 bp, Homo sapien
gaacgaagtactcgctctgctgcag

SEQ ID NO: 4784934 - DNA, 25 bp, Homo sapien
agtgatctcgtccatcccacctgag

SEQ ID NO: 4784935 - DNA, 25 bp, Homo sapien
tgtgacactagtccgttcatttctg

SEQ ID NO: 4784936 - DNA, 25 bp, Homo sapien
gtgccatctcacagagctaaaattg

SEQ ID NO: 4784937 - DNA, 25 bp, Homo sapien
aagccttattcccacaagctgcagg

SEQ ID NO: 4784938 - DNA, 25 bp, Homo sapien
taattgccatcagccctactgagga

SEQ ID NO: 4784939 - DNA, 25 bp, Homo sapien
cagtagctgcacaacgtaattgcca

SEQ ID NO: 4784940 - DNA, 25 bp, Homo sapien
tattttaaccagctggcccatgacg

SEQ ID NO: 4784941 - DNA, 25 bp, Homo sapien
cactcctggatggtttggcaattcc

SEQ ID NO: 4784942 - DNA, 25 bp, Homo sapien
tggagaatgacatcagccctcagca

SEQ ID NO: 4784943 - DNA, 25 bp, Homo sapien
tgtggagaatgacatcagccctcag

SEQ ID NO: 4784944 - DNA, 25 bp, Homo sapien
ggagaatgacatcagccctcagcat

SEQ ID NO: 4784945 - DNA, 25 bp, Homo sapien
cttgtggagaatgacatcagccctc

SEQ ID NO: 4784946 - DNA, 25 bp, Homo sapien
ccaccaggaaatcttgaagcttcaa

SEQ ID NO: 4784947 - DNA, 25 bp, Homo sapien
accaggaaatcttgaagcttcaagt

SEQ ID NO: 4784948 - DNA, 25 bp, Homo sapien
caccaggaaatcttgaagcttcaag

SEQ ID NO: 4784949 - DNA, 25 bp, Homo sapien
agctttgtggcactagtccgttcat

SEQ ID NO: 4784950 - DNA, 25 bp, Homo sapien
ctgagctttgtggcactagtccgtt

SEQ ID NO: 4784951 - DNA, 25 bp, Homo sapien
gagctttgtggcactagtccgttca

SEQ ID NO: 4784952 - DNA, 25 bp, Homo sapien
tgagctttgtggcactagtccgttc

SEQ ID NO: 4784953 - DNA, 25 bp, Homo sapien
gacctagtataatgccgggcactga

SEQ ID NO: 4784954 - DNA, 25 bp, Homo sapien
tctgggaccaagctgaggaacacat

SEQ ID NO: 4784955 - DNA, 25 bp, Homo sapien
gcctgggagcgggagacaaattcta

SEQ ID NO: 4784956 - DNA, 25 bp, Homo sapien
caagtgttcgctcgggtaactggaa

SEQ ID NO: 4784957 - DNA, 25 bp, Homo sapien
gggctctccagtaaataaggaagga

SEQ ID NO: 4784958 - DNA, 25 bp, Homo sapien
gctacagaggtaaaggaaatatccc

SEQ ID NO: 4784959 - DNA, 25 bp, Homo sapien
ggtaaaggaaatatccccagctgtg

SEQ ID NO: 4784960 - DNA, 25 bp, Homo sapien
gccacagggtaatgtatgctagcac

SEQ ID NO: 4784961 - DNA, 25 bp, Homo sapien
tgttctcagaactttgcgcatgtcc

SEQ ID NO: 4784962 - DNA, 25 bp, Homo sapien
gaagcctccgagcatctgagaacag

SEQ ID NO: 4784963 - DNA, 25 bp, Homo sapien
tataaaagaagcctccgagcatctg

SEQ ID NO: 4784964 - DNA, 25 bp, Homo sapien
gatttcttgatctgctgtaatgttc

SEQ ID NO: 4784965 - DNA, 25 bp, Homo sapien
gaaacaggggttgttggcattacag

SEQ ID NO: 4784966 - DNA, 25 bp, Homo sapien
cccaaggaagtgttcctgcagaggg

SEQ ID NO: 4784967 - DNA, 25 bp, Homo sapien
ggcattacagataatcccctgaacc

SEQ ID NO: 4784968 - DNA, 25 bp, Homo sapien
agataatcccctgaacccaaggaag

SEQ ID NO: 4784969 - DNA, 25 bp, Homo sapien
tgatgggacatatttgggcttggtc

SEQ ID NO: 4784970 - DNA, 25 bp, Homo sapien
cacagtttggtttgcggccgtaata

SEQ ID NO: 4784971 - DNA, 25 bp, Homo sapien
taggattcggtctggcacagtttgg

SEQ ID NO: 4784972 - DNA, 25 bp, Homo sapien
gaggatcaagattaataggccctgg

SEQ ID NO: 4784973 - DNA, 25 bp, Homo sapien
caggtatggacagaaaggccagagc

SEQ ID NO: 4784974 - DNA, 25 bp, Homo sapien
gtatggacagaaaggccagagctcc

SEQ ID NO: 4784975 - DNA, 25 bp, Homo sapien
ctgttcaggtatggacagaaaggcc

SEQ ID NO: 4784976 - DNA, 25 bp, Homo sapien
aggccagagctcctgcttctatcat

SEQ ID NO: 4784977 - DNA, 25 bp, Homo sapien
tcataagcttgtgggtctcgtaggg

SEQ ID NO: 4784978 - DNA, 25 bp, Homo sapien
gggcagtgaaactgaagtcccagct

SEQ ID NO: 4784979 - DNA, 25 bp, Homo sapien
gccctaagagaaagactgtgattgt

SEQ ID NO: 4784980 - DNA, 25 bp, Homo sapien
tcaggaaatcacgtctcagaaaatg

SEQ ID NO: 4784981 - DNA, 25 bp, Homo sapien
tagctcagccgaacagagatcagga

SEQ ID NO: 4784982 - DNA, 25 bp, Homo sapien
ttgttcatagggtgggtagctcagc

SEQ ID NO: 4784983 - DNA, 25 bp, Homo sapien
ggtagctcagccgaacagagatcag

SEQ ID NO: 4784984 - DNA, 25 bp, Homo sapien
atagggtgggtagctcagccgaaca

SEQ ID NO: 4784985 - DNA, 25 bp, Homo sapien
atatggttctacattaaactctttt

SEQ ID NO: 4784986 - DNA, 25 bp, Homo sapien
aagataatgacagtggatgtactag

SEQ ID NO: 4784987 - DNA, 25 bp, Homo sapien
taatgacagtggatgtactaggatg

SEQ ID NO: 4784988 - DNA, 25 bp, Homo sapien
tgacagtggatgtactaggatgata

SEQ ID NO: 4784989 - DNA, 25 bp, Homo sapien
cagtggatgtactaggatgataaga

SEQ ID NO: 4784990 - DNA, 25 bp, Homo sapien
tatcaagaatagtttgcatagacgg

SEQ ID NO: 4784991 - DNA, 25 bp, Homo sapien
gcatagacggcacaacagaatgaaa

SEQ ID NO: 4784992 - DNA, 25 bp, Homo sapien
actgttaccataaaactatcaagaa

SEQ ID NO: 4784993 - DNA, 25 bp, Homo sapien
taaaggcaaatggatccctctctgg

SEQ ID NO: 4784994 - DNA, 25 bp, Homo sapien
cccaaagaggcaacatactcaaatt

SEQ ID NO: 4784995 - DNA, 25 bp, Homo sapien
atcccaaagaggcaacatactcaaa

SEQ ID NO: 4784996 - DNA, 25 bp, Homo sapien
caaagaggcaacatactcaaatttc

SEQ ID NO: 4784997 - DNA, 25 bp, Homo sapien
tggggctggtcttgctaatatttct

SEQ ID NO: 4784998 - DNA, 25 bp, Homo sapien
cctggaaattcatcctaggaaactg

SEQ ID NO: 4784999 - DNA, 25 bp, Homo sapien
tactaagcctaccacatgataatgg

SEQ ID NO: 4785000 - DNA, 25 bp, Homo sapien
ccaggtactttgtgtctgtatcagc

SEQ ID NO: 4785001 - DNA, 25 bp, Homo sapien
tatgccattccaagcttgtagctga

SEQ ID NO: 4785002 - DNA, 25 bp, Homo sapien
tatttgacaccacgggtgactcagg

SEQ ID NO: 4785003 - DNA, 25 bp, Homo sapien
gatgagcagccaattctacccaact

SEQ ID NO: 4785004 - DNA, 25 bp, Homo sapien
gactcaggtaggaaatggccccact

SEQ ID NO: 4785005 - DNA, 25 bp, Homo sapien
tttagggcccaatatgtacaaggca

SEQ ID NO: 4785006 - DNA, 25 bp, Homo sapien
tatctaggatcctgtagggcagcag

SEQ ID NO: 4785007 - DNA, 25 bp, Homo sapien
gaagctggtgagtgtaagcagatca

SEQ ID NO: 4785008 - DNA, 25 bp, Homo sapien
cttccccatggcaactgacagcaaa

SEQ ID NO: 4785009 - DNA, 25 bp, Homo sapien
tgagcactgatctgacccaattaat

SEQ ID NO: 4785010 - DNA, 25 bp, Homo sapien
tgtctgcaaagttcacaccacctga

SEQ ID NO: 4785011 - DNA, 25 bp, Homo sapien
gagttaatacactgcccaatggtcc

SEQ ID NO: 4785012 - DNA, 25 bp, Homo sapien
gccttcacttaccagagcatacaga

SEQ ID NO: 4785013 - DNA, 25 bp, Homo sapien
caatggtccaagattggcaaatggc

SEQ ID NO: 4785014 - DNA, 25 bp, Homo sapien
gttgacttctgccaggatatgccat

SEQ ID NO: 4785015 - DNA, 25 bp, Homo sapien
tttcataatagcctccctctagaaa

SEQ ID NO: 4785016 - DNA, 25 bp, Homo sapien
ccaggggaatgttccaggtatttct

SEQ ID NO: 4785017 - DNA, 25 bp, Homo sapien
ataatagcctccctctagaaaccaa

SEQ ID NO: 4785018 - DNA, 25 bp, Homo sapien
gatagtgaccctactgacatttggg

SEQ ID NO: 4785019 - DNA, 25 bp, Homo sapien
taaaaggcgtttctcaccaaagtca

SEQ ID NO: 4785020 - DNA, 25 bp, Homo sapien
caaagctgctccaagagtaccgaag

SEQ ID NO: 4785021 - DNA, 25 bp, Homo sapien
cataaaccctcataaatagcttgga

SEQ ID NO: 4785022 - DNA, 25 bp, Homo sapien
tgctggctgccgaagttcatagacc

SEQ ID NO: 4785023 - DNA, 25 bp, Homo sapien
cagcgcaagggccatgtacaaagaa

SEQ ID NO: 4785024 - DNA, 25 bp, Homo sapien
taattcaaggttagggcagcgcaag

SEQ ID NO: 4785025 - DNA, 25 bp, Homo sapien
gccaaaataatgcactccgcgctga

SEQ ID NO: 4785026 - DNA, 25 bp, Homo sapien
ggcatcatcccacagtagatttgga

SEQ ID NO: 4785027 - DNA, 25 bp, Homo sapien
tggatcctctggaaagacatctgat

SEQ ID NO: 4785028 - DNA, 25 bp, Homo sapien
gaaattgcaacgcatacacctcaga

SEQ ID NO: 4785029 - DNA, 25 bp, Homo sapien
gatttggagccaaaagatcccagcc

SEQ ID NO: 4785030 - DNA, 25 bp, Homo sapien
caacatggataaaccatggcggaga

SEQ ID NO: 4785031 - DNA, 25 bp, Homo sapien
aaccatggcggagacaatttcccag

SEQ ID NO: 4785032 - DNA, 25 bp, Homo sapien
tggataaaccatggcggagacaatt

SEQ ID NO: 4785033 - DNA, 25 bp, Homo sapien
gacaatttcccagcaagtgggcccc

SEQ ID NO: 4785034 - DNA, 25 bp, Homo sapien
ctgtagcaaaggaataagagtaagg

SEQ ID NO: 4785035 - DNA, 25 bp, Homo sapien
gagccctggatcacactgtagcaaa

SEQ ID NO: 4785036 - DNA, 25 bp, Homo sapien
caggagccctggatcacactgtagc

SEQ ID NO: 4785037 - DNA, 25 bp, Homo sapien
ggacggacatagaggactggaacac

SEQ ID NO: 4785038 - DNA, 25 bp, Homo sapien
taatcagttagtgcctcacacatgg

SEQ ID NO: 4785039 - DNA, 25 bp, Homo sapien
tctctgagtagcacgttccccagct

SEQ ID NO: 4785040 - DNA, 25 bp, Homo sapien
tgtggaaataacagtacatcgcggg

SEQ ID NO: 4785041 - DNA, 25 bp, Homo sapien
cacacatggaagctcattctaagtg

SEQ ID NO: 4785042 - DNA, 25 bp, Homo sapien
gtcttcttctgaaagtgaggttctt

SEQ ID NO: 4785043 - DNA, 25 bp, Homo sapien
tctgaaagtgaggttcttccacagc

SEQ ID NO: 4785044 - DNA, 25 bp, Homo sapien
tcttcttctgaaagtgaggttcttc

SEQ ID NO: 4785045 - DNA, 25 bp, Homo sapien
cagcgtgtggctcgggagccctgga

SEQ ID NO: 4785046 - DNA, 25 bp, Homo sapien
cagggacgccgtggctggtcattaa

SEQ ID NO: 4785047 - DNA, 25 bp, Homo sapien
ccctggaaggcagcggccagagctc

SEQ ID NO: 4785048 - DNA, 25 bp, Homo sapien
aaggcagcggccagagctcacagca

SEQ ID NO: 4785049 - DNA, 25 bp, Homo sapien
aaggatgagttttcttggacagcat

SEQ ID NO: 4785050 - DNA, 25 bp, Homo sapien
ctctacacaacgttcatgagaagaa

SEQ ID NO: 4785051 - DNA, 25 bp, Homo sapien
tacacaacgttcatgagaagaaggg

SEQ ID NO: 4785052 - DNA, 25 bp, Homo sapien
ggatgagttttcttggacagcattt

SEQ ID NO: 4785053 - DNA, 25 bp, Homo sapien
cagttactggctggaaaggatccca

SEQ ID NO: 4785054 - DNA, 25 bp, Homo sapien
ccagttactggctggaaaggatccc

SEQ ID NO: 4785055 - DNA, 25 bp, Homo sapien
cttgatgaggttgcttctagatgtc

SEQ ID NO: 4785056 - DNA, 25 bp, Homo sapien
caaaaacagcttgccagtaaactac

SEQ ID NO: 4785057 - DNA, 25 bp, Homo sapien
gcaggaggtggatttaactacatca

SEQ ID NO: 4785058 - DNA, 25 bp, Homo sapien
ccggcctcagtatctctcttgatga

SEQ ID NO: 4785059 - DNA, 25 bp, Homo sapien
taacaaggttactgaaggccaagac

SEQ ID NO: 4785060 - DNA, 25 bp, Homo sapien
tcatgtgtctttggatcggtagcca

SEQ ID NO: 4785061 - DNA, 25 bp, Homo sapien
ggtagccacgttcagggacaagcct

SEQ ID NO: 4785062 - DNA, 25 bp, Homo sapien
tcagggacaagcctaacaaggttac

SEQ ID NO: 4785063 - DNA, 25 bp, Homo sapien
gattaaagacagacagatcgtggct

SEQ ID NO: 4785064 - DNA, 25 bp, Homo sapien
caggttcactgcacccatgattaaa

SEQ ID NO: 4785065 - DNA, 25 bp, Homo sapien
ctggaaagaacaggttcactgcacc

SEQ ID NO: 4785066 - DNA, 25 bp, Homo sapien
tcactgcacccatgattaaagacag

SEQ ID NO: 4785067 - DNA, 25 bp, Homo sapien
cacactcctgaaacattccataaac

SEQ ID NO: 4785068 - DNA, 25 bp, Homo sapien
ctggtactcccccctgaaactgtgt

SEQ ID NO: 4785069 - DNA, 25 bp, Homo sapien
cagaagggtcatgggctggtactcc

SEQ ID NO: 4785070 - DNA, 25 bp, Homo sapien
gggccttgcagaagggtcatgggct

SEQ ID NO: 4785071 - DNA, 25 bp, Homo sapien
ctttcacttgaatacacatccaatt

SEQ ID NO: 4785072 - DNA, 25 bp, Homo sapien
taagataataggtaactgtacttcc

SEQ ID NO: 4785073 - DNA, 25 bp, Homo sapien
aagataataggtaactgtacttcct

SEQ ID NO: 4785074 - DNA, 25 bp, Homo sapien
acaataagataataggtaactgtac

SEQ ID NO: 4785075 - DNA, 25 bp, Homo sapien
accaaaacaaaccctctcgctggct

SEQ ID NO: 4785076 - DNA, 25 bp, Homo sapien
gcaaactccttctttagaataacca

SEQ ID NO: 4785077 - DNA, 25 bp, Homo sapien
caaaacaaaccctctcgctggctgc

SEQ ID NO: 4785078 - DNA, 25 bp, Homo sapien
ccaaaacaaaccctctcgctggctg

SEQ ID NO: 4785079 - DNA, 25 bp, Homo sapien
tctagtgagcaatagcaccacggac

SEQ ID NO: 4785080 - DNA, 25 bp, Homo sapien
tcaggtcaaacaaagacccaaggcc

SEQ ID NO: 4785081 - DNA, 25 bp, Homo sapien
aagacccaaggcctctagtgagcaa

SEQ ID NO: 4785082 - DNA, 25 bp, Homo sapien
caaggcctctagtgagcaatagcac

SEQ ID NO: 4785083 - DNA, 25 bp, Homo sapien
gcatatagccaattcccaggtcaga

SEQ ID NO: 4785084 - DNA, 25 bp, Homo sapien
taagaaccgagtgaagactcagtgc

SEQ ID NO: 4785085 - DNA, 25 bp, Homo sapien
cgtttgggacacctccaactcgagt

SEQ ID NO: 4785086 - DNA, 25 bp, Homo sapien
tcccggattcacagtccgggactgt

SEQ ID NO: 4785087 - DNA, 25 bp, Homo sapien
agcagcgctcggtgccggacctgca

SEQ ID NO: 4785088 - DNA, 25 bp, Homo sapien
tcagggccctccgaacaaagcagcg

SEQ ID NO: 4785089 - DNA, 25 bp, Homo sapien
cccgggtctccacgcccagagatgc

SEQ ID NO: 4785090 - DNA, 25 bp, Homo sapien
cctccgaacaaagcagcgctcggtg

SEQ ID NO: 4785091 - DNA, 25 bp, Homo sapien
aagccccaagcgcagcagcgcagag

SEQ ID NO: 4785092 - DNA, 25 bp, Homo sapien
agccccaagcgcagcagcgcagagt

SEQ ID NO: 4785093 - DNA, 25 bp, Homo sapien
gtcgggcaagccccaagcgcagcag

SEQ ID NO: 4785094 - DNA, 25 bp, Homo sapien
ggcaagccccaagcgcagcagcgca

SEQ ID NO: 4785095 - DNA, 25 bp, Homo sapien
gcctccggtcccatctgagttgcaa

SEQ ID NO: 4785096 - DNA, 25 bp, Homo sapien
tgtggggctccggatcaaagtcccc

SEQ ID NO: 4785097 - DNA, 25 bp, Homo sapien
gagctcgtactaggacatcgtctcc

SEQ ID NO: 4785098 - DNA, 25 bp, Homo sapien
atcaaagtccccgaaaccgagcact

SEQ ID NO: 4785099 - DNA, 25 bp, Homo sapien
acaataacgcccaagtaagtcactg

SEQ ID NO: 4785100 - DNA, 25 bp, Homo sapien
caataacgcccaagtaagtcactgg

SEQ ID NO: 4785101 - DNA, 25 bp, Homo sapien
aataacgcccaagtaagtcactgga

SEQ ID NO: 4785102 - DNA, 25 bp, Homo sapien
aacaataacgcccaagtaagtcact

SEQ ID NO: 4785103 - DNA, 25 bp, Homo sapien
aaaaaacaaggagcaaagcgccctg

SEQ ID NO: 4785104 - DNA, 25 bp, Homo sapien
acaaggagcaaagcgccctgagaac

SEQ ID NO: 4785105 - DNA, 25 bp, Homo sapien
tccacttttgtgtttgcgtctcttt

SEQ ID NO: 4785106 - DNA, 25 bp, Homo sapien
acttttgtgtttgcgtctctttctc

SEQ ID NO: 4785107 - DNA, 25 bp, Homo sapien
ctgttggtgcgcggagctccccgcc

SEQ ID NO: 4785108 - DNA, 25 bp, Homo sapien
tgttggtgcgcggagctccccgccc

SEQ ID NO: 4785109 - DNA, 25 bp, Homo sapien
gttggtgcgcggagctccccgccct

SEQ ID NO: 4785110 - DNA, 25 bp, Homo sapien
gcgcagaggttactatcggtcaaag

SEQ ID NO: 4785111 - DNA, 25 bp, Homo sapien
tgccgggactagttccttttataga

SEQ ID NO: 4785112 - DNA, 25 bp, Homo sapien
actcactctcgctcgcaattacggg

SEQ ID NO: 4785113 - DNA, 25 bp, Homo sapien
tccttttatagattcggctgcaccg

SEQ ID NO: 4785114 - DNA, 25 bp, Homo sapien
cattctaccaactcacgactctcat

SEQ ID NO: 4785115 - DNA, 25 bp, Homo sapien
ccccattctaccaactcacgactct

SEQ ID NO: 4785116 - DNA, 25 bp, Homo sapien
tctaccaactcacgactctcatcat

SEQ ID NO: 4785117 - DNA, 25 bp, Homo sapien
caactcacgactctcatcatacttt

SEQ ID NO: 4785118 - DNA, 25 bp, Homo sapien
ggattggaagccctggacacactgc

SEQ ID NO: 4785119 - DNA, 25 bp, Homo sapien
tgggattggaagccctggacacact

SEQ ID NO: 4785120 - DNA, 25 bp, Homo sapien
actgggattggaagccctggacaca

SEQ ID NO: 4785121 - DNA, 25 bp, Homo sapien
cactgggattggaagccctggacac

SEQ ID NO: 4785122 - DNA, 25 bp, Homo sapien
tttctcacgtgtagtgtttccacac

SEQ ID NO: 4785123 - DNA, 25 bp, Homo sapien
tctcctcaacaccaatcccagtcat

SEQ ID NO: 4785124 - DNA, 25 bp, Homo sapien
tcctgctgcaatgaattaatatcca

SEQ ID NO: 4785125 - DNA, 25 bp, Homo sapien
agacacctttctcacgtgtagtgtt

SEQ ID NO: 4785126 - DNA, 25 bp, Homo sapien
cacacattcagcaagcgtttggaga

SEQ ID NO: 4785127 - DNA, 25 bp, Homo sapien
agttctagccctcagggaatttgag

SEQ ID NO: 4785128 - DNA, 25 bp, Homo sapien
gaaacacaaatgagtagggcaaagt

SEQ ID NO: 4785129 - DNA, 25 bp, Homo sapien
ggcactgcgttagacacttgggaaa

SEQ ID NO: 4785130 - DNA, 25 bp, Homo sapien
cctagtaagatgagaaaggccagca

SEQ ID NO: 4785131 - DNA, 25 bp, Homo sapien
ttatgtggtgtttccctcggtgtcc

SEQ ID NO: 4785132 - DNA, 25 bp, Homo sapien
ttggtgctcccgtgtttaatactgg

SEQ ID NO: 4785133 - DNA, 25 bp, Homo sapien
gatgcacaataaatacgacctagta

SEQ ID NO: 4785134 - DNA, 25 bp, Homo sapien
tctccctgattgtatgtacgtgggc

SEQ ID NO: 4785135 - DNA, 25 bp, Homo sapien
ctctccctgattgtatgtacgtggg

SEQ ID NO: 4785136 - DNA, 25 bp, Homo sapien
atcttgaaatagttatgcgtcatgc

SEQ ID NO: 4785137 - DNA, 25 bp, Homo sapien
tgaaatagttatgcgtcatgccaaa

SEQ ID NO: 4785138 - DNA, 25 bp, Homo sapien
cttgaaatagttatgcgtcatgcca

SEQ ID NO: 4785139 - DNA, 25 bp, Homo sapien
aatagttatgcgtcatgccaaagaa

SEQ ID NO: 4785140 - DNA, 25 bp, Homo sapien
cttaacaagattccctgcgggccct

SEQ ID NO: 4785141 - DNA, 25 bp, Homo sapien
acttcgatggcagttatccttaaca

SEQ ID NO: 4785142 - DNA, 25 bp, Homo sapien
aacaaacttgtaacttcgatggcag

SEQ ID NO: 4785143 - DNA, 25 bp, Homo sapien
tcacagaacaaacttgtaacttcga

SEQ ID NO: 4785144 - DNA, 25 bp, Homo sapien
tgatactggagaaggactcatccca

SEQ ID NO: 4785145 - DNA, 25 bp, Homo sapien
tctgaaaaccatcactgagggtgct

SEQ ID NO: 4785146 - DNA, 25 bp, Homo sapien
ccaaatcggtgggatgtcagcgaag

SEQ ID NO: 4785147 - DNA, 25 bp, Homo sapien
tttggagatcattcggactaaccct

SEQ ID NO: 4785148 - DNA, 25 bp, Homo sapien
gtggctcttccgcgggctcatgctc

SEQ ID NO: 4785149 - DNA, 25 bp, Homo sapien
gggcaatcggcacagctgaataggg

SEQ ID NO: 4785150 - DNA, 25 bp, Homo sapien
tctgccttttgcaggaagaagggat

SEQ ID NO: 4785151 - DNA, 25 bp, Homo sapien
gaagcccggagctctgtccggaata

SEQ ID NO: 4785152 - DNA, 25 bp, Homo sapien
ctccatttgagagccgaaccgaaac

SEQ ID NO: 4785153 - DNA, 25 bp, Homo sapien
tttgagagccgaaccgaaaccatca

SEQ ID NO: 4785154 - DNA, 25 bp, Homo sapien
gagccgaaccgaaaccatcacaaga

SEQ ID NO: 4785155 - DNA, 25 bp, Homo sapien
accctccatttgagagccgaaccga

SEQ ID NO: 4785156 - DNA, 25 bp, Homo sapien
tcgagccgatttggaaaattcctgc

SEQ ID NO: 4785157 - DNA, 25 bp, Homo sapien
tcgccaaactatgggtgtgtcctgg

SEQ ID NO: 4785158 - DNA, 25 bp, Homo sapien
gtcctgggccagtgcatgaagcgat

SEQ ID NO: 4785159 - DNA, 25 bp, Homo sapien
tgaaaggtaactagcagacgctgct

SEQ ID NO: 4785160 - DNA, 25 bp, Homo sapien
tgggctcgctttgcccgaatgtaac

SEQ ID NO: 4785161 - DNA, 25 bp, Homo sapien
tgcccgaatgtaaccctgccttgaa

SEQ ID NO: 4785162 - DNA, 25 bp, Homo sapien
cctcccttgagtgtgccgtcagaga

SEQ ID NO: 4785163 - DNA, 25 bp, Homo sapien
gacaaaggctgcaattgggctcgct

SEQ ID NO: 4785164 - DNA, 25 bp, Homo sapien
tgaagtcaatagctagggagaacaa

SEQ ID NO: 4785165 - DNA, 25 bp, Homo sapien
taaaggaagcgcaaacatttggttc

SEQ ID NO: 4785166 - DNA, 25 bp, Homo sapien
tcagataatattgtgccaactttta

SEQ ID NO: 4785167 - DNA, 25 bp, Homo sapien
attcgatttattctgctatgtcttg

SEQ ID NO: 4785168 - DNA, 25 bp, Homo sapien
actactttataaacatcctctttgt

SEQ ID NO: 4785169 - DNA, 25 bp, Homo sapien
tactttataaacatcctctttgttc

SEQ ID NO: 4785170 - DNA, 25 bp, Homo sapien
ttataaacatcctctttgttcccta

SEQ ID NO: 4785171 - DNA, 25 bp, Homo sapien
aacatcctctttgttccctatagca

SEQ ID NO: 4785172 - DNA, 25 bp, Homo sapien
atcactgttgtctcccctgattcct

SEQ ID NO: 4785173 - DNA, 25 bp, Homo sapien
tgagatgatcgtctgctctcctgaa

SEQ ID NO: 4785174 - DNA, 25 bp, Homo sapien
cttcctctgagatgatcgtctgctc

SEQ ID NO: 4785175 - DNA, 25 bp, Homo sapien
aactgaggctgttctatgtccctgg

SEQ ID NO: 4785176 - DNA, 25 bp, Homo sapien
tggaggctgcgcaagattacgccac

SEQ ID NO: 4785177 - DNA, 25 bp, Homo sapien
tacagcttctacaactcaaaccagg

SEQ ID NO: 4785178 - DNA, 25 bp, Homo sapien
caaaaaacatactgcggagggaggg

SEQ ID NO: 4785179 - DNA, 25 bp, Homo sapien
tggtccgaagtgacatctctcagct

SEQ ID NO: 4785180 - DNA, 25 bp, Homo sapien
tcagaggtaatacatcatgaggaaa

SEQ ID NO: 4785181 - DNA, 25 bp, Homo sapien
cagaggtaatacatcatgaggaaat

SEQ ID NO: 4785182 - DNA, 25 bp, Homo sapien
atctaggtctccagtaacccatctt

SEQ ID NO: 4785183 - DNA, 25 bp, Homo sapien
ggcacgggtctaatttcagtgctca

SEQ ID NO: 4785184 - DNA, 25 bp, Homo sapien
aacaacttggatttgatctggcctc

SEQ ID NO: 4785185 - DNA, 25 bp, Homo sapien
gctgtctggcggaaggctgaaggtt

SEQ ID NO: 4785186 - DNA, 25 bp, Homo sapien
gatgttccctctctagatagcgagt

SEQ ID NO: 4785187 - DNA, 25 bp, Homo sapien
ctggtgttaagatagaggcttttga

SEQ ID NO: 4785188 - DNA, 25 bp, Homo sapien
ttctctaggtatttctaccaaagta

SEQ ID NO: 4785189 - DNA, 25 bp, Homo sapien
ccagctgtttgatccatttttgttt

SEQ ID NO: 4785190 - DNA, 25 bp, Homo sapien
cagtagcaaactcacggtgccagct

SEQ ID NO: 4785191 - DNA, 25 bp, Homo sapien
gctttgtttcctgctctctgaacct

SEQ ID NO: 4785192 - DNA, 25 bp, Homo sapien
cattgtcaagggctgcctcatagag

SEQ ID NO: 4785193 - DNA, 25 bp, Homo sapien
taagtgtcaggcagacttccctggt

SEQ ID NO: 4785194 - DNA, 25 bp, Homo sapien
gcctcatagagtgttaagtaattca

SEQ ID NO: 4785195 - DNA, 25 bp, Homo sapien
aagatgttcgtgcaactgaggccag

SEQ ID NO: 4785196 - DNA, 25 bp, Homo sapien
cagaactttggacttggagcttaac

SEQ ID NO: 4785197 - DNA, 25 bp, Homo sapien
gacttggagcttaacctgctgttaa

SEQ ID NO: 4785198 - DNA, 25 bp, Homo sapien
gtcgctgaaccgagagaagtcatat

SEQ ID NO: 4785199 - DNA, 25 bp, Homo sapien
ttaaacatgggtcgctgaaccgaga

SEQ ID NO: 4785200 - DNA, 25 bp, Homo sapien
taccactgccgctttcaggcctgct

SEQ ID NO: 4785201 - DNA, 25 bp, Homo sapien
cgatgttaccactgccgctttcagg

SEQ ID NO: 4785202 - DNA, 25 bp, Homo sapien
gatgttaccactgccgctttcaggc

SEQ ID NO: 4785203 - DNA, 25 bp, Homo sapien
gttaccactgccgctttcaggcctg

SEQ ID NO: 4785204 - DNA, 25 bp, Homo sapien
caggtgacctggagacattgccaat

SEQ ID NO: 4785205 - DNA, 25 bp, Homo sapien
tccatgcagatacagcatataaggc

SEQ ID NO: 4785206 - DNA, 25 bp, Homo sapien
agcatataaggcatttgctgcacct

SEQ ID NO: 4785207 - DNA, 25 bp, Homo sapien
taacaggagtacttgtgagtggctg

SEQ ID NO: 4785208 - DNA, 25 bp, Homo sapien
tctgtcaggatgagtgttagatgcc

SEQ ID NO: 4785209 - DNA, 25 bp, Homo sapien
tgaggcctggagaaactcggccaca

SEQ ID NO: 4785210 - DNA, 25 bp, Homo sapien
atgtgtgttcccacgccagtagctg

SEQ ID NO: 4785211 - DNA, 25 bp, Homo sapien
tgttagatgccatgtgtgttcccac

SEQ ID NO: 4785212 - DNA, 25 bp, Homo sapien
cctgcagtatgcctcggactagctt

SEQ ID NO: 4785213 - DNA, 25 bp, Homo sapien
ggactagcttcatccagcaaactgc

SEQ ID NO: 4785214 - DNA, 25 bp, Homo sapien
tatgcctcggactagcttcatccag

SEQ ID NO: 4785215 - DNA, 25 bp, Homo sapien
ctgggcccctgcagtatgcctcgga

SEQ ID NO: 4785216 - DNA, 25 bp, Homo sapien
tcccaagatgagctaatggccttcc

SEQ ID NO: 4785217 - DNA, 25 bp, Homo sapien
taaaagaaatagtgtcaggctcctt

SEQ ID NO: 4785218 - DNA, 25 bp, Homo sapien
agcttaaggttgctggtgacctggt

SEQ ID NO: 4785219 - DNA, 25 bp, Homo sapien
gctggtgacctggtggtgttggtga

SEQ ID NO: 4785220 - DNA, 25 bp, Homo sapien
ggcagcaactggtgtcccgaagtaa

SEQ ID NO: 4785221 - DNA, 25 bp, Homo sapien
tggtgtcccgaagtaacagcagaga

SEQ ID NO: 4785222 - DNA, 25 bp, Homo sapien
tagactggagcagtagctttgtatc

SEQ ID NO: 4785223 - DNA, 25 bp, Homo sapien
cagtagctttgtatcttccctgctc

SEQ ID NO: 4785224 - DNA, 25 bp, Homo sapien
gctttgaggtctagcacattactcc

SEQ ID NO: 4785225 - DNA, 25 bp, Homo sapien
cagggctctggcctccgctttgagg

SEQ ID NO: 4785226 - DNA, 25 bp, Homo sapien
aacctctgcagcaactgcgctagtc

SEQ ID NO: 4785227 - DNA, 25 bp, Homo sapien
tagtcctagaaaaaggtctggttca

SEQ ID NO: 4785228 - DNA, 25 bp, Homo sapien
tgccagttcagtcaacttcatgctg

SEQ ID NO: 4785229 - DNA, 25 bp, Homo sapien
ggctgccagttcagtcaacttcatg

SEQ ID NO: 4785230 - DNA, 25 bp, Homo sapien
ggaataagttcccagatgttttcca

SEQ ID NO: 4785231 - DNA, 25 bp, Homo sapien
tgggaataagttcccagatgttttc

SEQ ID NO: 4785232 - DNA, 25 bp, Homo sapien
taggcctccaccctgggtgctacct

SEQ ID NO: 4785233 - DNA, 25 bp, Homo sapien
ctaggcctccaccctgggtgctacc

SEQ ID NO: 4785234 - DNA, 25 bp, Homo sapien
ctccaccctgggtgctacctcttgg

SEQ ID NO: 4785235 - DNA, 25 bp, Homo sapien
ggcctccaccctgggtgctacctct

SEQ ID NO: 4785236 - DNA, 25 bp, Homo sapien
tatctttcaaattcaattcatcttt

SEQ ID NO: 4785237 - DNA, 25 bp, Homo sapien
tccatttatctttcaaattcaattc

SEQ ID NO: 4785238 - DNA, 25 bp, Homo sapien
tctttcaaattcaattcatctttca

SEQ ID NO: 4785239 - DNA, 25 bp, Homo sapien
ttccatttatctttcaaattcaatt

SEQ ID NO: 4785240 - DNA, 25 bp, Homo sapien
atggtaggagtttagcccgttcctg

SEQ ID NO: 4785241 - DNA, 25 bp, Homo sapien
gcacgatactaagaccccagaagag

SEQ ID NO: 4785242 - DNA, 25 bp, Homo sapien
gaaggtgaacattcagctgaggaaa

SEQ ID NO: 4785243 - DNA, 25 bp, Homo sapien
aagaaatggagcacgatactaagac

SEQ ID NO: 4785244 - DNA, 25 bp, Homo sapien
catgtgaaagactggcattggagga

SEQ ID NO: 4785245 - DNA, 25 bp, Homo sapien
ggtctgttgctgtctgttcactgaa

SEQ ID NO: 4785246 - DNA, 25 bp, Homo sapien
tctatacttttggtctgttgctgtc

SEQ ID NO: 4785247 - DNA, 25 bp, Homo sapien
ggagactctcagctggtatatgcta

SEQ ID NO: 4785248 - DNA, 25 bp, Homo sapien
cacctggaagaagcttcgggtctcg

SEQ ID NO: 4785249 - DNA, 25 bp, Homo sapien
gccggaagtagaactgtggcctcca

SEQ ID NO: 4785250 - DNA, 25 bp, Homo sapien
cccaagtgaagtggtggcccatcat

SEQ ID NO: 4785251 - DNA, 25 bp, Homo sapien
cattgcgatggtgggtaggcgggta

SEQ ID NO: 4785252 - DNA, 25 bp, Homo sapien
gctcctctttgtcgatcaagctctg

SEQ ID NO: 4785253 - DNA, 25 bp, Homo sapien
cgatcaagctctgggctactccaca

SEQ ID NO: 4785254 - DNA, 25 bp, Homo sapien
tctgggctactccacatgtgttcat

SEQ ID NO: 4785255 - DNA, 25 bp, Homo sapien
ctgtttcaagctggtgtctccacct

SEQ ID NO: 4785256 - DNA, 25 bp, Homo sapien
tttactattccagtctacaagacag

SEQ ID NO: 4785257 - DNA, 25 bp, Homo sapien
tcttactttctctaacatgctgcat

SEQ ID NO: 4785258 - DNA, 25 bp, Homo sapien
caagacagaatttgaaggctgccac

SEQ ID NO: 4785259 - DNA, 25 bp, Homo sapien
aggaagacacctgagcagaattggg

SEQ ID NO: 4785260 - DNA, 25 bp, Homo sapien
cagactaaataaatctgtggagtcc

SEQ ID NO: 4785261 - DNA, 25 bp, Homo sapien
taaataaatctgtggagtccatagg

SEQ ID NO: 4785262 - DNA, 25 bp, Homo sapien
tgcagactaaataaatctgtggagt

SEQ ID NO: 4785263 - DNA, 25 bp, Homo sapien
taaatctgtggagtccatagggtcc

SEQ ID NO: 4785264 - DNA, 25 bp, Homo sapien
tctgtcctggtggtgctttgcacga

SEQ ID NO: 4785265 - DNA, 25 bp, Homo sapien
ggtgctttgcacgatccatgagaag

SEQ ID NO: 4785266 - DNA, 25 bp, Homo sapien
cttgagatgtctgtcctggtggtgc

SEQ ID NO: 4785267 - DNA, 25 bp, Homo sapien
ttcaaatgtgcttgagatgtctgtc

SEQ ID NO: 4785268 - DNA, 25 bp, Homo sapien
agacccttccctgcttgatagctgt

SEQ ID NO: 4785269 - DNA, 25 bp, Homo sapien
gacccttccctgcttgatagctgtt

SEQ ID NO: 4785270 - DNA, 25 bp, Homo sapien
cagacccttccctgcttgatagctg

SEQ ID NO: 4785271 - DNA, 25 bp, Homo sapien
ggtgcgctcgctcatattttgagtc

SEQ ID NO: 4785272 - DNA, 25 bp, Homo sapien
tcataggagtatgccaagtatggcc

SEQ ID NO: 4785273 - DNA, 25 bp, Homo sapien
cattgttgctgtccattaaaagtcc

SEQ ID NO: 4785274 - DNA, 25 bp, Homo sapien
caatggcctgggtaaaaccgcaggt

SEQ ID NO: 4785275 - DNA, 25 bp, Homo sapien
tttctgccagtgttgtggttgcatt

SEQ ID NO: 4785276 - DNA, 25 bp, Homo sapien
taggaacgtatctgattgcacctgt

SEQ ID NO: 4785277 - DNA, 25 bp, Homo sapien
tgtagttacccacttgcagccacaa

SEQ ID NO: 4785278 - DNA, 25 bp, Homo sapien
tcattagttgcatcgttagtcacac

SEQ ID NO: 4785279 - DNA, 25 bp, Homo sapien
tggtcaccacggctacctcttgata

SEQ ID NO: 4785280 - DNA, 25 bp, Homo sapien
tttgaataagctcctagaagcgagg

SEQ ID NO: 4785281 - DNA, 25 bp, Homo sapien
tgcggaaaatgcttacactgtaaca

SEQ ID NO: 4785282 - DNA, 25 bp, Homo sapien
gactttcagaatggttgtaacaaac

SEQ ID NO: 4785283 - DNA, 25 bp, Homo sapien
agtggagtcccacacaagaggattt

SEQ ID NO: 4785284 - DNA, 25 bp, Homo sapien
cacagccaattatgcaataccagac

SEQ ID NO: 4785285 - DNA, 25 bp, Homo sapien
gaagctggaacccttggaattcaca

SEQ ID NO: 4785286 - DNA, 25 bp, Homo sapien
aattatgcaataccagaccactggg

SEQ ID NO: 4785287 - DNA, 25 bp, Homo sapien
gctcagctggtgatccgattttacc

SEQ ID NO: 4785288 - DNA, 25 bp, Homo sapien
tagaggctgcactggcgcctcctct

SEQ ID NO: 4785289 - DNA, 25 bp, Homo sapien
aggtgtacccccagcaagagctctt

SEQ ID NO: 4785290 - DNA, 25 bp, Homo sapien
gttcagatggtttcagcgggtcccg

SEQ ID NO: 4785291 - DNA, 25 bp, Homo sapien
ttctgtgctcctcgcaggtgtaccc

SEQ ID NO: 4785292 - DNA, 25 bp, Homo sapien
ctctttgttgccagtgtaacaggag

SEQ ID NO: 4785293 - DNA, 25 bp, Homo sapien
ggctgaatgttgtcgctgagggctg

SEQ ID NO: 4785294 - DNA, 25 bp, Homo sapien
tgttgccagtgtaacaggaggaaga

SEQ ID NO: 4785295 - DNA, 25 bp, Homo sapien
aatgttgtcgctgagggctgagatg

SEQ ID NO: 4785296 - DNA, 25 bp, Homo sapien
tccttctctcggatccgagccctta

SEQ ID NO: 4785297 - DNA, 25 bp, Homo sapien
tccaaatttcgccaacctccttctc

SEQ ID NO: 4785298 - DNA, 25 bp, Homo sapien
tttcgccaacctccttctctcggat

SEQ ID NO: 4785299 - DNA, 25 bp, Homo sapien
ctgcccccatccaaatttcgccaac

SEQ ID NO: 4785300 - DNA, 25 bp, Homo sapien
tgtagaacatgccttgttccacaga

SEQ ID NO: 4785301 - DNA, 25 bp, Homo sapien
tctcactgtagaacatgccttgttc

SEQ ID NO: 4785302 - DNA, 25 bp, Homo sapien
gttccacagataagatgcatgtcat

SEQ ID NO: 4785303 - DNA, 25 bp, Homo sapien
catgccttgttccacagataagatg

SEQ ID NO: 4785304 - DNA, 25 bp, Homo sapien
cataaaagagtttgtggtcttccaa

SEQ ID NO: 4785305 - DNA, 25 bp, Homo sapien
tgttgtagattctcataaaagagtt

SEQ ID NO: 4785306 - DNA, 25 bp, Homo sapien
gtaatctgtcctggtattattttca

SEQ ID NO: 4785307 - DNA, 25 bp, Homo sapien
tctcataaaagagtttgtggtcttc

SEQ ID NO: 4785308 - DNA, 25 bp, Homo sapien
tgaccattcggagatggaatgctat

SEQ ID NO: 4785309 - DNA, 25 bp, Homo sapien
ggagctatgatctgcactggaggat

SEQ ID NO: 4785310 - DNA, 25 bp, Homo sapien
tatgaactgctatggggtcagctgg

SEQ ID NO: 4785311 - DNA, 25 bp, Homo sapien
gttatcacttaaactccaaatgacc

SEQ ID NO: 4785312 - DNA, 25 bp, Homo sapien
tggttctatggggagccaaatgttt

SEQ ID NO: 4785313 - DNA, 25 bp, Homo sapien
tcaaatctcaagcaggccacactct

SEQ ID NO: 4785314 - DNA, 25 bp, Homo sapien
ggtagcacaagatccagtggttcta

SEQ ID NO: 4785315 - DNA, 25 bp, Homo sapien
aaatctcaagcaggccacactctgg

SEQ ID NO: 4785316 - DNA, 25 bp, Homo sapien
tgctaggcaaatgctctggaccaga

SEQ ID NO: 4785317 - DNA, 25 bp, Homo sapien
gtcatacaatgactgaagattaagg

SEQ ID NO: 4785318 - DNA, 25 bp, Homo sapien
ccgaaacctatgatattcttggcag

SEQ ID NO: 4785319 - DNA, 25 bp, Homo sapien
tctggaccagaacagagatgttcct

SEQ ID NO: 4785320 - DNA, 25 bp, Homo sapien
cttccactttcatctcgtatatctg

SEQ ID NO: 4785321 - DNA, 25 bp, Homo sapien
tatctgatgcggtagctatatgaaa

SEQ ID NO: 4785322 - DNA, 25 bp, Homo sapien
tctcgtatatctgatgcggtagcta

SEQ ID NO: 4785323 - DNA, 25 bp, Homo sapien
ctttcatctcgtatatctgatgcgg

SEQ ID NO: 4785324 - DNA, 25 bp, Homo sapien
catgaagactgttgtgctagcgtat

SEQ ID NO: 4785325 - DNA, 25 bp, Homo sapien
ccaggactcctgtgatgtggacccg

SEQ ID NO: 4785326 - DNA, 25 bp, Homo sapien
tatagcatcaaagaagagcccactc

SEQ ID NO: 4785327 - DNA, 25 bp, Homo sapien
tgtggacccgtttcacctattcagt

SEQ ID NO: 4785328 - DNA, 25 bp, Homo sapien
cactgtctgaggaatagtgtggttg

SEQ ID NO: 4785329 - DNA, 25 bp, Homo sapien
aggagcccatcttctagtgaagatg

SEQ ID NO: 4785330 - DNA, 25 bp, Homo sapien
ttctgattagaataccaagcttggt

SEQ ID NO: 4785331 - DNA, 25 bp, Homo sapien
gtctacaggttggaattcttgttgg

SEQ ID NO: 4785332 - DNA, 25 bp, Homo sapien
tcttgcattgcatgtccttttttgc

SEQ ID NO: 4785333 - DNA, 25 bp, Homo sapien
cttccatcttgcattgcatgtcctt

SEQ ID NO: 4785334 - DNA, 25 bp, Homo sapien
ctgtccttccatcttgcattgcatg

SEQ ID NO: 4785335 - DNA, 25 bp, Homo sapien
ttgcattgcatgtccttttttgccc

SEQ ID NO: 4785336 - DNA, 25 bp, Homo sapien
tgtccccattgttcagcatgggcat

SEQ ID NO: 4785337 - DNA, 25 bp, Homo sapien
ccactgtccccattgttcagcatgg

SEQ ID NO: 4785338 - DNA, 25 bp, Homo sapien
cactgtccccattgttcagcatggg

SEQ ID NO: 4785339 - DNA, 25 bp, Homo sapien
actgtccccattgttcagcatgggc

SEQ ID NO: 4785340 - DNA, 25 bp, Homo sapien
acaaatttagcaactctcatgtgtg

SEQ ID NO: 4785341 - DNA, 25 bp, Homo sapien
tttaatcagcgaattgcagagtcca

SEQ ID NO: 4785342 - DNA, 25 bp, Homo sapien
atcagcgaattgcagagtccatttc

SEQ ID NO: 4785343 - DNA, 25 bp, Homo sapien
caactctcatgtgtgatactaaaca

SEQ ID NO: 4785344 - DNA, 25 bp, Homo sapien
taagggaggcgtcgctgattccaga

SEQ ID NO: 4785345 - DNA, 25 bp, Homo sapien
aggtggccgccctccaagaatttca

SEQ ID NO: 4785346 - DNA, 25 bp, Homo sapien
tttggtgtacacttgaactgacggt

SEQ ID NO: 4785347 - DNA, 25 bp, Homo sapien
gttatctgtatcacgcaggacatgc

SEQ ID NO: 4785348 - DNA, 25 bp, Homo sapien
aatatatgctataaaataagttcat

SEQ ID NO: 4785349 - DNA, 25 bp, Homo sapien
tttaagcccatcagctatccttaat

SEQ ID NO: 4785350 - DNA, 25 bp, Homo sapien
ataagttcatttaagtaggctaggc

SEQ ID NO: 4785351 - DNA, 25 bp, Homo sapien
gcccatcagctatccttaatgtatt

SEQ ID NO: 4785352 - DNA, 25 bp, Homo sapien
gatgcataagtcctagtgggtcaag

SEQ ID NO: 4785353 - DNA, 25 bp, Homo sapien
ggcttcggcttcagagtaacgtcag

SEQ ID NO: 4785354 - DNA, 25 bp, Homo sapien
gaaagcattgcctcctaccagaact

SEQ ID NO: 4785355 - DNA, 25 bp, Homo sapien
tcatacgggtggcttttacaaggca

SEQ ID NO: 4785356 - DNA, 25 bp, Homo sapien
tagccttaacatggcctctgagaag

SEQ ID NO: 4785357 - DNA, 25 bp, Homo sapien
taagagatctcctagcctgcaaggt

SEQ ID NO: 4785358 - DNA, 25 bp, Homo sapien
ggcaccacatatgtgtgaggccaca

SEQ ID NO: 4785359 - DNA, 25 bp, Homo sapien
tgaggcttcaactatttccaccatg

SEQ ID NO: 4785360 - DNA, 25 bp, Homo sapien
cagaatattctggaccactgaatgc

SEQ ID NO: 4785361 - DNA, 25 bp, Homo sapien
gacaaaaccctatcttctgaagacc

SEQ ID NO: 4785362 - DNA, 25 bp, Homo sapien
tattagataccccacaggaatgtga

SEQ ID NO: 4785363 - DNA, 25 bp, Homo sapien
cactgaatgcacttctaatagagct

SEQ ID NO: 4785364 - DNA, 25 bp, Homo sapien
gtagccctagtatttgtgacggtca

SEQ ID NO: 4785365 - DNA, 25 bp, Homo sapien
actggaggatcacagttaagccttc

SEQ ID NO: 4785366 - DNA, 25 bp, Homo sapien
tattgacacagtgcagactttgcag

SEQ ID NO: 4785367 - DNA, 25 bp, Homo sapien
ggaacaaacatgtaggtgcttgaac

SEQ ID NO: 4785368 - DNA, 25 bp, Homo sapien
gagtagaaaagcctccactgggccg

SEQ ID NO: 4785369 - DNA, 25 bp, Homo sapien
ctgagttgccgcgtgaatgctaaga

SEQ ID NO: 4785370 - DNA, 25 bp, Homo sapien
gcttcatagctggagtctgagttgc

SEQ ID NO: 4785371 - DNA, 25 bp, Homo sapien
tacaaagttcatccactgccaggcc

SEQ ID NO: 4785372 - DNA, 25 bp, Homo sapien
gaagcactttggcactcatatagca

SEQ ID NO: 4785373 - DNA, 25 bp, Homo sapien
gaagatgtgcgtttgcaccaagagg

SEQ ID NO: 4785374 - DNA, 25 bp, Homo sapien
cacagcctaatgagggacgcagaga

SEQ ID NO: 4785375 - DNA, 25 bp, Homo sapien
taagcagaggagcaatctagccata

SEQ ID NO: 4785376 - DNA, 25 bp, Homo sapien
tttgactagggaatttgttctctgt

SEQ ID NO: 4785377 - DNA, 25 bp, Homo sapien
gttttatggaaataagaagaagcta

SEQ ID NO: 4785378 - DNA, 25 bp, Homo sapien
caaacaagtttgtgggtagaatatc

SEQ ID NO: 4785379 - DNA, 25 bp, Homo sapien
tccaagtcactcatgttaaaaactc

SEQ ID NO: 4785380 - DNA, 25 bp, Homo sapien
tgggtagaatatccaagtcactcat

SEQ ID NO: 4785381 - DNA, 25 bp, Homo sapien
aaaaactctagagttctccattaca

SEQ ID NO: 4785382 - DNA, 25 bp, Homo sapien
gtaagtgatacgcttccacatccac

SEQ ID NO: 4785383 - DNA, 25 bp, Homo sapien
aggtaagtgatacgcttccacatcc

SEQ ID NO: 4785384 - DNA, 25 bp, Homo sapien
acagggcacacaattcgtatcttgc

SEQ ID NO: 4785385 - DNA, 25 bp, Homo sapien
aagtgatacgcttccacatccacag

SEQ ID NO: 4785386 - DNA, 25 bp, Homo sapien
ctgtcagctgacgtgagtaagagat

SEQ ID NO: 4785387 - DNA, 25 bp, Homo sapien
tgtcagctgacgtgagtaagagatt

SEQ ID NO: 4785388 - DNA, 25 bp, Homo sapien
cagctgacgtgagtaagagattgac

SEQ ID NO: 4785389 - DNA, 25 bp, Homo sapien
tcagctgacgtgagtaagagattga

SEQ ID NO: 4785390 - DNA, 25 bp, Homo sapien
tgcagaggcactagcggtagacaga

SEQ ID NO: 4785391 - DNA, 25 bp, Homo sapien
cctggctgcccctcgaaggatagtg

SEQ ID NO: 4785392 - DNA, 25 bp, Homo sapien
aaatcatacaggtagcgaggtgccg

SEQ ID NO: 4785393 - DNA, 25 bp, Homo sapien
gagagaccgctatcgctggaggaaa

SEQ ID NO: 4785394 - DNA, 25 bp, Homo sapien
tcatccagatgcctgaatcctagtt

SEQ ID NO: 4785395 - DNA, 25 bp, Homo sapien
gaatcctagttcagagtttatctcg

SEQ ID NO: 4785396 - DNA, 25 bp, Homo sapien
aatggtggaactggctgaagaagat

SEQ ID NO: 4785397 - DNA, 25 bp, Homo sapien
catcgtcatcgagttaatggtggaa

SEQ ID NO: 4785398 - DNA, 25 bp, Homo sapien
gattgatttaaagaagctacttcac

SEQ ID NO: 4785399 - DNA, 25 bp, Homo sapien
gtctcaaagagaggaactggatgct

SEQ ID NO: 4785400 - DNA, 25 bp, Homo sapien
gaagctagtcttaaacagaaaggtc

SEQ ID NO: 4785401 - DNA, 25 bp, Homo sapien
gagactccttaaagattaggcggga

SEQ ID NO: 4785402 - DNA, 25 bp, Homo sapien
ggaggagatggtgaagttatcccca

SEQ ID NO: 4785403 - DNA, 25 bp, Homo sapien
aagtggctacatttagaacaggaag

SEQ ID NO: 4785404 - DNA, 25 bp, Homo sapien
cctctttggtggcagttgatttatt

SEQ ID NO: 4785405 - DNA, 25 bp, Homo sapien
cagggttatgatacaaaccaaggga

SEQ ID NO: 4785406 - DNA, 25 bp, Homo sapien
gagggcctattccaggatctaaatg

SEQ ID NO: 4785407 - DNA, 25 bp, Homo sapien
ttctagaggacattcatatctgcac

SEQ ID NO: 4785408 - DNA, 25 bp, Homo sapien
tgcaaggcagtttagagaatgaagt

SEQ ID NO: 4785409 - DNA, 25 bp, Homo sapien
tgttcctcagagagagtttgaaaga

SEQ ID NO: 4785410 - DNA, 25 bp, Homo sapien
gctgtcttggcgaatgcgtgactcg

SEQ ID NO: 4785411 - DNA, 25 bp, Homo sapien
cccgggaccagtcaggaggtgaaat

SEQ ID NO: 4785412 - DNA, 25 bp, Homo sapien
caatcgggctgaggtgatgatacac

SEQ ID NO: 4785413 - DNA, 25 bp, Homo sapien
tcccgaacgggagtgcccatcatga

SEQ ID NO: 4785414 - DNA, 25 bp, Homo sapien
gataggcccctgtggcaggcttaag

SEQ ID NO: 4785415 - DNA, 25 bp, Homo sapien
tgataggcccctgtggcaggcttaa

SEQ ID NO: 4785416 - DNA, 25 bp, Homo sapien
gagaggacttcaacagtaagcttgt

SEQ ID NO: 4785417 - DNA, 25 bp, Homo sapien
ccgttctgagtgcattggatgagag

SEQ ID NO: 4785418 - DNA, 25 bp, Homo sapien
tctgagtgcattggatgagaggact

SEQ ID NO: 4785419 - DNA, 25 bp, Homo sapien
cattggatgagaggacttcaacagt

SEQ ID NO: 4785420 - DNA, 25 bp, Homo sapien
tcagtgcgctgctgtagttgtcaat

SEQ ID NO: 4785421 - DNA, 25 bp, Homo sapien
taacgggcttggaaaacggctcagc

SEQ ID NO: 4785422 - DNA, 25 bp, Homo sapien
aactctcagattgcctcagtgcgct

SEQ ID NO: 4785423 - DNA, 25 bp, Homo sapien
tcttccgctgtcgaaagcgtttcag

SEQ ID NO: 4785424 - DNA, 25 bp, Homo sapien
caagagtcacaggaaagccgaggct

SEQ ID NO: 4785425 - DNA, 25 bp, Homo sapien
gctcagcacttgacggcggcttttg

SEQ ID NO: 4785426 - DNA, 25 bp, Homo sapien
tcagtgaacttctggcggtgaggat

SEQ ID NO: 4785427 - DNA, 25 bp, Homo sapien
tataaaagcgaggaatcgccagggc

SEQ ID NO: 4785428 - DNA, 25 bp, Homo sapien
agtgaggtaaggtacgggaggctca

SEQ ID NO: 4785429 - DNA, 25 bp, Homo sapien
tgaggtaaggtacgggaggctcagg

SEQ ID NO: 4785430 - DNA, 25 bp, Homo sapien
ttgagtgaggtaaggtacgggaggc

SEQ ID NO: 4785431 - DNA, 25 bp, Homo sapien
ctgttgagtgaggtaaggtacggga

SEQ ID NO: 4785432 - DNA, 25 bp, Homo sapien
ttcagacaggtaccgctggcgactc

SEQ ID NO: 4785433 - DNA, 25 bp, Homo sapien
accgctggcgactcgggtgccctta

SEQ ID NO: 4785434 - DNA, 25 bp, Homo sapien
cttcagacaggtaccgctggcgact

SEQ ID NO: 4785435 - DNA, 25 bp, Homo sapien
ggtaccgctggcgactcgggtgccc

SEQ ID NO: 4785436 - DNA, 25 bp, Homo sapien
taatccctctgttttgctgcagata

SEQ ID NO: 4785437 - DNA, 25 bp, Homo sapien
aatccctctgttttgctgcagatac

SEQ ID NO: 4785438 - DNA, 25 bp, Homo sapien
ctaatccctctgttttgctgcagat

SEQ ID NO: 4785439 - DNA, 25 bp, Homo sapien
gaaaccctcgaatacattgaagcca

SEQ ID NO: 4785440 - DNA, 25 bp, Homo sapien
tgtttccgaagtttacactgtgctg

SEQ ID NO: 4785441 - DNA, 25 bp, Homo sapien
tagacatgaaggtccatgtaccctg

SEQ ID NO: 4785442 - DNA, 25 bp, Homo sapien
cactgtgctggactgagtttgtaga

SEQ ID NO: 4785443 - DNA, 25 bp, Homo sapien
tctcaatgcagaattattgggtctt

SEQ ID NO: 4785444 - DNA, 25 bp, Homo sapien
taaatgataaccaacagtcttctgt

SEQ ID NO: 4785445 - DNA, 25 bp, Homo sapien
cattccggatttgtaaagcaacatg

SEQ ID NO: 4785446 - DNA, 25 bp, Homo sapien
ccacccattccggatttgtaaagca

SEQ ID NO: 4785447 - DNA, 25 bp, Homo sapien
gaggcaagattcctcttaattgata

SEQ ID NO: 4785448 - DNA, 25 bp, Homo sapien
tagttaggcacccatgaatgtctcc

SEQ ID NO: 4785449 - DNA, 25 bp, Homo sapien
cagtcctctctaagcagggagcact

SEQ ID NO: 4785450 - DNA, 25 bp, Homo sapien
agctactgatatctggcccctggaa

SEQ ID NO: 4785451 - DNA, 25 bp, Homo sapien
tccctggtagtagtggtctcattca

SEQ ID NO: 4785452 - DNA, 25 bp, Homo sapien
ttccctggtagtagtggtctcattc

SEQ ID NO: 4785453 - DNA, 25 bp, Homo sapien
tttttattcttacacgactacagta

SEQ ID NO: 4785454 - DNA, 25 bp, Homo sapien
aaatgcaggtagttaagaatagatt

SEQ ID NO: 4785455 - DNA, 25 bp, Homo sapien
tatattgatactctctgataaatgc

SEQ ID NO: 4785456 - DNA, 25 bp, Homo sapien
gactacagtacttcaaatggcacat

SEQ ID NO: 4785457 - DNA, 25 bp, Homo sapien
taagctgcttcacatcagactgaaa

SEQ ID NO: 4785458 - DNA, 25 bp, Homo sapien
ggtgcatgatgccattttaagctgc

SEQ ID NO: 4785459 - DNA, 25 bp, Homo sapien
tcaactaggcaagaatcagcagggt

SEQ ID NO: 4785460 - DNA, 25 bp, Homo sapien
tgtataggtcctgtgcttaaaggag

SEQ ID NO: 4785461 - DNA, 25 bp, Homo sapien
ctgtgaatggagtagtatgaacatc

SEQ ID NO: 4785462 - DNA, 25 bp, Homo sapien
agcctgggaggatgtgagctgttca

SEQ ID NO: 4785463 - DNA, 25 bp, Homo sapien
ctgtgggccctgtgaatggagtagt

SEQ ID NO: 4785464 - DNA, 25 bp, Homo sapien
ggaagagcctgggaggatgtgagct

SEQ ID NO: 4785465 - DNA, 25 bp, Homo sapien
tcctatttgacagcttattgtttcg

SEQ ID NO: 4785466 - DNA, 25 bp, Homo sapien
cagcttattgtttcgtttagcatca

SEQ ID NO: 4785467 - DNA, 25 bp, Homo sapien
cctggtcccaggatgtcaacacaat

SEQ ID NO: 4785468 - DNA, 25 bp, Homo sapien
atgtcaacacaatcgggctcctttc

SEQ ID NO: 4785469 - DNA, 25 bp, Homo sapien
ttccaatcttgctaccctgttacca

SEQ ID NO: 4785470 - DNA, 25 bp, Homo sapien
tccaatcttgctaccctgttaccac

SEQ ID NO: 4785471 - DNA, 25 bp, Homo sapien
tgcggcggagacttggtagcggcca

SEQ ID NO: 4785472 - DNA, 25 bp, Homo sapien
cttggtagcggccaccgagccaatt

SEQ ID NO: 4785473 - DNA, 25 bp, Homo sapien
caccgagccaattcggtgggaagac

SEQ ID NO: 4785474 - DNA, 25 bp, Homo sapien
gctccgggggtgctaggccgactct

SEQ ID NO: 4785475 - DNA, 25 bp, Homo sapien
aaacagagaatttatgcatatccat

SEQ ID NO: 4785476 - DNA, 25 bp, Homo sapien
taaacagagaatttatgcatatcca

SEQ ID NO: 4785477 - DNA, 25 bp, Homo sapien
cttcagtagcgacaatataaacaga

SEQ ID NO: 4785478 - DNA, 25 bp, Homo sapien
atataaacagagaatttatgcatat

SEQ ID NO: 4785479 - DNA, 25 bp, Homo sapien
acaaataaaccccatgaatgagtct

SEQ ID NO: 4785480 - DNA, 25 bp, Homo sapien
aataaaccccatgaatgagtctgca

SEQ ID NO: 4785481 - DNA, 25 bp, Homo sapien
actgtagaggttaggagatcttgct

SEQ ID NO: 4785482 - DNA, 25 bp, Homo sapien
gccttaactgtagaggttaggagat

SEQ ID NO: 4785483 - DNA, 25 bp, Homo sapien
tatttttatatctccagtaagtcac

SEQ ID NO: 4785484 - DNA, 25 bp, Homo sapien
tatctccagtaagtcacagtgtgac

SEQ ID NO: 4785485 - DNA, 25 bp, Homo sapien
cactgtggttgctcgataaatgtta

SEQ ID NO: 4785486 - DNA, 25 bp, Homo sapien
tcttgaggtcaggatattattgttt

SEQ ID NO: 4785487 - DNA, 25 bp, Homo sapien
tgaggaccgtgttttgttcatctgc

SEQ ID NO: 4785488 - DNA, 25 bp, Homo sapien
aatccaactctgagcgtctcccctt

SEQ ID NO: 4785489 - DNA, 25 bp, Homo sapien
tccaactctgagcgtctccccttga

SEQ ID NO: 4785490 - DNA, 25 bp, Homo sapien
cttgaggaccgtgttttgttcatct

SEQ ID NO: 4785491 - DNA, 25 bp, Homo sapien
accgaggcaagagccggctggagcc

SEQ ID NO: 4785492 - DNA, 25 bp, Homo sapien
caagaagacgctggacccttactag

SEQ ID NO: 4785493 - DNA, 25 bp, Homo sapien
gcctagcgccggtgagcctgcggct

SEQ ID NO: 4785494 - DNA, 25 bp, Homo sapien
cccttactaggagaaccgaggcaag

SEQ ID NO: 4785495 - DNA, 25 bp, Homo sapien
ggcgcggaggagcgggcggccgcgg

SEQ ID NO: 4785496 - DNA, 25 bp, Homo sapien
cggagctggagccggcgcggaggag

SEQ ID NO: 4785497 - DNA, 25 bp, Homo sapien
gagctggagccggcgcggaggagcg

SEQ ID NO: 4785498 - DNA, 25 bp, Homo sapien
cggaggagcgggcggccgcggctgt

SEQ ID NO: 4785499 - DNA, 25 bp, Homo sapien
ccatgggacgagttggctctggcct

SEQ ID NO: 4785500 - DNA, 25 bp, Homo sapien
ggtcggtggtcgttatggattctcc

SEQ ID NO: 4785501 - DNA, 25 bp, Homo sapien
tggattctccatgggacgagttggc

SEQ ID NO: 4785502 - DNA, 25 bp, Homo sapien
cagtagccgcggctgcttcggttgc

SEQ ID NO: 4785503 - DNA, 25 bp, Homo sapien
tttcccttttttgacatcgcgcact

SEQ ID NO: 4785504 - DNA, 25 bp, Homo sapien
gtttcccttttttgacatcgcgcac

SEQ ID NO: 4785505 - DNA, 25 bp, Homo sapien
ttcccttttttgacatcgcgcacta

SEQ ID NO: 4785506 - DNA, 25 bp, Homo sapien
tcccttttttgacatcgcgcactat

SEQ ID NO: 4785507 - DNA, 25 bp, Homo sapien
cattggcatggaagaatcctatttc

SEQ ID NO: 4785508 - DNA, 25 bp, Homo sapien
actgcttgcagagcctccattgaag

SEQ ID NO: 4785509 - DNA, 25 bp, Homo sapien
actgctatgctccactgttttggtg

SEQ ID NO: 4785510 - DNA, 25 bp, Homo sapien
caaaccacactaacatattactggc

SEQ ID NO: 4785511 - DNA, 25 bp, Homo sapien
ccatgaatcaatatacgcttattca

SEQ ID NO: 4785512 - DNA, 25 bp, Homo sapien
ttcccacctaaatcagtttgaggca

SEQ ID NO: 4785513 - DNA, 25 bp, Homo sapien
taaatcagtttgaggcagaccaaca

SEQ ID NO: 4785514 - DNA, 25 bp, Homo sapien
aatatacgcttattcatatttaggg

SEQ ID NO: 4785515 - DNA, 25 bp, Homo sapien
acttcggcttctaggacgtctgtat

SEQ ID NO: 4785516 - DNA, 25 bp, Homo sapien
tctccttctttcataacttcggctt

SEQ ID NO: 4785517 - DNA, 25 bp, Homo sapien
tcataacttcggcttctaggacgtc

SEQ ID NO: 4785518 - DNA, 25 bp, Homo sapien
taacttcggcttctaggacgtctgt

SEQ ID NO: 4785519 - DNA, 25 bp, Homo sapien
tagcgtgaagaactgtacatattcc

SEQ ID NO: 4785520 - DNA, 25 bp, Homo sapien
tcataatcatcatagcgtgaagaac

SEQ ID NO: 4785521 - DNA, 25 bp, Homo sapien
catcatagcgtgaagaactgtacat

SEQ ID NO: 4785522 - DNA, 25 bp, Homo sapien
gtgaagaactgtacatattcctccc

SEQ ID NO: 4785523 - DNA, 25 bp, Homo sapien
ttggtgtcttccgatccccctgggc

SEQ ID NO: 4785524 - DNA, 25 bp, Homo sapien
tggtgtcttccgatccccctgggca

SEQ ID NO: 4785525 - DNA, 25 bp, Homo sapien
caaattatataaagtgtcttcagca

SEQ ID NO: 4785526 - DNA, 25 bp, Homo sapien
ttatataaagtgtcttcagcatcag

SEQ ID NO: 4785527 - DNA, 25 bp, Homo sapien
ctgtccaaattatataaagtgtctt

SEQ ID NO: 4785528 - DNA, 25 bp, Homo sapien
atataaagtgtcttcagcatcagga

SEQ ID NO: 4785529 - DNA, 25 bp, Homo sapien
agcaaatcctctcttggatggtgag

SEQ ID NO: 4785530 - DNA, 25 bp, Homo sapien
ctctcttggatggtgagtgtggaaa

SEQ ID NO: 4785531 - DNA, 25 bp, Homo sapien
caaatcctctcttggatggtgagtg

SEQ ID NO: 4785532 - DNA, 25 bp, Homo sapien
tggatggtgagtgtggaaatcaagt

SEQ ID NO: 4785533 - DNA, 25 bp, Homo sapien
ctatgttcctgacaaacagagacat

SEQ ID NO: 4785534 - DNA, 25 bp, Homo sapien
cgttggctatgttcctgacaaacag

SEQ ID NO: 4785535 - DNA, 25 bp, Homo sapien
agacctggtgtcgttggctatgttc

SEQ ID NO: 4785536 - DNA, 25 bp, Homo sapien
cagacctggtgtcgttggctatgtt

SEQ ID NO: 4785537 - DNA, 25 bp, Homo sapien
aacgggcccagcaaaccgtccatgg

SEQ ID NO: 4785538 - DNA, 25 bp, Homo sapien
tgaaggctgcgtgtctccactgggt

SEQ ID NO: 4785539 - DNA, 25 bp, Homo sapien
ttggggagacggcaggtagcgggac

SEQ ID NO: 4785540 - DNA, 25 bp, Homo sapien
ccactgggtgcactaacgggcccag

SEQ ID NO: 4785541 - DNA, 25 bp, Homo sapien
tggcaaccgcctcttttcctgagac

SEQ ID NO: 4785542 - DNA, 25 bp, Homo sapien
tatggcaaccgcctcttttcctgag

SEQ ID NO: 4785543 - DNA, 25 bp, Homo sapien
cagccagagggctccgctatggcaa

SEQ ID NO: 4785544 - DNA, 25 bp, Homo sapien
gagggctccgctatggcaaccgcct

SEQ ID NO: 4785545 - DNA, 25 bp, Homo sapien
gtggggagctcaggcttgattcttc

SEQ ID NO: 4785546 - DNA, 25 bp, Homo sapien
ttctattctgctcaggtttgattct

SEQ ID NO: 4785547 - DNA, 25 bp, Homo sapien
tttcttctcagtgtggggagctcag

SEQ ID NO: 4785548 - DNA, 25 bp, Homo sapien
tgttctattctgctcaggtttgatt

SEQ ID NO: 4785549 - DNA, 25 bp, Homo sapien
tttcttccgccttcagaagtaacca

SEQ ID NO: 4785550 - DNA, 25 bp, Homo sapien
ccgccttcagaagtaaccattatct

SEQ ID NO: 4785551 - DNA, 25 bp, Homo sapien
ttccgccttcagaagtaaccattat

SEQ ID NO: 4785552 - DNA, 25 bp, Homo sapien
tcttccgccttcagaagtaaccatt

SEQ ID NO: 4785553 - DNA, 25 bp, Homo sapien
cagtggttgtgctgagactcgccac

SEQ ID NO: 4785554 - DNA, 25 bp, Homo sapien
gccttcgctgccatggacgccagtg

SEQ ID NO: 4785555 - DNA, 25 bp, Homo sapien
tattcaaatcggcggcagggccagt

SEQ ID NO: 4785556 - DNA, 25 bp, Homo sapien
tgggcctgagtgttgccttcgctgc

SEQ ID NO: 4785557 - DNA, 25 bp, Homo sapien
caatgggcatgaaatcaccgatgat

SEQ ID NO: 4785558 - DNA, 25 bp, Homo sapien
gactggtacacgaagtttgctgcaa

SEQ ID NO: 4785559 - DNA, 25 bp, Homo sapien
ttagagagggttgccatcgatgcgc

SEQ ID NO: 4785560 - DNA, 25 bp, Homo sapien
tgtcgtttgttacttccgccaccaa

SEQ ID NO: 4785561 - DNA, 25 bp, Homo sapien
aaaaagggacatattgaaaatcctg

SEQ ID NO: 4785562 - DNA, 25 bp, Homo sapien
aaaatcctggagatggactatttgt

SEQ ID NO: 4785563 - DNA, 25 bp, Homo sapien
aaagggacatattgaaaatcctgga

SEQ ID NO: 4785564 - DNA, 25 bp, Homo sapien
tcctggagatggactatttgttcct

SEQ ID NO: 4785565 - DNA, 25 bp, Homo sapien
ggtcattggcctcaaagccggtaga

SEQ ID NO: 4785566 - DNA, 25 bp, Homo sapien
gcagcagccgttttcatcatgtgag

SEQ ID NO: 4785567 - DNA, 25 bp, Homo sapien
caaagtcaccttccaatggcgttgg

SEQ ID NO: 4785568 - DNA, 25 bp, Homo sapien
catgatgactacacagacttctact

SEQ ID NO: 4785569 - DNA, 25 bp, Homo sapien
tgtagttgaaatggaaggactcttg

SEQ ID NO: 4785570 - DNA, 25 bp, Homo sapien
aaacaccagcagatactattacttg

SEQ ID NO: 4785571 - DNA, 25 bp, Homo sapien
taatacattgttaattattgaccag

SEQ ID NO: 4785572 - DNA, 25 bp, Homo sapien
gctttaagtatttaagagctctgta

SEQ ID NO: 4785573 - DNA, 25 bp, Homo sapien
ggctctcactacctcttgttgggtt

SEQ ID NO: 4785574 - DNA, 25 bp, Homo sapien
cctcttgttgggtttagtgtggtag

SEQ ID NO: 4785575 - DNA, 25 bp, Homo sapien
cacctgcattcaggctctcactacc

SEQ ID NO: 4785576 - DNA, 25 bp, Homo sapien
tgggtttagtgtggtagtgtcatat

SEQ ID NO: 4785577 - DNA, 25 bp, Homo sapien
tgtagaatactgcctttgagagagt

SEQ ID NO: 4785578 - DNA, 25 bp, Homo sapien
actgcctttgagagagtatttatgt

SEQ ID NO: 4785579 - DNA, 25 bp, Homo sapien
gaatactgcctttgagagagtattt

SEQ ID NO: 4785580 - DNA, 25 bp, Homo sapien
tagaatactgcctttgagagagtat

SEQ ID NO: 4785581 - DNA, 25 bp, Homo sapien
cagggcaggagctctggggtcctgg

SEQ ID NO: 4785582 - DNA, 25 bp, Homo sapien
ggcaggagctctggggtcctggcac

SEQ ID NO: 4785583 - DNA, 25 bp, Homo sapien
tcagggcaggagctctggggtcctg

SEQ ID NO: 4785584 - DNA, 25 bp, Homo sapien
gggcaggagctctggggtcctggca

SEQ ID NO: 4785585 - DNA, 25 bp, Homo sapien
gatgattgcctatatcctcctactc

SEQ ID NO: 4785586 - DNA, 25 bp, Homo sapien
caggtccctggcatcaaacgctttg

SEQ ID NO: 4785587 - DNA, 25 bp, Homo sapien
tagcctagctgctccttggaatctg

SEQ ID NO: 4785588 - DNA, 25 bp, Homo sapien
ttggccaccagttgagctgaccagg

SEQ ID NO: 4785589 - DNA, 25 bp, Homo sapien
tctttgtgtacagttcacgggtgtc

SEQ ID NO: 4785590 - DNA, 25 bp, Homo sapien
ttcacgggtgtcactttctgagcca

SEQ ID NO: 4785591 - DNA, 25 bp, Homo sapien
gacttcctttgcgtctttgtgtaca

SEQ ID NO: 4785592 - DNA, 25 bp, Homo sapien
ctttgacttcctttgcgtctttgtg

SEQ ID NO: 4785593 - DNA, 25 bp, Homo sapien
aggacttcctggctggatgcctcac

SEQ ID NO: 4785594 - DNA, 25 bp, Homo sapien
ccaggacttcctggctggatgcctc

SEQ ID NO: 4785595 - DNA, 25 bp, Homo sapien
ccacctcctttgcccaggacttcct

SEQ ID NO: 4785596 - DNA, 25 bp, Homo sapien
tcaggccacctcctttgcccaggac

SEQ ID NO: 4785597 - DNA, 25 bp, Homo sapien
cttctgggtgggcaatctggccaat

SEQ ID NO: 4785598 - DNA, 25 bp, Homo sapien
ggtgcaacgtgccagtgagcagatc

SEQ ID NO: 4785599 - DNA, 25 bp, Homo sapien
caagtgggtcaatggcatcatggac

SEQ ID NO: 4785600 - DNA, 25 bp, Homo sapien
tccgtatacccaaggagcagggtgt

SEQ ID NO: 4785601 - DNA, 25 bp, Homo sapien
ctcagtgtgtacaatacagccaaag

SEQ ID NO: 4785602 - DNA, 25 bp, Homo sapien
ttgaaagacgaagagagcaaagcct

SEQ ID NO: 4785603 - DNA, 25 bp, Homo sapien
ggcgcatggtctaacatcctcagag

SEQ ID NO: 4785604 - DNA, 25 bp, Homo sapien
catgatctagtgtggcatcgtaacc

SEQ ID NO: 4785605 - DNA, 25 bp, Homo sapien
gatgattgcccagacgtgatggcca

SEQ ID NO: 4785606 - DNA, 25 bp, Homo sapien
cttctgccagatgcctctgacagca

SEQ ID NO: 4785607 - DNA, 25 bp, Homo sapien
ctgacagcacccaagagggtctgga

SEQ ID NO: 4785608 - DNA, 25 bp, Homo sapien
cactttgtgagtgcgcagggtataa

SEQ ID NO: 4785609 - DNA, 25 bp, Homo sapien
gtttgtggcccacccttcagtgcac

SEQ ID NO: 4785610 - DNA, 25 bp, Homo sapien
catagggaaacctacacccctgcct

SEQ ID NO: 4785611 - DNA, 25 bp, Homo sapien
taggaaaaccagtgaagagcaggaa

SEQ ID NO: 4785612 - DNA, 25 bp, Homo sapien
gctaatgctgtaatgggccctgttt

SEQ ID NO: 4785613 - DNA, 25 bp, Homo sapien
ggccataagcatgcaataaggagga

SEQ ID NO: 4785614 - DNA, 25 bp, Homo sapien
ggactcaagtcatacctgctgtgca

SEQ ID NO: 4785615 - DNA, 25 bp, Homo sapien
tggacttggatccttgccttctttg

SEQ ID NO: 4785616 - DNA, 25 bp, Homo sapien
cagagaccaagagcctggttaaggg

SEQ ID NO: 4785617 - DNA, 25 bp, Homo sapien
ttgatagtttggctgactgatgtgg

SEQ ID NO: 4785618 - DNA, 25 bp, Homo sapien
ccagaagtaaggtagactcggcaga

SEQ ID NO: 4785619 - DNA, 25 bp, Homo sapien
ttttctaccagttgcgttggcatgg

SEQ ID NO: 4785620 - DNA, 25 bp, Homo sapien
cttctttttctaccagttgcgttgg

SEQ ID NO: 4785621 - DNA, 25 bp, Homo sapien
gttgcgttggcatggttttggcaca

SEQ ID NO: 4785622 - DNA, 25 bp, Homo sapien
caaggcaacttggttgtttgaccca

SEQ ID NO: 4785623 - DNA, 25 bp, Homo sapien
atagcagctcctgtcgtacctgtgc

SEQ ID NO: 4785624 - DNA, 25 bp, Homo sapien
agcagctcctgtcgtacctgtgcca

SEQ ID NO: 4785625 - DNA, 25 bp, Homo sapien
cctgtcgtacctgtgccaccttctc

SEQ ID NO: 4785626 - DNA, 25 bp, Homo sapien
agctcctgtcgtacctgtgccacct

SEQ ID NO: 4785627 - DNA, 25 bp, Homo sapien
ccagaaaattggctcgttctccaga

SEQ ID NO: 4785628 - DNA, 25 bp, Homo sapien
gaatgtgaggcaggcttgataaggc

SEQ ID NO: 4785629 - DNA, 25 bp, Homo sapien
tgataaggcgccagggggtgtggaa

SEQ ID NO: 4785630 - DNA, 25 bp, Homo sapien
accttcagttgccacggtggagctg

SEQ ID NO: 4785631 - DNA, 25 bp, Homo sapien
tgaataagttcttgggccgggcatg

SEQ ID NO: 4785632 - DNA, 25 bp, Homo sapien
atgaataagttcttgggccgggcat

SEQ ID NO: 4785633 - DNA, 25 bp, Homo sapien
ggcacgtgcacatgcaacattgtgt

SEQ ID NO: 4785634 - DNA, 25 bp, Homo sapien
catctttccttgagtgttggttacc

SEQ ID NO: 4785635 - DNA, 25 bp, Homo sapien
ttcaagagtgaagaacctcctgtcc

SEQ ID NO: 4785636 - DNA, 25 bp, Homo sapien
ggttacctggtcataatcggagaag

SEQ ID NO: 4785637 - DNA, 25 bp, Homo sapien
gtttaagaagagaatagctgggttg

SEQ ID NO: 4785638 - DNA, 25 bp, Homo sapien
atcctggcgtttccctactctgtag

SEQ ID NO: 4785639 - DNA, 25 bp, Homo sapien
tcttacaatcaacagaatcccctca

SEQ ID NO: 4785640 - DNA, 25 bp, Homo sapien
ggcgtttccctactctgtagccagc

SEQ ID NO: 4785641 - DNA, 25 bp, Homo sapien
tcttccattgattatagcaacttgt

SEQ ID NO: 4785642 - DNA, 25 bp, Homo sapien
tatctctcatgccactctttgtctt

SEQ ID NO: 4785643 - DNA, 25 bp, Homo sapien
ggaaggactccagtatcactctcaa

SEQ ID NO: 4785644 - DNA, 25 bp, Homo sapien
acttgtgcttgaacacacaggaaac

SEQ ID NO: 4785645 - DNA, 25 bp, Homo sapien
ggttgttatccataaagctgggaga

SEQ ID NO: 4785646 - DNA, 25 bp, Homo sapien
tgttatccataaagctgggagatga

SEQ ID NO: 4785647 - DNA, 25 bp, Homo sapien
tggggttgttatccataaagctggg

SEQ ID NO: 4785648 - DNA, 25 bp, Homo sapien
ttatccataaagctgggagatgact

SEQ ID NO: 4785649 - DNA, 25 bp, Homo sapien
tgtaacgtgcgttctttcagatcca

SEQ ID NO: 4785650 - DNA, 25 bp, Homo sapien
gttcagggctgtagtctaatcccat

SEQ ID NO: 4785651 - DNA, 25 bp, Homo sapien
gcagtttgccatggtcatctgtaga

SEQ ID NO: 4785652 - DNA, 25 bp, Homo sapien
ctatgttgtaaggagagttcagggc

SEQ ID NO: 4785653 - DNA, 25 bp, Homo sapien
gcccagggagtgtgatcactttctg

SEQ ID NO: 4785654 - DNA, 25 bp, Homo sapien
ggcagcccagggagtgtgatcactt

SEQ ID NO: 4785655 - DNA, 25 bp, Homo sapien
tgatcactttctggagatagatcca

SEQ ID NO: 4785656 - DNA, 25 bp, Homo sapien
gatcactttctggagatagatccat

SEQ ID NO: 4785657 - DNA, 25 bp, Homo sapien
gcatattgtaattgcatgacagtcg

SEQ ID NO: 4785658 - DNA, 25 bp, Homo sapien
gaagaaggcatattgtaattgcatg

SEQ ID NO: 4785659 - DNA, 25 bp, Homo sapien
taattgcatgacagtcgtgtcccgg

SEQ ID NO: 4785660 - DNA, 25 bp, Homo sapien
agtcgtgtcccggtagctaaagagg

SEQ ID NO: 4785661 - DNA, 25 bp, Homo sapien
ctcgaaggttttgaggcagggctct

SEQ ID NO: 4785662 - DNA, 25 bp, Homo sapien
tctcgaaggttttgaggcagggctc

SEQ ID NO: 4785663 - DNA, 25 bp, Homo sapien
cctttctcgaaggttttgaggcagg

SEQ ID NO: 4785664 - DNA, 25 bp, Homo sapien
tttctcgaaggttttgaggcagggc

SEQ ID NO: 4785665 - DNA, 25 bp, Homo sapien
tcccttacttgccagaaagagtgtg

SEQ ID NO: 4785666 - DNA, 25 bp, Homo sapien
gaaatccaaagtatcccttacttgc

SEQ ID NO: 4785667 - DNA, 25 bp, Homo sapien
tccaaagtatcccttacttgccaga

SEQ ID NO: 4785668 - DNA, 25 bp, Homo sapien
aaagtatcccttacttgccagaaag

SEQ ID NO: 4785669 - DNA, 25 bp, Homo sapien
taggaatgcgatgtggacttgccga

SEQ ID NO: 4785670 - DNA, 25 bp, Homo sapien
ttaaaaataggaatgcgatgtggac

SEQ ID NO: 4785671 - DNA, 25 bp, Homo sapien
aataggaatgcgatgtggacttgcc

SEQ ID NO: 4785672 - DNA, 25 bp, Homo sapien
gaatgcgatgtggacttgccgacat

SEQ ID NO: 4785673 - DNA, 25 bp, Homo sapien
gaaagatccatgtagtttctcgtct

SEQ ID NO: 4785674 - DNA, 25 bp, Homo sapien
agcacgttcgtgtaccaggctccat

SEQ ID NO: 4785675 - DNA, 25 bp, Homo sapien
agttaatttctctggctggtatgtc

SEQ ID NO: 4785676 - DNA, 25 bp, Homo sapien
tccatccccagggtatgaccaagtg

SEQ ID NO: 4785677 - DNA, 25 bp, Homo sapien
ctccgggcttgtggcctgagaatgc

SEQ ID NO: 4785678 - DNA, 25 bp, Homo sapien
aacaagatgagctgtagagtggctc

SEQ ID NO: 4785679 - DNA, 25 bp, Homo sapien
tcagcaggctccgggcttgtggcct

SEQ ID NO: 4785680 - DNA, 25 bp, Homo sapien
ggtgaacaagatgagctgtagagtg

SEQ ID NO: 4785681 - DNA, 25 bp, Homo sapien
gctgctcaagctggtactcctcctc

SEQ ID NO: 4785682 - DNA, 25 bp, Homo sapien
gaatgtgcagatggcactggcagct

SEQ ID NO: 4785683 - DNA, 25 bp, Homo sapien
acatccccgttctttaaattcaatg

SEQ ID NO: 4785684 - DNA, 25 bp, Homo sapien
gtggaatgtgcagatggcactggca

SEQ ID NO: 4785685 - DNA, 25 bp, Homo sapien
cacagaaaagcttgaaggtccaatt

SEQ ID NO: 4785686 - DNA, 25 bp, Homo sapien
ccgcactgagatggccgtggcactt

SEQ ID NO: 4785687 - DNA, 25 bp, Homo sapien
tgagccatttctgagaaccgcctgc

SEQ ID NO: 4785688 - DNA, 25 bp, Homo sapien
agcttcaaaagcatgcaggctgctg

SEQ ID NO: 4785689 - DNA, 25 bp, Homo sapien
gcactggctcatggggcaccacagg

SEQ ID NO: 4785690 - DNA, 25 bp, Homo sapien
actggctcatggggcaccacaggac

SEQ ID NO: 4785691 - DNA, 25 bp, Homo sapien
ggctcatggggcaccacaggacaag

SEQ ID NO: 4785692 - DNA, 25 bp, Homo sapien
accacaggacaaggagagtttggag

SEQ ID NO: 4785693 - DNA, 25 bp, Homo sapien
tggaagatccctgtgttcagtggcc

SEQ ID NO: 4785694 - DNA, 25 bp, Homo sapien
tgttcagtggcctttagctctgatg

SEQ ID NO: 4785695 - DNA, 25 bp, Homo sapien
tggcctttagctctgatgcacccat

SEQ ID NO: 4785696 - DNA, 25 bp, Homo sapien
ctggttggaagatccctgtgttcag

SEQ ID NO: 4785697 - DNA, 25 bp, Homo sapien
ttggtgtagacgaaagaggatcaag

SEQ ID NO: 4785698 - DNA, 25 bp, Homo sapien
gctggctcacttgttttatctgttg

SEQ ID NO: 4785699 - DNA, 25 bp, Homo sapien
tggtgtagacgaaagaggatcaaga

SEQ ID NO: 4785700 - DNA, 25 bp, Homo sapien
aaattcaggctggctcacttgtttt

SEQ ID NO: 4785701 - DNA, 25 bp, Homo sapien
gctccaacaccttggatattgagtt

SEQ ID NO: 4785702 - DNA, 25 bp, Homo sapien
tgagtttcttttcgatgagtgttct

SEQ ID NO: 4785703 - DNA, 25 bp, Homo sapien
caacaccttggatattgagtttctt

SEQ ID NO: 4785704 - DNA, 25 bp, Homo sapien
tcttttcgatgagtgttctcttcaa

SEQ ID NO: 4785705 - DNA, 25 bp, Homo sapien
ggagtcttctgcctgattcacgtta

SEQ ID NO: 4785706 - DNA, 25 bp, Homo sapien
gattcacgttagatgtggttttctt

SEQ ID NO: 4785707 - DNA, 25 bp, Homo sapien
tcttctgcctgattcacgttagatg

SEQ ID NO: 4785708 - DNA, 25 bp, Homo sapien
gcctgattcacgttagatgtggttt

SEQ ID NO: 4785709 - DNA, 25 bp, Homo sapien
gagacagcacagttctgacaacaag

SEQ ID NO: 4785710 - DNA, 25 bp, Homo sapien
tgtggacacttcctttcatcttgtc

SEQ ID NO: 4785711 - DNA, 25 bp, Homo sapien
tctgacaacaagtgagtatttcaat

SEQ ID NO: 4785712 - DNA, 25 bp, Homo sapien
tttggagcttaagagtggaagaaca

SEQ ID NO: 4785713 - DNA, 25 bp, Homo sapien
ttgatgcatattatctgcttctctc

SEQ ID NO: 4785714 - DNA, 25 bp, Homo sapien
cttgatgcatattatctgcttctct

SEQ ID NO: 4785715 - DNA, 25 bp, Homo sapien
gatgcatattatctgcttctctctg

SEQ ID NO: 4785716 - DNA, 25 bp, Homo sapien
tgatgcatattatctgcttctctct

SEQ ID NO: 4785717 - DNA, 25 bp, Homo sapien
tttgcatgctgtataatcttaaacc

SEQ ID NO: 4785718 - DNA, 25 bp, Homo sapien
taaaccttttagagaacaggagcca

SEQ ID NO: 4785719 - DNA, 25 bp, Homo sapien
gagaacaggagccatgctttgtgct

SEQ ID NO: 4785720 - DNA, 25 bp, Homo sapien
catgctttgtgcttcttggttccat

SEQ ID NO: 4785721 - DNA, 25 bp, Homo sapien
ttactgatggtgaaatcagcatggg

SEQ ID NO: 4785722 - DNA, 25 bp, Homo sapien
aaatcagcatgggaagatttggagg

SEQ ID NO: 4785723 - DNA, 25 bp, Homo sapien
gaaagcagcatttactgatggtgaa

SEQ ID NO: 4785724 - DNA, 25 bp, Homo sapien
gactgtaagacaggggatactgatg

SEQ ID NO: 4785725 - DNA, 25 bp, Homo sapien
tgctcttcttgtcggcagactgcca

SEQ ID NO: 4785726 - DNA, 25 bp, Homo sapien
tgtgctcttcttgtcggcagactgc

SEQ ID NO: 4785727 - DNA, 25 bp, Homo sapien
tcttcttgtcggcagactgccaaag

SEQ ID NO: 4785728 - DNA, 25 bp, Homo sapien
cttgtgctcttcttgtcggcagact

SEQ ID NO: 4785729 - DNA, 25 bp, Homo sapien
tgtgtacttgcattgtgtgaaaaag

SEQ ID NO: 4785730 - DNA, 25 bp, Homo sapien
aaagaggaacctttgctgggctgca

SEQ ID NO: 4785731 - DNA, 25 bp, Homo sapien
ctgtgtacttgcattgtgtgaaaaa

SEQ ID NO: 4785732 - DNA, 25 bp, Homo sapien
taagggtggcaggtatatgataatc

SEQ ID NO: 4785733 - DNA, 25 bp, Homo sapien
ttagtcaactccatcacacttcagg

SEQ ID NO: 4785734 - DNA, 25 bp, Homo sapien
aaagctggatactgctaagggtggc

SEQ ID NO: 4785735 - DNA, 25 bp, Homo sapien
gtagcaattctggagagcactctgc

SEQ ID NO: 4785736 - DNA, 25 bp, Homo sapien
tcaagtatctggtgatgggggcctt

SEQ ID NO: 4785737 - DNA, 25 bp, Homo sapien
cacgttagaagctttccctcaagta

SEQ ID NO: 4785738 - DNA, 25 bp, Homo sapien
tctttcctgtgttcatttactgctt

SEQ ID NO: 4785739 - DNA, 25 bp, Homo sapien
tttggagatgttttctactgttctc

SEQ ID NO: 4785740 - DNA, 25 bp, Homo sapien
gctgcaaattttgagcccctttttc

SEQ ID NO: 4785741 - DNA, 25 bp, Homo sapien
ctgaatcggcatacatgctttctct

SEQ ID NO: 4785742 - DNA, 25 bp, Homo sapien
cttctgaatcggcatacatgctttc

SEQ ID NO: 4785743 - DNA, 25 bp, Homo sapien
agctgcaaattttgagccccttttt

SEQ ID NO: 4785744 - DNA, 25 bp, Homo sapien
atctctggattcactggttcgtaag

SEQ ID NO: 4785745 - DNA, 25 bp, Homo sapien
cactggttcgtaaggcaatcctttc

SEQ ID NO: 4785746 - DNA, 25 bp, Homo sapien
ctatgcacgtgctttggcaggaagt

SEQ ID NO: 4785747 - DNA, 25 bp, Homo sapien
ggaagtgctctcatttctgccatct

SEQ ID NO: 4785748 - DNA, 25 bp, Homo sapien
gacaagctgcagtggtaactcaaga

SEQ ID NO: 4785749 - DNA, 25 bp, Homo sapien
cgtgagacaagctgcagtggtaact

SEQ ID NO: 4785750 - DNA, 25 bp, Homo sapien
cagtggtaactcaagaagggagcag

SEQ ID NO: 4785751 - DNA, 25 bp, Homo sapien
gctgcagtggtaactcaagaaggga

SEQ ID NO: 4785752 - DNA, 25 bp, Homo sapien
tggtccattgaatgtaataagtgag

SEQ ID NO: 4785753 - DNA, 25 bp, Homo sapien
gaggtggtaactccagattctcttg

SEQ ID NO: 4785754 - DNA, 25 bp, Homo sapien
tgtttgaccagctacccctttgaga

SEQ ID NO: 4785755 - DNA, 25 bp, Homo sapien
aatgtttgaccagctacccctttga

SEQ ID NO: 4785756 - DNA, 25 bp, Homo sapien
aggaatgcttgggaaacaggctgct

SEQ ID NO: 4785757 - DNA, 25 bp, Homo sapien
ggaattaaggcctggttatagccca

SEQ ID NO: 4785758 - DNA, 25 bp, Homo sapien
tgctcttggcctgatgccggcccag

SEQ ID NO: 4785759 - DNA, 25 bp, Homo sapien
tctcttgaacaagtgaaggaatgct

SEQ ID NO: 4785760 - DNA, 25 bp, Homo sapien
tcatgtggccaacttttccagtgta

SEQ ID NO: 4785761 - DNA, 25 bp, Homo sapien
atgtggccaacttttccagtgtatc

SEQ ID NO: 4785762 - DNA, 25 bp, Homo sapien
tgtggccaacttttccagtgtatca

SEQ ID NO: 4785763 - DNA, 25 bp, Homo sapien
catgtggccaacttttccagtgtat

SEQ ID NO: 4785764 - DNA, 25 bp, Homo sapien
catgtagcctcttgcaaggcattcc

SEQ ID NO: 4785765 - DNA, 25 bp, Homo sapien
tgtagcctcttgcaaggcattcccc

SEQ ID NO: 4785766 - DNA, 25 bp, Homo sapien
tcatgtagcctcttgcaaggcattc

SEQ ID NO: 4785767 - DNA, 25 bp, Homo sapien
tagcctcttgcaaggcattccccac

SEQ ID NO: 4785768 - DNA, 25 bp, Homo sapien
ccaggattccatgagaagcttctcc

SEQ ID NO: 4785769 - DNA, 25 bp, Homo sapien
cactgccagtacttgagcaacttgc

SEQ ID NO: 4785770 - DNA, 25 bp, Homo sapien
ctccaggattccatgagaagcttct

SEQ ID NO: 4785771 - DNA, 25 bp, Homo sapien
tgcactgccagtacttgagcaactt

SEQ ID NO: 4785772 - DNA, 25 bp, Homo sapien
cagtgccattgacatgagttgtagc

SEQ ID NO: 4785773 - DNA, 25 bp, Homo sapien
gatattctggattagatcacgggca

SEQ ID NO: 4785774 - DNA, 25 bp, Homo sapien
gatgtgtactcttggcattcccctg

SEQ ID NO: 4785775 - DNA, 25 bp, Homo sapien
tcttttcaactatcagcgttgtgga

SEQ ID NO: 4785776 - DNA, 25 bp, Homo sapien
tgcataagggagaaagtccaagctt

SEQ ID NO: 4785777 - DNA, 25 bp, Homo sapien
tgatggctcccacattgcataaggg

SEQ ID NO: 4785778 - DNA, 25 bp, Homo sapien
gtagctgcttttgacttgatacccc

SEQ ID NO: 4785779 - DNA, 25 bp, Homo sapien
tatgctgtcataaccagctcagcct

SEQ ID NO: 4785780 - DNA, 25 bp, Homo sapien
ctggccacaaccagcctttacttta

SEQ ID NO: 4785781 - DNA, 25 bp, Homo sapien
tggccacaaccagcctttactttaa

SEQ ID NO: 4785782 - DNA, 25 bp, Homo sapien
ttattgatggcctaatttgcaccag

SEQ ID NO: 4785783 - DNA, 25 bp, Homo sapien
tctatgcatttccttacccactttc

SEQ ID NO: 4785784 - DNA, 25 bp, Homo sapien
cacacttcagttgggagagttcggg

SEQ ID NO: 4785785 - DNA, 25 bp, Homo sapien
gacactgtattttatccttgaaact

SEQ ID NO: 4785786 - DNA, 25 bp, Homo sapien
caccttcggaatcaacttcagttgc

SEQ ID NO: 4785787 - DNA, 25 bp, Homo sapien
tatccaccttcggaatcaacttcag

SEQ ID NO: 4785788 - DNA, 25 bp, Homo sapien
tcggaatcaacttcagttgcatttg

SEQ ID NO: 4785789 - DNA, 25 bp, Homo sapien
cagttgcatttgttggttggcattc

SEQ ID NO: 4785790 - DNA, 25 bp, Homo sapien
tcttcattggaatgggggatgacca

SEQ ID NO: 4785791 - DNA, 25 bp, Homo sapien
gtcttcattggaatgggggatgacc

SEQ ID NO: 4785792 - DNA, 25 bp, Homo sapien
cacgtgggttcccatgagtcccaaa

SEQ ID NO: 4785793 - DNA, 25 bp, Homo sapien
tcatggaaactgattgataaagtag

SEQ ID NO: 4785794 - DNA, 25 bp, Homo sapien
aacactgtgtatgagaatccagggc

SEQ ID NO: 4785795 - DNA, 25 bp, Homo sapien
taccatggggaagctggttgaaacc

SEQ ID NO: 4785796 - DNA, 25 bp, Homo sapien
atatcaaaagccgttggaatttgct

SEQ ID NO: 4785797 - DNA, 25 bp, Homo sapien
tttgcttcgtttaaccacatagaat

SEQ ID NO: 4785798 - DNA, 25 bp, Homo sapien
gaatttgcttcgtttaaccacatag

SEQ ID NO: 4785799 - DNA, 25 bp, Homo sapien
caaaagccgttggaatttgcttcgt

SEQ ID NO: 4785800 - DNA, 25 bp, Homo sapien
gcctctaagggatttgctgtctgtg

SEQ ID NO: 4785801 - DNA, 25 bp, Homo sapien
tctgtgtgcctattgggctgtctgt

SEQ ID NO: 4785802 - DNA, 25 bp, Homo sapien
tttgagaaagcctctaagggatttg

SEQ ID NO: 4785803 - DNA, 25 bp, Homo sapien
gaaagctcagtctgcgattgattgc

SEQ ID NO: 4785804 - DNA, 25 bp, Homo sapien
gcgacaagagacagttatggatttc

SEQ ID NO: 4785805 - DNA, 25 bp, Homo sapien
tctcttcagataagagttctctggc

SEQ ID NO: 4785806 - DNA, 25 bp, Homo sapien
tgtggttgcacctgatctaatgatt

SEQ ID NO: 4785807 - DNA, 25 bp, Homo sapien
tgagatagtggaggatttctgcgac

SEQ ID NO: 4785808 - DNA, 25 bp, Homo sapien
tggcattttcccaagctgcttcttg

SEQ ID NO: 4785809 - DNA, 25 bp, Homo sapien
caaagatatgtcttgaagccttttc

SEQ ID NO: 4785810 - DNA, 25 bp, Homo sapien
gaacagcaagctggtatttggagca

SEQ ID NO: 4785811 - DNA, 25 bp, Homo sapien
tttggagcatatggcgatggtctgt

SEQ ID NO: 4785812 - DNA, 25 bp, Homo sapien
ttgaaggcacagcaacaagccttca

SEQ ID NO: 4785813 - DNA, 25 bp, Homo sapien
agcatgccagaacaggacctcgtct

SEQ ID NO: 4785814 - DNA, 25 bp, Homo sapien
gcggcctctaaatttatacccttga

SEQ ID NO: 4785815 - DNA, 25 bp, Homo sapien
aggcacagcaacaagccttcatctc

SEQ ID NO: 4785816 - DNA, 25 bp, Homo sapien
tccttgtctcaaggggaacgtattg

SEQ ID NO: 4785817 - DNA, 25 bp, Homo sapien
tctcaaggggaacgtattgacttac

SEQ ID NO: 4785818 - DNA, 25 bp, Homo sapien
cttgtctcaaggggaacgtattgac

SEQ ID NO: 4785819 - DNA, 25 bp, Homo sapien
tgtctcaaggggaacgtattgactt

SEQ ID NO: 4785820 - DNA, 25 bp, Homo sapien
agcgccgctgctgaactgacagatg

SEQ ID NO: 4785821 - DNA, 25 bp, Homo sapien
ctgacagatgaactgggcagactct

SEQ ID NO: 4785822 - DNA, 25 bp, Homo sapien
aggtgtctaaccatcacagacagcg

SEQ ID NO: 4785823 - DNA, 25 bp, Homo sapien
tgtctaaccatcacagacagcgccg

SEQ ID NO: 4785824 - DNA, 25 bp, Homo sapien
aggcagtggcatggaagacagtctc

SEQ ID NO: 4785825 - DNA, 25 bp, Homo sapien
gcagtggcatggaagacagtctcct

SEQ ID NO: 4785826 - DNA, 25 bp, Homo sapien
gaggcagtggcatggaagacagtct

SEQ ID NO: 4785827 - DNA, 25 bp, Homo sapien
ggcagtggcatggaagacagtctcc

SEQ ID NO: 4785828 - DNA, 25 bp, Homo sapien
gacaatttgtgtgagggcatcaaaa

SEQ ID NO: 4785829 - DNA, 25 bp, Homo sapien
tcaaggaagagaaccccttggagta

SEQ ID NO: 4785830 - DNA, 25 bp, Homo sapien
gttgacaatttgtgtgagggcatca

SEQ ID NO: 4785831 - DNA, 25 bp, Homo sapien
gagaaccccttggagtacatcaaag

SEQ ID NO: 4785832 - DNA, 25 bp, Homo sapien
ttactctgattgcaatgagcacagt

SEQ ID NO: 4785833 - DNA, 25 bp, Homo sapien
caatgagcacagtctctctggctca

SEQ ID NO: 4785834 - DNA, 25 bp, Homo sapien
gattgcaatgagcacagtctctctg

SEQ ID NO: 4785835 - DNA, 25 bp, Homo sapien
tctgattgcaatgagcacagtctct

SEQ ID NO: 4785836 - DNA, 25 bp, Homo sapien
catgtgcaaagggccataggagcca

SEQ ID NO: 4785837 - DNA, 25 bp, Homo sapien
cgttccattgactggacgtgtaatg

SEQ ID NO: 4785838 - DNA, 25 bp, Homo sapien
tcacagcttgtgaaggctgtaatga

SEQ ID NO: 4785839 - DNA, 25 bp, Homo sapien
ccacagcaacaagttattgaaacag

SEQ ID NO: 4785840 - DNA, 25 bp, Homo sapien
gggtgaaagtgagcctgctgctatt

SEQ ID NO: 4785841 - DNA, 25 bp, Homo sapien
ccctcacttaaagcacggattattc

SEQ ID NO: 4785842 - DNA, 25 bp, Homo sapien
attattcctttattagagctcagcc

SEQ ID NO: 4785843 - DNA, 25 bp, Homo sapien
ttattagagctcagccacaagtagg

SEQ ID NO: 4785844 - DNA, 25 bp, Homo sapien
tcacttaaagcacggattattcctt

SEQ ID NO: 4785845 - DNA, 25 bp, Homo sapien
cagttgccgtagagacaggctaact

SEQ ID NO: 4785846 - DNA, 25 bp, Homo sapien
cagactgtccattaacgagaaataa

SEQ ID NO: 4785847 - DNA, 25 bp, Homo sapien
aggcaggccagattagtgaccagtt

SEQ ID NO: 4785848 - DNA, 25 bp, Homo sapien
tagtgaccagttgccgtagagacag

SEQ ID NO: 4785849 - DNA, 25 bp, Homo sapien
gaagtttcctggaccaatctgccat

SEQ ID NO: 4785850 - DNA, 25 bp, Homo sapien
gcctttgctctttatgaccgggtca

SEQ ID NO: 4785851 - DNA, 25 bp, Homo sapien
cagaaatctaatgccagcaacgggc

SEQ ID NO: 4785852 - DNA, 25 bp, Homo sapien
gaccgggtcactgcctttagcaatt

SEQ ID NO: 4785853 - DNA, 25 bp, Homo sapien
agacctgtctttgttgatttatgat

SEQ ID NO: 4785854 - DNA, 25 bp, Homo sapien
tgggtaacacctgaggaatctctcc

SEQ ID NO: 4785855 - DNA, 25 bp, Homo sapien
ggaatgctatgataaagtgggtaac

SEQ ID NO: 4785856 - DNA, 25 bp, Homo sapien
gagaagggcacaagataaaatgaga

SEQ ID NO: 4785857 - DNA, 25 bp, Homo sapien
gtaacacctgaggaatctctcctgc

SEQ ID NO: 4785858 - DNA, 25 bp, Homo sapien
tgctcattgcaaatgggcaatggaa

SEQ ID NO: 4785859 - DNA, 25 bp, Homo sapien
ttcttagttatctgacctcttctgc

SEQ ID NO: 4785860 - DNA, 25 bp, Homo sapien
tcttctgctatcttcgggctttctc

SEQ ID NO: 4785861 - DNA, 25 bp, Homo sapien
gtgtctaggctcaaacttcccccat

SEQ ID NO: 4785862 - DNA, 25 bp, Homo sapien
ccagctgataattgtgtctccctct

SEQ ID NO: 4785863 - DNA, 25 bp, Homo sapien
gatctttagtgcacagggatcacca

SEQ ID NO: 4785864 - DNA, 25 bp, Homo sapien
tcatgccatatgatccatgatcttt

SEQ ID NO: 4785865 - DNA, 25 bp, Homo sapien
agtacttaagccttcttcacttctg

SEQ ID NO: 4785866 - DNA, 25 bp, Homo sapien
ggatggattgggaacgctggtcacc

SEQ ID NO: 4785867 - DNA, 25 bp, Homo sapien
atattgccttgtctcgggatggatt

SEQ ID NO: 4785868 - DNA, 25 bp, Homo sapien
ccttgtctcgggatggattgggaac

SEQ ID NO: 4785869 - DNA, 25 bp, Homo sapien
gatggattgggaacgctggtcacct

SEQ ID NO: 4785870 - DNA, 25 bp, Homo sapien
ctcttggccgccattgttccaaatt

SEQ ID NO: 4785871 - DNA, 25 bp, Homo sapien
ggatgaaagactcttggccgccatt

SEQ ID NO: 4785872 - DNA, 25 bp, Homo sapien
gactcttggccgccattgttccaaa

SEQ ID NO: 4785873 - DNA, 25 bp, Homo sapien
tgaaagactcttggccgccattgtt

SEQ ID NO: 4785874 - DNA, 25 bp, Homo sapien
tttgaaagtcattacccggcccata

SEQ ID NO: 4785875 - DNA, 25 bp, Homo sapien
agatgcagctcaagttacacatgac

SEQ ID NO: 4785876 - DNA, 25 bp, Homo sapien
tacccggcccatagcctggaagatg

SEQ ID NO: 4785877 - DNA, 25 bp, Homo sapien
tgcagctcaagttacacatgacacc

SEQ ID NO: 4785878 - DNA, 25 bp, Homo sapien
tgtgaaaaagactctgcctgtgatt

SEQ ID NO: 4785879 - DNA, 25 bp, Homo sapien
ttgggaacacactgagcttttactc

SEQ ID NO: 4785880 - DNA, 25 bp, Homo sapien
atttccttgggaacacactgagctt

SEQ ID NO: 4785881 - DNA, 25 bp, Homo sapien
ctgtgattagatctgtcaggcagtg

SEQ ID NO: 4785882 - DNA, 25 bp, Homo sapien
ggctaagcctagaagtggggatcaa

SEQ ID NO: 4785883 - DNA, 25 bp, Homo sapien
tagaagtggggatcaaggctgtgcc

SEQ ID NO: 4785884 - DNA, 25 bp, Homo sapien
cagtaccagggccttggcagcagga

SEQ ID NO: 4785885 - DNA, 25 bp, Homo sapien
cagtcttggcttgttggagaggcta

SEQ ID NO: 4785886 - DNA, 25 bp, Homo sapien
tttaaaattctgtcgtggcaccaag

SEQ ID NO: 4785887 - DNA, 25 bp, Homo sapien
aaattctgtcgtggcaccaagttga

SEQ ID NO: 4785888 - DNA, 25 bp, Homo sapien
ggcaccaagttgatgtcagagaatt

SEQ ID NO: 4785889 - DNA, 25 bp, Homo sapien
cttactgcgtgtaggggcattttaa

SEQ ID NO: 4785890 - DNA, 25 bp, Homo sapien
cactcttctttacccactggctttt

SEQ ID NO: 4785891 - DNA, 25 bp, Homo sapien
tcaatataaacttttgagtgatttc

SEQ ID NO: 4785892 - DNA, 25 bp, Homo sapien
atataaacttttgagtgatttcacc

SEQ ID NO: 4785893 - DNA, 25 bp, Homo sapien
gcttttgattctcacatgtgtattc

SEQ ID NO: 4785894 - DNA, 25 bp, Homo sapien
ctgacgtgcaagagaaagacaaaca

SEQ ID NO: 4785895 - DNA, 25 bp, Homo sapien
gtctgacgtgcaagagaaagacaaa

SEQ ID NO: 4785896 - DNA, 25 bp, Homo sapien
ctgtgtctgacgtgcaagagaaaga

SEQ ID NO: 4785897 - DNA, 25 bp, Homo sapien
cagctgtgtctgacgtgcaagagaa

SEQ ID NO: 4785898 - DNA, 25 bp, Homo sapien
agtgaaagtgacgtttgtaaagacg

SEQ ID NO: 4785899 - DNA, 25 bp, Homo sapien
aagtgacgtttgtaaagacggtgag

SEQ ID NO: 4785900 - DNA, 25 bp, Homo sapien
ttgtaaagacggtgagagcagaatg

SEQ ID NO: 4785901 - DNA, 25 bp, Homo sapien
gatggaccttggttgtttgcaaaga

SEQ ID NO: 4785902 - DNA, 25 bp, Homo sapien
caacatgtgaggcagcgcctgcatg

SEQ ID NO: 4785903 - DNA, 25 bp, Homo sapien
tttcctttggcctgggtgcatagct

SEQ ID NO: 4785904 - DNA, 25 bp, Homo sapien
tttcttcaacatgtgaggcagcgcc

SEQ ID NO: 4785905 - DNA, 25 bp, Homo sapien
ttcctttggcctgggtgcatagctg

SEQ ID NO: 4785906 - DNA, 25 bp, Homo sapien
tacagggcatgtaaatagaataggc

SEQ ID NO: 4785907 - DNA, 25 bp, Homo sapien
aagagatgccccttcctcaaatgag

SEQ ID NO: 4785908 - DNA, 25 bp, Homo sapien
catccgagataggagaagcctgtcc

SEQ ID NO: 4785909 - DNA, 25 bp, Homo sapien
cagaggattcagctgaacaaggagc

SEQ ID NO: 4785910 - DNA, 25 bp, Homo sapien
agctgagtctgggacagtgagaatc

SEQ ID NO: 4785911 - DNA, 25 bp, Homo sapien
gagaatctgtgaagtccagcctcca

SEQ ID NO: 4785912 - DNA, 25 bp, Homo sapien
taccttatgccttactggccagatc

SEQ ID NO: 4785913 - DNA, 25 bp, Homo sapien
catgaaggaatcgagacattgtctc

SEQ ID NO: 4785914 - DNA, 25 bp, Homo sapien
ttgaaagatggaaagctccgtggga

SEQ ID NO: 4785915 - DNA, 25 bp, Homo sapien
tgtcacaaccccagcggttgaaaga

SEQ ID NO: 4785916 - DNA, 25 bp, Homo sapien
tcgaccagtggcctcttgcctgggt

SEQ ID NO: 4785917 - DNA, 25 bp, Homo sapien
tcaggagtctaaggccaagcctcga

SEQ ID NO: 4785918 - DNA, 25 bp, Homo sapien
taaaaacctgagcaattggcctcat

SEQ ID NO: 4785919 - DNA, 25 bp, Homo sapien
gtaaaaacctgagcaattggcctca

SEQ ID NO: 4785920 - DNA, 25 bp, Homo sapien
ggtaaaaacctgagcaattggcctc

SEQ ID NO: 4785921 - DNA, 25 bp, Homo sapien
agagggggcccaggacataatgcct

SEQ ID NO: 4785922 - DNA, 25 bp, Homo sapien
gcaggctcttcccaagatgtacgct

SEQ ID NO: 4785923 - DNA, 25 bp, Homo sapien
ttcctttgtacaggccgccgacttg

SEQ ID NO: 4785924 - DNA, 25 bp, Homo sapien
aagatgtacgcttcctttgtacagg

SEQ ID NO: 4785925 - DNA, 25 bp, Homo sapien
tattgagaagctactgagttccagc

SEQ ID NO: 4785926 - DNA, 25 bp, Homo sapien
ccagcaatggcatttaggattgaat

SEQ ID NO: 4785927 - DNA, 25 bp, Homo sapien
tttcaagagatgatctttcaattgg

SEQ ID NO: 4785928 - DNA, 25 bp, Homo sapien
tcaattggtttatggtggtccagca

SEQ ID NO: 4785929 - DNA, 25 bp, Homo sapien
gaaccgtttaagcacgtctctcttc

SEQ ID NO: 4785930 - DNA, 25 bp, Homo sapien
catgaaagccctctgtcaggagccc

SEQ ID NO: 4785931 - DNA, 25 bp, Homo sapien
caaattcctggatatgactcacaga

SEQ ID NO: 4785932 - DNA, 25 bp, Homo sapien
tgcgtggccatggagtgattgccct

SEQ ID NO: 4785933 - DNA, 25 bp, Homo sapien
taggcataactaatcatttaagccc

SEQ ID NO: 4785934 - DNA, 25 bp, Homo sapien
tgctgctgtcagacataactgatca

SEQ ID NO: 4785935 - DNA, 25 bp, Homo sapien
cataaagttagccttcaaagatctc

SEQ ID NO: 4785936 - DNA, 25 bp, Homo sapien
cagtaagcgtgttgccattctccct

SEQ ID NO: 4785937 - DNA, 25 bp, Homo sapien
agaaaggcaacatcttgatggcttc

SEQ ID NO: 4785938 - DNA, 25 bp, Homo sapien
tttttaatggcagtacaagaaaggc

SEQ ID NO: 4785939 - DNA, 25 bp, Homo sapien
tgatggcttctcatgatagattgaa

SEQ ID NO: 4785940 - DNA, 25 bp, Homo sapien
ttctcatgatagattgaagcagaag

SEQ ID NO: 4785941 - DNA, 25 bp, Homo sapien
aaacggtaggcagcaagagcatagg

SEQ ID NO: 4785942 - DNA, 25 bp, Homo sapien
tctcctggcatgaattgaagtgatc

SEQ ID NO: 4785943 - DNA, 25 bp, Homo sapien
ccagtcagcaaggatttgtcagtga

SEQ ID NO: 4785944 - DNA, 25 bp, Homo sapien
cataggatacaggaagataccaggg

SEQ ID NO: 4785945 - DNA, 25 bp, Homo sapien
gaagccacattctgtaagagggaca

SEQ ID NO: 4785946 - DNA, 25 bp, Homo sapien
gaaccaagttgagatggagagccat

SEQ ID NO: 4785947 - DNA, 25 bp, Homo sapien
tacccgaagagagtccttgaagtgg

SEQ ID NO: 4785948 - DNA, 25 bp, Homo sapien
ggagagccatgggaatacccgaaga

SEQ ID NO: 4785949 - DNA, 25 bp, Homo sapien
tttttcagacactccggtctgtgga

SEQ ID NO: 4785950 - DNA, 25 bp, Homo sapien
gcatgcagaatgtcgagtagatcat

SEQ ID NO: 4785951 - DNA, 25 bp, Homo sapien
gtgttgaagatgttgtcaccttcct

SEQ ID NO: 4785952 - DNA, 25 bp, Homo sapien
agtagatcatgtctgaggtcccttt

SEQ ID NO: 4785953 - DNA, 25 bp, Homo sapien
ccttccttattccatggtttatgga

SEQ ID NO: 4785954 - DNA, 25 bp, Homo sapien
tgaaggcagcgatgtgaggagtgcc

SEQ ID NO: 4785955 - DNA, 25 bp, Homo sapien
gaaggcagcgatgtgaggagtgcca

SEQ ID NO: 4785956 - DNA, 25 bp, Homo sapien
tatacctctggcgatggcacactca

SEQ ID NO: 4785957 - DNA, 25 bp, Homo sapien
ctctatacctctggcgatggcacac

SEQ ID NO: 4785958 - DNA, 25 bp, Homo sapien
aagtgtccactatcctctctatacc

SEQ ID NO: 4785959 - DNA, 25 bp, Homo sapien
acctctggcgatggcacactcaatg

SEQ ID NO: 4785960 - DNA, 25 bp, Homo sapien
gatttctgtacaagctgtgggagca

SEQ ID NO: 4785961 - DNA, 25 bp, Homo sapien
aggaagagatcagcccagtaacagt

SEQ ID NO: 4785962 - DNA, 25 bp, Homo sapien
ggccttgccgttctcttaagaggca

SEQ ID NO: 4785963 - DNA, 25 bp, Homo sapien
gactggtgcaatggaagtaaaccca

SEQ ID NO: 4785964 - DNA, 25 bp, Homo sapien
tgttccctgtagatggccggtttga

SEQ ID NO: 4785965 - DNA, 25 bp, Homo sapien
caaccttgatagctgtcaactggag

SEQ ID NO: 4785966 - DNA, 25 bp, Homo sapien
gaagacttcttaatggcctttgaga

SEQ ID NO: 4785967 - DNA, 25 bp, Homo sapien
gacattattgcaaaccagcactgga

SEQ ID NO: 4785968 - DNA, 25 bp, Homo sapien
tattggccccatctagagcaaggtg

SEQ ID NO: 4785969 - DNA, 25 bp, Homo sapien
gaaaaggcgtaagttccagcaggtg

SEQ ID NO: 4785970 - DNA, 25 bp, Homo sapien
tcttatctttactgggaagcgtccg

SEQ ID NO: 4785971 - DNA, 25 bp, Homo sapien
gatacttggactgatcactgttgag

SEQ ID NO: 4785972 - DNA, 25 bp, Homo sapien
cagggcatcaaagaggacattggtt

SEQ ID NO: 4785973 - DNA, 25 bp, Homo sapien
caaagaggacattggttataaattt

SEQ ID NO: 4785974 - DNA, 25 bp, Homo sapien
gcatcaaagaggacattggttataa

SEQ ID NO: 4785975 - DNA, 25 bp, Homo sapien
tccagggcatcaaagaggacattgg

SEQ ID NO: 4785976 - DNA, 25 bp, Homo sapien
cattgtgtaagttcttagcaaacat

SEQ ID NO: 4785977 - DNA, 25 bp, Homo sapien
aagttcttagcaaacatttgatttc

SEQ ID NO: 4785978 - DNA, 25 bp, Homo sapien
tgtaagttcttagcaaacatttgat

SEQ ID NO: 4785979 - DNA, 25 bp, Homo sapien
ttcattgtgtaagttcttagcaaac

SEQ ID NO: 4785980 - DNA, 25 bp, Homo sapien
tccaagaccttgttaatatgatttc

SEQ ID NO: 4785981 - DNA, 25 bp, Homo sapien
tgcatgtagatgacctggcccacca

SEQ ID NO: 4785982 - DNA, 25 bp, Homo sapien
tctttgggccaagtgagttgggctt

SEQ ID NO: 4785983 - DNA, 25 bp, Homo sapien
cacagaaaccttgactgcatgtaga

SEQ ID NO: 4785984 - DNA, 25 bp, Homo sapien
actaaggtatggaccttcaagtggc

SEQ ID NO: 4785985 - DNA, 25 bp, Homo sapien
cagtgaggatgtcttaacactaagg

SEQ ID NO: 4785986 - DNA, 25 bp, Homo sapien
taacactaaggtatggaccttcaag

SEQ ID NO: 4785987 - DNA, 25 bp, Homo sapien
gatgtcttaacactaaggtatggac

SEQ ID NO: 4785988 - DNA, 25 bp, Homo sapien
aactcatccaatcgtctactctcca

SEQ ID NO: 4785989 - DNA, 25 bp, Homo sapien
cttcacagtcatattcatctgcaga

SEQ ID NO: 4785990 - DNA, 25 bp, Homo sapien
ttcatctgcagatgagtaccacccc

SEQ ID NO: 4785991 - DNA, 25 bp, Homo sapien
tcatattcatctgcagatgagtacc

SEQ ID NO: 4785992 - DNA, 25 bp, Homo sapien
gtagataacatgtagcccgacccag

SEQ ID NO: 4785993 - DNA, 25 bp, Homo sapien
ttttatcgcaagcaaggttctcccc

SEQ ID NO: 4785994 - DNA, 25 bp, Homo sapien
cgacccagggtgaatcagctgagct

SEQ ID NO: 4785995 - DNA, 25 bp, Homo sapien
tcaacgtttcagaagcaccaaggcc

SEQ ID NO: 4785996 - DNA, 25 bp, Homo sapien
ttctgtgtgagaacttcatgtccac

SEQ ID NO: 4785997 - DNA, 25 bp, Homo sapien
cctccctgttgtcaattacacattg

SEQ ID NO: 4785998 - DNA, 25 bp, Homo sapien
cttctgtgtgagaacttcatgtcca

SEQ ID NO: 4785999 - DNA, 25 bp, Homo sapien
caattacacattgcttctgtgtgag

SEQ ID NO: 4786000 - DNA, 25 bp, Homo sapien
cattgtcctggtttagaacttcata

SEQ ID NO: 4786001 - DNA, 25 bp, Homo sapien
gatttcatggtttctggctatgtac

SEQ ID NO: 4786002 - DNA, 25 bp, Homo sapien
aatgtacgcacctgtgtcacacaag

SEQ ID NO: 4786003 - DNA, 25 bp, Homo sapien
agtttagtggtttctctcagtgagc

SEQ ID NO: 4786004 - DNA, 25 bp, Homo sapien
accaccctgagactcctgctttaag

SEQ ID NO: 4786005 - DNA, 25 bp, Homo sapien
cagcacgtctgaagagcaatccttt

SEQ ID NO: 4786006 - DNA, 25 bp, Homo sapien
gaaggtgtgctgtggatctttttcc

SEQ ID NO: 4786007 - DNA, 25 bp, Homo sapien
gagactcctgctttaaggctgtcct

SEQ ID NO: 4786008 - DNA, 25 bp, Homo sapien
agaccccatgctcggctgtggacca

SEQ ID NO: 4786009 - DNA, 25 bp, Homo sapien
cggctgtggaccatgttactggtct

SEQ ID NO: 4786010 - DNA, 25 bp, Homo sapien
tgctcggctgtggaccatgttactg

SEQ ID NO: 4786011 - DNA, 25 bp, Homo sapien
ccccatgctcggctgtggaccatgt

SEQ ID NO: 4786012 - DNA, 25 bp, Homo sapien
ctgggaatagccttcctcttattct

SEQ ID NO: 4786013 - DNA, 25 bp, Homo sapien
gcctgtttgcttggtgttttcatcc

SEQ ID NO: 4786014 - DNA, 25 bp, Homo sapien
ttgcttggtgttttcatccctggga

SEQ ID NO: 4786015 - DNA, 25 bp, Homo sapien
tattctcctctgacaaaatcctcat

SEQ ID NO: 4786016 - DNA, 25 bp, Homo sapien
tgacactaatctggctactgaaatg

SEQ ID NO: 4786017 - DNA, 25 bp, Homo sapien
tttagtgttcttcgctcctctagga

SEQ ID NO: 4786018 - DNA, 25 bp, Homo sapien
gccagtgatctactctttttggaaa

SEQ ID NO: 4786019 - DNA, 25 bp, Homo sapien
ccaatgcctgtgcatcatggagata

SEQ ID NO: 4786020 - DNA, 25 bp, Homo sapien
ggtgtaggatgtagctgtcaatttt

SEQ ID NO: 4786021 - DNA, 25 bp, Homo sapien
caccaggaaagggttcatggtgtag

SEQ ID NO: 4786022 - DNA, 25 bp, Homo sapien
acttgatagtacaccaggaaagggt

SEQ ID NO: 4786023 - DNA, 25 bp, Homo sapien
gctgtcaattttaacgcaatagtca

SEQ ID NO: 4786024 - DNA, 25 bp, Homo sapien
ctctgacctttccagaaatatagtg

SEQ ID NO: 4786025 - DNA, 25 bp, Homo sapien
atcactgaatctggcaccacagtcc

SEQ ID NO: 4786026 - DNA, 25 bp, Homo sapien
ccatcactgaatctggcaccacagt

SEQ ID NO: 4786027 - DNA, 25 bp, Homo sapien
gaagcccatcactgaatctggcacc

SEQ ID NO: 4786028 - DNA, 25 bp, Homo sapien
gcaccacagtcctgaatggaaaata

SEQ ID NO: 4786029 - DNA, 25 bp, Homo sapien
tggcctcattaagggcttcttctgc

SEQ ID NO: 4786030 - DNA, 25 bp, Homo sapien
gtctaatggcctcattaagggcttc

SEQ ID NO: 4786031 - DNA, 25 bp, Homo sapien
tctaatggcctcattaagggcttct

SEQ ID NO: 4786032 - DNA, 25 bp, Homo sapien
taatggcctcattaagggcttcttc

SEQ ID NO: 4786033 - DNA, 25 bp, Homo sapien
ttgcacaaaccattccttgagttcc

SEQ ID NO: 4786034 - DNA, 25 bp, Homo sapien
gttctttgcacaaaccattccttga

SEQ ID NO: 4786035 - DNA, 25 bp, Homo sapien
tctccaggacaccttgcacaagttc

SEQ ID NO: 4786036 - DNA, 25 bp, Homo sapien
ttgcacaagttctttgcacaaacca

SEQ ID NO: 4786037 - DNA, 25 bp, Homo sapien
cctgagctatagacaggacttcttg

SEQ ID NO: 4786038 - DNA, 25 bp, Homo sapien
ccttgcctgagctatagacaggact

SEQ ID NO: 4786039 - DNA, 25 bp, Homo sapien
catccttgcctgagctatagacagg

SEQ ID NO: 4786040 - DNA, 25 bp, Homo sapien
caccatccttgcctgagctatagac

SEQ ID NO: 4786041 - DNA, 25 bp, Homo sapien
tgaaggcaactgtaggactctgtgc

SEQ ID NO: 4786042 - DNA, 25 bp, Homo sapien
ctctgaaggcaactgtaggactctg

SEQ ID NO: 4786043 - DNA, 25 bp, Homo sapien
aggcaactgtaggactctgtgccac

SEQ ID NO: 4786044 - DNA, 25 bp, Homo sapien
tctgaaggcaactgtaggactctgt

SEQ ID NO: 4786045 - DNA, 25 bp, Homo sapien
tcgagtacgttaagggtagtgtagc

SEQ ID NO: 4786046 - DNA, 25 bp, Homo sapien
tcaagatcagttaagatcgagtacg

SEQ ID NO: 4786047 - DNA, 25 bp, Homo sapien
tcagttaagatcgagtacgttaagg

SEQ ID NO: 4786048 - DNA, 25 bp, Homo sapien
cgttaagggtagtgtagccacagac

SEQ ID NO: 4786049 - DNA, 25 bp, Homo sapien
gatcctgtaatctgttgtctataac

SEQ ID NO: 4786050 - DNA, 25 bp, Homo sapien
ttaatgtgattaccaaatgatcctg

SEQ ID NO: 4786051 - DNA, 25 bp, Homo sapien
tgtctataacattcagaaagtccca

SEQ ID NO: 4786052 - DNA, 25 bp, Homo sapien
tctgtgttccatcatacggcaaatg

SEQ ID NO: 4786053 - DNA, 25 bp, Homo sapien
cagtattaacatgttccttgagaca

SEQ ID NO: 4786054 - DNA, 25 bp, Homo sapien
taacagtaagaattaagagacctgg

SEQ ID NO: 4786055 - DNA, 25 bp, Homo sapien
caaacaaagcagttgactccatagc

SEQ ID NO: 4786056 - DNA, 25 bp, Homo sapien
gtctttataccattagcattggaag

SEQ ID NO: 4786057 - DNA, 25 bp, Homo sapien
atcatcaacttgaatagttttccag

SEQ ID NO: 4786058 - DNA, 25 bp, Homo sapien
tctttcttttgctaaaatcatcaac

SEQ ID NO: 4786059 - DNA, 25 bp, Homo sapien
aaaatcatcaacttgaatagttttc

SEQ ID NO: 4786060 - DNA, 25 bp, Homo sapien
ctaaaatcatcaacttgaatagttt

SEQ ID NO: 4786061 - DNA, 25 bp, Homo sapien
tttcaaggagtcaggatgtccccgt

SEQ ID NO: 4786062 - DNA, 25 bp, Homo sapien
gaagataacccaccaactagcctgg

SEQ ID NO: 4786063 - DNA, 25 bp, Homo sapien
gagacttccctcacaacgttggctg

SEQ ID NO: 4786064 - DNA, 25 bp, Homo sapien
tatccgtatcctgttagagttgggc

SEQ ID NO: 4786065 - DNA, 25 bp, Homo sapien
attgtacctttcccccatgcaccca

SEQ ID NO: 4786066 - DNA, 25 bp, Homo sapien
taaccattgtacctttcccccatgc

SEQ ID NO: 4786067 - DNA, 25 bp, Homo sapien
aaccattgtacctttcccccatgca

SEQ ID NO: 4786068 - DNA, 25 bp, Homo sapien
gtacctttcccccatgcacccacac

SEQ ID NO: 4786069 - DNA, 25 bp, Homo sapien
ggcggcagcccgtttaattgcagcg

SEQ ID NO: 4786070 - DNA, 25 bp, Homo sapien
gtttccaaggattggagcgctgtga

SEQ ID NO: 4786071 - DNA, 25 bp, Homo sapien
tatctcggtcgctcgaggtgagtgt

SEQ ID NO: 4786072 - DNA, 25 bp, Homo sapien
tcccttctagacgtggaggcttgga

SEQ ID NO: 4786073 - DNA, 25 bp, Homo sapien
accgcagtcggtccgccagccgctt

SEQ ID NO: 4786074 - DNA, 25 bp, Homo sapien
cgcttccccggtctttgccaagtgg

SEQ ID NO: 4786075 - DNA, 25 bp, Homo sapien
ttgccaagtgggtttacgaggtctg

SEQ ID NO: 4786076 - DNA, 25 bp, Homo sapien
tttacgaggtctgaggcgtgttggg

SEQ ID NO: 4786077 - DNA, 25 bp, Homo sapien
ctctgacctcgtcgctcctttctcc

SEQ ID NO: 4786078 - DNA, 25 bp, Homo sapien
gctcaattccccgactgcgggaagc

SEQ ID NO: 4786079 - DNA, 25 bp, Homo sapien
ctcacgttctcgcaaaaggctcctc

SEQ ID NO: 4786080 - DNA, 25 bp, Homo sapien
tgcgggaagccctttggtgccccag

SEQ ID NO: 4786081 - DNA, 25 bp, Homo sapien
ggtaaattatcagccgggacagtgg

SEQ ID NO: 4786082 - DNA, 25 bp, Homo sapien
caaagccgcacaaagccgggatcat

SEQ ID NO: 4786083 - DNA, 25 bp, Homo sapien
gatgaagattttatcgcagcctcca

SEQ ID NO: 4786084 - DNA, 25 bp, Homo sapien
gattgttattttcccggtgcagagc

SEQ ID NO: 4786085 - DNA, 25 bp, Homo sapien
tggaaatactcacaccgcaagctgg

SEQ ID NO: 4786086 - DNA, 25 bp, Homo sapien
gatggatgcaagtaagggaccctct

SEQ ID NO: 4786087 - DNA, 25 bp, Homo sapien
taaaaagccccacgtggttgatctg

SEQ ID NO: 4786088 - DNA, 25 bp, Homo sapien
aaaggttggcctctagatggatgca

SEQ ID NO: 4786089 - DNA, 25 bp, Homo sapien
gagagagacggatatctcaggtcat

SEQ ID NO: 4786090 - DNA, 25 bp, Homo sapien
tgtgtggcaggagaagattgtcttc

SEQ ID NO: 4786091 - DNA, 25 bp, Homo sapien
ggcagggaagatggcgatcctccat

SEQ ID NO: 4786092 - DNA, 25 bp, Homo sapien
ttattagaaaggcttcgcgcacccc

SEQ ID NO: 4786093 - DNA, 25 bp, Homo sapien
acaataacccgagcaggaagaggag

SEQ ID NO: 4786094 - DNA, 25 bp, Homo sapien
ccacaacaataacccgagcaggaag

SEQ ID NO: 4786095 - DNA, 25 bp, Homo sapien
tcccaaacaacttccacaacaataa

SEQ ID NO: 4786096 - DNA, 25 bp, Homo sapien
acaacttccacaacaataacccgag

SEQ ID NO: 4786097 - DNA, 25 bp, Homo sapien
ccggcgccgggacgcttcttctgta

SEQ ID NO: 4786098 - DNA, 25 bp, Homo sapien
ggcgccgggacgcttcttctgtaag

SEQ ID NO: 4786099 - DNA, 25 bp, Homo sapien
ctcccggcgccgggacgcttcttct

SEQ ID NO: 4786100 - DNA, 25 bp, Homo sapien
gcgccgggacgcttcttctgtaagt

SEQ ID NO: 4786101 - DNA, 25 bp, Homo sapien
cacctcggggtggtccgagtgctcc

SEQ ID NO: 4786102 - DNA, 25 bp, Homo sapien
gtggtggaggcacaaacgcgctcat

SEQ ID NO: 4786103 - DNA, 25 bp, Homo sapien
ggcacaaacgcgctcattcattcgg

SEQ ID NO: 4786104 - DNA, 25 bp, Homo sapien
tgcaattaacaaccacctcggggtg

SEQ ID NO: 4786105 - DNA, 25 bp, Homo sapien
ggagaagccattacacacgcttggc

SEQ ID NO: 4786106 - DNA, 25 bp, Homo sapien
gctgtctgctttggttccagtccag

SEQ ID NO: 4786107 - DNA, 25 bp, Homo sapien
tgtcctccatttgcaagctgtctgc

SEQ ID NO: 4786108 - DNA, 25 bp, Homo sapien
gggcgtctcactcctggtgcagttc

SEQ ID NO: 4786109 - DNA, 25 bp, Homo sapien
catttgtatgttaggccttctttca

SEQ ID NO: 4786110 - DNA, 25 bp, Homo sapien
gaagtactcttaagtcttcagaaat

SEQ ID NO: 4786111 - DNA, 25 bp, Homo sapien
taagactggctaacaccagtttctc

SEQ ID NO: 4786112 - DNA, 25 bp, Homo sapien
ctccatttctcttcaggtcgttcca

SEQ ID NO: 4786113 - DNA, 25 bp, Homo sapien
aaccttatgtccaggtatcttcacc

SEQ ID NO: 4786114 - DNA, 25 bp, Homo sapien
gaatttattaatcatgtaggaagac

SEQ ID NO: 4786115 - DNA, 25 bp, Homo sapien
aacatgatgtcagttgagaaaacct

SEQ ID NO: 4786116 - DNA, 25 bp, Homo sapien
taattgggaggaatttattaatcat

SEQ ID NO: 4786117 - DNA, 25 bp, Homo sapien
taagtaggcctaggtggagattttc

SEQ ID NO: 4786118 - DNA, 25 bp, Homo sapien
tttgcgaacacattcaatttgaggg

SEQ ID NO: 4786119 - DNA, 25 bp, Homo sapien
gatacagtgagaactgggaatttgc

SEQ ID NO: 4786120 - DNA, 25 bp, Homo sapien
gaaacaaggtgaactgggtcaacat

SEQ ID NO: 4786121 - DNA, 25 bp, Homo sapien
gggtcaacatatctttgtggataca

SEQ ID NO: 4786122 - DNA, 25 bp, Homo sapien
taatggtttggtcccaagaggcaaa

SEQ ID NO: 4786123 - DNA, 25 bp, Homo sapien
gtaaactgtccccacatttggatag

SEQ ID NO: 4786124 - DNA, 25 bp, Homo sapien
tggagatgaaccagacatgctgctg

SEQ ID NO: 4786125 - DNA, 25 bp, Homo sapien
tcatcttagcaaccctgttggagat

SEQ ID NO: 4786126 - DNA, 25 bp, Homo sapien
aaggttaggtcaagtattgcatggc

SEQ ID NO: 4786127 - DNA, 25 bp, Homo sapien
taggtcaagtattgcatggctgctg

SEQ ID NO: 4786128 - DNA, 25 bp, Homo sapien
ttagcagaaggttaggtcaagtatt

SEQ ID NO: 4786129 - DNA, 25 bp, Homo sapien
tcaagtattgcatggctgctgagag

SEQ ID NO: 4786130 - DNA, 25 bp, Homo sapien
tcaggtctgccgagccagcagttct

SEQ ID NO: 4786131 - DNA, 25 bp, Homo sapien
tgcattaagcattgaaatggtgctt

SEQ ID NO: 4786132 - DNA, 25 bp, Homo sapien
atgtgtccagttgctgaatgcatta

SEQ ID NO: 4786133 - DNA, 25 bp, Homo sapien
tgtccagttgctgaatgcattaagc

SEQ ID NO: 4786134 - DNA, 25 bp, Homo sapien
ggagataattcagctgggcaagcag

SEQ ID NO: 4786135 - DNA, 25 bp, Homo sapien
tgacgcaggagataattcagctggg

SEQ ID NO: 4786136 - DNA, 25 bp, Homo sapien
ctgtgacgcaggagataattcagct

SEQ ID NO: 4786137 - DNA, 25 bp, Homo sapien
cgcaggagataattcagctgggcaa

SEQ ID NO: 4786138 - DNA, 25 bp, Homo sapien
gtacaggatgtgtaatgtcaacatg

SEQ ID NO: 4786139 - DNA, 25 bp, Homo sapien
ggatgtgtaatgtcaacatgaagga

SEQ ID NO: 4786140 - DNA, 25 bp, Homo sapien
acagtacaggatgtgtaatgtcaac

SEQ ID NO: 4786141 - DNA, 25 bp, Homo sapien
gtaatgtcaacatgaaggattggag

SEQ ID NO: 4786142 - DNA, 25 bp, Homo sapien
tgttaaatgattaccttgtgcatgg

SEQ ID NO: 4786143 - DNA, 25 bp, Homo sapien
tcacattatgtgttaaatgattacc

SEQ ID NO: 4786144 - DNA, 25 bp, Homo sapien
aaatgattaccttgtgcatggtcca

SEQ ID NO: 4786145 - DNA, 25 bp, Homo sapien
tatgtgttaaatgattaccttgtgc

SEQ ID NO: 4786146 - DNA, 25 bp, Homo sapien
ttcatttagatggacaggggagcct

SEQ ID NO: 4786147 - DNA, 25 bp, Homo sapien
tggcttgttcatttagatggacagg

SEQ ID NO: 4786148 - DNA, 25 bp, Homo sapien
tttagatggacaggggagcctacgc

SEQ ID NO: 4786149 - DNA, 25 bp, Homo sapien
atggacaggggagcctacgcaagtc

SEQ ID NO: 4786150 - DNA, 25 bp, Homo sapien
caaacatggttttacacttggatga

SEQ ID NO: 4786151 - DNA, 25 bp, Homo sapien
gatgatgtagttaggctcaactcca

SEQ ID NO: 4786152 - DNA, 25 bp, Homo sapien
ttacacttggatgatgtagttaggc

SEQ ID NO: 4786153 - DNA, 25 bp, Homo sapien
catggttttacacttggatgatgta

SEQ ID NO: 4786154 - DNA, 25 bp, Homo sapien
tgatccacttgcttctgcatcccag

SEQ ID NO: 4786155 - DNA, 25 bp, Homo sapien
gatccacttgcttctgcatcccaga

SEQ ID NO: 4786156 - DNA, 25 bp, Homo sapien
tcaaatgatccacttgcttctgcat

SEQ ID NO: 4786157 - DNA, 25 bp, Homo sapien
aaatgatccacttgcttctgcatcc

SEQ ID NO: 4786158 - DNA, 25 bp, Homo sapien
gtttttgatttgtggattttgcctc

SEQ ID NO: 4786159 - DNA, 25 bp, Homo sapien
gattttgcctcttataactttaata

SEQ ID NO: 4786160 - DNA, 25 bp, Homo sapien
ttcttcaactgccagcctctctttc

SEQ ID NO: 4786161 - DNA, 25 bp, Homo sapien
tagattttttcatgggtcgtttcca

SEQ ID NO: 4786162 - DNA, 25 bp, Homo sapien
tagcagtgtgagacaattagccacc

SEQ ID NO: 4786163 - DNA, 25 bp, Homo sapien
catgtcatggaagagtctgggatcc

SEQ ID NO: 4786164 - DNA, 25 bp, Homo sapien
tcttaactgagagtttagccctgca

SEQ ID NO: 4786165 - DNA, 25 bp, Homo sapien
tgtcttcgaggcataactagcagaa

SEQ ID NO: 4786166 - DNA, 25 bp, Homo sapien
gggtagatttggcaggcataaagct

SEQ ID NO: 4786167 - DNA, 25 bp, Homo sapien
tgtccagatcctcctaaggctcgtt

SEQ ID NO: 4786168 - DNA, 25 bp, Homo sapien
ggcataaagctactacataacattg

SEQ ID NO: 4786169 - DNA, 25 bp, Homo sapien
cataacattgttccgactccatgag

SEQ ID NO: 4786170 - DNA, 25 bp, Homo sapien
tctctgctgtttgggcgaggtttag

SEQ ID NO: 4786171 - DNA, 25 bp, Homo sapien
gagtcgataaagcaacaccgtgatt

SEQ ID NO: 4786172 - DNA, 25 bp, Homo sapien
atcagttctgtaatgaagacccagc

SEQ ID NO: 4786173 - DNA, 25 bp, Homo sapien
aaagtgtctgtagaaacccagccag

SEQ ID NO: 4786174 - DNA, 25 bp, Homo sapien
gacttaatgccgaaggtgccctgct

SEQ ID NO: 4786175 - DNA, 25 bp, Homo sapien
ccttctgcagaaccgtaacttctgt

SEQ ID NO: 4786176 - DNA, 25 bp, Homo sapien
cgtaacttctgttgatgttgtgcaa

SEQ ID NO: 4786177 - DNA, 25 bp, Homo sapien
gatgttgtgcaaatcaggctcaaac

SEQ ID NO: 4786178 - DNA, 25 bp, Homo sapien
cagacagactggctggtgattaaca

SEQ ID NO: 4786179 - DNA, 25 bp, Homo sapien
tagactttggaatctggcaagcaga

SEQ ID NO: 4786180 - DNA, 25 bp, Homo sapien
aagccaaggcattctggaggtcccc

SEQ ID NO: 4786181 - DNA, 25 bp, Homo sapien
ctgatgtagaacaggatctggccca

SEQ ID NO: 4786182 - DNA, 25 bp, Homo sapien
cacaatttgggttggtgcttagaca

SEQ ID NO: 4786183 - DNA, 25 bp, Homo sapien
gctgatagcaacctcttccacacaa

SEQ ID NO: 4786184 - DNA, 25 bp, Homo sapien
tgttttcaggtctaatggactgtgc

SEQ ID NO: 4786185 - DNA, 25 bp, Homo sapien
ctaatggactgtgcgaaaggagaag

SEQ ID NO: 4786186 - DNA, 25 bp, Homo sapien
ctatcctggtgagttttgcccatag

SEQ ID NO: 4786187 - DNA, 25 bp, Homo sapien
aaaagcacttttaccagcgagagct

SEQ ID NO: 4786188 - DNA, 25 bp, Homo sapien
ggccttagccttgtcaaaagcactt

SEQ ID NO: 4786189 - DNA, 25 bp, Homo sapien
tgagttttgcccataggccttagcc

SEQ ID NO: 4786190 - DNA, 25 bp, Homo sapien
cttttctgaaagactcttgactcat

SEQ ID NO: 4786191 - DNA, 25 bp, Homo sapien
cttggcttggaaaaagccagtacct

SEQ ID NO: 4786192 - DNA, 25 bp, Homo sapien
cttggaaccttggcctccatgacat

SEQ ID NO: 4786193 - DNA, 25 bp, Homo sapien
tccatgacattgctttgagtgactg

SEQ ID NO: 4786194 - DNA, 25 bp, Homo sapien
gggagaaccagacagtcaaccaata

SEQ ID NO: 4786195 - DNA, 25 bp, Homo sapien
aaattcgcgataacattcctcgtgg

SEQ ID NO: 4786196 - DNA, 25 bp, Homo sapien
ttcctcgtgggtagcagggagaacc

SEQ ID NO: 4786197 - DNA, 25 bp, Homo sapien
tacatccactgtagatgacgtggca

SEQ ID NO: 4786198 - DNA, 25 bp, Homo sapien
ggtgatagttcctcccggcatgcat

SEQ ID NO: 4786199 - DNA, 25 bp, Homo sapien
cccaaatctgtgttgtagaatgtaa

SEQ ID NO: 4786200 - DNA, 25 bp, Homo sapien
ggaagggtattctgtggcaacctgt

SEQ ID NO: 4786201 - DNA, 25 bp, Homo sapien
taaataccatgagccctcaaagtca

SEQ ID NO: 4786202 - DNA, 25 bp, Homo sapien
gcaaagactgctccttttacacagg

SEQ ID NO: 4786203 - DNA, 25 bp, Homo sapien
gtgcaaagactgctccttttacaca

SEQ ID NO: 4786204 - DNA, 25 bp, Homo sapien
tgcaaagactgctccttttacacag

SEQ ID NO: 4786205 - DNA, 25 bp, Homo sapien
aaggagggtagtttcagaagactgc

SEQ ID NO: 4786206 - DNA, 25 bp, Homo sapien
tcaagagaaaacatccggcagtagt

SEQ ID NO: 4786207 - DNA, 25 bp, Homo sapien
gttcttggaagcaaagtcaaagtca

SEQ ID NO: 4786208 - DNA, 25 bp, Homo sapien
tgatttcctcccatgcgtggagtgg

SEQ ID NO: 4786209 - DNA, 25 bp, Homo sapien
tttactatgcacgtggaagctgggc

SEQ ID NO: 4786210 - DNA, 25 bp, Homo sapien
tacaagcgcaacatgattgaccaca

SEQ ID NO: 4786211 - DNA, 25 bp, Homo sapien
gcactcagcagttcccgaggagggc

SEQ ID NO: 4786212 - DNA, 25 bp, Homo sapien
aaagatcttcgctgtcctctctgcc

SEQ ID NO: 4786213 - DNA, 25 bp, Homo sapien
tatcttaaagacgtgtgtgccgaac

SEQ ID NO: 4786214 - DNA, 25 bp, Homo sapien
tggtaagcagtcaatcgcagtcctt

SEQ ID NO: 4786215 - DNA, 25 bp, Homo sapien
gacatgagatcgttgctggctagga

SEQ ID NO: 4786216 - DNA, 25 bp, Homo sapien
gcaggaattcttggcccgagtggtc

SEQ ID NO: 4786217 - DNA, 25 bp, Homo sapien
ggcaacagtagtgcagatctccctg

SEQ ID NO: 4786218 - DNA, 25 bp, Homo sapien
ccttcttaggactcagggcaagcgg

SEQ ID NO: 4786219 - DNA, 25 bp, Homo sapien
tcttgttctctactgaggtggtaag

SEQ ID NO: 4786220 - DNA, 25 bp, Homo sapien
tgtggactagacaccccaatttggc

SEQ ID NO: 4786221 - DNA, 25 bp, Homo sapien
tcaatgcaggccaacaatcttcttc

SEQ ID NO: 4786222 - DNA, 25 bp, Homo sapien
tctcaatgcaggccaacaatcttct

SEQ ID NO: 4786223 - DNA, 25 bp, Homo sapien
tgcaggccaacaatcttcttctctt

SEQ ID NO: 4786224 - DNA, 25 bp, Homo sapien
aatgcaggccaacaatcttcttctc

SEQ ID NO: 4786225 - DNA, 25 bp, Homo sapien
attactctcgggcccaacctcttcg

SEQ ID NO: 4786226 - DNA, 25 bp, Homo sapien
ctcagctcttgttgcaccttagtac

SEQ ID NO: 4786227 - DNA, 25 bp, Homo sapien
ttgcaccttagtacacatgtgcttc

SEQ ID NO: 4786228 - DNA, 25 bp, Homo sapien
catgtgcttcaatgtgacattactc

SEQ ID NO: 4786229 - DNA, 25 bp, Homo sapien
gagagacacaatccatcttgtagtt

SEQ ID NO: 4786230 - DNA, 25 bp, Homo sapien
cttgtagttgaactggtgaagtcat

SEQ ID NO: 4786231 - DNA, 25 bp, Homo sapien
catcttgtagttgaactggtgaagt

SEQ ID NO: 4786232 - DNA, 25 bp, Homo sapien
aggagatgagagacacaatccatct

SEQ ID NO: 4786233 - DNA, 25 bp, Homo sapien
caaactgtccaaatacttgcaggga

SEQ ID NO: 4786234 - DNA, 25 bp, Homo sapien
ttttccgctgtgataagtgtacctt

SEQ ID NO: 4786235 - DNA, 25 bp, Homo sapien
agagcgtgttgtccccattgaagtt

SEQ ID NO: 4786236 - DNA, 25 bp, Homo sapien
gaagtttgccggtccaaactgtcca

SEQ ID NO: 4786237 - DNA, 25 bp, Homo sapien
tgttagaaagatctctccatcaggg

SEQ ID NO: 4786238 - DNA, 25 bp, Homo sapien
taacttggatcagctggaacagatg

SEQ ID NO: 4786239 - DNA, 25 bp, Homo sapien
tcaggtaagccgtaactttgagctg

SEQ ID NO: 4786240 - DNA, 25 bp, Homo sapien
cacaagtttggtaatgaaggtccgg

SEQ ID NO: 4786241 - DNA, 25 bp, Homo sapien
tgccctcccaatcccagatggcatc

SEQ ID NO: 4786242 - DNA, 25 bp, Homo sapien
cctcccaatcccagatggcatctgg

SEQ ID NO: 4786243 - DNA, 25 bp, Homo sapien
cccaatcccagatggcatctggcat

SEQ ID NO: 4786244 - DNA, 25 bp, Homo sapien
cctgccctcccaatcccagatggca

SEQ ID NO: 4786245 - DNA, 25 bp, Homo sapien
caatggtacggtgcaccctgtggtg

SEQ ID NO: 4786246 - DNA, 25 bp, Homo sapien
tcaaagcactggtacctgtgtgagt

SEQ ID NO: 4786247 - DNA, 25 bp, Homo sapien
gaaacagaagctccatgacggtaga

SEQ ID NO: 4786248 - DNA, 25 bp, Homo sapien
tgttgcggaatatggaagcacctcc

SEQ ID NO: 4786249 - DNA, 25 bp, Homo sapien
cccatatcagctttttcaggaggga

SEQ ID NO: 4786250 - DNA, 25 bp, Homo sapien
tcttgaagcctaggttttagaagcc

SEQ ID NO: 4786251 - DNA, 25 bp, Homo sapien
tgattgtgaacaaagggtttcgttc

SEQ ID NO: 4786252 - DNA, 25 bp, Homo sapien
tcaggagggagcagcttagactaaa

SEQ ID NO: 4786253 - DNA, 25 bp, Homo sapien
aataagtgcttacttgaaaagcatg

SEQ ID NO: 4786254 - DNA, 25 bp, Homo sapien
gttgcatttgtggaataagtgctta

SEQ ID NO: 4786255 - DNA, 25 bp, Homo sapien
agtgcttacttgaaaagcatgttct

SEQ ID NO: 4786256 - DNA, 25 bp, Homo sapien
gtgaactatccagacaaagattcat

SEQ ID NO: 4786257 - DNA, 25 bp, Homo sapien
tgcagcttggtagatgaaaaatgtc

SEQ ID NO: 4786258 - DNA, 25 bp, Homo sapien
tcctgttgataccaagtgttagttc

SEQ ID NO: 4786259 - DNA, 25 bp, Homo sapien
tttctttcagagctcgatattgctt

SEQ ID NO: 4786260 - DNA, 25 bp, Homo sapien
gataccaagtgttagttctcatctg

SEQ ID NO: 4786261 - DNA, 25 bp, Homo sapien
cttcagatggttcattgtgttggca

SEQ ID NO: 4786262 - DNA, 25 bp, Homo sapien
tgattgttccttccacatactataa

SEQ ID NO: 4786263 - DNA, 25 bp, Homo sapien
tagaagcttcagatggttcattgtg

SEQ ID NO: 4786264 - DNA, 25 bp, Homo sapien
tataattgcttcattagaagcttca

SEQ ID NO: 4786265 - DNA, 25 bp, Homo sapien
ccaattgctgccttaagagaaaaca

SEQ ID NO: 4786266 - DNA, 25 bp, Homo sapien
gaacaatgggcgtccttccagagga

SEQ ID NO: 4786267 - DNA, 25 bp, Homo sapien
tgctccgggaacacatgagggcaga

SEQ ID NO: 4786268 - DNA, 25 bp, Homo sapien
aatggcttgaaatctgtatgcggga

SEQ ID NO: 4786269 - DNA, 25 bp, Homo sapien
tccagggtccaatagtagaagcagc

SEQ ID NO: 4786270 - DNA, 25 bp, Homo sapien
cagcatcagtgaagagtcctgagac

SEQ ID NO: 4786271 - DNA, 25 bp, Homo sapien
ttggccaagacaaaagtgaggttca

SEQ ID NO: 4786272 - DNA, 25 bp, Homo sapien
gcaaaacgtattgcattggccaaga

SEQ ID NO: 4786273 - DNA, 25 bp, Homo sapien
aaatccagtcagaaagatgggtcct

SEQ ID NO: 4786274 - DNA, 25 bp, Homo sapien
taatgatgcactaaggcagggaggc

SEQ ID NO: 4786275 - DNA, 25 bp, Homo sapien
ttgtgtccaccgtactaatgatgca

SEQ ID NO: 4786276 - DNA, 25 bp, Homo sapien
tcgttgcatcccagagaagggcttt

SEQ ID NO: 4786277 - DNA, 25 bp, Homo sapien
attctggactgctgactgatacagg

SEQ ID NO: 4786278 - DNA, 25 bp, Homo sapien
cctctcagccattctggactgctga

SEQ ID NO: 4786279 - DNA, 25 bp, Homo sapien
tctggactgctgactgatacagggt

SEQ ID NO: 4786280 - DNA, 25 bp, Homo sapien
ctgactgatacagggtgggcttctc

SEQ ID NO: 4786281 - DNA, 25 bp, Homo sapien
ttttgacttccaaactcccatgctc

SEQ ID NO: 4786282 - DNA, 25 bp, Homo sapien
ttgacttccaaactcccatgctctt

SEQ ID NO: 4786283 - DNA, 25 bp, Homo sapien
tttccattaccaatgtatgctgcct

SEQ ID NO: 4786284 - DNA, 25 bp, Homo sapien
cattaccaatgtatgctgcctccat

SEQ ID NO: 4786285 - DNA, 25 bp, Homo sapien
ccacacttagttccaaaacaggtct

SEQ ID NO: 4786286 - DNA, 25 bp, Homo sapien
tctcttccacatcattccaactccc

SEQ ID NO: 4786287 - DNA, 25 bp, Homo sapien
cacacttagttccaaaacaggtctt

SEQ ID NO: 4786288 - DNA, 25 bp, Homo sapien
tagttccaaaacaggtcttaaatca

SEQ ID NO: 4786289 - DNA, 25 bp, Homo sapien
ttactgttgaagactctcttgttct

SEQ ID NO: 4786290 - DNA, 25 bp, Homo sapien
tgttctgtgaactttccttttggat

SEQ ID NO: 4786291 - DNA, 25 bp, Homo sapien
tttggattccaagcctcatttgtaa

SEQ ID NO: 4786292 - DNA, 25 bp, Homo sapien
ctgttgaagactctcttgttctgtg

SEQ ID NO: 4786293 - DNA, 25 bp, Homo sapien
attctttccaatactccaaactgca

SEQ ID NO: 4786294 - DNA, 25 bp, Homo sapien
ttctttccaatactccaaactgcat

SEQ ID NO: 4786295 - DNA, 25 bp, Homo sapien
gatcatccattgacaccctctaagc

SEQ ID NO: 4786296 - DNA, 25 bp, Homo sapien
tggatcatccattgacaccctctaa

SEQ ID NO: 4786297 - DNA, 25 bp, Homo sapien
gcactggatcatccattgacaccct

SEQ ID NO: 4786298 - DNA, 25 bp, Homo sapien
gcagcactggatcatccattgacac

SEQ ID NO: 4786299 - DNA, 25 bp, Homo sapien
tctctgccaggtgtctgataaggct

SEQ ID NO: 4786300 - DNA, 25 bp, Homo sapien
tcccggtcactgaaggattaagtct

SEQ ID NO: 4786301 - DNA, 25 bp, Homo sapien
caccaggagacacgaagagaacttc

SEQ ID NO: 4786302 - DNA, 25 bp, Homo sapien
caagattaactgtcatctccagctg

SEQ ID NO: 4786303 - DNA, 25 bp, Homo sapien
gtgtgaacctaggcaaattgcttaa

SEQ ID NO: 4786304 - DNA, 25 bp, Homo sapien
tggttgtaagtttcatcatctttgc

SEQ ID NO: 4786305 - DNA, 25 bp, Homo sapien
tcatctttgctgtgtgaacctaggc

SEQ ID NO: 4786306 - DNA, 25 bp, Homo sapien
cttgtggttgtaagtttcatcatct

SEQ ID NO: 4786307 - DNA, 25 bp, Homo sapien
cccatgttagttgcgagactgtgag

SEQ ID NO: 4786308 - DNA, 25 bp, Homo sapien
ggcatgagattactggttcccatgt

SEQ ID NO: 4786309 - DNA, 25 bp, Homo sapien
tatcctgtttcttggaccagtgcca

SEQ ID NO: 4786310 - DNA, 25 bp, Homo sapien
tctggtgtccagaatagatgcagag

SEQ ID NO: 4786311 - DNA, 25 bp, Homo sapien
tccggtcaccctgagatgtccaagt

SEQ ID NO: 4786312 - DNA, 25 bp, Homo sapien
aagtcctctctttaacaggtgcctg

SEQ ID NO: 4786313 - DNA, 25 bp, Homo sapien
gtgcctgccaagaccaagacaggga

SEQ ID NO: 4786314 - DNA, 25 bp, Homo sapien
gagctagcacttagatgcctccggt

SEQ ID NO: 4786315 - DNA, 25 bp, Homo sapien
aaaggcaccatattgtcggaggcaa

SEQ ID NO: 4786316 - DNA, 25 bp, Homo sapien
gaggcaaatgagaccttcattatcc

SEQ ID NO: 4786317 - DNA, 25 bp, Homo sapien
tgtcggaggcaaatgagaccttcat

SEQ ID NO: 4786318 - DNA, 25 bp, Homo sapien
catattgtcggaggcaaatgagacc

SEQ ID NO: 4786319 - DNA, 25 bp, Homo sapien
tctgtgtttactggagaccatggca

SEQ ID NO: 4786320 - DNA, 25 bp, Homo sapien
ctctgtgtttactggagaccatggc

SEQ ID NO: 4786321 - DNA, 25 bp, Homo sapien
cctctgtgtttactggagaccatgg

SEQ ID NO: 4786322 - DNA, 25 bp, Homo sapien
tgagactcaggcatgtgaggcaata

SEQ ID NO: 4786323 - DNA, 25 bp, Homo sapien
gctgtgggatcgactgcaatagtta

SEQ ID NO: 4786324 - DNA, 25 bp, Homo sapien
gcaatagaccatgatctgacataca

SEQ ID NO: 4786325 - DNA, 25 bp, Homo sapien
gacatacatagtgtttttccttctg

SEQ ID NO: 4786326 - DNA, 25 bp, Homo sapien
taaattcttctctgtcttctaccat

SEQ ID NO: 4786327 - DNA, 25 bp, Homo sapien
ttctctgtcttctaccatttctccc

SEQ ID NO: 4786328 - DNA, 25 bp, Homo sapien
ctctgtcttctaccatttctccctt

SEQ ID NO: 4786329 - DNA, 25 bp, Homo sapien
tgtcttctaccatttctcccttctc

SEQ ID NO: 4786330 - DNA, 25 bp, Homo sapien
gcgctgggtcactgggactggagga

SEQ ID NO: 4786331 - DNA, 25 bp, Homo sapien
catttgcgctgggtcactgggactg

SEQ ID NO: 4786332 - DNA, 25 bp, Homo sapien
gttttaccatttgcgctgggtcact

SEQ ID NO: 4786333 - DNA, 25 bp, Homo sapien
tttgcgctgggtcactgggactgga

SEQ ID NO: 4786334 - DNA, 25 bp, Homo sapien
ttgatccttcacagctcccagttgg

SEQ ID NO: 4786335 - DNA, 25 bp, Homo sapien
ttcacagctcccagttggagaaaat

SEQ ID NO: 4786336 - DNA, 25 bp, Homo sapien
actatttatttgatattgccgtatc

SEQ ID NO: 4786337 - DNA, 25 bp, Homo sapien
caatgaagaaagtaggacttgatcc

SEQ ID NO: 4786338 - DNA, 25 bp, Homo sapien
tttccacaaggagcctctccaagca

SEQ ID NO: 4786339 - DNA, 25 bp, Homo sapien
tcctttccacaaggagcctctccaa

SEQ ID NO: 4786340 - DNA, 25 bp, Homo sapien
cacaaggagcctctccaagcactgc

SEQ ID NO: 4786341 - DNA, 25 bp, Homo sapien
acaaggagcctctccaagcactgct

SEQ ID NO: 4786342 - DNA, 25 bp, Homo sapien
tgcttggacaagtgcatttagttct

SEQ ID NO: 4786343 - DNA, 25 bp, Homo sapien
catggaacacgccttggcactgatt

SEQ ID NO: 4786344 - DNA, 25 bp, Homo sapien
gactgcttggacaagtgcatttagt

SEQ ID NO: 4786345 - DNA, 25 bp, Homo sapien
actgattgtccgtgggctccccttg

SEQ ID NO: 4786346 - DNA, 25 bp, Homo sapien
tcaccagcaaagggctaagcagcag

SEQ ID NO: 4786347 - DNA, 25 bp, Homo sapien
cagccaaggctggtccactcaccag

SEQ ID NO: 4786348 - DNA, 25 bp, Homo sapien
accagcaaagggctaagcagcagct

SEQ ID NO: 4786349 - DNA, 25 bp, Homo sapien
ccagcaaagggctaagcagcagctg

SEQ ID NO: 4786350 - DNA, 25 bp, Homo sapien
cctgcataaaggctgtagcggtagc

SEQ ID NO: 4786351 - DNA, 25 bp, Homo sapien
agccctgcataaaggctgtagcggt

SEQ ID NO: 4786352 - DNA, 25 bp, Homo sapien
gcataaaggctgtagcggtagccat

SEQ ID NO: 4786353 - DNA, 25 bp, Homo sapien
tgcataaaggctgtagcggtagcca

SEQ ID NO: 4786354 - DNA, 25 bp, Homo sapien
gggctggatctgctctggcattgtc

SEQ ID NO: 4786355 - DNA, 25 bp, Homo sapien
tcataggagctccccagcttcaaga

SEQ ID NO: 4786356 - DNA, 25 bp, Homo sapien
ctggatctgctctggcattgtcaaa

SEQ ID NO: 4786357 - DNA, 25 bp, Homo sapien
aggagctccccagcttcaagaaggg

SEQ ID NO: 4786358 - DNA, 25 bp, Homo sapien
gtaccattggttgcatgagtcagaa

SEQ ID NO: 4786359 - DNA, 25 bp, Homo sapien
tttaacaactgacatcaggccagac

SEQ ID NO: 4786360 - DNA, 25 bp, Homo sapien
tataatcaatgtgtaccattggttg

SEQ ID NO: 4786361 - DNA, 25 bp, Homo sapien
tggctttaacaactgacatcaggcc

SEQ ID NO: 4786362 - DNA, 25 bp, Homo sapien
tggtcaacttgctatcaggtcccat

SEQ ID NO: 4786363 - DNA, 25 bp, Homo sapien
catcactccagttaaatgtggtcaa

SEQ ID NO: 4786364 - DNA, 25 bp, Homo sapien
taaatgtggtcaacttgctatcagg

SEQ ID NO: 4786365 - DNA, 25 bp, Homo sapien
ccagttaaatgtggtcaacttgcta

SEQ ID NO: 4786366 - DNA, 25 bp, Homo sapien
agcaggttaatttcagcagctgcca

SEQ ID NO: 4786367 - DNA, 25 bp, Homo sapien
gagagagcaggttaatttcagcagc

SEQ ID NO: 4786368 - DNA, 25 bp, Homo sapien
gagagcaggttaatttcagcagctg

SEQ ID NO: 4786369 - DNA, 25 bp, Homo sapien
ctggagagagcaggttaatttcagc

SEQ ID NO: 4786370 - DNA, 25 bp, Homo sapien
ccagtgcctctgctgtggtcttttt

SEQ ID NO: 4786371 - DNA, 25 bp, Homo sapien
tgccagtgcctctgctgtggtcttt

SEQ ID NO: 4786372 - DNA, 25 bp, Homo sapien
agtgcctctgctgtggtcttttttt

SEQ ID NO: 4786373 - DNA, 25 bp, Homo sapien
ctgccagtgcctctgctgtggtctt

SEQ ID NO: 4786374 - DNA, 25 bp, Homo sapien
tcagcagcctgaaagatacttgaaa

SEQ ID NO: 4786375 - DNA, 25 bp, Homo sapien
gattttggagagcttcaattttgtc

SEQ ID NO: 4786376 - DNA, 25 bp, Homo sapien
gcagcctgaaagatacttgaaatgg

SEQ ID NO: 4786377 - DNA, 25 bp, Homo sapien
tttcatgattttggagagcttcaat

SEQ ID NO: 4786378 - DNA, 25 bp, Homo sapien
tacagttaagaagttcatcaatggt

SEQ ID NO: 4786379 - DNA, 25 bp, Homo sapien
ctttacagttaagaagttcatcaat

SEQ ID NO: 4786380 - DNA, 25 bp, Homo sapien
ttacagttaagaagttcatcaatgg

SEQ ID NO: 4786381 - DNA, 25 bp, Homo sapien
acagttaagaagttcatcaatggtt

SEQ ID NO: 4786382 - DNA, 25 bp, Homo sapien
atctgttcaactgtttcgccactgg

SEQ ID NO: 4786383 - DNA, 25 bp, Homo sapien
tggtatagttggtcacggcccatac

SEQ ID NO: 4786384 - DNA, 25 bp, Homo sapien
tgttcaactgtttcgccactggtat

SEQ ID NO: 4786385 - DNA, 25 bp, Homo sapien
caactgtttcgccactggtatagtt

SEQ ID NO: 4786386 - DNA, 25 bp, Homo sapien
cttccttttgtgtcttaagatctga

SEQ ID NO: 4786387 - DNA, 25 bp, Homo sapien
agcttccttttgtgtcttaagatct

SEQ ID NO: 4786388 - DNA, 25 bp, Homo sapien
gcttccttttgtgtcttaagatctg

SEQ ID NO: 4786389 - DNA, 25 bp, Homo sapien
gaacattggcaaggaataggactaa

SEQ ID NO: 4786390 - DNA, 25 bp, Homo sapien
acattggcaaggaataggactaatc

SEQ ID NO: 4786391 - DNA, 25 bp, Homo sapien
cattggcaaggaataggactaatcc

SEQ ID NO: 4786392 - DNA, 25 bp, Homo sapien
attggcaaggaataggactaatcca

SEQ ID NO: 4786393 - DNA, 25 bp, Homo sapien
agcaagtgcctctgcatcgatcaca

SEQ ID NO: 4786394 - DNA, 25 bp, Homo sapien
cagcaagtgcctctgcatcgatcac

SEQ ID NO: 4786395 - DNA, 25 bp, Homo sapien
gcaagtgcctctgcatcgatcacaa

SEQ ID NO: 4786396 - DNA, 25 bp, Homo sapien
cacaagttggggcacaactcctgtt

SEQ ID NO: 4786397 - DNA, 25 bp, Homo sapien
agcttcacaagttggggcacaactc

SEQ ID NO: 4786398 - DNA, 25 bp, Homo sapien
caagttggggcacaactcctgtttc

SEQ ID NO: 4786399 - DNA, 25 bp, Homo sapien
gttggggcacaactcctgtttccat

SEQ ID NO: 4786400 - DNA, 25 bp, Homo sapien
gcaggcatctgctaatagttctgga

SEQ ID NO: 4786401 - DNA, 25 bp, Homo sapien
gcatctgctaatagttctggatcat

SEQ ID NO: 4786402 - DNA, 25 bp, Homo sapien
cagcaggcatctgctaatagttctg

SEQ ID NO: 4786403 - DNA, 25 bp, Homo sapien
caggcatctgctaatagttctggat

SEQ ID NO: 4786404 - DNA, 25 bp, Homo sapien
gattcttgttgcagcaaagatttga

SEQ ID NO: 4786405 - DNA, 25 bp, Homo sapien
taagattacataagtaaccacatgc

SEQ ID NO: 4786406 - DNA, 25 bp, Homo sapien
cctcaacagcatctaaccggggtgc

SEQ ID NO: 4786407 - DNA, 25 bp, Homo sapien
atttcctcaacagcatctaaccggg

SEQ ID NO: 4786408 - DNA, 25 bp, Homo sapien
gtacttagtaatcaagtctcggaaa

SEQ ID NO: 4786409 - DNA, 25 bp, Homo sapien
ggtcaacggcactgtacttagtaat

SEQ ID NO: 4786410 - DNA, 25 bp, Homo sapien
gtgggtcaacggcactgtacttagt

SEQ ID NO: 4786411 - DNA, 25 bp, Homo sapien
cggcactgtacttagtaatcaagtc

SEQ ID NO: 4786412 - DNA, 25 bp, Homo sapien
ggagccgatacaacttgttcactga

SEQ ID NO: 4786413 - DNA, 25 bp, Homo sapien
ctggagccgatacaacttgttcact

SEQ ID NO: 4786414 - DNA, 25 bp, Homo sapien
cctggagccgatacaacttgttcac

SEQ ID NO: 4786415 - DNA, 25 bp, Homo sapien
tggagccgatacaacttgttcactg

SEQ ID NO: 4786416 - DNA, 25 bp, Homo sapien
agtgccctgattgttgtggtttttc

SEQ ID NO: 4786417 - DNA, 25 bp, Homo sapien
tgacttctattctgtgacacctcat

SEQ ID NO: 4786418 - DNA, 25 bp, Homo sapien
tggtttttctgcagcggacaagtag

SEQ ID NO: 4786419 - DNA, 25 bp, Homo sapien
gttgtggtttttctgcagcggacaa

SEQ ID NO: 4786420 - DNA, 25 bp, Homo sapien
ttttcccttgttcttgaatctgtta

SEQ ID NO: 4786421 - DNA, 25 bp, Homo sapien
ttcttgaatctgttaagtcgggcag

SEQ ID NO: 4786422 - DNA, 25 bp, Homo sapien
tgttcttgaatctgttaagtcgggc

SEQ ID NO: 4786423 - DNA, 25 bp, Homo sapien
ccttgttcttgaatctgttaagtcg

SEQ ID NO: 4786424 - DNA, 25 bp, Homo sapien
taagaagggctttctattgaaatcg

SEQ ID NO: 4786425 - DNA, 25 bp, Homo sapien
agaagggctttctattgaaatcgca

SEQ ID NO: 4786426 - DNA, 25 bp, Homo sapien
gaagggctttctattgaaatcgcac

SEQ ID NO: 4786427 - DNA, 25 bp, Homo sapien
ttaagaagggctttctattgaaatc

SEQ ID NO: 4786428 - DNA, 25 bp, Homo sapien
ggatgatctgtggaaaagcccagct

SEQ ID NO: 4786429 - DNA, 25 bp, Homo sapien
gccattgctcaagatgactcgatag

SEQ ID NO: 4786430 - DNA, 25 bp, Homo sapien
catggcataaacactctgggcttct

SEQ ID NO: 4786431 - DNA, 25 bp, Homo sapien
cactaaagcatttggcagagacaag

SEQ ID NO: 4786432 - DNA, 25 bp, Homo sapien
catggtcgctttttgccattcaaag

SEQ ID NO: 4786433 - DNA, 25 bp, Homo sapien
catactgggaatctgaaggctgggt

SEQ ID NO: 4786434 - DNA, 25 bp, Homo sapien
ggttgtcatctagacttcctcgtgc

SEQ ID NO: 4786435 - DNA, 25 bp, Homo sapien
tcttgctgtgatacgggactctcta

SEQ ID NO: 4786436 - DNA, 25 bp, Homo sapien
cagtgattgaaaagtcgaatcttgt

SEQ ID NO: 4786437 - DNA, 25 bp, Homo sapien
ctgcaaacatagtatacgttcagtg

SEQ ID NO: 4786438 - DNA, 25 bp, Homo sapien
taatagtactcaaagctgccaaatc

SEQ ID NO: 4786439 - DNA, 25 bp, Homo sapien
tcttgtgtaatagtactcaaagctg

SEQ ID NO: 4786440 - DNA, 25 bp, Homo sapien
gtggttcattagtgtgttcaagccc

SEQ ID NO: 4786441 - DNA, 25 bp, Homo sapien
gagtcaacaccattaccctctgagt

SEQ ID NO: 4786442 - DNA, 25 bp, Homo sapien
tctggtactttacatgagtcaacac

SEQ ID NO: 4786443 - DNA, 25 bp, Homo sapien
tagtggctgccccaagaacgatgtg

SEQ ID NO: 4786444 - DNA, 25 bp, Homo sapien
catcaggatgtgagttggaagccag

SEQ ID NO: 4786445 - DNA, 25 bp, Homo sapien
tctgagagcctttgtaacttggggt

SEQ ID NO: 4786446 - DNA, 25 bp, Homo sapien
actgagctctaacccgaaggtgttt

SEQ ID NO: 4786447 - DNA, 25 bp, Homo sapien
caggctatgatggttagaaccatag

SEQ ID NO: 4786448 - DNA, 25 bp, Homo sapien
ttcacattcactcccggagatgtag

SEQ ID NO: 4786449 - DNA, 25 bp, Homo sapien
agtcgtggaatcttctgtggcaata

SEQ ID NO: 4786450 - DNA, 25 bp, Homo sapien
ctttcaaaggaagtcgtggaatctt

SEQ ID NO: 4786451 - DNA, 25 bp, Homo sapien
ttcactcccggagatgtagactttc

SEQ ID NO: 4786452 - DNA, 25 bp, Homo sapien
ttccttttcttaggagctacccgca

SEQ ID NO: 4786453 - DNA, 25 bp, Homo sapien
aaactgtgtcatatatagcttagct

SEQ ID NO: 4786454 - DNA, 25 bp, Homo sapien
agaaaaactgtgtcatatatagctt

SEQ ID NO: 4786455 - DNA, 25 bp, Homo sapien
ccttttcttaggagctacccgcagg

SEQ ID NO: 4786456 - DNA, 25 bp, Homo sapien
attgcgtaacttcggcagccgggcg

SEQ ID NO: 4786457 - DNA, 25 bp, Homo sapien
cgggctacacattgcgtaacttcgg

SEQ ID NO: 4786458 - DNA, 25 bp, Homo sapien
tccacgaagcgcttcccgggctaca

SEQ ID NO: 4786459 - DNA, 25 bp, Homo sapien
cttcccgggctacacattgcgtaac

SEQ ID NO: 4786460 - DNA, 25 bp, Homo sapien
tctcggcgagtcacgatgatggcgg

SEQ ID NO: 4786461 - DNA, 25 bp, Homo sapien
gcggattccctgcttgtctcgccga

SEQ ID NO: 4786462 - DNA, 25 bp, Homo sapien
tgtggtgagctagcggattccctgc

SEQ ID NO: 4786463 - DNA, 25 bp, Homo sapien
ggccaccatcctgtggtgagctagc

SEQ ID NO: 4786464 - DNA, 25 bp, Homo sapien
cagaagcctaaagaagcggacataa

SEQ ID NO: 4786465 - DNA, 25 bp, Homo sapien
gggtgtttgatcacccatggattct

SEQ ID NO: 4786466 - DNA, 25 bp, Homo sapien
aatgctaacctggtgattcagtccc

SEQ ID NO: 4786467 - DNA, 25 bp, Homo sapien
tttcctaaagtgagacagcctggag

SEQ ID NO: 4786468 - DNA, 25 bp, Homo sapien
aggatgtactaatggacatttccgc

SEQ ID NO: 4786469 - DNA, 25 bp, Homo sapien
taatggacatttccgccagcagtgt

SEQ ID NO: 4786470 - DNA, 25 bp, Homo sapien
catctggtataagatggggcatctc

SEQ ID NO: 4786471 - DNA, 25 bp, Homo sapien
tgtactaatggacatttccgccagc

SEQ ID NO: 4786472 - DNA, 25 bp, Homo sapien
ctgttactagtttgttcatcacgaa

SEQ ID NO: 4786473 - DNA, 25 bp, Homo sapien
ggtaatactggcctcttagggtgag

SEQ ID NO: 4786474 - DNA, 25 bp, Homo sapien
tagactagcaagaaccaacaacatc

SEQ ID NO: 4786475 - DNA, 25 bp, Homo sapien
catctgttcataagtcatattggtc

SEQ ID NO: 4786476 - DNA, 25 bp, Homo sapien
ggtttcaacatgttagccagggatg

SEQ ID NO: 4786477 - DNA, 25 bp, Homo sapien
tttcaacatgttagccagggatggt

SEQ ID NO: 4786478 - DNA, 25 bp, Homo sapien
gtttcaacatgttagccagggatgg

SEQ ID NO: 4786479 - DNA, 25 bp, Homo sapien
tcatggcaacactggataatggctt

SEQ ID NO: 4786480 - DNA, 25 bp, Homo sapien
tgagacccttctaacatgatttgag

SEQ ID NO: 4786481 - DNA, 25 bp, Homo sapien
caagtcgtgagtcaaactgctgcct

SEQ ID NO: 4786482 - DNA, 25 bp, Homo sapien
tctgatcggataatggaatactctc

SEQ ID NO: 4786483 - DNA, 25 bp, Homo sapien
tcttaaagaatcagccgagacacca

SEQ ID NO: 4786484 - DNA, 25 bp, Homo sapien
tgtgtccttggacaacaaatctgga

SEQ ID NO: 4786485 - DNA, 25 bp, Homo sapien
tttgatcgttccatacagtaccttg

SEQ ID NO: 4786486 - DNA, 25 bp, Homo sapien
tgcattcgaggtatactgtcatttc

SEQ ID NO: 4786487 - DNA, 25 bp, Homo sapien
tccactggaaggttaccacctgctt

SEQ ID NO: 4786488 - DNA, 25 bp, Homo sapien
gagtttaggaccagtgtgtttcagg

SEQ ID NO: 4786489 - DNA, 25 bp, Homo sapien
cttggagtttaggaccagtgtgttt

SEQ ID NO: 4786490 - DNA, 25 bp, Homo sapien
agtttaggaccagtgtgtttcaggt

SEQ ID NO: 4786491 - DNA, 25 bp, Homo sapien
tcaatgaacagtgcctcaaaggcag

SEQ ID NO: 4786492 - DNA, 25 bp, Homo sapien
taagatggtcaatgaacagtgcctc

SEQ ID NO: 4786493 - DNA, 25 bp, Homo sapien
gatggtcaatgaacagtgcctcaaa

SEQ ID NO: 4786494 - DNA, 25 bp, Homo sapien
cctcagctccaaagacttttccacc

SEQ ID NO: 4786495 - DNA, 25 bp, Homo sapien
cacataatgcagtgagctggctggt

SEQ ID NO: 4786496 - DNA, 25 bp, Homo sapien
cttgacacataatgcagtgagctgg

SEQ ID NO: 4786497 - DNA, 25 bp, Homo sapien
gagactgcagggttctactgaccag

SEQ ID NO: 4786498 - DNA, 25 bp, Homo sapien
tactgaccagttccagatgggcatg

SEQ ID NO: 4786499 - DNA, 25 bp, Homo sapien
ggggcactggtgaagtgtcccctct

SEQ ID NO: 4786500 - DNA, 25 bp, Homo sapien
ggcactggtgaagtgtcccctcttg

SEQ ID NO: 4786501 - DNA, 25 bp, Homo sapien
gcactggtgaagtgtcccctcttgt

SEQ ID NO: 4786502 - DNA, 25 bp, Homo sapien
gtgtcccctcttgtctgctggagac

SEQ ID NO: 4786503 - DNA, 25 bp, Homo sapien
ggaagacgctggtctagagacccag

SEQ ID NO: 4786504 - DNA, 25 bp, Homo sapien
caaagtgggaaagacccagcatccg

SEQ ID NO: 4786505 - DNA, 25 bp, Homo sapien
gcatccgtgggtcgctgaaaagctg

SEQ ID NO: 4786506 - DNA, 25 bp, Homo sapien
gctcatacttgcctctattgccgaa

SEQ ID NO: 4786507 - DNA, 25 bp, Homo sapien
tctggcctgtgataccacctgaagc

SEQ ID NO: 4786508 - DNA, 25 bp, Homo sapien
tattttgccgtaaatgcagcggagt

SEQ ID NO: 4786509 - DNA, 25 bp, Homo sapien
tctgtgaggcatccataggtcatgg

SEQ ID NO: 4786510 - DNA, 25 bp, Homo sapien
gcaatggccattcttaagccagagg

SEQ ID NO: 4786511 - DNA, 25 bp, Homo sapien
tgctcgctgcctcaggtgttcgtgg

SEQ ID NO: 4786512 - DNA, 25 bp, Homo sapien
ggcccaactcagcaacgtgctggtg

SEQ ID NO: 4786513 - DNA, 25 bp, Homo sapien
gctggtgtttacttggcccagcagg

SEQ ID NO: 4786514 - DNA, 25 bp, Homo sapien
tgttcgtgggcagccccagaatgtg

SEQ ID NO: 4786515 - DNA, 25 bp, Homo sapien
tctgtgtggtccgtttccaagggcc

SEQ ID NO: 4786516 - DNA, 25 bp, Homo sapien
tatttgtcaagtggctcagatctca

SEQ ID NO: 4786517 - DNA, 25 bp, Homo sapien
tcatggtaggttgtcactcaggcaa

SEQ ID NO: 4786518 - DNA, 25 bp, Homo sapien
gatgtatcctcacagtagccctatg

SEQ ID NO: 4786519 - DNA, 25 bp, Homo sapien
tcatttcagggccatatttgtgctg

SEQ ID NO: 4786520 - DNA, 25 bp, Homo sapien
gctgtcttcctccttgttgctgtga

SEQ ID NO: 4786521 - DNA, 25 bp, Homo sapien
tttgtgctgtcttcctccttgttgc

SEQ ID NO: 4786522 - DNA, 25 bp, Homo sapien
catttcagggccatatttgtgctgt

SEQ ID NO: 4786523 - DNA, 25 bp, Homo sapien
gaaaacttggcaagatcctgcagcc

SEQ ID NO: 4786524 - DNA, 25 bp, Homo sapien
cacctggacaagcaatctgggatga

SEQ ID NO: 4786525 - DNA, 25 bp, Homo sapien
gatgaggtaactctccaggcagacc

SEQ ID NO: 4786526 - DNA, 25 bp, Homo sapien
caggcagacccatgttatgaaagta

SEQ ID NO: 4786527 - DNA, 25 bp, Homo sapien
gtttctgaaaagctgcgcaagagag

SEQ ID NO: 4786528 - DNA, 25 bp, Homo sapien
ttctgaaaagctgcgcaagagagca

SEQ ID NO: 4786529 - DNA, 25 bp, Homo sapien
gctgcgcaagagagcagctgacttc

SEQ ID NO: 4786530 - DNA, 25 bp, Homo sapien
aaagctgcgcaagagagcagctgac

SEQ ID NO: 4786531 - DNA, 25 bp, Homo sapien
ctcccaaccctgccctttggccact

SEQ ID NO: 4786532 - DNA, 25 bp, Homo sapien
tcccaaccctgccctttggccactg

SEQ ID NO: 4786533 - DNA, 25 bp, Homo sapien
cccaaccctgccctttggccactga

SEQ ID NO: 4786534 - DNA, 25 bp, Homo sapien
ccaaccctgccctttggccactgac

SEQ ID NO: 4786535 - DNA, 25 bp, Homo sapien
tcattcccattcaggcctagacctg

SEQ ID NO: 4786536 - DNA, 25 bp, Homo sapien
gggcctctcagaggcccgatcctgg

SEQ ID NO: 4786537 - DNA, 25 bp, Homo sapien
tcggtctcctggattgctcaagcat

SEQ ID NO: 4786538 - DNA, 25 bp, Homo sapien
acctgtgctcggtgcatagtctcca

SEQ ID NO: 4786539 - DNA, 25 bp, Homo sapien
gacactttctaattcgtatttgttc

SEQ ID NO: 4786540 - DNA, 25 bp, Homo sapien
ctaattcgtatttgttctagagcac

SEQ ID NO: 4786541 - DNA, 25 bp, Homo sapien
tctagagcactgtattagttttttc

SEQ ID NO: 4786542 - DNA, 25 bp, Homo sapien
ttagttttttctcgcactgctgtaa

SEQ ID NO: 4786543 - DNA, 25 bp, Homo sapien
gctacagcatgtattaacccataga

SEQ ID NO: 4786544 - DNA, 25 bp, Homo sapien
aaatttcagatgcacacaaaactag

SEQ ID NO: 4786545 - DNA, 25 bp, Homo sapien
cccatagacacgtttattttatctg

SEQ ID NO: 4786546 - DNA, 25 bp, Homo sapien
gccccactcttcatacataaaggat

SEQ ID NO: 4786547 - DNA, 25 bp, Homo sapien
gggaaacgcccatgcaattagtcta

SEQ ID NO: 4786548 - DNA, 25 bp, Homo sapien
gctacgcctgtgatgggctaattga

SEQ ID NO: 4786549 - DNA, 25 bp, Homo sapien
aaaactaatcttgtagctacgcctg

SEQ ID NO: 4786550 - DNA, 25 bp, Homo sapien
cagggagcttggcatgagaaacctt

SEQ ID NO: 4786551 - DNA, 25 bp, Homo sapien
tctaatgattcagaacatcccagct

SEQ ID NO: 4786552 - DNA, 25 bp, Homo sapien
agtggccacatgcaggtacctagtg

SEQ ID NO: 4786553 - DNA, 25 bp, Homo sapien
gggtcagaactaatggattctaatg

SEQ ID NO: 4786554 - DNA, 25 bp, Homo sapien
tctggtgtgggtaggagcacatttc

SEQ ID NO: 4786555 - DNA, 25 bp, Homo sapien
tctccctcgagcgatgacttaggtt

SEQ ID NO: 4786556 - DNA, 25 bp, Homo sapien
ggtagctgagactcgggaagcccat

SEQ ID NO: 4786557 - DNA, 25 bp, Homo sapien
ttcagaggaagccaacgcctgtgca

SEQ ID NO: 4786558 - DNA, 25 bp, Homo sapien
tcagagctggcgaaatcaacgagag

SEQ ID NO: 4786559 - DNA, 25 bp, Homo sapien
ggcaggtccaaatccataatgtctg

SEQ ID NO: 4786560 - DNA, 25 bp, Homo sapien
gggcaggtccaaatccataatgtct

SEQ ID NO: 4786561 - DNA, 25 bp, Homo sapien
gagggcaggtccaaatccataatgt

SEQ ID NO: 4786562 - DNA, 25 bp, Homo sapien
caggtccaaatccataatgtctgca

SEQ ID NO: 4786563 - DNA, 25 bp, Homo sapien
gactgagcctggatcacaatgcaat

SEQ ID NO: 4786564 - DNA, 25 bp, Homo sapien
agtttcaaataagggactgtgatgc

SEQ ID NO: 4786565 - DNA, 25 bp, Homo sapien
cactgaggtgtcaaatttgatgtca

SEQ ID NO: 4786566 - DNA, 25 bp, Homo sapien
gactgtgatgccacgaagcagaacg

SEQ ID NO: 4786567 - DNA, 25 bp, Homo sapien
tgatggagggttcatgtgccaagcc

SEQ ID NO: 4786568 - DNA, 25 bp, Homo sapien
ttggggaaaggatgtgcaaagacac

SEQ ID NO: 4786569 - DNA, 25 bp, Homo sapien
agcaaatccgtgaggctccagcatg

SEQ ID NO: 4786570 - DNA, 25 bp, Homo sapien
ctggaagtgaaggacgtctaaagga

SEQ ID NO: 4786571 - DNA, 25 bp, Homo sapien
cagtcaaattcagtagatggattag

SEQ ID NO: 4786572 - DNA, 25 bp, Homo sapien
attcagtagatggattagattaagc

SEQ ID NO: 4786573 - DNA, 25 bp, Homo sapien
ggattagattaagcccctttccagc

SEQ ID NO: 4786574 - DNA, 25 bp, Homo sapien
gttttctcaaccagtcaaattcagt

SEQ ID NO: 4786575 - DNA, 25 bp, Homo sapien
ggtatgtgctgtagaggaggccacg

SEQ ID NO: 4786576 - DNA, 25 bp, Homo sapien
ttcatcactggcagatgttgtcttc

SEQ ID NO: 4786577 - DNA, 25 bp, Homo sapien
caaagccatgcaattagctcctggc

SEQ ID NO: 4786578 - DNA, 25 bp, Homo sapien
agcaaagccatgcaattagctcctg

SEQ ID NO: 4786579 - DNA, 25 bp, Homo sapien
cctctggtatatccaggtagaatga

SEQ ID NO: 4786580 - DNA, 25 bp, Homo sapien
tgaaaaaacagtcatccttttattc

SEQ ID NO: 4786581 - DNA, 25 bp, Homo sapien
caggtagaatgagtaccacatttgg

SEQ ID NO: 4786582 - DNA, 25 bp, Homo sapien
tcccacaaaatcctctggtatatcc

SEQ ID NO: 4786583 - DNA, 25 bp, Homo sapien
acatgcacataaaattgcagagtgc

SEQ ID NO: 4786584 - DNA, 25 bp, Homo sapien
taaaattgcagagtgctacttttga

SEQ ID NO: 4786585 - DNA, 25 bp, Homo sapien
gcagagtgctacttttgatattttt

SEQ ID NO: 4786586 - DNA, 25 bp, Homo sapien
tgcacataaaattgcagagtgctac

SEQ ID NO: 4786587 - DNA, 25 bp, Homo sapien
agggaacccactccagcatgttcac

SEQ ID NO: 4786588 - DNA, 25 bp, Homo sapien
cagggaacccactccagcatgttca

SEQ ID NO: 4786589 - DNA, 25 bp, Homo sapien
ccagcatgttcacctacaacctcca

SEQ ID NO: 4786590 - DNA, 25 bp, Homo sapien
cactccagcatgttcacctacaacc

SEQ ID NO: 4786591 - DNA, 25 bp, Homo sapien
caaacaagattaagatggcccattc

SEQ ID NO: 4786592 - DNA, 25 bp, Homo sapien
caattgtatggtcctttctgatcca

SEQ ID NO: 4786593 - DNA, 25 bp, Homo sapien
tggcccattcatcacttgtcaagag

SEQ ID NO: 4786594 - DNA, 25 bp, Homo sapien
caagaggaggtctgaaatcctagga

SEQ ID NO: 4786595 - DNA, 25 bp, Homo sapien
caacgcttgtacagatcattctgaa

SEQ ID NO: 4786596 - DNA, 25 bp, Homo sapien
aacgcttgtacagatcattctgaaa

SEQ ID NO: 4786597 - DNA, 25 bp, Homo sapien
tcaacgcttgtacagatcattctga

SEQ ID NO: 4786598 - DNA, 25 bp, Homo sapien
ttggcgtctctagcaccttcagttt

SEQ ID NO: 4786599 - DNA, 25 bp, Homo sapien
ggcgtctctagcaccttcagttttc

SEQ ID NO: 4786600 - DNA, 25 bp, Homo sapien
cgtctctagcaccttcagttttctg

SEQ ID NO: 4786601 - DNA, 25 bp, Homo sapien
cttggcgtctctagcaccttcagtt

SEQ ID NO: 4786602 - DNA, 25 bp, Homo sapien
agacaacttcgtggattttctctgt

SEQ ID NO: 4786603 - DNA, 25 bp, Homo sapien
ttagcagacaacttcgtggattttc

SEQ ID NO: 4786604 - DNA, 25 bp, Homo sapien
ggtttagcagacaacttcgtggatt

SEQ ID NO: 4786605 - DNA, 25 bp, Homo sapien
ctgtggttcgtccttaactttggat

SEQ ID NO: 4786606 - DNA, 25 bp, Homo sapien
tgacaatggcagcaggatgtgggtg

SEQ ID NO: 4786607 - DNA, 25 bp, Homo sapien
ggtgacaatggcagcaggatgtggg

SEQ ID NO: 4786608 - DNA, 25 bp, Homo sapien
tggtgacaatggcagcaggatgtgg

SEQ ID NO: 4786609 - DNA, 25 bp, Homo sapien
ggtggtgacaatggcagcaggatgt

SEQ ID NO: 4786610 - DNA, 25 bp, Homo sapien
ctgggtatgggatgcaagggcacag

SEQ ID NO: 4786611 - DNA, 25 bp, Homo sapien
tgggtatgggatgcaagggcacagg

SEQ ID NO: 4786612 - DNA, 25 bp, Homo sapien
ggtatgggatgcaagggcacagggc

SEQ ID NO: 4786613 - DNA, 25 bp, Homo sapien
gtatgggatgcaagggcacagggct

SEQ ID NO: 4786614 - DNA, 25 bp, Homo sapien
gtgcgggttccgacactaggcccca

SEQ ID NO: 4786615 - DNA, 25 bp, Homo sapien
cacggagcttcaagaacgagctatt

SEQ ID NO: 4786616 - DNA, 25 bp, Homo sapien
acactaggccccacacggatctggg

SEQ ID NO: 4786617 - DNA, 25 bp, Homo sapien
ctggtttggctacgacctggcggaa

SEQ ID NO: 4786618 - DNA, 25 bp, Homo sapien
tgtgggcagtttaatgaggtgtaaa

SEQ ID NO: 4786619 - DNA, 25 bp, Homo sapien
tgtaaacgaagtgcaaatggcctag

SEQ ID NO: 4786620 - DNA, 25 bp, Homo sapien
tgcaaatggcctagaagccccttga

SEQ ID NO: 4786621 - DNA, 25 bp, Homo sapien
gggacccaggcatataatgtgggca

SEQ ID NO: 4786622 - DNA, 25 bp, Homo sapien
taggatatgtgctgccgaggtgagc

SEQ ID NO: 4786623 - DNA, 25 bp, Homo sapien
tttaggatatgtgctgccgaggtga

SEQ ID NO: 4786624 - DNA, 25 bp, Homo sapien
attttaggatatgtgctgccgaggt

SEQ ID NO: 4786625 - DNA, 25 bp, Homo sapien
aggatatgtgctgccgaggtgagca

SEQ ID NO: 4786626 - DNA, 25 bp, Homo sapien
ctgagtttcttcatccgcatactgg

SEQ ID NO: 4786627 - DNA, 25 bp, Homo sapien
gagtttcttcatccgcatactggag

SEQ ID NO: 4786628 - DNA, 25 bp, Homo sapien
ttcttcatccgcatactggagatgg

SEQ ID NO: 4786629 - DNA, 25 bp, Homo sapien
cttcatccgcatactggagatggga

SEQ ID NO: 4786630 - DNA, 25 bp, Homo sapien
gaagcatgcttgtccttacagataa

SEQ ID NO: 4786631 - DNA, 25 bp, Homo sapien
tgacctggagcaggcaagaagcatg

SEQ ID NO: 4786632 - DNA, 25 bp, Homo sapien
taagtactttgtaagcctcatagag

SEQ ID NO: 4786633 - DNA, 25 bp, Homo sapien
agctgtgcagaagggattgttatac

SEQ ID NO: 4786634 - DNA, 25 bp, Homo sapien
cataaacaacctttaggaggcagac

SEQ ID NO: 4786635 - DNA, 25 bp, Homo sapien
tatacaatagcctgtagaaggtgct

SEQ ID NO: 4786636 - DNA, 25 bp, Homo sapien
tattgaatgactctgcgtgtgaaca

SEQ ID NO: 4786637 - DNA, 25 bp, Homo sapien
gaggcagacatagcttcggtttagc

SEQ ID NO: 4786638 - DNA, 25 bp, Homo sapien
cccacagctgataggtcccagagta

SEQ ID NO: 4786639 - DNA, 25 bp, Homo sapien
gctgggtttaatatctaggtgcaac

SEQ ID NO: 4786640 - DNA, 25 bp, Homo sapien
caggctagaaaaagttaatgtaggc

SEQ ID NO: 4786641 - DNA, 25 bp, Homo sapien
taatttagctattggcgtatgtcga

SEQ ID NO: 4786642 - DNA, 25 bp, Homo sapien
ttctcaccttgagtatgcaaaatac

SEQ ID NO: 4786643 - DNA, 25 bp, Homo sapien
ctcaccttgagtatgcaaaatacaa

SEQ ID NO: 4786644 - DNA, 25 bp, Homo sapien
tctcaccttgagtatgcaaaataca

SEQ ID NO: 4786645 - DNA, 25 bp, Homo sapien
tccttgtcaaagtatgcagcagttt

SEQ ID NO: 4786646 - DNA, 25 bp, Homo sapien
caggtatattacctgacttaggtca

SEQ ID NO: 4786647 - DNA, 25 bp, Homo sapien
cacagtgcataacagactgtctgca

SEQ ID NO: 4786648 - DNA, 25 bp, Homo sapien
tgttctgcttaaggcatacttggga

SEQ ID NO: 4786649 - DNA, 25 bp, Homo sapien
ttagaaccaagactcaccaagcacc

SEQ ID NO: 4786650 - DNA, 25 bp, Homo sapien
ccatcatttaggctatttaaacatg

SEQ ID NO: 4786651 - DNA, 25 bp, Homo sapien
accaagcaccatcatttaggctatt

SEQ ID NO: 4786652 - DNA, 25 bp, Homo sapien
ctttagaaccaagactcaccaagca

SEQ ID NO: 4786653 - DNA, 25 bp, Homo sapien
gactcagttgggaacttgaccatga

SEQ ID NO: 4786654 - DNA, 25 bp, Homo sapien
tgattgtagtgctttctggctgggc

SEQ ID NO: 4786655 - DNA, 25 bp, Homo sapien
gtaagtccaggaatattcaagtcgg

SEQ ID NO: 4786656 - DNA, 25 bp, Homo sapien
tgatagaagatccagtcacagaccc

SEQ ID NO: 4786657 - DNA, 25 bp, Homo sapien
aatgcctcttcatgtgtaaggcgag

SEQ ID NO: 4786658 - DNA, 25 bp, Homo sapien
tgcctcttcatgtgtaaggcgaggt

SEQ ID NO: 4786659 - DNA, 25 bp, Homo sapien
cttcatgtgtaaggcgaggtggtcc

SEQ ID NO: 4786660 - DNA, 25 bp, Homo sapien
cctcttcatgtgtaaggcgaggtgg

SEQ ID NO: 4786661 - DNA, 25 bp, Homo sapien
tcgcatttttggcactggaacgggc

SEQ ID NO: 4786662 - DNA, 25 bp, Homo sapien
tcagttcatctgagcgggcgaattt

SEQ ID NO: 4786663 - DNA, 25 bp, Homo sapien
tacggtagtgcctggtcagttcatc

SEQ ID NO: 4786664 - DNA, 25 bp, Homo sapien
tgagcgggcgaatttccatccacag

SEQ ID NO: 4786665 - DNA, 25 bp, Homo sapien
ggtgtattgaattccatatcataaa

SEQ ID NO: 4786666 - DNA, 25 bp, Homo sapien
tattgctatatcaaagaatcgcccc

SEQ ID NO: 4786667 - DNA, 25 bp, Homo sapien
aggaatgtctttataccactgaagg

SEQ ID NO: 4786668 - DNA, 25 bp, Homo sapien
ggccagatagtaaaccaactctgac

SEQ ID NO: 4786669 - DNA, 25 bp, Homo sapien
tataatgccaagctaggagaggccc

SEQ ID NO: 4786670 - DNA, 25 bp, Homo sapien
gatcaaggcgatagactgccctggg

SEQ ID NO: 4786671 - DNA, 25 bp, Homo sapien
catcaagcaaaaggctcctgggcag

SEQ ID NO: 4786672 - DNA, 25 bp, Homo sapien
taagaccgaattgttacgaccagaa

SEQ ID NO: 4786673 - DNA, 25 bp, Homo sapien
tgggttcgcaggtgtgccttgagat

SEQ ID NO: 4786674 - DNA, 25 bp, Homo sapien
tcctctggcatgcaggaaccgggtg

SEQ ID NO: 4786675 - DNA, 25 bp, Homo sapien
cgcagcccgcgtaatcacaagtgtg

SEQ ID NO: 4786676 - DNA, 25 bp, Homo sapien
gatcgtcttcccctctttggcttgg

SEQ ID NO: 4786677 - DNA, 25 bp, Homo sapien
cccgagctacaaatccccgggactg

SEQ ID NO: 4786678 - DNA, 25 bp, Homo sapien
gctccccagcccgagctacaaatcc

SEQ ID NO: 4786679 - DNA, 25 bp, Homo sapien
gaaggtggggtgagcatcatcccgt

SEQ ID NO: 4786680 - DNA, 25 bp, Homo sapien
gcatcatcccgtgtgtcccgaagtg

SEQ ID NO: 4786681 - DNA, 25 bp, Homo sapien
cgtcgttgatgtccgccaggttgaa

SEQ ID NO: 4786682 - DNA, 25 bp, Homo sapien
cccggatcggataggtgaagctgca

SEQ ID NO: 4786683 - DNA, 25 bp, Homo sapien
tttgctgacgctgatgaccgacggg

SEQ ID NO: 4786684 - DNA, 25 bp, Homo sapien
aagtcgcttcatgtgggagagctcc

SEQ ID NO: 4786685 - DNA, 25 bp, Homo sapien
atactgacgtgctggcgggccacgc

SEQ ID NO: 4786686 - DNA, 25 bp, Homo sapien
gactgcaccgcccagacatggggac

SEQ ID NO: 4786687 - DNA, 25 bp, Homo sapien
gggagagacctgtcagtggtggtcc

SEQ ID NO: 4786688 - DNA, 25 bp, Homo sapien
tgttgccacccgacatactgacgtg

SEQ ID NO: 4786689 - DNA, 25 bp, Homo sapien
gggcgccagcgctgcaatctcggcc

SEQ ID NO: 4786690 - DNA, 25 bp, Homo sapien
agggcgccagcgctgcaatctcggc

SEQ ID NO: 4786691 - DNA, 25 bp, Homo sapien
cagggcgccagcgctgcaatctcgg

SEQ ID NO: 4786692 - DNA, 25 bp, Homo sapien
tctgtattgcgggtgttatgtcctg

SEQ ID NO: 4786693 - DNA, 25 bp, Homo sapien
tcgaagaagaggtgatgcgtctgta

SEQ ID NO: 4786694 - DNA, 25 bp, Homo sapien
cggaattggcacaccgaggctctct

SEQ ID NO: 4786695 - DNA, 25 bp, Homo sapien
tatgtcctgtctgcccaattgcgtg

SEQ ID NO: 4786696 - DNA, 25 bp, Homo sapien
cccggcggcccggagcgatactcac

SEQ ID NO: 4786697 - DNA, 25 bp, Homo sapien
ttattcggggcacctgcttgacgca

SEQ ID NO: 4786698 - DNA, 25 bp, Homo sapien
ggccagacgcgaacgtggagaaaga

SEQ ID NO: 4786699 - DNA, 25 bp, Homo sapien
agaaagatgggagcagcgcgtcgct

SEQ ID NO: 4786700 - DNA, 25 bp, Homo sapien
acctgcttgacgcagtgtcttctcc

SEQ ID NO: 4786701 - DNA, 25 bp, Homo sapien
ttccggcgcgtcccaccggtcctca

SEQ ID NO: 4786702 - DNA, 25 bp, Homo sapien
tcggccgtcgttccggcgcgtccca

SEQ ID NO: 4786703 - DNA, 25 bp, Homo sapien
tccggcgcgtcccaccggtcctcac

SEQ ID NO: 4786704 - DNA, 25 bp, Homo sapien
cactgtcgcggtcgcctcgagtgct

SEQ ID NO: 4786705 - DNA, 25 bp, Homo sapien
tcagcaaggcgagtaagtaggtccg

SEQ ID NO: 4786706 - DNA, 25 bp, Homo sapien
cctgaaccccaaagtcaacgaagag

SEQ ID NO: 4786707 - DNA, 25 bp, Homo sapien
cccaaattggccgagatccttcttc

SEQ ID NO: 4786708 - DNA, 25 bp, Homo sapien
cttgccgcgctgtctgcgcgctgga

SEQ ID NO: 4786709 - DNA, 25 bp, Homo sapien
tgacctcgcacggttcctcgcgggc

SEQ ID NO: 4786710 - DNA, 25 bp, Homo sapien
gcgattatccgcgtgactcatccag

SEQ ID NO: 4786711 - DNA, 25 bp, Homo sapien
aggagtccgctctcgtcgctcagcg

SEQ ID NO: 4786712 - DNA, 25 bp, Homo sapien
cggcgaacgctggcgcttaggctgg

SEQ ID NO: 4786713 - DNA, 25 bp, Homo sapien
acgctggcgcttaggctggtgtcaa

SEQ ID NO: 4786714 - DNA, 25 bp, Homo sapien
cgctggcgcttaggctggtgtcaac

SEQ ID NO: 4786715 - DNA, 25 bp, Homo sapien
cgaacgctggcgcttaggctggtgt

SEQ ID NO: 4786716 - DNA, 25 bp, Homo sapien
ctgtttgaaccctgcgattctggta

SEQ ID NO: 4786717 - DNA, 25 bp, Homo sapien
caatgtcctttgtcgttgtcacctg

SEQ ID NO: 4786718 - DNA, 25 bp, Homo sapien
ccctttttgagttctagttgccaat

SEQ ID NO: 4786719 - DNA, 25 bp, Homo sapien
gcgattctggtacctattaggtttc

SEQ ID NO: 4786720 - DNA, 25 bp, Homo sapien
gccaacgccaggaatccctctaaga

SEQ ID NO: 4786721 - DNA, 25 bp, Homo sapien
ttggaatgcatctcgccccgaatga

SEQ ID NO: 4786722 - DNA, 25 bp, Homo sapien
tctaagatccagagtcggacgccct

SEQ ID NO: 4786723 - DNA, 25 bp, Homo sapien
gaatgaattgactcggccctccctg

SEQ ID NO: 4786724 - DNA, 25 bp, Homo sapien
ccctggatgaacagtggatgagccc

SEQ ID NO: 4786725 - DNA, 25 bp, Homo sapien
gtggatgagcccttgattggcagcc

SEQ ID NO: 4786726 - DNA, 25 bp, Homo sapien
ctcaccctggatgaacagtggatga

SEQ ID NO: 4786727 - DNA, 25 bp, Homo sapien
gatgaacagtggatgagcccttgat

SEQ ID NO: 4786728 - DNA, 25 bp, Homo sapien
tccctgaatacaggatgtgtatttt

SEQ ID NO: 4786729 - DNA, 25 bp, Homo sapien
cctgaatacaggatgtgtattttca

SEQ ID NO: 4786730 - DNA, 25 bp, Homo sapien
tctctcaaatccctgaatacaggat

SEQ ID NO: 4786731 - DNA, 25 bp, Homo sapien
caaatccctgaatacaggatgtgta

SEQ ID NO: 4786732 - DNA, 25 bp, Homo sapien
ggccaacatcgtgtttccactgtaa

SEQ ID NO: 4786733 - DNA, 25 bp, Homo sapien
gagagtgctccgtttaccattttga

SEQ ID NO: 4786734 - DNA, 25 bp, Homo sapien
tcagagagccctgcaagtgagagtg

SEQ ID NO: 4786735 - DNA, 25 bp, Homo sapien
tctccctttctggttggccaacatc

SEQ ID NO: 4786736 - DNA, 25 bp, Homo sapien
aacagccttaccacaattgccaatt

SEQ ID NO: 4786737 - DNA, 25 bp, Homo sapien
gtttttggcaacagccttaccacaa

SEQ ID NO: 4786738 - DNA, 25 bp, Homo sapien
tctgccctttcttgtgaaggccttt

SEQ ID NO: 4786739 - DNA, 25 bp, Homo sapien
acagagggacattgatagacacaat

SEQ ID NO: 4786740 - DNA, 25 bp, Homo sapien
cttatggcagtacccttgttgcggt

SEQ ID NO: 4786741 - DNA, 25 bp, Homo sapien
ccaagcccaccaggaacttatggca

SEQ ID NO: 4786742 - DNA, 25 bp, Homo sapien
gcccaccaggaacttatggcagtac

SEQ ID NO: 4786743 - DNA, 25 bp, Homo sapien
ccaggaacttatggcagtacccttg

SEQ ID NO: 4786744 - DNA, 25 bp, Homo sapien
ttgttaaatgcacactgccacttct

SEQ ID NO: 4786745 - DNA, 25 bp, Homo sapien
ctatgaggaatacactctgaatctt

SEQ ID NO: 4786746 - DNA, 25 bp, Homo sapien
tatgaggaatacactctgaatcttg

SEQ ID NO: 4786747 - DNA, 25 bp, Homo sapien
atgaggaatacactctgaatcttgt

SEQ ID NO: 4786748 - DNA, 25 bp, Homo sapien
ggcatccatgatatccatgctgtcc

SEQ ID NO: 4786749 - DNA, 25 bp, Homo sapien
gataccaggacctttgtgcttccgg

SEQ ID NO: 4786750 - DNA, 25 bp, Homo sapien
aagataccaggacctttgtgcttcc

SEQ ID NO: 4786751 - DNA, 25 bp, Homo sapien
agataccaggacctttgtgcttccg

SEQ ID NO: 4786752 - DNA, 25 bp, Homo sapien
ctggcaaatgggaggatctttcctc

SEQ ID NO: 4786753 - DNA, 25 bp, Homo sapien
catttgagcatctggcaaatgggag

SEQ ID NO: 4786754 - DNA, 25 bp, Homo sapien
ggcaaatgggaggatctttcctcat

SEQ ID NO: 4786755 - DNA, 25 bp, Homo sapien
accatttgagcatctggcaaatggg

SEQ ID NO: 4786756 - DNA, 25 bp, Homo sapien
tggtctggtcatcagagtgctctcc

SEQ ID NO: 4786757 - DNA, 25 bp, Homo sapien
ctacggatttgcaagccatgagcac

SEQ ID NO: 4786758 - DNA, 25 bp, Homo sapien
gcagcattggtctggtcatcagagt

SEQ ID NO: 4786759 - DNA, 25 bp, Homo sapien
ccagccctctggaagctacggattt

SEQ ID NO: 4786760 - DNA, 25 bp, Homo sapien
ctgtgcaggtctacttataggagga

SEQ ID NO: 4786761 - DNA, 25 bp, Homo sapien
attcaagttcctagtccccaaagag

SEQ ID NO: 4786762 - DNA, 25 bp, Homo sapien
gacatggactcactacatggtagct

SEQ ID NO: 4786763 - DNA, 25 bp, Homo sapien
tctgtgcgggtattactgaggatac

SEQ ID NO: 4786764 - DNA, 25 bp, Homo sapien
atcctacgtgctttgccggtggtca

SEQ ID NO: 4786765 - DNA, 25 bp, Homo sapien
tcaaggtcgtgtgggcatcttgtcc

SEQ ID NO: 4786766 - DNA, 25 bp, Homo sapien
cagtggtcgggcctggaatttcaag

SEQ ID NO: 4786767 - DNA, 25 bp, Homo sapien
gggtcacactggatgatcctacgtg

SEQ ID NO: 4786768 - DNA, 25 bp, Homo sapien
ccttggaaaggtaggatcacccatc

SEQ ID NO: 4786769 - DNA, 25 bp, Homo sapien
taagattggcttgagttttgcagca

SEQ ID NO: 4786770 - DNA, 25 bp, Homo sapien
tggacttgattgcactcagaagagc

SEQ ID NO: 4786771 - DNA, 25 bp, Homo sapien
taggatcacccatctggtggctggt

SEQ ID NO: 4786772 - DNA, 25 bp, Homo sapien
agggtcaccataatcccagctgatc

SEQ ID NO: 4786773 - DNA, 25 bp, Homo sapien
catcagggtcaccataatcccagct

SEQ ID NO: 4786774 - DNA, 25 bp, Homo sapien
ctgaaatgaaggtgcagcccacacc

SEQ ID NO: 4786775 - DNA, 25 bp, Homo sapien
tgaaatgaaggtgcagcccacacca

SEQ ID NO: 4786776 - DNA, 25 bp, Homo sapien
gaaatgaaggtgcagcccacaccac

SEQ ID NO: 4786777 - DNA, 25 bp, Homo sapien
cctgaaatgaaggtgcagcccacac

SEQ ID NO: 4786778 - DNA, 25 bp, Homo sapien
ttatggccgggcagcgcttccgtcc

SEQ ID NO: 4786779 - DNA, 25 bp, Homo sapien
cactggctgccgctgacagacggac

SEQ ID NO: 4786780 - DNA, 25 bp, Homo sapien
cggacgatggagagacaagggctct

SEQ ID NO: 4786781 - DNA, 25 bp, Homo sapien
ctggcaagccactggctgccgctga

SEQ ID NO: 4786782 - DNA, 25 bp, Homo sapien
tagaatagtgcagattgatggctgg

SEQ ID NO: 4786783 - DNA, 25 bp, Homo sapien
cctgaaggaagcttctagaatagtg

SEQ ID NO: 4786784 - DNA, 25 bp, Homo sapien
gaagcttctagaatagtgcagattg

SEQ ID NO: 4786785 - DNA, 25 bp, Homo sapien
tgggggcagatccagagtcagagcc

SEQ ID NO: 4786786 - DNA, 25 bp, Homo sapien
cctgcaagcaccagaggccagtctg

SEQ ID NO: 4786787 - DNA, 25 bp, Homo sapien
gtgtcttagctttagcacctgcaag

SEQ ID NO: 4786788 - DNA, 25 bp, Homo sapien
agccggtggtgttgctggcaggatc

SEQ ID NO: 4786789 - DNA, 25 bp, Homo sapien
agcaagagggatgcgtgtcttagct

SEQ ID NO: 4786790 - DNA, 25 bp, Homo sapien
taaccgtgttattggcctgcgcagg

SEQ ID NO: 4786791 - DNA, 25 bp, Homo sapien
gaaatgcctcgtccccagacaaaaa

SEQ ID NO: 4786792 - DNA, 25 bp, Homo sapien
tgcgcaggcctcttgccatcagtga

SEQ ID NO: 4786793 - DNA, 25 bp, Homo sapien
tcctctttatagagggagaacaaag

SEQ ID NO: 4786794 - DNA, 25 bp, Homo sapien
tcctgcatttaagcagacattctcc

SEQ ID NO: 4786795 - DNA, 25 bp, Homo sapien
ttcatcccgtttgccctttaagctg

SEQ ID NO: 4786796 - DNA, 25 bp, Homo sapien
ttgccctttaagctgggcccaggac

SEQ ID NO: 4786797 - DNA, 25 bp, Homo sapien
gttgcttggcacctcgttcttcatc

SEQ ID NO: 4786798 - DNA, 25 bp, Homo sapien
ctgctagcaagcatattctgttgct

SEQ ID NO: 4786799 - DNA, 25 bp, Homo sapien
tccgctgatcgttctctgttagagc

SEQ ID NO: 4786800 - DNA, 25 bp, Homo sapien
tctgttagagctctgctttacccat

SEQ ID NO: 4786801 - DNA, 25 bp, Homo sapien
agctctgctttacccatggtttggg

SEQ ID NO: 4786802 - DNA, 25 bp, Homo sapien
tgtcacaaatctccgctgatcgttc

SEQ ID NO: 4786803 - DNA, 25 bp, Homo sapien
ccttgggtcaactgccaataactga

SEQ ID NO: 4786804 - DNA, 25 bp, Homo sapien
cttgggtcaactgccaataactgag

SEQ ID NO: 4786805 - DNA, 25 bp, Homo sapien
gggcttgtgtgtcctgagccaagaa

SEQ ID NO: 4786806 - DNA, 25 bp, Homo sapien
cgaggacaggccagtcctaaaaggg

SEQ ID NO: 4786807 - DNA, 25 bp, Homo sapien
ggagtaggtgggagatgcctgtccc

SEQ ID NO: 4786808 - DNA, 25 bp, Homo sapien
tgagccaagaagcttgacttttgcc

SEQ ID NO: 4786809 - DNA, 25 bp, Homo sapien
gctacgacgtgagttcccttccagt

SEQ ID NO: 4786810 - DNA, 25 bp, Homo sapien
caaggctttcaaatcgggtgcgtga

SEQ ID NO: 4786811 - DNA, 25 bp, Homo sapien
ccacacacaattccaagatgagact

SEQ ID NO: 4786812 - DNA, 25 bp, Homo sapien
cctggatggagaatctgactccaac

SEQ ID NO: 4786813 - DNA, 25 bp, Homo sapien
tctgcagacaatgtttggactgaac

SEQ ID NO: 4786814 - DNA, 25 bp, Homo sapien
ggtgtctgaagaagcatccctttct

SEQ ID NO: 4786815 - DNA, 25 bp, Homo sapien
gggtgtctgaagaagcatccctttc

SEQ ID NO: 4786816 - DNA, 25 bp, Homo sapien
caatgtttggactgaacttcactct

SEQ ID NO: 4786817 - DNA, 25 bp, Homo sapien
gccaccggacttcagcagcagtcat

SEQ ID NO: 4786818 - DNA, 25 bp, Homo sapien
cttgcagccaccggacttcagcagc

SEQ ID NO: 4786819 - DNA, 25 bp, Homo sapien
cagccaccggacttcagcagcagtc

SEQ ID NO: 4786820 - DNA, 25 bp, Homo sapien
tgcagccaccggacttcagcagcag

SEQ ID NO: 4786821 - DNA, 25 bp, Homo sapien
tgccaacccagaagtcctcaatgtt

SEQ ID NO: 4786822 - DNA, 25 bp, Homo sapien
ccagaagtcctcaatgttggtcatg

SEQ ID NO: 4786823 - DNA, 25 bp, Homo sapien
ttcttgccaacccagaagtcctcaa

SEQ ID NO: 4786824 - DNA, 25 bp, Homo sapien
caacccagaagtcctcaatgttggt

SEQ ID NO: 4786825 - DNA, 25 bp, Homo sapien
tcagccgacaagaaacggggtgatg

SEQ ID NO: 4786826 - DNA, 25 bp, Homo sapien
taggaagccgggatttcgcttttgc

SEQ ID NO: 4786827 - DNA, 25 bp, Homo sapien
gctctcccgctgtcccgggtaggaa

SEQ ID NO: 4786828 - DNA, 25 bp, Homo sapien
ggccgctgcggaaaactcggctctc

SEQ ID NO: 4786829 - DNA, 25 bp, Homo sapien
ccagtgagcagggaggatcttgtac

SEQ ID NO: 4786830 - DNA, 25 bp, Homo sapien
agccagtgagcagggaggatcttgt

SEQ ID NO: 4786831 - DNA, 25 bp, Homo sapien
acagccagtgagcagggaggatctt

SEQ ID NO: 4786832 - DNA, 25 bp, Homo sapien
ctaacagccagtgagcagggaggat

SEQ ID NO: 4786833 - DNA, 25 bp, Homo sapien
cacatccagcaggaacttgcgtgtg

SEQ ID NO: 4786834 - DNA, 25 bp, Homo sapien
tgttcagtgacatcaaaagtgatgt

SEQ ID NO: 4786835 - DNA, 25 bp, Homo sapien
tgacatcaaaagtgatgtctgtcaa

SEQ ID NO: 4786836 - DNA, 25 bp, Homo sapien
cttgcgtgtgtcttaaagttggagg

SEQ ID NO: 4786837 - DNA, 25 bp, Homo sapien
tatgttgggctgctccatgtagtgt

SEQ ID NO: 4786838 - DNA, 25 bp, Homo sapien
tgggctgctccatgtagtgtagcat

SEQ ID NO: 4786839 - DNA, 25 bp, Homo sapien
caagggcatggctaggaggagggct

SEQ ID NO: 4786840 - DNA, 25 bp, Homo sapien
tcctggtatgttgggctgctccatg

SEQ ID NO: 4786841 - DNA, 25 bp, Homo sapien
acccacggcccatggcctgacgcct

SEQ ID NO: 4786842 - DNA, 25 bp, Homo sapien
ccacggcccatggcctgacgcctac

SEQ ID NO: 4786843 - DNA, 25 bp, Homo sapien
agacccacggcccatggcctgacgc

SEQ ID NO: 4786844 - DNA, 25 bp, Homo sapien
cagacccacggcccatggcctgacg

SEQ ID NO: 4786845 - DNA, 25 bp, Homo sapien
tgggtccctgtcagtaactgcggcg

SEQ ID NO: 4786846 - DNA, 25 bp, Homo sapien
cggcggcagcttcctggattgctga

SEQ ID NO: 4786847 - DNA, 25 bp, Homo sapien
gcggagaggacaccgatcaaggctt

SEQ ID NO: 4786848 - DNA, 25 bp, Homo sapien
ggacaccgatcaaggcttcatccca

SEQ ID NO: 4786849 - DNA, 25 bp, Homo sapien
ctgagcccacacaaagctacttcct

SEQ ID NO: 4786850 - DNA, 25 bp, Homo sapien
tgagcccacacaaagctacttcctg

SEQ ID NO: 4786851 - DNA, 25 bp, Homo sapien
tctgtggacttcattacagcctgtg

SEQ ID NO: 4786852 - DNA, 25 bp, Homo sapien
aatccaggtgtctctgcaggataaa

SEQ ID NO: 4786853 - DNA, 25 bp, Homo sapien
tcatcggtgcagactgcatgaggcc

SEQ ID NO: 4786854 - DNA, 25 bp, Homo sapien
cagccaacctctaatccaggtgtct

SEQ ID NO: 4786855 - DNA, 25 bp, Homo sapien
ataaatgtgctgctggagcaagcac

SEQ ID NO: 4786856 - DNA, 25 bp, Homo sapien
ttttaataaatgtgctgctggagca

SEQ ID NO: 4786857 - DNA, 25 bp, Homo sapien
ttaataaatgtgctgctggagcaag

SEQ ID NO: 4786858 - DNA, 25 bp, Homo sapien
taataaatgtgctgctggagcaagc

SEQ ID NO: 4786859 - DNA, 25 bp, Homo sapien
ccagcttcttcgagagcgcaggaga

SEQ ID NO: 4786860 - DNA, 25 bp, Homo sapien
gagaccttcagagtggcctcaggca

SEQ ID NO: 4786861 - DNA, 25 bp, Homo sapien
aaagcttctggacttatcccaaggg

SEQ ID NO: 4786862 - DNA, 25 bp, Homo sapien
aggattcgtcttcgccccagggtgt

SEQ ID NO: 4786863 - DNA, 25 bp, Homo sapien
tggtcaaagcagtctgtgctattcc

SEQ ID NO: 4786864 - DNA, 25 bp, Homo sapien
gttccaaggtgactgcgttaagtct

SEQ ID NO: 4786865 - DNA, 25 bp, Homo sapien
gactgcgttaagtctggtcaaagca

SEQ ID NO: 4786866 - DNA, 25 bp, Homo sapien
ctgtgctattcctgagttggcagaa

SEQ ID NO: 4786867 - DNA, 25 bp, Homo sapien
cagaccttccgcatgtctgcatctg

SEQ ID NO: 4786868 - DNA, 25 bp, Homo sapien
gagacagaccttccgcatgtctgca

SEQ ID NO: 4786869 - DNA, 25 bp, Homo sapien
agcgagagacagaccttccgcatgt

SEQ ID NO: 4786870 - DNA, 25 bp, Homo sapien
gagagacagaccttccgcatgtctg

SEQ ID NO: 4786871 - DNA, 25 bp, Homo sapien
caaggataatgaagcgcacagagct

SEQ ID NO: 4786872 - DNA, 25 bp, Homo sapien
gcacagagctctcgtggcctgtttc

SEQ ID NO: 4786873 - DNA, 25 bp, Homo sapien
tgcgtacttctggacccctaagcct

SEQ ID NO: 4786874 - DNA, 25 bp, Homo sapien
gggtctgagacaactgcgtacttct

SEQ ID NO: 4786875 - DNA, 25 bp, Homo sapien
gcaaaaagagcgaaattctctcaaa

SEQ ID NO: 4786876 - DNA, 25 bp, Homo sapien
tgggcaaaaagagcgaaattctctc

SEQ ID NO: 4786877 - DNA, 25 bp, Homo sapien
ggcaaaaagagcgaaattctctcaa

SEQ ID NO: 4786878 - DNA, 25 bp, Homo sapien
ctgggcaaaaagagcgaaattctct

SEQ ID NO: 4786879 - DNA, 25 bp, Homo sapien
ggttgctgagaacacccatcacatc

SEQ ID NO: 4786880 - DNA, 25 bp, Homo sapien
ttttttgtaagtgagcgctgcagtt

SEQ ID NO: 4786881 - DNA, 25 bp, Homo sapien
tgcagttgtcactcctcgagggttg

SEQ ID NO: 4786882 - DNA, 25 bp, Homo sapien
cactcctcgagggttgctgagaaca

SEQ ID NO: 4786883 - DNA, 25 bp, Homo sapien
ttggcagaaagttcggcagtaagtg

SEQ ID NO: 4786884 - DNA, 25 bp, Homo sapien
atgctgcagctgtccggagatcttt

SEQ ID NO: 4786885 - DNA, 25 bp, Homo sapien
agctgtccggagatctttgcctttg

SEQ ID NO: 4786886 - DNA, 25 bp, Homo sapien
cttggcagaaagttcggcagtaagt

SEQ ID NO: 4786887 - DNA, 25 bp, Homo sapien
gaattttgcctctaatgtgccttct

SEQ ID NO: 4786888 - DNA, 25 bp, Homo sapien
tgcctctaatgtgccttctaaagtg

SEQ ID NO: 4786889 - DNA, 25 bp, Homo sapien
gcctgtgtccactgcttgcaatgac

SEQ ID NO: 4786890 - DNA, 25 bp, Homo sapien
ctgtgtccactgcttgcaatgacaa

SEQ ID NO: 4786891 - DNA, 25 bp, Homo sapien
tttggcaaggtccttggcagcaatg

SEQ ID NO: 4786892 - DNA, 25 bp, Homo sapien
tattggacttctaaacggatttgtg

SEQ ID NO: 4786893 - DNA, 25 bp, Homo sapien
aatggctggattgaaatattggact

SEQ ID NO: 4786894 - DNA, 25 bp, Homo sapien
tttcaaactcaggtcctttggcaag

SEQ ID NO: 4786895 - DNA, 25 bp, Homo sapien
ctgattcttcaggctggttgaagcc

SEQ ID NO: 4786896 - DNA, 25 bp, Homo sapien
cctgagtgtcatgaacagatggcag

SEQ ID NO: 4786897 - DNA, 25 bp, Homo sapien
tggaggcccccataaacctgagtgt

SEQ ID NO: 4786898 - DNA, 25 bp, Homo sapien
cagtgccctaatggacccaaggctg

SEQ ID NO: 4786899 - DNA, 25 bp, Homo sapien
tagggccaggcattatgacagggaa

SEQ ID NO: 4786900 - DNA, 25 bp, Homo sapien
cagggaatccagttgttgttgtgca

SEQ ID NO: 4786901 - DNA, 25 bp, Homo sapien
gcaggaccccactattactcaggaa

SEQ ID NO: 4786902 - DNA, 25 bp, Homo sapien
aactgagttgtagcttgcaggaccc

SEQ ID NO: 4786903 - DNA, 25 bp, Homo sapien
agcttacccgttttctgctgttgtg

SEQ ID NO: 4786904 - DNA, 25 bp, Homo sapien
cttactggcagcttacccgttttct

SEQ ID NO: 4786905 - DNA, 25 bp, Homo sapien
tgtttcagggctgccaaatagttct

SEQ ID NO: 4786906 - DNA, 25 bp, Homo sapien
ggcagcttacccgttttctgctgtt

SEQ ID NO: 4786907 - DNA, 25 bp, Homo sapien
aagggcaggaactccttgttctgca

SEQ ID NO: 4786908 - DNA, 25 bp, Homo sapien
ttcaagggcaggaactccttgttct

SEQ ID NO: 4786909 - DNA, 25 bp, Homo sapien
ctgtgggtttcaagggcaggaactc

SEQ ID NO: 4786910 - DNA, 25 bp, Homo sapien
tgtgggtttcaagggcaggaactcc

SEQ ID NO: 4786911 - DNA, 25 bp, Homo sapien
cctgagctgaccacaagggtgtttg

SEQ ID NO: 4786912 - DNA, 25 bp, Homo sapien
gcccttctcagatggccgggctgct

SEQ ID NO: 4786913 - DNA, 25 bp, Homo sapien
tgctggctcttggtctgcctgaagg

SEQ ID NO: 4786914 - DNA, 25 bp, Homo sapien
cgattagggtccatgtgctcaggcc

SEQ ID NO: 4786915 - DNA, 25 bp, Homo sapien
cttcttctcgggtcctcagggcttt

SEQ ID NO: 4786916 - DNA, 25 bp, Homo sapien
tcttctcgggtcctcagggcttttc

SEQ ID NO: 4786917 - DNA, 25 bp, Homo sapien
gatcgacaggactgggtgtctgtag

SEQ ID NO: 4786918 - DNA, 25 bp, Homo sapien
agtaaggaagtaggatcgacaggac

SEQ ID NO: 4786919 - DNA, 25 bp, Homo sapien
taaggaagtaggatcgacaggactg

SEQ ID NO: 4786920 - DNA, 25 bp, Homo sapien
gatagtaaggaagtaggatcgacag

SEQ ID NO: 4786921 - DNA, 25 bp, Homo sapien
tggatgcagcccaaagcctgctctg

SEQ ID NO: 4786922 - DNA, 25 bp, Homo sapien
agaactctggatgcagcccaaagcc

SEQ ID NO: 4786923 - DNA, 25 bp, Homo sapien
agatgaacagggcttcttcctgaga

SEQ ID NO: 4786924 - DNA, 25 bp, Homo sapien
tgcaggccaatgaggcccagaagat

SEQ ID NO: 4786925 - DNA, 25 bp, Homo sapien
gggcaccagcgatatctgccgggaa

SEQ ID NO: 4786926 - DNA, 25 bp, Homo sapien
caccagcgatatctgccgggaaata

SEQ ID NO: 4786927 - DNA, 25 bp, Homo sapien
ccagcgatatctgccgggaaatatc

SEQ ID NO: 4786928 - DNA, 25 bp, Homo sapien
gcaccagcgatatctgccgggaaat

SEQ ID NO: 4786929 - DNA, 25 bp, Homo sapien
taggccaggaatatgacggaaaggc

SEQ ID NO: 4786930 - DNA, 25 bp, Homo sapien
ggccaggaatatgacggaaaggccc

SEQ ID NO: 4786931 - DNA, 25 bp, Homo sapien
ggcataggccaggaatatgacggaa

SEQ ID NO: 4786932 - DNA, 25 bp, Homo sapien
gtggcaggcataggccaggaatatg

SEQ ID NO: 4786933 - DNA, 25 bp, Homo sapien
gagctgtctgactcgaagctgcttg

SEQ ID NO: 4786934 - DNA, 25 bp, Homo sapien
gatggatgaattaatccaaccaatt

SEQ ID NO: 4786935 - DNA, 25 bp, Homo sapien
ccttgtgtgcccttggtgatggatg

SEQ ID NO: 4786936 - DNA, 25 bp, Homo sapien
aattctccgtggctcccttgtgtgc

SEQ ID NO: 4786937 - DNA, 25 bp, Homo sapien
atgatgctggcgcagaaggccctga

SEQ ID NO: 4786938 - DNA, 25 bp, Homo sapien
gctgctgctcccatattctgggtgc

SEQ ID NO: 4786939 - DNA, 25 bp, Homo sapien
tgcctgtccatgatgctggcgcaga

SEQ ID NO: 4786940 - DNA, 25 bp, Homo sapien
aattctatgtctggagtggaagagg

SEQ ID NO: 4786941 - DNA, 25 bp, Homo sapien
cattcactgcgcatgtttcacaatt

SEQ ID NO: 4786942 - DNA, 25 bp, Homo sapien
aggccacacactgaggcgttgctat

SEQ ID NO: 4786943 - DNA, 25 bp, Homo sapien
gatgacacattcactgcgcatgttt

SEQ ID NO: 4786944 - DNA, 25 bp, Homo sapien
acttcgctgtccacctaaggccaca

SEQ ID NO: 4786945 - DNA, 25 bp, Homo sapien
gactttggactagtcctggcagctg

SEQ ID NO: 4786946 - DNA, 25 bp, Homo sapien
tgattcacttgtcactgcgcttggg

SEQ ID NO: 4786947 - DNA, 25 bp, Homo sapien
taagcgttcgttgaggtgattcact

SEQ ID NO: 4786948 - DNA, 25 bp, Homo sapien
aagttattttcatcggcttctgacc

SEQ ID NO: 4786949 - DNA, 25 bp, Homo sapien
tggaggagtcctccatgaatacctg

SEQ ID NO: 4786950 - DNA, 25 bp, Homo sapien
gaggagtcctccatgaatacctgtt

SEQ ID NO: 4786951 - DNA, 25 bp, Homo sapien
gagtcctccatgaatacctgttctt

SEQ ID NO: 4786952 - DNA, 25 bp, Homo sapien
ctccatgaatacctgttctttccaa

SEQ ID NO: 4786953 - DNA, 25 bp, Homo sapien
ttttctgcccttgaactaaaggcca

SEQ ID NO: 4786954 - DNA, 25 bp, Homo sapien
ttttcaacatggcagccagaatctg

SEQ ID NO: 4786955 - DNA, 25 bp, Homo sapien
ggtactgtgtccattcttgcctaag

SEQ ID NO: 4786956 - DNA, 25 bp, Homo sapien
cccctttcagcgtcattgtggatgc

SEQ ID NO: 4786957 - DNA, 25 bp, Homo sapien
ttatataatatggtgtgactggcag

SEQ ID NO: 4786958 - DNA, 25 bp, Homo sapien
tataatatggtgtgactggcagtat

SEQ ID NO: 4786959 - DNA, 25 bp, Homo sapien
tatataatatggtgtgactggcagt

SEQ ID NO: 4786960 - DNA, 25 bp, Homo sapien
taatatggtgtgactggcagtataa

SEQ ID NO: 4786961 - DNA, 25 bp, Homo sapien
cccaaagggcctagtattagtcagc

SEQ ID NO: 4786962 - DNA, 25 bp, Homo sapien
cctgatgatatagaagcggacattc

SEQ ID NO: 4786963 - DNA, 25 bp, Homo sapien
aaggcaatgcacaggtagagtctcc

SEQ ID NO: 4786964 - DNA, 25 bp, Homo sapien
gacattctgcctgacctagttgtgt

SEQ ID NO: 4786965 - DNA, 25 bp, Homo sapien
atgaatttgcatgtcttccctgggc

SEQ ID NO: 4786966 - DNA, 25 bp, Homo sapien
ctgggcagggaccaggctaatttct

SEQ ID NO: 4786967 - DNA, 25 bp, Homo sapien
cttccctgggcagggaccaggctaa

SEQ ID NO: 4786968 - DNA, 25 bp, Homo sapien
tccctgggcagggaccaggctaatt

SEQ ID NO: 4786969 - DNA, 25 bp, Homo sapien
cggtgagctggatctaagtacagca

SEQ ID NO: 4786970 - DNA, 25 bp, Homo sapien
tccacttgagtacaaggttgtctcc

SEQ ID NO: 4786971 - DNA, 25 bp, Homo sapien
tctaaagttgtactcggtgagctgg

SEQ ID NO: 4786972 - DNA, 25 bp, Homo sapien
ctccagtgtcataggtgccctctaa

SEQ ID NO: 4786973 - DNA, 25 bp, Homo sapien
ctgatctgggcccatttgcccctcc

SEQ ID NO: 4786974 - DNA, 25 bp, Homo sapien
ggcaacctgtgatgccccactccca

SEQ ID NO: 4786975 - DNA, 25 bp, Homo sapien
gcacttcatgggcacagcacactac

SEQ ID NO: 4786976 - DNA, 25 bp, Homo sapien
aggcaacctgtgatgccccactccc

SEQ ID NO: 4786977 - DNA, 25 bp, Homo sapien
gagcatgtctccactgattccctgg

SEQ ID NO: 4786978 - DNA, 25 bp, Homo sapien
gagtgtcagttgcagagcatgtctc

SEQ ID NO: 4786979 - DNA, 25 bp, Homo sapien
catggaccaagaaggtggcaggtcc

SEQ ID NO: 4786980 - DNA, 25 bp, Homo sapien
tgtcagttgcagagcatgtctccac

SEQ ID NO: 4786981 - DNA, 25 bp, Homo sapien
ttgttgctgccagagttttgagctg

SEQ ID NO: 4786982 - DNA, 25 bp, Homo sapien
ggacaaaagtcattctgtggccctg

SEQ ID NO: 4786983 - DNA, 25 bp, Homo sapien
caaacaaccactagggaggctttgt

SEQ ID NO: 4786984 - DNA, 25 bp, Homo sapien
gctcggagccttgtgtaggacaaaa

SEQ ID NO: 4786985 - DNA, 25 bp, Homo sapien
tttggagggaagtgttgacatcttg

SEQ ID NO: 4786986 - DNA, 25 bp, Homo sapien
ctttggagggaagtgttgacatctt

SEQ ID NO: 4786987 - DNA, 25 bp, Homo sapien
tcaagatccccctgtctctggggta

SEQ ID NO: 4786988 - DNA, 25 bp, Homo sapien
caagatccccctgtctctggggtac

SEQ ID NO: 4786989 - DNA, 25 bp, Homo sapien
tccatcttcccgcattcccactgcc

SEQ ID NO: 4786990 - DNA, 25 bp, Homo sapien
acctttcctgacatccttatcccag

SEQ ID NO: 4786991 - DNA, 25 bp, Homo sapien
catccttatcccagtgggcaggggt

SEQ ID NO: 4786992 - DNA, 25 bp, Homo sapien
cctgacatccttatcccagtgggca

SEQ ID NO: 4786993 - DNA, 25 bp, Homo sapien
tccagccatccctgcagtttggcta

SEQ ID NO: 4786994 - DNA, 25 bp, Homo sapien
ggagagcctgaggatgtgacttccc

SEQ ID NO: 4786995 - DNA, 25 bp, Homo sapien
atcggagagcctgaggatgtgactt

SEQ ID NO: 4786996 - DNA, 25 bp, Homo sapien
ccctccagccatccctgcagtttgg

SEQ ID NO: 4786997 - DNA, 25 bp, Homo sapien
aaatgtggtgtgagggcagtataga

SEQ ID NO: 4786998 - DNA, 25 bp, Homo sapien
gaaatgtggtgtgagggcagtatag

SEQ ID NO: 4786999 - DNA, 25 bp, Homo sapien
aatgtggtgtgagggcagtatagag

SEQ ID NO: 4787000 - DNA, 25 bp, Homo sapien
atgtggtgtgagggcagtatagaga

SEQ ID NO: 4787001 - DNA, 25 bp, Homo sapien
gtctgctccataggggaatgaacaa

SEQ ID NO: 4787002 - DNA, 25 bp, Homo sapien
ctgaggacctgcagagtctgctcca

SEQ ID NO: 4787003 - DNA, 25 bp, Homo sapien
ggaatgaacaaatgattgcatccat

SEQ ID NO: 4787004 - DNA, 25 bp, Homo sapien
cagagtctgctccataggggaatga

SEQ ID NO: 4787005 - DNA, 25 bp, Homo sapien
ggctgtatagggcagggctaatggc

SEQ ID NO: 4787006 - DNA, 25 bp, Homo sapien
ctgtatagggcagggctaatggcag

SEQ ID NO: 4787007 - DNA, 25 bp, Homo sapien
gtatagggcagggctaatggcagtg

SEQ ID NO: 4787008 - DNA, 25 bp, Homo sapien
taagacactgggccgtaagcactgt

SEQ ID NO: 4787009 - DNA, 25 bp, Homo sapien
gaaccggatcgcttggccctttgtc

SEQ ID NO: 4787010 - DNA, 25 bp, Homo sapien
agaaccggatcgcttggccctttgt

SEQ ID NO: 4787011 - DNA, 25 bp, Homo sapien
tagaaccggatcgcttggccctttg

SEQ ID NO: 4787012 - DNA, 25 bp, Homo sapien
tctgcccgcaatagccacttggctt

SEQ ID NO: 4787013 - DNA, 25 bp, Homo sapien
ggcttcctattatagcacttctttc

SEQ ID NO: 4787014 - DNA, 25 bp, Homo sapien
ggccagcacttttgtagatctgcag

SEQ ID NO: 4787015 - DNA, 25 bp, Homo sapien
tcagtctgcccgcaatagccacttg

SEQ ID NO: 4787016 - DNA, 25 bp, Homo sapien
ggcctgctgaccttgtatccctgga

SEQ ID NO: 4787017 - DNA, 25 bp, Homo sapien
gatgaaggcagcacataacctgtgt

SEQ ID NO: 4787018 - DNA, 25 bp, Homo sapien
tcacccatgcttgctgatttccaag

SEQ ID NO: 4787019 - DNA, 25 bp, Homo sapien
tcttcctgaaagaacataggcactt

SEQ ID NO: 4787020 - DNA, 25 bp, Homo sapien
tatgtgggttttcactgaaggcttc

SEQ ID NO: 4787021 - DNA, 25 bp, Homo sapien
cccaacacagggtccgacactatgt

SEQ ID NO: 4787022 - DNA, 25 bp, Homo sapien
aacacagggtccgacactatgtggg

SEQ ID NO: 4787023 - DNA, 25 bp, Homo sapien
cagggtccgacactatgtgggtttt

SEQ ID NO: 4787024 - DNA, 25 bp, Homo sapien
ggaagggcatctgggtagagataac

SEQ ID NO: 4787025 - DNA, 25 bp, Homo sapien
gaagggcatctgggtagagataaca

SEQ ID NO: 4787026 - DNA, 25 bp, Homo sapien
agggcatctgggtagagataacagc

SEQ ID NO: 4787027 - DNA, 25 bp, Homo sapien
aagggcatctgggtagagataacag

SEQ ID NO: 4787028 - DNA, 25 bp, Homo sapien
gaagagcaggatatgtcagcacctg

SEQ ID NO: 4787029 - DNA, 25 bp, Homo sapien
agcacctgcttgctgggaagcacca

SEQ ID NO: 4787030 - DNA, 25 bp, Homo sapien
tgcttggtaattctcgatgtcctta

SEQ ID NO: 4787031 - DNA, 25 bp, Homo sapien
cacctgaagagcaggatatgtcagc

SEQ ID NO: 4787032 - DNA, 25 bp, Homo sapien
cctttttgagtggaaagccgcctgg

SEQ ID NO: 4787033 - DNA, 25 bp, Homo sapien
tttttgagtggaaagccgcctggtc

SEQ ID NO: 4787034 - DNA, 25 bp, Homo sapien
tttgagtggaaagccgcctggtcat

SEQ ID NO: 4787035 - DNA, 25 bp, Homo sapien
ccctttttgagtggaaagccgcctg

SEQ ID NO: 4787036 - DNA, 25 bp, Homo sapien
ggaagcacaaaagagatgccctgca

SEQ ID NO: 4787037 - DNA, 25 bp, Homo sapien
aggaagcacaaaagagatgccctgc

SEQ ID NO: 4787038 - DNA, 25 bp, Homo sapien
gaagcacaaaagagatgccctgcag

SEQ ID NO: 4787039 - DNA, 25 bp, Homo sapien
gaaagtgttcctcctgcatttgtgg

SEQ ID NO: 4787040 - DNA, 25 bp, Homo sapien
tcagtgaagaaagtgttcctcctgc

SEQ ID NO: 4787041 - DNA, 25 bp, Homo sapien
gcttctcaaccagtgattgcatgtg

SEQ ID NO: 4787042 - DNA, 25 bp, Homo sapien
gcatttgtggctaaactcccctcag

SEQ ID NO: 4787043 - DNA, 25 bp, Homo sapien
aatcactggtgaatctgggcactgc

SEQ ID NO: 4787044 - DNA, 25 bp, Homo sapien
atgcatcctgcatagaatcactggt

SEQ ID NO: 4787045 - DNA, 25 bp, Homo sapien
gctcctgacattttgtcagatgtct

SEQ ID NO: 4787046 - DNA, 25 bp, Homo sapien
aatagcatgcatcctgcatagaatc

SEQ ID NO: 4787047 - DNA, 25 bp, Homo sapien
aacagttcattcatccgaacatagg

SEQ ID NO: 4787048 - DNA, 25 bp, Homo sapien
taaagatccatctggtcatagggct

SEQ ID NO: 4787049 - DNA, 25 bp, Homo sapien
gctttattgagctgatttctaagag

SEQ ID NO: 4787050 - DNA, 25 bp, Homo sapien
tacaagacctctggtgtaaagatcc

SEQ ID NO: 4787051 - DNA, 25 bp, Homo sapien
ctttccaaatgtgggtatgccccac

SEQ ID NO: 4787052 - DNA, 25 bp, Homo sapien
ctaggctttccaaatgtgggtatgc

SEQ ID NO: 4787053 - DNA, 25 bp, Homo sapien
ggctttccaaatgtgggtatgcccc

SEQ ID NO: 4787054 - DNA, 25 bp, Homo sapien
taggctttccaaatgtgggtatgcc

SEQ ID NO: 4787055 - DNA, 25 bp, Homo sapien
cccacactgtagcctccaaagtcca

SEQ ID NO: 4787056 - DNA, 25 bp, Homo sapien
cacactgtagcctccaaagtccaaa

SEQ ID NO: 4787057 - DNA, 25 bp, Homo sapien
ccacactgtagcctccaaagtccaa

SEQ ID NO: 4787058 - DNA, 25 bp, Homo sapien
ctacatatagcttggaatttgcggc

SEQ ID NO: 4787059 - DNA, 25 bp, Homo sapien
cacgccactcgctgtcatttttgga

SEQ ID NO: 4787060 - DNA, 25 bp, Homo sapien
ttttgggacaaacagccactctatg

SEQ ID NO: 4787061 - DNA, 25 bp, Homo sapien
caaaaatgactggtcacataacggt

SEQ ID NO: 4787062 - DNA, 25 bp, Homo sapien
tcattatctcaatttaagcccttta

SEQ ID NO: 4787063 - DNA, 25 bp, Homo sapien
caactggaggtagtttcagaaccac

SEQ ID NO: 4787064 - DNA, 25 bp, Homo sapien
taagccctttagtaattctctcaaa

SEQ ID NO: 4787065 - DNA, 25 bp, Homo sapien
ctctggaatcaaagagtttgttgat

SEQ ID NO: 4787066 - DNA, 25 bp, Homo sapien
cacttagggcacttagagcagtttt

SEQ ID NO: 4787067 - DNA, 25 bp, Homo sapien
gagcagttttctcagctaagtggct

SEQ ID NO: 4787068 - DNA, 25 bp, Homo sapien
tgaatgtgacacactttgtgcaggg

SEQ ID NO: 4787069 - DNA, 25 bp, Homo sapien
gccattgcctcttggctacacttag

SEQ ID NO: 4787070 - DNA, 25 bp, Homo sapien
ctcccacatctccacttagctgcat

SEQ ID NO: 4787071 - DNA, 25 bp, Homo sapien
tctcccacatctccacttagctgca

SEQ ID NO: 4787072 - DNA, 25 bp, Homo sapien
cgaacccttccaaactctcccacat

SEQ ID NO: 4787073 - DNA, 25 bp, Homo sapien
aactctcccacatctccacttagct

SEQ ID NO: 4787074 - DNA, 25 bp, Homo sapien
tccagcatagaaagctcctatggcc

SEQ ID NO: 4787075 - DNA, 25 bp, Homo sapien
atagaaagctcctatggcctcctct

SEQ ID NO: 4787076 - DNA, 25 bp, Homo sapien
gggagcatcccctcgaatgctcgag

SEQ ID NO: 4787077 - DNA, 25 bp, Homo sapien
tcgaatgctcgagctacagctggca

SEQ ID NO: 4787078 - DNA, 25 bp, Homo sapien
gcagttcttaagaccttccaaccca

SEQ ID NO: 4787079 - DNA, 25 bp, Homo sapien
ccatttgaggtacctgcagtgcagg

SEQ ID NO: 4787080 - DNA, 25 bp, Homo sapien
caggagcctccttatacccttctta

SEQ ID NO: 4787081 - DNA, 25 bp, Homo sapien
tcagcctcggagatgaatgtagcag

SEQ ID NO: 4787082 - DNA, 25 bp, Homo sapien
tctgaaggtgctttatgaatttcca

SEQ ID NO: 4787083 - DNA, 25 bp, Homo sapien
gtagtctccaggacttagttcctga

SEQ ID NO: 4787084 - DNA, 25 bp, Homo sapien
gctcagtccagtgtagtctccagga

SEQ ID NO: 4787085 - DNA, 25 bp, Homo sapien
ccaggacttagttcctgaatctgga

SEQ ID NO: 4787086 - DNA, 25 bp, Homo sapien
caagctcagtccagtgtagtctcca

SEQ ID NO: 4787087 - DNA, 25 bp, Homo sapien
tgtgtagtgatgacaaaacttgccc

SEQ ID NO: 4787088 - DNA, 25 bp, Homo sapien
tcagcaggtgggctactagaacgtt

SEQ ID NO: 4787089 - DNA, 25 bp, Homo sapien
tctgcaatttcaggcgaagtcagct

SEQ ID NO: 4787090 - DNA, 25 bp, Homo sapien
ttcctgcatgttagaggcccaggaa

SEQ ID NO: 4787091 - DNA, 25 bp, Homo sapien
cctagcaacggattctcaggaatgt

SEQ ID NO: 4787092 - DNA, 25 bp, Homo sapien
gcaacggattctcaggaatgtgata

SEQ ID NO: 4787093 - DNA, 25 bp, Homo sapien
gcttctagaagtgttcctagcaacg

SEQ ID NO: 4787094 - DNA, 25 bp, Homo sapien
gaagtgttcctagcaacggattctc

SEQ ID NO: 4787095 - DNA, 25 bp, Homo sapien
tgaggaagcatcacaaaacctggga

SEQ ID NO: 4787096 - DNA, 25 bp, Homo sapien
agcaatcatccagaatccccatgta

SEQ ID NO: 4787097 - DNA, 25 bp, Homo sapien
acttcataatctccacaaaccagca

SEQ ID NO: 4787098 - DNA, 25 bp, Homo sapien
gccaattacttttgggtcgtagagc

SEQ ID NO: 4787099 - DNA, 25 bp, Homo sapien
tcctgctgtgtccagtgagtcaagc

SEQ ID NO: 4787100 - DNA, 25 bp, Homo sapien
ggcagcagagcccaatcaaaggcag

SEQ ID NO: 4787101 - DNA, 25 bp, Homo sapien
agagcccaatcaaaggcagttgctg

SEQ ID NO: 4787102 - DNA, 25 bp, Homo sapien
gctgtgggccgtggcaggcttggcc

SEQ ID NO: 4787103 - DNA, 25 bp, Homo sapien
actgatgggatttgagggagaagtt

SEQ ID NO: 4787104 - DNA, 25 bp, Homo sapien
gtgaaagcctcaccccatacgatgg

SEQ ID NO: 4787105 - DNA, 25 bp, Homo sapien
tatcttcttcccttatggtgaaagc

SEQ ID NO: 4787106 - DNA, 25 bp, Homo sapien
accccatacgatggccagttgtgtg

SEQ ID NO: 4787107 - DNA, 25 bp, Homo sapien
cttttgaagcagctatggtgggatc

SEQ ID NO: 4787108 - DNA, 25 bp, Homo sapien
ttttgaagcagctatggtgggatca

SEQ ID NO: 4787109 - DNA, 25 bp, Homo sapien
tgaagcagctatggtgggatcaggg

SEQ ID NO: 4787110 - DNA, 25 bp, Homo sapien
tttgaagcagctatggtgggatcag

SEQ ID NO: 4787111 - DNA, 25 bp, Homo sapien
agcaggggggcctcaatagcaaagc

SEQ ID NO: 4787112 - DNA, 25 bp, Homo sapien
tgagtgaacccggttcaacttctcg

SEQ ID NO: 4787113 - DNA, 25 bp, Homo sapien
ttcccactctgagtgaacccggttc

SEQ ID NO: 4787114 - DNA, 25 bp, Homo sapien
tcacaacagcaatccttctcagttc

SEQ ID NO: 4787115 - DNA, 25 bp, Homo sapien
ctaacagagattttaatcgaaatga

SEQ ID NO: 4787116 - DNA, 25 bp, Homo sapien
gattttaatcgaaatgaactgacag

SEQ ID NO: 4787117 - DNA, 25 bp, Homo sapien
gagattttaatcgaaatgaactgac

SEQ ID NO: 4787118 - DNA, 25 bp, Homo sapien
cagagattttaatcgaaatgaactg

SEQ ID NO: 4787119 - DNA, 25 bp, Homo sapien
tctggcctcccttcttgacacttcc

SEQ ID NO: 4787120 - DNA, 25 bp, Homo sapien
gctctgtgagtgtttgcccagggtt

SEQ ID NO: 4787121 - DNA, 25 bp, Homo sapien
aaaggctttcccctcggcagactct

SEQ ID NO: 4787122 - DNA, 25 bp, Homo sapien
tattggcgatgtcattgggtgtcag

SEQ ID NO: 4787123 - DNA, 25 bp, Homo sapien
tttgcaagtgagtggacggcggaca

SEQ ID NO: 4787124 - DNA, 25 bp, Homo sapien
tggacggcggacaaggaggatgtcg

SEQ ID NO: 4787125 - DNA, 25 bp, Homo sapien
gacaaggaggatgtcgagtccacat

SEQ ID NO: 4787126 - DNA, 25 bp, Homo sapien
cttcattgacaccagtttgcaagtg

SEQ ID NO: 4787127 - DNA, 25 bp, Homo sapien
cagggtttgccttggcaggtatgtt

SEQ ID NO: 4787128 - DNA, 25 bp, Homo sapien
tgccttggcaggtatgttgatcttg

SEQ ID NO: 4787129 - DNA, 25 bp, Homo sapien
gtttgccttggcaggtatgttgatc

SEQ ID NO: 4787130 - DNA, 25 bp, Homo sapien
ccttggcaggtatgttgatcttgat

SEQ ID NO: 4787131 - DNA, 25 bp, Homo sapien
tgagcgtaaagcttccagagcagtg

SEQ ID NO: 4787132 - DNA, 25 bp, Homo sapien
caaggcccaggagctattgtgatgc

SEQ ID NO: 4787133 - DNA, 25 bp, Homo sapien
tgtgatgcactgagcgtaaagcttc

SEQ ID NO: 4787134 - DNA, 25 bp, Homo sapien
gcagtgagtaggtgaaaaggagaac

SEQ ID NO: 4787135 - DNA, 25 bp, Homo sapien
cagattccagtgtggtgagcccagg

SEQ ID NO: 4787136 - DNA, 25 bp, Homo sapien
ctccccagctggatgcagagcttct

SEQ ID NO: 4787137 - DNA, 25 bp, Homo sapien
aggtgctcagtagtaaacagattcc

SEQ ID NO: 4787138 - DNA, 25 bp, Homo sapien
tctctttgtctttgggagcaggata

SEQ ID NO: 4787139 - DNA, 25 bp, Homo sapien
tgagaaggacggcactcatactgca

SEQ ID NO: 4787140 - DNA, 25 bp, Homo sapien
tcatctgaagtatgagaaggacggc

SEQ ID NO: 4787141 - DNA, 25 bp, Homo sapien
gaaggacggcactcatactgcagcc

SEQ ID NO: 4787142 - DNA, 25 bp, Homo sapien
tctgaagtatgagaaggacggcact

SEQ ID NO: 4787143 - DNA, 25 bp, Homo sapien
gcatctgctttcagtttcttgatcc

SEQ ID NO: 4787144 - DNA, 25 bp, Homo sapien
tctttccatgcttttgtgcagccat

SEQ ID NO: 4787145 - DNA, 25 bp, Homo sapien
tgatccagctgagatactttgtctt

SEQ ID NO: 4787146 - DNA, 25 bp, Homo sapien
agtttcttgatccagctgagatact

SEQ ID NO: 4787147 - DNA, 25 bp, Homo sapien
tcagtgctttaagaccaggagccat

SEQ ID NO: 4787148 - DNA, 25 bp, Homo sapien
cctacaccaggtcagtgctttaaga

SEQ ID NO: 4787149 - DNA, 25 bp, Homo sapien
tcctacaccaggtcagtgctttaag

SEQ ID NO: 4787150 - DNA, 25 bp, Homo sapien
cctcctacaccaggtcagtgcttta

SEQ ID NO: 4787151 - DNA, 25 bp, Homo sapien
caatgaagcagtgaccggagaatac

SEQ ID NO: 4787152 - DNA, 25 bp, Homo sapien
gatactaggttcaacagacctgtct

SEQ ID NO: 4787153 - DNA, 25 bp, Homo sapien
cactttccaacttgggcctggcaga

SEQ ID NO: 4787154 - DNA, 25 bp, Homo sapien
acagtatctatgtgcagttgtccag

SEQ ID NO: 4787155 - DNA, 25 bp, Homo sapien
agacagtgatggacaggcagactct

SEQ ID NO: 4787156 - DNA, 25 bp, Homo sapien
gagcatgtcatccatcattgaagcc

SEQ ID NO: 4787157 - DNA, 25 bp, Homo sapien
gaaagtggagctgagtcttgagcac

SEQ ID NO: 4787158 - DNA, 25 bp, Homo sapien
tcatcctcgggggacagacagtgat

SEQ ID NO: 4787159 - DNA, 25 bp, Homo sapien
cacccatttcgaaaattcagttttg

SEQ ID NO: 4787160 - DNA, 25 bp, Homo sapien
caaaaggaaatctgctttattaagg

SEQ ID NO: 4787161 - DNA, 25 bp, Homo sapien
ccaaagcccttgctgttgaatagca

SEQ ID NO: 4787162 - DNA, 25 bp, Homo sapien
gggctcttcgcttcctgtgggcaaa

SEQ ID NO: 4787163 - DNA, 25 bp, Homo sapien
gcattgtgccactatgtctttccac

SEQ ID NO: 4787164 - DNA, 25 bp, Homo sapien
gaaaccgtatatgctactttctctt

SEQ ID NO: 4787165 - DNA, 25 bp, Homo sapien
ttaccctctggcagaatttagatgt

SEQ ID NO: 4787166 - DNA, 25 bp, Homo sapien
ttccaccacaccgaaaccgtatatg

SEQ ID NO: 4787167 - DNA, 25 bp, Homo sapien
gaaaacagcaaagccggtgcgtctt

SEQ ID NO: 4787168 - DNA, 25 bp, Homo sapien
gccggtgcgtctttgaagtccttct

SEQ ID NO: 4787169 - DNA, 25 bp, Homo sapien
aaagccggtgcgtctttgaagtcct

SEQ ID NO: 4787170 - DNA, 25 bp, Homo sapien
cagcaaagccggtgcgtctttgaag

SEQ ID NO: 4787171 - DNA, 25 bp, Homo sapien
gctgaggtgagggttaatgattcca

SEQ ID NO: 4787172 - DNA, 25 bp, Homo sapien
gaatttagctgaggtgagggttaat

SEQ ID NO: 4787173 - DNA, 25 bp, Homo sapien
ttctcttttagcaggaatttagctg

SEQ ID NO: 4787174 - DNA, 25 bp, Homo sapien
ttagcaggaatttagctgaggtgag

SEQ ID NO: 4787175 - DNA, 25 bp, Homo sapien
taacaattacagatacgacccaaat

SEQ ID NO: 4787176 - DNA, 25 bp, Homo sapien
gggcatattaactccttgacatcaa

SEQ ID NO: 4787177 - DNA, 25 bp, Homo sapien
cagatacgacccaaatgcggtcaca

SEQ ID NO: 4787178 - DNA, 25 bp, Homo sapien
ggtcacatggggtagctttgtctga

SEQ ID NO: 4787179 - DNA, 25 bp, Homo sapien
caagaggcgagtaagtcagagagca

SEQ ID NO: 4787180 - DNA, 25 bp, Homo sapien
ggacacaagaggcgagtaagtcaga

SEQ ID NO: 4787181 - DNA, 25 bp, Homo sapien
cacaagaggcgagtaagtcagagag

SEQ ID NO: 4787182 - DNA, 25 bp, Homo sapien
gacacaagaggcgagtaagtcagag

SEQ ID NO: 4787183 - DNA, 25 bp, Homo sapien
ccaaatatctgcacgtggaagggtt

SEQ ID NO: 4787184 - DNA, 25 bp, Homo sapien
gtgattccctactagctcccctgag

SEQ ID NO: 4787185 - DNA, 25 bp, Homo sapien
tgatctgagacacgggctggttcct

SEQ ID NO: 4787186 - DNA, 25 bp, Homo sapien
ccaggacctggcttaatacttccca

SEQ ID NO: 4787187 - DNA, 25 bp, Homo sapien
tgctataatctgaacacgccaggtt

SEQ ID NO: 4787188 - DNA, 25 bp, Homo sapien
gaagaacctcttgctataatctgaa

SEQ ID NO: 4787189 - DNA, 25 bp, Homo sapien
tcttgctataatctgaacacgccag

SEQ ID NO: 4787190 - DNA, 25 bp, Homo sapien
tccatctgtgaagaacctcttgcta

SEQ ID NO: 4787191 - DNA, 25 bp, Homo sapien
tgcacaaactactgtctgcccagaa

SEQ ID NO: 4787192 - DNA, 25 bp, Homo sapien
tctcgttccttgacaagactttttg

SEQ ID NO: 4787193 - DNA, 25 bp, Homo sapien
agactttccttgtccaagtctggga

SEQ ID NO: 4787194 - DNA, 25 bp, Homo sapien
cacatctctgagaagcctgtccaga

SEQ ID NO: 4787195 - DNA, 25 bp, Homo sapien
tcttggagagtgactaaaaggtctt

SEQ ID NO: 4787196 - DNA, 25 bp, Homo sapien
gagagtgactaaaaggtcttttgca

SEQ ID NO: 4787197 - DNA, 25 bp, Homo sapien
tggagagtgactaaaaggtcttttg

SEQ ID NO: 4787198 - DNA, 25 bp, Homo sapien
gagtgactaaaaggtcttttgcaaa

SEQ ID NO: 4787199 - DNA, 25 bp, Homo sapien
gggatagagatctggatattcctgc

SEQ ID NO: 4787200 - DNA, 25 bp, Homo sapien
tggggatagagatctggatattcct

SEQ ID NO: 4787201 - DNA, 25 bp, Homo sapien
cttggggatagagatctggatattc

SEQ ID NO: 4787202 - DNA, 25 bp, Homo sapien
ctgccttcctgcatggctcggaact

SEQ ID NO: 4787203 - DNA, 25 bp, Homo sapien
cttctcctagggagggatcgttggg

SEQ ID NO: 4787204 - DNA, 25 bp, Homo sapien
tgcttctcctagggagggatcgttg

SEQ ID NO: 4787205 - DNA, 25 bp, Homo sapien
gcttctcctagggagggatcgttgg

SEQ ID NO: 4787206 - DNA, 25 bp, Homo sapien
atgcttctcctagggagggatcgtt

SEQ ID NO: 4787207 - DNA, 25 bp, Homo sapien
tatcagttaatgcagaaccaataaa

SEQ ID NO: 4787208 - DNA, 25 bp, Homo sapien
tgttatcagttaatgcagaaccaat

SEQ ID NO: 4787209 - DNA, 25 bp, Homo sapien
gttatcagttaatgcagaaccaata

SEQ ID NO: 4787210 - DNA, 25 bp, Homo sapien
tcagttaatgcagaaccaataaagg

SEQ ID NO: 4787211 - DNA, 25 bp, Homo sapien
tagaggcctatgtgctcatgatggg

SEQ ID NO: 4787212 - DNA, 25 bp, Homo sapien
gctgctatatgtgttgcttctcaca

SEQ ID NO: 4787213 - DNA, 25 bp, Homo sapien
atttggaggctacattttagaggcc

SEQ ID NO: 4787214 - DNA, 25 bp, Homo sapien
gtgtctgtcgaccacacaatttgtg

SEQ ID NO: 4787215 - DNA, 25 bp, Homo sapien
tcctacattgtgcacgcgagaggcc

SEQ ID NO: 4787216 - DNA, 25 bp, Homo sapien
tgggtgtgttggatggcaatactcc

SEQ ID NO: 4787217 - DNA, 25 bp, Homo sapien
ctcctgcaggaatcaaaaatgtgtg

SEQ ID NO: 4787218 - DNA, 25 bp, Homo sapien
tcccatgggccaaagatcaagagtg

SEQ ID NO: 4787219 - DNA, 25 bp, Homo sapien
aaagctttgcatctccaggactggc

SEQ ID NO: 4787220 - DNA, 25 bp, Homo sapien
ctgggaaagtacatgaactgcctcg

SEQ ID NO: 4787221 - DNA, 25 bp, Homo sapien
cctgatggttagagaaaagctttgc

SEQ ID NO: 4787222 - DNA, 25 bp, Homo sapien
gcctcgttaggcttaaccctgatgg

SEQ ID NO: 4787223 - DNA, 25 bp, Homo sapien
tgaagcagcaatccagagtgaggca

SEQ ID NO: 4787224 - DNA, 25 bp, Homo sapien
caggatttcacagatagtgctagcc

SEQ ID NO: 4787225 - DNA, 25 bp, Homo sapien
gtccaaatgacccaatgaagcagca

SEQ ID NO: 4787226 - DNA, 25 bp, Homo sapien
tgccagggctacagatgagtcagtc

SEQ ID NO: 4787227 - DNA, 25 bp, Homo sapien
tgtttagagatagcaacctgagcgg

SEQ ID NO: 4787228 - DNA, 25 bp, Homo sapien
gaatgagagtaggactgaagctcca

SEQ ID NO: 4787229 - DNA, 25 bp, Homo sapien
ctctgtcccgtagccccttagaagt

SEQ ID NO: 4787230 - DNA, 25 bp, Homo sapien
ttgacactcgcaagtttatttggca

SEQ ID NO: 4787231 - DNA, 25 bp, Homo sapien
acatctccacgctcagtctcagtat

SEQ ID NO: 4787232 - DNA, 25 bp, Homo sapien
cgctcagtctcagtatgagactcgg

SEQ ID NO: 4787233 - DNA, 25 bp, Homo sapien
tccacgctcagtctcagtatgagac

SEQ ID NO: 4787234 - DNA, 25 bp, Homo sapien
tctcagtatgagactcggtgcagca

SEQ ID NO: 4787235 - DNA, 25 bp, Homo sapien
ccccgactgatttctccggatagag

SEQ ID NO: 4787236 - DNA, 25 bp, Homo sapien
gagtgtcccccgactgatttctccg

SEQ ID NO: 4787237 - DNA, 25 bp, Homo sapien
ctgaggagtgtcccccgactgattt

SEQ ID NO: 4787238 - DNA, 25 bp, Homo sapien
caggaaagccctgaccaacgggcgt

SEQ ID NO: 4787239 - DNA, 25 bp, Homo sapien
gtttgtgggagtcttgctgctcctt

SEQ ID NO: 4787240 - DNA, 25 bp, Homo sapien
ttgtgggagtcttgctgctccttgg

SEQ ID NO: 4787241 - DNA, 25 bp, Homo sapien
tggctgggagcgaattttggatacc

SEQ ID NO: 4787242 - DNA, 25 bp, Homo sapien
cgaattttggatacctgcaaagcct

SEQ ID NO: 4787243 - DNA, 25 bp, Homo sapien
ctgtgactcagcatggccattcata

SEQ ID NO: 4787244 - DNA, 25 bp, Homo sapien
cattcatagtctgtgggaaaccctt

SEQ ID NO: 4787245 - DNA, 25 bp, Homo sapien
catggccattcatagtctgtgggaa

SEQ ID NO: 4787246 - DNA, 25 bp, Homo sapien
tagtctgtgggaaacccttgcccat

SEQ ID NO: 4787247 - DNA, 25 bp, Homo sapien
tctcttcacatgtgtaactccagct

SEQ ID NO: 4787248 - DNA, 25 bp, Homo sapien
tttcccctctcttcacatgtgtaac

SEQ ID NO: 4787249 - DNA, 25 bp, Homo sapien
ttcactaggctctttctcaccccca

SEQ ID NO: 4787250 - DNA, 25 bp, Homo sapien
gcccatgtccaggtttctctctctt

SEQ ID NO: 4787251 - DNA, 25 bp, Homo sapien
tggactccctgaggcatgaccctgt

SEQ ID NO: 4787252 - DNA, 25 bp, Homo sapien
cacttgttggactccctgaggcatg

SEQ ID NO: 4787253 - DNA, 25 bp, Homo sapien
tttcacttgttggactccctgaggc

SEQ ID NO: 4787254 - DNA, 25 bp, Homo sapien
agttttcacttgttggactccctga

SEQ ID NO: 4787255 - DNA, 25 bp, Homo sapien
ctggccaaaatgacagggggaaaat

SEQ ID NO: 4787256 - DNA, 25 bp, Homo sapien
caaaatgacagggggaaaattgttg

SEQ ID NO: 4787257 - DNA, 25 bp, Homo sapien
gctggccaaaatgacagggggaaaa

SEQ ID NO: 4787258 - DNA, 25 bp, Homo sapien
ctccagggagatagcaggttatgta

SEQ ID NO: 4787259 - DNA, 25 bp, Homo sapien
ggtgctaaggagttacaaacagaga

SEQ ID NO: 4787260 - DNA, 25 bp, Homo sapien
taactcgctgagtaaacctgaacaa

SEQ ID NO: 4787261 - DNA, 25 bp, Homo sapien
acagcgcctagcatagctccaggga

SEQ ID NO: 4787262 - DNA, 25 bp, Homo sapien
tgaatgtttgatccccatagttatc

SEQ ID NO: 4787263 - DNA, 25 bp, Homo sapien
gagcatgcacgtttaaaattttgaa

SEQ ID NO: 4787264 - DNA, 25 bp, Homo sapien
cccatttaaccttagcagtatatga

SEQ ID NO: 4787265 - DNA, 25 bp, Homo sapien
tacacacttgggagcataaccctaa

SEQ ID NO: 4787266 - DNA, 25 bp, Homo sapien
caaagaagaatattggtcctgtggt

SEQ ID NO: 4787267 - DNA, 25 bp, Homo sapien
aagaagaatattggtcctgtggtcc

SEQ ID NO: 4787268 - DNA, 25 bp, Homo sapien
aaagaagaatattggtcctgtggtc

SEQ ID NO: 4787269 - DNA, 25 bp, Homo sapien
acaaagaagaatattggtcctgtgg

SEQ ID NO: 4787270 - DNA, 25 bp, Homo sapien
tccagacaatgaagtattactcagc

SEQ ID NO: 4787271 - DNA, 25 bp, Homo sapien
agccaagatgttcttcagtaggtaa

SEQ ID NO: 4787272 - DNA, 25 bp, Homo sapien
ttcagtaggtaaatggatacataaa

SEQ ID NO: 4787273 - DNA, 25 bp, Homo sapien
ccagacaatgaagtattactcagca

SEQ ID NO: 4787274 - DNA, 25 bp, Homo sapien
gcagcattagctgattaattcatct

SEQ ID NO: 4787275 - DNA, 25 bp, Homo sapien
cagcattagctgattaattcatctc

SEQ ID NO: 4787276 - DNA, 25 bp, Homo sapien
tcatctcatttagtgtctctgcagc

SEQ ID NO: 4787277 - DNA, 25 bp, Homo sapien
ctgtcatctcatttagtgtctctgc

SEQ ID NO: 4787278 - DNA, 25 bp, Homo sapien
tggccactccaccaagaatcaagct

SEQ ID NO: 4787279 - DNA, 25 bp, Homo sapien
ggtccaaagtggtagagtgaattcc

SEQ ID NO: 4787280 - DNA, 25 bp, Homo sapien
ggtccctctgtggagcaacttttat

SEQ ID NO: 4787281 - DNA, 25 bp, Homo sapien
gaatcaagctaaaacggtccctctg

SEQ ID NO: 4787282 - DNA, 25 bp, Homo sapien
catttcatcaggcaatctgaacttg

SEQ ID NO: 4787283 - DNA, 25 bp, Homo sapien
tgtttctctgcataaatgctctgcc

SEQ ID NO: 4787284 - DNA, 25 bp, Homo sapien
gcaaacagatgtcaataattcctca

SEQ ID NO: 4787285 - DNA, 25 bp, Homo sapien
catgcgctcagtcatgctttgacac

SEQ ID NO: 4787286 - DNA, 25 bp, Homo sapien
agagaaacgtccaccaaagaaggct

SEQ ID NO: 4787287 - DNA, 25 bp, Homo sapien
gagaagtattgtttatcccgtccaa

SEQ ID NO: 4787288 - DNA, 25 bp, Homo sapien
gaaggctttcattatctcatccatc

SEQ ID NO: 4787289 - DNA, 25 bp, Homo sapien
tcatgagaagtattgtttatcccgt

SEQ ID NO: 4787290 - DNA, 25 bp, Homo sapien
tgggcagcatgaccctcagatcctg

SEQ ID NO: 4787291 - DNA, 25 bp, Homo sapien
tgtctgctggctgtctatacctccc

SEQ ID NO: 4787292 - DNA, 25 bp, Homo sapien
gacaccatttgtcagaggactctgc

SEQ ID NO: 4787293 - DNA, 25 bp, Homo sapien
ttcctcgagaaaggagtccttgggc

SEQ ID NO: 4787294 - DNA, 25 bp, Homo sapien
ttcggcatagctccaggcagacagc

SEQ ID NO: 4787295 - DNA, 25 bp, Homo sapien
cattagtttttagtacctcatcatt

SEQ ID NO: 4787296 - DNA, 25 bp, Homo sapien
caactgtgaaagaagcatatgatgt

SEQ ID NO: 4787297 - DNA, 25 bp, Homo sapien
caaagtactatgatgttgcatgaca

SEQ ID NO: 4787298 - DNA, 25 bp, Homo sapien
tttcagagacagacgctaattactc

SEQ ID NO: 4787299 - DNA, 25 bp, Homo sapien
tttatttgcccttcttcaatcacaa

SEQ ID NO: 4787300 - DNA, 25 bp, Homo sapien
taaactgaattgtagaggtggctgc

SEQ ID NO: 4787301 - DNA, 25 bp, Homo sapien
tatggccacacagttttccacaggg

SEQ ID NO: 4787302 - DNA, 25 bp, Homo sapien
gattcagtgcctcgcagaagatagg

SEQ ID NO: 4787303 - DNA, 25 bp, Homo sapien
gaacctttctcttgggagtggctca

SEQ ID NO: 4787304 - DNA, 25 bp, Homo sapien
tgggccagattatctcccagagagt

SEQ ID NO: 4787305 - DNA, 25 bp, Homo sapien
cccaagctgatttgaagtcacttcc

SEQ ID NO: 4787306 - DNA, 25 bp, Homo sapien
cagatgcactgtcaatgctgatgaa

SEQ ID NO: 4787307 - DNA, 25 bp, Homo sapien
gaaattgtcctcagtattgcagctc

SEQ ID NO: 4787308 - DNA, 25 bp, Homo sapien
tggtggtgtccacattgtctccttc

SEQ ID NO: 4787309 - DNA, 25 bp, Homo sapien
tgcgagggagaacatccaccactct

SEQ ID NO: 4787310 - DNA, 25 bp, Homo sapien
tctcttcgcatgagatgccactctg

SEQ ID NO: 4787311 - DNA, 25 bp, Homo sapien
tctacacctacactatgccttagag

SEQ ID NO: 4787312 - DNA, 25 bp, Homo sapien
gactgccatccggattcccgaggat

SEQ ID NO: 4787313 - DNA, 25 bp, Homo sapien
taattccgcaggtttgccttttgag

SEQ ID NO: 4787314 - DNA, 25 bp, Homo sapien
gatggcagaatcaacaagagtggag

SEQ ID NO: 4787315 - DNA, 25 bp, Homo sapien
gaacttgtacttctgatgggcgctg

SEQ ID NO: 4787316 - DNA, 25 bp, Homo sapien
agcagttgccaacaaaggcccattg

SEQ ID NO: 4787317 - DNA, 25 bp, Homo sapien
ccgaacttgctgctgaatcaaagca

SEQ ID NO: 4787318 - DNA, 25 bp, Homo sapien
aaggcccattgcaatgtttgaaagc

SEQ ID NO: 4787319 - DNA, 25 bp, Homo sapien
caatgtttgaaagcccgaacttgct

SEQ ID NO: 4787320 - DNA, 25 bp, Homo sapien
aatagtggtcactgcttggattccc

SEQ ID NO: 4787321 - DNA, 25 bp, Homo sapien
gaaatcgccctggaatactggaccc

SEQ ID NO: 4787322 - DNA, 25 bp, Homo sapien
tgggatgaccctccagtaccaactg

SEQ ID NO: 4787323 - DNA, 25 bp, Homo sapien
ggagagtatgtctttgcccagccct

SEQ ID NO: 4787324 - DNA, 25 bp, Homo sapien
ttctaatgagttggccttaaacgga

SEQ ID NO: 4787325 - DNA, 25 bp, Homo sapien
aggagccccaccaaggctaccaggt

SEQ ID NO: 4787326 - DNA, 25 bp, Homo sapien
ttttctttggattactccaccctgc

SEQ ID NO: 4787327 - DNA, 25 bp, Homo sapien
aattaactctttggcatgcccacac

SEQ ID NO: 4787328 - DNA, 25 bp, Homo sapien
gattctctcccaggttgctttgggc

SEQ ID NO: 4787329 - DNA, 25 bp, Homo sapien
tgctttgggcctcagggctattctc

SEQ ID NO: 4787330 - DNA, 25 bp, Homo sapien
caaagcttctctcaacccttaggtc

SEQ ID NO: 4787331 - DNA, 25 bp, Homo sapien
tggttccaagagataaaggattctc

SEQ ID NO: 4787332 - DNA, 25 bp, Homo sapien
gcggagccagtcttaagagcagaaa

SEQ ID NO: 4787333 - DNA, 25 bp, Homo sapien
tccttaaagcggagccagtcttaag

SEQ ID NO: 4787334 - DNA, 25 bp, Homo sapien
ttaaagcggagccagtcttaagagc

SEQ ID NO: 4787335 - DNA, 25 bp, Homo sapien
gtctcctctccttaaagcggagcca

SEQ ID NO: 4787336 - DNA, 25 bp, Homo sapien
aaaccatgtgtcctgaggtgtgagg

SEQ ID NO: 4787337 - DNA, 25 bp, Homo sapien
gaagggaaaccaccatcttgtgaag

SEQ ID NO: 4787338 - DNA, 25 bp, Homo sapien
tcaggcctggatgctattgaaatgt

SEQ ID NO: 4787339 - DNA, 25 bp, Homo sapien
gcacaggccctcagttgaagggaaa

SEQ ID NO: 4787340 - DNA, 25 bp, Homo sapien
cttctgcgaggccatcagcttctcg

SEQ ID NO: 4787341 - DNA, 25 bp, Homo sapien
gtttatattcttctgcgaggccatc

SEQ ID NO: 4787342 - DNA, 25 bp, Homo sapien
tctgcgaggccatcagcttctcggc

SEQ ID NO: 4787343 - DNA, 25 bp, Homo sapien
tattcttctgcgaggccatcagctt

SEQ ID NO: 4787344 - DNA, 25 bp, Homo sapien
gacgcagcctagagcctgtgcctgg

SEQ ID NO: 4787345 - DNA, 25 bp, Homo sapien
gctgggtccatagtcaactgggtaa

SEQ ID NO: 4787346 - DNA, 25 bp, Homo sapien
gtccatagtcaactgggtaatggga

SEQ ID NO: 4787347 - DNA, 25 bp, Homo sapien
gccagtcagagacgcagcctagagc

SEQ ID NO: 4787348 - DNA, 25 bp, Homo sapien
tcacatctgtcattccacaggacat

SEQ ID NO: 4787349 - DNA, 25 bp, Homo sapien
ttccctccagtaatgaaggcctcca

SEQ ID NO: 4787350 - DNA, 25 bp, Homo sapien
gaccttgttgatgggaccacttagg

SEQ ID NO: 4787351 - DNA, 25 bp, Homo sapien
cacaggacattcaagaccttgttga

SEQ ID NO: 4787352 - DNA, 25 bp, Homo sapien
tgcaatgaccattgcaaggtcttgg

SEQ ID NO: 4787353 - DNA, 25 bp, Homo sapien
ccattgcaaggtcttggcagcccca

SEQ ID NO: 4787354 - DNA, 25 bp, Homo sapien
tgaccattgcaaggtcttggcagcc

SEQ ID NO: 4787355 - DNA, 25 bp, Homo sapien
aaattgcaatgaccattgcaaggtc

SEQ ID NO: 4787356 - DNA, 25 bp, Homo sapien
ttccaagccaaatcttaagtgggcc

SEQ ID NO: 4787357 - DNA, 25 bp, Homo sapien
catggtgtgacacagatgaaagcac

SEQ ID NO: 4787358 - DNA, 25 bp, Homo sapien
tgggcctcctttcaacagcacgatc

SEQ ID NO: 4787359 - DNA, 25 bp, Homo sapien
aaagcacagccgcttggtggaaggt

SEQ ID NO: 4787360 - DNA, 25 bp, Homo sapien
aaatatcgacaagatgacaaggagc

SEQ ID NO: 4787361 - DNA, 25 bp, Homo sapien
ccttctagcaggttgtaagttagca

SEQ ID NO: 4787362 - DNA, 25 bp, Homo sapien
tagcacatgggtcaatggtttatca

SEQ ID NO: 4787363 - DNA, 25 bp, Homo sapien
taaataacacctccaatggcaccct

SEQ ID NO: 4787364 - DNA, 25 bp, Homo sapien
tggaccatgtcaacaaccttcccat

SEQ ID NO: 4787365 - DNA, 25 bp, Homo sapien
tcttggaccatgtcaacaaccttcc

SEQ ID NO: 4787366 - DNA, 25 bp, Homo sapien
ttggaccatgtcaacaaccttccca

SEQ ID NO: 4787367 - DNA, 25 bp, Homo sapien
cgtcttggaccatgtcaacaacctt

SEQ ID NO: 4787368 - DNA, 25 bp, Homo sapien
tcagtggaactatgtttattgagta

SEQ ID NO: 4787369 - DNA, 25 bp, Homo sapien
gagtcagtggaactatgtttattga

SEQ ID NO: 4787370 - DNA, 25 bp, Homo sapien
actgagtcagtggaactatgtttat

SEQ ID NO: 4787371 - DNA, 25 bp, Homo sapien
cagtggaactatgtttattgagtac

SEQ ID NO: 4787372 - DNA, 25 bp, Homo sapien
ttgagtccacctgaagctgcctgtg

SEQ ID NO: 4787373 - DNA, 25 bp, Homo sapien
gcctgtgatcattagccagccgtgt

SEQ ID NO: 4787374 - DNA, 25 bp, Homo sapien
tgagtccacctgaagctgcctgtga

SEQ ID NO: 4787375 - DNA, 25 bp, Homo sapien
cattagccagccgtgtttccagtat

SEQ ID NO: 4787376 - DNA, 25 bp, Homo sapien
cacgttcactttggggaggatcata

SEQ ID NO: 4787377 - DNA, 25 bp, Homo sapien
agaatcctgacgttcgagtttcacg

SEQ ID NO: 4787378 - DNA, 25 bp, Homo sapien
gccaaaatgttttcagccctatcac

SEQ ID NO: 4787379 - DNA, 25 bp, Homo sapien
actctcttcatcaaatggctttggc

SEQ ID NO: 4787380 - DNA, 25 bp, Homo sapien
aggttataccttcaccaagggctga

SEQ ID NO: 4787381 - DNA, 25 bp, Homo sapien
caagggctgatagccttccccagca

SEQ ID NO: 4787382 - DNA, 25 bp, Homo sapien
tgtacaattacatctaaccgttacg

SEQ ID NO: 4787383 - DNA, 25 bp, Homo sapien
gccaaaccgtcccagattgaagact

SEQ ID NO: 4787384 - DNA, 25 bp, Homo sapien
tgatcttaggcccttctttctggat

SEQ ID NO: 4787385 - DNA, 25 bp, Homo sapien
cttggaatagttgatcttaggccct

SEQ ID NO: 4787386 - DNA, 25 bp, Homo sapien
tcttaggcccttctttctggatgcc

SEQ ID NO: 4787387 - DNA, 25 bp, Homo sapien
ttctttctggatgccattagatgac

SEQ ID NO: 4787388 - DNA, 25 bp, Homo sapien
ccctcaagggactgctactatctct

SEQ ID NO: 4787389 - DNA, 25 bp, Homo sapien
ctcttccctcaagggactgctacta

SEQ ID NO: 4787390 - DNA, 25 bp, Homo sapien
tccctcaagggactgctactatctc

SEQ ID NO: 4787391 - DNA, 25 bp, Homo sapien
tcttccctcaagggactgctactat

SEQ ID NO: 4787392 - DNA, 25 bp, Homo sapien
gtctgaacttgccagatcttggaga

SEQ ID NO: 4787393 - DNA, 25 bp, Homo sapien
gaaggtatgcattctctgtggaacg

SEQ ID NO: 4787394 - DNA, 25 bp, Homo sapien
gataactgtcagcatgtctcacaaa

SEQ ID NO: 4787395 - DNA, 25 bp, Homo sapien
ggaactcccaagatagagaagccaa

SEQ ID NO: 4787396 - DNA, 25 bp, Homo sapien
tatgttttcgaaaaatgtgtggacc

SEQ ID NO: 4787397 - DNA, 25 bp, Homo sapien
catacctaacatgcagcagggccat

SEQ ID NO: 4787398 - DNA, 25 bp, Homo sapien
agttgatacgctctaaagaacaggc

SEQ ID NO: 4787399 - DNA, 25 bp, Homo sapien
tggaccatatgcatacctaacatgc

SEQ ID NO: 4787400 - DNA, 25 bp, Homo sapien
tcaatccctcctgtatagaagcagc

SEQ ID NO: 4787401 - DNA, 25 bp, Homo sapien
gcagccatgtcgaatcatgcaaatg

SEQ ID NO: 4787402 - DNA, 25 bp, Homo sapien
attcactgtatgatagaccccatta

SEQ ID NO: 4787403 - DNA, 25 bp, Homo sapien
gatagaccccattattctgaattct

SEQ ID NO: 4787404 - DNA, 25 bp, Homo sapien
gtaccagatactccatagatgatgt

SEQ ID NO: 4787405 - DNA, 25 bp, Homo sapien
cggtgtctggccagtaccagatact

SEQ ID NO: 4787406 - DNA, 25 bp, Homo sapien
tacaagaccattccggtgtctggcc

SEQ ID NO: 4787407 - DNA, 25 bp, Homo sapien
tgtatctgcattacaagaccattcc

SEQ ID NO: 4787408 - DNA, 25 bp, Homo sapien
gatcttgctgttgactttaatgcaa

SEQ ID NO: 4787409 - DNA, 25 bp, Homo sapien
catatgaaactgacacttttccagg

SEQ ID NO: 4787410 - DNA, 25 bp, Homo sapien
tgcaaatgcttcaaatattagattg

SEQ ID NO: 4787411 - DNA, 25 bp, Homo sapien
taatgcaaatgcttcaaatattaga

SEQ ID NO: 4787412 - DNA, 25 bp, Homo sapien
caagttgcgtctgatgctggctaga

SEQ ID NO: 4787413 - DNA, 25 bp, Homo sapien
cagtggatgcacacgcaggtaggca

SEQ ID NO: 4787414 - DNA, 25 bp, Homo sapien
cattgtgtccacagacgtaaggctc

SEQ ID NO: 4787415 - DNA, 25 bp, Homo sapien
tccagccaggcctataaagattatg

SEQ ID NO: 4787416 - DNA, 25 bp, Homo sapien
ttgactcagaccaccgtggaaggtg

SEQ ID NO: 4787417 - DNA, 25 bp, Homo sapien
caaaggcagcacttggacacagtgg

SEQ ID NO: 4787418 - DNA, 25 bp, Homo sapien
taagcctgtgcccagaaagtgaagc

SEQ ID NO: 4787419 - DNA, 25 bp, Homo sapien
aagcaacacctatcctggccaagtg

SEQ ID NO: 4787420 - DNA, 25 bp, Homo sapien
caggccaggatctctaactgcttgc

SEQ ID NO: 4787421 - DNA, 25 bp, Homo sapien
tcttcacggctttatctcctacctc

SEQ ID NO: 4787422 - DNA, 25 bp, Homo sapien
ggatctctaactgcttgcagggaaa

SEQ ID NO: 4787423 - DNA, 25 bp, Homo sapien
tatctcctacctcttgcaacttctg

SEQ ID NO: 4787424 - DNA, 25 bp, Homo sapien
ggtggcattcagctgaagctcggta

SEQ ID NO: 4787425 - DNA, 25 bp, Homo sapien
ggtggaatgtatgactgaatggatg

SEQ ID NO: 4787426 - DNA, 25 bp, Homo sapien
cattcagctgaagctcggtaagcag

SEQ ID NO: 4787427 - DNA, 25 bp, Homo sapien
tgagcatcttagaacaaaggctggg

SEQ ID NO: 4787428 - DNA, 25 bp, Homo sapien
tcctgtgtgagcctgtgtaactcac

SEQ ID NO: 4787429 - DNA, 25 bp, Homo sapien
tgcatcctgtgtgagcctgtgtaac

SEQ ID NO: 4787430 - DNA, 25 bp, Homo sapien
gggatgccatttgcatcctgtgtga

SEQ ID NO: 4787431 - DNA, 25 bp, Homo sapien
catttgcatcctgtgtgagcctgtg

SEQ ID NO: 4787432 - DNA, 25 bp, Homo sapien
cctctagagggcaggtaaatagaac

SEQ ID NO: 4787433 - DNA, 25 bp, Homo sapien
ctagagggcaggtaaatagaactaa

SEQ ID NO: 4787434 - DNA, 25 bp, Homo sapien
cttccttagggcagattcctttcct

SEQ ID NO: 4787435 - DNA, 25 bp, Homo sapien
agagggcaggtaaatagaactaaag

SEQ ID NO: 4787436 - DNA, 25 bp, Homo sapien
tccttgtgttgctcatcagaacagc

SEQ ID NO: 4787437 - DNA, 25 bp, Homo sapien
gcgtaatgtctactttgagaaagcc

SEQ ID NO: 4787438 - DNA, 25 bp, Homo sapien
aaaggagaatcacaggctctaaagc

SEQ ID NO: 4787439 - DNA, 25 bp, Homo sapien
taaagccaattgaaagttgtggagc

SEQ ID NO: 4787440 - DNA, 25 bp, Homo sapien
gatactgttctaaagagctaaccaa

SEQ ID NO: 4787441 - DNA, 25 bp, Homo sapien
taacacagttgaaaagcgaagggat

SEQ ID NO: 4787442 - DNA, 25 bp, Homo sapien
taagtgtgttcaaagtgccagatac

SEQ ID NO: 4787443 - DNA, 25 bp, Homo sapien
tatcagcaattctaagttcacccag

SEQ ID NO: 4787444 - DNA, 25 bp, Homo sapien
ggaccaccaagggacaccaaaatga

SEQ ID NO: 4787445 - DNA, 25 bp, Homo sapien
ccttctgacttaggcttggtgccag

SEQ ID NO: 4787446 - DNA, 25 bp, Homo sapien
aaaatgattcctctgatcgtttggg

SEQ ID NO: 4787447 - DNA, 25 bp, Homo sapien
aatgattccagcttatctcctctgt

SEQ ID NO: 4787448 - DNA, 25 bp, Homo sapien
taggccagggtcacttcaaccaggt

SEQ ID NO: 4787449 - DNA, 25 bp, Homo sapien
tctgtttccaatgccaaggacccac

SEQ ID NO: 4787450 - DNA, 25 bp, Homo sapien
ggacccacctgtatagacagccctg

SEQ ID NO: 4787451 - DNA, 25 bp, Homo sapien
tttcaattcactgtcaacaccactg

SEQ ID NO: 4787452 - DNA, 25 bp, Homo sapien
tggactgtcccgcaaagagaaggaa

SEQ ID NO: 4787453 - DNA, 25 bp, Homo sapien
gaaacagtcaggcattatttgcccc

SEQ ID NO: 4787454 - DNA, 25 bp, Homo sapien
tgggcacagtgaggtggactgtccc

SEQ ID NO: 4787455 - DNA, 25 bp, Homo sapien
aagagaaggaaacagtcaggcatta

SEQ ID NO: 4787456 - DNA, 25 bp, Homo sapien
ttgttctctccctgcaatacatctg

SEQ ID NO: 4787457 - DNA, 25 bp, Homo sapien
ttctctccctgcaatacatctgttc

SEQ ID NO: 4787458 - DNA, 25 bp, Homo sapien
aatgaagacattgttctctccctgc

SEQ ID NO: 4787459 - DNA, 25 bp, Homo sapien
gacattgttctctccctgcaataca

SEQ ID NO: 4787460 - DNA, 25 bp, Homo sapien
ctgcaaaggaatctgatgacgtgga

SEQ ID NO: 4787461 - DNA, 25 bp, Homo sapien
gcaaaggaatctgatgacgtggatc

SEQ ID NO: 4787462 - DNA, 25 bp, Homo sapien
tccctttctgccgaaactcgctcat

SEQ ID NO: 4787463 - DNA, 25 bp, Homo sapien
aaaggaatctgatgacgtggatcaa

SEQ ID NO: 4787464 - DNA, 25 bp, Homo sapien
tgctgccctcggtagtaacagagca

SEQ ID NO: 4787465 - DNA, 25 bp, Homo sapien
gaagtcgccagggacagacactgta

SEQ ID NO: 4787466 - DNA, 25 bp, Homo sapien
gtcgccagggacagacactgtacaa

SEQ ID NO: 4787467 - DNA, 25 bp, Homo sapien
gaaaggctgtttctatcttcgctgc

SEQ ID NO: 4787468 - DNA, 25 bp, Homo sapien
cttctcccagctgaccgtcgttagg

SEQ ID NO: 4787469 - DNA, 25 bp, Homo sapien
gaagaagtcgtactgttcccaatcc

SEQ ID NO: 4787470 - DNA, 25 bp, Homo sapien
caatccccagttgtctaatccaaac

SEQ ID NO: 4787471 - DNA, 25 bp, Homo sapien
gctgaccgtcgttaggaaaacagac

SEQ ID NO: 4787472 - DNA, 25 bp, Homo sapien
gatgctgatgagctcacacaggcaa

SEQ ID NO: 4787473 - DNA, 25 bp, Homo sapien
gatgtactcacggatggtacaactg

SEQ ID NO: 4787474 - DNA, 25 bp, Homo sapien
tcacggatggtacaactgagcccca

SEQ ID NO: 4787475 - DNA, 25 bp, Homo sapien
gcaactccctgatgtactcacggat

SEQ ID NO: 4787476 - DNA, 25 bp, Homo sapien
caaatgcacaccagggagataaatc

SEQ ID NO: 4787477 - DNA, 25 bp, Homo sapien
tgcacaccagggagataaatccatg

SEQ ID NO: 4787478 - DNA, 25 bp, Homo sapien
aaatgcacaccagggagataaatcc

SEQ ID NO: 4787479 - DNA, 25 bp, Homo sapien
cacaccagggagataaatccatgcc

SEQ ID NO: 4787480 - DNA, 25 bp, Homo sapien
cttgggatggcaacggtaaggaact

SEQ ID NO: 4787481 - DNA, 25 bp, Homo sapien
ggaacttcaggagaattacagccat

SEQ ID NO: 4787482 - DNA, 25 bp, Homo sapien
gatggcaacggtaaggaacttcagg

SEQ ID NO: 4787483 - DNA, 25 bp, Homo sapien
caacggtaaggaacttcaggagaat

SEQ ID NO: 4787484 - DNA, 25 bp, Homo sapien
gtgtggcgtactcaggacaaaggac

SEQ ID NO: 4787485 - DNA, 25 bp, Homo sapien
tgcaccccacaggaaagtttagtat

SEQ ID NO: 4787486 - DNA, 25 bp, Homo sapien
ggaggtattcaccaagtgtggcgta

SEQ ID NO: 4787487 - DNA, 25 bp, Homo sapien
tattcaccaagtgtggcgtactcag

SEQ ID NO: 4787488 - DNA, 25 bp, Homo sapien
tttttctctatcctgtaatttggat

SEQ ID NO: 4787489 - DNA, 25 bp, Homo sapien
tctctatcctgtaatttggattgtt

SEQ ID NO: 4787490 - DNA, 25 bp, Homo sapien
ctttttctctatcctgtaatttgga

SEQ ID NO: 4787491 - DNA, 25 bp, Homo sapien
tttctctatcctgtaatttggattg

SEQ ID NO: 4787492 - DNA, 25 bp, Homo sapien
gccagtaatagtaaagcaccttcct

SEQ ID NO: 4787493 - DNA, 25 bp, Homo sapien
tatacctcgccctgtgttctacctc

SEQ ID NO: 4787494 - DNA, 25 bp, Homo sapien
ggctgttcttgagtcatatcctgta

SEQ ID NO: 4787495 - DNA, 25 bp, Homo sapien
ggtggtacactccaatagggcacag

SEQ ID NO: 4787496 - DNA, 25 bp, Homo sapien
gccagatggcgacctcagcattctt

SEQ ID NO: 4787497 - DNA, 25 bp, Homo sapien
gctcctccagttagttgagtccagg

SEQ ID NO: 4787498 - DNA, 25 bp, Homo sapien
caaccccattgggaatgtcattctt

SEQ ID NO: 4787499 - DNA, 25 bp, Homo sapien
tcagagttgcaagtagagcactggc

SEQ ID NO: 4787500 - DNA, 25 bp, Homo sapien
tgctggaggccttgtctgtggaaat

SEQ ID NO: 4787501 - DNA, 25 bp, Homo sapien
ttctgtaaatgtgtatagagaggcc

SEQ ID NO: 4787502 - DNA, 25 bp, Homo sapien
aatgtgtatagagaggcctgtggcc

SEQ ID NO: 4787503 - DNA, 25 bp, Homo sapien
gccttgtctgtggaaatgccgaggc

SEQ ID NO: 4787504 - DNA, 25 bp, Homo sapien
taaagtccacttgcgggtgtcgcca

SEQ ID NO: 4787505 - DNA, 25 bp, Homo sapien
gaagccatccagcatagtgcagccg

SEQ ID NO: 4787506 - DNA, 25 bp, Homo sapien
catggcggtgcggaagatgtactcc

SEQ ID NO: 4787507 - DNA, 25 bp, Homo sapien
tctatgatgtgcaggtggtcgtccg

SEQ ID NO: 4787508 - DNA, 25 bp, Homo sapien
tcccttgctccccttctcacatcca

SEQ ID NO: 4787509 - DNA, 25 bp, Homo sapien
cttctcacatccacagcctagagcc

SEQ ID NO: 4787510 - DNA, 25 bp, Homo sapien
catgaacttgctttgggacaggatc

SEQ ID NO: 4787511 - DNA, 25 bp, Homo sapien
tgcactttgaccgaagaagacagtc

SEQ ID NO: 4787512 - DNA, 25 bp, Homo sapien
tgaatcgcttgtgccatcctcgtgg

SEQ ID NO: 4787513 - DNA, 25 bp, Homo sapien
attaagcattcatcactcagaggag

SEQ ID NO: 4787514 - DNA, 25 bp, Homo sapien
caggcagtaaaacagtccctataga

SEQ ID NO: 4787515 - DNA, 25 bp, Homo sapien
gaagtgggcgttttctagactcacc

SEQ ID NO: 4787516 - DNA, 25 bp, Homo sapien
cattgtaattataggaggctcagcc

SEQ ID NO: 4787517 - DNA, 25 bp, Homo sapien
tgaaagcacatgacctggtaagatg

SEQ ID NO: 4787518 - DNA, 25 bp, Homo sapien
ttctcaatagccagccctcaaagag

SEQ ID NO: 4787519 - DNA, 25 bp, Homo sapien
aatggtcttctctgtcggatccctc

SEQ ID NO: 4787520 - DNA, 25 bp, Homo sapien
taattatgctctcaaacagcccaag

SEQ ID NO: 4787521 - DNA, 25 bp, Homo sapien
caacaggaatgagtggaaatggtct

SEQ ID NO: 4787522 - DNA, 25 bp, Homo sapien
tctttggtggtataaaaagctcagc

SEQ ID NO: 4787523 - DNA, 25 bp, Homo sapien
tttggtggtataaaaagctcagcat

SEQ ID NO: 4787524 - DNA, 25 bp, Homo sapien
tgttgatctttggtggtataaaaag

SEQ ID NO: 4787525 - DNA, 25 bp, Homo sapien
tgatctttggtggtataaaaagctc

SEQ ID NO: 4787526 - DNA, 25 bp, Homo sapien
ggactgcatttcaacctcaggcatg

SEQ ID NO: 4787527 - DNA, 25 bp, Homo sapien
gcagcaataagaccatcagagccag

SEQ ID NO: 4787528 - DNA, 25 bp, Homo sapien
gacatactcttgttggagggcgctg

SEQ ID NO: 4787529 - DNA, 25 bp, Homo sapien
gctcacccagtgattcaaagtggaa

SEQ ID NO: 4787530 - DNA, 25 bp, Homo sapien
tcagggacaaatcgacaatggaacc

SEQ ID NO: 4787531 - DNA, 25 bp, Homo sapien
tatagagtactgtttgtaacgagcc

SEQ ID NO: 4787532 - DNA, 25 bp, Homo sapien
ggcctcgggcattctccagtatcaa

SEQ ID NO: 4787533 - DNA, 25 bp, Homo sapien
gattggctgtcgtaaagcctgtgaa

SEQ ID NO: 4787534 - DNA, 25 bp, Homo sapien
tcctgggagcaacacttgtggtact

SEQ ID NO: 4787535 - DNA, 25 bp, Homo sapien
tgcaagagatcacttttcgctgcca

SEQ ID NO: 4787536 - DNA, 25 bp, Homo sapien
tatagtacatatcgagcaagtcaac

SEQ ID NO: 4787537 - DNA, 25 bp, Homo sapien
ggtacttcctataggtctcatggtg

SEQ ID NO: 4787538 - DNA, 25 bp, Homo sapien
tatcaatactgaaaaaaggctactt

SEQ ID NO: 4787539 - DNA, 25 bp, Homo sapien
taaatggtgccataaagatataaga

SEQ ID NO: 4787540 - DNA, 25 bp, Homo sapien
gcagatattggtaacacttgagctc

SEQ ID NO: 4787541 - DNA, 25 bp, Homo sapien
taaataaattcactatcaacaaggt

SEQ ID NO: 4787542 - DNA, 25 bp, Homo sapien
ctgataagatgccatgatactattt

SEQ ID NO: 4787543 - DNA, 25 bp, Homo sapien
tgataagatgccatgatactatttg

SEQ ID NO: 4787544 - DNA, 25 bp, Homo sapien
aagaacaggaaccgaagtcttctgt

SEQ ID NO: 4787545 - DNA, 25 bp, Homo sapien
gaacaggaaccgaagtcttctgttg

SEQ ID NO: 4787546 - DNA, 25 bp, Homo sapien
aacacagcaagactccctctcccca

SEQ ID NO: 4787547 - DNA, 25 bp, Homo sapien
gcaacacagcaagactccctctccc

SEQ ID NO: 4787548 - DNA, 25 bp, Homo sapien
acacagcaagactccctctccccat

SEQ ID NO: 4787549 - DNA, 25 bp, Homo sapien
gggcaacacagcaagactccctctc

SEQ ID NO: 4787550 - DNA, 25 bp, Homo sapien
ggtagctgaattctgctggtaagta

SEQ ID NO: 4787551 - DNA, 25 bp, Homo sapien
tagctgaattctgctggtaagtaag

SEQ ID NO: 4787552 - DNA, 25 bp, Homo sapien
gctgaattctgctggtaagtaagag

SEQ ID NO: 4787553 - DNA, 25 bp, Homo sapien
tgaattctgctggtaagtaagagtc

SEQ ID NO: 4787554 - DNA, 25 bp, Homo sapien
gctgtgcttcttccgctccgctttt

SEQ ID NO: 4787555 - DNA, 25 bp, Homo sapien
ggtcctccagcggactgccttcttt

SEQ ID NO: 4787556 - DNA, 25 bp, Homo sapien
gcttttcggcgattcttggatgatc

SEQ ID NO: 4787557 - DNA, 25 bp, Homo sapien
tcttccgctccgcttttcggcgatt

SEQ ID NO: 4787558 - DNA, 25 bp, Homo sapien
ttactatgggagtatttgccactca

SEQ ID NO: 4787559 - DNA, 25 bp, Homo sapien
aagaggtctgactcttgcccgtggg

SEQ ID NO: 4787560 - DNA, 25 bp, Homo sapien
gctgatatcctggagttactatggg

SEQ ID NO: 4787561 - DNA, 25 bp, Homo sapien
tcacgacactgctagtttcagagaa

SEQ ID NO: 4787562 - DNA, 25 bp, Homo sapien
gggcttgctccttgagctctcgaac

SEQ ID NO: 4787563 - DNA, 25 bp, Homo sapien
tgcctgctgggcttgctccttgagc

SEQ ID NO: 4787564 - DNA, 25 bp, Homo sapien
gctgggcttgctccttgagctctcg

SEQ ID NO: 4787565 - DNA, 25 bp, Homo sapien
ctgcctgctgggcttgctccttgag

SEQ ID NO: 4787566 - DNA, 25 bp, Homo sapien
taaacgtttcttgtggcgactgaat

SEQ ID NO: 4787567 - DNA, 25 bp, Homo sapien
aacgtttcttgtggcgactgaatgt

SEQ ID NO: 4787568 - DNA, 25 bp, Homo sapien
aataaacgtttcttgtggcgactga

SEQ ID NO: 4787569 - DNA, 25 bp, Homo sapien
cgtttcttgtggcgactgaatgtgg

SEQ ID NO: 4787570 - DNA, 25 bp, Homo sapien
taattttgattgagtctacatgaca

SEQ ID NO: 4787571 - DNA, 25 bp, Homo sapien
gattcttaatcatatttgatcacag

SEQ ID NO: 4787572 - DNA, 25 bp, Homo sapien
ttcaagtttactatttccaaataca

SEQ ID NO: 4787573 - DNA, 25 bp, Homo sapien
cagtaaataggaggagactctctca

SEQ ID NO: 4787574 - DNA, 25 bp, Homo sapien
gaattctatctaaaatggaaccctc

SEQ ID NO: 4787575 - DNA, 25 bp, Homo sapien
aatgaggaattctatctaaaatgga

SEQ ID NO: 4787576 - DNA, 25 bp, Homo sapien
aattctatctaaaatggaaccctca

SEQ ID NO: 4787577 - DNA, 25 bp, Homo sapien
gaggaattctatctaaaatggaacc

SEQ ID NO: 4787578 - DNA, 25 bp, Homo sapien
gctttacgttggtttctataatatc

SEQ ID NO: 4787579 - DNA, 25 bp, Homo sapien
ttacgttggtttctataatatccag

SEQ ID NO: 4787580 - DNA, 25 bp, Homo sapien
tttacgttggtttctataatatcca

SEQ ID NO: 4787581 - DNA, 25 bp, Homo sapien
tacgttggtttctataatatccagt

SEQ ID NO: 4787582 - DNA, 25 bp, Homo sapien
ctgaaaaacaggcctcctacaaggc

SEQ ID NO: 4787583 - DNA, 25 bp, Homo sapien
actttcagaggtaatcagaatattt

SEQ ID NO: 4787584 - DNA, 25 bp, Homo sapien
gaaagacatggattactttcagagg

SEQ ID NO: 4787585 - DNA, 25 bp, Homo sapien
aaagacatggattactttcagaggt

SEQ ID NO: 4787586 - DNA, 25 bp, Homo sapien
gcagctccttctaacagcaagagca

SEQ ID NO: 4787587 - DNA, 25 bp, Homo sapien
caggcagctccttctaacagcaaga

SEQ ID NO: 4787588 - DNA, 25 bp, Homo sapien
agctccttctaacagcaagagcaca

SEQ ID NO: 4787589 - DNA, 25 bp, Homo sapien
ctccttctaacagcaagagcacagc

SEQ ID NO: 4787590 - DNA, 25 bp, Homo sapien
acggcagccttgactgcctggcccc

SEQ ID NO: 4787591 - DNA, 25 bp, Homo sapien
tcacggcagccttgactgcctggcc

SEQ ID NO: 4787592 - DNA, 25 bp, Homo sapien
ctcacggcagccttgactgcctggc

SEQ ID NO: 4787593 - DNA, 25 bp, Homo sapien
ggcagccttgactgcctggccccaa

SEQ ID NO: 4787594 - DNA, 25 bp, Homo sapien
ccattctatatgctgtcttttcaca

SEQ ID NO: 4787595 - DNA, 25 bp, Homo sapien
gggtttacaggcgtttgctcatttc

SEQ ID NO: 4787596 - DNA, 25 bp, Homo sapien
ttacaggcgtttgctcatttcaaaa

SEQ ID NO: 4787597 - DNA, 25 bp, Homo sapien
ttccattctatatgctgtcttttca

SEQ ID NO: 4787598 - DNA, 25 bp, Homo sapien
gatatgcaatgaaaagactaaccaa

SEQ ID NO: 4787599 - DNA, 25 bp, Homo sapien
gctatcaacaaggaacgcactttca

SEQ ID NO: 4787600 - DNA, 25 bp, Homo sapien
tagctaataagccaacagtggaggt

SEQ ID NO: 4787601 - DNA, 25 bp, Homo sapien
tgaaaactcggaaaatactgaatct

SEQ ID NO: 4787602 - DNA, 25 bp, Homo sapien
ccacacagacatgagggttggttca

SEQ ID NO: 4787603 - DNA, 25 bp, Homo sapien
ggttggttcactgttgaaggagctt

SEQ ID NO: 4787604 - DNA, 25 bp, Homo sapien
ggttcactgttgaaggagcttggaa

SEQ ID NO: 4787605 - DNA, 25 bp, Homo sapien
ttggttcactgttgaaggagcttgg

SEQ ID NO: 4787606 - DNA, 25 bp, Homo sapien
catggccgcatcaatgtgcttcctc

SEQ ID NO: 4787607 - DNA, 25 bp, Homo sapien
ggccgcatcaatgtgcttcctctgc

SEQ ID NO: 4787608 - DNA, 25 bp, Homo sapien
aaaccatggccgcatcaatgtgctt

SEQ ID NO: 4787609 - DNA, 25 bp, Homo sapien
tccaaaaccatggccgcatcaatgt

SEQ ID NO: 4787610 - DNA, 25 bp, Homo sapien
aacgggcaaacatgagccccgctgg

SEQ ID NO: 4787611 - DNA, 25 bp, Homo sapien
gctggctcatacatgtgctcctgca

SEQ ID NO: 4787612 - DNA, 25 bp, Homo sapien
ggtaaagttaagctgggctgccaca

SEQ ID NO: 4787613 - DNA, 25 bp, Homo sapien
agagagctttctcgtgggcaccgca

SEQ ID NO: 4787614 - DNA, 25 bp, Homo sapien
taatggcaaacgtgagtaaagggac

SEQ ID NO: 4787615 - DNA, 25 bp, Homo sapien
taacccaagggttctgatggacaaa

SEQ ID NO: 4787616 - DNA, 25 bp, Homo sapien
caaatgcaatcaccaaggcgagggc

SEQ ID NO: 4787617 - DNA, 25 bp, Homo sapien
gaatggcattcaggagtaacccaag

SEQ ID NO: 4787618 - DNA, 25 bp, Homo sapien
gcttggtgaatataacttcagagct

SEQ ID NO: 4787619 - DNA, 25 bp, Homo sapien
tatcttttatcaagtttaagcattc

SEQ ID NO: 4787620 - DNA, 25 bp, Homo sapien
taacttcagagcttcgttatacaag

SEQ ID NO: 4787621 - DNA, 25 bp, Homo sapien
tcagagcttcgttatacaagttttt

SEQ ID NO: 4787622 - DNA, 25 bp, Homo sapien
tttgtctatagtaaaccgctgataa

SEQ ID NO: 4787623 - DNA, 25 bp, Homo sapien
aatggctttttcatatcgtttcaag

SEQ ID NO: 4787624 - DNA, 25 bp, Homo sapien
tatcgtttcaagtatttgtctatag

SEQ ID NO: 4787625 - DNA, 25 bp, Homo sapien
tatagtaaaccgctgataattagtt

SEQ ID NO: 4787626 - DNA, 25 bp, Homo sapien
gctaccatgaggaccaaatcaaagt

SEQ ID NO: 4787627 - DNA, 25 bp, Homo sapien
tctgtgacttctcagctaccatgag

SEQ ID NO: 4787628 - DNA, 25 bp, Homo sapien
caaatcaaagtcataggtgccaaga

SEQ ID NO: 4787629 - DNA, 25 bp, Homo sapien
cataggtgccaagagaatgatcata

SEQ ID NO: 4787630 - DNA, 25 bp, Homo sapien
gcatcaggatcagagggagcatttc

SEQ ID NO: 4787631 - DNA, 25 bp, Homo sapien
cagcatcaggatcagagggagcatt

SEQ ID NO: 4787632 - DNA, 25 bp, Homo sapien
cacagcatcaggatcagagggagca

SEQ ID NO: 4787633 - DNA, 25 bp, Homo sapien
ctcacagcatcaggatcagagggag

SEQ ID NO: 4787634 - DNA, 25 bp, Homo sapien
tgcagaagactagtagcagtcacgg

SEQ ID NO: 4787635 - DNA, 25 bp, Homo sapien
agcactttctctgtgagcggatctc

SEQ ID NO: 4787636 - DNA, 25 bp, Homo sapien
actttctctgtgagcggatctctac

SEQ ID NO: 4787637 - DNA, 25 bp, Homo sapien
tagtagcagtcacggccaccttaag

SEQ ID NO: 4787638 - DNA, 25 bp, Homo sapien
tctggggttgtcttctttacatgag

SEQ ID NO: 4787639 - DNA, 25 bp, Homo sapien
cagttctggggttgtcttctttaca

SEQ ID NO: 4787640 - DNA, 25 bp, Homo sapien
ctggggttgtcttctttacatgaga

SEQ ID NO: 4787641 - DNA, 25 bp, Homo sapien
gttctggggttgtcttctttacatg

SEQ ID NO: 4787642 - DNA, 25 bp, Homo sapien
aggctggacaaggacaactacacac

SEQ ID NO: 4787643 - DNA, 25 bp, Homo sapien
agaatgagaaaggtaagtaggctgg

SEQ ID NO: 4787644 - DNA, 25 bp, Homo sapien
taggctggacaaggacaactacaca

SEQ ID NO: 4787645 - DNA, 25 bp, Homo sapien
agaaaggtaagtaggctggacaagg

SEQ ID NO: 4787646 - DNA, 25 bp, Homo sapien
cggtttttcaaaggatgccacctgg

SEQ ID NO: 4787647 - DNA, 25 bp, Homo sapien
tagacactgctggtaactggtgcag

SEQ ID NO: 4787648 - DNA, 25 bp, Homo sapien
tatgaggatttatgctctccatgac

SEQ ID NO: 4787649 - DNA, 25 bp, Homo sapien
actggtgcagggtacatggtcttcg

SEQ ID NO: 4787650 - DNA, 25 bp, Homo sapien
ttttattcccgtcaggatccctgga

SEQ ID NO: 4787651 - DNA, 25 bp, Homo sapien
aagttaatatgattcacagaatcta

SEQ ID NO: 4787652 - DNA, 25 bp, Homo sapien
acaagttaatatgattcacagaatc

SEQ ID NO: 4787653 - DNA, 25 bp, Homo sapien
aaacaagttaatatgattcacagaa

SEQ ID NO: 4787654 - DNA, 25 bp, Homo sapien
aaaacaagttaatatgattcacaga

SEQ ID NO: 4787655 - DNA, 25 bp, Homo sapien
tcagattgagattgattctcagctt

SEQ ID NO: 4787656 - DNA, 25 bp, Homo sapien
atcagattgagattgattctcagct

SEQ ID NO: 4787657 - DNA, 25 bp, Homo sapien
cagattgagattgattctcagcttt

SEQ ID NO: 4787658 - DNA, 25 bp, Homo sapien
aatcagattgagattgattctcagc

SEQ ID NO: 4787659 - DNA, 25 bp, Homo sapien
ggctcgatgatgaacaacttctaag

SEQ ID NO: 4787660 - DNA, 25 bp, Homo sapien
accacttccgaatctgagctaaaac

SEQ ID NO: 4787661 - DNA, 25 bp, Homo sapien
aaccagggctcgatgatgaacaact

SEQ ID NO: 4787662 - DNA, 25 bp, Homo sapien
caacttctaagtttccccttggcat

SEQ ID NO: 4787663 - DNA, 25 bp, Homo sapien
ctgtaatacaagctttgtgtcctgg

SEQ ID NO: 4787664 - DNA, 25 bp, Homo sapien
tgggacacatgattgctgctcaggc

SEQ ID NO: 4787665 - DNA, 25 bp, Homo sapien
agaacttccccatgggacacatgat

SEQ ID NO: 4787666 - DNA, 25 bp, Homo sapien
gggcacaacagtgacaatccgtgaa

SEQ ID NO: 4787667 - DNA, 25 bp, Homo sapien
tggcaggtatgggaatgggttgtca

SEQ ID NO: 4787668 - DNA, 25 bp, Homo sapien
caaatgacgtgatatttgacgcaac

SEQ ID NO: 4787669 - DNA, 25 bp, Homo sapien
caataaaaactcatcatatactgca

SEQ ID NO: 4787670 - DNA, 25 bp, Homo sapien
aaacactggcaggtatgggaatggg

SEQ ID NO: 4787671 - DNA, 25 bp, Homo sapien
gcgacacctgtcagtcagaccaagg

SEQ ID NO: 4787672 - DNA, 25 bp, Homo sapien
acctgtcagtcagaccaaggacaca

SEQ ID NO: 4787673 - DNA, 25 bp, Homo sapien
gacacctgtcagtcagaccaaggac

SEQ ID NO: 4787674 - DNA, 25 bp, Homo sapien
aagcgacacctgtcagtcagaccaa

SEQ ID NO: 4787675 - DNA, 25 bp, Homo sapien
ccaattcggtctgggtgcatggata

SEQ ID NO: 4787676 - DNA, 25 bp, Homo sapien
gaaaccgaacaggaaatccaccaga

SEQ ID NO: 4787677 - DNA, 25 bp, Homo sapien
tcttctccaatcatggccaattcgg

SEQ ID NO: 4787678 - DNA, 25 bp, Homo sapien
ccaccagagttcttccatggtttaa

SEQ ID NO: 4787679 - DNA, 25 bp, Homo sapien
tcagccagctgtaatactactgact

SEQ ID NO: 4787680 - DNA, 25 bp, Homo sapien
actgacttggtcttggaattgcaac

SEQ ID NO: 4787681 - DNA, 25 bp, Homo sapien
ggtacttaaatatctggccatcagc

SEQ ID NO: 4787682 - DNA, 25 bp, Homo sapien
agactgattatgaccccatccaccg

SEQ ID NO: 4787683 - DNA, 25 bp, Homo sapien
cagcgggtttacatcttgatcttca

SEQ ID NO: 4787684 - DNA, 25 bp, Homo sapien
tgagaaggcctagtttcagcgggtt

SEQ ID NO: 4787685 - DNA, 25 bp, Homo sapien
gtcaaatggtgaatgacagaccggg

SEQ ID NO: 4787686 - DNA, 25 bp, Homo sapien
gcttacagccaggaagacgtcttct

SEQ ID NO: 4787687 - DNA, 25 bp, Homo sapien
actgttcttgtcacctcacgtagga

SEQ ID NO: 4787688 - DNA, 25 bp, Homo sapien
tagatcaggtggcaaatccgcagct

SEQ ID NO: 4787689 - DNA, 25 bp, Homo sapien
cacttgcagtagaatgggtcctttc

SEQ ID NO: 4787690 - DNA, 25 bp, Homo sapien
taaactgactgactagcttgagaga

SEQ ID NO: 4787691 - DNA, 25 bp, Homo sapien
tgcattctgatttccatcccaggag

SEQ ID NO: 4787692 - DNA, 25 bp, Homo sapien
gcacagcacccagaagttctagatt

SEQ ID NO: 4787693 - DNA, 25 bp, Homo sapien
aggagcctcaaagcacagcacccag

SEQ ID NO: 4787694 - DNA, 25 bp, Homo sapien
tttacaatactgtttcaatggaaga

SEQ ID NO: 4787695 - DNA, 25 bp, Homo sapien
tccaaatgaggagttctaaggcaaa

SEQ ID NO: 4787696 - DNA, 25 bp, Homo sapien
tgaggagttctaaggcaaactttaa

SEQ ID NO: 4787697 - DNA, 25 bp, Homo sapien
tttccaaatgaggagttctaaggca

SEQ ID NO: 4787698 - DNA, 25 bp, Homo sapien
caaatgaggagttctaaggcaaact

SEQ ID NO: 4787699 - DNA, 25 bp, Homo sapien
gtagggtcagcacttggacaatcac

SEQ ID NO: 4787700 - DNA, 25 bp, Homo sapien
tgtagggtcagcacttggacaatca

SEQ ID NO: 4787701 - DNA, 25 bp, Homo sapien
ctgtagggtcagcacttggacaatc

SEQ ID NO: 4787702 - DNA, 25 bp, Homo sapien
atgggaggcggaaccacagtctgcc

SEQ ID NO: 4787703 - DNA, 25 bp, Homo sapien
cattactcttttgagggtgtgctaa

SEQ ID NO: 4787704 - DNA, 25 bp, Homo sapien
cggaagactgtcaccaacaccctgt

SEQ ID NO: 4787705 - DNA, 25 bp, Homo sapien
actggcatctagaacagcaaggtca

SEQ ID NO: 4787706 - DNA, 25 bp, Homo sapien
caagtaaacgtgtgaaggccacaga

SEQ ID NO: 4787707 - DNA, 25 bp, Homo sapien
aaaggccaggcaagtaaacgtgtga

SEQ ID NO: 4787708 - DNA, 25 bp, Homo sapien
aaggccaggcaagtaaacgtgtgaa

SEQ ID NO: 4787709 - DNA, 25 bp, Homo sapien
caggcaagtaaacgtgtgaaggcca

SEQ ID NO: 4787710 - DNA, 25 bp, Homo sapien
acagagaacatgcagccggtatggg

SEQ ID NO: 4787711 - DNA, 25 bp, Homo sapien
tcagtcgtccagtgccaatcatagg

SEQ ID NO: 4787712 - DNA, 25 bp, Homo sapien
gatagtttccaacagtccagagctg

SEQ ID NO: 4787713 - DNA, 25 bp, Homo sapien
caatcataggcgaggtaatgccagc

SEQ ID NO: 4787714 - DNA, 25 bp, Homo sapien
tgttgtattgggcttaagatgctta

SEQ ID NO: 4787715 - DNA, 25 bp, Homo sapien
tctagactagcatcattgtgttgta

SEQ ID NO: 4787716 - DNA, 25 bp, Homo sapien
aaacacttaatccaagatctagact

SEQ ID NO: 4787717 - DNA, 25 bp, Homo sapien
tgatcacaatggaaggctaccagga

SEQ ID NO: 4787718 - DNA, 25 bp, Homo sapien
ctgcattccagagcaagtcatttac

SEQ ID NO: 4787719 - DNA, 25 bp, Homo sapien
gactgcaagcacagaggaatctgca

SEQ ID NO: 4787720 - DNA, 25 bp, Homo sapien
tgaaggtcttccagccagactgcaa

SEQ ID NO: 4787721 - DNA, 25 bp, Homo sapien
cacaggttttcggaatggagctttc

SEQ ID NO: 4787722 - DNA, 25 bp, Homo sapien
gtgtccatgaaggagtccatttttc

SEQ ID NO: 4787723 - DNA, 25 bp, Homo sapien
tatcctgctggttgggtttatcttg

SEQ ID NO: 4787724 - DNA, 25 bp, Homo sapien
catgaaggagtccatttttctcaaa

SEQ ID NO: 4787725 - DNA, 25 bp, Homo sapien
tcttgtgtagatgcaatcaaactgc

SEQ ID NO: 4787726 - DNA, 25 bp, Homo sapien
tgtcccttgtctctcggcgagcggt

SEQ ID NO: 4787727 - DNA, 25 bp, Homo sapien
ctgcacaagggtactgggccaagga

SEQ ID NO: 4787728 - DNA, 25 bp, Homo sapien
aatcaggcagccacatatgacaggc

SEQ ID NO: 4787729 - DNA, 25 bp, Homo sapien
tcaccgaaacagaggagatacatct

SEQ ID NO: 4787730 - DNA, 25 bp, Homo sapien
gaagcgtaaaatctactattcgagt

SEQ ID NO: 4787731 - DNA, 25 bp, Homo sapien
caaaagcaccatttgccccacagag

SEQ ID NO: 4787732 - DNA, 25 bp, Homo sapien
tatatgcggccttggaacaatgaaa

SEQ ID NO: 4787733 - DNA, 25 bp, Homo sapien
tacaatggcttcatatataccctgc

SEQ ID NO: 4787734 - DNA, 25 bp, Homo sapien
ggctcactggttgactgcaaagcaa

SEQ ID NO: 4787735 - DNA, 25 bp, Homo sapien
tgccacaggctcactggttgactgc

SEQ ID NO: 4787736 - DNA, 25 bp, Homo sapien
gcaaactctcggttccacactctga

SEQ ID NO: 4787737 - DNA, 25 bp, Homo sapien
tgactgcaaagcaaactctcggttc

SEQ ID NO: 4787738 - DNA, 25 bp, Homo sapien
ggtaacttgtggtctatggtcatcc

SEQ ID NO: 4787739 - DNA, 25 bp, Homo sapien
caggtaacttgtggtctatggtcat

SEQ ID NO: 4787740 - DNA, 25 bp, Homo sapien
cgccaggtaacttgtggtctatggt

SEQ ID NO: 4787741 - DNA, 25 bp, Homo sapien
ccccgccaggtaacttgtggtctat

SEQ ID NO: 4787742 - DNA, 25 bp, Homo sapien
tgattctactaccttagcttctcaa

SEQ ID NO: 4787743 - DNA, 25 bp, Homo sapien
gattctactaccttagcttctcaag

SEQ ID NO: 4787744 - DNA, 25 bp, Homo sapien
tacattagataacaggatgctcggt

SEQ ID NO: 4787745 - DNA, 25 bp, Homo sapien
caggtaccagtagtaaagtgtcatc

SEQ ID NO: 4787746 - DNA, 25 bp, Homo sapien
gacgaggccctagaaagcctttaga

SEQ ID NO: 4787747 - DNA, 25 bp, Homo sapien
taagtcttactctagcaggtaccag

SEQ ID NO: 4787748 - DNA, 25 bp, Homo sapien
ctaccccatccaacagtgataaact

SEQ ID NO: 4787749 - DNA, 25 bp, Homo sapien
gccttctgatccatggaactgtgtc

SEQ ID NO: 4787750 - DNA, 25 bp, Homo sapien
ttcctaccccatccaacagtgataa

SEQ ID NO: 4787751 - DNA, 25 bp, Homo sapien
ttctgatccatggaactgtgtctcc

SEQ ID NO: 4787752 - DNA, 25 bp, Homo sapien
tgctccaggattggctcaaaatctt

SEQ ID NO: 4787753 - DNA, 25 bp, Homo sapien
ctgctccaggattggctcaaaatct

SEQ ID NO: 4787754 - DNA, 25 bp, Homo sapien
gctgctccaggattggctcaaaatc

SEQ ID NO: 4787755 - DNA, 25 bp, Homo sapien
cagctcttggtcaggactccaactc

SEQ ID NO: 4787756 - DNA, 25 bp, Homo sapien
agagataccactggctacactccca

SEQ ID NO: 4787757 - DNA, 25 bp, Homo sapien
gactccaactcataacagagatacc

SEQ ID NO: 4787758 - DNA, 25 bp, Homo sapien
acagagataccactggctacactcc

SEQ ID NO: 4787759 - DNA, 25 bp, Homo sapien
gggagaaagccttctgccaccaaag

SEQ ID NO: 4787760 - DNA, 25 bp, Homo sapien
tgaacaccaacaatgcggccacttc

SEQ ID NO: 4787761 - DNA, 25 bp, Homo sapien
agtatgacgtctccagaggctgtgg

SEQ ID NO: 4787762 - DNA, 25 bp, Homo sapien
tgtgctgagactgcagagtatgacg

SEQ ID NO: 4787763 - DNA, 25 bp, Homo sapien
aatgagcaccgtcccctgttcagtt

SEQ ID NO: 4787764 - DNA, 25 bp, Homo sapien
tctatcaggccatgttctgaaccaa

SEQ ID NO: 4787765 - DNA, 25 bp, Homo sapien
tcggagagagaagcactgaggattc

SEQ ID NO: 4787766 - DNA, 25 bp, Homo sapien
tccctggaccttgaatatccctgaa

SEQ ID NO: 4787767 - DNA, 25 bp, Homo sapien
gtacaactatcccttgatgaatcat

SEQ ID NO: 4787768 - DNA, 25 bp, Homo sapien
cacgagacaagtacaactatccctt

SEQ ID NO: 4787769 - DNA, 25 bp, Homo sapien
gattcccacgagacaagtacaacta

SEQ ID NO: 4787770 - DNA, 25 bp, Homo sapien
gatgaagtgattcccacgagacaag

SEQ ID NO: 4787771 - DNA, 25 bp, Homo sapien
ccatgtatggattatagcagcaacc

SEQ ID NO: 4787772 - DNA, 25 bp, Homo sapien
tctctgagtacacacccatgtatgg

SEQ ID NO: 4787773 - DNA, 25 bp, Homo sapien
tatggtctacaaattaggaattctg

SEQ ID NO: 4787774 - DNA, 25 bp, Homo sapien
ctgacccactctatacagttatggt

SEQ ID NO: 4787775 - DNA, 25 bp, Homo sapien
gcctggctgcgtttttcatctttaa

SEQ ID NO: 4787776 - DNA, 25 bp, Homo sapien
taaacatcataaaaacgcctcaaaa

SEQ ID NO: 4787777 - DNA, 25 bp, Homo sapien
tgaaatttcacacccatcagcctta

SEQ ID NO: 4787778 - DNA, 25 bp, Homo sapien
cgcctcaaaactagtttctctgaaa

SEQ ID NO: 4787779 - DNA, 25 bp, Homo sapien
cacttgctaagtactgggatctgaa

SEQ ID NO: 4787780 - DNA, 25 bp, Homo sapien
gcctaaatgcctagccctgactgaa

SEQ ID NO: 4787781 - DNA, 25 bp, Homo sapien
tatgtccccaagctgaaaaactgtc

SEQ ID NO: 4787782 - DNA, 25 bp, Homo sapien
tttacgatccggtttgtggcctaca

SEQ ID NO: 4787783 - DNA, 25 bp, Homo sapien
ccagagtcagctcccacagtccgca

SEQ ID NO: 4787784 - DNA, 25 bp, Homo sapien
ccccaaacagaggtgcgtccggcct

SEQ ID NO: 4787785 - DNA, 25 bp, Homo sapien
aacagaggtgcgtccggcctcgcct

SEQ ID NO: 4787786 - DNA, 25 bp, Homo sapien
acgcgcagccggctacccagagtca

SEQ ID NO: 4787787 - DNA, 25 bp, Homo sapien
acggcactaggcctccaaggatgga

SEQ ID NO: 4787788 - DNA, 25 bp, Homo sapien
aacgctgaagcgctgcaaagaagcc

SEQ ID NO: 4787789 - DNA, 25 bp, Homo sapien
caatgggtgcgtcaactaggcagcc

SEQ ID NO: 4787790 - DNA, 25 bp, Homo sapien
aagaagccagcgactcaatgggtgc

SEQ ID NO: 4787791 - DNA, 25 bp, Homo sapien
gcttattagggaacaaacttgctgc

SEQ ID NO: 4787792 - DNA, 25 bp, Homo sapien
agctaatattcagggcagactggcc

SEQ ID NO: 4787793 - DNA, 25 bp, Homo sapien
gactggccagctatgctagaactag

SEQ ID NO: 4787794 - DNA, 25 bp, Homo sapien
gacaatctgggacagggtcatcaag

SEQ ID NO: 4787795 - DNA, 25 bp, Homo sapien
acatattcaaaatagcttcttgtgg

SEQ ID NO: 4787796 - DNA, 25 bp, Homo sapien
aattgtccttgagacagttgggata

SEQ ID NO: 4787797 - DNA, 25 bp, Homo sapien
gtaaaatatgccaaagctaagcaca

SEQ ID NO: 4787798 - DNA, 25 bp, Homo sapien
tttaaagaacattagtgcaatgttc

SEQ ID NO: 4787799 - DNA, 25 bp, Homo sapien
cagcttcatcacatgatgttccaga

SEQ ID NO: 4787800 - DNA, 25 bp, Homo sapien
tgatgttccagagatctgaccccaa

SEQ ID NO: 4787801 - DNA, 25 bp, Homo sapien
catgatgttccagagatctgacccc

SEQ ID NO: 4787802 - DNA, 25 bp, Homo sapien
atgatgttccagagatctgacccca

SEQ ID NO: 4787803 - DNA, 25 bp, Homo sapien
tcaagttttactatccatagtgtcc

SEQ ID NO: 4787804 - DNA, 25 bp, Homo sapien
tttgtaactgagacccatccgttat

SEQ ID NO: 4787805 - DNA, 25 bp, Homo sapien
ttgtaactgagacccatccgttatt

SEQ ID NO: 4787806 - DNA, 25 bp, Homo sapien
ttttaaagtatgagtctaaaataga

SEQ ID NO: 4787807 - DNA, 25 bp, Homo sapien
tatgagtctaaaatagaaaaactac

SEQ ID NO: 4787808 - DNA, 25 bp, Homo sapien
ttaaagtatgagtctaaaatagaaa

SEQ ID NO: 4787809 - DNA, 25 bp, Homo sapien
agtatgagtctaaaatagaaaaact

SEQ ID NO: 4787810 - DNA, 25 bp, Homo sapien
agagccatcatggatcttgtcttcg

SEQ ID NO: 4787811 - DNA, 25 bp, Homo sapien
agaagttggactaagagagccatca

SEQ ID NO: 4787812 - DNA, 25 bp, Homo sapien
tggactaagagagccatcatggatc

SEQ ID NO: 4787813 - DNA, 25 bp, Homo sapien
gatcttgtcttcgtaatacacttgt

SEQ ID NO: 4787814 - DNA, 25 bp, Homo sapien
ttatgggagaccagactcggaggca

SEQ ID NO: 4787815 - DNA, 25 bp, Homo sapien
gggcacaaacccatattctctcaga

SEQ ID NO: 4787816 - DNA, 25 bp, Homo sapien
tggatttaggcacatgagctgactc

SEQ ID NO: 4787817 - DNA, 25 bp, Homo sapien
atgtctatctcatggaaccccagca

SEQ ID NO: 4787818 - DNA, 25 bp, Homo sapien
ccttctgtgggtactaacagtttat

SEQ ID NO: 4787819 - DNA, 25 bp, Homo sapien
ataaattgcccttctgtgggtacta

SEQ ID NO: 4787820 - DNA, 25 bp, Homo sapien
tttggtgaatctgctactctctggg

SEQ ID NO: 4787821 - DNA, 25 bp, Homo sapien
gttatgagagtagataataaatgat

SEQ ID NO: 4787822 - DNA, 25 bp, Homo sapien
aatactttattctgcaaagaagtct

SEQ ID NO: 4787823 - DNA, 25 bp, Homo sapien
ctggtggcatagaggaattagcttg

SEQ ID NO: 4787824 - DNA, 25 bp, Homo sapien
tttccaggagaagcataagcttgtc

SEQ ID NO: 4787825 - DNA, 25 bp, Homo sapien
aagtcttagttactgtctggagctg

SEQ ID NO: 4787826 - DNA, 25 bp, Homo sapien
attgatattatacccccaaagtagg

SEQ ID NO: 4787827 - DNA, 25 bp, Homo sapien
ccaaagtaggttatacataatacca

SEQ ID NO: 4787828 - DNA, 25 bp, Homo sapien
cagctccaggtaggtagacatgtgt

SEQ ID NO: 4787829 - DNA, 25 bp, Homo sapien
ataacagcccgcaacaaaactccat

SEQ ID NO: 4787830 - DNA, 25 bp, Homo sapien
gttttgaaaaagcttgaacactgga

SEQ ID NO: 4787831 - DNA, 25 bp, Homo sapien
ctggaagtaagctttaaaccctctg

SEQ ID NO: 4787832 - DNA, 25 bp, Homo sapien
gctttaaaccctctgcagcaaaaac

SEQ ID NO: 4787833 - DNA, 25 bp, Homo sapien
aaaagcttgaacactggaagtaagc

SEQ ID NO: 4787834 - DNA, 25 bp, Homo sapien
aggagtttccacagaccagatgcag

SEQ ID NO: 4787835 - DNA, 25 bp, Homo sapien
gggccaagtgtatatcctatctgac

SEQ ID NO: 4787836 - DNA, 25 bp, Homo sapien
tatgtctagattacgcaagggacct

SEQ ID NO: 4787837 - DNA, 25 bp, Homo sapien
tccagtaccaggaatgcacaagggt

SEQ ID NO: 4787838 - DNA, 25 bp, Homo sapien
catggcacaagagtggatgttagca

SEQ ID NO: 4787839 - DNA, 25 bp, Homo sapien
tacagatgggcctatgtggagtcct

SEQ ID NO: 4787840 - DNA, 25 bp, Homo sapien
aatctcagatgtacatgggaatgcc

SEQ ID NO: 4787841 - DNA, 25 bp, Homo sapien
tgctcttggttctagagaggcaaac

SEQ ID NO: 4787842 - DNA, 25 bp, Homo sapien
tgaattaaatcctgggaagttttca

SEQ ID NO: 4787843 - DNA, 25 bp, Homo sapien
gttgatgaattaaatcctgggaagt

SEQ ID NO: 4787844 - DNA, 25 bp, Homo sapien
tgggaagttttcagtggcccctctc

SEQ ID NO: 4787845 - DNA, 25 bp, Homo sapien
ctctagttgatgaattaaatcctgg

SEQ ID NO: 4787846 - DNA, 25 bp, Homo sapien
gactcacagagatttggcacgctat

SEQ ID NO: 4787847 - DNA, 25 bp, Homo sapien
ttgagtcccaaatcccacacagttg

SEQ ID NO: 4787848 - DNA, 25 bp, Homo sapien
tcagaatgagtaggacaggagccag

SEQ ID NO: 4787849 - DNA, 25 bp, Homo sapien
tctctagaatactgaagcaacctgc

SEQ ID NO: 4787850 - DNA, 25 bp, Homo sapien
ggacatgttccgtccatattgaaca

SEQ ID NO: 4787851 - DNA, 25 bp, Homo sapien
aaatacagagaataggccatactgg

SEQ ID NO: 4787852 - DNA, 25 bp, Homo sapien
cacttctcaatttcgcagtcagcgt

SEQ ID NO: 4787853 - DNA, 25 bp, Homo sapien
cagtcagcgtcagaggtgagcaaac

SEQ ID NO: 4787854 - DNA, 25 bp, Homo sapien
caggcttgtctggctttaatgattt

SEQ ID NO: 4787855 - DNA, 25 bp, Homo sapien
aagattatcttaaaaagcagtacat

SEQ ID NO: 4787856 - DNA, 25 bp, Homo sapien
agattatcttaaaaagcagtacatt

SEQ ID NO: 4787857 - DNA, 25 bp, Homo sapien
gattatcttaaaaagcagtacatta

SEQ ID NO: 4787858 - DNA, 25 bp, Homo sapien
ttatcttaaaaagcagtacattaaa

SEQ ID NO: 4787859 - DNA, 25 bp, Homo sapien
gccactatatgtagttttctataca

SEQ ID NO: 4787860 - DNA, 25 bp, Homo sapien
aaatttcaactctctagcttcatag

SEQ ID NO: 4787861 - DNA, 25 bp, Homo sapien
acaactgctaatctcatatcccaag

SEQ ID NO: 4787862 - DNA, 25 bp, Homo sapien
taactaatttgctcttggaaggcta

SEQ ID NO: 4787863 - DNA, 25 bp, Homo sapien
tataaagctaaaagacgtcagtccc

SEQ ID NO: 4787864 - DNA, 25 bp, Homo sapien
gcagtcagattcattcgtttcagtt

SEQ ID NO: 4787865 - DNA, 25 bp, Homo sapien
ttaatgacgactgaaatggaattgc

SEQ ID NO: 4787866 - DNA, 25 bp, Homo sapien
taataatgtaaccaagcttgccatc

SEQ ID NO: 4787867 - DNA, 25 bp, Homo sapien
taaaaacattctgcaatgtacataa

SEQ ID NO: 4787868 - DNA, 25 bp, Homo sapien
aacaggcaacaagagcataatttga

SEQ ID NO: 4787869 - DNA, 25 bp, Homo sapien
catgtcaattatttgtggtagaggg

SEQ ID NO: 4787870 - DNA, 25 bp, Homo sapien
gtagaggggagcagcaacaggcaac

SEQ ID NO: 4787871 - DNA, 25 bp, Homo sapien
ctttggaagtgaaaggtagccatac

SEQ ID NO: 4787872 - DNA, 25 bp, Homo sapien
tggctttggaagtgaaaggtagcca

SEQ ID NO: 4787873 - DNA, 25 bp, Homo sapien
ttggaagtgaaaggtagccatactt

SEQ ID NO: 4787874 - DNA, 25 bp, Homo sapien
aagtgaaaggtagccatacttctct

SEQ ID NO: 4787875 - DNA, 25 bp, Homo sapien
tgaagactttcaacagctgcatgtc

SEQ ID NO: 4787876 - DNA, 25 bp, Homo sapien
caggaatgttagtacattagttttg

SEQ ID NO: 4787877 - DNA, 25 bp, Homo sapien
gctgcatgtctaaggtacctatgct

SEQ ID NO: 4787878 - DNA, 25 bp, Homo sapien
attgtaatttggctggtgaacatga

SEQ ID NO: 4787879 - DNA, 25 bp, Homo sapien
cgttctgtttctcttggacagtgct

SEQ ID NO: 4787880 - DNA, 25 bp, Homo sapien
gaagaagaactgttactaagagtga

SEQ ID NO: 4787881 - DNA, 25 bp, Homo sapien
gtgcctagcctaggaaatttcaaat

SEQ ID NO: 4787882 - DNA, 25 bp, Homo sapien
acagtgctgatctagaagaagaact

SEQ ID NO: 4787883 - DNA, 25 bp, Homo sapien
tcaacaatagtcataacaggagtca

SEQ ID NO: 4787884 - DNA, 25 bp, Homo sapien
caagttatgcagagcagaactaagg

SEQ ID NO: 4787885 - DNA, 25 bp, Homo sapien
ccaatcacaggaggcaagttatgca

SEQ ID NO: 4787886 - DNA, 25 bp, Homo sapien
aagtatgcctggtagtttgccaatc

SEQ ID NO: 4787887 - DNA, 25 bp, Homo sapien
ccgatttagaaactgcgagcatctc

SEQ ID NO: 4787888 - DNA, 25 bp, Homo sapien
agaaccatatccatttcagatgatg

SEQ ID NO: 4787889 - DNA, 25 bp, Homo sapien
gccatagcccatgtttacaagaatg

SEQ ID NO: 4787890 - DNA, 25 bp, Homo sapien
tgatgaactcactggcctagggaca

SEQ ID NO: 4787891 - DNA, 25 bp, Homo sapien
cacagtgcacgtggaacacgtttac

SEQ ID NO: 4787892 - DNA, 25 bp, Homo sapien
gaatggctgcagctattagtaaagc

SEQ ID NO: 4787893 - DNA, 25 bp, Homo sapien
tctggtaaagaggagaatcagctgg

SEQ ID NO: 4787894 - DNA, 25 bp, Homo sapien
cagctggccaggattgatgccatat

SEQ ID NO: 4787895 - DNA, 25 bp, Homo sapien
taacaggacacacagtacaatggaa

SEQ ID NO: 4787896 - DNA, 25 bp, Homo sapien
aataacaggacacacagtacaatgg

SEQ ID NO: 4787897 - DNA, 25 bp, Homo sapien
gcaagctttgacactacagaagcca

SEQ ID NO: 4787898 - DNA, 25 bp, Homo sapien
gccttcctatacattgtatggcact

SEQ ID NO: 4787899 - DNA, 25 bp, Homo sapien
gtacaacaaactttactgcttggat

SEQ ID NO: 4787900 - DNA, 25 bp, Homo sapien
ggttacgacaagaattcatttgcag

SEQ ID NO: 4787901 - DNA, 25 bp, Homo sapien
catttgcagttgaggtttggcatta

SEQ ID NO: 4787902 - DNA, 25 bp, Homo sapien
cttggatactaaaataaaggaggat

SEQ ID NO: 4787903 - DNA, 25 bp, Homo sapien
tagcaattttactagatggatgcaa

SEQ ID NO: 4787904 - DNA, 25 bp, Homo sapien
tcttccttcaaacacgtcattgatt

SEQ ID NO: 4787905 - DNA, 25 bp, Homo sapien
aaatacatctaggttttctttagca

SEQ ID NO: 4787906 - DNA, 25 bp, Homo sapien
tctcagcagtgttgacatgtcacta

SEQ ID NO: 4787907 - DNA, 25 bp, Homo sapien
tgttataacactcagataggacaca

SEQ ID NO: 4787908 - DNA, 25 bp, Homo sapien
cacacaacttgttataacactcaga

SEQ ID NO: 4787909 - DNA, 25 bp, Homo sapien
aaaccatttataccttccatccaca

SEQ ID NO: 4787910 - DNA, 25 bp, Homo sapien
ggacacaatacagaaggagcaatct

SEQ ID NO: 4787911 - DNA, 25 bp, Homo sapien
gatatgtgtcgtaacaatcgacagg

SEQ ID NO: 4787912 - DNA, 25 bp, Homo sapien
aatgtctcctctgcatgtatacagg

SEQ ID NO: 4787913 - DNA, 25 bp, Homo sapien
gttatttccagaggttctgtcccag

SEQ ID NO: 4787914 - DNA, 25 bp, Homo sapien
tctgtcccagatatgtgtcgtaaca

SEQ ID NO: 4787915 - DNA, 25 bp, Homo sapien
ggtctcacagctaaactatgtcaga

SEQ ID NO: 4787916 - DNA, 25 bp, Homo sapien
tggtcaccaacagattctctgggaa

SEQ ID NO: 4787917 - DNA, 25 bp, Homo sapien
gagttactacaagctacatgttcta

SEQ ID NO: 4787918 - DNA, 25 bp, Homo sapien
ggaaagacctagtagtgcccacata

SEQ ID NO: 4787919 - DNA, 25 bp, Homo sapien
tattttaatagatctgctgccagct

SEQ ID NO: 4787920 - DNA, 25 bp, Homo sapien
caggcatattcagccaaagcttcta

SEQ ID NO: 4787921 - DNA, 25 bp, Homo sapien
cagcatggtattttaatagatctgc

SEQ ID NO: 4787922 - DNA, 25 bp, Homo sapien
tctgttcagagagtttacaggcata

SEQ ID NO: 4787923 - DNA, 25 bp, Homo sapien
aaattaacaataggataccctctgc

SEQ ID NO: 4787924 - DNA, 25 bp, Homo sapien
aaaaagattttgtttcaccagcagg

SEQ ID NO: 4787925 - DNA, 25 bp, Homo sapien
cactttccgtggaaactaaatgcca

SEQ ID NO: 4787926 - DNA, 25 bp, Homo sapien
tacagactacgaaacagctccacag

SEQ ID NO: 4787927 - DNA, 25 bp, Homo sapien
taagttcattaagactgtgactgat

SEQ ID NO: 4787928 - DNA, 25 bp, Homo sapien
tcttcagcgatgctttttgttttct

SEQ ID NO: 4787929 - DNA, 25 bp, Homo sapien
tcttaagttcattaagactgtgact

SEQ ID NO: 4787930 - DNA, 25 bp, Homo sapien
ctgagttccagttcttcagcgatgc

SEQ ID NO: 4787931 - DNA, 25 bp, Homo sapien
tacatgtaatgttaccgcatctctt

SEQ ID NO: 4787932 - DNA, 25 bp, Homo sapien
aattttaatactattctgtgaacta

SEQ ID NO: 4787933 - DNA, 25 bp, Homo sapien
caatgctaactacaaatagatgaac

SEQ ID NO: 4787934 - DNA, 25 bp, Homo sapien
ctatggattatattgaaaggtgaac

SEQ ID NO: 4787935 - DNA, 25 bp, Homo sapien
tctcgcctgagttgacagttccaag

SEQ ID NO: 4787936 - DNA, 25 bp, Homo sapien
gtaaagtcctccatacgctccaaga

SEQ ID NO: 4787937 - DNA, 25 bp, Homo sapien
tcatggctggtgtaggcagaatcag

SEQ ID NO: 4787938 - DNA, 25 bp, Homo sapien
caagatgcgttctctgtgctcatgg

SEQ ID NO: 4787939 - DNA, 25 bp, Homo sapien
tatgggctgattcgcagttaggatg

SEQ ID NO: 4787940 - DNA, 25 bp, Homo sapien
ccaatgccactttcatacggtcaaa

SEQ ID NO: 4787941 - DNA, 25 bp, Homo sapien
tttcaatgaccttatccaatgccac

SEQ ID NO: 4787942 - DNA, 25 bp, Homo sapien
tccattcggtttacagtcagtcaca

SEQ ID NO: 4787943 - DNA, 25 bp, Homo sapien
aaaatctcctgggtccctggctcac

SEQ ID NO: 4787944 - DNA, 25 bp, Homo sapien
gggtccctggctcactcagctgctt

SEQ ID NO: 4787945 - DNA, 25 bp, Homo sapien
tcctgggtccctggctcactcagct

SEQ ID NO: 4787946 - DNA, 25 bp, Homo sapien
ctgggtccctggctcactcagctgc

SEQ ID NO: 4787947 - DNA, 25 bp, Homo sapien
caagaactgccctagctgctgccat

SEQ ID NO: 4787948 - DNA, 25 bp, Homo sapien
tcattgtacacttttcaagaactgc

SEQ ID NO: 4787949 - DNA, 25 bp, Homo sapien
cacttttcaagaactgccctagctg

SEQ ID NO: 4787950 - DNA, 25 bp, Homo sapien
tgtacacttttcaagaactgcccta

SEQ ID NO: 4787951 - DNA, 25 bp, Homo sapien
tttctctagtctttccatagttgcg

SEQ ID NO: 4787952 - DNA, 25 bp, Homo sapien
ctagtctttccatagttgcgagaac

SEQ ID NO: 4787953 - DNA, 25 bp, Homo sapien
tctccactcagatgtgcaaactcca

SEQ ID NO: 4787954 - DNA, 25 bp, Homo sapien
tggacaaactcttgaaagctattca

SEQ ID NO: 4787955 - DNA, 25 bp, Homo sapien
gtagttgtggataattatcatttcc

SEQ ID NO: 4787956 - DNA, 25 bp, Homo sapien
ttattcagtaacatttagggactct

SEQ ID NO: 4787957 - DNA, 25 bp, Homo sapien
ttgagattattcagtaacatttagg

SEQ ID NO: 4787958 - DNA, 25 bp, Homo sapien
aattttgtagttgtggataattatc

SEQ ID NO: 4787959 - DNA, 25 bp, Homo sapien
ttcatcgacacacaagccaagcaat

SEQ ID NO: 4787960 - DNA, 25 bp, Homo sapien
taagcaacgctcagacatgcatagc

SEQ ID NO: 4787961 - DNA, 25 bp, Homo sapien
gatcagtgtgtcaatgtatcctgca

SEQ ID NO: 4787962 - DNA, 25 bp, Homo sapien
caagtgcattcaacgtacagatgat

SEQ ID NO: 4787963 - DNA, 25 bp, Homo sapien
aaagcactttgaacaacacagaaag

SEQ ID NO: 4787964 - DNA, 25 bp, Homo sapien
aaaagcactttgaacaacacagaaa

SEQ ID NO: 4787965 - DNA, 25 bp, Homo sapien
tctgtaaaaattgtgatctgcccat

SEQ ID NO: 4787966 - DNA, 25 bp, Homo sapien
aatgactactcggtctgccagcaac

SEQ ID NO: 4787967 - DNA, 25 bp, Homo sapien
tgaagaaagaagtaatcttgcagcc

SEQ ID NO: 4787968 - DNA, 25 bp, Homo sapien
ccagatggttcaagttggttatgtc

SEQ ID NO: 4787969 - DNA, 25 bp, Homo sapien
taaaatctagacttctctctaacct

SEQ ID NO: 4787970 - DNA, 25 bp, Homo sapien
gggagaaagttaaacaggcatacaa

SEQ ID NO: 4787971 - DNA, 25 bp, Homo sapien
acaggcatacaaattaaaatctaga

SEQ ID NO: 4787972 - DNA, 25 bp, Homo sapien
ttaaaatctagacttctctctaacc

SEQ ID NO: 4787973 - DNA, 25 bp, Homo sapien
ttccagtggtaatgcaaactacaca

SEQ ID NO: 4787974 - DNA, 25 bp, Homo sapien
tcctgccctacaagacagtaagaga

SEQ ID NO: 4787975 - DNA, 25 bp, Homo sapien
taaaacccgagcagtaagcaggtgc

SEQ ID NO: 4787976 - DNA, 25 bp, Homo sapien
gctttaggccccaagggatgacatc

SEQ ID NO: 4787977 - DNA, 25 bp, Homo sapien
aatcccagttttcattggctatagc

SEQ ID NO: 4787978 - DNA, 25 bp, Homo sapien
tgtcctacacgctgaattgcttgca

SEQ ID NO: 4787979 - DNA, 25 bp, Homo sapien
ggctatagcttctcctactttaaca

SEQ ID NO: 4787980 - DNA, 25 bp, Homo sapien
tctttatgattaataagcgtggtga

SEQ ID NO: 4787981 - DNA, 25 bp, Homo sapien
ctgagggcagttatctggggcatgc

SEQ ID NO: 4787982 - DNA, 25 bp, Homo sapien
gggcagttatctggggcatgcagtt

SEQ ID NO: 4787983 - DNA, 25 bp, Homo sapien
ggcatacagttccagaggccctcca

SEQ ID NO: 4787984 - DNA, 25 bp, Homo sapien
ttccagaggccctccagatctttca

SEQ ID NO: 4787985 - DNA, 25 bp, Homo sapien
ctcagctgtgaccctgaacaaggct

SEQ ID NO: 4787986 - DNA, 25 bp, Homo sapien
tcagctgtgaccctgaacaaggctt

SEQ ID NO: 4787987 - DNA, 25 bp, Homo sapien
gctgtgaccctgaacaaggctttaa

SEQ ID NO: 4787988 - DNA, 25 bp, Homo sapien
cagctgtgaccctgaacaaggcttt

SEQ ID NO: 4787989 - DNA, 25 bp, Homo sapien
caaaacggtgtgcatctggattaac

SEQ ID NO: 4787990 - DNA, 25 bp, Homo sapien
aaaactcagggcgtcggttagctga

SEQ ID NO: 4787991 - DNA, 25 bp, Homo sapien
caggctgcgaactggtgacaaagtc

SEQ ID NO: 4787992 - DNA, 25 bp, Homo sapien
gctgattggcaaatacagtaacgca

SEQ ID NO: 4787993 - DNA, 25 bp, Homo sapien
gtccggtcgtgcgagcggcggccgc

SEQ ID NO: 4787994 - DNA, 25 bp, Homo sapien
ggctgcctcccgtccggtcgtgcga

SEQ ID NO: 4787995 - DNA, 25 bp, Homo sapien
acaagaacgccgcagtgccggcgcg

SEQ ID NO: 4787996 - DNA, 25 bp, Homo sapien
ccacacaggcggtccgacaagaacg

SEQ ID NO: 4787997 - DNA, 25 bp, Homo sapien
cgaagagccggagccgtagactgct

SEQ ID NO: 4787998 - DNA, 25 bp, Homo sapien
gctccaccgagcgagttttgatctc

SEQ ID NO: 4787999 - DNA, 25 bp, Homo sapien
agaaaccagcgggagtagcgtctgc

SEQ ID NO: 4788000 - DNA, 25 bp, Homo sapien
ctccagtcccgagtcgagggcgaag

SEQ ID NO: 4788001 - DNA, 25 bp, Homo sapien
ccctcggtctatcccgcagccggga

SEQ ID NO: 4788002 - DNA, 25 bp, Homo sapien
ggccctcggtctatcccgcagccgg

SEQ ID NO: 4788003 - DNA, 25 bp, Homo sapien
ctcggtctatcccgcagccgggact

SEQ ID NO: 4788004 - DNA, 25 bp, Homo sapien
gccctcggtctatcccgcagccggg

SEQ ID NO: 4788005 - DNA, 25 bp, Homo sapien
tcagcccacccgcccgaggcggcgg

SEQ ID NO: 4788006 - DNA, 25 bp, Homo sapien
ctgccgccagtcagcccacccgccc

SEQ ID NO: 4788007 - DNA, 25 bp, Homo sapien
tgccgccagtcagcccacccgcccg

SEQ ID NO: 4788008 - DNA, 25 bp, Homo sapien
cgccagtcagcccacccgcccgagg

SEQ ID NO: 4788009 - DNA, 25 bp, Homo sapien
aaatcagctctgaattcccgcaaag

SEQ ID NO: 4788010 - DNA, 25 bp, Homo sapien
aaagcttcccgtcctctcgataggt

SEQ ID NO: 4788011 - DNA, 25 bp, Homo sapien
ggtagaccaaaaccagaatcaagtc

SEQ ID NO: 4788012 - DNA, 25 bp, Homo sapien
ttggacagacaagcgtccccagcaa

SEQ ID NO: 4788013 - DNA, 25 bp, Homo sapien
ccttgacctctttaaggcgcccagt

SEQ ID NO: 4788014 - DNA, 25 bp, Homo sapien
aaggcgcccagtgtccacttcctgg

SEQ ID NO: 4788015 - DNA, 25 bp, Homo sapien
tccttacctatcacaaggccacctt

SEQ ID NO: 4788016 - DNA, 25 bp, Homo sapien
ctggacacaccttcccttacgaagt

SEQ ID NO: 4788017 - DNA, 25 bp, Homo sapien
cagtaggttgtcaaagcaagttagc

SEQ ID NO: 4788018 - DNA, 25 bp, Homo sapien
ggttgtcaaagcaagttagctaaga

SEQ ID NO: 4788019 - DNA, 25 bp, Homo sapien
caaagcaagttagctaagaaacagc

SEQ ID NO: 4788020 - DNA, 25 bp, Homo sapien
tcaaagcaagttagctaagaaacag

SEQ ID NO: 4788021 - DNA, 25 bp, Homo sapien
taagcaattacaactctatatcaaa

SEQ ID NO: 4788022 - DNA, 25 bp, Homo sapien
gaacccagggatgatacattttcaa

SEQ ID NO: 4788023 - DNA, 25 bp, Homo sapien
ttttacttttgaattgcctccttca

SEQ ID NO: 4788024 - DNA, 25 bp, Homo sapien
cagagggtatttattgtattcgaat

SEQ ID NO: 4788025 - DNA, 25 bp, Homo sapien
aatgagagttacatctgctgggtct

SEQ ID NO: 4788026 - DNA, 25 bp, Homo sapien
tacaatgagagttacatctgctggg

SEQ ID NO: 4788027 - DNA, 25 bp, Homo sapien
gatggctacaatgagagttacatct

SEQ ID NO: 4788028 - DNA, 25 bp, Homo sapien
tggctacaatgagagttacatctgc

SEQ ID NO: 4788029 - DNA, 25 bp, Homo sapien
gatcatagctgtgaagcactctggg

SEQ ID NO: 4788030 - DNA, 25 bp, Homo sapien
caacgtacggtctgttcctgaagaa

SEQ ID NO: 4788031 - DNA, 25 bp, Homo sapien
gaatgcttctttctggctcggaggg

SEQ ID NO: 4788032 - DNA, 25 bp, Homo sapien
tctctagaaagtgacaggaccacct

SEQ ID NO: 4788033 - DNA, 25 bp, Homo sapien
tttcacttcaacgtggtcagccaag

SEQ ID NO: 4788034 - DNA, 25 bp, Homo sapien
gcaacaccaatctcgtaacactggg

SEQ ID NO: 4788035 - DNA, 25 bp, Homo sapien
gcagaatctgcacacaacggagtca

SEQ ID NO: 4788036 - DNA, 25 bp, Homo sapien
tgatctggctaagagcaagaggcct

SEQ ID NO: 4788037 - DNA, 25 bp, Homo sapien
aagcagcccgcagcaagttctctct

SEQ ID NO: 4788038 - DNA, 25 bp, Homo sapien
caacagttaagtgagcaaaccacca

SEQ ID NO: 4788039 - DNA, 25 bp, Homo sapien
aaaatttcaagccagggtaccagtg

SEQ ID NO: 4788040 - DNA, 25 bp, Homo sapien
cattctgtatgtaaggccaggaggc

SEQ ID NO: 4788041 - DNA, 25 bp, Homo sapien
aactcgctgtcaaatttgaacttcc

SEQ ID NO: 4788042 - DNA, 25 bp, Homo sapien
ctgaactcgctgtcaaatttgaact

SEQ ID NO: 4788043 - DNA, 25 bp, Homo sapien
agctgagctgaactcgctgtcaaat

SEQ ID NO: 4788044 - DNA, 25 bp, Homo sapien
gagctgaactcgctgtcaaatttga

SEQ ID NO: 4788045 - DNA, 25 bp, Homo sapien
tcaacctactgaagatttcagatct

SEQ ID NO: 4788046 - DNA, 25 bp, Homo sapien
gatcttcagaaatgtcacggaaagt

SEQ ID NO: 4788047 - DNA, 25 bp, Homo sapien
atcttcagaaatgtcacggaaagtc

SEQ ID NO: 4788048 - DNA, 25 bp, Homo sapien
gatctatccaaaggactgtttcccc

SEQ ID NO: 4788049 - DNA, 25 bp, Homo sapien
caatcttttggagccctaatgagat

SEQ ID NO: 4788050 - DNA, 25 bp, Homo sapien
tcaaagtctgctagttgttgctcat

SEQ ID NO: 4788051 - DNA, 25 bp, Homo sapien
tacacatgaccacgtgactacgctt

SEQ ID NO: 4788052 - DNA, 25 bp, Homo sapien
gtgtatctacagaactctactgaag

SEQ ID NO: 4788053 - DNA, 25 bp, Homo sapien
aaccaacaacctgaagcaagcttag

SEQ ID NO: 4788054 - DNA, 25 bp, Homo sapien
tctactgaagtaacactgatcttga

SEQ ID NO: 4788055 - DNA, 25 bp, Homo sapien
tctctctaggtatgtagggtgttag

SEQ ID NO: 4788056 - DNA, 25 bp, Homo sapien
tactgtattgacactattttctgaa

SEQ ID NO: 4788057 - DNA, 25 bp, Homo sapien
gctcataaaactataactctctacg

SEQ ID NO: 4788058 - DNA, 25 bp, Homo sapien
ctctacgttagaaacaaatactgta

SEQ ID NO: 4788059 - DNA, 25 bp, Homo sapien
gaggcatagctctaactaataagta

SEQ ID NO: 4788060 - DNA, 25 bp, Homo sapien
tagctggctccccagcactgagtgt

SEQ ID NO: 4788061 - DNA, 25 bp, Homo sapien
tgtgtatttcctacaccggcaccag

SEQ ID NO: 4788062 - DNA, 25 bp, Homo sapien
cactgagtgtgtatttcctacaccg

SEQ ID NO: 4788063 - DNA, 25 bp, Homo sapien
gtatttcctacaccggcaccagcat

SEQ ID NO: 4788064 - DNA, 25 bp, Homo sapien
tcaagttagcaagtgcattctgttg

SEQ ID NO: 4788065 - DNA, 25 bp, Homo sapien
ttgatttcgagcaccgctggcttct

SEQ ID NO: 4788066 - DNA, 25 bp, Homo sapien
tagcaagtgcattctgttgatttcg

SEQ ID NO: 4788067 - DNA, 25 bp, Homo sapien
gcattctgttgatttcgagcaccgc

SEQ ID NO: 4788068 - DNA, 25 bp, Homo sapien
atttacttagtgtcttctgcaacct

SEQ ID NO: 4788069 - DNA, 25 bp, Homo sapien
tctgcaacctttatcacagcattgg

SEQ ID NO: 4788070 - DNA, 25 bp, Homo sapien
aactctgccaacgatttgtatttac

SEQ ID NO: 4788071 - DNA, 25 bp, Homo sapien
tatcctgacaagtctggatgaagct

SEQ ID NO: 4788072 - DNA, 25 bp, Homo sapien
cgtgggaactgaattcgtgggactc

SEQ ID NO: 4788073 - DNA, 25 bp, Homo sapien
tgggaactgaattcgtgggactcac

SEQ ID NO: 4788074 - DNA, 25 bp, Homo sapien
ctggtttggcgtgggaactgaattc

SEQ ID NO: 4788075 - DNA, 25 bp, Homo sapien
catggggtctggtttggcgtgggaa

SEQ ID NO: 4788076 - DNA, 25 bp, Homo sapien
cttccaggcctaggtagtatgctcc

SEQ ID NO: 4788077 - DNA, 25 bp, Homo sapien
gcatggcactatagatattggaagc

SEQ ID NO: 4788078 - DNA, 25 bp, Homo sapien
caagcctgtcaggtaaggatggcca

SEQ ID NO: 4788079 - DNA, 25 bp, Homo sapien
ggaccgatgattgctccttccaggc

SEQ ID NO: 4788080 - DNA, 25 bp, Homo sapien
ttgtgggaacacaaaaggctatttc

SEQ ID NO: 4788081 - DNA, 25 bp, Homo sapien
ggaaatgcctggatgattcactaat

SEQ ID NO: 4788082 - DNA, 25 bp, Homo sapien
cactgaaaattcctactaccagttc

SEQ ID NO: 4788083 - DNA, 25 bp, Homo sapien
cagttcttttgtatacccccaggag

SEQ ID NO: 4788084 - DNA, 25 bp, Homo sapien
caggtcaagaactgcaggtactgct

SEQ ID NO: 4788085 - DNA, 25 bp, Homo sapien
agtaaaatggccttgcatcctaacc

SEQ ID NO: 4788086 - DNA, 25 bp, Homo sapien
tctacaaagtatgttggcaagagat

SEQ ID NO: 4788087 - DNA, 25 bp, Homo sapien
tgctgcccagtatgtccccaggaat

SEQ ID NO: 4788088 - DNA, 25 bp, Homo sapien
catagtatgagtcagccaggtatac

SEQ ID NO: 4788089 - DNA, 25 bp, Homo sapien
gatgccaaacatagtatgagtcagc

SEQ ID NO: 4788090 - DNA, 25 bp, Homo sapien
caaacatagtatgagtcagccaggt

SEQ ID NO: 4788091 - DNA, 25 bp, Homo sapien
tatgagtcagccaggtatacaatcc

SEQ ID NO: 4788092 - DNA, 25 bp, Homo sapien
tttgagggaagcatcaaacacccct

SEQ ID NO: 4788093 - DNA, 25 bp, Homo sapien
tggcaacccgtaagtaatctcaagg

SEQ ID NO: 4788094 - DNA, 25 bp, Homo sapien
gaagattagtaaggcagtgcagcac

SEQ ID NO: 4788095 - DNA, 25 bp, Homo sapien
tagagtgcagtattcccggagacca

SEQ ID NO: 4788096 - DNA, 25 bp, Homo sapien
tactgttaggagcaaagtgaagccc

SEQ ID NO: 4788097 - DNA, 25 bp, Homo sapien
catctgaagcacctagtaactgacc

SEQ ID NO: 4788098 - DNA, 25 bp, Homo sapien
tctgatggccactagatatgctgtc

SEQ ID NO: 4788099 - DNA, 25 bp, Homo sapien
taactgacctagtgcacagtagatg

SEQ ID NO: 4788100 - DNA, 25 bp, Homo sapien
cataatgcttttgagcttcaccaac

SEQ ID NO: 4788101 - DNA, 25 bp, Homo sapien
tagtgcgtgccattagttatatgcc

SEQ ID NO: 4788102 - DNA, 25 bp, Homo sapien
gtctggctggttgcggtagttcaca

SEQ ID NO: 4788103 - DNA, 25 bp, Homo sapien
cctgtaatcctaacgctgtcagagg

SEQ ID NO: 4788104 - DNA, 25 bp, Homo sapien
aaaactttccggtatgctacctgca

SEQ ID NO: 4788105 - DNA, 25 bp, Homo sapien
tcatttagttgtaaatacgaccaca

SEQ ID NO: 4788106 - DNA, 25 bp, Homo sapien
ttagttgtaaatacgaccacacttg

SEQ ID NO: 4788107 - DNA, 25 bp, Homo sapien
gttgtaaatacgaccacacttggac

SEQ ID NO: 4788108 - DNA, 25 bp, Homo sapien
tgtaaatacgaccacacttggacta

SEQ ID NO: 4788109 - DNA, 25 bp, Homo sapien
ccttttggtagctcagatggacgtg

SEQ ID NO: 4788110 - DNA, 25 bp, Homo sapien
taaaggtgtgaatatccatgcctcc

SEQ ID NO: 4788111 - DNA, 25 bp, Homo sapien
tcttgcaaacatcacgatagacgtg

SEQ ID NO: 4788112 - DNA, 25 bp, Homo sapien
gaaggtaggccatcgtgcatccaat

SEQ ID NO: 4788113 - DNA, 25 bp, Homo sapien
cagctccacagggtgtcatatagca

SEQ ID NO: 4788114 - DNA, 25 bp, Homo sapien
tcttgattaatctgccctggaaacc

SEQ ID NO: 4788115 - DNA, 25 bp, Homo sapien
tgagctgcttacgtggaattcttcc

SEQ ID NO: 4788116 - DNA, 25 bp, Homo sapien
aatttagcagttttcgaagcatcac

SEQ ID NO: 4788117 - DNA, 25 bp, Homo sapien
aatgagaatcgcatggcatacacac

SEQ ID NO: 4788118 - DNA, 25 bp, Homo sapien
gtaccgatgggaagcatgttcactt

SEQ ID NO: 4788119 - DNA, 25 bp, Homo sapien
actgtcttatctaattcatcaggac

SEQ ID NO: 4788120 - DNA, 25 bp, Homo sapien
aattggaaggtaccgatgggaagca

SEQ ID NO: 4788121 - DNA, 25 bp, Homo sapien
tgcattgaggccgtgacaacatgca

SEQ ID NO: 4788122 - DNA, 25 bp, Homo sapien
gccgtgacaacatgcaacttagtaa

SEQ ID NO: 4788123 - DNA, 25 bp, Homo sapien
tcacacacactaaattgcattgagg

SEQ ID NO: 4788124 - DNA, 25 bp, Homo sapien
cacacacactaaattgcattgaggc

SEQ ID NO: 4788125 - DNA, 25 bp, Homo sapien
gactgatttcctcatatcgctgtag

SEQ ID NO: 4788126 - DNA, 25 bp, Homo sapien
aaccagctcctcttgaaagaaggca

SEQ ID NO: 4788127 - DNA, 25 bp, Homo sapien
ttagtgtatgcactcccaagaaggg

SEQ ID NO: 4788128 - DNA, 25 bp, Homo sapien
tcaatcagctgaacctaggtgtgac

SEQ ID NO: 4788129 - DNA, 25 bp, Homo sapien
tacccaggccttgctagtaggaaaa

SEQ ID NO: 4788130 - DNA, 25 bp, Homo sapien
ggaatctttatagatggcccctgtg

SEQ ID NO: 4788131 - DNA, 25 bp, Homo sapien
caagagatgcttaagaccacctggt

SEQ ID NO: 4788132 - DNA, 25 bp, Homo sapien
cagccaatcgcggaaacaaggtatt

SEQ ID NO: 4788133 - DNA, 25 bp, Homo sapien
ccacttcactggcttgtagtactca

SEQ ID NO: 4788134 - DNA, 25 bp, Homo sapien
tagataaaatagtgtggtcaggaaa

SEQ ID NO: 4788135 - DNA, 25 bp, Homo sapien
gatagtggagtcaggcttatcaccc

SEQ ID NO: 4788136 - DNA, 25 bp, Homo sapien
gtactcatcactggaacttaataga

SEQ ID NO: 4788137 - DNA, 25 bp, Homo sapien
cccgctgtagaagaggatggtcaag

SEQ ID NO: 4788138 - DNA, 25 bp, Homo sapien
tgaacagcaggctcacattccggct

SEQ ID NO: 4788139 - DNA, 25 bp, Homo sapien
taacgatccacagagactccaagat

SEQ ID NO: 4788140 - DNA, 25 bp, Homo sapien
tgagaagggctgtcccgctgtagaa

SEQ ID NO: 4788141 - DNA, 25 bp, Homo sapien
tttgtgccttccagagtgtgttaca

SEQ ID NO: 4788142 - DNA, 25 bp, Homo sapien
agtccagaatgtctcccagccagct

SEQ ID NO: 4788143 - DNA, 25 bp, Homo sapien
atgttctcgtgaacaaaggaaacaa

SEQ ID NO: 4788144 - DNA, 25 bp, Homo sapien
gctattctgacgactgacatgcaac

SEQ ID NO: 4788145 - DNA, 25 bp, Homo sapien
caaaccaagagtgatacagtctgtc

SEQ ID NO: 4788146 - DNA, 25 bp, Homo sapien
tacagtctgtcccaaagttctagta

SEQ ID NO: 4788147 - DNA, 25 bp, Homo sapien
tgtcccaaagttctagtacttgctt

SEQ ID NO: 4788148 - DNA, 25 bp, Homo sapien
agtattgttcaccttatctcctaga

SEQ ID NO: 4788149 - DNA, 25 bp, Homo sapien
tactgatacacgttgttagccgcag

SEQ ID NO: 4788150 - DNA, 25 bp, Homo sapien
gtgagttatccattctcgtccatac

SEQ ID NO: 4788151 - DNA, 25 bp, Homo sapien
ttctcgtccatactgatacacgttg

SEQ ID NO: 4788152 - DNA, 25 bp, Homo sapien
cgttgttagccgcagaattcagggc

SEQ ID NO: 4788153 - DNA, 25 bp, Homo sapien
tcatttcgtgcaaacagatgctgaa

SEQ ID NO: 4788154 - DNA, 25 bp, Homo sapien
caatgaaggtcatttcgtgcaaaca

SEQ ID NO: 4788155 - DNA, 25 bp, Homo sapien
gatgctgaaactaggccattcatct

SEQ ID NO: 4788156 - DNA, 25 bp, Homo sapien
caaacagatgctgaaactaggccat

SEQ ID NO: 4788157 - DNA, 25 bp, Homo sapien
gatttgctagagtttcattaatcaa

SEQ ID NO: 4788158 - DNA, 25 bp, Homo sapien
ttaatcaaattacttgtgacttcaa

SEQ ID NO: 4788159 - DNA, 25 bp, Homo sapien
tcaaattacttgtgacttcaatcat

SEQ ID NO: 4788160 - DNA, 25 bp, Homo sapien
tcagggtgatttgctagagtttcat

SEQ ID NO: 4788161 - DNA, 25 bp, Homo sapien
caggtctgctatcaacaaattcagt

SEQ ID NO: 4788162 - DNA, 25 bp, Homo sapien
ttcaccccgaaggagctctgttagc

SEQ ID NO: 4788163 - DNA, 25 bp, Homo sapien
gtttcactgactataaaagtattgt

SEQ ID NO: 4788164 - DNA, 25 bp, Homo sapien
ctgttagcattccatataagtgcag

SEQ ID NO: 4788165 - DNA, 25 bp, Homo sapien
gatgctacgcaaagggaccaagaag

SEQ ID NO: 4788166 - DNA, 25 bp, Homo sapien
gactatgagaagaacagacaactgg

SEQ ID NO: 4788167 - DNA, 25 bp, Homo sapien
gataaaactgagatggccaggcaaa

SEQ ID NO: 4788168 - DNA, 25 bp, Homo sapien
taggacttccaagcagagatgccac

SEQ ID NO: 4788169 - DNA, 25 bp, Homo sapien
gttcctatcactaacaaaaatatga

SEQ ID NO: 4788170 - DNA, 25 bp, Homo sapien
ctttgcagtcaggagtagggctaaa

SEQ ID NO: 4788171 - DNA, 25 bp, Homo sapien
tcaggagtagggctaaaagaagagt

SEQ ID NO: 4788172 - DNA, 25 bp, Homo sapien
gggctaaaagaagagttcctatcac

SEQ ID NO: 4788173 - DNA, 25 bp, Homo sapien
caaatacacacgactttagcaaaag

SEQ ID NO: 4788174 - DNA, 25 bp, Homo sapien
acaggcatggactaaaaaatacaga

SEQ ID NO: 4788175 - DNA, 25 bp, Homo sapien
tattgacaatccattagctgaccta

SEQ ID NO: 4788176 - DNA, 25 bp, Homo sapien
catagctaagaaaaaggcagtcgat

SEQ ID NO: 4788177 - DNA, 25 bp, Homo sapien
taattttcagtgcatgctaccaagg

SEQ ID NO: 4788178 - DNA, 25 bp, Homo sapien
caggtttctaagatatggaaggtca

SEQ ID NO: 4788179 - DNA, 25 bp, Homo sapien
cttgacgtttataagcttgtgcccc

SEQ ID NO: 4788180 - DNA, 25 bp, Homo sapien
aagggcactgtcactaagagatcaa

SEQ ID NO: 4788181 - DNA, 25 bp, Homo sapien
gatgaaccaactcccacaaagactg

SEQ ID NO: 4788182 - DNA, 25 bp, Homo sapien
caaagaaacagcaactcggagagat

SEQ ID NO: 4788183 - DNA, 25 bp, Homo sapien
tgctatctcacgaggctgatcctgt

SEQ ID NO: 4788184 - DNA, 25 bp, Homo sapien
tcacatgtggccagttaagttagct

SEQ ID NO: 4788185 - DNA, 25 bp, Homo sapien
tcaaaggagactagaatatcaggct

SEQ ID NO: 4788186 - DNA, 25 bp, Homo sapien
tgtcacaggtcatgactactatctg

SEQ ID NO: 4788187 - DNA, 25 bp, Homo sapien
ggctgagccacatttacagaactgg

SEQ ID NO: 4788188 - DNA, 25 bp, Homo sapien
caaacacctgagcaaggagatacca

SEQ ID NO: 4788189 - DNA, 25 bp, Homo sapien
agaattttccaagcccgacaatggg

SEQ ID NO: 4788190 - DNA, 25 bp, Homo sapien
cacatggtagcgtttctctaggaaa

SEQ ID NO: 4788191 - DNA, 25 bp, Homo sapien
caggaagctttctataatgccccac

SEQ ID NO: 4788192 - DNA, 25 bp, Homo sapien
gaaatccacaactccaaagtgaatg

SEQ ID NO: 4788193 - DNA, 25 bp, Homo sapien
tagggccagaaagaagtgttactca

SEQ ID NO: 4788194 - DNA, 25 bp, Homo sapien
caagctgaatactagcagggctgct

SEQ ID NO: 4788195 - DNA, 25 bp, Homo sapien
tctggccttgcaacctaaaggttca

SEQ ID NO: 4788196 - DNA, 25 bp, Homo sapien
ccaattaagaaggtggtagggccag

SEQ ID NO: 4788197 - DNA, 25 bp, Homo sapien
gacataggaaatgaggagtaatcaa

SEQ ID NO: 4788198 - DNA, 25 bp, Homo sapien
agtaatcaaatgtagaaggtactca

SEQ ID NO: 4788199 - DNA, 25 bp, Homo sapien
tttctacaatgcacctgtcagagaa

SEQ ID NO: 4788200 - DNA, 25 bp, Homo sapien
taatcaatagtgaaaaaccttgaca

SEQ ID NO: 4788201 - DNA, 25 bp, Homo sapien
cttcaaagacaagacgagatcgtac

SEQ ID NO: 4788202 - DNA, 25 bp, Homo sapien
tcaatcttcaaagacaagacgagat

SEQ ID NO: 4788203 - DNA, 25 bp, Homo sapien
aatcttcaaagacaagacgagatcg

SEQ ID NO: 4788204 - DNA, 25 bp, Homo sapien
aatcaatcttcaaagacaagacgag

SEQ ID NO: 4788205 - DNA, 25 bp, Homo sapien
tgcaatcggcactggcagcaactgc

SEQ ID NO: 4788206 - DNA, 25 bp, Homo sapien
tctaagaaacgttcctatttcaggc

SEQ ID NO: 4788207 - DNA, 25 bp, Homo sapien
cagatctgcatgacgacaatggccc

SEQ ID NO: 4788208 - DNA, 25 bp, Homo sapien
aatccacaggttcaaccagatctgc

SEQ ID NO: 4788209 - DNA, 25 bp, Homo sapien
acgttggagcggattctcccctgtc

SEQ ID NO: 4788210 - DNA, 25 bp, Homo sapien
gtggacaacgttggagcggattctc

SEQ ID NO: 4788211 - DNA, 25 bp, Homo sapien
gggaggtggacaacgttggagcgga

SEQ ID NO: 4788212 - DNA, 25 bp, Homo sapien
gacaacgttggagcggattctcccc

SEQ ID NO: 4788213 - DNA, 25 bp, Homo sapien
cattagtccacatgaggaaatggga

SEQ ID NO: 4788214 - DNA, 25 bp, Homo sapien
agaaaaacaccacacaccgcattag

SEQ ID NO: 4788215 - DNA, 25 bp, Homo sapien
gaaaaacaccacacaccgcattagt

SEQ ID NO: 4788216 - DNA, 25 bp, Homo sapien
cacacaccgcattagtccacatgag

SEQ ID NO: 4788217 - DNA, 25 bp, Homo sapien
gctggtcttcactgcttgattcata

SEQ ID NO: 4788218 - DNA, 25 bp, Homo sapien
aggctgagtggagggctggtcttca

SEQ ID NO: 4788219 - DNA, 25 bp, Homo sapien
gggctggtcttcactgcttgattca

SEQ ID NO: 4788220 - DNA, 25 bp, Homo sapien
tggagggctggtcttcactgcttga

SEQ ID NO: 4788221 - DNA, 25 bp, Homo sapien
agagtagaagctgccatggagataa

SEQ ID NO: 4788222 - DNA, 25 bp, Homo sapien
catggagataacctgccctggtaac

SEQ ID NO: 4788223 - DNA, 25 bp, Homo sapien
gaagctgccatggagataacctgcc

SEQ ID NO: 4788224 - DNA, 25 bp, Homo sapien
ggccaagtttgccagagtagaagct

SEQ ID NO: 4788225 - DNA, 25 bp, Homo sapien
tctgtccctcctctaataaatgccc

SEQ ID NO: 4788226 - DNA, 25 bp, Homo sapien
ctgtccctcctctaataaatgcccc

SEQ ID NO: 4788227 - DNA, 25 bp, Homo sapien
gtccctcctctaataaatgcccctg

SEQ ID NO: 4788228 - DNA, 25 bp, Homo sapien
tgtccctcctctaataaatgcccct

SEQ ID NO: 4788229 - DNA, 25 bp, Homo sapien
cagacatcaggaaaacaataaccag

SEQ ID NO: 4788230 - DNA, 25 bp, Homo sapien
agagggtacccacagacatcaggaa

SEQ ID NO: 4788231 - DNA, 25 bp, Homo sapien
catcaggaaaacaataaccaggaat

SEQ ID NO: 4788232 - DNA, 25 bp, Homo sapien
atagagggtacccacagacatcagg

SEQ ID NO: 4788233 - DNA, 25 bp, Homo sapien
gaaacagtcaacacatagccaacca

SEQ ID NO: 4788234 - DNA, 25 bp, Homo sapien
gcaatataatccagacaggaattga

SEQ ID NO: 4788235 - DNA, 25 bp, Homo sapien
tctcaagtagcgttcagtgcttgca

SEQ ID NO: 4788236 - DNA, 25 bp, Homo sapien
ttgaaactgctctcaagtagcgttc

SEQ ID NO: 4788237 - DNA, 25 bp, Homo sapien
taatgctatctccaaaaattgagta

SEQ ID NO: 4788238 - DNA, 25 bp, Homo sapien
gcatgtattttcatctatcaacctg

SEQ ID NO: 4788239 - DNA, 25 bp, Homo sapien
gaaactcacagattacctcattcca

SEQ ID NO: 4788240 - DNA, 25 bp, Homo sapien
gatgaacatcaatatacagtgctac

SEQ ID NO: 4788241 - DNA, 25 bp, Homo sapien
tgggcaaccccacctggccttaatc

SEQ ID NO: 4788242 - DNA, 25 bp, Homo sapien
cagcacttttggataagagcaagga

SEQ ID NO: 4788243 - DNA, 25 bp, Homo sapien
taatcagcacttttggataagagca

SEQ ID NO: 4788244 - DNA, 25 bp, Homo sapien
acctggccttaatcagcacttttgg

SEQ ID NO: 4788245 - DNA, 25 bp, Homo sapien
ccaacacctaacatatgctcgatca

SEQ ID NO: 4788246 - DNA, 25 bp, Homo sapien
gaagacgggacctgtatcttagtcc

SEQ ID NO: 4788247 - DNA, 25 bp, Homo sapien
ccaagaggtggtattgagggaacaa

SEQ ID NO: 4788248 - DNA, 25 bp, Homo sapien
actttaaacatgaaccaagaggtgg

SEQ ID NO: 4788249 - DNA, 25 bp, Homo sapien
gaattgtgtcactagattacctttg

SEQ ID NO: 4788250 - DNA, 25 bp, Homo sapien
ccacaatatagtctgagttaggaat

SEQ ID NO: 4788251 - DNA, 25 bp, Homo sapien
taatgacgtcaaggtacactgaact

SEQ ID NO: 4788252 - DNA, 25 bp, Homo sapien
gaatcaattggcattcttacgcact

SEQ ID NO: 4788253 - DNA, 25 bp, Homo sapien
aatctacgtctctccccttcacgcg

SEQ ID NO: 4788254 - DNA, 25 bp, Homo sapien
tcagctgctttactccaggcgggag

SEQ ID NO: 4788255 - DNA, 25 bp, Homo sapien
gcggtcagctgctttactccaggcg

SEQ ID NO: 4788256 - DNA, 25 bp, Homo sapien
ccttcacgcggtcagctgctttact

SEQ ID NO: 4788257 - DNA, 25 bp, Homo sapien
cctccaggatgaagtagaccagcac

SEQ ID NO: 4788258 - DNA, 25 bp, Homo sapien
ccgtagtcgacgaagcagagcggca

SEQ ID NO: 4788259 - DNA, 25 bp, Homo sapien
taatgggcttgtcgaagcgcagcgc

SEQ ID NO: 4788260 - DNA, 25 bp, Homo sapien
cccggtgttgtagaaggcctgctta

SEQ ID NO: 4788261 - DNA, 25 bp, Homo sapien
gagctccgcaggcttggcgcgtcct

SEQ ID NO: 4788262 - DNA, 25 bp, Homo sapien
gggagagctccgcaggcttggcgcg

SEQ ID NO: 4788263 - DNA, 25 bp, Homo sapien
ttggcgcgtccttagggccgccgcc

SEQ ID NO: 4788264 - DNA, 25 bp, Homo sapien
ctccgcaggcttggcgcgtccttag

SEQ ID NO: 4788265 - DNA, 25 bp, Homo sapien
cgttcctccgccacagccgcccccg

SEQ ID NO: 4788266 - DNA, 25 bp, Homo sapien
ttcctccgccacagccgcccccgag

SEQ ID NO: 4788267 - DNA, 25 bp, Homo sapien
tcctccgccacagccgcccccgagg

SEQ ID NO: 4788268 - DNA, 25 bp, Homo sapien
ctccgccacagccgcccccgagggg

SEQ ID NO: 4788269 - DNA, 25 bp, Homo sapien
taaggcatccggagaagctgcattc

SEQ ID NO: 4788270 - DNA, 25 bp, Homo sapien
tgcagcaccccattaccttagagaa

SEQ ID NO: 4788271 - DNA, 25 bp, Homo sapien
catacaattatacacggcagcaaag

SEQ ID NO: 4788272 - DNA, 25 bp, Homo sapien
ggagccagattgttccagcatatca

SEQ ID NO: 4788273 - DNA, 25 bp, Homo sapien
tgcagcctgcaagctaagaatggtc

SEQ ID NO: 4788274 - DNA, 25 bp, Homo sapien
tagaatctacttcctatggttgcgg

SEQ ID NO: 4788275 - DNA, 25 bp, Homo sapien
tagaatgcaagagcatgagatgccc

SEQ ID NO: 4788276 - DNA, 25 bp, Homo sapien
aatggtctctaaagtcctggccagc

SEQ ID NO: 4788277 - DNA, 25 bp, Homo sapien
tcaactccaggagaatgtgaaagct

SEQ ID NO: 4788278 - DNA, 25 bp, Homo sapien
catgaatctggagggtggtattaga

SEQ ID NO: 4788279 - DNA, 25 bp, Homo sapien
cttggaagcttttggtaactgtgtt

SEQ ID NO: 4788280 - DNA, 25 bp, Homo sapien
ggcagactttcacctgtgacatgaa

SEQ ID NO: 4788281 - DNA, 25 bp, Homo sapien
aatgccagagtggaaatgtctcagc

SEQ ID NO: 4788282 - DNA, 25 bp, Homo sapien
caaaatgggcagttagcacagacat

SEQ ID NO: 4788283 - DNA, 25 bp, Homo sapien
cagtgttgctcaatcataaagccca

SEQ ID NO: 4788284 - DNA, 25 bp, Homo sapien
taaagcccacgaagttggaaccagc

SEQ ID NO: 4788285 - DNA, 25 bp, Homo sapien
ggatattctaggtgaattcacttta

SEQ ID NO: 4788286 - DNA, 25 bp, Homo sapien
ttaaatggatattctaggtgaattc

SEQ ID NO: 4788287 - DNA, 25 bp, Homo sapien
tattctaggtgaattcactttatgg

SEQ ID NO: 4788288 - DNA, 25 bp, Homo sapien
taggtgaattcactttatgggtcat

SEQ ID NO: 4788289 - DNA, 25 bp, Homo sapien
ttcttctgcccaaaaggctgactgt

SEQ ID NO: 4788290 - DNA, 25 bp, Homo sapien
ggaatgctcacagtttggtctccaa

SEQ ID NO: 4788291 - DNA, 25 bp, Homo sapien
tatgtggatcataaaaaggcagtct

SEQ ID NO: 4788292 - DNA, 25 bp, Homo sapien
tccatgtaatctgttggccctgcag

SEQ ID NO: 4788293 - DNA, 25 bp, Homo sapien
cagagcaacaatcagaagcaaacaa

SEQ ID NO: 4788294 - DNA, 25 bp, Homo sapien
agatgagaaggtttgataggcagct

SEQ ID NO: 4788295 - DNA, 25 bp, Homo sapien
ggttcccatcaataggtagaaggtc

SEQ ID NO: 4788296 - DNA, 25 bp, Homo sapien
tgagaaggtttgataggcagctgat

SEQ ID NO: 4788297 - DNA, 25 bp, Homo sapien
tctatatcatgtcgagtgatagagc

SEQ ID NO: 4788298 - DNA, 25 bp, Homo sapien
acacgctctgaagccggcggtgagt

SEQ ID NO: 4788299 - DNA, 25 bp, Homo sapien
aaatactgacaacacgctctgaagc

SEQ ID NO: 4788300 - DNA, 25 bp, Homo sapien
gccggcggtgagtctatatcatgtc

SEQ ID NO: 4788301 - DNA, 25 bp, Homo sapien
gctggccccagttagcaaaaatcaa

SEQ ID NO: 4788302 - DNA, 25 bp, Homo sapien
tcctatctgctagggaagccctgcc

SEQ ID NO: 4788303 - DNA, 25 bp, Homo sapien
tcaggtccctgcttagtgtccgtgc

SEQ ID NO: 4788304 - DNA, 25 bp, Homo sapien
tacattcagtgcaaaggtctcctta

SEQ ID NO: 4788305 - DNA, 25 bp, Homo sapien
caatgaaccagcatgaccagggagc

SEQ ID NO: 4788306 - DNA, 25 bp, Homo sapien
aatgaaccagcatgaccagggagct

SEQ ID NO: 4788307 - DNA, 25 bp, Homo sapien
tcaatgaaccagcatgaccagggag

SEQ ID NO: 4788308 - DNA, 25 bp, Homo sapien
catcaatgaaccagcatgaccaggg

SEQ ID NO: 4788309 - DNA, 25 bp, Homo sapien
gcaggtgacgcgattgttctcaaaa

SEQ ID NO: 4788310 - DNA, 25 bp, Homo sapien
tctctgggaacattcacagggcgtt

SEQ ID NO: 4788311 - DNA, 25 bp, Homo sapien
tagaagtgctgtatgcggaccctgc

SEQ ID NO: 4788312 - DNA, 25 bp, Homo sapien
ggctggaccccaagcaaacagataa

SEQ ID NO: 4788313 - DNA, 25 bp, Homo sapien
tagctgaggaaatagtcacaggtct

SEQ ID NO: 4788314 - DNA, 25 bp, Homo sapien
tcttgtctgaagagaatccaactgc

SEQ ID NO: 4788315 - DNA, 25 bp, Homo sapien
tgtctgcactcagctcaaattctac

SEQ ID NO: 4788316 - DNA, 25 bp, Homo sapien
tacatcagcccctatcatccggtag

SEQ ID NO: 4788317 - DNA, 25 bp, Homo sapien
gaagagatatcgaaagagactttac

SEQ ID NO: 4788318 - DNA, 25 bp, Homo sapien
aagagatatcgaaagagactttact

SEQ ID NO: 4788319 - DNA, 25 bp, Homo sapien
ctagaagagatatcgaaagagactt

SEQ ID NO: 4788320 - DNA, 25 bp, Homo sapien
aactggcaagccctggtttgaggaa

SEQ ID NO: 4788321 - DNA, 25 bp, Homo sapien
gcagaatggtagaaagttgaagcaa

SEQ ID NO: 4788322 - DNA, 25 bp, Homo sapien
caatgggtgggacaatatacgcgca

SEQ ID NO: 4788323 - DNA, 25 bp, Homo sapien
tttgaggaacactgtattacaccat

SEQ ID NO: 4788324 - DNA, 25 bp, Homo sapien
tgtagagactcaccatgcctgagat

SEQ ID NO: 4788325 - DNA, 25 bp, Homo sapien
tagcccagcccgtcatgtcgtgata

SEQ ID NO: 4788326 - DNA, 25 bp, Homo sapien
tagaccttaagtactgaacaacagc

SEQ ID NO: 4788327 - DNA, 25 bp, Homo sapien
gggaggcccattgtccacatgactg

SEQ ID NO: 4788328 - DNA, 25 bp, Homo sapien
tctgcatatcagcaattggtgagta

SEQ ID NO: 4788329 - DNA, 25 bp, Homo sapien
aattggtgagtaggagacacctgga

SEQ ID NO: 4788330 - DNA, 25 bp, Homo sapien
cgttctgtgtcacatgagtcttctg

SEQ ID NO: 4788331 - DNA, 25 bp, Homo sapien
acagacacgttctgtgtcacatgag

SEQ ID NO: 4788332 - DNA, 25 bp, Homo sapien
gcctttaagactgaaaagcgggatg

SEQ ID NO: 4788333 - DNA, 25 bp, Homo sapien
aaagaaccatggaagaatggtcccg

SEQ ID NO: 4788334 - DNA, 25 bp, Homo sapien
catggaagaatggtcccgggcccag

SEQ ID NO: 4788335 - DNA, 25 bp, Homo sapien
tgaaaagcgggatggccgttacgaa

SEQ ID NO: 4788336 - DNA, 25 bp, Homo sapien
tttttccacagtcgtccactttgat

SEQ ID NO: 4788337 - DNA, 25 bp, Homo sapien
tttccacagtcgtccactttgattt

SEQ ID NO: 4788338 - DNA, 25 bp, Homo sapien
tccacagtcgtccactttgattttg

SEQ ID NO: 4788339 - DNA, 25 bp, Homo sapien
agtttttccacagtcgtccactttg

SEQ ID NO: 4788340 - DNA, 25 bp, Homo sapien
ccatacattgaagggtaaggctgca

SEQ ID NO: 4788341 - DNA, 25 bp, Homo sapien
caaaccatacattgaagggtaaggc

SEQ ID NO: 4788342 - DNA, 25 bp, Homo sapien
tgcatcaaaccatacattgaagggt

SEQ ID NO: 4788343 - DNA, 25 bp, Homo sapien
ccataatgcatcaaaccatacattg

SEQ ID NO: 4788344 - DNA, 25 bp, Homo sapien
aatcttttctcctaggctgtttact

SEQ ID NO: 4788345 - DNA, 25 bp, Homo sapien
tccagggtaaagtcctgccaggttg

SEQ ID NO: 4788346 - DNA, 25 bp, Homo sapien
gcatggaattctgcctgtccagggt

SEQ ID NO: 4788347 - DNA, 25 bp, Homo sapien
cactgcattagcctgttcatggcca

SEQ ID NO: 4788348 - DNA, 25 bp, Homo sapien
gaaatgcccaaacagagctgaccag

SEQ ID NO: 4788349 - DNA, 25 bp, Homo sapien
tcccggtaataatctagcctccgga

SEQ ID NO: 4788350 - DNA, 25 bp, Homo sapien
taataatctagcctccggatcaggg

SEQ ID NO: 4788351 - DNA, 25 bp, Homo sapien
atcaggggccggcacactagagagt

SEQ ID NO: 4788352 - DNA, 25 bp, Homo sapien
tcaggattcccggtaataatctagc

SEQ ID NO: 4788353 - DNA, 25 bp, Homo sapien
tggcataaaactgttccttgtattt

SEQ ID NO: 4788354 - DNA, 25 bp, Homo sapien
taaattttcgagtgtattggcataa

SEQ ID NO: 4788355 - DNA, 25 bp, Homo sapien
ctttttcaagtatacagatcagtgt

SEQ ID NO: 4788356 - DNA, 25 bp, Homo sapien
tagtaagctctaattcacataccgt

SEQ ID NO: 4788357 - DNA, 25 bp, Homo sapien
aatctctgctatgtctaaggttccc

SEQ ID NO: 4788358 - DNA, 25 bp, Homo sapien
agcgtgttttaggagtggattaaca

SEQ ID NO: 4788359 - DNA, 25 bp, Homo sapien
gtcaatttggctggccaaagtgccc

SEQ ID NO: 4788360 - DNA, 25 bp, Homo sapien
tctttaagcgtgttttaggagtgga

SEQ ID NO: 4788361 - DNA, 25 bp, Homo sapien
gcctttgagcaaagtagattgccct

SEQ ID NO: 4788362 - DNA, 25 bp, Homo sapien
ggctttgtggatcccctttactgaa

SEQ ID NO: 4788363 - DNA, 25 bp, Homo sapien
tgcagactgtggaacctgccagcct

SEQ ID NO: 4788364 - DNA, 25 bp, Homo sapien
cagatggcctttggacctgacttgc

SEQ ID NO: 4788365 - DNA, 25 bp, Homo sapien
ctccttagtcttgagacatatgtgt

SEQ ID NO: 4788366 - DNA, 25 bp, Homo sapien
aaccacccagacacaaccagctttt

SEQ ID NO: 4788367 - DNA, 25 bp, Homo sapien
tcatcacttaaattgttttggcttg

SEQ ID NO: 4788368 - DNA, 25 bp, Homo sapien
gctctgtccgttcccccatttttca

SEQ ID NO: 4788369 - DNA, 25 bp, Homo sapien
ttacatctcaactagcacccaccgg

SEQ ID NO: 4788370 - DNA, 25 bp, Homo sapien
atctcaactagcacccaccggatgg

SEQ ID NO: 4788371 - DNA, 25 bp, Homo sapien
tagcacccaccggatggtggtagaa

SEQ ID NO: 4788372 - DNA, 25 bp, Homo sapien
tcaactagcacccaccggatggtgg

SEQ ID NO: 4788373 - DNA, 25 bp, Homo sapien
tgaacaaggacatgcaacctggctt

SEQ ID NO: 4788374 - DNA, 25 bp, Homo sapien
gagtgacagattccgccacatggct

SEQ ID NO: 4788375 - DNA, 25 bp, Homo sapien
cacatttaagtcacctggcagcact

SEQ ID NO: 4788376 - DNA, 25 bp, Homo sapien
gctttcagaaacagacgggcttcgg

SEQ ID NO: 4788377 - DNA, 25 bp, Homo sapien
aggtagcgcaggtcgtagaactccc

SEQ ID NO: 4788378 - DNA, 25 bp, Homo sapien
cctcctccgacaggtagcgcaggtc

SEQ ID NO: 4788379 - DNA, 25 bp, Homo sapien
taggaggagtcgtggcgcggcaccg

SEQ ID NO: 4788380 - DNA, 25 bp, Homo sapien
ccccgcgaaggtgccgtaggaggag

SEQ ID NO: 4788381 - DNA, 25 bp, Homo sapien
acgcccagacccccgggtgctgccg

SEQ ID NO: 4788382 - DNA, 25 bp, Homo sapien
gcagcgacgcccagacccccgggtg

SEQ ID NO: 4788383 - DNA, 25 bp, Homo sapien
gcgacgcccagacccccgggtgctg

SEQ ID NO: 4788384 - DNA, 25 bp, Homo sapien
cgcccagacccccgggtgctgccgg

SEQ ID NO: 4788385 - DNA, 25 bp, Homo sapien
ctgagcctccgccgaggccaccagc

SEQ ID NO: 4788386 - DNA, 25 bp, Homo sapien
ccaccagcacgcgcccgcgcagccg

SEQ ID NO: 4788387 - DNA, 25 bp, Homo sapien
cgaggccaccagcacgcgcccgcgc

SEQ ID NO: 4788388 - DNA, 25 bp, Homo sapien
actgagcctccgccgaggccaccag

SEQ ID NO: 4788389 - DNA, 25 bp, Homo sapien
tgagtaaccgatttgcccaggcttc

SEQ ID NO: 4788390 - DNA, 25 bp, Homo sapien
tgtgattgtggcagttccttagaaa

SEQ ID NO: 4788391 - DNA, 25 bp, Homo sapien
caggcttctgactgtctagtatata

SEQ ID NO: 4788392 - DNA, 25 bp, Homo sapien
taaaaactcccaaaatcattgctgc

SEQ ID NO: 4788393 - DNA, 25 bp, Homo sapien
ttagtggtcgccaggtgatgccagg

SEQ ID NO: 4788394 - DNA, 25 bp, Homo sapien
gactggataagccaaatatggtata

SEQ ID NO: 4788395 - DNA, 25 bp, Homo sapien
gaatcagtagtgactgctaacagac

SEQ ID NO: 4788396 - DNA, 25 bp, Homo sapien
tatctatcaactgacgcaactgatg

SEQ ID NO: 4788397 - DNA, 25 bp, Homo sapien
ttttactggttagaggtgagctgcc

SEQ ID NO: 4788398 - DNA, 25 bp, Homo sapien
tgcaagtgggatcttctgaatgccc

SEQ ID NO: 4788399 - DNA, 25 bp, Homo sapien
ggcaaataaccaggacaactgctga

SEQ ID NO: 4788400 - DNA, 25 bp, Homo sapien
ggaatctgcatcctacagtttggag

SEQ ID NO: 4788401 - DNA, 25 bp, Homo sapien
tgggttggcaagaagtgacagcccc

SEQ ID NO: 4788402 - DNA, 25 bp, Homo sapien
tggaggtttccatcagcgagcagga

SEQ ID NO: 4788403 - DNA, 25 bp, Homo sapien
gacagccccatattgtacgggaaca

SEQ ID NO: 4788404 - DNA, 25 bp, Homo sapien
caaacagtcaaagctcggtgcaagt

SEQ ID NO: 4788405 - DNA, 25 bp, Homo sapien
cccgaagaaagaagacggacagaag

SEQ ID NO: 4788406 - DNA, 25 bp, Homo sapien
cgaagaaagaagacggacagaaggc

SEQ ID NO: 4788407 - DNA, 25 bp, Homo sapien
gaagaaagaagacggacagaaggca

SEQ ID NO: 4788408 - DNA, 25 bp, Homo sapien
aagcccgaagaaagaagacggacag

SEQ ID NO: 4788409 - DNA, 25 bp, Homo sapien
catcttccaggtgacaaggggagaa

SEQ ID NO: 4788410 - DNA, 25 bp, Homo sapien
gccatcttccaggtgacaaggggag

SEQ ID NO: 4788411 - DNA, 25 bp, Homo sapien
tcttccaggtgacaaggggagaatt

SEQ ID NO: 4788412 - DNA, 25 bp, Homo sapien
atgccatcttccaggtgacaagggg

SEQ ID NO: 4788413 - DNA, 25 bp, Homo sapien
cacagttcggtcatcaacagtcttt

SEQ ID NO: 4788414 - DNA, 25 bp, Homo sapien
tcacagttcggtcatcaacagtctt

SEQ ID NO: 4788415 - DNA, 25 bp, Homo sapien
cggtcatcaacagtcttttcatcat

SEQ ID NO: 4788416 - DNA, 25 bp, Homo sapien
agttcggtcatcaacagtcttttca

SEQ ID NO: 4788417 - DNA, 25 bp, Homo sapien
tggtgtaaatggtctgcactgtgga

SEQ ID NO: 4788418 - DNA, 25 bp, Homo sapien
gagacggtctctgtcaaaggcctca

SEQ ID NO: 4788419 - DNA, 25 bp, Homo sapien
tggctgccagagaaacaggtttccg

SEQ ID NO: 4788420 - DNA, 25 bp, Homo sapien
gccaggacagcactgtaatttactg

SEQ ID NO: 4788421 - DNA, 25 bp, Homo sapien
caggaaacgggttcattgtatcaac

SEQ ID NO: 4788422 - DNA, 25 bp, Homo sapien
aaagtatcaggaaacgggttcattg

SEQ ID NO: 4788423 - DNA, 25 bp, Homo sapien
cgggttcattgtatcaaccgggaat

SEQ ID NO: 4788424 - DNA, 25 bp, Homo sapien
tcattgtatcaaccgggaatgtttt

SEQ ID NO: 4788425 - DNA, 25 bp, Homo sapien
cctgaggtggcttctgatgacttct

SEQ ID NO: 4788426 - DNA, 25 bp, Homo sapien
gcttggctttccaggcctgactcat

SEQ ID NO: 4788427 - DNA, 25 bp, Homo sapien
gataatgagggagtcagagttgcct

SEQ ID NO: 4788428 - DNA, 25 bp, Homo sapien
gacagcctggagtctcgtgttccta

SEQ ID NO: 4788429 - DNA, 25 bp, Homo sapien
gaaaaaggccagacgaacagctgat

SEQ ID NO: 4788430 - DNA, 25 bp, Homo sapien
ctgtagtactgagctagtctgaaaa

SEQ ID NO: 4788431 - DNA, 25 bp, Homo sapien
gacgaacagctgatcaggtagtggt

SEQ ID NO: 4788432 - DNA, 25 bp, Homo sapien
gtactgagctagtctgaaaaaggcc

SEQ ID NO: 4788433 - DNA, 25 bp, Homo sapien
acatgcaaactccagtggtctcttc

SEQ ID NO: 4788434 - DNA, 25 bp, Homo sapien
cagcctcgttttgattggagggtac

SEQ ID NO: 4788435 - DNA, 25 bp, Homo sapien
agggtacatgcaaactccagtggtc

SEQ ID NO: 4788436 - DNA, 25 bp, Homo sapien
cctcgttttgattggagggtacatg

SEQ ID NO: 4788437 - DNA, 25 bp, Homo sapien
tggaggagaacagcgagagtgggca

SEQ ID NO: 4788438 - DNA, 25 bp, Homo sapien
gtggaggagaacagcgagagtgggc

SEQ ID NO: 4788439 - DNA, 25 bp, Homo sapien
agagtggaggagaacagcgagagtg

SEQ ID NO: 4788440 - DNA, 25 bp, Homo sapien
gaggagaacagcgagagtgggcaca

SEQ ID NO: 4788441 - DNA, 25 bp, Homo sapien
tcttggtggaacgttgctgaatgaa

SEQ ID NO: 4788442 - DNA, 25 bp, Homo sapien
gctgaatgaaggcaagatctccagt

SEQ ID NO: 4788443 - DNA, 25 bp, Homo sapien
tacgctggttctgatagtgtcttgg

SEQ ID NO: 4788444 - DNA, 25 bp, Homo sapien
tgaatgaaggcaagatctccagttc

SEQ ID NO: 4788445 - DNA, 25 bp, Homo sapien
ggaagttctgacattcatgcccgta

SEQ ID NO: 4788446 - DNA, 25 bp, Homo sapien
cactgcctgtgtgatgagtagcaca

SEQ ID NO: 4788447 - DNA, 25 bp, Homo sapien
taagcttgggaaatgactacatgga

SEQ ID NO: 4788448 - DNA, 25 bp, Homo sapien
gggcctcaggagtctcatccagtag

SEQ ID NO: 4788449 - DNA, 25 bp, Homo sapien
accagggcatctgacccgctttgag

SEQ ID NO: 4788450 - DNA, 25 bp, Homo sapien
agcaactctgaggaccaaacctggg

SEQ ID NO: 4788451 - DNA, 25 bp, Homo sapien
cccagactgagaccagggcatctga

SEQ ID NO: 4788452 - DNA, 25 bp, Homo sapien
tctgacccgctttgagggagggtac

SEQ ID NO: 4788453 - DNA, 25 bp, Homo sapien
caacaggtaggagggctgctgcttg

SEQ ID NO: 4788454 - DNA, 25 bp, Homo sapien
ggagggctgctgcttgcatttctga

SEQ ID NO: 4788455 - DNA, 25 bp, Homo sapien
ggtaggagggctgctgcttgcattt

SEQ ID NO: 4788456 - DNA, 25 bp, Homo sapien
agggctgctgcttgcatttctgatg

SEQ ID NO: 4788457 - DNA, 25 bp, Homo sapien
tgcaggagtcccacaagggctgcca

SEQ ID NO: 4788458 - DNA, 25 bp, Homo sapien
gcaggagtcccacaagggctgccat

SEQ ID NO: 4788459 - DNA, 25 bp, Homo sapien
aggagtcccacaagggctgccatcc

SEQ ID NO: 4788460 - DNA, 25 bp, Homo sapien
ctgcaggagtcccacaagggctgcc

SEQ ID NO: 4788461 - DNA, 25 bp, Homo sapien
tggatcgtcggaagcaacagcaaga

SEQ ID NO: 4788462 - DNA, 25 bp, Homo sapien
ccagtgcttcagaccagatggatcg

SEQ ID NO: 4788463 - DNA, 25 bp, Homo sapien
gacctgtatgcagaggatggaagat

SEQ ID NO: 4788464 - DNA, 25 bp, Homo sapien
atgcagggcgcagtccaggaagcca

SEQ ID NO: 4788465 - DNA, 25 bp, Homo sapien
catcagaagatcacccggctccagg

SEQ ID NO: 4788466 - DNA, 25 bp, Homo sapien
aatccatcagaagatcacccggctc

SEQ ID NO: 4788467 - DNA, 25 bp, Homo sapien
aaatccatcagaagatcacccggct

SEQ ID NO: 4788468 - DNA, 25 bp, Homo sapien
tccatcagaagatcacccggctcca

SEQ ID NO: 4788469 - DNA, 25 bp, Homo sapien
gaagcagagaacctcgatcttggcc

SEQ ID NO: 4788470 - DNA, 25 bp, Homo sapien
gccagtcgctggctgagcactccag

SEQ ID NO: 4788471 - DNA, 25 bp, Homo sapien
acaaagttgtacagggggctccaca

SEQ ID NO: 4788472 - DNA, 25 bp, Homo sapien
gatgccaataggtggaggtgatcta

SEQ ID NO: 4788473 - DNA, 25 bp, Homo sapien
actttaacctccactgaacctgacg

SEQ ID NO: 4788474 - DNA, 25 bp, Homo sapien
cctggaccattattcttcagctgtc

SEQ ID NO: 4788475 - DNA, 25 bp, Homo sapien
tcaggcatccagtttgcatgagcac

SEQ ID NO: 4788476 - DNA, 25 bp, Homo sapien
tcaccaggaattgtgatccctgaag

SEQ ID NO: 4788477 - DNA, 25 bp, Homo sapien
ctgacattctggaccttgggggacg

SEQ ID NO: 4788478 - DNA, 25 bp, Homo sapien
ccttctgacttgtgaggcgagctga

SEQ ID NO: 4788479 - DNA, 25 bp, Homo sapien
tggcggccgttgtggtgtttgtggt

SEQ ID NO: 4788480 - DNA, 25 bp, Homo sapien
acattctggaccttgggggacggca

SEQ ID NO: 4788481 - DNA, 25 bp, Homo sapien
aagctctgctcattacaataataaa

SEQ ID NO: 4788482 - DNA, 25 bp, Homo sapien
tctgctcattacaataataaacagg

SEQ ID NO: 4788483 - DNA, 25 bp, Homo sapien
gaagctctgctcattacaataataa

SEQ ID NO: 4788484 - DNA, 25 bp, Homo sapien
gctctgctcattacaataataaaca

SEQ ID NO: 4788485 - DNA, 25 bp, Homo sapien
gcatgtccaccttgcgcagggggac

SEQ ID NO: 4788486 - DNA, 25 bp, Homo sapien
catgtccaccttgcgcagggggacc

SEQ ID NO: 4788487 - DNA, 25 bp, Homo sapien
tccaccttgcgcagggggaccatgc

SEQ ID NO: 4788488 - DNA, 25 bp, Homo sapien
tgtccaccttgcgcagggggaccat

SEQ ID NO: 4788489 - DNA, 25 bp, Homo sapien
actatactgtcttgttaacttcctc

SEQ ID NO: 4788490 - DNA, 25 bp, Homo sapien
gggcagtttccacacgaataggaat

SEQ ID NO: 4788491 - DNA, 25 bp, Homo sapien
cttgatttccggcttttccacagct

SEQ ID NO: 4788492 - DNA, 25 bp, Homo sapien
taacttcctcactcggggaggcttg

SEQ ID NO: 4788493 - DNA, 25 bp, Homo sapien
ctagcgtcctgaagactggatttct

SEQ ID NO: 4788494 - DNA, 25 bp, Homo sapien
cttacactagcgtcctgaagactgg

SEQ ID NO: 4788495 - DNA, 25 bp, Homo sapien
gatatttacaaacggtgattcctcc

SEQ ID NO: 4788496 - DNA, 25 bp, Homo sapien
gactggatttcttattgatatttac

SEQ ID NO: 4788497 - DNA, 25 bp, Homo sapien
tccgcaacaggggaaggcaaaagtg

SEQ ID NO: 4788498 - DNA, 25 bp, Homo sapien
gaatgttacacttcacatgatccgc

SEQ ID NO: 4788499 - DNA, 25 bp, Homo sapien
ccaactgggctttcagaatgttaca

SEQ ID NO: 4788500 - DNA, 25 bp, Homo sapien
tgttcactcgggaagcattttccaa

SEQ ID NO: 4788501 - DNA, 25 bp, Homo sapien
gcttctttagatgggcagcggcttc

SEQ ID NO: 4788502 - DNA, 25 bp, Homo sapien
ttccagcttctttagatgggcagcg

SEQ ID NO: 4788503 - DNA, 25 bp, Homo sapien
cagttccagcttctttagatgggca

SEQ ID NO: 4788504 - DNA, 25 bp, Homo sapien
tttatgttgatgtgcagaggaggcc

SEQ ID NO: 4788505 - DNA, 25 bp, Homo sapien
gggaaaagggacacttgccagcgcc

SEQ ID NO: 4788506 - DNA, 25 bp, Homo sapien
cagctctcatgccttcagtatgcat

SEQ ID NO: 4788507 - DNA, 25 bp, Homo sapien
agggacacttgccagcgcccgattc

SEQ ID NO: 4788508 - DNA, 25 bp, Homo sapien
gcgcccgattcccagcaccctttct

SEQ ID NO: 4788509 - DNA, 25 bp, Homo sapien
ggacctcagaggcccctctttgttc

SEQ ID NO: 4788510 - DNA, 25 bp, Homo sapien
gacctcagaggcccctctttgttct

SEQ ID NO: 4788511 - DNA, 25 bp, Homo sapien
aaccggtccgagctgctaagcactg

SEQ ID NO: 4788512 - DNA, 25 bp, Homo sapien
aatgccaaaaggcaaccggtccgag

SEQ ID NO: 4788513 - DNA, 25 bp, Homo sapien
gctgcggtgaggaacggtgtgcccc

SEQ ID NO: 4788514 - DNA, 25 bp, Homo sapien
gtgaggaacggtgtgcccccattct

SEQ ID NO: 4788515 - DNA, 25 bp, Homo sapien
cacctagactcttgtaacagattcc

SEQ ID NO: 4788516 - DNA, 25 bp, Homo sapien
acaactaggattgccccatttgaag

SEQ ID NO: 4788517 - DNA, 25 bp, Homo sapien
catttgaaggccgtgtcatctccca

SEQ ID NO: 4788518 - DNA, 25 bp, Homo sapien
tcctccacagagtaattgccagagt

SEQ ID NO: 4788519 - DNA, 25 bp, Homo sapien
aaatgacattcactaggttgcgcat

SEQ ID NO: 4788520 - DNA, 25 bp, Homo sapien
acaatgtaaatgacattcactaggt

SEQ ID NO: 4788521 - DNA, 25 bp, Homo sapien
atgtaaatgacattcactaggttgc

SEQ ID NO: 4788522 - DNA, 25 bp, Homo sapien
gtaaatgacattcactaggttgcgc

SEQ ID NO: 4788523 - DNA, 25 bp, Homo sapien
aagtagccaggacaaacacgtacct

SEQ ID NO: 4788524 - DNA, 25 bp, Homo sapien
cagctgctgtgcctataagatccac

SEQ ID NO: 4788525 - DNA, 25 bp, Homo sapien
cacagataagggtttggatgccttc

SEQ ID NO: 4788526 - DNA, 25 bp, Homo sapien
tgccccagatgaagaaaggcatcag

SEQ ID NO: 4788527 - DNA, 25 bp, Homo sapien
agagtttataggtagtcagctccac

SEQ ID NO: 4788528 - DNA, 25 bp, Homo sapien
tcagctccactgtgcaaggtatgca

SEQ ID NO: 4788529 - DNA, 25 bp, Homo sapien
taccaacagactagggcaacaacca

SEQ ID NO: 4788530 - DNA, 25 bp, Homo sapien
gcacatacactgagcatcagaacgt

SEQ ID NO: 4788531 - DNA, 25 bp, Homo sapien
caggccacactagggaaactggacc

SEQ ID NO: 4788532 - DNA, 25 bp, Homo sapien
catacttgagcagcaaattcgatca

SEQ ID NO: 4788533 - DNA, 25 bp, Homo sapien
tctacgacaggaatatatgctgagc

SEQ ID NO: 4788534 - DNA, 25 bp, Homo sapien
tgaaatcacgcaagttagcagcacc

SEQ ID NO: 4788535 - DNA, 25 bp, Homo sapien
aaatgataaacatagactttgactc

SEQ ID NO: 4788536 - DNA, 25 bp, Homo sapien
tctggttttatttgctcccattaat

SEQ ID NO: 4788537 - DNA, 25 bp, Homo sapien
caaagaacatcaggaacatagtaaa

SEQ ID NO: 4788538 - DNA, 25 bp, Homo sapien
ttaaataacaaagaacatcaggaac

SEQ ID NO: 4788539 - DNA, 25 bp, Homo sapien
tttcaggactactccttaaagacac

SEQ ID NO: 4788540 - DNA, 25 bp, Homo sapien
gacaagctatagtggttttatcttc

SEQ ID NO: 4788541 - DNA, 25 bp, Homo sapien
aagacactcgtccaaacacatccat

SEQ ID NO: 4788542 - DNA, 25 bp, Homo sapien
cacttttcatggaatgcaatgaaac

SEQ ID NO: 4788543 - DNA, 25 bp, Homo sapien
ggccgatgctttccaatgcgacctg

SEQ ID NO: 4788544 - DNA, 25 bp, Homo sapien
caaagtgcagtcatgagtttatctc

SEQ ID NO: 4788545 - DNA, 25 bp, Homo sapien
gatacatcatactttgcatccctcc

SEQ ID NO: 4788546 - DNA, 25 bp, Homo sapien
ggttctggtcgtggacataatcaaa

SEQ ID NO: 4788547 - DNA, 25 bp, Homo sapien
gttttgtttgcagagcgaatggtta

SEQ ID NO: 4788548 - DNA, 25 bp, Homo sapien
gcaagggtctgtctatggtcaagtc

SEQ ID NO: 4788549 - DNA, 25 bp, Homo sapien
gggtctgtctatggtcaagtcatca

SEQ ID NO: 4788550 - DNA, 25 bp, Homo sapien
tcaaagggtgtctcatgggtcaagt

SEQ ID NO: 4788551 - DNA, 25 bp, Homo sapien
catgggtcaagtccgtctggagaaa

SEQ ID NO: 4788552 - DNA, 25 bp, Homo sapien
ctgggatggatattaggatgatatt

SEQ ID NO: 4788553 - DNA, 25 bp, Homo sapien
gctgggatggatattaggatgatat

SEQ ID NO: 4788554 - DNA, 25 bp, Homo sapien
tgggatggatattaggatgatattg

SEQ ID NO: 4788555 - DNA, 25 bp, Homo sapien
taagattggcaaggtccaaaggacc

SEQ ID NO: 4788556 - DNA, 25 bp, Homo sapien
gttttgatcacatagacaggcccag

SEQ ID NO: 4788557 - DNA, 25 bp, Homo sapien
aagattcaagaaccctggccgggca

SEQ ID NO: 4788558 - DNA, 25 bp, Homo sapien
cactacaggctatgcggagagggca

SEQ ID NO: 4788559 - DNA, 25 bp, Homo sapien
caggccctggttggccgtcctgaga

SEQ ID NO: 4788560 - DNA, 25 bp, Homo sapien
agcaagacgccagccatagaaacgt

SEQ ID NO: 4788561 - DNA, 25 bp, Homo sapien
gtcctgagaaacagcaagacgccag

SEQ ID NO: 4788562 - DNA, 25 bp, Homo sapien
gccatagaaacgtacctgtgctcct

SEQ ID NO: 4788563 - DNA, 25 bp, Homo sapien
ctggtaattatggacttctggattt

SEQ ID NO: 4788564 - DNA, 25 bp, Homo sapien
gagctcacaaacagaaacagtagga

SEQ ID NO: 4788565 - DNA, 25 bp, Homo sapien
taggaaatattccagaatgcagtct

SEQ ID NO: 4788566 - DNA, 25 bp, Homo sapien
gcaactttcacttgtccttttagag

SEQ ID NO: 4788567 - DNA, 25 bp, Homo sapien
ggaaaaccccagacagcaactttca

SEQ ID NO: 4788568 - DNA, 25 bp, Homo sapien
tcacagcaccggcaccagaagctcc

SEQ ID NO: 4788569 - DNA, 25 bp, Homo sapien
cattgctgggagacctcacagcacc

SEQ ID NO: 4788570 - DNA, 25 bp, Homo sapien
gcagggggaggcaccgatccctcct

SEQ ID NO: 4788571 - DNA, 25 bp, Homo sapien
ggaggcaccgatccctcctgagcat

SEQ ID NO: 4788572 - DNA, 25 bp, Homo sapien
cacgacaaggctatgaggtcaacaa

SEQ ID NO: 4788573 - DNA, 25 bp, Homo sapien
tgcctaacagagagttgggaaacct

SEQ ID NO: 4788574 - DNA, 25 bp, Homo sapien
ggagccagggctagaatcaacatct

SEQ ID NO: 4788575 - DNA, 25 bp, Homo sapien
ccaacttggctcttagagggactga

SEQ ID NO: 4788576 - DNA, 25 bp, Homo sapien
gagcacaatttcatccacggctccc

SEQ ID NO: 4788577 - DNA, 25 bp, Homo sapien
agcacaatttcatccacggctccca

SEQ ID NO: 4788578 - DNA, 25 bp, Homo sapien
agagcaattgaacagctgcgaacag

SEQ ID NO: 4788579 - DNA, 25 bp, Homo sapien
ctgtgaagagcaattgaacagctgc

SEQ ID NO: 4788580 - DNA, 25 bp, Homo sapien
cagctgcgaacagcagttattagct

SEQ ID NO: 4788581 - DNA, 25 bp, Homo sapien
tgcgaacagcagttattagctcatt

SEQ ID NO: 4788582 - DNA, 25 bp, Homo sapien
caagagcggtatatgccgggcagac

SEQ ID NO: 4788583 - DNA, 25 bp, Homo sapien
gagaattaaaagcaagacaccccga

SEQ ID NO: 4788584 - DNA, 25 bp, Homo sapien
taggaaggcctaagtctccagagct

SEQ ID NO: 4788585 - DNA, 25 bp, Homo sapien
taaaaacaagctatatgggtcccac

SEQ ID NO: 4788586 - DNA, 25 bp, Homo sapien
gctgggctgctatcactgggttgct

SEQ ID NO: 4788587 - DNA, 25 bp, Homo sapien
tgggctgctatcactgggttgcttg

SEQ ID NO: 4788588 - DNA, 25 bp, Homo sapien
agctgggctgctatcactgggttgc

SEQ ID NO: 4788589 - DNA, 25 bp, Homo sapien
cagagctgggctgctatcactgggt

SEQ ID NO: 4788590 - DNA, 25 bp, Homo sapien
gaactgcatggtggctacttctcct

SEQ ID NO: 4788591 - DNA, 25 bp, Homo sapien
taatggccatgcgagacttctacca

SEQ ID NO: 4788592 - DNA, 25 bp, Homo sapien
tgggaatgaggtacagcttagccgc

SEQ ID NO: 4788593 - DNA, 25 bp, Homo sapien
tcaagaagttccctgtctagagaca

SEQ ID NO: 4788594 - DNA, 25 bp, Homo sapien
ggaacgcactgctatcttgagacag

SEQ ID NO: 4788595 - DNA, 25 bp, Homo sapien
tggacaactctgaaccagtggacta

SEQ ID NO: 4788596 - DNA, 25 bp, Homo sapien
gaacagagagcgttctggccccttc

SEQ ID NO: 4788597 - DNA, 25 bp, Homo sapien
gaaaattgttccttacactgagcta

SEQ ID NO: 4788598 - DNA, 25 bp, Homo sapien
tggtggggaacacaaagttacagat

SEQ ID NO: 4788599 - DNA, 25 bp, Homo sapien
ccatggaggcccactaagtcctgag

SEQ ID NO: 4788600 - DNA, 25 bp, Homo sapien
gaaaaatgcatggagtggccacaag

SEQ ID NO: 4788601 - DNA, 25 bp, Homo sapien
cacaaggaaatcatgtacagaaggg

SEQ ID NO: 4788602 - DNA, 25 bp, Homo sapien
gcctggctaaatttaagggtgagga

SEQ ID NO: 4788603 - DNA, 25 bp, Homo sapien
taagggtgaggaaagtttggactga

SEQ ID NO: 4788604 - DNA, 25 bp, Homo sapien
tccctgtgatattcctgaggtaccg

SEQ ID NO: 4788605 - DNA, 25 bp, Homo sapien
tgtgggacttgagccgaatatctaa

SEQ ID NO: 4788606 - DNA, 25 bp, Homo sapien
tcagaattccagttagcatgggcct

SEQ ID NO: 4788607 - DNA, 25 bp, Homo sapien
tgtacttgtacgtggtcagaattcc

SEQ ID NO: 4788608 - DNA, 25 bp, Homo sapien
ctttgaacgttgaatgtctccggga

SEQ ID NO: 4788609 - DNA, 25 bp, Homo sapien
gataacgtttactaggcttcctctc

SEQ ID NO: 4788610 - DNA, 25 bp, Homo sapien
tcctctcaaaggtgctggttcttcg

SEQ ID NO: 4788611 - DNA, 25 bp, Homo sapien
gttcttcgtaacctggagccatgtg

SEQ ID NO: 4788612 - DNA, 25 bp, Homo sapien
tgtctaaccggaacacaaacgtgtg

SEQ ID NO: 4788613 - DNA, 25 bp, Homo sapien
caaaggtgtttgcaggtcctggcac

SEQ ID NO: 4788614 - DNA, 25 bp, Homo sapien
gaagaatgcgtggtgctcaactgca

SEQ ID NO: 4788615 - DNA, 25 bp, Homo sapien
gcccagcctgataaagtcggatcta

SEQ ID NO: 4788616 - DNA, 25 bp, Homo sapien
tcctcgaccaccacgagtgtcaatt

SEQ ID NO: 4788617 - DNA, 25 bp, Homo sapien
ccacgagtgtcaatttgctcttttt

SEQ ID NO: 4788618 - DNA, 25 bp, Homo sapien
tgatcatcatcctcgaccaccacga

SEQ ID NO: 4788619 - DNA, 25 bp, Homo sapien
tcgaccaccacgagtgtcaatttgc

SEQ ID NO: 4788620 - DNA, 25 bp, Homo sapien
ctagtcagacagaaagcattttaaa

SEQ ID NO: 4788621 - DNA, 25 bp, Homo sapien
acagaaagcattttaaaagcacaat

SEQ ID NO: 4788622 - DNA, 25 bp, Homo sapien
aaagcattttaaaagcacaatctgc

SEQ ID NO: 4788623 - DNA, 25 bp, Homo sapien
gaaagcattttaaaagcacaatctg

SEQ ID NO: 4788624 - DNA, 25 bp, Homo sapien
taagcctattttgttagctccttca

SEQ ID NO: 4788625 - DNA, 25 bp, Homo sapien
tgcctgtcggggtcagtccaagaga

SEQ ID NO: 4788626 - DNA, 25 bp, Homo sapien
tcagtccaagagaatattcacagcc

SEQ ID NO: 4788627 - DNA, 25 bp, Homo sapien
ccttcaaagattaatatgcctgtcg

SEQ ID NO: 4788628 - DNA, 25 bp, Homo sapien
tgacaacgtgcatgtctaccccata

SEQ ID NO: 4788629 - DNA, 25 bp, Homo sapien
ccagccacttcgctttattcagata

SEQ ID NO: 4788630 - DNA, 25 bp, Homo sapien
cagataggagagttccgcctgggca

SEQ ID NO: 4788631 - DNA, 25 bp, Homo sapien
gcatgtctaccccatacatttccag

SEQ ID NO: 4788632 - DNA, 25 bp, Homo sapien
gttctggaagctcgcactccccaag

SEQ ID NO: 4788633 - DNA, 25 bp, Homo sapien
cttctgtctgatttggaatgaaccg

SEQ ID NO: 4788634 - DNA, 25 bp, Homo sapien
tatcaaattccattgcttctgtctg

SEQ ID NO: 4788635 - DNA, 25 bp, Homo sapien
gaaactcagacacaagctctggtgt

SEQ ID NO: 4788636 - DNA, 25 bp, Homo sapien
caactcaggaggcatcgaggacaac

SEQ ID NO: 4788637 - DNA, 25 bp, Homo sapien
aggaggcatcgaggacaaccacagc

SEQ ID NO: 4788638 - DNA, 25 bp, Homo sapien
actcaggaggcatcgaggacaacca

SEQ ID NO: 4788639 - DNA, 25 bp, Homo sapien
gcatcgaggacaaccacagcaagac

SEQ ID NO: 4788640 - DNA, 25 bp, Homo sapien
cttgtagacagagagcagctaattc

SEQ ID NO: 4788641 - DNA, 25 bp, Homo sapien
cagctgtttcataagggcatttcaa

SEQ ID NO: 4788642 - DNA, 25 bp, Homo sapien
gagagcagctaattccacagctgtt

SEQ ID NO: 4788643 - DNA, 25 bp, Homo sapien
acagctgtttcataagggcatttca

SEQ ID NO: 4788644 - DNA, 25 bp, Homo sapien
tgtcatgcctgagttgtaaaacaaa

SEQ ID NO: 4788645 - DNA, 25 bp, Homo sapien
gaatgtcatgcctgagttgtaaaac

SEQ ID NO: 4788646 - DNA, 25 bp, Homo sapien
catgcctgagttgtaaaacaaacag

SEQ ID NO: 4788647 - DNA, 25 bp, Homo sapien
gaaagaatgtcatgcctgagttgta

SEQ ID NO: 4788648 - DNA, 25 bp, Homo sapien
tgctccctacctacggaaacagaat

SEQ ID NO: 4788649 - DNA, 25 bp, Homo sapien
gaatcctacacacaagagtggcccc

SEQ ID NO: 4788650 - DNA, 25 bp, Homo sapien
caggaggatgtaggcatcagaacca

SEQ ID NO: 4788651 - DNA, 25 bp, Homo sapien
ggaatctgagctgttcaaaagcttc

SEQ ID NO: 4788652 - DNA, 25 bp, Homo sapien
tgaagaatagtatttaactcgaaag

SEQ ID NO: 4788653 - DNA, 25 bp, Homo sapien
ctcgaaagtgtaaagcataagcagg

SEQ ID NO: 4788654 - DNA, 25 bp, Homo sapien
aagtgtaaagcataagcaggtccaa

SEQ ID NO: 4788655 - DNA, 25 bp, Homo sapien
cttgtaaactcctcacgaaggttgt

SEQ ID NO: 4788656 - DNA, 25 bp, Homo sapien
catctgcttttttatgggtttggca

SEQ ID NO: 4788657 - DNA, 25 bp, Homo sapien
ttttatgggtttggcatgatccagc

SEQ ID NO: 4788658 - DNA, 25 bp, Homo sapien
tgggtttggcatgatccagccagtg

SEQ ID NO: 4788659 - DNA, 25 bp, Homo sapien
tcatctgcttttttatgggtttggc

SEQ ID NO: 4788660 - DNA, 25 bp, Homo sapien
ccaggcgtggttcttttcagggagc

SEQ ID NO: 4788661 - DNA, 25 bp, Homo sapien
tattcaagccgtatagccaagtgga

SEQ ID NO: 4788662 - DNA, 25 bp, Homo sapien
tgggaacaccattgcttgaaggagg

SEQ ID NO: 4788663 - DNA, 25 bp, Homo sapien
tcagggcgagaactgggtaaacagc

SEQ ID NO: 4788664 - DNA, 25 bp, Homo sapien
tcccacaggcaaggcgggccttaca

SEQ ID NO: 4788665 - DNA, 25 bp, Homo sapien
tccaatcagctaactgtaccttctt

SEQ ID NO: 4788666 - DNA, 25 bp, Homo sapien
tcagctaactgtaccttcttagcat

SEQ ID NO: 4788667 - DNA, 25 bp, Homo sapien
gcgggccttacaggttccaatcagc

SEQ ID NO: 4788668 - DNA, 25 bp, Homo sapien
agagttggatgctggaaaggcctga

SEQ ID NO: 4788669 - DNA, 25 bp, Homo sapien
tcctgctgtgaacacccctcctgct

SEQ ID NO: 4788670 - DNA, 25 bp, Homo sapien
gctgcacagtgacagggcactggcg

SEQ ID NO: 4788671 - DNA, 25 bp, Homo sapien
tgggaaagccgcctgtatcctgctg

SEQ ID NO: 4788672 - DNA, 25 bp, Homo sapien
cagaccgtggctctctccagcaacg

SEQ ID NO: 4788673 - DNA, 25 bp, Homo sapien
tgctgaacctgtgatcggtgctgat

SEQ ID NO: 4788674 - DNA, 25 bp, Homo sapien
gtggctctctccagcaacgcctggc

SEQ ID NO: 4788675 - DNA, 25 bp, Homo sapien
acctgtgatcggtgctgatgccaga

SEQ ID NO: 4788676 - DNA, 25 bp, Homo sapien
tctgtttccacaaggtccaagtggt

SEQ ID NO: 4788677 - DNA, 25 bp, Homo sapien
aacctgggcagagtcgaggaactgg

SEQ ID NO: 4788678 - DNA, 25 bp, Homo sapien
aaggtccaagtggtacacaatctga

SEQ ID NO: 4788679 - DNA, 25 bp, Homo sapien
ggaactggaggccaaagtaatctgt

SEQ ID NO: 4788680 - DNA, 25 bp, Homo sapien
ctggaagacaattgggaagatgaaa

SEQ ID NO: 4788681 - DNA, 25 bp, Homo sapien
agatgaaaaaacttagggtgagaca

SEQ ID NO: 4788682 - DNA, 25 bp, Homo sapien
gaagatgaaaaaacttagggtgaga

SEQ ID NO: 4788683 - DNA, 25 bp, Homo sapien
caattgggaagatgaaaaaacttag

SEQ ID NO: 4788684 - DNA, 25 bp, Homo sapien
gctgggggataggtatcatctttac

SEQ ID NO: 4788685 - DNA, 25 bp, Homo sapien
aatatatctgtaactgcccctccca

SEQ ID NO: 4788686 - DNA, 25 bp, Homo sapien
ttttaaatatatctgtaactgcccc

SEQ ID NO: 4788687 - DNA, 25 bp, Homo sapien
cccaagtatgttctttgtttgctac

SEQ ID NO: 4788688 - DNA, 25 bp, Homo sapien
cagcttcaagaataatctggttaaa

SEQ ID NO: 4788689 - DNA, 25 bp, Homo sapien
cagtgggttaccaggtagaatgaag

SEQ ID NO: 4788690 - DNA, 25 bp, Homo sapien
gttaaattatgagggctggaatgga

SEQ ID NO: 4788691 - DNA, 25 bp, Homo sapien
ttaccaggtagaatgaagacaaggt

SEQ ID NO: 4788692 - DNA, 25 bp, Homo sapien
ctgtccgatggtaacttcaaaccca

SEQ ID NO: 4788693 - DNA, 25 bp, Homo sapien
tgtccgatggtaacttcaaacccag

SEQ ID NO: 4788694 - DNA, 25 bp, Homo sapien
cgatggtaacttcaaacccaggcat

SEQ ID NO: 4788695 - DNA, 25 bp, Homo sapien
tccgatggtaacttcaaacccaggc

SEQ ID NO: 4788696 - DNA, 25 bp, Homo sapien
cgagttaataaacgacatgttacag

SEQ ID NO: 4788697 - DNA, 25 bp, Homo sapien
gagctcattccctgaagcgagttaa

SEQ ID NO: 4788698 - DNA, 25 bp, Homo sapien
aatggatgcaactgtaactatctgg

SEQ ID NO: 4788699 - DNA, 25 bp, Homo sapien
aaacttacctatgtggaagagctca

SEQ ID NO: 4788700 - DNA, 25 bp, Homo sapien
taaagctaaatacctctggacttca

SEQ ID NO: 4788701 - DNA, 25 bp, Homo sapien
tcccatagctctagaatactgaggt

SEQ ID NO: 4788702 - DNA, 25 bp, Homo sapien
ccaggagcgtctttaattaagagga

SEQ ID NO: 4788703 - DNA, 25 bp, Homo sapien
gaggaacttcatcgcttttagaata

SEQ ID NO: 4788704 - DNA, 25 bp, Homo sapien
ccacaaatcaagctagagtctgcct

SEQ ID NO: 4788705 - DNA, 25 bp, Homo sapien
agctgtgctgtcagagaccttccca

SEQ ID NO: 4788706 - DNA, 25 bp, Homo sapien
tgcactcgagtgaaatgacattcaa

SEQ ID NO: 4788707 - DNA, 25 bp, Homo sapien
tcttaacctgtctgctaaaccctga

SEQ ID NO: 4788708 - DNA, 25 bp, Homo sapien
cagtgggcgcccgattaatgtgtgg

SEQ ID NO: 4788709 - DNA, 25 bp, Homo sapien
tcaattaccgctgtgtcctcagtca

SEQ ID NO: 4788710 - DNA, 25 bp, Homo sapien
cagaaattcccgaaggcaccgtctg

SEQ ID NO: 4788711 - DNA, 25 bp, Homo sapien
gactcactggtaactggacgccctg

SEQ ID NO: 4788712 - DNA, 25 bp, Homo sapien
gccccagactggccccgtcactcac

SEQ ID NO: 4788713 - DNA, 25 bp, Homo sapien
gacgcggcagtagagggtggccttg

SEQ ID NO: 4788714 - DNA, 25 bp, Homo sapien
tcccgtcgagcaggaagacgcggca

SEQ ID NO: 4788715 - DNA, 25 bp, Homo sapien
ggcaggtccacgctcacttcggtcc

SEQ ID NO: 4788716 - DNA, 25 bp, Homo sapien
ggcggcggagatgtgcacggccgcg

SEQ ID NO: 4788717 - DNA, 25 bp, Homo sapien
caaaggtccggcgcaggaaccgcag

SEQ ID NO: 4788718 - DNA, 25 bp, Homo sapien
ccgtggccccccatcgcgctcgtcc

SEQ ID NO: 4788719 - DNA, 25 bp, Homo sapien
gagcggcggccaaaggtccggcgca

SEQ ID NO: 4788720 - DNA, 25 bp, Homo sapien
gcggccaaaggtccggcgcaggaac

SEQ ID NO: 4788721 - DNA, 25 bp, Homo sapien
ggagcagggcgcctgcgtggtcctg

SEQ ID NO: 4788722 - DNA, 25 bp, Homo sapien
ccggccgagggccagccggagcagg

SEQ ID NO: 4788723 - DNA, 25 bp, Homo sapien
ggagcgtcccgcgacgccgtcagtg

SEQ ID NO: 4788724 - DNA, 25 bp, Homo sapien
cgaggccgcgctctagccgcctgcg

SEQ ID NO: 4788725 - DNA, 25 bp, Homo sapien
tagcctgggttcctatctgaggacc

SEQ ID NO: 4788726 - DNA, 25 bp, Homo sapien
tgatggcagccttagcctgggttcc

SEQ ID NO: 4788727 - DNA, 25 bp, Homo sapien
cagccttagcctgggttcctatctg

SEQ ID NO: 4788728 - DNA, 25 bp, Homo sapien
cctgggttcctatctgaggacccat

SEQ ID NO: 4788729 - DNA, 25 bp, Homo sapien
cacaaccaagatacaggaaccacag

SEQ ID NO: 4788730 - DNA, 25 bp, Homo sapien
gcattccaaagtaggggtcccgtga

SEQ ID NO: 4788731 - DNA, 25 bp, Homo sapien
cctatgttaacattacacaaccaag

SEQ ID NO: 4788732 - DNA, 25 bp, Homo sapien
gggtcccgtgactcacctatgttaa

SEQ ID NO: 4788733 - DNA, 25 bp, Homo sapien
gatgcaagttaaagcctccaaggca

SEQ ID NO: 4788734 - DNA, 25 bp, Homo sapien
tccaaggcatgaggcttatttgcaa

SEQ ID NO: 4788735 - DNA, 25 bp, Homo sapien
gagagaattcctccctttactcaca

SEQ ID NO: 4788736 - DNA, 25 bp, Homo sapien
gcagtatgaaggtcaacagatggga

SEQ ID NO: 4788737 - DNA, 25 bp, Homo sapien
gaggaagcatggtcagtactgctac

SEQ ID NO: 4788738 - DNA, 25 bp, Homo sapien
ttaggccagaaagccatcagttgtg

SEQ ID NO: 4788739 - DNA, 25 bp, Homo sapien
gtgatgcgatacctgcggagctcca

SEQ ID NO: 4788740 - DNA, 25 bp, Homo sapien
tcttgtggtctatgtgaggaagcat

SEQ ID NO: 4788741 - DNA, 25 bp, Homo sapien
acaacaaggcctctgagagagagga

SEQ ID NO: 4788742 - DNA, 25 bp, Homo sapien
gacaacaaggcctctgagagagagg

SEQ ID NO: 4788743 - DNA, 25 bp, Homo sapien
cttcctctggtttgggtaatcatgt

SEQ ID NO: 4788744 - DNA, 25 bp, Homo sapien
gggtaatcatgttgaaagtcctggg

SEQ ID NO: 4788745 - DNA, 25 bp, Homo sapien
gcagcctcaaggaaaattccggaga

SEQ ID NO: 4788746 - DNA, 25 bp, Homo sapien
cagcctcaaggaaaattccggagac

SEQ ID NO: 4788747 - DNA, 25 bp, Homo sapien
aagatgggagttcatgctcctgacc

SEQ ID NO: 4788748 - DNA, 25 bp, Homo sapien
ggagttcatgctcctgaccagaggg

SEQ ID NO: 4788749 - DNA, 25 bp, Homo sapien
atgggagttcatgctcctgaccaga

SEQ ID NO: 4788750 - DNA, 25 bp, Homo sapien
gggagttcatgctcctgaccagagg

SEQ ID NO: 4788751 - DNA, 25 bp, Homo sapien
atttggtccccggtctgaggtcaca

SEQ ID NO: 4788752 - DNA, 25 bp, Homo sapien
gattctctggaatatcagcctccca

SEQ ID NO: 4788753 - DNA, 25 bp, Homo sapien
caacagcgccaaagtctgagggaca

SEQ ID NO: 4788754 - DNA, 25 bp, Homo sapien
aaaggtcaggtagcaacacagcagc

SEQ ID NO: 4788755 - DNA, 25 bp, Homo sapien
tgagtgggcgtaggaactgaatccc

SEQ ID NO: 4788756 - DNA, 25 bp, Homo sapien
cagcaaactattcaattggcaccga

SEQ ID NO: 4788757 - DNA, 25 bp, Homo sapien
tataggtcttcatccgtcttgctac

SEQ ID NO: 4788758 - DNA, 25 bp, Homo sapien
tagagcttctaagcaaccaggcccg

SEQ ID NO: 4788759 - DNA, 25 bp, Homo sapien
aataatttgctacaatcctgtcaca

SEQ ID NO: 4788760 - DNA, 25 bp, Homo sapien
ttaacacggtattcacaaaggcaga

SEQ ID NO: 4788761 - DNA, 25 bp, Homo sapien
aataataatttgctacaatcctgtc

SEQ ID NO: 4788762 - DNA, 25 bp, Homo sapien
taataatttgctacaatcctgtcac

SEQ ID NO: 4788763 - DNA, 25 bp, Homo sapien
tgcaatggagaccattgtgactggg

SEQ ID NO: 4788764 - DNA, 25 bp, Homo sapien
tcaacggtaatttgaatcgttagga

SEQ ID NO: 4788765 - DNA, 25 bp, Homo sapien
ttgtgtttatattcagatagtctga

SEQ ID NO: 4788766 - DNA, 25 bp, Homo sapien
tctttatatatactcaacggtaatt

SEQ ID NO: 4788767 - DNA, 25 bp, Homo sapien
ggtttcccatggttcaattactaga

SEQ ID NO: 4788768 - DNA, 25 bp, Homo sapien
attcagtagtcggtgattccagtcc

SEQ ID NO: 4788769 - DNA, 25 bp, Homo sapien
cggccaaccctccagaagctgggtt

SEQ ID NO: 4788770 - DNA, 25 bp, Homo sapien
gaagctcttttctcagaaggccaaa

SEQ ID NO: 4788771 - DNA, 25 bp, Homo sapien
actgagagtaccagttctcagagcc

SEQ ID NO: 4788772 - DNA, 25 bp, Homo sapien
ctgaatgcacattactaatccaggt

SEQ ID NO: 4788773 - DNA, 25 bp, Homo sapien
gcttctacaactaagccacaagatg

SEQ ID NO: 4788774 - DNA, 25 bp, Homo sapien
caagatgaccagaacacactgagag

SEQ ID NO: 4788775 - DNA, 25 bp, Homo sapien
tgtgggtgtccggtctcaattgctc

SEQ ID NO: 4788776 - DNA, 25 bp, Homo sapien
tccttagcatcagggcgggtgaatc

SEQ ID NO: 4788777 - DNA, 25 bp, Homo sapien
agtgccctgccatctagtacatacg

SEQ ID NO: 4788778 - DNA, 25 bp, Homo sapien
caattgctccaggatgccgacaggg

SEQ ID NO: 4788779 - DNA, 25 bp, Homo sapien
tacacacgaagaatcgcttcacaca

SEQ ID NO: 4788780 - DNA, 25 bp, Homo sapien
tccagcatttggactaaaccttctt

SEQ ID NO: 4788781 - DNA, 25 bp, Homo sapien
cagcatttggactaaaccttcttca

SEQ ID NO: 4788782 - DNA, 25 bp, Homo sapien
cttcatacacacgaagaatcgcttc

SEQ ID NO: 4788783 - DNA, 25 bp, Homo sapien
catttttcggacaatatccagtggg

SEQ ID NO: 4788784 - DNA, 25 bp, Homo sapien
cagtgggtaaatgggcaggttcctc

SEQ ID NO: 4788785 - DNA, 25 bp, Homo sapien
tctgcaccatcatggcgcgctggtc

SEQ ID NO: 4788786 - DNA, 25 bp, Homo sapien
tcctctcagttaggcacatggctgt

SEQ ID NO: 4788787 - DNA, 25 bp, Homo sapien
cagtgaactaggacgggctcgctgt

SEQ ID NO: 4788788 - DNA, 25 bp, Homo sapien
agtcatcgggcacaccgtggtcagg

SEQ ID NO: 4788789 - DNA, 25 bp, Homo sapien
tccagaaagtcggaggagtcatcgg

SEQ ID NO: 4788790 - DNA, 25 bp, Homo sapien
tggtcaggccatgcgacgtactgga

SEQ ID NO: 4788791 - DNA, 25 bp, Homo sapien
gttcagcggcattgagaatactcgc

SEQ ID NO: 4788792 - DNA, 25 bp, Homo sapien
gaatactcgcaatgttgtagagcca

SEQ ID NO: 4788793 - DNA, 25 bp, Homo sapien
gataatatgctcaaggttccccagt

SEQ ID NO: 4788794 - DNA, 25 bp, Homo sapien
tatgaattggacgactctaggcact

SEQ ID NO: 4788795 - DNA, 25 bp, Homo sapien
ctgggtgtttgtgaccagcatttct

SEQ ID NO: 4788796 - DNA, 25 bp, Homo sapien
ctggatgtgaaagccgccgtggttc

SEQ ID NO: 4788797 - DNA, 25 bp, Homo sapien
aaagccgccgtggttcatgacgtcg

SEQ ID NO: 4788798 - DNA, 25 bp, Homo sapien
tttctcgggacacataggcgatggt

SEQ ID NO: 4788799 - DNA, 25 bp, Homo sapien
tctgatgagatcaacccatgcaagg

SEQ ID NO: 4788800 - DNA, 25 bp, Homo sapien
gcccaaggcagagttgacagacaca

SEQ ID NO: 4788801 - DNA, 25 bp, Homo sapien
cttgaaactaaactatgccgctgga

SEQ ID NO: 4788802 - DNA, 25 bp, Homo sapien
tctgcataggaaggataaatccctg

SEQ ID NO: 4788803 - DNA, 25 bp, Homo sapien
aaactgtgcacaggtatgcggcagg

SEQ ID NO: 4788804 - DNA, 25 bp, Homo sapien
tgagagtcgtcaacatgacaatgag

SEQ ID NO: 4788805 - DNA, 25 bp, Homo sapien
gagtgacaacttctgatcccagaca

SEQ ID NO: 4788806 - DNA, 25 bp, Homo sapien
cgccctcgttctgtgagagtcgtca

SEQ ID NO: 4788807 - DNA, 25 bp, Homo sapien
gttcacgtaacttgcattaatataa

SEQ ID NO: 4788808 - DNA, 25 bp, Homo sapien
cctgcaataatacccgggtggtgtc

SEQ ID NO: 4788809 - DNA, 25 bp, Homo sapien
tgcaataatacccgggtggtgtcat

SEQ ID NO: 4788810 - DNA, 25 bp, Homo sapien
tccctgcaataatacccgggtggtg

SEQ ID NO: 4788811 - DNA, 25 bp, Homo sapien
tttgaggcagctttgcaaacgtgat

SEQ ID NO: 4788812 - DNA, 25 bp, Homo sapien
gctttgcaaacgtgatggccaaacc

SEQ ID NO: 4788813 - DNA, 25 bp, Homo sapien
gcagctttgcaaacgtgatggccaa

SEQ ID NO: 4788814 - DNA, 25 bp, Homo sapien
tgcaaacgtgatggccaaacctggc

SEQ ID NO: 4788815 - DNA, 25 bp, Homo sapien
tgctatgttctactcaacctaagtg

SEQ ID NO: 4788816 - DNA, 25 bp, Homo sapien
cccggctatattggcacttcttatg

SEQ ID NO: 4788817 - DNA, 25 bp, Homo sapien
ctgcacccggctatattggcacttc

SEQ ID NO: 4788818 - DNA, 25 bp, Homo sapien
gctatgttctactcaacctaagtgt

SEQ ID NO: 4788819 - DNA, 25 bp, Homo sapien
gctgaattgaaatcgttgctagtaa

SEQ ID NO: 4788820 - DNA, 25 bp, Homo sapien
tgctagtaattttgggaccttccat

SEQ ID NO: 4788821 - DNA, 25 bp, Homo sapien
ttgctgaattgaaatcgttgctagt

SEQ ID NO: 4788822 - DNA, 25 bp, Homo sapien
gaaatcgttgctagtaattttggga

SEQ ID NO: 4788823 - DNA, 25 bp, Homo sapien
ttctactgctggcaaacctaacaag

SEQ ID NO: 4788824 - DNA, 25 bp, Homo sapien
gattctactgctggcaaacctaaca

SEQ ID NO: 4788825 - DNA, 25 bp, Homo sapien
agattctactgctggcaaacctaac

SEQ ID NO: 4788826 - DNA, 25 bp, Homo sapien
tctactgctggcaaacctaacaagt

SEQ ID NO: 4788827 - DNA, 25 bp, Homo sapien
tgcacacacggtcattccaaagccc

SEQ ID NO: 4788828 - DNA, 25 bp, Homo sapien
taggtgggtcgctggcacttgaaat

SEQ ID NO: 4788829 - DNA, 25 bp, Homo sapien
tcctttaggtgggtcgctggcactt

SEQ ID NO: 4788830 - DNA, 25 bp, Homo sapien
ccagatacacattatactgatgatg

SEQ ID NO: 4788831 - DNA, 25 bp, Homo sapien
gccagtgagtcacttgttttgacat

SEQ ID NO: 4788832 - DNA, 25 bp, Homo sapien
tccaaatgcaccttttataattatc

SEQ ID NO: 4788833 - DNA, 25 bp, Homo sapien
ggagccagtgagtcacttgttttga

SEQ ID NO: 4788834 - DNA, 25 bp, Homo sapien
cttttataattatcacaggagccag

SEQ ID NO: 4788835 - DNA, 25 bp, Homo sapien
tgaacaccgaaaacaccagcctttg

SEQ ID NO: 4788836 - DNA, 25 bp, Homo sapien
ggactatctgataaactggaaccag

SEQ ID NO: 4788837 - DNA, 25 bp, Homo sapien
cgtgaaggaggtttcatgaacaccg

SEQ ID NO: 4788838 - DNA, 25 bp, Homo sapien
tggaaccagttctcgcagggctgaa

SEQ ID NO: 4788839 - DNA, 25 bp, Homo sapien
tgcccaggatctgcactgcgctgtc

SEQ ID NO: 4788840 - DNA, 25 bp, Homo sapien
tgcactgcgctgtccacccaggtag

SEQ ID NO: 4788841 - DNA, 25 bp, Homo sapien
gcgctgtccacccaggtaggcctgt

SEQ ID NO: 4788842 - DNA, 25 bp, Homo sapien
acccaggtaggcctgtctctttatg

SEQ ID NO: 4788843 - DNA, 25 bp, Homo sapien
ccgagcctgagaagggggctgcctg

SEQ ID NO: 4788844 - DNA, 25 bp, Homo sapien
tccgagcctgagaagggggctgcct

SEQ ID NO: 4788845 - DNA, 25 bp, Homo sapien
cctgcttgctgctccgagcctgaga

SEQ ID NO: 4788846 - DNA, 25 bp, Homo sapien
ccctgcttgctgctccgagcctgag

SEQ ID NO: 4788847 - DNA, 25 bp, Homo sapien
cttgaagtcagcaaatgagcggaca

SEQ ID NO: 4788848 - DNA, 25 bp, Homo sapien
ggggaaaagctggttcagttcatct

SEQ ID NO: 4788849 - DNA, 25 bp, Homo sapien
gctttcgaggcccttctttagctgt

SEQ ID NO: 4788850 - DNA, 25 bp, Homo sapien
ctttagctgtgccatggatccctcc

SEQ ID NO: 4788851 - DNA, 25 bp, Homo sapien
ccagctcccgtgagtgggactcccg

SEQ ID NO: 4788852 - DNA, 25 bp, Homo sapien
ggccagctcccgtgagtgggactcc

SEQ ID NO: 4788853 - DNA, 25 bp, Homo sapien
agctcccgtgagtgggactcccggc

SEQ ID NO: 4788854 - DNA, 25 bp, Homo sapien
ctcccgtgagtgggactcccggctg

SEQ ID NO: 4788855 - DNA, 25 bp, Homo sapien
cccggccattgattaacacgatttg

SEQ ID NO: 4788856 - DNA, 25 bp, Homo sapien
acacgatttgatccccttcgttcag

SEQ ID NO: 4788857 - DNA, 25 bp, Homo sapien
agatgtcccggccattgattaacac

SEQ ID NO: 4788858 - DNA, 25 bp, Homo sapien
cattgattaacacgatttgatcccc

SEQ ID NO: 4788859 - DNA, 25 bp, Homo sapien
ggtttatccttgataccacaagagg

SEQ ID NO: 4788860 - DNA, 25 bp, Homo sapien
gaggcatcttttgatccactcctcc

SEQ ID NO: 4788861 - DNA, 25 bp, Homo sapien
ggtgactctgggtttatccttgata

SEQ ID NO: 4788862 - DNA, 25 bp, Homo sapien
ccttgataccacaagaggcatcttt

SEQ ID NO: 4788863 - DNA, 25 bp, Homo sapien
gatcaagactaagtagctgtcacca

SEQ ID NO: 4788864 - DNA, 25 bp, Homo sapien
tgtgatacggatcaagactaagtag

SEQ ID NO: 4788865 - DNA, 25 bp, Homo sapien
tacggatcaagactaagtagctgtc

SEQ ID NO: 4788866 - DNA, 25 bp, Homo sapien
tcatctggtgtgatacggatcaaga

SEQ ID NO: 4788867 - DNA, 25 bp, Homo sapien
tcatctaagagctgctgatcaacgc

SEQ ID NO: 4788868 - DNA, 25 bp, Homo sapien
tgatcaacgccgtcaggtgagcagg

SEQ ID NO: 4788869 - DNA, 25 bp, Homo sapien
ggtcaccctgtggaagtcatctaag

SEQ ID NO: 4788870 - DNA, 25 bp, Homo sapien
agtagtactggctggcgtcctcggt

SEQ ID NO: 4788871 - DNA, 25 bp, Homo sapien
gaaatcagagttagcatggccctag

SEQ ID NO: 4788872 - DNA, 25 bp, Homo sapien
catagaccgtcttccgggtgaaaag

SEQ ID NO: 4788873 - DNA, 25 bp, Homo sapien
agaagtacaagctctagaccccagg

SEQ ID NO: 4788874 - DNA, 25 bp, Homo sapien
ttctgaactccctggtaaccaaggc

SEQ ID NO: 4788875 - DNA, 25 bp, Homo sapien
tcttccgtttccgtgatgtaggtca

SEQ ID NO: 4788876 - DNA, 25 bp, Homo sapien
gccagagagcccttgtacgtgtaaa

SEQ ID NO: 4788877 - DNA, 25 bp, Homo sapien
gaaacttcagaatcgctgtcttgag

SEQ ID NO: 4788878 - DNA, 25 bp, Homo sapien
gatttcgtgccggagccgaggactt

SEQ ID NO: 4788879 - DNA, 25 bp, Homo sapien
ggcctccatgatttgcaatccccct

SEQ ID NO: 4788880 - DNA, 25 bp, Homo sapien
cctccatgatttgcaatccccctgg

SEQ ID NO: 4788881 - DNA, 25 bp, Homo sapien
agggcctccatgatttgcaatcccc

SEQ ID NO: 4788882 - DNA, 25 bp, Homo sapien
tcagggcctccatgatttgcaatcc

SEQ ID NO: 4788883 - DNA, 25 bp, Homo sapien
catgaattaagtaaagctaaccgta

SEQ ID NO: 4788884 - DNA, 25 bp, Homo sapien
gcaggctcgagtttcccaaactatt

SEQ ID NO: 4788885 - DNA, 25 bp, Homo sapien
tacttctgccaagagcctaaaatgc

SEQ ID NO: 4788886 - DNA, 25 bp, Homo sapien
gctagacttgtgtacttcatgaaaa

SEQ ID NO: 4788887 - DNA, 25 bp, Homo sapien
ggggaacgagaaggcagactcttgg

SEQ ID NO: 4788888 - DNA, 25 bp, Homo sapien
taatgggaggggaacgagaaggcag

SEQ ID NO: 4788889 - DNA, 25 bp, Homo sapien
tctaagtgctccactgataaggatc

SEQ ID NO: 4788890 - DNA, 25 bp, Homo sapien
agactcttggtttctaagtgctcca

SEQ ID NO: 4788891 - DNA, 25 bp, Homo sapien
caatcacctttttgcaatattggtt

SEQ ID NO: 4788892 - DNA, 25 bp, Homo sapien
cccgccaatcacctttttgcaatat

SEQ ID NO: 4788893 - DNA, 25 bp, Homo sapien
ttttgcaatattggttatttaccga

SEQ ID NO: 4788894 - DNA, 25 bp, Homo sapien
tttgcaatattggttatttaccgac

SEQ ID NO: 4788895 - DNA, 25 bp, Homo sapien
tgaagcctgtcaccctgttaaaggg

SEQ ID NO: 4788896 - DNA, 25 bp, Homo sapien
aacaatatgaatcgccctgtagcac

SEQ ID NO: 4788897 - DNA, 25 bp, Homo sapien
tagctatctagacccctcagagaat

SEQ ID NO: 4788898 - DNA, 25 bp, Homo sapien
tgagagaatagagcatgaagcctgt

SEQ ID NO: 4788899 - DNA, 25 bp, Homo sapien
tatcattcctgtggctaatagtacc

SEQ ID NO: 4788900 - DNA, 25 bp, Homo sapien
tagtggcatcagactgggatagccc

SEQ ID NO: 4788901 - DNA, 25 bp, Homo sapien
tacagctgccattctgactgcttgg

SEQ ID NO: 4788902 - DNA, 25 bp, Homo sapien
tataggcaatatatcccaaagtcac

SEQ ID NO: 4788903 - DNA, 25 bp, Homo sapien
agaacgtatggtgctcaacacagga

SEQ ID NO: 4788904 - DNA, 25 bp, Homo sapien
tgttgaaggccacaatatgttccct

SEQ ID NO: 4788905 - DNA, 25 bp, Homo sapien
tggtgttccgagagcccatagtcca

SEQ ID NO: 4788906 - DNA, 25 bp, Homo sapien
tccagtactgagacagaacattctt

SEQ ID NO: 4788907 - DNA, 25 bp, Homo sapien
ctgtcgctgatgtatgaagaacttt

SEQ ID NO: 4788908 - DNA, 25 bp, Homo sapien
tgtcgctgatgtatgaagaactttt

SEQ ID NO: 4788909 - DNA, 25 bp, Homo sapien
ttctgtcgctgatgtatgaagaact

SEQ ID NO: 4788910 - DNA, 25 bp, Homo sapien
tcgctgatgtatgaagaactttttc

SEQ ID NO: 4788911 - DNA, 25 bp, Homo sapien
cttttgaaagaaattttgagaatgt

SEQ ID NO: 4788912 - DNA, 25 bp, Homo sapien
tttgaaagaaattttgagaatgttc

SEQ ID NO: 4788913 - DNA, 25 bp, Homo sapien
tgaaagaaattttgagaatgttcac

SEQ ID NO: 4788914 - DNA, 25 bp, Homo sapien
gaaagaaattttgagaatgttcacc

SEQ ID NO: 4788915 - DNA, 25 bp, Homo sapien
caatgcatgtcctttactccatgat

SEQ ID NO: 4788916 - DNA, 25 bp, Homo sapien
gaagctgatgcctctcaatgcatgt

SEQ ID NO: 4788917 - DNA, 25 bp, Homo sapien
aagcacatcagggatcggccaggtt

SEQ ID NO: 4788918 - DNA, 25 bp, Homo sapien
tcttggctgcctagagtttacttct

SEQ ID NO: 4788919 - DNA, 25 bp, Homo sapien
caaggggctttaggcctgtggcacc

SEQ ID NO: 4788920 - DNA, 25 bp, Homo sapien
aggtttggtcacagttaggctggac

SEQ ID NO: 4788921 - DNA, 25 bp, Homo sapien
agggtccagcccttgtctgtgggcc

SEQ ID NO: 4788922 - DNA, 25 bp, Homo sapien
tctcctgcagtgaccttgtgggacc

SEQ ID NO: 4788923 - DNA, 25 bp, Homo sapien
tattttcggtacacagcaacacccg

SEQ ID NO: 4788924 - DNA, 25 bp, Homo sapien
ggatagaaacttgtgcaaatgtatt

SEQ ID NO: 4788925 - DNA, 25 bp, Homo sapien
gcaacacccgcggaagcaattccaa

SEQ ID NO: 4788926 - DNA, 25 bp, Homo sapien
cacccgcggaagcaattccaatcat

SEQ ID NO: 4788927 - DNA, 25 bp, Homo sapien
ctaccactgtgcagttctactccat

SEQ ID NO: 4788928 - DNA, 25 bp, Homo sapien
tgcagttctactccatagaagtcga

SEQ ID NO: 4788929 - DNA, 25 bp, Homo sapien
catagaagtcgagggtccgcgctat

SEQ ID NO: 4788930 - DNA, 25 bp, Homo sapien
tccgcgctatgttgatatagcagga

SEQ ID NO: 4788931 - DNA, 25 bp, Homo sapien
tgactatcggaaagatagcctggat

SEQ ID NO: 4788932 - DNA, 25 bp, Homo sapien
tgatcgggtataaagtgactatcgg

SEQ ID NO: 4788933 - DNA, 25 bp, Homo sapien
gatgtatggaagaattatagtctcc

SEQ ID NO: 4788934 - DNA, 25 bp, Homo sapien
gctcatgcagagattcgacttttgt

SEQ ID NO: 4788935 - DNA, 25 bp, Homo sapien
tcgtgaatagggtcatctttgatgt

SEQ ID NO: 4788936 - DNA, 25 bp, Homo sapien
cgtgaatagggtcatctttgatgtc

SEQ ID NO: 4788937 - DNA, 25 bp, Homo sapien
ttagagtagcaccaaccaagcagca

SEQ ID NO: 4788938 - DNA, 25 bp, Homo sapien
cccactgggatttgtatgaagatca

SEQ ID NO: 4788939 - DNA, 25 bp, Homo sapien
gatcccagtagtgttttagagtagc

SEQ ID NO: 4788940 - DNA, 25 bp, Homo sapien
aatgcaatgtgcaacagctgtctgc

SEQ ID NO: 4788941 - DNA, 25 bp, Homo sapien
tgtacggcataggacgctagaacca

SEQ ID NO: 4788942 - DNA, 25 bp, Homo sapien
tgctgagttaagagggcaggttaac

SEQ ID NO: 4788943 - DNA, 25 bp, Homo sapien
tacggcataggacgctagaaccact

SEQ ID NO: 4788944 - DNA, 25 bp, Homo sapien
attgtacggcataggacgctagaac

SEQ ID NO: 4788945 - DNA, 25 bp, Homo sapien
caggagctcctcaagtcttatgaca

SEQ ID NO: 4788946 - DNA, 25 bp, Homo sapien
actgcccatattggttctaattgtt

SEQ ID NO: 4788947 - DNA, 25 bp, Homo sapien
tctcatttccccagtgagactccag

SEQ ID NO: 4788948 - DNA, 25 bp, Homo sapien
gctcctcaagtcttatgacaactgt

SEQ ID NO: 4788949 - DNA, 25 bp, Homo sapien
cttcagttgtaagaaatacaagtgc

SEQ ID NO: 4788950 - DNA, 25 bp, Homo sapien
aaaggaggccttcggcagcattgcg

SEQ ID NO: 4788951 - DNA, 25 bp, Homo sapien
gatgcggcatacatgtgacacttgg

SEQ ID NO: 4788952 - DNA, 25 bp, Homo sapien
cagttccgggctttgtacatggtac

SEQ ID NO: 4788953 - DNA, 25 bp, Homo sapien
gataatccaatggtgaacccgggct

SEQ ID NO: 4788954 - DNA, 25 bp, Homo sapien
agcaaagtttctgagtcaaccccat

SEQ ID NO: 4788955 - DNA, 25 bp, Homo sapien
gagcaaagtttctgagtcaacccca

SEQ ID NO: 4788956 - DNA, 25 bp, Homo sapien
tgaattaatggtagaagcctggtcc

SEQ ID NO: 4788957 - DNA, 25 bp, Homo sapien
gatgcctgggatgcctaacttcaga

SEQ ID NO: 4788958 - DNA, 25 bp, Homo sapien
ctagaatagtggaacccaacccgag

SEQ ID NO: 4788959 - DNA, 25 bp, Homo sapien
caacccgagcttgggagacttccta

SEQ ID NO: 4788960 - DNA, 25 bp, Homo sapien
tagtactggcctgaggaaaccttgg

SEQ ID NO: 4788961 - DNA, 25 bp, Homo sapien
tgcaacagggtctcagtcgatcact

SEQ ID NO: 4788962 - DNA, 25 bp, Homo sapien
cttataacaaagctggcctggtgac

SEQ ID NO: 4788963 - DNA, 25 bp, Homo sapien
taaaatgtcagtatgtgcaccccag

SEQ ID NO: 4788964 - DNA, 25 bp, Homo sapien
ttactcgaaaatgcagggtacaggg

SEQ ID NO: 4788965 - DNA, 25 bp, Homo sapien
gcagtgtgttgggatcaggtataaa

SEQ ID NO: 4788966 - DNA, 25 bp, Homo sapien
aaatcttactcgaaaatgcagggta

SEQ ID NO: 4788967 - DNA, 25 bp, Homo sapien
cagtgtgttgggatcaggtataaaa

SEQ ID NO: 4788968 - DNA, 25 bp, Homo sapien
tgtccacatgtctaggtaccagcgg

SEQ ID NO: 4788969 - DNA, 25 bp, Homo sapien
tcatagaatgtcgaaccctctgggc

SEQ ID NO: 4788970 - DNA, 25 bp, Homo sapien
taatagcctgcgtttgtgtagccat

SEQ ID NO: 4788971 - DNA, 25 bp, Homo sapien
tcaggatacgttcaccgaaagcagg

SEQ ID NO: 4788972 - DNA, 25 bp, Homo sapien
tacttctgaacgcagaggatgcagc

SEQ ID NO: 4788973 - DNA, 25 bp, Homo sapien
cattcctggggacttggatgaggca

SEQ ID NO: 4788974 - DNA, 25 bp, Homo sapien
cagctcatgggagggaagaactttg

SEQ ID NO: 4788975 - DNA, 25 bp, Homo sapien
acaggtacttctgaacgcagaggat

SEQ ID NO: 4788976 - DNA, 25 bp, Homo sapien
tgttggaacatcaggccgagagcag

SEQ ID NO: 4788977 - DNA, 25 bp, Homo sapien
aatctaagagaatgtcgagggagcc

SEQ ID NO: 4788978 - DNA, 25 bp, Homo sapien
tctgagagggaactaaaggcaacta

SEQ ID NO: 4788979 - DNA, 25 bp, Homo sapien
gccacccacagtttctaggagagga

SEQ ID NO: 4788980 - DNA, 25 bp, Homo sapien
tcggttttccgtgaacgcgactatg

SEQ ID NO: 4788981 - DNA, 25 bp, Homo sapien
tcgggctaagtaaggccatcctcct

SEQ ID NO: 4788982 - DNA, 25 bp, Homo sapien
accctggctctcacatcgggctaag

SEQ ID NO: 4788983 - DNA, 25 bp, Homo sapien
tctcacatcgggctaagtaaggcca

SEQ ID NO: 4788984 - DNA, 25 bp, Homo sapien
gctaagtaaggccatcctccttcct

SEQ ID NO: 4788985 - DNA, 25 bp, Homo sapien
gggttccctcgctctgagctgccta

SEQ ID NO: 4788986 - DNA, 25 bp, Homo sapien
aaatgtgggttccctcgctctgagc

SEQ ID NO: 4788987 - DNA, 25 bp, Homo sapien
cttgaatacagaaatgtgggttccc

SEQ ID NO: 4788988 - DNA, 25 bp, Homo sapien
tgtgggttccctcgctctgagctgc

SEQ ID NO: 4788989 - DNA, 25 bp, Homo sapien
tcagaagtcagacagggagaagtcg

SEQ ID NO: 4788990 - DNA, 25 bp, Homo sapien
gaactacaggtaccagatgtcacag

SEQ ID NO: 4788991 - DNA, 25 bp, Homo sapien
ggagaagtcggctcactcatgactc

SEQ ID NO: 4788992 - DNA, 25 bp, Homo sapien
tagagggctgatctggaagcatctc

SEQ ID NO: 4788993 - DNA, 25 bp, Homo sapien
gaaacaggctgtgatacactaacac

SEQ ID NO: 4788994 - DNA, 25 bp, Homo sapien
gagaaacaggctgtgatacactaac

SEQ ID NO: 4788995 - DNA, 25 bp, Homo sapien
gggagaaacaggctgtgatacacta

SEQ ID NO: 4788996 - DNA, 25 bp, Homo sapien
ctgacgattggaggggagaaacagg

SEQ ID NO: 4788997 - DNA, 25 bp, Homo sapien
ctaatgttcgactgaaatgaaaaga

SEQ ID NO: 4788998 - DNA, 25 bp, Homo sapien
taatgttcgactgaaatgaaaagat

SEQ ID NO: 4788999 - DNA, 25 bp, Homo sapien
aatgttcgactgaaatgaaaagatc

SEQ ID NO: 4789000 - DNA, 25 bp, Homo sapien
actgcttcctgatggctttgcttgc

SEQ ID NO: 4789001 - DNA, 25 bp, Homo sapien
aactgcttcctgatggctttgcttg

SEQ ID NO: 4789002 - DNA, 25 bp, Homo sapien
tgcttcctgatggctttgcttgctt

SEQ ID NO: 4789003 - DNA, 25 bp, Homo sapien
ctgcttcctgatggctttgcttgct

SEQ ID NO: 4789004 - DNA, 25 bp, Homo sapien
ggagagtccacggagtcgtcatcat

SEQ ID NO: 4789005 - DNA, 25 bp, Homo sapien
gtcgtcatcatgctgtaaaccaaaa

SEQ ID NO: 4789006 - DNA, 25 bp, Homo sapien
cacacccaggtggttgtgcaccata

SEQ ID NO: 4789007 - DNA, 25 bp, Homo sapien
ttcagtcacacccaggtggttgtgc

SEQ ID NO: 4789008 - DNA, 25 bp, Homo sapien
gggagacgtctgcagccaaggcact

SEQ ID NO: 4789009 - DNA, 25 bp, Homo sapien
acagggagacgtctgcagccaaggc

SEQ ID NO: 4789010 - DNA, 25 bp, Homo sapien
tgcactgacagggagacgtctgcag

SEQ ID NO: 4789011 - DNA, 25 bp, Homo sapien
actgacagggagacgtctgcagcca

SEQ ID NO: 4789012 - DNA, 25 bp, Homo sapien
cgtgctaaaactccacgcaaactgc

SEQ ID NO: 4789013 - DNA, 25 bp, Homo sapien
tctcctcctgcctacatcaaggtcc

SEQ ID NO: 4789014 - DNA, 25 bp, Homo sapien
ctcctcctgcctacatcaaggtcca

SEQ ID NO: 4789015 - DNA, 25 bp, Homo sapien
tgctaaaactccacgcaaactgcct

SEQ ID NO: 4789016 - DNA, 25 bp, Homo sapien
tctgtaccacgccatctaaaaagtg

SEQ ID NO: 4789017 - DNA, 25 bp, Homo sapien
cgccatctaaaaagtggatgctgca

SEQ ID NO: 4789018 - DNA, 25 bp, Homo sapien
agtggatgctgcaaatgacttctga

SEQ ID NO: 4789019 - DNA, 25 bp, Homo sapien
actttaaaggtctgtaccacgccat

SEQ ID NO: 4789020 - DNA, 25 bp, Homo sapien
tccgaggtgcgtatattattaattc

SEQ ID NO: 4789021 - DNA, 25 bp, Homo sapien
ccaacgcacgtaaccgggaggtcat

SEQ ID NO: 4789022 - DNA, 25 bp, Homo sapien
attaattcttccacccaacgcacgt

SEQ ID NO: 4789023 - DNA, 25 bp, Homo sapien
ctttgggtaactccgaggtgcgtat

SEQ ID NO: 4789024 - DNA, 25 bp, Homo sapien
cttgtgagtgcagatacctgtcaga

SEQ ID NO: 4789025 - DNA, 25 bp, Homo sapien
tcagttacttgtgagtgcagatacc

SEQ ID NO: 4789026 - DNA, 25 bp, Homo sapien
gaattgtcagttacttgtgagtgca

SEQ ID NO: 4789027 - DNA, 25 bp, Homo sapien
taatatgcgaattgtcagttacttg

SEQ ID NO: 4789028 - DNA, 25 bp, Homo sapien
ggcaacctgggtgtagcaggggcct

SEQ ID NO: 4789029 - DNA, 25 bp, Homo sapien
gcctcacggtgtctgaaccctgagc

SEQ ID NO: 4789030 - DNA, 25 bp, Homo sapien
ctgccaggagagaggctcaggtagc

SEQ ID NO: 4789031 - DNA, 25 bp, Homo sapien
gagagaggctcaggtagcaagaaat

SEQ ID NO: 4789032 - DNA, 25 bp, Homo sapien
ctgtccacagcgacaggctccagtg

SEQ ID NO: 4789033 - DNA, 25 bp, Homo sapien
gatcacaggctttactcattcttcc

SEQ ID NO: 4789034 - DNA, 25 bp, Homo sapien
gaccatgttcctggcaatttcacca

SEQ ID NO: 4789035 - DNA, 25 bp, Homo sapien
agagctgacgcccaatatgcgagta

SEQ ID NO: 4789036 - DNA, 25 bp, Homo sapien
cccaccctgccctgggtggcgcaca

SEQ ID NO: 4789037 - DNA, 25 bp, Homo sapien
ccaccctgccctgggtggcgcacac

SEQ ID NO: 4789038 - DNA, 25 bp, Homo sapien
tctgcagtgtccacctcaggcagaa

SEQ ID NO: 4789039 - DNA, 25 bp, Homo sapien
tgtccacctcaggcagaattgcctg

SEQ ID NO: 4789040 - DNA, 25 bp, Homo sapien
gtgtcaccacgggatcatcacacga

SEQ ID NO: 4789041 - DNA, 25 bp, Homo sapien
catcacacgaccttgtgaggtggag

SEQ ID NO: 4789042 - DNA, 25 bp, Homo sapien
tgtccagacagctgagccagtactg

SEQ ID NO: 4789043 - DNA, 25 bp, Homo sapien
gcctgagtactcagcatgctgctgt

SEQ ID NO: 4789044 - DNA, 25 bp, Homo sapien
gaacagccacttggctaggagctag

SEQ ID NO: 4789045 - DNA, 25 bp, Homo sapien
aaagtcagcagcacccttgtttgat

SEQ ID NO: 4789046 - DNA, 25 bp, Homo sapien
tgaatctgaagtgaggaacagccac

SEQ ID NO: 4789047 - DNA, 25 bp, Homo sapien
gcagaggccagatcctgaaaaactc

SEQ ID NO: 4789048 - DNA, 25 bp, Homo sapien
catcctgcgctaggacaaagcctgg

SEQ ID NO: 4789049 - DNA, 25 bp, Homo sapien
tcccaggtgcacatggctctacttc

SEQ ID NO: 4789050 - DNA, 25 bp, Homo sapien
ggcatgcctaccagtggtttcccca

SEQ ID NO: 4789051 - DNA, 25 bp, Homo sapien
tggcaagatcctgattgtcccaggt

SEQ ID NO: 4789052 - DNA, 25 bp, Homo sapien
tctcaggtccttctcggccagagga

SEQ ID NO: 4789053 - DNA, 25 bp, Homo sapien
aagacatctataagatcaggctctg

SEQ ID NO: 4789054 - DNA, 25 bp, Homo sapien
tcaggtccttctcggccagaggaaa

SEQ ID NO: 4789055 - DNA, 25 bp, Homo sapien
tgtggacactgacctggtctcctcc

SEQ ID NO: 4789056 - DNA, 25 bp, Homo sapien
ctctgagacttgaatgagaatgctt

SEQ ID NO: 4789057 - DNA, 25 bp, Homo sapien
gggtcagagacatgactgatgatat

SEQ ID NO: 4789058 - DNA, 25 bp, Homo sapien
ggtaagggatcctgaatctgcttcc

SEQ ID NO: 4789059 - DNA, 25 bp, Homo sapien
tctgtatgataaaagatgaatcgag

SEQ ID NO: 4789060 - DNA, 25 bp, Homo sapien
gcccaccacctgtctggcctgacca

SEQ ID NO: 4789061 - DNA, 25 bp, Homo sapien
ccaccacctgtctggcctgaccagg

SEQ ID NO: 4789062 - DNA, 25 bp, Homo sapien
caccacctgtctggcctgaccaggg

SEQ ID NO: 4789063 - DNA, 25 bp, Homo sapien
ggcccaccacctgtctggcctgacc

SEQ ID NO: 4789064 - DNA, 25 bp, Homo sapien
aggatttattggctctggagtttcg

SEQ ID NO: 4789065 - DNA, 25 bp, Homo sapien
ggaggatttattggctctggagttt

SEQ ID NO: 4789066 - DNA, 25 bp, Homo sapien
cattccatatcgtccgcggaacggg

SEQ ID NO: 4789067 - DNA, 25 bp, Homo sapien
ctgataaatcattccatatcgtccg

SEQ ID NO: 4789068 - DNA, 25 bp, Homo sapien
gcgcggagcgcccaggtaggtcgcg

SEQ ID NO: 4789069 - DNA, 25 bp, Homo sapien
gggcggcgcggaagctcgctcgcgg

SEQ ID NO: 4789070 - DNA, 25 bp, Homo sapien
gctcgcggcgcgacctggccgccgt

SEQ ID NO: 4789071 - DNA, 25 bp, Homo sapien
gcccaggtaggtcgcgcgtgcgggc

SEQ ID NO: 4789072 - DNA, 25 bp, Homo sapien
ggcagtcgttccagggatagactga

SEQ ID NO: 4789073 - DNA, 25 bp, Homo sapien
tggaacctcatttcggtccttgtcc

SEQ ID NO: 4789074 - DNA, 25 bp, Homo sapien
ccggagtcgcacgtcccgggatagc

SEQ ID NO: 4789075 - DNA, 25 bp, Homo sapien
ggtgccgcccgtgcatcgcgtcggg

SEQ ID NO: 4789076 - DNA, 25 bp, Homo sapien
aaggcacatcgtcttcacataaggg

SEQ ID NO: 4789077 - DNA, 25 bp, Homo sapien
cagggacagcagagttcctaaggca

SEQ ID NO: 4789078 - DNA, 25 bp, Homo sapien
gaacactgtgctccgaattcctggt

SEQ ID NO: 4789079 - DNA, 25 bp, Homo sapien
tgctgaccaagtgcaaagcccaggt

SEQ ID NO: 4789080 - DNA, 25 bp, Homo sapien
ctgtgtgtctgcgtcggtaagttgc

SEQ ID NO: 4789081 - DNA, 25 bp, Homo sapien
tctttatcctcttcattgccgtcct

SEQ ID NO: 4789082 - DNA, 25 bp, Homo sapien
ctcacctcgttgattttctttatcc

SEQ ID NO: 4789083 - DNA, 25 bp, Homo sapien
gctgaccttgggtctcacctcgttg

SEQ ID NO: 4789084 - DNA, 25 bp, Homo sapien
gtggctgctgaccttgggtctcacc

SEQ ID NO: 4789085 - DNA, 25 bp, Homo sapien
ctatatccctgatatatactctgcc

SEQ ID NO: 4789086 - DNA, 25 bp, Homo sapien
tccctgatatatactctgccacact

SEQ ID NO: 4789087 - DNA, 25 bp, Homo sapien
tgccacactgatctaccttgttttc

SEQ ID NO: 4789088 - DNA, 25 bp, Homo sapien
tatccctgatatatactctgccaca

SEQ ID NO: 4789089 - DNA, 25 bp, Homo sapien
ttggaatactgtggtccacgcccat

SEQ ID NO: 4789090 - DNA, 25 bp, Homo sapien
ccctgcacaggagggttggaatact

SEQ ID NO: 4789091 - DNA, 25 bp, Homo sapien
agggttggaatactgtggtccacgc

SEQ ID NO: 4789092 - DNA, 25 bp, Homo sapien
ggttggaatactgtggtccacgccc

SEQ ID NO: 4789093 - DNA, 25 bp, Homo sapien
gccggcgtggttgagcctggccttg

SEQ ID NO: 4789094 - DNA, 25 bp, Homo sapien
gccttggggagcacgctcccatccc

SEQ ID NO: 4789095 - DNA, 25 bp, Homo sapien
ggggagcacgctcccatccctcgtt

SEQ ID NO: 4789096 - DNA, 25 bp, Homo sapien
ctgctgtagggccggcgtggttgag

SEQ ID NO: 4789097 - DNA, 25 bp, Homo sapien
atctataagggttacggtctgctgc

SEQ ID NO: 4789098 - DNA, 25 bp, Homo sapien
tctcgctattctggtagttttgctg

SEQ ID NO: 4789099 - DNA, 25 bp, Homo sapien
tacggtctgctgcatgtttactgcc

SEQ ID NO: 4789100 - DNA, 25 bp, Homo sapien
ctacgacgtggatagcatctataag

SEQ ID NO: 4789101 - DNA, 25 bp, Homo sapien
tcaaccacatcaaactccacagtct

SEQ ID NO: 4789102 - DNA, 25 bp, Homo sapien
tccttcaaccacatcaaactccaca

SEQ ID NO: 4789103 - DNA, 25 bp, Homo sapien
ttctccttcaaccacatcaaactcc

SEQ ID NO: 4789104 - DNA, 25 bp, Homo sapien
ttttctccttcaaccacatcaaact

SEQ ID NO: 4789105 - DNA, 25 bp, Homo sapien
ggggtacaaatgtatcttccttgat

SEQ ID NO: 4789106 - DNA, 25 bp, Homo sapien
attcttcgttttggcagtctggggt

SEQ ID NO: 4789107 - DNA, 25 bp, Homo sapien
gatgaaagcatatccgttccttaag

SEQ ID NO: 4789108 - DNA, 25 bp, Homo sapien
ttattcttcgttttggcagtctggg

SEQ ID NO: 4789109 - DNA, 25 bp, Homo sapien
gggggcggcgagcggcaagcggcgg

SEQ ID NO: 4789110 - DNA, 25 bp, Homo sapien
tcaaggttgtggtgatggtgactgg

SEQ ID NO: 4789111 - DNA, 25 bp, Homo sapien
gtctcggcctcgctgctcaaggttg

SEQ ID NO: 4789112 - DNA, 25 bp, Homo sapien
gcggggggcggcgagcggcaagcgg

SEQ ID NO: 4789113 - DNA, 25 bp, Homo sapien
gctcccgctaccgatcgaactcttg

SEQ ID NO: 4789114 - DNA, 25 bp, Homo sapien
tccgctcccgctaccgatcgaactc

SEQ ID NO: 4789115 - DNA, 25 bp, Homo sapien
cccgctaccgatcgaactcttggct

SEQ ID NO: 4789116 - DNA, 25 bp, Homo sapien
ctaggccagcggtggtggtggggct

SEQ ID NO: 4789117 - DNA, 25 bp, Homo sapien
tatgatcattcactggccggcagac

SEQ ID NO: 4789118 - DNA, 25 bp, Homo sapien
tggccggcagactccacatatcgtt

SEQ ID NO: 4789119 - DNA, 25 bp, Homo sapien
gttctttatgatcattcactggccg

SEQ ID NO: 4789120 - DNA, 25 bp, Homo sapien
ggcagactccacatatcgtttccat

SEQ ID NO: 4789121 - DNA, 25 bp, Homo sapien
ccttttagccgttgtgaatggtgta

SEQ ID NO: 4789122 - DNA, 25 bp, Homo sapien
gaagccctgtaccatgaagcagtca

SEQ ID NO: 4789123 - DNA, 25 bp, Homo sapien
tataccgatcttcaatccttttggg

SEQ ID NO: 4789124 - DNA, 25 bp, Homo sapien
tgtgcaaccgtcactactgtctagt

SEQ ID NO: 4789125 - DNA, 25 bp, Homo sapien
caggataatccctcttgctccacca

SEQ ID NO: 4789126 - DNA, 25 bp, Homo sapien
cacaggataatccctcttgctccac

SEQ ID NO: 4789127 - DNA, 25 bp, Homo sapien
tgcccacaggataatccctcttgct

SEQ ID NO: 4789128 - DNA, 25 bp, Homo sapien
ggatgcccacaggataatccctctt

SEQ ID NO: 4789129 - DNA, 25 bp, Homo sapien
ggagaattgaatgctgtaatccttt

SEQ ID NO: 4789130 - DNA, 25 bp, Homo sapien
tgctgttggactactggagaattga

SEQ ID NO: 4789131 - DNA, 25 bp, Homo sapien
gatgctgttggactactggagaatt

SEQ ID NO: 4789132 - DNA, 25 bp, Homo sapien
gctgtaatcctttacatagcactta

SEQ ID NO: 4789133 - DNA, 25 bp, Homo sapien
tccaatggcttaaagcatgtgccaa

SEQ ID NO: 4789134 - DNA, 25 bp, Homo sapien
tctgagtctgatacggaagaggcaa

SEQ ID NO: 4789135 - DNA, 25 bp, Homo sapien
tccactgaaaacctgtctgagtctg

SEQ ID NO: 4789136 - DNA, 25 bp, Homo sapien
catgtgccaacttcctagttagtga

SEQ ID NO: 4789137 - DNA, 25 bp, Homo sapien
cactgtgttttgaccgtatgtcact

SEQ ID NO: 4789138 - DNA, 25 bp, Homo sapien
tatgtcactcagtaggacatttgat

SEQ ID NO: 4789139 - DNA, 25 bp, Homo sapien
tacgctgtggcctgaattcctcttc

SEQ ID NO: 4789140 - DNA, 25 bp, Homo sapien
tgaaaacttttcctacgctgtggcc

SEQ ID NO: 4789141 - DNA, 25 bp, Homo sapien
tgacatcatgcagagcaaagccatg

SEQ ID NO: 4789142 - DNA, 25 bp, Homo sapien
gacccaagggtcttggctaaggaca

SEQ ID NO: 4789143 - DNA, 25 bp, Homo sapien
cagagaagtgaacaacggtccgagc

SEQ ID NO: 4789144 - DNA, 25 bp, Homo sapien
tgtacttggttacaagactgtgcag

SEQ ID NO: 4789145 - DNA, 25 bp, Homo sapien
atgtctgtactttctcctccaggca

SEQ ID NO: 4789146 - DNA, 25 bp, Homo sapien
tgtctgtactttctcctccaggcat

SEQ ID NO: 4789147 - DNA, 25 bp, Homo sapien
agctgccaactcttgaagtgctcct

SEQ ID NO: 4789148 - DNA, 25 bp, Homo sapien
tgaagctgccaactcttgaagtgct

SEQ ID NO: 4789149 - DNA, 25 bp, Homo sapien
ggtctgtctcctagggctgctgaag

SEQ ID NO: 4789150 - DNA, 25 bp, Homo sapien
tgatgttcatggcaaggggtctgtc

SEQ ID NO: 4789151 - DNA, 25 bp, Homo sapien
tcattaccagggaagttgcaggcca

SEQ ID NO: 4789152 - DNA, 25 bp, Homo sapien
aaggcatcattaccagggaagttgc

SEQ ID NO: 4789153 - DNA, 25 bp, Homo sapien
gcatcattaccagggaagttgcagg

SEQ ID NO: 4789154 - DNA, 25 bp, Homo sapien
atcattaccagggaagttgcaggcc

SEQ ID NO: 4789155 - DNA, 25 bp, Homo sapien
ctgacccaagagtttgcaaggttcc

SEQ ID NO: 4789156 - DNA, 25 bp, Homo sapien
ttcttaggcccaatcaaatcagcag

SEQ ID NO: 4789157 - DNA, 25 bp, Homo sapien
tcaagggcaattcttaggcccaatc

SEQ ID NO: 4789158 - DNA, 25 bp, Homo sapien
tgcactgggtttgggtctgacccaa

SEQ ID NO: 4789159 - DNA, 25 bp, Homo sapien
gagctgttctgaacacatacgtcat

SEQ ID NO: 4789160 - DNA, 25 bp, Homo sapien
cagacttggcagtggtgaaataaat

SEQ ID NO: 4789161 - DNA, 25 bp, Homo sapien
acataatcatgagctgttctgaaca

SEQ ID NO: 4789162 - DNA, 25 bp, Homo sapien
atcataggtcagacttggcagtggt

SEQ ID NO: 4789163 - DNA, 25 bp, Homo sapien
agtcccaggggagccgccggcgcac

SEQ ID NO: 4789164 - DNA, 25 bp, Homo sapien
cttctccccaggctccgcgccgcgc

SEQ ID NO: 4789165 - DNA, 25 bp, Homo sapien
gcgccgcgccgccagtcccagggga

SEQ ID NO: 4789166 - DNA, 25 bp, Homo sapien
cccacccttctccccaggctccgcg

SEQ ID NO: 4789167 - DNA, 25 bp, Homo sapien
ggacagttcttcaaggacccacagc

SEQ ID NO: 4789168 - DNA, 25 bp, Homo sapien
tctgagccactcaattgaagattca

SEQ ID NO: 4789169 - DNA, 25 bp, Homo sapien
tgaacaacctccaaccatgctcgta

SEQ ID NO: 4789170 - DNA, 25 bp, Homo sapien
gacccacagctggaatgaacaacct

SEQ ID NO: 4789171 - DNA, 25 bp, Homo sapien
gagctctccatcacaattggacctg

SEQ ID NO: 4789172 - DNA, 25 bp, Homo sapien
tcaggggtatgagctctccatcaca

SEQ ID NO: 4789173 - DNA, 25 bp, Homo sapien
atgagctctccatcacaattggacc

SEQ ID NO: 4789174 - DNA, 25 bp, Homo sapien
gctctccatcacaattggacctgcg

SEQ ID NO: 4789175 - DNA, 25 bp, Homo sapien
gcaccaagtggagagataacgtcgt

SEQ ID NO: 4789176 - DNA, 25 bp, Homo sapien
gagagataacgtcgttggcgaagca

SEQ ID NO: 4789177 - DNA, 25 bp, Homo sapien
agagataacgtcgttggcgaagcat

SEQ ID NO: 4789178 - DNA, 25 bp, Homo sapien
caagtggagagataacgtcgttggc

SEQ ID NO: 4789179 - DNA, 25 bp, Homo sapien
tctttgaatgtctattcttactcac

SEQ ID NO: 4789180 - DNA, 25 bp, Homo sapien
aagtctttgaatgtctattcttact

SEQ ID NO: 4789181 - DNA, 25 bp, Homo sapien
ttagaaagtctttgaatgtctattc

SEQ ID NO: 4789182 - DNA, 25 bp, Homo sapien
gaaagtctttgaatgtctattctta

SEQ ID NO: 4789183 - DNA, 25 bp, Homo sapien
tgcttgcttcctgctttagcgacac

SEQ ID NO: 4789184 - DNA, 25 bp, Homo sapien
cctgctttagcgacactggaaatcc

SEQ ID NO: 4789185 - DNA, 25 bp, Homo sapien
ttagcgacactggaaatcctccagg

SEQ ID NO: 4789186 - DNA, 25 bp, Homo sapien
gcttcctgctttagcgacactggaa

SEQ ID NO: 4789187 - DNA, 25 bp, Homo sapien
tactttgtaagttctcctttgcctc

SEQ ID NO: 4789188 - DNA, 25 bp, Homo sapien
ctctctcattgccagcattgggtag

SEQ ID NO: 4789189 - DNA, 25 bp, Homo sapien
ccagcattgggtagttgaaacctag

SEQ ID NO: 4789190 - DNA, 25 bp, Homo sapien
ttgaaacctagactcaggacaagat

SEQ ID NO: 4789191 - DNA, 25 bp, Homo sapien
ctgggatggtgtgaacgtcaggaag

SEQ ID NO: 4789192 - DNA, 25 bp, Homo sapien
tgggatggtgtgaacgtcaggaagg

SEQ ID NO: 4789193 - DNA, 25 bp, Homo sapien
ctggtattagtgttgcaggagcaat

SEQ ID NO: 4789194 - DNA, 25 bp, Homo sapien
gcagggagaatgaagttgatatacc

SEQ ID NO: 4789195 - DNA, 25 bp, Homo sapien
taaggatacttgaactctgctacaa

SEQ ID NO: 4789196 - DNA, 25 bp, Homo sapien
cttaagctcagaaatgtttggagcc

SEQ ID NO: 4789197 - DNA, 25 bp, Homo sapien
gaaatccttcggggtactctgaaca

SEQ ID NO: 4789198 - DNA, 25 bp, Homo sapien
atccttcggggtactctgaacacat

SEQ ID NO: 4789199 - DNA, 25 bp, Homo sapien
cagggaaatccttcggggtactctg

SEQ ID NO: 4789200 - DNA, 25 bp, Homo sapien
aatccttcggggtactctgaacaca

SEQ ID NO: 4789201 - DNA, 25 bp, Homo sapien
gccaagtaggtcaaagtaatgcatg

SEQ ID NO: 4789202 - DNA, 25 bp, Homo sapien
gtcatgggtgaaggctttagtcagg

SEQ ID NO: 4789203 - DNA, 25 bp, Homo sapien
atttcttagtggcagccaagtaggt

SEQ ID NO: 4789204 - DNA, 25 bp, Homo sapien
gtgaaggctttagtcagggataggg

SEQ ID NO: 4789205 - DNA, 25 bp, Homo sapien
aagcctacatggcagtggagattgg

SEQ ID NO: 4789206 - DNA, 25 bp, Homo sapien
atctagtggaaagcctacatggcag

SEQ ID NO: 4789207 - DNA, 25 bp, Homo sapien
tagtctttgggtgaaaatatgctcc

SEQ ID NO: 4789208 - DNA, 25 bp, Homo sapien
tctccattgtctggttgagatctag

SEQ ID NO: 4789209 - DNA, 25 bp, Homo sapien
tctgcgatttgagaagctgggtact

SEQ ID NO: 4789210 - DNA, 25 bp, Homo sapien
gatggtgccacaaataacgtcctgg

SEQ ID NO: 4789211 - DNA, 25 bp, Homo sapien
taacgtcctggccagatttcagcca

SEQ ID NO: 4789212 - DNA, 25 bp, Homo sapien
actttcgtgccttcagcaggagcca

SEQ ID NO: 4789213 - DNA, 25 bp, Homo sapien
cacactggttaacaatactttaggg

SEQ ID NO: 4789214 - DNA, 25 bp, Homo sapien
ggtgtataatgagagctcttgcctc

SEQ ID NO: 4789215 - DNA, 25 bp, Homo sapien
aatcttcaagaaatctcacactggt

SEQ ID NO: 4789216 - DNA, 25 bp, Homo sapien
tcttgcctctatctctgctacagaa

SEQ ID NO: 4789217 - DNA, 25 bp, Homo sapien
cttaatggctaggcagagtgagaac

SEQ ID NO: 4789218 - DNA, 25 bp, Homo sapien
ggcttaatggctaggcagagtgaga

SEQ ID NO: 4789219 - DNA, 25 bp, Homo sapien
ctggcttaatggctaggcagagtga

SEQ ID NO: 4789220 - DNA, 25 bp, Homo sapien
tctggcttaatggctaggcagagtg

SEQ ID NO: 4789221 - DNA, 25 bp, Homo sapien
cctgagtggtcatcacgatgggaaa

SEQ ID NO: 4789222 - DNA, 25 bp, Homo sapien
aggtccagcaaactgggtggcctga

SEQ ID NO: 4789223 - DNA, 25 bp, Homo sapien
gtccagcaaactgggtggcctgagt

SEQ ID NO: 4789224 - DNA, 25 bp, Homo sapien
catcacgatgggaaagacatgaccc

SEQ ID NO: 4789225 - DNA, 25 bp, Homo sapien
tcctctcttccggaagactctagga

SEQ ID NO: 4789226 - DNA, 25 bp, Homo sapien
tgacttcatgtggagcagaaacctc

SEQ ID NO: 4789227 - DNA, 25 bp, Homo sapien
cagaaacctcctgatcacaatgatg

SEQ ID NO: 4789228 - DNA, 25 bp, Homo sapien
taagattttgaacactaggaccctc

SEQ ID NO: 4789229 - DNA, 25 bp, Homo sapien
ccagcattttgtgtcatcttcacga

SEQ ID NO: 4789230 - DNA, 25 bp, Homo sapien
gacttgtccccaaacagaaccatag

SEQ ID NO: 4789231 - DNA, 25 bp, Homo sapien
tatagagcacgtccaacgtctccag

SEQ ID NO: 4789232 - DNA, 25 bp, Homo sapien
tgaggacgctgaggttcaagttatt

SEQ ID NO: 4789233 - DNA, 25 bp, Homo sapien
ttaatagtggctgcatagtaaaatc

SEQ ID NO: 4789234 - DNA, 25 bp, Homo sapien
aatagtggctgcatagtaaaatcac

SEQ ID NO: 4789235 - DNA, 25 bp, Homo sapien
ttttaatagtggctgcatagtaaaa

SEQ ID NO: 4789236 - DNA, 25 bp, Homo sapien
taatagtggctgcatagtaaaatca

SEQ ID NO: 4789237 - DNA, 25 bp, Homo sapien
tcctttcggaaagcacttaaggaca

SEQ ID NO: 4789238 - DNA, 25 bp, Homo sapien
cctttcggaaagcacttaaggacat

SEQ ID NO: 4789239 - DNA, 25 bp, Homo sapien
ttgcagcagaagtggccctgccagc

SEQ ID NO: 4789240 - DNA, 25 bp, Homo sapien
gccagctgcccttcttctttccgtg

SEQ ID NO: 4789241 - DNA, 25 bp, Homo sapien
gctgcccttcttctttccgtgggga

SEQ ID NO: 4789242 - DNA, 25 bp, Homo sapien
ctttgcagcagaagtggccctgcca

SEQ ID NO: 4789243 - DNA, 25 bp, Homo sapien
gaactggataataggctgctttaac

SEQ ID NO: 4789244 - DNA, 25 bp, Homo sapien
tttccaaacatggagccagtagctg

SEQ ID NO: 4789245 - DNA, 25 bp, Homo sapien
gcctttgcacaaccagctttactgg

SEQ ID NO: 4789246 - DNA, 25 bp, Homo sapien
taactgttgatgcagtggctgttcc

SEQ ID NO: 4789247 - DNA, 25 bp, Homo sapien
gaattgagtttgtcctgtgtatctg

SEQ ID NO: 4789248 - DNA, 25 bp, Homo sapien
tgtgtatctggggagctgttgatta

SEQ ID NO: 4789249 - DNA, 25 bp, Homo sapien
tgtgcctcttcagttattgaagaat

SEQ ID NO: 4789250 - DNA, 25 bp, Homo sapien
ctggggagctgttgattattctcat

SEQ ID NO: 4789251 - DNA, 25 bp, Homo sapien
cgtggctcgtggatgttgagaagtg

SEQ ID NO: 4789252 - DNA, 25 bp, Homo sapien
tgagaggctgagagccactgaagac

SEQ ID NO: 4789253 - DNA, 25 bp, Homo sapien
caaagatgtggtctgtgagaggctg

SEQ ID NO: 4789254 - DNA, 25 bp, Homo sapien
ccaggtgttccaagtggggcaaaga

SEQ ID NO: 4789255 - DNA, 25 bp, Homo sapien
gaaactctgcgtgctttaatagagg

SEQ ID NO: 4789256 - DNA, 25 bp, Homo sapien
caaagccttgatacaggcaactggc

SEQ ID NO: 4789257 - DNA, 25 bp, Homo sapien
aaaactttcaattagcccagtctgg

SEQ ID NO: 4789258 - DNA, 25 bp, Homo sapien
ccttggagggaagaatgacgtctta

SEQ ID NO: 4789259 - DNA, 25 bp, Homo sapien
cttcagttgccgtgaaacatttcag

SEQ ID NO: 4789260 - DNA, 25 bp, Homo sapien
ttcagttgccgtgaaacatttcagc

SEQ ID NO: 4789261 - DNA, 25 bp, Homo sapien
accatgtggggctgtgggtccctcc

SEQ ID NO: 4789262 - DNA, 25 bp, Homo sapien
ctaaaagtatagcaccatgtggggc

SEQ ID NO: 4789263 - DNA, 25 bp, Homo sapien
caccatgtggggctgtgggtccctc

SEQ ID NO: 4789264 - DNA, 25 bp, Homo sapien
tggtaagaagttgggccagcaagca

SEQ ID NO: 4789265 - DNA, 25 bp, Homo sapien
ttcctggactaatgagagggaccat

SEQ ID NO: 4789266 - DNA, 25 bp, Homo sapien
ggaaggggataaaaatgggcatcat

SEQ ID NO: 4789267 - DNA, 25 bp, Homo sapien
caaagccttttcctggactaatgag

SEQ ID NO: 4789268 - DNA, 25 bp, Homo sapien
acttgaatatgcagctggtgccact

SEQ ID NO: 4789269 - DNA, 25 bp, Homo sapien
gacatcttgccatgggtgaatactc

SEQ ID NO: 4789270 - DNA, 25 bp, Homo sapien
gagccacagtctcggtcacaataat

SEQ ID NO: 4789271 - DNA, 25 bp, Homo sapien
taatagaactgttgacccatgaggt

SEQ ID NO: 4789272 - DNA, 25 bp, Homo sapien
gaagaacctgggttggtctctttgc

SEQ ID NO: 4789273 - DNA, 25 bp, Homo sapien
gaggcagcttacagacagaaccatg

SEQ ID NO: 4789274 - DNA, 25 bp, Homo sapien
agaaccatgagggagggacaacatg

SEQ ID NO: 4789275 - DNA, 25 bp, Homo sapien
gcagcagaagtagcccagatgaaag

SEQ ID NO: 4789276 - DNA, 25 bp, Homo sapien
ttttgtgatatgcagcaaggtaaag

SEQ ID NO: 4789277 - DNA, 25 bp, Homo sapien
ttcattcatagaaatgcgctgataa

SEQ ID NO: 4789278 - DNA, 25 bp, Homo sapien
ttaagtggatctcccacatgttcct

SEQ ID NO: 4789279 - DNA, 25 bp, Homo sapien
taaagaagtcgttaagtggatctcc

SEQ ID NO: 4789280 - DNA, 25 bp, Homo sapien
ggttccattcccaacttctatcact

SEQ ID NO: 4789281 - DNA, 25 bp, Homo sapien
caggtgggaccaggtgcaacccaca

SEQ ID NO: 4789282 - DNA, 25 bp, Homo sapien
gcatgggttccattcccaacttcta

SEQ ID NO: 4789283 - DNA, 25 bp, Homo sapien
caggcatgggttccattcccaactt

SEQ ID NO: 4789284 - DNA, 25 bp, Homo sapien
ggtcaatcaaatagggttgccccat

SEQ ID NO: 4789285 - DNA, 25 bp, Homo sapien
gaggtcaatcaaatagggttgcccc

SEQ ID NO: 4789286 - DNA, 25 bp, Homo sapien
catgaggtcaatcaaatagggttgc

SEQ ID NO: 4789287 - DNA, 25 bp, Homo sapien
ggtccatgaggtcaatcaaataggg

SEQ ID NO: 4789288 - DNA, 25 bp, Homo sapien
atccaaccgccagacagccaagaag

SEQ ID NO: 4789289 - DNA, 25 bp, Homo sapien
gccttcttctgtcagcactacacag

SEQ ID NO: 4789290 - DNA, 25 bp, Homo sapien
agttgtcacggctcacatccaaccg

SEQ ID NO: 4789291 - DNA, 25 bp, Homo sapien
aaggagacgccaagatttaaatctg

SEQ ID NO: 4789292 - DNA, 25 bp, Homo sapien
cgagaaggaagcctacacaactcac

SEQ ID NO: 4789293 - DNA, 25 bp, Homo sapien
ggaagcctacacaactcacatgtga

SEQ ID NO: 4789294 - DNA, 25 bp, Homo sapien
gaaggaagcctacacaactcacatg

SEQ ID NO: 4789295 - DNA, 25 bp, Homo sapien
aactcacatgtgacatgcccgccat

SEQ ID NO: 4789296 - DNA, 25 bp, Homo sapien
tcctagttcaaagccagatttggtt

SEQ ID NO: 4789297 - DNA, 25 bp, Homo sapien
agttcaaagccagatttggtttgac

SEQ ID NO: 4789298 - DNA, 25 bp, Homo sapien
tagttcaaagccagatttggtttga

SEQ ID NO: 4789299 - DNA, 25 bp, Homo sapien
ttatcctagttcaaagccagatttg

SEQ ID NO: 4789300 - DNA, 25 bp, Homo sapien
tagtagtgtaatcctaagagaaggg

SEQ ID NO: 4789301 - DNA, 25 bp, Homo sapien
cctagtttatcacccatgtccttgg

SEQ ID NO: 4789302 - DNA, 25 bp, Homo sapien
ttctgtggttctgagatccaacccc

SEQ ID NO: 4789303 - DNA, 25 bp, Homo sapien
tcgtcccttttgacctagtttatca

SEQ ID NO: 4789304 - DNA, 25 bp, Homo sapien
tattaatagccagaggtcttgaatc

SEQ ID NO: 4789305 - DNA, 25 bp, Homo sapien
atggtattaatagccagaggtcttg

SEQ ID NO: 4789306 - DNA, 25 bp, Homo sapien
taatagccagaggtcttgaatcttc

SEQ ID NO: 4789307 - DNA, 25 bp, Homo sapien
gccagaggtcttgaatcttcctcca

SEQ ID NO: 4789308 - DNA, 25 bp, Homo sapien
gatttgccatcatcagctgaggatt

SEQ ID NO: 4789309 - DNA, 25 bp, Homo sapien
ggtcactaccagcagatcagagcca

SEQ ID NO: 4789310 - DNA, 25 bp, Homo sapien
ggtagcattgagcaagagctctgga

SEQ ID NO: 4789311 - DNA, 25 bp, Homo sapien
caccagggtcactaccagcagatca

SEQ ID NO: 4789312 - DNA, 25 bp, Homo sapien
cattatggtttataccactaccatc

SEQ ID NO: 4789313 - DNA, 25 bp, Homo sapien
tgggattattaggttcaaccactac

SEQ ID NO: 4789314 - DNA, 25 bp, Homo sapien
cactaccatcattgggattattagg

SEQ ID NO: 4789315 - DNA, 25 bp, Homo sapien
ggtttataccactaccatcattggg

SEQ ID NO: 4789316 - DNA, 25 bp, Homo sapien
gcagttgtttagacaaaatcctaag

SEQ ID NO: 4789317 - DNA, 25 bp, Homo sapien
ttgcagttgtttagacaaaatccta

SEQ ID NO: 4789318 - DNA, 25 bp, Homo sapien
tgcagttgtttagacaaaatcctaa

SEQ ID NO: 4789319 - DNA, 25 bp, Homo sapien
aattgcagttgtttagacaaaatcc

SEQ ID NO: 4789320 - DNA, 25 bp, Homo sapien
caagttgataatggctcccacaagc

SEQ ID NO: 4789321 - DNA, 25 bp, Homo sapien
cataaagctatattgccagttcagg

SEQ ID NO: 4789322 - DNA, 25 bp, Homo sapien
catagcaacattccctgcaactggg

SEQ ID NO: 4789323 - DNA, 25 bp, Homo sapien
tatttccggttcagagaatggatct

SEQ ID NO: 4789324 - DNA, 25 bp, Homo sapien
taccaccagttcacttcacaaaggc

SEQ ID NO: 4789325 - DNA, 25 bp, Homo sapien
accaccagttcacttcacaaaggcc

SEQ ID NO: 4789326 - DNA, 25 bp, Homo sapien
ctaccaccagttcacttcacaaagg

SEQ ID NO: 4789327 - DNA, 25 bp, Homo sapien
gggagtcctatagcactaggccaag

SEQ ID NO: 4789328 - DNA, 25 bp, Homo sapien
gagatccagtgtttccaaataggcc

SEQ ID NO: 4789329 - DNA, 25 bp, Homo sapien
gaccacttactatggtgcatttgag

SEQ ID NO: 4789330 - DNA, 25 bp, Homo sapien
ccacatttgaggttaagggaccact

SEQ ID NO: 4789331 - DNA, 25 bp, Homo sapien
ttgtactgtgttgggattcaaatct

SEQ ID NO: 4789332 - DNA, 25 bp, Homo sapien
gactcagaactaaagtcccctgaac

SEQ ID NO: 4789333 - DNA, 25 bp, Homo sapien
cttagcaagataacagcagactcag

SEQ ID NO: 4789334 - DNA, 25 bp, Homo sapien
acagcagactcagaactaaagtccc

SEQ ID NO: 4789335 - DNA, 25 bp, Homo sapien
gcaagactcctgtacgcaaactgtt

SEQ ID NO: 4789336 - DNA, 25 bp, Homo sapien
tatggtcgtgtgacctctggcatgg

SEQ ID NO: 4789337 - DNA, 25 bp, Homo sapien
gctttgtcaactactccacatctgc

SEQ ID NO: 4789338 - DNA, 25 bp, Homo sapien
tgggatgatgaaccatatggtcgtg

SEQ ID NO: 4789339 - DNA, 25 bp, Homo sapien
caccaacattgcatgggagagagga

SEQ ID NO: 4789340 - DNA, 25 bp, Homo sapien
tcatcagtggaggagaattccctac

SEQ ID NO: 4789341 - DNA, 25 bp, Homo sapien
taggcagatagagacccactggctt

SEQ ID NO: 4789342 - DNA, 25 bp, Homo sapien
tcagtagttataattgccaccaaca

SEQ ID NO: 4789343 - DNA, 25 bp, Homo sapien
ccgagactgtgcaggtgctgcccaa

SEQ ID NO: 4789344 - DNA, 25 bp, Homo sapien
gagactgtgcaggtgctgcccaagt

SEQ ID NO: 4789345 - DNA, 25 bp, Homo sapien
agactgtgcaggtgctgcccaagtc

SEQ ID NO: 4789346 - DNA, 25 bp, Homo sapien
acccgagactgtgcaggtgctgccc

SEQ ID NO: 4789347 - DNA, 25 bp, Homo sapien
atcagtgtcggcagaaagatcaatc

SEQ ID NO: 4789348 - DNA, 25 bp, Homo sapien
ggcagggaggatgaaaagatcagtg

SEQ ID NO: 4789349 - DNA, 25 bp, Homo sapien
gggcagggaggatgaaaagatcagt

SEQ ID NO: 4789350 - DNA, 25 bp, Homo sapien
gatattgaggatagcttgtgcaacg

SEQ ID NO: 4789351 - DNA, 25 bp, Homo sapien
cgtagctctggtggccgctaaggaa

SEQ ID NO: 4789352 - DNA, 25 bp, Homo sapien
taagccttgctggtatacatctcaa

SEQ ID NO: 4789353 - DNA, 25 bp, Homo sapien
gagcaaacagctctatggctgcaga

SEQ ID NO: 4789354 - DNA, 25 bp, Homo sapien
cccgtcctgcatcactggtcttgct

SEQ ID NO: 4789355 - DNA, 25 bp, Homo sapien
gcattgagcgtccagtccctggact

SEQ ID NO: 4789356 - DNA, 25 bp, Homo sapien
tgccaagagcattgagcgtccagtc

SEQ ID NO: 4789357 - DNA, 25 bp, Homo sapien
cagcctgccaagagcattgagcgtc

SEQ ID NO: 4789358 - DNA, 25 bp, Homo sapien
cttcccattggttctcacaaagtgt

SEQ ID NO: 4789359 - DNA, 25 bp, Homo sapien
gatcattttccttcacacatttcag

SEQ ID NO: 4789360 - DNA, 25 bp, Homo sapien
gcttctctgggtggagcaggctggc

SEQ ID NO: 4789361 - DNA, 25 bp, Homo sapien
gaataggttccagcagttcaggctc

SEQ ID NO: 4789362 - DNA, 25 bp, Homo sapien
agagtgcttaatgtgctcaatatgc

SEQ ID NO: 4789363 - DNA, 25 bp, Homo sapien
agtgcttaatgtgctcaatatgcac

SEQ ID NO: 4789364 - DNA, 25 bp, Homo sapien
atctcggctcagagtgcttaatgtg

SEQ ID NO: 4789365 - DNA, 25 bp, Homo sapien
ctatctcggctcagagtgcttaatg

SEQ ID NO: 4789366 - DNA, 25 bp, Homo sapien
tcctctttccctttgtgttcgtcat

SEQ ID NO: 4789367 - DNA, 25 bp, Homo sapien
gcctagagaacatatgtcgggagcc

SEQ ID NO: 4789368 - DNA, 25 bp, Homo sapien
tctcctctttccctttgtgttcgtc

SEQ ID NO: 4789369 - DNA, 25 bp, Homo sapien
cctctcctctttccctttgtgttcg

SEQ ID NO: 4789370 - DNA, 25 bp, Homo sapien
cattcattatttttgggacctcggt

SEQ ID NO: 4789371 - DNA, 25 bp, Homo sapien
gccccgtgataagggaaatgatgga

SEQ ID NO: 4789372 - DNA, 25 bp, Homo sapien
tgtcttctggcattgcgcaccagat

SEQ ID NO: 4789373 - DNA, 25 bp, Homo sapien
gaaatgatggatgcctggacttgtc

SEQ ID NO: 4789374 - DNA, 25 bp, Homo sapien
tcagaaagggcttgttctgagggtg

SEQ ID NO: 4789375 - DNA, 25 bp, Homo sapien
agaaagggcttgttctgagggtgac

SEQ ID NO: 4789376 - DNA, 25 bp, Homo sapien
cagaaagggcttgttctgagggtga

SEQ ID NO: 4789377 - DNA, 25 bp, Homo sapien
catcagtaagctttggtgtcacacc

SEQ ID NO: 4789378 - DNA, 25 bp, Homo sapien
gacagcgttgaatggcttgtcccca

SEQ ID NO: 4789379 - DNA, 25 bp, Homo sapien
tggaaacatagcagtgacagcgttg

SEQ ID NO: 4789380 - DNA, 25 bp, Homo sapien
tcacaccagccggatgactttctgg

SEQ ID NO: 4789381 - DNA, 25 bp, Homo sapien
gaccccataggtgcgtgtgtgtaca

SEQ ID NO: 4789382 - DNA, 25 bp, Homo sapien
catatcacttttggcccagttggca

SEQ ID NO: 4789383 - DNA, 25 bp, Homo sapien
taaatgacttgactatcaacctgtc

SEQ ID NO: 4789384 - DNA, 25 bp, Homo sapien
gcattaagttgcaaagtcagtctaa

SEQ ID NO: 4789385 - DNA, 25 bp, Homo sapien
cagtagggctgggactaatcttgca

SEQ ID NO: 4789386 - DNA, 25 bp, Homo sapien
gaagcctcatgtctattcttggaga

SEQ ID NO: 4789387 - DNA, 25 bp, Homo sapien
ttgttcagaggtggctcttccccag

SEQ ID NO: 4789388 - DNA, 25 bp, Homo sapien
aagaccatggcctctaaggttccag

SEQ ID NO: 4789389 - DNA, 25 bp, Homo sapien
gtcgggccggttcacattgcagcct

SEQ ID NO: 4789390 - DNA, 25 bp, Homo sapien
aaatcctgtgacctggcagagggct

SEQ ID NO: 4789391 - DNA, 25 bp, Homo sapien
tgtgtgcgggcaggtacaggatgcg

SEQ ID NO: 4789392 - DNA, 25 bp, Homo sapien
tacaggatgcgagctcagtcctgct

SEQ ID NO: 4789393 - DNA, 25 bp, Homo sapien
gacttgaggcattgtgggatctaga

SEQ ID NO: 4789394 - DNA, 25 bp, Homo sapien
gaaattcaaacgatgttatccgcct

SEQ ID NO: 4789395 - DNA, 25 bp, Homo sapien
tgtaatctgcataactcaaactggc

SEQ ID NO: 4789396 - DNA, 25 bp, Homo sapien
aaaggtacagggatagacttgaggc

SEQ ID NO: 4789397 - DNA, 25 bp, Homo sapien
catgaggagaactggtcctgtgtct

SEQ ID NO: 4789398 - DNA, 25 bp, Homo sapien
aaattgagtgactgcgggactcggc

SEQ ID NO: 4789399 - DNA, 25 bp, Homo sapien
gtctgtcaagggatcaatgagtaag

SEQ ID NO: 4789400 - DNA, 25 bp, Homo sapien
ggacgttcaggccatgtagccagtt

SEQ ID NO: 4789401 - DNA, 25 bp, Homo sapien
agtcttatcttcaccactaggctga

SEQ ID NO: 4789402 - DNA, 25 bp, Homo sapien
tgcactggcaacattgttggataca

SEQ ID NO: 4789403 - DNA, 25 bp, Homo sapien
gtttttagtcttatcttcaccacta

SEQ ID NO: 4789404 - DNA, 25 bp, Homo sapien
ggcaacattgttggatacatctgtt

SEQ ID NO: 4789405 - DNA, 25 bp, Homo sapien
tattctactaccctaatataatcaa

SEQ ID NO: 4789406 - DNA, 25 bp, Homo sapien
tggaatagggtagttattctactac

SEQ ID NO: 4789407 - DNA, 25 bp, Homo sapien
tttgtttttctagtacgctgatgag

SEQ ID NO: 4789408 - DNA, 25 bp, Homo sapien
gatgagaccaaaaagaagatataat

SEQ ID NO: 4789409 - DNA, 25 bp, Homo sapien
tcatttcctgttttcagatccccac

SEQ ID NO: 4789410 - DNA, 25 bp, Homo sapien
gaacggaatggcagctctctgctat

SEQ ID NO: 4789411 - DNA, 25 bp, Homo sapien
aggatccctgctgttgtgctcgaac

SEQ ID NO: 4789412 - DNA, 25 bp, Homo sapien
gctctctgctattgtaggatccctg

SEQ ID NO: 4789413 - DNA, 25 bp, Homo sapien
ggtccatggccagaacggaatggca

SEQ ID NO: 4789414 - DNA, 25 bp, Homo sapien
tccagctgggcagtcgataagcctg

SEQ ID NO: 4789415 - DNA, 25 bp, Homo sapien
tgcctttgaggactctcgggctctt

SEQ ID NO: 4789416 - DNA, 25 bp, Homo sapien
tgtaacctggcttctgtgtacaaca

SEQ ID NO: 4789417 - DNA, 25 bp, Homo sapien
tccagtttgacagggtacattacca

SEQ ID NO: 4789418 - DNA, 25 bp, Homo sapien
ctgagaaggctcgaaaaatgctata

SEQ ID NO: 4789419 - DNA, 25 bp, Homo sapien
gaaggctcgaaaaatgctataatta

SEQ ID NO: 4789420 - DNA, 25 bp, Homo sapien
gagaaggctcgaaaaatgctataat

SEQ ID NO: 4789421 - DNA, 25 bp, Homo sapien
ctctgagaaggctcgaaaaatgcta

SEQ ID NO: 4789422 - DNA, 25 bp, Homo sapien
agtggacggaaacagctgaccagcc

SEQ ID NO: 4789423 - DNA, 25 bp, Homo sapien
gagagcagagctataggcaagagag

SEQ ID NO: 4789424 - DNA, 25 bp, Homo sapien
gctggcttatgcttatcatgcatcc

SEQ ID NO: 4789425 - DNA, 25 bp, Homo sapien
tcctggcattcagagccgtaaaagc

SEQ ID NO: 4789426 - DNA, 25 bp, Homo sapien
cagaatcacagtcagaaccagggtc

SEQ ID NO: 4789427 - DNA, 25 bp, Homo sapien
cagtcagaaccagggtcaggtcgtc

SEQ ID NO: 4789428 - DNA, 25 bp, Homo sapien
tcaggtcgtcagtgtcaagggcaaa

SEQ ID NO: 4789429 - DNA, 25 bp, Homo sapien
cagtgtcaagggcaaatatcttttt

SEQ ID NO: 4789430 - DNA, 25 bp, Homo sapien
ggcattgtgaacattgtcttggaga

SEQ ID NO: 4789431 - DNA, 25 bp, Homo sapien
gaaggtttgccatgtaacacctgcc

SEQ ID NO: 4789432 - DNA, 25 bp, Homo sapien
cctgcctttgagcagggaagaacat

SEQ ID NO: 4789433 - DNA, 25 bp, Homo sapien
tgatttcatcgaaaaagcatctctg

SEQ ID NO: 4789434 - DNA, 25 bp, Homo sapien
gcctttcccttaaatgtcaccagta

SEQ ID NO: 4789435 - DNA, 25 bp, Homo sapien
cccttaaatgtcaccagtagcttca

SEQ ID NO: 4789436 - DNA, 25 bp, Homo sapien
aatgtcaccagtagcttcacctggt

SEQ ID NO: 4789437 - DNA, 25 bp, Homo sapien
cagtgcctttcccttaaatgtcacc

SEQ ID NO: 4789438 - DNA, 25 bp, Homo sapien
catgctgagatgtagggtcttttgg

SEQ ID NO: 4789439 - DNA, 25 bp, Homo sapien
ctccatgctgagatgtagggtcttt

SEQ ID NO: 4789440 - DNA, 25 bp, Homo sapien
agatgtagggtcttttggtgacggg

SEQ ID NO: 4789441 - DNA, 25 bp, Homo sapien
ctgagatgtagggtcttttggtgac

SEQ ID NO: 4789442 - DNA, 25 bp, Homo sapien
caggtcaatgtagagttccagggaa

SEQ ID NO: 4789443 - DNA, 25 bp, Homo sapien
tttccaggtcaatgtagagttccag

SEQ ID NO: 4789444 - DNA, 25 bp, Homo sapien
ctagttctgcccgtaagttatgccc

SEQ ID NO: 4789445 - DNA, 25 bp, Homo sapien
tctgcccgtaagttatgccctaaat

SEQ ID NO: 4789446 - DNA, 25 bp, Homo sapien
gattactcttttgaccaataccgta

SEQ ID NO: 4789447 - DNA, 25 bp, Homo sapien
tagcagaacagtgattactcttttg

SEQ ID NO: 4789448 - DNA, 25 bp, Homo sapien
ccaataccgtagaagctctcagaaa

SEQ ID NO: 4789449 - DNA, 25 bp, Homo sapien
tctttttagaactgccctagtcaca

SEQ ID NO: 4789450 - DNA, 25 bp, Homo sapien
cacttcccgcttataggctcggctt

SEQ ID NO: 4789451 - DNA, 25 bp, Homo sapien
gtggaacggcccactcggagtccca

SEQ ID NO: 4789452 - DNA, 25 bp, Homo sapien
taggctcggcttagaggcccaagtc

SEQ ID NO: 4789453 - DNA, 25 bp, Homo sapien
aagtctaaccctcgcagcaagcagt

SEQ ID NO: 4789454 - DNA, 25 bp, Homo sapien
gaaaacggagatactctctgatttc

SEQ ID NO: 4789455 - DNA, 25 bp, Homo sapien
gggaaaacggagatactctctgatt

SEQ ID NO: 4789456 - DNA, 25 bp, Homo sapien
gaagggaaaacggagatactctctg

SEQ ID NO: 4789457 - DNA, 25 bp, Homo sapien
gagaagggaaaacggagatactctc

SEQ ID NO: 4789458 - DNA, 25 bp, Homo sapien
gttgccagtggctttgattctatca

SEQ ID NO: 4789459 - DNA, 25 bp, Homo sapien
ggtgtagttgccagtggctttgatt

SEQ ID NO: 4789460 - DNA, 25 bp, Homo sapien
ttgattctatcaggccatcatgcat

SEQ ID NO: 4789461 - DNA, 25 bp, Homo sapien
tttgattctatcaggccatcatgca

SEQ ID NO: 4789462 - DNA, 25 bp, Homo sapien
ttactgatcaccacgaatccctgga

SEQ ID NO: 4789463 - DNA, 25 bp, Homo sapien
gattctgctgtggatggaacgtaca

SEQ ID NO: 4789464 - DNA, 25 bp, Homo sapien
gctaaaaagcgagggagacaactat

SEQ ID NO: 4789465 - DNA, 25 bp, Homo sapien
aactatagtgccaccctcctggagc

SEQ ID NO: 4789466 - DNA, 25 bp, Homo sapien
tacagcgagccttctaaacgtgggc

SEQ ID NO: 4789467 - DNA, 25 bp, Homo sapien
tgagacaaccaatgccctccaggaa

SEQ ID NO: 4789468 - DNA, 25 bp, Homo sapien
atggagaatttacgagcgcccgggc

SEQ ID NO: 4789469 - DNA, 25 bp, Homo sapien
tgaggtctcaggataccacagtcct

SEQ ID NO: 4789470 - DNA, 25 bp, Homo sapien
gaccttgttatccacctgcctcggc

SEQ ID NO: 4789471 - DNA, 25 bp, Homo sapien
tcctgaccttgttatccacctgcct

SEQ ID NO: 4789472 - DNA, 25 bp, Homo sapien
caggtgcccaccaccgcgtccagct

SEQ ID NO: 4789473 - DNA, 25 bp, Homo sapien
ctgaccttgttatccacctgcctcg

SEQ ID NO: 4789474 - DNA, 25 bp, Homo sapien
tgctgggccaccatgtgatgtcctc

SEQ ID NO: 4789475 - DNA, 25 bp, Homo sapien
cagaacgttccccaccagctgaatt

SEQ ID NO: 4789476 - DNA, 25 bp, Homo sapien
gggtcttcagatagatccgtgtgtc

SEQ ID NO: 4789477 - DNA, 25 bp, Homo sapien
tgtgacaagcctgcagttacagctt

SEQ ID NO: 4789478 - DNA, 25 bp, Homo sapien
tgaagccacatcctacagatggcag

SEQ ID NO: 4789479 - DNA, 25 bp, Homo sapien
caaatagcacatgggcaattggcac

SEQ ID NO: 4789480 - DNA, 25 bp, Homo sapien
gacgcaaaacaagtaagatccctgt

SEQ ID NO: 4789481 - DNA, 25 bp, Homo sapien
tctcaacaaaatgtgctagccactg

SEQ ID NO: 4789482 - DNA, 25 bp, Homo sapien
gaaggaggatcgtctttacctgagg

SEQ ID NO: 4789483 - DNA, 25 bp, Homo sapien
aggatttctagccagaggtcccaga

SEQ ID NO: 4789484 - DNA, 25 bp, Homo sapien
tctttacctgaggatttctagccag

SEQ ID NO: 4789485 - DNA, 25 bp, Homo sapien
gataagggggcgttcccaaagcaga

SEQ ID NO: 4789486 - DNA, 25 bp, Homo sapien
taagaggccacactattcgcggaat

SEQ ID NO: 4789487 - DNA, 25 bp, Homo sapien
tattactcctatgctgccttccgga

SEQ ID NO: 4789488 - DNA, 25 bp, Homo sapien
tcctgcctaatccatcgagagaaag

SEQ ID NO: 4789489 - DNA, 25 bp, Homo sapien
tgggccaccgctttgtacatagcac

SEQ ID NO: 4789490 - DNA, 25 bp, Homo sapien
cgcatttgtaactcttccagccttt

SEQ ID NO: 4789491 - DNA, 25 bp, Homo sapien
tgctccatcccatcaccgagccctg

SEQ ID NO: 4789492 - DNA, 25 bp, Homo sapien
ctgttctgagcatctgggggtgttc

SEQ ID NO: 4789493 - DNA, 25 bp, Homo sapien
ctgacccctgaccatcagttttcct

SEQ ID NO: 4789494 - DNA, 25 bp, Homo sapien
tcagggatcaaagccaaggctgtga

SEQ ID NO: 4789495 - DNA, 25 bp, Homo sapien
tgtgaagtcgaaatgggcttgcacc

SEQ ID NO: 4789496 - DNA, 25 bp, Homo sapien
tagtgcttgcatttgaaccccggct

SEQ ID NO: 4789497 - DNA, 25 bp, Homo sapien
ttcccacagaagcacacattggcag

SEQ ID NO: 4789498 - DNA, 25 bp, Homo sapien
tgggtggactctggacaactggaat

SEQ ID NO: 4789499 - DNA, 25 bp, Homo sapien
gtggactctggacaactggaatgag

SEQ ID NO: 4789500 - DNA, 25 bp, Homo sapien
gggagagttatccaaactctggatg

SEQ ID NO: 4789501 - DNA, 25 bp, Homo sapien
ctctggacaactggaatgagtctac

SEQ ID NO: 4789502 - DNA, 25 bp, Homo sapien
ttagattctcgaacgaggcccctcc

SEQ ID NO: 4789503 - DNA, 25 bp, Homo sapien
ggtgaagcagaactttgactccact

SEQ ID NO: 4789504 - DNA, 25 bp, Homo sapien
gtgggccttggtgaagcagaacttt

SEQ ID NO: 4789505 - DNA, 25 bp, Homo sapien
actttgactccacttagattctcga

SEQ ID NO: 4789506 - DNA, 25 bp, Homo sapien
tcaaaggaaggatatgagctttccc

SEQ ID NO: 4789507 - DNA, 25 bp, Homo sapien
cctttgttgccctatgattgtttga

SEQ ID NO: 4789508 - DNA, 25 bp, Homo sapien
gtcacctccacacctaagaatgctg

SEQ ID NO: 4789509 - DNA, 25 bp, Homo sapien
gatatgagctttccctgaggttctg

SEQ ID NO: 4789510 - DNA, 25 bp, Homo sapien
ctggtgtttgccagtggctgacaca

SEQ ID NO: 4789511 - DNA, 25 bp, Homo sapien
ctgggaggaatacagccaagattgg

SEQ ID NO: 4789512 - DNA, 25 bp, Homo sapien
gggaggaatacagccaagattgggt

SEQ ID NO: 4789513 - DNA, 25 bp, Homo sapien
aggaatacagccaagattgggtttt

SEQ ID NO: 4789514 - DNA, 25 bp, Homo sapien
cttattcagaggcaactcttgggat

SEQ ID NO: 4789515 - DNA, 25 bp, Homo sapien
ggcatggtaacactgaaggattctt

SEQ ID NO: 4789516 - DNA, 25 bp, Homo sapien
gcaactcttgggatggatgctggtt

SEQ ID NO: 4789517 - DNA, 25 bp, Homo sapien
ttttggaatcctgggcaccacagtc

SEQ ID NO: 4789518 - DNA, 25 bp, Homo sapien
acagtttgagttaaagcagaatcat

SEQ ID NO: 4789519 - DNA, 25 bp, Homo sapien
agtttgagttaaagcagaatcataa

SEQ ID NO: 4789520 - DNA, 25 bp, Homo sapien
cagtttgagttaaagcagaatcata

SEQ ID NO: 4789521 - DNA, 25 bp, Homo sapien
gacagtttgagttaaagcagaatca

SEQ ID NO: 4789522 - DNA, 25 bp, Homo sapien
tgtgcttagagttcattccttctaa

SEQ ID NO: 4789523 - DNA, 25 bp, Homo sapien
aaagttgccgtgagaattaagccat

SEQ ID NO: 4789524 - DNA, 25 bp, Homo sapien
taagccatatgtcatatgcaaagtg

SEQ ID NO: 4789525 - DNA, 25 bp, Homo sapien
tccttctaaattcctacatttagga

SEQ ID NO: 4789526 - DNA, 25 bp, Homo sapien
gtatagctaggagccttcctcggag

SEQ ID NO: 4789527 - DNA, 25 bp, Homo sapien
gactcaagatgttcacctttacctg

SEQ ID NO: 4789528 - DNA, 25 bp, Homo sapien
ttcttacccttcacactaaccagga

SEQ ID NO: 4789529 - DNA, 25 bp, Homo sapien
caagtatagaatgtgaccaggaggt

SEQ ID NO: 4789530 - DNA, 25 bp, Homo sapien
tgccttgattgggacagacagctga

SEQ ID NO: 4789531 - DNA, 25 bp, Homo sapien
tccagccttaggaaactgtaaggtg

SEQ ID NO: 4789532 - DNA, 25 bp, Homo sapien
ttgttgtcatgggcatggtccagcc

SEQ ID NO: 4789533 - DNA, 25 bp, Homo sapien
taaggtgcggtaaagcatttactga

SEQ ID NO: 4789534 - DNA, 25 bp, Homo sapien
ccctaatggctgcatgaggttggcc

SEQ ID NO: 4789535 - DNA, 25 bp, Homo sapien
tgtccctaatggctgcatgaggttg

SEQ ID NO: 4789536 - DNA, 25 bp, Homo sapien
ggctgcatgaggttggcctcctctc

SEQ ID NO: 4789537 - DNA, 25 bp, Homo sapien
ctaatggctgcatgaggttggcctc

SEQ ID NO: 4789538 - DNA, 25 bp, Homo sapien
cttccagtccatctcaagaataatg

SEQ ID NO: 4789539 - DNA, 25 bp, Homo sapien
gcctcgttgtaatcactgcattctc

SEQ ID NO: 4789540 - DNA, 25 bp, Homo sapien
gacttccagtccatctcaagaataa

SEQ ID NO: 4789541 - DNA, 25 bp, Homo sapien
acttccagtccatctcaagaataat

SEQ ID NO: 4789542 - DNA, 25 bp, Homo sapien
tgaagtcatcagcacacttctggtt

SEQ ID NO: 4789543 - DNA, 25 bp, Homo sapien
atgaagtcatcagcacacttctggt

SEQ ID NO: 4789544 - DNA, 25 bp, Homo sapien
gggctgatactgattttgagagcca

SEQ ID NO: 4789545 - DNA, 25 bp, Homo sapien
gagaaaatgtgctaatctggatctg

SEQ ID NO: 4789546 - DNA, 25 bp, Homo sapien
tcttgtaaagagaagcagttcctgc

SEQ ID NO: 4789547 - DNA, 25 bp, Homo sapien
gcagttcctgcattgggagaaaatg

SEQ ID NO: 4789548 - DNA, 25 bp, Homo sapien
tgtgacttctaagtgagatggcccc

SEQ ID NO: 4789549 - DNA, 25 bp, Homo sapien
tcatagctagagacctcgttgtggc

SEQ ID NO: 4789550 - DNA, 25 bp, Homo sapien
tgttccaaaattatccagttccagg

SEQ ID NO: 4789551 - DNA, 25 bp, Homo sapien
ggaatgtacatgtctcagtgagcag

SEQ ID NO: 4789552 - DNA, 25 bp, Homo sapien
atggatagtaagctggtttgccaga

SEQ ID NO: 4789553 - DNA, 25 bp, Homo sapien
aatggatagtaagctggtttgccag

SEQ ID NO: 4789554 - DNA, 25 bp, Homo sapien
tggatagtaagctggtttgccagac

SEQ ID NO: 4789555 - DNA, 25 bp, Homo sapien
aaatggatagtaagctggtttgcca

SEQ ID NO: 4789556 - DNA, 25 bp, Homo sapien
cattgagtgctgaattttaagccag

SEQ ID NO: 4789557 - DNA, 25 bp, Homo sapien
gtgggttctttatggaaagaggaca

SEQ ID NO: 4789558 - DNA, 25 bp, Homo sapien
tttaagccagattccactgcctttg

SEQ ID NO: 4789559 - DNA, 25 bp, Homo sapien
gccagattccactgcctttgtttgg

SEQ ID NO: 4789560 - DNA, 25 bp, Homo sapien
agcctctgggattccggttccttgc

SEQ ID NO: 4789561 - DNA, 25 bp, Homo sapien
gcttgcccctatgatgtacttgatg

SEQ ID NO: 4789562 - DNA, 25 bp, Homo sapien
tttcaaacaagtgtgtgtctccttc

SEQ ID NO: 4789563 - DNA, 25 bp, Homo sapien
tgctgagtcatctgattggtttcaa

SEQ ID NO: 4789564 - DNA, 25 bp, Homo sapien
aatccaaacagcattgaccatcgat

SEQ ID NO: 4789565 - DNA, 25 bp, Homo sapien
ggaggtttggaccaaacaatgcatc

SEQ ID NO: 4789566 - DNA, 25 bp, Homo sapien
cattgaccatcgattctgcaggagc

SEQ ID NO: 4789567 - DNA, 25 bp, Homo sapien
cttctctccttgttaatccaaacag

SEQ ID NO: 4789568 - DNA, 25 bp, Homo sapien
catcagggaaggcacgctgctactt

SEQ ID NO: 4789569 - DNA, 25 bp, Homo sapien
gaaggcacgctgctacttgtaactg

SEQ ID NO: 4789570 - DNA, 25 bp, Homo sapien
tcagggaaggcacgctgctacttgt

SEQ ID NO: 4789571 - DNA, 25 bp, Homo sapien
acgctgctacttgtaactgcatttc

SEQ ID NO: 4789572 - DNA, 25 bp, Homo sapien
ctgggcactccttgcatgaaccata

SEQ ID NO: 4789573 - DNA, 25 bp, Homo sapien
ctccttgcatgaaccataatttagc

SEQ ID NO: 4789574 - DNA, 25 bp, Homo sapien
ggcactccttgcatgaaccataatt

SEQ ID NO: 4789575 - DNA, 25 bp, Homo sapien
ccttgcatgaaccataatttagcac

SEQ ID NO: 4789576 - DNA, 25 bp, Homo sapien
tcttcaagccttcatactgggctcg

SEQ ID NO: 4789577 - DNA, 25 bp, Homo sapien
cttcatactgggctcgcaggaactg

SEQ ID NO: 4789578 - DNA, 25 bp, Homo sapien
aagccttcatactgggctcgcagga

SEQ ID NO: 4789579 - DNA, 25 bp, Homo sapien
tactgggctcgcaggaactggatgc

SEQ ID NO: 4789580 - DNA, 25 bp, Homo sapien
aatccaattcccagtgccacggtga

SEQ ID NO: 4789581 - DNA, 25 bp, Homo sapien
tgtcttattccaggtccttccattg

SEQ ID NO: 4789582 - DNA, 25 bp, Homo sapien
gaaggaggtgatagtgacaagcggg

SEQ ID NO: 4789583 - DNA, 25 bp, Homo sapien
cggatccgggagaaaagcaaacaca

SEQ ID NO: 4789584 - DNA, 25 bp, Homo sapien
gccatgaaatcatggcagtagacat

SEQ ID NO: 4789585 - DNA, 25 bp, Homo sapien
ctgccatgaaatcatggcagtagac

SEQ ID NO: 4789586 - DNA, 25 bp, Homo sapien
tgccatgaaatcatggcagtagaca

SEQ ID NO: 4789587 - DNA, 25 bp, Homo sapien
tattacctgcattgcccccaacaag

SEQ ID NO: 4789588 - DNA, 25 bp, Homo sapien
ccccaacaagagatttttgtagcaa

SEQ ID NO: 4789589 - DNA, 25 bp, Homo sapien
ttttgtagcaatacattaaggtagc

SEQ ID NO: 4789590 - DNA, 25 bp, Homo sapien
gcaatacattaaggtagcaataata

SEQ ID NO: 4789591 - DNA, 25 bp, Homo sapien
tttgaaagctattcagacatgagac

SEQ ID NO: 4789592 - DNA, 25 bp, Homo sapien
atttattttgaaagctattcagaca

SEQ ID NO: 4789593 - DNA, 25 bp, Homo sapien
tgaaagctattcagacatgagacgg

SEQ ID NO: 4789594 - DNA, 25 bp, Homo sapien
attttgaaagctattcagacatgag

SEQ ID NO: 4789595 - DNA, 25 bp, Homo sapien
agatggcaactgggtttatgtcttc

SEQ ID NO: 4789596 - DNA, 25 bp, Homo sapien
ttaaatagccaatggctggttatat

SEQ ID NO: 4789597 - DNA, 25 bp, Homo sapien
tggcaactgggtttatgtcttcata

SEQ ID NO: 4789598 - DNA, 25 bp, Homo sapien
acaagttttaaatagccaatggctg

SEQ ID NO: 4789599 - DNA, 25 bp, Homo sapien
gcttttccttattggctccagaaaa

SEQ ID NO: 4789600 - DNA, 25 bp, Homo sapien
ttcattaatggtggcttcaagcttt

SEQ ID NO: 4789601 - DNA, 25 bp, Homo sapien
aattcattaatggtggcttcaagct

SEQ ID NO: 4789602 - DNA, 25 bp, Homo sapien
ttagactaattcattaatggtggct

SEQ ID NO: 4789603 - DNA, 25 bp, Homo sapien
cattagacgtagcactgtagcactg

SEQ ID NO: 4789604 - DNA, 25 bp, Homo sapien
tattgaattgacattagacgtagca

SEQ ID NO: 4789605 - DNA, 25 bp, Homo sapien
ttgacattagacgtagcactgtagc

SEQ ID NO: 4789606 - DNA, 25 bp, Homo sapien
gagaatattgaattgacattagacg

SEQ ID NO: 4789607 - DNA, 25 bp, Homo sapien
aaaaactggaatgttggcatgcatt

SEQ ID NO: 4789608 - DNA, 25 bp, Homo sapien
aaactggaatgttggcatgcatttg

SEQ ID NO: 4789609 - DNA, 25 bp, Homo sapien
tgcatttgacttcacactctgaagc

SEQ ID NO: 4789610 - DNA, 25 bp, Homo sapien
taaaaaactggaatgttggcatgca

SEQ ID NO: 4789611 - DNA, 25 bp, Homo sapien
agactgcgagtactgagctttgaca

SEQ ID NO: 4789612 - DNA, 25 bp, Homo sapien
tactagcatcagatactccagcgat

SEQ ID NO: 4789613 - DNA, 25 bp, Homo sapien
gccaaaccggttatattctcaatga

SEQ ID NO: 4789614 - DNA, 25 bp, Homo sapien
cctttgacgggcacattaacaggca

SEQ ID NO: 4789615 - DNA, 25 bp, Homo sapien
gaaaggccagctacaaacactatga

SEQ ID NO: 4789616 - DNA, 25 bp, Homo sapien
ccattacagttaaagtcgggcttca

SEQ ID NO: 4789617 - DNA, 25 bp, Homo sapien
caaggtttggaggacaataccacga

SEQ ID NO: 4789618 - DNA, 25 bp, Homo sapien
tacaggttccagtaagaggcacaag

SEQ ID NO: 4789619 - DNA, 25 bp, Homo sapien
tactatacaacaggctcaggcaggc

SEQ ID NO: 4789620 - DNA, 25 bp, Homo sapien
agctctgtcatacggaagtcctcga

SEQ ID NO: 4789621 - DNA, 25 bp, Homo sapien
ttagctggtgcaaacaaatctgcgc

SEQ ID NO: 4789622 - DNA, 25 bp, Homo sapien
cagattgcatatatgtggtggtccc

SEQ ID NO: 4789623 - DNA, 25 bp, Homo sapien
atctacttcaaggaatatcacgttg

SEQ ID NO: 4789624 - DNA, 25 bp, Homo sapien
catccacatctacttcaaggaatat

SEQ ID NO: 4789625 - DNA, 25 bp, Homo sapien
tacttcaaggaatatcacgttggaa

SEQ ID NO: 4789626 - DNA, 25 bp, Homo sapien
cttcaaggaatatcacgttggaata

SEQ ID NO: 4789627 - DNA, 25 bp, Homo sapien
cactgtgaccaccaactcaaaaaac

SEQ ID NO: 4789628 - DNA, 25 bp, Homo sapien
tgtgaccaccaactcaaaaaacaca

SEQ ID NO: 4789629 - DNA, 25 bp, Homo sapien
actgtgaccaccaactcaaaaaaca

SEQ ID NO: 4789630 - DNA, 25 bp, Homo sapien
ctgtgaccaccaactcaaaaaacac

SEQ ID NO: 4789631 - DNA, 25 bp, Homo sapien
ggctgagaagtcaactactacaagt

SEQ ID NO: 4789632 - DNA, 25 bp, Homo sapien
caccacgtggctgagaagtcaacta

SEQ ID NO: 4789633 - DNA, 25 bp, Homo sapien
gagaagtcaactactacaagtttat

SEQ ID NO: 4789634 - DNA, 25 bp, Homo sapien
gaagtcaactactacaagtttatca

SEQ ID NO: 4789635 - DNA, 25 bp, Homo sapien
atcaccgttgacataagcataatgg

SEQ ID NO: 4789636 - DNA, 25 bp, Homo sapien
aagcataatggggtttccagagctg

SEQ ID NO: 4789637 - DNA, 25 bp, Homo sapien
actcagacatcaccgttgacataag

SEQ ID NO: 4789638 - DNA, 25 bp, Homo sapien
ctcaacactcagacatcaccgttga

SEQ ID NO: 4789639 - DNA, 25 bp, Homo sapien
taggagcaagagtctaagatctcgt

SEQ ID NO: 4789640 - DNA, 25 bp, Homo sapien
tgtgcaggcttcatgtacaaattct

SEQ ID NO: 4789641 - DNA, 25 bp, Homo sapien
tttctgaagtacttagccaagtgcc

SEQ ID NO: 4789642 - DNA, 25 bp, Homo sapien
cagagtacctcagaaacagaattgt

SEQ ID NO: 4789643 - DNA, 25 bp, Homo sapien
tcacttcacatacggaaaggcagcg

SEQ ID NO: 4789644 - DNA, 25 bp, Homo sapien
tctgcaagggccctccctatccttg

SEQ ID NO: 4789645 - DNA, 25 bp, Homo sapien
tgccttctgcaagggccctccctat

SEQ ID NO: 4789646 - DNA, 25 bp, Homo sapien
atacggaaaggcagcggcggccacc

SEQ ID NO: 4789647 - DNA, 25 bp, Homo sapien
agaaacgctgggcaccgccactccg

SEQ ID NO: 4789648 - DNA, 25 bp, Homo sapien
gacgctccccgcgtgcgtgcaatcc

SEQ ID NO: 4789649 - DNA, 25 bp, Homo sapien
atcccccgaggaacagggtgcgaga

SEQ ID NO: 4789650 - DNA, 25 bp, Homo sapien
gaacagggtgcgagaaacgctgggc

SEQ ID NO: 4789651 - DNA, 25 bp, Homo sapien
ccttccccagttacagaggccgcgc

SEQ ID NO: 4789652 - DNA, 25 bp, Homo sapien
gcgcggcgccggcaccctggccttc

SEQ ID NO: 4789653 - DNA, 25 bp, Homo sapien
tccccagttacagaggccgcgcgcg

SEQ ID NO: 4789654 - DNA, 25 bp, Homo sapien
cccagttacagaggccgcgcgcggc

SEQ ID NO: 4789655 - DNA, 25 bp, Homo sapien
ttcaagactcgctgcttgctctctc

SEQ ID NO: 4789656 - DNA, 25 bp, Homo sapien
tgctggagtctgacgagcggctgta

SEQ ID NO: 4789657 - DNA, 25 bp, Homo sapien
caaacagagcttcaagactcgctgc

SEQ ID NO: 4789658 - DNA, 25 bp, Homo sapien
gctgtaaggaccgatggaaatggat

SEQ ID NO: 4789659 - DNA, 25 bp, Homo sapien
ggccggacctccgcgcccgtcgctg

SEQ ID NO: 4789660 - DNA, 25 bp, Homo sapien
ctggcacgcccggcgtgcgtgtggc

SEQ ID NO: 4789661 - DNA, 25 bp, Homo sapien
ctccgcgcccgtcgctgcgccccgg

SEQ ID NO: 4789662 - DNA, 25 bp, Homo sapien
ggcacgcccggcgtgcgtgtggcgg

SEQ ID NO: 4789663 - DNA, 25 bp, Homo sapien
ctggattcctcgaaaagggccgcca

SEQ ID NO: 4789664 - DNA, 25 bp, Homo sapien
ggctggattcctcgaaaagggccgc

SEQ ID NO: 4789665 - DNA, 25 bp, Homo sapien
gattcctcgaaaagggccgccacgc

SEQ ID NO: 4789666 - DNA, 25 bp, Homo sapien
tggattcctcgaaaagggccgccac

SEQ ID NO: 4789667 - DNA, 25 bp, Homo sapien
cacagcggtttagtgcggtagaaac

SEQ ID NO: 4789668 - DNA, 25 bp, Homo sapien
accgtgaccgttctcttctctgtaa

SEQ ID NO: 4789669 - DNA, 25 bp, Homo sapien
cggtgtgtacgtccttgcctcctct

SEQ ID NO: 4789670 - DNA, 25 bp, Homo sapien
tgagtaacggtgaccgggaagtatc

SEQ ID NO: 4789671 - DNA, 25 bp, Homo sapien
acattgctatccccactatgaccat

SEQ ID NO: 4789672 - DNA, 25 bp, Homo sapien
tgcacattgctatccccactatgac

SEQ ID NO: 4789673 - DNA, 25 bp, Homo sapien
cttgcacattgctatccccactatg

SEQ ID NO: 4789674 - DNA, 25 bp, Homo sapien
tccttgcacattgctatccccacta

SEQ ID NO: 4789675 - DNA, 25 bp, Homo sapien
caattttttagcatcggctccacaa

SEQ ID NO: 4789676 - DNA, 25 bp, Homo sapien
agattgcattatggtattcaaccag

SEQ ID NO: 4789677 - DNA, 25 bp, Homo sapien
cttggagatcagcttacattaattc

SEQ ID NO: 4789678 - DNA, 25 bp, Homo sapien
tcaaccagcaaagcattaggagaga

SEQ ID NO: 4789679 - DNA, 25 bp, Homo sapien
tgattcaagtgctgcgaaaatgttg

SEQ ID NO: 4789680 - DNA, 25 bp, Homo sapien
tcctgattgaaaagttaaatcctac

SEQ ID NO: 4789681 - DNA, 25 bp, Homo sapien
caagtgctgcgaaaatgttgaggct

SEQ ID NO: 4789682 - DNA, 25 bp, Homo sapien
taaatcctactcatttccatcatct

SEQ ID NO: 4789683 - DNA, 25 bp, Homo sapien
ctcatgaatccacttctataacagc

SEQ ID NO: 4789684 - DNA, 25 bp, Homo sapien
tcatgaatccacttctataacagca

SEQ ID NO: 4789685 - DNA, 25 bp, Homo sapien
tcccctttgactttcacaagactca

SEQ ID NO: 4789686 - DNA, 25 bp, Homo sapien
agagccatctgcatcacgttgcagg

SEQ ID NO: 4789687 - DNA, 25 bp, Homo sapien
aattactgtttgatcctatctgggc

SEQ ID NO: 4789688 - DNA, 25 bp, Homo sapien
cgttgcaggtatttgaacacttccc

SEQ ID NO: 4789689 - DNA, 25 bp, Homo sapien
tgagcacagtgtagcattatgacta

SEQ ID NO: 4789690 - DNA, 25 bp, Homo sapien
tcaccccaatgtctaggctttaagg

SEQ ID NO: 4789691 - DNA, 25 bp, Homo sapien
gaagtctgttgacatagatcccagc

SEQ ID NO: 4789692 - DNA, 25 bp, Homo sapien
tagatcccagccacattgttcaatg

SEQ ID NO: 4789693 - DNA, 25 bp, Homo sapien
agagaagttgggaacgtgattctcc

SEQ ID NO: 4789694 - DNA, 25 bp, Homo sapien
tgaagatgctcttttgggagatgga

SEQ ID NO: 4789695 - DNA, 25 bp, Homo sapien
ctcttttgggagatggatcaagcac

SEQ ID NO: 4789696 - DNA, 25 bp, Homo sapien
gaagttgggaacgtgattctccagg

SEQ ID NO: 4789697 - DNA, 25 bp, Homo sapien
atattctggttacaaagaccagaca

SEQ ID NO: 4789698 - DNA, 25 bp, Homo sapien
taatattctggttacaaagaccaga

SEQ ID NO: 4789699 - DNA, 25 bp, Homo sapien
aagagaatgcagtttaatattctgg

SEQ ID NO: 4789700 - DNA, 25 bp, Homo sapien
tttaatattctggttacaaagacca

SEQ ID NO: 4789701 - DNA, 25 bp, Homo sapien
tacagaattgagaccaagcagggcc

SEQ ID NO: 4789702 - DNA, 25 bp, Homo sapien
ttggtaccaggacagaatcaggagg

SEQ ID NO: 4789703 - DNA, 25 bp, Homo sapien
tagattcagggtgcagtcaatgcca

SEQ ID NO: 4789704 - DNA, 25 bp, Homo sapien
caccatgaaatgaaggagagtagcc

SEQ ID NO: 4789705 - DNA, 25 bp, Homo sapien
ttgatgtgacaagtttcagccagct

SEQ ID NO: 4789706 - DNA, 25 bp, Homo sapien
tgatgtgacaagtttcagccagctc

SEQ ID NO: 4789707 - DNA, 25 bp, Homo sapien
tgttttgatgtgacaagtttcagcc

SEQ ID NO: 4789708 - DNA, 25 bp, Homo sapien
cggagaattgttcacatccacatta

SEQ ID NO: 4789709 - DNA, 25 bp, Homo sapien
catccacattagcaaaaaatacatt

SEQ ID NO: 4789710 - DNA, 25 bp, Homo sapien
aaatacattttggtatttcacagac

SEQ ID NO: 4789711 - DNA, 25 bp, Homo sapien
aaaaatacattttggtatttcacag

SEQ ID NO: 4789712 - DNA, 25 bp, Homo sapien
gaaccactgcgagtttgtgtccggc

SEQ ID NO: 4789713 - DNA, 25 bp, Homo sapien
tttcgaagaaaattgaaccactgcg

SEQ ID NO: 4789714 - DNA, 25 bp, Homo sapien
acatccttttgcagggaccacaccg

SEQ ID NO: 4789715 - DNA, 25 bp, Homo sapien
gtccggcagctgtcaaaaatgtttt

SEQ ID NO: 4789716 - DNA, 25 bp, Homo sapien
gatcactgtagctgtctcctattta

SEQ ID NO: 4789717 - DNA, 25 bp, Homo sapien
taataatctgtaccatgattacacc

SEQ ID NO: 4789718 - DNA, 25 bp, Homo sapien
gttggatcactgtagctgtctccta

SEQ ID NO: 4789719 - DNA, 25 bp, Homo sapien
ggtttagttggatcactgtagctgt

SEQ ID NO: 4789720 - DNA, 25 bp, Homo sapien
cataaagaatggatgataaagggac

SEQ ID NO: 4789721 - DNA, 25 bp, Homo sapien
cctaactcctccaacaatggtaact

SEQ ID NO: 4789722 - DNA, 25 bp, Homo sapien
tcacagaagtggagaatgtaatggt

SEQ ID NO: 4789723 - DNA, 25 bp, Homo sapien
caatggtaactatgtatggtgatga

SEQ ID NO: 4789724 - DNA, 25 bp, Homo sapien
gaatccaatctacagcatgatgact

SEQ ID NO: 4789725 - DNA, 25 bp, Homo sapien
tgcctacggtagtgaagagaaccac

SEQ ID NO: 4789726 - DNA, 25 bp, Homo sapien
cagtccgggtatcagctctttgtta

SEQ ID NO: 4789727 - DNA, 25 bp, Homo sapien
tccatgaagttaatgcctacggctt

SEQ ID NO: 4789728 - DNA, 25 bp, Homo sapien
tatgtggtggagagtaccaggtcca

SEQ ID NO: 4789729 - DNA, 25 bp, Homo sapien
ctttcccaatagacagcagaatatg

SEQ ID NO: 4789730 - DNA, 25 bp, Homo sapien
gaactttcccaatagacagcagaat

SEQ ID NO: 4789731 - DNA, 25 bp, Homo sapien
ggaactttcccaatagacagcagaa

SEQ ID NO: 4789732 - DNA, 25 bp, Homo sapien
ccaggaactttcccaatagacagca

SEQ ID NO: 4789733 - DNA, 25 bp, Homo sapien
caagtttactaaacaagacccagca

SEQ ID NO: 4789734 - DNA, 25 bp, Homo sapien
gagagatgatcctgcttttgggaga

SEQ ID NO: 4789735 - DNA, 25 bp, Homo sapien
ccaggcactaccgaggagagatgat

SEQ ID NO: 4789736 - DNA, 25 bp, Homo sapien
catgtaagaaagtatgtcacaagga

SEQ ID NO: 4789737 - DNA, 25 bp, Homo sapien
aaacaggattgaaagtcccagatac

SEQ ID NO: 4789738 - DNA, 25 bp, Homo sapien
atctctttaggagttgatgaaaaca

SEQ ID NO: 4789739 - DNA, 25 bp, Homo sapien
aaaagcaaccaaatagattcaaaag

SEQ ID NO: 4789740 - DNA, 25 bp, Homo sapien
gaaaaaattgaactgaagagctaac

SEQ ID NO: 4789741 - DNA, 25 bp, Homo sapien
tatctgtgatgtttatacggatggg

SEQ ID NO: 4789742 - DNA, 25 bp, Homo sapien
gggcattatctgtgatgtttatacg

SEQ ID NO: 4789743 - DNA, 25 bp, Homo sapien
ctgggcattatctgtgatgtttata

SEQ ID NO: 4789744 - DNA, 25 bp, Homo sapien
gcattatctgtgatgtttatacgga

SEQ ID NO: 4789745 - DNA, 25 bp, Homo sapien
gatctgagaagcatcagacctgagt

SEQ ID NO: 4789746 - DNA, 25 bp, Homo sapien
caagtgctaacttatggaaagatct

SEQ ID NO: 4789747 - DNA, 25 bp, Homo sapien
gagataactaagaggcatgggaaac

SEQ ID NO: 4789748 - DNA, 25 bp, Homo sapien
tgagttttactcttgattctgccac

SEQ ID NO: 4789749 - DNA, 25 bp, Homo sapien
tgtgtgtcatcctctagcatgggtc

SEQ ID NO: 4789750 - DNA, 25 bp, Homo sapien
tgtcatcctctagcatgggtcatac

SEQ ID NO: 4789751 - DNA, 25 bp, Homo sapien
catcctctagcatgggtcatactaa

SEQ ID NO: 4789752 - DNA, 25 bp, Homo sapien
tagcatgggtcatactaatcctctc

SEQ ID NO: 4789753 - DNA, 25 bp, Homo sapien
gtgacatcggtttggtcttacacat

SEQ ID NO: 4789754 - DNA, 25 bp, Homo sapien
caccatttaagcagggagactggca

SEQ ID NO: 4789755 - DNA, 25 bp, Homo sapien
acagtgacatcggtttggtcttaca

SEQ ID NO: 4789756 - DNA, 25 bp, Homo sapien
gacatcggtttggtcttacacattt

SEQ ID NO: 4789757 - DNA, 25 bp, Homo sapien
taagcactggtccttgtccagagag

SEQ ID NO: 4789758 - DNA, 25 bp, Homo sapien
tccccttagggagctctcttggtaa

SEQ ID NO: 4789759 - DNA, 25 bp, Homo sapien
gaaccattccaatatctgtagcaca

SEQ ID NO: 4789760 - DNA, 25 bp, Homo sapien
tgtctgctaagcaagtagtaggcac

SEQ ID NO: 4789761 - DNA, 25 bp, Homo sapien
tgtctattgttcctacgtgtttacg

SEQ ID NO: 4789762 - DNA, 25 bp, Homo sapien
cctacgtgtttacgtgttcccatca

SEQ ID NO: 4789763 - DNA, 25 bp, Homo sapien
tcctacgtgtttacgtgttcccatc

SEQ ID NO: 4789764 - DNA, 25 bp, Homo sapien
ctattgttcctacgtgtttacgtgt

SEQ ID NO: 4789765 - DNA, 25 bp, Homo sapien
cacttctgagtctaagtcacactct

SEQ ID NO: 4789766 - DNA, 25 bp, Homo sapien
agtcacactcttcaatgtcctctgg

SEQ ID NO: 4789767 - DNA, 25 bp, Homo sapien
tctggagtttcatgggcctgagcca

SEQ ID NO: 4789768 - DNA, 25 bp, Homo sapien
ctcttcaatgtcctctggagtttca

SEQ ID NO: 4789769 - DNA, 25 bp, Homo sapien
cagcgacctccgttcagacagggaa

SEQ ID NO: 4789770 - DNA, 25 bp, Homo sapien
acacagcgacctccgttcagacagg

SEQ ID NO: 4789771 - DNA, 25 bp, Homo sapien
ctgtatgacagcgagaccccgtcca

SEQ ID NO: 4789772 - DNA, 25 bp, Homo sapien
gagaccccgtccagccaggcgggca

SEQ ID NO: 4789773 - DNA, 25 bp, Homo sapien
tttggtgtggacaaggacttacagc

SEQ ID NO: 4789774 - DNA, 25 bp, Homo sapien
gacatagcacatagtagaccttgag

SEQ ID NO: 4789775 - DNA, 25 bp, Homo sapien
caaatttgtgccagggaacatgtga

SEQ ID NO: 4789776 - DNA, 25 bp, Homo sapien
catccaggcaatttgtcaggactca

SEQ ID NO: 4789777 - DNA, 25 bp, Homo sapien
gaacaagcatttgggcgttggcaga

SEQ ID NO: 4789778 - DNA, 25 bp, Homo sapien
tcttcacagaggcgccccatccagc

SEQ ID NO: 4789779 - DNA, 25 bp, Homo sapien
ccattctgacatggaaatcgacaga

SEQ ID NO: 4789780 - DNA, 25 bp, Homo sapien
ttctgacatggaaatcgacagacag

SEQ ID NO: 4789781 - DNA, 25 bp, Homo sapien
catgagtaggtgatcatgtctccat

SEQ ID NO: 4789782 - DNA, 25 bp, Homo sapien
tctaaacaaacactcctcaggaaac

SEQ ID NO: 4789783 - DNA, 25 bp, Homo sapien
catattgataatgtacgcctcgagc

SEQ ID NO: 4789784 - DNA, 25 bp, Homo sapien
ttctacgtgagctggtggaccacat

SEQ ID NO: 4789785 - DNA, 25 bp, Homo sapien
ggtaatgatgccgtggccctgcagc

SEQ ID NO: 4789786 - DNA, 25 bp, Homo sapien
cagcagagcattctcgggaatcaca

SEQ ID NO: 4789787 - DNA, 25 bp, Homo sapien
gaaaaccttccctacatttgatgga

SEQ ID NO: 4789788 - DNA, 25 bp, Homo sapien
ttgtctgtgtccacgtctcgtcggg

SEQ ID NO: 4789789 - DNA, 25 bp, Homo sapien
tgttgcaggaatataccacgttggg

SEQ ID NO: 4789790 - DNA, 25 bp, Homo sapien
gcccttcaagactgtagcctctgtt

SEQ ID NO: 4789791 - DNA, 25 bp, Homo sapien
ggttccattttctgtgcagtgtgcc

SEQ ID NO: 4789792 - DNA, 25 bp, Homo sapien
cagtgtgcctcagatggcccttcaa

SEQ ID NO: 4789793 - DNA, 25 bp, Homo sapien
tctcctggcagacacgttccctgtt

SEQ ID NO: 4789794 - DNA, 25 bp, Homo sapien
ctttgcatattgccacccctccact

SEQ ID NO: 4789795 - DNA, 25 bp, Homo sapien
tgttctcctggcagacacgttccct

SEQ ID NO: 4789796 - DNA, 25 bp, Homo sapien
tttgcatattgccacccctccactc

SEQ ID NO: 4789797 - DNA, 25 bp, Homo sapien
gaaactggactgcaagattcatcgg

SEQ ID NO: 4789798 - DNA, 25 bp, Homo sapien
tttactgccaaccacaaatccatgt

SEQ ID NO: 4789799 - DNA, 25 bp, Homo sapien
catgttctggactttcaggtttccc

SEQ ID NO: 4789800 - DNA, 25 bp, Homo sapien
ggctcacactgataaataattgtgc

SEQ ID NO: 4789801 - DNA, 25 bp, Homo sapien
actattatagatactgcttgcttgg

SEQ ID NO: 4789802 - DNA, 25 bp, Homo sapien
cattctaattaagacagaatcttac

SEQ ID NO: 4789803 - DNA, 25 bp, Homo sapien
gtatatgtaggcattacacattcta

SEQ ID NO: 4789804 - DNA, 25 bp, Homo sapien
tattatagatactgcttgcttggca

SEQ ID NO: 4789805 - DNA, 25 bp, Homo sapien
ctgacatactgatatgttaactccc

SEQ ID NO: 4789806 - DNA, 25 bp, Homo sapien
tactgatatgttaactccctcaaag

SEQ ID NO: 4789807 - DNA, 25 bp, Homo sapien
gacatactgatatgttaactccctc

SEQ ID NO: 4789808 - DNA, 25 bp, Homo sapien
gatatgttaactccctcaaaggtat

SEQ ID NO: 4789809 - DNA, 25 bp, Homo sapien
tgcaggagattctctcagggaacca

SEQ ID NO: 4789810 - DNA, 25 bp, Homo sapien
gaaccagcgaccatctttctgacag

SEQ ID NO: 4789811 - DNA, 25 bp, Homo sapien
tgtatccatcgtataaccttccaga

SEQ ID NO: 4789812 - DNA, 25 bp, Homo sapien
gaaatcgtccccatgtacaagtata

SEQ ID NO: 4789813 - DNA, 25 bp, Homo sapien
tccttggatttaggaagctgttaca

SEQ ID NO: 4789814 - DNA, 25 bp, Homo sapien
ggctcagtagatattttgtgcaaca

SEQ ID NO: 4789815 - DNA, 25 bp, Homo sapien
tatgtcaggcggatggcattgccat

SEQ ID NO: 4789816 - DNA, 25 bp, Homo sapien
taacaaccagttgagctgggtgcgg

SEQ ID NO: 4789817 - DNA, 25 bp, Homo sapien
tctaaacaggtcaaggcactgggac

SEQ ID NO: 4789818 - DNA, 25 bp, Homo sapien
tcacagactggataaggctggctcc

SEQ ID NO: 4789819 - DNA, 25 bp, Homo sapien
caagatgtagccctcgtgacagtgg

SEQ ID NO: 4789820 - DNA, 25 bp, Homo sapien
aagcctttgaagcactgaatccggg

SEQ ID NO: 4789821 - DNA, 25 bp, Homo sapien
ggtgttcagtacaaagccttccatg

SEQ ID NO: 4789822 - DNA, 25 bp, Homo sapien
gctaggctgtaaccatcagagcagt

SEQ ID NO: 4789823 - DNA, 25 bp, Homo sapien
caatgtctccaaagagccgatgggc

SEQ ID NO: 4789824 - DNA, 25 bp, Homo sapien
tggttcaccacaagataccgggtgg

SEQ ID NO: 4789825 - DNA, 25 bp, Homo sapien
attgtgtgcagggcaatggtctgtg

SEQ ID NO: 4789826 - DNA, 25 bp, Homo sapien
tcttgcatagaacaaatgggcctgt

SEQ ID NO: 4789827 - DNA, 25 bp, Homo sapien
tgccaaactccatctttgtagaagg

SEQ ID NO: 4789828 - DNA, 25 bp, Homo sapien
agtgggaataatacttcttctgcca

SEQ ID NO: 4789829 - DNA, 25 bp, Homo sapien
cgttaggcagacataaaactcatct

SEQ ID NO: 4789830 - DNA, 25 bp, Homo sapien
tccacagaagacgaggtgacaggca

SEQ ID NO: 4789831 - DNA, 25 bp, Homo sapien
gttattccccgtaatgacagcatct

SEQ ID NO: 4789832 - DNA, 25 bp, Homo sapien
aggtggcgctctgtcccagatgcca

SEQ ID NO: 4789833 - DNA, 25 bp, Homo sapien
tgttcctgaaagtgaagttattccc

SEQ ID NO: 4789834 - DNA, 25 bp, Homo sapien
tgttactctttcattggctatggat

SEQ ID NO: 4789835 - DNA, 25 bp, Homo sapien
gatgttactctttcattggctatgg

SEQ ID NO: 4789836 - DNA, 25 bp, Homo sapien
ttactctttcattggctatggattt

SEQ ID NO: 4789837 - DNA, 25 bp, Homo sapien
tgatgttactctttcattggctatg

SEQ ID NO: 4789838 - DNA, 25 bp, Homo sapien
ctatggagataaaacaggaagaact

SEQ ID NO: 4789839 - DNA, 25 bp, Homo sapien
ttcgagactagtctggacaaaatgg

SEQ ID NO: 4789840 - DNA, 25 bp, Homo sapien
cgagactagtctggacaaaatggcg

SEQ ID NO: 4789841 - DNA, 25 bp, Homo sapien
ctagtctggacaaaatggcgaaacc

SEQ ID NO: 4789842 - DNA, 25 bp, Homo sapien
aagagttcgagactagtctggacaa

SEQ ID NO: 4789843 - DNA, 25 bp, Homo sapien
gatgattctttatcaccggccagag

SEQ ID NO: 4789844 - DNA, 25 bp, Homo sapien
gggaatgactccaagaactgttagc

SEQ ID NO: 4789845 - DNA, 25 bp, Homo sapien
tattttccggactagaacacttcac

SEQ ID NO: 4789846 - DNA, 25 bp, Homo sapien
ggtaggtaagcccactcaaaatata

SEQ ID NO: 4789847 - DNA, 25 bp, Homo sapien
atagccggtttaccacatgaaacag

SEQ ID NO: 4789848 - DNA, 25 bp, Homo sapien
aatgctaactcctcaatgcaaccat

SEQ ID NO: 4789849 - DNA, 25 bp, Homo sapien
ctggaatagccggtttaccacatga

SEQ ID NO: 4789850 - DNA, 25 bp, Homo sapien
tttgctgccaaaagtaaatgctaac

SEQ ID NO: 4789851 - DNA, 25 bp, Homo sapien
cacttcatatgtctacgccttacct

SEQ ID NO: 4789852 - DNA, 25 bp, Homo sapien
cttacctttctaggattgccaaaca

SEQ ID NO: 4789853 - DNA, 25 bp, Homo sapien
gcctaatacctcagttcaaatacaa

SEQ ID NO: 4789854 - DNA, 25 bp, Homo sapien
tgccaaacataagaaacgtggtaaa

SEQ ID NO: 4789855 - DNA, 25 bp, Homo sapien
tggtatccttcctgacacgaaaatg

SEQ ID NO: 4789856 - DNA, 25 bp, Homo sapien
gaaaatgtgacttcggcacctactg

SEQ ID NO: 4789857 - DNA, 25 bp, Homo sapien
gattttggttactcccatcaactgg

SEQ ID NO: 4789858 - DNA, 25 bp, Homo sapien
tcacctgaggagtggccattttccg

SEQ ID NO: 4789859 - DNA, 25 bp, Homo sapien
ctagaaacagacagttttggtggaa

SEQ ID NO: 4789860 - DNA, 25 bp, Homo sapien
cacaaccatgcaaagtctcacagca

SEQ ID NO: 4789861 - DNA, 25 bp, Homo sapien
ggaataataagtggctttcacacaa

SEQ ID NO: 4789862 - DNA, 25 bp, Homo sapien
tcacacaaccatgcaaagtctcaca

SEQ ID NO: 4789863 - DNA, 25 bp, Homo sapien
tctacagattcagggtcggtctcca

SEQ ID NO: 4789864 - DNA, 25 bp, Homo sapien
caaaacgggaggatatattgcatca

SEQ ID NO: 4789865 - DNA, 25 bp, Homo sapien
ggtctccactgctataataggaagg

SEQ ID NO: 4789866 - DNA, 25 bp, Homo sapien
aaaggtaggcgctcattgggaaagt

SEQ ID NO: 4789867 - DNA, 25 bp, Homo sapien
tccatctacgttcaggcaagaagca

SEQ ID NO: 4789868 - DNA, 25 bp, Homo sapien
tgaacatatgtaggatccatctacg

SEQ ID NO: 4789869 - DNA, 25 bp, Homo sapien
ccatctcctgtgtacggtgggacac

SEQ ID NO: 4789870 - DNA, 25 bp, Homo sapien
tgctcactacaatctgatccaactg

SEQ ID NO: 4789871 - DNA, 25 bp, Homo sapien
caatagatagtagccattgttgcac

SEQ ID NO: 4789872 - DNA, 25 bp, Homo sapien
gcactggtaggttactgtgctgcca

SEQ ID NO: 4789873 - DNA, 25 bp, Homo sapien
tgtgctgccagcatagaagtcatcg

SEQ ID NO: 4789874 - DNA, 25 bp, Homo sapien
tgtacagaacatccttgagtcaccc

SEQ ID NO: 4789875 - DNA, 25 bp, Homo sapien
tgactttggaacctggctttaaatc

SEQ ID NO: 4789876 - DNA, 25 bp, Homo sapien
cttgattcagacagtactgcacagg

SEQ ID NO: 4789877 - DNA, 25 bp, Homo sapien
cacagggttcccgaccagctggaag

SEQ ID NO: 4789878 - DNA, 25 bp, Homo sapien
acagtgaggaagtggttgtgtccac

SEQ ID NO: 4789879 - DNA, 25 bp, Homo sapien
ttagaatcgatcttcactttcccca

SEQ ID NO: 4789880 - DNA, 25 bp, Homo sapien
actttccccacaattcctgacaaga

SEQ ID NO: 4789881 - DNA, 25 bp, Homo sapien
gaacaaaatatgctcttagaatcga

SEQ ID NO: 4789882 - DNA, 25 bp, Homo sapien
tgacaagaaatcaggccatgctaac

SEQ ID NO: 4789883 - DNA, 25 bp, Homo sapien
catagtcccagaggttgagctggct

SEQ ID NO: 4789884 - DNA, 25 bp, Homo sapien
gacaggacatagtcccagaggttga

SEQ ID NO: 4789885 - DNA, 25 bp, Homo sapien
gctggcttatggagcccacaaaaga

SEQ ID NO: 4789886 - DNA, 25 bp, Homo sapien
ttgccccagaactaacgcaccacca

SEQ ID NO: 4789887 - DNA, 25 bp, Homo sapien
tcagcaagctatttccttaggtggt

SEQ ID NO: 4789888 - DNA, 25 bp, Homo sapien
gactaagacagccacgaagggtgtc

SEQ ID NO: 4789889 - DNA, 25 bp, Homo sapien
gaagggtgtcaattggaactctgca

SEQ ID NO: 4789890 - DNA, 25 bp, Homo sapien
tctttatggtaacccaagcagacta

SEQ ID NO: 4789891 - DNA, 25 bp, Homo sapien
tcccatcttacaacaacctaatgtt

SEQ ID NO: 4789892 - DNA, 25 bp, Homo sapien
tgccctctcctcataacaaaattca

SEQ ID NO: 4789893 - DNA, 25 bp, Homo sapien
tgtgtccttgactctacagctctgt

SEQ ID NO: 4789894 - DNA, 25 bp, Homo sapien
aatcacccttgctccctaaattcat

SEQ ID NO: 4789895 - DNA, 25 bp, Homo sapien
tggcaaatgctcagtgtgtggatac

SEQ ID NO: 4789896 - DNA, 25 bp, Homo sapien
gctggattggcgcttggcaaatgct

SEQ ID NO: 4789897 - DNA, 25 bp, Homo sapien
tgtgtggatacacatccagggatct

SEQ ID NO: 4789898 - DNA, 25 bp, Homo sapien
tcagtgtgtggatacacatccaggg

SEQ ID NO: 4789899 - DNA, 25 bp, Homo sapien
taacccacagttaggataatcaggg

SEQ ID NO: 4789900 - DNA, 25 bp, Homo sapien
aaaggcatttctcacacagagaggc

SEQ ID NO: 4789901 - DNA, 25 bp, Homo sapien
ccatgtacaatgctgagaacctggg

SEQ ID NO: 4789902 - DNA, 25 bp, Homo sapien
cataaaagatggatagcagtggtcc

SEQ ID NO: 4789903 - DNA, 25 bp, Homo sapien
tatgggcaaaccaacagagaggcca

SEQ ID NO: 4789904 - DNA, 25 bp, Homo sapien
caagtgattgcaatatgatgccatc

SEQ ID NO: 4789905 - DNA, 25 bp, Homo sapien
tatagactttccagatgccattggc

SEQ ID NO: 4789906 - DNA, 25 bp, Homo sapien
atcattcaccgagggacagtttgtt

SEQ ID NO: 4789907 - DNA, 25 bp, Homo sapien
tagttcatgtcgtcagaggatttca

SEQ ID NO: 4789908 - DNA, 25 bp, Homo sapien
tccagaaggtacaggttagagcatg

SEQ ID NO: 4789909 - DNA, 25 bp, Homo sapien
tcgctgccgttatcaactgcatagg

SEQ ID NO: 4789910 - DNA, 25 bp, Homo sapien
ccgttataatcagtcaggagcaagg

SEQ ID NO: 4789911 - DNA, 25 bp, Homo sapien
cctggctgacatttacaactgtatg

SEQ ID NO: 4789912 - DNA, 25 bp, Homo sapien
cattgatgttcaattcacagtgtga

SEQ ID NO: 4789913 - DNA, 25 bp, Homo sapien
cagtgtgatcctgtgaagccagctg

SEQ ID NO: 4789914 - DNA, 25 bp, Homo sapien
tggattagactgacattcattgatg

SEQ ID NO: 4789915 - DNA, 25 bp, Homo sapien
ttatttaagcatgggtttgactggc

SEQ ID NO: 4789916 - DNA, 25 bp, Homo sapien
ggcaccgtctttacaggtagctcca

SEQ ID NO: 4789917 - DNA, 25 bp, Homo sapien
tcgacgttctttccacatcgggtac

SEQ ID NO: 4789918 - DNA, 25 bp, Homo sapien
catcgggtacccaaaaatccaggtg

SEQ ID NO: 4789919 - DNA, 25 bp, Homo sapien
tgtgcaacgatagccagccacacca

SEQ ID NO: 4789920 - DNA, 25 bp, Homo sapien
gccacaccatcaacacagattcctt

SEQ ID NO: 4789921 - DNA, 25 bp, Homo sapien
acacatgtgcaacgatagccagcca

SEQ ID NO: 4789922 - DNA, 25 bp, Homo sapien
taaacaaggactggagctacactca

SEQ ID NO: 4789923 - DNA, 25 bp, Homo sapien
cacaaatgaattccccaactaggtc

SEQ ID NO: 4789924 - DNA, 25 bp, Homo sapien
taacctgatgggcactcacaaatga

SEQ ID NO: 4789925 - DNA, 25 bp, Homo sapien
tacaaactccattgttgaggcaagg

SEQ ID NO: 4789926 - DNA, 25 bp, Homo sapien
cagtgggctgcactcatcgatgtct

SEQ ID NO: 4789927 - DNA, 25 bp, Homo sapien
ggacagagacaaacataaccacgcc

SEQ ID NO: 4789928 - DNA, 25 bp, Homo sapien
caaacataaccacgcccaagttgct

SEQ ID NO: 4789929 - DNA, 25 bp, Homo sapien
gagacaaacataaccacgcccaagt

SEQ ID NO: 4789930 - DNA, 25 bp, Homo sapien
cataaccacgcccaagttgctggca

SEQ ID NO: 4789931 - DNA, 25 bp, Homo sapien
ctattgtggcaagggttaaagaagc

SEQ ID NO: 4789932 - DNA, 25 bp, Homo sapien
attgtggcaagggttaaagaagcat

SEQ ID NO: 4789933 - DNA, 25 bp, Homo sapien
tggcaagggttaaagaagcattcat

SEQ ID NO: 4789934 - DNA, 25 bp, Homo sapien
tgtggcaagggttaaagaagcattc

SEQ ID NO: 4789935 - DNA, 25 bp, Homo sapien
ttccaagcattccactagagaacag

SEQ ID NO: 4789936 - DNA, 25 bp, Homo sapien
gctttccaagcattccactagagaa

SEQ ID NO: 4789937 - DNA, 25 bp, Homo sapien
tttccaagcattccactagagaaca

SEQ ID NO: 4789938 - DNA, 25 bp, Homo sapien
tgctttccaagcattccactagaga

SEQ ID NO: 4789939 - DNA, 25 bp, Homo sapien
ttttaatatgtccaagagaggcagg

SEQ ID NO: 4789940 - DNA, 25 bp, Homo sapien
gactgctgatttcatgcctcttttt

SEQ ID NO: 4789941 - DNA, 25 bp, Homo sapien
ggcagggggcaccacactttcctct

SEQ ID NO: 4789942 - DNA, 25 bp, Homo sapien
tcctctgccgctgagaaagttgaac

SEQ ID NO: 4789943 - DNA, 25 bp, Homo sapien
agtgtggcaaatatgccagtaagtg

SEQ ID NO: 4789944 - DNA, 25 bp, Homo sapien
cagagtgggtaaagccacatatatt

SEQ ID NO: 4789945 - DNA, 25 bp, Homo sapien
tatctaacactatggtcaagattct

SEQ ID NO: 4789946 - DNA, 25 bp, Homo sapien
aacactatggtcaagattctggttg

SEQ ID NO: 4789947 - DNA, 25 bp, Homo sapien
tccctgcattaggttggtaatagtc

SEQ ID NO: 4789948 - DNA, 25 bp, Homo sapien
tgacagggcattaacccagaacgcg

SEQ ID NO: 4789949 - DNA, 25 bp, Homo sapien
cattctgtgatggatctggaaccag

SEQ ID NO: 4789950 - DNA, 25 bp, Homo sapien
taatagtcacgaggacatgggtgac

SEQ ID NO: 4789951 - DNA, 25 bp, Homo sapien
gtatgaattcaggttgggtatgtcc

SEQ ID NO: 4789952 - DNA, 25 bp, Homo sapien
aaagtagctactcaggatgtcaaca

SEQ ID NO: 4789953 - DNA, 25 bp, Homo sapien
catcatctggatagctttaaagcca

SEQ ID NO: 4789954 - DNA, 25 bp, Homo sapien
gagtactcatgacttaactctttgg

SEQ ID NO: 4789955 - DNA, 25 bp, Homo sapien
caagtccactgtatgagtaggtgcc

SEQ ID NO: 4789956 - DNA, 25 bp, Homo sapien
gcagctccgggaaccaaattttggc

SEQ ID NO: 4789957 - DNA, 25 bp, Homo sapien
ttttctggacacgagaggcagctcc

SEQ ID NO: 4789958 - DNA, 25 bp, Homo sapien
tgcccagtggacacgattcacaagt

SEQ ID NO: 4789959 - DNA, 25 bp, Homo sapien
taaatatcataccttgccttggcat

SEQ ID NO: 4789960 - DNA, 25 bp, Homo sapien
gaaatgcccaccctatactcagagg

SEQ ID NO: 4789961 - DNA, 25 bp, Homo sapien
ctggaggctcctatgtcacctaaaa

SEQ ID NO: 4789962 - DNA, 25 bp, Homo sapien
gcctcagacaagagccgagtgttgg

SEQ ID NO: 4789963 - DNA, 25 bp, Homo sapien
gatccgatccggcagctttcacagg

SEQ ID NO: 4789964 - DNA, 25 bp, Homo sapien
tcttcatcttgataggatccgatcc

SEQ ID NO: 4789965 - DNA, 25 bp, Homo sapien
taataggttcccaaagggcaattga

SEQ ID NO: 4789966 - DNA, 25 bp, Homo sapien
tatattccgtgtacatcccagaggg

SEQ ID NO: 4789967 - DNA, 25 bp, Homo sapien
tgacccagtatgcaccaaatatttt

SEQ ID NO: 4789968 - DNA, 25 bp, Homo sapien
tttgacccagtatgcaccaaatatt

SEQ ID NO: 4789969 - DNA, 25 bp, Homo sapien
tcatttgacccagtatgcaccaaat

SEQ ID NO: 4789970 - DNA, 25 bp, Homo sapien
catctcatttgacccagtatgcacc

SEQ ID NO: 4789971 - DNA, 25 bp, Homo sapien
tgctgtcggctataagtatttctga

SEQ ID NO: 4789972 - DNA, 25 bp, Homo sapien
gagtcgttgctgattttcccattca

SEQ ID NO: 4789973 - DNA, 25 bp, Homo sapien
tagtttccaatgtctgaaggagtcg

SEQ ID NO: 4789974 - DNA, 25 bp, Homo sapien
catttctttcatcgggtaatggcac

SEQ ID NO: 4789975 - DNA, 25 bp, Homo sapien
gaagtcatcgtaagagtaatccagc

SEQ ID NO: 4789976 - DNA, 25 bp, Homo sapien
gggcacttcttttaatccgtgagga

SEQ ID NO: 4789977 - DNA, 25 bp, Homo sapien
gagtaatccagcctattagctgcac

SEQ ID NO: 4789978 - DNA, 25 bp, Homo sapien
ttgccgatgcttgtggctgtttctt

SEQ ID NO: 4789979 - DNA, 25 bp, Homo sapien
cacagagtgtgttgatagcttgctc

SEQ ID NO: 4789980 - DNA, 25 bp, Homo sapien
tgcttaaaatggtcacatgaggtga

SEQ ID NO: 4789981 - DNA, 25 bp, Homo sapien
taagtagttggttgtagagtccacg

SEQ ID NO: 4789982 - DNA, 25 bp, Homo sapien
gaaaagatgtctgccgtaatgcgaa

SEQ ID NO: 4789983 - DNA, 25 bp, Homo sapien
tttgaattttaccagcatatgtgac

SEQ ID NO: 4789984 - DNA, 25 bp, Homo sapien
attttaccagcatatgtgacttagt

SEQ ID NO: 4789985 - DNA, 25 bp, Homo sapien
gaattttaccagcatatgtgactta

SEQ ID NO: 4789986 - DNA, 25 bp, Homo sapien
ttgaattttaccagcatatgtgact

SEQ ID NO: 4789987 - DNA, 25 bp, Homo sapien
taccgatgccacagaatttaattac

SEQ ID NO: 4789988 - DNA, 25 bp, Homo sapien
tctagtttgcctcacttttctggaa

SEQ ID NO: 4789989 - DNA, 25 bp, Homo sapien
taatgtttctagtttgcctcacttt

SEQ ID NO: 4789990 - DNA, 25 bp, Homo sapien
tattttgcagattagtcttgccaac

SEQ ID NO: 4789991 - DNA, 25 bp, Homo sapien
tccagtctgcagtcaatgtcctctg

SEQ ID NO: 4789992 - DNA, 25 bp, Homo sapien
tcatagtcataattatattctaggc

SEQ ID NO: 4789993 - DNA, 25 bp, Homo sapien
tttggtcaggttctcctccagtctg

SEQ ID NO: 4789994 - DNA, 25 bp, Homo sapien
caattgcaaagccattttcatagtc

SEQ ID NO: 4789995 - DNA, 25 bp, Homo sapien
taccgagtctgcagggcatacaaat

SEQ ID NO: 4789996 - DNA, 25 bp, Homo sapien
tatgtatctagcatggttcctgcct

SEQ ID NO: 4789997 - DNA, 25 bp, Homo sapien
gaatggacattcgttaatatgttag

SEQ ID NO: 4789998 - DNA, 25 bp, Homo sapien
tatgttaggtgtacttgtaacgtgc

SEQ ID NO: 4789999 - DNA, 25 bp, Homo sapien
taaatgtacaattatcttttaagtg

SEQ ID NO: 4790000 - DNA, 25 bp, Homo sapien
ttataattgttgtaagagtcctttc

SEQ ID NO: 4790001 - DNA, 25 bp, Homo sapien
tgtacaattatcttttaagtgtcca

SEQ ID NO: 4790002 - DNA, 25 bp, Homo sapien
tgttgtaagagtcctttctaaacaa

SEQ ID NO: 4790003 - DNA, 25 bp, Homo sapien
tgtgtcatcacaacgagctgctttg

SEQ ID NO: 4790004 - DNA, 25 bp, Homo sapien
cccagggtcgtctcaaatgcttcag

SEQ ID NO: 4790005 - DNA, 25 bp, Homo sapien
tttttcccagggtcgtctcaaatgc

SEQ ID NO: 4790006 - DNA, 25 bp, Homo sapien
tcttcatcagatctgtgtcatcaca

SEQ ID NO: 4790007 - DNA, 25 bp, Homo sapien
tgttggtttccagacgccatcttca

SEQ ID NO: 4790008 - DNA, 25 bp, Homo sapien
gcacagtctggccattcagtggtat

SEQ ID NO: 4790009 - DNA, 25 bp, Homo sapien
caataatacttgtcagtagaccctt

SEQ ID NO: 4790010 - DNA, 25 bp, Homo sapien
cttcataagcacaataatacttgtc

SEQ ID NO: 4790011 - DNA, 25 bp, Homo sapien
aaatcatagccctccaagcaagtta

SEQ ID NO: 4790012 - DNA, 25 bp, Homo sapien
tcatagccctccaagcaagttaatg

SEQ ID NO: 4790013 - DNA, 25 bp, Homo sapien
gtgaatggaatttcacagggagaac

SEQ ID NO: 4790014 - DNA, 25 bp, Homo sapien
ctggagtgcatataaaatccccatt

SEQ ID NO: 4790015 - DNA, 25 bp, Homo sapien
cccatttacaggtgtgaatggaatt

SEQ ID NO: 4790016 - DNA, 25 bp, Homo sapien
gtgcatataaaatccccatttacag

SEQ ID NO: 4790017 - DNA, 25 bp, Homo sapien
gacttctggtaatgaccaattcagc

SEQ ID NO: 4790018 - DNA, 25 bp, Homo sapien
gggtcagtggctgtatactgtacta

SEQ ID NO: 4790019 - DNA, 25 bp, Homo sapien
ggtctccttgtgtatgacttctggt

SEQ ID NO: 4790020 - DNA, 25 bp, Homo sapien
actgtactatagtctccccttgagg

SEQ ID NO: 4790021 - DNA, 25 bp, Homo sapien
gcaccagtctatgacaggtggttct

SEQ ID NO: 4790022 - DNA, 25 bp, Homo sapien
cttctccgagacctggacgggaggt

SEQ ID NO: 4790023 - DNA, 25 bp, Homo sapien
tcatcccagcttgcggcatgtacct

SEQ ID NO: 4790024 - DNA, 25 bp, Homo sapien
gagatctgcaccagtctatgacagg

SEQ ID NO: 4790025 - DNA, 25 bp, Homo sapien
ggcaattaagcagaaagacatggca

SEQ ID NO: 4790026 - DNA, 25 bp, Homo sapien
tcaatgccagttggaagaatcagtg

SEQ ID NO: 4790027 - DNA, 25 bp, Homo sapien
tagaagccagatttgggtgactccg

SEQ ID NO: 4790028 - DNA, 25 bp, Homo sapien
caaaaagtatgcagagtaacaccag

SEQ ID NO: 4790029 - DNA, 25 bp, Homo sapien
caataaccttgatatggaaaatgca

SEQ ID NO: 4790030 - DNA, 25 bp, Homo sapien
aagctggatgaacgtggactgacac

SEQ ID NO: 4790031 - DNA, 25 bp, Homo sapien
cgtgtatacgatagcaacatctcca

SEQ ID NO: 4790032 - DNA, 25 bp, Homo sapien
cctggttgccggataggtcagttgc

SEQ ID NO: 4790033 - DNA, 25 bp, Homo sapien
cagagtcttagcctctatgtcctta

SEQ ID NO: 4790034 - DNA, 25 bp, Homo sapien
caggtaacattggcagaatcttgct

SEQ ID NO: 4790035 - DNA, 25 bp, Homo sapien
cagttgatttgaggagcctccacgt

SEQ ID NO: 4790036 - DNA, 25 bp, Homo sapien
atcttgctgttccagagtcttagcc

SEQ ID NO: 4790037 - DNA, 25 bp, Homo sapien
cagaaaaatacacaagtagattaat

SEQ ID NO: 4790038 - DNA, 25 bp, Homo sapien
gaaaaatacacaagtagattaatac

SEQ ID NO: 4790039 - DNA, 25 bp, Homo sapien
aaaaatacacaagtagattaataca

SEQ ID NO: 4790040 - DNA, 25 bp, Homo sapien
ctcagaaaaatacacaagtagatta

SEQ ID NO: 4790041 - DNA, 25 bp, Homo sapien
aatgtgatgccaggtttcaaagtgc

SEQ ID NO: 4790042 - DNA, 25 bp, Homo sapien
tctcacctgctttatatagaccaag

SEQ ID NO: 4790043 - DNA, 25 bp, Homo sapien
aactcctttttcatagcggtctgct

SEQ ID NO: 4790044 - DNA, 25 bp, Homo sapien
gaactccttattaaatggacattgg

SEQ ID NO: 4790045 - DNA, 25 bp, Homo sapien
gattttgtaaattcaccactttcaa

SEQ ID NO: 4790046 - DNA, 25 bp, Homo sapien
ttcagctctactattttccttattt

SEQ ID NO: 4790047 - DNA, 25 bp, Homo sapien
cagctctactattttccttatttgt

SEQ ID NO: 4790048 - DNA, 25 bp, Homo sapien
tttgtaaattcaccactttcaacca

SEQ ID NO: 4790049 - DNA, 25 bp, Homo sapien
tagcacctaaccatattatcatggg

SEQ ID NO: 4790050 - DNA, 25 bp, Homo sapien
tagcctgactagtgtagagacctac

SEQ ID NO: 4790051 - DNA, 25 bp, Homo sapien
tactgcacccatatggcaatattaa

SEQ ID NO: 4790052 - DNA, 25 bp, Homo sapien
aaagttgcaaagaaggattgtccta

SEQ ID NO: 4790053 - DNA, 25 bp, Homo sapien
ctgcctgaactccgacattccattt

SEQ ID NO: 4790054 - DNA, 25 bp, Homo sapien
gctgcctgaactccgacattccatt

SEQ ID NO: 4790055 - DNA, 25 bp, Homo sapien
agctgcctgaactccgacattccat

SEQ ID NO: 4790056 - DNA, 25 bp, Homo sapien
gctggctgcttgccacagttgtggg

SEQ ID NO: 4790057 - DNA, 25 bp, Homo sapien
gatcgtcccaaatttggctggctgc

SEQ ID NO: 4790058 - DNA, 25 bp, Homo sapien
atagcagatcgtcccaaatttggct

SEQ ID NO: 4790059 - DNA, 25 bp, Homo sapien
gatatgatgacatctttgggcatct

SEQ ID NO: 4790060 - DNA, 25 bp, Homo sapien
gagactggttagcattcacttacat

SEQ ID NO: 4790061 - DNA, 25 bp, Homo sapien
cacaaggagctagtcaattttcccc

SEQ ID NO: 4790062 - DNA, 25 bp, Homo sapien
tacttacggtgagcgtgtctttaac

SEQ ID NO: 4790063 - DNA, 25 bp, Homo sapien
tgtaatctgtatggcaatccttgca

SEQ ID NO: 4790064 - DNA, 25 bp, Homo sapien
gccaaatttgataagactgtctata

SEQ ID NO: 4790065 - DNA, 25 bp, Homo sapien
tattgtttctccataagtggctgca

SEQ ID NO: 4790066 - DNA, 25 bp, Homo sapien
cagtgtgggttgctagtatatttgc

SEQ ID NO: 4790067 - DNA, 25 bp, Homo sapien
cagcttttacagaccaacgtaatgt

SEQ ID NO: 4790068 - DNA, 25 bp, Homo sapien
gccatgtttcggctggcggagatga

SEQ ID NO: 4790069 - DNA, 25 bp, Homo sapien
tcttatataacatttcccttgtaga

SEQ ID NO: 4790070 - DNA, 25 bp, Homo sapien
tagtctgtacccttcatcacaggca

SEQ ID NO: 4790071 - DNA, 25 bp, Homo sapien
aagtaagcttatcactgccttctag

SEQ ID NO: 4790072 - DNA, 25 bp, Homo sapien
tgctgatcccatgaccagtggtggc

SEQ ID NO: 4790073 - DNA, 25 bp, Homo sapien
gctgggtagcctctcaagttgactt

SEQ ID NO: 4790074 - DNA, 25 bp, Homo sapien
gaagtggtcattgtcatcagagtca

SEQ ID NO: 4790075 - DNA, 25 bp, Homo sapien
gggttgatcaaaagaggaacttgca

SEQ ID NO: 4790076 - DNA, 25 bp, Homo sapien
tctataacgggtcgactagccgaag

SEQ ID NO: 4790077 - DNA, 25 bp, Homo sapien
tactgtactgagaagctttgtgggc

SEQ ID NO: 4790078 - DNA, 25 bp, Homo sapien
gatggaggtcctcaagtccctttgc

SEQ ID NO: 4790079 - DNA, 25 bp, Homo sapien
tgtttcaactggcaaccgtaggtag

SEQ ID NO: 4790080 - DNA, 25 bp, Homo sapien
ggaccccacaggctgcattgaagtg

SEQ ID NO: 4790081 - DNA, 25 bp, Homo sapien
tccagggtgacatcggaccccacag

SEQ ID NO: 4790082 - DNA, 25 bp, Homo sapien
ggtagacataagatgatgctgcttc

SEQ ID NO: 4790083 - DNA, 25 bp, Homo sapien
tctgaaccggaccacaaaccattgg

SEQ ID NO: 4790084 - DNA, 25 bp, Homo sapien
aggacatggaatgcaactgctgatt

SEQ ID NO: 4790085 - DNA, 25 bp, Homo sapien
gttcacaggtctggccagatgccct

SEQ ID NO: 4790086 - DNA, 25 bp, Homo sapien
ctcctggtgagccttcaggtttgta

SEQ ID NO: 4790087 - DNA, 25 bp, Homo sapien
acacagtcttcaggggatgtgcttc

SEQ ID NO: 4790088 - DNA, 25 bp, Homo sapien
gacaagccggagaagtccatgttat

SEQ ID NO: 4790089 - DNA, 25 bp, Homo sapien
caagccggagaagtccatgttatgt

SEQ ID NO: 4790090 - DNA, 25 bp, Homo sapien
aagccggagaagtccatgttatgtg

SEQ ID NO: 4790091 - DNA, 25 bp, Homo sapien
gccggagaagtccatgttatgtggc

SEQ ID NO: 4790092 - DNA, 25 bp, Homo sapien
gaatgcattagcagcctgtcgttct

SEQ ID NO: 4790093 - DNA, 25 bp, Homo sapien
ctctgtagaatgcattagcagcctg

SEQ ID NO: 4790094 - DNA, 25 bp, Homo sapien
tagcagcctgtcgttctccctgtga

SEQ ID NO: 4790095 - DNA, 25 bp, Homo sapien
ctccctgtgactggtggtagctcat

SEQ ID NO: 4790096 - DNA, 25 bp, Homo sapien
tggacaaagttgtgaatctgaaccc

SEQ ID NO: 4790097 - DNA, 25 bp, Homo sapien
gagtacagactatttggacaaagtt

SEQ ID NO: 4790098 - DNA, 25 bp, Homo sapien
ggccagagtacagactatttggaca

SEQ ID NO: 4790099 - DNA, 25 bp, Homo sapien
ttgtgaatctgaaccctgatgtggt

SEQ ID NO: 4790100 - DNA, 25 bp, Homo sapien
ccagcttaagttgatggaaccagtg

SEQ ID NO: 4790101 - DNA, 25 bp, Homo sapien
tagactggaaaatgcactatcaggg

SEQ ID NO: 4790102 - DNA, 25 bp, Homo sapien
ggaaccagtgtcaacatgctagcga

SEQ ID NO: 4790103 - DNA, 25 bp, Homo sapien
tggaacaaactagcctgatttaggc

SEQ ID NO: 4790104 - DNA, 25 bp, Homo sapien
ttcatgaatttgctagtcacccttg

SEQ ID NO: 4790105 - DNA, 25 bp, Homo sapien
ttgctagtcacccttgcacagaggg

SEQ ID NO: 4790106 - DNA, 25 bp, Homo sapien
taacactccgattttagtatatatg

SEQ ID NO: 4790107 - DNA, 25 bp, Homo sapien
tttctctgtaacactccgattttag

SEQ ID NO: 4790108 - DNA, 25 bp, Homo sapien
aatgtgttattggtagtagacaagg

SEQ ID NO: 4790109 - DNA, 25 bp, Homo sapien
gctgcgcctttcatcctggaatgtg

SEQ ID NO: 4790110 - DNA, 25 bp, Homo sapien
ttacagactgctgcgcctttcatcc

SEQ ID NO: 4790111 - DNA, 25 bp, Homo sapien
agactgctgcgcctttcatcctgga

SEQ ID NO: 4790112 - DNA, 25 bp, Homo sapien
gtcccctgggatgcaaaattctagt

SEQ ID NO: 4790113 - DNA, 25 bp, Homo sapien
tcccctgggatgcaaaattctagtg

SEQ ID NO: 4790114 - DNA, 25 bp, Homo sapien
tgtcccctgggatgcaaaattctag

SEQ ID NO: 4790115 - DNA, 25 bp, Homo sapien
agcaagagtcgcagcacagagtggc

SEQ ID NO: 4790116 - DNA, 25 bp, Homo sapien
gagcagttcagtctaggaccacacg

SEQ ID NO: 4790117 - DNA, 25 bp, Homo sapien
cacacggaaagcagacatgctgact

SEQ ID NO: 4790118 - DNA, 25 bp, Homo sapien
gctgactacagcatccagcaaagaa

SEQ ID NO: 4790119 - DNA, 25 bp, Homo sapien
caaaatggcctgtgtgtgtcccaca

SEQ ID NO: 4790120 - DNA, 25 bp, Homo sapien
cttgccttcatcacaaagatatgag

SEQ ID NO: 4790121 - DNA, 25 bp, Homo sapien
ttcccattcggtcacagcagtcctt

SEQ ID NO: 4790122 - DNA, 25 bp, Homo sapien
cattcatactgcagacctttcccgt

SEQ ID NO: 4790123 - DNA, 25 bp, Homo sapien
taatctgaggctagatttcctgtga

SEQ ID NO: 4790124 - DNA, 25 bp, Homo sapien
tgtgatttcttcctagtctgtattt

SEQ ID NO: 4790125 - DNA, 25 bp, Homo sapien
caaggatcaagcctaatttgccata

SEQ ID NO: 4790126 - DNA, 25 bp, Homo sapien
tcctagctcactaagacataaacct

SEQ ID NO: 4790127 - DNA, 25 bp, Homo sapien
taagtcaaggcttcccactctgtgt

SEQ ID NO: 4790128 - DNA, 25 bp, Homo sapien
ggacacatgggcatcatattcagca

SEQ ID NO: 4790129 - DNA, 25 bp, Homo sapien
tgttgcaaggtcagaatgtcatctc

SEQ ID NO: 4790130 - DNA, 25 bp, Homo sapien
gagtttgatattaccctcccatggg

SEQ ID NO: 4790131 - DNA, 25 bp, Homo sapien
tcctgaatctcgcagtgacgctgca

SEQ ID NO: 4790132 - DNA, 25 bp, Homo sapien
gctgcaattggtctagggtctcccc

SEQ ID NO: 4790133 - DNA, 25 bp, Homo sapien
tgtgtagcaggtaacagtgctcctc

SEQ ID NO: 4790134 - DNA, 25 bp, Homo sapien
tgcccggcgagctaaagcctcaaat

SEQ ID NO: 4790135 - DNA, 25 bp, Homo sapien
tttgattactgcttcttctacaagg

SEQ ID NO: 4790136 - DNA, 25 bp, Homo sapien
gacacccaccctaagcttgtgctca

SEQ ID NO: 4790137 - DNA, 25 bp, Homo sapien
tctacaaggtcacagcagttaactg

SEQ ID NO: 4790138 - DNA, 25 bp, Homo sapien
gcagttaactgtaagcaagacatta

SEQ ID NO: 4790139 - DNA, 25 bp, Homo sapien
cattacaggagtggttaaagggcag

SEQ ID NO: 4790140 - DNA, 25 bp, Homo sapien
ccaagtcttgtactgaggttctgca

SEQ ID NO: 4790141 - DNA, 25 bp, Homo sapien
taatcatgcttatcactggtaggac

SEQ ID NO: 4790142 - DNA, 25 bp, Homo sapien
agaatttagactttggcccagactg

SEQ ID NO: 4790143 - DNA, 25 bp, Homo sapien
ctccagaggtgctgtaaagtttacc

SEQ ID NO: 4790144 - DNA, 25 bp, Homo sapien
gtctgagatccttccaaacacttta

SEQ ID NO: 4790145 - DNA, 25 bp, Homo sapien
agtttacctctttgatcacaatttg

SEQ ID NO: 4790146 - DNA, 25 bp, Homo sapien
cactttatattgctctctcgggaaa

SEQ ID NO: 4790147 - DNA, 25 bp, Homo sapien
tttccctgatgcagcagggttcttc

SEQ ID NO: 4790148 - DNA, 25 bp, Homo sapien
cgggcaagtctggccaagccaaaca

SEQ ID NO: 4790149 - DNA, 25 bp, Homo sapien
tggcacatggcaggtttttccctga

SEQ ID NO: 4790150 - DNA, 25 bp, Homo sapien
ctgtttcagcttggataccgtctgc

SEQ ID NO: 4790151 - DNA, 25 bp, Homo sapien
tgtttcagcttggataccgtctgct

SEQ ID NO: 4790152 - DNA, 25 bp, Homo sapien
gtttcagcttggataccgtctgctc

SEQ ID NO: 4790153 - DNA, 25 bp, Homo sapien
gcttgcggacgaacatgagctcgct

SEQ ID NO: 4790154 - DNA, 25 bp, Homo sapien
tcttggacgagaaggtcacgatggc

SEQ ID NO: 4790155 - DNA, 25 bp, Homo sapien
cgcgcggcaccacgtagttcttgga

SEQ ID NO: 4790156 - DNA, 25 bp, Homo sapien
taggtgccgccacctcggtaggaga

SEQ ID NO: 4790157 - DNA, 25 bp, Homo sapien
ctgctgaaaggtcgcccagcccgaa

SEQ ID NO: 4790158 - DNA, 25 bp, Homo sapien
agcgccagaccccagcaacaaaagg

SEQ ID NO: 4790159 - DNA, 25 bp, Homo sapien
aacaaaaggccaggcgaggccacat

SEQ ID NO: 4790160 - DNA, 25 bp, Homo sapien
aaggtcgcccagcccgaaacgagcg

SEQ ID NO: 4790161 - DNA, 25 bp, Homo sapien
tcagcgccctttcatctgacactgg

SEQ ID NO: 4790162 - DNA, 25 bp, Homo sapien
tggggacagacacaatccagactcc

SEQ ID NO: 4790163 - DNA, 25 bp, Homo sapien
cagtcaagaaaaatctcccgcttcc

SEQ ID NO: 4790164 - DNA, 25 bp, Homo sapien
cagactcctcagcagctcgggaact

SEQ ID NO: 4790165 - DNA, 25 bp, Homo sapien
tcttttccgattttgtagagaatgg

SEQ ID NO: 4790166 - DNA, 25 bp, Homo sapien
atcttttccgattttgtagagaatg

SEQ ID NO: 4790167 - DNA, 25 bp, Homo sapien
agagtgaccaatctgagaaacccag

SEQ ID NO: 4790168 - DNA, 25 bp, Homo sapien
gagctgtgctcctccgagaaaaaga

SEQ ID NO: 4790169 - DNA, 25 bp, Homo sapien
cagacagttagttgaagtggagaca

SEQ ID NO: 4790170 - DNA, 25 bp, Homo sapien
caagagaatgtaagggtgaagccaa

SEQ ID NO: 4790171 - DNA, 25 bp, Homo sapien
atcctcaatgctggttacctgcccc

SEQ ID NO: 4790172 - DNA, 25 bp, Homo sapien
aacatcaggtttcccacatcctggg

SEQ ID NO: 4790173 - DNA, 25 bp, Homo sapien
acatcctggggtacaaaattcatcc

SEQ ID NO: 4790174 - DNA, 25 bp, Homo sapien
aaacatcaggtttcccacatcctgg

SEQ ID NO: 4790175 - DNA, 25 bp, Homo sapien
cttgaagaattggtaggcagcagac

SEQ ID NO: 4790176 - DNA, 25 bp, Homo sapien
aaatttgcgtatactcaagtccggc

SEQ ID NO: 4790177 - DNA, 25 bp, Homo sapien
gcatttggcccggtagaatccacgt

SEQ ID NO: 4790178 - DNA, 25 bp, Homo sapien
tagggaaataccaaccttcaagtgc

SEQ ID NO: 4790179 - DNA, 25 bp, Homo sapien
gctgaacagagcatataacactccc

SEQ ID NO: 4790180 - DNA, 25 bp, Homo sapien
tcaagtgtctccagctcaaaataat

SEQ ID NO: 4790181 - DNA, 25 bp, Homo sapien
gagcctctgggtatcacacaactgt

SEQ ID NO: 4790182 - DNA, 25 bp, Homo sapien
ttgaccaatctgtggaatgccttcc

SEQ ID NO: 4790183 - DNA, 25 bp, Homo sapien
gacatcaagggattgatttgcacag

SEQ ID NO: 4790184 - DNA, 25 bp, Homo sapien
cttcatgacatcaagggattgattt

SEQ ID NO: 4790185 - DNA, 25 bp, Homo sapien
gattgatttgcacagccataattca

SEQ ID NO: 4790186 - DNA, 25 bp, Homo sapien
caagggattgatttgcacagccata

SEQ ID NO: 4790187 - DNA, 25 bp, Homo sapien
cacttaccatgaacgaagatttcag

SEQ ID NO: 4790188 - DNA, 25 bp, Homo sapien
tatggatagcctattgcccgtaggc

SEQ ID NO: 4790189 - DNA, 25 bp, Homo sapien
ggtcaggatcaaaacatcactgcct

SEQ ID NO: 4790190 - DNA, 25 bp, Homo sapien
ctgagaaatgcatccatagttcatt

SEQ ID NO: 4790191 - DNA, 25 bp, Homo sapien
taaatataaatacgtataactatat

SEQ ID NO: 4790192 - DNA, 25 bp, Homo sapien
gcatgttcaggtccacaaactcagg

SEQ ID NO: 4790193 - DNA, 25 bp, Homo sapien
ccatgatgcggttgctggcggaaca

SEQ ID NO: 4790194 - DNA, 25 bp, Homo sapien
cattctgagaatggtcctacagaca

SEQ ID NO: 4790195 - DNA, 25 bp, Homo sapien
cctgcctataaccttgtcaaccttg

SEQ ID NO: 4790196 - DNA, 25 bp, Homo sapien
aggatcctgcgggctcctgaatccc

SEQ ID NO: 4790197 - DNA, 25 bp, Homo sapien
tcctttgtgaccctgcactgtacag

SEQ ID NO: 4790198 - DNA, 25 bp, Homo sapien
aacagtttttgccaggatcctgcgg

SEQ ID NO: 4790199 - DNA, 25 bp, Homo sapien
acctttggctcctttgtgaccctgc

SEQ ID NO: 4790200 - DNA, 25 bp, Homo sapien
cccggccctgggccatattctaaca

SEQ ID NO: 4790201 - DNA, 25 bp, Homo sapien
cggccctgggccatattctaacagt

SEQ ID NO: 4790202 - DNA, 25 bp, Homo sapien
gcacccggccctgggccatattcta

SEQ ID NO: 4790203 - DNA, 25 bp, Homo sapien
taacagttccacaggatatttccag

SEQ ID NO: 4790204 - DNA, 25 bp, Homo sapien
gttaaaacgtattatgactaataac

SEQ ID NO: 4790205 - DNA, 25 bp, Homo sapien
gttattagtcataatacgttttaac

SEQ ID NO: 4790206 - DNA, 25 bp, Homo sapien
gaaacctgaggtgcgaaaaaatatc

SEQ ID NO: 4790207 - DNA, 25 bp, Homo sapien
tgttgatcagaaccatccatgaaga

SEQ ID NO: 4790208 - DNA, 25 bp, Homo sapien
gtcacaaactgaatcaagcaaggcc

SEQ ID NO: 4790209 - DNA, 25 bp, Homo sapien
aagtccaggagaagagacgtcaggc

SEQ ID NO: 4790210 - DNA, 25 bp, Homo sapien
cttctgcgcaaaagaatggctggta

SEQ ID NO: 4790211 - DNA, 25 bp, Homo sapien
tcacgggacagtacactagatttca

SEQ ID NO: 4790212 - DNA, 25 bp, Homo sapien
cagatccgagatgcatttgctgtcc

SEQ ID NO: 4790213 - DNA, 25 bp, Homo sapien
tgtccgtgccagaatgcagcaagct

SEQ ID NO: 4790214 - DNA, 25 bp, Homo sapien
caattctttgttatatgagcagcca

SEQ ID NO: 4790215 - DNA, 25 bp, Homo sapien
caaattgttattcccaaatcgaagg

SEQ ID NO: 4790216 - DNA, 25 bp, Homo sapien
cgatacatgtaagaaaatgagctcc

SEQ ID NO: 4790217 - DNA, 25 bp, Homo sapien
gctgtgtggaaggaccagaccattc

SEQ ID NO: 4790218 - DNA, 25 bp, Homo sapien
gagaaaacttgggatgactcagtcc

SEQ ID NO: 4790219 - DNA, 25 bp, Homo sapien
ctagctttcaagtcagtcagagagg

SEQ ID NO: 4790220 - DNA, 25 bp, Homo sapien
tctgttgagtccaccactcctgtgg

SEQ ID NO: 4790221 - DNA, 25 bp, Homo sapien
tactcagggcataatcactgggtcc

SEQ ID NO: 4790222 - DNA, 25 bp, Homo sapien
tgccctgggagtcatgccgtttcac

SEQ ID NO: 4790223 - DNA, 25 bp, Homo sapien
ccagggcacctagagagtgggttcc

SEQ ID NO: 4790224 - DNA, 25 bp, Homo sapien
gaagcgtctccattctgttgctact

SEQ ID NO: 4790225 - DNA, 25 bp, Homo sapien
tacggttcggtctccttaggtgctc

SEQ ID NO: 4790226 - DNA, 25 bp, Homo sapien
tccagagccatctatatgccagtta

SEQ ID NO: 4790227 - DNA, 25 bp, Homo sapien
aaacatgctcatgtttccagagcca

SEQ ID NO: 4790228 - DNA, 25 bp, Homo sapien
caagtcctgtatgtgcaattgctac

SEQ ID NO: 4790229 - DNA, 25 bp, Homo sapien
aacatttgacacgatgggattcctc

SEQ ID NO: 4790230 - DNA, 25 bp, Homo sapien
gccaccctgcccgaattctggcaga

SEQ ID NO: 4790231 - DNA, 25 bp, Homo sapien
ccaccctgcccgaattctggcagaa

SEQ ID NO: 4790232 - DNA, 25 bp, Homo sapien
caccctgcccgaattctggcagaag

SEQ ID NO: 4790233 - DNA, 25 bp, Homo sapien
gagccaccctgcccgaattctggca

SEQ ID NO: 4790234 - DNA, 25 bp, Homo sapien
tctacatagtcactcaagctgatgg

SEQ ID NO: 4790235 - DNA, 25 bp, Homo sapien
tgtcaacattaaggacatcccctga

SEQ ID NO: 4790236 - DNA, 25 bp, Homo sapien
ggatgtcactctcttattctgccgc

SEQ ID NO: 4790237 - DNA, 25 bp, Homo sapien
tatctgcagccgtgtgcttagggac

SEQ ID NO: 4790238 - DNA, 25 bp, Homo sapien
tagtgggaaaaacacccacgcaatg

SEQ ID NO: 4790239 - DNA, 25 bp, Homo sapien
ggaaaaacacccacgcaatgcaagc

SEQ ID NO: 4790240 - DNA, 25 bp, Homo sapien
gaagactctcgaacaagagaaatag

SEQ ID NO: 4790241 - DNA, 25 bp, Homo sapien
acgcaatgcaagctggaagactctc

SEQ ID NO: 4790242 - DNA, 25 bp, Homo sapien
catttgctacagatggacccacact

SEQ ID NO: 4790243 - DNA, 25 bp, Homo sapien
gattcctggcgaatacacagtaacc

SEQ ID NO: 4790244 - DNA, 25 bp, Homo sapien
tgcacatgtgtaaaagtccacgttc

SEQ ID NO: 4790245 - DNA, 25 bp, Homo sapien
ggtactttacaagtctgccctctgc

SEQ ID NO: 4790246 - DNA, 25 bp, Homo sapien
gtagtttaaaagcagtccatagtct

SEQ ID NO: 4790247 - DNA, 25 bp, Homo sapien
gacaatcctttattcactcggcaca

SEQ ID NO: 4790248 - DNA, 25 bp, Homo sapien
taccaagagctggataacgagtccc

SEQ ID NO: 4790249 - DNA, 25 bp, Homo sapien
cattgcaggtgtggctaccaagagc

SEQ ID NO: 4790250 - DNA, 25 bp, Homo sapien
aggcataaacgtgtttattaagtga

SEQ ID NO: 4790251 - DNA, 25 bp, Homo sapien
taggcataaacgtgtttattaagtg

SEQ ID NO: 4790252 - DNA, 25 bp, Homo sapien
tcaagatgagggttgtcacataagc

SEQ ID NO: 4790253 - DNA, 25 bp, Homo sapien
tgaattccattgcaagagctccaac

SEQ ID NO: 4790254 - DNA, 25 bp, Homo sapien
gaggctgtttatcctccaagagagg

SEQ ID NO: 4790255 - DNA, 25 bp, Homo sapien
ggacggctggttcctcatctcagtt

SEQ ID NO: 4790256 - DNA, 25 bp, Homo sapien
aaggtggcgctcatttctttgtcgc

SEQ ID NO: 4790257 - DNA, 25 bp, Homo sapien
actccagccaagatggtgtggttga

SEQ ID NO: 4790258 - DNA, 25 bp, Homo sapien
aagccgagcggtctgagccttctgt

SEQ ID NO: 4790259 - DNA, 25 bp, Homo sapien
cagaggatctgcctaaaggtggcgc

SEQ ID NO: 4790260 - DNA, 25 bp, Homo sapien
tggacagcacacgtctagaagtaac

SEQ ID NO: 4790261 - DNA, 25 bp, Homo sapien
tgtggacagcacacgtctagaagta

SEQ ID NO: 4790262 - DNA, 25 bp, Homo sapien
gtggacagcacacgtctagaagtaa

SEQ ID NO: 4790263 - DNA, 25 bp, Homo sapien
acaaaaccaatccaggagtccagca

SEQ ID NO: 4790264 - DNA, 25 bp, Homo sapien
ttactcgccaagctttgtcttgcac

SEQ ID NO: 4790265 - DNA, 25 bp, Homo sapien
actcgccaagctttgtcttgcactg

SEQ ID NO: 4790266 - DNA, 25 bp, Homo sapien
gctttctggacatattagtttttcc

SEQ ID NO: 4790267 - DNA, 25 bp, Homo sapien
tgctttctggacatattagtttttc

SEQ ID NO: 4790268 - DNA, 25 bp, Homo sapien
tatcactagaatataatgtcttggc

SEQ ID NO: 4790269 - DNA, 25 bp, Homo sapien
aactttgggagatcacagatatcac

SEQ ID NO: 4790270 - DNA, 25 bp, Homo sapien
cacaatgtctttcattaactttggg

SEQ ID NO: 4790271 - DNA, 25 bp, Homo sapien
cagatatcactagaatataatgtct

SEQ ID NO: 4790272 - DNA, 25 bp, Homo sapien
ctgggtggttgagtctgttgatcca

SEQ ID NO: 4790273 - DNA, 25 bp, Homo sapien
tgaaatgttagcaagcgctttggct

SEQ ID NO: 4790274 - DNA, 25 bp, Homo sapien
ggcttcagaactaaagctcatcagt

SEQ ID NO: 4790275 - DNA, 25 bp, Homo sapien
gggaaacccatgattgtccagcaat

SEQ ID NO: 4790276 - DNA, 25 bp, Homo sapien
tagcctcagtgtgctggcctgcatg

SEQ ID NO: 4790277 - DNA, 25 bp, Homo sapien
cctcagtgtgctggcctgcatgatg

SEQ ID NO: 4790278 - DNA, 25 bp, Homo sapien
acgtagcctcagtgtgctggcctgc

SEQ ID NO: 4790279 - DNA, 25 bp, Homo sapien
cgtagcctcagtgtgctggcctgca

SEQ ID NO: 4790280 - DNA, 25 bp, Homo sapien
tgacattggtgcctctgggaatcca

SEQ ID NO: 4790281 - DNA, 25 bp, Homo sapien
gagctcaagaaaccctagtaattag

SEQ ID NO: 4790282 - DNA, 25 bp, Homo sapien
caagagctgagaaaactagtgactc

SEQ ID NO: 4790283 - DNA, 25 bp, Homo sapien
gattaccgtgtgcaaagaaacatga

SEQ ID NO: 4790284 - DNA, 25 bp, Homo sapien
tccagggataaggatgtgagcatct

SEQ ID NO: 4790285 - DNA, 25 bp, Homo sapien
tagtggtccgtatttctcactccca

SEQ ID NO: 4790286 - DNA, 25 bp, Homo sapien
gagtccttgctaggcaaaaatcaaa

SEQ ID NO: 4790287 - DNA, 25 bp, Homo sapien
cagggattttcttctgtgccgcaag

SEQ ID NO: 4790288 - DNA, 25 bp, Homo sapien
tgaagttgacaagaggcgattagga

SEQ ID NO: 4790289 - DNA, 25 bp, Homo sapien
gactaactgtctttaaaagctcatt

SEQ ID NO: 4790290 - DNA, 25 bp, Homo sapien
gcagaaggagaagtcgtggcctaaa

SEQ ID NO: 4790291 - DNA, 25 bp, Homo sapien
tttcccagcctgtgaagttaagctt

SEQ ID NO: 4790292 - DNA, 25 bp, Homo sapien
agccactgatggttctaatattctt

SEQ ID NO: 4790293 - DNA, 25 bp, Homo sapien
gccactgatggttctaatattctta

SEQ ID NO: 4790294 - DNA, 25 bp, Homo sapien
actgatggttctaatattcttagct

SEQ ID NO: 4790295 - DNA, 25 bp, Homo sapien
ccactgatggttctaatattcttag

SEQ ID NO: 4790296 - DNA, 25 bp, Homo sapien
cctgagcagcggagaaagtaaccag

SEQ ID NO: 4790297 - DNA, 25 bp, Homo sapien
gtccagaagttacagagactgctgc

SEQ ID NO: 4790298 - DNA, 25 bp, Homo sapien
tggtgagtatgcagagagcggacct

SEQ ID NO: 4790299 - DNA, 25 bp, Homo sapien
cttgatggtgagtatgcagagagcg

SEQ ID NO: 4790300 - DNA, 25 bp, Homo sapien
ggtaaatgcagtctaatacttcatt

SEQ ID NO: 4790301 - DNA, 25 bp, Homo sapien
ctaatacttcattccctaaacatca

SEQ ID NO: 4790302 - DNA, 25 bp, Homo sapien
cttaacaaggtaaatgcagtctaat

SEQ ID NO: 4790303 - DNA, 25 bp, Homo sapien
agtctaatacttcattccctaaaca

SEQ ID NO: 4790304 - DNA, 25 bp, Homo sapien
gaactgggtttttgcacacaaggac

SEQ ID NO: 4790305 - DNA, 25 bp, Homo sapien
gagtccgactcccaagctcttcaga

SEQ ID NO: 4790306 - DNA, 25 bp, Homo sapien
aaagtttccatgcagacacatacaa

SEQ ID NO: 4790307 - DNA, 25 bp, Homo sapien
gattataccatgctgactcaggaag

SEQ ID NO: 4790308 - DNA, 25 bp, Homo sapien
ggtttaagtaaagccatgaccacat

SEQ ID NO: 4790309 - DNA, 25 bp, Homo sapien
tgaccacattcagtctagacactat

SEQ ID NO: 4790310 - DNA, 25 bp, Homo sapien
tattagaacctcatatttgctttgg

SEQ ID NO: 4790311 - DNA, 25 bp, Homo sapien
tataataactcctctatgggtgcag

SEQ ID NO: 4790312 - DNA, 25 bp, Homo sapien
gcttcatgttctggttcctctgtcc

SEQ ID NO: 4790313 - DNA, 25 bp, Homo sapien
tctgtccacacttcaaaaggaactc

SEQ ID NO: 4790314 - DNA, 25 bp, Homo sapien
tggatgaacaagagtctcggccaga

SEQ ID NO: 4790315 - DNA, 25 bp, Homo sapien
gcctgaatcactctcaacagaccta

SEQ ID NO: 4790316 - DNA, 25 bp, Homo sapien
tgtgtcagtgatcccaaggcttagt

SEQ ID NO: 4790317 - DNA, 25 bp, Homo sapien
tcattggatgcaataagacaatctc

SEQ ID NO: 4790318 - DNA, 25 bp, Homo sapien
cacaggtgtgcttaaggtcctgtta

SEQ ID NO: 4790319 - DNA, 25 bp, Homo sapien
cagtgtttcagttagttaggcaggg

SEQ ID NO: 4790320 - DNA, 25 bp, Homo sapien
tcacaggtctacaagagggtcaaca

SEQ ID NO: 4790321 - DNA, 25 bp, Homo sapien
ctacaagagggtcaacaatgagtat

SEQ ID NO: 4790322 - DNA, 25 bp, Homo sapien
acaagagggtcaacaatgagtatag

SEQ ID NO: 4790323 - DNA, 25 bp, Homo sapien
gtctacaagagggtcaacaatgagt

SEQ ID NO: 4790324 - DNA, 25 bp, Homo sapien
tcatcctaaccaaaacagacgagac

SEQ ID NO: 4790325 - DNA, 25 bp, Homo sapien
gacgagacctatgcatcaatctgaa

SEQ ID NO: 4790326 - DNA, 25 bp, Homo sapien
caaaacagacgagacctatgcatca

SEQ ID NO: 4790327 - DNA, 25 bp, Homo sapien
tgtccatgatgcagtcatcctaacc

SEQ ID NO: 4790328 - DNA, 25 bp, Homo sapien
ccatgttacattcacccaaaaatgc

SEQ ID NO: 4790329 - DNA, 25 bp, Homo sapien
tcccatgttacattcacccaaaaat

SEQ ID NO: 4790330 - DNA, 25 bp, Homo sapien
aatcccatgttacattcacccaaaa

SEQ ID NO: 4790331 - DNA, 25 bp, Homo sapien
catgttacattcacccaaaaatgct

SEQ ID NO: 4790332 - DNA, 25 bp, Homo sapien
tcaatttccatagggaaagatgaaa

SEQ ID NO: 4790333 - DNA, 25 bp, Homo sapien
tagtctatggagaatgtataattcc

SEQ ID NO: 4790334 - DNA, 25 bp, Homo sapien
tggagccagcacagagcgtagaaca

SEQ ID NO: 4790335 - DNA, 25 bp, Homo sapien
taatgtgatcaaacgttaacctgaa

SEQ ID NO: 4790336 - DNA, 25 bp, Homo sapien
attacctggtgaatattcatactgt

SEQ ID NO: 4790337 - DNA, 25 bp, Homo sapien
tgcctcatccccttgtaattcctgg

SEQ ID NO: 4790338 - DNA, 25 bp, Homo sapien
tataaaggtgcctcatccccttgta

SEQ ID NO: 4790339 - DNA, 25 bp, Homo sapien
tgtaattcctggtgaattacctggt

SEQ ID NO: 4790340 - DNA, 25 bp, Homo sapien
tcatccgtgtgtggagctgcatgcg

SEQ ID NO: 4790341 - DNA, 25 bp, Homo sapien
ggaaaaccgtaatgtgcctctcgat

SEQ ID NO: 4790342 - DNA, 25 bp, Homo sapien
tcaatgaggccctgacgaaggagcc

SEQ ID NO: 4790343 - DNA, 25 bp, Homo sapien
ggtatagcacccataacgatggcca

SEQ ID NO: 4790344 - DNA, 25 bp, Homo sapien
tccatgtgggacagacattttgtaa

SEQ ID NO: 4790345 - DNA, 25 bp, Homo sapien
tgtaatgcaggttcccacaaggacc

SEQ ID NO: 4790346 - DNA, 25 bp, Homo sapien
caagtcactgtgcatcaaaggtttt

SEQ ID NO: 4790347 - DNA, 25 bp, Homo sapien
aacatttcaaacaagtcactgtgca

SEQ ID NO: 4790348 - DNA, 25 bp, Homo sapien
gctttgtaagagctaggtgctctct

SEQ ID NO: 4790349 - DNA, 25 bp, Homo sapien
tgtaagagctaggtgctctctcagc

SEQ ID NO: 4790350 - DNA, 25 bp, Homo sapien
gagctaggtgctctctcagcatgag

SEQ ID NO: 4790351 - DNA, 25 bp, Homo sapien
acctagctttgtaagagctaggtgc

SEQ ID NO: 4790352 - DNA, 25 bp, Homo sapien
ttacagggatggaagtagagatggc

SEQ ID NO: 4790353 - DNA, 25 bp, Homo sapien
tgaaattacagggatggaagtagag

SEQ ID NO: 4790354 - DNA, 25 bp, Homo sapien
agggatggaagtagagatggcagcc

SEQ ID NO: 4790355 - DNA, 25 bp, Homo sapien
gaaattacagggatggaagtagaga

SEQ ID NO: 4790356 - DNA, 25 bp, Homo sapien
ggttgtaggtggtgaacacgcccca

SEQ ID NO: 4790357 - DNA, 25 bp, Homo sapien
tcttgtttgctgatcagatcgaagt

SEQ ID NO: 4790358 - DNA, 25 bp, Homo sapien
tcagatcgaagtcatgctaggagaa

SEQ ID NO: 4790359 - DNA, 25 bp, Homo sapien
agtcatgctaggagaagctgtgtac

SEQ ID NO: 4790360 - DNA, 25 bp, Homo sapien
cttgtttgctgatcagatcgaagtc

SEQ ID NO: 4790361 - DNA, 25 bp, Homo sapien
gaagtcaggtactcagataggtgga

SEQ ID NO: 4790362 - DNA, 25 bp, Homo sapien
agtcaggtactcagataggtggatg

SEQ ID NO: 4790363 - DNA, 25 bp, Homo sapien
ctgagaagtcaggtactcagatagg

SEQ ID NO: 4790364 - DNA, 25 bp, Homo sapien
aggtggatggggagcttcataaatc

SEQ ID NO: 4790365 - DNA, 25 bp, Homo sapien
ttacttctggttgacaggtggccat

SEQ ID NO: 4790366 - DNA, 25 bp, Homo sapien
tttacttctggttgacaggtggcca

SEQ ID NO: 4790367 - DNA, 25 bp, Homo sapien
aattaaagcctactgcacacactga

SEQ ID NO: 4790368 - DNA, 25 bp, Homo sapien
gaattatggctaacaatccaacaag

SEQ ID NO: 4790369 - DNA, 25 bp, Homo sapien
gacacaactatatgctccctacatg

SEQ ID NO: 4790370 - DNA, 25 bp, Homo sapien
catacgaagtaaaaacgagtaactg

SEQ ID NO: 4790371 - DNA, 25 bp, Homo sapien
tctagaccacagtcaacagcgcagg

SEQ ID NO: 4790372 - DNA, 25 bp, Homo sapien
ggcagcatcgtaccaccaagtttag

SEQ ID NO: 4790373 - DNA, 25 bp, Homo sapien
gatgctccagcaatgtggccctaag

SEQ ID NO: 4790374 - DNA, 25 bp, Homo sapien
caaactctaagaggcacgttgccaa

SEQ ID NO: 4790375 - DNA, 25 bp, Homo sapien
tctcctatcaactctcaatgaaagc

SEQ ID NO: 4790376 - DNA, 25 bp, Homo sapien
ggaaaatgaagagttgcgtattaac

SEQ ID NO: 4790377 - DNA, 25 bp, Homo sapien
cttggatggtatagcacccatgaaa

SEQ ID NO: 4790378 - DNA, 25 bp, Homo sapien
cctagtaagagttatcaaatggtat

SEQ ID NO: 4790379 - DNA, 25 bp, Homo sapien
gaatgagcaggaatgagtagcagca

SEQ ID NO: 4790380 - DNA, 25 bp, Homo sapien
aaatgtttgatacattcctaaatat

SEQ ID NO: 4790381 - DNA, 25 bp, Homo sapien
tagagtcaggaatgagatttaaaaa

SEQ ID NO: 4790382 - DNA, 25 bp, Homo sapien
tgggaaatctcaaagtgaggtttag

SEQ ID NO: 4790383 - DNA, 25 bp, Homo sapien
attgagcatttattaacacaaaaat

SEQ ID NO: 4790384 - DNA, 25 bp, Homo sapien
tatgtatttgagtatatgaagggac

SEQ ID NO: 4790385 - DNA, 25 bp, Homo sapien
ccaggggttctgaattatatatgaa

SEQ ID NO: 4790386 - DNA, 25 bp, Homo sapien
tatatgaagggacatataccaatac

SEQ ID NO: 4790387 - DNA, 25 bp, Homo sapien
tactgttaacagctgctatttctag

SEQ ID NO: 4790388 - DNA, 25 bp, Homo sapien
cgatgaagatagagatcagattgtc

SEQ ID NO: 4790389 - DNA, 25 bp, Homo sapien
cactgagaacacgacagctgattta

SEQ ID NO: 4790390 - DNA, 25 bp, Homo sapien
ctggccgatgaagatagagatcaga

SEQ ID NO: 4790391 - DNA, 25 bp, Homo sapien
ccacttttcactgagaacacgacag

SEQ ID NO: 4790392 - DNA, 25 bp, Homo sapien
agcctgatacctcccatgctccttt

SEQ ID NO: 4790393 - DNA, 25 bp, Homo sapien
acaccacaatcatgattaaactcca

SEQ ID NO: 4790394 - DNA, 25 bp, Homo sapien
acaccagcctgatacctcccatgct

SEQ ID NO: 4790395 - DNA, 25 bp, Homo sapien
taaactccaaactgcctgttctgct

SEQ ID NO: 4790396 - DNA, 25 bp, Homo sapien
aatgatccgagccattctttcggat

SEQ ID NO: 4790397 - DNA, 25 bp, Homo sapien
gatctcttctctacacttaacacta

SEQ ID NO: 4790398 - DNA, 25 bp, Homo sapien
gagccattctttcggatctcttctc

SEQ ID NO: 4790399 - DNA, 25 bp, Homo sapien
caccacttgaatgatccgagccatt

SEQ ID NO: 4790400 - DNA, 25 bp, Homo sapien
tacagaaactacacttgcacgagga

SEQ ID NO: 4790401 - DNA, 25 bp, Homo sapien
cacgaggaacaatcataatgcccac

SEQ ID NO: 4790402 - DNA, 25 bp, Homo sapien
tacactgtgaccatataccagcaaa

SEQ ID NO: 4790403 - DNA, 25 bp, Homo sapien
gtcacaagcacaaatacccacaggg

SEQ ID NO: 4790404 - DNA, 25 bp, Homo sapien
tactatgaatgaggaattcagcaga

SEQ ID NO: 4790405 - DNA, 25 bp, Homo sapien
ttttactatgaatgaggaattcagc

SEQ ID NO: 4790406 - DNA, 25 bp, Homo sapien
tatgaatgaggaattcagcagagtt

SEQ ID NO: 4790407 - DNA, 25 bp, Homo sapien
tgaatgaggaattcagcagagttca

SEQ ID NO: 4790408 - DNA, 25 bp, Homo sapien
catcaacactgaaatatgggcagag

SEQ ID NO: 4790409 - DNA, 25 bp, Homo sapien
aatgagagcaggcatgtggatacct

SEQ ID NO: 4790410 - DNA, 25 bp, Homo sapien
tatcaggcaagctgggtagacagga

SEQ ID NO: 4790411 - DNA, 25 bp, Homo sapien
gcaagcggagaaagggaatgactaa

SEQ ID NO: 4790412 - DNA, 25 bp, Homo sapien
caaagcgtggtctttaggctactga

SEQ ID NO: 4790413 - DNA, 25 bp, Homo sapien
taaaggacaaacttgtactgcatcc

SEQ ID NO: 4790414 - DNA, 25 bp, Homo sapien
caggaccacctatcaagagaagcca

SEQ ID NO: 4790415 - DNA, 25 bp, Homo sapien
tatgacagcaatatgagactcactg

SEQ ID NO: 4790416 - DNA, 25 bp, Homo sapien
catcctcagatatgcagacagctct

SEQ ID NO: 4790417 - DNA, 25 bp, Homo sapien
aagcttcgagattggtcccaccact

SEQ ID NO: 4790418 - DNA, 25 bp, Homo sapien
gctccacagaccattgaggctggca

SEQ ID NO: 4790419 - DNA, 25 bp, Homo sapien
gagtccatatcgctccatgttcatg

SEQ ID NO: 4790420 - DNA, 25 bp, Homo sapien
gatggcagcctcaagtatagcctct

SEQ ID NO: 4790421 - DNA, 25 bp, Homo sapien
caatcgtagtccaagaaggcaaagc

SEQ ID NO: 4790422 - DNA, 25 bp, Homo sapien
gttcacagatgccaaacacgtgctc

SEQ ID NO: 4790423 - DNA, 25 bp, Homo sapien
caccagttcaagaagggcccatgca

SEQ ID NO: 4790424 - DNA, 25 bp, Homo sapien
tattgagactaccttggagaaaatg

SEQ ID NO: 4790425 - DNA, 25 bp, Homo sapien
ctcaaagtattgagactaccttgga

SEQ ID NO: 4790426 - DNA, 25 bp, Homo sapien
tgagactaccttggagaaaatgttc

SEQ ID NO: 4790427 - DNA, 25 bp, Homo sapien
aagtattgagactaccttggagaaa

SEQ ID NO: 4790428 - DNA, 25 bp, Homo sapien
atcactcacagggagactgaaatcc

SEQ ID NO: 4790429 - DNA, 25 bp, Homo sapien
cactcacagggagactgaaatccat

SEQ ID NO: 4790430 - DNA, 25 bp, Homo sapien
ccatcactcacagggagactgaaat

SEQ ID NO: 4790431 - DNA, 25 bp, Homo sapien
tctgttagttctttcccatcactca

SEQ ID NO: 4790432 - DNA, 25 bp, Homo sapien
tccgcggcgggacagtgtgagccca

SEQ ID NO: 4790433 - DNA, 25 bp, Homo sapien
aggccggctcgcaagaacgcacggc

SEQ ID NO: 4790434 - DNA, 25 bp, Homo sapien
cggctgcggcaacttccctccaggg

SEQ ID NO: 4790435 - DNA, 25 bp, Homo sapien
ggctcggtccgccgctgggtgcggg

SEQ ID NO: 4790436 - DNA, 25 bp, Homo sapien
tggcttcaggccgcgcgcccagtcc

SEQ ID NO: 4790437 - DNA, 25 bp, Homo sapien
ctggcttcaggccgcgcgcccagtc

SEQ ID NO: 4790438 - DNA, 25 bp, Homo sapien
gctggcttcaggccgcgcgcccagt

SEQ ID NO: 4790439 - DNA, 25 bp, Homo sapien
gggctggcttcaggccgcgcgccca

SEQ ID NO: 4790440 - DNA, 25 bp, Homo sapien
tcggcccctactgcccggctttggc

SEQ ID NO: 4790441 - DNA, 25 bp, Homo sapien
cgtcagccgccagtcggcccctact

SEQ ID NO: 4790442 - DNA, 25 bp, Homo sapien
tcagggagcgtcagccgccagtcgg

SEQ ID NO: 4790443 - DNA, 25 bp, Homo sapien
agtcggcccctactgcccggctttg

SEQ ID NO: 4790444 - DNA, 25 bp, Homo sapien
cattttcacgttgtcgctctcctct

SEQ ID NO: 4790445 - DNA, 25 bp, Homo sapien
cccggcacggggcattttcacgttg

SEQ ID NO: 4790446 - DNA, 25 bp, Homo sapien
ctcttcccactcgaaaagctctgga

SEQ ID NO: 4790447 - DNA, 25 bp, Homo sapien
caggactccggtggacgccccggca

SEQ ID NO: 4790448 - DNA, 25 bp, Homo sapien
taaacccttagaacaggcacttgag

SEQ ID NO: 4790449 - DNA, 25 bp, Homo sapien
gagactaggatagctttacccaccc

SEQ ID NO: 4790450 - DNA, 25 bp, Homo sapien
ggtaaagtgctgtgtgaatccaact

SEQ ID NO: 4790451 - DNA, 25 bp, Homo sapien
tcatcagtggctaaccaagtaccat

SEQ ID NO: 4790452 - DNA, 25 bp, Homo sapien
catgatcaagaaatttagccgtaag

SEQ ID NO: 4790453 - DNA, 25 bp, Homo sapien
taaaatggatctctgtagctactca

SEQ ID NO: 4790454 - DNA, 25 bp, Homo sapien
gacttcatccactgcatatagcctg

SEQ ID NO: 4790455 - DNA, 25 bp, Homo sapien
gccttaacagcaacatggtcgtctt

SEQ ID NO: 4790456 - DNA, 25 bp, Homo sapien
aaatccacaacaggaaatatagtta

SEQ ID NO: 4790457 - DNA, 25 bp, Homo sapien
ccacaacaggaaatatagttaaggc

SEQ ID NO: 4790458 - DNA, 25 bp, Homo sapien
atccacaacaggaaatatagttaag

SEQ ID NO: 4790459 - DNA, 25 bp, Homo sapien
tcagctgtacaaatccacaacagga

SEQ ID NO: 4790460 - DNA, 25 bp, Homo sapien
tcacatggctcttgacttgtacaat

SEQ ID NO: 4790461 - DNA, 25 bp, Homo sapien
acatggctcttgacttgtacaatac

SEQ ID NO: 4790462 - DNA, 25 bp, Homo sapien
cacatggctcttgacttgtacaata

SEQ ID NO: 4790463 - DNA, 25 bp, Homo sapien
tgatagggctactttttacacattt

SEQ ID NO: 4790464 - DNA, 25 bp, Homo sapien
cttcagggacagttgattggtcatc

SEQ ID NO: 4790465 - DNA, 25 bp, Homo sapien
atgctactccctctttcaacatcat

SEQ ID NO: 4790466 - DNA, 25 bp, Homo sapien
catcatcatttctctcagactaaat

SEQ ID NO: 4790467 - DNA, 25 bp, Homo sapien
caacatcatcatttctctcagacta

SEQ ID NO: 4790468 - DNA, 25 bp, Homo sapien
catttctctcagactaaatttcttg

SEQ ID NO: 4790469 - DNA, 25 bp, Homo sapien
tagtgaccggtttttagcaataatg

SEQ ID NO: 4790470 - DNA, 25 bp, Homo sapien
agcaataatgtatctacttaattct

SEQ ID NO: 4790471 - DNA, 25 bp, Homo sapien
tgctgtttctcttagtgaccggttt

SEQ ID NO: 4790472 - DNA, 25 bp, Homo sapien
gcaataatgtatctacttaattctt

SEQ ID NO: 4790473 - DNA, 25 bp, Homo sapien
tatcttcatctcacgtagtgctggg

SEQ ID NO: 4790474 - DNA, 25 bp, Homo sapien
gggccaggagagtttacacagactt

SEQ ID NO: 4790475 - DNA, 25 bp, Homo sapien
cctgatcctggcctgtattaatggg

SEQ ID NO: 4790476 - DNA, 25 bp, Homo sapien
agaacattgtgacctctctgtggga

SEQ ID NO: 4790477 - DNA, 25 bp, Homo sapien
cagtgggggattgtcttccaacttt

SEQ ID NO: 4790478 - DNA, 25 bp, Homo sapien
ttagcagtgggggattgtcttccaa

SEQ ID NO: 4790479 - DNA, 25 bp, Homo sapien
gggattgtcttccaactttagtgac

SEQ ID NO: 4790480 - DNA, 25 bp, Homo sapien
gttctgataacccatcggaccagcc

SEQ ID NO: 4790481 - DNA, 25 bp, Homo sapien
cgtggcctagcgaacagcaacgttc

SEQ ID NO: 4790482 - DNA, 25 bp, Homo sapien
cctgttctggtgcataagatgaagc

SEQ ID NO: 4790483 - DNA, 25 bp, Homo sapien
tgggaaatccgtgctggctcacagg

SEQ ID NO: 4790484 - DNA, 25 bp, Homo sapien
cacagtgccttggttaagctgactc

SEQ ID NO: 4790485 - DNA, 25 bp, Homo sapien
ctgctgtgttagttttcctaggacc

SEQ ID NO: 4790486 - DNA, 25 bp, Homo sapien
tgctgtgttagttttcctaggacca

SEQ ID NO: 4790487 - DNA, 25 bp, Homo sapien
ggatcatggattgcccaacaggaac

SEQ ID NO: 4790488 - DNA, 25 bp, Homo sapien
gaaggtgcggaggaaagaaatatca

SEQ ID NO: 4790489 - DNA, 25 bp, Homo sapien
tgcggaggaaagaaatatcagattc

SEQ ID NO: 4790490 - DNA, 25 bp, Homo sapien
ggtgcggaggaaagaaatatcagat

SEQ ID NO: 4790491 - DNA, 25 bp, Homo sapien
agtgcactctagcactccggcctgg

SEQ ID NO: 4790492 - DNA, 25 bp, Homo sapien
ccagtgcactctagcactccggcct

SEQ ID NO: 4790493 - DNA, 25 bp, Homo sapien
tgccagtgcactctagcactccggc

SEQ ID NO: 4790494 - DNA, 25 bp, Homo sapien
catgccagtgcactctagcactccg

SEQ ID NO: 4790495 - DNA, 25 bp, Homo sapien
caaaaccttacgaataaagccagtg

SEQ ID NO: 4790496 - DNA, 25 bp, Homo sapien
taaaaccagaagagtctgtgagtct

SEQ ID NO: 4790497 - DNA, 25 bp, Homo sapien
aaaaccagaagagtctgtgagtctc

SEQ ID NO: 4790498 - DNA, 25 bp, Homo sapien
ttgttctgggtctcttctgtaggat

SEQ ID NO: 4790499 - DNA, 25 bp, Homo sapien
tctcttctgtaggataactggttta

SEQ ID NO: 4790500 - DNA, 25 bp, Homo sapien
tttaatcattaaccttttcttcagc

SEQ ID NO: 4790501 - DNA, 25 bp, Homo sapien
taatcattaaccttttcttcagcat

SEQ ID NO: 4790502 - DNA, 25 bp, Homo sapien
ttaatcattaaccttttcttcagca

SEQ ID NO: 4790503 - DNA, 25 bp, Homo sapien
tctttaatcattaaccttttcttca

SEQ ID NO: 4790504 - DNA, 25 bp, Homo sapien
aataattccagccaaattgcctgtc

SEQ ID NO: 4790505 - DNA, 25 bp, Homo sapien
aagagatacaaatgcttagaagatg

SEQ ID NO: 4790506 - DNA, 25 bp, Homo sapien
gcttagaagatgtactatccatata

SEQ ID NO: 4790507 - DNA, 25 bp, Homo sapien
tcaaacagggattatttcaaataat

SEQ ID NO: 4790508 - DNA, 25 bp, Homo sapien
atctccatcagccaaacctagtgcg

SEQ ID NO: 4790509 - DNA, 25 bp, Homo sapien
cgaagttggtagcaagggagccttg

SEQ ID NO: 4790510 - DNA, 25 bp, Homo sapien
tcagccaaacctagtgcgaagttgg

SEQ ID NO: 4790511 - DNA, 25 bp, Homo sapien
caaacctagtgcgaagttggtagca

SEQ ID NO: 4790512 - DNA, 25 bp, Homo sapien
ggtatctggaataaagtggccttac

SEQ ID NO: 4790513 - DNA, 25 bp, Homo sapien
gactgatactaactaaagccctgtg

SEQ ID NO: 4790514 - DNA, 25 bp, Homo sapien
gagtttggcacctaacctgaggcac

SEQ ID NO: 4790515 - DNA, 25 bp, Homo sapien
caatcattagtgctgctaaagccca

SEQ ID NO: 4790516 - DNA, 25 bp, Homo sapien
ccattgcatttggtgcaattgtcca

SEQ ID NO: 4790517 - DNA, 25 bp, Homo sapien
tgtccaagatactcattaactctgc

SEQ ID NO: 4790518 - DNA, 25 bp, Homo sapien
aattacgtcttgatttagtgatccc

SEQ ID NO: 4790519 - DNA, 25 bp, Homo sapien
cgtcttgatttagtgatcccaatcc

SEQ ID NO: 4790520 - DNA, 25 bp, Homo sapien
aagccgggcagagacacaaccaaaa

SEQ ID NO: 4790521 - DNA, 25 bp, Homo sapien
aaattttagaccaatatccttgatg

SEQ ID NO: 4790522 - DNA, 25 bp, Homo sapien
agaaaattttagaccaatatccttg

SEQ ID NO: 4790523 - DNA, 25 bp, Homo sapien
gccgggcagagacacaaccaaaaaa

SEQ ID NO: 4790524 - DNA, 25 bp, Homo sapien
tggataattcaaccaattcagctgt

SEQ ID NO: 4790525 - DNA, 25 bp, Homo sapien
tccaccaggaattttgtgctggata

SEQ ID NO: 4790526 - DNA, 25 bp, Homo sapien
caccaggaattttgtgctggataat

SEQ ID NO: 4790527 - DNA, 25 bp, Homo sapien
gtgctggataattcaaccaattcag

SEQ ID NO: 4790528 - DNA, 25 bp, Homo sapien
ctcatggggccaaaagctacctgtt

SEQ ID NO: 4790529 - DNA, 25 bp, Homo sapien
catggggccaaaagctacctgttct

SEQ ID NO: 4790530 - DNA, 25 bp, Homo sapien
tcatggggccaaaagctacctgttc

SEQ ID NO: 4790531 - DNA, 25 bp, Homo sapien
atggggccaaaagctacctgttctg

SEQ ID NO: 4790532 - DNA, 25 bp, Homo sapien
ctcctatatgcttcagagcctcctt

SEQ ID NO: 4790533 - DNA, 25 bp, Homo sapien
aactcctcctatatgcttcagagcc

SEQ ID NO: 4790534 - DNA, 25 bp, Homo sapien
gcacactgggcttgtacttctaaca

SEQ ID NO: 4790535 - DNA, 25 bp, Homo sapien
ttctttgctcttgcatagacctgca

SEQ ID NO: 4790536 - DNA, 25 bp, Homo sapien
gcaagttctctacactcagtctcct

SEQ ID NO: 4790537 - DNA, 25 bp, Homo sapien
caatctgctttgcaagttctctaca

SEQ ID NO: 4790538 - DNA, 25 bp, Homo sapien
tcttcagctcattgaaactgtctcc

SEQ ID NO: 4790539 - DNA, 25 bp, Homo sapien
ctgctgagtgctagatccaggtctg

SEQ ID NO: 4790540 - DNA, 25 bp, Homo sapien
cccctcttcagtatctgagcattca

SEQ ID NO: 4790541 - DNA, 25 bp, Homo sapien
ccctcttcagtatctgagcattcaa

SEQ ID NO: 4790542 - DNA, 25 bp, Homo sapien
gctgtcctcccagcttggagtttat

SEQ ID NO: 4790543 - DNA, 25 bp, Homo sapien
ccagcttggagtttattacacttac

SEQ ID NO: 4790544 - DNA, 25 bp, Homo sapien
cccacacagagtgcccttgctgtcc

SEQ ID NO: 4790545 - DNA, 25 bp, Homo sapien
acccacacagagtgcccttgctgtc

SEQ ID NO: 4790546 - DNA, 25 bp, Homo sapien
ctttgtgcttccctcctgtggactc

SEQ ID NO: 4790547 - DNA, 25 bp, Homo sapien
tcctgtggactcaaagcaatttctt

SEQ ID NO: 4790548 - DNA, 25 bp, Homo sapien
catgtagtgtataacactattatcc

SEQ ID NO: 4790549 - DNA, 25 bp, Homo sapien
gcaatttcttaagcagctttctgct

SEQ ID NO: 4790550 - DNA, 25 bp, Homo sapien
ttcttcaaccagctgattgagccag

SEQ ID NO: 4790551 - DNA, 25 bp, Homo sapien
tttatgcagaacctacaacatgata

SEQ ID NO: 4790552 - DNA, 25 bp, Homo sapien
ccagctgattgagccaggaataatg

SEQ ID NO: 4790553 - DNA, 25 bp, Homo sapien
tcaaaatccatttatgcagaaccta

SEQ ID NO: 4790554 - DNA, 25 bp, Homo sapien
ttaggcgaagcacactggtaaggac

SEQ ID NO: 4790555 - DNA, 25 bp, Homo sapien
catgtggcatgcatgcttaggcgaa

SEQ ID NO: 4790556 - DNA, 25 bp, Homo sapien
cattttcagtacagcgttgtgtttg

SEQ ID NO: 4790557 - DNA, 25 bp, Homo sapien
gatccctttcccctaaggatctgtg

SEQ ID NO: 4790558 - DNA, 25 bp, Homo sapien
ccaactagtcaggactgtagggacg

SEQ ID NO: 4790559 - DNA, 25 bp, Homo sapien
gtcaggactgtagggacgtgccacc

SEQ ID NO: 4790560 - DNA, 25 bp, Homo sapien
tagtcaggactgtagggacgtgcca

SEQ ID NO: 4790561 - DNA, 25 bp, Homo sapien
actagtcaggactgtagggacgtgc

SEQ ID NO: 4790562 - DNA, 25 bp, Homo sapien
ctcttctcggtagcaggtcttctga

SEQ ID NO: 4790563 - DNA, 25 bp, Homo sapien
cataacagacaggtaagatgaatgg

SEQ ID NO: 4790564 - DNA, 25 bp, Homo sapien
ttccataacagacaggtaagatgaa

SEQ ID NO: 4790565 - DNA, 25 bp, Homo sapien
cttctcggtagcaggtcttctgagt

SEQ ID NO: 4790566 - DNA, 25 bp, Homo sapien
tgaatgtctgaatgaggtgcactgg

SEQ ID NO: 4790567 - DNA, 25 bp, Homo sapien
aatgggcaggcttgatggacgagga

SEQ ID NO: 4790568 - DNA, 25 bp, Homo sapien
actgagttttgttggctgtctgcct

SEQ ID NO: 4790569 - DNA, 25 bp, Homo sapien
ccagggctgtggctaacgactgagt

SEQ ID NO: 4790570 - DNA, 25 bp, Homo sapien
cagagatgttcgtgtgtttgatgca

SEQ ID NO: 4790571 - DNA, 25 bp, Homo sapien
agagatgttcgtgtgtttgatgcaa

SEQ ID NO: 4790572 - DNA, 25 bp, Homo sapien
gagatgttcgtgtgtttgatgcaat

SEQ ID NO: 4790573 - DNA, 25 bp, Homo sapien
ccataatacaaaatcaccacagtca

SEQ ID NO: 4790574 - DNA, 25 bp, Homo sapien
aaggctttaggtacatagagagggc

SEQ ID NO: 4790575 - DNA, 25 bp, Homo sapien
tgtaagagatgcaaactaagagcat

SEQ ID NO: 4790576 - DNA, 25 bp, Homo sapien
ggtaagcactccgtaaagcaacgag

SEQ ID NO: 4790577 - DNA, 25 bp, Homo sapien
cacgtgaagtgatcgatgagattcc

SEQ ID NO: 4790578 - DNA, 25 bp, Homo sapien
gctgttgcccaagagcgttgtcaga

SEQ ID NO: 4790579 - DNA, 25 bp, Homo sapien
tttagcaccgccagaatttcacacg

SEQ ID NO: 4790580 - DNA, 25 bp, Homo sapien
gatggagtatctcagcgggttacaa

SEQ ID NO: 4790581 - DNA, 25 bp, Homo sapien
tatttcttccagtactattcccttc

SEQ ID NO: 4790582 - DNA, 25 bp, Homo sapien
ctgaggacataaagaaatgaataaa

SEQ ID NO: 4790583 - DNA, 25 bp, Homo sapien
aagaaatgaataaagtgtgatattc

SEQ ID NO: 4790584 - DNA, 25 bp, Homo sapien
gaaatgaataaagtgtgatattcat

SEQ ID NO: 4790585 - DNA, 25 bp, Homo sapien
taaagaaatgaataaagtgtgatat

SEQ ID NO: 4790586 - DNA, 25 bp, Homo sapien
cttcaaccgttttctttctccactg

SEQ ID NO: 4790587 - DNA, 25 bp, Homo sapien
actcatattgccttttaataaacct

SEQ ID NO: 4790588 - DNA, 25 bp, Homo sapien
cttgcttctgcactcatattgcctt

SEQ ID NO: 4790589 - DNA, 25 bp, Homo sapien
catattgccttttaataaaccttca

SEQ ID NO: 4790590 - DNA, 25 bp, Homo sapien
taaatggagtcacacaatgtgtggt

SEQ ID NO: 4790591 - DNA, 25 bp, Homo sapien
taaccctagcaaactactaatctac

SEQ ID NO: 4790592 - DNA, 25 bp, Homo sapien
ggagtcacacaatgtgtggtcttta

SEQ ID NO: 4790593 - DNA, 25 bp, Homo sapien
aagaaactcacactcattagcagaa

SEQ ID NO: 4790594 - DNA, 25 bp, Homo sapien
taatttttatccagtcatcagttga

SEQ ID NO: 4790595 - DNA, 25 bp, Homo sapien
tttatccagtcatcagttgagcatt

SEQ ID NO: 4790596 - DNA, 25 bp, Homo sapien
tttttatccagtcatcagttgagca

SEQ ID NO: 4790597 - DNA, 25 bp, Homo sapien
tatccagtcatcagttgagcatttg

SEQ ID NO: 4790598 - DNA, 25 bp, Homo sapien
gcagtgcagttgctaccagagcgaa

SEQ ID NO: 4790599 - DNA, 25 bp, Homo sapien
aactgtaagtagcaaccccgttgtg

SEQ ID NO: 4790600 - DNA, 25 bp, Homo sapien
caagtctaggtgctatctacggcag

SEQ ID NO: 4790601 - DNA, 25 bp, Homo sapien
tagctagctgggacatactgcagac

SEQ ID NO: 4790602 - DNA, 25 bp, Homo sapien
aatggtctaaaccacggcagtctgc

SEQ ID NO: 4790603 - DNA, 25 bp, Homo sapien
cacctgggttctgactttggcacag

SEQ ID NO: 4790604 - DNA, 25 bp, Homo sapien
tggctttcagaaacccaatggtaag

SEQ ID NO: 4790605 - DNA, 25 bp, Homo sapien
ggaattatccgaaggagactgactc

SEQ ID NO: 4790606 - DNA, 25 bp, Homo sapien
ccaccacttcaacccccaatgaaca

SEQ ID NO: 4790607 - DNA, 25 bp, Homo sapien
aacaccaccacttcaacccccaatg

SEQ ID NO: 4790608 - DNA, 25 bp, Homo sapien
gaacatggcacttgtttgtttcttc

SEQ ID NO: 4790609 - DNA, 25 bp, Homo sapien
acttcaacccccaatgaacatggca

SEQ ID NO: 4790610 - DNA, 25 bp, Homo sapien
gtcaaacattcccactgtttagatt

SEQ ID NO: 4790611 - DNA, 25 bp, Homo sapien
ggctccatagtagctaaagactcaa

SEQ ID NO: 4790612 - DNA, 25 bp, Homo sapien
catagtagctaaagactcaattagg

SEQ ID NO: 4790613 - DNA, 25 bp, Homo sapien
tgctgtctggctccatagtagctaa

SEQ ID NO: 4790614 - DNA, 25 bp, Homo sapien
taattcttgacagtagcgtagaggc

SEQ ID NO: 4790615 - DNA, 25 bp, Homo sapien
aagttctgtttgatggagccctaag

SEQ ID NO: 4790616 - DNA, 25 bp, Homo sapien
gatgacactcccttttcttcgagga

SEQ ID NO: 4790617 - DNA, 25 bp, Homo sapien
gaaggaattatcagggcaaggcaca

SEQ ID NO: 4790618 - DNA, 25 bp, Homo sapien
ctcacagatgagtaggtcttatttt

SEQ ID NO: 4790619 - DNA, 25 bp, Homo sapien
tctatcacagataaagcttctgttc

SEQ ID NO: 4790620 - DNA, 25 bp, Homo sapien
ttaagcagcaattctatcacagata

SEQ ID NO: 4790621 - DNA, 25 bp, Homo sapien
ctgttctcacagatgagtaggtctt

SEQ ID NO: 4790622 - DNA, 25 bp, Homo sapien
caactctagggaagggtatatctga

SEQ ID NO: 4790623 - DNA, 25 bp, Homo sapien
tgtcagccaagtataccaatcacca

SEQ ID NO: 4790624 - DNA, 25 bp, Homo sapien
catacagttcatatggcctgcctga

SEQ ID NO: 4790625 - DNA, 25 bp, Homo sapien
gaacgatccttaggtctacatgacc

SEQ ID NO: 4790626 - DNA, 25 bp, Homo sapien
tgtttaagccgatcagggacacctg

SEQ ID NO: 4790627 - DNA, 25 bp, Homo sapien
gaactcagcaaagagaggtctgttg

SEQ ID NO: 4790628 - DNA, 25 bp, Homo sapien
cactctttgacacggcgtctggttc

SEQ ID NO: 4790629 - DNA, 25 bp, Homo sapien
gctgccaacaactgcgaatgaaaca

SEQ ID NO: 4790630 - DNA, 25 bp, Homo sapien
agtgctacaaagagtgacggtgacc

SEQ ID NO: 4790631 - DNA, 25 bp, Homo sapien
taaagttgacaactgtaccgtggca

SEQ ID NO: 4790632 - DNA, 25 bp, Homo sapien
caactgggaattcacaacctggata

SEQ ID NO: 4790633 - DNA, 25 bp, Homo sapien
aatcagctgggcgtgacagtacaca

SEQ ID NO: 4790634 - DNA, 25 bp, Homo sapien
caaagcctcaggatcggcatgttct

SEQ ID NO: 4790635 - DNA, 25 bp, Homo sapien
cctcaggatcggcatgttcttcttc

SEQ ID NO: 4790636 - DNA, 25 bp, Homo sapien
agccaaagcctcaggatcggcatgt

SEQ ID NO: 4790637 - DNA, 25 bp, Homo sapien
gatcggcatgttcttcttccaaaag

SEQ ID NO: 4790638 - DNA, 25 bp, Homo sapien
tcacacatcagtttgcacagctcct

SEQ ID NO: 4790639 - DNA, 25 bp, Homo sapien
tgagttttagccgttcacacatcag

SEQ ID NO: 4790640 - DNA, 25 bp, Homo sapien
tcctagctgcactttccacgtgctg

SEQ ID NO: 4790641 - DNA, 25 bp, Homo sapien
tttgcacagctcctgacgataacaa

SEQ ID NO: 4790642 - DNA, 25 bp, Homo sapien
tttgcccaggctttcaaaggcaccc

SEQ ID NO: 4790643 - DNA, 25 bp, Homo sapien
aggcacccagcagatattccagctg

SEQ ID NO: 4790644 - DNA, 25 bp, Homo sapien
ggtctccgcgtttcgcggccaggct

SEQ ID NO: 4790645 - DNA, 25 bp, Homo sapien
ttgggtctccgcgtttcgcggccag

SEQ ID NO: 4790646 - DNA, 25 bp, Homo sapien
tatgacaatgttagagaactcctgg

SEQ ID NO: 4790647 - DNA, 25 bp, Homo sapien
tgattgggcacagacttttccagct

SEQ ID NO: 4790648 - DNA, 25 bp, Homo sapien
cttcttgatgagaggtatgacaatg

SEQ ID NO: 4790649 - DNA, 25 bp, Homo sapien
ggccttcaagatatcagctgcacag

SEQ ID NO: 4790650 - DNA, 25 bp, Homo sapien
ctgcagttttcgggtccagtttaag

SEQ ID NO: 4790651 - DNA, 25 bp, Homo sapien
ctacagggtccatacaaaagcatca

SEQ ID NO: 4790652 - DNA, 25 bp, Homo sapien
tgcagttttcgggtccagtttaaga

SEQ ID NO: 4790653 - DNA, 25 bp, Homo sapien
ggtccagtttaagaaatggcatctt

SEQ ID NO: 4790654 - DNA, 25 bp, Homo sapien
ccacacaggcaatggctttcaatag

SEQ ID NO: 4790655 - DNA, 25 bp, Homo sapien
tgtcaccacacaggcaatggctttc

SEQ ID NO: 4790656 - DNA, 25 bp, Homo sapien
caggcaatggctttcaatagctcct

SEQ ID NO: 4790657 - DNA, 25 bp, Homo sapien
cacaggcaatggctttcaatagctc

SEQ ID NO: 4790658 - DNA, 25 bp, Homo sapien
aggaaatactattaagcccaaacat

SEQ ID NO: 4790659 - DNA, 25 bp, Homo sapien
tgaggaaatactattaagcccaaac

SEQ ID NO: 4790660 - DNA, 25 bp, Homo sapien
gaggaaatactattaagcccaaaca

SEQ ID NO: 4790661 - DNA, 25 bp, Homo sapien
gcaatgcggtcagtatcattccgag

SEQ ID NO: 4790662 - DNA, 25 bp, Homo sapien
gatgccatggcaattgcaccctggg

SEQ ID NO: 4790663 - DNA, 25 bp, Homo sapien
gactgcaaagccttctgggtaatag

SEQ ID NO: 4790664 - DNA, 25 bp, Homo sapien
ggtataatcgaatgccaccaaagga

SEQ ID NO: 4790665 - DNA, 25 bp, Homo sapien
catcagggctgtatcgtccaatagc

SEQ ID NO: 4790666 - DNA, 25 bp, Homo sapien
tgcatgcctaaaaatgccagaggca

SEQ ID NO: 4790667 - DNA, 25 bp, Homo sapien
tgaatagtcaaagcacaagaggtct

SEQ ID NO: 4790668 - DNA, 25 bp, Homo sapien
cagaggcaggacttcttttgcatga

SEQ ID NO: 4790669 - DNA, 25 bp, Homo sapien
ctgcaggagtttttcagtgctgcta

SEQ ID NO: 4790670 - DNA, 25 bp, Homo sapien
tttcagtgctgctatcccgtgaggt

SEQ ID NO: 4790671 - DNA, 25 bp, Homo sapien
ccacccattgagcttctgcaggagt

SEQ ID NO: 4790672 - DNA, 25 bp, Homo sapien
ccatataccacccattgagcttctg

SEQ ID NO: 4790673 - DNA, 25 bp, Homo sapien
ggccactcagcaaagcactcataag

SEQ ID NO: 4790674 - DNA, 25 bp, Homo sapien
gaatcacactgttccgatctgtcag

SEQ ID NO: 4790675 - DNA, 25 bp, Homo sapien
ctgttccgatctgtcaggccactca

SEQ ID NO: 4790676 - DNA, 25 bp, Homo sapien
aactaaatggcccatagcaaatgca

SEQ ID NO: 4790677 - DNA, 25 bp, Homo sapien
tgagtagttaatgacacaatgacac

SEQ ID NO: 4790678 - DNA, 25 bp, Homo sapien
tgaggacactgagtagttaatgaca

SEQ ID NO: 4790679 - DNA, 25 bp, Homo sapien
ggacactgagtagttaatgacacaa

SEQ ID NO: 4790680 - DNA, 25 bp, Homo sapien
gttaatgacacaatgacactggcac

SEQ ID NO: 4790681 - DNA, 25 bp, Homo sapien
cagaaatgattccactaaataagtt

SEQ ID NO: 4790682 - DNA, 25 bp, Homo sapien
agggtatgtacacggcaaccagaga

SEQ ID NO: 4790683 - DNA, 25 bp, Homo sapien
aattgccacctaaaacaatccatgc

SEQ ID NO: 4790684 - DNA, 25 bp, Homo sapien
cccagagggtatgtacacggcaacc

SEQ ID NO: 4790685 - DNA, 25 bp, Homo sapien
gctgttatatccttatggccagaac

SEQ ID NO: 4790686 - DNA, 25 bp, Homo sapien
tcagttatcagtgcaaccacagaaa

SEQ ID NO: 4790687 - DNA, 25 bp, Homo sapien
tactggaacagttagatgttttatt

SEQ ID NO: 4790688 - DNA, 25 bp, Homo sapien
tcttgaaccagttacatgttttcag

SEQ ID NO: 4790689 - DNA, 25 bp, Homo sapien
caagacctacaccacttctgatcag

SEQ ID NO: 4790690 - DNA, 25 bp, Homo sapien
ctgacacatcaaggtattgcaggca

SEQ ID NO: 4790691 - DNA, 25 bp, Homo sapien
ttctgatcagttcacacaacctagg

SEQ ID NO: 4790692 - DNA, 25 bp, Homo sapien
acaacctaggaactagctcgcccag

SEQ ID NO: 4790693 - DNA, 25 bp, Homo sapien
ccaactggatttgacatgaagttga

SEQ ID NO: 4790694 - DNA, 25 bp, Homo sapien
gacaaatataaaggtaagccttggc

SEQ ID NO: 4790695 - DNA, 25 bp, Homo sapien
ttgtcaaacgtgtaccaactggatt

SEQ ID NO: 4790696 - DNA, 25 bp, Homo sapien
ttggcaaataagtcaggaccacatc

SEQ ID NO: 4790697 - DNA, 25 bp, Homo sapien
tggagaagatttggcagcactaagc

SEQ ID NO: 4790698 - DNA, 25 bp, Homo sapien
gaagatttggcagcactaagccgag

SEQ ID NO: 4790699 - DNA, 25 bp, Homo sapien
cagcactaagccgagcactatccat

SEQ ID NO: 4790700 - DNA, 25 bp, Homo sapien
tccatcattggagaagatttggcag

SEQ ID NO: 4790701 - DNA, 25 bp, Homo sapien
gcctagggctacaaagtttagacta

SEQ ID NO: 4790702 - DNA, 25 bp, Homo sapien
cacccaggaaggtgcaagtctactg

SEQ ID NO: 4790703 - DNA, 25 bp, Homo sapien
ttagtaaacatcctatgggcaccca

SEQ ID NO: 4790704 - DNA, 25 bp, Homo sapien
tccaaattctcaatgcttagtaaac

SEQ ID NO: 4790705 - DNA, 25 bp, Homo sapien
gggctccaatacacttaaggactct

SEQ ID NO: 4790706 - DNA, 25 bp, Homo sapien
gagttttggtgcatgcggtttcaac

SEQ ID NO: 4790707 - DNA, 25 bp, Homo sapien
tcgcccggaggctcaaataattgag

SEQ ID NO: 4790708 - DNA, 25 bp, Homo sapien
tacacttaaggactctagcagagct

SEQ ID NO: 4790709 - DNA, 25 bp, Homo sapien
tgcacttttgctgatcttcacaagg

SEQ ID NO: 4790710 - DNA, 25 bp, Homo sapien
ttttgctgatcttcacaagggtgtt

SEQ ID NO: 4790711 - DNA, 25 bp, Homo sapien
cctgcacttttgctgatcttcacaa

SEQ ID NO: 4790712 - DNA, 25 bp, Homo sapien
ggctcctgcacttttgctgatcttc

SEQ ID NO: 4790713 - DNA, 25 bp, Homo sapien
acagagggcattgtggggttattaa

SEQ ID NO: 4790714 - DNA, 25 bp, Homo sapien
tcttcccttcatttagacagagggc

SEQ ID NO: 4790715 - DNA, 25 bp, Homo sapien
cccttcatttagacagagggcattg

SEQ ID NO: 4790716 - DNA, 25 bp, Homo sapien
tttgtgtgttggctaacatagcact

SEQ ID NO: 4790717 - DNA, 25 bp, Homo sapien
gggaacagctgttcagtggagcaat

SEQ ID NO: 4790718 - DNA, 25 bp, Homo sapien
tcagaaatatccttgtcactaagtg

SEQ ID NO: 4790719 - DNA, 25 bp, Homo sapien
taaatgggtgtagttcatacaactc

SEQ ID NO: 4790720 - DNA, 25 bp, Homo sapien
cactaagtgacgtgtgactgcattt

SEQ ID NO: 4790721 - DNA, 25 bp, Homo sapien
attcatttcatcaacggatgcacac

SEQ ID NO: 4790722 - DNA, 25 bp, Homo sapien
aactgagcaaatccaatacattcat

SEQ ID NO: 4790723 - DNA, 25 bp, Homo sapien
cattcatttcatcaacggatgcaca

SEQ ID NO: 4790724 - DNA, 25 bp, Homo sapien
gaacttccgtcacggtgctcatcat

SEQ ID NO: 4790725 - DNA, 25 bp, Homo sapien
agcgatggttctctggccagctgct

SEQ ID NO: 4790726 - DNA, 25 bp, Homo sapien
ctgagggctcgaacttccgtcacgg

SEQ ID NO: 4790727 - DNA, 25 bp, Homo sapien
aagggcagcgatggttctctggcca

SEQ ID NO: 4790728 - DNA, 25 bp, Homo sapien
cgttagtgaaagtgaccgcgcatcc

SEQ ID NO: 4790729 - DNA, 25 bp, Homo sapien
catggacgttagtgaaagtgaccgc

SEQ ID NO: 4790730 - DNA, 25 bp, Homo sapien
catacaaagagcatggacgttagtg

SEQ ID NO: 4790731 - DNA, 25 bp, Homo sapien
aagtgaccgcgcatccaataaagaa

SEQ ID NO: 4790732 - DNA, 25 bp, Homo sapien
cacagaggaatgagatcggagattg

SEQ ID NO: 4790733 - DNA, 25 bp, Homo sapien
tttctctgacactacagagacacag

SEQ ID NO: 4790734 - DNA, 25 bp, Homo sapien
taggtctgccaagaactaaacagaa

SEQ ID NO: 4790735 - DNA, 25 bp, Homo sapien
tcggagattgagtcctaggtctgcc

SEQ ID NO: 4790736 - DNA, 25 bp, Homo sapien
tctaagagcagtgaactacaacatg

SEQ ID NO: 4790737 - DNA, 25 bp, Homo sapien
cactagtactgcagtgtttacagca

SEQ ID NO: 4790738 - DNA, 25 bp, Homo sapien
gacctatggcaaggtttgtgcaact

SEQ ID NO: 4790739 - DNA, 25 bp, Homo sapien
tgggtcacagcacaatatagtggtc

SEQ ID NO: 4790740 - DNA, 25 bp, Homo sapien
cactccattcccaatgtaagacggg

SEQ ID NO: 4790741 - DNA, 25 bp, Homo sapien
tgctccactccattcccaatgtaag

SEQ ID NO: 4790742 - DNA, 25 bp, Homo sapien
agaaccctgctccactccattccca

SEQ ID NO: 4790743 - DNA, 25 bp, Homo sapien
tccactccattcccaatgtaagacg

SEQ ID NO: 4790744 - DNA, 25 bp, Homo sapien
agagctagttctgccgcttttcgta

SEQ ID NO: 4790745 - DNA, 25 bp, Homo sapien
gttctgccgcttttcgtacagattc

SEQ ID NO: 4790746 - DNA, 25 bp, Homo sapien
ttcagagctagttctgccgcttttc

SEQ ID NO: 4790747 - DNA, 25 bp, Homo sapien
ctagttctgccgcttttcgtacaga

SEQ ID NO: 4790748 - DNA, 25 bp, Homo sapien
tcaatgatgtcatctaagggtcttc

SEQ ID NO: 4790749 - DNA, 25 bp, Homo sapien
tcatcttgtactctaaaaagcgttt

SEQ ID NO: 4790750 - DNA, 25 bp, Homo sapien
catcttgtactctaaaaagcgtttc

SEQ ID NO: 4790751 - DNA, 25 bp, Homo sapien
atgatgtcatctaagggtcttcctc

SEQ ID NO: 4790752 - DNA, 25 bp, Homo sapien
tgcttgtaaggttcttaaccaaatc

SEQ ID NO: 4790753 - DNA, 25 bp, Homo sapien
catattgcttgtaaggttcttaacc

SEQ ID NO: 4790754 - DNA, 25 bp, Homo sapien
gaactcgccacatattgcttgtaag

SEQ ID NO: 4790755 - DNA, 25 bp, Homo sapien
ctggattctcgaactcgccacatat

SEQ ID NO: 4790756 - DNA, 25 bp, Homo sapien
cctgtcgaatgccaaggttgggatc

SEQ ID NO: 4790757 - DNA, 25 bp, Homo sapien
ctggtaacgataaagtcgaggaact

SEQ ID NO: 4790758 - DNA, 25 bp, Homo sapien
caaatacttgtcatggcctgtcgaa

SEQ ID NO: 4790759 - DNA, 25 bp, Homo sapien
catggatttgtcagtgaccaacgca

SEQ ID NO: 4790760 - DNA, 25 bp, Homo sapien
tgctctccagctctggtagcaatta

SEQ ID NO: 4790761 - DNA, 25 bp, Homo sapien
gaggcagaaaaggagccagctgctc

SEQ ID NO: 4790762 - DNA, 25 bp, Homo sapien
ggcagaaaaggagccagctgctctc

SEQ ID NO: 4790763 - DNA, 25 bp, Homo sapien
attacattaaaaccaaaagcagcac

SEQ ID NO: 4790764 - DNA, 25 bp, Homo sapien
cacattgcatgatggttggctaaat

SEQ ID NO: 4790765 - DNA, 25 bp, Homo sapien
cttgccagagaacaaagttccttgt

SEQ ID NO: 4790766 - DNA, 25 bp, Homo sapien
cttcctagagttccacattgcatga

SEQ ID NO: 4790767 - DNA, 25 bp, Homo sapien
tctggctggctaagatcacttgcca

SEQ ID NO: 4790768 - DNA, 25 bp, Homo sapien
aagagctcccccttgaaataccact

SEQ ID NO: 4790769 - DNA, 25 bp, Homo sapien
agctcccccttgaaataccactgtc

SEQ ID NO: 4790770 - DNA, 25 bp, Homo sapien
gagctcccccttgaaataccactgt

SEQ ID NO: 4790771 - DNA, 25 bp, Homo sapien
agagctcccccttgaaataccactg

SEQ ID NO: 4790772 - DNA, 25 bp, Homo sapien
tgtgtagagacttcctctatgggct

SEQ ID NO: 4790773 - DNA, 25 bp, Homo sapien
gctatccacagcacaacaattatgg

SEQ ID NO: 4790774 - DNA, 25 bp, Homo sapien
catggaaagccgaatcttccttctc

SEQ ID NO: 4790775 - DNA, 25 bp, Homo sapien
ttatggactcgcaacttagaaaagg

SEQ ID NO: 4790776 - DNA, 25 bp, Homo sapien
ttttgccagtcataagtgtttccac

SEQ ID NO: 4790777 - DNA, 25 bp, Homo sapien
attcctgttgatcttgttcattgcc

SEQ ID NO: 4790778 - DNA, 25 bp, Homo sapien
cccaaggccctttgatgcaacatct

SEQ ID NO: 4790779 - DNA, 25 bp, Homo sapien
tgcctagttcataaaccaacccaag

SEQ ID NO: 4790780 - DNA, 25 bp, Homo sapien
ctgaaacaaatgcactttgaatttc

SEQ ID NO: 4790781 - DNA, 25 bp, Homo sapien
ctgatagaactgaaacaaatgcact

SEQ ID NO: 4790782 - DNA, 25 bp, Homo sapien
actgaaacaaatgcactttgaattt

SEQ ID NO: 4790783 - DNA, 25 bp, Homo sapien
gatagaactgaaacaaatgcacttt

SEQ ID NO: 4790784 - DNA, 25 bp, Homo sapien
cttcacttctttgtgggtacttagc

SEQ ID NO: 4790785 - DNA, 25 bp, Homo sapien
cacttctttgtgggtacttagcttc

SEQ ID NO: 4790786 - DNA, 25 bp, Homo sapien
ttcacttctttgtgggtacttagct

SEQ ID NO: 4790787 - DNA, 25 bp, Homo sapien
tcacttctttgtgggtacttagctt

SEQ ID NO: 4790788 - DNA, 25 bp, Homo sapien
aacacccatggaaccacatcattca

SEQ ID NO: 4790789 - DNA, 25 bp, Homo sapien
ggttggggctgatgatatgtttatt

SEQ ID NO: 4790790 - DNA, 25 bp, Homo sapien
aaatcacatccaacacccatggaac

SEQ ID NO: 4790791 - DNA, 25 bp, Homo sapien
tgcttgcctcacgtgtgggttgggg

SEQ ID NO: 4790792 - DNA, 25 bp, Homo sapien
tcattataaatcgattagctgaata

SEQ ID NO: 4790793 - DNA, 25 bp, Homo sapien
aatcgattagctgaatatttggtac

SEQ ID NO: 4790794 - DNA, 25 bp, Homo sapien
tataaatcgattagctgaatatttg

SEQ ID NO: 4790795 - DNA, 25 bp, Homo sapien
taaatcgattagctgaatatttggt

SEQ ID NO: 4790796 - DNA, 25 bp, Homo sapien
tcatttgccaggcatctcgggcagc

SEQ ID NO: 4790797 - DNA, 25 bp, Homo sapien
ttcctattgcagcactggtaatggc

SEQ ID NO: 4790798 - DNA, 25 bp, Homo sapien
aatggcttcgccaatagtgaactga

SEQ ID NO: 4790799 - DNA, 25 bp, Homo sapien
cagcaggtggagtatattcctcttc

SEQ ID NO: 4790800 - DNA, 25 bp, Homo sapien
catcagaccttgcaagaggagtttc

SEQ ID NO: 4790801 - DNA, 25 bp, Homo sapien
aactggaaaatatcccagtgtttgg

SEQ ID NO: 4790802 - DNA, 25 bp, Homo sapien
ccttgcaagaggagtttctggtgag

SEQ ID NO: 4790803 - DNA, 25 bp, Homo sapien
tccacagaatccatcagaccttgca

SEQ ID NO: 4790804 - DNA, 25 bp, Homo sapien
tagtaagctttctacaagatgcaat

SEQ ID NO: 4790805 - DNA, 25 bp, Homo sapien
tggaaggtattctacttagtaagct

SEQ ID NO: 4790806 - DNA, 25 bp, Homo sapien
ccaggaggggtgatgtactgtccaa

SEQ ID NO: 4790807 - DNA, 25 bp, Homo sapien
ctgtgcaggcagcaattgccaggag

SEQ ID NO: 4790808 - DNA, 25 bp, Homo sapien
aaggatccatgctgtatctccgggc

SEQ ID NO: 4790809 - DNA, 25 bp, Homo sapien
tctgtagcactctgaatgagttcct

SEQ ID NO: 4790810 - DNA, 25 bp, Homo sapien
tcccaatgcaagcaaggatccatgc

SEQ ID NO: 4790811 - DNA, 25 bp, Homo sapien
taccttcccaccgtgaatcccaatg

SEQ ID NO: 4790812 - DNA, 25 bp, Homo sapien
taggtgtgttcacggtggtacggct

SEQ ID NO: 4790813 - DNA, 25 bp, Homo sapien
tgttcacggtggtacggctgcaggc

SEQ ID NO: 4790814 - DNA, 25 bp, Homo sapien
ttctcgctttcagtactcatcaggc

SEQ ID NO: 4790815 - DNA, 25 bp, Homo sapien
gctttcagtactcatcaggcccgac

SEQ ID NO: 4790816 - DNA, 25 bp, Homo sapien
aacaacgctgccagttcgcgcattt

SEQ ID NO: 4790817 - DNA, 25 bp, Homo sapien
cattgatttcaactcattccccgac

SEQ ID NO: 4790818 - DNA, 25 bp, Homo sapien
tataagctgttctatcattgatttc

SEQ ID NO: 4790819 - DNA, 25 bp, Homo sapien
ttccccgacactgttgataccacta

SEQ ID NO: 4790820 - DNA, 25 bp, Homo sapien
gacacagcttccaatagacagtaca

SEQ ID NO: 4790821 - DNA, 25 bp, Homo sapien
aatagacagtacataaccggcaaac

SEQ ID NO: 4790822 - DNA, 25 bp, Homo sapien
tttctggatacactgacacagcttc

SEQ ID NO: 4790823 - DNA, 25 bp, Homo sapien
ctacaaatttggtagccagcttttc

SEQ ID NO: 4790824 - DNA, 25 bp, Homo sapien
tagatgatgagggtgccatctgccc

SEQ ID NO: 4790825 - DNA, 25 bp, Homo sapien
ggcacatgcgcaagtacagaacgat

SEQ ID NO: 4790826 - DNA, 25 bp, Homo sapien
tctggacagggttagtctccccact

SEQ ID NO: 4790827 - DNA, 25 bp, Homo sapien
taaagtccgtatgtagcgcccaatg

SEQ ID NO: 4790828 - DNA, 25 bp, Homo sapien
agatcacctcttgtaatttacctag

SEQ ID NO: 4790829 - DNA, 25 bp, Homo sapien
ggaagctttttcattgatcgttaaa

SEQ ID NO: 4790830 - DNA, 25 bp, Homo sapien
tttacctagagcaagtcaataatct

SEQ ID NO: 4790831 - DNA, 25 bp, Homo sapien
gatcgttaaaataggataggcagca

SEQ ID NO: 4790832 - DNA, 25 bp, Homo sapien
aaggacagtggtcccggtcatgtac

SEQ ID NO: 4790833 - DNA, 25 bp, Homo sapien
tggtcccggtcatgtacttgactgg

SEQ ID NO: 4790834 - DNA, 25 bp, Homo sapien
ccggtcatgtacttgactggagttt

SEQ ID NO: 4790835 - DNA, 25 bp, Homo sapien
acagtggtcccggtcatgtacttga

SEQ ID NO: 4790836 - DNA, 25 bp, Homo sapien
ccttaatacgcgttgtgcttctcca

SEQ ID NO: 4790837 - DNA, 25 bp, Homo sapien
tacctggaagacaccttaatacgcg

SEQ ID NO: 4790838 - DNA, 25 bp, Homo sapien
ctgtttctacctggaagacacctta

SEQ ID NO: 4790839 - DNA, 25 bp, Homo sapien
cttttcttggatgtaataaaccatt

SEQ ID NO: 4790840 - DNA, 25 bp, Homo sapien
aatgtcaccaatgggaaatgatcat

SEQ ID NO: 4790841 - DNA, 25 bp, Homo sapien
gcagagtcaacataacacattataa

SEQ ID NO: 4790842 - DNA, 25 bp, Homo sapien
attcttggctatctaagcagagtca

SEQ ID NO: 4790843 - DNA, 25 bp, Homo sapien
ggtccggggactcatctggcttaca

SEQ ID NO: 4790844 - DNA, 25 bp, Homo sapien
caaccaatttcagaccacctagaga

SEQ ID NO: 4790845 - DNA, 25 bp, Homo sapien
tatgtgtatgctttacctcgtagag

SEQ ID NO: 4790846 - DNA, 25 bp, Homo sapien
cctgaatggttctaacctaagaagg

SEQ ID NO: 4790847 - DNA, 25 bp, Homo sapien
agaagtcagtgactatccagtggtc

SEQ ID NO: 4790848 - DNA, 25 bp, Homo sapien
tcacagccacttgtcgaacttgaac

SEQ ID NO: 4790849 - DNA, 25 bp, Homo sapien
gaaacaccgtactggcaaatttcac

SEQ ID NO: 4790850 - DNA, 25 bp, Homo sapien
tctgagggaaacaccgtactggcaa

SEQ ID NO: 4790851 - DNA, 25 bp, Homo sapien
gtagcagcaaatatctggaagggat

SEQ ID NO: 4790852 - DNA, 25 bp, Homo sapien
tattaagtacgaagccacaagtgcc

SEQ ID NO: 4790853 - DNA, 25 bp, Homo sapien
tacgctccaaccatcatagataaag

SEQ ID NO: 4790854 - DNA, 25 bp, Homo sapien
ctccatgagagttcgctgtgcccct

SEQ ID NO: 4790855 - DNA, 25 bp, Homo sapien
tgaatagcaagtcgagtctcaggct

SEQ ID NO: 4790856 - DNA, 25 bp, Homo sapien
caagcgctatatccttagtgaataa

SEQ ID NO: 4790857 - DNA, 25 bp, Homo sapien
gctgcacaagcgctatatccttagt

SEQ ID NO: 4790858 - DNA, 25 bp, Homo sapien
tatatccttagtgaataaatgtggc

SEQ ID NO: 4790859 - DNA, 25 bp, Homo sapien
ccttagtgaataaatgtggcatccg

SEQ ID NO: 4790860 - DNA, 25 bp, Homo sapien
ctgaatatgccattgacagtagttt

SEQ ID NO: 4790861 - DNA, 25 bp, Homo sapien
atgccattgacagtagtttagggtc

SEQ ID NO: 4790862 - DNA, 25 bp, Homo sapien
tatgccattgacagtagtttagggt

SEQ ID NO: 4790863 - DNA, 25 bp, Homo sapien
gaatatgccattgacagtagtttag

SEQ ID NO: 4790864 - DNA, 25 bp, Homo sapien
caaaagcattggacctaatggctta

SEQ ID NO: 4790865 - DNA, 25 bp, Homo sapien
cattcaaaagcattggacctaatgg

SEQ ID NO: 4790866 - DNA, 25 bp, Homo sapien
ggacctaatggcttaatcttgattt

SEQ ID NO: 4790867 - DNA, 25 bp, Homo sapien
ttagcttggtgaggccattcaaaag

SEQ ID NO: 4790868 - DNA, 25 bp, Homo sapien
gatgcacaaattgcagggataatgt

SEQ ID NO: 4790869 - DNA, 25 bp, Homo sapien
gcacaaattgcagggataatgttct

SEQ ID NO: 4790870 - DNA, 25 bp, Homo sapien
cacaaattgcagggataatgttctt

SEQ ID NO: 4790871 - DNA, 25 bp, Homo sapien
tgcacaaattgcagggataatgttc

SEQ ID NO: 4790872 - DNA, 25 bp, Homo sapien
taacttgactcttgtactgacaggg

SEQ ID NO: 4790873 - DNA, 25 bp, Homo sapien
aatgttggctgggaacgtttcagca

SEQ ID NO: 4790874 - DNA, 25 bp, Homo sapien
tcagcagcttgtctagagcggagga

SEQ ID NO: 4790875 - DNA, 25 bp, Homo sapien
ggtcccttttcaactctggcttcag

SEQ ID NO: 4790876 - DNA, 25 bp, Homo sapien
tgtgaccctaaaaaggtccatggac

SEQ ID NO: 4790877 - DNA, 25 bp, Homo sapien
cacagactgcctaaaaggtgttttg

SEQ ID NO: 4790878 - DNA, 25 bp, Homo sapien
gaaaagttatgtgatcagccaaacc

SEQ ID NO: 4790879 - DNA, 25 bp, Homo sapien
ggtaggaacctagcaagtacactca

SEQ ID NO: 4790880 - DNA, 25 bp, Homo sapien
cttcagtggtatatctccaaggtac

SEQ ID NO: 4790881 - DNA, 25 bp, Homo sapien
tttgtcttcagtggtatatctccaa

SEQ ID NO: 4790882 - DNA, 25 bp, Homo sapien
gtacaccttgtacatcttattaatg

SEQ ID NO: 4790883 - DNA, 25 bp, Homo sapien
tggtatatctccaaggtacaccttg

SEQ ID NO: 4790884 - DNA, 25 bp, Homo sapien
cacttgaatccgagagggggagatt

SEQ ID NO: 4790885 - DNA, 25 bp, Homo sapien
cttgaatccgagagggggagattgc

SEQ ID NO: 4790886 - DNA, 25 bp, Homo sapien
ttgaatccgagagggggagattgca

SEQ ID NO: 4790887 - DNA, 25 bp, Homo sapien
atcacttgaatccgagagggggaga

SEQ ID NO: 4790888 - DNA, 25 bp, Homo sapien
tgttcagcttctatgaatttcacga

SEQ ID NO: 4790889 - DNA, 25 bp, Homo sapien
tcaccaagtggagaacagcttcaag

SEQ ID NO: 4790890 - DNA, 25 bp, Homo sapien
aggtctgctgccgttgccacactgt

SEQ ID NO: 4790891 - DNA, 25 bp, Homo sapien
tgtatcactagaggcaatcaccaag

SEQ ID NO: 4790892 - DNA, 25 bp, Homo sapien
tcatccctgaaactaaactgttcgt

SEQ ID NO: 4790893 - DNA, 25 bp, Homo sapien
aacacatacagaggcatattggcaa

SEQ ID NO: 4790894 - DNA, 25 bp, Homo sapien
gcaaataatgaccaatttaagattg

SEQ ID NO: 4790895 - DNA, 25 bp, Homo sapien
tgttcgtttcagcactagattatga

SEQ ID NO: 4790896 - DNA, 25 bp, Homo sapien
ggttatcaccaataactcgtttggc

SEQ ID NO: 4790897 - DNA, 25 bp, Homo sapien
ttgttcaggtgtccatgggttatca

SEQ ID NO: 4790898 - DNA, 25 bp, Homo sapien
tccatgggttatcaccaataactcg

SEQ ID NO: 4790899 - DNA, 25 bp, Homo sapien
ccaataactcgtttggctgcataaa

SEQ ID NO: 4790900 - DNA, 25 bp, Homo sapien
gaagatgaattttggcgactctggg

SEQ ID NO: 4790901 - DNA, 25 bp, Homo sapien
ctgtttgaagaagaaccctgtgctg

SEQ ID NO: 4790902 - DNA, 25 bp, Homo sapien
atgaattttggcgactctgggattc

SEQ ID NO: 4790903 - DNA, 25 bp, Homo sapien
tttgaagaagaaccctgtgctgaag

SEQ ID NO: 4790904 - DNA, 25 bp, Homo sapien
tgtaaagccgataagcagtggagct

SEQ ID NO: 4790905 - DNA, 25 bp, Homo sapien
taactccccgtagtaaaagcagtca

SEQ ID NO: 4790906 - DNA, 25 bp, Homo sapien
tggcaactcagcatttgtaaagccg

SEQ ID NO: 4790907 - DNA, 25 bp, Homo sapien
catcttaggcaggtagagtctaaaa

SEQ ID NO: 4790908 - DNA, 25 bp, Homo sapien
tgatgattcaacagggtatttcatg

SEQ ID NO: 4790909 - DNA, 25 bp, Homo sapien
ttcatgtgaaaaagggttggtatta

SEQ ID NO: 4790910 - DNA, 25 bp, Homo sapien
ggcatcagaaggacatctagcatga

SEQ ID NO: 4790911 - DNA, 25 bp, Homo sapien
tttctcagcaagattaaatggagaa

SEQ ID NO: 4790912 - DNA, 25 bp, Homo sapien
ttccatggcagtaagaagcgtaggg

SEQ ID NO: 4790913 - DNA, 25 bp, Homo sapien
ccactggtaggcgaggatagcccat

SEQ ID NO: 4790914 - DNA, 25 bp, Homo sapien
gcgtaggggccagttcacattgttt

SEQ ID NO: 4790915 - DNA, 25 bp, Homo sapien
gtttttccactggtaggcgaggata

SEQ ID NO: 4790916 - DNA, 25 bp, Homo sapien
cagcagggtcctggtactgaaccaa

SEQ ID NO: 4790917 - DNA, 25 bp, Homo sapien
tacgtttattcagatggaccagcag

SEQ ID NO: 4790918 - DNA, 25 bp, Homo sapien
aacagtgtctctactggaagttgta

SEQ ID NO: 4790919 - DNA, 25 bp, Homo sapien
gcggctttttatacgtttattcaga

SEQ ID NO: 4790920 - DNA, 25 bp, Homo sapien
gggcacactgcatctgactgaagcc

SEQ ID NO: 4790921 - DNA, 25 bp, Homo sapien
gagttccaagcagagtatcagttat

SEQ ID NO: 4790922 - DNA, 25 bp, Homo sapien
caaggtctggattacaaaaggattc

SEQ ID NO: 4790923 - DNA, 25 bp, Homo sapien
tcacggaggaagtgacaggaacact

SEQ ID NO: 4790924 - DNA, 25 bp, Homo sapien
tattctgtaattgttcatctgtttc

SEQ ID NO: 4790925 - DNA, 25 bp, Homo sapien
caggaggaaggaatttagatataat

SEQ ID NO: 4790926 - DNA, 25 bp, Homo sapien
tcttgggtgctagagagtttgagca

SEQ ID NO: 4790927 - DNA, 25 bp, Homo sapien
catggccaagtcgtaaaaagacccg

SEQ ID NO: 4790928 - DNA, 25 bp, Homo sapien
tttctccaaagacaggatcactgcc

SEQ ID NO: 4790929 - DNA, 25 bp, Homo sapien
ttctccaaagacaggatcactgccc

SEQ ID NO: 4790930 - DNA, 25 bp, Homo sapien
cacaagagctcatcatacggaggca

SEQ ID NO: 4790931 - DNA, 25 bp, Homo sapien
ggccagaaagctaaaaatcccatgt

SEQ ID NO: 4790932 - DNA, 25 bp, Homo sapien
gaattattagtagaatcccacctag

SEQ ID NO: 4790933 - DNA, 25 bp, Homo sapien
tcccacctagagtaggaatcctatg

SEQ ID NO: 4790934 - DNA, 25 bp, Homo sapien
cagtcatagatcaggaggagggctc

SEQ ID NO: 4790935 - DNA, 25 bp, Homo sapien
ggctgatagagccaacaccatctca

SEQ ID NO: 4790936 - DNA, 25 bp, Homo sapien
ggctctgctcactacagtcggctga

SEQ ID NO: 4790937 - DNA, 25 bp, Homo sapien
gtttctcacttagaccatgcctcag

SEQ ID NO: 4790938 - DNA, 25 bp, Homo sapien
caccaatggtacgttcatccactcg

SEQ ID NO: 4790939 - DNA, 25 bp, Homo sapien
tcaatgtgatacatggtttatccaa

SEQ ID NO: 4790940 - DNA, 25 bp, Homo sapien
aatcttgacaaaaatcctcgggatc

SEQ ID NO: 4790941 - DNA, 25 bp, Homo sapien
catccactcgtacatatgcaattgt

SEQ ID NO: 4790942 - DNA, 25 bp, Homo sapien
ccagccctgattgccacatcttata

SEQ ID NO: 4790943 - DNA, 25 bp, Homo sapien
gtgaggcaccgctccagccctgatt

SEQ ID NO: 4790944 - DNA, 25 bp, Homo sapien
ctggccccgattgccacattttata

SEQ ID NO: 4790945 - DNA, 25 bp, Homo sapien
gcctggccccgattgccacatttta

SEQ ID NO: 4790946 - DNA, 25 bp, Homo sapien
ggcggccgcagccatgttgcgccgg

SEQ ID NO: 4790947 - DNA, 25 bp, Homo sapien
gcggccgcagccatgttgcgccggg

SEQ ID NO: 4790948 - DNA, 25 bp, Homo sapien
gcggcggccgcagccatgttgcgcc

SEQ ID NO: 4790949 - DNA, 25 bp, Homo sapien
aggcggcggccgcagccatgttgcg

SEQ ID NO: 4790950 - DNA, 25 bp, Homo sapien
ctgtcgccgcccgccccgcgtgcgc

SEQ ID NO: 4790951 - DNA, 25 bp, Homo sapien
cgccgcccgccccgcgtgcgctccc

SEQ ID NO: 4790952 - DNA, 25 bp, Homo sapien
gtcgccgcccgccccgcgtgcgctc

SEQ ID NO: 4790953 - DNA, 25 bp, Homo sapien
ccgcccgccccgcgtgcgctccccg

SEQ ID NO: 4790954 - DNA, 25 bp, Homo sapien
ccttttccgaggtctgcggctgtca

SEQ ID NO: 4790955 - DNA, 25 bp, Homo sapien
tcggcgccgcgaggtgagggctgta

SEQ ID NO: 4790956 - DNA, 25 bp, Homo sapien
gctgtagagcgaggcgttcggcggg

SEQ ID NO: 4790957 - DNA, 25 bp, Homo sapien
agtcggagccggtctccatgccgcg

SEQ ID NO: 4790958 - DNA, 25 bp, Homo sapien
cactcgctgcgggacaagcttctgg

SEQ ID NO: 4790959 - DNA, 25 bp, Homo sapien
tttcggaaagctgcacgagcgcgtt

SEQ ID NO: 4790960 - DNA, 25 bp, Homo sapien
tctggaagctctttgcggtggcgtt

SEQ ID NO: 4790961 - DNA, 25 bp, Homo sapien
atgcaggtactggtcgtcccgggcc

SEQ ID NO: 4790962 - DNA, 25 bp, Homo sapien
ctgtgggaggtgcgcactccgctgc

SEQ ID NO: 4790963 - DNA, 25 bp, Homo sapien
gaggtgcgcactccgctgcgggatg

SEQ ID NO: 4790964 - DNA, 25 bp, Homo sapien
gtgggaggtgcgcactccgctgcgg

SEQ ID NO: 4790965 - DNA, 25 bp, Homo sapien
ggaggtgcgcactccgctgcgggat

SEQ ID NO: 4790966 - DNA, 25 bp, Homo sapien
tacttacctatatcttacaatttat

SEQ ID NO: 4790967 - DNA, 25 bp, Homo sapien
ggaaaacattcatgttaacactggt

SEQ ID NO: 4790968 - DNA, 25 bp, Homo sapien
tagagatggcgtttccccatggaaa

SEQ ID NO: 4790969 - DNA, 25 bp, Homo sapien
gaaaggaggtggatcactcctgacc

SEQ ID NO: 4790970 - DNA, 25 bp, Homo sapien
caagtgttttgaacgttagtgtaca

SEQ ID NO: 4790971 - DNA, 25 bp, Homo sapien
tcccagcaagatccgttattccagt

SEQ ID NO: 4790972 - DNA, 25 bp, Homo sapien
ggcacccactactcagtcgactttg

SEQ ID NO: 4790973 - DNA, 25 bp, Homo sapien
cagtttacagttaatctcccgtcca

SEQ ID NO: 4790974 - DNA, 25 bp, Homo sapien
ttcggccgtgttgtagcacatatca

SEQ ID NO: 4790975 - DNA, 25 bp, Homo sapien
ctaattacttggtatgaatggaatc

SEQ ID NO: 4790976 - DNA, 25 bp, Homo sapien
gcaccattttggctatcaagaataa

SEQ ID NO: 4790977 - DNA, 25 bp, Homo sapien
cattgctataatcagtggtgctttc

SEQ ID NO: 4790978 - DNA, 25 bp, Homo sapien
tgtaatcaggattacactacgtttc

SEQ ID NO: 4790979 - DNA, 25 bp, Homo sapien
gtaatcaggattacactacgtttcc

SEQ ID NO: 4790980 - DNA, 25 bp, Homo sapien
gctattttgattactccagtaatgt

SEQ ID NO: 4790981 - DNA, 25 bp, Homo sapien
tttgtaatcaggattacactacgtt

SEQ ID NO: 4790982 - DNA, 25 bp, Homo sapien
taaaggtctgaactaagaaagcttc

SEQ ID NO: 4790983 - DNA, 25 bp, Homo sapien
ctgaaaacacactgtcaaaatgctt

SEQ ID NO: 4790984 - DNA, 25 bp, Homo sapien
tgttagtgtctataaaggtctgaac

SEQ ID NO: 4790985 - DNA, 25 bp, Homo sapien
tttctcccttgtgtggaaatgttag

SEQ ID NO: 4790986 - DNA, 25 bp, Homo sapien
caagcaaagtgtttttcaccctgag

SEQ ID NO: 4790987 - DNA, 25 bp, Homo sapien
cagagtgggtcgataatctacaagc

SEQ ID NO: 4790988 - DNA, 25 bp, Homo sapien
gctcagtaagttgtgatttccaagc

SEQ ID NO: 4790989 - DNA, 25 bp, Homo sapien
gctttgctaaacctacctgtagctc

SEQ ID NO: 4790990 - DNA, 25 bp, Homo sapien
tgaagcagtgcataaatggaaacaa

SEQ ID NO: 4790991 - DNA, 25 bp, Homo sapien
tctagccaggtcacaagtttttccc

SEQ ID NO: 4790992 - DNA, 25 bp, Homo sapien
catccaggtaacattggtaaagaaa

SEQ ID NO: 4790993 - DNA, 25 bp, Homo sapien
catatgcagcgtgatattagggaga

SEQ ID NO: 4790994 - DNA, 25 bp, Homo sapien
tgttgatactgactagattggtgac

SEQ ID NO: 4790995 - DNA, 25 bp, Homo sapien
tgtgattttacatccgtgcatagaa

SEQ ID NO: 4790996 - DNA, 25 bp, Homo sapien
tatactctatcttgtgctatctgca

SEQ ID NO: 4790997 - DNA, 25 bp, Homo sapien
ctgtaacttgtgctgtttgcatagg

SEQ ID NO: 4790998 - DNA, 25 bp, Homo sapien
tggcaagaggtttcatcaggctact

SEQ ID NO: 4790999 - DNA, 25 bp, Homo sapien
tttgtgtcctaggaggcacggagca

SEQ ID NO: 4791000 - DNA, 25 bp, Homo sapien
aagacctcgagtggatgcctgcaac

SEQ ID NO: 4791001 - DNA, 25 bp, Homo sapien
tgtcagtctgataacccaagaaggc

SEQ ID NO: 4791002 - DNA, 25 bp, Homo sapien
ttgggaccctaaatgtcagtgcctg

SEQ ID NO: 4791003 - DNA, 25 bp, Homo sapien
taagcctggctaccattactggcga

SEQ ID NO: 4791004 - DNA, 25 bp, Homo sapien
gggtacccaagttaatagcctatca

SEQ ID NO: 4791005 - DNA, 25 bp, Homo sapien
cagaggcacgccacatggtgggata

SEQ ID NO: 4791006 - DNA, 25 bp, Homo sapien
ggcggagtttgcactaagccgagat

SEQ ID NO: 4791007 - DNA, 25 bp, Homo sapien
cggagtttgcactaagccgagattg

SEQ ID NO: 4791008 - DNA, 25 bp, Homo sapien
gtttgcactaagccgagattgcacc

SEQ ID NO: 4791009 - DNA, 25 bp, Homo sapien
gaggcggagtttgcactaagccgag

SEQ ID NO: 4791010 - DNA, 25 bp, Homo sapien
aacacttacctaatatatgccaggc

SEQ ID NO: 4791011 - DNA, 25 bp, Homo sapien
tatcggcagggaggtagctaacact

SEQ ID NO: 4791012 - DNA, 25 bp, Homo sapien
tgtagaggaccagtatggactggcc

SEQ ID NO: 4791013 - DNA, 25 bp, Homo sapien
taagacccctatatgcctgcagtga

SEQ ID NO: 4791014 - DNA, 25 bp, Homo sapien
tgtagtgaacagtgaggtgactggt

SEQ ID NO: 4791015 - DNA, 25 bp, Homo sapien
tcagttccgggataattgtgtggaa

SEQ ID NO: 4791016 - DNA, 25 bp, Homo sapien
agtgaggtgactggttgttgttgac

SEQ ID NO: 4791017 - DNA, 25 bp, Homo sapien
tattagcccccgaaggcattagcta

SEQ ID NO: 4791018 - DNA, 25 bp, Homo sapien
taagacatttaaggtagtatacatt

SEQ ID NO: 4791019 - DNA, 25 bp, Homo sapien
ttaactaatcatctaaatggcctcc

SEQ ID NO: 4791020 - DNA, 25 bp, Homo sapien
aattaactaatcatctaaatggcct

SEQ ID NO: 4791021 - DNA, 25 bp, Homo sapien
gctcaaactcattatgagtactatt

SEQ ID NO: 4791022 - DNA, 25 bp, Homo sapien
cagcattcccataaatgcagctggc

SEQ ID NO: 4791023 - DNA, 25 bp, Homo sapien
tcagcattcccataaatgcagctgg

SEQ ID NO: 4791024 - DNA, 25 bp, Homo sapien
agcattcccataaatgcagctggca

SEQ ID NO: 4791025 - DNA, 25 bp, Homo sapien
ttcagcattcccataaatgcagctg

SEQ ID NO: 4791026 - DNA, 25 bp, Homo sapien
tatattccttgtactggattttacc

SEQ ID NO: 4791027 - DNA, 25 bp, Homo sapien
caatgatatattccttgtactggat

SEQ ID NO: 4791028 - DNA, 25 bp, Homo sapien
gttttcaaatccttcaatgatatat

SEQ ID NO: 4791029 - DNA, 25 bp, Homo sapien
gatatattccttgtactggatttta

SEQ ID NO: 4791030 - DNA, 25 bp, Homo sapien
caccgtgcccagagcgattaagcaa

SEQ ID NO: 4791031 - DNA, 25 bp, Homo sapien
catagtgcgaaatgtcataaggcag

SEQ ID NO: 4791032 - DNA, 25 bp, Homo sapien
agtcctgtcctccatgaacttgaag

SEQ ID NO: 4791033 - DNA, 25 bp, Homo sapien
cacaatgatctcagaggaggtacaa

SEQ ID NO: 4791034 - DNA, 25 bp, Homo sapien
caagtttttcgctaatgtattccag

SEQ ID NO: 4791035 - DNA, 25 bp, Homo sapien
tagacaagattatttgcttgaagtc

SEQ ID NO: 4791036 - DNA, 25 bp, Homo sapien
gtcagtcaattacaaagtagggaag

SEQ ID NO: 4791037 - DNA, 25 bp, Homo sapien
tccagtgatggcttagcactcttca

SEQ ID NO: 4791038 - DNA, 25 bp, Homo sapien
agaagaatcacatgaacccggcagg

SEQ ID NO: 4791039 - DNA, 25 bp, Homo sapien
aagaatcacatgaacccggcaggcg

SEQ ID NO: 4791040 - DNA, 25 bp, Homo sapien
ggagatcgcaccattgcaccccagc

SEQ ID NO: 4791041 - DNA, 25 bp, Homo sapien
gaggttgcagtgaacggagatcgca

SEQ ID NO: 4791042 - DNA, 25 bp, Homo sapien
taaggaggttaggacatagacacac

SEQ ID NO: 4791043 - DNA, 25 bp, Homo sapien
aagtcacacaggtgggccttaatca

SEQ ID NO: 4791044 - DNA, 25 bp, Homo sapien
aaattagggtataggatgcagggta

SEQ ID NO: 4791045 - DNA, 25 bp, Homo sapien
aaggccacgtgaagatgcagggaaa

SEQ ID NO: 4791046 - DNA, 25 bp, Homo sapien
caaagggagtgtgacctagtgtaca

SEQ ID NO: 4791047 - DNA, 25 bp, Homo sapien
gaatggcagacagtgagtgtagaca

SEQ ID NO: 4791048 - DNA, 25 bp, Homo sapien
tctaagcacaatgacccaataggga

SEQ ID NO: 4791049 - DNA, 25 bp, Homo sapien
tagggaaaaactgacgatgcggcag

SEQ ID NO: 4791050 - DNA, 25 bp, Homo sapien
tgcgaagctcctgatagataacaat

SEQ ID NO: 4791051 - DNA, 25 bp, Homo sapien
aaaagcttccatgcgaagctcctga

SEQ ID NO: 4791052 - DNA, 25 bp, Homo sapien
ggtagacgacaaaagcttccatgcg

SEQ ID NO: 4791053 - DNA, 25 bp, Homo sapien
gcatctccttgccagcggtagacga

SEQ ID NO: 4791054 - DNA, 25 bp, Homo sapien
cagactctgtatgaggagcttagaa

SEQ ID NO: 4791055 - DNA, 25 bp, Homo sapien
cttttggacctcagagtgtggagcg

SEQ ID NO: 4791056 - DNA, 25 bp, Homo sapien
gaggcctgtacaaggcatctcacag

SEQ ID NO: 4791057 - DNA, 25 bp, Homo sapien
tgccaataggagttaaagagtctct

SEQ ID NO: 4791058 - DNA, 25 bp, Homo sapien
ctgttatatgtagagatggctccac

SEQ ID NO: 4791059 - DNA, 25 bp, Homo sapien
cggttctgttatatgtagagatggc

SEQ ID NO: 4791060 - DNA, 25 bp, Homo sapien
gggccggttctgttatatgtagaga

SEQ ID NO: 4791061 - DNA, 25 bp, Homo sapien
gaagtgggccggttctgttatatgt

SEQ ID NO: 4791062 - DNA, 25 bp, Homo sapien
taacaatcataaccatcaggagacg

SEQ ID NO: 4791063 - DNA, 25 bp, Homo sapien
gcaaccttttcatcagaccctactg

SEQ ID NO: 4791064 - DNA, 25 bp, Homo sapien
caaatccaagcttttgaaggtaggc

SEQ ID NO: 4791065 - DNA, 25 bp, Homo sapien
tcttccaaagactctaccgtcttgt

SEQ ID NO: 4791066 - DNA, 25 bp, Homo sapien
tgagctttgcaatctgccccacgac

SEQ ID NO: 4791067 - DNA, 25 bp, Homo sapien
acagtggtattgtgtctggccactc

SEQ ID NO: 4791068 - DNA, 25 bp, Homo sapien
tcagaaatggagtgcgttgtccagc

SEQ ID NO: 4791069 - DNA, 25 bp, Homo sapien
agacagtggtattgtgtctggccac

SEQ ID NO: 4791070 - DNA, 25 bp, Homo sapien
cagatctttcccatcagaaatggag

SEQ ID NO: 4791071 - DNA, 25 bp, Homo sapien
ctggagaagccagtacaatagttcc

SEQ ID NO: 4791072 - DNA, 25 bp, Homo sapien
atagttccttttggtagggctacat

SEQ ID NO: 4791073 - DNA, 25 bp, Homo sapien
tagggctacatttttactttccaca

SEQ ID NO: 4791074 - DNA, 25 bp, Homo sapien
gaagccagtacaatagttccttttg

SEQ ID NO: 4791075 - DNA, 25 bp, Homo sapien
cattaaggcattaaggcatgtgaca

SEQ ID NO: 4791076 - DNA, 25 bp, Homo sapien
tgtcttccctttcaagggagtcagg

SEQ ID NO: 4791077 - DNA, 25 bp, Homo sapien
gataaagcacattaaggcattaagg

SEQ ID NO: 4791078 - DNA, 25 bp, Homo sapien
ttaaggcatgtgacatgtcttccct

SEQ ID NO: 4791079 - DNA, 25 bp, Homo sapien
gggtactgatctctgctggcttttt

SEQ ID NO: 4791080 - DNA, 25 bp, Homo sapien
ctaagctgcaccctttctgtctcat

SEQ ID NO: 4791081 - DNA, 25 bp, Homo sapien
tccctcattggttcccagggtactg

SEQ ID NO: 4791082 - DNA, 25 bp, Homo sapien
ttttccactctattaacacagggtc

SEQ ID NO: 4791083 - DNA, 25 bp, Homo sapien
aatattcataaacgtgattattatt

SEQ ID NO: 4791084 - DNA, 25 bp, Homo sapien
taatattcataaacgtgattattat

SEQ ID NO: 4791085 - DNA, 25 bp, Homo sapien
ttaatattcataaacgtgattatta

SEQ ID NO: 4791086 - DNA, 25 bp, Homo sapien
ctaccaatggtattataataactgg

SEQ ID NO: 4791087 - DNA, 25 bp, Homo sapien
tctaaataaatctgtaaggtcactg

SEQ ID NO: 4791088 - DNA, 25 bp, Homo sapien
gatccatagacgatttctaccaatg

SEQ ID NO: 4791089 - DNA, 25 bp, Homo sapien
gaaattccagtaaagatccatagac

SEQ ID NO: 4791090 - DNA, 25 bp, Homo sapien
aaaaaaataaagaatgagatgtttg

SEQ ID NO: 4791091 - DNA, 25 bp, Homo sapien
aaataaagaatgagatgtttggttt

SEQ ID NO: 4791092 - DNA, 25 bp, Homo sapien
aaaaataaagaatgagatgtttggt

SEQ ID NO: 4791093 - DNA, 25 bp, Homo sapien
ctagtcattgagacacaaaatttaa

SEQ ID NO: 4791094 - DNA, 25 bp, Homo sapien
gcatgagatgaaaccaaaggaccat

SEQ ID NO: 4791095 - DNA, 25 bp, Homo sapien
tcctgaacatacgagaagcttttac

SEQ ID NO: 4791096 - DNA, 25 bp, Homo sapien
caggttgccgagactgatgatgaac

SEQ ID NO: 4791097 - DNA, 25 bp, Homo sapien
ggaacccctttctaagcatgagatg

SEQ ID NO: 4791098 - DNA, 25 bp, Homo sapien
aggcaggagaatcagaatcacttga

SEQ ID NO: 4791099 - DNA, 25 bp, Homo sapien
gccaagattacgccattgcactcca

SEQ ID NO: 4791100 - DNA, 25 bp, Homo sapien
acctgggaggtagaggttgcggtga

SEQ ID NO: 4791101 - DNA, 25 bp, Homo sapien
gcatgggcaacaagagtgagactcc

SEQ ID NO: 4791102 - DNA, 25 bp, Homo sapien
gagagcctatgaccagacatgcagt

SEQ ID NO: 4791103 - DNA, 25 bp, Homo sapien
acaataatcattgtaggcagacccc

SEQ ID NO: 4791104 - DNA, 25 bp, Homo sapien
gataagatagggctgtaaatgccct

SEQ ID NO: 4791105 - DNA, 25 bp, Homo sapien
tctagccctctttacggttaaggca

SEQ ID NO: 4791106 - DNA, 25 bp, Homo sapien
cacacagtgagtcaacaacataggc

SEQ ID NO: 4791107 - DNA, 25 bp, Homo sapien
tattcagtgctttggtggcaccacg

SEQ ID NO: 4791108 - DNA, 25 bp, Homo sapien
gatcccgcaataaatcatgacctgg

SEQ ID NO: 4791109 - DNA, 25 bp, Homo sapien
gagagaaccctgttgcattgtgggc

SEQ ID NO: 4791110 - DNA, 25 bp, Homo sapien
tgccccatcattgtatcaccttcct

SEQ ID NO: 4791111 - DNA, 25 bp, Homo sapien
ttgctgccccatcattgtatcacct

SEQ ID NO: 4791112 - DNA, 25 bp, Homo sapien
tatcaccttccttcaatcttttggc

SEQ ID NO: 4791113 - DNA, 25 bp, Homo sapien
cattgtatcaccttccttcaatctt

SEQ ID NO: 4791114 - DNA, 25 bp, Homo sapien
gggatccacggtgaggaacaaagct

SEQ ID NO: 4791115 - DNA, 25 bp, Homo sapien
tagggatccacggtgaggaacaaag

SEQ ID NO: 4791116 - DNA, 25 bp, Homo sapien
ctcatgtagggatccacggtgagga

SEQ ID NO: 4791117 - DNA, 25 bp, Homo sapien
catgtagggatccacggtgaggaac

SEQ ID NO: 4791118 - DNA, 25 bp, Homo sapien
caaaataaagcattccataggcaat

SEQ ID NO: 4791119 - DNA, 25 bp, Homo sapien
aataaagcattccataggcaattag

SEQ ID NO: 4791120 - DNA, 25 bp, Homo sapien
taaagcattccataggcaattagaa

SEQ ID NO: 4791121 - DNA, 25 bp, Homo sapien
aagcattccataggcaattagaaac

SEQ ID NO: 4791122 - DNA, 25 bp, Homo sapien
cacagataatacttctgcttcagga

SEQ ID NO: 4791123 - DNA, 25 bp, Homo sapien
catctgtgcttctatcgcagagaca

SEQ ID NO: 4791124 - DNA, 25 bp, Homo sapien
atattgcttccattttaggttaggc

SEQ ID NO: 4791125 - DNA, 25 bp, Homo sapien
tgttacagtgctcaccatatggctt

SEQ ID NO: 4791126 - DNA, 25 bp, Homo sapien
gggtccatgtcttagtacgaaccat

SEQ ID NO: 4791127 - DNA, 25 bp, Homo sapien
cagggtccatgtcttagtacgaacc

SEQ ID NO: 4791128 - DNA, 25 bp, Homo sapien
agggtccatgtcttagtacgaacca

SEQ ID NO: 4791129 - DNA, 25 bp, Homo sapien
ccatcgggtgcgaattttctttggc

SEQ ID NO: 4791130 - DNA, 25 bp, Homo sapien
gattttgagctgaaacgctgcacca

SEQ ID NO: 4791131 - DNA, 25 bp, Homo sapien
accacttgcactcagccatcgggtg

SEQ ID NO: 4791132 - DNA, 25 bp, Homo sapien
tgaactctgccgaatcacttgggac

SEQ ID NO: 4791133 - DNA, 25 bp, Homo sapien
acaatccagttacgaaaccatttgg

SEQ ID NO: 4791134 - DNA, 25 bp, Homo sapien
ggtgcatccgctacaaacaatccag

SEQ ID NO: 4791135 - DNA, 25 bp, Homo sapien
ggagctgccagtgatctccccagct

SEQ ID NO: 4791136 - DNA, 25 bp, Homo sapien
ttcccgcgggtgcatccgctacaaa

SEQ ID NO: 4791137 - DNA, 25 bp, Homo sapien
aagctttcctattccctccggcgcg

SEQ ID NO: 4791138 - DNA, 25 bp, Homo sapien
gctttcctattccctccggcgcgcg

SEQ ID NO: 4791139 - DNA, 25 bp, Homo sapien
ccaagctttcctattccctccggcg

SEQ ID NO: 4791140 - DNA, 25 bp, Homo sapien
tgtaaccaagctttcctattccctc

SEQ ID NO: 4791141 - DNA, 25 bp, Homo sapien
gggtccgacttatgacaggtcccaa

SEQ ID NO: 4791142 - DNA, 25 bp, Homo sapien
gagcccgaaggttccactgcctggg

SEQ ID NO: 4791143 - DNA, 25 bp, Homo sapien
gaaggcggctgggactgcgcagccg

SEQ ID NO: 4791144 - DNA, 25 bp, Homo sapien
accagggtccgggaaatctgagtgc

SEQ ID NO: 4791145 - DNA, 25 bp, Homo sapien
acagctgcatcagtgtggtccttca

SEQ ID NO: 4791146 - DNA, 25 bp, Homo sapien
gggataaaatcatcgcaaagtggaa

SEQ ID NO: 4791147 - DNA, 25 bp, Homo sapien
aagtggaaggaaaccctcaaatctg

SEQ ID NO: 4791148 - DNA, 25 bp, Homo sapien
ttttttgatgaggtagctcctcggg

SEQ ID NO: 4791149 - DNA, 25 bp, Homo sapien
gagagtgtgccgagttaatcatgaa

SEQ ID NO: 4791150 - DNA, 25 bp, Homo sapien
tagtgattctagaacaataggcacc

SEQ ID NO: 4791151 - DNA, 25 bp, Homo sapien
gggtgccactatgccgcggatctat

SEQ ID NO: 4791152 - DNA, 25 bp, Homo sapien
gaatctcagtccatgtcaaagtcct

SEQ ID NO: 4791153 - DNA, 25 bp, Homo sapien
ccagttgcaaatgggtctcagtgca

SEQ ID NO: 4791154 - DNA, 25 bp, Homo sapien
gggcttccatgctgtcattgataca

SEQ ID NO: 4791155 - DNA, 25 bp, Homo sapien
ttggcacaggccagttgcaaatggg

SEQ ID NO: 4791156 - DNA, 25 bp, Homo sapien
ccatgctgtcattgatacagttctc

SEQ ID NO: 4791157 - DNA, 25 bp, Homo sapien
tgtttaacagtcgtctctaagttta

SEQ ID NO: 4791158 - DNA, 25 bp, Homo sapien
ttaacagtcgtctctaagtttaatg

SEQ ID NO: 4791159 - DNA, 25 bp, Homo sapien
tggtttgtttaacagtcgtctctaa

SEQ ID NO: 4791160 - DNA, 25 bp, Homo sapien
cctggtttgtttaacagtcgtctct

SEQ ID NO: 4791161 - DNA, 25 bp, Homo sapien
gagatggtgccttctggcatagtag

SEQ ID NO: 4791162 - DNA, 25 bp, Homo sapien
cataaaaatgttttcttcaaaggca

SEQ ID NO: 4791163 - DNA, 25 bp, Homo sapien
ataaaaatgttttcttcaaaggcat

SEQ ID NO: 4791164 - DNA, 25 bp, Homo sapien
gagctttgccactacctggttcaag

SEQ ID NO: 4791165 - DNA, 25 bp, Homo sapien
catctagcagctagaaggagctttt

SEQ ID NO: 4791166 - DNA, 25 bp, Homo sapien
caggaaggacatgaactgctttgcc

SEQ ID NO: 4791167 - DNA, 25 bp, Homo sapien
ttaaaaatagctagcaggacgcagg

SEQ ID NO: 4791168 - DNA, 25 bp, Homo sapien
cagcaacaatctgatttctctatct

SEQ ID NO: 4791169 - DNA, 25 bp, Homo sapien
tacagaacaaagtgaagtctcccat

SEQ ID NO: 4791170 - DNA, 25 bp, Homo sapien
acacagcaacaatctgatttctcta

SEQ ID NO: 4791171 - DNA, 25 bp, Homo sapien
agacacagcaacaatctgatttctc

SEQ ID NO: 4791172 - DNA, 25 bp, Homo sapien
gtttgtggtagcataaccccagcct

SEQ ID NO: 4791173 - DNA, 25 bp, Homo sapien
cattctccggtttgtggtagcataa

SEQ ID NO: 4791174 - DNA, 25 bp, Homo sapien
tccggtttgtggtagcataacccca

SEQ ID NO: 4791175 - DNA, 25 bp, Homo sapien
atccttggcattctccggtttgtgg

SEQ ID NO: 4791176 - DNA, 25 bp, Homo sapien
tctgaaatgtcaatccgaaggtgtc

SEQ ID NO: 4791177 - DNA, 25 bp, Homo sapien
gataaaatgaccctttgcaacttgg

SEQ ID NO: 4791178 - DNA, 25 bp, Homo sapien
caaagtcagtttagctgtcagctcc

SEQ ID NO: 4791179 - DNA, 25 bp, Homo sapien
ttttcccaggcagagtaatggttct

SEQ ID NO: 4791180 - DNA, 25 bp, Homo sapien
gctttaaaggcctacgtgcaaatct

SEQ ID NO: 4791181 - DNA, 25 bp, Homo sapien
gctaagttcatcttccgtttggaaa

SEQ ID NO: 4791182 - DNA, 25 bp, Homo sapien
acaggcagcgcctagaattgctaag

SEQ ID NO: 4791183 - DNA, 25 bp, Homo sapien
tcttgacgctgataacgggatgcga

SEQ ID NO: 4791184 - DNA, 25 bp, Homo sapien
tgttcagtgacacaccggaagcagc

SEQ ID NO: 4791185 - DNA, 25 bp, Homo sapien
cactgtggaaggtaaagcgctccgc

SEQ ID NO: 4791186 - DNA, 25 bp, Homo sapien
cgaaaaggatgcgtgtgccggacac

SEQ ID NO: 4791187 - DNA, 25 bp, Homo sapien
ctattgcagcaggtcaagtgatgat

SEQ ID NO: 4791188 - DNA, 25 bp, Homo sapien
ccagaacgcccactgtcttactgtg

SEQ ID NO: 4791189 - DNA, 25 bp, Homo sapien
aacacttgtactcttgactctgacg

SEQ ID NO: 4791190 - DNA, 25 bp, Homo sapien
tagctacaaatatcttggaacaggg

SEQ ID NO: 4791191 - DNA, 25 bp, Homo sapien
ttaggcagttaaagaccagtatgtc

SEQ ID NO: 4791192 - DNA, 25 bp, Homo sapien
tcttcttctgtcattcttcttctgg

SEQ ID NO: 4791193 - DNA, 25 bp, Homo sapien
actgtcttcttctgtcattcttctt

SEQ ID NO: 4791194 - DNA, 25 bp, Homo sapien
tgtcttcttctgtcattcttcttct

SEQ ID NO: 4791195 - DNA, 25 bp, Homo sapien
ttcttctgtcattcttcttctggaa

SEQ ID NO: 4791196 - DNA, 25 bp, Homo sapien
tccctgacttccttgacgtgatctt

SEQ ID NO: 4791197 - DNA, 25 bp, Homo sapien
cttccctgacttccttgacgtgatc

SEQ ID NO: 4791198 - DNA, 25 bp, Homo sapien
acttccttgacgtgatctttgtctg

SEQ ID NO: 4791199 - DNA, 25 bp, Homo sapien
cttccttgacgtgatctttgtctgt

SEQ ID NO: 4791200 - DNA, 25 bp, Homo sapien
tacataatagccagagtgaacgtca

SEQ ID NO: 4791201 - DNA, 25 bp, Homo sapien
tccatgacttaccattaaacttggg

SEQ ID NO: 4791202 - DNA, 25 bp, Homo sapien
taaacttgggagaaatctgaattcc

SEQ ID NO: 4791203 - DNA, 25 bp, Homo sapien
tggcctaacaagtcctggcaccagt

SEQ ID NO: 4791204 - DNA, 25 bp, Homo sapien
tgcatttaagccagaaacgaggtac

SEQ ID NO: 4791205 - DNA, 25 bp, Homo sapien
gagtctaccctcacgtccttgtagg

SEQ ID NO: 4791206 - DNA, 25 bp, Homo sapien
tccttgagtggtgaaaaatccgttg

SEQ ID NO: 4791207 - DNA, 25 bp, Homo sapien
tgcagtagaatgacctaacatgtcg

SEQ ID NO: 4791208 - DNA, 25 bp, Homo sapien
cacgctccggtccttccgcccgcgg

SEQ ID NO: 4791209 - DNA, 25 bp, Homo sapien
cgcccgcggggcgtgagaagaggag

SEQ ID NO: 4791210 - DNA, 25 bp, Homo sapien
gagaggatcaaggtgcgggccccgg

SEQ ID NO: 4791211 - DNA, 25 bp, Homo sapien
cgggcgccagcgggggactcggtgg

SEQ ID NO: 4791212 - DNA, 25 bp, Homo sapien
cccagccacagtcagcccagattca

SEQ ID NO: 4791213 - DNA, 25 bp, Homo sapien
gtgatctgcccccgcttgggctccc

SEQ ID NO: 4791214 - DNA, 25 bp, Homo sapien
ctgcgcccagccacagtcagcccag

SEQ ID NO: 4791215 - DNA, 25 bp, Homo sapien
tcgtgatctgcccccgcttgggctc

SEQ ID NO: 4791216 - DNA, 25 bp, Homo sapien
cactaattatgggagcagattctta

SEQ ID NO: 4791217 - DNA, 25 bp, Homo sapien
taggctgccccatcgtgtatataaa

SEQ ID NO: 4791218 - DNA, 25 bp, Homo sapien
tgtattcttacgtttctctgctttg

SEQ ID NO: 4791219 - DNA, 25 bp, Homo sapien
tgttatgatgtgcattaggctgccc

SEQ ID NO: 4791220 - DNA, 25 bp, Homo sapien
gaattacgctctatcatgtccacag

SEQ ID NO: 4791221 - DNA, 25 bp, Homo sapien
caagcatgcatgacggtgaaagtgt

SEQ ID NO: 4791222 - DNA, 25 bp, Homo sapien
tgtgtagtgggctacccaacctagg

SEQ ID NO: 4791223 - DNA, 25 bp, Homo sapien
gaaataatgtcaaccctgtgtacct

SEQ ID NO: 4791224 - DNA, 25 bp, Homo sapien
ggagggttaactgtgatgatcttca

SEQ ID NO: 4791225 - DNA, 25 bp, Homo sapien
tattttgcccgttcttctatcaggt

SEQ ID NO: 4791226 - DNA, 25 bp, Homo sapien
cttacaaagatgcaaaccatagggc

SEQ ID NO: 4791227 - DNA, 25 bp, Homo sapien
gactcaaagggtcagactgtgatgg

SEQ ID NO: 4791228 - DNA, 25 bp, Homo sapien
caaatctaaataattgcgctagtgg

SEQ ID NO: 4791229 - DNA, 25 bp, Homo sapien
gcgctagtggattagcatcaaaaac

SEQ ID NO: 4791230 - DNA, 25 bp, Homo sapien
tgcccatcaactctaccagggactt

SEQ ID NO: 4791231 - DNA, 25 bp, Homo sapien
cagggactttttcatatgctagacg

SEQ ID NO: 4791232 - DNA, 25 bp, Homo sapien
tcatcatctacctaaaaagtgtcaa

SEQ ID NO: 4791233 - DNA, 25 bp, Homo sapien
tatgttttcctcactattcaaacgg

SEQ ID NO: 4791234 - DNA, 25 bp, Homo sapien
catgcccggctgaagtataggtatg

SEQ ID NO: 4791235 - DNA, 25 bp, Homo sapien
tctgtacctaatggcccggtattaa

SEQ ID NO: 4791236 - DNA, 25 bp, Homo sapien
tattaatgacgacaggaccttggtt

SEQ ID NO: 4791237 - DNA, 25 bp, Homo sapien
ctctcgaaacaaggaaaggcctggt

SEQ ID NO: 4791238 - DNA, 25 bp, Homo sapien
ggacatatttcgtttcagggagagg

SEQ ID NO: 4791239 - DNA, 25 bp, Homo sapien
tcactgtaaagctgtgggagagcct

SEQ ID NO: 4791240 - DNA, 25 bp, Homo sapien
gatggtaattctctccagaaagtct

SEQ ID NO: 4791241 - DNA, 25 bp, Homo sapien
gaatcagaagcacgaaataaatcca

SEQ ID NO: 4791242 - DNA, 25 bp, Homo sapien
ggccttcagactcatctgatagaca

SEQ ID NO: 4791243 - DNA, 25 bp, Homo sapien
tgttaatgattccttgtctcctgag

SEQ ID NO: 4791244 - DNA, 25 bp, Homo sapien
gggacaactgacactctcttctgag

SEQ ID NO: 4791245 - DNA, 25 bp, Homo sapien
tagaaaggagttataagccggtctc

SEQ ID NO: 4791246 - DNA, 25 bp, Homo sapien
caatgaagaggagattgagtgccct

SEQ ID NO: 4791247 - DNA, 25 bp, Homo sapien
cctctagtgaaaagatagggtccga

SEQ ID NO: 4791248 - DNA, 25 bp, Homo sapien
aggtactaatctgattcctattttc

SEQ ID NO: 4791249 - DNA, 25 bp, Homo sapien
agaagacaaggtactaatctgattc

SEQ ID NO: 4791250 - DNA, 25 bp, Homo sapien
gacaaggtactaatctgattcctat

SEQ ID NO: 4791251 - DNA, 25 bp, Homo sapien
aagacaaggtactaatctgattcct

SEQ ID NO: 4791252 - DNA, 25 bp, Homo sapien
ctgaggtgacgaaatttgcggtgat

SEQ ID NO: 4791253 - DNA, 25 bp, Homo sapien
gaaccaatcttgaatagggaagtga

SEQ ID NO: 4791254 - DNA, 25 bp, Homo sapien
tgcggtgattttgttatggaagaag

SEQ ID NO: 4791255 - DNA, 25 bp, Homo sapien
ccaatcttgaatagggaagtgatgc

SEQ ID NO: 4791256 - DNA, 25 bp, Homo sapien
gctgagccaccaatgggttaataca

SEQ ID NO: 4791257 - DNA, 25 bp, Homo sapien
agccaccaatgggttaatacatgga

SEQ ID NO: 4791258 - DNA, 25 bp, Homo sapien
tgagccaccaatgggttaatacatg

SEQ ID NO: 4791259 - DNA, 25 bp, Homo sapien
ctgagccaccaatgggttaatacat

SEQ ID NO: 4791260 - DNA, 25 bp, Homo sapien
tcatgaggatctctctttgaggtca

SEQ ID NO: 4791261 - DNA, 25 bp, Homo sapien
cagcaatttgtcgaattatcaaggc

SEQ ID NO: 4791262 - DNA, 25 bp, Homo sapien
gaattatcaaggcagttgcttctac

SEQ ID NO: 4791263 - DNA, 25 bp, Homo sapien
cattaaactgtggtcagcaatttgt

SEQ ID NO: 4791264 - DNA, 25 bp, Homo sapien
acatccagttcttcagagtttagcc

SEQ ID NO: 4791265 - DNA, 25 bp, Homo sapien
aatcagtgctaggtgatgaagtgtc

SEQ ID NO: 4791266 - DNA, 25 bp, Homo sapien
gaagtgtcttttctgtaagcagata

SEQ ID NO: 4791267 - DNA, 25 bp, Homo sapien
gttcttcagagtttagcccaaatga

SEQ ID NO: 4791268 - DNA, 25 bp, Homo sapien
tctgtactgtaatgataatgccatc

SEQ ID NO: 4791269 - DNA, 25 bp, Homo sapien
gatattgtctgatgccttctcataa

SEQ ID NO: 4791270 - DNA, 25 bp, Homo sapien
atcagcctcataatgatattgtctg

SEQ ID NO: 4791271 - DNA, 25 bp, Homo sapien
tctttggtatataaaattatccaac

SEQ ID NO: 4791272 - DNA, 25 bp, Homo sapien
gatgcaagtcctttgtggactagga

SEQ ID NO: 4791273 - DNA, 25 bp, Homo sapien
cctttgtggatgcaagtcctttgtg

SEQ ID NO: 4791274 - DNA, 25 bp, Homo sapien
caagtcctttgtggactaggatctg

SEQ ID NO: 4791275 - DNA, 25 bp, Homo sapien
ctagtcctttgtggatgcaagtcct

SEQ ID NO: 4791276 - DNA, 25 bp, Homo sapien
ttgtcaccactacataacactctga

SEQ ID NO: 4791277 - DNA, 25 bp, Homo sapien
gcagtgtgttcatcaattgtcacca

SEQ ID NO: 4791278 - DNA, 25 bp, Homo sapien
aaagagtttcaatgactcactgcag

SEQ ID NO: 4791279 - DNA, 25 bp, Homo sapien
gcctctctctactagtgagatgtta

SEQ ID NO: 4791280 - DNA, 25 bp, Homo sapien
aaacctccaaatctatccagcaagg

SEQ ID NO: 4791281 - DNA, 25 bp, Homo sapien
tccaaatctatccagcaaggtgctt

SEQ ID NO: 4791282 - DNA, 25 bp, Homo sapien
tctggagtattaagaagtccttcag

SEQ ID NO: 4791283 - DNA, 25 bp, Homo sapien
gattctagcagctgaagtatgtctg

SEQ ID NO: 4791284 - DNA, 25 bp, Homo sapien
gaatcactttaaaggccatgtaagg

SEQ ID NO: 4791285 - DNA, 25 bp, Homo sapien
aacaagagtcttccacataattgta

SEQ ID NO: 4791286 - DNA, 25 bp, Homo sapien
aatctgctccaatatattgattatg

SEQ ID NO: 4791287 - DNA, 25 bp, Homo sapien
cataattgtattccaccacaaatga

SEQ ID NO: 4791288 - DNA, 25 bp, Homo sapien
agttaacttctaggaagattttgct

SEQ ID NO: 4791289 - DNA, 25 bp, Homo sapien
tcctgtgaaactggtacgtttgttc

SEQ ID NO: 4791290 - DNA, 25 bp, Homo sapien
tggtacgtttgttcctcacagatga

SEQ ID NO: 4791291 - DNA, 25 bp, Homo sapien
gaaactggtacgtttgttcctcaca

SEQ ID NO: 4791292 - DNA, 25 bp, Homo sapien
gaatgaaggacagtcagtgttaaac

SEQ ID NO: 4791293 - DNA, 25 bp, Homo sapien
tgaatgaaggacagtcagtgttaaa

SEQ ID NO: 4791294 - DNA, 25 bp, Homo sapien
tatatagagcatggaaattctaaat

SEQ ID NO: 4791295 - DNA, 25 bp, Homo sapien
tttctcttgcgtgtatatatagagc

SEQ ID NO: 4791296 - DNA, 25 bp, Homo sapien
tttttctaagtttagcatatcagaa

SEQ ID NO: 4791297 - DNA, 25 bp, Homo sapien
taaccaatatttctcttgcgtgtat

SEQ ID NO: 4791298 - DNA, 25 bp, Homo sapien
gtaacatcaaaggagaaggtgtccc

SEQ ID NO: 4791299 - DNA, 25 bp, Homo sapien
tctctgtggagcaggcatatttcct

SEQ ID NO: 4791300 - DNA, 25 bp, Homo sapien
cataatcctgaatgccaaaagagac

SEQ ID NO: 4791301 - DNA, 25 bp, Homo sapien
caaaagagacaggagtattcagcat

SEQ ID NO: 4791302 - DNA, 25 bp, Homo sapien
gtctgagtccattcttattataatc

SEQ ID NO: 4791303 - DNA, 25 bp, Homo sapien
agtccattcttattataatcagtac

SEQ ID NO: 4791304 - DNA, 25 bp, Homo sapien
tgagtccattcttattataatcagt

SEQ ID NO: 4791305 - DNA, 25 bp, Homo sapien
tctgagtccattcttattataatca

SEQ ID NO: 4791306 - DNA, 25 bp, Homo sapien
caattcttacttaaactgattattt

SEQ ID NO: 4791307 - DNA, 25 bp, Homo sapien
atccaattcttacttaaactgatta

SEQ ID NO: 4791308 - DNA, 25 bp, Homo sapien
ccaattcttacttaaactgattatt

SEQ ID NO: 4791309 - DNA, 25 bp, Homo sapien
tccaattcttacttaaactgattat

SEQ ID NO: 4791310 - DNA, 25 bp, Homo sapien
gactttgcatccaacttagtatctg

SEQ ID NO: 4791311 - DNA, 25 bp, Homo sapien
taaactgtacaatctccagctgtct

SEQ ID NO: 4791312 - DNA, 25 bp, Homo sapien
tgtagatatcttttgccttcgacaa

SEQ ID NO: 4791313 - DNA, 25 bp, Homo sapien
gacattgcaattcttgtatcttgta

SEQ ID NO: 4791314 - DNA, 25 bp, Homo sapien
tgtgtccaagctgcatgttaaaagg

SEQ ID NO: 4791315 - DNA, 25 bp, Homo sapien
aagagagcggcatgcttgaaagtca

SEQ ID NO: 4791316 - DNA, 25 bp, Homo sapien
aattgttaccagaagatgtaagaga

SEQ ID NO: 4791317 - DNA, 25 bp, Homo sapien
aaaggacatctctaattgttaccag

SEQ ID NO: 4791318 - DNA, 25 bp, Homo sapien
tggcgaacagcatcacttactactt

SEQ ID NO: 4791319 - DNA, 25 bp, Homo sapien
ataacagtggcaaatttccaattag

SEQ ID NO: 4791320 - DNA, 25 bp, Homo sapien
tttaagataggagaagctgctgctt

SEQ ID NO: 4791321 - DNA, 25 bp, Homo sapien
tagggagggtacacaaggatacaag

SEQ ID NO: 4791322 - DNA, 25 bp, Homo sapien
ctgacgcttgaatttcaatgacact

SEQ ID NO: 4791323 - DNA, 25 bp, Homo sapien
ttcctccagggttttattaatatga

SEQ ID NO: 4791324 - DNA, 25 bp, Homo sapien
gacactatctgttcccctttcctga

SEQ ID NO: 4791325 - DNA, 25 bp, Homo sapien
attaatatgaacaataggactttct

SEQ ID NO: 4791326 - DNA, 25 bp, Homo sapien
ggtacttcttttgccagagatggac

SEQ ID NO: 4791327 - DNA, 25 bp, Homo sapien
ggtcctgtgcagtcaagttcaaagt

SEQ ID NO: 4791328 - DNA, 25 bp, Homo sapien
tgctgctcctttatcagagaaatag

SEQ ID NO: 4791329 - DNA, 25 bp, Homo sapien
taataaagtcgctcaaaaggtccaa

SEQ ID NO: 4791330 - DNA, 25 bp, Homo sapien
caaaatgctggtttgcgtctaggcc

SEQ ID NO: 4791331 - DNA, 25 bp, Homo sapien
taggccaatgtgaacggaaactgct

SEQ ID NO: 4791332 - DNA, 25 bp, Homo sapien
cagagccagggcctatatggaatgc

SEQ ID NO: 4791333 - DNA, 25 bp, Homo sapien
aaagtcataaattctggcagagcca

SEQ ID NO: 4791334 - DNA, 25 bp, Homo sapien
acataactaatatttactgtgatgt

SEQ ID NO: 4791335 - DNA, 25 bp, Homo sapien
tacataactaatatttactgtgatg

SEQ ID NO: 4791336 - DNA, 25 bp, Homo sapien
ttttagtgtcattagaagacaaatt

SEQ ID NO: 4791337 - DNA, 25 bp, Homo sapien
tcattttcagatttagtcctgcttg

SEQ ID NO: 4791338 - DNA, 25 bp, Homo sapien
cactttcgtaggcaaaaatatctca

SEQ ID NO: 4791339 - DNA, 25 bp, Homo sapien
gaagacaaattatcatgacataaat

SEQ ID NO: 4791340 - DNA, 25 bp, Homo sapien
tcaaatgatccgcccgggtcggcct

SEQ ID NO: 4791341 - DNA, 25 bp, Homo sapien
agtggtgatctcagctcttgcaact

SEQ ID NO: 4791342 - DNA, 25 bp, Homo sapien
tgagccacggtgcccggccattttt

SEQ ID NO: 4791343 - DNA, 25 bp, Homo sapien
tccacctccctggttcgagcgattc

SEQ ID NO: 4791344 - DNA, 25 bp, Homo sapien
cacatcatgtagtattcattagctg

SEQ ID NO: 4791345 - DNA, 25 bp, Homo sapien
tcatgtagtattcattagctgattc

SEQ ID NO: 4791346 - DNA, 25 bp, Homo sapien
catcatgtagtattcattagctgat

SEQ ID NO: 4791347 - DNA, 25 bp, Homo sapien
acatcatgtagtattcattagctga

SEQ ID NO: 4791348 - DNA, 25 bp, Homo sapien
caaaccggagataatggaaatgtct

SEQ ID NO: 4791349 - DNA, 25 bp, Homo sapien
atgtctgaagttctgtacgtaatga

SEQ ID NO: 4791350 - DNA, 25 bp, Homo sapien
ttacaaaccggagataatggaaatg

SEQ ID NO: 4791351 - DNA, 25 bp, Homo sapien
ctgaagttctgtacgtaatgaattc

SEQ ID NO: 4791352 - DNA, 25 bp, Homo sapien
tagaggagttagtggcatttctaac

SEQ ID NO: 4791353 - DNA, 25 bp, Homo sapien
taggaatagaggagttagtggcatt

SEQ ID NO: 4791354 - DNA, 25 bp, Homo sapien
ggagttagtggcatttctaactctc

SEQ ID NO: 4791355 - DNA, 25 bp, Homo sapien
ttggcatgttaggaatagaggagtt

SEQ ID NO: 4791356 - DNA, 25 bp, Homo sapien
cctcaattccatgcttgttagtaag

SEQ ID NO: 4791357 - DNA, 25 bp, Homo sapien
gaatggtcaaaatctctgtggagct

SEQ ID NO: 4791358 - DNA, 25 bp, Homo sapien
ggagctgaattttatatccccgata

SEQ ID NO: 4791359 - DNA, 25 bp, Homo sapien
tgcactcttctggttcactctggct

SEQ ID NO: 4791360 - DNA, 25 bp, Homo sapien
ctaaatcctatagaatgacagtagc

SEQ ID NO: 4791361 - DNA, 25 bp, Homo sapien
gttccatacaaactgcttgcctgtt

SEQ ID NO: 4791362 - DNA, 25 bp, Homo sapien
gcttttgggctgagaacatcttatt

SEQ ID NO: 4791363 - DNA, 25 bp, Homo sapien
taaaaaaggctacgtctcagttctc

SEQ ID NO: 4791364 - DNA, 25 bp, Homo sapien
atggaatatcaatttctggtttgag

SEQ ID NO: 4791365 - DNA, 25 bp, Homo sapien
tccttttcatctacatagtttatta

SEQ ID NO: 4791366 - DNA, 25 bp, Homo sapien
agtgatggaatatcaatttctggtt

SEQ ID NO: 4791367 - DNA, 25 bp, Homo sapien
gatggaatatcaatttctggtttga

SEQ ID NO: 4791368 - DNA, 25 bp, Homo sapien
atattattgaaagccagtattacaa

SEQ ID NO: 4791369 - DNA, 25 bp, Homo sapien
ttactaaaatattattgaaagccag

SEQ ID NO: 4791370 - DNA, 25 bp, Homo sapien
tttactaaaatattattgaaagcca

SEQ ID NO: 4791371 - DNA, 25 bp, Homo sapien
aaaatattattgaaagccagtatta

SEQ ID NO: 4791372 - DNA, 25 bp, Homo sapien
ttaaacatattgtatcttctagttt

SEQ ID NO: 4791373 - DNA, 25 bp, Homo sapien
agtttctcttgacaaaagttcactt

SEQ ID NO: 4791374 - DNA, 25 bp, Homo sapien
aacatattgtatcttctagtttctc

SEQ ID NO: 4791375 - DNA, 25 bp, Homo sapien
taaacatattgtatcttctagtttc

SEQ ID NO: 4791376 - DNA, 25 bp, Homo sapien
aaaacagttttagtctactcaagag

SEQ ID NO: 4791377 - DNA, 25 bp, Homo sapien
tgaaatctaaaagaggatcctttac

SEQ ID NO: 4791378 - DNA, 25 bp, Homo sapien
ctcaagagagtaggcaaagttggta

SEQ ID NO: 4791379 - DNA, 25 bp, Homo sapien
gcttctgtgaagatctgtcctttga

SEQ ID NO: 4791380 - DNA, 25 bp, Homo sapien
tattcctttatcatcaataaataaa

SEQ ID NO: 4791381 - DNA, 25 bp, Homo sapien
aagtattcctttatcatcaataaat

SEQ ID NO: 4791382 - DNA, 25 bp, Homo sapien
aaaagtattcctttatcatcaataa

SEQ ID NO: 4791383 - DNA, 25 bp, Homo sapien
aaaaagtattcctttatcatcaata

SEQ ID NO: 4791384 - DNA, 25 bp, Homo sapien
taagcaaagaatctacttgaggagt

SEQ ID NO: 4791385 - DNA, 25 bp, Homo sapien
tgtattaagaaacactactgctaac

SEQ ID NO: 4791386 - DNA, 25 bp, Homo sapien
cttcaaaatagccaggcgtagccta

SEQ ID NO: 4791387 - DNA, 25 bp, Homo sapien
gatggtctacagtgcctacaaatga

SEQ ID NO: 4791388 - DNA, 25 bp, Homo sapien
catgtgggtgtataaactgacctcc

SEQ ID NO: 4791389 - DNA, 25 bp, Homo sapien
gacttcattgtagtccatgtgggtg

SEQ ID NO: 4791390 - DNA, 25 bp, Homo sapien
cctctacttcaatttgggagtctgg

SEQ ID NO: 4791391 - DNA, 25 bp, Homo sapien
tcacaattaatctgggtcaccattc

SEQ ID NO: 4791392 - DNA, 25 bp, Homo sapien
ggtatcagctgatccatagagtgca

SEQ ID NO: 4791393 - DNA, 25 bp, Homo sapien
caggcaaaaagtgggtcttttcagg

SEQ ID NO: 4791394 - DNA, 25 bp, Homo sapien
gagccagattaccagctaggtggta

SEQ ID NO: 4791395 - DNA, 25 bp, Homo sapien
atgttatcccgaggaacaatttgga

SEQ ID NO: 4791396 - DNA, 25 bp, Homo sapien
tcagttacaatttttgcgaaggcgg

SEQ ID NO: 4791397 - DNA, 25 bp, Homo sapien
gatggaatcagttaggtttgatctc

SEQ ID NO: 4791398 - DNA, 25 bp, Homo sapien
cttaaaggttcgaggcaggatggaa

SEQ ID NO: 4791399 - DNA, 25 bp, Homo sapien
acttcctactgttgctagtcctgag

SEQ ID NO: 4791400 - DNA, 25 bp, Homo sapien
aaacttgctttccattggtccaaga

SEQ ID NO: 4791401 - DNA, 25 bp, Homo sapien
tgtcattcccggaactgaaacagct

SEQ ID NO: 4791402 - DNA, 25 bp, Homo sapien
tggtccaagactgaggtatctgtca

SEQ ID NO: 4791403 - DNA, 25 bp, Homo sapien
ttctcaaggaaatcctccacaaaga

SEQ ID NO: 4791404 - DNA, 25 bp, Homo sapien
ttagtcaagctaatggtcaactcac

SEQ ID NO: 4791405 - DNA, 25 bp, Homo sapien
ggagcccaacacattggactactac

SEQ ID NO: 4791406 - DNA, 25 bp, Homo sapien
atcctcacataacttgagcttttaa

SEQ ID NO: 4791407 - DNA, 25 bp, Homo sapien
taatggtcaactcactatcctcaca

SEQ ID NO: 4791408 - DNA, 25 bp, Homo sapien
gaagggattcgaagcaataaagcat

SEQ ID NO: 4791409 - DNA, 25 bp, Homo sapien
tttattatcagtaactgctacatgg

SEQ ID NO: 4791410 - DNA, 25 bp, Homo sapien
gattcgaagcaataaagcatctctg

SEQ ID NO: 4791411 - DNA, 25 bp, Homo sapien
taaacatgaagggattcgaagcaat

SEQ ID NO: 4791412 - DNA, 25 bp, Homo sapien
ctcatataaatagtctattgcatga

SEQ ID NO: 4791413 - DNA, 25 bp, Homo sapien
tattgcatgatatttcaatgctgaa

SEQ ID NO: 4791414 - DNA, 25 bp, Homo sapien
atataaatagtctattgcatgatat

SEQ ID NO: 4791415 - DNA, 25 bp, Homo sapien
ctattgcatgatatttcaatgctga

SEQ ID NO: 4791416 - DNA, 25 bp, Homo sapien
ctttctttcaaagcagtgtaaattt

SEQ ID NO: 4791417 - DNA, 25 bp, Homo sapien
ttctttcaaagcagtgtaaatttca

SEQ ID NO: 4791418 - DNA, 25 bp, Homo sapien
cttctttctttcaaagcagtgtaaa

SEQ ID NO: 4791419 - DNA, 25 bp, Homo sapien
tctttcaaagcagtgtaaatttcaa

SEQ ID NO: 4791420 - DNA, 25 bp, Homo sapien
tcttgaaattgggtaaccaagggca

SEQ ID NO: 4791421 - DNA, 25 bp, Homo sapien
tcaagtggtcttgaaattgggtaac

SEQ ID NO: 4791422 - DNA, 25 bp, Homo sapien
ttgggtaaccaagggcagaactctg

SEQ ID NO: 4791423 - DNA, 25 bp, Homo sapien
tgaaattgggtaaccaagggcagaa

SEQ ID NO: 4791424 - DNA, 25 bp, Homo sapien
tactggactactggaccaaaatgga

SEQ ID NO: 4791425 - DNA, 25 bp, Homo sapien
acaaacatctactggactactggac

SEQ ID NO: 4791426 - DNA, 25 bp, Homo sapien
aatgcacacgataatgaggtcaggc

SEQ ID NO: 4791427 - DNA, 25 bp, Homo sapien
ggaccaaaatggaaatgcacacgat

SEQ ID NO: 4791428 - DNA, 25 bp, Homo sapien
ctgaggtaaaaatcgcctcctgcat

SEQ ID NO: 4791429 - DNA, 25 bp, Homo sapien
gggcacttccgtccgcgagtgggca

SEQ ID NO: 4791430 - DNA, 25 bp, Homo sapien
gcccgctggacacgtgaccactgag

SEQ ID NO: 4791431 - DNA, 25 bp, Homo sapien
aaaattcccgcccgctggacacgtg

SEQ ID NO: 4791432 - DNA, 25 bp, Homo sapien
ggcttggcattaaactccttcccag

SEQ ID NO: 4791433 - DNA, 25 bp, Homo sapien
tttactttactaacacatgggtgtc

SEQ ID NO: 4791434 - DNA, 25 bp, Homo sapien
gtcttttccatgaaacggcttggca

SEQ ID NO: 4791435 - DNA, 25 bp, Homo sapien
tacaggtgtgtgcagtttgcttcgg

SEQ ID NO: 4791436 - DNA, 25 bp, Homo sapien
tcgggtgcggccttcacctgccagg

SEQ ID NO: 4791437 - DNA, 25 bp, Homo sapien
tgctactcgggtgcggccttcacct

SEQ ID NO: 4791438 - DNA, 25 bp, Homo sapien
gttcctgctactcgggtgcggcctt

SEQ ID NO: 4791439 - DNA, 25 bp, Homo sapien
ctgttcctgctactcgggtgcggcc

SEQ ID NO: 4791440 - DNA, 25 bp, Homo sapien
tcttcaggctctatcacggtggtgg

SEQ ID NO: 4791441 - DNA, 25 bp, Homo sapien
agatgtcctccgctggatgcctaag

SEQ ID NO: 4791442 - DNA, 25 bp, Homo sapien
tcctcccctgagtaagggtcttcag

SEQ ID NO: 4791443 - DNA, 25 bp, Homo sapien
ggacaaggaatctgggttgccctca

SEQ ID NO: 4791444 - DNA, 25 bp, Homo sapien
ctcctccagaatttagttcgtaggt

SEQ ID NO: 4791445 - DNA, 25 bp, Homo sapien
tcctccagaatttagttcgtaggtg

SEQ ID NO: 4791446 - DNA, 25 bp, Homo sapien
ctccagaatttagttcgtaggtgtt

SEQ ID NO: 4791447 - DNA, 25 bp, Homo sapien
cagtgaagcctgtctatagcagggc

SEQ ID NO: 4791448 - DNA, 25 bp, Homo sapien
atgatggcacatttggcagtgaagc

SEQ ID NO: 4791449 - DNA, 25 bp, Homo sapien
tatgaacttcaagctgagtcctaag

SEQ ID NO: 4791450 - DNA, 25 bp, Homo sapien
gaaggagacggggaaacacatcagc

SEQ ID NO: 4791451 - DNA, 25 bp, Homo sapien
ccaaccccagaacatgggtatttat

SEQ ID NO: 4791452 - DNA, 25 bp, Homo sapien
catctgatacaaccacatagtcata

SEQ ID NO: 4791453 - DNA, 25 bp, Homo sapien
tggtcatcttctagaccaaccccag

SEQ ID NO: 4791454 - DNA, 25 bp, Homo sapien
gtatttatgaagctggatctttggg

SEQ ID NO: 4791455 - DNA, 25 bp, Homo sapien
acaaacatggctcttcaggtcccat

SEQ ID NO: 4791456 - DNA, 25 bp, Homo sapien
caatgaacaaacatggctcttcagg

SEQ ID NO: 4791457 - DNA, 25 bp, Homo sapien
atgaacaaacatggctcttcaggtc

SEQ ID NO: 4791458 - DNA, 25 bp, Homo sapien
gaacaaacatggctcttcaggtccc

SEQ ID NO: 4791459 - DNA, 25 bp, Homo sapien
ctatttctgatcccgaatgcccctg

SEQ ID NO: 4791460 - DNA, 25 bp, Homo sapien
atttctgatcccgaatgcccctggg

SEQ ID NO: 4791461 - DNA, 25 bp, Homo sapien
ctgatcccgaatgcccctgggacat

SEQ ID NO: 4791462 - DNA, 25 bp, Homo sapien
tttctgatcccgaatgcccctggga

SEQ ID NO: 4791463 - DNA, 25 bp, Homo sapien
gtccactaaagcattgtctgacaat

SEQ ID NO: 4791464 - DNA, 25 bp, Homo sapien
cgtccactaaagcattgtctgacaa

SEQ ID NO: 4791465 - DNA, 25 bp, Homo sapien
acgtccactaaagcattgtctgaca

SEQ ID NO: 4791466 - DNA, 25 bp, Homo sapien
cgcaaaatcaagttggcagcaagcc

SEQ ID NO: 4791467 - DNA, 25 bp, Homo sapien
caaaatcaagttggcagcaagccct

SEQ ID NO: 4791468 - DNA, 25 bp, Homo sapien
ggaagtcatggttatatcttttggc

SEQ ID NO: 4791469 - DNA, 25 bp, Homo sapien
tctgggaagtcatggttatatcttt

SEQ ID NO: 4791470 - DNA, 25 bp, Homo sapien
aaggaaagtgtggttgggagagctc

SEQ ID NO: 4791471 - DNA, 25 bp, Homo sapien
agaaggaaagtgtggttgggagagc

SEQ ID NO: 4791472 - DNA, 25 bp, Homo sapien
ggaaagtgtggttgggagagctcat

SEQ ID NO: 4791473 - DNA, 25 bp, Homo sapien
ctaggataagaaggaaagtgtggtt

SEQ ID NO: 4791474 - DNA, 25 bp, Homo sapien
taggaatagaccctaggtcactggc

SEQ ID NO: 4791475 - DNA, 25 bp, Homo sapien
tttctacccatttcagatctccagg

SEQ ID NO: 4791476 - DNA, 25 bp, Homo sapien
tatgcacatgatctgagatggattt

SEQ ID NO: 4791477 - DNA, 25 bp, Homo sapien
ggattctggctatgctaggaataga

SEQ ID NO: 4791478 - DNA, 25 bp, Homo sapien
agtattcaagtagcggatagagcca

SEQ ID NO: 4791479 - DNA, 25 bp, Homo sapien
tccagtggtagaccaatgcatacgt

SEQ ID NO: 4791480 - DNA, 25 bp, Homo sapien
cccatggtgacggtgagtgagaccc

SEQ ID NO: 4791481 - DNA, 25 bp, Homo sapien
gatagagccatagtgtgttgtccag

SEQ ID NO: 4791482 - DNA, 25 bp, Homo sapien
gagcaccatattcgttacaactgat

SEQ ID NO: 4791483 - DNA, 25 bp, Homo sapien
catggcaaccacagatctttatact

SEQ ID NO: 4791484 - DNA, 25 bp, Homo sapien
taacatcttgcaccagagcaccata

SEQ ID NO: 4791485 - DNA, 25 bp, Homo sapien
actgatggacctacattaacacacc

SEQ ID NO: 4791486 - DNA, 25 bp, Homo sapien
agccaggcacagggtcccgagctgc

SEQ ID NO: 4791487 - DNA, 25 bp, Homo sapien
ccgacaccgagggagcccggcccag

SEQ ID NO: 4791488 - DNA, 25 bp, Homo sapien
gaacagcagggccagacggagagag

SEQ ID NO: 4791489 - DNA, 25 bp, Homo sapien
ggccagacggagagagagcagcctc

SEQ ID NO: 4791490 - DNA, 25 bp, Homo sapien
gttgtccgtgttggcggccgcagcg

SEQ ID NO: 4791491 - DNA, 25 bp, Homo sapien
tcctcctgcgggagcgttgtccgtg

SEQ ID NO: 4791492 - DNA, 25 bp, Homo sapien
ggagcgttgtccgtgttggcggccg

SEQ ID NO: 4791493 - DNA, 25 bp, Homo sapien
gggccgggggatggcgctgctggac

SEQ ID NO: 4791494 - DNA, 25 bp, Homo sapien
tctacacgtgagtgagggaccgcag

SEQ ID NO: 4791495 - DNA, 25 bp, Homo sapien
ccttggagggaatggccgtcttcgg

SEQ ID NO: 4791496 - DNA, 25 bp, Homo sapien
acaggcgagaatgggaaacgtttgc

SEQ ID NO: 4791497 - DNA, 25 bp, Homo sapien
cgtcttcgggttcgtcctcttcttg

SEQ ID NO: 4791498 - DNA, 25 bp, Homo sapien
tctttgcgagggaaaagtgttgggc

SEQ ID NO: 4791499 - DNA, 25 bp, Homo sapien
gggtggagaaagctgatcgtcaggc

SEQ ID NO: 4791500 - DNA, 25 bp, Homo sapien
aaagctgatcgtcaggctgttcccc

SEQ ID NO: 4791501 - DNA, 25 bp, Homo sapien
tggcggtggtctttgcgagggaaaa

SEQ ID NO: 4791502 - DNA, 25 bp, Homo sapien
tctgttagggtggtgattgtgtcca

SEQ ID NO: 4791503 - DNA, 25 bp, Homo sapien
tgtccaccctgaaaaatgtccacca

SEQ ID NO: 4791504 - DNA, 25 bp, Homo sapien
gaagggctctatgcgcttagatagg

SEQ ID NO: 4791505 - DNA, 25 bp, Homo sapien
gataggtgtgaagcacctgtccacc

SEQ ID NO: 4791506 - DNA, 25 bp, Homo sapien
ctttgagtcctgtcagcttgtacat

SEQ ID NO: 4791507 - DNA, 25 bp, Homo sapien
gatagctttgagtcctgtcagcttg

SEQ ID NO: 4791508 - DNA, 25 bp, Homo sapien
gctttgagtcctgtcagcttgtaca

SEQ ID NO: 4791509 - DNA, 25 bp, Homo sapien
tagctttgagtcctgtcagcttgta

SEQ ID NO: 4791510 - DNA, 25 bp, Homo sapien
gacaaacagccttatagcaagctcc

SEQ ID NO: 4791511 - DNA, 25 bp, Homo sapien
gaaggcaactgacaaacagccttat

SEQ ID NO: 4791512 - DNA, 25 bp, Homo sapien
ggcaactgacaaacagccttatagc

SEQ ID NO: 4791513 - DNA, 25 bp, Homo sapien
acaagaaggcaactgacaaacagcc

SEQ ID NO: 4791514 - DNA, 25 bp, Homo sapien
tgtatcttactgactataattggag

SEQ ID NO: 4791515 - DNA, 25 bp, Homo sapien
ctgactataattggagtgaatgata

SEQ ID NO: 4791516 - DNA, 25 bp, Homo sapien
agcctacaggcttatttgaaagact

SEQ ID NO: 4791517 - DNA, 25 bp, Homo sapien
acttgtagaggtgtgtttgccatta

SEQ ID NO: 4791518 - DNA, 25 bp, Homo sapien
attacctgagaaacttatgttttca

SEQ ID NO: 4791519 - DNA, 25 bp, Homo sapien
tttgtgagccaatttcagaatgctt

SEQ ID NO: 4791520 - DNA, 25 bp, Homo sapien
ctttgttgccagtttaattattgga

SEQ ID NO: 4791521 - DNA, 25 bp, Homo sapien
cccaccatgtgttcagatgggatat

SEQ ID NO: 4791522 - DNA, 25 bp, Homo sapien
tgcttcctgctacaataatttgtga

SEQ ID NO: 4791523 - DNA, 25 bp, Homo sapien
tatgggacccaactataagctggag

SEQ ID NO: 4791524 - DNA, 25 bp, Homo sapien
catccgcgaatccatgacaatatac

SEQ ID NO: 4791525 - DNA, 25 bp, Homo sapien
gaactggtcgctacagattacgctg

SEQ ID NO: 4791526 - DNA, 25 bp, Homo sapien
aaaacttgattatgcagtcgcctgg

SEQ ID NO: 4791527 - DNA, 25 bp, Homo sapien
gaacatttacgggtggcagcagctt

SEQ ID NO: 4791528 - DNA, 25 bp, Homo sapien
cagcagctttgctttagagtttaga

SEQ ID NO: 4791529 - DNA, 25 bp, Homo sapien
tgaacaacacatggcgaggtactaa

SEQ ID NO: 4791530 - DNA, 25 bp, Homo sapien
gaatgactattcatgtccaaagtga

SEQ ID NO: 4791531 - DNA, 25 bp, Homo sapien
gaatgcctactgcagggctaacact

SEQ ID NO: 4791532 - DNA, 25 bp, Homo sapien
gccgctaaacttgctcgccaggttg

SEQ ID NO: 4791533 - DNA, 25 bp, Homo sapien
caaaatagactagatcagcgctggt

SEQ ID NO: 4791534 - DNA, 25 bp, Homo sapien
ggctaacactggcaatatggcagct

SEQ ID NO: 4791535 - DNA, 25 bp, Homo sapien
tattccctgaggaaagttgcacagt

SEQ ID NO: 4791536 - DNA, 25 bp, Homo sapien
caaaaccaaaatggctggacagact

SEQ ID NO: 4791537 - DNA, 25 bp, Homo sapien
gaacaaaggcttggatgcatattcc

SEQ ID NO: 4791538 - DNA, 25 bp, Homo sapien
gatgccatcctttgcactgccgaag

SEQ ID NO: 4791539 - DNA, 25 bp, Homo sapien
gcttctttatgaacgatttttcttg

SEQ ID NO: 4791540 - DNA, 25 bp, Homo sapien
tcagacgttgatagatgaagtgtct

SEQ ID NO: 4791541 - DNA, 25 bp, Homo sapien
aagtgtctgcgtgggagtaatacag

SEQ ID NO: 4791542 - DNA, 25 bp, Homo sapien
gcgtgggagtaatacagcttcttta

SEQ ID NO: 4791543 - DNA, 25 bp, Homo sapien
gtggaaccagagcttccttgctccc

SEQ ID NO: 4791544 - DNA, 25 bp, Homo sapien
ggaaccagagcttccttgctcccat

SEQ ID NO: 4791545 - DNA, 25 bp, Homo sapien
tggaaccagagcttccttgctccca

SEQ ID NO: 4791546 - DNA, 25 bp, Homo sapien
tctccatattgttcaattcaccttc

SEQ ID NO: 4791547 - DNA, 25 bp, Homo sapien
ctccatattgttcaattcaccttcc

SEQ ID NO: 4791548 - DNA, 25 bp, Homo sapien
tattcccgcattcatccccttaggg

SEQ ID NO: 4791549 - DNA, 25 bp, Homo sapien
taggaacaaaactcttcacgcaagt

SEQ ID NO: 4791550 - DNA, 25 bp, Homo sapien
gaggtggcaggtgcaatttgcattt

SEQ ID NO: 4791551 - DNA, 25 bp, Homo sapien
tgttaagagattcgatattcccgca

SEQ ID NO: 4791552 - DNA, 25 bp, Homo sapien
ggcctctttctgaccttggcagaca

SEQ ID NO: 4791553 - DNA, 25 bp, Homo sapien
gatgtagatgctaagaagagcttgg

SEQ ID NO: 4791554 - DNA, 25 bp, Homo sapien
tcatctttatatccactgtaggatg

SEQ ID NO: 4791555 - DNA, 25 bp, Homo sapien
tatatccactgtaggatgtagatgc

SEQ ID NO: 4791556 - DNA, 25 bp, Homo sapien
cactgtaggatgtagatgctaagaa

SEQ ID NO: 4791557 - DNA, 25 bp, Homo sapien
tgccagtcaggtcatgggggttaaa

SEQ ID NO: 4791558 - DNA, 25 bp, Homo sapien
ttggtccagctccttgcagtctgcc

SEQ ID NO: 4791559 - DNA, 25 bp, Homo sapien
ctcttggtccagctccttgcagtct

SEQ ID NO: 4791560 - DNA, 25 bp, Homo sapien
gtctgccatgccagtcaggtcatgg

SEQ ID NO: 4791561 - DNA, 25 bp, Homo sapien
taggtcaactcttcagatgtggcaa

SEQ ID NO: 4791562 - DNA, 25 bp, Homo sapien
ttacaacaaggccataggtcaactc

SEQ ID NO: 4791563 - DNA, 25 bp, Homo sapien
aacaaggccataggtcaactcttca

SEQ ID NO: 4791564 - DNA, 25 bp, Homo sapien
ggccataggtcaactcttcagatgt

SEQ ID NO: 4791565 - DNA, 25 bp, Homo sapien
tcatcttatacaggagtcacggtaa

SEQ ID NO: 4791566 - DNA, 25 bp, Homo sapien
tttgcatgtcatcttatacaggagt

SEQ ID NO: 4791567 - DNA, 25 bp, Homo sapien
tatacaggagtcacggtaattttct

SEQ ID NO: 4791568 - DNA, 25 bp, Homo sapien
ggagtcacggtaattttctctgtat

SEQ ID NO: 4791569 - DNA, 25 bp, Homo sapien
tactgctacccacccgaagatggga

SEQ ID NO: 4791570 - DNA, 25 bp, Homo sapien
gatacccagaaaggtttggcctctc

SEQ ID NO: 4791571 - DNA, 25 bp, Homo sapien
cacaagatgtcaccaggaatgctct

SEQ ID NO: 4791572 - DNA, 25 bp, Homo sapien
cagtaaacagagcaaggatatgtgc

SEQ ID NO: 4791573 - DNA, 25 bp, Homo sapien
ctagaagttttgttcatccgcgaga

SEQ ID NO: 4791574 - DNA, 25 bp, Homo sapien
tgttcatccgcgagacagaaaaacg

SEQ ID NO: 4791575 - DNA, 25 bp, Homo sapien
catccgcgagacagaaaaacgtcaa

SEQ ID NO: 4791576 - DNA, 25 bp, Homo sapien
aaaacgtcaaggttccagacaggct

SEQ ID NO: 4791577 - DNA, 25 bp, Homo sapien
tgaatgcgctcgcatccacaagcag

SEQ ID NO: 4791578 - DNA, 25 bp, Homo sapien
taaatacttagttcagatcccagct

SEQ ID NO: 4791579 - DNA, 25 bp, Homo sapien
tcctggccagttctggttgatggac

SEQ ID NO: 4791580 - DNA, 25 bp, Homo sapien
gttgatggactcacgtaggctcaca

SEQ ID NO: 4791581 - DNA, 25 bp, Homo sapien
tgggcttatcctgacccaacctggc

SEQ ID NO: 4791582 - DNA, 25 bp, Homo sapien
cacactgcgaagagccattctgttg

SEQ ID NO: 4791583 - DNA, 25 bp, Homo sapien
cattctgttgtaagaagtgtgctct

SEQ ID NO: 4791584 - DNA, 25 bp, Homo sapien
aacctggccttacacatcagagcca

SEQ ID NO: 4791585 - DNA, 25 bp, Homo sapien
gtagcctcttctcacgccagaacga

SEQ ID NO: 4791586 - DNA, 25 bp, Homo sapien
agggagactcttggcggagactctt

SEQ ID NO: 4791587 - DNA, 25 bp, Homo sapien
gactcttggcagagactgcgatgga

SEQ ID NO: 4791588 - DNA, 25 bp, Homo sapien
gcagagactgcgatggagaagaaaa

SEQ ID NO: 4791589 - DNA, 25 bp, Homo sapien
tgggtggcagataccagtgtactcc

SEQ ID NO: 4791590 - DNA, 25 bp, Homo sapien
gggctccgagtgtgcatcagcttgc

SEQ ID NO: 4791591 - DNA, 25 bp, Homo sapien
aaagtcacattatcagccatggcac

SEQ ID NO: 4791592 - DNA, 25 bp, Homo sapien
ctccgagtgtgcatcagcttgcagc

SEQ ID NO: 4791593 - DNA, 25 bp, Homo sapien
ttatgccgaaaaatcttaggtggac

SEQ ID NO: 4791594 - DNA, 25 bp, Homo sapien
tctgaaagtaagtttatgccgaaaa

SEQ ID NO: 4791595 - DNA, 25 bp, Homo sapien
aggaaaaccagtcataatatctgaa

SEQ ID NO: 4791596 - DNA, 25 bp, Homo sapien
agaatccagggaagattcagagggt

SEQ ID NO: 4791597 - DNA, 25 bp, Homo sapien
ctgcaagtcgaaaaagcaggtcaag

SEQ ID NO: 4791598 - DNA, 25 bp, Homo sapien
gcaagtcgaaaaagcaggtcaagac

SEQ ID NO: 4791599 - DNA, 25 bp, Homo sapien
aagtcgaaaaagcaggtcaagacta

SEQ ID NO: 4791600 - DNA, 25 bp, Homo sapien
tgcaagtcgaaaaagcaggtcaaga

SEQ ID NO: 4791601 - DNA, 25 bp, Homo sapien
ccttatctacgaggtttccaccaag

SEQ ID NO: 4791602 - DNA, 25 bp, Homo sapien
tgctggccaagcttatagagtgaag

SEQ ID NO: 4791603 - DNA, 25 bp, Homo sapien
gtttccaccaagttgcctgctggcc

SEQ ID NO: 4791604 - DNA, 25 bp, Homo sapien
ttggacatccctgttgttcccctgg

SEQ ID NO: 4791605 - DNA, 25 bp, Homo sapien
ggctcaacatgcagtcatggctccc

SEQ ID NO: 4791606 - DNA, 25 bp, Homo sapien
cttcctgagattctatggagggtgg

SEQ ID NO: 4791607 - DNA, 25 bp, Homo sapien
ggctcccggacaccctgtcatcttc

SEQ ID NO: 4791608 - DNA, 25 bp, Homo sapien
gtcatcttcctgagattctatggag

SEQ ID NO: 4791609 - DNA, 25 bp, Homo sapien
tgtatctgtgcattcatcaaccttt

SEQ ID NO: 4791610 - DNA, 25 bp, Homo sapien
cctgtatctgtgcattcatcaacct

SEQ ID NO: 4791611 - DNA, 25 bp, Homo sapien
ttcatcaacctttgacaataaggtc

SEQ ID NO: 4791612 - DNA, 25 bp, Homo sapien
catcaacctttgacaataaggtcat

SEQ ID NO: 4791613 - DNA, 25 bp, Homo sapien
tatctggaggcaaagtctacttcac

SEQ ID NO: 4791614 - DNA, 25 bp, Homo sapien
tgtggtgttgcaagacattctgccc

SEQ ID NO: 4791615 - DNA, 25 bp, Homo sapien
cattattgattactaaggaatgtgg

SEQ ID NO: 4791616 - DNA, 25 bp, Homo sapien
gatcacagggagcattgaacaatcc

SEQ ID NO: 4791617 - DNA, 25 bp, Homo sapien
gaaagtctttctgagcacatcatga

SEQ ID NO: 4791618 - DNA, 25 bp, Homo sapien
ttaaatgcatgatacaaaggtggca

SEQ ID NO: 4791619 - DNA, 25 bp, Homo sapien
cggctaaaattgcatgagagctagg

SEQ ID NO: 4791620 - DNA, 25 bp, Homo sapien
gatcagtaacctggactaagtaaca

SEQ ID NO: 4791621 - DNA, 25 bp, Homo sapien
cctgcctgcacggtatgatctgtac

SEQ ID NO: 4791622 - DNA, 25 bp, Homo sapien
tattgtagggtcatacctgcctgca

SEQ ID NO: 4791623 - DNA, 25 bp, Homo sapien
gatccagaaagatgccagtgaacgt

SEQ ID NO: 4791624 - DNA, 25 bp, Homo sapien
cagtgcatagagtcccgtggctgcc

SEQ ID NO: 4791625 - DNA, 25 bp, Homo sapien
tgaggttctgccgttagcttgtcca

SEQ ID NO: 4791626 - DNA, 25 bp, Homo sapien
tatctgaagtcagatccttctgagg

SEQ ID NO: 4791627 - DNA, 25 bp, Homo sapien
tgtcaatggtatcgggaaattcccc

SEQ ID NO: 4791628 - DNA, 25 bp, Homo sapien
aatgaagccagggtacgctgcgtgc

SEQ ID NO: 4791629 - DNA, 25 bp, Homo sapien
caacagtcacttgtgtgggctcagt

SEQ ID NO: 4791630 - DNA, 25 bp, Homo sapien
gacaacggtgctgtggctactccag

SEQ ID NO: 4791631 - DNA, 25 bp, Homo sapien
cttatgagtcattgcattgaaggcc

SEQ ID NO: 4791632 - DNA, 25 bp, Homo sapien
tactccaggtatgctgcaatccctc

SEQ ID NO: 4791633 - DNA, 25 bp, Homo sapien
tgccattttgatagtgaaaattttg

SEQ ID NO: 4791634 - DNA, 25 bp, Homo sapien
tactccagtgttctcatgttcctca

SEQ ID NO: 4791635 - DNA, 25 bp, Homo sapien
atgcccacccagctttctactccag

SEQ ID NO: 4791636 - DNA, 25 bp, Homo sapien
cacccagctttctactccagtgttc

SEQ ID NO: 4791637 - DNA, 25 bp, Homo sapien
cactgagatcagaggacattggagc

SEQ ID NO: 4791638 - DNA, 25 bp, Homo sapien
ggttctataaccacccttgcaatgg

SEQ ID NO: 4791639 - DNA, 25 bp, Homo sapien
gatgggtgaccaagctagcgatcat

SEQ ID NO: 4791640 - DNA, 25 bp, Homo sapien
aaattaagcctgtggtgattcagca

SEQ ID NO: 4791641 - DNA, 25 bp, Homo sapien
ggaaattagtgaggccccaggattg

SEQ ID NO: 4791642 - DNA, 25 bp, Homo sapien
taaacatggttagctctcccaggca

SEQ ID NO: 4791643 - DNA, 25 bp, Homo sapien
tgcaacagcaaactacaggtggtac

SEQ ID NO: 4791644 - DNA, 25 bp, Homo sapien
ggcaacctagttgcaggcagggact

SEQ ID NO: 4791645 - DNA, 25 bp, Homo sapien
ggaacgtggctaacaccagagacga

SEQ ID NO: 4791646 - DNA, 25 bp, Homo sapien
gaatgcagatcacaggaagccaagt

SEQ ID NO: 4791647 - DNA, 25 bp, Homo sapien
cattgacattctctagccaggacct

SEQ ID NO: 4791648 - DNA, 25 bp, Homo sapien
catctctacagaagcctacaagggt

SEQ ID NO: 4791649 - DNA, 25 bp, Homo sapien
ggagctcatctgttgcacaccaatt

SEQ ID NO: 4791650 - DNA, 25 bp, Homo sapien
gggtactggagctcatctgttgcac

SEQ ID NO: 4791651 - DNA, 25 bp, Homo sapien
gcaaaacccatgcaaactatcaggg

SEQ ID NO: 4791652 - DNA, 25 bp, Homo sapien
gtgttcatctccgtgacatcccaag

SEQ ID NO: 4791653 - DNA, 25 bp, Homo sapien
aacaacccaagttccctctgatcct

SEQ ID NO: 4791654 - DNA, 25 bp, Homo sapien
ctctgatccttggaactgagtcccc

SEQ ID NO: 4791655 - DNA, 25 bp, Homo sapien
caaaacaacccaagttccctctgat

SEQ ID NO: 4791656 - DNA, 25 bp, Homo sapien
ccctctgatccttggaactgagtcc

SEQ ID NO: 4791657 - DNA, 25 bp, Homo sapien
cagtgacggcaggaaaaccctctgt

SEQ ID NO: 4791658 - DNA, 25 bp, Homo sapien
ttccaccagtcagaggacaaaggct

SEQ ID NO: 4791659 - DNA, 25 bp, Homo sapien
tcttggcagctttgacaccacgtgg

SEQ ID NO: 4791660 - DNA, 25 bp, Homo sapien
cacagggcctcgtatctgattccaa

SEQ ID NO: 4791661 - DNA, 25 bp, Homo sapien
tacttccaggaatgtggcctaagtg

SEQ ID NO: 4791662 - DNA, 25 bp, Homo sapien
taggccaagtactgagaaaaagaca

SEQ ID NO: 4791663 - DNA, 25 bp, Homo sapien
aacaatacaacagcactcagtggcg

SEQ ID NO: 4791664 - DNA, 25 bp, Homo sapien
taaagattgtgtgtcgccatgttgc

SEQ ID NO: 4791665 - DNA, 25 bp, Homo sapien
aaggccacatccttcctccccagaa

SEQ ID NO: 4791666 - DNA, 25 bp, Homo sapien
gcaggcactgctttgttggttcagt

SEQ ID NO: 4791667 - DNA, 25 bp, Homo sapien
agaagcaggcactgctttgttggtt

SEQ ID NO: 4791668 - DNA, 25 bp, Homo sapien
aaaggccacatccttcctccccaga

SEQ ID NO: 4791669 - DNA, 25 bp, Homo sapien
ctttccttttgctaaggactgcatt

SEQ ID NO: 4791670 - DNA, 25 bp, Homo sapien
cttgaggctgtgcagtatcacctcc

SEQ ID NO: 4791671 - DNA, 25 bp, Homo sapien
tgcatcttgaggctgtgcagtatca

SEQ ID NO: 4791672 - DNA, 25 bp, Homo sapien
taaggactgcattcgtctatgctgc

SEQ ID NO: 4791673 - DNA, 25 bp, Homo sapien
cacagtgtacatcaggagtctcaag

SEQ ID NO: 4791674 - DNA, 25 bp, Homo sapien
cagaggaagtcccagccaagattca

SEQ ID NO: 4791675 - DNA, 25 bp, Homo sapien
cagatctgtatgtagccttcggtca

SEQ ID NO: 4791676 - DNA, 25 bp, Homo sapien
gcaggaaacttattggcatggccag

SEQ ID NO: 4791677 - DNA, 25 bp, Homo sapien
tggacggaagtcacacggagcctct

SEQ ID NO: 4791678 - DNA, 25 bp, Homo sapien
ccacatgctccctggacggaagtca

SEQ ID NO: 4791679 - DNA, 25 bp, Homo sapien
ctcctcagggatagccaccatctta

SEQ ID NO: 4791680 - DNA, 25 bp, Homo sapien
ccaccatcttaaatccaggaatggg

SEQ ID NO: 4791681 - DNA, 25 bp, Homo sapien
gctctgctgagccaaggacaacctc

SEQ ID NO: 4791682 - DNA, 25 bp, Homo sapien
gagtgtgctctgctgagccaaggac

SEQ ID NO: 4791683 - DNA, 25 bp, Homo sapien
tgtgctctgctgagccaaggacaac

SEQ ID NO: 4791684 - DNA, 25 bp, Homo sapien
tctgctgagccaaggacaacctcca

SEQ ID NO: 4791685 - DNA, 25 bp, Homo sapien
atccccagctgttcttcgtgactct

SEQ ID NO: 4791686 - DNA, 25 bp, Homo sapien
ccccagctgttcttcgtgactctga

SEQ ID NO: 4791687 - DNA, 25 bp, Homo sapien
ccagctgttcttcgtgactctgacc

SEQ ID NO: 4791688 - DNA, 25 bp, Homo sapien
cccagctgttcttcgtgactctgac

SEQ ID NO: 4791689 - DNA, 25 bp, Homo sapien
gctgagaaggagaggaatgtgagaa

SEQ ID NO: 4791690 - DNA, 25 bp, Homo sapien
acaccgctgagaaggagaggaatgt

SEQ ID NO: 4791691 - DNA, 25 bp, Homo sapien
cacaccgctgagaaggagaggaatg

SEQ ID NO: 4791692 - DNA, 25 bp, Homo sapien
gagaaggagaggaatgtgagaatga

SEQ ID NO: 4791693 - DNA, 25 bp, Homo sapien
gaacccagtccaacacccgccatct

SEQ ID NO: 4791694 - DNA, 25 bp, Homo sapien
cccagtccaacacccgccatctgca

SEQ ID NO: 4791695 - DNA, 25 bp, Homo sapien
aacccagtccaacacccgccatctg

SEQ ID NO: 4791696 - DNA, 25 bp, Homo sapien
ggaacccagtccaacacccgccatc

SEQ ID NO: 4791697 - DNA, 25 bp, Homo sapien
tgtgctcaatccattttaacccaga

SEQ ID NO: 4791698 - DNA, 25 bp, Homo sapien
tgtgggacaaaaccacaggcttagc

SEQ ID NO: 4791699 - DNA, 25 bp, Homo sapien
gcttagcccagagtgcacggcatca

SEQ ID NO: 4791700 - DNA, 25 bp, Homo sapien
gagcttggccccatttaacaaagaa

SEQ ID NO: 4791701 - DNA, 25 bp, Homo sapien
cctgagttggccctgtggatatgca

SEQ ID NO: 4791702 - DNA, 25 bp, Homo sapien
ctgagttggccctgtggatatgcag

SEQ ID NO: 4791703 - DNA, 25 bp, Homo sapien
tgagttggccctgtggatatgcagc

SEQ ID NO: 4791704 - DNA, 25 bp, Homo sapien
tggactgaacttctttctggaggct

SEQ ID NO: 4791705 - DNA, 25 bp, Homo sapien
caggttattggctacattcagttcc

SEQ ID NO: 4791706 - DNA, 25 bp, Homo sapien
aaatgtaccatcaaggcagaaggtg

SEQ ID NO: 4791707 - DNA, 25 bp, Homo sapien
tagggccttacgaggctagaatcaa

SEQ ID NO: 4791708 - DNA, 25 bp, Homo sapien
gaagactcaggcaagtaagcccagg

SEQ ID NO: 4791709 - DNA, 25 bp, Homo sapien
catcttccatcaaaccgactgctgg

SEQ ID NO: 4791710 - DNA, 25 bp, Homo sapien
ggcgactgagaactggccaagttaa

SEQ ID NO: 4791711 - DNA, 25 bp, Homo sapien
aaatactatttcaaagacacttggc

SEQ ID NO: 4791712 - DNA, 25 bp, Homo sapien
atgccagttgattgttttatgctgc

SEQ ID NO: 4791713 - DNA, 25 bp, Homo sapien
catgccagttgattgttttatgctg

SEQ ID NO: 4791714 - DNA, 25 bp, Homo sapien
agacccaaactgaccacccaagtga

SEQ ID NO: 4791715 - DNA, 25 bp, Homo sapien
aatgttcccactgcatctctaagga

SEQ ID NO: 4791716 - DNA, 25 bp, Homo sapien
aatggacaaggggtcccatcaggca

SEQ ID NO: 4791717 - DNA, 25 bp, Homo sapien
tacagcgctcagcagaaatgttccc

SEQ ID NO: 4791718 - DNA, 25 bp, Homo sapien
ttttttcagctatgaagctctttgc

SEQ ID NO: 4791719 - DNA, 25 bp, Homo sapien
tcaccagtgacaattatataaacag

SEQ ID NO: 4791720 - DNA, 25 bp, Homo sapien
tatgaattgggttctggtcaccagt

SEQ ID NO: 4791721 - DNA, 25 bp, Homo sapien
gggtagctctttgtataattccata

SEQ ID NO: 4791722 - DNA, 25 bp, Homo sapien
gcccaaactgcacaggagtgtcttc

SEQ ID NO: 4791723 - DNA, 25 bp, Homo sapien
acctgagcccaaactgcacaggagt

SEQ ID NO: 4791724 - DNA, 25 bp, Homo sapien
caaactgcacaggagtgtcttctca

SEQ ID NO: 4791725 - DNA, 25 bp, Homo sapien
tcacctgagcccaaactgcacagga

SEQ ID NO: 4791726 - DNA, 25 bp, Homo sapien
gaaaaaatagacagactgatcatca

SEQ ID NO: 4791727 - DNA, 25 bp, Homo sapien
ttttatgcatctaaggacactatgt

SEQ ID NO: 4791728 - DNA, 25 bp, Homo sapien
tatgtatagtaaaagtgcaacccac

SEQ ID NO: 4791729 - DNA, 25 bp, Homo sapien
aagcttcctgaaaccggatttctca

SEQ ID NO: 4791730 - DNA, 25 bp, Homo sapien
catagctgcggaagggatgtaagca

SEQ ID NO: 4791731 - DNA, 25 bp, Homo sapien
caagcttagggttctcctaggtcaa

SEQ ID NO: 4791732 - DNA, 25 bp, Homo sapien
gaatattgagttccacgtctcagga

SEQ ID NO: 4791733 - DNA, 25 bp, Homo sapien
gaaagtgggacctatgccatagctg

SEQ ID NO: 4791734 - DNA, 25 bp, Homo sapien
aacttagacttcagcagtgcaatag

SEQ ID NO: 4791735 - DNA, 25 bp, Homo sapien
gtgcaatagaatgagggcatctgta

SEQ ID NO: 4791736 - DNA, 25 bp, Homo sapien
caacttagacttcagcagtgcaata

SEQ ID NO: 4791737 - DNA, 25 bp, Homo sapien
ccaacttagacttcagcagtgcaat

SEQ ID NO: 4791738 - DNA, 25 bp, Homo sapien
tacagagttcacaagagcttggaaa

SEQ ID NO: 4791739 - DNA, 25 bp, Homo sapien
aaatacagagttcacaagagcttgg

SEQ ID NO: 4791740 - DNA, 25 bp, Homo sapien
tcacaagagcttggaaagaaagata

SEQ ID NO: 4791741 - DNA, 25 bp, Homo sapien
cacaagagcttggaaagaaagatac

SEQ ID NO: 4791742 - DNA, 25 bp, Homo sapien
gtctcctataggtatctccatggca

SEQ ID NO: 4791743 - DNA, 25 bp, Homo sapien
cacttgtgattcgtaatataatgca

SEQ ID NO: 4791744 - DNA, 25 bp, Homo sapien
taatattccccatagtacagcctgt

SEQ ID NO: 4791745 - DNA, 25 bp, Homo sapien
ccctcttttcaagggtgcattataa

SEQ ID NO: 4791746 - DNA, 25 bp, Homo sapien
taaagaaggaggaagcgccttcaga

SEQ ID NO: 4791747 - DNA, 25 bp, Homo sapien
aggaagcgccttcagaatcacaaga

SEQ ID NO: 4791748 - DNA, 25 bp, Homo sapien
ctaaagaaggaggaagcgccttcag

SEQ ID NO: 4791749 - DNA, 25 bp, Homo sapien
agcgccttcagaatcacaagaaaat

SEQ ID NO: 4791750 - DNA, 25 bp, Homo sapien
gccaggggaagcactaacacctgat

SEQ ID NO: 4791751 - DNA, 25 bp, Homo sapien
caggggaagcactaacacctgatat

SEQ ID NO: 4791752 - DNA, 25 bp, Homo sapien
gggccaggggaagcactaacacctg

SEQ ID NO: 4791753 - DNA, 25 bp, Homo sapien
gggaagcactaacacctgatatgaa

SEQ ID NO: 4791754 - DNA, 25 bp, Homo sapien
ttgtattcttgcaaatccttgcaca

SEQ ID NO: 4791755 - DNA, 25 bp, Homo sapien
ctgtcaggcttgatagcagggatct

SEQ ID NO: 4791756 - DNA, 25 bp, Homo sapien
cggcatatagccacaagggtaagct

SEQ ID NO: 4791757 - DNA, 25 bp, Homo sapien
atatagccacaagggtaagctgtca

SEQ ID NO: 4791758 - DNA, 25 bp, Homo sapien
ggcgctggccggcatatagccacaa

SEQ ID NO: 4791759 - DNA, 25 bp, Homo sapien
ggccggcatatagccacaagggtaa

SEQ ID NO: 4791760 - DNA, 25 bp, Homo sapien
gctggtactgtgagcaagctgttca

SEQ ID NO: 4791761 - DNA, 25 bp, Homo sapien
tctggaatcccagaagcagtcatta

SEQ ID NO: 4791762 - DNA, 25 bp, Homo sapien
gacatgagtgcaaaggacaatcctg

SEQ ID NO: 4791763 - DNA, 25 bp, Homo sapien
tttgggaaatgaaacgatgcccctg

SEQ ID NO: 4791764 - DNA, 25 bp, Homo sapien
tctctcaccattagaaaggatgctg

SEQ ID NO: 4791765 - DNA, 25 bp, Homo sapien
cattgttctaaccacccaagtgcag

SEQ ID NO: 4791766 - DNA, 25 bp, Homo sapien
ggattaaaggccagtctgtacccaa

SEQ ID NO: 4791767 - DNA, 25 bp, Homo sapien
gatcactgggcaaccgtggagaaag

SEQ ID NO: 4791768 - DNA, 25 bp, Homo sapien
ttggctttcctcagtctgaggcgtg

SEQ ID NO: 4791769 - DNA, 25 bp, Homo sapien
tgtgcaccgtaaaaaattctacttc

SEQ ID NO: 4791770 - DNA, 25 bp, Homo sapien
cagtctgaggcgtggtagaggtcct

SEQ ID NO: 4791771 - DNA, 25 bp, Homo sapien
ggtagaggtcctctgtgcaccgtaa

SEQ ID NO: 4791772 - DNA, 25 bp, Homo sapien
tgagtcacctgcctgaagcctggtc

SEQ ID NO: 4791773 - DNA, 25 bp, Homo sapien
tacatttgccctatagccggggttc

SEQ ID NO: 4791774 - DNA, 25 bp, Homo sapien
cagtcctactgtccatctctaggca

SEQ ID NO: 4791775 - DNA, 25 bp, Homo sapien
tgcaggacaggtgatttcccacctc

SEQ ID NO: 4791776 - DNA, 25 bp, Homo sapien
taatccaggtcggaagtgctcgagg

SEQ ID NO: 4791777 - DNA, 25 bp, Homo sapien
agtgctcgaggtctgctgcaagtga

SEQ ID NO: 4791778 - DNA, 25 bp, Homo sapien
aggttgtccaataatccaggtcgga

SEQ ID NO: 4791779 - DNA, 25 bp, Homo sapien
tcgaggtctgctgcaagtgagagca

SEQ ID NO: 4791780 - DNA, 25 bp, Homo sapien
tttgaagctagaaagcagttgggag

SEQ ID NO: 4791781 - DNA, 25 bp, Homo sapien
catccccacacagccatttacttgg

SEQ ID NO: 4791782 - DNA, 25 bp, Homo sapien
agagggtctgggagacacccatccc

SEQ ID NO: 4791783 - DNA, 25 bp, Homo sapien
gagggtctgggagacacccatcccc

SEQ ID NO: 4791784 - DNA, 25 bp, Homo sapien
cgtgacctaatgttagggctccaga

SEQ ID NO: 4791785 - DNA, 25 bp, Homo sapien
ctagcgtgacctaatgttagggctc

SEQ ID NO: 4791786 - DNA, 25 bp, Homo sapien
agcgtgacctaatgttagggctcca

SEQ ID NO: 4791787 - DNA, 25 bp, Homo sapien
tgacctaatgttagggctccagata

SEQ ID NO: 4791788 - DNA, 25 bp, Homo sapien
agagcctgtgtccacggaagacttg

SEQ ID NO: 4791789 - DNA, 25 bp, Homo sapien
gtggtacagcttcagcccccttgga

SEQ ID NO: 4791790 - DNA, 25 bp, Homo sapien
ggtacagcttcagcccccttggagc

SEQ ID NO: 4791791 - DNA, 25 bp, Homo sapien
tgtggtacagcttcagcccccttgg

SEQ ID NO: 4791792 - DNA, 25 bp, Homo sapien
ccagccaggggagatgggtttctca

SEQ ID NO: 4791793 - DNA, 25 bp, Homo sapien
ttggaaccagccaggggagatgggt

SEQ ID NO: 4791794 - DNA, 25 bp, Homo sapien
cttggaaccagccaggggagatggg

SEQ ID NO: 4791795 - DNA, 25 bp, Homo sapien
gaaccagccaggggagatgggtttc

SEQ ID NO: 4791796 - DNA, 25 bp, Homo sapien
tatgcaacggtccttcaaaccagaa

SEQ ID NO: 4791797 - DNA, 25 bp, Homo sapien
gggaacttgagccactaaagctcta

SEQ ID NO: 4791798 - DNA, 25 bp, Homo sapien
taaagctctattcagcctaccaaac

SEQ ID NO: 4791799 - DNA, 25 bp, Homo sapien
tgggtagagttggaaaataggcatc

SEQ ID NO: 4791800 - DNA, 25 bp, Homo sapien
acagacctcccctgtggttattagg

SEQ ID NO: 4791801 - DNA, 25 bp, Homo sapien
tacccacatttcatcaatgctgaca

SEQ ID NO: 4791802 - DNA, 25 bp, Homo sapien
accaacaccatggatggacacacta

SEQ ID NO: 4791803 - DNA, 25 bp, Homo sapien
taaatatccagaagctatacaacca

SEQ ID NO: 4791804 - DNA, 25 bp, Homo sapien
aggaagttccgaagacagagcccgg

SEQ ID NO: 4791805 - DNA, 25 bp, Homo sapien
tggtacccggacgtaggtccaagca

SEQ ID NO: 4791806 - DNA, 25 bp, Homo sapien
agcacacctcgggatctcggctgct

SEQ ID NO: 4791807 - DNA, 25 bp, Homo sapien
cggagactgacattgtagttggtac

SEQ ID NO: 4791808 - DNA, 25 bp, Homo sapien
aggtcatttcctgggcaaattcctt

SEQ ID NO: 4791809 - DNA, 25 bp, Homo sapien
cctgggcaaattccttctgatacca

SEQ ID NO: 4791810 - DNA, 25 bp, Homo sapien
tttcctgggcaaattccttctgata

SEQ ID NO: 4791811 - DNA, 25 bp, Homo sapien
attccttctgataccatctctggcc

SEQ ID NO: 4791812 - DNA, 25 bp, Homo sapien
tccatatcagctgtcttgatgcttc

SEQ ID NO: 4791813 - DNA, 25 bp, Homo sapien
ctccatatcagctgtcttgatgctt

SEQ ID NO: 4791814 - DNA, 25 bp, Homo sapien
gaaatcaatttacactctatagaaa

SEQ ID NO: 4791815 - DNA, 25 bp, Homo sapien
tttacactctatagaaaaaatgcta

SEQ ID NO: 4791816 - DNA, 25 bp, Homo sapien
atgagaaatcaatttacactctata

SEQ ID NO: 4791817 - DNA, 25 bp, Homo sapien
ttacactctatagaaaaaatgctac

SEQ ID NO: 4791818 - DNA, 25 bp, Homo sapien
tgaggtgctccttgtgcaaactctg

SEQ ID NO: 4791819 - DNA, 25 bp, Homo sapien
tttatgatgtcatgaggtgctcctt

SEQ ID NO: 4791820 - DNA, 25 bp, Homo sapien
gatgtcatgaggtgctccttgtgca

SEQ ID NO: 4791821 - DNA, 25 bp, Homo sapien
cagctgaaaatgtgttggggggtag

SEQ ID NO: 4791822 - DNA, 25 bp, Homo sapien
gagtgccgcttaggagatctcagca

SEQ ID NO: 4791823 - DNA, 25 bp, Homo sapien
cagtcgtagggtacagatccaaaca

SEQ ID NO: 4791824 - DNA, 25 bp, Homo sapien
cagcagggtcacattcaccgtataa

SEQ ID NO: 4791825 - DNA, 25 bp, Homo sapien
caggcacttgttccctcgttgtgaa

SEQ ID NO: 4791826 - DNA, 25 bp, Homo sapien
ttggtacatgtgttctgatccaact

SEQ ID NO: 4791827 - DNA, 25 bp, Homo sapien
ccaactttcctagaacgcctgttca

SEQ ID NO: 4791828 - DNA, 25 bp, Homo sapien
ctagaacgcctgttcaatttcaaac

SEQ ID NO: 4791829 - DNA, 25 bp, Homo sapien
tgtgttctgatccaactttcctaga

SEQ ID NO: 4791830 - DNA, 25 bp, Homo sapien
tatgtgtatttctcccgtgggagtt

SEQ ID NO: 4791831 - DNA, 25 bp, Homo sapien
atatgtgtatttctcccgtgggagt

SEQ ID NO: 4791832 - DNA, 25 bp, Homo sapien
atgtgtatttctcccgtgggagttt

SEQ ID NO: 4791833 - DNA, 25 bp, Homo sapien
tgtgtatttctcccgtgggagtttc

SEQ ID NO: 4791834 - DNA, 25 bp, Homo sapien
ctaaagaattctgccaaagctcaaa

SEQ ID NO: 4791835 - DNA, 25 bp, Homo sapien
taaagaattctgccaaagctcaaat

SEQ ID NO: 4791836 - DNA, 25 bp, Homo sapien
tcctgctgtctgtggtcaagttgac

SEQ ID NO: 4791837 - DNA, 25 bp, Homo sapien
aaccgatgacggctggcatcgagcg

SEQ ID NO: 4791838 - DNA, 25 bp, Homo sapien
tcgagcgcctgggaggtgctgtgga

SEQ ID NO: 4791839 - DNA, 25 bp, Homo sapien
gatgttcacggtgtagttggtgcct

SEQ ID NO: 4791840 - DNA, 25 bp, Homo sapien
tccaaccgttgtccttttatggata

SEQ ID NO: 4791841 - DNA, 25 bp, Homo sapien
ccaaccgttgtccttttatggatat

SEQ ID NO: 4791842 - DNA, 25 bp, Homo sapien
gattccatagggtccaaccgttgtc

SEQ ID NO: 4791843 - DNA, 25 bp, Homo sapien
catatgagatcttggggtttattct

SEQ ID NO: 4791844 - DNA, 25 bp, Homo sapien
ttaaacagtgatacatcattaatct

SEQ ID NO: 4791845 - DNA, 25 bp, Homo sapien
aacagtgatacatcattaatctttg

SEQ ID NO: 4791846 - DNA, 25 bp, Homo sapien
gatacatcattaatctttgtcagaa

SEQ ID NO: 4791847 - DNA, 25 bp, Homo sapien
caagctttcccattgaagcagacac

SEQ ID NO: 4791848 - DNA, 25 bp, Homo sapien
tcaagctttcccattgaagcagaca

SEQ ID NO: 4791849 - DNA, 25 bp, Homo sapien
tctgggacttccctgctgcagcacc

SEQ ID NO: 4791850 - DNA, 25 bp, Homo sapien
gatgggttttgacaacatgaccagg

SEQ ID NO: 4791851 - DNA, 25 bp, Homo sapien
atccctggatgggttttgacaacat

SEQ ID NO: 4791852 - DNA, 25 bp, Homo sapien
gttttgacaacatgaccaggtcttg

SEQ ID NO: 4791853 - DNA, 25 bp, Homo sapien
cacacagatgtggtaatgcccaccc

SEQ ID NO: 4791854 - DNA, 25 bp, Homo sapien
ggctgtccaacaaagacttagtttc

SEQ ID NO: 4791855 - DNA, 25 bp, Homo sapien
gagctggtagagaaatccttcctcc

SEQ ID NO: 4791856 - DNA, 25 bp, Homo sapien
tcttcagcgtctaaggacactgtca

SEQ ID NO: 4791857 - DNA, 25 bp, Homo sapien
tgtggctgcaactgagcacccagtg

SEQ ID NO: 4791858 - DNA, 25 bp, Homo sapien
caccagccaaacagaagggacagag

SEQ ID NO: 4791859 - DNA, 25 bp, Homo sapien
ttccatctgaaatgtgtgtggctgc

SEQ ID NO: 4791860 - DNA, 25 bp, Homo sapien
aagagggtcaccagccaaacagaag

SEQ ID NO: 4791861 - DNA, 25 bp, Homo sapien
tttccagacacgaaagtgattgcct

SEQ ID NO: 4791862 - DNA, 25 bp, Homo sapien
gtgattgcctaattcccagctgtct

SEQ ID NO: 4791863 - DNA, 25 bp, Homo sapien
tacccttctgagagcgtggagtgag

SEQ ID NO: 4791864 - DNA, 25 bp, Homo sapien
gagcgtcagccttataatcattaac

SEQ ID NO: 4791865 - DNA, 25 bp, Homo sapien
tctgtgtcgggaatacttccccaaa

SEQ ID NO: 4791866 - DNA, 25 bp, Homo sapien
gactccagcagttgttctgtgtcgg

SEQ ID NO: 4791867 - DNA, 25 bp, Homo sapien
cagcagttgttctgtgtcgggaata

SEQ ID NO: 4791868 - DNA, 25 bp, Homo sapien
caagtgactccagcagttgttctgt

SEQ ID NO: 4791869 - DNA, 25 bp, Homo sapien
ctgtgcatgttaaagtactttctct

SEQ ID NO: 4791870 - DNA, 25 bp, Homo sapien
tcttgacagacatagcgagccacac

SEQ ID NO: 4791871 - DNA, 25 bp, Homo sapien
gtgatttcctaccaagatggcgtgc

SEQ ID NO: 4791872 - DNA, 25 bp, Homo sapien
tcaaagccctcttgacagacatagc

SEQ ID NO: 4791873 - DNA, 25 bp, Homo sapien
ccaagatggcgtgccgcatttctgg

SEQ ID NO: 4791874 - DNA, 25 bp, Homo sapien
gcccagactagacgtataatttcct

SEQ ID NO: 4791875 - DNA, 25 bp, Homo sapien
tctctgcaagcataacgaacctggc

SEQ ID NO: 4791876 - DNA, 25 bp, Homo sapien
cccaggcctgtgcagcttgaaactg

SEQ ID NO: 4791877 - DNA, 25 bp, Homo sapien
tggaacactgaagaatccttctctg

SEQ ID NO: 4791878 - DNA, 25 bp, Homo sapien
cattccttggcaagtatccatccat

SEQ ID NO: 4791879 - DNA, 25 bp, Homo sapien
tggcatcggtggtcgggtggaaagg

SEQ ID NO: 4791880 - DNA, 25 bp, Homo sapien
ctgtgcatgatgtggcatcggtggt

SEQ ID NO: 4791881 - DNA, 25 bp, Homo sapien
ccattccttggcaagtatccatcca

SEQ ID NO: 4791882 - DNA, 25 bp, Homo sapien
gctcccatgagtgttcacgcatcgc

SEQ ID NO: 4791883 - DNA, 25 bp, Homo sapien
tcaaagctcccatgagtgttcacgc

SEQ ID NO: 4791884 - DNA, 25 bp, Homo sapien
tgagtgttcacgcatcgccctccat

SEQ ID NO: 4791885 - DNA, 25 bp, Homo sapien
gagtgttcacgcatcgccctccatg

SEQ ID NO: 4791886 - DNA, 25 bp, Homo sapien
ccagaaacttcacactcatctatgt

SEQ ID NO: 4791887 - DNA, 25 bp, Homo sapien
ctgcacaggccagaaacttcacact

SEQ ID NO: 4791888 - DNA, 25 bp, Homo sapien
tgcacaggccagaaacttcacactc

SEQ ID NO: 4791889 - DNA, 25 bp, Homo sapien
aggccagaaacttcacactcatcta

SEQ ID NO: 4791890 - DNA, 25 bp, Homo sapien
tcacacaagaagtgccacagagctt

SEQ ID NO: 4791891 - DNA, 25 bp, Homo sapien
tcaaattgtccacccagttggctcc

SEQ ID NO: 4791892 - DNA, 25 bp, Homo sapien
gactggctggaatcatctcacacta

SEQ ID NO: 4791893 - DNA, 25 bp, Homo sapien
ggtcttggatcaatgaacgcctctc

SEQ ID NO: 4791894 - DNA, 25 bp, Homo sapien
aataaacacctggatgcaggattcc

SEQ ID NO: 4791895 - DNA, 25 bp, Homo sapien
actggagaactcacaaggaaaggtc

SEQ ID NO: 4791896 - DNA, 25 bp, Homo sapien
tgctgataccccaacacttgctaag

SEQ ID NO: 4791897 - DNA, 25 bp, Homo sapien
taaagcccgctgatgtttctctggc

SEQ ID NO: 4791898 - DNA, 25 bp, Homo sapien
gacctgtggttacaggaacctgcag

SEQ ID NO: 4791899 - DNA, 25 bp, Homo sapien
cgacctgtggttacaggaacctgca

SEQ ID NO: 4791900 - DNA, 25 bp, Homo sapien
cccgacctgtggttacaggaacctg

SEQ ID NO: 4791901 - DNA, 25 bp, Homo sapien
acctgtggttacaggaacctgcagg

SEQ ID NO: 4791902 - DNA, 25 bp, Homo sapien
acagacaagagtggctccaaactgg

SEQ ID NO: 4791903 - DNA, 25 bp, Homo sapien
tgtacaaaaggtgccatcgttggga

SEQ ID NO: 4791904 - DNA, 25 bp, Homo sapien
tggctcgatatccttccaggcaaat

SEQ ID NO: 4791905 - DNA, 25 bp, Homo sapien
ccatcgttgggaatgaatgtcttgt

SEQ ID NO: 4791906 - DNA, 25 bp, Homo sapien
gagtgcagtggtggccaggtgcggt

SEQ ID NO: 4791907 - DNA, 25 bp, Homo sapien
ttaagagatgggatcttgttctgtc

SEQ ID NO: 4791908 - DNA, 25 bp, Homo sapien
ggagtgcagtggtggccaggtgcgg

SEQ ID NO: 4791909 - DNA, 25 bp, Homo sapien
agagatgggatcttgttctgtcgcc

SEQ ID NO: 4791910 - DNA, 25 bp, Homo sapien
taatgcatataacaaggttgctggg

SEQ ID NO: 4791911 - DNA, 25 bp, Homo sapien
tctctctgaattgagcttgaacctg

SEQ ID NO: 4791912 - DNA, 25 bp, Homo sapien
gattacaagatcgaggctcagtacc

SEQ ID NO: 4791913 - DNA, 25 bp, Homo sapien
cacaaagatatcacaacaaggctgt

SEQ ID NO: 4791914 - DNA, 25 bp, Homo sapien
ctgagtcctcccgttccctacaaat

SEQ ID NO: 4791915 - DNA, 25 bp, Homo sapien
acacactgagtcctcccgttcccta

SEQ ID NO: 4791916 - DNA, 25 bp, Homo sapien
cccgttccctacaaatccatagttg

SEQ ID NO: 4791917 - DNA, 25 bp, Homo sapien
ctacaaatccatagttgcaaataca

SEQ ID NO: 4791918 - DNA, 25 bp, Homo sapien
tggcaagtggcacagacgtctaaac

SEQ ID NO: 4791919 - DNA, 25 bp, Homo sapien
atggcaagtggcacagacgtctaaa

SEQ ID NO: 4791920 - DNA, 25 bp, Homo sapien
tccagacatactcctccagcctcat

SEQ ID NO: 4791921 - DNA, 25 bp, Homo sapien
aacttgtccttataaagatgcagag

SEQ ID NO: 4791922 - DNA, 25 bp, Homo sapien
ctaccaaagtgccagcctgatcaac

SEQ ID NO: 4791923 - DNA, 25 bp, Homo sapien
cagagattatatagatccatttgca

SEQ ID NO: 4791924 - DNA, 25 bp, Homo sapien
atgcagagattatatagatccattt

SEQ ID NO: 4791925 - DNA, 25 bp, Homo sapien
ttctgtcgtcagcatactcagggcc

SEQ ID NO: 4791926 - DNA, 25 bp, Homo sapien
ggaccccgagggatgtctagaatta

SEQ ID NO: 4791927 - DNA, 25 bp, Homo sapien
tagtaaccgagggaatgactgcaga

SEQ ID NO: 4791928 - DNA, 25 bp, Homo sapien
cttggtacccacgtcaaggatggct

SEQ ID NO: 4791929 - DNA, 25 bp, Homo sapien
cagagaaacaggaaagttgaagaac

SEQ ID NO: 4791930 - DNA, 25 bp, Homo sapien
ggcagagaaacaggaaagttgaaga

SEQ ID NO: 4791931 - DNA, 25 bp, Homo sapien
tggcagagaaacaggaaagttgaag

SEQ ID NO: 4791932 - DNA, 25 bp, Homo sapien
ctggcagagaaacaggaaagttgaa

SEQ ID NO: 4791933 - DNA, 25 bp, Homo sapien
tctcttctttcctcctgtggctcac

SEQ ID NO: 4791934 - DNA, 25 bp, Homo sapien
ttctcttctttcctcctgtggctca

SEQ ID NO: 4791935 - DNA, 25 bp, Homo sapien
cctgaatagtgaatgtgctgctgtg

SEQ ID NO: 4791936 - DNA, 25 bp, Homo sapien
tgaatagtgaatgtgctgctgtgat

SEQ ID NO: 4791937 - DNA, 25 bp, Homo sapien
ctgaatagtgaatgtgctgctgtga

SEQ ID NO: 4791938 - DNA, 25 bp, Homo sapien
aatagtgaatgtgctgctgtgattc

SEQ ID NO: 4791939 - DNA, 25 bp, Homo sapien
gagggaagatcaagcatgaaatgca

SEQ ID NO: 4791940 - DNA, 25 bp, Homo sapien
aagaacaacttcctgacctccagcc

SEQ ID NO: 4791941 - DNA, 25 bp, Homo sapien
agatcaagcatgaaatgcatgatga

SEQ ID NO: 4791942 - DNA, 25 bp, Homo sapien
tgaagtcaggtgacctttgtataca

SEQ ID NO: 4791943 - DNA, 25 bp, Homo sapien
atagaagtctaacccacaatctgca

SEQ ID NO: 4791944 - DNA, 25 bp, Homo sapien
gaagtctaacccacaatctgcagca

SEQ ID NO: 4791945 - DNA, 25 bp, Homo sapien
taaaatagaagtctaacccacaatc

SEQ ID NO: 4791946 - DNA, 25 bp, Homo sapien
aaatagaagtctaacccacaatctg

SEQ ID NO: 4791947 - DNA, 25 bp, Homo sapien
tgaccagatccatccaattcaaagg

SEQ ID NO: 4791948 - DNA, 25 bp, Homo sapien
tctactccgtaaacaaggtctctgc

SEQ ID NO: 4791949 - DNA, 25 bp, Homo sapien
ggtttcaagcaaccatcaagtctat

SEQ ID NO: 4791950 - DNA, 25 bp, Homo sapien
tgcagcaagcgagatcatgtcaccg

SEQ ID NO: 4791951 - DNA, 25 bp, Homo sapien
tatgcgcactgttctcggagataga

SEQ ID NO: 4791952 - DNA, 25 bp, Homo sapien
ttagagatatcacaggaagatcctg

SEQ ID NO: 4791953 - DNA, 25 bp, Homo sapien
gaaatagacgccaagcatctgcaag

SEQ ID NO: 4791954 - DNA, 25 bp, Homo sapien
caaggaaggaatcttaaccagggca

SEQ ID NO: 4791955 - DNA, 25 bp, Homo sapien
taggggcctgagctccttcgggagt

SEQ ID NO: 4791956 - DNA, 25 bp, Homo sapien
gggcctgagctccttcgggagtctg

SEQ ID NO: 4791957 - DNA, 25 bp, Homo sapien
cctgagctccttcgggagtctgagc

SEQ ID NO: 4791958 - DNA, 25 bp, Homo sapien
ggcctgagctccttcgggagtctga

SEQ ID NO: 4791959 - DNA, 25 bp, Homo sapien
cgggtttcatgatgccgtttctgtg

SEQ ID NO: 4791960 - DNA, 25 bp, Homo sapien
aaaccgcatgtttgtcaggaacttg

SEQ ID NO: 4791961 - DNA, 25 bp, Homo sapien
cttggcaaaccgcatgtttgtcagg

SEQ ID NO: 4791962 - DNA, 25 bp, Homo sapien
ttgtgatccgggtttcatgatgccg

SEQ ID NO: 4791963 - DNA, 25 bp, Homo sapien
cggcagcaggcggcgagacgggccc

SEQ ID NO: 4791964 - DNA, 25 bp, Homo sapien
gcaggcggcgagacgggcccgcatc

SEQ ID NO: 4791965 - DNA, 25 bp, Homo sapien
cagcaggcggcgagacgggcccgca

SEQ ID NO: 4791966 - DNA, 25 bp, Homo sapien
gcggcgagacgggcccgcatcccag

SEQ ID NO: 4791967 - DNA, 25 bp, Homo sapien
gaaacacaagtgaattatggaacat

SEQ ID NO: 4791968 - DNA, 25 bp, Homo sapien
aagaaacacaagtgaattatggaac

SEQ ID NO: 4791969 - DNA, 25 bp, Homo sapien
actttttggttcacaatctggttat

SEQ ID NO: 4791970 - DNA, 25 bp, Homo sapien
ttggttcacaatctggttatgaaag

SEQ ID NO: 4791971 - DNA, 25 bp, Homo sapien
gagccaaggataagcattctgccag

SEQ ID NO: 4791972 - DNA, 25 bp, Homo sapien
tattacaaagagtcagtgatgggcc

SEQ ID NO: 4791973 - DNA, 25 bp, Homo sapien
catctaaaccaatcactactaaggg

SEQ ID NO: 4791974 - DNA, 25 bp, Homo sapien
caccctcaaggtttaagacagctgt

SEQ ID NO: 4791975 - DNA, 25 bp, Homo sapien
cattagtacctaatatttagctccc

SEQ ID NO: 4791976 - DNA, 25 bp, Homo sapien
atgtccattagtacctaatatttag

SEQ ID NO: 4791977 - DNA, 25 bp, Homo sapien
tggggtgcgattgaacctgtcactg

SEQ ID NO: 4791978 - DNA, 25 bp, Homo sapien
gtttggggtgcgattgaacctgtca

SEQ ID NO: 4791979 - DNA, 25 bp, Homo sapien
gacttgcaacaaactcaccagggtg

SEQ ID NO: 4791980 - DNA, 25 bp, Homo sapien
taactgcagatcaaaagtatctggg

SEQ ID NO: 4791981 - DNA, 25 bp, Homo sapien
gaggcccatgttggtagacttgcaa

SEQ ID NO: 4791982 - DNA, 25 bp, Homo sapien
ccagggtgctgagctaggctacttt

SEQ ID NO: 4791983 - DNA, 25 bp, Homo sapien
ctgtttagtgttccaaagtgcaaga

SEQ ID NO: 4791984 - DNA, 25 bp, Homo sapien
tcttctaaagaagggctgccaacat

SEQ ID NO: 4791985 - DNA, 25 bp, Homo sapien
gaattgctcaacatatgtgttccca

SEQ ID NO: 4791986 - DNA, 25 bp, Homo sapien
tacagttaccttggcaagccatttc

SEQ ID NO: 4791987 - DNA, 25 bp, Homo sapien
tccttcaggaggtacagcactgggt

SEQ ID NO: 4791988 - DNA, 25 bp, Homo sapien
gttttcaacagtaccctgggagcac

SEQ ID NO: 4791989 - DNA, 25 bp, Homo sapien
aatcagtgggtttggtgggtctctc

SEQ ID NO: 4791990 - DNA, 25 bp, Homo sapien
tgtagtaactctggttgctggtccc

SEQ ID NO: 4791991 - DNA, 25 bp, Homo sapien
ttgaaacactcctgggtaactggta

SEQ ID NO: 4791992 - DNA, 25 bp, Homo sapien
taagagggccttacttattggctag

SEQ ID NO: 4791993 - DNA, 25 bp, Homo sapien
ttttcctgtagatatgccgtggtca

SEQ ID NO: 4791994 - DNA, 25 bp, Homo sapien
gccgtggtcaggacaatgcaatata

SEQ ID NO: 4791995 - DNA, 25 bp, Homo sapien
gaagacaatctcttaacaggttaga

SEQ ID NO: 4791996 - DNA, 25 bp, Homo sapien
tgagtttttcctgttaccctgtcta

SEQ ID NO: 4791997 - DNA, 25 bp, Homo sapien
ttcctactgtaatctgagaagggag

SEQ ID NO: 4791998 - DNA, 25 bp, Homo sapien
aaggactgagcagataattctctaa

SEQ ID NO: 4791999 - DNA, 25 bp, Homo sapien
ggaatgtagcatcagctagtatctg

SEQ ID NO: 4792000 - DNA, 25 bp, Homo sapien
ccagcaaagattagtagtgattacc

SEQ ID NO: 4792001 - DNA, 25 bp, Homo sapien
aatatacaatgaacgctaagtctag

SEQ ID NO: 4792002 - DNA, 25 bp, Homo sapien
taagtctagacttctgcaatccaac

SEQ ID NO: 4792003 - DNA, 25 bp, Homo sapien
gacatttattaaaaggcatgctaca

SEQ ID NO: 4792004 - DNA, 25 bp, Homo sapien
gcttgaattaaccatgcactacgca

SEQ ID NO: 4792005 - DNA, 25 bp, Homo sapien
caaactgaacgaaaatggaatatac

SEQ ID NO: 4792006 - DNA, 25 bp, Homo sapien
tagagatatcaagtaatagtcagca

SEQ ID NO: 4792007 - DNA, 25 bp, Homo sapien
ccaatgccacagactgttacaaatg

SEQ ID NO: 4792008 - DNA, 25 bp, Homo sapien
caatgccacagactgttacaaatga

SEQ ID NO: 4792009 - DNA, 25 bp, Homo sapien
atgccacagactgttacaaatgaaa

SEQ ID NO: 4792010 - DNA, 25 bp, Homo sapien
aatgccacagactgttacaaatgaa

SEQ ID NO: 4792011 - DNA, 25 bp, Homo sapien
aactcgtcatcctaatccattctgt

SEQ ID NO: 4792012 - DNA, 25 bp, Homo sapien
ggaattttgatgaacagaccacgta

SEQ ID NO: 4792013 - DNA, 25 bp, Homo sapien
tgaaaatgcccatcaaactcgtcat

SEQ ID NO: 4792014 - DNA, 25 bp, Homo sapien
ccagacaatgtcagaggctcctagc

SEQ ID NO: 4792015 - DNA, 25 bp, Homo sapien
aattgaaagtaaaggccgctctgca

SEQ ID NO: 4792016 - DNA, 25 bp, Homo sapien
tcagagcaatgaggtgacactttga

SEQ ID NO: 4792017 - DNA, 25 bp, Homo sapien
taactggtactttctggatatggga

SEQ ID NO: 4792018 - DNA, 25 bp, Homo sapien
aacagtcagtctttggtcagagcaa

SEQ ID NO: 4792019 - DNA, 25 bp, Homo sapien
tcaattatgactatgatcaccaagg

SEQ ID NO: 4792020 - DNA, 25 bp, Homo sapien
gaaaaatgctttacgcatcgtcacg

SEQ ID NO: 4792021 - DNA, 25 bp, Homo sapien
tgttctctggaacatatgcctcagg

SEQ ID NO: 4792022 - DNA, 25 bp, Homo sapien
tattcttggacctgcacaatgctct

SEQ ID NO: 4792023 - DNA, 25 bp, Homo sapien
ttttgtccaaaaatatctcgtggga

SEQ ID NO: 4792024 - DNA, 25 bp, Homo sapien
aatatgctaaacatgtaagcactgc

SEQ ID NO: 4792025 - DNA, 25 bp, Homo sapien
catgacaatatgctaaacatgtaag

SEQ ID NO: 4792026 - DNA, 25 bp, Homo sapien
caaaaatatctcgtgggaacagaag

SEQ ID NO: 4792027 - DNA, 25 bp, Homo sapien
gaaggcctcactgtcataagggaac

SEQ ID NO: 4792028 - DNA, 25 bp, Homo sapien
catgattatcatactaggtggagcc

SEQ ID NO: 4792029 - DNA, 25 bp, Homo sapien
gaaaaaccattgctagaagatactg

SEQ ID NO: 4792030 - DNA, 25 bp, Homo sapien
tgagcagaggcattcataggagcca

SEQ ID NO: 4792031 - DNA, 25 bp, Homo sapien
tatgatccccttccgttattagcaa

SEQ ID NO: 4792032 - DNA, 25 bp, Homo sapien
cacaaatgtgatcatagcgcactgc

SEQ ID NO: 4792033 - DNA, 25 bp, Homo sapien
tataccccttgtgtctaggtcaaaa

SEQ ID NO: 4792034 - DNA, 25 bp, Homo sapien
caactaagtgttgctcagtggtgag

SEQ ID NO: 4792035 - DNA, 25 bp, Homo sapien
gcaagttctcgcttgaggactgaga

SEQ ID NO: 4792036 - DNA, 25 bp, Homo sapien
tactccaaatacgtgggtactcagt

SEQ ID NO: 4792037 - DNA, 25 bp, Homo sapien
tgtataaggctgatctggacccaaa

SEQ ID NO: 4792038 - DNA, 25 bp, Homo sapien
gacagagtatgagaaataacccacc

SEQ ID NO: 4792039 - DNA, 25 bp, Homo sapien
ttcttccacagatcccaattgaatg

SEQ ID NO: 4792040 - DNA, 25 bp, Homo sapien
gaatgagcgccattttgcgatcttt

SEQ ID NO: 4792041 - DNA, 25 bp, Homo sapien
ttctccaaggtcatggttatgaagc

SEQ ID NO: 4792042 - DNA, 25 bp, Homo sapien
tcaatgagggcctgaattgcttctt

SEQ ID NO: 4792043 - DNA, 25 bp, Homo sapien
aaaaggttcttcagatcatccactg

SEQ ID NO: 4792044 - DNA, 25 bp, Homo sapien
cactgaacatccagcttctatgaaa

SEQ ID NO: 4792045 - DNA, 25 bp, Homo sapien
ttcactgaacatccagcttctatga

SEQ ID NO: 4792046 - DNA, 25 bp, Homo sapien
cagatcatccactgtaacagaaggg

SEQ ID NO: 4792047 - DNA, 25 bp, Homo sapien
tccatgcagcctaactggagaccag

SEQ ID NO: 4792048 - DNA, 25 bp, Homo sapien
aacaattaggacagagatagccaga

SEQ ID NO: 4792049 - DNA, 25 bp, Homo sapien
tcccggctggtatgaggtttgatcc

SEQ ID NO: 4792050 - DNA, 25 bp, Homo sapien
cagggaggccggatattcagcattc

SEQ ID NO: 4792051 - DNA, 25 bp, Homo sapien
tcttgtccctctcgaggaagctgta

SEQ ID NO: 4792052 - DNA, 25 bp, Homo sapien
tagagcccggctttttaaagcgatg

SEQ ID NO: 4792053 - DNA, 25 bp, Homo sapien
gtgtagcacgaagcactttcccata

SEQ ID NO: 4792054 - DNA, 25 bp, Homo sapien
gctgaaatccttagtcagaccttgg

SEQ ID NO: 4792055 - DNA, 25 bp, Homo sapien
ataatcttcactcgatgtacatcac

SEQ ID NO: 4792056 - DNA, 25 bp, Homo sapien
cttgatttgcatccgccatctgaac

SEQ ID NO: 4792057 - DNA, 25 bp, Homo sapien
gctgagcttgatttgcatccgccat

SEQ ID NO: 4792058 - DNA, 25 bp, Homo sapien
tcttattaaacataatcttcactcg

SEQ ID NO: 4792059 - DNA, 25 bp, Homo sapien
aataagatctttcagcagggcacag

SEQ ID NO: 4792060 - DNA, 25 bp, Homo sapien
aaaataagatctttcagcagggcac

SEQ ID NO: 4792061 - DNA, 25 bp, Homo sapien
tcagtttatgtgctacagagtatca

SEQ ID NO: 4792062 - DNA, 25 bp, Homo sapien
tatgtgctacagagtatcatcaata

SEQ ID NO: 4792063 - DNA, 25 bp, Homo sapien
tgaggaatttctctcgggcgttgaa

SEQ ID NO: 4792064 - DNA, 25 bp, Homo sapien
aaaaacctatcagcctggtgttgtg

SEQ ID NO: 4792065 - DNA, 25 bp, Homo sapien
atcttgagttgtaaacccaaagcag

SEQ ID NO: 4792066 - DNA, 25 bp, Homo sapien
ctttggctagaaaagagtcatatta

SEQ ID NO: 4792067 - DNA, 25 bp, Homo sapien
ataaaaagcccatgtggtgtgataa

SEQ ID NO: 4792068 - DNA, 25 bp, Homo sapien
caaataggataaaaagcccatgtgg

SEQ ID NO: 4792069 - DNA, 25 bp, Homo sapien
taaaaagcccatgtggtgtgataag

SEQ ID NO: 4792070 - DNA, 25 bp, Homo sapien
gataaaaagcccatgtggtgtgata

SEQ ID NO: 4792071 - DNA, 25 bp, Homo sapien
gattgagatttgtgacgagtagaac

SEQ ID NO: 4792072 - DNA, 25 bp, Homo sapien
aggaatggccatccttccagtgaca

SEQ ID NO: 4792073 - DNA, 25 bp, Homo sapien
agaggtgattgtgagaggaccaaga

SEQ ID NO: 4792074 - DNA, 25 bp, Homo sapien
gatttgtgacgagtagaacagaatt

SEQ ID NO: 4792075 - DNA, 25 bp, Homo sapien
aaaaataccaaaagcatttcatatt

SEQ ID NO: 4792076 - DNA, 25 bp, Homo sapien
ttaaaaataccaaaagcatttcata

SEQ ID NO: 4792077 - DNA, 25 bp, Homo sapien
taaaaataccaaaagcatttcatat

SEQ ID NO: 4792078 - DNA, 25 bp, Homo sapien
gatgcagaacacatactgattactg

SEQ ID NO: 4792079 - DNA, 25 bp, Homo sapien
caactggaaaggcaaatctaaggtt

SEQ ID NO: 4792080 - DNA, 25 bp, Homo sapien
tagcctatagttatttgtgccaaaa

SEQ ID NO: 4792081 - DNA, 25 bp, Homo sapien
acaaatcactacacttctacagctg

SEQ ID NO: 4792082 - DNA, 25 bp, Homo sapien
caatggctggggcaaatccagcagc

SEQ ID NO: 4792083 - DNA, 25 bp, Homo sapien
gcagcccctgcatatggtgaagaaa

SEQ ID NO: 4792084 - DNA, 25 bp, Homo sapien
ggtgaagaaattatacccggtgcac

SEQ ID NO: 4792085 - DNA, 25 bp, Homo sapien
tagcttgaggaaatccaatggctgg

SEQ ID NO: 4792086 - DNA, 25 bp, Homo sapien
gatgccgaacttaagtgtagacatc

SEQ ID NO: 4792087 - DNA, 25 bp, Homo sapien
ctgatcagcacggagcactatagcc

SEQ ID NO: 4792088 - DNA, 25 bp, Homo sapien
tgtagacatctgatcagcacggagc

SEQ ID NO: 4792089 - DNA, 25 bp, Homo sapien
gccgaacttaagtgtagacatctga

SEQ ID NO: 4792090 - DNA, 25 bp, Homo sapien
ttggagaagtcaatgcgcagagtgc

SEQ ID NO: 4792091 - DNA, 25 bp, Homo sapien
ggccatcaccagtaggaaggtctaa

SEQ ID NO: 4792092 - DNA, 25 bp, Homo sapien
gcattatagatattctggccatcca

SEQ ID NO: 4792093 - DNA, 25 bp, Homo sapien
gaaggtctaagcgagtgaagtctct

SEQ ID NO: 4792094 - DNA, 25 bp, Homo sapien
atcttcaagactgtgccaaatttag

SEQ ID NO: 4792095 - DNA, 25 bp, Homo sapien
aggcttgaaactgattattctttgt

SEQ ID NO: 4792096 - DNA, 25 bp, Homo sapien
ctgggtcagcatactgaagcaaggc

SEQ ID NO: 4792097 - DNA, 25 bp, Homo sapien
tctttgtaaaggtgataatcttcaa

SEQ ID NO: 4792098 - DNA, 25 bp, Homo sapien
gattgtattcactgatagaggagct

SEQ ID NO: 4792099 - DNA, 25 bp, Homo sapien
taactgggcaccaacatcagggaat

SEQ ID NO: 4792100 - DNA, 25 bp, Homo sapien
taaccagcaatagcactctagtccc

SEQ ID NO: 4792101 - DNA, 25 bp, Homo sapien
tagaggagctacaaaaaacgatatg

SEQ ID NO: 4792102 - DNA, 25 bp, Homo sapien
tggcgaaatccctcctccactaaaa

SEQ ID NO: 4792103 - DNA, 25 bp, Homo sapien
gtacaaaaattagccaggtgtggtg

SEQ ID NO: 4792104 - DNA, 25 bp, Homo sapien
acatggcgaaatccctcctccacta

SEQ ID NO: 4792105 - DNA, 25 bp, Homo sapien
gagccatgattgcaccaccacactc

SEQ ID NO: 4792106 - DNA, 25 bp, Homo sapien
aataattattcgaagcacagggctc

SEQ ID NO: 4792107 - DNA, 25 bp, Homo sapien
tttcaataattattcgaagcacagg

SEQ ID NO: 4792108 - DNA, 25 bp, Homo sapien
ggccaggcttcctgattggacggca

SEQ ID NO: 4792109 - DNA, 25 bp, Homo sapien
ttcctgattggacggcactgacagc

SEQ ID NO: 4792110 - DNA, 25 bp, Homo sapien
tagattgtcagtcttaagttctctg

SEQ ID NO: 4792111 - DNA, 25 bp, Homo sapien
gagtaataggagtgtaataattcac

SEQ ID NO: 4792112 - DNA, 25 bp, Homo sapien
ctggcttcgaaggtgaggagtaata

SEQ ID NO: 4792113 - DNA, 25 bp, Homo sapien
atagtaacggcagcttcctcagaag

SEQ ID NO: 4792114 - DNA, 25 bp, Homo sapien
aactggccagaaaagagtgctattt

SEQ ID NO: 4792115 - DNA, 25 bp, Homo sapien
gattacaagcgcatgataccacgat

SEQ ID NO: 4792116 - DNA, 25 bp, Homo sapien
tctccgtactcaatgtttcaaatgc

SEQ ID NO: 4792117 - DNA, 25 bp, Homo sapien
tgtatggaatcacactaaactggcc

SEQ ID NO: 4792118 - DNA, 25 bp, Homo sapien
gcccagcctttgtcgccctatttta

SEQ ID NO: 4792119 - DNA, 25 bp, Homo sapien
tgagtcctcaaaatactggtaagaa

SEQ ID NO: 4792120 - DNA, 25 bp, Homo sapien
tacaatttttgtagcaatgaggtct

SEQ ID NO: 4792121 - DNA, 25 bp, Homo sapien
taaactatagacattaaccgttctg

SEQ ID NO: 4792122 - DNA, 25 bp, Homo sapien
gtggataccagatcggcttagtaca

SEQ ID NO: 4792123 - DNA, 25 bp, Homo sapien
ccctccttatgcagcctggaccata

SEQ ID NO: 4792124 - DNA, 25 bp, Homo sapien
agtgtggataccagatcggcttagt

SEQ ID NO: 4792125 - DNA, 25 bp, Homo sapien
cctccttatgcagcctggaccatac

SEQ ID NO: 4792126 - DNA, 25 bp, Homo sapien
gaaatggcaagtatctctaaatcaa

SEQ ID NO: 4792127 - DNA, 25 bp, Homo sapien
ttagcaagcatatatcaaccatttc

SEQ ID NO: 4792128 - DNA, 25 bp, Homo sapien
tgccaccaagaccaggcacaagagc

SEQ ID NO: 4792129 - DNA, 25 bp, Homo sapien
gcacaagagcatttaattagcaagc

SEQ ID NO: 4792130 - DNA, 25 bp, Homo sapien
tgatctctgcttcggtgacatcaca

SEQ ID NO: 4792131 - DNA, 25 bp, Homo sapien
aaggcgaacagggaggtctatctcg

SEQ ID NO: 4792132 - DNA, 25 bp, Homo sapien
gtagacctaatgatatgatctctgc

SEQ ID NO: 4792133 - DNA, 25 bp, Homo sapien
ttttcgaagatggagaacacgggaa

SEQ ID NO: 4792134 - DNA, 25 bp, Homo sapien
tgtttgagaaaatgcgaataccgaa

SEQ ID NO: 4792135 - DNA, 25 bp, Homo sapien
aagttacccaagctcccattcgtgc

SEQ ID NO: 4792136 - DNA, 25 bp, Homo sapien
caaccagcataaggagttacaggac

SEQ ID NO: 4792137 - DNA, 25 bp, Homo sapien
cgtgctgcactatcaaataaagacc

SEQ ID NO: 4792138 - DNA, 25 bp, Homo sapien
gaatcaataagactaggcatccttg

SEQ ID NO: 4792139 - DNA, 25 bp, Homo sapien
ccttgcctcgttcttgatattaggg

SEQ ID NO: 4792140 - DNA, 25 bp, Homo sapien
taatgctaagctgtagtttcatacc

SEQ ID NO: 4792141 - DNA, 25 bp, Homo sapien
tctccagatctcttaaggtgagcag

SEQ ID NO: 4792142 - DNA, 25 bp, Homo sapien
ttttaggacccggatacagcctgcc

SEQ ID NO: 4792143 - DNA, 25 bp, Homo sapien
taagaacaactctagtggaacccca

SEQ ID NO: 4792144 - DNA, 25 bp, Homo sapien
tatgtaagcgattggcagttcctcc

SEQ ID NO: 4792145 - DNA, 25 bp, Homo sapien
cgtacatatagtccctgctgaggca

SEQ ID NO: 4792146 - DNA, 25 bp, Homo sapien
ggaagtctgctgctaacaaatgctc

SEQ ID NO: 4792147 - DNA, 25 bp, Homo sapien
agtacactgtaagaaccttccaaag

SEQ ID NO: 4792148 - DNA, 25 bp, Homo sapien
tcctgtggagtagacaatatacatc

SEQ ID NO: 4792149 - DNA, 25 bp, Homo sapien
cagctcttgtgtgcctgaaagaaga

SEQ ID NO: 4792150 - DNA, 25 bp, Homo sapien
gccttcatgctggagctagttcagt

SEQ ID NO: 4792151 - DNA, 25 bp, Homo sapien
agttcagtccatgtctcctctggtg

SEQ ID NO: 4792152 - DNA, 25 bp, Homo sapien
caaagtgcacagctgataattccat

SEQ ID NO: 4792153 - DNA, 25 bp, Homo sapien
ggttcttaacatgtctggcaattgg

SEQ ID NO: 4792154 - DNA, 25 bp, Homo sapien
tagacaccatataccttagagcact

SEQ ID NO: 4792155 - DNA, 25 bp, Homo sapien
tgctaaatctgaaaatagacaccat

SEQ ID NO: 4792156 - DNA, 25 bp, Homo sapien
tccaataacctccaggatcatttgc

SEQ ID NO: 4792157 - DNA, 25 bp, Homo sapien
cagaatttgttgaacgtgatgaaaa

SEQ ID NO: 4792158 - DNA, 25 bp, Homo sapien
ttatacatacaatggtttcaaaaga

SEQ ID NO: 4792159 - DNA, 25 bp, Homo sapien
ggcatcctgcttaggaatattatta

SEQ ID NO: 4792160 - DNA, 25 bp, Homo sapien
ttaacattcagcttcataagacatc

SEQ ID NO: 4792161 - DNA, 25 bp, Homo sapien
gattacgtgattatgtgattacatc

SEQ ID NO: 4792162 - DNA, 25 bp, Homo sapien
gctaatatcaaactcaaaaccctct

SEQ ID NO: 4792163 - DNA, 25 bp, Homo sapien
tctggggacagtgcttattagagag

SEQ ID NO: 4792164 - DNA, 25 bp, Homo sapien
aatcataaactacatacgtgatggg

SEQ ID NO: 4792165 - DNA, 25 bp, Homo sapien
gcacagcaacggaaataacagagta

SEQ ID NO: 4792166 - DNA, 25 bp, Homo sapien
ctgtagaaggagtagaactattcat

SEQ ID NO: 4792167 - DNA, 25 bp, Homo sapien
aggtccgttaatgatgccagaagaa

SEQ ID NO: 4792168 - DNA, 25 bp, Homo sapien
aaaggtccgttaatgatgccagaag

SEQ ID NO: 4792169 - DNA, 25 bp, Homo sapien
ggtaaaaggtccgttaatgatgcca

SEQ ID NO: 4792170 - DNA, 25 bp, Homo sapien
taaaaggtccgttaatgatgccaga

SEQ ID NO: 4792171 - DNA, 25 bp, Homo sapien
tgctgtgaggaaccaactcttttca

SEQ ID NO: 4792172 - DNA, 25 bp, Homo sapien
tgaggaaccaactcttttcatattt

SEQ ID NO: 4792173 - DNA, 25 bp, Homo sapien
ctgtgaggaaccaactcttttcata

SEQ ID NO: 4792174 - DNA, 25 bp, Homo sapien
ctgctgtgaggaaccaactcttttc

SEQ ID NO: 4792175 - DNA, 25 bp, Homo sapien
tcactgtaatcaccttatttaagca

SEQ ID NO: 4792176 - DNA, 25 bp, Homo sapien
tattaaagtctcatttatggttaac

SEQ ID NO: 4792177 - DNA, 25 bp, Homo sapien
gcatctttacctacttatccagtta

SEQ ID NO: 4792178 - DNA, 25 bp, Homo sapien
tctgcctatgcatttgaatttttcc

SEQ ID NO: 4792179 - DNA, 25 bp, Homo sapien
gcaattttccgtaaggtttgactgc

SEQ ID NO: 4792180 - DNA, 25 bp, Homo sapien
tggaagacaatcaagcagaatgaag

SEQ ID NO: 4792181 - DNA, 25 bp, Homo sapien
tgataacagattacggtttaaggga

SEQ ID NO: 4792182 - DNA, 25 bp, Homo sapien
ctggccaatgttaaacctactcctt

SEQ ID NO: 4792183 - DNA, 25 bp, Homo sapien
tactgactgacccatttgaatgaga

SEQ ID NO: 4792184 - DNA, 25 bp, Homo sapien
ccatagcctcctgtaactataaaca

SEQ ID NO: 4792185 - DNA, 25 bp, Homo sapien
taaacacatctaaacctaaagacat

SEQ ID NO: 4792186 - DNA, 25 bp, Homo sapien
ggtctgcattcattgcgtggcacta

SEQ ID NO: 4792187 - DNA, 25 bp, Homo sapien
tcaaataggacagcaaggtacgact

SEQ ID NO: 4792188 - DNA, 25 bp, Homo sapien
tgtaggtagaggaaacaaaatgcct

SEQ ID NO: 4792189 - DNA, 25 bp, Homo sapien
gcccttaccttaatggagcttacaa

SEQ ID NO: 4792190 - DNA, 25 bp, Homo sapien
taatgcctgcaagtaattcctctaa

SEQ ID NO: 4792191 - DNA, 25 bp, Homo sapien
tcacctatacagagccaactggaga

SEQ ID NO: 4792192 - DNA, 25 bp, Homo sapien
ttttatacatgcaggcagacttcac

SEQ ID NO: 4792193 - DNA, 25 bp, Homo sapien
tgaactgcccgagtccaaatgagga

SEQ ID NO: 4792194 - DNA, 25 bp, Homo sapien
ggacaactgtactctgaaacagatt

SEQ ID NO: 4792195 - DNA, 25 bp, Homo sapien
actgtatcacagtaatgaatgggaa

SEQ ID NO: 4792196 - DNA, 25 bp, Homo sapien
taggatcgtgcctgtgagtagccac

SEQ ID NO: 4792197 - DNA, 25 bp, Homo sapien
gcatcttccaacaaatcattgatta

SEQ ID NO: 4792198 - DNA, 25 bp, Homo sapien
acaacaacaattcactgagcgtggt

SEQ ID NO: 4792199 - DNA, 25 bp, Homo sapien
aaggatatacgagttctttgtactc

SEQ ID NO: 4792200 - DNA, 25 bp, Homo sapien
tgtgcgtttacatctatagaaagac

SEQ ID NO: 4792201 - DNA, 25 bp, Homo sapien
ggtgcaaatatgaactgggtaaagg

SEQ ID NO: 4792202 - DNA, 25 bp, Homo sapien
gaaattcaccacattagtacactaa

SEQ ID NO: 4792203 - DNA, 25 bp, Homo sapien
gaaacctggacatggcttagctagg

SEQ ID NO: 4792204 - DNA, 25 bp, Homo sapien
tctggagagtctatcacagaccgga

SEQ ID NO: 4792205 - DNA, 25 bp, Homo sapien
tattcaccattgtgagcaggcagct

SEQ ID NO: 4792206 - DNA, 25 bp, Homo sapien
tgggcctgtccataagataacttac

SEQ ID NO: 4792207 - DNA, 25 bp, Homo sapien
acacccagcgtgttgtcagtttggc

SEQ ID NO: 4792208 - DNA, 25 bp, Homo sapien
ggaggcttgcctaaatacgcccaca

SEQ ID NO: 4792209 - DNA, 25 bp, Homo sapien
taagagtcaagagacggcaaaatgc

SEQ ID NO: 4792210 - DNA, 25 bp, Homo sapien
agctgatcagagtgtaaggtggtac

SEQ ID NO: 4792211 - DNA, 25 bp, Homo sapien
ggtaaaactggacaagcacggtggc

SEQ ID NO: 4792212 - DNA, 25 bp, Homo sapien
accaggaattcacgccttaggctag

SEQ ID NO: 4792213 - DNA, 25 bp, Homo sapien
tgaactaagaagcaaaaacccctgc

SEQ ID NO: 4792214 - DNA, 25 bp, Homo sapien
tgagagctcccctttcgcttaataa

SEQ ID NO: 4792215 - DNA, 25 bp, Homo sapien
cagatggacccaaagtggtggaaca

SEQ ID NO: 4792216 - DNA, 25 bp, Homo sapien
tgaacaccactgtcaggtccaacaa

SEQ ID NO: 4792217 - DNA, 25 bp, Homo sapien
tgaactgtaagtggcttctagaact

SEQ ID NO: 4792218 - DNA, 25 bp, Homo sapien
taaaagcaggtagtcagaaagccaa

SEQ ID NO: 4792219 - DNA, 25 bp, Homo sapien
ctttaaaccgactgttataagatct

SEQ ID NO: 4792220 - DNA, 25 bp, Homo sapien
gactgttataagatctgtaacaaca

SEQ ID NO: 4792221 - DNA, 25 bp, Homo sapien
taaaccgactgttataagatctgta

SEQ ID NO: 4792222 - DNA, 25 bp, Homo sapien
aaccgactgttataagatctgtaac

SEQ ID NO: 4792223 - DNA, 25 bp, Homo sapien
gtataactgccttgcatattcaaac

SEQ ID NO: 4792224 - DNA, 25 bp, Homo sapien
ttccagtcagtatctgtataactgc

SEQ ID NO: 4792225 - DNA, 25 bp, Homo sapien
tcagtatctgtataactgccttgca

SEQ ID NO: 4792226 - DNA, 25 bp, Homo sapien
ttgcatattcaaaccaataaaccca

SEQ ID NO: 4792227 - DNA, 25 bp, Homo sapien
attcattaagtttcttggggagaga

SEQ ID NO: 4792228 - DNA, 25 bp, Homo sapien
acgtatctcacagcacaagtcggga

SEQ ID NO: 4792229 - DNA, 25 bp, Homo sapien
tgggaccatggcttgcgaccaggtc

SEQ ID NO: 4792230 - DNA, 25 bp, Homo sapien
gcccagacgtgtaccgacgcgtgca

SEQ ID NO: 4792231 - DNA, 25 bp, Homo sapien
ggtgtcgagaaagcgttaacgtatc

SEQ ID NO: 4792232 - DNA, 25 bp, Homo sapien
gcggcggcagcagggcggttccggg

SEQ ID NO: 4792233 - DNA, 25 bp, Homo sapien
ttccggggacaagcgagctttggct

SEQ ID NO: 4792234 - DNA, 25 bp, Homo sapien
ctaaccgcgagcagaggaagcaggc

SEQ ID NO: 4792235 - DNA, 25 bp, Homo sapien
acagagcagggactgacgggctaac

SEQ ID NO: 4792236 - DNA, 25 bp, Homo sapien
cggccggtccgaggtggaaggagag

SEQ ID NO: 4792237 - DNA, 25 bp, Homo sapien
ccccgtggcttcgtcatttgaaaag

SEQ ID NO: 4792238 - DNA, 25 bp, Homo sapien
tttgctcacagtttcacaaccagga

SEQ ID NO: 4792239 - DNA, 25 bp, Homo sapien
tataacgagtgacaacacgcttgct

SEQ ID NO: 4792240 - DNA, 25 bp, Homo sapien
accaggaaacgtttgcaccagagcc

SEQ ID NO: 4792241 - DNA, 25 bp, Homo sapien
ttctgatgagagacaccacccccat

SEQ ID NO: 4792242 - DNA, 25 bp, Homo sapien
tttctgatgagagacaccaccccca

SEQ ID NO: 4792243 - DNA, 25 bp, Homo sapien
tatggaatgtccttcaagtggaact

SEQ ID NO: 4792244 - DNA, 25 bp, Homo sapien
tttgacatacccctcatcaatgtgg

SEQ ID NO: 4792245 - DNA, 25 bp, Homo sapien
cagttgacctatgtgctcctttgac

SEQ ID NO: 4792246 - DNA, 25 bp, Homo sapien
cattgacgtcatatcaagggtccta

SEQ ID NO: 4792247 - DNA, 25 bp, Homo sapien
ttttccgtggtgcacctaggtccca

SEQ ID NO: 4792248 - DNA, 25 bp, Homo sapien
tggtcaacggttgcaggtctgcctt

SEQ ID NO: 4792249 - DNA, 25 bp, Homo sapien
gcacggagtgactatttggaggaaa

SEQ ID NO: 4792250 - DNA, 25 bp, Homo sapien
caattttcagtcatgggtcagcaaa

SEQ ID NO: 4792251 - DNA, 25 bp, Homo sapien
tctatttgtctacagatatttgaag

SEQ ID NO: 4792252 - DNA, 25 bp, Homo sapien
ccctgacctgaagttagccttctgt

SEQ ID NO: 4792253 - DNA, 25 bp, Homo sapien
ctgtcttggcattctatttgtctac

SEQ ID NO: 4792254 - DNA, 25 bp, Homo sapien
tctgtgctaatagagttgatttact

SEQ ID NO: 4792255 - DNA, 25 bp, Homo sapien
acccagcctgccaatagtgttcttt

SEQ ID NO: 4792256 - DNA, 25 bp, Homo sapien
tgccaatagtgttctttatagcaat

SEQ ID NO: 4792257 - DNA, 25 bp, Homo sapien
ggaaccagttcaggattatgtgttg

SEQ ID NO: 4792258 - DNA, 25 bp, Homo sapien
cagttcaggattatgtgttgcgttg

SEQ ID NO: 4792259 - DNA, 25 bp, Homo sapien
ggtgtaaacaactggagcaattttg

SEQ ID NO: 4792260 - DNA, 25 bp, Homo sapien
gagtagataccatgccactgtcctc

SEQ ID NO: 4792261 - DNA, 25 bp, Homo sapien
gagcaattttgcctccagaggacat

SEQ ID NO: 4792262 - DNA, 25 bp, Homo sapien
aaaactggaagagttggagatagat

SEQ ID NO: 4792263 - DNA, 25 bp, Homo sapien
ggttgcacctgagcaacaaagtaag

SEQ ID NO: 4792264 - DNA, 25 bp, Homo sapien
gagccatggttgcacctgagcaaca

SEQ ID NO: 4792265 - DNA, 25 bp, Homo sapien
tcatgtgcttgttgccattagtata

SEQ ID NO: 4792266 - DNA, 25 bp, Homo sapien
catttccctaagtaatgctattgag

SEQ ID NO: 4792267 - DNA, 25 bp, Homo sapien
agtactgagagtttccacatactcc

SEQ ID NO: 4792268 - DNA, 25 bp, Homo sapien
tagaagagtgctagattcacagaaa

SEQ ID NO: 4792269 - DNA, 25 bp, Homo sapien
ccaaaatccatagggttcactctgt

SEQ ID NO: 4792270 - DNA, 25 bp, Homo sapien
taacagccccagttggtatggtaaa

SEQ ID NO: 4792271 - DNA, 25 bp, Homo sapien
tagcttgagcctaggcgtctaaggc

SEQ ID NO: 4792272 - DNA, 25 bp, Homo sapien
aaagccctagttatttgcaaagcag

SEQ ID NO: 4792273 - DNA, 25 bp, Homo sapien
aagagcatactaaccttttataagt

SEQ ID NO: 4792274 - DNA, 25 bp, Homo sapien
aaaactataagcctgtagaaccagc

SEQ ID NO: 4792275 - DNA, 25 bp, Homo sapien
cactctttcgctttgtctgctgcca

SEQ ID NO: 4792276 - DNA, 25 bp, Homo sapien
gtttccttgcacacactctttcgct

SEQ ID NO: 4792277 - DNA, 25 bp, Homo sapien
tgacttgctccgtcttgccttcctt

SEQ ID NO: 4792278 - DNA, 25 bp, Homo sapien
gtgactttggaaccggtaatagaca

SEQ ID NO: 4792279 - DNA, 25 bp, Homo sapien
catcctccaggtcctagaatgacag

SEQ ID NO: 4792280 - DNA, 25 bp, Homo sapien
tgggagggcgtctgtaccctgcaaa

SEQ ID NO: 4792281 - DNA, 25 bp, Homo sapien
ctgggagggcgtctgtaccctgcaa

SEQ ID NO: 4792282 - DNA, 25 bp, Homo sapien
ggtcctagaatgacagacccactga

SEQ ID NO: 4792283 - DNA, 25 bp, Homo sapien
tactatgttgtgtgactactacctc

SEQ ID NO: 4792284 - DNA, 25 bp, Homo sapien
taatgctgccgtgaacatatacgta

SEQ ID NO: 4792285 - DNA, 25 bp, Homo sapien
ttaagcagttactctctattgcccc

SEQ ID NO: 4792286 - DNA, 25 bp, Homo sapien
aaaacgaggtggaattcacatatga

SEQ ID NO: 4792287 - DNA, 25 bp, Homo sapien
tgctagtggatcattgggcgttacg

SEQ ID NO: 4792288 - DNA, 25 bp, Homo sapien
cattgtgtacaagataggcaaaccc

SEQ ID NO: 4792289 - DNA, 25 bp, Homo sapien
tggtaacactgagatgccctaatgg

SEQ ID NO: 4792290 - DNA, 25 bp, Homo sapien
gataatccgggtcaatcacaccagg

SEQ ID NO: 4792291 - DNA, 25 bp, Homo sapien
gcaagaaggggataaacgcacagga

SEQ ID NO: 4792292 - DNA, 25 bp, Homo sapien
tccaagtcccgaaactgaacctgga

SEQ ID NO: 4792293 - DNA, 25 bp, Homo sapien
agaaggggataaacgcacaggagaa

SEQ ID NO: 4792294 - DNA, 25 bp, Homo sapien
caagtcccgaaactgaacctggagt

SEQ ID NO: 4792295 - DNA, 25 bp, Homo sapien
tcccaaaagcgaaactgaatgtcag

SEQ ID NO: 4792296 - DNA, 25 bp, Homo sapien
tctgttccaagaagctggcgcctta

SEQ ID NO: 4792297 - DNA, 25 bp, Homo sapien
tatctaccgatgcacaagggaaggc

SEQ ID NO: 4792298 - DNA, 25 bp, Homo sapien
tgcccagggctagcgttcctaagag

SEQ ID NO: 4792299 - DNA, 25 bp, Homo sapien
tgttagtttattacagcatctttac

SEQ ID NO: 4792300 - DNA, 25 bp, Homo sapien
cctgttagtttattacagcatcttt

SEQ ID NO: 4792301 - DNA, 25 bp, Homo sapien
ttcctgttagtttattacagcatct

SEQ ID NO: 4792302 - DNA, 25 bp, Homo sapien
aaattactttcaactgggtgaggtg

SEQ ID NO: 4792303 - DNA, 25 bp, Homo sapien
gggccggcctctagttgtttcacaa

SEQ ID NO: 4792304 - DNA, 25 bp, Homo sapien
tacattatcctcaatcagagcagtg

SEQ ID NO: 4792305 - DNA, 25 bp, Homo sapien
atttcaggcttccaactaggtcacc

SEQ ID NO: 4792306 - DNA, 25 bp, Homo sapien
ggttttagcacttccaccctgctga

SEQ ID NO: 4792307 - DNA, 25 bp, Homo sapien
tgcataacaattctgtacggaaagt

SEQ ID NO: 4792308 - DNA, 25 bp, Homo sapien
cttaagcgcagtctcttagagtagc

SEQ ID NO: 4792309 - DNA, 25 bp, Homo sapien
gcaggctctgtctcatggacagtaa

SEQ ID NO: 4792310 - DNA, 25 bp, Homo sapien
tggacagtaaagtgatctgagaagc

SEQ ID NO: 4792311 - DNA, 25 bp, Homo sapien
gaaggatcggcaggcatataagaat

SEQ ID NO: 4792312 - DNA, 25 bp, Homo sapien
aggatcggcaggcatataagaatag

SEQ ID NO: 4792313 - DNA, 25 bp, Homo sapien
ttgaaggatcggcaggcatataaga

SEQ ID NO: 4792314 - DNA, 25 bp, Homo sapien
gatcggcaggcatataagaatagat

SEQ ID NO: 4792315 - DNA, 25 bp, Homo sapien
ggcttctgggatacctgtaatatca

SEQ ID NO: 4792316 - DNA, 25 bp, Homo sapien
aaagcagtgtcatgctaagtgcaag

SEQ ID NO: 4792317 - DNA, 25 bp, Homo sapien
tactatggagtatctttatgctgtc

SEQ ID NO: 4792318 - DNA, 25 bp, Homo sapien
tggatacatctgatcactgtttctg

SEQ ID NO: 4792319 - DNA, 25 bp, Homo sapien
agctgcctctatgtgattctagaat

SEQ ID NO: 4792320 - DNA, 25 bp, Homo sapien
catccatggctttagtcactctctt

SEQ ID NO: 4792321 - DNA, 25 bp, Homo sapien
ctaaacttgctggaccctttgtgct

SEQ ID NO: 4792322 - DNA, 25 bp, Homo sapien
gcctagtcctggctgaatcaaactc

SEQ ID NO: 4792323 - DNA, 25 bp, Homo sapien
tgcttatgccatcacctgtcaaaag

SEQ ID NO: 4792324 - DNA, 25 bp, Homo sapien
tccactatgtgatagaccccgtact

SEQ ID NO: 4792325 - DNA, 25 bp, Homo sapien
cattaattccactatgtgatagacc

SEQ ID NO: 4792326 - DNA, 25 bp, Homo sapien
gtttcctcattaattccactatgtg

SEQ ID NO: 4792327 - DNA, 25 bp, Homo sapien
ctatgtgatagaccccgtactgaca

SEQ ID NO: 4792328 - DNA, 25 bp, Homo sapien
aatgtgactgttcggagatgaggcc

SEQ ID NO: 4792329 - DNA, 25 bp, Homo sapien
cataagagataccagcaatgtgtgc

SEQ ID NO: 4792330 - DNA, 25 bp, Homo sapien
gaaaagtattttgggcggacagtca

SEQ ID NO: 4792331 - DNA, 25 bp, Homo sapien
tgttgttaagccgtccactgtggga

SEQ ID NO: 4792332 - DNA, 25 bp, Homo sapien
cataccgtgaggcagcaatctctgg

SEQ ID NO: 4792333 - DNA, 25 bp, Homo sapien
ggattgagtcaagggaccttgccct

SEQ ID NO: 4792334 - DNA, 25 bp, Homo sapien
caatgagttcctctgatccatccaa

SEQ ID NO: 4792335 - DNA, 25 bp, Homo sapien
aagtgattgttagttaggttgccca

SEQ ID NO: 4792336 - DNA, 25 bp, Homo sapien
cagtgtggcctttaatccagctacc

SEQ ID NO: 4792337 - DNA, 25 bp, Homo sapien
gagtcaagataaaagtctgagtgaa

SEQ ID NO: 4792338 - DNA, 25 bp, Homo sapien
cgccatgaggttgggtcactgtgtt

SEQ ID NO: 4792339 - DNA, 25 bp, Homo sapien
tttaagttgaatcttgagtctctca

SEQ ID NO: 4792340 - DNA, 25 bp, Homo sapien
gacattcaaagtggtgaaggaaaaa

SEQ ID NO: 4792341 - DNA, 25 bp, Homo sapien
taccacatacaaaggggtgctaatg

SEQ ID NO: 4792342 - DNA, 25 bp, Homo sapien
gtgggatgacattcaaagtggtgaa

SEQ ID NO: 4792343 - DNA, 25 bp, Homo sapien
gctaatgtaactaccagcaaagttt

SEQ ID NO: 4792344 - DNA, 25 bp, Homo sapien
gctgccttaatagacctgactccaa

SEQ ID NO: 4792345 - DNA, 25 bp, Homo sapien
caagtcctagctgccttaatagacc

SEQ ID NO: 4792346 - DNA, 25 bp, Homo sapien
ttttgtatctccaggccagtaagac

SEQ ID NO: 4792347 - DNA, 25 bp, Homo sapien
taagctctagggtgcttctttctga

SEQ ID NO: 4792348 - DNA, 25 bp, Homo sapien
gctcgtggactctcaagccttggat

SEQ ID NO: 4792349 - DNA, 25 bp, Homo sapien
cagtggcagagttagtttgttcaac

SEQ ID NO: 4792350 - DNA, 25 bp, Homo sapien
gccttggatgacagggttgctctcc

SEQ ID NO: 4792351 - DNA, 25 bp, Homo sapien
caacaaggtacctcatcatggttgg

SEQ ID NO: 4792352 - DNA, 25 bp, Homo sapien
atagttcatataggtcaaatcataa

SEQ ID NO: 4792353 - DNA, 25 bp, Homo sapien
tcatataggtcaaatcataacagta

SEQ ID NO: 4792354 - DNA, 25 bp, Homo sapien
atctatgttgtagcctgtgataaga

SEQ ID NO: 4792355 - DNA, 25 bp, Homo sapien
gttcatataggtcaaatcataacag

SEQ ID NO: 4792356 - DNA, 25 bp, Homo sapien
gaacatcaaccggaatcagctctag

SEQ ID NO: 4792357 - DNA, 25 bp, Homo sapien
cactgttttgcatagtggtggtacc

SEQ ID NO: 4792358 - DNA, 25 bp, Homo sapien
ggtaccatctacattcctatcagca

SEQ ID NO: 4792359 - DNA, 25 bp, Homo sapien
tatcagcattgcataagagttccaa

SEQ ID NO: 4792360 - DNA, 25 bp, Homo sapien
gctgtacgtagtatctcggtagaaa

SEQ ID NO: 4792361 - DNA, 25 bp, Homo sapien
cagcggtgactatgggctgtacgta

SEQ ID NO: 4792362 - DNA, 25 bp, Homo sapien
cggtagaaagtgttaatgcacatcc

SEQ ID NO: 4792363 - DNA, 25 bp, Homo sapien
tctcggtagaaagtgttaatgcaca

SEQ ID NO: 4792364 - DNA, 25 bp, Homo sapien
atgcgttataagggaaatcacacac

SEQ ID NO: 4792365 - DNA, 25 bp, Homo sapien
tcaatgcgttataagggaaatcaca

SEQ ID NO: 4792366 - DNA, 25 bp, Homo sapien
aatgcgttataagggaaatcacaca

SEQ ID NO: 4792367 - DNA, 25 bp, Homo sapien
caatgcgttataagggaaatcacac

SEQ ID NO: 4792368 - DNA, 25 bp, Homo sapien
tgtacacttcctcggaccatagcgg

SEQ ID NO: 4792369 - DNA, 25 bp, Homo sapien
gggcccaggacgtgtagtagggagc

SEQ ID NO: 4792370 - DNA, 25 bp, Homo sapien
gaccgcgggcccaggacgtgtagta

SEQ ID NO: 4792371 - DNA, 25 bp, Homo sapien
agtgctgtacacttcctcggaccat

SEQ ID NO: 4792372 - DNA, 25 bp, Homo sapien
gcagtagggactgagctcgtgcgcg

SEQ ID NO: 4792373 - DNA, 25 bp, Homo sapien
tcgtgcgcgcggaggatggattgct

SEQ ID NO: 4792374 - DNA, 25 bp, Homo sapien
cgcgcggaggatggattgctccaac

SEQ ID NO: 4792375 - DNA, 25 bp, Homo sapien
tgcgcgcggaggatggattgctcca

SEQ ID NO: 4792376 - DNA, 25 bp, Homo sapien
gcagcaacgactgcgagctcggtgc

SEQ ID NO: 4792377 - DNA, 25 bp, Homo sapien
ggaggtgtcgttacacacttcctgt

SEQ ID NO: 4792378 - DNA, 25 bp, Homo sapien
gaggctcgatctacacctcctcggg

SEQ ID NO: 4792379 - DNA, 25 bp, Homo sapien
tgggtctcgccgaccacggcgcgtt

SEQ ID NO: 4792380 - DNA, 25 bp, Homo sapien
ctctcgcaggcccccccgcgccgac

SEQ ID NO: 4792381 - DNA, 25 bp, Homo sapien
ctcgcaggcccccccgcgccgaccg

SEQ ID NO: 4792382 - DNA, 25 bp, Homo sapien
cgggctgcccggctctcgcaggccc

SEQ ID NO: 4792383 - DNA, 25 bp, Homo sapien
cgcaggcccccccgcgccgaccgcg

SEQ ID NO: 4792384 - DNA, 25 bp, Homo sapien
cggggcggggacgagtgcgccgacg

SEQ ID NO: 4792385 - DNA, 25 bp, Homo sapien
gggacgagtgcgccgacgccgcgac

SEQ ID NO: 4792386 - DNA, 25 bp, Homo sapien
cgagtgcgccgacgccgcgacccag

SEQ ID NO: 4792387 - DNA, 25 bp, Homo sapien
ggtgggtgagagcccgcgcgcgggg

SEQ ID NO: 4792388 - DNA, 25 bp, Homo sapien
ttctggtaagttggtgttgaggaaa

SEQ ID NO: 4792389 - DNA, 25 bp, Homo sapien
cttgactttgcttctgattagttga

SEQ ID NO: 4792390 - DNA, 25 bp, Homo sapien
gttgatttatggactttatttacta

SEQ ID NO: 4792391 - DNA, 25 bp, Homo sapien
gcttctgattagttgatttatggac

SEQ ID NO: 4792392 - DNA, 25 bp, Homo sapien
tacttcttgactttgcttctgatta

SEQ ID NO: 4792393 - DNA, 25 bp, Homo sapien
cctcttaggttcttgtggtctcgcg

SEQ ID NO: 4792394 - DNA, 25 bp, Homo sapien
gcctgcatgtatagaaagtcctcaa

SEQ ID NO: 4792395 - DNA, 25 bp, Homo sapien
gctacccttgggagagtattgatga

SEQ ID NO: 4792396 - DNA, 25 bp, Homo sapien
aatgtggcttcttgatgtgacctcc

SEQ ID NO: 4792397 - DNA, 25 bp, Homo sapien
tggttcattacctttgtgggcagct

SEQ ID NO: 4792398 - DNA, 25 bp, Homo sapien
ataaccatctgagtgctaaaggaag

SEQ ID NO: 4792399 - DNA, 25 bp, Homo sapien
gagaccttgtaagatcagttataag

SEQ ID NO: 4792400 - DNA, 25 bp, Homo sapien
tttgctcctaagatctttgcacaag

SEQ ID NO: 4792401 - DNA, 25 bp, Homo sapien
cccagctgcagatacgaagcggagc

SEQ ID NO: 4792402 - DNA, 25 bp, Homo sapien
tgcagatacgaagcggagccgctgc

SEQ ID NO: 4792403 - DNA, 25 bp, Homo sapien
gggccccagctgcagatacgaagcg

SEQ ID NO: 4792404 - DNA, 25 bp, Homo sapien
ctgcagatacgaagcggagccgctg

SEQ ID NO: 4792405 - DNA, 25 bp, Homo sapien
tgtagaagatgcctaaagtttgttt

SEQ ID NO: 4792406 - DNA, 25 bp, Homo sapien
tatttgctgtgctattgcatctagc

SEQ ID NO: 4792407 - DNA, 25 bp, Homo sapien
gaaatgtctgtcatggaactatcta

SEQ ID NO: 4792408 - DNA, 25 bp, Homo sapien
aaagtcaatacccatgtccaattta

SEQ ID NO: 4792409 - DNA, 25 bp, Homo sapien
ttgacccctgcgtggacccaagatg

SEQ ID NO: 4792410 - DNA, 25 bp, Homo sapien
tgtctagcagtagacagaacctgtg

SEQ ID NO: 4792411 - DNA, 25 bp, Homo sapien
acccaagatggttgtgctgctggtt

SEQ ID NO: 4792412 - DNA, 25 bp, Homo sapien
cagtcacccctaaatcacgcatagg

SEQ ID NO: 4792413 - DNA, 25 bp, Homo sapien
aagtgaaccttggaactgatctttg

SEQ ID NO: 4792414 - DNA, 25 bp, Homo sapien
ttctttcccagatataggaagtcat

SEQ ID NO: 4792415 - DNA, 25 bp, Homo sapien
gacatctctgaagacctaagctatg

SEQ ID NO: 4792416 - DNA, 25 bp, Homo sapien
gaagacctaagctatgtctcaggac

SEQ ID NO: 4792417 - DNA, 25 bp, Homo sapien
ttcagcagctcagggaaacatagac

SEQ ID NO: 4792418 - DNA, 25 bp, Homo sapien
ggtcttactcgccatccacacgtgg

SEQ ID NO: 4792419 - DNA, 25 bp, Homo sapien
aggctgtgcatgtgatgtcacagtg

SEQ ID NO: 4792420 - DNA, 25 bp, Homo sapien
ggctgtgcatgtgatgtcacagtgt

SEQ ID NO: 4792421 - DNA, 25 bp, Homo sapien
tgaaaggctgtgcatgtgatgtcac

SEQ ID NO: 4792422 - DNA, 25 bp, Homo sapien
gacctttctagcttggtatccattc

SEQ ID NO: 4792423 - DNA, 25 bp, Homo sapien
ggaaccacttcagaactgaagaggt

SEQ ID NO: 4792424 - DNA, 25 bp, Homo sapien
gaggtgttgacctttctagcttggt

SEQ ID NO: 4792425 - DNA, 25 bp, Homo sapien
taagactgcgaggatgccaggaacc

SEQ ID NO: 4792426 - DNA, 25 bp, Homo sapien
cctgagcccggagcctttccatagt

SEQ ID NO: 4792427 - DNA, 25 bp, Homo sapien
agttgtccctgagcccggagccttt

SEQ ID NO: 4792428 - DNA, 25 bp, Homo sapien
tccatagttccaacagatgactggc

SEQ ID NO: 4792429 - DNA, 25 bp, Homo sapien
gactggcttccaccttggatgcagc

SEQ ID NO: 4792430 - DNA, 25 bp, Homo sapien
gaagttctacctctgtccattggcc

SEQ ID NO: 4792431 - DNA, 25 bp, Homo sapien
gctgtagacatttgcccctccgtga

SEQ ID NO: 4792432 - DNA, 25 bp, Homo sapien
gaagagcctttttacaccaacatgc

SEQ ID NO: 4792433 - DNA, 25 bp, Homo sapien
ccctccgtgaggtgataaagcaata

SEQ ID NO: 4792434 - DNA, 25 bp, Homo sapien
tagtcactataatttaaggccaggc

SEQ ID NO: 4792435 - DNA, 25 bp, Homo sapien
cgcacgtgtgcctgtttcactcaaa

SEQ ID NO: 4792436 - DNA, 25 bp, Homo sapien
gattaacatgaaaaacgcacgtgtg

SEQ ID NO: 4792437 - DNA, 25 bp, Homo sapien
gatttgctaggttaatgccatggtc

SEQ ID NO: 4792438 - DNA, 25 bp, Homo sapien
taaagacccagtcataaatgaaatg

SEQ ID NO: 4792439 - DNA, 25 bp, Homo sapien
taacccatggttacatagtgccaat

SEQ ID NO: 4792440 - DNA, 25 bp, Homo sapien
caatcatgtatttcgggacttctgg

SEQ ID NO: 4792441 - DNA, 25 bp, Homo sapien
cgggacttctggtatgtgttaaaga

SEQ ID NO: 4792442 - DNA, 25 bp, Homo sapien
gtaggaaccccatctcggctgtcaa

SEQ ID NO: 4792443 - DNA, 25 bp, Homo sapien
gataaaagattcacgcaccagaagg

SEQ ID NO: 4792444 - DNA, 25 bp, Homo sapien
ggacacgatgatttaggcaccccac

SEQ ID NO: 4792445 - DNA, 25 bp, Homo sapien
gaaaacctcctgaagcagaagtgcc

SEQ ID NO: 4792446 - DNA, 25 bp, Homo sapien
catagtcattaggagaatctggaca

SEQ ID NO: 4792447 - DNA, 25 bp, Homo sapien
gataactggactcagagctacttca

SEQ ID NO: 4792448 - DNA, 25 bp, Homo sapien
gaagcatcttgctgtacttgaaaga

SEQ ID NO: 4792449 - DNA, 25 bp, Homo sapien
tactcttgtagaaacggaagcatct

SEQ ID NO: 4792450 - DNA, 25 bp, Homo sapien
gatgttattgtaccgtctccagctt

SEQ ID NO: 4792451 - DNA, 25 bp, Homo sapien
tcattctgaacgatgtaggaagcgg

SEQ ID NO: 4792452 - DNA, 25 bp, Homo sapien
ccagatggtcgcacctgtgcataca

SEQ ID NO: 4792453 - DNA, 25 bp, Homo sapien
taggaagcggtcagtaacgtgaatg

SEQ ID NO: 4792454 - DNA, 25 bp, Homo sapien
gtgggtgtcactcctattttctgtc

SEQ ID NO: 4792455 - DNA, 25 bp, Homo sapien
gagtgggaaagtgggtgtcactcct

SEQ ID NO: 4792456 - DNA, 25 bp, Homo sapien
gaaagtgggtgtcactcctattttc

SEQ ID NO: 4792457 - DNA, 25 bp, Homo sapien
tgggaaagtgggtgtcactcctatt

SEQ ID NO: 4792458 - DNA, 25 bp, Homo sapien
tacagtgtactcagctgctgaagtg

SEQ ID NO: 4792459 - DNA, 25 bp, Homo sapien
ctaatatacttaactatggcaatca

SEQ ID NO: 4792460 - DNA, 25 bp, Homo sapien
caaggaagtaatttagcacgtttct

SEQ ID NO: 4792461 - DNA, 25 bp, Homo sapien
cctgctggggtatttacagtgtact

SEQ ID NO: 4792462 - DNA, 25 bp, Homo sapien
aagggtagggatatacagtttcagc

SEQ ID NO: 4792463 - DNA, 25 bp, Homo sapien
cctgagaggaggagcgtattgttca

SEQ ID NO: 4792464 - DNA, 25 bp, Homo sapien
tattgttcagcccacaccaaggtgg

SEQ ID NO: 4792465 - DNA, 25 bp, Homo sapien
cagccttgaggtgcagaggatgtca

SEQ ID NO: 4792466 - DNA, 25 bp, Homo sapien
gggaaggagcgtggccaatacaaat

SEQ ID NO: 4792467 - DNA, 25 bp, Homo sapien
cggagcatgtaaggcccattcctgt

SEQ ID NO: 4792468 - DNA, 25 bp, Homo sapien
cactgtggcaataaggaatgaccct

SEQ ID NO: 4792469 - DNA, 25 bp, Homo sapien
ttcccctgaaggacaccggctgttg

SEQ ID NO: 4792470 - DNA, 25 bp, Homo sapien
tgtaccaagctagaggtctggcgca

SEQ ID NO: 4792471 - DNA, 25 bp, Homo sapien
gtctggcgcaccctggaattccaga

SEQ ID NO: 4792472 - DNA, 25 bp, Homo sapien
ctggaatggatctaacctccggtta

SEQ ID NO: 4792473 - DNA, 25 bp, Homo sapien
aaatgttcaatgtctccccgctgtg

SEQ ID NO: 4792474 - DNA, 25 bp, Homo sapien
ccgaagtgaagcaaataactgagac

SEQ ID NO: 4792475 - DNA, 25 bp, Homo sapien
gctgaggttctgttgccgaagtgaa

SEQ ID NO: 4792476 - DNA, 25 bp, Homo sapien
taaacacatgtaaaggctgaggttc

SEQ ID NO: 4792477 - DNA, 25 bp, Homo sapien
tgcctcaagaggctttaaacacatg

SEQ ID NO: 4792478 - DNA, 25 bp, Homo sapien
agcaatgctgacctccacctgaggg

SEQ ID NO: 4792479 - DNA, 25 bp, Homo sapien
gaatattcatgaggcaaaaccacct

SEQ ID NO: 4792480 - DNA, 25 bp, Homo sapien
cagtaatgggttgaggcttttgcac

SEQ ID NO: 4792481 - DNA, 25 bp, Homo sapien
caaaataagtaagccagatgcagtg

SEQ ID NO: 4792482 - DNA, 25 bp, Homo sapien
ttttacgctaccaccagagaggatg

SEQ ID NO: 4792483 - DNA, 25 bp, Homo sapien
gaataggatcctctgcacggtgacc

SEQ ID NO: 4792484 - DNA, 25 bp, Homo sapien
taaggctatcctcgctgcaatggtg

SEQ ID NO: 4792485 - DNA, 25 bp, Homo sapien
tctgcgccgcagaagtaaggctatc

SEQ ID NO: 4792486 - DNA, 25 bp, Homo sapien
tttttaattgcatctagtcacaaca

SEQ ID NO: 4792487 - DNA, 25 bp, Homo sapien
tgcatctagtcacaacatttataag

SEQ ID NO: 4792488 - DNA, 25 bp, Homo sapien
gtcacaacatttataagagcatatg

SEQ ID NO: 4792489 - DNA, 25 bp, Homo sapien
tctagtcacaacatttataagagca

SEQ ID NO: 4792490 - DNA, 25 bp, Homo sapien
taaacgcaaaaggtatactgatagc

SEQ ID NO: 4792491 - DNA, 25 bp, Homo sapien
tcagtcaaacttgctaggagttggg

SEQ ID NO: 4792492 - DNA, 25 bp, Homo sapien
gggaatgacttcgtgaccatccagt

SEQ ID NO: 4792493 - DNA, 25 bp, Homo sapien
tcaattccttggacgatacagcttc

SEQ ID NO: 4792494 - DNA, 25 bp, Homo sapien
tgggtcaaggcgaggtaaaacagga

SEQ ID NO: 4792495 - DNA, 25 bp, Homo sapien
tgctgcactggtccttcaaatcctc

SEQ ID NO: 4792496 - DNA, 25 bp, Homo sapien
agatactttcattactgctgcactg

SEQ ID NO: 4792497 - DNA, 25 bp, Homo sapien
tcttgtgcacaagcaatcccttggc

SEQ ID NO: 4792498 - DNA, 25 bp, Homo sapien
tgaccgagtcaacaccataaaagat

SEQ ID NO: 4792499 - DNA, 25 bp, Homo sapien
ttctgttgggctgcaatatgctgct

SEQ ID NO: 4792500 - DNA, 25 bp, Homo sapien
tgatcccggaagtccttattaagag

SEQ ID NO: 4792501 - DNA, 25 bp, Homo sapien
tgctgctgctcagcgtgatcccgga

SEQ ID NO: 4792502 - DNA, 25 bp, Homo sapien
taagagagggtctcgagagtgcaat

SEQ ID NO: 4792503 - DNA, 25 bp, Homo sapien
agacagtcttactatatcatccagg

SEQ ID NO: 4792504 - DNA, 25 bp, Homo sapien
tagacagtcttactatatcatccag

SEQ ID NO: 4792505 - DNA, 25 bp, Homo sapien
agatactaaatatggcagagactga

SEQ ID NO: 4792506 - DNA, 25 bp, Homo sapien
catgcccggcaataatggatctgag

SEQ ID NO: 4792507 - DNA, 25 bp, Homo sapien
ggcctactttgcagaatgattaaaa

SEQ ID NO: 4792508 - DNA, 25 bp, Homo sapien
gatcatcaagctacctaaatttggc

SEQ ID NO: 4792509 - DNA, 25 bp, Homo sapien
cctaaagataggatagaacttctcc

SEQ ID NO: 4792510 - DNA, 25 bp, Homo sapien
gactcttagcctagggacagcagca

SEQ ID NO: 4792511 - DNA, 25 bp, Homo sapien
tgaagggaactagaatatgtcacct

SEQ ID NO: 4792512 - DNA, 25 bp, Homo sapien
gaggactctgccaacaagccttact

SEQ ID NO: 4792513 - DNA, 25 bp, Homo sapien
taaaaaccacattacaggccaggca

SEQ ID NO: 4792514 - DNA, 25 bp, Homo sapien
tataaaaaccacattacaggccagg

SEQ ID NO: 4792515 - DNA, 25 bp, Homo sapien
aaaaacccacattatagtgtcaata

SEQ ID NO: 4792516 - DNA, 25 bp, Homo sapien
aaaacccacattatagtgtcaatac

SEQ ID NO: 4792517 - DNA, 25 bp, Homo sapien
gaagactggttctgcataagtagtt

SEQ ID NO: 4792518 - DNA, 25 bp, Homo sapien
gactggttctgcataagtagttttc

SEQ ID NO: 4792519 - DNA, 25 bp, Homo sapien
ctggttctgcataagtagttttctt

SEQ ID NO: 4792520 - DNA, 25 bp, Homo sapien
gttgaagactggttctgcataagta

SEQ ID NO: 4792521 - DNA, 25 bp, Homo sapien
taggttgtcacctatgcctctgact

SEQ ID NO: 4792522 - DNA, 25 bp, Homo sapien
gggccccacaagctgaggctcagtt

SEQ ID NO: 4792523 - DNA, 25 bp, Homo sapien
cccatgactcactccttggatttgg

SEQ ID NO: 4792524 - DNA, 25 bp, Homo sapien
ttcagacgccaatggcaagtaggca

SEQ ID NO: 4792525 - DNA, 25 bp, Homo sapien
tcgcttgagcccatgaagtagaggc

SEQ ID NO: 4792526 - DNA, 25 bp, Homo sapien
cgcttgagcccatgaagtagaggct

SEQ ID NO: 4792527 - DNA, 25 bp, Homo sapien
agcccatgaagtagaggctgccgtg

SEQ ID NO: 4792528 - DNA, 25 bp, Homo sapien
ttgagcccatgaagtagaggctgcc

SEQ ID NO: 4792529 - DNA, 25 bp, Homo sapien
gtggaatgagctatgatgggccact

SEQ ID NO: 4792530 - DNA, 25 bp, Homo sapien
acttgggctcagtggaatgagctat

SEQ ID NO: 4792531 - DNA, 25 bp, Homo sapien
ctcagtggaatgagctatgatgggc

SEQ ID NO: 4792532 - DNA, 25 bp, Homo sapien
tgggctcagtggaatgagctatgat

SEQ ID NO: 4792533 - DNA, 25 bp, Homo sapien
taatcctagtgctttgggaagttga

SEQ ID NO: 4792534 - DNA, 25 bp, Homo sapien
gtaatcctagtgctttgggaagttg

SEQ ID NO: 4792535 - DNA, 25 bp, Homo sapien
tgtaatcctagtgctttgggaagtt

SEQ ID NO: 4792536 - DNA, 25 bp, Homo sapien
aatcctagtgctttgggaagttgag

SEQ ID NO: 4792537 - DNA, 25 bp, Homo sapien
cctctcattttacttggccaagaac

SEQ ID NO: 4792538 - DNA, 25 bp, Homo sapien
gaagaatattcaattgctctggttt

SEQ ID NO: 4792539 - DNA, 25 bp, Homo sapien
catttctgaactaggttgagcttta

SEQ ID NO: 4792540 - DNA, 25 bp, Homo sapien
tactgcaagatatcagaagaatatt

SEQ ID NO: 4792541 - DNA, 25 bp, Homo sapien
cttgtcctgaagagtttgctgccat

SEQ ID NO: 4792542 - DNA, 25 bp, Homo sapien
tatgtccagtggcaattggtcagca

SEQ ID NO: 4792543 - DNA, 25 bp, Homo sapien
ccgggaccgcctctccttacaatcg

SEQ ID NO: 4792544 - DNA, 25 bp, Homo sapien
ggaccgcctctccttacaatcgctg

SEQ ID NO: 4792545 - DNA, 25 bp, Homo sapien
caccgggaccgcctctccttacaat

SEQ ID NO: 4792546 - DNA, 25 bp, Homo sapien
accgcctctccttacaatcgctgct

SEQ ID NO: 4792547 - DNA, 25 bp, Homo sapien
taggcaagaggagctcaactcgcgg

SEQ ID NO: 4792548 - DNA, 25 bp, Homo sapien
ttaggcaagaggagctcaactcgcg

SEQ ID NO: 4792549 - DNA, 25 bp, Homo sapien
ggcaagaggagctcaactcgcggca

SEQ ID NO: 4792550 - DNA, 25 bp, Homo sapien
cttaggcaagaggagctcaactcgc

SEQ ID NO: 4792551 - DNA, 25 bp, Homo sapien
cactttagcggccacctcagtgcag

SEQ ID NO: 4792552 - DNA, 25 bp, Homo sapien
gcttccgcctcctgactgacgtgcg

SEQ ID NO: 4792553 - DNA, 25 bp, Homo sapien
accgcccgtcgtgattcgcacttta

SEQ ID NO: 4792554 - DNA, 25 bp, Homo sapien
tcgtgattcgcactttagcggccac

SEQ ID NO: 4792555 - DNA, 25 bp, Homo sapien
cttctacaatgcgaggtgcttcctg

SEQ ID NO: 4792556 - DNA, 25 bp, Homo sapien
tgccagatgctaaggcctgagttct

SEQ ID NO: 4792557 - DNA, 25 bp, Homo sapien
tctataccaagcagctattgagtgc

SEQ ID NO: 4792558 - DNA, 25 bp, Homo sapien
tcaaatttaaagatctgccagatgc

SEQ ID NO: 4792559 - DNA, 25 bp, Homo sapien
tacaggatgttaacaacggagacac

SEQ ID NO: 4792560 - DNA, 25 bp, Homo sapien
tatctatgccaagaaagcatcctgc

SEQ ID NO: 4792561 - DNA, 25 bp, Homo sapien
taaggagtacgcaaaaactctgtac

SEQ ID NO: 4792562 - DNA, 25 bp, Homo sapien
cctgcctccggaaacaaagaattgg

SEQ ID NO: 4792563 - DNA, 25 bp, Homo sapien
gaggataagcggctaacacaaacat

SEQ ID NO: 4792564 - DNA, 25 bp, Homo sapien
cagccgtccacttcagaagtggtgg

SEQ ID NO: 4792565 - DNA, 25 bp, Homo sapien
ggcttgggatgccatatagaataaa

SEQ ID NO: 4792566 - DNA, 25 bp, Homo sapien
aaccaccagaggataagcggctaac

SEQ ID NO: 4792567 - DNA, 25 bp, Homo sapien
ccagcactttgctaggactatgaca

SEQ ID NO: 4792568 - DNA, 25 bp, Homo sapien
tcccctggtgtactaaagagaaagc

SEQ ID NO: 4792569 - DNA, 25 bp, Homo sapien
tgctcatggtcacccacttgtagtg

SEQ ID NO: 4792570 - DNA, 25 bp, Homo sapien
tatagagtcttaatccatacggatg

SEQ ID NO: 4792571 - DNA, 25 bp, Homo sapien
caaaagtctcttcggccaaagtgtg

SEQ ID NO: 4792572 - DNA, 25 bp, Homo sapien
taacaccttgactatttgcaccacg

SEQ ID NO: 4792573 - DNA, 25 bp, Homo sapien
ccttggaaacagaagatctagggac

SEQ ID NO: 4792574 - DNA, 25 bp, Homo sapien
tatgctattcttccgatatgggtcg

SEQ ID NO: 4792575 - DNA, 25 bp, Homo sapien
tgctggtgggcgcatcagtaaacgc

SEQ ID NO: 4792576 - DNA, 25 bp, Homo sapien
tccacctctgatttccgttagacat

SEQ ID NO: 4792577 - DNA, 25 bp, Homo sapien
tttccgttagacatttgctccgcac

SEQ ID NO: 4792578 - DNA, 25 bp, Homo sapien
agccccaagcgtggctgctggtggg

SEQ ID NO: 4792579 - DNA, 25 bp, Homo sapien
ggtgctcggggagctcgccgcggcg

SEQ ID NO: 4792580 - DNA, 25 bp, Homo sapien
ccactccctgcgcgacatgccgcac

SEQ ID NO: 4792581 - DNA, 25 bp, Homo sapien
gtcccgagcggtgcgcgccatggcg

SEQ ID NO: 4792582 - DNA, 25 bp, Homo sapien
ggcggcgcgtcccgagcggtgcgcg

SEQ ID NO: 4792583 - DNA, 25 bp, Homo sapien
tcgcaagcaccggtgacagctggtg

SEQ ID NO: 4792584 - DNA, 25 bp, Homo sapien
gtggtgacagcacgcccagcccgga

SEQ ID NO: 4792585 - DNA, 25 bp, Homo sapien
gctgcataacttgtagctcctccag

SEQ ID NO: 4792586 - DNA, 25 bp, Homo sapien
gagtgggaggcttatttcgctcccc

SEQ ID NO: 4792587 - DNA, 25 bp, Homo sapien
tttccgtgctgggaccgggcagccc

SEQ ID NO: 4792588 - DNA, 25 bp, Homo sapien
ctgcacagaaagcaggagttcctgg

SEQ ID NO: 4792589 - DNA, 25 bp, Homo sapien
gcaggagttcctggctttccgtgct

SEQ ID NO: 4792590 - DNA, 25 bp, Homo sapien
ccctgggcttacagcgagagtcttc

SEQ ID NO: 4792591 - DNA, 25 bp, Homo sapien
ctctgtttaggtttggcagaggctg

SEQ ID NO: 4792592 - DNA, 25 bp, Homo sapien
ggctccattcacctccgacggccta

SEQ ID NO: 4792593 - DNA, 25 bp, Homo sapien
ttcttagagcagcacaaccctcctg

SEQ ID NO: 4792594 - DNA, 25 bp, Homo sapien
tggaaagaaagctcgccctttgacc

SEQ ID NO: 4792595 - DNA, 25 bp, Homo sapien
catcagaggggtgttaggacagttc

SEQ ID NO: 4792596 - DNA, 25 bp, Homo sapien
taggacagttcagtgctatggtctg

SEQ ID NO: 4792597 - DNA, 25 bp, Homo sapien
gggtgttaggacagttcagtgctat

SEQ ID NO: 4792598 - DNA, 25 bp, Homo sapien
tgtcttgttagatactggggttgtg

SEQ ID NO: 4792599 - DNA, 25 bp, Homo sapien
tggatgacagggattctgcgtcagt

SEQ ID NO: 4792600 - DNA, 25 bp, Homo sapien
ggatgacagggattctgcgtcagtt

SEQ ID NO: 4792601 - DNA, 25 bp, Homo sapien
ctggatgacagggattctgcgtcag

SEQ ID NO: 4792602 - DNA, 25 bp, Homo sapien
tgcctccagggttcaagcgattttc

SEQ ID NO: 4792603 - DNA, 25 bp, Homo sapien
ctgtaacctctgcctccagggttca

SEQ ID NO: 4792604 - DNA, 25 bp, Homo sapien
ctctgaaagtgctgggatcacaggc

SEQ ID NO: 4792605 - DNA, 25 bp, Homo sapien
tctcagctcactgcgatctcagctc

SEQ ID NO: 4792606 - DNA, 25 bp, Homo sapien
ctgggaccacagacgcgcatcacca

SEQ ID NO: 4792607 - DNA, 25 bp, Homo sapien
accacagacgcgcatcaccatgcct

SEQ ID NO: 4792608 - DNA, 25 bp, Homo sapien
agctgggaccacagacgcgcatcac

SEQ ID NO: 4792609 - DNA, 25 bp, Homo sapien
gggaccacagacgcgcatcaccatg

SEQ ID NO: 4792610 - DNA, 25 bp, Homo sapien
gggtgtttattcctattggcagccc

SEQ ID NO: 4792611 - DNA, 25 bp, Homo sapien
gagaatggggtgtttattcctattg

SEQ ID NO: 4792612 - DNA, 25 bp, Homo sapien
aatggggtgtttattcctattggca

SEQ ID NO: 4792613 - DNA, 25 bp, Homo sapien
tgtttattcctattggcagccccac

SEQ ID NO: 4792614 - DNA, 25 bp, Homo sapien
tgaggtcgcagaggttgtgttttca

SEQ ID NO: 4792615 - DNA, 25 bp, Homo sapien
tagctgggggtatgtctgcagatca

SEQ ID NO: 4792616 - DNA, 25 bp, Homo sapien
ggttgtgttttcaccaggtccgtga

SEQ ID NO: 4792617 - DNA, 25 bp, Homo sapien
ttcaccaggtccgtgaagttggagg

SEQ ID NO: 4792618 - DNA, 25 bp, Homo sapien
tcttgttccaaagcaaggaagcaca

SEQ ID NO: 4792619 - DNA, 25 bp, Homo sapien
cacctcttgttccaaagcaaggaag

SEQ ID NO: 4792620 - DNA, 25 bp, Homo sapien
cctcttgttccaaagcaaggaagca

SEQ ID NO: 4792621 - DNA, 25 bp, Homo sapien
ctcttgttccaaagcaaggaagcac

SEQ ID NO: 4792622 - DNA, 25 bp, Homo sapien
cctcaaatgatatgcctgcctccca

SEQ ID NO: 4792623 - DNA, 25 bp, Homo sapien
tcgacctcccgacctcaggcccacc

SEQ ID NO: 4792624 - DNA, 25 bp, Homo sapien
gtctcgacctcccgacctcaggccc

SEQ ID NO: 4792625 - DNA, 25 bp, Homo sapien
ctcaaatgatatgcctgcctcccaa

SEQ ID NO: 4792626 - DNA, 25 bp, Homo sapien
gggctctagctggtcctgtatgcaa

SEQ ID NO: 4792627 - DNA, 25 bp, Homo sapien
tattagcgggacatttaggtgtctc

SEQ ID NO: 4792628 - DNA, 25 bp, Homo sapien
tgaggtggcgaaagtgtgttctccc

SEQ ID NO: 4792629 - DNA, 25 bp, Homo sapien
ttactgatggtctgaggattggcag

SEQ ID NO: 4792630 - DNA, 25 bp, Homo sapien
tctccagatgccacagatgcaaagg

SEQ ID NO: 4792631 - DNA, 25 bp, Homo sapien
ctccagatgccacagatgcaaaggt

SEQ ID NO: 4792632 - DNA, 25 bp, Homo sapien
tccagatgccacagatgcaaaggtg

SEQ ID NO: 4792633 - DNA, 25 bp, Homo sapien
caaaggtgaatgtggtggtagttgg

SEQ ID NO: 4792634 - DNA, 25 bp, Homo sapien
cctgtgcttggcatccccttggtca

SEQ ID NO: 4792635 - DNA, 25 bp, Homo sapien
agaaggccatgtgggcggggtgccc

SEQ ID NO: 4792636 - DNA, 25 bp, Homo sapien
ggattgccccactgccaaaccttcc

SEQ ID NO: 4792637 - DNA, 25 bp, Homo sapien
gtatttgcctgtgcttggcatcccc

SEQ ID NO: 4792638 - DNA, 25 bp, Homo sapien
tcagaagcataacggaagagaagcg

SEQ ID NO: 4792639 - DNA, 25 bp, Homo sapien
gaaggtatgacgtcccagctgatga

SEQ ID NO: 4792640 - DNA, 25 bp, Homo sapien
tgcagtcacgtccacactgagaggg

SEQ ID NO: 4792641 - DNA, 25 bp, Homo sapien
tgagcttgtccatctgccctgtagt

SEQ ID NO: 4792642 - DNA, 25 bp, Homo sapien
gatgaggattggaactgtagtcact

SEQ ID NO: 4792643 - DNA, 25 bp, Homo sapien
tgcatgtatctatggaaaggcagat

SEQ ID NO: 4792644 - DNA, 25 bp, Homo sapien
tgatctacaccagagcgtaaaggct

SEQ ID NO: 4792645 - DNA, 25 bp, Homo sapien
tcctgccacaggctgtcagcctttt

SEQ ID NO: 4792646 - DNA, 25 bp, Homo sapien
tatacaggacacattcctttccaaa

SEQ ID NO: 4792647 - DNA, 25 bp, Homo sapien
gctgagttaagtcttaaccctgcct

SEQ ID NO: 4792648 - DNA, 25 bp, Homo sapien
tatgttcatccctatacaggacaca

SEQ ID NO: 4792649 - DNA, 25 bp, Homo sapien
ctgaaggttcggaataataggctga

SEQ ID NO: 4792650 - DNA, 25 bp, Homo sapien
gctgttgtccgccttcctggacact

SEQ ID NO: 4792651 - DNA, 25 bp, Homo sapien
tgtccactccccgtgctgtggaaat

SEQ ID NO: 4792652 - DNA, 25 bp, Homo sapien
tggcctcacattcctgcgggtctgg

SEQ ID NO: 4792653 - DNA, 25 bp, Homo sapien
cttggagcagtctcgagcagaggga

SEQ ID NO: 4792654 - DNA, 25 bp, Homo sapien
ccacgggtagcctcatcctgggtgg

SEQ ID NO: 4792655 - DNA, 25 bp, Homo sapien
tgaagaagtttaaatgggtggtgtc

SEQ ID NO: 4792656 - DNA, 25 bp, Homo sapien
taggccctgacccacgggtagcctc

SEQ ID NO: 4792657 - DNA, 25 bp, Homo sapien
taaatgggtggtgtcggagtgcaga

SEQ ID NO: 4792658 - DNA, 25 bp, Homo sapien
aatagacactgaaaacgcagttgct

SEQ ID NO: 4792659 - DNA, 25 bp, Homo sapien
tcacctcacagctcaaatagacact

SEQ ID NO: 4792660 - DNA, 25 bp, Homo sapien
gaaaacgcagttgctggaagctgga

SEQ ID NO: 4792661 - DNA, 25 bp, Homo sapien
cacacattgccagttagggagccct

SEQ ID NO: 4792662 - DNA, 25 bp, Homo sapien
tgtggcctgtgcacaattcctgcgg

SEQ ID NO: 4792663 - DNA, 25 bp, Homo sapien
tgtgtgtaccgccactctggagtgc

SEQ ID NO: 4792664 - DNA, 25 bp, Homo sapien
tgccagtcttgcgagctgcagttcc

SEQ ID NO: 4792665 - DNA, 25 bp, Homo sapien
atgaggcccgatcttcccaggttgg

SEQ ID NO: 4792666 - DNA, 25 bp, Homo sapien
tccttgtccacgaggcttgggtata

SEQ ID NO: 4792667 - DNA, 25 bp, Homo sapien
cctcgattggtggaagtggactccc

SEQ ID NO: 4792668 - DNA, 25 bp, Homo sapien
tgagccatggcttggagacagtttg

SEQ ID NO: 4792669 - DNA, 25 bp, Homo sapien
aaggcctcacttgtggttgggatac

SEQ ID NO: 4792670 - DNA, 25 bp, Homo sapien
gcattgactcgtcttggcctaggag

SEQ ID NO: 4792671 - DNA, 25 bp, Homo sapien
tggcaagtccttaacgtacagtacc

SEQ ID NO: 4792672 - DNA, 25 bp, Homo sapien
tgcctgcttgtgatgagtgataccg

SEQ ID NO: 4792673 - DNA, 25 bp, Homo sapien
caatgtgcgtccatgcttgagtgag

SEQ ID NO: 4792674 - DNA, 25 bp, Homo sapien
tgttcactgtcatcagagcagggat

SEQ ID NO: 4792675 - DNA, 25 bp, Homo sapien
ccattgttgagatcagtgggcatat

SEQ ID NO: 4792676 - DNA, 25 bp, Homo sapien
ctctgaatgtctgggcgagcttttg

SEQ ID NO: 4792677 - DNA, 25 bp, Homo sapien
ggaatatctattgtcttgaagtcag

SEQ ID NO: 4792678 - DNA, 25 bp, Homo sapien
tgctttagaggagggcacgatgacc

SEQ ID NO: 4792679 - DNA, 25 bp, Homo sapien
gtggaattttgggatggcagcccga

SEQ ID NO: 4792680 - DNA, 25 bp, Homo sapien
atggcagcccgaggaacatccagag

SEQ ID NO: 4792681 - DNA, 25 bp, Homo sapien
catcgttagctttgaaatcacaggc

SEQ ID NO: 4792682 - DNA, 25 bp, Homo sapien
gggtatcttcaagcctcagagcagc

SEQ ID NO: 4792683 - DNA, 25 bp, Homo sapien
taaaggcgcttttggcctagacacc

SEQ ID NO: 4792684 - DNA, 25 bp, Homo sapien
aaaacttcggctttggacatgtcca

SEQ ID NO: 4792685 - DNA, 25 bp, Homo sapien
caccagtggcgaggagcattgcata

SEQ ID NO: 4792686 - DNA, 25 bp, Homo sapien
gatcctgtcgttttagcctcctgag

SEQ ID NO: 4792687 - DNA, 25 bp, Homo sapien
tcaggctagtgctggattcctggcc

SEQ ID NO: 4792688 - DNA, 25 bp, Homo sapien
tagtggtctcgctatttgctcaggc

SEQ ID NO: 4792689 - DNA, 25 bp, Homo sapien
cttcacctggtttactgcaagggct

SEQ ID NO: 4792690 - DNA, 25 bp, Homo sapien
gtttgtaggtaaggaagactcagga

SEQ ID NO: 4792691 - DNA, 25 bp, Homo sapien
gaacatcccattgaagaaagccttg

SEQ ID NO: 4792692 - DNA, 25 bp, Homo sapien
gaagacaagggcctgagctccatcc

SEQ ID NO: 4792693 - DNA, 25 bp, Homo sapien
tggaagtactcaattgaacatccca

SEQ ID NO: 4792694 - DNA, 25 bp, Homo sapien
caactctggctggaacgcaggtttc

SEQ ID NO: 4792695 - DNA, 25 bp, Homo sapien
tgcagcctgcctgtaacccttaagg

SEQ ID NO: 4792696 - DNA, 25 bp, Homo sapien
tttggagccctcaagacagtccctt

SEQ ID NO: 4792697 - DNA, 25 bp, Homo sapien
tcccctcaggctgtgataatgcacg

SEQ ID NO: 4792698 - DNA, 25 bp, Homo sapien
aatgggacttgtttataggccacga

SEQ ID NO: 4792699 - DNA, 25 bp, Homo sapien
ccatatggtgacaatgggacttgtt

SEQ ID NO: 4792700 - DNA, 25 bp, Homo sapien
caatgggacttgtttataggccacg

SEQ ID NO: 4792701 - DNA, 25 bp, Homo sapien
gtctccatatggtgacaatgggact

SEQ ID NO: 4792702 - DNA, 25 bp, Homo sapien
gctgggagatttcagccgcactgag

SEQ ID NO: 4792703 - DNA, 25 bp, Homo sapien
gatttcagccgcactgagcacagag

SEQ ID NO: 4792704 - DNA, 25 bp, Homo sapien
gagatttcagccgcactgagcacag

SEQ ID NO: 4792705 - DNA, 25 bp, Homo sapien
tgggagatttcagccgcactgagca

SEQ ID NO: 4792706 - DNA, 25 bp, Homo sapien
catggtgagctggtagatcttgttg

SEQ ID NO: 4792707 - DNA, 25 bp, Homo sapien
gccaaggacagctgcagtatgacga

SEQ ID NO: 4792708 - DNA, 25 bp, Homo sapien
aaagcaggagcccacaaacatgtcc

SEQ ID NO: 4792709 - DNA, 25 bp, Homo sapien
gtggatgtcaccacgccggtcagag

SEQ ID NO: 4792710 - DNA, 25 bp, Homo sapien
gccctttatgagtttggacatagct

SEQ ID NO: 4792711 - DNA, 25 bp, Homo sapien
gaggagccctttatgagtttggaca

SEQ ID NO: 4792712 - DNA, 25 bp, Homo sapien
gtttggacatagctgatcggatggt

SEQ ID NO: 4792713 - DNA, 25 bp, Homo sapien
tgacggggatgagagcaaacagcat

SEQ ID NO: 4792714 - DNA, 25 bp, Homo sapien
aggacgccttcaccacgaggagtag

SEQ ID NO: 4792715 - DNA, 25 bp, Homo sapien
gccaagcccagcatcaggtcaatga

SEQ ID NO: 4792716 - DNA, 25 bp, Homo sapien
tcatgatcatggtggtgtcccgaaa

SEQ ID NO: 4792717 - DNA, 25 bp, Homo sapien
aaagagggatcacgtccactgtgcc

SEQ ID NO: 4792718 - DNA, 25 bp, Homo sapien
gaggccaccacgggctcaacccagg

SEQ ID NO: 4792719 - DNA, 25 bp, Homo sapien
ggccaccacgggctcaacccaggtc

SEQ ID NO: 4792720 - DNA, 25 bp, Homo sapien
aggccaccacgggctcaacccaggt

SEQ ID NO: 4792721 - DNA, 25 bp, Homo sapien
gtggcccctccgcgggcaggtgacc

SEQ ID NO: 4792722 - DNA, 25 bp, Homo sapien
gcccctccgcgggcaggtgacctcg

SEQ ID NO: 4792723 - DNA, 25 bp, Homo sapien
ccctccgcgggcaggtgacctcggg

SEQ ID NO: 4792724 - DNA, 25 bp, Homo sapien
tggcccctccgcgggcaggtgacct

SEQ ID NO: 4792725 - DNA, 25 bp, Homo sapien
tctgatggggatcgaagggctttct

SEQ ID NO: 4792726 - DNA, 25 bp, Homo sapien
tctctgatggggatcgaagggcttt

SEQ ID NO: 4792727 - DNA, 25 bp, Homo sapien
ctctgatggggatcgaagggctttc

SEQ ID NO: 4792728 - DNA, 25 bp, Homo sapien
aattcggctgctacggctgctcagg

SEQ ID NO: 4792729 - DNA, 25 bp, Homo sapien
tcccaaattcggctgctacggctgc

SEQ ID NO: 4792730 - DNA, 25 bp, Homo sapien
agtgacaaggatatgctcccaaatt

SEQ ID NO: 4792731 - DNA, 25 bp, Homo sapien
ggatatgctcccaaattcggctgct

SEQ ID NO: 4792732 - DNA, 25 bp, Homo sapien
cgcgagtgtgctccgtgcgccggga

SEQ ID NO: 4792733 - DNA, 25 bp, Homo sapien
cggccagtggcgagcagagccaggg

SEQ ID NO: 4792734 - DNA, 25 bp, Homo sapien
tacagcaaacagtccaaacaccttg

SEQ ID NO: 4792735 - DNA, 25 bp, Homo sapien
gatacatgtttcacccaacccaagc

SEQ ID NO: 4792736 - DNA, 25 bp, Homo sapien
ttgggagatacatgtttcacccaac

SEQ ID NO: 4792737 - DNA, 25 bp, Homo sapien
ggctacagcaaacagtccaaacacc

SEQ ID NO: 4792738 - DNA, 25 bp, Homo sapien
attgctgtggtcaacctctgaacca

SEQ ID NO: 4792739 - DNA, 25 bp, Homo sapien
gattgctgtggtcaacctctgaacc

SEQ ID NO: 4792740 - DNA, 25 bp, Homo sapien
cccagggtgtaggtgcacagactag

SEQ ID NO: 4792741 - DNA, 25 bp, Homo sapien
tgaggaggtcgtttgttccattgct

SEQ ID NO: 4792742 - DNA, 25 bp, Homo sapien
gaatctgcatggtcacattgtgagg

SEQ ID NO: 4792743 - DNA, 25 bp, Homo sapien
caattggtgctaaaagtaggcccag

SEQ ID NO: 4792744 - DNA, 25 bp, Homo sapien
caggcaagagtgaacttttttcctc

SEQ ID NO: 4792745 - DNA, 25 bp, Homo sapien
gctttagatacctgccaagtccaga

SEQ ID NO: 4792746 - DNA, 25 bp, Homo sapien
tgagaaagggtcagctttagatacc

SEQ ID NO: 4792747 - DNA, 25 bp, Homo sapien
cacaaagcggttttatgatagcatc

SEQ ID NO: 4792748 - DNA, 25 bp, Homo sapien
acagctgaagtcactggacccagct

SEQ ID NO: 4792749 - DNA, 25 bp, Homo sapien
cacagctgaagtcactggacccagc

SEQ ID NO: 4792750 - DNA, 25 bp, Homo sapien
acccagcttcaggctgaaactgcct

SEQ ID NO: 4792751 - DNA, 25 bp, Homo sapien
ctccctacagcccttttgagctgcc

SEQ ID NO: 4792752 - DNA, 25 bp, Homo sapien
gctcctcggcgacctggcttctcag

SEQ ID NO: 4792753 - DNA, 25 bp, Homo sapien
ccccccatgctcctcggcgacctgg

SEQ ID NO: 4792754 - DNA, 25 bp, Homo sapien
atctccctacagcccttttgagctg

SEQ ID NO: 4792755 - DNA, 25 bp, Homo sapien
ggaggaagccagcgtgatccccaga

SEQ ID NO: 4792756 - DNA, 25 bp, Homo sapien
gggaggaagccagcgtgatccccag

SEQ ID NO: 4792757 - DNA, 25 bp, Homo sapien
gaggaagccagcgtgatccccagac

SEQ ID NO: 4792758 - DNA, 25 bp, Homo sapien
gcgagccggccaaggcattctctag

SEQ ID NO: 4792759 - DNA, 25 bp, Homo sapien
tggctctttctgaactgcgcccggg

SEQ ID NO: 4792760 - DNA, 25 bp, Homo sapien
ggatctgaagggaccaatccacgat

SEQ ID NO: 4792761 - DNA, 25 bp, Homo sapien
caggtatctgcccactcgcagggta

SEQ ID NO: 4792762 - DNA, 25 bp, Homo sapien
taaccatgcaaataaggacaatgtc

SEQ ID NO: 4792763 - DNA, 25 bp, Homo sapien
tcttttcctttaccacatgcaactc

SEQ ID NO: 4792764 - DNA, 25 bp, Homo sapien
gaatcctgtggacataagaccatgc

SEQ ID NO: 4792765 - DNA, 25 bp, Homo sapien
caggaaatgggtagcgatcatgaag

SEQ ID NO: 4792766 - DNA, 25 bp, Homo sapien
caggaagggaagatactggagtcca

SEQ ID NO: 4792767 - DNA, 25 bp, Homo sapien
tcttaggcagttagggaagatccta

SEQ ID NO: 4792768 - DNA, 25 bp, Homo sapien
tcctaaagatgcagggatgacgtct

SEQ ID NO: 4792769 - DNA, 25 bp, Homo sapien
caggtcacagaacttgtcataagag

SEQ ID NO: 4792770 - DNA, 25 bp, Homo sapien
gggaggatgttgagtaaatgacttt

SEQ ID NO: 4792771 - DNA, 25 bp, Homo sapien
taacttatgttgtataccagaaaag

SEQ ID NO: 4792772 - DNA, 25 bp, Homo sapien
ccttgcattgcatgaatgatgaaga

SEQ ID NO: 4792773 - DNA, 25 bp, Homo sapien
cttattaaacattccttgcattgca

SEQ ID NO: 4792774 - DNA, 25 bp, Homo sapien
atcttcaacatcagaagttttgaag

SEQ ID NO: 4792775 - DNA, 25 bp, Homo sapien
agggtcccaggtttgtttctgccat

SEQ ID NO: 4792776 - DNA, 25 bp, Homo sapien
tccattcccaggttagacgtcaagg

SEQ ID NO: 4792777 - DNA, 25 bp, Homo sapien
gacgtcaaggacatacagagtacag

SEQ ID NO: 4792778 - DNA, 25 bp, Homo sapien
tcctgggagttggtccacaaacaca

SEQ ID NO: 4792779 - DNA, 25 bp, Homo sapien
tactgggcccttttcgcaagcatta

SEQ ID NO: 4792780 - DNA, 25 bp, Homo sapien
gtgtcagagatcaccaacccggagt

SEQ ID NO: 4792781 - DNA, 25 bp, Homo sapien
tatgggagaattgggtcctctatcc

SEQ ID NO: 4792782 - DNA, 25 bp, Homo sapien
tatggtatctttgggtgcaaacccc

SEQ ID NO: 4792783 - DNA, 25 bp, Homo sapien
acccctaatgcttttggaaggcact

SEQ ID NO: 4792784 - DNA, 25 bp, Homo sapien
cctcatctcgggcctggagacagcg

SEQ ID NO: 4792785 - DNA, 25 bp, Homo sapien
tcatctcgggcctggagacagcgat

SEQ ID NO: 4792786 - DNA, 25 bp, Homo sapien
ctaggctgctccctcatctcgggcc

SEQ ID NO: 4792787 - DNA, 25 bp, Homo sapien
aggctgctccctcatctcgggcctg

SEQ ID NO: 4792788 - DNA, 25 bp, Homo sapien
tgtgagctcacatccggtgttcgaa

SEQ ID NO: 4792789 - DNA, 25 bp, Homo sapien
cacaaacctctccttgagttgtgag

SEQ ID NO: 4792790 - DNA, 25 bp, Homo sapien
tatcaatcccatgttcttcacaata

SEQ ID NO: 4792791 - DNA, 25 bp, Homo sapien
gttttccttatcaatcccatgttct

SEQ ID NO: 4792792 - DNA, 25 bp, Homo sapien
tgtgggaagagtgacagtaactgcc

SEQ ID NO: 4792793 - DNA, 25 bp, Homo sapien
tgggaagagtgacagtaactgccat

SEQ ID NO: 4792794 - DNA, 25 bp, Homo sapien
gtgggaagagtgacagtaactgcca

SEQ ID NO: 4792795 - DNA, 25 bp, Homo sapien
ctgtgggaagagtgacagtaactgc

SEQ ID NO: 4792796 - DNA, 25 bp, Homo sapien
tgtttccccattcttgatattcttg

SEQ ID NO: 4792797 - DNA, 25 bp, Homo sapien
tatgtcaatgacattaagtccgtta

SEQ ID NO: 4792798 - DNA, 25 bp, Homo sapien
tataattatcatagtccgtttcaag

SEQ ID NO: 4792799 - DNA, 25 bp, Homo sapien
tagtccgtttcaagtatgtcaatga

SEQ ID NO: 4792800 - DNA, 25 bp, Homo sapien
acaacacaagttcaagtgcgtatcc

SEQ ID NO: 4792801 - DNA, 25 bp, Homo sapien
cctgttagagatagtgaggatgttg

SEQ ID NO: 4792802 - DNA, 25 bp, Homo sapien
cgccctgggcttcatgaggcaaatt

SEQ ID NO: 4792803 - DNA, 25 bp, Homo sapien
catcgccctgggcttcatgaggcaa

SEQ ID NO: 4792804 - DNA, 25 bp, Homo sapien
tactacatatggcattcttttctgt

SEQ ID NO: 4792805 - DNA, 25 bp, Homo sapien
ctacatatggcattcttttctgttg

SEQ ID NO: 4792806 - DNA, 25 bp, Homo sapien
cagtactacatatggcattcttttc

SEQ ID NO: 4792807 - DNA, 25 bp, Homo sapien
agtcagtactacatatggcattctt

SEQ ID NO: 4792808 - DNA, 25 bp, Homo sapien
caagagaaccgaataccactctcct

SEQ ID NO: 4792809 - DNA, 25 bp, Homo sapien
agaaccgaataccactctcctgaaa

SEQ ID NO: 4792810 - DNA, 25 bp, Homo sapien
gaggccaagagaaccgaataccact

SEQ ID NO: 4792811 - DNA, 25 bp, Homo sapien
cagagaagaattccccaggtaatca

SEQ ID NO: 4792812 - DNA, 25 bp, Homo sapien
gatcgaagttgcttgtcacagcatc

SEQ ID NO: 4792813 - DNA, 25 bp, Homo sapien
gcatcatcttggtaagggacagcac

SEQ ID NO: 4792814 - DNA, 25 bp, Homo sapien
acagacgagggtcaaccccagacac

SEQ ID NO: 4792815 - DNA, 25 bp, Homo sapien
ctttgacagatcgaagttgcttgtc

SEQ ID NO: 4792816 - DNA, 25 bp, Homo sapien
tttgttgactcattcttgtctgaag

SEQ ID NO: 4792817 - DNA, 25 bp, Homo sapien
attcctcaagtgcagcctcattttg

SEQ ID NO: 4792818 - DNA, 25 bp, Homo sapien
tgactcattcttgtctgaagaatag

SEQ ID NO: 4792819 - DNA, 25 bp, Homo sapien
ctattcctcaagtgcagcctcattt

SEQ ID NO: 4792820 - DNA, 25 bp, Homo sapien
gcaagtggagcaaggcgcaggatcg

SEQ ID NO: 4792821 - DNA, 25 bp, Homo sapien
agcagcttgggatgcagtttgaagc

SEQ ID NO: 4792822 - DNA, 25 bp, Homo sapien
ctaatgcggttggtacttccttgca

SEQ ID NO: 4792823 - DNA, 25 bp, Homo sapien
cccaacaggtcagccagaaacagct

SEQ ID NO: 4792824 - DNA, 25 bp, Homo sapien
gaagtttggtgaagatcagtgattg

SEQ ID NO: 4792825 - DNA, 25 bp, Homo sapien
agaggttggatgaggaatctactga

SEQ ID NO: 4792826 - DNA, 25 bp, Homo sapien
ggtctgtgaagaggttggatgagga

SEQ ID NO: 4792827 - DNA, 25 bp, Homo sapien
gatgaggaatctactgaagtttggt

SEQ ID NO: 4792828 - DNA, 25 bp, Homo sapien
gatatacagtcttgaggaaggagca

SEQ ID NO: 4792829 - DNA, 25 bp, Homo sapien
tatcagaatgtatagaattgttcct

SEQ ID NO: 4792830 - DNA, 25 bp, Homo sapien
gatggtgcagcattccttgtgtgga

SEQ ID NO: 4792831 - DNA, 25 bp, Homo sapien
caaacagatgtatatggagcaatcc

SEQ ID NO: 4792832 - DNA, 25 bp, Homo sapien
tagtggtcgtagctttacttatact

SEQ ID NO: 4792833 - DNA, 25 bp, Homo sapien
tgaaagatggtgtgctgatttctca

SEQ ID NO: 4792834 - DNA, 25 bp, Homo sapien
aaaggaatgcctttacattgttggg

SEQ ID NO: 4792835 - DNA, 25 bp, Homo sapien
agttcaactattgtgaaagatggtg

SEQ ID NO: 4792836 - DNA, 25 bp, Homo sapien
gttgcagtaaaaggcagggctctgg

SEQ ID NO: 4792837 - DNA, 25 bp, Homo sapien
tggccccaggttctatgcatgcaaa

SEQ ID NO: 4792838 - DNA, 25 bp, Homo sapien
ctggcgttgaaggttggtggctgct

SEQ ID NO: 4792839 - DNA, 25 bp, Homo sapien
cctgccaggcaaatcagcagttgca

SEQ ID NO: 4792840 - DNA, 25 bp, Homo sapien
cctctagtgctcctgttaaagatgc

SEQ ID NO: 4792841 - DNA, 25 bp, Homo sapien
tgtagaatatcctaacactggccaa

SEQ ID NO: 4792842 - DNA, 25 bp, Homo sapien
ttttaagctaagcatgcacctaggg

SEQ ID NO: 4792843 - DNA, 25 bp, Homo sapien
gtatagtgctatagacctctagtgc

SEQ ID NO: 4792844 - DNA, 25 bp, Homo sapien
attcagaatggcttcatctgtttgc

SEQ ID NO: 4792845 - DNA, 25 bp, Homo sapien
tcagaatggcttcatctgtttgcat

SEQ ID NO: 4792846 - DNA, 25 bp, Homo sapien
cttttatacctaacattcagaatgg

SEQ ID NO: 4792847 - DNA, 25 bp, Homo sapien
tttatacctaacattcagaatggct

SEQ ID NO: 4792848 - DNA, 25 bp, Homo sapien
tatacaagctttgtaattacagtgc

SEQ ID NO: 4792849 - DNA, 25 bp, Homo sapien
cctccttgtgaatctaatctaaaag

SEQ ID NO: 4792850 - DNA, 25 bp, Homo sapien
ccatggacaagttagataatcttag

SEQ ID NO: 4792851 - DNA, 25 bp, Homo sapien
cttgtgtatagtatcattacaacat

SEQ ID NO: 4792852 - DNA, 25 bp, Homo sapien
tatggaaggatctgaagaaaacctc

SEQ ID NO: 4792853 - DNA, 25 bp, Homo sapien
gtgcctagctcttgtctcttggtaa

SEQ ID NO: 4792854 - DNA, 25 bp, Homo sapien
aagccatggtcggaggatagcctga

SEQ ID NO: 4792855 - DNA, 25 bp, Homo sapien
cagaatggtagtcatggctgggctc

SEQ ID NO: 4792856 - DNA, 25 bp, Homo sapien
tcacatgtattagctattgatcctg

SEQ ID NO: 4792857 - DNA, 25 bp, Homo sapien
aagtctcacatgtattagctattga

SEQ ID NO: 4792858 - DNA, 25 bp, Homo sapien
taagtctcacatgtattagctattg

SEQ ID NO: 4792859 - DNA, 25 bp, Homo sapien
tctcacatgtattagctattgatcc

SEQ ID NO: 4792860 - DNA, 25 bp, Homo sapien
tgaaagcggcatgttaaagtctccc

SEQ ID NO: 4792861 - DNA, 25 bp, Homo sapien
aagattccaggttttgcctattcag

SEQ ID NO: 4792862 - DNA, 25 bp, Homo sapien
tttagagtcagtgcattgcggcacc

SEQ ID NO: 4792863 - DNA, 25 bp, Homo sapien
ttgcggcaccgagaagaatgtacat

SEQ ID NO: 4792864 - DNA, 25 bp, Homo sapien
gactaagtctgttgatccatggaga

SEQ ID NO: 4792865 - DNA, 25 bp, Homo sapien
catagggctactgcaatttgctggg

SEQ ID NO: 4792866 - DNA, 25 bp, Homo sapien
gcctggcctaaagagacagtctggt

SEQ ID NO: 4792867 - DNA, 25 bp, Homo sapien
gtcaggttccactcccatagggcta

SEQ ID NO: 4792868 - DNA, 25 bp, Homo sapien
tgtactgtggcaaaaaactttccga

SEQ ID NO: 4792869 - DNA, 25 bp, Homo sapien
caatcctagggttgcttgaactgtg

SEQ ID NO: 4792870 - DNA, 25 bp, Homo sapien
taaacaataacctacgactgactgc

SEQ ID NO: 4792871 - DNA, 25 bp, Homo sapien
caattaggtgtgtgctgcggctgaa

SEQ ID NO: 4792872 - DNA, 25 bp, Homo sapien
caagacaagtgtagcctttcccaca

SEQ ID NO: 4792873 - DNA, 25 bp, Homo sapien
tgggttcgcggtcatataaattttc

SEQ ID NO: 4792874 - DNA, 25 bp, Homo sapien
cacattcagtacagagatatgggtt

SEQ ID NO: 4792875 - DNA, 25 bp, Homo sapien
tcagggatgcaagacaagtgtagcc

SEQ ID NO: 4792876 - DNA, 25 bp, Homo sapien
gctttggagtggatgctctgacttc

SEQ ID NO: 4792877 - DNA, 25 bp, Homo sapien
tagtagctcatcctaagaacctggt

SEQ ID NO: 4792878 - DNA, 25 bp, Homo sapien
gatttcaggccttctctgtgggtct

SEQ ID NO: 4792879 - DNA, 25 bp, Homo sapien
tccatgggaaactgtggtcaaaaat

SEQ ID NO: 4792880 - DNA, 25 bp, Homo sapien
gaccaactggctacaagttgagggt

SEQ ID NO: 4792881 - DNA, 25 bp, Homo sapien
caactggctacaagttgagggttcc

SEQ ID NO: 4792882 - DNA, 25 bp, Homo sapien
actggctacaagttgagggttccta

SEQ ID NO: 4792883 - DNA, 25 bp, Homo sapien
tggctacaagttgagggttcctata

SEQ ID NO: 4792884 - DNA, 25 bp, Homo sapien
acatcatctctgggcatgcgacact

SEQ ID NO: 4792885 - DNA, 25 bp, Homo sapien
gaaaggggtatagagcttccacatc

SEQ ID NO: 4792886 - DNA, 25 bp, Homo sapien
tcatctctgggcatgcgacacttcc

SEQ ID NO: 4792887 - DNA, 25 bp, Homo sapien
tctgggcatgcgacacttccagcac

SEQ ID NO: 4792888 - DNA, 25 bp, Homo sapien
aacagtttttgaagatcacatccat

SEQ ID NO: 4792889 - DNA, 25 bp, Homo sapien
acatccatgtgccatgtctctgaca

SEQ ID NO: 4792890 - DNA, 25 bp, Homo sapien
tgacatcttccaatgccacgggttc

SEQ ID NO: 4792891 - DNA, 25 bp, Homo sapien
gatgaggctgtaacagtttttgaag

SEQ ID NO: 4792892 - DNA, 25 bp, Homo sapien
agaccatgtagtcaggggccagtgg

SEQ ID NO: 4792893 - DNA, 25 bp, Homo sapien
aaagaccatgtagtcaggggccagt

SEQ ID NO: 4792894 - DNA, 25 bp, Homo sapien
aagaccatgtagtcaggggccagtg

SEQ ID NO: 4792895 - DNA, 25 bp, Homo sapien
caaagaccatgtagtcaggggccag

SEQ ID NO: 4792896 - DNA, 25 bp, Homo sapien
gatgccatcttatataagtaagtag

SEQ ID NO: 4792897 - DNA, 25 bp, Homo sapien
taagtagagacctgagaaagcagag

SEQ ID NO: 4792898 - DNA, 25 bp, Homo sapien
tcttatataagtaagtagagacctg

SEQ ID NO: 4792899 - DNA, 25 bp, Homo sapien
tcttgatgccatcttatataagtaa

SEQ ID NO: 4792900 - DNA, 25 bp, Homo sapien
taactttatcctcccatgatgggtg

SEQ ID NO: 4792901 - DNA, 25 bp, Homo sapien
ccagaaacagggctaactttatcct

SEQ ID NO: 4792902 - DNA, 25 bp, Homo sapien
tggtccaatctgacaaaccagaaac

SEQ ID NO: 4792903 - DNA, 25 bp, Homo sapien
tgggtggcaccgagtgcaccagctc

SEQ ID NO: 4792904 - DNA, 25 bp, Homo sapien
tacaatttttcgaagtgcattcaca

SEQ ID NO: 4792905 - DNA, 25 bp, Homo sapien
ttcgaagtgcattcacaaatgccat

SEQ ID NO: 4792906 - DNA, 25 bp, Homo sapien
aagaacaaacaattgctcttcgtcg

SEQ ID NO: 4792907 - DNA, 25 bp, Homo sapien
ccgcagagtgtagggaatcaattcc

SEQ ID NO: 4792908 - DNA, 25 bp, Homo sapien
ctcccacacgagtgcaagggtcggg

SEQ ID NO: 4792909 - DNA, 25 bp, Homo sapien
tcccacacgagtgcaagggtcggga

SEQ ID NO: 4792910 - DNA, 25 bp, Homo sapien
tgagctgcgtctttcaccggtgtct

SEQ ID NO: 4792911 - DNA, 25 bp, Homo sapien
aatgctttgcgggttgcgaacgtgc

SEQ ID NO: 4792912 - DNA, 25 bp, Homo sapien
ttcccaagccaggaagtacgcctgc

SEQ ID NO: 4792913 - DNA, 25 bp, Homo sapien
tgcaaagcgccctcttgagctgcgt

SEQ ID NO: 4792914 - DNA, 25 bp, Homo sapien
tacctattcactacattaatagatg

SEQ ID NO: 4792915 - DNA, 25 bp, Homo sapien
tttgctataaacaactgtaaatcca

SEQ ID NO: 4792916 - DNA, 25 bp, Homo sapien
tgcaaagtttgcgttaacaacaccc

SEQ ID NO: 4792917 - DNA, 25 bp, Homo sapien
caaagagatgcaaagtttgcgttaa

SEQ ID NO: 4792918 - DNA, 25 bp, Homo sapien
agagagattccatccaagaatgagg

SEQ ID NO: 4792919 - DNA, 25 bp, Homo sapien
caagcaccagagagattccatccaa

SEQ ID NO: 4792920 - DNA, 25 bp, Homo sapien
gagagacagcgagcaagcaccagag

SEQ ID NO: 4792921 - DNA, 25 bp, Homo sapien
aaatctctgatttatagctagcttc

SEQ ID NO: 4792922 - DNA, 25 bp, Homo sapien
aagtcaatgcctggttttaaagcta

SEQ ID NO: 4792923 - DNA, 25 bp, Homo sapien
tacaaaggacaggtttactctcttg

SEQ ID NO: 4792924 - DNA, 25 bp, Homo sapien
acaaaggacaggtttactctcttgt

SEQ ID NO: 4792925 - DNA, 25 bp, Homo sapien
gaaattaaagatttggccaaatgtg

SEQ ID NO: 4792926 - DNA, 25 bp, Homo sapien
tagatgctacaggttggtttgtaca

SEQ ID NO: 4792927 - DNA, 25 bp, Homo sapien
aattaaagatttggccaaatgtggt

SEQ ID NO: 4792928 - DNA, 25 bp, Homo sapien
ttttagatgctacaggttggtttgt

SEQ ID NO: 4792929 - DNA, 25 bp, Homo sapien
cattcgaattccctgattgaggtgt

SEQ ID NO: 4792930 - DNA, 25 bp, Homo sapien
taagaaagagctgggtgaaaatgtc

SEQ ID NO: 4792931 - DNA, 25 bp, Homo sapien
tatcttgaatatcgctccctaccag

SEQ ID NO: 4792932 - DNA, 25 bp, Homo sapien
tactatatacatggttcagcaacct

SEQ ID NO: 4792933 - DNA, 25 bp, Homo sapien
gatttatcttctgaatgagttttca

SEQ ID NO: 4792934 - DNA, 25 bp, Homo sapien
atttatcttctgaatgagttttcac

SEQ ID NO: 4792935 - DNA, 25 bp, Homo sapien
tttggttagggatgcattttgtttg

SEQ ID NO: 4792936 - DNA, 25 bp, Homo sapien
tggttagggatgcattttgtttgaa

SEQ ID NO: 4792937 - DNA, 25 bp, Homo sapien
atgtttggttagggatgcattttgt

SEQ ID NO: 4792938 - DNA, 25 bp, Homo sapien
ttgtttgaaagttttcccacattca

SEQ ID NO: 4792939 - DNA, 25 bp, Homo sapien
caatgaggtgagacttttggctaaa

SEQ ID NO: 4792940 - DNA, 25 bp, Homo sapien
agtgtgggatcgctgatgtataaca

SEQ ID NO: 4792941 - DNA, 25 bp, Homo sapien
attacattcaaagggactttcacct

SEQ ID NO: 4792942 - DNA, 25 bp, Homo sapien
gctgtgattttgcattaaaggcttt

SEQ ID NO: 4792943 - DNA, 25 bp, Homo sapien
gagatgagttatacctaaaagactt

SEQ ID NO: 4792944 - DNA, 25 bp, Homo sapien
tgttctcacatgttcggtaagagat

SEQ ID NO: 4792945 - DNA, 25 bp, Homo sapien
cacatgttcggtaagagatgagtta

SEQ ID NO: 4792946 - DNA, 25 bp, Homo sapien
tgttcggtaagagatgagttatacc

SEQ ID NO: 4792947 - DNA, 25 bp, Homo sapien
gtttatgaccatgggctttgccaca

SEQ ID NO: 4792948 - DNA, 25 bp, Homo sapien
atgtacaacaaggtgtgacttttgg

SEQ ID NO: 4792949 - DNA, 25 bp, Homo sapien
tgagtgcatgtttatgaccatgggc

SEQ ID NO: 4792950 - DNA, 25 bp, Homo sapien
tgaattcttagatggtcagtgagtg

SEQ ID NO: 4792951 - DNA, 25 bp, Homo sapien
ctgatggtcaatgagtccttgttta

SEQ ID NO: 4792952 - DNA, 25 bp, Homo sapien
tggctgagaacctttccacattgat

SEQ ID NO: 4792953 - DNA, 25 bp, Homo sapien
tgtttatggctgagaacctttccac

SEQ ID NO: 4792954 - DNA, 25 bp, Homo sapien
caatgagtccttgtttatggctgag

SEQ ID NO: 4792955 - DNA, 25 bp, Homo sapien
tgaggtttttcatgcttagtagatg

SEQ ID NO: 4792956 - DNA, 25 bp, Homo sapien
ggtttttcatgcttagtagatgagc

SEQ ID NO: 4792957 - DNA, 25 bp, Homo sapien
ttttcatgcttagtagatgagctaa

SEQ ID NO: 4792958 - DNA, 25 bp, Homo sapien
ttcatgcttagtagatgagctaagg

SEQ ID NO: 4792959 - DNA, 25 bp, Homo sapien
tttgtcatgttttttgccagttttg

SEQ ID NO: 4792960 - DNA, 25 bp, Homo sapien
ttaatatgggatgaactatgacagc

SEQ ID NO: 4792961 - DNA, 25 bp, Homo sapien
tatgggatgaactatgacagcataa

SEQ ID NO: 4792962 - DNA, 25 bp, Homo sapien
gatgaactatgacagcataatttgt

SEQ ID NO: 4792963 - DNA, 25 bp, Homo sapien
ccacatgactcaaatttaagaagcc

SEQ ID NO: 4792964 - DNA, 25 bp, Homo sapien
cacagtttcttgagtgatcaggtaa

SEQ ID NO: 4792965 - DNA, 25 bp, Homo sapien
gagctatggctggataatttctcat

SEQ ID NO: 4792966 - DNA, 25 bp, Homo sapien
cttgactgcaacttccctgaggagt

SEQ ID NO: 4792967 - DNA, 25 bp, Homo sapien
ttgtgaatctttgtactcttatatt

SEQ ID NO: 4792968 - DNA, 25 bp, Homo sapien
atctttgtactcttatattttggaa

SEQ ID NO: 4792969 - DNA, 25 bp, Homo sapien
tgaatctttgtactcttatattttg

SEQ ID NO: 4792970 - DNA, 25 bp, Homo sapien
gaatctttgtactcttatattttgg

SEQ ID NO: 4792971 - DNA, 25 bp, Homo sapien
ttccatcagtttctttttgcttggg

SEQ ID NO: 4792972 - DNA, 25 bp, Homo sapien
ctttttgcttgggtcttgctatttt

SEQ ID NO: 4792973 - DNA, 25 bp, Homo sapien
ttttgcttgggtcttgctattttac

SEQ ID NO: 4792974 - DNA, 25 bp, Homo sapien
cagtttctttttgcttgggtcttgc

SEQ ID NO: 4792975 - DNA, 25 bp, Homo sapien
atgtctggtttgggagcttgacacc

SEQ ID NO: 4792976 - DNA, 25 bp, Homo sapien
tggacaaccttgactgggtcttttc

SEQ ID NO: 4792977 - DNA, 25 bp, Homo sapien
ccccttccccaaccatggtgcttct

SEQ ID NO: 4792978 - DNA, 25 bp, Homo sapien
tcctttttccaacttggagatcatg

SEQ ID NO: 4792979 - DNA, 25 bp, Homo sapien
cacatcattatacaggttgctctga

SEQ ID NO: 4792980 - DNA, 25 bp, Homo sapien
ttgaggcttggttgcagtagttctc

SEQ ID NO: 4792981 - DNA, 25 bp, Homo sapien
ccattgaggcttggttgcagtagtt

SEQ ID NO: 4792982 - DNA, 25 bp, Homo sapien
atcattatacaggttgctctgagca

SEQ ID NO: 4792983 - DNA, 25 bp, Homo sapien
tcacatgtttgaatgttactgatac

SEQ ID NO: 4792984 - DNA, 25 bp, Homo sapien
agtcacatgtttgaatgttactgat

SEQ ID NO: 4792985 - DNA, 25 bp, Homo sapien
gtcacatgtttgaatgttactgata

SEQ ID NO: 4792986 - DNA, 25 bp, Homo sapien
gatactgctaatcaaacttccacag

SEQ ID NO: 4792987 - DNA, 25 bp, Homo sapien
gatgctcccaatcactgaatttccc

SEQ ID NO: 4792988 - DNA, 25 bp, Homo sapien
cactgaccctctttgataacccagg

SEQ ID NO: 4792989 - DNA, 25 bp, Homo sapien
aatctctgatgctcccagatgctcc

SEQ ID NO: 4792990 - DNA, 25 bp, Homo sapien
caaaagaccatctagcatcgattcc

SEQ ID NO: 4792991 - DNA, 25 bp, Homo sapien
cacagataactcagaacaccgacct

SEQ ID NO: 4792992 - DNA, 25 bp, Homo sapien
aaactccgacactcggtgactgcca

SEQ ID NO: 4792993 - DNA, 25 bp, Homo sapien
cataatcgctggctcccatagacat

SEQ ID NO: 4792994 - DNA, 25 bp, Homo sapien
tgccccgcaagtacaccatctctga

SEQ ID NO: 4792995 - DNA, 25 bp, Homo sapien
aaaacaccctgtctcatcacagctc

SEQ ID NO: 4792996 - DNA, 25 bp, Homo sapien
agtacaccatctctgaccgccaaaa

SEQ ID NO: 4792997 - DNA, 25 bp, Homo sapien
tgaccgccaaaacaccctgtctcat

SEQ ID NO: 4792998 - DNA, 25 bp, Homo sapien
tccagtggtcgcccggcctctttgg

SEQ ID NO: 4792999 - DNA, 25 bp, Homo sapien
tctttggtcgtttccgcacttctcc

SEQ ID NO: 4793000 - DNA, 25 bp, Homo sapien
ttgtcagaatctggacgccgctgga

SEQ ID NO: 4793001 - DNA, 25 bp, Homo sapien
tccggtccacggtctctggctttgt

SEQ ID NO: 4793002 - DNA, 25 bp, Homo sapien
actcagccgtacagcggaagtgcgg

SEQ ID NO: 4793003 - DNA, 25 bp, Homo sapien
agggcggccttagcgggtccggcag

SEQ ID NO: 4793004 - DNA, 25 bp, Homo sapien
gcggccatcttggcaaacactcagc

SEQ ID NO: 4793005 - DNA, 25 bp, Homo sapien
atggcggcgcccttcggtaatagcg

SEQ ID NO: 4793006 - DNA, 25 bp, Homo sapien
aacgctctcgggttcacaaggattg

SEQ ID NO: 4793007 - DNA, 25 bp, Homo sapien
tctaacgtccgtaggaacgctctcg

SEQ ID NO: 4793008 - DNA, 25 bp, Homo sapien
ttcacaaggattgaccgaaccccag

SEQ ID NO: 4793009 - DNA, 25 bp, Homo sapien
aaccccaggatacgtcgctctccat

SEQ ID NO: 4793010 - DNA, 25 bp, Homo sapien
cgactcgcgagagcgggcacgggag

SEQ ID NO: 4793011 - DNA, 25 bp, Homo sapien
gcccgcccaggtggttgacgactcg

SEQ ID NO: 4793012 - DNA, 25 bp, Homo sapien
cttctggggagtggcgtcggcggcg

SEQ ID NO: 4793013 - DNA, 25 bp, Homo sapien
gcgctgggctgcgtgccgccggcgg

SEQ ID NO: 4793014 - DNA, 25 bp, Homo sapien
aggcgcctcgggctgggaacagaac

SEQ ID NO: 4793015 - DNA, 25 bp, Homo sapien
ctaggccggtgctttggctcctcca

SEQ ID NO: 4793016 - DNA, 25 bp, Homo sapien
ctcctccaggcgcctcgggctggga

SEQ ID NO: 4793017 - DNA, 25 bp, Homo sapien
ctttggctcctccaggcgcctcggg

SEQ ID NO: 4793018 - DNA, 25 bp, Homo sapien
tgctctgccggactcgggcttgtcg

SEQ ID NO: 4793019 - DNA, 25 bp, Homo sapien
gctggtcgtggcttgaccttccgcc

SEQ ID NO: 4793020 - DNA, 25 bp, Homo sapien
tccggtttctctgccgggactgcga

SEQ ID NO: 4793021 - DNA, 25 bp, Homo sapien
ggcttctccaccgtttgtgcctgga

SEQ ID NO: 4793022 - DNA, 25 bp, Homo sapien
tcctcaaaggacagcttccccatcc

SEQ ID NO: 4793023 - DNA, 25 bp, Homo sapien
aaagagctctgtgttcccggcgagg

SEQ ID NO: 4793024 - DNA, 25 bp, Homo sapien
tcagagccctcccggttcttgcggg

SEQ ID NO: 4793025 - DNA, 25 bp, Homo sapien
cttccccatccaggaaagagctctg

SEQ ID NO: 4793026 - DNA, 25 bp, Homo sapien
caatggccggttgggcgcagccggc

SEQ ID NO: 4793027 - DNA, 25 bp, Homo sapien
caagcggggcaatggccggttgggc

SEQ ID NO: 4793028 - DNA, 25 bp, Homo sapien
gggcaatggccggttgggcgcagcc

SEQ ID NO: 4793029 - DNA, 25 bp, Homo sapien
tgagcagcgcaagcggggcaatggc

SEQ ID NO: 4793030 - DNA, 25 bp, Homo sapien
ctttgatagggagccaggaccccct

SEQ ID NO: 4793031 - DNA, 25 bp, Homo sapien
aggaccccctgctgggagttcccag

SEQ ID NO: 4793032 - DNA, 25 bp, Homo sapien
agccaggaccccctgctgggagttc

SEQ ID NO: 4793033 - DNA, 25 bp, Homo sapien
cctgctgggagttcccaggaggatt

SEQ ID NO: 4793034 - DNA, 25 bp, Homo sapien
caggaatccatctaccgacgttagg

SEQ ID NO: 4793035 - DNA, 25 bp, Homo sapien
tcctttctggcacggcggcaggaat

SEQ ID NO: 4793036 - DNA, 25 bp, Homo sapien
caaatttcgagtgaagggagaccga

SEQ ID NO: 4793037 - DNA, 25 bp, Homo sapien
cagtctgcggaggaaaaactccttt

SEQ ID NO: 4793038 - DNA, 25 bp, Homo sapien
gacatctcaggctcgctgtctccgc

SEQ ID NO: 4793039 - DNA, 25 bp, Homo sapien
gggacatctcaggctcgctgtctcc

SEQ ID NO: 4793040 - DNA, 25 bp, Homo sapien
ggacatctcaggctcgctgtctccg

SEQ ID NO: 4793041 - DNA, 25 bp, Homo sapien
aacgctctcgggttcacaaggattg

SEQ ID NO: 4793042 - DNA, 25 bp, Homo sapien
ttcacaaggattgaccgaaccccag

SEQ ID NO: 4793043 - DNA, 25 bp, Homo sapien
tctaacgtccgtaggaacgctctcg

SEQ ID NO: 4793044 - DNA, 25 bp, Homo sapien
aaccccaggatacgtcgctctccat

SEQ ID NO: 4793045 - DNA, 25 bp, Homo sapien
ggcagagggttcgagcttttccaag

SEQ ID NO: 4793046 - DNA, 25 bp, Homo sapien
ttttccaaggcgagggtgctggctc

SEQ ID NO: 4793047 - DNA, 25 bp, Homo sapien
tcctgcagggcgccgtagagtttgc

SEQ ID NO: 4793048 - DNA, 25 bp, Homo sapien
tagagtttgcggtgcagagtcggga

SEQ ID NO: 4793049 - DNA, 25 bp, Homo sapien
cttctggggagtggcgtcggcggcg

SEQ ID NO: 4793050 - DNA, 25 bp, Homo sapien
gcccgcccaggtggttgacgactcg

SEQ ID NO: 4793051 - DNA, 25 bp, Homo sapien
cgactcgcgagagcgggcacgggag

SEQ ID NO: 4793052 - DNA, 25 bp, Homo sapien
gcgctgggctgcgtgccgccggcgg

SEQ ID NO: 4793053 - DNA, 25 bp, Homo sapien
ctttggctcctccaggcgcctcggg

SEQ ID NO: 4793054 - DNA, 25 bp, Homo sapien
ctaggccggtgctttggctcctcca

SEQ ID NO: 4793055 - DNA, 25 bp, Homo sapien
ctcctccaggcgcctcgggctggga

SEQ ID NO: 4793056 - DNA, 25 bp, Homo sapien
aggcgcctcgggctgggaacagaac

SEQ ID NO: 4793057 - DNA, 25 bp, Homo sapien
tgctctgccggactcgggcttgtcg

SEQ ID NO: 4793058 - DNA, 25 bp, Homo sapien
gctggtcgtggcttgaccttccgcc

SEQ ID NO: 4793059 - DNA, 25 bp, Homo sapien
tccggtttctctgccgggactgcga

SEQ ID NO: 4793060 - DNA, 25 bp, Homo sapien
ggcttctccaccgtttgtgcctgga

SEQ ID NO: 4793061 - DNA, 25 bp, Homo sapien
tcctcaaaggacagcttccccatcc

SEQ ID NO: 4793062 - DNA, 25 bp, Homo sapien
aaagagctctgtgttcccggcgagg

SEQ ID NO: 4793063 - DNA, 25 bp, Homo sapien
cttccccatccaggaaagagctctg

SEQ ID NO: 4793064 - DNA, 25 bp, Homo sapien
tcagagccctcccggttcttgcggg

SEQ ID NO: 4793065 - DNA, 25 bp, Homo sapien
caatggccggttgggcgcagccggc

SEQ ID NO: 4793066 - DNA, 25 bp, Homo sapien
caagcggggcaatggccggttgggc

SEQ ID NO: 4793067 - DNA, 25 bp, Homo sapien
gggcaatggccggttgggcgcagcc

SEQ ID NO: 4793068 - DNA, 25 bp, Homo sapien
tgagcagcgcaagcggggcaatggc

SEQ ID NO: 4793069 - DNA, 25 bp, Homo sapien
cctgctgggagttcccaggaggatt

SEQ ID NO: 4793070 - DNA, 25 bp, Homo sapien
ctttgatagggagccaggaccccct

SEQ ID NO: 4793071 - DNA, 25 bp, Homo sapien
agccaggaccccctgctgggagttc

SEQ ID NO: 4793072 - DNA, 25 bp, Homo sapien
aggaccccctgctgggagttcccag

SEQ ID NO: 4793073 - DNA, 25 bp, Homo sapien
tcctttctggcacggcggcaggaat

SEQ ID NO: 4793074 - DNA, 25 bp, Homo sapien
cagtctgcggaggaaaaactccttt

SEQ ID NO: 4793075 - DNA, 25 bp, Homo sapien
tatgccgagagtcgggcaaatttcg

SEQ ID NO: 4793076 - DNA, 25 bp, Homo sapien
caaatttcgagtgaagggagaccga

SEQ ID NO: 4793077 - DNA, 25 bp, Homo sapien
acagggtgtgctttcgtcccagctt

SEQ ID NO: 4793078 - DNA, 25 bp, Homo sapien
cagggtgtgctttcgtcccagctta

SEQ ID NO: 4793079 - DNA, 25 bp, Homo sapien
gggtgtgctttcgtcccagcttagt

SEQ ID NO: 4793080 - DNA, 25 bp, Homo sapien
gtgtgctttcgtcccagcttagttt

SEQ ID NO: 4793081 - DNA, 25 bp, Homo sapien
cctctttgtgtacccgacggtgttg

SEQ ID NO: 4793082 - DNA, 25 bp, Homo sapien
ctgtgagctcaggaccatcccggcg

SEQ ID NO: 4793083 - DNA, 25 bp, Homo sapien
ctcctctttgtgtacccgacggtgt

SEQ ID NO: 4793084 - DNA, 25 bp, Homo sapien
tgtgagctcaggaccatcccggcgg

SEQ ID NO: 4793085 - DNA, 25 bp, Homo sapien
catcgtgtgtgtatggccacagccc

SEQ ID NO: 4793086 - DNA, 25 bp, Homo sapien
tcccaggcgagtctgagaaacggcg

SEQ ID NO: 4793087 - DNA, 25 bp, Homo sapien
tcgctcggtgagcacgtgaatcaag

SEQ ID NO: 4793088 - DNA, 25 bp, Homo sapien
aggaaatggaacatccgcagggccg

SEQ ID NO: 4793089 - DNA, 25 bp, Homo sapien
aacgctctcgggttcacaaggattg

SEQ ID NO: 4793090 - DNA, 25 bp, Homo sapien
ttcacaaggattgaccgaaccccag

SEQ ID NO: 4793091 - DNA, 25 bp, Homo sapien
tctaacgtccgtaggaacgctctcg

SEQ ID NO: 4793092 - DNA, 25 bp, Homo sapien
aaccccaggatacgtcgctctccat

SEQ ID NO: 4793093 - DNA, 25 bp, Homo sapien
gcccgcccaggtggttgacgactcg

SEQ ID NO: 4793094 - DNA, 25 bp, Homo sapien
cgactcgcgagagcgggcacgggag

SEQ ID NO: 4793095 - DNA, 25 bp, Homo sapien
cttctggggagtggcgtcggcggcg

SEQ ID NO: 4793096 - DNA, 25 bp, Homo sapien
gcgctgggctgcgtgccgccggcgg

SEQ ID NO: 4793097 - DNA, 25 bp, Homo sapien
ctaggccggtgctttggctcctcca

SEQ ID NO: 4793098 - DNA, 25 bp, Homo sapien
aggcgcctcgggctgggaacagaac

SEQ ID NO: 4793099 - DNA, 25 bp, Homo sapien
ctttggctcctccaggcgcctcggg

SEQ ID NO: 4793100 - DNA, 25 bp, Homo sapien
ctcctccaggcgcctcgggctggga

SEQ ID NO: 4793101 - DNA, 25 bp, Homo sapien
cctctgcgctcgtgggggcgtcgtg

SEQ ID NO: 4793102 - DNA, 25 bp, Homo sapien
tcgggcttgtcgtggcctcgctctc

SEQ ID NO: 4793103 - DNA, 25 bp, Homo sapien
gtgctctgccggactcgggcttgtc

SEQ ID NO: 4793104 - DNA, 25 bp, Homo sapien
ccggactcgggcttgtcgtggcctc

SEQ ID NO: 4793105 - DNA, 25 bp, Homo sapien
gacgcagaggcctcccggctgtgcc

SEQ ID NO: 4793106 - DNA, 25 bp, Homo sapien
ctccaccgtttgtgcctggacgcag

SEQ ID NO: 4793107 - DNA, 25 bp, Homo sapien
tccggtttctctgccgggactgcga

SEQ ID NO: 4793108 - DNA, 25 bp, Homo sapien
ggcttctccaccgtttgtgcctgga

SEQ ID NO: 4793109 - DNA, 25 bp, Homo sapien
tcctcaaaggacagcttccccatcc

SEQ ID NO: 4793110 - DNA, 25 bp, Homo sapien
aaagagctctgtgttcccggcgagg

SEQ ID NO: 4793111 - DNA, 25 bp, Homo sapien
tcagagccctcccggttcttgcggg

SEQ ID NO: 4793112 - DNA, 25 bp, Homo sapien
cttccccatccaggaaagagctctg

SEQ ID NO: 4793113 - DNA, 25 bp, Homo sapien
cgggctttgatagggagccaggacc

SEQ ID NO: 4793114 - DNA, 25 bp, Homo sapien
caatggccggttgggcgcagccggc

SEQ ID NO: 4793115 - DNA, 25 bp, Homo sapien
tgagcagcgcaagcggggcaatggc

SEQ ID NO: 4793116 - DNA, 25 bp, Homo sapien
gccggcgggctttgatagggagcca

SEQ ID NO: 4793117 - DNA, 25 bp, Homo sapien
tcctttctggcacggcggcaggaat

SEQ ID NO: 4793118 - DNA, 25 bp, Homo sapien
caggaatccatctaccgacgttagg

SEQ ID NO: 4793119 - DNA, 25 bp, Homo sapien
cagtctgcggaggaaaaactccttt

SEQ ID NO: 4793120 - DNA, 25 bp, Homo sapien
caaatttcgagtgaagggagaccga

SEQ ID NO: 4793121 - DNA, 25 bp, Homo sapien
ggacatctcaggctcgctgtctctg

SEQ ID NO: 4793122 - DNA, 25 bp, Homo sapien
tttcggggacatctcaggctcgctg

SEQ ID NO: 4793123 - DNA, 25 bp, Homo sapien
tctcaggctcgctgtctctgccttg

SEQ ID NO: 4793124 - DNA, 25 bp, Homo sapien
ggctttcggggacatctcaggctcg

SEQ ID NO: 4793125 - DNA, 25 bp, Homo sapien
aaccccaggatacgtcgctctccat

SEQ ID NO: 4793126 - DNA, 25 bp, Homo sapien
ttcacaaggattgaccgaaccccag

SEQ ID NO: 4793127 - DNA, 25 bp, Homo sapien
aacgctctcgggttcacaaggattg

SEQ ID NO: 4793128 - DNA, 25 bp, Homo sapien
tctaacgtccgtaggaacgctctcg

SEQ ID NO: 4793129 - DNA, 25 bp, Homo sapien
ttttccaaggcgagggtgctggctc

SEQ ID NO: 4793130 - DNA, 25 bp, Homo sapien
tcctgcagggcgccgtagagtttgc

SEQ ID NO: 4793131 - DNA, 25 bp, Homo sapien
tagagtttgcggtgcagagtcggga

SEQ ID NO: 4793132 - DNA, 25 bp, Homo sapien
ggcagagggttcgagcttttccaag

SEQ ID NO: 4793133 - DNA, 25 bp, Homo sapien
cttctggggagtggcgtcggcggcg

SEQ ID NO: 4793134 - DNA, 25 bp, Homo sapien
gcccgcccaggtggttgacgactcg

SEQ ID NO: 4793135 - DNA, 25 bp, Homo sapien
cgactcgcgagagcgggcacgggag

SEQ ID NO: 4793136 - DNA, 25 bp, Homo sapien
gcgctgggctgcgtgccgccggcgg

SEQ ID NO: 4793137 - DNA, 25 bp, Homo sapien
aggcgcctcgggctgggaacagaac

SEQ ID NO: 4793138 - DNA, 25 bp, Homo sapien
ctttggctcctccaggcgcctcggg

SEQ ID NO: 4793139 - DNA, 25 bp, Homo sapien
ctaggccggtgctttggctcctcca

SEQ ID NO: 4793140 - DNA, 25 bp, Homo sapien
ctcctccaggcgcctcgggctggga

SEQ ID NO: 4793141 - DNA, 25 bp, Homo sapien
tgctctgccggactcgggcttgtcg

SEQ ID NO: 4793142 - DNA, 25 bp, Homo sapien
gctggtcgtggcttgaccttccgcc

SEQ ID NO: 4793143 - DNA, 25 bp, Homo sapien
tccggtttctctgccgggactgcga

SEQ ID NO: 4793144 - DNA, 25 bp, Homo sapien
ggcttctccaccgtttgtgcctgga

SEQ ID NO: 4793145 - DNA, 25 bp, Homo sapien
tcctcaaaggacagcttccccatcc

SEQ ID NO: 4793146 - DNA, 25 bp, Homo sapien
aaagagctctgtgttcccggcgagg

SEQ ID NO: 4793147 - DNA, 25 bp, Homo sapien
cttccccatccaggaaagagctctg

SEQ ID NO: 4793148 - DNA, 25 bp, Homo sapien
tcagagccctcccggttcttgcggg

SEQ ID NO: 4793149 - DNA, 25 bp, Homo sapien
cgggctttgatagggagccaggacc

SEQ ID NO: 4793150 - DNA, 25 bp, Homo sapien
caatggccggttgggcgcagccggc

SEQ ID NO: 4793151 - DNA, 25 bp, Homo sapien
tgagcagcgcaagcggggcaatggc

SEQ ID NO: 4793152 - DNA, 25 bp, Homo sapien
gccggcgggctttgatagggagcca

SEQ ID NO: 4793153 - DNA, 25 bp, Homo sapien
tcctttctggcacggcggcaggaat

SEQ ID NO: 4793154 - DNA, 25 bp, Homo sapien
caggaatccatctaccgacgttagg

SEQ ID NO: 4793155 - DNA, 25 bp, Homo sapien
cagtctgcggaggaaaaactccttt

SEQ ID NO: 4793156 - DNA, 25 bp, Homo sapien
caaatttcgagtgaagggagaccga

SEQ ID NO: 4793157 - DNA, 25 bp, Homo sapien
ttttccaaggcgagggtgctggctc

SEQ ID NO: 4793158 - DNA, 25 bp, Homo sapien
tcctgcagggcgccgtagagtttgc

SEQ ID NO: 4793159 - DNA, 25 bp, Homo sapien
tagagtttgcggtgcagagtcggga

SEQ ID NO: 4793160 - DNA, 25 bp, Homo sapien
ggcagagggttcgagcttttccaag

SEQ ID NO: 4793161 - DNA, 25 bp, Homo sapien
gccacgtccagcccgcccaggtggt

SEQ ID NO: 4793162 - DNA, 25 bp, Homo sapien
gcggccccggcgtgcgccagctgcc

SEQ ID NO: 4793163 - DNA, 25 bp, Homo sapien
cccggcgtgcgccagctgccaggtg

SEQ ID NO: 4793164 - DNA, 25 bp, Homo sapien
gcgctgggctgcgtgccgccggcgg

SEQ ID NO: 4793165 - DNA, 25 bp, Homo sapien
cctctgcgctcgtgggggcgtcgtg

SEQ ID NO: 4793166 - DNA, 25 bp, Homo sapien
tcgggcttgtcgtggcctcgctctc

SEQ ID NO: 4793167 - DNA, 25 bp, Homo sapien
gtgctctgccggactcgggcttgtc

SEQ ID NO: 4793168 - DNA, 25 bp, Homo sapien
ccggactcgggcttgtcgtggcctc

SEQ ID NO: 4793169 - DNA, 25 bp, Homo sapien
ctccaccgtttgtgcctggacgcag

SEQ ID NO: 4793170 - DNA, 25 bp, Homo sapien
gacgcagaggcctcccggctgtgcc

SEQ ID NO: 4793171 - DNA, 25 bp, Homo sapien
tccggtttctctgccgggactgcga

SEQ ID NO: 4793172 - DNA, 25 bp, Homo sapien
ggcttctccaccgtttgtgcctgga

SEQ ID NO: 4793173 - DNA, 25 bp, Homo sapien
aaagagctctgtgttcccggcgagg

SEQ ID NO: 4793174 - DNA, 25 bp, Homo sapien
ccatccaggaaagagctctgtgttc

SEQ ID NO: 4793175 - DNA, 25 bp, Homo sapien
tccaggaaagagctctgtgttcccg

SEQ ID NO: 4793176 - DNA, 25 bp, Homo sapien
cttccccatccaggaaagagctctg

SEQ ID NO: 4793177 - DNA, 25 bp, Homo sapien
cgggctttgatagggagccaggacc

SEQ ID NO: 4793178 - DNA, 25 bp, Homo sapien
tggccggttgggcgcagccggcggg

SEQ ID NO: 4793179 - DNA, 25 bp, Homo sapien
aatggccggttgggcgcagccggcg

SEQ ID NO: 4793180 - DNA, 25 bp, Homo sapien
gccggcgggctttgatagggagcca

SEQ ID NO: 4793181 - DNA, 25 bp, Homo sapien
caggaatccatctaccgacgttagg

SEQ ID NO: 4793182 - DNA, 25 bp, Homo sapien
tcctttctggcacggcggcaggaat

SEQ ID NO: 4793183 - DNA, 25 bp, Homo sapien
cagtctgcggaggaaaaactccttt

SEQ ID NO: 4793184 - DNA, 25 bp, Homo sapien
caaatttcgagtgaagggagaccga

SEQ ID NO: 4793185 - DNA, 25 bp, Homo sapien
ctgattttctcctcccctttgtgta

SEQ ID NO: 4793186 - DNA, 25 bp, Homo sapien
ctttgtgtacccgacgggtgttgct

SEQ ID NO: 4793187 - DNA, 25 bp, Homo sapien
tgtacccgacgggtgttgctgtgag

SEQ ID NO: 4793188 - DNA, 25 bp, Homo sapien
gtctgattttctcctcccctttgtg

SEQ ID NO: 4793189 - DNA, 25 bp, Homo sapien
gaagcaactattccaagacacgcag

SEQ ID NO: 4793190 - DNA, 25 bp, Homo sapien
gtgtagtcatccctcttgcaagttg

SEQ ID NO: 4793191 - DNA, 25 bp, Homo sapien
cagcgctctcatggtttctatcaca

SEQ ID NO: 4793192 - DNA, 25 bp, Homo sapien
tgttgaccccaagctgtctacctga

SEQ ID NO: 4793193 - DNA, 25 bp, Homo sapien
agggcatttttagggcagcaaacct

SEQ ID NO: 4793194 - DNA, 25 bp, Homo sapien
gattctaactatatggcactctgga

SEQ ID NO: 4793195 - DNA, 25 bp, Homo sapien
tgcaacaaatgtaccaccctggtga

SEQ ID NO: 4793196 - DNA, 25 bp, Homo sapien
gaacccagggaatctacaacaccaa

SEQ ID NO: 4793197 - DNA, 25 bp, Homo sapien
tataggcacctgcatgtgcttcctt

SEQ ID NO: 4793198 - DNA, 25 bp, Homo sapien
ggcacctgcatgtgcttccttttga

SEQ ID NO: 4793199 - DNA, 25 bp, Homo sapien
tcctataggcacctgcatgtgcttc

SEQ ID NO: 4793200 - DNA, 25 bp, Homo sapien
cctgcatgtgcttccttttgaggat

SEQ ID NO: 4793201 - DNA, 25 bp, Homo sapien
tccctcagcatacagttagcccgtt

SEQ ID NO: 4793202 - DNA, 25 bp, Homo sapien
tcccatgaaaagaagtaggtatccg

SEQ ID NO: 4793203 - DNA, 25 bp, Homo sapien
aagatgcatgtacaccacctgtcct

SEQ ID NO: 4793204 - DNA, 25 bp, Homo sapien
cactttcccaaggttctgagctaca

SEQ ID NO: 4793205 - DNA, 25 bp, Homo sapien
ccttgccagctagaaccaggcatgc

SEQ ID NO: 4793206 - DNA, 25 bp, Homo sapien
tttcaggagttgttacagcaacacc

SEQ ID NO: 4793207 - DNA, 25 bp, Homo sapien
ggcctgtccccggacactcaggatg

SEQ ID NO: 4793208 - DNA, 25 bp, Homo sapien
gagcctccttttgaaggtaatttca

SEQ ID NO: 4793209 - DNA, 25 bp, Homo sapien
tcactttgcctttgacgcgctatgg

SEQ ID NO: 4793210 - DNA, 25 bp, Homo sapien
tgccctaaggaatgggtcctcacca

SEQ ID NO: 4793211 - DNA, 25 bp, Homo sapien
cgcgctatggcctaaatgtcagtgt

SEQ ID NO: 4793212 - DNA, 25 bp, Homo sapien
ccctcctgaaggaaggtagtgctct

SEQ ID NO: 4793213 - DNA, 25 bp, Homo sapien
gggtaaaatgcaaaccaggatgagg

SEQ ID NO: 4793214 - DNA, 25 bp, Homo sapien
gccacaagcttcatccgagggtaaa

SEQ ID NO: 4793215 - DNA, 25 bp, Homo sapien
tctctgggtccaggacccgaggtct

SEQ ID NO: 4793216 - DNA, 25 bp, Homo sapien
agagtccaggggttcgccacaagct

SEQ ID NO: 4793217 - DNA, 25 bp, Homo sapien
atggccaaagcagggggagtcagga

SEQ ID NO: 4793218 - DNA, 25 bp, Homo sapien
gatgccaggttcctccggccacccc

SEQ ID NO: 4793219 - DNA, 25 bp, Homo sapien
catggccaaagcagggggagtcagg

SEQ ID NO: 4793220 - DNA, 25 bp, Homo sapien
tgtggtcctaacccggggatgccag

SEQ ID NO: 4793221 - DNA, 25 bp, Homo sapien
tgtccatcaggacccatggaactgg

SEQ ID NO: 4793222 - DNA, 25 bp, Homo sapien
taaagaagaaacaggacccactgct

SEQ ID NO: 4793223 - DNA, 25 bp, Homo sapien
acgttttggtgtggcagatcctgca

SEQ ID NO: 4793224 - DNA, 25 bp, Homo sapien
gagacatgccatggagcttcctatt

SEQ ID NO: 4793225 - DNA, 25 bp, Homo sapien
ggaaagtgagatcctctcctcctct

SEQ ID NO: 4793226 - DNA, 25 bp, Homo sapien
tgaggggacggttacttgacctcca

SEQ ID NO: 4793227 - DNA, 25 bp, Homo sapien
agagagggcaccgatgcccagagtg

SEQ ID NO: 4793228 - DNA, 25 bp, Homo sapien
gtacagggggaaagtgagatcctct

SEQ ID NO: 4793229 - DNA, 25 bp, Homo sapien
tgtgcagtctgcagcgtaactctga

SEQ ID NO: 4793230 - DNA, 25 bp, Homo sapien
taactctgaacttgacaatgaggtc

SEQ ID NO: 4793231 - DNA, 25 bp, Homo sapien
agcaggccctagaagcaggcgaggt

SEQ ID NO: 4793232 - DNA, 25 bp, Homo sapien
tctgcagcgtaactctgaacttgac

SEQ ID NO: 4793233 - DNA, 25 bp, Homo sapien
tccatggagtctgccccattgcctg

SEQ ID NO: 4793234 - DNA, 25 bp, Homo sapien
caatgtcctttcaggcaaacacggc

SEQ ID NO: 4793235 - DNA, 25 bp, Homo sapien
gaagagaagcatctttccatggagt

SEQ ID NO: 4793236 - DNA, 25 bp, Homo sapien
gcattcgtgcccatctagaggacca

SEQ ID NO: 4793237 - DNA, 25 bp, Homo sapien
gggagatccccttcaggcactcttg

SEQ ID NO: 4793238 - DNA, 25 bp, Homo sapien
tgtgcgacggtgctgaatcttgtcc

SEQ ID NO: 4793239 - DNA, 25 bp, Homo sapien
accaggtagcgccacgggagatccc

SEQ ID NO: 4793240 - DNA, 25 bp, Homo sapien
ccaggtagctgttctgtgtgcgacg

SEQ ID NO: 4793241 - DNA, 25 bp, Homo sapien
cctttcctgggatacgccttggagc

SEQ ID NO: 4793242 - DNA, 25 bp, Homo sapien
gctggggacgctctgctccagcctt

SEQ ID NO: 4793243 - DNA, 25 bp, Homo sapien
tgggatacgccttggagccatggct

SEQ ID NO: 4793244 - DNA, 25 bp, Homo sapien
ggagccatggcttaaaagtaaggac

SEQ ID NO: 4793245 - DNA, 25 bp, Homo sapien
ccatgtaaatggagcatccccagcc

SEQ ID NO: 4793246 - DNA, 25 bp, Homo sapien
ggtgcttaggtctattccaatccat

SEQ ID NO: 4793247 - DNA, 25 bp, Homo sapien
aggtctattccaatccatgtaaatg

SEQ ID NO: 4793248 - DNA, 25 bp, Homo sapien
tgtaattgtggtgcttaggtctatt

SEQ ID NO: 4793249 - DNA, 25 bp, Homo sapien
cggcgccgagagtgagtaagaagtt

SEQ ID NO: 4793250 - DNA, 25 bp, Homo sapien
gcggcgccgagagtgagtaagaagt

SEQ ID NO: 4793251 - DNA, 25 bp, Homo sapien
tagacgaaactggaaaatggccttc

SEQ ID NO: 4793252 - DNA, 25 bp, Homo sapien
gatatgtacgcatcttcctgtggcc

SEQ ID NO: 4793253 - DNA, 25 bp, Homo sapien
cagtgatggcaacgctgtaggcacc

SEQ ID NO: 4793254 - DNA, 25 bp, Homo sapien
caaaacacgatcttagggcgggacg

SEQ ID NO: 4793255 - DNA, 25 bp, Homo sapien
tgtcaagttcagagttacgctgcag

SEQ ID NO: 4793256 - DNA, 25 bp, Homo sapien
cgtgtttgcctgaaaggacattggc

SEQ ID NO: 4793257 - DNA, 25 bp, Homo sapien
gctggtcctctagatgggcacgaat

SEQ ID NO: 4793258 - DNA, 25 bp, Homo sapien
ttcctcaaggtatgcactcagcggg

SEQ ID NO: 4793259 - DNA, 25 bp, Homo sapien
aggtctaatactgtgttcccagcat

SEQ ID NO: 4793260 - DNA, 25 bp, Homo sapien
ttcctgatccccctctgggcgaggg

SEQ ID NO: 4793261 - DNA, 25 bp, Homo sapien
catggcactggaaactccttcctgt

SEQ ID NO: 4793262 - DNA, 25 bp, Homo sapien
gacatgtggctcgtgccgaggtcta

SEQ ID NO: 4793263 - DNA, 25 bp, Homo sapien
actctgggcatcggtgccctctctg

SEQ ID NO: 4793264 - DNA, 25 bp, Homo sapien
gccctctctggggttggaacaggaa

SEQ ID NO: 4793265 - DNA, 25 bp, Homo sapien
tcaagtaaccgtcccctcactctgg

SEQ ID NO: 4793266 - DNA, 25 bp, Homo sapien
gatgctccacacctggaggtcaagt

SEQ ID NO: 4793267 - DNA, 25 bp, Homo sapien
gtgggacttgagttgagactcaatt

SEQ ID NO: 4793268 - DNA, 25 bp, Homo sapien
tgtgggacttgagttgagactcaat

SEQ ID NO: 4793269 - DNA, 25 bp, Homo sapien
cgtgggtggtaatgcagtgggagcc

SEQ ID NO: 4793270 - DNA, 25 bp, Homo sapien
ccagagccgggtgcccagttccatg

SEQ ID NO: 4793271 - DNA, 25 bp, Homo sapien
tccatgggtcctgatggacagaagg

SEQ ID NO: 4793272 - DNA, 25 bp, Homo sapien
agccgggtgcccagttccatgggtc

SEQ ID NO: 4793273 - DNA, 25 bp, Homo sapien
tgcaggatctgccacaccaaaacgt

SEQ ID NO: 4793274 - DNA, 25 bp, Homo sapien
gcaggatctgccacaccaaaacgtc

SEQ ID NO: 4793275 - DNA, 25 bp, Homo sapien
tggccccgggtcccagcagtgggtc

SEQ ID NO: 4793276 - DNA, 25 bp, Homo sapien
ccgggtcccagcagtgggtcctgtt

SEQ ID NO: 4793277 - DNA, 25 bp, Homo sapien
ctttggaccatagacgcagctctga

SEQ ID NO: 4793278 - DNA, 25 bp, Homo sapien
gaggaattcccgcaacgcatgagtt

SEQ ID NO: 4793279 - DNA, 25 bp, Homo sapien
gggacctctgattgcctgtgagcag

SEQ ID NO: 4793280 - DNA, 25 bp, Homo sapien
tagattcctgtcgtgcttgctgtcc

SEQ ID NO: 4793281 - DNA, 25 bp, Homo sapien
tcaaaaggaggctcgtgcaggtgcc

SEQ ID NO: 4793282 - DNA, 25 bp, Homo sapien
caaaaggaggctcgtgcaggtgcct

SEQ ID NO: 4793283 - DNA, 25 bp, Homo sapien
ttcaaaaggaggctcgtgcaggtgc

SEQ ID NO: 4793284 - DNA, 25 bp, Homo sapien
tatgtagaaggcctgcctggaccga

SEQ ID NO: 4793285 - DNA, 25 bp, Homo sapien
ccggggccgttgagaacagcttgat

SEQ ID NO: 4793286 - DNA, 25 bp, Homo sapien
ggaccgactgcacagaggagcagca

SEQ ID NO: 4793287 - DNA, 25 bp, Homo sapien
gtcaccggggccgttgagaacagct

SEQ ID NO: 4793288 - DNA, 25 bp, Homo sapien
tatagagacctctaccacgctggtt

SEQ ID NO: 4793289 - DNA, 25 bp, Homo sapien
cacgctggttccaagtgacttgaca

SEQ ID NO: 4793290 - DNA, 25 bp, Homo sapien
tgacttgacaaggacatgccaacct

SEQ ID NO: 4793291 - DNA, 25 bp, Homo sapien
gttgcttccaggaatggcagtttca

SEQ ID NO: 4793292 - DNA, 25 bp, Homo sapien
tttaggcgtcctagcatccagggaa

SEQ ID NO: 4793293 - DNA, 25 bp, Homo sapien
gttggatgacacctaagaaatcctc

SEQ ID NO: 4793294 - DNA, 25 bp, Homo sapien
caaagcaaacccattggtgtgtgag

SEQ ID NO: 4793295 - DNA, 25 bp, Homo sapien
tctttggtcataagccaactggctg

SEQ ID NO: 4793296 - DNA, 25 bp, Homo sapien
cactgcctctattaatccagggacc

SEQ ID NO: 4793297 - DNA, 25 bp, Homo sapien
atcactgcctctattaatccaggga

SEQ ID NO: 4793298 - DNA, 25 bp, Homo sapien
cctctattaatccagggaccagcag

SEQ ID NO: 4793299 - DNA, 25 bp, Homo sapien
ctgcctctattaatccagggaccag

SEQ ID NO: 4793300 - DNA, 25 bp, Homo sapien
gcctgatttctgcttatcacaggta

SEQ ID NO: 4793301 - DNA, 25 bp, Homo sapien
aaatgcctctaaggcagtgcctgat

SEQ ID NO: 4793302 - DNA, 25 bp, Homo sapien
aatgcctctaaggcagtgcctgatt

SEQ ID NO: 4793303 - DNA, 25 bp, Homo sapien
tgatttctgcttatcacaggtaccc

SEQ ID NO: 4793304 - DNA, 25 bp, Homo sapien
cagtctgagcattggccttccaagc

SEQ ID NO: 4793305 - DNA, 25 bp, Homo sapien
agcattggccttccaagctcagtgc

SEQ ID NO: 4793306 - DNA, 25 bp, Homo sapien
cctgcaaatgtggggcagtctgagc

SEQ ID NO: 4793307 - DNA, 25 bp, Homo sapien
gcattggccttccaagctcagtgca

SEQ ID NO: 4793308 - DNA, 25 bp, Homo sapien
taggatcccatggtttgcaacaagc

SEQ ID NO: 4793309 - DNA, 25 bp, Homo sapien
tcttgccatggacccaggcttgggt

SEQ ID NO: 4793310 - DNA, 25 bp, Homo sapien
ggtggctgtgttgtgatcttatgat

SEQ ID NO: 4793311 - DNA, 25 bp, Homo sapien
cagaatccggaatctcttgccatgg

SEQ ID NO: 4793312 - DNA, 25 bp, Homo sapien
gcccagtaaaccatgacagcagcag

SEQ ID NO: 4793313 - DNA, 25 bp, Homo sapien
ttccccatggcccagtaaaccatga

SEQ ID NO: 4793314 - DNA, 25 bp, Homo sapien
ggaacccagatgcttcagagatacc

SEQ ID NO: 4793315 - DNA, 25 bp, Homo sapien
tcttggaacccagatgcttcagaga

SEQ ID NO: 4793316 - DNA, 25 bp, Homo sapien
taatcgccaagacaagccaagtgca

SEQ ID NO: 4793317 - DNA, 25 bp, Homo sapien
caactcaatatatgttacgcttggg

SEQ ID NO: 4793318 - DNA, 25 bp, Homo sapien
tattgcgtccatagcacggacttgc

SEQ ID NO: 4793319 - DNA, 25 bp, Homo sapien
tgaactgactcggagcgaggagacc

SEQ ID NO: 4793320 - DNA, 25 bp, Homo sapien
gagctgccatctcggcaccccgaat

SEQ ID NO: 4793321 - DNA, 25 bp, Homo sapien
cgggcgctacggtgaagagggtggg

SEQ ID NO: 4793322 - DNA, 25 bp, Homo sapien
catggcggtaagggccgggcgctac

SEQ ID NO: 4793323 - DNA, 25 bp, Homo sapien
cggggctggtgaagggtgtgttggc

SEQ ID NO: 4793324 - DNA, 25 bp, Homo sapien
tctctgagtagtaagactcaaaatg

SEQ ID NO: 4793325 - DNA, 25 bp, Homo sapien
tctgagtagtaagactcaaaatgat

SEQ ID NO: 4793326 - DNA, 25 bp, Homo sapien
gatgtgaccgcctagatttccattt

SEQ ID NO: 4793327 - DNA, 25 bp, Homo sapien
tttatcatgttgtgatgtgaccgcc

SEQ ID NO: 4793328 - DNA, 25 bp, Homo sapien
cagtccctactggttgacaggagac

SEQ ID NO: 4793329 - DNA, 25 bp, Homo sapien
actgtgtcagctttttacattgagc

SEQ ID NO: 4793330 - DNA, 25 bp, Homo sapien
tggtacaggcacatgcagtccctca

SEQ ID NO: 4793331 - DNA, 25 bp, Homo sapien
taaatggaaggtgaacgtggtacag

SEQ ID NO: 4793332 - DNA, 25 bp, Homo sapien
ggctctgggtacctgattgccgagt

SEQ ID NO: 4793333 - DNA, 25 bp, Homo sapien
ttaataatagtaggcacctgcggag

SEQ ID NO: 4793334 - DNA, 25 bp, Homo sapien
ttgttccaaagtggccatatcagtt

SEQ ID NO: 4793335 - DNA, 25 bp, Homo sapien
ttccaaagtggccatatcagtttct

SEQ ID NO: 4793336 - DNA, 25 bp, Homo sapien
tccaaagtggccatatcagtttctt

SEQ ID NO: 4793337 - DNA, 25 bp, Homo sapien
attttgttccaaagtggccatatca

SEQ ID NO: 4793338 - DNA, 25 bp, Homo sapien
tcacttccctgagagggtgaactaa

SEQ ID NO: 4793339 - DNA, 25 bp, Homo sapien
aactgatagatctgttgggccctca

SEQ ID NO: 4793340 - DNA, 25 bp, Homo sapien
ccctgagagggtgaactaactgata

SEQ ID NO: 4793341 - DNA, 25 bp, Homo sapien
gagggtgaactaactgatagatctg

SEQ ID NO: 4793342 - DNA, 25 bp, Homo sapien
gaagcaatgtatcccacttggtggg

SEQ ID NO: 4793343 - DNA, 25 bp, Homo sapien
aacagtgatcttcaggtgcaggccc

SEQ ID NO: 4793344 - DNA, 25 bp, Homo sapien
tatctagcaaatgaggtggccaccc

SEQ ID NO: 4793345 - DNA, 25 bp, Homo sapien
gaatcaggcaaccatttagggtccc

SEQ ID NO: 4793346 - DNA, 25 bp, Homo sapien
cactcctgggttaagcatacaagtt

SEQ ID NO: 4793347 - DNA, 25 bp, Homo sapien
tcctgggttaagcatacaagttata

SEQ ID NO: 4793348 - DNA, 25 bp, Homo sapien
gggtcacgtaactcaacagctttct

SEQ ID NO: 4793349 - DNA, 25 bp, Homo sapien
aagttataaatcaatcgggtcacgt

SEQ ID NO: 4793350 - DNA, 25 bp, Homo sapien
cctggagttcggaagccattgcagc

SEQ ID NO: 4793351 - DNA, 25 bp, Homo sapien
cagcttagctggtgaggaacgtgca

SEQ ID NO: 4793352 - DNA, 25 bp, Homo sapien
tatctacaggagcatcgcccattgg

SEQ ID NO: 4793353 - DNA, 25 bp, Homo sapien
gacagctgctgtgaccaaagggaga

SEQ ID NO: 4793354 - DNA, 25 bp, Homo sapien
aactgctgagacctatttccctttc

SEQ ID NO: 4793355 - DNA, 25 bp, Homo sapien
ctgggaagctcttcgtggcctcaat

SEQ ID NO: 4793356 - DNA, 25 bp, Homo sapien
tgattaaaggcagagacacaggact

SEQ ID NO: 4793357 - DNA, 25 bp, Homo sapien
ttattctctgatagactgagctcct

SEQ ID NO: 4793358 - DNA, 25 bp, Homo sapien
aaatactgattaagccatgggcagg

SEQ ID NO: 4793359 - DNA, 25 bp, Homo sapien
ggactctctggatagttgaacctct

SEQ ID NO: 4793360 - DNA, 25 bp, Homo sapien
gaatgccaactgaggcaagtcaagt

SEQ ID NO: 4793361 - DNA, 25 bp, Homo sapien
catgaacccttgtaacaactgcagg

SEQ ID NO: 4793362 - DNA, 25 bp, Homo sapien
cacacctttaggactgatcagggca

SEQ ID NO: 4793363 - DNA, 25 bp, Homo sapien
aaagtgaagaatccctcaggtgcca

SEQ ID NO: 4793364 - DNA, 25 bp, Homo sapien
taagccagtctgtgaaagtgccaaa

SEQ ID NO: 4793365 - DNA, 25 bp, Homo sapien
tccgcacacgggagacatatccaaa

SEQ ID NO: 4793366 - DNA, 25 bp, Homo sapien
gactcttacaggtgactggcttgga

SEQ ID NO: 4793367 - DNA, 25 bp, Homo sapien
tgtaatctcccttagttctaccagg

SEQ ID NO: 4793368 - DNA, 25 bp, Homo sapien
cttgaagacagggttatgatcctct

SEQ ID NO: 4793369 - DNA, 25 bp, Homo sapien
tacatgtcccaggactataggccag

SEQ ID NO: 4793370 - DNA, 25 bp, Homo sapien
tgcagagaaacctttgcaccagttt

SEQ ID NO: 4793371 - DNA, 25 bp, Homo sapien
aaatattgttcccagaatgctcacc

SEQ ID NO: 4793372 - DNA, 25 bp, Homo sapien
gggttggctgtgcaaaatcatgctt

SEQ ID NO: 4793373 - DNA, 25 bp, Homo sapien
tggttcgcctagacccagggttggc

SEQ ID NO: 4793374 - DNA, 25 bp, Homo sapien
catcccagccagtcaatgtcatcgt

SEQ ID NO: 4793375 - DNA, 25 bp, Homo sapien
cccagccagtcaatgtcatcgtcat

SEQ ID NO: 4793376 - DNA, 25 bp, Homo sapien
tcatcccagccagtcaatgtcatcg

SEQ ID NO: 4793377 - DNA, 25 bp, Homo sapien
tcccagccagtcaatgtcatcgtca

SEQ ID NO: 4793378 - DNA, 25 bp, Homo sapien
agtcctcacttgtgcctgcaccact

SEQ ID NO: 4793379 - DNA, 25 bp, Homo sapien
gtcagtcctcacttgtgcctgcacc

SEQ ID NO: 4793380 - DNA, 25 bp, Homo sapien
cagtcctcacttgtgcctgcaccac

SEQ ID NO: 4793381 - DNA, 25 bp, Homo sapien
cagtcagtcctcacttgtgcctgca

SEQ ID NO: 4793382 - DNA, 25 bp, Homo sapien
gagtggaagcaatccaacttctgtt

SEQ ID NO: 4793383 - DNA, 25 bp, Homo sapien
tggaagcaatccaacttctgttccc

SEQ ID NO: 4793384 - DNA, 25 bp, Homo sapien
ctgtgagtggaagcaatccaacttc

SEQ ID NO: 4793385 - DNA, 25 bp, Homo sapien
gaagcaatccaacttctgttcccag

SEQ ID NO: 4793386 - DNA, 25 bp, Homo sapien
tactgtcgtcgtggcctaaggtggc

SEQ ID NO: 4793387 - DNA, 25 bp, Homo sapien
gacaggcacgaactgaatagtctct

SEQ ID NO: 4793388 - DNA, 25 bp, Homo sapien
gcttggcaagggaacaggacctacc

SEQ ID NO: 4793389 - DNA, 25 bp, Homo sapien
cagggattgatgctacagacaggca

SEQ ID NO: 4793390 - DNA, 25 bp, Homo sapien
gggctaatcccacgtcactaccaat

SEQ ID NO: 4793391 - DNA, 25 bp, Homo sapien
gacgtgatctctaactctgacagta

SEQ ID NO: 4793392 - DNA, 25 bp, Homo sapien
ttctctctggacatcaatgacgtga

SEQ ID NO: 4793393 - DNA, 25 bp, Homo sapien
aaagttctggctctacatttactag

SEQ ID NO: 4793394 - DNA, 25 bp, Homo sapien
agaactacatgttaactggacagta

SEQ ID NO: 4793395 - DNA, 25 bp, Homo sapien
gttttcagagtacccaagaactaca

SEQ ID NO: 4793396 - DNA, 25 bp, Homo sapien
acaacatctgtgaagtcgttttcag

SEQ ID NO: 4793397 - DNA, 25 bp, Homo sapien
catgttaactggacagtattggtac

SEQ ID NO: 4793398 - DNA, 25 bp, Homo sapien
tcagagcagtcaaaatggcctaggg

SEQ ID NO: 4793399 - DNA, 25 bp, Homo sapien
aacggttgtaacctagcacagcggg

SEQ ID NO: 4793400 - DNA, 25 bp, Homo sapien
actgagcctgaagcccacctgtgtt

SEQ ID NO: 4793401 - DNA, 25 bp, Homo sapien
gaagggctccgatacatgcaagctg

SEQ ID NO: 4793402 - DNA, 25 bp, Homo sapien
tctatgaataaggatgccaggcaag

SEQ ID NO: 4793403 - DNA, 25 bp, Homo sapien
aaatcatcattttgagcctcaggtt

SEQ ID NO: 4793404 - DNA, 25 bp, Homo sapien
atcatcattttgagcctcaggtttt

SEQ ID NO: 4793405 - DNA, 25 bp, Homo sapien
tatgaataaggatgccaggcaagat

SEQ ID NO: 4793406 - DNA, 25 bp, Homo sapien
gtgggccaccaacaggctccatttc

SEQ ID NO: 4793407 - DNA, 25 bp, Homo sapien
ggactaattcctgcatggacagaga

SEQ ID NO: 4793408 - DNA, 25 bp, Homo sapien
ttgacagtgcctgggatttccttac

SEQ ID NO: 4793409 - DNA, 25 bp, Homo sapien
aagtggtatgtgaccgtcccctact

SEQ ID NO: 4793410 - DNA, 25 bp, Homo sapien
agagttgcccctttaaacagttcat

SEQ ID NO: 4793411 - DNA, 25 bp, Homo sapien
gagttgcccctttaaacagttcatc

SEQ ID NO: 4793412 - DNA, 25 bp, Homo sapien
cagagttgcccctttaaacagttca

SEQ ID NO: 4793413 - DNA, 25 bp, Homo sapien
tcagagttgcccctttaaacagttc

SEQ ID NO: 4793414 - DNA, 25 bp, Homo sapien
cctgtccctgaagcagtgctcagag

SEQ ID NO: 4793415 - DNA, 25 bp, Homo sapien
tgaagcagtgctcagaggaacatac

SEQ ID NO: 4793416 - DNA, 25 bp, Homo sapien
ctgaagcagtgctcagaggaacata

SEQ ID NO: 4793417 - DNA, 25 bp, Homo sapien
gtccctgaagcagtgctcagaggaa

SEQ ID NO: 4793418 - DNA, 25 bp, Homo sapien
ggagctttcttgtagtgggccatct

SEQ ID NO: 4793419 - DNA, 25 bp, Homo sapien
gcaagtgactcctcacactcagagt

SEQ ID NO: 4793420 - DNA, 25 bp, Homo sapien
tttcaggccctaaggccagtgggtc

SEQ ID NO: 4793421 - DNA, 25 bp, Homo sapien
ctttcctgatgggttgtcgggctta

SEQ ID NO: 4793422 - DNA, 25 bp, Homo sapien
aagtcgggggccctagaactctgtg

SEQ ID NO: 4793423 - DNA, 25 bp, Homo sapien
tgcaagacagttcgggtggaaggga

SEQ ID NO: 4793424 - DNA, 25 bp, Homo sapien
tgtgggatgggatgcaagacagttc

SEQ ID NO: 4793425 - DNA, 25 bp, Homo sapien
gggctcaggtggaattgaagtcggg

SEQ ID NO: 4793426 - DNA, 25 bp, Homo sapien
gtccatcctgggaagtggtgagggc

SEQ ID NO: 4793427 - DNA, 25 bp, Homo sapien
ctgagagtgcctcagcttctgagtc

SEQ ID NO: 4793428 - DNA, 25 bp, Homo sapien
ttctgtgtccatcctgggaagtggt

SEQ ID NO: 4793429 - DNA, 25 bp, Homo sapien
ctgtgtccatcctgggaagtggtga

SEQ ID NO: 4793430 - DNA, 25 bp, Homo sapien
cttcctcgaccacctgctctgaggg

SEQ ID NO: 4793431 - DNA, 25 bp, Homo sapien
gcttcctcgaccacctgctctgagg

SEQ ID NO: 4793432 - DNA, 25 bp, Homo sapien
tctccctattcaggggtgcttgagg

SEQ ID NO: 4793433 - DNA, 25 bp, Homo sapien
ctgggaaggtcttcgtggccgctct

SEQ ID NO: 4793434 - DNA, 25 bp, Homo sapien
ttcgtggccgctcttctgctttttc

SEQ ID NO: 4793435 - DNA, 25 bp, Homo sapien
cctgttggtttaacagctgaagagt

SEQ ID NO: 4793436 - DNA, 25 bp, Homo sapien
gaaggtcttcgtggccgctcttctg

SEQ ID NO: 4793437 - DNA, 25 bp, Homo sapien
aaatgcccaatacgatgaaacaaat

SEQ ID NO: 4793438 - DNA, 25 bp, Homo sapien
atgcccaatacgatgaaacaaatga

SEQ ID NO: 4793439 - DNA, 25 bp, Homo sapien
aatgcccaatacgatgaaacaaatg

SEQ ID NO: 4793440 - DNA, 25 bp, Homo sapien
tgcccaatacgatgaaacaaatgac

SEQ ID NO: 4793441 - DNA, 25 bp, Homo sapien
caaactctctccgtaaggactggaa

SEQ ID NO: 4793442 - DNA, 25 bp, Homo sapien
tccagctcaaactctctccgtaagg

SEQ ID NO: 4793443 - DNA, 25 bp, Homo sapien
ctccgtaaggactggaacacctggt

SEQ ID NO: 4793444 - DNA, 25 bp, Homo sapien
tcatgatggttcccagaatggtcct

SEQ ID NO: 4793445 - DNA, 25 bp, Homo sapien
agcttcaaccccagacatctgggac

SEQ ID NO: 4793446 - DNA, 25 bp, Homo sapien
gctgttcattttgcttggtgagagc

SEQ ID NO: 4793447 - DNA, 25 bp, Homo sapien
cttctctgaggggtcagatgcagca

SEQ ID NO: 4793448 - DNA, 25 bp, Homo sapien
tgatttgggcctggagggctaaaca

SEQ ID NO: 4793449 - DNA, 25 bp, Homo sapien
tggcggaggccaacaaatgttcaca

SEQ ID NO: 4793450 - DNA, 25 bp, Homo sapien
caggtgctcatccttggcggaggcc

SEQ ID NO: 4793451 - DNA, 25 bp, Homo sapien
ttctgctggtaggcatctctctgtg

SEQ ID NO: 4793452 - DNA, 25 bp, Homo sapien
tctgtgcgcacacctcctggtactg

SEQ ID NO: 4793453 - DNA, 25 bp, Homo sapien
caagagctgtcgaagtttgtccaat

SEQ ID NO: 4793454 - DNA, 25 bp, Homo sapien
tcctcggcctgagaacgctcttgag

SEQ ID NO: 4793455 - DNA, 25 bp, Homo sapien
aattcctcctggtatgacttgcgaa

SEQ ID NO: 4793456 - DNA, 25 bp, Homo sapien
tgcttggtctgtggacactcgagtc

SEQ ID NO: 4793457 - DNA, 25 bp, Homo sapien
ttctggccaactgggttgtagagct

SEQ ID NO: 4793458 - DNA, 25 bp, Homo sapien
ttaaacagctaattctggccaactg

SEQ ID NO: 4793459 - DNA, 25 bp, Homo sapien
taaacagctaattctggccaactgg

SEQ ID NO: 4793460 - DNA, 25 bp, Homo sapien
ggatgtcaccttgagttccagttgt

SEQ ID NO: 4793461 - DNA, 25 bp, Homo sapien
tgtgcttgctcagaggtttcttgga

SEQ ID NO: 4793462 - DNA, 25 bp, Homo sapien
tcaactcgaaggtcagtcagttcct

SEQ ID NO: 4793463 - DNA, 25 bp, Homo sapien
ttcacttttgaatttggactgtgct

SEQ ID NO: 4793464 - DNA, 25 bp, Homo sapien
gagacttcgctacagaaccaaagct

SEQ ID NO: 4793465 - DNA, 25 bp, Homo sapien
ctgggatacaggagcagagagactt

SEQ ID NO: 4793466 - DNA, 25 bp, Homo sapien
tgtaatgggctatgtgttatcccag

SEQ ID NO: 4793467 - DNA, 25 bp, Homo sapien
ggctatgtgttatcccagcagctct

SEQ ID NO: 4793468 - DNA, 25 bp, Homo sapien
gcagtggccgctgctaactcctctg

SEQ ID NO: 4793469 - DNA, 25 bp, Homo sapien
tggccgctgctaactcctctgtcac

SEQ ID NO: 4793470 - DNA, 25 bp, Homo sapien
agtggccgctgctaactcctctgtc

SEQ ID NO: 4793471 - DNA, 25 bp, Homo sapien
gtggccgctgctaactcctctgtca

SEQ ID NO: 4793472 - DNA, 25 bp, Homo sapien
tccatgcaggtgatgaaccaacctc

SEQ ID NO: 4793473 - DNA, 25 bp, Homo sapien
taaacataggtgttctccatgcagg

SEQ ID NO: 4793474 - DNA, 25 bp, Homo sapien
taaacagggagttatggctgccttc

SEQ ID NO: 4793475 - DNA, 25 bp, Homo sapien
tgtagactgaactagtaaacaggga

SEQ ID NO: 4793476 - DNA, 25 bp, Homo sapien
tattcctcgccttattccaaagtct

SEQ ID NO: 4793477 - DNA, 25 bp, Homo sapien
tatgcctgtctctattataccttac

SEQ ID NO: 4793478 - DNA, 25 bp, Homo sapien
cactgtacccacttgttttaaatat

SEQ ID NO: 4793479 - DNA, 25 bp, Homo sapien
caaagtctttatcggttttatagat

SEQ ID NO: 4793480 - DNA, 25 bp, Homo sapien
tgtggaccactgatctggaacaagt

SEQ ID NO: 4793481 - DNA, 25 bp, Homo sapien
tcaagcaccccaagtaagtcggagg

SEQ ID NO: 4793482 - DNA, 25 bp, Homo sapien
tagccctgaatagtaactgtgaggc

SEQ ID NO: 4793483 - DNA, 25 bp, Homo sapien
gcccctccagagattatgacaaaag

SEQ ID NO: 4793484 - DNA, 25 bp, Homo sapien
gagtcaccttactgcgaagcatatt

SEQ ID NO: 4793485 - DNA, 25 bp, Homo sapien
tacatgggaccattccttagctcta

SEQ ID NO: 4793486 - DNA, 25 bp, Homo sapien
gaatacatgaaaacctgctgggaga

SEQ ID NO: 4793487 - DNA, 25 bp, Homo sapien
attctgttggaaagccgactggtga

SEQ ID NO: 4793488 - DNA, 25 bp, Homo sapien
tcttgttcagcatgcaatactcttg

SEQ ID NO: 4793489 - DNA, 25 bp, Homo sapien
tctcttgttcagcatgcaatactct

SEQ ID NO: 4793490 - DNA, 25 bp, Homo sapien
cttgttcagcatgcaatactcttgc

SEQ ID NO: 4793491 - DNA, 25 bp, Homo sapien
cttctcttgttcagcatgcaatact

SEQ ID NO: 4793492 - DNA, 25 bp, Homo sapien
ccatcatcaggttactctgctcaac

SEQ ID NO: 4793493 - DNA, 25 bp, Homo sapien
tcatcaggttactctgctcaacata

SEQ ID NO: 4793494 - DNA, 25 bp, Homo sapien
catcaggttactctgctcaacatac

SEQ ID NO: 4793495 - DNA, 25 bp, Homo sapien
catcatcaggttactctgctcaaca

SEQ ID NO: 4793496 - DNA, 25 bp, Homo sapien
ctctgatttcgttcaattagttcac

SEQ ID NO: 4793497 - DNA, 25 bp, Homo sapien
cattctgttcttctatccgattgct

SEQ ID NO: 4793498 - DNA, 25 bp, Homo sapien
aaggatctcttgcttcaatctttca

SEQ ID NO: 4793499 - DNA, 25 bp, Homo sapien
gattgctcttttcaaggatctcttg

SEQ ID NO: 4793500 - DNA, 25 bp, Homo sapien
ctgaatgattcgctggatgttgctc

SEQ ID NO: 4793501 - DNA, 25 bp, Homo sapien
gaataagcatggaattgccagcact

SEQ ID NO: 4793502 - DNA, 25 bp, Homo sapien
cattgtaactgacatgctaggaata

SEQ ID NO: 4793503 - DNA, 25 bp, Homo sapien
ggatgttgctcataatcatgcttgt

SEQ ID NO: 4793504 - DNA, 25 bp, Homo sapien
ttatgttgccgggcttcagtcatga

SEQ ID NO: 4793505 - DNA, 25 bp, Homo sapien
cactttgctgactgccattcgaatt

SEQ ID NO: 4793506 - DNA, 25 bp, Homo sapien
actttgctgactgccattcgaattt

SEQ ID NO: 4793507 - DNA, 25 bp, Homo sapien
ttcagtgttatgttgccgggcttca

SEQ ID NO: 4793508 - DNA, 25 bp, Homo sapien
ggtacaaaggccgaacgggctgcag

SEQ ID NO: 4793509 - DNA, 25 bp, Homo sapien
gagagcggtgctgggtacaaaggcc

SEQ ID NO: 4793510 - DNA, 25 bp, Homo sapien
gctgagagagcggtgctgggtacaa

SEQ ID NO: 4793511 - DNA, 25 bp, Homo sapien
acaaaggccgaacgggctgcagctg

SEQ ID NO: 4793512 - DNA, 25 bp, Homo sapien
ctggggataagcgtaggcttgcata

SEQ ID NO: 4793513 - DNA, 25 bp, Homo sapien
tggggataagcgtaggcttgcatac

SEQ ID NO: 4793514 - DNA, 25 bp, Homo sapien
gaaagggtctgctacccctggcaaa

SEQ ID NO: 4793515 - DNA, 25 bp, Homo sapien
tgaagctaatccacgagaccaagag

SEQ ID NO: 4793516 - DNA, 25 bp, Homo sapien
taggtcactacccagtcatctggtg

SEQ ID NO: 4793517 - DNA, 25 bp, Homo sapien
ttcgagactccccatgttaatgagg

SEQ ID NO: 4793518 - DNA, 25 bp, Homo sapien
gcctggagcccagtaacagatggct

SEQ ID NO: 4793519 - DNA, 25 bp, Homo sapien
ggcatttccagatacagctgagtgg

SEQ ID NO: 4793520 - DNA, 25 bp, Homo sapien
tgggaatcgagagatgacacttgca

SEQ ID NO: 4793521 - DNA, 25 bp, Homo sapien
gaaaggattgggcatttccagatac

SEQ ID NO: 4793522 - DNA, 25 bp, Homo sapien
tggacggacggagtcaccacaggct

SEQ ID NO: 4793523 - DNA, 25 bp, Homo sapien
aagagagggctggacggacggagtc

SEQ ID NO: 4793524 - DNA, 25 bp, Homo sapien
gaggtcatctgtggtaacgctggat

SEQ ID NO: 4793525 - DNA, 25 bp, Homo sapien
gtaacgctggatgggccggatgaag

SEQ ID NO: 4793526 - DNA, 25 bp, Homo sapien
tactctgtacggggtccctcattga

SEQ ID NO: 4793527 - DNA, 25 bp, Homo sapien
gaacaagcgtttgggttactctgta

SEQ ID NO: 4793528 - DNA, 25 bp, Homo sapien
caagcgtttgggttactctgtacgg

SEQ ID NO: 4793529 - DNA, 25 bp, Homo sapien
ttactctgtacggggtccctcattg

SEQ ID NO: 4793530 - DNA, 25 bp, Homo sapien
ttttagccatccgagagatcaactt

SEQ ID NO: 4793531 - DNA, 25 bp, Homo sapien
tgaatcattggaatccagctgtggt

SEQ ID NO: 4793532 - DNA, 25 bp, Homo sapien
gagagatcaacttggctttgactgc

SEQ ID NO: 4793533 - DNA, 25 bp, Homo sapien
aacttggctttgactgcatcgggac

SEQ ID NO: 4793534 - DNA, 25 bp, Homo sapien
taagacactgagtttgcttacaggg

SEQ ID NO: 4793535 - DNA, 25 bp, Homo sapien
tatatagaccttatgcacacaatgg

SEQ ID NO: 4793536 - DNA, 25 bp, Homo sapien
taaacctatactgggagtgtgtgct

SEQ ID NO: 4793537 - DNA, 25 bp, Homo sapien
ggaagctctctatacaccaacatga

SEQ ID NO: 4793538 - DNA, 25 bp, Homo sapien
tcctgcactgtagtgatcctcctgc

SEQ ID NO: 4793539 - DNA, 25 bp, Homo sapien
atgcctggccaagactcttatactt

SEQ ID NO: 4793540 - DNA, 25 bp, Homo sapien
gcctggccaagactcttatacttac

SEQ ID NO: 4793541 - DNA, 25 bp, Homo sapien
tgaactcctgcactgtagtgatcct

SEQ ID NO: 4793542 - DNA, 25 bp, Homo sapien
agatttggtacgaagagctggctcc

SEQ ID NO: 4793543 - DNA, 25 bp, Homo sapien
ggagttagatttggtacgaagagct

SEQ ID NO: 4793544 - DNA, 25 bp, Homo sapien
tgcaagttgttcactgagggagtta

SEQ ID NO: 4793545 - DNA, 25 bp, Homo sapien
cactgagggagttagatttggtacg

SEQ ID NO: 4793546 - DNA, 25 bp, Homo sapien
aaaatccagaatcacaagtccaaat

SEQ ID NO: 4793547 - DNA, 25 bp, Homo sapien
aatgtgtgccaatttaatgactgta

SEQ ID NO: 4793548 - DNA, 25 bp, Homo sapien
caaattatattggataagcaaattg

SEQ ID NO: 4793549 - DNA, 25 bp, Homo sapien
caaatagaccatattccaagattga

SEQ ID NO: 4793550 - DNA, 25 bp, Homo sapien
tttgaaaggtattgatgtgggtggt

SEQ ID NO: 4793551 - DNA, 25 bp, Homo sapien
atttgaaaggtattgatgtgggtgg

SEQ ID NO: 4793552 - DNA, 25 bp, Homo sapien
gatttgaaaggtattgatgtgggtg

SEQ ID NO: 4793553 - DNA, 25 bp, Homo sapien
ggatgggagacggagctgcagaatc

SEQ ID NO: 4793554 - DNA, 25 bp, Homo sapien
catcagagccagaatctctggcaaa

SEQ ID NO: 4793555 - DNA, 25 bp, Homo sapien
gagctgcagaatcgcgggaactaac

SEQ ID NO: 4793556 - DNA, 25 bp, Homo sapien
gaactaacactgtgaccatcagagc

SEQ ID NO: 4793557 - DNA, 25 bp, Homo sapien
gatcgagtccgttgcttgagtccag

SEQ ID NO: 4793558 - DNA, 25 bp, Homo sapien
tattaccccttctgagccaacagca

SEQ ID NO: 4793559 - DNA, 25 bp, Homo sapien
tcgaacaccaggatcgagtccgttg

SEQ ID NO: 4793560 - DNA, 25 bp, Homo sapien
caggctggagggacaataagcaatc

SEQ ID NO: 4793561 - DNA, 25 bp, Homo sapien
caacttatctttgttagcagtggag

SEQ ID NO: 4793562 - DNA, 25 bp, Homo sapien
taacttcaagcgaagcaacttatct

SEQ ID NO: 4793563 - DNA, 25 bp, Homo sapien
ctttgttagcagtggagtcgaaaac

SEQ ID NO: 4793564 - DNA, 25 bp, Homo sapien
cttgatgacttttcctgatcctaac

SEQ ID NO: 4793565 - DNA, 25 bp, Homo sapien
gaagaggtactgttgcacttagcaa

SEQ ID NO: 4793566 - DNA, 25 bp, Homo sapien
atgattctgaaagagccagccggta

SEQ ID NO: 4793567 - DNA, 25 bp, Homo sapien
gggccgtctgccacaatgaggtcct

SEQ ID NO: 4793568 - DNA, 25 bp, Homo sapien
ccagccggtataggccacttccaaa

SEQ ID NO: 4793569 - DNA, 25 bp, Homo sapien
taaaaggtgctatagttattgggcc

SEQ ID NO: 4793570 - DNA, 25 bp, Homo sapien
tgtctctggtcatcataaaaggtgc

SEQ ID NO: 4793571 - DNA, 25 bp, Homo sapien
caaacatgatggaccagttctgtct

SEQ ID NO: 4793572 - DNA, 25 bp, Homo sapien
gccttttccgactcaaacatgatgg

SEQ ID NO: 4793573 - DNA, 25 bp, Homo sapien
agttcacatgaatcctagcaaccgt

SEQ ID NO: 4793574 - DNA, 25 bp, Homo sapien
gctgttgttgactgatataaagaag

SEQ ID NO: 4793575 - DNA, 25 bp, Homo sapien
gaatcctagcaaccgtaactggctg

SEQ ID NO: 4793576 - DNA, 25 bp, Homo sapien
accgtaactggctgttgttgactga

SEQ ID NO: 4793577 - DNA, 25 bp, Homo sapien
aattcttaagctaggatcatatcac

SEQ ID NO: 4793578 - DNA, 25 bp, Homo sapien
catatcacaaaggtcaaatttaaca

SEQ ID NO: 4793579 - DNA, 25 bp, Homo sapien
caattaatggcactggattatgcac

SEQ ID NO: 4793580 - DNA, 25 bp, Homo sapien
tgtttgggaaatggatagtagtgat

SEQ ID NO: 4793581 - DNA, 25 bp, Homo sapien
gacatcgggcaagccagataaaagc

SEQ ID NO: 4793582 - DNA, 25 bp, Homo sapien
tcttctgataaacaagacatcgggc

SEQ ID NO: 4793583 - DNA, 25 bp, Homo sapien
tatacatgagatgtgggagcactct

SEQ ID NO: 4793584 - DNA, 25 bp, Homo sapien
cagctcattggtattatttgggaca

SEQ ID NO: 4793585 - DNA, 25 bp, Homo sapien
ctgctttacatattgaccatttgtg

SEQ ID NO: 4793586 - DNA, 25 bp, Homo sapien
gcagcaccaaatttgccctgcttta

SEQ ID NO: 4793587 - DNA, 25 bp, Homo sapien
gctgtgtggttccccagaactgcag

SEQ ID NO: 4793588 - DNA, 25 bp, Homo sapien
cccagaactgcagcaccaaatttgc

SEQ ID NO: 4793589 - DNA, 25 bp, Homo sapien
agggtgttccttctcagcgacttac

SEQ ID NO: 4793590 - DNA, 25 bp, Homo sapien
aaaaagtagcttaactgcacgccct

SEQ ID NO: 4793591 - DNA, 25 bp, Homo sapien
actgatattttgtccgtggaagggc

SEQ ID NO: 4793592 - DNA, 25 bp, Homo sapien
tgacagctgttgagggtacaagcac

SEQ ID NO: 4793593 - DNA, 25 bp, Homo sapien
tgctgttgcgaccagtattgtggga

SEQ ID NO: 4793594 - DNA, 25 bp, Homo sapien
tggtggctggtgctgtttttggtgt

SEQ ID NO: 4793595 - DNA, 25 bp, Homo sapien
tggactgctgttgcgaccagtattg

SEQ ID NO: 4793596 - DNA, 25 bp, Homo sapien
ccagtattgtgggagtgctcatggt

SEQ ID NO: 4793597 - DNA, 25 bp, Homo sapien
taaggtttggttacatcctgtccaa

SEQ ID NO: 4793598 - DNA, 25 bp, Homo sapien
tgtgtgtacttccagttatcttctt

SEQ ID NO: 4793599 - DNA, 25 bp, Homo sapien
aggtatggtgggtgcacctggagtc

SEQ ID NO: 4793600 - DNA, 25 bp, Homo sapien
gctggacgagatggctcacacaggt

SEQ ID NO: 4793601 - DNA, 25 bp, Homo sapien
tacgtatattctattagctctgtcc

SEQ ID NO: 4793602 - DNA, 25 bp, Homo sapien
taaactcactttcacacatacgtat

SEQ ID NO: 4793603 - DNA, 25 bp, Homo sapien
tacactagcggttggccagaggctc

SEQ ID NO: 4793604 - DNA, 25 bp, Homo sapien
gcgtggctagtataaggcaggcaga

SEQ ID NO: 4793605 - DNA, 25 bp, Homo sapien
cagctgcctgatccagtccaaaaag

SEQ ID NO: 4793606 - DNA, 25 bp, Homo sapien
gggctgtgtactggaaaaattcatt

SEQ ID NO: 4793607 - DNA, 25 bp, Homo sapien
aaaaattcatttccatggccagcag

SEQ ID NO: 4793608 - DNA, 25 bp, Homo sapien
tgctgccgttccctggcctttctta

SEQ ID NO: 4793609 - DNA, 25 bp, Homo sapien
aaaggcatccttagtttaggtgaag

SEQ ID NO: 4793610 - DNA, 25 bp, Homo sapien
tgtctggtatgtaacaggctcagta

SEQ ID NO: 4793611 - DNA, 25 bp, Homo sapien
gtaaatgaattcaaagtctagtctg

SEQ ID NO: 4793612 - DNA, 25 bp, Homo sapien
tggacacaacctttattttgtgaaa

SEQ ID NO: 4793613 - DNA, 25 bp, Homo sapien
gaaaagtagctgcagtattcactgt

SEQ ID NO: 4793614 - DNA, 25 bp, Homo sapien
tagctgttgtctatgtctaggagca

SEQ ID NO: 4793615 - DNA, 25 bp, Homo sapien
ctattacttcccacaacggtgagga

SEQ ID NO: 4793616 - DNA, 25 bp, Homo sapien
taaactctaagaggcctagaaactc

SEQ ID NO: 4793617 - DNA, 25 bp, Homo sapien
ccgccgctcggcgagaggaaatcgg

SEQ ID NO: 4793618 - DNA, 25 bp, Homo sapien
cgctcggcgagaggaaatcggtgtc

SEQ ID NO: 4793619 - DNA, 25 bp, Homo sapien
ctcggcgagaggaaatcggtgtcgt

SEQ ID NO: 4793620 - DNA, 25 bp, Homo sapien
gcgagaggaaatcggtgtcgtcctc

SEQ ID NO: 4793621 - DNA, 25 bp, Homo sapien
tgtcaccgccgacgtcgtaaaatgc

SEQ ID NO: 4793622 - DNA, 25 bp, Homo sapien
tgcgttggctttcaccgggttgcgg

SEQ ID NO: 4793623 - DNA, 25 bp, Homo sapien
ctctggaccgaaagtagactgggct

SEQ ID NO: 4793624 - DNA, 25 bp, Homo sapien
ggcgaactccagcacggtctctgga

SEQ ID NO: 4793625 - DNA, 25 bp, Homo sapien
tacaaaagtagatcctatggcctca

SEQ ID NO: 4793626 - DNA, 25 bp, Homo sapien
caaaagtagatcctatggcctcagc

SEQ ID NO: 4793627 - DNA, 25 bp, Homo sapien
gtagtacaaaagtagatcctatggc

SEQ ID NO: 4793628 - DNA, 25 bp, Homo sapien
caaagtagtacaaaagtagatccta

SEQ ID NO: 4793629 - DNA, 25 bp, Homo sapien
aatggtatgtacctatgttcccagc

SEQ ID NO: 4793630 - DNA, 25 bp, Homo sapien
tagttatgcattagtggtagctgtg

SEQ ID NO: 4793631 - DNA, 25 bp, Homo sapien
ccattctttgtgttgcgcttaaaaa

SEQ ID NO: 4793632 - DNA, 25 bp, Homo sapien
gtagctgtggagttaggcacacctg

SEQ ID NO: 4793633 - DNA, 25 bp, Homo sapien
tccattcatgtttactcagaagaca

SEQ ID NO: 4793634 - DNA, 25 bp, Homo sapien
caaataatagccttcaatggctgta

SEQ ID NO: 4793635 - DNA, 25 bp, Homo sapien
tagctctaggtggaactttatggat

SEQ ID NO: 4793636 - DNA, 25 bp, Homo sapien
cataggtgacctagggattggacaa

SEQ ID NO: 4793637 - DNA, 25 bp, Homo sapien
gatttgtcttgcctcaacaggtttc

SEQ ID NO: 4793638 - DNA, 25 bp, Homo sapien
tttccaggatttgtcttgcctcaac

SEQ ID NO: 4793639 - DNA, 25 bp, Homo sapien
gtcttgcctcaacaggtttctcatc

SEQ ID NO: 4793640 - DNA, 25 bp, Homo sapien
tccaggatttgtcttgcctcaacag

SEQ ID NO: 4793641 - DNA, 25 bp, Homo sapien
catttgccccatcactgacactttg

SEQ ID NO: 4793642 - DNA, 25 bp, Homo sapien
acctgccatttgccccatcactgac

SEQ ID NO: 4793643 - DNA, 25 bp, Homo sapien
gccatttgccccatcactgacactt

SEQ ID NO: 4793644 - DNA, 25 bp, Homo sapien
ctgccatttgccccatcactgacac

SEQ ID NO: 4793645 - DNA, 25 bp, Homo sapien
tgaaccagcctagatcagaaatgga

SEQ ID NO: 4793646 - DNA, 25 bp, Homo sapien
taccaagaaacaagcccaggagcag

SEQ ID NO: 4793647 - DNA, 25 bp, Homo sapien
atttaccaagaaacaagcccaggag

SEQ ID NO: 4793648 - DNA, 25 bp, Homo sapien
tggtgaaccagcctagatcagaaat

SEQ ID NO: 4793649 - DNA, 25 bp, Homo sapien
tctttctttggtggtcccttctgaa

SEQ ID NO: 4793650 - DNA, 25 bp, Homo sapien
tctgaattaggggttctggtcttta

SEQ ID NO: 4793651 - DNA, 25 bp, Homo sapien
ccttctgaaatcgactcttttctga

SEQ ID NO: 4793652 - DNA, 25 bp, Homo sapien
gaattaggggttctggtctttatgc

SEQ ID NO: 4793653 - DNA, 25 bp, Homo sapien
cacatcatccaggtggtcataagct

SEQ ID NO: 4793654 - DNA, 25 bp, Homo sapien
acatcatccaggtggtcataagcta

SEQ ID NO: 4793655 - DNA, 25 bp, Homo sapien
gcacatcatccaggtggtcataagc

SEQ ID NO: 4793656 - DNA, 25 bp, Homo sapien
catcatccaggtggtcataagctac

SEQ ID NO: 4793657 - DNA, 25 bp, Homo sapien
taacttcagccaggattgatggcag

SEQ ID NO: 4793658 - DNA, 25 bp, Homo sapien
gagaagccacccatgagatgtcttt

SEQ ID NO: 4793659 - DNA, 25 bp, Homo sapien
tatgttcttgtctaatccatgtagc

SEQ ID NO: 4793660 - DNA, 25 bp, Homo sapien
tgcccaactaaacccagaactcaaa

SEQ ID NO: 4793661 - DNA, 25 bp, Homo sapien
gacaggtactgacgaagtccaacac

SEQ ID NO: 4793662 - DNA, 25 bp, Homo sapien
taaagccaaggagtcataaaaccat

SEQ ID NO: 4793663 - DNA, 25 bp, Homo sapien
cctaatcagtaaggccagctagacc

SEQ ID NO: 4793664 - DNA, 25 bp, Homo sapien
catgagcagggtgaatgacaggtac

SEQ ID NO: 4793665 - DNA, 25 bp, Homo sapien
gatgaagctagtgaaggagaaaaag

SEQ ID NO: 4793666 - DNA, 25 bp, Homo sapien
gactggctgccaaaggatgaagcta

SEQ ID NO: 4793667 - DNA, 25 bp, Homo sapien
cttaaattccatcttgagctcttgg

SEQ ID NO: 4793668 - DNA, 25 bp, Homo sapien
caaggccagttaagacaaaatgcta

SEQ ID NO: 4793669 - DNA, 25 bp, Homo sapien
taggtgccgtctctagtctgtgagg

SEQ ID NO: 4793670 - DNA, 25 bp, Homo sapien
tggaatttctataaggctggtaccc

SEQ ID NO: 4793671 - DNA, 25 bp, Homo sapien
tgcttcaagaggcagttgacccact

SEQ ID NO: 4793672 - DNA, 25 bp, Homo sapien
tattaagtctccatagccctcctga

SEQ ID NO: 4793673 - DNA, 25 bp, Homo sapien
cattctgtaaagagatcgggtacct

SEQ ID NO: 4793674 - DNA, 25 bp, Homo sapien
tatacccaaactagttacaaagcca

SEQ ID NO: 4793675 - DNA, 25 bp, Homo sapien
gcccagaacaatagggcatgattca

SEQ ID NO: 4793676 - DNA, 25 bp, Homo sapien
gagaggactgcttaatgtcaggagc

SEQ ID NO: 4793677 - DNA, 25 bp, Homo sapien
tattccattccagcgctctggcatg

SEQ ID NO: 4793678 - DNA, 25 bp, Homo sapien
tggattccagcttagagtgcaagtg

SEQ ID NO: 4793679 - DNA, 25 bp, Homo sapien
gtgcaagtgaagcatcagtaatctc

SEQ ID NO: 4793680 - DNA, 25 bp, Homo sapien
tgcaggaggtacattctgcttgact

SEQ ID NO: 4793681 - DNA, 25 bp, Homo sapien
gggtttataaccaatccgatcattg

SEQ ID NO: 4793682 - DNA, 25 bp, Homo sapien
gctcttgggatcactgctaagccca

SEQ ID NO: 4793683 - DNA, 25 bp, Homo sapien
tgatcatttgttcccggctcttggg

SEQ ID NO: 4793684 - DNA, 25 bp, Homo sapien
gatgaacgattattgggcttgggtt

SEQ ID NO: 4793685 - DNA, 25 bp, Homo sapien
cccagttattcagggggcctgatgt

SEQ ID NO: 4793686 - DNA, 25 bp, Homo sapien
ccagttattcagggggcctgatgtg

SEQ ID NO: 4793687 - DNA, 25 bp, Homo sapien
cagttattcagggggcctgatgtgg

SEQ ID NO: 4793688 - DNA, 25 bp, Homo sapien
agttattcagggggcctgatgtggt

SEQ ID NO: 4793689 - DNA, 25 bp, Homo sapien
ccaatgtggctagggtatagagagc

SEQ ID NO: 4793690 - DNA, 25 bp, Homo sapien
ggaaatgaaagagagccaatgtggc

SEQ ID NO: 4793691 - DNA, 25 bp, Homo sapien
aatctggagaggcactagaacatac

SEQ ID NO: 4793692 - DNA, 25 bp, Homo sapien
actggaagaaagggagcactccagg

SEQ ID NO: 4793693 - DNA, 25 bp, Homo sapien
attcttgatactggatgcagaatgc

SEQ ID NO: 4793694 - DNA, 25 bp, Homo sapien
tgtaggccatggtgaagaattcaga

SEQ ID NO: 4793695 - DNA, 25 bp, Homo sapien
taagtgcagaaaactactgaggagt

SEQ ID NO: 4793696 - DNA, 25 bp, Homo sapien
tgaggagttttaaacgggaatgaca

SEQ ID NO: 4793697 - DNA, 25 bp, Homo sapien
ggcgtgttggtttccgtctcagcat

SEQ ID NO: 4793698 - DNA, 25 bp, Homo sapien
ccaggtcctttcgaatgttctcaaa

SEQ ID NO: 4793699 - DNA, 25 bp, Homo sapien
caagctttagctctaggcgtgttgg

SEQ ID NO: 4793700 - DNA, 25 bp, Homo sapien
ttcaatgtcatcaagctttagctct

SEQ ID NO: 4793701 - DNA, 25 bp, Homo sapien
agtcaacactaagggccaaacccag

SEQ ID NO: 4793702 - DNA, 25 bp, Homo sapien
caacactaagggccaaacccagtga

SEQ ID NO: 4793703 - DNA, 25 bp, Homo sapien
ctaagggccaaacccagtgaactat

SEQ ID NO: 4793704 - DNA, 25 bp, Homo sapien
agggccaaacccagtgaactattag

SEQ ID NO: 4793705 - DNA, 25 bp, Homo sapien
tgttaaaaatgaaagagaggaggaa

SEQ ID NO: 4793706 - DNA, 25 bp, Homo sapien
ctgttaaaaatgaaagagaggagga

SEQ ID NO: 4793707 - DNA, 25 bp, Homo sapien
aaggtgataaagtctcagatacaaa

SEQ ID NO: 4793708 - DNA, 25 bp, Homo sapien
gaaggtgataaagtctcagatacaa

SEQ ID NO: 4793709 - DNA, 25 bp, Homo sapien
ctgaaggtgataaagtctcagatac

SEQ ID NO: 4793710 - DNA, 25 bp, Homo sapien
ggtgataaagtctcagatacaaaac

SEQ ID NO: 4793711 - DNA, 25 bp, Homo sapien
ttatcctccgcgtccaaacagatct

SEQ ID NO: 4793712 - DNA, 25 bp, Homo sapien
ctccgcgtccaaacagatcttaaat

SEQ ID NO: 4793713 - DNA, 25 bp, Homo sapien
caattcacaggattatcctccgcgt

SEQ ID NO: 4793714 - DNA, 25 bp, Homo sapien
caggattatcctccgcgtccaaaca

SEQ ID NO: 4793715 - DNA, 25 bp, Homo sapien
cattaaacaaacacttcttgtgttc

SEQ ID NO: 4793716 - DNA, 25 bp, Homo sapien
ttaaacaaacacttcttgtgttcca

SEQ ID NO: 4793717 - DNA, 25 bp, Homo sapien
taaacaaacacttcttgtgttccag

SEQ ID NO: 4793718 - DNA, 25 bp, Homo sapien
tcattaaacaaacacttcttgtgtt

SEQ ID NO: 4793719 - DNA, 25 bp, Homo sapien
caaagttaaaaggtacagtcataat

SEQ ID NO: 4793720 - DNA, 25 bp, Homo sapien
tacaaagttaaaaggtacagtcata

SEQ ID NO: 4793721 - DNA, 25 bp, Homo sapien
ctacaaagttaaaaggtacagtcat

SEQ ID NO: 4793722 - DNA, 25 bp, Homo sapien
tcggctccaagaagacgtaaacgcc

SEQ ID NO: 4793723 - DNA, 25 bp, Homo sapien
tgactttggcactagcgggctcttc

SEQ ID NO: 4793724 - DNA, 25 bp, Homo sapien
tatggtaacatggtcctcggctcca

SEQ ID NO: 4793725 - DNA, 25 bp, Homo sapien
gaagacttccggaccatggaggaga

SEQ ID NO: 4793726 - DNA, 25 bp, Homo sapien
gcttggagcctctctctccgcagaa

SEQ ID NO: 4793727 - DNA, 25 bp, Homo sapien
gaaactactgctaagccaactggac

SEQ ID NO: 4793728 - DNA, 25 bp, Homo sapien
gaggttctaggagggatgcccctca

SEQ ID NO: 4793729 - DNA, 25 bp, Homo sapien
acgacgccatttcctactacgactt

SEQ ID NO: 4793730 - DNA, 25 bp, Homo sapien
aatgggatgtgaagcagtagaccgc

SEQ ID NO: 4793731 - DNA, 25 bp, Homo sapien
gaatgccttatagccttcctcacag

SEQ ID NO: 4793732 - DNA, 25 bp, Homo sapien
gactacatatgacccagagagcaag

SEQ ID NO: 4793733 - DNA, 25 bp, Homo sapien
caaggtggctgaactatagtctgga

SEQ ID NO: 4793734 - DNA, 25 bp, Homo sapien
gaaagcaaacatgacgtctctattg

SEQ ID NO: 4793735 - DNA, 25 bp, Homo sapien
tctcttggctgtttaaaggatgtac

SEQ ID NO: 4793736 - DNA, 25 bp, Homo sapien
aggatgtacttcgtgtattaaaggg

SEQ ID NO: 4793737 - DNA, 25 bp, Homo sapien
caaagcaaaaccattgtgtcaggag

SEQ ID NO: 4793738 - DNA, 25 bp, Homo sapien
tgcaaccagtggcaagacattcaaa

SEQ ID NO: 4793739 - DNA, 25 bp, Homo sapien
agctccagtgagaaatgcaacttgc

SEQ ID NO: 4793740 - DNA, 25 bp, Homo sapien
cacagaattgaagctcacttcccaa

SEQ ID NO: 4793741 - DNA, 25 bp, Homo sapien
tagcaacccatagtaaaagagcaac

SEQ ID NO: 4793742 - DNA, 25 bp, Homo sapien
aagcaaacacatggcctgaacaatc

SEQ ID NO: 4793743 - DNA, 25 bp, Homo sapien
tcctggataccactgtgcagccctt

SEQ ID NO: 4793744 - DNA, 25 bp, Homo sapien
cctttggcacaacttgctgtggagc

SEQ ID NO: 4793745 - DNA, 25 bp, Homo sapien
ggaggtcgctccacatctcccagtc

SEQ ID NO: 4793746 - DNA, 25 bp, Homo sapien
gaggctccgtagtcaccatacccag

SEQ ID NO: 4793747 - DNA, 25 bp, Homo sapien
ccagcagcaaccgaaaaaggtttgg

SEQ ID NO: 4793748 - DNA, 25 bp, Homo sapien
cagcagcaaccgaaaaaggtttggt

SEQ ID NO: 4793749 - DNA, 25 bp, Homo sapien
caataccaaatgaggctccgtagtc

SEQ ID NO: 4793750 - DNA, 25 bp, Homo sapien
catcaggtaggcaaagatgcggaac

SEQ ID NO: 4793751 - DNA, 25 bp, Homo sapien
tccgtgggcaagtcagtgacaggct

SEQ ID NO: 4793752 - DNA, 25 bp, Homo sapien
ggttgcggaaacactccctcaaaga

SEQ ID NO: 4793753 - DNA, 25 bp, Homo sapien
aaggtccagcgtgtagacttgaggc

SEQ ID NO: 4793754 - DNA, 25 bp, Homo sapien
gctgaggtgggccagacattccacg

SEQ ID NO: 4793755 - DNA, 25 bp, Homo sapien
gggccagacattccacgcagaagga

SEQ ID NO: 4793756 - DNA, 25 bp, Homo sapien
gacattccacgcagaaggagtggca

SEQ ID NO: 4793757 - DNA, 25 bp, Homo sapien
agcagacggggcactcagcctcaag

SEQ ID NO: 4793758 - DNA, 25 bp, Homo sapien
agccacacacggggaggcttcgcgg

SEQ ID NO: 4793759 - DNA, 25 bp, Homo sapien
cacacacggggaggcttcgcgggag

SEQ ID NO: 4793760 - DNA, 25 bp, Homo sapien
ccacacacggggaggcttcgcggga

SEQ ID NO: 4793761 - DNA, 25 bp, Homo sapien
gccacacacggggaggcttcgcggg

SEQ ID NO: 4793762 - DNA, 25 bp, Homo sapien
tctgtgggtgttgaaaggtgtaatc

SEQ ID NO: 4793763 - DNA, 25 bp, Homo sapien
tgttgaaaggtgtaatcaccacgtt

SEQ ID NO: 4793764 - DNA, 25 bp, Homo sapien
caaaggaacagccatgaagtcccat

SEQ ID NO: 4793765 - DNA, 25 bp, Homo sapien
caaaagcgttttgttcttgatcacc

SEQ ID NO: 4793766 - DNA, 25 bp, Homo sapien
gagtcaaatgctcctacagcctccc

SEQ ID NO: 4793767 - DNA, 25 bp, Homo sapien
gctttggagctggacgcaaatgctc

SEQ ID NO: 4793768 - DNA, 25 bp, Homo sapien
cagatgtcgccctgggctttggagc

SEQ ID NO: 4793769 - DNA, 25 bp, Homo sapien
caagagagccggcattggagcagat

SEQ ID NO: 4793770 - DNA, 25 bp, Homo sapien
tgctacctcaaatccctgactagcg

SEQ ID NO: 4793771 - DNA, 25 bp, Homo sapien
cctgactagcgcagagatgggtttt

SEQ ID NO: 4793772 - DNA, 25 bp, Homo sapien
acatcctactcacccagtccttggc

SEQ ID NO: 4793773 - DNA, 25 bp, Homo sapien
tcctccccttgagctagagggccaa

SEQ ID NO: 4793774 - DNA, 25 bp, Homo sapien
ttccccatcctctgcctaccctggc

SEQ ID NO: 4793775 - DNA, 25 bp, Homo sapien
tcctgggaaaccttcagggcacgca

SEQ ID NO: 4793776 - DNA, 25 bp, Homo sapien
ttgtcctgggaaaccttcagggcac

SEQ ID NO: 4793777 - DNA, 25 bp, Homo sapien
cctgggaaaccttcagggcacgcac

SEQ ID NO: 4793778 - DNA, 25 bp, Homo sapien
cctgaatcggcaaagctttgggaga

SEQ ID NO: 4793779 - DNA, 25 bp, Homo sapien
ccagtcggcagcctcttgagcacac

SEQ ID NO: 4793780 - DNA, 25 bp, Homo sapien
gtggtcaggcagactactctggagg

SEQ ID NO: 4793781 - DNA, 25 bp, Homo sapien
cctcccctgaatcggcaaagctttg

SEQ ID NO: 4793782 - DNA, 25 bp, Homo sapien
gcttggagccaaggccagagagctt

SEQ ID NO: 4793783 - DNA, 25 bp, Homo sapien
cttggagccaaggccagagagcttc

SEQ ID NO: 4793784 - DNA, 25 bp, Homo sapien
tctcttcgaaagtggctggaacctc

SEQ ID NO: 4793785 - DNA, 25 bp, Homo sapien
taagagctccgactatcagattcag

SEQ ID NO: 4793786 - DNA, 25 bp, Homo sapien
tgggcagtcccttcaacacctggag

SEQ ID NO: 4793787 - DNA, 25 bp, Homo sapien
cccagggcatggcaactaattgaac

SEQ ID NO: 4793788 - DNA, 25 bp, Homo sapien
cagctggtcagccttctgagatctt

SEQ ID NO: 4793789 - DNA, 25 bp, Homo sapien
ctggtcagccttctgagatcttaga

SEQ ID NO: 4793790 - DNA, 25 bp, Homo sapien
gatcttagagctggccatcccacca

SEQ ID NO: 4793791 - DNA, 25 bp, Homo sapien
atcttagagctggccatcccaccaa

SEQ ID NO: 4793792 - DNA, 25 bp, Homo sapien
gagttggagggaggcgcactccagc

SEQ ID NO: 4793793 - DNA, 25 bp, Homo sapien
tctccgtttcaaccagaaatacttg

SEQ ID NO: 4793794 - DNA, 25 bp, Homo sapien
ctctgtttctcatatgggtcattcg

SEQ ID NO: 4793795 - DNA, 25 bp, Homo sapien
gggtcattcgaataatttgaagagt

SEQ ID NO: 4793796 - DNA, 25 bp, Homo sapien
gagccgatgtctgaagcaaaacctg

SEQ ID NO: 4793797 - DNA, 25 bp, Homo sapien
tatgacatcatctaccccgactgag

SEQ ID NO: 4793798 - DNA, 25 bp, Homo sapien
ctgctccaaacagggaaggaggaaa

SEQ ID NO: 4793799 - DNA, 25 bp, Homo sapien
ctgcttatactctcggacctgtggc

SEQ ID NO: 4793800 - DNA, 25 bp, Homo sapien
tctttgacctcatgacatttagagt

SEQ ID NO: 4793801 - DNA, 25 bp, Homo sapien
ggtgctgtgcaaggtattatggtga

SEQ ID NO: 4793802 - DNA, 25 bp, Homo sapien
aggtattatggtgaacaaaatagac

SEQ ID NO: 4793803 - DNA, 25 bp, Homo sapien
gacattgtctttgacctcatgacat

SEQ ID NO: 4793804 - DNA, 25 bp, Homo sapien
gagaccaccagagaaggtttctgca

SEQ ID NO: 4793805 - DNA, 25 bp, Homo sapien
gatgacagaagagctgagaccaaag

SEQ ID NO: 4793806 - DNA, 25 bp, Homo sapien
tggccccgaggtgagaaaagctctt

SEQ ID NO: 4793807 - DNA, 25 bp, Homo sapien
taggaatccagccacgcacagtgga

SEQ ID NO: 4793808 - DNA, 25 bp, Homo sapien
tgtcattaagcgaaaaagaaccagc

SEQ ID NO: 4793809 - DNA, 25 bp, Homo sapien
tattactacacgtcaagatctcctg

SEQ ID NO: 4793810 - DNA, 25 bp, Homo sapien
caggcgctggtttaacggtgacgta

SEQ ID NO: 4793811 - DNA, 25 bp, Homo sapien
caaagatgtgagtaaagagatgccc

SEQ ID NO: 4793812 - DNA, 25 bp, Homo sapien
ttattgcctggatctttatctgtgc

SEQ ID NO: 4793813 - DNA, 25 bp, Homo sapien
ccatggccagaactgtaaaaggctg

SEQ ID NO: 4793814 - DNA, 25 bp, Homo sapien
gaggaggaagcatcattattgcctg

SEQ ID NO: 4793815 - DNA, 25 bp, Homo sapien
gttccatggccagaactgtaaaagg

SEQ ID NO: 4793816 - DNA, 25 bp, Homo sapien
ctggccatgtatcacctccacccca

SEQ ID NO: 4793817 - DNA, 25 bp, Homo sapien
ttcccaggcccgatttccaggtagc

SEQ ID NO: 4793818 - DNA, 25 bp, Homo sapien
ctttggacctcctgtacaccctgga

SEQ ID NO: 4793819 - DNA, 25 bp, Homo sapien
cataggtcttagcagcgtttggcca

SEQ ID NO: 4793820 - DNA, 25 bp, Homo sapien
tagcgtgggtgggtcttatttgcat

SEQ ID NO: 4793821 - DNA, 25 bp, Homo sapien
tccctatgctgagtccctgtaacca

SEQ ID NO: 4793822 - DNA, 25 bp, Homo sapien
ctggcttctgccgagatggatcctt

SEQ ID NO: 4793823 - DNA, 25 bp, Homo sapien
tgcaggcctctgttctgggtccgat

SEQ ID NO: 4793824 - DNA, 25 bp, Homo sapien
tgggtccgattgatctcctgccatc

SEQ ID NO: 4793825 - DNA, 25 bp, Homo sapien
cagaaaaatagtcgggagacggttg

SEQ ID NO: 4793826 - DNA, 25 bp, Homo sapien
cagcagaaaaatagtcgggagacgg

SEQ ID NO: 4793827 - DNA, 25 bp, Homo sapien
agtcgggagacggttgagcgtctgc

SEQ ID NO: 4793828 - DNA, 25 bp, Homo sapien
aaaatagtcgggagacggttgagcg

SEQ ID NO: 4793829 - DNA, 25 bp, Homo sapien
gagtcatgagactcggtggagccca

SEQ ID NO: 4793830 - DNA, 25 bp, Homo sapien
aagagtcatgagactcggtggagcc

SEQ ID NO: 4793831 - DNA, 25 bp, Homo sapien
tgaagagtcatgagactcggtggag

SEQ ID NO: 4793832 - DNA, 25 bp, Homo sapien
gagcagaggcgtggggtggttttaa

SEQ ID NO: 4793833 - DNA, 25 bp, Homo sapien
gtatatactccttgatgccttctga

SEQ ID NO: 4793834 - DNA, 25 bp, Homo sapien
tccttgatgccttctgattatattc

SEQ ID NO: 4793835 - DNA, 25 bp, Homo sapien
tatactccttgatgccttctgatta

SEQ ID NO: 4793836 - DNA, 25 bp, Homo sapien
tgatgccttctgattatattcagct

SEQ ID NO: 4793837 - DNA, 25 bp, Homo sapien
gtcacactgtttacctctggaggga

SEQ ID NO: 4793838 - DNA, 25 bp, Homo sapien
aaaaaactggtacatcctcactgca

SEQ ID NO: 4793839 - DNA, 25 bp, Homo sapien
gcataaagtctctaaaaggatacac

SEQ ID NO: 4793840 - DNA, 25 bp, Homo sapien
gatacactagttgctggtcacactg

SEQ ID NO: 4793841 - DNA, 25 bp, Homo sapien
caagggcacaaagcgttgacaaggg

SEQ ID NO: 4793842 - DNA, 25 bp, Homo sapien
ctatcaagagttgcaagggcccagc

SEQ ID NO: 4793843 - DNA, 25 bp, Homo sapien
tagcagaactatttgtaagggtccc

SEQ ID NO: 4793844 - DNA, 25 bp, Homo sapien
gtgaattcccctatgtacggcccag

SEQ ID NO: 4793845 - DNA, 25 bp, Homo sapien
gccacagtctactacattactaata

SEQ ID NO: 4793846 - DNA, 25 bp, Homo sapien
aacaccaagtgacccgagttctaca

SEQ ID NO: 4793847 - DNA, 25 bp, Homo sapien
tatctcactgttggattataaaaac

SEQ ID NO: 4793848 - DNA, 25 bp, Homo sapien
gacccgagttctacacttttctgtg

SEQ ID NO: 4793849 - DNA, 25 bp, Homo sapien
tctgtagatgctcagtgaccgggct

SEQ ID NO: 4793850 - DNA, 25 bp, Homo sapien
gcacatgctacgactgtccctgaga

SEQ ID NO: 4793851 - DNA, 25 bp, Homo sapien
tgagacagctgtctactgcccctag

SEQ ID NO: 4793852 - DNA, 25 bp, Homo sapien
tgtgacacgatgcaaaggaaagcgt

SEQ ID NO: 4793853 - DNA, 25 bp, Homo sapien
cgaggtcaggagattgagaccatcc

SEQ ID NO: 4793854 - DNA, 25 bp, Homo sapien
caaaaaaattagccgggcgtgatgg

SEQ ID NO: 4793855 - DNA, 25 bp, Homo sapien
tcccagcacttaggcgggcggatca

SEQ ID NO: 4793856 - DNA, 25 bp, Homo sapien
tggctaacacggtgaaatcccgtct

SEQ ID NO: 4793857 - DNA, 25 bp, Homo sapien
aagggaacatttagtctggacagag

SEQ ID NO: 4793858 - DNA, 25 bp, Homo sapien
gaggtatgatcatgaaacccacgtt

SEQ ID NO: 4793859 - DNA, 25 bp, Homo sapien
aatagctatgtccagtcttcagaac

SEQ ID NO: 4793860 - DNA, 25 bp, Homo sapien
gaacagccctgtggcgaggtatgat

SEQ ID NO: 4793861 - DNA, 25 bp, Homo sapien
cagtcactggtatcagagacaagca

SEQ ID NO: 4793862 - DNA, 25 bp, Homo sapien
cactgggctagaagggtaccgccct

SEQ ID NO: 4793863 - DNA, 25 bp, Homo sapien
gggaaagacacaaagccatgctgag

SEQ ID NO: 4793864 - DNA, 25 bp, Homo sapien
aagggtcagttccagaggctcgagc

SEQ ID NO: 4793865 - DNA, 25 bp, Homo sapien
tgaacctaagcaaagaataccagcc

SEQ ID NO: 4793866 - DNA, 25 bp, Homo sapien
acaataaggagatggcgtcaccaac

SEQ ID NO: 4793867 - DNA, 25 bp, Homo sapien
tcctctgttaaaacttgcacacaat

SEQ ID NO: 4793868 - DNA, 25 bp, Homo sapien
ctgtggtccattctgagtaagtgaa

SEQ ID NO: 4793869 - DNA, 25 bp, Homo sapien
aagggtcctgatccatccagagaca

SEQ ID NO: 4793870 - DNA, 25 bp, Homo sapien
tcttggtagaaagacgcaggatgcg

SEQ ID NO: 4793871 - DNA, 25 bp, Homo sapien
ccttgcaatcatgtgatgaggtagc

SEQ ID NO: 4793872 - DNA, 25 bp, Homo sapien
ggtagcaattaaaggcatcaaggcc

SEQ ID NO: 4793873 - DNA, 25 bp, Homo sapien
gtttcgagtctgtcttaggtcccac

SEQ ID NO: 4793874 - DNA, 25 bp, Homo sapien
ttcacagtaggtctgaatgtgctgc

SEQ ID NO: 4793875 - DNA, 25 bp, Homo sapien
gcaggagatacacttgtgtccatcc

SEQ ID NO: 4793876 - DNA, 25 bp, Homo sapien
cttcacagtaggtctgaatgtgctg

SEQ ID NO: 4793877 - DNA, 25 bp, Homo sapien
tacacttgtgtccatccacactgac

SEQ ID NO: 4793878 - DNA, 25 bp, Homo sapien
attggctttactgactcccctgatg

SEQ ID NO: 4793879 - DNA, 25 bp, Homo sapien
tctccggtctaagaactattggctt

SEQ ID NO: 4793880 - DNA, 25 bp, Homo sapien
ccctgatgctgatttcaaccctgct

SEQ ID NO: 4793881 - DNA, 25 bp, Homo sapien
caaagtttctagttatcctctccgg

SEQ ID NO: 4793882 - DNA, 25 bp, Homo sapien
cttaatgatccatggggccaaagca

SEQ ID NO: 4793883 - DNA, 25 bp, Homo sapien
ttaatgatccatggggccaaagcag

SEQ ID NO: 4793884 - DNA, 25 bp, Homo sapien
acactttcacagctgctcagtaagc

SEQ ID NO: 4793885 - DNA, 25 bp, Homo sapien
cacaagaaacactttcacagctgct

SEQ ID NO: 4793886 - DNA, 25 bp, Homo sapien
ctttcacagctgctcagtaagccca

SEQ ID NO: 4793887 - DNA, 25 bp, Homo sapien
ctcacaagaaacactttcacagctg

SEQ ID NO: 4793888 - DNA, 25 bp, Homo sapien
cttcagaggtctgtagtatgtatgg

SEQ ID NO: 4793889 - DNA, 25 bp, Homo sapien
ttatcttcagaggtctgtagtatgt

SEQ ID NO: 4793890 - DNA, 25 bp, Homo sapien
gggttttatcttcagaggtctgtag

SEQ ID NO: 4793891 - DNA, 25 bp, Homo sapien
aggtctgtagtatgtatggttctct

SEQ ID NO: 4793892 - DNA, 25 bp, Homo sapien
tgccctgttctgtaccaagtttgag

SEQ ID NO: 4793893 - DNA, 25 bp, Homo sapien
tctgctgccctgttctgtaccaagt

SEQ ID NO: 4793894 - DNA, 25 bp, Homo sapien
cctgttctgtaccaagtttgagttc

SEQ ID NO: 4793895 - DNA, 25 bp, Homo sapien
ttctgtaccaagtttgagttcatac

SEQ ID NO: 4793896 - DNA, 25 bp, Homo sapien
ggtgttgtcccgagagccagtgcac

SEQ ID NO: 4793897 - DNA, 25 bp, Homo sapien
gtgttgtcccgagagccagtgcaca

SEQ ID NO: 4793898 - DNA, 25 bp, Homo sapien
ctgccttggttgtgaggaaccgtgc

SEQ ID NO: 4793899 - DNA, 25 bp, Homo sapien
aatccggtgaccaccatggcatggc

SEQ ID NO: 4793900 - DNA, 25 bp, Homo sapien
gcatggccacacaattgctgccttg

SEQ ID NO: 4793901 - DNA, 25 bp, Homo sapien
gaaccgtgcaagtcccacatcatga

SEQ ID NO: 4793902 - DNA, 25 bp, Homo sapien
agaggcactgaagaactggctggat

SEQ ID NO: 4793903 - DNA, 25 bp, Homo sapien
aggcactgaagaactggctggattt

SEQ ID NO: 4793904 - DNA, 25 bp, Homo sapien
ctggctggatttgggaatacaggct

SEQ ID NO: 4793905 - DNA, 25 bp, Homo sapien
gaggcactgaagaactggctggatt

SEQ ID NO: 4793906 - DNA, 25 bp, Homo sapien
catatatatgtttgatcttgttcct

SEQ ID NO: 4793907 - DNA, 25 bp, Homo sapien
tcttttaaacaatgtacaggtggct

SEQ ID NO: 4793908 - DNA, 25 bp, Homo sapien
gtgcccagcctagatatgtctcttt

SEQ ID NO: 4793909 - DNA, 25 bp, Homo sapien
ttttaactcagtaagagtactgcct

SEQ ID NO: 4793910 - DNA, 25 bp, Homo sapien
ctatattattgaggaatgctttgca

SEQ ID NO: 4793911 - DNA, 25 bp, Homo sapien
gaggaatgctttgcatatggcaaga

SEQ ID NO: 4793912 - DNA, 25 bp, Homo sapien
ccttcaactatattattgaggaatg

SEQ ID NO: 4793913 - DNA, 25 bp, Homo sapien
tattgaggaatgctttgcatatggc

SEQ ID NO: 4793914 - DNA, 25 bp, Homo sapien
ggtgatctcatgttcatgtcctttg

SEQ ID NO: 4793915 - DNA, 25 bp, Homo sapien
tggtgatctcatgttcatgtccttt

SEQ ID NO: 4793916 - DNA, 25 bp, Homo sapien
ttggtgatctcatgttcatgtcctt

SEQ ID NO: 4793917 - DNA, 25 bp, Homo sapien
gaccactgctctaaacttactgatg

SEQ ID NO: 4793918 - DNA, 25 bp, Homo sapien
aaagcattcggggttccctgttgtg

SEQ ID NO: 4793919 - DNA, 25 bp, Homo sapien
caggaacttgctcaaagcattcggg

SEQ ID NO: 4793920 - DNA, 25 bp, Homo sapien
tggccgtccctcctcacgtgcccct

SEQ ID NO: 4793921 - DNA, 25 bp, Homo sapien
gagctgggctatactcttgaaaagc

SEQ ID NO: 4793922 - DNA, 25 bp, Homo sapien
cagccacgacagagacggtatccat

SEQ ID NO: 4793923 - DNA, 25 bp, Homo sapien
tttccctccagagacacaaaggtct

SEQ ID NO: 4793924 - DNA, 25 bp, Homo sapien
ccagagacacaaaggtctgagttca

SEQ ID NO: 4793925 - DNA, 25 bp, Homo sapien
gctgtttccccatcacgacacaaaa

SEQ ID NO: 4793926 - DNA, 25 bp, Homo sapien
catcacgacacaaaacctaaacgaa

SEQ ID NO: 4793927 - DNA, 25 bp, Homo sapien
ccgtatttataagtgctgtgtttga

SEQ ID NO: 4793928 - DNA, 25 bp, Homo sapien
ttataagtgctgtgtttgagtttgc

SEQ ID NO: 4793929 - DNA, 25 bp, Homo sapien
ggagcttgtttcagttggcacctga

SEQ ID NO: 4793930 - DNA, 25 bp, Homo sapien
gcttgtttcagttggcacctgagta

SEQ ID NO: 4793931 - DNA, 25 bp, Homo sapien
tgtttcagttggcacctgagtagca

SEQ ID NO: 4793932 - DNA, 25 bp, Homo sapien
gtttcagttggcacctgagtagcag

SEQ ID NO: 4793933 - DNA, 25 bp, Homo sapien
ttgtggctgctggaagttgtgttcc

SEQ ID NO: 4793934 - DNA, 25 bp, Homo sapien
cccttgtggctgctggaagttgtgt

SEQ ID NO: 4793935 - DNA, 25 bp, Homo sapien
cttgtggctgctggaagttgtgttc

SEQ ID NO: 4793936 - DNA, 25 bp, Homo sapien
ccttgtggctgctggaagttgtgtt

SEQ ID NO: 4793937 - DNA, 25 bp, Homo sapien
ccccaaaccaataggatcttcttgg

SEQ ID NO: 4793938 - DNA, 25 bp, Homo sapien
cccaaaccaataggatcttcttggt

SEQ ID NO: 4793939 - DNA, 25 bp, Homo sapien
ccaaaccaataggatcttcttggtt

SEQ ID NO: 4793940 - DNA, 25 bp, Homo sapien
caaaccaataggatcttcttggtta

SEQ ID NO: 4793941 - DNA, 25 bp, Homo sapien
aatctctgtaattagtgggaagcca

SEQ ID NO: 4793942 - DNA, 25 bp, Homo sapien
tctcttctctgtctaagcatgtttg

SEQ ID NO: 4793943 - DNA, 25 bp, Homo sapien
tcttctctgtctaagcatgtttgca

SEQ ID NO: 4793944 - DNA, 25 bp, Homo sapien
tctgtaattagtgggaagccactga

SEQ ID NO: 4793945 - DNA, 25 bp, Homo sapien
ccaaggttggccctcataaccgctc

SEQ ID NO: 4793946 - DNA, 25 bp, Homo sapien
aagatgggaacctagcgccacccag

SEQ ID NO: 4793947 - DNA, 25 bp, Homo sapien
tctccgcttcgaccaaagggcgagg

SEQ ID NO: 4793948 - DNA, 25 bp, Homo sapien
tagtctgccgctatgcccctttctc

SEQ ID NO: 4793949 - DNA, 25 bp, Homo sapien
gctggggccggcgggaacgcggagc

SEQ ID NO: 4793950 - DNA, 25 bp, Homo sapien
cgcagttccgttcgcctaaagctgg

SEQ ID NO: 4793951 - DNA, 25 bp, Homo sapien
ccggcgctactctcttcgtgatcag

SEQ ID NO: 4793952 - DNA, 25 bp, Homo sapien
caggactccgctgccagaagaatct

SEQ ID NO: 4793953 - DNA, 25 bp, Homo sapien
tagacaatccaagcaaaacgggtac

SEQ ID NO: 4793954 - DNA, 25 bp, Homo sapien
gccacctgcgacaggtggagcgcac

SEQ ID NO: 4793955 - DNA, 25 bp, Homo sapien
tcagtgctcttagtccatggtgcat

SEQ ID NO: 4793956 - DNA, 25 bp, Homo sapien
ttctcagtgctcttagtccatggtg

SEQ ID NO: 4793957 - DNA, 25 bp, Homo sapien
gccttctcagtgctcttagtccatg

SEQ ID NO: 4793958 - DNA, 25 bp, Homo sapien
gaagccttctcagtgctcttagtcc

SEQ ID NO: 4793959 - DNA, 25 bp, Homo sapien
catataaggaccgaagaagcagagg

SEQ ID NO: 4793960 - DNA, 25 bp, Homo sapien
tagagcccaggaccattaggacaac

SEQ ID NO: 4793961 - DNA, 25 bp, Homo sapien
gatccccaggagtcggaaatgttaa

SEQ ID NO: 4793962 - DNA, 25 bp, Homo sapien
caactctgggcaacggcggttcttg

SEQ ID NO: 4793963 - DNA, 25 bp, Homo sapien
gctgataagtttccctacctgatgg

SEQ ID NO: 4793964 - DNA, 25 bp, Homo sapien
cactgataatagcagggacggcctt

SEQ ID NO: 4793965 - DNA, 25 bp, Homo sapien
ttttctagcacacaagagcaacctg

SEQ ID NO: 4793966 - DNA, 25 bp, Homo sapien
gggatcatgtctccaggtaacccga

SEQ ID NO: 4793967 - DNA, 25 bp, Homo sapien
gggccctctgtgaatcctttggatg

SEQ ID NO: 4793968 - DNA, 25 bp, Homo sapien
aggactctgctgctaaaaccaagtt

SEQ ID NO: 4793969 - DNA, 25 bp, Homo sapien
ttgcataatggggtttcagatcgcc

SEQ ID NO: 4793970 - DNA, 25 bp, Homo sapien
aaaagggacacaggtgtgaatgaga

SEQ ID NO: 4793971 - DNA, 25 bp, Homo sapien
gtaggtgacaaaggccgcagggaga

SEQ ID NO: 4793972 - DNA, 25 bp, Homo sapien
tccatggcctagggcccagccactt

SEQ ID NO: 4793973 - DNA, 25 bp, Homo sapien
gctttattatcacagtaggtgacaa

SEQ ID NO: 4793974 - DNA, 25 bp, Homo sapien
agggggaaaggtccagagctgtgga

SEQ ID NO: 4793975 - DNA, 25 bp, Homo sapien
taggtacagaatccctgaccacggg

SEQ ID NO: 4793976 - DNA, 25 bp, Homo sapien
caaagtcgaagtgttcacgcaggcc

SEQ ID NO: 4793977 - DNA, 25 bp, Homo sapien
agcctcggaggtcagcacaaagtcg

SEQ ID NO: 4793978 - DNA, 25 bp, Homo sapien
tcaaagttggagatcactgccagtc

SEQ ID NO: 4793979 - DNA, 25 bp, Homo sapien
gatttgctggctaacatgaagcact

SEQ ID NO: 4793980 - DNA, 25 bp, Homo sapien
tgggaaatgtcttcacagcacaaga

SEQ ID NO: 4793981 - DNA, 25 bp, Homo sapien
caggccttgtgggtcagatttgctg

SEQ ID NO: 4793982 - DNA, 25 bp, Homo sapien
ggaagctgagctggataagaccacc

SEQ ID NO: 4793983 - DNA, 25 bp, Homo sapien
gccctgcaagtcaagtttcaatgga

SEQ ID NO: 4793984 - DNA, 25 bp, Homo sapien
taggtgagtgctcccgtcagtggaa

SEQ ID NO: 4793985 - DNA, 25 bp, Homo sapien
taaggatctaaatccagggaccgca

SEQ ID NO: 4793986 - DNA, 25 bp, Homo sapien
tagcatatgggatagatttccagcc

SEQ ID NO: 4793987 - DNA, 25 bp, Homo sapien
aacttccagactctctggccagttc

SEQ ID NO: 4793988 - DNA, 25 bp, Homo sapien
aaggtcacagtgagtcagtggcaca

SEQ ID NO: 4793989 - DNA, 25 bp, Homo sapien
gccaggaccagaacccaaacttcca

SEQ ID NO: 4793990 - DNA, 25 bp, Homo sapien
gaacccaaacttccagactctctgg

SEQ ID NO: 4793991 - DNA, 25 bp, Homo sapien
gtaccatgagatatatttggatttt

SEQ ID NO: 4793992 - DNA, 25 bp, Homo sapien
taccatgagatatatttggatttta

SEQ ID NO: 4793993 - DNA, 25 bp, Homo sapien
ggtaataacactggcctaggaggag

SEQ ID NO: 4793994 - DNA, 25 bp, Homo sapien
gagagaactgactcaaggcacaaga

SEQ ID NO: 4793995 - DNA, 25 bp, Homo sapien
tcacacagggagtcacattggcaca

SEQ ID NO: 4793996 - DNA, 25 bp, Homo sapien
tagggaagggcgtcactggtaaatc

SEQ ID NO: 4793997 - DNA, 25 bp, Homo sapien
tcgggaaaggcgaagtccaggagcc

SEQ ID NO: 4793998 - DNA, 25 bp, Homo sapien
tatagctgccgtcggcagcgtgagc

SEQ ID NO: 4793999 - DNA, 25 bp, Homo sapien
ggagcccggacctgacgcagaatgt

SEQ ID NO: 4794000 - DNA, 25 bp, Homo sapien
tctcagctgtagggcgtccacggct

SEQ ID NO: 4794001 - DNA, 25 bp, Homo sapien
gaagcagattgaaaacgcagccgca

SEQ ID NO: 4794002 - DNA, 25 bp, Homo sapien
agcagattgaaaacgcagccgcaag

SEQ ID NO: 4794003 - DNA, 25 bp, Homo sapien
aggaagcagattgaaaacgcagccg

SEQ ID NO: 4794004 - DNA, 25 bp, Homo sapien
caaggaagcagattgaaaacgcagc

SEQ ID NO: 4794005 - DNA, 25 bp, Homo sapien
ccgccgctcctcaccgctgtctccg

SEQ ID NO: 4794006 - DNA, 25 bp, Homo sapien
cctgcccgccacaccgccgctcctc

SEQ ID NO: 4794007 - DNA, 25 bp, Homo sapien
cacaccgccgctcctcaccgctgtc

SEQ ID NO: 4794008 - DNA, 25 bp, Homo sapien
gctcctcaccgctgtctccgctccc

SEQ ID NO: 4794009 - DNA, 25 bp, Homo sapien
taacccagggatatcgatctaggcc

SEQ ID NO: 4794010 - DNA, 25 bp, Homo sapien
cactctgaaaaggtgaatgtggccc

SEQ ID NO: 4794011 - DNA, 25 bp, Homo sapien
tactgtttcaagagaggccccttcc

SEQ ID NO: 4794012 - DNA, 25 bp, Homo sapien
gcagaggccttggagttggactaca

SEQ ID NO: 4794013 - DNA, 25 bp, Homo sapien
agaggaaagagctgagggtggcaaa

SEQ ID NO: 4794014 - DNA, 25 bp, Homo sapien
agcttgggagagctcataggatgca

SEQ ID NO: 4794015 - DNA, 25 bp, Homo sapien
aaggtgggcctcacggctgacccag

SEQ ID NO: 4794016 - DNA, 25 bp, Homo sapien
aagcttgggagagctcataggatgc

SEQ ID NO: 4794017 - DNA, 25 bp, Homo sapien
gggcatgagggcacagttctaaaag

SEQ ID NO: 4794018 - DNA, 25 bp, Homo sapien
ttactttggttttcacttgtctgag

SEQ ID NO: 4794019 - DNA, 25 bp, Homo sapien
gagttagcatgctggcaaaaccacc

SEQ ID NO: 4794020 - DNA, 25 bp, Homo sapien
ggccccgctagcatgtgagcaggaa

SEQ ID NO: 4794021 - DNA, 25 bp, Homo sapien
cagctgcggtgtgtagtaggtgatg

SEQ ID NO: 4794022 - DNA, 25 bp, Homo sapien
ccactgcagcagctgcggtgtgtag

SEQ ID NO: 4794023 - DNA, 25 bp, Homo sapien
gtgtgtagtaggtgatgatgatgtc

SEQ ID NO: 4794024 - DNA, 25 bp, Homo sapien
actgcagcagctgcggtgtgtagta

SEQ ID NO: 4794025 - DNA, 25 bp, Homo sapien
tccagagacgtggtacacggcgaga

SEQ ID NO: 4794026 - DNA, 25 bp, Homo sapien
tccagtacggcagccttgagatcaa

SEQ ID NO: 4794027 - DNA, 25 bp, Homo sapien
tgctctgcggaaggcagtcatggcc

SEQ ID NO: 4794028 - DNA, 25 bp, Homo sapien
aaactctccagagacgtggtacacg

SEQ ID NO: 4794029 - DNA, 25 bp, Homo sapien
tcttgaactgttaaagcagggctgt

SEQ ID NO: 4794030 - DNA, 25 bp, Homo sapien
gctgtttgaggctcgtgcaagcccc

SEQ ID NO: 4794031 - DNA, 25 bp, Homo sapien
ccccgacatagaaggccacgatggt

SEQ ID NO: 4794032 - DNA, 25 bp, Homo sapien
gcagcctggcccactcttgaactgt

SEQ ID NO: 4794033 - DNA, 25 bp, Homo sapien
cgcacgatgtccaggtagggcattc

SEQ ID NO: 4794034 - DNA, 25 bp, Homo sapien
gatgtccaggtagggcattcccggc

SEQ ID NO: 4794035 - DNA, 25 bp, Homo sapien
aggtagggcattcccggcttcacca

SEQ ID NO: 4794036 - DNA, 25 bp, Homo sapien
ggcattcccggcttcaccatgagca

SEQ ID NO: 4794037 - DNA, 25 bp, Homo sapien
aaaagctgggcttgacttagctgca

SEQ ID NO: 4794038 - DNA, 25 bp, Homo sapien
caggcctcgtgctccagggggcagc

SEQ ID NO: 4794039 - DNA, 25 bp, Homo sapien
agcggcggtccccaaaagctgggct

SEQ ID NO: 4794040 - DNA, 25 bp, Homo sapien
agctggtagcagcggcggtccccaa

SEQ ID NO: 4794041 - DNA, 25 bp, Homo sapien
caaatttggcactgtagctcatcac

SEQ ID NO: 4794042 - DNA, 25 bp, Homo sapien
aaatttggcactgtagctcatcacc

SEQ ID NO: 4794043 - DNA, 25 bp, Homo sapien
gcaaatttggcactgtagctcatca

SEQ ID NO: 4794044 - DNA, 25 bp, Homo sapien
gtccgacggggctaccacctgacat

SEQ ID NO: 4794045 - DNA, 25 bp, Homo sapien
gcgtccatccatcatgtccgacggg

SEQ ID NO: 4794046 - DNA, 25 bp, Homo sapien
tccacgcgtccatccatcatgtccg

SEQ ID NO: 4794047 - DNA, 25 bp, Homo sapien
tgtccgacggggctaccacctgaca

SEQ ID NO: 4794048 - DNA, 25 bp, Homo sapien
tcctcagcccggaatgctccgtttt

SEQ ID NO: 4794049 - DNA, 25 bp, Homo sapien
aatgctccgttttcactcaggagcc

SEQ ID NO: 4794050 - DNA, 25 bp, Homo sapien
ctgccttggcatacgccaatgccac

SEQ ID NO: 4794051 - DNA, 25 bp, Homo sapien
ttggcatacgccaatgccacctcag

SEQ ID NO: 4794052 - DNA, 25 bp, Homo sapien
aggacagatgactgggttttgggga

SEQ ID NO: 4794053 - DNA, 25 bp, Homo sapien
ggacagatgactgggttttggggag

SEQ ID NO: 4794054 - DNA, 25 bp, Homo sapien
caggacagatgactgggttttgggg

SEQ ID NO: 4794055 - DNA, 25 bp, Homo sapien
gcagtaggagtgtgggtggcagcag

SEQ ID NO: 4794056 - DNA, 25 bp, Homo sapien
ggctggtgggagggagggaactcac

SEQ ID NO: 4794057 - DNA, 25 bp, Homo sapien
gtggcagcagggctggtgggaggga

SEQ ID NO: 4794058 - DNA, 25 bp, Homo sapien
gtgggcagtaggagtgtgggtggca

SEQ ID NO: 4794059 - DNA, 25 bp, Homo sapien
gagtcagctgcggaaccccgctcgt

SEQ ID NO: 4794060 - DNA, 25 bp, Homo sapien
gggaaggtcttcctcaacagatgga

SEQ ID NO: 4794061 - DNA, 25 bp, Homo sapien
ggactcctcggagtcagctgcggaa

SEQ ID NO: 4794062 - DNA, 25 bp, Homo sapien
ggtcttcctcaacagatggattgcc

SEQ ID NO: 4794063 - DNA, 25 bp, Homo sapien
tgctggggacgccaaagatcaagac

SEQ ID NO: 4794064 - DNA, 25 bp, Homo sapien
aagacacagcgtaggccctcttcca

SEQ ID NO: 4794065 - DNA, 25 bp, Homo sapien
gccaaagatcaagacacagcgtagg

SEQ ID NO: 4794066 - DNA, 25 bp, Homo sapien
agatcaagacacagcgtaggccctc

SEQ ID NO: 4794067 - DNA, 25 bp, Homo sapien
ctggtgataggctgtatgtcatcag

SEQ ID NO: 4794068 - DNA, 25 bp, Homo sapien
tggtgataggctgtatgtcatcagg

SEQ ID NO: 4794069 - DNA, 25 bp, Homo sapien
ggtgataggctgtatgtcatcagga

SEQ ID NO: 4794070 - DNA, 25 bp, Homo sapien
gcgggggtgggatatggattggtag

SEQ ID NO: 4794071 - DNA, 25 bp, Homo sapien
ggtgcgggggcgactgagagggatg

SEQ ID NO: 4794072 - DNA, 25 bp, Homo sapien
tgagagggatggttgggaagcagga

SEQ ID NO: 4794073 - DNA, 25 bp, Homo sapien
aaagaaatatggaagtggagatggt

SEQ ID NO: 4794074 - DNA, 25 bp, Homo sapien
ggaaagaaatatggaagtggagatg

SEQ ID NO: 4794075 - DNA, 25 bp, Homo sapien
tcttacaggtacatagcactttaca

SEQ ID NO: 4794076 - DNA, 25 bp, Homo sapien
tgactgccatctcttacaggtacat

SEQ ID NO: 4794077 - DNA, 25 bp, Homo sapien
acaatgtacagagcaccttctcagc

SEQ ID NO: 4794078 - DNA, 25 bp, Homo sapien
ttacaatgtacagagcaccttctca

SEQ ID NO: 4794079 - DNA, 25 bp, Homo sapien
tgccaggcccgaagtagtgggtgga

SEQ ID NO: 4794080 - DNA, 25 bp, Homo sapien
tgtgcagaacggactggggctgcat

SEQ ID NO: 4794081 - DNA, 25 bp, Homo sapien
gaggttggaggcattgagggtggtg

SEQ ID NO: 4794082 - DNA, 25 bp, Homo sapien
agtgggtggaagtagccgctgtgca

SEQ ID NO: 4794083 - DNA, 25 bp, Homo sapien
cgtgggccagtgggcacaggggcat

SEQ ID NO: 4794084 - DNA, 25 bp, Homo sapien
gcgtgggccagtgggcacaggggca

SEQ ID NO: 4794085 - DNA, 25 bp, Homo sapien
ggcgtgggccagtgggcacaggggc

SEQ ID NO: 4794086 - DNA, 25 bp, Homo sapien
tcctggggcattggctgcaggctct

SEQ ID NO: 4794087 - DNA, 25 bp, Homo sapien
ctcctggggcattggctgcaggctc

SEQ ID NO: 4794088 - DNA, 25 bp, Homo sapien
agttggttggaaccgagggctcctg

SEQ ID NO: 4794089 - DNA, 25 bp, Homo sapien
cagttggttggaaccgagggctcct

SEQ ID NO: 4794090 - DNA, 25 bp, Homo sapien
tccctgctggtcaacaaggtaagtt

SEQ ID NO: 4794091 - DNA, 25 bp, Homo sapien
tggaaaacagctcttctagattcct

SEQ ID NO: 4794092 - DNA, 25 bp, Homo sapien
acatctgagcaagcaatgactgttt

SEQ ID NO: 4794093 - DNA, 25 bp, Homo sapien
tagcccaatgctactcacagcatgg

SEQ ID NO: 4794094 - DNA, 25 bp, Homo sapien
gtaggcgtctctctgcccatactgt

SEQ ID NO: 4794095 - DNA, 25 bp, Homo sapien
gcgtctctctgcccatactgtttct

SEQ ID NO: 4794096 - DNA, 25 bp, Homo sapien
gattcagtaggcgtctctctgccca

SEQ ID NO: 4794097 - DNA, 25 bp, Homo sapien
aggcgtctctctgcccatactgttt

SEQ ID NO: 4794098 - DNA, 25 bp, Homo sapien
agacaggagcgagccgccaggaggt

SEQ ID NO: 4794099 - DNA, 25 bp, Homo sapien
gacagtcccaggtttggtctatgct

SEQ ID NO: 4794100 - DNA, 25 bp, Homo sapien
agtatagggcggtgcagaaagatcc

SEQ ID NO: 4794101 - DNA, 25 bp, Homo sapien
tagctttgctgggacgcagagtata

SEQ ID NO: 4794102 - DNA, 25 bp, Homo sapien
tgtctggcaccaagtagctgcacag

SEQ ID NO: 4794103 - DNA, 25 bp, Homo sapien
gaatatgagctcaaacccttgtggg

SEQ ID NO: 4794104 - DNA, 25 bp, Homo sapien
agatttctgaagtggagtccctgcc

SEQ ID NO: 4794105 - DNA, 25 bp, Homo sapien
tggaacgagatgtcctggcacagct

SEQ ID NO: 4794106 - DNA, 25 bp, Homo sapien
tgcagcgggataatccagcccaaac

SEQ ID NO: 4794107 - DNA, 25 bp, Homo sapien
tatccgagagggtgaaccccagaga

SEQ ID NO: 4794108 - DNA, 25 bp, Homo sapien
tcgatggagtctgcccaggcggtat

SEQ ID NO: 4794109 - DNA, 25 bp, Homo sapien
aacaaacgctccacgggactccgtg

SEQ ID NO: 4794110 - DNA, 25 bp, Homo sapien
cctccaggcccgctatctccccgca

SEQ ID NO: 4794111 - DNA, 25 bp, Homo sapien
aggcccgctatctccccgcatccag

SEQ ID NO: 4794112 - DNA, 25 bp, Homo sapien
tccaggcccgctatctccccgcatc

SEQ ID NO: 4794113 - DNA, 25 bp, Homo sapien
gccctccaggcccgctatctccccg

SEQ ID NO: 4794114 - DNA, 25 bp, Homo sapien
ctgctcctgtcaccgctgtctcccg

SEQ ID NO: 4794115 - DNA, 25 bp, Homo sapien
cgctgctcctgtcaccgctgtctcc

SEQ ID NO: 4794116 - DNA, 25 bp, Homo sapien
cacagaccgcgtaagagcggggggg

SEQ ID NO: 4794117 - DNA, 25 bp, Homo sapien
ctcccacagaccgcgtaagagcggg

SEQ ID NO: 4794118 - DNA, 25 bp, Homo sapien
ccgggccctgcgcttgtgcagcgaa

SEQ ID NO: 4794119 - DNA, 25 bp, Homo sapien
cacacgcaacgaggcctggccaatt

SEQ ID NO: 4794120 - DNA, 25 bp, Homo sapien
ctggccaattgggtgtgtcgagggc

SEQ ID NO: 4794121 - DNA, 25 bp, Homo sapien
acgccccctgaaggcggtcttctgg

SEQ ID NO: 4794122 - DNA, 25 bp, Homo sapien
aggaccacacgccaaaaactgcatg

SEQ ID NO: 4794123 - DNA, 25 bp, Homo sapien
ctgctggtcatccaaggcgatgcag

SEQ ID NO: 4794124 - DNA, 25 bp, Homo sapien
ggcgatgcagtatctcatgtttaca

SEQ ID NO: 4794125 - DNA, 25 bp, Homo sapien
aactgcatggagagtatcatcaggg

SEQ ID NO: 4794126 - DNA, 25 bp, Homo sapien
gtcaaaccccaagcactcaacttag

SEQ ID NO: 4794127 - DNA, 25 bp, Homo sapien
tgtcaaactacacgtcactacctgt

SEQ ID NO: 4794128 - DNA, 25 bp, Homo sapien
gcgcttggagcactgaatggaaaca

SEQ ID NO: 4794129 - DNA, 25 bp, Homo sapien
gggagagttagattcctgagcacca

SEQ ID NO: 4794130 - DNA, 25 bp, Homo sapien
agaagacatgagacaaaattagcca

SEQ ID NO: 4794131 - DNA, 25 bp, Homo sapien
cccaggatttcaaggatgcaatgag

SEQ ID NO: 4794132 - DNA, 25 bp, Homo sapien
aggatttcaaggatgcaatgagcta

SEQ ID NO: 4794133 - DNA, 25 bp, Homo sapien
ttagaagacatgagacaaaattagc

SEQ ID NO: 4794134 - DNA, 25 bp, Homo sapien
ccttccgggaggtgatgacaaatcc

SEQ ID NO: 4794135 - DNA, 25 bp, Homo sapien
aaagccatagtcacaagtctgggag

SEQ ID NO: 4794136 - DNA, 25 bp, Homo sapien
gatcagattactaccacaccagcag

SEQ ID NO: 4794137 - DNA, 25 bp, Homo sapien
cagcaggccgatcatctacaggcaa

SEQ ID NO: 4794138 - DNA, 25 bp, Homo sapien
cctgagccttggctgcctctgtgat

SEQ ID NO: 4794139 - DNA, 25 bp, Homo sapien
gccccagtttttcctgagccttggc

SEQ ID NO: 4794140 - DNA, 25 bp, Homo sapien
cataagcaaagccccagtttttcct

SEQ ID NO: 4794141 - DNA, 25 bp, Homo sapien
cagtttttcctgagccttggctgcc

SEQ ID NO: 4794142 - DNA, 25 bp, Homo sapien
tcatttcaagtggtaccttccaagg

SEQ ID NO: 4794143 - DNA, 25 bp, Homo sapien
gcttcacagaaacacgtagcacgtc

SEQ ID NO: 4794144 - DNA, 25 bp, Homo sapien
tagtcgttcagaatccctcttgtca

SEQ ID NO: 4794145 - DNA, 25 bp, Homo sapien
ggcacttttgcctgagactactctg

SEQ ID NO: 4794146 - DNA, 25 bp, Homo sapien
cttgctcttccgagtctgttttttt

SEQ ID NO: 4794147 - DNA, 25 bp, Homo sapien
ttgcctttctgctcccgcctatatg

SEQ ID NO: 4794148 - DNA, 25 bp, Homo sapien
ggtaacgaaccgctggaactccatc

SEQ ID NO: 4794149 - DNA, 25 bp, Homo sapien
tcctttcattgcaaagttgttagca

SEQ ID NO: 4794150 - DNA, 25 bp, Homo sapien
gcgtcttccgctttcctttcattgc

SEQ ID NO: 4794151 - DNA, 25 bp, Homo sapien
catcactggcattcagcgtcttccg

SEQ ID NO: 4794152 - DNA, 25 bp, Homo sapien
caccgagggagaacacaatcgttgg

SEQ ID NO: 4794153 - DNA, 25 bp, Homo sapien
aggtggaacgggaaagcctgcctct

SEQ ID NO: 4794154 - DNA, 25 bp, Homo sapien
cagactccctcttgtttgtaaggcg

SEQ ID NO: 4794155 - DNA, 25 bp, Homo sapien
gaagagaaaggctgtcagactccct

SEQ ID NO: 4794156 - DNA, 25 bp, Homo sapien
ctccttggagatgttgacaccgtcc

SEQ ID NO: 4794157 - DNA, 25 bp, Homo sapien
agcacgaagacgctggcggcgcggg

SEQ ID NO: 4794158 - DNA, 25 bp, Homo sapien
ttggagatgttgacaccgtccggga

SEQ ID NO: 4794159 - DNA, 25 bp, Homo sapien
tggcggcgcgggagatggcgctccg

SEQ ID NO: 4794160 - DNA, 25 bp, Homo sapien
tgcttccctcctgcccgttcgtccg

SEQ ID NO: 4794161 - DNA, 25 bp, Homo sapien
ctgcgaggagaccgggggtgagcaa

SEQ ID NO: 4794162 - DNA, 25 bp, Homo sapien
gggtgagcaaagctgccgttccagc

SEQ ID NO: 4794163 - DNA, 25 bp, Homo sapien
agcaaagctgccgttccagcacctg

SEQ ID NO: 4794164 - DNA, 25 bp, Homo sapien
cttgatgatcctggtgatcacggca

SEQ ID NO: 4794165 - DNA, 25 bp, Homo sapien
tcctggtgatcacggcattgggcag

SEQ ID NO: 4794166 - DNA, 25 bp, Homo sapien
gcaggtttaggtcctcgggcctctc

SEQ ID NO: 4794167 - DNA, 25 bp, Homo sapien
cacggcattgggcaggtttaggtcc

SEQ ID NO: 4794168 - DNA, 25 bp, Homo sapien
gacttcccgcgtcgctacggtctga

SEQ ID NO: 4794169 - DNA, 25 bp, Homo sapien
taaactccccttcgcctccgcttca

SEQ ID NO: 4794170 - DNA, 25 bp, Homo sapien
tgcgtccggacttcccgcgtcgcta

SEQ ID NO: 4794171 - DNA, 25 bp, Homo sapien
gcctccgcttcagggagctactgcg

SEQ ID NO: 4794172 - DNA, 25 bp, Homo sapien
caaataccggcgcatccggattttg

SEQ ID NO: 4794173 - DNA, 25 bp, Homo sapien
tccggattttgaagccgcagtggtt

SEQ ID NO: 4794174 - DNA, 25 bp, Homo sapien
cacagtgctctgagcgccatagcct

SEQ ID NO: 4794175 - DNA, 25 bp, Homo sapien
gttttggcccgccaaggcttccatc

SEQ ID NO: 4794176 - DNA, 25 bp, Homo sapien
cttatttggctcaatggagcttccg

SEQ ID NO: 4794177 - DNA, 25 bp, Homo sapien
tcaatggagcttccgtccgtttccc

SEQ ID NO: 4794178 - DNA, 25 bp, Homo sapien
tttggctcaatggagcttccgtccg

SEQ ID NO: 4794179 - DNA, 25 bp, Homo sapien
caacttatttggctcaatggagctt

SEQ ID NO: 4794180 - DNA, 25 bp, Homo sapien
gagccacggtatacccaatcttgag

SEQ ID NO: 4794181 - DNA, 25 bp, Homo sapien
ttgtaatcatgaaaaggcataggat

SEQ ID NO: 4794182 - DNA, 25 bp, Homo sapien
tgccaaagtcctgcgatgttgccaa

SEQ ID NO: 4794183 - DNA, 25 bp, Homo sapien
attgtgatattgtgatgatcatgta

SEQ ID NO: 4794184 - DNA, 25 bp, Homo sapien
cgcgcacagtgcgcgcacacactgg

SEQ ID NO: 4794185 - DNA, 25 bp, Homo sapien
cttcggctcgcgcacagtgcgcgca

SEQ ID NO: 4794186 - DNA, 25 bp, Homo sapien
ggctcgcgcacagtgcgcgcacaca

SEQ ID NO: 4794187 - DNA, 25 bp, Homo sapien
gcgcacagtgcgcgcacacactggc

SEQ ID NO: 4794188 - DNA, 25 bp, Homo sapien
ccaacctcgatgaggatgacttcaa

SEQ ID NO: 4794189 - DNA, 25 bp, Homo sapien
gttggtgcccaactgcgatctcatg

SEQ ID NO: 4794190 - DNA, 25 bp, Homo sapien
ccttttgcacatagtgttggtgccc

SEQ ID NO: 4794191 - DNA, 25 bp, Homo sapien
gacttcaagccctttagcctgactg

SEQ ID NO: 4794192 - DNA, 25 bp, Homo sapien
gagcctgaattgcttgggactgaag

SEQ ID NO: 4794193 - DNA, 25 bp, Homo sapien
tttgcaggagcctgaattgcttggg

SEQ ID NO: 4794194 - DNA, 25 bp, Homo sapien
tttctgatggatgacgggctggacc

SEQ ID NO: 4794195 - DNA, 25 bp, Homo sapien
cctgggcttctgagatctgggtcct

SEQ ID NO: 4794196 - DNA, 25 bp, Homo sapien
tctttctatagagcagccctggtcc

SEQ ID NO: 4794197 - DNA, 25 bp, Homo sapien
ctttctatagagcagccctggtcct

SEQ ID NO: 4794198 - DNA, 25 bp, Homo sapien
gctctttctatagagcagccctggt

SEQ ID NO: 4794199 - DNA, 25 bp, Homo sapien
ctggtcctgccttggatgtgtctgg

SEQ ID NO: 4794200 - DNA, 25 bp, Homo sapien
cttgcacctcagactactgggagca

SEQ ID NO: 4794201 - DNA, 25 bp, Homo sapien
cctagggctcaatgaaaaccagacg

SEQ ID NO: 4794202 - DNA, 25 bp, Homo sapien
tcctgcacagtttgctttggcttca

SEQ ID NO: 4794203 - DNA, 25 bp, Homo sapien
tgggagcactgtctgagccaaaccc

SEQ ID NO: 4794204 - DNA, 25 bp, Homo sapien
tgataaagttgtaccccagctctgg

SEQ ID NO: 4794205 - DNA, 25 bp, Homo sapien
caaggaatttatcaggagcagggct

SEQ ID NO: 4794206 - DNA, 25 bp, Homo sapien
ttcgtgaagggagcactcagcagct

SEQ ID NO: 4794207 - DNA, 25 bp, Homo sapien
caggagcttcctaaagtgtggcagc

SEQ ID NO: 4794208 - DNA, 25 bp, Homo sapien
gtagtatgggcacctggatagcagc

SEQ ID NO: 4794209 - DNA, 25 bp, Homo sapien
tgctgacttggctacttcccaaggg

SEQ ID NO: 4794210 - DNA, 25 bp, Homo sapien
tgcaactgcctcctattagtgctga

SEQ ID NO: 4794211 - DNA, 25 bp, Homo sapien
cattggcctggagactttgaaagtt

SEQ ID NO: 4794212 - DNA, 25 bp, Homo sapien
ctggacctgagatagaacttcttga

SEQ ID NO: 4794213 - DNA, 25 bp, Homo sapien
tggacctgagatagaacttcttgag

SEQ ID NO: 4794214 - DNA, 25 bp, Homo sapien
gttggtttggaccttgatctgtagc

SEQ ID NO: 4794215 - DNA, 25 bp, Homo sapien
gatctgtagccatctaagaactgct

SEQ ID NO: 4794216 - DNA, 25 bp, Homo sapien
ggcctgccccagaagatgagggcca

SEQ ID NO: 4794217 - DNA, 25 bp, Homo sapien
gttgaagacattggcagatcccttg

SEQ ID NO: 4794218 - DNA, 25 bp, Homo sapien
aggtgcacccgtggtccgttccagg

SEQ ID NO: 4794219 - DNA, 25 bp, Homo sapien
cagagagcagtttgttaggcagccc

SEQ ID NO: 4794220 - DNA, 25 bp, Homo sapien
acagagactgggaactcctgggacc

SEQ ID NO: 4794221 - DNA, 25 bp, Homo sapien
tgtgctgaggtttgctgtcactgcc

SEQ ID NO: 4794222 - DNA, 25 bp, Homo sapien
tgtcactgcctttgggcgcacagag

SEQ ID NO: 4794223 - DNA, 25 bp, Homo sapien
gaccggatgtggtcaggcttcctga

SEQ ID NO: 4794224 - DNA, 25 bp, Homo sapien
agccagccggctgtccagtgccaca

SEQ ID NO: 4794225 - DNA, 25 bp, Homo sapien
gccagccggctgtccagtgccacac

SEQ ID NO: 4794226 - DNA, 25 bp, Homo sapien
aatgagagcgcctactgggaggacc

SEQ ID NO: 4794227 - DNA, 25 bp, Homo sapien
gggcaaggacaccaatcatgaacag

SEQ ID NO: 4794228 - DNA, 25 bp, Homo sapien
tgccaaagggcctaatgagagcgcc

SEQ ID NO: 4794229 - DNA, 25 bp, Homo sapien
aatcgatgacagttgtgccaaaggg

SEQ ID NO: 4794230 - DNA, 25 bp, Homo sapien
gcacagtgggtcgaggattgctccc

SEQ ID NO: 4794231 - DNA, 25 bp, Homo sapien
gattgctcccaaaagcccgaagtct

SEQ ID NO: 4794232 - DNA, 25 bp, Homo sapien
gactgatactgctgaggtgactgca

SEQ ID NO: 4794233 - DNA, 25 bp, Homo sapien
ccattagcaggttgggaatcatcca

SEQ ID NO: 4794234 - DNA, 25 bp, Homo sapien
ctccctgtgaacttgaacctgagga

SEQ ID NO: 4794235 - DNA, 25 bp, Homo sapien
agctccctgtgaacttgaacctgag

SEQ ID NO: 4794236 - DNA, 25 bp, Homo sapien
ggccacaaaccacagctccctgtga

SEQ ID NO: 4794237 - DNA, 25 bp, Homo sapien
acagctccctgtgaacttgaacctg

SEQ ID NO: 4794238 - DNA, 25 bp, Homo sapien
agcaataggagaatgtgtcccctgc

SEQ ID NO: 4794239 - DNA, 25 bp, Homo sapien
caagcaagcaataggagaatgtgtc

SEQ ID NO: 4794240 - DNA, 25 bp, Homo sapien
ataggagaatgtgtcccctgcccag

SEQ ID NO: 4794241 - DNA, 25 bp, Homo sapien
aggtgccccagaacaaggcccgtgc

SEQ ID NO: 4794242 - DNA, 25 bp, Homo sapien
gcttcccaggccaagggtgaatcct

SEQ ID NO: 4794243 - DNA, 25 bp, Homo sapien
acagccttccagtctagaaggttcc

SEQ ID NO: 4794244 - DNA, 25 bp, Homo sapien
ggagccagcaggatgacagccttcc

SEQ ID NO: 4794245 - DNA, 25 bp, Homo sapien
tagaaggttcctaggccctgcaagg

SEQ ID NO: 4794246 - DNA, 25 bp, Homo sapien
gtgtgagcatgtaacccgggagcca

SEQ ID NO: 4794247 - DNA, 25 bp, Homo sapien
ccggactccatctcggatgaaagtg

SEQ ID NO: 4794248 - DNA, 25 bp, Homo sapien
cgtgtgagcatgtaacccgggagcc

SEQ ID NO: 4794249 - DNA, 25 bp, Homo sapien
ttctttgagacatcccggactccat

SEQ ID NO: 4794250 - DNA, 25 bp, Homo sapien
tcctagcaggtatcgctcccctggg

SEQ ID NO: 4794251 - DNA, 25 bp, Homo sapien
gtaagtccataaatagctctgctga

SEQ ID NO: 4794252 - DNA, 25 bp, Homo sapien
tggaacctggtcatttggttctgct

SEQ ID NO: 4794253 - DNA, 25 bp, Homo sapien
gaaggcagccgcttgacacggccgc

SEQ ID NO: 4794254 - DNA, 25 bp, Homo sapien
accaggccccacagcgatgcttgaa

SEQ ID NO: 4794255 - DNA, 25 bp, Homo sapien
ccccacagcgatgcttgaaaacttt

SEQ ID NO: 4794256 - DNA, 25 bp, Homo sapien
aggcttggtacaccaggccccacag

SEQ ID NO: 4794257 - DNA, 25 bp, Homo sapien
ctgagaggcttggtacaccaggccc

SEQ ID NO: 4794258 - DNA, 25 bp, Homo sapien
actgactagagccctgctatcctct

SEQ ID NO: 4794259 - DNA, 25 bp, Homo sapien
tgactagagccctgctatcctctgg

SEQ ID NO: 4794260 - DNA, 25 bp, Homo sapien
gactagagccctgctatcctctggg

SEQ ID NO: 4794261 - DNA, 25 bp, Homo sapien
tcactgactagagccctgctatcct

SEQ ID NO: 4794262 - DNA, 25 bp, Homo sapien
ttaaatgcagcgatgtaggtgaggt

SEQ ID NO: 4794263 - DNA, 25 bp, Homo sapien
cagtgggagtgccactagcgcccat

SEQ ID NO: 4794264 - DNA, 25 bp, Homo sapien
catctcataggtggctgttattaaa

SEQ ID NO: 4794265 - DNA, 25 bp, Homo sapien
tggatctgacactgagcaggcattc

SEQ ID NO: 4794266 - DNA, 25 bp, Homo sapien
ctgcttttcagctggacaaggtcac

SEQ ID NO: 4794267 - DNA, 25 bp, Homo sapien
gagaagatggaaaggagaatccctt

SEQ ID NO: 4794268 - DNA, 25 bp, Homo sapien
ttcagctggacaaggtcacatagtg

SEQ ID NO: 4794269 - DNA, 25 bp, Homo sapien
tggagggcctttgcagactaggccc

SEQ ID NO: 4794270 - DNA, 25 bp, Homo sapien
agttggtgaaagcaggatttatatc

SEQ ID NO: 4794271 - DNA, 25 bp, Homo sapien
atccaggtctggttccaaacacttg

SEQ ID NO: 4794272 - DNA, 25 bp, Homo sapien
caggtctggttccaaacacttgctc

SEQ ID NO: 4794273 - DNA, 25 bp, Homo sapien
aatcacacaccatacggtgtgtgcc

SEQ ID NO: 4794274 - DNA, 25 bp, Homo sapien
gtttataggacttgtacttctgaag

SEQ ID NO: 4794275 - DNA, 25 bp, Homo sapien
gaaacatttattattcgaaaatcac

SEQ ID NO: 4794276 - DNA, 25 bp, Homo sapien
ggtcctgctgtatattcatgactgg

SEQ ID NO: 4794277 - DNA, 25 bp, Homo sapien
tcacaaaaccatgcacacaacatta

SEQ ID NO: 4794278 - DNA, 25 bp, Homo sapien
ggccttctggactaaggcagcctgg

SEQ ID NO: 4794279 - DNA, 25 bp, Homo sapien
ggacactgcagtctggctacacaca

SEQ ID NO: 4794280 - DNA, 25 bp, Homo sapien
caaaggtggacaccattctccagct

SEQ ID NO: 4794281 - DNA, 25 bp, Homo sapien
tttagccaatgccttgggagaagct

SEQ ID NO: 4794282 - DNA, 25 bp, Homo sapien
tgatgcaatagaaaccagctgtggc

SEQ ID NO: 4794283 - DNA, 25 bp, Homo sapien
tctaatttcccacctgcaagaaggg

SEQ ID NO: 4794284 - DNA, 25 bp, Homo sapien
gtattccagtcccagatgtgcccag

SEQ ID NO: 4794285 - DNA, 25 bp, Homo sapien
tgaggtacccagatacagcctgagg

SEQ ID NO: 4794286 - DNA, 25 bp, Homo sapien
gctcaggcccctgcaagtgtcctgt

SEQ ID NO: 4794287 - DNA, 25 bp, Homo sapien
gaggtggattgacttctcccaagac

SEQ ID NO: 4794288 - DNA, 25 bp, Homo sapien
tcttcgctcctcgttcctggaagga

SEQ ID NO: 4794289 - DNA, 25 bp, Homo sapien
tgtcaccctcttttgtagaagacaa

SEQ ID NO: 4794290 - DNA, 25 bp, Homo sapien
gaggtaggcacttcctggcatcatg

SEQ ID NO: 4794291 - DNA, 25 bp, Homo sapien
gcaaggtcagaccagctaaaagtcc

SEQ ID NO: 4794292 - DNA, 25 bp, Homo sapien
ccagaatcctttgctggccggaaga

SEQ ID NO: 4794293 - DNA, 25 bp, Homo sapien
catcatggcagatctggcatcctct

SEQ ID NO: 4794294 - DNA, 25 bp, Homo sapien
ggaaacacgagtttgaatcccacgc

SEQ ID NO: 4794295 - DNA, 25 bp, Homo sapien
cccattccagggacataaaggcaga

SEQ ID NO: 4794296 - DNA, 25 bp, Homo sapien
ctcccgtggaaacacgagtttgaat

SEQ ID NO: 4794297 - DNA, 25 bp, Homo sapien
cccagacccattccagggacataaa

SEQ ID NO: 4794298 - DNA, 25 bp, Homo sapien
ctctgagaggctgactccactggac

SEQ ID NO: 4794299 - DNA, 25 bp, Homo sapien
ggtccccacggagatcgaatttcca

SEQ ID NO: 4794300 - DNA, 25 bp, Homo sapien
tggcagagatggtgcaagccagcct

SEQ ID NO: 4794301 - DNA, 25 bp, Homo sapien
actctgattgcgtctggctccagca

SEQ ID NO: 4794302 - DNA, 25 bp, Homo sapien
gagccacgtgcaagctacaagtgtt

SEQ ID NO: 4794303 - DNA, 25 bp, Homo sapien
agctacaagtgttgtcctgccaggg

SEQ ID NO: 4794304 - DNA, 25 bp, Homo sapien
tctgcgtaaaacactcgtgggctct

SEQ ID NO: 4794305 - DNA, 25 bp, Homo sapien
tgagtcactaagcatctgccctggc

SEQ ID NO: 4794306 - DNA, 25 bp, Homo sapien
tgggtggaagcattcaattgcagat

SEQ ID NO: 4794307 - DNA, 25 bp, Homo sapien
gatggacgcccgtgcttgctttatg

SEQ ID NO: 4794308 - DNA, 25 bp, Homo sapien
cttgaccttgggcatggacgcagct

SEQ ID NO: 4794309 - DNA, 25 bp, Homo sapien
tcctccagcacacggtatgacagca

SEQ ID NO: 4794310 - DNA, 25 bp, Homo sapien
cacgcccagccagcatggagttgac

SEQ ID NO: 4794311 - DNA, 25 bp, Homo sapien
gtacccaggggccacgcccagccag

SEQ ID NO: 4794312 - DNA, 25 bp, Homo sapien
ctggtacccaggggccacgcccagc

SEQ ID NO: 4794313 - DNA, 25 bp, Homo sapien
acgcccagccagcatggagttgact

SEQ ID NO: 4794314 - DNA, 25 bp, Homo sapien
atttccctgtgcttggcttagcgca

SEQ ID NO: 4794315 - DNA, 25 bp, Homo sapien
tttccctgtgcttggcttagcgcac

SEQ ID NO: 4794316 - DNA, 25 bp, Homo sapien
cagctgcttggccgagtcctgaaca

SEQ ID NO: 4794317 - DNA, 25 bp, Homo sapien
tcagctgcagctttatgtccgtcat

SEQ ID NO: 4794318 - DNA, 25 bp, Homo sapien
gccttccacgcatagtttttggctg

SEQ ID NO: 4794319 - DNA, 25 bp, Homo sapien
gtggcttagcgcttggcaggccttc

SEQ ID NO: 4794320 - DNA, 25 bp, Homo sapien
tgtgtgccctgtgagcgtgtccaga

SEQ ID NO: 4794321 - DNA, 25 bp, Homo sapien
tcaaaaaccgtgaatgccccgagag

SEQ ID NO: 4794322 - DNA, 25 bp, Homo sapien
cccgagagaggagctgacaccattt

SEQ ID NO: 4794323 - DNA, 25 bp, Homo sapien
ctgtgagcgtgtccagaccccagac

SEQ ID NO: 4794324 - DNA, 25 bp, Homo sapien
gatgcccacaagagggcgtctcagg

SEQ ID NO: 4794325 - DNA, 25 bp, Homo sapien
gcgtctcagggtcatccggaaggca

SEQ ID NO: 4794326 - DNA, 25 bp, Homo sapien
cactgatgcccacaagagggcgtct

SEQ ID NO: 4794327 - DNA, 25 bp, Homo sapien
aaactcaagtccaagatccgcttcc

SEQ ID NO: 4794328 - DNA, 25 bp, Homo sapien
ggccatgaacctgggccctgagtat

SEQ ID NO: 4794329 - DNA, 25 bp, Homo sapien
ggaccttgtcaacgctgctgcctct

SEQ ID NO: 4794330 - DNA, 25 bp, Homo sapien
actttctccgttgagcctcctacta

SEQ ID NO: 4794331 - DNA, 25 bp, Homo sapien
tttctccgttgagcctcctactact

SEQ ID NO: 4794332 - DNA, 25 bp, Homo sapien
ctggggaccttgtcaacgctgctgc

SEQ ID NO: 4794333 - DNA, 25 bp, Homo sapien
tgaacgccaggcttattaaatattt

SEQ ID NO: 4794334 - DNA, 25 bp, Homo sapien
agatgtctgaaaaatatgaacgcca

SEQ ID NO: 4794335 - DNA, 25 bp, Homo sapien
tcagacagtctcaaagtagaaacag

SEQ ID NO: 4794336 - DNA, 25 bp, Homo sapien
acattcagacagtctcaaagtagaa

SEQ ID NO: 4794337 - DNA, 25 bp, Homo sapien
cagtaaggtcattattaggtaagat

SEQ ID NO: 4794338 - DNA, 25 bp, Homo sapien
caaaatggtaatggtacctgactaa

SEQ ID NO: 4794339 - DNA, 25 bp, Homo sapien
gtacctgactaatcatgccggaggg

SEQ ID NO: 4794340 - DNA, 25 bp, Homo sapien
agtaatcagtaaggtcattattagg

SEQ ID NO: 4794341 - DNA, 25 bp, Homo sapien
cagtcctggtccaagcccacttgag

SEQ ID NO: 4794342 - DNA, 25 bp, Homo sapien
gtgggtgttggaagtccagtcctgg

SEQ ID NO: 4794343 - DNA, 25 bp, Homo sapien
cagaaagtcccccttgtgggtgttg

SEQ ID NO: 4794344 - DNA, 25 bp, Homo sapien
acatctcagaaagtcccccttgtgg

SEQ ID NO: 4794345 - DNA, 25 bp, Homo sapien
tttgccccggacacactaagctgca

SEQ ID NO: 4794346 - DNA, 25 bp, Homo sapien
aagtgcattgcactcctgctcagcc

SEQ ID NO: 4794347 - DNA, 25 bp, Homo sapien
caaggtggtccatttgccccggaca

SEQ ID NO: 4794348 - DNA, 25 bp, Homo sapien
caccagactatttggcagtggctgt

SEQ ID NO: 4794349 - DNA, 25 bp, Homo sapien
tggcgttgaaagggaagatgactcc

SEQ ID NO: 4794350 - DNA, 25 bp, Homo sapien
agggaaagatagtggcgttgaaagg

SEQ ID NO: 4794351 - DNA, 25 bp, Homo sapien
tatcgtctggtactgagggtaaaag

SEQ ID NO: 4794352 - DNA, 25 bp, Homo sapien
gggaagaactaatatcgtctggtac

SEQ ID NO: 4794353 - DNA, 25 bp, Homo sapien
ccttatcacagcactaggctcagtg

SEQ ID NO: 4794354 - DNA, 25 bp, Homo sapien
cttatcacagcactaggctcagtgc

SEQ ID NO: 4794355 - DNA, 25 bp, Homo sapien
gtttatttgtgtttgcccagtggta

SEQ ID NO: 4794356 - DNA, 25 bp, Homo sapien
tcatatgcaagcagtttattctcat

SEQ ID NO: 4794357 - DNA, 25 bp, Homo sapien
tctcattaagagaaatcctatcttc

SEQ ID NO: 4794358 - DNA, 25 bp, Homo sapien
ctctgtcagttaaatccgttaagtt

SEQ ID NO: 4794359 - DNA, 25 bp, Homo sapien
accccgggttggatctcgcaatggc

SEQ ID NO: 4794360 - DNA, 25 bp, Homo sapien
caatcgtgtcatcatcggctgtcat

SEQ ID NO: 4794361 - DNA, 25 bp, Homo sapien
cactcgttgtgtatggacacaatcg

SEQ ID NO: 4794362 - DNA, 25 bp, Homo sapien
gacacaatcgtgtcatcatcggctg

SEQ ID NO: 4794363 - DNA, 25 bp, Homo sapien
tagtccaacgaggagcggatgccat

SEQ ID NO: 4794364 - DNA, 25 bp, Homo sapien
gtcttccaaattcatgcttagtcca

SEQ ID NO: 4794365 - DNA, 25 bp, Homo sapien
catgcttagtccaacgaggagcgga

SEQ ID NO: 4794366 - DNA, 25 bp, Homo sapien
ccaaattcatgcttagtccaacgag

SEQ ID NO: 4794367 - DNA, 25 bp, Homo sapien
tgatgctactgcctacagaactcag

SEQ ID NO: 4794368 - DNA, 25 bp, Homo sapien
tgcctacagaactcagggagcacca

SEQ ID NO: 4794369 - DNA, 25 bp, Homo sapien
ttttcatggattcttccctcaaggg

SEQ ID NO: 4794370 - DNA, 25 bp, Homo sapien
tggaggtcaaagatagagtttttca

SEQ ID NO: 4794371 - DNA, 25 bp, Homo sapien
cgcatcccattgtcgtttgaccggg

SEQ ID NO: 4794372 - DNA, 25 bp, Homo sapien
cattgtcgtttgaccgggctcagga

SEQ ID NO: 4794373 - DNA, 25 bp, Homo sapien
tgaccgggctcaggaattcaattgt

SEQ ID NO: 4794374 - DNA, 25 bp, Homo sapien
caggtgaggtatagtgaatgattgt

SEQ ID NO: 4794375 - DNA, 25 bp, Homo sapien
tagtcggtgatgacaggtgaagtga

SEQ ID NO: 4794376 - DNA, 25 bp, Homo sapien
ggtgatgacaggtgaagtgaactca

SEQ ID NO: 4794377 - DNA, 25 bp, Homo sapien
acaggtgaagtgaactcaggtactg

SEQ ID NO: 4794378 - DNA, 25 bp, Homo sapien
tgacaggtgaagtgaactcaggtac

SEQ ID NO: 4794379 - DNA, 25 bp, Homo sapien
cttgaatgtgggtgcggatggtgac

SEQ ID NO: 4794380 - DNA, 25 bp, Homo sapien
ggatggtgacatggtcatcatgcag

SEQ ID NO: 4794381 - DNA, 25 bp, Homo sapien
cggatggtgacatggtcatcatgca

SEQ ID NO: 4794382 - DNA, 25 bp, Homo sapien
gtgcggatggtgacatggtcatcat

SEQ ID NO: 4794383 - DNA, 25 bp, Homo sapien
tccctttactggctgaatgatgata

SEQ ID NO: 4794384 - DNA, 25 bp, Homo sapien
tcaaaggtggaagattgacagcaaa

SEQ ID NO: 4794385 - DNA, 25 bp, Homo sapien
aaggacagttcctctatccgagccc

SEQ ID NO: 4794386 - DNA, 25 bp, Homo sapien
gcaaaataagctgcctggaagtcca

SEQ ID NO: 4794387 - DNA, 25 bp, Homo sapien
gatacagaaacgtggagatgcctca

SEQ ID NO: 4794388 - DNA, 25 bp, Homo sapien
gctcttccataaactggcagtgtgg

SEQ ID NO: 4794389 - DNA, 25 bp, Homo sapien
taaagcagaagattggtggatgcca

SEQ ID NO: 4794390 - DNA, 25 bp, Homo sapien
tggccttgagacagtcatcctaaca

SEQ ID NO: 4794391 - DNA, 25 bp, Homo sapien
cattcttcgtagctgatgtattgac

SEQ ID NO: 4794392 - DNA, 25 bp, Homo sapien
tcattcttcgtagctgatgtattga

SEQ ID NO: 4794393 - DNA, 25 bp, Homo sapien
tgaggcataacctggaattcaaaca

SEQ ID NO: 4794394 - DNA, 25 bp, Homo sapien
ttaggatgacgtcccagaaatggaa

SEQ ID NO: 4794395 - DNA, 25 bp, Homo sapien
caaattattctgtatagccggtatg

SEQ ID NO: 4794396 - DNA, 25 bp, Homo sapien
ttaaggctctaagatgcctttacag

SEQ ID NO: 4794397 - DNA, 25 bp, Homo sapien
actagaatccaggtgggggcaatac

SEQ ID NO: 4794398 - DNA, 25 bp, Homo sapien
ttcttcttcaagtgcctcacccatg

SEQ ID NO: 4794399 - DNA, 25 bp, Homo sapien
tttctactacaactgcaaattctgg

SEQ ID NO: 4794400 - DNA, 25 bp, Homo sapien
tgccaatctccggtctagggtcttg

SEQ ID NO: 4794401 - DNA, 25 bp, Homo sapien
tccggtctagggtcttgatgctcct

SEQ ID NO: 4794402 - DNA, 25 bp, Homo sapien
ctaaacaaccacaaactctgcagag

SEQ ID NO: 4794403 - DNA, 25 bp, Homo sapien
caaccacaaactctgcagagatgag

SEQ ID NO: 4794404 - DNA, 25 bp, Homo sapien
aaccacaaactctgcagagatgagc

SEQ ID NO: 4794405 - DNA, 25 bp, Homo sapien
aaacaaccacaaactctgcagagat

SEQ ID NO: 4794406 - DNA, 25 bp, Homo sapien
cctgggtagctgattggtaaaaact

SEQ ID NO: 4794407 - DNA, 25 bp, Homo sapien
gactcaagttagagacacactgatt

SEQ ID NO: 4794408 - DNA, 25 bp, Homo sapien
agctgattggtaaaaactcgcaggc

SEQ ID NO: 4794409 - DNA, 25 bp, Homo sapien
cagactcaagttagagacacactga

SEQ ID NO: 4794410 - DNA, 25 bp, Homo sapien
ccactgattcatgcggtagaagcaa

SEQ ID NO: 4794411 - DNA, 25 bp, Homo sapien
tagaagcaatggctcatggatctct

SEQ ID NO: 4794412 - DNA, 25 bp, Homo sapien
tcttgacatttaccatctcagggag

SEQ ID NO: 4794413 - DNA, 25 bp, Homo sapien
cctggaaaaactgaggttgcctagg

SEQ ID NO: 4794414 - DNA, 25 bp, Homo sapien
ccctgggggactgccaaggcctaag

SEQ ID NO: 4794415 - DNA, 25 bp, Homo sapien
ctgggggactgccaaggcctaaggt

SEQ ID NO: 4794416 - DNA, 25 bp, Homo sapien
tgggggactgccaaggcctaaggta

SEQ ID NO: 4794417 - DNA, 25 bp, Homo sapien
ctccctgggggactgccaaggccta

SEQ ID NO: 4794418 - DNA, 25 bp, Homo sapien
gtccctccttgaggaagtacgttgc

SEQ ID NO: 4794419 - DNA, 25 bp, Homo sapien
tctggagacttcaccatgacctgca

SEQ ID NO: 4794420 - DNA, 25 bp, Homo sapien
aagtacgttgctgctggttgatccc

SEQ ID NO: 4794421 - DNA, 25 bp, Homo sapien
tccttgaggaagtacgttgctgctg

SEQ ID NO: 4794422 - DNA, 25 bp, Homo sapien
aaaggcttctgctgaggcaactccc

SEQ ID NO: 4794423 - DNA, 25 bp, Homo sapien
acctgcttgtgacgcaagtttgaca

SEQ ID NO: 4794424 - DNA, 25 bp, Homo sapien
caccacctgcttgtgacgcaagttt

SEQ ID NO: 4794425 - DNA, 25 bp, Homo sapien
aggcttctgctgaggcaactcccac

SEQ ID NO: 4794426 - DNA, 25 bp, Homo sapien
ccatcacctactagaaaaagcctca

SEQ ID NO: 4794427 - DNA, 25 bp, Homo sapien
ctgcccatcacctactagaaaaagc

SEQ ID NO: 4794428 - DNA, 25 bp, Homo sapien
gcccatcacctactagaaaaagcct

SEQ ID NO: 4794429 - DNA, 25 bp, Homo sapien
atcacctactagaaaaagcctcagc

SEQ ID NO: 4794430 - DNA, 25 bp, Homo sapien
ttcctgggttttccaaatgttgcca

SEQ ID NO: 4794431 - DNA, 25 bp, Homo sapien
cctgggttttccaaatgttgccaga

SEQ ID NO: 4794432 - DNA, 25 bp, Homo sapien
tgggttttccaaatgttgccagact

SEQ ID NO: 4794433 - DNA, 25 bp, Homo sapien
tcctgggttttccaaatgttgccag

SEQ ID NO: 4794434 - DNA, 25 bp, Homo sapien
gcgcagagactccagtcagtacttg

SEQ ID NO: 4794435 - DNA, 25 bp, Homo sapien
tctgagtttggattgagcgcagaga

SEQ ID NO: 4794436 - DNA, 25 bp, Homo sapien
aggatggtatgctgaccattttgac

SEQ ID NO: 4794437 - DNA, 25 bp, Homo sapien
tgcactgagaggatggtatgctgac

SEQ ID NO: 4794438 - DNA, 25 bp, Homo sapien
gggctaagatatgaccacagtgcac

SEQ ID NO: 4794439 - DNA, 25 bp, Homo sapien
ccagagctcgcctggtgtttgtagg

SEQ ID NO: 4794440 - DNA, 25 bp, Homo sapien
acagtgtcattgctctcgaaagtga

SEQ ID NO: 4794441 - DNA, 25 bp, Homo sapien
aaagtgagggggctaagatatgacc

SEQ ID NO: 4794442 - DNA, 25 bp, Homo sapien
ccggcccgggaggagcaggacgcgc

SEQ ID NO: 4794443 - DNA, 25 bp, Homo sapien
agcccggcccgggaggagcaggacg

SEQ ID NO: 4794444 - DNA, 25 bp, Homo sapien
cccgggaggagcaggacgcgccggg

SEQ ID NO: 4794445 - DNA, 25 bp, Homo sapien
gccgcctcctcccgcacggacccat

SEQ ID NO: 4794446 - DNA, 25 bp, Homo sapien
tgcgctcggggtccccgatgacccc

SEQ ID NO: 4794447 - DNA, 25 bp, Homo sapien
cagacattctgcttggtctctgctc

SEQ ID NO: 4794448 - DNA, 25 bp, Homo sapien
caagtgatctataagggaggttcaa

SEQ ID NO: 4794449 - DNA, 25 bp, Homo sapien
cagcaagttcatctggacagtttcc

SEQ ID NO: 4794450 - DNA, 25 bp, Homo sapien
gtcagggcaagtgatctataaggga

SEQ ID NO: 4794451 - DNA, 25 bp, Homo sapien
tcacgtgcgcttctctgtagagcca

SEQ ID NO: 4794452 - DNA, 25 bp, Homo sapien
cacgtgcgcttctctgtagagccat

SEQ ID NO: 4794453 - DNA, 25 bp, Homo sapien
acttggatgtaacagtcagtaggag

SEQ ID NO: 4794454 - DNA, 25 bp, Homo sapien
acagtcagtaggagcgagcttgact

SEQ ID NO: 4794455 - DNA, 25 bp, Homo sapien
cagtcagtaggagcgagcttgactg

SEQ ID NO: 4794456 - DNA, 25 bp, Homo sapien
gagggtgttctctctttagccagtc

SEQ ID NO: 4794457 - DNA, 25 bp, Homo sapien
tctctttagccagtcccttgaaagg

SEQ ID NO: 4794458 - DNA, 25 bp, Homo sapien
tagccagtcccttgaaaggcttctt

SEQ ID NO: 4794459 - DNA, 25 bp, Homo sapien
cttcatggttatggcccagcagaga

SEQ ID NO: 4794460 - DNA, 25 bp, Homo sapien
tgggttttgctatatagtgctctca

SEQ ID NO: 4794461 - DNA, 25 bp, Homo sapien
ctttggaaatatcccatgggttttg

SEQ ID NO: 4794462 - DNA, 25 bp, Homo sapien
tgtggtcagggaatatggcctgtat

SEQ ID NO: 4794463 - DNA, 25 bp, Homo sapien
tgtggcctgtcacatgatcagtttg

SEQ ID NO: 4794464 - DNA, 25 bp, Homo sapien
taattaggtcagcatctccaaaatc

SEQ ID NO: 4794465 - DNA, 25 bp, Homo sapien
tgccaataatagtgcgaagcctcca

SEQ ID NO: 4794466 - DNA, 25 bp, Homo sapien
tgagggcctttctaggatcgtttcc

SEQ ID NO: 4794467 - DNA, 25 bp, Homo sapien
aaatcaatttccagcgaagtcgcgc

SEQ ID NO: 4794468 - DNA, 25 bp, Homo sapien
ggctcttgctagcactccatcatcg

SEQ ID NO: 4794469 - DNA, 25 bp, Homo sapien
ccggtgttggaagaagtagcatttc

SEQ ID NO: 4794470 - DNA, 25 bp, Homo sapien
tcaaccactttcaccctattagatg

SEQ ID NO: 4794471 - DNA, 25 bp, Homo sapien
tcaccctattagatgtggtcagctt

SEQ ID NO: 4794472 - DNA, 25 bp, Homo sapien
tactttgagtttgagcatgtgttcc

SEQ ID NO: 4794473 - DNA, 25 bp, Homo sapien
ttatagagattgtggttggctgacc

SEQ ID NO: 4794474 - DNA, 25 bp, Homo sapien
tcacagcaaaagtaagccctgcact

SEQ ID NO: 4794475 - DNA, 25 bp, Homo sapien
cctgggctgttgatcttgtgatata

SEQ ID NO: 4794476 - DNA, 25 bp, Homo sapien
tgaagactgtattagggtctggatc

SEQ ID NO: 4794477 - DNA, 25 bp, Homo sapien
gactgtattagggtctggatccaat

SEQ ID NO: 4794478 - DNA, 25 bp, Homo sapien
tattagggtctggatccaatctgca

SEQ ID NO: 4794479 - DNA, 25 bp, Homo sapien
ctgtattagggtctggatccaatct

SEQ ID NO: 4794480 - DNA, 25 bp, Homo sapien
tctgttccatggagcattgtggcca

SEQ ID NO: 4794481 - DNA, 25 bp, Homo sapien
actgagaggcgtaaagaaagtggtc

SEQ ID NO: 4794482 - DNA, 25 bp, Homo sapien
gagaagatgcctagacctggtttgg

SEQ ID NO: 4794483 - DNA, 25 bp, Homo sapien
gaaacttggccagtcaatcacaatg

SEQ ID NO: 4794484 - DNA, 25 bp, Homo sapien
tttgcttagaattatgggcgcccca

SEQ ID NO: 4794485 - DNA, 25 bp, Homo sapien
gcttagaattatgggcgccccagca

SEQ ID NO: 4794486 - DNA, 25 bp, Homo sapien
cccagcattctttccgccgctgaac

SEQ ID NO: 4794487 - DNA, 25 bp, Homo sapien
cagcattctttccgccgctgaacag

SEQ ID NO: 4794488 - DNA, 25 bp, Homo sapien
cacaaatttagaaataaaatttctg

SEQ ID NO: 4794489 - DNA, 25 bp, Homo sapien
ttggaataatattttctttccaaga

SEQ ID NO: 4794490 - DNA, 25 bp, Homo sapien
atttgcacaaatttagaaataaaat

SEQ ID NO: 4794491 - DNA, 25 bp, Homo sapien
tggaataatattttctttccaagaa

SEQ ID NO: 4794492 - DNA, 25 bp, Homo sapien
tcttttgcaggctgacggagccagt

SEQ ID NO: 4794493 - DNA, 25 bp, Homo sapien
agcactgcgagcaggtacactccct

SEQ ID NO: 4794494 - DNA, 25 bp, Homo sapien
ccagtgcagccggaaggaaaagcac

SEQ ID NO: 4794495 - DNA, 25 bp, Homo sapien
acagtgtgaaggctggtattcagtg

SEQ ID NO: 4794496 - DNA, 25 bp, Homo sapien
aatatccaagggctccactgtacat

SEQ ID NO: 4794497 - DNA, 25 bp, Homo sapien
taatatacctaatgattcgtgctga

SEQ ID NO: 4794498 - DNA, 25 bp, Homo sapien
ttttacagcgacacaaatagaatag

SEQ ID NO: 4794499 - DNA, 25 bp, Homo sapien
gagtgtcagcatgtagatagattcc

SEQ ID NO: 4794500 - DNA, 25 bp, Homo sapien
tgctcaacgtgtgcgaggacctggc

SEQ ID NO: 4794501 - DNA, 25 bp, Homo sapien
accctgctggaactcggtgacggac

SEQ ID NO: 4794502 - DNA, 25 bp, Homo sapien
cagatctgcgagttctacagccggg

SEQ ID NO: 4794503 - DNA, 25 bp, Homo sapien
cacgaggtcatcgagctgctcaacg

SEQ ID NO: 4794504 - DNA, 25 bp, Homo sapien
ccaggaccctgaggcttccaggagc

SEQ ID NO: 4794505 - DNA, 25 bp, Homo sapien
tctgctgcccacagccctcggggtc

SEQ ID NO: 4794506 - DNA, 25 bp, Homo sapien
tcccaggaccctgaggcttccagga

SEQ ID NO: 4794507 - DNA, 25 bp, Homo sapien
aggaccctgaggcttccaggagctc

SEQ ID NO: 4794508 - DNA, 25 bp, Homo sapien
cttccaggacggcagtgagcatggt

SEQ ID NO: 4794509 - DNA, 25 bp, Homo sapien
tcgactcgatgctgtgaaagatgtc

SEQ ID NO: 4794510 - DNA, 25 bp, Homo sapien
gccttgtggccccaacagttgatgt

SEQ ID NO: 4794511 - DNA, 25 bp, Homo sapien
ggtgtttggccatgttcgactcgat

SEQ ID NO: 4794512 - DNA, 25 bp, Homo sapien
tacacacacagttcggatgccaagg

SEQ ID NO: 4794513 - DNA, 25 bp, Homo sapien
tgtgagcaaattaggttctacacac

SEQ ID NO: 4794514 - DNA, 25 bp, Homo sapien
agttcggatgccaagggtgacaccc

SEQ ID NO: 4794515 - DNA, 25 bp, Homo sapien
gcaaattaggttctacacacacagt

SEQ ID NO: 4794516 - DNA, 25 bp, Homo sapien
gaaagccatcggactaagcccagat

SEQ ID NO: 4794517 - DNA, 25 bp, Homo sapien
gaagcatgggatgtctgtcctccag

SEQ ID NO: 4794518 - DNA, 25 bp, Homo sapien
gaatgccactgggtactcagaaagc

SEQ ID NO: 4794519 - DNA, 25 bp, Homo sapien
gatgctacagcaaaaggtccctcta

SEQ ID NO: 4794520 - DNA, 25 bp, Homo sapien
acatctgaggattggtttttggctg

SEQ ID NO: 4794521 - DNA, 25 bp, Homo sapien
cagaggccacctgccgcatcaccag

SEQ ID NO: 4794522 - DNA, 25 bp, Homo sapien
acacttgacatctgaggattggttt

SEQ ID NO: 4794523 - DNA, 25 bp, Homo sapien
cacctgccgcatcaccagtgaggaa

SEQ ID NO: 4794524 - DNA, 25 bp, Homo sapien
ttgaggattgtggtcgggggagccc

SEQ ID NO: 4794525 - DNA, 25 bp, Homo sapien
tggctttcaccaaaggagcccagtg

SEQ ID NO: 4794526 - DNA, 25 bp, Homo sapien
tcttcctctctcatttgggtttgag

SEQ ID NO: 4794527 - DNA, 25 bp, Homo sapien
gttgtagtagttgcttttcttcctc

SEQ ID NO: 4794528 - DNA, 25 bp, Homo sapien
tcgccagccaggagagagcgagggc

SEQ ID NO: 4794529 - DNA, 25 bp, Homo sapien
cagccaggagagagcgagggccgca

SEQ ID NO: 4794530 - DNA, 25 bp, Homo sapien
gcctcgccagccaggagagagcgag

SEQ ID NO: 4794531 - DNA, 25 bp, Homo sapien
gctgggcctcgccagccaggagaga

SEQ ID NO: 4794532 - DNA, 25 bp, Homo sapien
taggcaataccatagacacatctga

SEQ ID NO: 4794533 - DNA, 25 bp, Homo sapien
caaaagatgttgtgtgcggtctcct

SEQ ID NO: 4794534 - DNA, 25 bp, Homo sapien
tatcggtgtggatccaacagctctc

SEQ ID NO: 4794535 - DNA, 25 bp, Homo sapien
tttttataaacagccggtgcttggc

SEQ ID NO: 4794536 - DNA, 25 bp, Homo sapien
agccagtgtttgataaatgagggag

SEQ ID NO: 4794537 - DNA, 25 bp, Homo sapien
tcctgggcttgtggagcattgtccc

SEQ ID NO: 4794538 - DNA, 25 bp, Homo sapien
aggaagatgtgaccctcctgggctt

SEQ ID NO: 4794539 - DNA, 25 bp, Homo sapien
atgagggagggacatggtcgaggaa

SEQ ID NO: 4794540 - DNA, 25 bp, Homo sapien
aggaagggatggatttagtctccat

SEQ ID NO: 4794541 - DNA, 25 bp, Homo sapien
gaggaagggatggatttagtctcca

SEQ ID NO: 4794542 - DNA, 25 bp, Homo sapien
ggaggaagggatggatttagtctcc

SEQ ID NO: 4794543 - DNA, 25 bp, Homo sapien
ttgcttggcgctgcctgccacagga

SEQ ID NO: 4794544 - DNA, 25 bp, Homo sapien
acccaggttgcttggcgctgcctgc

SEQ ID NO: 4794545 - DNA, 25 bp, Homo sapien
ggttgcttggcgctgcctgccacag

SEQ ID NO: 4794546 - DNA, 25 bp, Homo sapien
ttggacccaggttgcttggcgctgc

SEQ ID NO: 4794547 - DNA, 25 bp, Homo sapien
tcagttggagaagcgcagcagctcc

SEQ ID NO: 4794548 - DNA, 25 bp, Homo sapien
gagaagcgcagcagctcctcatcac

SEQ ID NO: 4794549 - DNA, 25 bp, Homo sapien
ttggagaagcgcagcagctcctcat

SEQ ID NO: 4794550 - DNA, 25 bp, Homo sapien
cagttggagaagcgcagcagctcct

SEQ ID NO: 4794551 - DNA, 25 bp, Homo sapien
tcttctggtttaccgcaggtgccat

SEQ ID NO: 4794552 - DNA, 25 bp, Homo sapien
gacatcttcaatggttgctcttccc

SEQ ID NO: 4794553 - DNA, 25 bp, Homo sapien
agcagctgtcgcctggggccagaaa

SEQ ID NO: 4794554 - DNA, 25 bp, Homo sapien
ctggggccagaaacctctgcttgct

SEQ ID NO: 4794555 - DNA, 25 bp, Homo sapien
agagtagatgggctgcttaccaggt

SEQ ID NO: 4794556 - DNA, 25 bp, Homo sapien
gtagatgggctgcttaccaggtaca

SEQ ID NO: 4794557 - DNA, 25 bp, Homo sapien
ttaccaggtacagagtccagaactc

SEQ ID NO: 4794558 - DNA, 25 bp, Homo sapien
agggctctcccacctcgactccaac

SEQ ID NO: 4794559 - DNA, 25 bp, Homo sapien
aagaggacgcacttccccttgacag

SEQ ID NO: 4794560 - DNA, 25 bp, Homo sapien
gaacttgttcccgttgccctggcag

SEQ ID NO: 4794561 - DNA, 25 bp, Homo sapien
gacagcatcaaatgcccagagctgg

SEQ ID NO: 4794562 - DNA, 25 bp, Homo sapien
cagggacaccgcagtactctctgca

SEQ ID NO: 4794563 - DNA, 25 bp, Homo sapien
agtggagagaggcatggaacttgag

SEQ ID NO: 4794564 - DNA, 25 bp, Homo sapien
ggagtggagagaggcatggaacttg

SEQ ID NO: 4794565 - DNA, 25 bp, Homo sapien
tggagagaggcatggaacttgagaa

SEQ ID NO: 4794566 - DNA, 25 bp, Homo sapien
ggagagaggcatggaacttgagaaa

SEQ ID NO: 4794567 - DNA, 25 bp, Homo sapien
gaagttgttaccgttgcccatgcag

SEQ ID NO: 4794568 - DNA, 25 bp, Homo sapien
tggtcattcccatgcagggaccggc

SEQ ID NO: 4794569 - DNA, 25 bp, Homo sapien
ccacagttcggcaggtctgcagaca

SEQ ID NO: 4794570 - DNA, 25 bp, Homo sapien
tactggaaagtctcacaggccatgg

SEQ ID NO: 4794571 - DNA, 25 bp, Homo sapien
ttaccagttgcccaccccctgatcc

SEQ ID NO: 4794572 - DNA, 25 bp, Homo sapien
agttaccagttgcccaccccctgat

SEQ ID NO: 4794573 - DNA, 25 bp, Homo sapien
tcagttaccagttgcccaccccctg

SEQ ID NO: 4794574 - DNA, 25 bp, Homo sapien
taccagttgcccaccccctgatcct

SEQ ID NO: 4794575 - DNA, 25 bp, Homo sapien
agaagcagttgcagactccttgccg

SEQ ID NO: 4794576 - DNA, 25 bp, Homo sapien
tctggatcttctggaattcaggttg

SEQ ID NO: 4794577 - DNA, 25 bp, Homo sapien
ggaattcaggttgatggcagtaaga

SEQ ID NO: 4794578 - DNA, 25 bp, Homo sapien
aatgggagatattctggatcttctg

SEQ ID NO: 4794579 - DNA, 25 bp, Homo sapien
tcttctggaattcaggttgatggca

SEQ ID NO: 4794580 - DNA, 25 bp, Homo sapien
cgggattaagatgggctctggttcc

SEQ ID NO: 4794581 - DNA, 25 bp, Homo sapien
tcctgctccccagggacacattcac

SEQ ID NO: 4794582 - DNA, 25 bp, Homo sapien
gattaagatgggctctggttcctgc

SEQ ID NO: 4794583 - DNA, 25 bp, Homo sapien
ttaagatgggctctggttcctgctc

SEQ ID NO: 4794584 - DNA, 25 bp, Homo sapien
gcaggagagtttccctcagctgcgg

SEQ ID NO: 4794585 - DNA, 25 bp, Homo sapien
caggagagtttccctcagctgcggc

SEQ ID NO: 4794586 - DNA, 25 bp, Homo sapien
agtttccctcagctgcggcgcccgc

SEQ ID NO: 4794587 - DNA, 25 bp, Homo sapien
gagagtttccctcagctgcggcgcc

SEQ ID NO: 4794588 - DNA, 25 bp, Homo sapien
actccaatgggcacatctagtaatg

SEQ ID NO: 4794589 - DNA, 25 bp, Homo sapien
ggcacatctagtaatgagcctttac

SEQ ID NO: 4794590 - DNA, 25 bp, Homo sapien
caatgggcacatctagtaatgagcc

SEQ ID NO: 4794591 - DNA, 25 bp, Homo sapien
cttaactccaatgggcacatctagt

SEQ ID NO: 4794592 - DNA, 25 bp, Homo sapien
ttggtgtggaccacataggactcca

SEQ ID NO: 4794593 - DNA, 25 bp, Homo sapien
agcttggcagtaatggtgggtccat

SEQ ID NO: 4794594 - DNA, 25 bp, Homo sapien
cttggtcaggaaaatggcatactca

SEQ ID NO: 4794595 - DNA, 25 bp, Homo sapien
ggcatactcatcatagttggtgtgg

SEQ ID NO: 4794596 - DNA, 25 bp, Homo sapien
agaaacttcccatcagtatctgttt

SEQ ID NO: 4794597 - DNA, 25 bp, Homo sapien
ttctcataagctccagacgtctcct

SEQ ID NO: 4794598 - DNA, 25 bp, Homo sapien
gaaacttcccatcagtatctgtttt

SEQ ID NO: 4794599 - DNA, 25 bp, Homo sapien
tctgttttctcataagctccagacg

SEQ ID NO: 4794600 - DNA, 25 bp, Homo sapien
ccaggttgtaccacttcccatagat

SEQ ID NO: 4794601 - DNA, 25 bp, Homo sapien
tcatgctgatctccgcctctgtagc

SEQ ID NO: 4794602 - DNA, 25 bp, Homo sapien
ggtcatgctgatctccgcctctgta

SEQ ID NO: 4794603 - DNA, 25 bp, Homo sapien
gcaggtggaaccgatggccaggttg

SEQ ID NO: 4794604 - DNA, 25 bp, Homo sapien
gcacttggatgttgtcgggcggcgt

SEQ ID NO: 4794605 - DNA, 25 bp, Homo sapien
tgtcgggcggcgttggcacagggcc

SEQ ID NO: 4794606 - DNA, 25 bp, Homo sapien
cgagagatattgaagttttcctgca

SEQ ID NO: 4794607 - DNA, 25 bp, Homo sapien
ccgagagatattgaagttttcctgc

SEQ ID NO: 4794608 - DNA, 25 bp, Homo sapien
tgggctcctctgccttggtatatcc

SEQ ID NO: 4794609 - DNA, 25 bp, Homo sapien
cctctgccttggtatatcccacagg

SEQ ID NO: 4794610 - DNA, 25 bp, Homo sapien
ggctcctctgccttggtatatccca

SEQ ID NO: 4794611 - DNA, 25 bp, Homo sapien
ctcctctgccttggtatatcccaca

SEQ ID NO: 4794612 - DNA, 25 bp, Homo sapien
tagttgacctcagtgtttgccctgc

SEQ ID NO: 4794613 - DNA, 25 bp, Homo sapien
agctccaatcgatccctgtagcctg

SEQ ID NO: 4794614 - DNA, 25 bp, Homo sapien
caaggacagctccaatcgatccctg

SEQ ID NO: 4794615 - DNA, 25 bp, Homo sapien
ccaagaggccgggatggctgcttca

SEQ ID NO: 4794616 - DNA, 25 bp, Homo sapien
tcgtcaaagtgcctctgcgtggtct

SEQ ID NO: 4794617 - DNA, 25 bp, Homo sapien
tgtagcctggagaccacagagatgt

SEQ ID NO: 4794618 - DNA, 25 bp, Homo sapien
ttccagctcaggcaccgggtagttt

SEQ ID NO: 4794619 - DNA, 25 bp, Homo sapien
ccacagctggtatgttgggcagaca

SEQ ID NO: 4794620 - DNA, 25 bp, Homo sapien
caggaaccagccctgcatagactca

SEQ ID NO: 4794621 - DNA, 25 bp, Homo sapien
cagccctgcatagactcaggagcca

SEQ ID NO: 4794622 - DNA, 25 bp, Homo sapien
ctgcatagactcaggagccaaggac

SEQ ID NO: 4794623 - DNA, 25 bp, Homo sapien
gaaccagccctgcatagactcagga

SEQ ID NO: 4794624 - DNA, 25 bp, Homo sapien
gcagatgggcagactgaagcccaag

SEQ ID NO: 4794625 - DNA, 25 bp, Homo sapien
tccattcagcagatgggcagactga

SEQ ID NO: 4794626 - DNA, 25 bp, Homo sapien
tggtttctcctgaatccccttgttc

SEQ ID NO: 4794627 - DNA, 25 bp, Homo sapien
cctggtttctcctgaatccccttgt

SEQ ID NO: 4794628 - DNA, 25 bp, Homo sapien
tctgagggcctccagtctctgggcc

SEQ ID NO: 4794629 - DNA, 25 bp, Homo sapien
gctccgtgcgccctcactgcagggt

SEQ ID NO: 4794630 - DNA, 25 bp, Homo sapien
ggccacgtcgcagggagctgccaat

SEQ ID NO: 4794631 - DNA, 25 bp, Homo sapien
gaggacttggcctgggctccgtgcg

SEQ ID NO: 4794632 - DNA, 25 bp, Homo sapien
gagcagtgagactcgaggcctgccc

SEQ ID NO: 4794633 - DNA, 25 bp, Homo sapien
ctaaggagcagtgagactcgaggcc

SEQ ID NO: 4794634 - DNA, 25 bp, Homo sapien
cccatacaccatgggctccaacata

SEQ ID NO: 4794635 - DNA, 25 bp, Homo sapien
agtgagactcgaggcctgccctctc

SEQ ID NO: 4794636 - DNA, 25 bp, Homo sapien
ccaagtttgggaagtagaaagatct

SEQ ID NO: 4794637 - DNA, 25 bp, Homo sapien
tccaagtttgggaagtagaaagatc

SEQ ID NO: 4794638 - DNA, 25 bp, Homo sapien
cctggtgatgtcttcgggggcctca

SEQ ID NO: 4794639 - DNA, 25 bp, Homo sapien
gggggcctcacaggcaggggaggtg

SEQ ID NO: 4794640 - DNA, 25 bp, Homo sapien
ctctgagccctggtgatgtcttcgg

SEQ ID NO: 4794641 - DNA, 25 bp, Homo sapien
gggcctcacaggcaggggaggtgca

SEQ ID NO: 4794642 - DNA, 25 bp, Homo sapien
tcctccgtcaacatctctgccagga

SEQ ID NO: 4794643 - DNA, 25 bp, Homo sapien
ccgtcaacatctctgccaggactcg

SEQ ID NO: 4794644 - DNA, 25 bp, Homo sapien
tctgccaggactcgggtctgagtcc

SEQ ID NO: 4794645 - DNA, 25 bp, Homo sapien
tcctcctccgtcaacatctctgcca

SEQ ID NO: 4794646 - DNA, 25 bp, Homo sapien
agatgggaggtgagcctttgagttc

SEQ ID NO: 4794647 - DNA, 25 bp, Homo sapien
tctgacctcagtgccccaggagaga

SEQ ID NO: 4794648 - DNA, 25 bp, Homo sapien
aggtgagcctttgagttccccagac

SEQ ID NO: 4794649 - DNA, 25 bp, Homo sapien
ccagaccacccctctctgacctcag

SEQ ID NO: 4794650 - DNA, 25 bp, Homo sapien
ctctcttgggcacttggcagagcca

SEQ ID NO: 4794651 - DNA, 25 bp, Homo sapien
ctctctcttgggcacttggcagagc

SEQ ID NO: 4794652 - DNA, 25 bp, Homo sapien
cacctgaggcctcagggtccaacac

SEQ ID NO: 4794653 - DNA, 25 bp, Homo sapien
ggccgggcagatgggggcctgccac

SEQ ID NO: 4794654 - DNA, 25 bp, Homo sapien
acctacctggtgctagccatgacac

SEQ ID NO: 4794655 - DNA, 25 bp, Homo sapien
cccacctacctggtgctagccatga

SEQ ID NO: 4794656 - DNA, 25 bp, Homo sapien
gtcccacctacctggtgctagccat

SEQ ID NO: 4794657 - DNA, 25 bp, Homo sapien
cacctacctggtgctagccatgaca

SEQ ID NO: 4794658 - DNA, 25 bp, Homo sapien
gagactagaagcctcctgagagcag

SEQ ID NO: 4794659 - DNA, 25 bp, Homo sapien
caggaaccacgtctggtctatttct

SEQ ID NO: 4794660 - DNA, 25 bp, Homo sapien
gcagcagatggttcttctaccgtcc

SEQ ID NO: 4794661 - DNA, 25 bp, Homo sapien
gggtcttggtcgccttctgtgtgca

SEQ ID NO: 4794662 - DNA, 25 bp, Homo sapien
caaggagcttggggagttactgaag

SEQ ID NO: 4794663 - DNA, 25 bp, Homo sapien
ggagttactgaaggagtaagtgaat

SEQ ID NO: 4794664 - DNA, 25 bp, Homo sapien
gggagttactgaaggagtaagtgaa

SEQ ID NO: 4794665 - DNA, 25 bp, Homo sapien
gagcttggggagttactgaaggagt

SEQ ID NO: 4794666 - DNA, 25 bp, Homo sapien
tggattgatgactcctggatcaagg

SEQ ID NO: 4794667 - DNA, 25 bp, Homo sapien
gactcctggatcaaggtctccagtt

SEQ ID NO: 4794668 - DNA, 25 bp, Homo sapien
tgatgactcctggatcaaggtctcc

SEQ ID NO: 4794669 - DNA, 25 bp, Homo sapien
ggctctggattgatgactcctggat

SEQ ID NO: 4794670 - DNA, 25 bp, Homo sapien
ccaggggcactcgacacagtgggca

SEQ ID NO: 4794671 - DNA, 25 bp, Homo sapien
gccaggggcactcgacacagtgggc

SEQ ID NO: 4794672 - DNA, 25 bp, Homo sapien
gcactcgacacagtgggcagatgtg

SEQ ID NO: 4794673 - DNA, 25 bp, Homo sapien
ggggcactcgacacagtgggcagat

SEQ ID NO: 4794674 - DNA, 25 bp, Homo sapien
gtcacccctccaggctgggccgtga

SEQ ID NO: 4794675 - DNA, 25 bp, Homo sapien
cctacttgtcacccctccaggctgg

SEQ ID NO: 4794676 - DNA, 25 bp, Homo sapien
acccctccaggctgggccgtgagac

SEQ ID NO: 4794677 - DNA, 25 bp, Homo sapien
tacttgtcacccctccaggctgggc

SEQ ID NO: 4794678 - DNA, 25 bp, Homo sapien
agctggggccatcaagcagggacac

SEQ ID NO: 4794679 - DNA, 25 bp, Homo sapien
gggccatcaagcagggacacggtgg

SEQ ID NO: 4794680 - DNA, 25 bp, Homo sapien
gagctggggccatcaagcagggaca

SEQ ID NO: 4794681 - DNA, 25 bp, Homo sapien
tggggccatcaagcagggacacggt

SEQ ID NO: 4794682 - DNA, 25 bp, Homo sapien
aggtctcggctattctgcagctggc

SEQ ID NO: 4794683 - DNA, 25 bp, Homo sapien
ctgggccaggtctcggctattctgc

SEQ ID NO: 4794684 - DNA, 25 bp, Homo sapien
tgggccaggtctcggctattctgca

SEQ ID NO: 4794685 - DNA, 25 bp, Homo sapien
gccaggtctcggctattctgcagct

SEQ ID NO: 4794686 - DNA, 25 bp, Homo sapien
cacccgggctccactgagccctgag

SEQ ID NO: 4794687 - DNA, 25 bp, Homo sapien
ctgtagcatcccgtacaggttccgc

SEQ ID NO: 4794688 - DNA, 25 bp, Homo sapien
tagcatcccgtacaggttccgctgg

SEQ ID NO: 4794689 - DNA, 25 bp, Homo sapien
gcatcccgtacaggttccgctgggc

SEQ ID NO: 4794690 - DNA, 25 bp, Homo sapien
tgcagcatctctgtctccaaacgct

SEQ ID NO: 4794691 - DNA, 25 bp, Homo sapien
ggaactgcaggcgacggttctcctc

SEQ ID NO: 4794692 - DNA, 25 bp, Homo sapien
aggcgacggttctcctcctggagct

SEQ ID NO: 4794693 - DNA, 25 bp, Homo sapien
ccttgcagtccatttggtccagctg

SEQ ID NO: 4794694 - DNA, 25 bp, Homo sapien
gagctcggcttgcatatcgcagggt

SEQ ID NO: 4794695 - DNA, 25 bp, Homo sapien
gcctgtggtcgggtggtgacccgct

SEQ ID NO: 4794696 - DNA, 25 bp, Homo sapien
ttgcatatcgcagggtgctgagagt

SEQ ID NO: 4794697 - DNA, 25 bp, Homo sapien
tggtcgggtggtgacccgctgagct

SEQ ID NO: 4794698 - DNA, 25 bp, Homo sapien
ctggggagtgcactccccctgagcg

SEQ ID NO: 4794699 - DNA, 25 bp, Homo sapien
cccctgagcgctcctctctgagggc

SEQ ID NO: 4794700 - DNA, 25 bp, Homo sapien
cactccccctgagcgctcctctctg

SEQ ID NO: 4794701 - DNA, 25 bp, Homo sapien
ggggagtgcactccccctgagcgct

SEQ ID NO: 4794702 - DNA, 25 bp, Homo sapien
tccctgccaggccccgcttaagtac

SEQ ID NO: 4794703 - DNA, 25 bp, Homo sapien
cttccctgccaggccccgcttaagt

SEQ ID NO: 4794704 - DNA, 25 bp, Homo sapien
ttccctgccaggccccgcttaagta

SEQ ID NO: 4794705 - DNA, 25 bp, Homo sapien
tcccagtgagtctgccagcaacttg

SEQ ID NO: 4794706 - DNA, 25 bp, Homo sapien
tgtggctctgcttccgctgtgggtc

SEQ ID NO: 4794707 - DNA, 25 bp, Homo sapien
atgagggtgaccccgcgccctccca

SEQ ID NO: 4794708 - DNA, 25 bp, Homo sapien
ttggtgagcttgctgtcccggaaag

SEQ ID NO: 4794709 - DNA, 25 bp, Homo sapien
tacacaaaggagtttcgcgggcatc

SEQ ID NO: 4794710 - DNA, 25 bp, Homo sapien
gactcagtcagattggtctccacca

SEQ ID NO: 4794711 - DNA, 25 bp, Homo sapien
gaaggttacatcacttgcctagggc

SEQ ID NO: 4794712 - DNA, 25 bp, Homo sapien
cagaggaatactgagggcacagccc

SEQ ID NO: 4794713 - DNA, 25 bp, Homo sapien
tcataagcagtgttttacgaaggga

SEQ ID NO: 4794714 - DNA, 25 bp, Homo sapien
ttacgaagggagaagtcaacagcag

SEQ ID NO: 4794715 - DNA, 25 bp, Homo sapien
cagtgttttacgaagggagaagtca

SEQ ID NO: 4794716 - DNA, 25 bp, Homo sapien
agtttatacattcataagcagtgtt

SEQ ID NO: 4794717 - DNA, 25 bp, Homo sapien
aatcacaccggtggcccccaggtct

SEQ ID NO: 4794718 - DNA, 25 bp, Homo sapien
tcctctggtatcccccactgtggag

SEQ ID NO: 4794719 - DNA, 25 bp, Homo sapien
caggaaatcacaccggtggccccca

SEQ ID NO: 4794720 - DNA, 25 bp, Homo sapien
ctcttctatttactacaactcctct

SEQ ID NO: 4794721 - DNA, 25 bp, Homo sapien
cacgggatcccgtggctgctacctt

SEQ ID NO: 4794722 - DNA, 25 bp, Homo sapien
agcaggcttcggttgatgctgttag

SEQ ID NO: 4794723 - DNA, 25 bp, Homo sapien
tcaagcatcagctccccacgggatc

SEQ ID NO: 4794724 - DNA, 25 bp, Homo sapien
tcggttgatgctgttagcctcaagc

SEQ ID NO: 4794725 - DNA, 25 bp, Homo sapien
tatatgtccagatacagacccttgc

SEQ ID NO: 4794726 - DNA, 25 bp, Homo sapien
cccatgcacacccaagttggtttat

SEQ ID NO: 4794727 - DNA, 25 bp, Homo sapien
ccccatcaaagccacaaggttatgg

SEQ ID NO: 4794728 - DNA, 25 bp, Homo sapien
aggttatgggaccaagagtttccat

SEQ ID NO: 4794729 - DNA, 25 bp, Homo sapien
gctgagttccttcgacggctgagac

SEQ ID NO: 4794730 - DNA, 25 bp, Homo sapien
agtttgacggctgatgtaaagggtg

SEQ ID NO: 4794731 - DNA, 25 bp, Homo sapien
gggctgagttccttcgacggctgag

SEQ ID NO: 4794732 - DNA, 25 bp, Homo sapien
tgacggctgatgtaaagggtgagca

SEQ ID NO: 4794733 - DNA, 25 bp, Homo sapien
cctcagggccctggaagggtggagg

SEQ ID NO: 4794734 - DNA, 25 bp, Homo sapien
cttgatcctcagggccctggaaggg

SEQ ID NO: 4794735 - DNA, 25 bp, Homo sapien
ttgatcctcagggccctggaagggt

SEQ ID NO: 4794736 - DNA, 25 bp, Homo sapien
tcctcagggccctggaagggtggag

SEQ ID NO: 4794737 - DNA, 25 bp, Homo sapien
gactcccaaattccaccacccgcag

SEQ ID NO: 4794738 - DNA, 25 bp, Homo sapien
gagtcttgttccagcgaacagggag

SEQ ID NO: 4794739 - DNA, 25 bp, Homo sapien
gccccgagtcttgttccagcgaaca

SEQ ID NO: 4794740 - DNA, 25 bp, Homo sapien
agctgctccacatagaagccccgag

SEQ ID NO: 4794741 - DNA, 25 bp, Homo sapien
gggatctttctgagtccacccatcc

SEQ ID NO: 4794742 - DNA, 25 bp, Homo sapien
catccccagatcttactgacaacag

SEQ ID NO: 4794743 - DNA, 25 bp, Homo sapien
agatcttactgacaacagtccccac

SEQ ID NO: 4794744 - DNA, 25 bp, Homo sapien
aaggggatctttctgagtccaccca

SEQ ID NO: 4794745 - DNA, 25 bp, Homo sapien
ttcctcatgggctgtctttctattc

SEQ ID NO: 4794746 - DNA, 25 bp, Homo sapien
gcgctccgtttcctcatgggctgtc

SEQ ID NO: 4794747 - DNA, 25 bp, Homo sapien
cctggaaagaagcgctccgtttcct

SEQ ID NO: 4794748 - DNA, 25 bp, Homo sapien
ccgtttcctcatgggctgtctttct

SEQ ID NO: 4794749 - DNA, 25 bp, Homo sapien
ccaggtgctgcacgcggtccaacag

SEQ ID NO: 4794750 - DNA, 25 bp, Homo sapien
ttgtagatctccagataagaggcgc

SEQ ID NO: 4794751 - DNA, 25 bp, Homo sapien
tctccagataagaggcgcgaagggt

SEQ ID NO: 4794752 - DNA, 25 bp, Homo sapien
acagccaggcgaaggtcctctgcat

SEQ ID NO: 4794753 - DNA, 25 bp, Homo sapien
cagccaggctggggggtacaggcac

SEQ ID NO: 4794754 - DNA, 25 bp, Homo sapien
gccagccaggctggggggtacaggc

SEQ ID NO: 4794755 - DNA, 25 bp, Homo sapien
gccaggctggggggtacaggcaccc

SEQ ID NO: 4794756 - DNA, 25 bp, Homo sapien
tgccagccaggctggggggtacagg

SEQ ID NO: 4794757 - DNA, 25 bp, Homo sapien
ggctcatttaattcatagtcggtac

SEQ ID NO: 4794758 - DNA, 25 bp, Homo sapien
tgagccatcgtcatctccacagtaa

SEQ ID NO: 4794759 - DNA, 25 bp, Homo sapien
tgtatgataccgtgcgccgggaaac

SEQ ID NO: 4794760 - DNA, 25 bp, Homo sapien
actaccctctgtagcgcatgtatga

SEQ ID NO: 4794761 - DNA, 25 bp, Homo sapien
ccagagcccgtctggccaaaggtga

SEQ ID NO: 4794762 - DNA, 25 bp, Homo sapien
cagagcccgtctggccaaaggtgaa

SEQ ID NO: 4794763 - DNA, 25 bp, Homo sapien
gggtccagtcagggtgtaggtcttc

SEQ ID NO: 4794764 - DNA, 25 bp, Homo sapien
gagcccgtctggccaaaggtgaaaa

SEQ ID NO: 4794765 - DNA, 25 bp, Homo sapien
caggcccggcgcggagcggaggcga

SEQ ID NO: 4794766 - DNA, 25 bp, Homo sapien
aggcccggcgcggagcggaggcgaa

SEQ ID NO: 4794767 - DNA, 25 bp, Homo sapien
gcgcggagcggaggcgaagcttcac

SEQ ID NO: 4794768 - DNA, 25 bp, Homo sapien
ggagcggaggcgaagcttcactcac

SEQ ID NO: 4794769 - DNA, 25 bp, Homo sapien
cgtctagcaccgcaccgaagcggaa

SEQ ID NO: 4794770 - DNA, 25 bp, Homo sapien
gaagcggaacgccacttctggaccc

SEQ ID NO: 4794771 - DNA, 25 bp, Homo sapien
gcaccgaagcggaacgccacttctg

SEQ ID NO: 4794772 - DNA, 25 bp, Homo sapien
ggaacacgtcctcctgcgtgcgcgc

SEQ ID NO: 4794773 - DNA, 25 bp, Homo sapien
tggcgcgggtggggcggaggagcgg

SEQ ID NO: 4794774 - DNA, 25 bp, Homo sapien
gcgggtggggcggaggagcggggca

SEQ ID NO: 4794775 - DNA, 25 bp, Homo sapien
ctggcgcgggtggggcggaggagcg

SEQ ID NO: 4794776 - DNA, 25 bp, Homo sapien
tctggggagggtaggacaccctgga

SEQ ID NO: 4794777 - DNA, 25 bp, Homo sapien
ctggggagggtaggacaccctggag

SEQ ID NO: 4794778 - DNA, 25 bp, Homo sapien
attctggggagggtaggacaccctg

SEQ ID NO: 4794779 - DNA, 25 bp, Homo sapien
cattctggggagggtaggacaccct

SEQ ID NO: 4794780 - DNA, 25 bp, Homo sapien
cagaaggggcggggcactcgcaggg

SEQ ID NO: 4794781 - DNA, 25 bp, Homo sapien
ggttggcgcggcgcaccctggcgga

SEQ ID NO: 4794782 - DNA, 25 bp, Homo sapien
aggggttggcgcggcgcaccctggc

SEQ ID NO: 4794783 - DNA, 25 bp, Homo sapien
cgcaggggttggcgcggcgcaccct

SEQ ID NO: 4794784 - DNA, 25 bp, Homo sapien
gctcggccgcgctcatgggacgtac

SEQ ID NO: 4794785 - DNA, 25 bp, Homo sapien
cgctctgctgccctcgacgcagctc

SEQ ID NO: 4794786 - DNA, 25 bp, Homo sapien
tctgctgccctcgacgcagctcggc

SEQ ID NO: 4794787 - DNA, 25 bp, Homo sapien
tgagcagtgcagcacgctctgctgc

SEQ ID NO: 4794788 - DNA, 25 bp, Homo sapien
agggcagatggtacatcctgatgtc

SEQ ID NO: 4794789 - DNA, 25 bp, Homo sapien
gaagggcagatggtacatcctgatg

SEQ ID NO: 4794790 - DNA, 25 bp, Homo sapien
gggcagatggtacatcctgatgtct

SEQ ID NO: 4794791 - DNA, 25 bp, Homo sapien
cagatggtacatcctgatgtcttcc

SEQ ID NO: 4794792 - DNA, 25 bp, Homo sapien
ctggatgggcgtttccggcccctct

SEQ ID NO: 4794793 - DNA, 25 bp, Homo sapien
ctgtgggcagcaatgcgacttatca

SEQ ID NO: 4794794 - DNA, 25 bp, Homo sapien
tcatacctgcacctagcggctgttc

SEQ ID NO: 4794795 - DNA, 25 bp, Homo sapien
gggcagcaatgcgacttatcatacc

SEQ ID NO: 4794796 - DNA, 25 bp, Homo sapien
tgcgacttatcatacctgcacctag

SEQ ID NO: 4794797 - DNA, 25 bp, Homo sapien
cgtcgggtgacccgcgttcttccat

SEQ ID NO: 4794798 - DNA, 25 bp, Homo sapien
tgggactgtctacacacatcttgca

SEQ ID NO: 4794799 - DNA, 25 bp, Homo sapien
acactgggactgtctacacacatct

SEQ ID NO: 4794800 - DNA, 25 bp, Homo sapien
cacaacactgggactgtctacacac

SEQ ID NO: 4794801 - DNA, 25 bp, Homo sapien
caacactgggactgtctacacacat

SEQ ID NO: 4794802 - DNA, 25 bp, Homo sapien
ttggtggccgccttctcgatgatgt

SEQ ID NO: 4794803 - DNA, 25 bp, Homo sapien
caaaagagccttggtggccgccttc

SEQ ID NO: 4794804 - DNA, 25 bp, Homo sapien
ttctcgatgatgtgtcaggtccact

SEQ ID NO: 4794805 - DNA, 25 bp, Homo sapien
cttctcgatgatgtgtcaggtccac

SEQ ID NO: 4794806 - DNA, 25 bp, Homo sapien
tccaggatgaaatgctgtgtcagcg

SEQ ID NO: 4794807 - DNA, 25 bp, Homo sapien
tagccttggaacacacatgctctct

SEQ ID NO: 4794808 - DNA, 25 bp, Homo sapien
cagatggagcgctcattaacgcccc

SEQ ID NO: 4794809 - DNA, 25 bp, Homo sapien
gaaaaactgagcctttgctagcctt

SEQ ID NO: 4794810 - DNA, 25 bp, Homo sapien
cagggcctatctcaggttccagctt

SEQ ID NO: 4794811 - DNA, 25 bp, Homo sapien
agggcctatctcaggttccagcttc

SEQ ID NO: 4794812 - DNA, 25 bp, Homo sapien
cctctgcattggcctccgcctctgc

SEQ ID NO: 4794813 - DNA, 25 bp, Homo sapien
gcaaagccagggtcttattgagaac

SEQ ID NO: 4794814 - DNA, 25 bp, Homo sapien
aacagacggagcctgtttaactgtt

SEQ ID NO: 4794815 - DNA, 25 bp, Homo sapien
tcctgcaaagccagggtcttattga

SEQ ID NO: 4794816 - DNA, 25 bp, Homo sapien
actgtttttcgcctgggaggatggc

SEQ ID NO: 4794817 - DNA, 25 bp, Homo sapien
tggggtacggaagaacaacagatgt

SEQ ID NO: 4794818 - DNA, 25 bp, Homo sapien
tctgagtattgggtgttttccaatt

SEQ ID NO: 4794819 - DNA, 25 bp, Homo sapien
tttttcactggccagacttccagta

SEQ ID NO: 4794820 - DNA, 25 bp, Homo sapien
ttctgagtattgggtgttttccaat

SEQ ID NO: 4794821 - DNA, 25 bp, Homo sapien
ttcactggccagacttccagtaaga

SEQ ID NO: 4794822 - DNA, 25 bp, Homo sapien
ggtttaccatgaagtcctaaggatc

SEQ ID NO: 4794823 - DNA, 25 bp, Homo sapien
cagtccccaggacaccaaagttaag

SEQ ID NO: 4794824 - DNA, 25 bp, Homo sapien
ccgagggactagagcaggtttacca

SEQ ID NO: 4794825 - DNA, 25 bp, Homo sapien
aaatttagccgtctgtcctcttgag

SEQ ID NO: 4794826 - DNA, 25 bp, Homo sapien
tgttggccaccataagtgggctttg

SEQ ID NO: 4794827 - DNA, 25 bp, Homo sapien
gccaccataagtgggctttggatct

SEQ ID NO: 4794828 - DNA, 25 bp, Homo sapien
ttggccaccataagtgggctttgga

SEQ ID NO: 4794829 - DNA, 25 bp, Homo sapien
ggctttggatctcacagccctttgc

SEQ ID NO: 4794830 - DNA, 25 bp, Homo sapien
caccaggccagagtgacgtagtcct

SEQ ID NO: 4794831 - DNA, 25 bp, Homo sapien
ccagagtgacgtagtcctgcaggca

SEQ ID NO: 4794832 - DNA, 25 bp, Homo sapien
tattccttctggtagagtgattgtg

SEQ ID NO: 4794833 - DNA, 25 bp, Homo sapien
tctggtagagtgattgtgtttggaa

SEQ ID NO: 4794834 - DNA, 25 bp, Homo sapien
gggttctccatgacatagtgatgtc

SEQ ID NO: 4794835 - DNA, 25 bp, Homo sapien
ggggttctccatgacatagtgatgt

SEQ ID NO: 4794836 - DNA, 25 bp, Homo sapien
ggttctccatgacatagtgatgtct

SEQ ID NO: 4794837 - DNA, 25 bp, Homo sapien
gagtcaggtgagctctggcctgcac

SEQ ID NO: 4794838 - DNA, 25 bp, Homo sapien
cagagtcaggtgagctctggcctgc

SEQ ID NO: 4794839 - DNA, 25 bp, Homo sapien
agagtcaggtgagctctggcctgca

SEQ ID NO: 4794840 - DNA, 25 bp, Homo sapien
gaagaataaccaggttgtgaacagg

SEQ ID NO: 4794841 - DNA, 25 bp, Homo sapien
agaataaccaggttgtgaacaggca

SEQ ID NO: 4794842 - DNA, 25 bp, Homo sapien
ctagaagaataaccaggttgtgaac

SEQ ID NO: 4794843 - DNA, 25 bp, Homo sapien
aataaccaggttgtgaacaggcaga

SEQ ID NO: 4794844 - DNA, 25 bp, Homo sapien
cgccggagcccgtggacgcagagct

SEQ ID NO: 4794845 - DNA, 25 bp, Homo sapien
aggcggaccgggtcggcggcgcagt

SEQ ID NO: 4794846 - DNA, 25 bp, Homo sapien
tggacgcagagctgccgaagttcga

SEQ ID NO: 4794847 - DNA, 25 bp, Homo sapien
agttcgagcgcaggcggaccgggtc

SEQ ID NO: 4794848 - DNA, 25 bp, Homo sapien
cgcctccaaaagtttgatcatctct

SEQ ID NO: 4794849 - DNA, 25 bp, Homo sapien
cagcagcccgcctccaaaagtttga

SEQ ID NO: 4794850 - DNA, 25 bp, Homo sapien
cgcggcgcccggactcctgggacca

SEQ ID NO: 4794851 - DNA, 25 bp, Homo sapien
aaaggaccgaggcaggggcgagcgc

SEQ ID NO: 4794852 - DNA, 25 bp, Homo sapien
acttcaattgtgcccatcaaaagcc

SEQ ID NO: 4794853 - DNA, 25 bp, Homo sapien
agccttcggccccttctacttcaat

SEQ ID NO: 4794854 - DNA, 25 bp, Homo sapien
tcggccccttctacttcaattgtgc

SEQ ID NO: 4794855 - DNA, 25 bp, Homo sapien
gcccccatcctacccagaaaacagc

SEQ ID NO: 4794856 - DNA, 25 bp, Homo sapien
aggccccacaaaggtgaccatcctg

SEQ ID NO: 4794857 - DNA, 25 bp, Homo sapien
cccgcctctgtttatttgtgcatca

SEQ ID NO: 4794858 - DNA, 25 bp, Homo sapien
ggacctgtcctatgcgagctggcac

SEQ ID NO: 4794859 - DNA, 25 bp, Homo sapien
tgaattcagtcccacacaacaagcc

SEQ ID NO: 4794860 - DNA, 25 bp, Homo sapien
gatgtaaatgttttcggaatcctgg

SEQ ID NO: 4794861 - DNA, 25 bp, Homo sapien
ttttgttaggtcatggccttagcca

SEQ ID NO: 4794862 - DNA, 25 bp, Homo sapien
ctggatagagtgaggccagggctgt

SEQ ID NO: 4794863 - DNA, 25 bp, Homo sapien
gagtgtcagtaatgtccaacgtgga

SEQ ID NO: 4794864 - DNA, 25 bp, Homo sapien
gagctggagactttgagattgccta

SEQ ID NO: 4794865 - DNA, 25 bp, Homo sapien
gaaatacaagccatatacaagccac

SEQ ID NO: 4794866 - DNA, 25 bp, Homo sapien
tgtttgagcctaaaagtgcaagacc

SEQ ID NO: 4794867 - DNA, 25 bp, Homo sapien
tagtgcagtccgatagaaatgaaat

SEQ ID NO: 4794868 - DNA, 25 bp, Homo sapien
agaccacggctatgtctctgccaag

SEQ ID NO: 4794869 - DNA, 25 bp, Homo sapien
tattaaagtgcgagccaaaggagaa

SEQ ID NO: 4794870 - DNA, 25 bp, Homo sapien
cctcatcttagcctggagtcagaag

SEQ ID NO: 4794871 - DNA, 25 bp, Homo sapien
gaatttgaccctgaggagtagcccc

SEQ ID NO: 4794872 - DNA, 25 bp, Homo sapien
cgtggatggacaccagtggagcact

SEQ ID NO: 4794873 - DNA, 25 bp, Homo sapien
tctgcagagggcatatgacttggcc

SEQ ID NO: 4794874 - DNA, 25 bp, Homo sapien
aagtactatagtgcggctggtgcca

SEQ ID NO: 4794875 - DNA, 25 bp, Homo sapien
gggcattgtcgcctctccttgagaa

SEQ ID NO: 4794876 - DNA, 25 bp, Homo sapien
gcttctctataggtcgagtttgcca

SEQ ID NO: 4794877 - DNA, 25 bp, Homo sapien
gccatcagccgggtccagatgaatt

SEQ ID NO: 4794878 - DNA, 25 bp, Homo sapien
tcactgccgttgcttctctataggt

SEQ ID NO: 4794879 - DNA, 25 bp, Homo sapien
ggtcgagtttgccatcagccgggtc

SEQ ID NO: 4794880 - DNA, 25 bp, Homo sapien
gttggcttggcccttcacggtcctg

SEQ ID NO: 4794881 - DNA, 25 bp, Homo sapien
tcatcaggtaatctgctaaggagga

SEQ ID NO: 4794882 - DNA, 25 bp, Homo sapien
gaattttcctagcatcgcccttgtg

SEQ ID NO: 4794883 - DNA, 25 bp, Homo sapien
gggcatcatccgcatctttctctct

SEQ ID NO: 4794884 - DNA, 25 bp, Homo sapien
ccagcctggacgctctgcgtggaag

SEQ ID NO: 4794885 - DNA, 25 bp, Homo sapien
aagttgtgtctctttgggaattgga

SEQ ID NO: 4794886 - DNA, 25 bp, Homo sapien
tggaagtgcgtgtttgtagcagctc

SEQ ID NO: 4794887 - DNA, 25 bp, Homo sapien
gtcttcgtttacgtctctgtccaca

SEQ ID NO: 4794888 - DNA, 25 bp, Homo sapien
tccccgctgccttctaggataagtg

SEQ ID NO: 4794889 - DNA, 25 bp, Homo sapien
cccgctgccttctaggataagtgtg

SEQ ID NO: 4794890 - DNA, 25 bp, Homo sapien
cgctgccttctaggataagtgtgag

SEQ ID NO: 4794891 - DNA, 25 bp, Homo sapien
ctgccttctaggataagtgtgagcc

SEQ ID NO: 4794892 - DNA, 25 bp, Homo sapien
ttccagtattaccatggccatcggg

SEQ ID NO: 4794893 - DNA, 25 bp, Homo sapien
tgtggtgcctatcacaaggacctta

SEQ ID NO: 4794894 - DNA, 25 bp, Homo sapien
gagagttcaggcatgtggtgcctat

SEQ ID NO: 4794895 - DNA, 25 bp, Homo sapien
gcaactaggcaagaggcggttgcct

SEQ ID NO: 4794896 - DNA, 25 bp, Homo sapien
gagggttggctttaatctccaccag

SEQ ID NO: 4794897 - DNA, 25 bp, Homo sapien
tttctcagagagtaccagacccggt

SEQ ID NO: 4794898 - DNA, 25 bp, Homo sapien
cagttacctgaatgtccagcgggag

SEQ ID NO: 4794899 - DNA, 25 bp, Homo sapien
gacagaggacacgatctttctcaga

SEQ ID NO: 4794900 - DNA, 25 bp, Homo sapien
catgtacagaaagtgcttggcgtgg

SEQ ID NO: 4794901 - DNA, 25 bp, Homo sapien
gacatcatttagcatcccgagcctc

SEQ ID NO: 4794902 - DNA, 25 bp, Homo sapien
tacctggacgatgagaagaactggg

SEQ ID NO: 4794903 - DNA, 25 bp, Homo sapien
ccttagggacaccaagaccttgatg

SEQ ID NO: 4794904 - DNA, 25 bp, Homo sapien
ttcaggagctgcagcataagggccc

SEQ ID NO: 4794905 - DNA, 25 bp, Homo sapien
tgtgaaatcacagcaccgatgagct

SEQ ID NO: 4794906 - DNA, 25 bp, Homo sapien
cctgggacagggcttatgaacgcaa

SEQ ID NO: 4794907 - DNA, 25 bp, Homo sapien
ggccctgtgccctaatacctgtgaa

SEQ ID NO: 4794908 - DNA, 25 bp, Homo sapien
attctgccctctccccggaagacct

SEQ ID NO: 4794909 - DNA, 25 bp, Homo sapien
ccacaggccagagctcattctgccc

SEQ ID NO: 4794910 - DNA, 25 bp, Homo sapien
ccctggttgagctggttccacaggc

SEQ ID NO: 4794911 - DNA, 25 bp, Homo sapien
ctggttgagctggttccacaggcca

SEQ ID NO: 4794912 - DNA, 25 bp, Homo sapien
caacctgggtgctcgtgattgacag

SEQ ID NO: 4794913 - DNA, 25 bp, Homo sapien
cttgttacgtgagggaagcagcacc

SEQ ID NO: 4794914 - DNA, 25 bp, Homo sapien
tgcagctgcgtataccatccagggt

SEQ ID NO: 4794915 - DNA, 25 bp, Homo sapien
gacatcctgcaaatgtggagccctg

SEQ ID NO: 4794916 - DNA, 25 bp, Homo sapien
gagactgcctgaggttctgcctgga

SEQ ID NO: 4794917 - DNA, 25 bp, Homo sapien
tcctggtgaggaactatgcgggcct

SEQ ID NO: 4794918 - DNA, 25 bp, Homo sapien
taccagtcactaggagaaaggtctc

SEQ ID NO: 4794919 - DNA, 25 bp, Homo sapien
gataaacgccactgggatcctagga

SEQ ID NO: 4794920 - DNA, 25 bp, Homo sapien
ccgcaggctgtgagcctggcgcagg

SEQ ID NO: 4794921 - DNA, 25 bp, Homo sapien
gcctggtggtagagcggacgctctc

SEQ ID NO: 4794922 - DNA, 25 bp, Homo sapien
caggctgtgagcctggcgcaggtcg

SEQ ID NO: 4794923 - DNA, 25 bp, Homo sapien
gagcggacgctctcggcagcctgca

SEQ ID NO: 4794924 - DNA, 25 bp, Homo sapien
ctaggtcgcccaggtcgagctggat

SEQ ID NO: 4794925 - DNA, 25 bp, Homo sapien
taggtcgcccaggtcgagctggatg

SEQ ID NO: 4794926 - DNA, 25 bp, Homo sapien
aggtcgcccaggtcgagctggatgg

SEQ ID NO: 4794927 - DNA, 25 bp, Homo sapien
gtcgcccaggtcgagctggatggag

SEQ ID NO: 4794928 - DNA, 25 bp, Homo sapien
ggcggccacttggcagctggttggg

SEQ ID NO: 4794929 - DNA, 25 bp, Homo sapien
ggctgtgggcggccacttggcagct

SEQ ID NO: 4794930 - DNA, 25 bp, Homo sapien
cggccacttggcagctggttgggct

SEQ ID NO: 4794931 - DNA, 25 bp, Homo sapien
tgtgggcggccacttggcagctggt

SEQ ID NO: 4794932 - DNA, 25 bp, Homo sapien
aagtgagtgggctcgttacacatgg

SEQ ID NO: 4794933 - DNA, 25 bp, Homo sapien
gagcaccgtgtgtggggtcaacccc

SEQ ID NO: 4794934 - DNA, 25 bp, Homo sapien
gggccagtggctcctactctctggg

SEQ ID NO: 4794935 - DNA, 25 bp, Homo sapien
gggacaagccgaggagcaccgtgtg

SEQ ID NO: 4794936 - DNA, 25 bp, Homo sapien
cagggtgtcaccagcgcaaattcta

SEQ ID NO: 4794937 - DNA, 25 bp, Homo sapien
tctccctagggccaacactgaaaaa

SEQ ID NO: 4794938 - DNA, 25 bp, Homo sapien
tgtaaaagtagggactgtctgggct

SEQ ID NO: 4794939 - DNA, 25 bp, Homo sapien
actgggcccgttcagtcctgctgac

SEQ ID NO: 4794940 - DNA, 25 bp, Homo sapien
ggcaatcgcataccacatgggatcg

SEQ ID NO: 4794941 - DNA, 25 bp, Homo sapien
taagtacgtggttgagactcttcct

SEQ ID NO: 4794942 - DNA, 25 bp, Homo sapien
ggatattgcttcactaacgtggcca

SEQ ID NO: 4794943 - DNA, 25 bp, Homo sapien
tgccaaggccacagtgctactaggg

SEQ ID NO: 4794944 - DNA, 25 bp, Homo sapien
gataaggcatgatgggaaccgagga

SEQ ID NO: 4794945 - DNA, 25 bp, Homo sapien
ctgttgccagataccacagtccggg

SEQ ID NO: 4794946 - DNA, 25 bp, Homo sapien
acagcggcaggtggataaggcatga

SEQ ID NO: 4794947 - DNA, 25 bp, Homo sapien
aaccgaggagatgtaggcaaaggct

SEQ ID NO: 4794948 - DNA, 25 bp, Homo sapien
tttctcctcgtggtggccttctctg

SEQ ID NO: 4794949 - DNA, 25 bp, Homo sapien
ctaccctgtgagactccatgtcggg

SEQ ID NO: 4794950 - DNA, 25 bp, Homo sapien
ccatgtcggggaggtctctctttgg

SEQ ID NO: 4794951 - DNA, 25 bp, Homo sapien
aactcacccaggtctaataaccctg

SEQ ID NO: 4794952 - DNA, 25 bp, Homo sapien
ctgctccagttaaactcacccaggt

SEQ ID NO: 4794953 - DNA, 25 bp, Homo sapien
agagaagaaacagtatttgtcccta

SEQ ID NO: 4794954 - DNA, 25 bp, Homo sapien
taagagaagaaacagtatttgtccc

SEQ ID NO: 4794955 - DNA, 25 bp, Homo sapien
gctaagagaagaaacagtatttgtc

SEQ ID NO: 4794956 - DNA, 25 bp, Homo sapien
tggctaagagaagaaacagtatttg

SEQ ID NO: 4794957 - DNA, 25 bp, Homo sapien
gtatcagcgggaggcggtcccagtg

SEQ ID NO: 4794958 - DNA, 25 bp, Homo sapien
cactgaagggtatcagcgggaggcg

SEQ ID NO: 4794959 - DNA, 25 bp, Homo sapien
ggggagacccaacttgaccacacag

SEQ ID NO: 4794960 - DNA, 25 bp, Homo sapien
agtgggtcccctgtgacagcaccac

SEQ ID NO: 4794961 - DNA, 25 bp, Homo sapien
gggtccaagacgtcaagtaatttgc

SEQ ID NO: 4794962 - DNA, 25 bp, Homo sapien
gacaacaaccatgacagtgagagca

SEQ ID NO: 4794963 - DNA, 25 bp, Homo sapien
ttatcaaatccaacaagccactggg

SEQ ID NO: 4794964 - DNA, 25 bp, Homo sapien
caagctgcctccatctgggtgatga

SEQ ID NO: 4794965 - DNA, 25 bp, Homo sapien
taagcccgggctctcccaaatgcag

SEQ ID NO: 4794966 - DNA, 25 bp, Homo sapien
gagtggcccagaacagtcccctggg

SEQ ID NO: 4794967 - DNA, 25 bp, Homo sapien
cacagtgagacagagccattctcca

SEQ ID NO: 4794968 - DNA, 25 bp, Homo sapien
agagccattctccatgtgggagtgg

SEQ ID NO: 4794969 - DNA, 25 bp, Homo sapien
ggccttggctcaaccaccactccct

SEQ ID NO: 4794970 - DNA, 25 bp, Homo sapien
cacatacatccccaatgccacacct

SEQ ID NO: 4794971 - DNA, 25 bp, Homo sapien
ttcaggccttggctcaaccaccact

SEQ ID NO: 4794972 - DNA, 25 bp, Homo sapien
catacatccccaatgccacacctgg

SEQ ID NO: 4794973 - DNA, 25 bp, Homo sapien
gcctgtcaggactctaacactagca

SEQ ID NO: 4794974 - DNA, 25 bp, Homo sapien
catgcaggcatgaacggagaggcct

SEQ ID NO: 4794975 - DNA, 25 bp, Homo sapien
taacactagcacaggaagagcatag

SEQ ID NO: 4794976 - DNA, 25 bp, Homo sapien
accacttgtaagctgtgtgcccttg

SEQ ID NO: 4794977 - DNA, 25 bp, Homo sapien
tcctgggtcctaatgggccggcagt

SEQ ID NO: 4794978 - DNA, 25 bp, Homo sapien
gcatcctgggtcctaatgggccggc

SEQ ID NO: 4794979 - DNA, 25 bp, Homo sapien
ggggacagaacatggtattcgtggc

SEQ ID NO: 4794980 - DNA, 25 bp, Homo sapien
tgggaccgccttaggggacagaaca

SEQ ID NO: 4794981 - DNA, 25 bp, Homo sapien
gaactgtcagtatcagccctgtgga

SEQ ID NO: 4794982 - DNA, 25 bp, Homo sapien
aacaagtgcaccgagattcatggag

SEQ ID NO: 4794983 - DNA, 25 bp, Homo sapien
tccgagccggaaaagcacaggtgat

SEQ ID NO: 4794984 - DNA, 25 bp, Homo sapien
taagtccacagagagattgtccggt

SEQ ID NO: 4794985 - DNA, 25 bp, Homo sapien
tcttctcagagaacagtggtaggga

SEQ ID NO: 4794986 - DNA, 25 bp, Homo sapien
ggaaggtgaccctgtctggccatcc

SEQ ID NO: 4794987 - DNA, 25 bp, Homo sapien
ccgagctgcctgtggactgtccttg

SEQ ID NO: 4794988 - DNA, 25 bp, Homo sapien
cagagaacagtggtagggagggcag

SEQ ID NO: 4794989 - DNA, 25 bp, Homo sapien
gagcacctcccgaggcactgaggaa

SEQ ID NO: 4794990 - DNA, 25 bp, Homo sapien
cagggacagtcggagcacctcccga

SEQ ID NO: 4794991 - DNA, 25 bp, Homo sapien
gacagtcggagcacctcccgaggca

SEQ ID NO: 4794992 - DNA, 25 bp, Homo sapien
agcacctcccgaggcactgaggaag

SEQ ID NO: 4794993 - DNA, 25 bp, Homo sapien
agacgaagccgggacacctcttctt

SEQ ID NO: 4794994 - DNA, 25 bp, Homo sapien
gctgtcttccagccgcagacgaagc

SEQ ID NO: 4794995 - DNA, 25 bp, Homo sapien
gaagccgggacacctcttcttgcag

SEQ ID NO: 4794996 - DNA, 25 bp, Homo sapien
ccgggcggggcggtcaaaggcagat

SEQ ID NO: 4794997 - DNA, 25 bp, Homo sapien
tgggtgagtatcccctggtgccgcc

SEQ ID NO: 4794998 - DNA, 25 bp, Homo sapien
tcagatgactgtgtcagaaggagtg

SEQ ID NO: 4794999 - DNA, 25 bp, Homo sapien
gagcgctcagatgactgtgtcagaa

SEQ ID NO: 4795000 - DNA, 25 bp, Homo sapien
ccagcagacatgagcgctcagatga

SEQ ID NO: 4795001 - DNA, 25 bp, Homo sapien
cagaaatccgtttgtgcccctcaaa

SEQ ID NO: 4795002 - DNA, 25 bp, Homo sapien
ccctcaaactctgagccaggaaccg

SEQ ID NO: 4795003 - DNA, 25 bp, Homo sapien
gggctgttcagaaatccgtttgtgc

SEQ ID NO: 4795004 - DNA, 25 bp, Homo sapien
ctctgttggtccacagggtagaggc

SEQ ID NO: 4795005 - DNA, 25 bp, Homo sapien
cctctgccggagaggcccacttggg

SEQ ID NO: 4795006 - DNA, 25 bp, Homo sapien
atctcggctgccagtgtccgctcca

SEQ ID NO: 4795007 - DNA, 25 bp, Homo sapien
cttgggctggagaggtacctctgtg

SEQ ID NO: 4795008 - DNA, 25 bp, Homo sapien
ccagtgtccgctccaggctgaagtt

SEQ ID NO: 4795009 - DNA, 25 bp, Homo sapien
cctggccttggggtaggaagctcca

SEQ ID NO: 4795010 - DNA, 25 bp, Homo sapien
ggccttggggtaggaagctccatcc

SEQ ID NO: 4795011 - DNA, 25 bp, Homo sapien
ctgggaatcagagaacccctggcct

SEQ ID NO: 4795012 - DNA, 25 bp, Homo sapien
cagagaacccctggccttggggtag

SEQ ID NO: 4795013 - DNA, 25 bp, Homo sapien
cagcaaagggctgggctaatgttcc

SEQ ID NO: 4795014 - DNA, 25 bp, Homo sapien
caaagggctgggctaatgttcctgc

SEQ ID NO: 4795015 - DNA, 25 bp, Homo sapien
ctgggcacagatgcagcaaagggct

SEQ ID NO: 4795016 - DNA, 25 bp, Homo sapien
agggctgggctaatgttcctgctgt

SEQ ID NO: 4795017 - DNA, 25 bp, Homo sapien
gtgaggggtgaaactctgcttgttt

SEQ ID NO: 4795018 - DNA, 25 bp, Homo sapien
ggagagccggtgctctggagtctgg

SEQ ID NO: 4795019 - DNA, 25 bp, Homo sapien
ctgatgtgggagagccggtgctctg

SEQ ID NO: 4795020 - DNA, 25 bp, Homo sapien
tgaggggtgaaactctgcttgtttc

SEQ ID NO: 4795021 - DNA, 25 bp, Homo sapien
accgcctcggtgcaaaggcttctgt

SEQ ID NO: 4795022 - DNA, 25 bp, Homo sapien
aggcgctcagagatgccgcttccct

SEQ ID NO: 4795023 - DNA, 25 bp, Homo sapien
tggaaggcgctcagagatgccgctt

SEQ ID NO: 4795024 - DNA, 25 bp, Homo sapien
caccgcctcggtgcaaaggcttctg

SEQ ID NO: 4795025 - DNA, 25 bp, Homo sapien
catagataccatcttctccgtggcc

SEQ ID NO: 4795026 - DNA, 25 bp, Homo sapien
tgcccgtctctagccagggatgcct

SEQ ID NO: 4795027 - DNA, 25 bp, Homo sapien
ctactttggtgggatgctgcggact

SEQ ID NO: 4795028 - DNA, 25 bp, Homo sapien
gaaacctggtggcttcatagatacc

SEQ ID NO: 4795029 - DNA, 25 bp, Homo sapien
aagaccatccttgagttctgccagg

SEQ ID NO: 4795030 - DNA, 25 bp, Homo sapien
ctggcatgggaagagaagaccatcc

SEQ ID NO: 4795031 - DNA, 25 bp, Homo sapien
gttggcctgtcctgggagccaagca

SEQ ID NO: 4795032 - DNA, 25 bp, Homo sapien
gcctggttctgccaccttctagctg

SEQ ID NO: 4795033 - DNA, 25 bp, Homo sapien
gaagcgctgtcttattcactctgac

SEQ ID NO: 4795034 - DNA, 25 bp, Homo sapien
tctaaactgtgaagcgctgtcttat

SEQ ID NO: 4795035 - DNA, 25 bp, Homo sapien
tgtgtcctactgaaaatcatgtccc

SEQ ID NO: 4795036 - DNA, 25 bp, Homo sapien
tttcaagggctatcagtggtataca

SEQ ID NO: 4795037 - DNA, 25 bp, Homo sapien
cgggcactgccttgggaggaccctg

SEQ ID NO: 4795038 - DNA, 25 bp, Homo sapien
atgacttttctcagcctgcaccggg

SEQ ID NO: 4795039 - DNA, 25 bp, Homo sapien
tgggagagacttcacactgaggtac

SEQ ID NO: 4795040 - DNA, 25 bp, Homo sapien
tgctttccctggagttgcagccacc

SEQ ID NO: 4795041 - DNA, 25 bp, Homo sapien
gaggccatggtaaacttgctccatc

SEQ ID NO: 4795042 - DNA, 25 bp, Homo sapien
tcactgttgccagagctcacctcca

SEQ ID NO: 4795043 - DNA, 25 bp, Homo sapien
gccatggtaaacttgctccatctgc

SEQ ID NO: 4795044 - DNA, 25 bp, Homo sapien
ccacatttacgtgcaatgggcaggg

SEQ ID NO: 4795045 - DNA, 25 bp, Homo sapien
tatccatgcagtactacaagctaga

SEQ ID NO: 4795046 - DNA, 25 bp, Homo sapien
gagttgggaggcatagagaccccac

SEQ ID NO: 4795047 - DNA, 25 bp, Homo sapien
gagaccccactactgtcatctgtgt

SEQ ID NO: 4795048 - DNA, 25 bp, Homo sapien
aatttgctcgcctgcaaaacggaga

SEQ ID NO: 4795049 - DNA, 25 bp, Homo sapien
tcttgctgggtctggtctatgtgtt

SEQ ID NO: 4795050 - DNA, 25 bp, Homo sapien
aggcagcttcccagacggtatatct

SEQ ID NO: 4795051 - DNA, 25 bp, Homo sapien
gcaggcaggtgcgttggctgatgga

SEQ ID NO: 4795052 - DNA, 25 bp, Homo sapien
tgtccagagctgagtctgacccggg

SEQ ID NO: 4795053 - DNA, 25 bp, Homo sapien
tgctcccgacaagccttcaggtact

SEQ ID NO: 4795054 - DNA, 25 bp, Homo sapien
aggcgtccccttggagccggcaagc

SEQ ID NO: 4795055 - DNA, 25 bp, Homo sapien
ctgcgaggatcaaatcttccaggcg

SEQ ID NO: 4795056 - DNA, 25 bp, Homo sapien
tcctcctctagggccgcgtgggcag

SEQ ID NO: 4795057 - DNA, 25 bp, Homo sapien
cttgacttggtcctggggcatgaga

SEQ ID NO: 4795058 - DNA, 25 bp, Homo sapien
gggcatgagacgtcctgcctgtatc

SEQ ID NO: 4795059 - DNA, 25 bp, Homo sapien
gacgtcctgcctgtatcagtctttc

SEQ ID NO: 4795060 - DNA, 25 bp, Homo sapien
cctgcctgtatcagtctttcaaagg

SEQ ID NO: 4795061 - DNA, 25 bp, Homo sapien
cctcagagatgtcccggttctccgg

SEQ ID NO: 4795062 - DNA, 25 bp, Homo sapien
taagcgaggaggggctcaagtctcc

SEQ ID NO: 4795063 - DNA, 25 bp, Homo sapien
aagtctcctcgagctgatggccacc

SEQ ID NO: 4795064 - DNA, 25 bp, Homo sapien
ggtgggcatgctggtaagcgaggag

SEQ ID NO: 4795065 - DNA, 25 bp, Homo sapien
agggtcaccaagatgccaagtggca

SEQ ID NO: 4795066 - DNA, 25 bp, Homo sapien
ccaagtggcagggccagggctgccc

SEQ ID NO: 4795067 - DNA, 25 bp, Homo sapien
ccagggtcaccaagatgccaagtgg

SEQ ID NO: 4795068 - DNA, 25 bp, Homo sapien
gtggcagggccagggctgcccccag

SEQ ID NO: 4795069 - DNA, 25 bp, Homo sapien
cctggggcaccattcccgtgtggat

SEQ ID NO: 4795070 - DNA, 25 bp, Homo sapien
tggggcaccattcccgtgtggatgc

SEQ ID NO: 4795071 - DNA, 25 bp, Homo sapien
gggcaccattcccgtgtggatgctg

SEQ ID NO: 4795072 - DNA, 25 bp, Homo sapien
ggggtgggtcagagaacaggttcac

SEQ ID NO: 4795073 - DNA, 25 bp, Homo sapien
gtgcctctcgacattgagagcagca

SEQ ID NO: 4795074 - DNA, 25 bp, Homo sapien
tggagcatgacagggggaggcactg

SEQ ID NO: 4795075 - DNA, 25 bp, Homo sapien
cagctcccacatcctcctctactgc

SEQ ID NO: 4795076 - DNA, 25 bp, Homo sapien
ctcagctcccacatcctcctctact

SEQ ID NO: 4795077 - DNA, 25 bp, Homo sapien
gctcccacatcctcctctactgctg

SEQ ID NO: 4795078 - DNA, 25 bp, Homo sapien
ctcccacatcctcctctactgctgc

SEQ ID NO: 4795079 - DNA, 25 bp, Homo sapien
tcggggacttgggcccatgcctcca

SEQ ID NO: 4795080 - DNA, 25 bp, Homo sapien
cggggacttgggcccatgcctccac

SEQ ID NO: 4795081 - DNA, 25 bp, Homo sapien
gcctccaccccatcccggcctggta

SEQ ID NO: 4795082 - DNA, 25 bp, Homo sapien
tcagcgtacttggtgaggagcctgt

SEQ ID NO: 4795083 - DNA, 25 bp, Homo sapien
aggcgtagctggtcaatggtgttct

SEQ ID NO: 4795084 - DNA, 25 bp, Homo sapien
tggccccgaggcgtagctggtcaat

SEQ ID NO: 4795085 - DNA, 25 bp, Homo sapien
ttctcggcctcagcgtacttggtga

SEQ ID NO: 4795086 - DNA, 25 bp, Homo sapien
tccccacgcccgtggagctcatggt

SEQ ID NO: 4795087 - DNA, 25 bp, Homo sapien
cttgccaaaactccccacgcccgtg

SEQ ID NO: 4795088 - DNA, 25 bp, Homo sapien
gtgctcttgccaaaactccccacgc

SEQ ID NO: 4795089 - DNA, 25 bp, Homo sapien
caaaactccccacgcccgtggagct

SEQ ID NO: 4795090 - DNA, 25 bp, Homo sapien
ttgagcaaagggcttgggtgtatct

SEQ ID NO: 4795091 - DNA, 25 bp, Homo sapien
aatcactggtctttttgagcaaagg

SEQ ID NO: 4795092 - DNA, 25 bp, Homo sapien
catccttgaaacacgagtacaatca

SEQ ID NO: 4795093 - DNA, 25 bp, Homo sapien
aagaagcaaacagatcatccttgaa

SEQ ID NO: 4795094 - DNA, 25 bp, Homo sapien
ccccaagccaacaggggccttggtg

SEQ ID NO: 4795095 - DNA, 25 bp, Homo sapien
ggggccttggtgacacatccacagc

SEQ ID NO: 4795096 - DNA, 25 bp, Homo sapien
caccccaattagcctccaccccaag

SEQ ID NO: 4795097 - DNA, 25 bp, Homo sapien
caccagcctccgtcctagggcttcc

SEQ ID NO: 4795098 - DNA, 25 bp, Homo sapien
tcagggagtgggtagttcaactgcc

SEQ ID NO: 4795099 - DNA, 25 bp, Homo sapien
cttggggggacggtagctctcatct

SEQ ID NO: 4795100 - DNA, 25 bp, Homo sapien
attagaagaggagcggccagccaga

SEQ ID NO: 4795101 - DNA, 25 bp, Homo sapien
agtggcttgctcaggcgtctgaaat

SEQ ID NO: 4795102 - DNA, 25 bp, Homo sapien
tgccctgccgcgttggcctgggctg

SEQ ID NO: 4795103 - DNA, 25 bp, Homo sapien
gctgatggagccaatgaatcgggaa

SEQ ID NO: 4795104 - DNA, 25 bp, Homo sapien
tcgggaagggagtggcttaggtgac

SEQ ID NO: 4795105 - DNA, 25 bp, Homo sapien
ttaggtgacgtctttgtctgcttcc

SEQ ID NO: 4795106 - DNA, 25 bp, Homo sapien
cttcccaggtagaatcaaggctgtc

SEQ ID NO: 4795107 - DNA, 25 bp, Homo sapien
tgtcactagggtggtcgaggctcac

SEQ ID NO: 4795108 - DNA, 25 bp, Homo sapien
accttgccgggctgagttcaacgga

SEQ ID NO: 4795109 - DNA, 25 bp, Homo sapien
tatctgtggcatgctgcggactctg

SEQ ID NO: 4795110 - DNA, 25 bp, Homo sapien
ccaggcaagaggctcatgggaactt

SEQ ID NO: 4795111 - DNA, 25 bp, Homo sapien
acttccgagggtcccatctggctcc

SEQ ID NO: 4795112 - DNA, 25 bp, Homo sapien
ggcaagaggctcatgggaacttgct

SEQ ID NO: 4795113 - DNA, 25 bp, Homo sapien
cagtcatgtccagctgacggccctg

SEQ ID NO: 4795114 - DNA, 25 bp, Homo sapien
ctcggaatcctgatgcccatcgggc

SEQ ID NO: 4795115 - DNA, 25 bp, Homo sapien
tcctgatgcccatcgggctgcgggt

SEQ ID NO: 4795116 - DNA, 25 bp, Homo sapien
cggaatcctgatgcccatcgggctg

SEQ ID NO: 4795117 - DNA, 25 bp, Homo sapien
tcgggctgcgggtgtgggtcccact

SEQ ID NO: 4795118 - DNA, 25 bp, Homo sapien
cagctttgtgaactacttctatcca

SEQ ID NO: 4795119 - DNA, 25 bp, Homo sapien
ggtggcattgggaaagagtctctct

SEQ ID NO: 4795120 - DNA, 25 bp, Homo sapien
agcccagcggatctcagtctccgag

SEQ ID NO: 4795121 - DNA, 25 bp, Homo sapien
caggctcagcccagcggatctcagt

SEQ ID NO: 4795122 - DNA, 25 bp, Homo sapien
ggcctgggcttcacctgggccactt

SEQ ID NO: 4795123 - DNA, 25 bp, Homo sapien
ctggcctgggcttcacctgggccac

SEQ ID NO: 4795124 - DNA, 25 bp, Homo sapien
gggctggcctgggcttcacctgggc

SEQ ID NO: 4795125 - DNA, 25 bp, Homo sapien
ctgggcttcacctgggccacttcat

SEQ ID NO: 4795126 - DNA, 25 bp, Homo sapien
gggccccagagtcaccgctggttcc

SEQ ID NO: 4795127 - DNA, 25 bp, Homo sapien
gttcctgtcagcatcggccatcctg

SEQ ID NO: 4795128 - DNA, 25 bp, Homo sapien
agagtcaccgctggttcctgtcagc

SEQ ID NO: 4795129 - DNA, 25 bp, Homo sapien
tggttcctgtcagcatcggccatcc

SEQ ID NO: 4795130 - DNA, 25 bp, Homo sapien
ggcacaggccctgctcatgggagaa

SEQ ID NO: 4795131 - DNA, 25 bp, Homo sapien
aggcaactacaaatccaggtgagat

SEQ ID NO: 4795132 - DNA, 25 bp, Homo sapien
ccaggaggaagcagacgatcaccag

SEQ ID NO: 4795133 - DNA, 25 bp, Homo sapien
tggctcttcgtgtgggcatggggca

SEQ ID NO: 4795134 - DNA, 25 bp, Homo sapien
aatcctctaagcgtgcagtttcctg

SEQ ID NO: 4795135 - DNA, 25 bp, Homo sapien
gcattttaaaccagggcctcaggca

SEQ ID NO: 4795136 - DNA, 25 bp, Homo sapien
ctttgaagttcactaggcctcctgg

SEQ ID NO: 4795137 - DNA, 25 bp, Homo sapien
ccagggatcttaagcttcagtgtgc

SEQ ID NO: 4795138 - DNA, 25 bp, Homo sapien
actcactgtgtatagctgggcttgc

SEQ ID NO: 4795139 - DNA, 25 bp, Homo sapien
gcatcaggagacaggtgctagtcct

SEQ ID NO: 4795140 - DNA, 25 bp, Homo sapien
gcagggtatgggactcaaagagctt

SEQ ID NO: 4795141 - DNA, 25 bp, Homo sapien
cctcaggctgggacgatgctgtgat

SEQ ID NO: 4795142 - DNA, 25 bp, Homo sapien
cctgtctccattgcgccctggccca

SEQ ID NO: 4795143 - DNA, 25 bp, Homo sapien
ccagggagccccctgtctccattgc

SEQ ID NO: 4795144 - DNA, 25 bp, Homo sapien
gccccctgtctccattgcgccctgg

SEQ ID NO: 4795145 - DNA, 25 bp, Homo sapien
agggagccccctgtctccattgcgc

SEQ ID NO: 4795146 - DNA, 25 bp, Homo sapien
tccaggccgttctgccagcccaagc

SEQ ID NO: 4795147 - DNA, 25 bp, Homo sapien
ctccaggccgttctgccagcccaag

SEQ ID NO: 4795148 - DNA, 25 bp, Homo sapien
ccaggccgttctgccagcccaagct

SEQ ID NO: 4795149 - DNA, 25 bp, Homo sapien
ttgaggccgcctcgcctcggcagga

SEQ ID NO: 4795150 - DNA, 25 bp, Homo sapien
tggttgaggccgcctcgcctcggca

SEQ ID NO: 4795151 - DNA, 25 bp, Homo sapien
tgccgtggttgaggccgcctcgcct

SEQ ID NO: 4795152 - DNA, 25 bp, Homo sapien
gtggttgaggccgcctcgcctcggc

SEQ ID NO: 4795153 - DNA, 25 bp, Homo sapien
agcttccacaatatcaaccccaggt

SEQ ID NO: 4795154 - DNA, 25 bp, Homo sapien
tcaaccccaggtctagcgatgagtc

SEQ ID NO: 4795155 - DNA, 25 bp, Homo sapien
tccacaatatcaaccccaggtctag

SEQ ID NO: 4795156 - DNA, 25 bp, Homo sapien
caatatcaaccccaggtctagcgat

SEQ ID NO: 4795157 - DNA, 25 bp, Homo sapien
accttgggcacctccgtcttcagtt

SEQ ID NO: 4795158 - DNA, 25 bp, Homo sapien
ggtgcttccttctgaccttgggcac

SEQ ID NO: 4795159 - DNA, 25 bp, Homo sapien
ttgggcacctccgtcttcagttgcc

SEQ ID NO: 4795160 - DNA, 25 bp, Homo sapien
ctgtgtggtgcttccttctgacctt

SEQ ID NO: 4795161 - DNA, 25 bp, Homo sapien
ttcttactcctggtctccagatcat

SEQ ID NO: 4795162 - DNA, 25 bp, Homo sapien
tggggatctaaactcaggtcttctt

SEQ ID NO: 4795163 - DNA, 25 bp, Homo sapien
atccaggctggggatctaaactcag

SEQ ID NO: 4795164 - DNA, 25 bp, Homo sapien
gtcttcttactcctggtctccagat

SEQ ID NO: 4795165 - DNA, 25 bp, Homo sapien
ttctcccgacggagaaactgagtcc

SEQ ID NO: 4795166 - DNA, 25 bp, Homo sapien
tgagtcccaacgagggacagggacc

SEQ ID NO: 4795167 - DNA, 25 bp, Homo sapien
tccacgtggaaaagaccgaaagcag

SEQ ID NO: 4795168 - DNA, 25 bp, Homo sapien
tcccattcccggagcggtgatgcgt

SEQ ID NO: 4795169 - DNA, 25 bp, Homo sapien
ctggcggccgccgagcgcgggtggt

SEQ ID NO: 4795170 - DNA, 25 bp, Homo sapien
gcggccgccgagcgcgggtggtttc

SEQ ID NO: 4795171 - DNA, 25 bp, Homo sapien
gccgccgagcgcgggtggtttcctg

SEQ ID NO: 4795172 - DNA, 25 bp, Homo sapien
cgccgagcgcgggtggtttcctgga

SEQ ID NO: 4795173 - DNA, 25 bp, Homo sapien
atcaccgaaaggccgccgccacggc

SEQ ID NO: 4795174 - DNA, 25 bp, Homo sapien
caatcaccgaaaggccgccgccacg

SEQ ID NO: 4795175 - DNA, 25 bp, Homo sapien
aactcggacatagggagcgcaaacc

SEQ ID NO: 4795176 - DNA, 25 bp, Homo sapien
tcggacatagggagcgcaaaccctg

SEQ ID NO: 4795177 - DNA, 25 bp, Homo sapien
ggacacagaactggacaaagcagga

SEQ ID NO: 4795178 - DNA, 25 bp, Homo sapien
acagaactggacaaagcaggatttc

SEQ ID NO: 4795179 - DNA, 25 bp, Homo sapien
acacagaactggacaaagcaggatt

SEQ ID NO: 4795180 - DNA, 25 bp, Homo sapien
cacagaactggacaaagcaggattt

SEQ ID NO: 4795181 - DNA, 25 bp, Homo sapien
gagtgacctcactttggacaaaggc

SEQ ID NO: 4795182 - DNA, 25 bp, Homo sapien
caaccccgcaaggagcttgatgaag

SEQ ID NO: 4795183 - DNA, 25 bp, Homo sapien
tactgtgtacccagtacagcaccag

SEQ ID NO: 4795184 - DNA, 25 bp, Homo sapien
cactaaaggtcttgcaagatgcccc

SEQ ID NO: 4795185 - DNA, 25 bp, Homo sapien
ccaccttgagctgcccacagttgtg

SEQ ID NO: 4795186 - DNA, 25 bp, Homo sapien
cagaaagtcaatgtagtcacggtcc

SEQ ID NO: 4795187 - DNA, 25 bp, Homo sapien
cattgaactcagtgaccagaaagtc

SEQ ID NO: 4795188 - DNA, 25 bp, Homo sapien
tccagaatcacgtggcccaccttga

SEQ ID NO: 4795189 - DNA, 25 bp, Homo sapien
cagggtggccgcacttttcttcaca

SEQ ID NO: 4795190 - DNA, 25 bp, Homo sapien
tcttcacacggaccagagtggacgt

SEQ ID NO: 4795191 - DNA, 25 bp, Homo sapien
gtgttggcgccaccctcgatggcga

SEQ ID NO: 4795192 - DNA, 25 bp, Homo sapien
tgaatagtgacaatcctaggcaggg

SEQ ID NO: 4795193 - DNA, 25 bp, Homo sapien
ctcgttccgaggcagctccttgcta

SEQ ID NO: 4795194 - DNA, 25 bp, Homo sapien
gctcttggtggacaccgactgcctt

SEQ ID NO: 4795195 - DNA, 25 bp, Homo sapien
agagtctgcccgctgtccgagaggt

SEQ ID NO: 4795196 - DNA, 25 bp, Homo sapien
gtttgttggccccatctgtgggcct

SEQ ID NO: 4795197 - DNA, 25 bp, Homo sapien
gagttaatactataggcaaggccct

SEQ ID NO: 4795198 - DNA, 25 bp, Homo sapien
gcaaggccctttgaacactggcaca

SEQ ID NO: 4795199 - DNA, 25 bp, Homo sapien
aggctcctgaggtcgaaatcctgac

SEQ ID NO: 4795200 - DNA, 25 bp, Homo sapien
taccaacctcatagggctactggga

SEQ ID NO: 4795201 - DNA, 25 bp, Homo sapien
gctcgcagcaacctggcaggactgt

SEQ ID NO: 4795202 - DNA, 25 bp, Homo sapien
caggccaggccatggcggacaggaa

SEQ ID NO: 4795203 - DNA, 25 bp, Homo sapien
agctggagaaggcaccccgacgctc

SEQ ID NO: 4795204 - DNA, 25 bp, Homo sapien
gccctccacgagttcagtcctcctg

SEQ ID NO: 4795205 - DNA, 25 bp, Homo sapien
cagagcctggccttgctgtactcac

SEQ ID NO: 4795206 - DNA, 25 bp, Homo sapien
acccccaaggaccacagagcctggc

SEQ ID NO: 4795207 - DNA, 25 bp, Homo sapien
ctgaagaggacagggacccccaagg

SEQ ID NO: 4795208 - DNA, 25 bp, Homo sapien
cacagagcctggccttgctgtactc

SEQ ID NO: 4795209 - DNA, 25 bp, Homo sapien
gacctccaccatgacaaagtgctgg

SEQ ID NO: 4795210 - DNA, 25 bp, Homo sapien
ggcagcgccctcacttcattgacgt

SEQ ID NO: 4795211 - DNA, 25 bp, Homo sapien
tcattgacgtctggctcgctgtcgg

SEQ ID NO: 4795212 - DNA, 25 bp, Homo sapien
ccagatgggcgtccagcggcctctt

SEQ ID NO: 4795213 - DNA, 25 bp, Homo sapien
tccttggctggcctagtgggaggtc

SEQ ID NO: 4795214 - DNA, 25 bp, Homo sapien
cttgaagcttgacagcccctgggag

SEQ ID NO: 4795215 - DNA, 25 bp, Homo sapien
tgggaggtcgttgccttgggccaga

SEQ ID NO: 4795216 - DNA, 25 bp, Homo sapien
cccctgggaggtggatctgacatca

SEQ ID NO: 4795217 - DNA, 25 bp, Homo sapien
aaagacccaacaggcggagaaggag

SEQ ID NO: 4795218 - DNA, 25 bp, Homo sapien
acccaacaggcggagaaggagtcag

SEQ ID NO: 4795219 - DNA, 25 bp, Homo sapien
gacccaacaggcggagaaggagtca

SEQ ID NO: 4795220 - DNA, 25 bp, Homo sapien
caaaagacccaacaggcggagaagg

SEQ ID NO: 4795221 - DNA, 25 bp, Homo sapien
acacatctgggagggcgttgatatt

SEQ ID NO: 4795222 - DNA, 25 bp, Homo sapien
atctgggagggcgttgatattgccc

SEQ ID NO: 4795223 - DNA, 25 bp, Homo sapien
tctgggagggcgttgatattgccct

SEQ ID NO: 4795224 - DNA, 25 bp, Homo sapien
acggacacatctgggagggcgttga

SEQ ID NO: 4795225 - DNA, 25 bp, Homo sapien
tagggttattactcagcattactgc

SEQ ID NO: 4795226 - DNA, 25 bp, Homo sapien
gacaagtgatttagcagaggtatga

SEQ ID NO: 4795227 - DNA, 25 bp, Homo sapien
tgtagaccacacagcggcacttagt

SEQ ID NO: 4795228 - DNA, 25 bp, Homo sapien
cccacgaagaggttaaagcaatgtg

SEQ ID NO: 4795229 - DNA, 25 bp, Homo sapien
ctccatcaggtctataaaccacagc

SEQ ID NO: 4795230 - DNA, 25 bp, Homo sapien
ctccatcaggtctataagccacagc

SEQ ID NO: 4795231 - DNA, 25 bp, Homo sapien
tagaagcacagtctgcagtttccca

SEQ ID NO: 4795232 - DNA, 25 bp, Homo sapien
ggcctgaacattatcaaggccaatc

SEQ ID NO: 4795233 - DNA, 25 bp, Homo sapien
tctgattctaaagggaccactgtag

SEQ ID NO: 4795234 - DNA, 25 bp, Homo sapien
gctgctgaggcctgaacattatcaa

SEQ ID NO: 4795235 - DNA, 25 bp, Homo sapien
tgccgcgccttcatggactcaatct

SEQ ID NO: 4795236 - DNA, 25 bp, Homo sapien
ccgtgtcactgtaggagaccatgga

SEQ ID NO: 4795237 - DNA, 25 bp, Homo sapien
cctgtggatgaacccgtgtcactgt

SEQ ID NO: 4795238 - DNA, 25 bp, Homo sapien
gcaccaggtggtcgaagcgttctag

SEQ ID NO: 4795239 - DNA, 25 bp, Homo sapien
agcagcactcgtgtctggttcccca

SEQ ID NO: 4795240 - DNA, 25 bp, Homo sapien
ttgaacagggccatgacgagggcct

SEQ ID NO: 4795241 - DNA, 25 bp, Homo sapien
ccggctgggcccttgtaaaatcctg

SEQ ID NO: 4795242 - DNA, 25 bp, Homo sapien
gtggcgtgttcctgctcgttcagca

SEQ ID NO: 4795243 - DNA, 25 bp, Homo sapien
ttattccttctgttgtgagatcgcc

SEQ ID NO: 4795244 - DNA, 25 bp, Homo sapien
tattccttctgttgtgagatcgcca

SEQ ID NO: 4795245 - DNA, 25 bp, Homo sapien
gattgacaggcaacctcagggtcag

SEQ ID NO: 4795246 - DNA, 25 bp, Homo sapien
gagatcccagatgcaactcgcaggt

SEQ ID NO: 4795247 - DNA, 25 bp, Homo sapien
ctgagttgttgccaaccccgcagga

SEQ ID NO: 4795248 - DNA, 25 bp, Homo sapien
caagagaaccatgcatcgtggcctc

SEQ ID NO: 4795249 - DNA, 25 bp, Homo sapien
gacttaagcagcctgacagcctcgt

SEQ ID NO: 4795250 - DNA, 25 bp, Homo sapien
gatgaggtgccgagatgacttaagc

SEQ ID NO: 4795251 - DNA, 25 bp, Homo sapien
tgtaggatgttgagaaagctccgcc

SEQ ID NO: 4795252 - DNA, 25 bp, Homo sapien
gatccgggaactggcgatccacttg

SEQ ID NO: 4795253 - DNA, 25 bp, Homo sapien
cctcccacgtgagcgagctagcatc

SEQ ID NO: 4795254 - DNA, 25 bp, Homo sapien
tcccacgtgagcgagctagcatcct

SEQ ID NO: 4795255 - DNA, 25 bp, Homo sapien
cacgtgagcgagctagcatcctcat

SEQ ID NO: 4795256 - DNA, 25 bp, Homo sapien
tccctcccacgtgagcgagctagca

SEQ ID NO: 4795257 - DNA, 25 bp, Homo sapien
accagaaatgctgtggatggacccg

SEQ ID NO: 4795258 - DNA, 25 bp, Homo sapien
taatgcacactgactcccaatatgg

SEQ ID NO: 4795259 - DNA, 25 bp, Homo sapien
caatatggtctatgcttccttccgg

SEQ ID NO: 4795260 - DNA, 25 bp, Homo sapien
gatggacccggcaaggctaatgcac

SEQ ID NO: 4795261 - DNA, 25 bp, Homo sapien
tctctctcagctcacttatgtattt

SEQ ID NO: 4795262 - DNA, 25 bp, Homo sapien
aaagggttcagcattatccagacat

SEQ ID NO: 4795263 - DNA, 25 bp, Homo sapien
tgatagagacactgtaaagatcagt

SEQ ID NO: 4795264 - DNA, 25 bp, Homo sapien
cactgcatggttccaactatgtgat

SEQ ID NO: 4795265 - DNA, 25 bp, Homo sapien
gcactgcaggcactttggtgggcac

SEQ ID NO: 4795266 - DNA, 25 bp, Homo sapien
gggcttggagagagctgtttgatgg

SEQ ID NO: 4795267 - DNA, 25 bp, Homo sapien
gagtctttcctgttgttggagcact

SEQ ID NO: 4795268 - DNA, 25 bp, Homo sapien
agtgagtctttcctgttgttggagc

SEQ ID NO: 4795269 - DNA, 25 bp, Homo sapien
gggtgctgtccagagactcagtcca

SEQ ID NO: 4795270 - DNA, 25 bp, Homo sapien
cagagaaggcaagtggggagaacag

SEQ ID NO: 4795271 - DNA, 25 bp, Homo sapien
ttagcacaggggtgctgtccagaga

SEQ ID NO: 4795272 - DNA, 25 bp, Homo sapien
ccagagactcagtccagagaaggca

SEQ ID NO: 4795273 - DNA, 25 bp, Homo sapien
aatgaagtcgatatggtcaggctcc

SEQ ID NO: 4795274 - DNA, 25 bp, Homo sapien
tcaccaatgaagtcgatatggtcag

SEQ ID NO: 4795275 - DNA, 25 bp, Homo sapien
ggcttcaccaatgaagtcgatatgg

SEQ ID NO: 4795276 - DNA, 25 bp, Homo sapien
gctggcttcaccaatgaagtcgata

SEQ ID NO: 4795277 - DNA, 25 bp, Homo sapien
gagggatctatcagctggttactgg

SEQ ID NO: 4795278 - DNA, 25 bp, Homo sapien
caaaagagggatctatcagctggtt

SEQ ID NO: 4795279 - DNA, 25 bp, Homo sapien
acatccttccacacaaaagagggat

SEQ ID NO: 4795280 - DNA, 25 bp, Homo sapien
cagctggttactggttttggcatct

SEQ ID NO: 4795281 - DNA, 25 bp, Homo sapien
ccagtgatgtaaatgccaaggccgt

SEQ ID NO: 4795282 - DNA, 25 bp, Homo sapien
cccacggatcgtgaggcccagggac

SEQ ID NO: 4795283 - DNA, 25 bp, Homo sapien
tcagagcctgggtccacgccagtga

SEQ ID NO: 4795284 - DNA, 25 bp, Homo sapien
tgtaaatgccaaggccgtactcagc

SEQ ID NO: 4795285 - DNA, 25 bp, Homo sapien
tctgcccagataggacggatccgtg

SEQ ID NO: 4795286 - DNA, 25 bp, Homo sapien
aactgatagcgccatccagggctgt

SEQ ID NO: 4795287 - DNA, 25 bp, Homo sapien
accttcttagtgaggccgtccctgc

SEQ ID NO: 4795288 - DNA, 25 bp, Homo sapien
cagtccggctggaacctcatatgca

SEQ ID NO: 4795289 - DNA, 25 bp, Homo sapien
ctctgctgttctgggttcggaggga

SEQ ID NO: 4795290 - DNA, 25 bp, Homo sapien
catacactacacaggtcaaaaagaa

SEQ ID NO: 4795291 - DNA, 25 bp, Homo sapien
ggcagcttagcctgtattataacat

SEQ ID NO: 4795292 - DNA, 25 bp, Homo sapien
gaatacggtgtctgagaggctggcc

SEQ ID NO: 4795293 - DNA, 25 bp, Homo sapien
gtgcagggtgctcctccggtcaccc

SEQ ID NO: 4795294 - DNA, 25 bp, Homo sapien
gccctgcgggtccacccaggtgtag

SEQ ID NO: 4795295 - DNA, 25 bp, Homo sapien
tgctgcctcagggcaccaccgtggg

SEQ ID NO: 4795296 - DNA, 25 bp, Homo sapien
tagatgtggttggtgacgtagcccc

SEQ ID NO: 4795297 - DNA, 25 bp, Homo sapien
aggccagccctgaagtccctttcct

SEQ ID NO: 4795298 - DNA, 25 bp, Homo sapien
ctttccttctctagccctcgatttt

SEQ ID NO: 4795299 - DNA, 25 bp, Homo sapien
tccttctctagccctcgattttgtc

SEQ ID NO: 4795300 - DNA, 25 bp, Homo sapien
tttccttctctagccctcgattttg

SEQ ID NO: 4795301 - DNA, 25 bp, Homo sapien
tggaagggactcaccactaccgaat

SEQ ID NO: 4795302 - DNA, 25 bp, Homo sapien
cacccatggtaacgactgatatgtg

SEQ ID NO: 4795303 - DNA, 25 bp, Homo sapien
gatatgtgttgatgtctgcccttcc

SEQ ID NO: 4795304 - DNA, 25 bp, Homo sapien
tgtagagaactcagtacccagaacc

SEQ ID NO: 4795305 - DNA, 25 bp, Homo sapien
taagcggactggctggcattgtctt

SEQ ID NO: 4795306 - DNA, 25 bp, Homo sapien
tgggctggggtccaagcaaggaggc

SEQ ID NO: 4795307 - DNA, 25 bp, Homo sapien
ctagtaagcggactggctggcattg

SEQ ID NO: 4795308 - DNA, 25 bp, Homo sapien
cacttggttcctaatcccaatgggg

SEQ ID NO: 4795309 - DNA, 25 bp, Homo sapien
ccagaggaaggtctgtgcatgccat

SEQ ID NO: 4795310 - DNA, 25 bp, Homo sapien
aaaacagggccagaggaaggtctgt

SEQ ID NO: 4795311 - DNA, 25 bp, Homo sapien
aacagggccagaggaaggtctgtgc

SEQ ID NO: 4795312 - DNA, 25 bp, Homo sapien
ggacccaagagtgaaaacagggcca

SEQ ID NO: 4795313 - DNA, 25 bp, Homo sapien
gtttctgaaagcctcaagggcttcc

SEQ ID NO: 4795314 - DNA, 25 bp, Homo sapien
tttccagaagctacaaagaagtttc

SEQ ID NO: 4795315 - DNA, 25 bp, Homo sapien
gagctttgcccactgcaccctgatg

SEQ ID NO: 4795316 - DNA, 25 bp, Homo sapien
gatgcagtataaaccgatcggcctt

SEQ ID NO: 4795317 - DNA, 25 bp, Homo sapien
gaggaagtagtcgtgggcctctgct

SEQ ID NO: 4795318 - DNA, 25 bp, Homo sapien
tggacacaggccactgaacggcact

SEQ ID NO: 4795319 - DNA, 25 bp, Homo sapien
cactgaacggcactcaggaggaagt

SEQ ID NO: 4795320 - DNA, 25 bp, Homo sapien
aacggcactcaggaggaagtagtcg

SEQ ID NO: 4795321 - DNA, 25 bp, Homo sapien
gcttatttggtccagtggccccatt

SEQ ID NO: 4795322 - DNA, 25 bp, Homo sapien
cctgagagggcaagtgacttgcttc

SEQ ID NO: 4795323 - DNA, 25 bp, Homo sapien
tacattcaggcaggagtctcatttc

SEQ ID NO: 4795324 - DNA, 25 bp, Homo sapien
tagggaccgcttatttggtccagtg

SEQ ID NO: 4795325 - DNA, 25 bp, Homo sapien
gatgaccagacgaagcatgggcagc

SEQ ID NO: 4795326 - DNA, 25 bp, Homo sapien
tggttccaccagagacacgtagatg

SEQ ID NO: 4795327 - DNA, 25 bp, Homo sapien
gccagggatttgtcgttgacgcgca

SEQ ID NO: 4795328 - DNA, 25 bp, Homo sapien
tgtattggtcgaagagcagctggtc

SEQ ID NO: 4795329 - DNA, 25 bp, Homo sapien
ttggcagacagtaaccgcagccccg

SEQ ID NO: 4795330 - DNA, 25 bp, Homo sapien
gcgagccggtggaggacgagctcac

SEQ ID NO: 4795331 - DNA, 25 bp, Homo sapien
cccagcgagccggtggaggacgagc

SEQ ID NO: 4795332 - DNA, 25 bp, Homo sapien
cagcgagccggtggaggacgagctc

SEQ ID NO: 4795333 - DNA, 25 bp, Homo sapien
cgacaggccgtccagcggcgcgttc

SEQ ID NO: 4795334 - DNA, 25 bp, Homo sapien
acaggccgtccagcggcgcgttcat

SEQ ID NO: 4795335 - DNA, 25 bp, Homo sapien
gacaggccgtccagcggcgcgttca

SEQ ID NO: 4795336 - DNA, 25 bp, Homo sapien
ctgtcctcgcgggtactggcgcgac

SEQ ID NO: 4795337 - DNA, 25 bp, Homo sapien
gcgcgacagctggatccccgggagc

SEQ ID NO: 4795338 - DNA, 25 bp, Homo sapien
ccgggagcgcggagacgacggctgg

SEQ ID NO: 4795339 - DNA, 25 bp, Homo sapien
ggagcgcggagacgacggctggagc

SEQ ID NO: 4795340 - DNA, 25 bp, Homo sapien
gtttggggagcacgggtacagtggc

SEQ ID NO: 4795341 - DNA, 25 bp, Homo sapien
gaggcgcgaagacggcgggggtcgc

SEQ ID NO: 4795342 - DNA, 25 bp, Homo sapien
accgctgctagagtcccggaggcgc

SEQ ID NO: 4795343 - DNA, 25 bp, Homo sapien
cggagaccgctgctagagtcccgga

SEQ ID NO: 4795344 - DNA, 25 bp, Homo sapien
gggtcgcggagaccgctgctagagt

SEQ ID NO: 4795345 - DNA, 25 bp, Homo sapien
acgtcggcgggttcctgagagacac

SEQ ID NO: 4795346 - DNA, 25 bp, Homo sapien
ctggagcccggaggtggcggagact

SEQ ID NO: 4795347 - DNA, 25 bp, Homo sapien
gtggcggagactgctgctggagtcc

SEQ ID NO: 4795348 - DNA, 25 bp, Homo sapien
agacgtcggcgggttcctgagagac

SEQ ID NO: 4795349 - DNA, 25 bp, Homo sapien
gagacgacgggtggctggagtttgg

SEQ ID NO: 4795350 - DNA, 25 bp, Homo sapien
cgggcgcccgttcctctagggctgg

SEQ ID NO: 4795351 - DNA, 25 bp, Homo sapien
ggagggcgctctagtcccagagcac

SEQ ID NO: 4795352 - DNA, 25 bp, Homo sapien
gagtggcagccggtgaagcggcgcg

SEQ ID NO: 4795353 - DNA, 25 bp, Homo sapien
ctggctttcctgctaccaagagaga

SEQ ID NO: 4795354 - DNA, 25 bp, Homo sapien
gagatatggtgctaacaccggtcat

SEQ ID NO: 4795355 - DNA, 25 bp, Homo sapien
cctggctttcctgctaccaagagag

SEQ ID NO: 4795356 - DNA, 25 bp, Homo sapien
cagaggactttccttgttcacactc

SEQ ID NO: 4795357 - DNA, 25 bp, Homo sapien
ggactttccttgttcacactctcat

SEQ ID NO: 4795358 - DNA, 25 bp, Homo sapien
cccagaggactttccttgttcacac

SEQ ID NO: 4795359 - DNA, 25 bp, Homo sapien
gaggactttccttgttcacactctc

SEQ ID NO: 4795360 - DNA, 25 bp, Homo sapien
tcgccaaaattgatctgcaggttca

SEQ ID NO: 4795361 - DNA, 25 bp, Homo sapien
tgggtgcttaatccaatatggctga

SEQ ID NO: 4795362 - DNA, 25 bp, Homo sapien
gaaagcacagaaactggcacctata

SEQ ID NO: 4795363 - DNA, 25 bp, Homo sapien
gagtagtgtactccccaaaatcatg

SEQ ID NO: 4795364 - DNA, 25 bp, Homo sapien
cctgtgaccgtaatgtcagtctgtt

SEQ ID NO: 4795365 - DNA, 25 bp, Homo sapien
ggtaagatactatcatctcctgtga

SEQ ID NO: 4795366 - DNA, 25 bp, Homo sapien
ttaagttcgtggtaagatactatca

SEQ ID NO: 4795367 - DNA, 25 bp, Homo sapien
tcatctcctgtgaccgtaatgtcag

SEQ ID NO: 4795368 - DNA, 25 bp, Homo sapien
tttgacagtaatgaagttggacaca

SEQ ID NO: 4795369 - DNA, 25 bp, Homo sapien
tagcctcattcaaggggagagattt

SEQ ID NO: 4795370 - DNA, 25 bp, Homo sapien
gacacatagtcaggaaccagatcat

SEQ ID NO: 4795371 - DNA, 25 bp, Homo sapien
gatataatgggttggggtagcctca

SEQ ID NO: 4795372 - DNA, 25 bp, Homo sapien
cacacacgagtgtgaacactcagtc

SEQ ID NO: 4795373 - DNA, 25 bp, Homo sapien
atctcacacacgagtgtgaacactc

SEQ ID NO: 4795374 - DNA, 25 bp, Homo sapien
tcacacacgagtgtgaacactcagt

SEQ ID NO: 4795375 - DNA, 25 bp, Homo sapien
cactcagtcatcatccttatgaact

SEQ ID NO: 4795376 - DNA, 25 bp, Homo sapien
tgaagtaattcaggattgtcctgtg

SEQ ID NO: 4795377 - DNA, 25 bp, Homo sapien
tatatgttggctgtccttgtggtct

SEQ ID NO: 4795378 - DNA, 25 bp, Homo sapien
tttccagctgtatgttaagccactc

SEQ ID NO: 4795379 - DNA, 25 bp, Homo sapien
tagaaaccaaaatacctgtgtctcc

SEQ ID NO: 4795380 - DNA, 25 bp, Homo sapien
gactctgaccaaacctagagatttt

SEQ ID NO: 4795381 - DNA, 25 bp, Homo sapien
tttttcctgtccgagatgtagtctt

SEQ ID NO: 4795382 - DNA, 25 bp, Homo sapien
ttttcctgtccgagatgtagtcttg

SEQ ID NO: 4795383 - DNA, 25 bp, Homo sapien
tttttttcctgtccgagatgtagtc

SEQ ID NO: 4795384 - DNA, 25 bp, Homo sapien
tttcctgtccgagatgtagtcttgc

SEQ ID NO: 4795385 - DNA, 25 bp, Homo sapien
gagatgcgaatacatgtctttggaa

SEQ ID NO: 4795386 - DNA, 25 bp, Homo sapien
cagattcttagaggagagatgcgaa

SEQ ID NO: 4795387 - DNA, 25 bp, Homo sapien
gcccggcctatatagcagattctta

SEQ ID NO: 4795388 - DNA, 25 bp, Homo sapien
tggaataatttcctagcagtgggaa

SEQ ID NO: 4795389 - DNA, 25 bp, Homo sapien
catgtattacttggtgtatcgataa

SEQ ID NO: 4795390 - DNA, 25 bp, Homo sapien
cagccttaaagtagtccattcttgc

SEQ ID NO: 4795391 - DNA, 25 bp, Homo sapien
tggttagaacagtgaatactagtgg

SEQ ID NO: 4795392 - DNA, 25 bp, Homo sapien
tactagtggaattgtttgggctgct

SEQ ID NO: 4795393 - DNA, 25 bp, Homo sapien
gagataatgcactactttcagagca

SEQ ID NO: 4795394 - DNA, 25 bp, Homo sapien
ataatgcactactttcagagcagcc

SEQ ID NO: 4795395 - DNA, 25 bp, Homo sapien
acacacaattgagataatgcactac

SEQ ID NO: 4795396 - DNA, 25 bp, Homo sapien
gaacacacaattgagataatgcact

SEQ ID NO: 4795397 - DNA, 25 bp, Homo sapien
gcttgaatctaagagttcaacacca

SEQ ID NO: 4795398 - DNA, 25 bp, Homo sapien
ggacagaagactggcctacctagca

SEQ ID NO: 4795399 - DNA, 25 bp, Homo sapien
cagcctggatgattcttaagggccc

SEQ ID NO: 4795400 - DNA, 25 bp, Homo sapien
tcctaggacacccttggacagaaga

SEQ ID NO: 4795401 - DNA, 25 bp, Homo sapien
aatgtaataaacacgtggcttgcca

SEQ ID NO: 4795402 - DNA, 25 bp, Homo sapien
tttcagagagataaggtcttgctat

SEQ ID NO: 4795403 - DNA, 25 bp, Homo sapien
tgccttggcctcccatgctgctggg

SEQ ID NO: 4795404 - DNA, 25 bp, Homo sapien
agtcttgaactcctggcctcaagtg

SEQ ID NO: 4795405 - DNA, 25 bp, Homo sapien
tgctatgttacccagcctagtcttg

SEQ ID NO: 4795406 - DNA, 25 bp, Homo sapien
gctcctaagtcttaaggctctgtgt

SEQ ID NO: 4795407 - DNA, 25 bp, Homo sapien
ccatggtgtaggcagtgcaatgtct

SEQ ID NO: 4795408 - DNA, 25 bp, Homo sapien
tcattgcatggattctagagttctg

SEQ ID NO: 4795409 - DNA, 25 bp, Homo sapien
taggatgggaataagagcatgtacc

SEQ ID NO: 4795410 - DNA, 25 bp, Homo sapien
ttgtagtgggagtttctagtgtctc

SEQ ID NO: 4795411 - DNA, 25 bp, Homo sapien
tataatgttagctccggactttctg

SEQ ID NO: 4795412 - DNA, 25 bp, Homo sapien
tatgattgtagtgggagtttctagt

SEQ ID NO: 4795413 - DNA, 25 bp, Homo sapien
ccatgcctggcattcactattaaat

SEQ ID NO: 4795414 - DNA, 25 bp, Homo sapien
tgcctggctccaacaactatacaat

SEQ ID NO: 4795415 - DNA, 25 bp, Homo sapien
cctggctccaacaactatacaattc

SEQ ID NO: 4795416 - DNA, 25 bp, Homo sapien
tctccctctgtggcctgggctagag

SEQ ID NO: 4795417 - DNA, 25 bp, Homo sapien
cgtgcctggctccaacaactataca

SEQ ID NO: 4795418 - DNA, 25 bp, Homo sapien
caggatgggcttttcattgaaggta

SEQ ID NO: 4795419 - DNA, 25 bp, Homo sapien
gaaggtatgaattttactccacatt

SEQ ID NO: 4795420 - DNA, 25 bp, Homo sapien
gccaggatgggcttttcattgaagg

SEQ ID NO: 4795421 - DNA, 25 bp, Homo sapien
tgccatggcatagacatcatattcc

SEQ ID NO: 4795422 - DNA, 25 bp, Homo sapien
tgcacgccttgagcatcatgcggtt

SEQ ID NO: 4795423 - DNA, 25 bp, Homo sapien
tagaatgctcatggcctcctaagga

SEQ ID NO: 4795424 - DNA, 25 bp, Homo sapien
cagtcttcatgactcttgtccactg

SEQ ID NO: 4795425 - DNA, 25 bp, Homo sapien
ccaaggactttaattggaggcggct

SEQ ID NO: 4795426 - DNA, 25 bp, Homo sapien
ctgtggagagaatttgtgttcagat

SEQ ID NO: 4795427 - DNA, 25 bp, Homo sapien
aacaacagaagatcttggaccccat

SEQ ID NO: 4795428 - DNA, 25 bp, Homo sapien
tcttggattgtggaagccaacagtg

SEQ ID NO: 4795429 - DNA, 25 bp, Homo sapien
ggatgatgctgttcgaacattcttg

SEQ ID NO: 4795430 - DNA, 25 bp, Homo sapien
cctcgctggtcttgcggcaacaaca

SEQ ID NO: 4795431 - DNA, 25 bp, Homo sapien
ctgtgtgcagaacgcgtatgctctc

SEQ ID NO: 4795432 - DNA, 25 bp, Homo sapien
gggctgtgtgcagaacgcgtatgct

SEQ ID NO: 4795433 - DNA, 25 bp, Homo sapien
accgggctgtgtgcagaacgcgtat

SEQ ID NO: 4795434 - DNA, 25 bp, Homo sapien
tgtgcagaacgcgtatgctctccat

SEQ ID NO: 4795435 - DNA, 25 bp, Homo sapien
caccttgctgtgtaatttcgggccg

SEQ ID NO: 4795436 - DNA, 25 bp, Homo sapien
tggtatggtgaaacctacccgcaga

SEQ ID NO: 4795437 - DNA, 25 bp, Homo sapien
tacccgcagaatgccgttgtaagga

SEQ ID NO: 4795438 - DNA, 25 bp, Homo sapien
tgctttgcagggtatgcggtacaca

SEQ ID NO: 4795439 - DNA, 25 bp, Homo sapien
agtgtccgcctctagagggaagcag

SEQ ID NO: 4795440 - DNA, 25 bp, Homo sapien
tccgcctctagagggaagcaggagc

SEQ ID NO: 4795441 - DNA, 25 bp, Homo sapien
cagtgtccgcctctagagggaagca

SEQ ID NO: 4795442 - DNA, 25 bp, Homo sapien
tgtccgcctctagagggaagcagga

SEQ ID NO: 4795443 - DNA, 25 bp, Homo sapien
ttgcttggtggcacaaggatggctc

SEQ ID NO: 4795444 - DNA, 25 bp, Homo sapien
tcaagaactttaattggaggcagct

SEQ ID NO: 4795445 - DNA, 25 bp, Homo sapien
tagtcttcatgactcctgtccaccg

SEQ ID NO: 4795446 - DNA, 25 bp, Homo sapien
tcccatggtggctttttaggagctg

SEQ ID NO: 4795447 - DNA, 25 bp, Homo sapien
tgaggcatggctggaatggccagtg

SEQ ID NO: 4795448 - DNA, 25 bp, Homo sapien
aggcatggctggaatggccagtgct

SEQ ID NO: 4795449 - DNA, 25 bp, Homo sapien
cctggcagtagcggtttaagtttct

SEQ ID NO: 4795450 - DNA, 25 bp, Homo sapien
gcagtagcggtttaagtttctcttg

SEQ ID NO: 4795451 - DNA, 25 bp, Homo sapien
gatcaggggtgttctcgaaggcaaa

SEQ ID NO: 4795452 - DNA, 25 bp, Homo sapien
gcaaatgggagactgcgttaatgcg

SEQ ID NO: 4795453 - DNA, 25 bp, Homo sapien
cgttaatgcgcttgggattttgtct

SEQ ID NO: 4795454 - DNA, 25 bp, Homo sapien
tttgtctgtcaagctcatccttctg

SEQ ID NO: 4795455 - DNA, 25 bp, Homo sapien
ctggcaatgagaattccacagggtc

SEQ ID NO: 4795456 - DNA, 25 bp, Homo sapien
ggaggcttaggtgagatcacggaag

SEQ ID NO: 4795457 - DNA, 25 bp, Homo sapien
cggaagtgaagatgttttgcaagct

SEQ ID NO: 4795458 - DNA, 25 bp, Homo sapien
taggtgagatcacggaagtgaagat

SEQ ID NO: 4795459 - DNA, 25 bp, Homo sapien
aaggcagtttgggggtatcccagca

SEQ ID NO: 4795460 - DNA, 25 bp, Homo sapien
agagaggccatgcagagtgtcctta

SEQ ID NO: 4795461 - DNA, 25 bp, Homo sapien
cagagtgtccttatctgatacctac

SEQ ID NO: 4795462 - DNA, 25 bp, Homo sapien
ggtttgagtacttagccatccaaca

SEQ ID NO: 4795463 - DNA, 25 bp, Homo sapien
ggtttgactgggaaccttggagtca

SEQ ID NO: 4795464 - DNA, 25 bp, Homo sapien
ggcttgtgctcctgggtttgactgg

SEQ ID NO: 4795465 - DNA, 25 bp, Homo sapien
gactgggaaccttggagtcattgat

SEQ ID NO: 4795466 - DNA, 25 bp, Homo sapien
atggcttgtgctcctgggtttgact

SEQ ID NO: 4795467 - DNA, 25 bp, Homo sapien
ctgcagcataaacagaagatcttca

SEQ ID NO: 4795468 - DNA, 25 bp, Homo sapien
gatcttcaagatcaggttttggtgg

SEQ ID NO: 4795469 - DNA, 25 bp, Homo sapien
gcagcataaacagaagatcttcaag

SEQ ID NO: 4795470 - DNA, 25 bp, Homo sapien
ttcaagatcaggttttggtgggctg

SEQ ID NO: 4795471 - DNA, 25 bp, Homo sapien
tgttggaggcaaaggaatgaggggc

SEQ ID NO: 4795472 - DNA, 25 bp, Homo sapien
ttggaggcaaaggaatgaggggcat

SEQ ID NO: 4795473 - DNA, 25 bp, Homo sapien
ctgttggaggcaaaggaatgagggg

SEQ ID NO: 4795474 - DNA, 25 bp, Homo sapien
gttggaggcaaaggaatgaggggca

SEQ ID NO: 4795475 - DNA, 25 bp, Homo sapien
tgggggtatcattgggtcagcctct

SEQ ID NO: 4795476 - DNA, 25 bp, Homo sapien
gtcagcctctcccaaggcattaata

SEQ ID NO: 4795477 - DNA, 25 bp, Homo sapien
ttccggaatctgaattccagatgcc

SEQ ID NO: 4795478 - DNA, 25 bp, Homo sapien
ggcattaatataatactcctcccct

SEQ ID NO: 4795479 - DNA, 25 bp, Homo sapien
ttgtctgcaggggtgccttgttgaa

SEQ ID NO: 4795480 - DNA, 25 bp, Homo sapien
ggagttgaaacttctactctgccag

SEQ ID NO: 4795481 - DNA, 25 bp, Homo sapien
gaaaggagttgaaacttctactctg

SEQ ID NO: 4795482 - DNA, 25 bp, Homo sapien
gcaggggtgccttgttgaatcagcc

SEQ ID NO: 4795483 - DNA, 25 bp, Homo sapien
caggtctctagtgaccccattgcac

SEQ ID NO: 4795484 - DNA, 25 bp, Homo sapien
gaccccattgcactttgatcagaag

SEQ ID NO: 4795485 - DNA, 25 bp, Homo sapien
gtgaccccattgcactttgatcaga

SEQ ID NO: 4795486 - DNA, 25 bp, Homo sapien
tctagtgaccccattgcactttgat

SEQ ID NO: 4795487 - DNA, 25 bp, Homo sapien
cagagtagacagaaggctgtctgtg

SEQ ID NO: 4795488 - DNA, 25 bp, Homo sapien
agagtagacagaaggctgtctgtga

SEQ ID NO: 4795489 - DNA, 25 bp, Homo sapien
gcagagtagacagaaggctgtctgt

SEQ ID NO: 4795490 - DNA, 25 bp, Homo sapien
ggcagagtagacagaaggctgtctg

SEQ ID NO: 4795491 - DNA, 25 bp, Homo sapien
actggaccacaacagcgaggaggag

SEQ ID NO: 4795492 - DNA, 25 bp, Homo sapien
gatgtttggactggaccacaacagc

SEQ ID NO: 4795493 - DNA, 25 bp, Homo sapien
gctgggatgtttggactggaccaca

SEQ ID NO: 4795494 - DNA, 25 bp, Homo sapien
tttggactggaccacaacagcgagg

SEQ ID NO: 4795495 - DNA, 25 bp, Homo sapien
ctaagaaggctgttgatctggtccc

SEQ ID NO: 4795496 - DNA, 25 bp, Homo sapien
tggtcccccctgttgtcagcatttc

SEQ ID NO: 4795497 - DNA, 25 bp, Homo sapien
tattcttctaagaaggctgttgatc

SEQ ID NO: 4795498 - DNA, 25 bp, Homo sapien
taatcatggtagacatcttcattta

SEQ ID NO: 4795499 - DNA, 25 bp, Homo sapien
gatcttccgtgcagatgataccata

SEQ ID NO: 4795500 - DNA, 25 bp, Homo sapien
tccaccttctggagaggatggtttg

SEQ ID NO: 4795501 - DNA, 25 bp, Homo sapien
atcagatcttccgtgcagatgatac

SEQ ID NO: 4795502 - DNA, 25 bp, Homo sapien
ttcattccaccttctggagaggatg

SEQ ID NO: 4795503 - DNA, 25 bp, Homo sapien
taaccacacttacagattagttcat

SEQ ID NO: 4795504 - DNA, 25 bp, Homo sapien
gccataaccacacttacagattagt

SEQ ID NO: 4795505 - DNA, 25 bp, Homo sapien
accacacttacagattagttcattt

SEQ ID NO: 4795506 - DNA, 25 bp, Homo sapien
tttgccataaccacacttacagatt

SEQ ID NO: 4795507 - DNA, 25 bp, Homo sapien
ccaggataggccatatcacttcctg

SEQ ID NO: 4795508 - DNA, 25 bp, Homo sapien
tccctagctccaggataggccatat

SEQ ID NO: 4795509 - DNA, 25 bp, Homo sapien
tccaggataggccatatcacttcct

SEQ ID NO: 4795510 - DNA, 25 bp, Homo sapien
tagctccaggataggccatatcact

SEQ ID NO: 4795511 - DNA, 25 bp, Homo sapien
cctccctgcgatggctgttgttctg

SEQ ID NO: 4795512 - DNA, 25 bp, Homo sapien
ctgcctccctgcgatggctgttgtt

SEQ ID NO: 4795513 - DNA, 25 bp, Homo sapien
gctgttgttctgtttcccctgctca

SEQ ID NO: 4795514 - DNA, 25 bp, Homo sapien
ctgttgttctgtttcccctgctcac

SEQ ID NO: 4795515 - DNA, 25 bp, Homo sapien
taagcttaaagcctcgcaagggcag

SEQ ID NO: 4795516 - DNA, 25 bp, Homo sapien
tatttacagcgatgtctacatggac

SEQ ID NO: 4795517 - DNA, 25 bp, Homo sapien
tcagtcacaatctgctcacacaggt

SEQ ID NO: 4795518 - DNA, 25 bp, Homo sapien
tttgcttgcttgttatccacgcccc

SEQ ID NO: 4795519 - DNA, 25 bp, Homo sapien
gtgattgaaagaatgaaggactctg

SEQ ID NO: 4795520 - DNA, 25 bp, Homo sapien
ttgaaagaatgaaggactctgcttt

SEQ ID NO: 4795521 - DNA, 25 bp, Homo sapien
ctggtgattgaaagaatgaaggact

SEQ ID NO: 4795522 - DNA, 25 bp, Homo sapien
gattgaaagaatgaaggactctgct

SEQ ID NO: 4795523 - DNA, 25 bp, Homo sapien
tcactcatgtcaattagggagagga

SEQ ID NO: 4795524 - DNA, 25 bp, Homo sapien
acccaagcagaggaggtttgtgctg

SEQ ID NO: 4795525 - DNA, 25 bp, Homo sapien
tcctcaagatgaagggagcacccaa

SEQ ID NO: 4795526 - DNA, 25 bp, Homo sapien
gcttgtctggactaatatctggaag

SEQ ID NO: 4795527 - DNA, 25 bp, Homo sapien
ggcggggagcagtcttggtcctggc

SEQ ID NO: 4795528 - DNA, 25 bp, Homo sapien
gccagatgtggtaccacttgttggg

SEQ ID NO: 4795529 - DNA, 25 bp, Homo sapien
agagccagatgtggtaccacttgtt

SEQ ID NO: 4795530 - DNA, 25 bp, Homo sapien
cagatgtggtaccacttgttgggcg

SEQ ID NO: 4795531 - DNA, 25 bp, Homo sapien
tgtttaatacaaatctggtggttga

SEQ ID NO: 4795532 - DNA, 25 bp, Homo sapien
caaatctggtggttgattgcatttg

SEQ ID NO: 4795533 - DNA, 25 bp, Homo sapien
taatacaaatctggtggttgattgc

SEQ ID NO: 4795534 - DNA, 25 bp, Homo sapien
caggtgtttaatacaaatctggtgg

SEQ ID NO: 4795535 - DNA, 25 bp, Homo sapien
ctctcctctgaggagggtgtttgac

SEQ ID NO: 4795536 - DNA, 25 bp, Homo sapien
tctcctctgaggagggtgtttgact

SEQ ID NO: 4795537 - DNA, 25 bp, Homo sapien
tcaacacattgaattgggccaatta

SEQ ID NO: 4795538 - DNA, 25 bp, Homo sapien
cttcaacacattgaattgggccaat

SEQ ID NO: 4795539 - DNA, 25 bp, Homo sapien
aacacattgaattgggccaattatc

SEQ ID NO: 4795540 - DNA, 25 bp, Homo sapien
tcttcaacacattgaattgggccaa

SEQ ID NO: 4795541 - DNA, 25 bp, Homo sapien
cttctgaagccttttgaatccgatg

SEQ ID NO: 4795542 - DNA, 25 bp, Homo sapien
cacttctgaagccttttgaatccga

SEQ ID NO: 4795543 - DNA, 25 bp, Homo sapien
tcacttctgaagccttttgaatccg

SEQ ID NO: 4795544 - DNA, 25 bp, Homo sapien
tctgaagccttttgaatccgatgac

SEQ ID NO: 4795545 - DNA, 25 bp, Homo sapien
gggagaaccagagaccctgaagctg

SEQ ID NO: 4795546 - DNA, 25 bp, Homo sapien
ctggggagaaccagagaccctgaag

SEQ ID NO: 4795547 - DNA, 25 bp, Homo sapien
gaaccagagaccctgaagctggtgg

SEQ ID NO: 4795548 - DNA, 25 bp, Homo sapien
accagagaccctgaagctggtggtg

SEQ ID NO: 4795549 - DNA, 25 bp, Homo sapien
ccccagagagcccttcagagaacca

SEQ ID NO: 4795550 - DNA, 25 bp, Homo sapien
cagagagcccttcagagaaccataa

SEQ ID NO: 4795551 - DNA, 25 bp, Homo sapien
ccagagagcccttcagagaaccata

SEQ ID NO: 4795552 - DNA, 25 bp, Homo sapien
agagagcccttcagagaaccataaa

SEQ ID NO: 4795553 - DNA, 25 bp, Homo sapien
tgccatgttggttgagatcttgccc

SEQ ID NO: 4795554 - DNA, 25 bp, Homo sapien
ttctctctttttgcgtgccatgttg

SEQ ID NO: 4795555 - DNA, 25 bp, Homo sapien
gttgccctggtggaacgataagcag

SEQ ID NO: 4795556 - DNA, 25 bp, Homo sapien
taagcagacgcccatgagatctgac

SEQ ID NO: 4795557 - DNA, 25 bp, Homo sapien
tcattcgtcccctgaaagagctgct

SEQ ID NO: 4795558 - DNA, 25 bp, Homo sapien
tgctggaaatcgtggtcaaaagggc

SEQ ID NO: 4795559 - DNA, 25 bp, Homo sapien
gaaatcgtggtcaaaagggcctgct

SEQ ID NO: 4795560 - DNA, 25 bp, Homo sapien
gtagcttctgaagagtcattggtac

SEQ ID NO: 4795561 - DNA, 25 bp, Homo sapien
tgtaaggaatccagagtacctcgtt

SEQ ID NO: 4795562 - DNA, 25 bp, Homo sapien
tcgttccagagcatactgattctga

SEQ ID NO: 4795563 - DNA, 25 bp, Homo sapien
ccacgatggtcaaactgtaaggaat

SEQ ID NO: 4795564 - DNA, 25 bp, Homo sapien
aagtcttctactagtggtttattag

SEQ ID NO: 4795565 - DNA, 25 bp, Homo sapien
aagccttaagttccccatgaatgac

SEQ ID NO: 4795566 - DNA, 25 bp, Homo sapien
aaaagccttaagttccccatgaatg

SEQ ID NO: 4795567 - DNA, 25 bp, Homo sapien
aaagccttaagttccccatgaatga

SEQ ID NO: 4795568 - DNA, 25 bp, Homo sapien
agccttaagttccccatgaatgact

SEQ ID NO: 4795569 - DNA, 25 bp, Homo sapien
tgttggacactctctggacaaatgg

SEQ ID NO: 4795570 - DNA, 25 bp, Homo sapien
tacactgtgagagtaggacttgcct

SEQ ID NO: 4795571 - DNA, 25 bp, Homo sapien
tctggcactggccacgaagggtgac

SEQ ID NO: 4795572 - DNA, 25 bp, Homo sapien
tatccaggcaagtgctgccacgtga

SEQ ID NO: 4795573 - DNA, 25 bp, Homo sapien
ggaagacagcttcctagctctagat

SEQ ID NO: 4795574 - DNA, 25 bp, Homo sapien
caatggccgtgccttgtgcacagtg

SEQ ID NO: 4795575 - DNA, 25 bp, Homo sapien
aaaacacttctaggactctgggcca

SEQ ID NO: 4795576 - DNA, 25 bp, Homo sapien
tgtaggtccagctgccaatatgatg

SEQ ID NO: 4795577 - DNA, 25 bp, Homo sapien
gtctgactgtgcctttccgtaaaaa

SEQ ID NO: 4795578 - DNA, 25 bp, Homo sapien
gaatctgcagacagtagaggtgctg

SEQ ID NO: 4795579 - DNA, 25 bp, Homo sapien
gatccatgtgcctaaagtttacgaa

SEQ ID NO: 4795580 - DNA, 25 bp, Homo sapien
agttctgacatgagccctattagga

SEQ ID NO: 4795581 - DNA, 25 bp, Homo sapien
tataataccgaaatgctcagatggc

SEQ ID NO: 4795582 - DNA, 25 bp, Homo sapien
tcctgcccttgacatattagcgtag

SEQ ID NO: 4795583 - DNA, 25 bp, Homo sapien
gcatttataatacgggccaagggtc

SEQ ID NO: 4795584 - DNA, 25 bp, Homo sapien
tctatgaagactctggtgagccagg

SEQ ID NO: 4795585 - DNA, 25 bp, Homo sapien
tagctaaaccgttgtccctgtggaa

SEQ ID NO: 4795586 - DNA, 25 bp, Homo sapien
gaaaattaggaactcggtggcagag

SEQ ID NO: 4795587 - DNA, 25 bp, Homo sapien
gaacaataactggaccactggtgac

SEQ ID NO: 4795588 - DNA, 25 bp, Homo sapien
cactggtgaccattgtatagcagga

SEQ ID NO: 4795589 - DNA, 25 bp, Homo sapien
tacttcgcatacagacttggtcccc

SEQ ID NO: 4795590 - DNA, 25 bp, Homo sapien
cactcagaggtcatcccacggaatg

SEQ ID NO: 4795591 - DNA, 25 bp, Homo sapien
aatgaagtagtctcccgactctggg

SEQ ID NO: 4795592 - DNA, 25 bp, Homo sapien
tcattcggttcttggtgaaggccag

SEQ ID NO: 4795593 - DNA, 25 bp, Homo sapien
aaagtgctgtgtgggagtttgtctc

SEQ ID NO: 4795594 - DNA, 25 bp, Homo sapien
tgctgtgtgggagtttgtctcacaa

SEQ ID NO: 4795595 - DNA, 25 bp, Homo sapien
ctagttcatgttcccagtgcagagc

SEQ ID NO: 4795596 - DNA, 25 bp, Homo sapien
ttttaaagtgctgtgtgggagtttg

SEQ ID NO: 4795597 - DNA, 25 bp, Homo sapien
tacctgagacctatgatcctggaga

SEQ ID NO: 4795598 - DNA, 25 bp, Homo sapien
gaattacttgcagctccgagttgga

SEQ ID NO: 4795599 - DNA, 25 bp, Homo sapien
taacatcttggactagtgacctggg

SEQ ID NO: 4795600 - DNA, 25 bp, Homo sapien
tttacgtatgacaaggccaggcacc

SEQ ID NO: 4795601 - DNA, 25 bp, Homo sapien
gcttatctccgtctgctctaagagg

SEQ ID NO: 4795602 - DNA, 25 bp, Homo sapien
ccttggcttatctccgtctgctcta

SEQ ID NO: 4795603 - DNA, 25 bp, Homo sapien
tgcccttggcttatctccgtctgct

SEQ ID NO: 4795604 - DNA, 25 bp, Homo sapien
gtgtgcccttggcttatctccgtct

SEQ ID NO: 4795605 - DNA, 25 bp, Homo sapien
gtgctttgtatgagacaaagggtga

SEQ ID NO: 4795606 - DNA, 25 bp, Homo sapien
caaagggtgactgaaatgaagacgg

SEQ ID NO: 4795607 - DNA, 25 bp, Homo sapien
gaagacggccctttgtgagttgcat

SEQ ID NO: 4795608 - DNA, 25 bp, Homo sapien
ctgaaatgaagacggccctttgtga

SEQ ID NO: 4795609 - DNA, 25 bp, Homo sapien
gatgtgaaggtgcaaactcctgtcc

SEQ ID NO: 4795610 - DNA, 25 bp, Homo sapien
ctgatgtgaaggtgcaaactcctgt

SEQ ID NO: 4795611 - DNA, 25 bp, Homo sapien
gctgatgtgaaggtgcaaactcctg

SEQ ID NO: 4795612 - DNA, 25 bp, Homo sapien
tgatgtgaaggtgcaaactcctgtc

SEQ ID NO: 4795613 - DNA, 25 bp, Homo sapien
ggctcaacaggacatgggagtagtt

SEQ ID NO: 4795614 - DNA, 25 bp, Homo sapien
gatgtggtgtcgtatgtatggatac

SEQ ID NO: 4795615 - DNA, 25 bp, Homo sapien
ggatacgacatgtaaggaggctcaa

SEQ ID NO: 4795616 - DNA, 25 bp, Homo sapien
ctcaataccctgcatctgtgatgtg

SEQ ID NO: 4795617 - DNA, 25 bp, Homo sapien
aaaaatccgttttatatctggcata

SEQ ID NO: 4795618 - DNA, 25 bp, Homo sapien
tcaatgaccgtgttagttatgtaat

SEQ ID NO: 4795619 - DNA, 25 bp, Homo sapien
tgttaacagtggtcagctataagag

SEQ ID NO: 4795620 - DNA, 25 bp, Homo sapien
tataagagttatgggtaatgatgac

SEQ ID NO: 4795621 - DNA, 25 bp, Homo sapien
tgagagcccagcgtgcgctgctgct

SEQ ID NO: 4795622 - DNA, 25 bp, Homo sapien
ccaaagctcagtcccagatcctcgg

SEQ ID NO: 4795623 - DNA, 25 bp, Homo sapien
aaggaaggggagcaacaccaggcag

SEQ ID NO: 4795624 - DNA, 25 bp, Homo sapien
ctgacaagcaggtatgtggtgagtc

SEQ ID NO: 4795625 - DNA, 25 bp, Homo sapien
gctcctggaggcacctctgactcct

SEQ ID NO: 4795626 - DNA, 25 bp, Homo sapien
aatagaagaccagctctcacagtgg

SEQ ID NO: 4795627 - DNA, 25 bp, Homo sapien
tcacagtgggtgacttaatcactca

SEQ ID NO: 4795628 - DNA, 25 bp, Homo sapien
agagagagcccccattaaatagaag

SEQ ID NO: 4795629 - DNA, 25 bp, Homo sapien
tggagttggtgctcagttcttcatt

SEQ ID NO: 4795630 - DNA, 25 bp, Homo sapien
caatcagagagcctgatgtggagtt

SEQ ID NO: 4795631 - DNA, 25 bp, Homo sapien
cctgatgtggagttggtgctcagtt

SEQ ID NO: 4795632 - DNA, 25 bp, Homo sapien
cacctggcaatcagagagcctgatg

SEQ ID NO: 4795633 - DNA, 25 bp, Homo sapien
ggccgtcagctaaatttttactgaa

SEQ ID NO: 4795634 - DNA, 25 bp, Homo sapien
tgaaatcatggactccaactttggg

SEQ ID NO: 4795635 - DNA, 25 bp, Homo sapien
agacatttgagaggtcatttggctc

SEQ ID NO: 4795636 - DNA, 25 bp, Homo sapien
tggctctaccgcctgcattctctgt

SEQ ID NO: 4795637 - DNA, 25 bp, Homo sapien
tatttacaaaagtaggcagagtcgc

SEQ ID NO: 4795638 - DNA, 25 bp, Homo sapien
tatgtcggtttaggcccagagtgac

SEQ ID NO: 4795639 - DNA, 25 bp, Homo sapien
agcagtgacagtgacccagggtaga

SEQ ID NO: 4795640 - DNA, 25 bp, Homo sapien
tgtctgcagcaaccagcatcaaggt

SEQ ID NO: 4795641 - DNA, 25 bp, Homo sapien
ggaggtgacattgaaatggaaatca

SEQ ID NO: 4795642 - DNA, 25 bp, Homo sapien
caatgtgatttgatcatagagcaca

SEQ ID NO: 4795643 - DNA, 25 bp, Homo sapien
taggagttaatcaggcaaaagagtg

SEQ ID NO: 4795644 - DNA, 25 bp, Homo sapien
tgacaggagtatcctaggcagaagg

SEQ ID NO: 4795645 - DNA, 25 bp, Homo sapien
ggattgtaaactgacctggcactca

SEQ ID NO: 4795646 - DNA, 25 bp, Homo sapien
tccaggaagagagctagatccaggg

SEQ ID NO: 4795647 - DNA, 25 bp, Homo sapien
gagtgacaatcttccatcgcagagt

SEQ ID NO: 4795648 - DNA, 25 bp, Homo sapien
ggcactcactggcacttgggatatg

SEQ ID NO: 4795649 - DNA, 25 bp, Homo sapien
gaaaccactcacagtgcaaaagtca

SEQ ID NO: 4795650 - DNA, 25 bp, Homo sapien
aaaagtcaggtacctctgctcagag

SEQ ID NO: 4795651 - DNA, 25 bp, Homo sapien
ggctggttaaccctcaagagtaaca

SEQ ID NO: 4795652 - DNA, 25 bp, Homo sapien
gatgtaccccttgtgtctttaggtg

SEQ ID NO: 4795653 - DNA, 25 bp, Homo sapien
ttttttagccttgagtctcaaagtc

SEQ ID NO: 4795654 - DNA, 25 bp, Homo sapien
tagccttgagtctcaaagtctgttt

SEQ ID NO: 4795655 - DNA, 25 bp, Homo sapien
agcaagattcatttgtcctatgcag

SEQ ID NO: 4795656 - DNA, 25 bp, Homo sapien
gttagtgtgtgactcaaatgccagc

SEQ ID NO: 4795657 - DNA, 25 bp, Homo sapien
acaagatcagcctcctagtgccaga

SEQ ID NO: 4795658 - DNA, 25 bp, Homo sapien
tgtaacctagagaaggaggactgcc

SEQ ID NO: 4795659 - DNA, 25 bp, Homo sapien
tctaactggaatagagtcaggcctc

SEQ ID NO: 4795660 - DNA, 25 bp, Homo sapien
tactgtatggtagagaggcgctttc

SEQ ID NO: 4795661 - DNA, 25 bp, Homo sapien
actgatatggtggtgttgacctgca

SEQ ID NO: 4795662 - DNA, 25 bp, Homo sapien
ttgacctgcaggtaatccagcaaga

SEQ ID NO: 4795663 - DNA, 25 bp, Homo sapien
gatggacaacacattctcaagagga

SEQ ID NO: 4795664 - DNA, 25 bp, Homo sapien
gtttcgtttgcattccagactcaca

SEQ ID NO: 4795665 - DNA, 25 bp, Homo sapien
ggatcaccagattcccatcctgata

SEQ ID NO: 4795666 - DNA, 25 bp, Homo sapien
gattcccatcctgatatctgactcc

SEQ ID NO: 4795667 - DNA, 25 bp, Homo sapien
ccatcctgatatctgactccatgga

SEQ ID NO: 4795668 - DNA, 25 bp, Homo sapien
cagggaattggatcaccagattccc

SEQ ID NO: 4795669 - DNA, 25 bp, Homo sapien
gaggtaggcccatgacttcttgaat

SEQ ID NO: 4795670 - DNA, 25 bp, Homo sapien
tggaggtaggcccatgacttcttga

SEQ ID NO: 4795671 - DNA, 25 bp, Homo sapien
cttggaggtaggcccatgacttctt

SEQ ID NO: 4795672 - DNA, 25 bp, Homo sapien
aggtaggcccatgacttcttgaatg

SEQ ID NO: 4795673 - DNA, 25 bp, Homo sapien
ttcgcctgcaggatcaggcccaagc

SEQ ID NO: 4795674 - DNA, 25 bp, Homo sapien
tcgcctgcaggatcaggcccaagct

SEQ ID NO: 4795675 - DNA, 25 bp, Homo sapien
ttctgactcctttcgcctgcaggat

SEQ ID NO: 4795676 - DNA, 25 bp, Homo sapien
tcaaacccatgcgtgtggccctctg

SEQ ID NO: 4795677 - DNA, 25 bp, Homo sapien
acccatgcgtgtggccctctgtgac

SEQ ID NO: 4795678 - DNA, 25 bp, Homo sapien
cgcaggtgccgaagaagtgatagag

SEQ ID NO: 4795679 - DNA, 25 bp, Homo sapien
atgcgtgtggccctctgtgaccctg

SEQ ID NO: 4795680 - DNA, 25 bp, Homo sapien
gcactggaaggatttgcggtactga

SEQ ID NO: 4795681 - DNA, 25 bp, Homo sapien
gcggtactgagttttcccagatggt

SEQ ID NO: 4795682 - DNA, 25 bp, Homo sapien
aaggggatatgtagacttggccagc

SEQ ID NO: 4795683 - DNA, 25 bp, Homo sapien
gaaggatttgcggtactgagttttc

SEQ ID NO: 4795684 - DNA, 25 bp, Homo sapien
tctgaggctagtagagacgacgtgt

SEQ ID NO: 4795685 - DNA, 25 bp, Homo sapien
tatgaccttggacgagatacttcac

SEQ ID NO: 4795686 - DNA, 25 bp, Homo sapien
gaatggcttctccaataccttgatg

SEQ ID NO: 4795687 - DNA, 25 bp, Homo sapien
tcatcgatgttaactgaactcggca

SEQ ID NO: 4795688 - DNA, 25 bp, Homo sapien
tttacacctaattccaagatcttac

SEQ ID NO: 4795689 - DNA, 25 bp, Homo sapien
atttacacctaattccaagatctta

SEQ ID NO: 4795690 - DNA, 25 bp, Homo sapien
catttacacctaattccaagatctt

SEQ ID NO: 4795691 - DNA, 25 bp, Homo sapien
cctttgagggggacgttgtcaggtg

SEQ ID NO: 4795692 - DNA, 25 bp, Homo sapien
ctcctttgagggggacgttgtcagg

SEQ ID NO: 4795693 - DNA, 25 bp, Homo sapien
tgagggggacgttgtcaggtgagtt

SEQ ID NO: 4795694 - DNA, 25 bp, Homo sapien
ggggacgttgtcaggtgagttggga

SEQ ID NO: 4795695 - DNA, 25 bp, Homo sapien
tgacactttatataccacggctact

SEQ ID NO: 4795696 - DNA, 25 bp, Homo sapien
caccgcactgtacaatcagattgca

SEQ ID NO: 4795697 - DNA, 25 bp, Homo sapien
ttcctggtctaagaaatcacagcac

SEQ ID NO: 4795698 - DNA, 25 bp, Homo sapien
cacggctactattaacatggcaagc

SEQ ID NO: 4795699 - DNA, 25 bp, Homo sapien
tagctgcggctcgtggtccccaggt

SEQ ID NO: 4795700 - DNA, 25 bp, Homo sapien
agtggctgtggtcaaatagaaatag

SEQ ID NO: 4795701 - DNA, 25 bp, Homo sapien
gtggccaccgtgaagacaaggcaca

SEQ ID NO: 4795702 - DNA, 25 bp, Homo sapien
tctgaacgaccaacaccataatagt

SEQ ID NO: 4795703 - DNA, 25 bp, Homo sapien
gggccattccgttgagtgcttgctg

SEQ ID NO: 4795704 - DNA, 25 bp, Homo sapien
aggggccattccgttgagtgcttgc

SEQ ID NO: 4795705 - DNA, 25 bp, Homo sapien
attccgttgagtgcttgctgcagcc

SEQ ID NO: 4795706 - DNA, 25 bp, Homo sapien
ccattccgttgagtgcttgctgcag

SEQ ID NO: 4795707 - DNA, 25 bp, Homo sapien
atcacaccttatctctcttcatctg

SEQ ID NO: 4795708 - DNA, 25 bp, Homo sapien
tccaagaaggattctccccctgaat

SEQ ID NO: 4795709 - DNA, 25 bp, Homo sapien
tgattcagttctgggcccatctctg

SEQ ID NO: 4795710 - DNA, 25 bp, Homo sapien
aaactcttctctgggggcgtgaggc

SEQ ID NO: 4795711 - DNA, 25 bp, Homo sapien
tgttcagcctctttgatcaaagtgg

SEQ ID NO: 4795712 - DNA, 25 bp, Homo sapien
cctctggtgggcacggacagtgagt

SEQ ID NO: 4795713 - DNA, 25 bp, Homo sapien
acagtgagtgggtagcaagggctct

SEQ ID NO: 4795714 - DNA, 25 bp, Homo sapien
taattaaggtgggaacgaggcaagc

SEQ ID NO: 4795715 - DNA, 25 bp, Homo sapien
tatgcagggttgaccttcaatctat

SEQ ID NO: 4795716 - DNA, 25 bp, Homo sapien
tgcagggttgaccttcaatctatgc

SEQ ID NO: 4795717 - DNA, 25 bp, Homo sapien
cagggttgaccttcaatctatgctt

SEQ ID NO: 4795718 - DNA, 25 bp, Homo sapien
ggttgaccttcaatctatgcttcat

SEQ ID NO: 4795719 - DNA, 25 bp, Homo sapien
tcataatggataaggccagcaggca

SEQ ID NO: 4795720 - DNA, 25 bp, Homo sapien
cataatggataaggccagcaggcag

SEQ ID NO: 4795721 - DNA, 25 bp, Homo sapien
aggcagctgtaacagtggcactcag

SEQ ID NO: 4795722 - DNA, 25 bp, Homo sapien
gcagctgtaacagtggcactcagtg

SEQ ID NO: 4795723 - DNA, 25 bp, Homo sapien
gcacttaatatacaccgggtaccat

SEQ ID NO: 4795724 - DNA, 25 bp, Homo sapien
ctgaaatgagaagtatgagtgtccc

SEQ ID NO: 4795725 - DNA, 25 bp, Homo sapien
gcccatgtgtggtaacaatacttac

SEQ ID NO: 4795726 - DNA, 25 bp, Homo sapien
gagccaagaattgaactcaggcagt

SEQ ID NO: 4795727 - DNA, 25 bp, Homo sapien
ccctcccacttgaccactatcccta

SEQ ID NO: 4795728 - DNA, 25 bp, Homo sapien
tcctatcccaacattccccgctttg

SEQ ID NO: 4795729 - DNA, 25 bp, Homo sapien
cactatccctacttacctttcctat

SEQ ID NO: 4795730 - DNA, 25 bp, Homo sapien
tgttcaaatgattggctttggtgaa

SEQ ID NO: 4795731 - DNA, 25 bp, Homo sapien
acaatcaggtactgtccagaaatgt

SEQ ID NO: 4795732 - DNA, 25 bp, Homo sapien
caatcaggtactgtccagaaatgtt

SEQ ID NO: 4795733 - DNA, 25 bp, Homo sapien
aatcaggtactgtccagaaatgttt

SEQ ID NO: 4795734 - DNA, 25 bp, Homo sapien
tacaatcaggtactgtccagaaatg

SEQ ID NO: 4795735 - DNA, 25 bp, Homo sapien
atccttaaaatggaaacagtattgc

SEQ ID NO: 4795736 - DNA, 25 bp, Homo sapien
tctggtttctgttgtatgaaatgta

SEQ ID NO: 4795737 - DNA, 25 bp, Homo sapien
aatggaaacagtattgcttttctgg

SEQ ID NO: 4795738 - DNA, 25 bp, Homo sapien
ccttaaaatggaaacagtattgctt

SEQ ID NO: 4795739 - DNA, 25 bp, Homo sapien
tcccagagccacctaagagaagtaa

SEQ ID NO: 4795740 - DNA, 25 bp, Homo sapien
gcttcatgtaaaatacggctggttc

SEQ ID NO: 4795741 - DNA, 25 bp, Homo sapien
aaaactattgcgatgttgtcactgg

SEQ ID NO: 4795742 - DNA, 25 bp, Homo sapien
agtaaaaaactattgcgatgttgtc

SEQ ID NO: 4795743 - DNA, 25 bp, Homo sapien
gttggagactgatgtctttggtgca

SEQ ID NO: 4795744 - DNA, 25 bp, Homo sapien
ccatggtcagctttgactctcacca

SEQ ID NO: 4795745 - DNA, 25 bp, Homo sapien
ccgttggccccagggatccatggtc

SEQ ID NO: 4795746 - DNA, 25 bp, Homo sapien
gtgtggaccgatggttgggctggtt

SEQ ID NO: 4795747 - DNA, 25 bp, Homo sapien
tggcccttccagtggaaccagttaa

SEQ ID NO: 4795748 - DNA, 25 bp, Homo sapien
ctggattgagtgttcgtggcccttc

SEQ ID NO: 4795749 - DNA, 25 bp, Homo sapien
cccgtttgcgcctgccttcaagatt

SEQ ID NO: 4795750 - DNA, 25 bp, Homo sapien
tttctgaagttgcttggtctcagct

SEQ ID NO: 4795751 - DNA, 25 bp, Homo sapien
tgtaattcacgagattcctatggag

SEQ ID NO: 4795752 - DNA, 25 bp, Homo sapien
tttggtatggaatagcagaacgaac

SEQ ID NO: 4795753 - DNA, 25 bp, Homo sapien
gccgtccttaggaataggttctgaa

SEQ ID NO: 4795754 - DNA, 25 bp, Homo sapien
cagaacgaacagctcaacaaaacac

SEQ ID NO: 4795755 - DNA, 25 bp, Homo sapien
tgagtatggtagtccaacagcttgg

SEQ ID NO: 4795756 - DNA, 25 bp, Homo sapien
tactgtggtgggcactaaagccaga

SEQ ID NO: 4795757 - DNA, 25 bp, Homo sapien
ggcaaatccgcttgtaattactcag

SEQ ID NO: 4795758 - DNA, 25 bp, Homo sapien
gtctgcagatggtagagtcaatcca

SEQ ID NO: 4795759 - DNA, 25 bp, Homo sapien
cacaggactgctgtcaagaaatgtc

SEQ ID NO: 4795760 - DNA, 25 bp, Homo sapien
taaggtctacacttaaggtcgcagg

SEQ ID NO: 4795761 - DNA, 25 bp, Homo sapien
ttcctgcacagggtaaaaatgataa

SEQ ID NO: 4795762 - DNA, 25 bp, Homo sapien
catttgctagcagttaattagggca

SEQ ID NO: 4795763 - DNA, 25 bp, Homo sapien
ggttattgtccccatatctccccat

SEQ ID NO: 4795764 - DNA, 25 bp, Homo sapien
ggttgacacggtgacagttcctgta

SEQ ID NO: 4795765 - DNA, 25 bp, Homo sapien
gaaagcccctttgtaggacagagca

SEQ ID NO: 4795766 - DNA, 25 bp, Homo sapien
gcacagttggtgatggctgaatctg

SEQ ID NO: 4795767 - DNA, 25 bp, Homo sapien
cagaaaatatggacctgagaaatct

SEQ ID NO: 4795768 - DNA, 25 bp, Homo sapien
gctgaacttgtcatagacagcaaag

SEQ ID NO: 4795769 - DNA, 25 bp, Homo sapien
ggagctcgtactgcccctgggctgt

SEQ ID NO: 4795770 - DNA, 25 bp, Homo sapien
gctgtctccccatggtcccgcaggt

SEQ ID NO: 4795771 - DNA, 25 bp, Homo sapien
agtcttggcatctcccacgctgaac

SEQ ID NO: 4795772 - DNA, 25 bp, Homo sapien
tgccttccagttttggtagaagttc

SEQ ID NO: 4795773 - DNA, 25 bp, Homo sapien
tccagttttggtagaagttctcgcg

SEQ ID NO: 4795774 - DNA, 25 bp, Homo sapien
gtccgtttttgcgtctcaggaacac

SEQ ID NO: 4795775 - DNA, 25 bp, Homo sapien
agaagttctcgcgtccgtttttgcg

SEQ ID NO: 4795776 - DNA, 25 bp, Homo sapien
tgctatgtaactttgggtggtcacc

SEQ ID NO: 4795777 - DNA, 25 bp, Homo sapien
gagcatcaggctccattctgtccat

SEQ ID NO: 4795778 - DNA, 25 bp, Homo sapien
ctataaacatatcgatgaatctggg

SEQ ID NO: 4795779 - DNA, 25 bp, Homo sapien
gggtgtacttaagctattgcaggaa

SEQ ID NO: 4795780 - DNA, 25 bp, Homo sapien
tcagccttatcaccattcagataaa

SEQ ID NO: 4795781 - DNA, 25 bp, Homo sapien
tagaggccagaggtcgtgtctccat

SEQ ID NO: 4795782 - DNA, 25 bp, Homo sapien
agcattgcttgggagcagtccttgg

SEQ ID NO: 4795783 - DNA, 25 bp, Homo sapien
tcacagaagacttccagcgcctcag

SEQ ID NO: 4795784 - DNA, 25 bp, Homo sapien
tcctcaggggcccattgagtgcctg

SEQ ID NO: 4795785 - DNA, 25 bp, Homo sapien
gctcaggtctgccaggctgtaggag

SEQ ID NO: 4795786 - DNA, 25 bp, Homo sapien
gtctggatcatattgctcctcaggg

SEQ ID NO: 4795787 - DNA, 25 bp, Homo sapien
ctgtaggaggtggtatctggaccca

SEQ ID NO: 4795788 - DNA, 25 bp, Homo sapien
gcaggtaaccggtgactgatgcccg

SEQ ID NO: 4795789 - DNA, 25 bp, Homo sapien
tcgccaggtaaggagggcagtttcc

SEQ ID NO: 4795790 - DNA, 25 bp, Homo sapien
ctcagtagcagtcaagtctcttgga

SEQ ID NO: 4795791 - DNA, 25 bp, Homo sapien
ggcagtttccgactgaacctcagta

SEQ ID NO: 4795792 - DNA, 25 bp, Homo sapien
tgcctggaacgtggatcattaaata

SEQ ID NO: 4795793 - DNA, 25 bp, Homo sapien
gtttccctgcttgctatagtttgta

SEQ ID NO: 4795794 - DNA, 25 bp, Homo sapien
gctctcaatgtatagaaacctaaca

SEQ ID NO: 4795795 - DNA, 25 bp, Homo sapien
cattaaatactaggtttagggccag

SEQ ID NO: 4795796 - DNA, 25 bp, Homo sapien
gacaccgtgcgtgtaatttctggca

SEQ ID NO: 4795797 - DNA, 25 bp, Homo sapien
gattctcagtgtgtattccgtggca

SEQ ID NO: 4795798 - DNA, 25 bp, Homo sapien
gagcatactccactgtgttcccgga

SEQ ID NO: 4795799 - DNA, 25 bp, Homo sapien
cttggcagtgatggttgagctcttc

SEQ ID NO: 4795800 - DNA, 25 bp, Homo sapien
tcgaacatcgaaactttcagtgacc

SEQ ID NO: 4795801 - DNA, 25 bp, Homo sapien
ctccttcgaacatcgaaactttcag

SEQ ID NO: 4795802 - DNA, 25 bp, Homo sapien
ccttcgaacatcgaaactttcagtg

SEQ ID NO: 4795803 - DNA, 25 bp, Homo sapien
ttcgaacatcgaaactttcagtgac

SEQ ID NO: 4795804 - DNA, 25 bp, Homo sapien
agatgacataactgtccacagtggc

SEQ ID NO: 4795805 - DNA, 25 bp, Homo sapien
tgtgtaggagatgacataactgtcc

SEQ ID NO: 4795806 - DNA, 25 bp, Homo sapien
taggagatgacataactgtccacag

SEQ ID NO: 4795807 - DNA, 25 bp, Homo sapien
cctgtgtaggagatgacataactgt

SEQ ID NO: 4795808 - DNA, 25 bp, Homo sapien
tcaccaggccagatgggccatccag

SEQ ID NO: 4795809 - DNA, 25 bp, Homo sapien
accaggccagatgggccatccagag

SEQ ID NO: 4795810 - DNA, 25 bp, Homo sapien
tgtcaccaggccagatgggccatcc

SEQ ID NO: 4795811 - DNA, 25 bp, Homo sapien
ttggctgtcaccaggccagatgggc

SEQ ID NO: 4795812 - DNA, 25 bp, Homo sapien
gtctgagtcttggttccgtccacag

SEQ ID NO: 4795813 - DNA, 25 bp, Homo sapien
gatgatgctgacaaggtactccacg

SEQ ID NO: 4795814 - DNA, 25 bp, Homo sapien
aaagcccttcatggcgatgatgctg

SEQ ID NO: 4795815 - DNA, 25 bp, Homo sapien
caggtatgagtttcaccagcctggt

SEQ ID NO: 4795816 - DNA, 25 bp, Homo sapien
taatccggaagctctccacttgggc

SEQ ID NO: 4795817 - DNA, 25 bp, Homo sapien
gacagtagccgaattttcagtgatg

SEQ ID NO: 4795818 - DNA, 25 bp, Homo sapien
cagctgacagtagccgaattttcag

SEQ ID NO: 4795819 - DNA, 25 bp, Homo sapien
tcctgtaatgggcacataggtaatc

SEQ ID NO: 4795820 - DNA, 25 bp, Homo sapien
attattattattacaaagagtcata

SEQ ID NO: 4795821 - DNA, 25 bp, Homo sapien
ttattattacaaagagtcatattat

SEQ ID NO: 4795822 - DNA, 25 bp, Homo sapien
tattattacaaagagtcatattatt

SEQ ID NO: 4795823 - DNA, 25 bp, Homo sapien
tattattattacaaagagtcatatt

SEQ ID NO: 4795824 - DNA, 25 bp, Homo sapien
gagccatcactctgggcctaagagt

SEQ ID NO: 4795825 - DNA, 25 bp, Homo sapien
agccatcactctgggcctaagagtc

SEQ ID NO: 4795826 - DNA, 25 bp, Homo sapien
tgagccatcactctgggcctaagag

SEQ ID NO: 4795827 - DNA, 25 bp, Homo sapien
ttgaaagagtcaggatcagagcgcc

SEQ ID NO: 4795828 - DNA, 25 bp, Homo sapien
taaactccaaggacactctaggtgc

SEQ ID NO: 4795829 - DNA, 25 bp, Homo sapien
cttggtatagctcgaacatttggcc

SEQ ID NO: 4795830 - DNA, 25 bp, Homo sapien
cattaatggcaacgtgaatagctct

SEQ ID NO: 4795831 - DNA, 25 bp, Homo sapien
tgagacctgttatgtccctggtacg

SEQ ID NO: 4795832 - DNA, 25 bp, Homo sapien
caatttcgtattcagtagcctctct

SEQ ID NO: 4795833 - DNA, 25 bp, Homo sapien
gcactgactgtctgggatcgccttc

SEQ ID NO: 4795834 - DNA, 25 bp, Homo sapien
cagaaggttgtcaacttccggttcg

SEQ ID NO: 4795835 - DNA, 25 bp, Homo sapien
ctagagggagagaaaatggtgggag

SEQ ID NO: 4795836 - DNA, 25 bp, Homo sapien
ggagaaggaggaaagacaacatcat

SEQ ID NO: 4795837 - DNA, 25 bp, Homo sapien
gagaaggaggaaagacaacatcatt

SEQ ID NO: 4795838 - DNA, 25 bp, Homo sapien
aaggaggaaagacaacatcatttac

SEQ ID NO: 4795839 - DNA, 25 bp, Homo sapien
gatgccccggctttcagagatagaa

SEQ ID NO: 4795840 - DNA, 25 bp, Homo sapien
gggtatcaatatgtagtgatgcccc

SEQ ID NO: 4795841 - DNA, 25 bp, Homo sapien
gcaatcttctctccagtaggggtat

SEQ ID NO: 4795842 - DNA, 25 bp, Homo sapien
tcaatatgtagtgatgccccggctt

SEQ ID NO: 4795843 - DNA, 25 bp, Homo sapien
tctaaaagcaattcagtaaatccac

SEQ ID NO: 4795844 - DNA, 25 bp, Homo sapien
taacaagtccagtagagtcaggaga

SEQ ID NO: 4795845 - DNA, 25 bp, Homo sapien
tggcccgtcccacatattattaaat

SEQ ID NO: 4795846 - DNA, 25 bp, Homo sapien
cattcaatacaagtcaagcatatgt

SEQ ID NO: 4795847 - DNA, 25 bp, Homo sapien
gagctgctcatgatgatactgctga

SEQ ID NO: 4795848 - DNA, 25 bp, Homo sapien
catgatgatactgctgattacattc

SEQ ID NO: 4795849 - DNA, 25 bp, Homo sapien
tctgtagagctgctcatgatgatac

SEQ ID NO: 4795850 - DNA, 25 bp, Homo sapien
agtgcccatcccctgcaagaccttt

SEQ ID NO: 4795851 - DNA, 25 bp, Homo sapien
tcttagtgctgtttcactaaagaag

SEQ ID NO: 4795852 - DNA, 25 bp, Homo sapien
cactaaagaaggctcctacccttga

SEQ ID NO: 4795853 - DNA, 25 bp, Homo sapien
tttgctttgttcttagtgctgtttc

SEQ ID NO: 4795854 - DNA, 25 bp, Homo sapien
tcactaaagaaggctcctacccttg

SEQ ID NO: 4795855 - DNA, 25 bp, Homo sapien
ggttttccaatgacgagcccactgg

SEQ ID NO: 4795856 - DNA, 25 bp, Homo sapien
tgttaaagtcatggcgatccggtag

SEQ ID NO: 4795857 - DNA, 25 bp, Homo sapien
ggacccagggtttcatcttgcattg

SEQ ID NO: 4795858 - DNA, 25 bp, Homo sapien
gaaaagccgtgcagttaaagatcct

SEQ ID NO: 4795859 - DNA, 25 bp, Homo sapien
catagccaatgccagttatgaggcc

SEQ ID NO: 4795860 - DNA, 25 bp, Homo sapien
tgccatccaggaaactgtgaacccg

SEQ ID NO: 4795861 - DNA, 25 bp, Homo sapien
tatgaggcctctaagctccagcttc

SEQ ID NO: 4795862 - DNA, 25 bp, Homo sapien
gaatccaccaccgttactagaaagc

SEQ ID NO: 4795863 - DNA, 25 bp, Homo sapien
tgatttctcaggtgctaaagggcct

SEQ ID NO: 4795864 - DNA, 25 bp, Homo sapien
gatggcaatttagaccctgggagag

SEQ ID NO: 4795865 - DNA, 25 bp, Homo sapien
tgaaaatcagatggcaaagtccgtc

SEQ ID NO: 4795866 - DNA, 25 bp, Homo sapien
tcttctgttatgtgggaggtcctgc

SEQ ID NO: 4795867 - DNA, 25 bp, Homo sapien
gagcttgctttgcatctcctgagac

SEQ ID NO: 4795868 - DNA, 25 bp, Homo sapien
gcaaaaagcccagcttgagtggtcc

SEQ ID NO: 4795869 - DNA, 25 bp, Homo sapien
tgagcgtcactcacattgataacaa

SEQ ID NO: 4795870 - DNA, 25 bp, Homo sapien
taaagattagcgtgcccaactgtgg

SEQ ID NO: 4795871 - DNA, 25 bp, Homo sapien
gaccatcagggtctgagcacgctgc

SEQ ID NO: 4795872 - DNA, 25 bp, Homo sapien
tggtgatgacagagctgcgagacac

SEQ ID NO: 4795873 - DNA, 25 bp, Homo sapien
tgcccgccaatcagcccatgaaggt

SEQ ID NO: 4795874 - DNA, 25 bp, Homo sapien
aaggtgggcagtgtaattagaagaa

SEQ ID NO: 4795875 - DNA, 25 bp, Homo sapien
cctgagcttcccacgagatggacac

SEQ ID NO: 4795876 - DNA, 25 bp, Homo sapien
gggtgatcggaattactaacttcta

SEQ ID NO: 4795877 - DNA, 25 bp, Homo sapien
ccccaggtcatgtttgagacagtga

SEQ ID NO: 4795878 - DNA, 25 bp, Homo sapien
gaaagctatcaaaggcagactcctg

SEQ ID NO: 4795879 - DNA, 25 bp, Homo sapien
agctctcgggagttatgtcagaaac

SEQ ID NO: 4795880 - DNA, 25 bp, Homo sapien
cactgatggttttggtccggatgct

SEQ ID NO: 4795881 - DNA, 25 bp, Homo sapien
tgggcagttcgttcagcaccagaga

SEQ ID NO: 4795882 - DNA, 25 bp, Homo sapien
tcaatggtaaaggtctcgaagatcc

SEQ ID NO: 4795883 - DNA, 25 bp, Homo sapien
ccggaggagggtaattcagttctct

SEQ ID NO: 4795884 - DNA, 25 bp, Homo sapien
tttccaactagcaaaagactctcag

SEQ ID NO: 4795885 - DNA, 25 bp, Homo sapien
tcagaaagggcaacacctgcatcat

SEQ ID NO: 4795886 - DNA, 25 bp, Homo sapien
ccagaactcatatatagggagggaa

SEQ ID NO: 4795887 - DNA, 25 bp, Homo sapien
actggtgttctatagccccggatca

SEQ ID NO: 4795888 - DNA, 25 bp, Homo sapien
gacacggctaaatctcccagctgtg

SEQ ID NO: 4795889 - DNA, 25 bp, Homo sapien
tctataaggcgtggcagcctcgagg

SEQ ID NO: 4795890 - DNA, 25 bp, Homo sapien
aggctgccaggcaacgtgaggttct

SEQ ID NO: 4795891 - DNA, 25 bp, Homo sapien
tgcggactacagaggaagatatgag

SEQ ID NO: 4795892 - DNA, 25 bp, Homo sapien
gaagatattccaggcaacacaggaa

SEQ ID NO: 4795893 - DNA, 25 bp, Homo sapien
tatgtagtttctagcaaccaccaag

SEQ ID NO: 4795894 - DNA, 25 bp, Homo sapien
tatctgttatataagagcaaggaaa

SEQ ID NO: 4795895 - DNA, 25 bp, Homo sapien
gatttccatggaacgcaggctgcca

SEQ ID NO: 4795896 - DNA, 25 bp, Homo sapien
tgactgtgtaaggagtgccagccct

SEQ ID NO: 4795897 - DNA, 25 bp, Homo sapien
tgagagcatcccagctaacctcggt

SEQ ID NO: 4795898 - DNA, 25 bp, Homo sapien
tcataggttccatctggcgtggtcc

SEQ ID NO: 4795899 - DNA, 25 bp, Homo sapien
gaccccgcggatggtgatggtataa

SEQ ID NO: 4795900 - DNA, 25 bp, Homo sapien
tgtcagcctcctgcacctgaatgaa

SEQ ID NO: 4795901 - DNA, 25 bp, Homo sapien
cagtcctcctgggacggtgaggttc

SEQ ID NO: 4795902 - DNA, 25 bp, Homo sapien
tgaaaaagtactcataggccccttc

SEQ ID NO: 4795903 - DNA, 25 bp, Homo sapien
tagcagccttgaggcccggtatgtc

SEQ ID NO: 4795904 - DNA, 25 bp, Homo sapien
taaagtgctcataggcctggtcagc

SEQ ID NO: 4795905 - DNA, 25 bp, Homo sapien
actggtgttctatagccctggatca

SEQ ID NO: 4795906 - DNA, 25 bp, Homo sapien
cggtatgtccacagcccgaaggctg

SEQ ID NO: 4795907 - DNA, 25 bp, Homo sapien
gtttctagcgttcaaatcatttaca

SEQ ID NO: 4795908 - DNA, 25 bp, Homo sapien
tccgaccttctgtattttgagacaa

SEQ ID NO: 4795909 - DNA, 25 bp, Homo sapien
tcttggtttgagctgtccgaccttc

SEQ ID NO: 4795910 - DNA, 25 bp, Homo sapien
attgggatttcatcagtttctagcg

SEQ ID NO: 4795911 - DNA, 25 bp, Homo sapien
aactcagagaggcagtactgtggcc

SEQ ID NO: 4795912 - DNA, 25 bp, Homo sapien
tactgccctagaagccaagtgtttc

SEQ ID NO: 4795913 - DNA, 25 bp, Homo sapien
tgagatgaggaccaagaggcttcac

SEQ ID NO: 4795914 - DNA, 25 bp, Homo sapien
gacatactgtggacttactgcccta

SEQ ID NO: 4795915 - DNA, 25 bp, Homo sapien
tttctcttctatacaccggcatcgc

SEQ ID NO: 4795916 - DNA, 25 bp, Homo sapien
caaaattcctgagagctactgggtt

SEQ ID NO: 4795917 - DNA, 25 bp, Homo sapien
tagcaacgtgcaccatttcttgaga

SEQ ID NO: 4795918 - DNA, 25 bp, Homo sapien
tactgggttgtcactgtcaaggctt

SEQ ID NO: 4795919 - DNA, 25 bp, Homo sapien
tagggccctgtaacccatggctggg

SEQ ID NO: 4795920 - DNA, 25 bp, Homo sapien
tctgaagtagccagggtccctaaac

SEQ ID NO: 4795921 - DNA, 25 bp, Homo sapien
gctcagaaagcttaaggaacagtgt

SEQ ID NO: 4795922 - DNA, 25 bp, Homo sapien
cccaagaggccatggtgaagtgagc

SEQ ID NO: 4795923 - DNA, 25 bp, Homo sapien
tccagaaagactcacccagaaggtg

SEQ ID NO: 4795924 - DNA, 25 bp, Homo sapien
tcttccgcaagcactatgagcaggc

SEQ ID NO: 4795925 - DNA, 25 bp, Homo sapien
tatgctgcctagaacacagatggaa

SEQ ID NO: 4795926 - DNA, 25 bp, Homo sapien
gaagcagtcaatgcagagtcaacag

SEQ ID NO: 4795927 - DNA, 25 bp, Homo sapien
gcctttctcggctgtcaggaggaca

SEQ ID NO: 4795928 - DNA, 25 bp, Homo sapien
ggcggtagcggtcaaatttggccaa

SEQ ID NO: 4795929 - DNA, 25 bp, Homo sapien
tggatgccttcacacgtgcgggctt

SEQ ID NO: 4795930 - DNA, 25 bp, Homo sapien
tggccaacggtgtcttccagagcag

SEQ ID NO: 4795931 - DNA, 25 bp, Homo sapien
ttgatggtcgctggattgctctcct

SEQ ID NO: 4795932 - DNA, 25 bp, Homo sapien
tcccatattcagttcccggcctcag

SEQ ID NO: 4795933 - DNA, 25 bp, Homo sapien
gcagaaactccaatcccatattcag

SEQ ID NO: 4795934 - DNA, 25 bp, Homo sapien
gtggctgcgttgatggtcgctggat

SEQ ID NO: 4795935 - DNA, 25 bp, Homo sapien
ttttggttgtggcttgttggctctt

SEQ ID NO: 4795936 - DNA, 25 bp, Homo sapien
cagggtgatgctgttatctgtctgg

SEQ ID NO: 4795937 - DNA, 25 bp, Homo sapien
tctgtaactgtcaatagctgccttg

SEQ ID NO: 4795938 - DNA, 25 bp, Homo sapien
ctctttggaacatcaacctcagcgt

SEQ ID NO: 4795939 - DNA, 25 bp, Homo sapien
cacgtctttgatgccgtaggtcagc

SEQ ID NO: 4795940 - DNA, 25 bp, Homo sapien
catctttcacctcgatctggctggg

SEQ ID NO: 4795941 - DNA, 25 bp, Homo sapien
ggtggtacggtctcctggcacgtct

SEQ ID NO: 4795942 - DNA, 25 bp, Homo sapien
caggcttcaggttcccgatggagta

SEQ ID NO: 4795943 - DNA, 25 bp, Homo sapien
aatttacagcagattgtgagaaaac

SEQ ID NO: 4795944 - DNA, 25 bp, Homo sapien
aacaataacaagtgacaggaagtgg

SEQ ID NO: 4795945 - DNA, 25 bp, Homo sapien
cagcattggttcagtaaacaataac

SEQ ID NO: 4795946 - DNA, 25 bp, Homo sapien
taacaagtgacaggaagtgggcttt

SEQ ID NO: 4795947 - DNA, 25 bp, Homo sapien
gagaaggcactttctcaaccaggag

SEQ ID NO: 4795948 - DNA, 25 bp, Homo sapien
gctatgaggtacaatcagccttatc

SEQ ID NO: 4795949 - DNA, 25 bp, Homo sapien
gagtgcagtcaagaacagataagct

SEQ ID NO: 4795950 - DNA, 25 bp, Homo sapien
ccccttaagcacacagatacatgag

SEQ ID NO: 4795951 - DNA, 25 bp, Homo sapien
cgggtattgtttttcactatgtgca

SEQ ID NO: 4795952 - DNA, 25 bp, Homo sapien
tatctcatactcttgcccaggagct

SEQ ID NO: 4795953 - DNA, 25 bp, Homo sapien
tttgccggtaagaggtctctggcct

SEQ ID NO: 4795954 - DNA, 25 bp, Homo sapien
caggagctagaccagtttgccggta

SEQ ID NO: 4795955 - DNA, 25 bp, Homo sapien
tttcaaaagcaatgtctagaggatc

SEQ ID NO: 4795956 - DNA, 25 bp, Homo sapien
agatgtctccttgatggacttgaat

SEQ ID NO: 4795957 - DNA, 25 bp, Homo sapien
cagatgtctccttgatggacttgaa

SEQ ID NO: 4795958 - DNA, 25 bp, Homo sapien
acagatgtctccttgatggacttga

SEQ ID NO: 4795959 - DNA, 25 bp, Homo sapien
gatgtctccttgatggacttgaatt

SEQ ID NO: 4795960 - DNA, 25 bp, Homo sapien
ggataaagtactccacaccaggctc

SEQ ID NO: 4795961 - DNA, 25 bp, Homo sapien
tggcgctgacaggaatgctcttctt

SEQ ID NO: 4795962 - DNA, 25 bp, Homo sapien
aaggtactctgtgacccgcatctca

SEQ ID NO: 4795963 - DNA, 25 bp, Homo sapien
gttctccaggatggcaaatacacgg

SEQ ID NO: 4795964 - DNA, 25 bp, Homo sapien
gtcctaagttgttgcagtcactggg

SEQ ID NO: 4795965 - DNA, 25 bp, Homo sapien
agcggccctggccatgacagtcact

SEQ ID NO: 4795966 - DNA, 25 bp, Homo sapien
ggcccgagacgcattgtcctaagtt

SEQ ID NO: 4795967 - DNA, 25 bp, Homo sapien
tgctccttgcagtctttgcccataa

SEQ ID NO: 4795968 - DNA, 25 bp, Homo sapien
cacgcatcgtccacggttgtagcaa

SEQ ID NO: 4795969 - DNA, 25 bp, Homo sapien
ttgtgacagtcagcaggacacctct

SEQ ID NO: 4795970 - DNA, 25 bp, Homo sapien
tgaagccttcttcgcagtagcaggt

SEQ ID NO: 4795971 - DNA, 25 bp, Homo sapien
tgacagtcattagggcagctcatgt

SEQ ID NO: 4795972 - DNA, 25 bp, Homo sapien
tttccagccaggttcgcagacacag

SEQ ID NO: 4795973 - DNA, 25 bp, Homo sapien
cagttgcctggacattcgggctcag

SEQ ID NO: 4795974 - DNA, 25 bp, Homo sapien
gtcatcgcctgcaaagccatcgtgg

SEQ ID NO: 4795975 - DNA, 25 bp, Homo sapien
cggcgtagccttcgaaacagatgca

SEQ ID NO: 4795976 - DNA, 25 bp, Homo sapien
gaagtcattggtctgatctccatgg

SEQ ID NO: 4795977 - DNA, 25 bp, Homo sapien
gccttagctcagtttgcagaagtca

SEQ ID NO: 4795978 - DNA, 25 bp, Homo sapien
tactatctagtatggtggcccttgg

SEQ ID NO: 4795979 - DNA, 25 bp, Homo sapien
ggttgacattactcgagccccttga

SEQ ID NO: 4795980 - DNA, 25 bp, Homo sapien
acatgcaaaatccctatctctctct

SEQ ID NO: 4795981 - DNA, 25 bp, Homo sapien
agaccctatctcttattgctctttg

SEQ ID NO: 4795982 - DNA, 25 bp, Homo sapien
ttcggatggtgttttgctcttgtca

SEQ ID NO: 4795983 - DNA, 25 bp, Homo sapien
actgcgcctagccaaagaccctatc

SEQ ID NO: 4795984 - DNA, 25 bp, Homo sapien
cggatgactttcttgaggaccccac

SEQ ID NO: 4795985 - DNA, 25 bp, Homo sapien
ccaccttcggtagcgagggcaagga

SEQ ID NO: 4795986 - DNA, 25 bp, Homo sapien
tgtgtgctcctgaaagctttcgctg

SEQ ID NO: 4795987 - DNA, 25 bp, Homo sapien
tctcttctggcagggtggcgttcac

SEQ ID NO: 4795988 - DNA, 25 bp, Homo sapien
gggctctagggtatctcactttcag

SEQ ID NO: 4795989 - DNA, 25 bp, Homo sapien
tctagggctctagggtatctcactt

SEQ ID NO: 4795990 - DNA, 25 bp, Homo sapien
tagggtatctcactttcagcagaat

SEQ ID NO: 4795991 - DNA, 25 bp, Homo sapien
ggctctagggctctagggtatctca

SEQ ID NO: 4795992 - DNA, 25 bp, Homo sapien
taaagtacccagcatggtgtcaagc

SEQ ID NO: 4795993 - DNA, 25 bp, Homo sapien
gcctgagcttgaccgcctagttgaa

SEQ ID NO: 4795994 - DNA, 25 bp, Homo sapien
gatctagatcaaagaggagctgcag

SEQ ID NO: 4795995 - DNA, 25 bp, Homo sapien
ggtaccaccaaatgttgcatcgttg

SEQ ID NO: 4795996 - DNA, 25 bp, Homo sapien
tgtatctaacgcaaaacaagacaca

SEQ ID NO: 4795997 - DNA, 25 bp, Homo sapien
tccctgtcaatgtctcaaaagctag

SEQ ID NO: 4795998 - DNA, 25 bp, Homo sapien
caaaagctagttaatctggtgaaca

SEQ ID NO: 4795999 - DNA, 25 bp, Homo sapien
tttagagtcaaacaaatacctgtga

SEQ ID NO: 4796000 - DNA, 25 bp, Homo sapien
tccggtgcaacctgtgtcataaaag

SEQ ID NO: 4796001 - DNA, 25 bp, Homo sapien
tccatagttgagtgagtccggtgca

SEQ ID NO: 4796002 - DNA, 25 bp, Homo sapien
gccaatgatggataggtcttgccct

SEQ ID NO: 4796003 - DNA, 25 bp, Homo sapien
tgcccttaatgagctcacagtcagg

SEQ ID NO: 4796004 - DNA, 25 bp, Homo sapien
taagcattggtggtgcctcacgact

SEQ ID NO: 4796005 - DNA, 25 bp, Homo sapien
tacattcagaccacaaactgccctg

SEQ ID NO: 4796006 - DNA, 25 bp, Homo sapien
caactggccaacattaagtacaaac

SEQ ID NO: 4796007 - DNA, 25 bp, Homo sapien
tagtatacctaagaaatgctcagat

SEQ ID NO: 4796008 - DNA, 25 bp, Homo sapien
ctaggaagaaccgattacagacaga

SEQ ID NO: 4796009 - DNA, 25 bp, Homo sapien
agaaatctagttggctctttcagaa

SEQ ID NO: 4796010 - DNA, 25 bp, Homo sapien
gtcttgagccaaggttaagaaatgg

SEQ ID NO: 4796011 - DNA, 25 bp, Homo sapien
cagaagcattgaatagtgagttctc

SEQ ID NO: 4796012 - DNA, 25 bp, Homo sapien
aagcaggaaaccagactctcaggga

SEQ ID NO: 4796013 - DNA, 25 bp, Homo sapien
caaaaatacgtctctaggactggaa

SEQ ID NO: 4796014 - DNA, 25 bp, Homo sapien
gaaatctttcccgatccaatgtgct

SEQ ID NO: 4796015 - DNA, 25 bp, Homo sapien
agtgggatttgcatcagaaggagcc

SEQ ID NO: 4796016 - DNA, 25 bp, Homo sapien
caatatttatactgtgcgtggcact

SEQ ID NO: 4796017 - DNA, 25 bp, Homo sapien
cacaggattaggttggatggcacac

SEQ ID NO: 4796018 - DNA, 25 bp, Homo sapien
ggttaagtaagtggcctagtcagca

SEQ ID NO: 4796019 - DNA, 25 bp, Homo sapien
gcaaatctttaaagcccctggagaa

SEQ ID NO: 4796020 - DNA, 25 bp, Homo sapien
aaaaaagaaacataggtagaatgag

SEQ ID NO: 4796021 - DNA, 25 bp, Homo sapien
aaaagaaacataggtagaatgagat

SEQ ID NO: 4796022 - DNA, 25 bp, Homo sapien
gatgacagtaaaagggcatctaatt

SEQ ID NO: 4796023 - DNA, 25 bp, Homo sapien
gagatgacagtaaaagggcatctaa

SEQ ID NO: 4796024 - DNA, 25 bp, Homo sapien
tcatacgtgtgcaattacctcccct

SEQ ID NO: 4796025 - DNA, 25 bp, Homo sapien
tgcctcccggcattctcatacgtgt

SEQ ID NO: 4796026 - DNA, 25 bp, Homo sapien
ggatggcccagtgactttcttctaa

SEQ ID NO: 4796027 - DNA, 25 bp, Homo sapien
gcagactctaaggtggccccattga

SEQ ID NO: 4796028 - DNA, 25 bp, Homo sapien
ctgcccatggtgggtccgtttttgg

SEQ ID NO: 4796029 - DNA, 25 bp, Homo sapien
ggactgtgctaatggtgcgtctgcc

SEQ ID NO: 4796030 - DNA, 25 bp, Homo sapien
cattcttgacctcagtggtgtacag

SEQ ID NO: 4796031 - DNA, 25 bp, Homo sapien
cagggaaggcaatcataggggtaat

SEQ ID NO: 4796032 - DNA, 25 bp, Homo sapien
attcttgtcgaagttagcagcagcc

SEQ ID NO: 4796033 - DNA, 25 bp, Homo sapien
tcaaaattctgagacgacgtggcat

SEQ ID NO: 4796034 - DNA, 25 bp, Homo sapien
aagggattttccgttcgcgatctgc

SEQ ID NO: 4796035 - DNA, 25 bp, Homo sapien
ccattcacagatagactaaaaatgc

SEQ ID NO: 4796036 - DNA, 25 bp, Homo sapien
tgacagggttgtttctaaagtggaa

SEQ ID NO: 4796037 - DNA, 25 bp, Homo sapien
agcaggagtgacctgactgctacct

SEQ ID NO: 4796038 - DNA, 25 bp, Homo sapien
ctgtgtgcctacttttctgagatga

SEQ ID NO: 4796039 - DNA, 25 bp, Homo sapien
gtgacctgactgctacctctagttt

SEQ ID NO: 4796040 - DNA, 25 bp, Homo sapien
tttccaggcagagagttgcaccatt

SEQ ID NO: 4796041 - DNA, 25 bp, Homo sapien
tgagaaccatgaaaaatgatacatg

SEQ ID NO: 4796042 - DNA, 25 bp, Homo sapien
gagaaccatgaaaaatgatacatgc

SEQ ID NO: 4796043 - DNA, 25 bp, Homo sapien
ctgagaaccatgaaaaatgatacat

SEQ ID NO: 4796044 - DNA, 25 bp, Homo sapien
taaaatcaataggcaccaatgccag

SEQ ID NO: 4796045 - DNA, 25 bp, Homo sapien
ctgtaaaatcaataggcaccaatgc

SEQ ID NO: 4796046 - DNA, 25 bp, Homo sapien
gtaaaatcaataggcaccaatgcca

SEQ ID NO: 4796047 - DNA, 25 bp, Homo sapien
tgtaaaatcaataggcaccaatgcc

SEQ ID NO: 4796048 - DNA, 25 bp, Homo sapien
tttcttgtaagaaagcacagctagg

SEQ ID NO: 4796049 - DNA, 25 bp, Homo sapien
ctttggtccagtggatatgttttct

SEQ ID NO: 4796050 - DNA, 25 bp, Homo sapien
tgtaagaaagcacagctaggtgtct

SEQ ID NO: 4796051 - DNA, 25 bp, Homo sapien
aagcacagctaggtgtctatagaaa

SEQ ID NO: 4796052 - DNA, 25 bp, Homo sapien
gagaatactcatattgtgcaccttt

SEQ ID NO: 4796053 - DNA, 25 bp, Homo sapien
aatactcatattgtgcacctttttc

SEQ ID NO: 4796054 - DNA, 25 bp, Homo sapien
aaaccagagaatactcatattgtgc

SEQ ID NO: 4796055 - DNA, 25 bp, Homo sapien
caaaccagagaatactcatattgtg

SEQ ID NO: 4796056 - DNA, 25 bp, Homo sapien
caaatgacttgtatgcgcacaaagc

SEQ ID NO: 4796057 - DNA, 25 bp, Homo sapien
tgcaagggccaaagcacgctgactt

SEQ ID NO: 4796058 - DNA, 25 bp, Homo sapien
gttgtctaggactgaataaatcttc

SEQ ID NO: 4796059 - DNA, 25 bp, Homo sapien
gacttacatctcctgcaaatgactt

SEQ ID NO: 4796060 - DNA, 25 bp, Homo sapien
ctgggatggatagtagttttccttt

SEQ ID NO: 4796061 - DNA, 25 bp, Homo sapien
ctgggggatgttgttgctcagatct

SEQ ID NO: 4796062 - DNA, 25 bp, Homo sapien
tgggggatgttgttgctcagatctt

SEQ ID NO: 4796063 - DNA, 25 bp, Homo sapien
gggggatgttgttgctcagatcttt

SEQ ID NO: 4796064 - DNA, 25 bp, Homo sapien
cgatgggcgagagacctaggtcctt

SEQ ID NO: 4796065 - DNA, 25 bp, Homo sapien
cttggaagaagtacctggagtgtgg

SEQ ID NO: 4796066 - DNA, 25 bp, Homo sapien
tttccgatgggcgagagacctaggt

SEQ ID NO: 4796067 - DNA, 25 bp, Homo sapien
cctggagtgtggagctgcggcggtt

SEQ ID NO: 4796068 - DNA, 25 bp, Homo sapien
tgcgcgttcccccgagttccccagc

SEQ ID NO: 4796069 - DNA, 25 bp, Homo sapien
cgcgttcccccgagttccccagcag

SEQ ID NO: 4796070 - DNA, 25 bp, Homo sapien
gagttccccagcagcgctgcctttg

SEQ ID NO: 4796071 - DNA, 25 bp, Homo sapien
tgcctttgtgcccacggaggcgggg

SEQ ID NO: 4796072 - DNA, 25 bp, Homo sapien
ccttcctctgtaatgggacgcctcg

SEQ ID NO: 4796073 - DNA, 25 bp, Homo sapien
gctggcttatatagcgagctccttc

SEQ ID NO: 4796074 - DNA, 25 bp, Homo sapien
acagtaggcaggctgtggccggtgc

SEQ ID NO: 4796075 - DNA, 25 bp, Homo sapien
tgtggccggtgcagccaactttggc

SEQ ID NO: 4796076 - DNA, 25 bp, Homo sapien
ccataaagctaattaggagagatct

SEQ ID NO: 4796077 - DNA, 25 bp, Homo sapien
aatggaggtctcaattatccactta

SEQ ID NO: 4796078 - DNA, 25 bp, Homo sapien
attaactactaataatggaggtctc

SEQ ID NO: 4796079 - DNA, 25 bp, Homo sapien
tattaaatgatatcatccccacagt

SEQ ID NO: 4796080 - DNA, 25 bp, Homo sapien
cttgagaaaagcatgtcccctctct

SEQ ID NO: 4796081 - DNA, 25 bp, Homo sapien
tcttcttcttgggattcatctggtt

SEQ ID NO: 4796082 - DNA, 25 bp, Homo sapien
tcttcttgggattcatctggtttcc

SEQ ID NO: 4796083 - DNA, 25 bp, Homo sapien
tcccctctctgaagctcctcctctt

SEQ ID NO: 4796084 - DNA, 25 bp, Homo sapien
gaatgcttttccatagagatgtagt

SEQ ID NO: 4796085 - DNA, 25 bp, Homo sapien
ttccatagagatgtagttctatgat

SEQ ID NO: 4796086 - DNA, 25 bp, Homo sapien
gcttttccatagagatgtagttcta

SEQ ID NO: 4796087 - DNA, 25 bp, Homo sapien
atgcttttccatagagatgtagttc

SEQ ID NO: 4796088 - DNA, 25 bp, Homo sapien
tttttttgtcacagctcctttaaca

SEQ ID NO: 4796089 - DNA, 25 bp, Homo sapien
tcaagtagttttttttgtcacagct

SEQ ID NO: 4796090 - DNA, 25 bp, Homo sapien
caagtagttttttttgtcacagctc

SEQ ID NO: 4796091 - DNA, 25 bp, Homo sapien
tttgtcacagctcctttaacatgac

SEQ ID NO: 4796092 - DNA, 25 bp, Homo sapien
tctaaatgctttggaacacctgccc

SEQ ID NO: 4796093 - DNA, 25 bp, Homo sapien
gaaagtttgataatccccatggaca

SEQ ID NO: 4796094 - DNA, 25 bp, Homo sapien
tgtgcagtgctctcatcgatgtggc

SEQ ID NO: 4796095 - DNA, 25 bp, Homo sapien
tattgccaaggagagatcttccgag

SEQ ID NO: 4796096 - DNA, 25 bp, Homo sapien
tctgtggatactgtactgatatcaa

SEQ ID NO: 4796097 - DNA, 25 bp, Homo sapien
ggatactgtactgatatcaacacca

SEQ ID NO: 4796098 - DNA, 25 bp, Homo sapien
gtgagttaaccccatgcttgcagtt

SEQ ID NO: 4796099 - DNA, 25 bp, Homo sapien
aaggacagtgagttaaccccatgct

SEQ ID NO: 4796100 - DNA, 25 bp, Homo sapien
cctcggattatcattctaaagtctt

SEQ ID NO: 4796101 - DNA, 25 bp, Homo sapien
tgagtaaggctttctagagtctgaa

SEQ ID NO: 4796102 - DNA, 25 bp, Homo sapien
tctcagtatataatactggatgcac

SEQ ID NO: 4796103 - DNA, 25 bp, Homo sapien
tctcatgtcctctaacctcggatta

SEQ ID NO: 4796104 - DNA, 25 bp, Homo sapien
aaatgtatgcaacccatagaaaatg

SEQ ID NO: 4796105 - DNA, 25 bp, Homo sapien
gtgttccagattggccccaggtcat

SEQ ID NO: 4796106 - DNA, 25 bp, Homo sapien
agattggccccaggtcataggaagg

SEQ ID NO: 4796107 - DNA, 25 bp, Homo sapien
ggtccctggaagtccacagaaagga

SEQ ID NO: 4796108 - DNA, 25 bp, Homo sapien
gtgctctctgctccttctggtttac

SEQ ID NO: 4796109 - DNA, 25 bp, Homo sapien
taactggcggtgctctctgctcctt

SEQ ID NO: 4796110 - DNA, 25 bp, Homo sapien
gcggtgctctctgctccttctggtt

SEQ ID NO: 4796111 - DNA, 25 bp, Homo sapien
ctaactggcggtgctctctgctcct

SEQ ID NO: 4796112 - DNA, 25 bp, Homo sapien
gaccagctgtcaacctcacttagtg

SEQ ID NO: 4796113 - DNA, 25 bp, Homo sapien
gagtcgccggggatgagttggagga

SEQ ID NO: 4796114 - DNA, 25 bp, Homo sapien
tctcctttcactagtgaccagctgt

SEQ ID NO: 4796115 - DNA, 25 bp, Homo sapien
ggagccaggagactgacttcatctc

SEQ ID NO: 4796116 - DNA, 25 bp, Homo sapien
tgtctctttcctaatgtttggaggg

SEQ ID NO: 4796117 - DNA, 25 bp, Homo sapien
tcctaatgtttggaggggtgttctc

SEQ ID NO: 4796118 - DNA, 25 bp, Homo sapien
tctgtctctttcctaatgtttggag

SEQ ID NO: 4796119 - DNA, 25 bp, Homo sapien
catctgtctctttcctaatgtttgg

SEQ ID NO: 4796120 - DNA, 25 bp, Homo sapien
gaaaattctgagctttttggagtaa

SEQ ID NO: 4796121 - DNA, 25 bp, Homo sapien
ccagtggaagtgagtcagaatgttc

SEQ ID NO: 4796122 - DNA, 25 bp, Homo sapien
taccccttcaagcatcacacagact

SEQ ID NO: 4796123 - DNA, 25 bp, Homo sapien
acgtactgaatttgttgatccttgc

SEQ ID NO: 4796124 - DNA, 25 bp, Homo sapien
gaaaggccaaaggtggtgtcagcat

SEQ ID NO: 4796125 - DNA, 25 bp, Homo sapien
ctgagaaagggctggatttctctta

SEQ ID NO: 4796126 - DNA, 25 bp, Homo sapien
gagaaagggctggatttctcttaaa

SEQ ID NO: 4796127 - DNA, 25 bp, Homo sapien
ttttgaaaggccaaaggtggtgtca

SEQ ID NO: 4796128 - DNA, 25 bp, Homo sapien
ataggacagtgggtgagtagaggct

SEQ ID NO: 4796129 - DNA, 25 bp, Homo sapien
cccataggacagtgggtgagtagag

SEQ ID NO: 4796130 - DNA, 25 bp, Homo sapien
ggctgtggggagtttggtcagagca

SEQ ID NO: 4796131 - DNA, 25 bp, Homo sapien
ccataggacagtgggtgagtagagg

SEQ ID NO: 4796132 - DNA, 25 bp, Homo sapien
gaaagtcacaccagtcttactgagt

SEQ ID NO: 4796133 - DNA, 25 bp, Homo sapien
gtcacaccagtcttactgagtatcc

SEQ ID NO: 4796134 - DNA, 25 bp, Homo sapien
ttcaagtaacatggggaaagtcaca

SEQ ID NO: 4796135 - DNA, 25 bp, Homo sapien
gggaaagtcacaccagtcttactga

SEQ ID NO: 4796136 - DNA, 25 bp, Homo sapien
gaataggcattagtgttagggatgc

SEQ ID NO: 4796137 - DNA, 25 bp, Homo sapien
gtgttagggatgcttctagaaagcc

SEQ ID NO: 4796138 - DNA, 25 bp, Homo sapien
gcattagtgttagggatgcttctag

SEQ ID NO: 4796139 - DNA, 25 bp, Homo sapien
ttctagaaagcctctctactagcat

SEQ ID NO: 4796140 - DNA, 25 bp, Homo sapien
tagtcctcagccgtttattggcaaa

SEQ ID NO: 4796141 - DNA, 25 bp, Homo sapien
cctcagccgtttattggcaaaatac

SEQ ID NO: 4796142 - DNA, 25 bp, Homo sapien
ctgtttagtcctcagccgtttattg

SEQ ID NO: 4796143 - DNA, 25 bp, Homo sapien
tcagccgtttattggcaaaatactt

SEQ ID NO: 4796144 - DNA, 25 bp, Homo sapien
acatagagtgagatgctggtttgtg

SEQ ID NO: 4796145 - DNA, 25 bp, Homo sapien
ctccccgcaacatagagtgagatgc

SEQ ID NO: 4796146 - DNA, 25 bp, Homo sapien
tttgtggcctaggatgagagaaagg

SEQ ID NO: 4796147 - DNA, 25 bp, Homo sapien
catcactccccgcaacatagagtga

SEQ ID NO: 4796148 - DNA, 25 bp, Homo sapien
tacttaaatcagagatgcactggaa

SEQ ID NO: 4796149 - DNA, 25 bp, Homo sapien
tccagctgtactccgactcgggtga

SEQ ID NO: 4796150 - DNA, 25 bp, Homo sapien
gacagcttggccacttgagtcttcc

SEQ ID NO: 4796151 - DNA, 25 bp, Homo sapien
tgagtcttccaaacccaataggctt

SEQ ID NO: 4796152 - DNA, 25 bp, Homo sapien
gaaatccttgtcactgcacccaagt

SEQ ID NO: 4796153 - DNA, 25 bp, Homo sapien
aattttctatagcatccattgccgt

SEQ ID NO: 4796154 - DNA, 25 bp, Homo sapien
gaagtcgaaatccttgtcactgcac

SEQ ID NO: 4796155 - DNA, 25 bp, Homo sapien
tccattgccgttgggttgaagtcga

SEQ ID NO: 4796156 - DNA, 25 bp, Homo sapien
gatagttacacgtagtcgtcctttc

SEQ ID NO: 4796157 - DNA, 25 bp, Homo sapien
agtctcgcccttggatagttacacg

SEQ ID NO: 4796158 - DNA, 25 bp, Homo sapien
ttggatagttacacgtagtcgtcct

SEQ ID NO: 4796159 - DNA, 25 bp, Homo sapien
agagtctcgcccttggatagttaca

SEQ ID NO: 4796160 - DNA, 25 bp, Homo sapien
ctatttgttgtagagcaggatcatt

SEQ ID NO: 4796161 - DNA, 25 bp, Homo sapien
tgtagagcaggatcattgctgcatt

SEQ ID NO: 4796162 - DNA, 25 bp, Homo sapien
agcaggatcattgctgcatttgcta

SEQ ID NO: 4796163 - DNA, 25 bp, Homo sapien
tgttgtagagcaggatcattgctgc

SEQ ID NO: 4796164 - DNA, 25 bp, Homo sapien
cttgatagttgattggaagagtgcc

SEQ ID NO: 4796165 - DNA, 25 bp, Homo sapien
tcttcttgatagttgattggaagag

SEQ ID NO: 4796166 - DNA, 25 bp, Homo sapien
gatagttgattggaagagtgccaga

SEQ ID NO: 4796167 - DNA, 25 bp, Homo sapien
tttcttcttgatagttgattggaag

SEQ ID NO: 4796168 - DNA, 25 bp, Homo sapien
ccagttcccacggtagatgttgtac

SEQ ID NO: 4796169 - DNA, 25 bp, Homo sapien
ggtagatgttgtacctccactagct

SEQ ID NO: 4796170 - DNA, 25 bp, Homo sapien
gttccagttcccacggtagatgttg

SEQ ID NO: 4796171 - DNA, 25 bp, Homo sapien
ttcccacggtagatgttgtacctcc

SEQ ID NO: 4796172 - DNA, 25 bp, Homo sapien
gctgcacatgtaccgtgttccagga

SEQ ID NO: 4796173 - DNA, 25 bp, Homo sapien
gttttctcgatccttcatggctgca

SEQ ID NO: 4796174 - DNA, 25 bp, Homo sapien
ttttatggtctcacttctgcctggg

SEQ ID NO: 4796175 - DNA, 25 bp, Homo sapien
taagcatactctacacctgcatggc

SEQ ID NO: 4796176 - DNA, 25 bp, Homo sapien
ttgacccgatgcctgaattccccat

SEQ ID NO: 4796177 - DNA, 25 bp, Homo sapien
gatgcctgaattccccatcactttt

SEQ ID NO: 4796178 - DNA, 25 bp, Homo sapien
gtgttgacccgatgcctgaattccc

SEQ ID NO: 4796179 - DNA, 25 bp, Homo sapien
cttggtgttgacccgatgcctgaat

SEQ ID NO: 4796180 - DNA, 25 bp, Homo sapien
gccatcgttacagctgactgctgaa

SEQ ID NO: 4796181 - DNA, 25 bp, Homo sapien
cacaaactgggccatagcagcagaa

SEQ ID NO: 4796182 - DNA, 25 bp, Homo sapien
ggctgattacccatccctacaggtt

SEQ ID NO: 4796183 - DNA, 25 bp, Homo sapien
taagtcagttcaaagagtttctggg

SEQ ID NO: 4796184 - DNA, 25 bp, Homo sapien
gcacaagggattgctacagtctgaa

SEQ ID NO: 4796185 - DNA, 25 bp, Homo sapien
gtctgtgtcctcctaaaatttgtat

SEQ ID NO: 4796186 - DNA, 25 bp, Homo sapien
caaatgggcacaagggattgctaca

SEQ ID NO: 4796187 - DNA, 25 bp, Homo sapien
aaacaaatgggcacaagggattgct

SEQ ID NO: 4796188 - DNA, 25 bp, Homo sapien
atcttgaacttgccagcctccagaa

SEQ ID NO: 4796189 - DNA, 25 bp, Homo sapien
caaacaccaaatcttctggcacctt

SEQ ID NO: 4796190 - DNA, 25 bp, Homo sapien
ctggcaccttgatcttgaacttgcc

SEQ ID NO: 4796191 - DNA, 25 bp, Homo sapien
ggcaccttgatcttgaacttgccag

SEQ ID NO: 4796192 - DNA, 25 bp, Homo sapien
gcatacgaacccataaattgaactg

SEQ ID NO: 4796193 - DNA, 25 bp, Homo sapien
tatttgagaagtcctgaagacttgg

SEQ ID NO: 4796194 - DNA, 25 bp, Homo sapien
tcctaaaggctcaattcagctcaaa

SEQ ID NO: 4796195 - DNA, 25 bp, Homo sapien
gactaggtcccaaatattccaactc

SEQ ID NO: 4796196 - DNA, 25 bp, Homo sapien
cagaattccagaaacttaatgtaat

SEQ ID NO: 4796197 - DNA, 25 bp, Homo sapien
gaattgggtatatcagaattccaga

SEQ ID NO: 4796198 - DNA, 25 bp, Homo sapien
ttggaattgggtatatcagaattcc

SEQ ID NO: 4796199 - DNA, 25 bp, Homo sapien
agaattccagaaacttaatgtaatt

SEQ ID NO: 4796200 - DNA, 25 bp, Homo sapien
ttaatcgagcaatttgaagatggca

SEQ ID NO: 4796201 - DNA, 25 bp, Homo sapien
gatctggcaatgatcactactgccg

SEQ ID NO: 4796202 - DNA, 25 bp, Homo sapien
tcatgtttttgcagctgcgtacagg

SEQ ID NO: 4796203 - DNA, 25 bp, Homo sapien
tactgccgaacaggttaatcgagca

SEQ ID NO: 4796204 - DNA, 25 bp, Homo sapien
ctggatcccggaagggcttggccat

SEQ ID NO: 4796205 - DNA, 25 bp, Homo sapien
agatttgatgctactgccaatgtac

SEQ ID NO: 4796206 - DNA, 25 bp, Homo sapien
tgccaatgtacctgaataagaagac

SEQ ID NO: 4796207 - DNA, 25 bp, Homo sapien
actgccaatgtacctgaataagaag

SEQ ID NO: 4796208 - DNA, 25 bp, Homo sapien
ctttggtcacagatttgatgctact

SEQ ID NO: 4796209 - DNA, 25 bp, Homo sapien
cacttgtagaaagtatgactctgtc

SEQ ID NO: 4796210 - DNA, 25 bp, Homo sapien
tgactctgtctttccataacactaa

SEQ ID NO: 4796211 - DNA, 25 bp, Homo sapien
cactatcactggtgcctgtaaaggg

SEQ ID NO: 4796212 - DNA, 25 bp, Homo sapien
tcctttgagttaatacccactatca

SEQ ID NO: 4796213 - DNA, 25 bp, Homo sapien
tgatggacacctatgctgatctgat

SEQ ID NO: 4796214 - DNA, 25 bp, Homo sapien
ctgatggacacctatgctgatctga

SEQ ID NO: 4796215 - DNA, 25 bp, Homo sapien
tggacacctatgctgatctgatgtt

SEQ ID NO: 4796216 - DNA, 25 bp, Homo sapien
gatggacacctatgctgatctgatg

SEQ ID NO: 4796217 - DNA, 25 bp, Homo sapien
ggtcagtgatgtggtgggcaatgcc

SEQ ID NO: 4796218 - DNA, 25 bp, Homo sapien
agctgggactccttacaattctgcc

SEQ ID NO: 4796219 - DNA, 25 bp, Homo sapien
aatttctggttgattcacatttggg

SEQ ID NO: 4796220 - DNA, 25 bp, Homo sapien
aggctccaagggcaactttccaagc

SEQ ID NO: 4796221 - DNA, 25 bp, Homo sapien
tatggcattcaatccttgattcccc

SEQ ID NO: 4796222 - DNA, 25 bp, Homo sapien
aaacaacacagctgttcccttgcag

SEQ ID NO: 4796223 - DNA, 25 bp, Homo sapien
tcaatccttgattccccaataaaac

SEQ ID NO: 4796224 - DNA, 25 bp, Homo sapien
ccttgcagctcgtctctcagcagga

SEQ ID NO: 4796225 - DNA, 25 bp, Homo sapien
cagtggccattaacacggcattttc

SEQ ID NO: 4796226 - DNA, 25 bp, Homo sapien
acggcattttcacacttcctggtgc

SEQ ID NO: 4796227 - DNA, 25 bp, Homo sapien
acagtcagtggccattaacacggca

SEQ ID NO: 4796228 - DNA, 25 bp, Homo sapien
ggtctgcttccttttggtcagtttc

SEQ ID NO: 4796229 - DNA, 25 bp, Homo sapien
gcagctgctggatatcctccacagt

SEQ ID NO: 4796230 - DNA, 25 bp, Homo sapien
gctgctggatatcctccacagttta

SEQ ID NO: 4796231 - DNA, 25 bp, Homo sapien
aagctgggtaatattctcctctgca

SEQ ID NO: 4796232 - DNA, 25 bp, Homo sapien
tgggtaatattctcctctgcagctg

SEQ ID NO: 4796233 - DNA, 25 bp, Homo sapien
agctgtggtcagtgttagtaatttc

SEQ ID NO: 4796234 - DNA, 25 bp, Homo sapien
tagctgtggtcagtgttagtaattt

SEQ ID NO: 4796235 - DNA, 25 bp, Homo sapien
ctagctgtggtcagtgttagtaatt

SEQ ID NO: 4796236 - DNA, 25 bp, Homo sapien
gctgtggtcagtgttagtaatttct

SEQ ID NO: 4796237 - DNA, 25 bp, Homo sapien
agtcaaaactggacagccatagtta

SEQ ID NO: 4796238 - DNA, 25 bp, Homo sapien
tcaatttcctggattcacagtcaag

SEQ ID NO: 4796239 - DNA, 25 bp, Homo sapien
cctgtgtcctcgtttgtagaataaa

SEQ ID NO: 4796240 - DNA, 25 bp, Homo sapien
tagagactctatggcttctggaaca

SEQ ID NO: 4796241 - DNA, 25 bp, Homo sapien
gattctgaggaggagtggtctgaaa

SEQ ID NO: 4796242 - DNA, 25 bp, Homo sapien
aggagcagttggtgaaggggcatcc

SEQ ID NO: 4796243 - DNA, 25 bp, Homo sapien
ttctgaggaggagtggtctgaaaca

SEQ ID NO: 4796244 - DNA, 25 bp, Homo sapien
ggaggagtggtctgaaacagctctt

SEQ ID NO: 4796245 - DNA, 25 bp, Homo sapien
caaagttgttgtttggctttatagt

SEQ ID NO: 4796246 - DNA, 25 bp, Homo sapien
catttagagaaggagatatgcgtgt

SEQ ID NO: 4796247 - DNA, 25 bp, Homo sapien
tgtgaacatttagagaaggagatat

SEQ ID NO: 4796248 - DNA, 25 bp, Homo sapien
aaatgtgaacatttagagaaggaga

SEQ ID NO: 4796249 - DNA, 25 bp, Homo sapien
tagagaaggagatatgcgtgtatat

SEQ ID NO: 4796250 - DNA, 25 bp, Homo sapien
caaactttcaaagatccgatctttc

SEQ ID NO: 4796251 - DNA, 25 bp, Homo sapien
cacagtgcatccctcaaactttcaa

SEQ ID NO: 4796252 - DNA, 25 bp, Homo sapien
tccctcaaactttcaaagatccgat

SEQ ID NO: 4796253 - DNA, 25 bp, Homo sapien
tcaaagatccgatctttcacctgtg

SEQ ID NO: 4796254 - DNA, 25 bp, Homo sapien
gaggatcttaagagaggtacaagtg

SEQ ID NO: 4796255 - DNA, 25 bp, Homo sapien
cagggaaagggaggatcttaagaga

SEQ ID NO: 4796256 - DNA, 25 bp, Homo sapien
gagaggtacaagtggactgcagtcc

SEQ ID NO: 4796257 - DNA, 25 bp, Homo sapien
ggtacaagtggactgcagtcccagg

SEQ ID NO: 4796258 - DNA, 25 bp, Homo sapien
ctttgctttgctcaatttcttcttg

SEQ ID NO: 4796259 - DNA, 25 bp, Homo sapien
gctcaatttcttcttgtactctttg

SEQ ID NO: 4796260 - DNA, 25 bp, Homo sapien
atttcttcttgtactctttggacca

SEQ ID NO: 4796261 - DNA, 25 bp, Homo sapien
tgctttgctcaatttcttcttgtac

SEQ ID NO: 4796262 - DNA, 25 bp, Homo sapien
tttcttcacattacagaggatggca

SEQ ID NO: 4796263 - DNA, 25 bp, Homo sapien
tatgagaccacggatgaccatgggt

SEQ ID NO: 4796264 - DNA, 25 bp, Homo sapien
tcaatgtgggtcaaaccagttgctc

SEQ ID NO: 4796265 - DNA, 25 bp, Homo sapien
cagtgtcctagaaggctgctcccaa

SEQ ID NO: 4796266 - DNA, 25 bp, Homo sapien
ctgtatagctgttggtttccttcca

SEQ ID NO: 4796267 - DNA, 25 bp, Homo sapien
aaacaatgtattctatgctctccat

SEQ ID NO: 4796268 - DNA, 25 bp, Homo sapien
aaactttcctatctttccatattga

SEQ ID NO: 4796269 - DNA, 25 bp, Homo sapien
tgcatctgatgttgttgacagttcc

SEQ ID NO: 4796270 - DNA, 25 bp, Homo sapien
ggatcagtgccctgcaaatagtgag

SEQ ID NO: 4796271 - DNA, 25 bp, Homo sapien
tagcctcttacgagactgatgttgg

SEQ ID NO: 4796272 - DNA, 25 bp, Homo sapien
caaatggtcactcctgttgccctga

SEQ ID NO: 4796273 - DNA, 25 bp, Homo sapien
ggaatcaattcctaagctcagcagg

SEQ ID NO: 4796274 - DNA, 25 bp, Homo sapien
tgcagtgctatgaatctctccatca

SEQ ID NO: 4796275 - DNA, 25 bp, Homo sapien
cagcaacaactaatgatcctcccat

SEQ ID NO: 4796276 - DNA, 25 bp, Homo sapien
atgatcctcccatgaaagcttgaaa

SEQ ID NO: 4796277 - DNA, 25 bp, Homo sapien
aagcaattctgttaaatgcagtgct

SEQ ID NO: 4796278 - DNA, 25 bp, Homo sapien
gcgcaggatctgatgatattttcca

SEQ ID NO: 4796279 - DNA, 25 bp, Homo sapien
gcaactctactggtagcaggaagat

SEQ ID NO: 4796280 - DNA, 25 bp, Homo sapien
tgtaaggcttttcaggggcaactct

SEQ ID NO: 4796281 - DNA, 25 bp, Homo sapien
tgcatgtgcgcgcaggatctgatga

SEQ ID NO: 4796282 - DNA, 25 bp, Homo sapien
aactgctttgaattagagccaggag

SEQ ID NO: 4796283 - DNA, 25 bp, Homo sapien
ctttgaattagagccaggagagact

SEQ ID NO: 4796284 - DNA, 25 bp, Homo sapien
aattagagccaggagagactgttgc

SEQ ID NO: 4796285 - DNA, 25 bp, Homo sapien
tagagccaggagagactgttgcatt

SEQ ID NO: 4796286 - DNA, 25 bp, Homo sapien
ggttggttttgtccagtaggtctgc

SEQ ID NO: 4796287 - DNA, 25 bp, Homo sapien
caatgatacagagctcactggagtc

SEQ ID NO: 4796288 - DNA, 25 bp, Homo sapien
ccagggaacatgtgtgggccaatga

SEQ ID NO: 4796289 - DNA, 25 bp, Homo sapien
gaaagttcatcagggcaaggagcca

SEQ ID NO: 4796290 - DNA, 25 bp, Homo sapien
cctcatgggacacatcgctcttctt

SEQ ID NO: 4796291 - DNA, 25 bp, Homo sapien
tcttcttgagctgatgggagtctga

SEQ ID NO: 4796292 - DNA, 25 bp, Homo sapien
tgagaaacaatcttatacaccaaag

SEQ ID NO: 4796293 - DNA, 25 bp, Homo sapien
tatacaccaaagataaccctccatt

SEQ ID NO: 4796294 - DNA, 25 bp, Homo sapien
agtgagcactctctggtgccacaga

SEQ ID NO: 4796295 - DNA, 25 bp, Homo sapien
gaagccttctaaattccatctccct

SEQ ID NO: 4796296 - DNA, 25 bp, Homo sapien
tgtctgtgtcagtgagcactctctg

SEQ ID NO: 4796297 - DNA, 25 bp, Homo sapien
atgaagccttctaaattccatctcc

SEQ ID NO: 4796298 - DNA, 25 bp, Homo sapien
gctgtttgtatacagatgctggcct

SEQ ID NO: 4796299 - DNA, 25 bp, Homo sapien
gggcggtgccccattaagactagat

SEQ ID NO: 4796300 - DNA, 25 bp, Homo sapien
taagcaggcaattaggtagcagatc

SEQ ID NO: 4796301 - DNA, 25 bp, Homo sapien
tctgtgccaagagcatgggaccacc

SEQ ID NO: 4796302 - DNA, 25 bp, Homo sapien
ttagaaattgccacactttccccac

SEQ ID NO: 4796303 - DNA, 25 bp, Homo sapien
tgttttagaaattgccacactttcc

SEQ ID NO: 4796304 - DNA, 25 bp, Homo sapien
tcatgttttagaaattgccacactt

SEQ ID NO: 4796305 - DNA, 25 bp, Homo sapien
tttagaaattgccacactttcccca

SEQ ID NO: 4796306 - DNA, 25 bp, Homo sapien
gcttcggcgtcttggatcttagcaa

SEQ ID NO: 4796307 - DNA, 25 bp, Homo sapien
gtggtccatgcgaggaccccggcca

SEQ ID NO: 4796308 - DNA, 25 bp, Homo sapien
ggaccccggccattgtctgaggctc

SEQ ID NO: 4796309 - DNA, 25 bp, Homo sapien
tgaggctccaacctttgttgggttc

SEQ ID NO: 4796310 - DNA, 25 bp, Homo sapien
cagcaaacttcaggccccaaagcat

SEQ ID NO: 4796311 - DNA, 25 bp, Homo sapien
ttgccctccacagcaaacttcaggc

SEQ ID NO: 4796312 - DNA, 25 bp, Homo sapien
ccacagcaaacttcaggccccaaag

SEQ ID NO: 4796313 - DNA, 25 bp, Homo sapien
gcaaacttcaggccccaaagcattc

SEQ ID NO: 4796314 - DNA, 25 bp, Homo sapien
aaagtctgggttttaagaatgcttg

SEQ ID NO: 4796315 - DNA, 25 bp, Homo sapien
catgcatatattgggtactgggaaa

SEQ ID NO: 4796316 - DNA, 25 bp, Homo sapien
tttcctacatgcatatattgggtac

SEQ ID NO: 4796317 - DNA, 25 bp, Homo sapien
tatattgggtactgggaaagtctgg

SEQ ID NO: 4796318 - DNA, 25 bp, Homo sapien
aagaattataaatcatgctgttata

SEQ ID NO: 4796319 - DNA, 25 bp, Homo sapien
gaattataaatcatgctgttataaa

SEQ ID NO: 4796320 - DNA, 25 bp, Homo sapien
caaagaattataaatcatgctgtta

SEQ ID NO: 4796321 - DNA, 25 bp, Homo sapien
cccaaagaattataaatcatgctgt

SEQ ID NO: 4796322 - DNA, 25 bp, Homo sapien
acaacaatggcgagggactggagac

SEQ ID NO: 4796323 - DNA, 25 bp, Homo sapien
gaaacttaaaacttgagcgcaggtc

SEQ ID NO: 4796324 - DNA, 25 bp, Homo sapien
gacacttagggcatggttagagtca

SEQ ID NO: 4796325 - DNA, 25 bp, Homo sapien
gaaatggcactatgaacctgtagac

SEQ ID NO: 4796326 - DNA, 25 bp, Homo sapien
ttgcaattccagatttggacagcac

SEQ ID NO: 4796327 - DNA, 25 bp, Homo sapien
tcctcccgagttgtcatattgtttg

SEQ ID NO: 4796328 - DNA, 25 bp, Homo sapien
tcaacgttctaagtcctggcactgt

SEQ ID NO: 4796329 - DNA, 25 bp, Homo sapien
ttgagaaatgtccaggcttgccttc

SEQ ID NO: 4796330 - DNA, 25 bp, Homo sapien
ctctgtgtgagctgttttcctctag

SEQ ID NO: 4796331 - DNA, 25 bp, Homo sapien
gattatgtgagtcctgaaaggcact

SEQ ID NO: 4796332 - DNA, 25 bp, Homo sapien
tttcctctagacaagcagctcggta

SEQ ID NO: 4796333 - DNA, 25 bp, Homo sapien
actgaaatagcttattccaactgta

SEQ ID NO: 4796334 - DNA, 25 bp, Homo sapien
cttgatcctgtaggggattttccaa

SEQ ID NO: 4796335 - DNA, 25 bp, Homo sapien
ttttccaagttccactttagcacat

SEQ ID NO: 4796336 - DNA, 25 bp, Homo sapien
ccaagttccactttagcacatgtag

SEQ ID NO: 4796337 - DNA, 25 bp, Homo sapien
aagttccactttagcacatgtagac

SEQ ID NO: 4796338 - DNA, 25 bp, Homo sapien
ggcatcccacaagaattagaagtta

SEQ ID NO: 4796339 - DNA, 25 bp, Homo sapien
tacaacattccataagcagcttggg

SEQ ID NO: 4796340 - DNA, 25 bp, Homo sapien
ccgatgtgacaactttggtcttccc

SEQ ID NO: 4796341 - DNA, 25 bp, Homo sapien
ctggcttcatccgatgtgacaactt

SEQ ID NO: 4796342 - DNA, 25 bp, Homo sapien
caggcagttttgtgcacagtccctt

SEQ ID NO: 4796343 - DNA, 25 bp, Homo sapien
ccgcaggcagttttgtgcacagtcc

SEQ ID NO: 4796344 - DNA, 25 bp, Homo sapien
agctgctaaagactcttttggcaag

SEQ ID NO: 4796345 - DNA, 25 bp, Homo sapien
tgctaaagactcttttggcaagttt

SEQ ID NO: 4796346 - DNA, 25 bp, Homo sapien
gatattctgggcctttggagcacct

SEQ ID NO: 4796347 - DNA, 25 bp, Homo sapien
cttgtgctgcatcaataggtggcaa

SEQ ID NO: 4796348 - DNA, 25 bp, Homo sapien
tggcaatggatattctgggcctttg

SEQ ID NO: 4796349 - DNA, 25 bp, Homo sapien
caataggtggcaatggatattctgg

SEQ ID NO: 4796350 - DNA, 25 bp, Homo sapien
gacaagtgccattgattctgcaagt

SEQ ID NO: 4796351 - DNA, 25 bp, Homo sapien
ggcacaggacaagtgccattgattc

SEQ ID NO: 4796352 - DNA, 25 bp, Homo sapien
tctgcaagtccttatctaccctagc

SEQ ID NO: 4796353 - DNA, 25 bp, Homo sapien
tcaaagacgtacacattcttcaagg

SEQ ID NO: 4796354 - DNA, 25 bp, Homo sapien
tcagactcccttgagtgagcagcac

SEQ ID NO: 4796355 - DNA, 25 bp, Homo sapien
cctggtcaaaatggttcagactccc

SEQ ID NO: 4796356 - DNA, 25 bp, Homo sapien
gctggaatggagaacaatgacttca

SEQ ID NO: 4796357 - DNA, 25 bp, Homo sapien
tcatcgatctcgcagagttcttggg

SEQ ID NO: 4796358 - DNA, 25 bp, Homo sapien
ggtaagttaacttcttcatgtcgca

SEQ ID NO: 4796359 - DNA, 25 bp, Homo sapien
gatgacatggtcctgttctgtcctt

SEQ ID NO: 4796360 - DNA, 25 bp, Homo sapien
tcaagtttctctaaatttgatgaca

SEQ ID NO: 4796361 - DNA, 25 bp, Homo sapien
cattctctgatcttaggtaagttaa

SEQ ID NO: 4796362 - DNA, 25 bp, Homo sapien
tgaatggatgtaactgtcactcgct

SEQ ID NO: 4796363 - DNA, 25 bp, Homo sapien
aaaagctgtttctcgcccactgaat

SEQ ID NO: 4796364 - DNA, 25 bp, Homo sapien
tcttggcagcgaattaatgaaatgc

SEQ ID NO: 4796365 - DNA, 25 bp, Homo sapien
tgaaatgcacggaataaaaagctgt

SEQ ID NO: 4796366 - DNA, 25 bp, Homo sapien
gctgcccgcctgcacagagccctcc

SEQ ID NO: 4796367 - DNA, 25 bp, Homo sapien
gggtgggctgcccgcctgcacagag

SEQ ID NO: 4796368 - DNA, 25 bp, Homo sapien
ttagggtgggctgcccgcctgcaca

SEQ ID NO: 4796369 - DNA, 25 bp, Homo sapien
cccttagggtgggctgcccgcctgc

SEQ ID NO: 4796370 - DNA, 25 bp, Homo sapien
gtctgtagtgtatcccccttcctca

SEQ ID NO: 4796371 - DNA, 25 bp, Homo sapien
ggtctgtagtgtatcccccttcctc

SEQ ID NO: 4796372 - DNA, 25 bp, Homo sapien
ttgaaagatgcatccggggtctgta

SEQ ID NO: 4796373 - DNA, 25 bp, Homo sapien
gcatccggggtctgtagtgtatccc

SEQ ID NO: 4796374 - DNA, 25 bp, Homo sapien
caaaaggggcagttcctggagtgct

SEQ ID NO: 4796375 - DNA, 25 bp, Homo sapien
tagaaagattcatgggccaaaaggg

SEQ ID NO: 4796376 - DNA, 25 bp, Homo sapien
tcctgcctgctggtttacatcttgt

SEQ ID NO: 4796377 - DNA, 25 bp, Homo sapien
caccacagtctagaagtgacattgg

SEQ ID NO: 4796378 - DNA, 25 bp, Homo sapien
cactccgaataaataaggactttgg

SEQ ID NO: 4796379 - DNA, 25 bp, Homo sapien
ggactttgggcagaactctttaaca

SEQ ID NO: 4796380 - DNA, 25 bp, Homo sapien
tgccattccaatccactccgaataa

SEQ ID NO: 4796381 - DNA, 25 bp, Homo sapien
agaactctttaacacaatggcccac

SEQ ID NO: 4796382 - DNA, 25 bp, Homo sapien
tcctccagagtggaaaaggtttgag

SEQ ID NO: 4796383 - DNA, 25 bp, Homo sapien
ctccagagtggaaaaggtttgaggc

SEQ ID NO: 4796384 - DNA, 25 bp, Homo sapien
ccagagtggaaaaggtttgaggctt

SEQ ID NO: 4796385 - DNA, 25 bp, Homo sapien
ttcctccagagtggaaaaggtttga

SEQ ID NO: 4796386 - DNA, 25 bp, Homo sapien
atggaatatcagtggtcgcattggt

SEQ ID NO: 4796387 - DNA, 25 bp, Homo sapien
agtggtcgcattggtctgtccttta

SEQ ID NO: 4796388 - DNA, 25 bp, Homo sapien
ggaatatcagtggtcgcattggtct

SEQ ID NO: 4796389 - DNA, 25 bp, Homo sapien
tatcagtggtcgcattggtctgtcc

SEQ ID NO: 4796390 - DNA, 25 bp, Homo sapien
attccactggacacttgtggccttt

SEQ ID NO: 4796391 - DNA, 25 bp, Homo sapien
tctagtaagtttatggaagatttac

SEQ ID NO: 4796392 - DNA, 25 bp, Homo sapien
ccactggacacttgtggcctttcta

SEQ ID NO: 4796393 - DNA, 25 bp, Homo sapien
tgtggcctttctagtaagtttatgg

SEQ ID NO: 4796394 - DNA, 25 bp, Homo sapien
taaaatgtgcaactgaaatatggct

SEQ ID NO: 4796395 - DNA, 25 bp, Homo sapien
tggctttatggaggagctccaagtt

SEQ ID NO: 4796396 - DNA, 25 bp, Homo sapien
cagaattatgtactatttgagaggg

SEQ ID NO: 4796397 - DNA, 25 bp, Homo sapien
tgagaggggtcaaccgcagaactgc

SEQ ID NO: 4796398 - DNA, 25 bp, Homo sapien
cttgctccattatgacggtcaaata

SEQ ID NO: 4796399 - DNA, 25 bp, Homo sapien
tcttcttgctccattatgacggtca

SEQ ID NO: 4796400 - DNA, 25 bp, Homo sapien
ttcttgctccattatgacggtcaaa

SEQ ID NO: 4796401 - DNA, 25 bp, Homo sapien
gctcttcttgctccattatgacggt

SEQ ID NO: 4796402 - DNA, 25 bp, Homo sapien
acactcatacagacactcttcaggg

SEQ ID NO: 4796403 - DNA, 25 bp, Homo sapien
gagcatttagtaagcacactcatac

SEQ ID NO: 4796404 - DNA, 25 bp, Homo sapien
tgactgaggaatacataacgaatgg

SEQ ID NO: 4796405 - DNA, 25 bp, Homo sapien
taacgaatggtactccataaccctc

SEQ ID NO: 4796406 - DNA, 25 bp, Homo sapien
attttagtctactgtcaaagtcagg

SEQ ID NO: 4796407 - DNA, 25 bp, Homo sapien
catgtctaaggactggccaagtaaa

SEQ ID NO: 4796408 - DNA, 25 bp, Homo sapien
tctactgtcaaagtcaggtggtaca

SEQ ID NO: 4796409 - DNA, 25 bp, Homo sapien
tcaaagtcaggtggtacaataccac

SEQ ID NO: 4796410 - DNA, 25 bp, Homo sapien
accatgaagttgagagggatgacca

SEQ ID NO: 4796411 - DNA, 25 bp, Homo sapien
agagcacctgctttgtactgagaac

SEQ ID NO: 4796412 - DNA, 25 bp, Homo sapien
cattcctgacaagccaacggtggtg

SEQ ID NO: 4796413 - DNA, 25 bp, Homo sapien
gaatttccagaaccaaatgtggagc

SEQ ID NO: 4796414 - DNA, 25 bp, Homo sapien
aattgtcaaggttttggtaggctga

SEQ ID NO: 4796415 - DNA, 25 bp, Homo sapien
tcctccaacacgaataattgtcaag

SEQ ID NO: 4796416 - DNA, 25 bp, Homo sapien
gccattctgaaaccagatgattgag

SEQ ID NO: 4796417 - DNA, 25 bp, Homo sapien
tcagggacgaagagacaaacaggca

SEQ ID NO: 4796418 - DNA, 25 bp, Homo sapien
ttggaaattcacattagcatgttct

SEQ ID NO: 4796419 - DNA, 25 bp, Homo sapien
aaattcacattagcatgttctaccc

SEQ ID NO: 4796420 - DNA, 25 bp, Homo sapien
ggaaattcacattagcatgttctac

SEQ ID NO: 4796421 - DNA, 25 bp, Homo sapien
gaaattcacattagcatgttctacc

SEQ ID NO: 4796422 - DNA, 25 bp, Homo sapien
tgaaccaatcgttgaatctatagcg

SEQ ID NO: 4796423 - DNA, 25 bp, Homo sapien
gaagatttgtgggactgctgtaatc

SEQ ID NO: 4796424 - DNA, 25 bp, Homo sapien
tatagcgatattgggagttgactgc

SEQ ID NO: 4796425 - DNA, 25 bp, Homo sapien
gtaatctgttagttgaggagaatca

SEQ ID NO: 4796426 - DNA, 25 bp, Homo sapien
tgtgtgccgcttgtgcttgcatgtg

SEQ ID NO: 4796427 - DNA, 25 bp, Homo sapien
caacaatatgtatgagtctgcgtgt

SEQ ID NO: 4796428 - DNA, 25 bp, Homo sapien
taatataagagacaattgcttggca

SEQ ID NO: 4796429 - DNA, 25 bp, Homo sapien
caggagatttatcacgtcgaaagac

SEQ ID NO: 4796430 - DNA, 25 bp, Homo sapien
tttccatgcttaaggactgattctc

SEQ ID NO: 4796431 - DNA, 25 bp, Homo sapien
gatgaaacaggagtgttattttctt

SEQ ID NO: 4796432 - DNA, 25 bp, Homo sapien
gattctcatgtggaaacccatcaag

SEQ ID NO: 4796433 - DNA, 25 bp, Homo sapien
taaaagaaggtattggtccagatga

SEQ ID NO: 4796434 - DNA, 25 bp, Homo sapien
ggagattgtctatgccctttgccat

SEQ ID NO: 4796435 - DNA, 25 bp, Homo sapien
tctcactgtatcaaagtcttcaacg

SEQ ID NO: 4796436 - DNA, 25 bp, Homo sapien
cgtgatacccaacagggagattgtc

SEQ ID NO: 4796437 - DNA, 25 bp, Homo sapien
tcaaagtcttcaacgtgatacccaa

SEQ ID NO: 4796438 - DNA, 25 bp, Homo sapien
cttttatcagcaaactggaggagtc

SEQ ID NO: 4796439 - DNA, 25 bp, Homo sapien
tatcagcaaactggaggagtcttta

SEQ ID NO: 4796440 - DNA, 25 bp, Homo sapien
tttatcagcaaactggaggagtctt

SEQ ID NO: 4796441 - DNA, 25 bp, Homo sapien
ggccttatagtgcagtgtgaaatca

SEQ ID NO: 4796442 - DNA, 25 bp, Homo sapien
attataatgtcagtttgtactcttt

SEQ ID NO: 4796443 - DNA, 25 bp, Homo sapien
cattataatgtcagtttgtactctt

SEQ ID NO: 4796444 - DNA, 25 bp, Homo sapien
gtgacattataatgtcagtttgtac

SEQ ID NO: 4796445 - DNA, 25 bp, Homo sapien
gacattataatgtcagtttgtactc

SEQ ID NO: 4796446 - DNA, 25 bp, Homo sapien
caagatcaggtaggatattgaacca

SEQ ID NO: 4796447 - DNA, 25 bp, Homo sapien
caaagaattcccagacagcccatgt

SEQ ID NO: 4796448 - DNA, 25 bp, Homo sapien
gaagtctgccaactacgttttctat

SEQ ID NO: 4796449 - DNA, 25 bp, Homo sapien
tagctcagcatatagcatgttcaac

SEQ ID NO: 4796450 - DNA, 25 bp, Homo sapien
ctgtgacttgacagatggatttgga

SEQ ID NO: 4796451 - DNA, 25 bp, Homo sapien
tgcaggtgtcggcagaaactgactt

SEQ ID NO: 4796452 - DNA, 25 bp, Homo sapien
tagatagcatttgcaaatgggctgc

SEQ ID NO: 4796453 - DNA, 25 bp, Homo sapien
tgcgatgaataaaagagtccttgtg

SEQ ID NO: 4796454 - DNA, 25 bp, Homo sapien
aaagcaaggcgtagagatgatcaca

SEQ ID NO: 4796455 - DNA, 25 bp, Homo sapien
gagctcagtcatgcagaactcaggt

SEQ ID NO: 4796456 - DNA, 25 bp, Homo sapien
tatgagcaaatgtcgaggtcttaac

SEQ ID NO: 4796457 - DNA, 25 bp, Homo sapien
ttcacaactagaaacgactcagcga

SEQ ID NO: 4796458 - DNA, 25 bp, Homo sapien
caacaggccaattgtgaagctggac

SEQ ID NO: 4796459 - DNA, 25 bp, Homo sapien
gaaacacccatagcatcctaggaag

SEQ ID NO: 4796460 - DNA, 25 bp, Homo sapien
gataaaattacagaggcccagggag

SEQ ID NO: 4796461 - DNA, 25 bp, Homo sapien
gcctgcactgggttttcaaggaaaa

SEQ ID NO: 4796462 - DNA, 25 bp, Homo sapien
tcttcatctccctcatccttctcct

SEQ ID NO: 4796463 - DNA, 25 bp, Homo sapien
cttctcttcatctccctcatccttc

SEQ ID NO: 4796464 - DNA, 25 bp, Homo sapien
tccttctcttcatctccctcatcct

SEQ ID NO: 4796465 - DNA, 25 bp, Homo sapien
tctcttcatctccctcatccttctc

SEQ ID NO: 4796466 - DNA, 25 bp, Homo sapien
cccagttgctggttctagagatctc

SEQ ID NO: 4796467 - DNA, 25 bp, Homo sapien
gatggatgagtctgcatacacccac

SEQ ID NO: 4796468 - DNA, 25 bp, Homo sapien
tattttgcccaagagacgtattcat

SEQ ID NO: 4796469 - DNA, 25 bp, Homo sapien
cactgaaggaagagccccagttgct

SEQ ID NO: 4796470 - DNA, 25 bp, Homo sapien
cattcttcactaacgagccctggta

SEQ ID NO: 4796471 - DNA, 25 bp, Homo sapien
caaactgtcaccaaatgcctggctc

SEQ ID NO: 4796472 - DNA, 25 bp, Homo sapien
gagacttctaggataatgacagcca

SEQ ID NO: 4796473 - DNA, 25 bp, Homo sapien
gaataaattcagatgctcagccaca

SEQ ID NO: 4796474 - DNA, 25 bp, Homo sapien
ctgggctttgtaaccgtcaggatag

SEQ ID NO: 4796475 - DNA, 25 bp, Homo sapien
taaccgtcaggatagtttgaaccac

SEQ ID NO: 4796476 - DNA, 25 bp, Homo sapien
tcaggatagtttgaaccacctgtgg

SEQ ID NO: 4796477 - DNA, 25 bp, Homo sapien
gatagtttgaaccacctgtggtgct

SEQ ID NO: 4796478 - DNA, 25 bp, Homo sapien
aaacctcaaggagtggagactgctc

SEQ ID NO: 4796479 - DNA, 25 bp, Homo sapien
cacttgggaggtgcatgcagccaac

SEQ ID NO: 4796480 - DNA, 25 bp, Homo sapien
aaggctttcaaaggctgactcctgg

SEQ ID NO: 4796481 - DNA, 25 bp, Homo sapien
tgctctgtggagtcaaacaactgtg

SEQ ID NO: 4796482 - DNA, 25 bp, Homo sapien
tcagaaacgctcgaagtttgaactt

SEQ ID NO: 4796483 - DNA, 25 bp, Homo sapien
gaaacgctcgaagtttgaacttctc

SEQ ID NO: 4796484 - DNA, 25 bp, Homo sapien
ctcagaaacgctcgaagtttgaact

SEQ ID NO: 4796485 - DNA, 25 bp, Homo sapien
cagaaacgctcgaagtttgaacttc

SEQ ID NO: 4796486 - DNA, 25 bp, Homo sapien
cataaactgatcctcctagtgagaa

SEQ ID NO: 4796487 - DNA, 25 bp, Homo sapien
ctggccctggagtctaagttcttaa

SEQ ID NO: 4796488 - DNA, 25 bp, Homo sapien
tctcagggaaaaaggcatcaggttg

SEQ ID NO: 4796489 - DNA, 25 bp, Homo sapien
gctagtaaaagtaacctggacatcg

SEQ ID NO: 4796490 - DNA, 25 bp, Homo sapien
ggtgggcctatcacttgtagatcag

SEQ ID NO: 4796491 - DNA, 25 bp, Homo sapien
gctagcatagggtataggcactcaa

SEQ ID NO: 4796492 - DNA, 25 bp, Homo sapien
cccttttagaaggtatgctctgaaa

SEQ ID NO: 4796493 - DNA, 25 bp, Homo sapien
taagcacacagaatagggctagcat

SEQ ID NO: 4796494 - DNA, 25 bp, Homo sapien
tttatttacagtcagaagctccatg

SEQ ID NO: 4796495 - DNA, 25 bp, Homo sapien
tccatgaaattctgagccaaaaggc

SEQ ID NO: 4796496 - DNA, 25 bp, Homo sapien
cattcagctatcacctttaacagga

SEQ ID NO: 4796497 - DNA, 25 bp, Homo sapien
ggtagtggcctccaacattcagcta

SEQ ID NO: 4796498 - DNA, 25 bp, Homo sapien
agggaggatttgaggttctgtaact

SEQ ID NO: 4796499 - DNA, 25 bp, Homo sapien
tgctgattagcaacatataatacag

SEQ ID NO: 4796500 - DNA, 25 bp, Homo sapien
cccacattgctaaacacaaaagtca

SEQ ID NO: 4796501 - DNA, 25 bp, Homo sapien
tgtataaaacccatagctgatgaat

SEQ ID NO: 4796502 - DNA, 25 bp, Homo sapien
gatctgttgattttcctggtgcttc

SEQ ID NO: 4796503 - DNA, 25 bp, Homo sapien
tggtgacctcattccgtctcatgct

SEQ ID NO: 4796504 - DNA, 25 bp, Homo sapien
actcagcccttggacaccctctttg

SEQ ID NO: 4796505 - DNA, 25 bp, Homo sapien
gttgattttcctggtgcttcaccac

SEQ ID NO: 4796506 - DNA, 25 bp, Homo sapien
tctgccctgtgaccagcctgctgca

SEQ ID NO: 4796507 - DNA, 25 bp, Homo sapien
ttctctcacccagattacttcttgg

SEQ ID NO: 4796508 - DNA, 25 bp, Homo sapien
caaatacatcctggatccagcaatt

SEQ ID NO: 4796509 - DNA, 25 bp, Homo sapien
ccagattacttcttggaggctcttc

SEQ ID NO: 4796510 - DNA, 25 bp, Homo sapien
ctgtgtgctccatatccagattaga

SEQ ID NO: 4796511 - DNA, 25 bp, Homo sapien
ccagattagataccctttccacgtg

SEQ ID NO: 4796512 - DNA, 25 bp, Homo sapien
ctgtgaattggtattcatggagggc

SEQ ID NO: 4796513 - DNA, 25 bp, Homo sapien
tccttcagctgtgaattggtattca

SEQ ID NO: 4796514 - DNA, 25 bp, Homo sapien
cttggcttgcgtaatctgaggaggc

SEQ ID NO: 4796515 - DNA, 25 bp, Homo sapien
cagcgttgacgcattcagacaagct

SEQ ID NO: 4796516 - DNA, 25 bp, Homo sapien
ccctggcctttgaagggaagatgtt

SEQ ID NO: 4796517 - DNA, 25 bp, Homo sapien
ttacaaatacgggagctggacattc

SEQ ID NO: 4796518 - DNA, 25 bp, Homo sapien
tccaggcaccctcaaaatgccaaag

SEQ ID NO: 4796519 - DNA, 25 bp, Homo sapien
tgaataccaaagatgccatctttgt

SEQ ID NO: 4796520 - DNA, 25 bp, Homo sapien
caaagatgccatctttgtacttctg

SEQ ID NO: 4796521 - DNA, 25 bp, Homo sapien
caacagtgagcagaagtttatttgc

SEQ ID NO: 4796522 - DNA, 25 bp, Homo sapien
tccaaccagtgcaaaactacgcata

SEQ ID NO: 4796523 - DNA, 25 bp, Homo sapien
caaccagtgcaaaactacgcatata

SEQ ID NO: 4796524 - DNA, 25 bp, Homo sapien
cagtgcaaaactacgcatataaata

SEQ ID NO: 4796525 - DNA, 25 bp, Homo sapien
accagtgcaaaactacgcatataaa

SEQ ID NO: 4796526 - DNA, 25 bp, Homo sapien
acattcactaccctagcccactcct

SEQ ID NO: 4796527 - DNA, 25 bp, Homo sapien
ttcacctctttctggtccactttct

SEQ ID NO: 4796528 - DNA, 25 bp, Homo sapien
cactttctatagtccatttcaccat

SEQ ID NO: 4796529 - DNA, 25 bp, Homo sapien
agtccactcctctccctagtccacc

SEQ ID NO: 4796530 - DNA, 25 bp, Homo sapien
ggtttgaaaggcctaatcgacacag

SEQ ID NO: 4796531 - DNA, 25 bp, Homo sapien
cctgagaacggaagtcttgtaacct

SEQ ID NO: 4796532 - DNA, 25 bp, Homo sapien
ttgtaacctcaaataccaaggacta

SEQ ID NO: 4796533 - DNA, 25 bp, Homo sapien
cagagaacggaagccaagtgcagaa

SEQ ID NO: 4796534 - DNA, 25 bp, Homo sapien
tggtaaaagtcatgaatagaacttt

SEQ ID NO: 4796535 - DNA, 25 bp, Homo sapien
cttgttgtttttcagcagaggccta

SEQ ID NO: 4796536 - DNA, 25 bp, Homo sapien
gcagaggcctaaacctggtggtaaa

SEQ ID NO: 4796537 - DNA, 25 bp, Homo sapien
tcctccagggtgctctatttttctc

SEQ ID NO: 4796538 - DNA, 25 bp, Homo sapien
caaaacaatgggtagccacgaatgg

SEQ ID NO: 4796539 - DNA, 25 bp, Homo sapien
tagtaaaaattcgtcaccacagctg

SEQ ID NO: 4796540 - DNA, 25 bp, Homo sapien
gcatactgcatacgttgaagcagga

SEQ ID NO: 4796541 - DNA, 25 bp, Homo sapien
ggagagtaagtcagcaatgcatact

SEQ ID NO: 4796542 - DNA, 25 bp, Homo sapien
gcagttatgtgaaacatccagctgc

SEQ ID NO: 4796543 - DNA, 25 bp, Homo sapien
tcccagaacccaaaagtccactgaa

SEQ ID NO: 4796544 - DNA, 25 bp, Homo sapien
cagagaagtgcacaagcagttatgt

SEQ ID NO: 4796545 - DNA, 25 bp, Homo sapien
gaacccaaaagtccactgaagatca

SEQ ID NO: 4796546 - DNA, 25 bp, Homo sapien
ctgggtaaatttgaccttccaagtg

SEQ ID NO: 4796547 - DNA, 25 bp, Homo sapien
agctgggtaaatttgaccttccaag

SEQ ID NO: 4796548 - DNA, 25 bp, Homo sapien
atgtaggacttcttgcccccattcc

SEQ ID NO: 4796549 - DNA, 25 bp, Homo sapien
taaaaacaatgtaggacttcttgcc

SEQ ID NO: 4796550 - DNA, 25 bp, Homo sapien
ttaaaaacaatgtaggacttcttgc

SEQ ID NO: 4796551 - DNA, 25 bp, Homo sapien
aacaatgtaggacttcttgccccca

SEQ ID NO: 4796552 - DNA, 25 bp, Homo sapien
attctccttcgtgactttctctcct

SEQ ID NO: 4796553 - DNA, 25 bp, Homo sapien
tccttcatccacaaggatcacatct

SEQ ID NO: 4796554 - DNA, 25 bp, Homo sapien
tccccattctccttcgtgactttct

SEQ ID NO: 4796555 - DNA, 25 bp, Homo sapien
ctttcttctacaaaatccccattct

SEQ ID NO: 4796556 - DNA, 25 bp, Homo sapien
cttcatagtccttttcccattcact

SEQ ID NO: 4796557 - DNA, 25 bp, Homo sapien
ccttttcccattcactgaaagccat

SEQ ID NO: 4796558 - DNA, 25 bp, Homo sapien
ctgaacctcttcttcatagtccttt

SEQ ID NO: 4796559 - DNA, 25 bp, Homo sapien
agtccttttcccattcactgaaagc

SEQ ID NO: 4796560 - DNA, 25 bp, Homo sapien
tggcctcaacttgatcttcagcatc

SEQ ID NO: 4796561 - DNA, 25 bp, Homo sapien
gcagcatgagatgcagtgcaatgaa

SEQ ID NO: 4796562 - DNA, 25 bp, Homo sapien
taaacagttcttggtcacgggcttg

SEQ ID NO: 4796563 - DNA, 25 bp, Homo sapien
tcaacatcaagcagagcagcatgag

SEQ ID NO: 4796564 - DNA, 25 bp, Homo sapien
taggtaaattgcatgctgtgggagt

SEQ ID NO: 4796565 - DNA, 25 bp, Homo sapien
cagctactcaaggtttagctcccac

SEQ ID NO: 4796566 - DNA, 25 bp, Homo sapien
ctgtgggagtttgctgtacacatta

SEQ ID NO: 4796567 - DNA, 25 bp, Homo sapien
aatagacccccatgtcttgttccct

SEQ ID NO: 4796568 - DNA, 25 bp, Homo sapien
tgccaactgactgtcttgctaggat

SEQ ID NO: 4796569 - DNA, 25 bp, Homo sapien
aaacaattgccaactgactgtcttg

SEQ ID NO: 4796570 - DNA, 25 bp, Homo sapien
ctgctgagaaccctgcaggagttca

SEQ ID NO: 4796571 - DNA, 25 bp, Homo sapien
attgccaactgactgtcttgctagg

SEQ ID NO: 4796572 - DNA, 25 bp, Homo sapien
gaggattataatacaaggggagaca

SEQ ID NO: 4796573 - DNA, 25 bp, Homo sapien
gattataatacaaggggagacagca

SEQ ID NO: 4796574 - DNA, 25 bp, Homo sapien
ggattataatacaaggggagacagc

SEQ ID NO: 4796575 - DNA, 25 bp, Homo sapien
atgaggattataatacaaggggaga

SEQ ID NO: 4796576 - DNA, 25 bp, Homo sapien
gaacattatctttggtgaggaacat

SEQ ID NO: 4796577 - DNA, 25 bp, Homo sapien
gaaatgttcccgtactcttagcact

SEQ ID NO: 4796578 - DNA, 25 bp, Homo sapien
catatgatggtgttgtatttaccag

SEQ ID NO: 4796579 - DNA, 25 bp, Homo sapien
acttccatgaacattatctttggtg

SEQ ID NO: 4796580 - DNA, 25 bp, Homo sapien
ccattcccaaaccagatggtcactg

SEQ ID NO: 4796581 - DNA, 25 bp, Homo sapien
aacatgacagccgtccgttcccatt

SEQ ID NO: 4796582 - DNA, 25 bp, Homo sapien
tcccaaaccagatggtcactgagcc

SEQ ID NO: 4796583 - DNA, 25 bp, Homo sapien
cagtgaacgttaatgggcttttcag

SEQ ID NO: 4796584 - DNA, 25 bp, Homo sapien
gaatgcatgaagtttacatggggga

SEQ ID NO: 4796585 - DNA, 25 bp, Homo sapien
tgaagtttacatgggggagtgagca

SEQ ID NO: 4796586 - DNA, 25 bp, Homo sapien
atgcatgaagtttacatgggggagt

SEQ ID NO: 4796587 - DNA, 25 bp, Homo sapien
gcatgaagtttacatgggggagtga

SEQ ID NO: 4796588 - DNA, 25 bp, Homo sapien
ttagtcataaaccagagagggtgct

SEQ ID NO: 4796589 - DNA, 25 bp, Homo sapien
gagatggcaccagaatacgaaacac

SEQ ID NO: 4796590 - DNA, 25 bp, Homo sapien
tagtcataaaccagagagggtgctt

SEQ ID NO: 4796591 - DNA, 25 bp, Homo sapien
ctgagatggcaccagaatacgaaac

SEQ ID NO: 4796592 - DNA, 25 bp, Homo sapien
ggagaacagtcagggccttaacagt

SEQ ID NO: 4796593 - DNA, 25 bp, Homo sapien
actactctcaactatctgctgaggg

SEQ ID NO: 4796594 - DNA, 25 bp, Homo sapien
tccaactccaccttgagtactgtct

SEQ ID NO: 4796595 - DNA, 25 bp, Homo sapien
tcagggccttaacagtcaaaccaaa

SEQ ID NO: 4796596 - DNA, 25 bp, Homo sapien
tcttcttcagaggtcccccagtatg

SEQ ID NO: 4796597 - DNA, 25 bp, Homo sapien
agaggtcccccagtatgtaccatcc

SEQ ID NO: 4796598 - DNA, 25 bp, Homo sapien
atctcttcttcagaggtcccccagt

SEQ ID NO: 4796599 - DNA, 25 bp, Homo sapien
atcccaatccctgtttctgtcatac

SEQ ID NO: 4796600 - DNA, 25 bp, Homo sapien
gctccgaatggtcagatgcactctc

SEQ ID NO: 4796601 - DNA, 25 bp, Homo sapien
cacgtaacccgtgctccgaatggtc

SEQ ID NO: 4796602 - DNA, 25 bp, Homo sapien
gacccaattgagatgcatgtgaaag

SEQ ID NO: 4796603 - DNA, 25 bp, Homo sapien
ctggttcccggagcctagggcacgt

SEQ ID NO: 4796604 - DNA, 25 bp, Homo sapien
tatatagatggaaacatcgagggcc

SEQ ID NO: 4796605 - DNA, 25 bp, Homo sapien
taagaaaacggacacctgagagaga

SEQ ID NO: 4796606 - DNA, 25 bp, Homo sapien
ccagtaccaagaggagcgtttgaaa

SEQ ID NO: 4796607 - DNA, 25 bp, Homo sapien
tatatgatgtaacaaggaccgccac

SEQ ID NO: 4796608 - DNA, 25 bp, Homo sapien
tctggtaactatggtagggacctcc

SEQ ID NO: 4796609 - DNA, 25 bp, Homo sapien
gctaatggcagatgtacactcaaag

SEQ ID NO: 4796610 - DNA, 25 bp, Homo sapien
aatgagcatcttctgttcgttatca

SEQ ID NO: 4796611 - DNA, 25 bp, Homo sapien
taaatggcaagattcctgttagaga

SEQ ID NO: 4796612 - DNA, 25 bp, Homo sapien
tatatctcacgtgaccgaggatggg

SEQ ID NO: 4796613 - DNA, 25 bp, Homo sapien
gacccagaagtgcaaagtgctcatg

SEQ ID NO: 4796614 - DNA, 25 bp, Homo sapien
ttctccttgaagacagaccgagccc

SEQ ID NO: 4796615 - DNA, 25 bp, Homo sapien
tacctagctgccacctatgatgggc

SEQ ID NO: 4796616 - DNA, 25 bp, Homo sapien
tggaattcagcaatgcccacggctt

SEQ ID NO: 4796617 - DNA, 25 bp, Homo sapien
tctgtgcggacagacattgtgtgac

SEQ ID NO: 4796618 - DNA, 25 bp, Homo sapien
cacggctttctgctggacacgagtc

SEQ ID NO: 4796619 - DNA, 25 bp, Homo sapien
gaggtcattgccagctacaatcagc

SEQ ID NO: 4796620 - DNA, 25 bp, Homo sapien
ggatgagaactgtgaccccgagtgc

SEQ ID NO: 4796621 - DNA, 25 bp, Homo sapien
catggactgcaactatgaacggttc

SEQ ID NO: 4796622 - DNA, 25 bp, Homo sapien
caagcaatacaacatctcctgggag

SEQ ID NO: 4796623 - DNA, 25 bp, Homo sapien
tgatcataagaacccgacggtgacg

SEQ ID NO: 4796624 - DNA, 25 bp, Homo sapien
gaaaacattgctaagtagcaacttg

SEQ ID NO: 4796625 - DNA, 25 bp, Homo sapien
aatgtgtgctactggctgggctctg

SEQ ID NO: 4796626 - DNA, 25 bp, Homo sapien
gagcaggaaaccatcactaatgtgt

SEQ ID NO: 4796627 - DNA, 25 bp, Homo sapien
tctgtgagaactccttgggagagac

SEQ ID NO: 4796628 - DNA, 25 bp, Homo sapien
gcaaatatcttctcagtctggtaac

SEQ ID NO: 4796629 - DNA, 25 bp, Homo sapien
ccagtcatgggttggcttaaaagac

SEQ ID NO: 4796630 - DNA, 25 bp, Homo sapien
ttttgaccaccaagcaattttctga

SEQ ID NO: 4796631 - DNA, 25 bp, Homo sapien
ggtaaccacactgtactggcacagc

SEQ ID NO: 4796632 - DNA, 25 bp, Homo sapien
tctcctcagaaatgatcagagtcta

SEQ ID NO: 4796633 - DNA, 25 bp, Homo sapien
tcagagtctagacattgaagtcaag

SEQ ID NO: 4796634 - DNA, 25 bp, Homo sapien
catgcatgaataaacttgagtggaa

SEQ ID NO: 4796635 - DNA, 25 bp, Homo sapien
gagattcttagccacttcaaccttg

SEQ ID NO: 4796636 - DNA, 25 bp, Homo sapien
ctatagaggcatatttgggttggga

SEQ ID NO: 4796637 - DNA, 25 bp, Homo sapien
gagttcaaaagtgccttccagttgc

SEQ ID NO: 4796638 - DNA, 25 bp, Homo sapien
aatcagaggcaggcatacagggcag

SEQ ID NO: 4796639 - DNA, 25 bp, Homo sapien
agaggcatatttgggttgggatgaa

SEQ ID NO: 4796640 - DNA, 25 bp, Homo sapien
gcagcatgcctgtttacctccaact

SEQ ID NO: 4796641 - DNA, 25 bp, Homo sapien
cctccaactgtatctggtgttttgg

SEQ ID NO: 4796642 - DNA, 25 bp, Homo sapien
tgacttggcctcgattttcacactc

SEQ ID NO: 4796643 - DNA, 25 bp, Homo sapien
gattttcacactctgcagcatgcct

SEQ ID NO: 4796644 - DNA, 25 bp, Homo sapien
cgtcccgggattcgaagctctggat

SEQ ID NO: 4796645 - DNA, 25 bp, Homo sapien
gtcccgggattcgaagctctggatc

SEQ ID NO: 4796646 - DNA, 25 bp, Homo sapien
tcgtcccgggattcgaagctctgga

SEQ ID NO: 4796647 - DNA, 25 bp, Homo sapien
ctcgtcccgggattcgaagctctgg

SEQ ID NO: 4796648 - DNA, 25 bp, Homo sapien
catttagtaaccatcagattgacca

SEQ ID NO: 4796649 - DNA, 25 bp, Homo sapien
caatatgcatgactagaaacctact

SEQ ID NO: 4796650 - DNA, 25 bp, Homo sapien
gaaaaattaggagtcatagaccatg

SEQ ID NO: 4796651 - DNA, 25 bp, Homo sapien
gaaacctacttgatccacaaacatg

SEQ ID NO: 4796652 - DNA, 25 bp, Homo sapien
tgaacacgtacattttgcgactatg

SEQ ID NO: 4796653 - DNA, 25 bp, Homo sapien
gattggtctccaaacaatttgctga

SEQ ID NO: 4796654 - DNA, 25 bp, Homo sapien
agctgtgagctactagtggtcccca

SEQ ID NO: 4796655 - DNA, 25 bp, Homo sapien
caagagatggttagggtgctgaaca

SEQ ID NO: 4796656 - DNA, 25 bp, Homo sapien
aaggatgaccgttttccagaaagca

SEQ ID NO: 4796657 - DNA, 25 bp, Homo sapien
gcagcccttggagttcttgacacca

SEQ ID NO: 4796658 - DNA, 25 bp, Homo sapien
gacacacccgatggagaaagcaaaa

SEQ ID NO: 4796659 - DNA, 25 bp, Homo sapien
tcataacagtgtagtctcgcagccc

SEQ ID NO: 4796660 - DNA, 25 bp, Homo sapien
taaagtgtgtactctcaagagctga

SEQ ID NO: 4796661 - DNA, 25 bp, Homo sapien
ggattctagccctggaagtctctgg

SEQ ID NO: 4796662 - DNA, 25 bp, Homo sapien
gcacagagatgttacgttcccagta

SEQ ID NO: 4796663 - DNA, 25 bp, Homo sapien
caagagctgaacagcctagcagcaa

SEQ ID NO: 4796664 - DNA, 25 bp, Homo sapien
tcactctgccctcatgcacacggtt

SEQ ID NO: 4796665 - DNA, 25 bp, Homo sapien
ggtcctgcaatcagcctaaaatgca

SEQ ID NO: 4796666 - DNA, 25 bp, Homo sapien
gtggtcctgcaatcagcctaaaatg

SEQ ID NO: 4796667 - DNA, 25 bp, Homo sapien
tcatgcacacggttgcttttctctc

SEQ ID NO: 4796668 - DNA, 25 bp, Homo sapien
cagtgagtgcaccagtcctaaagga

SEQ ID NO: 4796669 - DNA, 25 bp, Homo sapien
gttctcatcccatagcaagcagtag

SEQ ID NO: 4796670 - DNA, 25 bp, Homo sapien
gaaacctttgttagagggctgcaga

SEQ ID NO: 4796671 - DNA, 25 bp, Homo sapien
gattggcattagaggtcccctggga

SEQ ID NO: 4796672 - DNA, 25 bp, Homo sapien
tttaggagtccaaaaccacatgtat

SEQ ID NO: 4796673 - DNA, 25 bp, Homo sapien
tgtcccgtgtgcattttgccaagag

SEQ ID NO: 4796674 - DNA, 25 bp, Homo sapien
gccgccattggcaggactctgaaag

SEQ ID NO: 4796675 - DNA, 25 bp, Homo sapien
ggaagggtctccacaagagtctgaa

SEQ ID NO: 4796676 - DNA, 25 bp, Homo sapien
gggactagtcacagaaaaggcagct

SEQ ID NO: 4796677 - DNA, 25 bp, Homo sapien
taaatttcctaatggactgtgggcc

SEQ ID NO: 4796678 - DNA, 25 bp, Homo sapien
tgcgttcgagaagagagaagcctgc

SEQ ID NO: 4796679 - DNA, 25 bp, Homo sapien
tggatcaccccataagactctcgga

SEQ ID NO: 4796680 - DNA, 25 bp, Homo sapien
atttggcggaatctgacttcagagt

SEQ ID NO: 4796681 - DNA, 25 bp, Homo sapien
ggaacttttcgtgaacatgaatagt

SEQ ID NO: 4796682 - DNA, 25 bp, Homo sapien
tttggcggaatctgacttcagagtg

SEQ ID NO: 4796683 - DNA, 25 bp, Homo sapien
tgcttcttggaacttttcgtgaaca

SEQ ID NO: 4796684 - DNA, 25 bp, Homo sapien
gaagagtaacccattcattacataa

SEQ ID NO: 4796685 - DNA, 25 bp, Homo sapien
ggctgaagagtaacccattcattac

SEQ ID NO: 4796686 - DNA, 25 bp, Homo sapien
agagtaacccattcattacataaga

SEQ ID NO: 4796687 - DNA, 25 bp, Homo sapien
gctgaagagtaacccattcattaca

SEQ ID NO: 4796688 - DNA, 25 bp, Homo sapien
caagagcaatcttgtgcactgtctc

SEQ ID NO: 4796689 - DNA, 25 bp, Homo sapien
caaaccagtcagagttcagggtggg

SEQ ID NO: 4796690 - DNA, 25 bp, Homo sapien
ggagggatccattttaacactctgg

SEQ ID NO: 4796691 - DNA, 25 bp, Homo sapien
tatcgaaaccatatagcaggaggat

SEQ ID NO: 4796692 - DNA, 25 bp, Homo sapien
cccttattccatctgcttttcgtta

SEQ ID NO: 4796693 - DNA, 25 bp, Homo sapien
gcttttcgttatagttctatgcatg

SEQ ID NO: 4796694 - DNA, 25 bp, Homo sapien
tcatctacacgcttctcgatcttca

SEQ ID NO: 4796695 - DNA, 25 bp, Homo sapien
catgtttttcagaatgggttcatca

SEQ ID NO: 4796696 - DNA, 25 bp, Homo sapien
caaagtcatagggttgatcagggca

SEQ ID NO: 4796697 - DNA, 25 bp, Homo sapien
tagagtgacacagctaaaagggatc

SEQ ID NO: 4796698 - DNA, 25 bp, Homo sapien
tcagggcatctattctaatctccag

SEQ ID NO: 4796699 - DNA, 25 bp, Homo sapien
gaccattactgtagcaggctgcaga

SEQ ID NO: 4796700 - DNA, 25 bp, Homo sapien
tagagtgtgctatttgcaaagggca

SEQ ID NO: 4796701 - DNA, 25 bp, Homo sapien
gctatggccttcaccaaagcattca

SEQ ID NO: 4796702 - DNA, 25 bp, Homo sapien
gaaatcctgtgctctatacccaatg

SEQ ID NO: 4796703 - DNA, 25 bp, Homo sapien
ttagtgaaatgagagagcctttgcc

SEQ ID NO: 4796704 - DNA, 25 bp, Homo sapien
tcctctttagcttcaggaccagaaa

SEQ ID NO: 4796705 - DNA, 25 bp, Homo sapien
tctttagcttcaggaccagaaacct

SEQ ID NO: 4796706 - DNA, 25 bp, Homo sapien
cacatcctctttagcttcaggacca

SEQ ID NO: 4796707 - DNA, 25 bp, Homo sapien
catcctctttagcttcaggaccaga

SEQ ID NO: 4796708 - DNA, 25 bp, Homo sapien
cctgggctgtaatgcacttaggaag

SEQ ID NO: 4796709 - DNA, 25 bp, Homo sapien
cctgtagaatgagaccagaaagggc

SEQ ID NO: 4796710 - DNA, 25 bp, Homo sapien
tgtaaacagcgttcactctcctggg

SEQ ID NO: 4796711 - DNA, 25 bp, Homo sapien
aatagccagttgagcttgctgagcc

SEQ ID NO: 4796712 - DNA, 25 bp, Homo sapien
caggtggtgaaaggggacacttcgg

SEQ ID NO: 4796713 - DNA, 25 bp, Homo sapien
gtggtgaaaggggacacttcggtga

SEQ ID NO: 4796714 - DNA, 25 bp, Homo sapien
aaacatgactcatatgtgcaggtgg

SEQ ID NO: 4796715 - DNA, 25 bp, Homo sapien
aacatgactcatatgtgcaggtggt

SEQ ID NO: 4796716 - DNA, 25 bp, Homo sapien
agagtgagatatgacatactaatct

SEQ ID NO: 4796717 - DNA, 25 bp, Homo sapien
ggatcatattctccgtattcacaag

SEQ ID NO: 4796718 - DNA, 25 bp, Homo sapien
ctgcataaattctcactggaggact

SEQ ID NO: 4796719 - DNA, 25 bp, Homo sapien
tggtctcagtgatttctcacctgtg

SEQ ID NO: 4796720 - DNA, 25 bp, Homo sapien
gaattatcagacaggcttgagcaca

SEQ ID NO: 4796721 - DNA, 25 bp, Homo sapien
cataccaaatgaccggttagcagct

SEQ ID NO: 4796722 - DNA, 25 bp, Homo sapien
ttagcagctaacgatttggccctca

SEQ ID NO: 4796723 - DNA, 25 bp, Homo sapien
gcacgttccaggcagtatggaccaa

SEQ ID NO: 4796724 - DNA, 25 bp, Homo sapien
gctgcttcaacaccctgcgtttgtg

SEQ ID NO: 4796725 - DNA, 25 bp, Homo sapien
gcagatgtctgttgccctggccaag

SEQ ID NO: 4796726 - DNA, 25 bp, Homo sapien
tctggtgcttagtggaagattcagg

SEQ ID NO: 4796727 - DNA, 25 bp, Homo sapien
aagattcagggaagtggcaggtgca

SEQ ID NO: 4796728 - DNA, 25 bp, Homo sapien
catcttggcatctagtggggttccc

SEQ ID NO: 4796729 - DNA, 25 bp, Homo sapien
ggaacacacagatcttaatttggaa

SEQ ID NO: 4796730 - DNA, 25 bp, Homo sapien
gacaatgcactctgcatgatcatct

SEQ ID NO: 4796731 - DNA, 25 bp, Homo sapien
tgacttgtacttcaatttcaacaca

SEQ ID NO: 4796732 - DNA, 25 bp, Homo sapien
agtgtttgcttgcttcgttcttcac

SEQ ID NO: 4796733 - DNA, 25 bp, Homo sapien
gagtgtttgcttgcttcgttcttca

SEQ ID NO: 4796734 - DNA, 25 bp, Homo sapien
tgtttgcttgcttcgttcttcacct

SEQ ID NO: 4796735 - DNA, 25 bp, Homo sapien
gtttgcttgcttcgttcttcacctc

SEQ ID NO: 4796736 - DNA, 25 bp, Homo sapien
gtcacccacggaccatctggctggg

SEQ ID NO: 4796737 - DNA, 25 bp, Homo sapien
catgtgctgtgaagtcacccacgga

SEQ ID NO: 4796738 - DNA, 25 bp, Homo sapien
agcacatgtgctgtgaagtcaccca

SEQ ID NO: 4796739 - DNA, 25 bp, Homo sapien
gtgaagtcacccacggaccatctgg

SEQ ID NO: 4796740 - DNA, 25 bp, Homo sapien
ggatttgcctcgttgaaaccaggtg

SEQ ID NO: 4796741 - DNA, 25 bp, Homo sapien
gggctgattccctaattgaccatga

SEQ ID NO: 4796742 - DNA, 25 bp, Homo sapien
gacaggccagctcgagaaatacaca

SEQ ID NO: 4796743 - DNA, 25 bp, Homo sapien
ccatgatgaaaagcctagggaactg

SEQ ID NO: 4796744 - DNA, 25 bp, Homo sapien
ggtacactcatgaaaccactactca

SEQ ID NO: 4796745 - DNA, 25 bp, Homo sapien
cactactcatattaggatgtggacc

SEQ ID NO: 4796746 - DNA, 25 bp, Homo sapien
catacacatactacccaacttaata

SEQ ID NO: 4796747 - DNA, 25 bp, Homo sapien
tggacctgtccaaatcttcagggag

SEQ ID NO: 4796748 - DNA, 25 bp, Homo sapien
aacagtctgccttaaaagtgaccca

SEQ ID NO: 4796749 - DNA, 25 bp, Homo sapien
cctggaaaggagttgagggacatca

SEQ ID NO: 4796750 - DNA, 25 bp, Homo sapien
gaaagtccagaatgtctaagccagt

SEQ ID NO: 4796751 - DNA, 25 bp, Homo sapien
aaaccctcatgggtccacatggtga

SEQ ID NO: 4796752 - DNA, 25 bp, Homo sapien
tccatacctgtgactgggcagtgct

SEQ ID NO: 4796753 - DNA, 25 bp, Homo sapien
aattagtcaactgcacgtggaagcc

SEQ ID NO: 4796754 - DNA, 25 bp, Homo sapien
tgtctagcctccaaaagttaagtga

SEQ ID NO: 4796755 - DNA, 25 bp, Homo sapien
tacagattgttctcaagagggccat

SEQ ID NO: 4796756 - DNA, 25 bp, Homo sapien
tctgatgcactattgtgtgtcagca

SEQ ID NO: 4796757 - DNA, 25 bp, Homo sapien
atcttctgtgtaggtgaccggagca

SEQ ID NO: 4796758 - DNA, 25 bp, Homo sapien
tctgtgtaggtgaccggagcactga

SEQ ID NO: 4796759 - DNA, 25 bp, Homo sapien
ggcagctctgatgcactattgtgtg

SEQ ID NO: 4796760 - DNA, 25 bp, Homo sapien
tgaaagatgaggtggacagtcctct

SEQ ID NO: 4796761 - DNA, 25 bp, Homo sapien
ctgaagtattagattgttagcagca

SEQ ID NO: 4796762 - DNA, 25 bp, Homo sapien
gaaagatgaggtggacagtcctcta

SEQ ID NO: 4796763 - DNA, 25 bp, Homo sapien
gaagtattagattgttagcagcaaa

SEQ ID NO: 4796764 - DNA, 25 bp, Homo sapien
agccacaatcttaactacctaccca

SEQ ID NO: 4796765 - DNA, 25 bp, Homo sapien
agggaagcttttccaagccacaatc

SEQ ID NO: 4796766 - DNA, 25 bp, Homo sapien
tagggaagcttttccaagccacaat

SEQ ID NO: 4796767 - DNA, 25 bp, Homo sapien
aaggatttgcattacccccagattc

SEQ ID NO: 4796768 - DNA, 25 bp, Homo sapien
gaaattgtttattctacagcctcag

SEQ ID NO: 4796769 - DNA, 25 bp, Homo sapien
cagcctcagtaggtagacacaaaca

SEQ ID NO: 4796770 - DNA, 25 bp, Homo sapien
ctgtacattgtggtaggtccaggaa

SEQ ID NO: 4796771 - DNA, 25 bp, Homo sapien
tttccctagaagacatagagtggga

SEQ ID NO: 4796772 - DNA, 25 bp, Homo sapien
caatgtcaaagtcagctaactgtcg

SEQ ID NO: 4796773 - DNA, 25 bp, Homo sapien
aataaaactgtgatctcgtctagag

SEQ ID NO: 4796774 - DNA, 25 bp, Homo sapien
ttaaactacacaccagcagtcagtg

SEQ ID NO: 4796775 - DNA, 25 bp, Homo sapien
ggcattctgagtgcaaacaaatggg

SEQ ID NO: 4796776 - DNA, 25 bp, Homo sapien
tggatctaagttaaatcttttggca

SEQ ID NO: 4796777 - DNA, 25 bp, Homo sapien
ttacacaattgttcatctaatttat

SEQ ID NO: 4796778 - DNA, 25 bp, Homo sapien
atggatctaagttaaatcttttggc

SEQ ID NO: 4796779 - DNA, 25 bp, Homo sapien
cctgttctcatggatttgttttccc

SEQ ID NO: 4796780 - DNA, 25 bp, Homo sapien
gatatttttatcctgttctcatgga

SEQ ID NO: 4796781 - DNA, 25 bp, Homo sapien
ttatcctgttctcatggatttgttt

SEQ ID NO: 4796782 - DNA, 25 bp, Homo sapien
ttttatcctgttctcatggatttgt

SEQ ID NO: 4796783 - DNA, 25 bp, Homo sapien
tacagaagcatgagttagcaatggg

SEQ ID NO: 4796784 - DNA, 25 bp, Homo sapien
ttcaatccataagaacccttgcttc

SEQ ID NO: 4796785 - DNA, 25 bp, Homo sapien
tttaaggtgagaaacagcggtgctg

SEQ ID NO: 4796786 - DNA, 25 bp, Homo sapien
agttcaagtactgtccaccctgtga

SEQ ID NO: 4796787 - DNA, 25 bp, Homo sapien
tggagtcttagaaatctgggcttca

SEQ ID NO: 4796788 - DNA, 25 bp, Homo sapien
atctgtggagtcttagaaatctggg

SEQ ID NO: 4796789 - DNA, 25 bp, Homo sapien
tgtggagtcttagaaatctgggctt

SEQ ID NO: 4796790 - DNA, 25 bp, Homo sapien
agtcttagaaatctgggcttcatgc

SEQ ID NO: 4796791 - DNA, 25 bp, Homo sapien
cctgtgaagtactctccagatgtga

SEQ ID NO: 4796792 - DNA, 25 bp, Homo sapien
gaaatgtggtgatatctcccagatg

SEQ ID NO: 4796793 - DNA, 25 bp, Homo sapien
gggaatccaattagagacatcagtg

SEQ ID NO: 4796794 - DNA, 25 bp, Homo sapien
cagatgtgtgggtgaaatcgtcact

SEQ ID NO: 4796795 - DNA, 25 bp, Homo sapien
ctactctagctcctttctccacaca

SEQ ID NO: 4796796 - DNA, 25 bp, Homo sapien
tactctagctcctttctccacacac

SEQ ID NO: 4796797 - DNA, 25 bp, Homo sapien
gcatgccagttccaaggttgcagtg

SEQ ID NO: 4796798 - DNA, 25 bp, Homo sapien
catcatgtcagaggtgcactgaggg

SEQ ID NO: 4796799 - DNA, 25 bp, Homo sapien
gggcagcatgccagttccaaggttg

SEQ ID NO: 4796800 - DNA, 25 bp, Homo sapien
gcagcatgccagttccaaggttgca

SEQ ID NO: 4796801 - DNA, 25 bp, Homo sapien
gccttggtgtattctccatgtaaat

SEQ ID NO: 4796802 - DNA, 25 bp, Homo sapien
gggccttggtgtattctccatgtaa

SEQ ID NO: 4796803 - DNA, 25 bp, Homo sapien
cttggtgtattctccatgtaaatgg

SEQ ID NO: 4796804 - DNA, 25 bp, Homo sapien
tggtgtattctccatgtaaatggac

SEQ ID NO: 4796805 - DNA, 25 bp, Homo sapien
ctgtggccccttgccctcccctgct

SEQ ID NO: 4796806 - DNA, 25 bp, Homo sapien
gccccttgccctcccctgctgccaa

SEQ ID NO: 4796807 - DNA, 25 bp, Homo sapien
cccttgccctcccctgctgccaact

SEQ ID NO: 4796808 - DNA, 25 bp, Homo sapien
gtggccccttgccctcccctgctgc

SEQ ID NO: 4796809 - DNA, 25 bp, Homo sapien
tcccttaagggcaatagctggtgaa

SEQ ID NO: 4796810 - DNA, 25 bp, Homo sapien
tgaaggcccatgtatacccaggaag

SEQ ID NO: 4796811 - DNA, 25 bp, Homo sapien
gaagctccacctgtatacttagaga

SEQ ID NO: 4796812 - DNA, 25 bp, Homo sapien
tgttcctcgggttgggtcaagacaa

SEQ ID NO: 4796813 - DNA, 25 bp, Homo sapien
tcccaggcaccaaggttggaagaat

SEQ ID NO: 4796814 - DNA, 25 bp, Homo sapien
ttagattgtgagaggttgagaagct

SEQ ID NO: 4796815 - DNA, 25 bp, Homo sapien
ttgtgttacccattttccccatatg

SEQ ID NO: 4796816 - DNA, 25 bp, Homo sapien
agaagcttcccaggcaccaaggttg

SEQ ID NO: 4796817 - DNA, 25 bp, Homo sapien
ataggaatttttaatgcatggacag

SEQ ID NO: 4796818 - DNA, 25 bp, Homo sapien
gaatttttaatgcatggacaggcct

SEQ ID NO: 4796819 - DNA, 25 bp, Homo sapien
caataggaatttttaatgcatggac

SEQ ID NO: 4796820 - DNA, 25 bp, Homo sapien
aggaatttttaatgcatggacaggc

SEQ ID NO: 4796821 - DNA, 25 bp, Homo sapien
ggtcaaaactgtccctccataggtc

SEQ ID NO: 4796822 - DNA, 25 bp, Homo sapien
caataatgtccagcaaaaaagagag

SEQ ID NO: 4796823 - DNA, 25 bp, Homo sapien
aagtccttaaagacccatgcttcct

SEQ ID NO: 4796824 - DNA, 25 bp, Homo sapien
aaggccgcttggtctccacctgaaa

SEQ ID NO: 4796825 - DNA, 25 bp, Homo sapien
ctgcctcgggattgacagccatcca

SEQ ID NO: 4796826 - DNA, 25 bp, Homo sapien
gcctcgggattgacagccatccata

SEQ ID NO: 4796827 - DNA, 25 bp, Homo sapien
tcgggattgacagccatccataaga

SEQ ID NO: 4796828 - DNA, 25 bp, Homo sapien
ggattgacagccatccataagaaaa

SEQ ID NO: 4796829 - DNA, 25 bp, Homo sapien
taaaaaggagagacttttgatagag

SEQ ID NO: 4796830 - DNA, 25 bp, Homo sapien
aaggagagacttttgatagagtcaa

SEQ ID NO: 4796831 - DNA, 25 bp, Homo sapien
ggagagacttttgatagagtcaaat

SEQ ID NO: 4796832 - DNA, 25 bp, Homo sapien
aaaaggagagacttttgatagagtc

SEQ ID NO: 4796833 - DNA, 25 bp, Homo sapien
caggatccaggagaatactgctccc

SEQ ID NO: 4796834 - DNA, 25 bp, Homo sapien
tatccacaggagaaaccgtttgctt

SEQ ID NO: 4796835 - DNA, 25 bp, Homo sapien
tggccttgctggcaagcttcatctg

SEQ ID NO: 4796836 - DNA, 25 bp, Homo sapien
gagtctctgtgctcacggagggcaa

SEQ ID NO: 4796837 - DNA, 25 bp, Homo sapien
aagatagggcactgtttccacgcgg

SEQ ID NO: 4796838 - DNA, 25 bp, Homo sapien
tctccagtcgccgtagaatcaggtg

SEQ ID NO: 4796839 - DNA, 25 bp, Homo sapien
ctcgctgcggcagaaaagatagggc

SEQ ID NO: 4796840 - DNA, 25 bp, Homo sapien
ttgaggatgctataccacaccatgc

SEQ ID NO: 4796841 - DNA, 25 bp, Homo sapien
gaagtccagatcaagagttagacct

SEQ ID NO: 4796842 - DNA, 25 bp, Homo sapien
gacctttgaggtagtaaatgtcaac

SEQ ID NO: 4796843 - DNA, 25 bp, Homo sapien
tgaaaggtaggatgagacagccatg

SEQ ID NO: 4796844 - DNA, 25 bp, Homo sapien
cactgattcaaaaattgccctagaa

SEQ ID NO: 4796845 - DNA, 25 bp, Homo sapien
tattccgtactatggaggacatcat

SEQ ID NO: 4796846 - DNA, 25 bp, Homo sapien
gaattattccgtactatggaggaca

SEQ ID NO: 4796847 - DNA, 25 bp, Homo sapien
aagaattattccgtactatggagga

SEQ ID NO: 4796848 - DNA, 25 bp, Homo sapien
attattccgtactatggaggacatc

SEQ ID NO: 4796849 - DNA, 25 bp, Homo sapien
gaaagaataaacttgtgaacagaac

SEQ ID NO: 4796850 - DNA, 25 bp, Homo sapien
tttcacttcgaactctcttctccaa

SEQ ID NO: 4796851 - DNA, 25 bp, Homo sapien
ctttgctaaacaacccagccttgtt

SEQ ID NO: 4796852 - DNA, 25 bp, Homo sapien
cacaagaaccatcatgatctgtcct

SEQ ID NO: 4796853 - DNA, 25 bp, Homo sapien
cattggtaattccttctgatgagaa

SEQ ID NO: 4796854 - DNA, 25 bp, Homo sapien
ccagatctggattagctgctccagc

SEQ ID NO: 4796855 - DNA, 25 bp, Homo sapien
tttacaaggattcttccttgagctc

SEQ ID NO: 4796856 - DNA, 25 bp, Homo sapien
ttccacctggaggacccttcttcat

SEQ ID NO: 4796857 - DNA, 25 bp, Homo sapien
actagatgctgaaccttgtaaaggc

SEQ ID NO: 4796858 - DNA, 25 bp, Homo sapien
tgaccagtcttttccgcactagatg

SEQ ID NO: 4796859 - DNA, 25 bp, Homo sapien
tgccaaatgccaccgcaattgctgg

SEQ ID NO: 4796860 - DNA, 25 bp, Homo sapien
cacacggcctgacacatagttagca

SEQ ID NO: 4796861 - DNA, 25 bp, Homo sapien
gggttgcacagtgagcttattagca

SEQ ID NO: 4796862 - DNA, 25 bp, Homo sapien
agcaatctcagatatcctccaggag

SEQ ID NO: 4796863 - DNA, 25 bp, Homo sapien
tcctgctgacatatcagtgtgggat

SEQ ID NO: 4796864 - DNA, 25 bp, Homo sapien
cagcaccaggatagattaggaggca

SEQ ID NO: 4796865 - DNA, 25 bp, Homo sapien
ctgagtggattgcctggcctctgtg

SEQ ID NO: 4796866 - DNA, 25 bp, Homo sapien
actgagtggattgcctggcctctgt

SEQ ID NO: 4796867 - DNA, 25 bp, Homo sapien
tactgagtggattgcctggcctctg

SEQ ID NO: 4796868 - DNA, 25 bp, Homo sapien
tcatagtgagagttgtagtggtgct

SEQ ID NO: 4796869 - DNA, 25 bp, Homo sapien
tccacttgtgtacccattgtacaga

SEQ ID NO: 4796870 - DNA, 25 bp, Homo sapien
gacgaagtcgccaaacttttcatag

SEQ ID NO: 4796871 - DNA, 25 bp, Homo sapien
catcagtgtgttgtaggccatctgc

SEQ ID NO: 4796872 - DNA, 25 bp, Homo sapien
cgtgcttagctctgagtgcctccct

SEQ ID NO: 4796873 - DNA, 25 bp, Homo sapien
agtggacaggccgtcctcagggtca

SEQ ID NO: 4796874 - DNA, 25 bp, Homo sapien
tctgccttgttgtcatctaccagtg

SEQ ID NO: 4796875 - DNA, 25 bp, Homo sapien
tcgtgtatccacagcatacagagtg

SEQ ID NO: 4796876 - DNA, 25 bp, Homo sapien
ccaggctgtgacttcacagaaggcc

SEQ ID NO: 4796877 - DNA, 25 bp, Homo sapien
accaggctgtgacttcacagaaggc

SEQ ID NO: 4796878 - DNA, 25 bp, Homo sapien
caagaagttaattggcagtgagagc

SEQ ID NO: 4796879 - DNA, 25 bp, Homo sapien
aaccaagaagttaattggcagtgag

SEQ ID NO: 4796880 - DNA, 25 bp, Homo sapien
tctgacagggggtaagagcagggac

SEQ ID NO: 4796881 - DNA, 25 bp, Homo sapien
atgaaaccaagaagttaattggcag

SEQ ID NO: 4796882 - DNA, 25 bp, Homo sapien
cctgggtccccgagagtataggaga

SEQ ID NO: 4796883 - DNA, 25 bp, Homo sapien
tccccagccgcaacatgatttaggc

SEQ ID NO: 4796884 - DNA, 25 bp, Homo sapien
gtttgaagtctccaggccaacgcct

SEQ ID NO: 4796885 - DNA, 25 bp, Homo sapien
cccgagagtataggagaatgcgttt

SEQ ID NO: 4796886 - DNA, 25 bp, Homo sapien
cttcccacatctgaccctaaagccc

SEQ ID NO: 4796887 - DNA, 25 bp, Homo sapien
tcttcccacatctgaccctaaagcc

SEQ ID NO: 4796888 - DNA, 25 bp, Homo sapien
ttaagattgaattttgccaaagcca

SEQ ID NO: 4796889 - DNA, 25 bp, Homo sapien
ggtgcctttaagattgaattttgcc

SEQ ID NO: 4796890 - DNA, 25 bp, Homo sapien
tgcctttaagattgaattttgccaa

SEQ ID NO: 4796891 - DNA, 25 bp, Homo sapien
aagattgaattttgccaaagccaag

SEQ ID NO: 4796892 - DNA, 25 bp, Homo sapien
cctaagcctggtaataatatgggag

SEQ ID NO: 4796893 - DNA, 25 bp, Homo sapien
tccttgagagcagttatgtggtcca

SEQ ID NO: 4796894 - DNA, 25 bp, Homo sapien
gcaatgcagcacagagttatgcact

SEQ ID NO: 4796895 - DNA, 25 bp, Homo sapien
gaagcatatccctgagtattgagta

SEQ ID NO: 4796896 - DNA, 25 bp, Homo sapien
tacttaatcaactgctggtccaggg

SEQ ID NO: 4796897 - DNA, 25 bp, Homo sapien
gacaaagcagggtttattgcccaca

SEQ ID NO: 4796898 - DNA, 25 bp, Homo sapien
ggtccagggctccttatgctgcatt

SEQ ID NO: 4796899 - DNA, 25 bp, Homo sapien
gaagcgggcttttgaatcaaggacg

SEQ ID NO: 4796900 - DNA, 25 bp, Homo sapien
caaagtctacagttgctaggttcca

SEQ ID NO: 4796901 - DNA, 25 bp, Homo sapien
aactcactttagaatgcagccagca

SEQ ID NO: 4796902 - DNA, 25 bp, Homo sapien
gaagcatggtacctatagccactga

SEQ ID NO: 4796903 - DNA, 25 bp, Homo sapien
accagaggagtggtgacatcagcca

SEQ ID NO: 4796904 - DNA, 25 bp, Homo sapien
gcctggtatattgaaagcactcttt

SEQ ID NO: 4796905 - DNA, 25 bp, Homo sapien
cactgtctcattgagaagggtggat

SEQ ID NO: 4796906 - DNA, 25 bp, Homo sapien
aaaaaacactgtctcattgagaagg

SEQ ID NO: 4796907 - DNA, 25 bp, Homo sapien
agggtggatggattaacttacagaa

SEQ ID NO: 4796908 - DNA, 25 bp, Homo sapien
ctgatttcataggcctaatttaaaa

SEQ ID NO: 4796909 - DNA, 25 bp, Homo sapien
taaaattatgtgcatgtgctagtag

SEQ ID NO: 4796910 - DNA, 25 bp, Homo sapien
gtaggggatgcagattcacaaagtc

SEQ ID NO: 4796911 - DNA, 25 bp, Homo sapien
cacagtgggtaaaaacccacctctg

SEQ ID NO: 4796912 - DNA, 25 bp, Homo sapien
tcaaaaggattctggatggtcgttc

SEQ ID NO: 4796913 - DNA, 25 bp, Homo sapien
cctgataaggaccagttcctccaga

SEQ ID NO: 4796914 - DNA, 25 bp, Homo sapien
tcgttccttccaaagatagtgggac

SEQ ID NO: 4796915 - DNA, 25 bp, Homo sapien
cttgcctgataaggaccagttcctc

SEQ ID NO: 4796916 - DNA, 25 bp, Homo sapien
cagctgctacacaagatgtgcccag

SEQ ID NO: 4796917 - DNA, 25 bp, Homo sapien
gacttcagggacctctccatggctt

SEQ ID NO: 4796918 - DNA, 25 bp, Homo sapien
gacacttgaagatgactgagtagat

SEQ ID NO: 4796919 - DNA, 25 bp, Homo sapien
cgggctccagacacttgaagatgac

SEQ ID NO: 4796920 - DNA, 25 bp, Homo sapien
attccaagtctggctacatgtgttt

SEQ ID NO: 4796921 - DNA, 25 bp, Homo sapien
ttccaagtctggctacatgtgtttg

SEQ ID NO: 4796922 - DNA, 25 bp, Homo sapien
tgggaatagctttccagatagttcc

SEQ ID NO: 4796923 - DNA, 25 bp, Homo sapien
gagatgaaaagatggctgatattca

SEQ ID NO: 4796924 - DNA, 25 bp, Homo sapien
ttcattttcaaatgggaatagcttt

SEQ ID NO: 4796925 - DNA, 25 bp, Homo sapien
gctttccagatagttccatgaattt

SEQ ID NO: 4796926 - DNA, 25 bp, Homo sapien
agagccataaaagccctcgtcatcc

SEQ ID NO: 4796927 - DNA, 25 bp, Homo sapien
agccataaaagccctcgtcatcccc

SEQ ID NO: 4796928 - DNA, 25 bp, Homo sapien
taattagagccataaaagccctcgt

SEQ ID NO: 4796929 - DNA, 25 bp, Homo sapien
ttagagccataaaagccctcgtcat

SEQ ID NO: 4796930 - DNA, 25 bp, Homo sapien
tggctgcagcgggtattgctaacat

SEQ ID NO: 4796931 - DNA, 25 bp, Homo sapien
gctgcagcgggtattgctaacatgt

SEQ ID NO: 4796932 - DNA, 25 bp, Homo sapien
aaatgatgctaatgcatttggctgc

SEQ ID NO: 4796933 - DNA, 25 bp, Homo sapien
cagcgggtattgctaacatgtgtgg

SEQ ID NO: 4796934 - DNA, 25 bp, Homo sapien
gccctaatcctcctgagtaaaccag

SEQ ID NO: 4796935 - DNA, 25 bp, Homo sapien
agaactcgaacttgctctggagatg

SEQ ID NO: 4796936 - DNA, 25 bp, Homo sapien
gaaaaggtctgcctattgccctaat

SEQ ID NO: 4796937 - DNA, 25 bp, Homo sapien
aaaccaggagcattgcagagctcac

SEQ ID NO: 4796938 - DNA, 25 bp, Homo sapien
tccattagtctgagttaggggcata

SEQ ID NO: 4796939 - DNA, 25 bp, Homo sapien
tctctgtcgatggaaacacttatca

SEQ ID NO: 4796940 - DNA, 25 bp, Homo sapien
ctcttccactctctgtcgatggaaa

SEQ ID NO: 4796941 - DNA, 25 bp, Homo sapien
agttaggggcatagtctgtgttctc

SEQ ID NO: 4796942 - DNA, 25 bp, Homo sapien
atcttggaacccaaatttctataat

SEQ ID NO: 4796943 - DNA, 25 bp, Homo sapien
ggtgtctctggattgcatctgcaac

SEQ ID NO: 4796944 - DNA, 25 bp, Homo sapien
tagagctgagtgaatggtgtctctg

SEQ ID NO: 4796945 - DNA, 25 bp, Homo sapien
gttaactgctgataccagtgcctgg

SEQ ID NO: 4796946 - DNA, 25 bp, Homo sapien
tgcaacctgacgttccagaatgctg

SEQ ID NO: 4796947 - DNA, 25 bp, Homo sapien
caaccttgctgacaagattcatccc

SEQ ID NO: 4796948 - DNA, 25 bp, Homo sapien
acaaccttgctgacaagattcatcc

SEQ ID NO: 4796949 - DNA, 25 bp, Homo sapien
ggtgccccagttcccgtagtcattc

SEQ ID NO: 4796950 - DNA, 25 bp, Homo sapien
gccccagttcccgtagtcattctat

SEQ ID NO: 4796951 - DNA, 25 bp, Homo sapien
cccagttcccgtagtcattctatca

SEQ ID NO: 4796952 - DNA, 25 bp, Homo sapien
tgccccagttcccgtagtcattcta

SEQ ID NO: 4796953 - DNA, 25 bp, Homo sapien
tactttctctgtgcacgaaactgtg

SEQ ID NO: 4796954 - DNA, 25 bp, Homo sapien
tctatcaggaagttcacagttgagc

SEQ ID NO: 4796955 - DNA, 25 bp, Homo sapien
tgtttacgatcctcaaaaggcttca

SEQ ID NO: 4796956 - DNA, 25 bp, Homo sapien
agaaacaagaaaccgtgatcaggag

SEQ ID NO: 4796957 - DNA, 25 bp, Homo sapien
gcctggccttgatctattaatacgt

SEQ ID NO: 4796958 - DNA, 25 bp, Homo sapien
tcatgaactttgaatgacttcagtc

SEQ ID NO: 4796959 - DNA, 25 bp, Homo sapien
attaatacgtcccaggagctacaga

SEQ ID NO: 4796960 - DNA, 25 bp, Homo sapien
ctttgaatgacttcagtcaagtcac

SEQ ID NO: 4796961 - DNA, 25 bp, Homo sapien
cagaacagggtaattgagttctccc

SEQ ID NO: 4796962 - DNA, 25 bp, Homo sapien
gaggttggggtcatgtgagcacagc

SEQ ID NO: 4796963 - DNA, 25 bp, Homo sapien
tccagggaagtacccaaaatctctc

SEQ ID NO: 4796964 - DNA, 25 bp, Homo sapien
acagggtaattgagttctccctggg

SEQ ID NO: 4796965 - DNA, 25 bp, Homo sapien
gcttggctttcctaacagcgtcccg

SEQ ID NO: 4796966 - DNA, 25 bp, Homo sapien
tgaccgagcgatggcttctctgaag

SEQ ID NO: 4796967 - DNA, 25 bp, Homo sapien
tcccggaactgaccgagcgatggct

SEQ ID NO: 4796968 - DNA, 25 bp, Homo sapien
tttcctaacagcgtcccggaactga

SEQ ID NO: 4796969 - DNA, 25 bp, Homo sapien
ggtctcaaatcaatagcctcagcta

SEQ ID NO: 4796970 - DNA, 25 bp, Homo sapien
tatttgaaaacgaagtggcatgcct

SEQ ID NO: 4796971 - DNA, 25 bp, Homo sapien
gaaaatcagaaaggctccagaagac

SEQ ID NO: 4796972 - DNA, 25 bp, Homo sapien
ttcttgcaagaaaaggtctaagccc

SEQ ID NO: 4796973 - DNA, 25 bp, Homo sapien
ggctggttcaatatccgcaaatcaa

SEQ ID NO: 4796974 - DNA, 25 bp, Homo sapien
gcaaggctggttcaatatccgcaaa

SEQ ID NO: 4796975 - DNA, 25 bp, Homo sapien
tcaataaatgtaatccagcaataaa

SEQ ID NO: 4796976 - DNA, 25 bp, Homo sapien
aaatcaataaatgtaatccagcaat

SEQ ID NO: 4796977 - DNA, 25 bp, Homo sapien
ctgtgtacaggtcagtgtctgtgta

SEQ ID NO: 4796978 - DNA, 25 bp, Homo sapien
aatatagtcggagaccttggtccca

SEQ ID NO: 4796979 - DNA, 25 bp, Homo sapien
caaggagaccacagtactggagggc

SEQ ID NO: 4796980 - DNA, 25 bp, Homo sapien
caatagctggctgaacatccaccca

SEQ ID NO: 4796981 - DNA, 25 bp, Homo sapien
gagcaccagtaggaactcatcagtg

SEQ ID NO: 4796982 - DNA, 25 bp, Homo sapien
ggtcacacctgcaccagtcatcgat

SEQ ID NO: 4796983 - DNA, 25 bp, Homo sapien
tcatcgatcacatcccctttccctg

SEQ ID NO: 4796984 - DNA, 25 bp, Homo sapien
catcaaaggcgctgaggtcacacct

SEQ ID NO: 4796985 - DNA, 25 bp, Homo sapien
agcacatgccaacttcttacagtag

SEQ ID NO: 4796986 - DNA, 25 bp, Homo sapien
gattcaacctcctttgttcttcagc

SEQ ID NO: 4796987 - DNA, 25 bp, Homo sapien
tgcatgcactatttcatacccacaa

SEQ ID NO: 4796988 - DNA, 25 bp, Homo sapien
tggttaaagcctccactgattcaac

SEQ ID NO: 4796989 - DNA, 25 bp, Homo sapien
gggtgggctatggaggtagagtccc

SEQ ID NO: 4796990 - DNA, 25 bp, Homo sapien
tgggctatggaggtagagtcccttt

SEQ ID NO: 4796991 - DNA, 25 bp, Homo sapien
ttgtgatcacagcttggaggacagt

SEQ ID NO: 4796992 - DNA, 25 bp, Homo sapien
gagtcccttttggagacaattgtga

SEQ ID NO: 4796993 - DNA, 25 bp, Homo sapien
catccgtcatcagcatatctcctca

SEQ ID NO: 4796994 - DNA, 25 bp, Homo sapien
tgggccatctgccatccgtcatcag

SEQ ID NO: 4796995 - DNA, 25 bp, Homo sapien
ctgggccatctgccatccgtcatca

SEQ ID NO: 4796996 - DNA, 25 bp, Homo sapien
atctgccatccgtcatcagcatatc

SEQ ID NO: 4796997 - DNA, 25 bp, Homo sapien
aaaacaacagcacaaggtataatca

SEQ ID NO: 4796998 - DNA, 25 bp, Homo sapien
caaggtataatcaagggctcgtttc

SEQ ID NO: 4796999 - DNA, 25 bp, Homo sapien
taggcagaaggcatcatcttttccc

SEQ ID NO: 4797000 - DNA, 25 bp, Homo sapien
ttccagcttaggcagaaggcatcat

SEQ ID NO: 4797001 - DNA, 25 bp, Homo sapien
aagtgttttcttgtatccatgtggc

SEQ ID NO: 4797002 - DNA, 25 bp, Homo sapien
tcagggctctgaagtgttttcttgt

SEQ ID NO: 4797003 - DNA, 25 bp, Homo sapien
tgaagtgttttcttgtatccatgtg

SEQ ID NO: 4797004 - DNA, 25 bp, Homo sapien
gctctgaagtgttttcttgtatcca

SEQ ID NO: 4797005 - DNA, 25 bp, Homo sapien
cttggatgagggtataaagtggcac

SEQ ID NO: 4797006 - DNA, 25 bp, Homo sapien
caaacctgagaggtaggtgatgaag

SEQ ID NO: 4797007 - DNA, 25 bp, Homo sapien
tctccacacctgaaatgagctggtc

SEQ ID NO: 4797008 - DNA, 25 bp, Homo sapien
tgacaggtagatggacagcgcccct

SEQ ID NO: 4797009 - DNA, 25 bp, Homo sapien
ccttcttgctgcccagctctgtggt

SEQ ID NO: 4797010 - DNA, 25 bp, Homo sapien
ttcttgctgcccagctctgtggtct

SEQ ID NO: 4797011 - DNA, 25 bp, Homo sapien
acttgagctccttcttgctgcccag

SEQ ID NO: 4797012 - DNA, 25 bp, Homo sapien
ggacttgagctccttcttgctgccc

SEQ ID NO: 4797013 - DNA, 25 bp, Homo sapien
tccattccaatgttactgtctttag

SEQ ID NO: 4797014 - DNA, 25 bp, Homo sapien
tcaatgctccattccaatgttactg

SEQ ID NO: 4797015 - DNA, 25 bp, Homo sapien
caatgttactgtctttagggagtca

SEQ ID NO: 4797016 - DNA, 25 bp, Homo sapien
tctcttctatcaatgctccattcca

SEQ ID NO: 4797017 - DNA, 25 bp, Homo sapien
tgtagagacctgatgggacgtattg

SEQ ID NO: 4797018 - DNA, 25 bp, Homo sapien
aagtgtagagacctgatgggacgta

SEQ ID NO: 4797019 - DNA, 25 bp, Homo sapien
gtgtagagacctgatgggacgtatt

SEQ ID NO: 4797020 - DNA, 25 bp, Homo sapien
tcaagtgtagagacctgatgggacg

SEQ ID NO: 4797021 - DNA, 25 bp, Homo sapien
cctcaagaacggattccaagattag

SEQ ID NO: 4797022 - DNA, 25 bp, Homo sapien
tcctcaagaacggattccaagatta

SEQ ID NO: 4797023 - DNA, 25 bp, Homo sapien
tcaagaacggattccaagattagtt

SEQ ID NO: 4797024 - DNA, 25 bp, Homo sapien
caagaacggattccaagattagttc

SEQ ID NO: 4797025 - DNA, 25 bp, Homo sapien
taaacgctagtaatcaccatgatga

SEQ ID NO: 4797026 - DNA, 25 bp, Homo sapien
ccagcctgcactacttctcataaag

SEQ ID NO: 4797027 - DNA, 25 bp, Homo sapien
tctcataaagccacccatcaatcaa

SEQ ID NO: 4797028 - DNA, 25 bp, Homo sapien
taagtacttagaacatggtaaggaa

SEQ ID NO: 4797029 - DNA, 25 bp, Homo sapien
cacccgagcaaaactacacttggtt

SEQ ID NO: 4797030 - DNA, 25 bp, Homo sapien
tcacccgagcaaaactacacttggt

SEQ ID NO: 4797031 - DNA, 25 bp, Homo sapien
cgagcaaaactacacttggtttggg

SEQ ID NO: 4797032 - DNA, 25 bp, Homo sapien
cccgagcaaaactacacttggtttg

SEQ ID NO: 4797033 - DNA, 25 bp, Homo sapien
gctgcagagtgtactccccaagtct

SEQ ID NO: 4797034 - DNA, 25 bp, Homo sapien
ccaagtctgcctctgctgtcggcct

SEQ ID NO: 4797035 - DNA, 25 bp, Homo sapien
agtgtactccccaagtctgcctctg

SEQ ID NO: 4797036 - DNA, 25 bp, Homo sapien
gcagagtgtactccccaagtctgcc

SEQ ID NO: 4797037 - DNA, 25 bp, Homo sapien
acattcctttacagagcaatgtgtt

SEQ ID NO: 4797038 - DNA, 25 bp, Homo sapien
aggcaaaacattcctttacagagca

SEQ ID NO: 4797039 - DNA, 25 bp, Homo sapien
ctgagtaggcaaaacattcctttac

SEQ ID NO: 4797040 - DNA, 25 bp, Homo sapien
caaaacattcctttacagagcaatg

SEQ ID NO: 4797041 - DNA, 25 bp, Homo sapien
gattcagtaaggtgccaacgctttg

SEQ ID NO: 4797042 - DNA, 25 bp, Homo sapien
gataaacttgtctctagtgcagctc

SEQ ID NO: 4797043 - DNA, 25 bp, Homo sapien
taccctggaggctaccgttttgtga

SEQ ID NO: 4797044 - DNA, 25 bp, Homo sapien
aacgctttgctgaggactaccctgg

SEQ ID NO: 4797045 - DNA, 25 bp, Homo sapien
aacttgagcaggtccctttcgccca

SEQ ID NO: 4797046 - DNA, 25 bp, Homo sapien
ttgagcaggtccctttcgcccatgg

SEQ ID NO: 4797047 - DNA, 25 bp, Homo sapien
gaacttgagcaggtccctttcgccc

SEQ ID NO: 4797048 - DNA, 25 bp, Homo sapien
gcaggtccctttcgcccatgggcgt

SEQ ID NO: 4797049 - DNA, 25 bp, Homo sapien
gccccgggttctcagaggaaagctc

SEQ ID NO: 4797050 - DNA, 25 bp, Homo sapien
ccccgggttctcagaggaaagctca

SEQ ID NO: 4797051 - DNA, 25 bp, Homo sapien
tggattacgtgtcgctaaggccccg

SEQ ID NO: 4797052 - DNA, 25 bp, Homo sapien
gaaaactggattacgtgtcgctaag

SEQ ID NO: 4797053 - DNA, 25 bp, Homo sapien
gggccagctgcacgacaagccccag

SEQ ID NO: 4797054 - DNA, 25 bp, Homo sapien
tggggccagctgcacgacaagcccc

SEQ ID NO: 4797055 - DNA, 25 bp, Homo sapien
ccagctgcacgacaagccccagcat

SEQ ID NO: 4797056 - DNA, 25 bp, Homo sapien
gggccgccttgccccgcgcgcttgg

SEQ ID NO: 4797057 - DNA, 25 bp, Homo sapien
gccatcttggattgagaattgcaga

SEQ ID NO: 4797058 - DNA, 25 bp, Homo sapien
gacagaatggattgaccctagttgg

SEQ ID NO: 4797059 - DNA, 25 bp, Homo sapien
aaatttggatagtctctagggctca

SEQ ID NO: 4797060 - DNA, 25 bp, Homo sapien
gatacacaagccctttaggaagcag

SEQ ID NO: 4797061 - DNA, 25 bp, Homo sapien
tagagtcaccaataccctattctga

SEQ ID NO: 4797062 - DNA, 25 bp, Homo sapien
gatatctacccaggtcaaaattcag

SEQ ID NO: 4797063 - DNA, 25 bp, Homo sapien
tggcaagccaaagagcaactgcctt

SEQ ID NO: 4797064 - DNA, 25 bp, Homo sapien
tatcttactctaggtgcagggctga

SEQ ID NO: 4797065 - DNA, 25 bp, Homo sapien
attctggtgccccataccccggaga

SEQ ID NO: 4797066 - DNA, 25 bp, Homo sapien
tccaaaaggagccttctttctgggc

SEQ ID NO: 4797067 - DNA, 25 bp, Homo sapien
aatcaagatctccaaaaggagcctt

SEQ ID NO: 4797068 - DNA, 25 bp, Homo sapien
tcaatgattctggtgccccataccc

SEQ ID NO: 4797069 - DNA, 25 bp, Homo sapien
gtggagtaggagggaacagcaagga

SEQ ID NO: 4797070 - DNA, 25 bp, Homo sapien
tgtggagtaggagggaacagcaagg

SEQ ID NO: 4797071 - DNA, 25 bp, Homo sapien
aaagctgacagattagccagggaga

SEQ ID NO: 4797072 - DNA, 25 bp, Homo sapien
gagaaacagccatgacataggaagt

SEQ ID NO: 4797073 - DNA, 25 bp, Homo sapien
aaaagctcaaattcaaaagctgaca

SEQ ID NO: 4797074 - DNA, 25 bp, Homo sapien
aaattcaaaagctgacagattagcc

SEQ ID NO: 4797075 - DNA, 25 bp, Homo sapien
gctcaagctgaaggtctaaattcca

SEQ ID NO: 4797076 - DNA, 25 bp, Homo sapien
tctaaattccaagtcttagctttcc

SEQ ID NO: 4797077 - DNA, 25 bp, Homo sapien
tcacccctgctcaagctgaaggtct

SEQ ID NO: 4797078 - DNA, 25 bp, Homo sapien
taaattccaagtcttagctttccta

SEQ ID NO: 4797079 - DNA, 25 bp, Homo sapien
tggaaacggcagtctcatgggccta

SEQ ID NO: 4797080 - DNA, 25 bp, Homo sapien
ccacatcctgtatcgtctttttgca

SEQ ID NO: 4797081 - DNA, 25 bp, Homo sapien
tgggcctatttgtgtttaatgaacc

SEQ ID NO: 4797082 - DNA, 25 bp, Homo sapien
tctgaggagaaatacgttggctctg

SEQ ID NO: 4797083 - DNA, 25 bp, Homo sapien
agggctgtacaaatgctcatggttg

SEQ ID NO: 4797084 - DNA, 25 bp, Homo sapien
accagagctagggtgaaggaagaac

SEQ ID NO: 4797085 - DNA, 25 bp, Homo sapien
tgggaagatcacaggaaggccatct

SEQ ID NO: 4797086 - DNA, 25 bp, Homo sapien
cagatcataaaagtggccagggtcc

SEQ ID NO: 4797087 - DNA, 25 bp, Homo sapien
gacagaatggaaaccgtctgcttgg

SEQ ID NO: 4797088 - DNA, 25 bp, Homo sapien
ggaataaccttcacaaggtgagtgg

SEQ ID NO: 4797089 - DNA, 25 bp, Homo sapien
ccaattctgataatagctgagagtc

SEQ ID NO: 4797090 - DNA, 25 bp, Homo sapien
cagcacctggtctgaggaattccaa

SEQ ID NO: 4797091 - DNA, 25 bp, Homo sapien
caaagagaggatgtgggaagcaaag

SEQ ID NO: 4797092 - DNA, 25 bp, Homo sapien
tcaaagagaggatgtgggaagcaaa

SEQ ID NO: 4797093 - DNA, 25 bp, Homo sapien
aaagagaggatgtgggaagcaaagt

SEQ ID NO: 4797094 - DNA, 25 bp, Homo sapien
agagaggatgtgggaagcaaagtac

SEQ ID NO: 4797095 - DNA, 25 bp, Homo sapien
caggatcttgagaacattagtgaag

SEQ ID NO: 4797096 - DNA, 25 bp, Homo sapien
ggaaagtggatgatgcaggtgagct

SEQ ID NO: 4797097 - DNA, 25 bp, Homo sapien
gagccatagtgctggatgaaggaca

SEQ ID NO: 4797098 - DNA, 25 bp, Homo sapien
cctctgcgatgtagtgggagccata

SEQ ID NO: 4797099 - DNA, 25 bp, Homo sapien
gggtacatcagacacggtgaccaag

SEQ ID NO: 4797100 - DNA, 25 bp, Homo sapien
catcagacacggtgaccaagaggga

SEQ ID NO: 4797101 - DNA, 25 bp, Homo sapien
aactcagcaacgtagaccatgggaa

SEQ ID NO: 4797102 - DNA, 25 bp, Homo sapien
tctgcaggagaagaaggcctaaact

SEQ ID NO: 4797103 - DNA, 25 bp, Homo sapien
gtaacccatggcctcatcatacctg

SEQ ID NO: 4797104 - DNA, 25 bp, Homo sapien
cacacggtagaggttgctccggacc

SEQ ID NO: 4797105 - DNA, 25 bp, Homo sapien
catggcctcatcatacctgatatct

SEQ ID NO: 4797106 - DNA, 25 bp, Homo sapien
tggtgctgagcttcacacggtagag

SEQ ID NO: 4797107 - DNA, 25 bp, Homo sapien
ggcagcgggatcaccaacagcccat

SEQ ID NO: 4797108 - DNA, 25 bp, Homo sapien
agcgggatcaccaacagcccatcgg

SEQ ID NO: 4797109 - DNA, 25 bp, Homo sapien
accaacagcccatcggccagctggg

SEQ ID NO: 4797110 - DNA, 25 bp, Homo sapien
gctcggagaggaccccccggcactg

SEQ ID NO: 4797111 - DNA, 25 bp, Homo sapien
gagactgccaaatcgaggaagtgga

SEQ ID NO: 4797112 - DNA, 25 bp, Homo sapien
tgccaaatcgaggaagtggagactg

SEQ ID NO: 4797113 - DNA, 25 bp, Homo sapien
gactgccaaatcgaggaagtggaga

SEQ ID NO: 4797114 - DNA, 25 bp, Homo sapien
agagagactgccaaatcgaggaagt

SEQ ID NO: 4797115 - DNA, 25 bp, Homo sapien
catttttcactttaccacccaagag

SEQ ID NO: 4797116 - DNA, 25 bp, Homo sapien
gaaatgttcttacaattgtagagaa

SEQ ID NO: 4797117 - DNA, 25 bp, Homo sapien
cacccaagagtgtccatttcaaatc

SEQ ID NO: 4797118 - DNA, 25 bp, Homo sapien
tcttacaattgtagagaagggaagg

SEQ ID NO: 4797119 - DNA, 25 bp, Homo sapien
cagccctaacgcagtgtctgatgca

SEQ ID NO: 4797120 - DNA, 25 bp, Homo sapien
ggaccatgagcactcgagagcaaga

SEQ ID NO: 4797121 - DNA, 25 bp, Homo sapien
gctatgctagcattatcacactgga

SEQ ID NO: 4797122 - DNA, 25 bp, Homo sapien
tccctaggaggactttgtcaatgcc

SEQ ID NO: 4797123 - DNA, 25 bp, Homo sapien
gctgttactaactcctgccctggta

SEQ ID NO: 4797124 - DNA, 25 bp, Homo sapien
gccctggtaattgcgatccctgaaa

SEQ ID NO: 4797125 - DNA, 25 bp, Homo sapien
tattagcactgggatcccttgtcct

SEQ ID NO: 4797126 - DNA, 25 bp, Homo sapien
tgcaggctagaggaacattatcttc

SEQ ID NO: 4797127 - DNA, 25 bp, Homo sapien
aggccaaacccatcactcagacttc

SEQ ID NO: 4797128 - DNA, 25 bp, Homo sapien
caaatacccaaaacttcttctccag

SEQ ID NO: 4797129 - DNA, 25 bp, Homo sapien
cagcgcccccgaaaaccatcttcaa

SEQ ID NO: 4797130 - DNA, 25 bp, Homo sapien
ttctccaggccaaacccatcactca

SEQ ID NO: 4797131 - DNA, 25 bp, Homo sapien
cactgagctaggccattgcaggtgg

SEQ ID NO: 4797132 - DNA, 25 bp, Homo sapien
agctaggccattgcaggtgggtctc

SEQ ID NO: 4797133 - DNA, 25 bp, Homo sapien
gaaacaaccagataactccagtacc

SEQ ID NO: 4797134 - DNA, 25 bp, Homo sapien
aaacaaccagataactccagtacca

SEQ ID NO: 4797135 - DNA, 25 bp, Homo sapien
tactcaaccccaccacttctgcttt

SEQ ID NO: 4797136 - DNA, 25 bp, Homo sapien
tctgcatgtgcctgcatactcaacc

SEQ ID NO: 4797137 - DNA, 25 bp, Homo sapien
catactcaaccccaccacttctgct

SEQ ID NO: 4797138 - DNA, 25 bp, Homo sapien
gtatctgcatgtgcctgcatactca

SEQ ID NO: 4797139 - DNA, 25 bp, Homo sapien
ctttgagagacgctgtgtgaaatgc

SEQ ID NO: 4797140 - DNA, 25 bp, Homo sapien
tttgagagacgctgtgtgaaatgct

SEQ ID NO: 4797141 - DNA, 25 bp, Homo sapien
tatctttgagagacgctgtgtgaaa

SEQ ID NO: 4797142 - DNA, 25 bp, Homo sapien
tctttatctttgagagacgctgtgt

SEQ ID NO: 4797143 - DNA, 25 bp, Homo sapien
agcagaggagaacattaggaacgga

SEQ ID NO: 4797144 - DNA, 25 bp, Homo sapien
gagaacattaggaacggagggagct

SEQ ID NO: 4797145 - DNA, 25 bp, Homo sapien
acattaggaacggagggagctgaca

SEQ ID NO: 4797146 - DNA, 25 bp, Homo sapien
ctctgttctctaggcgtatgcaggc

SEQ ID NO: 4797147 - DNA, 25 bp, Homo sapien
tgagctaacatttacctgccctgcc

SEQ ID NO: 4797148 - DNA, 25 bp, Homo sapien
tctcactgcaaagtcctggatccca

SEQ ID NO: 4797149 - DNA, 25 bp, Homo sapien
tcttgatagtctgcccagtgagcca

SEQ ID NO: 4797150 - DNA, 25 bp, Homo sapien
tattcctgccaaggtcttgaccgag

SEQ ID NO: 4797151 - DNA, 25 bp, Homo sapien
taggtgctgatgcatggtactgctc

SEQ ID NO: 4797152 - DNA, 25 bp, Homo sapien
ccaaatctggttggacaatggagcc

SEQ ID NO: 4797153 - DNA, 25 bp, Homo sapien
ggtactgctccaagggtaagggcca

SEQ ID NO: 4797154 - DNA, 25 bp, Homo sapien
gaatttgtgttgttaccaaatctgg

SEQ ID NO: 4797155 - DNA, 25 bp, Homo sapien
cacggcatgacaagtaagaacaatc

SEQ ID NO: 4797156 - DNA, 25 bp, Homo sapien
ttagttctctgaaccacggcatgac

SEQ ID NO: 4797157 - DNA, 25 bp, Homo sapien
gggatatcctttagagcaactttag

SEQ ID NO: 4797158 - DNA, 25 bp, Homo sapien
agtaagaacaatcacttcatcgtct

SEQ ID NO: 4797159 - DNA, 25 bp, Homo sapien
caagtgtgacaggacgcacactaca

SEQ ID NO: 4797160 - DNA, 25 bp, Homo sapien
gacaggacgcacactacaacacaat

SEQ ID NO: 4797161 - DNA, 25 bp, Homo sapien
gatttcaagtgtgacaggacgcaca

SEQ ID NO: 4797162 - DNA, 25 bp, Homo sapien
attttggagtaagtggtatctcaca

SEQ ID NO: 4797163 - DNA, 25 bp, Homo sapien
ttacttttctcatcacctctttctc

SEQ ID NO: 4797164 - DNA, 25 bp, Homo sapien
cttagaaaggcaattagaaggtgca

SEQ ID NO: 4797165 - DNA, 25 bp, Homo sapien
tatgttccctgacttcatggtgaga

SEQ ID NO: 4797166 - DNA, 25 bp, Homo sapien
tagaaggtgcaaggtcttacagcta

SEQ ID NO: 4797167 - DNA, 25 bp, Homo sapien
cacaacagctttggagaccacttaa

SEQ ID NO: 4797168 - DNA, 25 bp, Homo sapien
cacctcttaggaaggcactagaaaa

SEQ ID NO: 4797169 - DNA, 25 bp, Homo sapien
taaagtattcagcataggtccagac

SEQ ID NO: 4797170 - DNA, 25 bp, Homo sapien
tgtgggtgctgaatccccaaatccc

SEQ ID NO: 4797171 - DNA, 25 bp, Homo sapien
ctaaacagctttactgggatttggg

SEQ ID NO: 4797172 - DNA, 25 bp, Homo sapien
caaatctcactctactagcttatgg

SEQ ID NO: 4797173 - DNA, 25 bp, Homo sapien
gctttgaggcataagtaagtcacca

SEQ ID NO: 4797174 - DNA, 25 bp, Homo sapien
aacctagccgtcactcactattgag

SEQ ID NO: 4797175 - DNA, 25 bp, Homo sapien
caatgtgcaagtatctacagcatac

SEQ ID NO: 4797176 - DNA, 25 bp, Homo sapien
gcaggattttccatcaggagccagt

SEQ ID NO: 4797177 - DNA, 25 bp, Homo sapien
tctggaagacttggccttggttcac

SEQ ID NO: 4797178 - DNA, 25 bp, Homo sapien
ttggttcacatgctgggtccggttg

SEQ ID NO: 4797179 - DNA, 25 bp, Homo sapien
gagccagtttgtactcctccacgca

SEQ ID NO: 4797180 - DNA, 25 bp, Homo sapien
tgaagatggtgctcgaagtggcatc

SEQ ID NO: 4797181 - DNA, 25 bp, Homo sapien
agatggtgctcgaagtggcatcgta

SEQ ID NO: 4797182 - DNA, 25 bp, Homo sapien
gcctttggagtggtcgtagcagcca

SEQ ID NO: 4797183 - DNA, 25 bp, Homo sapien
ccatcagagcagtcaatgcctttgg

SEQ ID NO: 4797184 - DNA, 25 bp, Homo sapien
catgagaccccaccggccaactccc

SEQ ID NO: 4797185 - DNA, 25 bp, Homo sapien
tgggctgtggtctttaactggctga

SEQ ID NO: 4797186 - DNA, 25 bp, Homo sapien
actttcagtgctaactgctcagttt

SEQ ID NO: 4797187 - DNA, 25 bp, Homo sapien
tcagtctccttcaatggaggcactg

SEQ ID NO: 4797188 - DNA, 25 bp, Homo sapien
cagtctccttcaatggaggcactgg

SEQ ID NO: 4797189 - DNA, 25 bp, Homo sapien
agtctccttcaatggaggcactgga

SEQ ID NO: 4797190 - DNA, 25 bp, Homo sapien
gaattttcttggaattgattgaaca

SEQ ID NO: 4797191 - DNA, 25 bp, Homo sapien
tgtagaaaggggaaaattagctctg

SEQ ID NO: 4797192 - DNA, 25 bp, Homo sapien
ctgaagtatttaagaggaaaatggg

SEQ ID NO: 4797193 - DNA, 25 bp, Homo sapien
gggaattttcttggaattgattgaa

SEQ ID NO: 4797194 - DNA, 25 bp, Homo sapien
catagatgcttggatgtctttctgt

SEQ ID NO: 4797195 - DNA, 25 bp, Homo sapien
gtctttctgttttcagaagcctcat

SEQ ID NO: 4797196 - DNA, 25 bp, Homo sapien
tgtctttctgttttcagaagcctca

SEQ ID NO: 4797197 - DNA, 25 bp, Homo sapien
ggatgtctttctgttttcagaagcc

SEQ ID NO: 4797198 - DNA, 25 bp, Homo sapien
tttaacaggctggtatcgcttcccc

SEQ ID NO: 4797199 - DNA, 25 bp, Homo sapien
ggtttaacaggctggtatcgcttcc

SEQ ID NO: 4797200 - DNA, 25 bp, Homo sapien
taacaggctggtatcgcttccccat

SEQ ID NO: 4797201 - DNA, 25 bp, Homo sapien
ctaggtttaacaggctggtatcgct

SEQ ID NO: 4797202 - DNA, 25 bp, Homo sapien
gataaatttagctttgaaagtccat

SEQ ID NO: 4797203 - DNA, 25 bp, Homo sapien
catgtggctgatctacagggataaa

SEQ ID NO: 4797204 - DNA, 25 bp, Homo sapien
ctacagggataaatttagctttgaa

SEQ ID NO: 4797205 - DNA, 25 bp, Homo sapien
cccatgtggctgatctacagggata

SEQ ID NO: 4797206 - DNA, 25 bp, Homo sapien
agctaagtacagcatacagtaaaga

SEQ ID NO: 4797207 - DNA, 25 bp, Homo sapien
taaagctaagtacagcatacagtaa

SEQ ID NO: 4797208 - DNA, 25 bp, Homo sapien
taataaagctaagtacagcatacag

SEQ ID NO: 4797209 - DNA, 25 bp, Homo sapien
cttaataaagctaagtacagcatac

SEQ ID NO: 4797210 - DNA, 25 bp, Homo sapien
tgttcccgggccaatgggcacttac

SEQ ID NO: 4797211 - DNA, 25 bp, Homo sapien
cactgccatgttcccgggccaatgg

SEQ ID NO: 4797212 - DNA, 25 bp, Homo sapien
catgttcccgggccaatgggcactt

SEQ ID NO: 4797213 - DNA, 25 bp, Homo sapien
ggccactgccatgttcccgggccaa

SEQ ID NO: 4797214 - DNA, 25 bp, Homo sapien
acacttgaagttgcgagtgcagccc

SEQ ID NO: 4797215 - DNA, 25 bp, Homo sapien
agcagtcacgaactggcccgaagga

SEQ ID NO: 4797216 - DNA, 25 bp, Homo sapien
ctgccggtcagacacacacttgaag

SEQ ID NO: 4797217 - DNA, 25 bp, Homo sapien
cccgaaggaagacagcaggtcattg

SEQ ID NO: 4797218 - DNA, 25 bp, Homo sapien
tggtccctcagtaggctcaaggaga

SEQ ID NO: 4797219 - DNA, 25 bp, Homo sapien
ccatcatcatatggccttcttgcct

SEQ ID NO: 4797220 - DNA, 25 bp, Homo sapien
ccttggctggcagtttcaggactcc

SEQ ID NO: 4797221 - DNA, 25 bp, Homo sapien
cccagccatgcttagctttccttgg

SEQ ID NO: 4797222 - DNA, 25 bp, Homo sapien
gctccaaaacagagatagccagacc

SEQ ID NO: 4797223 - DNA, 25 bp, Homo sapien
cccagacattgtgcaaaaggttcca

SEQ ID NO: 4797224 - DNA, 25 bp, Homo sapien
caataaatatctgagtacctgctgc

SEQ ID NO: 4797225 - DNA, 25 bp, Homo sapien
tacctgaccggtaaagtacaaatgc

SEQ ID NO: 4797226 - DNA, 25 bp, Homo sapien
cctaactagcagaggtagcatgagt

SEQ ID NO: 4797227 - DNA, 25 bp, Homo sapien
gggatattaatacctaactagcaga

SEQ ID NO: 4797228 - DNA, 25 bp, Homo sapien
tagcatgagtgatagattagggagc

SEQ ID NO: 4797229 - DNA, 25 bp, Homo sapien
gggcaagtctcttaaaccctgagcc

SEQ ID NO: 4797230 - DNA, 25 bp, Homo sapien
ttcgctgaataagggcaggtgttga

SEQ ID NO: 4797231 - DNA, 25 bp, Homo sapien
gggcatgctgcagctgttcgctgaa

SEQ ID NO: 4797232 - DNA, 25 bp, Homo sapien
gtcctcctcggtcacatcccttagt

SEQ ID NO: 4797233 - DNA, 25 bp, Homo sapien
agggcacaataaggcccatcagctg

SEQ ID NO: 4797234 - DNA, 25 bp, Homo sapien
tggtcatcagttcatggctgacaga

SEQ ID NO: 4797235 - DNA, 25 bp, Homo sapien
ttccaggctcagatgagtagggcca

SEQ ID NO: 4797236 - DNA, 25 bp, Homo sapien
caagcttgatggtggtctatagtcc

SEQ ID NO: 4797237 - DNA, 25 bp, Homo sapien
taaaggacctttttcctgagcatgt

SEQ ID NO: 4797238 - DNA, 25 bp, Homo sapien
tgaatacactgaagctcctagaggt

SEQ ID NO: 4797239 - DNA, 25 bp, Homo sapien
ggatcccacctgtctactgcaagct

SEQ ID NO: 4797240 - DNA, 25 bp, Homo sapien
caaagtgggagcatacatctgacat

SEQ ID NO: 4797241 - DNA, 25 bp, Homo sapien
aggaccccggtatgtgttcactgag

SEQ ID NO: 4797242 - DNA, 25 bp, Homo sapien
taaaacctagtcacaaaaatgcatg

SEQ ID NO: 4797243 - DNA, 25 bp, Homo sapien
taatgactcatttaagccttggaat

SEQ ID NO: 4797244 - DNA, 25 bp, Homo sapien
aaacattcagtgtgatcccaatcag

SEQ ID NO: 4797245 - DNA, 25 bp, Homo sapien
ggaaggccctgtgtttggttatgat

SEQ ID NO: 4797246 - DNA, 25 bp, Homo sapien
actgccctgttgctgcataaaactg

SEQ ID NO: 4797247 - DNA, 25 bp, Homo sapien
tgtcaatgccgacagctccctgtgg

SEQ ID NO: 4797248 - DNA, 25 bp, Homo sapien
aaaactccattgtactgccctgttg

SEQ ID NO: 4797249 - DNA, 25 bp, Homo sapien
tcttggaatatgtgagtaagtgact

SEQ ID NO: 4797250 - DNA, 25 bp, Homo sapien
tccattagattgcttcctgaggctc

SEQ ID NO: 4797251 - DNA, 25 bp, Homo sapien
tcaacttctgggttactgaccccaa

SEQ ID NO: 4797252 - DNA, 25 bp, Homo sapien
tgccaagtgacatcttcgacctcat

SEQ ID NO: 4797253 - DNA, 25 bp, Homo sapien
taattattgctgaatctacacctcc

SEQ ID NO: 4797254 - DNA, 25 bp, Homo sapien
ctggcagggttctgatcaacacaca

SEQ ID NO: 4797255 - DNA, 25 bp, Homo sapien
ttccttctccttgagcctttatcgc

SEQ ID NO: 4797256 - DNA, 25 bp, Homo sapien
gcagggttctgatcaacacacactg

SEQ ID NO: 4797257 - DNA, 25 bp, Homo sapien
ttgagcctttatcgctaagcctcat

SEQ ID NO: 4797258 - DNA, 25 bp, Homo sapien
ggatctggcaagaataagggccctg

SEQ ID NO: 4797259 - DNA, 25 bp, Homo sapien
caggatctggcaagaataagggccc

SEQ ID NO: 4797260 - DNA, 25 bp, Homo sapien
ccaggatctggcaagaataagggcc

SEQ ID NO: 4797261 - DNA, 25 bp, Homo sapien
tccaggatctggcaagaataagggc

SEQ ID NO: 4797262 - DNA, 25 bp, Homo sapien
gaggcctcaggcttttatctctggc

SEQ ID NO: 4797263 - DNA, 25 bp, Homo sapien
gggtaatgaattgccgtctttgcag

SEQ ID NO: 4797264 - DNA, 25 bp, Homo sapien
gcagcgtgacatgcagggtaatgaa

SEQ ID NO: 4797265 - DNA, 25 bp, Homo sapien
tctctggcaatgacatgggcagcgt

SEQ ID NO: 4797266 - DNA, 25 bp, Homo sapien
gccaccggtgactctgaaaacaagg

SEQ ID NO: 4797267 - DNA, 25 bp, Homo sapien
cagccaccggtgactctgaaaacaa

SEQ ID NO: 4797268 - DNA, 25 bp, Homo sapien
ttgtgctgacctgggctgttgacat

SEQ ID NO: 4797269 - DNA, 25 bp, Homo sapien
ccaccggtgactctgaaaacaaggg

SEQ ID NO: 4797270 - DNA, 25 bp, Homo sapien
caagtttgcggtttagatgaatcca

SEQ ID NO: 4797271 - DNA, 25 bp, Homo sapien
cactccagtggctcgtggaggatga

SEQ ID NO: 4797272 - DNA, 25 bp, Homo sapien
caacagcaagcggagcaatggaagg

SEQ ID NO: 4797273 - DNA, 25 bp, Homo sapien
gctatgagtgtcacactgagaagtg

SEQ ID NO: 4797274 - DNA, 25 bp, Homo sapien
tcgctccagtgcagaatgaagacaa

SEQ ID NO: 4797275 - DNA, 25 bp, Homo sapien
atgggcagcgagttccggagaatac

SEQ ID NO: 4797276 - DNA, 25 bp, Homo sapien
gaaaaagcaagggtctcgctccagt

SEQ ID NO: 4797277 - DNA, 25 bp, Homo sapien
gaatgaagacaaatgggcagcgagt

SEQ ID NO: 4797278 - DNA, 25 bp, Homo sapien
tgtgcgtgccggctgcgctcccgtt

SEQ ID NO: 4797279 - DNA, 25 bp, Homo sapien
cctgtcagtcgcgagcagagctttt

SEQ ID NO: 4797280 - DNA, 25 bp, Homo sapien
tcagggccacgcaaagccctgtcag

SEQ ID NO: 4797281 - DNA, 25 bp, Homo sapien
tcgcgagcagagcttttgtgtgcgt

SEQ ID NO: 4797282 - DNA, 25 bp, Homo sapien
gtgttgtcagaccttgcctgactct

SEQ ID NO: 4797283 - DNA, 25 bp, Homo sapien
ggaggagaggaggtgttgtcagacc

SEQ ID NO: 4797284 - DNA, 25 bp, Homo sapien
ttgtcagaccttgcctgactctctg

SEQ ID NO: 4797285 - DNA, 25 bp, Homo sapien
tgtcagaccttgcctgactctctgc

SEQ ID NO: 4797286 - DNA, 25 bp, Homo sapien
gccagatccatgtcatgaatctccc

SEQ ID NO: 4797287 - DNA, 25 bp, Homo sapien
gatccatgtcatgaatctccccagg

SEQ ID NO: 4797288 - DNA, 25 bp, Homo sapien
atgtcatgaatctccccaggctgcc

SEQ ID NO: 4797289 - DNA, 25 bp, Homo sapien
ccagccagatccatgtcatgaatct

SEQ ID NO: 4797290 - DNA, 25 bp, Homo sapien
taactcagtccggtcacacctagga

SEQ ID NO: 4797291 - DNA, 25 bp, Homo sapien
tacagttaactcagtccggtcacac

SEQ ID NO: 4797292 - DNA, 25 bp, Homo sapien
tccggtcacacctaggaggagactg

SEQ ID NO: 4797293 - DNA, 25 bp, Homo sapien
ttcaatacagttaactcagtccggt

SEQ ID NO: 4797294 - DNA, 25 bp, Homo sapien
attgcacctgaagatgtatggccca

SEQ ID NO: 4797295 - DNA, 25 bp, Homo sapien
ttgcacctgaagatgtatggcccat

SEQ ID NO: 4797296 - DNA, 25 bp, Homo sapien
tttgcctttgtgactctccaacata

SEQ ID NO: 4797297 - DNA, 25 bp, Homo sapien
tagcccaaagcacatcccatggact

SEQ ID NO: 4797298 - DNA, 25 bp, Homo sapien
attcataaattagcccaaagcacat

SEQ ID NO: 4797299 - DNA, 25 bp, Homo sapien
aattagcccaaagcacatcccatgg

SEQ ID NO: 4797300 - DNA, 25 bp, Homo sapien
gacatctgcagggtcttccgtgacg

SEQ ID NO: 4797301 - DNA, 25 bp, Homo sapien
gacagctccacaggcggaaccacaa

SEQ ID NO: 4797302 - DNA, 25 bp, Homo sapien
gagcacatcggtcttgcagctggcc

SEQ ID NO: 4797303 - DNA, 25 bp, Homo sapien
gttgatggacagctccacaggcgga

SEQ ID NO: 4797304 - DNA, 25 bp, Homo sapien
caatgtaagagtttccattggggaa

SEQ ID NO: 4797305 - DNA, 25 bp, Homo sapien
ttgctcccctgtcaccagatcatag

SEQ ID NO: 4797306 - DNA, 25 bp, Homo sapien
tagcccctctcaagtgtcgtgtagg

SEQ ID NO: 4797307 - DNA, 25 bp, Homo sapien
ctcaagtgtcgtgtagggccaaggt

SEQ ID NO: 4797308 - DNA, 25 bp, Homo sapien
agatcatagcccctctcaagtgtcg

SEQ ID NO: 4797309 - DNA, 25 bp, Homo sapien
ccagtcactgcgcacacacaggtgt

SEQ ID NO: 4797310 - DNA, 25 bp, Homo sapien
cacaggtgtctgtgaacagggtcag

SEQ ID NO: 4797311 - DNA, 25 bp, Homo sapien
gtcaggggcatagccttcatgacag

SEQ ID NO: 4797312 - DNA, 25 bp, Homo sapien
gggtcaggggcatagccttcatgac

SEQ ID NO: 4797313 - DNA, 25 bp, Homo sapien
gctctctagggatgcatgtaaccat

SEQ ID NO: 4797314 - DNA, 25 bp, Homo sapien
gacagctctctagggatgcatgtaa

SEQ ID NO: 4797315 - DNA, 25 bp, Homo sapien
cagctctctagggatgcatgtaacc

SEQ ID NO: 4797316 - DNA, 25 bp, Homo sapien
tgacagctctctagggatgcatgta

SEQ ID NO: 4797317 - DNA, 25 bp, Homo sapien
ggtgtgagactttccaaccttgttc

SEQ ID NO: 4797318 - DNA, 25 bp, Homo sapien
cgcattgtagctgccggccccttat

SEQ ID NO: 4797319 - DNA, 25 bp, Homo sapien
tgtggactccgcattgtagctgccg

SEQ ID NO: 4797320 - DNA, 25 bp, Homo sapien
cacatgggtgtctctgatatccctt

SEQ ID NO: 4797321 - DNA, 25 bp, Homo sapien
ctaagcttctcagatgcaccaggaa

SEQ ID NO: 4797322 - DNA, 25 bp, Homo sapien
ctcactgcacgccagagccctgcaa

SEQ ID NO: 4797323 - DNA, 25 bp, Homo sapien
acgccagagccctgcaacctctaag

SEQ ID NO: 4797324 - DNA, 25 bp, Homo sapien
cctgcaacctctaagcttctcagat

SEQ ID NO: 4797325 - DNA, 25 bp, Homo sapien
tcctgctgtgttagttcctcctttt

SEQ ID NO: 4797326 - DNA, 25 bp, Homo sapien
tctggtccagatcttactgctgcag

SEQ ID NO: 4797327 - DNA, 25 bp, Homo sapien
atttggtgtccttgcccctctgggc

SEQ ID NO: 4797328 - DNA, 25 bp, Homo sapien
gaccagctacccttctctggataat

SEQ ID NO: 4797329 - DNA, 25 bp, Homo sapien
agagagatgaatccatcctattttt

SEQ ID NO: 4797330 - DNA, 25 bp, Homo sapien
gagagatgaatccatcctatttttt

SEQ ID NO: 4797331 - DNA, 25 bp, Homo sapien
ggcagagagatgaatccatcctatt

SEQ ID NO: 4797332 - DNA, 25 bp, Homo sapien
agatgaatccatcctattttttcta

SEQ ID NO: 4797333 - DNA, 25 bp, Homo sapien
tacatcactgcacaaggtgtgattc

SEQ ID NO: 4797334 - DNA, 25 bp, Homo sapien
caaggtgtgattcaggctagaagag

SEQ ID NO: 4797335 - DNA, 25 bp, Homo sapien
tgtgcaggaggtataggagcctgaa

SEQ ID NO: 4797336 - DNA, 25 bp, Homo sapien
cattagcgtaggaagacttggagga

SEQ ID NO: 4797337 - DNA, 25 bp, Homo sapien
gaaataagacatggcacataaaggt

SEQ ID NO: 4797338 - DNA, 25 bp, Homo sapien
tataaaaaagtatggtctgccttct

SEQ ID NO: 4797339 - DNA, 25 bp, Homo sapien
cagagaggtccaagtaaaatcccca

SEQ ID NO: 4797340 - DNA, 25 bp, Homo sapien
cataaaggtgccaccaaaaaagagt

SEQ ID NO: 4797341 - DNA, 25 bp, Homo sapien
tcctgggatataatggagaatcatt

SEQ ID NO: 4797342 - DNA, 25 bp, Homo sapien
ggttcccattaccaaggctctcatt

SEQ ID NO: 4797343 - DNA, 25 bp, Homo sapien
ggcttcactacagagtcaggtttca

SEQ ID NO: 4797344 - DNA, 25 bp, Homo sapien
taagcaacgtgtgtctaagcagcct

SEQ ID NO: 4797345 - DNA, 25 bp, Homo sapien
tgaattctggatgccctgtccaaag

SEQ ID NO: 4797346 - DNA, 25 bp, Homo sapien
gagttgtgtgggacattttgaattc

SEQ ID NO: 4797347 - DNA, 25 bp, Homo sapien
actccaactgcccatcacatactcc

SEQ ID NO: 4797348 - DNA, 25 bp, Homo sapien
cctggtgttagcaacgtaaatccat

SEQ ID NO: 4797349 - DNA, 25 bp, Homo sapien
tagaaactcaaaccatctagtgaaa

SEQ ID NO: 4797350 - DNA, 25 bp, Homo sapien
tcaaaccatctagtgaaattttaat

SEQ ID NO: 4797351 - DNA, 25 bp, Homo sapien
attttaattaagagaccattcaaca

SEQ ID NO: 4797352 - DNA, 25 bp, Homo sapien
ctggtagaaactcaaaccatctagt

SEQ ID NO: 4797353 - DNA, 25 bp, Homo sapien
ctttcaccctgagttggtgttgtca

SEQ ID NO: 4797354 - DNA, 25 bp, Homo sapien
tttcaccctgagttggtgttgtcat

SEQ ID NO: 4797355 - DNA, 25 bp, Homo sapien
tctcctttcaccctgagttggtgtt

SEQ ID NO: 4797356 - DNA, 25 bp, Homo sapien
tcctttcaccctgagttggtgttgt

SEQ ID NO: 4797357 - DNA, 25 bp, Homo sapien
tctctgggcggcagtagaatcagcc

SEQ ID NO: 4797358 - DNA, 25 bp, Homo sapien
tatttgggagtgttcagagccttgc

SEQ ID NO: 4797359 - DNA, 25 bp, Homo sapien
ggcttaactccagacctgctgaggt

SEQ ID NO: 4797360 - DNA, 25 bp, Homo sapien
cagggtagtccttgagccagaagca

SEQ ID NO: 4797361 - DNA, 25 bp, Homo sapien
agacacaaaagttaacctggagaag

SEQ ID NO: 4797362 - DNA, 25 bp, Homo sapien
cagagacacaaaagttaacctggag

SEQ ID NO: 4797363 - DNA, 25 bp, Homo sapien
gagacacaaaagttaacctggagaa

SEQ ID NO: 4797364 - DNA, 25 bp, Homo sapien
cacaaaagttaacctggagaagtcg

SEQ ID NO: 4797365 - DNA, 25 bp, Homo sapien
ggaggagatccttgacctggactac

SEQ ID NO: 4797366 - DNA, 25 bp, Homo sapien
ccagtttttcgtgcaagccagccag

SEQ ID NO: 4797367 - DNA, 25 bp, Homo sapien
tctgcacagaggctgttgtcatggt

SEQ ID NO: 4797368 - DNA, 25 bp, Homo sapien
tgtcatggtattcacgtaaccagtt

SEQ ID NO: 4797369 - DNA, 25 bp, Homo sapien
tttccatcagaagtagggctcagtc

SEQ ID NO: 4797370 - DNA, 25 bp, Homo sapien
caatgtggtcaatccaggtacgtgc

SEQ ID NO: 4797371 - DNA, 25 bp, Homo sapien
tctttcccacctagcagatgggctt

SEQ ID NO: 4797372 - DNA, 25 bp, Homo sapien
tacgtgcctgcaatggaaatgacac

SEQ ID NO: 4797373 - DNA, 25 bp, Homo sapien
gagatgtccaggtagctcccttcac

SEQ ID NO: 4797374 - DNA, 25 bp, Homo sapien
tttctgggtcgcagagctgctcaca

SEQ ID NO: 4797375 - DNA, 25 bp, Homo sapien
ggcatctgtcgtcctttgtccacag

SEQ ID NO: 4797376 - DNA, 25 bp, Homo sapien
gggtttaaccagtcggagatgtcca

SEQ ID NO: 4797377 - DNA, 25 bp, Homo sapien
actgattttaaggtcttagctgatg

SEQ ID NO: 4797378 - DNA, 25 bp, Homo sapien
tactgattttaaggtcttagctgat

SEQ ID NO: 4797379 - DNA, 25 bp, Homo sapien
atgggtgaacggagagacagatact

SEQ ID NO: 4797380 - DNA, 25 bp, Homo sapien
ctatgggtgaacggagagacagata

SEQ ID NO: 4797381 - DNA, 25 bp, Homo sapien
tctgtaattgtgcagcatagatcag

SEQ ID NO: 4797382 - DNA, 25 bp, Homo sapien
cagcatagatcaggggtgagctggg

SEQ ID NO: 4797383 - DNA, 25 bp, Homo sapien
gggagctcaggccactctgtagcat

SEQ ID NO: 4797384 - DNA, 25 bp, Homo sapien
ttgattatcagcctgcttctgtaat

SEQ ID NO: 4797385 - DNA, 25 bp, Homo sapien
cttgaagacatgttgcgagagtgag

SEQ ID NO: 4797386 - DNA, 25 bp, Homo sapien
gtgggaatgagggaccctacttgaa

SEQ ID NO: 4797387 - DNA, 25 bp, Homo sapien
tgattgtcacaataccctgggatga

SEQ ID NO: 4797388 - DNA, 25 bp, Homo sapien
cttatcctagcagcttttcccctga

SEQ ID NO: 4797389 - DNA, 25 bp, Homo sapien
tgcagcctgtttccacttcttaggg

SEQ ID NO: 4797390 - DNA, 25 bp, Homo sapien
tcttagggtctacccttttgtatga

SEQ ID NO: 4797391 - DNA, 25 bp, Homo sapien
gcctgtttccacttcttagggtcta

SEQ ID NO: 4797392 - DNA, 25 bp, Homo sapien
cttttgtatgagatgtgcttccttc

SEQ ID NO: 4797393 - DNA, 25 bp, Homo sapien
gctaattgccaagaatatgttctcc

SEQ ID NO: 4797394 - DNA, 25 bp, Homo sapien
tcttcccagattatactcatttatc

SEQ ID NO: 4797395 - DNA, 25 bp, Homo sapien
tccttactacccgtatcttcccaga

SEQ ID NO: 4797396 - DNA, 25 bp, Homo sapien
tgactaaataatgccactttcttct

SEQ ID NO: 4797397 - DNA, 25 bp, Homo sapien
tcttttcttatatcggtatcaccac

SEQ ID NO: 4797398 - DNA, 25 bp, Homo sapien
gaagcctgctacacgcatctctttt

SEQ ID NO: 4797399 - DNA, 25 bp, Homo sapien
tcggtatcaccactgatgcatttga

SEQ ID NO: 4797400 - DNA, 25 bp, Homo sapien
tgcatttgaatttagcccacacttt

SEQ ID NO: 4797401 - DNA, 25 bp, Homo sapien
aagatttagggcatgctggtgtctc

SEQ ID NO: 4797402 - DNA, 25 bp, Homo sapien
caagatttagggcatgctggtgtct

SEQ ID NO: 4797403 - DNA, 25 bp, Homo sapien
gcaagatttagggcatgctggtgtc

SEQ ID NO: 4797404 - DNA, 25 bp, Homo sapien
ggcaagatttagggcatgctggtgt

SEQ ID NO: 4797405 - DNA, 25 bp, Homo sapien
tattgccatagatgttatcaaacgg

SEQ ID NO: 4797406 - DNA, 25 bp, Homo sapien
gagtgagttttctaaggaagaatcc

SEQ ID NO: 4797407 - DNA, 25 bp, Homo sapien
tggcccttagcgtgcaatcagtaaa

SEQ ID NO: 4797408 - DNA, 25 bp, Homo sapien
tggcatctctaagcacagcgtttgg

SEQ ID NO: 4797409 - DNA, 25 bp, Homo sapien
ataatccagaggaatgtgctgggga

SEQ ID NO: 4797410 - DNA, 25 bp, Homo sapien
gaatgtgctggggagaaaagccaaa

SEQ ID NO: 4797411 - DNA, 25 bp, Homo sapien
ggagaaaagccaaatagcaaggctt

SEQ ID NO: 4797412 - DNA, 25 bp, Homo sapien
aagccaaatagcaaggctttgctgg

SEQ ID NO: 4797413 - DNA, 25 bp, Homo sapien
tatatgcccacttacattgggaacc

SEQ ID NO: 4797414 - DNA, 25 bp, Homo sapien
ggagtggaaccatctcacctacttc

SEQ ID NO: 4797415 - DNA, 25 bp, Homo sapien
gaccacattgggtgaatatatgccc

SEQ ID NO: 4797416 - DNA, 25 bp, Homo sapien
tgggaacctcagtagatgcataaac

SEQ ID NO: 4797417 - DNA, 25 bp, Homo sapien
tccttccaaatcatcaagacggttt

SEQ ID NO: 4797418 - DNA, 25 bp, Homo sapien
gtctcgggtaatcccttgattttgc

SEQ ID NO: 4797419 - DNA, 25 bp, Homo sapien
gacggtttgccgctgtctcgggtaa

SEQ ID NO: 4797420 - DNA, 25 bp, Homo sapien
aaatcatcaagacggtttgccgctg

SEQ ID NO: 4797421 - DNA, 25 bp, Homo sapien
gaaacagacgccaacatatcctgga

SEQ ID NO: 4797422 - DNA, 25 bp, Homo sapien
gctaatgactatggtggcaacagtg

SEQ ID NO: 4797423 - DNA, 25 bp, Homo sapien
cagtaggttctctgaagtagctcaa

SEQ ID NO: 4797424 - DNA, 25 bp, Homo sapien
tacagctaaagacggtgatggcatg

SEQ ID NO: 4797425 - DNA, 25 bp, Homo sapien
tttggccatacacagaaacctttga

SEQ ID NO: 4797426 - DNA, 25 bp, Homo sapien
agtaattctaaggtttggccataca

SEQ ID NO: 4797427 - DNA, 25 bp, Homo sapien
taattctaaggtttggccatacaca

SEQ ID NO: 4797428 - DNA, 25 bp, Homo sapien
cacagaaacctttgaccagtcaggg

SEQ ID NO: 4797429 - DNA, 25 bp, Homo sapien
ctgctatgaagtgctcgggcacatg

SEQ ID NO: 4797430 - DNA, 25 bp, Homo sapien
atctgctatgaagtgctcgggcaca

SEQ ID NO: 4797431 - DNA, 25 bp, Homo sapien
ctatgaagtgctcgggcacatgcag

SEQ ID NO: 4797432 - DNA, 25 bp, Homo sapien
gctatgaagtgctcgggcacatgca

SEQ ID NO: 4797433 - DNA, 25 bp, Homo sapien
gtgagtggacaagacatctggctgc

SEQ ID NO: 4797434 - DNA, 25 bp, Homo sapien
ggacaagacatctggctgccacaca

SEQ ID NO: 4797435 - DNA, 25 bp, Homo sapien
cacagtgagtggacaagacatctgg

SEQ ID NO: 4797436 - DNA, 25 bp, Homo sapien
cttcacagtgagtggacaagacatc

SEQ ID NO: 4797437 - DNA, 25 bp, Homo sapien
gcaggaactcacagcaatcagtgtc

SEQ ID NO: 4797438 - DNA, 25 bp, Homo sapien
gccaggatgcaggaactcacagcaa

SEQ ID NO: 4797439 - DNA, 25 bp, Homo sapien
caggatgcaggaactcacagcaatc

SEQ ID NO: 4797440 - DNA, 25 bp, Homo sapien
gatgcaggaactcacagcaatcagt

SEQ ID NO: 4797441 - DNA, 25 bp, Homo sapien
ggaaatgggattggcatcaagtttg

SEQ ID NO: 4797442 - DNA, 25 bp, Homo sapien
tgaggaaatgggattggcatcaagt

SEQ ID NO: 4797443 - DNA, 25 bp, Homo sapien
tgggattggcatcaagtttgggaat

SEQ ID NO: 4797444 - DNA, 25 bp, Homo sapien
aatgggattggcatcaagtttggga

SEQ ID NO: 4797445 - DNA, 25 bp, Homo sapien
tgggcttcttatgattcctttgggt

SEQ ID NO: 4797446 - DNA, 25 bp, Homo sapien
ctcccttcccaattcggttggtcat

SEQ ID NO: 4797447 - DNA, 25 bp, Homo sapien
ttgatttaacactccgcaaaatggg

SEQ ID NO: 4797448 - DNA, 25 bp, Homo sapien
ggcaattttcactcctcccttccca

SEQ ID NO: 4797449 - DNA, 25 bp, Homo sapien
gcctgtcatttagaagagtttcacg

SEQ ID NO: 4797450 - DNA, 25 bp, Homo sapien
gagtttcacggttagaagctgatca

SEQ ID NO: 4797451 - DNA, 25 bp, Homo sapien
gcagctactatgtgagacacataca

SEQ ID NO: 4797452 - DNA, 25 bp, Homo sapien
taataaatatctcacagggttcttg

SEQ ID NO: 4797453 - DNA, 25 bp, Homo sapien
ctgacagtgacactgtgtcatattc

SEQ ID NO: 4797454 - DNA, 25 bp, Homo sapien
tcctgacagtgacactgtgtcatat

SEQ ID NO: 4797455 - DNA, 25 bp, Homo sapien
cctgacagtgacactgtgtcatatt

SEQ ID NO: 4797456 - DNA, 25 bp, Homo sapien
ttcctgacagtgacactgtgtcata

SEQ ID NO: 4797457 - DNA, 25 bp, Homo sapien
catgttgagagtggccctatggccc

SEQ ID NO: 4797458 - DNA, 25 bp, Homo sapien
tactatatgcgaagcctctgctggg

SEQ ID NO: 4797459 - DNA, 25 bp, Homo sapien
tatatcaagatctgaagactgggcc

SEQ ID NO: 4797460 - DNA, 25 bp, Homo sapien
ggttcaagttgcacaagccatcagg

SEQ ID NO: 4797461 - DNA, 25 bp, Homo sapien
gactcagtattagtatagcctccag

SEQ ID NO: 4797462 - DNA, 25 bp, Homo sapien
cagtattagtatagcctccagcctg

SEQ ID NO: 4797463 - DNA, 25 bp, Homo sapien
ttagtatagcctccagcctgtgtgg

SEQ ID NO: 4797464 - DNA, 25 bp, Homo sapien
ttttcgagactcagtattagtatag

SEQ ID NO: 4797465 - DNA, 25 bp, Homo sapien
gatggccattattatccccggccct

SEQ ID NO: 4797466 - DNA, 25 bp, Homo sapien
tgattcacacaagcccaggcgatgg

SEQ ID NO: 4797467 - DNA, 25 bp, Homo sapien
acttgattcacacaagcccaggcga

SEQ ID NO: 4797468 - DNA, 25 bp, Homo sapien
caagcccaggcgatggccattatta

SEQ ID NO: 4797469 - DNA, 25 bp, Homo sapien
ctgccgggaatagaaggatgaatga

SEQ ID NO: 4797470 - DNA, 25 bp, Homo sapien
gccgggaatagaaggatgaatgagc

SEQ ID NO: 4797471 - DNA, 25 bp, Homo sapien
gaatagaaggatgaatgagcaagac

SEQ ID NO: 4797472 - DNA, 25 bp, Homo sapien
cgggaatagaaggatgaatgagcaa

SEQ ID NO: 4797473 - DNA, 25 bp, Homo sapien
ctgtattaagaagagaggttcctcc

SEQ ID NO: 4797474 - DNA, 25 bp, Homo sapien
tcctgaagagaccttcagcaggcat

SEQ ID NO: 4797475 - DNA, 25 bp, Homo sapien
tccagtctcctgaagagaccttcag

SEQ ID NO: 4797476 - DNA, 25 bp, Homo sapien
gtattaagaagagaggttcctccag

SEQ ID NO: 4797477 - DNA, 25 bp, Homo sapien
tcaccatgacaacagcctctttaac

SEQ ID NO: 4797478 - DNA, 25 bp, Homo sapien
tgcctcatgtggtccagccccatca

SEQ ID NO: 4797479 - DNA, 25 bp, Homo sapien
agccccatcaccatgacaacagcct

SEQ ID NO: 4797480 - DNA, 25 bp, Homo sapien
cagcctctttaacatccctggccat

SEQ ID NO: 4797481 - DNA, 25 bp, Homo sapien
gaaaaattatctcagcagcttggcc

SEQ ID NO: 4797482 - DNA, 25 bp, Homo sapien
gagacgcatgggtaacaaatttcac

SEQ ID NO: 4797483 - DNA, 25 bp, Homo sapien
agcttggcccttatcttgacagtga

SEQ ID NO: 4797484 - DNA, 25 bp, Homo sapien
aatttcactaatcgcccggctgttg

SEQ ID NO: 4797485 - DNA, 25 bp, Homo sapien
gaatgagaccctgtcgagagagagt

SEQ ID NO: 4797486 - DNA, 25 bp, Homo sapien
tatcatagacaattgagagcagctg

SEQ ID NO: 4797487 - DNA, 25 bp, Homo sapien
taaatcaaactctggactgaggtcc

SEQ ID NO: 4797488 - DNA, 25 bp, Homo sapien
tccagggattccaagaccagataca

SEQ ID NO: 4797489 - DNA, 25 bp, Homo sapien
tgccaagactgcttgacgtttctgt

SEQ ID NO: 4797490 - DNA, 25 bp, Homo sapien
tctgcattcaaggaaccctcatttg

SEQ ID NO: 4797491 - DNA, 25 bp, Homo sapien
tatttcagggaccatcatgggctgg

SEQ ID NO: 4797492 - DNA, 25 bp, Homo sapien
cacaggaagaggagtacagagaaca

SEQ ID NO: 4797493 - DNA, 25 bp, Homo sapien
cttccttgggccttggatgttgtag

SEQ ID NO: 4797494 - DNA, 25 bp, Homo sapien
tcttccttgggccttggatgttgta

SEQ ID NO: 4797495 - DNA, 25 bp, Homo sapien
ttccttgggccttggatgttgtagt

SEQ ID NO: 4797496 - DNA, 25 bp, Homo sapien
ctcttccttgggccttggatgttgt

SEQ ID NO: 4797497 - DNA, 25 bp, Homo sapien
tacaatgacttagaggctgatagaa

SEQ ID NO: 4797498 - DNA, 25 bp, Homo sapien
cagccagtagatctgcccatgagca

SEQ ID NO: 4797499 - DNA, 25 bp, Homo sapien
gctgatagaatactgcttgatctgt

SEQ ID NO: 4797500 - DNA, 25 bp, Homo sapien
tctgttctgagtagcaggtcctggg

SEQ ID NO: 4797501 - DNA, 25 bp, Homo sapien
caggcaggcataaagcgagacaaaa

SEQ ID NO: 4797502 - DNA, 25 bp, Homo sapien
ccagcaggcaggcataaagcgagac

SEQ ID NO: 4797503 - DNA, 25 bp, Homo sapien
ggcaggcataaagcgagacaaaaca

SEQ ID NO: 4797504 - DNA, 25 bp, Homo sapien
ggcataaagcgagacaaaacaagag

SEQ ID NO: 4797505 - DNA, 25 bp, Homo sapien
aatttataggggacatgctcagtga

SEQ ID NO: 4797506 - DNA, 25 bp, Homo sapien
tcatcaatcgtcaacttctaaatct

SEQ ID NO: 4797507 - DNA, 25 bp, Homo sapien
tgaggggacccattgacttccccag

SEQ ID NO: 4797508 - DNA, 25 bp, Homo sapien
gctggattgtgtgagggagaagacc

SEQ ID NO: 4797509 - DNA, 25 bp, Homo sapien
cccatgaggcagttacaaggtacag

SEQ ID NO: 4797510 - DNA, 25 bp, Homo sapien
tcaatggaaacactcctcccacgtg

SEQ ID NO: 4797511 - DNA, 25 bp, Homo sapien
ggagaggcagatcccatttttccaa

SEQ ID NO: 4797512 - DNA, 25 bp, Homo sapien
gcttttagcatacaccagacaccat

SEQ ID NO: 4797513 - DNA, 25 bp, Homo sapien
ggctgctttcccatccttatagaca

SEQ ID NO: 4797514 - DNA, 25 bp, Homo sapien
catggaatccatgtttgtaccccag

SEQ ID NO: 4797515 - DNA, 25 bp, Homo sapien
taaagcccatggatggatctgccct

SEQ ID NO: 4797516 - DNA, 25 bp, Homo sapien
tgacctggacttgtcacaggacctt

SEQ ID NO: 4797517 - DNA, 25 bp, Homo sapien
ggaacgatggatcttggccacaggt

SEQ ID NO: 4797518 - DNA, 25 bp, Homo sapien
ggcaattgcctgaaatatgctgttt

SEQ ID NO: 4797519 - DNA, 25 bp, Homo sapien
tcagagcacgttgaatcatcaggga

SEQ ID NO: 4797520 - DNA, 25 bp, Homo sapien
cacaggttttagacctttgtggagt

SEQ ID NO: 4797521 - DNA, 25 bp, Homo sapien
tatttatacataccaagttgaggac

SEQ ID NO: 4797522 - DNA, 25 bp, Homo sapien
gaaggtcacccatatagccagggca

SEQ ID NO: 4797523 - DNA, 25 bp, Homo sapien
gcctagaaaggcacacggtatctta

SEQ ID NO: 4797524 - DNA, 25 bp, Homo sapien
ccagggcaacagatactaagctcag

SEQ ID NO: 4797525 - DNA, 25 bp, Homo sapien
tctggttctggaaccttccaaggac

SEQ ID NO: 4797526 - DNA, 25 bp, Homo sapien
tggaaccttccaaggacactattac

SEQ ID NO: 4797527 - DNA, 25 bp, Homo sapien
tggttctggaaccttccaaggacac

SEQ ID NO: 4797528 - DNA, 25 bp, Homo sapien
tctggaaccttccaaggacactatt

SEQ ID NO: 4797529 - DNA, 25 bp, Homo sapien
tactgctccgtgtagaatgtcagct

SEQ ID NO: 4797530 - DNA, 25 bp, Homo sapien
tcagctgagtttcatcgtctgcctc

SEQ ID NO: 4797531 - DNA, 25 bp, Homo sapien
ttggctctcccaaagctgattcctc

SEQ ID NO: 4797532 - DNA, 25 bp, Homo sapien
tctgagcccgacgtccccttggctc

SEQ ID NO: 4797533 - DNA, 25 bp, Homo sapien
tgctctgccagcctcgacaggccca

SEQ ID NO: 4797534 - DNA, 25 bp, Homo sapien
gctctgccagcctcgacaggcccag

SEQ ID NO: 4797535 - DNA, 25 bp, Homo sapien
tgccagcctcgacaggcccagccct

SEQ ID NO: 4797536 - DNA, 25 bp, Homo sapien
ctccatctttcttcagacatggcac

SEQ ID NO: 4797537 - DNA, 25 bp, Homo sapien
gcactcattcccagggtgaacttcg

SEQ ID NO: 4797538 - DNA, 25 bp, Homo sapien
tcagacatggcactcattcccaggg

SEQ ID NO: 4797539 - DNA, 25 bp, Homo sapien
cattcccagggtgaacttcgcaggc

SEQ ID NO: 4797540 - DNA, 25 bp, Homo sapien
aagaaatgaattttatttgattagg

SEQ ID NO: 4797541 - DNA, 25 bp, Homo sapien
aaatgaattttatttgattaggcat

SEQ ID NO: 4797542 - DNA, 25 bp, Homo sapien
ctggggagatgaaagaaatgaattt

SEQ ID NO: 4797543 - DNA, 25 bp, Homo sapien
gaaagaaatgaattttatttgatta

SEQ ID NO: 4797544 - DNA, 25 bp, Homo sapien
catgatgagggtaagcattaattaa

SEQ ID NO: 4797545 - DNA, 25 bp, Homo sapien
tctaactgcgagagaataattatgt

SEQ ID NO: 4797546 - DNA, 25 bp, Homo sapien
tatgtacacatatccgtcagggcag

SEQ ID NO: 4797547 - DNA, 25 bp, Homo sapien
tgctagctgcaagatcatgatgagg

SEQ ID NO: 4797548 - DNA, 25 bp, Homo sapien
gagctcaccagcgtttctcggctaa

SEQ ID NO: 4797549 - DNA, 25 bp, Homo sapien
ggctaacaccctcggcaggtagcaa

SEQ ID NO: 4797550 - DNA, 25 bp, Homo sapien
cgcaagatgatttctttgggaccct

SEQ ID NO: 4797551 - DNA, 25 bp, Homo sapien
caatctgtgaaggttgctccgcaac

SEQ ID NO: 4797552 - DNA, 25 bp, Homo sapien
ccagatagaattgactgagagcccc

SEQ ID NO: 4797553 - DNA, 25 bp, Homo sapien
accaggatctggtcgtgagccttcc

SEQ ID NO: 4797554 - DNA, 25 bp, Homo sapien
catcctccaggccagatagaattga

SEQ ID NO: 4797555 - DNA, 25 bp, Homo sapien
cccctgatgtatttcagatggacaa

SEQ ID NO: 4797556 - DNA, 25 bp, Homo sapien
tagagcctcatagctcctgaacacc

SEQ ID NO: 4797557 - DNA, 25 bp, Homo sapien
cttctagagcctcatagctcctgaa

SEQ ID NO: 4797558 - DNA, 25 bp, Homo sapien
tctagagcctcatagctcctgaaca

SEQ ID NO: 4797559 - DNA, 25 bp, Homo sapien
gagcctcatagctcctgaacaccct

SEQ ID NO: 4797560 - DNA, 25 bp, Homo sapien
tctggaaactagtgggcaccgtggc

SEQ ID NO: 4797561 - DNA, 25 bp, Homo sapien
ttctggaaactagtgggcaccgtgg

SEQ ID NO: 4797562 - DNA, 25 bp, Homo sapien
gcttttaaccatgtgctcaattcca

SEQ ID NO: 4797563 - DNA, 25 bp, Homo sapien
ccatggcactggttctcggctaccc

SEQ ID NO: 4797564 - DNA, 25 bp, Homo sapien
ctttaatagcatccacttgagcaca

SEQ ID NO: 4797565 - DNA, 25 bp, Homo sapien
catactgtgattaagctgttttgga

SEQ ID NO: 4797566 - DNA, 25 bp, Homo sapien
tctcctgcagaaattgtatcccatg

SEQ ID NO: 4797567 - DNA, 25 bp, Homo sapien
tgtatcccatggtagcagcaaaatc

SEQ ID NO: 4797568 - DNA, 25 bp, Homo sapien
tcttccctgccgatgtgctgcgcag

SEQ ID NO: 4797569 - DNA, 25 bp, Homo sapien
atgggcgtgttagcgcggaaactct

SEQ ID NO: 4797570 - DNA, 25 bp, Homo sapien
ctcgagacttgctcctccgcttcct

SEQ ID NO: 4797571 - DNA, 25 bp, Homo sapien
ggtggttgcagctgaccgatctcga

SEQ ID NO: 4797572 - DNA, 25 bp, Homo sapien
actgtctcctgagtcgcctcagctg

SEQ ID NO: 4797573 - DNA, 25 bp, Homo sapien
tgtctcctgagtcgcctcagctgct

SEQ ID NO: 4797574 - DNA, 25 bp, Homo sapien
ctgtctcctgagtcgcctcagctgc

SEQ ID NO: 4797575 - DNA, 25 bp, Homo sapien
gtctcctgagtcgcctcagctgctg

SEQ ID NO: 4797576 - DNA, 25 bp, Homo sapien
gagcggcaaaatgctcacccatcgc

SEQ ID NO: 4797577 - DNA, 25 bp, Homo sapien
tcctggtacccgctgagctctgact

SEQ ID NO: 4797578 - DNA, 25 bp, Homo sapien
ctgactccccagagcggcaaaatgc

SEQ ID NO: 4797579 - DNA, 25 bp, Homo sapien
ctcctggtacccgctgagctctgac

SEQ ID NO: 4797580 - DNA, 25 bp, Homo sapien
tgcacagtcaaatgccaggactggg

SEQ ID NO: 4797581 - DNA, 25 bp, Homo sapien
ggctttggactttgcacagtcaaat

SEQ ID NO: 4797582 - DNA, 25 bp, Homo sapien
ttgcacagtcaaatgccaggactgg

SEQ ID NO: 4797583 - DNA, 25 bp, Homo sapien
tcgggctttggactttgcacagtca

SEQ ID NO: 4797584 - DNA, 25 bp, Homo sapien
tagatagagtacacttcattgcccc

SEQ ID NO: 4797585 - DNA, 25 bp, Homo sapien
aaggcttgtcgcagctagtgtgcta

SEQ ID NO: 4797586 - DNA, 25 bp, Homo sapien
gaatgactcagggtagactcacagc

SEQ ID NO: 4797587 - DNA, 25 bp, Homo sapien
ggtccttgaccctagcaaatctgta

SEQ ID NO: 4797588 - DNA, 25 bp, Homo sapien
tgtttactctacaccaggcaccatt

SEQ ID NO: 4797589 - DNA, 25 bp, Homo sapien
accacaagcctaggaagtgagtgac

SEQ ID NO: 4797590 - DNA, 25 bp, Homo sapien
gatcttaaccactctgaaatacagg

SEQ ID NO: 4797591 - DNA, 25 bp, Homo sapien
tgagtgacattatggagagagccca

SEQ ID NO: 4797592 - DNA, 25 bp, Homo sapien
cttccaagctaattgtctccactgg

SEQ ID NO: 4797593 - DNA, 25 bp, Homo sapien
ttgtctccactggtgtatgcaaacg

SEQ ID NO: 4797594 - DNA, 25 bp, Homo sapien
ctcattcacttccaagctaattgtc

SEQ ID NO: 4797595 - DNA, 25 bp, Homo sapien
tccactggtgtatgcaaacgaacca

SEQ ID NO: 4797596 - DNA, 25 bp, Homo sapien
gaacaatgcctataatcctcaccga

SEQ ID NO: 4797597 - DNA, 25 bp, Homo sapien
tgagagttctgtacccttgagatcc

SEQ ID NO: 4797598 - DNA, 25 bp, Homo sapien
gatcctaatgaaagccagagcgttg

SEQ ID NO: 4797599 - DNA, 25 bp, Homo sapien
gacatggatcctgtgatgacctacg

SEQ ID NO: 4797600 - DNA, 25 bp, Homo sapien
gaagtagaatttattggtgagtatt

SEQ ID NO: 4797601 - DNA, 25 bp, Homo sapien
aggaagtagaatttattggtgagta

SEQ ID NO: 4797602 - DNA, 25 bp, Homo sapien
ttggtgagtattaagagggggcagc

SEQ ID NO: 4797603 - DNA, 25 bp, Homo sapien
tattggtgagtattaagagggggca

SEQ ID NO: 4797604 - DNA, 25 bp, Homo sapien
gccacgactggggatgtacttgacc

SEQ ID NO: 4797605 - DNA, 25 bp, Homo sapien
cagccatcagggatgagctgcttct

SEQ ID NO: 4797606 - DNA, 25 bp, Homo sapien
acgactggggatgtacttgacccca

SEQ ID NO: 4797607 - DNA, 25 bp, Homo sapien
tcaaattcatcaacattgaacttgg

SEQ ID NO: 4797608 - DNA, 25 bp, Homo sapien
agatgcggatcttctggtggccagg

SEQ ID NO: 4797609 - DNA, 25 bp, Homo sapien
ctttgagatgcggatcttctggtgg

SEQ ID NO: 4797610 - DNA, 25 bp, Homo sapien
atgcggatcttctggtggccaggaa

SEQ ID NO: 4797611 - DNA, 25 bp, Homo sapien
gcggatcttctggtggccaggaaac

SEQ ID NO: 4797612 - DNA, 25 bp, Homo sapien
gccctgcgcagggcctcaattacat

SEQ ID NO: 4797613 - DNA, 25 bp, Homo sapien
ctgcgcagggcctcaattacatgct

SEQ ID NO: 4797614 - DNA, 25 bp, Homo sapien
gcttggtgtggatggacatgataac

SEQ ID NO: 4797615 - DNA, 25 bp, Homo sapien
aggcacctcgcatgcctgtttggag

SEQ ID NO: 4797616 - DNA, 25 bp, Homo sapien
gggtagcgcaaggtcagaaacataa

SEQ ID NO: 4797617 - DNA, 25 bp, Homo sapien
tagcgcaaggtcagaaacataaaca

SEQ ID NO: 4797618 - DNA, 25 bp, Homo sapien
agcgcaaggtcagaaacataaacat

SEQ ID NO: 4797619 - DNA, 25 bp, Homo sapien
ggtcagaaacataaacatacatctg

SEQ ID NO: 4797620 - DNA, 25 bp, Homo sapien
aacccagttggcttaattggctgca

SEQ ID NO: 4797621 - DNA, 25 bp, Homo sapien
cttaaagcaacccatacaacaaaca

SEQ ID NO: 4797622 - DNA, 25 bp, Homo sapien
ccccatgaggaaaggaacccagttg

SEQ ID NO: 4797623 - DNA, 25 bp, Homo sapien
gccattgcacaatgggcccccatga

SEQ ID NO: 4797624 - DNA, 25 bp, Homo sapien
accaaggatgacccaggagacacag

SEQ ID NO: 4797625 - DNA, 25 bp, Homo sapien
gacccaggagacacaggagatatta

SEQ ID NO: 4797626 - DNA, 25 bp, Homo sapien
caggagacacaggagatattaaacc

SEQ ID NO: 4797627 - DNA, 25 bp, Homo sapien
cccaggagacacaggagatattaaa

SEQ ID NO: 4797628 - DNA, 25 bp, Homo sapien
tgcacagagtcagatagttccagat

SEQ ID NO: 4797629 - DNA, 25 bp, Homo sapien
gaacagagctctatatctgcacaga

SEQ ID NO: 4797630 - DNA, 25 bp, Homo sapien
ggatatgacaaattctttcatggag

SEQ ID NO: 4797631 - DNA, 25 bp, Homo sapien
ccagattagcttatggatggtgacg

SEQ ID NO: 4797632 - DNA, 25 bp, Homo sapien
cctttccccagagcgtggagtctga

SEQ ID NO: 4797633 - DNA, 25 bp, Homo sapien
ccccagagcgtggagtctgagaatg

SEQ ID NO: 4797634 - DNA, 25 bp, Homo sapien
cgtggagtctgagaatggccgtcca

SEQ ID NO: 4797635 - DNA, 25 bp, Homo sapien
gtgccctttccccagagcgtggagt

SEQ ID NO: 4797636 - DNA, 25 bp, Homo sapien
taactatgaggactgatattttaca

SEQ ID NO: 4797637 - DNA, 25 bp, Homo sapien
catggtaactatgaggactgatatt

SEQ ID NO: 4797638 - DNA, 25 bp, Homo sapien
tttcatggtaactatgaggactgat

SEQ ID NO: 4797639 - DNA, 25 bp, Homo sapien
tatgaggactgatattttacaaagg

SEQ ID NO: 4797640 - DNA, 25 bp, Homo sapien
gccctggtgtgagttagtcctctct

SEQ ID NO: 4797641 - DNA, 25 bp, Homo sapien
tctcttcctatgtaagtgtgctgag

SEQ ID NO: 4797642 - DNA, 25 bp, Homo sapien
tctctgtgttcatgcattctcaatg

SEQ ID NO: 4797643 - DNA, 25 bp, Homo sapien
tgttcatgcattctcaatgttcaac

SEQ ID NO: 4797644 - DNA, 25 bp, Homo sapien
tgctgtaggcttggaagtagcatag

SEQ ID NO: 4797645 - DNA, 25 bp, Homo sapien
gttgctgtaggcttggaagtagcat

SEQ ID NO: 4797646 - DNA, 25 bp, Homo sapien
ggttgctgtaggcttggaagtagca

SEQ ID NO: 4797647 - DNA, 25 bp, Homo sapien
ctgtaggcttggaagtagcatagtt

SEQ ID NO: 4797648 - DNA, 25 bp, Homo sapien
agcctctggattcgttcagtttttg

SEQ ID NO: 4797649 - DNA, 25 bp, Homo sapien
gcctctggattcgttcagtttttgg

SEQ ID NO: 4797650 - DNA, 25 bp, Homo sapien
atgggctgtgacatggaggactcac

SEQ ID NO: 4797651 - DNA, 25 bp, Homo sapien
aaatgggctgtgacatggaggactc

SEQ ID NO: 4797652 - DNA, 25 bp, Homo sapien
tcaaaatgccccctggaaaatgggc

SEQ ID NO: 4797653 - DNA, 25 bp, Homo sapien
ggaaaatgggctgtgacatggagga

SEQ ID NO: 4797654 - DNA, 25 bp, Homo sapien
cagccgggatgaacggaagctctcc

SEQ ID NO: 4797655 - DNA, 25 bp, Homo sapien
gtcatccaggatgggagtctcccgg

SEQ ID NO: 4797656 - DNA, 25 bp, Homo sapien
tcctcgcgggagacatggttggccc

SEQ ID NO: 4797657 - DNA, 25 bp, Homo sapien
gatgggcacgccaatgacggaattg

SEQ ID NO: 4797658 - DNA, 25 bp, Homo sapien
acagcgccacggtgaacaccagcag

SEQ ID NO: 4797659 - DNA, 25 bp, Homo sapien
acagatgggatgtagtggatctcat

SEQ ID NO: 4797660 - DNA, 25 bp, Homo sapien
gcttctgtgcttgcgctcttctggg

SEQ ID NO: 4797661 - DNA, 25 bp, Homo sapien
tgccaacgtcgctgggcgtacagcg

SEQ ID NO: 4797662 - DNA, 25 bp, Homo sapien
gaaggaaggacacacaaatgggcca

SEQ ID NO: 4797663 - DNA, 25 bp, Homo sapien
ggaaggaaggacacacaaatgggcc

SEQ ID NO: 4797664 - DNA, 25 bp, Homo sapien
caggaaggaaggacacacaaatggg

SEQ ID NO: 4797665 - DNA, 25 bp, Homo sapien
agcaggaaggaaggacacacaaatg

SEQ ID NO: 4797666 - DNA, 25 bp, Homo sapien
cagatttccagtattctggggctca

SEQ ID NO: 4797667 - DNA, 25 bp, Homo sapien
cgtggtttccgttacagattcaagt

SEQ ID NO: 4797668 - DNA, 25 bp, Homo sapien
agaacttggtcaaagcagatttcca

SEQ ID NO: 4797669 - DNA, 25 bp, Homo sapien
tcactgaccacgtggtttccgttac

SEQ ID NO: 4797670 - DNA, 25 bp, Homo sapien
ggtccacacccatagaattacatac

SEQ ID NO: 4797671 - DNA, 25 bp, Homo sapien
ctggtccacacccatagaattacat

SEQ ID NO: 4797672 - DNA, 25 bp, Homo sapien
tggtccacacccatagaattacata

SEQ ID NO: 4797673 - DNA, 25 bp, Homo sapien
aatcgaccagtgctcagcacggcca

SEQ ID NO: 4797674 - DNA, 25 bp, Homo sapien
cagaaaggcaggagcaatcgaccag

SEQ ID NO: 4797675 - DNA, 25 bp, Homo sapien
tttaacagcttcccacaccagaggt

SEQ ID NO: 4797676 - DNA, 25 bp, Homo sapien
cacaccagaggtaagcaaacagaaa

SEQ ID NO: 4797677 - DNA, 25 bp, Homo sapien
tcctccaaagtgtgatgctccctct

SEQ ID NO: 4797678 - DNA, 25 bp, Homo sapien
ccctgggcagttggcatcctccaaa

SEQ ID NO: 4797679 - DNA, 25 bp, Homo sapien
gcagttggcatcctccaaagtgtga

SEQ ID NO: 4797680 - DNA, 25 bp, Homo sapien
gtcctacttgtcctggagtcaccct

SEQ ID NO: 4797681 - DNA, 25 bp, Homo sapien
caaacctcgtatgcccctttgctgc

SEQ ID NO: 4797682 - DNA, 25 bp, Homo sapien
aacctcgtatgcccctttgctgctt

SEQ ID NO: 4797683 - DNA, 25 bp, Homo sapien
aaacctcgtatgcccctttgctgct

SEQ ID NO: 4797684 - DNA, 25 bp, Homo sapien
cgtgctgaacagatgctcaacagca

SEQ ID NO: 4797685 - DNA, 25 bp, Homo sapien
gtgctgaacagatgctcaacagcag

SEQ ID NO: 4797686 - DNA, 25 bp, Homo sapien
tccttttacactctgctggtggata

SEQ ID NO: 4797687 - DNA, 25 bp, Homo sapien
tctgagttcttagtacttgatgtac

SEQ ID NO: 4797688 - DNA, 25 bp, Homo sapien
cttaatagaggaaagtcgggacgag

SEQ ID NO: 4797689 - DNA, 25 bp, Homo sapien
cctgtaccaaatgagctctgagttc

SEQ ID NO: 4797690 - DNA, 25 bp, Homo sapien
gctgcaatgtggtgacaggcccaca

SEQ ID NO: 4797691 - DNA, 25 bp, Homo sapien
agaggttcatcctgagatctggctc

SEQ ID NO: 4797692 - DNA, 25 bp, Homo sapien
acagcccacacctctaagaggttca

SEQ ID NO: 4797693 - DNA, 25 bp, Homo sapien
ttcatcctgagatctggctctgctt

SEQ ID NO: 4797694 - DNA, 25 bp, Homo sapien
gttgccggcagtcgctgtccctctg

SEQ ID NO: 4797695 - DNA, 25 bp, Homo sapien
agcagttgccggcagtcgctgtccc

SEQ ID NO: 4797696 - DNA, 25 bp, Homo sapien
attacagcagttgccggcagtcgct

SEQ ID NO: 4797697 - DNA, 25 bp, Homo sapien
gaattacagcagttgccggcagtcg

SEQ ID NO: 4797698 - DNA, 25 bp, Homo sapien
gggaggatgggcctacgataacctc

SEQ ID NO: 4797699 - DNA, 25 bp, Homo sapien
aggatgggcctacgataacctcttg

SEQ ID NO: 4797700 - DNA, 25 bp, Homo sapien
gatgggcctacgataacctcttgtc

SEQ ID NO: 4797701 - DNA, 25 bp, Homo sapien
ggaggatgggcctacgataacctct

SEQ ID NO: 4797702 - DNA, 25 bp, Homo sapien
tgagtctgaacgctcacaggcctgc

SEQ ID NO: 4797703 - DNA, 25 bp, Homo sapien
tgagcagctcctatgccttatttct

SEQ ID NO: 4797704 - DNA, 25 bp, Homo sapien
gcctcaggactactggcctcggaaa

SEQ ID NO: 4797705 - DNA, 25 bp, Homo sapien
tcttatctgcatgaagtgccagcac

SEQ ID NO: 4797706 - DNA, 25 bp, Homo sapien
ggactcgccttataccctgtgcttc

SEQ ID NO: 4797707 - DNA, 25 bp, Homo sapien
caggactcgccttataccctgtgct

SEQ ID NO: 4797708 - DNA, 25 bp, Homo sapien
ctgctgggaaagtagggtagcacat

SEQ ID NO: 4797709 - DNA, 25 bp, Homo sapien
acatacactaaatgctggaatcctg

SEQ ID NO: 4797710 - DNA, 25 bp, Homo sapien
aaaagacacaccaaagtagtagatc

SEQ ID NO: 4797711 - DNA, 25 bp, Homo sapien
tcctgaagggatagggatcgtctat

SEQ ID NO: 4797712 - DNA, 25 bp, Homo sapien
caaagtagtagatcctgaagggata

SEQ ID NO: 4797713 - DNA, 25 bp, Homo sapien
agggatcgtctatttcacttcttgc

SEQ ID NO: 4797714 - DNA, 25 bp, Homo sapien
tggctatgcttgaattcaccaggtg

SEQ ID NO: 4797715 - DNA, 25 bp, Homo sapien
caccaggtgttatctctatcagcaa

SEQ ID NO: 4797716 - DNA, 25 bp, Homo sapien
gcttcaaagcacttggaacgtctga

SEQ ID NO: 4797717 - DNA, 25 bp, Homo sapien
agccaagcctcctgcttgaacactg

SEQ ID NO: 4797718 - DNA, 25 bp, Homo sapien
atttcatggtcccatccaatttcag

SEQ ID NO: 4797719 - DNA, 25 bp, Homo sapien
ctgtggtggagtgaaattggttagg

SEQ ID NO: 4797720 - DNA, 25 bp, Homo sapien
tggagtgaaattggttaggatttca

SEQ ID NO: 4797721 - DNA, 25 bp, Homo sapien
tggtggagtgaaattggttaggatt

SEQ ID NO: 4797722 - DNA, 25 bp, Homo sapien
gctgctgagcatggtacgtcccttt

SEQ ID NO: 4797723 - DNA, 25 bp, Homo sapien
gagatgccaacttgaaagtccccat

SEQ ID NO: 4797724 - DNA, 25 bp, Homo sapien
gaatgcgaaggttactgacagtgcc

SEQ ID NO: 4797725 - DNA, 25 bp, Homo sapien
ttcctagtagagttaaaagagccac

SEQ ID NO: 4797726 - DNA, 25 bp, Homo sapien
ctttctgtgggtaaaagccatgtat

SEQ ID NO: 4797727 - DNA, 25 bp, Homo sapien
tgagaatgacttaaacacactgtta

SEQ ID NO: 4797728 - DNA, 25 bp, Homo sapien
ttcattaccaccctgccaagtcttt

SEQ ID NO: 4797729 - DNA, 25 bp, Homo sapien
gtatgtccacctgcgttcatcagtc

SEQ ID NO: 4797730 - DNA, 25 bp, Homo sapien
caggcctctggacacttcattaggg

SEQ ID NO: 4797731 - DNA, 25 bp, Homo sapien
aacaggaaccgaagagggtgtccat

SEQ ID NO: 4797732 - DNA, 25 bp, Homo sapien
tcaggacacataaggactgtaataa

SEQ ID NO: 4797733 - DNA, 25 bp, Homo sapien
tcattaggggaacatcaggacacat

SEQ ID NO: 4797734 - DNA, 25 bp, Homo sapien
gaacgttccaatttatcaaagccaa

SEQ ID NO: 4797735 - DNA, 25 bp, Homo sapien
cagtcctattgaggagaacgttcca

SEQ ID NO: 4797736 - DNA, 25 bp, Homo sapien
acaaggtcctccgtcacaggcggaa

SEQ ID NO: 4797737 - DNA, 25 bp, Homo sapien
ggtaagttttccagccactatgacc

SEQ ID NO: 4797738 - DNA, 25 bp, Homo sapien
tgtggtcagttgaatagtgggtccc

SEQ ID NO: 4797739 - DNA, 25 bp, Homo sapien
ggcaagaaacccacagaaatgacat

SEQ ID NO: 4797740 - DNA, 25 bp, Homo sapien
agtggattcataacgtcaatgtgtc

SEQ ID NO: 4797741 - DNA, 25 bp, Homo sapien
gggtcccagaaagatatgcccacac

SEQ ID NO: 4797742 - DNA, 25 bp, Homo sapien
tgaggttgagttccatctgcttctc

SEQ ID NO: 4797743 - DNA, 25 bp, Homo sapien
cctttcttgaggttgagttccatct

SEQ ID NO: 4797744 - DNA, 25 bp, Homo sapien
ctcgctacccgactcccagcccttt

SEQ ID NO: 4797745 - DNA, 25 bp, Homo sapien
gccctttcttgaggttgagttccat

SEQ ID NO: 4797746 - DNA, 25 bp, Homo sapien
cttctctctgtatcacttcctccat

SEQ ID NO: 4797747 - DNA, 25 bp, Homo sapien
cacactaatgggacagggatgaaga

SEQ ID NO: 4797748 - DNA, 25 bp, Homo sapien
tggcccacactaatgggacagggat

SEQ ID NO: 4797749 - DNA, 25 bp, Homo sapien
tccatctgggctttatcattggccc

SEQ ID NO: 4797750 - DNA, 25 bp, Homo sapien
tcattggcccacactaatgggacag

SEQ ID NO: 4797751 - DNA, 25 bp, Homo sapien
gttcagtgtctccaagacatgactc

SEQ ID NO: 4797752 - DNA, 25 bp, Homo sapien
cctggggttcagtgtctccaagaca

SEQ ID NO: 4797753 - DNA, 25 bp, Homo sapien
tcagaggaagaacaccctggggttc

SEQ ID NO: 4797754 - DNA, 25 bp, Homo sapien
caccctggggttcagtgtctccaag

SEQ ID NO: 4797755 - DNA, 25 bp, Homo sapien
gaagtacaaggtgccattctccagc

SEQ ID NO: 4797756 - DNA, 25 bp, Homo sapien
gagatgtccgctgctgtgccagaca

SEQ ID NO: 4797757 - DNA, 25 bp, Homo sapien
gggcggtggcttgggccagctgccc

SEQ ID NO: 4797758 - DNA, 25 bp, Homo sapien
tcctcaacaatctccgagggctcct

SEQ ID NO: 4797759 - DNA, 25 bp, Homo sapien
tgataggaacaggatctaattcatc

SEQ ID NO: 4797760 - DNA, 25 bp, Homo sapien
taggaacaggatctaattcatcctt

SEQ ID NO: 4797761 - DNA, 25 bp, Homo sapien
tcatcattattgataggaacaggat

SEQ ID NO: 4797762 - DNA, 25 bp, Homo sapien
cattattgataggaacaggatctaa

SEQ ID NO: 4797763 - DNA, 25 bp, Homo sapien
aggacccttttgacttgcaattcca

SEQ ID NO: 4797764 - DNA, 25 bp, Homo sapien
gccgtcagtggaatgattacaggac

SEQ ID NO: 4797765 - DNA, 25 bp, Homo sapien
ttcagtccaatttaggccggccaca

SEQ ID NO: 4797766 - DNA, 25 bp, Homo sapien
acagagccccaggccgtcagtggaa

SEQ ID NO: 4797767 - DNA, 25 bp, Homo sapien
tcaagctctaaaaccagccacctgg

SEQ ID NO: 4797768 - DNA, 25 bp, Homo sapien
tcagctccccaatatagcacagggc

SEQ ID NO: 4797769 - DNA, 25 bp, Homo sapien
tctgccactctattagttgaataac

SEQ ID NO: 4797770 - DNA, 25 bp, Homo sapien
cactttcatcatataaactggtgaa

SEQ ID NO: 4797771 - DNA, 25 bp, Homo sapien
atcatatttactaagctccagttcc

SEQ ID NO: 4797772 - DNA, 25 bp, Homo sapien
catatttactaagctccagttccaa

SEQ ID NO: 4797773 - DNA, 25 bp, Homo sapien
ctggctcttccgtttggattttatc

SEQ ID NO: 4797774 - DNA, 25 bp, Homo sapien
atttactaagctccagttccaaggc

SEQ ID NO: 4797775 - DNA, 25 bp, Homo sapien
tgtcctcacggagactgataaggaa

SEQ ID NO: 4797776 - DNA, 25 bp, Homo sapien
cggagactgataaggaagtaattag

SEQ ID NO: 4797777 - DNA, 25 bp, Homo sapien
cctcacggagactgataaggaagta

SEQ ID NO: 4797778 - DNA, 25 bp, Homo sapien
tgtgtgtcctcacggagactgataa

SEQ ID NO: 4797779 - DNA, 25 bp, Homo sapien
tccagtgctgacacaagaaagcctg

SEQ ID NO: 4797780 - DNA, 25 bp, Homo sapien
aatggtccctcccttgaaggtagag

SEQ ID NO: 4797781 - DNA, 25 bp, Homo sapien
agaaagcctgaataataatgtagac

SEQ ID NO: 4797782 - DNA, 25 bp, Homo sapien
caagttttggccagtgatatgtgaa

SEQ ID NO: 4797783 - DNA, 25 bp, Homo sapien
gaagagaatagaggacggcagggct

SEQ ID NO: 4797784 - DNA, 25 bp, Homo sapien
ctgaaaggagccaatagctcatgtt

SEQ ID NO: 4797785 - DNA, 25 bp, Homo sapien
gagaatagaggacggcagggctcca

SEQ ID NO: 4797786 - DNA, 25 bp, Homo sapien
aggagccaatagctcatgttcctcc

SEQ ID NO: 4797787 - DNA, 25 bp, Homo sapien
ttaacaacacacgacagcttcgttg

SEQ ID NO: 4797788 - DNA, 25 bp, Homo sapien
ttggcagtgagtgtaggcagcttaa

SEQ ID NO: 4797789 - DNA, 25 bp, Homo sapien
gcttcgttgaacaaattggcagtga

SEQ ID NO: 4797790 - DNA, 25 bp, Homo sapien
cacacgacagcttcgttgaacaaat

SEQ ID NO: 4797791 - DNA, 25 bp, Homo sapien
aggtccccgaacaaaggcatcctgg

SEQ ID NO: 4797792 - DNA, 25 bp, Homo sapien
gattcctacagtgcatgaacttgct

SEQ ID NO: 4797793 - DNA, 25 bp, Homo sapien
tctcggattcctacagtgcatgaac

SEQ ID NO: 4797794 - DNA, 25 bp, Homo sapien
gaagctttctcggattcctacagtg

SEQ ID NO: 4797795 - DNA, 25 bp, Homo sapien
ctacagtgcatgaacttgcttttcc

SEQ ID NO: 4797796 - DNA, 25 bp, Homo sapien
ggcactggccgacatccaagtaggg

SEQ ID NO: 4797797 - DNA, 25 bp, Homo sapien
tacctacaaggctaaagggcatcct

SEQ ID NO: 4797798 - DNA, 25 bp, Homo sapien
tgaggtgggatgacctggtatatct

SEQ ID NO: 4797799 - DNA, 25 bp, Homo sapien
gcttctgcggtgtgtgttatctgag

SEQ ID NO: 4797800 - DNA, 25 bp, Homo sapien
cattatttttaatatttgcaaccaa

SEQ ID NO: 4797801 - DNA, 25 bp, Homo sapien
tctcattatttttaatatttgcaac

SEQ ID NO: 4797802 - DNA, 25 bp, Homo sapien
ttatttttaatatttgcaaccaaca

SEQ ID NO: 4797803 - DNA, 25 bp, Homo sapien
tatttttaatatttgcaaccaacat

SEQ ID NO: 4797804 - DNA, 25 bp, Homo sapien
ccaagcttaaaatcagagagaagca

SEQ ID NO: 4797805 - DNA, 25 bp, Homo sapien
caagcttaaaatcagagagaagcat

SEQ ID NO: 4797806 - DNA, 25 bp, Homo sapien
caccaagcttaaaatcagagagaag

SEQ ID NO: 4797807 - DNA, 25 bp, Homo sapien
tacaccaagcttaaaatcagagaga

SEQ ID NO: 4797808 - DNA, 25 bp, Homo sapien
caagattcctgggtaccagagccgg

SEQ ID NO: 4797809 - DNA, 25 bp, Homo sapien
gctacctctgagcatctggaattgg

SEQ ID NO: 4797810 - DNA, 25 bp, Homo sapien
tggactctgattacaatctgaggag

SEQ ID NO: 4797811 - DNA, 25 bp, Homo sapien
ctgtcggcaatcaaacaccctctgg

SEQ ID NO: 4797812 - DNA, 25 bp, Homo sapien
ggaggcagaggccggcttgcagctg

SEQ ID NO: 4797813 - DNA, 25 bp, Homo sapien
gcagaggccggcttgcagctggggg

SEQ ID NO: 4797814 - DNA, 25 bp, Homo sapien
ctggaggcagaggccggcttgcagc

SEQ ID NO: 4797815 - DNA, 25 bp, Homo sapien
aggcagaggccggcttgcagctggg

SEQ ID NO: 4797816 - DNA, 25 bp, Homo sapien
caatctgatcttcaattttaatgcg

SEQ ID NO: 4797817 - DNA, 25 bp, Homo sapien
ctcaagaagtatgccagcactggct

SEQ ID NO: 4797818 - DNA, 25 bp, Homo sapien
tacagtaaaacagtgatatcttttc

SEQ ID NO: 4797819 - DNA, 25 bp, Homo sapien
tcttcaattttaatgcgcttccatg

SEQ ID NO: 4797820 - DNA, 25 bp, Homo sapien
taatcacagacttgtcgaccaccag

SEQ ID NO: 4797821 - DNA, 25 bp, Homo sapien
catgtaatttacaacaggcagtgcc

SEQ ID NO: 4797822 - DNA, 25 bp, Homo sapien
tcatttgaatgcgaaaggggccagc

SEQ ID NO: 4797823 - DNA, 25 bp, Homo sapien
tggcacctagatggagtgcggaaat

SEQ ID NO: 4797824 - DNA, 25 bp, Homo sapien
gcttctctcattctgtcgttcctct

SEQ ID NO: 4797825 - DNA, 25 bp, Homo sapien
ctgcttctctcattctgtcgttcct

SEQ ID NO: 4797826 - DNA, 25 bp, Homo sapien
ttctctcattctgtcgttcctctcc

SEQ ID NO: 4797827 - DNA, 25 bp, Homo sapien
ctcattctgtcgttcctctccccat

SEQ ID NO: 4797828 - DNA, 25 bp, Homo sapien
caccgctattcgcagttaacatgga

SEQ ID NO: 4797829 - DNA, 25 bp, Homo sapien
cagtcccactggctttcacatagag

SEQ ID NO: 4797830 - DNA, 25 bp, Homo sapien
tggaagacatgcgagtcaggaagac

SEQ ID NO: 4797831 - DNA, 25 bp, Homo sapien
ggagagaactggaaatgcaccgcta

SEQ ID NO: 4797832 - DNA, 25 bp, Homo sapien
caagaatgggagaagcagaacagca

SEQ ID NO: 4797833 - DNA, 25 bp, Homo sapien
gagcttactactttctccctaggag

SEQ ID NO: 4797834 - DNA, 25 bp, Homo sapien
tatgaagacccacatgtgctgcagc

SEQ ID NO: 4797835 - DNA, 25 bp, Homo sapien
gtgtcactcacccttccggactatg

SEQ ID NO: 4797836 - DNA, 25 bp, Homo sapien
caagaaaggccgacatgcaatcaac

SEQ ID NO: 4797837 - DNA, 25 bp, Homo sapien
tatgcaataagggtctatgagcacc

SEQ ID NO: 4797838 - DNA, 25 bp, Homo sapien
gagggaatattcacgctggatctta

SEQ ID NO: 4797839 - DNA, 25 bp, Homo sapien
cactgaatatacgaaatgcttggga

SEQ ID NO: 4797840 - DNA, 25 bp, Homo sapien
acagacagtacaaagcaagaggagc

SEQ ID NO: 4797841 - DNA, 25 bp, Homo sapien
tcatggagtaggtcagggcacttca

SEQ ID NO: 4797842 - DNA, 25 bp, Homo sapien
gatttccagatcctaaccagcgtta

SEQ ID NO: 4797843 - DNA, 25 bp, Homo sapien
tacccactcatattgcagcagaaag

SEQ ID NO: 4797844 - DNA, 25 bp, Homo sapien
cctgctatacccagccatctggtga

SEQ ID NO: 4797845 - DNA, 25 bp, Homo sapien
cagctcctgctatacccagccatct

SEQ ID NO: 4797846 - DNA, 25 bp, Homo sapien
ctacacagctcctgctatacccagc

SEQ ID NO: 4797847 - DNA, 25 bp, Homo sapien
tcctgctatacccagccatctggtg

SEQ ID NO: 4797848 - DNA, 25 bp, Homo sapien
cgttgagagcgcctaaagctgccag

SEQ ID NO: 4797849 - DNA, 25 bp, Homo sapien
aaatccccgttgagagcgcctaaag

SEQ ID NO: 4797850 - DNA, 25 bp, Homo sapien
ctagccaaatccccgttgagagcgc

SEQ ID NO: 4797851 - DNA, 25 bp, Homo sapien
tccccgttgagagcgcctaaagctg

SEQ ID NO: 4797852 - DNA, 25 bp, Homo sapien
agtccggcggcgctctaaggaacac

SEQ ID NO: 4797853 - DNA, 25 bp, Homo sapien
cacaggtgcacgtgggaagagctac

SEQ ID NO: 4797854 - DNA, 25 bp, Homo sapien
ttccctttctcggacatgggcagcc

SEQ ID NO: 4797855 - DNA, 25 bp, Homo sapien
cagctgtgagcctgaggttagtccg

SEQ ID NO: 4797856 - DNA, 25 bp, Homo sapien
gtgcccgaggcggatcccgccgagg

SEQ ID NO: 4797857 - DNA, 25 bp, Homo sapien
gctgttgttggccagactccgacaa

SEQ ID NO: 4797858 - DNA, 25 bp, Homo sapien
cctggcgcctcacgggcgctgttgt

SEQ ID NO: 4797859 - DNA, 25 bp, Homo sapien
cgagcaagcagcgagcgcgggagag

SEQ ID NO: 4797860 - DNA, 25 bp, Homo sapien
agggccgactcctccgggattcgcg

SEQ ID NO: 4797861 - DNA, 25 bp, Homo sapien
tctgattaacttttccgttggagcc

SEQ ID NO: 4797862 - DNA, 25 bp, Homo sapien
caagctgctggcgaacttttctgat

SEQ ID NO: 4797863 - DNA, 25 bp, Homo sapien
cagctccactgaagggccgactcct

SEQ ID NO: 4797864 - DNA, 25 bp, Homo sapien
cccgcaactccgaggcgagagcgag

SEQ ID NO: 4797865 - DNA, 25 bp, Homo sapien
ctggaagggcagaacccgcaactcc

SEQ ID NO: 4797866 - DNA, 25 bp, Homo sapien
tcatgaaaatccatctggaagggca

SEQ ID NO: 4797867 - DNA, 25 bp, Homo sapien
tgacggcgggtggccagtgacggta

SEQ ID NO: 4797868 - DNA, 25 bp, Homo sapien
actggcttaggatctgggatgctcc

SEQ ID NO: 4797869 - DNA, 25 bp, Homo sapien
cggcttccgggatggatcaagcaga

SEQ ID NO: 4797870 - DNA, 25 bp, Homo sapien
tccaggtcgggactgagaggcagag

SEQ ID NO: 4797871 - DNA, 25 bp, Homo sapien
cgggatggatcaagcagagctccag

SEQ ID NO: 4797872 - DNA, 25 bp, Homo sapien
tcctcccacatgctcgtttccaacc

SEQ ID NO: 4797873 - DNA, 25 bp, Homo sapien
ctgcgggagggttggcacgccccca

SEQ ID NO: 4797874 - DNA, 25 bp, Homo sapien
cctcctcccacatgctcgtttccaa

SEQ ID NO: 4797875 - DNA, 25 bp, Homo sapien
ggagggttggcacgcccccaggctc

SEQ ID NO: 4797876 - DNA, 25 bp, Homo sapien
tgtgcgacctctgggcccctcctct

SEQ ID NO: 4797877 - DNA, 25 bp, Homo sapien
ggcagccccgggcagggatccccag

SEQ ID NO: 4797878 - DNA, 25 bp, Homo sapien
cctctaccctctgccaaccccactc

SEQ ID NO: 4797879 - DNA, 25 bp, Homo sapien
gcagggatccccagggcgcccccac

SEQ ID NO: 4797880 - DNA, 25 bp, Homo sapien
tccttgggatctagcgcgtgccggc

SEQ ID NO: 4797881 - DNA, 25 bp, Homo sapien
ccgtccggcatgacgcaggggctcg

SEQ ID NO: 4797882 - DNA, 25 bp, Homo sapien
tgacgcaggggctcggggttccttg

SEQ ID NO: 4797883 - DNA, 25 bp, Homo sapien
gttccttgggatctagcgcgtgccg

SEQ ID NO: 4797884 - DNA, 25 bp, Homo sapien
aagggcagctcggtgttgtccaggt

SEQ ID NO: 4797885 - DNA, 25 bp, Homo sapien
gcagctcggtgttgtccaggtcgtc

SEQ ID NO: 4797886 - DNA, 25 bp, Homo sapien
aagaagggcagctcggtgttgtcca

SEQ ID NO: 4797887 - DNA, 25 bp, Homo sapien
gtgaagaagggcagctcggtgttgt

SEQ ID NO: 4797888 - DNA, 25 bp, Homo sapien
cagctcgttacgcacaaagagcagg

SEQ ID NO: 4797889 - DNA, 25 bp, Homo sapien
cccggcagctcgttacgcacaaaga

SEQ ID NO: 4797890 - DNA, 25 bp, Homo sapien
gctcgttacgcacaaagagcaggag

SEQ ID NO: 4797891 - DNA, 25 bp, Homo sapien
ggcagctcgttacgcacaaagagca

SEQ ID NO: 4797892 - DNA, 25 bp, Homo sapien
tccagccgatgtcgctctcccgcag

SEQ ID NO: 4797893 - DNA, 25 bp, Homo sapien
gacaccgtgacggtcttcagccggc

SEQ ID NO: 4797894 - DNA, 25 bp, Homo sapien
accgtgacggtcttcagccggcacg

SEQ ID NO: 4797895 - DNA, 25 bp, Homo sapien
tgtggacaccgtgacggtcttcagc

SEQ ID NO: 4797896 - DNA, 25 bp, Homo sapien
gcggccccgggtggaagcagagcct

SEQ ID NO: 4797897 - DNA, 25 bp, Homo sapien
ggaggggctgcggtgctgcgggcgg

SEQ ID NO: 4797898 - DNA, 25 bp, Homo sapien
cgggaggggctgcggtgctgcgggc

SEQ ID NO: 4797899 - DNA, 25 bp, Homo sapien
ggcgggaggggctgcggtgctgcgg

SEQ ID NO: 4797900 - DNA, 25 bp, Homo sapien
gaggggctgcggtgctgcgggcggc

SEQ ID NO: 4797901 - DNA, 25 bp, Homo sapien
gaggcagctgcggagacggcggacg

SEQ ID NO: 4797902 - DNA, 25 bp, Homo sapien
cagctgcggagacggcggacgccga

SEQ ID NO: 4797903 - DNA, 25 bp, Homo sapien
cggagacggcggacgccgaagcgaa

SEQ ID NO: 4797904 - DNA, 25 bp, Homo sapien
gcggagacggcggacgccgaagcga

SEQ ID NO: 4797905 - DNA, 25 bp, Homo sapien
gtctttctagactcaagttgagcta

SEQ ID NO: 4797906 - DNA, 25 bp, Homo sapien
caagttgagctaggtcctcagattc

SEQ ID NO: 4797907 - DNA, 25 bp, Homo sapien
ttcttcacctgcagtctttctagac

SEQ ID NO: 4797908 - DNA, 25 bp, Homo sapien
aggtcctcagattcagcaccctttg

SEQ ID NO: 4797909 - DNA, 25 bp, Homo sapien
gagaccctccagggagcggacacct

SEQ ID NO: 4797910 - DNA, 25 bp, Homo sapien
ctgagaccctccagggagcggacac

SEQ ID NO: 4797911 - DNA, 25 bp, Homo sapien
acctgagaccctccagggagcggac

SEQ ID NO: 4797912 - DNA, 25 bp, Homo sapien
cctgagaccctccagggagcggaca

SEQ ID NO: 4797913 - DNA, 25 bp, Homo sapien
attatgttaagatcattagtcacaa

SEQ ID NO: 4797914 - DNA, 25 bp, Homo sapien
gttaagatcattagtcacaaagatg

SEQ ID NO: 4797915 - DNA, 25 bp, Homo sapien
aaaattatgttaagatcattagtca

SEQ ID NO: 4797916 - DNA, 25 bp, Homo sapien
tatgttaagatcattagtcacaaag

SEQ ID NO: 4797917 - DNA, 25 bp, Homo sapien
caaggtgccatctgggttagtgtct

SEQ ID NO: 4797918 - DNA, 25 bp, Homo sapien
ggcacatgtgctcaaaaaggggggg

SEQ ID NO: 4797919 - DNA, 25 bp, Homo sapien
gccatctgggttagtgtctagtgag

SEQ ID NO: 4797920 - DNA, 25 bp, Homo sapien
tgtaggtggcactttgtgtcttcac

SEQ ID NO: 4797921 - DNA, 25 bp, Homo sapien
tagagaatgcttatttgggacagcc

SEQ ID NO: 4797922 - DNA, 25 bp, Homo sapien
catggctcggcttgctatggtttca

SEQ ID NO: 4797923 - DNA, 25 bp, Homo sapien
taattctggtaacaagccaagaagg

SEQ ID NO: 4797924 - DNA, 25 bp, Homo sapien
tgggacagccactctcatgagccct

SEQ ID NO: 4797925 - DNA, 25 bp, Homo sapien
tgtagtgttcgacctcatcccaacc

SEQ ID NO: 4797926 - DNA, 25 bp, Homo sapien
cagtctctgcagattccaatactca

SEQ ID NO: 4797927 - DNA, 25 bp, Homo sapien
tttctgttcctgtagtgttcgacct

SEQ ID NO: 4797928 - DNA, 25 bp, Homo sapien
catcccaaccttatcccagtctctg

SEQ ID NO: 4797929 - DNA, 25 bp, Homo sapien
cactgtaagtggtatctcttgattc

SEQ ID NO: 4797930 - DNA, 25 bp, Homo sapien
tcaaggcgaaattcaagggcagttc

SEQ ID NO: 4797931 - DNA, 25 bp, Homo sapien
gattcagatcccactaagagcttta

SEQ ID NO: 4797932 - DNA, 25 bp, Homo sapien
ggcagttcctccatgaaaatgatct

SEQ ID NO: 4797933 - DNA, 25 bp, Homo sapien
cagtgctctgcacttaggagttgta

SEQ ID NO: 4797934 - DNA, 25 bp, Homo sapien
tatgcaggcatgagacccatgtcag

SEQ ID NO: 4797935 - DNA, 25 bp, Homo sapien
gcaggctatgagtgctatgcaggca

SEQ ID NO: 4797936 - DNA, 25 bp, Homo sapien
tgaccatcagatatggcagcactgc

SEQ ID NO: 4797937 - DNA, 25 bp, Homo sapien
ttgatgtggcaaatttctctctcca

SEQ ID NO: 4797938 - DNA, 25 bp, Homo sapien
gtgttgatgtggcaaatttctctct

SEQ ID NO: 4797939 - DNA, 25 bp, Homo sapien
gatgtggcaaatttctctctccaca

SEQ ID NO: 4797940 - DNA, 25 bp, Homo sapien
gttgatgtggcaaatttctctctcc

SEQ ID NO: 4797941 - DNA, 25 bp, Homo sapien
ccactcttgctgctttatgcccaca

SEQ ID NO: 4797942 - DNA, 25 bp, Homo sapien
cttgctgctttatgcccacactcac

SEQ ID NO: 4797943 - DNA, 25 bp, Homo sapien
tgctttatgcccacactcacataca

SEQ ID NO: 4797944 - DNA, 25 bp, Homo sapien
actcttgctgctttatgcccacact

SEQ ID NO: 4797945 - DNA, 25 bp, Homo sapien
gggacttgacactaactctgaactg

SEQ ID NO: 4797946 - DNA, 25 bp, Homo sapien
tctgacccataagcactttccaggg

SEQ ID NO: 4797947 - DNA, 25 bp, Homo sapien
accaatctgagttacacccacaaag

SEQ ID NO: 4797948 - DNA, 25 bp, Homo sapien
tttccagggtcatttgataatcacc

SEQ ID NO: 4797949 - DNA, 25 bp, Homo sapien
gagcatctgagagaattgatccatc

SEQ ID NO: 4797950 - DNA, 25 bp, Homo sapien
gaggccctttagagtggagcatctg

SEQ ID NO: 4797951 - DNA, 25 bp, Homo sapien
acacgggctcaaggcctggacccag

SEQ ID NO: 4797952 - DNA, 25 bp, Homo sapien
caaggacatggatgattttccggga

SEQ ID NO: 4797953 - DNA, 25 bp, Homo sapien
tgtgtagtccgcgatgtatttgcat

SEQ ID NO: 4797954 - DNA, 25 bp, Homo sapien
tgggtgtgtagtccgcgatgtattt

SEQ ID NO: 4797955 - DNA, 25 bp, Homo sapien
agctggccagtgtgggtgtgtagtc

SEQ ID NO: 4797956 - DNA, 25 bp, Homo sapien
ccagtgtgggtgtgtagtccgcgat

SEQ ID NO: 4797957 - DNA, 25 bp, Homo sapien
caggccatgaaagtgtcaatttcac

SEQ ID NO: 4797958 - DNA, 25 bp, Homo sapien
gtcaggatgactgtctacgtaatgg

SEQ ID NO: 4797959 - DNA, 25 bp, Homo sapien
gctgagttcaatgagccagtaggaa

SEQ ID NO: 4797960 - DNA, 25 bp, Homo sapien
tacgtaatggaagccctgtcgccag

SEQ ID NO: 4797961 - DNA, 25 bp, Homo sapien
ttgttcaggtaccatgtcaggatga

SEQ ID NO: 4797962 - DNA, 25 bp, Homo sapien
tacatgtggtgcttagcctagacgc

SEQ ID NO: 4797963 - DNA, 25 bp, Homo sapien
tagacgcttcagcatgcccgtagat

SEQ ID NO: 4797964 - DNA, 25 bp, Homo sapien
aattcactgggtatgagccagcccc

SEQ ID NO: 4797965 - DNA, 25 bp, Homo sapien
gagagggctttagcctcttggacca

SEQ ID NO: 4797966 - DNA, 25 bp, Homo sapien
taggacacagcttgtgggagcccag

SEQ ID NO: 4797967 - DNA, 25 bp, Homo sapien
ctaggacacagcttgtgggagccca

SEQ ID NO: 4797968 - DNA, 25 bp, Homo sapien
actaggacacagcttgtgggagccc

SEQ ID NO: 4797969 - DNA, 25 bp, Homo sapien
caacataatggagaaacacacagaa

SEQ ID NO: 4797970 - DNA, 25 bp, Homo sapien
cagcccagcagattgtaaactcctc

SEQ ID NO: 4797971 - DNA, 25 bp, Homo sapien
gaaagggagataacgtaaatagaga

SEQ ID NO: 4797972 - DNA, 25 bp, Homo sapien
tgttttaatccttgtctgtgtccac

SEQ ID NO: 4797973 - DNA, 25 bp, Homo sapien
tcaaaggctgctcaaaagctgtgag

SEQ ID NO: 4797974 - DNA, 25 bp, Homo sapien
gagtcttctagcacccctcttgaac

SEQ ID NO: 4797975 - DNA, 25 bp, Homo sapien
tcactgagtgtagggcagcttcagg

SEQ ID NO: 4797976 - DNA, 25 bp, Homo sapien
ggaatgagtcttctagcacccctct

SEQ ID NO: 4797977 - DNA, 25 bp, Homo sapien
cgtatacctgtagcgaagcacttag

SEQ ID NO: 4797978 - DNA, 25 bp, Homo sapien
tagcgaagcacttagcaccaattct

SEQ ID NO: 4797979 - DNA, 25 bp, Homo sapien
atggtcgtatacctgtagcgaagca

SEQ ID NO: 4797980 - DNA, 25 bp, Homo sapien
aactgatcattacctccatcctcag

SEQ ID NO: 4797981 - DNA, 25 bp, Homo sapien
ggcagtgttgccatgcctgccaagg

SEQ ID NO: 4797982 - DNA, 25 bp, Homo sapien
acattcccagccatcgtccttggcc

SEQ ID NO: 4797983 - DNA, 25 bp, Homo sapien
agccatcgtccttggcccggggagc

SEQ ID NO: 4797984 - DNA, 25 bp, Homo sapien
gggcagtgttgccatgcctgccaag

SEQ ID NO: 4797985 - DNA, 25 bp, Homo sapien
gtggataaacgtactgtccccctca

SEQ ID NO: 4797986 - DNA, 25 bp, Homo sapien
tggataaacgtactgtccccctcac

SEQ ID NO: 4797987 - DNA, 25 bp, Homo sapien
gctcccatgatacaacacctgaaca

SEQ ID NO: 4797988 - DNA, 25 bp, Homo sapien
tggctcccatgatacaacacctgaa

SEQ ID NO: 4797989 - DNA, 25 bp, Homo sapien
cccatgatacaacacctgaacaaat

SEQ ID NO: 4797990 - DNA, 25 bp, Homo sapien
attggctcccatgatacaacacctg

SEQ ID NO: 4797991 - DNA, 25 bp, Homo sapien
tccagattggaaacaggaactgttg

SEQ ID NO: 4797992 - DNA, 25 bp, Homo sapien
gattggaaacaggaactgttgccat

SEQ ID NO: 4797993 - DNA, 25 bp, Homo sapien
cagattggaaacaggaactgttgcc

SEQ ID NO: 4797994 - DNA, 25 bp, Homo sapien
ccagattggaaacaggaactgttgc

SEQ ID NO: 4797995 - DNA, 25 bp, Homo sapien
cttgtggtcccaagccaagaagccc

SEQ ID NO: 4797996 - DNA, 25 bp, Homo sapien
gaagccctgcttggtaatgagcctg

SEQ ID NO: 4797997 - DNA, 25 bp, Homo sapien
tccacttaagagaaatacagcacca

SEQ ID NO: 4797998 - DNA, 25 bp, Homo sapien
atcaatcagagcgataggcccgagg

SEQ ID NO: 4797999 - DNA, 25 bp, Homo sapien
gaagaacctgattctgacataatgc

SEQ ID NO: 4798000 - DNA, 25 bp, Homo sapien
caagcaaggtcatggctgaagaacc

SEQ ID NO: 4798001 - DNA, 25 bp, Homo sapien
ggaagtcaaagctaacagaacaagc

SEQ ID NO: 4798002 - DNA, 25 bp, Homo sapien
tggatgagcttgcatctttgtgacc

SEQ ID NO: 4798003 - DNA, 25 bp, Homo sapien
tgtacggaattacttggtgctgctg

SEQ ID NO: 4798004 - DNA, 25 bp, Homo sapien
tgtaaatgtcagacttctgtacgga

SEQ ID NO: 4798005 - DNA, 25 bp, Homo sapien
tctagattccccgacctttaaatgc

SEQ ID NO: 4798006 - DNA, 25 bp, Homo sapien
ccgacctttaaatgctgaacactat

SEQ ID NO: 4798007 - DNA, 25 bp, Homo sapien
tcagtgcagggtcctagagacctgt

SEQ ID NO: 4798008 - DNA, 25 bp, Homo sapien
cagtgcagggtcctagagacctgtt

SEQ ID NO: 4798009 - DNA, 25 bp, Homo sapien
agtgcagggtcctagagacctgttc

SEQ ID NO: 4798010 - DNA, 25 bp, Homo sapien
tgcagggtcctagagacctgttcat

SEQ ID NO: 4798011 - DNA, 25 bp, Homo sapien
tccgtggacaaaaacagagttgatg

SEQ ID NO: 4798012 - DNA, 25 bp, Homo sapien
caaggtattttcatggtcacaacca

SEQ ID NO: 4798013 - DNA, 25 bp, Homo sapien
gtcacaaccattcctttatccgtgg

SEQ ID NO: 4798014 - DNA, 25 bp, Homo sapien
tcagatactcttggaaaatccttct

SEQ ID NO: 4798015 - DNA, 25 bp, Homo sapien
agaccaggctgccaaattccccgtg

SEQ ID NO: 4798016 - DNA, 25 bp, Homo sapien
aattaacattaaagctctggcagcc

SEQ ID NO: 4798017 - DNA, 25 bp, Homo sapien
tggagtccaggtcaaaaccaatatc

SEQ ID NO: 4798018 - DNA, 25 bp, Homo sapien
gaccttgtcgattctgtatcagcag

SEQ ID NO: 4798019 - DNA, 25 bp, Homo sapien
ttgacccattttcttcatccagcat

SEQ ID NO: 4798020 - DNA, 25 bp, Homo sapien
catttgacccattttcttcatccag

SEQ ID NO: 4798021 - DNA, 25 bp, Homo sapien
tccaccatttgacccattttcttca

SEQ ID NO: 4798022 - DNA, 25 bp, Homo sapien
ctccaccatttgacccattttcttc

SEQ ID NO: 4798023 - DNA, 25 bp, Homo sapien
gaagtacagacaaatttcagttctc

SEQ ID NO: 4798024 - DNA, 25 bp, Homo sapien
ccaggccagtttgatttatccttgc

SEQ ID NO: 4798025 - DNA, 25 bp, Homo sapien
ctccaggccagtttgatttatcctt

SEQ ID NO: 4798026 - DNA, 25 bp, Homo sapien
aagtacagacaaatttcagttctcc

SEQ ID NO: 4798027 - DNA, 25 bp, Homo sapien
ctgtggccggtaattgtttatgctc

SEQ ID NO: 4798028 - DNA, 25 bp, Homo sapien
tggccggtaattgtttatgctctct

SEQ ID NO: 4798029 - DNA, 25 bp, Homo sapien
gtggccggtaattgtttatgctctc

SEQ ID NO: 4798030 - DNA, 25 bp, Homo sapien
tgtggccggtaattgtttatgctct

SEQ ID NO: 4798031 - DNA, 25 bp, Homo sapien
acacagccactgaatctcctttggg

SEQ ID NO: 4798032 - DNA, 25 bp, Homo sapien
aaacacagccactgaatctcctttg

SEQ ID NO: 4798033 - DNA, 25 bp, Homo sapien
tggattggtgtccgggagacacact

SEQ ID NO: 4798034 - DNA, 25 bp, Homo sapien
gtgtccgggagacacactaaacaca

SEQ ID NO: 4798035 - DNA, 25 bp, Homo sapien
agccctctttccaactgaacctgga

SEQ ID NO: 4798036 - DNA, 25 bp, Homo sapien
tccaatcttaagtcacatgatgcct

SEQ ID NO: 4798037 - DNA, 25 bp, Homo sapien
gcctgggtccttttaatcacactat

SEQ ID NO: 4798038 - DNA, 25 bp, Homo sapien
caagcagccactaccagtgaattgg

SEQ ID NO: 4798039 - DNA, 25 bp, Homo sapien
cctgaggacttggacattccagcgt

SEQ ID NO: 4798040 - DNA, 25 bp, Homo sapien
gacattccagcgtatcgcagaaccg

SEQ ID NO: 4798041 - DNA, 25 bp, Homo sapien
cgtatcgcagaaccggaattcagct

SEQ ID NO: 4798042 - DNA, 25 bp, Homo sapien
gacttggacattccagcgtatcgca

SEQ ID NO: 4798043 - DNA, 25 bp, Homo sapien
tctgtgtctatggatgcctaatcct

SEQ ID NO: 4798044 - DNA, 25 bp, Homo sapien
tgcctaatcctactcccctccactg

SEQ ID NO: 4798045 - DNA, 25 bp, Homo sapien
tccactgccagcgccaaattgacat

SEQ ID NO: 4798046 - DNA, 25 bp, Homo sapien
atgtctgtgtctatggatgcctaat

SEQ ID NO: 4798047 - DNA, 25 bp, Homo sapien
gtctgtgaattcattatgagcgata

SEQ ID NO: 4798048 - DNA, 25 bp, Homo sapien
cattatgagcgataattcaagttgt

SEQ ID NO: 4798049 - DNA, 25 bp, Homo sapien
agttgtagtatctccctgccacacc

SEQ ID NO: 4798050 - DNA, 25 bp, Homo sapien
taattcaagttgtagtatctccctg

SEQ ID NO: 4798051 - DNA, 25 bp, Homo sapien
tgccaccgttcatcccttgagtcat

SEQ ID NO: 4798052 - DNA, 25 bp, Homo sapien
cagtgccaccgttcatcccttgagt

SEQ ID NO: 4798053 - DNA, 25 bp, Homo sapien
ctgccagtgccaccgttcatccctt

SEQ ID NO: 4798054 - DNA, 25 bp, Homo sapien
gccagtgccaccgttcatcccttga

SEQ ID NO: 4798055 - DNA, 25 bp, Homo sapien
tgttacccgtagcacagtatgctcc

SEQ ID NO: 4798056 - DNA, 25 bp, Homo sapien
cccgtagcacagtatgctccctgtt

SEQ ID NO: 4798057 - DNA, 25 bp, Homo sapien
attgtgttacccgtagcacagtatg

SEQ ID NO: 4798058 - DNA, 25 bp, Homo sapien
gctccctgtttgcatggggctgatt

SEQ ID NO: 4798059 - DNA, 25 bp, Homo sapien
atatggaacgcatcatggatttgtg

SEQ ID NO: 4798060 - DNA, 25 bp, Homo sapien
gtgtatgtgctactgcagcaagcac

SEQ ID NO: 4798061 - DNA, 25 bp, Homo sapien
tttagtgtatgtgctactgcagcaa

SEQ ID NO: 4798062 - DNA, 25 bp, Homo sapien
gaaaatatggaacgcatcatggatt

SEQ ID NO: 4798063 - DNA, 25 bp, Homo sapien
ttgttatctactcaagccaggatga

SEQ ID NO: 4798064 - DNA, 25 bp, Homo sapien
tagaggtgaaaacatctatgatgcc

SEQ ID NO: 4798065 - DNA, 25 bp, Homo sapien
tttattcccggtgtggccattgctg

SEQ ID NO: 4798066 - DNA, 25 bp, Homo sapien
tgctgccaacatcatccatgaaggt

SEQ ID NO: 4798067 - DNA, 25 bp, Homo sapien
agagtctagcaccactaaaggcagg

SEQ ID NO: 4798068 - DNA, 25 bp, Homo sapien
taaaggcagggaatacctttgccag

SEQ ID NO: 4798069 - DNA, 25 bp, Homo sapien
tggtttcagcacctgagagtctagc

SEQ ID NO: 4798070 - DNA, 25 bp, Homo sapien
catctttggctgaattagctgtggt

SEQ ID NO: 4798071 - DNA, 25 bp, Homo sapien
ttcacagttgtggattgataaaaac

SEQ ID NO: 4798072 - DNA, 25 bp, Homo sapien
tggattgataaaaacagagaactct

SEQ ID NO: 4798073 - DNA, 25 bp, Homo sapien
catatgtgaatgcttgtcagttgag

SEQ ID NO: 4798074 - DNA, 25 bp, Homo sapien
gtcagttgagagtaaactttcttca

SEQ ID NO: 4798075 - DNA, 25 bp, Homo sapien
ctgtctctaaatcatgcttcctcct

SEQ ID NO: 4798076 - DNA, 25 bp, Homo sapien
tttccaagcagcagggtcaagccgc

SEQ ID NO: 4798077 - DNA, 25 bp, Homo sapien
tgtctctgccctttactttttctgg

SEQ ID NO: 4798078 - DNA, 25 bp, Homo sapien
tggctcttgccacggttttgaataa

SEQ ID NO: 4798079 - DNA, 25 bp, Homo sapien
ctttaatccatccaccacaccatcc

SEQ ID NO: 4798080 - DNA, 25 bp, Homo sapien
cttgctaagataaggagcttcaaca

SEQ ID NO: 4798081 - DNA, 25 bp, Homo sapien
atcccttgctaagataaggagcttc

SEQ ID NO: 4798082 - DNA, 25 bp, Homo sapien
cgtattctcccctttaatccatcca

SEQ ID NO: 4798083 - DNA, 25 bp, Homo sapien
gcaatccgcaactttaataacttgg

SEQ ID NO: 4798084 - DNA, 25 bp, Homo sapien
cacaaagcagttttgatgcaaagtg

SEQ ID NO: 4798085 - DNA, 25 bp, Homo sapien
tcaaggtgactgcaaccttcgcagc

SEQ ID NO: 4798086 - DNA, 25 bp, Homo sapien
ttagcacaacatcgcctgacacagc

SEQ ID NO: 4798087 - DNA, 25 bp, Homo sapien
gaagcatccgtaaccgagcatgaga

SEQ ID NO: 4798088 - DNA, 25 bp, Homo sapien
taaaacagccccttgtctgccagtg

SEQ ID NO: 4798089 - DNA, 25 bp, Homo sapien
tatttgagcataaaagaagcatccg

SEQ ID NO: 4798090 - DNA, 25 bp, Homo sapien
ggtcgttctgaagcggcaattacaa

SEQ ID NO: 4798091 - DNA, 25 bp, Homo sapien
tcaaatggagttccagaggggagag

SEQ ID NO: 4798092 - DNA, 25 bp, Homo sapien
caaatggagttccagaggggagaga

SEQ ID NO: 4798093 - DNA, 25 bp, Homo sapien
aattgtcgggacaatttccctggag

SEQ ID NO: 4798094 - DNA, 25 bp, Homo sapien
tgaaattgtcgggacaatttccctg

SEQ ID NO: 4798095 - DNA, 25 bp, Homo sapien
ggcttgaaattgtcgggacaatttc

SEQ ID NO: 4798096 - DNA, 25 bp, Homo sapien
gcttgaaattgtcgggacaatttcc

SEQ ID NO: 4798097 - DNA, 25 bp, Homo sapien
tatggcaataaaataggtgagattc

SEQ ID NO: 4798098 - DNA, 25 bp, Homo sapien
taactatggcaataaaataggtgag

SEQ ID NO: 4798099 - DNA, 25 bp, Homo sapien
aacttgcaatctcggtaactatggc

SEQ ID NO: 4798100 - DNA, 25 bp, Homo sapien
cagcatctaaacttgcaatctcggt

SEQ ID NO: 4798101 - DNA, 25 bp, Homo sapien
atgctgacagtttagccccacggtc

SEQ ID NO: 4798102 - DNA, 25 bp, Homo sapien
tttgctgatctgcatagatgctgac

SEQ ID NO: 4798103 - DNA, 25 bp, Homo sapien
gatctgcatagatgctgacagttta

SEQ ID NO: 4798104 - DNA, 25 bp, Homo sapien
agtttagccccacggtccatagaca

SEQ ID NO: 4798105 - DNA, 25 bp, Homo sapien
gcgcagccgcgcaaatgacatctga

SEQ ID NO: 4798106 - DNA, 25 bp, Homo sapien
aagccgccggctgctttcaaaaggg

SEQ ID NO: 4798107 - DNA, 25 bp, Homo sapien
gaaaagggtgggctctcctgactct

SEQ ID NO: 4798108 - DNA, 25 bp, Homo sapien
gacatctgagcctcctttcaagccg

SEQ ID NO: 4798109 - DNA, 25 bp, Homo sapien
tcccatttctattagaaaagggaga

SEQ ID NO: 4798110 - DNA, 25 bp, Homo sapien
cccatttctattagaaaagggagag

SEQ ID NO: 4798111 - DNA, 25 bp, Homo sapien
ccatttctattagaaaagggagaga

SEQ ID NO: 4798112 - DNA, 25 bp, Homo sapien
ttttgaaagtcacccctgtcatatt

SEQ ID NO: 4798113 - DNA, 25 bp, Homo sapien
gtcacccctgtcatattgagcagct

SEQ ID NO: 4798114 - DNA, 25 bp, Homo sapien
ccataggacatccatagccattcag

SEQ ID NO: 4798115 - DNA, 25 bp, Homo sapien
tgttttaggagcatggttccaccca

SEQ ID NO: 4798116 - DNA, 25 bp, Homo sapien
ctgatgacataagttggaataaagc

SEQ ID NO: 4798117 - DNA, 25 bp, Homo sapien
cctgatgacataagttggaataaag

SEQ ID NO: 4798118 - DNA, 25 bp, Homo sapien
tcctgatgacataagttggaataaa

SEQ ID NO: 4798119 - DNA, 25 bp, Homo sapien
gttcctgatgacataagttggaata

SEQ ID NO: 4798120 - DNA, 25 bp, Homo sapien
cctggaaaatgggctttccttgagg

SEQ ID NO: 4798121 - DNA, 25 bp, Homo sapien
ctggatagcagatgaggtcctccat

SEQ ID NO: 4798122 - DNA, 25 bp, Homo sapien
tggatagcagatgaggtcctccatc

SEQ ID NO: 4798123 - DNA, 25 bp, Homo sapien
ttccttgaggtagccttaagcagga

SEQ ID NO: 4798124 - DNA, 25 bp, Homo sapien
ggaactccatgttagcctctttggg

SEQ ID NO: 4798125 - DNA, 25 bp, Homo sapien
aggaactccatgttagcctctttgg

SEQ ID NO: 4798126 - DNA, 25 bp, Homo sapien
caggaactccatgttagcctctttg

SEQ ID NO: 4798127 - DNA, 25 bp, Homo sapien
cagcagatcatcctaactggttcag

SEQ ID NO: 4798128 - DNA, 25 bp, Homo sapien
agcagatcatcctaactggttcagc

SEQ ID NO: 4798129 - DNA, 25 bp, Homo sapien
gcagatcatcctaactggttcagcc

SEQ ID NO: 4798130 - DNA, 25 bp, Homo sapien
gcagcagatcatcctaactggttca

SEQ ID NO: 4798131 - DNA, 25 bp, Homo sapien
gataccagttatcaaggagctgaca

SEQ ID NO: 4798132 - DNA, 25 bp, Homo sapien
aaaacctaggttgctggccccattg

SEQ ID NO: 4798133 - DNA, 25 bp, Homo sapien
aattagatagcagggtagagccagc

SEQ ID NO: 4798134 - DNA, 25 bp, Homo sapien
agggagcccaactggaggatgtcca

SEQ ID NO: 4798135 - DNA, 25 bp, Homo sapien
tgctcatagtccaaacacgaaagtg

SEQ ID NO: 4798136 - DNA, 25 bp, Homo sapien
gaacatgacacgttggagagcccag

SEQ ID NO: 4798137 - DNA, 25 bp, Homo sapien
gatattcggtgagttctgagcctcc

SEQ ID NO: 4798138 - DNA, 25 bp, Homo sapien
cagagaaggtcatttgaagcagcca

SEQ ID NO: 4798139 - DNA, 25 bp, Homo sapien
tatcaggaaggccacttgtgcttac

SEQ ID NO: 4798140 - DNA, 25 bp, Homo sapien
ctcttccctaattccttggagctga

SEQ ID NO: 4798141 - DNA, 25 bp, Homo sapien
tgaattttatcaggaaggccacttg

SEQ ID NO: 4798142 - DNA, 25 bp, Homo sapien
gcctcttccctaattccttggagct

SEQ ID NO: 4798143 - DNA, 25 bp, Homo sapien
gtgataaatattgtcactactgctc

SEQ ID NO: 4798144 - DNA, 25 bp, Homo sapien
tggtgataaatattgtcactactgc

SEQ ID NO: 4798145 - DNA, 25 bp, Homo sapien
ctggtgataaatattgtcactactg

SEQ ID NO: 4798146 - DNA, 25 bp, Homo sapien
gataaatattgtcactactgctcat

SEQ ID NO: 4798147 - DNA, 25 bp, Homo sapien
catgtcagtaaatggttgttcctct

SEQ ID NO: 4798148 - DNA, 25 bp, Homo sapien
aaaccacgttggtgccctccatgtc

SEQ ID NO: 4798149 - DNA, 25 bp, Homo sapien
taacagacccttttttgatgccaga

SEQ ID NO: 4798150 - DNA, 25 bp, Homo sapien
tatcatcaaaaaccacgttggtgcc

SEQ ID NO: 4798151 - DNA, 25 bp, Homo sapien
tcttctgcacattgaggctcctgag

SEQ ID NO: 4798152 - DNA, 25 bp, Homo sapien
gagcacttgttaccaaccaatgcct

SEQ ID NO: 4798153 - DNA, 25 bp, Homo sapien
ccattttgccgtgattttaattaga

SEQ ID NO: 4798154 - DNA, 25 bp, Homo sapien
cactataatttggaagctgtggctt

SEQ ID NO: 4798155 - DNA, 25 bp, Homo sapien
agcagaacgaccttcaaattctttg

SEQ ID NO: 4798156 - DNA, 25 bp, Homo sapien
tttagcagaacgaccttcaaattct

SEQ ID NO: 4798157 - DNA, 25 bp, Homo sapien
tagcagaacgaccttcaaattcttt

SEQ ID NO: 4798158 - DNA, 25 bp, Homo sapien
tcatttagcagaacgaccttcaaat

SEQ ID NO: 4798159 - DNA, 25 bp, Homo sapien
aatttcaccctaggttcaacgtatg

SEQ ID NO: 4798160 - DNA, 25 bp, Homo sapien
gtatggccaaaatgtgagtctctcc

SEQ ID NO: 4798161 - DNA, 25 bp, Homo sapien
gctgttctgtgaaaacatggctgct

SEQ ID NO: 4798162 - DNA, 25 bp, Homo sapien
cccctgctagggtcagctgttctgt

SEQ ID NO: 4798163 - DNA, 25 bp, Homo sapien
ctggaagtcatccaatccaatgact

SEQ ID NO: 4798164 - DNA, 25 bp, Homo sapien
taaaacaccgtgttccatgcagtca

SEQ ID NO: 4798165 - DNA, 25 bp, Homo sapien
tataataccgtcattcttggaccct

SEQ ID NO: 4798166 - DNA, 25 bp, Homo sapien
aatgtatgagtaaaagtgaccctgg

SEQ ID NO: 4798167 - DNA, 25 bp, Homo sapien
taagcccaaactgagaagattcagc

SEQ ID NO: 4798168 - DNA, 25 bp, Homo sapien
ggtgaaaccagaattccgataatgc

SEQ ID NO: 4798169 - DNA, 25 bp, Homo sapien
tacccaaagtaactgtccatcaatg

SEQ ID NO: 4798170 - DNA, 25 bp, Homo sapien
ctatctgggagagacggcaacacca

SEQ ID NO: 4798171 - DNA, 25 bp, Homo sapien
agagggtgcagaggcaaaatgctac

SEQ ID NO: 4798172 - DNA, 25 bp, Homo sapien
ctgcagagttaaaggaagtaagtgg

SEQ ID NO: 4798173 - DNA, 25 bp, Homo sapien
aaggaagtaagtggagagggtgcag

SEQ ID NO: 4798174 - DNA, 25 bp, Homo sapien
cagagttaaaggaagtaagtggaga

SEQ ID NO: 4798175 - DNA, 25 bp, Homo sapien
ggatgatggagaagacataattggt

SEQ ID NO: 4798176 - DNA, 25 bp, Homo sapien
agaatggtttacattggaagcctct

SEQ ID NO: 4798177 - DNA, 25 bp, Homo sapien
tcctgtggaaaatgtcagtcccatc

SEQ ID NO: 4798178 - DNA, 25 bp, Homo sapien
gagaagacataattggtagaatggt

SEQ ID NO: 4798179 - DNA, 25 bp, Homo sapien
gggcataagagagaaccatgtgtgg

SEQ ID NO: 4798180 - DNA, 25 bp, Homo sapien
gagggtaaggggcataagagagaac

SEQ ID NO: 4798181 - DNA, 25 bp, Homo sapien
taaggggcataagagagaaccatgt

SEQ ID NO: 4798182 - DNA, 25 bp, Homo sapien
ggtaaggggcataagagagaaccat

SEQ ID NO: 4798183 - DNA, 25 bp, Homo sapien
gagggcaaagtaactgtgaataccc

SEQ ID NO: 4798184 - DNA, 25 bp, Homo sapien
gtaactgtgaatacccaatacgtat

SEQ ID NO: 4798185 - DNA, 25 bp, Homo sapien
tgtagaatcaagagggcaaagtaac

SEQ ID NO: 4798186 - DNA, 25 bp, Homo sapien
ccaatacgtatagaatcattgtcac

SEQ ID NO: 4798187 - DNA, 25 bp, Homo sapien
aggagcatggtaacccgtaagttgc

SEQ ID NO: 4798188 - DNA, 25 bp, Homo sapien
tcaactctgatactgatatctttga

SEQ ID NO: 4798189 - DNA, 25 bp, Homo sapien
taacccgtaagttgctcctgatgtc

SEQ ID NO: 4798190 - DNA, 25 bp, Homo sapien
ttgaggacaattgaggagcatggta

SEQ ID NO: 4798191 - DNA, 25 bp, Homo sapien
aattataattgtaccaaatgggctc

SEQ ID NO: 4798192 - DNA, 25 bp, Homo sapien
cattaataatgctccttgaggccac

SEQ ID NO: 4798193 - DNA, 25 bp, Homo sapien
tctctagaagggacctccattaata

SEQ ID NO: 4798194 - DNA, 25 bp, Homo sapien
tttgctttatgcaattagatgcact

SEQ ID NO: 4798195 - DNA, 25 bp, Homo sapien
tatggatatggatttgcagatgcta

SEQ ID NO: 4798196 - DNA, 25 bp, Homo sapien
cagtgatagcttgtggtgtgtctct

SEQ ID NO: 4798197 - DNA, 25 bp, Homo sapien
aagacagtgatagcttgtggtgtgt

SEQ ID NO: 4798198 - DNA, 25 bp, Homo sapien
gtgtgtctctatgggtacagtatgg

SEQ ID NO: 4798199 - DNA, 25 bp, Homo sapien
gatgactttcttcaggttggtttta

SEQ ID NO: 4798200 - DNA, 25 bp, Homo sapien
ctggttttgcagtctctgaaggcca

SEQ ID NO: 4798201 - DNA, 25 bp, Homo sapien
ctgaaggccagaccactttgatgac

SEQ ID NO: 4798202 - DNA, 25 bp, Homo sapien
tatacagtaaaagaaggtaagtcca

SEQ ID NO: 4798203 - DNA, 25 bp, Homo sapien
caactgggtagtttgcaatagtttg

SEQ ID NO: 4798204 - DNA, 25 bp, Homo sapien
gctaggtttcttatcaggtgggacc

SEQ ID NO: 4798205 - DNA, 25 bp, Homo sapien
aagtgattgaagaatgagtttttcc

SEQ ID NO: 4798206 - DNA, 25 bp, Homo sapien
ttgttgagctaaagtgttctctgaa

SEQ ID NO: 4798207 - DNA, 25 bp, Homo sapien
tagggcagggatgctgaagcaggat

SEQ ID NO: 4798208 - DNA, 25 bp, Homo sapien
ggcagggatgctgaagcaggatcat

SEQ ID NO: 4798209 - DNA, 25 bp, Homo sapien
gggcagggatgctgaagcaggatca

SEQ ID NO: 4798210 - DNA, 25 bp, Homo sapien
gatagggcagggatgctgaagcagg

SEQ ID NO: 4798211 - DNA, 25 bp, Homo sapien
ctgaccatgcaggtccaatgtagaa

SEQ ID NO: 4798212 - DNA, 25 bp, Homo sapien
tagatgcacagttgggcctacattg

SEQ ID NO: 4798213 - DNA, 25 bp, Homo sapien
caaggagtattgtcagtaaacagcc

SEQ ID NO: 4798214 - DNA, 25 bp, Homo sapien
gatactacatacagtgactcaccca

SEQ ID NO: 4798215 - DNA, 25 bp, Homo sapien
gaagtcaacagtgagatgggctaaa

SEQ ID NO: 4798216 - DNA, 25 bp, Homo sapien
cttcctctgcacaattctgcttata

SEQ ID NO: 4798217 - DNA, 25 bp, Homo sapien
aattctgcttataccctcttgcttt

SEQ ID NO: 4798218 - DNA, 25 bp, Homo sapien
cagtgagatgggctaaatgaagaag

SEQ ID NO: 4798219 - DNA, 25 bp, Homo sapien
tatgtatgcagatctgttaagacat

SEQ ID NO: 4798220 - DNA, 25 bp, Homo sapien
ggcttcgtcgattgattagtcttga

SEQ ID NO: 4798221 - DNA, 25 bp, Homo sapien
gtgaagtttaggtttgtcacagcca

SEQ ID NO: 4798222 - DNA, 25 bp, Homo sapien
gcagatctgttaagacatgtgaagt

SEQ ID NO: 4798223 - DNA, 25 bp, Homo sapien
gtttgtggtgctgactgaaaaccaa

SEQ ID NO: 4798224 - DNA, 25 bp, Homo sapien
taaggcctattgcagctgtttgtgg

SEQ ID NO: 4798225 - DNA, 25 bp, Homo sapien
catcatggattaggctggcagaaac

SEQ ID NO: 4798226 - DNA, 25 bp, Homo sapien
caaccttggcgtttaacctgcttag

SEQ ID NO: 4798227 - DNA, 25 bp, Homo sapien
ccactgtaaattggcactcatcaaa

SEQ ID NO: 4798228 - DNA, 25 bp, Homo sapien
ttcttccactgtaaattggcactca

SEQ ID NO: 4798229 - DNA, 25 bp, Homo sapien
taaattggcactcatcaaatatact

SEQ ID NO: 4798230 - DNA, 25 bp, Homo sapien
ctgtaaattggcactcatcaaatat

SEQ ID NO: 4798231 - DNA, 25 bp, Homo sapien
gtcttctccgtcagtaattgcagtc

SEQ ID NO: 4798232 - DNA, 25 bp, Homo sapien
agtcttctccgtcagtaattgcagt

SEQ ID NO: 4798233 - DNA, 25 bp, Homo sapien
tcagtcttctccgtcagtaattgca

SEQ ID NO: 4798234 - DNA, 25 bp, Homo sapien
cagtcttctccgtcagtaattgcag

SEQ ID NO: 4798235 - DNA, 25 bp, Homo sapien
taaagccatgcatttgccactgtcc

SEQ ID NO: 4798236 - DNA, 25 bp, Homo sapien
gctggtaaagccatgcatttgccac

SEQ ID NO: 4798237 - DNA, 25 bp, Homo sapien
tgccactgtccccttgaatgtcatg

SEQ ID NO: 4798238 - DNA, 25 bp, Homo sapien
ccactgtccccttgaatgtcatggg

SEQ ID NO: 4798239 - DNA, 25 bp, Homo sapien
tataattcttggttcttgaacaagg

SEQ ID NO: 4798240 - DNA, 25 bp, Homo sapien
tcaactgtgaagcagtcaattttaa

SEQ ID NO: 4798241 - DNA, 25 bp, Homo sapien
caatctttgcaatatatacagcttc

SEQ ID NO: 4798242 - DNA, 25 bp, Homo sapien
tttcctttccaattgtcaactgtga

SEQ ID NO: 4798243 - DNA, 25 bp, Homo sapien
gttacgagagccttttctgtcccca

SEQ ID NO: 4798244 - DNA, 25 bp, Homo sapien
tggttgccacgggttacgagagcct

SEQ ID NO: 4798245 - DNA, 25 bp, Homo sapien
ttctatccaaaggcagctggttgcc

SEQ ID NO: 4798246 - DNA, 25 bp, Homo sapien
tgtgattttgctgaccgaaaccatc

SEQ ID NO: 4798247 - DNA, 25 bp, Homo sapien
acagcatctgtggacccatgtaaaa

SEQ ID NO: 4798248 - DNA, 25 bp, Homo sapien
cagcatctgtggacccatgtaaaat

SEQ ID NO: 4798249 - DNA, 25 bp, Homo sapien
tcaacgtgaaacacaaagtccagag

SEQ ID NO: 4798250 - DNA, 25 bp, Homo sapien
gaatgaggattggagctgagaatac

SEQ ID NO: 4798251 - DNA, 25 bp, Homo sapien
acgtctgaaacctgtcccatgtctc

SEQ ID NO: 4798252 - DNA, 25 bp, Homo sapien
tgaggattggagctgagaatacctg

SEQ ID NO: 4798253 - DNA, 25 bp, Homo sapien
tttccacgtctgaaacctgtcccat

SEQ ID NO: 4798254 - DNA, 25 bp, Homo sapien
cagagaaattggaactgcggagaga

SEQ ID NO: 4798255 - DNA, 25 bp, Homo sapien
catcagaaaccaaatctacggcctc

SEQ ID NO: 4798256 - DNA, 25 bp, Homo sapien
aatctacggcctctctcgaagtcat

SEQ ID NO: 4798257 - DNA, 25 bp, Homo sapien
gaaattggaactgcggagagatgta

SEQ ID NO: 4798258 - DNA, 25 bp, Homo sapien
gcattctgtctttcgcataaagtga

SEQ ID NO: 4798259 - DNA, 25 bp, Homo sapien
ggcattctgtctttcgcataaagtg

SEQ ID NO: 4798260 - DNA, 25 bp, Homo sapien
gttcctgtcgtggcattctgtcttt

SEQ ID NO: 4798261 - DNA, 25 bp, Homo sapien
attctgtctttcgcataaagtgaaa

SEQ ID NO: 4798262 - DNA, 25 bp, Homo sapien
caatcaatctggtgggtggcatcta

SEQ ID NO: 4798263 - DNA, 25 bp, Homo sapien
tatgttttggcgctgcctcacagag

SEQ ID NO: 4798264 - DNA, 25 bp, Homo sapien
cttagtatggatactgttgcgggcc

SEQ ID NO: 4798265 - DNA, 25 bp, Homo sapien
acttataaagtatgtgcgcttccag

SEQ ID NO: 4798266 - DNA, 25 bp, Homo sapien
tctccttagaagtggccaatcagtc

SEQ ID NO: 4798267 - DNA, 25 bp, Homo sapien
cagctgttgtgtacccaatgtaaat

SEQ ID NO: 4798268 - DNA, 25 bp, Homo sapien
tactcattgcacaggacgattccca

SEQ ID NO: 4798269 - DNA, 25 bp, Homo sapien
gccaagtttgcccagaatactcatt

SEQ ID NO: 4798270 - DNA, 25 bp, Homo sapien
gctttacctgggcagcccactttgg

SEQ ID NO: 4798271 - DNA, 25 bp, Homo sapien
tacacatgctttctggtacctgacg

SEQ ID NO: 4798272 - DNA, 25 bp, Homo sapien
agtttttgccaccaaggaccactag

SEQ ID NO: 4798273 - DNA, 25 bp, Homo sapien
tcttgatggaaacgatctagagatg

SEQ ID NO: 4798274 - DNA, 25 bp, Homo sapien
tctagagctggtttgttgagaagca

SEQ ID NO: 4798275 - DNA, 25 bp, Homo sapien
cgatagggacgaatcacagtggcaa

SEQ ID NO: 4798276 - DNA, 25 bp, Homo sapien
ggttttaatgctggctaaccaggaa

SEQ ID NO: 4798277 - DNA, 25 bp, Homo sapien
ttgcctttcactaagtctagagctg

SEQ ID NO: 4798278 - DNA, 25 bp, Homo sapien
tgctaaagtggcaaaatgccttagt

SEQ ID NO: 4798279 - DNA, 25 bp, Homo sapien
gctaaagtggcaaaatgccttagtc

SEQ ID NO: 4798280 - DNA, 25 bp, Homo sapien
cttaccacggctgttgtacaaatac

SEQ ID NO: 4798281 - DNA, 25 bp, Homo sapien
ttgaagaaatgatcccagttagatg

SEQ ID NO: 4798282 - DNA, 25 bp, Homo sapien
atgctcctgtgccaatcgtctccat

SEQ ID NO: 4798283 - DNA, 25 bp, Homo sapien
aagaaatgatcccagttagatgctc

SEQ ID NO: 4798284 - DNA, 25 bp, Homo sapien
gaaatgatcccagttagatgctcct

SEQ ID NO: 4798285 - DNA, 25 bp, Homo sapien
gttgaggaaccacgaaatatgaagg

SEQ ID NO: 4798286 - DNA, 25 bp, Homo sapien
cacgaaatatgaaggtccacgtccc

SEQ ID NO: 4798287 - DNA, 25 bp, Homo sapien
cctgatcgttgttgaggaaccacga

SEQ ID NO: 4798288 - DNA, 25 bp, Homo sapien
gccagcctgatcgttgttgaggaac

SEQ ID NO: 4798289 - DNA, 25 bp, Homo sapien
gtgtcacaggtacaaccagtaccaa

SEQ ID NO: 4798290 - DNA, 25 bp, Homo sapien
tggtgtcacaggtacaaccagtacc

SEQ ID NO: 4798291 - DNA, 25 bp, Homo sapien
ttagatatatggtgtcacaggtaca

SEQ ID NO: 4798292 - DNA, 25 bp, Homo sapien
tatatggtgtcacaggtacaaccag

SEQ ID NO: 4798293 - DNA, 25 bp, Homo sapien
gccgctgagtccatatgcctccttt

SEQ ID NO: 4798294 - DNA, 25 bp, Homo sapien
ttcctggataagtctatgactccct

SEQ ID NO: 4798295 - DNA, 25 bp, Homo sapien
gataagtctatgactccctctttcc

SEQ ID NO: 4798296 - DNA, 25 bp, Homo sapien
ggcctttgggcatgccgctgagtcc

SEQ ID NO: 4798297 - DNA, 25 bp, Homo sapien
ctaagtgggcgagcatctgttaaac

SEQ ID NO: 4798298 - DNA, 25 bp, Homo sapien
tgggcgagcatctgttaaacagctg

SEQ ID NO: 4798299 - DNA, 25 bp, Homo sapien
ctttagggctaagtctaagtgggcg

SEQ ID NO: 4798300 - DNA, 25 bp, Homo sapien
ctaagtctaagtgggcgagcatctg

SEQ ID NO: 4798301 - DNA, 25 bp, Homo sapien
gggtaagagatatccattttgaacc

SEQ ID NO: 4798302 - DNA, 25 bp, Homo sapien
gtcgggtaagagatatccattttga

SEQ ID NO: 4798303 - DNA, 25 bp, Homo sapien
cgggtaagagatatccattttgaac

SEQ ID NO: 4798304 - DNA, 25 bp, Homo sapien
tcgggtaagagatatccattttgaa

SEQ ID NO: 4798305 - DNA, 25 bp, Homo sapien
cagccatcgagtttgtttgctccag

SEQ ID NO: 4798306 - DNA, 25 bp, Homo sapien
tccttggcaaatgccaaaaccttgt

SEQ ID NO: 4798307 - DNA, 25 bp, Homo sapien
tctgcagtttcagtcgcaggtatta

SEQ ID NO: 4798308 - DNA, 25 bp, Homo sapien
cgcaggtattagaatgctcttctcc

SEQ ID NO: 4798309 - DNA, 25 bp, Homo sapien
aatattgtttgaggcatgatataga

SEQ ID NO: 4798310 - DNA, 25 bp, Homo sapien
catcaatattgtttgaggcatgata

SEQ ID NO: 4798311 - DNA, 25 bp, Homo sapien
tcaatattgtttgaggcatgatata

SEQ ID NO: 4798312 - DNA, 25 bp, Homo sapien
tcatcaatattgtttgaggcatgat

SEQ ID NO: 4798313 - DNA, 25 bp, Homo sapien
acgattgctccaaattagcagtttc

SEQ ID NO: 4798314 - DNA, 25 bp, Homo sapien
tacaaaacgattgctccaaattagc

SEQ ID NO: 4798315 - DNA, 25 bp, Homo sapien
gaactaaagtacaaaacgattgctc

SEQ ID NO: 4798316 - DNA, 25 bp, Homo sapien
tcaagtctactttccgtttgaaaca

SEQ ID NO: 4798317 - DNA, 25 bp, Homo sapien
gcttttggataagcttgagttgcga

SEQ ID NO: 4798318 - DNA, 25 bp, Homo sapien
tattttgcaaatcagcgcatctaga

SEQ ID NO: 4798319 - DNA, 25 bp, Homo sapien
catctagagagtatactgtgtcgca

SEQ ID NO: 4798320 - DNA, 25 bp, Homo sapien
gttgcgatgtcaggcgctatccgtg

SEQ ID NO: 4798321 - DNA, 25 bp, Homo sapien
gtgatgaaatgcgtaaagctccact

SEQ ID NO: 4798322 - DNA, 25 bp, Homo sapien
gatgaaatgcgtaaagctccacttc

SEQ ID NO: 4798323 - DNA, 25 bp, Homo sapien
gaaatgcgtaaagctccacttcaga

SEQ ID NO: 4798324 - DNA, 25 bp, Homo sapien
cagctgaattcgtctctttttattc

SEQ ID NO: 4798325 - DNA, 25 bp, Homo sapien
ccaggaacacaacaggatgaattta

SEQ ID NO: 4798326 - DNA, 25 bp, Homo sapien
ttctccaggaacacaacaggatgaa

SEQ ID NO: 4798327 - DNA, 25 bp, Homo sapien
cattaaacgaaaaggtattctctca

SEQ ID NO: 4798328 - DNA, 25 bp, Homo sapien
aaatatgcattaaacgaaaaggtat

SEQ ID NO: 4798329 - DNA, 25 bp, Homo sapien
tttatttttagacaacctacatgac

SEQ ID NO: 4798330 - DNA, 25 bp, Homo sapien
tgcattttatttttagacaacctac

SEQ ID NO: 4798331 - DNA, 25 bp, Homo sapien
cattttatttttagacaacctacat

SEQ ID NO: 4798332 - DNA, 25 bp, Homo sapien
ttttatttttagacaacctacatga

SEQ ID NO: 4798333 - DNA, 25 bp, Homo sapien
atgacaattagaagcgagttatgat

SEQ ID NO: 4798334 - DNA, 25 bp, Homo sapien
caattagaagcgagttatgatgaca

SEQ ID NO: 4798335 - DNA, 25 bp, Homo sapien
acaattagaagcgagttatgatgac

SEQ ID NO: 4798336 - DNA, 25 bp, Homo sapien
attagaagcgagttatgatgacagg

SEQ ID NO: 4798337 - DNA, 25 bp, Homo sapien
ctaaaccatccctaaagaaaatcat

SEQ ID NO: 4798338 - DNA, 25 bp, Homo sapien
agaaaatcatatatggggtcacacc

SEQ ID NO: 4798339 - DNA, 25 bp, Homo sapien
tctaaaccatccctaaagaaaatca

SEQ ID NO: 4798340 - DNA, 25 bp, Homo sapien
atatatggggtcacaccatcctcac

SEQ ID NO: 4798341 - DNA, 25 bp, Homo sapien
cgtagtccagtagagcaaccatgcc

SEQ ID NO: 4798342 - DNA, 25 bp, Homo sapien
ttctgcagcccctgtcataaaaggt

SEQ ID NO: 4798343 - DNA, 25 bp, Homo sapien
catctggattcatgttttcaccaat

SEQ ID NO: 4798344 - DNA, 25 bp, Homo sapien
gatttgttctgcagcccctgtcata

SEQ ID NO: 4798345 - DNA, 25 bp, Homo sapien
ttcaagtttgcctttgattgatttc

SEQ ID NO: 4798346 - DNA, 25 bp, Homo sapien
tgatttcatgtaatctttgatgtac

SEQ ID NO: 4798347 - DNA, 25 bp, Homo sapien
gattgatttcatgtaatctttgatg

SEQ ID NO: 4798348 - DNA, 25 bp, Homo sapien
cttcaagtttgcctttgattgattt

SEQ ID NO: 4798349 - DNA, 25 bp, Homo sapien
gatggttcatgacaacatcgacagc

SEQ ID NO: 4798350 - DNA, 25 bp, Homo sapien
ggttcatgacaacatcgacagcagt

SEQ ID NO: 4798351 - DNA, 25 bp, Homo sapien
accctcggggccttcagcggagaca

SEQ ID NO: 4798352 - DNA, 25 bp, Homo sapien
ttcatgacaacatcgacagcagtga

SEQ ID NO: 4798353 - DNA, 25 bp, Homo sapien
accacctcccagcacagcccgtcca

SEQ ID NO: 4798354 - DNA, 25 bp, Homo sapien
cctcccagcacagcccgtccacaat

SEQ ID NO: 4798355 - DNA, 25 bp, Homo sapien
tttccccaccacctcccagcacagc

SEQ ID NO: 4798356 - DNA, 25 bp, Homo sapien
cacctcccagcacagcccgtccaca

SEQ ID NO: 4798357 - DNA, 25 bp, Homo sapien
gccagaagctccaagcgagtgtggt

SEQ ID NO: 4798358 - DNA, 25 bp, Homo sapien
cagaagctccaagcgagtgtggtgc

SEQ ID NO: 4798359 - DNA, 25 bp, Homo sapien
cggctgaagggagactacggcagca

SEQ ID NO: 4798360 - DNA, 25 bp, Homo sapien
ggagactacggcagcactagcttag

SEQ ID NO: 4798361 - DNA, 25 bp, Homo sapien
cagaaagcgttagaatgcaaggcag

SEQ ID NO: 4798362 - DNA, 25 bp, Homo sapien
tatcaaatatgatcgggaacaacgc

SEQ ID NO: 4798363 - DNA, 25 bp, Homo sapien
gacaagtcaaactggcaatggagtg

SEQ ID NO: 4798364 - DNA, 25 bp, Homo sapien
ggaacaacgcatcaaagcagaaagc

SEQ ID NO: 4798365 - DNA, 25 bp, Homo sapien
cgtcacgatatttaaggtatttcaa

SEQ ID NO: 4798366 - DNA, 25 bp, Homo sapien
tccctatttcactgatgtagcaatt

SEQ ID NO: 4798367 - DNA, 25 bp, Homo sapien
ttatgttcaaccaatcagaactggt

SEQ ID NO: 4798368 - DNA, 25 bp, Homo sapien
ttctgtgacttccaagagaagttgg

SEQ ID NO: 4798369 - DNA, 25 bp, Homo sapien
ctgaacatccgctagccctgacagt

SEQ ID NO: 4798370 - DNA, 25 bp, Homo sapien
gtgctgccactttctcacttccaga

SEQ ID NO: 4798371 - DNA, 25 bp, Homo sapien
tcatctactccccacttacgtggat

SEQ ID NO: 4798372 - DNA, 25 bp, Homo sapien
atttggaaacactgccataaatttc

SEQ ID NO: 4798373 - DNA, 25 bp, Homo sapien
tggagagctcatctactccccactt

SEQ ID NO: 4798374 - DNA, 25 bp, Homo sapien
gccataaatttccctgtgcttcagc

SEQ ID NO: 4798375 - DNA, 25 bp, Homo sapien
cccagcttcaatcaaagcaccaata

SEQ ID NO: 4798376 - DNA, 25 bp, Homo sapien
ccacttcacatgctggaaccaagga

SEQ ID NO: 4798377 - DNA, 25 bp, Homo sapien
agcaccaatacctgtttccacttca

SEQ ID NO: 4798378 - DNA, 25 bp, Homo sapien
acatgctggaaccaaggatttctga

SEQ ID NO: 4798379 - DNA, 25 bp, Homo sapien
tcagggaatttcattgaacccattg

SEQ ID NO: 4798380 - DNA, 25 bp, Homo sapien
tggactgttgaaataatgccctttt

SEQ ID NO: 4798381 - DNA, 25 bp, Homo sapien
ttgaacccattgatgacatggactg

SEQ ID NO: 4798382 - DNA, 25 bp, Homo sapien
gacatggactgttgaaataatgccc

SEQ ID NO: 4798383 - DNA, 25 bp, Homo sapien
aatggtatgtcaccattaaatgtac

SEQ ID NO: 4798384 - DNA, 25 bp, Homo sapien
aaaaatggtatgtcaccattaaatg

SEQ ID NO: 4798385 - DNA, 25 bp, Homo sapien
tctaaaaatggtatgtcaccattaa

SEQ ID NO: 4798386 - DNA, 25 bp, Homo sapien
ggtatgtcaccattaaatgtactca

SEQ ID NO: 4798387 - DNA, 25 bp, Homo sapien
aatcttccctatattccgtgggctg

SEQ ID NO: 4798388 - DNA, 25 bp, Homo sapien
atcttccctatattccgtgggctga

SEQ ID NO: 4798389 - DNA, 25 bp, Homo sapien
taaagccattgggagctgagatccg

SEQ ID NO: 4798390 - DNA, 25 bp, Homo sapien
tgtacgtagtagaaacaccaccatc

SEQ ID NO: 4798391 - DNA, 25 bp, Homo sapien
tggagaagggtaactaaagccattg

SEQ ID NO: 4798392 - DNA, 25 bp, Homo sapien
tgagatccgtagtacagtcccagag

SEQ ID NO: 4798393 - DNA, 25 bp, Homo sapien
ccaagttaaccatattatctgccat

SEQ ID NO: 4798394 - DNA, 25 bp, Homo sapien
ttccaagttaaccatattatctgcc

SEQ ID NO: 4798395 - DNA, 25 bp, Homo sapien
cattttccaagttaaccatattatc

SEQ ID NO: 4798396 - DNA, 25 bp, Homo sapien
ttttccaagttaaccatattatctg

SEQ ID NO: 4798397 - DNA, 25 bp, Homo sapien
gaggtcaagatagaggctcttacat

SEQ ID NO: 4798398 - DNA, 25 bp, Homo sapien
ggctcttacatctgtccagggacat

SEQ ID NO: 4798399 - DNA, 25 bp, Homo sapien
tagaggctcttacatctgtccaggg

SEQ ID NO: 4798400 - DNA, 25 bp, Homo sapien
caagatagaggctcttacatctgtc

SEQ ID NO: 4798401 - DNA, 25 bp, Homo sapien
tgggtccttactctttggagcacca

SEQ ID NO: 4798402 - DNA, 25 bp, Homo sapien
cttaatgggtccttactctttggag

SEQ ID NO: 4798403 - DNA, 25 bp, Homo sapien
ccttactctttggagcaccatccaa

SEQ ID NO: 4798404 - DNA, 25 bp, Homo sapien
taatgggtccttactctttggagca

SEQ ID NO: 4798405 - DNA, 25 bp, Homo sapien
ctggatcctgttgggaaggtcagag

SEQ ID NO: 4798406 - DNA, 25 bp, Homo sapien
gtaacagattggaaaagggaagtca

SEQ ID NO: 4798407 - DNA, 25 bp, Homo sapien
tggtcctgcatctaaagtaacagat

SEQ ID NO: 4798408 - DNA, 25 bp, Homo sapien
agggaagtcaaagttctggatcctg

SEQ ID NO: 4798409 - DNA, 25 bp, Homo sapien
tcctcagacagccatcgtatctgac

SEQ ID NO: 4798410 - DNA, 25 bp, Homo sapien
agccatcgtatctgacatttcacca

SEQ ID NO: 4798411 - DNA, 25 bp, Homo sapien
gccatcgtatctgacatttcaccat

SEQ ID NO: 4798412 - DNA, 25 bp, Homo sapien
ctcagacagccatcgtatctgacat

SEQ ID NO: 4798413 - DNA, 25 bp, Homo sapien
taactgtactccttagaacaattcc

SEQ ID NO: 4798414 - DNA, 25 bp, Homo sapien
tcacgttaccatgagccaacatacg

SEQ ID NO: 4798415 - DNA, 25 bp, Homo sapien
tacgtgttaacgcatatgcaataac

SEQ ID NO: 4798416 - DNA, 25 bp, Homo sapien
ctagggagccagaagagttagcttg

SEQ ID NO: 4798417 - DNA, 25 bp, Homo sapien
gatggacaaatctctggatctggga

SEQ ID NO: 4798418 - DNA, 25 bp, Homo sapien
acaaaagaattgtgataactgccca

SEQ ID NO: 4798419 - DNA, 25 bp, Homo sapien
aaaagaattgtgataactgcccatg

SEQ ID NO: 4798420 - DNA, 25 bp, Homo sapien
gtctttccatgacgcctttgggatg

SEQ ID NO: 4798421 - DNA, 25 bp, Homo sapien
gctcatcctgtaataagagccaaat

SEQ ID NO: 4798422 - DNA, 25 bp, Homo sapien
ctcatcctgtaataagagccaaatt

SEQ ID NO: 4798423 - DNA, 25 bp, Homo sapien
cagggtgctcatcctgtaataagag

SEQ ID NO: 4798424 - DNA, 25 bp, Homo sapien
accttggtttgactctctgagaagc

SEQ ID NO: 4798425 - DNA, 25 bp, Homo sapien
gaagcatgcatttatccattgttct

SEQ ID NO: 4798426 - DNA, 25 bp, Homo sapien
ttggtttgactctctgagaagcatg

SEQ ID NO: 4798427 - DNA, 25 bp, Homo sapien
ttatccattgttcttcatgacccat

SEQ ID NO: 4798428 - DNA, 25 bp, Homo sapien
ctttatcctctgaataacccttctt

SEQ ID NO: 4798429 - DNA, 25 bp, Homo sapien
gtacaggcaacacctttaatctcat

SEQ ID NO: 4798430 - DNA, 25 bp, Homo sapien
gtgagtgtacagaagtgtacaggca

SEQ ID NO: 4798431 - DNA, 25 bp, Homo sapien
tgtacagaagtgtacaggcaacacc

SEQ ID NO: 4798432 - DNA, 25 bp, Homo sapien
gaagtgtacaggcaacacctttaat

SEQ ID NO: 4798433 - DNA, 25 bp, Homo sapien
attgagtcttgaaggtaaagacagt

SEQ ID NO: 4798434 - DNA, 25 bp, Homo sapien
aatattgagtcttgaaggtaaagac

SEQ ID NO: 4798435 - DNA, 25 bp, Homo sapien
tattgagtcttgaaggtaaagacag

SEQ ID NO: 4798436 - DNA, 25 bp, Homo sapien
gaaatattgagtcttgaaggtaaag

SEQ ID NO: 4798437 - DNA, 25 bp, Homo sapien
tcttgtgacttctatacagtgatcc

SEQ ID NO: 4798438 - DNA, 25 bp, Homo sapien
cagggtgactacctgaaggaatcta

SEQ ID NO: 4798439 - DNA, 25 bp, Homo sapien
tgacagctaggaacaatggcaaggc

SEQ ID NO: 4798440 - DNA, 25 bp, Homo sapien
caaggcaagatgaaaggtggccact

SEQ ID NO: 4798441 - DNA, 25 bp, Homo sapien
tccagttgagcaccttcgcttaagc

SEQ ID NO: 4798442 - DNA, 25 bp, Homo sapien
tcgcttaagccgttaaacaaatgaa

SEQ ID NO: 4798443 - DNA, 25 bp, Homo sapien
cacttttaaatagagttcgcacata

SEQ ID NO: 4798444 - DNA, 25 bp, Homo sapien
tcattgtcagatgacttagttccag

SEQ ID NO: 4798445 - DNA, 25 bp, Homo sapien
gttcttcttttgccactctctccat

SEQ ID NO: 4798446 - DNA, 25 bp, Homo sapien
tctccccaacttcgacagcagtttt

SEQ ID NO: 4798447 - DNA, 25 bp, Homo sapien
ggctgccactggatagtctgaatgg

SEQ ID NO: 4798448 - DNA, 25 bp, Homo sapien
acaataggctgccactggatagtct

SEQ ID NO: 4798449 - DNA, 25 bp, Homo sapien
ctgaatggggagctcattagctttg

SEQ ID NO: 4798450 - DNA, 25 bp, Homo sapien
ttaactgctcctatagaattggcca

SEQ ID NO: 4798451 - DNA, 25 bp, Homo sapien
tttaactgctcctatagaattggcc

SEQ ID NO: 4798452 - DNA, 25 bp, Homo sapien
taactgctcctatagaattggccat

SEQ ID NO: 4798453 - DNA, 25 bp, Homo sapien
tgcatttcccctggtgaaaagctgg

SEQ ID NO: 4798454 - DNA, 25 bp, Homo sapien
ccatataggtcaggaatctgatgca

SEQ ID NO: 4798455 - DNA, 25 bp, Homo sapien
tgtgattcatccagtccatataggt

SEQ ID NO: 4798456 - DNA, 25 bp, Homo sapien
ttgagtcaccaccacaaggcgtatt

SEQ ID NO: 4798457 - DNA, 25 bp, Homo sapien
tttgcagttcttgttctggtgtaag

SEQ ID NO: 4798458 - DNA, 25 bp, Homo sapien
ttcctcagtggataaactgcggatg

SEQ ID NO: 4798459 - DNA, 25 bp, Homo sapien
gataaactgcggatgtcttgttcat

SEQ ID NO: 4798460 - DNA, 25 bp, Homo sapien
tcttgttctggtgtaagattcactt

SEQ ID NO: 4798461 - DNA, 25 bp, Homo sapien
tctgcttcggggcaagaactttgta

SEQ ID NO: 4798462 - DNA, 25 bp, Homo sapien
gggcaagaactttgtactccaccaa

SEQ ID NO: 4798463 - DNA, 25 bp, Homo sapien
agaactttgtactccaccaatagca

SEQ ID NO: 4798464 - DNA, 25 bp, Homo sapien
gcttcggggcaagaactttgtactc

SEQ ID NO: 4798465 - DNA, 25 bp, Homo sapien
ttcggcagctgaaggggatccatca

SEQ ID NO: 4798466 - DNA, 25 bp, Homo sapien
tcggcagctgaaggggatccatcat

SEQ ID NO: 4798467 - DNA, 25 bp, Homo sapien
ctttcggcagctgaaggggatccat

SEQ ID NO: 4798468 - DNA, 25 bp, Homo sapien
tttcggcagctgaaggggatccatc

SEQ ID NO: 4798469 - DNA, 25 bp, Homo sapien
gatgtatcacatcccgctgagtgct

SEQ ID NO: 4798470 - DNA, 25 bp, Homo sapien
aataatccagttcctctacacagcc

SEQ ID NO: 4798471 - DNA, 25 bp, Homo sapien
tgtgaacctcttctaccagctctga

SEQ ID NO: 4798472 - DNA, 25 bp, Homo sapien
gctaacatgaccttcgtggcttcta

SEQ ID NO: 4798473 - DNA, 25 bp, Homo sapien
actgattctcagtcccataagagca

SEQ ID NO: 4798474 - DNA, 25 bp, Homo sapien
gaagtaactgattctcagtcccata

SEQ ID NO: 4798475 - DNA, 25 bp, Homo sapien
taactgattctcagtcccataagag

SEQ ID NO: 4798476 - DNA, 25 bp, Homo sapien
tgcagaagtaactgattctcagtcc

SEQ ID NO: 4798477 - DNA, 25 bp, Homo sapien
aaacatccacagttattacaccatt

SEQ ID NO: 4798478 - DNA, 25 bp, Homo sapien
aaaaacatccacagttattacacca

SEQ ID NO: 4798479 - DNA, 25 bp, Homo sapien
aaaacatccacagttattacaccat

SEQ ID NO: 4798480 - DNA, 25 bp, Homo sapien
tccatttggcgatcaaataggaaaa

SEQ ID NO: 4798481 - DNA, 25 bp, Homo sapien
gcaggaggtacatccatttggcgat

SEQ ID NO: 4798482 - DNA, 25 bp, Homo sapien
aaaacacagtcaggtttggagagga

SEQ ID NO: 4798483 - DNA, 25 bp, Homo sapien
gaggtacatccatttggcgatcaaa

SEQ ID NO: 4798484 - DNA, 25 bp, Homo sapien
aaaatccatcacaccactcattgca

SEQ ID NO: 4798485 - DNA, 25 bp, Homo sapien
tccatcacaccactcattgcaatat

SEQ ID NO: 4798486 - DNA, 25 bp, Homo sapien
tcacaccactcattgcaatatctgc

SEQ ID NO: 4798487 - DNA, 25 bp, Homo sapien
actcattgcaatatctgcattttct

SEQ ID NO: 4798488 - DNA, 25 bp, Homo sapien
gccccattaggagcctgaagtactt

SEQ ID NO: 4798489 - DNA, 25 bp, Homo sapien
cattaggagcctgaagtactttccc

SEQ ID NO: 4798490 - DNA, 25 bp, Homo sapien
tcaggccccattaggagcctgaagt

SEQ ID NO: 4798491 - DNA, 25 bp, Homo sapien
cccattaggagcctgaagtactttc

SEQ ID NO: 4798492 - DNA, 25 bp, Homo sapien
tgggaatccagcaatatctgcttct

SEQ ID NO: 4798493 - DNA, 25 bp, Homo sapien
aacagtggaaacatgacctatttca

SEQ ID NO: 4798494 - DNA, 25 bp, Homo sapien
gtagcccttgtagtgcctgggaatc

SEQ ID NO: 4798495 - DNA, 25 bp, Homo sapien
gtggaaacatgacctatttcagtca

SEQ ID NO: 4798496 - DNA, 25 bp, Homo sapien
gcaccccagtcccattgaatcagaa

SEQ ID NO: 4798497 - DNA, 25 bp, Homo sapien
gaagattgacgtgttcatcagggct

SEQ ID NO: 4798498 - DNA, 25 bp, Homo sapien
tctggtgtagttaaggaagacccca

SEQ ID NO: 4798499 - DNA, 25 bp, Homo sapien
cataaaatgggcataggctaggcat

SEQ ID NO: 4798500 - DNA, 25 bp, Homo sapien
gaatttgggctcttgagtatcgctc

SEQ ID NO: 4798501 - DNA, 25 bp, Homo sapien
aatttgggctcttgagtatcgctcc

SEQ ID NO: 4798502 - DNA, 25 bp, Homo sapien
tttgggctcttgagtatcgctccat

SEQ ID NO: 4798503 - DNA, 25 bp, Homo sapien
atttgggctcttgagtatcgctcca

SEQ ID NO: 4798504 - DNA, 25 bp, Homo sapien
ggtagtactataccagatttcttca

SEQ ID NO: 4798505 - DNA, 25 bp, Homo sapien
gccaagggatgggaggcatgacatg

SEQ ID NO: 4798506 - DNA, 25 bp, Homo sapien
cttacatctaactgtgccaagggat

SEQ ID NO: 4798507 - DNA, 25 bp, Homo sapien
tctgtactcactaaaatcacgacat

SEQ ID NO: 4798508 - DNA, 25 bp, Homo sapien
tctgtcccccaaagcaaatgccaag

SEQ ID NO: 4798509 - DNA, 25 bp, Homo sapien
ctctgtcccccaaagcaaatgccaa

SEQ ID NO: 4798510 - DNA, 25 bp, Homo sapien
ttactgtttagacccatctctgtcc

SEQ ID NO: 4798511 - DNA, 25 bp, Homo sapien
ggtagatccatgtgattgtgccaga

SEQ ID NO: 4798512 - DNA, 25 bp, Homo sapien
gatccatgtgattgtgccagataag

SEQ ID NO: 4798513 - DNA, 25 bp, Homo sapien
tagatccatgtgattgtgccagata

SEQ ID NO: 4798514 - DNA, 25 bp, Homo sapien
tccatgtgattgtgccagataagcc

SEQ ID NO: 4798515 - DNA, 25 bp, Homo sapien
tgcactggccgcttgcttatagaag

SEQ ID NO: 4798516 - DNA, 25 bp, Homo sapien
gggtgtcactgttgagtcatacaaa

SEQ ID NO: 4798517 - DNA, 25 bp, Homo sapien
tgagtcatacaaatgcactggccgc

SEQ ID NO: 4798518 - DNA, 25 bp, Homo sapien
tcttcactagggtcaagatagagca

SEQ ID NO: 4798519 - DNA, 25 bp, Homo sapien
cttctgatgtatttgccagcagtct

SEQ ID NO: 4798520 - DNA, 25 bp, Homo sapien
tcaccttcagagacgcctcggccat

SEQ ID NO: 4798521 - DNA, 25 bp, Homo sapien
tttccggggctaatgatcttgcagc

SEQ ID NO: 4798522 - DNA, 25 bp, Homo sapien
aacaatagcgtagataatttccggg

SEQ ID NO: 4798523 - DNA, 25 bp, Homo sapien
ggtcctttctgttagatggactctg

SEQ ID NO: 4798524 - DNA, 25 bp, Homo sapien
taaaattgtagtagtgcattctgga

SEQ ID NO: 4798525 - DNA, 25 bp, Homo sapien
cacagggctgtactccagtagaaaa

SEQ ID NO: 4798526 - DNA, 25 bp, Homo sapien
tactccagtagaaaatttaggcctg

SEQ ID NO: 4798527 - DNA, 25 bp, Homo sapien
ccagtagaaaatttaggcctgatac

SEQ ID NO: 4798528 - DNA, 25 bp, Homo sapien
gctgtactccagtagaaaatttagg

SEQ ID NO: 4798529 - DNA, 25 bp, Homo sapien
aaatgtcttcaagggccaacttagg

SEQ ID NO: 4798530 - DNA, 25 bp, Homo sapien
ttcaagggccaacttaggtccacat

SEQ ID NO: 4798531 - DNA, 25 bp, Homo sapien
caacttaggtccacattgagactgc

SEQ ID NO: 4798532 - DNA, 25 bp, Homo sapien
cagattattagagtcattgagcaga

SEQ ID NO: 4798533 - DNA, 25 bp, Homo sapien
gactactacttcatcaccatagaag

SEQ ID NO: 4798534 - DNA, 25 bp, Homo sapien
caccatagaagtggatctcacctaa

SEQ ID NO: 4798535 - DNA, 25 bp, Homo sapien
gatctcacctaactgcaggctactg

SEQ ID NO: 4798536 - DNA, 25 bp, Homo sapien
gctactgggaatggagcctttagtt

SEQ ID NO: 4798537 - DNA, 25 bp, Homo sapien
ctgcttctgactggatttattatta

SEQ ID NO: 4798538 - DNA, 25 bp, Homo sapien
tcctgttagcttccagcatccgtat

SEQ ID NO: 4798539 - DNA, 25 bp, Homo sapien
tgttagcttccagcatccgtatcaa

SEQ ID NO: 4798540 - DNA, 25 bp, Homo sapien
cttccagcatccgtatcaacttcat

SEQ ID NO: 4798541 - DNA, 25 bp, Homo sapien
ccactttcctgttagcttccagcat

SEQ ID NO: 4798542 - DNA, 25 bp, Homo sapien
cgtgtgcatttgtcacaccaggtgt

SEQ ID NO: 4798543 - DNA, 25 bp, Homo sapien
cacgtgtgcatttgtcacaccaggt

SEQ ID NO: 4798544 - DNA, 25 bp, Homo sapien
tgtgcatttgtcacaccaggtgtca

SEQ ID NO: 4798545 - DNA, 25 bp, Homo sapien
gtgcatttgtcacaccaggtgtcat

SEQ ID NO: 4798546 - DNA, 25 bp, Homo sapien
tagcctgaacccatcgtggaatttg

SEQ ID NO: 4798547 - DNA, 25 bp, Homo sapien
gtgtcggcagctaccaagtcctgtt

SEQ ID NO: 4798548 - DNA, 25 bp, Homo sapien
tctgagaacccaattccccagtgag

SEQ ID NO: 4798549 - DNA, 25 bp, Homo sapien
acagtgtcggcagctaccaagtcct

SEQ ID NO: 4798550 - DNA, 25 bp, Homo sapien
actgagaaaggccataaactccagc

SEQ ID NO: 4798551 - DNA, 25 bp, Homo sapien
agtactgagaaaggccataaactcc

SEQ ID NO: 4798552 - DNA, 25 bp, Homo sapien
tactgagaaaggccataaactccag

SEQ ID NO: 4798553 - DNA, 25 bp, Homo sapien
gtactgagaaaggccataaactcca

SEQ ID NO: 4798554 - DNA, 25 bp, Homo sapien
aggatgatgcattgtcctcagtggg

SEQ ID NO: 4798555 - DNA, 25 bp, Homo sapien
caggatgatgcattgtcctcagtgg

SEQ ID NO: 4798556 - DNA, 25 bp, Homo sapien
tccttgatcagaggttggatcatcc

SEQ ID NO: 4798557 - DNA, 25 bp, Homo sapien
ccttgatcagaggttggatcatcct

SEQ ID NO: 4798558 - DNA, 25 bp, Homo sapien
ttgccgtcatttgtccttgatcaga

SEQ ID NO: 4798559 - DNA, 25 bp, Homo sapien
catttgtccttgatcagaggttgga

SEQ ID NO: 4798560 - DNA, 25 bp, Homo sapien
caaaaggactcgtggaagtagatgt

SEQ ID NO: 4798561 - DNA, 25 bp, Homo sapien
ccttttatatgttgggcactgggct

SEQ ID NO: 4798562 - DNA, 25 bp, Homo sapien
tacataattagtcaccgtaggacat

SEQ ID NO: 4798563 - DNA, 25 bp, Homo sapien
tactagagtgcgtgtgaaaaagacc

SEQ ID NO: 4798564 - DNA, 25 bp, Homo sapien
taataacacgtctctttggaaacca

SEQ ID NO: 4798565 - DNA, 25 bp, Homo sapien
cccggctgtgctgaccccgacgtga

SEQ ID NO: 4798566 - DNA, 25 bp, Homo sapien
tgaccccgacgtgatgtagcttgct

SEQ ID NO: 4798567 - DNA, 25 bp, Homo sapien
gacctaattcataagcccggctgtg

SEQ ID NO: 4798568 - DNA, 25 bp, Homo sapien
cagatcagaggagggtgcttacatg

SEQ ID NO: 4798569 - DNA, 25 bp, Homo sapien
tgcttacatgtctggaggcttgact

SEQ ID NO: 4798570 - DNA, 25 bp, Homo sapien
tccatttgccgccttcttcagcagt

SEQ ID NO: 4798571 - DNA, 25 bp, Homo sapien
tcaacagtatttgggccaggcagct

SEQ ID NO: 4798572 - DNA, 25 bp, Homo sapien
ggaagaaccaagcactacagtctcc

SEQ ID NO: 4798573 - DNA, 25 bp, Homo sapien
ctgaaacatttcatgggagccctct

SEQ ID NO: 4798574 - DNA, 25 bp, Homo sapien
cagtctccatagtaagaggcagtga

SEQ ID NO: 4798575 - DNA, 25 bp, Homo sapien
cctctgtaactatggcatcgtggaa

SEQ ID NO: 4798576 - DNA, 25 bp, Homo sapien
caggccgaattgtcctgaaatcaaa

SEQ ID NO: 4798577 - DNA, 25 bp, Homo sapien
ggatttggattctcaggccgaattg

SEQ ID NO: 4798578 - DNA, 25 bp, Homo sapien
tcaaaagtgcagttgacacagtttt

SEQ ID NO: 4798579 - DNA, 25 bp, Homo sapien
tccttgtccaccattaaaatgtaag

SEQ ID NO: 4798580 - DNA, 25 bp, Homo sapien
tcaccattcagggtacttgtagggc

SEQ ID NO: 4798581 - DNA, 25 bp, Homo sapien
cagggtacttgtagggcaatatgcc

SEQ ID NO: 4798582 - DNA, 25 bp, Homo sapien
cattcagggtacttgtagggcaata

SEQ ID NO: 4798583 - DNA, 25 bp, Homo sapien
tgtagggcaatatgcctaatacagc

SEQ ID NO: 4798584 - DNA, 25 bp, Homo sapien
tgtatgtgatcaatgggcagagcag

SEQ ID NO: 4798585 - DNA, 25 bp, Homo sapien
caagtcgagcagaatgagtcccaaa

SEQ ID NO: 4798586 - DNA, 25 bp, Homo sapien
tgccaggtgtaaacgtgtgtatgtg

SEQ ID NO: 4798587 - DNA, 25 bp, Homo sapien
agcagggatcaagtcgagcagaatg

SEQ ID NO: 4798588 - DNA, 25 bp, Homo sapien
ataggagtgcaagttgacagccctg

SEQ ID NO: 4798589 - DNA, 25 bp, Homo sapien
gagttaattagcaataggagtgcaa

SEQ ID NO: 4798590 - DNA, 25 bp, Homo sapien
ctttgagtggtgagttaattagcaa

SEQ ID NO: 4798591 - DNA, 25 bp, Homo sapien
ctgctttgagtggtgagttaattag

SEQ ID NO: 4798592 - DNA, 25 bp, Homo sapien
tgaatcttatgttctctatgaggcc

SEQ ID NO: 4798593 - DNA, 25 bp, Homo sapien
gaattcttgaggtcagagaaaccta

SEQ ID NO: 4798594 - DNA, 25 bp, Homo sapien
ttatcacccaatcatatcatgcttg

SEQ ID NO: 4798595 - DNA, 25 bp, Homo sapien
gcttgtaaagtaacctaagtgccta

SEQ ID NO: 4798596 - DNA, 25 bp, Homo sapien
taaactctagcagttatcgtgaagc

SEQ ID NO: 4798597 - DNA, 25 bp, Homo sapien
tgaagctccaatcagggcagcagaa

SEQ ID NO: 4798598 - DNA, 25 bp, Homo sapien
aatctatgctctacctaaactctag

SEQ ID NO: 4798599 - DNA, 25 bp, Homo sapien
cacaaaggaggctggtttaatggaa

SEQ ID NO: 4798600 - DNA, 25 bp, Homo sapien
tagtatccaggtaatggacacagga

SEQ ID NO: 4798601 - DNA, 25 bp, Homo sapien
ttctgaacgtgtgatgctggagcca

SEQ ID NO: 4798602 - DNA, 25 bp, Homo sapien
tctctataaccctctttggacatgc

SEQ ID NO: 4798603 - DNA, 25 bp, Homo sapien
tggagccaggaccaactgcaaagat

SEQ ID NO: 4798604 - DNA, 25 bp, Homo sapien
aatacaatctgtggcgtctcccagc

SEQ ID NO: 4798605 - DNA, 25 bp, Homo sapien
cagcactggcagaatgctcggagca

SEQ ID NO: 4798606 - DNA, 25 bp, Homo sapien
tgctgttggcttgtaacagcactgg

SEQ ID NO: 4798607 - DNA, 25 bp, Homo sapien
tgctccaattggctgcgtgctgttg

SEQ ID NO: 4798608 - DNA, 25 bp, Homo sapien
cagttgttatcaagttgtcagcaat

SEQ ID NO: 4798609 - DNA, 25 bp, Homo sapien
tctccagagctataaaaccactggt

SEQ ID NO: 4798610 - DNA, 25 bp, Homo sapien
tcagcaattcccattgtatctccag

SEQ ID NO: 4798611 - DNA, 25 bp, Homo sapien
tgtatctccagagctataaaaccac

SEQ ID NO: 4798612 - DNA, 25 bp, Homo sapien
caccacaggattcttaatgctgcca

SEQ ID NO: 4798613 - DNA, 25 bp, Homo sapien
gatatcaccatttgccactgggtcc

SEQ ID NO: 4798614 - DNA, 25 bp, Homo sapien
agccagtagcgggactctggatatc

SEQ ID NO: 4798615 - DNA, 25 bp, Homo sapien
gggactctggatatcaccatttgcc

SEQ ID NO: 4798616 - DNA, 25 bp, Homo sapien
agatgacaataaggcatgcttttgt

SEQ ID NO: 4798617 - DNA, 25 bp, Homo sapien
gagatgacaataaggcatgcttttg

SEQ ID NO: 4798618 - DNA, 25 bp, Homo sapien
ggaaagggcctgtgcgttcaatgta

SEQ ID NO: 4798619 - DNA, 25 bp, Homo sapien
aagggcctgtgcgttcaatgtaaga

SEQ ID NO: 4798620 - DNA, 25 bp, Homo sapien
cctgtgcgttcaatgtaagagtcca

SEQ ID NO: 4798621 - DNA, 25 bp, Homo sapien
cgttcaatgtaagagtccagtaaat

SEQ ID NO: 4798622 - DNA, 25 bp, Homo sapien
tctgccacaccaacatttcaatcag

SEQ ID NO: 4798623 - DNA, 25 bp, Homo sapien
gatctgccgttcacacatatccagg

SEQ ID NO: 4798624 - DNA, 25 bp, Homo sapien
aaagcagatgggttgactgacagga

SEQ ID NO: 4798625 - DNA, 25 bp, Homo sapien
gtgtgctgcacctgtctggcaccga

SEQ ID NO: 4798626 - DNA, 25 bp, Homo sapien
cagcccgtgtgccactcaaaatagc

SEQ ID NO: 4798627 - DNA, 25 bp, Homo sapien
agcccgtgtgccactcaaaatagcc

SEQ ID NO: 4798628 - DNA, 25 bp, Homo sapien
acagcccgtgtgccactcaaaatag

SEQ ID NO: 4798629 - DNA, 25 bp, Homo sapien
aagtgacagctaatactgggctggc

SEQ ID NO: 4798630 - DNA, 25 bp, Homo sapien
taattaggacacagtccagttgggt

SEQ ID NO: 4798631 - DNA, 25 bp, Homo sapien
cggagtgcacgccatggttcatcat

SEQ ID NO: 4798632 - DNA, 25 bp, Homo sapien
tgactttgttctgcccgaggaagtg

SEQ ID NO: 4798633 - DNA, 25 bp, Homo sapien
tcatcgccatggctaaggaccatag

SEQ ID NO: 4798634 - DNA, 25 bp, Homo sapien
taaggaccatagagctggaagagtt

SEQ ID NO: 4798635 - DNA, 25 bp, Homo sapien
gagttttcagacgtgatttccagca

SEQ ID NO: 4798636 - DNA, 25 bp, Homo sapien
gaagagttttcagacgtgatttcca

SEQ ID NO: 4798637 - DNA, 25 bp, Homo sapien
gtgcaggtgattgtatatatccatc

SEQ ID NO: 4798638 - DNA, 25 bp, Homo sapien
aattgtcaatccgactcaccaccaa

SEQ ID NO: 4798639 - DNA, 25 bp, Homo sapien
tcaccaccaactcaaaataggggaa

SEQ ID NO: 4798640 - DNA, 25 bp, Homo sapien
ctttctgccttgtattatagaggta

SEQ ID NO: 4798641 - DNA, 25 bp, Homo sapien
cacctattccacagggttatgaaga

SEQ ID NO: 4798642 - DNA, 25 bp, Homo sapien
aaagaaggtgccacatatctcctca

SEQ ID NO: 4798643 - DNA, 25 bp, Homo sapien
aaaacaatctcatgaagctagaggg

SEQ ID NO: 4798644 - DNA, 25 bp, Homo sapien
agagcttgatttatacagggtgcca

SEQ ID NO: 4798645 - DNA, 25 bp, Homo sapien
atatttttttgatcagggatggctt

SEQ ID NO: 4798646 - DNA, 25 bp, Homo sapien
tggcttttaccctgttactgtggaa

SEQ ID NO: 4798647 - DNA, 25 bp, Homo sapien
ttaccctgttactgtggaataatgt

SEQ ID NO: 4798648 - DNA, 25 bp, Homo sapien
gcttttaccctgttactgtggaata

SEQ ID NO: 4798649 - DNA, 25 bp, Homo sapien
cttggcttttaccctgttactgtgg

SEQ ID NO: 4798650 - DNA, 25 bp, Homo sapien
catcttttcttcttatttcttcctt

SEQ ID NO: 4798651 - DNA, 25 bp, Homo sapien
tcttatttcttccttaaacacttga

SEQ ID NO: 4798652 - DNA, 25 bp, Homo sapien
ctcatcttttcttcttatttcttcc

SEQ ID NO: 4798653 - DNA, 25 bp, Homo sapien
tatttcttccttaaacacttgaatc

SEQ ID NO: 4798654 - DNA, 25 bp, Homo sapien
gcaggcatgacagagggacctttct

SEQ ID NO: 4798655 - DNA, 25 bp, Homo sapien
aagcaggcatgacagagggaccttt

SEQ ID NO: 4798656 - DNA, 25 bp, Homo sapien
tcattttgtccaatcgcccagatag

SEQ ID NO: 4798657 - DNA, 25 bp, Homo sapien
atcgcccagatagtttctattttcc

SEQ ID NO: 4798658 - DNA, 25 bp, Homo sapien
caatgtgcctgctcttcttgtggaa

SEQ ID NO: 4798659 - DNA, 25 bp, Homo sapien
aaggatctggtttaagatctacaga

SEQ ID NO: 4798660 - DNA, 25 bp, Homo sapien
aagcaaataaatagtccagaaacac

SEQ ID NO: 4798661 - DNA, 25 bp, Homo sapien
cattctcccctacaatccgatacat

SEQ ID NO: 4798662 - DNA, 25 bp, Homo sapien
ttttgtccagttgtaacttggttca

SEQ ID NO: 4798663 - DNA, 25 bp, Homo sapien
tttgtccagttgtaacttggttcat

SEQ ID NO: 4798664 - DNA, 25 bp, Homo sapien
cacctttttgtccagttgtaacttg

SEQ ID NO: 4798665 - DNA, 25 bp, Homo sapien
ttcttcacctttttgtccagttgta

SEQ ID NO: 4798666 - DNA, 25 bp, Homo sapien
tagaagatatcaaggtggggatctc

SEQ ID NO: 4798667 - DNA, 25 bp, Homo sapien
ttagaagatatcaaggtggggatct

SEQ ID NO: 4798668 - DNA, 25 bp, Homo sapien
gggatctcggtactcttgccactgt

SEQ ID NO: 4798669 - DNA, 25 bp, Homo sapien
aggtggggatctcggtactcttgcc

SEQ ID NO: 4798670 - DNA, 25 bp, Homo sapien
aggctgggtcgtagaaatagctgcc

SEQ ID NO: 4798671 - DNA, 25 bp, Homo sapien
gctgccagggtaataggccaaaaat

SEQ ID NO: 4798672 - DNA, 25 bp, Homo sapien
gaaatggctaaactgctgaattgcc

SEQ ID NO: 4798673 - DNA, 25 bp, Homo sapien
gaacagaaatggctaaactgctgaa

SEQ ID NO: 4798674 - DNA, 25 bp, Homo sapien
gcagagaattaaggcgaatgttata

SEQ ID NO: 4798675 - DNA, 25 bp, Homo sapien
caaggtttgaggaagctacatgcag

SEQ ID NO: 4798676 - DNA, 25 bp, Homo sapien
aagctacatgcagagaattaaggcg

SEQ ID NO: 4798677 - DNA, 25 bp, Homo sapien
catgcagagaattaaggcgaatgtt

SEQ ID NO: 4798678 - DNA, 25 bp, Homo sapien
atcttcagagccaatagcaggtggc

SEQ ID NO: 4798679 - DNA, 25 bp, Homo sapien
ccacttctagtatcatcttcagagc

SEQ ID NO: 4798680 - DNA, 25 bp, Homo sapien
tagcagtcccacttctagtatcatc

SEQ ID NO: 4798681 - DNA, 25 bp, Homo sapien
cttcagagccaatagcaggtggcat

SEQ ID NO: 4798682 - DNA, 25 bp, Homo sapien
tataccagttgttctatacacagca

SEQ ID NO: 4798683 - DNA, 25 bp, Homo sapien
ataccagttgttctatacacagcat

SEQ ID NO: 4798684 - DNA, 25 bp, Homo sapien
catataccagttgttctatacacag

SEQ ID NO: 4798685 - DNA, 25 bp, Homo sapien
atataccagttgttctatacacagc

SEQ ID NO: 4798686 - DNA, 25 bp, Homo sapien
ggaattatattgcttcataagctct

SEQ ID NO: 4798687 - DNA, 25 bp, Homo sapien
tgggaattatattgcttcataagct

SEQ ID NO: 4798688 - DNA, 25 bp, Homo sapien
cttgggaattatattgcttcataag

SEQ ID NO: 4798689 - DNA, 25 bp, Homo sapien
cacttgggaattatattgcttcata

SEQ ID NO: 4798690 - DNA, 25 bp, Homo sapien
tgtctttctgtctcagtggagcata

SEQ ID NO: 4798691 - DNA, 25 bp, Homo sapien
ttctgctggaactggatttgtgtct

SEQ ID NO: 4798692 - DNA, 25 bp, Homo sapien
agcataaacgtaaggaatgtcagga

SEQ ID NO: 4798693 - DNA, 25 bp, Homo sapien
ctgtgctttctgctggaactggatt

SEQ ID NO: 4798694 - DNA, 25 bp, Homo sapien
cagagtattccatagtgtcagactg

SEQ ID NO: 4798695 - DNA, 25 bp, Homo sapien
catagtgtcagactgccccagaggt

SEQ ID NO: 4798696 - DNA, 25 bp, Homo sapien
tgccccagaggtaaggcagattctc

SEQ ID NO: 4798697 - DNA, 25 bp, Homo sapien
ccagaggtaaggcagattctcccat

SEQ ID NO: 4798698 - DNA, 25 bp, Homo sapien
gaacacgaaatatcccacttgggag

SEQ ID NO: 4798699 - DNA, 25 bp, Homo sapien
cacttgggagctcccgtgcctgtgt

SEQ ID NO: 4798700 - DNA, 25 bp, Homo sapien
gggaactgagggctgaatatcttga

SEQ ID NO: 4798701 - DNA, 25 bp, Homo sapien
agctcccgtgcctgtgttgagggaa

SEQ ID NO: 4798702 - DNA, 25 bp, Homo sapien
ccgacaaatcacctgcattatgcat

SEQ ID NO: 4798703 - DNA, 25 bp, Homo sapien
ctctttttccgacaaatcacctgca

SEQ ID NO: 4798704 - DNA, 25 bp, Homo sapien
cccgtctaaagagaatttcctgcaa

SEQ ID NO: 4798705 - DNA, 25 bp, Homo sapien
gcaaaagttgattggtaatcccctc

SEQ ID NO: 4798706 - DNA, 25 bp, Homo sapien
ttgagggcgatttgccagaggccca

SEQ ID NO: 4798707 - DNA, 25 bp, Homo sapien
tatgatgatctaagtttagctgctt

SEQ ID NO: 4798708 - DNA, 25 bp, Homo sapien
cagaacccagtttacggaagcctcg

SEQ ID NO: 4798709 - DNA, 25 bp, Homo sapien
aattctgcgtactgctgtttctcaa

SEQ ID NO: 4798710 - DNA, 25 bp, Homo sapien
ctactagaggagcagggacaagcag

SEQ ID NO: 4798711 - DNA, 25 bp, Homo sapien
agtgaactactagaggagcagggac

SEQ ID NO: 4798712 - DNA, 25 bp, Homo sapien
aactactagaggagcagggacaagc

SEQ ID NO: 4798713 - DNA, 25 bp, Homo sapien
gaaaagtgaactactagaggagcag

SEQ ID NO: 4798714 - DNA, 25 bp, Homo sapien
taaatcgcccaaagaatgtgtgcat

SEQ ID NO: 4798715 - DNA, 25 bp, Homo sapien
tccctgtctttcactatatttctgc

SEQ ID NO: 4798716 - DNA, 25 bp, Homo sapien
gggcaactcttgaaatcactatggc

SEQ ID NO: 4798717 - DNA, 25 bp, Homo sapien
catcttatgctaggttgggggacac

SEQ ID NO: 4798718 - DNA, 25 bp, Homo sapien
tgtgtctgtctgtgtgtttgtatac

SEQ ID NO: 4798719 - DNA, 25 bp, Homo sapien
gtgtgtctgtctgtgtgtttgtata

SEQ ID NO: 4798720 - DNA, 25 bp, Homo sapien
ctttgcagaagttagtcttgctttt

SEQ ID NO: 4798721 - DNA, 25 bp, Homo sapien
cagaagttagtcttgctttttccca

SEQ ID NO: 4798722 - DNA, 25 bp, Homo sapien
taactttgcagaagttagtcttgct

SEQ ID NO: 4798723 - DNA, 25 bp, Homo sapien
tgcagaagttagtcttgctttttcc

SEQ ID NO: 4798724 - DNA, 25 bp, Homo sapien
ccacaggactagagagagcctcttg

SEQ ID NO: 4798725 - DNA, 25 bp, Homo sapien
aaatatcttttttctcggcaccagt

SEQ ID NO: 4798726 - DNA, 25 bp, Homo sapien
tccgtctgcagtggtacagtgccta

SEQ ID NO: 4798727 - DNA, 25 bp, Homo sapien
gcaccagtgggtagatccgtctgca

SEQ ID NO: 4798728 - DNA, 25 bp, Homo sapien
tcatgtccttgcttaaggaatccag

SEQ ID NO: 4798729 - DNA, 25 bp, Homo sapien
agtgtttaatttgcttgtcctggtg

SEQ ID NO: 4798730 - DNA, 25 bp, Homo sapien
gagtgtttaatttgcttgtcctggt

SEQ ID NO: 4798731 - DNA, 25 bp, Homo sapien
gcataagcagcataactatgacaat

SEQ ID NO: 4798732 - DNA, 25 bp, Homo sapien
gagcagacagagatcagaggcataa

SEQ ID NO: 4798733 - DNA, 25 bp, Homo sapien
tgtaacttgtgtttacgtagaggaa

SEQ ID NO: 4798734 - DNA, 25 bp, Homo sapien
tgtgtttacgtagaggaaatttcca

SEQ ID NO: 4798735 - DNA, 25 bp, Homo sapien
gttgctacttgaacactgtaagcca

SEQ ID NO: 4798736 - DNA, 25 bp, Homo sapien
ttttcatgatcccaggatttctcac

SEQ ID NO: 4798737 - DNA, 25 bp, Homo sapien
tcagctcttgttgctacttgaacac

SEQ ID NO: 4798738 - DNA, 25 bp, Homo sapien
tttcatgatcccaggatttctcact

SEQ ID NO: 4798739 - DNA, 25 bp, Homo sapien
tcagcaaagacaaatagctcgaatg

SEQ ID NO: 4798740 - DNA, 25 bp, Homo sapien
gacaaatagctcgaatgataaacac

SEQ ID NO: 4798741 - DNA, 25 bp, Homo sapien
ggagggagatttttgccagcatcct

SEQ ID NO: 4798742 - DNA, 25 bp, Homo sapien
gctcgaatgataaacacaacagggt

SEQ ID NO: 4798743 - DNA, 25 bp, Homo sapien
caatgagatacactcattggcttgt

SEQ ID NO: 4798744 - DNA, 25 bp, Homo sapien
atgaataagaggcaccaacacaatg

SEQ ID NO: 4798745 - DNA, 25 bp, Homo sapien
ctttcgatgaataagaggcaccaac

SEQ ID NO: 4798746 - DNA, 25 bp, Homo sapien
gatacactcattggcttgttggatt

SEQ ID NO: 4798747 - DNA, 25 bp, Homo sapien
cttgttgatgtttgcttcaaaaatg

SEQ ID NO: 4798748 - DNA, 25 bp, Homo sapien
aaggtctttatcatagtatgccaag

SEQ ID NO: 4798749 - DNA, 25 bp, Homo sapien
aatgtggagtgtgcactggctgcat

SEQ ID NO: 4798750 - DNA, 25 bp, Homo sapien
gactattgcacagtaacaggtcttg

SEQ ID NO: 4798751 - DNA, 25 bp, Homo sapien
tgacttcattgcaatgagtctcttg

SEQ ID NO: 4798752 - DNA, 25 bp, Homo sapien
gacttcattgcaatgagtctcttgt

SEQ ID NO: 4798753 - DNA, 25 bp, Homo sapien
gtgacttcattgcaatgagtctctt

SEQ ID NO: 4798754 - DNA, 25 bp, Homo sapien
acttcattgcaatgagtctcttgta

SEQ ID NO: 4798755 - DNA, 25 bp, Homo sapien
taaacaataacgctttctgctgccc

SEQ ID NO: 4798756 - DNA, 25 bp, Homo sapien
tgacatttttattggacattactgc

SEQ ID NO: 4798757 - DNA, 25 bp, Homo sapien
taattgacaccttactgcctcatca

SEQ ID NO: 4798758 - DNA, 25 bp, Homo sapien
tatttttctgatgtggctacttgaa

SEQ ID NO: 4798759 - DNA, 25 bp, Homo sapien
tttctggaatattgaattcctcttc

SEQ ID NO: 4798760 - DNA, 25 bp, Homo sapien
ttcctcttccaacaactcttgaatc

SEQ ID NO: 4798761 - DNA, 25 bp, Homo sapien
ttttctggaatattgaattcctctt

SEQ ID NO: 4798762 - DNA, 25 bp, Homo sapien
cataacaggtggttgctgatgcaaa

SEQ ID NO: 4798763 - DNA, 25 bp, Homo sapien
cacaatcctgccatgatcataacag

SEQ ID NO: 4798764 - DNA, 25 bp, Homo sapien
ctgaacttctgtggaacacatacaa

SEQ ID NO: 4798765 - DNA, 25 bp, Homo sapien
aacttctgtggaacacatacaaagg

SEQ ID NO: 4798766 - DNA, 25 bp, Homo sapien
catgatctcggtgaggtctctttac

SEQ ID NO: 4798767 - DNA, 25 bp, Homo sapien
tagataattctgcacattctggccc

SEQ ID NO: 4798768 - DNA, 25 bp, Homo sapien
catgggctttcagcagagcattgga

SEQ ID NO: 4798769 - DNA, 25 bp, Homo sapien
aaacttccagattgatgttgccagc

SEQ ID NO: 4798770 - DNA, 25 bp, Homo sapien
tttagcctaactctttacttgccag

SEQ ID NO: 4798771 - DNA, 25 bp, Homo sapien
gcaggagggtgctatgcaagttata

SEQ ID NO: 4798772 - DNA, 25 bp, Homo sapien
caggttcagtgatctagatgctttc

SEQ ID NO: 4798773 - DNA, 25 bp, Homo sapien
tgcccaccattatcccaggttcagt

SEQ ID NO: 4798774 - DNA, 25 bp, Homo sapien
tctggaaaagaactcagattgaagg

SEQ ID NO: 4798775 - DNA, 25 bp, Homo sapien
agaatttttcctacaactgcagtga

SEQ ID NO: 4798776 - DNA, 25 bp, Homo sapien
ctttctataagatgaagtgactgag

SEQ ID NO: 4798777 - DNA, 25 bp, Homo sapien
gataaggattaagtagcacactgca

SEQ ID NO: 4798778 - DNA, 25 bp, Homo sapien
ggcagtgtcagttgtacattacata

SEQ ID NO: 4798779 - DNA, 25 bp, Homo sapien
aatggcagtgtcagttgtacattac

SEQ ID NO: 4798780 - DNA, 25 bp, Homo sapien
aggaaaaatggcagtgtcagttgta

SEQ ID NO: 4798781 - DNA, 25 bp, Homo sapien
tatcttctttatctatgtccatttc

SEQ ID NO: 4798782 - DNA, 25 bp, Homo sapien
gtgtgtacaacaacaggaaaagtcc

SEQ ID NO: 4798783 - DNA, 25 bp, Homo sapien
agcacctgaggcctaagaagcaact

SEQ ID NO: 4798784 - DNA, 25 bp, Homo sapien
cccttcttcatgacagagtgagtat

SEQ ID NO: 4798785 - DNA, 25 bp, Homo sapien
tttaatcttagcacctgcacagcag

SEQ ID NO: 4798786 - DNA, 25 bp, Homo sapien
caaagaaggtgtcgaggcggatctc

SEQ ID NO: 4798787 - DNA, 25 bp, Homo sapien
gacggatcttctcccagcgtgggta

SEQ ID NO: 4798788 - DNA, 25 bp, Homo sapien
catttcgcagtagggtaggtagccg

SEQ ID NO: 4798789 - DNA, 25 bp, Homo sapien
cgaagaggaatagaactggccgccc

SEQ ID NO: 4798790 - DNA, 25 bp, Homo sapien
cagaataatcatgaggttgtgggct

SEQ ID NO: 4798791 - DNA, 25 bp, Homo sapien
aatcatgaggttgtgggctgtatca

SEQ ID NO: 4798792 - DNA, 25 bp, Homo sapien
gtgggctgtatcaaagaaggcatta

SEQ ID NO: 4798793 - DNA, 25 bp, Homo sapien
gaataatcatgaggttgtgggctgt

SEQ ID NO: 4798794 - DNA, 25 bp, Homo sapien
gggtcatcagaatagagataacgat

SEQ ID NO: 4798795 - DNA, 25 bp, Homo sapien
gagtctttctatagacaccaattaa

SEQ ID NO: 4798796 - DNA, 25 bp, Homo sapien
tatcttggtagccagagtctttcta

SEQ ID NO: 4798797 - DNA, 25 bp, Homo sapien
caaaatcagtatgaatattgagggt

SEQ ID NO: 4798798 - DNA, 25 bp, Homo sapien
gaggtacaattttttcactactcaa

SEQ ID NO: 4798799 - DNA, 25 bp, Homo sapien
gctctcgtttaaggtgaggtacaat

SEQ ID NO: 4798800 - DNA, 25 bp, Homo sapien
tccacaaagaaaaccgctaaagagc

SEQ ID NO: 4798801 - DNA, 25 bp, Homo sapien
tacaattttttcactactcaacctg

SEQ ID NO: 4798802 - DNA, 25 bp, Homo sapien
gagttataggtttagtccagcccac

SEQ ID NO: 4798803 - DNA, 25 bp, Homo sapien
cacaggacagaataggacttgaact

SEQ ID NO: 4798804 - DNA, 25 bp, Homo sapien
gctagataatgatggttggaggacc

SEQ ID NO: 4798805 - DNA, 25 bp, Homo sapien
ttggaggaccaacgcacagttgctt

SEQ ID NO: 4798806 - DNA, 25 bp, Homo sapien
tgttagcacctctgtccgacactgc

SEQ ID NO: 4798807 - DNA, 25 bp, Homo sapien
gtggcccaaggttcccagtgttagc

SEQ ID NO: 4798808 - DNA, 25 bp, Homo sapien
ggttcccagtgttagcacctctgtc

SEQ ID NO: 4798809 - DNA, 25 bp, Homo sapien
ctgtccgacactgctccatgccaga

SEQ ID NO: 4798810 - DNA, 25 bp, Homo sapien
tacactgaggccgaaaagcttgcgg

SEQ ID NO: 4798811 - DNA, 25 bp, Homo sapien
tccgtggcactctgcaggagcttgt

SEQ ID NO: 4798812 - DNA, 25 bp, Homo sapien
gcttgtagcggttctgcaggtccca

SEQ ID NO: 4798813 - DNA, 25 bp, Homo sapien
tgatggatgcttccgatggtcagga

SEQ ID NO: 4798814 - DNA, 25 bp, Homo sapien
ccagttagattagctccctttcaga

SEQ ID NO: 4798815 - DNA, 25 bp, Homo sapien
tgcagcagtcctaattccagttaga

SEQ ID NO: 4798816 - DNA, 25 bp, Homo sapien
cactccaaagtgaaagggtcagggt

SEQ ID NO: 4798817 - DNA, 25 bp, Homo sapien
ggtcactgaactttcccttgcagca

SEQ ID NO: 4798818 - DNA, 25 bp, Homo sapien
agtggcactgagtgagactctctac

SEQ ID NO: 4798819 - DNA, 25 bp, Homo sapien
catgcagtggcactgagtgagactc

SEQ ID NO: 4798820 - DNA, 25 bp, Homo sapien
tcatgcagtggcactgagtgagact

SEQ ID NO: 4798821 - DNA, 25 bp, Homo sapien
caggtccttataagcttcggcccaa

SEQ ID NO: 4798822 - DNA, 25 bp, Homo sapien
taagcttcggcccaagacttggcca

SEQ ID NO: 4798823 - DNA, 25 bp, Homo sapien
tctccaggtccttataagcttcggc

SEQ ID NO: 4798824 - DNA, 25 bp, Homo sapien
tccttataagcttcggcccaagact

SEQ ID NO: 4798825 - DNA, 25 bp, Homo sapien
tgcggaaactcctcggcacattggc

SEQ ID NO: 4798826 - DNA, 25 bp, Homo sapien
tggcagcgacactggctgttctggc

SEQ ID NO: 4798827 - DNA, 25 bp, Homo sapien
agcgacactggctgttctggcacag

SEQ ID NO: 4798828 - DNA, 25 bp, Homo sapien
gggcagttgcactgcggaaactcct

SEQ ID NO: 4798829 - DNA, 25 bp, Homo sapien
acttctcttgcagatactgaggaaa

SEQ ID NO: 4798830 - DNA, 25 bp, Homo sapien
gatatagctcaaggccgactggaca

SEQ ID NO: 4798831 - DNA, 25 bp, Homo sapien
gccgactggacaaacttctcttgca

SEQ ID NO: 4798832 - DNA, 25 bp, Homo sapien
tcaaggccgactggacaaacttctc

SEQ ID NO: 4798833 - DNA, 25 bp, Homo sapien
tccatgctgcgtacttggccacaag

SEQ ID NO: 4798834 - DNA, 25 bp, Homo sapien
tttgaatggtatagccccacatggc

SEQ ID NO: 4798835 - DNA, 25 bp, Homo sapien
ggaaatcggtcacacctacacaagt

SEQ ID NO: 4798836 - DNA, 25 bp, Homo sapien
tcgacaaggaatctaatgggacatg

SEQ ID NO: 4798837 - DNA, 25 bp, Homo sapien
tctcctctggcgagcatagaacaag

SEQ ID NO: 4798838 - DNA, 25 bp, Homo sapien
ggtgctcctatgttcataaagtaaa

SEQ ID NO: 4798839 - DNA, 25 bp, Homo sapien
cctcattctattcggtttctgattg

SEQ ID NO: 4798840 - DNA, 25 bp, Homo sapien
tgattgatatcctcaatccctttct

SEQ ID NO: 4798841 - DNA, 25 bp, Homo sapien
catatcacatccatgatgtttcccc

SEQ ID NO: 4798842 - DNA, 25 bp, Homo sapien
tccatatttgcagttttcattagat

SEQ ID NO: 4798843 - DNA, 25 bp, Homo sapien
tctcccacatatcacatccatgatg

SEQ ID NO: 4798844 - DNA, 25 bp, Homo sapien
ctccatccctcctgatcccctctcc

SEQ ID NO: 4798845 - DNA, 25 bp, Homo sapien
cttgaaggtgcagtttgctctccgt

SEQ ID NO: 4798846 - DNA, 25 bp, Homo sapien
gctctccgtgctttgcagaaggacg

SEQ ID NO: 4798847 - DNA, 25 bp, Homo sapien
gaaggacggaactcacagagtccag

SEQ ID NO: 4798848 - DNA, 25 bp, Homo sapien
gctttgcagaaggacggaactcaca

SEQ ID NO: 4798849 - DNA, 25 bp, Homo sapien
gttgttgtattgagaacctgtcgcc

SEQ ID NO: 4798850 - DNA, 25 bp, Homo sapien
tgtccatccactctcagaatgcctg

SEQ ID NO: 4798851 - DNA, 25 bp, Homo sapien
tattgagaacctgtcgcccaaatcc

SEQ ID NO: 4798852 - DNA, 25 bp, Homo sapien
gcctgcattgcagtgttgttgtatt

SEQ ID NO: 4798853 - DNA, 25 bp, Homo sapien
aacactttgagtggcattccctgac

SEQ ID NO: 4798854 - DNA, 25 bp, Homo sapien
taccatcacggtcaacaaagtagga

SEQ ID NO: 4798855 - DNA, 25 bp, Homo sapien
gaagcctcctcatggtaccatcacg

SEQ ID NO: 4798856 - DNA, 25 bp, Homo sapien
gatgcgagctggtgcagagcttcaa

SEQ ID NO: 4798857 - DNA, 25 bp, Homo sapien
tctgtgtgggtacaatctaatcagc

SEQ ID NO: 4798858 - DNA, 25 bp, Homo sapien
gcttagaggattgagttacttgcca

SEQ ID NO: 4798859 - DNA, 25 bp, Homo sapien
tctagtgagtagcagaattgggcct

SEQ ID NO: 4798860 - DNA, 25 bp, Homo sapien
gccaccgtggctagaacgaaagcag

SEQ ID NO: 4798861 - DNA, 25 bp, Homo sapien
gatgatggtatcgatgaactgctga

SEQ ID NO: 4798862 - DNA, 25 bp, Homo sapien
cactggatggcggaccagatctctc

SEQ ID NO: 4798863 - DNA, 25 bp, Homo sapien
aactgctgagtggtaggtctcctgc

SEQ ID NO: 4798864 - DNA, 25 bp, Homo sapien
gctcctttgaaactccggcatgagg

SEQ ID NO: 4798865 - DNA, 25 bp, Homo sapien
gactgagtgaaggttgcttttgctc

SEQ ID NO: 4798866 - DNA, 25 bp, Homo sapien
gcatacaaaccgagtacaagtgaaa

SEQ ID NO: 4798867 - DNA, 25 bp, Homo sapien
ttagagggactgagtgaaggttgct

SEQ ID NO: 4798868 - DNA, 25 bp, Homo sapien
agtaaacttggagcatacaaaccga

SEQ ID NO: 4798869 - DNA, 25 bp, Homo sapien
tgcctgagttacatgctctcggtcc

SEQ ID NO: 4798870 - DNA, 25 bp, Homo sapien
cttgaggaaaacagactagacaaga

SEQ ID NO: 4798871 - DNA, 25 bp, Homo sapien
aacagactagacaagagggctgtaa

SEQ ID NO: 4798872 - DNA, 25 bp, Homo sapien
gactagacaagagggctgtaaggtc

SEQ ID NO: 4798873 - DNA, 25 bp, Homo sapien
ggaaaacagactagacaagagggct

SEQ ID NO: 4798874 - DNA, 25 bp, Homo sapien
gagtttaatgaaaaggtctctctct

SEQ ID NO: 4798875 - DNA, 25 bp, Homo sapien
ctgagataaatgatgggaaccagag

SEQ ID NO: 4798876 - DNA, 25 bp, Homo sapien
gataaatgatgggaaccagagttta

SEQ ID NO: 4798877 - DNA, 25 bp, Homo sapien
accagagtttaatgaaaaggtctct

SEQ ID NO: 4798878 - DNA, 25 bp, Homo sapien
tgtggaatatgcttatgcccaatta

SEQ ID NO: 4798879 - DNA, 25 bp, Homo sapien
ccaattagactgagattaaagtaag

SEQ ID NO: 4798880 - DNA, 25 bp, Homo sapien
tatgcccaattaagcatcccagcag

SEQ ID NO: 4798881 - DNA, 25 bp, Homo sapien
cagcagggtgggcaaaccaattaga

SEQ ID NO: 4798882 - DNA, 25 bp, Homo sapien
tgcatcttaacgagagggtgtcagc

SEQ ID NO: 4798883 - DNA, 25 bp, Homo sapien
gagaaaggtgaacccaagggcatat

SEQ ID NO: 4798884 - DNA, 25 bp, Homo sapien
gcatcttaacgagagggtgtcagct

SEQ ID NO: 4798885 - DNA, 25 bp, Homo sapien
ccaagggcatatgtgaagcagaaat

SEQ ID NO: 4798886 - DNA, 25 bp, Homo sapien
tccttaaagtatgtatcaccccgaa

SEQ ID NO: 4798887 - DNA, 25 bp, Homo sapien
gcacttccttaaagtatgtatcacc

SEQ ID NO: 4798888 - DNA, 25 bp, Homo sapien
cttgcacttccttaaagtatgtatc

SEQ ID NO: 4798889 - DNA, 25 bp, Homo sapien
caccttgcacttccttaaagtatgt

SEQ ID NO: 4798890 - DNA, 25 bp, Homo sapien
ctctgtcagtgctacaggatgtgtc

SEQ ID NO: 4798891 - DNA, 25 bp, Homo sapien
acaaacagtagtcctcatcgtccct

SEQ ID NO: 4798892 - DNA, 25 bp, Homo sapien
caaacagtagtcctcatcgtccctg

SEQ ID NO: 4798893 - DNA, 25 bp, Homo sapien
cgatgaagaactggtattctctacc

SEQ ID NO: 4798894 - DNA, 25 bp, Homo sapien
gaactggtattctctaccaatgaag

SEQ ID NO: 4798895 - DNA, 25 bp, Homo sapien
ctctaccaatgaagacgatggagaa

SEQ ID NO: 4798896 - DNA, 25 bp, Homo sapien
tgtaagacgatgaagaactggtatt

SEQ ID NO: 4798897 - DNA, 25 bp, Homo sapien
gattcgtttcacaccccacttcaca

SEQ ID NO: 4798898 - DNA, 25 bp, Homo sapien
ccgccttcctcagtgattcgtttca

SEQ ID NO: 4798899 - DNA, 25 bp, Homo sapien
ttgacactccacagtaccgccttcc

SEQ ID NO: 4798900 - DNA, 25 bp, Homo sapien
ccttcctgctacttcaggaatggct

SEQ ID NO: 4798901 - DNA, 25 bp, Homo sapien
tgctgactttctctgaacaataaac

SEQ ID NO: 4798902 - DNA, 25 bp, Homo sapien
ttgctgactttctctgaacaataaa

SEQ ID NO: 4798903 - DNA, 25 bp, Homo sapien
cttgctgactttctctgaacaataa

SEQ ID NO: 4798904 - DNA, 25 bp, Homo sapien
gagtctgtaagcctggatgctgcac

SEQ ID NO: 4798905 - DNA, 25 bp, Homo sapien
tatccagtagctgtagaactctaca

SEQ ID NO: 4798906 - DNA, 25 bp, Homo sapien
taaaagaatgcatcctgccacaggg

SEQ ID NO: 4798907 - DNA, 25 bp, Homo sapien
gatgctgcacgggaaaaggctgcct

SEQ ID NO: 4798908 - DNA, 25 bp, Homo sapien
cctgcagctgttggtggcactgatt

SEQ ID NO: 4798909 - DNA, 25 bp, Homo sapien
ctaactttatatccgtgcatgtcag

SEQ ID NO: 4798910 - DNA, 25 bp, Homo sapien
gttaatgaaacccttctccgctgcc

SEQ ID NO: 4798911 - DNA, 25 bp, Homo sapien
gcactgattggtatttgagggttaa

SEQ ID NO: 4798912 - DNA, 25 bp, Homo sapien
tctcagagcggttgaaacttgccca

SEQ ID NO: 4798913 - DNA, 25 bp, Homo sapien
ggaagtcccacagaccagcttttga

SEQ ID NO: 4798914 - DNA, 25 bp, Homo sapien
tgtgacagcatagagttaagggccc

SEQ ID NO: 4798915 - DNA, 25 bp, Homo sapien
cttgcccatggtcaaaggaagcctg

SEQ ID NO: 4798916 - DNA, 25 bp, Homo sapien
tttctgaagcttcccaatcaccctg

SEQ ID NO: 4798917 - DNA, 25 bp, Homo sapien
tctgaagcttcccaatcaccctggg

SEQ ID NO: 4798918 - DNA, 25 bp, Homo sapien
gaagcttcccaatcaccctgggttc

SEQ ID NO: 4798919 - DNA, 25 bp, Homo sapien
aataaggagagaaagcttcttccca

SEQ ID NO: 4798920 - DNA, 25 bp, Homo sapien
cttgacggtgtctttccacaaagga

SEQ ID NO: 4798921 - DNA, 25 bp, Homo sapien
gatacggccccatataaacaggaag

SEQ ID NO: 4798922 - DNA, 25 bp, Homo sapien
catgttggtctgtcccagctggttc

SEQ ID NO: 4798923 - DNA, 25 bp, Homo sapien
tatctggttgtaaatccttgacggt

SEQ ID NO: 4798924 - DNA, 25 bp, Homo sapien
tcattcttgctccattctgtggagt

SEQ ID NO: 4798925 - DNA, 25 bp, Homo sapien
ctctcattcttgctccattctgtgg

SEQ ID NO: 4798926 - DNA, 25 bp, Homo sapien
cattcttgctccattctgtggagtc

SEQ ID NO: 4798927 - DNA, 25 bp, Homo sapien
tctcattcttgctccattctgtgga

SEQ ID NO: 4798928 - DNA, 25 bp, Homo sapien
tgttcagagcctaaaacaaatccgt

SEQ ID NO: 4798929 - DNA, 25 bp, Homo sapien
caaatccgtacatgttgagtgcaga

SEQ ID NO: 4798930 - DNA, 25 bp, Homo sapien
aaggagaaaggtacatgagcagagg

SEQ ID NO: 4798931 - DNA, 25 bp, Homo sapien
tgagtgcagaacagtaacaactacg

SEQ ID NO: 4798932 - DNA, 25 bp, Homo sapien
ctgagtggcaaattgggctagactc

SEQ ID NO: 4798933 - DNA, 25 bp, Homo sapien
ggcaaattgggctagactcctatct

SEQ ID NO: 4798934 - DNA, 25 bp, Homo sapien
tcttctagctctcggttaagagttc

SEQ ID NO: 4798935 - DNA, 25 bp, Homo sapien
agctctcggttaagagttcttctca

SEQ ID NO: 4798936 - DNA, 25 bp, Homo sapien
gatcagtccatgattcgacttaaag

SEQ ID NO: 4798937 - DNA, 25 bp, Homo sapien
gtccatgattcgacttaaagaagta

SEQ ID NO: 4798938 - DNA, 25 bp, Homo sapien
atgggtagtttcaggatcagtccat

SEQ ID NO: 4798939 - DNA, 25 bp, Homo sapien
attcagttcttgtagtgtgatgggt

SEQ ID NO: 4798940 - DNA, 25 bp, Homo sapien
aagtgcagatgcaaacagattgctc

SEQ ID NO: 4798941 - DNA, 25 bp, Homo sapien
aggtgtgacgggagaaggacccaca

SEQ ID NO: 4798942 - DNA, 25 bp, Homo sapien
tataaagtgcagatgcaaacagatt

SEQ ID NO: 4798943 - DNA, 25 bp, Homo sapien
ggagaaggacccacagctgtataaa

SEQ ID NO: 4798944 - DNA, 25 bp, Homo sapien
ccagagttggccaaaggtggatgac

SEQ ID NO: 4798945 - DNA, 25 bp, Homo sapien
ggtggatgacacagaaaggtacgta

SEQ ID NO: 4798946 - DNA, 25 bp, Homo sapien
caacaggcagagattgtaacaatag

SEQ ID NO: 4798947 - DNA, 25 bp, Homo sapien
ctgcctgtggtggattgtcaagaaa

SEQ ID NO: 4798948 - DNA, 25 bp, Homo sapien
gagataattgagaccctgctgttcc

SEQ ID NO: 4798949 - DNA, 25 bp, Homo sapien
cactatttagacagagcaggcctca

SEQ ID NO: 4798950 - DNA, 25 bp, Homo sapien
gcaggcctcaatagatctggaacaa

SEQ ID NO: 4798951 - DNA, 25 bp, Homo sapien
gagtttcctaaagtatgctatacag

SEQ ID NO: 4798952 - DNA, 25 bp, Homo sapien
cacagacttgtacacatgtaattag

SEQ ID NO: 4798953 - DNA, 25 bp, Homo sapien
gtaattagctgacttcttagaaggg

SEQ ID NO: 4798954 - DNA, 25 bp, Homo sapien
tcgagatagagatctaacccctgct

SEQ ID NO: 4798955 - DNA, 25 bp, Homo sapien
ccaccttctaatgtacaaatgtgct

SEQ ID NO: 4798956 - DNA, 25 bp, Homo sapien
cataggctggtttgtgcggtaatga

SEQ ID NO: 4798957 - DNA, 25 bp, Homo sapien
ttggcattacaaaaaggactcgtca

SEQ ID NO: 4798958 - DNA, 25 bp, Homo sapien
gtgccaagaggcctccaagcagatg

SEQ ID NO: 4798959 - DNA, 25 bp, Homo sapien
taggacagtattcagggtgccaaga

SEQ ID NO: 4798960 - DNA, 25 bp, Homo sapien
ttggaatccccatattcttggtata

SEQ ID NO: 4798961 - DNA, 25 bp, Homo sapien
ggaatccccatattcttggtatagg

SEQ ID NO: 4798962 - DNA, 25 bp, Homo sapien
gtctatattatcattggaatcccca

SEQ ID NO: 4798963 - DNA, 25 bp, Homo sapien
aatccccatattcttggtataggca

SEQ ID NO: 4798964 - DNA, 25 bp, Homo sapien
tttaaatgaacatgaagcaattgtt

SEQ ID NO: 4798965 - DNA, 25 bp, Homo sapien
taaatgaacatgaagcaattgttag

SEQ ID NO: 4798966 - DNA, 25 bp, Homo sapien
ctttaaatgaacatgaagcaattgt

SEQ ID NO: 4798967 - DNA, 25 bp, Homo sapien
ttaaatgaacatgaagcaattgtta

SEQ ID NO: 4798968 - DNA, 25 bp, Homo sapien
cttaatggcccattcaagtgataat

SEQ ID NO: 4798969 - DNA, 25 bp, Homo sapien
gtgtttttacaattcttgcctgtac

SEQ ID NO: 4798970 - DNA, 25 bp, Homo sapien
ggtgtttttacaattcttgcctgta

SEQ ID NO: 4798971 - DNA, 25 bp, Homo sapien
agggtgtttttacaattcttgcctg

SEQ ID NO: 4798972 - DNA, 25 bp, Homo sapien
aaagtgccatctagccccggaaaat

SEQ ID NO: 4798973 - DNA, 25 bp, Homo sapien
ttgaaatggagtcacagctccccct

SEQ ID NO: 4798974 - DNA, 25 bp, Homo sapien
agctgggtcgtctaaactcaacggg

SEQ ID NO: 4798975 - DNA, 25 bp, Homo sapien
gcggcaaagatactcattgcagcct

SEQ ID NO: 4798976 - DNA, 25 bp, Homo sapien
gaaaaggctctattgcagatgggcc

SEQ ID NO: 4798977 - DNA, 25 bp, Homo sapien
tctattgcagatgggcctaaaaccc

SEQ ID NO: 4798978 - DNA, 25 bp, Homo sapien
aaggctctattgcagatgggcctaa

SEQ ID NO: 4798979 - DNA, 25 bp, Homo sapien
tggaaaaggctctattgcagatggg

SEQ ID NO: 4798980 - DNA, 25 bp, Homo sapien
cagtactgggtccttgcttgtcggt

SEQ ID NO: 4798981 - DNA, 25 bp, Homo sapien
tgggtccttgcttgtcggtaattcc

SEQ ID NO: 4798982 - DNA, 25 bp, Homo sapien
cagtcacactcagtactgggtcctt

SEQ ID NO: 4798983 - DNA, 25 bp, Homo sapien
acactcagtactgggtccttgcttg

SEQ ID NO: 4798984 - DNA, 25 bp, Homo sapien
ttaatattccttccagtttcgatcg

SEQ ID NO: 4798985 - DNA, 25 bp, Homo sapien
taatattccttccagtttcgatcgt

SEQ ID NO: 4798986 - DNA, 25 bp, Homo sapien
gtctggaagccatgctaacagcagt

SEQ ID NO: 4798987 - DNA, 25 bp, Homo sapien
gagaaagtaacagctgccgagtctg

SEQ ID NO: 4798988 - DNA, 25 bp, Homo sapien
agccatgctaacagcagtaaaactc

SEQ ID NO: 4798989 - DNA, 25 bp, Homo sapien
cttgagaaagtaacagctgccgagt

SEQ ID NO: 4798990 - DNA, 25 bp, Homo sapien
ttaagctgtgggtcccagtgtagca

SEQ ID NO: 4798991 - DNA, 25 bp, Homo sapien
caggattccaccgtttggaggaatt

SEQ ID NO: 4798992 - DNA, 25 bp, Homo sapien
tgtagcaggattccaccgtttggag

SEQ ID NO: 4798993 - DNA, 25 bp, Homo sapien
tcccagtgtagcaggattccaccgt

SEQ ID NO: 4798994 - DNA, 25 bp, Homo sapien
tccacagcgggtttcccggtgacta

SEQ ID NO: 4798995 - DNA, 25 bp, Homo sapien
aggtgccatctacagccccataatc

SEQ ID NO: 4798996 - DNA, 25 bp, Homo sapien
tacgtgatcctatagtaagggtccc

SEQ ID NO: 4798997 - DNA, 25 bp, Homo sapien
caacattgggctaaataaggtgcca

SEQ ID NO: 4798998 - DNA, 25 bp, Homo sapien
caatgtccgtctttggcggagagct

SEQ ID NO: 4798999 - DNA, 25 bp, Homo sapien
ctgcgtgcagctcgcattccgggca

SEQ ID NO: 4799000 - DNA, 25 bp, Homo sapien
aggacgctttttattcggctcggtg

SEQ ID NO: 4799001 - DNA, 25 bp, Homo sapien
ctcggtgggaacttgggagagccct

SEQ ID NO: 4799002 - DNA, 25 bp, Homo sapien
atgaatcccggctccggaaggcggt

SEQ ID NO: 4799003 - DNA, 25 bp, Homo sapien
gcgcgccagatcagtttgcagccgt

SEQ ID NO: 4799004 - DNA, 25 bp, Homo sapien
gcctggctcatactcagccgtaaag

SEQ ID NO: 4799005 - DNA, 25 bp, Homo sapien
tggtcccgaggacaggcatgaatcc

SEQ ID NO: 4799006 - DNA, 25 bp, Homo sapien
agcatccaaagggaccgcgcatacg

SEQ ID NO: 4799007 - DNA, 25 bp, Homo sapien
cggaatcctggtgcccttaagcgtg

SEQ ID NO: 4799008 - DNA, 25 bp, Homo sapien
cccttaagcgtgactgtactgtgtg

SEQ ID NO: 4799009 - DNA, 25 bp, Homo sapien
catacgcgcaaacccggaatcctgg

SEQ ID NO: 4799010 - DNA, 25 bp, Homo sapien
cgtaacctcccagaatgaagcaaga

SEQ ID NO: 4799011 - DNA, 25 bp, Homo sapien
gtgtaggcgagagcccacgtaacct

SEQ ID NO: 4799012 - DNA, 25 bp, Homo sapien
tgtgtctgcgcgtctctctgtgagt

SEQ ID NO: 4799013 - DNA, 25 bp, Homo sapien
tccacggccgcgtggatccatcgag

SEQ ID NO: 4799014 - DNA, 25 bp, Homo sapien
ctacgtaggcaggatgtaggaggga

SEQ ID NO: 4799015 - DNA, 25 bp, Homo sapien
cgtaggcaggatgtaggagggagaa

SEQ ID NO: 4799016 - DNA, 25 bp, Homo sapien
tacgtaggcaggatgtaggagggag

SEQ ID NO: 4799017 - DNA, 25 bp, Homo sapien
gtaggcaggatgtaggagggagaag

SEQ ID NO: 4799018 - DNA, 25 bp, Homo sapien
gagatggttgaaggccttttgtaga

SEQ ID NO: 4799019 - DNA, 25 bp, Homo sapien
ctgagatggttgaaggccttttgta

SEQ ID NO: 4799020 - DNA, 25 bp, Homo sapien
tgagatggttgaaggccttttgtag

SEQ ID NO: 4799021 - DNA, 25 bp, Homo sapien
gatggttgaaggccttttgtagatt

SEQ ID NO: 4799022 - DNA, 25 bp, Homo sapien
gttgaaggtcaagtgctgcatatcc

SEQ ID NO: 4799023 - DNA, 25 bp, Homo sapien
ctttctatgttgaaggtcaagtgct

SEQ ID NO: 4799024 - DNA, 25 bp, Homo sapien
tatcattatctgtgttttattacag

SEQ ID NO: 4799025 - DNA, 25 bp, Homo sapien
ggtcaagtgctgcatatcctgtatc

SEQ ID NO: 4799026 - DNA, 25 bp, Homo sapien
tctcctttgacccatcactctcagg

SEQ ID NO: 4799027 - DNA, 25 bp, Homo sapien
tagccagtgggctgaagattttcag

SEQ ID NO: 4799028 - DNA, 25 bp, Homo sapien
tttactatagccagtgggctgaaga

SEQ ID NO: 4799029 - DNA, 25 bp, Homo sapien
tcttcttatctcctttgacccatca

SEQ ID NO: 4799030 - DNA, 25 bp, Homo sapien
tgaaaagttaattcccactgacctc

SEQ ID NO: 4799031 - DNA, 25 bp, Homo sapien
gaaaagttaattcccactgacctca

SEQ ID NO: 4799032 - DNA, 25 bp, Homo sapien
tgtgctacctttagcaaaaggcctg

SEQ ID NO: 4799033 - DNA, 25 bp, Homo sapien
gcctggcttagcttggcgacgatta

SEQ ID NO: 4799034 - DNA, 25 bp, Homo sapien
aaaggcctggcttagcttggcgacg

SEQ ID NO: 4799035 - DNA, 25 bp, Homo sapien
gctacctttagcaaaaggcctggct

SEQ ID NO: 4799036 - DNA, 25 bp, Homo sapien
ctttatgaaccccagagaagaaaat

SEQ ID NO: 4799037 - DNA, 25 bp, Homo sapien
accccagagaagaaaattatactca

SEQ ID NO: 4799038 - DNA, 25 bp, Homo sapien
tgaaccccagagaagaaaattatac

SEQ ID NO: 4799039 - DNA, 25 bp, Homo sapien
tatgaaccccagagaagaaaattat

SEQ ID NO: 4799040 - DNA, 25 bp, Homo sapien
taaaagatgttagacctggtctcgc

SEQ ID NO: 4799041 - DNA, 25 bp, Homo sapien
gctttgccgagataataaaagatgt

SEQ ID NO: 4799042 - DNA, 25 bp, Homo sapien
cactcagtgcgtgcagctttgccga

SEQ ID NO: 4799043 - DNA, 25 bp, Homo sapien
ggatctttttattatggccccacca

SEQ ID NO: 4799044 - DNA, 25 bp, Homo sapien
atggaatcaatgtgaagtcagccat

SEQ ID NO: 4799045 - DNA, 25 bp, Homo sapien
caaccgttggagtagacactgacga

SEQ ID NO: 4799046 - DNA, 25 bp, Homo sapien
ccacatcagataaggcaagttcagt

SEQ ID NO: 4799047 - DNA, 25 bp, Homo sapien
gagcctggaatagtcccaaccgttg

SEQ ID NO: 4799048 - DNA, 25 bp, Homo sapien
tgacgaccagaattcccatttggaa

SEQ ID NO: 4799049 - DNA, 25 bp, Homo sapien
tgatttcgggaaatgatatattctt

SEQ ID NO: 4799050 - DNA, 25 bp, Homo sapien
cattttgcccctggactgcatatca

SEQ ID NO: 4799051 - DNA, 25 bp, Homo sapien
tgcaggttctcggttttcactgaga

SEQ ID NO: 4799052 - DNA, 25 bp, Homo sapien
catatcattgcgtgtagtggcctgc

SEQ ID NO: 4799053 - DNA, 25 bp, Homo sapien
ccaggagcccaaatttaatttcaca

SEQ ID NO: 4799054 - DNA, 25 bp, Homo sapien
acactgaacaatctgagcagctgcc

SEQ ID NO: 4799055 - DNA, 25 bp, Homo sapien
cccaaatttaatttcacactgaaca

SEQ ID NO: 4799056 - DNA, 25 bp, Homo sapien
cactgaacaatctgagcagctgcca

SEQ ID NO: 4799057 - DNA, 25 bp, Homo sapien
agccacattgctgggatagcggctg

SEQ ID NO: 4799058 - DNA, 25 bp, Homo sapien
acagccacattgctgggatagcggc

SEQ ID NO: 4799059 - DNA, 25 bp, Homo sapien
cacagccacattgctgggatagcgg

SEQ ID NO: 4799060 - DNA, 25 bp, Homo sapien
gccacagccacattgctgggatagc

SEQ ID NO: 4799061 - DNA, 25 bp, Homo sapien
gagctttacccttgactgtgcccat

SEQ ID NO: 4799062 - DNA, 25 bp, Homo sapien
tgatcgagctttacccttgactgtg

SEQ ID NO: 4799063 - DNA, 25 bp, Homo sapien
taattgatcgagctttacccttgac

SEQ ID NO: 4799064 - DNA, 25 bp, Homo sapien
tcttagtaattgatcgagctttacc

SEQ ID NO: 4799065 - DNA, 25 bp, Homo sapien
tcgatgtggctcaatctgctgggaa

SEQ ID NO: 4799066 - DNA, 25 bp, Homo sapien
tcttcaatggcctgtccaaagctgt

SEQ ID NO: 4799067 - DNA, 25 bp, Homo sapien
caaagctgtagttgtaaagcattca

SEQ ID NO: 4799068 - DNA, 25 bp, Homo sapien
tatttgtgggaccaggagacaagtc

SEQ ID NO: 4799069 - DNA, 25 bp, Homo sapien
tcagatttgcaatcggtgtttatgt

SEQ ID NO: 4799070 - DNA, 25 bp, Homo sapien
aatgtacgttggaagctggagtttg

SEQ ID NO: 4799071 - DNA, 25 bp, Homo sapien
ttgaaatgtacgttggaagctggag

SEQ ID NO: 4799072 - DNA, 25 bp, Homo sapien
ttgcaatcggtgtttatgtttcata

SEQ ID NO: 4799073 - DNA, 25 bp, Homo sapien
tgatcccgggactccattcagcaga

SEQ ID NO: 4799074 - DNA, 25 bp, Homo sapien
gggaagacacccaattactccagtg

SEQ ID NO: 4799075 - DNA, 25 bp, Homo sapien
gatgggaaccgtccttggtcatcac

SEQ ID NO: 4799076 - DNA, 25 bp, Homo sapien
cgggactccattcagcagactgctg

SEQ ID NO: 4799077 - DNA, 25 bp, Homo sapien
gaagtgagactcagaatgaagcaac

SEQ ID NO: 4799078 - DNA, 25 bp, Homo sapien
gataaataaaacatagttctggctg

SEQ ID NO: 4799079 - DNA, 25 bp, Homo sapien
aaatcatttcaactcaagggcttgc

SEQ ID NO: 4799080 - DNA, 25 bp, Homo sapien
ttaagttagaatgttgaagcacggt

SEQ ID NO: 4799081 - DNA, 25 bp, Homo sapien
ttattcctgtgctatattacagagg

SEQ ID NO: 4799082 - DNA, 25 bp, Homo sapien
cacagaccagatgcattcattattc

SEQ ID NO: 4799083 - DNA, 25 bp, Homo sapien
tgctatattacagaggtctccattc

SEQ ID NO: 4799084 - DNA, 25 bp, Homo sapien
taaaccaggttgtatcagattcccg

SEQ ID NO: 4799085 - DNA, 25 bp, Homo sapien
tactgctggcatgctaaagacagga

SEQ ID NO: 4799086 - DNA, 25 bp, Homo sapien
tgtctatgcagctcggttcctgcct

SEQ ID NO: 4799087 - DNA, 25 bp, Homo sapien
cagggtcttgattatggtttcctca

SEQ ID NO: 4799088 - DNA, 25 bp, Homo sapien
gccaagtggcaccttaaacgctcca

SEQ ID NO: 4799089 - DNA, 25 bp, Homo sapien
taactaacacctgtgagtccagaga

SEQ ID NO: 4799090 - DNA, 25 bp, Homo sapien
tctctctagagttacaggctgggac

SEQ ID NO: 4799091 - DNA, 25 bp, Homo sapien
gaagctgggccgatggccagttctc

SEQ ID NO: 4799092 - DNA, 25 bp, Homo sapien
agagatgcccaactatgaagctggg

SEQ ID NO: 4799093 - DNA, 25 bp, Homo sapien
cctagtctctaattgcataattgaa

SEQ ID NO: 4799094 - DNA, 25 bp, Homo sapien
tttaacatctctttcggcatcctag

SEQ ID NO: 4799095 - DNA, 25 bp, Homo sapien
tgcataattgaaagatttatcttca

SEQ ID NO: 4799096 - DNA, 25 bp, Homo sapien
tctctttcggcatcctagtctctaa

SEQ ID NO: 4799097 - DNA, 25 bp, Homo sapien
ggttttgtgcaaactgtagagtatt

SEQ ID NO: 4799098 - DNA, 25 bp, Homo sapien
tagttctctacttgcagaggtagga

SEQ ID NO: 4799099 - DNA, 25 bp, Homo sapien
cgtccttaagaccatagttctctac

SEQ ID NO: 4799100 - DNA, 25 bp, Homo sapien
caaactgtagagtatttcacgtgct

SEQ ID NO: 4799101 - DNA, 25 bp, Homo sapien
tgccttatctgagtcaacccacgtc

SEQ ID NO: 4799102 - DNA, 25 bp, Homo sapien
gtcagagtctaatgtctgtgtcaca

SEQ ID NO: 4799103 - DNA, 25 bp, Homo sapien
tacttcaatgctcaggtcagagtct

SEQ ID NO: 4799104 - DNA, 25 bp, Homo sapien
tgagtcaacccacgtctcctttggt

SEQ ID NO: 4799105 - DNA, 25 bp, Homo sapien
tggttacttggagtgcctgtgttcc

SEQ ID NO: 4799106 - DNA, 25 bp, Homo sapien
ggagtgcctgtgttccacttgggtt

SEQ ID NO: 4799107 - DNA, 25 bp, Homo sapien
ctctgttggttacttggagtgcctg

SEQ ID NO: 4799108 - DNA, 25 bp, Homo sapien
gcatctctgttggttacttggagtg

SEQ ID NO: 4799109 - DNA, 25 bp, Homo sapien
tttgagagccttggatgaatgcagt

SEQ ID NO: 4799110 - DNA, 25 bp, Homo sapien
taatttgcctgcactcagcgtcttc

SEQ ID NO: 4799111 - DNA, 25 bp, Homo sapien
caggaagtagtggaaataatttgcc

SEQ ID NO: 4799112 - DNA, 25 bp, Homo sapien
gttttgagagccttggatgaatgca

SEQ ID NO: 4799113 - DNA, 25 bp, Homo sapien
tacctgaaatgtccacgagcccaaa

SEQ ID NO: 4799114 - DNA, 25 bp, Homo sapien
tgaaatgtccacgagcccaaatctc

SEQ ID NO: 4799115 - DNA, 25 bp, Homo sapien
ctttatgatgcagctctagagctcc

SEQ ID NO: 4799116 - DNA, 25 bp, Homo sapien
ttatgatgcagctctagagctcctt

SEQ ID NO: 4799117 - DNA, 25 bp, Homo sapien
tatggcacaaatagagatgtatgtt

SEQ ID NO: 4799118 - DNA, 25 bp, Homo sapien
gcagattctatggcacaaatagaga

SEQ ID NO: 4799119 - DNA, 25 bp, Homo sapien
gattctatggcacaaatagagatgt

SEQ ID NO: 4799120 - DNA, 25 bp, Homo sapien
tctatggcacaaatagagatgtatg

SEQ ID NO: 4799121 - DNA, 25 bp, Homo sapien
tagttgcattgtttgtttcacgagg

SEQ ID NO: 4799122 - DNA, 25 bp, Homo sapien
gatctgtctgagctactgtagttgc

SEQ ID NO: 4799123 - DNA, 25 bp, Homo sapien
caacagcaacaatcctgtgatctgt

SEQ ID NO: 4799124 - DNA, 25 bp, Homo sapien
tgtttgtttcacgaggcacctggtt

SEQ ID NO: 4799125 - DNA, 25 bp, Homo sapien
ctaggatgtaatcgccatgatgtag

SEQ ID NO: 4799126 - DNA, 25 bp, Homo sapien
gatgtaatcgccatgatgtagagga

SEQ ID NO: 4799127 - DNA, 25 bp, Homo sapien
gccagtgcaccgacaaagagtggag

SEQ ID NO: 4799128 - DNA, 25 bp, Homo sapien
cagaaacgcgggctacagcacatag

SEQ ID NO: 4799129 - DNA, 25 bp, Homo sapien
gccttgagcactggggcctccataa

SEQ ID NO: 4799130 - DNA, 25 bp, Homo sapien
agacttggctagagccagaccactc

SEQ ID NO: 4799131 - DNA, 25 bp, Homo sapien
gacttggctagagccagaccactct

SEQ ID NO: 4799132 - DNA, 25 bp, Homo sapien
tctggaagccttgagcactggggcc

SEQ ID NO: 4799133 - DNA, 25 bp, Homo sapien
tcagatacccgagtaggaggaggac

SEQ ID NO: 4799134 - DNA, 25 bp, Homo sapien
gaggacgcagcatgacaggtggtgt

SEQ ID NO: 4799135 - DNA, 25 bp, Homo sapien
tcacgtgtcgtggaaactgtcagat

SEQ ID NO: 4799136 - DNA, 25 bp, Homo sapien
ggaaactgtcagatacccgagtagg

SEQ ID NO: 4799137 - DNA, 25 bp, Homo sapien
ccttcaagccacataagccgtctgg

SEQ ID NO: 4799138 - DNA, 25 bp, Homo sapien
ggtgaggatactgatggctccattg

SEQ ID NO: 4799139 - DNA, 25 bp, Homo sapien
acataagccgtctggtgaggatact

SEQ ID NO: 4799140 - DNA, 25 bp, Homo sapien
gtagccagcaccattggcaccctca

SEQ ID NO: 4799141 - DNA, 25 bp, Homo sapien
tctcaactctaaaggttcttcaccc

SEQ ID NO: 4799142 - DNA, 25 bp, Homo sapien
gtggtctcaactctaaaggttcttc

SEQ ID NO: 4799143 - DNA, 25 bp, Homo sapien
ggtctcaactctaaaggttcttcac

SEQ ID NO: 4799144 - DNA, 25 bp, Homo sapien
tgtggtctcaactctaaaggttctt

SEQ ID NO: 4799145 - DNA, 25 bp, Homo sapien
aaataaggcgtatttgtcaactgct

SEQ ID NO: 4799146 - DNA, 25 bp, Homo sapien
tgaagaacagaggttgaatgacaag

SEQ ID NO: 4799147 - DNA, 25 bp, Homo sapien
gaaaataaggcgtatttgtcaactg

SEQ ID NO: 4799148 - DNA, 25 bp, Homo sapien
aagaacagaggttgaatgacaagtg

SEQ ID NO: 4799149 - DNA, 25 bp, Homo sapien
cctggagatcccttcaaatccataa

SEQ ID NO: 4799150 - DNA, 25 bp, Homo sapien
gagctgctgggcaggacgaatcctg

SEQ ID NO: 4799151 - DNA, 25 bp, Homo sapien
gcaggacgaatcctggagatccctt

SEQ ID NO: 4799152 - DNA, 25 bp, Homo sapien
ctggagatcccttcaaatccataac

SEQ ID NO: 4799153 - DNA, 25 bp, Homo sapien
ctagagcagttagaaaccagtggga

SEQ ID NO: 4799154 - DNA, 25 bp, Homo sapien
cagttagaaaccagtgggaattaga

SEQ ID NO: 4799155 - DNA, 25 bp, Homo sapien
ttagaaaccagtgggaattagagac

SEQ ID NO: 4799156 - DNA, 25 bp, Homo sapien
aaccagtgggaattagagacagagg

SEQ ID NO: 4799157 - DNA, 25 bp, Homo sapien
cacagtaactgtcccagtgtaggaa

SEQ ID NO: 4799158 - DNA, 25 bp, Homo sapien
cagatgtggacaagtcatagggtgt

SEQ ID NO: 4799159 - DNA, 25 bp, Homo sapien
tcacttggcgtttttgggttccaga

SEQ ID NO: 4799160 - DNA, 25 bp, Homo sapien
gggacattgttgcacagtaactgtc

SEQ ID NO: 4799161 - DNA, 25 bp, Homo sapien
tgaaaaacatggtctacctataccc

SEQ ID NO: 4799162 - DNA, 25 bp, Homo sapien
gaaaaacatggtctacctataccca

SEQ ID NO: 4799163 - DNA, 25 bp, Homo sapien
aaaaacatggtctacctatacccat

SEQ ID NO: 4799164 - DNA, 25 bp, Homo sapien
ttgaaaaacatggtctacctatacc

SEQ ID NO: 4799165 - DNA, 25 bp, Homo sapien
cccatcagcggctcaagtctttgaa

SEQ ID NO: 4799166 - DNA, 25 bp, Homo sapien
ttaggacgattatacacttggaggc

SEQ ID NO: 4799167 - DNA, 25 bp, Homo sapien
ttgacaagcgccatggctcattagg

SEQ ID NO: 4799168 - DNA, 25 bp, Homo sapien
gaaatggactggagccatccttagc

SEQ ID NO: 4799169 - DNA, 25 bp, Homo sapien
gctccagccgccaatgcggctaccg

SEQ ID NO: 4799170 - DNA, 25 bp, Homo sapien
cagctgcgggaagccgtccaaaggc

SEQ ID NO: 4799171 - DNA, 25 bp, Homo sapien
gctgtggccaacacgcgtctccagg

SEQ ID NO: 4799172 - DNA, 25 bp, Homo sapien
ccaatgcggctaccgaccagcagag

SEQ ID NO: 4799173 - DNA, 25 bp, Homo sapien
gacaggggtttatcatgaggccgaa

SEQ ID NO: 4799174 - DNA, 25 bp, Homo sapien
gagacacagggcgtcagagtgacag

SEQ ID NO: 4799175 - DNA, 25 bp, Homo sapien
tctcacatactcagttatcatgtca

SEQ ID NO: 4799176 - DNA, 25 bp, Homo sapien
tatcatgtcaacagtgagacacagg

SEQ ID NO: 4799177 - DNA, 25 bp, Homo sapien
gtcccctgtgtgttccacaacttgc

SEQ ID NO: 4799178 - DNA, 25 bp, Homo sapien
tcccctgtgtgttccacaacttgct

SEQ ID NO: 4799179 - DNA, 25 bp, Homo sapien
tgtgatggatctcaagtcccctgtg

SEQ ID NO: 4799180 - DNA, 25 bp, Homo sapien
gatggatctcaagtcccctgtgtgt

SEQ ID NO: 4799181 - DNA, 25 bp, Homo sapien
gcatccaggtacactatgtggtcag

SEQ ID NO: 4799182 - DNA, 25 bp, Homo sapien
tggtcagggacaactatcacaggga

SEQ ID NO: 4799183 - DNA, 25 bp, Homo sapien
tattttagacagtagggagcctacc

SEQ ID NO: 4799184 - DNA, 25 bp, Homo sapien
ggtaaagcatctttggtgcccaact

SEQ ID NO: 4799185 - DNA, 25 bp, Homo sapien
tgctcagcctattctcaaatgacgg

SEQ ID NO: 4799186 - DNA, 25 bp, Homo sapien
ctgcttaaattgctgtgccagaaac

SEQ ID NO: 4799187 - DNA, 25 bp, Homo sapien
caattatattgactgcttaaattgc

SEQ ID NO: 4799188 - DNA, 25 bp, Homo sapien
ggctgagacaccaggtctttcctaa

SEQ ID NO: 4799189 - DNA, 25 bp, Homo sapien
catggcagttcacactatgaaggag

SEQ ID NO: 4799190 - DNA, 25 bp, Homo sapien
ttatgcccaacagaacatatctctg

SEQ ID NO: 4799191 - DNA, 25 bp, Homo sapien
cactatgaaggaggtggctttgctc

SEQ ID NO: 4799192 - DNA, 25 bp, Homo sapien
gaggagatcatgagcggaaacgcca

SEQ ID NO: 4799193 - DNA, 25 bp, Homo sapien
ctctgggactggatggctatctgca

SEQ ID NO: 4799194 - DNA, 25 bp, Homo sapien
ctatctgcagaggcgagaggcaggg

SEQ ID NO: 4799195 - DNA, 25 bp, Homo sapien
ctgcataaatagccgcttcctctgg

SEQ ID NO: 4799196 - DNA, 25 bp, Homo sapien
ctgggactggatggctatctgcaga

SEQ ID NO: 4799197 - DNA, 25 bp, Homo sapien
aacatcagaggttgaggcaataagc

SEQ ID NO: 4799198 - DNA, 25 bp, Homo sapien
atggaaacatcagaggttgaggcaa

SEQ ID NO: 4799199 - DNA, 25 bp, Homo sapien
aggttgaggcaataagcgtcttcag

SEQ ID NO: 4799200 - DNA, 25 bp, Homo sapien
cagaggttgaggcaataagcgtctt

SEQ ID NO: 4799201 - DNA, 25 bp, Homo sapien
cacagggtgttgattaggtttgatt

SEQ ID NO: 4799202 - DNA, 25 bp, Homo sapien
actccaggccaatcctttcaaggga

SEQ ID NO: 4799203 - DNA, 25 bp, Homo sapien
ggttgagcacctcttactcagatgc

SEQ ID NO: 4799204 - DNA, 25 bp, Homo sapien
tgtacaatctcaaggactccaggcc

SEQ ID NO: 4799205 - DNA, 25 bp, Homo sapien
tgtttggcatacagacacctatgtg

SEQ ID NO: 4799206 - DNA, 25 bp, Homo sapien
tattgttccagatgtaccaattgga

SEQ ID NO: 4799207 - DNA, 25 bp, Homo sapien
aagaagagagcacgcaaaacatggt

SEQ ID NO: 4799208 - DNA, 25 bp, Homo sapien
gcacgcaaaacatggtattcaggaa

SEQ ID NO: 4799209 - DNA, 25 bp, Homo sapien
aaccctgagtttcccatggtagagg

SEQ ID NO: 4799210 - DNA, 25 bp, Homo sapien
caaaaccctgagtttcccatggtag

SEQ ID NO: 4799211 - DNA, 25 bp, Homo sapien
acaccaaaaccctgagtttcccatg

SEQ ID NO: 4799212 - DNA, 25 bp, Homo sapien
cctgagtttcccatggtagaggcac

SEQ ID NO: 4799213 - DNA, 25 bp, Homo sapien
agatcgattggtaattggtatccca

SEQ ID NO: 4799214 - DNA, 25 bp, Homo sapien
tggctagttccaccgtaagaaaaga

SEQ ID NO: 4799215 - DNA, 25 bp, Homo sapien
gtaagacaggctcgttcaccaggtg

SEQ ID NO: 4799216 - DNA, 25 bp, Homo sapien
tcaccaggtgaagttaaagatcgat

SEQ ID NO: 4799217 - DNA, 25 bp, Homo sapien
cttggccaagtctttcacttgtgcc

SEQ ID NO: 4799218 - DNA, 25 bp, Homo sapien
catattccttggccaagtctttcac

SEQ ID NO: 4799219 - DNA, 25 bp, Homo sapien
ttggccaagtctttcacttgtgcca

SEQ ID NO: 4799220 - DNA, 25 bp, Homo sapien
atcggcttcgaccataggctgccag

SEQ ID NO: 4799221 - DNA, 25 bp, Homo sapien
ctatcaggtccaatcggcttcgacc

SEQ ID NO: 4799222 - DNA, 25 bp, Homo sapien
ggtccaatcggcttcgaccataggc

SEQ ID NO: 4799223 - DNA, 25 bp, Homo sapien
tccaatcggcttcgaccataggctg

SEQ ID NO: 4799224 - DNA, 25 bp, Homo sapien
cacaatccctagtgaatcagccaaa

SEQ ID NO: 4799225 - DNA, 25 bp, Homo sapien
catggaccagtctgaggggagctta

SEQ ID NO: 4799226 - DNA, 25 bp, Homo sapien
gaacaatatgaatggtgatgctaca

SEQ ID NO: 4799227 - DNA, 25 bp, Homo sapien
agcttaatcaggagtgccaaggcca

SEQ ID NO: 4799228 - DNA, 25 bp, Homo sapien
acagtagagcattaagaagggctgc

SEQ ID NO: 4799229 - DNA, 25 bp, Homo sapien
ctgtaatgtagccagagacttaaat

SEQ ID NO: 4799230 - DNA, 25 bp, Homo sapien
gccagagacttaaatacgattgagt

SEQ ID NO: 4799231 - DNA, 25 bp, Homo sapien
taagaagggctgcacagacagtaaa

SEQ ID NO: 4799232 - DNA, 25 bp, Homo sapien
ttgattctgaacttgcacagaacat

SEQ ID NO: 4799233 - DNA, 25 bp, Homo sapien
gtattttaccagctgtcacggacac

SEQ ID NO: 4799234 - DNA, 25 bp, Homo sapien
tctgaacttgcacagaacatgaaac

SEQ ID NO: 4799235 - DNA, 25 bp, Homo sapien
taccagctgtcacggacactagcat

SEQ ID NO: 4799236 - DNA, 25 bp, Homo sapien
aagacttgcacatggtagatttgca

SEQ ID NO: 4799237 - DNA, 25 bp, Homo sapien
aaagacttgcacatggtagatttgc

SEQ ID NO: 4799238 - DNA, 25 bp, Homo sapien
aacaagtgaattctgctcgttagca

SEQ ID NO: 4799239 - DNA, 25 bp, Homo sapien
tactgactcaacaagtgaattctgc

SEQ ID NO: 4799240 - DNA, 25 bp, Homo sapien
tctgctcgttagcagctccacaaaa

SEQ ID NO: 4799241 - DNA, 25 bp, Homo sapien
cactattactgactcaacaagtgaa

SEQ ID NO: 4799242 - DNA, 25 bp, Homo sapien
gtctctggagccaaatttcctccca

SEQ ID NO: 4799243 - DNA, 25 bp, Homo sapien
gcagaagaataggagaagaggtctc

SEQ ID NO: 4799244 - DNA, 25 bp, Homo sapien
ctcaggtcagctgtagcagaagaat

SEQ ID NO: 4799245 - DNA, 25 bp, Homo sapien
tcagaaaagggcaacttgaatgctc

SEQ ID NO: 4799246 - DNA, 25 bp, Homo sapien
agactctaaccgtaccactgtccaa

SEQ ID NO: 4799247 - DNA, 25 bp, Homo sapien
cgtaccactgtccaaccttcctctc

SEQ ID NO: 4799248 - DNA, 25 bp, Homo sapien
tctctgcacagactctaaccgtacc

SEQ ID NO: 4799249 - DNA, 25 bp, Homo sapien
gcacagactctaaccgtaccactgt

SEQ ID NO: 4799250 - DNA, 25 bp, Homo sapien
tccccacgcccaaggactgtcagca

SEQ ID NO: 4799251 - DNA, 25 bp, Homo sapien
cctccccacgcccaaggactgtcag

SEQ ID NO: 4799252 - DNA, 25 bp, Homo sapien
cacctccccacgcccaaggactgtc

SEQ ID NO: 4799253 - DNA, 25 bp, Homo sapien
cccacgcccaaggactgtcagcatc

SEQ ID NO: 4799254 - DNA, 25 bp, Homo sapien
gatgctgggtgtttctcccctgccc

SEQ ID NO: 4799255 - DNA, 25 bp, Homo sapien
gaaaacctctatgccaatcgcagga

SEQ ID NO: 4799256 - DNA, 25 bp, Homo sapien
gagttggccctaatgaacaggccca

SEQ ID NO: 4799257 - DNA, 25 bp, Homo sapien
ggctaatatctggaggaaaacctct

SEQ ID NO: 4799258 - DNA, 25 bp, Homo sapien
ggtcccccgtggtatgcaggaagac

SEQ ID NO: 4799259 - DNA, 25 bp, Homo sapien
tgaaaacctgctccatagctccatt

SEQ ID NO: 4799260 - DNA, 25 bp, Homo sapien
tcaccaatgagcaatctgggtcccc

SEQ ID NO: 4799261 - DNA, 25 bp, Homo sapien
tctgtggggacacactgaaaacctg

SEQ ID NO: 4799262 - DNA, 25 bp, Homo sapien
ggtgtagcttaagctctagaaggta

SEQ ID NO: 4799263 - DNA, 25 bp, Homo sapien
ggtaaatatgactgggccatttttc

SEQ ID NO: 4799264 - DNA, 25 bp, Homo sapien
gagaatggatggtgtagcttaagct

SEQ ID NO: 4799265 - DNA, 25 bp, Homo sapien
agggatggcttcattgctgctcagg

SEQ ID NO: 4799266 - DNA, 25 bp, Homo sapien
cagtgtggagccaattactctttcc

SEQ ID NO: 4799267 - DNA, 25 bp, Homo sapien
tgaaattgagtctaatgccccgccc

SEQ ID NO: 4799268 - DNA, 25 bp, Homo sapien
gccctacggatcctgtacctaagag

SEQ ID NO: 4799269 - DNA, 25 bp, Homo sapien
tgagcaagcagatacaggtagacca

SEQ ID NO: 4799270 - DNA, 25 bp, Homo sapien
catccaggcaggttgtgtaaacaag

SEQ ID NO: 4799271 - DNA, 25 bp, Homo sapien
cactgcctccatgcgctgatttgca

SEQ ID NO: 4799272 - DNA, 25 bp, Homo sapien
gcagtcatgtgtggctgtgttaaca

SEQ ID NO: 4799273 - DNA, 25 bp, Homo sapien
taacactacatgactaaaaccaatc

SEQ ID NO: 4799274 - DNA, 25 bp, Homo sapien
ttggagggtatgtgctgtaattggc

SEQ ID NO: 4799275 - DNA, 25 bp, Homo sapien
tcctgggtgtcttgcaagtttataa

SEQ ID NO: 4799276 - DNA, 25 bp, Homo sapien
gggtgtcttgcaagtttataatcat

SEQ ID NO: 4799277 - DNA, 25 bp, Homo sapien
ctccttttatcctgggtgtcttgca

SEQ ID NO: 4799278 - DNA, 25 bp, Homo sapien
tcaaattcctcctatcttcagaata

SEQ ID NO: 4799279 - DNA, 25 bp, Homo sapien
ttcctcctatcttcagaatatagat

SEQ ID NO: 4799280 - DNA, 25 bp, Homo sapien
caaattcctcctatcttcagaatat

SEQ ID NO: 4799281 - DNA, 25 bp, Homo sapien
aattcctcctatcttcagaatatag

SEQ ID NO: 4799282 - DNA, 25 bp, Homo sapien
ggctctggcctgtagtaggtgttca

SEQ ID NO: 4799283 - DNA, 25 bp, Homo sapien
taggtgttcagtaaaaacactcttg

SEQ ID NO: 4799284 - DNA, 25 bp, Homo sapien
ctggctctggcctgtagtaggtgtt

SEQ ID NO: 4799285 - DNA, 25 bp, Homo sapien
tactggctctggcctgtagtaggtg

SEQ ID NO: 4799286 - DNA, 25 bp, Homo sapien
aaccctgctaactcttgattctttg

SEQ ID NO: 4799287 - DNA, 25 bp, Homo sapien
tgtcaaccctgctaactcttgattc

SEQ ID NO: 4799288 - DNA, 25 bp, Homo sapien
cctgctaactcttgattctttgtac

SEQ ID NO: 4799289 - DNA, 25 bp, Homo sapien
gctaactcttgattctttgtacttt

SEQ ID NO: 4799290 - DNA, 25 bp, Homo sapien
tgccttgggagatgatcatgagaac

SEQ ID NO: 4799291 - DNA, 25 bp, Homo sapien
gactgatcctaagccggccacaggg

SEQ ID NO: 4799292 - DNA, 25 bp, Homo sapien
tttctgtgccttgggagatgatcat

SEQ ID NO: 4799293 - DNA, 25 bp, Homo sapien
ccagtgactgatcctaagccggcca

SEQ ID NO: 4799294 - DNA, 25 bp, Homo sapien
ccctttaaaggtgaaatatgctctg

SEQ ID NO: 4799295 - DNA, 25 bp, Homo sapien
gagaaataagcccagtcgagtgttc

SEQ ID NO: 4799296 - DNA, 25 bp, Homo sapien
gagacataaacttcctgacggtgtg

SEQ ID NO: 4799297 - DNA, 25 bp, Homo sapien
tcgagtgttctaaccacaggatggt

SEQ ID NO: 4799298 - DNA, 25 bp, Homo sapien
gaactgttgcaggaaggcatggcct

SEQ ID NO: 4799299 - DNA, 25 bp, Homo sapien
tgaactgttgcaggaaggcatggcc

SEQ ID NO: 4799300 - DNA, 25 bp, Homo sapien
caggcctgagagccaatcctgtttc

SEQ ID NO: 4799301 - DNA, 25 bp, Homo sapien
ccccatcatggacagactctagagc

SEQ ID NO: 4799302 - DNA, 25 bp, Homo sapien
gctggagctgccgacggaacagcca

SEQ ID NO: 4799303 - DNA, 25 bp, Homo sapien
tagagctcgtagatctactgccagg

SEQ ID NO: 4799304 - DNA, 25 bp, Homo sapien
agtctgctcagacaacctttccggc

SEQ ID NO: 4799305 - DNA, 25 bp, Homo sapien
ctgcagtctgctcagacaacctttc

SEQ ID NO: 4799306 - DNA, 25 bp, Homo sapien
gctcagacaacctttccggcctcat

SEQ ID NO: 4799307 - DNA, 25 bp, Homo sapien
gcagtctgctcagacaacctttccg

SEQ ID NO: 4799308 - DNA, 25 bp, Homo sapien
aactcagaagtccagtctcctgcaa

SEQ ID NO: 4799309 - DNA, 25 bp, Homo sapien
ggtggcctatgcaaggtcaactcag

SEQ ID NO: 4799310 - DNA, 25 bp, Homo sapien
gattgagtgccattccaagctcatg

SEQ ID NO: 4799311 - DNA, 25 bp, Homo sapien
tcccaaggaagaaacgtgtagattg

SEQ ID NO: 4799312 - DNA, 25 bp, Homo sapien
caacttggagtaagtcttctgacca

SEQ ID NO: 4799313 - DNA, 25 bp, Homo sapien
tgaatttcccaacttggagtaagtc

SEQ ID NO: 4799314 - DNA, 25 bp, Homo sapien
cccaacttggagtaagtcttctgac

SEQ ID NO: 4799315 - DNA, 25 bp, Homo sapien
ttcccaacttggagtaagtcttctg

SEQ ID NO: 4799316 - DNA, 25 bp, Homo sapien
tttcacaagatttccgagagagcag

SEQ ID NO: 4799317 - DNA, 25 bp, Homo sapien
gatgccggcagacttttcaagccag

SEQ ID NO: 4799318 - DNA, 25 bp, Homo sapien
cagttcacagcgctcattttgtggg

SEQ ID NO: 4799319 - DNA, 25 bp, Homo sapien
taatcttgctcattatgatgccggc

SEQ ID NO: 4799320 - DNA, 25 bp, Homo sapien
gcatggcttcatcgcttgggcttaa

SEQ ID NO: 4799321 - DNA, 25 bp, Homo sapien
tgggcttaatgaggtaaaccagacc

SEQ ID NO: 4799322 - DNA, 25 bp, Homo sapien
taaagtccaccctgcaaattgtggg

SEQ ID NO: 4799323 - DNA, 25 bp, Homo sapien
gacctccggtaatatcgcctgtata

SEQ ID NO: 4799324 - DNA, 25 bp, Homo sapien
agctttcatagcattgtcccagtaa

SEQ ID NO: 4799325 - DNA, 25 bp, Homo sapien
tggctgcgccctctgttcagctggg

SEQ ID NO: 4799326 - DNA, 25 bp, Homo sapien
tacagggcttgatagtggttccttg

SEQ ID NO: 4799327 - DNA, 25 bp, Homo sapien
ccagtaacccagtggtacagggctt

SEQ ID NO: 4799328 - DNA, 25 bp, Homo sapien
aaatgtttgcaagagcgtaggagcc

SEQ ID NO: 4799329 - DNA, 25 bp, Homo sapien
cacagatgtgttagattcatcaagc

SEQ ID NO: 4799330 - DNA, 25 bp, Homo sapien
aacatctggatttctggaaactgtg

SEQ ID NO: 4799331 - DNA, 25 bp, Homo sapien
tgagatgagctagaacattaaaacc

SEQ ID NO: 4799332 - DNA, 25 bp, Homo sapien
tatgcaatacgctctaagatccatt

SEQ ID NO: 4799333 - DNA, 25 bp, Homo sapien
aacacactctcccaatgcttctact

SEQ ID NO: 4799334 - DNA, 25 bp, Homo sapien
tttgtcgtagccctggtgcttagtg

SEQ ID NO: 4799335 - DNA, 25 bp, Homo sapien
tacgctctaagatccattgaacaca

SEQ ID NO: 4799336 - DNA, 25 bp, Homo sapien
tgaacaagtcctcgattctgccact

SEQ ID NO: 4799337 - DNA, 25 bp, Homo sapien
tgggtccagagcaggatgcaattcc

SEQ ID NO: 4799338 - DNA, 25 bp, Homo sapien
tctgcattcatgcaccctggatctc

SEQ ID NO: 4799339 - DNA, 25 bp, Homo sapien
cttcacacttagtccgagtggtctg

SEQ ID NO: 4799340 - DNA, 25 bp, Homo sapien
gcaattacctatcctcttttcatgg

SEQ ID NO: 4799341 - DNA, 25 bp, Homo sapien
cccttacggaataggaaatctctat

SEQ ID NO: 4799342 - DNA, 25 bp, Homo sapien
gacaagactgtcgtgcattcccctt

SEQ ID NO: 4799343 - DNA, 25 bp, Homo sapien
caatcatgtctattccccttacgga

SEQ ID NO: 4799344 - DNA, 25 bp, Homo sapien
ttctatggatgctgtactgaggcgg

SEQ ID NO: 4799345 - DNA, 25 bp, Homo sapien
aacctgttctgtcttagagggccca

SEQ ID NO: 4799346 - DNA, 25 bp, Homo sapien
ctcagccttagaggaaacctgttct

SEQ ID NO: 4799347 - DNA, 25 bp, Homo sapien
cctggataattgttctatggatgct

SEQ ID NO: 4799348 - DNA, 25 bp, Homo sapien
tttgtccgctattggcaagcgatgg

SEQ ID NO: 4799349 - DNA, 25 bp, Homo sapien
caagcgatggcagttggcttagtag

SEQ ID NO: 4799350 - DNA, 25 bp, Homo sapien
aagatgtcgcttcctgtttgtccgc

SEQ ID NO: 4799351 - DNA, 25 bp, Homo sapien
tgaaccccagtgttgtgcagacggt

SEQ ID NO: 4799352 - DNA, 25 bp, Homo sapien
gaggaaaggtcttcctagagccacc

SEQ ID NO: 4799353 - DNA, 25 bp, Homo sapien
cagagaggatgttatcacaggagac

SEQ ID NO: 4799354 - DNA, 25 bp, Homo sapien
gccattcctgctaggtactgtgctt

SEQ ID NO: 4799355 - DNA, 25 bp, Homo sapien
tgcactaaggtgtttgtcatcagcc

SEQ ID NO: 4799356 - DNA, 25 bp, Homo sapien
tcttcctctagggccccagaaacac

SEQ ID NO: 4799357 - DNA, 25 bp, Homo sapien
agccagaggctctatctcctcaggg

SEQ ID NO: 4799358 - DNA, 25 bp, Homo sapien
gcagctcgccacctgtgtggcagac

SEQ ID NO: 4799359 - DNA, 25 bp, Homo sapien
agcctgaatgtgtactctggggtcc

SEQ ID NO: 4799360 - DNA, 25 bp, Homo sapien
gagttcaaagcactacttgggccac

SEQ ID NO: 4799361 - DNA, 25 bp, Homo sapien
caatcaggagctttagttaggcctc

SEQ ID NO: 4799362 - DNA, 25 bp, Homo sapien
gaaagcctgttcttcggagagcaga

SEQ ID NO: 4799363 - DNA, 25 bp, Homo sapien
tataagctgaggcaaggtacctggc

SEQ ID NO: 4799364 - DNA, 25 bp, Homo sapien
ggactcaagggaactagacagcatt

SEQ ID NO: 4799365 - DNA, 25 bp, Homo sapien
tctgtgagaggaaggccatatgttc

SEQ ID NO: 4799366 - DNA, 25 bp, Homo sapien
tgcagttgaccccagattctacaga

SEQ ID NO: 4799367 - DNA, 25 bp, Homo sapien
aaaagtatcctgtagcatcagaggg

SEQ ID NO: 4799368 - DNA, 25 bp, Homo sapien
ctcagatattctgacccagacctct

SEQ ID NO: 4799369 - DNA, 25 bp, Homo sapien
gacatgtgggccctcagatattctg

SEQ ID NO: 4799370 - DNA, 25 bp, Homo sapien
ttggtatgacctcctgagaggacag

SEQ ID NO: 4799371 - DNA, 25 bp, Homo sapien
tcatgcacatcgagaagttggtatg

SEQ ID NO: 4799372 - DNA, 25 bp, Homo sapien
ggcaggaaggctctcagcagcttcc

SEQ ID NO: 4799373 - DNA, 25 bp, Homo sapien
ggaaggctctcagcagcttccgctg

SEQ ID NO: 4799374 - DNA, 25 bp, Homo sapien
ggctctcagcagcttccgctgatca

SEQ ID NO: 4799375 - DNA, 25 bp, Homo sapien
aaggctctcagcagcttccgctgat

SEQ ID NO: 4799376 - DNA, 25 bp, Homo sapien
agatttcccagtaaattcatgctca

SEQ ID NO: 4799377 - DNA, 25 bp, Homo sapien
tcatgctcacacagggcatacacct

SEQ ID NO: 4799378 - DNA, 25 bp, Homo sapien
acagggcatacacctgagtcagtgg

SEQ ID NO: 4799379 - DNA, 25 bp, Homo sapien
ccaggtggctatggagaactgcagg

SEQ ID NO: 4799380 - DNA, 25 bp, Homo sapien
gccaaggacagctgcgttcatatag

SEQ ID NO: 4799381 - DNA, 25 bp, Homo sapien
ctaataacggtgtaggttgccaagg

SEQ ID NO: 4799382 - DNA, 25 bp, Homo sapien
gctaaatgatgtagttctgatggca

SEQ ID NO: 4799383 - DNA, 25 bp, Homo sapien
tgcgttcatatagggaatccaagcc

SEQ ID NO: 4799384 - DNA, 25 bp, Homo sapien
acacatcctccactggccctccact

SEQ ID NO: 4799385 - DNA, 25 bp, Homo sapien
tggctccattcttgggtcctggttc

SEQ ID NO: 4799386 - DNA, 25 bp, Homo sapien
gtcctggttctttgatgattcccat

SEQ ID NO: 4799387 - DNA, 25 bp, Homo sapien
cctgcaacctggctccattcttggg

SEQ ID NO: 4799388 - DNA, 25 bp, Homo sapien
tgtgctggtggagtagaagagcaga

SEQ ID NO: 4799389 - DNA, 25 bp, Homo sapien
tgctggtggagtagaagagcagaag

SEQ ID NO: 4799390 - DNA, 25 bp, Homo sapien
gatgtgctggtggagtagaagagca

SEQ ID NO: 4799391 - DNA, 25 bp, Homo sapien
cagaagatgtacagagctgaagaga

SEQ ID NO: 4799392 - DNA, 25 bp, Homo sapien
ccaagctggggaagattctcttggg

SEQ ID NO: 4799393 - DNA, 25 bp, Homo sapien
gggctgaagtcctaatgcctcgtca

SEQ ID NO: 4799394 - DNA, 25 bp, Homo sapien
aagtcctaatgcctcgtcagtgaag

SEQ ID NO: 4799395 - DNA, 25 bp, Homo sapien
atgcctcgtcagtgaagccttggag

SEQ ID NO: 4799396 - DNA, 25 bp, Homo sapien
tctggatgcatttgcagaatctgag

SEQ ID NO: 4799397 - DNA, 25 bp, Homo sapien
gcatttgcagaatctgagatcccag

SEQ ID NO: 4799398 - DNA, 25 bp, Homo sapien
tttgttctggatgcatttgcagaat

SEQ ID NO: 4799399 - DNA, 25 bp, Homo sapien
gatgcatttgcagaatctgagatcc

SEQ ID NO: 4799400 - DNA, 25 bp, Homo sapien
cagatgttgaggagatttcttggcc

SEQ ID NO: 4799401 - DNA, 25 bp, Homo sapien
ggatcagggttattaatttgcagct

SEQ ID NO: 4799402 - DNA, 25 bp, Homo sapien
tcttgactgctactctcagccccag

SEQ ID NO: 4799403 - DNA, 25 bp, Homo sapien
ttggcctctcagaataacaggatca

SEQ ID NO: 4799404 - DNA, 25 bp, Homo sapien
tcctttgaaaggtcctttgacacat

SEQ ID NO: 4799405 - DNA, 25 bp, Homo sapien
ctcctttgaaaggtcctttgacaca

SEQ ID NO: 4799406 - DNA, 25 bp, Homo sapien
ctccttgaggcacctcaccaccact

SEQ ID NO: 4799407 - DNA, 25 bp, Homo sapien
ccttgaggcacctcaccaccactgc

SEQ ID NO: 4799408 - DNA, 25 bp, Homo sapien
agcagcagcatccaactctgctcgg

SEQ ID NO: 4799409 - DNA, 25 bp, Homo sapien
agcagcatccaactctgctcggcag

SEQ ID NO: 4799410 - DNA, 25 bp, Homo sapien
actccacatcacttccaacatttta

SEQ ID NO: 4799411 - DNA, 25 bp, Homo sapien
ggcatttgccctttatcctctacca

SEQ ID NO: 4799412 - DNA, 25 bp, Homo sapien
aaacttagaaatatgactttgatca

SEQ ID NO: 4799413 - DNA, 25 bp, Homo sapien
gatcatgtgccctgtgtaattctgg

SEQ ID NO: 4799414 - DNA, 25 bp, Homo sapien
tgtgcagcaaatgatagcccacaga

SEQ ID NO: 4799415 - DNA, 25 bp, Homo sapien
gccccaagcatgcaccttagtccac

SEQ ID NO: 4799416 - DNA, 25 bp, Homo sapien
gagagccccaagcatgcaccttagt

SEQ ID NO: 4799417 - DNA, 25 bp, Homo sapien
cccaagcatgcaccttagtccacat

SEQ ID NO: 4799418 - DNA, 25 bp, Homo sapien
tctctgtggataacggaccattggc

SEQ ID NO: 4799419 - DNA, 25 bp, Homo sapien
aggtgtagctagttcttcctgaggc

SEQ ID NO: 4799420 - DNA, 25 bp, Homo sapien
tggataacggaccattggcatgggc

SEQ ID NO: 4799421 - DNA, 25 bp, Homo sapien
agaagtctctgtggataacggacca

SEQ ID NO: 4799422 - DNA, 25 bp, Homo sapien
caatagaaaatcactctgggtgctc

SEQ ID NO: 4799423 - DNA, 25 bp, Homo sapien
gaagctccaggataattgttgcagg

SEQ ID NO: 4799424 - DNA, 25 bp, Homo sapien
caagtcatcgagacgacaggcaagc

SEQ ID NO: 4799425 - DNA, 25 bp, Homo sapien
gagatattgcctcacatctgtcagg

SEQ ID NO: 4799426 - DNA, 25 bp, Homo sapien
aaccatcccctggaaaaggccactg

SEQ ID NO: 4799427 - DNA, 25 bp, Homo sapien
gaggagagcccatttatgctcattc

SEQ ID NO: 4799428 - DNA, 25 bp, Homo sapien
catcccctggaaaaggccactgttt

SEQ ID NO: 4799429 - DNA, 25 bp, Homo sapien
tgtttcccgaaggaggagagcccat

SEQ ID NO: 4799430 - DNA, 25 bp, Homo sapien
ttatgtcgggaacagtttgtgcctt

SEQ ID NO: 4799431 - DNA, 25 bp, Homo sapien
ccaggaaagtatatcttctcgggga

SEQ ID NO: 4799432 - DNA, 25 bp, Homo sapien
tcggggatgattttatgtcgggaac

SEQ ID NO: 4799433 - DNA, 25 bp, Homo sapien
attttatgtcgggaacagtttgtgc

SEQ ID NO: 4799434 - DNA, 25 bp, Homo sapien
ggaagcataaactaaattccaagca

SEQ ID NO: 4799435 - DNA, 25 bp, Homo sapien
aaccaaaccacaaagtggaagcata

SEQ ID NO: 4799436 - DNA, 25 bp, Homo sapien
ctcctcgcagcccaagcaaccaaac

SEQ ID NO: 4799437 - DNA, 25 bp, Homo sapien
ccacaaagtggaagcataaactaaa

SEQ ID NO: 4799438 - DNA, 25 bp, Homo sapien
caagtgccaattgagcacattatta

SEQ ID NO: 4799439 - DNA, 25 bp, Homo sapien
aagtgccaattgagcacattattac

SEQ ID NO: 4799440 - DNA, 25 bp, Homo sapien
tcaagtgccaattgagcacattatt

SEQ ID NO: 4799441 - DNA, 25 bp, Homo sapien
ccaaggtcatactcagctctgcatc

SEQ ID NO: 4799442 - DNA, 25 bp, Homo sapien
ggttctcccacaagatcatcagctt

SEQ ID NO: 4799443 - DNA, 25 bp, Homo sapien
ggctgttctggttctcccacaagat

SEQ ID NO: 4799444 - DNA, 25 bp, Homo sapien
gcaaggccaaggtcatactcagctc

SEQ ID NO: 4799445 - DNA, 25 bp, Homo sapien
ctcttccggctcatagtctgagctt

SEQ ID NO: 4799446 - DNA, 25 bp, Homo sapien
gccaaaaccttgctgattgggaaac

SEQ ID NO: 4799447 - DNA, 25 bp, Homo sapien
accttgctgattgggaaactgtcac

SEQ ID NO: 4799448 - DNA, 25 bp, Homo sapien
tccggctcatagtctgagcttccaa

SEQ ID NO: 4799449 - DNA, 25 bp, Homo sapien
tcatgtccagttgatatctgtgctc
